United States Patent Application Publication US 2025/0333808 A1 - sequence listing, part 6

SEQ ID NO: 85041 - DNA, 80 bp, synthetic construct
  source 1..80: mol_type = other DNA
cttacgaaaacaacacttgggtaaatcagacatatataaacatcagcaatgtcaaattcattgctgaacaggcagtaact

SEQ ID NO: 85042 - DNA, 80 bp, synthetic construct
  source 1..80: mol_type = other DNA
aaatccaaacgagaaggtcgttcgaactgaaaagattatgggatcaaacccattcaaaatcagggctactggtttcagat

SEQ ID NO: 85043 - DNA, 80 bp, synthetic construct
  source 1..80: mol_type = other DNA
agaaaggaatacaacagagatagtttacttggctaacaccaccatagagaaagaaacatgccctgagacagtggaataca

SEQ ID NO: 85044 - DNA, 80 bp, synthetic construct
  source 1..80: mol_type = other DNA
atgaacccaaatcaaaagataataacaattggctctgtttctatcatcattgcagcaatatgcttcctcatgcaagtggc

SEQ ID NO: 85045 - DNA, 80 bp, synthetic construct
  source 1..80: mol_type = other DNA
aatcttgataattactgtaacattacatttcaaacaatatgaatgtgtataccctacgaacagccaaataataccatgtg

SEQ ID NO: 85046 - DNA, 80 bp, synthetic construct
  source 1..80: mol_type = other DNA
aaaagtgaatgccagaattgaaccattcacgagggagacaccacgctccctcaaattacctgatggacctccctgttctc

SEQ ID NO: 85047 - DNA, 80 bp, synthetic construct
  source 1..80: mol_type = other DNA
atggagacaaaactgtttgtgttattctgcacatttactgcattaaaagctgataccatctgtgtaggctatcatgctaa

SEQ ID NO: 85048 - DNA, 80 bp, synthetic construct
  source 1..80: mol_type = other DNA
cattcgcattgaacaggagcactggtcctaggattatggtatcggatgctcaagttcacaattgcactacaaaatgtcaa

SEQ ID NO: 85049 - DNA, 80 bp, synthetic construct
  source 1..80: mol_type = other DNA
tctacggaaggagtgcctgagtccatgagggaagaatatcaacaggaacagcagagtgctgtggatgctgacgatggtcc

SEQ ID NO: 85050 - DNA, 80 bp, synthetic construct
  source 1..80: mol_type = other DNA
acaaagagaagccaacaaaccataataccgaacattgggtctagaccctgggtaaggggtctgtctagtagaataagcat

SEQ ID NO: 85051 - DNA, 80 bp, synthetic construct
  source 1..80: mol_type = other DNA
agaggagggaagaagaagaaaaagaggactatttggagccatagcagggtttatagagggaggatggcagggaatggtag

SEQ ID NO: 85052 - DNA, 80 bp, synthetic construct
  source 1..80: mol_type = other DNA
ttggagccatagcagggtttatagagggaggatggcagggaatggtagatggttggtatgggtaccaccatagcaatgag

SEQ ID NO: 85053 - DNA, 80 bp, synthetic construct
  source 1..80: mol_type = other DNA
ggagatgagggagaaaacagtagtaggacagaaacattcagaccagggggaggagatatgagagacaattggagaagtga

SEQ ID NO: 85054 - DNA, 80 bp, synthetic construct
  source 1..80: mol_type = other DNA
atttgcaccatcctcaggaggggacccagaaattacaacacatagcctaatgatacaaaaagtagtaacacaaacatcac

SEQ ID NO: 85055 - DNA, 80 bp, synthetic construct
  source 1..80: mol_type = other DNA
ctgtgcttctacattgttgaaagagagttttgtggcagctgcagcgagggtgacacattaaaatgtgtagatgcaaagct

SEQ ID NO: 85056 - DNA, 80 bp, synthetic construct
  source 1..80: mol_type = other DNA
actgctggcttgattcgttcaagagttttttctacggattgaaaaacatgctcagcggcatcttcggaaacataatcata

SEQ ID NO: 85057 - DNA, 80 bp, synthetic construct
  source 1..80: mol_type = other DNA
ggcatccttctgttccttgctccatttctcttgctgctttttttcttttttttcggttggagaatccttttctgtttcag

SEQ ID NO: 85058 - DNA, 80 bp, synthetic construct
  source 1..80: mol_type = other DNA
ggcacgtgaaggaagatgaagagacaggctacaagagaatcattgaaaaactgaacagtaagaaagggaaaaacaaacta

SEQ ID NO: 85059 - DNA, 80 bp, synthetic construct
  source 1..80: mol_type = other DNA
agaaaagccacagagtatactaatagaacacaaagggacaatcattggcaaacaaaatgatacctgtgcaaccaagacta

SEQ ID NO: 85060 - DNA, 80 bp, synthetic construct
  source 1..80: mol_type = other DNA
gtgttgcaggaggaccagaggcttgtttaagtatagacacctcaaagatgacgaggaaacaggctacagaaggattattg

SEQ ID NO: 85061 - DNA, 80 bp, synthetic construct
  source 1..80: mol_type = other DNA
acctcaaagatgacgaggaaacaggctacagaaggattattgaaagactgaacagcaaaaaaggggggaaaaacagactg

SEQ ID NO: 85062 - DNA, 80 bp, synthetic construct
  source 1..80: mol_type = other DNA
gacacctcaaggacgatgaagaaactggttatagaaggattattgaaagactaaacaataaaaagggaaaaaacaaactt

SEQ ID NO: 85063 - DNA, 80 bp, synthetic construct
  source 1..80: mol_type = other DNA
aataataagctctcagtaagtgttatttatctttacaaatacagagcttaatagttttagtaataatgaacattatagta

SEQ ID NO: 85064 - DNA, 80 bp, synthetic construct
  source 1..80: mol_type = other DNA
gagattcatgccttctgcactgctattgtaataggcacgattgcagtactcataggaatagcaaacctaggattgaacat

SEQ ID NO: 85065 - DNA, 80 bp, synthetic construct
  source 1..80: mol_type = other DNA
ccagtaatagtatagtatcaatgtgttccagcacagaattccttggacaatggaactggcctgatggggctaaaatagag

SEQ ID NO: 85066 - DNA, 80 bp, synthetic construct
  source 1..80: mol_type = other DNA
cttacaatgcggaacttattggcacactggaaaaccagcatacaattgccttgtctgactcaaaaatgagcaaaggatgt

SEQ ID NO: 85067 - DNA, 80 bp, synthetic construct
  source 1..80: mol_type = other DNA
caaaaaacaagaatacagctgagcgagaatgctgaggacatgggaaatggctgtttcagaatataccacaaatgtgacaa

SEQ ID NO: 85068 - DNA, 80 bp, synthetic construct
  source 1..80: mol_type = other DNA
gtactggaaaagaacgtaactgtgactcactcagtgaatttgctcgaagacaaccataacgggaagctctgcagactgaa

SEQ ID NO: 85069 - DNA, 80 bp, synthetic construct
  source 1..80: mol_type = other DNA
aattgcctgtccctactctggggtcagcagtttttatcgaaatttgttgtggataataaagaaggggaattcatacccaa

SEQ ID NO: 85070 - DNA, 80 bp, synthetic construct
  source 1..80: mol_type = other DNA
tcgtgctctggggagtgcaccatcctccgaccaccagtgaacaacaaagtctataccagaacattgatgcatacgtctca

SEQ ID NO: 85071 - DNA, 80 bp, synthetic construct
  source 1..80: mol_type = other DNA
tacaccaattaaatcacaaatatccagcactgaacgcgaccatgccaaacaatgacaaatttgacaaattgtacatttgg

SEQ ID NO: 85072 - DNA, 80 bp, synthetic construct
  source 1..80: mol_type = other DNA
tgataatcgcgctccttggagctgtgaaaggtcttgataaaatctgcctaggacatcatgcagtggccaacgggaccatc

SEQ ID NO: 85073 - DNA, 80 bp, synthetic construct
  source 1..80: mol_type = other DNA
caccaaaatgctcagggcacgggccaagccgctgattacaagagtactcaggcggctattgaccaaatcactggaaaact

SEQ ID NO: 85074 - DNA, 80 bp, synthetic construct
  source 1..80: mol_type = other DNA
gaatagacttattgagaaaaccaatactgagttcgagtcaatagaatctgagtttagtgagatcgaacaccagatcggta

SEQ ID NO: 85075 - DNA, 80 bp, synthetic construct
  source 1..80: mol_type = other DNA
atgtcatcaattggactaaggattcaataaccgacatctggacttatcaggctgagctattggtagcaatggaaaaccag

SEQ ID NO: 85076 - DNA, 80 bp, synthetic construct
  source 1..80: mol_type = other DNA
catacaatcgatatggctgactcagaaatgttgaatctatatgagagagtgagaaaacaactcaggcagaatgcagaaga

SEQ ID NO: 85077 - DNA, 80 bp, synthetic construct
  source 1..80: mol_type = other DNA
agacgggaaaggatgttttgagatatatcatgcttgtgatgactcatgcatggagagtataagaaacaacacctatgacc

SEQ ID NO: 85078 - DNA, 80 bp, synthetic construct
  source 1..80: mol_type = other DNA
attcacagtacagagaagaagctcttttgaacagactgaatatcaacccagtgacactctcttctggctataaagacata

SEQ ID NO: 85079 - DNA, 80 bp, synthetic construct
  source 1..80: mol_type = other DNA
atcctctggtttagcttcggggcatcatgttttgttcttctagccgttgtcatgggtcttgtcttcttttgtcttaagaa

SEQ ID NO: 85080 - DNA, 80 bp, synthetic construct
  source 1..80: mol_type = other DNA
catgaaaggaagaatccataaagacctgggcaaatgccatccaataggaatgttaataggaacaccagcttgtgatctgc

SEQ ID NO: 85081 - DNA, 80 bp, synthetic construct
  source 1..80: mol_type = other DNA
atcttacagggacgtgggacactctcattgaacgagagaatgctattgcttactgctaccctggagccactgtaaatgaa

SEQ ID NO: 85082 - DNA, 80 bp, synthetic construct
  source 1..80: mol_type = other DNA
gaagcactgaggcagaaaataatggagagtggagggatcagcaaaataagcactggtttcacttatggatcttccataaa

SEQ ID NO: 85083 - DNA, 80 bp, synthetic construct
  source 1..80: mol_type = other DNA
ttcggccggaaccactaaagcatgcatgaggaatggagggaatagcttttatgcagaactcaagtggctggtatcaaaga

SEQ ID NO: 85084 - DNA, 80 bp, synthetic construct
  source 1..80: mol_type = other DNA
gcaaaggacaaaacttccctcaaaccacaaacacttacagaaacacggacacggctgaacacctcataatgtggggaatc

SEQ ID NO: 85085 - DNA, 80 bp, synthetic construct
  source 1..80: mol_type = other DNA
catcacccttctagcactcaagaaaagaatgatctatatgggacgcaatcactgttcatatcagtcgggagttccactta

SEQ ID NO: 85086 - DNA, 80 bp, synthetic construct
  source 1..80: mol_type = other DNA
ccagaacaattttgttccggttgttggagcaagacctcaggttaatggacaaagtggaagaattgattttccacacaacg

SEQ ID NO: 85087 - DNA, 80 bp, synthetic construct
  source 1..80: mol_type = other DNA
ggggtctgatagcaccgagccgagttagcaaattaactggaagaggattgggaattcaatcagatgcaccaatagacaat

SEQ ID NO: 85088 - DNA, 80 bp, synthetic construct
  source 1..80: mol_type = other DNA
gtaaagactctcacaaatgaacaggaagaggtgaccaatgctactgaaacagtggagagtacaagtctaaacagattatg

SEQ ID NO: 85089 - DNA, 80 bp, synthetic construct
  source 1..80: mol_type = other DNA
aattgtgagtctaaatgtttttggagagggggttctataaatacaaggcttcctttccaaaatttgtcaccaaggacagt

SEQ ID NO: 85090 - DNA, 80 bp, synthetic construct
  source 1..80: mol_type = other DNA
gggtcaatgtcctaaatatgtgaacaaaaagagcttgatgcttgcaacaggaatgagaaacgtgccagaaataatgcaag

SEQ ID NO: 85091 - DNA, 80 bp, synthetic construct
  source 1..80: mol_type = other DNA
ggagaggtctgtttggtgcaatagcgggatttatagagaatgggtgggaaggaatggttgatggttggtatggtttcaga

SEQ ID NO: 85092 - DNA, 80 bp, synthetic construct
  source 1..80: mol_type = other DNA
ctcaaacagtattgttgttttttgtggcacttcaggtacctatggaacaggctcatggcctgatggggcgaacatcaatt

SEQ ID NO: 85093 - DNA, 80 bp, synthetic construct
  source 1..80: mol_type = other DNA
atcggtagtgtcagcattgtactaacaacagtaggattgctcctccaaataacaagcttgtgctcaatatggttcagcca

SEQ ID NO: 85094 - DNA, 80 bp, synthetic construct
  source 1..80: mol_type = other DNA
tgcattatctggagtggcaatagcacttagtgtactgaacttattgataggaatctcaaatgtcggattgaatgtatctc

SEQ ID NO: 85095 - DNA, 80 bp, synthetic construct
  source 1..80: mol_type = other DNA
gcttggtagggccctcaaccccctgtcaaaaaatggatttgaaaagttgaaaaaacctaaagcagatgttgattccaatt

SEQ ID NO: 85096 - DNA, 80 bp, synthetic construct
  source 1..80: mol_type = other DNA
ttagaaaagcagaaagacaggaaaatgttgacaaaaaaaaatggtccgggtattttggaaactttttttactattggaat

SEQ ID NO: 85097 - DNA, 80 bp, synthetic construct
  source 1..80: mol_type = other DNA
gaaagtaaaagaccaattgaaaaataatgccaaggaagtagggaacggatgtttcgaattctatcacaagtgtgatgata

SEQ ID NO: 85098 - DNA, 80 bp, synthetic construct
  source 1..80: mol_type = other DNA
atgaagatggcgtcgagtgacgccaacccatctgaagggtccacagccagcctcgtcccagaggtcaacaatgaggtcat

SEQ ID NO: 85099 - DNA, 80 bp, synthetic construct
  source 1..80: mol_type = other DNA
acacaaagaagtcccaattacaatggaatctttactacgaaaacaaaccatcaacaatgaaggcttttttaagcctgaat

SEQ ID NO: 85100 - DNA, 80 bp, synthetic construct
  source 1..80: mol_type = other DNA
attttaaaagttttaaaagtggatggtgagcatccaatggcaagattctggagacatgttataagctctgcacaattaga

SEQ ID NO: 85101 - DNA, 80 bp, synthetic construct
  source 1..80: mol_type = other DNA
gtacttgtttgtaaacattgagcagcccctgatgatgatcggccaccactttgaatgtgtaaactcacagagcattaatg

SEQ ID NO: 85102 - DNA, 80 bp, synthetic construct
  source 1..80: mol_type = other DNA
tttaggtctgtaaccagtgatgatatcaaattcaaaataagaaaatgtaccatgaatctgtttctgaaaaatggtggtcg

SEQ ID NO: 85103 - DNA, 80 bp, synthetic construct
  source 1..80: mol_type = other DNA
agatattcatatattgacgtacacagctcacgatggggatctaagttctagcatttttagaagcccggatgactcagtct

SEQ ID NO: 85104 - DNA, 80 bp, synthetic construct
  source 1..80: mol_type = other DNA
attacaaaaatgtaagaaattttagacaatggaaaatcaaaaaatggtttcctaaaacgttgtggagtatagtttgattt

SEQ ID NO: 85105 - DNA, 80 bp, synthetic construct
  source 1..80: mol_type = other DNA
atgactcagatttgtctaaatcagagcgagaactgttaggcactttatcctttatagacctggactgggataaaacagag

SEQ ID NO: 85106 - DNA, 80 bp, synthetic construct
  source 1..80: mol_type = other DNA
aaaacattcccaatgtttaaaaaggcagtattcgacaacttccatgtgtctccacctgatgagaactacatgagtcatat

SEQ ID NO: 85107 - DNA, 80 bp, synthetic construct
  source 1..80: mol_type = other DNA
gggacccatttgattccaagtcaacaattcagattcctccctgggtgttcacggatgctgaggagggaaagggtttgtct

SEQ ID NO: 85108 - DNA, 80 bp, synthetic construct
  source 1..80: mol_type = other DNA
taacaggtcacgtagtgatagcagatgaagttatggatacagatgacatactactagtgtctattgattctatcaacaat

SEQ ID NO: 85109 - DNA, 80 bp, synthetic construct
  source 1..80: mol_type = other DNA
aagttgactctctgtaacacctcactcatgacacaggcctgtcgatcagaacggtgtaagccaattcccatacattattg

SEQ ID NO: 85110 - DNA, 80 bp, synthetic construct
  source 1..80: mol_type = other DNA
ctaaatgttttatagcacgaggcctgatgagtgaacctaggggtgatgatatgtcaggcgctactagcactgatcaggga

SEQ ID NO: 85111 - DNA, 80 bp, synthetic construct
  source 1..80: mol_type = other DNA
gactgcgcactgacctcagacaatggactgataacagtatcaccaatccatggtggagaaattatccaaagatggaattc

SEQ ID NO: 85112 - DNA, 80 bp, synthetic construct
  source 1..80: mol_type = other DNA
ctagactgcgaatacaaaaagacgggacacattgtgaaaatatggggcaagttcctccatgattccagaatgggagcggt

SEQ ID NO: 85113 - DNA, 80 bp, synthetic construct
  source 1..80: mol_type = other DNA
attactggatcattaagactttttccttctgaacgtgtattgactatgaactctacatttaaggtgtttgattcagagga

SEQ ID NO: 85114 - DNA, 80 bp, synthetic construct
  source 1..80: mol_type = other DNA
tacttaaacaatactattatagaaaaggaaccttgttctaaagtggtagaatacagggactggtcgaaaccgcagtgcca

SEQ ID NO: 85115 - DNA, 80 bp, synthetic construct
  source 1..80: mol_type = other DNA
atctctggtcttataatgcagagcttcttgttgctctagagaaccagcatacaattgatttgaccgactctgagatgaac

SEQ ID NO: 85116 - DNA, 80 bp, synthetic construct
  source 1..80: mol_type = other DNA
ctgggacttttaaggctgctgacacagcggggactttccactggggcgttccagggaggtgtggtcgggggagtggtcaa

SEQ ID NO: 85117 - DNA, 80 bp, synthetic construct
  source 1..80: mol_type = other DNA
tgcaactgcaataaaaggtaggaaacagttagcatatgctcttttttatagccttgatataatatcacttaatgaaaatg

SEQ ID NO: 85118 - DNA, 80 bp, synthetic construct
  source 1..80: mol_type = other DNA
aaaatgaaaaactgttcttttaatgtaaccacaacagcaagagatcagcttaagaaagaacatgcacttttttatagact

SEQ ID NO: 85119 - DNA, 80 bp, synthetic construct
  source 1..80: mol_type = other DNA
tgttactaccaataatactagtgatctgggaaaaatgtcagaaggaatgaaaaactgctctttcaatatcacaagcatag

SEQ ID NO: 85120 - DNA, 80 bp, synthetic construct
  source 1..80: mol_type = other DNA
gaaatgaggtaaagaaagaatatgcactctttcatacacttgatataaaatcacaacatagtggaggctatatgttgaca

SEQ ID NO: 85121 - DNA, 80 bp, synthetic construct
  source 1..80: mol_type = other DNA
gacggtggaaaatggaaactgcactaataatactgagacacagacaaaggaagtacaagaactgcaagaaataaaaaact

SEQ ID NO: 85122 - DNA, 80 bp, synthetic construct
  source 1..80: mol_type = other DNA
gttctttcaaaaccttcacaaggataagagataagacacagggagaagaatctgctcttttttatagagatgatctagta

SEQ ID NO: 85123 - DNA, 80 bp, synthetic construct
  source 1..80: mol_type = other DNA
accactaatgacactagtgatatgacaaactgctctttctatgcccccacaggaatacaaggtagatttcaaaaggaata

SEQ ID NO: 85124 - DNA, 80 bp, synthetic construct
  source 1..80: mol_type = other DNA
tgctcttttttataaacttgatgtagtacaaatagataaggatagtaatagtacaactagtaatagtacagatagtaata

SEQ ID NO: 85125 - DNA, 80 bp, synthetic construct
  source 1..80: mol_type = other DNA
aaaggataagtcacagagagcatatgcatctttctataaacttgacatagtaccattagaagagaatagtacaacctata

SEQ ID NO: 85126 - DNA, 80 bp, synthetic construct
  source 1..80: mol_type = other DNA
tggcgaagaactgatggaaaaaggagaactaaaaaagtgctttttcaatgttacttcaagcgtaagggataaggtgcagc

SEQ ID NO: 85127 - DNA, 80 bp, synthetic construct
  source 1..80: mol_type = other DNA
cagagggaagggcctcgagagcaggggcctcgagagttgagccagcagcagcagaggacggggcctcagggatctcgaga

SEQ ID NO: 85128 - DNA, 80 bp, synthetic construct
  source 1..80: mol_type = other DNA
tttcaatattaccacaaaattaggagggactaagcaagaaagggcgatttttaataaacttgatgtagtactaataagta

SEQ ID NO: 85129 - DNA, 80 bp, synthetic construct
  source 1..80: mol_type = other DNA
tctttcaaggtcaacccaggcataaaagacaagacgcagagagaacgggcacttttctatgcacttgatttagtaccaat

SEQ ID NO: 85130 - DNA, 80 bp, synthetic construct
  source 1..80: mol_type = other DNA
aaactgctctttcgacatcaccacaagcataaatgagaaggtgaaaggatctgcacttttttataaatatgatgtaatac

SEQ ID NO: 85131 - DNA, 80 bp, synthetic construct
  source 1..80: mol_type = other DNA
cctattaaccagcacgggatggatgacccagagaaagaggtgttggtgtggaagtttgacagcagcctcgcatatcatca

SEQ ID NO: 85132 - DNA, 80 bp, synthetic construct
  source 1..80: mol_type = other DNA
tgttggtgtggaagtttgacagcagcctcgcatatcatcaccgagcccgagagctgtttccgcacttctacaaggactaa

SEQ ID NO: 85133 - DNA, 80 bp, synthetic construct
  source 1..80: mol_type = other DNA
tactggtctggagatttgaccgtagtctggcatcaaagcatatagctcgagagaagcatcctgagttctacaaagactga

SEQ ID NO: 85134 - DNA, 80 bp, synthetic construct
  source 1..80: mol_type = other DNA
ggaaatagatatgaaaaactgctcttttaatgctactgcgggaatacagggtaaggtaaagaaagaatatgcactttttt

SEQ ID NO: 85135 - DNA, 80 bp, synthetic construct
  source 1..80: mol_type = other DNA
tagtagtggagaaatgaaacaatgctctttcaatagtaccacaagcataagagatgttacaacgaaagaatctgcacttt

SEQ ID NO: 85136 - DNA, 80 bp, synthetic construct
  source 1..80: mol_type = other DNA
aagaaataacaaactgctcgttcaatgtcaccacaagcataggagataagagacatagagaatatgcactttttcataaa

SEQ ID NO: 85137 - DNA, 80 bp, synthetic construct
  source 1..80: mol_type = other DNA
attgatctaatgccaatagagaatatagcaacaaatagaacaaatggaacaaacacagcaaacaatacaacaaactatgc

SEQ ID NO: 85138 - DNA, 80 bp, synthetic construct
  source 1..80: mol_type = other DNA
ccgtagaaaataagatgaagccagaatatgcattttttagtacacttgatatagtaccaataaagtatgagaatggtaag

SEQ ID NO: 85139 - DNA, 80 bp, synthetic construct
  source 1..80: mol_type = other DNA
gtatttgtaatgagaacattagaaatagtgtcaatagtaggactaatagtagcactactcgcagcaataattgtgtggac

SEQ ID NO: 85140 - DNA, 80 bp, synthetic construct
  source 1..80: mol_type = other DNA
taatgctagtaatgctaatggtaggaatgttattaatgaagacatgcaaaattgctctttcaatgcagccacagaaataa

SEQ ID NO: 85141 - DNA, 80 bp, synthetic construct
  source 1..80: mol_type = other DNA
tattggggctcagagataaaagggagtgctgttagtctaattgataccatagccattgcagtagctgaaggaacagatag

SEQ ID NO: 85142 - DNA, 80 bp, synthetic construct
  source 1..80: mol_type = other DNA
taaaatggggaacaagtggtcaaagggatggcctgtgataagagaaagaataagaagagctgccccagcagagggagtag

SEQ ID NO: 85143 - DNA, 80 bp, synthetic construct
  source 1..80: mol_type = other DNA
tgggaaatattgtgctgtattggggtctagagcttaaaaagagtgctattagcctgcttgatattatagcaataacagta

SEQ ID NO: 85144 - DNA, 80 bp, synthetic construct
  source 1..80: mol_type = other DNA
gctgaaagaacagatagaattatagaaataggacagataatttgtagagctatccgtagcatacctagaagactaagaca

SEQ ID NO: 85145 - DNA, 80 bp, synthetic construct
  source 1..80: mol_type = other DNA
gggagttgaagcagctttacaataaaatggggaacaagtggtcaaagggatggcctgtgataagagaaagaataagaaga

SEQ ID NO: 85146 - DNA, 80 bp, synthetic construct
  source 1..80: mol_type = other DNA
gaaaaattgctctttcaatatcaccacaagcctaagagatagagtgcagaaaaaatatgcatatttttataaccttgata

SEQ ID NO: 85147 - DNA, 80 bp, synthetic construct
  source 1..80: mol_type = other DNA
tgggaataatactagtattgaggggggaaagatggagagaggagaactgaaaaactgctctttcaacatctccacaagcg

SEQ ID NO: 85148 - DNA, 80 bp, synthetic construct
  source 1..80: mol_type = other DNA
gtattgaggggggaaagatggagagaggagaactgaaaaactgctctttcaacatctccacaagcgtaaaagataagtat

SEQ ID NO: 85149 - DNA, 80 bp, synthetic construct
  source 1..80: mol_type = other DNA
caagtgttcttcattatttggggctgctgtttccttgttattaaaagggtctggtcacacgttttccttgattctgactt

SEQ ID NO: 85150 - DNA, 80 bp, synthetic construct
  source 1..80: mol_type = other DNA
taataagtgttcttccctttttggtgttgcaatgtcattactgttcaaacaagtatggaacaatttattccgagctgaga

SEQ ID NO: 85151 - DNA, 80 bp, synthetic construct
  source 1..80: mol_type = other DNA
aaaatggtctcctggtgtacaactctgctaaattccggcgatttactcaagcattatatgatggtttatagagatgacaa

SEQ ID NO: 85152 - DNA, 80 bp, synthetic construct
  source 1..80: mol_type = other DNA
tgaacaagtgttcttcattatttggggctgctgtttccttgttatttaaaagggtctggtcacacttacataactgtatt

SEQ ID NO: 85153 - DNA, 80 bp, synthetic construct
  source 1..80: mol_type = other DNA
cttaacaacaactatgacactacatttcaaagaatgcatcaacccatcgaacaatcaagcattaccatgtgagccaatca

SEQ ID NO: 85154 - DNA, 80 bp, synthetic construct
  source 1..80: mol_type = other DNA
tgggggcgcaacagggtgcaaaacataatggattccaacactgtgtcaagcttccaggtagactgctttctttggcatgt

SEQ ID NO: 85155 - DNA, 80 bp, synthetic construct
  source 1..80: mol_type = other DNA
tgctggtctggagatttgacagcaggctggcacttaaacacagagctcaagagctgctcccggagttcttcaagaactgc

SEQ ID NO: 85156 - DNA, 80 bp, synthetic construct
  source 1..80: mol_type = other DNA
agtatcagtatcatgctcccataacgggaaaagcagcttttacagaaatttgctatggcccacggggaaaaacggtctgt

SEQ ID NO: 85157 - DNA, 80 bp, synthetic construct
  source 1..80: mol_type = other DNA
agcaaaagcaggggaaaatgattgcattcattgtaatagcaacactggtagcaaccggaaaaccagacaagatatgcatt

SEQ ID NO: 85158 - DNA, 80 bp, synthetic construct
  source 1..80: mol_type = other DNA
gaaactagaggactttttggagctattgcaggcttcattgaaggagggtggactggaatgattgatgggtggtacggcta

SEQ ID NO: 85159 - DNA, 80 bp, synthetic construct
  source 1..80: mol_type = other DNA
atgaatacacaatttgaggctgtagatcatgagttttcaaacctggagagaaggattgacaacctaaacaaaagagtgga

SEQ ID NO: 85160 - DNA, 80 bp, synthetic construct
  source 1..80: mol_type = other DNA
agatggatttctggatgtttggacatataatgctgaactgttggttcttcttgaaaacgaaaggacactagacctacatg

SEQ ID NO: 85161 - DNA, 80 bp, synthetic construct
  source 1..80: mol_type = other DNA
gaaggtcaggtcacaactaagggacaatgctaatgacttagggaacggatgctttgaattttggcataagtgtgacaatg

SEQ ID NO: 85162 - DNA, 80 bp, synthetic construct
  source 1..80: mol_type = other DNA
aatgtatggagtctgtcaaaaatgggacctatgactatcccaaatatcaaaaggagagtaggttaaacagacagaaaata

SEQ ID NO: 85163 - DNA, 80 bp, synthetic construct
  source 1..80: mol_type = other DNA
gaatcggtaaaactggagaattttgatgtgtatcaaatccttgccatttatagtacggtatcgagcagtctagttttggc

SEQ ID NO: 85164 - DNA, 80 bp, synthetic construct
  source 1..80: mol_type = other DNA
gctggagaaccagaaagaagaaagattctgcaagatctcaaacaaagcccctctcgatctaagggattgtaccctagagg

SEQ ID NO: 85165 - DNA, 80 bp, synthetic construct
  source 1..80: mol_type = other DNA
agggctgatcctggcaatgggtctttggatgtgttcaaatggttcaatgcagtgcaggatatgtatataattgagaaaaa

SEQ ID NO: 85166 - DNA, 80 bp, synthetic construct
  source 1..80: mol_type = other DNA
atgggtctttggatgtgttcaaatggttcaatgcagtgcaggatatgtatataattgagaaaaacacccttgtttctact

SEQ ID NO: 85167 - DNA, 80 bp, synthetic construct
  source 1..80: mol_type = other DNA
gttggatcttggggaacccccgatgcggcatattgctagctgaccaaagctggtcatacatagtagaacggcctaatgcc

SEQ ID NO: 85168 - DNA, 80 bp, synthetic construct
  source 1..80: mol_type = other DNA
cgaaatgggatttgctatcctggaacattgaatgaagcagaagaattaaaggcacttattggatcaggagaaagggtaga

SEQ ID NO: 85169 - DNA, 80 bp, synthetic construct
  source 1..80: mol_type = other DNA
aaggtttgagatgtttcccaaaagcacatggacaggagtggacaccgaaagtggagtgtcaagtgcttgtcctcttggta

SEQ ID NO: 85170 - DNA, 80 bp, synthetic construct
  source 1..80: mol_type = other DNA
atggtccatctttctacaggaatcttctatggataataaaactcaattcatcagaatacccagtaatcagaggaactttc

SEQ ID NO: 85171 - DNA, 80 bp, synthetic construct
  source 1..80: mol_type = other DNA
aacaacactggagacaagtcaattctctatttttggggtgtacaccatcctcctgtcacaactgaacaaaatgctctgta

SEQ ID NO: 85172 - DNA, 80 bp, synthetic construct
  source 1..80: mol_type = other DNA
tggttctggtaatcgatatgttagaatgggaactgaaagcatgaattttgccaggagcccagaaattgcggcaagacctg

SEQ ID NO: 85173 - DNA, 80 bp, synthetic construct
  source 1..80: mol_type = other DNA
ctgtgaatggtcagagaggcagaattgattatttctggtccatcttaaaaccaggggaaaccttgaatgtagaatctaat

SEQ ID NO: 85174 - DNA, 80 bp, synthetic construct
  source 1..80: mol_type = other DNA
ggataccatgcaaacaattcgacaacaaaggtagatacgatacttgagaagaacgtaactgtcacacactcagttgaact

SEQ ID NO: 85175 - DNA, 80 bp, synthetic construct
  source 1..80: mol_type = other DNA
gggaatttaatagccccttggtatgcatacagatttgtcaacaaagatagcaaaggggccatattcagatctaatttgcc

SEQ ID NO: 85176 - DNA, 80 bp, synthetic construct
  source 1..80: mol_type = other DNA
aatcgagaactgtgatgccacatgccagactactgaaggagtgataagaaccaacaagacatttcagaatgtgagccctc

SEQ ID NO: 85177 - DNA, 80 bp, synthetic construct
  source 1..80: mol_type = other DNA
tgtggattggagaatgccccaagtatgtaaaaagtaaaagtctaaggcttgcaactggactaaggaatgttccacaaata

SEQ ID NO: 85178 - DNA, 80 bp, synthetic construct
  source 1..80: mol_type = other DNA
gaggtagtgtacttgtataatactaccattgaaaaagaaattttccaaaaggtagtagaatacaaaaattggtcgaaacc

SEQ ID NO: 85179 - DNA, 80 bp, synthetic construct
  source 1..80: mol_type = other DNA
cacgaagacacatagccagagagaaatacccggagtattaccaagactgagactgctgacacaaagattgctgatacaga

SEQ ID NO: 85180 - DNA, 80 bp, synthetic construct
  source 1..80: mol_type = other DNA
caaatgtaatgtggtatataataagcatagtagcattgatattagcactaataatagtgatagttgtgtggactatagta

SEQ ID NO: 85181 - DNA, 80 bp, synthetic construct
  source 1..80: mol_type = other DNA
aataggaaaacagaaaagagaccatgcactgttttctgtacttgatatagcattaataaagaatgataacacaagctaca

SEQ ID NO: 85182 - DNA, 80 bp, synthetic construct
  source 1..80: mol_type = other DNA
atgaaaaatataataattgggtttataaagcaaaaaaagtaaatgagaatatgcattctttgcaggacgtaatagcgaga

SEQ ID NO: 85183 - DNA, 80 bp, synthetic construct
  source 1..80: mol_type = other DNA
cagcaagcatacattaatgatctacaaattcataataataaattggagaaggatctacaaaataaggtaaattcgttggt

SEQ ID NO: 85184 - DNA, 80 bp, synthetic construct
  source 1..80: mol_type = other DNA
atagacttaataaatccagtaaatgctatcgatgatctagaacaaataataagaaatttaatttccgattatgataagat

SEQ ID NO: 85185 - DNA, 80 bp, synthetic construct
  source 1..80: mol_type = other DNA
atttttaatgttcaaagggttgatgcagcgctgtaactatgaatacgtttacgaatgacttctatactgactcgacatta

SEQ ID NO: 85186 - DNA, 80 bp, synthetic construct
  source 1..80: mol_type = other DNA
actacgctttaaagactatgaattacgtaatggactacattgtgtatagattcttgttgatcataacaatttgcactttg

SEQ ID NO: 85187 - DNA, 80 bp, synthetic construct
  source 1..80: mol_type = other DNA
atggtgaaagcgcaaaattatggaataaatctaccaattacaggttcaatggatatgaattacattaatataaacacaac

SEQ ID NO: 85188 - DNA, 80 bp, synthetic construct
  source 1..80: mol_type = other DNA
cattgaaaaaccatttttaacttcaacattgtgtatttattatccaaatgatgtcataactgagattcaagatgataaat

SEQ ID NO: 85189 - DNA, 80 bp, synthetic construct
  source 1..80: mol_type = other DNA
aaagactatgaagatctggcgaaattttcaataaatccacaattgtattgtgattataatataattataatgcgttatta

SEQ ID NO: 85190 - DNA, 80 bp, synthetic construct
  source 1..80: mol_type = other DNA
tgagaatatgacattagatatgtcagaattggcagatttactattgaatgaatggttgtgtaatcctatggatattgttt

SEQ ID NO: 85191 - DNA, 80 bp, synthetic construct
  source 1..80: mol_type = other DNA
tgggtgaggaatgtactgtgaaagtgtgcccattagatacacaaactttaggcataggatgtactacaacagatgttaac

SEQ ID NO: 85192 - DNA, 80 bp, synthetic construct
  source 1..80: mol_type = other DNA
acatttgaagtgttggcgaatacagaaaagcttgctataactgatgttgtagacggagtaaattataaaataaacatatc

SEQ ID NO: 85193 - DNA, 80 bp, synthetic construct
  source 1..80: mol_type = other DNA
gacgcagagctgtacaattcgcaattgtaataaattaggaccaagggagaatgtagccgtgatacaagtgggaggaccag

SEQ ID NO: 85194 - DNA, 80 bp, synthetic construct
  source 1..80: mol_type = other DNA
gcacagctggagtggagtctgctgtcttgaggggattcctcattttaggcaaagaagacaagagatatggtccagcatta

SEQ ID NO: 85195 - DNA, 80 bp, synthetic construct
  source 1..80: mol_type = other DNA
agaggaatttgctgagatcatgaagatctgttccaccattgaagagctcagacggcagaaatagtgaatttagcttgtcc

SEQ ID NO: 85196 - DNA, 80 bp, synthetic construct
  source 1..80: mol_type = other DNA
attttcaaaatccttgacccgaataatggactatattatttatagattaacgtttgtaattgtagcattatcagcattat

SEQ ID NO: 85197 - DNA, 80 bp, synthetic construct
  source 1..80: mol_type = other DNA
tactctttatgtataggttatcatgcgaacaattcaacagacactgtaaaccccgtactaaaaaaaaatgtaacattaac

SEQ ID NO: 85198 - DNA, 80 bp, synthetic construct
  source 1..80: mol_type = other DNA
aaaattaaacagagaagaaatagatggggtaaagctggaatcaacaaggatttaccagattttggcgatctattcaactg

SEQ ID NO: 85199 - DNA, 80 bp, synthetic construct
  source 1..80: mol_type = other DNA
ctggtgcctcctcgtctgctagtggtgtttgggcgctccccccaccctctgaggggtcggtggctacctcaccacctcag

SEQ ID NO: 85200 - DNA, 80 bp, synthetic construct
  source 1..80: mol_type = other DNA
gctccagtcagtaagcctgctagcccacctagtcttattacatctagaccccctgctcgtaagccgcccacaccaccacc

SEQ ID NO: 85201 - DNA, 80 bp, synthetic construct
  source 1..80: mol_type = other DNA
gaggttccgggtcgatgcggcatctgtgtcccccgcccctgagcccgctggtctacctggccccactgtgcttacccccc

SEQ ID NO: 85202 - DNA, 80 bp, synthetic construct
  source 1..80: mol_type = other DNA
ctttcttcctcttcaggtagtatctatagtctttcaacacagagcactgccttgaccaagccctcttcaggctcttcttc

SEQ ID NO: 85203 - DNA, 80 bp, synthetic construct
  source 1..80: mol_type = other DNA
gaggggggagtcacgtgtttagtgaaaagaatcaattagttttaattaaattttgattggatttaattttaattggatct

SEQ ID NO: 85204 - DNA, 80 bp, synthetic construct
  source 1..80: mol_type = other DNA
cgtgtttagtgaaaagaatcaattagttttaattaaattttgattggatttaattttaattggatcttttaaaaaaaaaa

SEQ ID NO: 85205 - DNA, 80 bp, synthetic construct
  source 1..80: mol_type = other DNA
gcgcacttgtcgccaacgagggctggaatgcctcggaggatgcgcttaccgccgtgatcaccgcagcgtacctgaccatc

SEQ ID NO: 85206 - DNA, 80 bp, synthetic construct
  source 1..80: mol_type = other DNA
gccgccgttggctctcagctggttttcatctagaccctagggttcttgtctttgacgaggcggtcccctgccgctgccgg

SEQ ID NO: 85207 - DNA, 80 bp, synthetic construct
  source 1..80: mol_type = other DNA
agctttttaaagaaagtcgccgggagattctgctgctttatgaaatggttggggcaggagtgcacctgttttctggagcc

SEQ ID NO: 85208 - DNA, 80 bp, synthetic construct
  source 1..80: mol_type = other DNA
accctgatgtttctgggacctatgcggtccatggccgacagcttgaggctctatatagagcgcttaatatcccggatgat

SEQ ID NO: 85209 - DNA, 80 bp, synthetic construct
  source 1..80: mol_type = other DNA
attgcggcccgtgcgtcacgcctgacagctactgtggaacttgtcgccagcccaggccgactcgagtgccggacagtact

SEQ ID NO: 85210 - DNA, 80 bp, synthetic construct
  source 1..80: mol_type = other DNA
atatcttctaatggcttagattgtaccgccatattcccccctggtgcggcgccaagtgctgcaccaagtgaagtggcggc

SEQ ID NO: 85211 - DNA, 80 bp, synthetic construct
  source 1..80: mol_type = other DNA
tttttgcagcgccctatataggtacaataagtttacccagcgccattcgctgaccggtgggctgtggctgtaccctgaag

SEQ ID NO: 85212 - DNA, 80 bp, synthetic construct
  source 1..80: mol_type = other DNA
tatacacgaacttggtctacatctggcttctctagtgacttttccccgcccgaggcagctcatgccgtcccagtccctga

SEQ ID NO: 85213 - DNA, 80 bp, synthetic construct
  source 1..80: mol_type = other DNA
cgtcgggttaccttcgggtgccccctcgtctgctagtgatgtttgggtgttcccaccgccctctgaggggtcggcgatcg

SEQ ID NO: 85214 - DNA, 80 bp, synthetic construct
  source 1..80: mol_type = other DNA
ttccaccacccgaaaccccggtcagtaagccagctaacccgccttgttctattacacctagaccccccgttcgtaagcca

SEQ ID NO: 85215 - DNA, 80 bp, synthetic construct
  source 1..80: mol_type = other DNA
cctacaccaccaccggctcgcacccgtcggctcctttctttgaaaggtttttggaagaagacatctggcttctctagcga

SEQ ID NO: 85216 - DNA, 80 bp, synthetic construct
  source 1..80: mol_type = other DNA
cttttccccgcccgaggcagctcatgccgtcccagtccctgacgtcgggttaccttcgggtgccccctcgtctgctagtg

SEQ ID NO: 85217 - DNA, 80 bp, synthetic construct
  source 1..80: mol_type = other DNA
atgtttgggtgttcccaccgccctctgaggggtcggcgatcgttccaccacccgaaaccccggtcagtaagccagctaac

SEQ ID NO: 85218 - DNA, 80 bp, synthetic construct
  source 1..80: mol_type = other DNA
ccgccttgttctattacacctagaccccccgttcgtaagccacctacaccaccaccggctcgcacccgtcggctccttta

SEQ ID NO: 85219 - DNA, 80 bp, synthetic construct
  source 1..80: mol_type = other DNA
tatgtatcccgatggggccaaggtatatgcaggctctctgttcgagtcggattgtgactggctggtcaatgcatctaacc

SEQ ID NO: 85220 - DNA, 80 bp, synthetic construct
  source 1..80: mol_type = other DNA
ccggccaccgtcctggcggtggtctttgtcatgcattttatcagcgtttcccggagtcattccatccgactgattttgtc

SEQ ID NO: 85221 - DNA, 80 bp, synthetic construct
  source 1..80: mol_type = other DNA
atgcgtgagggtcttgccgcgtacactttgagcccgcgcccgatcatccatgctgtggcccccgactatagggttgaaca

SEQ ID NO: 85222 - DNA, 80 bp, synthetic construct
  source 1..80: mol_type = other DNA
aaaccccaagaggctggaggcggcatatcgtgagacctgttcccgcctcggcacagctgcctacccgctactggggtcgg

SEQ ID NO: 85223 - DNA, 80 bp, synthetic construct
  source 1..80: mol_type = other DNA
ctgtaggcttaagtttcgacgcctgggagcgtaatcaccgccctggcgatgaactttaccttactgagccggctgccgcc

SEQ ID NO: 85224 - DNA, 80 bp, synthetic construct
  source 1..80: mol_type = other DNA
tggtttgaggctaataagccaacccaaccagccttaacaattactgaagacactgcccgtacagccaaccttgcgctcga

SEQ ID NO: 85225 - DNA, 80 bp, synthetic construct
  source 1..80: mol_type = other DNA
gatggactctgctaccgaggttggtcgcgcttgcgccggctgcactattaaccccgggattgttcattaccagtttaccg

SEQ ID NO: 85226 - DNA, 80 bp, synthetic construct
  source 1..80: mol_type = other DNA
gatagatgaggcaccctcgcttccaccgcatttgctgttgctccatatgcagcgggcctcatcggttcacctccttggcg

SEQ ID NO: 85227 - DNA, 80 bp, synthetic construct
  source 1..80: mol_type = other DNA
accccaaccagatccctgctatcgactttgagcatgccggtttagtcccggcgatccgccctgagcttacccctactagt

SEQ ID NO: 85228 - DNA, 80 bp, synthetic construct
  source 1..80: mol_type = other DNA
tggtggcacgttacccaccgttgccccgctgatgtgtgtgaactcatacgtggggcttacccaaagattcagacgaccag

SEQ ID NO: 85229 - DNA, 80 bp, synthetic construct
  source 1..80: mol_type = other DNA
ccgtgtgttgcggtctttattctggaatgagcctgcggtaggccagaggctagttttcacgcaggcagccaaggcggcta

SEQ ID NO: 85230 - DNA, 80 bp, synthetic construct
  source 1..80: mol_type = other DNA
agggcgccacgttcacggagaccaccatcatagccacagccgatgccagaggtcttattcagtcttcccgtgcgcatgcc

SEQ ID NO: 85231 - DNA, 80 bp, synthetic construct
  source 1..80: mol_type = other DNA
atcgttgcacttacccgtcatacagaaaaatgcgtcattcttgatgcccccggcttactgcgtgaggtcggcatttctga

SEQ ID NO: 85232 - DNA, 80 bp, synthetic construct
  source 1..80: mol_type = other DNA
tataattgttaataactttttcctggctggtggtgaagtgggtcatcatcgcccctctaccataccccgcggcaatccag

SEQ ID NO: 85233 - DNA, 80 bp, synthetic construct
  source 1..80: mol_type = other DNA
accagaacttagacaccctgcgagctttccccccgtcctgccaaattagtgcctaccatcagctggctgaggagctgggc

SEQ ID NO: 85234 - DNA, 80 bp, synthetic construct
  source 1..80: mol_type = other DNA
tacggtgtctgacagcgtcctaattttcgaacttacggacatagttcactgccgcatggctgcccccagtcaacgtaagg

SEQ ID NO: 85235 - DNA, 80 bp, synthetic construct
  source 1..80: mol_type = other DNA
cggtcctttcgacactcgttggtaggtacggccgccgaacgaagttgcacgaagcggcccactctgatgttcgcgagtct

SEQ ID NO: 85236 - DNA, 80 bp, synthetic construct
  source 1..80: mol_type = other DNA
gaagggccaggacggctctgccgtgctcgagcttgatctctgtagccgtgacgtctcgcgtattacattcttccagaatg

SEQ ID NO: 85237 - DNA, 80 bp, synthetic construct
  source 1..80: mol_type = other DNA
ggtttttggaagaagcattctggtgagcccggtactctcctctggaacactgtctggaacatggcgattatagcacactg

SEQ ID NO: 85238 - DNA, 80 bp, synthetic construct
  source 1..80: mol_type = other DNA
gcaatgcggccactctgatagctggttgcggattgaaactgaaggttgattatcggcctataggtctgtatgccggcgtt

SEQ ID NO: 85239 - DNA, 80 bp, synthetic construct
  source 1..80: mol_type = other DNA
cacccgtgtgtcccgctatactagcacagcccgacaccgtctgcgccgtggcgccgatggtacagccgagctcacaacca

SEQ ID NO: 85240 - DNA, 80 bp, synthetic construct
  source 1..80: mol_type = other DNA
cgtcgtaacttatgagggtgataccagtgcgggctataaccatgatgtgtctatactccgcgcatggatccgcaccacta

SEQ ID NO: 85241 - DNA, 80 bp, synthetic construct
  source 1..80: mol_type = other DNA
ggactcccgagtagttatacaagactatgacaaccaacatgagcaggaccggcctaccccgtcgccggccccgtcccgtc

SEQ ID NO: 85242 - DNA, 80 bp, synthetic construct
  source 1..80: mol_type = other DNA
ctttttcagtccttcgagctaatgatgttttgtggctctctctgaccgcggctgaatatgaccaaactacttatggctcg

SEQ ID NO: 85243 - DNA, 80 bp, synthetic construct
  source 1..80: mol_type = other DNA
tgtttctgcagtgggtgttcttgctccgcactctgccttagctgtacttgaggacactatcgactaccccgcccgtgccc

SEQ ID NO: 85244 - DNA, 80 bp, synthetic construct
  source 1..80: mol_type = other DNA
gtaatctcggcctgcagggttgcgctttccagtccactgttgctgagcttcagcgtcttaaaatgaaggtaggcaagacc

SEQ ID NO: 85245 - DNA, 80 bp, synthetic construct
  source 1..80: mol_type = other DNA
attggggaaattgaaccaattgacattgtctggtggatgatcgggatactgcctgacttgacccccaccacaaagatgtc

SEQ ID NO: 85246 - DNA, 80 bp, synthetic construct
  source 1..80: mol_type = other DNA
tcacgatgagcttctggatgaccctgcttgtcacagatgtataatattatatcatcctttttgcaaattgctgtcacatg

SEQ ID NO: 85247 - DNA, 80 bp, synthetic construct
  source 1..80: mol_type = other DNA
taaacaaggcttagtgaatccaagagcatttaagtctttgagaaatttatgggattacatgataaattacacaaagggag

SEQ ID NO: 85248 - DNA, 80 bp, synthetic construct
  source 1..80: mol_type = other DNA
gcacattttcataatttcgtcattatgggatgatcttctgtcctttaaaatttccatagaatccatgccagaacgtttat

SEQ ID NO: 85249 - DNA, 80 bp, synthetic construct
  source 1..80: mol_type = other DNA
agctcgaaggttatggaaaatttgatgatgtgctaggaagccttctagtccataggtttagaactggcgagcatttgcag

SEQ ID NO: 85250 - DNA, 80 bp, synthetic construct
  source 1..80: mol_type = other DNA
gattcagaggtaagtgcaatcctccaagagttgtgcatggacaaatctgctctgctggtgcctttatcatttgtgccgga

SEQ ID NO: 85251 - DNA, 80 bp, synthetic construct
  source 1..80: mol_type = other DNA
tgtgtctgcgtgggttggccggtgtgtggtctccctgtgtcgggctgcctttcgtgctgggctcgggtgtcactcctcgt

SEQ ID NO: 85252 - DNA, 80 bp, synthetic construct
  source 1..80: mol_type = other DNA
gtttgccttgtttgtaacagtcccacgaaggagggttgtgagatggacagcacactaaaatgcgcaacaaaatgcctaaa

SEQ ID NO: 85253 - DNA, 80 bp, synthetic construct
  source 1..80: mol_type = other DNA
aattttctgaactttacgaaactctcgatgacagagatgacatctcagtattaagcaaggaggcagttgaatcttgcccc

SEQ ID NO: 85254 - DNA, 80 bp, synthetic construct
  source 1..80: mol_type = other DNA
tttttggattgcgctttcctcagctccatcctgtggaagaatgggccaaatagtgacgatgtttgaggctctgcctcaca

SEQ ID NO: 85255 - DNA, 80 bp, synthetic construct
  source 1..80: mol_type = other DNA
tcatcacgagcatcaaagctgtatacaatttcgccacctgcgggatacttgcattaatcagcttcctcttcctggctggc

SEQ ID NO: 85256 - DNA, 80 bp, synthetic construct
  source 1..80: mol_type = other DNA
gtatatttgattagcatctttctgcatcttttaaagataccaacacacagacacataaagggtggctcatgcccaaagcc

SEQ ID NO: 85257 - DNA, 80 bp, synthetic construct
  source 1..80: mol_type = other DNA
aggtcctgtggcatgtatggtcttagtgggcctgatgtttacaagggagtttaccaactcaagtcagtggagtttgacat

SEQ ID NO: 85258 - DNA, 80 bp, synthetic construct
  source 1..80: mol_type = other DNA
gctgctccagccgctggtctgggtgagttgaccataggcttctcatttgataaatcaattgttgtgttctcccacgctct

SEQ ID NO: 85259 - DNA, 80 bp, synthetic construct
  source 1..80: mol_type = other DNA
gaacttctggattggagttaacctttacgaatgaatccattatcgcccacaatttttgcaatctgacttctgctttcaac

SEQ ID NO: 85260 - DNA, 80 bp, synthetic construct
  source 1..80: mol_type = other DNA
tttcaacaatggcatcactattcaatacaacctgacactttctgatgcgcagagtgctctgagtcaatgtaggaccttca

SEQ ID NO: 85261 - DNA, 80 bp, synthetic construct
  source 1..80: mol_type = other DNA
ggggaagagtcctggatatgttcagaactgcttttggaggaaagtacatgaggagtggctggggttggacaggttcagat

SEQ ID NO: 85262 - DNA, 80 bp, synthetic construct
  source 1..80: mol_type = other DNA
gtgtgtttgggtgtgtgggtagataatcactcactgagtgacatcaacatcatggcgtctcaaggcaccaaacgatctta

SEQ ID NO: 85263 - DNA, 80 bp, synthetic construct
  source 1..80: mol_type = other DNA
gggtgggactcctcaagcgaaagcaggcaaaccatttgaatggatgtcaatccgactttacttttcttaaaagtgccagc

SEQ ID NO: 85264 - DNA, 80 bp, synthetic construct
  source 1..80: mol_type = other DNA
ggtagaccacgtacgttgctcggcgtacgtggtcgatgccatggaggcccaccagtttatcaaggctcctggcatcacaa

SEQ ID NO: 85265 - DNA, 80 bp, synthetic construct
  source 1..80: mol_type = other DNA
atgctctttggtgccacacttgacgaccaggcattctgctgctcccgtttgatgacgtaccttagggggataagctataa

SEQ ID NO: 85266 - DNA, 80 bp, synthetic construct
  source 1..80: mol_type = other DNA
agtcacggtcggagccctggttgctaacgagggttggagtgcgtcggaggacgcactcaccgctgtgattacagctgcgt

SEQ ID NO: 85267 - DNA, 80 bp, synthetic construct
  source 1..80: mol_type = other DNA
atctcactatttgccaccaacggtacctccgtacacaagctatctctaagggcatgcggaggctggaattggagcatgca

SEQ ID NO: 85268 - DNA, 80 bp, synthetic construct
  source 1..80: mol_type = other DNA
cagaagtttattacaaggctttacagctggctttttgagaagtcgggccgtgaatacatccctggtcgccaactgcaatt

SEQ ID NO: 85269 - DNA, 80 bp, synthetic construct
  source 1..80: mol_type = other DNA
gctgtagtggtacggccgtttctttcccgcttgcagactgagattcttattaatttgatgcagcctcgccagcttgtttt

SEQ ID NO: 85270 - DNA, 80 bp, synthetic construct
  source 1..80: mol_type = other DNA
tatgcacagtgccgacgttggctctctgctggatttcatctcgaccctcgtgtgcttgtctttgatgaggcggcaccctg

SEQ ID NO: 85271 - DNA, 80 bp, synthetic construct
  source 1..80: mol_type = other DNA
ccgctgcaggagtcccctccagaaggctgctagccggttctgttgcttcatgcggtggctgggtcaggagtgcaactgtt

SEQ ID NO: 85272 - DNA, 80 bp, synthetic construct
  source 1..80: mol_type = other DNA
gctctgaggttgaccctgcagagccggctgccccagatattgatggtatctatacggtctcgggggcacaactgtccacg

SEQ ID NO: 85273 - DNA, 80 bp, synthetic construct
  source 1..80: mol_type = other DNA
ttgtatcgggcccttggccttcccactgatctggtcgctcgtgcctcccggctcgttgctactgttgaactgacttctca

SEQ ID NO: 85274 - DNA, 80 bp, synthetic construct
  source 1..80: mol_type = other DNA
tccaggccgcatcgagtgtaagacagcacttggtaataaaacctttcttacgagcttcctcgatggttcccgtctggagg

SEQ ID NO: 85275 - DNA, 80 bp, synthetic construct
  source 1..80: mol_type = other DNA
ctaacggcccggaggagtttatactatcttttgatgctgatcgtcaggccatgtcggccggccctaacagccttacttat

SEQ ID NO: 85276 - DNA, 80 bp, synthetic construct
  source 1..80: mol_type = other DNA
gagagaacacctgctggtttgcgggtccacattgtttccaatgggcaagattgtgttgccaccttcccgcctggtcccgc

SEQ ID NO: 85277 - DNA, 80 bp, synthetic construct
  source 1..80: mol_type = other DNA
acctgcagctgctcccggcgaggtcactgcattttgttcagcgttgtatcggtttaaccggtccatccaacgacattcac

SEQ ID NO: 85278 - DNA, 80 bp, synthetic construct
  source 1..80: mol_type = other DNA
ttgtaggagccctctggtatcatccagagggcttacttggtcttttcccgcccttttcgccgaatcatatctgggattct

SEQ ID NO: 85279 - DNA, 80 bp, synthetic construct
  source 1..80: mol_type = other DNA
tcgccccgaggttttctggaatcatcctatacagcgggttatccacaatgaactagaacaatattgccgtgcccgtgctg

SEQ ID NO: 85280 - DNA, 80 bp, synthetic construct
  source 1..80: mol_type = other DNA
gccaaccctttttgcggggagagcactctctacacccgtacctggtccgtctctggtttttccagcgattttgtaccagt

SEQ ID NO: 85281 - DNA, 80 bp, synthetic construct
  source 1..80: mol_type = other DNA
cgggacgtctgctctggcgcccgaacagcctggcgtcagaactgtttgctctcccccgcccgcctctgagcagggcgatc

SEQ ID NO: 85282 - DNA, 80 bp, synthetic construct
  source 1..80: mol_type = other DNA
tacagccaatccaaattccccggcctgttcttcagcctgggccgagtgttcctgcgtctgtgggttcagtaagggcgcct

SEQ ID NO: 85283 - DNA, 80 bp, synthetic construct
  source 1..80: mol_type = other DNA
actacccaggggcttgtcccaccggtctcccgcaaccgccgccttcttttcacttatcctgatggagccaaagtgtactc

SEQ ID NO: 85284 - DNA, 80 bp, synthetic construct
  source 1..80: mol_type = other DNA
gggctcgctgtttgagtccgagtgcacctggctagttaatgcttctaaccctggccatcgcccaggtggcggtctttgtc

SEQ ID NO: 85285 - DNA, 80 bp, synthetic construct
  source 1..80: mol_type = other DNA
atgcatttttccaacgctttcctgagtcttttgatcatactaaatttatcatgcgtgagggtcttgccgcctacaccctt

SEQ ID NO: 85286 - DNA, 80 bp, synthetic construct
  source 1..80: mol_type = other DNA
gcgccccggcccattattcatgctgtagcccctgattaccgggtcgaacataacccgaaaaggcttgaagctgcctaccg

SEQ ID NO: 85287 - DNA, 80 bp, synthetic construct
  source 1..80: mol_type = other DNA
tgagacttgctctcgccttgggacagcagcctatccattgcttggctccggaatctatcaggtcccggttggtcccagct

SEQ ID NO: 85288 - DNA, 80 bp, synthetic construct
  source 1..80: mol_type = other DNA
ttgatgcctgggagcgtaaccatcgcccaggggatgagctttatctcactgatgctgcagctacctggtttgagagcaat

SEQ ID NO: 85289 - DNA, 80 bp, synthetic construct
  source 1..80: mol_type = other DNA
aaaccctctcagcctgctttgaccatcactgaagatgttgcgaggactgctaaccttgccctcgaaatagacgctgccac

SEQ ID NO: 85290 - DNA, 80 bp, synthetic construct
  source 1..80: mol_type = other DNA
gtcgttgccttgaggttggggcccatcctcgctctataaatgacaaccctaatgttttacatcggtgttttctccgccct

SEQ ID NO: 85291 - DNA, 80 bp, synthetic construct
  source 1..80: mol_type = other DNA
cgaggtcggccgagcttgttctggctgccgtgtcgaccccggtgtggttcactaccagttcactgcaggtgttcccgggt

SEQ ID NO: 85292 - DNA, 80 bp, synthetic construct
  source 1..80: mol_type = other DNA
ctggtaaatcgcggtcgattcaacagggtgacgtcgacgttgttgttgtcccgacgcgggaacttcgggatagctggcgt

SEQ ID NO: 85293 - DNA, 80 bp, synthetic construct
  source 1..80: mol_type = other DNA
cgtcgcggttttgcggcttttaccccgcacacagcagcccgggtgacccgtggccgccgagttgtgatcgatgaagcccc

SEQ ID NO: 85294 - DNA, 80 bp, synthetic construct
  source 1..80: mol_type = other DNA
atctctgccaccccatcttctgcttctacatatgcagagggctgcctccgttcacctgcttggcgacccgaatcaaatcc

SEQ ID NO: 85295 - DNA, 80 bp, synthetic construct
  source 1..80: mol_type = other DNA
ctgctatagactttgagaacacagggttggtcccggcaatccgccccgagcttgtccctacaagctggtggcacactacc

SEQ ID NO: 85296 - DNA, 80 bp, synthetic construct
  source 1..80: mol_type = other DNA
catcgttgcccggcggatgtttgtgagctaatccgtggggcctaccctaaaatccaaactgccagccgcgttctgcgctc

SEQ ID NO: 85297 - DNA, 80 bp, synthetic construct
  source 1..80: mol_type = other DNA
gcttttctggggtgagcccccggttggccagaaactcgtatttacacaggcagctaaggccgccaaccctggtgcgatca

SEQ ID NO: 85298 - DNA, 80 bp, synthetic construct
  source 1..80: mol_type = other DNA
cagttcatgaagcgcagggagcgacatttactgctactacaatcattgccacagctgatgctcgggggcttattcagtcc

SEQ ID NO: 85299 - DNA, 80 bp, synthetic construct
  source 1..80: mol_type = other DNA
tcacgggcgcatgcaattgtcgctcttactcgtcacactgagaagtgtgtggtgcttgatgccccaggccttcttaagga

SEQ ID NO: 85300 - DNA, 80 bp, synthetic construct
  source 1..80: mol_type = other DNA
gatcgggatatctgattctattgttaataatttctttttgtccggtggggaggtcggtcataatagaccatcagttatac

SEQ ID NO: 85301 - DNA, 80 bp, synthetic construct
  source 1..80: mol_type = other DNA
cccgtggcactcctgatcttaatgtcgccacgttagatgccttcccaccttcttgccagatcagcgcttatcaccagctt

SEQ ID NO: 85302 - DNA, 80 bp, synthetic construct
  source 1..80: mol_type = other DNA
gctgaggaactcggccaccgccctcaacctgttgctgctgttctcccgccctgccccgaactagaacaggggttgcttta

SEQ ID NO: 85303 - DNA, 80 bp, synthetic construct
  source 1..80: mol_type = other DNA
tatgcctcaggagctcaccacctccgatagcgtcctggtgtttgagcttactgatatagtccattgtcggatggctgcgc

SEQ ID NO: 85304 - DNA, 80 bp, synthetic construct
  source 1..80: mol_type = other DNA
caagccagcgtaaagctgtgctctccacccttgttggcaggtacggccgccgcaccaggctctatgaagctgcccactcg

SEQ ID NO: 85305 - DNA, 80 bp, synthetic construct
  source 1..80: mol_type = other DNA
gatgttcgtgagtctctagctaagtttattcccaccattggccctgtgcgggctactacttgcgaactttatgagcttgt

SEQ ID NO: 85306 - DNA, 80 bp, synthetic construct
  source 1..80: mol_type = other DNA
tgaagccatggtggagaagggccaggatgggtcggccgtcctagaattggacctgtgtgcccgtgatgtgtctcgcataa

SEQ ID NO: 85307 - DNA, 80 bp, synthetic construct
  source 1..80: mol_type = other DNA
catttttccagaaggattgcaataagttcaccactggcgagacgattacccacggtaaggtcggtcaaggtatatctgcg

SEQ ID NO: 85308 - DNA, 80 bp, synthetic construct
  source 1..80: mol_type = other DNA
tggagtaaaacattttgcgccttatttgggccttggttccgcgccattgaaaaacagatccttgccctccttcctcagaa

SEQ ID NO: 85309 - DNA, 80 bp, synthetic construct
  source 1..80: mol_type = other DNA
tgtgttctacgctgatgcttatgatgattctgtcttctctgcagccgtgtctggtgcaaaagctagcatggtttttgaga

SEQ ID NO: 85310 - DNA, 80 bp, synthetic construct
  source 1..80: mol_type = other DNA
gtctcccgcccgttgatcgtacttattgtttcgacggcttttcccggtgttctttcgccgctgagactggagttgccctg

SEQ ID NO: 85311 - DNA, 80 bp, synthetic construct
  source 1..80: mol_type = other DNA
gtatgcccgcctggctaatccgtctttaccatcttgttcgctctgcttggatcctccaggcacctaaagaatctctgaag

SEQ ID NO: 85312 - DNA, 80 bp, synthetic construct
  source 1..80: mol_type = other DNA
ggtttctggaagaagcattctggtgagcccggtacgttgctttggaatactgtctggaacatggctattatagcgcattg

SEQ ID NO: 85313 - DNA, 80 bp, synthetic construct
  source 1..80: mol_type = other DNA
ttatgagttccgcaacctccaggttgccgctttcaaaggcgatgactctatggtgctctgtagtgattaccgccagagcc

SEQ ID NO: 85314 - DNA, 80 bp, synthetic construct
  source 1..80: mol_type = other DNA
cgcaacgccgccacccttattgccggttgtggcctaaaactgaaggtggattatcgaccgatcggtctgtatgctggtgt

SEQ ID NO: 85315 - DNA, 80 bp, synthetic construct
  source 1..80: mol_type = other DNA
cgttgtggctcctggccttggggccctcccagacgtcgtccggtttgccgggagactgtctgagaaaaattggtgccccg

SEQ ID NO: 85316 - DNA, 80 bp, synthetic construct
  source 1..80: mol_type = other DNA
atccagagcgtgctgaacagcttcgtcttgctgtctgtgatttccttcggaagttaacgaatgttgctcagttgtgtgtg

SEQ ID NO: 85317 - DNA, 80 bp, synthetic construct
  source 1..80: mol_type = other DNA
gatgttgtttcacgtgtttatggtgtcagccctggtttggtgcataaccttattggtatgcttcagaccattgccgacgg

SEQ ID NO: 85318 - DNA, 80 bp, synthetic construct
  source 1..80: mol_type = other DNA
taaggcccattttactgagacaattaaacctgttcttgaccttacagacgccattatacagcggcgtgaatgaataacat

SEQ ID NO: 85319 - DNA, 80 bp, synthetic construct
  source 1..80: mol_type = other DNA
tactctttacatgacctgtggccggccgacgtcgccgaggcgatggcccggcacggcatgacccgtctgtatgcagttct

SEQ ID NO: 85320 - DNA, 80 bp, synthetic construct
  source 1..80: mol_type = other DNA
tcgccgccgagctgccccttccggggctgcgccgctgaccgctgttgcccctgccccaggtactgcccccgtcccagatg

SEQ ID NO: 85321 - DNA, 80 bp, synthetic construct
  source 1..80: mol_type = other DNA
ttgactcgcgtggcgctgttttgcgccgccagtataatttgtcaacctcacctcttacatcttcggttgcttctgggaca

SEQ ID NO: 85322 - DNA, 80 bp, synthetic construct
  source 1..80: mol_type = other DNA
gaggcgtccaactatgctcaataccgcatagtccgtgcgaccattcgttaccgccctttggttccgaacgctgttggggg

SEQ ID NO: 85323 - DNA, 80 bp, synthetic construct
  source 1..80: mol_type = other DNA
cggttgacatgaattcaatcacttcgactgacgtccggattgttgttcaacctggtctcgcttccgaactagtgatccct

SEQ ID NO: 85324 - DNA, 80 bp, synthetic construct
  source 1..80: mol_type = other DNA
agtgagcgcctccattatcgcaatcaaggttggcgctctgttgagacatctggggttgctgaggaggaagcgacatccgg

SEQ ID NO: 85325 - DNA, 80 bp, synthetic construct
  source 1..80: mol_type = other DNA
tctagttatgctttgtgtccacggttcccctgttaattcgtatactaatacaccttacactggtgctttaggcttgcttg

SEQ ID NO: 85326 - DNA, 80 bp, synthetic construct
  source 1..80: mol_type = other DNA
acttcgcccttgagcttgagtttcgcaatcttacgcccggcaatactaacacccgtgtctctcgttattctagtactgcc

SEQ ID NO: 85327 - DNA, 80 bp, synthetic construct
  source 1..80: mol_type = other DNA
ccacctcccacccgaggttctcctgcctcctggcacttatcatactacctcatacctactgattcatgacggccagcgcg

SEQ ID NO: 85328 - DNA, 80 bp, synthetic construct
  source 1..80: mol_type = other DNA
cgtcaccgcttgaaacgtggtgccgatggtacggctgttctaacgaccacagcagccactaggttcatgaaggatctgca

SEQ ID NO: 85329 - DNA, 80 bp, synthetic construct
  source 1..80: mol_type = other DNA
ctttaccggcacgaatggtttgggtgaggtcggtcgtggcatagcgttaaccctgttcaatcttgctgacactctccttg

SEQ ID NO: 85330 - DNA, 80 bp, synthetic construct
  source 1..80: mol_type = other DNA
gcgagtcacgtgttgtcattcaggattatgataatcagcatgaacaggatcggcccaccccgtctccggctccctctcgt

SEQ ID NO: 85331 - DNA, 80 bp, synthetic construct
  source 1..80: mol_type = other DNA
ccattttctgttcttcgtgctaatgacgttctctggctttcactgactgccgccgagtacgaccaagcgacttatgggtc

SEQ ID NO: 85332 - DNA, 80 bp, synthetic construct
  source 1..80: mol_type = other DNA
ctccactgacccggtttatgtctctgatactgttacttttgtcaatgttgccactggcgctcaggccgtggctcgtactc

SEQ ID NO: 85333 - DNA, 80 bp, synthetic construct
  source 1..80: mol_type = other DNA
ttgactggaccaaggtcacgctggacggtcaacctttaaagaccatcaatcagtattctaagacattcttcgtcctcccc

SEQ ID NO: 85334 - DNA, 80 bp, synthetic construct
  source 1..80: mol_type = other DNA
cttcgcggcaagttatctttttgggaggctggtactgttaaggccggctacccgtataattataacaccacagctagtga

SEQ ID NO: 85335 - DNA, 80 bp, synthetic construct
  source 1..80: mol_type = other DNA
tcatatactaatcgagaacgcagcaggtcaccgtgttgcgatctctacttacaccactagtcttggtgctggcccggttg

SEQ ID NO: 85336 - DNA, 80 bp, synthetic construct
  source 1..80: mol_type = other DNA
ctgtgatcacatatgagggtgacaccagcgccggttataaccatgatgttgccatactccgtgcttgggtccgcacaacc

SEQ ID NO: 85337 - DNA, 80 bp, synthetic construct
  source 1..80: mol_type = other DNA
ccatttcttgtgtaggtgtgctagcaccccatgccgcgcttgctgtactggaggatactatagaccatccggctcgtgcc

SEQ ID NO: 85338 - DNA, 80 bp, synthetic construct
  source 1..80: mol_type = other DNA
catacatatgatgacttctgccctgagtgccgtacactcggtctccagggctgcgcatttcagtccaccattgctgaatt

SEQ ID NO: 85339 - DNA, 80 bp, synthetic construct
  source 1..80: mol_type = other DNA
gcaacgtcttaagatgaaggtgggtaaaactcgggagtactaatctattctctctgtgccccccttctttgtcttcttta

SEQ ID NO: 85340 - DNA, 80 bp, synthetic construct
  source 1..80: mol_type = other DNA
ggagtactaatctattctctctgtgccccccttctttgtcttctttattttccttttctgcgtttcgcgctccctgaaaa

SEQ ID NO: 85341 - DNA, 80 bp, synthetic construct
  source 1..80: mol_type = other DNA
aaggtcactgggaaccaccctctggttattgagagggtccgagctatcggctgtcatttcgttctgctccttactgcggc

SEQ ID NO: 85342 - DNA, 80 bp, synthetic construct
  source 1..80: mol_type = other DNA
acctgaaccatcgcctatgccgtatgtaccataccctcgatctacagaggtttatgtgcggtcgatatttggccccggcg

SEQ ID NO: 85343 - DNA, 80 bp, synthetic construct
  source 1..80: mol_type = other DNA
ggtcgccctctctgtttccgtcagcctgttcgactaaatctacctttcatgctgtcccagtccatatctgggatcggctt

SEQ ID NO: 85344 - DNA, 80 bp, synthetic construct
  source 1..80: mol_type = other DNA
cctgccccaggtactgcccccgtcccagatgttgactcgcgtggcgctgttttgcgccgccagtataatttgtcaacctc

SEQ ID NO: 85345 - DNA, 80 bp, synthetic construct
  source 1..80: mol_type = other DNA
gataacccctcactgtgcactgatggattgtatcatgttcgatgcagcagtgtcgggaggattgagcacacaggttttga

SEQ ID NO: 85346 - DNA, 80 bp, synthetic construct
  source 1..80: mol_type = other DNA
agttgctctctaccaaccgagctctggttgttacattcacttctttcgtgagcctactgatttaaaacagtttagacaag

SEQ ID NO: 85347 - DNA, 80 bp, synthetic construct
  source 1..80: mol_type = other DNA
aaggagaaggaacattatcctcaacaggggcaatgacgagaacccacgaggcccagtaagtcatgagcacattgagtggg

SEQ ID NO: 85348 - DNA, 80 bp, synthetic construct
  source 1..80: mol_type = other DNA
tttattcaacagtggcgagttccctagcactggcaatcatggtggctggtctatctttatggatgtgctccaatgggtcg

SEQ ID NO: 85349 - DNA, 80 bp, synthetic construct
  source 1..80: mol_type = other DNA
tgttgagttttatataataccacgatcgcaagaatctaagtgtagtgaatatataaatactggattaccaccaatgcaga

SEQ ID NO: 85350 - DNA, 80 bp, synthetic construct
  source 1..80: mol_type = other DNA
ttgtggattctatggacaacctggtgtacctgtaagatggaagagatgagacccttgccggggcccccgtgacccaccgc

SEQ ID NO: 85351 - DNA, 80 bp, synthetic construct
  source 1..80: mol_type = other DNA
attgtaaggacttgttggagttattgcttccagctttctgtggtttcccacctgattctaaatcaacaacggtattttcc

SEQ ID NO: 85352 - DNA, 80 bp, synthetic construct
  source 1..80: mol_type = other DNA
attgcgctttgctttaatcaacttattttagcggacagtccaaatcctctgctgtgcatacgcaacagaacagtccggca

SEQ ID NO: 85353 - DNA, 80 bp, synthetic construct
  source 1..80: mol_type = other DNA
agaccctcactaccccatctctcccagttcgagccccttggttaccaccagtcattcctatcatattcaggagagcccgt

SEQ ID NO: 85354 - DNA, 80 bp, synthetic construct
  source 1..80: mol_type = other DNA
tgacatcccagaccctcactaccccatctctcccagttcgagccccttggttaccaccactcattcctatcatattcagg

SEQ ID NO: 85355 - DNA, 80 bp, synthetic construct
  source 1..80: mol_type = other DNA
gaggcactcattgctggactattctgttaaaaagtcgattaaagcaaagcgcaatccaatagcctaggatccactctgcg

SEQ ID NO: 85356 - DNA, 80 bp, synthetic construct
  source 1..80: mol_type = other DNA
attttggattgcgcatttcttggagccaaagaggggagcgtcttacccaaacatggggcagatagtgacattcttccaag

SEQ ID NO: 85357 - DNA, 80 bp, synthetic construct
  source 1..80: mol_type = other DNA
gagactctaagagtctcttgatgtcctctgacccttggcaggtgattaccatgttccgtggaagtgcttctattactgca

SEQ ID NO: 85358 - DNA, 80 bp, synthetic construct
  source 1..80: mol_type = other DNA
gagagtcatgagctgtgagtaggttagtcctgctgggaaaccagccgtctgcaatgatctgttggattccttgctcccag

SEQ ID NO: 85359 - DNA, 80 bp, synthetic construct
  source 1..80: mol_type = other DNA
agacccttacaatgccgtctcttccagcatttgccccttggccaccactagtcatgccaatcatgtttagcagggccctc

SEQ ID NO: 85360 - DNA, 80 bp, synthetic construct
  source 1..80: mol_type = other DNA
cagttcgacgaggttgttgactgcctgatttaagtctctgaggcgtttcaggtcactatcatccctcctctctttgcgca

SEQ ID NO: 85361 - DNA, 80 bp, synthetic construct
  source 1..80: mol_type = other DNA
gctcattcctaccactgagttgtgaacaccactgcacttagatctacagggatgagttgcacctaaagcgcaatccaata

SEQ ID NO: 85362 - DNA, 80 bp, synthetic construct
  source 1..80: mol_type = other DNA
atttgggattgcgcatcttggatttcttttgactaagataccacatttacaatgggtcaaatagtgaccttcttccagga

SEQ ID NO: 85363 - DNA, 80 bp, synthetic construct
  source 1..80: mol_type = other DNA
ataaatccttaaattgatcccacacatcgttctcgaacttccttgcatcagccttgctcaatgagatgtcaattagcttt

SEQ ID NO: 85364 - DNA, 80 bp, synthetic construct
  source 1..80: mol_type = other DNA
atatctttcctgtcctgtgagtccaaaagctttctaatgtcatcagagccttgacaagtcagcaccatattacgtggtag

SEQ ID NO: 85365 - DNA, 80 bp, synthetic construct
  source 1..80: mol_type = other DNA
ccctcaaagtcatcaactgagaataagtcaaaccagtagcaaatcccgaagactgcagcatcttgttggatccattgttc

SEQ ID NO: 85366 - DNA, 80 bp, synthetic construct
  source 1..80: mol_type = other DNA
tcaagaacatcaattgttgggagagcatgggaaaatactgtggtagatcttgagtcaaacaaaaatcagcctaaggttgg

SEQ ID NO: 85367 - DNA, 80 bp, synthetic construct
  source 1..80: mol_type = other DNA
atactctgactacaccatctcggctaggttggtttccctgactaccgccagccattccaatcatgtttagaagtgctctc

SEQ ID NO: 85368 - DNA, 80 bp, synthetic construct
  source 1..80: mol_type = other DNA
ttccactagattgttgacggcctgattcaagtctctaagcctctttaaatcattatcatctcttttctgtttacgcatga

SEQ ID NO: 85369 - DNA, 80 bp, synthetic construct
  source 1..80: mol_type = other DNA
ctaggcattaaggctatcctttataactgtcccttaattataaactattgttggcatctgttctccggcgccctgtcata

SEQ ID NO: 85370 - DNA, 80 bp, synthetic construct
  source 1..80: mol_type = other DNA
ggagttcagggactatagggtggaggtctggtgttttctcctgttctggcgggtggtgctgttgggacgattgatggttt

SEQ ID NO: 85371 - DNA, 80 bp, synthetic construct
  source 1..80: mol_type = other DNA
acaagtcgccatcccacttagccactcattctggaaaccacaaccacctcacccacagctaagtatggaggaagacatgg

SEQ ID NO: 85372 - DNA, 80 bp, synthetic construct
  source 1..80: mol_type = other DNA
gtctggtgtcgcctcctgctccggtggggggtgctgttgggacaactgatggttttagtcttgttgggagaggcatttta

SEQ ID NO: 85373 - DNA, 80 bp, synthetic construct
  source 1..80: mol_type = other DNA
acaaactgtcatcccacctaaccatccactttggaagctgcaaccacctcacccacagccaaacatggaggaagacatgg

SEQ ID NO: 85374 - DNA, 80 bp, synthetic construct
  source 1..80: mol_type = other DNA
gttcttgaaggtcgataagagtcaattgctcagtgatttcaataatctgtatgctgataaattggtcgcagaagacaatg

SEQ ID NO: 85375 - DNA, 80 bp, synthetic construct
  source 1..80: mol_type = other DNA
ctaggcattaaggctatcctttataattgtcttttaattataaactgttgttggcatttgttttccggcaccttgtcaca

SEQ ID NO: 85376 - DNA, 80 bp, synthetic construct
  source 1..80: mol_type = other DNA
tcgagcagaaatcaaatcctcaactcaatatttcacaggaccattttgagagccactactgctctgaaggatgttgggat

SEQ ID NO: 85377 - DNA, 80 bp, synthetic construct
  source 1..80: mol_type = other DNA
tgaggttgtctcacactagaacacatgaacctatggtggaagagagagtggtgagtactagtgatgctgttgacaacttc

SEQ ID NO: 85378 - DNA, 80 bp, synthetic construct
  source 1..80: mol_type = other DNA
agaacatgcgaggagttgattgaaaaagacgagcgtattgaggacatcgagtagatcctctgaggcggacggctcccccg

SEQ ID NO: 85379 - DNA, 80 bp, synthetic construct
  source 1..80: mol_type = other DNA
gtagatcctctgaggcggacggctcccccgggcgggccgccggcaggaggtacccccgggaagtgtcgtgtggtcgaggg

SEQ ID NO: 85380 - DNA, 80 bp, synthetic construct
  source 1..80: mol_type = other DNA
tcgggccatcctctgcttctgaggctttggcctgtttgttccccatctgctgaggttcgggatgttgggcctcaaggaag

SEQ ID NO: 85381 - DNA, 80 bp, synthetic construct
  source 1..80: mol_type = other DNA
ataaactgccatcccacttagccatccatcttggaagctgcaaccacctcatccacagccaagcatggaggaagacatgg

SEQ ID NO: 85382 - DNA, 80 bp, synthetic construct
  source 1..80: mol_type = other DNA
cttgaaggtcgaaaagagtcaattactcagtgatttcaataatctgtatgctgataagttggtcgttgaagacaatgttg

SEQ ID NO: 85383 - DNA, 80 bp, synthetic construct
  source 1..80: mol_type = other DNA
ccgactgtggtatggacaccctcgctgaactgttgaagacaatggatgattgggtggagttcaaagggtatgctttgtgc

SEQ ID NO: 85384 - DNA, 80 bp, synthetic construct
  source 1..80: mol_type = other DNA
ccggggtggcccccggcggggggtccccccgggtggtgtcggagggttgagagaggaagattgtgtgaattttggttgat

SEQ ID NO: 85385 - DNA, 80 bp, synthetic construct
  source 1..80: mol_type = other DNA
ttgagggagtgagattgtgggaattttggtggattaggggctatatggtggaggatttgtgatgttggcctctctgatgg

SEQ ID NO: 85386 - DNA, 80 bp, synthetic construct
  source 1..80: mol_type = other DNA
aggcatttacgatatcttttaaggtattgttagtgaaaggttggtatttgggtgtcatggaggatgacatagcttatgtg

SEQ ID NO: 85387 - DNA, 80 bp, synthetic construct
  source 1..80: mol_type = other DNA
aaggtcaaatcattgaggatattaaacactagaagaaaattgttattggttttcgacgtgatcattcttctagcacacag

SEQ ID NO: 85388 - DNA, 80 bp, synthetic construct
  source 1..80: mol_type = other DNA
ggcagatcgatcaagatgtggaaaagaggactccatggggtggttagggtctagttttattagtgtcaatgaccgtttag

SEQ ID NO: 85389 - DNA, 80 bp, synthetic construct
  source 1..80: mol_type = other DNA
tttctctagaatcgacaaaaagagatctcaagaagtggttagagagaaggttgagctctgaacttaaaaaacatgaaggt

SEQ ID NO: 85390 - DNA, 80 bp, synthetic construct
  source 1..80: mol_type = other DNA
ccgactctctcaccttcacaacatagaaataagatcttaaagtctgtcattcagaaagctttggcaaaggccaacgatgc

SEQ ID NO: 85391 - DNA, 80 bp, synthetic construct
  source 1..80: mol_type = other DNA
cctgaaagatgttggtgtgaggcctgatcactatggagtagacatggaggtactaaactgtgatgtttatgatgcggtga

SEQ ID NO: 85392 - DNA, 80 bp, synthetic construct
  source 1..80: mol_type = other DNA
tggatcttgaggtctcaggtgtaacacccactatgaactatcaaaagtcccaggatgataggtttccttatgaaatggga

SEQ ID NO: 85393 - DNA, 80 bp, synthetic construct
  source 1..80: mol_type = other DNA
gttgttgatgtgttggacagtgcagatctaagcaggctttcatctctgagcttagctattgtgaattctatgaaaacctc

SEQ ID NO: 85394 - DNA, 80 bp, synthetic construct
  source 1..80: mol_type = other DNA
atcaactgttaaattgagacaaaatgagtttggggcagctaggtatcaaactgtgcgatgcaaggaagcttattgccaag

SEQ ID NO: 85395 - DNA, 80 bp, synthetic construct
  source 1..80: mol_type = other DNA
aattctttgtggatggtgttaatttcaaactactttaccaaaaaacaggtgagtgttcgaaatgttatgctataaataat

SEQ ID NO: 85396 - DNA, 80 bp, synthetic construct
  source 1..80: mol_type = other DNA
ttttctgttggtgaagtctgttctttctatgcagaccctaagaggtatttccctgctatattttcaagtgatgttttgca

SEQ ID NO: 85397 - DNA, 80 bp, synthetic construct
  source 1..80: mol_type = other DNA
gaaagttgttgatgtgatggtcagctggttggaaaactgtgctgaattgtctgatcaactgcatactataaaaatgttaa

SEQ ID NO: 85398 - DNA, 80 bp, synthetic construct
  source 1..80: mol_type = other DNA
caaagatgattttggttttgatcttggcccaccccagtaagcgtagtcaaaagttgttacaaaatgtgaggtactttata

SEQ ID NO: 85399 - DNA, 80 bp, synthetic construct
  source 1..80: mol_type = other DNA
atggcttatgtatctgactaccaccacaaagacctaattgagaaggttaaagaaaaactgatcacagacgtagagttcct

SEQ ID NO: 85400 - DNA, 80 bp, synthetic construct
  source 1..80: mol_type = other DNA
tctttatagattaattaacatgttacttaaaattgtgttgcacaaggatgttaatagtgttctaacaaatagatttaaat

SEQ ID NO: 85401 - DNA, 80 bp, synthetic construct
  source 1..80: mol_type = other DNA
gagaagtttttagagccaaaactggaatttggacatgtgactgtgaatccattggacaaagctgaggaagatgagttgca

SEQ ID NO: 85402 - DNA, 80 bp, synthetic construct
  source 1..80: mol_type = other DNA
agatatggtacacaatgcaaaaaagttcttgagtaagggaacttgtgtcgactcaaataagattgagtacaagtgtcccg

SEQ ID NO: 85403 - DNA, 80 bp, synthetic construct
  source 1..80: mol_type = other DNA
gtatctcaaggaagtacctttcactcttaacatcttctttcaacaatggttctttgttcaaagggaaggaggttaaaaga

SEQ ID NO: 85404 - DNA, 80 bp, synthetic construct
  source 1..80: mol_type = other DNA
gagttgaaagatccattaatcacaagcggttgcgctaccgccctggatctcgccagcaacaaaagtgttgttgtgaacaa

SEQ ID NO: 85405 - DNA, 80 bp, synthetic construct
  source 1..80: mol_type = other DNA
gtttacagatggcaccagggtgctgaattatgattttaacagacttacagcattggctgtaacccagttaactgaggtct

SEQ ID NO: 85406 - DNA, 80 bp, synthetic construct
  source 1..80: mol_type = other DNA
tttcaaggaaaggaaagttcttattagataaacaagactatgacttcaaagtccaacaagctatgagcaacttagtgctt

SEQ ID NO: 85407 - DNA, 80 bp, synthetic construct
  source 1..80: mol_type = other DNA
ggaaaaaatcagacaaactcaaacatagatgaggtgaatctagatgagattttacttgagggaggtgcttcaatttattt

SEQ ID NO: 85408 - DNA, 80 bp, synthetic construct
  source 1..80: mol_type = other DNA
tgatgagctaagagagacggtggaaaaaattgtggatcagtataaagagccattaaagcaccactccaattcccaggaca

SEQ ID NO: 85409 - DNA, 80 bp, synthetic construct
  source 1..80: mol_type = other DNA
cggcattaccaaacatatctgacttagaaaaggttgttcaaaataaattccacatcaggctgatcaagggagagttgtcc

SEQ ID NO: 85410 - DNA, 80 bp, synthetic construct
  source 1..80: mol_type = other DNA
aaccatatggttgaagattttgatcatgaactattccctgaggagttctacaaggagttctgtgatgaggtctacaacaa

SEQ ID NO: 85411 - DNA, 80 bp, synthetic construct
  source 1..80: mol_type = other DNA
tgaagatttaaagttgaagtacttttattgtggctcattagggtcttgcccaattagtgaactgactaaagcagtggcaa

SEQ ID NO: 85412 - DNA, 80 bp, synthetic construct
  source 1..80: mol_type = other DNA
gcagaacctatcatgactgtgaatatttccaatgttttaaatcattactactgatgatgaatggcaacaaactaatgggg

SEQ ID NO: 85413 - DNA, 80 bp, synthetic construct
  source 1..80: mol_type = other DNA
gagagaaagcaactccgaagcattgagtaaagcactgtcactaacaaattgtacaacagcaatgttgaagaatttatgtt

SEQ ID NO: 85414 - DNA, 80 bp, synthetic construct
  source 1..80: mol_type = other DNA
gtacattgaagaccttaagaagctagaacaactcagagatgacttgaagtccatagacattaaccttataccgttaattg

SEQ ID NO: 85415 - DNA, 80 bp, synthetic construct
  source 1..80: mol_type = other DNA
ccggggagttacatgaggagtttacaacaaactatctgtcaggtgagcataaaacatcattgcaaaacttgtgcaagttg

SEQ ID NO: 85416 - DNA, 80 bp, synthetic construct
  source 1..80: mol_type = other DNA
ttagagtgtgaacctttggagccaacagaccttcaataccactggttgaatttggcagctcatcacccattgagaatggt

SEQ ID NO: 85417 - DNA, 80 bp, synthetic construct
  source 1..80: mol_type = other DNA
tttaagacaaaagattatatattcaggtgcagtcaatttagaggatgagaagatcccgacaattgtcaaaactttacaaa

SEQ ID NO: 85418 - DNA, 80 bp, synthetic construct
  source 1..80: mol_type = other DNA
agcagagcttaaaggtgttgagctcttgagtgataacttcggcacgcagttttggaaaattccagcgcacttaagtgttg

SEQ ID NO: 85419 - DNA, 80 bp, synthetic construct
  source 1..80: mol_type = other DNA
gtacaagtgatgtggtggacaacttcatgaggcaagtttactttgaatcatatatcaagtcttttgttgcgaccactaga

SEQ ID NO: 85420 - DNA, 80 bp, synthetic construct
  source 1..80: mol_type = other DNA
agatttgctcaagagagcaattcacttttcgaagagtcagaatatgcaaggctttgtgagtctttgactacaacctcaag

SEQ ID NO: 85421 - DNA, 80 bp, synthetic construct
  source 1..80: mol_type = other DNA
actttggggtcattcacctggtttcctcacaagagctccatacctggaggagaaggtttgcagcgactcggccctttctc

SEQ ID NO: 85422 - DNA, 80 bp, synthetic construct
  source 1..80: mol_type = other DNA
ttgatttcgacattgagcctgcacagcttaacggaaatcagcttattgcgtctgggctcactgaaggcaattatgaatca

SEQ ID NO: 85423 - DNA, 80 bp, synthetic construct
  source 1..80: mol_type = other DNA
ttggaagacctccttgatgccatggcgggactaaggtcaggctcagtgaaatttaatcaaacagtaaggttccaagtaaa

SEQ ID NO: 85424 - DNA, 80 bp, synthetic construct
  source 1..80: mol_type = other DNA
gagtcaggacactgccttcaaggaaaccttctccatccaccttgagttcttaggtggaatcgacaccaaacataggtatt

SEQ ID NO: 85425 - DNA, 80 bp, synthetic construct
  source 1..80: mol_type = other DNA
gtgtccttgaaacaaaggtcatgtactctgggtcagtcaaccaatgtgtactgcctgactgttggagactagttctggct

SEQ ID NO: 85426 - DNA, 80 bp, synthetic construct
  source 1..80: mol_type = other DNA
ggtgctacttttaaagggaagtctgcatggtttgtagacacaaaaaccattaatgaatttttagaggacacaaagcaatt

SEQ ID NO: 85427 - DNA, 80 bp, synthetic construct
  source 1..80: mol_type = other DNA
gggtgatgttatccacattgaactgcttgttgacaaggagcaattgcagttcactgaatatgacttctctctggtgggcc

SEQ ID NO: 85428 - DNA, 80 bp, synthetic construct
  source 1..80: mol_type = other DNA
ctgatgctgaatcagtgccattggtagtgtgtagaggagcactgtgggagcgcaacacaaaattggcggactttacgcct

SEQ ID NO: 85429 - DNA, 80 bp, synthetic construct
  source 1..80: mol_type = other DNA
cagactgtcaggaattgaaagcatgaatgtgttgtctgacagacgctccaatcacttcgaggatgtgattgccatttgtc

SEQ ID NO: 85430 - DNA, 80 bp, synthetic construct
  source 1..80: mol_type = other DNA
cacatgaatatatggttgtattggaagggattcttgagagtctaggggattgggttgactttaaggggtatgctctatgt

SEQ ID NO: 85431 - DNA, 80 bp, synthetic construct
  source 1..80: mol_type = other DNA
tacgacttaaaggcagaacatgtgaggagttcatcagagcagcggtttgtgtggaggatatcgagtagaccctctcctgc

SEQ ID NO: 85432 - DNA, 80 bp, synthetic construct
  source 1..80: mol_type = other DNA
catcagagcagcggtttgtgtggaggatatcgagtagaccctctcctgccccccggggtggtccccggcgggtggtcccc

SEQ ID NO: 85433 - DNA, 80 bp, synthetic construct
  source 1..80: mol_type = other DNA
gttgctgacagagagaagcattgtgagacagttgaggcagagataatgattgttacactccaccagccctttgttttcaa

SEQ ID NO: 85434 - DNA, 80 bp, synthetic construct
  source 1..80: mol_type = other DNA
accagcaactcttgcagaactggggtcctaagtagcttgcatcaggcactaggttggccctgctgggttctgagttctgg

SEQ ID NO: 85435 - DNA, 80 bp, synthetic construct
  source 1..80: mol_type = other DNA
tgctgggttctgagttctggttgggtttggtccctttgttgcccatgtggactctgtggtggtgggagtgtgggactgcg

SEQ ID NO: 85436 - DNA, 80 bp, synthetic construct
  source 1..80: mol_type = other DNA
accaaggagtggacaacaaactaacagctcatgaggtcaagatgtcaatagaagaagaataccaagtatttaggaataga

SEQ ID NO: 85437 - DNA, 80 bp, synthetic construct
  source 1..80: mol_type = other DNA
tttaagaaaggagagataaatagtcaatttagaaaagttgataaggagaaactcctaagtgactttgacacaatgtacag

SEQ ID NO: 85438 - DNA, 80 bp, synthetic construct
  source 1..80: mol_type = other DNA
tgatgagatcattgagtgcgggtgtgttgaggaattagtgttccgcttcaaaagagcttcaccaatattgaggttcttat

SEQ ID NO: 85439 - DNA, 80 bp, synthetic construct
  source 1..80: mol_type = other DNA
actgtgagttaacaagtgatgaggataacaggaaagttggcaatagtgatcaaatgcaatgctggaggtctttcctcaat

SEQ ID NO: 85440 - DNA, 80 bp, synthetic construct
  source 1..80: mol_type = other DNA
ccataacacttcggacttctacggcttaattactgaaagattcataaactatgctataaattgtgtatgtggcggacaaa

SEQ ID NO: 85441 - DNA, 80 bp, synthetic construct
  source 1..80: mol_type = other DNA
gaaggaatgggtctatggggtaccttgcatattgcaacaaatttagtgtccttatttgaatcaagttacagagttgaact

SEQ ID NO: 85442 - DNA, 80 bp, synthetic construct
  source 1..80: mol_type = other DNA
tcacagatagcagagcttaaaggtgttgagctcttgagtgataacttcggcacgcagttttggaaaattccagcgcactt

SEQ ID NO: 85443 - DNA, 80 bp, synthetic construct
  source 1..80: mol_type = other DNA
caaccatgatctctgataggctaaaattgagaaaacactgggtggaggttgacatagtattggtcctcagcaaactgttg

SEQ ID NO: 85444 - DNA, 80 bp, synthetic construct
  source 1..80: mol_type = other DNA
gttggcctcggtcggaggagcgctggggcttcctgaggcctttattttggtgggaagcggcattttgcagattgggcacc

SEQ ID NO: 85445 - DNA, 80 bp, synthetic construct
  source 1..80: mol_type = other DNA
gaagtactcacattataaaacaaagaatctaaacttcaagtttgacactggaaagctctctgatgatgtgaggatcagtg

SEQ ID NO: 85446 - DNA, 80 bp, synthetic construct
  source 1..80: mol_type = other DNA
ttacagtaaaaccaaaaacaaagtgatgatacagtcaagtgggggcaaactacgacttaaaggcagaacatgtgaggagt

SEQ ID NO: 85447 - DNA, 80 bp, synthetic construct
  source 1..80: mol_type = other DNA
atgggtcaaatagtgaccttcttccaggaagtgcctcatgttatagaggaagtgatgaacatagttctgatagcactttc

SEQ ID NO: 85448 - DNA, 80 bp, synthetic construct
  source 1..80: mol_type = other DNA
gaagatcttgttcagcaatctacaaaggccaatatgagctccaaactttagaactaaatatggagtccctaaacatgacc

SEQ ID NO: 85449 - DNA, 80 bp, synthetic construct
  source 1..80: mol_type = other DNA
ttacatcagagccggcaacaacacaggcctggagttgaccctcaccaacaccagcatcatacatcataaattctgcaacc

SEQ ID NO: 85450 - DNA, 80 bp, synthetic construct
  source 1..80: mol_type = other DNA
acttcaacggtgggaaaatcagcatacaatacaacctcagtcactcctacgctggtgatgctgcagaacactgtggtaca

SEQ ID NO: 85451 - DNA, 80 bp, synthetic construct
  source 1..80: mol_type = other DNA
gttgcaaatggggtgctgcagaccttcatgagattggcttggggaggtagttacctagcccttgattcagggagaaagaa

SEQ ID NO: 85452 - DNA, 80 bp, synthetic construct
  source 1..80: mol_type = other DNA
ttgggattgcataatttccagttatcagtacttgatcatccaaaacacaacttgggatgaccattgtcagttttcaagac

SEQ ID NO: 85453 - DNA, 80 bp, synthetic construct
  source 1..80: mol_type = other DNA
catccccaatcgggtacttgggtttgttatcgcagaggaccagagacatctatataagtagaagactccttgggactttt

SEQ ID NO: 85454 - DNA, 80 bp, synthetic construct
  source 1..80: mol_type = other DNA
acatggacactttcagactccgagggacatgacacgccaggtggttactgcttgaccagatggatgcttattgaagctga

SEQ ID NO: 85455 - DNA, 80 bp, synthetic construct
  source 1..80: mol_type = other DNA
tctcttggccatcctgaagggcctctacaatcttgccacctgtggggtaattggactgataacattcctcttactctgtg

SEQ ID NO: 85456 - DNA, 80 bp, synthetic construct
  source 1..80: mol_type = other DNA
atcaatatgaagcaatgagttgtgacttcaatggtggaaaaattagtattcaatataatctcagccactcttatgctgga

SEQ ID NO: 85457 - DNA, 80 bp, synthetic construct
  source 1..80: mol_type = other DNA
gaaagggagagtaattctgaagcgttgagtaaagcattgtcgttgacaaactgtacgacggcgatgttaaagaatttgtg

SEQ ID NO: 85458 - DNA, 80 bp, synthetic construct
  source 1..80: mol_type = other DNA
attttgtctatgaaactgaatgtatccttggctcatgtgtcatacagcatggaccacagtaaatggggaccaatgatgtg

SEQ ID NO: 85459 - DNA, 80 bp, synthetic construct
  source 1..80: mol_type = other DNA
atcttatcaatgaaattgaatgtctcgttagctcatgtttcatacagtatggaccacagtaaatggggaccaatgatgtg

SEQ ID NO: 85460 - DNA, 80 bp, synthetic construct
  source 1..80: mol_type = other DNA
ggaaataaaaaaatgctctttcaatttcaccacaagcataaatactatagtgagagactatgcagttttttataaacagg

SEQ ID NO: 85461 - DNA, 80 bp, synthetic construct
  source 1..80: mol_type = other DNA
gggacttgaacccattgataaagtcatggggatgatcgggatactacctgacatgactcccagcacagaactgtcattga

SEQ ID NO: 85462 - DNA, 80 bp, synthetic construct
  source 1..80: mol_type = other DNA
gggcagccggagtggaatctgctgtgctgaggggattcctaattctaggcaaggaggacaaaagatatggaccagcattg

SEQ ID NO: 85463 - DNA, 80 bp, synthetic construct
  source 1..80: mol_type = other DNA
acaggtgcttttatgtggagttgataagagggaggccacaggagaccagagtgtggtggacttcaaatagcatcattgta

SEQ ID NO: 85464 - DNA, 80 bp, synthetic construct
  source 1..80: mol_type = other DNA
tcaagcggagcgaatacaccaactcctcgaaaaatcatgtagtgcagtgcgacacggtaataatagaaaggaacacaaca

SEQ ID NO: 85465 - DNA, 80 bp, synthetic construct
  source 1..80: mol_type = other DNA
taaaaaaaattgcatattactatatagtgcagctaacacaggtaaatcattatttggtatgagtttaataaaatttctgc

SEQ ID NO: 85466 - DNA, 80 bp, synthetic construct
  source 1..80: mol_type = other DNA
aacaggggatactatatcagatgacgagaacgaaaatgacagtgatacaggtgaagatttggtagattttatagtaaatg

SEQ ID NO: 85467 - DNA, 80 bp, synthetic construct
  source 1..80: mol_type = other DNA
aataccaaaaactattacagtgtctactggatttatgtctatatgacataatcctctgcgtttaggtgttttcttgtata

SEQ ID NO: 85468 - DNA, 80 bp, synthetic construct
  source 1..80: mol_type = other DNA
tattgtatttgtttatataccattatttttaatacatacacatgcacgcttcttaattacataatgtatatgtacataat

SEQ ID NO: 85469 - DNA, 80 bp, synthetic construct
  source 1..80: mol_type = other DNA
catataattgttgtataccatcacttactgatttttcttttttatttttatatatatagttttttttcttatttgtttgt

SEQ ID NO: 85470 - DNA, 80 bp, synthetic construct
  source 1..80: mol_type = other DNA
agggggacggcggagcgagcgcaccggggatcctaggcgtaacaatcacgccaatagagtgaggttttgtgacttgaacc

SEQ ID NO: 85471 - DNA, 80 bp, synthetic construct
  source 1..80: mol_type = other DNA
cacaagtgctatccaatgagtttggaggtttatagtgcatgataggcttctctgaacagagctcctcagctaaagatagc

SEQ ID NO: 85472 - DNA, 80 bp, synthetic construct
  source 1..80: mol_type = other DNA
aataactcaaagtctgggacatttgtgaactttgatacacactcccataaaacaggctcttctttccttaacaaaagcct

SEQ ID NO: 85473 - DNA, 80 bp, synthetic construct
  source 1..80: mol_type = other DNA
cgttagaaagtagcaacatctcaccaataatcaaacccgacttttttaaagtctctatttcagagggttgcgacttgtaa

SEQ ID NO: 85474 - DNA, 80 bp, synthetic construct
  source 1..80: mol_type = other DNA
acacatgtcacaaagttcagaatgattaagtccaaaaataagagtgtgtttcttctggtgttaaacactttctttccttt

SEQ ID NO: 85475 - DNA, 80 bp, synthetic construct
  source 1..80: mol_type = other DNA
tacaactttttcatccattgtcaaatttcgcctaggatcctcggtgcgcatgacaaaagcttgaagccctctgttaaaac

SEQ ID NO: 85476 - DNA, 80 bp, synthetic construct
  source 1..80: mol_type = other DNA
catctataaacatgggcaactcaaaatccaaatccaaaccatctagtctctcaaaggctcaagagggaacaccaacagtc

SEQ ID NO: 85477 - DNA, 80 bp, synthetic construct
  source 1..80: mol_type = other DNA
ttctggaacgccaccctccccatgtgtccctgtaatttccgagtcggccaacagttcatctaagtttatggctttttttc

SEQ ID NO: 85478 - DNA, 80 bp, synthetic construct
  source 1..80: mol_type = other DNA
atggcttcacttatttacagacaattgcttactaattcgtatacaactgatttgtctgatgaaatccaagaaattggatc

SEQ ID NO: 85479 - DNA, 80 bp, synthetic construct
  source 1..80: mol_type = other DNA
ccaacctaaattcagttatttgtagcggtggcgattacagctttgcactgcctctgggaagcttcccagttatgtcggga

SEQ ID NO: 85480 - DNA, 80 bp, synthetic construct
  source 1..80: mol_type = other DNA
ctcttaattcattaagattcagattcagactggcagttgaagaacctccatttttgataactcgaacacgaataagtgga

SEQ ID NO: 85481 - DNA, 80 bp, synthetic construct
  source 1..80: mol_type = other DNA
gaattcggtaacggtaaggcaagatcttgatagacaacttggggagctacgtgatgaatttaatgcactatctcaacaaa

SEQ ID NO: 85482 - DNA, 80 bp, synthetic construct
  source 1..80: mol_type = other DNA
aaggcactatagatgctgcaaaatcgatggcaacaaatgtaatgaaaaagtttaggaagtcgaatctagctaactcagtg

SEQ ID NO: 85483 - DNA, 80 bp, synthetic construct
  source 1..80: mol_type = other DNA
tcaacactaactgaatcactatctgatgcggcgtcgtcaatatctagaggatcgacaataaaatcaattggttcatcagt

SEQ ID NO: 85484 - DNA, 80 bp, synthetic construct
  source 1..80: mol_type = other DNA
ttctgcatggacagaggtttcagcttcaactggcgatttaactatgacgactagctcagtggcgacgcagactgcgacac

SEQ ID NO: 85485 - DNA, 80 bp, synthetic construct
  source 1..80: mol_type = other DNA
ttagcaagcggttaagattaaaagagattgccacgcaaaccgacggtatgaatttcgacgatatttctgctgcagtactt

SEQ ID NO: 85486 - DNA, 80 bp, synthetic construct
  source 1..80: mol_type = other DNA
ggtattatttgctccaaatactgagggaatagtagccgagatgacgaataataccagcatatggcttactactatactaa

SEQ ID NO: 85487 - DNA, 80 bp, synthetic construct
  source 1..80: mol_type = other DNA
ttgaaccaaacgtttcccggagaactagaacgtatacaatatttggccagcaaattgaactgacgattgaaaacgcatca

SEQ ID NO: 85488 - DNA, 80 bp, synthetic construct
  source 1..80: mol_type = other DNA
caaactgaatggaggttcatcgactttggcagaagtaatcaaaataacgattatgtgccatatggtgcattaatgtcaag

SEQ ID NO: 85489 - DNA, 80 bp, synthetic construct
  source 1..80: mol_type = other DNA
cacgaaactacaggccgcgatgaagtatggcggaaaactgtttacattcgttggaaacacgcctaatgcagcacctgacg

SEQ ID NO: 85490 - DNA, 80 bp, synthetic construct
  source 1..80: mol_type = other DNA
aggaagggtatctaactagcaattatgatgcaattatggtaaccccattctgcgatttttatatagtcccacgtttgccg

SEQ ID NO: 85491 - DNA, 80 bp, synthetic construct
  source 1..80: mol_type = other DNA
agagaagtgtgtagaaactacattaatcgtggacttcctccaatgcagaacacaagaaatgttgtaccagttgcgctatc

SEQ ID NO: 85492 - DNA, 80 bp, synthetic construct
  source 1..80: mol_type = other DNA
agctagaaacgtcgttaagcaaagaacgagtatgaatgaagatattgttatatcaaagacttctttatggaaagagatgc

SEQ ID NO: 85493 - DNA, 80 bp, synthetic construct
  source 1..80: mol_type = other DNA
agttaaaatgatggactttattatatatagatttttgttgatcgtagtaattgtgtcaccatatgtaaagacacaaaact

SEQ ID NO: 85494 - DNA, 80 bp, synthetic construct
  source 1..80: mol_type = other DNA
atggaataaaccttccggtcacaggttccatggatacgacgtatgcgaattcaactcaggccgaaacgtttctaacttca

SEQ ID NO: 85495 - DNA, 80 bp, synthetic construct
  source 1..80: mol_type = other DNA
gcaactaatgaaaagctagcaattacagacgtggtagatggcgtaaattataagttgaatgttagtacaacaacatgtac

SEQ ID NO: 85496 - DNA, 80 bp, synthetic construct
  source 1..80: mol_type = other DNA
atcattggttttgcactggccattgttttgaaagcattgtacatgttgtcaactcgtgggaggcaaacaatcaaagaaaa

SEQ ID NO: 85497 - DNA, 80 bp, synthetic construct
  source 1..80: mol_type = other DNA
gatgaaccaagtggacaaacagctgactggttctcaattggccaatacatcattggttttgcactggccattgttttgaa

SEQ ID NO: 85498 - DNA, 80 bp, synthetic construct
  source 1..80: mol_type = other DNA
caccagattccataaagtcaccgcaggccccatgggtgtttgcctgtgcacctgatagatgccctcctacatgcatttat

SEQ ID NO: 85499 - DNA, 80 bp, synthetic construct
  source 1..80: mol_type = other DNA
gaaccgagtgggcaaacagctgattggttttcaattggtcaatacatcattgggtttgcattggccattgttttgaaagc

SEQ ID NO: 85500 - DNA, 80 bp, synthetic construct
  source 1..80: mol_type = other DNA
ccataaagtcaccacaggctccatgggtgtttgcctgcgcacctgatagatgccctcctacatgcatttatgtggctggg

SEQ ID NO: 85501 - DNA, 80 bp, synthetic construct
  source 1..80: mol_type = other DNA
ttgttctgaaagcactatacatgttgtcaactcgtgggaggcaaacaatcaaggaaaacaaaggcacaagaattaggttc

SEQ ID NO: 85502 - DNA, 80 bp, synthetic construct
  source 1..80: mol_type = other DNA
tatggtaatgtccttgatgtgaacgccattgatattgatgaaccaagtggacaaacagctgactggttttcaattgggca

SEQ ID NO: 85503 - DNA, 80 bp, synthetic construct
  source 1..80: mol_type = other DNA
ccataaagtcaccacaggcaccatgggtctttgcttgtgcaccagatagatgccctcctacgtgcatctatgttgccgga

SEQ ID NO: 85504 - DNA, 80 bp, synthetic construct
  source 1..80: mol_type = other DNA
acagctgactggttttcaattgggcaatacatcattgggtttgcattggccattgtcctaaaggcactatacatgttgtc

SEQ ID NO: 85505 - DNA, 80 bp, synthetic construct
  source 1..80: mol_type = other DNA
caccatgggtcttcgcttgtgcacctgatagatgccctcctacatgcatctatgtggccggaatggcagaacttggtgca

SEQ ID NO: 85506 - DNA, 80 bp, synthetic construct
  source 1..80: mol_type = other DNA
ggacaaacagctgactggttttcaatcgggcaatacatcattgggtttgcattagcaattgtcctaaaagcactgtacat

SEQ ID NO: 85507 - DNA, 80 bp, synthetic construct
  source 1..80: mol_type = other DNA
agtggacagacagctgactggttttcaattgggcaatacatcattgggtttgcattggctattgtcctaaaggcactata

SEQ ID NO: 85508 - DNA, 80 bp, synthetic construct
  source 1..80: mol_type = other DNA
catgttgtcaactcgtggaaggcagacaattaaagagaataagggcaccagaatcaggtttaaggatgacagctcatttg

SEQ ID NO: 85509 - DNA, 80 bp, synthetic construct
  source 1..80: mol_type = other DNA
cgcaggccccatgggtatttgcttgtgcacctgatagatgccctcctacatgcatttatgtggccggaatggcagaactt

SEQ ID NO: 85510 - DNA, 80 bp, synthetic construct
  source 1..80: mol_type = other DNA
gagccaagtgggcagacagcagattggttttctatcggtcaatacatcacaggatttgcacttgcaataatcctaaaagc

SEQ ID NO: 85511 - DNA, 80 bp, synthetic construct
  source 1..80: mol_type = other DNA
aagcaccatgggtgtttgcttgtgcacccgataggtgccctcccacatgcatttacatagcaggaatggcagagctggga

SEQ ID NO: 85512 - DNA, 80 bp, synthetic construct
  source 1..80: mol_type = other DNA
gatgagcctagcgggcaaacagcagattggttctcaattggtcagtacatcataggctttgcacttgcaattgtcttaaa

SEQ ID NO: 85513 - DNA, 80 bp, synthetic construct
  source 1..80: mol_type = other DNA
cacctgactcaataaagtcaccacaggcaccatgggtgtttgcctgtgcacctgatagatgccccccgacatgtatatat

SEQ ID NO: 85514 - DNA, 80 bp, synthetic construct
  source 1..80: mol_type = other DNA
caccatgggtatttgcctgtgcaccggatagatgccctccaacatgcatatacatagcagggatggctgagctgggagct

SEQ ID NO: 85515 - DNA, 80 bp, synthetic construct
  source 1..80: mol_type = other DNA
tttttgcctgtgcaccggatagatgccctccaacatgcatctatatagcaggaatggctgaactgggggctttcttttcc

SEQ ID NO: 85516 - DNA, 80 bp, synthetic construct
  source 1..80: mol_type = other DNA
caccagatagatgtcctccaacatgcatttatatagcagggatggctgagctgggggctttctttttccatcctacaaga

SEQ ID NO: 85517 - DNA, 80 bp, synthetic construct
  source 1..80: mol_type = other DNA
attgacgagccgagtgggcaaacagctgattggttctccatcggccagtatgttatgggttttgcactcgctatcatctt

SEQ ID NO: 85518 - DNA, 80 bp, synthetic construct
  source 1..80: mol_type = other DNA
ccataaagtcaccacaggcaccttgggtatttgcttgtgcacctgatagatgccccccaacatgcatttacatagcaggg

SEQ ID NO: 85519 - DNA, 80 bp, synthetic construct
  source 1..80: mol_type = other DNA
actgaaaccgctggtatgagccaactcaaagaaatacaggaggagatcacccgccatgaacagcagattgtcattgcccg

SEQ ID NO: 85520 - DNA, 80 bp, synthetic construct
  source 1..80: mol_type = other DNA
aaaaacaagcaattggctcttgcatacacgcacgcacatacaatgatataaatttggagggttgggcactaaattcacat

SEQ ID NO: 85521 - DNA, 80 bp, synthetic construct
  source 1..80: mol_type = other DNA
acatgcattattaaattcacatacacactgattgggttgggtggttaaatcaatacagctgggttaggtaagtttactaa

SEQ ID NO: 85522 - DNA, 80 bp, synthetic construct
  source 1..80: mol_type = other DNA
gaatttctcataaaaccatgcccattcctgaaaaaacagagcagcctaagtaaggatgaagaattcttggtgagtaatga

SEQ ID NO: 85523 - DNA, 80 bp, synthetic construct
  source 1..80: mol_type = other DNA
tcctatcatggaaaaggaaccttgttctaaaattgtagaatacagggattggtcgaaaccgcaatgccaaattacagggt

SEQ ID NO: 85524 - DNA, 80 bp, synthetic construct
  source 1..80: mol_type = other DNA
agtgcccttgcaggaaagaactcagatcttgcagagactggaaaggaatggttgaagacaagccgaatcttaccacctct

SEQ ID NO: 85525 - DNA, 80 bp, synthetic construct
  source 1..80: mol_type = other DNA
aaaatgccttacatctgcagacataccattacactgggaatagcaccttccctctgtgtaaatggtgcaggtgggaaatg

SEQ ID NO: 85526 - DNA, 80 bp, synthetic construct
  source 1..80: mol_type = other DNA
ctgttttacagatgtgagtgggtgtcactaagctattttacaaatgtgaatgtgagacccaaaggggccatatacaacag

SEQ ID NO: 85527 - DNA, 80 bp, synthetic construct
  source 1..80: mol_type = other DNA
cccaaggtcagtgaccacagttattacatttcgtcgattatgtgctacttgtgaacagattgctgatttacatgaaaagt

SEQ ID NO: 85528 - DNA, 80 bp, synthetic construct
  source 1..80: mol_type = other DNA
ctcacagacttgaaattctgggcaatattcttaaagtcaattcctggaatattatggtgctggctagcacaacggtcgat

SEQ ID NO: 85529 - DNA, 80 bp, synthetic construct
  source 1..80: mol_type = other DNA
cttcttgaacaatttacagggccgggccaacagctggttgaggccatggaggttgctaatcagactaggcagatggtaca

SEQ ID NO: 85530 - DNA, 80 bp, synthetic construct
  source 1..80: mol_type = other DNA
gactccaggaatcctgggcaacagactgagacctgtctcaaaacaaaacgagcgaggacagcagcatagacgctttgtcc

SEQ ID NO: 85531 - DNA, 80 bp, synthetic construct
  source 1..80: mol_type = other DNA
tccatgagggaagaatatcaacaggaacagcagagtgctgtggatgttgacgatggtcattttgtcaacatagagctaga

SEQ ID NO: 85532 - DNA, 80 bp, synthetic construct
  source 1..80: mol_type = other DNA
tgcatctgttctaacagttttgttcacattacataaagcttcagttccaacaatgaaaatagcattaaaaacgtcaaaat

SEQ ID NO: 85533 - DNA, 80 bp, synthetic construct
  source 1..80: mol_type = other DNA
cggaaacgggactctagcatacttactgacagccagacagcgaccaaaagaattcggatggccatcaattagtgtcgaat

SEQ ID NO: 85534 - DNA, 80 bp, synthetic construct
  source 1..80: mol_type = other DNA
tcgagcaagagaaggatcacgagatctatctcaacatgtagatgtacctggaacaataacgaataatgctaatactaccg

SEQ ID NO: 85535 - DNA, 80 bp, synthetic construct
  source 1..80: mol_type = other DNA
gggattcaacccggttagaagatgaggaagaagacgatgcagtcgggtttccagtcccgccgcaagcaccgcctttacca

SEQ ID NO: 85536 - DNA, 80 bp, synthetic construct
  source 1..80: mol_type = other DNA
gggacttttgatgtagctttcgttctcaactactttgggggacaggatgggggactgtacgccctaatttactccaagat

SEQ ID NO: 85537 - DNA, 80 bp, synthetic construct
  source 1..80: mol_type = other DNA
agatcctagatgagagccttgatttaagggtctgtttcatccctggctgcttccctgactggccaagctacgggatcaga

SEQ ID NO: 85538 - DNA, 80 bp, synthetic construct
  source 1..80: mol_type = other DNA
ttgtaagattaataacacagattggaacaacattttagagcaggtggctaaaaaattacatagccattttaaccaaacaa

SEQ ID NO: 85539 - DNA, 80 bp, synthetic construct
  source 1..80: mol_type = other DNA
tcaataaagcttgcctgacccgtctgttgtgtgactctggtaactagagatccctcagaccactctagacagtgtaaaaa

SEQ ID NO: 85540 - DNA, 80 bp, synthetic construct
  source 1..80: mol_type = other DNA
gtattcttaatgtatatcttaaccataggaataggagcactaatagtagcatttatcatagtcataattgtgtggactat

SEQ ID NO: 85541 - DNA, 80 bp, synthetic construct
  source 1..80: mol_type = other DNA
gcaatacaaaagctaagagaggtaatggagagcaggaagtctgcaagtgccgctaaggaagacacaagcgcaaggcagac

SEQ ID NO: 85542 - DNA, 80 bp, synthetic construct
  source 1..80: mol_type = other DNA
actcataaagccagagtgctagcagaagcaatggctatagcccaccaagatctgaagggaggatacacagcagtattcat

SEQ ID NO: 85543 - DNA, 80 bp, synthetic construct
  source 1..80: mol_type = other DNA
cagccccaccaatggaggaggaaatgaagggacaagagaatcagggacagaaggggagccaggacgaactctatccgttt

SEQ ID NO: 85544 - DNA, 80 bp, synthetic construct
  source 1..80: mol_type = other DNA
gcgggactttccagaagagactgctgacacggcggggactttccagtgtgggagggacaggggcggttcggggagtggct

SEQ ID NO: 85545 - DNA, 80 bp, synthetic construct
  source 1..80: mol_type = other DNA
tcaggaaaggccagggattggtattacagacaccattatgaaattagaaatccaagagccagctcaagtgtatatattcc

SEQ ID NO: 85546 - DNA, 80 bp, synthetic construct
  source 1..80: mol_type = other DNA
gactatatctaaaagaaaagaggcaagatagaagggaaagagaggtgcttgaaaggttaagaagaataagacaagttgag

SEQ ID NO: 85547 - DNA, 80 bp, synthetic construct
  source 1..80: mol_type = other DNA
ataaataagaatgataccagcaacagcaactcagagaaccttatgaaaaagtgtgagtttaatgtaaccacaattctcaa

SEQ ID NO: 85548 - DNA, 80 bp, synthetic construct
  source 1..80: mol_type = other DNA
agacaagaaggagaaaaaacaggctctattctatgtatcagatttgatgcaactgaatgatactgaaacaaatagcacag

SEQ ID NO: 85549 - DNA, 80 bp, synthetic construct
  source 1..80: mol_type = other DNA
agtactcaactaatattcaatgggacactctctgaaggaaaaataagaattatgggaaaaaatatttcaaacagtgggcc

SEQ ID NO: 85550 - DNA, 80 bp, synthetic construct
  source 1..80: mol_type = other DNA
aaatatcatagtgaccctaaattctactataaacatgacctgtaggagagaaggggatcagaaagtacaacagatgcaaa

SEQ ID NO: 85551 - DNA, 80 bp, synthetic construct
  source 1..80: mol_type = other DNA
taggtccaatggcctggtacagcatgagctttaaggaagtgtcaaataactcaaggatagcctattgcaagtataacacc

SEQ ID NO: 85552 - DNA, 80 bp, synthetic construct
  source 1..80: mol_type = other DNA
tctgattgggtaaaagccttaaaacaaacagctgaaaggtatttagaacttgtgaacaatacaaatagagttaacatgac

SEQ ID NO: 85553 - DNA, 80 bp, synthetic construct
  source 1..80: mol_type = other DNA
attcaatcacacctctggtggagatccagagatatcctatttacattttaactgtcatggagagttcttctattgtaaca

SEQ ID NO: 85554 - DNA, 80 bp, synthetic construct
  source 1..80: mol_type = other DNA
catctgggatgtttaattatacctttgcatgtacaggaatcaactgtaatattactcaagataacagtagaaataatgac

SEQ ID NO: 85555 - DNA, 80 bp, synthetic construct
  source 1..80: mol_type = other DNA
acttggagactgccttgcaggataaaacaggtggtaaggtcatggataaggggagggtcgggactctatgcacctcccag

SEQ ID NO: 85556 - DNA, 80 bp, synthetic construct
  source 1..80: mol_type = other DNA
gccaggtaacctaacatgcagttcacacataactggaatgattctgcaagtggatgagccatggaacaagaccaaaaaca

SEQ ID NO: 85557 - DNA, 80 bp, synthetic construct
  source 1..80: mol_type = other DNA
acagcaaagccatctttagaccaatagggggaaatatggaagatatatggagaactgaactgttcaaatacaaagtagta

SEQ ID NO: 85558 - DNA, 80 bp, synthetic construct
  source 1..80: mol_type = other DNA
atggggctgtaagggaagactagtctgctacacatcagtaagatggaacacgacatggacaaacaacactgatttaggag

SEQ ID NO: 85559 - DNA, 80 bp, synthetic construct
  source 1..80: mol_type = other DNA
taatttgggacaatatgacatggcaggaatgggatcagcagataagcaacataagcaccaccatatataatgaaatacaa

SEQ ID NO: 85560 - DNA, 80 bp, synthetic construct
  source 1..80: mol_type = other DNA
aaggcacaagtacagcaggaacataatgagaaaaagttgctggagttagatgaatgggcttctatttggaactggctgga

SEQ ID NO: 85561 - DNA, 80 bp, synthetic construct
  source 1..80: mol_type = other DNA
cataactaaatggttgtggtatataaaaatagcaataatcatagtaggagcactaataggggtgagaattgttatgatag

SEQ ID NO: 85562 - DNA, 80 bp, synthetic construct
  source 1..80: mol_type = other DNA
gaagcgccaggaggaacaggagaaggaggtggagaaggaggcaggctcaggttgataccctcgccgcaaggattcttgcc

SEQ ID NO: 85563 - DNA, 80 bp, synthetic construct
  source 1..80: mol_type = other DNA
tgaccagccatctgggacttggactgtggatcctgggacaaaggataactagtgcttgcagaatttgcttagctataata

SEQ ID NO: 85564 - DNA, 80 bp, synthetic construct
  source 1..80: mol_type = other DNA
caatattggctacaagaattaaagagtagtgctacaaacctcctagatacccttgcagtagcagttgccaattggactga

SEQ ID NO: 85565 - DNA, 80 bp, synthetic construct
  source 1..80: mol_type = other DNA
cggtgtaattttagggatacaaagaataggaagagcaattcttaacatcccaaggagaattagacagggcgcagaaagaa

SEQ ID NO: 85566 - DNA, 80 bp, synthetic construct
  source 1..80: mol_type = other DNA
ctttattgtaacatgggaaacgtactgggaaaagataaatttaagggatggtcagcaataagagaaagaatgagaagaac

SEQ ID NO: 85567 - DNA, 80 bp, synthetic construct
  source 1..80: mol_type = other DNA
ttcccctgagccttcccctgagcctgaaccatgtgcacctggagtaggaccaatctccagggaactagcagctagaggag

SEQ ID NO: 85568 - DNA, 80 bp, synthetic construct
  source 1..80: mol_type = other DNA
gagagcctgcaatctctctggaactcagtagcagtgctctggtgcgttcacaacagatttgatgttcaagatacacagca

SEQ ID NO: 85569 - DNA, 80 bp, synthetic construct
  source 1..80: mol_type = other DNA
ggcaataaaaaagttaaaggaagtaatggcgagcaggaagcctgccactgccgctaaggaggaaacaggctcaaggcaga

SEQ ID NO: 85570 - DNA, 80 bp, synthetic construct
  source 1..80: mol_type = other DNA
ctgctacatccagcttgtaatcatggcgctgaggatgaacacggggagatactaaaatggcagtttgatagaacattagg

SEQ ID NO: 85571 - DNA, 80 bp, synthetic construct
  source 1..80: mol_type = other DNA
cagccccaccaatggaggaggtagtgaagaagcaagaggatcagaatcagagtcagaggagagagcaggaggagctctat

SEQ ID NO: 85572 - DNA, 80 bp, synthetic construct
  source 1..80: mol_type = other DNA
catcacacatatagccctgcaaaagcacccagaactcttccccaagtaactaaaactgctaacctgtgggactttccaga

SEQ ID NO: 85573 - DNA, 80 bp, synthetic construct
  source 1..80: mol_type = other DNA
atcaggatgaacataagaaccttaaaacagggaaatatactaggcaaaaggcctctcacacaaatgacataaggcaatta

SEQ ID NO: 85574 - DNA, 80 bp, synthetic construct
  source 1..80: mol_type = other DNA
ttagccttgcaggattccaaaaaacaagtaaacatagtaacagactcacaatatgcattgggcatcatagcctcccaacc

SEQ ID NO: 85575 - DNA, 80 bp, synthetic construct
  source 1..80: mol_type = other DNA
aacacaaagtgactcccctatagttcagcagataatagaagaactaaccaataaggaacaagtgtatcttacatgggtac

SEQ ID NO: 85576 - DNA, 80 bp, synthetic construct
  source 1..80: mol_type = other DNA
ctagaaaggctaagagatggaattatagacatcattatgaaacaaggcatccaaaaattagttcagttatatacattcca

SEQ ID NO: 85577 - DNA, 80 bp, synthetic construct
  source 1..80: mol_type = other DNA
catagtaaggtagggacactacagttcttagccttaaaagcattagtgaaagtaaagaaaaacaagcctcccctacccag

SEQ ID NO: 85578 - DNA, 80 bp, synthetic construct
  source 1..80: mol_type = other DNA
tgtccaaaagttaacagaagacagatggaacaagcaccagagaatcaagggccagctagagagcaatccaatgtgtggac

SEQ ID NO: 85579 - DNA, 80 bp, synthetic construct
  source 1..80: mol_type = other DNA
gggtttgggaatctcccatggcaggaagaagcgacgaagaccagcaactgctgtgggccattcagacaataaagctcctg

SEQ ID NO: 85580 - DNA, 80 bp, synthetic construct
  source 1..80: mol_type = other DNA
taccagagcagtaagtaacgctgatgcatcagagggacctgctagctgtattagccttaagtgctttgtgttttataagt

SEQ ID NO: 85581 - DNA, 80 bp, synthetic construct
  source 1..80: mol_type = other DNA
tgcaaaaccaacactattctgtgcttcagatgttaacttgacaagcacagagaaacataatatttgggcatcacaagcct

SEQ ID NO: 85582 - DNA, 80 bp, synthetic construct
  source 1..80: mol_type = other DNA
tcaaatacaacaaatacaaccatcctaaaagaagaagcaacagccataaaaagctgtagctttgatgtaactacagttct

SEQ ID NO: 85583 - DNA, 80 bp, synthetic construct
  source 1..80: mol_type = other DNA
caaagacaaaaaggagaaaaaacaggctctattttatgtaacagatctggctaaggttgacccaacagatccaaattcaa

SEQ ID NO: 85584 - DNA, 80 bp, synthetic construct
  source 1..80: mol_type = other DNA
ttacttgtacacatggcatcaagccaacagtaagtactcagctaatattgaatgggacaatatctaaagacaaaacaaga

SEQ ID NO: 85585 - DNA, 80 bp, synthetic construct
  source 1..80: mol_type = other DNA
attatgggacaaaatatcacagacagtgggaagaatatcataataaccctaaatactactataaaaatgaattgcacgaa

SEQ ID NO: 85586 - DNA, 80 bp, synthetic construct
  source 1..80: mol_type = other DNA
agaaggaaataatgagatacaagaaataaaaatagggcccatgtcatggctcagtatggcagttactgcaaatgaaactg

SEQ ID NO: 85587 - DNA, 80 bp, synthetic construct
  source 1..80: mol_type = other DNA
gctcaaaatcaaggatagcttattgtaattatagtagcaccgaatgggaaaaggccttaaaactaacagctgaaagatat

SEQ ID NO: 85588 - DNA, 80 bp, synthetic construct
  source 1..80: mol_type = other DNA
gtacaacttttaaacataacagaaaaagttaccataacattcaaaaatagcagtgggggagatgcagaaataagccgttt

SEQ ID NO: 85589 - DNA, 80 bp, synthetic construct
  source 1..80: mol_type = other DNA
gcattttaactgtcatggagaattcttttattgtaacacatctaagatgtttaactatacttttgactgtacaagtggca

SEQ ID NO: 85590 - DNA, 80 bp, synthetic construct
  source 1..80: mol_type = other DNA
actgtactgagatcaattccatgaataaaactgatgagcataatggactaccttgcaggttaagacaggtagtaagatca

SEQ ID NO: 85591 - DNA, 80 bp, synthetic construct
  source 1..80: mol_type = other DNA
tggataaagggagagtcaggactttatgcacctcccatcagaggcaacctcacatgccagtccaacataactggaatgat

SEQ ID NO: 85592 - DNA, 80 bp, synthetic construct
  source 1..80: mol_type = other DNA
tctacaactagatgaaccatataaccgcacatcagatgcaaatgtcacacttagaccaagtgggggagacatgcaagata

SEQ ID NO: 85593 - DNA, 80 bp, synthetic construct
  source 1..80: mol_type = other DNA
tatggagagctcaattgtacaactacaaagtagtacagataaaaccttttagtgtagcacctacaagaatctcaaggcca

SEQ ID NO: 85594 - DNA, 80 bp, synthetic construct
  source 1..80: mol_type = other DNA
acaataaaccttaacacccctcgcagagaaaaaagagcagtaggattgggaatgctgttcttgggggcgctaagccttgc

SEQ ID NO: 85595 - DNA, 80 bp, synthetic construct
  source 1..80: mol_type = other DNA
tctgtatggggtatcagacaactccgagctcgcctgcaagccttagagacccttgtacagaatcagcaacgcctaaacct

SEQ ID NO: 85596 - DNA, 80 bp, synthetic construct
  source 1..80: mol_type = other DNA
atggggctgtaagggaaggataatctgttacacatcagtaaaatggaacacatcatggggagattacaatgacagtattt

SEQ ID NO: 85597 - DNA, 80 bp, synthetic construct
  source 1..80: mol_type = other DNA
ggaaccactatacatggcagcaatgggaccaacaaatagataatataagctccattatctatgatgaaatacaagcagca

SEQ ID NO: 85598 - DNA, 80 bp, synthetic construct
  source 1..80: mol_type = other DNA
caagaccaacaggaaaggaatgtaaaggcactgctggagctagatgaatgggcctctctttggaactggtttgacataac

SEQ ID NO: 85599 - DNA, 80 bp, synthetic construct
  source 1..80: mol_type = other DNA
aacccctctcgttgcagatccctatccaacaccgtcaggaagcagaagcgccaggaggaacaggagaaggaggtggagac

SEQ ID NO: 85600 - DNA, 80 bp, synthetic construct
  source 1..80: mol_type = other DNA
ggagacaggcgggcgtggagaaccttgccaccaggattcttgcatctgctatacacagacctccggacgataatcctgtg

SEQ ID NO: 85601 - DNA, 80 bp, synthetic construct
  source 1..80: mol_type = other DNA
gacaaaagataattaatgctttcaaactttgtggagctgtaacacaatactggctacaagaattgcagactagtgctata

SEQ ID NO: 85602 - DNA, 80 bp, synthetic construct
  source 1..80: mol_type = other DNA
attccttaacatcccaagaagggttagacaaggcgcagaaatagcattattgtaacatggggaatgcctggagcaaaagc

SEQ ID NO: 85603 - DNA, 80 bp, synthetic construct
  source 1..80: mol_type = other DNA
agaagtctccagggcattagcagacagagggggaataccaaattcctacaatcctcaaaacaatgcagctctcgcattcc

SEQ ID NO: 85604 - DNA, 80 bp, synthetic construct
  source 1..80: mol_type = other DNA
atacacgtgaggatgctagtctgctacatccagcttgtaatcatggcgctgaggatgaacacggggagatgctaaaatgg

SEQ ID NO: 85605 - DNA, 80 bp, synthetic construct
  source 1..80: mol_type = other DNA
cagtttgatagaacattaggcagcacacatatagccctgcaaaagcacccagagctcttccccaagtaaataaaactgct

SEQ ID NO: 85606 - DNA, 80 bp, synthetic construct
  source 1..80: mol_type = other DNA
aacctgtgggactttccagactgctgacactgcgggactttccagcctgctgacactgcggggactttccagtgtgggag

SEQ ID NO: 85607 - DNA, 80 bp, synthetic construct
  source 1..80: mol_type = other DNA
gcaacacaaaagctgaaggaagtaatggggagcagaaagtctgcagcggccgctaaggaagacacaagcgggaggcagac

SEQ ID NO: 85608 - DNA, 80 bp, synthetic construct
  source 1..80: mol_type = other DNA
caaggggccttacaagtgctaaaagaagtaatcaatgaggaagcatcagattgggatagaactcatccaccagcgatggg

SEQ ID NO: 85609 - DNA, 80 bp, synthetic construct
  source 1..80: mol_type = other DNA
actgggttaccagggccaacaaccctatcccagtaggagatatctatagaaaatggatagtgctaggattaaacaaaatg

SEQ ID NO: 85610 - DNA, 80 bp, synthetic construct
  source 1..80: mol_type = other DNA
ggaccaactcataaggccagagtgctagcagaagcaatggctacggcccagcaagatctgaagggaggatgcacagcaat

SEQ ID NO: 85611 - DNA, 80 bp, synthetic construct
  source 1..80: mol_type = other DNA
atttatgcaaagagggcaaaatccaattaggaaaggacctataaaatgtttcaattgtggaaaagagggacatctagcaa

SEQ ID NO: 85612 - DNA, 80 bp, synthetic construct
  source 1..80: mol_type = other DNA
ctcctgcatccagcttgcaaccatggctcggaagatgcacacggacagatactgaaatggcagtttgatagatcactagg

SEQ ID NO: 85613 - DNA, 80 bp, synthetic construct
  source 1..80: mol_type = other DNA
caacacccatgttgctatgataacccatccagagctcttcaacaaggactaaaactgctgacctgaagatagctgacgct

SEQ ID NO: 85614 - DNA, 80 bp, synthetic construct
  source 1..80: mol_type = other DNA
gtgtccagaaattaacagaagatagatggagcaggcacctgaagaccaaggaccagctagagagccatttaatgaatggg

SEQ ID NO: 85615 - DNA, 80 bp, synthetic construct
  source 1..80: mol_type = other DNA
gcagcatagggatttgctaataattattagtgctttgctacttataaatgtaattttatggatgtttgttcttaaacagt

SEQ ID NO: 85616 - DNA, 80 bp, synthetic construct
  source 1..80: mol_type = other DNA
gcttagagcaaaggaaacaaagtagaagggaaagagaactaattgaaaggttaagaagaataagagaaattaaagatgac

SEQ ID NO: 85617 - DNA, 80 bp, synthetic construct
  source 1..80: mol_type = other DNA
aaccccagtattattctgtgcttcagatgcgaacctaacaagcactgagcagcataacatttgggcatcacaagcctgtg

SEQ ID NO: 85618 - DNA, 80 bp, synthetic construct
  source 1..80: mol_type = other DNA
aaacagtgtgcctttaatataaccacagttctcaaagacaaaaaggagaaaaaacaggctctgttctatgtatcagattt

SEQ ID NO: 85619 - DNA, 80 bp, synthetic construct
  source 1..80: mol_type = other DNA
agtactcaactaatattaaatgggacactctctgaaggaaaaatcagaattatggggaaaaatatctcggacagtggcaa

SEQ ID NO: 85620 - DNA, 80 bp, synthetic construct
  source 1..80: mol_type = other DNA
aagcatcttagtgaccctaaattctactataaacataacctgtgagagaccatggaatctgtcattacaagagatacgca

SEQ ID NO: 85621 - DNA, 80 bp, synthetic construct
  source 1..80: mol_type = other DNA
taggtccaatggcctggtatagcattgctttacagacacaaccccaggcaaggttagctcattgcacgtataataccact

SEQ ID NO: 85622 - DNA, 80 bp, synthetic construct
  source 1..80: mol_type = other DNA
gattgggaaaaagccttaaaacaaacagctgaaaggtacttagaacttgtaaactatacaagtggtaatgttaacataac

SEQ ID NO: 85623 - DNA, 80 bp, synthetic construct
  source 1..80: mol_type = other DNA
attcaatagaagcaatgagggaggagatgcagaaataacccagctacattttaactgtcacggagagttcttctattgta

SEQ ID NO: 85624 - DNA, 80 bp, synthetic construct
  source 1..80: mol_type = other DNA
acacatctagtctgtttaattatagcttttcatgtaacggaaccaactgtactattaaccaaactaaaaatgagacttgg

SEQ ID NO: 85625 - DNA, 80 bp, synthetic construct
  source 1..80: mol_type = other DNA
ataccttgcaggataaaacaggtagtaaggtcatggatacagggagggtcaggactctacgcacctcccatccgaggtgc

SEQ ID NO: 85626 - DNA, 80 bp, synthetic construct
  source 1..80: mol_type = other DNA
actaaaatgtgagtcaaacataactggaataattctagaaatggatcagccatggaataaaagcagcccagatgtcacat

SEQ ID NO: 85627 - DNA, 80 bp, synthetic construct
  source 1..80: mol_type = other DNA
ttagaccaatagggggagacatgaaagacatatggagaactgaattgttcagatacaaagtagtaaaggtaaaacctttt

SEQ ID NO: 85628 - DNA, 80 bp, synthetic construct
  source 1..80: mol_type = other DNA
atggggttgtaagggaaggataatctgctacacatcagtaaaatggaacagtacatggggaaatgtcaccagtatgagtg

SEQ ID NO: 85629 - DNA, 80 bp, synthetic construct
  source 1..80: mol_type = other DNA
aagtttgggacaaactaacctggcaggaatgggatcagcagatagacaacataagcaatgttatatttgatgaaatacaa

SEQ ID NO: 85630 - DNA, 80 bp, synthetic construct
  source 1..80: mol_type = other DNA
ttcgtaacatcccaaggagaactagacagggcttagaacaaagtttattgtaacatgggaaacgcattgaggaaaagccc

SEQ ID NO: 85631 - DNA, 80 bp, synthetic construct
  source 1..80: mol_type = other DNA
gaaagcctgcagtcactctggaacacaatagcggtactctggtgtgttcacaacaggtttaaagttgatgatacgcagca

SEQ ID NO: 85632 - DNA, 80 bp, synthetic construct
  source 1..80: mol_type = other DNA
ggcaatacaaaagttaaagcaagtaatggagagcaggaagtctaccagtaccgctaaggaagaaacaaactcaaggcaga

SEQ ID NO: 85633 - DNA, 80 bp, synthetic construct
  source 1..80: mol_type = other DNA
tggactactaggggaaataacccagtcccagtaggagacatctatagaaaatggatagtgctagggctaaacaaaatggt

SEQ ID NO: 85634 - DNA, 80 bp, synthetic construct
  source 1..80: mol_type = other DNA
agcaagatctaaaaggagggtatacagcagtattcatgcaaagagggcaaaattcaaacagaaaagggcctatgaagtgt

SEQ ID NO: 85635 - DNA, 80 bp, synthetic construct
  source 1..80: mol_type = other DNA
cttctacatccagcttgtaatcatgggtttgaggatgaccatggagaagtattaatgtggcagttcgatcgctccttagg

SEQ ID NO: 85636 - DNA, 80 bp, synthetic construct
  source 1..80: mol_type = other DNA
ggcacgaggccaggcaattatctgcagaaacaagtgtccccatcagccccaccaatggaggaggtaatgaagagacagga

SEQ ID NO: 85637 - DNA, 80 bp, synthetic construct
  source 1..80: mol_type = other DNA
gaagcaggggcaagaaaatcagactcaagggggagaccaggacgaactctacccgtttgcctccctcaaatccctctttg

SEQ ID NO: 85638 - DNA, 80 bp, synthetic construct
  source 1..80: mol_type = other DNA
ggacagaccagtagtcatagcaaaggttgggggccatccatgtgaggttttactggatacgggggcagatgatacagtat

SEQ ID NO: 85639 - DNA, 80 bp, synthetic construct
  source 1..80: mol_type = other DNA
cttaaaacatatagccttagaaaagcacccagagctcttccccaaataacaactgctaacatgaagattgctgacactgc

SEQ ID NO: 85640 - DNA, 80 bp, synthetic construct
  source 1..80: mol_type = other DNA
gtagccttacaggattccaaagagaaagtaaatatagtaacagattctcaatatgcactgggtgttatatcctcccagcc

SEQ ID NO: 85641 - DNA, 80 bp, synthetic construct
  source 1..80: mol_type = other DNA
ctagaaaagccaaggattggcattataaacatcattatgagtcaggaaatccaagagtcagttcaattgtatatattcca

SEQ ID NO: 85642 - DNA, 80 bp, synthetic construct
  source 1..80: mol_type = other DNA
gtaggtgagggtgaaataaaggtgactacatattggggattaatgccaggggaaagagaggaacacttgggacatggggt

SEQ ID NO: 85643 - DNA, 80 bp, synthetic construct
  source 1..80: mol_type = other DNA
ttgcttgttttacagagtcagcaatcaggaaagccattctagggcagagaatattgaccaagtgtgaataccttgcagga

SEQ ID NO: 85644 - DNA, 80 bp, synthetic construct
  source 1..80: mol_type = other DNA
catagtcaggtagggacactgcaattcctagctttaaaagtattagtgaaagtaaaaagaaataaacctcccctacccag

SEQ ID NO: 85645 - DNA, 80 bp, synthetic construct
  source 1..80: mol_type = other DNA
actagagctcctggaagagctaaaagcagaatcagtaagacatttccctaggaattggttacaagcccttgggcaataca

SEQ ID NO: 85646 - DNA, 80 bp, synthetic construct
  source 1..80: mol_type = other DNA
tttatgagacttatggagacacttgggaaggagtcatggcaattataagaattttacaacagctactatttgcccatttt

SEQ ID NO: 85647 - DNA, 80 bp, synthetic construct
  source 1..80: mol_type = other DNA
aagaagcggcgaagaccagcagctactgcaagccatccagataataaagatcctgtaccagagcagtaagtaacgctaat

SEQ ID NO: 85648 - DNA, 80 bp, synthetic construct
  source 1..80: mol_type = other DNA
gcatcacagggacctgatagccttaatagcttttagtgttgcatgtcttttatgtgtacttgtatggatgcttgtcctta

SEQ ID NO: 85649 - DNA, 80 bp, synthetic construct
  source 1..80: mol_type = other DNA
agcaccagtactattctgtgcctcagatgttaacatgacaagcatggagaaacataatatttgggcatcacaagcctgcg

SEQ ID NO: 85650 - DNA, 80 bp, synthetic construct
  source 1..80: mol_type = other DNA
ggcagcacaaatacaacagatacaaatacaacatatacaaatacaacagatacaaaccccatgaaaaagtgtgattttaa

SEQ ID NO: 85651 - DNA, 80 bp, synthetic construct
  source 1..80: mol_type = other DNA
tgtaactacagttcttaaagacaaactagagaaaaaacaggctctattttatgtctcagatctgatgaaactagaggaaa

SEQ ID NO: 85652 - DNA, 80 bp, synthetic construct
  source 1..80: mol_type = other DNA
ctcaactaatactcaatgggacactctctaaagataacataagaatcatgggaaaaaatatttcgaacagtggaaagact

SEQ ID NO: 85653 - DNA, 80 bp, synthetic construct
  source 1..80: mol_type = other DNA
attatagtaaccctgaaaaaacctataaaattaaattgcacgagagaaggaaatcaggaaacacaagatatagggatagg

SEQ ID NO: 85654 - DNA, 80 bp, synthetic construct
  source 1..80: mol_type = other DNA
tccattgaaatggcgtagtatacaacttatagacaatggaacaaatccaagagcagcctattgtaactatagtatcgctg

SEQ ID NO: 85655 - DNA, 80 bp, synthetic construct
  source 1..80: mol_type = other DNA
cctgggaagaggccttaaaagagacagctgaaagatatctaaaacttgtaaacaatacagagaatactactataatattt

SEQ ID NO: 85656 - DNA, 80 bp, synthetic construct
  source 1..80: mol_type = other DNA
aatgcaagcactgggggggatgcagaaataaccaatctacattttagctgtcatggagaattcttttattgcaacacatc

SEQ ID NO: 85657 - DNA, 80 bp, synthetic construct
  source 1..80: mol_type = other DNA
gctgtcatggagaattcttttattgcaacacatctgggttgtttaatcatacttttgagtgtatagagcacaactgtact

SEQ ID NO: 85658 - DNA, 80 bp, synthetic construct
  source 1..80: mol_type = other DNA
tgggttgtttaatcatacttttgagtgtatagagcacaactgtacttctaaaattaatagcacccatgaaaatagctccc

SEQ ID NO: 85659 - DNA, 80 bp, synthetic construct
  source 1..80: mol_type = other DNA
aatagcacccatgaaaatagctcccaaagaaatggaacaataccgtgcaggataagacaggtagtaagagcatggatggg

SEQ ID NO: 85660 - DNA, 80 bp, synthetic construct
  source 1..80: mol_type = other DNA
aaagaaatggaacaataccgtgcaggataagacaggtagtaagagcatggatggggggaaggtcaggactctatgcacct

SEQ ID NO: 85661 - DNA, 80 bp, synthetic construct
  source 1..80: mol_type = other DNA
cccatcaaaggtatcctaacatgtcaatcaaatataactggaatgctactagaaagggatgaaccatggaaccaaacagg

SEQ ID NO: 85662 - DNA, 80 bp, synthetic construct
  source 1..80: mol_type = other DNA
cacaaataacagcacatttagaccaacagggggagatatgagagatatatggagaactagcttatacaattacaaagtag

SEQ ID NO: 85663 - DNA, 80 bp, synthetic construct
  source 1..80: mol_type = other DNA
taagaataaaaccttttagtgtggcacctacaaaaattgcaagaccagtcataaaagctcctagagaaagaagggcagca

SEQ ID NO: 85664 - DNA, 80 bp, synthetic construct
  source 1..80: mol_type = other DNA
ggattgggaatgctattcttgggggtgctaagtgcagcaggtagcactatgggcgcagtgtcaatgacactgacggtaca

SEQ ID NO: 85665 - DNA, 80 bp, synthetic construct
  source 1..80: mol_type = other DNA
gacccaaaacgtgttaaagggtatagtgcaacagcaggacaacctgctgagagcgatacaggcccagcaccacttgctga

SEQ ID NO: 85666 - DNA, 80 bp, synthetic construct
  source 1..80: mol_type = other DNA
ggctatctgtatggggcattagacagctccgagctcgcctgctagccttagagaccctcatgcagaatcagcaactccta

SEQ ID NO: 85667 - DNA, 80 bp, synthetic construct
  source 1..80: mol_type = other DNA
agcctatggggctgtcagggaaagttaatctgctacacatcagtagaatggaacaactcatggggaggactaacagaaga

SEQ ID NO: 85668 - DNA, 80 bp, synthetic construct
  source 1..80: mol_type = other DNA
tatctggacaaacctaacatggcaggagtgggatcaacaaataagcaacataagctccattatatatgaccaaatacaag

SEQ ID NO: 85669 - DNA, 80 bp, synthetic construct
  source 1..80: mol_type = other DNA
aagcagaaatacaacaagaaaaaaacaaaaaggctttgctggagctaaatgaatgggcctctctttggaactggtttgac

SEQ ID NO: 85670 - DNA, 80 bp, synthetic construct
  source 1..80: mol_type = other DNA
aacccctctcgttacagatccctgtccagcaccagcaggaagtagaagcgccaggaggaacaggaggagaaggtggagac

SEQ ID NO: 85671 - DNA, 80 bp, synthetic construct
  source 1..80: mol_type = other DNA
ggaggcaggcacaggttgacacccttgccgccaggattcttgcaactgttgtacacggacctcaggacaataatcttgtg

SEQ ID NO: 85672 - DNA, 80 bp, synthetic construct
  source 1..80: mol_type = other DNA
ggcagaggacaattgaagcttgcagattttgtggagctgtggtgcaatactggatacaagaattacaaactagtgctaca

SEQ ID NO: 85673 - DNA, 80 bp, synthetic construct
  source 1..80: mol_type = other DNA
agcttgctagatactattgcagtgataattgccaattggactgacggcatcatagtaggcatacaaactttaggaagagg

SEQ ID NO: 85674 - DNA, 80 bp, synthetic construct
  source 1..80: mol_type = other DNA
aatcctcaacatcccaagaagaattagacagggcctcgaaaggagcttattataatatggggaatgcatggagtagacgc

SEQ ID NO: 85675 - DNA, 80 bp, synthetic construct
  source 1..80: mol_type = other DNA
aaatttgcaggatggtcagaagtaagaaacagaatgagacaaacctcccctgaccctttaccccaaccatgtgcacctgg

SEQ ID NO: 85676 - DNA, 80 bp, synthetic construct
  source 1..80: mol_type = other DNA
agtaggagcagtctccagggagctagcagagagaggaggaataccaagttcctacactcctcaaaacaatgcagcccttg

SEQ ID NO: 85677 - DNA, 80 bp, synthetic construct
  source 1..80: mol_type = other DNA
cttaaaacatatagccttagaaaagcacccagagctcttccccaaataacaactgcgggactttccagactgctgacact

SEQ ID NO: 85678 - DNA, 80 bp, synthetic construct
  source 1..80: mol_type = other DNA
aagacagggtcagaaaacctgaagtcactttggaacacagtagcagtactctggtgtgttcacaacaggtttaaggttga

SEQ ID NO: 85679 - DNA, 80 bp, synthetic construct
  source 1..80: mol_type = other DNA
agatacgcagcaggcaatacaaaaattaaaggaagtaatggaaaaaagacaggctgcaaatatggctaaaaaagaagaca

SEQ ID NO: 85680 - DNA, 80 bp, synthetic construct
  source 1..80: mol_type = other DNA
gactgggatagaactcatccaccagtagtaggaccgttgccgccagggcagatgagggatccaacaggaagtgatattgc

SEQ ID NO: 85681 - DNA, 80 bp, synthetic construct
  source 1..80: mol_type = other DNA
tggaacaactagcacccagatagagcaaattcaatggattactaggcctaataatcctatcccagttggagatatctata

SEQ ID NO: 85682 - DNA, 80 bp, synthetic construct
  source 1..80: mol_type = other DNA
ctcctacatccagtttgtaataatggatttgaggatccgcacggggaaatactgaaatggcagtttgatagatcactagc

SEQ ID NO: 85683 - DNA, 80 bp, synthetic construct
  source 1..80: mol_type = other DNA
cagccccaccaatggaggaagtactagaggagcagaagggtcagaatcaaggagggagtcagagcgagctctatccattt

SEQ ID NO: 85684 - DNA, 80 bp, synthetic construct
  source 1..80: mol_type = other DNA
caccacccatgtagctcggataactcacccagagctcttctccaaagactaagactgctgacgctgcgggactttccagt

SEQ ID NO: 85685 - DNA, 80 bp, synthetic construct
  source 1..80: mol_type = other DNA
aatggacttaccagatatatcaggatgaacataggaacctcaagacagggaaatatgctagacaaaaggcctcccataca

SEQ ID NO: 85686 - DNA, 80 bp, synthetic construct
  source 1..80: mol_type = other DNA
aatgatataagacaattagcaaacttaatccagaaggtgtctcaagaatctatagttatctggggaaaattgcctagatt

SEQ ID NO: 85687 - DNA, 80 bp, synthetic construct
  source 1..80: mol_type = other DNA
cactgggcatcatctcctcccagcctacacagagtgactcccccatagttcagcaaataatagaagaactgacaaaaaag

SEQ ID NO: 85688 - DNA, 80 bp, synthetic construct
  source 1..80: mol_type = other DNA
actaagaaagccaaagaatggtattatagacatcattttgagtctagaaatccaagattcagttcaggtgtatatattcc

SEQ ID NO: 85689 - DNA, 80 bp, synthetic construct
  source 1..80: mol_type = other DNA
attaggtgaagccagtataatggtgaccacatattggggattaatgccaggggaaagagaagagcacttgggacatgggg

SEQ ID NO: 85690 - DNA, 80 bp, synthetic construct
  source 1..80: mol_type = other DNA
acatagtcaggtagggacactacaattcctagctttgagagcagttgtaaaaatagagagaaagaagcctcccttaccca

SEQ ID NO: 85691 - DNA, 80 bp, synthetic construct
  source 1..80: mol_type = other DNA
gtgtccaaaagttaacagaagacagatggaacaggtacccgaagatcaaggaccagctagggagccattcaatgaatggg

SEQ ID NO: 85692 - DNA, 80 bp, synthetic construct
  source 1..80: mol_type = other DNA
cactagagctcctagaggagctaaaagcagaagcagtaagacatttccctaggacttggttacactccttgggacaatac

SEQ ID NO: 85693 - DNA, 80 bp, synthetic construct
  source 1..80: mol_type = other DNA
atttatgaaacttatggagacacttgggaaggagtaatggcaattataagaatcttacaacaaataatatttacccatta

SEQ ID NO: 85694 - DNA, 80 bp, synthetic construct
  source 1..80: mol_type = other DNA
tagaattggatgtcaacatagtagaataggaattatccagtctaattcaagagcaagagaaagaagaaatggaccccgta

SEQ ID NO: 85695 - DNA, 80 bp, synthetic construct
  source 1..80: mol_type = other DNA
gatcctgacctacccccctggcatcaccctggaagccaaccccaaaccccgtgtaattcttgctattgcaaaagatgctg

SEQ ID NO: 85696 - DNA, 80 bp, synthetic construct
  source 1..80: mol_type = other DNA
ctatcattgcctcctttgtttcacaaagaagggtttggggatctcctatggcaggaagaagcgacgacgaccggcagctg

SEQ ID NO: 85697 - DNA, 80 bp, synthetic construct
  source 1..80: mol_type = other DNA
ctgcaagccatccagatagtaaagatcctgtaccagagcagtaagtaacgctgatgcatcacagggacctgctagtctta

SEQ ID NO: 85698 - DNA, 80 bp, synthetic construct
  source 1..80: mol_type = other DNA
atagctattagtgctttgcttcttgccaacatacttatatggatgtttaatcttagaaggtatttagaacaaaagaaaca

SEQ ID NO: 85699 - DNA, 80 bp, synthetic construct
  source 1..80: mol_type = other DNA
gaagcagaaaaatctctagcagtggcgcccgaacagggaccgtgaaagtgaaaccagggaagaaaacctccgacgcaacg

SEQ ID NO: 85700 - DNA, 80 bp, synthetic construct
  source 1..80: mol_type = other DNA
cctgtatgggaagatgcaaaaccagtactattttgtgcatcaaatgctagcctgacaagcactgagcagcacaatatttg

SEQ ID NO: 85701 - DNA, 80 bp, synthetic construct
  source 1..80: mol_type = other DNA
ggcaacacaagcttgcgttcccacagaccccacgccaattgaatatctcctaaaaaatgtaacagatagatttgatatat

SEQ ID NO: 85702 - DNA, 80 bp, synthetic construct
  source 1..80: mol_type = other DNA
ggaataattacatggtggagcaaatgcatgatgacattattggtttatgggaacagagtttaaaaccttgtgttcaattg

SEQ ID NO: 85703 - DNA, 80 bp, synthetic construct
  source 1..80: mol_type = other DNA
accttcttgtgtgtacaaatgaattgtacagattttaatgtaactacagtactcaaagataaaaaagagaaaaaacaggc

SEQ ID NO: 85704 - DNA, 80 bp, synthetic construct
  source 1..80: mol_type = other DNA
tttattctatgtgtcagatttggttaagattgatgacaaagacaactcaagtaagtcaatatatacattaattaattgta

SEQ ID NO: 85705 - DNA, 80 bp, synthetic construct
  source 1..80: mol_type = other DNA
gtactcaattaatactaaatgggacactctctaaaggaaacatacaaattatgggaaaagatatttcagacactgggaag

SEQ ID NO: 85706 - DNA, 80 bp, synthetic construct
  source 1..80: mol_type = other DNA
aatatcctagtatccctaaattctagcataaacatgacctgtgagagaccatacaatcagacaatacaagaggtgtggat

SEQ ID NO: 85707 - DNA, 80 bp, synthetic construct
  source 1..80: mol_type = other DNA
gactcggcttagcggagtgcacccgctgagaggcgagaggaactcacgaggggtgagtaaatttgctggcagtggccaga

SEQ ID NO: 85708 - DNA, 80 bp, synthetic construct
  source 1..80: mol_type = other DNA
aggcagcccaatggcttggtacagcatggcgcttgatagggagcagaataaaacgataacaaggatggctttttgtaggt

SEQ ID NO: 85709 - DNA, 80 bp, synthetic construct
  source 1..80: mol_type = other DNA
ataatggcactggctggaaagaaaccctaaaacaaatagctggaagatatttagaacttgtaaaaaacaaagagaagaat

SEQ ID NO: 85710 - DNA, 80 bp, synthetic construct
  source 1..80: mol_type = other DNA
aatattagcgtagcattcaaaagcagcagtggaggagatgtagaggtaacctctttacattttaactgtcatggagaatt

SEQ ID NO: 85711 - DNA, 80 bp, synthetic construct
  source 1..80: mol_type = other DNA
cttttattgtaacacaactacgctatttaatcatactttttcttgtaacaattccacctgtcagaacatgtctggcagtg

SEQ ID NO: 85712 - DNA, 80 bp, synthetic construct
  source 1..80: mol_type = other DNA
acacttctagcaatgacactataccttgcaggttgaaacagatagtaaggtcatggatagggggagagtcgggattctat

SEQ ID NO: 85713 - DNA, 80 bp, synthetic construct
  source 1..80: mol_type = other DNA
gcacctcccatcaagggtgccctaaattgcacctcacaaataactggaatgattttacaactggactatccatggaacaa

SEQ ID NO: 85714 - DNA, 80 bp, synthetic construct
  source 1..80: mol_type = other DNA
cacagagggaaaggccacaaataacacaaaaaacaataccaacgtcatatttagaccaacagggggagatatgaaagata

SEQ ID NO: 85715 - DNA, 80 bp, synthetic construct
  source 1..80: mol_type = other DNA
tatggaggactaaattatttaactataaggtagtaaaggtaaaaccttttagtatagcacctacaaaagttgcaagacca

SEQ ID NO: 85716 - DNA, 80 bp, synthetic construct
  source 1..80: mol_type = other DNA
gtcataggaactggcactcatagggagaaaagggcagcaggtatggcaatgctattcttgggggttctaagtgcagcagg

SEQ ID NO: 85717 - DNA, 80 bp, synthetic construct
  source 1..80: mol_type = other DNA
cctaggggaagggcgaagtccctaggggaggaagatgggtgcgagagcgtctgtgttgtcagggagcaaattggacgcat

SEQ ID NO: 85718 - DNA, 80 bp, synthetic construct
  source 1..80: mol_type = other DNA
gtggggctgcaagggaaagctaatctgctacacatcagtacggtggaacagctcatggggaaaggatgatgatagtattt

SEQ ID NO: 85719 - DNA, 80 bp, synthetic construct
  source 1..80: mol_type = other DNA
gggaaaacctaacatggcaagagtgggatcaacagataagcaatgtaagttccatcatatatgatagaatacaagaggca

SEQ ID NO: 85720 - DNA, 80 bp, synthetic construct
  source 1..80: mol_type = other DNA
caagaacaacaggaaagaaatgagcaaaaattgctggagttagatgaatggagctctctttggaatttgtttgacataac

SEQ ID NO: 85721 - DNA, 80 bp, synthetic construct
  source 1..80: mol_type = other DNA
acccctctcgttacagacccccacccgtcaccaaccggaagtagaagcgccaggagaaacaggaggagaaggtggagacg

SEQ ID NO: 85722 - DNA, 80 bp, synthetic construct
  source 1..80: mol_type = other DNA
cagacaggcgcaggtggatttcatcgcagcaagggttcttgcaactgttgtacacggacctcaggacaataattgtgtgg

SEQ ID NO: 85723 - DNA, 80 bp, synthetic construct
  source 1..80: mol_type = other DNA
agctaccacctcttgagcaacttagcatcagggatccagaagatcatcaggcacctgagacttggactgtggagcatagg

SEQ ID NO: 85724 - DNA, 80 bp, synthetic construct
  source 1..80: mol_type = other DNA
gcagtggataattgaagcttgcagactccttagagctataatacaatactggctacaagaattgcaaaatagtgctacaa

SEQ ID NO: 85725 - DNA, 80 bp, synthetic construct
  source 1..80: mol_type = other DNA
atctactagatactattgcagtggcagttgccaattggactgacagcatcatcttaggcatacaaaggatagggtgggga

SEQ ID NO: 85726 - DNA, 80 bp, synthetic construct
  source 1..80: mol_type = other DNA
attcttcacatcccaagaagaattagacagggcttggaacgcagcttattgtaacatgggaaatgcatggagcaaaaaca

SEQ ID NO: 85727 - DNA, 80 bp, synthetic construct
  source 1..80: mol_type = other DNA
aatgggcgggatgggcagcagtaagagaaagaatgagaaaaacttcccctgaccctctaccatgtgcacctggagtggga

SEQ ID NO: 85728 - DNA, 80 bp, synthetic construct
  source 1..80: mol_type = other DNA
gcagtctccagggcgttagcagacagaggagggataccaagctctcagactcctcaaaacaatgcagccctcgcattctt

SEQ ID NO: 85729 - DNA, 80 bp, synthetic construct
  source 1..80: mol_type = other DNA
ggcagtacaaaaattaagggaagtaatggggagcaggaagtctgcaagtgccgctaaggaagatacaagcgcaaggcaga

SEQ ID NO: 85730 - DNA, 80 bp, synthetic construct
  source 1..80: mol_type = other DNA
ctcccacacaaatgatataagactattagcagaggcagtccaaaaggtgtctcaagaatctatagtaatctggggaaaat

SEQ ID NO: 85731 - DNA, 80 bp, synthetic construct
  source 1..80: mol_type = other DNA
tcggggaaaaccagggaatggtattacaagcaccattatgagtctagaaatccaagagtcagttcaggtgtatatattcc

SEQ ID NO: 85732 - DNA, 80 bp, synthetic construct
  source 1..80: mol_type = other DNA
agagcagtaagtaatgctaatgcatcatagggacctgctgacattaataatttttagtgctttactgcttataactataa

SEQ ID NO: 85733 - DNA, 80 bp, synthetic construct
  source 1..80: mol_type = other DNA
ttctatggatgcttgttcttagacagtgtttaaaacaaaagaaacaagaaaaaagggaaagggacataattgaaaggtta

SEQ ID NO: 85734 - DNA, 80 bp, synthetic construct
  source 1..80: mol_type = other DNA
accccagtattattctgtgcttcagatgctaacctaacaagtgaggaaaagcataatatttgggcatcacaagcctgtgt

SEQ ID NO: 85735 - DNA, 80 bp, synthetic construct
  source 1..80: mol_type = other DNA
agagcatcaaatgaagcaagtacaaaggaaacagagaatcctgtaaaacaatgtgagtttaatgtaaccacagttctcaa

SEQ ID NO: 85736 - DNA, 80 bp, synthetic construct
  source 1..80: mol_type = other DNA
agacaaaaaggagaaaaaacaggctctattctatgtgtcagacttaactaaactgaatgatacaagtggcacaatgtata

SEQ ID NO: 85737 - DNA, 80 bp, synthetic construct
  source 1..80: mol_type = other DNA
acagtgagtactcagctaatattaaatgggacactcgctgaaggaaaagtaagaattatgggaaaaaatatttcggactc

SEQ ID NO: 85738 - DNA, 80 bp, synthetic construct
  source 1..80: mol_type = other DNA
tggaaaaaatatcatagtaaccctgaattctactataaatatgacctgtgtgagagcatgggatcaggaagtacaagaga

SEQ ID NO: 85739 - DNA, 80 bp, synthetic construct
  source 1..80: mol_type = other DNA
taaaagcaggtccaatggcctggtacagcatggccttagcgaaagagtcaaactccagttcaagggcagcttattgcgag

SEQ ID NO: 85740 - DNA, 80 bp, synthetic construct
  source 1..80: mol_type = other DNA
tataacaacactgattgggaaaaggccttaaaacaaacagctgaaaggtatttagaacttgtaaacaagagtaagaatga

SEQ ID NO: 85741 - DNA, 80 bp, synthetic construct
  source 1..80: mol_type = other DNA
gacaaaggtgatattcagtagcagtattcctggtggagatctagaaacaacccagttgcattttaactgtcatggagagt

SEQ ID NO: 85742 - DNA, 80 bp, synthetic construct
  source 1..80: mol_type = other DNA
tcttctattgtaacacatctaatctatttaattataccttttcatgtgaaggaaccaactgtacatgtaacggaaccaac

SEQ ID NO: 85743 - DNA, 80 bp, synthetic construct
  source 1..80: mol_type = other DNA
tgtgggactaacaatagcacaaatagcacgataccctgtaggttgagacaggtggtaaggtcatggataaggggacagtc

SEQ ID NO: 85744 - DNA, 80 bp, synthetic construct
  source 1..80: mol_type = other DNA
gggactctatgcagctcccatccgaggtaacctaacatgcatatcaaacatcactggaataattttacaaatggattcgc

SEQ ID NO: 85745 - DNA, 80 bp, synthetic construct
  source 1..80: mol_type = other DNA
catggaaacacaacaacaccaatgccacatttaggccaacagggggagatatggaagatatatggagaactgaattgatc

SEQ ID NO: 85746 - DNA, 80 bp, synthetic construct
  source 1..80: mol_type = other DNA
atggggctgtaaaggaaagctcatctgctacacatcagtacaatggaacacaacatggacaccaggtagatggaaaacag

SEQ ID NO: 85747 - DNA, 80 bp, synthetic construct
  source 1..80: mol_type = other DNA
aggaggggatggacgcaatctggggcaacctgacatggcaggaatgggatcagcagatagataacatcagccaggccata

SEQ ID NO: 85748 - DNA, 80 bp, synthetic construct
  source 1..80: mol_type = other DNA
tatgatgaaatacaaaaggcacaagtacagcaggaacaaaatgagaaaaagttgctggagttagatgaatgggcttctat

SEQ ID NO: 85749 - DNA, 80 bp, synthetic construct
  source 1..80: mol_type = other DNA
ctcctgcatccagcttgtaaccacggctttgaagatccacacggggagatactgaaatggcagtttgacagatcactagc

SEQ ID NO: 85750 - DNA, 80 bp, synthetic construct
  source 1..80: mol_type = other DNA
cagccccaccgatggaggaagtgatgaagggacaagagaatcagaatcaggaacaaaaaggggacgaactctatcctttt

SEQ ID NO: 85751 - DNA, 80 bp, synthetic construct
  source 1..80: mol_type = other DNA
cagcacccatgttgctctgataactcacccagagctcttcaacaaggactaaaactgctgacctgaaggttgttgacaca

SEQ ID NO: 85752 - DNA, 80 bp, synthetic construct
  source 1..80: mol_type = other DNA
gcttcataggaacttgctattatcaataattattagtgctttgctgcttacaaatataattctatggatgtatatactta

SEQ ID NO: 85753 - DNA, 80 bp, synthetic construct
  source 1..80: mol_type = other DNA
agaaattctacagctaacagcaagtctacaactcccagctcaggcagcttagagaaccctgtgaaacaatgtgagtttaa

SEQ ID NO: 85754 - DNA, 80 bp, synthetic construct
  source 1..80: mol_type = other DNA
tgttaccacggttctcaaagacaaaaaggagaaaaaacaggctctattctatgtatcagatttggttaaagcgaaggata

SEQ ID NO: 85755 - DNA, 80 bp, synthetic construct
  source 1..80: mol_type = other DNA
taaggataggtccaatggcctggtacagcatgggcttagcgatgggaaacggatctgagtcaagaagagcttattgtgag

SEQ ID NO: 85756 - DNA, 80 bp, synthetic construct
  source 1..80: mol_type = other DNA
gagcatgatattcaatagcagtactggaggagatctagaggtagaccagttacatttcaattgccatggagagttctttt

SEQ ID NO: 85757 - DNA, 80 bp, synthetic construct
  source 1..80: mol_type = other DNA
actgtaacacatcttggttgtttaattatacctttatgtgtaatggaactacctgtgagagcccaaatatcaacagcact

SEQ ID NO: 85758 - DNA, 80 bp, synthetic construct
  source 1..80: mol_type = other DNA
aataacactctgataccttgcaggttgaggcaggtagtaaggtcatggatgaggggaggatcgggactctatgcacctcc

SEQ ID NO: 85759 - DNA, 80 bp, synthetic construct
  source 1..80: mol_type = other DNA
catccgaggtaacttaacatgtagatcaaacataactgggatgattctacagatggatcaaccatggaacatgagccgcc

SEQ ID NO: 85760 - DNA, 80 bp, synthetic construct
  source 1..80: mol_type = other DNA
agaacagcacatttagaccaacagggggagatatgaaagacatatggagaactgaattgctcagatacaaagtagtaagg

SEQ ID NO: 85761 - DNA, 80 bp, synthetic construct
  source 1..80: mol_type = other DNA
ctacacatcagtaaaatggaactggacaggagatgaatctatttggggcaatctcacatggcagcaatgggatcagcaga

SEQ ID NO: 85762 - DNA, 80 bp, synthetic construct
  source 1..80: mol_type = other DNA
tagacaatgtaagctccaccatatatgaggaaatactaaaagcacaaatacaacaggaacaaaatgagaaaaagctgctg

SEQ ID NO: 85763 - DNA, 80 bp, synthetic construct
  source 1..80: mol_type = other DNA
atttgaaggatggtcagcaataagagaaagaatgagaaaaacttcccctgaacctgaaaaacctgaagattgtgcacctg

SEQ ID NO: 85764 - DNA, 80 bp, synthetic construct
  source 1..80: mol_type = other DNA
gggaggactggaagggatgatttactcccatgaaagagcagaaatcctggatctttgggtgcatcacactcagggattct

SEQ ID NO: 85765 - DNA, 80 bp, synthetic construct
  source 1..80: mol_type = other DNA
cagctctcaggacagggtcagagagcctgcagtcactctggaacacaatagcagtactctggtgtgttcacaacagatat

SEQ ID NO: 85766 - DNA, 80 bp, synthetic construct
  source 1..80: mol_type = other DNA
aacattagagatacgcagcaggcagtacaaaagtttaaagaagaaatgaaaagcaggaagtctgcgggtgccgctaagga

SEQ ID NO: 85767 - DNA, 80 bp, synthetic construct
  source 1..80: mol_type = other DNA
gtgtcagaagatgaggcagaaaggctaggaaatacatgtgtaagggctcatctcctgcatccagcgtgtgcccatggctt

SEQ ID NO: 85768 - DNA, 80 bp, synthetic construct
  source 1..80: mol_type = other DNA
agcaagcccagcaagatctgaaaggaggattctcagcagtattcatgcaaagagggcaaaatctaaataggagaggagct

SEQ ID NO: 85769 - DNA, 80 bp, synthetic construct
  source 1..80: mol_type = other DNA
cagccccaccaatggaggaggaagtgaagggacaggcaccaatggaggaggaagtgaagagacaggagaatcaggaacag

SEQ ID NO: 85770 - DNA, 80 bp, synthetic construct
  source 1..80: mol_type = other DNA
aaggggggtcagaacgagctttatccgtttgcctccctcaaatccctctttgggacagaccaatagttacagcaaaggtt

SEQ ID NO: 85771 - DNA, 80 bp, synthetic construct
  source 1..80: mol_type = other DNA
tcagaacgagctttatccgtttgcctccctcaaatccctctttgggacagaccaatagttacagcaaaggttgggggcca

SEQ ID NO: 85772 - DNA, 80 bp, synthetic construct
  source 1..80: mol_type = other DNA
tgatgatccacatggagaaatactgatgtggaggtttgatagatctctaggcaacacccatgttgctcagataacccacc

SEQ ID NO: 85773 - DNA, 80 bp, synthetic construct
  source 1..80: mol_type = other DNA
cagaactcttccagaaagactaaaagctgttgacctgaagattgctgacgctgtgggactttccagcaaagactgctgac

SEQ ID NO: 85774 - DNA, 80 bp, synthetic construct
  source 1..80: mol_type = other DNA
tctagacagaccagggagtggcattacagacatcattatgaaagcagaaatccaagagtcagttcaggtgtatatattcc

SEQ ID NO: 85775 - DNA, 80 bp, synthetic construct
  source 1..80: mol_type = other DNA
cagaccccttgtaatacttgctactgcaaaagctgctgctatcattgctatgtttgtttcacaagaaagggtttgggaat

SEQ ID NO: 85776 - DNA, 80 bp, synthetic construct
  source 1..80: mol_type = other DNA
ctcctatggcaggaagaagcgacgacgaacggctgctgcaagccatccagttcatcaagatcctgtaccagagcagtaag

SEQ ID NO: 85777 - DNA, 80 bp, synthetic construct
  source 1..80: mol_type = other DNA
taacgctaatgcagcataaggacctgttaatagtaataattagtagtgctttgctgtttataaatgtaattttatggaca

SEQ ID NO: 85778 - DNA, 80 bp, synthetic construct
  source 1..80: mol_type = other DNA
tataatcttaaaaaatatttagaacaaaggaagcaagacagaagggaaagagaaatacttgaaaggttagaaagaataag

SEQ ID NO: 85779 - DNA, 80 bp, synthetic construct
  source 1..80: mol_type = other DNA
gatgcaaaaccagtattattttgtgcttcagatgttaacctaacaagcactgagcagcataatatttgggcagcacaagc

SEQ ID NO: 85780 - DNA, 80 bp, synthetic construct
  source 1..80: mol_type = other DNA
ctgtgttcctacagaccccactccacatgaatattcattgaataatgtgacagataaatttgatatatggaaaaattaca

SEQ ID NO: 85781 - DNA, 80 bp, synthetic construct
  source 1..80: mol_type = other DNA
tggtagaacaaatgcaggaagacattaaagatttatgggaacagagttttaaaccttgtgtgcaaatgactttcatgtgt

SEQ ID NO: 85782 - DNA, 80 bp, synthetic construct
  source 1..80: mol_type = other DNA
gtacaaatgaattgtacaaacaatataactacaaacaacataactaaaaatgtaaaagatatgaaacagtgtgagtttaa

SEQ ID NO: 85783 - DNA, 80 bp, synthetic construct
  source 1..80: mol_type = other DNA
tgtaaccactgttgtcaaagacaaaaaagagaaaaaacaggctctattctatgtatcagatttggtaaaactgaatgaca

SEQ ID NO: 85784 - DNA, 80 bp, synthetic construct
  source 1..80: mol_type = other DNA
gccagcagtaagtactcagctaatattaaatgggacactctctaaaggaaaaataagaattatggcaaaaaatattacaa

SEQ ID NO: 85785 - DNA, 80 bp, synthetic construct
  source 1..80: mol_type = other DNA
acactgggaataatatcatagtgactctaaattccaccataaacataacctgtaacagaccaggaaggggaataaaacag

SEQ ID NO: 85786 - DNA, 80 bp, synthetic construct
  source 1..80: mol_type = other DNA
ataggtataggtccaatgtccgtatacagcgggagcttagcggacttagggggaaacaacaactcaaggatagcttattg

SEQ ID NO: 85787 - DNA, 80 bp, synthetic construct
  source 1..80: mol_type = other DNA
cgattatgacatcactaagtggaacgaaacattaaagcaagtagctgaaaggtttttagaacttgtcaacaatacattag

SEQ ID NO: 85788 - DNA, 80 bp, synthetic construct
  source 1..80: mol_type = other DNA
aaaatgctaccataatgttcaagcgcagcgaacccggtggagatctagagccagccactttacatttcaactgtcatgga

SEQ ID NO: 85789 - DNA, 80 bp, synthetic construct
  source 1..80: mol_type = other DNA
gaattcttttattgtaacacatctcaattgtttaattataccttgtcatgtaacaaaaccacctgtaaatttaaccaaag

SEQ ID NO: 85790 - DNA, 80 bp, synthetic construct
  source 1..80: mol_type = other DNA
tagcactaataacactcggataccttgcaggctgaaacaggtggtaagatcatggatgaggggagggtcaggaatctatg

SEQ ID NO: 85791 - DNA, 80 bp, synthetic construct
  source 1..80: mol_type = other DNA
cacctcccatcccaggtaatctaacatgtacatcaaacataactggaatgattctacaaaatgatgaaccatggaacagc

SEQ ID NO: 85792 - DNA, 80 bp, synthetic construct
  source 1..80: mol_type = other DNA
agcgtaggacgcgcaatatttaaacctacagggggagatatgatggatatatggagaactgaattgtacaactacaaggt

SEQ ID NO: 85793 - DNA, 80 bp, synthetic construct
  source 1..80: mol_type = other DNA
tccctgattggcagtgctacacaccaggaccaggaaccagatacccactgacatttggctggttatttaagctagtacca

SEQ ID NO: 85794 - DNA, 80 bp, synthetic construct
  source 1..80: mol_type = other DNA
aaaatggaacaacacatggcaaggaaatgacagcatttggggcacactaacatggcaagaatgggatcagcaggtaaaca

SEQ ID NO: 85795 - DNA, 80 bp, synthetic construct
  source 1..80: mol_type = other DNA
acataagctccatcatatatgaggagatacaaaaggcacaagaacagcaggaacaaaatgagaaaaagttgctggagtta

SEQ ID NO: 85796 - DNA, 80 bp, synthetic construct
  source 1..80: mol_type = other DNA
ctgtcgttacagatccccgtccatcatcaagtggaagcagaaacgccaggaagaacaggagaaggaggtggagaagaagg

SEQ ID NO: 85797 - DNA, 80 bp, synthetic construct
  source 1..80: mol_type = other DNA
cttagatacaattgcagtggcagtagccaattggactgacagcataatctcagggctacaaagaataggaagaggaattc

SEQ ID NO: 85798 - DNA, 80 bp, synthetic construct
  source 1..80: mol_type = other DNA
ttaacatcccaaggagaattagacagggcttagaaagaagtttattgtaacatgggaaacgcattgacaaaaagtaaatt

SEQ ID NO: 85799 - DNA, 80 bp, synthetic construct
  source 1..80: mol_type = other DNA
tccaggatgggcagaagtaagagaaagaataagaagaacttcccctagatctgaaccatctgattctgaaccatgtgcac

SEQ ID NO: 85800 - DNA, 80 bp, synthetic construct
  source 1..80: mol_type = other DNA
ctggagtaggagaggtctccagggcattagcagctagaggagggataccaagttcccatactcctcaaaacaatgcagcc

SEQ ID NO: 85801 - DNA, 80 bp, synthetic construct
  source 1..80: mol_type = other DNA
caacacccatgttgctaagataacccacccagaactcttccagaaagactaaaagctgttgacctgaagattgctgacgc

SEQ ID NO: 85802 - DNA, 80 bp, synthetic construct
  source 1..80: mol_type = other DNA
ggagctggacaattttgcatgtaatcctgagctactagaaaatgcagaaggtactgagaaactgttactgcagttagagc

SEQ ID NO: 85803 - DNA, 80 bp, synthetic construct
  source 1..80: mol_type = other DNA
gcaatacaaaagctaaaggaagtaatgggaagcaggaagtctgcggatgccgctaaggaagatacaagcgcaaggcagac

SEQ ID NO: 85804 - DNA, 80 bp, synthetic construct
  source 1..80: mol_type = other DNA
caaggagcattacaagtgctaaaggaagtaatcaatgaggaagcagcagagtgggatagaactcacccaccaccaatagg

SEQ ID NO: 85805 - DNA, 80 bp, synthetic construct
  source 1..80: mol_type = other DNA
cagccccaccgatggagatggaggaagaaaggaagagacaggagaatcaggaacagaagggggacccaaacgaactctat

SEQ ID NO: 85806 - DNA, 80 bp, synthetic construct
  source 1..80: mol_type = other DNA
ggaacagggcaatggacttaccaggtatatcaggaggaaaataagaacctcaaaacaggaaaatatactaggcaaaaagc

SEQ ID NO: 85807 - DNA, 80 bp, synthetic construct
  source 1..80: mol_type = other DNA
ctcccacacaaatgatataagacaattagcagaggtagtccagaaggcatctcaggaagctataattatctggggaaaat

SEQ ID NO: 85808 - DNA, 80 bp, synthetic construct
  source 1..80: mol_type = other DNA
actgggaaaaccaggaattggcattacaggcaccattttgaatccagaaatccaagagtcagttcaggtgtatatattcc

SEQ ID NO: 85809 - DNA, 80 bp, synthetic construct
  source 1..80: mol_type = other DNA
agcatagggacctgctaacattaataattactagtgctttgctgcttataaatgtaattatatggatgtttgttcttaga

SEQ ID NO: 85810 - DNA, 80 bp, synthetic construct
  source 1..80: mol_type = other DNA
ctgtgtttagaacatagaagacaagaaagaagggaaagagaaataattagaaggttaaggagaataagagaaattgaaga

SEQ ID NO: 85811 - DNA, 80 bp, synthetic construct
  source 1..80: mol_type = other DNA
gaggcagccccagtgctattctgtgcttcagatgttaacctaacaagcactgagcagcataatatttgggcatcacaagc

SEQ ID NO: 85812 - DNA, 80 bp, synthetic construct
  source 1..80: mol_type = other DNA
ggaagcacaagccaaacagagaccagtgtagagatgaaaaggtgtgaatttaatgtaaccacagttctcaaagacaaaaa

SEQ ID NO: 85813 - DNA, 80 bp, synthetic construct
  source 1..80: mol_type = other DNA
ggaaaagaaacaggctctattctatagatcagatttgatgaaactaaataataagacaggagacagaaatgacacaggca

SEQ ID NO: 85814 - DNA, 80 bp, synthetic construct
  source 1..80: mol_type = other DNA
tgggaaaaatatcatagtgaccctaaattctactgtaaacataacctgtgtgagaccatggaatcagacagtacaaacaa

SEQ ID NO: 85815 - DNA, 80 bp, synthetic construct
  source 1..80: mol_type = other DNA
taggaataggaccaatgtcatggtacagcatgggcataactgcagataacaacaataactcaagaatagcttattgcaag

SEQ ID NO: 85816 - DNA, 80 bp, synthetic construct
  source 1..80: mol_type = other DNA
tataacaccacgaattgggaaagagccctaaaacaaacagctgaaaggtatttagaacttatgaaccacacagatggagc

SEQ ID NO: 85817 - DNA, 80 bp, synthetic construct
  source 1..80: mol_type = other DNA
taacattagcatgatattcaatcacagctctgatggggatccagagacaacccatttgcattttaactgtcatggagagt

SEQ ID NO: 85818 - DNA, 80 bp, synthetic construct
  source 1..80: mol_type = other DNA
tcttctattgtaatacatctaagatgtttaattatacctttttatgtaaaggaaccaactgtactaatacccaaagtaat

SEQ ID NO: 85819 - DNA, 80 bp, synthetic construct
  source 1..80: mol_type = other DNA
agtaccagaaatgacactgtaatatattgcaagataagacaggtagtaagatcatggatgaggggagggtcaggactctt

SEQ ID NO: 85820 - DNA, 80 bp, synthetic construct
  source 1..80: mol_type = other DNA
tgcaccgcccattccaggtaacctaacatgcagatcacaaataactggaatgatgctacaaatggataagccatggaatg

SEQ ID NO: 85821 - DNA, 80 bp, synthetic construct
  source 1..80: mol_type = other DNA
gtagtaagggtaaaaccttttagtgtggcacctacaaaaattgcaaggccagtcataggcataggcactggcactcatag

SEQ ID NO: 85822 - DNA, 80 bp, synthetic construct
  source 1..80: mol_type = other DNA
agagaaaagagacataggattgggaatgctattcttgggggttctaagtgcagcaggtagcactatgggcgcagcggcaa

SEQ ID NO: 85823 - DNA, 80 bp, synthetic construct
  source 1..80: mol_type = other DNA
atggggctgtaagggaaggctgatctgttacacatcagtaaagtggaacatgtcatgggcaaatgtaactgaactagata

SEQ ID NO: 85824 - DNA, 80 bp, synthetic construct
  source 1..80: mol_type = other DNA
aaatttggggaaacctaacatggcaggaatgggatcaacagatagacaacataagtgacaccatatataatgaaatacaa

SEQ ID NO: 85825 - DNA, 80 bp, synthetic construct
  source 1..80: mol_type = other DNA
aggcaggcccaagttgataccctcgccgcaaggattcttgccactgttgtacacggacctcaggacaataatcttgtgga

SEQ ID NO: 85826 - DNA, 80 bp, synthetic construct
  source 1..80: mol_type = other DNA
gttaccacctcttgagcaacttagcatcagtgatccagacggtgatcagccatctgggacttggactgtggatcctcggc

SEQ ID NO: 85827 - DNA, 80 bp, synthetic construct
  source 1..80: mol_type = other DNA
cagaagataattaatgcttgcagaatttgcttcgctgtaatacaatattggctacaagaattgcagaaaagtgctacaag

SEQ ID NO: 85828 - DNA, 80 bp, synthetic construct
  source 1..80: mol_type = other DNA
tttggaacataccaagaagaattagacagggcttagaaagaagtttattgtaacatgggaaacgtattaggaaaagataa

SEQ ID NO: 85829 - DNA, 80 bp, synthetic construct
  source 1..80: mol_type = other DNA
gtttgggggatggccagcagtaagagaaagaatgagaagaactagaagaacttcccctgagcctgaaccatgtgcatctg

SEQ ID NO: 85830 - DNA, 80 bp, synthetic construct
  source 1..80: mol_type = other DNA
cagccccaccgatggaggaagtgataaaggggcaagagaatcaggaacaaaagggggacccgaccgaactctaccctttt

SEQ ID NO: 85831 - DNA, 80 bp, synthetic construct
  source 1..80: mol_type = other DNA
agcaattatacaaacagcaactcagatacaaacagcttagtgaactctagcaacttagagagccctgtgaaaaaatgtga

SEQ ID NO: 85832 - DNA, 80 bp, synthetic construct
  source 1..80: mol_type = other DNA
gtttaatgtaaccacggttctcaaagacaaaaaggagaaaagacaggctctattctatatatcagatttggttaaaatga

SEQ ID NO: 85833 - DNA, 80 bp, synthetic construct
  source 1..80: mol_type = other DNA
aggataatggaacaagaggcaataacacaagtggcaataatacaatatatacattaattaattgtaactccacaaccatc

SEQ ID NO: 85834 - DNA, 80 bp, synthetic construct
  source 1..80: mol_type = other DNA
agtactcagttaatattaaatggaacactctcggaaggaaagataagaataatggcaaaagatattttaaatagtggcaa

SEQ ID NO: 85835 - DNA, 80 bp, synthetic construct
  source 1..80: mol_type = other DNA
aaatatcatagtgaccctaaatactactgtaaacatgacctgcgtgagaccaggaaatataacaatacaaacgttaaaga

SEQ ID NO: 85836 - DNA, 80 bp, synthetic construct
  source 1..80: mol_type = other DNA
taggtccactggcctggtacagcatggacatagcgaatgaaaaagaccataagtcaagaacagcttattgtgagtataat

SEQ ID NO: 85837 - DNA, 80 bp, synthetic construct
  source 1..80: mol_type = other DNA
accactaattgggtaaaggccttacaacagacagctgaaaggtatctagaattagtaaacaatacaggtaatatgagcat

SEQ ID NO: 85838 - DNA, 80 bp, synthetic construct
  source 1..80: mol_type = other DNA
gatattcagtcacagtactgggggagatccagaggtaacccagttgcattttaattgtcatggagagttcttttactgta

SEQ ID NO: 85839 - DNA, 80 bp, synthetic construct
  source 1..80: mol_type = other DNA
acacatctgcaatgtttaattataccttttcatgtaatagaaccacctgtaatttccccaatatcaatagagataataac

SEQ ID NO: 85840 - DNA, 80 bp, synthetic construct
  source 1..80: mol_type = other DNA
actctgataccttgcaggttgagacaggtagtaaggtcatggatgaggggaggatcgggactttatgcacctcccatccg

SEQ ID NO: 85841 - DNA, 80 bp, synthetic construct
  source 1..80: mol_type = other DNA
aggtaacttaacatgtaaatcaaacataactggaatgattctacaaatggatcagccatggaacatgagccgggggaaca

SEQ ID NO: 85842 - DNA, 80 bp, synthetic construct
  source 1..80: mol_type = other DNA
ttacacatcagtagaatggaactggacaggagatgaaaagatttggggcaacctcacatggcaggaatgggatcagcagg

SEQ ID NO: 85843 - DNA, 80 bp, synthetic construct
  source 1..80: mol_type = other DNA
taaacaatgtaagctccatcatatttgatgaaatactaaaagcacaagtacagcaggaagaaaatgagcgaaagttgctg

SEQ ID NO: 85844 - DNA, 80 bp, synthetic construct
  source 1..80: mol_type = other DNA
cccctctcgttacagatccccatccctcaccaaccggaagcagaaacgcaaggaagaacaggagaaggaggtggagaaga

SEQ ID NO: 85845 - DNA, 80 bp, synthetic construct
  source 1..80: mol_type = other DNA
tttggaacatccccacaagaattagacaggggttcgaacgaagtttgttgtaacatgggaaacgtattagggaaaagcaa

SEQ ID NO: 85846 - DNA, 80 bp, synthetic construct
  source 1..80: mol_type = other DNA
gcaggcagtacaaaagttaaaagaagtaatggggaaaaagaagcctgtagaagctgctaaggaggacacaagctcaaagc

SEQ ID NO: 85847 - DNA, 80 bp, synthetic construct
  source 1..80: mol_type = other DNA
ggagggcatcagggggctttacaagtgctgaaggaagtaatcaatgaggaagcatcagattgggacagaacgcacccacc

SEQ ID NO: 85848 - DNA, 80 bp, synthetic construct
  source 1..80: mol_type = other DNA
agcaagtacactggattactagagctaaccatcctatcccagttggagatatctatagaaaatggatagtgttaggattg

SEQ ID NO: 85849 - DNA, 80 bp, synthetic construct
  source 1..80: mol_type = other DNA
agcaagatctaaaaggaggatacacagcagtgttcatgcagagagggcaaggcccaattaggagggggcctgtaaaatgt

SEQ ID NO: 85850 - DNA, 80 bp, synthetic construct
  source 1..80: mol_type = other DNA
cagaattcatgttgctatggtaactcacccagagctcttcaccaaagactaaaactgctgagctgaagagtgctgaagac

SEQ ID NO: 85851 - DNA, 80 bp, synthetic construct
  source 1..80: mol_type = other DNA
ctgctcataaaggcatagggggaaatgaaaaaatagataaattagtaagcaaagatgttagaagagtcctattcctagaa

SEQ ID NO: 85852 - DNA, 80 bp, synthetic construct
  source 1..80: mol_type = other DNA
tagtatagaatggcagtacaagcgctataaaacacagattgaccctgaaacagcagacaggatgatacatctgtactatt

SEQ ID NO: 85853 - DNA, 80 bp, synthetic construct
  source 1..80: mol_type = other DNA
catagtcaggtagggacgctgcaactactagctctgagaaaggtagtaggagaaaaaaggaataggcctcccctacccag

SEQ ID NO: 85854 - DNA, 80 bp, synthetic construct
  source 1..80: mol_type = other DNA
aatagagctcctggaagagctgaaagcagaagcaatgagacatttccctctgacttggttacaagccttgggacaattca

SEQ ID NO: 85855 - DNA, 80 bp, synthetic construct
  source 1..80: mol_type = other DNA
agaattggatgccaacacagtagaataggaattaacccatctaacacaagagaaagaggaagaagaaatggatccagtag

SEQ ID NO: 85856 - DNA, 80 bp, synthetic construct
  source 1..80: mol_type = other DNA
atcctgaggtgcccccttggcaccaccctggaagtcaaccccaaaccccttgtaatacttgctattgcaaaaagtgctgc

SEQ ID NO: 85857 - DNA, 80 bp, synthetic construct
  source 1..80: mol_type = other DNA
tatcattgcttcctttgtttcacaagcaagggtttgggactctcccatggcaggaagaagcgacgaagaccagcaactgc

SEQ ID NO: 85858 - DNA, 80 bp, synthetic construct
  source 1..80: mol_type = other DNA
tgcaagccatccagataataaagatcctgtaccagagcagtaagtaacgctaatgcattataagggcctgctactgataa

SEQ ID NO: 85859 - DNA, 80 bp, synthetic construct
  source 1..80: mol_type = other DNA
taattgctttgattcttataaatataattatatggatgtttattcttaagaaatatttagaacaaaagaaacaagagaga

SEQ ID NO: 85860 - DNA, 80 bp, synthetic construct
  source 1..80: mol_type = other DNA
cctgtatgggaagatgcaaaaccagtattgttctgtgcttccgatgctaacttaacaagcactgaggcgcacaatatctg

SEQ ID NO: 85861 - DNA, 80 bp, synthetic construct
  source 1..80: mol_type = other DNA
ggaaaaattacatggtagatcagatgcatgatgatgttattgatttatgggaacagagtttaaagccttgtgttgaactg

SEQ ID NO: 85862 - DNA, 80 bp, synthetic construct
  source 1..80: mol_type = other DNA
actttcctgtgtgtacaaatgaattgcacagattataacataaccatcaatgcaaccaactctaactccaatgacagctc

SEQ ID NO: 85863 - DNA, 80 bp, synthetic construct
  source 1..80: mol_type = other DNA
aagggtagccacctccaatgtaaccaccgtcaatgtaaccaccgatctaaaacagtgtgactttaatgtaaccacagttg

SEQ ID NO: 85864 - DNA, 80 bp, synthetic construct
  source 1..80: mol_type = other DNA
tcaaagacaaaaaggagcaaaaacaggctctattctataaatcagatttgatggaaataacagataaaaataagaaaaac

SEQ ID NO: 85865 - DNA, 80 bp, synthetic construct
  source 1..80: mol_type = other DNA
attatgggaagagatattacacaaactgggcaaaatatcctagtgactctaaattccactctgaacataacctgtgtgag

SEQ ID NO: 85866 - DNA, 80 bp, synthetic construct
  source 1..80: mol_type = other DNA
accaggaaaccagtcagtacaagagataaaaataggtccaatgtcttggctcagcttggaagtagaaagggaagctaaaa

SEQ ID NO: 85867 - DNA, 80 bp, synthetic construct
  source 1..80: mol_type = other DNA
aaggaacatcaaggatagcttattgcaaatataatgccagtaaatgggaagcagccttaagacaaacagctgagagatat

SEQ ID NO: 85868 - DNA, 80 bp, synthetic construct
  source 1..80: mol_type = other DNA
ctagaacttgtaaacaatacagaaaatgctacagtaaaattcaatcccagcagaggtggagatttagagataaccacttt

SEQ ID NO: 85869 - DNA, 80 bp, synthetic construct
  source 1..80: mol_type = other DNA
acatttcaattgtcatggagaattcttttattgtaacacaacggagttgtttatttataactttaattgtagcaactcca

SEQ ID NO: 85870 - DNA, 80 bp, synthetic construct
  source 1..80: mol_type = other DNA
catgcaacatctcagatgcctataggaaaattaatagtggtagtgatggattgcataatataacttgtagaattaaacag

SEQ ID NO: 85871 - DNA, 80 bp, synthetic construct
  source 1..80: mol_type = other DNA
gtggtaaggtcatggatgaagacagggtcgggactctatgcacctcccatcagaggtcacttaaaatgtgagtcaaacat

SEQ ID NO: 85872 - DNA, 80 bp, synthetic construct
  source 1..80: mol_type = other DNA
aactggaatgattctacaattggattacccatggaacagtacaattagaaatgccacatttagcccaatagggggagata

SEQ ID NO: 85873 - DNA, 80 bp, synthetic construct
  source 1..80: mol_type = other DNA
tgaaagacatatggagaactcaattgtacaactacaaagtagtaagggtaaaaccttttagtgtggcacctacaaaaatt

SEQ ID NO: 85874 - DNA, 80 bp, synthetic construct
  source 1..80: mol_type = other DNA
gccttagagacctttatacagaatcagcaactcctaaacctatggggctgtaagggacacctagtctgctacacatcagt

SEQ ID NO: 85875 - DNA, 80 bp, synthetic construct
  source 1..80: mol_type = other DNA
aaaatggaacacaacatggggaaggaatgatactgatctggaaaaaatttggggaaacctgacctggcaggaatgggatc

SEQ ID NO: 85876 - DNA, 80 bp, synthetic construct
  source 1..80: mol_type = other DNA
agcagataaacaatgtaagctccatcatatatgatgaaatacaaaaggcacaagtacagcaggaactaaatgagaaaagg

SEQ ID NO: 85877 - DNA, 80 bp, synthetic construct
  source 1..80: mol_type = other DNA
ttgctggagttagatcaatgggcctctatttggagttggcttgacataactaaatggttgtggtatataaaaatagctat

SEQ ID NO: 85878 - DNA, 80 bp, synthetic construct
  source 1..80: mol_type = other DNA
aatcatagtaggagcactagtaggtgtgagagttatcatgatagtacttaatctagtaagaaacattaggcagggatatc

SEQ ID NO: 85879 - DNA, 80 bp, synthetic construct
  source 1..80: mol_type = other DNA
tacccctatcgtttcagacccccagccatcaccaactggaagcagaaacgccaggaagaacaggagaaggaggtggagaa

SEQ ID NO: 85880 - DNA, 80 bp, synthetic construct
  source 1..80: mol_type = other DNA
ggagacagacccaagttgagtccattgcagcaagggttcttgcaactgttgtacacggacctcaggacaataatcttgtg

SEQ ID NO: 85881 - DNA, 80 bp, synthetic construct
  source 1..80: mol_type = other DNA
gagttaccacctcttgagcagcttaacatcagggatccagaagttgatcagccatctgggacttggactgtggatcctag

SEQ ID NO: 85882 - DNA, 80 bp, synthetic construct
  source 1..80: mol_type = other DNA
ggcagaagacaattgatgcttgtagaactggtacagctgtaatacaatattggctacaagaattgcagaatagtgctaca

SEQ ID NO: 85883 - DNA, 80 bp, synthetic construct
  source 1..80: mol_type = other DNA
agtctgctagatactgtggcaataacagttgcaaattggactgacggcatcatcttagggctacaacgcataggcagagg

SEQ ID NO: 85884 - DNA, 80 bp, synthetic construct
  source 1..80: mol_type = other DNA
aatccttaacatccccacaagaattaggcagggcttcgaaagaagtttattgtaacatggggaacgcttttagtaaaggt

SEQ ID NO: 85885 - DNA, 80 bp, synthetic construct
  source 1..80: mol_type = other DNA
agatttccaggatggtcagcagtaagagagagaatgagaagagctcccagtagtgatcctgagccacctgcacctggagt

SEQ ID NO: 85886 - DNA, 80 bp, synthetic construct
  source 1..80: mol_type = other DNA
aggagaagtctccagggaattagcagccagaggagggatatcaatcacacatactcctcaaaacaatcaagccctggcat

SEQ ID NO: 85887 - DNA, 80 bp, synthetic construct
  source 1..80: mol_type = other DNA
cactctggaacacaatagcagtactttggtgtgttcacaaaagatataaagtggaagacacgcagcaggcaatacaaaag

SEQ ID NO: 85888 - DNA, 80 bp, synthetic construct
  source 1..80: mol_type = other DNA
ttaaaggaaataatggggagcaggaagtctgcggacaataaggaagacacaagcgcaaagcagacaagtcaaaattatcc

SEQ ID NO: 85889 - DNA, 80 bp, synthetic construct
  source 1..80: mol_type = other DNA
agcaagatctaaaaggaggatatacagcagtattcatgcaaagagggcaaaaccaaggcaggaaaggacctgtaaaatgt

SEQ ID NO: 85890 - DNA, 80 bp, synthetic construct
  source 1..80: mol_type = other DNA
cagccccatcagccccaccaatggaggaggtagtgaaggggcaagagaatcagaatcagggggagggctcgaacgaactc

SEQ ID NO: 85891 - DNA, 80 bp, synthetic construct
  source 1..80: mol_type = other DNA
taccaggatgaacataagaatctcaaaacaggaaaatatactagacagaaggcctcccacacaaatgagataagacaact

SEQ ID NO: 85892 - DNA, 80 bp, synthetic construct
  source 1..80: mol_type = other DNA
catcattatgagaatagaaatccaagaatcagttcaggtgtctatattccagtaggagaagccatgatagtggtaaccac

SEQ ID NO: 85893 - DNA, 80 bp, synthetic construct
  source 1..80: mol_type = other DNA
aaagcctgtctagggcagagagtgctgacaaggtgtgaattccataaaggacatagtcaggtagggccactacaactcct

SEQ ID NO: 85894 - DNA, 80 bp, synthetic construct
  source 1..80: mol_type = other DNA
attcctgctattgcaaaggttgctgctatcattgcattgtttgtttcacaaagaagggtttgggaatctcctatggcagg

SEQ ID NO: 85895 - DNA, 80 bp, synthetic construct
  source 1..80: mol_type = other DNA
aagaagcggcgaagaccaacagctgctgaacgtcgtacagataataaagatcctgtaccagagcagtaagtaacatcaat

SEQ ID NO: 85896 - DNA, 80 bp, synthetic construct
  source 1..80: mol_type = other DNA
gcagtataaagaattgctattcttactagcttatagtgctttgtctcttataaccgcgcttatatggatatttgtgctta

SEQ ID NO: 85897 - DNA, 80 bp, synthetic construct
  source 1..80: mol_type = other DNA
aactttgcttagaacaaaagagacaagaaaaaagggaaagagaaatacttgatagattaagaagaataagagagatcagg

SEQ ID NO: 85898 - DNA, 80 bp, synthetic construct
  source 1..80: mol_type = other DNA
aataatacaaataccacagtcacacccatagcaggcccagagaaagagaccaatccgctaaaaaaatgtgaatttaatgt

SEQ ID NO: 85899 - DNA, 80 bp, synthetic construct
  source 1..80: mol_type = other DNA
aagccaacagtaagcactcaactaatattcaatgggacaatctctaaaggaaaaataagaattatggcaaagaacatttc

SEQ ID NO: 85900 - DNA, 80 bp, synthetic construct
  source 1..80: mol_type = other DNA
gagcaacacaaacaatatcttagtgaccctaaattctgctataaacatgacctgcgtgaggccaggaaataattcaatac

SEQ ID NO: 85901 - DNA, 80 bp, synthetic construct
  source 1..80: mol_type = other DNA
aggagataaggataggtccaatggcttggtacagtatgggacttgggaaagagaatacaaatacatcaagaatagcttat

SEQ ID NO: 85902 - DNA, 80 bp, synthetic construct
  source 1..80: mol_type = other DNA
tgtacctataatgccacgaaatggaaagaaaccttgcaaaggatagctgaaaggtatttagaacttgtaaatcatacaga

SEQ ID NO: 85903 - DNA, 80 bp, synthetic construct
  source 1..80: mol_type = other DNA
aaacagtaccataacattcaaaaacagcattaatggaggagatatagaagtatcccgtttgcattttaactgtcatggag

SEQ ID NO: 85904 - DNA, 80 bp, synthetic construct
  source 1..80: mol_type = other DNA
aattcttttattgtaacacaagtcacatgtttaattatacattcaattgtactaactccaactgtagtaatactacttat

SEQ ID NO: 85905 - DNA, 80 bp, synthetic construct
  source 1..80: mol_type = other DNA
gataacagtacaagaatatattgccagttgagacaggtagtaaggtcatggatgaggggagggtcagggctctatgcacc

SEQ ID NO: 85906 - DNA, 80 bp, synthetic construct
  source 1..80: mol_type = other DNA
tcctatcaaaggtaatctaacctgcagttcaaacataactggattgattctacaaatggatacaccatggaataaaacca

SEQ ID NO: 85907 - DNA, 80 bp, synthetic construct
  source 1..80: mol_type = other DNA
accacacagtcacatttagaccaacaggaggagatatgaaggatatatggaaaacccaattgtacaattacaaagtagta

SEQ ID NO: 85908 - DNA, 80 bp, synthetic construct
  source 1..80: mol_type = other DNA
agggtaaaatcttttagtgtagcacctactaagattagtagaccagttgtaggcactaaccatcaaagagaaaaaagggc

SEQ ID NO: 85909 - DNA, 80 bp, synthetic construct
  source 1..80: mol_type = other DNA
cttctacatccagctcataatcatggttttgaggatgatcagggggaaatattaaagtggcagttcgatcgctcattagg

SEQ ID NO: 85910 - DNA, 80 bp, synthetic construct
  source 1..80: mol_type = other DNA
aggaggtgagggtaacataatagtaactacatattggggattaatgccaggggaaagagaggaacaattgggacatgggg

SEQ ID NO: 85911 - DNA, 80 bp, synthetic construct
  source 1..80: mol_type = other DNA
gatcctgaggtgcccccttggcatcaccctggaagtcagcctaagaccccttgtaataattgctattgcaaacgctgctg

SEQ ID NO: 85912 - DNA, 80 bp, synthetic construct
  source 1..80: mol_type = other DNA
ttatcattgccctgtttgtttcacaaagaagggtttgggaatctcccatggcaggaagaagcggcgaagaccagcagctg

SEQ ID NO: 85913 - DNA, 80 bp, synthetic construct
  source 1..80: mol_type = other DNA
ctgcaagccattcagctaataaagatcctgtaccagagcagtaagtaacgctaatgcatcactgggaactgataaccctc

SEQ ID NO: 85914 - DNA, 80 bp, synthetic construct
  source 1..80: mol_type = other DNA
atagcttttagtgttgcatgtcttttatgtgtacttgtatggatgcttgtttttagactttatttagaacacaagaaaca

SEQ ID NO: 85915 - DNA, 80 bp, synthetic construct
  source 1..80: mol_type = other DNA
gacattacaaaaatgaacagtacaaagacaacagacacaaccaaccccatgaaagcgtgtgattttaatgtaactacagt

SEQ ID NO: 85916 - DNA, 80 bp, synthetic construct
  source 1..80: mol_type = other DNA
tcttaaagacaaactagagaagaaacaagctctattttatgtctcagatctgatgaaagtagagggatcaaacagcacaa

SEQ ID NO: 85917 - DNA, 80 bp, synthetic construct
  source 1..80: mol_type = other DNA
atattatagtaaccctgaaagatcctataaaaataaagtgtacgagagaaggaaatcagacagtacaagatataggggta

SEQ ID NO: 85918 - DNA, 80 bp, synthetic construct
  source 1..80: mol_type = other DNA
ggtccaatggtatggcgcagtatacaacttgcacaaggcgacaatagaacaagagcagcctattgtatctataataccac

SEQ ID NO: 85919 - DNA, 80 bp, synthetic construct
  source 1..80: mol_type = other DNA
tgactgggaaaaggccttagaagaaacagctgaaagatatctagaacttttaaacaatacagggaatactactataatat

SEQ ID NO: 85920 - DNA, 80 bp, synthetic construct
  source 1..80: mol_type = other DNA
ttgatgtaagcgctggtggagatgcagaaataaccaatctgcattttaactgtcatggagaattcttttattgcaacaca

SEQ ID NO: 85921 - DNA, 80 bp, synthetic construct
  source 1..80: mol_type = other DNA
tttgagttgtttaattatacttttagatgtagagggtccaactgtacttctgaaaatagcacccaaataaatggaacaat

SEQ ID NO: 85922 - DNA, 80 bp, synthetic construct
  source 1..80: mol_type = other DNA
accttgcaagataaaacaagtagtaaggacatggatggggggaaggtcaggactctatgcacctcccattaaaggtgaac

SEQ ID NO: 85923 - DNA, 80 bp, synthetic construct
  source 1..80: mol_type = other DNA
gtcaggactctatgcacctcccattaaaggtgaactaacatgtgaatcaaacataactggaatgctactacaaagggatc

SEQ ID NO: 85924 - DNA, 80 bp, synthetic construct
  source 1..80: mol_type = other DNA
taacatgtgaatcaaacataactggaatgctactacaaagggatcaaccatggaaccaaacatgtaacagcacatttaga

SEQ ID NO: 85925 - DNA, 80 bp, synthetic construct
  source 1..80: mol_type = other DNA
ccaatagggggagatatgagagatatatggagaactagcttatacaactacaaagtagtaaaaataaaaccttttagtgt

SEQ ID NO: 85926 - DNA, 80 bp, synthetic construct
  source 1..80: mol_type = other DNA
ggcacctacaagaattgcaaggccagtcataagtcttagatctcctagagaaaaaagggcagcaggattgggaatgctat

SEQ ID NO: 85927 - DNA, 80 bp, synthetic construct
  source 1..80: mol_type = other DNA
tcttgggggtgctaagtgcagcaggtagcactatgggcgcagtgtcaacgacactgacggtacagacccaaaaagtgtta

SEQ ID NO: 85928 - DNA, 80 bp, synthetic construct
  source 1..80: mol_type = other DNA
aagggtatagtgcaacagcaggacaacctgctgagagcgatacaggcccagcaacatttgctgaggctatctgtatgggg

SEQ ID NO: 85929 - DNA, 80 bp, synthetic construct
  source 1..80: mol_type = other DNA
cattagacagctccgagctcgcctgctagccttagagaccctcatacagaatcagcaactcctaagcctatggggctgta

SEQ ID NO: 85930 - DNA, 80 bp, synthetic construct
  source 1..80: mol_type = other DNA
agggacagttaatctgctacacatcagtaaaatggaacgactcatggggaggaaacgaaagtatctggacagacctaaca

SEQ ID NO: 85931 - DNA, 80 bp, synthetic construct
  source 1..80: mol_type = other DNA
tggcaggagtgggatcgacagataagcaacataagctacatcatatatgaacaaatacaagaggcagcaatacaacaaga

SEQ ID NO: 85932 - DNA, 80 bp, synthetic construct
  source 1..80: mol_type = other DNA
gcaggcaatagaaaagttaaaggaagtaatggagagaaggaagcctgcagatactgctaaggaagacacaaactcaaggc

SEQ ID NO: 85933 - DNA, 80 bp, synthetic construct
  source 1..80: mol_type = other DNA
tggattaccaggcctaacaaccctatcccagttggagatatttatagaaaatggatagtgttaggattaaacaaaatggt

SEQ ID NO: 85934 - DNA, 80 bp, synthetic construct
  source 1..80: mol_type = other DNA
ggctacagcccagcaagaactaagaggaggatacacatcagtattcatgcagagagggcaaggcccaattaggaaagggc

SEQ ID NO: 85935 - DNA, 80 bp, synthetic construct
  source 1..80: mol_type = other DNA
ctcctacatccagcttgtgctcatggctatggagatcaacacggggaaatgctaaaatggcagtttgatagatcattagg

SEQ ID NO: 85936 - DNA, 80 bp, synthetic construct
  source 1..80: mol_type = other DNA
atgaagggacaagagaatcaggaacagaagggggaaccaaacgaactctacccatttgcctccctcaaatccctctttgg

SEQ ID NO: 85937 - DNA, 80 bp, synthetic construct
  source 1..80: mol_type = other DNA
cagcactcatgttgctctgataacacacccagagctctttcacaaggactaaaactgctgaacactgaagattgctgaca

SEQ ID NO: 85938 - DNA, 80 bp, synthetic construct
  source 1..80: mol_type = other DNA
ctgcgggactttccagtaaagactgctgatgctgcagggactttccagcgtgggagggataagggcggatcggggagtgg

SEQ ID NO: 85939 - DNA, 80 bp, synthetic construct
  source 1..80: mol_type = other DNA
catcattatgagtttcacaatccaagaatcagttcaggtgtatctattccagtagggatgggttggatactagtgaccac

SEQ ID NO: 85940 - DNA, 80 bp, synthetic construct
  source 1..80: mol_type = other DNA
atactggggattaatgccaggagaaagagatgaacacttgggacatggagttagtatagaatggcagtacaggaggtata

SEQ ID NO: 85941 - DNA, 80 bp, synthetic construct
  source 1..80: mol_type = other DNA
aaagccatcctagggcagagagtgctgaccaggtgtgaatactctgaaggacatagtcaggtagggacgctgcaactact

SEQ ID NO: 85942 - DNA, 80 bp, synthetic construct
  source 1..80: mol_type = other DNA
agctctgagagtagtagtaaaagtaaaaaggaataagcctcccctacccagtgtccagaagctaacagaagatagatgga

SEQ ID NO: 85943 - DNA, 80 bp, synthetic construct
  source 1..80: mol_type = other DNA
acaggtgccagaagatcagggaccagctagggagccattcaatgaatgggcactagagctcctggaagaactgaaagcag

SEQ ID NO: 85944 - DNA, 80 bp, synthetic construct
  source 1..80: mol_type = other DNA
aagcagtgagacacttccctaggaattggttacaaaccttgggacaatacatctatgagacttatggggacacttggata

SEQ ID NO: 85945 - DNA, 80 bp, synthetic construct
  source 1..80: mol_type = other DNA
atacttgctattgcaaaaagtgctgctatcattgctatctttgtttcacaagaaagggtttgggaatctcccatggcagg

SEQ ID NO: 85946 - DNA, 80 bp, synthetic construct
  source 1..80: mol_type = other DNA
aagaagcgacgcagaccagcaactgctgcgagctgtccagataataaagatcttgtaccagagcagtaagtaacgctaat

SEQ ID NO: 85947 - DNA, 80 bp, synthetic construct
  source 1..80: mol_type = other DNA
gcctcataagggcctgctactaataataattgctttgcttcttataaatgtaattgtatggatgtttaatcttagaaaat

SEQ ID NO: 85948 - DNA, 80 bp, synthetic construct
  source 1..80: mol_type = other DNA
agcccaatattattctgtgcttctgatgctaacttaacaagcactgagaagcacaatgtttgggcatcacaatcctgtgt

SEQ ID NO: 85949 - DNA, 80 bp, synthetic construct
  source 1..80: mol_type = other DNA
aatgtaacagacctcctaaccaacgccctaaagtgtgattttaatgtaaccacaattctcaaagacaaaaaggagaaaaa

SEQ ID NO: 85950 - DNA, 80 bp, synthetic construct
  source 1..80: mol_type = other DNA
acaggcgctattctataaatcagatttgattaaaataaacagcacagagggcaacacctatacattaattaattgtaact

SEQ ID NO: 85951 - DNA, 80 bp, synthetic construct
  source 1..80: mol_type = other DNA
ttacttgtacacatggcatcaagccagcagtaagtacccaattaatactaaatgggacactctctaaaggaaaaataaga

SEQ ID NO: 85952 - DNA, 80 bp, synthetic construct
  source 1..80: mol_type = other DNA
atcatggggaaaaatatttcaaacactggtaaaaatatcctagtgactctaaattctactctaagcatgacctgtgtgag

SEQ ID NO: 85953 - DNA, 80 bp, synthetic construct
  source 1..80: mol_type = other DNA
aacaggaaatcagacagtacagcagatgaaagtaggtccaatggcttggtacagcatggcaataagccaggaaaagaatg

SEQ ID NO: 85954 - DNA, 80 bp, synthetic construct
  source 1..80: mol_type = other DNA
acacaaggaaagcttattgcacatataatgccacggactgggaaacagccttaaaacaaacagctgagaggtatctagaa

SEQ ID NO: 85955 - DNA, 80 bp, synthetic construct
  source 1..80: mol_type = other DNA
cttgtaaactatacagggagtgctaacataacattcaatagcagcagtggtggagatgtagagataacccatttacattt

SEQ ID NO: 85956 - DNA, 80 bp, synthetic construct
  source 1..80: mol_type = other DNA
caactgtcatggagaattcttttattgtaacacagcggaaatgtttaattatacctttaagtgtaagggcgccacctgta

SEQ ID NO: 85957 - DNA, 80 bp, synthetic construct
  source 1..80: mol_type = other DNA
actccaccagtttagaaaacaatgggactagcaatctaacttgtaagattagacaggtggtaaggtcctggatgaagcaa

SEQ ID NO: 85958 - DNA, 80 bp, synthetic construct
  source 1..80: mol_type = other DNA
gggtcgggactctatgcaccccccatcagaggtaacctagcatgcatgtcaaacataactggaataattctacaattaga

SEQ ID NO: 85959 - DNA, 80 bp, synthetic construct
  source 1..80: mol_type = other DNA
tacaccatggaacaacagtaaagaaaatacaacagccacatttagaccaacggggggagatatgacagatatatggagaa

SEQ ID NO: 85960 - DNA, 80 bp, synthetic construct
  source 1..80: mol_type = other DNA
cagccacatttagaccaacggggggagatatgacagatatatggagaactcaattgttcaactacaaagtagtaagggta

SEQ ID NO: 85961 - DNA, 80 bp, synthetic construct
  source 1..80: mol_type = other DNA
gaaacctttgtaaagaatcagcaactcctaaacctatggggctgtaagggacgactagtctgctacacatcagtacaatg

SEQ ID NO: 85962 - DNA, 80 bp, synthetic construct
  source 1..80: mol_type = other DNA
gaacagaacatgggtaaataatactgatctggagcacatttgggaaaacctaacctggcaagaatgggatcagcaggtaa

SEQ ID NO: 85963 - DNA, 80 bp, synthetic construct
  source 1..80: mol_type = other DNA
acaacataagctccttcatatttgaggaaatacaaagggcacaagtacagcaggaacaaaatgagaaaaagttgctggag

SEQ ID NO: 85964 - DNA, 80 bp, synthetic construct
  source 1..80: mol_type = other DNA
ttagatgaatgggcctccatttggaattggcttgacataactaaatggttgtggtatataaaaatagctataatcatagt

SEQ ID NO: 85965 - DNA, 80 bp, synthetic construct
  source 1..80: mol_type = other DNA
aggagcactagtaggtgtgagagttgtcatgatagtacttaatctagtgaaaaacattaggcagggatatcaacccctat

SEQ ID NO: 85966 - DNA, 80 bp, synthetic construct
  source 1..80: mol_type = other DNA
cgttacagacccctgtccatcaccaaccggaagtagaaacgccaggaggaacaggagaaggaggtggagaaggagacaga

SEQ ID NO: 85967 - DNA, 80 bp, synthetic construct
  source 1..80: mol_type = other DNA
cccaagttgattccatcgccgcaagggttcttgccacagttgtacacggacctcaggacaataatcttgtggagttacca

SEQ ID NO: 85968 - DNA, 80 bp, synthetic construct
  source 1..80: mol_type = other DNA
cctcttgagcaacttagcatcagtgatccagaagctgatcagacacctgggacttggactgtggatcctagggcagaaaa

SEQ ID NO: 85969 - DNA, 80 bp, synthetic construct
  source 1..80: mol_type = other DNA
caattgaagcttgtagaattggtaaagctgtaatacaatactggctacaagaattgcaaaatagtgctacaaatctgata

SEQ ID NO: 85970 - DNA, 80 bp, synthetic construct
  source 1..80: mol_type = other DNA
gataccttggcagtggcagttgccaattggactgacggcatcatcttagggttgcaacgcataggaagaggaattcttaa

SEQ ID NO: 85971 - DNA, 80 bp, synthetic construct
  source 1..80: mol_type = other DNA
cattccaagaagaatcaggcagggcctagagataggtttattgtaacatggggaacgcattgaagaaaagtagctttgca

SEQ ID NO: 85972 - DNA, 80 bp, synthetic construct
  source 1..80: mol_type = other DNA
ggatggccagcagtaagagaaagaatgagacgggctcccgctcccagtgatgatcctgaaccatgtgcaccaggagtagg

SEQ ID NO: 85973 - DNA, 80 bp, synthetic construct
  source 1..80: mol_type = other DNA
agaactctccagggaactagcagctagaggaggggtaccaagttcctatactcctcaaaacaatgcagcccttgcattcc

SEQ ID NO: 85974 - DNA, 80 bp, synthetic construct
  source 1..80: mol_type = other DNA
cagcactcatgttgctctgataacccacccagagctctttcacaaggactaaaactgctgaactaaaggacactgaagat

SEQ ID NO: 85975 - DNA, 80 bp, synthetic construct
  source 1..80: mol_type = other DNA
tgctgacactgcgggactttccagtaaagactgctgatgctgcagggactttccagcgtgggagggataagggcggatcg

SEQ ID NO: 85976 - DNA, 80 bp, synthetic construct
  source 1..80: mol_type = other DNA
gagccagctctcaagacagggtcagaaagcctgcagtcactctggaacacaatagcagtgctctggtgtgttcataacag

SEQ ID NO: 85977 - DNA, 80 bp, synthetic construct
  source 1..80: mol_type = other DNA
atttaaaattggagatacgcagcaggcaatacaaaagttaagggaagtcatggggaacaggaagtctgcgagtgccgcta

SEQ ID NO: 85978 - DNA, 80 bp, synthetic construct
  source 1..80: mol_type = other DNA
ctggatgaccagggccaacaatcctatcccagtaggagacatctatagaaaatggatagtgttgggactaaacaaaatgg

SEQ ID NO: 85979 - DNA, 80 bp, synthetic construct
  source 1..80: mol_type = other DNA
ttagccttaaaggattccaaagaaaaggtaaatatagtaacagattcacaatacacattgggcatcatctcatcacaacc

SEQ ID NO: 85980 - DNA, 80 bp, synthetic construct
  source 1..80: mol_type = other DNA
gaaagtatttaaaaataaagagacaggacagaagggaaagagaaatacttgaaaggttaagaagaataacagaaattaaa

SEQ ID NO: 85981 - DNA, 80 bp, synthetic construct
  source 1..80: mol_type = other DNA
ggcaatggcaacagcagcttagggaattctacaggcaacagcagctcagaggattcgaaccctataaaaaaatgtgagtt

SEQ ID NO: 85982 - DNA, 80 bp, synthetic construct
  source 1..80: mol_type = other DNA
taatgtaaccacggttcttaaagacaaaaaggagaaaaaacaggctctattttatagatcagatttggttagagtgaatg

SEQ ID NO: 85983 - DNA, 80 bp, synthetic construct
  source 1..80: mol_type = other DNA
ttgatgacaaaaaatatttcggataatggccaaaatatcatagtgaccctaaatactactataaacatgacctgccagag

SEQ ID NO: 85984 - DNA, 80 bp, synthetic construct
  source 1..80: mol_type = other DNA
accaggaaatataacagtacaggagatgaagataggtccaatggcctggtacagcatgagcatagaggggaatgacaacg

SEQ ID NO: 85985 - DNA, 80 bp, synthetic construct
  source 1..80: mol_type = other DNA
ctgagtcaagaagagcttattgtgagtataataccactaaatgggaagaggtcttaaaacagacagctgaaaggtattta

SEQ ID NO: 85986 - DNA, 80 bp, synthetic construct
  source 1..80: mol_type = other DNA
gaattagtaaacaatacaggtcatactataaacatgacattcaatagcagtattgctggaggagatctggagacaaccca

SEQ ID NO: 85987 - DNA, 80 bp, synthetic construct
  source 1..80: mol_type = other DNA
tttgcattttaattgttatggagagttcttttactgtaacacatctcagatgttcaattatacctttatatgtaatgaaa

SEQ ID NO: 85988 - DNA, 80 bp, synthetic construct
  source 1..80: mol_type = other DNA
ccacctgtgagaacacctgtaagagcccaaattgcagtagcaatatcactcagataccttgcaggttgaagcaggtagta

SEQ ID NO: 85989 - DNA, 80 bp, synthetic construct
  source 1..80: mol_type = other DNA
aggtcctggatgaagggaggatcaggactctatgcacctcccatccgaggtcaattaagatgtgaatcaaacataactgg

SEQ ID NO: 85990 - DNA, 80 bp, synthetic construct
  source 1..80: mol_type = other DNA
aatgattctagaaatggatcagccatggaacgggaaccaaagcaacagcacaaggacatttagaccaacagggggaaata

SEQ ID NO: 85991 - DNA, 80 bp, synthetic construct
  source 1..80: mol_type = other DNA
tgaaagatatatggagaactgaattgctcagatacaaagtagtaagaataaaaccttttagtgtggcacctacaaaaatt

SEQ ID NO: 85992 - DNA, 80 bp, synthetic construct
  source 1..80: mol_type = other DNA
acaaggccagtcataggctttggcccccgcagagaaaaaagagctgtgggcttgggaatgctattcttgggggttctaag

SEQ ID NO: 85993 - DNA, 80 bp, synthetic construct
  source 1..80: mol_type = other DNA
tgcagcaggtagcactatgggcgcagcggcaacagcgctgacggtacagacccacactttgataaagggtatagtgcaac

SEQ ID NO: 85994 - DNA, 80 bp, synthetic construct
  source 1..80: mol_type = other DNA
ttacacatcagtaaaatggaacgagacatggacaggagatgactctatttggggcaacctcacatggcagcaatgggatc

SEQ ID NO: 85995 - DNA, 80 bp, synthetic construct
  source 1..80: mol_type = other DNA
agcagatagataatgtaagctccctcatatatgatgaaatactaaaagcacaaatacagcaggaacaaaatgagcaaaag

SEQ ID NO: 85996 - DNA, 80 bp, synthetic construct
  source 1..80: mol_type = other DNA
aggcaggcccagattgacaccatcgccacaagggttcttgccactgttgtacacggacctgaggacgataatcttgtgga

SEQ ID NO: 85997 - DNA, 80 bp, synthetic construct
  source 1..80: mol_type = other DNA
tttggaacatccccaggagaattagacaaggggctgaaagagctttggtgtaacatgggaaacgcattaaggaaaagcaa

SEQ ID NO: 85998 - DNA, 80 bp, synthetic construct
  source 1..80: mol_type = other DNA
cagctctcaagacagggtcagagaacctaaaatctctctggaacacaatagcggtactctggtgtgttcacaacaaatat

SEQ ID NO: 85999 - DNA, 80 bp, synthetic construct
  source 1..80: mol_type = other DNA
caaattggagatacgcagcaggcaatacaaaaactagaggcagtcatgaagagcagacagtctgccagtaccgcaaagga

SEQ ID NO: 86000 - DNA, 80 bp, synthetic construct
  source 1..80: mol_type = other DNA
taataccatgctaaatgccataggaggacaccaaggggcgttacaagtattaaaggaagtaatcaatgaggaagcagcag

SEQ ID NO: 86001 - DNA, 80 bp, synthetic construct
  source 1..80: mol_type = other DNA
attgggatagaactcatccaccagcaatggggccgttaccaccagggcagataagggaaccaacagggagtgacattgct

SEQ ID NO: 86002 - DNA, 80 bp, synthetic construct
  source 1..80: mol_type = other DNA
gggacaactagcacacagcaagagcaaatgcactggattactagggggaataatcccatcccagtaggagacatctatag

SEQ ID NO: 86003 - DNA, 80 bp, synthetic construct
  source 1..80: mol_type = other DNA
actcacaaggctagagtactagcagaagcaatggcttctgcccagcaagatctaaaaggaggatactcatcagtattcat

SEQ ID NO: 86004 - DNA, 80 bp, synthetic construct
  source 1..80: mol_type = other DNA
cttctacatccagcttgtgatcatggccatgaagaccctcacaaggaaatgctaaagtggcagtttgatagagcactagg

SEQ ID NO: 86005 - DNA, 80 bp, synthetic construct
  source 1..80: mol_type = other DNA
gagaaggagcaagagaaggagaagcagaatcaggggggggaccagaacgagctatatccgtttgcctccctcaaatccct

SEQ ID NO: 86006 - DNA, 80 bp, synthetic construct
  source 1..80: mol_type = other DNA
ggggaccagaacgagctatatccgtttgcctccctcaaatccctctttgggacagaccagtaatcatagcaaaagttggg

SEQ ID NO: 86007 - DNA, 80 bp, synthetic construct
  source 1..80: mol_type = other DNA
ctttgggacagaccagtaatcatagcaaaagttgggggtcatctctgtgaggttttactggacacaggggcagatgatac

SEQ ID NO: 86008 - DNA, 80 bp, synthetic construct
  source 1..80: mol_type = other DNA
cataaatcatgtagccttacagcttcacccagaactcttccccaaataacagactgcttgttgacacagaagattgctga

SEQ ID NO: 86009 - DNA, 80 bp, synthetic construct
  source 1..80: mol_type = other DNA
gctgagttaatggctatattattagccttacaggattccaaagagaaagtaaatatagtgacagactcacagtatgcatt

SEQ ID NO: 86010 - DNA, 80 bp, synthetic construct
  source 1..80: mol_type = other DNA
gggcatcatatcctcccagcctacacagagtgattcccctatagtccagcagataatagaagaactaacaagaaaggacc

SEQ ID NO: 86011 - DNA, 80 bp, synthetic construct
  source 1..80: mol_type = other DNA
tctaagaagacccaaaattggctttatagacatcattatgaaaccagaaatccaagaatcagttcagttgtatatattcc

SEQ ID NO: 86012 - DNA, 80 bp, synthetic construct
  source 1..80: mol_type = other DNA
agtagataaagctgatataataataaccacatattggggattaatgccaggggaaagggatgaacacttgggacatgggg

SEQ ID NO: 86013 - DNA, 80 bp, synthetic construct
  source 1..80: mol_type = other DNA
ttcacctgttttacagaatcagcaatcaggaacgccattctagggcagaaagtgttacccaagtgtgaattccctgcagg

SEQ ID NO: 86014 - DNA, 80 bp, synthetic construct
  source 1..80: mol_type = other DNA
acatagtcaggtagggacactgcaactcctagccttgaaagaaatagtaaaagacagaagaaataagcctcccttaccca

SEQ ID NO: 86015 - DNA, 80 bp, synthetic construct
  source 1..80: mol_type = other DNA
gtgtccagaaattaacagaagataaatggaacaagcaccagagaatcaggggccagttagagaaccagtcaatgcatgga

SEQ ID NO: 86016 - DNA, 80 bp, synthetic construct
  source 1..80: mol_type = other DNA
ataattgctattgcaaatgctgctgctatcattgccttgtttgtttcacaaagaagggtttggggatctcccatggcagg

SEQ ID NO: 86017 - DNA, 80 bp, synthetic construct
  source 1..80: mol_type = other DNA
aagaagcgaagaagaccagcagctgctgcaagccatcagaataataaggatcctgtaccagagcagtaagtaatgctaat

SEQ ID NO: 86018 - DNA, 80 bp, synthetic construct
  source 1..80: mol_type = other DNA
gcatcaaagggacgtgctagttttagtagtttttattgctttgagtattgtaagcttgcttatatggctatttagtctta

SEQ ID NO: 86019 - DNA, 80 bp, synthetic construct
  source 1..80: mol_type = other DNA
agtattatctagaaaaaagaaaccaagagagaagggaagaggaaatacttaaaaggttaaggagaataatagaaatcaag

SEQ ID NO: 86020 - DNA, 80 bp, synthetic construct
  source 1..80: mol_type = other DNA
caactccaggcttggtaggagaaacaccaatgaaaaagtgtgaatttaatgtaactacagtactcaaagataaacaagag

SEQ ID NO: 86021 - DNA, 80 bp, synthetic construct
  source 1..80: mol_type = other DNA
aaaaaacaggctctattttatgtgtcagatctggccaaggttaacacaagtaacgtaaatgacacaaatacatatacaat

SEQ ID NO: 86022 - DNA, 80 bp, synthetic construct
  source 1..80: mol_type = other DNA
gaaataagaattatgggaaaaaatattactaaaaatgaaaagaatatcatagtaactctaaaaaacgaagtaaatataac

SEQ ID NO: 86023 - DNA, 80 bp, synthetic construct
  source 1..80: mol_type = other DNA
ctgcgtaagagaaggacagcaggaagtacaagatataggaataggtccaatgacatggcgcagtgtaatccttgcagcag

SEQ ID NO: 86024 - DNA, 80 bp, synthetic construct
  source 1..80: mol_type = other DNA
aaaacaatagcacaaactcaaggagagcttattgtaattttagtgagactggttggagagacaccctaaaacaaacaact

SEQ ID NO: 86025 - DNA, 80 bp, synthetic construct
  source 1..80: mol_type = other DNA
gaaagatatctaaaacttgtaaactatacaaagaatgctaccataatattcacaggaagctctggtggagatgcagaagt

SEQ ID NO: 86026 - DNA, 80 bp, synthetic construct
  source 1..80: mol_type = other DNA
aacctctttccattttaactgtcatggagaattcttttattgtaacacaagtagcatgtttaactataccttttactgta

SEQ ID NO: 86027 - DNA, 80 bp, synthetic construct
  source 1..80: mol_type = other DNA
acaactccacctgtaacaatggaagcaatcagaatggaaacaacatgacaataccttgcaggataaaacaggtagtgaga

SEQ ID NO: 86028 - DNA, 80 bp, synthetic construct
  source 1..80: mol_type = other DNA
tcatggatgaagggagagtcaggactatatgcacctcccatcagaggtcacttacagtgtatatcaaatataactggaat

SEQ ID NO: 86029 - DNA, 80 bp, synthetic construct
  source 1..80: mol_type = other DNA
gatcctacaattggatcgagaatggaattatactaataatgacacaagagatgccaatgccacatttagaccaacagggg

SEQ ID NO: 86030 - DNA, 80 bp, synthetic construct
  source 1..80: mol_type = other DNA
gagagatgagagatatatggagaacagaattgtacaactataaagtagtaagggtaaagccttttagtgtggcacctaca

SEQ ID NO: 86031 - DNA, 80 bp, synthetic construct
  source 1..80: mol_type = other DNA
acaattacaaggccagtcataagcaaccatagaaataaaagagcagcaggattgggaatgctattcttgggggtactaag

SEQ ID NO: 86032 - DNA, 80 bp, synthetic construct
  source 1..80: mol_type = other DNA
tctgtgtggggtatcagacaactccgagctcgcctgctagcattagaaaccttcatacagaatcagcaactcctaaacct

SEQ ID NO: 86033 - DNA, 80 bp, synthetic construct
  source 1..80: mol_type = other DNA
ggtggccagacctaggggaagggcgaagtccctagggggggaagatgggtgcgagagcgtcagtactaagaggaagtaaa

SEQ ID NO: 86034 - DNA, 80 bp, synthetic construct
  source 1..80: mol_type = other DNA
gtggggctgtaagggaagactaatctgctatacaacagtagaatggaatagaacatggggaggaaatgaatcaatttggg

SEQ ID NO: 86035 - DNA, 80 bp, synthetic construct
  source 1..80: mol_type = other DNA
acaacctaacatggcagcagtgggatagagaaataaacaacataagttctgtcatatttgaagaaatacaaaaggcacaa

SEQ ID NO: 86036 - DNA, 80 bp, synthetic construct
  source 1..80: mol_type = other DNA
gagcaacaggaaaagaatgtaaaggagctgctggaattagatgaatgggcctctctttggaattggtttgacataactaa

SEQ ID NO: 86037 - DNA, 80 bp, synthetic construct
  source 1..80: mol_type = other DNA
gggaagatgggtgcgagagcgtcagtactaagaggaagtaaattggatgcatgggaacaaattaggttaaggccaggatc

SEQ ID NO: 86038 - DNA, 80 bp, synthetic construct
  source 1..80: mol_type = other DNA
ctctcgttacagatccccatccaacaccatcaggaagcagaaacgctaggaagaacaggagaagaaggtggagacggagg

SEQ ID NO: 86039 - DNA, 80 bp, synthetic construct
  source 1..80: mol_type = other DNA
caggcacaggttgacgccttggccaccaggattcttgcaactgttgtacacggacctgaggacagtaaccctgtggattt

SEQ ID NO: 86040 - DNA, 80 bp, synthetic construct
  source 1..80: mol_type = other DNA
accatctcttgagcatcttagcatcagggatccagaagctgatcagctatctgagacttggactgtggattctgggacaa

SEQ ID NO: 86041 - DNA, 80 bp, synthetic construct
  source 1..80: mol_type = other DNA
aagacaattgacgcttgcagacttgttggggctgtaatacaatactggctacaagaattgcaaaatagtgctataagctt

SEQ ID NO: 86042 - DNA, 80 bp, synthetic construct
  source 1..80: mol_type = other DNA
gctagatactgttgcaatagcagttggcaattggactgacagcatcatctcaggtgtacaaagaatagggagagcaattc

SEQ ID NO: 86043 - DNA, 80 bp, synthetic construct
  source 1..80: mol_type = other DNA
ttaacattccaagaagaataagacaaggcttagaaagattcttagtgtaacatgggaaataagtggagcaaaagcaaatt

SEQ ID NO: 86044 - DNA, 80 bp, synthetic construct
  source 1..80: mol_type = other DNA
ttggatgcatgggaacaaattaggttaaggccaggatctaaaaagaaatataagctaaaacatttaatttgggcaagcag

SEQ ID NO: 86045 - DNA, 80 bp, synthetic construct
  source 1..80: mol_type = other DNA
tgcaggatggacagaagtaagaaccagaatgagacagacttcccctgagcctgagcctgagccatgtgcacctggagtag

SEQ ID NO: 86046 - DNA, 80 bp, synthetic construct
  source 1..80: mol_type = other DNA
gagcagtctccagggagttagcagctagaggaggtataccaagttcctatactcctcaaaacaatgcagcccttgcattt

SEQ ID NO: 86047 - DNA, 80 bp, synthetic construct
  source 1..80: mol_type = other DNA
agagctggaaaattatgcatgtgatcctgagctactagacaatgcggaaggtaatgagaaattgttgaagcagttagagc

SEQ ID NO: 86048 - DNA, 80 bp, synthetic construct
  source 1..80: mol_type = other DNA
tatgcgcctgtgaattggggtcctggtgagactaatgattccaccactgttgaaccggtacttgatggcccttatcagcc

SEQ ID NO: 86049 - DNA, 80 bp, synthetic construct
  source 1..80: mol_type = other DNA
tattactggcgcctacagcagctggagtggtggtggaaggtaccaacaatacagatcgttggttagctacaattttagta

SEQ ID NO: 86050 - DNA, 80 bp, synthetic construct
  source 1..80: mol_type = other DNA
tagagatataatatcacatagggctcaagcaaacgaagacattgtcgtgtcaaaaacatcgttgtggaaagaaatgcaat

SEQ ID NO: 86051 - DNA, 80 bp, synthetic construct
  source 1..80: mol_type = other DNA
cgccggccgccattcaggggctatttgaccctacaccccctgccagtgacatttgggtgctgccgccaccctccgaggag

SEQ ID NO: 86052 - DNA, 80 bp, synthetic construct
  source 1..80: mol_type = other DNA
ctccaggtcgacacgaaacctgcctcccccacccttgagcctgctttatcgctcaggcctgttgagcctaagacccctgt

SEQ ID NO: 86053 - DNA, 80 bp, synthetic construct
  source 1..80: mol_type = other DNA
aaattaaatagagagttgctgagaattggagcaaactcagtatggactccagttccttcgaataaaattaaaggctggtg

SEQ ID NO: 86054 - DNA, 80 bp, synthetic construct
  source 1..80: mol_type = other DNA
acttgccattatgcactgaacagaccgacacattgattaaactagaagaggaaggaaaactgtctgaggagtatgagctt

SEQ ID NO: 86055 - DNA, 80 bp, synthetic construct
  source 1..80: mol_type = other DNA
atacaaagttacactgaacgaagacaaacctatttcagacggatacgtgaaagaattggttgctgagcttcgttggcagt

SEQ ID NO: 86056 - DNA, 80 bp, synthetic construct
  source 1..80: mol_type = other DNA
gtaaaaaattgctctttcaaaagatgaaacaagaaaagaatccattcagaggtctgtcgactgatagaaagatggatgaa

SEQ ID NO: 86057 - DNA, 80 bp, synthetic construct
  source 1..80: mol_type = other DNA
agaaacacttcaaaacgctgaatgagtgggctgaaggtgaaaatccatatgaaccaaaagaggtgactgcatcgttgtga

SEQ ID NO: 86058 - DNA, 80 bp, synthetic construct
  source 1..80: mol_type = other DNA
atctataattcgcagtcagctgtacaaattccaatttattattcttctgattcagacttagagaaaagatgcatagaact

SEQ ID NO: 86059 - DNA, 80 bp, synthetic construct
  source 1..80: mol_type = other DNA
acactagggtgatacaaacgttacgtttatataagcagacgcaaatcaatttaatggattcgtacgtgcaaatcccagat

SEQ ID NO: 86060 - DNA, 80 bp, synthetic construct
  source 1..80: mol_type = other DNA
ggaaatataattaaaaagatacagtacggagcagttgcgtcaggtgaaaaacagacaaaagccgccaactctatagctaa

SEQ ID NO: 86061 - DNA, 80 bp, synthetic construct
  source 1..80: mol_type = other DNA
tggcgctaatcaaaacagttttatcacgtatagcgaacaaatattcatttgtaactaaaataattcgagttgatggagac

SEQ ID NO: 86062 - DNA, 80 bp, synthetic construct
  source 1..80: mol_type = other DNA
tcattcgaagtgcttagagaattccaagaaaggattgtctctaaaaaatgtttttatagagtataaagacgtaattgaaa

SEQ ID NO: 86063 - DNA, 80 bp, synthetic construct
  source 1..80: mol_type = other DNA
tttaaacaagatgatcgaatgcaagaaaaagaagagaataaaaacgtaaatggtaatattgaaaataaaaacgctacaaa

SEQ ID NO: 86064 - DNA, 80 bp, synthetic construct
  source 1..80: mol_type = other DNA
tgcacatgctaacgtccaatttgactttcactgtgtattccgatcttcttgcattcgtttcagcagataccgtgaaccaa

SEQ ID NO: 86065 - DNA, 80 bp, synthetic construct
  source 1..80: mol_type = other DNA
ttaccttaaaggacatggctgttgaaaataaaaattctagagagccaggcaaagttgttgactctgaaagctccattttg

SEQ ID NO: 86066 - DNA, 80 bp, synthetic construct
  source 1..80: mol_type = other DNA
atgctacagttggattaactcttcgaattgactcggcaatttgcgaatctgtcttggcggatgctaatgaaacaatgctc

SEQ ID NO: 86067 - DNA, 80 bp, synthetic construct
  source 1..80: mol_type = other DNA
cttgttgactactgtaacattacatttcaaacaatatgaatgcggatcccccgcgaacaaccaaatgataacgtgtgagc

SEQ ID NO: 86068 - DNA, 80 bp, synthetic construct
  source 1..80: mol_type = other DNA
gaggaagaaggtcagaagcgagagtcttttggacctcaaacagcattgttgtgttttgtggcacttcaggtacatatgga

SEQ ID NO: 86069 - DNA, 80 bp, synthetic construct
  source 1..80: mol_type = other DNA
catggcctgatggggctgacatcaatctcatgcctatatgagctttcgcaatctcagaaaaaaaactccttgtttctact

SEQ ID NO: 86070 - DNA, 80 bp, synthetic construct
  source 1..80: mol_type = other DNA
gggacatttgggtgacgagggaaccttatgtgtcatgcgagcctgacaagtgttaccaatttgcactcggtcaaggaact

SEQ ID NO: 86071 - DNA, 80 bp, synthetic construct
  source 1..80: mol_type = other DNA
aaggtactgttcattgaagaagggaaaatcgttcatatcagcccattggcagggagtgcccaacatgtagaggagtgctc

SEQ ID NO: 86072 - DNA, 80 bp, synthetic construct
  source 1..80: mol_type = other DNA
gggggggggggggcccttaaagggatgtgtgggaggaccacccttggggggggcataccccccagataaaaagaattcgc

SEQ ID NO: 86073 - DNA, 80 bp, synthetic construct
  source 1..80: mol_type = other DNA
ggggcataccccccagataaaaagaattcgccgcccacctcttggtatctaatccattcttcaaaagagggtgtggtgtt

SEQ ID NO: 86074 - DNA, 80 bp, synthetic construct
  source 1..80: mol_type = other DNA
cgcccacctcttggtatctaatccattcttcaaaagagggtgtggtgttttcagtgacagataacagtacgtgttggatg

SEQ ID NO: 86075 - DNA, 80 bp, synthetic construct
  source 1..80: mol_type = other DNA
gatttgtgtttgcaaataatataatcaaagcaggtggacttggttataaatggtcagagatatcatataaggctaataat

SEQ ID NO: 86076 - DNA, 80 bp, synthetic construct
  source 1..80: mol_type = other DNA
aatataggtgcagaaaagaaagagaatgtccctgcatttattgggggattcaatgggacccaaataacaccagtttcgtg

SEQ ID NO: 86077 - DNA, 80 bp, synthetic construct
  source 1..80: mol_type = other DNA
tgataagattcgtatttgcaaataatataattaaagcaggtggacttggttataaatgttccgaaataacatataaggct

SEQ ID NO: 86078 - DNA, 80 bp, synthetic construct
  source 1..80: mol_type = other DNA
aattggttgtaaataaggaacaagttaccactaaagatgaacttgagcatcatatgcatagaatcgtaaaagagatgaga

SEQ ID NO: 86079 - DNA, 80 bp, synthetic construct
  source 1..80: mol_type = other DNA
tcacacacctcctcctccaccaccaccacccttgcacaggcctcacctgcactgcccacctgcacctccgaggaacgcgt

SEQ ID NO: 86080 - DNA, 80 bp, synthetic construct
  source 1..80: mol_type = other DNA
ggtatgggcctgcattgggttggaagtgggtagaggccagcccctgggtgttggtattagtgggcatccattattaaaca

SEQ ID NO: 86081 - DNA, 80 bp, synthetic construct
  source 1..80: mol_type = other DNA
ttacttacgaaaggaacaaatgtttgcaagacatttctttaatagggcgggaacggttggagaggacattccacaggatt

SEQ ID NO: 86082 - DNA, 80 bp, synthetic construct
  source 1..80: mol_type = other DNA
cttatctatagttgccaaaactttactatgtgactaagtacacacctggcgcacagctaggcgcggtttggcaactacac

SEQ ID NO: 86083 - DNA, 80 bp, synthetic construct
  source 1..80: mol_type = other DNA
cgacactcaaatggtgaggatatagtaatcaagtataccaaacaaggggacacggtcagtggagtgcccaccgtctccac

SEQ ID NO: 86084 - DNA, 80 bp, synthetic construct
  source 1..80: mol_type = other DNA
acactgcatacagtgtcccccccctggatcaaagggaaaagacagacgcaaaggaacccctaaccggctcaataattgaa

SEQ ID NO: 86085 - DNA, 80 bp, synthetic construct
  source 1..80: mol_type = other DNA
tccgcttcacccgacatagtcggcaccataaatgcactcttggcgagaatcgccgctgccagatctctagtacacagggc

SEQ ID NO: 86086 - DNA, 80 bp, synthetic construct
  source 1..80: mol_type = other DNA
taaggaagagatgtcatctaggatgcgtcctgttgtcatcatgatatctggacgacctgggatagggaagacccacttgg

SEQ ID NO: 86087 - DNA, 80 bp, synthetic construct
  source 1..80: mol_type = other DNA
cttggcacgcgatctggccaaaaagatggcagccactctatcaggtgaccaaagagttggccttgtcccaagaaacggtg

SEQ ID NO: 86088 - DNA, 80 bp, synthetic construct
  source 1..80: mol_type = other DNA
ctcgccgacacatgccccttaacactcaactgtgatagaatagaaaataaggggaaagtctttgacagtgacactctgat

SEQ ID NO: 86089 - DNA, 80 bp, synthetic construct
  source 1..80: mol_type = other DNA
tatcaccaccaatttgcccaatccggcccccatggactatgtgaattttgaagcttgctcacgccgcatagacttccttg

SEQ ID NO: 86090 - DNA, 80 bp, synthetic construct
  source 1..80: mol_type = other DNA
tctacgcggattccccctcagttgacaaggcaaaaagagactttccgggccaaccggacatgtggaaagacgccttcaaa

SEQ ID NO: 86091 - DNA, 80 bp, synthetic construct
  source 1..80: mol_type = other DNA
ggcgtcatgaagtcactgaccatacactccctcatagcccgcgccattggcctactccatgagaggttggacgaatttga

SEQ ID NO: 86092 - DNA, 80 bp, synthetic construct
  source 1..80: mol_type = other DNA
atgtgggacggtgagatctaccattatgggctctatgtggagagaggattggtccttggtgtacataagccaccggcagc

SEQ ID NO: 86093 - DNA, 80 bp, synthetic construct
  source 1..80: mol_type = other DNA
tctacaaggcccagacttgccagtgtacaactttgaccagaacaaggtggccgcattccgaaaactcgcggccgataaca

SEQ ID NO: 86094 - DNA, 80 bp, synthetic construct
  source 1..80: mol_type = other DNA
agtatggactcatggacaccttgagagcaggcaacaaattgaaggaagtcaaaaccctagaacaattcaaggaagcagtg

SEQ ID NO: 86095 - DNA, 80 bp, synthetic construct
  source 1..80: mol_type = other DNA
aaggacatacgaataaaaccctgtaggataatctacaattccctggcctatgacttagattcaaatgggtcagggaaagt

SEQ ID NO: 86096 - DNA, 80 bp, synthetic construct
  source 1..80: mol_type = other DNA
caatatcaagaaggtaggggatcagagggtccaagccaacaatgaactcaactctgcgctcaacaaactgcgcggggcca

SEQ ID NO: 86097 - DNA, 80 bp, synthetic construct
  source 1..80: mol_type = other DNA
gaatcagatattacgtgaaatgcttccaagaaatgatctactcaattctccagattgccggcgcggcttttgttacatca

SEQ ID NO: 86098 - DNA, 80 bp, synthetic construct
  source 1..80: mol_type = other DNA
tcaacaaaatgtggtccaaaccagaaaaacaaatgggcaccctcacggagccacctgtccctccggatgaagaatggacc

SEQ ID NO: 86099 - DNA, 80 bp, synthetic construct
  source 1..80: mol_type = other DNA
atagtaccggtggacacagtccaggaaggcaagaaaggcaaaaacaagagtggcagaggcaagaaacacactgctttttc

SEQ ID NO: 86100 - DNA, 80 bp, synthetic construct
  source 1..80: mol_type = other DNA
cgtgagcctcgcgcgcatcgagctgtcccccctttccctatattggagaacagtttacacacccccttacttggttgctc

SEQ ID NO: 86101 - DNA, 80 bp, synthetic construct
  source 1..80: mol_type = other DNA
gctggggcttttgggtctcctccaacctgttcattacttccacacatgtcatcccaccaaacatgactgaagcctttgga

SEQ ID NO: 86102 - DNA, 80 bp, synthetic construct
  source 1..80: mol_type = other DNA
gtgccaataaaccagatacagatacacaggagtggggagttctgtaagatgagattcccaaaagccatcagacccgatgt

SEQ ID NO: 86103 - DNA, 80 bp, synthetic construct
  source 1..80: mol_type = other DNA
ggtacaaggcagaatgattggaggccagatgggaatgctcctcacagggtccaatgccaaaaacatggatcttggcaccg

SEQ ID NO: 86104 - DNA, 80 bp, synthetic construct
  source 1..80: mol_type = other DNA
caagaggggcaatgattgggttaccatcggggtccacactgccgccgctaggggcggtaacacggtgatctgtgctaccc

SEQ ID NO: 86105 - DNA, 80 bp, synthetic construct
  source 1..80: mol_type = other DNA
caagaggggcaatgattgggttaccatcggggtccacactgccgccgctaggtgcggtaacacggtgatctgtgctaccc

SEQ ID NO: 86106 - DNA, 80 bp, synthetic construct
  source 1..80: mol_type = other DNA
ctgacacccttaagaagctccatggtgaaaccttcccctacacggcatttgagaacaactgctacacattctgctgttgg

SEQ ID NO: 86107 - DNA, 80 bp, synthetic construct
  source 1..80: mol_type = other DNA
ccgaaaccagcggttttggaggccgcaaaggaaaccatttgtaatgtattggaacaaaccattgaaccaccccagaagtg

SEQ ID NO: 86108 - DNA, 80 bp, synthetic construct
  source 1..80: mol_type = other DNA
gtcctacgcgcaagcctgcgcatccctagacaaaacaacttcaagtggtcacccccatcacaagaagaaaaatgacaatt

SEQ ID NO: 86109 - DNA, 80 bp, synthetic construct
  source 1..80: mol_type = other DNA
ttctgtggggttcagacctgggtacgatgatacgctgtgccaggtcattcggtggtctcatggatgagatgaaggcaaac

SEQ ID NO: 86110 - DNA, 80 bp, synthetic construct
  source 1..80: mol_type = other DNA
cacaacaaaggtgtgtcttgggtgctgcacttgaaattatggtcaggttctcagccgaacctgaattggcacaaattgtg

SEQ ID NO: 86111 - DNA, 80 bp, synthetic construct
  source 1..80: mol_type = other DNA
cccagaaattaacagacaaactaagagaatatggcttgatcccaaccagacctgacaagacagaaggccctctcataatc

SEQ ID NO: 86112 - DNA, 80 bp, synthetic construct
  source 1..80: mol_type = other DNA
aaggaaagcttggagggcctaaccttcctgagaagggatgtgtgcagagacccagttggatggtatggcaagcttgacca

SEQ ID NO: 86113 - DNA, 80 bp, synthetic construct
  source 1..80: mol_type = other DNA
acagaaagttcgtgtcgagaaccacaggcttctatagaccctatcaagattggaacagaaaaccattgccaaccatggac

SEQ ID NO: 86114 - DNA, 80 bp, synthetic construct
  source 1..80: mol_type = other DNA
cgggaggagctatcgcagccccccttaccgggcagacaaattttattgatccctggattagaaataattatgtgcaagca

SEQ ID NO: 86115 - DNA, 80 bp, synthetic construct
  source 1..80: mol_type = other DNA
cccaatggtgagtttacaatatcccctagaaattctcctggtgaaattttacttaatttggaattgggccctgaacttaa

SEQ ID NO: 86116 - DNA, 80 bp, synthetic construct
  source 1..80: mol_type = other DNA
tttgctgcagtgccaccccacttcccagttgagagtcttagccccccccaaattactatgtttccccatattatagtgga

SEQ ID NO: 86117 - DNA, 80 bp, synthetic construct
  source 1..80: mol_type = other DNA
tgtcagaacccttgaacctataaacatccccatacctgatgttaggaacaatttcttccattacaatcagaacaatgagc

SEQ ID NO: 86118 - DNA, 80 bp, synthetic construct
  source 1..80: mol_type = other DNA
gaggggaaactcaagaaggtggccaatgtgttcctgtgcgctctgtctgggctgatcaccagacccatcaaggacctcat

SEQ ID NO: 86119 - DNA, 80 bp, synthetic construct
  source 1..80: mol_type = other DNA
tgatgttttcacagtgtcatgcagggttctaacaaagccttcagcagattttgagttcaattatttggtccccccgacag

SEQ ID NO: 86120 - DNA, 80 bp, synthetic construct
  source 1..80: mol_type = other DNA
tcgaatcaagaactaaacccttcacaataccaatactcacaattggagagatgacaaattcaagattccctgtggccatt

SEQ ID NO: 86121 - DNA, 80 bp, synthetic construct
  source 1..80: mol_type = other DNA
gacatgctgtacaccagcccaactgaaaacctggtggtccaaccccagaatggcaggtgtacacttgagggtgagttatt

SEQ ID NO: 86122 - DNA, 80 bp, synthetic construct
  source 1..80: mol_type = other DNA
ccccagacttcataggtgatgtgtacggagtgctctcccaaaggaatagaaacatagaatctggccaaactgctcccgca

SEQ ID NO: 86123 - DNA, 80 bp, synthetic construct
  source 1..80: mol_type = other DNA
acactaatgatgttgaaaaccaacccaccaaattcacaccagtaggacttgaaaatcctggttctttccaccagtgggag

SEQ ID NO: 86124 - DNA, 80 bp, synthetic construct
  source 1..80: mol_type = other DNA
ttgccaaattactcaggagctttaaccctcaacatggggcttgcaccacctgtgttcccaacctaccccggcgagcagct

SEQ ID NO: 86125 - DNA, 80 bp, synthetic construct
  source 1..80: mol_type = other DNA
tctcttcttccgctcgtacatcccccttaagggtgggtttgggaattcaataatagattgtcttgtgccacaagagtgga

SEQ ID NO: 86126 - DNA, 80 bp, synthetic construct
  source 1..80: mol_type = other DNA
accttctctggtgttgtagagtcagtgattctctttgcagaactctttggcatcttttggacaccaccagatatatcagc

SEQ ID NO: 86127 - DNA, 80 bp, synthetic construct
  source 1..80: mol_type = other DNA
aagcaaggggttctgaccgctggcggcttttcccctactgatgcggcacgcggggcaatcaacgcccccatgacaaaagt

SEQ ID NO: 86128 - DNA, 80 bp, synthetic construct
  source 1..80: mol_type = other DNA
cttggattggagtggaacaaggtactgggcaccaaacgccactgccacaacctcaatgtcaggtggctttacaggacaag

SEQ ID NO: 86129 - DNA, 80 bp, synthetic construct
  source 1..80: mol_type = other DNA
ttgtgcaccggaccacaccagattttaaaacaagccaggcccccaagtctgtacccagtagtgggtcctcaatcagatca

SEQ ID NO: 86130 - DNA, 80 bp, synthetic construct
  source 1..80: mol_type = other DNA
aactcaacccaactcaccagtctaggctcacattcatccgggtcgtctcgatccagtgggtccacagttactagttccct

SEQ ID NO: 86131 - DNA, 80 bp, synthetic construct
  source 1..80: mol_type = other DNA
accatcttccagtaggactagggaatgggtcaagcaacaaagtctcaatttggaaccacatatgcctgggtctcacagaa

SEQ ID NO: 86132 - DNA, 80 bp, synthetic construct
  source 1..80: mol_type = other DNA
tttcattgcatccttgttgggtgactatgaaatgcaaggccctgaagacatcgcatccgagatcgtcccagtcatccttg

SEQ ID NO: 86133 - DNA, 80 bp, synthetic construct
  source 1..80: mol_type = other DNA
gcggcattggcatggttcttggcttcaccaaagaaagaattggccggttgctgagctccgcggcatcatcccttagagca

SEQ ID NO: 86134 - DNA, 80 bp, synthetic construct
  source 1..80: mol_type = other DNA
tgtgactggactttcatgggggtcgtcgagttagtggtgctactgactgaactgtttgatatcttctggaccccacctga

SEQ ID NO: 86135 - DNA, 80 bp, synthetic construct
  source 1..80: mol_type = other DNA
taatattagggggtattggcctggctattggtttcactagagacaaaatcacaaaggtcatgaagagtgccgttgatggt

SEQ ID NO: 86136 - DNA, 80 bp, synthetic construct
  source 1..80: mol_type = other DNA
gcatgtccaagataacagaggattgtaataaactacaagccatagctgatactgctccactcacactcaactgtgacaga

SEQ ID NO: 86137 - DNA, 80 bp, synthetic construct
  source 1..80: mol_type = other DNA
aggcagttgctttgacaatggaaagacaagatgagttccagatgcagggggcagtgtataactttgatgaggaccgggtc

SEQ ID NO: 86138 - DNA, 80 bp, synthetic construct
  source 1..80: mol_type = other DNA
tttctacaaatccaagagcggcatgcgaaaacaacgtcaagaggagcgccgacaacttggattagtcacaggcactgaag

SEQ ID NO: 86139 - DNA, 80 bp, synthetic construct
  source 1..80: mol_type = other DNA
gggtgagttcaacagtttttattacaaccacacacgtcataccaccagaagccaaagaaatttttggggaaaaactttca

SEQ ID NO: 86140 - DNA, 80 bp, synthetic construct
  source 1..80: mol_type = other DNA
ccttgaggagggttgcccggagggaacggtgtgcactataatggtgaagagagactcaggtgaattgctacctctagcag

SEQ ID NO: 86141 - DNA, 80 bp, synthetic construct
  source 1..80: mol_type = other DNA
agtcagttaaaccagtttacacagcagcacttaaagatgaattggtaaaacctgaaaaagtgtacacaaaaataaaaaag

SEQ ID NO: 86142 - DNA, 80 bp, synthetic construct
  source 1..80: mol_type = other DNA
ctttggggtgcggaccttggcacagtcattcgggctgcccgagccttcggcccattttgtgaggcgataaagccacatgt

SEQ ID NO: 86143 - DNA, 80 bp, synthetic construct
  source 1..80: mol_type = other DNA
tgtgattagtgttaaggatggcctcccctcagggttcccatgcacctcacaagtgaacagcataaaccattggatttaca

SEQ ID NO: 86144 - DNA, 80 bp, synthetic construct
  source 1..80: mol_type = other DNA
gttaatgcagctgaacctctaccccttgaaccggtggtgggcgccgcaaccgcggcggccaccgctggacaggttaatat

SEQ ID NO: 86145 - DNA, 80 bp, synthetic construct
  source 1..80: mol_type = other DNA
gaccacaccttaacccctttctcctgcatttgtcccagatgtataatggttgggttgggaatatgagagttagggtcatg

SEQ ID NO: 86146 - DNA, 80 bp, synthetic construct
  source 1..80: mol_type = other DNA
ggtcccccttgatgatgtgcgcaatgtcctgttccacacaaatgagaatcgcccaaccatgcgattgctctgtatgttat

SEQ ID NO: 86147 - DNA, 80 bp, synthetic construct
  source 1..80: mol_type = other DNA
acacacctctccgtgctggaggagcttcatcaggcacagatccttttgtcattgctggccgtgtgttaacttgtcctgct

SEQ ID NO: 86148 - DNA, 80 bp, synthetic construct
  source 1..80: mol_type = other DNA
ggcaaagtcttctccaccaactccgggacggggcttaatttaactgaagtagatgggaccccctaccatgcatttgagag

SEQ ID NO: 86149 - DNA, 80 bp, synthetic construct
  source 1..80: mol_type = other DNA
cccggcccccctcggttttcctgacataggcaattgtgattggcacgtgtatgcctttaaggtaaatcaaaacacagggg

SEQ ID NO: 86150 - DNA, 80 bp, synthetic construct
  source 1..80: mol_type = other DNA
cacccatcgggggaccaactaggcacacttacttggatctcccctctcaacaatgcttctagggttgatccctggaaaat

SEQ ID NO: 86151 - DNA, 80 bp, synthetic construct
  source 1..80: mol_type = other DNA
cccaacatatggttcaacattgactgagtccaccaacttggcaccacccatctttccaccaggttttggtgagtctatag

SEQ ID NO: 86152 - DNA, 80 bp, synthetic construct
  source 1..80: mol_type = other DNA
tttattttatgtcagattttcctattgtgtcaggtaatactgcccaaatcccttgcaccctgccccaagaatttgtttca

SEQ ID NO: 86153 - DNA, 80 bp, synthetic construct
  source 1..80: mol_type = other DNA
gggagaattcaaattgtaccctgatgggttcatcacttgtgtgcctaacacgggtggcggcccccaaaatctcccatcga

SEQ ID NO: 86154 - DNA, 80 bp, synthetic construct
  source 1..80: mol_type = other DNA
aagcatgatgaaaggatgttgggtttacaaattgagggatctaacgctctgctacaaaagaatctttctacccgttataa

SEQ ID NO: 86155 - DNA, 80 bp, synthetic construct
  source 1..80: mol_type = other DNA
tctcttagttggtgcaggtctttcctcagctgatgctgcaagatccatagctggggctccagtgacaaaaatcgtggact

SEQ ID NO: 86156 - DNA, 80 bp, synthetic construct
  source 1..80: mol_type = other DNA
ggaatggggtgagaatcgctgcccccacgtccactgccaccaccctccgttctggcaacttcatgagcataccaactata

SEQ ID NO: 86157 - DNA, 80 bp, synthetic construct
  source 1..80: mol_type = other DNA
cccaaaaaggagccccaaaaattgtcagcacgctctgtaggcctctccaatcctaattatgattcatctactatgatttc

SEQ ID NO: 86158 - DNA, 80 bp, synthetic construct
  source 1..80: mol_type = other DNA
taggacaagtcaatgggtggagtcgcaaaattcaatcaggaatttgtcacctttccatagctcggctctgaggaccactt

SEQ ID NO: 86159 - DNA, 80 bp, synthetic construct
  source 1..80: mol_type = other DNA
gggtaacccctcctggttctacttctacttcaactttttctactgtttcttcggcgccacggtacttcaacaccgagcgt

SEQ ID NO: 86160 - DNA, 80 bp, synthetic construct
  source 1..80: mol_type = other DNA
caagagaaagtcccatttcacctacaaataagcaaacaggtaattcatgcagaaattcaacacctaggtcattggatgga

SEQ ID NO: 86161 - DNA, 80 bp, synthetic construct
  source 1..80: mol_type = other DNA
ttgggactgtgtcaaaatttcaaccatcagatactttattatttttaggcccacttgaacagggtggattgatttttaaa

SEQ ID NO: 86162 - DNA, 80 bp, synthetic construct
  source 1..80: mol_type = other DNA
caagaaaaaataccattccacttgcaaataagtaaacaagtaattcatgcagaaattcaacacttaggtcactggatgga

SEQ ID NO: 86163 - DNA, 80 bp, synthetic construct
  source 1..80: mol_type = other DNA
ttggaactgtatcaaaattccaaccatcagacactctattatttttaggtccacttgaacaaggtgggttgatttttaag

SEQ ID NO: 86164 - DNA, 80 bp, synthetic construct
  source 1..80: mol_type = other DNA
agaaatgaaggtgttgttcaagccatgagattaatccaggctgatataaattttgtacgagagcatttaattcgaaatga

SEQ ID NO: 86165 - DNA, 80 bp, synthetic construct
  source 1..80: mol_type = other DNA
ttcctctgatcagtacgatacacgtttagtctgtaatgagatattaaaaaactacccggaaacaccagtacagctattag

SEQ ID NO: 86166 - DNA, 80 bp, synthetic construct
  source 1..80: mol_type = other DNA
agaaatgagggtgttgttcaggccatgagattgatacaagctgacataaattttgtaagggagcacttaattcggaatga

SEQ ID NO: 86167 - DNA, 80 bp, synthetic construct
  source 1..80: mol_type = other DNA
tgcttctgaccagtatgatacccgtctagcatgtaatgaaatattaaagaactacccagaaacaccgctgcaacttttag

SEQ ID NO: 86168 - DNA, 80 bp, synthetic construct
  source 1..80: mol_type = other DNA
gatttttcgttctcttgggggatttgcggagcttgtgccttttcagctatcaccacttgagaatacttctgattgtagca

SEQ ID NO: 86169 - DNA, 80 bp, synthetic construct
  source 1..80: mol_type = other DNA
aggaccgcggaacttctgggacgaagggggtggggaaccctcaaattttataaccctttccagtattggggtaaggaaga

SEQ ID NO: 86170 - DNA, 80 bp, synthetic construct
  source 1..80: mol_type = other DNA
tggggtaaggaagaaaaaaagagtgttttattgctctgttactctgccacaccagtagtggagaggaccactgggattat

SEQ ID NO: 86171 - DNA, 80 bp, synthetic construct
  source 1..80: mol_type = other DNA
cacaaagaagtactagtgtggagatttgacagcagcctagcacgcagacacgtagcccgcgagctacatccggagtttta

SEQ ID NO: 86172 - DNA, 80 bp, synthetic construct
  source 1..80: mol_type = other DNA
catcatgatccgctgcagaataacacatataataaacatgtggcaggtagtgagagcagtactgtatgcccctgcccttc

SEQ ID NO: 86173 - DNA, 80 bp, synthetic construct
  source 1..80: mol_type = other DNA
gcaggcaacagttaagcaagcaatccatctacgcagtactactatggactcgtgatgcagcaagtagttactggcgcgag

SEQ ID NO: 86174 - DNA, 80 bp, synthetic construct
  source 1..80: mol_type = other DNA
ggaacttagggacattggaaatggatcctttgggttaccccctggccaaaaaggaaggggagaaaagaaaaaaaaggaca

SEQ ID NO: 86175 - DNA, 80 bp, synthetic construct
  source 1..80: mol_type = other DNA
attgttgtggtaaatgtaaccgcaaattttaccatgtggttgaatgacatgctggatgagatgctcgatgagataatcag

SEQ ID NO: 86176 - DNA, 80 bp, synthetic construct
  source 1..80: mol_type = other DNA
ctttttggatcatagcctaaagccatgcgtaatgtgggccacactatgcgtcactataaacagtagtagtgttgccatca

SEQ ID NO: 86177 - DNA, 80 bp, synthetic construct
  source 1..80: mol_type = other DNA
gttacctctaccttaaaacctacgaaactgaaagcttatgcactgatttatagaactgagttagtaccacttattgagaa

SEQ ID NO: 86178 - DNA, 80 bp, synthetic construct
  source 1..80: mol_type = other DNA
tcagatcaacggcaattacatgattacagggtatttgaataacttgaacataacaaagtcaggtcaaacggtatcctttg

SEQ ID NO: 86179 - DNA, 80 bp, synthetic construct
  source 1..80: mol_type = other DNA
gaccttttcgcccacatccttggcctcatgcgggtcaagcgagtctaacggtcaagtgtaataatatttcatttaaaggc

SEQ ID NO: 86180 - DNA, 80 bp, synthetic construct
  source 1..80: mol_type = other DNA
acaggaccatgcaataaggtcagctcagtacagtgtactcaaggaattaaactagttgaatggactcgtttaatgttata

SEQ ID NO: 86181 - DNA, 80 bp, synthetic construct
  source 1..80: mol_type = other DNA
tggtagtatagcagaagagcagatagaaattcgttgtgaaaatctgacaatcaaaaccggattaataatagtgcagctta

SEQ ID NO: 86182 - DNA, 80 bp, synthetic construct
  source 1..80: mol_type = other DNA
atgcagtataaaacaaattatacagatgtggcaaggattacgaaaagtattgaatgcccctgtctgcgctccccttgacg

SEQ ID NO: 86183 - DNA, 80 bp, synthetic construct
  source 1..80: mol_type = other DNA
gaaacataaaatgtacatcaaatttcacaggactactattgccacgtgctggaggaagtggacttaatgatactgacgca

SEQ ID NO: 86184 - DNA, 80 bp, synthetic construct
  source 1..80: mol_type = other DNA
ataaatcggtctttctccacaaccccaaaacttaaaaaaaagactgagactgatctttttcattatgttgaagtagaagc

SEQ ID NO: 86185 - DNA, 80 bp, synthetic construct
  source 1..80: mol_type = other DNA
actggatatgactgctactgatgatggatatataaattgtaatacctcaaccttaaccataacctgtccctgtgtctctt

SEQ ID NO: 86186 - DNA, 80 bp, synthetic construct
  source 1..80: mol_type = other DNA
tcgcccctgttcctattccttattgtgctcctgctggttatgctattcctattcgtaatggtaataatttcactggacca

SEQ ID NO: 86187 - DNA, 80 bp, synthetic construct
  source 1..80: mol_type = other DNA
ggaccatgcccgagtgtcaacgccttccaaggtacacgtggacttgaacctgtggcatcaactccactattgttaattgg

SEQ ID NO: 86188 - DNA, 80 bp, synthetic construct
  source 1..80: mol_type = other DNA
taatgtagcaaaaaatgagatagtaattatatctgaaactctgacacacaatgtcaaaatggtaatggtacaacttaatg

SEQ ID NO: 86189 - DNA, 80 bp, synthetic construct
  source 1..80: mol_type = other DNA
agaagagactgtgaatgagagtacaacagaaattgtgggcaatggggtggattttggtggtcctaagctttgaaatgttt

SEQ ID NO: 86190 - DNA, 80 bp, synthetic construct
  source 1..80: mol_type = other DNA
ccaccctgccgtccggtcgcttttgacccccctcctataatttattgtggtcctcctggtgatgctactcttctgtgttg

SEQ ID NO: 86191 - DNA, 80 bp, synthetic construct
  source 1..80: mol_type = other DNA
tgatgatacaatcttcggagtaagaccatgctgtaatgtcgtcaccgcactatgcacacctggtgttattccaccggtgt

SEQ ID NO: 86192 - DNA, 80 bp, synthetic construct
  source 1..80: mol_type = other DNA
aaatctcacaaggatatttgggataaccttccttggacccggtgggatagaaaaatttgtattttcccggccccaatatc

SEQ ID NO: 86193 - DNA, 80 bp, synthetic construct
  source 1..80: mol_type = other DNA
ccggttgcttgaagactcgcaaacccagccggaaaagaatgggaaagattttcttgaattggataaatggcaaaatttgt

SEQ ID NO: 86194 - DNA, 80 bp, synthetic construct
  source 1..80: mol_type = other DNA
attgatggtaccataaatggtaccttgaaggaggaagtaaaaaattgctctttcgaaaggaccgtggtagtactatttta

SEQ ID NO: 86195 - DNA, 80 bp, synthetic construct
  source 1..80: mol_type = other DNA
taaaaataagggacctgcactattttatggacttgatttcctaccctttatggaggagggaattcggtggtataagataa

SEQ ID NO: 86196 - DNA, 80 bp, synthetic construct
  source 1..80: mol_type = other DNA
taaaatgtggggcacaaggttaagatatagagtagtaggaggtaccggtagagaaagagtaagaagagctgtatcagcag

SEQ ID NO: 86197 - DNA, 80 bp, synthetic construct
  source 1..80: mol_type = other DNA
accaacattaggaataggagcatttatactagccctaatcataataataattattcggaccataggacagatacaacata

SEQ ID NO: 86198 - DNA, 80 bp, synthetic construct
  source 1..80: mol_type = other DNA
agaagttggtgagacaaaagataataaaaaggttggtaaaaaaaattagggaaagcgcaaaaaacggagccaatggtaat

SEQ ID NO: 86199 - DNA, 80 bp, synthetic construct
  source 1..80: mol_type = other DNA
gatgaggacaaaaaggcattgttatcaatggtggattgggcgcatcatgaagcttcggatgaatatgatagataatataa

SEQ ID NO: 86200 - DNA, 80 bp, synthetic construct
  source 1..80: mol_type = other DNA
ttaccttgcgaaaaattgacatggtggaacaaacgcctgatgatatactcagtttgtgtgatgagatcctaaagtcgtgt

SEQ ID NO: 86201 - DNA, 80 bp, synthetic construct
  source 1..80: mol_type = other DNA
gtaaagatgaccccagtctgtgtcactttaaactgtagcaatgcaactgctaatacaactgctaatagaaatatcggtag

SEQ ID NO: 86202 - DNA, 80 bp, synthetic construct
  source 1..80: mol_type = other DNA
aagtgtagagcattattgttatttcaataacactactagaattcacggcgtaatgataggtatgcaggaatattgtaaat

SEQ ID NO: 86203 - DNA, 80 bp, synthetic construct
  source 1..80: mol_type = other DNA
gatcaagacagaagcagctggatgcgattagtaaacggaatcttagcgcttgcttgggacgacatcctgagcatgtgtct

SEQ ID NO: 86204 - DNA, 80 bp, synthetic construct
  source 1..80: mol_type = other DNA
tttcatctaccaccgattgagggacgtcatattggtgatagcgaggacagtggaggttctggggcgcaggagtagggaag

SEQ ID NO: 86205 - DNA, 80 bp, synthetic construct
  source 1..80: mol_type = other DNA
cccttaaatatcttggcagccttgtgcagtattgggctttagagttgaaaaagagtgctattagtataatagatgcttta

SEQ ID NO: 86206 - DNA, 80 bp, synthetic construct
  source 1..80: mol_type = other DNA
tgcaggataagagatcaacttgtacaacatgtgaggctaaagaagtcagtaatgatgccaatgtacgcccctcctatcaa

SEQ ID NO: 86207 - DNA, 80 bp, synthetic construct
  source 1..80: mol_type = other DNA
tggagatatagcatgtagatcaaacatcacaggtctactattgacacgtgatggaggcaacaccaacacatctgagatat

SEQ ID NO: 86208 - DNA, 80 bp, synthetic construct
  source 1..80: mol_type = other DNA
atgggtgcgagagcgtcaatattaagaggcgaaaaattagaggcctgggaaagaattaagttgcgaccaggcggaaggaa

SEQ ID NO: 86209 - DNA, 80 bp, synthetic construct
  source 1..80: mol_type = other DNA
cagaatgctaatggagaatggatacatagtaaattgctctttcaaaataaccacaaagttaaaagatgagctaaggcagg

SEQ ID NO: 86210 - DNA, 80 bp, synthetic construct
  source 1..80: mol_type = other DNA
aatacgcgcttttttatattattgatatggtatcacttgcggggaataatacttataggttaataaattgcaatacctca

SEQ ID NO: 86211 - DNA, 80 bp, synthetic construct
  source 1..80: mol_type = other DNA
tttatcacggagacatagcaaattgctcttttaatgaaaccacagaactaaaagacaaagtctctaaggaacatgatctt

SEQ ID NO: 86212 - DNA, 80 bp, synthetic construct
  source 1..80: mol_type = other DNA
ttctataggcttgatgtaaaaccattaaatgaagagaagaacaattccactcacaatacctccatattaataaattgtag

SEQ ID NO: 86213 - DNA, 80 bp, synthetic construct
  source 1..80: mol_type = other DNA
tcaactcaactattgatgtatggttttctatctgaaaatcgaagagacaataccaacaatataacagtacatcttagtga

SEQ ID NO: 86214 - DNA, 80 bp, synthetic construct
  source 1..80: mol_type = other DNA
atctgtagatattatgtgtactaggccaagcaataatactaggagaagaatcatcgggatacgaccagggagagtatcta

SEQ ID NO: 86215 - DNA, 80 bp, synthetic construct
  source 1..80: mol_type = other DNA
tgatgcgaggagatatgataatctatctaagagcaacatattgtaatattagagatacgagagctgcttgtaatattact

SEQ ID NO: 86216 - DNA, 80 bp, synthetic construct
  source 1..80: mol_type = other DNA
ttgagagatgtagtagacgaattacacttacagttcgatgaaacaataacaattgcaccttcttcaggaggtcccccaga

SEQ ID NO: 86217 - DNA, 80 bp, synthetic construct
  source 1..80: mol_type = other DNA
agataacactaatagctctacttgtggggaggacttatgctgttgcaatacatcacagctgattcatagtagtatttgtc

SEQ ID NO: 86218 - DNA, 80 bp, synthetic construct
  source 1..80: mol_type = other DNA
ataataatccaacatccgaaccgtctaaaaatcgtgctgcaaatccaacattcataatcccatgcagggtgaagcaagtt

SEQ ID NO: 86219 - DNA, 80 bp, synthetic construct
  source 1..80: mol_type = other DNA
ctaagcatgcgcctcgtattgcgggaagcaatgtatgcccatcctatatcaggagacgtactattgacatcggatgtcgg

SEQ ID NO: 86220 - DNA, 80 bp, synthetic construct
  source 1..80: mol_type = other DNA
caagcaagactcgatttacctggaaccctcctttgccctcaaccccttgtttggctacaaccccttggcccaataaagga

SEQ ID NO: 86221 - DNA, 80 bp, synthetic construct
  source 1..80: mol_type = other DNA
ggctcgccagattacggaagctcacttaaatacaggagcagatgagactttgccagaagaatggaatttgccaaggatat

SEQ ID NO: 86222 - DNA, 80 bp, synthetic construct
  source 1..80: mol_type = other DNA
ggagacctggaatgtttataggaattgggcgttatgatcaagtactgatatatgatcgtggacctatagaaatatgtgca

SEQ ID NO: 86223 - DNA, 80 bp, synthetic construct
  source 1..80: mol_type = other DNA
agggcaaatgctatacgggaatctgtcacctaaaaatttatctgctaggattttagtagtatgggaaaaagctttcaacc

SEQ ID NO: 86224 - DNA, 80 bp, synthetic construct
  source 1..80: mol_type = other DNA
gaagagtaggagcaatgctaatcctttccctcatagcacggttccgagcactcatggaatacatgagaagccgagtgcca

SEQ ID NO: 86225 - DNA, 80 bp, synthetic construct
  source 1..80: mol_type = other DNA
ttacagctaacaccaagcgggataattaaaatagttagggaaagagcagaagaaactgccgatgatggtgatggggacac

SEQ ID NO: 86226 - DNA, 80 bp, synthetic construct
  source 1..80: mol_type = other DNA
tgtacttgaaccttttatcatgtggaacgatgacatggagcagatgatgcatgattctataatttatttatgtcatagac

SEQ ID NO: 86227 - DNA, 80 bp, synthetic construct
  source 1..80: mol_type = other DNA
gcctaccgccattggtccctctctgtgttagtcaactgtgccatgaggtagatatatataaaaataccactactgctaat

SEQ ID NO: 86228 - DNA, 80 bp, synthetic construct
  source 1..80: mol_type = other DNA
gctaccagctctatggatgttaccgtcacggaagaactgaaaaattgttctttctctacaaccacagacataaaagataa

SEQ ID NO: 86229 - DNA, 80 bp, synthetic construct
  source 1..80: mol_type = other DNA
aaaacagaaagcatatgcacttttttataaacttgatcttgctcccttgctcataggtgatgatattgtcattaatatga

SEQ ID NO: 86230 - DNA, 80 bp, synthetic construct
  source 1..80: mol_type = other DNA
gttgcactgcctcaaccgtatgtcgagccggcgcttttgttccttttcctccaattcattgtgctccttgtgctcctgct

SEQ ID NO: 86231 - DNA, 80 bp, synthetic construct
  source 1..80: mol_type = other DNA
ggttttgcgagtcgggaatgtaaggacaatgaagtcagaggaacgcgacatggcgtcactgtacaccgaggacatggtac

SEQ ID NO: 86232 - DNA, 80 bp, synthetic construct
  source 1..80: mol_type = other DNA
tcatgcaatggtgccatcgccaccactgctactagtgggtaatggaaaacaagaaaaagaagatatatcggataaatcta

SEQ ID NO: 86233 - DNA, 80 bp, synthetic construct
  source 1..80: mol_type = other DNA
aaaattatgccaacaaagtaataatactacttctacaacttagaacatgtgaggaaattaagtgcaccaagaatactacg

SEQ ID NO: 86234 - DNA, 80 bp, synthetic construct
  source 1..80: mol_type = other DNA
aagacaaggaggagtgtacgaagaggaccattcttcgcatccttagagataagaggagaaataagacaagcaccacgtac

SEQ ID NO: 86235 - DNA, 80 bp, synthetic construct
  source 1..80: mol_type = other DNA
caatagtgccagtaatgggagtgccggtatcacactgataggtgaagaattactacaacacctcgatcataacacaataa

SEQ ID NO: 86236 - DNA, 80 bp, synthetic construct
  source 1..80: mol_type = other DNA
gatcagtaccatcctcaccatgcgagcgagaaacactaacacataccactcctagctgtggatgggaagtattctactgt

SEQ ID NO: 86237 - DNA, 80 bp, synthetic construct
  source 1..80: mol_type = other DNA
gtttcaattcaaatatgtaatggggtttactttactgacacatggactacctacaactctaatgatgctgattacacaga

SEQ ID NO: 86238 - DNA, 80 bp, synthetic construct
  source 1..80: mol_type = other DNA
catcctcactctgacatgcagaataaaactaattgtaaacttgagtcaggagctggggcgagcaaggtctgcccctccca

SEQ ID NO: 86239 - DNA, 80 bp, synthetic construct
  source 1..80: mol_type = other DNA
ttgacggatccgtaaaatgtacatctaattttacaggactagtattgacacgtgctggaggaaatgccacaggggatgtt

SEQ ID NO: 86240 - DNA, 80 bp, synthetic construct
  source 1..80: mol_type = other DNA
ggtcttacagctaaaaaatagtgctattagtctgcttgataccgtagcaataccgctagctgaaggaccagatcgaattc

SEQ ID NO: 86241 - DNA, 80 bp, synthetic construct
  source 1..80: mol_type = other DNA
tagaggtaatgtgaccatgaattgggaaatagtaaactgtggtttcagtgttacgactgagataagagatacgagaaagc

SEQ ID NO: 86242 - DNA, 80 bp, synthetic construct
  source 1..80: mol_type = other DNA
atgaatatgctctaatttctagtaatgatgtcgttacatttaatgagggcaattccagtgagtatagattaataaattgt

SEQ ID NO: 86243 - DNA, 80 bp, synthetic construct
  source 1..80: mol_type = other DNA
tacccacccacccccccccacaagagatgttgttgaatgttgtagaagatttttttatgatgaggaatgatgaggtggag

SEQ ID NO: 86244 - DNA, 80 bp, synthetic construct
  source 1..80: mol_type = other DNA
catatgatggatgatgatatcatcttatggcaaagactactgccatgttgtgtgacgatgaccctctgcggtgctcactc

SEQ ID NO: 86245 - DNA, 80 bp, synthetic construct
  source 1..80: mol_type = other DNA
aacgtgcagtaatattaatagtactgctaccatcaatgatagtgacgggggaatgaccatgtgtgatttcattagagggg

SEQ ID NO: 86246 - DNA, 80 bp, synthetic construct
  source 1..80: mol_type = other DNA
aaataaaaaattgctctttcaatataaccacagactttagatataaacttgataaagaacctgctcttttttataaacct

SEQ ID NO: 86247 - DNA, 80 bp, synthetic construct
  source 1..80: mol_type = other DNA
ataatagtgcatcttaaaaatgatggaacaattgtgtgtactaggaccagcaatagtacaaggataagactgaggatagg

SEQ ID NO: 86248 - DNA, 80 bp, synthetic construct
  source 1..80: mol_type = other DNA
acaccatcacactccactgcaaaataaaacaatttataaacatgtggcagggggtagggctagcaatgtatgccccttcc

SEQ ID NO: 86249 - DNA, 80 bp, synthetic construct
  source 1..80: mol_type = other DNA
cttgcaggaaacataatatgtaaatcaaatttcacaggactagtcttgacatgtgatggaggagaggggaataacgtgac

SEQ ID NO: 86250 - DNA, 80 bp, synthetic construct
  source 1..80: mol_type = other DNA
ctgtacaagggtgtggagattaagaagaatgctattagcctgctgaaaccgacagcaacagcaggagctgaaggaacagt

SEQ ID NO: 86251 - DNA, 80 bp, synthetic construct
  source 1..80: mol_type = other DNA
tcaaataatagaaatagttctaagaattattcgaagtatattcaatctacctagaagagtaagtcagggattcaaagcag

SEQ ID NO: 86252 - DNA, 80 bp, synthetic construct
  source 1..80: mol_type = other DNA
ctcagcaataaaaagggggccaaagggtcaaaaagtagcccagggggaagactaggaaaaatagaaaaaataggaaaagg

SEQ ID NO: 86253 - DNA, 80 bp, synthetic construct
  source 1..80: mol_type = other DNA
tcatgaggagacgtagaaattactacacgtagctttaattgtagaggaggatttttctactgtagtactacacccttgtt

SEQ ID NO: 86254 - DNA, 80 bp, synthetic construct
  source 1..80: mol_type = other DNA
tactagtactagtactactgggggtactactgattcaaattcatacatcacagtcatcactcccccatgcagtatactac

SEQ ID NO: 86255 - DNA, 80 bp, synthetic construct
  source 1..80: mol_type = other DNA
attgagagagctgttaagcacagtttcttcatttgaaagatttgaaattttcccaaacgaaacctcatggccagatcatg

SEQ ID NO: 86256 - DNA, 80 bp, synthetic construct
  source 1..80: mol_type = other DNA
agatcagcaaatcatacacaaatgacagagggaaagaggtacttgtaatatggggagtgcactatcctccgaatgacagt

SEQ ID NO: 86257 - DNA, 80 bp, synthetic construct
  source 1..80: mol_type = other DNA
aaaattagatcaaccgaaatggaagctaaactgtttgtattattctgtgcattcactgcactgaaagctgacaccatttg

SEQ ID NO: 86258 - DNA, 80 bp, synthetic construct
  source 1..80: mol_type = other DNA
gcaatcagcttctggatgtgctctaatgggtcattgcaatgcagaatatgcatttaagacttgaatttcaaattgtacgg

SEQ ID NO: 86259 - DNA, 80 bp, synthetic construct
  source 1..80: mol_type = other DNA
tcgtgcggggagacaaatggtgaagcgtattctggaagaagaatacgaggaggcgcttaaaataactattgcttctgtgc

SEQ ID NO: 86260 - DNA, 80 bp, synthetic construct
  source 1..80: mol_type = other DNA
ttgtgctggaaaacaaatagtgaagcgtattttggaagaagaatgtgatgaagcacttaaaataattaccgcttctgtgc

SEQ ID NO: 86261 - DNA, 80 bp, synthetic construct
  source 1..80: mol_type = other DNA
tgtgtacgaaaacaacaattgggtaaatcaaacatatgttaacatcagcaacaacattttagttgctgaacagacagtaa

SEQ ID NO: 86262 - DNA, 80 bp, synthetic construct
  source 1..80: mol_type = other DNA
cctatatgaacgacaaagagagagaagtccttgtgctatggggtgttcaccacccgtccaatatagaggaccaaaggaca

SEQ ID NO: 86263 - DNA, 80 bp, synthetic construct
  source 1..80: mol_type = other DNA
cttttgcactggaaaggggctttgagtcaggaatcatcgtctcaaatgcgtcagtggatgagtgtgacgcaaaatgtcaa

SEQ ID NO: 86264 - DNA, 80 bp, synthetic construct
  source 1..80: mol_type = other DNA
ccccctcaaacaaccaagtaatgctgtgtgaaccaacgataattgaaagaaacataacagaaatagtgtatctggccaac

SEQ ID NO: 86265 - DNA, 80 bp, synthetic construct
  source 1..80: mol_type = other DNA
ccaccgcttctgtgcctgctacacactatttaactgacatgactcttgaagaaatgtcaagaaactggttcatgctcatg

SEQ ID NO: 86266 - DNA, 80 bp, synthetic construct
  source 1..80: mol_type = other DNA
agagttcatggcccaaacacagcataggagcaactgaatcatgctccaaacaagggagaagcagtttttatacaaatctg

SEQ ID NO: 86267 - DNA, 80 bp, synthetic construct
  source 1..80: mol_type = other DNA
ggcaaggaattcaataatctagaaaaaagaattgagaatttgaacaaaaaagtcgatgacggatttttagatgtgtggac

SEQ ID NO: 86268 - DNA, 80 bp, synthetic construct
  source 1..80: mol_type = other DNA
tgacagctatggatttagagcttcctatatctgcgaaattattacatcatccgacgactgaaatcagatcagaattttat

SEQ ID NO: 86269 - DNA, 80 bp, synthetic construct
  source 1..80: mol_type = other DNA
ctgatattgaagtatacttgttgccaggatggaaactaacgtatgtaggatacaatggaagtgagactaagggacattat

SEQ ID NO: 86270 - DNA, 80 bp, synthetic construct
  source 1..80: mol_type = other DNA
aaagtacggtagatatagcgaaatccatggctactaatgttatgaaaaagtttaaaagatcaaacttggctacatcaata

SEQ ID NO: 86271 - DNA, 80 bp, synthetic construct
  source 1..80: mol_type = other DNA
tttcggtgtggacggatgtttcaaaccaaattgtagacgcatcaaattcagttagtagtatttcaacgcagactgccact

SEQ ID NO: 86272 - DNA, 80 bp, synthetic construct
  source 1..80: mol_type = other DNA
attagtagaaggcttaggctaaaagagatgacaacgcagactgaaggaatgaattttgatgatatttcagcagctgtgct

SEQ ID NO: 86273 - DNA, 80 bp, synthetic construct
  source 1..80: mol_type = other DNA
agaaaagtttattccgaaaagatcataccgtgtattaaaagatgatgaggttatggaagctagtgtcgacggaaagtttt

SEQ ID NO: 86274 - DNA, 80 bp, synthetic construct
  source 1..80: mol_type = other DNA
tcgcttataaggtggacacctttgaagaagtaccttttgatgttaataaatttgtagatttagtcacagattctccggta

SEQ ID NO: 86275 - DNA, 80 bp, synthetic construct
  source 1..80: mol_type = other DNA
tagatttcaaaactttaaaaaacctgaacgataattatggtattactcgtacccaagcattaaatttaatcagatcagat

SEQ ID NO: 86276 - DNA, 80 bp, synthetic construct
  source 1..80: mol_type = other DNA
ccttgaacttgttcaggtacaaaagtaggtgttatatattcacagtgtgggtaattctccttgttgtagagtcagtgatg

SEQ ID NO: 86277 - DNA, 80 bp, synthetic construct
  source 1..80: mol_type = other DNA
ggggcgcttgcaaaaatggaaacaaaggaagctcaggctgtaaggaagcatgccatagatgctggttgtaaccttgttga

SEQ ID NO: 86278 - DNA, 80 bp, synthetic construct
  source 1..80: mol_type = other DNA
atatctaatcttaccacacataatatcttgtatttaaattatagtaataaaacacttgaaatactgaataaatcaggaat

SEQ ID NO: 86279 - DNA, 80 bp, synthetic construct
  source 1..80: mol_type = other DNA
agatttagataagttctataattcaataatttacggaattgcgccacctccacaattcaaaaaacgctacaatactaatg

SEQ ID NO: 86280 - DNA, 80 bp, synthetic construct
  source 1..80: mol_type = other DNA
aatgactgtttagtgactacatcagttaaagtatgtctgattggaactgtgtcaaaattccaaccatcggataccctatt

SEQ ID NO: 86281 - DNA, 80 bp, synthetic construct
  source 1..80: mol_type = other DNA
tgagccaggtgaagaagagaacagcaccttgttacaccctgcgagccagcaggggataggggacccggagagagaagtgt

SEQ ID NO: 86282 - DNA, 80 bp, synthetic construct
  source 1..80: mol_type = other DNA
tcttggccagacggtgctgagttgccattcaccattgacaagtagtttgttcaaaaaatctccttgtaccgactcgaatg

SEQ ID NO: 86283 - DNA, 80 bp, synthetic construct
  source 1..80: mol_type = other DNA
gtcaacatggagtagaggacccagagaaagaagtgctaatatggagatttaacagcatactagcatttgaacacaaggcc

SEQ ID NO: 86284 - DNA, 80 bp, synthetic construct
  source 1..80: mol_type = other DNA
ggagatttaacagcatactagcatttgaacacaaggccagaataaagcacccagagttctacaaagactgctgacaccaa

SEQ ID NO: 86285 - DNA, 80 bp, synthetic construct
  source 1..80: mol_type = other DNA
aaaaactgctctttcaatgtcaccacggccataaaagggaagaaacagaaaaattatgcactttttaatacccttgatat

SEQ ID NO: 86286 - DNA, 80 bp, synthetic construct
  source 1..80: mol_type = other DNA
tatggagatttgacagtagcctagcacggagacacctagcccgagagatgcacccggagtactacaaggactgctgacac

SEQ ID NO: 86287 - DNA, 80 bp, synthetic construct
  source 1..80: mol_type = other DNA
gtcattcaattcagacagggaaccaatgtcaaaatgaatcaatcagcaacactaaatttcttgctgagaaagctgtggct

SEQ ID NO: 86288 - DNA, 80 bp, synthetic construct
  source 1..80: mol_type = other DNA
tgtttctacaaaaaaaaccctttaaaaaaaattattaaaaaaaaagggggggcccccggaaccaaacaatattttttttt

SEQ ID NO: 86289 - DNA, 80 bp, synthetic construct
  source 1..80: mol_type = other DNA
ggggatgtgtttgttataagagagccattcatctcatgctcccacttggaatgcagaactttctttttaacccagggagc

SEQ ID NO: 86290 - DNA, 80 bp, synthetic construct
  source 1..80: mol_type = other DNA
gtgctgagttgccattcactattgacaagtaatttgttcaaaaaactccttgtttctacaaaaaaaaccctttaaaaaaa

SEQ ID NO: 86291 - DNA, 80 bp, synthetic construct
  source 1..80: mol_type = other DNA
ccatgcggggaaaagcagtttttacagaaatttgctatggctgacggagaaggagggctcatacccaaagctgaagaatt

SEQ ID NO: 86292 - DNA, 80 bp, synthetic construct
  source 1..80: mol_type = other DNA
agatatgagtagagaaataaaaaactgcactttcaatgtaaccacacacatgaacaataaggtgcaaaaacaacaggcac

SEQ ID NO: 86293 - DNA, 80 bp, synthetic construct
  source 1..80: mol_type = other DNA
catcacaagagcaaatacacgaatatattagagatgtttttgatgtgtgtgatgaacacaaatggaacacatctataaca

SEQ ID NO: 86294 - DNA, 80 bp, synthetic construct
  source 1..80: mol_type = other DNA
aaaatattcaattgcttagaaccaatagagttggatagtgtttattacgttatacttaaccatgaggtgaattgggacgt

SEQ ID NO: 86295 - DNA, 80 bp, synthetic construct
  source 1..80: mol_type = other DNA
cgctaacgtactgattcaaaatattgggaaaattccacaaatactgaccttgaatgatgttataacagctctacattcta

SEQ ID NO: 86296 - DNA, 80 bp, synthetic construct
  source 1..80: mol_type = other DNA
gttgcttacaaattcatacacgactgatctatctgaagaaattaaagaaattggatcatcaaagtcacaagatgttacaa

SEQ ID NO: 86297 - DNA, 80 bp, synthetic construct
  source 1..80: mol_type = other DNA
ggcagccgatttaaattcaataacttgcagcggtggtagctatagtttcgcattacctgtaggaaattttccagttatgt

SEQ ID NO: 86298 - DNA, 80 bp, synthetic construct
  source 1..80: mol_type = other DNA
caggaggcgccgtatcgttacatccttctggagtgacactatcgacccagtttacagattatgtatctcttaactcgtta

SEQ ID NO: 86299 - DNA, 80 bp, synthetic construct
  source 1..80: mol_type = other DNA
agattcaggttcaggttagcagttgaagaaccgccattttcaataacacgtacacgagtaagtagattatatgggttacc

SEQ ID NO: 86300 - DNA, 80 bp, synthetic construct
  source 1..80: mol_type = other DNA
agctgtaaatccaaataatactagagagttttatgaaatggcaggaaggttttctttgatatcgcttgtaccatcaaacg

SEQ ID NO: 86301 - DNA, 80 bp, synthetic construct
  source 1..80: mol_type = other DNA
acaccgataatgaactcagtgacagttcgacaagatctcgaaagacagcttggagaattacgtaatgaatttaattcatt

SEQ ID NO: 86302 - DNA, 80 bp, synthetic construct
  source 1..80: mol_type = other DNA
acgttatttgctccaagtgataagggtgtagttgctgaactgacaaataatatagatatgtggttagccattatcttgat

SEQ ID NO: 86303 - DNA, 80 bp, synthetic construct
  source 1..80: mol_type = other DNA
tgaaccaaatgtacctcaagaattgaaacaatacactatattcggtcaacaagttaatctagtgattgaaaatacatcac

SEQ ID NO: 86304 - DNA, 80 bp, synthetic construct
  source 1..80: mol_type = other DNA
agacaaaatggaaatttgctgattttagaaaaagaagtcaaaatgatacttacgttcttagtgacacacttacgtcagat

SEQ ID NO: 86305 - DNA, 80 bp, synthetic construct
  source 1..80: mol_type = other DNA
acaaaactgcaagctgcaatgaaatacggagcaagactgttcacattcactgggaacacgccgaatgcagcgccacagga

SEQ ID NO: 86306 - DNA, 80 bp, synthetic construct
  source 1..80: mol_type = other DNA
atatgggtatgaaactaacaattacagcgcaatcgaaatacggtcattttgtgatttttacatcataccacgtataccaa

SEQ ID NO: 86307 - DNA, 80 bp, synthetic construct
  source 1..80: mol_type = other DNA
gagaagtatgtagaaattatatcaaccatggtcttccaccaatgcaaaatactagaaatgtggtaccagtcgcattatca

SEQ ID NO: 86308 - DNA, 80 bp, synthetic construct
  source 1..80: mol_type = other DNA
gctcgggagatagtaacacaacgagcaagtgttaatgaagatattgttatatctaaaacttccttatggaaagaaatgca

SEQ ID NO: 86309 - DNA, 80 bp, synthetic construct
  source 1..80: mol_type = other DNA
agtaaaatctggaggattaggctataaatgggcagaaatttcatttagaccagcgaattatcagtatacgtatactagag

SEQ ID NO: 86310 - DNA, 80 bp, synthetic construct
  source 1..80: mol_type = other DNA
ttaggagttagtgatgcatggaggccatcacctccagcgaaatataaaggatggtgtttggattgttgtcaacatactga

SEQ ID NO: 86311 - DNA, 80 bp, synthetic construct
  source 1..80: mol_type = other DNA
ttgatagacacatatgatagattgcttttagatgatgtgaattttaacagaatgtcattcctacctttaattttacagca

SEQ ID NO: 86312 - DNA, 80 bp, synthetic construct
  source 1..80: mol_type = other DNA
gaaaatgtgttgaagaatttgcataatccgaattttaaaatgcaaattactcgtaactgtagtactatgacagctaaatg

SEQ ID NO: 86313 - DNA, 80 bp, synthetic construct
  source 1..80: mol_type = other DNA
tcagagataagttgtttccatctattacgagtatgcacaagagaataataaatgttggtccgagaaatgagtcaatgttc

SEQ ID NO: 86314 - DNA, 80 bp, synthetic construct
  source 1..80: mol_type = other DNA
cgagaaatgagtcaatgttcacatttttaaatttcccaactattaaacagttttcaaacggtgcatatcttgtcaagcat

SEQ ID NO: 86315 - DNA, 80 bp, synthetic construct
  source 1..80: mol_type = other DNA
catcacaagaacaaatacatgagcatattagagatatttttgatgtgtgtgatgaaaataaatggaacacagctataaca

SEQ ID NO: 86316 - DNA, 80 bp, synthetic construct
  source 1..80: mol_type = other DNA
tattaatatactggaaaatttgcataatccaaatttcaaaatacaaattactcgtaattgcagtgctatgcttggtgtat

SEQ ID NO: 86317 - DNA, 80 bp, synthetic construct
  source 1..80: mol_type = other DNA
tttccgaataccagttggcgcatggcctattatgagtggtggtgcagtatcattacatttcgctggcgttacattgtcaa

SEQ ID NO: 86318 - DNA, 80 bp, synthetic construct
  source 1..80: mol_type = other DNA
aaagcacagtagatatagcgaaatctatggctactaatgtaatgaaaagattcaaaaagtcaaaactagccacatcaatc

SEQ ID NO: 86319 - DNA, 80 bp, synthetic construct
  source 1..80: mol_type = other DNA
tttcggtatggactgatgtttcaaatcaaatcgtggatgcgtcaaattcaattaacagtatttcaacgcaaaccgctact

SEQ ID NO: 86320 - DNA, 80 bp, synthetic construct
  source 1..80: mol_type = other DNA
atcagtagacgacttagattaaaagaaatgacaacacaaactgaaggaatgaacttcgatgatatttcagcagctgtatt

SEQ ID NO: 86321 - DNA, 80 bp, synthetic construct
  source 1..80: mol_type = other DNA
aaagacgaaaatagacaaatcaactcaaataagccctaatactttacctgacttaataacagaagcatcagaaaaattca

SEQ ID NO: 86322 - DNA, 80 bp, synthetic construct
  source 1..80: mol_type = other DNA
ttccaaataggtcatatcgtgtattaaaagatgatgaagttatggaagcgagcgttgatggaaagttttttgcatataaa

SEQ ID NO: 86323 - DNA, 80 bp, synthetic construct
  source 1..80: mol_type = other DNA
cgaagagggggacggcggagcgagcgcaccggggatcctaggcgtttttactcacgcaaataattgtcactcttttgctg

SEQ ID NO: 86324 - DNA, 80 bp, synthetic construct
  source 1..80: mol_type = other DNA
agtgagccatggtttgcgctgtgcggaagacttagacaaaatgcctaggatccactgtgcgcatagtcatcagtccatca

SEQ ID NO: 86325 - DNA, 80 bp, synthetic construct
  source 1..80: mol_type = other DNA
acctatttggggattacacaactaatggcaatcactcaaagatgagtgtgattatgaggaatactacctgggagggtcaa

SEQ ID NO: 86326 - DNA, 80 bp, synthetic construct
  source 1..80: mol_type = other DNA
ctcgaagagggggacggcggagcgagcgcaccggggatcctaggcgtaacattcacgccaatagagtgaatttttcaatc

SEQ ID NO: 86327 - DNA, 80 bp, synthetic construct
  source 1..80: mol_type = other DNA
cagtattatggaatacacatcttccacttgttctccatgaggtaattcagaatcttgcccacccgcaattgaatttgaaa

SEQ ID NO: 86328 - DNA, 80 bp, synthetic construct
  source 1..80: mol_type = other DNA
ttcttttaagtgaaactaaatgtatgacaggctcactaattgttgacaccacataacccattgttaaatcatctaacatc

SEQ ID NO: 86329 - DNA, 80 bp, synthetic construct
  source 1..80: mol_type = other DNA
aaaacaatgactttttcatccattgtcaaatatcaccgaggatcctaggcgatatttgacaatggatgaaaaagtcattg

SEQ ID NO: 86330 - DNA, 80 bp, synthetic construct
  source 1..80: mol_type = other DNA
caaactcatctgcaaacatgggcaattcaaagtctaaatctaagccatcaagcctcccagaggctcaagagggaacacca

SEQ ID NO: 86331 - DNA, 80 bp, synthetic construct
  source 1..80: mol_type = other DNA
accccaacacactgtcctccttgggtatgcctgtaacttctgagtcagccaatagttcacttaagtctacagctcttttt

SEQ ID NO: 86332 - DNA, 80 bp, synthetic construct
  source 1..80: mol_type = other DNA
cgcgcgtccctcgaagaggtggacggcggagcgagcgcaccggggatcctaggcgtaactttcacgccaacaaagtgagg

SEQ ID NO: 86333 - DNA, 80 bp, synthetic construct
  source 1..80: mol_type = other DNA
ttcaaagcaatgactttttcatccattgtcaaatttcgcctaggatcctcggtgcggtgcttcaacttgtgaaagcaatg

SEQ ID NO: 86334 - DNA, 80 bp, synthetic construct
  source 1..80: mol_type = other DNA
ttttcaatctaaacacatctgcaaacatgggcagttcaaaatccaaatccagcccatctagtctctcagaaactcaagaa

SEQ ID NO: 86335 - DNA, 80 bp, synthetic construct
  source 1..80: mol_type = other DNA
gcaccggggatcctaggcgtttttactcacgctattatttgtctatattattgttgggtgtgacctgacataatgggaca

SEQ ID NO: 86336 - DNA, 80 bp, synthetic construct
  source 1..80: mol_type = other DNA
catggttcgagttgtgcagaagactaagacaaaaatgcctaggatccactgtgcgcttgagaaacttgtgtaaaatcaag

SEQ ID NO: 86337 - DNA, 80 bp, synthetic construct
  source 1..80: mol_type = other DNA
ccgcgccggggaggtggagcacgagcgcaccggggatcctaggcgtttttgctcacgctattatttgtccacactattgt

SEQ ID NO: 86338 - DNA, 80 bp, synthetic construct
  source 1..80: mol_type = other DNA
ggtttgggttgtgcagaagactaagacaaaaatgcctaggatccactgtgcgcttgtgtaaaatcaagggagtctgcgat

SEQ ID NO: 86339 - DNA, 80 bp, synthetic construct
  source 1..80: mol_type = other DNA
ttagtcctgttctctgttcatccagtccaaccatacttgacaactacactcaatgtacaatgggctccccagagtttgat

SEQ ID NO: 86340 - DNA, 80 bp, synthetic construct
  source 1..80: mol_type = other DNA
aaggtggatgttggttgctggagatttgaagtgctttggcaacacagctgtcgccaagtgtaatttgaatcatgattctg

SEQ ID NO: 86341 - DNA, 80 bp, synthetic construct
  source 1..80: mol_type = other DNA
agcagagatgttaagcaaagaataccaagacaggcaggggaagactcccttaacactggttgatctgtgtttttggagtg

SEQ ID NO: 86342 - DNA, 80 bp, synthetic construct
  source 1..80: mol_type = other DNA
ttgcctcacaggctcgatagaaatggtgcttgcaggtgtggcaggtatcaaaaccttggaaaacaagtaacctggaagag

SEQ ID NO: 86343 - DNA, 80 bp, synthetic construct
  source 1..80: mol_type = other DNA
tttcatcagccctccagctctgtcggcccggaaacccgggccgacagagcgccccccagtccgcggcaatgccgcggact

SEQ ID NO: 86344 - DNA, 80 bp, synthetic construct
  source 1..80: mol_type = other DNA
tctgcctacattacaaatgcgctcttggcttggaacactaatgtgtttggtagcagttggatgggaatggtgtcgggaag

SEQ ID NO: 86345 - DNA, 80 bp, synthetic construct
  source 1..80: mol_type = other DNA
tgaacagtgataactgaaccctgtggcaataagccaatgacgtaactcaatagaccaggttgagcatcttcgaggtcctt

SEQ ID NO: 86346 - DNA, 80 bp, synthetic construct
  source 1..80: mol_type = other DNA
gctcgggggcctgttacaggtcttgcatttaaatcgacacttgtgttgtcccaagatctcccgagtatttgtgaccttga

SEQ ID NO: 86347 - DNA, 80 bp, synthetic construct
  source 1..80: mol_type = other DNA
cctgcagcccccttttgttgttggaatcccagggttctaagaatccctgctcttttttccaattgtgactgtgtcaagtt

SEQ ID NO: 86348 - DNA, 80 bp, synthetic construct
  source 1..80: mol_type = other DNA
agctggggacttctttggagtgagccatggttcgcgttgtgtagaagactaagacaaaaatgcctaggatccactgtgcg

SEQ ID NO: 86349 - DNA, 80 bp, synthetic construct
  source 1..80: mol_type = other DNA
tggttcgcgttgtgtagaagactaagacaaaaatgcctaggatccactgtgcgaaccatggctcactccaaagaagtccc

SEQ ID NO: 86350 - DNA, 80 bp, synthetic construct
  source 1..80: mol_type = other DNA
acggcggagcgagcgcacgggggatcctaggcgtttttactcacgcaataatttgtccacactattgttgggtgtgacct

SEQ ID NO: 86351 - DNA, 80 bp, synthetic construct
  source 1..80: mol_type = other DNA
ttctctcggggccacgcgcgcgtccctcgaagaggtggacggcggagcgagcgcacgggtgatcctaggcgtttttactc

SEQ ID NO: 86352 - DNA, 80 bp, synthetic construct
  source 1..80: mol_type = other DNA
aaaaagggacaccaacagtcacagaattcaggaggactgccattcacagtctctatgggaggtacaactgcaagtgttgc

SEQ ID NO: 86353 - DNA, 80 bp, synthetic construct
  source 1..80: mol_type = other DNA
acctctgtttgaggtgtttgaatgtcatgctgaaaaactctgatctttgcaacatttgctgggagcagctgcccacatgc

SEQ ID NO: 86354 - DNA, 80 bp, synthetic construct
  source 1..80: mol_type = other DNA
ccggtggccccagtggggcccccaccggggatgcccggaggtgctgctggtcctctgtggcctactcgatttcggtgaca

SEQ ID NO: 86355 - DNA, 80 bp, synthetic construct
  source 1..80: mol_type = other DNA
gccttaggctgccggagctgtccgatatcaccaagtccctcaaggatttgctatagcagacactaaagtccacaaactcg

SEQ ID NO: 86356 - DNA, 80 bp, synthetic construct
  source 1..80: mol_type = other DNA
cgagcaccagaggggaatcggagtactcaggccccacaatttcataagcatatctatcgtcaatatgttcataaaatgta

SEQ ID NO: 86357 - DNA, 80 bp, synthetic construct
  source 1..80: mol_type = other DNA
ggattatttagtagaataggcacttttggaggttgtactgaggagaacacccattctcctagctcacaggcatttgtcaa

SEQ ID NO: 86358 - DNA, 80 bp, synthetic construct
  source 1..80: mol_type = other DNA
ataatattgatctcgaaaactctggtattgaggtcaacgcatcagaacaaaaaatgaccccagggttttttgcgcatatc

SEQ ID NO: 86359 - DNA, 80 bp, synthetic construct
  source 1..80: mol_type = other DNA
gcggatctttcccgccccccgttcctcccgacccctccacccgccctccctccgccgccgcccctcctcgtcctcgccgg

SEQ ID NO: 86360 - DNA, 80 bp, synthetic construct
  source 1..80: mol_type = other DNA
aacaaaagtcccagaaacactcttggggctcacaaatttgttgaattttgaggacaaaaaatcgtggaaacataaaagct

SEQ ID NO: 86361 - DNA, 80 bp, synthetic construct
  source 1..80: mol_type = other DNA
agggtgcgtgctccggcgtgtgcgggtgtgggcgagcggcgccggaggtcgggtcggcggaggaccgtaccccgaccggc

SEQ ID NO: 86362 - DNA, 80 bp, synthetic construct
  source 1..80: mol_type = other DNA
tctgttggggattcctccgaataaaagcacaagttcctcagagcagcactggtgaagaaactcttgtctagtctgtcagc

SEQ ID NO: 86363 - DNA, 80 bp, synthetic construct
  source 1..80: mol_type = other DNA
ttttgttgttaagttttttagtaggagttctaatggacagatgtcaagaggcctctccaaaaagaaggtaggtcttaatg

SEQ ID NO: 86364 - DNA, 80 bp, synthetic construct
  source 1..80: mol_type = other DNA
ctataggggtctgtacgcaatgtaccattaactcttagccttcctttgttaaaaagtgacacacaataacttagtagctc

SEQ ID NO: 86365 - DNA, 80 bp, synthetic construct
  source 1..80: mol_type = other DNA
gggttactgcgtcaaccaactcctcatcaaaatccaaccagcttaacatctctgcgcacgtagctagaagcacaaattca

SEQ ID NO: 86366 - DNA, 80 bp, synthetic construct
  source 1..80: mol_type = other DNA
tcaggggccaatgagtcagagtgggcactcgacaacaccaaggtctgcagtagggactttctatctgtctggacaaaatt

SEQ ID NO: 86367 - DNA, 80 bp, synthetic construct
  source 1..80: mol_type = other DNA
ataaaatctttcaaaacaatgactttttcatccattgtcaaatttcgcctaggatcctcggtgcgggattcaatctcgac

SEQ ID NO: 86368 - DNA, 80 bp, synthetic construct
  source 1..80: mol_type = other DNA
gaaggtggctcgggaggccccgtcccgccccgtcttccccccgcccccgtcctccccccgggtggcgcggagcgtagcgg

SEQ ID NO: 86369 - DNA, 80 bp, synthetic construct
  source 1..80: mol_type = other DNA
cctcgaagagggggacggcggagcgagcgcaccggggatcctaggcgtaactttcacgccaacaaagtgaggttttataa

SEQ ID NO: 86370 - DNA, 80 bp, synthetic construct
  source 1..80: mol_type = other DNA
ttcaaacccatctgcaatatgggcagttcaaaatccaaatccaactcatctagtttttcagagactcatgaaggaacacc

SEQ ID NO: 86371 - DNA, 80 bp, synthetic construct
  source 1..80: mol_type = other DNA
taagatggggaataaatggtcaaaatgtagtctagggggatggcctgctataagagaaagaatgagacgcactggagctg

SEQ ID NO: 86372 - DNA, 80 bp, synthetic construct
  source 1..80: mol_type = other DNA
cctcagcagcagagggagcagcagcgggagtagggccagcgtctcaagacttagatagacatggggcactaacaagcagc

SEQ ID NO: 86373 - DNA, 80 bp, synthetic construct
  source 1..80: mol_type = other DNA
ttgttctctccttcattggcttgtaattgccccccgcctgtctaaatcttgagacactgctcccaccccttctgctgctc

SEQ ID NO: 86374 - DNA, 80 bp, synthetic construct
  source 1..80: mol_type = other DNA
agtgatgctactgttggtgataatggagaaatgaaaaaaagagataagagaaaaactgaaactgaatatgcccttttcta

SEQ ID NO: 86375 - DNA, 80 bp, synthetic construct
  source 1..80: mol_type = other DNA
gttttttttctgtggaagccaaaaactgcatcaccaggtgtttttatggggagttgataagagggagcccccaggagacc

SEQ ID NO: 86376 - DNA, 80 bp, synthetic construct
  source 1..80: mol_type = other DNA
tcctacaaaaacgataaaaagaaagaagtcctggtactatggggtgttcatcatccgcccaacatagaggaccaaagggc

SEQ ID NO: 86377 - DNA, 80 bp, synthetic construct
  source 1..80: mol_type = other DNA
ctttcacactgagtaggggccttggatcaggaatcatcacttctaatgcaccgatggacaaatgtgatgcgaagtgtcag

SEQ ID NO: 86378 - DNA, 80 bp, synthetic construct
  source 1..80: mol_type = other DNA
taatagtagttattttaaattaagtatacccactaatttttcctttggtgtgactcaggagtacattcagacaaccattc

SEQ ID NO: 86379 - DNA, 80 bp, synthetic construct
  source 1..80: mol_type = other DNA
cttggcagcatagcaggtgttggctggactgctggcttatcctcctttgctgctattccatttgcacagagtatctttta

SEQ ID NO: 86380 - DNA, 80 bp, synthetic construct
  source 1..80: mol_type = other DNA
ttctgtacgtaatttgtttgcgagcgtgaaaagctctcaatcatctcctatcataccaggttttggaggtgactttaatt

SEQ ID NO: 86381 - DNA, 80 bp, synthetic construct
  source 1..80: mol_type = other DNA
gcttttcagaaggttcaggatgctgtgaacaacaatgcacaggctctatccaaattagctagcgagctatctaatacttt

SEQ ID NO: 86382 - DNA, 80 bp, synthetic construct
  source 1..80: mol_type = other DNA
cggacaatggggcagtggctgtgctgaaatacaatgacataattacagacactatcaagagttggaaaaacaatatattg

SEQ ID NO: 86383 - DNA, 80 bp, synthetic construct
  source 1..80: mol_type = other DNA
actggttgtatgcattagatcataattatccagcgctgaatgtaaccatgccaaacagtgacgaatttgacaaactgtac

SEQ ID NO: 86384 - DNA, 80 bp, synthetic construct
  source 1..80: mol_type = other DNA
atctggggagtacaccacccgaatactgaaaaggaccaaaccagcctatatggccaagcatcagggagagtcacaatctc

SEQ ID NO: 86385 - DNA, 80 bp, synthetic construct
  source 1..80: mol_type = other DNA
ctgtaatcccgaatatcgggtctagaccctgggtgaggggtgtctccagcataataagcatctattggacaatagtaaaa

SEQ ID NO: 86386 - DNA, 80 bp, synthetic construct
  source 1..80: mol_type = other DNA
ctccaactaacaatgtccaacaaaccctctaccagaatgcttctacatatgtttcagttggaacatcaaaatactaccga

SEQ ID NO: 86387 - DNA, 80 bp, synthetic construct
  source 1..80: mol_type = other DNA
tagatatggtaatggtgtttggataggaagaactaaaagtgccagctttagacgtgggtttgaaatgatttgggatccaa

SEQ ID NO: 86388 - DNA, 80 bp, synthetic construct
  source 1..80: mol_type = other DNA
gtcattcaattcagattggagggaaaacccactctgagatatgtagccaaaatatcattacatatgaaaacacaacatgg

SEQ ID NO: 86389 - DNA, 80 bp, synthetic construct
  source 1..80: mol_type = other DNA
gagttctaggtgataacccacgcgctaatgatgggaaaggcaactgtggcccagtgctttccaatggagcaaatggagtg

SEQ ID NO: 86390 - DNA, 80 bp, synthetic construct
  source 1..80: mol_type = other DNA
ggggccacgcgcgcgtccctcgaagaggtggacggcggagcgagcgcaccggggatcctaggcgattcttgatcgcgctt

SEQ ID NO: 86391 - DNA, 80 bp, synthetic construct
  source 1..80: mol_type = other DNA
gaaatcaattttctaagccagacagtgaatgccttaatctcagataatttgttaatgaagaataaaattaaagagctaat

SEQ ID NO: 86392 - DNA, 80 bp, synthetic construct
  source 1..80: mol_type = other DNA
aacacatggggcagcttatcagcttctttcaagagattcctgtttttctacaggaagctctaaacatcgctttagtggct

SEQ ID NO: 86393 - DNA, 80 bp, synthetic construct
  source 1..80: mol_type = other DNA
gggggactggggaggcactgcttacagtgcaaaggctgccttgggtagaaataggaggctgagaggtaaaagtgccattg

SEQ ID NO: 86394 - DNA, 80 bp, synthetic construct
  source 1..80: mol_type = other DNA
cagtgtattagtggggtctaacttctttacagcctctttaatcactgcttcttgcatttcagtcaggtttgctagtctta

SEQ ID NO: 86395 - DNA, 80 bp, synthetic construct
  source 1..80: mol_type = other DNA
tcctgctcggatggcacattcaaaataggcctacacactgagttccagtcagtcacccttaccatgcagagacttttagc

SEQ ID NO: 86396 - DNA, 80 bp, synthetic construct
  source 1..80: mol_type = other DNA
ggggacctgactcagtcctctttatcttgttcttcagtttttccaagtctgatgcaagctccatcaattcatctctcccc

SEQ ID NO: 86397 - DNA, 80 bp, synthetic construct
  source 1..80: mol_type = other DNA
aaccaaaggatttgaaataaagctcagtagaagagttagacactttgcctaggatccactgtgctttatttcaaatcctt

SEQ ID NO: 86398 - DNA, 80 bp, synthetic construct
  source 1..80: mol_type = other DNA
aagggaggtgtgaacaccttcctgattcgtgtttctgatatttcagtcctcatgaaggagcatgatgtatcaatctatga

SEQ ID NO: 86399 - DNA, 80 bp, synthetic construct
  source 1..80: mol_type = other DNA
aaagggagggatctaacattcaattcaacatcagcaaagctgatgatgccagagtgtatggaaagaagataagaaatggt

SEQ ID NO: 86400 - DNA, 80 bp, synthetic construct
  source 1..80: mol_type = other DNA
tcttcaggggcttccatgacccgtgtgaggaagggaaagtgtgctacctgaccatcaatcagtgtggtgaccccagttcc

SEQ ID NO: 86401 - DNA, 80 bp, synthetic construct
  source 1..80: mol_type = other DNA
cctcgaagagggggacggcggagcgagcgcaccggggatcctaggcgttactggatcaagtttctggtgaacacttgttt

SEQ ID NO: 86402 - DNA, 80 bp, synthetic construct
  source 1..80: mol_type = other DNA
caattgccttcaccttcaaaatgacctccttgttctgaatgacctccttgtcctgaatttctcctacttccattacacat

SEQ ID NO: 86403 - DNA, 80 bp, synthetic construct
  source 1..80: mol_type = other DNA
tccaatgaaaaactgtataccatctttctcttcagcttgaactttgtagacattcttacatgatcaatttgcaccaccaa

SEQ ID NO: 86404 - DNA, 80 bp, synthetic construct
  source 1..80: mol_type = other DNA
gcctacaacaacatttttaacttttaatccaaacagttcacttacatcaggagccttctcctggggcagcaattgaacac

SEQ ID NO: 86405 - DNA, 80 bp, synthetic construct
  source 1..80: mol_type = other DNA
accgacttccatcacagttcccgtggagccaagcgctcccccaccataagtgtccgtagacccggtccatctgaccccca

SEQ ID NO: 86406 - DNA, 80 bp, synthetic construct
  source 1..80: mol_type = other DNA
caagggacagacatcaagcactccttcgagaaagtaattgtgcctctccgacgaattgtaaactgcttcacataaatctt

SEQ ID NO: 86407 - DNA, 80 bp, synthetic construct
  source 1..80: mol_type = other DNA
tgtacacgtcagggggaagaacatccgggtcaaaatccttaacttcatgtaatgacacttcggctctgatctctttcatc

SEQ ID NO: 86408 - DNA, 80 bp, synthetic construct
  source 1..80: mol_type = other DNA
cgggggatccccgggggcgttgagccgcatcactcgatgtcctccacctggcgtgcacccgccagtggtctgcacgtcac

SEQ ID NO: 86409 - DNA, 80 bp, synthetic construct
  source 1..80: mol_type = other DNA
ttgaaaatctttaatccttttatcttattgcacaaagacaaaacactaaggtaatgtttttccacgctagagtgtgtagc

SEQ ID NO: 86410 - DNA, 80 bp, synthetic construct
  source 1..80: mol_type = other DNA
attgaactgctggtccgttgtggctgtgccatctgttctttcaacataactaagagtaacattataaacaatttccatca

SEQ ID NO: 86411 - DNA, 80 bp, synthetic construct
  source 1..80: mol_type = other DNA
caggaatatgtttcctaataagtccttttaattcttggacacattcatccatggccaagtgtcgcctaggatcctcggtg

SEQ ID NO: 86412 - DNA, 80 bp, synthetic construct
  source 1..80: mol_type = other DNA
ccaattcatccatcctccagccaatttgtgcaagacagcacagagatctccacaatgggcaactgcaacaaacccttcag

SEQ ID NO: 86413 - DNA, 80 bp, synthetic construct
  source 1..80: mol_type = other DNA
ggcggagcgagcgcaccggggatcctaggcgtaactggatcaagttttgctgagtgcaagttgtagcacatctgacattt

SEQ ID NO: 86414 - DNA, 80 bp, synthetic construct
  source 1..80: mol_type = other DNA
acaccaaaaggaaaccacaaactgtccaaagggttgttcccattttttgctaagttattaatttggccaagattttttga

SEQ ID NO: 86415 - DNA, 80 bp, synthetic construct
  source 1..80: mol_type = other DNA
tcttgtctgcacactgttgtcagccatcttggctaaagcaacttgcacatcatgttttatttcgttgaatgattcaacct

SEQ ID NO: 86416 - DNA, 80 bp, synthetic construct
  source 1..80: mol_type = other DNA
tattaaagatcttcaatccctttattttattacataaagatagaatactaaagtaatgtttctccacattagagtgtgca

SEQ ID NO: 86417 - DNA, 80 bp, synthetic construct
  source 1..80: mol_type = other DNA
gtgatgagctgctggtccgttgtggctgtgttgtcggtcctttcaacacaactaagagtcacattgtaaacaatttccat

SEQ ID NO: 86418 - DNA, 80 bp, synthetic construct
  source 1..80: mol_type = other DNA
caacttgttgttgcaaaagggacatcttgacacatcactgtccagatgagcgcctagtcctgatagagactctagtaact

SEQ ID NO: 86419 - DNA, 80 bp, synthetic construct
  source 1..80: mol_type = other DNA
tctaataagccctttcaattcttggacatattcatcctaggcgacacttggccatggatgaatatgtccaagaattgaaa

SEQ ID NO: 86420 - DNA, 80 bp, synthetic construct
  source 1..80: mol_type = other DNA
agccaatttgtgcaggacagcacagagttccccgcaatgggcaactgcaacaagcctctcagaaggcccctcaacacaca

SEQ ID NO: 86421 - DNA, 80 bp, synthetic construct
  source 1..80: mol_type = other DNA
caatcgctatcactttcaaaatgacctctttgttctgaatttctcctacgtccattatgcattccaaagaaaagctgtat

SEQ ID NO: 86422 - DNA, 80 bp, synthetic construct
  source 1..80: mol_type = other DNA
accatttttctctttaacttgaactttgtagacattcttacatgatcaatttgcaccactaagcctacgataacactttt

SEQ ID NO: 86423 - DNA, 80 bp, synthetic construct
  source 1..80: mol_type = other DNA
acgccaaaaggagaccataaattgtccaaagggttgttcctacttttcaccaagctgtcaacttggccgaagttcttggt

SEQ ID NO: 86424 - DNA, 80 bp, synthetic construct
  source 1..80: mol_type = other DNA
catcctggcaactgtcattaatgtcaactattagatttaccattatgaggtccaaaaataacaaagtattcctcctggta

SEQ ID NO: 86425 - DNA, 80 bp, synthetic construct
  source 1..80: mol_type = other DNA
atttatctgctggtccgttgtggctatgccatcggtcctttcaacgcaactgagggtaacattgtgaacaatttccatca

SEQ ID NO: 86426 - DNA, 80 bp, synthetic construct
  source 1..80: mol_type = other DNA
tggatcaagtttctggtgaatactagtttccaatacgtcgatctttcagtcaacctgtcaaagacagcacagagtccccc

SEQ ID NO: 86427 - DNA, 80 bp, synthetic construct
  source 1..80: mol_type = other DNA
aatgagtcctttcaattcttggacacattcatccatggccaagtgtcgcctaggatcctcggtgcgcaacgagactcgag

SEQ ID NO: 86428 - DNA, 80 bp, synthetic construct
  source 1..80: mol_type = other DNA
acgtggacagcttttcgcctcctacataaaaggagccatcctttaggaccaacggatcttcttggttttcaggtcctgag

SEQ ID NO: 86429 - DNA, 80 bp, synthetic construct
  source 1..80: mol_type = other DNA
cgccggggtctgggttgtgctcagtgtcttctatgccagacagtgggttttttcaatctgggatatttaccacacctaca

SEQ ID NO: 86430 - DNA, 80 bp, synthetic construct
  source 1..80: mol_type = other DNA
cccgggcgcaccggggatcctaggcgattcttgatcgcgcttattagctaaccaatttaatttggtgttgaagtgttgac

SEQ ID NO: 86431 - DNA, 80 bp, synthetic construct
  source 1..80: mol_type = other DNA
ggggccccccagtccgcggctctgccgcggactggagaggcactgcttacagtgcaaaggctgccttgggtagaaatagg

SEQ ID NO: 86432 - DNA, 80 bp, synthetic construct
  source 1..80: mol_type = other DNA
tgaaataaagctcagtagaagagttagacactttgcctaggatccactgtgcggagggctctcagaaagaacaaaagggg

SEQ ID NO: 86433 - DNA, 80 bp, synthetic construct
  source 1..80: mol_type = other DNA
atttaacatcagcaaagctgatgataccaaggtgtatgggaagaagataagaaatggaatgaggcatctctttagaggtt

SEQ ID NO: 86434 - DNA, 80 bp, synthetic construct
  source 1..80: mol_type = other DNA
ttaagctgatcagctaataagcgtgatcaagaatcgcctaggatccccggtggctgttagtcttatagctgtcatcaaag

SEQ ID NO: 86435 - DNA, 80 bp, synthetic construct
  source 1..80: mol_type = other DNA
ctcgaagagggggacggcggagcgagcgcaccggggatcctaggcgtaacttcatcactaaaatctcagattctgttctg

SEQ ID NO: 86436 - DNA, 80 bp, synthetic construct
  source 1..80: mol_type = other DNA
atgggcaactgtagcggggcatccaaggccaaccagccagactcctcaagagtcacacagccagccgcagaattcaggag

SEQ ID NO: 86437 - DNA, 80 bp, synthetic construct
  source 1..80: mol_type = other DNA
ttcaggggtgctgacatcatccactcttagtgaactgacaatggtgtaactatacaccatctttcttctaagtttaaatt

SEQ ID NO: 86438 - DNA, 80 bp, synthetic construct
  source 1..80: mol_type = other DNA
gggtaatttcttcgtatagaatgcaatacatggttcatgcctaattggtcttctatttgtcgtactgctttgggtttaac

SEQ ID NO: 86439 - DNA, 80 bp, synthetic construct
  source 1..80: mol_type = other DNA
aaattcttattacataagaccaaaggggcttgtggactcttaacagcagagaacacccactcccctagttcacaggcatt

SEQ ID NO: 86440 - DNA, 80 bp, synthetic construct
  source 1..80: mol_type = other DNA
caaaacagacattatatggctggggacttggtcctttgactgcagatactggtggaagaactcttcaccaacactagtac

SEQ ID NO: 86441 - DNA, 80 bp, synthetic construct
  source 1..80: mol_type = other DNA
gtcaatttatatggagatagataaacagcatcacacaactctttgtacagatcagacctgaacacatctggatcaaaatc

SEQ ID NO: 86442 - DNA, 80 bp, synthetic construct
  source 1..80: mol_type = other DNA
ccccccggggggcccccatggggaccccccgtggaggaaccccggaggtgatgcactattaatcaatgtctttgatctcg

SEQ ID NO: 86443 - DNA, 80 bp, synthetic construct
  source 1..80: mol_type = other DNA
aaggagcccacaatgactcaagagactctcgctcatcagcagatagattctttgatttcaacttggtggtctcaactttt

SEQ ID NO: 86444 - DNA, 80 bp, synthetic construct
  source 1..80: mol_type = other DNA
gaatattcccaagttcgtcgagcttagggatcaccacacttttgttgcttgacaaatccagagctgtgctagtgatgtta

SEQ ID NO: 86445 - DNA, 80 bp, synthetic construct
  source 1..80: mol_type = other DNA
gggtgatgcactattaatcaatgtctttgatctcgactttgtgcttcagcggcctgcaagtcacccctttcaatctgaat

SEQ ID NO: 86446 - DNA, 80 bp, synthetic construct
  source 1..80: mol_type = other DNA
tgatgtcctcttgttccagtgttagactcccatttaaaggggggttcacaacaacacagtcaaacttgactttgggctca

SEQ ID NO: 86447 - DNA, 80 bp, synthetic construct
  source 1..80: mol_type = other DNA
gaaggggaacagagtacagccaacactaacaatctcaatattggccttgtcattgtcatgagttcgtggctaaaatccaa

SEQ ID NO: 86448 - DNA, 80 bp, synthetic construct
  source 1..80: mol_type = other DNA
cctggggatccgatatcagcaggtcatttaaagatctgctgaatgctaccttgaaatttgaaaattccaaccaatcacca

SEQ ID NO: 86449 - DNA, 80 bp, synthetic construct
  source 1..80: mol_type = other DNA
agatgaaatctttgtacataacactcccttagtctaacattcccaaagtatctagaatactctctttcattgatcaacaa

SEQ ID NO: 86450 - DNA, 80 bp, synthetic construct
  source 1..80: mol_type = other DNA
tggggctggtcattaatttcttccttattaatttgattgcctccagaatatctagtagcctgtcattgactaacattaac

SEQ ID NO: 86451 - DNA, 80 bp, synthetic construct
  source 1..80: mol_type = other DNA
taccatggtcagacaaaattacatcaacaaacttctgatctgaattgatctgacaggcatgtgcctcacaggactcaagc

SEQ ID NO: 86452 - DNA, 80 bp, synthetic construct
  source 1..80: mol_type = other DNA
tgacagaagcttgaacccttccaacaacagagagctggggtgatgttgagataaaaagatgtccctttggtatgctagtt

SEQ ID NO: 86453 - DNA, 80 bp, synthetic construct
  source 1..80: mol_type = other DNA
gggttcacaacaacacagtcaaacttgactttgggctcaacaaacttctcaaaacactttatttgatctgtcaggcgatc

SEQ ID NO: 86454 - DNA, 80 bp, synthetic construct
  source 1..80: mol_type = other DNA
acaagtaaatctaatggggcagacaatcaatgccttgatatctgacaacttattgatgaaaaacaaaatcagggaactaa

SEQ ID NO: 86455 - DNA, 80 bp, synthetic construct
  source 1..80: mol_type = other DNA
atcaggggcgaagcatgccctttgccacacaggttgaatagcttgggtggatgcagatgtggtaagtaccccaatctaaa

SEQ ID NO: 86456 - DNA, 80 bp, synthetic construct
  source 1..80: mol_type = other DNA
gtggctggtccttcaatatcgagccaaagggtgttggtggggtcgagtttccccactgcctctctgatgacagcttcttg

SEQ ID NO: 86457 - DNA, 80 bp, synthetic construct
  source 1..80: mol_type = other DNA
gattttatgagggaagagaagttttctggggtgactctgattgtttccaacatgtttccaccatcaaggatggatgctcc

SEQ ID NO: 86458 - DNA, 80 bp, synthetic construct
  source 1..80: mol_type = other DNA
tccttggagtgtgccatgccagaagttctggtgattttgatctagggtagagttgctcagtgaaagtgttagacacaatg

SEQ ID NO: 86459 - DNA, 80 bp, synthetic construct
  source 1..80: mol_type = other DNA
ggtagagttgctcagtgaaagtgttagacacaatgcctaggatccactgtgcgactctaccctagatcaaaatcaccaga

SEQ ID NO: 86460 - DNA, 80 bp, synthetic construct
  source 1..80: mol_type = other DNA
ggggcaatgcttcatttatgatcagctttgatgatattacagtgttgctgccacagtatgatgttataatacaacatcca

SEQ ID NO: 86461 - DNA, 80 bp, synthetic construct
  source 1..80: mol_type = other DNA
acaatggggcagttcattagcttcatgcaagaaataccaacctttttgcaagaggctctgaacattgctcttgttgcagt

SEQ ID NO: 86462 - DNA, 80 bp, synthetic construct
  source 1..80: mol_type = other DNA
ccctggaggctattgtctagaagagtggatgctcgtagcagccaaaatgaagtgttttggcaacactgctgtagcaaaat

SEQ ID NO: 86463 - DNA, 80 bp, synthetic construct
  source 1..80: mol_type = other DNA
tgttaaaattttactcagcgcaccggggatcctaggcgtaactggatcaagttttgctgagtaaaattttaacacattga

SEQ ID NO: 86464 - DNA, 80 bp, synthetic construct
  source 1..80: mol_type = other DNA
caatggccccaaagggagtgtctccatatccagagtatctaattaactggttaactcgttttgatattcttgccactatt

SEQ ID NO: 86465 - DNA, 80 bp, synthetic construct
  source 1..80: mol_type = other DNA
actcagttgcatagtctgatggaagaattcttcactcaaactggtggagccgcagcccatcaatccaagggaccttttca

SEQ ID NO: 86466 - DNA, 80 bp, synthetic construct
  source 1..80: mol_type = other DNA
attcttggacatattcatccatggccaagtgtcgcctaggatcctcggtgcgagtttgcacatcaaaaggttacattcct

SEQ ID NO: 86467 - DNA, 80 bp, synthetic construct
  source 1..80: mol_type = other DNA
cgcacagtggatcctaggctattggattgcgcttttctctaatcatttctgtagatagtcattgccgttgtgtttgcaca

SEQ ID NO: 86468 - DNA, 80 bp, synthetic construct
  source 1..80: mol_type = other DNA
atacacatcatctcgacaatgagtgtctcaaaagaagtgaaatccttcctatggacacaatctctgaggagggagttgtc

SEQ ID NO: 86469 - DNA, 80 bp, synthetic construct
  source 1..80: mol_type = other DNA
atgcgcaccggggatcctaggcaatttgggcgatcttcaccagaaaatttctgctctagacccggcaagatgggcaacag

SEQ ID NO: 86470 - DNA, 80 bp, synthetic construct
  source 1..80: mol_type = other DNA
catttctgatgttcaaggtattgagtcattgacagatcctcatggtgttcagtattggcgagtcccgttgaatgttagga

SEQ ID NO: 86471 - DNA, 80 bp, synthetic construct
  source 1..80: mol_type = other DNA
taaattcctcatggagttgcccagttttcaacttgttatataatttcctcaacatagatctaatcttgctgcaagcatca

SEQ ID NO: 86472 - DNA, 80 bp, synthetic construct
  source 1..80: mol_type = other DNA
cggcaccctcagccaaaacagaaagcagcatcaaccctccaccgtacagcccctgaaccagccaccaaccccaccatccc

SEQ ID NO: 86473 - DNA, 80 bp, synthetic construct
  source 1..80: mol_type = other DNA
aaaaatacttttctttcagtttgctgttcttgtaaacggcgtcacaaaattctttgtaaaaatcacctggtaaaacgtca

SEQ ID NO: 86474 - DNA, 80 bp, synthetic construct
  source 1..80: mol_type = other DNA
ctaaatcattaacagagggctgattaccactattaaggtttgaacctgatttggcaggttctttatactgatcaatgatt

SEQ ID NO: 86475 - DNA, 80 bp, synthetic construct
  source 1..80: mol_type = other DNA
ctgcatcaactttattctgtcgagaccctagaaccagattactcatcgcctgctgcactttgtaatcataatcttgttta

SEQ ID NO: 86476 - DNA, 80 bp, synthetic construct
  source 1..80: mol_type = other DNA
agatcagatttaccaatgccctcaccaacctataaagtaagaattcaacatcggtaataagttcttctctcaatttgtcg

SEQ ID NO: 86477 - DNA, 80 bp, synthetic construct
  source 1..80: mol_type = other DNA
atgagacccttgtgatgataatctgatacatatgccattatgaagtacctgagattttgaagaagtttttgagaacgttt

SEQ ID NO: 86478 - DNA, 80 bp, synthetic construct
  source 1..80: mol_type = other DNA
tttgattcttatctggacactgggaagactgaatagttttggatctttcagactgctgcctccgctcaacccacttttct

SEQ ID NO: 86479 - DNA, 80 bp, synthetic construct
  source 1..80: mol_type = other DNA
agatccctttttgttgattctaaggagaccaatctatcattaacactaatgaaacaggatcctagccaacccttcaaaca

SEQ ID NO: 86480 - DNA, 80 bp, synthetic construct
  source 1..80: mol_type = other DNA
cttatgtcttgtttgatcatgtatactagcgagaagaatcaatgcatcaaaaattaataaaagctttcttcttgtattca

SEQ ID NO: 86481 - DNA, 80 bp, synthetic construct
  source 1..80: mol_type = other DNA
agtccacccagtcatccactacctcgagaactgcatttagagccctcgcaccgttgcttggtacagcggccttcaatata

SEQ ID NO: 86482 - DNA, 80 bp, synthetic construct
  source 1..80: mol_type = other DNA
aaaacgatctccagtattgcatctgacactccctgatagtctggtgtctttcatcaccgcttccctcaccaatgttcgca

SEQ ID NO: 86483 - DNA, 80 bp, synthetic construct
  source 1..80: mol_type = other DNA
tacaagaatcttaatattggcgatgctctcttgaactgataaatcaaatactcaatattgtcttttgtggccgtgacctc

SEQ ID NO: 86484 - DNA, 80 bp, synthetic construct
  source 1..80: mol_type = other DNA
gaaacaatgtccacctctgaccattgcatccttagtttaagcctgtccaacatcatggcgctcaatgctccaatcagcaa

SEQ ID NO: 86485 - DNA, 80 bp, synthetic construct
  source 1..80: mol_type = other DNA
tgtttgaggagggtggtggttagacccttctgagtggatgtccaactaaaatggcggttccgccgtaagacaaggcccca

SEQ ID NO: 86486 - DNA, 80 bp, synthetic construct
  source 1..80: mol_type = other DNA
aactaaaatggcggttccgccgtaagacaaggccccatataagttaatcaaatagatagcctaaatgcctaggatcctcg

SEQ ID NO: 86487 - DNA, 80 bp, synthetic construct
  source 1..80: mol_type = other DNA
gcaaaccaaggccacggaggcaaaggacagcccaagggccagtctgatcccagatgctacacatttaggaccacagttct

SEQ ID NO: 86488 - DNA, 80 bp, synthetic construct
  source 1..80: mol_type = other DNA
aagcttattgacatatcattaaataaagctgattctagaagatttgagaatgctgtttgggatcagtgtaaggatctgtg

SEQ ID NO: 86489 - DNA, 80 bp, synthetic construct
  source 1..80: mol_type = other DNA
ccacatgcacactggagtggttgttgagaaaaagaaaaggggaggtaaggaggaaatcactccacactgtgctctgatgg

SEQ ID NO: 86490 - DNA, 80 bp, synthetic construct
  source 1..80: mol_type = other DNA
acttcaagccccaaggtcgtcctgtaaatggacgcccccgtggcccatggatgggatcgtctcctatcttttccatttaa

SEQ ID NO: 86491 - DNA, 80 bp, synthetic construct
  source 1..80: mol_type = other DNA
ctggcacaccgggttgtttatacaggccacatgagcaaatgcccatgtggttgagcctgtgtggcttgggacaaggtttc

SEQ ID NO: 86492 - DNA, 80 bp, synthetic construct
  source 1..80: mol_type = other DNA
ccagtgatgtgcctgtgagtcggaatcttgactaaatggaggaagatacttataagataaaagctggtgctaaagacaaa

SEQ ID NO: 86493 - DNA, 80 bp, synthetic construct
  source 1..80: mol_type = other DNA
agagttctgtgatatgctgagacttttcgatttcaacaaacaggctataaaaaggttgaaagcagaggcacagatgagca

SEQ ID NO: 86494 - DNA, 80 bp, synthetic construct
  source 1..80: mol_type = other DNA
tggctgttgttttttgtgcaagataaaggcattgtcatgttaaggtttgccatgtccagttccaaggtttgcaactcata

SEQ ID NO: 86495 - DNA, 80 bp, synthetic construct
  source 1..80: mol_type = other DNA
gacacccttgtacattgttgaacatgatctgccgcacagaaaaagaaaggagatcagcccaaagagcccacaagtggcaa

SEQ ID NO: 86496 - DNA, 80 bp, synthetic construct
  source 1..80: mol_type = other DNA
cattgtaaattccttttaatattgccaaaaggctgagtgcaattagaactatgttcatcacctcctctataacatggggc

SEQ ID NO: 86497 - DNA, 80 bp, synthetic construct
  source 1..80: mol_type = other DNA
acctcttgaaagaaggttattatctgtcccatgatctagtggatctgatcacacaaagttcacttaaaagcgcaatccca

SEQ ID NO: 86498 - DNA, 80 bp, synthetic construct
  source 1..80: mol_type = other DNA
attatctgtcccatgatctagtggatctgatcacacaaagttcacttaaaagcgcaatcccaaatgcctaggatccccgg

SEQ ID NO: 86499 - DNA, 80 bp, synthetic construct
  source 1..80: mol_type = other DNA
ttaaagtcagtgcaacagaaaagcattctgagagttggaacactaacttcagacgacctgttgacactggcggctgacct

SEQ ID NO: 86500 - DNA, 80 bp, synthetic construct
  source 1..80: mol_type = other DNA
aaattcctttgacttgtttggtgacactcacacctaaaagtcagagtgcatcggtcagaatgagtgtttccaaggaagta

SEQ ID NO: 86501 - DNA, 80 bp, synthetic construct
  source 1..80: mol_type = other DNA
ccggggatcctaggcaatttagctggactttagtggaaccttttactcaataagcctctagagaaaggccctcattcaag

SEQ ID NO: 86502 - DNA, 80 bp, synthetic construct
  source 1..80: mol_type = other DNA
taaagaccggatttgacaaggcgagcctccagcagtcaggcagagcacatgggctcacagacccagaatacaatgcttgc

SEQ ID NO: 86503 - DNA, 80 bp, synthetic construct
  source 1..80: mol_type = other DNA
acatcacttaccatgaactcaccacactgattaatggaacccaccatattgaggtgaatggagaaggtttctttaaaact

SEQ ID NO: 86504 - DNA, 80 bp, synthetic construct
  source 1..80: mol_type = other DNA
agcatcttgacttttgattttgtacctaactgtctgataaaattgtacggacccagctggcagtgtgctcagcaaatcaa

SEQ ID NO: 86505 - DNA, 80 bp, synthetic construct
  source 1..80: mol_type = other DNA
ggaaatcctcaagagattctagcctcaactcttctgtgaggcctgatgcaatgagctggttgaagtttattttggctggt

SEQ ID NO: 86506 - DNA, 80 bp, synthetic construct
  source 1..80: mol_type = other DNA
tcaatgtcaaagtctatccatgcatatcccatcatcaagtcaaatttaaacatgggcctttctacccctttatagatggc

SEQ ID NO: 86507 - DNA, 80 bp, synthetic construct
  source 1..80: mol_type = other DNA
cttttcaacaaatgaagaaaagggacctaaccgttgcagaccttcaccttctggtattgatgttctatgggggaaccaag

SEQ ID NO: 86508 - DNA, 80 bp, synthetic construct
  source 1..80: mol_type = other DNA
tgaatgagcctaaagtccttgttgtggccacaaaagagcgaacatatgattcaaagtaaacctgtctcataaaattatcc

SEQ ID NO: 86509 - DNA, 80 bp, synthetic construct
  source 1..80: mol_type = other DNA
tcctcagttttgcaagagctgctggttcgagaacaaaggactggttgaatgcaacaaccattatctatgtctcaactgtc

SEQ ID NO: 86510 - DNA, 80 bp, synthetic construct
  source 1..80: mol_type = other DNA
actgcgtcagcagtgctgactaccctttcttctaccatgggttcatgggtgcgggagtgtgagtttctcaactcagatgc

SEQ ID NO: 86511 - DNA, 80 bp, synthetic construct
  source 1..80: mol_type = other DNA
tagcacaacataatgttcttctcttttccatttgacaatatgtgaaacaagcgagagtgcctcacagttcacatctaagg

SEQ ID NO: 86512 - DNA, 80 bp, synthetic construct
  source 1..80: mol_type = other DNA
gtataaacgccttagggaatgaataatgtgactcatgccgaccctgtcctccaaaagcctcgagaaggtaggtttcaagg

SEQ ID NO: 86513 - DNA, 80 bp, synthetic construct
  source 1..80: mol_type = other DNA
gaaaatagtcacaagggttgtgcttaaaaaagtctagaacttgggtttgctttggttctccaagcacccatgctccaagc

SEQ ID NO: 86514 - DNA, 80 bp, synthetic construct
  source 1..80: mol_type = other DNA
tctatagctgtggacagagaaatacacatataatcccataggaggggccttaagtaactgacagcagtgccaccttcatt

SEQ ID NO: 86515 - DNA, 80 bp, synthetic construct
  source 1..80: mol_type = other DNA
cttagcttctggagacactctccatatttggaccccattatcccttgttactatatcaacaccctgagtctctagcaatt

SEQ ID NO: 86516 - DNA, 80 bp, synthetic construct
  source 1..80: mol_type = other DNA
gagactgtatagatctaatgtaaagattctccttattaggacctctgacacacttactacctagtgtcctgcacagcccc

SEQ ID NO: 86517 - DNA, 80 bp, synthetic construct
  source 1..80: mol_type = other DNA
acaaatccagaagctatagagctctgaaaggctgatttgtttattgcttcagataacagtttctgagctcccctggtaaa

SEQ ID NO: 86518 - DNA, 80 bp, synthetic construct
  source 1..80: mol_type = other DNA
cgttgatgataatctattctgtaatgtctttacaattgttggaattttctcatcttccaggttcacagcaccagagtaaa

SEQ ID NO: 86519 - DNA, 80 bp, synthetic construct
  source 1..80: mol_type = other DNA
ttatcttttgtcttaacaccatcctgagtggatgatgagtggcaaggtttaaccagtggtactccaagtcagaggtagat

SEQ ID NO: 86520 - DNA, 80 bp, synthetic construct
  source 1..80: mol_type = other DNA
aatggttcaacacctaggagtttgaataagttttgtaatgatgacatatgttcacctgacaaataattagtggtgaattc

SEQ ID NO: 86521 - DNA, 80 bp, synthetic construct
  source 1..80: mol_type = other DNA
ctcatgaagctcaccaattttcaatttattgaacaataccctaagcattgatctcatctttttgcaggcatctggaatta

SEQ ID NO: 86522 - DNA, 80 bp, synthetic construct
  source 1..80: mol_type = other DNA
gtctttcaatttgcctcattattctataactacggttcccatctacccaatctctcacatcagtctcacaatttaagaga

SEQ ID NO: 86523 - DNA, 80 bp, synthetic construct
  source 1..80: mol_type = other DNA
tctgcaaaatgcccctccccaccaaactgaagacatcaacacaacccagcgcaccccgagccgaagtgcccccaagcaca

SEQ ID NO: 86524 - DNA, 80 bp, synthetic construct
  source 1..80: mol_type = other DNA
ggtcaattggatatttagcatagcacagcaggttcagtgtccttttttgaatcctattgcataagtcaactgggacacca

SEQ ID NO: 86525 - DNA, 80 bp, synthetic construct
  source 1..80: mol_type = other DNA
tttgctacagattgatcaattatggtgtcgattgtttcggctaactgatggggctccttgcacttgacgttgtgcaaagc

SEQ ID NO: 86526 - DNA, 80 bp, synthetic construct
  source 1..80: mol_type = other DNA
tttgggctcacaaacttatttagttggtcgctcatatagtaatggaattctagtagtgttttaaactcctcttcatctct

SEQ ID NO: 86527 - DNA, 80 bp, synthetic construct
  source 1..80: mol_type = other DNA
tgacaacaattctgttagagtctgatcaaataatgatatctgatcatcactagatgtgtaagagtcaatctgcccaccac

SEQ ID NO: 86528 - DNA, 80 bp, synthetic construct
  source 1..80: mol_type = other DNA
atacacactttattgcaaagttaatgaatctttcagaaattagtgcataaaagtctgaggtattgtgtaagatgccttga

SEQ ID NO: 86529 - DNA, 80 bp, synthetic construct
  source 1..80: mol_type = other DNA
cccatgtcaaggattgagctgatgtgtgaagggactgtaccaatctgaaaattggagctgaaaaagtcttcagtcactga

SEQ ID NO: 86530 - DNA, 80 bp, synthetic construct
  source 1..80: mol_type = other DNA
ttgagttgtcttctttcttaatccaagatgggatttaatatatgacttcatcattgctgacacaacattgaatgggattt

SEQ ID NO: 86531 - DNA, 80 bp, synthetic construct
  source 1..80: mol_type = other DNA
ctaccattttgtgcatgtgccatgtcaacaatgttgataagtagtctttgcctttcaagtcagcttgcagatcatcagaa

SEQ ID NO: 86532 - DNA, 80 bp, synthetic construct
  source 1..80: mol_type = other DNA
agcaaaatgagattttgaattattgtcagaaacaggaaagggcacatcattggaccccacttactatgatccatgctata

SEQ ID NO: 86533 - DNA, 80 bp, synthetic construct
  source 1..80: mol_type = other DNA
tgagatgtgtgcagatgagacattcagcttcattgataaaatagcattgtcaaactctttctcattgtttaagcaactgc

SEQ ID NO: 86534 - DNA, 80 bp, synthetic construct
  source 1..80: mol_type = other DNA
ctgaaagttgcagtgtgagtgcctcaaaatagtcctcaataagtcttgtgaacatttttgttctcaagtcaccgatatat

SEQ ID NO: 86535 - DNA, 80 bp, synthetic construct
  source 1..80: mol_type = other DNA
agctctctattaccccccacttgttccttgtaagatagagaaaacttgagcctgcccgtgtcagggccaattgaattgta

SEQ ID NO: 86536 - DNA, 80 bp, synthetic construct
  source 1..80: mol_type = other DNA
tgagtgcttcggagttactctctcgctcacttattctgacatcatcagccaactttcctgtgtcaaatttaaaattcaaa

SEQ ID NO: 86537 - DNA, 80 bp, synthetic construct
  source 1..80: mol_type = other DNA
cacttacttttataatgagaatatcttcccatcagcttattcccattcatcagcaataaaattgacttaaaacattgaaa

SEQ ID NO: 86538 - DNA, 80 bp, synthetic construct
  source 1..80: mol_type = other DNA
gtattcctgatctaagaaggttcttgtcaccactgcctttgttaactcacttatagggcatgaattcatcggtccagtgt

SEQ ID NO: 86539 - DNA, 80 bp, synthetic construct
  source 1..80: mol_type = other DNA
aaaagtatttatctctcaagagcttatcattgtacacgttgttgcagactttagcatattggtcctcaggcagaatctca

SEQ ID NO: 86540 - DNA, 80 bp, synthetic construct
  source 1..80: mol_type = other DNA
taatcaaagtcttctatcatatgatttgagagctcacttttgatcaatctaatgaggagtttctcttctatcacctggtc

SEQ ID NO: 86541 - DNA, 80 bp, synthetic construct
  source 1..80: mol_type = other DNA
aaggtcggaaattgagggtgcatcattgctcacttgtcgttgtttttctggcaactctctgtattggctgacaatgttat

SEQ ID NO: 86542 - DNA, 80 bp, synthetic construct
  source 1..80: mol_type = other DNA
caaccgtgcacctcagttggtcaaaatattctgatgcccctccgtctaacagaatctcatctaaatcagtcccattaatg

SEQ ID NO: 86543 - DNA, 80 bp, synthetic construct
  source 1..80: mol_type = other DNA
tcaccaatttcctttttggaacccaaaacaagatcactcatagcttgttgtatcttataatcatagtcttgtttgtttaa

SEQ ID NO: 86544 - DNA, 80 bp, synthetic construct
  source 1..80: mol_type = other DNA
caaaaatttacctttgcgtgcaaagacttcagtcagctgtgtcacagccagtgctgtgagtttgttaaagtcataatcca

SEQ ID NO: 86545 - DNA, 80 bp, synthetic construct
  source 1..80: mol_type = other DNA
agacacgagatccatctgtatacttattcacaaccacactcttattactggccaagtctaaagctgtggcacagccactt

SEQ ID NO: 86546 - DNA, 80 bp, synthetic construct
  source 1..80: mol_type = other DNA
gtaatgagagggtctcgtaatgccttcttcacctctttctctctgaacaacgaaccattgttaaaactagacgttagaag

SEQ ID NO: 86547 - DNA, 80 bp, synthetic construct
  source 1..80: mol_type = other DNA
tgaaatgaactttttagacactccaggttttttatatcttaccttgtctgcttctacacagcattccttgttcaaaaatt

SEQ ID NO: 86548 - DNA, 80 bp, synthetic construct
  source 1..80: mol_type = other DNA
tctttgcattgaaaaccatctcatcaagctcttctcctgaagcattgtctttaggattgacactgacatgtccaaattcc

SEQ ID NO: 86549 - DNA, 80 bp, synthetic construct
  source 1..80: mol_type = other DNA
aatttaggttcaaggaatttttcaaagcacttaatctgatcagttagtctgtcaggtgtttctttagttataaaatgaca

SEQ ID NO: 86550 - DNA, 80 bp, synthetic construct
  source 1..80: mol_type = other DNA
catgtaagaaacattcaagatgaacttaaacctattggtcatcatactgacaacatcttcagataacataatttccagca

SEQ ID NO: 86551 - DNA, 80 bp, synthetic construct
  source 1..80: mol_type = other DNA
aggaacagatgagtttatagagcaggtattcaacctctgtgattaattcttctttgatcttttcgatcaagtccctgtgg

SEQ ID NO: 86552 - DNA, 80 bp, synthetic construct
  source 1..80: mol_type = other DNA
ctcgggtccaaacaattctgaacacgttcttcccttcagtctgaagctccccttacttgattgtatcataatcttttgct

SEQ ID NO: 86553 - DNA, 80 bp, synthetic construct
  source 1..80: mol_type = other DNA
aatcagaattaggatcatttttgtcaatgacttaatggttggcagctgttcagataactccttgcactcttctatccaac

SEQ ID NO: 86554 - DNA, 80 bp, synthetic construct
  source 1..80: mol_type = other DNA
taaccattacttcaaccacattctgcaagacatcactagaaaagattgaaggaaaaaaccgttttgggtcggcataaaat

SEQ ID NO: 86555 - DNA, 80 bp, synthetic construct
  source 1..80: mol_type = other DNA
tataataatttaaattccatcctattgataaaaaattcctgacaataagcttctttacacctcacaacttgatatctaga

SEQ ID NO: 86556 - DNA, 80 bp, synthetic construct
  source 1..80: mol_type = other DNA
aggcccaaattcattctgcctcagcttcactgtcgaagatgttttcattgagttaatcagggccagacttaatgtggaca

SEQ ID NO: 86557 - DNA, 80 bp, synthetic construct
  source 1..80: mol_type = other DNA
tttccaaatctgtcgtactcagtacgtccacagcacctaatgtgtagggaaacatatcgtcttgagatttttgatagctc

SEQ ID NO: 86558 - DNA, 80 bp, synthetic construct
  source 1..80: mol_type = other DNA
atagtaggtgtgataccagaaacctccatatccataatgacatcataaacatcgcagtccaatgtaccaaagttgacccc

SEQ ID NO: 86559 - DNA, 80 bp, synthetic construct
  source 1..80: mol_type = other DNA
atatgaatcaatctctatattgacctccctcaaggcactagtggctctatttaagactttctttatgatgttggaaagct

SEQ ID NO: 86560 - DNA, 80 bp, synthetic construct
  source 1..80: mol_type = other DNA
caaggttccgcctttctttaagtgttagagtgtctgtaggtagtatatctttgtctttagtccttcctctactatcaatc

SEQ ID NO: 86561 - DNA, 80 bp, synthetic construct
  source 1..80: mol_type = other DNA
ttgatttgctgtaacaaagggaataacctttgaagtcaacccactcctccaaggtctcaagaaatcctcctagtatctgg

SEQ ID NO: 86562 - DNA, 80 bp, synthetic construct
  source 1..80: mol_type = other DNA
caacgttttaaatccctttttgttgattctagtgaaaccaatctgtcattaacacttacaaaacaagaacccaaccaacc

SEQ ID NO: 86563 - DNA, 80 bp, synthetic construct
  source 1..80: mol_type = other DNA
tgtggaattttccttgttgctgttcaaacgatctaatcgatcggcaagaaggatcaaaatgtcgaatataaggaggagtt

SEQ ID NO: 86564 - DNA, 80 bp, synthetic construct
  source 1..80: mol_type = other DNA
tcctcctggtgttgagaatcctcagtgactttaccttatttagaaaagatctccagcactgcatttgcccaccccgaggg

SEQ ID NO: 86565 - DNA, 80 bp, synthetic construct
  source 1..80: mol_type = other DNA
tcggcagttccttcttcactagaacctaaatctgcatatagaaactttaagacaggggaagctctcttaaactgaaactc

SEQ ID NO: 86566 - DNA, 80 bp, synthetic construct
  source 1..80: mol_type = other DNA
taattgcctaaaatcactgttgcagataccaatgttatctttgtacaagttcttaaggtccttcaggagcatcgtcttgt

SEQ ID NO: 86567 - DNA, 80 bp, synthetic construct
  source 1..80: mol_type = other DNA
cagttttaataaattgattcactatatctccctgcctcaatttgtttctgaaaatctgatactcttcctcaatcatattc

SEQ ID NO: 86568 - DNA, 80 bp, synthetic construct
  source 1..80: mol_type = other DNA
ttaacctcgtgggcggagagtttattgttgattccttggtggcagctagagattatttcctcaaagtgttttgcacgttt

SEQ ID NO: 86569 - DNA, 80 bp, synthetic construct
  source 1..80: mol_type = other DNA
gtctgttaaaacattaatgctttcgatccctgaaagccttccggaggtcagagccaatgactcacacaaccttgaatact

SEQ ID NO: 86570 - DNA, 80 bp, synthetic construct
  source 1..80: mol_type = other DNA
cggactcctcaaatagagcattgctttcctgtgagtacttcaacaaggcgaacagagtgtccctgagtttgtcattgacc

SEQ ID NO: 86571 - DNA, 80 bp, synthetic construct
  source 1..80: mol_type = other DNA
caatcaggtatctgcttgttataaaatgttgtcctgccatcaatgagggggatgagattgataccaacagattctaagtc

SEQ ID NO: 86572 - DNA, 80 bp, synthetic construct
  source 1..80: mol_type = other DNA
atatagtctgtgggcctctgcttagtaaggactgtcacaatgtctaccccagttaactgaactttttgcctcagtctgtc

SEQ ID NO: 86573 - DNA, 80 bp, synthetic construct
  source 1..80: mol_type = other DNA
agtcttcagttgctctagttttttgtgatcctccaggtacttttgctcaaagttagcaggagatgatctaacaaaacact

SEQ ID NO: 86574 - DNA, 80 bp, synthetic construct
  source 1..80: mol_type = other DNA
acccgtcgggaaccacaaagcataaagcaggggtgagaatgccatggtcactgaggatggattcaactgatttgtcttca

SEQ ID NO: 86575 - DNA, 80 bp, synthetic construct
  source 1..80: mol_type = other DNA
gtattatgctcacaaccattggctttacaagagtcaacctcaatgcagagggataacagctttaatccctccatgagtaa

SEQ ID NO: 86576 - DNA, 80 bp, synthetic construct
  source 1..80: mol_type = other DNA
cattctaggttcagtctgaaccaagaatgccaacttttgcctcgataatttgtcattgtctgcaaggtattttgaaatta

SEQ ID NO: 86577 - DNA, 80 bp, synthetic construct
  source 1..80: mol_type = other DNA
ggtctttggcagtggcaatgtcttcctccattgttaattgtggtggttgtgtcggagtgcgacctgggggtgtgcaatga

SEQ ID NO: 86578 - DNA, 80 bp, synthetic construct
  source 1..80: mol_type = other DNA
tgtgcaatgagtcactctattagtgttattgtcaaaaaactttaccatatatgagagccaatatgcctaggatcctcggt

SEQ ID NO: 86579 - DNA, 80 bp, synthetic construct
  source 1..80: mol_type = other DNA
agacatcatcgatttcaatgcaccactcaggaggtctggtgaactttcaccaatctctctaacaaatacttccaaatctt

SEQ ID NO: 86580 - DNA, 80 bp, synthetic construct
  source 1..80: mol_type = other DNA
atgggcaacaaacaagccaagtcaaccagagttgatgaacaacaaagagctcatctagtgccggatgcatcccacctagg

SEQ ID NO: 86581 - DNA, 80 bp, synthetic construct
  source 1..80: mol_type = other DNA
ggtcttgaatggatggtgtaaatgtcgcaaccctcttgtcagactcccacagtgcccctctacaaacaaccaacggcaca

SEQ ID NO: 86582 - DNA, 80 bp, synthetic construct
  source 1..80: mol_type = other DNA
ggttcaacatcaggaccaactctggaaaaatcaaactcagttaactgtaatttatctgagtcaataattaattttatggg

SEQ ID NO: 86583 - DNA, 80 bp, synthetic construct
  source 1..80: mol_type = other DNA
gatgacatcccccagctgttgtgtatctttcagaaattcatttaccacatctgacgcaacataccaaggcgacctacctt

SEQ ID NO: 86584 - DNA, 80 bp, synthetic construct
  source 1..80: mol_type = other DNA
cggagtggcccccccgccgggggcccccccggagggaagcagacagccaagtcggcactactcaatgtcctccacgacct

SEQ ID NO: 86585 - DNA, 80 bp, synthetic construct
  source 1..80: mol_type = other DNA
ccaagtcggcactactcaatgtcctccacgacctcctcgggtccaaacaattctgaacacgttcttcccttcagtctgaa

SEQ ID NO: 86586 - DNA, 80 bp, synthetic construct
  source 1..80: mol_type = other DNA
ggttgtcttgccacccgaagccccggccagtaggcctactagcccacctagtcttatcacacctgggccccccgctcata

SEQ ID NO: 86587 - DNA, 80 bp, synthetic construct
  source 1..80: mol_type = other DNA
acagttcgatttgacaccaaatcaatcgattttgaaaataatcaaaacacaaagttcaccccagtcggtgttgtccagga

SEQ ID NO: 86588 - DNA, 80 bp, synthetic construct
  source 1..80: mol_type = other DNA
tggtaataatcatgatgagcccacacaatgggtgctcccaaattattcaggcccagacactcataatgtgcacctggccc

SEQ ID NO: 86589 - DNA, 80 bp, synthetic construct
  source 1..80: mol_type = other DNA
tgcaccttcagagggggtatcacccgtattggacagagtgaatcctacaaaatgaatttggcctcccaaaattggaacaa

SEQ ID NO: 86590 - DNA, 80 bp, synthetic construct
  source 1..80: mol_type = other DNA
ttatgacccaacagaagagatcccagcccctctagggactccagatttcaaggggaggattcgaggtctgctcacccaaa

SEQ ID NO: 86591 - DNA, 80 bp, synthetic construct
  source 1..80: mol_type = other DNA
aagtagagcaagagataagaactttctcgtttcagcttatttaatgataaaaaacacccttgtttctctatagaggagcc

SEQ ID NO: 86592 - DNA, 80 bp, synthetic construct
  source 1..80: mol_type = other DNA
atggagggaattaagggactaagagatttgatgtcgcagtcttgcactcgggagatactgacaaaaaccccagtggcccc

SEQ ID NO: 86593 - DNA, 80 bp, synthetic construct
  source 1..80: mol_type = other DNA
tgtccccagacaaacaggtagatgttgaaagatgagtcttctaaccgaggtcgaaacgtatgttctctctataatcccat

SEQ ID NO: 86594 - DNA, 80 bp, synthetic construct
  source 1..80: mol_type = other DNA
atgctgtggatgttgacgatggtcattttgtcaacatagagctggagtaaaaaactaccttgtttctctatcgagggccc

SEQ ID NO: 86595 - DNA, 80 bp, synthetic construct
  source 1..80: mol_type = other DNA
gtgttcccgggcgaaagcaggtactgatccaaaatggaagactttgtgcgacaatgcttcaatccaatgattgtcgagct

SEQ ID NO: 86596 - DNA, 80 bp, synthetic construct
  source 1..80: mol_type = other DNA
tattggtgtctggaactaaaaaggagtgctattagtctgttggatagtgtagcaatagaagtagctgaaggaacagatag

SEQ ID NO: 86597 - DNA, 80 bp, synthetic construct
  source 1..80: mol_type = other DNA
tgacatgaaaaagtgttttttcaatacaaccacactcttcaaagataagaagcacaaagtgtctgcacttttttatagac

SEQ ID NO: 86598 - DNA, 80 bp, synthetic construct
  source 1..80: mol_type = other DNA
agaaatgataccaatatgaaaagttgctctttctatgtcaccactgaattaagagataagcagaagaaggagaatgcact

SEQ ID NO: 86599 - DNA, 80 bp, synthetic construct
  source 1..80: mol_type = other DNA
aagacgagataaacgaattggcaatggtgagatccatcgaggacgcagtgctggacctcgaggccatcgagaacaaccat

SEQ ID NO: 86600 - DNA, 80 bp, synthetic construct
  source 1..80: mol_type = other DNA
cggggcgcggtccaaacaaccgtccccgagggacaaaccaccaagacccccgagaccacccacaccagagttggttaaac

SEQ ID NO: 86601 - DNA, 80 bp, synthetic construct
  source 1..80: mol_type = other DNA
ccctactggcaaggattgcagctgcccgatctctagtacacagggctaaggaagaactgtctagcagacctcgaccggtc

SEQ ID NO: 86602 - DNA, 80 bp, synthetic construct
  source 1..80: mol_type = other DNA
gttgtgatgatttcagggagaccaggtatagggaagacccatctagctagagagttggcaaagaagattgcctcctcact

SEQ ID NO: 86603 - DNA, 80 bp, synthetic construct
  source 1..80: mol_type = other DNA
gaagggtgttatgaagaccctcactgctagttccctcgttgcccgagcatcagggctcctccacgagagactagacgagt

SEQ ID NO: 86604 - DNA, 80 bp, synthetic construct
  source 1..80: mol_type = other DNA
cggatcacaactcaagaatgtcaaaaccatgacagaactcaaacaggctctcaagaacatcacagtcaagaaatgccagc

SEQ ID NO: 86605 - DNA, 80 bp, synthetic construct
  source 1..80: mol_type = other DNA
aacggggaggacgagccaaccatttcttacaacgtcaaagagggtgtttctggtttgcctgaactctcaacggtcaccca

SEQ ID NO: 86606 - DNA, 80 bp, synthetic construct
  source 1..80: mol_type = other DNA
ttgtgtatggcgggagcacatacacactcgaatctgatggcaaaggcaatgtgtgtgttgagaaggtgaagaacacaagt

SEQ ID NO: 86607 - DNA, 80 bp, synthetic construct
  source 1..80: mol_type = other DNA
gtgcagactaacaacgagctctccggcgttctgcaccatctcaggtgtgccaggattaggtactatgttaagtgtgtcca

SEQ ID NO: 86608 - DNA, 80 bp, synthetic construct
  source 1..80: mol_type = other DNA
ggaagctctctactccatcttgcaaattgccggggctgcattcatcaccacgcgcattgcaaagcgcatgaacatacaaa

SEQ ID NO: 86609 - DNA, 80 bp, synthetic construct
  source 1..80: mol_type = other DNA
caaaccacaagtggaagatttggaggagactagcaacagggagggctgtccaaaacctaaagatgatgaggaatttgtta

SEQ ID NO: 86610 - DNA, 80 bp, synthetic construct
  source 1..80: mol_type = other DNA
tctcctctgatgacatcaaaaccgagggcaagaaaggaaagaacaagactggccgtggcaagaagcacacagccttttcc

SEQ ID NO: 86611 - DNA, 80 bp, synthetic construct
  source 1..80: mol_type = other DNA
accggaagagagctctacggcattcagcgttccccctcttagtcagagggagaacagagacgcaaaggaacccctaactg

SEQ ID NO: 86612 - DNA, 80 bp, synthetic construct
  source 1..80: mol_type = other DNA
gggtctcgcctagcctcttcataacatcaacccacgtcattcccaaaggtgcacaggagttctttggagtgcctatcaag

SEQ ID NO: 86613 - DNA, 80 bp, synthetic construct
  source 1..80: mol_type = other DNA
caaatacaaattcataaatcaggagagttctgccggctaagatttccaaaaccaatcaggacagatgtcacgggcatgat

SEQ ID NO: 86614 - DNA, 80 bp, synthetic construct
  source 1..80: mol_type = other DNA
cactgttggtgggcagatgggcatgctactcacggggtctaacgccaagagtatggatttgggcacaactcctggtgact

SEQ ID NO: 86615 - DNA, 80 bp, synthetic construct
  source 1..80: mol_type = other DNA
ctaccacccccctgccacccggaacctatgaaccagcttatctgggtggcaaggaccccagagtggggggtggtccctca

SEQ ID NO: 86616 - DNA, 80 bp, synthetic construct
  source 1..80: mol_type = other DNA
ctaccacccccctgccacccggaacctatgaaccagcttatctgggtggcaaggaccccagagtgggaggtggtccctca

SEQ ID NO: 86617 - DNA, 80 bp, synthetic construct
  source 1..80: mol_type = other DNA
gacggggagatctaccattatggcttatatgtggaacgaggattagtgctcggtgtacacaaaccaccagcagccatcag

SEQ ID NO: 86618 - DNA, 80 bp, synthetic construct
  source 1..80: mol_type = other DNA
tatggggttcagacctatcaaccatgatacggtgtgcacgagctttcggtgggctgatggacgagctcaaggcccattgc

SEQ ID NO: 86619 - DNA, 80 bp, synthetic construct
  source 1..80: mol_type = other DNA
gtcacactaccagttagggttggcatgaacatgaatgaggatggacccataatatttgagaaacattccagatacagata

SEQ ID NO: 86620 - DNA, 80 bp, synthetic construct
  source 1..80: mol_type = other DNA
aattttcaccagaacctcatctggcccaagtagttgcagaagacctcttgtcccccagtgtgatggatgtgggtgatttc

SEQ ID NO: 86621 - DNA, 80 bp, synthetic construct
  source 1..80: mol_type = other DNA
cagaaggacccttaattatctctgaagatttggatggcctgaccttcttacggagaacggtgactcgcgatccggctggg

SEQ ID NO: 86622 - DNA, 80 bp, synthetic construct
  source 1..80: mol_type = other DNA
gttgaactgtcccccttgtctttgtactggagacctgtgtacaccccacagtacctcatttcccctgacactctcaaaaa

SEQ ID NO: 86623 - DNA, 80 bp, synthetic construct
  source 1..80: mol_type = other DNA
agatcttaatccatatttggctcacctttcaagaatgtacaatggttatgctggaggagtggaagtgcaagtgctcctag

SEQ ID NO: 86624 - DNA, 80 bp, synthetic construct
  source 1..80: mol_type = other DNA
tttttgcagcagtccccccaaatttccccgttgatatgcttagtcctgctcaaatcacaatgcttccccatttaattgta

SEQ ID NO: 86625 - DNA, 80 bp, synthetic construct
  source 1..80: mol_type = other DNA
tttggagcccattatgatccctctgcctgatgttaggaacgttttctatcactttaataaccagcctgccccaagaatga

SEQ ID NO: 86626 - DNA, 80 bp, synthetic construct
  source 1..80: mol_type = other DNA
gattggttgctatgctctacactcctttaagatccaatgggtccggtgatgatgtattcactgtctcctgcagggtgcta

SEQ ID NO: 86627 - DNA, 80 bp, synthetic construct
  source 1..80: mol_type = other DNA
taaccagacctactccggactttgagtttacatatttagttcccccctcggtagagtctaaaaccaagcctttcacccta

SEQ ID NO: 86628 - DNA, 80 bp, synthetic construct
  source 1..80: mol_type = other DNA
gttgcatggggagacgttcccttacacagcctttgacaacaactgttatgccttctgctgttgggttcttgacttgaacg

SEQ ID NO: 86629 - DNA, 80 bp, synthetic construct
  source 1..80: mol_type = other DNA
cccatcctaacaattggagagttgacaaattctagattcccagccccgatcgatcagttgtacacttcacccaacgctga

SEQ ID NO: 86630 - DNA, 80 bp, synthetic construct
  source 1..80: mol_type = other DNA
tgtagttgtccaaccccaaaatggccggtgcacactggacggtgagctacaaggcacaacacaacttctgacaacggcaa

SEQ ID NO: 86631 - DNA, 80 bp, synthetic construct
  source 1..80: mol_type = other DNA
tatgttcatacaggggcacaacatcaaaccccactagtgactactgggatgatcacctcctgcacttggtccaccccaat

SEQ ID NO: 86632 - DNA, 80 bp, synthetic construct
  source 1..80: mol_type = other DNA
ggggcaacatatgacccgaccgaggacgtgccagctccttttggcacgcaggactttcggggcattctgtatggggtgtt

SEQ ID NO: 86633 - DNA, 80 bp, synthetic construct
  source 1..80: mol_type = other DNA
ggggcaacatatgacccgaccgaggacgtgccagctccttttggcacgcaggactttcggggcattctgtatggtgtgtt

SEQ ID NO: 86634 - DNA, 80 bp, synthetic construct
  source 1..80: mol_type = other DNA
gactcaaaacacccaaaatcccagggacgaagtctccaactcccgtgggatctacatctcatccactagtgacaagttca

SEQ ID NO: 86635 - DNA, 80 bp, synthetic construct
  source 1..80: mol_type = other DNA
ctccaaaattgggtacaattggcttacaccaagtgcaaggcgacacagccagcaaccaacaatcaaaattcacaccagta

SEQ ID NO: 86636 - DNA, 80 bp, synthetic construct
  source 1..80: mol_type = other DNA
gggatagcggtgaatcaaaacactcctttcaaacagtgggaactcccaaactactctggtgccctcaccctcaacacaaa

SEQ ID NO: 86637 - DNA, 80 bp, synthetic construct
  source 1..80: mol_type = other DNA
ccttgcaccagcggttgggcccaacttccctggggagcaaatccttttcttcaggtcaaatgtcccaagtgttcaaggta

SEQ ID NO: 86638 - DNA, 80 bp, synthetic construct
  source 1..80: mol_type = other DNA
accaccctactcaagagattgattgcctgatcccacaagaatgggtttcccacttctatcaagaatcagctccctctcag

SEQ ID NO: 86639 - DNA, 80 bp, synthetic construct
  source 1..80: mol_type = other DNA
agtgatgtggctttggtcaggtatgtcaatcctgacacagggcgcacaatctttgaggccaaactgcataggcagggatt

SEQ ID NO: 86640 - DNA, 80 bp, synthetic construct
  source 1..80: mol_type = other DNA
tatcaccatagcggccactggaagcaaccccgtggtcgtgccccccaatgggtacttcagatttgattcctgggtcaacc

SEQ ID NO: 86641 - DNA, 80 bp, synthetic construct
  source 1..80: mol_type = other DNA
gattggcaggtgacatgctcaccaatactgttggttccctggtaacagcgggggctaatgctataaaccaaaaagttgaa

SEQ ID NO: 86642 - DNA, 80 bp, synthetic construct
  source 1..80: mol_type = other DNA
tatgacctcaccaaacaactgcaaagtgcctccttccaacatgacaaggacatgcttcaagcccaggtcaacgcaacaaa

SEQ ID NO: 86643 - DNA, 80 bp, synthetic construct
  source 1..80: mol_type = other DNA
acaattgcagagtgacatgatggccatcaaagcaggggttttgaccgctggcggcttttcccctgctgatgcagccagag

SEQ ID NO: 86644 - DNA, 80 bp, synthetic construct
  source 1..80: mol_type = other DNA
gggcagtcaatgctccaatgacaaaagtcttagactggtcagggacgcgttactgggcacccaattcaaccaaaacaaca

SEQ ID NO: 86645 - DNA, 80 bp, synthetic construct
  source 1..80: mol_type = other DNA
agccaatctggtcagttctcctttgtaaatgtgcatagaccctttgttcaatcaaaaactgtccaaccatctcctccgcg

SEQ ID NO: 86646 - DNA, 80 bp, synthetic construct
  source 1..80: mol_type = other DNA
ggcgccctcatcttcgggtagcgttcgcagcctttctactcaatcaacaatgctttcaaattctagcttttcttcccttg

SEQ ID NO: 86647 - DNA, 80 bp, synthetic construct
  source 1..80: mol_type = other DNA
ggactccttcaactcagtcaacaaatctttcttcttctcgaacggcggactgggttcgaagtcagaggaacctgagcccc

SEQ ID NO: 86648 - DNA, 80 bp, synthetic construct
  source 1..80: mol_type = other DNA
tacatggacggggctctgcagacagcctttgtcaccccaccatcaagcagagcttcttctacaggcaccgtctcaacagt

SEQ ID NO: 86649 - DNA, 80 bp, synthetic construct
  source 1..80: mol_type = other DNA
acgactccaaagtgaagaaggtggccaatgttctcctctgtgctctctcatcattgttcactagaccaattaaggacatt

SEQ ID NO: 86650 - DNA, 80 bp, synthetic construct
  source 1..80: mol_type = other DNA
acatcctagccacatgtgattggacttttgcaggcatagtagaatccctgatcctcttggctgaactgtttggagttttc

SEQ ID NO: 86651 - DNA, 80 bp, synthetic construct
  source 1..80: mol_type = other DNA
tctgtcaaagaaatgctgtcagatatgattagaaggaggaacttaattctcaacagaggcggcgatgaaaatccacgagg

SEQ ID NO: 86652 - DNA, 80 bp, synthetic construct
  source 1..80: mol_type = other DNA
ttaactttgagtgagtgacttgagcatcttagatgcagcatgcccttcaacattatgtacacaccactattgtgtgttgt

SEQ ID NO: 86653 - DNA, 80 bp, synthetic construct
  source 1..80: mol_type = other DNA
agtacagccaaccttctctcaggatgacacgtctacggctgttcaagatatacaccccagcccaacaaatagatctaaga

SEQ ID NO: 86654 - DNA, 80 bp, synthetic construct
  source 1..80: mol_type = other DNA
agtgttcctgttaccccaggtacccgaacatcaggtgtgtttgcagagacaactggaaaggctctaacagacctattata

SEQ ID NO: 86655 - DNA, 80 bp, synthetic construct
  source 1..80: mol_type = other DNA
aatgcatcagagacaccattaactcctgtctggaatgacaatgcccatggggtaggttctgttcccatgcatacagatct

SEQ ID NO: 86656 - DNA, 80 bp, synthetic construct
  source 1..80: mol_type = other DNA
tctgacaacgaatggggatcgactcttgaggcatccatgttggctaaagaaatgggtgttaccatcatcatttggactgt

SEQ ID NO: 86657 - DNA, 80 bp, synthetic construct
  source 1..80: mol_type = other DNA
attggtgaagttatgtcgttgcggcagctagggcacaagttgctaacacgagataaacaaatcaagcaggaattctcaaa

SEQ ID NO: 86658 - DNA, 80 bp, synthetic construct
  source 1..80: mol_type = other DNA
gtcaccaaggatttgcttgaccatctagatgttggcggactgttgagggcagctttccctggaacaggaatagaaagaca

SEQ ID NO: 86659 - DNA, 80 bp, synthetic construct
  source 1..80: mol_type = other DNA
cactctgtcaatttacttgaggatagtcacaatggaaagctgtgcctactaaatggaatagcccccttacaattgggtaa

SEQ ID NO: 86660 - DNA, 80 bp, synthetic construct
  source 1..80: mol_type = other DNA
agcatcagcatcatgctcccataatgggaaaagaagtttttacagaaatctgatatggctaacagtgaaaaatggtttgt

SEQ ID NO: 86661 - DNA, 80 bp, synthetic construct
  source 1..80: mol_type = other DNA
aatcctataaaaacgacaaagggaaagaaatccttatattatggggtgttcatcatccgcccaacataagggaccaaagg

SEQ ID NO: 86662 - DNA, 80 bp, synthetic construct
  source 1..80: mol_type = other DNA
gcaacgacatagttgtcgcgggtgtccataccgcagcagcccgggggggcaacactgtcatttgtgccactcaaggacaa

SEQ ID NO: 86663 - DNA, 80 bp, synthetic construct
  source 1..80: mol_type = other DNA
tggacaagggggcccaatcatgaaaacccatacgagagcatggttccccactcccagcgagctactcagctcatggccct

SEQ ID NO: 86664 - DNA, 80 bp, synthetic construct
  source 1..80: mol_type = other DNA
attccggagaggatgtgttcactgtgtcctgtagggttctgactcgccccgctccagattttgaatttacattcttagtt

SEQ ID NO: 86665 - DNA, 80 bp, synthetic construct
  source 1..80: mol_type = other DNA
ccaccaactgttgaatcaaaaacaaaaccctttactttacctattctaacccttggtgagttgtctaattcccgttttcc

SEQ ID NO: 86666 - DNA, 80 bp, synthetic construct
  source 1..80: mol_type = other DNA
tgctgctatagatatgctttatactgatcccaatgaatcaatagttgttcagccccaaaatggtagatgtacccttgacg

SEQ ID NO: 86667 - DNA, 80 bp, synthetic construct
  source 1..80: mol_type = other DNA
ttagaggtactctgattagtcagaatgcgagagcggccgatttaacagattccccccagagagcccgtaatcacccgttg

SEQ ID NO: 86668 - DNA, 80 bp, synthetic construct
  source 1..80: mol_type = other DNA
cacgtccaggtcaagaacctagatggcacacagtatgacccaacagatgacatccctgcagtcctgggggctattgactt

SEQ ID NO: 86669 - DNA, 80 bp, synthetic construct
  source 1..80: mol_type = other DNA
caagggtacagtgttcggagtggcaagtcagagggacgtctctggaacacaagaacagggccattatgccacccgggctc

SEQ ID NO: 86670 - DNA, 80 bp, synthetic construct
  source 1..80: mol_type = other DNA
atgaagcacacattgacacaactgatccaaagtatgcacctaaattaggcacaattctcatcaaatctgaatctactgat

SEQ ID NO: 86671 - DNA, 80 bp, synthetic construct
  source 1..80: mol_type = other DNA
ttcatcacaaatcagcccattaggttcactccagtgggcatgggcgacaacaattggagacagtgggaattgcctgacta

SEQ ID NO: 86672 - DNA, 80 bp, synthetic construct
  source 1..80: mol_type = other DNA
ttctggtagtttgactctaaatatgaaccttgcccctgctgtttccccatctttccctggtgaacgaatccttttcttta

SEQ ID NO: 86673 - DNA, 80 bp, synthetic construct
  source 1..80: mol_type = other DNA
ggtctatagtaccatcagctggaggctacgggtctggctatatagactgtctcataccccaggaatgggtgcaacatttc

SEQ ID NO: 86674 - DNA, 80 bp, synthetic construct
  source 1..80: mol_type = other DNA
taccaggaggcagcaccttcacaatccgctgttgcactggttaggtatgtcaaccccgacactgggcgtaacatctttga

SEQ ID NO: 86675 - DNA, 80 bp, synthetic construct
  source 1..80: mol_type = other DNA
tcctggaaacaatcctattgtggttccccctaatggttattttagatttgaggcttgggttaatcaattctatacacttg

SEQ ID NO: 86676 - DNA, 80 bp, synthetic construct
  source 1..80: mol_type = other DNA
gagctcagtaatggctggagccttcttcgcagggttagcaggtgatgtcgtgtcgaacggcatcggttccctcatcaatg

SEQ ID NO: 86677 - DNA, 80 bp, synthetic construct
  source 1..80: mol_type = other DNA
caggtgctaatgcagtcaatcaaaaggttgagtatgactttaataagcaacttcagatggcatcattcaaacatgataag

SEQ ID NO: 86678 - DNA, 80 bp, synthetic construct
  source 1..80: mol_type = other DNA
tgaacataaagcaggggatgttgaccgctggcggcttttctcctgcggacgctgctagggtggctgttaacgctccaata

SEQ ID NO: 86679 - DNA, 80 bp, synthetic construct
  source 1..80: mol_type = other DNA
tgaacataaagcaggggatgttgaccgctggcggcttttctcctgcggacgctgctaggggggctgttaacgctccaata

SEQ ID NO: 86680 - DNA, 80 bp, synthetic construct
  source 1..80: mol_type = other DNA
tagtagtcctgtccacaggtctcctgctcccctccagcacactgccccaccaaagagtaagttgcaaagtgattctgcta

SEQ ID NO: 86681 - DNA, 80 bp, synthetic construct
  source 1..80: mol_type = other DNA
gtgtgtatagcaccccttccactgtttcttcacaatcaactcattcaacagtgttgtctgcaggaactgggtcgtccaga

SEQ ID NO: 86682 - DNA, 80 bp, synthetic construct
  source 1..80: mol_type = other DNA
ccacagcaacctccaccctgtctaggaccagcgactgggttagaggacagaatgaaaggcttggcccgtttatggatggt

SEQ ID NO: 86683 - DNA, 80 bp, synthetic construct
  source 1..80: mol_type = other DNA
tggactcctatgaccacgtagtcattccccctcttgtagatgtaaggacaaccgcagtcgccaggaccggtgccaagatc

SEQ ID NO: 86684 - DNA, 80 bp, synthetic construct
  source 1..80: mol_type = other DNA
agggcatagttccctaagtctttacacgcccgcagtgttgatgcagcggatgacagcatgcggcctatcttctcagctgt

SEQ ID NO: 86685 - DNA, 80 bp, synthetic construct
  source 1..80: mol_type = other DNA
ctcaggcccctgcaattcaaaatcacctatcagggaggctataaaattagagacgtctggcggggtccaaaagacgttga

SEQ ID NO: 86686 - DNA, 80 bp, synthetic construct
  source 1..80: mol_type = other DNA
cgtcgcgagacttatagctgccggaggtttgtgaacccccagagctttgccgccgctgacgtacacggagtagtggtaaa

SEQ ID NO: 86687 - DNA, 80 bp, synthetic construct
  source 1..80: mol_type = other DNA
tgctgggtgctttagtgcccttaggtacggcacccagcattttcttaaatccaactttgatgttggagaatgcaccagcc

SEQ ID NO: 86688 - DNA, 80 bp, synthetic construct
  source 1..80: mol_type = other DNA
ttcagaacctgtgatcaagccgagagaggccctctcctctttgcgttgtttccttgttggtctgcacagtggcactttgc

SEQ ID NO: 86689 - DNA, 80 bp, synthetic construct
  source 1..80: mol_type = other DNA
gacggagaggcagtccttgagggaaatgaagaccttggcacctactgtggtgctccaattctgggccctggtaaagcgcc

SEQ ID NO: 86690 - DNA, 80 bp, synthetic construct
  source 1..80: mol_type = other DNA
ttgtcatctcagtccaggagggcctgccatcaggagtcccatgtacgtcgcaatggaattcaatagcgcactggattcta

SEQ ID NO: 86691 - DNA, 80 bp, synthetic construct
  source 1..80: mol_type = other DNA
cgacaacctttgttcctcctcctccaatttattgtggtgctcctggtggtgctgcttttttttgttgtgatgataagttc

SEQ ID NO: 86692 - DNA, 80 bp, synthetic construct
  source 1..80: mol_type = other DNA
ttcggtggaaggcggtgttgtaatgtcgtctcctcactacgctgccctggaattaatccaccggtgtcatctcctctgct

SEQ ID NO: 86693 - DNA, 80 bp, synthetic construct
  source 1..80: mol_type = other DNA
gttgtttggcggtctaccacaacaagagaaaataatagatctcagacatcccacaaacaatgtcaaaaacataatactgc

SEQ ID NO: 86694 - DNA, 80 bp, synthetic construct
  source 1..80: mol_type = other DNA
aattaaacaaatctgcaggaatcaattgtagcagaccattcattaacaatacaacaacaagtataagaatacgacgcggc

SEQ ID NO: 86695 - DNA, 80 bp, synthetic construct
  source 1..80: mol_type = other DNA
attgtttaatgagagacagaaaatggatcacggaagagctataatggctactatcttacatccatgtaggataaaacaaa

SEQ ID NO: 86696 - DNA, 80 bp, synthetic construct
  source 1..80: mol_type = other DNA
tcagggagcaaaagcaggagtttaaaatgaatccaaatcagaaaataataaccattgggtcactatccttagggctagta

SEQ ID NO: 86697 - DNA, 80 bp, synthetic construct
  source 1..80: mol_type = other DNA
ttacccatgaggaaagggaagaacagaacctgctctgtcactgcaactacaggagaaaaagagaagcaactgcatgcgct

SEQ ID NO: 86698 - DNA, 80 bp, synthetic construct
  source 1..80: mol_type = other DNA
gtcacatattttaagactagaaccactacctgtggatactaactctaagtctagtttgaatgaatatagatattgtaata

SEQ ID NO: 86699 - DNA, 80 bp, synthetic construct
  source 1..80: mol_type = other DNA
gcacaaccacatccctaaccggtccctgtgccccggttgctctagatcctattcctcctcgctatcgtgctcctgctgct

SEQ ID NO: 86700 - DNA, 80 bp, synthetic construct
  source 1..80: mol_type = other DNA
tttcttattcgtaagtgtaatgagaaagaggtcaccgggacagggacatgtgtaaatggcgtaccaggaacacgtgcaat

SEQ ID NO: 86701 - DNA, 80 bp, synthetic construct
  source 1..80: mol_type = other DNA
tgaaccaataccatcagtgtcatctctgttactggtaaatgaagcacaagaagaaaaagaagtagatatagttaaaacaa

SEQ ID NO: 86702 - DNA, 80 bp, synthetic construct
  source 1..80: mol_type = other DNA
acctggcagacaatgccaaaaccaataataatacatacatcaaatctatagatattgtatgtacaagacctacacctaac

SEQ ID NO: 86703 - DNA, 80 bp, synthetic construct
  source 1..80: mol_type = other DNA
gaacactacccaaatcacaactacataaactttacctcatcctcattcatcaggaacgagaccacaactacaagccacag

SEQ ID NO: 86704 - DNA, 80 bp, synthetic construct
  source 1..80: mol_type = other DNA
ctttaattgtagaggggaatttttctattgcaatacatcaggcctgtttaatagtacatacaatggtacatttacattta

SEQ ID NO: 86705 - DNA, 80 bp, synthetic construct
  source 1..80: mol_type = other DNA
tcgtgtggggaaacagatagtggagcggattcttgatgaggaatctgatggggaatttaaaatgccgacttcacgctacc

SEQ ID NO: 86706 - DNA, 80 bp, synthetic construct
  source 1..80: mol_type = other DNA
agcaagatttgaaaggaggatacacagcagtattcatgcaaagagggcaaaatccaaataggagaggagctataaaatgt

SEQ ID NO: 86707 - DNA, 80 bp, synthetic construct
  source 1..80: mol_type = other DNA
cagccccaccaatggaggaggaaataaagggacaggagaatcaggaacagaaagggggcccgaccgagctctatccgttt

SEQ ID NO: 86708 - DNA, 80 bp, synthetic construct
  source 1..80: mol_type = other DNA
gcctccctcaaatccctctttgggacagaccaattacagcaaaggttgggggccatctatgtgaagttttgctggacaca

SEQ ID NO: 86709 - DNA, 80 bp, synthetic construct
  source 1..80: mol_type = other DNA
gtggccagacctaggggaagggcgaagtctctaggggaggaagatgggtgcgagtgcgtctgtgttgacaggaagcaaat

SEQ ID NO: 86710 - DNA, 80 bp, synthetic construct
  source 1..80: mol_type = other DNA
aacagagagaaattaaaagaaccagtgcatggtgtatactatcaacctgataaagacttatgggttaatattcagaagca

SEQ ID NO: 86711 - DNA, 80 bp, synthetic construct
  source 1..80: mol_type = other DNA
aggagaagggcaatggacttaccagatatatcaggatgaacataagaacctcaaaacagggaaatatactaggcaaaggg

SEQ ID NO: 86712 - DNA, 80 bp, synthetic construct
  source 1..80: mol_type = other DNA
cctcccacacaaatgacataagacaattagcagaagtaatccagaaggtgtctcaagaatctatagttatctggggaaaa

SEQ ID NO: 86713 - DNA, 80 bp, synthetic construct
  source 1..80: mol_type = other DNA
aaaggctgaattaatggcagtattattagccttacaggattccaaagaaaaagtaaatatagtaacagactcacaatatg

SEQ ID NO: 86714 - DNA, 80 bp, synthetic construct
  source 1..80: mol_type = other DNA
tattgggcattatctcctcccaacctacacagagtgaatcccctatagttcagcagataatagaggaactaacaaaaaag

SEQ ID NO: 86715 - DNA, 80 bp, synthetic construct
  source 1..80: mol_type = other DNA
tctagaaaggccaaggactggtgttacagacatcattatgaactcagaaatccaagagtcagttcaagtgtacatattcc

SEQ ID NO: 86716 - DNA, 80 bp, synthetic construct
  source 1..80: mol_type = other DNA
agtaggggtagcccatgtagtagtgaccacatattggggattaatgccaggagaaagagatgaacacttggggcatgggg

SEQ ID NO: 86717 - DNA, 80 bp, synthetic construct
  source 1..80: mol_type = other DNA
ttagtatagaatggcagcataaggagtataaaacacagattgaccctgaaacagcagacaggataatacatcagcattat

SEQ ID NO: 86718 - DNA, 80 bp, synthetic construct
  source 1..80: mol_type = other DNA
tcagaaagcctgcagtcactctggaacacaatagcagtgctctggtgtgttcacaacagatataaaattggagatacgca

SEQ ID NO: 86719 - DNA, 80 bp, synthetic construct
  source 1..80: mol_type = other DNA
ttcaactgttttacagaatcagcaatcaggggagccatcctagggcagagagtactgaccaggtgtgactaccctgaagg

SEQ ID NO: 86720 - DNA, 80 bp, synthetic construct
  source 1..80: mol_type = other DNA
acatagtcaggtagggacactgcaactactagctctaagagcagtagtaaaagccagaagaagtaagcctcccctaccca

SEQ ID NO: 86721 - DNA, 80 bp, synthetic construct
  source 1..80: mol_type = other DNA
gtgtccagaaattaacagaagatagatggaacaagcacccgaggatcagggacctagagagccattcaatgaatgggcac

SEQ ID NO: 86722 - DNA, 80 bp, synthetic construct
  source 1..80: mol_type = other DNA
aacccaactaatacaagaggaagaggaagaaggaatggatccaatagctcctgaggtgcccccttggcaccaccctggaa

SEQ ID NO: 86723 - DNA, 80 bp, synthetic construct
  source 1..80: mol_type = other DNA
gccagccccagaccccgtgtaataattgctattgcaaaaactgctgctatcattgcattgtttgtttcacaaagaagggt

SEQ ID NO: 86724 - DNA, 80 bp, synthetic construct
  source 1..80: mol_type = other DNA
ttgggaatctcctatggcaggaagaagcggcgacgcccagctgctacaagtcatccagatcataaagatcctgtaccaaa

SEQ ID NO: 86725 - DNA, 80 bp, synthetic construct
  source 1..80: mol_type = other DNA
gcagtaagtaacgctaatgcattatagaggactgctaacattaatagctattattgctttgctgattataaatgtaattg

SEQ ID NO: 86726 - DNA, 80 bp, synthetic construct
  source 1..80: mol_type = other DNA
tatggatgtttattcttagaaaatatttagagcaaaaggaacaagatagaagagaaagagaaatacttaaaaggttaagg

SEQ ID NO: 86727 - DNA, 80 bp, synthetic construct
  source 1..80: mol_type = other DNA
gcaggcaatacaaaagttaaaggaagtaatggggagcaggaagtctgcgggtaccactaaagaagacacaagcgcaaagc

SEQ ID NO: 86728 - DNA, 80 bp, synthetic construct
  source 1..80: mol_type = other DNA
gcctgtatgggaagatgcaataccagtattattctgtgcttcagatgctaatctaacaagcactgagcggcataatattt

SEQ ID NO: 86729 - DNA, 80 bp, synthetic construct
  source 1..80: mol_type = other DNA
gggcatcacacgcctgtgttcctacagaccccactccatatgaatatccattgcacaatgtgacagataaatttgatata

SEQ ID NO: 86730 - DNA, 80 bp, synthetic construct
  source 1..80: mol_type = other DNA
tggaaaaattatatggtagaacaaatgcaaagagacattattgatttatgggaacagagtcttaaaccttgtgttcaact

SEQ ID NO: 86731 - DNA, 80 bp, synthetic construct
  source 1..80: mol_type = other DNA
gactttcctgtgtgtacaaatgaattgtacagacccaacagacaatggtacaactatagaaaaccctgtaaaaaagtgtg

SEQ ID NO: 86732 - DNA, 80 bp, synthetic construct
  source 1..80: mol_type = other DNA
agtttaatacaaccactgttgtcaaagacaaaaaggagaaaaaacaggctctattttatttatcagatttgatgaaactg

SEQ ID NO: 86733 - DNA, 80 bp, synthetic construct
  source 1..80: mol_type = other DNA
agtactcagttaatcttgaatgggacactctctaaaggaaaagtaagaattataggaacaaatatttcggacagtgggaa

SEQ ID NO: 86734 - DNA, 80 bp, synthetic construct
  source 1..80: mol_type = other DNA
aaatatcatagtgaccctaaattctaccctaaacatgacctgtagaagaccagcaatgaaagtacaagaaatgagaatag

SEQ ID NO: 86735 - DNA, 80 bp, synthetic construct
  source 1..80: mol_type = other DNA
gtccaatggcctggtacagcggcgcttattgtgaatataataacactgagtgggaagaaacattaaaacaaacagctgaa

SEQ ID NO: 86736 - DNA, 80 bp, synthetic construct
  source 1..80: mol_type = other DNA
aggtatttagaacttgtaaacaatacagggaatattagcatgatattcgatagaaccagcggtggagatgcagaggtgac

SEQ ID NO: 86737 - DNA, 80 bp, synthetic construct
  source 1..80: mol_type = other DNA
tcatttacattttaactgtcatggggaattcttttattgtaacacaagtaatatgtttaattatagctttgaatgtgacg

SEQ ID NO: 86738 - DNA, 80 bp, synthetic construct
  source 1..80: mol_type = other DNA
gaaccacctgtaccataccttgcaggttaaaacaggtggtaaggtcatggatacagggagggtcgggactctatgcacct

SEQ ID NO: 86739 - DNA, 80 bp, synthetic construct
  source 1..80: mol_type = other DNA
cccatcagaggtaatctaacatgtacatcaaacataactggaatgattctacaaatggatatgccatggaacaacagcgg

SEQ ID NO: 86740 - DNA, 80 bp, synthetic construct
  source 1..80: mol_type = other DNA
tacaggaaacaggactgcaacattgagaccaggagggggagagatgaaagacatatggagaactgaattgatcaactaca

SEQ ID NO: 86741 - DNA, 80 bp, synthetic construct
  source 1..80: mol_type = other DNA
aagtagtaaggataaaaccttttagtgtggcacccacacctattgcaaggccagtcataggcactagcactcatagagaa

SEQ ID NO: 86742 - DNA, 80 bp, synthetic construct
  source 1..80: mol_type = other DNA
aaaagagcagtaggattgggaatgctattcttgggggttctaagtgcagcaggtagcactatgggcgcagcggctacagc

SEQ ID NO: 86743 - DNA, 80 bp, synthetic construct
  source 1..80: mol_type = other DNA
gctgacggtacggacccacacattgatgaagggtatagtgcaacagcaggacaacctgctaagagcaatacaggcccagc

SEQ ID NO: 86744 - DNA, 80 bp, synthetic construct
  source 1..80: mol_type = other DNA
agcaattgctgaggctatctgtatggggtatcagacaactccgagctcgcctgctagccttggaaaccttaatacagaat

SEQ ID NO: 86745 - DNA, 80 bp, synthetic construct
  source 1..80: mol_type = other DNA
cagcaactcctaaacctgtggggctgtaaaggaaggctagtctgctacacatcagtaaagtggaataagtcatggacagg

SEQ ID NO: 86746 - DNA, 80 bp, synthetic construct
  source 1..80: mol_type = other DNA
aggagaagacatttggggaaatctaacatggcaggagtgggatcaacagataaacaacataagctccatcatatatgatg

SEQ ID NO: 86747 - DNA, 80 bp, synthetic construct
  source 1..80: mol_type = other DNA
aaatacaaaaggcacaagtacagcaggaagaaaatgagaaaaagttgctggaattagatgaatgggcttctatctggaat

SEQ ID NO: 86748 - DNA, 80 bp, synthetic construct
  source 1..80: mol_type = other DNA
tggcttgacataactaaatggttgtggtatataaaaatagcaataatcatagtaggagcattagtaggtgtaagagttat

SEQ ID NO: 86749 - DNA, 80 bp, synthetic construct
  source 1..80: mol_type = other DNA
catgatagtacttaatctagtgaggaacattaggcagggatatcaacccctctcgttacagatccccatccatcaccaag

SEQ ID NO: 86750 - DNA, 80 bp, synthetic construct
  source 1..80: mol_type = other DNA
tggaagcagaaacgccaggaggaacaggagaaggaggtggagaagaaggcaggcccaagtgaacctcgctgcaaggtttc

SEQ ID NO: 86751 - DNA, 80 bp, synthetic construct
  source 1..80: mol_type = other DNA
ttgccactgttgtacacggacctcagaacaataatattgtggagttaccgcctcttgagcaacttagcatcagggatcca

SEQ ID NO: 86752 - DNA, 80 bp, synthetic construct
  source 1..80: mol_type = other DNA
gaaggtgatcgactatctgagacttggactgtggatcctaggacaaaagataattatctgcagaatttgtgcagctgtaa

SEQ ID NO: 86753 - DNA, 80 bp, synthetic construct
  source 1..80: mol_type = other DNA
cacaatactggctacaagaattacagaatagtgctacaagcttattagatacagttgcagtggcagtagccaattggact

SEQ ID NO: 86754 - DNA, 80 bp, synthetic construct
  source 1..80: mol_type = other DNA
gacggcatcatctcagggatacaaagaataggaagaggaattctcaacgtcccaagaagaattagacagggcttagaaag

SEQ ID NO: 86755 - DNA, 80 bp, synthetic construct
  source 1..80: mol_type = other DNA
aagtttattgtaacatgggaaacgcattgagaaagagtaaatttgagggatgggcagcagtaagagaaagaatgagaaaa

SEQ ID NO: 86756 - DNA, 80 bp, synthetic construct
  source 1..80: mol_type = other DNA
acaaaaacctcccctgagcctgaaccatgtgcacctggagtaggagagatctccaggagattagcagatagaggagggat

SEQ ID NO: 86757 - DNA, 80 bp, synthetic construct
  source 1..80: mol_type = other DNA
accaagttcctatactcctcaaaacaatgcagcccttgcattcctagaaagtcaccaagatgaagaagtaggttttccag

SEQ ID NO: 86758 - DNA, 80 bp, synthetic construct
  source 1..80: mol_type = other DNA
ggaggacatcaaggagctttacaagtgctaaaggaagtaatcaatgaggaagcggcagattgggatagaactcacccacc

SEQ ID NO: 86759 - DNA, 80 bp, synthetic construct
  source 1..80: mol_type = other DNA
ctcctgcatccagcgtgtgcccatggctggggagatccacatggggaaatactgatgtggaagtttgatagatctttagg

SEQ ID NO: 86760 - DNA, 80 bp, synthetic construct
  source 1..80: mol_type = other DNA
caacacccatgttgctatgataaccaacccagagctatttcagaagaacaagtgctgacctgaagattgatgacaatgtg

SEQ ID NO: 86761 - DNA, 80 bp, synthetic construct
  source 1..80: mol_type = other DNA
ggactttccaacagagactgctgacactgcggggactttccagtgtgggagggatgggggcggttcggggagtggcttac

SEQ ID NO: 86762 - DNA, 80 bp, synthetic construct
  source 1..80: mol_type = other DNA
accggtagggccgttgccaccagggcagataagggaaccaacaggaagtgacattgctgggacaactagcacccagcaag

SEQ ID NO: 86763 - DNA, 80 bp, synthetic construct
  source 1..80: mol_type = other DNA
agcaaattcactggactaccagagccaaccaacctatcccagtaggagacatctatagaaaatggatagtgttaggccta

SEQ ID NO: 86764 - DNA, 80 bp, synthetic construct
  source 1..80: mol_type = other DNA
ccctacccgacgtcttccgatcttactgagggagaaaacaattgtctgttacatcctatgtgccaacacggaatggatga

SEQ ID NO: 86765 - DNA, 80 bp, synthetic construct
  source 1..80: mol_type = other DNA
accagtagatccagaggaagtagagcaggctaatgagggagaaaacaatagtctattacaccctgtgtgccagcatggaa

SEQ ID NO: 86766 - DNA, 80 bp, synthetic construct
  source 1..80: mol_type = other DNA
catatctgcagaaatgaaaggggaaataacaaactgcactttcaatacaaccacatttataagggataagacatttataa

SEQ ID NO: 86767 - DNA, 80 bp, synthetic construct
  source 1..80: mol_type = other DNA
aatccattcctggcctttatgtaagtttgtggtctgggtactcaccagccaccacacctgaatacacaatgggagaacat

SEQ ID NO: 86768 - DNA, 80 bp, synthetic construct
  source 1..80: mol_type = other DNA
aataaagcttgccttgagtgcttcacctcaataaagcttgccttgagtgcttcacctcaataaagcttgccttgagtgct

SEQ ID NO: 86769 - DNA, 80 bp, synthetic construct
  source 1..80: mol_type = other DNA
tttggagggtggctgggaggtcagcatcgatccagggagttatgatggtacaataaagcttgccttgagtgcttcacctc

SEQ ID NO: 86770 - DNA, 80 bp, synthetic construct
  source 1..80: mol_type = other DNA
taaactcaataaagcttgccttgagtgcttcagcctcaataaagcttgccttgagtgcttcagcctcaataaagcttgcc

SEQ ID NO: 86771 - DNA, 80 bp, synthetic construct
  source 1..80: mol_type = other DNA
ttgagtgcttcagcctcaataaagcttgccttgagtgcttcagcctcaataaagcttgccttgagtgcttcagcctcaat

SEQ ID NO: 86772 - DNA, 80 bp, synthetic construct
  source 1..80: mol_type = other DNA
tgtaatatcacaatcacctggaaacttactagaaatgcacatttccagactcctctttccctgttcctttcacagaccca

SEQ ID NO: 86773 - DNA, 80 bp, synthetic construct
  source 1..80: mol_type = other DNA
ggttgaaatcatccatctacatggtcatgttgtctctccaagagtgaagagttttctctgatcgcccgaacagggacttg

SEQ ID NO: 86774 - DNA, 80 bp, synthetic construct
  source 1..80: mol_type = other DNA
ctgactcagaaactctggggtggggtccaggactctgtgctttaattaaagtccactgggcgatcatgatgctccccaat

SEQ ID NO: 86775 - DNA, 80 bp, synthetic construct
  source 1..80: mol_type = other DNA
atgtatggtattgattatacctcagtactagtctttttgatttcaatttttatacttaattacatgttaaaagaaattgg

SEQ ID NO: 86776 - DNA, 80 bp, synthetic construct
  source 1..80: mol_type = other DNA
gcctgaacttaccaattactgggtcaatggatgtaactttggcaaattcatcaatggaaaatacgttcatgacatcaaca

SEQ ID NO: 86777 - DNA, 80 bp, synthetic construct
  source 1..80: mol_type = other DNA
ttgtgcctatactatccaacagaagcgaaaacagaaattggcgatgcttcttggacagatacattgtctcagttatttct

SEQ ID NO: 86778 - DNA, 80 bp, synthetic construct
  source 1..80: mol_type = other DNA
aagaatgcttgattatattgtttatagatttctccttatagtggcgatattaggtccaatgatcagaggacaaaattatg

SEQ ID NO: 86779 - DNA, 80 bp, synthetic construct
  source 1..80: mol_type = other DNA
agtgcgtcaatggactttcaactttggattgcttggtactactctactcaatctggatgctaattacgtcgaggacgcta

SEQ ID NO: 86780 - DNA, 80 bp, synthetic construct
  source 1..80: mol_type = other DNA
agtctcaacgtaacggaattgcaccacaatccgatgctctcagaaaattggcctcttcaaaatttaaacggataaatttt

SEQ ID NO: 86781 - DNA, 80 bp, synthetic construct
  source 1..80: mol_type = other DNA
aataatgattcagaatatatagaaaattggaatttacagcatcgaaggcaaagaacgggatttgtatttcacaaaccaaa

SEQ ID NO: 86782 - DNA, 80 bp, synthetic construct
  source 1..80: mol_type = other DNA
catatttccatatacaatgtcatttacacttaatagatcacaaccacaacatgacgatctaatgggtacaatgtggatta

SEQ ID NO: 86783 - DNA, 80 bp, synthetic construct
  source 1..80: mol_type = other DNA
aatcggtttcgattaccaatgtgcattaaatgctccagccaacattcaacaatttgaacatactgtacagttacgtcgcg

SEQ ID NO: 86784 - DNA, 80 bp, synthetic construct
  source 1..80: mol_type = other DNA
ctctaactacagcaacaataactctaatacccgatgcggataagttcaactgtcgaagagtaataaattcagtagacggg

SEQ ID NO: 86785 - DNA, 80 bp, synthetic construct
  source 1..80: mol_type = other DNA
ttaataactatgctgcacgatatggaacgatcatcgcacgtaattttgatacaattaggttacgatttcaactggttaga

SEQ ID NO: 86786 - DNA, 80 bp, synthetic construct
  source 1..80: mol_type = other DNA
ccaccaaacatgacaccagcagttgctgctctttttccgaatgccggtccgttcaataatcatgccgctgtaggactcac

SEQ ID NO: 86787 - DNA, 80 bp, synthetic construct
  source 1..80: mol_type = other DNA
actgcgaattgagtctgcaatttgtgaatcagtattggcggatgctacagaaactatgcttgcatcagttacaggaatta

SEQ ID NO: 86788 - DNA, 80 bp, synthetic construct
  source 1..80: mol_type = other DNA
atggcttctctaatatacagacaactgctaaacaattcatatactgttaatttatctgaagaaattcaagaattaagtac

SEQ ID NO: 86789 - DNA, 80 bp, synthetic construct
  source 1..80: mol_type = other DNA
tgagatcactatctgcagaatttaataatgtagaatgtactggcggagattatagtttttcattaccagttggacaatgg

SEQ ID NO: 86790 - DNA, 80 bp, synthetic construct
  source 1..80: mol_type = other DNA
taaattcgcttagatttagattccgattgacagttggtgaaccgtcgtttgcaattcttagaacacgaatgtcaggacta

SEQ ID NO: 86791 - DNA, 80 bp, synthetic construct
  source 1..80: mol_type = other DNA
tatggattaccagcagcaaatccgaataacggaaaagcgttttatgagacattaggaagattttctttaatatcacttgt

SEQ ID NO: 86792 - DNA, 80 bp, synthetic construct
  source 1..80: mol_type = other DNA
taagacaagagtttaacgcattatcgcaagaaatagcagtatctcaacttattgatttagccttactcccacttgacatg

SEQ ID NO: 86793 - DNA, 80 bp, synthetic construct
  source 1..80: mol_type = other DNA
ttttcaatgttttcaggtattaaatcgactgttgaggcagcaaaatcgatggcaacgaacgtcatgaaaaaattcaaaaa

SEQ ID NO: 86794 - DNA, 80 bp, synthetic construct
  source 1..80: mol_type = other DNA
atcatcactcgcatcatcaatggctacacttactgaaaatttatctgacgcagcgtcatcagtatcacggtccggcacat

SEQ ID NO: 86795 - DNA, 80 bp, synthetic construct
  source 1..80: mol_type = other DNA
tgagatctattagttctactgcatctgcatggacagacgtctcaactagtgtaagtgatatttcatcaaccgtaagtagc

SEQ ID NO: 86796 - DNA, 80 bp, synthetic construct
  source 1..80: mol_type = other DNA
gtttcctcacaaacttctacaataagtagaagattgagattgaaagagatagctactcaaactgagggattaaattttga

SEQ ID NO: 86797 - DNA, 80 bp, synthetic construct
  source 1..80: mol_type = other DNA
tgacatatcagcagctgttttaaagactaaaatagataaatcagtacaagtagctccacacactttaccagatattgtta

SEQ ID NO: 86798 - DNA, 80 bp, synthetic construct
  source 1..80: mol_type = other DNA
tatgcatataaagttagcacatttaacgaaataccttttgacgttcaaaaatttgcagacttagtaacggattcaccagt

SEQ ID NO: 86799 - DNA, 80 bp, synthetic construct
  source 1..80: mol_type = other DNA
tagattttaagacacttaaaaatcttaatgacaattatggcatttcaaaacagcaagcgctaaacttacttagatcagat

SEQ ID NO: 86800 - DNA, 80 bp, synthetic construct
  source 1..80: mol_type = other DNA
ccaagagtgctgcgtgaatttattaatcaaaataacccaataattaagcatagaattgaacagcttataatgcagtgtcg

SEQ ID NO: 86801 - DNA, 80 bp, synthetic construct
  source 1..80: mol_type = other DNA
agttaattattggttactgctatccccgacagaggctggtgtagtgatgcaaggaacaaataataccaatagatggctag

SEQ ID NO: 86802 - DNA, 80 bp, synthetic construct
  source 1..80: mol_type = other DNA
ctatactactagtagaaccaaacgtagcatcgactactagaaattataacttatttggctccagtgtggacataacggtt

SEQ ID NO: 86803 - DNA, 80 bp, synthetic construct
  source 1..80: mol_type = other DNA
gagaacactagttctgataagtggaaatttattgatgttgggaagacatctctaaatggtaattatacacagcatagtac

SEQ ID NO: 86804 - DNA, 80 bp, synthetic construct
  source 1..80: mol_type = other DNA
tctaatatcttcaacaaaattatgtgccgcaatgaaacacggcggaaatttatatactttttctggtaccacgccgaatg

SEQ ID NO: 86805 - DNA, 80 bp, synthetic construct
  source 1..80: mol_type = other DNA
ccttgccaaaatcatactctacaactaactttgattcagtgaatgtaacaacatttgcggacttttatatcatctcaagg

SEQ ID NO: 86806 - DNA, 80 bp, synthetic construct
  source 1..80: mol_type = other DNA
gacaatgaacaaaagtgtcgtcaatacgtgaataatggcctaccaccaatacagaatacgagaaacgtcgtaccattaag

SEQ ID NO: 86807 - DNA, 80 bp, synthetic construct
  source 1..80: mol_type = other DNA
tataacatctagggatatacaaaatgtacgagcacgaatgaatgaggatattgtcgtatcaaaaacttcattatggaaag

SEQ ID NO: 86808 - DNA, 80 bp, synthetic construct
  source 1..80: mol_type = other DNA
taataaaacacaatcaactacagtgaatcctggaccattcgcacaaacaggatatgcaccagtaaactggggtcatggag

SEQ ID NO: 86809 - DNA, 80 bp, synthetic construct
  source 1..80: mol_type = other DNA
ctggaaagaatggagaaaacgtgttgaaaaggaaacaattgaaaatttagatattgcatatgaatatttaagaactggtg

SEQ ID NO: 86810 - DNA, 80 bp, synthetic construct
  source 1..80: mol_type = other DNA
ttaataagatgtgttgtgttaaaattaccgcaatggatattgagttaccagtaactgcaaaattaatacatcatcctaca

SEQ ID NO: 86811 - DNA, 80 bp, synthetic construct
  source 1..80: mol_type = other DNA
acagaaatccgatctgaatgttatttaataatggatcatttcgactctaagaacactaaaagattcatcccaaaaggaac

SEQ ID NO: 86812 - DNA, 80 bp, synthetic construct
  source 1..80: mol_type = other DNA
tttgtattcatatataaataatacattaactgagaatgttttcttacaaaaacaatttctacttaagaaaacggatgcat

SEQ ID NO: 86813 - DNA, 80 bp, synthetic construct
  source 1..80: mol_type = other DNA
atgtcattgcgttgtatgcattatcaaatgatatgaatgatagagagaaagttgttaaattcgttaataatacccagaaa

SEQ ID NO: 86814 - DNA, 80 bp, synthetic construct
  source 1..80: mol_type = other DNA
ggaattattaccgtaaggctaaataattcttttgatgatgtagataaagtaggctttaaaaatgtgtatgactggacttt

SEQ ID NO: 86815 - DNA, 80 bp, synthetic construct
  source 1..80: mol_type = other DNA
cttaccaactgatttttcgcttaagaatacaatacgcacatcatatgattcatgtttaggcatgttcggactatcaatat

SEQ ID NO: 86816 - DNA, 80 bp, synthetic construct
  source 1..80: mol_type = other DNA
gaaatattaaacaagtcgggtattacagctatagaaatagacactgaagatgaattaattttattaattaagagtaactt

SEQ ID NO: 86817 - DNA, 80 bp, synthetic construct
  source 1..80: mol_type = other DNA
cattagagtctaaaccgacaggtaataatcacatttttatcatatctggtagctcagattattataacatagatagttac

SEQ ID NO: 86818 - DNA, 80 bp, synthetic construct
  source 1..80: mol_type = other DNA
gcaaaccatctaagcatttcaagacgttcacatcaaatacggttttctgagtccgcaacgacgttatcaggatatatatt

SEQ ID NO: 86819 - DNA, 80 bp, synthetic construct
  source 1..80: mol_type = other DNA
actaaggtggatttatttacattcaattgataaggtacaggtggaaggcggcaaatattatgaacatgctccaattgaat

SEQ ID NO: 86820 - DNA, 80 bp, synthetic construct
  source 1..80: mol_type = other DNA
tgttatatgcatgtgagtcagcaattgaatttgctagtatacagaatgatttgactgtatcgagatatgccagagaagtt

SEQ ID NO: 86821 - DNA, 80 bp, synthetic construct
  source 1..80: mol_type = other DNA
agaaagtatattaacagcgtttatagtatagtatatgctgacaatccaaattattttatagcaataacttttgtatcaat

SEQ ID NO: 86822 - DNA, 80 bp, synthetic construct
  source 1..80: mol_type = other DNA
accatataaatatgaagttagagtaccacatctaacatttggagttcttcatatatccgatacaatgattgatgatgtag

SEQ ID NO: 86823 - DNA, 80 bp, synthetic construct
  source 1..80: mol_type = other DNA
cgaaaatcatacgaaacttgaaaacagatattagaaatatgaatttgcagacgaattatacttacatgttaacagatgat

SEQ ID NO: 86824 - DNA, 80 bp, synthetic construct
  source 1..80: mol_type = other DNA
gtgtacgtggctaacatatctggtacactatcaacatattttaaattatataatgcattttatagagaacaaataccatt

SEQ ID NO: 86825 - DNA, 80 bp, synthetic construct
  source 1..80: mol_type = other DNA
tggtcaatcaagaatgtacatcccgcacgtaactttagcttttggaaagcataaaccagttaaaatagataaatataagt

SEQ ID NO: 86826 - DNA, 80 bp, synthetic construct
  source 1..80: mol_type = other DNA
tacttatgacttcaatgaaggtatagtatatctacatgattattcatactatacgaataacgaaataagaactgatcagt

SEQ ID NO: 86827 - DNA, 80 bp, synthetic construct
  source 1..80: mol_type = other DNA
tagataaatataagttgattgttaaagatatttatctaaagaaaattcatggtgacattgtgtatactttacgtgattga

SEQ ID NO: 86828 - DNA, 80 bp, synthetic construct
  source 1..80: mol_type = other DNA
tttgggttacaactacagatattgaagaatacattatacctggatggagagttacttatgtaggtaataatgggtatgag

SEQ ID NO: 86829 - DNA, 80 bp, synthetic construct
  source 1..80: mol_type = other DNA
acaagaggacattacaattttagttttgtgtgtcagaacgccgcaactgatgatgatataatcattaactatatatattc

SEQ ID NO: 86830 - DNA, 80 bp, synthetic construct
  source 1..80: mol_type = other DNA
aaatgaactcaattttcaaaactatctactgcaaaaaattaaagaacgtatgacaaccgccctaccaatgaacagattat

SEQ ID NO: 86831 - DNA, 80 bp, synthetic construct
  source 1..80: mol_type = other DNA
ctaatagaatattcagagagaaaatgattagattgagcagtatgaataataatcaaataataaacattggtccaagaaat

SEQ ID NO: 86832 - DNA, 80 bp, synthetic construct
  source 1..80: mol_type = other DNA
gagtcgatgttcttattcttaaattatccaggcattaaacattattcaaatggtgcatatatggtcaaagatacgcttaa

SEQ ID NO: 86833 - DNA, 80 bp, synthetic construct
  source 1..80: mol_type = other DNA
gcttaaacaagaaagatggttaggtaagagactttcgcagtttgacattggacaatataaaaatatgttaaatgtattaa

SEQ ID NO: 86834 - DNA, 80 bp, synthetic construct
  source 1..80: mol_type = other DNA
atgaatatgaaaatgcattcttgatatctaatttaactgcacataatatcttatattattattatagtgtcaaaacattg

SEQ ID NO: 86835 - DNA, 80 bp, synthetic construct
  source 1..80: mol_type = other DNA
ttgttactatgatgcatttaaatcagtgccactaatatatatgcttgggtcagcgccctcatattggattaaagatgtta

SEQ ID NO: 86836 - DNA, 80 bp, synthetic construct
  source 1..80: mol_type = other DNA
agaatgttacaaataaaattaaatttgaaacatgggatcctcttgatactccatattcagataagcatcatagagagctg

SEQ ID NO: 86837 - DNA, 80 bp, synthetic construct
  source 1..80: mol_type = other DNA
ttcttcaagtcagatgtaaataaactaacaagtaattcaatactgtatatagatataagaacagacagagggacattaga

SEQ ID NO: 86838 - DNA, 80 bp, synthetic construct
  source 1..80: mol_type = other DNA
atggcgtacagaaagcgaaacgttcgtaaaactgaacaaaaatttcaacaaaatgaagatgagaaggtggaaacgggcag

SEQ ID NO: 86839 - DNA, 80 bp, synthetic construct
  source 1..80: mol_type = other DNA
gtatctacagaagcacaaatacagaaaatgtcacaagatttacagttagaggcattaacaattcagtctgaaactcaatt

SEQ ID NO: 86840 - DNA, 80 bp, synthetic construct
  source 1..80: mol_type = other DNA
gagaatcacttgtagcgtgtcaattagcaattgttaatactataatatatccagcttttggaatgcagcgtatgcattat

SEQ ID NO: 86841 - DNA, 80 bp, synthetic construct
  source 1..80: mol_type = other DNA
aaaatgaaagttcgaaatcgaaggataaagacatgaaaagtaaagatgaaatcaaaatagatgaaaatgtaattcgatca

SEQ ID NO: 86842 - DNA, 80 bp, synthetic construct
  source 1..80: mol_type = other DNA
actccaactataatgaacaaattaataatacagttgcaattatagtagctgcaggtagactaaatctgtatcaaaagaaa

SEQ ID NO: 86843 - DNA, 80 bp, synthetic construct
  source 1..80: mol_type = other DNA
tagttgaagagtttctaaaacgactccatatttttgatgtgccaagagttcctgatgaccaaatgtatagacttcgtgat

SEQ ID NO: 86844 - DNA, 80 bp, synthetic construct
  source 1..80: mol_type = other DNA
taattgctaaacttgatgcgacggtattcgctcaaattgtaaagttaaggaaaatagatactcttaaaccgattatgtat

SEQ ID NO: 86845 - DNA, 80 bp, synthetic construct
  source 1..80: mol_type = other DNA
aagaaagaagaatcaaaacagctagttgagatattaaaaactaaggaagaacatcaaaaggaaatacaatatgaaatatt

SEQ ID NO: 86846 - DNA, 80 bp, synthetic construct
  source 1..80: mol_type = other DNA
tagcgttcgtttccgcagataccgttgaaccaatcaacgcagttgcgtttgatcatatgagaattatgaacgagctttaa

SEQ ID NO: 86847 - DNA, 80 bp, synthetic construct
  source 1..80: mol_type = other DNA
tagaagatatcaaacctgaagctgcaaaaaaacaatcaaaattatttagaatatttgagccaaagcaattacctatatat

SEQ ID NO: 86848 - DNA, 80 bp, synthetic construct
  source 1..80: mol_type = other DNA
ctgctgctcaaggatatggctgtagataataaaaattctagagacgctggtaaagttgtggattctgaaactgctactat

SEQ ID NO: 86849 - DNA, 80 bp, synthetic construct
  source 1..80: mol_type = other DNA
acttaaagatagagtattgagtaagaaagaagaaattattacagacacagttgatgaaataagtgttgacaaaaaattag

SEQ ID NO: 86850 - DNA, 80 bp, synthetic construct
  source 1..80: mol_type = other DNA
actttgagtctatatgggacacaatcactactgcaaattacatcttagctagatccgttgtaccagatctcaaagaactt

SEQ ID NO: 86851 - DNA, 80 bp, synthetic construct
  source 1..80: mol_type = other DNA
tgcttatacgagatgaaatagttaatatgcttagagaatctgtgaaacatgatgatcacttattacgtgatgccgaacta

SEQ ID NO: 86852 - DNA, 80 bp, synthetic construct
  source 1..80: mol_type = other DNA
aaaagaatatgcatgttatggatgatattgccaataatagatacacaccaaatgtagttcctaaagttgatgtgagtaaa

SEQ ID NO: 86853 - DNA, 80 bp, synthetic construct
  source 1..80: mol_type = other DNA
ccaattccactcggccgccgcgacgtaccaggacgtagaactagaataatatttattttaccatatgaatattttatagc

SEQ ID NO: 86854 - DNA, 80 bp, synthetic construct
  source 1..80: mol_type = other DNA
caaaaaaagctcaatcattaaaaccattatatagtgaatttaaagatgtcatagaaaaagcaagtctattgtcaattttg

SEQ ID NO: 86855 - DNA, 80 bp, synthetic construct
  source 1..80: mol_type = other DNA
aactattatcatacggcgatgtaaccagatatctatcatctaattgcatggttttatacactgatgtttcacaatgggac

SEQ ID NO: 86856 - DNA, 80 bp, synthetic construct
  source 1..80: mol_type = other DNA
tcgtctcagcataacactcaaccttttagaaaaggaataatttcagctttagatttactgttaacaatgacgaacgacga

SEQ ID NO: 86857 - DNA, 80 bp, synthetic construct
  source 1..80: mol_type = other DNA
aaatgttgctaagacgttaaatgtttataaacaaacacagataaacttaatggactcatatgtacaaattcctgacggta

SEQ ID NO: 86858 - DNA, 80 bp, synthetic construct
  source 1..80: mol_type = other DNA
ggctttaattaaaactgttttatcaagacttgcaaatgagtatgcctttaaaacaaaaatcattagagtggacggtgacg

SEQ ID NO: 86859 - DNA, 80 bp, synthetic construct
  source 1..80: mol_type = other DNA
ataattacgcagttctcgaattcagcaaggatgtaaatgaagatatggtcttgaatgtatcgaatgcagttagggagaca

SEQ ID NO: 86860 - DNA, 80 bp, synthetic construct
  source 1..80: mol_type = other DNA
acatattcaaatgataaatacaatgctgtagaaagtaaacttaagaagtatgcaatcagggaaccattagtagccgatgt

SEQ ID NO: 86861 - DNA, 80 bp, synthetic construct
  source 1..80: mol_type = other DNA
tttgatgaggacgattttattatacagtatggaacgtctgatgatgaagtttatcttcagcgagcttttatggcgcttgc

SEQ ID NO: 86862 - DNA, 80 bp, synthetic construct
  source 1..80: mol_type = other DNA
gtcgcagagatcgggaattgccgacgaaatatccgcatcacgcacttttaagacttatgttgagctattatcaaatagat

SEQ ID NO: 86863 - DNA, 80 bp, synthetic construct
  source 1..80: mol_type = other DNA
tacttaaatccaaaaacaatatagtatcaagaggaatcgcacaaacggaaaaagcaaaattgaactcatatgctccaatt

SEQ ID NO: 86864 - DNA, 80 bp, synthetic construct
  source 1..80: mol_type = other DNA
taactattaatgatattctatctgatataaaaccgttttttactagatctgaagcgcagttgttactaaaatatccaaaa

SEQ ID NO: 86865 - DNA, 80 bp, synthetic construct
  source 1..80: mol_type = other DNA
agaaagatattgtattgtatttgatgtcgttaggagtgccacaaattgatgcagacacttacgttggttcaaaaatttat

SEQ ID NO: 86866 - DNA, 80 bp, synthetic construct
  source 1..80: mol_type = other DNA
aaccaagataaatatagaattttagaatcttatgtatataatttattatcaattaattatgggtgctatcagttatttga

SEQ ID NO: 86867 - DNA, 80 bp, synthetic construct
  source 1..80: mol_type = other DNA
ttaattctccagagctcgagtctctaattcgaatgccatttaaaggcaaaataccagcagtgacattcgttttacatttg

SEQ ID NO: 86868 - DNA, 80 bp, synthetic construct
  source 1..80: mol_type = other DNA
taatgcaaatgaactggactatgagaacaataaattgacatcagaattattcactgctgataattacactgatagtttaa

SEQ ID NO: 86869 - DNA, 80 bp, synthetic construct
  source 1..80: mol_type = other DNA
tacgctaaactagaaataattaattacgctattaaatatgggaagtggatcactattttttgtaattaccccaaatcaga

SEQ ID NO: 86870 - DNA, 80 bp, synthetic construct
  source 1..80: mol_type = other DNA
acgaaggtgagtacgggaaaatatataaacgacggttaactctgttccagtatgttgcttctactgttaatcattacggt

SEQ ID NO: 86871 - DNA, 80 bp, synthetic construct
  source 1..80: mol_type = other DNA
gaacatttattactaatgaggaacttgagctcgaattctcaaataaatatgtcaaagcaatagtaccagatcaaaccttg

SEQ ID NO: 86872 - DNA, 80 bp, synthetic construct
  source 1..80: mol_type = other DNA
aaagaattagatgatatgatagtgaccatgcgtaaaactggattaatagatattcctaatatgatcgaaaattggctcat

SEQ ID NO: 86873 - DNA, 80 bp, synthetic construct
  source 1..80: mol_type = other DNA
tgaacgttcactagagaaatttgatttaatggcaaaaatttattcatggtcttttcatgttggtttcagaaagcaaaaaa

SEQ ID NO: 86874 - DNA, 80 bp, synthetic construct
  source 1..80: mol_type = other DNA
atgtctttaactatagacgttgcagatctaccatcaataacttctagttttttcaatgatgaatcgtcaaatacttcgtc

SEQ ID NO: 86875 - DNA, 80 bp, synthetic construct
  source 1..80: mol_type = other DNA
gtgtttcaatggatacatcggttagatcacgaccgagtagtgacactggatgtgatcaaattgacttccacttcgcaaaa

SEQ ID NO: 86876 - DNA, 80 bp, synthetic construct
  source 1..80: mol_type = other DNA
ggattaaaagttaacgctactcttgattcaaacttatcagtcactactcagtccacagttaagagtcaggaatcacgaag

SEQ ID NO: 86877 - DNA, 80 bp, synthetic construct
  source 1..80: mol_type = other DNA
tgctaaagaaaagaaggtccacaaaagtaggaaacactacccaaaaattgaagctgaatccgattcagataactatgttg

SEQ ID NO: 86878 - DNA, 80 bp, synthetic construct
  source 1..80: mol_type = other DNA
gatgaatgcgttaattgtaaatataaaaagaagtactatttattgaaagaacgaatgaaaaaagtcgcaatgcaattgat

SEQ ID NO: 86879 - DNA, 80 bp, synthetic construct
  source 1..80: mol_type = other DNA
atggaaaacttggctgacctcaactacacgcttggagtcatcactatgatgaattcaactttacattcaattatggaaga

SEQ ID NO: 86880 - DNA, 80 bp, synthetic construct
  source 1..80: mol_type = other DNA
ttaagttaatgttgagaatgtcaaaatgttcatacaagacgattaagtttattatggttactacaataaatgcattgtta

SEQ ID NO: 86881 - DNA, 80 bp, synthetic construct
  source 1..80: mol_type = other DNA
cgcttatcaggttcaaaagatcagattacaacaaaggaagaattagagaaagagacggacagaattgtgaaagaaatgag

SEQ ID NO: 86882 - DNA, 80 bp, synthetic construct
  source 1..80: mol_type = other DNA
acaaatgatggaaacgatgaatgtattaactaagagagaattggaacaggttgaactattaaagagattgaatgacaaaa

SEQ ID NO: 86883 - DNA, 80 bp, synthetic construct
  source 1..80: mol_type = other DNA
taggaatcattggaaaggaagaggaaaaagaagaaatagatatgtcatatgagacgaatcaaaaagagagcaaaacaatg

SEQ ID NO: 86884 - DNA, 80 bp, synthetic construct
  source 1..80: mol_type = other DNA
aaaaagagagcaaaacaatggatgattggaaacatggggaaaatccatatgaaccaagggaagtgatgggccaaatgtga

SEQ ID NO: 86885 - DNA, 80 bp, synthetic construct
  source 1..80: mol_type = other DNA
ttcatccattgcttactttccatatattgcttcctttctaacaattgcatttacgctacataaagcgacaatgccatcac

SEQ ID NO: 86886 - DNA, 80 bp, synthetic construct
  source 1..80: mol_type = other DNA
cactaaacggaaaattcggatccgcaatgagaaacagaaattggatgtcaaacgctcaaacagtaagtagacttgacgag

SEQ ID NO: 86887 - DNA, 80 bp, synthetic construct
  source 1..80: mol_type = other DNA
gatggaaacagaaaccattgattggaaacggaagtatgatcaattaagtttgagatttgacgcgctgaagaaaagagtta

SEQ ID NO: 86888 - DNA, 80 bp, synthetic construct
  source 1..80: mol_type = other DNA
atgaaaaatataattcatgggtagaaaaggcgaagaaagtgacggataatatgaagtcaatgcagaatacaattgtacaa

SEQ ID NO: 86889 - DNA, 80 bp, synthetic construct
  source 1..80: mol_type = other DNA
caacaacagtatatatcagaattacaacaatataacattaaaattgaaaaagacattcaatcaaaaattgaaacattaat

SEQ ID NO: 86890 - DNA, 80 bp, synthetic construct
  source 1..80: mol_type = other DNA
cggatctcttgaatggcacgttaggtccatgaatttgcctgatgatgttaaacaagatattgaacagcaattaaattcaa

SEQ ID NO: 86891 - DNA, 80 bp, synthetic construct
  source 1..80: mol_type = other DNA
tagatacaattaatccagttaacgcaattgatgacattgaatccattattcggaacatactcagtgattacaccaacata

SEQ ID NO: 86892 - DNA, 80 bp, synthetic construct
  source 1..80: mol_type = other DNA
ttaatgggagtggaatatgattataatgaggtgtacacgcgagtgaagagcaaatttgattttgtgatggatgattcggg

SEQ ID NO: 86893 - DNA, 80 bp, synthetic construct
  source 1..80: mol_type = other DNA
tactcagtgattacaccaacatatttgacatgttcattgggctagtcaagcgctgcaattatgaaataagttatgaataa

SEQ ID NO: 86894 - DNA, 80 bp, synthetic construct
  source 1..80: mol_type = other DNA
atggctgagctagcctgcttctgttaccctacacaggatcatgatagctataaattttcatcatacacaagacttgccat

SEQ ID NO: 86895 - DNA, 80 bp, synthetic construct
  source 1..80: mol_type = other DNA
caccacaatttaagaaacgattcagtacaagtgaaaactccagaggtatcaattatgattgtcaaatgtttgataaagtt

SEQ ID NO: 86896 - DNA, 80 bp, synthetic construct
  source 1..80: mol_type = other DNA
tcaggtttaatttgttcagtactgaatcaacacaaggtgaacaaaaatgagttacaacaagtgatgtcacgcactgtgtc

SEQ ID NO: 86897 - DNA, 80 bp, synthetic construct
  source 1..80: mol_type = other DNA
cgtaagacatcttgaaaacttggttctaagaatggaaaatgcgcaagacgtattatatcattcgaaggagctgttataca

SEQ ID NO: 86898 - DNA, 80 bp, synthetic construct
  source 1..80: mol_type = other DNA
aagctgtttctattgctattggattaattaaagaacaggaaaccacaatcactgctgaaggaggtgacattgtatttcaa

SEQ ID NO: 86899 - DNA, 80 bp, synthetic construct
  source 1..80: mol_type = other DNA
taaagatggtccagtagctgaacaaagcgtcaaagaactcattgctgagctgagatggcagtataatcgattcgctgcta

SEQ ID NO: 86900 - DNA, 80 bp, synthetic construct
  source 1..80: mol_type = other DNA
aaactaactgcaaattaaacgtcggacatgaatttcatcagatggatcaacgtattgtatggcaaaactggttcgcgttc

SEQ ID NO: 86901 - DNA, 80 bp, synthetic construct
  source 1..80: mol_type = other DNA
aaaatgtatgctgtctgctaaggttgataaatcattatcagaaaagttctacaacactttggtctatggaattgctccgc

SEQ ID NO: 86902 - DNA, 80 bp, synthetic construct
  source 1..80: mol_type = other DNA
acatcgtcaatgatacagggaaatacatcagatgtatgtaagaaactacttttccagaaaatgaaacagaataaaaatga

SEQ ID NO: 86903 - DNA, 80 bp, synthetic construct
  source 1..80: mol_type = other DNA
aaatgaaacagaataaaaatgaattcaaaggattgacagctgagaagaaatttgatgaagtttcaaacgttggagtataa

SEQ ID NO: 86904 - DNA, 80 bp, synthetic construct
  source 1..80: mol_type = other DNA
ggatgattttagaatgaaggaagtttatgatttagttactgaatttctacgtgtattagtaaaatctaacacaaatgtag

SEQ ID NO: 86905 - DNA, 80 bp, synthetic construct
  source 1..80: mol_type = other DNA
gtcattgttcatcaatggaatcaatttatgattacattccatatctgtttaatccgaataggaaagaaaagtataatgag

SEQ ID NO: 86906 - DNA, 80 bp, synthetic construct
  source 1..80: mol_type = other DNA
gctgttagtaaactatttgtgtatctggaacctgttgaaatcaaaggaattgaatatgtattactcaattatccaatgag

SEQ ID NO: 86907 - DNA, 80 bp, synthetic construct
  source 1..80: mol_type = other DNA
tatccaattgcgcaatgtacttaaaatttgtggaccaaatagagtgccatcaataatgtcagagtacacaattggctata

SEQ ID NO: 86908 - DNA, 80 bp, synthetic construct
  source 1..80: mol_type = other DNA
tgattaaattaatcattgctaaatggtttgatgttgaaaacaccagacttcagcccttaacactaactcaaaccaattca

SEQ ID NO: 86909 - DNA, 80 bp, synthetic construct
  source 1..80: mol_type = other DNA
ccaattcattgtatgcacttaaaacattcgataagctcacagatgaatatgcattattaatttcagacgacgaatcctaa

SEQ ID NO: 86910 - DNA, 80 bp, synthetic construct
  source 1..80: mol_type = other DNA
ctaatcttacatactgtaaaggctgttcgttataccatgtatgccaatggtgtgtgcagtataacagatgttttttggat

SEQ ID NO: 86911 - DNA, 80 bp, synthetic construct
  source 1..80: mol_type = other DNA
aatgtagaagtgaatatgacgtacaatggtacaatcaattgctcatgcccataacattgcaagcattaactattaaggtg

SEQ ID NO: 86912 - DNA, 80 bp, synthetic construct
  source 1..80: mol_type = other DNA
gaatatgcaacatattacatttttggatattatgatgatatgacaaaaattaatcaaacacctttctctttcactaattt

SEQ ID NO: 86913 - DNA, 80 bp, synthetic construct
  source 1..80: mol_type = other DNA
ctgtgatgattatgataaattaatcttagattcatacaactttgatcgaatggaacatcttccaatggtattgcagcaag

SEQ ID NO: 86914 - DNA, 80 bp, synthetic construct
  source 1..80: mol_type = other DNA
aatatgcaatgaggtacttcaataaaagtaggtttctgacgcagccggttaaagaaatttgcaagagtaattttactgaa

SEQ ID NO: 86915 - DNA, 80 bp, synthetic construct
  source 1..80: mol_type = other DNA
gagctgtatgagaatagggacataccaacatcacctatcaatgtgactcgtaactgcgttaaagggcattcaaaatggaa

SEQ ID NO: 86916 - DNA, 80 bp, synthetic construct
  source 1..80: mol_type = other DNA
agtgtgtgactggaataaacaatgcatgaaagtgtgggatactgatcattattttaaagaactcgcaactgcttacactg

SEQ ID NO: 86917 - DNA, 80 bp, synthetic construct
  source 1..80: mol_type = other DNA
agcattacgccgtgtcacaaaggtgcttaatcttcatggattataaattacaactgctggtatctaaagttagacctaat

SEQ ID NO: 86918 - DNA, 80 bp, synthetic construct
  source 1..80: mol_type = other DNA
tacatttgctcaaatcatcacaacaaagcgacaaaagtgagaagatgtaggtggtgcacattacagcaaagtacattatg

SEQ ID NO: 86919 - DNA, 80 bp, synthetic construct
  source 1..80: mol_type = other DNA
ttggttgcataaattgaatggcaaatatccagcgctgaacgtcactatgccaaataatgaaaaatttgacaaattgtaca

SEQ ID NO: 86920 - DNA, 80 bp, synthetic construct
  source 1..80: mol_type = other DNA
acaaagcttgtacacaagttatgaatgctaaagaatacatggaggtggcaaactcggcatacactgaacattatagtgtc

SEQ ID NO: 86921 - DNA, 80 bp, synthetic construct
  source 1..80: mol_type = other DNA
ttaccacaacaaaatgaacgtctgcaagaaaaagaaattgaaaatgatacagacgtaaccatggaaaataaaaataaaaa

SEQ ID NO: 86922 - DNA, 80 bp, synthetic construct
  source 1..80: mol_type = other DNA
tgatagaaatgccagattatttattgctaaaagatatggctgtagaaaataaaaactcaagggatgctggtaaagttgta

SEQ ID NO: 86923 - DNA, 80 bp, synthetic construct
  source 1..80: mol_type = other DNA
tttcaaaccgcgtatttagagataagttatttaaaacgttaacaataaatcatgccaaagtagttaatattgggtccgcg

SEQ ID NO: 86924 - DNA, 80 bp, synthetic construct
  source 1..80: mol_type = other DNA
aattggacatttgactttggtctactaggtactacccttttaaatcttgatgctaattatgttgagactgccagaactac

SEQ ID NO: 86925 - DNA, 80 bp, synthetic construct
  source 1..80: mol_type = other DNA
gcacggctggagtagagtctgctgttttgagaggattcctcatcctgggcaaagaagacaagagatacggcccagcattg

SEQ ID NO: 86926 - DNA, 80 bp, synthetic construct
  source 1..80: mol_type = other DNA
aaccacactgcaaccggaaattcagcatcatgctcccataatgggaaaagtagtttttacagaaatctgatatggctgac

SEQ ID NO: 86927 - DNA, 80 bp, synthetic construct
  source 1..80: mol_type = other DNA
tcctacaaaaacgacagagagaaagaagtccttatactatggggtgttcatcacccgtctaacataggggaccaaaggac

SEQ ID NO: 86928 - DNA, 80 bp, synthetic construct
  source 1..80: mol_type = other DNA
gcaaaactggtacgcatttacgtcttcaatgaaacaaggtaatactcttgatgtgtgcaaaaaactactcttccaaaaaa

SEQ ID NO: 86929 - DNA, 80 bp, synthetic construct
  source 1..80: mol_type = other DNA
taaatgttgtttaattatattatataataatattattatatcgagttattgaatttaataactttctaacgagagaagat

SEQ ID NO: 86930 - DNA, 80 bp, synthetic construct
  source 1..80: mol_type = other DNA
aaccaataataatagaaagaaacacaacaaaggttgtatacctgaccaacaccaccatagagaaagaaatatgccccaaa

SEQ ID NO: 86931 - DNA, 80 bp, synthetic construct
  source 1..80: mol_type = other DNA
cttggtaaataccgtagcattacatttcaagaagcacgactacgactcctcccctccaaacaaccaatcaatacgatgtg

SEQ ID NO: 86932 - DNA, 80 bp, synthetic construct
  source 1..80: mol_type = other DNA
acagctgttgacacagaagggactttccactagggactttccagaaggcgggacagtgggcgggattggggagtggccaa

SEQ ID NO: 86933 - DNA, 80 bp, synthetic construct
  source 1..80: mol_type = other DNA
gcaatagtagctttaataatagcagctctactagcaatagttacttggaccatagcatatatagaatataggcaactggt

SEQ ID NO: 86934 - DNA, 80 bp, synthetic construct
  source 1..80: mol_type = other DNA
aagccagtattattttgtgcttcagacgttaacctaacaagcactgagcaacataatatttgggcatcacaagcctgtgt

SEQ ID NO: 86935 - DNA, 80 bp, synthetic construct
  source 1..80: mol_type = other DNA
gaatcaaatgcaacagcacgaacagcacaaacaaatgcaacagcacaatcaactgcaacaacaccaacagtaccatcaga

SEQ ID NO: 86936 - DNA, 80 bp, synthetic construct
  source 1..80: mol_type = other DNA
aatgaaacagtgtgactttaatgtaaccacaattgtcaaagacaaacaggagaaaaaacaggctctattttatgtatcag

SEQ ID NO: 86937 - DNA, 80 bp, synthetic construct
  source 1..80: mol_type = other DNA
agtactcaactaatactaagtggaacactctctaaagaaaagataagaattatgggaaaaagtatttcagattctgggaa

SEQ ID NO: 86938 - DNA, 80 bp, synthetic construct
  source 1..80: mol_type = other DNA
aaatattctagtgaccctaagttctcctgtaaatataacatgtgagagaccatacaatctgacagtacaacagataaaaa

SEQ ID NO: 86939 - DNA, 80 bp, synthetic construct
  source 1..80: mol_type = other DNA
caggcccactggcctggtatagcatgagcctaggggaaggcagcaccagtaactcaaggagagctttttgcctagttaat

SEQ ID NO: 86940 - DNA, 80 bp, synthetic construct
  source 1..80: mol_type = other DNA
accactaattggataaaaaccttaaaacaaacagctgaaaggtatttagaacttgtgaacaacacaaatagaagtgttag

SEQ ID NO: 86941 - DNA, 80 bp, synthetic construct
  source 1..80: mol_type = other DNA
catgatattcaatcataccagtggtggagatctagaggtagcctttttgcattttaactgtcatggagagttcttttatt

SEQ ID NO: 86942 - DNA, 80 bp, synthetic construct
  source 1..80: mol_type = other DNA
gtgacacatctgggatgtttaattatacctttaattgtacaggaaccagctgcgataacaaaactagtactgagaatagt

SEQ ID NO: 86943 - DNA, 80 bp, synthetic construct
  source 1..80: mol_type = other DNA
accacaatattttgcaagataaaacaggtggtaagatcatggatgaggggagcgtcaggactctatgcccctcccattcg

SEQ ID NO: 86944 - DNA, 80 bp, synthetic construct
  source 1..80: mol_type = other DNA
aggtcaactaaaatgtatgtcaaatataactgggatgattctacaaatggataagccatggaacaatactgacgagaatg

SEQ ID NO: 86945 - DNA, 80 bp, synthetic construct
  source 1..80: mol_type = other DNA
ctacatttagaccaggagggggaaatatggaagatatatggagaacacaattgttcaattataaagtagtaagggtaaaa

SEQ ID NO: 86946 - DNA, 80 bp, synthetic construct
  source 1..80: mol_type = other DNA
ccttttagtgtagcacctacaaaaattgcaaggccagtcataggcactggtactcatagaggaaagagagcagtagggtt

SEQ ID NO: 86947 - DNA, 80 bp, synthetic construct
  source 1..80: mol_type = other DNA
atggggatgtaaagggaacctaatctgctacacgtcagtgagatggaacgagacatggaaaggaaataatagtaccatgt

SEQ ID NO: 86948 - DNA, 80 bp, synthetic construct
  source 1..80: mol_type = other DNA
tagaaagcatttgggagaacctcacatggcaagaatgggatcaacagataagcaacataagctccaccatatatgaggaa

SEQ ID NO: 86949 - DNA, 80 bp, synthetic construct
  source 1..80: mol_type = other DNA
atacaaaaggcacaagtacagcaggaacagaatgagaaaaagttactagaattaagtgaatgggcttctatttggaattg

SEQ ID NO: 86950 - DNA, 80 bp, synthetic construct
  source 1..80: mol_type = other DNA
agacaggcccagattggtctcattgcatcaagggttcttgcaactgttgtacacggacctgaggacaataactttgtgga

SEQ ID NO: 86951 - DNA, 80 bp, synthetic construct
  source 1..80: mol_type = other DNA
tctaccacctcttgagcaacttagcatcagggatccagagagtgaccagccttctgggagtgggactgtggattctaggg

SEQ ID NO: 86952 - DNA, 80 bp, synthetic construct
  source 1..80: mol_type = other DNA
cagaagataattaatgcttgcaaactttgtacagctgtaatacagtactggctacaagaattgcagaagagtgctacaag

SEQ ID NO: 86953 - DNA, 80 bp, synthetic construct
  source 1..80: mol_type = other DNA
tagagagaagcatccggagttttataaagactgctgacactgtgggactttccagcgaagactgctgacactgcggggac

SEQ ID NO: 86954 - DNA, 80 bp, synthetic construct
  source 1..80: mol_type = other DNA
tttcttggaaaaacgggcggcccgtcaaccaaaatgaaagtaaaactactggtcctgttatgcacatttacagctacata

SEQ ID NO: 86955 - DNA, 80 bp, synthetic construct
  source 1..80: mol_type = other DNA
ccaaaaaatatccaaaaaattcagaaaaaacaaaaaaaaacagggacaaaagtgatgcaggaaaattggaatcaatggga

SEQ ID NO: 86956 - DNA, 80 bp, synthetic construct
  source 1..80: mol_type = other DNA
catcactaccaatagcaagactttcaaatcgcgtatttagagataagttatttaaaacgttatcagcaaatcatgataaa

SEQ ID NO: 86957 - DNA, 80 bp, synthetic construct
  source 1..80: mol_type = other DNA
agcaggggaatttcacaactagctaaaatggaaataatagcactaatagttatactattagcaacaacaacgagcaatgc

SEQ ID NO: 86958 - DNA, 80 bp, synthetic construct
  source 1..80: mol_type = other DNA
aactgctctttcaatatcagcaccctcctaaaggataaaaaagaaaaagaatatgcacttttccatacacttgacttagt

SEQ ID NO: 86959 - DNA, 80 bp, synthetic construct
  source 1..80: mol_type = other DNA
gatgcatccagactacttcaaggactgctgacagcgagctttctacaaaggactttccgctagagactttccaaggagaa

SEQ ID NO: 86960 - DNA, 80 bp, synthetic construct
  source 1..80: mol_type = other DNA
attctagcaaggattgtagaacttctaagacgcaggaggtaggagatcctcaaatactagtagaacctcctgcaatatta

SEQ ID NO: 86961 - DNA, 80 bp, synthetic construct
  source 1..80: mol_type = other DNA
tactaaggtcagaaactaaagaatagtgctattagcttgttcaacgccaccgccatagcagtagctaagaggacagataa

SEQ ID NO: 86962 - DNA, 80 bp, synthetic construct
  source 1..80: mol_type = other DNA
aattaagaaagcaacttaatacaacaacaatagtctttcagccaccatcaggagaagacccagaaattgtaaggcacagt

SEQ ID NO: 86963 - DNA, 80 bp, synthetic construct
  source 1..80: mol_type = other DNA
caaattacttacagaatcgcagatccagcaaaaaaaaaatgagcacgacttgttaaaattagattcctaggcaagtctgt

SEQ ID NO: 86964 - DNA, 80 bp, synthetic construct
  source 1..80: mol_type = other DNA
catcacagagcccgagagctgtatccggactactacaagaactaaactgctgacatcaagcaagaactgctgacagcgag

SEQ ID NO: 86965 - DNA, 80 bp, synthetic construct
  source 1..80: mol_type = other DNA
gaaattatgatgctcacttttaattgtagagaagaatttttctactgtaattcaacacaactgtttaataagacatagaa

SEQ ID NO: 86966 - DNA, 80 bp, synthetic construct
  source 1..80: mol_type = other DNA
tgatactgaactgtctaataaaacttagaatgttgatagaaataatgctagtgacatcattacactcccatgtaaaataa

SEQ ID NO: 86967 - DNA, 80 bp, synthetic construct
  source 1..80: mol_type = other DNA
accctagcatttcatcacagagcccgagagctgtatccggactactacaagaactaaactgctgacagcaagcaagaact

SEQ ID NO: 86968 - DNA, 80 bp, synthetic construct
  source 1..80: mol_type = other DNA
ggccagctataagagaaagaataaggcgaactgagccagcagcagataaggtaagagcacgagctgaaccagcagcagct

SEQ ID NO: 86969 - DNA, 80 bp, synthetic construct
  source 1..80: mol_type = other DNA
ctctcgacgcaggactcggcttgctgagcgcgcacggcaagaggcgaggggcggcgaaatttttgactagcggaggctag

SEQ ID NO: 86970 - DNA, 80 bp, synthetic construct
  source 1..80: mol_type = other DNA
gacttttggccggttggaaaacttaatactacttagagctttcacagaagagggaacaatcgtgggagaaatctcaccat

SEQ ID NO: 86971 - DNA, 80 bp, synthetic construct
  source 1..80: mol_type = other DNA
ccacacagggaagtggctcgacccgggcccatagagcaacagtttatgttgggagtgccgaattcactccaaagctgggc

SEQ ID NO: 86972 - DNA, 80 bp, synthetic construct
  source 1..80: mol_type = other DNA
aaagttcgatttgaaactgatacagaagatgatcttgtaattcgccaaaacacaaaattcaccccagtcggtgtcatcca

SEQ ID NO: 86973 - DNA, 80 bp, synthetic construct
  source 1..80: mol_type = other DNA
agtcaagtgaacaccaccgagatgaaccccaacaatggaggctcccaaattattcaggtgcaaacacctttaatgtacac

SEQ ID NO: 86974 - DNA, 80 bp, synthetic construct
  source 1..80: mol_type = other DNA
ctagcccctgctgtagcccccaatttccccggtgaacagcttcttttcttcaggtccactctgcccggatgcggtgggca

SEQ ID NO: 86975 - DNA, 80 bp, synthetic construct
  source 1..80: mol_type = other DNA
tcacagtggctcacaccggtcaatatgatttggtcctcccctctaatggttattttaggtttgattcttgggtcaatcaa

SEQ ID NO: 86976 - DNA, 80 bp, synthetic construct
  source 1..80: mol_type = other DNA
aatcctaactgttggagaaatgaccaattcaagattccccgtaaatttggaaagattattcacgggacccagcagtgcca

SEQ ID NO: 86977 - DNA, 80 bp, synthetic construct
  source 1..80: mol_type = other DNA
atgttgttcaaccacaaaatggcaggtgcacgattgatggcgagctcttaggcaccacccaactgtcttctgttaacatt

SEQ ID NO: 86978 - DNA, 80 bp, synthetic construct
  source 1..80: mol_type = other DNA
tttgcaccttcagaggggacgttactcacattgggacaactcaacattggacaatgaatttggcctctccaaattggaac

SEQ ID NO: 86979 - DNA, 80 bp, synthetic construct
  source 1..80: mol_type = other DNA
aattatgacccaacagaagaaactccagcccccctgggaactccagattttgtgggaaagatccatggtatgctcaccca

SEQ ID NO: 86980 - DNA, 80 bp, synthetic construct
  source 1..80: mol_type = other DNA
ccacaaagggagaaggttcgacccggggccatagagctacagtttatgttgggagtgctaactatgctccaaagctaggt

SEQ ID NO: 86981 - DNA, 80 bp, synthetic construct
  source 1..80: mol_type = other DNA
agagttcaatttgaaactgacacaactaatgatcttgatgctcaccaaaacacaaaattcaccccagtcggtgtcgtcca

SEQ ID NO: 86982 - DNA, 80 bp, synthetic construct
  source 1..80: mol_type = other DNA
agggtggtgaatcccccaaaggaagtgaaccccaacaatgggtgctcccaagttattcaggtagagatacccctaatgta

SEQ ID NO: 86983 - DNA, 80 bp, synthetic construct
  source 1..80: mol_type = other DNA
catctagcccctgctgtagcccccactttcccgggtgaacaacttcttttcttcagatccactatacccggatgtggcgg

SEQ ID NO: 86984 - DNA, 80 bp, synthetic construct
  source 1..80: mol_type = other DNA
cgtatctcctagaaacgctccaggtgaaatactatggagcgcgcccttaggtcctgacctgaatccctacctatctcatt

SEQ ID NO: 86985 - DNA, 80 bp, synthetic construct
  source 1..80: mol_type = other DNA
tttgcaccttcagaggggatgtcacccaccctagggactctccaatttacacaatgaatttggcctctccaaattggaac

SEQ ID NO: 86986 - DNA, 80 bp, synthetic construct
  source 1..80: mol_type = other DNA
aaagttcaatttaaaactgaaacagaccatgatctttcaattcgccaaaacacaaaattcaccccagtcggtgtcgtcca

SEQ ID NO: 86987 - DNA, 80 bp, synthetic construct
  source 1..80: mol_type = other DNA
ccacaaagggagaaggttcgacccggggccatagagctacagtttatgttggaggtgccaatttcactccaaagctgggc

SEQ ID NO: 86988 - DNA, 80 bp, synthetic construct
  source 1..80: mol_type = other DNA
ccacaaagggagaaggttcgacccggggccatagagctacagtttatgttgggggtgccaatttcactccaaagctgggc

SEQ ID NO: 86989 - DNA, 80 bp, synthetic construct
  source 1..80: mol_type = other DNA
gaaccaccatccggcggatcgctggaaaattttgctgttttatgaagtggctcggtcaggagtgttcttgtttcctccag

SEQ ID NO: 86990 - DNA, 80 bp, synthetic construct
  source 1..80: mol_type = other DNA
ggcctatgaaggctctgatgttgatactgctgagcctgccaccctagacattacaggctcatacatcgtggatggtcggt

SEQ ID NO: 86991 - DNA, 80 bp, synthetic construct
  source 1..80: mol_type = other DNA
ctctgcaaactgtctatcaagctctcgacctgccagctgacctggtagcgcgcgcagcccgactgtctgctacagttact

SEQ ID NO: 86992 - DNA, 80 bp, synthetic construct
  source 1..80: mol_type = other DNA
gttactgaaacctctggccgtctggattgccaaacaatgatcggcaataagacttttctcactacctttgttgatggggc

SEQ ID NO: 86993 - DNA, 80 bp, synthetic construct
  source 1..80: mol_type = other DNA
ttcgtcctgaggttttttggaatcacccgattcaacgtgttatacataatgagcttgagcagtattgccgtgctcgctcg

SEQ ID NO: 86994 - DNA, 80 bp, synthetic construct
  source 1..80: mol_type = other DNA
acgccttgaggttaacgggcctgagcagcttaacctctcttttgacagccagcagtgtagtatggcggccggcccgtttt

SEQ ID NO: 86995 - DNA, 80 bp, synthetic construct
  source 1..80: mol_type = other DNA
gcctcacctatgctgccgtagatggcgggctggaagttcatttttccaccgctggcctcgagagccgtgttgttttcccc

SEQ ID NO: 86996 - DNA, 80 bp, synthetic construct
  source 1..80: mol_type = other DNA
cctggtaatgccccgactgccccgccgagtgaggtcaccgccttctgctcagctctttataggcacaaccggcagagcca

SEQ ID NO: 86997 - DNA, 80 bp, synthetic construct
  source 1..80: mol_type = other DNA
gcgccagtcggttattggtagtttgtggctgcaccctgaaggtttgctcggcctgttcccgcccttttcacccgggcatg

SEQ ID NO: 86998 - DNA, 80 bp, synthetic construct
  source 1..80: mol_type = other DNA
agtggcggtctgctaacccattttgcggcgagagcacgctctacacccgcacttggtccacaattacagacacaccctta

SEQ ID NO: 86999 - DNA, 80 bp, synthetic construct
  source 1..80: mol_type = other DNA
agagcacgctctacacccgcacttggtccacaattacagacacacccttaactgtcgggctaatttccggtcatttggat

SEQ ID NO: 87000 - DNA, 80 bp, synthetic construct
  source 1..80: mol_type = other DNA
actgtcgggctaatttccggtcatttggatgctgctccccactcgggggggccacctgctactgccacaggccctgctgt

SEQ ID NO: 87001 - DNA, 80 bp, synthetic construct
  source 1..80: mol_type = other DNA
aggctcgtctgactctccagaccctgacccgctacctgatgttacagatggctcacgcccctctggggcccgtccggctg

SEQ ID NO: 87002 - DNA, 80 bp, synthetic construct
  source 1..80: mol_type = other DNA
gccccaacccgaatggcgttccgcagcgccgcttactacacacctaccctgacggcgctaagatctatgtcggctccatt

SEQ ID NO: 87003 - DNA, 80 bp, synthetic construct
  source 1..80: mol_type = other DNA
ggtcgctgccttgagattggagcccacccacgctccattaatgataatcctaatgtcctccatcgctgctttctccaccc

SEQ ID NO: 87004 - DNA, 80 bp, synthetic construct
  source 1..80: mol_type = other DNA
attttgagcacaccggtctgattccagcaatacggccggagttggtcccgacttcatggtggcatgtcacccaccgttgc

SEQ ID NO: 87005 - DNA, 80 bp, synthetic construct
  source 1..80: mol_type = other DNA
gtcacaccgatgtccgcgcctcccttgcgcgctttattcccactctcgggcgggttactgccaccacctgtgaactcttt

SEQ ID NO: 87006 - DNA, 80 bp, synthetic construct
  source 1..80: mol_type = other DNA
ttttaccacaagctgtgttctacggggatgcttatgacgactcagtattctctgctgccgtggctggcgccagccatgcc

SEQ ID NO: 87007 - DNA, 80 bp, synthetic construct
  source 1..80: mol_type = other DNA
atggtgtttgaaaatgatttttctgagtttgactcgactcagaataacttttccctaggtcttgagtgcgccattatgga

SEQ ID NO: 87008 - DNA, 80 bp, synthetic construct
  source 1..80: mol_type = other DNA
cgtcaactggcccggtttatatctcggacagcgtgactttggtgaatgttgcgactggcgcgcaggccgtagcccgatcg

SEQ ID NO: 87009 - DNA, 80 bp, synthetic construct
  source 1..80: mol_type = other DNA
cttgactggtccaaagtcaccctcgacgggcggcccctcccgactgttgagcaatattccaagacattctttgtgctccc

SEQ ID NO: 87010 - DNA, 80 bp, synthetic construct
  source 1..80: mol_type = other DNA
ccatttctgcggccgcggttttggctccacgctccgccctggctctgctggaggatacttttgattatccggctcgggcg

SEQ ID NO: 87011 - DNA, 80 bp, synthetic construct
  source 1..80: mol_type = other DNA
cacacatttgatgacttctgccctgaatgccgcgctttaggcctccagggttgtgctttccagtcaactgtcgctgagct

SEQ ID NO: 87012 - DNA, 80 bp, synthetic construct
  source 1..80: mol_type = other DNA
aaagttaaggtgggtaaaactcgggagttgtagtttatttggctgtgcccacctacttatatctgctgatttcctttatt

SEQ ID NO: 87013 - DNA, 80 bp, synthetic construct
  source 1..80: mol_type = other DNA
aaactcgggagttgtagtttatttggctgtgcccacctacttatatctgctgatttcctttatttcctttttctgcgtcc

SEQ ID NO: 87014 - DNA, 80 bp, synthetic construct
  source 1..80: mol_type = other DNA
ttctcaataaagcttgccttgagtgagaagcagtgtgtgctcatctgttcaaccctggtgtctagagatccctcagatca

SEQ ID NO: 87015 - DNA, 80 bp, synthetic construct
  source 1..80: mol_type = other DNA
acagcccagcaagatttgaagggaggatacacatcagtgtttatgcaaagagggaaaaacccaattaggaaagggcctat

SEQ ID NO: 87016 - DNA, 80 bp, synthetic construct
  source 1..80: mol_type = other DNA
ggcaatggacttatcagatatatcaggaagagcataagaacctcaaaacagggaaatatactagacaaaaggcctcccac

SEQ ID NO: 87017 - DNA, 80 bp, synthetic construct
  source 1..80: mol_type = other DNA
acaaatgatataagacagttagcagaagtaatccagaaggtggctcaagaagccatagttatctggggaaaattgcctaa

SEQ ID NO: 87018 - DNA, 80 bp, synthetic construct
  source 1..80: mol_type = other DNA
acaaaactaggaaaagcaggatatgttacagaacaaggaaagcagaaaataataaaattagaagagaccaccaatcaaaa

SEQ ID NO: 87019 - DNA, 80 bp, synthetic construct
  source 1..80: mol_type = other DNA
tgggcatcatctcctcacagcccacacagagtgactcccctatagtccagcagataatagaggaactaacaaaaaaggaa

SEQ ID NO: 87020 - DNA, 80 bp, synthetic construct
  source 1..80: mol_type = other DNA
tctgggaaagccagagaatggtggtacagacaccattttgaatccagaaacccaagattcagttcaggtgtatatattcc

SEQ ID NO: 87021 - DNA, 80 bp, synthetic construct
  source 1..80: mol_type = other DNA
ttgaatccagaaacccaagattcagttcaggtgtatatattccagtagggggacctggggggccttggatagtggtgtcc

SEQ ID NO: 87022 - DNA, 80 bp, synthetic construct
  source 1..80: mol_type = other DNA
agtagggggacctggggggccttggatagtggtgtccacatactggggattgatgccaggggaaaaagatgaacatttgg

SEQ ID NO: 87023 - DNA, 80 bp, synthetic construct
  source 1..80: mol_type = other DNA
ggcatggagttagtatagaatggcagtacaagaaatatgcaacacagattgaccctgaaacagcagacagaataatacat

SEQ ID NO: 87024 - DNA, 80 bp, synthetic construct
  source 1..80: mol_type = other DNA
acacactattttacctgttttacagagtcagcaatcaggagagccatcctagggcaaaaagtactgccccagtgtgaatt

SEQ ID NO: 87025 - DNA, 80 bp, synthetic construct
  source 1..80: mol_type = other DNA
ctctgcaggacatagtcaggtagggacactgcaactactagctctaagagcagtagtaaaaacaaaaagaaataagcctc

SEQ ID NO: 87026 - DNA, 80 bp, synthetic construct
  source 1..80: mol_type = other DNA
ccctacccagtgtccagaaattaacagaagataaatggaacaggcacctgaggaccaaggaccagctagagagcctttca

SEQ ID NO: 87027 - DNA, 80 bp, synthetic construct
  source 1..80: mol_type = other DNA
attaacaccatgctaaatgccataggaggacatcaaggggctttgcaagtactaaaagaagtaatcaatgaggaagcagc

SEQ ID NO: 87028 - DNA, 80 bp, synthetic construct
  source 1..80: mol_type = other DNA
ttactgttagcaatagtactgctagcattaatggcacccaagatgatacctcatatgaggactacaaggaaataaaaaat

SEQ ID NO: 87029 - DNA, 80 bp, synthetic construct
  source 1..80: mol_type = other DNA
agggcctgctcttcttcaactgggggttcatctttctatagaaacctcctatggataataaagaacaaatcggcatcata

SEQ ID NO: 87030 - DNA, 80 bp, synthetic construct
  source 1..80: mol_type = other DNA
cccagtgattaaaggagcttacaacaacaccggaaaccagccaattatttatttttggggtgtgcatcatcctcctgacg

SEQ ID NO: 87031 - DNA, 80 bp, synthetic construct
  source 1..80: mol_type = other DNA
ggttggattacggctaactccaaatctcaggtgaatagacaagtcatagttgacaataacaactggtctggctattctgg

SEQ ID NO: 87032 - DNA, 80 bp, synthetic construct
  source 1..80: mol_type = other DNA
ttcaggtacctacggaacaggctcatggcctgatggggcgaacatcaacttcatgcctatataagctttcgcaattttag

SEQ ID NO: 87033 - DNA, 80 bp, synthetic construct
  source 1..80: mol_type = other DNA
caatattagaatacaggaactggtcaaaaccacaatgccaaatcacagggtttgctcctttctccaaggacaactcaatc

SEQ ID NO: 87034 - DNA, 80 bp, synthetic construct
  source 1..80: mol_type = other DNA
gaacgaattgggcatcccgttccacttgggaaccaaacaggtgtgcatcgcttggtccagctcaagctgtcatgatggga

SEQ ID NO: 87035 - DNA, 80 bp, synthetic construct
  source 1..80: mol_type = other DNA
ctggggatgacagaaatgcaactgctagtttcatttacaatggagtgcttgttgatagtgtcggttcatggtctcaaaac

SEQ ID NO: 87036 - DNA, 80 bp, synthetic construct
  source 1..80: mol_type = other DNA
tgtgtttgcagagacaattggaaaggctccaataggcccattatagacattaatatggcaaattatagcattaattctag

SEQ ID NO: 87037 - DNA, 80 bp, synthetic construct
  source 1..80: mol_type = other DNA
cctagcaacgactgtaacgttgcattttaagcagaatggatacagtatcccctcaaacaatcaagcagtgccctgcgagc

SEQ ID NO: 87038 - DNA, 80 bp, synthetic construct
  source 1..80: mol_type = other DNA
ccagtcataatagagaagaacataacaaaaatagtgtatttgaataataccataatagaaaaagaattttgccccaaggc

SEQ ID NO: 87039 - DNA, 80 bp, synthetic construct
  source 1..80: mol_type = other DNA
ttttcaaatcgaatctaccagtagaggactgtcatgccatatgccaaactgctgcaggagtcttaagggtcaataaaaga

SEQ ID NO: 87040 - DNA, 80 bp, synthetic construct
  source 1..80: mol_type = other DNA
tttcagaatgtaagccccctatggataggagaatgccctaaatatgtgaaaagtaaaagtctgaggcttgcaaccggacc

SEQ ID NO: 87041 - DNA, 80 bp, synthetic construct
  source 1..80: mol_type = other DNA
ttcatggtctaaaaatatcctcagaactcaggagtcagagtgtgtttgcatcaatggaacttgtgcggtaataatgactg

SEQ ID NO: 87042 - DNA, 80 bp, synthetic construct
  source 1..80: mol_type = other DNA
cttattaagtgagaactgggctaacaccctagtattcgatcttaatgagcatgtagctatgtcaagctgcttagacttca

SEQ ID NO: 87043 - DNA, 80 bp, synthetic construct
  source 1..80: mol_type = other DNA
taatacatatcaagctcgatgtggaacaataatcgcaagaaaccttgatactatccggctctcatctcaactaatgcgaa

SEQ ID NO: 87044 - DNA, 80 bp, synthetic construct
  source 1..80: mol_type = other DNA
acccagatgagggcactgctggggttgaatctgccgtactaaggggttttctgatcttgggaaaggaagacagaagatac

SEQ ID NO: 87045 - DNA, 80 bp, synthetic construct
  source 1..80: mol_type = other DNA
ttgaaaaaggatacactgccagacggagattatgacgtacgagagtattttttaaatttatatgatcaaatattgataga

SEQ ID NO: 87046 - DNA, 80 bp, synthetic construct
  source 1..80: mol_type = other DNA
ttgatttaattaatcccattaatgctatagacgatattgaatcgttaattcgtaatttaatatctgattatgataaaatt

SEQ ID NO: 87047 - DNA, 80 bp, synthetic construct
  source 1..80: mol_type = other DNA
tttattatgtttaaaggattgttgtagcaatatgaatatgcatatgtatatcactaaattaaagatattaaccatctaca

SEQ ID NO: 87048 - DNA, 80 bp, synthetic construct
  source 1..80: mol_type = other DNA
caacaagctcatatcaatgaattacaaatgtataataataaactagagcgtgatttacaaggcaaatttagttcattagt

SEQ ID NO: 87049 - DNA, 80 bp, synthetic construct
  source 1..80: mol_type = other DNA
cgttttattaccggatcccgggaattcggtaatacgactcactataggatcccgggaattcggtaatacgactcactata

SEQ ID NO: 87050 - DNA, 80 bp, synthetic construct
  source 1..80: mol_type = other DNA
ggatcccgggaattcggtaatacgactcactatatttttatagtgagtcgtattaccgaattcccggtattatataatat

SEQ ID NO: 87051 - DNA, 80 bp, synthetic construct
  source 1..80: mol_type = other DNA
accatcaatgccatactggctagaatagctgccgctagatctctcctgcacaaggccaaagaagagatgttcggcaggat

SEQ ID NO: 87052 - DNA, 80 bp, synthetic construct
  source 1..80: mol_type = other DNA
cagaccagtggttgtcatgatctcaggcagacctggcgttggcaaaacccatatggcaaggcatttggctaaaaacatcg

SEQ ID NO: 87053 - DNA, 80 bp, synthetic construct
  source 1..80: mol_type = other DNA
ctaagggtactaaagcacccaacagtgaccagcactgtccaacagtcaagatcgggcccaaaacactaacagtcccccct

SEQ ID NO: 87054 - DNA, 80 bp, synthetic construct
  source 1..80: mol_type = other DNA
ctaaattgtgataggatcgagaacaaggggaaaatgttcgacagtgatgtcatcataatcacgaccaatctagtcaaccc

SEQ ID NO: 87055 - DNA, 80 bp, synthetic construct
  source 1..80: mol_type = other DNA
accgtacagtttgatgcgaggtctgaaaccgtaactgggctaccggacttgacaacagtacaaaatgaacacgaaaacac

SEQ ID NO: 87056 - DNA, 80 bp, synthetic construct
  source 1..80: mol_type = other DNA
gggtttcatctaatctcctgatcacaacaacacacgtcctgcccaagggggtcaaggaactctttggggttgaagtcaaa

SEQ ID NO: 87057 - DNA, 80 bp, synthetic construct
  source 1..80: mol_type = other DNA
gggtttcatctaatctcctgatcacaacaacacacgtcctgcccaaggtggtcaaggaactctttggggttgaagtcaaa

SEQ ID NO: 87058 - DNA, 80 bp, synthetic construct
  source 1..80: mol_type = other DNA
cacaaaaaccaaattttggcgctcatcaccagatgccctacctcctggtacatacgaacctgcttacctggggggtaggg

SEQ ID NO: 87059 - DNA, 80 bp, synthetic construct
  source 1..80: mol_type = other DNA
cacaaaaaccaaattttggcgctcatcaccagatgccctacctcctggtacatacgaacctgcttacctgggaggtaggg

SEQ ID NO: 87060 - DNA, 80 bp, synthetic construct
  source 1..80: mol_type = other DNA
actggaatggggagtcttttactggtccccttgcggaccaagcatccaaagccaacctcatgtatgaacaggcaaagcat

SEQ ID NO: 87061 - DNA, 80 bp, synthetic construct
  source 1..80: mol_type = other DNA
caaagagatgttacaatcacaggttttggcaaccaaacaactgcagcaggaaatgatgaacataaggcaaggggtgttga

SEQ ID NO: 87062 - DNA, 80 bp, synthetic construct
  source 1..80: mol_type = other DNA
gtacagctccgaagagttttaactacagctacaataacacttttaccggatgcagaaagattcagttttccaagagtaat

SEQ ID NO: 87063 - DNA, 80 bp, synthetic construct
  source 1..80: mol_type = other DNA
cggcggatgcaccaaagtggtttccaggtgataattcagcaaaattcaggcggtttattgttccattacataatggactt

SEQ ID NO: 87064 - DNA, 80 bp, synthetic construct
  source 1..80: mol_type = other DNA
atggatacttatgagccacatgttaaagagtttttagaattctttccggttacaaggaaacttaaataagtgttcatcat

SEQ ID NO: 87065 - DNA, 80 bp, synthetic construct
  source 1..80: mol_type = other DNA
ataagtgttcatcattatttggtgtggcgatgtctttgttattaaggagacctgacaagcttactagctagaggggagaa

SEQ ID NO: 87066 - DNA, 80 bp, synthetic construct
  source 1..80: mol_type = other DNA
acaagtgctcatcattgtttggtgtggcaatgtctctattatcaaagaaatctgacaaggtatcagactagacgccagta

SEQ ID NO: 87067 - DNA, 80 bp, synthetic construct
  source 1..80: mol_type = other DNA
agtgttcatcattatttggtgtggcgatgtctttgttattaaggagacctgacaaggcttactgagctaggacccttagg

SEQ ID NO: 87068 - DNA, 80 bp, synthetic construct
  source 1..80: mol_type = other DNA
acaggctgtaccgcctgtggtgcttatcttgataaactaagatcagttggaaaagtctttaagatagtatctttaagata

SEQ ID NO: 87069 - DNA, 80 bp, synthetic construct
  source 1..80: mol_type = other DNA
accaaatggtcacctggtgataattctgctaaattccggcgatttacccagtcactatatgatggtctgcgcgatgataa

SEQ ID NO: 87070 - DNA, 80 bp, synthetic construct
  source 1..80: mol_type = other DNA
acaaaatggtcacctggtgataattcagctaagttccggaggttcacccaatcattatatgatggattacgtgatgataa

SEQ ID NO: 87071 - DNA, 80 bp, synthetic construct
  source 1..80: mol_type = other DNA
agtaagaatgacaagcttaaactatttagagacttttgcgggataggtaaacataaacagttcaagaataagatgctgga

SEQ ID NO: 87072 - DNA, 80 bp, synthetic construct
  source 1..80: mol_type = other DNA
ggacgttgaattatcaaaaccaaaaatattggactttaatgacgaaaatatttacttggcaagtctgacaatgattgagc

SEQ ID NO: 87073 - DNA, 80 bp, synthetic construct
  source 1..80: mol_type = other DNA
tgagaatcccactgttaggctagacgatataatgactttttccttgtttactagcttatctataacaaaaagtgtactat

SEQ ID NO: 87074 - DNA, 80 bp, synthetic construct
  source 1..80: mol_type = other DNA
aaagcaaaaaaagaccttagaaatagaaagcagaaagaggagattggcaaatcccctttttgtttcagatgaagaggtcg

SEQ ID NO: 87075 - DNA, 80 bp, synthetic construct
  source 1..80: mol_type = other DNA
gcttagaggtgggacattgcaattataatatgctaagagaagcaatgccagaatatagggattatatctcaactaaagta

SEQ ID NO: 87076 - DNA, 80 bp, synthetic construct
  source 1..80: mol_type = other DNA
tagattgtatgaaatgctagatacagatcaaatctccgataaaccagcaatagaattgattatggatatgatggttaatc

SEQ ID NO: 87077 - DNA, 80 bp, synthetic construct
  source 1..80: mol_type = other DNA
tagagaaattgatgaggcaattgaagccttagcagcagataattttgaaggaaacatatccaaaattgaaaaattggccc

SEQ ID NO: 87078 - DNA, 80 bp, synthetic construct
  source 1..80: mol_type = other DNA
accgaatcttaatgaaagacttaaatagtctgccactaacaaatgatgacatacaagtggtttattcatatataatactc

SEQ ID NO: 87079 - DNA, 80 bp, synthetic construct
  source 1..80: mol_type = other DNA
aatgacccactaatgataacaattgcaaacacccaaatattgtccatttatggtagccctcaaaaaagaactgggatgtc

SEQ ID NO: 87080 - DNA, 80 bp, synthetic construct
  source 1..80: mol_type = other DNA
gttcaactatgcctgaattccggaatttaaaattaatacatcattcaccagcactagtacttagagcgtatagtaaggat

SEQ ID NO: 87081 - DNA, 80 bp, synthetic construct
  source 1..80: mol_type = other DNA
cttaaagacaaaaatggaaaaaagaatattggataatgaattggaaaaaggggctagagatatagtcttcgaattaaagg

SEQ ID NO: 87082 - DNA, 80 bp, synthetic construct
  source 1..80: mol_type = other DNA
atttcaccctaacagccccatggtgcaagacaggatgtccagaagtctggcaccacccaatatataaagaatttaaattg

SEQ ID NO: 87083 - DNA, 80 bp, synthetic construct
  source 1..80: mol_type = other DNA
aacaattataattagaaataaattgattagttttgagttgattggctatttccaaattgctaaaattagcagcttatagt

SEQ ID NO: 87084 - DNA, 80 bp, synthetic construct
  source 1..80: mol_type = other DNA
tgattggctatttccaaattgctaaaattagcagcttatagtacattatagtatatatttgtaaataggagcacactact

SEQ ID NO: 87085 - DNA, 80 bp, synthetic construct
  source 1..80: mol_type = other DNA
aacgaaggctgtttgaagagtccatgagattcaactcatatgaatctgaacgctggaatacgaacttaataaaaatcaga

SEQ ID NO: 87086 - DNA, 80 bp, synthetic construct
  source 1..80: mol_type = other DNA
gaatatacaaagcaagaatataataactttgtaacaagatcagcaaaagaggtcttcttagcaacagggaattataagca

SEQ ID NO: 87087 - DNA, 80 bp, synthetic construct
  source 1..80: mol_type = other DNA
ccttcaaaaagataccttcggccttttgttatcctgtggaagaggccccgccagttctctctcccagtttccattgccca

SEQ ID NO: 87088 - DNA, 80 bp, synthetic construct
  source 1..80: mol_type = other DNA
aggtttgatgaggagctgagaactgcagccctgaacaccatctggggaagagattggccagccattggtgaccccccgaa

SEQ ID NO: 87089 - DNA, 80 bp, synthetic construct
  source 1..80: mol_type = other DNA
gagaaacatccggagtactaccaaggctgagactgctgagactgctaacacagagattgctgacacagaagaatctagag

SEQ ID NO: 87090 - DNA, 80 bp, synthetic construct
  source 1..80: mol_type = other DNA
agactgctaacacagagattgctgacacagaagaatctagagggactttccgctggggactttccagagggcgggccaga

SEQ ID NO: 87091 - DNA, 80 bp, synthetic construct
  source 1..80: mol_type = other DNA
ttttagactgctgacacagacgggactttccactggggcgttccggaggagtggtctgggcggtactggggagtggccag

SEQ ID NO: 87092 - DNA, 80 bp, synthetic construct
  source 1..80: mol_type = other DNA
ctttccattgctgacacagctgggactttccactggggcgttccaggaggagtggtctgggcgggactgggagtggtcag

SEQ ID NO: 87093 - DNA, 80 bp, synthetic construct
  source 1..80: mol_type = other DNA
gagaaattgctctttcaatgcatccacagaaataaggggtaaaaaacatagaacgtatgcacttttttataaattagaca

SEQ ID NO: 87094 - DNA, 80 bp, synthetic construct
  source 1..80: mol_type = other DNA
gtaaacacaggaataaaaggtaagaaaaagaatgaatctgcactcttttatacacttgatatagtaaaaattgatgggaa

SEQ ID NO: 87095 - DNA, 80 bp, synthetic construct
  source 1..80: mol_type = other DNA
acacaggagggactttccgctgggactttccactggggcgttctgggaggtgtggtctgggcgggactgggagtggtcaa

SEQ ID NO: 87096 - DNA, 80 bp, synthetic construct
  source 1..80: mol_type = other DNA
tcacagtatggtccattgttgtctactccgaaactgtatgccgtaatgaagtatggtggtagaattcatacatatagtgg

SEQ ID NO: 87097 - DNA, 80 bp, synthetic construct
  source 1..80: mol_type = other DNA
agcgaaagcaggggtttaaaatgaatccaaaccagaaaataataaccattgggtcagtatcattgggattggttattctt

SEQ ID NO: 87098 - DNA, 80 bp, synthetic construct
  source 1..80: mol_type = other DNA
aatcagggatatggagtaaagggttttggattcagacaaggaaatgatgtgtggataggaagaaccattagtcggacagc

SEQ ID NO: 87099 - DNA, 80 bp, synthetic construct
  source 1..80: mol_type = other DNA
aagatccggatttgagattctgaaggtcaaaaatggctggatacaaaacagtaaagaacaaatcaaaaaacaggtggtga

SEQ ID NO: 87100 - DNA, 80 bp, synthetic construct
  source 1..80: mol_type = other DNA
ttgacaattcaaattggtcaggatatagtggctcgtttacattaccaattgaattgacaagaagagactgtctggttccc

SEQ ID NO: 87101 - DNA, 80 bp, synthetic construct
  source 1..80: mol_type = other DNA
tgtttttgggttgagatgatcagaggaaagccagaagagaatacaatatggacctctagcagctctgttgtgatgtgtgg

SEQ ID NO: 87102 - DNA, 80 bp, synthetic construct
  source 1..80: mol_type = other DNA
agtagaccatgaggttgccgattggtcatggcacgatggagctattcttccttttgacatcgataagatgtgatttatga

SEQ ID NO: 87103 - DNA, 80 bp, synthetic construct
  source 1..80: mol_type = other DNA
ttggtcatggcacgatggagctattcttccttttgacatcgataagatgtgatttatgaaaaaaactccttgtttctact

SEQ ID NO: 87104 - DNA, 80 bp, synthetic construct
  source 1..80: mol_type = other DNA
aacaatcctaaaggaatacaatgaaacagtgagaattgaaagggtggtacagtggcacaacagcagcattattgaatatg

SEQ ID NO: 87105 - DNA, 80 bp, synthetic construct
  source 1..80: mol_type = other DNA
tagatcgaccaaaaaatctcccctttatgaacaatacagagccattgtgcaatgtcaaaggctttgcacctttttctaaa

SEQ ID NO: 87106 - DNA, 80 bp, synthetic construct
  source 1..80: mol_type = other DNA
gataatggaataagaattgggtcaaggggtcatatatttgttatcagggaaccgtttgtctcctgttctcctagcgaatg

SEQ ID NO: 87107 - DNA, 80 bp, synthetic construct
  source 1..80: mol_type = other DNA
cagaacattctttctcacacaaggctctctacttaacgacaaacactccaatggaacagtgaaagaccggagcccttata

SEQ ID NO: 87108 - DNA, 80 bp, synthetic construct
  source 1..80: mol_type = other DNA
gaacactaatgagcgtagaaataggacagtctcctaatgtgtatcagtcaaggttcgaggctgtagcttggtcagcaact

SEQ ID NO: 87109 - DNA, 80 bp, synthetic construct
  source 1..80: mol_type = other DNA
gcatgtcatgatgggaagaaatggatgacaattggagttacagggccagatgcagaagccgtagcagtagtccattatgg

SEQ ID NO: 87110 - DNA, 80 bp, synthetic construct
  source 1..80: mol_type = other DNA
ggggattccaactgatgtggttaattcctgggctggtaatatattaaggactcaagaatcatcttgcacatgcatccaag

SEQ ID NO: 87111 - DNA, 80 bp, synthetic construct
  source 1..80: mol_type = other DNA
gtgattgttactgggtgatgacagacgggccagcaaacaatcaagcacagtacaaaatatttaaagctaatcaggggaaa

SEQ ID NO: 87112 - DNA, 80 bp, synthetic construct
  source 1..80: mol_type = other DNA
aacatccttctgcatatagtcagcatcacaataacagtattagttttcccgaggaaaacaaatgatgaactctgcaacgg

SEQ ID NO: 87113 - DNA, 80 bp, synthetic construct
  source 1..80: mol_type = other DNA
gtaatagatcaagctgaaattaagtttgatggaggtcatattgaggaatgctcatgctatcccaatgaggggaaagtgga

SEQ ID NO: 87114 - DNA, 80 bp, synthetic construct
  source 1..80: mol_type = other DNA
atgtgtgtgtagagacaattggactgggacaaatagaccagttttagtgatatctacagatctatcctatcaggttgggt

SEQ ID NO: 87115 - DNA, 80 bp, synthetic construct
  source 1..80: mol_type = other DNA
atctttgtgcaggtctccctagtgacactccaaggggagaggacaatcaatttataggttcatgcattaaccccagtggg

SEQ ID NO: 87116 - DNA, 80 bp, synthetic construct
  source 1..80: mol_type = other DNA
agcaaaagcaggagtttcataatgaatccgaaccaaaagatcataaccatcggtagtgtcagcattgtactaacaacagt

SEQ ID NO: 87117 - DNA, 80 bp, synthetic construct
  source 1..80: mol_type = other DNA
tgggaagggaagatacggggtaaaaggttttagctttaggtatgtggatggagtctggatagggagaacgaaaagcttgg

SEQ ID NO: 87118 - DNA, 80 bp, synthetic construct
  source 1..80: mol_type = other DNA
aatccaggagcggattcgaaatgatttgggacgcaaatgggtgggtatcaacagataaggactcaaatggtgtacaggac

SEQ ID NO: 87119 - DNA, 80 bp, synthetic construct
  source 1..80: mol_type = other DNA
attatagacaatgacaactggtctggatatagtgggagtttcagcattaggggagaaacaactggtaggaattgcactgt

SEQ ID NO: 87120 - DNA, 80 bp, synthetic construct
  source 1..80: mol_type = other DNA
accgtgcttttgggttgagatgataagggggcagcctaaggagaaaaccatatggactagcggtagtagtattgcatttt

SEQ ID NO: 87121 - DNA, 80 bp, synthetic construct
  source 1..80: mol_type = other DNA
cctgttcgaacaacacaacaaactattacaatgagacttttgtaaatgtcacaaatgtgcagaacaattataccactata

SEQ ID NO: 87122 - DNA, 80 bp, synthetic construct
  source 1..80: mol_type = other DNA
actgagccctcaagcccccagataattcactattcaagtgggaaaggcctatgcccagtgaaaggatgggcacctttgag

SEQ ID NO: 87123 - DNA, 80 bp, synthetic construct
  source 1..80: mol_type = other DNA
caaagacaacggaatcagaattggatccaggggcgaggtatttgtcattcgggagcctttcatatcgtgttccattaatg

SEQ ID NO: 87124 - DNA, 80 bp, synthetic construct
  source 1..80: mol_type = other DNA
aatgcagaacatttttcttgactcaaggtgctctcctcaatgataagcactcgaatgggacagtaaaagacagaagtccc

SEQ ID NO: 87125 - DNA, 80 bp, synthetic construct
  source 1..80: mol_type = other DNA
tttcgcacactaatgagttgccccattggggttgctccttcccctagcaacagtcgatttgaatctgtagcttggtctgc

SEQ ID NO: 87126 - DNA, 80 bp, synthetic construct
  source 1..80: mol_type = other DNA
cactgcatgcagcgacgggcccggttggttgacattaggaatcactggcccagattctactgctgttgcagtaataaaat

SEQ ID NO: 87127 - DNA, 80 bp, synthetic construct
  source 1..80: mol_type = other DNA
acaatggtatcatcaccgacacattaaagagctggaagggcaacattatgcgaacacaagagtccgaatgtgtgtgtcag

SEQ ID NO: 87128 - DNA, 80 bp, synthetic construct
  source 1..80: mol_type = other DNA
gatgagttttgttacactttaattacggatgggccgtctgatgcacaggctttctacaagatattaaagataaggaaagg

SEQ ID NO: 87129 - DNA, 80 bp, synthetic construct
  source 1..80: mol_type = other DNA
aggattgctcctccaaataacaagcttgtgctcaatatggttcagccattataaccaggtaactcaaacaagcgaacaac

SEQ ID NO: 87130 - DNA, 80 bp, synthetic construct
  source 1..80: mol_type = other DNA
gaaaatagtgagtgtgaaagatgtagatgcaacaggatttcactttgaggagtgctcctgttacccaagtggagaaaatg

SEQ ID NO: 87131 - DNA, 80 bp, synthetic construct
  source 1..80: mol_type = other DNA
tcgaatgtgtgtgtagagacaattggagagggagtaatagaccgtggatacgattcaacagtgatcttgattatcaaatt

SEQ ID NO: 87132 - DNA, 80 bp, synthetic construct
  source 1..80: mol_type = other DNA
ggctatatatgtagtggagtgtttggagacaatcccaggccagtggatggcacaggatcatgcaatggcccaatcaacaa

SEQ ID NO: 87133 - DNA, 80 bp, synthetic construct
  source 1..80: mol_type = other DNA
agcaaaagcagggtgacaaagacataatggattccaacacgataacctcgtttcaggtagattgttatctatggcacata

SEQ ID NO: 87134 - DNA, 80 bp, synthetic construct
  source 1..80: mol_type = other DNA
tactgtcattgaaaaggaaatttgtcctacagcgataggatacaggaattggtcaaaaccacaatgtcagattgcagggt

SEQ ID NO: 87135 - DNA, 80 bp, synthetic construct
  source 1..80: mol_type = other DNA
ggtcaaggatacggtgtaaaaggttttgggttcagacagggaaatgatgtatggatggggaggacaattagtcgtacctc

SEQ ID NO: 87136 - DNA, 80 bp, synthetic construct
  source 1..80: mol_type = other DNA
taggtcaggatttgaggtaataagagtaaagaatggctggacacagacaagtaaagaacagattagaaaacaagtagttg

SEQ ID NO: 87137 - DNA, 80 bp, synthetic construct
  source 1..80: mol_type = other DNA
ttgacaatttgaattggtcgggttacagtgggtcttttaccctaccaacagagttatctgggaaaagctgtttggttcca

SEQ ID NO: 87138 - DNA, 80 bp, synthetic construct
  source 1..80: mol_type = other DNA
tgtttttgggtagaaacgatcagaggtaaaccggaggagagaacaatctggacctctagcagctccattgtgatgtgtgg

SEQ ID NO: 87139 - DNA, 80 bp, synthetic construct
  source 1..80: mol_type = other DNA
agttgattatgaaatcgccgattggtcgtggcacgatggagctattcttccttttgacatcgataagatgtaatttacga

SEQ ID NO: 87140 - DNA, 80 bp, synthetic construct
  source 1..80: mol_type = other DNA
gacggtagtgaaggaatacaatgagacagtcagagtagaaaaggtgatccaatggcataacactagcgtagttgaataca

SEQ ID NO: 87141 - DNA, 80 bp, synthetic construct
  source 1..80: mol_type = other DNA
taccacatttaagtggagacacttacacaaacaatactgaagcagtatgtgacgtcaagggctttgcccctttctcaaag

SEQ ID NO: 87142 - DNA, 80 bp, synthetic construct
  source 1..80: mol_type = other DNA
gacaatggaataagaattggttctaggggacatgtttttgttataagggaaccctttgtctcctgttcgcccagggagtg

SEQ ID NO: 87143 - DNA, 80 bp, synthetic construct
  source 1..80: mol_type = other DNA
gaactcttatgagcgttgaagtaggtcaatcacccaatgtataccaagccaagtttgaagctgtagcgtggtcagcgacc

SEQ ID NO: 87144 - DNA, 80 bp, synthetic construct
  source 1..80: mol_type = other DNA
gcttgccatgatggaaagaagtggatgacggttggtgttacagggcctgactccaaggcagtggcagtagtccattatgg

SEQ ID NO: 87145 - DNA, 80 bp, synthetic construct
  source 1..80: mol_type = other DNA
gggggtgcctattgatatcattaattcttgggcaggagatatcttgaggacccaggagtcatcctgcacctgcatacagg

SEQ ID NO: 87146 - DNA, 80 bp, synthetic construct
  source 1..80: mol_type = other DNA
gtgattgctactgggtgatgactgacggccctgccaataggcaggcgcagtacagaatatacaaggctaatcaaggaaag

SEQ ID NO: 87147 - DNA, 80 bp, synthetic construct
  source 1..80: mol_type = other DNA
aatgttctattgcatatcgtgagcatcatagtaacagtagtggtcctggggagtagcgggggcaatggaatttgtaatga

SEQ ID NO: 87148 - DNA, 80 bp, synthetic construct
  source 1..80: mol_type = other DNA
atcattggtcagatggatatcaactttagtgggggtcatattgaagagtgttcttgctaccctaatgacggcaaggtaga

SEQ ID NO: 87149 - DNA, 80 bp, synthetic construct
  source 1..80: mol_type = other DNA
atgcgtttgtagagacaactggacagggaccaaccggcctgtgctggtgatttcgcctgatctctcttacaaagttgggt

SEQ ID NO: 87150 - DNA, 80 bp, synthetic construct
  source 1..80: mol_type = other DNA
atttgtgtgcagggctgccaagcgacactccaagaggagaagatgcccaattttcaggttcttgcaccagtcccgtaggg

SEQ ID NO: 87151 - DNA, 80 bp, synthetic construct
  source 1..80: mol_type = other DNA
tttgtgtgtaaaaaaaaggggcgccagtagcaaaaagcagggggaatttcacaaaccactcaagatggagacagtatcac

SEQ ID NO: 87152 - DNA, 80 bp, synthetic construct
  source 1..80: mol_type = other DNA
ctgggccatgtccaatgggtcttgcagatgcaacatttgtatataattggcaaaaacacccttgttttctctgttaaaac

SEQ ID NO: 87153 - DNA, 80 bp, synthetic construct
  source 1..80: mol_type = other DNA
cctaccttaccaatttaattgcagaacagactatagctccagcagcactagcaggcaattcctctctctgtcccatcagt

SEQ ID NO: 87154 - DNA, 80 bp, synthetic construct
  source 1..80: mol_type = other DNA
gctaagagcgttcacagaagaaggagtaatcataggagaaatctcaccagtaccctctcttccaggacataatgatgagg

SEQ ID NO: 87155 - DNA, 80 bp, synthetic construct
  source 1..80: mol_type = other DNA
aataataagaactaatccaagagcaaggactaggccaagagcagagagagtagaagcagcaacgggagtaggagcagcat

SEQ ID NO: 87156 - DNA, 80 bp, synthetic construct
  source 1..80: mol_type = other DNA
aaaaactgctctttcaatgtcacagcgcccataagaaataagaaagcttatgcactttttaatagacttgatgtagtacc

SEQ ID NO: 87157 - DNA, 80 bp, synthetic construct
  source 1..80: mol_type = other DNA
cggggagaaataaaaaactgctctttcaatgtcacagcgcccataagaaataagaaagcttatgcactttttaatagact

SEQ ID NO: 87158 - DNA, 80 bp, synthetic construct
  source 1..80: mol_type = other DNA
aaacaacgatagatgcagctaaatcaatggccactaatgtaatgaagaagtttaaaagctcaggcttggccacgtctgta

SEQ ID NO: 87159 - DNA, 80 bp, synthetic construct
  source 1..80: mol_type = other DNA
tccacgttgacagactcattatctgacgccgcatcagcggtatcaaggaacagctcaataagatcaattggatcaacagc

SEQ ID NO: 87160 - DNA, 80 bp, synthetic construct
  source 1..80: mol_type = other DNA
atcagcttggacagacatttcttcacaaatagtggatacgcaagcatcagtcaatacgttggcaactcaaacgtcaacta

SEQ ID NO: 87161 - DNA, 80 bp, synthetic construct
  source 1..80: mol_type = other DNA
tcagcaagagattaaggttaaaagaaattgcgactcaaacagagggaatgaatttcgacgacatatcagcagctgtgtta

SEQ ID NO: 87162 - DNA, 80 bp, synthetic construct
  source 1..80: mol_type = other DNA
aaaactaaaattgacaaatcatcacaaataggaccaagtactttaccagatattgttactgaagcgtcggagaagtttat

SEQ ID NO: 87163 - DNA, 80 bp, synthetic construct
  source 1..80: mol_type = other DNA
accaaatagaacgtatagagtaattgacgatgatactgtgtttgaagcaggaacagatgggagattttacgcatatagag

SEQ ID NO: 87164 - DNA, 80 bp, synthetic construct
  source 1..80: mol_type = other DNA
tagactttaaaacgcttaaaaacttgaatgataactatggaattactcgttcgcaagcattaaatctaattagatcagat

SEQ ID NO: 87165 - DNA, 80 bp, synthetic construct
  source 1..80: mol_type = other DNA
caattgagttcagtatcgtcatttaagaggttcgaaatattccccaaagagagctcatggcccaaccacacagtaaccgg

SEQ ID NO: 87166 - DNA, 80 bp, synthetic construct
  source 1..80: mol_type = other DNA
agtgtcatcatcatgctcccataacgggcaaagcagcttctacagaaatttgctatggctgacggtgaaggacggtttgt

SEQ ID NO: 87167 - DNA, 80 bp, synthetic construct
  source 1..80: mol_type = other DNA
gataaggaatcaatgggtttcacctatagtggaataagaaccaatggagcgacaagtgcttgcagaagatcaggttcttc

SEQ ID NO: 87168 - DNA, 80 bp, synthetic construct
  source 1..80: mol_type = other DNA
gattcacttctatgttgcacaatggacttcctaataataagctaaagaactgtgtgattgatgcgctcaagcaagtttac

SEQ ID NO: 87169 - DNA, 80 bp, synthetic construct
  source 1..80: mol_type = other DNA
cttgtcagtttcctgtttctgtatatatgtaataaactgttgtgtgtattgtaaactatttgtattgtttgggtgtatct

SEQ ID NO: 87170 - DNA, 80 bp, synthetic construct
  source 1..80: mol_type = other DNA
atgtacaggaaggggtggacgatataaatgctgtgtgtgcactaaaacgaaagtttgcagcatgctcagaaagtgctgta

SEQ ID NO: 87171 - DNA, 80 bp, synthetic construct
  source 1..80: mol_type = other DNA
tggggtgggggctagttcagatgcaagctgtgaaacggatgtagacagttgtactagtgttccattacaaaatattagta

SEQ ID NO: 87172 - DNA, 80 bp, synthetic construct
  source 1..80: mol_type = other DNA
tgtggggttgtattatatacatggcaatgaaaagacgtattttaaatattttaaagaggatgcaaaaaagtactctaaaa

SEQ ID NO: 87173 - DNA, 80 bp, synthetic construct
  source 1..80: mol_type = other DNA
accaacagcgaaagtacacaggggacaaagcgacgacgactcgatttaccagactccagagacaacacccagtactccac

SEQ ID NO: 87174 - DNA, 80 bp, synthetic construct
  source 1..80: mol_type = other DNA
gggcaaaaggctacacttcgtactcgcagtggaaagcaaataggggctaaagtacattactaccaagacttaagtcccat

SEQ ID NO: 87175 - DNA, 80 bp, synthetic construct
  source 1..80: mol_type = other DNA
gtattaatgatggactttatgatatttatgctgacgatgctgatactatacatgattttcacagtcctatgcactcacat

SEQ ID NO: 87176 - DNA, 80 bp, synthetic construct
  source 1..80: mol_type = other DNA
ccaccacacgtaccagtaatgtgtccataccattaaatactggatttgacactcctcttgtgtcattggaacctggtcca

SEQ ID NO: 87177 - DNA, 80 bp, synthetic construct
  source 1..80: mol_type = other DNA
ttttaacagtactgcctccattttactttacctccattttgtgcaggtaaccgatttcggttgctggcacaaacgtgttt

SEQ ID NO: 87178 - DNA, 80 bp, synthetic construct
  source 1..80: mol_type = other DNA
gtgactcactaacatttattgccaggtgtggactgaccgttttgggtcacattgttcatgtttcaacattttatataata

SEQ ID NO: 87179 - DNA, 80 bp, synthetic construct
  source 1..80: mol_type = other DNA
aacggggtaggggcgggctgtactggctggtttgaggtagaagcggtaatagaacgaagaacaggagataatatttcaga

SEQ ID NO: 87180 - DNA, 80 bp, synthetic construct
  source 1..80: mol_type = other DNA
acgtgggactaccctcgggtaccccctcatctgctggcgatgtatgggtattcccaccgccctccgaggggtcggtagtt

SEQ ID NO: 87181 - DNA, 80 bp, synthetic construct
  source 1..80: mol_type = other DNA
agcaaaagcaggggaaaattaaataaaacaaaaatgaaagcaaaattgttcgtattattctgtgtattcactgcactgaa

SEQ ID NO: 87182 - DNA, 80 bp, synthetic construct
  source 1..80: mol_type = other DNA
agcaaaagcaggggataattaaagaaaccaagatggaagcaaaactgtttgtactattctgtgcattcactacactggaa

SEQ ID NO: 87183 - DNA, 80 bp, synthetic construct
  source 1..80: mol_type = other DNA
catatgtcaacatcagtaacaacaattttgtagctgagcaaacgatagctccagtgaaattagcgggcaattcttctctc

SEQ ID NO: 87184 - DNA, 80 bp, synthetic construct
  source 1..80: mol_type = other DNA
agacaacggggcagtggctgtgctgaaatacaatgacataataacagacaccattaagagttggggaaacaaaatattga

SEQ ID NO: 87185 - DNA, 80 bp, synthetic construct
  source 1..80: mol_type = other DNA
atgaatccaaatcagagaataataaccattggatcagtatccttaggactggtagtcctcaacattctcttacatatagt

SEQ ID NO: 87186 - DNA, 80 bp, synthetic construct
  source 1..80: mol_type = other DNA
ttcagcaatttgaacatattgtccagctaaggcgtgcgctaactacagctactataactttgttacctgatgcagaaaga

SEQ ID NO: 87187 - DNA, 80 bp, synthetic construct
  source 1..80: mol_type = other DNA
ttggacaccttcacaaactcctactccttttgtgagaatgtaccaaatctggataagtttgtgttccagatggccagcgc

SEQ ID NO: 87188 - DNA, 80 bp, synthetic construct
  source 1..80: mol_type = other DNA
tctaattctcaacaggggtggtgatgaaaatccgcgcggcccagtgagccgtgaacatgtggagtggtgtagggaatttg

SEQ ID NO: 87189 - DNA, 80 bp, synthetic construct
  source 1..80: mol_type = other DNA
gacccctttcgtgatagtgaatacggtcgtaagagctactataacacgatggcaactatggaggaactgcagagggaaat

SEQ ID NO: 87190 - DNA, 80 bp, synthetic construct
  source 1..80: mol_type = other DNA
ttcatttggtccttaaactaattttgctctctttcctctttctctggcttcctctgctagtgaagacattcccccccaca

SEQ ID NO: 87191 - DNA, 80 bp, synthetic construct
  source 1..80: mol_type = other DNA
aactaattttgctctctttcctctttctctggcttcctctgctagtgaagacattcccccccacaaaactagaaataaaa

SEQ ID NO: 87192 - DNA, 80 bp, synthetic construct
  source 1..80: mol_type = other DNA
ggggctttacaagtgctgaaggatgtaatcaatgaggaagcatcagaatgggatagagcgcacccaccaccggtggggcc

SEQ ID NO: 87193 - DNA, 80 bp, synthetic construct
  source 1..80: mol_type = other DNA
attgccaccagggcaaataagggaaccaacaggaagtgacattgctggaacaactagcagccagcaagaacaaattcact

SEQ ID NO: 87194 - DNA, 80 bp, synthetic construct
  source 1..80: mol_type = other DNA
ggactactagggtcaaccaccctatcccagttggagatatttatagaaaatggatagtgctgggattaaacaaaatggta

SEQ ID NO: 87195 - DNA, 80 bp, synthetic construct
  source 1..80: mol_type = other DNA
acacataaggccagagtactagcagaagcaatggcctcagcccatcaagatctaaaaggaggatacacagcagtattcat

SEQ ID NO: 87196 - DNA, 80 bp, synthetic construct
  source 1..80: mol_type = other DNA
cagccccaccaatggaggagataatgaaggggccagagaatcaggaacagaagggggacccaaacgaactgtatccgttt

SEQ ID NO: 87197 - DNA, 80 bp, synthetic construct
  source 1..80: mol_type = other DNA
ttagccttacaggattctaaggagaaagtaaacatagtaacagattcacaatatgtattgggtatcatctcctcacaacc

SEQ ID NO: 87198 - DNA, 80 bp, synthetic construct
  source 1..80: mol_type = other DNA
tacacagagtgaatcccctatagttcaacagataatagaagaactgacaaaaaaggataaggtgtaccttacatgggttc

SEQ ID NO: 87199 - DNA, 80 bp, synthetic construct
  source 1..80: mol_type = other DNA
ctaagaaaaccaaggactggttgtacagacatcattatgagtctagaaatccaagattcagttcaggtgtatacattcca

SEQ ID NO: 87200 - DNA, 80 bp, synthetic construct
  source 1..80: mol_type = other DNA
gtagggacagggtgtataatagtgaccacatattggggattaatgccaggagaaaaagatgagcatttgggacatggagt

SEQ ID NO: 87201 - DNA, 80 bp, synthetic construct
  source 1..80: mol_type = other DNA
tcacctgttttacagactcagcagtcaggacagccatcctagggcagagagtactgaccaggtgtgaatactctgcagga

SEQ ID NO: 87202 - DNA, 80 bp, synthetic construct
  source 1..80: mol_type = other DNA
catagtcaggtagggacattgcaactactagccttgaaaataatagtaaaagaaaaaaggaataagcctcctctacccag

SEQ ID NO: 87203 - DNA, 80 bp, synthetic construct
  source 1..80: mol_type = other DNA
tccctaggatttggctacaagccttgggaccatacatttatgagacttatggagatacttgggtaggagttatggccatt

SEQ ID NO: 87204 - DNA, 80 bp, synthetic construct
  source 1..80: mol_type = other DNA
ataagaatcttacaacagataatatttacccattttagaattggatgccaacacagtagaataggaatttacccaactaa

SEQ ID NO: 87205 - DNA, 80 bp, synthetic construct
  source 1..80: mol_type = other DNA
gcaggcagtacaaaagttaagggaggaaatggagaaaaggaagcctaaaaatactgctaaggaagacacaaactcaaggc

SEQ ID NO: 87206 - DNA, 80 bp, synthetic construct
  source 1..80: mol_type = other DNA
ctggactaccagagccaataatcctatcccagtaggagatatctatagaaaatggatagtgttagggttaaacaaaatgg

SEQ ID NO: 87207 - DNA, 80 bp, synthetic construct
  source 1..80: mol_type = other DNA
aaggtgtttcaactgtgggaaagagggacatatagcaaaaaactgtcgagcacctaggaagaaaggttgctggaaatgtg

SEQ ID NO: 87208 - DNA, 80 bp, synthetic construct
  source 1..80: mol_type = other DNA
cagcccctccgatggaggaggtagtaaagagagaggagaatcaggacaagggaggggaccagagcgaactctatccgttt

SEQ ID NO: 87209 - DNA, 80 bp, synthetic construct
  source 1..80: mol_type = other DNA
gggcaatggacttaccagatatatcaggatgaacataagaacctcaaaacagggaaatacaataggcaaaaagcatccca

SEQ ID NO: 87210 - DNA, 80 bp, synthetic construct
  source 1..80: mol_type = other DNA
cacaaatgatataagacaattggcagaagtgctacagaaagtgtcacaagagtctatagtcatctggggaaaattgccta

SEQ ID NO: 87211 - DNA, 80 bp, synthetic construct
  source 1..80: mol_type = other DNA
tagagataccaagctagggaaagcaggatatgttacagaacgagggaaacagaaaataataaacttagaagagactacca

SEQ ID NO: 87212 - DNA, 80 bp, synthetic construct
  source 1..80: mol_type = other DNA
gaagaactaacaaagaaggaacaagtgtaccttacatgggttcctgcccataagggtatagggggaaatgaaaaaataga

SEQ ID NO: 87213 - DNA, 80 bp, synthetic construct
  source 1..80: mol_type = other DNA
tctaggaagattaaagactggtggtacagacatcattttgaaactagaaatccaagagttagttcaagtgtatatattcc

SEQ ID NO: 87214 - DNA, 80 bp, synthetic construct
  source 1..80: mol_type = other DNA
ttcacctgttttacagagtcagcaatcaggagagccaccttagggcagagagtactgatcaagtgtgattaccctgaagg

SEQ ID NO: 87215 - DNA, 80 bp, synthetic construct
  source 1..80: mol_type = other DNA
acatagtaaggtagggacactgcaactcttagctttaagagcagttgtaaaagcaaaaagaaataaacctcccttaccca

SEQ ID NO: 87216 - DNA, 80 bp, synthetic construct
  source 1..80: mol_type = other DNA
cactagagctcctagaggagctgaaagcagaagcagtgagacatttccctgtgaattggctgcactctttgggacaatac

SEQ ID NO: 87217 - DNA, 80 bp, synthetic construct
  source 1..80: mol_type = other DNA
gcaggcaatacaaaagctaaaacaagaaaaggggaagtctgtgggtaccgctaaggaagacacaagcgcaaggcagacag

SEQ ID NO: 87218 - DNA, 80 bp, synthetic construct
  source 1..80: mol_type = other DNA
gagtgtatctcacatgggttcctgctcacaaaggcatagggggaaatgaaaagatagataaattagtaagtaaagatatt

SEQ ID NO: 87219 - DNA, 80 bp, synthetic construct
  source 1..80: mol_type = other DNA
agccctaagagtgatagtcggagaaaaaagaactaggcctcccgtacccagtgtccagaagttaacagaagttaacagaa

SEQ ID NO: 87220 - DNA, 80 bp, synthetic construct
  source 1..80: mol_type = other DNA
tactgggtctcagttagagaaccaggttagagcccgggagctccctagcctctggctgaacccactgcttaacgctcaat

SEQ ID NO: 87221 - DNA, 80 bp, synthetic construct
  source 1..80: mol_type = other DNA
acagcccatcaggacctaaaaggaggatacacagcagtattcatgcaaagagggcagggcacaaataggagagggcctat

SEQ ID NO: 87222 - DNA, 80 bp, synthetic construct
  source 1..80: mol_type = other DNA
gggagacaagaggctccggagcagaagggggacccgaccgaactgtacccatttgcctccctcaaatccctctttgggac

SEQ ID NO: 87223 - DNA, 80 bp, synthetic construct
  source 1..80: mol_type = other DNA
ggctgaattaatggcaatattattagccttacaggattccaaggaaacggtgaacatagtaacagattcacaatatgcat

SEQ ID NO: 87224 - DNA, 80 bp, synthetic construct
  source 1..80: mol_type = other DNA
gaagatcatgaaaagtatcatagcaatgggagagcattagctagtgactatggactaccaccagtggtagccaaagaaat

SEQ ID NO: 87225 - DNA, 80 bp, synthetic construct
  source 1..80: mol_type = other DNA
ctagagaaactaaggactgggcttacagacatcattatgaatgcataaatccaagaatcagttcaggtgtatatattcca

SEQ ID NO: 87226 - DNA, 80 bp, synthetic construct
  source 1..80: mol_type = other DNA
gtagggatgagttatgtaatagtgaccacctattggggattaatgccaggagaaagagaggatcagttgggacatggagt

SEQ ID NO: 87227 - DNA, 80 bp, synthetic construct
  source 1..80: mol_type = other DNA
catagtcaggtagggacgctgcagctactagctttgagagtaatagtaaaagcaaaaaggaataaacctcccctacccag

SEQ ID NO: 87228 - DNA, 80 bp, synthetic construct
  source 1..80: mol_type = other DNA
agagtaggagatacgcagcaggcaatacaaaagttacaagaagaaatgaagaaaaggaaacctgtagatactgctaagga

SEQ ID NO: 87229 - DNA, 80 bp, synthetic construct
  source 1..80: mol_type = other DNA
aaacttgccttgcgtgagaagcagtgtgtgctcatctgttcaaccctggtagctagagatccctcaaatcacgtaaactg

SEQ ID NO: 87230 - DNA, 80 bp, synthetic construct
  source 1..80: mol_type = other DNA
cagtaagagaaagaataagaagagctcacaaggagcctgaacctgaaccatgtgcacctggagtgggagaactctccagg

SEQ ID NO: 87231 - DNA, 80 bp, synthetic construct
  source 1..80: mol_type = other DNA
gcggtagcaaatagaggagggataccaagttcctttactcctcaaaacaatgcagcccttgcattcctagaaagtcacca

SEQ ID NO: 87232 - DNA, 80 bp, synthetic construct
  source 1..80: mol_type = other DNA
ctcctacatccagcttgtgatcatggctttgaagatccacacggagaaatactgaaatggcagtttgatagaacattagg

SEQ ID NO: 87233 - DNA, 80 bp, synthetic construct
  source 1..80: mol_type = other DNA
catcactcatgttgctcagagaacccacccagagctcttctctaaggactaaaactgctaactgaagattgctgacaccg

SEQ ID NO: 87234 - DNA, 80 bp, synthetic construct
  source 1..80: mol_type = other DNA
cgggactttccagtagagactgctgacactgcagggactttccagcgtgggagggataaagggcggtccggggagtggct

SEQ ID NO: 87235 - DNA, 80 bp, synthetic construct
  source 1..80: mol_type = other DNA
tacaaaactaggaaaggcaggatatattacagaaaaggggaaacagaaaataataaaattagaggaaaccaccaatcaaa

SEQ ID NO: 87236 - DNA, 80 bp, synthetic construct
  source 1..80: mol_type = other DNA
tcagggaagaccagagactggtactacagacaccattttgaaattaaaaatccaagagccagctcaggtgtatatattcc

SEQ ID NO: 87237 - DNA, 80 bp, synthetic construct
  source 1..80: mol_type = other DNA
agtaggggacgctaggatagtaataactacatactggggattgatgccaggggaaagagatgaacatttgggacatgggg

SEQ ID NO: 87238 - DNA, 80 bp, synthetic construct
  source 1..80: mol_type = other DNA
tttgcctgttttacagcgtcagcaatcaggaaagccatcctagggcagaaagtactgaccaaatgtgaataccctgcagg

SEQ ID NO: 87239 - DNA, 80 bp, synthetic construct
  source 1..80: mol_type = other DNA
tgcatcttaaggaccagctgacattagtaattattagtgctttgctgcttataaatataatactatggacatttgttctt

SEQ ID NO: 87240 - DNA, 80 bp, synthetic construct
  source 1..80: mol_type = other DNA
agacaatatttgaaacaaaggaaacaagatagaagggaaagagaggtacttgaaaggctagtaagaataagacaaattga

SEQ ID NO: 87241 - DNA, 80 bp, synthetic construct
  source 1..80: mol_type = other DNA
ctgtgttcccacagaccccactccatatgaatatcctttaaaaaatgtgacagatagctttaatatatggaaaaattaca

SEQ ID NO: 87242 - DNA, 80 bp, synthetic construct
  source 1..80: mol_type = other DNA
tggtagaacaaatgcagaatgacatcattagtttatgggaacagagtttaaaaccttgtgttcaaatgactttcctgtgt

SEQ ID NO: 87243 - DNA, 80 bp, synthetic construct
  source 1..80: mol_type = other DNA
gtacaaatgaattgtacaaatataaatatgacaaacataaacaatatgacaaacataaacaagacatcagaaggtgaaat

SEQ ID NO: 87244 - DNA, 80 bp, synthetic construct
  source 1..80: mol_type = other DNA
gaaacaggatgaaatgaaacagtgtgactttaatgtaaccacagttctcaaagacaaaaaggagaagaaacaggctctat

SEQ ID NO: 87245 - DNA, 80 bp, synthetic construct
  source 1..80: mol_type = other DNA
acagtgagtactcaactaatattcaatggaacactctcagaagaaaaaataagaattataggaaagaatattacagacag

SEQ ID NO: 87246 - DNA, 80 bp, synthetic construct
  source 1..80: mol_type = other DNA
tgggaaaaatatcatagtgaccctaaaagatattgtgaacatgacctgtgagagaccatggaatcagtcagtacaagata

SEQ ID NO: 87247 - DNA, 80 bp, synthetic construct
  source 1..80: mol_type = other DNA
taggtataggtccaatgtcctggcgcagtctagacttaaaaaacaatatctcagggtggtcagcaaggttagcctcctgt

SEQ ID NO: 87248 - DNA, 80 bp, synthetic construct
  source 1..80: mol_type = other DNA
aagtataatacctctgattggaaaaaggccttaaaacaaatagctgaaaggtatttagaacttatgaacaatactggtaa

SEQ ID NO: 87249 - DNA, 80 bp, synthetic construct
  source 1..80: mol_type = other DNA
tgctagcatgacattcaatcaaagcgctggtggagatccagaagtatcccagttacattttaattgtcatggagagttct

SEQ ID NO: 87250 - DNA, 80 bp, synthetic construct
  source 1..80: mol_type = other DNA
tctattgtaacacaagtacgatgtttaattataccttttcatgtactggaaccaactgtaccatacaaaatgaccaaaat

SEQ ID NO: 87251 - DNA, 80 bp, synthetic construct
  source 1..80: mol_type = other DNA
aaaagtaatgatactgagatattttgcaagataaaacaggtagtaaggtcatggatgaggggagggtcgggactctatgc

SEQ ID NO: 87252 - DNA, 80 bp, synthetic construct
  source 1..80: mol_type = other DNA
acctcccattccaggaaaactaacatgcagttcaaacataactggaatgattctacaattggatatgccatggaacaaaa

SEQ ID NO: 87253 - DNA, 80 bp, synthetic construct
  source 1..80: mol_type = other DNA
gcaataccaacaacacagtcatgcttagaccaatagggggagatatgcaagatatatggagaactgaattgctcagatac

SEQ ID NO: 87254 - DNA, 80 bp, synthetic construct
  source 1..80: mol_type = other DNA
aaagtagtaaaggtaaaaccttttagtgtggcacctacaaaaattgcaaggccagtcataggcactggcactcgaagaga

SEQ ID NO: 87255 - DNA, 80 bp, synthetic construct
  source 1..80: mol_type = other DNA
gaacaaaatgagaaaaagttgctggagttagatgaatgggctactatttggaactggctggacataactaaatggttgtg

SEQ ID NO: 87256 - DNA, 80 bp, synthetic construct
  source 1..80: mol_type = other DNA
gtatataaaaatagcaataatcatagtaggagcactaataggaataagaattgttatgatagtacttaatctagtgaaaa

SEQ ID NO: 87257 - DNA, 80 bp, synthetic construct
  source 1..80: mol_type = other DNA
gaggacaataatcttgtggagctaccacctcttgagcagcttagcatcggggatccagacggtgatcagctatctgggac

SEQ ID NO: 87258 - DNA, 80 bp, synthetic construct
  source 1..80: mol_type = other DNA
tcggactgtggatccttggacagaaaataattagtgcttgcagaatttgtgcagctgtaatacaatattggctacaagaa

SEQ ID NO: 87259 - DNA, 80 bp, synthetic construct
  source 1..80: mol_type = other DNA
atgtgcacctggagtagggcaaatctccagagacttagcagctaggggagggataccaagctcctatacccctcaaaaca

SEQ ID NO: 87260 - DNA, 80 bp, synthetic construct
  source 1..80: mol_type = other DNA
caacacccatgttgctatgagaaccaacccagagctctttcaaaaggactaagactgctgacatgaagaatgctgacact

SEQ ID NO: 87261 - DNA, 80 bp, synthetic construct
  source 1..80: mol_type = other DNA
acctttggtcttacaacgcggaacttcttgtcgcactagagaatcaacatacaattgacctgactgactcagaaatgaac

SEQ ID NO: 87262 - DNA, 80 bp, synthetic construct
  source 1..80: mol_type = other DNA
acatcgaatcagctactcttgcgggaaaacaaatagttaagcgtattctggaagaagaatacgatgaagcacttagaata

SEQ ID NO: 87263 - DNA, 80 bp, synthetic construct
  source 1..80: mol_type = other DNA
actccttagagctttcacagaggaagggacgattgtaggtgaaatctcaccgttaccttctcttccaggacatactgatg

SEQ ID NO: 87264 - DNA, 80 bp, synthetic construct
  source 1..80: mol_type = other DNA
gggggtagtaggattcgttagagaggtccttttcgatacgttattccatggttgggccctgttgtgtctttctcatgcac

SEQ ID NO: 87265 - DNA, 80 bp, synthetic construct
  source 1..80: mol_type = other DNA
gtagtataaatgtccatattaggaataggaataggagcgctaatagtagcatttatcctagccatagttgtgtggatcat

SEQ ID NO: 87266 - DNA, 80 bp, synthetic construct
  source 1..80: mol_type = other DNA
gaagacaaagcagggatactttcattaatcatgaagaccattattgcattgagctacattttctacctgacttctggaca

SEQ ID NO: 87267 - DNA, 80 bp, synthetic construct
  source 1..80: mol_type = other DNA
acaaagttagaatgcaattaagggacaatgcaaaagaactagggaatggatgcttcgaattttatcacaaatgtgatgat

SEQ ID NO: 87268 - DNA, 80 bp, synthetic construct
  source 1..80: mol_type = other DNA
agtagccaaaagcccattcttactgcagaagagagatggtaagatatcctggtcagggatgtttaacccattctctggaa

SEQ ID NO: 87269 - DNA, 80 bp, synthetic construct
  source 1..80: mol_type = other DNA
ttgccgaagccgcagaagatgctatctaaagcgcctaaagtgctaagatcagaactgcaggtgttccttgcacaaagact

SEQ ID NO: 87270 - DNA, 80 bp, synthetic construct
  source 1..80: mol_type = other DNA
ttaatcctttttctggagacccaattgatgagttgcagattctcatcagctgctgctataacggctacctcaagaacaaa

SEQ ID NO: 87271 - DNA, 80 bp, synthetic construct
  source 1..80: mol_type = other DNA
cttctcggccatccagcgcattgcaagacattcattcactcttcacaagatggggagcacaataagatggaaagggatgt

SEQ ID NO: 87272 - DNA, 80 bp, synthetic construct
  source 1..80: mol_type = other DNA
taggcacaatcaacgccctgctagcaaggatcgcggccgctcgttccctggtgcatcgggcaaaagaggagctttctagc

SEQ ID NO: 87273 - DNA, 80 bp, synthetic construct
  source 1..80: mol_type = other DNA
tagtctacggtggtctcacatactcacttgaatctgatggcaaaggcaatgtgaaggttgagagagtgcagagtacaact

SEQ ID NO: 87274 - DNA, 80 bp, synthetic construct
  source 1..80: mol_type = other DNA
gtacaaaccaacaatgagctatctggcgctctacaccatctcaagtgcgccaggatcaggtactatgttaagtgtgtcca

SEQ ID NO: 87275 - DNA, 80 bp, synthetic construct
  source 1..80: mol_type = other DNA
ctaggccacaggtagaggatgcagaagaggtcatcaatagagacgggtgtccaaaaccaaaagatgatgaggagtttgtc

SEQ ID NO: 87276 - DNA, 80 bp, synthetic construct
  source 1..80: mol_type = other DNA
atctcatctgaagacatcaaagctgagggcaagaaaggaaagaacaagtccggtcgtggcaagaaacacacagccttctc

SEQ ID NO: 87277 - DNA, 80 bp, synthetic construct
  source 1..80: mol_type = other DNA
cagccgaacgaggccaacacagcattcagtgtccccccactcaatcagagggagaacagggacgctaaagagccactaac

SEQ ID NO: 87278 - DNA, 80 bp, synthetic construct
  source 1..80: mol_type = other DNA
ttccattaagcaaatccaaatccacaaatcgggtgagttctgccgcctaagattcccaaaaccaatcagaactgatgtga

SEQ ID NO: 87279 - DNA, 80 bp, synthetic construct
  source 1..80: mol_type = other DNA
cactgttgggggccagatgggaatgctcttgacaggatctaatgctaagagcatggatctgggcaccacaccaggtgact

SEQ ID NO: 87280 - DNA, 80 bp, synthetic construct
  source 1..80: mol_type = other DNA
gccctgataagactgaagggcctctggtcatctctgaggacctgaatggtctgaccttcctgcggaggactgtgacccgc

SEQ ID NO: 87281 - DNA, 80 bp, synthetic construct
  source 1..80: mol_type = other DNA
gttgagttgacaccactgtctctatactggagaccagtgtacaccccccagtaccttatagctccagacactctcagaaa

SEQ ID NO: 87282 - DNA, 80 bp, synthetic construct
  source 1..80: mol_type = other DNA
gggcaccacccaactcttgccgagtcaaatatgtgctctcaggggcacgctcaccagatcaacaagcagggccagtgacc

SEQ ID NO: 87283 - DNA, 80 bp, synthetic construct
  source 1..80: mol_type = other DNA
aagccgacacggcaacccctaggctgttcaattattattggcacatacaattggataatctaaatggaaccccctacgac

SEQ ID NO: 87284 - DNA, 80 bp, synthetic construct
  source 1..80: mol_type = other DNA
cctgcagaagacataccagcccctttgggaacaccagacttccggggcaaggtctttggcgtagctagccagagaaaccc

SEQ ID NO: 87285 - DNA, 80 bp, synthetic construct
  source 1..80: mol_type = other DNA
tgacagcacaacaagagcacatgaagcaaaagtggacacaacatctggtcgcttcgccccgaaattgggttccctagaaa

SEQ ID NO: 87286 - DNA, 80 bp, synthetic construct
  source 1..80: mol_type = other DNA
tatccactgaatccagtgactttgactcaaatcaaccaacaaggttcaccccagttggcattggggttgacaatgaggca

SEQ ID NO: 87287 - DNA, 80 bp, synthetic construct
  source 1..80: mol_type = other DNA
gattttcagcaatggtccttacctgactactccggtcagttcactcataacatgaacttagccccagctgtcgcccccaa

SEQ ID NO: 87288 - DNA, 80 bp, synthetic construct
  source 1..80: mol_type = other DNA
tggttaggtatgttaaccctgacactggtagagtgctatttgaggccaagctacacaaattgggcttcatgactatagct

SEQ ID NO: 87289 - DNA, 80 bp, synthetic construct
  source 1..80: mol_type = other DNA
ggcccatcaaggatataattggaaaattaagacctttaaacatccttaacatattggcttcctgcgattggacttttgca

SEQ ID NO: 87290 - DNA, 80 bp, synthetic construct
  source 1..80: mol_type = other DNA
tttgcacagttaaaaggcttttacagtgatttggctcagaaggaagattatattatgtattttcatgacatggtgaaatt

SEQ ID NO: 87291 - DNA, 80 bp, synthetic construct
  source 1..80: mol_type = other DNA
gctgttgggccactatggggctgatcaaacctacgaggctcttcgagtcagttctatgtttatccgtgctcgtgaagtcg

SEQ ID NO: 87292 - DNA, 80 bp, synthetic construct
  source 1..80: mol_type = other DNA
gtcattatggagtcgatcagacgtacgaggctcttcgagtcagttccatgttcatccgcgctcgtgaagtcggctggcga

SEQ ID NO: 87293 - DNA, 80 bp, synthetic construct
  source 1..80: mol_type = other DNA
tctcgccccgtagtcacaatggattttgcacagctaaaaggtttttacaacgatttagctcagaaagaagattacatcat

SEQ ID NO: 87294 - DNA, 80 bp, synthetic construct
  source 1..80: mol_type = other DNA
cttgtggcagatcggggagaggacggcctggacgatgcattaagaaagtttgtgcgactgactccagacgagaggaagtc

SEQ ID NO: 87295 - DNA, 80 bp, synthetic construct
  source 1..80: mol_type = other DNA
tagtgttaataccaatatgagttatagctataataggagtggtctggagacagatatgagaaactgctctttcaaagtca

SEQ ID NO: 87296 - DNA, 80 bp, synthetic construct
  source 1..80: mol_type = other DNA
ccctttttgtccggtgggaaaatttttaaccgggggccccgaaccgggacttgaaaaggaaaaaaagaccagaggagctc

SEQ ID NO: 87297 - DNA, 80 bp, synthetic construct
  source 1..80: mol_type = other DNA
tatcacctcaagagtaggacagagattgcagaaagagtatgcactcttttataaagtggatctagtaccattaggtaata

SEQ ID NO: 87298 - DNA, 80 bp, synthetic construct
  source 1..80: mol_type = other DNA
cttttaacatcagcaacaccaactttgctgctggacagtcagtggtttccgtgaaattagcgggcaattcctctctctgc

SEQ ID NO: 87299 - DNA, 80 bp, synthetic construct
  source 1..80: mol_type = other DNA
ggggtttttcttgttgacaagaatcctcacaataccgcagagtctagactcgtggtggacttctctcagttttctaggtg

SEQ ID NO: 87300 - DNA, 80 bp, synthetic construct
  source 1..80: mol_type = other DNA
cttacaaggcctttctaagtaaacagtatatgaacctttaccccgttgcccggcaacggcctggtctgtgccaagtgttg

SEQ ID NO: 87301 - DNA, 80 bp, synthetic construct
  source 1..80: mol_type = other DNA
ataaatatgttaaggcaattgtacctgatcaaattttcgatgaattacaggaaatgatcgataatatgagaaaagctggt

SEQ ID NO: 87302 - DNA, 80 bp, synthetic construct
  source 1..80: mol_type = other DNA
attgtatccaaaggtatagctgtaacagaaaaggcgaaattgaattcatatgcaccagtttatttagaaaaacgtcgtgc

SEQ ID NO: 87303 - DNA, 80 bp, synthetic construct
  source 1..80: mol_type = other DNA
aaggactgcgctctttatataacaccctagcagttctttattgtgtccatcgtagaatatcagtacaaaatacacaagaa

SEQ ID NO: 87304 - DNA, 80 bp, synthetic construct
  source 1..80: mol_type = other DNA
tgggagggggtagaggcaattattaggatgctacaacaattactgtttatccattataggattggctgtcagcacagcag

SEQ ID NO: 87305 - DNA, 80 bp, synthetic construct
  source 1..80: mol_type = other DNA
cattaatactagcagtagtagtttgggtgttactatataaagaatataagaaactaaaattgcaagaacaaataagttac

SEQ ID NO: 87306 - DNA, 80 bp, synthetic construct
  source 1..80: mol_type = other DNA
ataacattaagagacagggaagaagatagtggcaatgagagtgatggggatacagagctattggtcactcttttgtcttg

SEQ ID NO: 87307 - DNA, 80 bp, synthetic construct
  source 1..80: mol_type = other DNA
gctttggacaaagtacatggggaaaaggaacagcacaacaagccaaaaaactcagaagcaggggcagcggcagcagttga

SEQ ID NO: 87308 - DNA, 80 bp, synthetic construct
  source 1..80: mol_type = other DNA
ttgagggtaccacccagaggactacaacaagtagtacaggtataggaaataagctaatgaaaaattgctcatttaatgca

SEQ ID NO: 87309 - DNA, 80 bp, synthetic construct
  source 1..80: mol_type = other DNA
accactgagagaaaagataaaaagaagacagtttactctctgttttatgcagaagatgtagtaaaaatctcaaatgatag

SEQ ID NO: 87310 - DNA, 80 bp, synthetic construct
  source 1..80: mol_type = other DNA
ggtgacattgttattagaaatagcagtcgcggtactctgttggtgcaatggaatgagacagtgcaaataaattgtacaag

SEQ ID NO: 87311 - DNA, 80 bp, synthetic construct
  source 1..80: mol_type = other DNA
gccaggaaataatacaagtggacaggtgcagataggacctgctatgacattttataacatagagaaaatagtaggagaca

SEQ ID NO: 87312 - DNA, 80 bp, synthetic construct
  source 1..80: mol_type = other DNA
ttagacaagcgcactgtaatgtctcctgggaaagttggggaaaaatgtggaatagaacaaaagacaaaataaacagggag

SEQ ID NO: 87313 - DNA, 80 bp, synthetic construct
  source 1..80: mol_type = other DNA
gtcaactggaccaactggatctaccgggatagggagaagaaggaaggagatccagaagtaacccaattcatgttcaattg

SEQ ID NO: 87314 - DNA, 80 bp, synthetic construct
  source 1..80: mol_type = other DNA
tagaggagaatttttctattgtaacacttctaaattgtttaaggagagtaaatcgtctaacaggacagggagtattactc

SEQ ID NO: 87315 - DNA, 80 bp, synthetic construct
  source 1..80: mol_type = other DNA
tgccctgtagaataaaacaatttgtaaacttgtggacaagggtaggaaaaggaatttatgcaccaccagttaggggaaat

SEQ ID NO: 87316 - DNA, 80 bp, synthetic construct
  source 1..80: mol_type = other DNA
ctcaggaggaaacatgattgatctttggagacaagagttgcatagatacaaagtagttagtatagaacccataggagtag

SEQ ID NO: 87317 - DNA, 80 bp, synthetic construct
  source 1..80: mol_type = other DNA
actgtgccttggaatgagacttggagcagtaatacctcctatgagacaatctggaataatttaacctggcaagaatggga

SEQ ID NO: 87318 - DNA, 80 bp, synthetic construct
  source 1..80: mol_type = other DNA
taagaaagtaagaaactattcaggtgtcatttttgaccttatagagcaggcacaagaacaacagaacacaaatgaaaaat

SEQ ID NO: 87319 - DNA, 80 bp, synthetic construct
  source 1..80: mol_type = other DNA
gagagagtacttgtataagatgggaaagagttggtcaaaaagcagcatagtaggatggccagaaatcagagaaagaatga

SEQ ID NO: 87320 - DNA, 80 bp, synthetic construct
  source 1..80: mol_type = other DNA
gaagacaaccagcagagccagcaataggagtaggagcagcttctcaagacctagctaatcgaggggcaatcaccacaagt

SEQ ID NO: 87321 - DNA, 80 bp, synthetic construct
  source 1..80: mol_type = other DNA
aatactgcaagcaataatgaaactgtagcttggctagaagcacaagaagaagaggaagaagtaggctttccagtacgccc

SEQ ID NO: 87322 - DNA, 80 bp, synthetic construct
  source 1..80: mol_type = other DNA
gaagaagtaggctttccagtacgccctcaggtgccattaaggccaatgaccatgaaagcggctgttgacctttccttctt

SEQ ID NO: 87323 - DNA, 80 bp, synthetic construct
  source 1..80: mol_type = other DNA
tcaggtgccattaaggccaatgaccatgaaagcggctgttgacctttccttctttttaaaagaaaaggggggactggaag

SEQ ID NO: 87324 - DNA, 80 bp, synthetic construct
  source 1..80: mol_type = other DNA
cgtctgttgtgtgaatttggtaactagagattccttagacccttttggtccgcttggaaaatctttagcagtggcgcccg

SEQ ID NO: 87325 - DNA, 80 bp, synthetic construct
  source 1..80: mol_type = other DNA
agagaaatacccgcagtactaccaagactgagactgctgacactgctgacacaaagattgctgatacagaagaatctaag

SEQ ID NO: 87326 - DNA, 80 bp, synthetic construct
  source 1..80: mol_type = other DNA
actgctgacactgctgacacagaagaatttaagggactttccactggggactttccagaaggcggaccagagggaggggc

SEQ ID NO: 87327 - DNA, 80 bp, synthetic construct
  source 1..80: mol_type = other DNA
atgaatgcagcattcccccgaacaatcaagtggagatagtgtatttgaataatactaccatagaaaaagaaatttgtcct

SEQ ID NO: 87328 - DNA, 80 bp, synthetic construct
  source 1..80: mol_type = other DNA
agactgctgacactgaagtttctaaccgctggggactttccaggggaggtgtggccggggcggagttggggagtggctaa

SEQ ID NO: 87329 - DNA, 80 bp, synthetic construct
  source 1..80: mol_type = other DNA
ttgtcctggctatcgttggatgtgtctgcggcgttttatcatcttcctcttcatcctgctgctatgcctcatcttcttgt

SEQ ID NO: 87330 - DNA, 80 bp, synthetic construct
  source 1..80: mol_type = other DNA
ataaaatcaaagattgctttcgcaaacttcccgtgaatagacccattgattggaaggtttgtcaacgcattgtggatctt

SEQ ID NO: 87331 - DNA, 80 bp, synthetic construct
  source 1..80: mol_type = other DNA
gatcttatttcttcggagacaatgcagaggagtatgacaactaaagaaaaatacccttgtttctacccctttcaccgctg

SEQ ID NO: 87332 - DNA, 80 bp, synthetic construct
  source 1..80: mol_type = other DNA
caaaaatggaggaaataatacttcttctttcattagtcagtcttgtaaaaagcgatcagatttgcattggttaccatgca

SEQ ID NO: 87333 - DNA, 80 bp, synthetic construct
  source 1..80: mol_type = other DNA
agttactctcatttttgccttctgatttctttccttccgtccgggatctactagatacatgcgcagctctgtttcgggac

SEQ ID NO: 87334 - DNA, 80 bp, synthetic construct
  source 1..80: mol_type = other DNA
agtgaaaatgaatccaaatcaaaagataatagcacttggctccgcttctctaactattgcgatagtatgtctgctcatcc

SEQ ID NO: 87335 - DNA, 80 bp, synthetic construct
  source 1..80: mol_type = other DNA
agaggaggctcaggggtgaaaggttgggcgtttgacaatggggatgatgtttggatgggaagaacaatcaaaaaggactc

SEQ ID NO: 87336 - DNA, 80 bp, synthetic construct
  source 1..80: mol_type = other DNA
ctggagatgacaagaatgctactgctagcgttatttatggcgggatgcttactgacagtattggttcatggtctaaaaac

SEQ ID NO: 87337 - DNA, 80 bp, synthetic construct
  source 1..80: mol_type = other DNA
ctgcgaccttttgctgggaggaagggaatggtcctacatcgtcgaaagaccatcggcagtaaatggaacgtgttaccctg

SEQ ID NO: 87338 - DNA, 80 bp, synthetic construct
  source 1..80: mol_type = other DNA
cccaaatatattggagtcaagagtctcaagctagcaataggtctgagaaatgtgcctgccaagtcgaagagagggctatt

SEQ ID NO: 87339 - DNA, 80 bp, synthetic construct
  source 1..80: mol_type = other DNA
tcaaatatattcaacatggagagaataagagaactcagagatttgatgtcgcaatctcgcactcgcgagatattaacaaa

SEQ ID NO: 87340 - DNA, 80 bp, synthetic construct
  source 1..80: mol_type = other DNA
ctttacactgtgtgaattacaatgccaccaatgccaccaatggccttaacaatagcaccctaaaagaagagtcaggggca

SEQ ID NO: 87341 - DNA, 80 bp, synthetic construct
  source 1..80: mol_type = other DNA
ctgctgacactgctgacacaaagattgctgatacagaagaatctaagggactttccactggggactttccagaaggcggg

SEQ ID NO: 87342 - DNA, 80 bp, synthetic construct
  source 1..80: mol_type = other DNA
atggattcaaacacgataacctcgtttcaggtagattgctatttgtggcatataagaaagctgctcagcatgagagacat

SEQ ID NO: 87343 - DNA, 80 bp, synthetic construct
  source 1..80: mol_type = other DNA
ccaagggagtagaagaaggctcaattgggaaagtttgcaggaccatgttggcaaaatccgtgttcaacagtctgtatgca

SEQ ID NO: 87344 - DNA, 80 bp, synthetic construct
  source 1..80: mol_type = other DNA
ggtccaatcatgacgcctcatcaggagtgagttcggcatgcccatacaatggtagatcttcctttttcaggaatgtagtt

SEQ ID NO: 87345 - DNA, 80 bp, synthetic construct
  source 1..80: mol_type = other DNA
cctaaaatgtaagaagtcatcatcatattttgttcctgatgctcggtccaggtgtacatctgtaaggagatgtcgctggg

SEQ ID NO: 87346 - DNA, 80 bp, synthetic construct
  source 1..80: mol_type = other DNA
gactacctgatgaccgcttaaaaaattgtgtaattgatgcattaaggaatgtctataaaactgacttctatatgtcccgg

SEQ ID NO: 87347 - DNA, 80 bp, synthetic construct
  source 1..80: mol_type = other DNA
aaaaccttctccagagcaggaataaatttgcttaataatgaaaaaagaggacaaagtacacaatgggatcaggcagcagt

SEQ ID NO: 87348 - DNA, 80 bp, synthetic construct
  source 1..80: mol_type = other DNA
tttgtactctaattatatcgtaaatagacttagagggtttgagactgatagagaatttcccctaactaaaataatgcaaa

SEQ ID NO: 87349 - DNA, 80 bp, synthetic construct
  source 1..80: mol_type = other DNA
ggatattggaatcatatgtatataacctgccctccataccttacggatgttatcaattatttgactttaattcgccggac

SEQ ID NO: 87350 - DNA, 80 bp, synthetic construct
  source 1..80: mol_type = other DNA
gatacaagactggttagtcgattgttccatagaaaaatttccattaatggctaaaatatactcatggtcgtttcatgttg

SEQ ID NO: 87351 - DNA, 80 bp, synthetic construct
  source 1..80: mol_type = other DNA
tatgtatgttaattggaaatactacggtaattccaagcccgcaaacactccttcactcctataacgtaaatgccaccttt

SEQ ID NO: 87352 - DNA, 80 bp, synthetic construct
  source 1..80: mol_type = other DNA
ccttcaaattacaacgaacgaatccacgatgctgtggctcctattacggctgctaatatactaaatttatatcagaaaaa

SEQ ID NO: 87353 - DNA, 80 bp, synthetic construct
  source 1..80: mol_type = other DNA
aatgaaatcaatagttgaggatccccccccaagattgcaaatttccgatgtaccacgagtaccagacgaccagatgtaca

SEQ ID NO: 87354 - DNA, 80 bp, synthetic construct
  source 1..80: mol_type = other DNA
ggttgagagacagacttagattattgccacctgaaagacgaagacttgatacctttaacgtaatattaatgaccccggag

SEQ ID NO: 87355 - DNA, 80 bp, synthetic construct
  source 1..80: mol_type = other DNA
tcgctcccctcgactattcgtgtgcaattaatgcgccagctaatacacaacaatccgaacaccccccccagctccgaagc

SEQ ID NO: 87356 - DNA, 80 bp, synthetic construct
  source 1..80: mol_type = other DNA
cttttaactacagctacaataacacccttaccggatgctgaaagattcagttccccaagagtccttccttcagttgacgg

SEQ ID NO: 87357 - DNA, 80 bp, synthetic construct
  source 1..80: mol_type = other DNA
ttcagcgtcattcacaccccctagcccacaaccccctcccgataacttgatgggtacgatgtggctgaacgcaggatcag

SEQ ID NO: 87358 - DNA, 80 bp, synthetic construct
  source 1..80: mol_type = other DNA
aacctcaggtcgctggccttgactcctcgtgtgcaaccaatgcgccagctaatacacaacaatttgagcaccctgtacag

SEQ ID NO: 87359 - DNA, 80 bp, synthetic construct
  source 1..80: mol_type = other DNA
accgtccccactacagctacaataacactccccccggatgcagaaagattcagttttccaagagcccctaattcagctga

SEQ ID NO: 87360 - DNA, 80 bp, synthetic construct
  source 1..80: mol_type = other DNA
ttcagcgtccctcacactgaatagatcacccccagctcatgataacttcctgggtaccctgtggctgaacgcaggatcag

SEQ ID NO: 87361 - DNA, 80 bp, synthetic construct
  source 1..80: mol_type = other DNA
gctacaataacacttttaccgcctgcagaaagattcacctttccaagagccatccattcagctgacggagttactacatg

SEQ ID NO: 87362 - DNA, 80 bp, synthetic construct
  source 1..80: mol_type = other DNA
cttagtactcctgccatatgatcccagtcttccattggatatgtcagagttagctgatttaatattgaatgaatggttcc

SEQ ID NO: 87363 - DNA, 80 bp, synthetic construct
  source 1..80: mol_type = other DNA
accaccccacctccacaactacgacatgtgctattcgaaattgtaagaagttaggtccaagagagaacgtagctgccata

SEQ ID NO: 87364 - DNA, 80 bp, synthetic construct
  source 1..80: mol_type = other DNA
aatgaggcatgcaagcttccccaaaacgttagtgcgtattccaacatgctgaaaacatcacatattgaattttaccgtgt

SEQ ID NO: 87365 - DNA, 80 bp, synthetic construct
  source 1..80: mol_type = other DNA
cagaattaagaaaacctatgataatatttttacctttctacgagcttccattaacccaaatgttaatattggacattgct

SEQ ID NO: 87366 - DNA, 80 bp, synthetic construct
  source 1..80: mol_type = other DNA
attaatttattagagaacatacataccccaacctccaccgtacaccttacgcgtaattgtatcgacctatcttttacttg

SEQ ID NO: 87367 - DNA, 80 bp, synthetic construct
  source 1..80: mol_type = other DNA
tttctactacctgcagcctccttacacaatgtaaactaaaaatggcccataaattaattaaaccaaatcccctaacttcg

SEQ ID NO: 87368 - DNA, 80 bp, synthetic construct
  source 1..80: mol_type = other DNA
aatcataaaacgtcagctactgaggtacacaattgcaagtggtgttcagttaaccataatcccactgtccggaatgcccc

SEQ ID NO: 87369 - DNA, 80 bp, synthetic construct
  source 1..80: mol_type = other DNA
tccattagatggtgacgtttattccgtatttgggtattccgatgacatgaataatatcccccaaactccattctcattta

SEQ ID NO: 87370 - DNA, 80 bp, synthetic construct
  source 1..80: mol_type = other DNA
taaatttagtagatatatatgataacctattaccccctgatgtgaatcccactagaatgtccctcctaccagcatcccta

SEQ ID NO: 87371 - DNA, 80 bp, synthetic construct
  source 1..80: mol_type = other DNA
tcctgtgtctaccagccgtagagcccccacacactgtaaactcaaaatggcatctaaattaatcaaaccaaactatccaa

SEQ ID NO: 87372 - DNA, 80 bp, synthetic construct
  source 1..80: mol_type = other DNA
ggagagaaaatcatcaacctgtgttgtttccctcgaaggaactgctcttaaaatctgttttgatagctattggtcaatta

SEQ ID NO: 87373 - DNA, 80 bp, synthetic construct
  source 1..80: mol_type = other DNA
cgaataccaaatcccatccaatgaagataaaccaacctcccatatatgtgttaaagaacttgttgctgaattgacctggc

SEQ ID NO: 87374 - DNA, 80 bp, synthetic construct
  source 1..80: mol_type = other DNA
aaaataatactaagagtggccttgttactgatttcccccccctagatcaaagaataccttggcaaaattggtatgcgttc

SEQ ID NO: 87375 - DNA, 80 bp, synthetic construct
  source 1..80: mol_type = other DNA
ccatcttcaatgccacaaggtaccacactccatgtatgtaagaaactgctctttcaaaagaccaagcaggagaagaatcc

SEQ ID NO: 87376 - DNA, 80 bp, synthetic construct
  source 1..80: mol_type = other DNA
ggaaagaaaatccccaagatgtacccttccattcgaaagagctactctccaaatctgtgttgataactcctggtcagtca

SEQ ID NO: 87377 - DNA, 80 bp, synthetic construct
  source 1..80: mol_type = other DNA
tgaatataaaccccccctgaccgaagccaaaccaatttcagatgtatgtgttaaagaacttgttgctgacctaagatggc

SEQ ID NO: 87378 - DNA, 80 bp, synthetic construct
  source 1..80: mol_type = other DNA
cccccccaaaaccaaatagcagatcttcagcaatattgcaataaattggaagctgatttacaaggcaaaccccgttccct

SEQ ID NO: 87379 - DNA, 80 bp, synthetic construct
  source 1..80: mol_type = other DNA
ggtgtcatcaattgagtggtatctaaggtctatggaattaccagatgatgtaaagaatccccttgaacagcagttaacct

SEQ ID NO: 87380 - DNA, 80 bp, synthetic construct
  source 1..80: mol_type = other DNA
cagcaaccccaaccagcagcccttcagcaatattgcaataacctggaccctgatttacaaggcaaattcccctccctggc

SEQ ID NO: 87381 - DNA, 80 bp, synthetic construct
  source 1..80: mol_type = other DNA
ctcatcaattgagtggtatcccaggtctatggaattaccagatgatgtaaagaatgatcctgaacagcagttaaattcaa

SEQ ID NO: 87382 - DNA, 80 bp, synthetic construct
  source 1..80: mol_type = other DNA
cccccccccccccaaatagcagatcttcaacaatattgtaataaattggaagctgatttgcaaggcaaatccacctcacc

SEQ ID NO: 87383 - DNA, 80 bp, synthetic construct
  source 1..80: mol_type = other DNA
agcctcatcagttgagtggtatctaaggtctatggaattaccagatgatgtaaagaatgaccttgaacagcagttaaatt

SEQ ID NO: 87384 - DNA, 80 bp, synthetic construct
  source 1..80: mol_type = other DNA
accaaccgccacctgacactatagattggaaccccagatatgatcaacttgaccgacgatttgagtcgtccaaacagcga

SEQ ID NO: 87385 - DNA, 80 bp, synthetic construct
  source 1..80: mol_type = other DNA
gttaccgaaaagtacaataattgggttattaaggcaaggaaagtaaacgaaaacatgaactctcttcagaatgttatccc

SEQ ID NO: 87386 - DNA, 80 bp, synthetic construct
  source 1..80: mol_type = other DNA
attggaaatccagatatgatcaacttgaccgacgccccccgtcgtccaaacagcgacctaatgaaaagtacaataatccg

SEQ ID NO: 87387 - DNA, 80 bp, synthetic construct
  source 1..80: mol_type = other DNA
acaacaagctcatatcaatgaattacaaacccctaccgaccaactagagcgtcctccacaatcaaaaataggatcagttc

SEQ ID NO: 87388 - DNA, 80 bp, synthetic construct
  source 1..80: mol_type = other DNA
cttcatccattgaatggtacttacggtcccccgaactatcagatgacattaaatcagatattgaacaacaactcaattca

SEQ ID NO: 87389 - DNA, 80 bp, synthetic construct
  source 1..80: mol_type = other DNA
tccctaaccgtactaggtccatgaaagagaaaatagaacgtggagaagtcgaagtggatgatgcattcaccgaagaaaga

SEQ ID NO: 87390 - DNA, 80 bp, synthetic construct
  source 1..80: mol_type = other DNA
agatgattgatacccccacccctcgtgaaccccaacaggttgaattgcttaaacgtatacaccataacctgataactaga

SEQ ID NO: 87391 - DNA, 80 bp, synthetic construct
  source 1..80: mol_type = other DNA
acaccccacgttatagccatcccgaccgaattcacccagaaaaacatcaaaacgctagatgaaccggagagtggaaccac

SEQ ID NO: 87392 - DNA, 80 bp, synthetic construct
  source 1..80: mol_type = other DNA
agaaaaacatcaaaacgctagatgaaccggagagtggaaccaccccccatgaaccgtcagaagtgactgcatccatgtaa

SEQ ID NO: 87393 - DNA, 80 bp, synthetic construct
  source 1..80: mol_type = other DNA
aaaatagcattgaagaccccaaacccctcatataccgtgcccaaatactgtatagtcacgatccctaatactctccccaa

SEQ ID NO: 87394 - DNA, 80 bp, synthetic construct
  source 1..80: mol_type = other DNA
aatgctcgtataaggtggtgaagtattgcattgtaacacctttccacccatccccgaaactagcaggttataaagaacag

SEQ ID NO: 87395 - DNA, 80 bp, synthetic construct
  source 1..80: mol_type = other DNA
aactagcaggttataaagaacagatcactaccaaagatgaaataccaaagcaaccggacagagtcctccaaccaccgacc

SEQ ID NO: 87396 - DNA, 80 bp, synthetic construct
  source 1..80: mol_type = other DNA
cgtcagttggaaccccttgataagttaactacacgtgaaattgagcaagccgaattactccaacgtattcctgccaaatt

SEQ ID NO: 87397 - DNA, 80 bp, synthetic construct
  source 1..80: mol_type = other DNA
aactagcagcctataaagaacagatcactaccaaacctgaaatagaaaagcccatggacagagttcctaaagaaccgacc

SEQ ID NO: 87398 - DNA, 80 bp, synthetic construct
  source 1..80: mol_type = other DNA
cgtcagtccgaaatgattgataagttaactacacgtgaaattccgcaagttgaattacttaaacgtattcctgataaatc

SEQ ID NO: 87399 - DNA, 80 bp, synthetic construct
  source 1..80: mol_type = other DNA
aaagtcccccccaccccccgagaattgaagcagattctgattttgaagaccatgccttggatccttcagatcctcctccc

SEQ ID NO: 87400 - DNA, 80 bp, synthetic construct
  source 1..80: mol_type = other DNA
tccccacggccaccgtccaaattgccaacctaagaaaacctccttcgcactaagaatgaggatgaaacgacccgcaatgc

SEQ ID NO: 87401 - DNA, 80 bp, synthetic construct
  source 1..80: mol_type = other DNA
attgccaacctaagaaaacctccttcgcactaagaatgaggatgaaacgacccgcaatgcaattgatcgaagatttgtaa

SEQ ID NO: 87402 - DNA, 80 bp, synthetic construct
  source 1..80: mol_type = other DNA
aggtattcctccccgtgcccccctcccctcccgtatatcaatttcaactgataataagaaggccaaatccaaaaaagatc

SEQ ID NO: 87403 - DNA, 80 bp, synthetic construct
  source 1..80: mol_type = other DNA
accgccggaaacaccccccgagaattgaagcagattctccttctgaagattatcctttggatccttcagatagtcctgac

SEQ ID NO: 87404 - DNA, 80 bp, synthetic construct
  source 1..80: mol_type = other DNA
ggaaaatgtaaaaattgtaagtataaaaagaaatcccccccacttcgttcccgaatgaaacaagtcgcaatgcacctgat

SEQ ID NO: 87405 - DNA, 80 bp, synthetic construct
  source 1..80: mol_type = other DNA
attgtaagtataaaaagaaatcccccccacttcgttcccgaatgaaacaagtcgcaatgcacctgattaaagatttgtga

SEQ ID NO: 87406 - DNA, 80 bp, synthetic construct
  source 1..80: mol_type = other DNA
gaaaaggccaaggaaagagagaacaggggcggagggcacccgcgaagccagcaggggagggaggacccggagaaagaagg

SEQ ID NO: 87407 - DNA, 80 bp, synthetic construct
  source 1..80: mol_type = other DNA
agaccggcacagggcccgagagcgacagccggaggacgacaaagacggcggacaccgagcgggcgacaagggacgcgccg

SEQ ID NO: 87408 - DNA, 80 bp, synthetic construct
  source 1..80: mol_type = other DNA
gacaccgagcgggcgacaagggacgcgccgcgggggacgggccaggggaggcgggaccggggcgggacgggggaggggcg

SEQ ID NO: 87409 - DNA, 80 bp, synthetic construct
  source 1..80: mol_type = other DNA
gcggagggggaagggggacagccaccgagcagaccggcacagggcccgagagcgacagccggaggacgacaaagacggcg

SEQ ID NO: 87410 - DNA, 80 bp, synthetic construct
  source 1..80: mol_type = other DNA
ccggagccagcggcagggggggggggagcagcagcacgggaccgggaaagacagggagcacgcacaaggagcaagacacc

SEQ ID NO: 87411 - DNA, 80 bp, synthetic construct
  source 1..80: mol_type = other DNA
gaaagacagggagcacgcacaaggagcaagacaccaacgaacaaggcgacgggggccgggcgacaggcacaagaggagga

SEQ ID NO: 87412 - DNA, 80 bp, synthetic construct
  source 1..80: mol_type = other DNA
tactagtgaaatgagaaactgctctttcaacattaccacagaaacaggagagaaaaggctgaaaaactatgcactttttt

SEQ ID NO: 87413 - DNA, 80 bp, synthetic construct
  source 1..80: mol_type = other DNA
cagcacaagaggacgaggaggggggcgggccaggcaggccacagggaccgcgaagaccaaggacggacaagggagcgggg

SEQ ID NO: 87414 - DNA, 80 bp, synthetic construct
  source 1..80: mol_type = other DNA
agaaatgaaaaactgctctttcaataccctcatgagagaaagacttggttggcagaaagaatatgcacttttttataagc

SEQ ID NO: 87415 - DNA, 80 bp, synthetic construct
  source 1..80: mol_type = other DNA
aaactgctctttcaatacaaccacaggaataagggacaagaaacagaaagcagagcttgatatagtgccaattaataaaa

SEQ ID NO: 87416 - DNA, 80 bp, synthetic construct
  source 1..80: mol_type = other DNA
ctacaaagatgtgatactttggtttagcttcggggcatcatgtttcatacttctggccattgcaatgggctttgtcttca

SEQ ID NO: 87417 - DNA, 80 bp, synthetic construct
  source 1..80: mol_type = other DNA
tgtcagcattgtactaacaacagtaggattgattctccaaataacaagcttgtgctcgatatggttcagtcattataacc

SEQ ID NO: 87418 - DNA, 80 bp, synthetic construct
  source 1..80: mol_type = other DNA
ggactagcggtagtagtattgcattttgtggtgttaattttgataccacaggttggtcgtggcctgaaggcgctctgtgc

SEQ ID NO: 87419 - DNA, 80 bp, synthetic construct
  source 1..80: mol_type = other DNA
gcccaaacaagaggagaatacaacaataattactaaggaagctgattggaaaacaccaagctatctgctgttgaacaaga

SEQ ID NO: 87420 - DNA, 80 bp, synthetic construct
  source 1..80: mol_type = other DNA
tcatgcatatataagctttcgcaattttagaaaaaactggagacaatgcagaagagtacgacaattaaggaaaaaaatac

SEQ ID NO: 87421 - DNA, 80 bp, synthetic construct
  source 1..80: mol_type = other DNA
ccttggccaagacccctcgtctctgctcattaaacccaagcctattcaaggctctactcctcttccagagaaagccttcc

SEQ ID NO: 87422 - DNA, 80 bp, synthetic construct
  source 1..80: mol_type = other DNA
caactatactccacctgctgcaggtctccccgctgtcttggtctgacgtgcccatgtgtccttcccttcaagcccgggcc

SEQ ID NO: 87423 - DNA, 80 bp, synthetic construct
  source 1..80: mol_type = other DNA
ataaaacccttacaaacagcaacacagacatcactaatactgggggcgctagaccgagagagcaaaaggaggacgaggag

SEQ ID NO: 87424 - DNA, 80 bp, synthetic construct
  source 1..80: mol_type = other DNA
atgagcgtatcaattatcgatctccagacctctgtgtgcctcgtttatcactggatgtctctgctgcgttttatcatctt

SEQ ID NO: 87425 - DNA, 80 bp, synthetic construct
  source 1..80: mol_type = other DNA
cctgttcatcctgctgctatgcctcatcttcttgttggttcttctggactatcaaggtatgttgcccgtttgtcctctaa

SEQ ID NO: 87426 - DNA, 80 bp, synthetic construct
  source 1..80: mol_type = other DNA
gtgagctggtcacaccccaaccgggtgttcacaaatcgttctgtatatcgatggatgtgtacgcggccttatattctatt

SEQ ID NO: 87427 - DNA, 80 bp, synthetic construct
  source 1..80: mol_type = other DNA
gggctttcccccactgtttggctttcagttatatggatgatgtgtattgggggccaagttgtacagcatcgacttttata

SEQ ID NO: 87428 - DNA, 80 bp, synthetic construct
  source 1..80: mol_type = other DNA
cctcgtcatcctggtgctatgcctcatcttgttggtggctcttctggactaccagggtatgttgcccgtttgtcctctta

SEQ ID NO: 87429 - DNA, 80 bp, synthetic construct
  source 1..80: mol_type = other DNA
gaagagttattattcgtcagcgtcttgtcctgagagtgtcctgtttatcgcttcatgtgtctgcggcgttttatcagctt

SEQ ID NO: 87430 - DNA, 80 bp, synthetic construct
  source 1..80: mol_type = other DNA
tcgtggtcgttactcacctatcccgtgtcctccatgtgtcctgtgtatcgctggatatgtctgcggcgttttatcagctt

SEQ ID NO: 87431 - DNA, 80 bp, synthetic construct
  source 1..80: mol_type = other DNA
acattccctacaatccccaaagtcaaaaaataataaaatccataaataaaaaattaaaaaaaattataaaacaaataaaa

SEQ ID NO: 87432 - DNA, 80 bp, synthetic construct
  source 1..80: mol_type = other DNA
acagcaccaaagacaacgagaccttcagacctaaaaaaaaagatataaaagacaattaaaaaagtaaattatataaatac

SEQ ID NO: 87433 - DNA, 80 bp, synthetic construct
  source 1..80: mol_type = other DNA
tattaaagtcagaaactaaagaatagtactgttagcttgctcaacgccgcagccatagcagtaactaaaagaacagataa

SEQ ID NO: 87434 - DNA, 80 bp, synthetic construct
  source 1..80: mol_type = other DNA
aattataaaagtattacaaaaaattttagacaaagcttcaaaaagactttaatataaaataagtggcaagtagtctaaat

SEQ ID NO: 87435 - DNA, 80 bp, synthetic construct
  source 1..80: mol_type = other DNA
atagtagatagcctactgtaaaaaaaaaaataaaacgaactaagccaacagctgagccagcagcagataaagtaagtgca

SEQ ID NO: 87436 - DNA, 80 bp, synthetic construct
  source 1..80: mol_type = other DNA
aacagaaacaaatccaggcaatcagtaaacaaattattaacacttatctaagtcaacctacaaagcctgtgcctcttcag

SEQ ID NO: 87437 - DNA, 80 bp, synthetic construct
  source 1..80: mol_type = other DNA
ctaccaccgcttaaaaaacttactcttaattgtaacaaaaattataaaacttctaaaacgcaggaggtaaaaaatcctca

SEQ ID NO: 87438 - DNA, 80 bp, synthetic construct
  source 1..80: mol_type = other DNA
aatattagtaaaatctcctacagtattaaagtcagaaactaaaaaatagtgctgttagcttgctcaacgccgcagccata

SEQ ID NO: 87439 - DNA, 80 bp, synthetic construct
  source 1..80: mol_type = other DNA
gcagtagctaaaaaaacaaataaaattataaaagtattacaaaaaatttttaaaactgttctccacatacctaaaaaaat

SEQ ID NO: 87440 - DNA, 80 bp, synthetic construct
  source 1..80: mol_type = other DNA
aaaacaaagcttcaaaaaagctttagtataaaataagtagcaagtagtctaaatgtagtaaataacctgctgtaaaaaaa

SEQ ID NO: 87441 - DNA, 80 bp, synthetic construct
  source 1..80: mol_type = other DNA
acctgcatagaataaaaaaccagaaaaaaaaagtgttaaagtaaaggtttaacagccgcctagcattccatcacgtggcc

SEQ ID NO: 87442 - DNA, 80 bp, synthetic construct
  source 1..80: mol_type = other DNA
caaaaaaagcatccagagtattacaaaaactaaaactgctaacatcaaactttctacaaaaaactttccgctgagaactt

SEQ ID NO: 87443 - DNA, 80 bp, synthetic construct
  source 1..80: mol_type = other DNA
ttcttctactgtaatttaacacagttatttaatagtacttaaaggcataataattcaatacaattagataataatactta

SEQ ID NO: 87444 - DNA, 80 bp, synthetic construct
  source 1..80: mol_type = other DNA
atagtagtagcaataccaccaacaaaaccttcagacctaaaaaaaaagatataaaagacaattaaagaaataaattatat

SEQ ID NO: 87445 - DNA, 80 bp, synthetic construct
  source 1..80: mol_type = other DNA
ttaaaataatagttaaagtaataaatcttacaataagatttaaagcaacataacctaaatgcagtaaaaaaaaaaattga

SEQ ID NO: 87446 - DNA, 80 bp, synthetic construct
  source 1..80: mol_type = other DNA
cgtttcagacccacctcccaaccaaaagaagacccgacaagcccgcaaaaaccgaagaaaaaagtaaaaaaaaagacaga

SEQ ID NO: 87447 - DNA, 80 bp, synthetic construct
  source 1..80: mol_type = other DNA
tattaaagtcaagaactaaagaatagtgctattagcttactcaacgccacagccatagcagtagctaaaaagacagataa

SEQ ID NO: 87448 - DNA, 80 bp, synthetic construct
  source 1..80: mol_type = other DNA
aattataaaaatattacaaagaattttcaaagctattatccacatacctaaaaaaataagacaaagtttaaaaaagtttt

SEQ ID NO: 87449 - DNA, 80 bp, synthetic construct
  source 1..80: mol_type = other DNA
tgctataaaataagtaataagtagtcaaaaagttagcctgctgtaaaaaaaaaaataagacaagctaagcccaaagaaaa

SEQ ID NO: 87450 - DNA, 80 bp, synthetic construct
  source 1..80: mol_type = other DNA
aattgctaagcccaaagaaaaaataagacaagctaagccagcagcagctaaagtaaaaccagcatctcaagacctaaaaa

SEQ ID NO: 87451 - DNA, 80 bp, synthetic construct
  source 1..80: mol_type = other DNA
cataagatagatgacccagagaaaaaagtgctaatgtaaaagtttgacatcagcctagcacgacaccacaaggcccaaaa

SEQ ID NO: 87452 - DNA, 80 bp, synthetic construct
  source 1..80: mol_type = other DNA
gctgcatccaaagtactacaaagactgctgacatcaagatttctacaaaagactttccgctaaagactttccagaagaag

SEQ ID NO: 87453 - DNA, 80 bp, synthetic construct
  source 1..80: mol_type = other DNA
tactaaaaaaataaaaaattgctctttcaatgtcaccaaaagcataacaaataagttacacaaaaaatatgcactctttt

SEQ ID NO: 87454 - DNA, 80 bp, synthetic construct
  source 1..80: mol_type = other DNA
acaattaaaaaagtaaattatataaatataaagtagtaaaaattaagccattaaaaatagcacccaccaaggcaaaaaaa

SEQ ID NO: 87455 - DNA, 80 bp, synthetic construct
  source 1..80: mol_type = other DNA
agtctttacgcaaccaggaaaggacccgacaagcccgcaagaaccgaagaaaaaagtaaaaaaagagacaaagacacatc

SEQ ID NO: 87456 - DNA, 80 bp, synthetic construct
  source 1..80: mol_type = other DNA
aaaactacagaaaaaataaaaaattgctctttcaatgtcaccaaaggcataacaaataagttacacaaagaatatgcact

SEQ ID NO: 87457 - DNA, 80 bp, synthetic construct
  source 1..80: mol_type = other DNA
tattagagtctagaactaaagaatagtgctgttaacttgtttaataccacagcaatagtagtagctgaaaggacagataa

SEQ ID NO: 87458 - DNA, 80 bp, synthetic construct
  source 1..80: mol_type = other DNA
agaaaaaataaaaaattgctctttcaatgtcaccacaagcataagaaataagacacagaaaaaagcggcacttttttata

SEQ ID NO: 87459 - DNA, 80 bp, synthetic construct
  source 1..80: mol_type = other DNA
aaaaaaaaaagaaataaaaaattgctctttcaatgtcaccacaagcataaaaaataagacacagaaaaaagcggcacttt

SEQ ID NO: 87460 - DNA, 80 bp, synthetic construct
  source 1..80: mol_type = other DNA
tattaaagtctgaaactaaaaaatagtgctgttaacttgtttaataccacagcaatagtagtagctaaaaaaaacaaata

SEQ ID NO: 87461 - DNA, 80 bp, synthetic construct
  source 1..80: mol_type = other DNA
atgaatccaaatcagaaaataataaccattggatcgatatccttagggttggtagtcctcaatatcctcctacatatagt

SEQ ID NO: 87462 - DNA, 80 bp, synthetic construct
  source 1..80: mol_type = other DNA
ataataacaattggctctgtctctctaaccattgcaacagtatgtttcctcatgcagattgccattctagcaacgactgt

SEQ ID NO: 87463 - DNA, 80 bp, synthetic construct
  source 1..80: mol_type = other DNA
atgaatgcagcataccctcgaacaatcaaaccatagagaaagaactttgtcctaaagtggtagaatacaggaattggtcg

SEQ ID NO: 87464 - DNA, 80 bp, synthetic construct
  source 1..80: mol_type = other DNA
actggaacaagcaaagcatgctcaggttcattctatagaattatgaaatggctgacgcacaagagcagttcctaccctat

SEQ ID NO: 87465 - DNA, 80 bp, synthetic construct
  source 1..80: mol_type = other DNA
attattcatcagagaggggaaaattgttcatattagtcccttggcggggagtgcgcaacatatagaagagtgttcctgtt

SEQ ID NO: 87466 - DNA, 80 bp, synthetic construct
  source 1..80: mol_type = other DNA
tggatgtcatggatcattgccacaagaacacatcatacaaaaaatcaaagactgtttcagaaaacttcctgttaacaggc

SEQ ID NO: 87467 - DNA, 80 bp, synthetic construct
  source 1..80: mol_type = other DNA
tacaatgtgaggaggagttacccactgcaagtactgccaactctcccagaagtgtacaaaggccacagattgtgcaaaag

SEQ ID NO: 87468 - DNA, 80 bp, synthetic construct
  source 1..80: mol_type = other DNA
aaaatctgttctctcatttcttcgcacaccacacttcaaacccactggaggtatacagagtacttggggttggacccact

SEQ ID NO: 87469 - DNA, 80 bp, synthetic construct
  source 1..80: mol_type = other DNA
ggcaaaaaaagcccaacacgcaatgcgttcattataattcagttcactggtgtaatgagggtattggggctttttaaacg

SEQ ID NO: 87470 - DNA, 80 bp, synthetic construct
  source 1..80: mol_type = other DNA
tagtacagaacatcataatagatacttttcagaggaagatgttgctaaggtgaggacaaatggtgtttacatcgacgtaa

SEQ ID NO: 87471 - DNA, 80 bp, synthetic construct
  source 1..80: mol_type = other DNA
gatcaagttttgacacgaatgactggaaaaagagaaggaaattaatagaagaagaaacaaagcaatggctggacatatca

SEQ ID NO: 87472 - DNA, 80 bp, synthetic construct
  source 1..80: mol_type = other DNA
tataaattactagaaactaaatatgtagaagcaatattattgaaaatgacagcaatggacatagaaataccagatggata

SEQ ID NO: 87473 - DNA, 80 bp, synthetic construct
  source 1..80: mol_type = other DNA
tatctacttattgatagacaaaccattaaaagaaaaaaggtgaagattactaaatcattaatatacaatgctataaacac

SEQ ID NO: 87474 - DNA, 80 bp, synthetic construct
  source 1..80: mol_type = other DNA
gataacgtattcatttctggaaaatactcattaagaggcaaaactgaaggagtgttagcgttatactgtttgtcaaatac

SEQ ID NO: 87475 - DNA, 80 bp, synthetic construct
  source 1..80: mol_type = other DNA
gactttaaaactaacgcagattatacatttttaccatcagattttacatgctcagtaagtacaatactaacgtcatatag

SEQ ID NO: 87476 - DNA, 80 bp, synthetic construct
  source 1..80: mol_type = other DNA
caaatcaagtagctacaacaatcatattatacctgaacgatacgattataaatgaagtaagtaaagcatttgaattgctg

SEQ ID NO: 87477 - DNA, 80 bp, synthetic construct
  source 1..80: mol_type = other DNA
aggatatgctggagcgtttggttatgcaataacgaaagaccttaagtctgatggaaataatcatatatacattattccaa

SEQ ID NO: 87478 - DNA, 80 bp, synthetic construct
  source 1..80: mol_type = other DNA
tgaaagtaattttgatacatttgcatcacatctgggattatcaagatattcgcattcaaaaagattttcagaatcagcaa

SEQ ID NO: 87479 - DNA, 80 bp, synthetic construct
  source 1..80: mol_type = other DNA
gattaaacagtttaaagttaaatctgatatttatgaagaacatactgatgatgaagtacagaatgcgatcgaagcagctt

SEQ ID NO: 87480 - DNA, 80 bp, synthetic construct
  source 1..80: mol_type = other DNA
atacgtattatctattagatggtgacagagttggtaaagaatatgcgaagaaaatgatggaaatctggaaaattcaggtt

SEQ ID NO: 87481 - DNA, 80 bp, synthetic construct
  source 1..80: mol_type = other DNA
gtaaagaatatgcgaagaaaatgatggaaatctggaaaattcaggtttgaggctaaccacctctaccatatgatgtggct

SEQ ID NO: 87482 - DNA, 80 bp, synthetic construct
  source 1..80: mol_type = other DNA
gtataccggcacttattattaagacagatcacattggaatatttacatcatcaaatttcacctatgattggcaacatagg

SEQ ID NO: 87483 - DNA, 80 bp, synthetic construct
  source 1..80: mol_type = other DNA
atagtatattttcatgaatatacatattataaagataatgaatttattgttagtgatgagttttggctacatactaatat

SEQ ID NO: 87484 - DNA, 80 bp, synthetic construct
  source 1..80: mol_type = other DNA
tgataccatataagttactatattatgaaaggggattgagaaaattatatgatggtgaagagtacacattgtataataca

SEQ ID NO: 87485 - DNA, 80 bp, synthetic construct
  source 1..80: mol_type = other DNA
atgatattttatataaatatatatatgaaaaggacactattatgagtggtgctgattatttagaattgtatgaagataaa

SEQ ID NO: 87486 - DNA, 80 bp, synthetic construct
  source 1..80: mol_type = other DNA
aattttagaaatttcgtacattttatgagattattacgaatgagatttgcagttccatttgatcagttgtcaaatagaat

SEQ ID NO: 87487 - DNA, 80 bp, synthetic construct
  source 1..80: mol_type = other DNA
tgctttttttaagagtaaaatacatgtcggtttacgtaatgagtcaataccacaagctttagataatataacttcacagt

SEQ ID NO: 87488 - DNA, 80 bp, synthetic construct
  source 1..80: mol_type = other DNA
ggattaattattcagcaaatgggatactgatatcagaattgaaaggttcaggaaattactcagagaaaaggataagtgaa

SEQ ID NO: 87489 - DNA, 80 bp, synthetic construct
  source 1..80: mol_type = other DNA
atcggagcagcacctggttattggataaagtcaatgaaaaaatattttactatagtaacgtatgataataaaaaagttga

SEQ ID NO: 87490 - DNA, 80 bp, synthetic construct
  source 1..80: mol_type = other DNA
tgggattttttcccgaccaccagttggatccagcattcagagcaaacaccagaaatccagattgggaccacaatcccaac

SEQ ID NO: 87491 - DNA, 80 bp, synthetic construct
  source 1..80: mol_type = other DNA
tatgtttccctcatgttgctgttcaaaaccttcggacggaaattgcacttgtattcccatcccatcatcatgggctttcg

SEQ ID NO: 87492 - DNA, 80 bp, synthetic construct
  source 1..80: mol_type = other DNA
tactggagctggaaaaccgaagtttctaccggatttgtatgattacaaagagaacagattcatcgaaattggagtgacaa

SEQ ID NO: 87493 - DNA, 80 bp, synthetic construct
  source 1..80: mol_type = other DNA
catcccttctgacctcgctgcccgagccagtcggcttaccgctaccgttgaagtgactgacgctgatggccgccttatct

SEQ ID NO: 87494 - DNA, 80 bp, synthetic construct
  source 1..80: mol_type = other DNA
gtgaaactactataggcaataagacctttaaaacagtttttactgatggtgcccagttagaggctaacgggccagagcaa

SEQ ID NO: 87495 - DNA, 80 bp, synthetic construct
  source 1..80: mol_type = other DNA
ccttgaggtgcgtgttacttccgccggactcgactgcaaggctgttttcccatctggtgtagcgaccccctccacccctg

SEQ ID NO: 87496 - DNA, 80 bp, synthetic construct
  source 1..80: mol_type = other DNA
gggaggtgtccgctttttgctcagccttgtacaggttcaatcgctgtgtccagcggcactccctcatcggtggcctgtgg

SEQ ID NO: 87497 - DNA, 80 bp, synthetic construct
  source 1..80: mol_type = other DNA
cctttttgtggggagagtaccctctacacccggacttggtcagtgtcagggttttctagctgcttttccccgcttgagcc

SEQ ID NO: 87498 - DNA, 80 bp, synthetic construct
  source 1..80: mol_type = other DNA
atttgtcaccgcctgtcgagactgacatgcctattgctattaatgtttcatccccaaccatctctgcactgcctcagccc

SEQ ID NO: 87499 - DNA, 80 bp, synthetic construct
  source 1..80: mol_type = other DNA
ccagcctccgaacgggcggccccctcaccaaacctagttgatagcggtgctgtttcggccctatcggacgccgccgttgc

SEQ ID NO: 87500 - DNA, 80 bp, synthetic construct
  source 1..80: mol_type = other DNA
ccccccggcgccggtgcagcccgcaacccaattatccgggccccgccggcggttacttcatacttaccctgatggctcaa

SEQ ID NO: 87501 - DNA, 80 bp, synthetic construct
  source 1..80: mol_type = other DNA
ggccttgcggcttataccctcaccccccggcctattatccatgctgttgcccccgattaccggaaggaacataaccccaa

SEQ ID NO: 87502 - DNA, 80 bp, synthetic construct
  source 1..80: mol_type = other DNA
ttacggcgggtgtgcccggctccggtaagtcccgttcggttcagcagggtgaggtggatgtggtggtggtgccaactcgt

SEQ ID NO: 87503 - DNA, 80 bp, synthetic construct
  source 1..80: mol_type = other DNA
caccaagtggtggcatgtcacacacagatgtcctgccgatgtctgcgagctgattcgtagtgcataccccaaaattcaga

SEQ ID NO: 87504 - DNA, 80 bp, synthetic construct
  source 1..80: mol_type = other DNA
tgattcgtagtgcataccccaaaattcagaccgcaagccgtgtcctccgctctttattctggggggagcccccggttggc

SEQ ID NO: 87505 - DNA, 80 bp, synthetic construct
  source 1..80: mol_type = other DNA
ttatcccacgcggcactgtcgactgcaacgttgacgcgcttgatgcatttccaccctcctgccaattcagtgcctatcac

SEQ ID NO: 87506 - DNA, 80 bp, synthetic construct
  source 1..80: mol_type = other DNA
ggctccctaaaccactttatccctgagcttagccctattagtttcaccacttgtgagctttatgagcttgtagaggctat

SEQ ID NO: 87507 - DNA, 80 bp, synthetic construct
  source 1..80: mol_type = other DNA
ccttcatgggggttgtggaactgattgtgctcctagcggagttgtttgatgtgttctggaccccaccagatatctcaagt

SEQ ID NO: 87508 - DNA, 80 bp, synthetic construct
  source 1..80: mol_type = other DNA
atatggcgcttgatctgctacgccggtcacaaacaccttccccatcccgacaagagagccctcctaagagccagagagac

SEQ ID NO: 87509 - DNA, 80 bp, synthetic construct
  source 1..80: mol_type = other DNA
ttcaaggggctgtctacaactttgatgaagacagggtgtccgccttcacaagcctggcccgagctaacggcttgtggctt

SEQ ID NO: 87510 - DNA, 80 bp, synthetic construct
  source 1..80: mol_type = other DNA
ttcaaggggctgtctacaactttgatgaagacagggtgtccgccttcacaagcctggcccgagctaacggcttggggctt

SEQ ID NO: 87511 - DNA, 80 bp, synthetic construct
  source 1..80: mol_type = other DNA
ttaagcatggcaacattgggtaaaaggctcagaagtgtcaaatctatggagggcctgcgtaacgctttggtgggctacaa

SEQ ID NO: 87512 - DNA, 80 bp, synthetic construct
  source 1..80: mol_type = other DNA
actgcttctgaagtgaagaaagtgttggggtgggatgttgaaccagaacaccaggaaagcacggccaaggcatggtgcga

SEQ ID NO: 87513 - DNA, 80 bp, synthetic construct
  source 1..80: mol_type = other DNA
tggggtttttgggtaagctcaacagtgttcataaccacaacccatgtcataccacctggggttaaagaagtctttggtga

SEQ ID NO: 87514 - DNA, 80 bp, synthetic construct
  source 1..80: mol_type = other DNA
gggaatcaccccatcaactttgcctagcacgtttgaaagggctgacccagttgatagccccattgaacagcaacctgtaa

SEQ ID NO: 87515 - DNA, 80 bp, synthetic construct
  source 1..80: mol_type = other DNA
ttgaggggggcccatccttacaacaggtgttaagggaccagttaaaaccatttgccgagccccgtggtagattacctgaa

SEQ ID NO: 87516 - DNA, 80 bp, synthetic construct
  source 1..80: mol_type = other DNA
ctctggggcgcggacctcggtaccgtcattcgcgctgccagagcatttggaccattttgtgaggccataaaaccccatgt

SEQ ID NO: 87517 - DNA, 80 bp, synthetic construct
  source 1..80: mol_type = other DNA
ctagcggtggggtcgatattggtgtcaatgatttaaccaccgtccgtggtccattttggaatatgtgccccctcccgcca

SEQ ID NO: 87518 - DNA, 80 bp, synthetic construct
  source 1..80: mol_type = other DNA
tggataccagggacgactcgaccgtaactctattgaaaggcagctttggtggactcgcggaccaaaccatgaggacccat

SEQ ID NO: 87519 - DNA, 80 bp, synthetic construct
  source 1..80: mol_type = other DNA
aagagggagggcttgaaatctacattcctggttggcaggccatgttccgctggatgcgactccatgatctaagtttgtgg

SEQ ID NO: 87520 - DNA, 80 bp, synthetic construct
  source 1..80: mol_type = other DNA
ggaagcagccttgctacattatctggaccctgatactcatagaaatcttggtgagttcaaattatatcctgatggcttca

SEQ ID NO: 87521 - DNA, 80 bp, synthetic construct
  source 1..80: mol_type = other DNA
cagccggcccggctcgtaggcttgggattaggagatcataatggctcaagccatacttggagccatagcagcaacagcag

SEQ ID NO: 87522 - DNA, 80 bp, synthetic construct
  source 1..80: mol_type = other DNA
gggggcgcctgctactcgtgtcattgactggaatggaactaggatcgccgcgcccatgtcaactgcgacgacacttaggt

SEQ ID NO: 87523 - DNA, 80 bp, synthetic construct
  source 1..80: mol_type = other DNA
ataggggtggtaagaataaacaatcaattggtggtggtttttctaatgtaaattatgatccctcagtctcctcttctcgt

SEQ ID NO: 87524 - DNA, 80 bp, synthetic construct
  source 1..80: mol_type = other DNA
ggtaagtgatttttgtaatatgaattagtgggcatcatattcaatttggaatcaattagatatttagattggcagatgat

SEQ ID NO: 87525 - DNA, 80 bp, synthetic construct
  source 1..80: mol_type = other DNA
gtgggcctgccaaaaaggcaacattaggtgcaacatttgcatttaagtgcattaattaaaaacaccctgctttcgctgat

SEQ ID NO: 87526 - DNA, 80 bp, synthetic construct
  source 1..80: mol_type = other DNA
aaacatggtttcgttatggatcagccattcggttaagaccgaagggaaaaaccacagtgaggtgtgcaacaaaaatgtca

SEQ ID NO: 87527 - DNA, 80 bp, synthetic construct
  source 1..80: mol_type = other DNA
caagattaaaaagagaggaaataagtggagtaaagttggaatcaataggaacttaccaaatactgtcaatttattcaaca

SEQ ID NO: 87528 - DNA, 80 bp, synthetic construct
  source 1..80: mol_type = other DNA
gtgctcatctgttcaaccctggtgtctagagatccctcagatcacttagactgaagcagaaaaatctctagcagtggcgc

SEQ ID NO: 87529 - DNA, 80 bp, synthetic construct
  source 1..80: mol_type = other DNA
agcaagacctgaaaggaggatacacagcagtatttatgcaaagagggcaaaacccaatcagaaaagggcctataaaatgt

SEQ ID NO: 87530 - DNA, 80 bp, synthetic construct
  source 1..80: mol_type = other DNA
ttcaactgtgggaaagagggacatatagcaaaaaattgtcgagcacctagaaagcaaggttgctggaaatgtggacaggc

SEQ ID NO: 87531 - DNA, 80 bp, synthetic construct
  source 1..80: mol_type = other DNA
cagctccaccgatggaggaagtgatgaagggacaagagaatcaggaacagaaagaggacacacccgaactctatcctttt

SEQ ID NO: 87532 - DNA, 80 bp, synthetic construct
  source 1..80: mol_type = other DNA
gcttccctcaaatccctctttgggacagaccagtagttacagcaagggtggaaggccatctgtgtgaagttttgctggat

SEQ ID NO: 87533 - DNA, 80 bp, synthetic construct
  source 1..80: mol_type = other DNA
tctaggaagaccaaggactggtactacagacatcattatgaatccagaaatccaagattcagttcaggtgtatatattcc

SEQ ID NO: 87534 - DNA, 80 bp, synthetic construct
  source 1..80: mol_type = other DNA
aatagggccggcttgtatagtagtgagcacatattggggattgatgccaggagaaagagatgaacatatgggacatgggg

SEQ ID NO: 87535 - DNA, 80 bp, synthetic construct
  source 1..80: mol_type = other DNA
tttacctgttttacagaatcagcaatcaggaaagccatcctagggcaaagaatactgcccaagtgtgaatactctgcagg

SEQ ID NO: 87536 - DNA, 80 bp, synthetic construct
  source 1..80: mol_type = other DNA
gcaatacaaaagttaagggaagtcatggggaacaggaagtctgcaagtgccactaaagaagacacaagtgcaaggcagac

SEQ ID NO: 87537 - DNA, 80 bp, synthetic construct
  source 1..80: mol_type = other DNA
gcatcacaaggacctgctattagtagtaattattagtgctttgctgcttataaatataattctatggatgtataatctta

SEQ ID NO: 87538 - DNA, 80 bp, synthetic construct
  source 1..80: mol_type = other DNA
gaaaatacttagaacaaaagaagcaagacagaagggaaagagaaatacttgacaggttaagaagaataagagaaattaga

SEQ ID NO: 87539 - DNA, 80 bp, synthetic construct
  source 1..80: mol_type = other DNA
gatgatagtgattatgaaagcaatgaagaagaagaacaagaagttagggatcatcttgtgcatgcttttggctttgctaa

SEQ ID NO: 87540 - DNA, 80 bp, synthetic construct
  source 1..80: mol_type = other DNA
tcccatgtttgaaatctgagaacttgtatgcaacagtctatgctggggtacctgtatgggaagaagcaaatccaatacta

SEQ ID NO: 87541 - DNA, 80 bp, synthetic construct
  source 1..80: mol_type = other DNA
ttctgtgcctcagatgttaacctaacaagcactgagcagcataatatttgggcatcacaagcctgtgttcccacaaaccc

SEQ ID NO: 87542 - DNA, 80 bp, synthetic construct
  source 1..80: mol_type = other DNA
gacaattctacaattaatgctacaaagagccctatggaacaagatataaaacaatgtgattttaatgtaaccacggttct

SEQ ID NO: 87543 - DNA, 80 bp, synthetic construct
  source 1..80: mol_type = other DNA
caaagataaaaaggagaaaaaacaggctctattctatgtatcagatttggttaaagtgaatgataaagtgaataagaatg

SEQ ID NO: 87544 - DNA, 80 bp, synthetic construct
  source 1..80: mol_type = other DNA
acagtaagtactcagctaatattaaatggaacactctcaaaaggaaagataagactgatgacaaagaatattacagataa

SEQ ID NO: 87545 - DNA, 80 bp, synthetic construct
  source 1..80: mol_type = other DNA
tggccaaaatatcatagtgaccctaaatactactataaatatgacctgccatagaccaggaaatctaaaagtacaggaaa

SEQ ID NO: 87546 - DNA, 80 bp, synthetic construct
  source 1..80: mol_type = other DNA
taaagataggtccaatgtcctggtacagcatgggcataggggctgaaaacgaaactaagtcaagatacgcttattgtgag

SEQ ID NO: 87547 - DNA, 80 bp, synthetic construct
  source 1..80: mol_type = other DNA
tataatgccactaattgggaaaaggccttaaaacagacagctgaaaggtatttagaattagtaaacaatacaggtattaa

SEQ ID NO: 87548 - DNA, 80 bp, synthetic construct
  source 1..80: mol_type = other DNA
tataagcatggtattcaacaacagtgctggaggagatgtagaaataacccatttgcattttaattgtcatggagagttct

SEQ ID NO: 87549 - DNA, 80 bp, synthetic construct
  source 1..80: mol_type = other DNA
tttactgttacacagctgatatgtttaagtatacctttagatgtaatgaaaccacctgtatcccaggattcaatagctca

SEQ ID NO: 87550 - DNA, 80 bp, synthetic construct
  source 1..80: mol_type = other DNA
gaatccaagaataacacccggataccttgcaggataaagcaggtagtaaggtcatggatgaggggaggatcaggactcta

SEQ ID NO: 87551 - DNA, 80 bp, synthetic construct
  source 1..80: mol_type = other DNA
tgcacctccaatccgaggaaacttaacatgtgaatcaaacataactggaatgattctacaaatggatgagccatggaaca

SEQ ID NO: 87552 - DNA, 80 bp, synthetic construct
  source 1..80: mol_type = other DNA
cgagcagaaagaacaacacatttagaccagtagggggagatatgaaagatatatggagaactgaattgctcagatacaaa

SEQ ID NO: 87553 - DNA, 80 bp, synthetic construct
  source 1..80: mol_type = other DNA
gtagtaaggataaaaccttttagtgtggcacctacaaaagttacaagaccagtcataggctttggcccccgcagagaaaa

SEQ ID NO: 87554 - DNA, 80 bp, synthetic construct
  source 1..80: mol_type = other DNA
agcaggacaacctgctgagagcaatacaggcccagcagcacttgctgaggctatctgtatggggtatcagacaactccga

SEQ ID NO: 87555 - DNA, 80 bp, synthetic construct
  source 1..80: mol_type = other DNA
gctcgcctgctagccttagaaaccttaatacagaatcagcaactcctaaactcatggggctgtaagggaaagctagtctg

SEQ ID NO: 87556 - DNA, 80 bp, synthetic construct
  source 1..80: mol_type = other DNA
ttacacagcagtaaaatggaacgagacggcatggaaaggaggtgaatatatttggaacaacctcacatggcaggaatggg

SEQ ID NO: 87557 - DNA, 80 bp, synthetic construct
  source 1..80: mol_type = other DNA
atcaggagatagccaatgtaagcgccaccatatttgaggaaatactaaatgcacaagtactacaggaacaaaatgagcga

SEQ ID NO: 87558 - DNA, 80 bp, synthetic construct
  source 1..80: mol_type = other DNA
aagttgctggagttagatgaatgggcttctctttgggattggcttcctataactaaatggttgtggtatataaaaatagc

SEQ ID NO: 87559 - DNA, 80 bp, synthetic construct
  source 1..80: mol_type = other DNA
aataatcatagtaggagcactaataggtgtaagaattgtcatggtagtacttaacttagtgaggaacattaggcagggat

SEQ ID NO: 87560 - DNA, 80 bp, synthetic construct
  source 1..80: mol_type = other DNA
atcaacccctctcgttacagatccccatccatcaccaatcggaagcagaaacgccaggaagaacaggagaaggaggtgga

SEQ ID NO: 87561 - DNA, 80 bp, synthetic construct
  source 1..80: mol_type = other DNA
ggagaaggcaggcccagattgataccatcgccgcaagggttcttgccactgttgtacacggacctgaggacaataatctt

SEQ ID NO: 87562 - DNA, 80 bp, synthetic construct
  source 1..80: mol_type = other DNA
gtggagttaccacctcttgagcaacttagcatcagggatccagaaggtgatcagctacctgagacttggactgtggactc

SEQ ID NO: 87563 - DNA, 80 bp, synthetic construct
  source 1..80: mol_type = other DNA
tagggcagaagataattaatgcttgcagaatttgtgcagctgtaatacaatactggctacaagaattgcagaatagtgcc

SEQ ID NO: 87564 - DNA, 80 bp, synthetic construct
  source 1..80: mol_type = other DNA
acaaatctagtagatactattgcagtagcagttgctaattggactgacagcataatcttagggatacaaaggttaggaag

SEQ ID NO: 87565 - DNA, 80 bp, synthetic construct
  source 1..80: mol_type = other DNA
aggaatttggaatatccccagaagaattagacaggggttggaaagaagtttgttataacatgggaaacgcattcaggaaa

SEQ ID NO: 87566 - DNA, 80 bp, synthetic construct
  source 1..80: mol_type = other DNA
agcagatttgaaggatggtcagcagtaagagaaagaatgagaagatcttcccctaaccctgaacctgcacctggagtagg

SEQ ID NO: 87567 - DNA, 80 bp, synthetic construct
  source 1..80: mol_type = other DNA
agactaggaaatacgtgtgagagggctagtctcctgcatccagcttgtaaccatggatttgaagatgcacacggagagat

SEQ ID NO: 87568 - DNA, 80 bp, synthetic construct
  source 1..80: mol_type = other DNA
actgaaatggcagtttgacagctctctaggccgcacccatgttgctatggtaatccacccagagctcttccacaaggact

SEQ ID NO: 87569 - DNA, 80 bp, synthetic construct
  source 1..80: mol_type = other DNA
aaaactgctgacctgaaggttgctgacactgtgggactttccagcgaagactgctaacattgcagggactttccagcgtg

SEQ ID NO: 87570 - DNA, 80 bp, synthetic construct
  source 1..80: mol_type = other DNA
ccctagtagttttatggtgtgttcacagaagagtggatataagtgacacacagcaggccattacaaaatggaaggaggaa

SEQ ID NO: 87571 - DNA, 80 bp, synthetic construct
  source 1..80: mol_type = other DNA
atgcagagaagaaagaaagcactagagggcagcactggaactggaacaagtcaaaactatcctattgtgcagaatgccca

SEQ ID NO: 87572 - DNA, 80 bp, synthetic construct
  source 1..80: mol_type = other DNA
ttaatactatgcttaatgcagtaggcggacatcagggagcgttacaggtgttgaaagaagtaattaatgaagaggctgca

SEQ ID NO: 87573 - DNA, 80 bp, synthetic construct
  source 1..80: mol_type = other DNA
gaatgggatagaacccatcctgtcccagtgggaccgttaccaccagggcagcttagagacccaacaggaggggatattgc

SEQ ID NO: 87574 - DNA, 80 bp, synthetic construct
  source 1..80: mol_type = other DNA
aggaaccactagtaacaagcaggaacagataacctggacaacaaggaacaataatcctataccagtaggagatatctata

SEQ ID NO: 87575 - DNA, 80 bp, synthetic construct
  source 1..80: mol_type = other DNA
ccttagaagaaatgatgaatgcctgtcaaggagtagggggaccaacacataaggccagggtcttagcagaagctatggca

SEQ ID NO: 87576 - DNA, 80 bp, synthetic construct
  source 1..80: mol_type = other DNA
gcagctaatcaagctaaccaagatttgaaaggagggtatacaactgttttcatgcagagtggacagagaaagccagttaa

SEQ ID NO: 87577 - DNA, 80 bp, synthetic construct
  source 1..80: mol_type = other DNA
gtgctttaactgtggaaaaataggacatatagcaaagaactgtaaggcacctaggagaaaaggatgctggaagtgtggac

SEQ ID NO: 87578 - DNA, 80 bp, synthetic construct
  source 1..80: mol_type = other DNA
cagccccaccaatggaggaggacgagatgacccgggacaagcagagggagagggaggaaagggaggacgagaaggaatac

SEQ ID NO: 87579 - DNA, 80 bp, synthetic construct
  source 1..80: mol_type = other DNA
gagggaggaaagggaggacgagaaggaataccctttaacctccctcagatcactctttgggacagaccagtaataccagt

SEQ ID NO: 87580 - DNA, 80 bp, synthetic construct
  source 1..80: mol_type = other DNA
cctttaacctccctcagatcactctttgggacagaccagtaataccagtaagagtaggggggcatatttgtgaggcttta

SEQ ID NO: 87581 - DNA, 80 bp, synthetic construct
  source 1..80: mol_type = other DNA
agaagttgaggaaatgggagatgagcaggagaaagctaagctgctacatccagcctgcacttatggggattcagatcatc

SEQ ID NO: 87582 - DNA, 80 bp, synthetic construct
  source 1..80: mol_type = other DNA
atagggagatcctaatgtggaagtttgatagatcactgggagaaagacatgttgccttacaaaagcacccggaactgttt

SEQ ID NO: 87583 - DNA, 80 bp, synthetic construct
  source 1..80: mol_type = other DNA
actaaagactaaagtgctgacgctacgcagctactaagttgctgacactgcagggactctccggggacggaaagtcccga

SEQ ID NO: 87584 - DNA, 80 bp, synthetic construct
  source 1..80: mol_type = other DNA
tagccttaaaagaatcaggaaaacaggctaacatagtaacagactcccaatatgtattagggatcatctcagcaactcca

SEQ ID NO: 87585 - DNA, 80 bp, synthetic construct
  source 1..80: mol_type = other DNA
attatgagacagtccatcctaggattagttcaggagtttacattccagtaggagcagcaatcattgttgtgactacttat

SEQ ID NO: 87586 - DNA, 80 bp, synthetic construct
  source 1..80: mol_type = other DNA
tgggggcttatgcctggggaaaaagaagaacaattaggacatggagcaagtgtggagtggagacaaggtaaatacaccac

SEQ ID NO: 87587 - DNA, 80 bp, synthetic construct
  source 1..80: mol_type = other DNA
ccagatagatccagaaacagcagataggctaattcatctccactactttcaatgtttttcagattcggctgtgaggaggg

SEQ ID NO: 87588 - DNA, 80 bp, synthetic construct
  source 1..80: mol_type = other DNA
caatactaggggacagggtattgaacaagtgtgaatactcagcaggacatagtcaggtaggctccttgcagtttttagcc

SEQ ID NO: 87589 - DNA, 80 bp, synthetic construct
  source 1..80: mol_type = other DNA
ttaaaagtggtagtagggaaagtaaaaaggaagccacccctccctagtgtccagatattgacacaagatatatggagcaa

SEQ ID NO: 87590 - DNA, 80 bp, synthetic construct
  source 1..80: mol_type = other DNA
ttaggacaatacatctataatacctatggggacacctgggagggagtaactgcaattattaggatcctacaacaattaat

SEQ ID NO: 87591 - DNA, 80 bp, synthetic construct
  source 1..80: mol_type = other DNA
ctttatccattatagaattggatgtcatcatagtagaataggtatattgccaccctctcgaagaggaaggagacatggac

SEQ ID NO: 87592 - DNA, 80 bp, synthetic construct
  source 1..80: mol_type = other DNA
ccagtagatcctgacctgcctccatggcagcagccagggagtcagccctcaagcccatgtaacaattgctactgcaaagc

SEQ ID NO: 87593 - DNA, 80 bp, synthetic construct
  source 1..80: mol_type = other DNA
ctgctgctatcattgctatgtttgtttcacaaagaagggtttggggatctcctatggcaggaagaagcgacgaagacctg

SEQ ID NO: 87594 - DNA, 80 bp, synthetic construct
  source 1..80: mol_type = other DNA
cgagagctgataacaacaatcagaatcatcaagatcctgtatcaaagtagtaagtagaaataataagttgcattaatgca

SEQ ID NO: 87595 - DNA, 80 bp, synthetic construct
  source 1..80: mol_type = other DNA
tcctagagatgtggcagtattaataatagctggggtattactaatttgcattatagtagtttgggggaaggtcctgctat

SEQ ID NO: 87596 - DNA, 80 bp, synthetic construct
  source 1..80: mol_type = other DNA
ttgtgctaaaagaaagagaaagggataagtttgtacaaaggctagtaaggtggagagaaaggcaagaagatggggggtat

SEQ ID NO: 87597 - DNA, 80 bp, synthetic construct
  source 1..80: mol_type = other DNA
gagagcaatgaagaagaagaagaacagcttagggaacttgggaatttgcttggctttggtaatatactttaatgctatta

SEQ ID NO: 87598 - DNA, 80 bp, synthetic construct
  source 1..80: mol_type = other DNA
gctgtactagtggaatacactatgttactgtatattatggggttccagtttggagaaatgctgaagttaccttgttttgt

SEQ ID NO: 87599 - DNA, 80 bp, synthetic construct
  source 1..80: mol_type = other DNA
gcagcagatgcatcgctaactagcaaagagcagcataatatttgggccacccaggcctgtgtgcccacagaccctgaacc

SEQ ID NO: 87600 - DNA, 80 bp, synthetic construct
  source 1..80: mol_type = other DNA
tgcaatgaatgccacaagcaggttaactgtactaataacccccctgtgaatagaaccaacgacaatccattagacctata

SEQ ID NO: 87601 - DNA, 80 bp, synthetic construct
  source 1..80: mol_type = other DNA
tcagtgcagttttaatacaaccacaatactaaaagataaaaaggagaaacagcaagcactcttctatagaacagacctaa

SEQ ID NO: 87602 - DNA, 80 bp, synthetic construct
  source 1..80: mol_type = other DNA
aaatgtgtcactcacctgtgtaagaccaggtaataacacaagaggacaagtgcaaataggacccatgacctggtataata

SEQ ID NO: 87603 - DNA, 80 bp, synthetic construct
  source 1..80: mol_type = other DNA
tgaaattctacacaggcgatatcaggaaagcttattgtaacatttccatgcaaaattggacagaaactttaaaatctgtc

SEQ ID NO: 87604 - DNA, 80 bp, synthetic construct
  source 1..80: mol_type = other DNA
agtaaggccatctggaaagcttatcctcaaccccccaacaaaaaccatacatttgtctttcggaacagtacagggggaga

SEQ ID NO: 87605 - DNA, 80 bp, synthetic construct
  source 1..80: mol_type = other DNA
cccagaggtttcttttctgcacttcaattgtcatggggaattcttttattgtaacaccagtagcctgtttaattatagct

SEQ ID NO: 87606 - DNA, 80 bp, synthetic construct
  source 1..80: mol_type = other DNA
atacttgtaatacctcgggtgcatgtatcattaatcctacaggtaatcacacaggtgagaacatgataataacactacct

SEQ ID NO: 87607 - DNA, 80 bp, synthetic construct
  source 1..80: mol_type = other DNA
tgtagactaaagcaagtagttaattcatggatgaaagtgggatcaggcttgtttgcgccacctatcgagggacaattgca

SEQ ID NO: 87608 - DNA, 80 bp, synthetic construct
  source 1..80: mol_type = other DNA
gtgccactccaacattacaggtttaatattagacagagcatcaccttataatgtcaacagcagtaacaccactttaagtc

SEQ ID NO: 87609 - DNA, 80 bp, synthetic construct
  source 1..80: mol_type = other DNA
ctaccgggggagaaatgagaaatatctggagaagtgagttatatccctacaaggtagttcaagtaaaagctctggctgtg

SEQ ID NO: 87610 - DNA, 80 bp, synthetic construct
  source 1..80: mol_type = other DNA
gcacctacaagggtctccagacctacaatcatggctcatgatgctcataggaaaaaaaggggagcaggcctaggaatgct

SEQ ID NO: 87611 - DNA, 80 bp, synthetic construct
  source 1..80: mol_type = other DNA
gcacgggctcggctcagcggagtgcacctgctgagaggcgagaggagctcacagcggtgagtacattttgtcagtggtgg

SEQ ID NO: 87612 - DNA, 80 bp, synthetic construct
  source 1..80: mol_type = other DNA
ctgcttgccattgaaacctacttaagggatcagcaattcctaggactgtggggatgctcaggacaaacagtatgttatac

SEQ ID NO: 87613 - DNA, 80 bp, synthetic construct
  source 1..80: mol_type = other DNA
taatgtgccatggaataggagctggaccaacaaaagtgagactgaattagatggcatttggactaatctaacatggcagg

SEQ ID NO: 87614 - DNA, 80 bp, synthetic construct
  source 1..80: mol_type = other DNA
aatgggacaaactggtggataattacactgacacaatttatttagaaatacaacgagcacaagatcagcaaaaggctaat

SEQ ID NO: 87615 - DNA, 80 bp, synthetic construct
  source 1..80: mol_type = other DNA
cctgtatcgttacagacccttggcctgaacggggatccagcaggaatagcaccaggaacaaacgaagaaggtggagaagc

SEQ ID NO: 87616 - DNA, 80 bp, synthetic construct
  source 1..80: mol_type = other DNA
aggcaacggcagatcgatcagattgctggacggattcttgcctctcgtctgggacgacctgaagaacctggtggtgcaga

SEQ ID NO: 87617 - DNA, 80 bp, synthetic construct
  source 1..80: mol_type = other DNA
tctaccagatcttagtcggctgcatattggggatcaaggacctcctaacaatcctgtggatacacctgggccaactgctg

SEQ ID NO: 87618 - DNA, 80 bp, synthetic construct
  source 1..80: mol_type = other DNA
accagagggcttaactgcctgcgagactgctttgctgcgtgtggctattggactcaagaattaaaacagagtgcaaccag

SEQ ID NO: 87619 - DNA, 80 bp, synthetic construct
  source 1..80: mol_type = other DNA
cttattggacactgttgctatatcagttgcagggtggactgatcaagtaataatagtagggcaacaaataggaagaggct

SEQ ID NO: 87620 - DNA, 80 bp, synthetic construct
  source 1..80: mol_type = other DNA
ttttgaacataccaagaaggataagacaagggatagaaagaagcttgctataatggggaatgcatggaagaaaagtagct

SEQ ID NO: 87621 - DNA, 80 bp, synthetic construct
  source 1..80: mol_type = other DNA
tagtgggctggccagcagtcagagaaagaatgaatcagactgccccagaaacacctgcacctggggttggggagatctcc

SEQ ID NO: 87622 - DNA, 80 bp, synthetic construct
  source 1..80: mol_type = other DNA
aaagacttagcacaaggaaaaggaatacccagtaaatataattcaaagaacaatgcagcattagccttcttagaagctca

SEQ ID NO: 87623 - DNA, 80 bp, synthetic construct
  source 1..80: mol_type = other DNA
atgacaaactgctctttcaacatcaccacaagcataagagacaaggtgacgaaggaatttgcacttttttatagagatga

SEQ ID NO: 87624 - DNA, 80 bp, synthetic construct
  source 1..80: mol_type = other DNA
agtcaggaactaaagagttgctatcttgtacaacgcaacagcaatagcagtagcgggaacagaggttatagaaatagcaa

SEQ ID NO: 87625 - DNA, 80 bp, synthetic construct
  source 1..80: mol_type = other DNA
gagccaggaactaaagaattgccgtcttgctcaacgccacagctatagcagtagcgggaacagagattatagaagcagta

SEQ ID NO: 87626 - DNA, 80 bp, synthetic construct
  source 1..80: mol_type = other DNA
aaactgctctttcaatatcaccgcaagcataggagataaaaggcgtgaagaatatgcacttttttataaaactgatgtaa

SEQ ID NO: 87627 - DNA, 80 bp, synthetic construct
  source 1..80: mol_type = other DNA
ctgttgtctccatcaaacgctggagtagttgtagaaggaactaataactcaaacagatggctagcaatcgttttgataga

SEQ ID NO: 87628 - DNA, 80 bp, synthetic construct
  source 1..80: mol_type = other DNA
accaaacgttcagactgagacgagaacatatacactatttggagttgaagaacaaatatctgtatcaaatgattcactaa

SEQ ID NO: 87629 - DNA, 80 bp, synthetic construct
  source 1..80: mol_type = other DNA
caaagtggaaattcatagatttatcaaaaactacacttaacggaacttttacacaacatggcccaatgctatcagatccc

SEQ ID NO: 87630 - DNA, 80 bp, synthetic construct
  source 1..80: mol_type = other DNA
aaactttacggcgttatgaaacacaacgggaaactatacacgtataacggtgagacaccgaatgcaacaaccggatatta

SEQ ID NO: 87631 - DNA, 80 bp, synthetic construct
  source 1..80: mol_type = other DNA
atccattattacacaaagggcgcaggctaacgaggacattattgtgtctaagacctcattatggaaggaaatgcaatata

SEQ ID NO: 87632 - DNA, 80 bp, synthetic construct
  source 1..80: mol_type = other DNA
agaggactaccgtggacccgggaccgttcgctcagacgggttatgcaccagtgaattgggggcctggtgaaactaacgat

SEQ ID NO: 87633 - DNA, 80 bp, synthetic construct
  source 1..80: mol_type = other DNA
catgcttgttaagtgaggaccaagctaatcacttggtatccaatcttatcatgcatgtagctatatcaagctgctcagac

SEQ ID NO: 87634 - DNA, 80 bp, synthetic construct
  source 1..80: mol_type = other DNA
gctcaaccttttgttaatcacgcaactgttggattgactctacggattgattcagcaatttgtgaatctgtactcgctga

SEQ ID NO: 87635 - DNA, 80 bp, synthetic construct
  source 1..80: mol_type = other DNA
tgctactgagacaatgttagctaatgtaacagccgttagacaagagtatgctgttccagttgggccagtatttccaccgg

SEQ ID NO: 87636 - DNA, 80 bp, synthetic construct
  source 1..80: mol_type = other DNA
aaggcgaagaaagtaaatgaaaatatgtactctcttcaaaatgttatatcacaacaacaaagtcaaattgctgatctgca

SEQ ID NO: 87637 - DNA, 80 bp, synthetic construct
  source 1..80: mol_type = other DNA
agacagttgctatccaattcatacgtaacgaacatttctgatgaggttagtgaaattggagctaggaaaacaacaaacgt

SEQ ID NO: 87638 - DNA, 80 bp, synthetic construct
  source 1..80: mol_type = other DNA
tgtggaaagagatgcaatataacagagatataacaattagatttaagtttgctaactcgattgtgaagtcaggaggttca

SEQ ID NO: 87639 - DNA, 80 bp, synthetic construct
  source 1..80: mol_type = other DNA
ggtaagagatgaaatgacaaactgctcattcaacgtcacagacatagagggtaagaggcaaaaacaatatggagcttttt

SEQ ID NO: 87640 - DNA, 80 bp, synthetic construct
  source 1..80: mol_type = other DNA
ataaatttgatttagtatcaataggtgagaatagtactggaaattgctctaaccttaatgagaatcagaaaaagaataat

SEQ ID NO: 87641 - DNA, 80 bp, synthetic construct
  source 1..80: mol_type = other DNA
aggaaggcgggccagagggagggctggggagtggcttgccctcagatgctgcatataagcagctgctttttgcctgtaca

SEQ ID NO: 87642 - DNA, 80 bp, synthetic construct
  source 1..80: mol_type = other DNA
gaaggctgaattaatggcaacattgttagccttacaggactctaaggagaaagtaaacatagtgacagattcacaatatg

SEQ ID NO: 87643 - DNA, 80 bp, synthetic construct
  source 1..80: mol_type = other DNA
catcattatgaaaccagaaatccaagaatcagttcaggtgtctatattccattaggaccagctatgatagtagtaaccac

SEQ ID NO: 87644 - DNA, 80 bp, synthetic construct
  source 1..80: mol_type = other DNA
atattggggattaatgccaggggaaagagatgaacatctaggacatggggttagtatagaatggcagtacaaaaattata

SEQ ID NO: 87645 - DNA, 80 bp, synthetic construct
  source 1..80: mol_type = other DNA
aaacacagattgaccctgaaacagcagacagaatgatacatctatattacttcaactgttttacagcttcagcaatcagg

SEQ ID NO: 87646 - DNA, 80 bp, synthetic construct
  source 1..80: mol_type = other DNA
acagcctgtctagggcaaaaagtgctgacccggtgtgaattccataaaggacatagtcaggtagggacactgcaactctt

SEQ ID NO: 87647 - DNA, 80 bp, synthetic construct
  source 1..80: mol_type = other DNA
agccttaagagcattagtaggagaaaaaagaagtagacctcccctacccagtgtccagaagttaacaggagatagatgga

SEQ ID NO: 87648 - DNA, 80 bp, synthetic construct
  source 1..80: mol_type = other DNA
aacctctcaatgtgctcaacattctgtccaactgtgattggaccttcatgggagtggtggagatggtcatactattactt

SEQ ID NO: 87649 - DNA, 80 bp, synthetic construct
  source 1..80: mol_type = other DNA
atcttcagggacctgaagacttggcacgagatctagtcccagtgattcttggcggtataggactggccatcgggttcacc

SEQ ID NO: 87650 - DNA, 80 bp, synthetic construct
  source 1..80: mol_type = other DNA
ctggggttaattggcagaacgaccccagaaccaacagggaccgctggtccaccacccaaacaacagagggaccgacctcc

SEQ ID NO: 87651 - DNA, 80 bp, synthetic construct
  source 1..80: mol_type = other DNA
aggtggggttagttccccgtgaagctgtcgaccactgggacggttatcatggtgaggaagtgatgctgtgggacgactat

SEQ ID NO: 87652 - DNA, 80 bp, synthetic construct
  source 1..80: mol_type = other DNA
gtcaaccttggtccagtgtgtagacgggtcgacttcttggtctactgctctgccccagaggtggaacagatacggagggt

SEQ ID NO: 87653 - DNA, 80 bp, synthetic construct
  source 1..80: mol_type = other DNA
tagccctggtgatacatcagcactgaaagactgcttcaagctagacttctcccatttaaaaatggaactggccccacaag

SEQ ID NO: 87654 - DNA, 80 bp, synthetic construct
  source 1..80: mol_type = other DNA
cagctacagggaaagatgtatgactttgatgatgacagggtgtcagcgttcaccaccatggcacgtgataatggcctagg

SEQ ID NO: 87655 - DNA, 80 bp, synthetic construct
  source 1..80: mol_type = other DNA
cacaacgatggagggcttaaaaaatgccctgaaggggtacaaaattagtgcgtgcacgataaaatggcaggccaaagtgt

SEQ ID NO: 87656 - DNA, 80 bp, synthetic construct
  source 1..80: mol_type = other DNA
tagaactcaggaggaggtccagtatggtatggggtggtctgacaggcccattgatcaaaacgtcaaatcatgggaagagc

SEQ ID NO: 87657 - DNA, 80 bp, synthetic construct
  source 1..80: mol_type = other DNA
actcactagaatcagatggtaacagtgtcaacattaaagaggagaggaacatcctaactcagcaacaacagtcggtgtgt

SEQ ID NO: 87658 - DNA, 80 bp, synthetic construct
  source 1..80: mol_type = other DNA
catactacaaattgctggctcagccctagtggtcaacagagcagtgaagagaatgtttggcacgcgtactgccaccttgt

SEQ ID NO: 87659 - DNA, 80 bp, synthetic construct
  source 1..80: mol_type = other DNA
ccctagagggcccccccagagaacacaaatgcagggtccatatggccaaggccgcaggaaagggacctattggccatgat

SEQ ID NO: 87660 - DNA, 80 bp, synthetic construct
  source 1..80: mol_type = other DNA
tggaaggcaagaacaaggggaagaacaagaaaggacgtggtcggaggaacaattacaacgccttctcccgcagaggactc

SEQ ID NO: 87661 - DNA, 80 bp, synthetic construct
  source 1..80: mol_type = other DNA
tagggctggtgacaggctccgacattcggaagagaaaaccaatcgactggaccccacccaagtcagcatgggcagatgat

SEQ ID NO: 87662 - DNA, 80 bp, synthetic construct
  source 1..80: mol_type = other DNA
ggatggggtttctgggtcagccctacagtcttcataaccacaacgcacgttataccaaccagtgcgaaggagttctttgg

SEQ ID NO: 87663 - DNA, 80 bp, synthetic construct
  source 1..80: mol_type = other DNA
gagggttgccccgagggcacggtgtgttcagtactaataaagagggactctggtgaactactgccattggccgtgagaat

SEQ ID NO: 87664 - DNA, 80 bp, synthetic construct
  source 1..80: mol_type = other DNA
tactcactggtgctaatgctaagggcatggatcttggaaccatcccaggagactgtggggctccttatgtttataagaga

SEQ ID NO: 87665 - DNA, 80 bp, synthetic construct
  source 1..80: mol_type = other DNA
gaaggagaaaccacgcttgaaggcggtgacaaaggtcattatgctggacatgaaataattaagcatggttgtggaccagc

SEQ ID NO: 87666 - DNA, 80 bp, synthetic construct
  source 1..80: mol_type = other DNA
cctccaacatatgaacgggtcaaggatgacagtccacctggtgaacaggttaaatggtccgcacgtgatggagtcaacat

SEQ ID NO: 87667 - DNA, 80 bp, synthetic construct
  source 1..80: mol_type = other DNA
gaggacgcatgccagagccaggtctcttggaggccgcagttgagactgtgacttcatcattagagcaggttatggatact

SEQ ID NO: 87668 - DNA, 80 bp, synthetic construct
  source 1..80: mol_type = other DNA
gttatggggggcagacttgggcacggtagttcgggctgcacgggcttttggcccattctgtgatgctataaaatcccaca

SEQ ID NO: 87669 - DNA, 80 bp, synthetic construct
  source 1..80: mol_type = other DNA
caatcaagttgcctatcaaagttggaatgaattcaattgaggatgggccactgatctatgcagaacattcaaaatataag

SEQ ID NO: 87670 - DNA, 80 bp, synthetic construct
  source 1..80: mol_type = other DNA
tggagtggagcgcctcacaacagtgagtggacccgagtggaatctttgccctttaccccccattgacttgaggaatatgg

SEQ ID NO: 87671 - DNA, 80 bp, synthetic construct
  source 1..80: mol_type = other DNA
catagaatttgatccagcaaaactgacacaagttcttagggagtatggacttagacccacccgccccgacaaaagcgagg

SEQ ID NO: 87672 - DNA, 80 bp, synthetic construct
  source 1..80: mol_type = other DNA
acgctgcgggatttcaagggcgactggaccgagcatccattgaaagacaaatctactggactagaggacccaaccattca

SEQ ID NO: 87673 - DNA, 80 bp, synthetic construct
  source 1..80: mol_type = other DNA
cagctgaccccttacccatggaacccgtggccgggccaacaacagccgtagccactgctgggcaagttaatatgattgat

SEQ ID NO: 87674 - DNA, 80 bp, synthetic construct
  source 1..80: mol_type = other DNA
tgagagttaggattcttcttgctgggaatgctttctcagctggaaagattatagtttgttgtgtcccccctggcttcacg

SEQ ID NO: 87675 - DNA, 80 bp, synthetic construct
  source 1..80: mol_type = other DNA
tcttcctctctcaccatagctcaggctacattgtttccccatgtgattgctgatgtgagaacccttgaaccaatagaaat

SEQ ID NO: 87676 - DNA, 80 bp, synthetic construct
  source 1..80: mol_type = other DNA
gcctctcgaggatgtacgcaatgtcctctatcacaccaatgataatcaaccaacaatgcggttggtgtgtatgctctaca

SEQ ID NO: 87677 - DNA, 80 bp, synthetic construct
  source 1..80: mol_type = other DNA
cgccgctccgtactggtgggggatctggtaattctgattctttcgtagttgctggtagggtgctcacggctcctagtagc

SEQ ID NO: 87678 - DNA, 80 bp, synthetic construct
  source 1..80: mol_type = other DNA
gacttcagtttcttgttccttgtcccacctactatagaacagaagactcgggcttttactgtgcctaatatccccttgca

SEQ ID NO: 87679 - DNA, 80 bp, synthetic construct
  source 1..80: mol_type = other DNA
aaccttgtccaattctagatttccttccctcatccaggggatgatcctgtctcctgacgcatctcaagtggtccagtttc

SEQ ID NO: 87680 - DNA, 80 bp, synthetic construct
  source 1..80: mol_type = other DNA
aaaatggacgatgccttatagatggccaactcctaggcaccacacccgctacatcaggacagctgttcagagtaagagga

SEQ ID NO: 87681 - DNA, 80 bp, synthetic construct
  source 1..80: mol_type = other DNA
aagataaatcagggagcccgcacgcttaacctcacagaggtggatggcaaaccattcatggcatttgattcccctgcacc

SEQ ID NO: 87682 - DNA, 80 bp, synthetic construct
  source 1..80: mol_type = other DNA
tgtggggttccccgattttggaaaatgtgattggcatatgagaatcagcaaaaccccaaataacacaggctcaggtgatc

SEQ ID NO: 87683 - DNA, 80 bp, synthetic construct
  source 1..80: mol_type = other DNA
ccatgcgcagtgtcagcgtgcagaccaacgtgcagggttttgtaccacacctgggaagcatacagtttgatgaagtgttc

SEQ ID NO: 87684 - DNA, 80 bp, synthetic construct
  source 1..80: mol_type = other DNA
aaccaccccacaggtgactacattggcaccattgaatggatttcccagccatctacacctcctggaacagatattaatct

SEQ ID NO: 87685 - DNA, 80 bp, synthetic construct
  source 1..80: mol_type = other DNA
gtgggagattcccgattatggatcatccctttcccaagcagctaatctggcccccccagtattcccccctggatttggtg

SEQ ID NO: 87686 - DNA, 80 bp, synthetic construct
  source 1..80: mol_type = other DNA
aggctcttgtgtactttgtttctgcttttccaggccccaacaaccgctcagccccgaatgatgtaccttgtcttcttcct

SEQ ID NO: 87687 - DNA, 80 bp, synthetic construct
  source 1..80: mol_type = other DNA
caagagtacataacccacttcgtcagtgaacaagccccaacaatgggtgacgcagctttgctgcattatgtcgaccctga

SEQ ID NO: 87688 - DNA, 80 bp, synthetic construct
  source 1..80: mol_type = other DNA
cggggtgggtgccgggcctcaacagcttcctcttaatggtgtttttctctttgtctcttgggtatctcgcttttatcagc

SEQ ID NO: 87689 - DNA, 80 bp, synthetic construct
  source 1..80: mol_type = other DNA
ccgtatataatggcccaagccattataggagcaattgccgcgtcagctgctggctcagcattgggtgcgggcatccaggc

SEQ ID NO: 87690 - DNA, 80 bp, synthetic construct
  source 1..80: mol_type = other DNA
tggtgccgaagctgcgcttcagagtcagagataccaacaagacttagccctgcaaaggaatacttttgaacatgataaag

SEQ ID NO: 87691 - DNA, 80 bp, synthetic construct
  source 1..80: mol_type = other DNA
atatgctttcctaccaggttcaggcaagtaatgcacttttagcaaagaatctcaatacccgctattctatgcttattgca

SEQ ID NO: 87692 - DNA, 80 bp, synthetic construct
  source 1..80: mol_type = other DNA
ggaggtctttctagtgctgatgcttcacgggctgttgctggagccccagtaacacgattgattgattggaacggcactcg

SEQ ID NO: 87693 - DNA, 80 bp, synthetic construct
  source 1..80: mol_type = other DNA
ggttgccgcccccagatcaagtgcaacaactctgaggtctggtggcttcatggcagttcccatgcctgttcaacccaaat

SEQ ID NO: 87694 - DNA, 80 bp, synthetic construct
  source 1..80: mol_type = other DNA
ctaagaccccacaatcctctgggttctctaatcctgcttatgatatgtccacagtttcctctaggacttcttcttgggtg

SEQ ID NO: 87695 - DNA, 80 bp, synthetic construct
  source 1..80: mol_type = other DNA
cagtcacaaaattccctgcgaagtgtatcaccattccacaggcaggccctgcagactgtatgggtcactccacctgggtc

SEQ ID NO: 87696 - DNA, 80 bp, synthetic construct
  source 1..80: mol_type = other DNA
tacttcttcttcttctgtttcctcaacaccttatggtgtttttaacacggataggatgccgctattcgcaaatttgcggc

SEQ ID NO: 87697 - DNA, 80 bp, synthetic construct
  source 1..80: mol_type = other DNA
gctaatgttgtaatataatgcagcagtgggcactatattcaatttggtttaattagtaaataatttggctattgattagt

SEQ ID NO: 87698 - DNA, 80 bp, synthetic construct
  source 1..80: mol_type = other DNA
gatttttatcgagatttaagggcctaggaggtggcgcaagcccccctagccctataaaaattaaaagtacagaaatggct

SEQ ID NO: 87699 - DNA, 80 bp, synthetic construct
  source 1..80: mol_type = other DNA
ctggtcacgtcgggcagattccaccaccccacccaatcgtggtcacaacagacccctgagttccagcaagatagcaagtt

SEQ ID NO: 87700 - DNA, 80 bp, synthetic construct
  source 1..80: mol_type = other DNA
agagttggtcagggacgccatattagctgcagtaaatggtcttgtttcgcagccctttaagaacttcttgggtaaactca

SEQ ID NO: 87701 - DNA, 80 bp, synthetic construct
  source 1..80: mol_type = other DNA
agaatggggacgaacttgacattgatgatatgatcgaaccaggtgaagatgaacaaagaccgcgtggtggtagaaatcca

SEQ ID NO: 87702 - DNA, 80 bp, synthetic construct
  source 1..80: mol_type = other DNA
cacacacaggccaggcttatacagatgcaagacgaactggagaatatgattgaggatttacacattttggatgaggaatt

SEQ ID NO: 87703 - DNA, 80 bp, synthetic construct
  source 1..80: mol_type = other DNA
tgacaatgcgctatttctattgtagttccatcaagtgatggatagacgcgacgctcgttcaagggataagaatttggatg

SEQ ID NO: 87704 - DNA, 80 bp, synthetic construct
  source 1..80: mol_type = other DNA
agttccatcaagtgatggatagacgcgacgctcgttcaagggataagaatttggatgaccacccaaactactaaaaaacc

SEQ ID NO: 87705 - DNA, 80 bp, synthetic construct
  source 1..80: mol_type = other DNA
ggaatgagaattgaagattggagagatgcttactataatgagaggttgccaaaaagaatgacatcaacaacgatgtcaac

SEQ ID NO: 87706 - DNA, 80 bp, synthetic construct
  source 1..80: mol_type = other DNA
acagctgatgaatctggaaattgagaatctgcatttgagaaacaaagcttgggcagaaggagcagatagaaagtttagac

SEQ ID NO: 87707 - DNA, 80 bp, synthetic construct
  source 1..80: mol_type = other DNA
tgatgtcaagcttcgatctgtctacaaaaaatggccacacaatattggttccaaagacgaggaatgctgagatcatcttg

SEQ ID NO: 87708 - DNA, 80 bp, synthetic construct
  source 1..80: mol_type = other DNA
gctaattcatcatctgaggtaaagctgagtgaccacccatcacaggcagtggatagacttgtaaagaaaaatcatgcact

SEQ ID NO: 87709 - DNA, 80 bp, synthetic construct
  source 1..80: mol_type = other DNA
gacagagaaagtagcccaacttgagtcagcaaaacaggacgacaactcaactattattctctgcaaagccgtggaagaca

SEQ ID NO: 87710 - DNA, 80 bp, synthetic construct
  source 1..80: mol_type = other DNA
tgtcagaaaagctcagaaaagctgaaaaggaatcctcagacctagagaagctactattggagtgtaataggagcaactct

SEQ ID NO: 87711 - DNA, 80 bp, synthetic construct
  source 1..80: mol_type = other DNA
agactgaagaggcaattagagatatgtgaggaggagacaacggacagattagccgcagttaatgctcatcacaaggagga

SEQ ID NO: 87712 - DNA, 80 bp, synthetic construct
  source 1..80: mol_type = other DNA
aactgaaattatgaggagggaaatatacagactgcaaatcgtcaacgctcaactgaatgatcgtaacctggttttggaag

SEQ ID NO: 87713 - DNA, 80 bp, synthetic construct
  source 1..80: mol_type = other DNA
aacagcatggacatcacttagacatgatcagaggcctggcagctagagcaggactagttgttgatgagggtgattcagga

SEQ ID NO: 87714 - DNA, 80 bp, synthetic construct
  source 1..80: mol_type = other DNA
tagagactgtgctggttgaatgtaacgttccagacgtagctagagtaatgaataggtttgaagatgcactgtatgactgt

SEQ ID NO: 87715 - DNA, 80 bp, synthetic construct
  source 1..80: mol_type = other DNA
tttgaaactgagaatagtgatgatgattcatcagaagaggaagatgataatggctttgacattgaggatatgatggaacc

SEQ ID NO: 87716 - DNA, 80 bp, synthetic construct
  source 1..80: mol_type = other DNA
aggtgatgatgaacagagaccacgtggcggtgaaaatccgcgcaggcaagctagattgagacagatggacaacgaatcag

SEQ ID NO: 87717 - DNA, 80 bp, synthetic construct
  source 1..80: mol_type = other DNA
actccaatgtaaaaaatctgtatgacaaggtcagaatgcaattgaaggacaatgctaaggaagtagggaacgggtgcttt

SEQ ID NO: 87718 - DNA, 80 bp, synthetic construct
  source 1..80: mol_type = other DNA
attaacggctcatgctatccaggcagtttcaatgattatgaggaattaaagcacctccttaccagcgtgacacactttga

SEQ ID NO: 87719 - DNA, 80 bp, synthetic construct
  source 1..80: mol_type = other DNA
gcgtatggtggcccatcgttcttcaggaacatggtctggcttacaaagaaaggatccaactatccagttgccaaaagatc

SEQ ID NO: 87720 - DNA, 80 bp, synthetic construct
  source 1..80: mol_type = other DNA
ctaattgcaccagaatacggtttcaaaatatcaaaaaggggaagctcaggaatcgtgaaaacagagaaaacactcgataa

SEQ ID NO: 87721 - DNA, 80 bp, synthetic construct
  source 1..80: mol_type = other DNA
ttgtgaaaccaaatgtcaaactcccttgggagcaataaacacaacattgccttttcacaacatccacccactggcaatag

SEQ ID NO: 87722 - DNA, 80 bp, synthetic construct
  source 1..80: mol_type = other DNA
atgctaaggaaatagggaacggatgctttgagttttatcataaatgtgatgatgaatgcatgaacagtgtcaggaatggg

SEQ ID NO: 87723 - DNA, 80 bp, synthetic construct
  source 1..80: mol_type = other DNA
ccaaggacattcttgagaaaacgcataatgggaagttgtgcagattgagcgggatccctccattggaattgggggattgc

SEQ ID NO: 87724 - DNA, 80 bp, synthetic construct
  source 1..80: mol_type = other DNA
actctattgaagacatgggatgtcataaattttgagagcactggtaatttaattgcaccagaatatggattcaaaatatc

SEQ ID NO: 87725 - DNA, 80 bp, synthetic construct
  source 1..80: mol_type = other DNA
gaggacctgaaatctctctggaacgcaatagcagtactctggtgcgttcacaacagatttgacatccgagatacacagca

SEQ ID NO: 87726 - DNA, 80 bp, synthetic construct
  source 1..80: mol_type = other DNA
ggcaatacaaaagttaaaggaagtaatggcaagcaggaagtctgcagaggccgctaaggaagaaacaagccctaggcaga

SEQ ID NO: 87727 - DNA, 80 bp, synthetic construct
  source 1..80: mol_type = other DNA
aacaactagcacacagcaagagcaaattatatggactactagaggggctaactctatcccagtaggagacatctatagaa

SEQ ID NO: 87728 - DNA, 80 bp, synthetic construct
  source 1..80: mol_type = other DNA
actgggtaatacaaatgaagatgctagtcttctacatccagcttgtaatcatggagctgaggatgcacacggggagatac

SEQ ID NO: 87729 - DNA, 80 bp, synthetic construct
  source 1..80: mol_type = other DNA
agcaagatttaaaaggaggatacacagcagtattcatgcaaagagggcagaatccaaatagaaaagggcccataaaatgc

SEQ ID NO: 87730 - DNA, 80 bp, synthetic construct
  source 1..80: mol_type = other DNA
cagccccaccaatggaggaggcagtgaaggaacaagagaatcagagtcagaagggggatcaggaagagctgtacccattt

SEQ ID NO: 87731 - DNA, 80 bp, synthetic construct
  source 1..80: mol_type = other DNA
gcctccctcaaatccctctttgggacagaccaatagtcacagcaaaggttgggggtcatctatgtgaggctttactggat

SEQ ID NO: 87732 - DNA, 80 bp, synthetic construct
  source 1..80: mol_type = other DNA
taaaatggcagtttgatagatcattaggcttaacacatatagccctgcaaaagcacccagagctcttccccaagtaactg

SEQ ID NO: 87733 - DNA, 80 bp, synthetic construct
  source 1..80: mol_type = other DNA
tctaagaaggccgcgaactggcgttataggcatcattatgaatccaggaatccaaaagtcagttcggcggtgtatattcc

SEQ ID NO: 87734 - DNA, 80 bp, synthetic construct
  source 1..80: mol_type = other DNA
ttcacatgttttacagaatcagcaatcaggaaggccattctagggcagagagtgctgaccaagtgtgaatacctggcagg

SEQ ID NO: 87735 - DNA, 80 bp, synthetic construct
  source 1..80: mol_type = other DNA
acaaataaaacaggcctattaaatgagacaataaatgagatgagaaattgtagttttaatgtaactacagtcctcacaga

SEQ ID NO: 87736 - DNA, 80 bp, synthetic construct
  source 1..80: mol_type = other DNA
caaaaaggagcaaaaacaggctctattctatgtatcagatctgagtaaggttaatgactcaaatgcagtaaatggaacaa

SEQ ID NO: 87737 - DNA, 80 bp, synthetic construct
  source 1..80: mol_type = other DNA
agtactcaactaatactgaatgggacactctctagagaaaagataagaattatgggaaaaaatattacagaatcagcaaa

SEQ ID NO: 87738 - DNA, 80 bp, synthetic construct
  source 1..80: mol_type = other DNA
gaatatcatagtaaccctaaacactcctataaacatgacctgcataagagaaggaattgcagaggtacaagatatatata

SEQ ID NO: 87739 - DNA, 80 bp, synthetic construct
  source 1..80: mol_type = other DNA
caggtccaatgagatggcgcagtatgacacttaaaagaagtaacaatacatcaccaagatcaagggtagcttattgtaca

SEQ ID NO: 87740 - DNA, 80 bp, synthetic construct
  source 1..80: mol_type = other DNA
tataataagactgtatgggaaaatgccctacaacaaacagctataaggtatttaaatcttgtaaaccaaacagagaatgt

SEQ ID NO: 87741 - DNA, 80 bp, synthetic construct
  source 1..80: mol_type = other DNA
taccataatattcagcagaactagtggtggagatgcagaagtaagccatttacattttaactgtcatggagaattctttt

SEQ ID NO: 87742 - DNA, 80 bp, synthetic construct
  source 1..80: mol_type = other DNA
attgtaacacatctgggatgtttaactatacttttatcaactgtacaaagtccggatgccaggagatcaaagggagcaat

SEQ ID NO: 87743 - DNA, 80 bp, synthetic construct
  source 1..80: mol_type = other DNA
gagaccaataaaaatggtactataccttgcaagttaagacagctagtaagatcatggatgaagggagagtcgagaatcta

SEQ ID NO: 87744 - DNA, 80 bp, synthetic construct
  source 1..80: mol_type = other DNA
tgcacctcccatccccggcaacttaacatgtcattccaacataactggaatgattctacagttagatcaaccatggaatt

SEQ ID NO: 87745 - DNA, 80 bp, synthetic construct
  source 1..80: mol_type = other DNA
ccacaggtgaaaatacacttagaccagtagggggagatatgaaagatatatggagaactaaattgtacaactacaaagta

SEQ ID NO: 87746 - DNA, 80 bp, synthetic construct
  source 1..80: mol_type = other DNA
gtacagataaaaccttttagtgtagcacctacaaaaatgtcaagaccaataataaacattcacacccctcacagggaaaa

SEQ ID NO: 87747 - DNA, 80 bp, synthetic construct
  source 1..80: mol_type = other DNA
atggggctgtaaaggaaaactaatctgttacacatcagtaaaatggaacacatcatggtcaggaagatataatgatgaca

SEQ ID NO: 87748 - DNA, 80 bp, synthetic construct
  source 1..80: mol_type = other DNA
gtatttgggacaaccttacatggcagcaatgggaccaacacataaacaatgtaagctccattatatatgatgaaatacaa

SEQ ID NO: 87749 - DNA, 80 bp, synthetic construct
  source 1..80: mol_type = other DNA
gcagcacaagaccaacaggaaaagaatgtaaaagcattgttggagctagatgaatgggcctctctttggaattggtttga

SEQ ID NO: 87750 - DNA, 80 bp, synthetic construct
  source 1..80: mol_type = other DNA
tctcgttgcagatccctgtcccacaccggcaggaagcagaaacgccaggaagaacaggagaagaaggtggagaaggagac

SEQ ID NO: 87751 - DNA, 80 bp, synthetic construct
  source 1..80: mol_type = other DNA
aggcccaagtggacagccttgccaccaggattcttgcaacagttgtacacggatctcaggacaataatcttgtggactta

SEQ ID NO: 87752 - DNA, 80 bp, synthetic construct
  source 1..80: mol_type = other DNA
ccacctcttgagcaacttaatatcagggatccggaggctgatcgactacctgggactgggactgtggatcctgggacaaa

SEQ ID NO: 87753 - DNA, 80 bp, synthetic construct
  source 1..80: mol_type = other DNA
agacaattgaagcttgtagactttgtggagctgtaatgcaatattggctacaagaattgaaaaatagtgctacaaacctg

SEQ ID NO: 87754 - DNA, 80 bp, synthetic construct
  source 1..80: mol_type = other DNA
cttgatactattgcagtgtcagttgccaattggactgacggcatcatcttaggtctacaaagaataggacaaggattcct

SEQ ID NO: 87755 - DNA, 80 bp, synthetic construct
  source 1..80: mol_type = other DNA
tcacatcccaagaagaattagacaaggtgcagaaagaatcttagtgtaacatggggaatgcatggagcaaaagcaaattt

SEQ ID NO: 87756 - DNA, 80 bp, synthetic construct
  source 1..80: mol_type = other DNA
gcaggatggtcagaagtaagagatagaatgagacgatcctcctctgatcctcaacaaccatgtgcacctggagtaggagc

SEQ ID NO: 87757 - DNA, 80 bp, synthetic construct
  source 1..80: mol_type = other DNA
tgtctccagggagttagcaactagagggggaatatcaagttcccacactcctcaaaacaatgcagcccttgcattcctag

SEQ ID NO: 87758 - DNA, 80 bp, synthetic construct
  source 1..80: mol_type = other DNA
tacatgtgagagggctaatctcctgcatccagcatgtgcccatggatttgaagatacacataaagaaatactgatgtgga

SEQ ID NO: 87759 - DNA, 80 bp, synthetic construct
  source 1..80: mol_type = other DNA
agtttgatagatctctaggcaacacccatgttgctatgataactcacccagagctcttccagaaggactaaaaactgctg

SEQ ID NO: 87760 - DNA, 80 bp, synthetic construct
  source 1..80: mol_type = other DNA
acctgaagattgctgacactgtggaactttccagcaaagactgctgacactgcggggactttccagtgggagggacaggg

SEQ ID NO: 87761 - DNA, 80 bp, synthetic construct
  source 1..80: mol_type = other DNA
gaggcagagctggaattagaggaaaacagagaaaggttaaaacaaccagtgcatggggtatactatcaacctgataagga

SEQ ID NO: 87762 - DNA, 80 bp, synthetic construct
  source 1..80: mol_type = other DNA
tctatgggttaatattcagaagcaaggaggggagcaatggacttaccagatatatcaggaagaacataagaacctcaaaa

SEQ ID NO: 87763 - DNA, 80 bp, synthetic construct
  source 1..80: mol_type = other DNA
tctagaaagaccgagaactggtggtacagacatcattatgaatccagaaatccaagagttagttcaagtgtatatattcc

SEQ ID NO: 87764 - DNA, 80 bp, synthetic construct
  source 1..80: mol_type = other DNA
caagaggaagaggaagaagaaatggatccagtagatcctgaggtgcccccttggcaccaccctggaagtcagccccagat

SEQ ID NO: 87765 - DNA, 80 bp, synthetic construct
  source 1..80: mol_type = other DNA
cccttgtaataattgctattgcaaaagatgctgctatcattgctatgtttgtttcgtaagaaagggtttgggaatctcct

SEQ ID NO: 87766 - DNA, 80 bp, synthetic construct
  source 1..80: mol_type = other DNA
atggcaggaagaagcgaggacgaccagctgctgcaagccatccagatcataaagatcctgtaccaaagcagtaagtaacg

SEQ ID NO: 87767 - DNA, 80 bp, synthetic construct
  source 1..80: mol_type = other DNA
ctaatgcatcatagggacctgctagcaataataattattagtgctttgctgtttataaatgtaattttatgggggtttat

SEQ ID NO: 87768 - DNA, 80 bp, synthetic construct
  source 1..80: mol_type = other DNA
ggaacaacaaatgaaaaccttatgaagaagtgtgagtttaatgtaaccactgttatcaaagacaaaaaggagaaaaaaca

SEQ ID NO: 87769 - DNA, 80 bp, synthetic construct
  source 1..80: mol_type = other DNA
ggctctattctatgtatcagatttgatggaactgaatgagacaagcagcacaaataagacaaacagcaaaatgtatacat

SEQ ID NO: 87770 - DNA, 80 bp, synthetic construct
  source 1..80: mol_type = other DNA
aaggtggaaaaaatatcatagtgaccctaaactctaccctaaacatgacctgtgaaagaccacaaatagacatacaagag

SEQ ID NO: 87771 - DNA, 80 bp, synthetic construct
  source 1..80: mol_type = other DNA
atgagaataggtccaatggcctggtacagcatgggaatagggggaacagcaggaaacagctcaagggcagcttattgcaa

SEQ ID NO: 87772 - DNA, 80 bp, synthetic construct
  source 1..80: mol_type = other DNA
gtataatgccactgattggggaaaaatattaaaacaaacagctgaaaggtatttagaactagtaaacaatacaggtagta

SEQ ID NO: 87773 - DNA, 80 bp, synthetic construct
  source 1..80: mol_type = other DNA
ttaacatgacattcaatcacagcagcggtggagatctagaggtaacccatttacactttaactgtcatggagaattcttt

SEQ ID NO: 87774 - DNA, 80 bp, synthetic construct
  source 1..80: mol_type = other DNA
tattgtaacacagctaagatgtttaattataccttttcatgtaacggaaccacctgtagtgttagtaatgttagtcaagg

SEQ ID NO: 87775 - DNA, 80 bp, synthetic construct
  source 1..80: mol_type = other DNA
taacaatggcactctaccttgcaaactgagacaggtggtaaggtcatggataaggggacagtcgggactctatgcacctc

SEQ ID NO: 87776 - DNA, 80 bp, synthetic construct
  source 1..80: mol_type = other DNA
ccatcaaaggtaatctaacatgtatgtcaaacataactggaatgatcctacaaatggataacacatggaacagcagcaac

SEQ ID NO: 87777 - DNA, 80 bp, synthetic construct
  source 1..80: mol_type = other DNA
aacaatgtaacatttagaccaatagggggagacatgaaagatatatggagaactgaattgttcaactacaaagtagtaag

SEQ ID NO: 87778 - DNA, 80 bp, synthetic construct
  source 1..80: mol_type = other DNA
ggtaaaaccttttagtgtggcacccacacgtattgcaaggccagtcataagcactagaactcatagagaaaaaagagcag

SEQ ID NO: 87779 - DNA, 80 bp, synthetic construct
  source 1..80: mol_type = other DNA
atggggctgtaaaggaaagctagtctgctacacatcagtaaaatggaatagaacatggataggaaacgaaagcatttggg

SEQ ID NO: 87780 - DNA, 80 bp, synthetic construct
  source 1..80: mol_type = other DNA
atggttgtggtatataaaaatagcaataatcatagtaggagcactagtaggggtgagagttatcatgatagtacttaata

SEQ ID NO: 87781 - DNA, 80 bp, synthetic construct
  source 1..80: mol_type = other DNA
tagtgaaaaacattaggcagggatatcaacccctctcgttacagatccccaaccatcaccaagaggaagcaggaacgcca

SEQ ID NO: 87782 - DNA, 80 bp, synthetic construct
  source 1..80: mol_type = other DNA
ggaagaacaggaggaggaggtggagaagaaggcaggcccaggtggataccctcgccgcaagggttcttgccactgttgta

SEQ ID NO: 87783 - DNA, 80 bp, synthetic construct
  source 1..80: mol_type = other DNA
cacggacctcagaacaataatattgtggacttaccacctcttgagcaacttagcatcagggatccagaaggtgatcagct

SEQ ID NO: 87784 - DNA, 80 bp, synthetic construct
  source 1..80: mol_type = other DNA
atctgaggcttggactgtggatcctagggcagaagataattaatgtttgcagaatttgtgcagctgtaacacaatactgg

SEQ ID NO: 87785 - DNA, 80 bp, synthetic construct
  source 1..80: mol_type = other DNA
ctacaagaattgcagaatagtgctacaagcttgctagacacacttgcagtggcagtagccaattggactgacggcataat

SEQ ID NO: 87786 - DNA, 80 bp, synthetic construct
  source 1..80: mol_type = other DNA
cgcagggatacaaagaataggaacaggaattcgtaacatcccaaggagaattagacagggcttagaaagaagtttattgt

SEQ ID NO: 87787 - DNA, 80 bp, synthetic construct
  source 1..80: mol_type = other DNA
aacatgggaaacgcattgagaaaaggtaaatttgagggatgggcagcagtaagagaaagaatgagaagaactagaacttt

SEQ ID NO: 87788 - DNA, 80 bp, synthetic construct
  source 1..80: mol_type = other DNA
atactcctcaaaacaatgcagcccttgcattcctagaaagtcaccaagaggaagaagtaggttttccagtagcacctcaa

SEQ ID NO: 87789 - DNA, 80 bp, synthetic construct
  source 1..80: mol_type = other DNA
atgatgatggcgtctaaggacgctacgtcaagcgtggatggcgccagtgcgtcggttcagttggtaccggaggttaatgc

SEQ ID NO: 87790 - DNA, 80 bp, synthetic construct
  source 1..80: mol_type = other DNA
tggttcctcccacagtggaacagaagactaggcctttcaccctcccaaatttaccgctgagttctttgtctaattcacgt

SEQ ID NO: 87791 - DNA, 80 bp, synthetic construct
  source 1..80: mol_type = other DNA
aaaatggccgatgtaccttagatggacgtcttgttggcaccaccccagtttccctctcccatgttgctaagataaggggt

SEQ ID NO: 87792 - DNA, 80 bp, synthetic construct
  source 1..80: mol_type = other DNA
acttctaatggtacagtaatcaatctcaccgaattggatggcacccccttccacccttttgaaggccctgcccctattgg

SEQ ID NO: 87793 - DNA, 80 bp, synthetic construct
  source 1..80: mol_type = other DNA
aggcaactattgaaactactgttgttagacgacgggaccgaggcaggtcccctagaagaagaactccctcgcctcgcaga

SEQ ID NO: 87794 - DNA, 80 bp, synthetic construct
  source 1..80: mol_type = other DNA
atgggtagcaagtggtcaaaatgtgggggggctggatggtctactgtaagagaaagaatgagacgagctgagccaggaga

SEQ ID NO: 87795 - DNA, 80 bp, synthetic construct
  source 1..80: mol_type = other DNA
atgggtggcaagtggtcaaaacgtagtgggggtggatggcctgctataagggaaagaatgagaaaagctgatccaacagc

SEQ ID NO: 87796 - DNA, 80 bp, synthetic construct
  source 1..80: mol_type = other DNA
atgggtggcaagtggtcaaagcgtaggctacctggatgggctgatgtaagggaaaaaatgagacgcactaatccaacagc

SEQ ID NO: 87797 - DNA, 80 bp, synthetic construct
  source 1..80: mol_type = other DNA
atgggtggcaagtggtcaaaaagtagtagggatacctggactgctgtaagggaaagaatgagacgagcagggccctcagc

SEQ ID NO: 87798 - DNA, 80 bp, synthetic construct
  source 1..80: mol_type = other DNA
atgggtggcaagtggtcaaaaaagagggtccctggatgggctgaggtaagggaaaaaataagaaaaactgaaccagcagc

SEQ ID NO: 87799 - DNA, 80 bp, synthetic construct
  source 1..80: mol_type = other DNA
atgggtggcaagtggtcaaaacgtctgggtggatggcccgccataagggaaagaatgagacgagctcagccaggagatga

SEQ ID NO: 87800 - DNA, 80 bp, synthetic construct
  source 1..80: mol_type = other DNA
atgggtggcaggtggtcaaaacgcagtctgggtaatgggtgggccgtgataagggaaagaatgagaagaactgcaccagc

SEQ ID NO: 87801 - DNA, 80 bp, synthetic construct
  source 1..80: mol_type = other DNA
agctgccatcttctgatgatactaacatgtctgtagctattgatgtttcaccactagacccccctgtccagactcagccc

SEQ ID NO: 87802 - DNA, 80 bp, synthetic construct
  source 1..80: mol_type = other DNA
tcaattcctggtcaggtggtgcccccaccagactcggctgatggtggtgccggccttggcttgcctagcgcctctgcgga

SEQ ID NO: 87803 - DNA, 80 bp, synthetic construct
  source 1..80: mol_type = other DNA
gccccaaacgcccgtgcagtctgcaacccagcccgggccccgtcggcgattactccatgcctaccccgacggttcgaaag

SEQ ID NO: 87804 - DNA, 80 bp, synthetic construct
  source 1..80: mol_type = other DNA
tatttaaacaataccatcatagaaaaggagccttattccaaaatggtagaatatagaaattggtcgaaatcgcaatgtca

SEQ ID NO: 87805 - DNA, 80 bp, synthetic construct
  source 1..80: mol_type = other DNA
cgtctgctgcatccgattagcctgcatggcatggatgatccggaaaaagaagtgctgatgtggaaatttgatagcagcct

SEQ ID NO: 87806 - DNA, 80 bp, synthetic construct
  source 1..80: mol_type = other DNA
atgggcggcaaatggagcaaaatgcgtggctggccggatgtgcgtgaacgtatgcgtcgtgtggaaccgaccgcgggcgg

SEQ ID NO: 87807 - DNA, 80 bp, synthetic construct
  source 1..80: mol_type = other DNA
tgcctgctgcatccgattaaccagcatggcatggatgatccggaaaaagaagtgctgacctggaaatttgatagccgtct

SEQ ID NO: 87808 - DNA, 80 bp, synthetic construct
  source 1..80: mol_type = other DNA
cgtgggcgcggtgagccgtgatctggaaaaacatggcgcgattaccagcagcaacaccgcggcgaccaacgcggatctgg

SEQ ID NO: 87809 - DNA, 80 bp, synthetic construct
  source 1..80: mol_type = other DNA
tataaaggcgcggtggatctgagccattttctgaaagataaaggcggcctggaaggcctgatttggagccagcagcgtca

SEQ ID NO: 87810 - DNA, 80 bp, synthetic construct
  source 1..80: mol_type = other DNA
aacaactgcctgctgtatagcattagccagcatggcatggatgatccggaaaaagaagtgctggaatggaaatttgatag

SEQ ID NO: 87811 - DNA, 80 bp, synthetic construct
  source 1..80: mol_type = other DNA
tgctggaatggaaatttgatagccgtctggcgtttcatcataccgcgcgtgaactgcatccggaatattataaatattaa

SEQ ID NO: 87812 - DNA, 80 bp, synthetic construct
  source 1..80: mol_type = other DNA
atgggcaacaaatggagcaaaatggtgggctggccggcggtgcgtgaacgtatgcgtcgtgcgcagccggcggcggatgg

SEQ ID NO: 87813 - DNA, 80 bp, synthetic construct
  source 1..80: mol_type = other DNA
tggaagcgcaggaagatggcgaagtgggctttccggtgaaaccgcaggtgccgctgcgtccgatgacctataaaggcgcg

SEQ ID NO: 87814 - DNA, 80 bp, synthetic construct
  source 1..80: mol_type = other DNA
ctggatctgagccattttctgaaagaaaaaggcggcctggaaggcctggtgtatagccagcagcgtcgtgatattctgga

SEQ ID NO: 87815 - DNA, 80 bp, synthetic construct
  source 1..80: mol_type = other DNA
tctgtgggtgtataacacccagggctattttccggattggcagaactataccccgggcccgggcacccgttatccgctga

SEQ ID NO: 87816 - DNA, 80 bp, synthetic construct
  source 1..80: mol_type = other DNA
cctttggctggtgctttaaactggtgccggtggaaccggaaaaaattgaagaagcgaacaaacgtgaaaacaccagcctg

SEQ ID NO: 87817 - DNA, 80 bp, synthetic construct
  source 1..80: mol_type = other DNA
ctgcatccgattagcctgcatggcatggatgatccggaaaacgaagtgctggaatggcgttttgatagccgtctggcgtt

SEQ ID NO: 87818 - DNA, 80 bp, synthetic construct
  source 1..80: mol_type = other DNA
tggaatggcgttttgatagccgtctggcgtttcatcatgtggcgcgtgaaaaacatccggaatattttaacaactgctaa

SEQ ID NO: 87819 - DNA, 80 bp, synthetic construct
  source 1..80: mol_type = other DNA
cgtgggcgcggtgagccgtgatctggcgcgtcatggcgcgattaccagcaacaacattaacaacccggattgcgcgtggg

SEQ ID NO: 87820 - DNA, 80 bp, synthetic construct
  source 1..80: mol_type = other DNA
atgggcgcgaaatggagcaaaagcagcgtggtgggctggccggcgattcgtgaacgtatgcgtcgtacccgtgcggcggc

SEQ ID NO: 87821 - DNA, 80 bp, synthetic construct
  source 1..80: mol_type = other DNA
atgggcaacaaatggagcaaaagctggccgagcgtgcgtgaacgtattcgtcgtgcggaaccgcgtgcggaaccggcggc

SEQ ID NO: 87822 - DNA, 80 bp, synthetic construct
  source 1..80: mol_type = other DNA
gttggccgctgacctttggctggtgctttaaactggtgccgatggatccggataaagtggaagaagcgaacgaaggcgaa

SEQ ID NO: 87823 - DNA, 80 bp, synthetic construct
  source 1..80: mol_type = other DNA
atgggcggcaaatggagcaaacgtagcgaaggcggctgggcgaccgtgcgtgaacgtatgcgtcgtacccgtccggcggc

SEQ ID NO: 87824 - DNA, 80 bp, synthetic construct
  source 1..80: mol_type = other DNA
attgcgcgtggattgaagcgcaggaagaagaagaagtgggctttccggtgcgtccgcaggtgccgctgcgtccgatgacc

SEQ ID NO: 87825 - DNA, 80 bp, synthetic construct
  source 1..80: mol_type = other DNA
tataaagcggcggtggatctgagccattttctgaaagaaaaaggcggcctggaaggcctggtgtatagccagaaacgtca

SEQ ID NO: 87826 - DNA, 80 bp, synthetic construct
  source 1..80: mol_type = other DNA
ggatattctggatctgtgggtgtataacacccagggctattttccggattggcagaactataccccgggcccgggcaccc

SEQ ID NO: 87827 - DNA, 80 bp, synthetic construct
  source 1..80: mol_type = other DNA
gttttccgctgacctttggctggtgctttaaactggtgccggtggatccggatctggtggaaaaagtgaccgaaggcgaa

SEQ ID NO: 87828 - DNA, 80 bp, synthetic construct
  source 1..80: mol_type = other DNA
aacaactgcctgctgcatccgattaacctgcatggcatggatgatccggaaggcgaagtgctggtgtggaaatttgatag

SEQ ID NO: 87829 - DNA, 80 bp, synthetic construct
  source 1..80: mol_type = other DNA
tggtgtggaaatttgatagccgtctggcgtttcatcatatggcgcgtgaactgcatccggaatattataaagattgctaa

SEQ ID NO: 87830 - DNA, 80 bp, synthetic construct
  source 1..80: mol_type = other DNA
ggaaggcgtgggcgcggcgagccgtgatctggaacgtcatggcgcgattaccagcagcaacaccgcggcgaccaacgcgg

SEQ ID NO: 87831 - DNA, 80 bp, synthetic construct
  source 1..80: mol_type = other DNA
atgggcagcaaatggagcaaatgcggcggcgcgggctggagcaccgtgcgtgaacgtatgcgtcgtgcggaaccggcggc

SEQ ID NO: 87832 - DNA, 80 bp, synthetic construct
  source 1..80: mol_type = other DNA
tgctgatgtggaaatttgatagcaccctggcgtttcatcatcgtgcgcgtgaacagcatccggaatattataaaaactaa

SEQ ID NO: 87833 - DNA, 80 bp, synthetic construct
  source 1..80: mol_type = other DNA
gttatccgctgacctttggctggtgctataaactggtgccggtggataaagaagaaattgaagcggcgaacgaaggcgaa

SEQ ID NO: 87834 - DNA, 80 bp, synthetic construct
  source 1..80: mol_type = other DNA
tgaaatggaaatttgatagcaccctggcgtttcatcatcgtgcgaaagaactgtatccggattattataaaaactgctaa

SEQ ID NO: 87835 - DNA, 80 bp, synthetic construct
  source 1..80: mol_type = other DNA
atgggcggcaaatggagcaaactgaaactggaatggccggcggtgcgtgaacgtatgcgtcagaccgaaccggcggcggc

SEQ ID NO: 87836 - DNA, 80 bp, synthetic construct
  source 1..80: mol_type = other DNA
atgggcggcaaatggagcaaaaaacgtgtgccgggctgggcggaagtgcgtgaaaaaattcgtaaaaccgaaccggcggc

SEQ ID NO: 87837 - DNA, 80 bp, synthetic construct
  source 1..80: mol_type = other DNA
ggcgcggtggatctgagccattttctgaaagaaaaaggcggcctggaacgtctggtgtggagccagcgtcgtcaggatat

SEQ ID NO: 87838 - DNA, 80 bp, synthetic construct
  source 1..80: mol_type = other DNA
tctggatctgtggatttatcatacccagggctattttccggattggcagaactataccagcggcccgggcattcgttata

SEQ ID NO: 87839 - DNA, 80 bp, synthetic construct
  source 1..80: mol_type = other DNA
atgggcggcaaatggagcaaaagcagcgtggtgggctggagcgcgattcgtgaacgtatgcgtcgtgcggaaccggcggc

SEQ ID NO: 87840 - DNA, 80 bp, synthetic construct
  source 1..80: mol_type = other DNA
ggatggcgtgggcgcggtgagccgtgatctggaacgtcatggcgcgattaccaacagcaacattaacaacgcggatagcg

SEQ ID NO: 87841 - DNA, 80 bp, synthetic construct
  source 1..80: mol_type = other DNA
atgggcggcaaatggagcaaacgtagcaccgaatggagcgcggtgcgtgaaaaaatgcgtcgtgcggaaccggcggcgga

SEQ ID NO: 87842 - DNA, 80 bp, synthetic construct
  source 1..80: mol_type = other DNA
aactgcctgctgcatccgatgagcctgcatggcatggaagatccggaaaaagaagtgctggtgtggaaatttgatagcaa

SEQ ID NO: 87843 - DNA, 80 bp, synthetic construct
  source 1..80: mol_type = other DNA
atgggcggcaaatggagcaaaagcaaactgggctggccggcgattcgtgaacgtatgcgtcgtgcgggcccggcggcgga

SEQ ID NO: 87844 - DNA, 80 bp, synthetic construct
  source 1..80: mol_type = other DNA
aaaggcgcgctggatctgagccattttctgaaagaaaaaggcggcctggaaggcctgattcatagccagaaacgtcagga

SEQ ID NO: 87845 - DNA, 80 bp, synthetic construct
  source 1..80: mol_type = other DNA
aacagcctgctgagcgcgatgagcctgcatggcatggatgatccggaaaaagaagtgctgatgtggaaatttgatagccg

SEQ ID NO: 87846 - DNA, 80 bp, synthetic construct
  source 1..80: mol_type = other DNA
aggcgtgggcgcggcgagccgtgatctggaaaaacatggcgcgctgaccagcagcaacaccgcggcgaacaacccggatt

SEQ ID NO: 87847 - DNA, 80 bp, synthetic construct
  source 1..80: mol_type = other DNA
tgcagtgggaatttgatagccgtctggcgtttcatcatgtggcgcgtgaaaaacatccggaattttataaaaactgctaa

SEQ ID NO: 87848 - DNA, 80 bp, synthetic construct
  source 1..80: mol_type = other DNA
atgggcggcaaatggagcaaacgtagcaccgaatggagcgcggtgcgtgaaaaaatgaaaaaaaccgaaccggcggcgaa

SEQ ID NO: 87849 - DNA, 80 bp, synthetic construct
  source 1..80: mol_type = other DNA
gcgcgtggctggaagcgcaggaagatgaagatgtgggctttccggtgcgtccgcaggtgccgctgcgtctgatggcgtat

SEQ ID NO: 87850 - DNA, 80 bp, synthetic construct
  source 1..80: mol_type = other DNA
tggtgtggaaatttgatagcaaactggcgtttcatcatgtggcgcaggaactgcatccggaatattataaaaactgctaa

SEQ ID NO: 87851 - DNA, 80 bp, synthetic construct
  source 1..80: mol_type = other DNA
atgggcggcaaatggagcaaacgtagcggcggcggctggccggcgattcgtgaacgtatgcgtaaagcggaaccggcggc

SEQ ID NO: 87852 - DNA, 80 bp, synthetic construct
  source 1..80: mol_type = other DNA
gataaatgcctgctgcatccgattagccagcatggcgtggatgatccggaaaaagaagtgctgcagtggaaatttgatag

SEQ ID NO: 87853 - DNA, 80 bp, synthetic construct
  source 1..80: mol_type = other DNA
atgggcggcaaatggagcaaacgtatgggcgatggctgggcgaccgtgcgtgaacgtatgcgtcgtaccgaaccggcggc

SEQ ID NO: 87854 - DNA, 80 bp, synthetic construct
  source 1..80: mol_type = other DNA
tgatgtggaaatttgatagcatgctggcgcatcgtcatgtggcgcgtgaactgcatccggaatattttaaagattgctaa

SEQ ID NO: 87855 - DNA, 80 bp, synthetic construct
  source 1..80: mol_type = other DNA
atgggcggcaaatggagcaaacgtcgtctgccgggctgggcggatgtgcgtgaaaaaatgcgtcgtgcggaaccggcggc

SEQ ID NO: 87856 - DNA, 80 bp, synthetic construct
  source 1..80: mol_type = other DNA
ggcgcgctggatctgagccattttctgcgtgaaaaaggcggcctggaaggcctggtgtatagccagcagcgtcaggatat

SEQ ID NO: 87857 - DNA, 80 bp, synthetic construct
  source 1..80: mol_type = other DNA
cgctgacctttggctggtgctttaaactggtgccggtggaagaacaggaagtggaagaagcgaacaccggcgaaaacaac

SEQ ID NO: 87858 - DNA, 80 bp, synthetic construct
  source 1..80: mol_type = other DNA
aaactgctgcatccggcgagcctgcatggcatggaagatccggaaaaagaagtgctgatttggaaatttgatagccgtct

SEQ ID NO: 87859 - DNA, 80 bp, synthetic construct
  source 1..80: mol_type = other DNA
atgggcggcaaatggagcaaaagccgtgcgggcggctggtttaccgtgcgtgaacgtatgcgtcgtgcggaaccggcggc

SEQ ID NO: 87860 - DNA, 80 bp, synthetic construct
  source 1..80: mol_type = other DNA
cgtgcgcgtggctggaagcgcaggaagatgaagaagtgggctttagcgtgcgtccgcaggtgccgctgcgtccgatgacc

SEQ ID NO: 87861 - DNA, 80 bp, synthetic construct
  source 1..80: mol_type = other DNA
tataaaggcgcgctggatctgagcaaaaaagaaaaaggcggcctggaaggcctgatttatagccagcgtcgtcaggatat

SEQ ID NO: 87862 - DNA, 80 bp, synthetic construct
  source 1..80: mol_type = other DNA
atgggcggcaaatggagcaaacatagcatgggcggctggccgggcgtgcgtgaaaaaatgattcgtgcggaaccggcggc

SEQ ID NO: 87863 - DNA, 80 bp, synthetic construct
  source 1..80: mol_type = other DNA
ggatggcgtgggcgcggtgagccgtgatctggaaaaacatggcgcgattaccaacaacaacaccccggcgaccaacgcgg

SEQ ID NO: 87864 - DNA, 80 bp, synthetic construct
  source 1..80: mol_type = other DNA
atgggcggcaaatggagcaaacgtagcatggcggattggccggcggtgcgtgaacgtatgcgtcaggcggaaccgaccgc

SEQ ID NO: 87865 - DNA, 80 bp, synthetic construct
  source 1..80: mol_type = other DNA
cgtcgtgcggcgattgatctgagccattttctgaaagaaaaaggcggcctggaaggcctggtgcatagccagaaacgtca

SEQ ID NO: 87866 - DNA, 80 bp, synthetic construct
  source 1..80: mol_type = other DNA
atgggcggcaaatggagcaaacatagcggctgggatcgtattcgtgaacgtatgcgtcgtgcggaaccggcggcggaagg

SEQ ID NO: 87867 - DNA, 80 bp, synthetic construct
  source 1..80: mol_type = other DNA
tgcctgctgcatccggcgaacctgcatggcatggaagataccgaacgtgaagtgctggtgtggaaatttgatagccgtct

SEQ ID NO: 87868 - DNA, 80 bp, synthetic construct
  source 1..80: mol_type = other DNA
cgtgggcgcggcgagccgtgatctggaacgtcatggcgcgattaccagcagcaacaccgcgaccaacaacgcggcgtgcg

SEQ ID NO: 87869 - DNA, 80 bp, synthetic construct
  source 1..80: mol_type = other DNA
atgggcggcaaatggagcaaacgtagcctgggcggctggagcaacattcgtaaacgtatggaacagaccgaaccggcggc

SEQ ID NO: 87870 - DNA, 80 bp, synthetic construct
  source 1..80: mol_type = other DNA
atgggcggcaaatggagcaaatttagcggctggagcgcggtgcgtgatcgtatgcgtcgtgcggaaccggcggcggtggg

SEQ ID NO: 87871 - DNA, 80 bp, synthetic construct
  source 1..80: mol_type = other DNA
gcggcggtggatctgagccattttctgaaagaaaaaggcggcctggaaggcctgatttatagcaccaaacgtcaggaaat

SEQ ID NO: 87872 - DNA, 80 bp, synthetic construct
  source 1..80: mol_type = other DNA
tgcctgctgcatccgattagccagcatggcatggatgataccgaaaaagaagtgctggtgtggcgttttgatagccgtct

SEQ ID NO: 87873 - DNA, 80 bp, synthetic construct
  source 1..80: mol_type = other DNA
atgggcggcaaatggagcaaacatagcgaaggcggctggaccgcggtgcgtgaacgtatgcgtcgtgcggaaccggcggc

SEQ ID NO: 87874 - DNA, 80 bp, synthetic construct
  source 1..80: mol_type = other DNA
gttatccgctgacctttggctggtgctttaaactggtgccggtggaaccggaaaaaattgaagaagcgaacgcgggcgaa

SEQ ID NO: 87875 - DNA, 80 bp, synthetic construct
  source 1..80: mol_type = other DNA
gatagcagcctgctgaacccgattagcctgcatggcatggatgatagcgaacgtgaagtgctgatgtggaaatttgatag

SEQ ID NO: 87876 - DNA, 80 bp, synthetic construct
  source 1..80: mol_type = other DNA
atgggcggcaaatggagcaaatgcagcgtggtgggctggccgaccgtgcgtgaacgtatgcgtcgtaccgaaccggcggc

SEQ ID NO: 87877 - DNA, 80 bp, synthetic construct
  source 1..80: mol_type = other DNA
tatcgtgcggcgctggatctgagccattttctgaaagaacagggcggcctggaaggcctggtgtatagccagcgtcgtca

SEQ ID NO: 87878 - DNA, 80 bp, synthetic construct
  source 1..80: mol_type = other DNA
aacaacagcctgctgcatccgatgagccagcatggcatggaagatccggaaggcgaagtgctggaatggcgttttgatag

SEQ ID NO: 87879 - DNA, 80 bp, synthetic construct
  source 1..80: mol_type = other DNA
aacaactgcctgctgcatccgatgagcctgcatggcatggatgatctggaaaaagaaaccctgcagtggaaatttgatag

SEQ ID NO: 87880 - DNA, 80 bp, synthetic construct
  source 1..80: mol_type = other DNA
gaccggcgtgggcagcgcgagccgtgatctggaaaaacatggcgcgctgaccagcaacaacaccgcgcgtaacaacgcgg

SEQ ID NO: 87881 - DNA, 80 bp, synthetic construct
  source 1..80: mol_type = other DNA
tataaaggcgcgctggatctgagccattttctgaaagaaaaaggcggcctggaaggcattatttatagccagcgtcgtca

SEQ ID NO: 87882 - DNA, 80 bp, synthetic construct
  source 1..80: mol_type = other DNA
gttttccgctgacctttggctggtgctttaaactggtgccggtggatccggaaaaagtggaagaagcgaccacccgtgaa

SEQ ID NO: 87883 - DNA, 80 bp, synthetic construct
  source 1..80: mol_type = other DNA
tggtgtggaaatttgatagccgtctggcgtttgaacataaagcgcgtgaactgtatccgcagttttataaagattgctaa

SEQ ID NO: 87884 - DNA, 80 bp, synthetic construct
  source 1..80: mol_type = other DNA
tgctgcagtggaaatttgatagccgtctggcgtttcatcatattgcgcgtgaaaaacatccggaatattttaaagattaa

SEQ ID NO: 87885 - DNA, 80 bp, synthetic construct
  source 1..80: mol_type = other DNA
atgggcggcaaatggagcaaatgcagcggctggctggcggtgcgtgaacgtatgcgtcgtgcggaaccggcggcggatgg

SEQ ID NO: 87886 - DNA, 80 bp, synthetic construct
  source 1..80: mol_type = other DNA
ggcgcgtttgatctgagccattttctgaaagaaaaaggcggcctggaaggcctgatttatagccagcgtcgtcaggatat

SEQ ID NO: 87887 - DNA, 80 bp, synthetic construct
  source 1..80: mol_type = other DNA
cgctgtgctttggctggtgctttaaactggtgccggtggatccggataaagtggaagaagcgaacgaacgtgaagataac

SEQ ID NO: 87888 - DNA, 80 bp, synthetic construct
  source 1..80: mol_type = other DNA
tgcagtggaaatttgatagccgtctggcgtttgaacataaagcgcgtcagctgcatccggaatattttaaagattgctaa

SEQ ID NO: 87889 - DNA, 80 bp, synthetic construct
  source 1..80: mol_type = other DNA
atgggcggcaaatggagcaaaaacagcggctggccggcgattcgtgaacgtatgcgtcgtaccgaaccggcggcggtggg

SEQ ID NO: 87890 - DNA, 80 bp, synthetic construct
  source 1..80: mol_type = other DNA
atgggcggcaaatggagcaaacgtagcaccattggctggccggcgattcgtgaacgtatgcgtcgtgcggaaccgaccgc

SEQ ID NO: 87891 - DNA, 80 bp, synthetic construct
  source 1..80: mol_type = other DNA
tgcagtggaaatttgatagcagcctggcgtttcatcatcgtgcgcgtgaacagcatccggaattttataaagattgctaa

SEQ ID NO: 87892 - DNA, 80 bp, synthetic construct
  source 1..80: mol_type = other DNA
ggaaggcgtgggcgcggcgagccgtgatctggcgacccatggcgcgctgaccaccagcaacaccgcggataacaacgcgg

SEQ ID NO: 87893 - DNA, 80 bp, synthetic construct
  source 1..80: mol_type = other DNA
tggtgtggaaatttgatagccagctggcgtttcgtcatattgcgcgtgaacgtcatccggaatattataaaaactgctaa

SEQ ID NO: 87894 - DNA, 80 bp, synthetic construct
  source 1..80: mol_type = other DNA
atgggcggcaaatggagcaaatgcggcctgggcggctggccggcggtgcgtgaacgtatgcgtcgtgcggaaccggcggc

SEQ ID NO: 87895 - DNA, 80 bp, synthetic construct
  source 1..80: mol_type = other DNA
agatattctggatctgtgggtgtatcatacccagggcttttttccggattgggataactataccccgggcccgggcgtgc

SEQ ID NO: 87896 - DNA, 80 bp, synthetic construct
  source 1..80: mol_type = other DNA
gttatccgctgacctttggctggtgctttaaactggtgccggtggaacaggaagatgtggaaaaagcgaacgaaggcgaa

SEQ ID NO: 87897 - DNA, 80 bp, synthetic construct
  source 1..80: mol_type = other DNA
aacaacagcctgctgcatccgatttgcacccatggcatggatgatccggaaggcgaagtgctgcagtggaaatttgatag

SEQ ID NO: 87898 - DNA, 80 bp, synthetic construct
  source 1..80: mol_type = other DNA
atgggcggcaaatggagcaaaagcaaactgtttggctggagcaacgtgcgtgaacgtatgcgtcgtgcggaaccggcggc

SEQ ID NO: 87899 - DNA, 80 bp, synthetic construct
  source 1..80: mol_type = other DNA
cgtggctggaagcgcaggaagaagaagaagtgggctttccggtgcgtccgcaggtgccgctgcgtccgatgacctttaaa

SEQ ID NO: 87900 - DNA, 80 bp, synthetic construct
  source 1..80: mol_type = other DNA
ggcgcgcatgatctgagccattttctgaaagaaaaaggcggcctggaaggcctggtgtggagccagaaacgtcaggatat

SEQ ID NO: 87901 - DNA, 80 bp, synthetic construct
  source 1..80: mol_type = other DNA
tctggatctgtgggtgtatcatacccagggctattttccggattggcagaactataccccgggcccgggcacccgttttc

SEQ ID NO: 87902 - DNA, 80 bp, synthetic construct
  source 1..80: mol_type = other DNA
cgctgacctttggctggtgctttaaactggtgccggtggaaccggaaaaagtggaagaagcgaacgaaggcgaaaacaac

SEQ ID NO: 87903 - DNA, 80 bp, synthetic construct
  source 1..80: mol_type = other DNA
ggaaggcgtgggcgcggtgagccgtgatctggaaaaacatggcgcgattaccagcagcaccgcgaacaacgcggcgtgcg

SEQ ID NO: 87904 - DNA, 80 bp, synthetic construct
  source 1..80: mol_type = other DNA
cgtgggcccggcgagccgtgatctggcgacccatggcgcgctgaccagcagcaacaccagcgcgaccaacgcggattgcg

SEQ ID NO: 87905 - DNA, 80 bp, synthetic construct
  source 1..80: mol_type = other DNA
gcgcgtgggtggaagcgcagcaggaaggcgaagtgggctttccggtgcgtccgcaggtgccgctgcgtccgatgacctat

SEQ ID NO: 87906 - DNA, 80 bp, synthetic construct
  source 1..80: mol_type = other DNA
ctgctgcatccgatgagccagcatggcatggatgatccggaaaaagaagtgctgcagtggaaatttgatagccgtctggc

SEQ ID NO: 87907 - DNA, 80 bp, synthetic construct
  source 1..80: mol_type = other DNA
tatagcgcggcgattagcctgagccattttctgaaagaaaaaggcggcctggatggcctgatttatagcaaacagcgtca

SEQ ID NO: 87908 - DNA, 80 bp, synthetic construct
  source 1..80: mol_type = other DNA
gttatccgattacctttggctggtgctataaactggtgccggtggaaccggaagatcgtgaagaagaaaacgatagcctg

SEQ ID NO: 87909 - DNA, 80 bp, synthetic construct
  source 1..80: mol_type = other DNA
ctgcatccggcgagccagcatggcatggaagatccggaacgtgaagtgctgatgtggaaatttgatagccgtctggcgtt

SEQ ID NO: 87910 - DNA, 80 bp, synthetic construct
  source 1..80: mol_type = other DNA
ggatggcgtgggcgcggcgagccgtgatctggaaaaacatggcgcgctgaccagcagcaacaccgcgagcaacaacgcgg

SEQ ID NO: 87911 - DNA, 80 bp, synthetic construct
  source 1..80: mol_type = other DNA
atgggcggcaaactgagcaaatttagcggctggccggcgattcgtgaacgtatgcagcgtgcggaaccggcggcggatgg

SEQ ID NO: 87912 - DNA, 80 bp, synthetic construct
  source 1..80: mol_type = other DNA
cgctgacctttggctggtgctttaaactggtgccggcggaaccggaagcggaagaaaacagcaccctgctgcatccggcg

SEQ ID NO: 87913 - DNA, 80 bp, synthetic construct
  source 1..80: mol_type = other DNA
agccagcatggcgtggatgataccgaacgtgaagtgctgatgtggaaatttgatagcagcctggcgtttcatcatcgtgc

SEQ ID NO: 87914 - DNA, 80 bp, synthetic construct
  source 1..80: mol_type = other DNA
tatagtgaacaaaaatgagggaaaaacgttcctaaatctgaccaagcccctatgtgaggtaaactcgtggcacatcttgt

SEQ ID NO: 87915 - DNA, 80 bp, synthetic construct
  source 1..80: mol_type = other DNA
atgaagaccattattgcactgagctacattttctgtttatcttttggtcaggaccttccaggaaacgacagcagcacagc

SEQ ID NO: 87916 - DNA, 80 bp, synthetic construct
  source 1..80: mol_type = other DNA
gaggtcaacagaccataattccaaatattggatctaggccttgggtaaggggccagtctggtagaataagcatttattgg

SEQ ID NO: 87917 - DNA, 80 bp, synthetic construct
  source 1..80: mol_type = other DNA
ggcagacccctaatggagacacatcagtatgtctcagccacaggggtcaatacagcccgcgaggcccaggccacagcggc

SEQ ID NO: 87918 - DNA, 80 bp, synthetic construct
  source 1..80: mol_type = other DNA
gacctacttacggggaatctcctttaaggtcacggtcgggactatcacagccaatgagggttggacaacggatgagtatg

SEQ ID NO: 87919 - DNA, 80 bp, synthetic construct
  source 1..80: mol_type = other DNA
cactgactgccactgtagttgcatcctatttgacaatctgtcatcagcgttggattcggacgcagggcatttctatgggc

SEQ ID NO: 87920 - DNA, 80 bp, synthetic construct
  source 1..80: mol_type = other DNA
atcaagaggctggccaaagagcaccagcaagggcttttattccgactaggtgagtggcttctaactaagatctgtggctc

SEQ ID NO: 87921 - DNA, 80 bp, synthetic construct
  source 1..80: mol_type = other DNA
taaagaaagtttcatcccaggccgacagttgcagttttacaagcagtgccagaactgggtttcagctggattttacctag

SEQ ID NO: 87922 - DNA, 80 bp, synthetic construct
  source 1..80: mol_type = other DNA
atgttagggagatgtgctttgaccgtgagtacagctgcctttgcagcctatgcatgaagactatccgcaagggctgcagt

SEQ ID NO: 87923 - DNA, 80 bp, synthetic construct
  source 1..80: mol_type = other DNA
tgcttggccaggaaatttggtcaggtctgtgggtgttttatgagtgatgttgttgctagtattgaggactcagttgagga

SEQ ID NO: 87924 - DNA, 80 bp, synthetic construct
  source 1..80: mol_type = other DNA
tctgacagtagacctgtgccccgtagatgcagatgtatacgagcctcagggtctcgacaattggaccacccgtgccctgt

SEQ ID NO: 87925 - DNA, 80 bp, synthetic construct
  source 1..80: mol_type = other DNA
tctcccctttgcagcttgtctttgagccctctgttgtttggtcgcatccggtacagcgcactattcatgattttttggag

SEQ ID NO: 87926 - DNA, 80 bp, synthetic construct
  source 1..80: mol_type = other DNA
cttctgagctgactaaggtgatgaatacagctagacaccgcggtggcaggttagctggttacccgagaatcgacctcact

SEQ ID NO: 87927 - DNA, 80 bp, synthetic construct
  source 1..80: mol_type = other DNA
ttcctgctgtgccctgtagggtgttttttctctggccgaccatcacctgcggccgctcctaatgcgcatgaaccgggacc

SEQ ID NO: 87928 - DNA, 80 bp, synthetic construct
  source 1..80: mol_type = other DNA
tctttcagctcactggtatcttttgagctgtcacctctacggaaccctccgcagcccccaaggcagaggctgctactaga

SEQ ID NO: 87929 - DNA, 80 bp, synthetic construct
  source 1..80: mol_type = other DNA
gcttttgccagatggttcagcagtttatgagggggatttgttttcatctgattgtttttggctggtcaacgccgctaata

SEQ ID NO: 87930 - DNA, 80 bp, synthetic construct
  source 1..80: mol_type = other DNA
gcaaccatcaacctgggggaggcatttgcggtgtcttctactcaaagtatcctactgctttcgacaaatcaaagtttgat

SEQ ID NO: 87931 - DNA, 80 bp, synthetic construct
  source 1..80: mol_type = other DNA
ttccgcgggggcggtctagccgcttacactgagtgccctcgacccatcattcacgctgtggcccccgattatagacgagg

SEQ ID NO: 87932 - DNA, 80 bp, synthetic construct
  source 1..80: mol_type = other DNA
ggccgaccgggctcgcctacaggccgcctacagggagtgcttacatcgtaaagagtctgcggcatattgtttattgggca

SEQ ID NO: 87933 - DNA, 80 bp, synthetic construct
  source 1..80: mol_type = other DNA
cgggaatttatgcagtaccaccagcccactccctccaagcgtggctagatcaccacctacccggcgatgaactctacttg

SEQ ID NO: 87934 - DNA, 80 bp, synthetic construct
  source 1..80: mol_type = other DNA
acgtacgtccgtcggaaggctggcgtttgcttggaggttggtgcgcatcctagatctattaatgataaccccggagtctc

SEQ ID NO: 87935 - DNA, 80 bp, synthetic construct
  source 1..80: mol_type = other DNA
ttaccggatttgactaattggtttagggcctggcggcaggcgtacccggatggctcagcgcccaggaccccacagctggc

SEQ ID NO: 87936 - DNA, 80 bp, synthetic construct
  source 1..80: mol_type = other DNA
tgaggaggccgacgctagcgccacgcggatgcttgttatcaatccagccctggccaacacagctaatttggcattgcagc

SEQ ID NO: 87937 - DNA, 80 bp, synthetic construct
  source 1..80: mol_type = other DNA
aggaggctgaaggggccttcggaaagtatgttggcaatgcccatgtcgcccctgggcctgtgagatatcgttatattgct

SEQ ID NO: 87938 - DNA, 80 bp, synthetic construct
  source 1..80: mol_type = other DNA
ggggtgcccggttccggcaagtcggccggtattaagaaagaggagtgtgaccttgttattgtgcctacacagcagcttaa

SEQ ID NO: 87939 - DNA, 80 bp, synthetic construct
  source 1..80: mol_type = other DNA
aaaccagtggaaacagcgtggttttaatgttatgacacagcatgtcggcttaggccatgctgccggccgtaggttgattg

SEQ ID NO: 87940 - DNA, 80 bp, synthetic construct
  source 1..80: mol_type = other DNA
tggatgaggccccctctttgccgccccacctgctgctttattatatgactgtcgccaagtctgttgtgttgcttggtgac

SEQ ID NO: 87941 - DNA, 80 bp, synthetic construct
  source 1..80: mol_type = other DNA
cccaaccaaataccagcaattgactttgatcataaaggtttggtccctgccatgaatttaaaattagagcccacggagtg

SEQ ID NO: 87942 - DNA, 80 bp, synthetic construct
  source 1..80: mol_type = other DNA
gcgtacggtaactcatcgctgcccccgcgatgtgtgccatttgttgtccgccgactatcctggcatgaccacgacaaacc

SEQ ID NO: 87943 - DNA, 80 bp, synthetic construct
  source 1..80: mol_type = other DNA
ctgtgactcggtcaattttcttttcaggggccacggctggccagaagcttgttttcacgcaggccgccaaatttatgcac

SEQ ID NO: 87944 - DNA, 80 bp, synthetic construct
  source 1..80: mol_type = other DNA
cctggcgcgataacagttcacgaagcgcagggtagcacgtttaacactgtcaccctaatagccaccaatgatgcgagagg

SEQ ID NO: 87945 - DNA, 80 bp, synthetic construct
  source 1..80: mol_type = other DNA
acatcgatgttttttaccacctgacggtcgagatatgcagcgctggcgagattgcccgcgaaggggtccagctaataaca

SEQ ID NO: 87946 - DNA, 80 bp, synthetic construct
  source 1..80: mol_type = other DNA
cctgctattgagttctcgcgcgcatgctattgtcgccttgacccgccacacagagaagtgttacatcgtggatgcgccgg

SEQ ID NO: 87947 - DNA, 80 bp, synthetic construct
  source 1..80: mol_type = other DNA
gcctgttgcgtgagctgggcgtgtctgatgccgtcctgcacaatttttacctcaccaacccggtcgacgtgcaggcgcgc

SEQ ID NO: 87948 - DNA, 80 bp, synthetic construct
  source 1..80: mol_type = other DNA
ccagctgctgtagaaaaggccgagacgcgggaacactctgaggatttgagtatgttaccggctgctccacctgatgttgc

SEQ ID NO: 87949 - DNA, 80 bp, synthetic construct
  source 1..80: mol_type = other DNA
cctttatcaaatgtccgaggcttttggccatcgaccattggaggtccgagctgtcgttcccccaacaccaagccttgagc

SEQ ID NO: 87950 - DNA, 80 bp, synthetic construct
  source 1..80: mol_type = other DNA
aagggaaactttatatgccttttagtctgtcaggccgagattcagtaaccatcttgagtttgacggatacagtgcattgc

SEQ ID NO: 87951 - DNA, 80 bp, synthetic construct
  source 1..80: mol_type = other DNA
cgtatggctgcccctgcacatcgcctcgccgttctgtctaccttggtgggcaggtacggcaaagagacgaagttgtggca

SEQ ID NO: 87952 - DNA, 80 bp, synthetic construct
  source 1..80: mol_type = other DNA
tgaagacgttgcaactgtccgggagtccttacgagccttaattccgtcgttatcggaggtgcgagtgacaacttgtgaac

SEQ ID NO: 87953 - DNA, 80 bp, synthetic construct
  source 1..80: mol_type = other DNA
tcgctgaacttgtggaggcgatggttgcccgtggccaggacggcacagcagtgcttgatttggatttcacagatagaaac

SEQ ID NO: 87954 - DNA, 80 bp, synthetic construct
  source 1..80: mol_type = other DNA
tgtacacgcattacttttttccagaaagactgcaataagtttacaactgatgagcccatcgctcacggcaaggtgggcca

SEQ ID NO: 87955 - DNA, 80 bp, synthetic construct
  source 1..80: mol_type = other DNA
gggcatatcggcctggtctaagaccttggtagccctttttggcccatggtttagagcaattgaaaagtctataattgacc

SEQ ID NO: 87956 - DNA, 80 bp, synthetic construct
  source 1..80: mol_type = other DNA
tcaggcgttgcattctcacagggcgcccggcttctgatttgtccttttgtacgcggggattcacacggtgtcgccaccat

SEQ ID NO: 87957 - DNA, 80 bp, synthetic construct
  source 1..80: mol_type = other DNA
agttgcctgagtggtgtttttatggcgacgcttacgccatgccgcggtttgaggcggctgtctcgggagcccgaggctgc

SEQ ID NO: 87958 - DNA, 80 bp, synthetic construct
  source 1..80: mol_type = other DNA
cgtgtctttgagaatgatttttctgagtttgatagcacccagaacaacttctcgctgggtttggaatgtgttctgatggc

SEQ ID NO: 87959 - DNA, 80 bp, synthetic construct
  source 1..80: mol_type = other DNA
ggaggctggtgcacctgaatggctttggaagttgtatcatctgattcggagtgcctgggttttacaagctccgcaggagt

SEQ ID NO: 87960 - DNA, 80 bp, synthetic construct
  source 1..80: mol_type = other DNA
ccctcagagggcggtggaagaagcactcaggggaacctgggacgttactttggaacaccatctggaatatggcagtgata

SEQ ID NO: 87961 - DNA, 80 bp, synthetic construct
  source 1..80: mol_type = other DNA
ttgcattgttataggtttgaagcagtagcgctgatggcttttaagggtgatgattcggtggtgtgctgccgcatgtatga

SEQ ID NO: 87962 - DNA, 80 bp, synthetic construct
  source 1..80: mol_type = other DNA
ccagctcccccgtgccaatgcattaataactggttgtggcctcaaattgaaggcagcatttcatgacgtggggagctatg

SEQ ID NO: 87963 - DNA, 80 bp, synthetic construct
  source 1..80: mol_type = other DNA
ctgggctgctgctagcttgtggtatgggggttgtccccgatgtggtgaggtttttgggccgtttgaccgagaagaactgg

SEQ ID NO: 87964 - DNA, 80 bp, synthetic construct
  source 1..80: mol_type = other DNA
gggcctggtgaggaccgtaagaccgagttgcagcaagcggtgaaggatttccttgcgaagattacaaatactactgcact

SEQ ID NO: 87965 - DNA, 80 bp, synthetic construct
  source 1..80: mol_type = other DNA
gtcttgtcttctggccacaaggttttacaagctggagcctgggctcgcactgaatgttgtcgcaggtctgaaggcaattg

SEQ ID NO: 87966 - DNA, 80 bp, synthetic construct
  source 1..80: mol_type = other DNA
ctgagggggtgatggacttgaaggagtacacctggcctgtcttgcagttgggtggaagggaataacactcgtgatggagc

SEQ ID NO: 87967 - DNA, 80 bp, synthetic construct
  source 1..80: mol_type = other DNA
gcgccagtggggattgccctctactcccttcatgatttacatccgcgtgaggtcgcgtcagcaatgtatcgccatggcat

SEQ ID NO: 87968 - DNA, 80 bp, synthetic construct
  source 1..80: mol_type = other DNA
atgtgttcaagatgcgttttgttctcttgctcctgcttctgctgttcgtgtcggtgctgctcgccgccccaatgtacccc

SEQ ID NO: 87969 - DNA, 80 bp, synthetic construct
  source 1..80: mol_type = other DNA
gcaggtgcagggtggcgcccgagcaatcggcgaggtacccgggccgactccgtcggccccggccccaacagcctaccccc

SEQ ID NO: 87970 - DNA, 80 bp, synthetic construct
  source 1..80: mol_type = other DNA
tacccgggccgactccgtcggccccggccccaacagcctaccccctccacccaccagagttgatgctaggcccaattgga

SEQ ID NO: 87971 - DNA, 80 bp, synthetic construct
  source 1..80: mol_type = other DNA
tccacccaccagagttgatgctaggcccaattggatgtcccccacaaaccctttcgcccctgagctgtctggcgtgcccc

SEQ ID NO: 87972 - DNA, 80 bp, synthetic construct
  source 1..80: mol_type = other DNA
cactcgggagcgcctgggcagaccgcccccgtgcaaaacgtcaacccaggaatacccgcctttccgatgccgggcaatcg

SEQ ID NO: 87973 - DNA, 80 bp, synthetic construct
  source 1..80: mol_type = other DNA
ccgttgactgcggttgcccccgccccaaataccgcgcctgtgccggattacgactctcgtggcgccattttaaaacgcca

SEQ ID NO: 87974 - DNA, 80 bp, synthetic construct
  source 1..80: mol_type = other DNA
atataacttgtcaacttcccctttaaccttgactgtccctcagtcctctaattctattttgtttgcggcatctcttaacc

SEQ ID NO: 87975 - DNA, 80 bp, synthetic construct
  source 1..80: mol_type = other DNA
cccttttgccgctacaggatgggtctaatactcacattatggctactgaggcctctaattatgcccaataccgcatacag

SEQ ID NO: 87976 - DNA, 80 bp, synthetic construct
  source 1..80: mol_type = other DNA
gccgcaaccttacggttccggccattggtcccgaattcggttggaggttacgccatgagtatgtctttctggccgcagtc

SEQ ID NO: 87977 - DNA, 80 bp, synthetic construct
  source 1..80: mol_type = other DNA
gactacggttcccacctcagtcgacatgaactccatcacctccactgatgtgaggatcgtgtcccaaccaggcctctctg

SEQ ID NO: 87978 - DNA, 80 bp, synthetic construct
  source 1..80: mol_type = other DNA
ccgaactggtcatcccccgtgagcggctgcattaccggaatcagggctggcgatcagtagagaccaatgctgtgccccaa

SEQ ID NO: 87979 - DNA, 80 bp, synthetic construct
  source 1..80: mol_type = other DNA
gcatacactatacgctgtgatgcacttgcctgctgaagcgctgttgccagatggggtttacactaccaaggcctatgttg

SEQ ID NO: 87980 - DNA, 80 bp, synthetic construct
  source 1..80: mol_type = other DNA
gaggaatcgacttccggtatgattatggtttgcattcacggggcaccaattaattctttcacaaactccccttacaccgg

SEQ ID NO: 87981 - DNA, 80 bp, synthetic construct
  source 1..80: mol_type = other DNA
agcactagggttgcttgatctcgctttgcagctggagtatcgcaaccttactcctggtaataccaatactcgagtgaatc

SEQ ID NO: 87982 - DNA, 80 bp, synthetic construct
  source 1..80: mol_type = other DNA
ggtatcgctccacggcccagcataagatacgccgtctgcctgatggcacggcacaggtttcatctgctgctgcccttcgg

SEQ ID NO: 87983 - DNA, 80 bp, synthetic construct
  source 1..80: mol_type = other DNA
tttatgcaggatgttcatctgacgggtaataatggcttaggtgatgtgggtaggggtattgtgcaagtgctgtttaacat

SEQ ID NO: 87984 - DNA, 80 bp, synthetic construct
  source 1..80: mol_type = other DNA
agctgacaccctgcttggtggcctacccactgatctcgtgtcgaatgccggagggcagatgttctatggccgccctcagg

SEQ ID NO: 87985 - DNA, 80 bp, synthetic construct
  source 1..80: mol_type = other DNA
tttcggccaatggggaaccatcggttaaattgtatacatctgttgaggctgcccagctggaccacggtatcgtgataccg

SEQ ID NO: 87986 - DNA, 80 bp, synthetic construct
  source 1..80: mol_type = other DNA
catgacattgacctcggactttcttcagttaccctgcaggactatgataatcaacatgtacaagaccgaccgacgccttc

SEQ ID NO: 87987 - DNA, 80 bp, synthetic construct
  source 1..80: mol_type = other DNA
gcctgcccctgctaggccgatcaccaattggaggacgggtgatgtggtgtgggtcacattgccagcggcccaatatattc

SEQ ID NO: 87988 - DNA, 80 bp, synthetic construct
  source 1..80: mol_type = other DNA
tgtcctcgagcgtgttagattcccacccggcttattggtctgctgatgccacaatcataaacgtggccacaggccagcgt

SEQ ID NO: 87989 - DNA, 80 bp, synthetic construct
  source 1..80: mol_type = other DNA
gccgcagtgtcatctataaagtgggaccaggttacccttaatggccgccctctacatcatgaggcccactcggagttgat

SEQ ID NO: 87990 - DNA, 80 bp, synthetic construct
  source 1..80: mol_type = other DNA
cccgtaatgttgaaggccgattagttgtcacatatgagggtgacacatctgcaggttacaatcatgagcgtaagctgata

SEQ ID NO: 87991 - DNA, 80 bp, synthetic construct
  source 1..80: mol_type = other DNA
ttattacaagctgccgttgatgggtaagatcagtttttgggaacagggcactacgaaggccggttatacctataattaca

SEQ ID NO: 87992 - DNA, 80 bp, synthetic construct
  source 1..80: mol_type = other DNA
acactgtggactctgatagtatctgggtttggtgggatggtggctctaaagcttatctttatgtttctacctatacaact

SEQ ID NO: 87993 - DNA, 80 bp, synthetic construct
  source 1..80: mol_type = other DNA
atgctgggtgcgggtccggttgatattacaggggtgggtgctgttggccctacctcttcatccaccacccgtgctgttga

SEQ ID NO: 87994 - DNA, 80 bp, synthetic construct
  source 1..80: mol_type = other DNA
cccctctcatactcttcaggacggttgtccagcctgtgctgccgccgggctgtcgagctgtctcgttgctgaagctattg

SEQ ID NO: 87995 - DNA, 80 bp, synthetic construct
  source 1..80: mol_type = other DNA
cgcgagtcaagctcctgactgtctctgaagatgtctagttatctttcttattgttttcttttctttttctttttcttcta

SEQ ID NO: 87996 - DNA, 80 bp, synthetic construct
  source 1..80: mol_type = other DNA
cgggcctggattaaagtcacccgggttaggggctgctgttctttggtagtggagagggtccgaagcgtcgggtgtcattt

SEQ ID NO: 87997 - DNA, 80 bp, synthetic construct
  source 1..80: mol_type = other DNA
tgtcttacggttgaccacagtggccaccccttgcccgatgccctacacaccataccctaggagctctgttgtctatgttc

SEQ ID NO: 87998 - DNA, 80 bp, synthetic construct
  source 1..80: mol_type = other DNA
gcagtctgtttagtgcaggcgggtcccctggcttgcttggattcccgttgtcttgcaagtcccgttcaacattccacagt

SEQ ID NO: 87999 - DNA, 80 bp, synthetic construct
  source 1..80: mol_type = other DNA
gtcccttcggacatctgggacaggttgatgctctttggagccacgttagatgatgatgctttctgctgctccaggctgat

SEQ ID NO: 88000 - DNA, 80 bp, synthetic construct
  source 1..80: mol_type = other DNA
cctttgttacaccgtggtcataaaccaggatcccctgggttttggcgtgattctacacctagcgccagtagcataagctc

SEQ ID NO: 88001 - DNA, 80 bp, synthetic construct
  source 1..80: mol_type = other DNA
atgactttcaaactggaggaattggtaatttacctatcaggaattggacttttgattttggtctattaggtactacactt

SEQ ID NO: 88002 - DNA, 80 bp, synthetic construct
  source 1..80: mol_type = other DNA
tggctgggtttgattactcatgcgccataaatgcaccagcgaacatacaacaatttgagcacattgttcaactcagacgc

SEQ ID NO: 88003 - DNA, 80 bp, synthetic construct
  source 1..80: mol_type = other DNA
aaaagcctttgcaaggaaaagaaatgcgggttcgggtattaccatttcagataccccattccacgattccaatacaactt

SEQ ID NO: 88004 - DNA, 80 bp, synthetic construct
  source 1..80: mol_type = other DNA
ttcagccacccaagggtgctataaacaccaccctcccatttcagaatatacatccgatcacaattggaaaatgtccaaaa

SEQ ID NO: 88005 - DNA, 80 bp, synthetic construct
  source 1..80: mol_type = other DNA
cccggctgccctctgacatggggcaagcatgggtcacagtggccttgttagtctcactgagcacttagcactgtgaccca

SEQ ID NO: 88006 - DNA, 80 bp, synthetic construct
  source 1..80: mol_type = other DNA
ggggcaagcatgggtcacagtggccttgttagtctcactgagcacttagcactgtgacccatgcttgccccatgtcagag

SEQ ID NO: 88007 - DNA, 80 bp, synthetic construct
  source 1..80: mol_type = other DNA
atttttcaaaatcaaggtttattagtgaaaagaggaaatgtattagtgatttacatttttccactaatgtaatagaaaat

SEQ ID NO: 88008 - DNA, 80 bp, synthetic construct
  source 1..80: mol_type = other DNA
taaaatgcttgaagaatcagtaaaacacgatgaccacctattacaagattctgaattagctggcttgttatcaatgtctt

SEQ ID NO: 88009 - DNA, 80 bp, synthetic construct
  source 1..80: mol_type = other DNA
tataaaccatcaatcgaggaattatataaagtaatttcattacatgagaatgaaatacaattatatttaatttcattagg

SEQ ID NO: 88010 - DNA, 80 bp, synthetic construct
  source 1..80: mol_type = other DNA
tgagactgatagagaatttattttaactaaaataatgcaaatgacgtctgttgccattactggatcgctgagactttttc

SEQ ID NO: 88011 - DNA, 80 bp, synthetic construct
  source 1..80: mol_type = other DNA
tgaatcattatgggatacaataactacatcaaattacatattagcaagatcagtcggagtgttaaatcaaacgcttaatg

SEQ ID NO: 88012 - DNA, 80 bp, synthetic construct
  source 1..80: mol_type = other DNA
acaacattagaaatggacaagttattaatcaattaatggaagcattaatgcagttatctagacaacaatttccgactatg

SEQ ID NO: 88013 - DNA, 80 bp, synthetic construct
  source 1..80: mol_type = other DNA
aaaacactacaaatattgaataagtctggcatagctgcgatagagatacagaaaatggatgagctattcacactaattag

SEQ ID NO: 88014 - DNA, 80 bp, synthetic construct
  source 1..80: mol_type = other DNA
ttgacattggtcaatacaaaaatatgttgaatgtattaacaactttatatcaatattatgacatgtatcgtgagaaacca

SEQ ID NO: 88015 - DNA, 80 bp, synthetic construct
  source 1..80: mol_type = other DNA
ttctctgtgaggcaagatgttgtggcaatgactgattggtcagggtatagcggaagtttcgttcaacatcctgagctgac

SEQ ID NO: 88016 - DNA, 80 bp, synthetic construct
  source 1..80: mol_type = other DNA
agaattggttccaaaggagacgtttttgtcataagagagccctttatttcatgttctcacttggaatgcaggaccttttt

SEQ ID NO: 88017 - DNA, 80 bp, synthetic construct
  source 1..80: mol_type = other DNA
agggttactaaatcaatagagttgaatgcacctaattctcactatgaggaatgttcctgttaccctgataccggcaaagt

SEQ ID NO: 88018 - DNA, 80 bp, synthetic construct
  source 1..80: mol_type = other DNA
gggtaaaccccccccccaatcctataaagataactaaccaagatatggctctggggctgattggccgagccccagtgcct

SEQ ID NO: 88019 - DNA, 80 bp, synthetic construct
  source 1..80: mol_type = other DNA
gtgattggacatttatgggggtcgtcgagatggtagtcctcctcttagagctcttcggagtcttttggaacccacccgat

SEQ ID NO: 88020 - DNA, 80 bp, synthetic construct
  source 1..80: mol_type = other DNA
tcgtcttgggtggaattggtttagctatagggtttaccagggacaaggtgagcaaaatgatgaaaaacgctgttgacggg

SEQ ID NO: 88021 - DNA, 80 bp, synthetic construct
  source 1..80: mol_type = other DNA
ctccgagcggccacccagcttgggcaatatgggctagaaatattctccctactgaaaaagtatttctttggtggtgacca

SEQ ID NO: 88022 - DNA, 80 bp, synthetic construct
  source 1..80: mol_type = other DNA
aaggccacaaccgtggaagtccctaaacagcagagggataggccaccacggactgtcgccgaggtccaacaaaacttgtg

SEQ ID NO: 88023 - DNA, 80 bp, synthetic construct
  source 1..80: mol_type = other DNA
agtcccggtgacactggtgcgctcaaagactgctttaaacccgacttttcacatctgaaaatggaattggccccccaggg

SEQ ID NO: 88024 - DNA, 80 bp, synthetic construct
  source 1..80: mol_type = other DNA
ccaaggtcccacctatgattttgatgctgatagggtgtccgcgttcacaaagatggctcgagctaatgggataggcctca

SEQ ID NO: 88025 - DNA, 80 bp, synthetic construct
  source 1..80: mol_type = other DNA
tagccatggcctctttgggaaaaagactgcgcagtgtttccactattgaaggtttgaagaatgctctatcaggatataaa

SEQ ID NO: 88026 - DNA, 80 bp, synthetic construct
  source 1..80: mol_type = other DNA
aagctaaagaagctggaaagggacccataggacatgatgacatgatagagaggtttggcttgtgtgagactgaagaagag

SEQ ID NO: 88027 - DNA, 80 bp, synthetic construct
  source 1..80: mol_type = other DNA
tcagggtggggtttttgggtcagtccaactgtgttcatcacaaccacacatgtggtgccaactgacgtcaaagaattctt

SEQ ID NO: 88028 - DNA, 80 bp, synthetic construct
  source 1..80: mol_type = other DNA
gcatgggggctattgcctccatgaggatacagggccgcctcgttcatggccaatcaggaatgctattgacaggggctaat

SEQ ID NO: 88029 - DNA, 80 bp, synthetic construct
  source 1..80: mol_type = other DNA
gcatggaggctattgcctccatgaggatacagggccgcctcgttcatggccaatcaggaatgctattgacaggggctaat

SEQ ID NO: 88030 - DNA, 80 bp, synthetic construct
  source 1..80: mol_type = other DNA
ggatcttggtaccatacctggtgattgtggggcaccatacgttcacaagcgtggcaatgactgggttgtgtgtggtgttc

SEQ ID NO: 88031 - DNA, 80 bp, synthetic construct
  source 1..80: mol_type = other DNA
gggataaggggcattatgctggccatgagattgttagatatgggaatgggccagcactgtcaactaaaacaaagttttgg

SEQ ID NO: 88032 - DNA, 80 bp, synthetic construct
  source 1..80: mol_type = other DNA
gtggtaaggaccctcgagtccaaaatggtccctccctccaacaggtgctccgcgaccaactgaaaccattcgcagatcct

SEQ ID NO: 88033 - DNA, 80 bp, synthetic construct
  source 1..80: mol_type = other DNA
attatggggcgccgaccttgggacagtgatcagggctgctagggcttttggcccattttgtgatgctataaaaccacatg

SEQ ID NO: 88034 - DNA, 80 bp, synthetic construct
  source 1..80: mol_type = other DNA
ctggctggtaatgcatttactgcaggtaaaattatagtttcttgcatacctcctggctttggttcccataaccttactat

SEQ ID NO: 88035 - DNA, 80 bp, synthetic construct
  source 1..80: mol_type = other DNA
taggtgtgcattcccctaatgcagctttctcaataacaagaatcaccatacagcccatatcagcttggtggcgagtgtgc

SEQ ID NO: 88036 - DNA, 80 bp, synthetic construct
  source 1..80: mol_type = other DNA
tcttggggagtttaaggcttaccctgatggtttcctaacctgtgtccctaatggggccagctcgggcccacaacaactgc

SEQ ID NO: 88037 - DNA, 80 bp, synthetic construct
  source 1..80: mol_type = other DNA
tgattggttatcaagttgaggcttcaaatcagttgctggcaaagaatttggccaccaggtactcacttctccgcgctggg

SEQ ID NO: 88038 - DNA, 80 bp, synthetic construct
  source 1..80: mol_type = other DNA
ggtctgaccagtgctgatgcagcaagatttgttgcgggggccccggtcactcgcgttgtggactggaatggtgtgagagt

SEQ ID NO: 88039 - DNA, 80 bp, synthetic construct
  source 1..80: mol_type = other DNA
gtctgcccctgagactcctgcgaccacactgagatctggcggcttcatgtctgtgcctatgccatacactatcaaacaaa

SEQ ID NO: 88040 - DNA, 80 bp, synthetic construct
  source 1..80: mol_type = other DNA
agcaggctcaaccatctggtattagcaatccaaattatgccccctctactgtttctcgaactactagttgggttgaatca

SEQ ID NO: 88041 - DNA, 80 bp, synthetic construct
  source 1..80: mol_type = other DNA
aacaataggcgataatgttgtaatatgaaatgtgggcatcatattcatttaatttggtttaattagattcaatttgatgt

SEQ ID NO: 88042 - DNA, 80 bp, synthetic construct
  source 1..80: mol_type = other DNA
ccacccaactcaagattggtctcaagacaccccagagttccaacaagatagcaaactagagatggttagggatgcagtct

SEQ ID NO: 88043 - DNA, 80 bp, synthetic construct
  source 1..80: mol_type = other DNA
tggctgcagtgaacggattggtgtcgcggccattcaaagacctcttggccaaactcaaaccactgaatgtgctcaacttg

SEQ ID NO: 88044 - DNA, 80 bp, synthetic construct
  source 1..80: mol_type = other DNA
cacatcgatggaaggtctgaagaatgctctgaaaggatacaaagttggcgcgtgtacaattaagtggcaggccaaggttt

SEQ ID NO: 88045 - DNA, 80 bp, synthetic construct
  source 1..80: mol_type = other DNA
tttggggggcagacctaggaactgtgattcgggccgcacgggcttttggcccgttctgtgatgccataaagtcccacaca

SEQ ID NO: 88046 - DNA, 80 bp, synthetic construct
  source 1..80: mol_type = other DNA
tcttaacactaggtatgctcttctgcgggcagggggcctatctagtgctgatgctgctcgggcagtggctggtgctcctg

SEQ ID NO: 88047 - DNA, 80 bp, synthetic construct
  source 1..80: mol_type = other DNA
tgatggcgtcgaaagacgtcgttgcagctactgctgctagtgctgaaaacactagtgacaatagtgaatctataaagaac

SEQ ID NO: 88048 - DNA, 80 bp, synthetic construct
  source 1..80: mol_type = other DNA
aactgcgattggacatttatgggagtagtggagacaataatattacttatggaactgtttgggatcttctggaacccccc

SEQ ID NO: 88049 - DNA, 80 bp, synthetic construct
  source 1..80: mol_type = other DNA
tgatgtgtccagcttcatagcctcactactacccgatatgcatctgcaagggccagaagatctggctaaagatttgatac

SEQ ID NO: 88050 - DNA, 80 bp, synthetic construct
  source 1..80: mol_type = other DNA
cactggtgttggggggtgtaggacttgcaattggatttaccaaggacaaggttacaaaggtcatgaagagcgctgttgaa

SEQ ID NO: 88051 - DNA, 80 bp, synthetic construct
  source 1..80: mol_type = other DNA
ggacttagggcagccacacaattgggccagtatggcctagagatatttgcagtcttaaagaaatacttctttggtggaga

SEQ ID NO: 88052 - DNA, 80 bp, synthetic construct
  source 1..80: mol_type = other DNA
agaagactttaaaggacattgagacagccgtgattgacatggaggtcatttcaacaactgctgtcactcaattagtcagg

SEQ ID NO: 88053 - DNA, 80 bp, synthetic construct
  source 1..80: mol_type = other DNA
gacaagcaggctgcccgaacctacatgaacatcttggatgctgaagaagaaaaggcaagaaagctttcagtcaggcatgc

SEQ ID NO: 88054 - DNA, 80 bp, synthetic construct
  source 1..80: mol_type = other DNA
agacccccatgtcgtgtccacgactaatgccttgatctcacgcatttctttggctcgctctgcacttgctaaggcacaag

SEQ ID NO: 88055 - DNA, 80 bp, synthetic construct
  source 1..80: mol_type = other DNA
gattagtagagggccatctccagccccacaagaaaggccccccaaagatcagagggacaaacccccaaggaatgtgactg

SEQ ID NO: 88056 - DNA, 80 bp, synthetic construct
  source 1..80: mol_type = other DNA
ctgagatgaccaatagagttaaaccagtagtaataatgatgtgtggccccccaggtataggcaagacaaaggcagctgag

SEQ ID NO: 88057 - DNA, 80 bp, synthetic construct
  source 1..80: mol_type = other DNA
accttgctaagagattggctaatgagatacggcctggaggaaaagtgggtctcgtgccaagggaggctgtggatcactgg

SEQ ID NO: 88058 - DNA, 80 bp, synthetic construct
  source 1..80: mol_type = other DNA
gccatagccgatacagctccactcaccttgaattgtgaccggattgagaagaaagggttacagttcgtctctgatgccat

SEQ ID NO: 88059 - DNA, 80 bp, synthetic construct
  source 1..80: mol_type = other DNA
agtgataacaacaaatgccccaggtccagcccctgttgactttgtcaatcttggcccagtgtgccgacgggtagacttcc

SEQ ID NO: 88060 - DNA, 80 bp, synthetic construct
  source 1..80: mol_type = other DNA
tggtttattgcaccgcacctgacgttgaacaaacacgtcgcaccaaccctggagacactggagcccttaaggattgtttc

SEQ ID NO: 88061 - DNA, 80 bp, synthetic construct
  source 1..80: mol_type = other DNA
aaaagtgacttctcccatctaaaaatggagttggccccacagggcggatttgataatcaagggaacaccccatttggcaa

SEQ ID NO: 88062 - DNA, 80 bp, synthetic construct
  source 1..80: mol_type = other DNA
agggactatgcggcccaccacgttaaaccgtcttctcatacaagctgtggcgctaaccatggagcgtcaggatgaattcc

SEQ ID NO: 88063 - DNA, 80 bp, synthetic construct
  source 1..80: mol_type = other DNA
gtcaagtgtatgattttgacgctgacagggtatccgctttcaccagtctagcgagagccaatggtctgggcctcattagc

SEQ ID NO: 88064 - DNA, 80 bp, synthetic construct
  source 1..80: mol_type = other DNA
atggcctctctaggaaagaaattgaggggtgtggactcagtccatggcctcaagaatgcattatcaggctacaccataac

SEQ ID NO: 88065 - DNA, 80 bp, synthetic construct
  source 1..80: mol_type = other DNA
aaactcaacaggcaatggggtggattgacccccccgtggatcagaacttaccaacctgggaggaattgagtcaaacagaa

SEQ ID NO: 88066 - DNA, 80 bp, synthetic construct
  source 1..80: mol_type = other DNA
taaaatggcaagccagagtgtatgacattgaatcggatggcaccaatgtacacataaaggaaaacacctcagcccagaca

SEQ ID NO: 88067 - DNA, 80 bp, synthetic construct
  source 1..80: mol_type = other DNA
caacgccagcagtcaattgacacagcagctctagcactcactagactcaaggcagcacgggcagcagcgtatgcagcttg

SEQ ID NO: 88068 - DNA, 80 bp, synthetic construct
  source 1..80: mol_type = other DNA
catacaaagcgcaataacaactatcttgcagatggctgggtcagccatcgttataaatcgtgctgtcaaaaggatgtttg

SEQ ID NO: 88069 - DNA, 80 bp, synthetic construct
  source 1..80: mol_type = other DNA
gagcacacccaagcaccatagccctcgaaggaccaccaagagaacaccggtgtagagctcacctggccaaagctgcaggt

SEQ ID NO: 88070 - DNA, 80 bp, synthetic construct
  source 1..80: mol_type = other DNA
ggtggaccaataggtcatgatgatgtcattgataagtatggtctatgtgagactgaagaagagggcaccagtgaggagat

SEQ ID NO: 88071 - DNA, 80 bp, synthetic construct
  source 1..80: mol_type = other DNA
gaatgtggagcttcccaccgccacttctgagggtaaaaataaaggtaaaaccaagaaaggaagaggcagaagagccaact

SEQ ID NO: 88072 - DNA, 80 bp, synthetic construct
  source 1..80: mol_type = other DNA
acaatgctttttcaaggcgaggtctgagtgatgaagaatacgaggagtataagaagatcagggaagaaaagaatggtaac

SEQ ID NO: 88073 - DNA, 80 bp, synthetic construct
  source 1..80: mol_type = other DNA
gtgatggaggcattggtgagacagaaatggagatccgacacaagatcttctataaatccaaaaagggccgccaaaatgaa

SEQ ID NO: 88074 - DNA, 80 bp, synthetic construct
  source 1..80: mol_type = other DNA
cgccgccagttaggattagtcactggtagtgacattagaaagagaaaaccaattgattggaccccccccaagaatgattg

SEQ ID NO: 88075 - DNA, 80 bp, synthetic construct
  source 1..80: mol_type = other DNA
aaacaagagatactcaagaacaattcaaactggttcgatgctggtggattggcaccagctagtatcccttctggttatgt

SEQ ID NO: 88076 - DNA, 80 bp, synthetic construct
  source 1..80: mol_type = other DNA
ggtggggcttttgggtgagcccgactgtttttatcaccaccacccacgttataccatctggagtgcgtgaattctttggc

SEQ ID NO: 88077 - DNA, 80 bp, synthetic construct
  source 1..80: mol_type = other DNA
gaacccatcgaatccattgcaatccaccgtgctggtgaatttacacaattcaggttttcacgcaaagtccgcccagactt

SEQ ID NO: 88078 - DNA, 80 bp, synthetic construct
  source 1..80: mol_type = other DNA
gactggaatggtgttggaggaaggctgccctgaaggtgtcgtgtgttccatcctcattaaacgcgactctggtgagctgc

SEQ ID NO: 88079 - DNA, 80 bp, synthetic construct
  source 1..80: mol_type = other DNA
taccccttgctgttcgaatgggcgctatagcgtccatgaagatccaagggaggttagtgcatggtcaatctgggatgctg

SEQ ID NO: 88080 - DNA, 80 bp, synthetic construct
  source 1..80: mol_type = other DNA
cttactggggccaacgccaaggggatggacttaggtaccctaccaggtgattgtggtgccccttatgtgtacaagaggaa

SEQ ID NO: 88081 - DNA, 80 bp, synthetic construct
  source 1..80: mol_type = other DNA
gaggtgataaaggccactatgctggtcatgagataatcaagcacagtaagggcccagctttatcaaccaagaccaagttt

SEQ ID NO: 88082 - DNA, 80 bp, synthetic construct
  source 1..80: mol_type = other DNA
gtgtttatgaaccagcataccttgggggccgtgacccaagggtaaaaggtggaccttccctacaacaagtcctgcgtgac

SEQ ID NO: 88083 - DNA, 80 bp, synthetic construct
  source 1..80: mol_type = other DNA
gaagaatacagagcagcaaccccctgaccaccaggttaaatggagtgtaaacaacggggttgatctgggggtggacagtc

SEQ ID NO: 88084 - DNA, 80 bp, synthetic construct
  source 1..80: mol_type = other DNA
gaagaatacagagcagcaaccccctgaccaccaggttaaatggagtgtaaacaacggggttgatctgggagtggacagtc

SEQ ID NO: 88085 - DNA, 80 bp, synthetic construct
  source 1..80: mol_type = other DNA
cagctgaaaccgtttgctgagccacgaggtcgaatgccagaacctggtctacttgaggcagccgtcgaaactgtcacatc

SEQ ID NO: 88086 - DNA, 80 bp, synthetic construct
  source 1..80: mol_type = other DNA
gtcagtcactcgacaaaaccacaagttcggggcacccataccataaaaggaaaaatgatgattggaatggaacttcattt

SEQ ID NO: 88087 - DNA, 80 bp, synthetic construct
  source 1..80: mol_type = other DNA
aaaggctcctctggggtgctgatctctcaacagttataagagctgccagagcctttggaccattttgtgacgccataaag

SEQ ID NO: 88088 - DNA, 80 bp, synthetic construct
  source 1..80: mol_type = other DNA
cctcatgtcattaaactccccatcaaggttggtatgaactccatagaagatggcccaatgatttatgcagaacatgcaaa

SEQ ID NO: 88089 - DNA, 80 bp, synthetic construct
  source 1..80: mol_type = other DNA
ttcggcctgggattctacacaaaatagacagatcatgactgagtcctttgcaatcatgtgccgcctcacggcgtcacctg

SEQ ID NO: 88090 - DNA, 80 bp, synthetic construct
  source 1..80: mol_type = other DNA
aaggaaggcttgccatcagggttcccttgcacgtcacaggtgaatagtataaatcattggttaatcacattgtgtgctat

SEQ ID NO: 88091 - DNA, 80 bp, synthetic construct
  source 1..80: mol_type = other DNA
taactactgtgccaggtccaacatggaacctgtgccccatgccaccaattgatcaacgaaacaatggccctgcaaaagag

SEQ ID NO: 88092 - DNA, 80 bp, synthetic construct
  source 1..80: mol_type = other DNA
tctcaacagatattgattttgaccccgcccgcctcactcaagtacttaaagaatatggattgaggcccacccgaccagac

SEQ ID NO: 88093 - DNA, 80 bp, synthetic construct
  source 1..80: mol_type = other DNA
aagtcagaaggacccatcatacttagaagacaggtggatggtcttgttttcttaaggaggacaatctcaaaagatgccgc

SEQ ID NO: 88094 - DNA, 80 bp, synthetic construct
  source 1..80: mol_type = other DNA
gggcttccaggggaggctggataggggctcaattgaaaggcagctctggtggactcgaggccctaaccatgatgacccca

SEQ ID NO: 88095 - DNA, 80 bp, synthetic construct
  source 1..80: mol_type = other DNA
gggcttccaggtgaggctggataggggctcaattgaaaggcagctctggtggactcgaggccctaaccatgatgacccca

SEQ ID NO: 88096 - DNA, 80 bp, synthetic construct
  source 1..80: mol_type = other DNA
tccacggtgagaaattttacaggaaaatctccagtaaagttatacaggagataaagactggtggtttggaaatgtatgtg

SEQ ID NO: 88097 - DNA, 80 bp, synthetic construct
  source 1..80: mol_type = other DNA
cagctgaccctatacccattgaccctgtggctggctcttctacagcacttgccactgcaggccaagttaatttgattgat

SEQ ID NO: 88098 - DNA, 80 bp, synthetic construct
  source 1..80: mol_type = other DNA
gacctcatttaaaccctttcctctcccatctctctcagatgtacaatggctgggtgggcaacatgcgagtgcgtgttgtc

SEQ ID NO: 88099 - DNA, 80 bp, synthetic construct
  source 1..80: mol_type = other DNA
ccacttattggtgatatgatagaattctatgagggacacatttaccattatgcaatatatattggccaaggaaaaactgt

SEQ ID NO: 88100 - DNA, 80 bp, synthetic construct
  source 1..80: mol_type = other DNA
ttggctggtaatgctttcacggctgggaaggttataatttgttgtgtcccccctggctttcaatctcgtactctttccat

SEQ ID NO: 88101 - DNA, 80 bp, synthetic construct
  source 1..80: mol_type = other DNA
agctcaggctactttattcccccacgttattgctgatgttaggacccttgaccctgtagaagtgcctcttgaagatgtta

SEQ ID NO: 88102 - DNA, 80 bp, synthetic construct
  source 1..80: mol_type = other DNA
ggaacgtgttgtatcataataatgacacccaacccaccatgcgcctcctttgcatgttgtacacccctctccgcaccggg

SEQ ID NO: 88103 - DNA, 80 bp, synthetic construct
  source 1..80: mol_type = other DNA
ggagcgtctggtgggactgattctttcgtggtagctgggcgtgtacttacttgcccaggccctgactttaacttcttatt

SEQ ID NO: 88104 - DNA, 80 bp, synthetic construct
  source 1..80: mol_type = other DNA
cttggtccctcctacagtcgagcaaaagactcgccctttcactgtgcctaatatccctttgaagtatctatctaactcca

SEQ ID NO: 88105 - DNA, 80 bp, synthetic construct
  source 1..80: mol_type = other DNA
gaatcccaaaccccattgaaggtatgtcattgtcacctgatcagactcaaaatgtccaattccagaatggcaggtgcaca

SEQ ID NO: 88106 - DNA, 80 bp, synthetic construct
  source 1..80: mol_type = other DNA
attgacggtcaacccctcgggactacacctgtctcggttagccagttatgtaagtttaggggtaggataacatctggaca

SEQ ID NO: 88107 - DNA, 80 bp, synthetic construct
  source 1..80: mol_type = other DNA
gaaggtgctcaatttgacagagttggatggttcaccttttatggcctttgctgcccctgctcctgcgggcttcccagatc

SEQ ID NO: 88108 - DNA, 80 bp, synthetic construct
  source 1..80: mol_type = other DNA
ttgggtcctgtgattggcatattgagatgagtaaaatcccaaattctagcacccagagtaatccaatagtggtcaattct

SEQ ID NO: 88109 - DNA, 80 bp, synthetic construct
  source 1..80: mol_type = other DNA
gtcaagcccaatagtcaacagtttgtccctcatttgtcaagtattacccttgatgacaatgtttctagtgggggtgatta

SEQ ID NO: 88110 - DNA, 80 bp, synthetic construct
  source 1..80: mol_type = other DNA
tattggtactatacaatggacctctcccccttctgattctggcggagccaatacaaacttttggaaaatccctgactatg

SEQ ID NO: 88111 - DNA, 80 bp, synthetic construct
  source 1..80: mol_type = other DNA
ggtctagcttggctgaagcttcacagttggcccccgctgtctatccacctggtttcaatgaagtgattgtgtattttatg

SEQ ID NO: 88112 - DNA, 80 bp, synthetic construct
  source 1..80: mol_type = other DNA
aagcggccttttcaatagccagaataaccatacaccccattgctgcttggtggagggtttgttatgtgccaacacctgat

SEQ ID NO: 88113 - DNA, 80 bp, synthetic construct
  source 1..80: mol_type = other DNA
gcatctatacctggccccaatcaatctgggtcccctaatttggtgccatgcctactcccccaggaatatataacacattt

SEQ ID NO: 88114 - DNA, 80 bp, synthetic construct
  source 1..80: mol_type = other DNA
cattagtgaacaggcccccattcagggtgaggctgccttactccattatgtggacccagacaccaatcgtaatttgggtg

SEQ ID NO: 88115 - DNA, 80 bp, synthetic construct
  source 1..80: mol_type = other DNA
agtttaaattgtatcctggtggttatttaacctgtgttcctaatagttctagtactggacctcaacagcttcctcttgat

SEQ ID NO: 88116 - DNA, 80 bp, synthetic construct
  source 1..80: mol_type = other DNA
ttggtgtccgtagataatggcccaagccattataggagccattgccgcctctgcagccggcagcgccctgggtgctggca

SEQ ID NO: 88117 - DNA, 80 bp, synthetic construct
  source 1..80: mol_type = other DNA
tccaggccggtgctgaagctgcgttacaggcacagagatatcaacaagatttgactttgcagcaaaattcttttaatcat

SEQ ID NO: 88118 - DNA, 80 bp, synthetic construct
  source 1..80: mol_type = other DNA
gataaagaaatgttaggttatcaagtggaaatgtctaataagttgttagctaagaatcttaatacccgctattctcttct

SEQ ID NO: 88119 - DNA, 80 bp, synthetic construct
  source 1..80: mol_type = other DNA
ccaggcgggtggcctctcaccctctgatgcggctagggctgtggccggggcccctgtcaccaggctggtcgactggggtg

SEQ ID NO: 88120 - DNA, 80 bp, synthetic construct
  source 1..80: mol_type = other DNA
ccaggcgggtggcctctcaccctctgatgcggctagggctgtggccggtgcccctgtcaccaggctggtcgactggtgtg

SEQ ID NO: 88121 - DNA, 80 bp, synthetic construct
  source 1..80: mol_type = other DNA
gagtgcgtgttgcagcaccacaatcgtctgccaccacattgagatctggcaatttcatggcagtgccgctcccagctcag

SEQ ID NO: 88122 - DNA, 80 bp, synthetic construct
  source 1..80: mol_type = other DNA
ccaaagcagaagccccttgccagtgagggttattccaaccccgcttatgaccctatgcagcgtacagcttcttgggttca

SEQ ID NO: 88123 - DNA, 80 bp, synthetic construct
  source 1..80: mol_type = other DNA
cagagattaaattatgaccaactcaaagagcttgagaatgagccatggccatatgctgcagtcaccaataattgctatga

SEQ ID NO: 88124 - DNA, 80 bp, synthetic construct
  source 1..80: mol_type = other DNA
atctcaaaattccaatcggacttggtctccttaccataggcaggcccttcagactgtgtgggtgaccccccctggctcta

SEQ ID NO: 88125 - DNA, 80 bp, synthetic construct
  source 1..80: mol_type = other DNA
cctcttcttcttctgtttctaccgcccctcgggggtactttaatacagataggttgcctctgttcgcaaacttgaggcgt

SEQ ID NO: 88126 - DNA, 80 bp, synthetic construct
  source 1..80: mol_type = other DNA
taatgttgtaataagattagtgagcatcctattcaaatttggccttgtataatttggttatatttggcttttaattttga

SEQ ID NO: 88127 - DNA, 80 bp, synthetic construct
  source 1..80: mol_type = other DNA
agattagtgagcatcctattcaaatttggccttgtataatttggttatatttggcttttaattttgatttggttgatgtt

SEQ ID NO: 88128 - DNA, 80 bp, synthetic construct
  source 1..80: mol_type = other DNA
cgtttcttcacaagattgaagaatttaggttctaacaataaacctataaaaattgaaaacacccatatggccctcaactt

SEQ ID NO: 88129 - DNA, 80 bp, synthetic construct
  source 1..80: mol_type = other DNA
gttttgctgcagaatcctcaacctgcaggatacttggttggagcgccgtctagttacgtccagtcgttttaaccatccaa

SEQ ID NO: 88130 - DNA, 80 bp, synthetic construct
  source 1..80: mol_type = other DNA
caattaatggcttggtatcaaaaccctttaaagaccttctaaataaacttaagccactcaacgtgcttaacctactctcc

SEQ ID NO: 88131 - DNA, 80 bp, synthetic construct
  source 1..80: mol_type = other DNA
ccttcatgggggttgttgagttgatcgtactgatggctgaattgtttgatgtgttttggacgccacctgacatatcaagt

SEQ ID NO: 88132 - DNA, 80 bp, synthetic construct
  source 1..80: mol_type = other DNA
cagaggatctggctaaggatctagtccccctcatacttggcggcattggtttggcgataggctttacaagggacaaggtc

SEQ ID NO: 88133 - DNA, 80 bp, synthetic construct
  source 1..80: mol_type = other DNA
acaaaagttatgaaaagcgcggttgacggactacgttcagccacgcaacttgggcagtatggcttggagatattttcaat

SEQ ID NO: 88134 - DNA, 80 bp, synthetic construct
  source 1..80: mol_type = other DNA
agcgaacactgcggggcattgaggacgcagtcatagacatggaggtgctgtccagtacaaatgtgacgcaattggttaga

SEQ ID NO: 88135 - DNA, 80 bp, synthetic construct
  source 1..80: mol_type = other DNA
atatggcattggacctgttacgccgatcacagacaccctctcccacccggcacaaccacccccccaaagaccaaagagac

SEQ ID NO: 88136 - DNA, 80 bp, synthetic construct
  source 1..80: mol_type = other DNA
tcgtaaaccttgggcctgtgtgtaggcgagtagacttcctagtctactgttctgccccagagattgagcagatgcgaagg

SEQ ID NO: 88137 - DNA, 80 bp, synthetic construct
  source 1..80: mol_type = other DNA
gcacatccaggagacaccaatgtgatcaaggatttatataagaaggacttctcacatttgaagatggaaatagcccccca

SEQ ID NO: 88138 - DNA, 80 bp, synthetic construct
  source 1..80: mol_type = other DNA
ggggggctttgacaaccagggtaacacaccatttggaaagggtaccatgaagaccaccacgctcaatagactactcatac

SEQ ID NO: 88139 - DNA, 80 bp, synthetic construct
  source 1..80: mol_type = other DNA
aggccacagctttaaccatggaacgacaagatgagttccaattgcaaggagcagtctataattttgatgaggatagagtg

SEQ ID NO: 88140 - DNA, 80 bp, synthetic construct
  source 1..80: mol_type = other DNA
gccgcctttactagtatggcccgagccaatggcttggggcttattagtatggcaactttgggaaagaagctgaggagtgt

SEQ ID NO: 88141 - DNA, 80 bp, synthetic construct
  source 1..80: mol_type = other DNA
cgcccaccacggtctgttatggaggtaaagaggactatgggttgggatggtgaaccagaacaaaaagagagcacagctag

SEQ ID NO: 88142 - DNA, 80 bp, synthetic construct
  source 1..80: mol_type = other DNA
aatagaagaatgtgacataatctggaacacccgaacctactcaatcaagagtgatagtaagactgtcacagtgaaagaga

SEQ ID NO: 88143 - DNA, 80 bp, synthetic construct
  source 1..80: mol_type = other DNA
aacaaagtccatcatcggttcagcaccaagccgtctgcacagccaccctcgctctatccaggttgcgtgcggcccgagca

SEQ ID NO: 88144 - DNA, 80 bp, synthetic construct
  source 1..80: mol_type = other DNA
ttggcttatgcctcctgtcttcagagtgcggttttgtccgtactccaagtggccggttctgctgtggtagtaagtagagc

SEQ ID NO: 88145 - DNA, 80 bp, synthetic construct
  source 1..80: mol_type = other DNA
agtcaagcgcatgtttggcacgcgtgcagaccaaccagctcttgaaggtggccataaggaacataactgtagggtccatc

SEQ ID NO: 88146 - DNA, 80 bp, synthetic construct
  source 1..80: mol_type = other DNA
gtgcagaggctgcaggccgtggccccatagggcacgacggtgtcattgagcgctacggtctgtgtgagagtgaacaagaa

SEQ ID NO: 88147 - DNA, 80 bp, synthetic construct
  source 1..80: mol_type = other DNA
ggcggcgatggcgggataggtgagactgaagcagaaatccgccacagagtgttctacaagtccaaggctggcatgaggaa

SEQ ID NO: 88148 - DNA, 80 bp, synthetic construct
  source 1..80: mol_type = other DNA
ggcatggtgtgatctcacaaaagaggagaaagaagagataatgcgcaacaacgagaggctgttcgatgctggtggggtca

SEQ ID NO: 88149 - DNA, 80 bp, synthetic construct
  source 1..80: mol_type = other DNA
gatggggcttttgggtcagttcaacagtcttcatcaccaccactcatgtaatcccaccaggctccaaagaagtctttggg

SEQ ID NO: 88150 - DNA, 80 bp, synthetic construct
  source 1..80: mol_type = other DNA
ccccttcaaccgtgcccagcacatttgagagagactactcgaatggggctattgatgaacaccagactgtgtcctggtct

SEQ ID NO: 88151 - DNA, 80 bp, synthetic construct
  source 1..80: mol_type = other DNA
gtggaagggacccaagggtggaaggaggtccatcgctgcaacaggttttgagggaccaacttaaaccctttgctgagcct

SEQ ID NO: 88152 - DNA, 80 bp, synthetic construct
  source 1..80: mol_type = other DNA
cgtggtaggctacctgaagcgggcctcttagaagctgcagtggaaacagtcaccaatgccattgagcaagtcatggacac

SEQ ID NO: 88153 - DNA, 80 bp, synthetic construct
  source 1..80: mol_type = other DNA
ctggaatggcaccgcgttcgtgcgggagctgggggatcaggcagcccatgccaacaacatgtttgagcttggaaagtcca

SEQ ID NO: 88154 - DNA, 80 bp, synthetic construct
  source 1..80: mol_type = other DNA
ggggcggaccttggcacagttattcgtgccgctagggcttttggtccattttgtgaagccataaaatctcatgttataaa

SEQ ID NO: 88155 - DNA, 80 bp, synthetic construct
  source 1..80: mol_type = other DNA
gctgctaatggagttaatattggagttgaggacctaacgactgttcgcgggccttactggaatttatgcccccttccacc

SEQ ID NO: 88156 - DNA, 80 bp, synthetic construct
  source 1..80: mol_type = other DNA
tctccacagatgttgaatttgatccaatcaagctaactcaagtgctcaaagaatatggtctaagacctacaagacctgac

SEQ ID NO: 88157 - DNA, 80 bp, synthetic construct
  source 1..80: mol_type = other DNA
aaaacagacggccccatagtggtcaaacagcaagtggatggccttgtctttctccgacgcactatctcaaaagatgccat

SEQ ID NO: 88158 - DNA, 80 bp, synthetic construct
  source 1..80: mol_type = other DNA
tggctaccaaggtcgtcttgaccgaaactccattgagaggcagctctggtggacgcgtggtcccaatcacgatgatccat

SEQ ID NO: 88159 - DNA, 80 bp, synthetic construct
  source 1..80: mol_type = other DNA
ttgagacattggttccacacccgcagagaaaagtccaactaatatccctgcttggtgaggctgccctccatggtgagaaa

SEQ ID NO: 88160 - DNA, 80 bp, synthetic construct
  source 1..80: mol_type = other DNA
attggacacccgtaacaatgaccccgcaaaggaacctctcataggagacatgatagagttttatgagggacatatcttcc

SEQ ID NO: 88161 - DNA, 80 bp, synthetic construct
  source 1..80: mol_type = other DNA
tcacctcccaaagtgtgtccatagcacagatgactatgttcccccacataatcgctgatgttagggttctggaaccaatt

SEQ ID NO: 88162 - DNA, 80 bp, synthetic construct
  source 1..80: mol_type = other DNA
gaaattcccctggaggatgtgaggaatgttctgtttcatactaatgacaaccggccaaccatgcggctggtatgtatgct

SEQ ID NO: 88163 - DNA, 80 bp, synthetic construct
  source 1..80: mol_type = other DNA
ctacacgccacttagggccaatggcagttcttccggcactgacccttttgttattgcaggcagggttctgacttgtcctg

SEQ ID NO: 88164 - DNA, 80 bp, synthetic construct
  source 1..80: mol_type = other DNA
attctacctttaactttctgtttttagtgcccccaaatgtagaacagaagaccaaacagtttagtgtacccaatctccct

SEQ ID NO: 88165 - DNA, 80 bp, synthetic construct
  source 1..80: mol_type = other DNA
cttaactctctttctaactctagggtgcctagtttgatcaagtccatgatgatttctcgagatcaagcccaagtgattca

SEQ ID NO: 88166 - DNA, 80 bp, synthetic construct
  source 1..80: mol_type = other DNA
gtttcagaatggtcgggttacattagatgggcagttacaaggcacaaccccgacttctgctagtcaactcttcaagcttc

SEQ ID NO: 88167 - DNA, 80 bp, synthetic construct
  source 1..80: mol_type = other DNA
ggggcactgttttcactgcgtctggtggcaaaggattaaacctgacagagcttgacggcacaccctaccatgcctttgag

SEQ ID NO: 88168 - DNA, 80 bp, synthetic construct
  source 1..80: mol_type = other DNA
agtcccgcacccatagggtttcctgatattggtgattgtgattggcacctcattgctgtccccactactacttttccaaa

SEQ ID NO: 88169 - DNA, 80 bp, synthetic construct
  source 1..80: mol_type = other DNA
tgacggccgtaatcgtgagatagcagtcactcaaggatcagcatttgcacctcacctgggatctatacattttacaggag

SEQ ID NO: 88170 - DNA, 80 bp, synthetic construct
  source 1..80: mol_type = other DNA
gtgacctcaacaacaatgataatgttatctgttcaataaattggatctcccctattgatacagtgaaaaaggtaaaccca

SEQ ID NO: 88171 - DNA, 80 bp, synthetic construct
  source 1..80: mol_type = other DNA
tgggtcattccaaattacggttcaaccctaacagaagcagcccaattggcccccccaatataccccccaggttttggtga

SEQ ID NO: 88172 - DNA, 80 bp, synthetic construct
  source 1..80: mol_type = other DNA
gaccattgttttcttcatgtctgatggtcctattgccaatggattgaatgggctgagtgttccatgcacactaccacaag

SEQ ID NO: 88173 - DNA, 80 bp, synthetic construct
  source 1..80: mol_type = other DNA
aatttgtgacccattttgtcaatgaacaagctccaacccggggtgaagctgcactgttgcattacattgacccagacact

SEQ ID NO: 88174 - DNA, 80 bp, synthetic construct
  source 1..80: mol_type = other DNA
cggccggtgcggtccgtaggcttgggatccgcagatcataatggcccaagccatcttgggagcaattgcagccacagctg

SEQ ID NO: 88175 - DNA, 80 bp, synthetic construct
  source 1..80: mol_type = other DNA
caggcatccaggctggcacggaggccgcgcttcagcatcagcgtttccaacaggatttgacccttcagagtaacactttt

SEQ ID NO: 88176 - DNA, 80 bp, synthetic construct
  source 1..80: mol_type = other DNA
aagcatgacaaggaaatgttagggctacaggttgaagcttcaacagctcttttgcagaacagcttgggagcccgctacag

SEQ ID NO: 88177 - DNA, 80 bp, synthetic construct
  source 1..80: mol_type = other DNA
catgctcaccaatgctggcctcacctcagctgacgctgccagagctgttgccggggctccggtgacccgggtagttgatt

SEQ ID NO: 88178 - DNA, 80 bp, synthetic construct
  source 1..80: mol_type = other DNA
ggaacggcacacgcattgcagcccccacatcaacccagaccactctcaggtcaggtggtttcatgagtgtgccaatagta

SEQ ID NO: 88179 - DNA, 80 bp, synthetic construct
  source 1..80: mol_type = other DNA
tacagaggaaaacaacaacaaccatctggtggctttcataaccccaactatgacgcgcagtccacatctactcgcacgtc

SEQ ID NO: 88180 - DNA, 80 bp, synthetic construct
  source 1..80: mol_type = other DNA
tcagtgggtgtcttcacagtcctcttctttgtcaactctttcaccatatcatcctaatgctctccgaaccacttgggtca

SEQ ID NO: 88181 - DNA, 80 bp, synthetic construct
  source 1..80: mol_type = other DNA
tgcctctattcgcaaatatgaggaaatagtttttgtaatatgaaatgtgggcatcatattcaattggcttaattaatgat

SEQ ID NO: 88182 - DNA, 80 bp, synthetic construct
  source 1..80: mol_type = other DNA
tttgtaatatgaaatgtgggcatcatattcaattggcttaattaatgattaataatttggtctgattagtatttgatgtt

SEQ ID NO: 88183 - DNA, 80 bp, synthetic construct
  source 1..80: mol_type = other DNA
aaccatggccctatgcctctataaccaacaactgctatgagttttgttgcagggtgatggcgcttgatgacacatggctt

SEQ ID NO: 88184 - DNA, 80 bp, synthetic construct
  source 1..80: mol_type = other DNA
tttattgcgtctttactgcctgatttacatctacaaggcccagaagatctagccagagatttagtcccccttatattagg

SEQ ID NO: 88185 - DNA, 80 bp, synthetic construct
  source 1..80: mol_type = other DNA
tggtataggtttagcaattggtttcacaagagacaaaataacaaaggtgatgaagagcgccgttgatggattacggtcag

SEQ ID NO: 88186 - DNA, 80 bp, synthetic construct
  source 1..80: mol_type = other DNA
gtcaatctaggtcccgtgtgcagacgggtggactttttagtttactgctctgcacccgagatcgaacaaacgcggagggc

SEQ ID NO: 88187 - DNA, 80 bp, synthetic construct
  source 1..80: mol_type = other DNA
tccaagggactgtctacaactttgatgaggacagagtggccgccttcaccagtttagctcgcgctaacggcctaggcctc

SEQ ID NO: 88188 - DNA, 80 bp, synthetic construct
  source 1..80: mol_type = other DNA
ataagtatggcaacattgggcaagaaactaaggaatgtcagttccatggaaggtctgcgtaatgcactactggggtataa

SEQ ID NO: 88189 - DNA, 80 bp, synthetic construct
  source 1..80: mol_type = other DNA
gtgacgggaacaatgttacaattaaagaaaaacaagcaccgtcctctccccaacatcaagctatttccacagccacccta

SEQ ID NO: 88190 - DNA, 80 bp, synthetic construct
  source 1..80: mol_type = other DNA
gggtcattgaacgttatggtctgtgtgagagtgagcaagaaggggaagatgaccagactgtggaactgcccaccgctgat

SEQ ID NO: 88191 - DNA, 80 bp, synthetic construct
  source 1..80: mol_type = other DNA
aaagaaggcaaaaacaaaggcaaaaccaaaaagggccgcgggcggaagtccaatttcaatgcattctccaggcgtggact

SEQ ID NO: 88192 - DNA, 80 bp, synthetic construct
  source 1..80: mol_type = other DNA
tggggtttttgggtgagttcaacggtgttcatcaccacaacccacgttataccacctggggctaaagagatctttggtga

SEQ ID NO: 88193 - DNA, 80 bp, synthetic construct
  source 1..80: mol_type = other DNA
aggtgtcactccatcaaccctgcccagtacatttgaaaggactgattcaagtagtaccactgacgggcaacaaccagtga

SEQ ID NO: 88194 - DNA, 80 bp, synthetic construct
  source 1..80: mol_type = other DNA
ccagggttgaaggtggcccctctttgcagcaagttttgcgagaccagctaaagccatttgctgaaccccgcggcaggttg

SEQ ID NO: 88195 - DNA, 80 bp, synthetic construct
  source 1..80: mol_type = other DNA
gatcaagttacccattaaagtgggcatgaatgctatagaggatggtcccttaatttatgcagaacactctaagtataaat

SEQ ID NO: 88196 - DNA, 80 bp, synthetic construct
  source 1..80: mol_type = other DNA
catggtcttctagcagaggagttgaccttggcatcaatgacctgaccacagttcgtggcccagtttggaacatgtgtccc

SEQ ID NO: 88197 - DNA, 80 bp, synthetic construct
  source 1..80: mol_type = other DNA
tgaaagttagggtgctgcttgctggtaatgcatttacagcaggcaaaataataatcagttgtgtccctccaggttttgca

SEQ ID NO: 88198 - DNA, 80 bp, synthetic construct
  source 1..80: mol_type = other DNA
aagtcccactagaggatgtgaggaatgtgcttttccacaacaatgattccaccccaactatgagattgatttgtatgttg

SEQ ID NO: 88199 - DNA, 80 bp, synthetic construct
  source 1..80: mol_type = other DNA
tatacccctctccgtgctagtggtagttcttctggcactgatccatttgttatagctggtcgggtcctcacctgtcccag

SEQ ID NO: 88200 - DNA, 80 bp, synthetic construct
  source 1..80: mol_type = other DNA
tcctgacttcaacttcttattccttgtcccccctaatgttgaacagaaaaccaagccattcagtgtgcctaatctccccc

SEQ ID NO: 88201 - DNA, 80 bp, synthetic construct
  source 1..80: mol_type = other DNA
ttaatgttctctcaaactctagggtcccctccttgataaggtccatgatggtctcccaagatcatggacagatggtacaa

SEQ ID NO: 88202 - DNA, 80 bp, synthetic construct
  source 1..80: mol_type = other DNA
ttccaaaatggtagggttacattagatggacagcttcaaggtaccacccccacttcagctagccagctctgcaaaattcg

SEQ ID NO: 88203 - DNA, 80 bp, synthetic construct
  source 1..80: mol_type = other DNA
agggacagtttaccatgcaactggtggtcaagggcttaatttaactgaaattgatgggaccccctaccatgcatttgaga

SEQ ID NO: 88204 - DNA, 80 bp, synthetic construct
  source 1..80: mol_type = other DNA
gccctgccccaattggcttccccgatttaggtgagtgtgattggcacattaatgcatcccctgccaatgctttcatagat

SEQ ID NO: 88205 - DNA, 80 bp, synthetic construct
  source 1..80: mol_type = other DNA
ggtagcattatacatagaattgatgtagttcaggattctacttttgccccccatctaggcactatccattatactaatgc

SEQ ID NO: 88206 - DNA, 80 bp, synthetic construct
  source 1..80: mol_type = other DNA
taattatgatgctaatgttagcctgatctgttcacttgaatggctttccccaccaagtggtggtgctccaaaggtaaacc

SEQ ID NO: 88207 - DNA, 80 bp, synthetic construct
  source 1..80: mol_type = other DNA
ttggtgaggcaattgttttctttatgtctgattttcctatagctaatggttcagatggtctgagtgtcccctgcactata

SEQ ID NO: 88208 - DNA, 80 bp, synthetic construct
  source 1..80: mol_type = other DNA
ccacaagagtttgtgactcactttgttaatgaacaagcaccaacccgtggggaagctgccctcctccattatgttgaccc

SEQ ID NO: 88209 - DNA, 80 bp, synthetic construct
  source 1..80: mol_type = other DNA
gtccccaaacactgcccatcaatggggtcttcactttcatctcttgggtttcccgtttctaccaactaaagcctgtggga

SEQ ID NO: 88210 - DNA, 80 bp, synthetic construct
  source 1..80: mol_type = other DNA
cgggcattcaggctggcactgaggctgcgctccaacaccagcgcttccagcaggacttaacgttgcagagtaacactttc

SEQ ID NO: 88211 - DNA, 80 bp, synthetic construct
  source 1..80: mol_type = other DNA
aaacatgataaggaaatgttagggttgcaggttggcgcttctactgcccttttacaaaatagtctcaacactcgctacaa

SEQ ID NO: 88212 - DNA, 80 bp, synthetic construct
  source 1..80: mol_type = other DNA
catgctcaccaatgctggtctctcatcctcggatgcagctcgcatggtggttggtgcgcccgctacgcgtgttgtagact

SEQ ID NO: 88213 - DNA, 80 bp, synthetic construct
  source 1..80: mol_type = other DNA
ggaatggcaccagaatatcagcaccgcggtccactgccaccacactaaggtctggcgggtttatgacaatcccaactcta

SEQ ID NO: 88214 - DNA, 80 bp, synthetic construct
  source 1..80: mol_type = other DNA
tacaagggcaaacaacagcagaaggctccagctgaaattggtctgtctaatccaaattatgggtcatctgtatcttcaag

SEQ ID NO: 88215 - DNA, 80 bp, synthetic construct
  source 1..80: mol_type = other DNA
ggttgctgattgggtttcttctcaaaattcttctcgctcgtccttgggcccataccaccccagtgcattgcaaacaacat

SEQ ID NO: 88216 - DNA, 80 bp, synthetic construct
  source 1..80: mol_type = other DNA
gggtgacaccacccggctcaagttctacttctactatctcttctgtgtctactgcacctagatattttaatactgatagg

SEQ ID NO: 88217 - DNA, 80 bp, synthetic construct
  source 1..80: mol_type = other DNA
gggcatcatattcaattggatttgattagtcattaattcggtctaattatcaatttggtttgatcttggaatttgatgtt

SEQ ID NO: 88218 - DNA, 80 bp, synthetic construct
  source 1..80: mol_type = other DNA
ctttcatgggggttgtagaattgatcgtactcctagcggagttgtttgatgtattctggactccaccagatatttcaagc

SEQ ID NO: 88219 - DNA, 80 bp, synthetic construct
  source 1..80: mol_type = other DNA
cattaagaaatatttctttggcggggaccaaacggaaaagaccttgcggggtatagaggatgcagtgatagatatggagg

SEQ ID NO: 88220 - DNA, 80 bp, synthetic construct
  source 1..80: mol_type = other DNA
cattaagaaatatttctttggcgtggaccaaacggaaaagaccttgcggggtatagaggatgcagtgatagatatggagg

SEQ ID NO: 88221 - DNA, 80 bp, synthetic construct
  source 1..80: mol_type = other DNA
tccaaggggctgtttataactttgatgaagacagggtgtccgcctttacaagtctggcccgtgctaatggcttggtgctc

SEQ ID NO: 88222 - DNA, 80 bp, synthetic construct
  source 1..80: mol_type = other DNA
tccaaggggctgtttataactttgatgaagacagggtgtccgcctttacaagtctggcccgtgctaatggcttggggctc

SEQ ID NO: 88223 - DNA, 80 bp, synthetic construct
  source 1..80: mol_type = other DNA
ttaagtatggcaacattaggtaaaagactcagaagtgtcaattctatggagggcctgcgcaatgcattagtgggctacaa

SEQ ID NO: 88224 - DNA, 80 bp, synthetic construct
  source 1..80: mol_type = other DNA
accgcttctgaggtaaagaaagtgatgggatgggatgtcgagccagaacatcaggaaagcacagctaaggcatggtgcga

SEQ ID NO: 88225 - DNA, 80 bp, synthetic construct
  source 1..80: mol_type = other DNA
ggtggggatggcggaattggtgagactgaggcagagattcgccatcgggttttctataaatcaaaatccggcatgagaaa

SEQ ID NO: 88226 - DNA, 80 bp, synthetic construct
  source 1..80: mol_type = other DNA
ttcggatgggggcggtggcgtcaatgaagatccaaggcaagcttatgcatggacaatcaggaatgttgctcaccggcgct

SEQ ID NO: 88227 - DNA, 80 bp, synthetic construct
  source 1..80: mol_type = other DNA
ctagtggtggggtcgatattggtgttaatgatcttaccaccgttcgtggcccattttggaacatgtgtcccctcccgcca

SEQ ID NO: 88228 - DNA, 80 bp, synthetic construct
  source 1..80: mol_type = other DNA
acattcctggttggcaggccatgttccgctggatgcgattccatgatctaagtttgtggacaggggaccgcgatctcctg

SEQ ID NO: 88229 - DNA, 80 bp, synthetic construct
  source 1..80: mol_type = other DNA
aggggacatgatagagttttatgaaggtcacatattccattatgccatctatattggacaaggcaagaccattggggtcc

SEQ ID NO: 88230 - DNA, 80 bp, synthetic construct
  source 1..80: mol_type = other DNA
gccatggccctacgcttctatcacaaacaattgctatgagttttgctgtagggtgatggcacttgacgacacatggctcg

SEQ ID NO: 88231 - DNA, 80 bp, synthetic construct
  source 1..80: mol_type = other DNA
cttttatgggggtcgtcgagctggtggtgttaatggctgaactgtttgacatcttctggacccctcctgatgtttccaac

SEQ ID NO: 88232 - DNA, 80 bp, synthetic construct
  source 1..80: mol_type = other DNA
ttcatagcatctcttctgcctgatttccacctgcaaggaccagaggatttggctaaagatctggttccactgatactggg

SEQ ID NO: 88233 - DNA, 80 bp, synthetic construct
  source 1..80: mol_type = other DNA
gggtattggcctggccattggtttcaccagagataaaataacaaaagtcatgaagagcgccgttgatggcttgcgctcag

SEQ ID NO: 88234 - DNA, 80 bp, synthetic construct
  source 1..80: mol_type = other DNA
ccctcaagggcatagagaacgctgtcatagacatggaagtcttatcgagtaccaacgtcactcagttggtgcgcgataag

SEQ ID NO: 88235 - DNA, 80 bp, synthetic construct
  source 1..80: mol_type = other DNA
aaattggctaagacctatatgaatatcctagataatgaagaggagaaagcaagaaaactctcagtacgcagtgctgatcc

SEQ ID NO: 88236 - DNA, 80 bp, synthetic construct
  source 1..80: mol_type = other DNA
atggcattggaattgatacgtaggtcccaaacaccatccccaacacgcccggatccccctcctaaatcgcagcgtgatcg

SEQ ID NO: 88237 - DNA, 80 bp, synthetic construct
  source 1..80: mol_type = other DNA
acatgttgtaacaacggtcaacaatctcatttcgcgcatatccatggcgcgttcagccctcgccaaagcccaagctgaaa

SEQ ID NO: 88238 - DNA, 80 bp, synthetic construct
  source 1..80: mol_type = other DNA
gaccaccaggcataggaaaaactaaagctgctgagcacttagccaaccgcttagctggtgaaataagaccagggggcaaa

SEQ ID NO: 88239 - DNA, 80 bp, synthetic construct
  source 1..80: mol_type = other DNA
gtggggttggtgcctagagaatccattgaccattgggatggctatcatggggaagaggttctgttgtgggatgactatgg

SEQ ID NO: 88240 - DNA, 80 bp, synthetic construct
  source 1..80: mol_type = other DNA
gtgtggttggtgcctagagaatccattgaccattgggatggctatcatggggaagaggttctgttgtgggatgactatgg

SEQ ID NO: 88241 - DNA, 80 bp, synthetic construct
  source 1..80: mol_type = other DNA
catgtctaagataacagaagattgcaacaaattacaagccatagctgatactgccccgttcacactcaactgtgacagga

SEQ ID NO: 88242 - DNA, 80 bp, synthetic construct
  source 1..80: mol_type = other DNA
tggtgtactgcactgctcccgaaattgaacaaactaggagaacccatcccggagacaccaatgctatcaaagacctgttc

SEQ ID NO: 88243 - DNA, 80 bp, synthetic construct
  source 1..80: mol_type = other DNA
aaaccagacttttcccatcttaaaatggagatagcaccacaaggggggtttgacaaccaaggtaacaccccctttgggag

SEQ ID NO: 88244 - DNA, 80 bp, synthetic construct
  source 1..80: mol_type = other DNA
aagctgttgcattaacaatggaaagacaagatgagttccagatgcaaggggcggtatataattttgatgaggaccgggtg

SEQ ID NO: 88245 - DNA, 80 bp, synthetic construct
  source 1..80: mol_type = other DNA
ccctccaagaactgtatcagaagtcaaacaagctttaggttggggtgattccgcccataaggattatggggcccgagcgt

SEQ ID NO: 88246 - DNA, 80 bp, synthetic construct
  source 1..80: mol_type = other DNA
acagctttcaccagtttagctcgggccaatgggctaggactcctgagcatggcagcacttggaaaaagattacggagtgt

SEQ ID NO: 88247 - DNA, 80 bp, synthetic construct
  source 1..80: mol_type = other DNA
caacaacatggaaggacttcgcaatgctctcaaggggtacaagatcactgagtgtgatattgtgtggaacaatagaactt

SEQ ID NO: 88248 - DNA, 80 bp, synthetic construct
  source 1..80: mol_type = other DNA
acaccattaagggggatggatcaaatgtgagtatcactgagaaacaggtggcagcctctctccagcaacaagccgtcagt

SEQ ID NO: 88249 - DNA, 80 bp, synthetic construct
  source 1..80: mol_type = other DNA
tcagttaccttggcgctttccaggttgcgcgccgcgcgagcgctggcgtatgcatcttgctttcagagcgcagtggttac

SEQ ID NO: 88250 - DNA, 80 bp, synthetic construct
  source 1..80: mol_type = other DNA
tattctacaaatggctgggtctgctgtggtgattagtagagcagtcaaacgcatgttcgggacccatacaaaccagccga

SEQ ID NO: 88251 - DNA, 80 bp, synthetic construct
  source 1..80: mol_type = other DNA
ccttggagggcaaacccaaggaacataactgcagagtccatcgcgccgaaagggaaggtcatggacctattggacatgac

SEQ ID NO: 88252 - DNA, 80 bp, synthetic construct
  source 1..80: mol_type = other DNA
ggcatcatagaacgatacggcctgtgtgagagcgatcaggatgaggagaagatcgtgatggaggtgccaactgctgacaa

SEQ ID NO: 88253 - DNA, 80 bp, synthetic construct
  source 1..80: mol_type = other DNA
agagggcaaaaataaaggcaagaacaagaaggggcgaggtaggaaaaacaactacaacgccttttctaggcgaggcctga

SEQ ID NO: 88254 - DNA, 80 bp, synthetic construct
  source 1..80: mol_type = other DNA
ggtgtgacctaacagctgaggaaaagaaagagatcttggataacaatgagcgcctctttgatgctggcggtgtgacccca

SEQ ID NO: 88255 - DNA, 80 bp, synthetic construct
  source 1..80: mol_type = other DNA
tcttctataagtccaaaagtggtatgcgcaaacagcgccaagaggagcgccgacaacttggactggttacgggtgctgaa

SEQ ID NO: 88256 - DNA, 80 bp, synthetic construct
  source 1..80: mol_type = other DNA
atcaggaaacgcaagcccatagactggacaccgccaaaaaatgactggtcagaagacaccagggaagtcaactatgacga

SEQ ID NO: 88257 - DNA, 80 bp, synthetic construct
  source 1..80: mol_type = other DNA
gatggggcttttgggtaagttcaacagttttcatcacaaccacacacgtcataccaccggatgctaaagaaatttttgga

SEQ ID NO: 88258 - DNA, 80 bp, synthetic construct
  source 1..80: mol_type = other DNA
gaaaaactttcagacatagcaatacacagagttggggaattcacacaatttagattctccaaaaaaatgagacctgacct

SEQ ID NO: 88259 - DNA, 80 bp, synthetic construct
  source 1..80: mol_type = other DNA
tgcgcatgggagctgtcgcatccatgaagatacagggaaaacttatgcacggccaatctggcatgttgctgactggtgcg

SEQ ID NO: 88260 - DNA, 80 bp, synthetic construct
  source 1..80: mol_type = other DNA
ggaatggacttaggcaccattcctggtgattgtggagctccatatgtgcacaaaagaggaaatgactgggtggtgtgtgg

SEQ ID NO: 88261 - DNA, 80 bp, synthetic construct
  source 1..80: mol_type = other DNA
ctcttgagggtggtggacaaaacaaaggacattatgcaggccacccaatcttaaggtatggtaatggaccctctctttct

SEQ ID NO: 88262 - DNA, 80 bp, synthetic construct
  source 1..80: mol_type = other DNA
tcaacagtgccaagcacttttgagaggtgtgagacacttgagcaaaccaatgataaccactctgttaggtggaatgagtc

SEQ ID NO: 88263 - DNA, 80 bp, synthetic construct
  source 1..80: mol_type = other DNA
acaaaaaccaaattttggaagtcaactccccaaccccttcctcctggaacctacgagccagcttacttaggtgggcgtga

SEQ ID NO: 88264 - DNA, 80 bp, synthetic construct
  source 1..80: mol_type = other DNA
ccccagagtggatggtggaccatcactccaacaggtcctacgtgatcagctcaagccttttgctgaaccccgtggtagga

SEQ ID NO: 88265 - DNA, 80 bp, synthetic construct
  source 1..80: mol_type = other DNA
tgccagagccaagcttgctagaagcagctgtggagaccgtcacaaacgtcttggagcaaaccatggacacgcctgtgcca

SEQ ID NO: 88266 - DNA, 80 bp, synthetic construct
  source 1..80: mol_type = other DNA
tggagttacagtgacgcctgcatgtcacttgacaagactaccagctcaggctttccacatcataaacgcaagaacgatga

SEQ ID NO: 88267 - DNA, 80 bp, synthetic construct
  source 1..80: mol_type = other DNA
ctggaacggcagtgcgtttgtgcgcgagcttggtgagcaggcagcccacgccaacaatatgtatgaattaggcaaatcag

SEQ ID NO: 88268 - DNA, 80 bp, synthetic construct
  source 1..80: mol_type = other DNA
tcaaaccagtttatactgcagcacttaaagatgaattggtgaaacccgaaaaagtgtacacaaaaataaagaagagattg

SEQ ID NO: 88269 - DNA, 80 bp, synthetic construct
  source 1..80: mol_type = other DNA
ctttggggtgcagaccttggcacagtcattcgagctgctcgagcctttggcccattctgtgaagctataaaaccacatgt

SEQ ID NO: 88270 - DNA, 80 bp, synthetic construct
  source 1..80: mol_type = other DNA
ccgattaaagtcggcatgaatgcaattgaagatggccccctcatatatgctgaacatgctaagtataaatatcactttga

SEQ ID NO: 88271 - DNA, 80 bp, synthetic construct
  source 1..80: mol_type = other DNA
ctgatccatcactggctgccattgtcgcacaggacttgttgtccccgtcggaaatggacgtgggagattacgtaattagt

SEQ ID NO: 88272 - DNA, 80 bp, synthetic construct
  source 1..80: mol_type = other DNA
cacgggagtgaatctgggtgttggtcctctaaccacagttgcaggtccagtgtggaatatgtgtcctcttccaccgattg

SEQ ID NO: 88273 - DNA, 80 bp, synthetic construct
  source 1..80: mol_type = other DNA
gttaaggatggcctcccctcaggattcccatgcacctcacaagtgaatagcataaatcattggatttatactctgtgcgc

SEQ ID NO: 88274 - DNA, 80 bp, synthetic construct
  source 1..80: mol_type = other DNA
ccctgtcggaggtcacaggtttggctcctgatgttttgcaatctcagtcttacttttccttctatggggatgatgaaatt

SEQ ID NO: 88275 - DNA, 80 bp, synthetic construct
  source 1..80: mol_type = other DNA
gtatcaactgatgtggaatttgacccaacaaaactcacccaagtgcttagagagtatggcttgaagcccacgcggcctga

SEQ ID NO: 88276 - DNA, 80 bp, synthetic construct
  source 1..80: mol_type = other DNA
caaatcagaagggcctatcatagtgaagcatcaaatagatgggctagtttttctgaggcgcactatatcaaaagatgctg

SEQ ID NO: 88277 - DNA, 80 bp, synthetic construct
  source 1..80: mol_type = other DNA
ctggctaccaagggcgcctggaccgcaactccattgaaagacaattatggtggacccggggcccaaaccatgatgatccc

SEQ ID NO: 88278 - DNA, 80 bp, synthetic construct
  source 1..80: mol_type = other DNA
gataccccatcaacaaagaaagattcaattgatttccttacttggtgaggctgcacttcacggagagaaattctatagaa

SEQ ID NO: 88279 - DNA, 80 bp, synthetic construct
  source 1..80: mol_type = other DNA
agatagccaacagagtcatacaggaagtcaaagaggggggccttgagctctatatacccggttggcaggccatatttcgc

SEQ ID NO: 88280 - DNA, 80 bp, synthetic construct
  source 1..80: mol_type = other DNA
gttaatgcagctgaacccctaccccttgagccggtggtgggtgccgcaactgcggcggccactgctgggcaagttaattt

SEQ ID NO: 88281 - DNA, 80 bp, synthetic construct
  source 1..80: mol_type = other DNA
attcgcgcaataatggccctgcaaatgaaccacgcattggggatatgatagagttttatgaagggcacatatttcactat

SEQ ID NO: 88282 - DNA, 80 bp, synthetic construct
  source 1..80: mol_type = other DNA
tgcatcccaaaacatatcaattggacaagccacaatgttcccacatgttatagctgatgtgagagtattagaacctattg

SEQ ID NO: 88283 - DNA, 80 bp, synthetic construct
  source 1..80: mol_type = other DNA
aaatcccccttgatgatgtacgcaatgtcttattccacactaatgaaaaccgcccaactatgcggttactctgcatgctg

SEQ ID NO: 88284 - DNA, 80 bp, synthetic construct
  source 1..80: mol_type = other DNA
tacacacccctccgtgctggaggtgcttcatcaggcacggacccttttgttattgcaggtcgtgtcctaacctgcccttc

SEQ ID NO: 88285 - DNA, 80 bp, synthetic construct
  source 1..80: mol_type = other DNA
ccctgacttcaattttctgttcctcgtacctcctagtgtggaacagaagaccaggcaattaactgtgcccaacataccct

SEQ ID NO: 88286 - DNA, 80 bp, synthetic construct
  source 1..80: mol_type = other DNA
tgaataatttggccaactccagagtgcctgcaatgataaacaagatgacagtttctactgatcaaaatcaggtagtccag

SEQ ID NO: 88287 - DNA, 80 bp, synthetic construct
  source 1..80: mol_type = other DNA
ttccaaaatggtcgttgcacactcgaagggcaacttttgggcacaacccctgtctcagctagtcaagtagcccgcatacg

SEQ ID NO: 88288 - DNA, 80 bp, synthetic construct
  source 1..80: mol_type = other DNA
cggtaaagttttctccactgcatctgggaagggacttaatctaactgagctggatggaaccccttatcatgcatttgaga

SEQ ID NO: 88289 - DNA, 80 bp, synthetic construct
  source 1..80: mol_type = other DNA
gcccagccccccttggctttcctgacataggagcctgtgattggcatgtgtcaacttttaaggtggatcaaaatctttcg

SEQ ID NO: 88290 - DNA, 80 bp, synthetic construct
  source 1..80: mol_type = other DNA
ggggaccccatgtccaggctagatataaaacaaaatgccccatttgcaccacatcttggttccattgaattcacctctga

SEQ ID NO: 88291 - DNA, 80 bp, synthetic construct
  source 1..80: mol_type = other DNA
ccaggagccaaccggggatcaattgggcacactagcttgggtctccccctccactagtggagctagggtcgatccttgga

SEQ ID NO: 88292 - DNA, 80 bp, synthetic construct
  source 1..80: mol_type = other DNA
aaattccatcatatggttcaactgtaactgagtccactcacctggcaccacctatctttccaccaggttttggtgaagcc

SEQ ID NO: 88293 - DNA, 80 bp, synthetic construct
  source 1..80: mol_type = other DNA
atagtctattttatgtcagattttcctattgtgtcgggtaacactgctcaagttccctgtaccttacctcaagaatttgt

SEQ ID NO: 88294 - DNA, 80 bp, synthetic construct
  source 1..80: mol_type = other DNA
tccactccccccgagcagccttctccatagcacgcattaccatacaccccatcacagcatggtggcgtatctgctatgaa

SEQ ID NO: 88295 - DNA, 80 bp, synthetic construct
  source 1..80: mol_type = other DNA
ttcacactttgtagaacagcaggcaccaattcgaggtgaagctgccctactgcattatgtagatccagacacccaccgta

SEQ ID NO: 88296 - DNA, 80 bp, synthetic construct
  source 1..80: mol_type = other DNA
atttgggagagtttaaattataccctgatgggttcatcacctgtgtgccaaatacaggcggtggcccccaaaaccttcct

SEQ ID NO: 88297 - DNA, 80 bp, synthetic construct
  source 1..80: mol_type = other DNA
ttgccgccaccgctgctggcagcgcagtgggggcaggtatccaagctggcacagaagcagccctgcaatatcagagattt

SEQ ID NO: 88298 - DNA, 80 bp, synthetic construct
  source 1..80: mol_type = other DNA
caacaggatcttaccctacaggagaattcttttaaacatgatgagagaatgttgggtttacagattgagggatctaatgc

SEQ ID NO: 88299 - DNA, 80 bp, synthetic construct
  source 1..80: mol_type = other DNA
gttctcgcctcatggcgaaactgaaggagcgtataagctcccaacgtggtgaaggcaccacaaagattaaaaacactgaa

SEQ ID NO: 88300 - DNA, 80 bp, synthetic construct
  source 1..80: mol_type = other DNA
tttattacaaaagaatctttctactcgctataatctattagttggtgcaggtctttcttcggctgatgctgcaaggtcta

SEQ ID NO: 88301 - DNA, 80 bp, synthetic construct
  source 1..80: mol_type = other DNA
tcgttggggcccctgtgacaaaaatcgtggattggaatggggtgaggattgccgcccccacgtccactgccaccaccctc

SEQ ID NO: 88302 - DNA, 80 bp, synthetic construct
  source 1..80: mol_type = other DNA
cgatctggcaatttcatgagcataccagtcacgcctagaaaggagccccaaaacctgtcagcacgttctgtaggtcttac

SEQ ID NO: 88303 - DNA, 80 bp, synthetic construct
  source 1..80: mol_type = other DNA
taatcctaattatgactcatccaccatgatctctagaacaacccagtgggtggagtcacaaaattcagctagaaatctat

SEQ ID NO: 88304 - DNA, 80 bp, synthetic construct
  source 1..80: mol_type = other DNA
cccacagaccatcaacgcctcagctatgatcaattaaaagagcttgagaatgaaccatggccttatgcatccataacaaa

SEQ ID NO: 88305 - DNA, 80 bp, synthetic construct
  source 1..80: mol_type = other DNA
caccttttcatagctcagccctgaggaccacatgggtgacccctcctggctctacttctacttcaactttttctactgtt

SEQ ID NO: 88306 - DNA, 80 bp, synthetic construct
  source 1..80: mol_type = other DNA
tcttcggtgccacggttctttaacaccgagcgccttcccttgttcgcaaacaataggaagtagtttttgtaatataatgt

SEQ ID NO: 88307 - DNA, 80 bp, synthetic construct
  source 1..80: mol_type = other DNA
ttgtaatataatgtgggcatcatattcatatttgatttattgatttggtttaatttgattaattagatttgaatatgatc

SEQ ID NO: 88308 - DNA, 80 bp, synthetic construct
  source 1..80: mol_type = other DNA
caattgttatgagttctgttgccgcgtcatgtccctggacgactcctggttacagcgaaaattagtgacctctggcaggt

SEQ ID NO: 88309 - DNA, 80 bp, synthetic construct
  source 1..80: mol_type = other DNA
ttaaccaccctactcaggagtggtctagggacacaccggacttccatcaagattcaaaattagaaatagtgagagatgca

SEQ ID NO: 88310 - DNA, 80 bp, synthetic construct
  source 1..80: mol_type = other DNA
attctgtctgctataaatggcctggtctctcagcctttcaaaaacattctttcaaagatcaagccactaaatctgttatc

SEQ ID NO: 88311 - DNA, 80 bp, synthetic construct
  source 1..80: mol_type = other DNA
aggatgcagtgctagacctcgaggccattgagaacaaccatatgacagctctactcaaggataaggatagccttgcaacc

SEQ ID NO: 88312 - DNA, 80 bp, synthetic construct
  source 1..80: mol_type = other DNA
ttgtgtatggcgggagcacgtacacgcttgaatctgatggcaaaggcaatgtgcatgtcgagaaggtgaagaacaccaat

SEQ ID NO: 88313 - DNA, 80 bp, synthetic construct
  source 1..80: mol_type = other DNA
ggtggggcttttgggtctcgcctagcctcttcataacatcaacccatgtcattccccaaggcgcgcaggagttctttgga

SEQ ID NO: 88314 - DNA, 80 bp, synthetic construct
  source 1..80: mol_type = other DNA
gtgcccatcaaacagatacaaattcataagtcaggtgaattctgccggcttaggttcccaaaaccaatcaggacagatgt

SEQ ID NO: 88315 - DNA, 80 bp, synthetic construct
  source 1..80: mol_type = other DNA
gagactcctgtgggggtcagacctgtcaaccatgatacggtgtgcacgagccttcggtgggctaatggacgaattcaagg

SEQ ID NO: 88316 - DNA, 80 bp, synthetic construct
  source 1..80: mol_type = other DNA
cccattgcgttacactaccagttagggttggcatgaacatgaatgaggatggacccataatatttgagaaacattccaga

SEQ ID NO: 88317 - DNA, 80 bp, synthetic construct
  source 1..80: mol_type = other DNA
aagtagttgcagaagacctcttgtcccctagtgtgatggatgtgggtgatttcaagatttcaatcaacgaggggctaccc

SEQ ID NO: 88318 - DNA, 80 bp, synthetic construct
  source 1..80: mol_type = other DNA
ggggcttccatagccgcccctctaaccggtcaaaataatgtgatagacccctggattagaatgaattttgtccaagcccc

SEQ ID NO: 88319 - DNA, 80 bp, synthetic construct
  source 1..80: mol_type = other DNA
ctctcctggtgaaattctgttaaatttagaattaggtcctgaactgaatccattcttagcacacctttcaaggatgtaca

SEQ ID NO: 88320 - DNA, 80 bp, synthetic construct
  source 1..80: mol_type = other DNA
atggttatgctggtggggttgaagtgcaggtgctacttgccgggaacgcgttcacagcaggaaaactagtgtttgcagca

SEQ ID NO: 88321 - DNA, 80 bp, synthetic construct
  source 1..80: mol_type = other DNA
atccccccacatttccctatcgagaatcttagtcctggacaaattacaatgttcccccatgtaatcattgatgttaggac

SEQ ID NO: 88322 - DNA, 80 bp, synthetic construct
  source 1..80: mol_type = other DNA
attagaacctgtactcttgcccctcccagatgttaggaatagtttctttcattataatcaggagcctgagccccgtatga

SEQ ID NO: 88323 - DNA, 80 bp, synthetic construct
  source 1..80: mol_type = other DNA
caatcctgactattggagaattgtcaaattctagattcccagctccaattgatgaactgtataccagtcccaatgagggt

SEQ ID NO: 88324 - DNA, 80 bp, synthetic construct
  source 1..80: mol_type = other DNA
ttggttgtccaaccccaaaatggcagatcaacactcgacggtgaactgttgggcaccacccaacttgtgccctcaaacat

SEQ ID NO: 88325 - DNA, 80 bp, synthetic construct
  source 1..80: mol_type = other DNA
ttgctcactgcgaggacgcatcaatgcccacttgccagacaaccagcaccgttggaacatgcaggtcacaaatccaaatg

SEQ ID NO: 88326 - DNA, 80 bp, synthetic construct
  source 1..80: mol_type = other DNA
gaactcccttcgaccccaccgaagatgtccctgcaccgctgggtgcaccagacttcctagcgaacatctatggagtcacc

SEQ ID NO: 88327 - DNA, 80 bp, synthetic construct
  source 1..80: mol_type = other DNA
agtcagaggaaccccgacaacacttgtcgcgcccatgatggaattttggcgacttggagccccaaattcacacccaagct

SEQ ID NO: 88328 - DNA, 80 bp, synthetic construct
  source 1..80: mol_type = other DNA
ggggtctgtggtcctgggcacttgggaagacagagattttgacataaaccaacccacaaggttcacatctgttggtttgt

SEQ ID NO: 88329 - DNA, 80 bp, synthetic construct
  source 1..80: mol_type = other DNA
atgacactgaccacttcaatcaatgggctctaccaaattactctggagcgctgactctaaacatgaatttggcaccctct

SEQ ID NO: 88330 - DNA, 80 bp, synthetic construct
  source 1..80: mol_type = other DNA
gtcgcccccctcttcccaggtgagcagttacttttcttcaggtcccatataccactcaagggaggtacctctaatggtgc

SEQ ID NO: 88331 - DNA, 80 bp, synthetic construct
  source 1..80: mol_type = other DNA
tattgattgtctactccctcaggaatgggttcagcacttttaccaggagtcagctccatcctctactgacgtggctctga

SEQ ID NO: 88332 - DNA, 80 bp, synthetic construct
  source 1..80: mol_type = other DNA
tcaggtacaccaaccctgacacaggacgcgttttgtttgaggccaaattgcataggcagggatttatcacagtgtcaaac

SEQ ID NO: 88333 - DNA, 80 bp, synthetic construct
  source 1..80: mol_type = other DNA
tctggctctagacccattgttgtccccccaaatggctattttagatttgattcttgggttaatcaattttattctcttgc

SEQ ID NO: 88334 - DNA, 80 bp, synthetic construct
  source 1..80: mol_type = other DNA
ggcttgctggtgacttgctcaccaatagtgttggttcacttgtgaatgctggagctaatgcaataaaccaaaaggtagac

SEQ ID NO: 88335 - DNA, 80 bp, synthetic construct
  source 1..80: mol_type = other DNA
ccactttctccggagggttcactggctcttctcacgccaggactgttgatttgcccaagaaggcgccagccactccggca

SEQ ID NO: 88336 - DNA, 80 bp, synthetic construct
  source 1..80: mol_type = other DNA
tcagtgcctgcgcctagatccagttcttcttctgcctctacggtctccactcgctcaacacttgttagcgggtcttccaa

SEQ ID NO: 88337 - DNA, 80 bp, synthetic construct
  source 1..80: mol_type = other DNA
ttttccctcttcaactaagagttctattagtgttccttcccaatcaatttccccgtcctcccggactagtgaatgggtgc

SEQ ID NO: 88338 - DNA, 80 bp, synthetic construct
  source 1..80: mol_type = other DNA
aaaggggcactacaaacagcttatgtaacacctccttctagtaggacttctagtaatggcacagtctcaaccgtgccaaa

SEQ ID NO: 88339 - DNA, 80 bp, synthetic construct
  source 1..80: mol_type = other DNA
atctccgtcggagaggggagtcacaagtttagtgaaaagatgattttcctttcttctttctttgagaattttgtctttca

SEQ ID NO: 88340 - DNA, 80 bp, synthetic construct
  source 1..80: mol_type = other DNA
cggggcgcggcctaaacagccgcccccgagggacaaaccaccaaaacccccaagaccgcccacaccagagttggttagag

SEQ ID NO: 88341 - DNA, 80 bp, synthetic construct
  source 1..80: mol_type = other DNA
ccctactgtcaaggattgcagctgcccggtctctagtgcacagggctaaggaggaactgtcaagtaggccccgaccggtc

SEQ ID NO: 88342 - DNA, 80 bp, synthetic construct
  source 1..80: mol_type = other DNA
caatcccccctcccccacccaacggggaggacgaaccaatcatttcttacaacgtcaaagagggggtttctggtttgcct

SEQ ID NO: 88343 - DNA, 80 bp, synthetic construct
  source 1..80: mol_type = other DNA
caatcccccctcccccacccaacggggaggacgaaccaatcatttcttacaacgtcaaagaggtggtttctggtttgcct

SEQ ID NO: 88344 - DNA, 80 bp, synthetic construct
  source 1..80: mol_type = other DNA
ggcattagccccgcaaggaggttttgacaagaatggtaacactcctcatgggaagggtgtcatgaagaccctcactgcca

SEQ ID NO: 88345 - DNA, 80 bp, synthetic construct
  source 1..80: mol_type = other DNA
caaaccacaggcagaagatctggaggagactggtaatgaggagggttgtccaaagcctaaaaatgatgaggagtttgtta

SEQ ID NO: 88346 - DNA, 80 bp, synthetic construct
  source 1..80: mol_type = other DNA
gaactctcaactgtcacccaaccggaagagagctctacagcattcagtgttccccctcttagccagagggagaacagaga

SEQ ID NO: 88347 - DNA, 80 bp, synthetic construct
  source 1..80: mol_type = other DNA
aaggaaatgagggtgaggccatgttagaaggtggtgacaacaagggtacttactgtggagcaccaatattgggccctgga

SEQ ID NO: 88348 - DNA, 80 bp, synthetic construct
  source 1..80: mol_type = other DNA
gaatggggagactttcacaggaaaactggcagatcaagcatcaaaggctaacctaatgtttgaggaagggaagaacatga

SEQ ID NO: 88349 - DNA, 80 bp, synthetic construct
  source 1..80: mol_type = other DNA
aagtggttgcagaggacctcttatcccccagtgtgatggatgtgggtgacttcaagatatcaattaacgaggggttaccc

SEQ ID NO: 88350 - DNA, 80 bp, synthetic construct
  source 1..80: mol_type = other DNA
tctggtgttccctgcacctcacaatggaactccattgcccactggctcctcacactatgcgcattgtctgaggttacaga

SEQ ID NO: 88351 - DNA, 80 bp, synthetic construct
  source 1..80: mol_type = other DNA
cagaaaagctaacaacaaaattgaaggaatacgggctaaagccaacccgtcctgacaaaacagaaggacccttaatcatc

SEQ ID NO: 88352 - DNA, 80 bp, synthetic construct
  source 1..80: mol_type = other DNA
tgaccttcttacggagaacggtgacccgtgatccggccgggtggtttggcaaattggaccaaagttcaatactcaggcag

SEQ ID NO: 88353 - DNA, 80 bp, synthetic construct
  source 1..80: mol_type = other DNA
cccctagaaattcccctggtgaagttcttctcaatttggaattgggtccagaaataaatccctacttggctcatcttgct

SEQ ID NO: 88354 - DNA, 80 bp, synthetic construct
  source 1..80: mol_type = other DNA
aggatgtataatggttatgcaggtggatttgaagtgcaggtggtcctagctggaaatgcgtttacagcaggaaagataat

SEQ ID NO: 88355 - DNA, 80 bp, synthetic construct
  source 1..80: mol_type = other DNA
ctttgcagctattccccctaattttccaattgataatctaagtgcagcacagatcacaatgtgtccacatgtgattgtgg

SEQ ID NO: 88356 - DNA, 80 bp, synthetic construct
  source 1..80: mol_type = other DNA
atgttaggcagttggaaccagtcaacctcccgatgcctgacgttcgcaataactttttccattacaatcaggggtctgat

SEQ ID NO: 88357 - DNA, 80 bp, synthetic construct
  source 1..80: mol_type = other DNA
tcgagattgcgcctaattgcaatgttatatacacctcttagggcaaataactctggggatgatgtttttactgtgtcctg

SEQ ID NO: 88358 - DNA, 80 bp, synthetic construct
  source 1..80: mol_type = other DNA
cagagtgctaactagacctagtcctgatttctcattcaatttccttgtgccacccactgtggagtcaaagacaaaaccct

SEQ ID NO: 88359 - DNA, 80 bp, synthetic construct
  source 1..80: mol_type = other DNA
tttccctccccatcctgactatctctgaaatgtccaattctaggttcccagtaccaattgattctctgcacaccagtcct

SEQ ID NO: 88360 - DNA, 80 bp, synthetic construct
  source 1..80: mol_type = other DNA
actgagaacattgttgtccagtgccagaatggacgcgtcacccttgatggtgagttgatgggcaccactcaacttttacc

SEQ ID NO: 88361 - DNA, 80 bp, synthetic construct
  source 1..80: mol_type = other DNA
tagccaaatctgtgctttcaggggcatgcttaccagatcaacaagcagggccagtgaccaggccgatacagcaaccccta

SEQ ID NO: 88362 - DNA, 80 bp, synthetic construct
  source 1..80: mol_type = other DNA
gattgtttaattattattggcatatacaattggataatctaaatggaactccttatgaccctgcagaagatataccaggc

SEQ ID NO: 88363 - DNA, 80 bp, synthetic construct
  source 1..80: mol_type = other DNA
cccctagggacaccagatttccggggcaaagtctttggtgtggctagccagagaaatcctgatgccacgactagggcaca

SEQ ID NO: 88364 - DNA, 80 bp, synthetic construct
  source 1..80: mol_type = other DNA
tgaagcaaagatagacacaacatctggccgcttcaccccaaaattaggctcactagagatttccactgagtctggagatt

SEQ ID NO: 88365 - DNA, 80 bp, synthetic construct
  source 1..80: mol_type = other DNA
ttgatcaaaaccaaccaacaagattcaccccagttggcattggggttgaccgtgaggcagattttcaacaatggactctt

SEQ ID NO: 88366 - DNA, 80 bp, synthetic construct
  source 1..80: mol_type = other DNA
cccgactacgctggccagttcacccacaacatgaacttagccccagctgttgctcccaacttccctggtgagcagctcct

SEQ ID NO: 88367 - DNA, 80 bp, synthetic construct
  source 1..80: mol_type = other DNA
tttcttccgctcacagttgccatcttccggtgggcggtccaacggtattctagactgcctggtcccccaagaatgggtac

SEQ ID NO: 88368 - DNA, 80 bp, synthetic construct
  source 1..80: mol_type = other DNA
tggttaggtacgtcaaccccgacactggtagagtgttatttgaggccaagctgcacaagctaggcttcatgactatagcc

SEQ ID NO: 88369 - DNA, 80 bp, synthetic construct
  source 1..80: mol_type = other DNA
aagagtggtgactctccaataactgcccccccaaatggatatttcaggtttgaatcttgggtgaaccccttttatacact

SEQ ID NO: 88370 - DNA, 80 bp, synthetic construct
  source 1..80: mol_type = other DNA
tacaggggctaatgctatcaatcaaacaattgattttgaaaataataaatatttgcaaaatgcctcttttaatcatgata

SEQ ID NO: 88371 - DNA, 80 bp, synthetic construct
  source 1..80: mol_type = other DNA
atggaacgagatactgggcgccaggtgccacctccacaacctcgatgtcaggtggcttcacaagtcaaactgtgcgcaga

SEQ ID NO: 88372 - DNA, 80 bp, synthetic construct
  source 1..80: mol_type = other DNA
tccacaccaaattttaaaacgaaccaggcccccaaacccgcacccagcagtgggtcttcagtgaggtcaaattcaaccca

SEQ ID NO: 88373 - DNA, 80 bp, synthetic construct
  source 1..80: mol_type = other DNA
aatcactagcctgagctcacactcgtccgggtcgtctcgatccagcgggtctacagttgtcagctcaataccgtcctcta

SEQ ID NO: 88374 - DNA, 80 bp, synthetic construct
  source 1..80: mol_type = other DNA
acaggactagggactgggttaaccaacaaaattttaatttggaaccacacatgcctggatctcttaggacagcttttgtc

SEQ ID NO: 88375 - DNA, 80 bp, synthetic construct
  source 1..80: mol_type = other DNA
cctggacatctgcgttcaacacgcgcagacagccgctatttgcacaccttcgcagaaggggggagtcaaatgtttagtgg

SEQ ID NO: 88376 - DNA, 80 bp, synthetic construct
  source 1..80: mol_type = other DNA
attgggaagttgaagcccctaaacatcctcaacatcctagccacatgtgattggacttttgcaggcatagtggaatcact

SEQ ID NO: 88377 - DNA, 80 bp, synthetic construct
  source 1..80: mol_type = other DNA
caggggaccagcgtgtaggtctcatcccccgtaatggcgttgatcactgggatgcatataaggtggaaagagtcgtccta

SEQ ID NO: 88378 - DNA, 80 bp, synthetic construct
  source 1..80: mol_type = other DNA
caggggaccagcgtgtaggtctcatcccccgtaatggcgttgatcactgggatgcatataagggggaaagagtcgtccta

SEQ ID NO: 88379 - DNA, 80 bp, synthetic construct
  source 1..80: mol_type = other DNA
aacggggaggatgaactagtggtttcttacagcgccaaagatggcgtttccggtttgcctgagcttaccactgtctgtca

SEQ ID NO: 88380 - DNA, 80 bp, synthetic construct
  source 1..80: mol_type = other DNA
gtactgttggaggtcaaatgggcatgctcctaacaggatccaacgccaagagtatggacctgggcaccacaccaggtgac

SEQ ID NO: 88381 - DNA, 80 bp, synthetic construct
  source 1..80: mol_type = other DNA
gacggggagatctatcattacggtctgtatgtggaacgaggccttgtacttggtgtgcacaaaccaccagctgccatcag

SEQ ID NO: 88382 - DNA, 80 bp, synthetic construct
  source 1..80: mol_type = other DNA
ggggttcggacctggcgaccatgatccggtgcgctcgagcattcggtggcctgatggaggaactcaaagcacattgtgtc

SEQ ID NO: 88383 - DNA, 80 bp, synthetic construct
  source 1..80: mol_type = other DNA
ggggttcggacctggcgaccatgatccggtgcgctcgagcattcgggggcctgatggaggaactcaaagcacattgtgtc

SEQ ID NO: 88384 - DNA, 80 bp, synthetic construct
  source 1..80: mol_type = other DNA
ctaggggccccaaccatgaagacccatctgaaacaatgataccacactcccagaggcccatacaattgatgtctttgctg

SEQ ID NO: 88385 - DNA, 80 bp, synthetic construct
  source 1..80: mol_type = other DNA
actgcatggagagtcgttcccctacacagcctttgacaacaactgctatgccttctgttgttgggtcctggacctaaacg

SEQ ID NO: 88386 - DNA, 80 bp, synthetic construct
  source 1..80: mol_type = other DNA
ccacaaagggagacggctcgacccgcggtcacaaagctacagtgagcactgggagtgtcgacttcactccaaagctgggc

SEQ ID NO: 88387 - DNA, 80 bp, synthetic construct
  source 1..80: mol_type = other DNA
agcgttcagttcgccactgatacagacaatgattttgaaactggccaaaacacaaggttcaccccagtcggtgtcatcca

SEQ ID NO: 88388 - DNA, 80 bp, synthetic construct
  source 1..80: mol_type = other DNA
ttgcccccatgggaaatggagcggggcgtagacgtgcattataatggctggagctttctttgctggattggcatctgatg

SEQ ID NO: 88389 - DNA, 80 bp, synthetic construct
  source 1..80: mol_type = other DNA
cttcgggggcactgccaggaagaactaatcccagggctactgtccccgctcggggctcccccagcacaccttctaacact

SEQ ID NO: 88390 - DNA, 80 bp, synthetic construct
  source 1..80: mol_type = other DNA
cggggcgcggcctaaacagccgcccccgggagaaataaaacaaacacaaaaaccaccaagaccaccaacaccggaattag

SEQ ID NO: 88391 - DNA, 80 bp, synthetic construct
  source 1..80: mol_type = other DNA
aggggtaaggtttcagttgacagggtgcaaaacacaacagtccaaaccaacaatgagctttcaggagcgctgcaccactt

SEQ ID NO: 88392 - DNA, 80 bp, synthetic construct
  source 1..80: mol_type = other DNA
tggaaggaaagaaaggcaagaacaagtctggccgaggtaagaaacacacagccttttcatccaagggcctcagtgatgaa

SEQ ID NO: 88393 - DNA, 80 bp, synthetic construct
  source 1..80: mol_type = other DNA
ttttccgccccaccaaaaagcagcggaaagaggaaagagccacacttgggctcgtcacagggtcggagatcagaaagagg

SEQ ID NO: 88394 - DNA, 80 bp, synthetic construct
  source 1..80: mol_type = other DNA
gacaacaggggagttgatgccccttgcagccagaatgggaacccacgccacaatgagaattcaagggagaacggtgtgtg

SEQ ID NO: 88395 - DNA, 80 bp, synthetic construct
  source 1..80: mol_type = other DNA
gacaacaggggagttgatgccccttgcagccagaatgggaacccacgccacaatgagaattcaagggagaacggtgggtg

SEQ ID NO: 88396 - DNA, 80 bp, synthetic construct
  source 1..80: mol_type = other DNA
cacgtgtgaagggcggtccgtccctgcaacaggtcatgagagaccaactcaaaccttttacagagcccagagggaaacca

SEQ ID NO: 88397 - DNA, 80 bp, synthetic construct
  source 1..80: mol_type = other DNA
ttgagcgggggcacatacttggggtgcataaaccacctgccgcaataagcctcgccaaaattgaactgacaccactgtct

SEQ ID NO: 88398 - DNA, 80 bp, synthetic construct
  source 1..80: mol_type = other DNA
ccgaggggccgctggtgatcagtgaagacctgaatggcttgacgttcctccgccgaacagtctctcgtgacccagcaggc

SEQ ID NO: 88399 - DNA, 80 bp, synthetic construct
  source 1..80: mol_type = other DNA
agtttacagtgtcccctaggaattcccctggtgaagtgcttcttaatttggaattgggcccagaaataaacccctatttg

SEQ ID NO: 88400 - DNA, 80 bp, synthetic construct
  source 1..80: mol_type = other DNA
atggttatgcaggtggatttgaagtgcaagtagtcctggctggaaatgcgtttacagcaggaaagataatctttgcagct

SEQ ID NO: 88401 - DNA, 80 bp, synthetic construct
  source 1..80: mol_type = other DNA
ataccccctaattttccaattgataacctgagcgcagcacagatcacaatgtgcccgcatgtgattgtggatgtcagaca

SEQ ID NO: 88402 - DNA, 80 bp, synthetic construct
  source 1..80: mol_type = other DNA
gttggaaccggtcaaccttccgatgcctgacgttcgcaacaatttctttcattataatcaagggtctgattcgagattgc

SEQ ID NO: 88403 - DNA, 80 bp, synthetic construct
  source 1..80: mol_type = other DNA
ttctggggatgatgtttttactgtgtcatgcagagtgctgactaggcctagccctgacttttcatttaatttccttgtgc

SEQ ID NO: 88404 - DNA, 80 bp, synthetic construct
  source 1..80: mol_type = other DNA
cacctactgtggagtcaaagacaaagcccttcacccttcctattctgactatctctgaaatgtccaattctaggtttcca

SEQ ID NO: 88405 - DNA, 80 bp, synthetic construct
  source 1..80: mol_type = other DNA
gtgccgattgattctctgcacaccagcccaactgagaatattgttgtccagtgccaaaacgggcgcgtcactcttgacgg

SEQ ID NO: 88406 - DNA, 80 bp, synthetic construct
  source 1..80: mol_type = other DNA
tgagttaatgggaaccacccaactcttaccgagtcagatctgtgctttcaggggcgtgctcacccgatcaacaagcaggg

SEQ ID NO: 88407 - DNA, 80 bp, synthetic construct
  source 1..80: mol_type = other DNA
ccagtgatcaggccgacacagcaacccctaggttgtttaattattattggcacatacaattggataatctaaatggaaca

SEQ ID NO: 88408 - DNA, 80 bp, synthetic construct
  source 1..80: mol_type = other DNA
ccttacgatcctgcagaagacataccaggccccctagggacaccagattttcggggcaaagtctttggcgtggccagcca

SEQ ID NO: 88409 - DNA, 80 bp, synthetic construct
  source 1..80: mol_type = other DNA
aagaaaccccgacagcacaactagggcacacgaagcaaaggtggatacaacatctggccgtttcaccccaaaattaggct

SEQ ID NO: 88410 - DNA, 80 bp, synthetic construct
  source 1..80: mol_type = other DNA
cattagaaatatccactgaatctggtgactttgaccaaaaccaaccaacaagattcactccagttggcattggggttgac

SEQ ID NO: 88411 - DNA, 80 bp, synthetic construct
  source 1..80: mol_type = other DNA
aatgaggcagactttcaacaatggtctttacccgactattctggtcagttcacccacaacatgaacttggccccagctgt

SEQ ID NO: 88412 - DNA, 80 bp, synthetic construct
  source 1..80: mol_type = other DNA
tgcacccaacttccctggtgagcagctcctcttcttccgctcacagttaccatcttctggtggacggtccaacgggattc

SEQ ID NO: 88413 - DNA, 80 bp, synthetic construct
  source 1..80: mol_type = other DNA
tagactgcctggttccccaagaatgggttcagcacttctaccaagaatcggcccccgcccaaacacaggtggccttggtt

SEQ ID NO: 88414 - DNA, 80 bp, synthetic construct
  source 1..80: mol_type = other DNA
aggtatgtcaaccctgacactggtagagtgttgtttgaggctaagctgcacaagttaggtttcatgactatagctaagag

SEQ ID NO: 88415 - DNA, 80 bp, synthetic construct
  source 1..80: mol_type = other DNA
tggtgattccccaataactgtccctccaaatggatattttagatttgaatcttgggtgaaccccttttatacacttgccc

SEQ ID NO: 88416 - DNA, 80 bp, synthetic construct
  source 1..80: mol_type = other DNA
atggaacgaggtactgggcaccaaaagctacctccacaacttcaatgtcgggtggcttcactaatcaagctgtgcacaga

SEQ ID NO: 88417 - DNA, 80 bp, synthetic construct
  source 1..80: mol_type = other DNA
accacgccaaattctaaaacgaaccaggcttccaaatccacacctagtagtgggtcttcagtggggtcaaactcaaccca

SEQ ID NO: 88418 - DNA, 80 bp, synthetic construct
  source 1..80: mol_type = other DNA
aagcaccagtctgagctcacactcgtccgggtcgtcccgatccagcgggtctacagtcgttagctcattaccatcctcta

SEQ ID NO: 88419 - DNA, 80 bp, synthetic construct
  source 1..80: mol_type = other DNA
ttcgcagaaggggggagtcaaatgtttagtgaaaagattatttagatttgatttgaattggatttgatttggaatctttt

SEQ ID NO: 88420 - DNA, 80 bp, synthetic construct
  source 1..80: mol_type = other DNA
caggccagtggtcgtgatgatctcaggcagacctggcattggaaagacccacatggcgagacatttggccaagagcatcg

SEQ ID NO: 88421 - DNA, 80 bp, synthetic construct
  source 1..80: mol_type = other DNA
caagggtaccaaagcacccagcagtgttcaacattgccccacagttaagatcgggcctaaaacattaacaatcccccctg

SEQ ID NO: 88422 - DNA, 80 bp, synthetic construct
  source 1..80: mol_type = other DNA
cgcgcaacggtgtcgatcactgggatgcctacaggggagagagggtggtcctgtgggatgactacggtatggagagccct

SEQ ID NO: 88423 - DNA, 80 bp, synthetic construct
  source 1..80: mol_type = other DNA
cgcgcaacggtgtcgatcactgggatgcctacaggggagagagggtggtcctgtgggatgactacggtatggggagccct

SEQ ID NO: 88424 - DNA, 80 bp, synthetic construct
  source 1..80: mol_type = other DNA
cctaacccaggggtccctgactgcgagagttgcaggccttgtccatgagaggagagatgaattccagctccaaggaaatg

SEQ ID NO: 88425 - DNA, 80 bp, synthetic construct
  source 1..80: mol_type = other DNA
gaggacaatgcatcccagactgtgaacgaggtacagtcagcacttctcaggctcaggcaagcaagggccagatattacat

SEQ ID NO: 88426 - DNA, 80 bp, synthetic construct
  source 1..80: mol_type = other DNA
actgtacagtttgatgtaaagtcagaaactataattgggttgccggacttgacaacggtgcaaaatgaacatgaaaacaa

SEQ ID NO: 88427 - DNA, 80 bp, synthetic construct
  source 1..80: mol_type = other DNA
tggttggggattctgggtttcatccaaccttctgatcacaacaacacacgtcctacctaaaggggttaaggagctctttg

SEQ ID NO: 88428 - DNA, 80 bp, synthetic construct
  source 1..80: mol_type = other DNA
gcaagatggggaagcaatccttgagggaaatgaggaccttggcacctattgtggcgccccaattctgggccctggcaagg

SEQ ID NO: 88429 - DNA, 80 bp, synthetic construct
  source 1..80: mol_type = other DNA
caggggcaaactacctagacctgcagtcttggaggaagccaaaaagacagtgatgaatgttctagaacaaaccattgacc

SEQ ID NO: 88430 - DNA, 80 bp, synthetic construct
  source 1..80: mol_type = other DNA
actggaatggggagtctttcactggaccacttgcagatcaggcatctaaagccaacctcatgtatgagcaggctaaacat

SEQ ID NO: 88431 - DNA, 80 bp, synthetic construct
  source 1..80: mol_type = other DNA
ctctgggggtccacaaaccaccggcggctataagcctcgcgacgattgagctcacccccatatcactttactggaggccc

SEQ ID NO: 88432 - DNA, 80 bp, synthetic construct
  source 1..80: mol_type = other DNA
tggacaagggggcctaaccatgagaacccgtacgagagcatggttcctcattctcagcgggccacacaactcatggccct

SEQ ID NO: 88433 - DNA, 80 bp, synthetic construct
  source 1..80: mol_type = other DNA
ggtgcatcgctggcgacaccagttgtcgggcaacaaaatataattgatccctggataagaaataattttgtacaagctcc

SEQ ID NO: 88434 - DNA, 80 bp, synthetic construct
  source 1..80: mol_type = other DNA
tgcaggtgagtttacagtttcccctagaaattcccctggtgaaattttgcttgatttggagttgggaccagaactgaacc

SEQ ID NO: 88435 - DNA, 80 bp, synthetic construct
  source 1..80: mol_type = other DNA
cctatctcgctcatctggcccgtatgtataatgggcacgctggtggcatggaagtgcaaattgtgttggctgggaacgcg

SEQ ID NO: 88436 - DNA, 80 bp, synthetic construct
  source 1..80: mol_type = other DNA
gtttatacccccaattacttggtctccccggacacattaaagggcctcgctggtgagaagttcccctacacggccttcag

SEQ ID NO: 88437 - DNA, 80 bp, synthetic construct
  source 1..80: mol_type = other DNA
ttcacagctggcaagatcatatttgctgccatccctccagggttcccttatgaaaatttgtcaccttcacaaattacaat

SEQ ID NO: 88438 - DNA, 80 bp, synthetic construct
  source 1..80: mol_type = other DNA
gtgccctcatgttataattgatgttagacaattagaaccagttctactacctatgccagatattagaaacaatttcttcc

SEQ ID NO: 88439 - DNA, 80 bp, synthetic construct
  source 1..80: mol_type = other DNA
attacaatcagggcaatgacccaaaattgagattgatagctatgctctacacccctttaagggctaataattctggtgat

SEQ ID NO: 88440 - DNA, 80 bp, synthetic construct
  source 1..80: mol_type = other DNA
gatgtgttcacagtttcttgtagggtcctcactaaaccgtcacctgattttgaattcacatttttggtcccccctacggt

SEQ ID NO: 88441 - DNA, 80 bp, synthetic construct
  source 1..80: mol_type = other DNA
tgaatctaaaaccaaacagttcacattgcccatccttaaaatatcagagatgaccaactcaagattcccagtgccagtgg

SEQ ID NO: 88442 - DNA, 80 bp, synthetic construct
  source 1..80: mol_type = other DNA
aaatgatgtacacagccaggaatgagaaccaagttgtccagccacagaatggtagggtcacacttgatggcgagctgtta

SEQ ID NO: 88443 - DNA, 80 bp, synthetic construct
  source 1..80: mol_type = other DNA
ggcaccacacccttgttggctgtcaacatctgcaaattcaagggggaggttatagccaagaatggagatgtgagatccta

SEQ ID NO: 88444 - DNA, 80 bp, synthetic construct
  source 1..80: mol_type = other DNA
taggatggacatggaaatcactaacactgatggcaccccaattgaccccacagaagacacacctggccccattggttcac

SEQ ID NO: 88445 - DNA, 80 bp, synthetic construct
  source 1..80: mol_type = other DNA
ctgactttcaaggtatactctttggcgttgctagccaacgcaacaagaatgagcaaaaccctgccacgagagcccatgaa

SEQ ID NO: 88446 - DNA, 80 bp, synthetic construct
  source 1..80: mol_type = other DNA
gccaacattaacactggtggggatcaatatgcccccaaattggcccaagtgaaattcttctcagagtcccaggatttcga

SEQ ID NO: 88447 - DNA, 80 bp, synthetic construct
  source 1..80: mol_type = other DNA
ggtgcaccagcccacagttttcaccccagttggtgtggcaggcgacacttcccaccctttcagacagtgggtcctgcctc

SEQ ID NO: 88448 - DNA, 80 bp, synthetic construct
  source 1..80: mol_type = other DNA
gatacggtggacatcttaccaacaacacccacttggctccagcagtggcccccctattcccaggtgagcagattctattc

SEQ ID NO: 88449 - DNA, 80 bp, synthetic construct
  source 1..80: mol_type = other DNA
tttagatcacaaatacccagctcaggcggccatgaattgggttacatggactgccttgtcccacaagaatgggtccaaca

SEQ ID NO: 88450 - DNA, 80 bp, synthetic construct
  source 1..80: mol_type = other DNA
cttctatcaagaagctgccacagctcagtctgaggtggcactcataaggttcatcaacccagacactggcagagtcctct

SEQ ID NO: 88451 - DNA, 80 bp, synthetic construct
  source 1..80: mol_type = other DNA
ttgaggccaagctgcacaagcaaggctttataactgtggctcatactggtgataacccaattgtcatgccaccaaatggg

SEQ ID NO: 88452 - DNA, 80 bp, synthetic construct
  source 1..80: mol_type = other DNA
ggatccaataatggctagtgctttccttgcaaatttggcaggaggcgttgcctccaatggaattagttcactcataaatg

SEQ ID NO: 88453 - DNA, 80 bp, synthetic construct
  source 1..80: mol_type = other DNA
ctggggctaatgctatcaaccaaaaagttgagtttgattataataaacaactccaaaatgcatccttctcccatgataag

SEQ ID NO: 88454 - DNA, 80 bp, synthetic construct
  source 1..80: mol_type = other DNA
gaaatgctccaagcccaaattgaagccactaaacgtctgcaacaagagatgattgacataaagcaaggggtgctgacagc

SEQ ID NO: 88455 - DNA, 80 bp, synthetic construct
  source 1..80: mol_type = other DNA
tgcgggattttctcctacagatgccgcgaggggctctgtcggcgcgccaatgacaaaattagttgattggagtggcacta

SEQ ID NO: 88456 - DNA, 80 bp, synthetic construct
  source 1..80: mol_type = other DNA
gatattgggcgcctggtgccatgaggacaacaggttattcagggacttttacttacttgccccctgtgcagtctgcttca

SEQ ID NO: 88457 - DNA, 80 bp, synthetic construct
  source 1..80: mol_type = other DNA
tatgttaataaccaaaatagacaatttcttaaagtagatccttctcctccttcttcgagtggttcttctgtttcttctgc

SEQ ID NO: 88458 - DNA, 80 bp, synthetic construct
  source 1..80: mol_type = other DNA
taaaacacaatcaactaccctctcaggcacttcaagggtgggctcctcatctcagtcaaccctgtcgaccaggccgagca

SEQ ID NO: 88459 - DNA, 80 bp, synthetic construct
  source 1..80: mol_type = other DNA
caaggacatctgattgggtgcgcagccagaatgagaggttgagtcccttcatggatggagcgttgcaaacaacgtatgta

SEQ ID NO: 88460 - DNA, 80 bp, synthetic construct
  source 1..80: mol_type = other DNA
acgccaccatccagtagggcatcaagtgtcagcacagtctcgaccgtgccgaaagaggttttggactcctggacgcctgc

SEQ ID NO: 88461 - DNA, 80 bp, synthetic construct
  source 1..80: mol_type = other DNA
ggggagtcacagatttagtgaaaagattggttaggaaagttgattagtttgttcttcctttctactattcctttaattct

SEQ ID NO: 88462 - DNA, 80 bp, synthetic construct
  source 1..80: mol_type = other DNA
ctctaattttgtagcctccctaataggtgattttgaattgcaagggcctgaggacctggctgtggagctcgtccccgtgg

SEQ ID NO: 88463 - DNA, 80 bp, synthetic construct
  source 1..80: mol_type = other DNA
aagacttggggaattatgctcttgacatactgaaactggttatgaagtggttcttcccaaagaaagaagagaaagccgag

SEQ ID NO: 88464 - DNA, 80 bp, synthetic construct
  source 1..80: mol_type = other DNA
caagggaaccaaagcacccagtaatgatcagcactgtcccacagttaagatcgggaccaaaacactaacagttccccctg

SEQ ID NO: 88465 - DNA, 80 bp, synthetic construct
  source 1..80: mol_type = other DNA
cagacccgtggttgttatgatctcgggtagacctggcattggcaaaacccacatggcaagacacttggctaagagtatcg

SEQ ID NO: 88466 - DNA, 80 bp, synthetic construct
  source 1..80: mol_type = other DNA
acgcaacggggttgatcattgggacgcctacaggtgagagagggtggttttatgggatgattatggcatgggaaaccctg

SEQ ID NO: 88467 - DNA, 80 bp, synthetic construct
  source 1..80: mol_type = other DNA
acgcaacggggttgatcattgggacgcctacaggggagagagggtggttttatgggatgattatggcatgggaaaccctg

SEQ ID NO: 88468 - DNA, 80 bp, synthetic construct
  source 1..80: mol_type = other DNA
cctaacccaggggtccctgactgcaagggttgcaggtcttgttcatgagaggagagatgagttccagctccaggggaacg

SEQ ID NO: 88469 - DNA, 80 bp, synthetic construct
  source 1..80: mol_type = other DNA
atcgtgcagtttgatgcgaagtcggaaactgtgcgtgggctaccagacttgacaacggtgcagaatgaacacgaaaacac

SEQ ID NO: 88470 - DNA, 80 bp, synthetic construct
  source 1..80: mol_type = other DNA
aggggggttcttggtttggtcactggctcagacatcaggaagaggagaccagacgattttcaaccgaagggcaacctgtg

SEQ ID NO: 88471 - DNA, 80 bp, synthetic construct
  source 1..80: mol_type = other DNA
tggctggggcttctgggtctcatccaacctcctgatcacaacaacacacgtcctgcctaaggggattaaggaactttttg

SEQ ID NO: 88472 - DNA, 80 bp, synthetic construct
  source 1..80: mol_type = other DNA
cccgtggaggcaacactgtcatatgtgccactcaggggcaagatggggaggcagtccttgagggaaatgagaaccttggc

SEQ ID NO: 88473 - DNA, 80 bp, synthetic construct
  source 1..80: mol_type = other DNA
cccggggaggcaacactgtcatatgtgccactcaggggcaagatggggaggcagtccttgagggaaatgagaaccttggc

SEQ ID NO: 88474 - DNA, 80 bp, synthetic construct
  source 1..80: mol_type = other DNA
attggaatggggaatccttcactggcccccttgcagaccaagcatccaaagccaacctcatgtacgaacaggccaaacat

SEQ ID NO: 88475 - DNA, 80 bp, synthetic construct
  source 1..80: mol_type = other DNA
ttgtcatctcagtccaggagggtctgccatcaggggtcccatgcacatcacaatggaattctatagcacattggatcctg

SEQ ID NO: 88476 - DNA, 80 bp, synthetic construct
  source 1..80: mol_type = other DNA
ctaggggttcacaagccccctgcagcgataagcctcgcgacgatagaactcacacccatatctctttattggaggcccgt

SEQ ID NO: 88477 - DNA, 80 bp, synthetic construct
  source 1..80: mol_type = other DNA
aggggcacactaattggccaaacatcaagatcttcagactcaaccgactcagcccctcggagaagggatcacccactcca

SEQ ID NO: 88478 - DNA, 80 bp, synthetic construct
  source 1..80: mol_type = other DNA
aggggactgtctttggggtggccagtcagagagatgtgtcaggacaacaagtggaggcaactcgagctcacgaagtgcac

SEQ ID NO: 88479 - DNA, 80 bp, synthetic construct
  source 1..80: mol_type = other DNA
aggggactgtctttggggtggccagtcagagagatgtgtcaggacaacaagtgggggcaactcgagctcacgaagtgcac

SEQ ID NO: 88480 - DNA, 80 bp, synthetic construct
  source 1..80: mol_type = other DNA
aaactgggatccattctcatgcactcagagtcggacgactttgtgactggacagccgatccgtttcacacccataggaat

SEQ ID NO: 88481 - DNA, 80 bp, synthetic construct
  source 1..80: mol_type = other DNA
cccatgggaactggtcaggggcgtaggaggaatcaataatggctagtgcttttcttgcaggtcttgctggcgacgtcata

SEQ ID NO: 88482 - DNA, 80 bp, synthetic construct
  source 1..80: mol_type = other DNA
tgaacataaggcaggtggtgttgaccgctggcggcttctcccccgcggatgctgctagaggggccgtcaatgccccaatg

SEQ ID NO: 88483 - DNA, 80 bp, synthetic construct
  source 1..80: mol_type = other DNA
tgaacataaggcagggggtgttgaccgctggcggcttctcccccgcggatgctgctagaggggccgtcaatgccccaatg

SEQ ID NO: 88484 - DNA, 80 bp, synthetic construct
  source 1..80: mol_type = other DNA
tagcagccctgttcacaagtcccctgctccttctcagcacactgctttgccaaagagtagattgcaaaatgattctgcta

SEQ ID NO: 88485 - DNA, 80 bp, synthetic construct
  source 1..80: mol_type = other DNA
ccacagcgacccctaccttgtctagaaccagcgactgggttaggggacagaacgagaggctcagcccgtttatggatggt

SEQ ID NO: 88486 - DNA, 80 bp, synthetic construct
  source 1..80: mol_type = other DNA
gcccatctacgcagacgaggggagtcacaagtttagtgaaaagagtgattaggttttctccctttttcttttctctcttt

SEQ ID NO: 88487 - DNA, 80 bp, synthetic construct
  source 1..80: mol_type = other DNA
ttttgaattgcaggggcctgaggacttggctgtggagctcgtccccgtggtcatgggtggcataggaatggttctcggct

SEQ ID NO: 88488 - DNA, 80 bp, synthetic construct
  source 1..80: mol_type = other DNA
aagatctggggaactacgccctagatatactaaaactagttatgaagtggttctttccaaagaaagaagagaaggccgaa

SEQ ID NO: 88489 - DNA, 80 bp, synthetic construct
  source 1..80: mol_type = other DNA
ttagaccagtagttgtcatgatctcaggtagacctggcattggcaaaacccatatggcaaggcatctggctaagagtata

SEQ ID NO: 88490 - DNA, 80 bp, synthetic construct
  source 1..80: mol_type = other DNA
ctaaaaacaccaaagcacccagcggtgaccggcactgccccgcagttaagatcgggtccaaaacactagtgatcccgcca

SEQ ID NO: 88491 - DNA, 80 bp, synthetic construct
  source 1..80: mol_type = other DNA
cgcgcaacggggttgaccactgggatgcttacagggtggagagagtggtcctgtgggacgactacggtatggagaaccct

SEQ ID NO: 88492 - DNA, 80 bp, synthetic construct
  source 1..80: mol_type = other DNA
cgcgcaacggggttgaccactgggatgcttacaggggggagagagtggtcctgtgggacgactacggtatggggaaccct

SEQ ID NO: 88493 - DNA, 80 bp, synthetic construct
  source 1..80: mol_type = other DNA
ctctaacccaggggtctctgactgcaagagtggcgggccttgttcatgagaggagagatgaattccagctgcaaggggat

SEQ ID NO: 88494 - DNA, 80 bp, synthetic construct
  source 1..80: mol_type = other DNA
ctctaacccaggggtctctgactgcaagagtggcgggccttgttcatgagaggagagatgaattccagctgcaaggtgat

SEQ ID NO: 88495 - DNA, 80 bp, synthetic construct
  source 1..80: mol_type = other DNA
gaacccccaaacggtgaggatattgtgcagttcgacgcaaaatcagaaactgtacgtgggctacccgacctgacgacggt

SEQ ID NO: 88496 - DNA, 80 bp, synthetic construct
  source 1..80: mol_type = other DNA
tcgaggacctcacttcccaaaccgcaaatgaggtgagttcagccctcctcaggctcagacaagccagggccagatattat

SEQ ID NO: 88497 - DNA, 80 bp, synthetic construct
  source 1..80: mol_type = other DNA
tctgctgggagagatgggttaaaccgaccgagacccaggagacgagtgagcccgagaaggaaactgcccagagtgagtgg

SEQ ID NO: 88498 - DNA, 80 bp, synthetic construct
  source 1..80: mol_type = other DNA
gagattgaacccaaggacacagaaccagaaggtaagaagggcaagaacaagaaaggaaggggcaagaaacacacagcctt

SEQ ID NO: 88499 - DNA, 80 bp, synthetic construct
  source 1..80: mol_type = other DNA
gggtctcatccaacctcctgattacaacaacacatgttctgcctaagggtgttaaggaactcttcggcgtcgacgtcaaa

SEQ ID NO: 88500 - DNA, 80 bp, synthetic construct
  source 1..80: mol_type = other DNA
cccgaggaggcaacactgtcatctgtgccactcaagggcaggacggggaagcagttcttgaagggaatgagagccttggc

SEQ ID NO: 88501 - DNA, 80 bp, synthetic construct
  source 1..80: mol_type = other DNA
caggggcaaaccaccaagacccacagtcctggaagaagctaaaaagacagtaatgaacgtcctggaacagaccattgatc

SEQ ID NO: 88502 - DNA, 80 bp, synthetic construct
  source 1..80: mol_type = other DNA
ctctgggggtgcacaaacccccagcggctataagcctcgcgacagtggaactcactcccatatccctttactggcgacct

SEQ ID NO: 88503 - DNA, 80 bp, synthetic construct
  source 1..80: mol_type = other DNA
gtctacactccaaactacctggtacacccagacacactgaagggtcttgctggtgaaaagtttccctacacggcctttag

SEQ ID NO: 88504 - DNA, 80 bp, synthetic construct
  source 1..80: mol_type = other DNA
actctggcgaggacgtgttcacagtgtcttgcagggtcttgacccgcccagcccctgactttgagttcacgttcttagtg

SEQ ID NO: 88505 - DNA, 80 bp, synthetic construct
  source 1..80: mol_type = other DNA
ccaccaaccgtagaatcaaagaccaagccttttacactccctattttgaccctaggggaactatccaattccagattccc

SEQ ID NO: 88506 - DNA, 80 bp, synthetic construct
  source 1..80: mol_type = other DNA
tgctccaatagacatgctgtacacagatcccaatgagacaatcgtggtacaaccacaaaatggcaggtgcactctagatg

SEQ ID NO: 88507 - DNA, 80 bp, synthetic construct
  source 1..80: mol_type = other DNA
ttaggggcacgttgatcagccaaacgtcgaggtctgcagattcaacagattcagctccacgggtgaggaaccatcccctt

SEQ ID NO: 88508 - DNA, 80 bp, synthetic construct
  source 1..80: mol_type = other DNA
cacgttcagctgaagaacctcgacgggacaccatatgacccaacagatgaggtaccggcagttctgggtgccatagattt

SEQ ID NO: 88509 - DNA, 80 bp, synthetic construct
  source 1..80: mol_type = other DNA
caaaggaactgtgtttggagtcgctagccagagaaacaccacagggagctctgtaggggcgacgcgtgcccacgaggtgc

SEQ ID NO: 88510 - DNA, 80 bp, synthetic construct
  source 1..80: mol_type = other DNA
acatagacaccacaaaccctagatacaccccaaaacttggttctgtgttgatgcaatctgagtctagtgattttgatgat

SEQ ID NO: 88511 - DNA, 80 bp, synthetic construct
  source 1..80: mol_type = other DNA
ggacaaccgactcgcttcacccccattggcatgggagcagatgattggcgccaatgggaattgcccgaatattctggtca

SEQ ID NO: 88512 - DNA, 80 bp, synthetic construct
  source 1..80: mol_type = other DNA
ccttaccctcaacatgaacctagcccccgcagttgcccctgctttccccggtgagcgcatcctcttcttcaggtcagtgg

SEQ ID NO: 88513 - DNA, 80 bp, synthetic construct
  source 1..80: mol_type = other DNA
cccatgggaactggacaggggcgcaggagagtccaataatggcaggagctttctttgctggattagcaggcgacgccata

SEQ ID NO: 88514 - DNA, 80 bp, synthetic construct
  source 1..80: mol_type = other DNA
acaaatggtgtcgggtccctgatcaacgctggggccaacgcaatcaatcagaaggtagagtatgatttcaacaaacaact

SEQ ID NO: 88515 - DNA, 80 bp, synthetic construct
  source 1..80: mol_type = other DNA
ccaattggcatcctttaaacatgacaaggaaatgctacaatcacaagttctggccaccaaacagctccagcaggaaatga

SEQ ID NO: 88516 - DNA, 80 bp, synthetic construct
  source 1..80: mol_type = other DNA
tgaacataaggcaaggggtcttgaccgctggcggcttttcccctacagatgccgcgagaggcgctgtaaacgcgccaatg

SEQ ID NO: 88517 - DNA, 80 bp, synthetic construct
  source 1..80: mol_type = other DNA
atggcacaagatattttgctccaaatagtatgaaaacaaccagttattcgggtcagctctccagtaatcctgtgcatagg

SEQ ID NO: 88518 - DNA, 80 bp, synthetic construct
  source 1..80: mol_type = other DNA
caacccactttgtcccgttctgaccccccaaaagttaaaatcaatagtgattctgctagtgtatatagttctacatctac

SEQ ID NO: 88519 - DNA, 80 bp, synthetic construct
  source 1..80: mol_type = other DNA
tgctccttcacaatcaacccattcaacaattctgactgcagggtctggatcatccaggacaacctcctcttccacagcaa

SEQ ID NO: 88520 - DNA, 80 bp, synthetic construct
  source 1..80: mol_type = other DNA
cttccaccctatctaggactagtgactgggtgaggggacaaaatgagaggcttagcccgttcatggatggtgctctccaa

SEQ ID NO: 88521 - DNA, 80 bp, synthetic construct
  source 1..80: mol_type = other DNA
acttgcgtaggcgaggggagtcacaaatttagtgaaaagattgattaggttttcttctcccttctttctccttttctttc

SEQ ID NO: 88522 - DNA, 80 bp, synthetic construct
  source 1..80: mol_type = other DNA
tactgggcaaactcaagccacttaacctactgcatctgcttgcgtcgtgtgactggacgtttgcaggtatagtagagaca

SEQ ID NO: 88523 - DNA, 80 bp, synthetic construct
  source 1..80: mol_type = other DNA
gtcatcttaatggcggaactcttcaatgtgttctggaccccacctgatgtttccaatttcatagcctccttgatgggtga

SEQ ID NO: 88524 - DNA, 80 bp, synthetic construct
  source 1..80: mol_type = other DNA
ttttcagttacaaggacccgaggacctggctgtggagctcgtccccgtggttatgggaggcataggaatggtcctcggtt

SEQ ID NO: 88525 - DNA, 80 bp, synthetic construct
  source 1..80: mol_type = other DNA
caatcactcttgggatctttcccgaccccactttgatccagtcttcgaagaatacacctcaaatccggattgggacttct

SEQ ID NO: 88526 - DNA, 80 bp, synthetic construct
  source 1..80: mol_type = other DNA
tcaccatattcttgggaacaagagctacagcatggggcagaatctttccaccagcaatcctctgggattctttcccgacc

SEQ ID NO: 88527 - DNA, 80 bp, synthetic construct
  source 1..80: mol_type = other DNA
atcctcaggccatgcagtggaactccacaacctccacctaactcgcatgaatcccactgctggtggctccagttcaggaa

SEQ ID NO: 88528 - DNA, 80 bp, synthetic construct
  source 1..80: mol_type = other DNA
cttcacatcggcggctgccccagggctatcttaccctactccacctgccagcgacatttgggtgctaccacaagcttctg

SEQ ID NO: 88529 - DNA, 80 bp, synthetic construct
  source 1..80: mol_type = other DNA
aggacacccggactagtacggcccttgtgccctctgtctcggagcccgtcgggctgccaaaccctgttgtacctaccccc

SEQ ID NO: 88530 - DNA, 80 bp, synthetic construct
  source 1..80: mol_type = other DNA
cccgtgcgtaagccaccagcaccaccgccttctcgcactcgccgtctcctttacacttatcccgacggtgccaaggtgta

SEQ ID NO: 88531 - DNA, 80 bp, synthetic construct
  source 1..80: mol_type = other DNA
cgccccgtcgcagaagatctcaatctcgggaatctcaatgttagtatcccttggactcaaaaggtgggaaactttactgg

SEQ ID NO: 88532 - DNA, 80 bp, synthetic construct
  source 1..80: mol_type = other DNA
cggcagaccccccaccggcgtccacaaatcttcctgctggtagatcgcctactcgaatatctccacctgttccaaacact

SEQ ID NO: 88533 - DNA, 80 bp, synthetic construct
  source 1..80: mol_type = other DNA
cacctgttccaaacactgatcctcacgccacgccatgcaactccacgacagtcgaccctgctctgctagagcacaagtga

SEQ ID NO: 88534 - DNA, 80 bp, synthetic construct
  source 1..80: mol_type = other DNA
tcacaataccacagagtctagactcgtggtggacttctctcaattatctagggggagcacccacgtgtcctggccaaatt

SEQ ID NO: 88535 - DNA, 80 bp, synthetic construct
  source 1..80: mol_type = other DNA
atattattaatagatgtcaacaatatgtgggccctcttacagttaatgaaaaaaggagattaaatttaattatgcctgct

SEQ ID NO: 88536 - DNA, 80 bp, synthetic construct
  source 1..80: mol_type = other DNA
atggcttctctcatttatagacagctactgtcaaattcgtacactgtgaatttatcagatgaaattcaaattatcggttc

SEQ ID NO: 88537 - DNA, 80 bp, synthetic construct
  source 1..80: mol_type = other DNA
atggtttaccagctgcaaatccaaataatggaaacgagtattatgaaatattaggaagattttcccttatatcgttggta

SEQ ID NO: 88538 - DNA, 80 bp, synthetic construct
  source 1..80: mol_type = other DNA
ttaattcactgtcgcaggaaatagcaatgtcacaacttatcgatttagctttgttaccgttagacatgttttccatgttt

SEQ ID NO: 88539 - DNA, 80 bp, synthetic construct
  source 1..80: mol_type = other DNA
catcgtccatatcaactttaacggattcattgtctgatgctgcttcatcaatttcaagaaattcttcaataagatcagtt

SEQ ID NO: 88540 - DNA, 80 bp, synthetic construct
  source 1..80: mol_type = other DNA
gggtcatctatatcagcatggacagacatatctacgcaagtgacagatatatcagatgcattaagttcagtttcaacgca

SEQ ID NO: 88541 - DNA, 80 bp, synthetic construct
  source 1..80: mol_type = other DNA
tcagatcggatcctagagtgctgcgagagtttataaaccaagaaaatccgataattcgtaacagaatagaacagcttata

SEQ ID NO: 88542 - DNA, 80 bp, synthetic construct
  source 1..80: mol_type = other DNA
ctattatccccatctaatgcaggtgtagtagtggaaggaacgaataattcggacagatggttagctactatactaattga

SEQ ID NO: 88543 - DNA, 80 bp, synthetic construct
  source 1..80: mol_type = other DNA
accaaacgttccatcacaaagtagaacatatactttatttgggcaacaagaacagataacgattgagaacgtctcaacaa

SEQ ID NO: 88544 - DNA, 80 bp, synthetic construct
  source 1..80: mol_type = other DNA
caaaatggaaattcatagatttagctaaaactgatgtcaatggaacgttcacgcaacatgggccactactgtcggacaca

SEQ ID NO: 88545 - DNA, 80 bp, synthetic construct
  source 1..80: mol_type = other DNA
aagctctatggagtgatgaagtttagcggtagattgtatacgtacaatggtgagacaccaaatgccactacaggttatta

SEQ ID NO: 88546 - DNA, 80 bp, synthetic construct
  source 1..80: mol_type = other DNA
caccacaactaactatgatacagttaatatggtgtcacattgtgacttttacattattccacgatctgaagaaaacacat

SEQ ID NO: 88547 - DNA, 80 bp, synthetic construct
  source 1..80: mol_type = other DNA
agtatctttaacttctagatcaattgtacataccagagcacaagcaaatgaagatattgtcgtgtcaaaaacttcattat

SEQ ID NO: 88548 - DNA, 80 bp, synthetic construct
  source 1..80: mol_type = other DNA
cctatcataatagagaagaacacagtgcatttaaatagtactaccatagtgaaggaaatttgtcctaaagtgtcagaata

SEQ ID NO: 88549 - DNA, 80 bp, synthetic construct
  source 1..80: mol_type = other DNA
ttgaccggaacagagtcaccgctttcagacaactggctgctgagaacaaatatggactggtggataccatgaggattggc

SEQ ID NO: 88550 - DNA, 80 bp, synthetic construct
  source 1..80: mol_type = other DNA
caaagccaccactagaccaaagcgagccagaggtcaaggaggagacccccaagttagaggatgatgaattcatcatctcc

SEQ ID NO: 88551 - DNA, 80 bp, synthetic construct
  source 1..80: mol_type = other DNA
tccaaggacattaaggaggaagggaagaagggcaaaaacaaaactggccgtggcaagaaacacactgcattctctagcaa

SEQ ID NO: 88552 - DNA, 80 bp, synthetic construct
  source 1..80: mol_type = other DNA
ggtaaacccccgagacctagtgtgctggaggcagccaaacagaccatcatcaacgttctcgagcaaactttggatccccc

SEQ ID NO: 88553 - DNA, 80 bp, synthetic construct
  source 1..80: mol_type = other DNA
taaaacagggggtcctggccgctggcggcttttcccctgctgatgcagccagaggtgctgtgaacgcgcccatgacacag

SEQ ID NO: 88554 - DNA, 80 bp, synthetic construct
  source 1..80: mol_type = other DNA
agcctcccctgacattgtgggcaccataaacgccctgctggctaggatcgctgccgcgcgttccttagttcatagggcca

SEQ ID NO: 88555 - DNA, 80 bp, synthetic construct
  source 1..80: mol_type = other DNA
aggaggagctctccagcagaccaagaccggtcgttttgatgatctctggcaaaccagggataggaaagacccacttggcc

SEQ ID NO: 88556 - DNA, 80 bp, synthetic construct
  source 1..80: mol_type = other DNA
agggaactggcaaagaaaattgcctcgacactcacaggagaccaaagggtgggcctcattccgcgaaatggagtcgacca

SEQ ID NO: 88557 - DNA, 80 bp, synthetic construct
  source 1..80: mol_type = other DNA
cagacacatgcccattaaccctgaattgtgacaggattgagaacaaagggaaggtctttgacagcgacgcgatcataatc

SEQ ID NO: 88558 - DNA, 80 bp, synthetic construct
  source 1..80: mol_type = other DNA
tgcaccaccttagatgtgccaggataaggtactatgtcaagtgtgttcaagaggccatctactcactcctccaaatcgcc

SEQ ID NO: 88559 - DNA, 80 bp, synthetic construct
  source 1..80: mol_type = other DNA
gcagatgaggccactatgaaggaggggtgtcccaaacctagggaagaagaggaatttgtcgtctcctcagatgacatcaa

SEQ ID NO: 88560 - DNA, 80 bp, synthetic construct
  source 1..80: mol_type = other DNA
caggtgcaaatacacaaatcaggcgaattctgtcgcctaagattcccaaaacccatcaggacagatgtatcaggtatgat

SEQ ID NO: 88561 - DNA, 80 bp, synthetic construct
  source 1..80: mol_type = other DNA
gcactgttgccaccatactcatcaaaagaaccactggagaactgatgcctctcgcagcaagaatgggcacccacgcgacc

SEQ ID NO: 88562 - DNA, 80 bp, synthetic construct
  source 1..80: mol_type = other DNA
cccgagtcaaaggtggaccatctctgcaacaagttatgcgagaccaactgaagccatttactgaaccccgtggtaagcca

SEQ ID NO: 88563 - DNA, 80 bp, synthetic construct
  source 1..80: mol_type = other DNA
agtatacgggaagataaagaagaggttgctttggggctctgatctggccaccatggtgcggtgcgcgcgctcctttggtg

SEQ ID NO: 88564 - DNA, 80 bp, synthetic construct
  source 1..80: mol_type = other DNA
gtttgatggatgaactcaaggcccattgtgtgacacttccgataagggttggcatgaacatgaatgaagatggaccaata

SEQ ID NO: 88565 - DNA, 80 bp, synthetic construct
  source 1..80: mol_type = other DNA
tgactttcctaaggagaaccgtcactcgcgaccctgcaggatggtttggcaaactggaccaaagttccatacttagacaa

SEQ ID NO: 88566 - DNA, 80 bp, synthetic construct
  source 1..80: mol_type = other DNA
aaccctacatgcgtggtgccctacagacagcttttgtcaccccgccttccagcagggcgtctgatgggacagtctcaacc

SEQ ID NO: 88567 - DNA, 80 bp, synthetic construct
  source 1..80: mol_type = other DNA
acgctgtattagacctggaggccattgagaacaaccatatgaccactctattgaaagataagaacagccttgcagcctac

SEQ ID NO: 88568 - DNA, 80 bp, synthetic construct
  source 1..80: mol_type = other DNA
atgaagaccttggacatggaagaagagaaagctaggaagttatccaccaaatcagcctcccctgatattgtgggcacaat

SEQ ID NO: 88569 - DNA, 80 bp, synthetic construct
  source 1..80: mol_type = other DNA
aaatgccctgctggccaggatcgccgccgcgcgctccttggtccatagggccaaggaggagctctccagcagaccaagac

SEQ ID NO: 88570 - DNA, 80 bp, synthetic construct
  source 1..80: mol_type = other DNA
aagacccacctggccagagaactggcaaagaaaattgcctcgacactcacaggggaccagagggtgggcctcatcccacg

SEQ ID NO: 88571 - DNA, 80 bp, synthetic construct
  source 1..80: mol_type = other DNA
tacctataaggcaggtgcaaatacacaagtcaggcgagttttgtcgcctgagattcccaaaacccatcaggacagatgtg

SEQ ID NO: 88572 - DNA, 80 bp, synthetic construct
  source 1..80: mol_type = other DNA
aaagactgctttggggctccgatctggccaccatggtgcggtgtgcgcgctcctttggcggtttgatggacgaactcaag

SEQ ID NO: 88573 - DNA, 80 bp, synthetic construct
  source 1..80: mol_type = other DNA
tcgcctagcgtggttgacgtgggcgactttaagatttcaatcaatgaagggttaccgtcgggtgtcccttgcacctctca

SEQ ID NO: 88574 - DNA, 80 bp, synthetic construct
  source 1..80: mol_type = other DNA
ttgtgatatctgagttgaaagaaggtggaatggatttttacgtgcccaggcaagaacctatgtttagatggatgagattc

SEQ ID NO: 88575 - DNA, 80 bp, synthetic construct
  source 1..80: mol_type = other DNA
gtgagctccaagggacaactcaactccaagtcagtggcatttgtgctttcaagggagaagtgaccgcccacttgcatgac

SEQ ID NO: 88576 - DNA, 80 bp, synthetic construct
  source 1..80: mol_type = other DNA
ggacaacaatccgtggacagtacaacttgtactgcacctataatacacctaaaaggtgatcctaatagtttaaaatgttt

SEQ ID NO: 88577 - DNA, 80 bp, synthetic construct
  source 1..80: mol_type = other DNA
tcatttaacctttggaaatggtataagttggggctagtagcagttgtcggccggaacagtgatggaactgagtcgagttg

SEQ ID NO: 88578 - DNA, 80 bp, synthetic construct
  source 1..80: mol_type = other DNA
gcgtaagtaacttaccatatgttaggtatgctgagcaaattgtacccctcagcccaggtcttggcctcctcagaccacca

SEQ ID NO: 88579 - DNA, 80 bp, synthetic construct
  source 1..80: mol_type = other DNA
atcctgctggtggctccagtcctgctggtggctccaggcccctgctggtggctccagttcaggaacagtaaaccctgttc

SEQ ID NO: 88580 - DNA, 80 bp, synthetic construct
  source 1..80: mol_type = other DNA
cccatgtttccagcgagtagtgtgtgggatttcaacgggatgggagtcgccctaaccgaggaggattcaacaagaacagc

SEQ ID NO: 88581 - DNA, 80 bp, synthetic construct
  source 1..80: mol_type = other DNA
cttattatctgcctctcatacgagagaagcgttctggctagcaaaagccccctgcctccaagctgtgcgttggggctggg

SEQ ID NO: 88582 - DNA, 80 bp, synthetic construct
  source 1..80: mol_type = other DNA
gcaattgattatgcctgctaggttttatccaaatgttaccaaatatttgccattggataagggtattaaaccttattatc

SEQ ID NO: 88583 - DNA, 80 bp, synthetic construct
  source 1..80: mol_type = other DNA
ttgtaggatgtgaccagaaaaaatggtggcaggtgttttataccgtagtagattacataaatcaaatagttcaggtaatg

SEQ ID NO: 88584 - DNA, 80 bp, synthetic construct
  source 1..80: mol_type = other DNA
agattgcagacgacaagtggaaagatactctctcacagctatttctcacaaaagggtggccgacagggtcagtttacttt

SEQ ID NO: 88585 - DNA, 80 bp, synthetic construct
  source 1..80: mol_type = other DNA
aatggatagcgatgggacaatcatgtacaataaaagtgtgtccattgaatacacaaacattaggaataggttgtcaaaca

SEQ ID NO: 88586 - DNA, 80 bp, synthetic construct
  source 1..80: mol_type = other DNA
agtggatagcaatggggcagtcatgcacaataaaagtatgtccattgaatactcaaacactaggaataggatgtcagaca

SEQ ID NO: 88587 - DNA, 80 bp, synthetic construct
  source 1..80: mol_type = other DNA
cagttatcgcagttgaaccacatgtcagtcaaacaattaactggagcgttctagtctgtgcaaataagcagcttaatgta

SEQ ID NO: 88588 - DNA, 80 bp, synthetic construct
  source 1..80: mol_type = other DNA
gaaaatagttcacataaatggaaatttttcgaaatgtttaaaggtagtagtcagggtgatttttctaatagacggacttt

SEQ ID NO: 88589 - DNA, 80 bp, synthetic construct
  source 1..80: mol_type = other DNA
gtggaaaggtatggacatttcatggtgaaacaccaagagctactactgatagttcgaatactgcggatttaaataatatt

SEQ ID NO: 88590 - DNA, 80 bp, synthetic construct
  source 1..80: mol_type = other DNA
aatttacgcctgtaaatcagcgaaagaattcgcttcgttacaagacgatcttaccgtattacgttacgctaatgaaattg

SEQ ID NO: 88591 - DNA, 80 bp, synthetic construct
  source 1..80: mol_type = other DNA
aacgttatataaataaagtatatagtataacatatgcagatgatccaaattatttcataggtattagatttagacacatc

SEQ ID NO: 88592 - DNA, 80 bp, synthetic construct
  source 1..80: mol_type = other DNA
atgcggcgactgatgacgacttaataatagaatacatttattctgaagtactggacttccaaaatttcatgctaaagaaa

SEQ ID NO: 88593 - DNA, 80 bp, synthetic construct
  source 1..80: mol_type = other DNA
ttatgttgcataccattgaacccaattcatcttcttttgtaccgcaccttggtagtgtttccttcaaagagaatgttagt

SEQ ID NO: 88594 - DNA, 80 bp, synthetic construct
  source 1..80: mol_type = other DNA
gtggctggtgattatgtctgcactatacagtatacttcacccccttctgacccccataattctaatgctgatgttgattt

SEQ ID NO: 88595 - DNA, 80 bp, synthetic construct
  source 1..80: mol_type = other DNA
aggctattgtctatttcatgtcacgtgttcctggctggaatagaactgataggctcaatctggtcccttgcctactgccc

SEQ ID NO: 88596 - DNA, 80 bp, synthetic construct
  source 1..80: mol_type = other DNA
caagagttcattgggcactttgtcagtgaacaggcccccgcgattggtgaggccgctctcctacattatgttgacccaga

SEQ ID NO: 88597 - DNA, 80 bp, synthetic construct
  source 1..80: mol_type = other DNA
tactaatcggaacctgggtgaattcaaattatatcctgagggctttatcacttgtgtccccaatggtactggccctcaac

SEQ ID NO: 88598 - DNA, 80 bp, synthetic construct
  source 1..80: mol_type = other DNA
cttgggtgtcaagattttatcaactcaagcctgtgggaacggcttcttcagccagaggtaggcttggcatcaggagataa

SEQ ID NO: 88599 - DNA, 80 bp, synthetic construct
  source 1..80: mol_type = other DNA
cccattagaggatgtcaggaacacattgtatcacaacaatgataaccagccgacgatgcgtttactgtgcatgctgtaca

SEQ ID NO: 88600 - DNA, 80 bp, synthetic construct
  source 1..80: mol_type = other DNA
gaatctttccaactctcgagttcctagtttaattcaaagcatggtcctctctaatgatcatgcacaaactgtccagtttc

SEQ ID NO: 88601 - DNA, 80 bp, synthetic construct
  source 1..80: mol_type = other DNA
agaatggtaggtgcaccactgacggtcacctgctagggactacacctgtttcttctggtcagctcatgaaatttagaggt

SEQ ID NO: 88602 - DNA, 80 bp, synthetic construct
  source 1..80: mol_type = other DNA
agctggattccctgatcttgggaagtgtgattggcatattgaaatgagtctctaccaggataataatcatgcaaacccca

SEQ ID NO: 88603 - DNA, 80 bp, synthetic construct
  source 1..80: mol_type = other DNA
acatgtttgtgttactggagatgatagaaatgcaactgccagtatcatctatggtggtatacttgttgatagcattggtt

SEQ ID NO: 88604 - DNA, 80 bp, synthetic construct
  source 1..80: mol_type = other DNA
cgttcaagttaccaatgacgaaagaaattaaccaaaagaatgtgagaacgctaaaagaatgggaaaatgggaaaaatcct

SEQ ID NO: 88605 - DNA, 80 bp, synthetic construct
  source 1..80: mol_type = other DNA
cagggacttcctacattaacgtccgtgctgaccgaatggataaaccgcataaaggctgagcaacgcgtattacttacttg

SEQ ID NO: 88606 - DNA, 80 bp, synthetic construct
  source 1..80: mol_type = other DNA
cgtgctgaccgaatggataaaccgcataaaggctgagcaacgcgtattacttacttgtggcttctaagcagtaatattat

SEQ ID NO: 88607 - DNA, 80 bp, synthetic construct
  source 1..80: mol_type = other DNA
ggatgcttgttttcactatagaaggataacaaaactaaacagggaattactgagaattggggcaaactcagtatggactc

SEQ ID NO: 88608 - DNA, 80 bp, synthetic construct
  source 1..80: mol_type = other DNA
agaagaagggaaactatctgaagagtatgaacttctaatctcggattctgaagatgatgactagtaattaaatcaactat

SEQ ID NO: 88609 - DNA, 80 bp, synthetic construct
  source 1..80: mol_type = other DNA
cagtctgctcgaataaaattaaagggtggtgtattgaatgctgtcaactaactgaattgactttttgtcatggatgttcg

SEQ ID NO: 88610 - DNA, 80 bp, synthetic construct
  source 1..80: mol_type = other DNA
aactgtgattggaccttcatggtggtcgttgaaaccataatactcctgatggaactatttggggtgttttgggatccccc

SEQ ID NO: 88611 - DNA, 80 bp, synthetic construct
  source 1..80: mol_type = other DNA
aactgtgattggaccttcatgggggtcgttgaaaccataatactcctgatggaactatttggggtgttttgggatccccc

SEQ ID NO: 88612 - DNA, 80 bp, synthetic construct
  source 1..80: mol_type = other DNA
tcaggggtagttcaccaacccccctgaaagagtcccccaaacaacagagggagcgggctccaaggagtgtggctgagacc

SEQ ID NO: 88613 - DNA, 80 bp, synthetic construct
  source 1..80: mol_type = other DNA
ggggatacaggagctcttaaggattgttttaagagtgatttctcccatctaaaaatggaccttgcgccccaaggtggatt

SEQ ID NO: 88614 - DNA, 80 bp, synthetic construct
  source 1..80: mol_type = other DNA
gggcacgatgcggcccaccacattaaaccgactactaatacaggcagtggccctcaccatggagcggcaagatgaattcc

SEQ ID NO: 88615 - DNA, 80 bp, synthetic construct
  source 1..80: mol_type = other DNA
tggcaatgctggggaagaagctgagaaacgtggactcagtccatggcctcaagaatgcactcgctgggtacactataacc

SEQ ID NO: 88616 - DNA, 80 bp, synthetic construct
  source 1..80: mol_type = other DNA
ccaagaaggggaggggcagacgcaccaactacaatgcattctcacgaaggtggctcagtgatgaagagtatgaggagtat

SEQ ID NO: 88617 - DNA, 80 bp, synthetic construct
  source 1..80: mol_type = other DNA
ccaagaaggggaggggcagacgcaccaactacaatgcattctcacgaagggggctcagtgatgaagagtatgaggagtat

SEQ ID NO: 88618 - DNA, 80 bp, synthetic construct
  source 1..80: mol_type = other DNA
tggggcttttgggttagccctacagttttcataactaccacacatgtcatcccttcaaatgttagggaattctttggtga

SEQ ID NO: 88619 - DNA, 80 bp, synthetic construct
  source 1..80: mol_type = other DNA
tggtgtgtgctgtccaagcaggggaaggagagactactctagagggtggtgataaagggcattatgctggccatgagata

SEQ ID NO: 88620 - DNA, 80 bp, synthetic construct
  source 1..80: mol_type = other DNA
gggtgtatgagccagcatatcttggaggtcgcgaccctagggtaaagggcggtccttcactccaacaagtcctacgggat

SEQ ID NO: 88621 - DNA, 80 bp, synthetic construct
  source 1..80: mol_type = other DNA
tttgtaggggagctgggcgaacaggccgcccacgccaacaacatgtatgagcaggggaagtccatgaagccactctacac

SEQ ID NO: 88622 - DNA, 80 bp, synthetic construct
  source 1..80: mol_type = other DNA
actcctatggggtgctgacttatccacagtgattagggcggcgagagcttttggccccttttgtgatgccataaaatccc

SEQ ID NO: 88623 - DNA, 80 bp, synthetic construct
  source 1..80: mol_type = other DNA
tccaaggatgctgcagggtttcaggggcgtctggatagagcctccattgaaagacagctctggtggacacgtggcccgaa

SEQ ID NO: 88624 - DNA, 80 bp, synthetic construct
  source 1..80: mol_type = other DNA
tggggaggttatcttgtacttctactccacttttccaggttctggccaaccagggcaactccaagtcccatgtctattac

SEQ ID NO: 88625 - DNA, 80 bp, synthetic construct
  source 1..80: mol_type = other DNA
cattgctggggaggctgccctcctccattatgtggatcctgatacagggcgaaacttggtggagttcaagctttaccccg

SEQ ID NO: 88626 - DNA, 80 bp, synthetic construct
  source 1..80: mol_type = other DNA
cattgctggggaggctgccctcctccattatgtggatcctgatacagggcgaaacttgggggagttcaagctttaccccg

SEQ ID NO: 88627 - DNA, 80 bp, synthetic construct
  source 1..80: mol_type = other DNA
ccggcagcatactcggggcaggcatacaggctggcgctgaggccggcctccaggcccaacgataccaacaggacctacaa

SEQ ID NO: 88628 - DNA, 80 bp, synthetic construct
  source 1..80: mol_type = other DNA
aagatgccagtgggcaccatattcaaatttaatttaattaggttgattaattaagatttggcttaattggtgttaaaaaa

SEQ ID NO: 88629 - DNA, 80 bp, synthetic construct
  source 1..80: mol_type = other DNA
gacttctgttgccatgttatgggggtgcaggacacctggctagaacggcggcttatcacatctggccgcttcaaccaccc

SEQ ID NO: 88630 - DNA, 80 bp, synthetic construct
  source 1..80: mol_type = other DNA
cggggcccggcctaaacagccggccccgagggacaaaccaccaaaacccccacgaccacctaccccagagctggtcaaaa

SEQ ID NO: 88631 - DNA, 80 bp, synthetic construct
  source 1..80: mol_type = other DNA
cccttttggcaagaattgcagctgctcgttccctcgtgcatagagccaaagaagaactatccagcaggccaaggccagtt

SEQ ID NO: 88632 - DNA, 80 bp, synthetic construct
  source 1..80: mol_type = other DNA
tgtggagaagtgccttcagtcctgacttttcacacatcaaaatgcaacttgctccccaaggtggcttcgacaagaacggc

SEQ ID NO: 88633 - DNA, 80 bp, synthetic construct
  source 1..80: mol_type = other DNA
aacttcgaccgcaacaaaatacatgccttcagacagctcgctgccgaaaacaagtatggattggtggacacaatgcgggt

SEQ ID NO: 88634 - DNA, 80 bp, synthetic construct
  source 1..80: mol_type = other DNA
tgggggccaactcaagggagttaagaccatgccagaacttaagcaagctctcaaaaacatttcaatcagaaggtgccaga

SEQ ID NO: 88635 - DNA, 80 bp, synthetic construct
  source 1..80: mol_type = other DNA
ctaacggagaggatgaaccagttatttcgtacagcgccaaggatggtgtgtctggcttgcctgaactcacaacagttagg

SEQ ID NO: 88636 - DNA, 80 bp, synthetic construct
  source 1..80: mol_type = other DNA
tagtctatgggggttgcacctatatactggaatctgatggcaaaggcaatgtgaaggtcgaaaaggtgcaaagcactacg

SEQ ID NO: 88637 - DNA, 80 bp, synthetic construct
  source 1..80: mol_type = other DNA
gtgcagaccaacaatgagatggccggcgcactacaccacctaaggtgtgccaggatcagatactacgtcaagtgtgtaca

SEQ ID NO: 88638 - DNA, 80 bp, synthetic construct
  source 1..80: mol_type = other DNA
gtgtacaggaatccatctattccatcctccaaatcgctggggctgcatttgtgacaacgcgcattgtcaagcgcatgaac

SEQ ID NO: 88639 - DNA, 80 bp, synthetic construct
  source 1..80: mol_type = other DNA
caaaccaccggtgggagacgcagacgagacggccactgaagaaggctgcccaaagcccaaagatgacgaagagttcatcg

SEQ ID NO: 88640 - DNA, 80 bp, synthetic construct
  source 1..80: mol_type = other DNA
tctcgtccgatgatattaaagctgagggcaagaaggggaagaacaagtctggccgaggcaagaaacacacggccttctca

SEQ ID NO: 88641 - DNA, 80 bp, synthetic construct
  source 1..80: mol_type = other DNA
ggctcagagatcagaaagcggaacccagatgacttcaaacccaaaggaaaattgtgggccgacgatgacaggagcgtcga

SEQ ID NO: 88642 - DNA, 80 bp, synthetic construct
  source 1..80: mol_type = other DNA
caaccggatgtgcactctacggcgttcagtgtccccccactcgaccagagggagaatagggacgccaaagaaccactaac

SEQ ID NO: 88643 - DNA, 80 bp, synthetic construct
  source 1..80: mol_type = other DNA
gggtctcccccagcttattcatcacatcaacccatgtcatacccccgggcgcccaggagttctttggtgtgtccgtcaaa

SEQ ID NO: 88644 - DNA, 80 bp, synthetic construct
  source 1..80: mol_type = other DNA
catggttgggggccaaatgggcatgctactaacagggtccaacgctaagagcatggacttgggaacaacaccaggtgact

SEQ ID NO: 88645 - DNA, 80 bp, synthetic construct
  source 1..80: mol_type = other DNA
ggcaaaccacccaagccaaatgtattagaagcagcaaagaagaccatcataaatgtgttggagcagacaatagacccccc

SEQ ID NO: 88646 - DNA, 80 bp, synthetic construct
  source 1..80: mol_type = other DNA
gatggggagatttatcattatggcctgtacgtggaacgagggctagtgcttggtgtacacaaacccccagcggcgattag

SEQ ID NO: 88647 - DNA, 80 bp, synthetic construct
  source 1..80: mol_type = other DNA
ggggttcagacctggcaacaatgatccggtgcgcacgggcgtttggggggctgatggacgaacttaaggcccactgcatc

SEQ ID NO: 88648 - DNA, 80 bp, synthetic construct
  source 1..80: mol_type = other DNA
ggggttcagacctggcaacaatgatccggtgcgcacgggcgtttggagggctgatggacgaacttaaggcccactgcatc

SEQ ID NO: 88649 - DNA, 80 bp, synthetic construct
  source 1..80: mol_type = other DNA
agatagttgcagaagaccttttgtcccccagtgtgatggatgtcggtgacttcaagatatccatcaatgaaggactgcct

SEQ ID NO: 88650 - DNA, 80 bp, synthetic construct
  source 1..80: mol_type = other DNA
tcgggagtgccgtgcacatcgcagtggaattccattgcccactggctcctcaccctctgtgcactttccgaggtgacaga

SEQ ID NO: 88651 - DNA, 80 bp, synthetic construct
  source 1..80: mol_type = other DNA
aaactgaaggacctttaatcatttctgaagacttaaatggcctgaccttcttacggaggactgtgactcgagacccagct

SEQ ID NO: 88652 - DNA, 80 bp, synthetic construct
  source 1..80: mol_type = other DNA
gtcgctcttgggcgaagcagccctacatggcccatcattctacagtaaaatcagcaaattggtcatcacagagttaaagg

SEQ ID NO: 88653 - DNA, 80 bp, synthetic construct
  source 1..80: mol_type = other DNA
gttgagatgacacccttgtctctgtactggagaccagtgtacaccccgcaatacctcatagcccctgacacgctcaaaaa

SEQ ID NO: 88654 - DNA, 80 bp, synthetic construct
  source 1..80: mol_type = other DNA
ggggcttcaatagccgccccactcaccggccaaaacaatgttatagacccctggattagattaaattttgtgcaggctcc

SEQ ID NO: 88655 - DNA, 80 bp, synthetic construct
  source 1..80: mol_type = other DNA
ctcgcctggggaaatcctactaaatttggaattgggccctgaactgaatccatacctggcacacctttctagaatgtaca

SEQ ID NO: 88656 - DNA, 80 bp, synthetic construct
  source 1..80: mol_type = other DNA
caggtggggttgaggtgcaagtactactggctgggaacgcgttcacagctggaaaactggtgtttgccgcagttccccct

SEQ ID NO: 88657 - DNA, 80 bp, synthetic construct
  source 1..80: mol_type = other DNA
ccatcttgactataggggagctaaccaattccaggttccctgcgcccatagatgagctctacaccagtcccaatgagagt

SEQ ID NO: 88658 - DNA, 80 bp, synthetic construct
  source 1..80: mol_type = other DNA
ggagttgcagggcacgactcagctcctccccacggcgatctgctcgttcaggggtcgaatcaaccagaaggtaagtggag

SEQ ID NO: 88659 - DNA, 80 bp, synthetic construct
  source 1..80: mol_type = other DNA
agaaccatgtctggaatatgcaggtcaccaacaccaacggaaccccttttgatccaacagaagatgtcccggcccctcta

SEQ ID NO: 88660 - DNA, 80 bp, synthetic construct
  source 1..80: mol_type = other DNA
ttgcccccacctttcctggtgaacaaattctcttctttagatcccacattcctcttaaaggaggtgtagcagacccagtt

SEQ ID NO: 88661 - DNA, 80 bp, synthetic construct
  source 1..80: mol_type = other DNA
ggcttgctggtgacatagtcaccaacagcgttggctcacttgtgaacgccggggctaatgcaataaatcaaaaagtagac

SEQ ID NO: 88662 - DNA, 80 bp, synthetic construct
  source 1..80: mol_type = other DNA
gaggggcgctgcacacagcatatgtgacgcccccctctagtagggcttctagtaatggcacagtctcaaccgtgccaaaa

SEQ ID NO: 88663 - DNA, 80 bp, synthetic construct
  source 1..80: mol_type = other DNA
ggggagtcacaagcttagtgaaaagatgatcttttcttcctttcttttgaaaatttctgtcttttaaaaaaaaaaaaaaa

SEQ ID NO: 88664 - DNA, 80 bp, synthetic construct
  source 1..80: mol_type = other DNA
tccagatgaggggacgaccggagttgaatctgcagtgcttaggggattcttgattctaggcaaagaggataaaagatatg

SEQ ID NO: 88665 - DNA, 80 bp, synthetic construct
  source 1..80: mol_type = other DNA
aggggcaaggttgtggttgaaagggtacaaaacgcaacagttcaaaccaacaatgaacttgtaggggcgctccaccacct

SEQ ID NO: 88666 - DNA, 80 bp, synthetic construct
  source 1..80: mol_type = other DNA
gacaacaggggagctgatgcctcttgcagttagaatggggactcatgccacaatgaaaatccaaggtagaacggtgggtg

SEQ ID NO: 88667 - DNA, 80 bp, synthetic construct
  source 1..80: mol_type = other DNA
gacaacaggggagctgatgcctcttgcagttagaatggggactcatgccacaatgaaaatccaaggtagaacggtgtgtg

SEQ ID NO: 88668 - DNA, 80 bp, synthetic construct
  source 1..80: mol_type = other DNA
ggggttctgacctctccacaatgattcgatgcgccagagcatttggtggtctcatggatgaattcaaagcaaattgtatc

SEQ ID NO: 88669 - DNA, 80 bp, synthetic construct
  source 1..80: mol_type = other DNA
ttgagcgggggcatgtgctcggagtacacaagccacctgctgcaataagccttgccaaaattgaaataacaccgctgtct

SEQ ID NO: 88670 - DNA, 80 bp, synthetic construct
  source 1..80: mol_type = other DNA
accatctggcgtgccttgcacctcacaatggaattctattgcccactggttacttaccttgtgtgccctttctgaagtga

SEQ ID NO: 88671 - DNA, 80 bp, synthetic construct
  source 1..80: mol_type = other DNA
ctgaggggccgttggtgattagtgaagacctgaatgggttgactttcctccgccgaacagtcacccgtgatccagcaggt

SEQ ID NO: 88672 - DNA, 80 bp, synthetic construct
  source 1..80: mol_type = other DNA
ctattcaggggagcttaccttgaatatgaatcttgcccccccagttgctccaaattttcctggtgaacaattgttattct

SEQ ID NO: 88673 - DNA, 80 bp, synthetic construct
  source 1..80: mol_type = other DNA
gattggcaggcgacatgctcacgtcatctgtgggctcccttgtgaacgcaggggcaaacgccatcaaccaaaagatagac

SEQ ID NO: 88674 - DNA, 80 bp, synthetic construct
  source 1..80: mol_type = other DNA
taaaacaggaggttttggccgcaggcggcttttcccccactgatgcagcaaggggagccattggtgcacccatgacaaag

SEQ ID NO: 88675 - DNA, 80 bp, synthetic construct
  source 1..80: mol_type = other DNA
taaaacagggggttttggccgcaggcggcttttcccccactgatgcagcaaggggagccattggtgcacccatgacaaag

SEQ ID NO: 88676 - DNA, 80 bp, synthetic construct
  source 1..80: mol_type = other DNA
gaggggggagtcacgtgtttagtgaaaagaaataattggctataatttgatttctttctaaattcggctaatttgtgtct

SEQ ID NO: 88677 - DNA, 80 bp, synthetic construct
  source 1..80: mol_type = other DNA
caatccggaatatcgggtcagatataatttatatgatgaaatagagcaaattggatcagaaaaaactcaaaacgtaactg

SEQ ID NO: 88678 - DNA, 80 bp, synthetic construct
  source 1..80: mol_type = other DNA
ggaaagaaatgcaatataacagatatattataattaggtttagatttggtaatagaaatatttttaaaagggggaggggg

SEQ ID NO: 88679 - DNA, 80 bp, synthetic construct
  source 1..80: mol_type = other DNA
ttagatttggtaatagaaatatttttaaaagggggaggggggggggggttttctttggggagggccgcaacacaaacttt

SEQ ID NO: 88680 - DNA, 80 bp, synthetic construct
  source 1..80: mol_type = other DNA
gggtgcctaacaactgatgccaaccccctttgtataaaaaagcatccggcagaaaaatcaacccctcacagaaaaatgta

SEQ ID NO: 88681 - DNA, 80 bp, synthetic construct
  source 1..80: mol_type = other DNA
tatgggagtcgaccctcaattgaagggggacaacaaacacatgcacgtttaaaaataggaactcccccccttttgagggc

SEQ ID NO: 88682 - DNA, 80 bp, synthetic construct
  source 1..80: mol_type = other DNA
aaaagggaacccttttccttcttccggggctgagaacataattattttttccaaatatccggtgaccggggggacgggtc

SEQ ID NO: 88683 - DNA, 80 bp, synthetic construct
  source 1..80: mol_type = other DNA
ttccaaatatccggtgaccggggggacgggtcccaaataaataatagaaaggaaccggtataaaggaaaaaatggcgccc

SEQ ID NO: 88684 - DNA, 80 bp, synthetic construct
  source 1..80: mol_type = other DNA
ccaaataaataatagaaaggaaccggtataaaggaaaaaatggcgccctctttttttttttaaaaaaatctaaactataa

SEQ ID NO: 88685 - DNA, 80 bp, synthetic construct
  source 1..80: mol_type = other DNA
aattactacagattttcccaaaagtgcaagagaggagagtttttttttttttcttcactaacatataaaaaagaggatcc

SEQ ID NO: 88686 - DNA, 80 bp, synthetic construct
  source 1..80: mol_type = other DNA
ccggcccctagagaaaaaaaaaaatgtccgacggtagaatttttactaagtgggacagattattaatacctatcacgctc

SEQ ID NO: 88687 - DNA, 80 bp, synthetic construct
  source 1..80: mol_type = other DNA
tctcaggtccctacaatgctcacaccccctgcccccgagcccgctaggccgcccagccctgctggacttccgccccccgt

SEQ ID NO: 88688 - DNA, 80 bp, synthetic construct
  source 1..80: mol_type = other DNA
attcatcacctcctgttgatgctgatatgcatgcggctgttaataccataccgccagttactatggagcaacctcactct

SEQ ID NO: 88689 - DNA, 80 bp, synthetic construct
  source 1..80: mol_type = other DNA
ccagcttctgagccggcgttacctcctccggccccgattgatagtgctattggtccggccataagcgcccctgtggcacc

SEQ ID NO: 88690 - DNA, 80 bp, synthetic construct
  source 1..80: mol_type = other DNA
ttacggcgggtgtccccggctccggcaagtcccggtcgattcagcagggtgaggtagatgtggtggtagtaccaacccgt

SEQ ID NO: 88691 - DNA, 80 bp, synthetic construct
  source 1..80: mol_type = other DNA
tgtgttttatgcctttataaataatgtaattacagagaacgtatttatacaacctcctttcaaattgaagacattgccca

SEQ ID NO: 88692 - DNA, 80 bp, synthetic construct
  source 1..80: mol_type = other DNA
gacattcttaccaacagacttcgaggttaaggattcaataattacatcatatgatggctgtttaggcatattcggactat

SEQ ID NO: 88693 - DNA, 80 bp, synthetic construct
  source 1..80: mol_type = other DNA
ctcgggccgacgtggtatccgtaccacctgcccctgagcctattaggccgtccggtctaattgagcccatacctcccgtg

SEQ ID NO: 88694 - DNA, 80 bp, synthetic construct
  source 1..80: mol_type = other DNA
cgtaagccaccagtaccgccgcccccccgcactcgccgtctcctttacacataccctgatggcgctaaagtatatgcggg

SEQ ID NO: 88695 - DNA, 80 bp, synthetic construct
  source 1..80: mol_type = other DNA
tcccaggttgatgcggcgcctacaccccccgctcccgagtccgttgggttgcccagccccactgaacctcaaccccttgt

SEQ ID NO: 88696 - DNA, 80 bp, synthetic construct
  source 1..80: mol_type = other DNA
gcgtaagccaccggcgttgccgccttctcgcacccgccgtcttctctacacctatcctgacggtgccagggtgtatgcgg

SEQ ID NO: 88697 - DNA, 80 bp, synthetic construct
  source 1..80: mol_type = other DNA
gttacagctgctaccccgaggttgccccatcccaccccacctgttagtgatatctgggtgttaccgtcgccatcggaaga

SEQ ID NO: 88698 - DNA, 80 bp, synthetic construct
  source 1..80: mol_type = other DNA
gtctcaggttgatgcagcatctgtgccccctgcccctgagcctgttggattgcccgatcccattgtgctaaccccccccc

SEQ ID NO: 88699 - DNA, 80 bp, synthetic construct
  source 1..80: mol_type = other DNA
cccccccccctgtgcgtaagccgccaacacccccgccttcacgcactcgtcgtctcctctatacctatcctgacggcgct

SEQ ID NO: 88700 - DNA, 80 bp, synthetic construct
  source 1..80: mol_type = other DNA
tatcccgcacgacatcgccgcccgagcggctcggctaacagctactgtcgagctcgttgcaggcccagatcgtctggagt

SEQ ID NO: 88701 - DNA, 80 bp, synthetic construct
  source 1..80: mol_type = other DNA
caccggttgctaccccagggtcgcccagccccaccccaccagttagtgatatttgggtgttaccaccgtcctcggaggtg

SEQ ID NO: 88702 - DNA, 80 bp, synthetic construct
  source 1..80: mol_type = other DNA
tttcaggttgacgcagtacttgtaccccctgcccccgagcctgctaggttgcccagccctgctggactcccgccccccgt

SEQ ID NO: 88703 - DNA, 80 bp, synthetic construct
  source 1..80: mol_type = other DNA
gcgtaagccgccggcactgccgccttctcgcacccgccgtctcctttatacctatcctgacggcgctaaggtgtatgcgg

SEQ ID NO: 88704 - DNA, 80 bp, synthetic construct
  source 1..80: mol_type = other DNA
caccggccattgccccagggtcaccactccctaccccacccgtcagtgatatttgggtgttaccatcgtcccccgaagag

SEQ ID NO: 88705 - DNA, 80 bp, synthetic construct
  source 1..80: mol_type = other DNA
cctcagattgacgttgcgcctgtatcaccagcccctgagcccgttcggtcgtccagcctcaccgaacccgcaccccccgt

SEQ ID NO: 88706 - DNA, 80 bp, synthetic construct
  source 1..80: mol_type = other DNA
gcgtaagccaccagcaccgccaccttcccgcacccgccgtctcctttacacatatcctgacggcgctaaggtatatgcag

SEQ ID NO: 88707 - DNA, 80 bp, synthetic construct
  source 1..80: mol_type = other DNA
ccaaggttatcctgccccaccccaccagttagtgatatttgggtgttgccaccgccctcagaagaatttcagtttgacgc

SEQ ID NO: 88708 - DNA, 80 bp, synthetic construct
  source 1..80: mol_type = other DNA
agtgatatttgggtgttgccaccgccctcagaagaatttcagtttgacgcggcgctcgttccccctgcccccgagcccgt

SEQ ID NO: 88709 - DNA, 80 bp, synthetic construct
  source 1..80: mol_type = other DNA
ggcgctcgttccccctgcccccgagcccgtcggattgcccagccctactgagccccctccccccgtgcgtaagccaccgg

SEQ ID NO: 88710 - DNA, 80 bp, synthetic construct
  source 1..80: mol_type = other DNA
ccggttgctgccccagggtcgccttaccccaccccaccggtcagtgatatttgggtgttaccgccgcctttagaagagcc

SEQ ID NO: 88711 - DNA, 80 bp, synthetic construct
  source 1..80: mol_type = other DNA
ccaggtggaagcgccgcttgcgcctcccgcccccgagcctgttaggttgcctagccctactaaacctaacccccccgtgc

SEQ ID NO: 88712 - DNA, 80 bp, synthetic construct
  source 1..80: mol_type = other DNA
ataagccaccggcaccgctgccttctcgcactcgccgtcttctttacacttacccggacggtgctaaggtgtatgcgggg

SEQ ID NO: 88713 - DNA, 80 bp, synthetic construct
  source 1..80: mol_type = other DNA
ccagggttgacccattctactccacctgttagtgacatctgggtgctaccaccgccctcagaggagtctcaggccgacgc

SEQ ID NO: 88714 - DNA, 80 bp, synthetic construct
  source 1..80: mol_type = other DNA
ggcacccgtaccacctgcccctgagcccgttaggccgcccagcactgccgaatctataccccccgtgcgtaagctgccag

SEQ ID NO: 88715 - DNA, 80 bp, synthetic construct
  source 1..80: mol_type = other DNA
cactaccaccttctcgtacccgccgccttctttatacctatcccgacggcgccaaggtgtatgcggggtcactgtttgag

SEQ ID NO: 88716 - DNA, 80 bp, synthetic construct
  source 1..80: mol_type = other DNA
ctcaggttgatacggttcccgtaccacctgcccccgagcccgttgggtcgcccagccctgctgaacctctcccccctgtg

SEQ ID NO: 88717 - DNA, 80 bp, synthetic construct
  source 1..80: mol_type = other DNA
tctcaggttgatgcgacgcatgtgtctcccggccccgagcccgtaaggtcgcccagtcttgctcggccccctccccctgt

SEQ ID NO: 88718 - DNA, 80 bp, synthetic construct
  source 1..80: mol_type = other DNA
ctaccccgcccgtgcccatacctttgatgatttctgcccggaatgccgcacccttggtttgcagggttgcgctttccagt

SEQ ID NO: 88719 - DNA, 80 bp, synthetic construct
  source 1..80: mol_type = other DNA
ccgggattgtcccacctcactccacctgctagtgatatctgggtgctgccacccccttcagaggagtcccagatcgatgc

SEQ ID NO: 88720 - DNA, 80 bp, synthetic construct
  source 1..80: mol_type = other DNA
ggcacctgtgccacctgttcctaagactgttggattgcctagccccattgcacttgctcctcctcccccccctcctcccc

SEQ ID NO: 88721 - DNA, 80 bp, synthetic construct
  source 1..80: mol_type = other DNA
cgatctctgcggttggtgttctagccccacactcggccctcgccgttctagaggacaccgttgattaccccgcccgtgct

SEQ ID NO: 88722 - DNA, 80 bp, synthetic construct
  source 1..80: mol_type = other DNA
caccagctactgatccagggttgtcccgccttaccccacctgccagtgacatttgggtgttaccaccgccttcagaaggg

SEQ ID NO: 88723 - DNA, 80 bp, synthetic construct
  source 1..80: mol_type = other DNA
tcccaggttaatgcggcatctgtaccacccacccctgagccctttgggttgcccggccctattgcgcccataccacccgt

SEQ ID NO: 88724 - DNA, 80 bp, synthetic construct
  source 1..80: mol_type = other DNA
gcgtaagtcaccagcaccgccgccctctcgcacccgccgtctcctttacacatatcctgatggtgctaaggtgtacgcag

SEQ ID NO: 88725 - DNA, 80 bp, synthetic construct
  source 1..80: mol_type = other DNA
cacccaacatcttttacggtgatgcctacgaggaatcggtgtttgcagccgctgtgtccggggcagggacctgtatggtg

SEQ ID NO: 88726 - DNA, 80 bp, synthetic construct
  source 1..80: mol_type = other DNA
gtcacagttggtgcgcttgtcgctaatgaggggtggaatgcctccgaagatgcccttactgctgtaattactgcggccta

SEQ ID NO: 88727 - DNA, 80 bp, synthetic construct
  source 1..80: mol_type = other DNA
tcgttgcaggacgttcttgaagaaagtcgctggtaaattttgctgttttatgcggtggttagggcaagagtgtacctgct

SEQ ID NO: 88728 - DNA, 80 bp, synthetic construct
  source 1..80: mol_type = other DNA
tcttggagccagccgagggtttaattggtgatcaaggccatgacaacgaggcctatgagggctctgaggtcgacccggct

SEQ ID NO: 88729 - DNA, 80 bp, synthetic construct
  source 1..80: mol_type = other DNA
gaacctgcacaccttgatgtctcgggaacctatgccgtccatgggcaccagcttgaggccctttatagggcacttaatgt

SEQ ID NO: 88730 - DNA, 80 bp, synthetic construct
  source 1..80: mol_type = other DNA
cccacacgacattgccgcccgagcgtcccgattaacggccactgttgagcttgttgctagtccagaccgcttagagtgcc

SEQ ID NO: 88731 - DNA, 80 bp, synthetic construct
  source 1..80: mol_type = other DNA
gcaccgtgcttggaaataagaccttccgaacgacggttgtcgatggtgctcatcttgaagcgaacggccctgagcagtat

SEQ ID NO: 88732 - DNA, 80 bp, synthetic construct
  source 1..80: mol_type = other DNA
ccgccctgaggtactttggaatcaccctatccagcgggttatacataatgaattagaacagtactgccgggctcgagctg

SEQ ID NO: 88733 - DNA, 80 bp, synthetic construct
  source 1..80: mol_type = other DNA
gttttatcttttgacgcctcccgtcagtccatgggggccgggtcgcatagtctcacttacgagcttacccctgccggttt

SEQ ID NO: 88734 - DNA, 80 bp, synthetic construct
  source 1..80: mol_type = other DNA
acacgttaggatttcatccaatggtctggattgcattgctacattcccccctggcggagctcctagcgccgcgccggtgg

SEQ ID NO: 88735 - DNA, 80 bp, synthetic construct
  source 1..80: mol_type = other DNA
caccctgaggggttgctgggcatcttcccccctttctcccctgggcacatttgggagtctgccaaccctttttgcgtgga

SEQ ID NO: 88736 - DNA, 80 bp, synthetic construct
  source 1..80: mol_type = other DNA
cgactgccgccccagggttgcctcatccgaccccacctgctagtgacatttgggtattaccaccaccctcggaggagtcc

SEQ ID NO: 88737 - DNA, 80 bp, synthetic construct
  source 1..80: mol_type = other DNA
tgggtcgatgcggtgcctgtgcctcccgcctctgagccagctgggccgcctagccctattgcttctacacccccgccctc

SEQ ID NO: 88738 - DNA, 80 bp, synthetic construct
  source 1..80: mol_type = other DNA
tcgcactcgtcgtctcctctacacctactctgacggcgctaaggtgtatgcggggtccctatttgaatcagattgtgact

SEQ ID NO: 88739 - DNA, 80 bp, synthetic construct
  source 1..80: mol_type = other DNA
ggttagtcaatgcttctaacccgggtcaccgccccgggggtggcctctgccatgctttttaccaacggttcccagaggcg

SEQ ID NO: 88740 - DNA, 80 bp, synthetic construct
  source 1..80: mol_type = other DNA
ttttactcgactgaattcatcatgcgtgagggccttgcagcatacaccttgactccacgccctatcatccatgcagtggc

SEQ ID NO: 88741 - DNA, 80 bp, synthetic construct
  source 1..80: mol_type = other DNA
gccgctgcttggaggtcggagctcacccgaggtccattaatgacaaccccaacgttctgcaccggtgctttctcagacct

SEQ ID NO: 88742 - DNA, 80 bp, synthetic construct
  source 1..80: mol_type = other DNA
tcccgactatagggttgagcagaacccgaagaggcttgaggcagcgtaccgggaaacttgttcccgtcgtggcaccgctg

SEQ ID NO: 88743 - DNA, 80 bp, synthetic construct
  source 1..80: mol_type = other DNA
cctacccgcttttaggctctggcatataccgggtccctgttagcctcagtttcgatgcctgggaacgtaatcaccgcccc

SEQ ID NO: 88744 - DNA, 80 bp, synthetic construct
  source 1..80: mol_type = other DNA
ggcgatgagctttacttgactgaacccgccgcagcttggtttgaggctaacaagccgtcgcagccggcgctcaccataac

SEQ ID NO: 88745 - DNA, 80 bp, synthetic construct
  source 1..80: mol_type = other DNA
tgaggacacggctcgtacggccaacctggcattagagatcgatgccgcgacagaggttggccgtgcctgtgccggctgca

SEQ ID NO: 88746 - DNA, 80 bp, synthetic construct
  source 1..80: mol_type = other DNA
ctatcagtcctggggttgtgcactatcagttcaccgccggggttccgggttcgggcaagtcaaggtccatacgacaagtg

SEQ ID NO: 88747 - DNA, 80 bp, synthetic construct
  source 1..80: mol_type = other DNA
gatgttgacgtggtggttgtgcccacccgggagctccgtaatagctggcgtcgccggggttttgcagcttttacacctca

SEQ ID NO: 88748 - DNA, 80 bp, synthetic construct
  source 1..80: mol_type = other DNA
cacagcagcccgtgttactatcggtcgccgcgttgtgattgatgaggccccatctcttccaccgcacctgctgctattac

SEQ ID NO: 88749 - DNA, 80 bp, synthetic construct
  source 1..80: mol_type = other DNA
acatgcagcgggcctcctcggtccatctcctcggcgaccccaatcaaatccctgctattgattttgaacatgctggcctg

SEQ ID NO: 88750 - DNA, 80 bp, synthetic construct
  source 1..80: mol_type = other DNA
gttcctgcgatccgccccgagcttgcaccgacaagctggtggcacgtcacacatcgctgcccggccgatgtgtgcgagct

SEQ ID NO: 88751 - DNA, 80 bp, synthetic construct
  source 1..80: mol_type = other DNA
tatacgtggggcctaccctaaaatccagaccacgagccgtgtgctacggtccctgttttggaacgaaccggctatcggcc

SEQ ID NO: 88752 - DNA, 80 bp, synthetic construct
  source 1..80: mol_type = other DNA
gttggccgggatgtccagcgttggtactctgctcccactcgtggccctgcggccaattgccgccgctccgcattgcgcgg

SEQ ID NO: 88753 - DNA, 80 bp, synthetic construct
  source 1..80: mol_type = other DNA
agaagttggttttcacgcaggctgctaaggccgctaaccctggtgcgattacggtccacgaagcccagggtgccaccttc

SEQ ID NO: 88754 - DNA, 80 bp, synthetic construct
  source 1..80: mol_type = other DNA
acagagaccacaattatagccacggctgatgccaggggccttatccaatcatccagggctcatgccatagttgcacttac

SEQ ID NO: 88755 - DNA, 80 bp, synthetic construct
  source 1..80: mol_type = other DNA
tcgccacactgagaagtgtgtcattctggatgcccccggcctgctgcgtgaggtcggcatttcggacgtgattgtcaata

SEQ ID NO: 88756 - DNA, 80 bp, synthetic construct
  source 1..80: mol_type = other DNA
actttttccttgctggcgtggtggttggtcatcaccgcccctccgtggtaccccgtggtaaccctgatcagaacctcggg

SEQ ID NO: 88757 - DNA, 80 bp, synthetic construct
  source 1..80: mol_type = other DNA
accctacaggccttcccgccgtcctgccagattagtgcttaccatcagctggctgaggaactgggccaccgcccggcccc

SEQ ID NO: 88758 - DNA, 80 bp, synthetic construct
  source 1..80: mol_type = other DNA
tgtcgccgccgtcctgcccccttgcccagagctcgagcagggtctgctctacatgccacaagagcttactgtgtctgata

SEQ ID NO: 88759 - DNA, 80 bp, synthetic construct
  source 1..80: mol_type = other DNA
gtgtattggtttttgagctcacggatatagttcattgccgtatggccgccccaagccagcgaaaggctgttctctcaaca

SEQ ID NO: 88760 - DNA, 80 bp, synthetic construct
  source 1..80: mol_type = other DNA
cttgtggggaggtatggccgtaggacgaaattatatgaggcggcccattcagatgtccgtgagtccctagccaggttcat

SEQ ID NO: 88761 - DNA, 80 bp, synthetic construct
  source 1..80: mol_type = other DNA
tcccactattggacctgttcaggccaccacatgtgagttgtatgagttggttgaggccatggttgagaagggtcaggacg

SEQ ID NO: 88762 - DNA, 80 bp, synthetic construct
  source 1..80: mol_type = other DNA
gctctgccgtcctagagctcgatctttgcaatcgtgatgtttcgcgcatcacgtttttccagaaggactgcaacaagttt

SEQ ID NO: 88763 - DNA, 80 bp, synthetic construct
  source 1..80: mol_type = other DNA
ccttcctcccgttgatcgtacttactgctttgatgggttttctcgttgtgcttttgctgcagagaccggtgtggcccttt

SEQ ID NO: 88764 - DNA, 80 bp, synthetic construct
  source 1..80: mol_type = other DNA
acaactggtgagactatcgcccatggcaaggttggccagggtatatcggcctggagtaagaccttttgtgctctgtttgg

SEQ ID NO: 88765 - DNA, 80 bp, synthetic construct
  source 1..80: mol_type = other DNA
cccgtggttccgtgccatcgaaaaggaaatattggccctacttccgcctaatatcttttatggcgacgcttatgaggagt

SEQ ID NO: 88766 - DNA, 80 bp, synthetic construct
  source 1..80: mol_type = other DNA
cagtgtttgctgccgctgtgtctggggcggggtcatgtatggtatttgaaaatgacttttcagagtttgacagtacccag

SEQ ID NO: 88767 - DNA, 80 bp, synthetic construct
  source 1..80: mol_type = other DNA
gtatgccccaatggttaattaggttgtatcatttggttcggtctgcctggattttgcaggcgccgaaggagtctcttaag

SEQ ID NO: 88768 - DNA, 80 bp, synthetic construct
  source 1..80: mol_type = other DNA
actctctgcatgatctctggccggctgatgttgcggaggctatggcccgccatgggatgacacgcctatatgccgcacta

SEQ ID NO: 88769 - DNA, 80 bp, synthetic construct
  source 1..80: mol_type = other DNA
actaatttggttctctatgctgctccgttgaacccccttttgcctttgcaggatggcaccaacactcatattatggctac

SEQ ID NO: 88770 - DNA, 80 bp, synthetic construct
  source 1..80: mol_type = other DNA
cacctcccccctgaggtgctattaccacccggcacctaccacacaacctcgtacctcctgatccacgacggcgaccgcgc

SEQ ID NO: 88771 - DNA, 80 bp, synthetic construct
  source 1..80: mol_type = other DNA
aacacccgtgtatcccggtataccagtacagcccgccaccggctgcgccgcggtgctgatgggactgctgagctcaccac

SEQ ID NO: 88772 - DNA, 80 bp, synthetic construct
  source 1..80: mol_type = other DNA
cacagcggccacacgtttcatgaaggatctgcattttactggcactaacggcgttggtgaggtgggccgtggtattgccc

SEQ ID NO: 88773 - DNA, 80 bp, synthetic construct
  source 1..80: mol_type = other DNA
cgttttcagttcttcgtgccaatgatgtcttgtggctctctctcaccgccgcagagtatgaccagactacgtatgggtcg

SEQ ID NO: 88774 - DNA, 80 bp, synthetic construct
  source 1..80: mol_type = other DNA
tgttgtgacttacgagggtgacaccagtgcaggctataatcatgatgtctccatactccgtgcgtggattcgtaccacta

SEQ ID NO: 88775 - DNA, 80 bp, synthetic construct
  source 1..80: mol_type = other DNA
tccaccaaccctatgtatgtttctgacacagtcacgtttgttaatgttgccaccggtgcccaggctgtcgcccgctccct

SEQ ID NO: 88776 - DNA, 80 bp, synthetic construct
  source 1..80: mol_type = other DNA
tccgcgggaagttgtccttctgggaggctggcacgactaaggccggctacccgtacaattataacactactgctagtgat

SEQ ID NO: 88777 - DNA, 80 bp, synthetic construct
  source 1..80: mol_type = other DNA
caaattctgattgagaacgcggccggccaccgtgttgctatttccacctataccactagcttgggtgccggccctacttc

SEQ ID NO: 88778 - DNA, 80 bp, synthetic construct
  source 1..80: mol_type = other DNA
gtcggtgtactagccccgcactcggttcttgctattcttgaggacactgtagattaccccgctcgcgctcatactttcga

SEQ ID NO: 88779 - DNA, 80 bp, synthetic construct
  source 1..80: mol_type = other DNA
cttttgtgcccccttcgcagcttcctttggctttatttcttatttctgctttccgcgctccctggaaaaaaaaaaaaaaa

SEQ ID NO: 88780 - DNA, 80 bp, synthetic construct
  source 1..80: mol_type = other DNA
ctccccatctttgttcccgtcagcctgctccactaaatctactttccatgctgtcccggtccacatctgggaccgactca

SEQ ID NO: 88781 - DNA, 80 bp, synthetic construct
  source 1..80: mol_type = other DNA
ctcgggctgatgcagcatcagtgccccctgtctttgaacctgcaagattgcctagtcccgttgtgcctacccccccccca

SEQ ID NO: 88782 - DNA, 80 bp, synthetic construct
  source 1..80: mol_type = other DNA
attatcctgctcgtgctcatacttttgatgatttctgcccggagtgtcgtgccctaggtttgcagggctgtgcattccag

SEQ ID NO: 88783 - DNA, 80 bp, synthetic construct
  source 1..80: mol_type = other DNA
cataccctccgaccttgccgctcgtgcaagccgactcaccgctacggttgaggtttctgatgctgatggccgtcttacct

SEQ ID NO: 88784 - DNA, 80 bp, synthetic construct
  source 1..80: mol_type = other DNA
cctcgaggtgcatgtggtcgcggccgggcttgattgcaaggccgtctttccgtccggcgtagcggccccctctgctgccg

SEQ ID NO: 88785 - DNA, 80 bp, synthetic construct
  source 1..80: mol_type = other DNA
cttgtgccccgagcgtgccacctcctgtggaggctagtgtacctgtggtcttagataccacaccttcagagattatggag

SEQ ID NO: 88786 - DNA, 80 bp, synthetic construct
  source 1..80: mol_type = other DNA
caggaccaacccccggctcctgaaccggcggcacctctatccgattcagttgataatagtgttacccttaccccgcctag

SEQ ID NO: 88787 - DNA, 80 bp, synthetic construct
  source 1..80: mol_type = other DNA
tgcacccattgcacctccggcgtcggcgccgcctgtaacccatccatctgggtcccgccggcggttacttcatacttacc

SEQ ID NO: 88788 - DNA, 80 bp, synthetic construct
  source 1..80: mol_type = other DNA
cccggctctggtaagtccaggtcgattcaacagggggatgtagatgtgatagtggttccaacccgcgagctgcgtaattc

SEQ ID NO: 88789 - DNA, 80 bp, synthetic construct
  source 1..80: mol_type = other DNA
atggcgtcgccgcgggttcgcagcctatacaccccacacggcagcccgtgtgacccgtggccgcagggtcgtcatcgatg

SEQ ID NO: 88790 - DNA, 80 bp, synthetic construct
  source 1..80: mol_type = other DNA
cactattgataacaatgttgatacacttgatgccttcccgccctcttgccagtttagtgcttatcatcagctggccgagg

SEQ ID NO: 88791 - DNA, 80 bp, synthetic construct
  source 1..80: mol_type = other DNA
ccagggttgttatactctaccccgccagttagtgatatttgggttttaccaccgccttcagaaggatcccaggttgatgc

SEQ ID NO: 88792 - DNA, 80 bp, synthetic construct
  source 1..80: mol_type = other DNA
ggggctcgtgacccccactctcgagcccgttgggtcgcctagccccactgagccacctccccccgtgcgtaagccaccgg

SEQ ID NO: 88793 - DNA, 80 bp, synthetic construct
  source 1..80: mol_type = other DNA
cacagccgccctctcgcacacgccgtctcctctatacctatcctgacggcgccaaggtgtatgcggggtcattgtttgag

SEQ ID NO: 88794 - DNA, 80 bp, synthetic construct
  source 1..80: mol_type = other DNA
cataccttctgatcttgctgcgcgtgctggccggctcaccgccaccgttgaggtctctgacgctgatggccgccttgtct

SEQ ID NO: 88795 - DNA, 80 bp, synthetic construct
  source 1..80: mol_type = other DNA
gtaagactattataggcaataaaactttttcaacggtttttgccgatggggcccagctagaggccaatgggccggaacag

SEQ ID NO: 88796 - DNA, 80 bp, synthetic construct
  source 1..80: mol_type = other DNA
cctcgaggtttccattgtctccgctgggctcgattgtaaggccgtttttccgcccggagtcgctacaccctcagcccctg

SEQ ID NO: 88797 - DNA, 80 bp, synthetic construct
  source 1..80: mol_type = other DNA
gggaggtgtctgcattctgctcagccctatataggttcaaccgctgcgttcagcggcattcccttatcggtggcttgtgg

SEQ ID NO: 88798 - DNA, 80 bp, synthetic construct
  source 1..80: mol_type = other DNA
actcgccaccacctgctaacattaatttatctattgatgcccctctccctgtgatccctgtacagacccaattaccggcc

SEQ ID NO: 88799 - DNA, 80 bp, synthetic construct
  source 1..80: mol_type = other DNA
cctgagcaggcggcaccctccttggacttacccgaccgtggcgctagtcccactttgactggtgcccccatggcgccccc

SEQ ID NO: 88800 - DNA, 80 bp, synthetic construct
  source 1..80: mol_type = other DNA
ggctaaccggcctaccctacctgccttgaccattactgaggatgcggcacgcaccgcgaatctggccttggagctggacg

SEQ ID NO: 88801 - DNA, 80 bp, synthetic construct
  source 1..80: mol_type = other DNA
cggccaccgaggtcggccgtgcgtgtgttggctgccgcatcgagcctggtgtagtccactaccagtttacggccggtgtg

SEQ ID NO: 88802 - DNA, 80 bp, synthetic construct
  source 1..80: mol_type = other DNA
cctggctctggcaaatctcggtcgattcagcaaggggatgttgatgtggtagtggtgccgacccgcgagttacgcaactc

SEQ ID NO: 88803 - DNA, 80 bp, synthetic construct
  source 1..80: mol_type = other DNA
tacgttttatcattcgatttgactaagcaaactatggctgctggcccgcatagtcttagttataccctaacatctgaagg

SEQ ID NO: 88804 - DNA, 80 bp, synthetic construct
  source 1..80: mol_type = other DNA
ccttgaagtgcatattatttctgctgggctcgactgcaaggctgttttcccgtctggtgttgcaaccccctctgctcctg

SEQ ID NO: 88805 - DNA, 80 bp, synthetic construct
  source 1..80: mol_type = other DNA
agctgccaccttctggcgacattgatctatctgtagatgctgataccccgccatcggctccccctgcacagactcagccc

SEQ ID NO: 88806 - DNA, 80 bp, synthetic construct
  source 1..80: mol_type = other DNA
ccaactctcggtcatgtggcatccccgccagacttggttgatagtggtgctggccttgatttgactagcgcctctgtggt

SEQ ID NO: 88807 - DNA, 80 bp, synthetic construct
  source 1..80: mol_type = other DNA
gcccccggcgcccgtgcagcctgtaacccagcccgggcctcgccgacgactgcttcatacttatcccgacggttcgaagg

SEQ ID NO: 88808 - DNA, 80 bp, synthetic construct
  source 1..80: mol_type = other DNA
tgtcgattatcctgcccgcgctcacacttttgatgatttctgccctgagtgccgtgcacttggtcttcagggttgtgctt

SEQ ID NO: 88809 - DNA, 80 bp, synthetic construct
  source 1..80: mol_type = other DNA
caccggctgctaccccggggctgacctaccccaccccacctgttagtgacatttgggtgttacctccgccctcaattgag

SEQ ID NO: 88810 - DNA, 80 bp, synthetic construct
  source 1..80: mol_type = other DNA
tctcaggttgatgcggcgcccgtaccccttgcccctgtgcccgctgggtcgcccagccttactgaaccttcaccccccgt

SEQ ID NO: 88811 - DNA, 80 bp, synthetic construct
  source 1..80: mol_type = other DNA
gcgtaagccaccggcattaccgccttctcgttcccgccgtctcctttatgcctatcctgacggcgccaaggtgtacgcgg

SEQ ID NO: 88812 - DNA, 80 bp, synthetic construct
  source 1..80: mol_type = other DNA
ccttgaggtttccttcgtctctgctgggctcgattgtaagaccgtctttccacccggtgtcgccacaccctcagctcctg

SEQ ID NO: 88813 - DNA, 80 bp, synthetic construct
  source 1..80: mol_type = other DNA
acttgccaccatctgctaacaataatatgcctattgatgcccctccccctgtgacccctgtacagacccaatcaccggtc

SEQ ID NO: 88814 - DNA, 80 bp, synthetic construct
  source 1..80: mol_type = other DNA
tctgagcaggtggcaccccccttggatttacctgatcgtggtgctagtcccactttgaccagtgcttccatggcgccccc

SEQ ID NO: 88815 - DNA, 80 bp, synthetic construct
  source 1..80: mol_type = other DNA
gattacccagcccgtgctcacactttcgatgacttttgccctgagtgccgtgcgcttggccttcagggctgtgcttttca

SEQ ID NO: 88816 - DNA, 80 bp, synthetic construct
  source 1..80: mol_type = other DNA
ttctcccctcctgaggcagccgtccctgcaccggctgctgttccagtgccactcgaccctaccccaccagtcagtgatat

SEQ ID NO: 88817 - DNA, 80 bp, synthetic construct
  source 1..80: mol_type = other DNA
ttggatgttaccatcgctttcagaagagcttcaggttgacgcaatgcccgccccccccgcccccgaggtcgtcaggctgc

SEQ ID NO: 88818 - DNA, 80 bp, synthetic construct
  source 1..80: mol_type = other DNA
ccagccctgctaaaccccccccccccgtgcgtaagccacctgcactgctgccttcccgcacccgccgccttctttatacc

SEQ ID NO: 88819 - DNA, 80 bp, synthetic construct
  source 1..80: mol_type = other DNA
ctcaagctgatgcagcatctgtgccccctgcccctgagtttgctggattacccagccccattgtgtcacccccccccctc

SEQ ID NO: 88820 - DNA, 80 bp, synthetic construct
  source 1..80: mol_type = other DNA
ccagagttgccccatcctacaccacctgtcagtgatatctgggtgctaccaccgccctcagaagagtctcagatccatgc

SEQ ID NO: 88821 - DNA, 80 bp, synthetic construct
  source 1..80: mol_type = other DNA
tgcaccagaattacctgtccccgggcccgttgagctgcccagctctgttgaacctataccccccgtgcgtaagccgccag

SEQ ID NO: 88822 - DNA, 80 bp, synthetic construct
  source 1..80: mol_type = other DNA
ccatttctgcggtcggtgtattagccccgcacacggcccttgctattctcgaggatactgttgattaccccgcccgtgct

SEQ ID NO: 88823 - DNA, 80 bp, synthetic construct
  source 1..80: mol_type = other DNA
ccgtaccggatgctgccccggggtcgctctattccacctcaccggtcagtgatatttgggtgctaccaccgccctcagag

SEQ ID NO: 88824 - DNA, 80 bp, synthetic construct
  source 1..80: mol_type = other DNA
gaatcccaagttggtgtggtgcctgcatccgccgcccccgagcccgttaggctgcccagccctactgagccccccccccc

SEQ ID NO: 88825 - DNA, 80 bp, synthetic construct
  source 1..80: mol_type = other DNA
gcagaggaagttactgtgagcgtttctgggtcatatatcgttactggcagccagctgcagcccctctatcaggcgcttgg

SEQ ID NO: 88826 - DNA, 80 bp, synthetic construct
  source 1..80: mol_type = other DNA
catcccctctgatcttgccgcccaagcaggtcggcttactgctactgtcgaagtctcagatgccgacggctgcctcacct

SEQ ID NO: 88827 - DNA, 80 bp, synthetic construct
  source 1..80: mol_type = other DNA
cctcgaggtgcgtgtagtctctgctgggcttgactgccaggttgtttttccatctggtgttgcaactccctccgcccctg

SEQ ID NO: 88828 - DNA, 80 bp, synthetic construct
  source 1..80: mol_type = other DNA
gtgaggtgtcagccttctgttcagctttatacaggtttaaccgctgcgttcagcggcactctcttattgggggcctgtgg

SEQ ID NO: 88829 - DNA, 80 bp, synthetic construct
  source 1..80: mol_type = other DNA
tactatcccgaggggctaattggcttgttcccaccgtttgctcccggccatacttgggagtcaactaaccctttttgcgg

SEQ ID NO: 88830 - DNA, 80 bp, synthetic construct
  source 1..80: mol_type = other DNA
cccctgcctcaggttcactaccccctgcggagattgacccacctgtgaccgttgatgccccacccccaattatttcggca

SEQ ID NO: 88831 - DNA, 80 bp, synthetic construct
  source 1..80: mol_type = other DNA
ctgcctcagccctcagtttctgaacaggccacacccccattaggtctacctggtgacggtgccgttccggccccgtcgag

SEQ ID NO: 88832 - DNA, 80 bp, synthetic construct
  source 1..80: mol_type = other DNA
tgcccctggcgcgtccccgccaacagcgcgggccgtaacctccccatctgggccccgccggcgattactccatacctatc

SEQ ID NO: 88833 - DNA, 80 bp, synthetic construct
  source 1..80: mol_type = other DNA
ctgacggctcaaaggtgtatgctggatctctctttgagtccgagtgtacttggctagttaatgcatccaatcctggtcac

SEQ ID NO: 88834 - DNA, 80 bp, synthetic construct
  source 1..80: mol_type = other DNA
ttgggtgctaccaccgccctcagagggctctcaggccgacgcggcccctgtaccatctgtccctgagcccgttaggccgt

SEQ ID NO: 88835 - DNA, 80 bp, synthetic construct
  source 1..80: mol_type = other DNA
ccggtcctactgaatccataccccccatgcgtaagccgccagtgccgctgcctcctcgcacccgccgtctcctctacaca

SEQ ID NO: 88836 - DNA, 80 bp, synthetic construct
  source 1..80: mol_type = other DNA
ctgaggcggccgtccctgcaccggttactgctccagggttgccctactccactccgccggttagtgatatttgggtgtta

SEQ ID NO: 88837 - DNA, 80 bp, synthetic construct
  source 1..80: mol_type = other DNA
ccgccgccttcagaagagtctcaggttgatgcggtgcccgtaaccctcgcccctgaacccgttaggccgcccagccctat

SEQ ID NO: 88838 - DNA, 80 bp, synthetic construct
  source 1..80: mol_type = other DNA
tgaacctcctccccttgtgcgtaagccaccggcactgctgccttcccgcacccgccgtcttctttacacttaccccgacg

SEQ ID NO: 88839 - DNA, 80 bp, synthetic construct
  source 1..80: mol_type = other DNA
ccgtgcgtaagccatcaacacccccgccctctcgcactcgtcgtctcctctacacttactctgacggcgctaaggtgtat

SEQ ID NO: 88840 - DNA, 80 bp, synthetic construct
  source 1..80: mol_type = other DNA
gccttacctatgagcttacgcccgccggcttgcaggtcaggatttcatctaatggcctagactgtactgccgtattcccc

SEQ ID NO: 88841 - DNA, 80 bp, synthetic construct
  source 1..80: mol_type = other DNA
ccagattgatgcggcgcctgcaccccccgcccccgagtctgtcgggttgcccagccctactgaactcccccgccctgtgc

SEQ ID NO: 88842 - DNA, 80 bp, synthetic construct
  source 1..80: mol_type = other DNA
gtaagccaccagctcagccgccttctcgcactcgccgtcttctttacacctaccctgacggcgctaaggtgtatgcgggg

SEQ ID NO: 88843 - DNA, 80 bp, synthetic construct
  source 1..80: mol_type = other DNA
ctcaggtcgacgcggcatctgtaccaccagcccctgagcccgttgggtcgcctggccctactaaatttataccccccgtg

SEQ ID NO: 88844 - DNA, 80 bp, synthetic construct
  source 1..80: mol_type = other DNA
ttccgcatgatattgctgctcaagcggcccgattaacagccactgtcgagctcgctgcaggccccgaccgtctggagtgc

SEQ ID NO: 88845 - DNA, 80 bp, synthetic construct
  source 1..80: mol_type = other DNA
caccggctgctgcctcaggttcgccttatcccaccccaccggtcagtgatatttgggtgttaccaccgcctttagaggag

SEQ ID NO: 88846 - DNA, 80 bp, synthetic construct
  source 1..80: mol_type = other DNA
ccccaggtgggtgcgccgcttacacctcctgcccccgagcctgttaggttacccagccctgctaaacctaaccctcccgt

SEQ ID NO: 88847 - DNA, 80 bp, synthetic construct
  source 1..80: mol_type = other DNA
gcgtaagccatcggcgccgctgccttctcgcacccgccgtcttctttacacctaccctgacggtgctaaggtgtatgcag

SEQ ID NO: 88848 - DNA, 80 bp, synthetic construct
  source 1..80: mol_type = other DNA
ccaggtcgatgcggcatctgtgccccctgctcctgtgcccgttgggttacccagccccattgtgcttacccccccccccc

SEQ ID NO: 88849 - DNA, 80 bp, synthetic construct
  source 1..80: mol_type = other DNA
ccccccctcctgtgcgtaagccaccaacacctccgtcttcccgcgctcgccgcctcctctacacctatcctgacggcgca

SEQ ID NO: 88850 - DNA, 80 bp, synthetic construct
  source 1..80: mol_type = other DNA
ttgattaccctgctcgtgctcacacttttgacgatttctgcccggagtgccgcacccttggtttgcagggttgtgcattc

SEQ ID NO: 88851 - DNA, 80 bp, synthetic construct
  source 1..80: mol_type = other DNA
ctcaggttgatgcagcgtttgtaacccccgcccctgagcccgctgggctgcccagccctattgaaccacccccccctgtg

SEQ ID NO: 88852 - DNA, 80 bp, synthetic construct
  source 1..80: mol_type = other DNA
cgtaagccaccagtgtcgctgccttctcgcacccgccgtcttctttacacctatcccgacggcgccaaggtgtatgcggg

SEQ ID NO: 88853 - DNA, 80 bp, synthetic construct
  source 1..80: mol_type = other DNA
gttatggctaccacaccgaggttgccttgtcccactccacctgttagcgatatttgggtgctaccaccgccctcagaaga

SEQ ID NO: 88854 - DNA, 80 bp, synthetic construct
  source 1..80: mol_type = other DNA
gcctcaggttgacgcagcatctgtgctccctgcccctgagcctgctggattgcctggtcctattgtgcctaccccccccc

SEQ ID NO: 88855 - DNA, 80 bp, synthetic construct
  source 1..80: mol_type = other DNA
ctcccccccctttccttgcgcgtaagccaccaatatccccgccttcacgcacccgtcgtctcctctatacctatcctgac

SEQ ID NO: 88856 - DNA, 80 bp, synthetic construct
  source 1..80: mol_type = other DNA
tctgggtgctgccaccgccctcagaagagtctcaggttgttgcagcgatcgtaccccccgtccccgagcccgttgggttg

SEQ ID NO: 88857 - DNA, 80 bp, synthetic construct
  source 1..80: mol_type = other DNA
tccggccctactgaacctcttccccccgtgcgtaagccaccggtgtcactgccttctcgcactcgccgtcttctttacac

SEQ ID NO: 88858 - DNA, 80 bp, synthetic construct
  source 1..80: mol_type = other DNA
tcccaagtcgatgctgcatctgtgccccttgctcttgagctcgctggattacccagccccattatgcctaccccccctcc

SEQ ID NO: 88859 - DNA, 80 bp, synthetic construct
  source 1..80: mol_type = other DNA
caccggccgctgccccagggccgccccaccccaccccaccagtcagtgatatttgggtgttaccaccgcttttagtggag

SEQ ID NO: 88860 - DNA, 80 bp, synthetic construct
  source 1..80: mol_type = other DNA
tcccaggttgatgcggcacctgtactccccgtcctcgagcccgttaggctgcctagccctaccgaacctccaccccctgt

SEQ ID NO: 88861 - DNA, 80 bp, synthetic construct
  source 1..80: mol_type = other DNA
gcgtaagccaccggcatcgccgcctcctcgcacccgccgtcttctttatacctaccccgacggtgccaaggtgtatgcgg

SEQ ID NO: 88862 - DNA, 80 bp, synthetic construct
  source 1..80: mol_type = other DNA
caccagctgctgctccagggttgccttatcccaccccaccagtcagtgacatttgggtgctgccaccgccctcagaggag

SEQ ID NO: 88863 - DNA, 80 bp, synthetic construct
  source 1..80: mol_type = other DNA
cctcaagttgatgcggtgcctgtaccccccgcctctgagcctgttaggttacccagtcctactgaaccccctccccctgt

SEQ ID NO: 88864 - DNA, 80 bp, synthetic construct
  source 1..80: mol_type = other DNA
acatggggttgcccccgggtaccccctcttctgctagtgatgtctgggtgctcccgccgccctctgagaggtcggcggtt

SEQ ID NO: 88865 - DNA, 80 bp, synthetic construct
  source 1..80: mol_type = other DNA
ctcaggtcgatgtggcgtctgtgcctcccgtttctgaacccgccaggttgtccagtcctattgtccttaccccccccgtg

SEQ ID NO: 88866 - DNA, 80 bp, synthetic construct
  source 1..80: mol_type = other DNA
cgtaagccaccaacatccccaccctcccgcacccgtcgcctcctctacacctatcccgacggcgctaaggtgtatgcggg

SEQ ID NO: 88867 - DNA, 80 bp, synthetic construct
  source 1..80: mol_type = other DNA
accccgcccgcgcccatacttttgacgatttctgcccggagtgtcgtacccttggcctgcagggttgcgcattccagtct

SEQ ID NO: 88868 - DNA, 80 bp, synthetic construct
  source 1..80: mol_type = other DNA
tgcaggttagaatttcatccaatggcttagactgcacagccgtattccctcctggtggtgcccctagtgcggcgccgggg

SEQ ID NO: 88869 - DNA, 80 bp, synthetic construct
  source 1..80: mol_type = other DNA
tttcaagctgatgcagtgcctgtatctcctgcccctgagcccgctgggttgctcagccctattaagcctaccccccccgt

SEQ ID NO: 88870 - DNA, 80 bp, synthetic construct
  source 1..80: mol_type = other DNA
gcgtaagccaccagcatcgccgtctcctcgcacccgccgtcttctttatacctatcctgatggcgccaaggtgtactcgg

SEQ ID NO: 88871 - DNA, 80 bp, synthetic construct
  source 1..80: mol_type = other DNA
ccaggttgacgcggcatccgtaccacctgcccctgagcccgctgggttgcctggttctactgaacccacaccccccgtgc

SEQ ID NO: 88872 - DNA, 80 bp, synthetic construct
  source 1..80: mol_type = other DNA
gtaagccaccagcgccgccacctccccgcacccgccgtctcctttatacataccctgatggcgctaaggtgtatgcgggg

SEQ ID NO: 88873 - DNA, 80 bp, synthetic construct
  source 1..80: mol_type = other DNA
tttcaagttgatgctgcgcctacgcccccttcccctggggctgctaggattcccagccctgccgcgctcacccccccccc

SEQ ID NO: 88874 - DNA, 80 bp, synthetic construct
  source 1..80: mol_type = other DNA
cccccccgtgcgtaagccaccaacacccccgccctctcgcactcgccgtctcctttacacctaccccgacggcgctaagg

SEQ ID NO: 88875 - DNA, 80 bp, synthetic construct
  source 1..80: mol_type = other DNA
acatcccgattgatattgctgctcgagcggcccgattgacagctactgttgagctcactgcaggcccggaccgtctggag

SEQ ID NO: 88876 - DNA, 80 bp, synthetic construct
  source 1..80: mol_type = other DNA
ctcaggttgatgtggcgcttgcgcctcctgtccctgaacccgttaggctgcccagccccactgaaccttctccccccgtg

SEQ ID NO: 88877 - DNA, 80 bp, synthetic construct
  source 1..80: mol_type = other DNA
aaggctcctggcattactactgccattgagcaggctgctctggctgcggctaactccgccttggcgaatgctgtggtggt

SEQ ID NO: 88878 - DNA, 80 bp, synthetic construct
  source 1..80: mol_type = other DNA
ctcaggttgatgcggcattcgtgcctcctgtccctgagtctgttggattgcccagtccggttgtgcgtatccccccctcc

SEQ ID NO: 88879 - DNA, 80 bp, synthetic construct
  source 1..80: mol_type = other DNA
ccccccccaccccccgtgcgtaagccgccaacacccccgccttctcgtactcgccgtctcctctacacctaccctgacgg

SEQ ID NO: 88880 - DNA, 80 bp, synthetic construct
  source 1..80: mol_type = other DNA
cttcccaccggttactgctccaggattgccctgtcctaccccacctgtcagcgatatttgggtgttgccaccaccctcag

SEQ ID NO: 88881 - DNA, 80 bp, synthetic construct
  source 1..80: mol_type = other DNA
aggggtcccaggttgatgcagcacctgtgccacccgcccccggacccgttaagccatccggttctactgaactcacaccc

SEQ ID NO: 88882 - DNA, 80 bp, synthetic construct
  source 1..80: mol_type = other DNA
cccgtgcgtaagccgccggtaccgtcacccccccgtacccgccgcctcctttacacataccctgacggcgctaaggtgta

SEQ ID NO: 88883 - DNA, 80 bp, synthetic construct
  source 1..80: mol_type = other DNA
ccaggtcgacgcggcccctgtaccacctgttcctgagcccgctaggccgcccggccctattgggcctacccccctcgtgc

SEQ ID NO: 88884 - DNA, 80 bp, synthetic construct
  source 1..80: mol_type = other DNA
gtaagccaccggcgccgctgccctctcgcacccgccgtctcctttatacctaccctgacggcgctaaggtgtatgcggtg

SEQ ID NO: 88885 - DNA, 80 bp, synthetic construct
  source 1..80: mol_type = other DNA
tacgcccaatgtcggcggtggttgtccgccggcttccacctcgacccccgtgtgcttgtctttgatgaggcagccccttg

SEQ ID NO: 88886 - DNA, 80 bp, synthetic construct
  source 1..80: mol_type = other DNA
cataccttctgaccttgctgcgcgtgccggccggctcaccgccaccgtggaggtttctgatgttgacggccgccttgcct

SEQ ID NO: 88887 - DNA, 80 bp, synthetic construct
  source 1..80: mol_type = other DNA
gtaagaccatcataggcaacaaaactttttcaacagtctttgttgatggcgctcaactggaggctaacgggccggaacag

SEQ ID NO: 88888 - DNA, 80 bp, synthetic construct
  source 1..80: mol_type = other DNA
acttgctaccatctgctaatactaatatacctattgatgcccctctccctgcgacccctgtgcagacccaaccaccggtt

SEQ ID NO: 88889 - DNA, 80 bp, synthetic construct
  source 1..80: mol_type = other DNA
cccgagcaggtggcacccgccttggatttacctgaccgtggtgctagccccacttcgactggtgcccccatggcgccccc

SEQ ID NO: 88890 - DNA, 80 bp, synthetic construct
  source 1..80: mol_type = other DNA
ccgcataccccttgctcggcgccgggatatataaggttcccgttgggcttagtttcgatgcctgggaacgtaaccaccgc

SEQ ID NO: 88891 - DNA, 80 bp, synthetic construct
  source 1..80: mol_type = other DNA
ctaccctgctttgaccattactgaggatgcagcgcgcacggcgaacctggcattggagctggacgcggccactgaggtcg

SEQ ID NO: 88892 - DNA, 80 bp, synthetic construct
  source 1..80: mol_type = other DNA
ttctctcctcctgaggcgaccgcccccgcaccggctgttgccccagggttgccctactccaccccaccagttagtgatat

SEQ ID NO: 88893 - DNA, 80 bp, synthetic construct
  source 1..80: mol_type = other DNA
ctgggtgttaccgccgccctcagaagagtcccagacgggtgcgccgcctgcaccttccgcccctgagcctgttggactgc

SEQ ID NO: 88894 - DNA, 80 bp, synthetic construct
  source 1..80: mol_type = other DNA
ccagccctactaaacccactccccccgtgcgtaagccatcggcatcattgccttctcgcactcgccgacttctttacacc

SEQ ID NO: 88895 - DNA, 80 bp, synthetic construct
  source 1..80: mol_type = other DNA
tcccgcacgatattgctgcccgagcggctcgactaacagctactgtcgagctcgccgcaggcccggaccgtctggagtgc

SEQ ID NO: 88896 - DNA, 80 bp, synthetic construct
  source 1..80: mol_type = other DNA
ctcagatcgatgtggtgtctgtaccccccgctcccgagcccgttgggttgcccagccttactgaacttcctccccctgtg

SEQ ID NO: 88897 - DNA, 80 bp, synthetic construct
  source 1..80: mol_type = other DNA
cgtaagccgccggcgccgccgtcttcacgcacccgccgtcttctttacacttatcccgacggcgctaaggtgtatgcggg

SEQ ID NO: 88898 - DNA, 80 bp, synthetic construct
  source 1..80: mol_type = other DNA
ctgaggcggccgcctctgcaccggctgctgcccgtgggttaccccaccccacccccccggtcagtgatatctgggtatta

SEQ ID NO: 88899 - DNA, 80 bp, synthetic construct
  source 1..80: mol_type = other DNA
tctcatgtcgatgcggcgcctgtaccccccacccccgggtctgttgggctgcccagccctatcgaaccaccaccctctgt

SEQ ID NO: 88900 - DNA, 80 bp, synthetic construct
  source 1..80: mol_type = other DNA
gcgtaagccgccggcagtgacatctcctcgcacccgccgtcttctttatgcctatcccgacggagctaaggtgtatgcag

SEQ ID NO: 88901 - DNA, 80 bp, synthetic construct
  source 1..80: mol_type = other DNA
gccgttcttgaggatactgttgattaccccgcccgcgcccatacttttgatgatttctgcccggaatgtcgcacccttgg

SEQ ID NO: 88902 - DNA, 80 bp, synthetic construct
  source 1..80: mol_type = other DNA
ctctggttgatgcggcatctgtgccccttgtttctgagcctgccggggcgcccaaccccatcgtactcaccccccccctg

SEQ ID NO: 88903 - DNA, 80 bp, synthetic construct
  source 1..80: mol_type = other DNA
cataccttccgaccttgccgcgcgtgctggccggctcactgccaccgttgaggtctccgatgccgatggccgccttgttt

SEQ ID NO: 88904 - DNA, 80 bp, synthetic construct
  source 1..80: mol_type = other DNA
gtaagaccattataggtaacaaaactttttcaacggttttcgccgatggtgcccagctagaggctaacgggccggaacaa

SEQ ID NO: 88905 - DNA, 80 bp, synthetic construct
  source 1..80: mol_type = other DNA
aatacgtgttgtcatttgacccggctaagcaaaccatggccgccggcccgcatagcctcagttacactctaacgcctgcc

SEQ ID NO: 88906 - DNA, 80 bp, synthetic construct
  source 1..80: mol_type = other DNA
ggcctcgaggtttctattgtctctgccgggcttgactgtaaggttgtctttccacccggtgtcgctacgccctcagcctc

SEQ ID NO: 88907 - DNA, 80 bp, synthetic construct
  source 1..80: mol_type = other DNA
tggggaagtatctgcattctgttcggctctatataggttcaaccgctgtgtccagcggcagtctcttatcggtggcttgt

SEQ ID NO: 88908 - DNA, 80 bp, synthetic construct
  source 1..80: mol_type = other DNA
acttaccatcatctgtcaatattaatatgcctaataatgttccttctcctgtgacccctatacagaccccaccaccggcc

SEQ ID NO: 88909 - DNA, 80 bp, synthetic construct
  source 1..80: mol_type = other DNA
cctgagcaggttgcattacccttggattcgcctgattgtggtgccggccccacttcgaccggtgcctctgcggcgctccc

SEQ ID NO: 88910 - DNA, 80 bp, synthetic construct
  source 1..80: mol_type = other DNA
cgcgccgccgcagtccataacccatctgtctgggcctcgccggcggttactccacacctacccagatggctcaaaggtgt

SEQ ID NO: 88911 - DNA, 80 bp, synthetic construct
  source 1..80: mol_type = other DNA
gctccggcaaatcccgatcgatccaacaaggggatgttgatgtggtggtggtgccgactcgcgagttacgcaactcatgg

SEQ ID NO: 88912 - DNA, 80 bp, synthetic construct
  source 1..80: mol_type = other DNA
tctgaatcatttcatccctgaactcggtcccatcaatgtcaccacctgtgagctttacgagctcgtagaggctatggtag

SEQ ID NO: 88913 - DNA, 80 bp, synthetic construct
  source 1..80: mol_type = other DNA
ttattttccttgtgccttcctttgtactgtcttttatttctcttttctgcgtcccgcgctccctggaaaaaaaaaaaaaa

SEQ ID NO: 88914 - DNA, 80 bp, synthetic construct
  source 1..80: mol_type = other DNA
cgcaccggggatcctaggctttttggattgcgctttcctttaggacaactgggtgctggattctatccagtaaaaggatg

SEQ ID NO: 88915 - DNA, 80 bp, synthetic construct
  source 1..80: mol_type = other DNA
tggtcagcttcctttttctggctggtaggtcctgtggcatgtacggccttaatggtcccgatatctataaaggggtttac

SEQ ID NO: 88916 - DNA, 80 bp, synthetic construct
  source 1..80: mol_type = other DNA
cagttcaaatcagtggagtttgatatgtctcacttaaatctgacgatgcccaatgcgtgctcagtcaacaactctcatca

SEQ ID NO: 88917 - DNA, 80 bp, synthetic construct
  source 1..80: mol_type = other DNA
ctccatccttaatcacaacttctgcaacttaacctccgctttcaacaaaaagtcttttgaccatacactcatgagtatag

SEQ ID NO: 88918 - DNA, 80 bp, synthetic construct
  source 1..80: mol_type = other DNA
ttttaacaatggcatcaccattcaatacaacttgtcattttcggacccacagagcgctatgagccagtgtaggactttca

SEQ ID NO: 88919 - DNA, 80 bp, synthetic construct
  source 1..80: mol_type = other DNA
cgcttccgctgccgttgctgctaatagcaacaacgacaacgcaaaatcttcaagtgacggagtgctttctagcatggctg

SEQ ID NO: 88920 - DNA, 80 bp, synthetic construct
  source 1..80: mol_type = other DNA
ctgaagggcctcttgtcatttccgaagacctgaatggcctaaccttcctgcggaggaccgtgactcgcgacccagcaggc

SEQ ID NO: 88921 - DNA, 80 bp, synthetic construct
  source 1..80: mol_type = other DNA
tgctggggatgatgtcttcacagtttcctgccgagttctcacgagaccatcccccgattttgatttcatatttctagtgc

SEQ ID NO: 88922 - DNA, 80 bp, synthetic construct
  source 1..80: mol_type = other DNA
tgcaccttcagaggagatgtcacccatatcacaggtagtcataactacacaatgaatttggcttctcaaaattggagcaa

SEQ ID NO: 88923 - DNA, 80 bp, synthetic construct
  source 1..80: mol_type = other DNA
atcgggggcatcgccaggaagagctaatctcagggatgctgtccctgctcggggtccctccagtaagtcttctaattctt

SEQ ID NO: 88924 - DNA, 80 bp, synthetic construct
  source 1..80: mol_type = other DNA
cggggcgcggcaaaaacagcctcccccgagggaaataccacaaaggcctccacggccacccaccccagaactggtcaaaa

SEQ ID NO: 88925 - DNA, 80 bp, synthetic construct
  source 1..80: mol_type = other DNA
aactctccagtgttcaactataacaaggcaaccaaaaggctgaccattcttggaaaagatgcaggatcgttagcagaaga

SEQ ID NO: 88926 - DNA, 80 bp, synthetic construct
  source 1..80: mol_type = other DNA
acgacaggagtggaatctgcagtactgaggggattcttaattctaggtaaagaggataaaaggtatgggccagcattgag

SEQ ID NO: 88927 - DNA, 80 bp, synthetic construct
  source 1..80: mol_type = other DNA
gcaggagtaaaaatgaatccaaatcagaagataatgacaattggtctcatctctctgactgttgcgacaatatgcctgct

SEQ ID NO: 88928 - DNA, 80 bp, synthetic construct
  source 1..80: mol_type = other DNA
tgttagttacgactatgacaatgcatttcaagcatgatgaatgcaccacaaacaatcagacggtgccatgtggatcaatc

SEQ ID NO: 88929 - DNA, 80 bp, synthetic construct
  source 1..80: mol_type = other DNA
aaagagcaaatcaagaggcaagtcgtggtcgacaatctgaattggtcaggatacagcggctctttcacactaccagtggg

SEQ ID NO: 88930 - DNA, 80 bp, synthetic construct
  source 1..80: mol_type = other DNA
agtttgaacaagttgtgcatgaaagggagaaattacaaagacttgggaaattgtcacccaataggaatgctgatagggac

SEQ ID NO: 88931 - DNA, 80 bp, synthetic construct
  source 1..80: mol_type = other DNA
atctcccaagtatgaacgaaactaactcaacaacaacaataataaacaataatactcaaaataacttcacaaatatcact

SEQ ID NO: 88932 - DNA, 80 bp, synthetic construct
  source 1..80: mol_type = other DNA
tatggtaaacaaagaggagaaaagaacatttctaaacctgaccaagcccctatgtgaggtaaactcgtggcacattctgt

SEQ ID NO: 88933 - DNA, 80 bp, synthetic construct
  source 1..80: mol_type = other DNA
acagccggagtggagtctgcggtactaaggggattcctaattctaggcaaggaggacagaaggtatgggccagcattgag

SEQ ID NO: 88934 - DNA, 80 bp, synthetic construct
  source 1..80: mol_type = other DNA
cacaaatgtgaataatctatacaacaaggtaaagagagccttgggatctaacgcaattgaagatggaaatggatgttttg

SEQ ID NO: 88935 - DNA, 80 bp, synthetic construct
  source 1..80: mol_type = other DNA
gaacaaaacgatttgtacaaaaagactgacacaacaacaagtgtgacaacagaagatataaacagaactttcaaaccgat

SEQ ID NO: 88936 - DNA, 80 bp, synthetic construct
  source 1..80: mol_type = other DNA
tactggtaacgactgtgacactgcattttagacaacatgagagtggcccaccttcaaacaatcaagtaataccgtgtgaa

SEQ ID NO: 88937 - DNA, 80 bp, synthetic construct
  source 1..80: mol_type = other DNA
tgggcctttgacaatggagatgacgtgtggatgggaagaacgatcagtaaggatttacgcttaggttatgaaacctttaa

SEQ ID NO: 88938 - DNA, 80 bp, synthetic construct
  source 1..80: mol_type = other DNA
gggacatttgggtgacaagggagccttatgtgtcatgtgaccctgacaagtgttaccaatttgcactcggccaggggacc

SEQ ID NO: 88939 - DNA, 80 bp, synthetic construct
  source 1..80: mol_type = other DNA
ctggggatgatactaatgcaaccgccagcttcatctataacgggagacttgtggacagcattggttcatggtctcaaaat

SEQ ID NO: 88940 - DNA, 80 bp, synthetic construct
  source 1..80: mol_type = other DNA
actacaataattcatgtataaaactaagggcgtaaccgaaatcggttgaaccgaaaccggttagtataaaagcagacatt

SEQ ID NO: 88941 - DNA, 80 bp, synthetic construct
  source 1..80: mol_type = other DNA
ggtggaagtgggggtggttgcagtcagtacagtagtggaagtggtggagagggtgttagtgaaagacacactatatgcca

SEQ ID NO: 88942 - DNA, 80 bp, synthetic construct
  source 1..80: mol_type = other DNA
acggggtaagtttttcagaattagtaagaccatttaaaagtaataaatcaacgtgttgcgattggtgtattgctgcattt

SEQ ID NO: 88943 - DNA, 80 bp, synthetic construct
  source 1..80: mol_type = other DNA
ggaatggttgtgttactattagtaagatataaatgtggaaaaaatagagaaacaattgaaaaattgctgtctaaactatt

SEQ ID NO: 88944 - DNA, 80 bp, synthetic construct
  source 1..80: mol_type = other DNA
ccagacaccggaaacccctgccacaccactaagttgctgcacagctcacacaaaggacggattaactgtaatagtaacac

SEQ ID NO: 88945 - DNA, 80 bp, synthetic construct
  source 1..80: mol_type = other DNA
actggggcaaaggatccccatgtaccaatgttgcagtaaatccaggtgattgtccaccattagagttaataaacacagtt

SEQ ID NO: 88946 - DNA, 80 bp, synthetic construct
  source 1..80: mol_type = other DNA
tattaagttgtatgtgtgtttgtatgtatggtataataaacatgtgtgtatgtgtttttcaatgcttgtgtaactattgt

SEQ ID NO: 88947 - DNA, 80 bp, synthetic construct
  source 1..80: mol_type = other DNA
tttttgttttatatatactatattttgtagcgccagcggccattttgtagcttcaaccgaattcggttgcatgctttttg

SEQ ID NO: 88948 - DNA, 80 bp, synthetic construct
  source 1..80: mol_type = other DNA
ttcatttgtaaaactacacatgggtgtgtgcaaaccgttttgggttacacatttacaagcaacttatataataatactaa

SEQ ID NO: 88949 - DNA, 80 bp, synthetic construct
  source 1..80: mol_type = other DNA
accataatctaccatggctgatcctgcaggtaccaatggggaagagggtacgggatgtaatggatggttttatgtagagg

SEQ ID NO: 88950 - DNA, 80 bp, synthetic construct
  source 1..80: mol_type = other DNA
ttgcatctgtcctaacggttttgttcacattgcataaagggcttttaaaagttctgttccgagagagcgcgtgcggaaag

SEQ ID NO: 88951 - DNA, 80 bp, synthetic construct
  source 1..80: mol_type = other DNA
gtcactgttggtgctcttgtagccaatgagggttggaatgcttctgaggatgccctcactgcagtgattaccgcggcgta

SEQ ID NO: 88952 - DNA, 80 bp, synthetic construct
  source 1..80: mol_type = other DNA
gctgtggttattcggccgtttttgtcccggacacagactgaaattctcattaaccttatgcaaccccggcagctggtttt

SEQ ID NO: 88953 - DNA, 80 bp, synthetic construct
  source 1..80: mol_type = other DNA
gtatgcgtcgactggagcttgagcacgcccagaagtttatcaccaggctttatagctggctgtttgaaaagtccggccgt

SEQ ID NO: 88954 - DNA, 80 bp, synthetic construct
  source 1..80: mol_type = other DNA
gattatatccccggccgtcagcttcaattctacgcgcagtgccgacgctggctttctgccggctttcatttggaccctag

SEQ ID NO: 88955 - DNA, 80 bp, synthetic construct
  source 1..80: mol_type = other DNA
agtgcttgtttttgatgagtctgtgcactgccgctgtaggagccttgtaaagaatgtggctagaaaagtttgctgcttta

SEQ ID NO: 88956 - DNA, 80 bp, synthetic construct
  source 1..80: mol_type = other DNA
tgaagtggcttggtcaggagtgcacttgcttcttggagcccgcggagggtctgattggtgaccagggccatgataatgag

SEQ ID NO: 88957 - DNA, 80 bp, synthetic construct
  source 1..80: mol_type = other DNA
gcttacgaggggtctgaggtcgaccctgctgagcccgccccgtctgatgtatcggagacctatgttgtccgcgggcaact

SEQ ID NO: 88958 - DNA, 80 bp, synthetic construct
  source 1..80: mol_type = other DNA
gttggtagacttatatagagcactcaacgtcccacatgatattgctgcccgagccgcacgtttgtcagctactgttgagc

SEQ ID NO: 88959 - DNA, 80 bp, synthetic construct
  source 1..80: mol_type = other DNA
tcaccgccggcccagggcggcttgagtgtcgcactattttgggtaacaagaccttccgcaccacgattatcgacggcgcc

SEQ ID NO: 88960 - DNA, 80 bp, synthetic construct
  source 1..80: mol_type = other DNA
caattggaggcgaatggccctgagcaatatgtcctttcatttgatgagactcgccagtgtatgggtgccggcccgcatag

SEQ ID NO: 88961 - DNA, 80 bp, synthetic construct
  source 1..80: mol_type = other DNA
ccttgtgtatgagctcacccccagcgggctccaggtcaagatgttatctaatggtttagactgtgtggcagtcttccccc

SEQ ID NO: 88962 - DNA, 80 bp, synthetic construct
  source 1..80: mol_type = other DNA
ccgggagggccccgagtgtcgaggccgcagaggttacggccttctgtagtgccctttatagatataatagaaccatccag

SEQ ID NO: 88963 - DNA, 80 bp, synthetic construct
  source 1..80: mol_type = other DNA
ccgcccggaggttttctggaatcaccccattcagcgtgtaatacacaatgagctagagcagtactgtcgtgcccgcgccg

SEQ ID NO: 88964 - DNA, 80 bp, synthetic construct
  source 1..80: mol_type = other DNA
cgacactcgattgttggcgggctgtggttacacccagaggggctgctaggtctcttcccacctttttcccccggtcattt

SEQ ID NO: 88965 - DNA, 80 bp, synthetic construct
  source 1..80: mol_type = other DNA
ctgggagtctaataacccgttttgtggtgaggagactctttataccagaacttggtccatgtctggcttttccagtgatt

SEQ ID NO: 88966 - DNA, 80 bp, synthetic construct
  source 1..80: mol_type = other DNA
tctcgccacctgaggcgactgccggcgtccccccccccgctaacctgccttgcacaccggccccctccgagattgccgtt

SEQ ID NO: 88967 - DNA, 80 bp, synthetic construct
  source 1..80: mol_type = other DNA
cgaaccctgccgccccctcccgtggactcaggggttattgatccacctgctgctatgtctgccccttctgctcataagcc

SEQ ID NO: 88968 - DNA, 80 bp, synthetic construct
  source 1..80: mol_type = other DNA
accggggcggtcttcggctcgtaaccgccgccttctctacacctacccagatggtgctaaagtttattcagggtctttgt

SEQ ID NO: 88969 - DNA, 80 bp, synthetic construct
  source 1..80: mol_type = other DNA
ttgagtctgactgtgactggctggttaacgcatctaatcccgggcaccgcccgggcggtggcctatgtcatgccttttat

SEQ ID NO: 88970 - DNA, 80 bp, synthetic construct
  source 1..80: mol_type = other DNA
cagcgtttcccccagtcttttgaccataccaagtttattatgcgggacgggttggctgcttacaccctatcacctcgccc

SEQ ID NO: 88971 - DNA, 80 bp, synthetic construct
  source 1..80: mol_type = other DNA
gatcattcatgcagttgcccctgattatagggttgcccataacccaaaaaggctggaagcggcgtaccgcgagacctgct

SEQ ID NO: 88972 - DNA, 80 bp, synthetic construct
  source 1..80: mol_type = other DNA
cccgcctcggtactgccgcttacccattgttgggctcgggtatatttcaggtccctgttggcccgagctttgatgcctgg

SEQ ID NO: 88973 - DNA, 80 bp, synthetic construct
  source 1..80: mol_type = other DNA
gagcgaaaccaccggcccggtgatgaactttacctcacagagccagcgaccgcttggttcgaggccaataggcccgcccg

SEQ ID NO: 88974 - DNA, 80 bp, synthetic construct
  source 1..80: mol_type = other DNA
ggcgttgtcttgaggtcggggcccacccaagatctattaatgataatccaaatgttcttcaccggtgcttcctcaggccc

SEQ ID NO: 88975 - DNA, 80 bp, synthetic construct
  source 1..80: mol_type = other DNA
gccccccacacctatagtccttgacacgcccttgcctgactgccttccagccggagccggttctccaccagaggctgata

SEQ ID NO: 88976 - DNA, 80 bp, synthetic construct
  source 1..80: mol_type = other DNA
ccggcccagcactgccagctctgactataacggaagatgcagctcgaacggctaaccttgcgttagagatcgactccagg

SEQ ID NO: 88977 - DNA, 80 bp, synthetic construct
  source 1..80: mol_type = other DNA
actgagctaggccgtgcctgcaccggttgtgctgttagccctggagttgtccggtatcaattcaccgcaggtgtccccgg

SEQ ID NO: 88978 - DNA, 80 bp, synthetic construct
  source 1..80: mol_type = other DNA
gtccggtaaatcgaggtccatacagcagggtgatgttgatgtggtggttgtgcccacccgcgagcttcgcaatagttggc

SEQ ID NO: 88979 - DNA, 80 bp, synthetic construct
  source 1..80: mol_type = other DNA
gtcgccgcgggtttgctgcatttacgccccactcggctgctcgcgtcaccagtggccggcgtgttgtaatcgatgaagca

SEQ ID NO: 88980 - DNA, 80 bp, synthetic construct
  source 1..80: mol_type = other DNA
ccatcccttccgccccacctgctcttactgcatatgcagcgtgcttcatcggtgcatcttcttggtgacccgaaccagat

SEQ ID NO: 88981 - DNA, 80 bp, synthetic construct
  source 1..80: mol_type = other DNA
tcccgcaattgatttcgagcatgcaggtcttgttcctgcaatacgtcctgagctggcccccaccagctggtggcatgtta

SEQ ID NO: 88982 - DNA, 80 bp, synthetic construct
  source 1..80: mol_type = other DNA
taaggtccctgttctggggagaccccccggttggtcagaagttggttttcacgcaagctgcaaaggcagccaaccctggt

SEQ ID NO: 88983 - DNA, 80 bp, synthetic construct
  source 1..80: mol_type = other DNA
gcaattacagttcatgaggcccagggcgccactttcacagagactaccatcatcgcgacggcagatgcgagaggcctcat

SEQ ID NO: 88984 - DNA, 80 bp, synthetic construct
  source 1..80: mol_type = other DNA
gttgggagggacgttcagcggtggtactccgcccccactcgcggccctgctgctaattgccgccgttccgcgctgcgcgg

SEQ ID NO: 88985 - DNA, 80 bp, synthetic construct
  source 1..80: mol_type = other DNA
agtcatctcgggcgcatgcaattgtcgccttaacccggcacacagagaagtgtgttattttagacgccccggggcttctt

SEQ ID NO: 88986 - DNA, 80 bp, synthetic construct
  source 1..80: mol_type = other DNA
cgcgaggtgggcatatcagatgtgatagtcaataacttctttttggccggaggtgagattggccaccaccgcccctcagt

SEQ ID NO: 88987 - DNA, 80 bp, synthetic construct
  source 1..80: mol_type = other DNA
tatacctcgcggtaatcctgaccgaaacctcgacgtccttcaggcttttcccccttcatgccagattagtgcttaccacc

SEQ ID NO: 88988 - DNA, 80 bp, synthetic construct
  source 1..80: mol_type = other DNA
agctggctgaggagctcggtcaccggcccgcgcctgtggccgccgtcctgccgccttgccctgagcttgagcagggcctg

SEQ ID NO: 88989 - DNA, 80 bp, synthetic construct
  source 1..80: mol_type = other DNA
ctgtatatgccacaggagctcacagtatctgacagtgtactagtttttgagttgactgatatagtccactgccgtatggc

SEQ ID NO: 88990 - DNA, 80 bp, synthetic construct
  source 1..80: mol_type = other DNA
tgcccccagccagcggaaagccgttctttcgactctcgtcgggcggtatgggcgtcgaacaaggttatatgaggccgctc

SEQ ID NO: 88991 - DNA, 80 bp, synthetic construct
  source 1..80: mol_type = other DNA
actctgatgtccgtgaatcactctcgaggtttattcccgccatcggccctgtgcaggcgacaacttgcgagctctatgag

SEQ ID NO: 88992 - DNA, 80 bp, synthetic construct
  source 1..80: mol_type = other DNA
ctggttgaggcgatggtggagaaaggtcaggacgggtcagctgtcctcgagcttgatctttgcagccgtgatgtgtctcg

SEQ ID NO: 88993 - DNA, 80 bp, synthetic construct
  source 1..80: mol_type = other DNA
aataactttcttccagaaagactgtaacaagttcacaactggggagacgattgcccatggcaaggtaggtcaggggatat

SEQ ID NO: 88994 - DNA, 80 bp, synthetic construct
  source 1..80: mol_type = other DNA
cagcctggagcaaaaccttttgtgctctatttggcccttggtttcgggccattgagaaacagatattaaccctgctcccg

SEQ ID NO: 88995 - DNA, 80 bp, synthetic construct
  source 1..80: mol_type = other DNA
gtcttccacccgccgatcgtacctattgctttgatgggttctccggctgcacctttgcggctgaaaccggtattgctctc

SEQ ID NO: 88996 - DNA, 80 bp, synthetic construct
  source 1..80: mol_type = other DNA
cctaacatcttctatggtgatgcttatgaggactctgtgttctctgcggctgtcaccggtgccgggtcaagcatggtatt

SEQ ID NO: 88997 - DNA, 80 bp, synthetic construct
  source 1..80: mol_type = other DNA
cgagaacgacttttccgagtttgatagcacccaaaataatttctcacttggccttgagtgtgtgattatggaggaatgtg

SEQ ID NO: 88998 - DNA, 80 bp, synthetic construct
  source 1..80: mol_type = other DNA
gcatgccccagtggctagtcagactgtaccatttggtgcggtctgcttggattttgcaggccccgaaggagtccttaaaa

SEQ ID NO: 88999 - DNA, 80 bp, synthetic construct
  source 1..80: mol_type = other DNA
ttatgagttccgcgatttcaaggttgctgcgtttaaaggggacgattctgtcgtcctttgtagcgactatcgccagagtc

SEQ ID NO: 89000 - DNA, 80 bp, synthetic construct
  source 1..80: mol_type = other DNA
gctttgcagcggccctgattgcaggttgcgggctcaagctcaaagttgattaccgtcctgtcgggctctatgccggagtt

SEQ ID NO: 89001 - DNA, 80 bp, synthetic construct
  source 1..80: mol_type = other DNA
gtggttgcccctggtcttgggacgttgcccgacgtcgtccggttcgctggtcggttgtcagaaaagaactggggccccgg

SEQ ID NO: 89002 - DNA, 80 bp, synthetic construct
  source 1..80: mol_type = other DNA
ccccgaacgtgcggagcagttacgtctagctgtctgtgatttcctgagaaagttgacgaatgttgctcaggtgtgtgtcg

SEQ ID NO: 89003 - DNA, 80 bp, synthetic construct
  source 1..80: mol_type = other DNA
atgttgtgtctcgtgtttatggggtgagtcctgggcttgtacataatcttattggcatgttacagacaattgctgatggt

SEQ ID NO: 89004 - DNA, 80 bp, synthetic construct
  source 1..80: mol_type = other DNA
aaggcccactacactgaaactgtcaagcctgtattagacctcacaaattccattgtgcagaggttagaatgaataacatg

SEQ ID NO: 89005 - DNA, 80 bp, synthetic construct
  source 1..80: mol_type = other DNA
tactctttacatgacttgtggcctgctgatgttgcggaggcaatggcgcaccatgggctggcacgtctgtatgctgtgtt

SEQ ID NO: 89006 - DNA, 80 bp, synthetic construct
  source 1..80: mol_type = other DNA
tttctctttgcatcgcccatgggttcaccatgcgccctggggctattttgctgctgttcgtcgtgtgtttgcctatgttg

SEQ ID NO: 89007 - DNA, 80 bp, synthetic construct
  source 1..80: mol_type = other DNA
ccacatcccgggtctggagcccgaccccggcaaccagcccgcccccttggcacctcttggcgcgacctgtcccagcgccc

SEQ ID NO: 89008 - DNA, 80 bp, synthetic construct
  source 1..80: mol_type = other DNA
ccccgctgcctcgcgccgtcgacctaccccagctggggctgcgccgttgaccgctgtttcacctgcacctgatacggcgc

SEQ ID NO: 89009 - DNA, 80 bp, synthetic construct
  source 1..80: mol_type = other DNA
ctgtcccagatgttgattcacgcggagctattttgcgccgccagtataatctctccacttcacctttgacttcaactgtt

SEQ ID NO: 89010 - DNA, 80 bp, synthetic construct
  source 1..80: mol_type = other DNA
gccgcaggcactaaccttgtcctatatgctgcaccgcttaaccccctcctgcctcttcaggatggcaccaatacacacat

SEQ ID NO: 89011 - DNA, 80 bp, synthetic construct
  source 1..80: mol_type = other DNA
catggcgactgaggcgtctaattacgctcagtatcgggttgttcgagcgacaatccgttatcgccctttggtgcccaatg

SEQ ID NO: 89012 - DNA, 80 bp, synthetic construct
  source 1..80: mol_type = other DNA
ccgtagatatgaattccatcacctcaactgatgttaggattcttgttcagcctggtctggcttccgaacttgttataccg

SEQ ID NO: 89013 - DNA, 80 bp, synthetic construct
  source 1..80: mol_type = other DNA
gcacctcccgcctgaggttttactgccgccgggcacctaccacaccacctcctaccttctcattcacgacggcgcccgtg

SEQ ID NO: 89014 - DNA, 80 bp, synthetic construct
  source 1..80: mol_type = other DNA
agtgagcgtctccactatcgtaaccaagggtggcgttctgtcgagacctccggtgtggctgaggaggaggccacttccgg

SEQ ID NO: 89015 - DNA, 80 bp, synthetic construct
  source 1..80: mol_type = other DNA
gcttgttatgctctgtatccacggctcccctgtaaattcatatactaacaccccttacacaggtgctttggggcttcttg

SEQ ID NO: 89016 - DNA, 80 bp, synthetic construct
  source 1..80: mol_type = other DNA
attttgcgcttgagattgagttccggaatctaactccagggaacaccaatacacgtgtttcccggtataccagtactgcc

SEQ ID NO: 89017 - DNA, 80 bp, synthetic construct
  source 1..80: mol_type = other DNA
cgccatcgtttgcgtcgtggcgccgatgggaccgccgaacttacaaccacggcggcaacacggtttatgaaagatcttca

SEQ ID NO: 89018 - DNA, 80 bp, synthetic construct
  source 1..80: mol_type = other DNA
tttcaccgggatgaacggggtcggtgagatcggtcgtggcatagccctgacgctgtttaacttagctgatacacttcttg

SEQ ID NO: 89019 - DNA, 80 bp, synthetic construct
  source 1..80: mol_type = other DNA
gtggcctgccgacagaattaatttcgtcggccgggggtcaggtattctactcccgccccgtcgtctcagccaatggcgag

SEQ ID NO: 89020 - DNA, 80 bp, synthetic construct
  source 1..80: mol_type = other DNA
ccgactgtcaagttgtatacatcagttgagaacgcacagcaagacaaggggatcgcgatacctcatgacattgatcttgg

SEQ ID NO: 89021 - DNA, 80 bp, synthetic construct
  source 1..80: mol_type = other DNA
cgattcccgcgttgttattcaggactatgacaaccaacatgagcaggaccggcctacgccgtcaccggccccctcccgcc

SEQ ID NO: 89022 - DNA, 80 bp, synthetic construct
  source 1..80: mol_type = other DNA
ctttctctgttttacgtgctaatgatgtgctgtggctctcgcttactgctgcagagtatgatcaaactacatatggctcg

SEQ ID NO: 89023 - DNA, 80 bp, synthetic construct
  source 1..80: mol_type = other DNA
tcaactaaccctatgtatgtttcggacactgtcacatttgtcaatgtcgcaacaggtgcccaggctgtcgcccgatctct

SEQ ID NO: 89024 - DNA, 80 bp, synthetic construct
  source 1..80: mol_type = other DNA
ctgttgtgacttatgaaggtgatacaagtgctggttacaaccatgatgtttccatcctccgtgcctggattcgcaccact

SEQ ID NO: 89025 - DNA, 80 bp, synthetic construct
  source 1..80: mol_type = other DNA
tgattggtctaaggttactctggacgggcgaccgcttaccaccatacagcagcactctaaaatgttttatgttctccctt

SEQ ID NO: 89026 - DNA, 80 bp, synthetic construct
  source 1..80: mol_type = other DNA
tacgcggtaagctctccttttgggaggccggtactaccaaggcaggttacccctataattacaacactaccgccagcgat

SEQ ID NO: 89027 - DNA, 80 bp, synthetic construct
  source 1..80: mol_type = other DNA
cagatcttgattgagaatgcagctgatcaccgtgttgctgtttccacctacactacgagtttgggcgctggccctgtgtc

SEQ ID NO: 89028 - DNA, 80 bp, synthetic construct
  source 1..80: mol_type = other DNA
catctctgcagttggtgtgcttgctccgcactcagttctagctgttcttgaggatactattgattaccccgctcgcgctc

SEQ ID NO: 89029 - DNA, 80 bp, synthetic construct
  source 1..80: mol_type = other DNA
acacttttgatgacttttgccccgaatgccgtattctcggcctgcagggctgtgcttttcagtctactgttgctgagctc

SEQ ID NO: 89030 - DNA, 80 bp, synthetic construct
  source 1..80: mol_type = other DNA
aattcttgctgtgccttccttctttgctgattgttttatttcttatttctgcgctccgcgctccctggaaaaaaaaaaaa

SEQ ID NO: 89031 - DNA, 80 bp, synthetic construct
  source 1..80: mol_type = other DNA
aagtcatcggcgaccatccgctggtgatagagcgtgttcgcgctattggctgccattttgtgttattgctcactgcagcc

SEQ ID NO: 89032 - DNA, 80 bp, synthetic construct
  source 1..80: mol_type = other DNA
cccgaaccgtcacccatgccttatgtcccattcccccgttcgacagaggtgtttgttcgctcgatattcggcccgggcgg

SEQ ID NO: 89033 - DNA, 80 bp, synthetic construct
  source 1..80: mol_type = other DNA
ctcgccctctctttttccatcagcttgttccacaaaatctactttccatgccgtccctgttcatatttgggataggctta

SEQ ID NO: 89034 - DNA, 80 bp, synthetic construct
  source 1..80: mol_type = other DNA
tgctctttggtgctacgctggatgaccaggccttttgttgctcgaggcttatgacctaccttcgcggtattagttacaaa

SEQ ID NO: 89035 - DNA, 80 bp, synthetic construct
  source 1..80: mol_type = other DNA
tcctgccgccttgccctgagcttgagcagggcctgctgtatatgccacaggagctcacagtatctgacagtgtactagtt

SEQ ID NO: 89036 - DNA, 80 bp, synthetic construct
  source 1..80: mol_type = other DNA
tttcatccaaccaaccccttcgccgctgacgttgacccacatcccgggtctggagcccgaccccggcaaccagcccgccc

SEQ ID NO: 89037 - DNA, 80 bp, synthetic construct
  source 1..80: mol_type = other DNA
atacctaactgacatgactctcgaagagatgtcaagagactggttcatgctcatgcctaagcagaaagtggcaggttccc

SEQ ID NO: 89038 - DNA, 80 bp, synthetic construct
  source 1..80: mol_type = other DNA
gccagaattagctgattgggtactgaacggatggtggtatgaaccaatgaattctactttatactattaccaacaaacag

SEQ ID NO: 89039 - DNA, 80 bp, synthetic construct
  source 1..80: mol_type = other DNA
tcatcacatgacataagggggccgtcattcaatacgcaaaccttaggaatgggttgtttgactgttgatatgtggacact

SEQ ID NO: 89040 - DNA, 80 bp, synthetic construct
  source 1..80: mol_type = other DNA
caaaaaagttgccacggcggagaaattagtcattactgatgttgttgatggagtcaatcataaactagatgttactacgg

SEQ ID NO: 89041 - DNA, 80 bp, synthetic construct
  source 1..80: mol_type = other DNA
cgcaccctggcagttggatatgtttgaactggttgatttgatattgaatgaatggtgtggtaatccgatggacattactc

SEQ ID NO: 89042 - DNA, 80 bp, synthetic construct
  source 1..80: mol_type = other DNA
cagatgaagctaataagggggtttccatgggatcttcatggccaaaaaaaggaagtccccttaatccccaacttcttgga

SEQ ID NO: 89043 - DNA, 80 bp, synthetic construct
  source 1..80: mol_type = other DNA
aatggttggttgacccacgatgcgccaacctttgaagaagtaggtacaggtgagaaaatagtaattactgacgttgtgat

SEQ ID NO: 89044 - DNA, 80 bp, synthetic construct
  source 1..80: mol_type = other DNA
gggagtgaatcccagattagacgtcacgactgccacttgtactatcagaaattgtaagaaactaggaccaagagagaacg

SEQ ID NO: 89045 - DNA, 80 bp, synthetic construct
  source 1..80: mol_type = other DNA
aatgcagctacagatgacgatataataattgaatatatatattccaatgaattagattttcaaaattttcttttaagaaa

SEQ ID NO: 89046 - DNA, 80 bp, synthetic construct
  source 1..80: mol_type = other DNA
ttatgaacatgcaccaatagaattgatatatgcatgccggtcagctaaagaatttgctatattgcaagatgacttaacgg

SEQ ID NO: 89047 - DNA, 80 bp, synthetic construct
  source 1..80: mol_type = other DNA
ctgagacgctttaaaagccttgcggtgtagccatggctgagctagcttgcttttgttatcctcatttggagaacgatagc

SEQ ID NO: 89048 - DNA, 80 bp, synthetic construct
  source 1..80: mol_type = other DNA
gtctcacatgttggaatttaattcgctttcgattcttgcttcgtcatcatcattcttgaatcgaaagcgaattaaattcc

SEQ ID NO: 89049 - DNA, 80 bp, synthetic construct
  source 1..80: mol_type = other DNA
ggtggacttcaaacagtatcgttgtattctgtggcacttcaggtacttatggaacaggctcgtggcctgatggtgcgaat

SEQ ID NO: 89050 - DNA, 80 bp, synthetic construct
  source 1..80: mol_type = other DNA
gaaatagtgtatctaaacaatactatcatagaaaaagagccttgctctaaagcggtagaatacagggattggtcgaaacc

SEQ ID NO: 89051 - DNA, 80 bp, synthetic construct
  source 1..80: mol_type = other DNA
tagcatcacagtgacagttctggttctccccgggaatggagataacgggaactgcagtggagtagtcattaaagaataca

SEQ ID NO: 89052 - DNA, 80 bp, synthetic construct
  source 1..80: mol_type = other DNA
agaatacagaagattgagaaactgaatggaagcgctcaacacatcgaagagtgttcatgttatggagcattaggaataat

SEQ ID NO: 89053 - DNA, 80 bp, synthetic construct
  source 1..80: mol_type = other DNA
aagaagagaggttctgtaaaattttgaacaaggcccctctcgatctaaggggatgcaccatagaaggttggattttggga

SEQ ID NO: 89054 - DNA, 80 bp, synthetic construct
  source 1..80: mol_type = other DNA
ttcagatctaatttgccaatagaaagttgtgacgccacatgccagacaattgcaggagttctaagaaccaacaaaacatt

SEQ ID NO: 89055 - DNA, 80 bp, synthetic construct
  source 1..80: mol_type = other DNA
gtgcagacaaatctgtacacaagaactgacacaacaacgagtgtggcaacggaagaaataaataggacattcaaaccatt

SEQ ID NO: 89056 - DNA, 80 bp, synthetic construct
  source 1..80: mol_type = other DNA
tgtaataaacaagaacgaggaaagaaactttctcaatctgaccaagccactatgtgaagtcaattcatggcacattctat

SEQ ID NO: 89057 - DNA, 80 bp, synthetic construct
  source 1..80: mol_type = other DNA
actctccagtgttcaattacagtaaggcaaccagaaggttgacagtcctggggaaggatgcaggcgcattggtagaggat

SEQ ID NO: 89058 - DNA, 80 bp, synthetic construct
  source 1..80: mol_type = other DNA
cagaaaccttgtatggatagtaaaaactgattcatcaacatatccaataattagggggacgtacaacaatactgggaccc

SEQ ID NO: 89059 - DNA, 80 bp, synthetic construct
  source 1..80: mol_type = other DNA
tatgtcagcaataccaattttcttactgggcaagctatggcttcagtaactttatcaggcaattcctctctttgccctat

SEQ ID NO: 89060 - DNA, 80 bp, synthetic construct
  source 1..80: mol_type = other DNA
agacaatgaggctgttgctgtattgaaatacagtggtataataacagacactatcaagagttggaagaataatatactga

SEQ ID NO: 89061 - DNA, 80 bp, synthetic construct
  source 1..80: mol_type = other DNA
ctatccatgtcgtctacatggcattggacaggacataatgtaaaacataaaagtgcaattgttacacttacatatgatag

SEQ ID NO: 89062 - DNA, 80 bp, synthetic construct
  source 1..80: mol_type = other DNA
ccaatcacagtgcatttgaatggtaccaccatagagaaggaaatttgtcccagagcatcagaatacaagaattggtcaaa

SEQ ID NO: 89063 - DNA, 80 bp, synthetic construct
  source 1..80: mol_type = other DNA
ctccacatccgtcaacggaactcaacacaatagaacacacaccgtggtggcacccgaagggacccatgaacccaggtcac

SEQ ID NO: 89064 - DNA, 80 bp, synthetic construct
  source 1..80: mol_type = other DNA
ccgcaaacacggcaccacccaccaaatcggaccacccctctgccgaacccgcagcatcaaccagtgggccagagggctca

SEQ ID NO: 89065 - DNA, 80 bp, synthetic construct
  source 1..80: mol_type = other DNA
ccgagcaccttcctcccacctaccacacaaggccagaccccgacagagaccacgccagcacctcccgcaacaaccgacac

SEQ ID NO: 89066 - DNA, 80 bp, synthetic construct
  source 1..80: mol_type = other DNA
agatgcatcaagcacaagtgttgtcgacgccagcacacagatagccaaggacatctccacgccaacagcccacacaagtc

SEQ ID NO: 89067 - DNA, 80 bp, synthetic construct
  source 1..80: mol_type = other DNA
cagtacattcaaagccttttcagccatgcccaaaacctccttgtgcttttacattgtggagagagaatactgtaagagct

SEQ ID NO: 89068 - DNA, 80 bp, synthetic construct
  source 1..80: mol_type = other DNA
tcattgagaggctgaataacaagaaggggaaaaacaaactacttgacggtgaaaggctagctgataggaagatcgccgag

SEQ ID NO: 89069 - DNA, 80 bp, synthetic construct
  source 1..80: mol_type = other DNA
cttttaagttgaaaacgttgaaaaacgaatgtataatagcactttatgctttatcaaatgatcttaacaacagagaagat

SEQ ID NO: 89070 - DNA, 80 bp, synthetic construct
  source 1..80: mol_type = other DNA
atataatgcattgatttattatagatataattattcatttgaccttaaacgatggatatacttacattcaacaggtaaag

SEQ ID NO: 89071 - DNA, 80 bp, synthetic construct
  source 1..80: mol_type = other DNA
gcaacccccgatggagacccatcaatatgtcgccgccacgggggttaacactgctcgagaggcccaggctactgcggcag

SEQ ID NO: 89072 - DNA, 80 bp, synthetic construct
  source 1..80: mol_type = other DNA
tcatgacttatctgcgcgggatttcattcaaagtcactgttgggacggttgtggccaatgagggctggaccactgacgag

SEQ ID NO: 89073 - DNA, 80 bp, synthetic construct
  source 1..80: mol_type = other DNA
tatgccctcacagcagtggttgttgcatcctacctgacaatttgccaccagcgttggatacggacacaggggatttcaat

SEQ ID NO: 89074 - DNA, 80 bp, synthetic construct
  source 1..80: mol_type = other DNA
ggggattagacgtttggctagagagcatcaacaggggctgctcttccggctggtggagtggcttttggccaaggtctgcg

SEQ ID NO: 89075 - DNA, 80 bp, synthetic construct
  source 1..80: mol_type = other DNA
ggccgaaggagacgtttgtccccggccggcagctgcagttttatagacagtgtagaaactgggtatcggctgggttctat

SEQ ID NO: 89076 - DNA, 80 bp, synthetic construct
  source 1..80: mol_type = other DNA
gtggatctgagggagttatgttttgacagggagtatgtttgtccatgtctcccgcttgagcggccccttcgcaagggctg

SEQ ID NO: 89077 - DNA, 80 bp, synthetic construct
  source 1..80: mol_type = other DNA
tggttgtctggcacggaagttaaagcaagtgtgtgggtgctttatgtcagatgctgtggaggtgttggaggattctctgg

SEQ ID NO: 89078 - DNA, 80 bp, synthetic construct
  source 1..80: mol_type = other DNA
aggatttgactgcagatttgtaccctggaccggaggtctatgaaccccaaggactggacaattggactatccgcgcctta

SEQ ID NO: 89079 - DNA, 80 bp, synthetic construct
  source 1..80: mol_type = other DNA
tcccctttgcagcttgtctttgaacccgctgtttcttggtcgcatccggtacagcgtgttattcatgattttctggagac

SEQ ID NO: 89080 - DNA, 80 bp, synthetic construct
  source 1..80: mol_type = other DNA
accgacgccttccatcaggcggctcggcgcgcacttagtgcaggatctaagctggccaattggcctgagattgggctagc

SEQ ID NO: 89081 - DNA, 80 bp, synthetic construct
  source 1..80: mol_type = other DNA
cttcctgttagcccccatcggacttgtcttccggggtgagcctgtgcccggccccgcgggccgtaggctggaaaatggac

SEQ ID NO: 89082 - DNA, 80 bp, synthetic construct
  source 1..80: mol_type = other DNA
cctactggggtgatgccccccccccctcggccacgcctgatgaactgccttatcagacgcccgtcagtccagacggcccg

SEQ ID NO: 89083 - DNA, 80 bp, synthetic construct
  source 1..80: mol_type = other DNA
ccaccaccagcatcatggacaccagggcctatttcccccaggtacactctcccgactccgatcgagtaccgaggtcaccc

SEQ ID NO: 89084 - DNA, 80 bp, synthetic construct
  source 1..80: mol_type = other DNA
cccgaggtccgcagggttttgggaggtgactccggaccccgcggctgagagccctctgagccgccattcgtccctttgca

SEQ ID NO: 89085 - DNA, 80 bp, synthetic construct
  source 1..80: mol_type = other DNA
gcgttgccttagagccggctcgcaacccacccgtgcagccggtccagaggcagctgttggaattgctaccggatggtgcg

SEQ ID NO: 89086 - DNA, 80 bp, synthetic construct
  source 1..80: mol_type = other DNA
gcgatatatgaggaggatctattcagttctaattgctactggttagttaatgcagcaaatgcacagcatgtccccggggg

SEQ ID NO: 89087 - DNA, 80 bp, synthetic construct
  source 1..80: mol_type = other DNA
aggggtttgcggggcgttctacggacgcttcccggaggcctttgatcgcactcagtttgtgcacccaaatgggtcgacgg

SEQ ID NO: 89088 - DNA, 80 bp, synthetic construct
  source 1..80: mol_type = other DNA
cggcctatacagtcacacctaggccaattattcatgccgtggcccctgattacaggcgacggcgagaccccgccgcttta

SEQ ID NO: 89089 - DNA, 80 bp, synthetic construct
  source 1..80: mol_type = other DNA
caagtggcctatcaggagtgcctctacaggcaggagacagccgcatattgcctgctcggtagcggtatatatcaagttcc

SEQ ID NO: 89090 - DNA, 80 bp, synthetic construct
  source 1..80: mol_type = other DNA
gtacgtccgccgcaaggctggcccttgcctggaggtcggtgcgcaccctcgatctattaatgaacatgccaatgtcatac

SEQ ID NO: 89091 - DNA, 80 bp, synthetic construct
  source 1..80: mol_type = other DNA
ccctgaggagtccatgcaggcttggtttgataatcacctgccaggggacgagatgtacctgctcccggccatgacatcct

SEQ ID NO: 89092 - DNA, 80 bp, synthetic construct
  source 1..80: mol_type = other DNA
taatcacctgccaggggacgagatgtacctgctcccggccatgacatcctggtaccgcgcctggcgcgggaagaccacca

SEQ ID NO: 89093 - DNA, 80 bp, synthetic construct
  source 1..80: mol_type = other DNA
ccccaccccacgccgccccccccggggcctgctgtcgcgtggtctgatgggcgtggaggagtgtgcggcccccagtctgg

SEQ ID NO: 89094 - DNA, 80 bp, synthetic construct
  source 1..80: mol_type = other DNA
tgatgggggtggaggagggcgcggcccccagtctgggcccccggcccacattctggtcgtgacacctgtgctggctaata

SEQ ID NO: 89095 - DNA, 80 bp, synthetic construct
  source 1..80: mol_type = other DNA
gcccccggcccacattctggtcgtgacacctgggctggctaatacggccaacttggccttgcagcaggagtctgaggggc

SEQ ID NO: 89096 - DNA, 80 bp, synthetic construct
  source 1..80: mol_type = other DNA
cttttgggaagtttgtgggtaactcccatgtgccccctgggccggtccgctaccggttcgtggcggtggtgccgtggtct

SEQ ID NO: 89097 - DNA, 80 bp, synthetic construct
  source 1..80: mol_type = other DNA
ggtaagtctgtcggggtccgccgggaggactgtgacttggtgattgtgccgacgaatcagttaaaggcacagtggcgtgc

SEQ ID NO: 89098 - DNA, 80 bp, synthetic construct
  source 1..80: mol_type = other DNA
gcggggctttcccgtgatgaccccccacgtggggctgcaacatgctaaaggcaaaaggttggttgtggatgaggccccta

SEQ ID NO: 89099 - DNA, 80 bp, synthetic construct
  source 1..80: mol_type = other DNA
ctgttccgccacacctcctactctgttatatgacctctgcctctgatgtggttttgttgggggaccctaggcagatcccg

SEQ ID NO: 89100 - DNA, 80 bp, synthetic construct
  source 1..80: mol_type = other DNA
gccattgattttgagagtaaggggctcatccctgccatgcagctgaatttggaacccacagagtggcggctccagtccca

SEQ ID NO: 89101 - DNA, 80 bp, synthetic construct
  source 1..80: mol_type = other DNA
tcggtgcccccgagatgtctgtcatctgttgtcagcggactaccccgggatgactaccacgaaccctatagtcaggtcct

SEQ ID NO: 89102 - DNA, 80 bp, synthetic construct
  source 1..80: mol_type = other DNA
acagatgctttcttccacctgatggcagagatatgcagcgctggcgcgattgcccgcggcgaggaccagctaataacatc

SEQ ID NO: 89103 - DNA, 80 bp, synthetic construct
  source 1..80: mol_type = other DNA
taattttcactgggcaaggccaggggcagaagcttgtgtttacgcaggccgcgaaggctatgcaccccggggccataact

SEQ ID NO: 89104 - DNA, 80 bp, synthetic construct
  source 1..80: mol_type = other DNA
gtgcatgaggcgcagggcagcacttttaatacaaccacactcattgtgacgaatgatgcgcgcgggctgttggctgcatc

SEQ ID NO: 89105 - DNA, 80 bp, synthetic construct
  source 1..80: mol_type = other DNA
ccgcgcgcattgcattgtcgctttgacgcgccatacagataagtgctatgttttagatggtcccgggctgctgaaagagt

SEQ ID NO: 89106 - DNA, 80 bp, synthetic construct
  source 1..80: mol_type = other DNA
tgggcgtcactgattctattttacataatttttatctcacccagcccgtagaggtgcaggccaggccggcagcagtggag

SEQ ID NO: 89107 - DNA, 80 bp, synthetic construct
  source 1..80: mol_type = other DNA
aagcccgagagggttgccaatttgcaagacatcgatatggtgcctcccgcccccccagacgtggctctacaccagatggc

SEQ ID NO: 89108 - DNA, 80 bp, synthetic construct
  source 1..80: mol_type = other DNA
tgaggcatttgggcacaggccccttgaggttcgggccgtggtgccactctgcccgacgttagaacaagggaaactttaca

SEQ ID NO: 89109 - DNA, 80 bp, synthetic construct
  source 1..80: mol_type = other DNA
ccccattcagcctttcggggcgggagcaggtgactgtcctggccctgtcctccaccgtccattgccgcatggccgccccg

SEQ ID NO: 89110 - DNA, 80 bp, synthetic construct
  source 1..80: mol_type = other DNA
gcccaccgcttagctgtcctgtcgactttggtgggcaggtatggcaaagagactaagctgtggcatgatgatgtagaggt

SEQ ID NO: 89111 - DNA, 80 bp, synthetic construct
  source 1..80: mol_type = other DNA
gatgcgggagtcgctccgaacgttggtgccgtcactgagcggtgttagggtaacaacatgtgagcttgcggagttggtgg

SEQ ID NO: 89112 - DNA, 80 bp, synthetic construct
  source 1..80: mol_type = other DNA
aggcgatggtggcgagaggccaggacggcactgcagtcctcgatctggacttctctgataaggcgtgcacccgtatcacc

SEQ ID NO: 89113 - DNA, 80 bp, synthetic construct
  source 1..80: mol_type = other DNA
cgccgttgcattcttacagggcgccaggcttctgatctttccttttgcacgcgtgggttcgaacgctgtcggcattatgc

SEQ ID NO: 89114 - DNA, 80 bp, synthetic construct
  source 1..80: mol_type = other DNA
tttttccagaaggactgtaacaagtttactacagatgagccagtgcagcacggcaaggtgggtcaaggaatatcagcctg

SEQ ID NO: 89115 - DNA, 80 bp, synthetic construct
  source 1..80: mol_type = other DNA
gtctaagacccttgtggcactttttggcccctggtttagggcaatagaaaaaacgattgtggacaacgcgcctgagtggt

SEQ ID NO: 89116 - DNA, 80 bp, synthetic construct
  source 1..80: mol_type = other DNA
gtttttacggtgactgctatacgcaggagaggtttgaggcagctgttgctggggccaaggcttgccgtgtttttgagaat

SEQ ID NO: 89117 - DNA, 80 bp, synthetic construct
  source 1..80: mol_type = other DNA
gattttagcgagtttgatagcacacagaacaattattccttggggctggagtgcttgttgatgaaggaggctggtgcccc

SEQ ID NO: 89118 - DNA, 80 bp, synthetic construct
  source 1..80: mol_type = other DNA
cgagtggctgtggaggctctaccacctgttgagatccgcctgggtgctgcaggcccctcaggagagcttgcggggccgtt

SEQ ID NO: 89119 - DNA, 80 bp, synthetic construct
  source 1..80: mol_type = other DNA
ggaagaaacactcaggcgaacccggcaccctgctctggaataccgtctggaacatggcggttataatgcattgctaccgc

SEQ ID NO: 89120 - DNA, 80 bp, synthetic construct
  source 1..80: mol_type = other DNA
ttcgacggcctagcggttgcagcatttaagggtgatgattctattgtgtgctgccggttttaccaacaggagccccgggc

SEQ ID NO: 89121 - DNA, 80 bp, synthetic construct
  source 1..80: mol_type = other DNA
tgccgcgcttatcaccggctgcggccttaaacttaaggttaactttggggatgttgggtcctatgcaggtttactggtgg

SEQ ID NO: 89122 - DNA, 80 bp, synthetic construct
  source 1..80: mol_type = other DNA
cctgcgggctcggtgtcacccccgatgttgtcaggttcctggggaggttatccgagaagaactggtgccctgttaaggag

SEQ ID NO: 89123 - DNA, 80 bp, synthetic construct
  source 1..80: mol_type = other DNA
cgtagggaagatctcgaacagtcagtgcgtgactttgttgctaaattacgcaacgtcacagccctttcatgcctacttgc

SEQ ID NO: 89124 - DNA, 80 bp, synthetic construct
  source 1..80: mol_type = other DNA
cgaggtcggggtcgcgttttactccttgcacgacctacatccgcgtgaggttgcccgggcaatgcgtgctcatggtatgc

SEQ ID NO: 89125 - DNA, 80 bp, synthetic construct
  source 1..80: mol_type = other DNA
aactagattttacaaattggagccaggcttggccctcaacgcggtggcaggcctgaaggccatcgcggagggccgtatgg

SEQ ID NO: 89126 - DNA, 80 bp, synthetic construct
  source 1..80: mol_type = other DNA
aattgaaggagtatacctggccggtgttgcaattggaggggaagaaggaataacactcgaggctgtagcatgtgcgcgaa

SEQ ID NO: 89127 - DNA, 80 bp, synthetic construct
  source 1..80: mol_type = other DNA
atgcgtgtcactctcgtgctcgtgcttttgttgttcgtgccgctgctgttcgcggcccccatgtaccccggaggagcccg

SEQ ID NO: 89128 - DNA, 80 bp, synthetic construct
  source 1..80: mol_type = other DNA
gggcgctggtgggccgcggcgagggacacgttcagatgcaaccgtgcctcacccagcccccccccctgtgcaacagacaa

SEQ ID NO: 89129 - DNA, 80 bp, synthetic construct
  source 1..80: mol_type = other DNA
attggctctccccaaccaatccctttgctgccgagttctccaccatgcctccactcggttccgcctgggttgatcggcgc

SEQ ID NO: 89130 - DNA, 80 bp, synthetic construct
  source 1..80: mol_type = other DNA
cgcggtaggccccgcaaccgggttgccatcgtacccgatgccgggcagtcgccaatgactgcccaggccccggcgcccaa

SEQ ID NO: 89131 - DNA, 80 bp, synthetic construct
  source 1..80: mol_type = other DNA
tacagcgcccgtccctgatgtggacagccgtgggtccatcttgcgccggcagtataatttatctacatcaccccttactc

SEQ ID NO: 89132 - DNA, 80 bp, synthetic construct
  source 1..80: mol_type = other DNA
ttactgtcccccagtcgtctaattccatactctatgcggcgtccctgaaccctcttttacctctgcaggacgggtcaaac

SEQ ID NO: 89133 - DNA, 80 bp, synthetic construct
  source 1..80: mol_type = other DNA
acgcatattatggcgactgaggcttctaattatgcccagtaccgagtgcaggcggctacactacggttccgcccgctggt

SEQ ID NO: 89134 - DNA, 80 bp, synthetic construct
  source 1..80: mol_type = other DNA
gcccaactcggtaggtgggtatgctgtttcaatgtcattttggccacagtctacaacggtccccacgtcggtcgacatga

SEQ ID NO: 89135 - DNA, 80 bp, synthetic construct
  source 1..80: mol_type = other DNA
acactctatatgctgtgatgcacctgccggccgaggcgctgttgccggatggggtttacaccacccgcgcctacaccgcg

SEQ ID NO: 89136 - DNA, 80 bp, synthetic construct
  source 1..80: mol_type = other DNA
actccatcacttcgaccgatgtgcggatagtggcgcaacccggactggccgcggagttaggcatacctcgagaacggctg

SEQ ID NO: 89137 - DNA, 80 bp, synthetic construct
  source 1..80: mol_type = other DNA
cattaccgtaaccagggctggcgctccgttgaaacgaattcggtgcctcaggaggagtcgacatctgggatgctaatggt

SEQ ID NO: 89138 - DNA, 80 bp, synthetic construct
  source 1..80: mol_type = other DNA
ttgcatacatggggcacccattaattctttcacaaattctgcttatacaggggcattgggtttgcttgatatcgccctcc

SEQ ID NO: 89139 - DNA, 80 bp, synthetic construct
  source 1..80: mol_type = other DNA
aggttgagtatcggaatttgaccccaggtaacactaacacccgtgttaaccgcttccgcaccacggcgcctcataaaatc

SEQ ID NO: 89140 - DNA, 80 bp, synthetic construct
  source 1..80: mol_type = other DNA
aaacggatgccggatgggactgcccaggttgccactgcatcggcggtgagatttatgcaagatgttcacctggcaggcgg

SEQ ID NO: 89141 - DNA, 80 bp, synthetic construct
  source 1..80: mol_type = other DNA
gaacggcgttggggatattggcaagggtattgtgcaggttttgtttaatattgccgataccttgctgggttggcttccca

SEQ ID NO: 89142 - DNA, 80 bp, synthetic construct
  source 1..80: mol_type = other DNA
cagatcttgtgtccaatgccggagggcagctgttctacggccgcccccaggtctccgaaaacggagaaccttctgttaag

SEQ ID NO: 89143 - DNA, 80 bp, synthetic construct
  source 1..80: mol_type = other DNA
ctctatacttctgttgaggccgcccaactcgatcagggcgtgacaattcctcatgatatagacctaggtctttctgctgt

SEQ ID NO: 89144 - DNA, 80 bp, synthetic construct
  source 1..80: mol_type = other DNA
cacattacaggattttgacaaccagcacctgcaagataggccaacaccttccccagcgccggcccgcccaattactaatt

SEQ ID NO: 89145 - DNA, 80 bp, synthetic construct
  source 1..80: mol_type = other DNA
ggcggtctggcgatgtcgtctgggtaactctgccttctgccgagtatgcccagtcgcagagcgctatggcgtcccaccct

SEQ ID NO: 89146 - DNA, 80 bp, synthetic construct
  source 1..80: mol_type = other DNA
cggaatttggaggggcggctgattgtgacatatgaaggggacacatctgctggttacaatcacgatcgaaaaaccattag

SEQ ID NO: 89147 - DNA, 80 bp, synthetic construct
  source 1..80: mol_type = other DNA
gcctactggtctgaggaggcaacaatcatcaacgttgcgaccggccagagggcggcagtttccaacatcaagtgggatca

SEQ ID NO: 89148 - DNA, 80 bp, synthetic construct
  source 1..80: mol_type = other DNA
ggtcactcttaatggcaaggcgctccacaaagagacccattcaggcctggtgtactaccaattgccacttatggggaaga

SEQ ID NO: 89149 - DNA, 80 bp, synthetic construct
  source 1..80: mol_type = other DNA
ttaatttctggcagcagggtactaccaaagctggctatacatataactataatactactgattttgatagtttgtgggtg

SEQ ID NO: 89150 - DNA, 80 bp, synthetic construct
  source 1..80: mol_type = other DNA
tggtgggacggctcctctaaagcttatctctatatttcaacctatactactatgttgggtgcagggcctgttaatataac

SEQ ID NO: 89151 - DNA, 80 bp, synthetic construct
  source 1..80: mol_type = other DNA
cgggttgggtgctatcggccctagcccgacggatcaggccttaattgctgcgcctttacatagtctgcaggatggctgcc

SEQ ID NO: 89152 - DNA, 80 bp, synthetic construct
  source 1..80: mol_type = other DNA
ctgcctgtgctttggccgggctatctacctgtctcgtagctgatgctatggcgcgagtacaggctctgtcagcagcagcc

SEQ ID NO: 89153 - DNA, 80 bp, synthetic construct
  source 1..80: mol_type = other DNA
gccgatagtgtctagtaatttcttttcctcctttctcttttcttctttattatcttctttttttctgctcttcgcaagac

SEQ ID NO: 89154 - DNA, 80 bp, synthetic construct
  source 1..80: mol_type = other DNA
gacctgggtcaaagccaccagggtccgaggctgctgtgcacttgtcatcgagcgtgtgagggccattggctgccactttg

SEQ ID NO: 89155 - DNA, 80 bp, synthetic construct
  source 1..80: mol_type = other DNA
cggctaccgcctttgctaatgctcaggtggtacgccccttcctgtcgcattctcaagcctctcttcttgttgagcttttc

SEQ ID NO: 89156 - DNA, 80 bp, synthetic construct
  source 1..80: mol_type = other DNA
tgttacgtatgacaaccgtgaccaacccctgccccatgccgtacaccccctatccgagggccactaccatctatgttcgc

SEQ ID NO: 89157 - DNA, 80 bp, synthetic construct
  source 1..80: mol_type = other DNA
agcctcttcagcgcagggggaagcgccggtctgcttggtccgccccctttgatgtgtgaaaaatcccgttccacttacca

SEQ ID NO: 89158 - DNA, 80 bp, synthetic construct
  source 1..80: mol_type = other DNA
ctgcgtgccggttgacatctgggaccgtctcatgctgtttggggccacattggatgatgaggccttttgctgcagtcgtc

SEQ ID NO: 89159 - DNA, 80 bp, synthetic construct
  source 1..80: mol_type = other DNA
tgctcccggccatgacatcctggtaccgcgcctggcgcgggaagaccaccacaggcgcagggtgcgctcacgcccccccc

SEQ ID NO: 89160 - DNA, 80 bp, synthetic construct
  source 1..80: mol_type = other DNA
tatgctttatctaacgattttaattcaagacaagatgttattaatttaattaataaacaaaaacaatcgcttattactgt

SEQ ID NO: 89161 - DNA, 80 bp, synthetic construct
  source 1..80: mol_type = other DNA
tagtataacttatgctgatgatcctaattactttataggaattaaatttaacagtataccttatgaatatgatgttaaag

SEQ ID NO: 89162 - DNA, 80 bp, synthetic construct
  source 1..80: mol_type = other DNA
gtggtataatcacctattgatgccaataacattacaatctctatcaattgaattagatggtgatgtttattacgtatttg

SEQ ID NO: 89163 - DNA, 80 bp, synthetic construct
  source 1..80: mol_type = other DNA
gagtaattgagaaaaggtcacattagccaccacaagactccctgcactagagtagcgcctaggcagcataaaatgtgacc

SEQ ID NO: 89164 - DNA, 80 bp, synthetic construct
  source 1..80: mol_type = other DNA
acatgtttgtgttactggggatgatagaaatgcaactgccagtattatatatgatggccttcttgctgacagtattggtt

SEQ ID NO: 89165 - DNA, 80 bp, synthetic construct
  source 1..80: mol_type = other DNA
tattggttacgactatgacactgcatttcaagcatgatgactgcaccaactcctcagacaatcaggcaatgccatgtgga

SEQ ID NO: 89166 - DNA, 80 bp, synthetic construct
  source 1..80: mol_type = other DNA
aattaagggaatcataaaccaatggtgtaatgctgctgaattagatcctttaccgttatgcatcgaacaaactgacaaat

SEQ ID NO: 89167 - DNA, 80 bp, synthetic construct
  source 1..80: mol_type = other DNA
tggttaaactagaagaagaaggaaaactatctgaagaatacgagcttctaatctcagattctgaagatgatgattaatgt

SEQ ID NO: 89168 - DNA, 80 bp, synthetic construct
  source 1..80: mol_type = other DNA
ctaaacagagaattactgagaattggggcaaactcagtatggactccagtttcttcgagtaaaattaaagggtggtgcat

SEQ ID NO: 89169 - DNA, 80 bp, synthetic construct
  source 1..80: mol_type = other DNA
cggggcccggcctaaacagccgcccccgagggaaacaacacaaaaacaaaaacctccacggccgcccaccccggagttaa

SEQ ID NO: 89170 - DNA, 80 bp, synthetic construct
  source 1..80: mol_type = other DNA
acaatcaattcacttctggcacggattgcagccgcccgttccttggtgcatcgggcaaaagaagagctttccagtaggcc

SEQ ID NO: 89171 - DNA, 80 bp, synthetic construct
  source 1..80: mol_type = other DNA
aagacccgttgttgtcatgatatcaggaaagccagggatagggaagacccaccttgccagagatttggcaaagaaagttg

SEQ ID NO: 89172 - DNA, 80 bp, synthetic construct
  source 1..80: mol_type = other DNA
ttaaaaagattccaccctccccgcccaacggggaggacgatatagtggtgtcctacagtgccaaaggtggtgtctccggt

SEQ ID NO: 89173 - DNA, 80 bp, synthetic construct
  source 1..80: mol_type = other DNA
ccctcgttgcccgtgcttcaggactcctccacgaaagactggacgagtacgagttacaagggccaacacccacaaccttc

SEQ ID NO: 89174 - DNA, 80 bp, synthetic construct
  source 1..80: mol_type = other DNA
aatttcgaccaaaacaaggtgttcgcctttaggcagctcgccgctgaaaataaatacgggctgatagacaccatgagagt

SEQ ID NO: 89175 - DNA, 80 bp, synthetic construct
  source 1..80: mol_type = other DNA
gggaagccagctcaaaaatgtcaaaactgtgtcagagctcaaacaggcactcaagaatatttcaattagaaggtgccaga

SEQ ID NO: 89176 - DNA, 80 bp, synthetic construct
  source 1..80: mol_type = other DNA
tagtctatggtggtctcacatactcacttgaatctgatggcaaaggtaatgtgagggttgataaggtgcaaagttcagct

SEQ ID NO: 89177 - DNA, 80 bp, synthetic construct
  source 1..80: mol_type = other DNA
gtgcagaccaacaatgagctaactggcgcactacaccatctgagatgcgctaggattagatattatgttaagtgtgtcca

SEQ ID NO: 89178 - DNA, 80 bp, synthetic construct
  source 1..80: mol_type = other DNA
cagaccacaggtggaggatgaggaagagaccaccagcaaagacgggtgcccaaaaccaaaggatgaggaagagtttgtca

SEQ ID NO: 89179 - DNA, 80 bp, synthetic construct
  source 1..80: mol_type = other DNA
tctcgtccgaagacatcaagcctgaaggcaagaagggaaagaacaagtctggccgtggcaagaaacacacagccttctcg

SEQ ID NO: 89180 - DNA, 80 bp, synthetic construct
  source 1..80: mol_type = other DNA
gggtctcaccaagtctctttataacatccacccatgtcatacctcaaggggcacaagagtttttcggtgtttccatcaaa

SEQ ID NO: 89181 - DNA, 80 bp, synthetic construct
  source 1..80: mol_type = other DNA
cagatccaaattcataaatcaggtgagttctgccgactaagattcccgaagccaattaggactgatgtgacaggtatgat

SEQ ID NO: 89182 - DNA, 80 bp, synthetic construct
  source 1..80: mol_type = other DNA
gtactgtcggaggacagatggggatgctcctgacagggtccaacgccaagagcatggacttgggtactacaccaggtgac

SEQ ID NO: 89183 - DNA, 80 bp, synthetic construct
  source 1..80: mol_type = other DNA
aaggaagtgagggcgaggccgtacttgaaggtggtgacaacaaaggcacctattgtggcgccccaatcctaggtccagga

SEQ ID NO: 89184 - DNA, 80 bp, synthetic construct
  source 1..80: mol_type = other DNA
aacgcccccaaactcagtactaaaaccaaattctggaggtcctcaacaacaccactcccacctggtacatatgaaccagc

SEQ ID NO: 89185 - DNA, 80 bp, synthetic construct
  source 1..80: mol_type = other DNA
gacggagagatttaccactacggcttgtacgtggagcggggcttggtgcttggggtgcacaaaccaccagcggctattag

SEQ ID NO: 89186 - DNA, 80 bp, synthetic construct
  source 1..80: mol_type = other DNA
catcagggtagggatgaacatgaatgaggatggtcccatcatttttgaaaaacactctaggtacacctaccattatgatg

SEQ ID NO: 89187 - DNA, 80 bp, synthetic construct
  source 1..80: mol_type = other DNA
aattttccccagaaccacacctagctcagattgtcgcagaagatctcctatctcccagcgtgatggacgtgggcgatttt

SEQ ID NO: 89188 - DNA, 80 bp, synthetic construct
  source 1..80: mol_type = other DNA
ctcctcacgctctgtgcactctctgaggtaacagatttatctcctgacaccatccaagcaaactcactcttctcttttta

SEQ ID NO: 89189 - DNA, 80 bp, synthetic construct
  source 1..80: mol_type = other DNA
cagaaaggctaacagtcaaactaaaagagtatggtctcaagccaacccgccctgacaagactgaagggcctctggtcatt

SEQ ID NO: 89190 - DNA, 80 bp, synthetic construct
  source 1..80: mol_type = other DNA
tcttgcaaaggttgaactagcaacactgtctctgtactggagaccagtgtacacccctcagtacctcatatccccgggaa

SEQ ID NO: 89191 - DNA, 80 bp, synthetic construct
  source 1..80: mol_type = other DNA
attccccaggtgaagtgttgttaaatttggaattaggccctgaattaaatccattcttggcacaccttgcaagaatgtac

SEQ ID NO: 89192 - DNA, 80 bp, synthetic construct
  source 1..80: mol_type = other DNA
ctggtggggttgaagtgcaggtgctacttgctgggaatgcgttcacggcaggaaaactagtgtttgcagcaatcccccca

SEQ ID NO: 89193 - DNA, 80 bp, synthetic construct
  source 1..80: mol_type = other DNA
cacttccctcttgagaatctgagtcctggtcaaattactatgtttcctcatgtaatcattgatgttagaactttagaacc

SEQ ID NO: 89194 - DNA, 80 bp, synthetic construct
  source 1..80: mol_type = other DNA
ctctaagaaaactacatggagagacattcccttacacggcctttgacaacaactgttacgccttctgttgttgggtcttg

SEQ ID NO: 89195 - DNA, 80 bp, synthetic construct
  source 1..80: mol_type = other DNA
caatattgaccatcggagaattgtcaaattctaggttcccagtaccaatagatgaattgtacaccagccccaatgaagga

SEQ ID NO: 89196 - DNA, 80 bp, synthetic construct
  source 1..80: mol_type = other DNA
gtggttgtgcaacctcaaaatggcagatcaacacttgatggtgaactgcttggcaccacacaacttgtaccatcaaacat

SEQ ID NO: 89197 - DNA, 80 bp, synthetic construct
  source 1..80: mol_type = other DNA
ctgtgccttgcgagggcgcatcaacgcccaagtgccagacgatcaccatcaatggaacttacaggttacaaatgcaaatg

SEQ ID NO: 89198 - DNA, 80 bp, synthetic construct
  source 1..80: mol_type = other DNA
ggacttcatttgaccccactgaagatgtccctgcaccattgggcacgccggatttcctggcaaacatctacggagtcact

SEQ ID NO: 89199 - DNA, 80 bp, synthetic construct
  source 1..80: mol_type = other DNA
agtcagaggaaccctgacaacacttgccgtgctcatgatggggttttggcaacctggagccctaaatttacacccaagtt

SEQ ID NO: 89200 - DNA, 80 bp, synthetic construct
  source 1..80: mol_type = other DNA
aggatctgtggttttgggtacttgggaagaaagtgatcttgatctcaatcagcccaccagatttacacctgttggtttgt

SEQ ID NO: 89201 - DNA, 80 bp, synthetic construct
  source 1..80: mol_type = other DNA
atgacacaaaccactttgatcagtggattctacccaattactctggaagattgaccttaaacatgaatttggcaccctcc

SEQ ID NO: 89202 - DNA, 80 bp, synthetic construct
  source 1..80: mol_type = other DNA
gttgcccccctattcccaggtgaacaaatacttttctttaggtcccacatgccacttaaaggaggcacttccaatggtgc

SEQ ID NO: 89203 - DNA, 80 bp, synthetic construct
  source 1..80: mol_type = other DNA
cattgactgtctgctccctcaggagtggattcagcatttctatcaggaatcagccccgtcacccacagatgttgctctga

SEQ ID NO: 89204 - DNA, 80 bp, synthetic construct
  source 1..80: mol_type = other DNA
ttaggtacaccaaccctgacacgggccgtgtcctatttgaggctaaattacatagacaggggtttatcacagtagcaaat

SEQ ID NO: 89205 - DNA, 80 bp, synthetic construct
  source 1..80: mol_type = other DNA
tctggttctagacctattgttgttcctcctaatggttattttaggtttgattcttgggttaatcagttttactctctcgc

SEQ ID NO: 89206 - DNA, 80 bp, synthetic construct
  source 1..80: mol_type = other DNA
ggcttgccggtgatatagtcaccaatggcattggttcacttgtgaacgctggagccaatgcaataaaccaaaaagtagat

SEQ ID NO: 89207 - DNA, 80 bp, synthetic construct
  source 1..80: mol_type = other DNA
aattcaggccacaaaacaattacaggctgacatgattgcgctcaaacaaggggtattgaccgcaggcggcttctccccta

SEQ ID NO: 89208 - DNA, 80 bp, synthetic construct
  source 1..80: mol_type = other DNA
tgctttctccggcgggttcacaagctctcccaataccaggactattgatttgcctaggaaaacatcaaccacaccagccc

SEQ ID NO: 89209 - DNA, 80 bp, synthetic construct
  source 1..80: mol_type = other DNA
ccacgcctgtgtctagacctagttcttctgcttctactgtttctacccgctcaacaattgttagcgggacttctggcctt

SEQ ID NO: 89210 - DNA, 80 bp, synthetic construct
  source 1..80: mol_type = other DNA
tcttcttcgactaggagctcttcccaacccacctcctcttcttctcggactagcgaatgggtgcgtagtcaaaacagggc

SEQ ID NO: 89211 - DNA, 80 bp, synthetic construct
  source 1..80: mol_type = other DNA
ggagcgttacaaactgcttacgtgacgcccccctctagtagagcttccagcaatggcacggtctcaaccgtgccaaaaga

SEQ ID NO: 89212 - DNA, 80 bp, synthetic construct
  source 1..80: mol_type = other DNA
acgattccaaattgaagaaggtggctaatatagtcctgtgtgctttgtcatcattattcaccaggcccattaaggacata

SEQ ID NO: 89213 - DNA, 80 bp, synthetic construct
  source 1..80: mol_type = other DNA
ggggagtcacaggtttagtgaaaagatgattctttcttctattctttttgaaatttctatcttttaaaaaaaaaaaaaaa

SEQ ID NO: 89214 - DNA, 80 bp, synthetic construct
  source 1..80: mol_type = other DNA
ataggaaaactaaggcccttgaacatactcaacatactagcttcctgcgactggactttcgcaggaatagtggaatccct

SEQ ID NO: 89215 - DNA, 80 bp, synthetic construct
  source 1..80: mol_type = other DNA
caaggggaccaaagcacccagtagtgatcagcactgcccctcagttaagatcgggaccaagacgttaacagtcccccctg

SEQ ID NO: 89216 - DNA, 80 bp, synthetic construct
  source 1..80: mol_type = other DNA
tgccaccaaccgtggagtcaaagactaagccctttacactccctattctgactcttggggagctgtccaactcaagattc

SEQ ID NO: 89217 - DNA, 80 bp, synthetic construct
  source 1..80: mol_type = other DNA
cccgctccaatagacatgttgtacactgaccccaatgaggcgattgtggtgcaaccacaaaatggcaggtgcactctaga

SEQ ID NO: 89218 - DNA, 80 bp, synthetic construct
  source 1..80: mol_type = other DNA
agggccttgctggtgagaagttcccctacacggccttcagtaacaactgttacaatttctgttgctgggtgcttgagctc

SEQ ID NO: 89219 - DNA, 80 bp, synthetic construct
  source 1..80: mol_type = other DNA
aggggcacgctaattagccagacgtcgaggtctgcagattcaacagattcagccccacgggtgaggaaccaccctctcca

SEQ ID NO: 89220 - DNA, 80 bp, synthetic construct
  source 1..80: mol_type = other DNA
aaggaactgtatttggggtcgctagccaaagaaacactacagggaactctataggcgcaacccgcgcccatgaagtgcac

SEQ ID NO: 89221 - DNA, 80 bp, synthetic construct
  source 1..80: mol_type = other DNA
atagacactacaaaccccagatacaccccaaagcttggctctgtgttgatgtattctgaatctactgattttgatgatgg

SEQ ID NO: 89222 - DNA, 80 bp, synthetic construct
  source 1..80: mol_type = other DNA
acaacccacccgctttacccccattggcatgggagccgatgattggcaccagtgggaattgcccgaatattctggtcacc

SEQ ID NO: 89223 - DNA, 80 bp, synthetic construct
  source 1..80: mol_type = other DNA
tcactcttaacatgaatttggcccccgcagttgcccctgctttccctggtgagcgcattctcttcttcagatcagtggtg

SEQ ID NO: 89224 - DNA, 80 bp, synthetic construct
  source 1..80: mol_type = other DNA
gattggcaggtgacgccataacaagtggtgtcgggtccctaatcaatgctggggccaatgcaattaaccaaaaggtagaa

SEQ ID NO: 89225 - DNA, 80 bp, synthetic construct
  source 1..80: mol_type = other DNA
atggaacaaggtactttgctccaaatagtatgaagacaaccagttattcgggccagttttccagcaaccctgtgcatagg

SEQ ID NO: 89226 - DNA, 80 bp, synthetic construct
  source 1..80: mol_type = other DNA
caacccactttaccccgttctgaacccccaaaaactaaggtcaatagtgattctgctagtgtgtatagttctgcatctac

SEQ ID NO: 89227 - DNA, 80 bp, synthetic construct
  source 1..80: mol_type = other DNA
tgctccttcacaatcaactcactcaacggctttgactgcggggtctagctcatctaggacaacatcctcttctgcagtag

SEQ ID NO: 89228 - DNA, 80 bp, synthetic construct
  source 1..80: mol_type = other DNA
caggggaccagcgcgtgggcctcatccctcgcaatggcgttgaccactgggatgcatacaagggagaaagagtcgtcctg

SEQ ID NO: 89229 - DNA, 80 bp, synthetic construct
  source 1..80: mol_type = other DNA
ctcctaggaattcccctggtgaagtgctcctcaatttggaattgggcccagagataaacccttatctggcccatcttgct

SEQ ID NO: 89230 - DNA, 80 bp, synthetic construct
  source 1..80: mol_type = other DNA
gttggaaccggtcaacctccctatgcctgacgttcgcaataacttcttccactacaaccaagggtctgattcgaaattgc

SEQ ID NO: 89231 - DNA, 80 bp, synthetic construct
  source 1..80: mol_type = other DNA
gcttggttgcaatgctgtacacacctcttagggcaaataactctggggatgatgttttcactgtgtcttgtagggtgctg

SEQ ID NO: 89232 - DNA, 80 bp, synthetic construct
  source 1..80: mol_type = other DNA
tggagtcaaagacaaaacccttcaccctcccaattctgactatctctgaaatgtctaattctaggtttccagtgccgatt

SEQ ID NO: 89233 - DNA, 80 bp, synthetic construct
  source 1..80: mol_type = other DNA
gattctctgcataccagcccaactgagaatattgttgtccagtgccaaaatggacgcgtcactcttgatggtgagttgat

SEQ ID NO: 89234 - DNA, 80 bp, synthetic construct
  source 1..80: mol_type = other DNA
gggcaccactcagctcttacctagtcaaatctgtgctttcaggggcgtactcactagatcaacaagcagggctagtgacc

SEQ ID NO: 89235 - DNA, 80 bp, synthetic construct
  source 1..80: mol_type = other DNA
aggccgacacagcaacccctagattgtttaattattattggcacatacaattggataatctaaatgggactccttatgat

SEQ ID NO: 89236 - DNA, 80 bp, synthetic construct
  source 1..80: mol_type = other DNA
cctgcagaagacataccaggccccttgggtacaccagatttccggggcaaagtctttggcgtggccagccaaagaaaccc

SEQ ID NO: 89237 - DNA, 80 bp, synthetic construct
  source 1..80: mol_type = other DNA
cgacagtacaactagagcacatgaagcaaaggtggacacaacagctggtcgcttcaccccaaaactaggctcattagaga

SEQ ID NO: 89238 - DNA, 80 bp, synthetic construct
  source 1..80: mol_type = other DNA
tatccactgaatctggcgactttgaccaaaaccaaccaacaagattcaccccagttggcattggggttgaccaagaggca

SEQ ID NO: 89239 - DNA, 80 bp, synthetic construct
  source 1..80: mol_type = other DNA
gacttccaacaatggtccttacccgactactctggccagttcactcacaacatgaacttagccccggctgttgctcccaa

SEQ ID NO: 89240 - DNA, 80 bp, synthetic construct
  source 1..80: mol_type = other DNA
cttccctggtgagcagctccttttcttccgctcacagctaccatcttctggtgggcgatccaatgggattctagactgcc

SEQ ID NO: 89241 - DNA, 80 bp, synthetic construct
  source 1..80: mol_type = other DNA
tggtcccccaagaatgggttcagcacttctaccaagaatcagcccccgcccaaacccaggtggctctggttagatatgtc

SEQ ID NO: 89242 - DNA, 80 bp, synthetic construct
  source 1..80: mol_type = other DNA
aaccctgacactggtagagtgttgtttgaggccaagctgcacaaattaggtttcatgaccatagctaagaatggtgactc

SEQ ID NO: 89243 - DNA, 80 bp, synthetic construct
  source 1..80: mol_type = other DNA
tccaataactgtccccccaaatggatattttaggtttgaatcttgggtgaacccattttacacacttgcccccatgggaa

SEQ ID NO: 89244 - DNA, 80 bp, synthetic construct
  source 1..80: mol_type = other DNA
tggcggcttttcccccactgatgcagctcgcggggcaattaatgcccccatgacaaaagtcctagattggagtggaacaa

SEQ ID NO: 89245 - DNA, 80 bp, synthetic construct
  source 1..80: mol_type = other DNA
ggtactgggcaccaagtgccacctctacaacctcgatgtcgggtggcttcacaaaccaggctgtgcacagaaccacacca

SEQ ID NO: 89246 - DNA, 80 bp, synthetic construct
  source 1..80: mol_type = other DNA
aattttaaaatgaaccaggcccccaaacccacacccagcagtgggtcttcagtgaggtcactctcaacccaagtcactag

SEQ ID NO: 89247 - DNA, 80 bp, synthetic construct
  source 1..80: mol_type = other DNA
tctgagctcacactcgtccgggtcgtctcgatccagcgagtctacagttgctagctcattaccatcctctaacaggacta

SEQ ID NO: 89248 - DNA, 80 bp, synthetic construct
  source 1..80: mol_type = other DNA
gggactgggtcaatcagcaaaatttcaatttggaaccacacatgcctgggtcacttaggacggcttttgtcactccacca

SEQ ID NO: 89249 - DNA, 80 bp, synthetic construct
  source 1..80: mol_type = other DNA
tagaaggggggagtcaaatgtttagtgaaaaggttattttaaatttgatttaaattggatttgatttggaatcttttaaa

SEQ ID NO: 89250 - DNA, 80 bp, synthetic construct
  source 1..80: mol_type = other DNA
gaaactgctgttgttagacgacgggaccgaggcaggtcccctagaagaagaactccctcgcctcgcagacgcagatctca

SEQ ID NO: 89251 - DNA, 80 bp, synthetic construct
  source 1..80: mol_type = other DNA
gaggttgggcatcacaacctcgcaaaggcatggggacgaccaccattcggcagtcaggaaggcagcccactcccatctct

SEQ ID NO: 89252 - DNA, 80 bp, synthetic construct
  source 1..80: mol_type = other DNA
atgtttgccatcataaagaaactgatgagatctgtgagctgcttgatggggaaattgatggataggggaaggcaagtgat

SEQ ID NO: 89253 - DNA, 80 bp, synthetic construct
  source 1..80: mol_type = other DNA
tgtgagtgggtgttactcttgcatgacaggcgccagggtctccatcaaactgcatagcagcaaaaatagcactgcacatg

SEQ ID NO: 89254 - DNA, 80 bp, synthetic construct
  source 1..80: mol_type = other DNA
tggtgccaacactggctgtatcaaagaataaagcattacaagcaattgacatggcattggacaggacataatgtaaaaca

SEQ ID NO: 89255 - DNA, 80 bp, synthetic construct
  source 1..80: mol_type = other DNA
acatatgctatattggtcatcagcgagcaagtcagacaggagaatctgattggaatcatgccaacaactaaacaacatca

SEQ ID NO: 89256 - DNA, 80 bp, synthetic construct
  source 1..80: mol_type = other DNA
gctggatactcatccatgagaaaaatgtcaccgtcacgcactcggttgaattgctagaaaccagaaagaagagagattct

SEQ ID NO: 89257 - DNA, 80 bp, synthetic construct
  source 1..80: mol_type = other DNA
gtattgcttattcgtctcagggagcaaaagcaggagtgaaaatgaatccaaatcagaagataataacaatcggctctgtc

SEQ ID NO: 89258 - DNA, 80 bp, synthetic construct
  source 1..80: mol_type = other DNA
agaccgtcattgctttaagctacattttctgtctgacttttggtcaggactttccagggaatgacaacagtacagcaaca

SEQ ID NO: 89259 - DNA, 80 bp, synthetic construct
  source 1..80: mol_type = other DNA
tggagttgggggaggagattatataagtgtttgcattttcccccaaggaaacggaagcctagaaaaatcaagtaatttat

SEQ ID NO: 89260 - DNA, 80 bp, synthetic construct
  source 1..80: mol_type = other DNA
gcctagaaaaatcaagtaatttataaaaatttcacgatccagctagcccaggagcgtgacgaatttgcacgcatgtacta

SEQ ID NO: 89261 - DNA, 80 bp, synthetic construct
  source 1..80: mol_type = other DNA
tgtttctttagggcgttactcgagtgagcataattggtctgcgcaccagcaccatgcaactttttcacctctgcctaatc

SEQ ID NO: 89262 - DNA, 80 bp, synthetic construct
  source 1..80: mol_type = other DNA
tgagaaagaagatgcaatgatatgcctgctaggctctatcgaactgttagcgaacattgcgttggcataggtacaaccta

SEQ ID NO: 89263 - DNA, 80 bp, synthetic construct
  source 1..80: mol_type = other DNA
atcgaactgttagcgaacattgcgttggcataggtacaacctatatcgagacacttagctgagtcagtatacgcttcgtc

SEQ ID NO: 89264 - DNA, 80 bp, synthetic construct
  source 1..80: mol_type = other DNA
gtcaagtctgactagagcgtgtagacatattgttgggcacagcacatgcactttgacctcgccaatcatctctgtcatgc

SEQ ID NO: 89265 - DNA, 80 bp, synthetic construct
  source 1..80: mol_type = other DNA
ggtattaaaccattttccagaacatcgagttatcattattccaaacgtaacacgttgtcgcacacgccgcgccctctcga

SEQ ID NO: 89266 - DNA, 80 bp, synthetic construct
  source 1..80: mol_type = other DNA
gacggggcgggtcctcgtgtagcagagtcgatatcgaccagtatagagggtatagtcgcaacagcttgcaggggagtgga

SEQ ID NO: 89267 - DNA, 80 bp, synthetic construct
  source 1..80: mol_type = other DNA
ttccagcaacaacacaggctgtctcttttaaatttcttctgtttaacagtgtgacccctttatattggcgtaaatgtgcc

SEQ ID NO: 89268 - DNA, 80 bp, synthetic construct
  source 1..80: mol_type = other DNA
ttatattggcgtaaatgtgccctacagatgaagaaacaacacctggcgactagtcacctccgcaacgagcccatttggcc

SEQ ID NO: 89269 - DNA, 80 bp, synthetic construct
  source 1..80: mol_type = other DNA
ctacagatgaagaaacaacacctggcgactagtcacctccgcaacgagcccatttggccaacaattctgtgcagggggga

SEQ ID NO: 89270 - DNA, 80 bp, synthetic construct
  source 1..80: mol_type = other DNA
acttgagggggctagctaccttgatgggtttggggggggggagaagaatcatctcgtaacttaacggggggttatgccaa

SEQ ID NO: 89271 - DNA, 80 bp, synthetic construct
  source 1..80: mol_type = other DNA
gggagaagaatcatctcgtaacttaacggggggttatgccaacactaatatgggcctaaagctcggacaactcatgtggt

SEQ ID NO: 89272 - DNA, 80 bp, synthetic construct
  source 1..80: mol_type = other DNA
cactaatatgggcctaaagctcggacaactcatgtggtttcacatttcttgtctcacttgggggggggaaatagtattag

SEQ ID NO: 89273 - DNA, 80 bp, synthetic construct
  source 1..80: mol_type = other DNA
cgacgtgacccgcgcccgcccccccctacagctcgggaactcatgcagtattcgtggactcatacggggaaacttaacgg

SEQ ID NO: 89274 - DNA, 80 bp, synthetic construct
  source 1..80: mol_type = other DNA
acaccctctttcgtaataacatttacacgagatatatcaaaaatgtgaacggtttgtaggccctctcacgtatgagaaaa

SEQ ID NO: 89275 - DNA, 80 bp, synthetic construct
  source 1..80: mol_type = other DNA
gtggtctgttccgggtcggggtctctccaatgctgtctttagtgctagcctcgggaaacaaaaaaactttccccaagaac

SEQ ID NO: 89276 - DNA, 80 bp, synthetic construct
  source 1..80: mol_type = other DNA
gaagatgcgattaattatgctggccggtttatcgcaagctcccaatatttgcattggaccaggtattaaaccttaattat

SEQ ID NO: 89277 - DNA, 80 bp, synthetic construct
  source 1..80: mol_type = other DNA
agaaacatctagtatcgtacgttccgactagaccgtatttacacctctctatggcagggggctattttttttggagagac

SEQ ID NO: 89278 - DNA, 80 bp, synthetic construct
  source 1..80: mol_type = other DNA
taacactctttattaaagaatttgggagcttcctggagtactctcgtttttgccttctgacttctttccttcagtacgag

SEQ ID NO: 89279 - DNA, 80 bp, synthetic construct
  source 1..80: mol_type = other DNA
ccaagacattatcaaaaaatgtgaacagtttgtaggcccactcacagttaatgagaaaagaagaattgctacatgtcgtc

SEQ ID NO: 89280 - DNA, 80 bp, synthetic construct
  source 1..80: mol_type = other DNA
cttagcatattggtggcccagcatgcacttacgcgcaaactcgtcatctcgtcagctcagctggctatgctggcatgaca

SEQ ID NO: 89281 - DNA, 80 bp, synthetic construct
  source 1..80: mol_type = other DNA
ggggaactaatgactctagccacatggttattttcttctctttaaaaacataccagggacctagtagtcagttatgttaa

SEQ ID NO: 89282 - DNA, 80 bp, synthetic construct
  source 1..80: mol_type = other DNA
gtgaacaatttgtaggcccactcacagtcaatgagaaaagaagattgcaattggttatgcctgctaggttttacccaaag

SEQ ID NO: 89283 - DNA, 80 bp, synthetic construct
  source 1..80: mol_type = other DNA
tgatctataagaatttgagctactgtggagtactctcgttttgctctgactctttcctcagtcgagatcttctagatacc

SEQ ID NO: 89284 - DNA, 80 bp, synthetic construct
  source 1..80: mol_type = other DNA
ggggtgaagttcgggagctgtaggataaattggtctgcgcaccaccatcatgcaactttttcacctctgcctaatcatct

SEQ ID NO: 89285 - DNA, 80 bp, synthetic construct
  source 1..80: mol_type = other DNA
atgaaaaaaagaagactgaaatatatgcctgctaggtttatcctaacagcacaaaaatattgcttagacaaaggataagc

SEQ ID NO: 89286 - DNA, 80 bp, synthetic construct
  source 1..80: mol_type = other DNA
aagcttatatcctgatcagaggtaatcatagtcaagccgacattattaacacactctctggaagctggaattctattaag

SEQ ID NO: 89287 - DNA, 80 bp, synthetic construct
  source 1..80: mol_type = other DNA
ctggcgtgatattcttggcatcgtcaagagtgtctacgctcatcatggagaaacgaatcgcctgtggtcagatagaaggg

SEQ ID NO: 89288 - DNA, 80 bp, synthetic construct
  source 1..80: mol_type = other DNA
ctgtggagctactctcaattttgcctttctgatagctgtccttccgtccgctgctactttttatttttcttctctctata

SEQ ID NO: 89289 - DNA, 80 bp, synthetic construct
  source 1..80: mol_type = other DNA
tcaagtagcggcagagtctcctgagcatagctcaactcaccatacagcactcaggcaagcaattctctgcagatgggaac

SEQ ID NO: 89290 - DNA, 80 bp, synthetic construct
  source 1..80: mol_type = other DNA
tcaactcaccatacagcactcaggcaagcaattctctgcagatgggaacatgagggtctggctacctggttgggtattgg

SEQ ID NO: 89291 - DNA, 80 bp, synthetic construct
  source 1..80: mol_type = other DNA
atgagggtctggctacctggttgggtattggggggggggagatcgagctttcaggtatctagtaggggggttatgttaat

SEQ ID NO: 89292 - DNA, 80 bp, synthetic construct
  source 1..80: mol_type = other DNA
gggagatcgagctttcaggtatctagtagggtggttatgttaatactaacatgggcctaaagatcaggcaattattgtgg

SEQ ID NO: 89293 - DNA, 80 bp, synthetic construct
  source 1..80: mol_type = other DNA
actaacatgggcctaaagatcaggcaattattgtggtttcatatttcttgccttacttttggggggagaaactgtccttg

SEQ ID NO: 89294 - DNA, 80 bp, synthetic construct
  source 1..80: mol_type = other DNA
cggcgggcccgccccgcctctgaaggatctcatccggatcccactgccagttattccttggactcatagggggaatttac

SEQ ID NO: 89295 - DNA, 80 bp, synthetic construct
  source 1..80: mol_type = other DNA
aatgcctactttgaagcctcctcctgtgtgttgtgggatcatggcttcggatcaggaccgttatgaagaatgtgtagcta

SEQ ID NO: 89296 - DNA, 80 bp, synthetic construct
  source 1..80: mol_type = other DNA
atgaaaaaagaagactggaggctattatgctgctagctttagtcttagcagccaaaatatttggcttttagaacaaggat

SEQ ID NO: 89297 - DNA, 80 bp, synthetic construct
  source 1..80: mol_type = other DNA
ggcttttagaacaaggatagcttatttatctgatcatgtagcttatcatactcagccggacattatttccaatcctcctg

SEQ ID NO: 89298 - DNA, 80 bp, synthetic construct
  source 1..80: mol_type = other DNA
ccaaatatttgccattggataagggtattaaaccatattatccagaacatctagttaatcattacttccaaactagacac

SEQ ID NO: 89299 - DNA, 80 bp, synthetic construct
  source 1..80: mol_type = other DNA
ggaagttcaattaggaataccacatcctgctggattaaaaaagaacaaatcaatcacagtattggatgtgggagatgcat

SEQ ID NO: 89300 - DNA, 80 bp, synthetic construct
  source 1..80: mol_type = other DNA
atttttcagtccctttacataaggaatttaggaaatatactgcattcactatacctagtattaataatgagacaccaggg

SEQ ID NO: 89301 - DNA, 80 bp, synthetic construct
  source 1..80: mol_type = other DNA
cctcaaatcactctttggcaacgacccgttgtcgcagtaagagtaggagggcagataatagaagctctattagacacagg

SEQ ID NO: 89302 - DNA, 80 bp, synthetic construct
  source 1..80: mol_type = other DNA
ccagaaaaaaagcatcagaaagaacccccatttcgatggctggggtatgaactccatcctgacaaatggacagtgcagcc

SEQ ID NO: 89303 - DNA, 80 bp, synthetic construct
  source 1..80: mol_type = other DNA
agaaccctttagagcaaaaaatccagaactagttatctaccaatacgtggatgatttgtttgtagggtctgacttagaaa

SEQ ID NO: 89304 - DNA, 80 bp, synthetic construct
  source 1..80: mol_type = other DNA
tagggcaacatagagcaaaaatagaggaactgagagaccatttattaaaatgggggtttactacaccagaaaaaaagcat

SEQ ID NO: 89305 - DNA, 80 bp, synthetic construct
  source 1..80: mol_type = other DNA
aggaaaaatttcaaaaattgggcctgaaaatccatataacactccagtgtttgccataaaaaagaagaacagtactaaat

SEQ ID NO: 89306 - DNA, 80 bp, synthetic construct
  source 1..80: mol_type = other DNA
caggaagtatactgcattcaccatacctagtacaaacaatgaaacaccaggaatcagatatcaatataatgtgcttccac

SEQ ID NO: 89307 - DNA, 80 bp, synthetic construct
  source 1..80: mol_type = other DNA
aggggtggaaaggatcaccagcaatatttcagagtagcatgacaagaatcctagaaccctttagggcacgaaaccccgaa

SEQ ID NO: 89308 - DNA, 80 bp, synthetic construct
  source 1..80: mol_type = other DNA
atagtaatttatcaatatatggatgacttatatgttggatctgatctagaaataatgcaacatagagcaaaagtagaaga

SEQ ID NO: 89309 - DNA, 80 bp, synthetic construct
  source 1..80: mol_type = other DNA
gttaagagaacacttattgaaatggggatttaccacaccagacaagaaacatcagaaagaacctccatttctttggatgg

SEQ ID NO: 89310 - DNA, 80 bp, synthetic construct
  source 1..80: mol_type = other DNA
gaaaattagtagacttcagagagctcaataaaagaactcaagacttctgggaggtccaattagggttaccccaccctggg

SEQ ID NO: 89311 - DNA, 80 bp, synthetic construct
  source 1..80: mol_type = other DNA
ggaggtccaattagggttaccccaccctggggggttaaaaaagaacaaatcagtaacagtactggatgtgggggatgcat

SEQ ID NO: 89312 - DNA, 80 bp, synthetic construct
  source 1..80: mol_type = other DNA
agcagatgatacagtgctaacagaaatagatttgccagggagatggaaaccaaaaatgatagggggaattggaggtttta

SEQ ID NO: 89313 - DNA, 80 bp, synthetic construct
  source 1..80: mol_type = other DNA
tcaaagtaagacaatatgataacatgaccatagaaattgaaggaagaaaggctacaggtacagtattaataggccctaca

SEQ ID NO: 89314 - DNA, 80 bp, synthetic construct
  source 1..80: mol_type = other DNA
cctcaaatcactctttggcaacgaccaataattgcagtaagaatagggggaaaactaatagaagccctattagacacagg

SEQ ID NO: 89315 - DNA, 80 bp, synthetic construct
  source 1..80: mol_type = other DNA
agacccctttagagcaaaaaacccagaaatagttatttgtcagtacgtggatgatttgtatgtggggtctgacttagaat

SEQ ID NO: 89316 - DNA, 80 bp, synthetic construct
  source 1..80: mol_type = other DNA
taaagcagcacagagaaaaggtagaggaactgagagagcatctcttgaagtggggacttaccacaccagatgaaaaacac

SEQ ID NO: 89317 - DNA, 80 bp, synthetic construct
  source 1..80: mol_type = other DNA
ggagatccaattaggaatacctcatcccgcgggattaccaaacaacaaatcagtaacagtgctagatgtgggggatgcat

SEQ ID NO: 89318 - DNA, 80 bp, synthetic construct
  source 1..80: mol_type = other DNA
agagccctttagaacaaaaaatccagatatagtgatctaccaatatgtggatgatttattagtaggatcagatttaggaa

SEQ ID NO: 89319 - DNA, 80 bp, synthetic construct
  source 1..80: mol_type = other DNA
cacagtaaaaatagagggacagctaatagaggccctattagacacaggagcagatgatacagtattagaaggaataaatt

SEQ ID NO: 89320 - DNA, 80 bp, synthetic construct
  source 1..80: mol_type = other DNA
agaggacggaaaaatttcaaaaattgggcctgaaaacccatacaatactccaatatttgccataaagaaaaaagagggta

SEQ ID NO: 89321 - DNA, 80 bp, synthetic construct
  source 1..80: mol_type = other DNA
atggatggaccaaaggttaaacagtggccattgacagaagaaaaaataaaagcattgacagaaatttgtaaagaattgga

SEQ ID NO: 89322 - DNA, 80 bp, synthetic construct
  source 1..80: mol_type = other DNA
tatactaaaactagcaggaagatggccagtcagagtaatacatacagacaatggcagtaatttcaccagtagtgcagtta

SEQ ID NO: 89323 - DNA, 80 bp, synthetic construct
  source 1..80: mol_type = other DNA
atgaataaagaattaaagaaaatcataggacaggtaagagatcaagctgagcatcttaaaacagcagtacaaatggcagt

SEQ ID NO: 89324 - DNA, 80 bp, synthetic construct
  source 1..80: mol_type = other DNA
aatggaatcagaaaagtgctgtttctagatggaatagataaggctcaagaagagcatgacagatatcacagcaattggag

SEQ ID NO: 89325 - DNA, 80 bp, synthetic construct
  source 1..80: mol_type = other DNA
atttggaaaggaccagccaagctactctggaaaggtgaaggggcagtagtaatacaagataacagtgaaataaaggtagt

SEQ ID NO: 89326 - DNA, 80 bp, synthetic construct
  source 1..80: mol_type = other DNA
accaaggaggaaagcaaaaatcattaaagactatggaaaacagatggcaggtgctgattgtgtggcaagtggacaggatg

SEQ ID NO: 89327 - DNA, 80 bp, synthetic construct
  source 1..80: mol_type = other DNA
cagcaattggagggcaatggccagtgattttaatctgccacctatagtagcaaaagaaatagtggccagctgtgataaat

SEQ ID NO: 89328 - DNA, 80 bp, synthetic construct
  source 1..80: mol_type = other DNA
gtcagttaaaaggtgaagccacacatggacaagtagactgtagtccaggaatatggcaattagattgtacacatctagaa

SEQ ID NO: 89329 - DNA, 80 bp, synthetic construct
  source 1..80: mol_type = other DNA
aacagcatactttatattaaaattagcaggaagatggccagtgaaagtaatacacacagacaatggcagcaacttcacca

SEQ ID NO: 89330 - DNA, 80 bp, synthetic construct
  source 1..80: mol_type = other DNA
gtgctgcagtaaaggcagcatgttggtgggcaaatgtcacacaagaatttggaattccctacaatccccaaagtcaagga

SEQ ID NO: 89331 - DNA, 80 bp, synthetic construct
  source 1..80: mol_type = other DNA
gtagtggaatctatgaataaagaattaaagaaaattatagggcaggtcagggatcaagctgaacaccttaagacagcagt

SEQ ID NO: 89332 - DNA, 80 bp, synthetic construct
  source 1..80: mol_type = other DNA
taatagcaacagacatacaaactaaagaactacaaaaacaaattacaaaaattcaaaattttcgggtttattacagggac

SEQ ID NO: 89333 - DNA, 80 bp, synthetic construct
  source 1..80: mol_type = other DNA
aaattagtcagtaatggaatcaggaaagtactattcttagatggcatagataaggcccaagaagaacatgaaagatatca

SEQ ID NO: 89334 - DNA, 80 bp, synthetic construct
  source 1..80: mol_type = other DNA
gagagcaatggcgagtgattttaatctgccacctgtagtagcaaaggaaatagtagccagctgtgataaatgtcaactaa

SEQ ID NO: 89335 - DNA, 80 bp, synthetic construct
  source 1..80: mol_type = other DNA
aaggggaagccatgcatggacaagtagactgtagtccagggatatggcaattagattgcacacatctagaaggaaaaata

SEQ ID NO: 89336 - DNA, 80 bp, synthetic construct
  source 1..80: mol_type = other DNA
atcctagtagcagtccatgtagccagtggctatatagaagcagaagttatcccagcagaaacaggacaggagacagcata

SEQ ID NO: 89337 - DNA, 80 bp, synthetic construct
  source 1..80: mol_type = other DNA
ctttctactgaaactagcaggaagatggccagtaagagtaatacacacagataatggcagtaattttaccagtgctacag

SEQ ID NO: 89338 - DNA, 80 bp, synthetic construct
  source 1..80: mol_type = other DNA
ttaaggccgcctgttggtgggcaggtatcaagcaggaattcggaattccctacaatccccaaagtcaaggagtagtagaa

SEQ ID NO: 89339 - DNA, 80 bp, synthetic construct
  source 1..80: mol_type = other DNA
tctatgaataaagagttaaagaaaattataggacaggtaagagatcaagctgaacaccttaagacagcagtacaaatggc

SEQ ID NO: 89340 - DNA, 80 bp, synthetic construct
  source 1..80: mol_type = other DNA
cagacatacaaactaaagaattacaaaaacaaattacaaaaattcaaaattttcgggtttattacagggacagcagagac

SEQ ID NO: 89341 - DNA, 80 bp, synthetic construct
  source 1..80: mol_type = other DNA
agcaatggaatcagaaaagtgctatttttagatgggatagataaggctcaagaagaacatgaaaaatatcacagcaattg

SEQ ID NO: 89342 - DNA, 80 bp, synthetic construct
  source 1..80: mol_type = other DNA
ccaatttggaaaggaccagcaaagcttctttggaaaggtgaaggggcagtagtaatacaagacaatagtgacataaaggt

SEQ ID NO: 89343 - DNA, 80 bp, synthetic construct
  source 1..80: mol_type = other DNA
agtaccaaggaggaaggcaaagatcattagggattatggaaaacagatggcaggtgatgattgtgtggcaggtagacagg

SEQ ID NO: 89344 - DNA, 80 bp, synthetic construct
  source 1..80: mol_type = other DNA
gtcagctaaaaggggaagctatgcatggacaggtagactgtagtccagggatgtggcaattagattgcacacatctggag

SEQ ID NO: 89345 - DNA, 80 bp, synthetic construct
  source 1..80: mol_type = other DNA
ggaaaaataatcctagtagcagtccatgtagccagtggctatatagaagcagaagttatcccagcagaaacaggacagga

SEQ ID NO: 89346 - DNA, 80 bp, synthetic construct
  source 1..80: mol_type = other DNA
aaattagtcagtagtggaatcaggagagtactatttttagatggcatagataaagcccaggaagatcatgagaggtatca

SEQ ID NO: 89347 - DNA, 80 bp, synthetic construct
  source 1..80: mol_type = other DNA
tgcatggacaagtagactgtagtccaggaatatggcaattagattgtacacatctagaaggaaaagttatcctggtagca

SEQ ID NO: 89348 - DNA, 80 bp, synthetic construct
  source 1..80: mol_type = other DNA
attagcaggaagatggccagtaaaagtagtgcatacagacaatggtagcaattttaccagtggcgccgttaaggccgcat

SEQ ID NO: 89349 - DNA, 80 bp, synthetic construct
  source 1..80: mol_type = other DNA
gggttacagtgcaggggaaagaataatagacataatagcatcagacatacaaactaaagaattacaaaaacaaatcacaa

SEQ ID NO: 89350 - DNA, 80 bp, synthetic construct
  source 1..80: mol_type = other DNA
caattttaaaagaaaaggggggattgggggttacagtgcaggggaaagaataatagacataatagcatcagacatacaaa

SEQ ID NO: 89351 - DNA, 80 bp, synthetic construct
  source 1..80: mol_type = other DNA
agaaaagtaaagatcattagggattatggaaaacaggtggcaggtgatgattgtgtggcaagtggacagaatgaggatta

SEQ ID NO: 89352 - DNA, 80 bp, synthetic construct
  source 1..80: mol_type = other DNA
aggagagtactgtttttagatggaatagataaggctcaagaggaacatgaaaaatatcacaacaattggagagcaatggc

SEQ ID NO: 89353 - DNA, 80 bp, synthetic construct
  source 1..80: mol_type = other DNA
ggaccagcaaaacttctctggaaaggtgaaggggcagtagtaatacaagataagagtgacataaaggtagtaccaagaag

SEQ ID NO: 89354 - DNA, 80 bp, synthetic construct
  source 1..80: mol_type = other DNA
atttagaaagaaacatccagagataatcatttatgagtacgtggatgatccttgtgagggatctgacttagaactggcac

SEQ ID NO: 89355 - DNA, 80 bp, synthetic construct
  source 1..80: mol_type = other DNA
tttgtacagaaatggaaaaggaaggaaaaatttctagaatggggcctgagaatccatataacactccaatttttgctata

SEQ ID NO: 89356 - DNA, 80 bp, synthetic construct
  source 1..80: mol_type = other DNA
caccaggaaccagataccagtacaatgtacttccacagggatggaaaggatcaccagcaatatttcagagtagcatgaca

SEQ ID NO: 89357 - DNA, 80 bp, synthetic construct
  source 1..80: mol_type = other DNA
tcaatttccctcaaatcactctttggcaacgaccccttgttaccataaaaatagaagggcagctaaaagaggctctatta

SEQ ID NO: 89358 - DNA, 80 bp, synthetic construct
  source 1..80: mol_type = other DNA
tcaaggtaagacaatatgatcagatagctatagaaatttgtggaaaaaaggctgtaggtacagtattagtaggacctacc

SEQ ID NO: 89359 - DNA, 80 bp, synthetic construct
  source 1..80: mol_type = other DNA
tagggcaacatagaacaaaaatagaagagttaagagctcatctcttgagctggggatttactacaccagacaaaaagcat

SEQ ID NO: 89360 - DNA, 80 bp, synthetic construct
  source 1..80: mol_type = other DNA
tcaaagtaagacagtatgatcagatacttatagaaatttgtgggaaaaaggctataggtacagtattaatagggcctacc

SEQ ID NO: 89361 - DNA, 80 bp, synthetic construct
  source 1..80: mol_type = other DNA
cctatcaacataattggaagaaatatgttgactcagattggttgtactttaaattttccaataagtcctattgaaactgt

SEQ ID NO: 89362 - DNA, 80 bp, synthetic construct
  source 1..80: mol_type = other DNA
atttttcagtccctttacatgaagatttcagaaaatatactgcattcactataccaagtataaacaatgagacaccaggg

SEQ ID NO: 89363 - DNA, 80 bp, synthetic construct
  source 1..80: mol_type = other DNA
atcagatatcagtacaatgtacttccacaaggatgggaaggatcaccagcaatattccagagtagcatgacaaaaatctt

SEQ ID NO: 89364 - DNA, 80 bp, synthetic construct
  source 1..80: mol_type = other DNA
agagccatttagattaaaaaatccagaaatagttgtctaccaatacatggatgacttgtatgtaggctctgatttagaaa

SEQ ID NO: 89365 - DNA, 80 bp, synthetic construct
  source 1..80: mol_type = other DNA
ggaagcaaaatccagacatagtcatctatcaatacgtggatgatttgtatgtaggatctgacttagaaatagagcagcat

SEQ ID NO: 89366 - DNA, 80 bp, synthetic construct
  source 1..80: mol_type = other DNA
agaacaaaaatagaggaactgagacaacatttgttgaggtgggggtttttcacaccagacaaaaaacatcaaaaggaacc

SEQ ID NO: 89367 - DNA, 80 bp, synthetic construct
  source 1..80: mol_type = other DNA
tccattcctttggatgggttatgaactccatcctgataaatggacagtacagactatagtactgccagaaaaagacagct

SEQ ID NO: 89368 - DNA, 80 bp, synthetic construct
  source 1..80: mol_type = other DNA
ttatgtaaactcattaggggaaccaaggcactgacagaagtgataccactaacagaagaagcagagctggaactggcaga

SEQ ID NO: 89369 - DNA, 80 bp, synthetic construct
  source 1..80: mol_type = other DNA
tggggaggagacaacaactccctctcagaagcaggagacgaaagacaaggagctatatcctttaacctccctcagatcac

SEQ ID NO: 89370 - DNA, 80 bp, synthetic construct
  source 1..80: mol_type = other DNA
cagtattagaagaaatggatttgccaggaagatggaaaccaaaaatgatagggggaattggaggttttatcaaagtaaga

SEQ ID NO: 89371 - DNA, 80 bp, synthetic construct
  source 1..80: mol_type = other DNA
cagtatgatcagatagccatagaaatctgtggacataaaactataggtacagtattaataggacctacaccggtcaacat

SEQ ID NO: 89372 - DNA, 80 bp, synthetic construct
  source 1..80: mol_type = other DNA
aattggaagaaatctgatgactcagcttggctgcactttaaattttcccattagtcctattgaaactgtagcagtaaaat

SEQ ID NO: 89373 - DNA, 80 bp, synthetic construct
  source 1..80: mol_type = other DNA
taaagccaggaatggatggcccaagggtcaaacagtggcctttgacagaagaaaaaataaaagcattagtagaaatttgt

SEQ ID NO: 89374 - DNA, 80 bp, synthetic construct
  source 1..80: mol_type = other DNA
acagaaatggaaaaggaagggaaaatttcaaaaattgggcctgaaaatccatacaatactccagtgtttgccataaagaa

SEQ ID NO: 89375 - DNA, 80 bp, synthetic construct
  source 1..80: mol_type = other DNA
tccaaggaagccagggaattttttcaaagcagaccagagccaacagccccaccagccccaccagaggagagcttcaggtt

SEQ ID NO: 89376 - DNA, 80 bp, synthetic construct
  source 1..80: mol_type = other DNA
taggaataccacaccccgcaggaataaaaaagaacaaatcagtaacagtactggatgtgggtgatgcatatttttcagtt

SEQ ID NO: 89377 - DNA, 80 bp, synthetic construct
  source 1..80: mol_type = other DNA
cccttagatgaagacttcagaaagtatactgcatttaccatacctagtataaacaatgagagaccaggaatgagatatca

SEQ ID NO: 89378 - DNA, 80 bp, synthetic construct
  source 1..80: mol_type = other DNA
gacttggagatagagcaacatagagcaaaaatagaggagttaagaggacgtctgttaaagtggggatttaccacaccgga

SEQ ID NO: 89379 - DNA, 80 bp, synthetic construct
  source 1..80: mol_type = other DNA
ccagggatcaaagtgaagcaactttgtaaactccttagggggactaaagcactaacagacatagtaccactaactgaaga

SEQ ID NO: 89380 - DNA, 80 bp, synthetic construct
  source 1..80: mol_type = other DNA
tgatagcggaaatacagaaacaggggcaggatcaatggacatatcagatttatcaagaaccatttaaaaatctaaaaaca

SEQ ID NO: 89381 - DNA, 80 bp, synthetic construct
  source 1..80: mol_type = other DNA
gggaagtatgcaaaaaggagggctgcccacagtaatgatgtaaaacagttagcagaggcagtgcaaaaaataaccataga

SEQ ID NO: 89382 - DNA, 80 bp, synthetic construct
  source 1..80: mol_type = other DNA
accaacagccccaccggcagagagcttcaggttcgaggagacaacccccgctccgaagcaggagctgaaggacagggaac

SEQ ID NO: 89383 - DNA, 80 bp, synthetic construct
  source 1..80: mol_type = other DNA
aagcatagtaatatggggaaagactcccaaatttagactgcccatccaaaaggaaacatgggagacatggtggacagact

SEQ ID NO: 89384 - DNA, 80 bp, synthetic construct
  source 1..80: mol_type = other DNA
tagacacaggggcagatgatacagtattagaagaaataagtttgccaggaaaatggaaaccaaaaatgataggaggaatt

SEQ ID NO: 89385 - DNA, 80 bp, synthetic construct
  source 1..80: mol_type = other DNA
ttagggaaaatttggccttcccacaagggaaggccagggaacttcctccagaacagaccaggaccaacagccccactaga

SEQ ID NO: 89386 - DNA, 80 bp, synthetic construct
  source 1..80: mol_type = other DNA
cacagggatggaaaggatcaccagcaatattccagcatagcatgacaaaaatcttggagccctttagatcaaaaaatcca

SEQ ID NO: 89387 - DNA, 80 bp, synthetic construct
  source 1..80: mol_type = other DNA
ggagctgaaagctcatctattgaagtggggactttttacaccagatcaaaagcatcagaaggaacctccatttcgttggc

SEQ ID NO: 89388 - DNA, 80 bp, synthetic construct
  source 1..80: mol_type = other DNA
gatggaccaaaggttaaacaatggccattgacagaagaaaaaataaaagcattaacagagatttgtaaagagatggagga

SEQ ID NO: 89389 - DNA, 80 bp, synthetic construct
  source 1..80: mol_type = other DNA
gaggttcaattaggaatccctcatcccgcgggcttaaaaaagaacaaatcagtaacaataatagatgtgggggatgcata

SEQ ID NO: 89390 - DNA, 80 bp, synthetic construct
  source 1..80: mol_type = other DNA
tttttcagttcccttatatgaggactttagaaagtacacagcattcactatacctagtataaataatgaaacaccaggga

SEQ ID NO: 89391 - DNA, 80 bp, synthetic construct
  source 1..80: mol_type = other DNA
gagccctttagaaaagaaaacccagaggtggtgatctaccaatatgtggatgacttatatgtagcatcagacttagagat

SEQ ID NO: 89392 - DNA, 80 bp, synthetic construct
  source 1..80: mol_type = other DNA
agggcaacatagagcaaaaatagaggagttgagagaacatttactgagatggggattttttacaccagacaaaaaacatc

SEQ ID NO: 89393 - DNA, 80 bp, synthetic construct
  source 1..80: mol_type = other DNA
gcagatgatacagtattagaaaaattagatataccagggaaatggaaaccaaaaataatagggggaattggaggtcttgt

SEQ ID NO: 89394 - DNA, 80 bp, synthetic construct
  source 1..80: mol_type = other DNA
cagagtaagacagtatgaacaggtacctatagaaatttgcggaaaaaagaccataggcacagtattagtaggacctacac

SEQ ID NO: 89395 - DNA, 80 bp, synthetic construct
  source 1..80: mol_type = other DNA
gagccctttagagcaaaaaatccagagatggagatctaccaatatgtggatgatctatatgtaggatctgacttagaaat

SEQ ID NO: 89396 - DNA, 80 bp, synthetic construct
  source 1..80: mol_type = other DNA
actcttgactataaaaacaaaggttttttaacatggcagtggtacaatttgttagtgacagagctttgcttagtgcctca

SEQ ID NO: 89397 - DNA, 80 bp, synthetic construct
  source 1..80: mol_type = other DNA
atcctaagatgcatgagtttagcaggagctatctaaagctgctatgcaatcatgctaagaccaaactgaggaagcagtat

SEQ ID NO: 89398 - DNA, 80 bp, synthetic construct
  source 1..80: mol_type = other DNA
tttaatgtgaacccctcttgtctctatgtccactcttatctcaagtctgtttacaggaacgggttcaaaattttcaggtg

SEQ ID NO: 89399 - DNA, 80 bp, synthetic construct
  source 1..80: mol_type = other DNA
acgggatgagcagccctgtccacgacgccctcagacttcaggagctcgctgatacctgtcctctcacactcaactgtgac

SEQ ID NO: 89400 - DNA, 80 bp, synthetic construct
  source 1..80: mol_type = other DNA
tcccccacccaacggggaggacggaccaatcatttcttacaacgtcaaaggaggtgtttctggtttgcctgagctctcaa

SEQ ID NO: 89401 - DNA, 80 bp, synthetic construct
  source 1..80: mol_type = other DNA
tcccccacccaacggggaggacggaccaatcatttcttacaacgtcaaagggggtgtttctggtttgcctgagctctcaa

SEQ ID NO: 89402 - DNA, 80 bp, synthetic construct
  source 1..80: mol_type = other DNA
ttgtgtacggtgggggcacatacacacttgagtctgatggcaaaggcaatgtgcatgtcgaaaaggtgaacaacaccagt

SEQ ID NO: 89403 - DNA, 80 bp, synthetic construct
  source 1..80: mol_type = other DNA
ctgtcacccaacttgaagagaactctacagcattcagcgttccccctcttagtcagagggagaacagagatgcaaaggaa

SEQ ID NO: 89404 - DNA, 80 bp, synthetic construct
  source 1..80: mol_type = other DNA
cgctgttggtggacagatgggcatgctactcacagggtctaacgctaagagcatggatttgggcacaacccctggcgatt

SEQ ID NO: 89405 - DNA, 80 bp, synthetic construct
  source 1..80: mol_type = other DNA
accactcccctgccacccggaacctatgagccagcttatctgggtggcaaggaccctagagtgaaaggtggcccctcact

SEQ ID NO: 89406 - DNA, 80 bp, synthetic construct
  source 1..80: mol_type = other DNA
aggtggttgcagaagaccttttgtcccccagtgtgatggatgtgggtgacttcaggatatcaatcaacgagggattgccc

SEQ ID NO: 89407 - DNA, 80 bp, synthetic construct
  source 1..80: mol_type = other DNA
tctggtgtcccttgcacttcacaatggaactccattgctcactggctcctcacactatgtgcactgtctgaagtcacaga

SEQ ID NO: 89408 - DNA, 80 bp, synthetic construct
  source 1..80: mol_type = other DNA
ccttgctaagattgagctggcccccttgtctttgtattggagaccagtgtacaccccacagtacctcatttcccctgaca

SEQ ID NO: 89409 - DNA, 80 bp, synthetic construct
  source 1..80: mol_type = other DNA
ctctcagaaagttgcatggggagacgttcccttatacagcctttgacaacaactgttatgccttctgctgttgggtgctt

SEQ ID NO: 89410 - DNA, 80 bp, synthetic construct
  source 1..80: mol_type = other DNA
agtcctgacttctcattcaatttccttgtgccacctactgtggagtcaaagacaaaacccttctccctccctatcctgac

SEQ ID NO: 89411 - DNA, 80 bp, synthetic construct
  source 1..80: mol_type = other DNA
tatttctgaaatgtctaattctaggttcccagtaccaattgattctctgcacaccagtcctactgagaatattgttgttc

SEQ ID NO: 89412 - DNA, 80 bp, synthetic construct
  source 1..80: mol_type = other DNA
agtgccaaaatgggcgcgtcacccttgatggtgagttgatgggcaccacccaactcttgcctagccaaatctgtgctttc

SEQ ID NO: 89413 - DNA, 80 bp, synthetic construct
  source 1..80: mol_type = other DNA
aggggagttctcaccagatcaacaagcagggccagtgaccaggccgatacagcaacccctagattgtttaattattattg

SEQ ID NO: 89414 - DNA, 80 bp, synthetic construct
  source 1..80: mol_type = other DNA
gcatatacaattggataatctaaatggaaccccttatgatcctgcagaagacataccaggccccctagggacaccagatt

SEQ ID NO: 89415 - DNA, 80 bp, synthetic construct
  source 1..80: mol_type = other DNA
tccgtggcaaagtctttggcgtggccagccagagaaatcttgataccacgactagggcacatgaagcaaagatagacacc

SEQ ID NO: 89416 - DNA, 80 bp, synthetic construct
  source 1..80: mol_type = other DNA
acatctggccgcttcaccccaaagctaggctcattagaaatatccactgaatctagtgattttgatcaaagccaaccaac

SEQ ID NO: 89417 - DNA, 80 bp, synthetic construct
  source 1..80: mol_type = other DNA
tcacacacaacatgaacttagcaccagctgttgctcccaacttccctggtgagcagctccttttcttccgctcacatttg

SEQ ID NO: 89418 - DNA, 80 bp, synthetic construct
  source 1..80: mol_type = other DNA
ccatcttctggtgggcgatctaacgggattctagactgcctggtcccccaagaatgggtacagcacttctaccaagagtc

SEQ ID NO: 89419 - DNA, 80 bp, synthetic construct
  source 1..80: mol_type = other DNA
agccccctctcagtctcaagtggccctggttaggtatgttaaccctgacactggtagagtgttatttgaggccaagctac

SEQ ID NO: 89420 - DNA, 80 bp, synthetic construct
  source 1..80: mol_type = other DNA
acaaattgggtttcatgactatagccaagaatggtgattctccaataattgttcctccaaatggatactttaggtttgaa

SEQ ID NO: 89421 - DNA, 80 bp, synthetic construct
  source 1..80: mol_type = other DNA
aggatctgtggtcttgggtacttgggaaaaagaagattttaatatcaatcagcctaccagattcacacctattggtttgc

SEQ ID NO: 89422 - DNA, 80 bp, synthetic construct
  source 1..80: mol_type = other DNA
ataatacagaacactttaagcagtgggttctacccaattattctggaatgttgaccttaaacatgaatttggcaccctct

SEQ ID NO: 89423 - DNA, 80 bp, synthetic construct
  source 1..80: mol_type = other DNA
gttgctcccctcttcccaggtgaacaaatactcttctttaggtcctttataccactcaatggaggcaaatccgacggtgc

SEQ ID NO: 89424 - DNA, 80 bp, synthetic construct
  source 1..80: mol_type = other DNA
ttaggtacaccaatcctgacacgggccgcgtcctctttgaggccaaattacatagacagggattcattacagtagcaagt

SEQ ID NO: 89425 - DNA, 80 bp, synthetic construct
  source 1..80: mol_type = other DNA
tgtccttttacctttaccagatgttagaaataacttctttcattacaatcagcagcctgaggcccgtatgaaacttgtgg

SEQ ID NO: 89426 - DNA, 80 bp, synthetic construct
  source 1..80: mol_type = other DNA
gagctctgcagatatctggggtggcagaccacgtatgtggtcgatgccatggaggcccaccagttcattaaggctcctgg

SEQ ID NO: 89427 - DNA, 80 bp, synthetic construct
  source 1..80: mol_type = other DNA
ggaggcagcaaggaaaacagtccattaggggagcagctaagtgtggatacggatctaagtccacggttacaagaaatttc

SEQ ID NO: 89428 - DNA, 80 bp, synthetic construct
  source 1..80: mol_type = other DNA
tggtggggatagtagtgacaatgcagaaaatgtagatccgcattgcagtattacagaactaaaggagctattacaagcaa

SEQ ID NO: 89429 - DNA, 80 bp, synthetic construct
  source 1..80: mol_type = other DNA
tgaaggtggggattggagacccatagtacaattcctaagatatcagggagtagaatttattagctttttaagggcactaa

SEQ ID NO: 89430 - DNA, 80 bp, synthetic construct
  source 1..80: mol_type = other DNA
gggtgtatattatataaaagatggagataccacatattatgtacaatttaaaagcgaatgtgagaaatatggaaatagta

SEQ ID NO: 89431 - DNA, 80 bp, synthetic construct
  source 1..80: mol_type = other DNA
ccgtacgggctatgtacccttagggggcaggtctaatactgttgtggatgttggccccactaggccacctgtggttattg

SEQ ID NO: 89432 - DNA, 80 bp, synthetic construct
  source 1..80: mol_type = other DNA
acgtagtggtaaacaaatagggggtagggtacatttttaccatgatataagccccattgctgctacagaggaaattgaat

SEQ ID NO: 89433 - DNA, 80 bp, synthetic construct
  source 1..80: mol_type = other DNA
gggccaagggcacactttgtaaacctgcacaattgcaacctggtgactgtcctcctttggaacttaaaaacaccattatt

SEQ ID NO: 89434 - DNA, 80 bp, synthetic construct
  source 1..80: mol_type = other DNA
gcactagcgctaatatgcgtgaaacccctggcagttgtgtgtattccccttctcccagtggctctattattacttctgat

SEQ ID NO: 89435 - DNA, 80 bp, synthetic construct
  source 1..80: mol_type = other DNA
cttcttggcgtacatgtggcacacctggtattagtcattttcctgtccaggtgtactaaaacaatggcttgcacaactgt

SEQ ID NO: 89436 - DNA, 80 bp, synthetic construct
  source 1..80: mol_type = other DNA
aaactataaactgactcacttatacatacatagtttatgcaaccgaaaaaggttgggccctataacacataccttttctt

SEQ ID NO: 89437 - DNA, 80 bp, synthetic construct
  source 1..80: mol_type = other DNA
cgacggggagggaacggggtgtaatggctggttctttgtagaaacaattgtagagaaaaaaacaggtgatgtaatatcag

SEQ ID NO: 89438 - DNA, 80 bp, synthetic construct
  source 1..80: mol_type = other DNA
taataataataatcttgttataaaaaagtagggagtaaccgaaattggtgaaccgaaaacggttggtatataaagcacat

SEQ ID NO: 89439 - DNA, 80 bp, synthetic construct
  source 1..80: mol_type = other DNA
gggcatggttatgttaatgcttgtaagatttaaatgtgcaaaaaatagaataacaattgaaaaattattagaaaagttat

SEQ ID NO: 89440 - DNA, 80 bp, synthetic construct
  source 1..80: mol_type = other DNA
actgtggggttatcagtgcagctgcatgcacaaaccaaacaagggctgtcagttgtcctgcaactacacctataatacac

SEQ ID NO: 89441 - DNA, 80 bp, synthetic construct
  source 1..80: mol_type = other DNA
acagtaacttttttacttgtatatactgttgtttgtattggtattggtataataaacttttttactttttttttattatt

SEQ ID NO: 89442 - DNA, 80 bp, synthetic construct
  source 1..80: mol_type = other DNA
gatctggtactgggggtcgcactggatatgtccctcttagtacacgtccttctacagtatctgaggcaagtatacctatt

SEQ ID NO: 89443 - DNA, 80 bp, synthetic construct
  source 1..80: mol_type = other DNA
gggtgcgccgtcctgcacgtttagggttatatagtaaggctacacaacaagtaaaagttattgatccaacgtttcttagt

SEQ ID NO: 89444 - DNA, 80 bp, synthetic construct
  source 1..80: mol_type = other DNA
acctttaggggcgtctgcaactactacttctactttaaatgatggcttatatgacatttatgcagacactgattttactg

SEQ ID NO: 89445 - DNA, 80 bp, synthetic construct
  source 1..80: mol_type = other DNA
ttggggtaaaggtagtccttgtagtaataatgctattacccctggtgattgtcctccattagaattaaaaaattcagtta

SEQ ID NO: 89446 - DNA, 80 bp, synthetic construct
  source 1..80: mol_type = other DNA
tgttactcatataattaattgcatataggtattacaccgttttcggttacagttttacaagcaattgttctttttatact

SEQ ID NO: 89447 - DNA, 80 bp, synthetic construct
  source 1..80: mol_type = other DNA
ggggaggggacgggatgcaatggttggttttatgtagaagcagtaattgacagacagacaggagacaacatttcagacga

SEQ ID NO: 89448 - DNA, 80 bp, synthetic construct
  source 1..80: mol_type = other DNA
cgaaaatgaagacagtagtgatactggggaggatatggttgactttattgacaattgtaatgtatacaacaatcaggcag

SEQ ID NO: 89449 - DNA, 80 bp, synthetic construct
  source 1..80: mol_type = other DNA
tcaatttgacctatcgcaaatgatacagtgggcatttgataatgatataacagacgactgtgaaatagcatataaatatg

SEQ ID NO: 89450 - DNA, 80 bp, synthetic construct
  source 1..80: mol_type = other DNA
gaatatttaagacatgcagaagagtttgatttacagtttgtttttcagttatgtaaaattagtttaactactgaggtaat

SEQ ID NO: 89451 - DNA, 80 bp, synthetic construct
  source 1..80: mol_type = other DNA
tgtatgtgtatgtgtatgtgtagtaatgtttgtatgtatgtttaataaagtttatatgtgtgttgtgtgggtggtttact

SEQ ID NO: 89452 - DNA, 80 bp, synthetic construct
  source 1..80: mol_type = other DNA
gcagatcaggaggcagtacaggcactaaaacgaaagctattaggcagtccatatgaaagccctgtcagtgattcacagca

SEQ ID NO: 89453 - DNA, 80 bp, synthetic construct
  source 1..80: mol_type = other DNA
cagcatagacaacgaactaagtcctaggcttggcggtttaacgctatgtcgggggtcccaaggggccaaacgacgattat

SEQ ID NO: 89454 - DNA, 80 bp, synthetic construct
  source 1..80: mol_type = other DNA
tccagtcactggaaaatcgagacagtggatatggctattctgaagtggaagtacagcagacacaggtagaacacggacat

SEQ ID NO: 89455 - DNA, 80 bp, synthetic construct
  source 1..80: mol_type = other DNA
atggctattctgaagtggaagtacagcagacacaggtagaacacggacatggcgccgtacatgggactatgggtaacggg

SEQ ID NO: 89456 - DNA, 80 bp, synthetic construct
  source 1..80: mol_type = other DNA
ggcgccgtacatgggactatgggtaacgggggggcagtgggtagtgaacttggagtgcaggaaaatgaagaaggtagtac

SEQ ID NO: 89457 - DNA, 80 bp, synthetic construct
  source 1..80: mol_type = other DNA
tacaagtacgcctacaacaagggtggtagaattacttaagtgtaagaacctgcatgcaacattgttaggtaagtttaaag

SEQ ID NO: 89458 - DNA, 80 bp, synthetic construct
  source 1..80: mol_type = other DNA
aattgtttggagtgtcatttggcgatttagtaagacagtttaaaagtgacaaaagcagttgtacagactgggttattgca

SEQ ID NO: 89459 - DNA, 80 bp, synthetic construct
  source 1..80: mol_type = other DNA
gcatttggggttaatcatagtattgcagaagggtttaatacattaattaaagcagattcactatatacacatatacaatg

SEQ ID NO: 89460 - DNA, 80 bp, synthetic construct
  source 1..80: mol_type = other DNA
gctaacctgtacgtggggcatggtgttattaatgctaattagatttaaatgtggaaaaaatcgtactacagtgtccaaag

SEQ ID NO: 89461 - DNA, 80 bp, synthetic construct
  source 1..80: mol_type = other DNA
gaatttgggctgacattgcggaatttacagatttcctgcatttggtgcaaaaagcacttaacaggcgcagaggtgctcgc

SEQ ID NO: 89462 - DNA, 80 bp, synthetic construct
  source 1..80: mol_type = other DNA
gccttagtaaattattaaacatacctacaaatcaattattaatagagccacctcggttacaaagtgtggctgccgccata

SEQ ID NO: 89463 - DNA, 80 bp, synthetic construct
  source 1..80: mol_type = other DNA
tactggtttagatcaggaatatctaatgctagcattgtaaccggagacacaccagagtggattcaaagacaaacaatttt

SEQ ID NO: 89464 - DNA, 80 bp, synthetic construct
  source 1..80: mol_type = other DNA
agaacattgttttgcagatgcccaatttaatttaacagaaatggtgcaatgggcatatgataatgatattactgaagaca

SEQ ID NO: 89465 - DNA, 80 bp, synthetic construct
  source 1..80: mol_type = other DNA
gtgacattgcatatgaatatgcacaacgggcagacagggatagcaatgctgctgcatttttaaaaagtaactgccaggca

SEQ ID NO: 89466 - DNA, 80 bp, synthetic construct
  source 1..80: mol_type = other DNA
atgagacgtatgtctatgggtgcatggataaaacatagaagtgccaagataggggatagtggagattggaaacctatagt

SEQ ID NO: 89467 - DNA, 80 bp, synthetic construct
  source 1..80: mol_type = other DNA
aaaatttattagatatcaacaaattgattttttagcatttatgtctgcatttaaaaagtttttacataatatacctaaaa

SEQ ID NO: 89468 - DNA, 80 bp, synthetic construct
  source 1..80: mol_type = other DNA
aaagttgtttagtgttaattggtcctccaaatacaggaaaatcacagtttggaatgagtttaataaacttcttagcagga

SEQ ID NO: 89469 - DNA, 80 bp, synthetic construct
  source 1..80: mol_type = other DNA
actgtaatatcatttgtaaattcacatagccatttttggctgcagccattggacagtgcaaaaatagctatgctggatga

SEQ ID NO: 89470 - DNA, 80 bp, synthetic construct
  source 1..80: mol_type = other DNA
ctccaccatgttggacatatttagatatatatttaagaaatttattagatggcaatccatgcagtatagatagaaaacat

SEQ ID NO: 89471 - DNA, 80 bp, synthetic construct
  source 1..80: mol_type = other DNA
aaagcattaacagttgttaagtgcccaccattacttataacatcaaatacagatattagaacaaatgacaaatggaaata

SEQ ID NO: 89472 - DNA, 80 bp, synthetic construct
  source 1..80: mol_type = other DNA
gtaccattttaaagatttggtagtggtgtggaggaaggactttccatatgctgcatgtgcattttgtttagaatttaatt

SEQ ID NO: 89473 - DNA, 80 bp, synthetic construct
  source 1..80: mol_type = other DNA
ctatggagagactggccaaacgtttagatgcgtgccaggaacagttgttagaactgtatgaggaaaatagtagggattta

SEQ ID NO: 89474 - DNA, 80 bp, synthetic construct
  source 1..80: mol_type = other DNA
caaaaacatattgaacattggaaatgtttacgtatggaggcagtggtattgtataaggcccgtgaaatgggctttgcaaa

SEQ ID NO: 89475 - DNA, 80 bp, synthetic construct
  source 1..80: mol_type = other DNA
tataggacatcaaatagtaccaacattggaaacatgtagagccaaggcccacatggcaattgaaatacacttggcattag

SEQ ID NO: 89476 - DNA, 80 bp, synthetic construct
  source 1..80: mol_type = other DNA
agacattattgcagtcctcgtatggtaaagaaccatggacattgcaagaaacaagtaatgaactgtggcttacgaatcct

SEQ ID NO: 89477 - DNA, 80 bp, synthetic construct
  source 1..80: mol_type = other DNA
aaaaaatgttttaaaaaacaaggacgtaccgtggaggttatatttgatggaaaacaggacaatgcaatgcattatacagc

SEQ ID NO: 89478 - DNA, 80 bp, synthetic construct
  source 1..80: mol_type = other DNA
atggacatatatatatatacaaactgtgcaaggtacatggtgtaaagtacaaggacacgtttgccatgcaggactatatt

SEQ ID NO: 89479 - DNA, 80 bp, synthetic construct
  source 1..80: mol_type = other DNA
atattgtggaaaatatgaaacagttttattgtaattttaaagaggaggcaaaaaaatatggggtaacagaccaatgggag

SEQ ID NO: 89480 - DNA, 80 bp, synthetic construct
  source 1..80: mol_type = other DNA
gtacatgatggcaatcaggtgattgtttctcctgcacccatatctagcaccacatccaccgacgcagagataccctctac

SEQ ID NO: 89481 - DNA, 80 bp, synthetic construct
  source 1..80: mol_type = other DNA
ctaaaatttgtgcactgcgacactacgaaagatcagcattttggtatacagtggagaaagaaactggactacttttagaa

SEQ ID NO: 89482 - DNA, 80 bp, synthetic construct
  source 1..80: mol_type = other DNA
tggatctactaagttggtacaacaagtgtgcaccacaaacccattgcacaccacaacgtccattgacaaccaccacgcag

SEQ ID NO: 89483 - DNA, 80 bp, synthetic construct
  source 1..80: mol_type = other DNA
actgtacagacggaacagcatacaacgtgcccatccaaacctcaccgccacgaaaacgatacagacagtgtggacagtcg

SEQ ID NO: 89484 - DNA, 80 bp, synthetic construct
  source 1..80: mol_type = other DNA
ccatcacagcacctgcagcactcaaaccccagcatccccagcatccccagcgcatccgtggaccctggattgtgtggggt

SEQ ID NO: 89485 - DNA, 80 bp, synthetic construct
  source 1..80: mol_type = other DNA
cagaactaacagtgaaaactgtaacaagcgacggaaccactgtggaagtcaggctacgcctgtaattcatttacaaggtg

SEQ ID NO: 89486 - DNA, 80 bp, synthetic construct
  source 1..80: mol_type = other DNA
accctaattgcctaaaatgcctacgatttaggctaaaaagaaattgttcacatttatttacacaggtgtcatctacatgg

SEQ ID NO: 89487 - DNA, 80 bp, synthetic construct
  source 1..80: mol_type = other DNA
catttaacagaaaatgattgtacacgtgacactaaaactggtataataacaatacattattatgatgaagcacaaagaaa

SEQ ID NO: 89488 - DNA, 80 bp, synthetic construct
  source 1..80: mol_type = other DNA
tttatttttaaatactgtaaaaataccttctgggataaaatcctgtattggatatatgtctatgttacagtttatatgat

SEQ ID NO: 89489 - DNA, 80 bp, synthetic construct
  source 1..80: mol_type = other DNA
tagttgtatatgtgtataaacagttataggacttcaatactgtgactccacaacgtgtgggacaaccggccagaaactgc

SEQ ID NO: 89490 - DNA, 80 bp, synthetic construct
  source 1..80: mol_type = other DNA
tgcttttattgtttatagttgttggtgcgtgtgttgtgtgtgtgtggattagtttacaaaattatccatatcctgtatgg

SEQ ID NO: 89491 - DNA, 80 bp, synthetic construct
  source 1..80: mol_type = other DNA
gcctcttgccttgctagctacctaacattggtgctattatcatggttgcaggtactaacatactttgactatttttttct

SEQ ID NO: 89492 - DNA, 80 bp, synthetic construct
  source 1..80: mol_type = other DNA
gaacaacaaattagatgtgccttgtgtcaaaagccgttatcacagagcgaaaaaaaccatcatattgatacaggtacaag

SEQ ID NO: 89493 - DNA, 80 bp, synthetic construct
  source 1..80: mol_type = other DNA
atgtttaatcattcttggtattccttctgtcttactaacattactaatacatttagcaatacaataacacatattagttt

SEQ ID NO: 89494 - DNA, 80 bp, synthetic construct
  source 1..80: mol_type = other DNA
aggtgtgtgtgtgtggtgtgcatgtgatttgtacatggttgtacatatataataccaattattgtttggctactattttc

SEQ ID NO: 89495 - DNA, 80 bp, synthetic construct
  source 1..80: mol_type = other DNA
atttatagccacactgctgttttgcatattggtattacaaacatataaactgttaccatacgtatatacagtgctgtaaa

SEQ ID NO: 89496 - DNA, 80 bp, synthetic construct
  source 1..80: mol_type = other DNA
taaacttttgttatattgtgtgtacttcttttgtgctattacaatgccaccacaacggtcccgcagacgaaagcgggcct

SEQ ID NO: 89497 - DNA, 80 bp, synthetic construct
  source 1..80: mol_type = other DNA
ctgccacacaattatatcaaacgtgtaaggcctcagggacatgtcctccagatgttattcccaaagttgaaggaaccaca

SEQ ID NO: 89498 - DNA, 80 bp, synthetic construct
  source 1..80: mol_type = other DNA
ttggcagataaaattttacaatggggtagtttaggcgtgttttttgggaggttgggaattggcactggtgcaggtacgtg

SEQ ID NO: 89499 - DNA, 80 bp, synthetic construct
  source 1..80: mol_type = other DNA
ggttgggaattggcactggtgcaggtacgggtgggcgcacgggctatgtgcctctgggaacaaggcctcctgtaattgct

SEQ ID NO: 89500 - DNA, 80 bp, synthetic construct
  source 1..80: mol_type = other DNA
tgggcgcacgggctatgtgcctctgggaacaaggcctcctgtaattgctgaaccaggacctgcagtacgcccaccaatag

SEQ ID NO: 89501 - DNA, 80 bp, synthetic construct
  source 1..80: mol_type = other DNA
ctgttgacaccgtggggccatctgatccttctattgtttccttattagaagagtcatcagttattgatgcaggaataaca

SEQ ID NO: 89502 - DNA, 80 bp, synthetic construct
  source 1..80: mol_type = other DNA
gtacctgatattacttctcatggaggttttaatattactacatctactggtgggcctgcctcaacgcctgctatattaga

SEQ ID NO: 89503 - DNA, 80 bp, synthetic construct
  source 1..80: mol_type = other DNA
tatctcccctcccactaatactatacgtgtcacaacaactacatctaccaatcctttatatattgatccttttacattgc

SEQ ID NO: 89504 - DNA, 80 bp, synthetic construct
  source 1..80: mol_type = other DNA
atttcaatttatattgtgtcagtggacgggtcggtgtacgcattgcagaggacaatgcgtggagagacgcctaccctaaa

SEQ ID NO: 89505 - DNA, 80 bp, synthetic construct
  source 1..80: mol_type = other DNA
agccgccattgccagcagaggttaatgggcgcctattaatatctactcctaccatcacaccccactcatatgaagaaata

SEQ ID NO: 89506 - DNA, 80 bp, synthetic construct
  source 1..80: mol_type = other DNA
ccaatggacacgtttgttgtatctacagatacaactaacacatttactagtactcccattcctggccctcggtcgtctgc

SEQ ID NO: 89507 - DNA, 80 bp, synthetic construct
  source 1..80: mol_type = other DNA
acgcctggggttatattctagagcaacgcaacaacgtccagttactaccagtgcatttttaacatctcctgcacggttgg

SEQ ID NO: 89508 - DNA, 80 bp, synthetic construct
  source 1..80: mol_type = other DNA
ttacttatgacaatccagcctatgaaggacttacggaggatacattagtatttgaacatccatccattcatactgcacct

SEQ ID NO: 89509 - DNA, 80 bp, synthetic construct
  source 1..80: mol_type = other DNA
gaccctgatttcatggatatagttgcattgcatcgtcctatgttatcatccaaacagggtagtgtacgtgttagtagaat

SEQ ID NO: 89510 - DNA, 80 bp, synthetic construct
  source 1..80: mol_type = other DNA
tggacaaaggctgtctatgcagacacgtcgcgggacccgttttgggtcacgtgtacacttttttcatgaccttagcccta

SEQ ID NO: 89511 - DNA, 80 bp, synthetic construct
  source 1..80: mol_type = other DNA
ttacacactcttcagaaactattgaattacagcctttatctgcttcttcagtatctgcagcctccaatattaatgatggg

SEQ ID NO: 89512 - DNA, 80 bp, synthetic construct
  source 1..80: mol_type = other DNA
ttatttgatatttatgttgatactagtgatgtaaatgttacaaataccacttcctctatacctatgcatggttttgctac

SEQ ID NO: 89513 - DNA, 80 bp, synthetic construct
  source 1..80: mol_type = other DNA
cccccgtttgtccactacatctttccctacattacctagcatgtctacacattctgccaataccaccatacctttttcgt

SEQ ID NO: 89514 - DNA, 80 bp, synthetic construct
  source 1..80: mol_type = other DNA
ttcctgccactgtgcatgtgggccctgatttatctgttgtggaccacccatgggacagtaccccaacgtctgtaatgcct

SEQ ID NO: 89515 - DNA, 80 bp, synthetic construct
  source 1..80: mol_type = other DNA
ggacattgttttgtttgacataccaacgtgtgagacacccattgacctgtattgctatgaacaattggacagctcagatg

SEQ ID NO: 89516 - DNA, 80 bp, synthetic construct
  source 1..80: mol_type = other DNA
cagggtaactttgtaatggtatcaggatgggattttatattgcatcctagttatttttggcgtaggcgccgtaaacctgt

SEQ ID NO: 89517 - DNA, 80 bp, synthetic construct
  source 1..80: mol_type = other DNA
tagtgacaacaaggtttatctacctcctcctcctgtttccaaggtggtcagcactgatgaatatgtgcaacgcaccaact

SEQ ID NO: 89518 - DNA, 80 bp, synthetic construct
  source 1..80: mol_type = other DNA
acttttaccatgccagcagttctaggctattggttgttggtcacccttattactctattacaaaaaggccaaataagaca

SEQ ID NO: 89519 - DNA, 80 bp, synthetic construct
  source 1..80: mol_type = other DNA
tctatccccaaagtgtctggtttacagtacagagtatttagagttaggctccctgatcctaataagtttacattgcctga

SEQ ID NO: 89520 - DNA, 80 bp, synthetic construct
  source 1..80: mol_type = other DNA
aactaatttatataacccagagacacagcgcatggtgtgggcctgtgtggggctagaagtaggtcgtggacagcctttgg

SEQ ID NO: 89521 - DNA, 80 bp, synthetic construct
  source 1..80: mol_type = other DNA
atgatactgaaaatgcgcctacatatggtggaggccctggtacagacaatagggaaaatgtttctatggattataaacaa

SEQ ID NO: 89522 - DNA, 80 bp, synthetic construct
  source 1..80: mol_type = other DNA
acacagttgtgtttagttggctgtaaacctgccataggggagcactggggtaaaggtactgcctgtacaccacagtccaa

SEQ ID NO: 89523 - DNA, 80 bp, synthetic construct
  source 1..80: mol_type = other DNA
tggtgactgcccaccattagaattaaaaaatagttttattcaggatggggatatggtggatgtagggtttggagcactag

SEQ ID NO: 89524 - DNA, 80 bp, synthetic construct
  source 1..80: mol_type = other DNA
attttggtgctttacaatcctccaaagctgaggtacctttggatattgtaaattcaattactaaatatcctgattactta

SEQ ID NO: 89525 - DNA, 80 bp, synthetic construct
  source 1..80: mol_type = other DNA
aagatgaccaagccaaacaggacatacagcgttacagaatactgtgtgtgtgtacacagtgttacaagtctgttaaactc

SEQ ID NO: 89526 - DNA, 80 bp, synthetic construct
  source 1..80: mol_type = other DNA
gacagtatgtttttctttttaaggcgagaacaaatgtttgttcgtcatttgtttaatagggctggcgcaattggtgaacc

SEQ ID NO: 89527 - DNA, 80 bp, synthetic construct
  source 1..80: mol_type = other DNA
tgtacctgatgaactgtataccaaggctgctaataatgcatctggcagacataatttaggtagtagtatttattatccta

SEQ ID NO: 89528 - DNA, 80 bp, synthetic construct
  source 1..80: mol_type = other DNA
ggggaaatcagctatttttaactgtggttgatactacccgtagtactaacatgactttgtgtgccactgcaacatctggt

SEQ ID NO: 89529 - DNA, 80 bp, synthetic construct
  source 1..80: mol_type = other DNA
gatacatatacagctgctaattttaaggaatatttaagacatgctgaagaatatgatgtgcaatttatatttcaattgtg

SEQ ID NO: 89530 - DNA, 80 bp, synthetic construct
  source 1..80: mol_type = other DNA
gttgaagttatgtcatatatacacaatatgaatcctaacatattagaggagtggaatgttggtgttgcaccaccaccttc

SEQ ID NO: 89531 - DNA, 80 bp, synthetic construct
  source 1..80: mol_type = other DNA
aggaactttagaagatagttataggtatgtacaatcagaagctattcgctgtcaggctaaggtaacaacgccagaaaaaa

SEQ ID NO: 89532 - DNA, 80 bp, synthetic construct
  source 1..80: mol_type = other DNA
aggatccttattcagacttttccttttgggaggtaaatttatctgaaaagttttctactgatttagatcaatttccttta

SEQ ID NO: 89533 - DNA, 80 bp, synthetic construct
  source 1..80: mol_type = other DNA
ggtagaaagtttttactgcaggccgggttgcgtgcaaggcctaaactgtctgtaggtaaacgaaaggcgtctacagctaa

SEQ ID NO: 89534 - DNA, 80 bp, synthetic construct
  source 1..80: mol_type = other DNA
gttgtgcagtgtacagaggcggacataagaaacctgcaacagatgcttttgggcacactggatattgtgtgtcctttgtg

SEQ ID NO: 89535 - DNA, 80 bp, synthetic construct
  source 1..80: mol_type = other DNA
atctgtttcttcagctaaacgtaagaaaacacacaaatagatgtatgtagtaatgttatgatacatatttatgttattta

SEQ ID NO: 89536 - DNA, 80 bp, synthetic construct
  source 1..80: mol_type = other DNA
tttgtgtactgtgttaataaactactttttatatgttgtgtgttctccattttgttttttgtactccattttgtatctag

SEQ ID NO: 89537 - DNA, 80 bp, synthetic construct
  source 1..80: mol_type = other DNA
accgatttcggttgtatctggcctgttaccaggtgcattggccatgtttcctaacattttgcaaacctattcacttttta

SEQ ID NO: 89538 - DNA, 80 bp, synthetic construct
  source 1..80: mol_type = other DNA
aatttataaatgcaatatgtgctgccaactgttttatggcacgtatgttctgccaacgtacactccctaattcctttaca

SEQ ID NO: 89539 - DNA, 80 bp, synthetic construct
  source 1..80: mol_type = other DNA
taacacacacgcccttttgcacaggcatgttgcacaaaggttggcaaaggttagcatatctctgcagttacccatttcct

SEQ ID NO: 89540 - DNA, 80 bp, synthetic construct
  source 1..80: mol_type = other DNA
ttttccttttttttatgtatgagtaacttaattgttatatgtaataaaaaagcttttaggcacatattttcagtgttggc

SEQ ID NO: 89541 - DNA, 80 bp, synthetic construct
  source 1..80: mol_type = other DNA
atacacatttacaagttaccttggcttaaacaagtaaagttatttgtcactgttgacacattactcatatatataatttg

SEQ ID NO: 89542 - DNA, 80 bp, synthetic construct
  source 1..80: mol_type = other DNA
acacattactcatatatataatttgtttttaacatgcaggtggcaaccgaaaccggtacataaatcctccttattctttt

SEQ ID NO: 89543 - DNA, 80 bp, synthetic construct
  source 1..80: mol_type = other DNA
tgcccgcgtggagtaactgcaatggcggatgatacaggtacagaggaggggctagggtgttctggatggttttgtgtaga

SEQ ID NO: 89544 - DNA, 80 bp, synthetic construct
  source 1..80: mol_type = other DNA
agctatagtagacaaaacaacagaaaatgctatttcagatgacgaggacgaaaatgtagacgatagtgggttagatcttg

SEQ ID NO: 89545 - DNA, 80 bp, synthetic construct
  source 1..80: mol_type = other DNA
tggattttgtagataatagtacagtaatacatacaaagcaggtacatgcacaagccttattaaataaacaacaagcacat

SEQ ID NO: 89546 - DNA, 80 bp, synthetic construct
  source 1..80: mol_type = other DNA
cttattataaactacaatcctggctttgaaaaataagggagtaaccgaattcggttcaaccgaaaccggtacatatataa

SEQ ID NO: 89547 - DNA, 80 bp, synthetic construct
  source 1..80: mol_type = other DNA
accacccaaagtagtggtcccagttaaggcagaatgtcaggtacatctgcctcatcacagccacgcacattataccaatt

SEQ ID NO: 89548 - DNA, 80 bp, synthetic construct
  source 1..80: mol_type = other DNA
ctaacaattattatacttgtagtttaagggtgggaccgaaaacggtccgaccgaaagcggtacatatataaaccacccaa

SEQ ID NO: 89549 - DNA, 80 bp, synthetic construct
  source 1..80: mol_type = other DNA
ctctgttaaatgcacaacaagcggatgctgatgctgctatagtgcaggagttaaaacgaaagtatatgagtccctatgta

SEQ ID NO: 89550 - DNA, 80 bp, synthetic construct
  source 1..80: mol_type = other DNA
agtcctatacagtgtttacaggaatctgtagacagagatctaagtccaaggttgcatgcaataaagattggaggcggaca

SEQ ID NO: 89551 - DNA, 80 bp, synthetic construct
  source 1..80: mol_type = other DNA
aaaagcaaaaaggagactgtttcacgtaacagagcagcgggatagtaccaatggcaatactgaagtggaagcaagagaga

SEQ ID NO: 89552 - DNA, 80 bp, synthetic construct
  source 1..80: mol_type = other DNA
cacaggtagaggtggaatatggcgaaccggaacgccatatgcgggccaataaagggtgtgggaggtggagtagtagtgtg

SEQ ID NO: 89553 - DNA, 80 bp, synthetic construct
  source 1..80: mol_type = other DNA
gcggaagctgtagaggttgtagaggaagcgggtgcaacaaacagtagccaagacataggagagccaagcccacgcacgcg

SEQ ID NO: 89554 - DNA, 80 bp, synthetic construct
  source 1..80: mol_type = other DNA
tataatagaattgtttaaagacaaggatgttactgtaaaactgttaggtaagtttaaagaattatttggtgtggggttta

SEQ ID NO: 89555 - DNA, 80 bp, synthetic construct
  source 1..80: mol_type = other DNA
atgatttagtaagacaatttaagagtgacaaatcaacgtgtaccgactgggtatatagtgtatttggtgttaatccatcc

SEQ ID NO: 89556 - DNA, 80 bp, synthetic construct
  source 1..80: mol_type = other DNA
gtaacataactttgcctactctgcaaattgggtgcatattttgcaagaagtggttactgaccacggaagtattatcgttt

SEQ ID NO: 89557 - DNA, 80 bp, synthetic construct
  source 1..80: mol_type = other DNA
atatcagaaggatttcacatgttattaaaagagcataccctatacctacatacccagtgggtgacctgtagatggggaat

SEQ ID NO: 89558 - DNA, 80 bp, synthetic construct
  source 1..80: mol_type = other DNA
ggtattgcttgcattatgtagatataaggttgcaaaaaatagaagtacaatagtaagacagctagcacaaatgttaaatg

SEQ ID NO: 89559 - DNA, 80 bp, synthetic construct
  source 1..80: mol_type = other DNA
tgcctgtacaacaaattttaattcaaccaccaaaattacaaagtgcacctgcagcactattttggtttaggtctagtatg

SEQ ID NO: 89560 - DNA, 80 bp, synthetic construct
  source 1..80: mol_type = other DNA
ggaaatggtagtgaggtaacaggcacaacaccagaatggataagcagacaaaccatgctggaacatagttttgcagatac

SEQ ID NO: 89561 - DNA, 80 bp, synthetic construct
  source 1..80: mol_type = other DNA
acagtttagtttaactgatatggtgcaatgggcatatgataacggatatacagaggaatgtgatatagcatattattatg

SEQ ID NO: 89562 - DNA, 80 bp, synthetic construct
  source 1..80: mol_type = other DNA
cacaaagaggcgatatagatgcaaatgcagctgcatttttaaaaagtaacatgcaagctagatatgttagggattgtgca

SEQ ID NO: 89563 - DNA, 80 bp, synthetic construct
  source 1..80: mol_type = other DNA
tgcatgtgcaaacattacaagttagcagaaatgaaaaaaatgtccatggcggagtggattaaacatagaggggggaagtg

SEQ ID NO: 89564 - DNA, 80 bp, synthetic construct
  source 1..80: mol_type = other DNA
taatgatggagactggaaacctatagtaaaatttttaaaataccaacatatagatattatagcatttctaggtgcgttaa

SEQ ID NO: 89565 - DNA, 80 bp, synthetic construct
  source 1..80: mol_type = other DNA
aaaaatggttacatggtataccaaaaaagaattgcatttgcataataggtccgccggacacaggcaaatcatgctttgga

SEQ ID NO: 89566 - DNA, 80 bp, synthetic construct
  source 1..80: mol_type = other DNA
atgagtttaatgaaatttttaggcggtaccatattatcatatgtaaatgcaagcagccatttttggttacagccattagt

SEQ ID NO: 89567 - DNA, 80 bp, synthetic construct
  source 1..80: mol_type = other DNA
gcatttagagatttaagggttgtgtggcgcgacggatatccgtttgctgcatgcttggcctgtctacagtttcatggaaa

SEQ ID NO: 89568 - DNA, 80 bp, synthetic construct
  source 1..80: mol_type = other DNA
ggatgcaaaagtggccatgttagatgatgttacagcaggctgttggacatacatggatatgcatatgagaaacctattag

SEQ ID NO: 89569 - DNA, 80 bp, synthetic construct
  source 1..80: mol_type = other DNA
atggaaatcctacaagtattgatagaaagcatagagcactaacagtaataaagtgtcctccattattgctgacatccaat

SEQ ID NO: 89570 - DNA, 80 bp, synthetic construct
  source 1..80: mol_type = other DNA
atggatattagtacagaagacaagtataaatatttaagaagtagaattacaacatttacatttcctaatacatttccatt

SEQ ID NO: 89571 - DNA, 80 bp, synthetic construct
  source 1..80: mol_type = other DNA
tgatactaatggcaatgccatttatgagttaaatgatgaaaattggaactccttttttaaaaggttggcatcaagcttag

SEQ ID NO: 89572 - DNA, 80 bp, synthetic construct
  source 1..80: mol_type = other DNA
aactggacactgcagaggacgaaaatggagacactagccaggcgactagatatgtgccaggaacagttgttagaactgta

SEQ ID NO: 89573 - DNA, 80 bp, synthetic construct
  source 1..80: mol_type = other DNA
tgaaaaagacagcaaaaccctgaaggaccatgtgttgcattggaaatatatacgttatgagtgtgcattatattataaag

SEQ ID NO: 89574 - DNA, 80 bp, synthetic construct
  source 1..80: mol_type = other DNA
caagagagtcgggcattaaacatctaggccaccaggtggtgccacagctagaagtatcaagacaaaaagcatatttggct

SEQ ID NO: 89575 - DNA, 80 bp, synthetic construct
  source 1..80: mol_type = other DNA
attgaattacaaatgtcattagaagcattattacaaactgaatatagcctagaaccgtggacactacaggacaccagtca

SEQ ID NO: 89576 - DNA, 80 bp, synthetic construct
  source 1..80: mol_type = other DNA
agaagtgtggcttacagaaccacaaaaatgctttaaaaaaagaggacagacagtagaagtcagatatgactgcaatcctg

SEQ ID NO: 89577 - DNA, 80 bp, synthetic construct
  source 1..80: mol_type = other DNA
caaatgcaatgcattacaccctatggtcagacatatatgtacctttcaatagcacatggctaaaagtttctggccatgtg

SEQ ID NO: 89578 - DNA, 80 bp, synthetic construct
  source 1..80: mol_type = other DNA
aataagtcaatataggcactttgactacgcagcatatgcagatactgtagaagaagaaacaaagcaaacagtgtttgatt

SEQ ID NO: 89579 - DNA, 80 bp, synthetic construct
  source 1..80: mol_type = other DNA
gactatgaaggcctatcatacacagtatgtgggcaaaagcaatattatgtagaatttcataaagaggcacaaacttatgg

SEQ ID NO: 89580 - DNA, 80 bp, synthetic construct
  source 1..80: mol_type = other DNA
ggaaactggacaatggaacgttgttatgggctcaaacgtcatatattctcctgcatctgtatctagtaccgtcagcgaag

SEQ ID NO: 89581 - DNA, 80 bp, synthetic construct
  source 1..80: mol_type = other DNA
tatcctctgttgcgtctactgaatctgacaccggaccagcgaccaccgtcccagattccacgtgcacccaaaaagcagac

SEQ ID NO: 89582 - DNA, 80 bp, synthetic construct
  source 1..80: mol_type = other DNA
ttccaggagcaagcgccgcctagaaagcgagtgcgattcgacccccacactaccccgatcgccgacttggccagaactgt

SEQ ID NO: 89583 - DNA, 80 bp, synthetic construct
  source 1..80: mol_type = other DNA
tggaagagggtcagtggacagttcagactcgcgactcgtgcctaagcatacggaccaccaccctagagggcacaaccgtg

SEQ ID NO: 89584 - DNA, 80 bp, synthetic construct
  source 1..80: mol_type = other DNA
gaagtcacactacgcctataatacagttacaaggtgaagcaaatgcactgaaatgttttagatacagattgaataaacat

SEQ ID NO: 89585 - DNA, 80 bp, synthetic construct
  source 1..80: mol_type = other DNA
aaacatttgtttgctgatgtgtcatccacatggcgatggacaaccgagtgtaataataaaaataatactgcattaattac

SEQ ID NO: 89586 - DNA, 80 bp, synthetic construct
  source 1..80: mol_type = other DNA
attaacatatattagtgaacaacagagggctgactttttgtctcgtgttaaaatacctacaactattaaacagtgcctgg

SEQ ID NO: 89587 - DNA, 80 bp, synthetic construct
  source 1..80: mol_type = other DNA
gagcattaacaattatgtaaataatgtatgtatgtatgtatatttgtatagaggaactgtaactgtgataaaaggggggg

SEQ ID NO: 89588 - DNA, 80 bp, synthetic construct
  source 1..80: mol_type = other DNA
tattgtaccccaaccacacaaccagccaacctgctgctattattgtttatagatgacaagcttggcatattaacagttaa

SEQ ID NO: 89589 - DNA, 80 bp, synthetic construct
  source 1..80: mol_type = other DNA
tgtgcattagatgctgtaagtgccacaagccattatcaccagtggaaaaagtacagcatattgtgcaaaaggcacaattc

SEQ ID NO: 89590 - DNA, 80 bp, synthetic construct
  source 1..80: mol_type = other DNA
cattcttatttgcattcttgctgtattggtgtgcgcatgggtaacggacaacgtggtgtgggcttctgtgcttgcatgtg

SEQ ID NO: 89591 - DNA, 80 bp, synthetic construct
  source 1..80: mol_type = other DNA
cttctatcttttattttttatcttggggcgtccttacatcacctattaacgtttttatattggcgttgttagtgtggtat

SEQ ID NO: 89592 - DNA, 80 bp, synthetic construct
  source 1..80: mol_type = other DNA
ttgccagcccttttattgcattggtatattatatctgctattgcataacagtaaatatgttaacctgtacatttgaagat

SEQ ID NO: 89593 - DNA, 80 bp, synthetic construct
  source 1..80: mol_type = other DNA
ggtgatacatggatgtttttatggttacttgtaacagttataactgtattaatattggtgttagcgtttcattacagaac

SEQ ID NO: 89594 - DNA, 80 bp, synthetic construct
  source 1..80: mol_type = other DNA
acttaagttgcatcagtcctccagcaaataaacaatcctttatataattacttgtaaacatggtgtcttatacacataaa

SEQ ID NO: 89595 - DNA, 80 bp, synthetic construct
  source 1..80: mol_type = other DNA
aggcgcaaacgggcatcagctacacaattatatcaaacatgcaaagctgctggcacatgtccctcggatgtaattaataa

SEQ ID NO: 89596 - DNA, 80 bp, synthetic construct
  source 1..80: mol_type = other DNA
agcatactacaatagcagatcagatattaaaatgggcgagcatgggagtgtattttggagggttgggtattggaacaggc

SEQ ID NO: 89597 - DNA, 80 bp, synthetic construct
  source 1..80: mol_type = other DNA
tcaggaactggaggcagaacaggctatgtccctctaacaacaggtcgtacgggtattgtccctaaggtgactgcagagcc

SEQ ID NO: 89598 - DNA, 80 bp, synthetic construct
  source 1..80: mol_type = other DNA
tggagtagtgtcacgtcctcctattgttgtagaatctgttgctccaactgatccttccattgtgtccttaattgaggaat

SEQ ID NO: 89599 - DNA, 80 bp, synthetic construct
  source 1..80: mol_type = other DNA
caagcataattcagtccggggctcctattaccaatattccatcacatggtggctttgaggtaacctcctctggatcagag

SEQ ID NO: 89600 - DNA, 80 bp, synthetic construct
  source 1..80: mol_type = other DNA
tttaaaatacatagcgtgtggaaaggatactgcttacattgctggaaatcatgcatggaaaaacgccgacgatcagagac

SEQ ID NO: 89601 - DNA, 80 bp, synthetic construct
  source 1..80: mol_type = other DNA
gttcctgcaattttagatgtttccccatctacttcagtgcatattactacatctacacatttaaatcctgcatttactga

SEQ ID NO: 89602 - DNA, 80 bp, synthetic construct
  source 1..80: mol_type = other DNA
tcctactattgtacagccaacccccccagttgaggctgggggacgtattataatatctcactccactgttactgctgata

SEQ ID NO: 89603 - DNA, 80 bp, synthetic construct
  source 1..80: mol_type = other DNA
gtgctgaacaaattcctatggatacgtttgttgtacacagcgatcccaccactagcacacctattccaggcactgcccca

SEQ ID NO: 89604 - DNA, 80 bp, synthetic construct
  source 1..80: mol_type = other DNA
cgacctcgtttgggcctgtacagtaaggcattgcagcaggtggaaattgttgaccctacatttttgtcctcgccacaacg

SEQ ID NO: 89605 - DNA, 80 bp, synthetic construct
  source 1..80: mol_type = other DNA
tttaattacatatgacaatcctgtatttgaggatcctaatgctacattgacatttgaacagcctacagtacatgaagctc

SEQ ID NO: 89606 - DNA, 80 bp, synthetic construct
  source 1..80: mol_type = other DNA
ctgattctaggtttatggatatagttactttacatagacctgcattaacatcccgacgaggtatagttagatttagtagg

SEQ ID NO: 89607 - DNA, 80 bp, synthetic construct
  source 1..80: mol_type = other DNA
gtgggtgcgcgcggtactatgtatactcgcagtgggatacgtattgggggtcgtgtacacttttttacagatattagttc

SEQ ID NO: 89608 - DNA, 80 bp, synthetic construct
  source 1..80: mol_type = other DNA
catacccacagaggaagcaatagaattgcagcccctaggacgttcccagtcctttcctacagtttctgatactagtgatt

SEQ ID NO: 89609 - DNA, 80 bp, synthetic construct
  source 1..80: mol_type = other DNA
tatatgatatttatgcagatgagaatctgttaaataatgatattagttttactgacacccacgtgtccctacaaaattct

SEQ ID NO: 89610 - DNA, 80 bp, synthetic construct
  source 1..80: mol_type = other DNA
actaaggttgttaatacagctgtgccacttgcaactgtacctgatatttatgcacaaacagggcctgacataagctttcc

SEQ ID NO: 89611 - DNA, 80 bp, synthetic construct
  source 1..80: mol_type = other DNA
tatgtgctaactatgcaaccagaacctagaagcttaacctgtaacgagcaattagacagctcagactcagaggatgagcg

SEQ ID NO: 89612 - DNA, 80 bp, synthetic construct
  source 1..80: mol_type = other DNA
tactattcctattcacattccatatattcctgtgtccccatctatttcccctcagtctgtttccatacatggtactgatt

SEQ ID NO: 89613 - DNA, 80 bp, synthetic construct
  source 1..80: mol_type = other DNA
tttatttgcatccttcattgtggcatttgggcaaacgccgtaaacgcttttcatatttttttacagataactatgtggcg

SEQ ID NO: 89614 - DNA, 80 bp, synthetic construct
  source 1..80: mol_type = other DNA
gcttaatgacaacaaggtttacctgcctcctccagggcctatagcatctattgtgagcacagatgaatatgtgcaacgca

SEQ ID NO: 89615 - DNA, 80 bp, synthetic construct
  source 1..80: mol_type = other DNA
ccaacttattttattatgctggcagttcacgtttgcttgcagtgggtcacccatatttcccccttaaaaattccactggt

SEQ ID NO: 89616 - DNA, 80 bp, synthetic construct
  source 1..80: mol_type = other DNA
aaaataactgtacctaaggtgtctggttatcagtacagagtatttagagttaaattgcctgaccctaataaatttggctt

SEQ ID NO: 89617 - DNA, 80 bp, synthetic construct
  source 1..80: mol_type = other DNA
ttcagaaacaacactggttacatcagacactcagcgtttagtctggggatgcgtaggagttgaaattggtagaggacaac

SEQ ID NO: 89618 - DNA, 80 bp, synthetic construct
  source 1..80: mol_type = other DNA
ctttaggtgttggaataagtggccatccctatttaaataagtatgatgacactgaaaacccgtctgggtatggcacatcg

SEQ ID NO: 89619 - DNA, 80 bp, synthetic construct
  source 1..80: mol_type = other DNA
ccgggacaagataacagagaaaatgtagcaatggattataaacaaacacagctgtgtattgttggctgtacacctcctat

SEQ ID NO: 89620 - DNA, 80 bp, synthetic construct
  source 1..80: mol_type = other DNA
gggtgaatattggggtcagggtgtgccttgcagcgcatcaggtgttacccaaggtgattgtcctgtaatagaattaaaaa

SEQ ID NO: 89621 - DNA, 80 bp, synthetic construct
  source 1..80: mol_type = other DNA
gtgaagttatacaggatggtgacatggtagatacaggatttggtgcaatggattttgcttccctacaggccagtaaaagt

SEQ ID NO: 89622 - DNA, 80 bp, synthetic construct
  source 1..80: mol_type = other DNA
tgagcaacccacgcaacaggaccagcaagtgaatctacaagtttacagagttgtaacagagtgcacatcctgtctgtgtg

SEQ ID NO: 89623 - DNA, 80 bp, synthetic construct
  source 1..80: mol_type = other DNA
gatgtacccttagacctggttaatactaaaagtaaatatcctgattatttgggaatggcagcagagccttatgggaatag

SEQ ID NO: 89624 - DNA, 80 bp, synthetic construct
  source 1..80: mol_type = other DNA
tttgtttttttttctacgccgggaacaaatgttccttagacatttttttaataaagctggtaaaactggcgacgttgtgc

SEQ ID NO: 89625 - DNA, 80 bp, synthetic construct
  source 1..80: mol_type = other DNA
cttccgatatgtatattgctggctctaataccaggtccaaaattgcagatagtatatatttttctacacccagtgggtct

SEQ ID NO: 89626 - DNA, 80 bp, synthetic construct
  source 1..80: mol_type = other DNA
ttggttacttctgattctcaattgtttaacaaacccttatggatacaaaaggcccagggacataataatggcatttgttt

SEQ ID NO: 89627 - DNA, 80 bp, synthetic construct
  source 1..80: mol_type = other DNA
tgggaatcagttgtttgttacagtggtagataccactcgtagtacaaacttgacgttatgtgcctctactgaccctactg

SEQ ID NO: 89628 - DNA, 80 bp, synthetic construct
  source 1..80: mol_type = other DNA
tgcccagtacatatgacaatgcaaagtttaaggaatacttgcggcatgtggaagaatatgatctgcagtttatatttcaa

SEQ ID NO: 89629 - DNA, 80 bp, synthetic construct
  source 1..80: mol_type = other DNA
ttatgcataataacgctaaacccagaggttatgacatatattcatactatggatcccacattattagaggactggaattt

SEQ ID NO: 89630 - DNA, 80 bp, synthetic construct
  source 1..80: mol_type = other DNA
tggtgtgtccccacctgcctctgcttctttggaagatacttatcgctttttgtctaacaaggccattgcatgtcaaaaaa

SEQ ID NO: 89631 - DNA, 80 bp, synthetic construct
  source 1..80: mol_type = other DNA
atgctcccccaaaggaacgggaggatccctataaaaagtatacattttgggatataaatcttacagaaaagttttctgca

SEQ ID NO: 89632 - DNA, 80 bp, synthetic construct
  source 1..80: mol_type = other DNA
caacttacccagtttcccttagggcgcaaatttgttatgcaggcgggtctgcgtcccaaacctaaattaaaaactgtaaa

SEQ ID NO: 89633 - DNA, 80 bp, synthetic construct
  source 1..80: mol_type = other DNA
taattcgacttgttgtgcagtgctctgacagtgacatcaagaagctagaagacttgctgttgggcacattaacaattgtg

SEQ ID NO: 89634 - DNA, 80 bp, synthetic construct
  source 1..80: mol_type = other DNA
gcgttctgcaccatcctcctctacgtctgcccctgcctctaaacgcaaaaagactaagcgataacatatgtgtgtgtgtt

SEQ ID NO: 89635 - DNA, 80 bp, synthetic construct
  source 1..80: mol_type = other DNA
ttgtacctgtatggatatgtgtgtgtgttttgtacctgtatggtttgtttttgcttgttgtgtatgtatggtgtgtttgt

SEQ ID NO: 89636 - DNA, 80 bp, synthetic construct
  source 1..80: mol_type = other DNA
cttacgtacttgtttgtgtatgtgtgtatatgtgttgtatgtattgttgcaatgacaaatagaaatgtttgtgtgtatat

SEQ ID NO: 89637 - DNA, 80 bp, synthetic construct
  source 1..80: mol_type = other DNA
gtgtatgttgtatagattaataaagatgtttgtgtgtggtgtggtttgtggttgcaccctatgagtaactatgtgtggtg

SEQ ID NO: 89638 - DNA, 80 bp, synthetic construct
  source 1..80: mol_type = other DNA
ttatgtgtttattaccttttccttttcctgtgtttttgttttactatttgtaactggctttggttttagtaatggttact

SEQ ID NO: 89639 - DNA, 80 bp, synthetic construct
  source 1..80: mol_type = other DNA
gttgtgggacgtcttccattttgtttttgccgtcttccattttgtttttgcaaccgatttcggtcgcgtttggcaccctt

SEQ ID NO: 89640 - DNA, 80 bp, synthetic construct
  source 1..80: mol_type = other DNA
attcatggtgtcagcataatttgcaaaggttgctgtgcccctgccaaaatatgttggcacactttttatccctttggcgt

SEQ ID NO: 89641 - DNA, 80 bp, synthetic construct
  source 1..80: mol_type = other DNA
caaggtgtggcttcctacgcccacattccacttttactatacaaatgtaccttttcacctctatgttttattaccttttc

SEQ ID NO: 89642 - DNA, 80 bp, synthetic construct
  source 1..80: mol_type = other DNA
attgtttttgacatatatatttgatttttcatagttactaatagcttttttggctcacataaatgaactgcagtcataaa

SEQ ID NO: 89643 - DNA, 80 bp, synthetic construct
  source 1..80: mol_type = other DNA
atatgtatgagtaagtgttgtggtaagcacacctgcagaccgaaaccggtccctacacaccttacattctttgtggttat

SEQ ID NO: 89644 - DNA, 80 bp, synthetic construct
  source 1..80: mol_type = other DNA
aaaccatagcttgtggggcataatgtctgcacgtagctgctcccaaaacgcacggactatatttgagttgtgtgatgagt

SEQ ID NO: 89645 - DNA, 80 bp, synthetic construct
  source 1..80: mol_type = other DNA
tgcccactgtgtaccaccacagcggtgtgactaccatggctgataaacaaggtacagaggatgaggggttgggatgctca

SEQ ID NO: 89646 - DNA, 80 bp, synthetic construct
  source 1..80: mol_type = other DNA
ggctggtttatagtagaggcaacagtggacaaaacaacagaaaacaatatatcggaagatgagattgaggacgaggaaga

SEQ ID NO: 89647 - DNA, 80 bp, synthetic construct
  source 1..80: mol_type = other DNA
ggaagatagtgggtttgatatggtagattttattaataatacattagaagacagttgtacagaccacagcagtgcgcagg

SEQ ID NO: 89648 - DNA, 80 bp, synthetic construct
  source 1..80: mol_type = other DNA
gctagatatgttagggattgtgcatgcatgtgcaaacattacaagttagcagaaatgaaaaaaatgtccatggcggagtg

SEQ ID NO: 89649 - DNA, 80 bp, synthetic construct
  source 1..80: mol_type = other DNA
cagtgcctgggagcattaacaattatgtaaataatgtatgtatgtatgtatatttgtatagaggaactgtaactgtgata

SEQ ID NO: 89650 - DNA, 80 bp, synthetic construct
  source 1..80: mol_type = other DNA
gttaagaccgaaaacggtgcatataaaggtagttgaaaagaaaagggcaacggcatggcacgctttgaggatcctacaca

SEQ ID NO: 89651 - DNA, 80 bp, synthetic construct
  source 1..80: mol_type = other DNA
gctcgagactcaggtaaccgtggagaatactggaaatggggatagcaatggcagtgtttgtagcgacagtcaaatagact

SEQ ID NO: 89652 - DNA, 80 bp, synthetic construct
  source 1..80: mol_type = other DNA
aaaaataagaaagcagctatgtatgcaaaatttaaagaattgtatgggttatcatttcaagatttggttaggacatttaa

SEQ ID NO: 89653 - DNA, 80 bp, synthetic construct
  source 1..80: mol_type = other DNA
gggaactgcaagaaagagaggtatttgaatttgcttttaatgacttatttatagtgtatagagactgtacaccgtatgca

SEQ ID NO: 89654 - DNA, 80 bp, synthetic construct
  source 1..80: mol_type = other DNA
tggggagtagtaatattagcattattaagatataaatgtggaaaaaatagaataacagttgcaaaaggacttagcacatt

SEQ ID NO: 89655 - DNA, 80 bp, synthetic construct
  source 1..80: mol_type = other DNA
aagaggggggagattggaaacccatagtacaatttttaagatatcaaggagtagaatttataacgtttttatgtgcatta

SEQ ID NO: 89656 - DNA, 80 bp, synthetic construct
  source 1..80: mol_type = other DNA
ttaatgaacacataaactattggaaactggtgcgtatggaaaatgtaattttatttgcagcaagagagaacaatatacat

SEQ ID NO: 89657 - DNA, 80 bp, synthetic construct
  source 1..80: mol_type = other DNA
ggggactatattataaagtggaagaggaacaggtgtactatgtaaaatttatacatgatgccaaaaaatatgggactaca

SEQ ID NO: 89658 - DNA, 80 bp, synthetic construct
  source 1..80: mol_type = other DNA
cccctccgcaacgccccccgaagccacgtacttgggcccccaaacgtccaaccgtcagacgaagactggaaagcgaccaa

SEQ ID NO: 89659 - DNA, 80 bp, synthetic construct
  source 1..80: mol_type = other DNA
tggcagaacagggtacatacctttaggggggcgtacaaacactatagtagatgtatcgcctgctaaaccaccagtagtta

SEQ ID NO: 89660 - DNA, 80 bp, synthetic construct
  source 1..80: mol_type = other DNA
aggcccacgcaaacgtgcagcgcccgcccctacctttaccccatcaccaaaacgtgttaagcgtcgcaagtcttccagaa

SEQ ID NO: 89661 - DNA, 80 bp, synthetic construct
  source 1..80: mol_type = other DNA
tatttgtttttgtacataataaagtatgcatgacagtttcatgtgtggttgcacccaatgagtaaggtactgtcccttta

SEQ ID NO: 89662 - DNA, 80 bp, synthetic construct
  source 1..80: mol_type = other DNA
ggaagggacggggtgcaatggatggttttttgtgcaggcaatagtagataaaaaaacaggtgacaaaatttcagatgacg

SEQ ID NO: 89663 - DNA, 80 bp, synthetic construct
  source 1..80: mol_type = other DNA
gacaaatgagtatgtcacagtggataaaatggagatgtgataaaatagaagaggggggagattggaaacccatagtacaa

SEQ ID NO: 89664 - DNA, 80 bp, synthetic construct
  source 1..80: mol_type = other DNA
gggcgtacaaacactatagtagatgtatcgcctgctaaaccaccagtagttattgaacctgttggacctacagatccatc

SEQ ID NO: 89665 - DNA, 80 bp, synthetic construct
  source 1..80: mol_type = other DNA
ttcatggggagtaattgtaatgatgctaattagatatatatgtggaaaaaatagaaaaacaattaccaaatcgctaagct

SEQ ID NO: 89666 - DNA, 80 bp, synthetic construct
  source 1..80: mol_type = other DNA
catcaggggtggattacagaggcatatattatatgcatgatggccacaaaacatattacacagactttgaacaggaggcc

SEQ ID NO: 89667 - DNA, 80 bp, synthetic construct
  source 1..80: mol_type = other DNA
ggaagtttatttacatattttgggtggcttggcattggtactgggtctgggtcgggtggtcgtgcgggctatgttccctt

SEQ ID NO: 89668 - DNA, 80 bp, synthetic construct
  source 1..80: mol_type = other DNA
ttggtactgggtctgggtcgggtggtcgggcgggctatgttcccttaggctctaggccttctactatagttgatgtcact

SEQ ID NO: 89669 - DNA, 80 bp, synthetic construct
  source 1..80: mol_type = other DNA
tcaggggctggtgttcccaattttactgggtcagggggatttgaagttacatcctcttccacaaccacacctgctgtgtt

SEQ ID NO: 89670 - DNA, 80 bp, synthetic construct
  source 1..80: mol_type = other DNA
aggccgaggtcaacctttaggtgctgggttaagtggtcatccattatttaataggctggatgacactgaggtctctaatt

SEQ ID NO: 89671 - DNA, 80 bp, synthetic construct
  source 1..80: mol_type = other DNA
cattaggggaacattggactaagggcgcggtgtgtaagtctacaccaggtaatacaggggattgtccacctcttgcatta

SEQ ID NO: 89672 - DNA, 80 bp, synthetic construct
  source 1..80: mol_type = other DNA
gttaataataatctaacctttacaaaaaagaggaggaaccgaattcggttccaaccgaaaacggttatataaaaaccagc

SEQ ID NO: 89673 - DNA, 80 bp, synthetic construct
  source 1..80: mol_type = other DNA
cggatgctcattatgcggctgtgcaggacctaaaacgaaagtatttaggtagtccatatgttagtcctttaagtaatatt

SEQ ID NO: 89674 - DNA, 80 bp, synthetic construct
  source 1..80: mol_type = other DNA
gagcaggcagtggagtgtgacattagcccacggctggacgctataacattaagtagacaaccaaaaaaagtaaagcgacg

SEQ ID NO: 89675 - DNA, 80 bp, synthetic construct
  source 1..80: mol_type = other DNA
gctgtttgacagaccagaattaacggacagtggatatggcaatactgaagtggaagctgaaacgcaggtagagagaaatg

SEQ ID NO: 89676 - DNA, 80 bp, synthetic construct
  source 1..80: mol_type = other DNA
gcgaaccggaagattgtgggtgaggtggacaaggaagggacacagagggggtggaacaggtggaaacggaagtgcagaca

SEQ ID NO: 89677 - DNA, 80 bp, synthetic construct
  source 1..80: mol_type = other DNA
catagcaacacacaacagcacaccgggaccacgcgggtactagaactattgaaatgtaagaatataagggctacactgct

SEQ ID NO: 89678 - DNA, 80 bp, synthetic construct
  source 1..80: mol_type = other DNA
tggtaagtttaaggattgctatgggttatcatatacagatttaattagacaatttaaaagtgacaagacaacatgtgggg

SEQ ID NO: 89679 - DNA, 80 bp, synthetic construct
  source 1..80: mol_type = other DNA
actgggtaattgcagcctttggggtgcaccatagtgtgtcagaggcgtttcaaaatttaatacagccagtaacaacatat

SEQ ID NO: 89680 - DNA, 80 bp, synthetic construct
  source 1..80: mol_type = other DNA
agtgcaacattcctatgcacaatctgcaaattttatgcgtgttttgcagaaaaacgttaagtactgcagaggtttattca

SEQ ID NO: 89681 - DNA, 80 bp, synthetic construct
  source 1..80: mol_type = other DNA
agccacatacaatggcttacaaatgcatggggaatggtcctactggcattagtaaggtttaaggtaaataaaaacagatg

SEQ ID NO: 89682 - DNA, 80 bp, synthetic construct
  source 1..80: mol_type = other DNA
tacagtggcacgtatgatggcaacccgtttaaatatacctgaggaccacatgttaattgaacctcctaaaatacaaagcg

SEQ ID NO: 89683 - DNA, 80 bp, synthetic construct
  source 1..80: mol_type = other DNA
gtgttgcagcgttatattggtttagaagtggtatatccaatgccagtatagtaactggagaaacaccggaatggataaca

SEQ ID NO: 89684 - DNA, 80 bp, synthetic construct
  source 1..80: mol_type = other DNA
aggcaaaccattgtagaacatgggcttgcagacaaccaatttaaattagcagacatggttcaatgggcatatgataatga

SEQ ID NO: 89685 - DNA, 80 bp, synthetic construct
  source 1..80: mol_type = other DNA
cttttgtgaggaaagtgaaattgcatttgaatatgcacaacgtgcagatatagatgccaatgccagagcattcctaaata

SEQ ID NO: 89686 - DNA, 80 bp, synthetic construct
  source 1..80: mol_type = other DNA
gtaattgtcaggcaaaatatgtaaaagactgtgccacaatgtgcaagcactataaaactgcagaaatgaaaaaaatgaat

SEQ ID NO: 89687 - DNA, 80 bp, synthetic construct
  source 1..80: mol_type = other DNA
atgaaacagtggataaaatttaggagcagtaaatttgaagacacaggaaattggaaaccaatagtgcaatttttaagaca

SEQ ID NO: 89688 - DNA, 80 bp, synthetic construct
  source 1..80: mol_type = other DNA
ccaaaacatagaatttattccgtttttaactaaattaaagatgtggctgcatggtacaccaaaaaaaaactgtattgcaa

SEQ ID NO: 89689 - DNA, 80 bp, synthetic construct
  source 1..80: mol_type = other DNA
tagtgggcccaccagacacaggtaaatcgtgtttttgtatgagtttaattaaattcttaggaggcactgtaattagttat

SEQ ID NO: 89690 - DNA, 80 bp, synthetic construct
  source 1..80: mol_type = other DNA
tgatgtaacccaatcctgctgggtatatatggatacatatatgagaaacctattagatggaaaccctatgaccattgaca

SEQ ID NO: 89691 - DNA, 80 bp, synthetic construct
  source 1..80: mol_type = other DNA
ttcgcatataaacagttatatgtagtgtaccgaggaaactttccatttgcagcctgtgccatttgtttagaactacaagg

SEQ ID NO: 89692 - DNA, 80 bp, synthetic construct
  source 1..80: mol_type = other DNA
gaaaacacaaatcattagcattaataaaatgtccgcctttaatagtaacatcaaacatagacattactaaagaagagaaa

SEQ ID NO: 89693 - DNA, 80 bp, synthetic construct
  source 1..80: mol_type = other DNA
tacaaatatttatgtagcagggtaacattatttacatttccaaatccattcccctttgacagaaatgggaatgcactata

SEQ ID NO: 89694 - DNA, 80 bp, synthetic construct
  source 1..80: mol_type = other DNA
tgacctgtgtgaaacaaactggaaatgtttctttgcaagattatcatcaagtctagatatacaaacatcagaggacgagg

SEQ ID NO: 89695 - DNA, 80 bp, synthetic construct
  source 1..80: mol_type = other DNA
aagatggagacaatagccaagcatttagatgtgtgccaggaacagttgttagaactgtatgaagaaaatagtaataaact

SEQ ID NO: 89696 - DNA, 80 bp, synthetic construct
  source 1..80: mol_type = other DNA
tacaaaacatatacaacattggaaatgtatacgatatgaatgtgtgttactacacaaagctaagcaaatgggcctgaacc

SEQ ID NO: 89697 - DNA, 80 bp, synthetic construct
  source 1..80: mol_type = other DNA
acattggaatgcaagtggtgccagcattagcagtgtcacagacaaagggacaccaggcaattgaaatgcaaatgacatta

SEQ ID NO: 89698 - DNA, 80 bp, synthetic construct
  source 1..80: mol_type = other DNA
gaaacattactaaactctgactatggtacggaaccatggacattgcaagagacaagtcgggaaatgtggttaacaccacc

SEQ ID NO: 89699 - DNA, 80 bp, synthetic construct
  source 1..80: mol_type = other DNA
caaatattgctttaaaaagcagggacaaactgtggaagtaaaatttgactgcaatgcagacaatgcaatggagtatgtat

SEQ ID NO: 89700 - DNA, 80 bp, synthetic construct
  source 1..80: mol_type = other DNA
ggtggaaagtcatttatgtatttgacacagacaaatgggtaaaagtgacaggacacatagactataaagggttgtattat

SEQ ID NO: 89701 - DNA, 80 bp, synthetic construct
  source 1..80: mol_type = other DNA
gtacatggtgggcataaaacctattatacaaattttgaaaaggaggccgaaaaatatgggaactctttacaatgggaggt

SEQ ID NO: 89702 - DNA, 80 bp, synthetic construct
  source 1..80: mol_type = other DNA
taaggtcaatcaatttaggcattttaactacgcgggatatgcagtaacagtggaagaagaaacaaataagtcaattctgg

SEQ ID NO: 89703 - DNA, 80 bp, synthetic construct
  source 1..80: mol_type = other DNA
atgtattggcagcagtatcatatgttctcctgcatctatatctagtactgtgcaagacgtatccattgctgggcctgctt

SEQ ID NO: 89704 - DNA, 80 bp, synthetic construct
  source 1..80: mol_type = other DNA
cagcgactccgtggacagtacaaacaacaacatcctccctaacagttacaacagtaacaaaggacgggacaacaattatt

SEQ ID NO: 89705 - DNA, 80 bp, synthetic construct
  source 1..80: mol_type = other DNA
gtacagctacgcctgtagttcaattacaaggtgatgctaattgtttaaagtgtttaagatatagattacatgcaaagtat

SEQ ID NO: 89706 - DNA, 80 bp, synthetic construct
  source 1..80: mol_type = other DNA
aaaacattgtttgtagcagcatcgtccacatggcgctggacatgttcagatacatccagtaatgcactggtaacattaac

SEQ ID NO: 89707 - DNA, 80 bp, synthetic construct
  source 1..80: mol_type = other DNA
atatgttgatgaacagcaacgccagcagtttttaaacactgtaaagttaccaccaaaagttacatataaagttggatata

SEQ ID NO: 89708 - DNA, 80 bp, synthetic construct
  source 1..80: mol_type = other DNA
tgtctttacaattgttataatgtgtgttgtatatatctaattgtatatattgtacatggaacacaaacctatagatgcta

SEQ ID NO: 89709 - DNA, 80 bp, synthetic construct
  source 1..80: mol_type = other DNA
ctataggggcaaccagcacatcattactgccagttgtaattgccctgtttgtatgctttgttagcattgtattaattatt

SEQ ID NO: 89710 - DNA, 80 bp, synthetic construct
  source 1..80: mol_type = other DNA
tgtatttctgattttatagtgtacacatctatattggtactaaccttactgctatatctgttactttggcttttactaac

SEQ ID NO: 89711 - DNA, 80 bp, synthetic construct
  source 1..80: mol_type = other DNA
acgtgctgatacgctgctatttgtgccacaaaccattgtgccacgtggaaaaggtgcgccacatattggacaaggcgcga

SEQ ID NO: 89712 - DNA, 80 bp, synthetic construct
  source 1..80: mol_type = other DNA
ctctgccctgcaattttatttactaacactgtgtgtctgcttttttcctgcgtggtatatacatttccatattgtacata

SEQ ID NO: 89713 - DNA, 80 bp, synthetic construct
  source 1..80: mol_type = other DNA
cacaacaagaataactattacaatgctaacatgtacgtttgatgatggtgatacatggctgttattgtggttgttattaa

SEQ ID NO: 89714 - DNA, 80 bp, synthetic construct
  source 1..80: mol_type = other DNA
cattaattgttaccattatagcattgttattaatgcatttaaaaactgtacaatgcgttacatgcagtaaataagtattt

SEQ ID NO: 89715 - DNA, 80 bp, synthetic construct
  source 1..80: mol_type = other DNA
gtatatttggtgtgtattgtataaatatggcacacagtagggcacgtagacgtaaacgtgcatctgctacccaattatat

SEQ ID NO: 89716 - DNA, 80 bp, synthetic construct
  source 1..80: mol_type = other DNA
caaacatgtaaggctgcaggcacctgtccctctgatattattcctaaggtggaacataacactattgcagatcagatatt

SEQ ID NO: 89717 - DNA, 80 bp, synthetic construct
  source 1..80: mol_type = other DNA
aaagtggtgcagtttggaggttttttttgggggactggggattggtacaggctctggcacaggcggtagaacagcgtata

SEQ ID NO: 89718 - DNA, 80 bp, synthetic construct
  source 1..80: mol_type = other DNA
tacctttacaatccaccccgcgtcctgacattccctctgtacctaccgcaaggccacctatacttgttgatactgttgca

SEQ ID NO: 89719 - DNA, 80 bp, synthetic construct
  source 1..80: mol_type = other DNA
cctggggacccgtccattgtatccttggttgacgaatctgctattataaattcggaggccccggaattggtccctccttc

SEQ ID NO: 89720 - DNA, 80 bp, synthetic construct
  source 1..80: mol_type = other DNA
ccatgcaggatttgaaatcactacatctgaatctaccacaccagctatattagatgtgtttgtcaccacacatactacct

SEQ ID NO: 89721 - DNA, 80 bp, synthetic construct
  source 1..80: mol_type = other DNA
ctacaagtgtatttaaaaaccctagctttgctgacccatctgttgtacagtcgcagcctgctgttgaagctggtggccac

SEQ ID NO: 89722 - DNA, 80 bp, synthetic construct
  source 1..80: mol_type = other DNA
ttcattaaattacaagatacctggaagggtcgctgcttccattgttggacatcatgcatggaaactatactaccttaaag

SEQ ID NO: 89723 - DNA, 80 bp, synthetic construct
  source 1..80: mol_type = other DNA
atacttatctctacctcatctatatcgtcccaccctgtagaagaaatacctttggatacatttatagtatcttcctctga

SEQ ID NO: 89724 - DNA, 80 bp, synthetic construct
  source 1..80: mol_type = other DNA
tagtaatcctgcatctagcactcccattccagcatctggtgcacggccgcgtattggcctatacagtaaggctttgcacc

SEQ ID NO: 89725 - DNA, 80 bp, synthetic construct
  source 1..80: mol_type = other DNA
aggtacaggtaacggatcctgcctttttgtcctctccccagcgcctaataacatttgataatcctgcatatgaaggggag

SEQ ID NO: 89726 - DNA, 80 bp, synthetic construct
  source 1..80: mol_type = other DNA
gatgttactttacactttgcacacaatactatacatgaacctccagatgatgcgtttatggatattatacgattgcacag

SEQ ID NO: 89727 - DNA, 80 bp, synthetic construct
  source 1..80: mol_type = other DNA
accggctatacagtccaggcgtggtcgtgtgcggtttagtagaattggacaacgagggtctatgtacacacgtagtggca

SEQ ID NO: 89728 - DNA, 80 bp, synthetic construct
  source 1..80: mol_type = other DNA
aacatattggtggcaggatacatttctatcaagacatttctcctatatctgctgctgcagaagaaatagaactgcacccc

SEQ ID NO: 89729 - DNA, 80 bp, synthetic construct
  source 1..80: mol_type = other DNA
cttgtggccactgcacaggatagtggcctgtttgatatttatgcagaacctgaccctgatgttacagaagaacctgtttc

SEQ ID NO: 89730 - DNA, 80 bp, synthetic construct
  source 1..80: mol_type = other DNA
attgtctttttctacctccacaccctttcagcggtcttctgtgtcagccaccccatggggcaatactactgtccctcttt

SEQ ID NO: 89731 - DNA, 80 bp, synthetic construct
  source 1..80: mol_type = other DNA
cattacctgctgacatgtttgtacagcctggtcctgacataatctttcctactgcatccactacaactccctatagtcct

SEQ ID NO: 89732 - DNA, 80 bp, synthetic construct
  source 1..80: mol_type = other DNA
gtcactcctgctttacctacaggtcctgtttttataagtggtgctgcattttatttatatcctacatggtattttgcacg

SEQ ID NO: 89733 - DNA, 80 bp, synthetic construct
  source 1..80: mol_type = other DNA
gaaattgttttacagctggaacctcctgaccctgtaggcctacattgcaatgagcaattagacagctcagaagatgaggt

SEQ ID NO: 89734 - DNA, 80 bp, synthetic construct
  source 1..80: mol_type = other DNA
caaacgccgtaaacgtgtttccttgttttttgcagatgtggcggcctagtgaaaaccaggtatatgtgcctcctcccgcc

SEQ ID NO: 89735 - DNA, 80 bp, synthetic construct
  source 1..80: mol_type = other DNA
ccagtatccaaagtaatacctacggatgcctatgtcaaacgcaccaacatatattaccatgctagcagttctagacttct

SEQ ID NO: 89736 - DNA, 80 bp, synthetic construct
  source 1..80: mol_type = other DNA
tgctgtgggcaacccttattttgccatacgaccagcaaacaagacacttgtgcctaaggtttcgggatttcaatataggg

SEQ ID NO: 89737 - DNA, 80 bp, synthetic construct
  source 1..80: mol_type = other DNA
tttttaagatggtattgccagaccctaataaatttgccttacctgacacatctatatatgaccccactacgcaacgcctg

SEQ ID NO: 89738 - DNA, 80 bp, synthetic construct
  source 1..80: mol_type = other DNA
aattggatgatgtagaaaattcagctagttatgcagccggtccgggtcaggataacagggtaaatgtggccatggactat

SEQ ID NO: 89739 - DNA, 80 bp, synthetic construct
  source 1..80: mol_type = other DNA
aaacaaacacaattatgtttggttggctgtgcacccccgttaggtgagcattggggtaaaggcaagcagtgtaataatgt

SEQ ID NO: 89740 - DNA, 80 bp, synthetic construct
  source 1..80: mol_type = other DNA
tagtgttaaggatggggactgccctcccttggaattaattactagtgtaattgaggatggtgatatggtggacactggtt

SEQ ID NO: 89741 - DNA, 80 bp, synthetic construct
  source 1..80: mol_type = other DNA
ttggagccatgaattttgctgaattgcagccaaataaatctgatgttccattagatatatgcactgctacatgtaaatat

SEQ ID NO: 89742 - DNA, 80 bp, synthetic construct
  source 1..80: mol_type = other DNA
ggatgaactagccacgcaagccacgcaagacgttacacagccttaccaaatagtaaccacctgtggtacatgtagtcgga

SEQ ID NO: 89743 - DNA, 80 bp, synthetic construct
  source 1..80: mol_type = other DNA
gctggaacagttggtgaggacgtttcccaggatctggttattaaaagtgctagtaaaaatactgttcctaatgctatata

SEQ ID NO: 89744 - DNA, 80 bp, synthetic construct
  source 1..80: mol_type = other DNA
ctttaatacacccagtggttctcttgtatcttctgaaacccaattatttaataagcctttttggttgcaaaaggcgcagg

SEQ ID NO: 89745 - DNA, 80 bp, synthetic construct
  source 1..80: mol_type = other DNA
atactacccgtagtacaaacatgacaatatgtgctgccactacacagtcccctccgtctacatatactagtgaacaatat

SEQ ID NO: 89746 - DNA, 80 bp, synthetic construct
  source 1..80: mol_type = other DNA
aagcaatacatgcgacatgttgaggagtttgacttacaatttatgtttcaattatgtagtattaccttaacggcggaggt

SEQ ID NO: 89747 - DNA, 80 bp, synthetic construct
  source 1..80: mol_type = other DNA
aatggcctatcttcatactatgaatgctggtattttagaacagtggaactttgggttgtcgccgcccccaaatggtacct

SEQ ID NO: 89748 - DNA, 80 bp, synthetic construct
  source 1..80: mol_type = other DNA
tagaggacaaatacagatatgtgcagtcccaggccattacatgtcaaaagccaccccctgaaaaggcaaagcaggacccc

SEQ ID NO: 89749 - DNA, 80 bp, synthetic construct
  source 1..80: mol_type = other DNA
tatgcaaaattaagtttttgggaggtggatcttagagaaaagttttctagtgagttggatcaatatccccttggtagaaa

SEQ ID NO: 89750 - DNA, 80 bp, synthetic construct
  source 1..80: mol_type = other DNA
atttttattacaaacgggtgtgcaggcccgttcctctgttcgtgtgggtaggaaacgtcctgcgtctgcagccacttcct

SEQ ID NO: 89751 - DNA, 80 bp, synthetic construct
  source 1..80: mol_type = other DNA
ccagtaaacaaaaacggtctaggaagaagtagtatgtgttattgttttgtttgtatgtgtgtcatatgttattgtgttat

SEQ ID NO: 89752 - DNA, 80 bp, synthetic construct
  source 1..80: mol_type = other DNA
aggttcggctggttgtgcagtgcacaggaacagacatccatcacctacatacgcttctgctgggttcactggatatattg

SEQ ID NO: 89753 - DNA, 80 bp, synthetic construct
  source 1..80: mol_type = other DNA
atatgtgttgtgttgtatatatgttgtatgtgtatgttgtgtaatgttgtttgtaatggaatgcatgtgtgtgttgtaca

SEQ ID NO: 89754 - DNA, 80 bp, synthetic construct
  source 1..80: mol_type = other DNA
taataaacttaatctgtgtgtcctgttccaccccatgagtaagtgttgtagtgttgtgttctatgtttggtatatataat

SEQ ID NO: 89755 - DNA, 80 bp, synthetic construct
  source 1..80: mol_type = other DNA
atataacatatgtacagccatgttagtttttaaacatattcctccattttgggtgcaaccgttttcggttgttcattttg

SEQ ID NO: 89756 - DNA, 80 bp, synthetic construct
  source 1..80: mol_type = other DNA
ggtgcaaccgttttcggttgttactcattacccacatcctgtacccaatttgttatagcaagcaaaatatttaatcatct

SEQ ID NO: 89757 - DNA, 80 bp, synthetic construct
  source 1..80: mol_type = other DNA
ctgccagaactttattatgttactaagtacacacctggcgcacagctaggcgcggtttggcaactacacaatacattcct

SEQ ID NO: 89758 - DNA, 80 bp, synthetic construct
  source 1..80: mol_type = other DNA
aatctctatactactgctgtctcgtttgtgaacaatagtgcgctggtagccaactttttaaaagcatttttggctactag

SEQ ID NO: 89759 - DNA, 80 bp, synthetic construct
  source 1..80: mol_type = other DNA
cactgcatttttgtacagttactgttggttttataaaatgagtaacctaaggtcacacacctgcgaccggtatcggttga

SEQ ID NO: 89760 - DNA, 80 bp, synthetic construct
  source 1..80: mol_type = other DNA
tttataaaatgagtaacctaaggtcacacacctgcgaccggtatcggttgacacacaccctgtacacttccttatcatag

SEQ ID NO: 89761 - DNA, 80 bp, synthetic construct
  source 1..80: mol_type = other DNA
ccaaaaattaagcaagcggggcataatggaaagtgcaaatgcctccacgtctgcacaaagtatagaccagttgtgcaagg

SEQ ID NO: 89762 - DNA, 80 bp, synthetic construct
  source 1..80: mol_type = other DNA
tgtcctgtgtgtgcgcccaaaacctaacaacgatggctgacaatacaggtacagagggaacgggatgctcaggatggttt

SEQ ID NO: 89763 - DNA, 80 bp, synthetic construct
  source 1..80: mol_type = other DNA
ctagtagaggctatagtggagaacacaaccgggcaacaaatatcagaggatgaggatgaggcagtggaggatagtgggtt

SEQ ID NO: 89764 - DNA, 80 bp, synthetic construct
  source 1..80: mol_type = other DNA
ggatatggtggactttatagatgacaggcctattacacacaattccatggaagcacaggcattgttaaacgagcaggagg

SEQ ID NO: 89765 - DNA, 80 bp, synthetic construct
  source 1..80: mol_type = other DNA
cgtggacgcgccgccatgtaaacgaccccgaggaccccccacaaacaccaacaacgccagaaacaccgtctgtgtcagaa

SEQ ID NO: 89766 - DNA, 80 bp, synthetic construct
  source 1..80: mol_type = other DNA
gaaagttttaatcatacttttatatattgggagtaaccgaaaagggtttaagaccgaaaacggtacatataaaaggcagc

SEQ ID NO: 89767 - DNA, 80 bp, synthetic construct
  source 1..80: mol_type = other DNA
catggggggttatagtaatgatgctaattagatatacatgtggcaaaaacagaaaaacaattgcaaaagcattaagctca

SEQ ID NO: 89768 - DNA, 80 bp, synthetic construct
  source 1..80: mol_type = other DNA
agatgaagggggtgattggaaacccattgtacaatttttaagatatcaaggggtcgatttcatttcatttttaagttact

SEQ ID NO: 89769 - DNA, 80 bp, synthetic construct
  source 1..80: mol_type = other DNA
ggaagtttatttacatatttcggaggccttggcattggtacaggaactgggtctgggggtcgtgcaggctatgttccatt

SEQ ID NO: 89770 - DNA, 80 bp, synthetic construct
  source 1..80: mol_type = other DNA
atctggtgcagggattcctaattttactgggtctgggggatttgaaattacatcatcatcaacaactacacctgccgtgt

SEQ ID NO: 89771 - DNA, 80 bp, synthetic construct
  source 1..80: mol_type = other DNA
ctgtatgtattatcatatgcaatgtttaacatgtacatggggggttatagtaatgatgctaattagatatacatgtggca

SEQ ID NO: 89772 - DNA, 80 bp, synthetic construct
  source 1..80: mol_type = other DNA
atttttcagttcccttgcatgaaagctttagaaaatatactgcattcaccttacctagcataaacaatgagacaccagga

SEQ ID NO: 89773 - DNA, 80 bp, synthetic construct
  source 1..80: mol_type = other DNA
tatcaatacatggatgacttgtatgtagggtctgatctagaaatagaacagcatagaaagaaaatagaggagttaagagc

SEQ ID NO: 89774 - DNA, 80 bp, synthetic construct
  source 1..80: mol_type = other DNA
cctgtcaacataattggaaggaacatgttgactcagattggatgtactttaaattttccaatggaaaaggaaggaaaaat

SEQ ID NO: 89775 - DNA, 80 bp, synthetic construct
  source 1..80: mol_type = other DNA
tactgcattcactatacctagcataaacaatgagacaccaggaattagataccagtacaacgtgctgccacagggatgga

SEQ ID NO: 89776 - DNA, 80 bp, synthetic construct
  source 1..80: mol_type = other DNA
tatcaatacatggatgatttgtatgtaggatctgacttagaaataagacagcatagagaaaaagtagaagaattaaggga

SEQ ID NO: 89777 - DNA, 80 bp, synthetic construct
  source 1..80: mol_type = other DNA
gcatttattgaagtggggattcaccacaccagataaaaaacatcagaaggaacctccattcctttggatgggatatgagc

SEQ ID NO: 89778 - DNA, 80 bp, synthetic construct
  source 1..80: mol_type = other DNA
tcaaagtaagacagtatgaaaacatgcccatagaaattgagggaaaaaaggctataggtacagtattaataggacctact

SEQ ID NO: 89779 - DNA, 80 bp, synthetic construct
  source 1..80: mol_type = other DNA
tgtgcttccacagggatggaaaggatcaccagcaatatttcagcatagcatgacaaaaattttagagccctttagatcac

SEQ ID NO: 89780 - DNA, 80 bp, synthetic construct
  source 1..80: mol_type = other DNA
aaaatagaagagttgagagctcatctattaagctggggatttaccaccccagacaagaagcatcagaaagaaccaccatt

SEQ ID NO: 89781 - DNA, 80 bp, synthetic construct
  source 1..80: mol_type = other DNA
ttaaagtaagacaatatgagggagtaaccatagaaattgagggaaaaaaggctataggtacagtactagtaggacctaca

SEQ ID NO: 89782 - DNA, 80 bp, synthetic construct
  source 1..80: mol_type = other DNA
tactgcatttactatacctagtataaacaatgaaacaccagggaaaagatatcagtataatgtgttaccacaaggatgga

SEQ ID NO: 89783 - DNA, 80 bp, synthetic construct
  source 1..80: mol_type = other DNA
taccgcatcctgcacggctgaaaaagaaaaaatcagtaacagtactggatgtgggtgatgcatatttttcagttccttta

SEQ ID NO: 89784 - DNA, 80 bp, synthetic construct
  source 1..80: mol_type = other DNA
gataaagactttaggaaatatacagcatttaccatacctagtataaacaatgagacaccaggggttagatatcagtacaa

SEQ ID NO: 89785 - DNA, 80 bp, synthetic construct
  source 1..80: mol_type = other DNA
aaaatagaagaattaagagaacacctgttgaagtggggatttaccaccccagataaaaaacatcagaaagaacctccatt

SEQ ID NO: 89786 - DNA, 80 bp, synthetic construct
  source 1..80: mol_type = other DNA
aggtagggggacagcaaagggaggctttgttagatacaggagcagatgatacagtattagaagaaatgaatttgccagga

SEQ ID NO: 89787 - DNA, 80 bp, synthetic construct
  source 1..80: mol_type = other DNA
tcaaagtaagacaatatgaggacatagctatagaaattgagggaaaaaaggctgtaggtacagtgttaataggacccacc

SEQ ID NO: 89788 - DNA, 80 bp, synthetic construct
  source 1..80: mol_type = other DNA
ttcaagaattgggcctgagaatccatacaatactccaatatttgctataaagaaaaaggacagtaataggtggagaaaat

SEQ ID NO: 89789 - DNA, 80 bp, synthetic construct
  source 1..80: mol_type = other DNA
acatctattgaagtggggatttaccacaccagacaacaagcatcaaaaggaacctccatatcgttggctgggttatgaac

SEQ ID NO: 89790 - DNA, 80 bp, synthetic construct
  source 1..80: mol_type = other DNA
tcaaagtaaaacagtatgatcaaatatccatggaaatttgtggacacaaggctataggtacagtattagtaggacctacg

SEQ ID NO: 89791 - DNA, 80 bp, synthetic construct
  source 1..80: mol_type = other DNA
tagtagatttcagagaacttaataaaagaactcaagatttttgggaagttcaactgggaataccacatcctgccggatta

SEQ ID NO: 89792 - DNA, 80 bp, synthetic construct
  source 1..80: mol_type = other DNA
aaaaagaacaaatcagtaacagtactggatgtgggagatgcatatttttcagttcccttagataaggatttcaggaagta

SEQ ID NO: 89793 - DNA, 80 bp, synthetic construct
  source 1..80: mol_type = other DNA
aaggatcaccagcaatattccaagctagcatgacaaaaatcttagagccctttagaacaaaaaatccagacatagttatt

SEQ ID NO: 89794 - DNA, 80 bp, synthetic construct
  source 1..80: mol_type = other DNA
acatctgctgagatggggatttactacaccagacaagaaacatcagaaagaacctccattcctttggatgggatatgaac

SEQ ID NO: 89795 - DNA, 80 bp, synthetic construct
  source 1..80: mol_type = other DNA
aagaagaacaaatcagtaacagtattggatgtgggggatgcatatttttcagtgcctctagatgaaaacttcaggaaata

SEQ ID NO: 89796 - DNA, 80 bp, synthetic construct
  source 1..80: mol_type = other DNA
aaggatcaccagctatatttcagtgtagcatgacaaaaatcttagaaccatttagagcaaaaaacccagaaatagttatc

SEQ ID NO: 89797 - DNA, 80 bp, synthetic construct
  source 1..80: mol_type = other DNA
tactgcgttcaccatacctagtataaacaatgggacaccaggaatcagatatcagtacaatgtgctaccacagggatgga

SEQ ID NO: 89798 - DNA, 80 bp, synthetic construct
  source 1..80: mol_type = other DNA
tatcaatacatggatgatttgtatgtaggatctgatttggaaatagggctacacagagaaaaagtagaggagttgagagc

SEQ ID NO: 89799 - DNA, 80 bp, synthetic construct
  source 1..80: mol_type = other DNA
taccacatccagcaggtttaaaaaagaaaaagtcagtaacagtactggatgtgggggatgcatatttctcagtgccttta

SEQ ID NO: 89800 - DNA, 80 bp, synthetic construct
  source 1..80: mol_type = other DNA
gataaagaatttagaaagtacactgcattcaccatacctagtgtaaacaatgagacaccaggaatcaggtaccagtacaa

SEQ ID NO: 89801 - DNA, 80 bp, synthetic construct
  source 1..80: mol_type = other DNA
agaatccagaattagtcatctaccaatacatggatgacttgtatgtaggatctgatttagaaataaggcagcacagagca

SEQ ID NO: 89802 - DNA, 80 bp, synthetic construct
  source 1..80: mol_type = other DNA
aaaatagaggagttaagagatcatctattgagatggggatttactacaccagacaaaaagcatcaaaaggaacctccatt

SEQ ID NO: 89803 - DNA, 80 bp, synthetic construct
  source 1..80: mol_type = other DNA
tctttggatgggatatgaactccatcccgacaaatggacacctcaaatcactctttggcaacgacccgttgtcacagtaa

SEQ ID NO: 89804 - DNA, 80 bp, synthetic construct
  source 1..80: mol_type = other DNA
cagtactggtaggacctacaccagtcaacataattggaagaaatatgttgactcaaattggttgcactttaaattttcca

SEQ ID NO: 89805 - DNA, 80 bp, synthetic construct
  source 1..80: mol_type = other DNA
aaggatcaccagctatattccaatgtagcatgacaaaaatcttagacccatttagaaaacaaaatccagaactagttatc

SEQ ID NO: 89806 - DNA, 80 bp, synthetic construct
  source 1..80: mol_type = other DNA
tatcaatacatggatgacttgtatgtgggatctgacttagaaatagaacagcacagagagaaggtagaaagattaagaga

SEQ ID NO: 89807 - DNA, 80 bp, synthetic construct
  source 1..80: mol_type = other DNA
cagtactaaatggagaaaattagtagatttcagggaacttaataagaaaactcaagacttctgggaagttcaattaggaa

SEQ ID NO: 89808 - DNA, 80 bp, synthetic construct
  source 1..80: mol_type = other DNA
taccacatcctgcagggctaaaaaagaaaaaatcagtaacagtactagatgtgggggacgcatatttttcaattccctta

SEQ ID NO: 89809 - DNA, 80 bp, synthetic construct
  source 1..80: mol_type = other DNA
gatgaggaattcaggaggtatactgcatttaccatacctagtataaataatgagacaccagggattagataccaatacaa

SEQ ID NO: 89810 - DNA, 80 bp, synthetic construct
  source 1..80: mol_type = other DNA
tgtgcttccacagggatggaaagggtcaccagcgatattccaaagtagcatgataaaaatcttagagccttttagaaaac

SEQ ID NO: 89811 - DNA, 80 bp, synthetic construct
  source 1..80: mol_type = other DNA
aaaatccagatatagtcatctatcaatacatggatgatttgtatgtaggatctgacttagaaatagagcagcatagagca

SEQ ID NO: 89812 - DNA, 80 bp, synthetic construct
  source 1..80: mol_type = other DNA
aaaatagagagactgagacaacacctgttgaagtggggattaaccacaccagacaaaaaacatcagaaagaacctccatt

SEQ ID NO: 89813 - DNA, 80 bp, synthetic construct
  source 1..80: mol_type = other DNA
cctatggatgggttatgaactccatcctgataaatggacacctcagaacactctttggcaacgacccctcgtctcaataa

SEQ ID NO: 89814 - DNA, 80 bp, synthetic construct
  source 1..80: mol_type = other DNA
gggcaactaaaggaagctctattagatacaggagcagatgatacagtattagaagacatggagttgccaggaagatggaa

SEQ ID NO: 89815 - DNA, 80 bp, synthetic construct
  source 1..80: mol_type = other DNA
agataggggggcaactaaaggaagctctattagatacaggagcagatgatacagtattagaagacatggagttgccagga

SEQ ID NO: 89816 - DNA, 80 bp, synthetic construct
  source 1..80: mol_type = other DNA
ttcaagaattgggcctgaaaacccatacaatactccaatatttgccataaagaaaaaagatagcactaaatggagaaaat

SEQ ID NO: 89817 - DNA, 80 bp, synthetic construct
  source 1..80: mol_type = other DNA
tcaaagtcagacaatatgatcaggtacctatagaaatttgtgaaagaaaggctataggtacggtgttggtaggacctaca

SEQ ID NO: 89818 - DNA, 80 bp, synthetic construct
  source 1..80: mol_type = other DNA
cctgtcaacataattggacgaaatatgttgactcagattggctgtactttaaatttcccattggaaaaagatggaaaaat

SEQ ID NO: 89819 - DNA, 80 bp, synthetic construct
  source 1..80: mol_type = other DNA
ctcaaaaattgggcctgaaaatccatacaatactccagtatttgctataaagaaaaagaacagtgataaatggagaaaaa

SEQ ID NO: 89820 - DNA, 80 bp, synthetic construct
  source 1..80: mol_type = other DNA
tagtagatttcagagaactcaataaaagaactcaggacttttgggaggttcaactaggaataccacatccaggaggttta

SEQ ID NO: 89821 - DNA, 80 bp, synthetic construct
  source 1..80: mol_type = other DNA
gaaaagaagaaatcagtaacagtaatagatgtgggagatgcatatttttcaattccattacatgaaagctttagaaagta

SEQ ID NO: 89822 - DNA, 80 bp, synthetic construct
  source 1..80: mol_type = other DNA
tatcaatacgtggatgacttgtatgtagcatctgatttagaaataggacagcatagagaaaaagtaaaggaactgagaga

SEQ ID NO: 89823 - DNA, 80 bp, synthetic construct
  source 1..80: mol_type = other DNA
ttatctatggaagtgggggttttatacaccagacaaaaagtatcagaaagaacctccattcctttggatgggatatgaac

SEQ ID NO: 89824 - DNA, 80 bp, synthetic construct
  source 1..80: mol_type = other DNA
agcagatgatacagtgctagaaaacataaatttgcaagggaaatggaaaccgaaaatgatagggggaattggaggtttta

SEQ ID NO: 89825 - DNA, 80 bp, synthetic construct
  source 1..80: mol_type = other DNA
atcaggtatcagtacaatgtgcttccacagggatggaagggatcaccatcaatattccagtctagcatgacaaaaattct

SEQ ID NO: 89826 - DNA, 80 bp, synthetic construct
  source 1..80: mol_type = other DNA
agagccctttaggtcaaagaatccagaaataattatctatcaatatttggatgacttgttagtaggatctgatttagaaa

SEQ ID NO: 89827 - DNA, 80 bp, synthetic construct
  source 1..80: mol_type = other DNA
tagagcagcatagagcaaaagtagaggagttgagagctcatctactgagctggggattttatacaccagaccaaaagcat

SEQ ID NO: 89828 - DNA, 80 bp, synthetic construct
  source 1..80: mol_type = other DNA
caaggaaagctggactgtcaatgatatacaaaagctagtgggaaagctaaattgggctagtcagatttattcagggatta

SEQ ID NO: 89829 - DNA, 80 bp, synthetic construct
  source 1..80: mol_type = other DNA
agaaccatttagagcaaaatatccagaaatagttatctgtcaatacgtggatgacttatatgtgggatctgacttagaga

SEQ ID NO: 89830 - DNA, 80 bp, synthetic construct
  source 1..80: mol_type = other DNA
tagggcagcatagaacaaaaatagaggagctgagagatcatctattgaagtgggggttctttacaccagacaaaaagcat

SEQ ID NO: 89831 - DNA, 80 bp, synthetic construct
  source 1..80: mol_type = other DNA
aagtaaagcaactgtgtagactcatcaggggagctaaagcactaacagccacagtaacactgactgaggaagcagaatta

SEQ ID NO: 89832 - DNA, 80 bp, synthetic construct
  source 1..80: mol_type = other DNA
aaattctaaaagaaccagtacatggagtatattatgatccatcaaaagacttgatagctgaactacagaaacaggggcat

SEQ ID NO: 89833 - DNA, 80 bp, synthetic construct
  source 1..80: mol_type = other DNA
ttaaagtaagacagtatgatcaaatagctatagaaatttgtggaaagaaggctataggttcagtattagtagggcctaca

SEQ ID NO: 89834 - DNA, 80 bp, synthetic construct
  source 1..80: mol_type = other DNA
taaaacaacacagagaaaaaatagaggagttaagagaacatctattgaagtggggattcacaacaccagacaagaaacac

SEQ ID NO: 89835 - DNA, 80 bp, synthetic construct
  source 1..80: mol_type = other DNA
gaattggcagaaaacagagaaactctaaaagaaccagtacatggagcatattatgatccctcaaaagatttaatagcaga

SEQ ID NO: 89836 - DNA, 80 bp, synthetic construct
  source 1..80: mol_type = other DNA
tcaaagtaagacagtatgaagatatagtcatagaaattgagggaaaaaaggctataggaaaagtgttaataggacctaca

SEQ ID NO: 89837 - DNA, 80 bp, synthetic construct
  source 1..80: mol_type = other DNA
taggacaacatagagaaaaggtagaagaattaagggagcatctattgaagtgggggttgaccacaccagataaaaaacat

SEQ ID NO: 89838 - DNA, 80 bp, synthetic construct
  source 1..80: mol_type = other DNA
ggaagtccagttagggataccacatccagcagggttaaaaaagaaaaaatcagtatcagtactggatgtaggggatgcat

SEQ ID NO: 89839 - DNA, 80 bp, synthetic construct
  source 1..80: mol_type = other DNA
acttttcagtccctttagatgaaaatttcaggaagtacactgcattcaccatacctagtgtaaacaatgagacaccagga

SEQ ID NO: 89840 - DNA, 80 bp, synthetic construct
  source 1..80: mol_type = other DNA
attggatatgtgtataatgtgcttccacagggatggaaaggatcaccagcaatattccagagtagcatgacaaaaatttt

SEQ ID NO: 89841 - DNA, 80 bp, synthetic construct
  source 1..80: mol_type = other DNA
tcaaagtaagacagtatgaggaagtaagcatagaaattgagggaaaaagggctgtaggtgcagtgctagtaggacctaca

SEQ ID NO: 89842 - DNA, 80 bp, synthetic construct
  source 1..80: mol_type = other DNA
gccataaagaaaaaagacagcactaaatggagaaaagtaactgattttagggaactcaataaaagaactcaagacttttg

SEQ ID NO: 89843 - DNA, 80 bp, synthetic construct
  source 1..80: mol_type = other DNA
cctcaaatcactctttggcagcgacccatcgtcacaataaaagtggcgggtcagctgatggaagctctattagatacagg

SEQ ID NO: 89844 - DNA, 80 bp, synthetic construct
  source 1..80: mol_type = other DNA
gggtaaaacagttatgtaaactccttagggggacaaaagcactaacagacatagtaccattgactgcagaagcagaatta

SEQ ID NO: 89845 - DNA, 80 bp, synthetic construct
  source 1..80: mol_type = other DNA
aagtgaaacaattgtgtaaactccttaggggagctaaagcactaacagacatagtcccactgactaaggaagcagaatta

SEQ ID NO: 89846 - DNA, 80 bp, synthetic construct
  source 1..80: mol_type = other DNA
tagggcaacatagggcaaaaatagaaaagctaagagctcatttattgagctggggattaactacaccagacggaaagcat

SEQ ID NO: 89847 - DNA, 80 bp, synthetic construct
  source 1..80: mol_type = other DNA
gccctttaggtcacaaaatccagaaatagttatctgtcagtacatggatgacttgtatgtagcatctgatttagaaatag

SEQ ID NO: 89848 - DNA, 80 bp, synthetic construct
  source 1..80: mol_type = other DNA
agcagcatagaacaaaaatagaacagttaagagatcatctgttgagatgggggcttactacaccagacagaaagtatcag

SEQ ID NO: 89849 - DNA, 80 bp, synthetic construct
  source 1..80: mol_type = other DNA
agcagatgatacagtattaaaggaaatagatttgatgggaagatggaaaccaaaaatgatagggggaattggaggtttta

SEQ ID NO: 89850 - DNA, 80 bp, synthetic construct
  source 1..80: mol_type = other DNA
gccataaagaaaaaagacagcaataaatggagaaaattagtagatttcagggagctcaataaaagaactcaggacttttg

SEQ ID NO: 89851 - DNA, 80 bp, synthetic construct
  source 1..80: mol_type = other DNA
tcaaagtaagacaatatgatcagatatctttagaaatttgtgggaaaagggctctgggtacagtgttagtaggacctaca

SEQ ID NO: 89852 - DNA, 80 bp, synthetic construct
  source 1..80: mol_type = other DNA
tagggcagcatagagcaaaaatagaagaattgagagcacatctactgaaatggggatttactacaccagacaaaaagcat

SEQ ID NO: 89853 - DNA, 80 bp, synthetic construct
  source 1..80: mol_type = other DNA
gaattggcagagaatagggaaattctaaaaacccctgtgcatggggtatattatgacccctcaaaagacttagtagcaga

SEQ ID NO: 89854 - DNA, 80 bp, synthetic construct
  source 1..80: mol_type = other DNA
tagggcagcatagggcaaaaatagatgagttaagaaatcatctgttgaaatggggatttactacaccagacaaaaagcat

SEQ ID NO: 89855 - DNA, 80 bp, synthetic construct
  source 1..80: mol_type = other DNA
atttttcaatccctctagatccggacttcaggaagtatactgcattcactatacctagtatgaacaatgagtcacccggg

SEQ ID NO: 89856 - DNA, 80 bp, synthetic construct
  source 1..80: mol_type = other DNA
gctataaagaaaaaggacagcactaagtggagaaaattagtagatttcagagaactcaataagagaactaaggacctttg

SEQ ID NO: 89857 - DNA, 80 bp, synthetic construct
  source 1..80: mol_type = other DNA
gctataaagaagaaagacagcactaaatggagaaaattagtagatttcagagaactcaataaaagaacccaggatttctg

SEQ ID NO: 89858 - DNA, 80 bp, synthetic construct
  source 1..80: mol_type = other DNA
gaagttagtgggaaagctaaattgggcaagtcagatttatccagggattaaagtaaagcaactatgtaggctccttaggg

SEQ ID NO: 89859 - DNA, 80 bp, synthetic construct
  source 1..80: mol_type = other DNA
aagtaaagcaactatgtaggctccttaggggggcaaaagcactaacagcaatagtaccaatgactgtagaagcagaaatg

SEQ ID NO: 89860 - DNA, 80 bp, synthetic construct
  source 1..80: mol_type = other DNA
cctgtcaacataattggacgaaatatgttgacccaaatcggttgtactttaaattttccaattagttctattgaaactat

SEQ ID NO: 89861 - DNA, 80 bp, synthetic construct
  source 1..80: mol_type = other DNA
atttttccattcccttagataaagactttaggaagtatactgcattcactatacctagtgtgaacaatgagacaccaggg

SEQ ID NO: 89862 - DNA, 80 bp, synthetic construct
  source 1..80: mol_type = other DNA
gggctaaagcactaacagacatagtaccgctgactgcagaagcagagctagaattggcagagaacagggagattctaaag

SEQ ID NO: 89863 - DNA, 80 bp, synthetic construct
  source 1..80: mol_type = other DNA
tcaaagtaagacagtatgataacatggccatggaaattgaaggaaaaagggttataggcacagtattaataggacctaca

SEQ ID NO: 89864 - DNA, 80 bp, synthetic construct
  source 1..80: mol_type = other DNA
atttttcagtccctctagatgaaaactttagaaagtatactgcattcactatacctagtacaaacaatgagatgccaggg

SEQ ID NO: 89865 - DNA, 80 bp, synthetic construct
  source 1..80: mol_type = other DNA
aagtaaagcaactatgtaaactccttaggggggctaaagcactaacagacatagtaccgctgactgcagaagcagagcta

SEQ ID NO: 89866 - DNA, 80 bp, synthetic construct
  source 1..80: mol_type = other DNA
gaattggcagagaacagggagattctaaaggaacctgtacacggagtttactatgacccaaataaagaattaatagcaga

SEQ ID NO: 89867 - DNA, 80 bp, synthetic construct
  source 1..80: mol_type = other DNA
cctcaaatcactctttggcaacgaccagttgtcacagtgaaaatagaaggacagctgaaagaagctctattagacacagg

SEQ ID NO: 89868 - DNA, 80 bp, synthetic construct
  source 1..80: mol_type = other DNA
aagtaaaggaactgtgtaaactcatcaggggaaccaaagcactaacagaagtagtaccattgactagggaagcagaatta

SEQ ID NO: 89869 - DNA, 80 bp, synthetic construct
  source 1..80: mol_type = other DNA
tcaaagtaagacagtatgagggaataaccctagagattgagggaaaaaaggctacaggtacagtgttagtaggacctaca

SEQ ID NO: 89870 - DNA, 80 bp, synthetic construct
  source 1..80: mol_type = other DNA
tagggcagcatagaacaaaaatagaggagttgagagctcatctgttacaatggggatttactacaccagacaaaaagcat

SEQ ID NO: 89871 - DNA, 80 bp, synthetic construct
  source 1..80: mol_type = other DNA
aagtaaagcatctatgcagactccttagggggaccaaagcactaacagacgtagtaccactgactaaagaagcagaattg

SEQ ID NO: 89872 - DNA, 80 bp, synthetic construct
  source 1..80: mol_type = other DNA
agagccctttaggtcaaaaaatccagaaatggttatctgtcaatacgtggatgacttgtatgtaggatctgacttggaaa

SEQ ID NO: 89873 - DNA, 80 bp, synthetic construct
  source 1..80: mol_type = other DNA
aggtaaaacaactatgtagactcctcagggggaccaaagcactaacagatatagtaccactgactgcagaggcagaatta

SEQ ID NO: 89874 - DNA, 80 bp, synthetic construct
  source 1..80: mol_type = other DNA
tcaaagttagacaatatgaggaagtaaccatagagattgaggggagaaaggctataggtacagtgttagtaggacctaca

SEQ ID NO: 89875 - DNA, 80 bp, synthetic construct
  source 1..80: mol_type = other DNA
cctcaagtctctctttggcaacgacccattgttgccataagagtagcggggcaggtgaaagaagctctattagatacagg

SEQ ID NO: 89876 - DNA, 80 bp, synthetic construct
  source 1..80: mol_type = other DNA
tagggcaacatagaaaaaagatagaggaactgagggaacacctattgagatggggattcactacaccagataaaaaacat

SEQ ID NO: 89877 - DNA, 80 bp, synthetic construct
  source 1..80: mol_type = other DNA
tcaaagtaagacagtatgagcaagtaaccttagaaattgaagggaaaaaagctataggtacagtgttagtaggacctaca

SEQ ID NO: 89878 - DNA, 80 bp, synthetic construct
  source 1..80: mol_type = other DNA
accagtaacattaaagccaggaatggagggcccaaaagttaaacaatggccattgacagaagaaaaaatcaaagcattga

SEQ ID NO: 89879 - DNA, 80 bp, synthetic construct
  source 1..80: mol_type = other DNA
ataagatatcagtacaatgtgctaccacagggatggaaagggtcaccagctatcttccagagtagcatgacaaaaatctt

SEQ ID NO: 89880 - DNA, 80 bp, synthetic construct
  source 1..80: mol_type = other DNA
ggaagttcaattaggaataccgcatccagcggggctaaaacagaaaaaatcagtaacagtactagatgtgggtgatgcgt

SEQ ID NO: 89881 - DNA, 80 bp, synthetic construct
  source 1..80: mol_type = other DNA
gaattggcagaaaatagggagattctaaaagaccctgtgcatggagtctattatgacccatcgaaagacttaatagcaga

SEQ ID NO: 89882 - DNA, 80 bp, synthetic construct
  source 1..80: mol_type = other DNA
tcaaagtaagacaatatgatcaggtacctatggaaatttatggaaagaaggctataggtacagtactagtaggacctaca

SEQ ID NO: 89883 - DNA, 80 bp, synthetic construct
  source 1..80: mol_type = other DNA
gaattggcagaaaatagggagattttaaaagaaccagtacatggggcgtattatgacccatcaaaagaaataatagcaga

SEQ ID NO: 89884 - DNA, 80 bp, synthetic construct
  source 1..80: mol_type = other DNA
atttttcaattcctctagataaagattttaggaagtatactgcattcactatacctagtactaataatgagacaccaggg

SEQ ID NO: 89885 - DNA, 80 bp, synthetic construct
  source 1..80: mol_type = other DNA
agaaccctttagaacaaataacccagagatagttatctgtcaatacgtggatgacttgtatgtaggatctgacttagaaa

SEQ ID NO: 89886 - DNA, 80 bp, synthetic construct
  source 1..80: mol_type = other DNA
taggacagcatagagaaaaagtagaagaattaagagaacatctattgagatggggactcaccacaccagataagaaacat

SEQ ID NO: 89887 - DNA, 80 bp, synthetic construct
  source 1..80: mol_type = other DNA
aaataaggcaattatgcaaactcattagggggacaaaagcactaacagaaatagtaccactgactccagaagcagaattg

SEQ ID NO: 89888 - DNA, 80 bp, synthetic construct
  source 1..80: mol_type = other DNA
ttctaaaagaccctgtgcatggagtctattatgacccatcaaaagacttaatagcagaaatacagaaacaaggatgtgac

SEQ ID NO: 89889 - DNA, 80 bp, synthetic construct
  source 1..80: mol_type = other DNA
aggtaaagcaactgtgtaaattactcagaggagccaaagcactaacagaagtggtaccattgactaaggaagcagaatta

SEQ ID NO: 89890 - DNA, 80 bp, synthetic construct
  source 1..80: mol_type = other DNA
tcaaagtgagacagtatgatcaggtacatatagaaatttgtggaaaaagggctataggtacagtcttggtaggacctaca

SEQ ID NO: 89891 - DNA, 80 bp, synthetic construct
  source 1..80: mol_type = other DNA
cctgtcaacataattgggaggaacatgttgactcagattggttgcactttaaattttccaattagtcctattgagacagt

SEQ ID NO: 89892 - DNA, 80 bp, synthetic construct
  source 1..80: mol_type = other DNA
ggaagtccaattaggaataccgcacccagcgggtttacaaaagaacaaatcagtaacagtgctggatgtgggggatgcat

SEQ ID NO: 89893 - DNA, 80 bp, synthetic construct
  source 1..80: mol_type = other DNA
tagagcagcacagagaaaagatagaggagttaagagctcatctattgagatggggatttactacaccagacaaaaagcat

SEQ ID NO: 89894 - DNA, 80 bp, synthetic construct
  source 1..80: mol_type = other DNA
aagtaaagcaactgtgtaaattactcaggggagccaaagcactgacagatgtaataccattaactgaggaagcagaatta

SEQ ID NO: 89895 - DNA, 80 bp, synthetic construct
  source 1..80: mol_type = other DNA
ggaggttcaattgggcataccgcatccagcgggtttgaaaaagagcaaatcagtaacagtactggatgtgggggatgcat

SEQ ID NO: 89896 - DNA, 80 bp, synthetic construct
  source 1..80: mol_type = other DNA
atttttcagttcctttacataaggactttagaaagtatactgcattcaccatacctagtataaataacgagaccccagga

SEQ ID NO: 89897 - DNA, 80 bp, synthetic construct
  source 1..80: mol_type = other DNA
atcaggtattgctacaatgtacttccacagggctggaaaggatcaccagcaatattccagtctagcatgacaaagatttt

SEQ ID NO: 89898 - DNA, 80 bp, synthetic construct
  source 1..80: mol_type = other DNA
aaaagacagctggactgtcaatgatatacaaaaattagtgggaaagttaaattgggcaagtcaaatatacccaggaatta

SEQ ID NO: 89899 - DNA, 80 bp, synthetic construct
  source 1..80: mol_type = other DNA
gttagatatcagtataatgtgctaccaatgggatggaagggatccccggcaatattccagagtagcatgacaaagatctt

SEQ ID NO: 89900 - DNA, 80 bp, synthetic construct
  source 1..80: mol_type = other DNA
gtaagatattgttacaatgtgctaccacagggatggaaaggatcaccatgtatattccaagctagcatgacaaaaatctt

SEQ ID NO: 89901 - DNA, 80 bp, synthetic construct
  source 1..80: mol_type = other DNA
agattctaaaaaaccctgtgcatggagcctattatgactcatcaaaagaattaatagcagaagtgcagaagcaaggggaa

SEQ ID NO: 89902 - DNA, 80 bp, synthetic construct
  source 1..80: mol_type = other DNA
tcaaagtaaaacagtatgaggatataactatagagattgagggaaaagaggctaaaggtacagtgttaatagggcctaca

SEQ ID NO: 89903 - DNA, 80 bp, synthetic construct
  source 1..80: mol_type = other DNA
ggaaccatttagagctcaaaacccagaaatagttatctatcaatacgtggatgacttgtatgtgggatctgacctagaaa

SEQ ID NO: 89904 - DNA, 80 bp, synthetic construct
  source 1..80: mol_type = other DNA
taggacagcatagagaaaaggtggaggaattgagagagcatctattgaaatggggattcaccacaccagacaaaaaacat

SEQ ID NO: 89905 - DNA, 80 bp, synthetic construct
  source 1..80: mol_type = other DNA
cagaaagaacctccattcctctggatggggtatgaactccatcctgacaaatggacagtacaaactatacagctgccgga

SEQ ID NO: 89906 - DNA, 80 bp, synthetic construct
  source 1..80: mol_type = other DNA
atttttcagtccctttatatgaagactttagaaagtatactgcattcaccatacctagtataaacaatcagacaccagga

SEQ ID NO: 89907 - DNA, 80 bp, synthetic construct
  source 1..80: mol_type = other DNA
tagggctacatagagaaaaggtagaggagttgagagctcatttgttaaaatggggatttactacaccagataaaaagcat

SEQ ID NO: 89908 - DNA, 80 bp, synthetic construct
  source 1..80: mol_type = other DNA
aagtaaggcaactatgtaaactactcaggggaaccaaagcactaacagaggtagtaccattgactgaggaagcagaatta

SEQ ID NO: 89909 - DNA, 80 bp, synthetic construct
  source 1..80: mol_type = other DNA
cctcaaatcactctttggcaacgaccccttgtcacagtaagggtcgaaggacagctaaaagaagctctactagatacagg

SEQ ID NO: 89910 - DNA, 80 bp, synthetic construct
  source 1..80: mol_type = other DNA
gaactagcagagaacagggagattctaaaaaaccctgtgcatggagtatattatgacccatcaaaagacttgatagcaga

SEQ ID NO: 89911 - DNA, 80 bp, synthetic construct
  source 1..80: mol_type = other DNA
tagagcagcatagagaaaaaatagaggagttaagaaaacatctactaaaatgggggttgactacaccagacgaaaagcat

SEQ ID NO: 89912 - DNA, 80 bp, synthetic construct
  source 1..80: mol_type = other DNA
aagtaaaagaactatgtaaactcattagggggaccaaagcactgacagacatagtaccactgactgcggaagcagaattg

SEQ ID NO: 89913 - DNA, 80 bp, synthetic construct
  source 1..80: mol_type = other DNA
atttttcagttcctttagatgagagcttcaggaagtacactgcattcactatacccagtacaaacaatcagacaccagga

SEQ ID NO: 89914 - DNA, 80 bp, synthetic construct
  source 1..80: mol_type = other DNA
gaattggcagagaacagggagattctaaaacatcctgtgcatggagcctactatgacccatcaaaagaattaatagcaga

SEQ ID NO: 89915 - DNA, 80 bp, synthetic construct
  source 1..80: mol_type = other DNA
cagagatttgtagagaaatggaagcggaaggaaaaatttcaaaaattgggcctgaaaatccgtacaatactccaatattt

SEQ ID NO: 89916 - DNA, 80 bp, synthetic construct
  source 1..80: mol_type = other DNA
agagccctttaggagagacaatccagaaatagttatctatcaatacatggatgatttatatgtaggatctgatctagaaa

SEQ ID NO: 89917 - DNA, 80 bp, synthetic construct
  source 1..80: mol_type = other DNA
agagccctttagaaagaacaatccagaaatggtgatctgccaatatatggatgatttgtatgtagcatctgatttagaaa

SEQ ID NO: 89918 - DNA, 80 bp, synthetic construct
  source 1..80: mol_type = other DNA
ggggccaaagcactaacagacatagtaccactgactgcagaagcagaattggagttggcagagaacagggaaattctaaa

SEQ ID NO: 89919 - DNA, 80 bp, synthetic construct
  source 1..80: mol_type = other DNA
gccataaagaaaaaggacagcactaaatggaggaagttagttgattttagagaactcaataaaagaactcaagacttctg

SEQ ID NO: 89920 - DNA, 80 bp, synthetic construct
  source 1..80: mol_type = other DNA
ggaagttcaattaggaataccacatccagcagggttaaaaaagagcaaatcagcaacagtactggatgtgggggatgcat

SEQ ID NO: 89921 - DNA, 80 bp, synthetic construct
  source 1..80: mol_type = other DNA
agaaccatttaggacacagaacccagaaatagttatctaccaatacgtggatgacttgtacgtgggatctgacttagaaa

SEQ ID NO: 89922 - DNA, 80 bp, synthetic construct
  source 1..80: mol_type = other DNA
cctcaaatcactctttggcaacgacccattgtcagagtagaagtagaggggcagcagaaagaagctctattagatacagg

SEQ ID NO: 89923 - DNA, 80 bp, synthetic construct
  source 1..80: mol_type = other DNA
tagggcagcatagagaaaaggtagaggaattaaggaagcatctattgagctgggggctcaccacaccagataaaaaacat

SEQ ID NO: 89924 - DNA, 80 bp, synthetic construct
  source 1..80: mol_type = other DNA
caaaaggaacatccattcctctggatgggatatgaactacatcctgacaaatggacggtacaacctatacagctgccaga

SEQ ID NO: 89925 - DNA, 80 bp, synthetic construct
  source 1..80: mol_type = other DNA
aggtaaagcaattgtgtaaactccttaggggggccaaagcactaacagacatagtaccactgactgcagaagcagaattg

SEQ ID NO: 89926 - DNA, 80 bp, synthetic construct
  source 1..80: mol_type = other DNA
aagtaaaacaattatgtaaactccttagagggacaaaagcactaacagacatagtaccactgactacagaggcagaattg

SEQ ID NO: 89927 - DNA, 80 bp, synthetic construct
  source 1..80: mol_type = other DNA
agcagatgacacagtattagaaaaaatagatttaccagggaaatggaagccaagaatgatagggggaattggagggttta

SEQ ID NO: 89928 - DNA, 80 bp, synthetic construct
  source 1..80: mol_type = other DNA
atttttcggtccctttagataaagattttagaaagtatactgccttcactatacctggtacaaataatgagacaccaggg

SEQ ID NO: 89929 - DNA, 80 bp, synthetic construct
  source 1..80: mol_type = other DNA
agagccctttagagcaaaaaatccagacataattatctatcaatacgtggatgacctatatgtaggatctggcttagaaa

SEQ ID NO: 89930 - DNA, 80 bp, synthetic construct
  source 1..80: mol_type = other DNA
tcaaagtaagacagtatgaaaacataactttagagattgagggaaaaagggctataggtacagtattaacaggacctacg

SEQ ID NO: 89931 - DNA, 80 bp, synthetic construct
  source 1..80: mol_type = other DNA
ataagatatcagtacaacgtgctaccacagggatggaaaggatcaccggctatatttcaggctagcatgacaaaaatttt

SEQ ID NO: 89932 - DNA, 80 bp, synthetic construct
  source 1..80: mol_type = other DNA
caaggaagactggactgtcaatgatatacaaaagttagtgggaaaactaaattgggcaagtcagatctatccagggatca

SEQ ID NO: 89933 - DNA, 80 bp, synthetic construct
  source 1..80: mol_type = other DNA
aagtaaagcaattatgtaaactcattagggggactaaagcactgacagaagtagtaccattgacagaagaagcagaatta

SEQ ID NO: 89934 - DNA, 80 bp, synthetic construct
  source 1..80: mol_type = other DNA
gaactggcagaaaaccgggaaattctaaaagaaacagtacatggagtatattatgacccatcaaaagatttaatagcaga

SEQ ID NO: 89935 - DNA, 80 bp, synthetic construct
  source 1..80: mol_type = other DNA
tcaaagtaagacagtatgatcaaatagccatagaaatttgtggatacaaagctaccggtacagtattagtaggacctaca

SEQ ID NO: 89936 - DNA, 80 bp, synthetic construct
  source 1..80: mol_type = other DNA
cctgttaacataattggaagaaatttgttgacccagattggctgcactttaaattttccaattagtcctatagagactgt

SEQ ID NO: 89937 - DNA, 80 bp, synthetic construct
  source 1..80: mol_type = other DNA
ggaaattcaattagggataccacaccctgcagggctggaaaagaaaaaatcagtaacagtactggatgtgggtgatgcat

SEQ ID NO: 89938 - DNA, 80 bp, synthetic construct
  source 1..80: mol_type = other DNA
cagaaagagccgccattccgttggatgggttatgaactccatcctgataaatggacagtacagcatatagaactgccaga

SEQ ID NO: 89939 - DNA, 80 bp, synthetic construct
  source 1..80: mol_type = other DNA
agattataaaaaaccctgtgcatggagtatattatgacccatcaaaagacttaatagcagaaatacagaaacaagggcag

SEQ ID NO: 89940 - DNA, 80 bp, synthetic construct
  source 1..80: mol_type = other DNA
gccataaagaaaaaggatggtaataaatggagaaaactagtagatttcagagagctcaataaaagaactcaagatttctg

SEQ ID NO: 89941 - DNA, 80 bp, synthetic construct
  source 1..80: mol_type = other DNA
cctgtcaacataattggaaggaacatgttgactcaggttggatgtactttaaatttcccaattagtccgattgatactgt

SEQ ID NO: 89942 - DNA, 80 bp, synthetic construct
  source 1..80: mol_type = other DNA
atttttcagtccctttagatgaaagcttcaggaagtatacagcatttactatacctagtataaacaatgagacaccaggg

SEQ ID NO: 89943 - DNA, 80 bp, synthetic construct
  source 1..80: mol_type = other DNA
aagtaaagcaactatgtagactccttagggggaccaaagcactaacagaaatagtgacactgactgcagaggcagagttg

SEQ ID NO: 89944 - DNA, 80 bp, synthetic construct
  source 1..80: mol_type = other DNA
agaaccatttagaacacaaaacccagaaatagttatctgtcaatacgtagatgacttgtatgttgcatctgacttagaga

SEQ ID NO: 89945 - DNA, 80 bp, synthetic construct
  source 1..80: mol_type = other DNA
tcaaggtaagacagtatgatcaggtacttatagaaatttgtgggaaaaaagctataggttcagtattggtaggacctaca

SEQ ID NO: 89946 - DNA, 80 bp, synthetic construct
  source 1..80: mol_type = other DNA
agagccctttagatcacagaatccagaaatagttatctgtcaatacgtggatgacctgtatgtgggatctgatttagaaa

SEQ ID NO: 89947 - DNA, 80 bp, synthetic construct
  source 1..80: mol_type = other DNA
accagtaaaattaaagccagggatggatggcccaaaagttaaacaatggccgttgtcaaaagaaaaaataaaagcattaa

SEQ ID NO: 89948 - DNA, 80 bp, synthetic construct
  source 1..80: mol_type = other DNA
cctgtcaacataattggaagaaacctgttgactcagattggctgtactttaaattttccaatcagtcctgttgacactat

SEQ ID NO: 89949 - DNA, 80 bp, synthetic construct
  source 1..80: mol_type = other DNA
cagaaagaacccccatttctctggatggggtatgaactccatcctgacaaatggacagtccagcatatacagctgccagt

SEQ ID NO: 89950 - DNA, 80 bp, synthetic construct
  source 1..80: mol_type = other DNA
taggaaagcacagagaaaaagtagaagacttaaggaagcatctgttgaggtgggggctcaccacaccagataaaaaacat

SEQ ID NO: 89951 - DNA, 80 bp, synthetic construct
  source 1..80: mol_type = other DNA
cctcaaatcactctttggcaacgacccgtcgtcccagtaaagatagcggggcagctgaaggaagctctattagatacagg

SEQ ID NO: 89952 - DNA, 80 bp, synthetic construct
  source 1..80: mol_type = other DNA
cctcaaatcactctttggcaacgacccattgtcgcagtaagagtggcagggcagctgaaggaagctctattagatacagg

SEQ ID NO: 89953 - DNA, 80 bp, synthetic construct
  source 1..80: mol_type = other DNA
atcaggtatcagtacaacgtgctcccacagggatggaaaggatcaccagcaatattccagagtagcatgacaagaatttt

SEQ ID NO: 89954 - DNA, 80 bp, synthetic construct
  source 1..80: mol_type = other DNA
tcaaagtaagacaatatgagcaagtaagtatagacatctgtggaaaaagggctataggtacagtgttagtaggacctaca

SEQ ID NO: 89955 - DNA, 80 bp, synthetic construct
  source 1..80: mol_type = other DNA
cctcaaatcactctttggcagcgaccccttgttacagtaaaaatagagggacagttaagggaagctctactagacacagg

SEQ ID NO: 89956 - DNA, 80 bp, synthetic construct
  source 1..80: mol_type = other DNA
cagaaatttgcaatgatatggaaaaggagggaaagatttcaaaaatagggcctgaaaatccatacaatactccaatattt

SEQ ID NO: 89957 - DNA, 80 bp, synthetic construct
  source 1..80: mol_type = other DNA
tcaaagtacgacaatatgatcaaatacctataaagatttgtggaaaagaggctataggtacagtattagtaggacctaca

SEQ ID NO: 89958 - DNA, 80 bp, synthetic construct
  source 1..80: mol_type = other DNA
agagccctttagagcagagaatccagagatagtgatctaccaatatatggatgatttatatgtaggatctgacttggaga

SEQ ID NO: 89959 - DNA, 80 bp, synthetic construct
  source 1..80: mol_type = other DNA
ttaaggtaaaacaatatgatcaaataaccatagaaatctgtggacacaaggctgtaggtacagtattagtaggacctaca

SEQ ID NO: 89960 - DNA, 80 bp, synthetic construct
  source 1..80: mol_type = other DNA
aagtaaagcaattatgcaaactccttaggggagccaaggcactaacagacatagtgccacagactgtagaagcagagtta

SEQ ID NO: 89961 - DNA, 80 bp, synthetic construct
  source 1..80: mol_type = other DNA
ggaagctcaattaggaataccccatccagcagggttaagaaagaaaaaatcagtaacagtacttgatgtgggggacgcat

SEQ ID NO: 89962 - DNA, 80 bp, synthetic construct
  source 1..80: mol_type = other DNA
agagccatttagagcacaaaacccagaagtgattatttatcaatacgtggatgacttgtatgtggcatctgacttagaaa

SEQ ID NO: 89963 - DNA, 80 bp, synthetic construct
  source 1..80: mol_type = other DNA
ggacaaaacaactatgtagactccttagggggacaaaagcacttacagacatagtaacactgactgcagaagcagaatta

SEQ ID NO: 89964 - DNA, 80 bp, synthetic construct
  source 1..80: mol_type = other DNA
taggacagcatagagaaaaagtagaagaattaaggaagcatttattgaggtggggattcaccacaccagataaaaagcat

SEQ ID NO: 89965 - DNA, 80 bp, synthetic construct
  source 1..80: mol_type = other DNA
cctcaaatcactctttggcaacgaccccttgttacaataaaaatagcagggcagctgaaggaagctctgttagatacagg

SEQ ID NO: 89966 - DNA, 80 bp, synthetic construct
  source 1..80: mol_type = other DNA
tcaaagtaagacaatatgaggaaatactcatagaaattgaagggaaaaaggctataggtacagtgttagtaggacccaca

SEQ ID NO: 89967 - DNA, 80 bp, synthetic construct
  source 1..80: mol_type = other DNA
agaaccttttagaacacaaaacccagaattagttatctatcaatacatggatgacttatatgtgggatctgacttagaaa

SEQ ID NO: 89968 - DNA, 80 bp, synthetic construct
  source 1..80: mol_type = other DNA
aagtaaaacaactgtgtaaacttcttagggggacaaaagcactaacagatgtagtaacactgactgcagaggcagaattg

SEQ ID NO: 89969 - DNA, 80 bp, synthetic construct
  source 1..80: mol_type = other DNA
agcagatgatacagtattagaagacatagatttgccaggaagatggaaaccaaaagtgatagggggaatcggaggtttta

SEQ ID NO: 89970 - DNA, 80 bp, synthetic construct
  source 1..80: mol_type = other DNA
cagaaggaacctccatttctctggatgggatatgaacttcatcctgacaaatggacagtccagcccatagagctgccaga

SEQ ID NO: 89971 - DNA, 80 bp, synthetic construct
  source 1..80: mol_type = other DNA
agagccctttaggtcacagaatccagaactagttatcgttcaatacgtggatgatttatatgtaggatctgatttagaaa

SEQ ID NO: 89972 - DNA, 80 bp, synthetic construct
  source 1..80: mol_type = other DNA
tagggcaacatagagcaaaaatagaggaattaagagatcacctattaaaatggggatttaccacaccagacaaaaagtat

SEQ ID NO: 89973 - DNA, 80 bp, synthetic construct
  source 1..80: mol_type = other DNA
caaagattgttggactgtcaatgatatacaaaaattagtgggaaaactaaattgggcaagtcagatttatccagggatta

SEQ ID NO: 89974 - DNA, 80 bp, synthetic construct
  source 1..80: mol_type = other DNA
gagctggaggagaacaaggaaatcctaaaagaaccagtacatggagtatattatgacccatcaaaagacttaatagcaga

SEQ ID NO: 89975 - DNA, 80 bp, synthetic construct
  source 1..80: mol_type = other DNA
caggacagcatagagaaaaggtagaagacttgaggaagcatctattgaggtggggactgaccacaccagataaaaaacat

SEQ ID NO: 89976 - DNA, 80 bp, synthetic construct
  source 1..80: mol_type = other DNA
aaaacccagagatagtgatctgccaatacgtggatgatttatatgtaggatctgatttagagatagggcagcatagagca

SEQ ID NO: 89977 - DNA, 80 bp, synthetic construct
  source 1..80: mol_type = other DNA
aaaatagaggagttgagaaatcatctactgaaatggggatttaccacaccagacaaaaaatatcagaaggaacccccatt

SEQ ID NO: 89978 - DNA, 80 bp, synthetic construct
  source 1..80: mol_type = other DNA
atggaaaaggaaggaaaaatttcaagaattgggcctgaaaatccatacaatactccaatctttgccataaagaagaaaga

SEQ ID NO: 89979 - DNA, 80 bp, synthetic construct
  source 1..80: mol_type = other DNA
gatgtgggggatgcatatttttcagtccctttagatgtagattttaggaagtatactgccttcactatacctagtattaa

SEQ ID NO: 89980 - DNA, 80 bp, synthetic construct
  source 1..80: mol_type = other DNA
tcatagaaatttgtggaaaaaaggctataggtacagtattagtaggacctacacctgccaacataattggcagaaacatg

SEQ ID NO: 89981 - DNA, 80 bp, synthetic construct
  source 1..80: mol_type = other DNA
caatactccaatatttgccataaagaaaaaggatagcaataaatggaggaaactagtagacttcagagaactcaataaaa

SEQ ID NO: 89982 - DNA, 80 bp, synthetic construct
  source 1..80: mol_type = other DNA
gggtctgacttagaaataggacagcatagagcaaaaatagaagagttaagagctcatctgctgagctggggattaactac

SEQ ID NO: 89983 - DNA, 80 bp, synthetic construct
  source 1..80: mol_type = other DNA
caatgcaacaccagggattagatatcagtacaatgtgcttccacagggatggaagggatcaccagcaatattccaaagca

SEQ ID NO: 89984 - DNA, 80 bp, synthetic construct
  source 1..80: mol_type = other DNA
caatgagactccagggatcagatatcagtacaatgtgcttccacagggatggaaaggatcaccagcaatattccaagcta

SEQ ID NO: 89985 - DNA, 80 bp, synthetic construct
  source 1..80: mol_type = other DNA
ggatctgacttagaaatagaacaacatagagcaaaaatagaggaactgagacagcatctgttgagatgggggtttaccac

SEQ ID NO: 89986 - DNA, 80 bp, synthetic construct
  source 1..80: mol_type = other DNA
gcatgacaaaaatcttagagcccttcaggacaaaaaatccagaagtaatcatctatcaatacatggatgacctatatgta

SEQ ID NO: 89987 - DNA, 80 bp, synthetic construct
  source 1..80: mol_type = other DNA
cttgtctcaataaaagtagggggtcaggtaaaagaggctctcttagatacaggagcagatgatacagtattagaagaaat

SEQ ID NO: 89988 - DNA, 80 bp, synthetic construct
  source 1..80: mol_type = other DNA
ggatctgacttagaaatagggcaacacagagcaaaagtagaggagttaagagaacatctattaaagtggggactcaccac

SEQ ID NO: 89989 - DNA, 80 bp, synthetic construct
  source 1..80: mol_type = other DNA
gcatgacaaaaatcttagagcctttcagaaacaaaaacccagacctagttatctatcagtacatggatgacttgtatgta

SEQ ID NO: 89990 - DNA, 80 bp, synthetic construct
  source 1..80: mol_type = other DNA
ggatctgacttagaaatagagaagcacagatcaaaaatagaggaactgagacaacatctgttgaagtgggggtttaccac

SEQ ID NO: 89991 - DNA, 80 bp, synthetic construct
  source 1..80: mol_type = other DNA
gatgtgggagatgcatatttttcagttcctttagacgaaggcttcaggaaatacactgcatttaccatacctagtataaa

SEQ ID NO: 89992 - DNA, 80 bp, synthetic construct
  source 1..80: mol_type = other DNA
gcatgacaaaaatcttagagccctttagagcacaaaatccagaaatggtcatctatcaatatatggatgacttatatgta

SEQ ID NO: 89993 - DNA, 80 bp, synthetic construct
  source 1..80: mol_type = other DNA
cttgtcacaataaaagtagggggccaaacaacagaggctctgttagacacaggagcagatgatacagtattagaagaaat

SEQ ID NO: 89994 - DNA, 80 bp, synthetic construct
  source 1..80: mol_type = other DNA
tcatagagatctgcggacataaagctataggtacagtattaataggacctacacctgtcaacataattggaagaaacttg

SEQ ID NO: 89995 - DNA, 80 bp, synthetic construct
  source 1..80: mol_type = other DNA
ctgacccagcttgggtgcactttaaatttcgaaatggaaaaggaaggaaaaatttcaaaaattgggcctgaaaatcccta

SEQ ID NO: 89996 - DNA, 80 bp, synthetic construct
  source 1..80: mol_type = other DNA
gatgtgggtgatgcatttttttcagttcccttagatgaagacttcagaaagtatactgcatttaccatacccagtagaaa

SEQ ID NO: 89997 - DNA, 80 bp, synthetic construct
  source 1..80: mol_type = other DNA
ggatctgacctagaaatagggcaacatagagcaaaaatagaagaactgagacaacatctgttgaagtgggggttttgcac

SEQ ID NO: 89998 - DNA, 80 bp, synthetic construct
  source 1..80: mol_type = other DNA
ggatttgtcaggaaaatggaaaccaaaaatgatagggggaattggaggttttatcaaagtaagacagtatgagcaagtac

SEQ ID NO: 89999 - DNA, 80 bp, synthetic construct
  source 1..80: mol_type = other DNA
ccatagaaatctgtgggcataaaactatgggtacagtgttaataggacctacaccggtcaacataattggaagaaatctg

SEQ ID NO: 90000 - DNA, 80 bp, synthetic construct
  source 1..80: mol_type = other DNA
tacgacaacatctgttgaagtgggggttctacacaccagacaaaaaatatcagaaagaacctccatttctttggctgggg

SEQ ID NO: 90001 - DNA, 80 bp, synthetic construct
  source 1..80: mol_type = other DNA
ggatctgacttagaaatcggacagcatagaacaaaaatagaggaactacgacaacatctgttgaagtgggggttctacac

SEQ ID NO: 90002 - DNA, 80 bp, synthetic construct
  source 1..80: mol_type = other DNA
gaactcaagacttctgtgaagttcagttaggaataccacatcctgcagggttaaaaaagaacaagtcagtgacagtactg

SEQ ID NO: 90003 - DNA, 80 bp, synthetic construct
  source 1..80: mol_type = other DNA
gcatgacaaagatcttagagccttttagaaaacaaaatccaggaataattatctatcaatacgtggatgatttgtatgta

SEQ ID NO: 90004 - DNA, 80 bp, synthetic construct
  source 1..80: mol_type = other DNA
gcatgacaaaaatcttagagccctttagaaaacaaaacccagagatagttatctaccaatacgtggatgatttgcatgta

SEQ ID NO: 90005 - DNA, 80 bp, synthetic construct
  source 1..80: mol_type = other DNA
gtgtagaaatctgtggccataaagctataggtacagtattagtaggacctacacctgtcaacataatcggaagaaacctg

SEQ ID NO: 90006 - DNA, 80 bp, synthetic construct
  source 1..80: mol_type = other DNA
aaactcaagacttttgggaagttcaattagggatgccacatcccgcagggttaaaaaagagcaaatcagtgacagtactg

SEQ ID NO: 90007 - DNA, 80 bp, synthetic construct
  source 1..80: mol_type = other DNA
gcatctgatttagaaacagggcaacatagaacaaaaatagaggaactgaggcaacatctgttgaagtgggggtttaccac

SEQ ID NO: 90008 - DNA, 80 bp, synthetic construct
  source 1..80: mol_type = other DNA
gagtttatcagggagatggaaaccaaaaatgatagggggaattggaggctttatcaaagtaagacaatatgatcaggtat

SEQ ID NO: 90009 - DNA, 80 bp, synthetic construct
  source 1..80: mol_type = other DNA
aaagttgccaggaaattggaaaccaaaaatgataggaggaattggaggttttatcaaagtaagacagtatgagcagatac

SEQ ID NO: 90010 - DNA, 80 bp, synthetic construct
  source 1..80: mol_type = other DNA
caataccccaatatttgctataaagaaaaaggacagtactaaatggaggaagttagtagatttcagagagctcaataaaa

SEQ ID NO: 90011 - DNA, 80 bp, synthetic construct
  source 1..80: mol_type = other DNA
ggatcagatttagaaatagggctgcatagagcaaaaatagaagagttgagagctcatctattgagctggggatttactac

SEQ ID NO: 90012 - DNA, 80 bp, synthetic construct
  source 1..80: mol_type = other DNA
cttgtctcaataaaagtaggagggcaaataaaagaagctcttttagacacaggagcagatgatactgtattagaagaaat

SEQ ID NO: 90013 - DNA, 80 bp, synthetic construct
  source 1..80: mol_type = other DNA
ccatagaaatctgtgaacataaagttataggtacagtattagtaggacctacacctgtcaatataattggaagaaatctg

SEQ ID NO: 90014 - DNA, 80 bp, synthetic construct
  source 1..80: mol_type = other DNA
ttgactcagcttggttgcactttaaattttgaaatggagaaagacggaaaaatttcaaaaattgggcccgaaaacccata

SEQ ID NO: 90015 - DNA, 80 bp, synthetic construct
  source 1..80: mol_type = other DNA
caatactccagtatttgccataaagaggaaagatggtactaaatggagaaaattagtagattttagagaacttaataaaa

SEQ ID NO: 90016 - DNA, 80 bp, synthetic construct
  source 1..80: mol_type = other DNA
gaacgcaagacttctgggaaattcaattaggaataccacatcccgcagggataaggaagaacaaatcagtaacagtactg

SEQ ID NO: 90017 - DNA, 80 bp, synthetic construct
  source 1..80: mol_type = other DNA
gatgtgggtgatgcatatttttcagttcccttagataaggaatttaggaagtatactgcatttaccatacctagtataaa

SEQ ID NO: 90018 - DNA, 80 bp, synthetic construct
  source 1..80: mol_type = other DNA
tgagacagcatctgttaaggtggggatttgacacaccagacaaaaaacatcagaaagaacctccattcctttggatgggk

SEQ ID NO: 90019 - DNA, 80 bp, synthetic construct
  source 1..80: mol_type = other DNA
ggatctgacttagaaataggacagcatagagaaaaaatagaagaactgagacagcatctgttaaggtggggatttgacac

SEQ ID NO: 90020 - DNA, 80 bp, synthetic construct
  source 1..80: mol_type = other DNA
gtcgtcacagtaagaatagggggacaactaatggaagctctattagatacaggagcagatgatacaatatttgaagaaat

SEQ ID NO: 90021 - DNA, 80 bp, synthetic construct
  source 1..80: mol_type = other DNA
atcgtcacagtaaggataggaggacaactaaaagaagctctattagatacaggagcagatgatacagtactagaagaaat

SEQ ID NO: 90022 - DNA, 80 bp, synthetic construct
  source 1..80: mol_type = other DNA
taatactccagtatttgccataaagaaaaaggacagttctaaatggagaaaagtagtagacttcagagaacttaataaaa

SEQ ID NO: 90023 - DNA, 80 bp, synthetic construct
  source 1..80: mol_type = other DNA
ggactcaagacttctgggaagttcagttaggaataccacatccagcagggctagaaaagaagaaatcagtaacagtactg

SEQ ID NO: 90024 - DNA, 80 bp, synthetic construct
  source 1..80: mol_type = other DNA
gcatgacaagaattttagagccttttagacaacaaaatccagacatagtcatctatcaatacgtggatgatttgtatgta

SEQ ID NO: 90025 - DNA, 80 bp, synthetic construct
  source 1..80: mol_type = other DNA
cttgtcacaataaaaataggggggcaactaaaggaagccctattagatacaggagcagatgatacagtattagaagaaat

SEQ ID NO: 90026 - DNA, 80 bp, synthetic construct
  source 1..80: mol_type = other DNA
agttctgacttagaaatagagcagcatagaacaaaaatagaagaactgagacaacatctgtcgaggtggggattttccac

SEQ ID NO: 90027 - DNA, 80 bp, synthetic construct
  source 1..80: mol_type = other DNA
cggggatcctaggcatttggattgcgcatttgaagcgaaattcctgttcaggaggccttatcttttgaaatggagcaaat

SEQ ID NO: 90028 - DNA, 80 bp, synthetic construct
  source 1..80: mol_type = other DNA
gtataccgtattgcaactacagtaagtattggtatctcaatcacacctcatcagggagaacatcgttgcctaaatgctgg

SEQ ID NO: 90029 - DNA, 80 bp, synthetic construct
  source 1..80: mol_type = other DNA
cttgtttccaatggaagttatctgaatgagacccacttctcagatgatattgaacaacaggcagacaacatgataactga

SEQ ID NO: 90030 - DNA, 80 bp, synthetic construct
  source 1..80: mol_type = other DNA
tttaccttataagtatattcttacacttgataaagatacctactcataggcacatagttggaaagccatgccccaagcca

SEQ ID NO: 90031 - DNA, 80 bp, synthetic construct
  source 1..80: mol_type = other DNA
tcctgaaaggggtctacaatgtggcaacatgtgggataattgggcttgtgaccttcctctttctctgtggaagatcttgt

SEQ ID NO: 90032 - DNA, 80 bp, synthetic construct
  source 1..80: mol_type = other DNA
gcatgtgacacagatctttgtattgatcccatacagcattctcaaactttcttgagtcaattttattgagagaaacatca

SEQ ID NO: 90033 - DNA, 80 bp, synthetic construct
  source 1..80: mol_type = other DNA
atgagtttaatgtcccttctcccctgtgaatccaacaattttttgatgtcgtctgatccctgacaggtcagcaccatatt

SEQ ID NO: 90034 - DNA, 80 bp, synthetic construct
  source 1..80: mol_type = other DNA
cctgggaagtgcctcaatgacagcactggtcaaacctggctgagcagcaaacaaatcggtgacatctatcccatgtgagt

SEQ ID NO: 90035 - DNA, 80 bp, synthetic construct
  source 1..80: mol_type = other DNA
catcttgtttaaattgcttcaggtctgttggttctctaaagaagtgtatgtagcaacctgagataggctgaaacaaggcg

SEQ ID NO: 90036 - DNA, 80 bp, synthetic construct
  source 1..80: mol_type = other DNA
gagggtcatgagctgagagtatgtcagtccaggggcaaagcctgcagattgcaatgatttgttagatccattgctcccaa

SEQ ID NO: 90037 - DNA, 80 bp, synthetic construct
  source 1..80: mol_type = other DNA
atgtaaggccacccgtctcctgaaagacagattttataaagaatgttttcataaggattcctttctccaggtgtatcaga

SEQ ID NO: 90038 - DNA, 80 bp, synthetic construct
  source 1..80: mol_type = other DNA
tcactgatctacaaaggcagttatgagctgcaaacattggagttaaatatggagaccctaaacatgaccatgcctctgtc

SEQ ID NO: 90039 - DNA, 80 bp, synthetic construct
  source 1..80: mol_type = other DNA
aataaacatcccaagactcctcttcacctttaaaatggatttcaaaatcccatccatggtttggggagtgaccttgattg

SEQ ID NO: 90040 - DNA, 80 bp, synthetic construct
  source 1..80: mol_type = other DNA
tctccagcatgttgcccccatcaagcatgcatgccccagtcttgattgcggcccctaaactaaaattgtagccagagatg

SEQ ID NO: 90041 - DNA, 80 bp, synthetic construct
  source 1..80: mol_type = other DNA
ccgaactcatctgacctagacagactttcacaaagccatccaatcctgaacatgatcgataccaagaagagctcattgaa

SEQ ID NO: 90042 - DNA, 80 bp, synthetic construct
  source 1..80: mol_type = other DNA
acaccatctcctttgggttggctgttctggttcccaccactcatccctatcatgctcaggagggctctcctctggtcaag

SEQ ID NO: 90043 - DNA, 80 bp, synthetic construct
  source 1..80: mol_type = other DNA
ttgctgagagctgaggtttcccatataaactcctgaactcaaaggtctttcagtcctagttactttagactttagttttt

SEQ ID NO: 90044 - DNA, 80 bp, synthetic construct
  source 1..80: mol_type = other DNA
ctaggtcagcagcaagtgttagtaagtcatcagaggtcagggtgccaactctcaatatacttttttgttgaactgatttt

SEQ ID NO: 90045 - DNA, 80 bp, synthetic construct
  source 1..80: mol_type = other DNA
tgattcaggtctctgagcctcttgaggtcaccatcatccctcttctgttttcgcatcagcctctgaacattgctcacttc

SEQ ID NO: 90046 - DNA, 80 bp, synthetic construct
  source 1..80: mol_type = other DNA
agagaaatcaagcccatgtaataaggcctgagcatccttgaccacctggagtttgatgttagagcagtaacctgacagct

SEQ ID NO: 90047 - DNA, 80 bp, synthetic construct
  source 1..80: mol_type = other DNA
atgcactaaaaatagtagccaccattatattcgagttgggaacgagactggcttagagctgacattgaccaacaccagca

SEQ ID NO: 90048 - DNA, 80 bp, synthetic construct
  source 1..80: mol_type = other DNA
ctctcctcagagactgagtccagagaaaagacttcacctctttagagttactcatcttgctccaaacaggacactagtgt

SEQ ID NO: 90049 - DNA, 80 bp, synthetic construct
  source 1..80: mol_type = other DNA
gtgataactatcaacacagggctgtcactacaccaaaaaagtgttgtaagcgcaacctttaagcctaggatccactgtgc

SEQ ID NO: 90050 - DNA, 80 bp, synthetic construct
  source 1..80: mol_type = other DNA
ttataaatcacaaattctgtaacctgtcagatgctcacaaacgtaatctgtatgaccacgcactcatgagcatcctttcc

SEQ ID NO: 90051 - DNA, 80 bp, synthetic construct
  source 1..80: mol_type = other DNA
accagtatgaggcgatgagttgtgacttcaatggaggcaaaatcagtgtgcaatataatctcagccatgcttatgcagtt

SEQ ID NO: 90052 - DNA, 80 bp, synthetic construct
  source 1..80: mol_type = other DNA
gatgctgccgaacactgcggaacagttgcaaatggtgtgctacaaacattcatgaggatggcttggggaggaagttacat

SEQ ID NO: 90053 - DNA, 80 bp, synthetic construct
  source 1..80: mol_type = other DNA
tgcacttgactctgggagaggcaattgggactgtattatgacaagctaccaatacttaatcattcagaatacaacatggg

SEQ ID NO: 90054 - DNA, 80 bp, synthetic construct
  source 1..80: mol_type = other DNA
aataaccttcttccaggaggttcctcatgttatagaggaggtgatgaacattgttctgatagcactctcactcctagcta

SEQ ID NO: 90055 - DNA, 80 bp, synthetic construct
  source 1..80: mol_type = other DNA
tcagtaggaggctgctgggtacattcacctggacactttctgactcagagggaaatgagacaccaggcggatactgttta

SEQ ID NO: 90056 - DNA, 80 bp, synthetic construct
  source 1..80: mol_type = other DNA
ataaggtgggaaactttactgggctttactcctctacagtacctatctttaatcctgaatggcaaactccttcctttcct

SEQ ID NO: 90057 - DNA, 80 bp, synthetic construct
  source 1..80: mol_type = other DNA
aaaacccagagatggtgatctaccaatatatggatgatttgtatgtaggatctgacttagaaatagggcaacatagagca

SEQ ID NO: 90058 - DNA, 80 bp, synthetic construct
  source 1..80: mol_type = other DNA
tggcgataaatggagaaaactagtagatttcagagagctcaataaaagaactcaggatttttgggaaattcaattaggaa

SEQ ID NO: 90059 - DNA, 80 bp, synthetic construct
  source 1..80: mol_type = other DNA
catgaagactttagaaagtatactgcattcaccatacctagcatgaacaatgagacaccaggagtcagatatcagtacaa

SEQ ID NO: 90060 - DNA, 80 bp, synthetic construct
  source 1..80: mol_type = other DNA
aaaacccagaattagttatctgtcaatacatggatgacttgtatgtagcatctgatttagaaatagggcaacatagggca

SEQ ID NO: 90061 - DNA, 80 bp, synthetic construct
  source 1..80: mol_type = other DNA
aaaatagaaaagctaagagctcatttattgagctggggattaactacaccagacggaaagcatcagaaagaacctccatt

SEQ ID NO: 90062 - DNA, 80 bp, synthetic construct
  source 1..80: mol_type = other DNA
aaactccttaggggagctaaagcactaacagacatagtcccactgactaaggaagcagaattagaattggaagaaaacag

SEQ ID NO: 90063 - DNA, 80 bp, synthetic construct
  source 1..80: mol_type = other DNA
gatgagaacttcaggaagtatactgcattcactatacctagtataaacaatgagtcaccagggattagatatcagtacaa

SEQ ID NO: 90064 - DNA, 80 bp, synthetic construct
  source 1..80: mol_type = other DNA
cgtgctaccacagggatggaaaggatcaccggctatattccagagtagcatgacaaaaattttagagccatttagaacaa

SEQ ID NO: 90065 - DNA, 80 bp, synthetic construct
  source 1..80: mol_type = other DNA
aaggtagaagaattaagggaacatctattgaggtggggattaaccacaccagatcaaaaacatcagaaagaacctccatt

SEQ ID NO: 90066 - DNA, 80 bp, synthetic construct
  source 1..80: mol_type = other DNA
tcaatgatatacaaaaactagtgggaaaactaaattgggcaagtcagatctatgcagggattcaagtaagacaactatgt

SEQ ID NO: 90067 - DNA, 80 bp, synthetic construct
  source 1..80: mol_type = other DNA
aaactccttagggggacaaaagcactaacagatatagtaacactgactgcagaagcagaatcggaattggcagagaacag

SEQ ID NO: 90068 - DNA, 80 bp, synthetic construct
  source 1..80: mol_type = other DNA
aaaataaaggaattaagggaacatctattgaagtggggatttaccacaccagacaacaagcatcaaaaggaacctccata

SEQ ID NO: 90069 - DNA, 80 bp, synthetic construct
  source 1..80: mol_type = other DNA
tcaatgatatacagaagttagtgggaaaattaaattgggcaagccagatttatgcaggaattaaagtaagacaattatgc

SEQ ID NO: 90070 - DNA, 80 bp, synthetic construct
  source 1..80: mol_type = other DNA
aaactgattaggggagccaaggcactgacagaagtagtaccactgacagaagaagcagagttagaactagcagaaaacag

SEQ ID NO: 90071 - DNA, 80 bp, synthetic construct
  source 1..80: mol_type = other DNA
aaaacccagaaatagtcatctatcaatacatggatgacttgtatgtgggctctgacttagaaataggacagcataggaaa

SEQ ID NO: 90072 - DNA, 80 bp, synthetic construct
  source 1..80: mol_type = other DNA
ggaaattctaaaggaacctgtacatggagtctactatgacccagaaaaagaattaatagcagaaatacagaaacaagggg

SEQ ID NO: 90073 - DNA, 80 bp, synthetic construct
  source 1..80: mol_type = other DNA
atggaaaaggaaggaaagatttcaaaaattgggcctgaaaatccatataacactccagtgtttgctataaagaaaaagga

SEQ ID NO: 90074 - DNA, 80 bp, synthetic construct
  source 1..80: mol_type = other DNA
tgtgcttccccagggatggaaaggatcaccagccatattccagtttagcatgcaaaaaattttagagccctttaggtcaa

SEQ ID NO: 90075 - DNA, 80 bp, synthetic construct
  source 1..80: mol_type = other DNA
agaacccagaaatagttatctatcaatatgtggatgatttgtatgtaggatctgatttagaaatagagcagcatagaaca

SEQ ID NO: 90076 - DNA, 80 bp, synthetic construct
  source 1..80: mol_type = other DNA
aaaatagaggaactgagagctcatctattgaggtggggattcactacaccagacaaaaagcatcagaaagagcctccatt

SEQ ID NO: 90077 - DNA, 80 bp, synthetic construct
  source 1..80: mol_type = other DNA
tctctggatgggatatgagctccatcctgacaaatggacggtacaacctatacagctgccagataaggaagattggactg

SEQ ID NO: 90078 - DNA, 80 bp, synthetic construct
  source 1..80: mol_type = other DNA
tcaatgatatacaaaagttagtgggaaaactaaattgggcaagtcagatttatccaaacattaaaacaaggcaaatatgt

SEQ ID NO: 90079 - DNA, 80 bp, synthetic construct
  source 1..80: mol_type = other DNA
tacctcatccctcagggttaaaaaagaagaaatcagtaacagtactggatgtgggggatgcatatttttcagttccccta

SEQ ID NO: 90080 - DNA, 80 bp, synthetic construct
  source 1..80: mol_type = other DNA
taccacatccagcagggttaaaaaagaacaaatcagtaacagtgctggatgtaggggatgcatatttttcagtcccgctg

SEQ ID NO: 90081 - DNA, 80 bp, synthetic construct
  source 1..80: mol_type = other DNA
tgtgctaccacagggatggaaagggtcaccagctatctttcagagtagcatgacaaaaatattagaaccatttagaaaac

SEQ ID NO: 90082 - DNA, 80 bp, synthetic construct
  source 1..80: mol_type = other DNA
aaggtagaggaattgagggagcatctattgaaatgggggcttaccacaccagacaaaaaacatcagaaagaacctccatt

SEQ ID NO: 90083 - DNA, 80 bp, synthetic construct
  source 1..80: mol_type = other DNA
cagctctaagtggagaaagttagtggactttagggaactcaataaaagaactcaagacttctgggaagttcaattaggaa

SEQ ID NO: 90084 - DNA, 80 bp, synthetic construct
  source 1..80: mol_type = other DNA
taccacatccaggagggttagaaaagaaaaaatcagtaacgatactggatgtgggggacgcatatttttcagtccctcta

SEQ ID NO: 90085 - DNA, 80 bp, synthetic construct
  source 1..80: mol_type = other DNA
gatgaaaatttcaggaagtatacagcatttactatacctagtataaacaatgagacaccaggggtaagatatcaatacaa

SEQ ID NO: 90086 - DNA, 80 bp, synthetic construct
  source 1..80: mol_type = other DNA
aaaatccagaaatagttatttgtcaatacgtggatgacttatatgtggcatctgacttagaaataggacagcatagaaaa

SEQ ID NO: 90087 - DNA, 80 bp, synthetic construct
  source 1..80: mol_type = other DNA
aaggtggaagacttaagggagcatctattaaagtggggattcatcacaccagataaaaaatatcagaaagaacctccatt

SEQ ID NO: 90088 - DNA, 80 bp, synthetic construct
  source 1..80: mol_type = other DNA
tgtgttgccacagggatggaaaggatcaccagcaatattccaggctagcatgataaaaatcttagagccctttagagcaa

SEQ ID NO: 90089 - DNA, 80 bp, synthetic construct
  source 1..80: mol_type = other DNA
aaagtagaggagctaagagttcatttgttggcctggggattaactacaccagataaaaagcatcagaaagaacctccatt

SEQ ID NO: 90090 - DNA, 80 bp, synthetic construct
  source 1..80: mol_type = other DNA
gagatgcatatttttcagttcctttatatgaaggctttagaaagtatactgcatttaccatacctagtacaaacaatgaa

SEQ ID NO: 90091 - DNA, 80 bp, synthetic construct
  source 1..80: mol_type = other DNA
atttagaaatagggcagcatagaacaaaaatagaggagctgagagatcatctattgaagtgggggttctttacaccagac

SEQ ID NO: 90092 - DNA, 80 bp, synthetic construct
  source 1..80: mol_type = other DNA
cagggattaaagtaaagcaactgtgtagactcatcaggggagctaaagcactaacagccacagtaacactgactgaggaa

SEQ ID NO: 90093 - DNA, 80 bp, synthetic construct
  source 1..80: mol_type = other DNA
aatatccagaaatagttatctatcaatacatggatgatttgtatgtaggatctgatttggaaatagggctacacagagaa

SEQ ID NO: 90094 - DNA, 80 bp, synthetic construct
  source 1..80: mol_type = other DNA
aaagtagaggagttgagagctcatttgttaaaatggggatttactacaccagataaaaagcatcagaaagaacctccatt

SEQ ID NO: 90095 - DNA, 80 bp, synthetic construct
  source 1..80: mol_type = other DNA
cagcactaaatggagaaaggtagtagatttcagagagctcaataaaagaactcaagacttttgggaagttcaattaggga

SEQ ID NO: 90096 - DNA, 80 bp, synthetic construct
  source 1..80: mol_type = other DNA
gatgaaagctttaggaaatacactgcattcaccatacctagtataaacaatgaaacaccagggattagatatcagtacaa

SEQ ID NO: 90097 - DNA, 80 bp, synthetic construct
  source 1..80: mol_type = other DNA
aaaatcctgaagtagttatttaccagtacatggatgatttgtatgtaggatctgacttagaaataggagaacacagagac

SEQ ID NO: 90098 - DNA, 80 bp, synthetic construct
  source 1..80: mol_type = other DNA
aaaatagaggagttaagggctcatttgttgaagtggggattcaccacaccagacaaaaaacatcagaaagaacccccatt

SEQ ID NO: 90099 - DNA, 80 bp, synthetic construct
  source 1..80: mol_type = other DNA
cagtactaaatggagaaaattagtagattttagagagctaaataaaagaactcaagatttctgggaggtccaattaggga

SEQ ID NO: 90100 - DNA, 80 bp, synthetic construct
  source 1..80: mol_type = other DNA
ataaagaattcaggaagtatactgcatttactatacctagtataaacaatgagacaccagggactagatatcaatacaat

SEQ ID NO: 90101 - DNA, 80 bp, synthetic construct
  source 1..80: mol_type = other DNA
cggcattaaatagagaaaattgatagattttcgagagctcaataaaagaactcaagacttttggaaagttcaattaggaa

SEQ ID NO: 90102 - DNA, 80 bp, synthetic construct
  source 1..80: mol_type = other DNA
tgtgctccccatgggatggaaaggatcaccagcaatatttcaggatagcatgacaaaaatcttaaaaccctttagagcaa

SEQ ID NO: 90103 - DNA, 80 bp, synthetic construct
  source 1..80: mol_type = other DNA
aaaatccagagatagtgatcattcaatatgtggataatttatatgtaggatctgatctagaaatagggcagcatagagca

SEQ ID NO: 90104 - DNA, 80 bp, synthetic construct
  source 1..80: mol_type = other DNA
aaaatagaagagttaagagctcatctcttgagctggggacttactaccccagacaaaaaacatcagaaggaacctccatt

SEQ ID NO: 90105 - DNA, 80 bp, synthetic construct
  source 1..80: mol_type = other DNA
atggaaaaggaaggaaagctttcaagaattgggcctgagaatccatataatactccaatatttgttataaagagaaaaga

SEQ ID NO: 90106 - DNA, 80 bp, synthetic construct
  source 1..80: mol_type = other DNA
ggagatgcatatttttcagttcccttgcatgaaagctttagaaaatatactgcattcaccttacctagcataaacaatga

SEQ ID NO: 90107 - DNA, 80 bp, synthetic construct
  source 1..80: mol_type = other DNA
gcagggattaaagtaaagcaactatgtaaactcctcaagggagctaaaacactaacagacatagtaacactgactgagga

SEQ ID NO: 90108 - DNA, 80 bp, synthetic construct
  source 1..80: mol_type = other DNA
aggacttttgggaagttcagttaggaataccacacccagcaggtttaagaaagaaaaaatcagtaacagtactagatgtg

SEQ ID NO: 90109 - DNA, 80 bp, synthetic construct
  source 1..80: mol_type = other DNA
cggaaatttgtacagagatggaaaaggaaggaaaaatttcaagaatcggacctgaaaatccatacaataccccagtattt

SEQ ID NO: 90110 - DNA, 80 bp, synthetic construct
  source 1..80: mol_type = other DNA
ttatctctaatcactccagaatacgtattagtttccccatcttctagaaaggaaaactcagacccagagacactaagcaa

SEQ ID NO: 90111 - DNA, 80 bp, synthetic construct
  source 1..80: mol_type = other DNA
tcatgaagctacctaactttgatcctcaagttttcccatctatagcatgggactgctggactagaaatctctaagtcccc

SEQ ID NO: 90112 - DNA, 80 bp, synthetic construct
  source 1..80: mol_type = other DNA
agtgattagagataaggtgtagaagtagccaagtgtatggcagctggtacaatggatgccatagtaaaggagttggtgcc

SEQ ID NO: 90113 - DNA, 80 bp, synthetic construct
  source 1..80: mol_type = other DNA
cggccccgagacgggtcgtccgcgggattcgctatcgctggatgtgtctgcggcgttttatcatattcctcttcatcctg

SEQ ID NO: 90114 - DNA, 80 bp, synthetic construct
  source 1..80: mol_type = other DNA
ctgctatgcctcatcttcttgttggttcttctggactatcaaggtatgttgcccgtttgtcctctacttccaggaacaac

SEQ ID NO: 90115 - DNA, 80 bp, synthetic construct
  source 1..80: mol_type = other DNA
taggtagcttcatgaaaagggtataaatgtggaaatccaagactccagttctaactgaggcttaatcacagataacgtgt

SEQ ID NO: 90116 - DNA, 80 bp, synthetic construct
  source 1..80: mol_type = other DNA
aaataactattataatgacacaaacatcacccagataagtaataccaacattcaggtagaggaaagggcaattagagatt

SEQ ID NO: 90117 - DNA, 80 bp, synthetic construct
  source 1..80: mol_type = other DNA
agcagagattacttgcacgtgtagggataattggcaaggctcaaatagaccagtaattcggatagatccagtggcgatga

SEQ ID NO: 90118 - DNA, 80 bp, synthetic construct
  source 1..80: mol_type = other DNA
actgggcaattagaactaaaagtgggggaaacaccaaccagcagaaagcatctgctggacaaataagtgtacaaccaaca

SEQ ID NO: 90119 - DNA, 80 bp, synthetic construct
  source 1..80: mol_type = other DNA
gatactcattggttggggtagacccttttaaactacttcaaaacagtcaaatattcagccttattaggcctaatgaaaat

SEQ ID NO: 90120 - DNA, 80 bp, synthetic construct
  source 1..80: mol_type = other DNA
cgcaccggggatcctaggcgtttagttgcgctgtttggttgcacaactttcttcgtgaggctgtcagaagtggacctggc

SEQ ID NO: 90121 - DNA, 80 bp, synthetic construct
  source 1..80: mol_type = other DNA
acctatcttggccctttaagctgcaaatcttgctggcagaaatttgacagcttggtaagatgccatgaccactacctttg

SEQ ID NO: 90122 - DNA, 80 bp, synthetic construct
  source 1..80: mol_type = other DNA
caggcactgtttaaaccttctgctgtcagtatccgacaggtgtcctctttgtaaatatccattaccaaccagattgaaga

SEQ ID NO: 90123 - DNA, 80 bp, synthetic construct
  source 1..80: mol_type = other DNA
tatcaacagccccaagctctccacctccctacgaagagtaacaccgtccggccccggccccgacaaacagcccagcacaa

SEQ ID NO: 90124 - DNA, 80 bp, synthetic construct
  source 1..80: mol_type = other DNA
cgatgtcctcggccaccgacccgcctagccaatcgtcgcaggacctccccttgagtctaaacctgccccccactgtttca

SEQ ID NO: 90125 - DNA, 80 bp, synthetic construct
  source 1..80: mol_type = other DNA
tacatcaaagtgctcctagatttgctaaaacaaagtctgcaatccttaaaggcgaaccagtctggcaaaagcgacagtgg

SEQ ID NO: 90126 - DNA, 80 bp, synthetic construct
  source 1..80: mol_type = other DNA
aatcagcagaatagatctgtctatacatagttcctggaggattacacttatctctgaacccaacaaatgttcaccagttc

SEQ ID NO: 90127 - DNA, 80 bp, synthetic construct
  source 1..80: mol_type = other DNA
tctctgaacccaacaaatgttcaccagttctgaatcgatgcaggaagaggttcccaaggacatcactaatcttttcatag

SEQ ID NO: 90128 - DNA, 80 bp, synthetic construct
  source 1..80: mol_type = other DNA
tgatagcgatgggtcaaggcaagtccagagaggagaaaggcaccaatagtacaaacagggccgaaatcctaccagatacc

SEQ ID NO: 90129 - DNA, 80 bp, synthetic construct
  source 1..80: mol_type = other DNA
cgcaccgcccccaccacgataccccccccggggagcgaccccccgggagcccggcggagccccacggagatgcccatcag

SEQ ID NO: 90130 - DNA, 80 bp, synthetic construct
  source 1..80: mol_type = other DNA
agcccggcggagccccacggagatgcccatcagtcgatgtcctcggccaccgacccgcctagccaatcgtcgcaggacct

SEQ ID NO: 90131 - DNA, 80 bp, synthetic construct
  source 1..80: mol_type = other DNA
catttggaatagccccaagtgtggcgaactttaaacatataacatatgtatacatatacaatgtttatcgtgttcatggg

SEQ ID NO: 90132 - DNA, 80 bp, synthetic construct
  source 1..80: mol_type = other DNA
tgtacttagtgtgtagtagttcagtagccataaagtgatgtgtgtgtttataattaacactgtattgttgtatgactatg

SEQ ID NO: 90133 - DNA, 80 bp, synthetic construct
  source 1..80: mol_type = other DNA
ggtttaaatagcctaaccagcgtttcaagcatggatctgatcgagactgttaatgcatgcgttggcttgcaaaaaagagt

SEQ ID NO: 90134 - DNA, 80 bp, synthetic construct
  source 1..80: mol_type = other DNA
tcccaaagtacagtatatgatggacacaatatttccagaaacagcattcactaacagacccgtagtcgactggaacgttc

SEQ ID NO: 90135 - DNA, 80 bp, synthetic construct
  source 1..80: mol_type = other DNA
aaagtctattgacttcttcaagtcagaaaacgtggtgccagaaaattgcaatgttgatcgcagcatatgcagccaaaatc

SEQ ID NO: 90136 - DNA, 80 bp, synthetic construct
  source 1..80: mol_type = other DNA
gcagccaaaatctgattctacgctggctccgagacacggagtgcttcgtgaagcgcgaaaaattaagcaataaaaaaccc

SEQ ID NO: 90137 - DNA, 80 bp, synthetic construct
  source 1..80: mol_type = other DNA
ttaacggtagaacgtacgcgctactggatcaaacagcggtatacacaccgtacaccgtcaacgccccaattatttcgctt

SEQ ID NO: 90138 - DNA, 80 bp, synthetic construct
  source 1..80: mol_type = other DNA
gctgtacgcatttcaaccgacgactatgacgacatgcgatccgggattgattcaattctggacatcttagcagccgccat

SEQ ID NO: 90139 - DNA, 80 bp, synthetic construct
  source 1..80: mol_type = other DNA
tagaactgaaggatcaagaccaaccagggtgatagaaagaagggtgattgaaccaaacgttaaacaattggtggaagact

SEQ ID NO: 90140 - DNA, 80 bp, synthetic construct
  source 1..80: mol_type = other DNA
tgaaactgaaaagtctaacatcagaaatatctatagctaatatggcagcagttgatacagccctaattcagcctgagata

SEQ ID NO: 90141 - DNA, 80 bp, synthetic construct
  source 1..80: mol_type = other DNA
attgaaacagaaaatccattgtttgctgacataattgaacaggttattcacagaccaaacgcgagcatgacgggcggtaa

SEQ ID NO: 90142 - DNA, 80 bp, synthetic construct
  source 1..80: mol_type = other DNA
catacgggcaactctgggtagatggtcaggaaacaaaggaattgtcacttgtatgtctggaatggattcagagcacagat

SEQ ID NO: 90143 - DNA, 80 bp, synthetic construct
  source 1..80: mol_type = other DNA
ttactgtagactttaagacgagaacatgtggcatcatcaacgtagtatacgcaccgacagcgggagttatcatgatacca

SEQ ID NO: 90144 - DNA, 80 bp, synthetic construct
  source 1..80: mol_type = other DNA
atgccaactggtagaaacagagagggacacttgatagatgtgtctgctgagatgatggcagaaaatttcgccatagactt

SEQ ID NO: 90145 - DNA, 80 bp, synthetic construct
  source 1..80: mol_type = other DNA
tttgaaattagctccaaacacaaaccttaacacagcgggtcaaagtgtgctcaacgattacaatgcgctagcctcaagag

SEQ ID NO: 90146 - DNA, 80 bp, synthetic construct
  source 1..80: mol_type = other DNA
tcaacccatgggacatgcagaaacataacgacaatctttggacagttaacctggctaactggccgcaggggacttctccg

SEQ ID NO: 90147 - DNA, 80 bp, synthetic construct
  source 1..80: mol_type = other DNA
cgacagccagcaatatcatttctctttgaaacacggcgtacattcaccgaaggggattatcagcacttgtcacgttgtgc

SEQ ID NO: 90148 - DNA, 80 bp, synthetic construct
  source 1..80: mol_type = other DNA
ggcacaatatggactcctttcagttcttcgagtggctattgagggacattgaaaggaatctactttataccagtcttgta

SEQ ID NO: 90149 - DNA, 80 bp, synthetic construct
  source 1..80: mol_type = other DNA
tcaagaatgctaaagctaatgaatgaaaacttgaacacaacactggataaattctcacttatattcaactgtttttcatc

SEQ ID NO: 90150 - DNA, 80 bp, synthetic construct
  source 1..80: mol_type = other DNA
aacatttcatgtggggcatagaatagataacgctcaagatgcaattacggatcaagtaacggcgacgtacacatcgaacg

SEQ ID NO: 90151 - DNA, 80 bp, synthetic construct
  source 1..80: mol_type = other DNA
ttaacagagaaatgtatgattcatactactacaaattgaaacagatgttaaaagaagaaattgtacaatacgttgaagat

SEQ ID NO: 90152 - DNA, 80 bp, synthetic construct
  source 1..80: mol_type = other DNA
cactcgccaattcgtcaaacggattctcgaaagaagtgaaatttatagatagaaatatcaagacaacgaagaaaattctg

SEQ ID NO: 90153 - DNA, 80 bp, synthetic construct
  source 1..80: mol_type = other DNA
atttaattaccaacgattattcggatttgtctaaagcactatcacatggcataccgatgggaacccgcaacgtgcctgcg

SEQ ID NO: 90154 - DNA, 80 bp, synthetic construct
  source 1..80: mol_type = other DNA
cgtcaaacgcgtggcatttttattctgccttggcaagtagcagctgtgcagcacacaattgcagaatcgctatataaaag

SEQ ID NO: 90155 - DNA, 80 bp, synthetic construct
  source 1..80: mol_type = other DNA
agccaagaaaggagcatatcaaggatccttcgccgaagcatatacggctaaaactgcttcattgacgtacggcgtactgg

SEQ ID NO: 90156 - DNA, 80 bp, synthetic construct
  source 1..80: mol_type = other DNA
ggactcaccaaacgaattattattgacgttgaagaagacattggacgaatgctcaactctagacgaaaaaattgaaacat

SEQ ID NO: 90157 - DNA, 80 bp, synthetic construct
  source 1..80: mol_type = other DNA
ctgaagacacttcaaaagctacaaagataatcttatacaccgatgtatcgcagtgggacgcgagccaacataacactgaa

SEQ ID NO: 90158 - DNA, 80 bp, synthetic construct
  source 1..80: mol_type = other DNA
ctgcgtggattaacgctatacgcgaggcgagggctgaattgaaatggcgttacgatgatgaaccaaaggttcttgaaatg

SEQ ID NO: 90159 - DNA, 80 bp, synthetic construct
  source 1..80: mol_type = other DNA
aatgtgctggattcaatgataaaaattcaagaatatctgctaaattcaaacttggtagtagcgtcaccaggatctcaacg

SEQ ID NO: 90160 - DNA, 80 bp, synthetic construct
  source 1..80: mol_type = other DNA
cccaacaaagattataagatatcatggcgtcgcttcaggtgaaaaaacgacaaagattggcaattcgtttgccaatgtag

SEQ ID NO: 90161 - DNA, 80 bp, synthetic construct
  source 1..80: mol_type = other DNA
ccctaatagaaacggtccttgatttcgcaaaaacagatataccagacctggagatctcccatctgcgcgtggatggtgat

SEQ ID NO: 90162 - DNA, 80 bp, synthetic construct
  source 1..80: mol_type = other DNA
gacaacgtagtctcaatcaacacctcatgtaccatcgacagactccaaaggattattaaggaaaaatattcatctctgaa

SEQ ID NO: 90163 - DNA, 80 bp, synthetic construct
  source 1..80: mol_type = other DNA
cgcacgtgtaaaagcactagcttcatacacaggactggagatggcaaaacgctttatcatctgtgggaaaatctttgaga

SEQ ID NO: 90164 - DNA, 80 bp, synthetic construct
  source 1..80: mol_type = other DNA
atgtcctagtgcctccatcagcgtcaactagaataactggaagattgagggtactgatgtcgccggtcaccttatacgcc

SEQ ID NO: 90165 - DNA, 80 bp, synthetic construct
  source 1..80: mol_type = other DNA
tactaaggatacgatacttcacagtgtacgttggagataaatcagataaaaggaatatcatacgttcttggctgtcaact

SEQ ID NO: 90166 - DNA, 80 bp, synthetic construct
  source 1..80: mol_type = other DNA
acgggtccattaagtttcgaaattacgcctcaagggttgggaggaaggtgtagattcttcacacaatctgcaaaattgtt

SEQ ID NO: 90167 - DNA, 80 bp, synthetic construct
  source 1..80: mol_type = other DNA
cactctttttaaaatgctaacccagacagctgctgtttccataactccagatgaaataaagaaatatgcagagactgtgc

SEQ ID NO: 90168 - DNA, 80 bp, synthetic construct
  source 1..80: mol_type = other DNA
aattcaaaaaaagaactgaagtgatgattgccagtatgcagagaaaattgttagtgccagcgaaagcattagcacgcata

SEQ ID NO: 90169 - DNA, 80 bp, synthetic construct
  source 1..80: mol_type = other DNA
atagttgacaaagaacaacagaaaacgttgggggtgccaaatgtacaaagccagaaaaatcgaagccaagtctcgaaagc

SEQ ID NO: 90170 - DNA, 80 bp, synthetic construct
  source 1..80: mol_type = other DNA
gatagaaatactaggagtgccagagaggaatgatatagtggccaaaggttattacccagaagaactatattcactgataa

SEQ ID NO: 90171 - DNA, 80 bp, synthetic construct
  source 1..80: mol_type = other DNA
ttagtcattcagtggtcgtctatacatcacattcaactccaatctctatatatcgtgttaattgtgaacctgtggaacta

SEQ ID NO: 90172 - DNA, 80 bp, synthetic construct
  source 1..80: mol_type = other DNA
ttgaggtcacagcttggtatacggatagctgattcaaaaccaatcgctaagcctacaaatcatctatatgatatagttag

SEQ ID NO: 90173 - DNA, 80 bp, synthetic construct
  source 1..80: mol_type = other DNA
tggattatctccaattaaaatatcaccttcagatttactaacacaagcgaaaaaatacgacctgtcaacttacaaaggga

SEQ ID NO: 90174 - DNA, 80 bp, synthetic construct
  source 1..80: mol_type = other DNA
aaagagactacttaagtgatctaggtctagtcggcaacacactgaagacatatttagcctcaaagatgttatttcgggat

SEQ ID NO: 90175 - DNA, 80 bp, synthetic construct
  source 1..80: mol_type = other DNA
ctgctcatgtcgaaatacgacgacttgtattcaacaccaggatttggagccactcagcttacaacaatcccacttgacgt

SEQ ID NO: 90176 - DNA, 80 bp, synthetic construct
  source 1..80: mol_type = other DNA
acgatcaatagactaaatgtggaagagtatgcatcaattcaagaaattgaactgcaggctaagcaatggagagctgaaaa

SEQ ID NO: 90177 - DNA, 80 bp, synthetic construct
  source 1..80: mol_type = other DNA
aacatcagcggagaaggtcttttcgataagacttggtttgccaccacatctgtatgaggtagtgatgctgcttttattat

SEQ ID NO: 90178 - DNA, 80 bp, synthetic construct
  source 1..80: mol_type = other DNA
atgaatacatacattacgtattctcatgcaaaagaacattcacagcacagatgcatgcaatctcccaagagcagtcagca

SEQ ID NO: 90179 - DNA, 80 bp, synthetic construct
  source 1..80: mol_type = other DNA
gtaatcaccaagaacataattctaatgctagataacatacagctggatcaagtgtcgttttctgacgacgcttggtagat

SEQ ID NO: 90180 - DNA, 80 bp, synthetic construct
  source 1..80: mol_type = other DNA
ttctaatgctagataacatacagctggatcaagtgtcgttttctgacgacgcttggtagatcatactaaataaagccccc

SEQ ID NO: 90181 - DNA, 80 bp, synthetic construct
  source 1..80: mol_type = other DNA
cgcgaagtctttgcgaccatatcattacaacattcccatcaatgaatatctaagggataacgaaattgaggttctcgaca

SEQ ID NO: 90182 - DNA, 80 bp, synthetic construct
  source 1..80: mol_type = other DNA
cgggtgacaataggtggaagtccgatacgcttcaaggattattgcctaacttttaccacagaacgcacactttaattggt

SEQ ID NO: 90183 - DNA, 80 bp, synthetic construct
  source 1..80: mol_type = other DNA
gcaatacttttcgctgtgacttcaagattggaaatctacagctatgagcaaaagaaagcccttcgctatttactgagaac

SEQ ID NO: 90184 - DNA, 80 bp, synthetic construct
  source 1..80: mol_type = other DNA
aatagaaaaatgttacaatgagggatatctcgagatgtctcgagacagaaaatggtctcatactcttccggagttacgaa

SEQ ID NO: 90185 - DNA, 80 bp, synthetic construct
  source 1..80: mol_type = other DNA
cgttaacatttagactgtataactcgaaagtcatccacgccgcatgtgcaatgatctcattggtgcacgcaaaccctatt

SEQ ID NO: 90186 - DNA, 80 bp, synthetic construct
  source 1..80: mol_type = other DNA
tacactaatcctaagatcgctatagtgcgatatgaaccaagcgaaaatgcgaaattgtggcgatccaaagagttgaacac

SEQ ID NO: 90187 - DNA, 80 bp, synthetic construct
  source 1..80: mol_type = other DNA
gactatgaatttctttgtcaagtggtggcagtataccaaatcataccagccaacgccgccaaattactttccacacctat

SEQ ID NO: 90188 - DNA, 80 bp, synthetic construct
  source 1..80: mol_type = other DNA
gaccctgtacgtaggtgtggccactttcagctcaaatcaggtagcatcaactggcaatgcatcagaatgcgcaccactac

SEQ ID NO: 90189 - DNA, 80 bp, synthetic construct
  source 1..80: mol_type = other DNA
aaattgagaataatatatatgtatcagaggcccaaaagaaagaatgggcagagtctttcaagtctgacccgttgaacaaa

SEQ ID NO: 90190 - DNA, 80 bp, synthetic construct
  source 1..80: mol_type = other DNA
aaccacactgcaaccggagggtcaaagtcatgctcctataatggggaaagattttacagaaatctgttatggctgacagg

SEQ ID NO: 90191 - DNA, 80 bp, synthetic construct
  source 1..80: mol_type = other DNA
tcctatgaaaatgacaaagggaaagaagtccttatactatggggtgttcatcatccgcctgacatagagaaccaaaggac

SEQ ID NO: 90192 - DNA, 80 bp, synthetic construct
  source 1..80: mol_type = other DNA
acctctaatgcaccaatggacaaatgtgatgcgaaatgtcagacacctcagggagctataaacagcagtcttcctttcca

SEQ ID NO: 90193 - DNA, 80 bp, synthetic construct
  source 1..80: mol_type = other DNA
caaaaatcctctcaataccacagagtctagactcgtggtggacttctctcaattttctaggggggctacccgggtgtcct

SEQ ID NO: 90194 - DNA, 80 bp, synthetic construct
  source 1..80: mol_type = other DNA
aatttgttcagtggtgcgtagggctttcccccactgtctggcttttagttatatggatgatctggtattgggggccaaat

SEQ ID NO: 90195 - DNA, 80 bp, synthetic construct
  source 1..80: mol_type = other DNA
ggatggtggctataattggatggtttacccaccccttggacttttttccaccccgctgaaactttttcggttctgtccca

SEQ ID NO: 90196 - DNA, 80 bp, synthetic construct
  source 1..80: mol_type = other DNA
gcagacagtcatcctcaggccagaagacggactactcccatctctccacctctaatacacaatcctccacaggccatgca

SEQ ID NO: 90197 - DNA, 80 bp, synthetic construct
  source 1..80: mol_type = other DNA
attccgctgcattccaccgttctctgctagaccccccagtgaggggtatagactttcctgcaggtggctccttttccaga

SEQ ID NO: 90198 - DNA, 80 bp, synthetic construct
  source 1..80: mol_type = other DNA
tcgtcaatcttctcgaggactgctcaccctgcagcgaacatgtttcatgtgacatcaagattcctaggacccctgctcgt

SEQ ID NO: 90199 - DNA, 80 bp, synthetic construct
  source 1..80: mol_type = other DNA
ggacgatcgggaggattccgtccaggtttcgccccatctcacggcgtgcttttggggtggagccctgacgctcagggcac

SEQ ID NO: 90200 - DNA, 80 bp, synthetic construct
  source 1..80: mol_type = other DNA
tcatcaatcttctcaaggattggacaccctgcaccgaacatggagagcacaacattgtgattcctaggactcctgctcgc

SEQ ID NO: 90201 - DNA, 80 bp, synthetic construct
  source 1..80: mol_type = other DNA
acatcgtcatgtctcccccaacaaggatcactggacacaggcaaatcccgtctgaccgggtctattagagccagggttca

SEQ ID NO: 90202 - DNA, 80 bp, synthetic construct
  source 1..80: mol_type = other DNA
cccccatgcacgggaactttttggattggacccctctctactagggcccattgagaggggggctatactttcctgctgct

SEQ ID NO: 90203 - DNA, 80 bp, synthetic construct
  source 1..80: mol_type = other DNA
tagggcccattgagaggggggctatactttcctgctgctggttccacttaccgaaaatcaagaacagttcctactactgc

SEQ ID NO: 90204 - DNA, 80 bp, synthetic construct
  source 1..80: mol_type = other DNA
ggttccacttaccgaaaatcaagaacagttcctactactgcctctccacttttaacaaacatctctccgactgccatgcc

SEQ ID NO: 90205 - DNA, 80 bp, synthetic construct
  source 1..80: mol_type = other DNA
gtggaactccatggagaacaccacatctctacttcctccgacacctgctggtctaaacattgctgctgttcttgctgatt

SEQ ID NO: 90206 - DNA, 80 bp, synthetic construct
  source 1..80: mol_type = other DNA
ccaatcctccaaatactgatcagactacagtcatcaccatatcgtcaatcttctccaggactggggagcctgcaccgaac

SEQ ID NO: 90207 - DNA, 80 bp, synthetic construct
  source 1..80: mol_type = other DNA
tcgactgtcttctctaggactgaggaccctgcaccgaacatggaaaacacaacatcccggttcctatgacccctgctctt

SEQ ID NO: 90208 - DNA, 80 bp, synthetic construct
  source 1..80: mol_type = other DNA
tcgtcgatcttctcgaggattgtgggacctgtgctcaagatgcagaacacattattctgattcctaggactcctgctcga

SEQ ID NO: 90209 - DNA, 80 bp, synthetic construct
  source 1..80: mol_type = other DNA
ttttgtgggtcaccatattcttgggaacaagagctacagcatgggaggttggtcttcctgccctcgacaaggtatggttc

SEQ ID NO: 90210 - DNA, 80 bp, synthetic construct
  source 1..80: mol_type = other DNA
ttttgtgggtcaccatattcttgggaacaagagctacagcatgggaggttggtcttccaaaactagacaaggtatgggga

SEQ ID NO: 90211 - DNA, 80 bp, synthetic construct
  source 1..80: mol_type = other DNA
acggcagtcttcgcgaggactggggaccctgcaccgacaatggaaaacacaccatcgctattcctaggacccctgctctt

SEQ ID NO: 90212 - DNA, 80 bp, synthetic construct
  source 1..80: mol_type = other DNA
tttttcgggtcaccatattcttgggaacaagatctacagcatgggaggttggtcctccaaacctcgaaaaggcatgggga

SEQ ID NO: 90213 - DNA, 80 bp, synthetic construct
  source 1..80: mol_type = other DNA
ttttgtgggtcaccatattcttgggaacaagagctacagcatgggaggtccgtcttccaaacctcaactaggcgtgggga

SEQ ID NO: 90214 - DNA, 80 bp, synthetic construct
  source 1..80: mol_type = other DNA
tcgacaatcttctcgagaactgtagaacctgtgctcaagatggagagcacaatattctggttcacaggaatccgcccaat

SEQ ID NO: 90215 - DNA, 80 bp, synthetic construct
  source 1..80: mol_type = other DNA
ttttgtttgtccccttattcttgagaacactacctgcggcatggttggtcgttactcctcacctcggggtgacatgaaga

SEQ ID NO: 90216 - DNA, 80 bp, synthetic construct
  source 1..80: mol_type = other DNA
gggtattgccccctaaggatcattgctgatcggtggccaaaggagaatgaggtaggagtttgagggttcggtccaaccca

SEQ ID NO: 90217 - DNA, 80 bp, synthetic construct
  source 1..80: mol_type = other DNA
tcactccatcgttggaggtcttttgccgtgtagcgctaaggctcagggcatattgagaatcctgcccctgccacctcctc

SEQ ID NO: 90218 - DNA, 80 bp, synthetic construct
  source 1..80: mol_type = other DNA
ctgcatccagaatacagcactccgcaaaacactctacttctatctctacacatccaccagacaggcatgctcaggacatg

SEQ ID NO: 90219 - DNA, 80 bp, synthetic construct
  source 1..80: mol_type = other DNA
cactgcaactccctatgattgcacccagatgaggtagatctacaatcgagcgtcctataggttcctgctggtggctccgg

SEQ ID NO: 90220 - DNA, 80 bp, synthetic construct
  source 1..80: mol_type = other DNA
tggaaaatcttctcgatcattgagaaacctgaacggaacatggagaatactcctctgtattgttgggattcctgtttctc

SEQ ID NO: 90221 - DNA, 80 bp, synthetic construct
  source 1..80: mol_type = other DNA
tttgtctttctcctcccaatcctcttggattctttcccgatcaaccatgctaccctgccgtctcatccaactcaaattgt

SEQ ID NO: 90222 - DNA, 80 bp, synthetic construct
  source 1..80: mol_type = other DNA
ttttgtgtgtcactctattcttgggacggagtaccccagcatgggaggttggtcttcctccatccaacaaggcatggggt

SEQ ID NO: 90223 - DNA, 80 bp, synthetic construct
  source 1..80: mol_type = other DNA
ctggattggcatttcaacaacaccatgatgccctgactataggcaaaatccgtaagagtgggaggattcaggtaccggtg

SEQ ID NO: 90224 - DNA, 80 bp, synthetic construct
  source 1..80: mol_type = other DNA
gtaccggtggtcaacaagacttttgggccggagccctatcgctatcgcctgataaacaacatggcccactacacctcccc

SEQ ID NO: 90225 - DNA, 80 bp, synthetic construct
  source 1..80: mol_type = other DNA
ctgccaccactgatcggccaacaggaagatagtctactttttcctctacacttctacgagatcgacaacctgtggcaatg

SEQ ID NO: 90226 - DNA, 80 bp, synthetic construct
  source 1..80: mol_type = other DNA
gaatggagctgcacgatattcttcttgactttaatatatacattattgaggggctcataatttcctgctggtggatccag

SEQ ID NO: 90227 - DNA, 80 bp, synthetic construct
  source 1..80: mol_type = other DNA
cacatttttgggtaccccatccttcgggactctttcccgatcgcttgttggaggctggcttcggaccgaaatcaaaaaat

SEQ ID NO: 90228 - DNA, 80 bp, synthetic construct
  source 1..80: mol_type = other DNA
caggcaatgcattgtacttccccaacattctctcaagctctgctagaccccatagtgaggggctcatactttcctgctgg

SEQ ID NO: 90229 - DNA, 80 bp, synthetic construct
  source 1..80: mol_type = other DNA
ttttgtgggtcaccatattcttgggaacaagagctacagcatgcgacgttggtcttccaaaactctttctggtatgggtc

SEQ ID NO: 90230 - DNA, 80 bp, synthetic construct
  source 1..80: mol_type = other DNA
tcgggccatggttttggcggccacacggtggtcttttggtgtggagccctccggctccagcaccacctcctcctgcggcc

SEQ ID NO: 90231 - DNA, 80 bp, synthetic construct
  source 1..80: mol_type = other DNA
gcaccacctccaccagcatcaactactcccccttcacctcctccacaaactcccatcactgatcctctaagaaacagcca

SEQ ID NO: 90232 - DNA, 80 bp, synthetic construct
  source 1..80: mol_type = other DNA
ttcacctcctccacaaactcccatcactgatcctctaagaaacagccatccctccgccatacatcggctgtctctaacat

SEQ ID NO: 90233 - DNA, 80 bp, synthetic construct
  source 1..80: mol_type = other DNA
tcgctccgccatacatcggctgtctctaacattccagcgaactctgctacatcctggaggggggggctcatattttccag

SEQ ID NO: 90234 - DNA, 80 bp, synthetic construct
  source 1..80: mol_type = other DNA
caggtggttctactactgcaacagccacccctgttcccttcaccgccacaacgatatcggcagtcttcacgaggactggg

SEQ ID NO: 90235 - DNA, 80 bp, synthetic construct
  source 1..80: mol_type = other DNA
tcggcagtcttcacgaggactgggaacactgcatcattaatactacgaccactgttgctattgctaggattcttgttctt

SEQ ID NO: 90236 - DNA, 80 bp, synthetic construct
  source 1..80: mol_type = other DNA
cgaagctatttgttccccatcatctggtgttcgttgcggatcaagccttgtaccctgcgttcggagccaactccaacaac

SEQ ID NO: 90237 - DNA, 80 bp, synthetic construct
  source 1..80: mol_type = other DNA
tccccaacattccctgctgctgtgtcagattccggagtgagggacccagatcttactgctggcgcatccatatccgcaat

SEQ ID NO: 90238 - DNA, 80 bp, synthetic construct
  source 1..80: mol_type = other DNA
cttctccagtgttgcgaacactgcctcaaacatggagacaatcttctcaagaatcggagaacctgtgctcaagatggagg

SEQ ID NO: 90239 - DNA, 80 bp, synthetic construct
  source 1..80: mol_type = other DNA
gagacaatcttctcaagaatcggagaacctgtgctcaagatggaggagacgttattctggttcacaagaatcctgctcgt

SEQ ID NO: 90240 - DNA, 80 bp, synthetic construct
  source 1..80: mol_type = other DNA
tcttgtggtttcctatattcatgggatggtattatacaccacgggggggtgttcttcctcaaatccgaaagggatgggga

SEQ ID NO: 90241 - DNA, 80 bp, synthetic construct
  source 1..80: mol_type = other DNA
tggtgttggggcttcaaccccgcctggggtcgctgaccataggaaatatccgtaacgccgggagccttcgggccccggtt

SEQ ID NO: 90242 - DNA, 80 bp, synthetic construct
  source 1..80: mol_type = other DNA
caccccgccataaggcggtcttttggggtgaagccctcaggctcagggtgtattgacaaatgtcccgtcagcgcctcctc

SEQ ID NO: 90243 - DNA, 80 bp, synthetic construct
  source 1..80: mol_type = other DNA
agtgggcgggcgacaggaagttcgtctacttttctctcaaagcgtctaccagaatgtactacttgcggcatgcgatggtg

SEQ ID NO: 90244 - DNA, 80 bp, synthetic construct
  source 1..80: mol_type = other DNA
ctccacgataatcttcttgagttgaaaacataattgattgaggggtctatatattcctgctggtggctccagttccggaa

SEQ ID NO: 90245 - DNA, 80 bp, synthetic construct
  source 1..80: mol_type = other DNA
cacctctttctgttccccgtcctctgggattctttccccactgcctgttggaccctggcttcggaggcaactcaaggttt

SEQ ID NO: 90246 - DNA, 80 bp, synthetic construct
  source 1..80: mol_type = other DNA
ttttgtgggtcaccatattcttgggaacaggagctacaccattcaaggcatggggacgaatctttctgttcccaatcctc

SEQ ID NO: 90247 - DNA, 80 bp, synthetic construct
  source 1..80: mol_type = other DNA
ctcgattggcacttcaaacccaaatcggatcattggacagaagcaaatcaggaaggagcggagccattcactacaggatt

SEQ ID NO: 90248 - DNA, 80 bp, synthetic construct
  source 1..80: mol_type = other DNA
tatcccagcacacggcggtcttttggcctggagccctaaggcccatgtagtagagggaacaccgcagactccgactccta

SEQ ID NO: 90249 - DNA, 80 bp, synthetic construct
  source 1..80: mol_type = other DNA
ctgcctgcagaaatcagtgtcccgaaggccagcctacgcccaactatcgacctctcagagacagtcttcctcaagctttg

SEQ ID NO: 90250 - DNA, 80 bp, synthetic construct
  source 1..80: mol_type = other DNA
cactgaaactccataccgttgcactggactctgctagacgcgatcaagctgcgactataatttcttgatgttggctggga

SEQ ID NO: 90251 - DNA, 80 bp, synthetic construct
  source 1..80: mol_type = other DNA
tcgtcaatcttctccaggactggacatcctgcatcgaatatggattagacaacatcgcgattccgaggacccctgctcgt

SEQ ID NO: 90252 - DNA, 80 bp, synthetic construct
  source 1..80: mol_type = other DNA
ttttgtgggtcaccatattcttgggaacaagagctacagcactcgacaaggcatgtggacaaatcgttctgtttccaata

SEQ ID NO: 90253 - DNA, 80 bp, synthetic construct
  source 1..80: mol_type = other DNA
atcagagataactgacccgaggcaaatcaggaagtaaagggcaccaagggtccagggttcaacccaactcagggaggtgt

SEQ ID NO: 90254 - DNA, 80 bp, synthetic construct
  source 1..80: mol_type = other DNA
gggggcgtggagcccacaggtccaggccacacagacaactgtgccgggagcgcgtcctcaggcttacggcaattggcagt

SEQ ID NO: 90255 - DNA, 80 bp, synthetic construct
  source 1..80: mol_type = other DNA
tctctccccccataagacacagtcgtcgtcagcccacgcccaggaattcccctacattacaccaacatctgctggacccc

SEQ ID NO: 90256 - DNA, 80 bp, synthetic construct
  source 1..80: mol_type = other DNA
atctgggattctgcccggataaaaatttggacgttgccattggtgcgaaattaaacaatgcagaccaggaggtcaacgcc

SEQ ID NO: 90257 - DNA, 80 bp, synthetic construct
  source 1..80: mol_type = other DNA
cacctgctcctgccaccgcctctcccatatcggcaatcttctcgactggggaccctgcaccgaacatggacaaccaacat

SEQ ID NO: 90258 - DNA, 80 bp, synthetic construct
  source 1..80: mol_type = other DNA
atgcctatactcccggaacattaaatgctgatccgactactgcctctcccacagaatcaatattcacgaggactggacac

SEQ ID NO: 90259 - DNA, 80 bp, synthetic construct
  source 1..80: mol_type = other DNA
gaatcaatattcacgaggactggacaccctgctctgaacatggagaacacaacatcgggattcctaatactcctgctcgt

SEQ ID NO: 90260 - DNA, 80 bp, synthetic construct
  source 1..80: mol_type = other DNA
ttttgtgggtcaccatattcttgggaacaagagctacagcatgggacgcggaatgcctgccgacgaatcgttcggttccc

SEQ ID NO: 90261 - DNA, 80 bp, synthetic construct
  source 1..80: mol_type = other DNA
acaacaaggatcattggcaaaaggataattgggtagaagcgggaccagtcggaccggggttcttcccaccagggttcact

SEQ ID NO: 90262 - DNA, 80 bp, synthetic construct
  source 1..80: mol_type = other DNA
cttttggtgtggagtcttttggctcggggcctattggctcaggtgccattgtcacctccgcctgcctccccctcccgggc

SEQ ID NO: 90263 - DNA, 80 bp, synthetic construct
  source 1..80: mol_type = other DNA
ctccagaaaacggcctactcccatctctcctactctaatagatccacctcctcaagacatgcatcgtaactccatggcat

SEQ ID NO: 90264 - DNA, 80 bp, synthetic construct
  source 1..80: mol_type = other DNA
ggaactcccctgctgtagaccccagagtggggaacctaaaccctgctgctggtgcctcctcctccggaacgtcaatcttc

SEQ ID NO: 90265 - DNA, 80 bp, synthetic construct
  source 1..80: mol_type = other DNA
gttacgactactgccgttgccatatcgtcaatcttcacaacaactgtgtaccctgcaacgaagatggagaacacaacatc

SEQ ID NO: 90266 - DNA, 80 bp, synthetic construct
  source 1..80: mol_type = other DNA
tcgtcaatcttcacaacaactgtgtaccctgcaacgaagatggagaacacaacatcaggattcctaggacccctgctcgt

SEQ ID NO: 90267 - DNA, 80 bp, synthetic construct
  source 1..80: mol_type = other DNA
atctctggtattctttcctcagggattctttcacgatgagttcgtggaccctgcgttcggagccaattgggacttccacc

SEQ ID NO: 90268 - DNA, 80 bp, synthetic construct
  source 1..80: mol_type = other DNA
ttttgtgggtcaccatattcttgggaacaagagctacagcatgcctcgacaagggatggggactaatctttctgttcccc

SEQ ID NO: 90269 - DNA, 80 bp, synthetic construct
  source 1..80: mol_type = other DNA
tcgacaaccttcttgaggactggagaccctgcatcgaaagtggagaagatctcgttatgattactactacccctgctggt

SEQ ID NO: 90270 - DNA, 80 bp, synthetic construct
  source 1..80: mol_type = other DNA
ttatgtgggtcaccatattattgagaacaagatatacagcatgtgaggtcgttgttacaaacctgggaaaggcatgtgga

SEQ ID NO: 90271 - DNA, 80 bp, synthetic construct
  source 1..80: mol_type = other DNA
aaaatctagatcgggacctcaacccacacaaggacaactgcacaaacgccaacaaggcgggagtgggagcattcggccca

SEQ ID NO: 90272 - DNA, 80 bp, synthetic construct
  source 1..80: mol_type = other DNA
tcgtcagtcttctcggagactggggaccctgcaccgaacatggagaacatcacatcaggactcctaggacccctgctcgt

SEQ ID NO: 90273 - DNA, 80 bp, synthetic construct
  source 1..80: mol_type = other DNA
ttttgtgggtcaccatattcttgggaacaagagctacagcatgcgaggttggtgggacaactctttctgttccgaatcct

SEQ ID NO: 90274 - DNA, 80 bp, synthetic construct
  source 1..80: mol_type = other DNA
caagggtcactggccccacgccaatgatgtatgaccggaagcatttgggccaggattcgccccatcccacggcggtcttt

SEQ ID NO: 90275 - DNA, 80 bp, synthetic construct
  source 1..80: mol_type = other DNA
ccatctctccacctctaacacacatctctcctcctgccatacactggaattccacagcattgcaccgagctctgctaaat

SEQ ID NO: 90276 - DNA, 80 bp, synthetic construct
  source 1..80: mol_type = other DNA
attccacagcattgcaccgagctctgctaaatttcaaagtgaggctgctatattttccagcggggggctcatattttcga

SEQ ID NO: 90277 - DNA, 80 bp, synthetic construct
  source 1..80: mol_type = other DNA
gcaggagactctgttccgacaactgcctcacccgtaccgactatcgtctcaaggattgcggaccctgtctcgaacatggg

SEQ ID NO: 90278 - DNA, 80 bp, synthetic construct
  source 1..80: mol_type = other DNA
ccgactatcgtctcaaggattgcggaccctgtctcgaacatggggaacactgcatcagaattgctagaacccctgctcgg

SEQ ID NO: 90279 - DNA, 80 bp, synthetic construct
  source 1..80: mol_type = other DNA
ctgctattcgttcccgatcccctggtggaccttgcctatcgagccatgtaccatgatccagattgggacttcaaccccca

SEQ ID NO: 90280 - DNA, 80 bp, synthetic construct
  source 1..80: mol_type = other DNA
atggggacaaatcgaggtgtttccaataatccgggattcggcatggggccacatctggacgttgccattcgtgccagatt

SEQ ID NO: 90281 - DNA, 80 bp, synthetic construct
  source 1..80: mol_type = other DNA
cagggttcaaggcaactcagggaggtgtgggggcgtggagccctcagttccaggccccactgacaactgtttcgggagcg

SEQ ID NO: 90282 - DNA, 80 bp, synthetic construct
  source 1..80: mol_type = other DNA
aaacaatgcagaccaggaggtccacgccatcaaagataactcacccgatgcaaatcaggaagtagagggcaccaaggatc

SEQ ID NO: 90283 - DNA, 80 bp, synthetic construct
  source 1..80: mol_type = other DNA
atgtggagaaatcgtggtctttctaatcatccgggattctttctgggtccacatctggacgttgccattggtgtcgaatt

SEQ ID NO: 90284 - DNA, 80 bp, synthetic construct
  source 1..80: mol_type = other DNA
ccgggctcaccccaccacacggaggtgttggggcgtgggggccagggttcccggccacattgacaactgtttcggggggg

SEQ ID NO: 90285 - DNA, 80 bp, synthetic construct
  source 1..80: mol_type = other DNA
ttcccggccacattgacaactgtttcgggggggagtcctcaggcttacggcaattggcaatcaggaacaccaccacctcc

SEQ ID NO: 90286 - DNA, 80 bp, synthetic construct
  source 1..80: mol_type = other DNA
agtcctcaggcttacggcaattggcaatcaggaacaccaccacctcccctttcttcccccaataggcacagtggtagtca

SEQ ID NO: 90287 - DNA, 80 bp, synthetic construct
  source 1..80: mol_type = other DNA
aaacaatgcagaccaggaggtccacgccttcggagccaactggaccgaggcagatcgggaattagagggcgccaaggggc

SEQ ID NO: 90288 - DNA, 80 bp, synthetic construct
  source 1..80: mol_type = other DNA
atggggacaaatctttctgtttccaatcatccgggattctttccggggccacatctggaccttgccattggtgccggatt

SEQ ID NO: 90289 - DNA, 80 bp, synthetic construct
  source 1..80: mol_type = other DNA
cagcccactcccagctattcccctacaatacaccgtcatcttctggccccccaagggaggggcccaacattccctgctgg

SEQ ID NO: 90290 - DNA, 80 bp, synthetic construct
  source 1..80: mol_type = other DNA
atgtggacaaatcgttgtgtttccaataatctgggattcggcccggatccacatctggatcttgccattggtgcgagatt

SEQ ID NO: 90291 - DNA, 80 bp, synthetic construct
  source 1..80: mol_type = other DNA
cagggttcaacccaactcagggaggtgtgggggcgtggggcccagggttcccggccacactgacaactgtttcgggggcg

SEQ ID NO: 90292 - DNA, 80 bp, synthetic construct
  source 1..80: mol_type = other DNA
aaacaatgcagaccaggaggtcaacgccatcagagacaactcacccaatccagatcaggaagtaaacggcaccaagggtc

SEQ ID NO: 90293 - DNA, 80 bp, synthetic construct
  source 1..80: mol_type = other DNA
atggggagaaatcgttgtgtttccaatcatctgggattcggcccggggccacatctggacgttgccattcgtgccggatt

SEQ ID NO: 90294 - DNA, 80 bp, synthetic construct
  source 1..80: mol_type = other DNA
cagggttcaacccaactcagggaggtgtgggggcgtggggcccagggttccccgccacacacggaggtgttccgggggcg

SEQ ID NO: 90295 - DNA, 80 bp, synthetic construct
  source 1..80: mol_type = other DNA
cgtcctcaggcttacggcaattggcagtcaggaacacaagcacctcccatctctccccccaaaagacacagtggtagtca

SEQ ID NO: 90296 - DNA, 80 bp, synthetic construct
  source 1..80: mol_type = other DNA
gcccacgcacaggtattcccctacaatacaccatcatctgctggccccccaagggaggggcacaacattccctgctggtg

SEQ ID NO: 90297 - DNA, 80 bp, synthetic construct
  source 1..80: mol_type = other DNA
aaacaatgatcaccaggaggtccaccccatcagagaccactgacccaatccaaatcaggtattaaagggcaccaagggtc

SEQ ID NO: 90298 - DNA, 80 bp, synthetic construct
  source 1..80: mol_type = other DNA
atggggacaaatcgaggtgtttctaataatccgggattaggcccggatccacatctgtacgttgccattggtgccagatt

SEQ ID NO: 90299 - DNA, 80 bp, synthetic construct
  source 1..80: mol_type = other DNA
atgtggaccaatcgttctctttccaatcatcctggattctttctggatccacagttggaccttgccattggtgcgaaatc

SEQ ID NO: 90300 - DNA, 80 bp, synthetic construct
  source 1..80: mol_type = other DNA
tctctccccccaaaagacacagtggtcgtcagcccatgcagaggaattccccaacattccaccaagatctgctagccgcc

SEQ ID NO: 90301 - DNA, 80 bp, synthetic construct
  source 1..80: mol_type = other DNA
aaacaatgcagaccaggaggtcaacgccatcaaggaccactgacccgaggcaaatcaggaagtagagggagccaagggtc

SEQ ID NO: 90302 - DNA, 80 bp, synthetic construct
  source 1..80: mol_type = other DNA
aggtggaccaatcgaggtgtttccaataatctgggattctttccggatccacatctggaccttgccattggtgccaaatt

SEQ ID NO: 90303 - DNA, 80 bp, synthetic construct
  source 1..80: mol_type = other DNA
atgtggacaaatcgaggtgtttctaataatccgggattcggcccggggacaaatctggacgttgccattggtgcgaaatt

SEQ ID NO: 90304 - DNA, 80 bp, synthetic construct
  source 1..80: mol_type = other DNA
aaacaatgatcaccaggaggtccacgccatcggagataactcacccgatccagatcaggaattaaagggcaccaaggatc

SEQ ID NO: 90305 - DNA, 80 bp, synthetic construct
  source 1..80: mol_type = other DNA
aagtctctgcatctattaaaggtaactggctacaaggtaacctgaataagtgttcctcattatttggggctgcaatatca

SEQ ID NO: 90306 - DNA, 80 bp, synthetic construct
  source 1..80: mol_type = other DNA
gtgtttaccttgataaattaaaatcagtaggtaaagcttttaaaattgtttctctaaggtatacaaggaaggcatgcatc

SEQ ID NO: 90307 - DNA, 80 bp, synthetic construct
  source 1..80: mol_type = other DNA
atagttccttaagagatcatattaatgttattgtaggacgtgacttatcctttcaggatttaagtgagacaccttgtcaa

SEQ ID NO: 90308 - DNA, 80 bp, synthetic construct
  source 1..80: mol_type = other DNA
gtgtttatcttgataagttaaaatcggtaggtaaggcttttaagattatttctttaaaatatacaagaaaggcatgcatt

SEQ ID NO: 90309 - DNA, 80 bp, synthetic construct
  source 1..80: mol_type = other DNA
atagctccctgagagatcacatcaatgttattgttggacgtgatctatcttttcaagacttgagtgagacaccttgtcaa

SEQ ID NO: 90310 - DNA, 80 bp, synthetic construct
  source 1..80: mol_type = other DNA
atgccgactaaggggaatagccccattgcaactaggtaattgcagtgttgccggatggatcttaggaaatccagagtgtg

SEQ ID NO: 90311 - DNA, 80 bp, synthetic construct
  source 1..80: mol_type = other DNA
aatcacaccgtaaccaagggagtatcggaatcatgctcccacaatgggaaaagtagtttttaccggaatttgttatggct

SEQ ID NO: 90312 - DNA, 80 bp, synthetic construct
  source 1..80: mol_type = other DNA
gagacgtgctggtatggagatttgacagcagcctagcacggagacacatagcccgagagctgcatccggagtacagctga

SEQ ID NO: 90313 - DNA, 80 bp, synthetic construct
  source 1..80: mol_type = other DNA
aatatcacctcaagcataagagataaggtacagaaagaaaaggcattgtttaatacacttgatatagtaccaatgtatat

SEQ ID NO: 90314 - DNA, 80 bp, synthetic construct
  source 1..80: mol_type = other DNA
aggtgctgatctggaaattcgacagtacactggcatttacacacagagctaaagagctgcacccggagttctacacggac

SEQ ID NO: 90315 - DNA, 80 bp, synthetic construct
  source 1..80: mol_type = other DNA
gagaagtgctgcgctgggtgtttgacagtaaactggcatttacacacaaagctcgagagctgcatccagagttctacaca

SEQ ID NO: 90316 - DNA, 80 bp, synthetic construct
  source 1..80: mol_type = other DNA
ggagatttgacagtcgcctggcatttgaacacaaggctaaagagctgcatccggagttttacaactggctggggactttc

SEQ ID NO: 90317 - DNA, 80 bp, synthetic construct
  source 1..80: mol_type = other DNA
atgtcaccacaagtataagaaataaggttacgaaggaatatgcatttttttataaacttgatgttgtacctatctataca

SEQ ID NO: 90318 - DNA, 80 bp, synthetic construct
  source 1..80: mol_type = other DNA
gagtaggaccagcttctcaggacttagccaaatatggggcacttacaagcagcaacacacctgacaataaccctgattgt

SEQ ID NO: 90319 - DNA, 80 bp, synthetic construct
  source 1..80: mol_type = other DNA
actagtgtggaagtttgacagtatgctggcacgcagacacatggcccgcgagctacatccggagttttacaccactgggg

SEQ ID NO: 90320 - DNA, 80 bp, synthetic construct
  source 1..80: mol_type = other DNA
gaggtgccctcagatgtgaaggataaaagaaagacagtatactcatttttctatggacttgatatagtaccaatgtatag

SEQ ID NO: 90321 - DNA, 80 bp, synthetic construct
  source 1..80: mol_type = other DNA
gcaagagaagtaggaacagcaactcaagagttagatacatgtggagcagccacaagtagtaatacagcagcctccaatga

SEQ ID NO: 90322 - DNA, 80 bp, synthetic construct
  source 1..80: mol_type = other DNA
tgtatccacagaccaaatagatagaaagcagaaacaatgggcaagttttaatagacttgatttggtaccaatcttcaaat

SEQ ID NO: 90323 - DNA, 80 bp, synthetic construct
  source 1..80: mol_type = other DNA
acagagaagtgctggtctggagatttgacagtcacctggcatttgaacacaaggctcgagtgctgcatccggagttctag

SEQ ID NO: 90324 - DNA, 80 bp, synthetic construct
  source 1..80: mol_type = other DNA
tgtggaagtttgacattcaactagcacacagacacatggcccgcgagctgcatccggagtactacactgggactttccac

SEQ ID NO: 90325 - DNA, 80 bp, synthetic construct
  source 1..80: mol_type = other DNA
cagcacaggcataggaaataagttaaagagagaagaagcacttttttatagtcttgatttagaaacagggctacattaag

SEQ ID NO: 90326 - DNA, 80 bp, synthetic construct
  source 1..80: mol_type = other DNA
atatcacttcaagcagcggaagtaagatgaagaaagaatatgccctctttgatagccttgatctagtaccactctatagg

SEQ ID NO: 90327 - DNA, 80 bp, synthetic construct
  source 1..80: mol_type = other DNA
aagacagagaagtactgagatgggagtttgacagttccctagcaagaaaacacatggcccgagagctgcatccggagtac

SEQ ID NO: 90328 - DNA, 80 bp, synthetic construct
  source 1..80: mol_type = other DNA
tttcaccacagaaagcggagataaacgcaaagaccatgcaatttttaatagcattgatctaatagcaatctataggttga

SEQ ID NO: 90329 - DNA, 80 bp, synthetic construct
  source 1..80: mol_type = other DNA
tgtcactggaagcatagtaaatgaagtgaagcaagaaaatgcacttttttatgacctggatatagtatcaatgtatgtgt

SEQ ID NO: 90330 - DNA, 80 bp, synthetic construct
  source 1..80: mol_type = other DNA
catccaaacgggcatacaagataaggtgaaaaaagaatctgcatatttttataaccttgatatagtaagaatgtttaggt

SEQ ID NO: 90331 - DNA, 80 bp, synthetic construct
  source 1..80: mol_type = other DNA
acaaggaagtgctggtatggagatttgacagcagcctggcacggaggcacttggcccgagagaagcatccggagtattag

SEQ ID NO: 90332 - DNA, 80 bp, synthetic construct
  source 1..80: mol_type = other DNA
atatctccacaagcatgagcgacagatcgcagaaagctcagtcacttttttatgcacttgatgtagtacaattgtatagg

SEQ ID NO: 90333 - DNA, 80 bp, synthetic construct
  source 1..80: mol_type = other DNA
acagagaagtgctggtctggagatttgatagcagcctggcaagaacacacagggctcgagagctacatccggagttttag

SEQ ID NO: 90334 - DNA, 80 bp, synthetic construct
  source 1..80: mol_type = other DNA
aagtgttagtgtggagatttaacagcaggctggcatttgagcacaaggcccgaataatgcatcctgagttctacaactga

SEQ ID NO: 90335 - DNA, 80 bp, synthetic construct
  source 1..80: mol_type = other DNA
aggtgctagtctggagcttcgacagtaaactggcattgacacacagagctagagagatgcatccggagttctacacactg

SEQ ID NO: 90336 - DNA, 80 bp, synthetic construct
  source 1..80: mol_type = other DNA
tgtggagatttgacagtcaactagcacacagacacagggcccgcgaactacatccggagttttacacggggactttccac

SEQ ID NO: 90337 - DNA, 80 bp, synthetic construct
  source 1..80: mol_type = other DNA
gagataagatgcagcagaaagaatatgcagttttttataagcatgatgtagtatcagtctttaggttgataagttgtaac

SEQ ID NO: 90338 - DNA, 80 bp, synthetic construct
  source 1..80: mol_type = other DNA
aatggaagacgagcacagagaagtactgatctggagatttgacagcaaattggcactcaaacacagagctcaagagctgc

SEQ ID NO: 90339 - DNA, 80 bp, synthetic construct
  source 1..80: mol_type = other DNA
acagagaagtactgatctggagatttgacagcaaattggcactcaaacacagagctcaagagctgcatccggagttctag

SEQ ID NO: 90340 - DNA, 80 bp, synthetic construct
  source 1..80: mol_type = other DNA
acggagaagtgctgatgtggagatttgacagtagcctagcacgaagacacatcgcccgagagctgtatccggactactag

SEQ ID NO: 90341 - DNA, 80 bp, synthetic construct
  source 1..80: mol_type = other DNA
acggagaagttttacagtggaagtttgatagcagcctagcacgcagacacctggcccgcgagctacatccggagtactac

SEQ ID NO: 90342 - DNA, 80 bp, synthetic construct
  source 1..80: mol_type = other DNA
acaaatggaatgctgctatacaaaatgtaagcaaagaattagcaaaactcttccctaataaatcaatagtctttagacca

SEQ ID NO: 90343 - DNA, 80 bp, synthetic construct
  source 1..80: mol_type = other DNA
ataccaccacaagcacaaatgagaaaatgcagacatatgcgccttttagtagtcttgatctagtgtacatctataggttg

SEQ ID NO: 90344 - DNA, 80 bp, synthetic construct
  source 1..80: mol_type = other DNA
acagagaggtgctggtatggagatttgacagcagcctagcacggagacacctagcccgagagctacatccggagttctag

SEQ ID NO: 90345 - DNA, 80 bp, synthetic construct
  source 1..80: mol_type = other DNA
tactggtctggagatttgacagcagcctggcaagaacacacagagcaaaagagatgcatcctgagttctacaactgctga

SEQ ID NO: 90346 - DNA, 80 bp, synthetic construct
  source 1..80: mol_type = other DNA
aagtagaagaaatagaaaacagaaagactttgcacttttttatacacttgatatagtaccaatgtataggttgagaagtt

SEQ ID NO: 90347 - DNA, 80 bp, synthetic construct
  source 1..80: mol_type = other DNA
aaagcagtaagcagcaaatgtaatgcatataataagcatagtagcattgatattagcactaataatagtgatagttgtgt

SEQ ID NO: 90348 - DNA, 80 bp, synthetic construct
  source 1..80: mol_type = other DNA
aagtactgcaatggaagtttgacagcagcctggcacgaagacacatagccagagagagacgcccggagtattaccactga

SEQ ID NO: 90349 - DNA, 80 bp, synthetic construct
  source 1..80: mol_type = other DNA
gttaccacacttataagagataagactacgcaggaatttgcattgttttataaacttgatgtagtaccaatctataggtt

SEQ ID NO: 90350 - DNA, 80 bp, synthetic construct
  source 1..80: mol_type = other DNA
acagagatgtgctggtatggagatttgacattagcctagcacggaggcacatagcccgagagctgtatccggagtattag

SEQ ID NO: 90351 - DNA, 80 bp, synthetic construct
  source 1..80: mol_type = other DNA
tataactgcaggagataaaaggaagagagaaaatgcagttttctataatgaagatgtaatacaaacgtatattctagtac

SEQ ID NO: 90352 - DNA, 80 bp, synthetic construct
  source 1..80: mol_type = other DNA
agagccatcaagatcttgtaccaaagcagtaagtatgtaatgttactagaaataggaataggagcttttataatagcact

SEQ ID NO: 90353 - DNA, 80 bp, synthetic construct
  source 1..80: mol_type = other DNA
acaaagatgtgctggtctggagatttgacagtagactggcatttgaccacagagctaaagcgctgcatccggagtactac

SEQ ID NO: 90354 - DNA, 80 bp, synthetic construct
  source 1..80: mol_type = other DNA
atattgatagacataatgaaaagcagaagaaagaatatgcacttttttctcaatttgatttagaacgaacgtataggttg

SEQ ID NO: 90355 - DNA, 80 bp, synthetic construct
  source 1..80: mol_type = other DNA
acaagaataagacagggctttgaagcagctttgctataaaatgggaagcaaaatgtcaaaaatggtctgctgtaagggaa

SEQ ID NO: 90356 - DNA, 80 bp, synthetic construct
  source 1..80: mol_type = other DNA
ggggcaagtggtcaaaaagcaacaatatggtctgctataagagaaagaataagaagagggagtaggaccagcatctcgag

SEQ ID NO: 90357 - DNA, 80 bp, synthetic construct
  source 1..80: mol_type = other DNA
atagagaagtgctggtctggagacatgacagtagactggcattaaaacacctagctcgagagatgcatccggagttctag

SEQ ID NO: 90358 - DNA, 80 bp, synthetic construct
  source 1..80: mol_type = other DNA
gttgaagtggatgattcattcattgaggaaaaaatggaagttgatacaatagattggaagtctagatatgagcaattgga

SEQ ID NO: 90359 - DNA, 80 bp, synthetic construct
  source 1..80: mol_type = other DNA
aacggggaggatgacatagtggtttcttatagtgtcaaagatggtgtctctggtttgcctgatctttccaccgtcaggca

SEQ ID NO: 90360 - DNA, 80 bp, synthetic construct
  source 1..80: mol_type = other DNA
tagtatatagtggtagcacctacacacttgagtctgatggcaaaggcaatgtgaaggttgacaaagttcaaagtgcctcc

SEQ ID NO: 90361 - DNA, 80 bp, synthetic construct
  source 1..80: mol_type = other DNA
gtgtccaggaagccttgtattccatcatccagattgctggggctgcatttgtcaccacgcgcatcgtcaagcgcatgaac

SEQ ID NO: 90362 - DNA, 80 bp, synthetic construct
  source 1..80: mol_type = other DNA
ggctctgaaattaggaaaagaaatccagatgatttcaaacccaaggggaaactgtgggctgacgatgacagaaatgtgga

SEQ ID NO: 90363 - DNA, 80 bp, synthetic construct
  source 1..80: mol_type = other DNA
ctagggtcgaactaacaccactttccttgtactggagacccgtatataccccccaatacctcatctctccagacgctctc

SEQ ID NO: 90364 - DNA, 80 bp, synthetic construct
  source 1..80: mol_type = other DNA
aagaaactacacggagagacgttcccctacacagcctttgacaacaactgttatgccttttgttgttgggtcctggacct

SEQ ID NO: 90365 - DNA, 80 bp, synthetic construct
  source 1..80: mol_type = other DNA
tgcaccttcagaggggatgtcacccacatctcaggtactcacagatacacaatgaatttggctactcaaaattggaacag

SEQ ID NO: 90366 - DNA, 80 bp, synthetic construct
  source 1..80: mol_type = other DNA
agtccccgggggcactgccaggaagggctagggctgctgtccccgctcggggctcctccaacacatcttctaactcttct

SEQ ID NO: 90367 - DNA, 80 bp, synthetic construct
  source 1..80: mol_type = other DNA
cagaccacaagtggagaacacagaggagactaccagcaaggacgggtgtccaaaacccagagatgatgaggagttcgtca

SEQ ID NO: 90368 - DNA, 80 bp, synthetic construct
  source 1..80: mol_type = other DNA
tttcatccgacgacatcaaaactgagggtaagaaaggaaagaacaagactggtcgcggcaagaaacacacagccttctca

SEQ ID NO: 90369 - DNA, 80 bp, synthetic construct
  source 1..80: mol_type = other DNA
cattagagttggtatgaatatgaatgaggatggccccatcatcttcgagaggcattccaggtacacataccactatgatg

SEQ ID NO: 90370 - DNA, 80 bp, synthetic construct
  source 1..80: mol_type = other DNA
aattctccccagaaccacatttggctcaggtagtcgcagaagaccttctctctcctagcgtggtggacgtgggtgacttc

SEQ ID NO: 90371 - DNA, 80 bp, synthetic construct
  source 1..80: mol_type = other DNA
acaatatcaatcaacgagggtcttccctctggggtgccctgcacctcccaatggaattccatcgcccactggcttctcac

SEQ ID NO: 90372 - DNA, 80 bp, synthetic construct
  source 1..80: mol_type = other DNA
ggggaacgcgttcaccgccgggaaaatcatatttgcagcagtcccaccaaatttcccaaccgaaggactgagcccctgcc

SEQ ID NO: 90373 - DNA, 80 bp, synthetic construct
  source 1..80: mol_type = other DNA
tgcaccttcagaggggatgtcactcaaattggaagtactcaaagttacacaatgaacctggcctcccaaaattggaataa

SEQ ID NO: 90374 - DNA, 80 bp, synthetic construct
  source 1..80: mol_type = other DNA
ttatgatccaacagaagaaatcccagcccccctgggaaccccagattttgtaggaaggatccgaggcatgctcacccaaa

SEQ ID NO: 90375 - DNA, 80 bp, synthetic construct
  source 1..80: mol_type = other DNA
ccacaaagagtgatggctcgacccgtggtcacgtagccacagtgagcactggaagtgcttattttactccaaagttgggc

SEQ ID NO: 90376 - DNA, 80 bp, synthetic construct
  source 1..80: mol_type = other DNA
agagttcaattctccactgacacaagcaatgaccttgaagctcgccaaaacacgagattcaccccagtcggcgtcatcca

SEQ ID NO: 90377 - DNA, 80 bp, synthetic construct
  source 1..80: mol_type = other DNA
ggatggtagtaccacccaccgaaatgaaccccaacaatgggtgctcccagagtattcaggtagagatagtcacaatgtac

SEQ ID NO: 90378 - DNA, 80 bp, synthetic construct
  source 1..80: mol_type = other DNA
atgctggggctgggaccattaatcaaaaagttgattttgacaataatagaaaattgcaacaagcttccttccaatatagt

SEQ ID NO: 90379 - DNA, 80 bp, synthetic construct
  source 1..80: mol_type = other DNA
cctcgggagcaccaccagggagaaccaatctcagggctactacccccgctcgaggctcctccagtacactttcaaatgct

SEQ ID NO: 90380 - DNA, 80 bp, synthetic construct
  source 1..80: mol_type = other DNA
aacggggaggatgaggcagtggtctcttatagtgttaaagatggcatttccggcctgcccgagctttccactgtcaggca

SEQ ID NO: 90381 - DNA, 80 bp, synthetic construct
  source 1..80: mol_type = other DNA
ggaggctctatattccatcatccagattgctggagctgcatttgtcaccacgcgcatcgctaggcgcatgaacatacaag

SEQ ID NO: 90382 - DNA, 80 bp, synthetic construct
  source 1..80: mol_type = other DNA
caaaaccacaagtggaagacacaggggaggccatcaacaaagaagggtgcccaaaacccagagatgaagaggagttcgtc

SEQ ID NO: 90383 - DNA, 80 bp, synthetic construct
  source 1..80: mol_type = other DNA
atttcatctgacgacatcaaagctgaaggcaagaaggggaagaacaagactggccgcggcaagaagcacacagccttctc

SEQ ID NO: 90384 - DNA, 80 bp, synthetic construct
  source 1..80: mol_type = other DNA
cactgttggaggtcagatgggcatgcttttgacagggtccaacgccaagaacatggacctaggcaccacaccaggtgact

SEQ ID NO: 90385 - DNA, 80 bp, synthetic construct
  source 1..80: mol_type = other DNA
gaacgggactactttcacaggcaagctggcagaccaagcttccaaggccaacctgatgttcgaagaggggaaaagcatga

SEQ ID NO: 90386 - DNA, 80 bp, synthetic construct
  source 1..80: mol_type = other DNA
aggtggttgcagaagaccttctttcccctagcgtgatggatgtgggtgacttcaaaataacaatcaatgagggcctcccc

SEQ ID NO: 90387 - DNA, 80 bp, synthetic construct
  source 1..80: mol_type = other DNA
tggtggagagtttacagtgtcccctagaaacgctccgggtgagatactctggagcgcgccccttggccctgatttaaacc

SEQ ID NO: 90388 - DNA, 80 bp, synthetic construct
  source 1..80: mol_type = other DNA
aaactgcacggagaatcattcccctacacagcctttgacaacaattgttacgccttttgttgctgggtcttggacctaaa

SEQ ID NO: 90389 - DNA, 80 bp, synthetic construct
  source 1..80: mol_type = other DNA
tgctggggatgatgtcttcacagtctcttgccgagtcctcacgaggccatcccctgattttgattttatatttttggtgc

SEQ ID NO: 90390 - DNA, 80 bp, synthetic construct
  source 1..80: mol_type = other DNA
tgctccttcagaggaagtgtcacccaagttggagtaacccatgattacacaatgaatttggcctctcaaaattggaacaa

SEQ ID NO: 90391 - DNA, 80 bp, synthetic construct
  source 1..80: mol_type = other DNA
ctatgacccaacagaggaaatcccagcccctctgggaactccagacttcaaaggaaaaatccaaggtgtgctcacccaaa

SEQ ID NO: 90392 - DNA, 80 bp, synthetic construct
  source 1..80: mol_type = other DNA
caacgaggctgggtggctcgacccgcgcacacaaagctacagtgagcactggggctgctgacttcactccaaaattgggt

SEQ ID NO: 90393 - DNA, 80 bp, synthetic construct
  source 1..80: mol_type = other DNA
agagttcaattccacactgacacaaccaatgatttgaacgctaacgagaacaccaaattcaccccagtcggcgtcatcca

SEQ ID NO: 90394 - DNA, 80 bp, synthetic construct
  source 1..80: mol_type = other DNA
agaaagtgacaaccaccgagatgaaccccaacaatgggtgctcccagactacgcaggcagaggtacccacaatgtgcact

SEQ ID NO: 90395 - DNA, 80 bp, synthetic construct
  source 1..80: mol_type = other DNA
tagcccctgccgttgctcccacttttccaggtgaacaacttctattctttaggtccactctgcccgggtgtggcgggtac

SEQ ID NO: 90396 - DNA, 80 bp, synthetic construct
  source 1..80: mol_type = other DNA
tcacagtggcttacactggtccacatgatttggttattccccccaatggttattttagatttgattcttgggttaatcag

SEQ ID NO: 90397 - DNA, 80 bp, synthetic construct
  source 1..80: mol_type = other DNA
atgctggggctggggtcatcaaccaaaaagttgattttgaaaacaacagaaaattacaacaagactccttccaatttagt

SEQ ID NO: 90398 - DNA, 80 bp, synthetic construct
  source 1..80: mol_type = other DNA
agcccgtggggcaatcaacgcccccatgacaaaagttttggactggaatggaacaaggcactgggctcctaatgctagaa

SEQ ID NO: 90399 - DNA, 80 bp, synthetic construct
  source 1..80: mol_type = other DNA
atcgggggcatcaccaggaagaaccaaccttagggccactgtccccgctcggggctcttcttcttctaaactttctagta

SEQ ID NO: 90400 - DNA, 80 bp, synthetic construct
  source 1..80: mol_type = other DNA
atcaaaacagaaatctgtcacctttcatgaggggggctctcaacacgtcattcgtctccccaccatctagcaaatcctct

SEQ ID NO: 90401 - DNA, 80 bp, synthetic construct
  source 1..80: mol_type = other DNA
ctctcttcgctcacattcgcaagcgaggggagtcacgggtgtaatgtgaaaagacaaattaattatctttcctttcttta

SEQ ID NO: 90402 - DNA, 80 bp, synthetic construct
  source 1..80: mol_type = other DNA
ccttcggcagtcaaaaatctgccaatgacagtactaacaccaccccttctaataaagaagaggctggtgcattctccaac

SEQ ID NO: 90403 - DNA, 80 bp, synthetic construct
  source 1..80: mol_type = other DNA
caaggggaccaaaacacccagtagtgctcagcactgccccacagtcaagatcggggacaaaacattaacagttccacccg

SEQ ID NO: 90404 - DNA, 80 bp, synthetic construct
  source 1..80: mol_type = other DNA
ggccaggcccgtggttgttatgatctcgggtaaacctggcattggcaagacttacatggcaagacacctagctaagggcg

SEQ ID NO: 90405 - DNA, 80 bp, synthetic construct
  source 1..80: mol_type = other DNA
gagtggcgaccaaagagttgggctcgttccgcgcaacggggtcgaccattgggacgcctacagggaggagagtgtggtct

SEQ ID NO: 90406 - DNA, 80 bp, synthetic construct
  source 1..80: mol_type = other DNA
gagtggcgaccaaagagttgggctcgttccgcgcaacggggtcgaccattgggacgcctacaggggggagagggtggtct

SEQ ID NO: 90407 - DNA, 80 bp, synthetic construct
  source 1..80: mol_type = other DNA
ctaaactgtgataggattgaaaacaaagggaagatgttcgacagtgatgtcattgtaatcacgaccaatttagtcaaccc

SEQ ID NO: 90408 - DNA, 80 bp, synthetic construct
  source 1..80: mol_type = other DNA
cctgacccaggggtccctgatcgcaagggtcgcgggtcttgttcatgagaggaaagatgagttccagctccaaggaggcg

SEQ ID NO: 90409 - DNA, 80 bp, synthetic construct
  source 1..80: mol_type = other DNA
cctgacccaggggtccctgatcgcaagggtcgcgggtcttgttcatgagaggaaagatgagttccagctccaagggggcg

SEQ ID NO: 90410 - DNA, 80 bp, synthetic construct
  source 1..80: mol_type = other DNA
cgttgtgcagtatgatgcgaagtcagaaactgtgcatggactaccagacttgacgacggtgcaaaatgagcacgaaaaca

SEQ ID NO: 90411 - DNA, 80 bp, synthetic construct
  source 1..80: mol_type = other DNA
cttgtgggggtcggaccttggcacgatgatcaggtgcgccagggcttttggtggtctcatggatagcatgaaggcaagtt

SEQ ID NO: 90412 - DNA, 80 bp, synthetic construct
  source 1..80: mol_type = other DNA
ctaggagttcacaaaccccctgcagcaataagcctcgcaactatagagctcacgcccatatctctttactggaggcccgt

SEQ ID NO: 90413 - DNA, 80 bp, synthetic construct
  source 1..80: mol_type = other DNA
tggacaaggggccccaatcatgagaatccatacgagagcatggtccctcataaccagcgggcaacacagctcatggccct

SEQ ID NO: 90414 - DNA, 80 bp, synthetic construct
  source 1..80: mol_type = other DNA
attctggtgaggatatgtttacggtgtcttgcagagtcctgacccgtccagcccctgactttgagttcacgtttctggtg

SEQ ID NO: 90415 - DNA, 80 bp, synthetic construct
  source 1..80: mol_type = other DNA
ccgccaactgtagaatcaaagactaagccctttacactcccaattctaactcttggagaactatctaattctagattccc

SEQ ID NO: 90416 - DNA, 80 bp, synthetic construct
  source 1..80: mol_type = other DNA
ctgccccaatagacatgctgtacataaatcccagtgagacaattgtggtgaggtcacaaaatggccggtgtcttctggac

SEQ ID NO: 90417 - DNA, 80 bp, synthetic construct
  source 1..80: mol_type = other DNA
ggaacacttcaagggaccacccagctggcgcccacccaaatttgctccttcaggggcacgctggttcgccaggagtcgag

SEQ ID NO: 90418 - DNA, 80 bp, synthetic construct
  source 1..80: mol_type = other DNA
gtctgcagattcagtagattcagtagactcagctagacgaacaatgaaccatcctctctacgttcagctgaggaacctcg

SEQ ID NO: 90419 - DNA, 80 bp, synthetic construct
  source 1..80: mol_type = other DNA
atgggacatcatatgatccaacagatgaggtgccagcggttctgggtgccatagattttaaaggaactgtgtatggggtc

SEQ ID NO: 90420 - DNA, 80 bp, synthetic construct
  source 1..80: mol_type = other DNA
gctagtcaaagggacaccaaaggctctgtaggagcgacccgcgcccatgaagtgacaataaacaccagagatgctaaata

SEQ ID NO: 90421 - DNA, 80 bp, synthetic construct
  source 1..80: mol_type = other DNA
ctctccaaaacttggctctgtgttgatgcattctgaatccactgatttcttcagtgaccagcccatccgctttactccta

SEQ ID NO: 90422 - DNA, 80 bp, synthetic construct
  source 1..80: mol_type = other DNA
ttggtatgggggaggaaaatgattggagccaatgggatttgcctgattattctggtgccctcaccctcaacatgcaccta

SEQ ID NO: 90423 - DNA, 80 bp, synthetic construct
  source 1..80: mol_type = other DNA
gcccccgcagttgcccctgctttccctggtgagcgcattctcttctttagatcagtggtgccagctgctggtggttatgg

SEQ ID NO: 90424 - DNA, 80 bp, synthetic construct
  source 1..80: mol_type = other DNA
aaaaggtgaaatagactgtctcatcccacaggaatggattcagcatttctaccaggaggccgccccaacacaatccgcgg

SEQ ID NO: 90425 - DNA, 80 bp, synthetic construct
  source 1..80: mol_type = other DNA
ctggagacaaccccatagttgtgccatcaaatggctacttcagatttgaggcttgggttaatcaattctatacacttacc

SEQ ID NO: 90426 - DNA, 80 bp, synthetic construct
  source 1..80: mol_type = other DNA
tatgacttcaataaacaactccaattggcatcctttcaacatgacaaagagatgttgcagtcacaagttctggccactaa

SEQ ID NO: 90427 - DNA, 80 bp, synthetic construct
  source 1..80: mol_type = other DNA
atggaacgaggtattttgccccaaacagtatgaagacaaccagttattcaggccagctctccagtaaccctgtacataag

SEQ ID NO: 90428 - DNA, 80 bp, synthetic construct
  source 1..80: mol_type = other DNA
caatccacactaccccgtcccagcccttcaaaaactaatgttagtagtggttcttctagtgtgtatagttctttatcttc

SEQ ID NO: 90429 - DNA, 80 bp, synthetic construct
  source 1..80: mol_type = other DNA
tgcttcctcacaatcaactcattcaacggttttgactgcgggatccgggtcgtctaggacagctccctcctcctcaacag

SEQ ID NO: 90430 - DNA, 80 bp, synthetic construct
  source 1..80: mol_type = other DNA
cttccaccttgtctagaactagtgattgggtaagaggacaaaatgagagactcagcccgtttatgaatggtgctctccaa

SEQ ID NO: 90431 - DNA, 80 bp, synthetic construct
  source 1..80: mol_type = other DNA
ttcaataccaataggcagcctctcttcgctcacattcgtaggcgaggggagtcacagatttagtgaaaagattgattagg

SEQ ID NO: 90432 - DNA, 80 bp, synthetic construct
  source 1..80: mol_type = other DNA
actttgaactgcaagggcctgaggacctggctgtggagcttgtccccgtggtcatgggcggcgtagggatggttctcggc

SEQ ID NO: 90433 - DNA, 80 bp, synthetic construct
  source 1..80: mol_type = other DNA
gagattggacgaatatgaactgcagggcccaacccccacaacattcaacttcgaccgcaacaaggtgcttgcttttaggc

SEQ ID NO: 90434 - DNA, 80 bp, synthetic construct
  source 1..80: mol_type = other DNA
caaaccacaagcagaagatctggaggagaccaacaacgaggagggctgtccaaaacctaaaaatgatgaggaatttgtta

SEQ ID NO: 90435 - DNA, 80 bp, synthetic construct
  source 1..80: mol_type = other DNA
actagaggagaactctacagcgttcagtgttccccctcttagtcagagggagaacagggatgctaaggaaccactgactg

SEQ ID NO: 90436 - DNA, 80 bp, synthetic construct
  source 1..80: mol_type = other DNA
gaaacgagggggaggccatgctagaaggtggtgacaacaagggaacttactgtggagcaccaatattaggccatggaaat

SEQ ID NO: 90437 - DNA, 80 bp, synthetic construct
  source 1..80: mol_type = other DNA
cgggtgcagcgatagcagcacccctcactggtcagcaaaatataattgatccctggattatgaacaattttgtgcaagca

SEQ ID NO: 90438 - DNA, 80 bp, synthetic construct
  source 1..80: mol_type = other DNA
attccccccaattttccaattgacaatctaagtgcagcacagatcacaatgtgtccacatgtgattgtggacgtcagaca

SEQ ID NO: 90439 - DNA, 80 bp, synthetic construct
  source 1..80: mol_type = other DNA
gcctaattgcaatgctgtatacacctcttagagcaaataattctggggatgatgtcttcactgtgtcctgcagagtgcta

SEQ ID NO: 90440 - DNA, 80 bp, synthetic construct
  source 1..80: mol_type = other DNA
actagacctagtcctgacttctcatttaatttccttgtgccacctactgtggagtcaaagacaaaacccttttccctccc

SEQ ID NO: 90441 - DNA, 80 bp, synthetic construct
  source 1..80: mol_type = other DNA
tattctgaccatctctgaaatgtccaattctaggttcccagtaccaattgattctctgcacactagccctactgataata

SEQ ID NO: 90442 - DNA, 80 bp, synthetic construct
  source 1..80: mol_type = other DNA
ttgttgtccagtgccagaatgggcgcgtcacccttgacggtgagttgatgggcaccacccaactcttgcctagccaaatc

SEQ ID NO: 90443 - DNA, 80 bp, synthetic construct
  source 1..80: mol_type = other DNA
tgtgctttcaggggcgtactcaccagatcaacaagcagggccagtgaccaggccgatacagcagcccctaggttgtttaa

SEQ ID NO: 90444 - DNA, 80 bp, synthetic construct
  source 1..80: mol_type = other DNA
ttattattggcacataaaattggataatctaaatggaactccctatgatcctgcagaagacatgccaggccccctgggaa

SEQ ID NO: 90445 - DNA, 80 bp, synthetic construct
  source 1..80: mol_type = other DNA
caccagatttcctgggcaaagtctttggcgtggccagccagagagatcctgataccacgactagggcacatgaagcaaag

SEQ ID NO: 90446 - DNA, 80 bp, synthetic construct
  source 1..80: mol_type = other DNA
atagacacatcatctggccgtttcgccccaaaactaggctcactagagatatccactgaatctgctgatttcaatccaaa

SEQ ID NO: 90447 - DNA, 80 bp, synthetic construct
  source 1..80: mol_type = other DNA
caaaccaacaagattcaccccagttggcattggggttgaccaggctgagggagactttcaacaatggactctacccgact

SEQ ID NO: 90448 - DNA, 80 bp, synthetic construct
  source 1..80: mol_type = other DNA
atgctggcgcgatcacccacaacatgaacttggccccagctgtcgctcccaacttccctggtgagcagctcctcttcttc

SEQ ID NO: 90449 - DNA, 80 bp, synthetic construct
  source 1..80: mol_type = other DNA
cgctcacatttgccatcttctggtgggcgatccgacgggattctagactgcctggtcccccaagagtgggtacagcactt

SEQ ID NO: 90450 - DNA, 80 bp, synthetic construct
  source 1..80: mol_type = other DNA
ctaccaagaatcagccccctctcaatctcaagtggctctgattaggtacatcaaccctgataatggtagagtattatttg

SEQ ID NO: 90451 - DNA, 80 bp, synthetic construct
  source 1..80: mol_type = other DNA
aggccaagctgcacaaattaggtttcataactatagctaagaatggtaattctccaataactgtccccccaaatggatac

SEQ ID NO: 90452 - DNA, 80 bp, synthetic construct
  source 1..80: mol_type = other DNA
aatcactagcctgagctcacactcgtccgggtcgtctcgatccagcgggtccacagttgtcagctcaatatccactaaca

SEQ ID NO: 90453 - DNA, 80 bp, synthetic construct
  source 1..80: mol_type = other DNA
tcgcagaaggggggagtcaaatgtttagtgaaaagattatttttaaatttgatttaaaattacatttaatttggcatctt

SEQ ID NO: 90454 - DNA, 80 bp, synthetic construct
  source 1..80: mol_type = other DNA
aacggagaggatgaaatagtggtttcttacagtgttaaggatggtgtttccggcttgcctgacctttccaccgttaggca

SEQ ID NO: 90455 - DNA, 80 bp, synthetic construct
  source 1..80: mol_type = other DNA
aaattatccggagaaacgttcccctacacagcctttgacaacaactgttatgccttttgttgctgggtcctggacctaaa

SEQ ID NO: 90456 - DNA, 80 bp, synthetic construct
  source 1..80: mol_type = other DNA
tgcaccttcagaggggatgtcacccaagttggaaaaactaacagatacacaatgaatttggcctccccaaattggaacag

SEQ ID NO: 90457 - DNA, 80 bp, synthetic construct
  source 1..80: mol_type = other DNA
ttacgatccaacagaagataccccagcccctctaggaactccagatttcgtggggaagattcaaggtgtgctcacccaaa

SEQ ID NO: 90458 - DNA, 80 bp, synthetic construct
  source 1..80: mol_type = other DNA
aaaattcaatttgacactgacacaagtaatgatcttgacaccaaccagaacacaaagttcaccccagtcggcgttgtcca

SEQ ID NO: 90459 - DNA, 80 bp, synthetic construct
  source 1..80: mol_type = other DNA
ggaaggtgatgatacccaccagaaagaacccatacaatgggagctcccaagctattcaggcagaggcactcataatgtac

SEQ ID NO: 90460 - DNA, 80 bp, synthetic construct
  source 1..80: mol_type = other DNA
acctggcccccgctgtagcccctactttcccgggcgagcagctcctcttcttcagatctactatgcccggatgtggcggg

SEQ ID NO: 90461 - DNA, 80 bp, synthetic construct
  source 1..80: mol_type = other DNA
acctggcccccgctgtagcccctactttcccgggcgagcagctcctcttcttcagatctactatgcccggatgtggcgtg

SEQ ID NO: 90462 - DNA, 80 bp, synthetic construct
  source 1..80: mol_type = other DNA
cctcgggggcaccaccaggaagggctaatcttagggctgctgcccccgcccggggctcctctagcatgtcttctaaatct

SEQ ID NO: 90463 - DNA, 80 bp, synthetic construct
  source 1..80: mol_type = other DNA
tgtgctgtatctataccatttgttaaaatattactaggttctctgtcagatttgccaggtttaggatactttgatgactt

SEQ ID NO: 90464 - DNA, 80 bp, synthetic construct
  source 1..80: mol_type = other DNA
caaacattgacaagctgcacattctctaaggagtatgcctggaaagatttcttgaatgggattcattgtgatgttatacc

SEQ ID NO: 90465 - DNA, 80 bp, synthetic construct
  source 1..80: mol_type = other DNA
cagacactaacaagttgtacattctctaaggagtatgcctggaaagacttcctaaatgggattcattgtgatgttatacc

SEQ ID NO: 90466 - DNA, 80 bp, synthetic construct
  source 1..80: mol_type = other DNA
tgtgctgtatcaattccttttattaaaatcctccttggatcactatctgacctaccaggccttggttatttcgatgatct

SEQ ID NO: 90467 - DNA, 80 bp, synthetic construct
  source 1..80: mol_type = other DNA
cagacattgactagctgcacattctctaaagagtatgcatggaaagattttttgaataatgtacattgtgatgtgatacc

SEQ ID NO: 90468 - DNA, 80 bp, synthetic construct
  source 1..80: mol_type = other DNA
agcaaaagcaggggatactttcattaatcatgaagaccattatcgctttaagctacgttttctgtctggccttcggtcag

SEQ ID NO: 90469 - DNA, 80 bp, synthetic construct
  source 1..80: mol_type = other DNA
tatagttcctataaacaataataatagtaatagtattactagtaatagtagtagatataggagttataggttgataagtt

SEQ ID NO: 90470 - DNA, 80 bp, synthetic construct
  source 1..80: mol_type = other DNA
acgcgatttctatctaacaatgccatggtgctatatacagacgtatctcaatgggattcatcccaacacaatacgcaacc

SEQ ID NO: 90471 - DNA, 80 bp, synthetic construct
  source 1..80: mol_type = other DNA
ggaagctgacatacgttggatacaatggaagtgatacgcgtggacattataatttttcatttagatgtcaaaatgcagct

SEQ ID NO: 90472 - DNA, 80 bp, synthetic construct
  source 1..80: mol_type = other DNA
cgtataatgcagaattgttggttctgctggagaatgagaggactttggattttcatgattcaaatgtgaagagcttatat

SEQ ID NO: 90473 - DNA, 80 bp, synthetic construct
  source 1..80: mol_type = other DNA
ggatgtgttctaatggttctttgcagtgcagaatatgtatctgagaccataatttcagagatataaggaaaaaacaccct

SEQ ID NO: 90474 - DNA, 80 bp, synthetic construct
  source 1..80: mol_type = other DNA
caattaagttcagtatcttcattcgagaggttcgaaatatttcctaaggagagttcatggcccaaacacagcataggagc

SEQ ID NO: 90475 - DNA, 80 bp, synthetic construct
  source 1..80: mol_type = other DNA
aactgcatcatgctccaaacaagggaaaagcagtttttatacaaatctgctatggctaactgaaaaaaatgggtcttatc

SEQ ID NO: 90476 - DNA, 80 bp, synthetic construct
  source 1..80: mol_type = other DNA
caaatttgaccatgtcctatatgaacgacaaagagagagaagtccttgtgctatggggagtccatcatccgtccaacata

SEQ ID NO: 90477 - DNA, 80 bp, synthetic construct
  source 1..80: mol_type = other DNA
atagtctgaaggtgatgcaatccttttgtgtttttaattcccacctcattttccccttcattagtcttcttgcccctttc

SEQ ID NO: 90478 - DNA, 80 bp, synthetic construct
  source 1..80: mol_type = other DNA
ataccgctttattgtggagttgaccttgtcttctaagctcttgaaaaaacttgtctcttcttccccttcaaagcatatgt

SEQ ID NO: 90479 - DNA, 80 bp, synthetic construct
  source 1..80: mol_type = other DNA
aaactttgcatgttccttaattgctccgtattagcctggaaatcataattttcaaactttgtatagtacattataggatg

SEQ ID NO: 90480 - DNA, 80 bp, synthetic construct
  source 1..80: mol_type = other DNA
agttccgggcctcatgaaattcttaaactcagtaaatggtatgtggcactcatgctcaagatgttcagacagaccatagt

SEQ ID NO: 90481 - DNA, 80 bp, synthetic construct
  source 1..80: mol_type = other DNA
tcccaccactgacaagcacctttgaattttcaaaatgaactcatttatagatgttctaaacagatcctcaagggatgctt

SEQ ID NO: 90482 - DNA, 80 bp, synthetic construct
  source 1..80: mol_type = other DNA
agcaatggtgtcataaagctcagagaattccttaatcaaatctctggggttgactttctgaaaacacctcttgagtttcc

SEQ ID NO: 90483 - DNA, 80 bp, synthetic construct
  source 1..80: mol_type = other DNA
ggaggcagcaaagaaaacagtccattaggggagcggctggaggtggatacagagttaagtccacggttacaagaaatatc

SEQ ID NO: 90484 - DNA, 80 bp, synthetic construct
  source 1..80: mol_type = other DNA
gggggcacagagggcaacaacagcagtgtagacggtacaagtgacaatagcaatatagaaaatgtaaatccacaatgtac

SEQ ID NO: 90485 - DNA, 80 bp, synthetic construct
  source 1..80: mol_type = other DNA
tgaagggggagattggagaccaatagtgcaattcctgcgataccaacaaatagagtttataacatttttaggagccttaa

SEQ ID NO: 90486 - DNA, 80 bp, synthetic construct
  source 1..80: mol_type = other DNA
aggggattgtattatgtaaaggaagggtacaacacgttttatatagaatttaaaagtgaatgtgaaaaatatgggaacac

SEQ ID NO: 90487 - DNA, 80 bp, synthetic construct
  source 1..80: mol_type = other DNA
ttgtacattgtatattttgttttataccttttatgctttttgtatttttgtaataaaattatggtatcccaccgtgccgc

SEQ ID NO: 90488 - DNA, 80 bp, synthetic construct
  source 1..80: mol_type = other DNA
gggctaagggcacggcttgtaaatcgcgtcctttatcacagggcgattgcccccctttagaacttaaaaacacagttttg

SEQ ID NO: 90489 - DNA, 80 bp, synthetic construct
  source 1..80: mol_type = other DNA
gtatgcgtgcttcacctggcagctgtgtgtattctccctctccaagtggctctattgttacctctgactcccagttgttt

SEQ ID NO: 90490 - DNA, 80 bp, synthetic construct
  source 1..80: mol_type = other DNA
aggcgcacctggtattagtcattttcctgtccaggtgcgctacaacaattgcttgcataactatatccactccctatgta

SEQ ID NO: 90491 - DNA, 80 bp, synthetic construct
  source 1..80: mol_type = other DNA
catgaactataatatgactaagctgtgcatacatagtttatgcaaccgaaataggttgggcagcacatactatacttttc

SEQ ID NO: 90492 - DNA, 80 bp, synthetic construct
  source 1..80: mol_type = other DNA
aaaggagtctatgaattgcaagctcttgagttgaacatggaaactctcaacatgaccatgcccctgtcctgcacaaagaa

SEQ ID NO: 90493 - DNA, 80 bp, synthetic construct
  source 1..80: mol_type = other DNA
atggggcaaatcataacatttttccaagaggtgcctcatgtcatagaggaggttatgaacattgtccttattgccctcag

SEQ ID NO: 90494 - DNA, 80 bp, synthetic construct
  source 1..80: mol_type = other DNA
aaaggtgtttacgagctacaaaccctggagctggacatgcaaaaccttaatatgaccatgcccctgtcctgcacaaagaa

SEQ ID NO: 90495 - DNA, 80 bp, synthetic construct
  source 1..80: mol_type = other DNA
ctttggtccggccgctgccttggggccgccccactctacaccccctgttagtgatatctgggtgctaccgccaccccctg

SEQ ID NO: 90496 - DNA, 80 bp, synthetic construct
  source 1..80: mol_type = other DNA
aagagccccagggtgatgcagtgcttgctcctcctgctcctgaatatgctcggccgcccagccccggtaggcctaagggc

SEQ ID NO: 90497 - DNA, 80 bp, synthetic construct
  source 1..80: mol_type = other DNA
gacgctgccactgcgaccgctggcacacccagcacaaacagtgaaattcacaacaaagatgagaacccctcatcgaacat

SEQ ID NO: 90498 - DNA, 80 bp, synthetic construct
  source 1..80: mol_type = other DNA
gctctaggggcgagatcaaaacaatccgcccccggagttacctcaaacaacaagggcgggaaaaccaccatcccccccat

SEQ ID NO: 90499 - DNA, 80 bp, synthetic construct
  source 1..80: mol_type = other DNA
gctctaggggcgagatcaaaacaatccgcccccggagttacctcaaacaacaaggtcgggaaaaccaccatcccccccat

SEQ ID NO: 90500 - DNA, 80 bp, synthetic construct
  source 1..80: mol_type = other DNA
accccccccacccccaaatggtgaggacatagtaatcaagtacaccaaacaaggggacacgatcagtggagtgcccaccg

SEQ ID NO: 90501 - DNA, 80 bp, synthetic construct
  source 1..80: mol_type = other DNA
atatggactcatggacaccctaagagcaggcaacaaactgaaagaagtcaaaaccctggaacagtttaaggaagcagtga

SEQ ID NO: 90502 - DNA, 80 bp, synthetic construct
  source 1..80: mol_type = other DNA
aggatatacggataaaaccctgcaggataatttacaattccctggcctacgacttggaatctaatgggtcaggaaaagtc

SEQ ID NO: 90503 - DNA, 80 bp, synthetic construct
  source 1..80: mol_type = other DNA
agtgggggatcagagggtccaagctgacaatgaactcaactctgcgctcaacaagctgcgcgaggccagagtcagatact

SEQ ID NO: 90504 - DNA, 80 bp, synthetic construct
  source 1..80: mol_type = other DNA
atgtgaggtgtttccaagaaatgatctactcagtcctccagattgccggtgcagcttttgtcacatcaagaatagcacaa

SEQ ID NO: 90505 - DNA, 80 bp, synthetic construct
  source 1..80: mol_type = other DNA
acttcaacaaaatgtggtccaagacagaaaagcaaacggtcacccccacgggaccacctgtccccccagatgaagaatgg

SEQ ID NO: 90506 - DNA, 80 bp, synthetic construct
  source 1..80: mol_type = other DNA
acaccgcatatagcgtccctcccctggaccaaagggagaaggcagacgctaaggaacccttaaccggctcaataattgaa

SEQ ID NO: 90507 - DNA, 80 bp, synthetic construct
  source 1..80: mol_type = other DNA
gggtttcctccaacctgttcatcacttccacacatgtcatcccaccgaacatgactgaagcctttggagtaccaataaac

SEQ ID NO: 90508 - DNA, 80 bp, synthetic construct
  source 1..80: mol_type = other DNA
caaatacagatacacaggagtggagagttctgcaagatgagattcccaaaagccatcagacccgatgtgtctggcatgat

SEQ ID NO: 90509 - DNA, 80 bp, synthetic construct
  source 1..80: mol_type = other DNA
aagagccagatggtgaagccaccctcgaggggggggaaaaccatggaacatactgtggtgcgcccatattaggaccagtg

SEQ ID NO: 90510 - DNA, 80 bp, synthetic construct
  source 1..80: mol_type = other DNA
aagggccagatggtgaagccaccctcgaggggggggaaaaccatggaacatactgtggtgcgcccatattaggaccaggg

SEQ ID NO: 90511 - DNA, 80 bp, synthetic construct
  source 1..80: mol_type = other DNA
caagggtcaagggcggcccgtcgctgcagcaggtcatgagggagcagctcaagcccttcaccgcccctcgcgggaaacca

SEQ ID NO: 90512 - DNA, 80 bp, synthetic construct
  source 1..80: mol_type = other DNA
ccgagaccggcgattctggaggccgcaaaggaaaccatctgcaatgtgttggaacaaaccattgaaccatcccagaaatg

SEQ ID NO: 90513 - DNA, 80 bp, synthetic construct
  source 1..80: mol_type = other DNA
tgtggggctcagacttgggcacgatgatacgctgtgccagagcattcggtggtctcatggatgagatgaaggcaaactgt

SEQ ID NO: 90514 - DNA, 80 bp, synthetic construct
  source 1..80: mol_type = other DNA
gctgaggacctcttgtcacccagcgtcatggacgttggcgacttcaaaatcaccataaacgagggcttgccctctggggt

SEQ ID NO: 90515 - DNA, 80 bp, synthetic construct
  source 1..80: mol_type = other DNA
gaaacgatgatcccacactctcagagacctgttcaactgatgtctctgcttggtgaagcagctctacatggaccagcatt

SEQ ID NO: 90516 - DNA, 80 bp, synthetic construct
  source 1..80: mol_type = other DNA
ctacaaaaaggtcagcaaattggtcatcaccgaactcaaggaaggtggaatggatttctatgtacccaggcaggaaccca

SEQ ID NO: 90517 - DNA, 80 bp, synthetic construct
  source 1..80: mol_type = other DNA
cccattcctagcccatttggctagaatgtataatgggtatgctggaggtgttgatgtccaagtcatcatggcaggtaatg

SEQ ID NO: 90518 - DNA, 80 bp, synthetic construct
  source 1..80: mol_type = other DNA
ccttcactgctggtaaggtcatctttgctgcagtgccaccccactttccagttgagagtctcagtcccccccaaattact

SEQ ID NO: 90519 - DNA, 80 bp, synthetic construct
  source 1..80: mol_type = other DNA
atgtttccccatatgatagtggatgttagaactcttgaacctataaatatccccatacctgatgttaggaacaatttctt

SEQ ID NO: 90520 - DNA, 80 bp, synthetic construct
  source 1..80: mol_type = other DNA
ccattacaatcagaacaatgagccccgcatgaagttggtggccatgttgtacactcccctcagatcaaatggttctgctg

SEQ ID NO: 90521 - DNA, 80 bp, synthetic construct
  source 1..80: mol_type = other DNA
cgacatgctgcacaccagcccaaatgaaaacatagtggtccaaccccagaatggcaggtgcacacttgagggcgagttgc

SEQ ID NO: 90522 - DNA, 80 bp, synthetic construct
  source 1..80: mol_type = other DNA
taggcacaacacagctggtgactccaaacatctgctccctccgtggtgcaatcactggacatgagggcaatgatgacaat

SEQ ID NO: 90523 - DNA, 80 bp, synthetic construct
  source 1..80: mol_type = other DNA
ccccagacttcataggtgaggtgtacggagtgctctcccaaagaaacaggaaaataacttctggccacactgcccccgca

SEQ ID NO: 90524 - DNA, 80 bp, synthetic construct
  source 1..80: mol_type = other DNA
aacaggtcccatgaagctgtcatttccacaaggtgcaacaaatttacaccaaaattgggctcagtgatgattgccacttg

SEQ ID NO: 90525 - DNA, 80 bp, synthetic construct
  source 1..80: mol_type = other DNA
gaatactgatgatattgaaaatgaacccaccaaattcacaccagtagggcttgaaagccctgattccttccaccagtggg

SEQ ID NO: 90526 - DNA, 80 bp, synthetic construct
  source 1..80: mol_type = other DNA
gttttggatctgaacgattcttggctcaacagaaaattcgtgtcaagaactacaggtttctacaggccctatcaagattg

SEQ ID NO: 90527 - DNA, 80 bp, synthetic construct
  source 1..80: mol_type = other DNA
atttgccaagttactcaggggctttgactctcaacatggggctcgctccagctgtgtacccgacctaccccggcgagcag

SEQ ID NO: 90528 - DNA, 80 bp, synthetic construct
  source 1..80: mol_type = other DNA
atcctcttcttccgctcgtacatccctcttaagggtgggtatgggaactcagtaattgattgtcttttgccacaggagtg

SEQ ID NO: 90529 - DNA, 80 bp, synthetic construct
  source 1..80: mol_type = other DNA
gatccaacacttctaccaagaatcagccccctcacagtcactagtggctttggttaggtatgtcaaccccgaaacaggac

SEQ ID NO: 90530 - DNA, 80 bp, synthetic construct
  source 1..80: mol_type = other DNA
gcgtccttttcgaggccaaattgcacaagcaagggtacatgaccgtcgccaagactggtgacagccccatcaatgccccc

SEQ ID NO: 90531 - DNA, 80 bp, synthetic construct
  source 1..80: mol_type = other DNA
gccaatggctatttcagatttgactcttgggttagtccattttattcacttgcccccatgggaactgggaacgggcgtag

SEQ ID NO: 90532 - DNA, 80 bp, synthetic construct
  source 1..80: mol_type = other DNA
caggtgctaatgctatcaatcagaaagttgattttgagaacaataagtatttgcaaagtgcatcttttaatcatgataag

SEQ ID NO: 90533 - DNA, 80 bp, synthetic construct
  source 1..80: mol_type = other DNA
agtggaacaaggtactgggcaccaaacgccaccgccacaacctcaatgtcaggtggctttacaggacaaactgtgcaccg

SEQ ID NO: 90534 - DNA, 80 bp, synthetic construct
  source 1..80: mol_type = other DNA
gaacagaaaaccattgccaaccatggacgaggggaagctcaaaaaggtggccaatgtgttcctgtgcggtctgtctgggc

SEQ ID NO: 90535 - DNA, 80 bp, synthetic construct
  source 1..80: mol_type = other DNA
gaccgcaccaaatttcaaaacaagccagacccccaagtctgtgcccagcagtgggtcctcaattagatcaaacccaaccc

SEQ ID NO: 90536 - DNA, 80 bp, synthetic construct
  source 1..80: mol_type = other DNA
aactcaccagtctgagctcacattcatctgggtcatctcgatccagtgggtccacagttattagttcactaccatcttcc

SEQ ID NO: 90537 - DNA, 80 bp, synthetic construct
  source 1..80: mol_type = other DNA
agtaggactagggaatgggttaaccaacaaaatctcaatttggaaccacacatgcctgggtctaccaggatagcttttgt

SEQ ID NO: 90538 - DNA, 80 bp, synthetic construct
  source 1..80: mol_type = other DNA
ttcatagaaggggggagtcaaaagtttagtgaaaagaatgttttaaatttgatttgatttggatttaattggattctttt

SEQ ID NO: 90539 - DNA, 80 bp, synthetic construct
  source 1..80: mol_type = other DNA
tgatcaccaggcctatcaaggacctcataggcaaactgaagccattaaacctcctcaacatcatcgccaactgtgactgg

SEQ ID NO: 90540 - DNA, 80 bp, synthetic construct
  source 1..80: mol_type = other DNA
tttcgtcgcgtccttgctgggcgactatgaaatgcagggccctgaggacatcgcatctgaaatcgtcccagtcatccttg

SEQ ID NO: 90541 - DNA, 80 bp, synthetic construct
  source 1..80: mol_type = other DNA
catctatcgcaaggaagatgcttacatctctgtagtgtcttcaaactataacagaagattccacccagaaataacaagga

SEQ ID NO: 90542 - DNA, 80 bp, synthetic construct
  source 1..80: mol_type = other DNA
ataagtaccgatagcaatttcttagtgagacagaatgtagtggcaataactgattggtcagggtacagtggaagtttcgt

SEQ ID NO: 90543 - DNA, 80 bp, synthetic construct
  source 1..80: mol_type = other DNA
acgggccagcatcgtacaaaatcttcagaattgaagaggggaaaattactaaatctaaagagttggatgcacccaattcc

SEQ ID NO: 90544 - DNA, 80 bp, synthetic construct
  source 1..80: mol_type = other DNA
gcctactgggacagagcagcctcaggggactacagagaagttgggaagccctgaaatacctgaaaagccttgtgcagtat

SEQ ID NO: 90545 - DNA, 80 bp, synthetic construct
  source 1..80: mol_type = other DNA
tgagaataagaacttttactatacctatacttatacctatatttgtgtgcaccatactatatataaaataagagattgtg

SEQ ID NO: 90546 - DNA, 80 bp, synthetic construct
  source 1..80: mol_type = other DNA
tcaacacaaaaaaaaataaattcattaattaaaaaaattagggaaagaacagaacactgtgccaatgagtgtgaaggata

SEQ ID NO: 90547 - DNA, 80 bp, synthetic construct
  source 1..80: mol_type = other DNA
tatcagcctaagcccgtgtgtaaaggtaacatctgtgtccttaaactgtacatatgttactgttaccaacaattctggct

SEQ ID NO: 90548 - DNA, 80 bp, synthetic construct
  source 1..80: mol_type = other DNA
attaagaaggtacttttctaaagcaataagatttgaaccatcctcaggaggagacctactacttactacacatagcttta

SEQ ID NO: 90549 - DNA, 80 bp, synthetic construct
  source 1..80: mol_type = other DNA
cttgtagaggaggatatttctactgcaatacatcaaacctgattaataataatataaacattgcttcagcgagcacaata

SEQ ID NO: 90550 - DNA, 80 bp, synthetic construct
  source 1..80: mol_type = other DNA
agaagtacgcgggaggtgggttgcagtattggggtgaggaattaaaacagagtggttttagtagcaatgataccatagca

SEQ ID NO: 90551 - DNA, 80 bp, synthetic construct
  source 1..80: mol_type = other DNA
atagtcgtagaggaaggaacagatagaattatacaagtattacaatggattggtagagctagcaacaacataccaggaag

SEQ ID NO: 90552 - DNA, 80 bp, synthetic construct
  source 1..80: mol_type = other DNA
gaggatctaggagcatatcaaaatttagcgaaacctgagacacatacaaccagcaacactggcgccagcactggtgttca

SEQ ID NO: 90553 - DNA, 80 bp, synthetic construct
  source 1..80: mol_type = other DNA
acccgataaagcttcaccgccaaggggaaatggtacatctagccccatcaactttaaatgtatgggcatgggtaatagaa

SEQ ID NO: 90554 - DNA, 80 bp, synthetic construct
  source 1..80: mol_type = other DNA
actagtgacttatacatgggagagaggagaaataagaaactgctctgtcactgctaccacagacatagaagataggagga

SEQ ID NO: 90555 - DNA, 80 bp, synthetic construct
  source 1..80: mol_type = other DNA
aaaatgaagatgcttcttatcataatcgtggtataatacaaattaataatattaataatacctataccttgatgttgagt

SEQ ID NO: 90556 - DNA, 80 bp, synthetic construct
  source 1..80: mol_type = other DNA
agttgtaccacttctatcattgccggtccctgtccatccgtatcccttgatcctattcccaattgttattgtgccgcggc

SEQ ID NO: 90557 - DNA, 80 bp, synthetic construct
  source 1..80: mol_type = other DNA
tggttttcctattcggaatggtaatgataacaacgtcgctggaccgggaccaagtgatattgtcaccccaggaccatgtg

SEQ ID NO: 90558 - DNA, 80 bp, synthetic construct
  source 1..80: mol_type = other DNA
atatgtaagaaaaagaatgagtatgctcttttttttaatattgatgtagtaccacttgatgagaattctaatagtcctag

SEQ ID NO: 90559 - DNA, 80 bp, synthetic construct
  source 1..80: mol_type = other DNA
ttaagactgtttaatgggtccacgggtaaagggaccagggggaatggaaggtcaaggaacccatctaagtcagacgtcac

SEQ ID NO: 90560 - DNA, 80 bp, synthetic construct
  source 1..80: mol_type = other DNA
tatcactttcccatgcagaataatccaatttttgccaggagcaggggtagcaatcaacgccctttcccgtaccggaaaca

SEQ ID NO: 90561 - DNA, 80 bp, synthetic construct
  source 1..80: mol_type = other DNA
ttacatgtattctactggttacaggattactgctggcagggggtggtggtaacgatactaaagggaaagagatcttcaga

SEQ ID NO: 90562 - DNA, 80 bp, synthetic construct
  source 1..80: mol_type = other DNA
ctgcactatatacaggataatggacataaggcaagagatgtggccagcaccgtatgcacctatgattgcccgcacgatta

SEQ ID NO: 90563 - DNA, 80 bp, synthetic construct
  source 1..80: mol_type = other DNA
caagaacgtcaacaatcacttcaattctcccaagacttcttctaaggaatgagacaggtaatgagaatgagacacacctg

SEQ ID NO: 90564 - DNA, 80 bp, synthetic construct
  source 1..80: mol_type = other DNA
tatgagacatatgaacaacctggcagagacaataggagaaataattggaggaaagatttacaggcatatgaagtggcatc

SEQ ID NO: 90565 - DNA, 80 bp, synthetic construct
  source 1..80: mol_type = other DNA
acttggagcaataacaatagcgccgaagagagataagagaacagtggagaaagcagaaggagcactaggcattcgagctg

SEQ ID NO: 90566 - DNA, 80 bp, synthetic construct
  source 1..80: mol_type = other DNA
aataaaaccaattgaaaccttggggcagggggtaggaaaagcaattattgccccctccattaaaggaaaattacctggta

SEQ ID NO: 90567 - DNA, 80 bp, synthetic construct
  source 1..80: mol_type = other DNA
cttccaaattcccaggcttaccactggccccgagtaggggtgaaaaaataggaacctatggaaatttggcaaaaagagaa

SEQ ID NO: 90568 - DNA, 80 bp, synthetic construct
  source 1..80: mol_type = other DNA
gtttcatgcatacttgcactttcaatgctaccacagaaataagagataagaatttcaaaaagtatgctcttttttatatg

SEQ ID NO: 90569 - DNA, 80 bp, synthetic construct
  source 1..80: mol_type = other DNA
cttgatataataccacttgatgatgacaataataacagctcgaacagctctacttatacgtcaataaattgtaccacctc

SEQ ID NO: 90570 - DNA, 80 bp, synthetic construct
  source 1..80: mol_type = other DNA
ataggagttaactcatcctcaagacgggacctatatatcacaacacacattttctattgtaatacatcaggcctgtttaa

SEQ ID NO: 90571 - DNA, 80 bp, synthetic construct
  source 1..80: mol_type = other DNA
tggtacatacatgcctacatacatgcctaatggtacagaaagtaattcaaactcaactatcacaatcccatgcagaataa

SEQ ID NO: 90572 - DNA, 80 bp, synthetic construct
  source 1..80: mol_type = other DNA
ataggagtaccaccatttgtattaccactattcataccattatttgtggggaccatattatacttaaaatataggaaatt

SEQ ID NO: 90573 - DNA, 80 bp, synthetic construct
  source 1..80: mol_type = other DNA
gaaaaattgctctttctacataaccacaaaactaaaacttaagattcgacaaaaatttgcacttttttatgatcctgaca

SEQ ID NO: 90574 - DNA, 80 bp, synthetic construct
  source 1..80: mol_type = other DNA
acttgatcttgatagataatgataattccatgtatttgttaaattgtaatacctctaccataacccaaacctgtccctgg

SEQ ID NO: 90575 - DNA, 80 bp, synthetic construct
  source 1..80: mol_type = other DNA
gtctcttttgattttgaccctattccttattgtgatcgtgctgcttatggtattctgattcgtaataataataaattcaa

SEQ ID NO: 90576 - DNA, 80 bp, synthetic construct
  source 1..80: mol_type = other DNA
tgtaacaggaccatgccctagtgtcaacgcaggacaatgtacacgtggaattggaactatgccatcaactccacttctgt

SEQ ID NO: 90577 - DNA, 80 bp, synthetic construct
  source 1..80: mol_type = other DNA
tgaatggaaatataacaaaagaggacatagtaattatatctgaatatttggataacaatgccaatgtaatcataatacaa

SEQ ID NO: 90578 - DNA, 80 bp, synthetic construct
  source 1..80: mol_type = other DNA
cttaataaaactgtacctgttaattgtactagacccagacataatactagaacaagagtaaggatgagaccaggacaaag

SEQ ID NO: 90579 - DNA, 80 bp, synthetic construct
  source 1..80: mol_type = other DNA
actctatgtctcagcagatataataggaaatataagactagcacattgtcattgcatcggaagtggacgttatgacactt

SEQ ID NO: 90580 - DNA, 80 bp, synthetic construct
  source 1..80: mol_type = other DNA
tagaattggtaaaactaaatacattagaacactgtctatatcataaaacaataatgtttacacatccatcaggaggagca

SEQ ID NO: 90581 - DNA, 80 bp, synthetic construct
  source 1..80: mol_type = other DNA
ctacctactactacacatacacttaattgtggaggagaattattctattgcagtacatcatccctgcttaattttacttg

SEQ ID NO: 90582 - DNA, 80 bp, synthetic construct
  source 1..80: mol_type = other DNA
gcgaagtttattttgccatgcccaagccccgttccaggaaactcataataatagtacaaataacatccccttcccatgca

SEQ ID NO: 90583 - DNA, 80 bp, synthetic construct
  source 1..80: mol_type = other DNA
gcccgatcagacaaatcataatcatgtggcaggggctagaggtagcaatatctacccctccccctaacggtacagtatca

SEQ ID NO: 90584 - DNA, 80 bp, synthetic construct
  source 1..80: mol_type = other DNA
tgtacttctaatttcactggcgtagtcctgctacgtgctggagggcgtcatcggggaaatgaaagtgggacagagacatt

SEQ ID NO: 90585 - DNA, 80 bp, synthetic construct
  source 1..80: mol_type = other DNA
acttaaatatctggaataatgacaaggatgatcagatgcatgaggatctagtcaatatatggaaccaatgcgtacaactc

SEQ ID NO: 90586 - DNA, 80 bp, synthetic construct
  source 1..80: mol_type = other DNA
tgtataaagttggtcacgttgactgtcagtgtcaaaagtgtaaatggtactgataatagtactaccagtaatactactag

SEQ ID NO: 90587 - DNA, 80 bp, synthetic construct
  source 1..80: mol_type = other DNA
tacggatagtgagacctctaataatactaccagtgggaataatgttacctataatgatgccatggaaatgacaaattgct

SEQ ID NO: 90588 - DNA, 80 bp, synthetic construct
  source 1..80: mol_type = other DNA
ccgagaaggctaaataaaaatatgaggatggggcaaggactaggactggaagcgcatgcccctcccgtaactataaattt

SEQ ID NO: 90589 - DNA, 80 bp, synthetic construct
  source 1..80: mol_type = other DNA
tgtctgtgaatttaacgttacacgaataccaatgactagagatagtggtattaataatactaatactacctacacacccg

SEQ ID NO: 90590 - DNA, 80 bp, synthetic construct
  source 1..80: mol_type = other DNA
cacgaggaagaagaaaggacaatgacagatgtaaaatggatatatataaatataaactagttgaacctgtacgactagga

SEQ ID NO: 90591 - DNA, 80 bp, synthetic construct
  source 1..80: mol_type = other DNA
ataacatccgcaaagacaaaaatgatagagatagagagaaaagaaatagcactgggagttataactattatcttcgtgtt

SEQ ID NO: 90592 - DNA, 80 bp, synthetic construct
  source 1..80: mol_type = other DNA
cttggcagcaaccagtatgactacggcctcggcgtcgctgacgctgacggcacagacttaccagtcagtgacaggagtat

SEQ ID NO: 90593 - DNA, 80 bp, synthetic construct
  source 1..80: mol_type = other DNA
acttgcaaatcaatatgctgatgcctatagatgagcagcagcatctagctctgctgctactcatagtctggtgtattcag

SEQ ID NO: 90594 - DNA, 80 bp, synthetic construct
  source 1..80: mol_type = other DNA
cctcccaagtcaagagtcgtggctgataacagatacgtggatcaggagtacataggtacttggaagcgctgcctgcctgg

SEQ ID NO: 90595 - DNA, 80 bp, synthetic construct
  source 1..80: mol_type = other DNA
caacgtcaaccacgtgactgctgcttcaccttgccactgcccttgtagtaataaatcttatgaagagatttggaacaaca

SEQ ID NO: 90596 - DNA, 80 bp, synthetic construct
  source 1..80: mol_type = other DNA
aacaggcattctgtaacctcagtaggccacaatgggaagatactttaggaaaaatagttaaaaaattaagacaaaatttt

SEQ ID NO: 90597 - DNA, 80 bp, synthetic construct
  source 1..80: mol_type = other DNA
agaggaccaaaaaaaattgttctttcaatatgaccccagtattaagtggtaaacagcaaaaaatgtctgcactcttttat

SEQ ID NO: 90598 - DNA, 80 bp, synthetic construct
  source 1..80: mol_type = other DNA
gcagtagtgttattcaagtaatagccatattacgggcaataggagtttggaatcgggaggaatcaatttgctctttcaat

SEQ ID NO: 90599 - DNA, 80 bp, synthetic construct
  source 1..80: mol_type = other DNA
ggccgacaacaacaagaaatggcagcagaagatcgtagcgaagcgccgaggcaccctccaggtagtcatcaaaaaactgg

SEQ ID NO: 90600 - DNA, 80 bp, synthetic construct
  source 1..80: mol_type = other DNA
taataataagtgttgcaacaaaaaaagtaatcatcattttgtagtttgtcatccgaaaaaaggattcgtcatttcttacg

SEQ ID NO: 90601 - DNA, 80 bp, synthetic construct
  source 1..80: mol_type = other DNA
gcaggaagaagaggagacagcgaagaagtcctcctaccagcagggatgatcatcataatattgtatcacagcagtaagta

SEQ ID NO: 90602 - DNA, 80 bp, synthetic construct
  source 1..80: mol_type = other DNA
tcacactaataattgtgtggaccgtgtcaaccatagaatatataaagttggtaagactggggagactaaagaggttaaat

SEQ ID NO: 90603 - DNA, 80 bp, synthetic construct
  source 1..80: mol_type = other DNA
gaacgcccaattctgtgcatcctatgcttcagatgatgacgcatatgaccctaatgtccgggctgcccgggccagtgttg

SEQ ID NO: 90604 - DNA, 80 bp, synthetic construct
  source 1..80: mol_type = other DNA
ctagtgaccctacccaacctaacatacatttgatacatgtgacagatgagtctaacgagtgtaacatgtgcatgattgag

SEQ ID NO: 90605 - DNA, 80 bp, synthetic construct
  source 1..80: mol_type = other DNA
cagatgcattcgatgcttgccgatctatgcaatctatgccagcagccccgtgtaccgttagcaacgctctgtgtcccctg

SEQ ID NO: 90606 - DNA, 80 bp, synthetic construct
  source 1..80: mol_type = other DNA
tgtttgtttgaattgcacgactgtgaacgccaacaacaccaacaccaccagcaccagtaccccgactaccgccaccactg

SEQ ID NO: 90607 - DNA, 80 bp, synthetic construct
  source 1..80: mol_type = other DNA
tcggccgtcaacgcgaggatatggacaaggatatgcacaactgctctttctcttccactacgactacaggattaagagat

SEQ ID NO: 90608 - DNA, 80 bp, synthetic construct
  source 1..80: mol_type = other DNA
gagaaagcatattcactttttttctatcatcttgatctagttcctagttgcacatcagtgacggatgctagtactagcag

SEQ ID NO: 90609 - DNA, 80 bp, synthetic construct
  source 1..80: mol_type = other DNA
atcatatagcttacatgcttgccacttagccttacagccttggcttccaacggtggatgcatccttggagagcatacccc

SEQ ID NO: 90610 - DNA, 80 bp, synthetic construct
  source 1..80: mol_type = other DNA
tttattataatcctccaggtagttcaagtatagagagttgtaataaggcgacaagcagaggggcaccgtccttcatcatc

SEQ ID NO: 90611 - DNA, 80 bp, synthetic construct
  source 1..80: mol_type = other DNA
gtcaccgcacaacaaactcctcgaagaaaggcgccagtggcatctcaactactaatatatagtagtatagcagcagagaa

SEQ ID NO: 90612 - DNA, 80 bp, synthetic construct
  source 1..80: mol_type = other DNA
tttaaacaccacaactactagttttagttgtggaggagacttcttctgttgtactacctccagactgtttaatttttact

SEQ ID NO: 90613 - DNA, 80 bp, synthetic construct
  source 1..80: mol_type = other DNA
atggcggcctgcagggggcgacagcggcgaccaacagtgatccaactataactatccattgcagcataatgcaactaatt

SEQ ID NO: 90614 - DNA, 80 bp, synthetic construct
  source 1..80: mol_type = other DNA
aatatgtggcagcgagcaggacgaccaacatatgcccctcccatcccaggaatgatgacgtgtagatcatccatcactgg

SEQ ID NO: 90615 - DNA, 80 bp, synthetic construct
  source 1..80: mol_type = other DNA
agaataagaagaggctggaagcagctttgcaataacatggggagcaaaaggtcaaaaaagtcctgcagtgggcggcctgt

SEQ ID NO: 90616 - DNA, 80 bp, synthetic construct
  source 1..80: mol_type = other DNA
ggcaacagtactagtaatactggcaacagtactagtaataatggcactaggataaatgagatgcggggagaaataaaaaa

SEQ ID NO: 90617 - DNA, 80 bp, synthetic construct
  source 1..80: mol_type = other DNA
ggggatctagaagtcacaaaaccaagttttaaatgtaaatggggatttttcttatccaatcccacgattgtgtttacgaa

SEQ ID NO: 90618 - DNA, 80 bp, synthetic construct
  source 1..80: mol_type = other DNA
tccggcaaggagggccaggaaagggagccggtggttcttattttggaccccgggacccttccaggaagtcacccaaaaac

SEQ ID NO: 90619 - DNA, 80 bp, synthetic construct
  source 1..80: mol_type = other DNA
tgctaacgttgatgctaacgatgctggtgacttatcacaggaagaaataaaagatggattattcaatgcatccaccgatg

SEQ ID NO: 90620 - DNA, 80 bp, synthetic construct
  source 1..80: mol_type = other DNA
taagcgctgagataagggatgagtatgcgatagagtatacacttgatatagtaccagttatagttactgtgactatttca

SEQ ID NO: 90621 - DNA, 80 bp, synthetic construct
  source 1..80: mol_type = other DNA
ttaacaagtcatcaggaggggacctagaagttacaacacatagctctaattgtagaggagagtttgtctattgcgataca

SEQ ID NO: 90622 - DNA, 80 bp, synthetic construct
  source 1..80: mol_type = other DNA
tcagacctgctcactacatcagttagtgttcaaaaagtactagttatcactagtacagatgccatcatactccgcatgcc

SEQ ID NO: 90623 - DNA, 80 bp, synthetic construct
  source 1..80: mol_type = other DNA
aaatacaacacattataagcatgtggcagtgagtacgacgagcattgtatgcccccctcctatgaaaggcatgcgtagca

SEQ ID NO: 90624 - DNA, 80 bp, synthetic construct
  source 1..80: mol_type = other DNA
gtacatgcactatcacaggtactactgacctcagggatggaaggactgactatcacagcatgtacatagtcagacctgga

SEQ ID NO: 90625 - DNA, 80 bp, synthetic construct
  source 1..80: mol_type = other DNA
ggggattacagagggggtgggataccctgaattatctgcgaagtcttgttcagtatagaagtaaggagataaaaaagagt

SEQ ID NO: 90626 - DNA, 80 bp, synthetic construct
  source 1..80: mol_type = other DNA
gaagcaggggggcaatagatcggggggcaagtggtcaaaatgtagcccagtggggggacatataatacgagaaaggataa

SEQ ID NO: 90627 - DNA, 80 bp, synthetic construct
  source 1..80: mol_type = other DNA
gtggggggacatataatacgagaaaggataacaccagatggcccagcagcagagggagtaggagcagcgtctcaagactt

SEQ ID NO: 90628 - DNA, 80 bp, synthetic construct
  source 1..80: mol_type = other DNA
atggagaataaaacaaattattaacatggggaaaggaataaggcgagcaatgtatgccccttccagtgcaagccaaatct

SEQ ID NO: 90629 - DNA, 80 bp, synthetic construct
  source 1..80: mol_type = other DNA
gagagaagtgttagtgtggagatttaacagcagattggcatttgaacacaaggcccgactgaagcatccggagtattacc

SEQ ID NO: 90630 - DNA, 80 bp, synthetic construct
  source 1..80: mol_type = other DNA
tgctctttcaatatgaccgctcatttaagggataccaacaacaaagtgtactcactttttaatggatctgacgtaactca

SEQ ID NO: 90631 - DNA, 80 bp, synthetic construct
  source 1..80: mol_type = other DNA
aattaatgaaacgcatgggacctataaactgctgagttgtaatacctcatccattaaaaaaccttggccaatggaatcct

SEQ ID NO: 90632 - DNA, 80 bp, synthetic construct
  source 1..80: mol_type = other DNA
ttgacccaatccccctacttaatcgagccccagccggtattgggctcctaaagggtaaggatacaaattccagtgggaca

SEQ ID NO: 90633 - DNA, 80 bp, synthetic construct
  source 1..80: mol_type = other DNA
agaccttgcatgaaggtggccatagcaaaatggtcacctggaatcaaggcaccggtgtcaactcagctgctgttaaatgg

SEQ ID NO: 90634 - DNA, 80 bp, synthetic construct
  source 1..80: mol_type = other DNA
agtttagagctaaaaaagagtgccattgatctatttgataccacagcaatagtagtagctgaaggaacagatagggttat

SEQ ID NO: 90635 - DNA, 80 bp, synthetic construct
  source 1..80: mol_type = other DNA
aatagtggtgtggaccaaagaatatatagaatataggaaattggtaaaacaaagaaaaataaacgggctaattaaaaaaa

SEQ ID NO: 90636 - DNA, 80 bp, synthetic construct
  source 1..80: mol_type = other DNA
ttagggaaaaagaaaaaaaaaggggaaatgaaaaggaaggggaaacgaaggaattggcaacaaggaggaataggggaaac

SEQ ID NO: 90637 - DNA, 80 bp, synthetic construct
  source 1..80: mol_type = other DNA
aggaaggggaaacgaaggaattggcaacaaggaggaataggggaaaccttaggctttgggaagttaggggtttgtaaggg

SEQ ID NO: 90638 - DNA, 80 bp, synthetic construct
  source 1..80: mol_type = other DNA
cttaggctttgggaagttaggggtttgtaaggggggagaaaaattgtggggcacagttaattatggggaaccggggggga

SEQ ID NO: 90639 - DNA, 80 bp, synthetic construct
  source 1..80: mol_type = other DNA
agaaaccaaaacgtcctttatttggggcaccaaatgctaaagcatataaaaagaaacggcataaggttggggccaacggc

SEQ ID NO: 90640 - DNA, 80 bp, synthetic construct
  source 1..80: mol_type = other DNA
tgggggcccccaagaccctgcccacggaaagtagtattgggaaaggttggaaatgtaatagaaagttatatcgtgtggaa

SEQ ID NO: 90641 - DNA, 80 bp, synthetic construct
  source 1..80: mol_type = other DNA
tatcactctcacatgcccaagaaaactaattataaacatgtggcaggaattagggaaagggaaggatgcgcctcccattc

SEQ ID NO: 90642 - DNA, 80 bp, synthetic construct
  source 1..80: mol_type = other DNA
caagccaaagacaatgtacatcttccattaccggactgctattgctaatagatggaggtttagacaacaccaacaacgag

SEQ ID NO: 90643 - DNA, 80 bp, synthetic construct
  source 1..80: mol_type = other DNA
accttcagacctggaggaggagatataagagataattggaaaagtggaatatataaatattatgcattaaaaatagaacc

SEQ ID NO: 90644 - DNA, 80 bp, synthetic construct
  source 1..80: mol_type = other DNA
taccggggtttggagctaaaaaagagtgatattagtatgcgtgataccattgcaatagcagtagcagaaggaacagatag

SEQ ID NO: 90645 - DNA, 80 bp, synthetic construct
  source 1..80: mol_type = other DNA
taccacagcaatagcagtagctgggtggccagagcagtagatagaaatagaacaaaacctttgtagatgatacaaagggt

SEQ ID NO: 90646 - DNA, 80 bp, synthetic construct
  source 1..80: mol_type = other DNA
agtagatagaaatagaacaaaacctttgtagatgatacaaagggttttacgataacatggggggcaacaggtggaaaagt

SEQ ID NO: 90647 - DNA, 80 bp, synthetic construct
  source 1..80: mol_type = other DNA
agcatcatggtggggcgtgaggaggggagaagaatagagcatcctcctcctccagcagcagcagtaggagcagcatttca

SEQ ID NO: 90648 - DNA, 80 bp, synthetic construct
  source 1..80: mol_type = other DNA
agatgaagataatcatcgagcagccgcaaccagcaacattaatccctctgagagagtcgtgcgggacgcgcaacaggaag

SEQ ID NO: 90649 - DNA, 80 bp, synthetic construct
  source 1..80: mol_type = other DNA
cccctactacggaagaaatgaaaaactgatctttcaatatctgctctttcattatcgataagatgcaaaaggaatataca

SEQ ID NO: 90650 - DNA, 80 bp, synthetic construct
  source 1..80: mol_type = other DNA
cttttttatccacttgatcttgccctagatattgttaataagagtaataatgatagtactacctaaccgttgataagttg

SEQ ID NO: 90651 - DNA, 80 bp, synthetic construct
  source 1..80: mol_type = other DNA
tatcacctcaacccctacaacattacgtccacctgttacctttgatccatttcccatatattattgtgccccggctggtt

SEQ ID NO: 90652 - DNA, 80 bp, synthetic construct
  source 1..80: mol_type = other DNA
ctaattaaacaaagagatggtggaaaacgataaaaaacaaactcctcccttaaatgaagacttttcaagacctggaggag

SEQ ID NO: 90653 - DNA, 80 bp, synthetic construct
  source 1..80: mol_type = other DNA
tcgaaatgaaaaattgttctttcaatacaaccgcagacctaagagataagagacaaacagcccatgcagttttttctaca

SEQ ID NO: 90654 - DNA, 80 bp, synthetic construct
  source 1..80: mol_type = other DNA
ttgctctttcaatgtaaccacgggagataggaagaagtcagcttttgcacttttttataaacttgatatagcacgactta

SEQ ID NO: 90655 - DNA, 80 bp, synthetic construct
  source 1..80: mol_type = other DNA
gcgtttggggggtatgagggaattcttatatgggggcgaaggttttgtgatgtacccatttgtcctttctatccctacta

SEQ ID NO: 90656 - DNA, 80 bp, synthetic construct
  source 1..80: mol_type = other DNA
gatgtacccatttgtcctttctatccctactagccggtttaatggtacttggaggaccattattcccattaggtccaccg

SEQ ID NO: 90657 - DNA, 80 bp, synthetic construct
  source 1..80: mol_type = other DNA
gccggtttaatggtacttggaggaccattattcccattaggtccaccggcaacgattcgaattgttttacttttctatgc

SEQ ID NO: 90658 - DNA, 80 bp, synthetic construct
  source 1..80: mol_type = other DNA
cctcatatgccgaattatacaaatttttaacatgtggcagcgggtggtacgagcaatatatgctgctcgtattgtaggaa

SEQ ID NO: 90659 - DNA, 80 bp, synthetic construct
  source 1..80: mol_type = other DNA
gtataacatgtatctcatgtatcacaggactactgttgacacgtgctggaggaacaaataatgataccacaagagaaata

SEQ ID NO: 90660 - DNA, 80 bp, synthetic construct
  source 1..80: mol_type = other DNA
acagaataagacgaactgggccagcagcaagaactgagccagcagcagagggagtaggggcagcgtcccgagacttagcc

SEQ ID NO: 90661 - DNA, 80 bp, synthetic construct
  source 1..80: mol_type = other DNA
atgacaaactgctctttcaatgtcactgcagggataaaggataagatgcagaaggaatatgcctttttctataaacttga

SEQ ID NO: 90662 - DNA, 80 bp, synthetic construct
  source 1..80: mol_type = other DNA
ccagagcagtaagtattgttaagtagatgtaatgccagatttgttagtactagggatagtagcattaatagtagcagtaa

SEQ ID NO: 90663 - DNA, 80 bp, synthetic construct
  source 1..80: mol_type = other DNA
aatacaaaattgttctttcaatatgacccccgaaagagaagacaagaggggaaagtcctcggccctttttttaaaactta

SEQ ID NO: 90664 - DNA, 80 bp, synthetic construct
  source 1..80: mol_type = other DNA
ctggacttcacccccagggggatactagccagagctatagagagatgaattgtaatacctgaacaattacacaggcttgc

SEQ ID NO: 90665 - DNA, 80 bp, synthetic construct
  source 1..80: mol_type = other DNA
gtaagtgtttcttgagttccaatcatctttcattattgttatccagctgagtatgttatgctaaaaagtagggagataga

SEQ ID NO: 90666 - DNA, 80 bp, synthetic construct
  source 1..80: mol_type = other DNA
cgcctggcgctgaaacacttagccaaaaaaagacatccggagtactacaaaaactgaaactgctgacacaaaaattgctg

SEQ ID NO: 90667 - DNA, 80 bp, synthetic construct
  source 1..80: mol_type = other DNA
ttttaatgagcaaaagcagggtgacaaaaacataatggattccaatactgtgtcaagttttcaggtagactgctttcttt

SEQ ID NO: 90668 - DNA, 80 bp, synthetic construct
  source 1..80: mol_type = other DNA
ttttttctttttttttatatttattttagcgaaagcaggtagatattgaaagatgagtcttctaaccgaggtcgaaacgt

SEQ ID NO: 90669 - DNA, 80 bp, synthetic construct
  source 1..80: mol_type = other DNA
gttgacgatgatcattttgtcaacatagaattggagtaaaaaactaccttgtttctacttgtaaggggagaaaaaaaaaa

SEQ ID NO: 90670 - DNA, 80 bp, synthetic construct
  source 1..80: mol_type = other DNA
agggatttacgggttgggaatcattatttactatttactatttactataacatgtaggttgataagtttaggaataagta

SEQ ID NO: 90671 - DNA, 80 bp, synthetic construct
  source 1..80: mol_type = other DNA
atcatactggctgtatgaaattaactattgattagccgggatttagacattagttaaacacaaatatatatatatcgata

SEQ ID NO: 90672 - DNA, 80 bp, synthetic construct
  source 1..80: mol_type = other DNA
tattaaatataatctgtgtataatcatatgtatgcttttaggtgttaaggttactaacaaatcaaactacttaatggatg

SEQ ID NO: 90673 - DNA, 80 bp, synthetic construct
  source 1..80: mol_type = other DNA
atggtaagagccattgaagacgcagtactggacctagaagccattgagaataaccatatgaccactctgctcaaagataa

SEQ ID NO: 90674 - DNA, 80 bp, synthetic construct
  source 1..80: mol_type = other DNA
cggggctcggcctaaacaaccaaccccgagggaaaaacccccaaaaccccccagaccaccaacaccagaattgataaaga

SEQ ID NO: 90675 - DNA, 80 bp, synthetic construct
  source 1..80: mol_type = other DNA
gaacagtcttgcagcctacatgaagaccttagatatggaagaagagaaggcaaggaaactgtccacaaagtcagcttccc

SEQ ID NO: 90676 - DNA, 80 bp, synthetic construct
  source 1..80: mol_type = other DNA
acaatcaatgctttgcttgcacgaatcgctgccgcacgctcattagtccatagagctaaggaagagctctccagcagacc

SEQ ID NO: 90677 - DNA, 80 bp, synthetic construct
  source 1..80: mol_type = other DNA
gagaccagtcgtggttatgatttctggcaaacctggaataggaaaaacacacttggctagggatttggcaaagaagatag

SEQ ID NO: 90678 - DNA, 80 bp, synthetic construct
  source 1..80: mol_type = other DNA
cctcgaccctcacaggagatcaaagagtggggcttatcccgcgcaatggggtcgatcattgggacgcttataaaggtgaa

SEQ ID NO: 90679 - DNA, 80 bp, synthetic construct
  source 1..80: mol_type = other DNA
acatgtggaaagatgcctatcgcaatgacttctcacatatcaaactgcaactggcaccacagggtggatttgacaagaac

SEQ ID NO: 90680 - DNA, 80 bp, synthetic construct
  source 1..80: mol_type = other DNA
gaatcccctcccccccacccaatggcgaggatgagccaattgtgtcatttagtgccacgggtggcgtgtctgggttgccc

SEQ ID NO: 90681 - DNA, 80 bp, synthetic construct
  source 1..80: mol_type = other DNA
cgcttgttgcgcgcgcctcaggccttttgcacgagagaatggatgagtacgaactgcaaggaccatccctctcaaccttc

SEQ ID NO: 90682 - DNA, 80 bp, synthetic construct
  source 1..80: mol_type = other DNA
tgggcaaccagttgaggaatgttacaactatggctgagctgaagcaggccttgaggaacatcacgatcaaaaagtgtcag

SEQ ID NO: 90683 - DNA, 80 bp, synthetic construct
  source 1..80: mol_type = other DNA
ttagtctatggtgggagcacttacactctcgagtctgatggcaaaggtaaagttatggttgaaaaagtgcaaaacactag

SEQ ID NO: 90684 - DNA, 80 bp, synthetic construct
  source 1..80: mol_type = other DNA
catacaaatcaacaatgaaattgctggggcagttcaccatctcagatgtgccagaataagatactatgtgaagtgtgtcc

SEQ ID NO: 90685 - DNA, 80 bp, synthetic construct
  source 1..80: mol_type = other DNA
ccggcacagtgtttgttacatcacgcattgtgagccgcatgaacatccaaaacctatggtctaggccacagatagaggac

SEQ ID NO: 90686 - DNA, 80 bp, synthetic construct
  source 1..80: mol_type = other DNA
acagatgtgaccaccgcagatgaagggtgtcctaaacctagggatgaggaagagtttgttatctcttcagatgatatcaa

SEQ ID NO: 90687 - DNA, 80 bp, synthetic construct
  source 1..80: mol_type = other DNA
gtcagaagggaaaaagggcaaaaacaagagtggccggggcaagaaacacacagcattctcaagcaaaggcctcagtgacg

SEQ ID NO: 90688 - DNA, 80 bp, synthetic construct
  source 1..80: mol_type = other DNA
gagctcacaactgtcgggcagccgcctgaggccaacacggccttcagtgtgcccccgcttagcctaagggagaataggga

SEQ ID NO: 90689 - DNA, 80 bp, synthetic construct
  source 1..80: mol_type = other DNA
tcttcaggcctactcggaaacaacgtaaagaagagagagccaacctcggcctcgtcactggatctgagatcaggaaaaga

SEQ ID NO: 90690 - DNA, 80 bp, synthetic construct
  source 1..80: mol_type = other DNA
cccataagacagatccaaatacataaatcaggtgagttctgtcgcctgagattcccaaaacccatcagaacagatgtttc

SEQ ID NO: 90691 - DNA, 80 bp, synthetic construct
  source 1..80: mol_type = other DNA
ttctggaggagggagcaccggagggcaccgttgctaccatcttgattaaaagaaccactggagagttgatgcccctcgca

SEQ ID NO: 90692 - DNA, 80 bp, synthetic construct
  source 1..80: mol_type = other DNA
gcacggatgggcacacatgcgactatgaaaatccaaggtcgcacggtgggtggacagatggggatgctgcttactgggtc

SEQ ID NO: 90693 - DNA, 80 bp, synthetic construct
  source 1..80: mol_type = other DNA
gcacggatgggcacacatgcgactatgaaaatccaaggtcgcacggtgtgtggacagatggggatgctgcttactgggtc

SEQ ID NO: 90694 - DNA, 80 bp, synthetic construct
  source 1..80: mol_type = other DNA
aaaaccaagttctggaggtcttccacgacaccgctcccacctgggacgtatgagccagcatacttgggaggaaaggaccc

SEQ ID NO: 90695 - DNA, 80 bp, synthetic construct
  source 1..80: mol_type = other DNA
ccgagttaaaggtgggccatctctacaacaagtcatgagggatcaactgaaaccattcactgagcctcgtggcaagcctc

SEQ ID NO: 90696 - DNA, 80 bp, synthetic construct
  source 1..80: mol_type = other DNA
gatggggagatttatcattatggtctgtatgtggagcgaggccttgtgttgggtgtacataaaccaccagcagccatcag

SEQ ID NO: 90697 - DNA, 80 bp, synthetic construct
  source 1..80: mol_type = other DNA
gagactactttggggttcggatctggccacaatggtgcggtgtgcgcggtcctttgggggcctgatggatgagttaaaat

SEQ ID NO: 90698 - DNA, 80 bp, synthetic construct
  source 1..80: mol_type = other DNA
cacactgcgtaaccctccccatcagggttggcatgaacatgaatgaggacgggcccatagtctttgagaaacactccagg

SEQ ID NO: 90699 - DNA, 80 bp, synthetic construct
  source 1..80: mol_type = other DNA
ttttcagcagaaccacagttagcccaggtagttgcagaagatttgctgtctcctagtgtggttgacgtgggcgactttaa

SEQ ID NO: 90700 - DNA, 80 bp, synthetic construct
  source 1..80: mol_type = other DNA
aagacctgaatggcctaacgttcctgcggaggacagtcacccgtgatcctgcaggatggtttggaagattggaccagagc

SEQ ID NO: 90701 - DNA, 80 bp, synthetic construct
  source 1..80: mol_type = other DNA
tgtagccaaagtggagctgactcccctttcactgtactggaggcctgtatacacgccccattatctcatctccccagaca

SEQ ID NO: 90702 - DNA, 80 bp, synthetic construct
  source 1..80: mol_type = other DNA
acctgaagaaacttcatggggagttatttccctacacggcgttcgagaacaactgctacgccttctgctgctgggttttg

SEQ ID NO: 90703 - DNA, 80 bp, synthetic construct
  source 1..80: mol_type = other DNA
aatcctcacacttggtgagttatccaattccagatttcctgtgtccatagatcaaatgttcactagccccaacgaggtca

SEQ ID NO: 90704 - DNA, 80 bp, synthetic construct
  source 1..80: mol_type = other DNA
ggagctccaaggaacaacacagctccaggttagcggtatctgtgcattcaagggagaggtgactgctcacttgcacgata

SEQ ID NO: 90705 - DNA, 80 bp, synthetic construct
  source 1..80: mol_type = other DNA
cacatacacagcccaatacaccccaaagttaggccagatccaaattggcacgtggcagactgatgacctaacagtcaatc

SEQ ID NO: 90706 - DNA, 80 bp, synthetic construct
  source 1..80: mol_type = other DNA
gacttgaacgattcgtggttgagcaggaggatgattagcaggaccacaggcttcttcagaccttaccaagaatggaacag

SEQ ID NO: 90707 - DNA, 80 bp, synthetic construct
  source 1..80: mol_type = other DNA
aggttcacatcgactgctccaacaaggcaggccgacttgcagcatgctcaaaaccgaccgtcgagtggttcttctgtgtc

SEQ ID NO: 90708 - DNA, 80 bp, synthetic construct
  source 1..80: mol_type = other DNA
ctcctattccactcaatcttcaagaccaaccctgactacaacagtggggtcttcacacagtgcagtcccatccaattcga

SEQ ID NO: 90709 - DNA, 80 bp, synthetic construct
  source 1..80: mol_type = other DNA
ctcggagcacaaatctctctatgtccactgtttctagagccacttctagaaccagtgaatgggtcagggatcaaaataaa

SEQ ID NO: 90710 - DNA, 80 bp, synthetic construct
  source 1..80: mol_type = other DNA
aatttggaaccctatatgcatggtgccttacagacagcttttgtcacaccaccatccagcagggcatccgacgggacggt

SEQ ID NO: 90711 - DNA, 80 bp, synthetic construct
  source 1..80: mol_type = other DNA
acgattcaaaactgaaaaaggttgcaaacatcgtcctgtgtgccttgtcatcgctatttactaggcccatcaaagatata

SEQ ID NO: 90712 - DNA, 80 bp, synthetic construct
  source 1..80: mol_type = other DNA
gcacacctccgtaagaggggggagtcacaagcatagtgaaaaggtaaaatctagcttaaaatgaattgatcttatctttt

SEQ ID NO: 90713 - DNA, 80 bp, synthetic construct
  source 1..80: mol_type = other DNA
atcggaaagcttagacccctgaatatcctaaatatcttagcttcatgtgattggacttttgctggcatagtggaatctct

SEQ ID NO: 90714 - DNA, 80 bp, synthetic construct
  source 1..80: mol_type = other DNA
agtgaatgggtttctctcaccagatgcaaatgatgtttggtcgggaagaacaatctacgagaagtcacgcttagggtatg

SEQ ID NO: 90715 - DNA, 80 bp, synthetic construct
  source 1..80: mol_type = other DNA
gttggagacacacccagaattattggtatctcgaccaaaagcaggagtaaagatcgaatccaaatcgaaggatatcaagg

SEQ ID NO: 90716 - DNA, 80 bp, synthetic construct
  source 1..80: mol_type = other DNA
caccggccgccgtccaggggccttttcaccctactccccctgccagcgacatttgggtgctaccgccgccctccgaagat

SEQ ID NO: 90717 - DNA, 80 bp, synthetic construct
  source 1..80: mol_type = other DNA
tctcaggtcgacttgaaatctgtcccccccacccccgaacctgctccgccatccaggcctgctgagcctagggctcctgt

SEQ ID NO: 90718 - DNA, 80 bp, synthetic construct
  source 1..80: mol_type = other DNA
ttttctgcggttcccgtccgcgggaaaaaaaaaataaaatcttaaatgctgcgatgttgtgggtgcggagggcgagtatg

SEQ ID NO: 90719 - DNA, 80 bp, synthetic construct
  source 1..80: mol_type = other DNA
cgtccgcgggaaaaaaaaaataaaatcttaaatgctgcgatgttgtgggggcggagggcgagtatgatgttagatgatta

SEQ ID NO: 90720 - DNA, 80 bp, synthetic construct
  source 1..80: mol_type = other DNA
gctatagatgtgcacgggtcgatgccatggaggcccatcagtttattaaggctcctggcattactactgccattgagcag

SEQ ID NO: 90721 - DNA, 80 bp, synthetic construct
  source 1..80: mol_type = other DNA
gcctacaccaccgccggctctaatctcggtcagtaagccagctagcccgtctagcctcaccacatataagcctcctgtcc

SEQ ID NO: 90722 - DNA, 80 bp, synthetic construct
  source 1..80: mol_type = other DNA
cacgtcgtatatcgagtgtcgatgccatggaggcccatcagttcattaaggctcctggcattactactgccattgagcag

SEQ ID NO: 90723 - DNA, 80 bp, synthetic construct
  source 1..80: mol_type = other DNA
gtttcgccacctgtaacttcggtcagcaagccaactaatccacctggtcctattacatccaggccacccgctcgtgagtc

SEQ ID NO: 90724 - DNA, 80 bp, synthetic construct
  source 1..80: mol_type = other DNA
gcctacaccatcgctggccctagccccggccagtaagccaatcggtccacctagtcttactacacctaggccccctgtcc

SEQ ID NO: 90725 - DNA, 80 bp, synthetic construct
  source 1..80: mol_type = other DNA
acccacactatcatcggccctaatcttggctagtaatccagctaacccgtctagccttattacatctaggccacccgccc

SEQ ID NO: 90726 - DNA, 80 bp, synthetic construct
  source 1..80: mol_type = other DNA
atcctccaagtcctgccacacctaggccccccgttcgtgagtcacctacaccaccaccggctctcaccccggtcagtgaa

SEQ ID NO: 90727 - DNA, 80 bp, synthetic construct
  source 1..80: mol_type = other DNA
gcagagtcatgtatagatgtggtcgatgccatggaggcccaccagttcattaaggctcctggcattactactgccattga

SEQ ID NO: 90728 - DNA, 80 bp, synthetic construct
  source 1..80: mol_type = other DNA
tccttctacatccgggcccctcgcccgtgagccgcctacaccaccatcggctctaactccggtcagtggtccagctaacc

SEQ ID NO: 90729 - DNA, 80 bp, synthetic construct
  source 1..80: mol_type = other DNA
gtcgatgccatggaggcccatcagttcattaaggctcctggcattactactgccatagagcaggctgctctggctgcggc

SEQ ID NO: 90730 - DNA, 80 bp, synthetic construct
  source 1..80: mol_type = other DNA
gcgcgctcgtcgccaacgagggctggaacgcctcggaggatgcgcttaccgctgtgatcactgcagcgtatttgactatt

SEQ ID NO: 90731 - DNA, 80 bp, synthetic construct
  source 1..80: mol_type = other DNA
tgtcatcaacgctacctacgaacacaggccatttctaaaggtatgcgtcggttggaggtcgagcatgcccaaaagttcat

SEQ ID NO: 90732 - DNA, 80 bp, synthetic construct
  source 1..80: mol_type = other DNA
tacaaggctatatagctggctgtttgaaaagtcaggccgtgactacatccccggccgccagctccagttttatgcacagt

SEQ ID NO: 90733 - DNA, 80 bp, synthetic construct
  source 1..80: mol_type = other DNA
gccgccgctggctctcggccggcttccatttggaccctagagttctcgtctttgatgaggcggtcccctgccgctgtcgg

SEQ ID NO: 90734 - DNA, 80 bp, synthetic construct
  source 1..80: mol_type = other DNA
agcttcctaaagaaagttgctggaaaattctgctgttttatgaaatggctagggcaggagtgcacctgttttctggaacc

SEQ ID NO: 90735 - DNA, 80 bp, synthetic construct
  source 1..80: mol_type = other DNA
agcagaaggcctggttggtgattgcggccatgataacgaggcctacgaagggtccgaggtggactccgccgagcctgccc

SEQ ID NO: 90736 - DNA, 80 bp, synthetic construct
  source 1..80: mol_type = other DNA
accttgatatttccgggacctatgcggttcacggtcgtcagcttgaagctctatatagagcgcttaatatcccagatgac

SEQ ID NO: 90737 - DNA, 80 bp, synthetic construct
  source 1..80: mol_type = other DNA
attgcagctcgcgcgtcacgcctgacggccactgtggaacttgccgccagcccaggccgaattgaatgtcgtacggtgct

SEQ ID NO: 90738 - DNA, 80 bp, synthetic construct
  source 1..80: mol_type = other DNA
tgggaataagactttccgtacatcaataattgatggtgcccatctcgaggccaacggtcccgagcagtacgtcttgacat

SEQ ID NO: 90739 - DNA, 80 bp, synthetic construct
  source 1..80: mol_type = other DNA
ttgatgattcacgccaggcaatgggggctgggcctcatagcctcacgtatgaacttgtccctgctggtctgcaggttaaa

SEQ ID NO: 90740 - DNA, 80 bp, synthetic construct
  source 1..80: mol_type = other DNA
atatcttctaatggcttggattgtactgctgtattcccccctggtggggcaccaagcgctgcaccgggtgaagtggcggc

SEQ ID NO: 90741 - DNA, 80 bp, synthetic construct
  source 1..80: mol_type = other DNA
cttctgcagcgctctatacaggtacaataggttcacccagcaccattcgctgaccggaggactgtggctacaccctgagg

SEQ ID NO: 90742 - DNA, 80 bp, synthetic construct
  source 1..80: mol_type = other DNA
ggcttcttggcctgtttccccctttctccccggggcatctttgggagtctgcaaaccccttctgcggtgagagtacactt

SEQ ID NO: 90743 - DNA, 80 bp, synthetic construct
  source 1..80: mol_type = other DNA
tatacacggacttggtctacatctggtttttctagcgacttctctccacccgaggcggcttatgctgccccggtccctga

SEQ ID NO: 90744 - DNA, 80 bp, synthetic construct
  source 1..80: mol_type = other DNA
catagggttaccctcgggtactccctcgtctgctagcgatatctgggcgtttccaccgccttctgaggggtcggcgactg

SEQ ID NO: 90745 - DNA, 80 bp, synthetic construct
  source 1..80: mol_type = other DNA
ttccgccacctgtaaccccggttagtaagccaactaacccgcccagtcttgttgctcccaggtctcccgtccgtgagcca

SEQ ID NO: 90746 - DNA, 80 bp, synthetic construct
  source 1..80: mol_type = other DNA
cctacaccacagccggcccctaccccgttcagcgagccagctaaccagcctagtcttaccacacctaggccccccgcccg

SEQ ID NO: 90747 - DNA, 80 bp, synthetic construct
  source 1..80: mol_type = other DNA
cgagccgcctgcgcctccaacgacccgttctcgccggctcctttacacatatcctgatggggccaaggtgtatgcaggct

SEQ ID NO: 90748 - DNA, 80 bp, synthetic construct
  source 1..80: mol_type = other DNA
ctttgtttgagtcggattgtgactggctggttaatgcatctaaccctggccaccgccctggtggcggcctctgccatgcg

SEQ ID NO: 90749 - DNA, 80 bp, synthetic construct
  source 1..80: mol_type = other DNA
ttctaccagcgcttccctgagtcgttccatccgactgattttgtcatgcgtgaaggccttgccgcatacactttgagccc

SEQ ID NO: 90750 - DNA, 80 bp, synthetic construct
  source 1..80: mol_type = other DNA
gcgtccgatcattcatgctgtggcccctgactacagggttgagcagaaccccaaaagattagaggcggcataccgtgaga

SEQ ID NO: 90751 - DNA, 80 bp, synthetic construct
  source 1..80: mol_type = other DNA
cttgctctcgccttggcacagctgcctacccgctactgggatcaggaatttatcaggtccctgtgggtttaagctttgac

SEQ ID NO: 90752 - DNA, 80 bp, synthetic construct
  source 1..80: mol_type = other DNA
gcctgggagcgtaaccaccgcccaggcgatgaactttaccttactgagccggctgccacctggttcgaggctaataagcc

SEQ ID NO: 90753 - DNA, 80 bp, synthetic construct
  source 1..80: mol_type = other DNA
aacccaaccagccctaacaattactgaggacactgcccgtacagctaatcttgcgcttgagattgactctgccactgagg

SEQ ID NO: 90754 - DNA, 80 bp, synthetic construct
  source 1..80: mol_type = other DNA
tgggtcgtgcttgcgccggctgcactattaatcccggggttgtgcactaccagttcaccgctggggtccctggctccgtg

SEQ ID NO: 90755 - DNA, 80 bp, synthetic construct
  source 1..80: mol_type = other DNA
cggttttgctgcttttacaccccacacagcagcccgtgtcactgccggccggcgtgtggtgatagatgaggcaccttcgc

SEQ ID NO: 90756 - DNA, 80 bp, synthetic construct
  source 1..80: mol_type = other DNA
ttccaccgcacttgctcctccttcatatgcagcgagcttcatcggtccaccttcttggtgatcccaaccagatccctgcc

SEQ ID NO: 90757 - DNA, 80 bp, synthetic construct
  source 1..80: mol_type = other DNA
attgactttgaacacgccggtctggttccagcgattcgccctgagctagcccctactagttggtggcatgtcacccatcg

SEQ ID NO: 90758 - DNA, 80 bp, synthetic construct
  source 1..80: mol_type = other DNA
ctgccccgccgatgtgtgtgagctcatacgcggggcttacccaaagattcagacaactagccgtgtgttgagatctttat

SEQ ID NO: 90759 - DNA, 80 bp, synthetic construct
  source 1..80: mol_type = other DNA
tctggaatgagcctgcggtgggtcagaggctggttttcacgcaggcagccaaggctgctaaccctggtgcaattactgtt

SEQ ID NO: 90760 - DNA, 80 bp, synthetic construct
  source 1..80: mol_type = other DNA
catgaggcccagggtgccacatttactgagactaccataatagccacggctgatgctagaggtcttattcagtcttctcg

SEQ ID NO: 90761 - DNA, 80 bp, synthetic construct
  source 1..80: mol_type = other DNA
tgcacatgccatcgttgcgcttactcgccatacagaaaaatgcgtcattctcgatgctcctggcttacttcgtgaggtcg

SEQ ID NO: 90762 - DNA, 80 bp, synthetic construct
  source 1..80: mol_type = other DNA
gcatttctgatataattgttaataatttcttcctggctggtggcgaagtgggccaccatcgcccctctactataccccgc

SEQ ID NO: 90763 - DNA, 80 bp, synthetic construct
  source 1..80: mol_type = other DNA
ggtaacccagaccagaatttagacaccctacgagcatttcctccgtcctgccaaattagtgcctatcaccagcttgctga

SEQ ID NO: 90764 - DNA, 80 bp, synthetic construct
  source 1..80: mol_type = other DNA
agagctgggccatcggccggctccagtggccgccgtcctgcccccttgccctgagcttgagcaggggttactctacatgc

SEQ ID NO: 90765 - DNA, 80 bp, synthetic construct
  source 1..80: mol_type = other DNA
cgcaggagcttacggtgtccgatagcgtcttagtttttgagctcacggatatagttcactgccgtatggccgcccccagt

SEQ ID NO: 90766 - DNA, 80 bp, synthetic construct
  source 1..80: mol_type = other DNA
caacgtaaggcggtcctctctacgctcgtcggcaggtacggccgccgaacgaagctgtatgaagcggcccattcagatgt

SEQ ID NO: 90767 - DNA, 80 bp, synthetic construct
  source 1..80: mol_type = other DNA
ccgcgagtctttaaggaggtttatccctactattggaccggtccaggccacaacatgcgagctatacgagctggttgagg

SEQ ID NO: 90768 - DNA, 80 bp, synthetic construct
  source 1..80: mol_type = other DNA
ccatggtagagaagggtcaggacggctccgctgtgctcgagcttgacctctgtagccgtgatgtctctcgtatcacgttt

SEQ ID NO: 90769 - DNA, 80 bp, synthetic construct
  source 1..80: mol_type = other DNA
cttgccccctgtcgatcgtacatattgcttcgatgggttttcccgctgcgcctttgccgccgagaccgggatcgctttat

SEQ ID NO: 90770 - DNA, 80 bp, synthetic construct
  source 1..80: mol_type = other DNA
ttccagaaagattgtaataaatttacaacaggtgagaccatagcccacggcaaggtgggccagggcatttcggcttggag

SEQ ID NO: 90771 - DNA, 80 bp, synthetic construct
  source 1..80: mol_type = other DNA
cacccaatattttctatggtgatgcctatgaggagtcagtgttttctgcagccatttctggggctggctccagtatggtt

SEQ ID NO: 90772 - DNA, 80 bp, synthetic construct
  source 1..80: mol_type = other DNA
gtaatgcagctaccctgatagccggatgtgggttgaaattgaaggctgattaccggcctataggcctgtatgctggggtt

SEQ ID NO: 90773 - DNA, 80 bp, synthetic construct
  source 1..80: mol_type = other DNA
gtggtggctccgggcctcggggcacttccagatgttgtccggtttgctggtcgattatctgagaagaactggtgcccgtg

SEQ ID NO: 90774 - DNA, 80 bp, synthetic construct
  source 1..80: mol_type = other DNA
ccctgaacgcgccgaacagttgcgccttgcagtttgtgacttcctccgaaggttgacgaatgttgcgcaggtttgtgttg

SEQ ID NO: 90775 - DNA, 80 bp, synthetic construct
  source 1..80: mol_type = other DNA
atgttgtgtcccgtgtttacggggttagccccgggctggtgcataaccttattggcatgctacagactattgctgatgga

SEQ ID NO: 90776 - DNA, 80 bp, synthetic construct
  source 1..80: mol_type = other DNA
aaggcccactttactgagactgtcaagcctgtgctggatcttacaaactctatcatacagaggttggaatgaataacatg

SEQ ID NO: 90777 - DNA, 80 bp, synthetic construct
  source 1..80: mol_type = other DNA
tcttgtgcattgcccatgggatcgccatgcgccctagggctgttctgctgctgctcttcgtgcttctgcctatgctgccc

SEQ ID NO: 90778 - DNA, 80 bp, synthetic construct
  source 1..80: mol_type = other DNA
cccccgtcgtcgatctaccccaactggggctgcgccgttaactgctgtctcaccagcgcctgacacggccccagttcctg

SEQ ID NO: 90779 - DNA, 80 bp, synthetic construct
  source 1..80: mol_type = other DNA
gtcagtataatctgtccacttcccctttaacttcatctgttgcctctggaactaatcttgttttgtatgctgccccgctt

SEQ ID NO: 90780 - DNA, 80 bp, synthetic construct
  source 1..80: mol_type = other DNA
aaccctctcctgcctctccaagatggcaccaatacccacatcatggcgactgaggcgtctaattacgctcagtaccgggt

SEQ ID NO: 90781 - DNA, 80 bp, synthetic construct
  source 1..80: mol_type = other DNA
cacttaccccccgaggttttgttaccacctggcacctatcatacaacatcttatcttttgattcacgacggcagtcgcgc

SEQ ID NO: 90782 - DNA, 80 bp, synthetic construct
  source 1..80: mol_type = other DNA
atcgccctctggtgccgaatgccgtcggcggctatgcgatttctatctccttctggccccagactacgactacacccact

SEQ ID NO: 90783 - DNA, 80 bp, synthetic construct
  source 1..80: mol_type = other DNA
tctgttgatatgaactctattacttctacagatgttaggattttagtccagcctggaatagcctccgagttggtcatccc

SEQ ID NO: 90784 - DNA, 80 bp, synthetic construct
  source 1..80: mol_type = other DNA
cgggtgtggccgaggaggaggcaacatcaggtttggttatgctttgtattcatggttcccctgttaattcttataccaat

SEQ ID NO: 90785 - DNA, 80 bp, synthetic construct
  source 1..80: mol_type = other DNA
acgccctatactggggcattggggcttcttgattttgcacttgagcttgaatttagaaatttgacccctgggaacactaa

SEQ ID NO: 90786 - DNA, 80 bp, synthetic construct
  source 1..80: mol_type = other DNA
ctgcagccacacgttttatgaaggacttgcatttcaccgggacaaatggtgttggagaggtgggccgtggtatagcccta

SEQ ID NO: 90787 - DNA, 80 bp, synthetic construct
  source 1..80: mol_type = other DNA
ccgactgttaagttatacacctctgttgagaatgcacagcaggacaaaggcattgctataccacacgacatagacttagg

SEQ ID NO: 90788 - DNA, 80 bp, synthetic construct
  source 1..80: mol_type = other DNA
agagtcccgtgtggttatacaagactatgataaccaacatgaacaagaccggcctactccgtcgccggccccgtctcgcc

SEQ ID NO: 90789 - DNA, 80 bp, synthetic construct
  source 1..80: mol_type = other DNA
ccttttcagtccttcgagccaatgatgtcttatggctttctctgactgcggctgaatatgaccagactacttatggttcg

SEQ ID NO: 90790 - DNA, 80 bp, synthetic construct
  source 1..80: mol_type = other DNA
tgactggtccaaggtcaccttagatggccggccactcactaccattcagcagtactccaagacattttatgtgctgccgc

SEQ ID NO: 90791 - DNA, 80 bp, synthetic construct
  source 1..80: mol_type = other DNA
tgtttctgcggtcggtgttcttgctccgcactctgctttagctgtgcttgaagatactattgactaccctgcccgtgctc

SEQ ID NO: 90792 - DNA, 80 bp, synthetic construct
  source 1..80: mol_type = other DNA
atacttttgatgatttttgccctgagtgtcgcaatctcggtttgcagggctgcgccttccagtctaccattgctgagctt

SEQ ID NO: 90793 - DNA, 80 bp, synthetic construct
  source 1..80: mol_type = other DNA
cagcgtcttaaaatgaaggtaggtaaaacccgggagtcttaattaattcccctttgtgcccccttctaatttcctctgtt

SEQ ID NO: 90794 - DNA, 80 bp, synthetic construct
  source 1..80: mol_type = other DNA
attcttctattctgcgttcccgctccgaaaagaatattttactgccgcgaaaaaaataataaacgccctggatgctctgt

SEQ ID NO: 90795 - DNA, 80 bp, synthetic construct
  source 1..80: mol_type = other DNA
cgcggtcgccgatctttggagccgaaagtaatatatttctccgcgtatttgtgatggttagttccacattggtactgctt

SEQ ID NO: 90796 - DNA, 80 bp, synthetic construct
  source 1..80: mol_type = other DNA
aaatagttggtgatcacccactggtaatagagagggtccgcgccatcggctgccattttgttttgcttttaactgcagcc

SEQ ID NO: 90797 - DNA, 80 bp, synthetic construct
  source 1..80: mol_type = other DNA
gtcgccttctcttttcccatcagcctgctctaccaagtctacattccatgctgtcccggttcatatctgggaccggctaa

SEQ ID NO: 90798 - DNA, 80 bp, synthetic construct
  source 1..80: mol_type = other DNA
agatgtagcacatcatatgtggtcgatgccatggaggcccaccaattcattaaggctcctggcattactactgccattga

SEQ ID NO: 90799 - DNA, 80 bp, synthetic construct
  source 1..80: mol_type = other DNA
gctccaccacccgtgttcccagttagtaagccagctaattcaccaagtctcgccacacctgggtcccccgtccatgagcc

SEQ ID NO: 90800 - DNA, 80 bp, synthetic construct
  source 1..80: mol_type = other DNA
gcctacaccaccattggctctcaccccggtcagtaaaccggctagcccgactagccttactatatacaagcctcctgccc

SEQ ID NO: 90801 - DNA, 80 bp, synthetic construct
  source 1..80: mol_type = other DNA
agtgccgcaatctcggcctgcagggctgtgcctttcaatctactattgctgagcttcagcgccttaaaatgaaggtaggc

SEQ ID NO: 90802 - DNA, 80 bp, synthetic construct
  source 1..80: mol_type = other DNA
gtgcacgagtgggtcgacgccatggaggcccatcagttcattaaggctcctggcatcactactgccattgagcaagctgc

SEQ ID NO: 90803 - DNA, 80 bp, synthetic construct
  source 1..80: mol_type = other DNA
gtatctatcagacatgtggtcgatgccatggaggcccatcagttcattaaggctcctggcatcacaaccgccattgagca

SEQ ID NO: 90804 - DNA, 80 bp, synthetic construct
  source 1..80: mol_type = other DNA
gcctcgcgtatgagctcacccccggcgggctgcaggttaaaatctcgtctaatggtttggattgtacggcagtctttcct

SEQ ID NO: 90805 - DNA, 80 bp, synthetic construct
  source 1..80: mol_type = other DNA
cccggaagggccccagatgcgggagctgcggaggtttcggccttctgtagtagtctgtatagatttaataagaccattca

SEQ ID NO: 90806 - DNA, 80 bp, synthetic construct
  source 1..80: mol_type = other DNA
gcggcactcgatcgtcggtgggctgtggttgcacccggaggtgctgctgggtctttttccacctttcgcccccggccacc

SEQ ID NO: 90807 - DNA, 80 bp, synthetic construct
  source 1..80: mol_type = other DNA
cttgaggcagccgctaatgcccctcttatcgctagtctgccttgtacgccggccccctccgaggctggtgccccagtttt

SEQ ID NO: 90808 - DNA, 80 bp, synthetic construct
  source 1..80: mol_type = other DNA
gccgccgacttctgagtctcccgggcctagtaacttgcttcccggcgcccccgggccttctgctcgtaagcctacggggc

SEQ ID NO: 90809 - DNA, 80 bp, synthetic construct
  source 1..80: mol_type = other DNA
agcctttagtgcgtaaccgccgcttgctccatacctatcctgatggtgcaaaggtttatgcagggtccctgtttgagtcg

SEQ ID NO: 90810 - DNA, 80 bp, synthetic construct
  source 1..80: mol_type = other DNA
gttctcgtatcggtactgccgcctacccgctgctgggatctggcatctatcaggtgcctgtgggcccgagtttcgatgcc

SEQ ID NO: 90811 - DNA, 80 bp, synthetic construct
  source 1..80: mol_type = other DNA
ggtccttcatgccggccgcccctgacacggcccccgctgacggccccgcagtcgtgactggctccccgccagaggccgcc

SEQ ID NO: 90812 - DNA, 80 bp, synthetic construct
  source 1..80: mol_type = other DNA
agtcgtgactggctccccgccagaggccgccaacggcccggcacttcctaccctgaccataacagaggatgtagctcgga

SEQ ID NO: 90813 - DNA, 80 bp, synthetic construct
  source 1..80: mol_type = other DNA
aacggcccggcacttcctaccctgaccataacagaggatgtagctcggacggctaatcttgcactggagattgactccag

SEQ ID NO: 90814 - DNA, 80 bp, synthetic construct
  source 1..80: mol_type = other DNA
tccagtcgtctcgcgcgcatgctgtcgttgcgctcacccggcacacagagaaatgtgtcattattgatgcgccggggttg

SEQ ID NO: 90815 - DNA, 80 bp, synthetic construct
  source 1..80: mol_type = other DNA
tgcgcgaatcgcttacaaggttcatccctgtcataggtcctgtgactgctacgacatgtgaactctatgagctggtcgag

SEQ ID NO: 90816 - DNA, 80 bp, synthetic construct
  source 1..80: mol_type = other DNA
tactctctgcatgatatgtggcccgctgacgtcgcggaggccatggcgcgtcatggaatgacgcgtctctttgctgtatt

SEQ ID NO: 90817 - DNA, 80 bp, synthetic construct
  source 1..80: mol_type = other DNA
acatctcccccccgaggtcctactgccaccaggtacctatcacaccacgtcttaccttttgatccatgacggcaatcgcg

SEQ ID NO: 90818 - DNA, 80 bp, synthetic construct
  source 1..80: mol_type = other DNA
gggtcggcgattgtcccgccacccgaaaccccggccagtaagcctaccagtctgcctagtcttgttacacctggaccccc

SEQ ID NO: 90819 - DNA, 80 bp, synthetic construct
  source 1..80: mol_type = other DNA
gcccacaccatcaccagccctaacctcagtcagtgagccggctaacccgtctagacttactacacctgtgtctcccatcc

SEQ ID NO: 90820 - DNA, 80 bp, synthetic construct
  source 1..80: mol_type = other DNA
cacacgcgcgtgctcgatgtggtcgatgccatggaggcccaccagttcattaaggctcctggcattactactgccattga

SEQ ID NO: 90821 - DNA, 80 bp, synthetic construct
  source 1..80: mol_type = other DNA
cacctacaccaccatcggctccaaccccggtcaataacccagctagcctgtctagccttactacacacaggcctcctgtt

SEQ ID NO: 90822 - DNA, 80 bp, synthetic construct
  source 1..80: mol_type = other DNA
tgccgcacctaggcctcccgccagcgaactgtctataccaccaccggccctaaccccggtcagtaagccggctaaatcgc

SEQ ID NO: 90823 - DNA, 80 bp, synthetic construct
  source 1..80: mol_type = other DNA
cccgggagtcttaattaatttcccctttgtgccccctcaaaccttgccctgttatttctcttttctgcgttccgcgcccc

SEQ ID NO: 90824 - DNA, 80 bp, synthetic construct
  source 1..80: mol_type = other DNA
tgcacgtactgcgcagtggtcgatgccatggaggcccatcagtttattaaggctcctggcattactactgccattgagca

SEQ ID NO: 90825 - DNA, 80 bp, synthetic construct
  source 1..80: mol_type = other DNA
cccgcctagccttaccacaccttggactactgcccgtgagctgcttacagcaccaccggccctaaccccggttagtaaac

SEQ ID NO: 90826 - DNA, 80 bp, synthetic construct
  source 1..80: mol_type = other DNA
gccgttgtagaagtttgatgaagagtgtagcaagaaaggtttgttgtttcatgaagtggctcggtcaggagtgtacctgt

SEQ ID NO: 90827 - DNA, 80 bp, synthetic construct
  source 1..80: mol_type = other DNA
cccctaccgatgtgtcaggcacttacactgtccatgggcgactgttggtggacctatataaagcactcaacgtcccgcaa

SEQ ID NO: 90828 - DNA, 80 bp, synthetic construct
  source 1..80: mol_type = other DNA
cttgccgctggcccagggcggcttgagtgccgcaccatcctaggcaataagaccttccgtactacgttcactgacggcgc

SEQ ID NO: 90829 - DNA, 80 bp, synthetic construct
  source 1..80: mol_type = other DNA
ccaactggaggcaaatggccccgagcagtacgttctttcatttgatgaagaccgtcagtgcatgggtgctgggccgcata

SEQ ID NO: 90830 - DNA, 80 bp, synthetic construct
  source 1..80: mol_type = other DNA
gtcttgtgtatgagctcaccccctctgggctgcaggttaaaattacatctaatggcttagattgcactgcagtcttccca

SEQ ID NO: 90831 - DNA, 80 bp, synthetic construct
  source 1..80: mol_type = other DNA
cctgggaaggccccgagtgctggggccgcagaggttacggccttctgcagcgccttgtatagatacaacagaactatcca

SEQ ID NO: 90832 - DNA, 80 bp, synthetic construct
  source 1..80: mol_type = other DNA
ttcctaccacctgaggcagtcgttagtgcccacccccccgttgacctgccctatacaccggccccccttgaggttgacga

SEQ ID NO: 90833 - DNA, 80 bp, synthetic construct
  source 1..80: mol_type = other DNA
tcgaggcccgtcactccctcctgttgcccccggcgctgttggcccgcccgtcggcacgcccgggccctttgctcataagc

SEQ ID NO: 90834 - DNA, 80 bp, synthetic construct
  source 1..80: mol_type = other DNA
tgccggggccgtcttcagctcgcaatcgtcgcctcctttttacctatccagatggcgctaagatttattcagggtccctg

SEQ ID NO: 90835 - DNA, 80 bp, synthetic construct
  source 1..80: mol_type = other DNA
ggtctctcacacccacaacacctgacacagcctcagctgattaccccgtagcaggcgccggccttccgccagggaccgac

SEQ ID NO: 90836 - DNA, 80 bp, synthetic construct
  source 1..80: mol_type = other DNA
accggcccggtactgcccgccctgaccataacagaggatatagctcggacggccaacctcgcattggaaattgactccaa

SEQ ID NO: 90837 - DNA, 80 bp, synthetic construct
  source 1..80: mol_type = other DNA
gaccgagctaggccgggcttgtaccggctgtattattagccctggggtagtccgctatcaatttactgcgggcgttcccg

SEQ ID NO: 90838 - DNA, 80 bp, synthetic construct
  source 1..80: mol_type = other DNA
tgtgcgcgcgacgagctggtcgatgccatggaggcccaccagtttattaaggctcctggcattactactgccattgagca

SEQ ID NO: 90839 - DNA, 80 bp, synthetic construct
  source 1..80: mol_type = other DNA
ttgccccgccacccgaaactcctgtcagtaattcgattaacccacttagtcttattacacctaagccccccgtccgtaag

SEQ ID NO: 90840 - DNA, 80 bp, synthetic construct
  source 1..80: mol_type = other DNA
gtaattgtttcgccacccgaaaccccggttagtaagctgactaatccacctagtcttacagcacctaagccccctgcccg

SEQ ID NO: 90841 - DNA, 80 bp, synthetic construct
  source 1..80: mol_type = other DNA
atatacgcggtcgatgccatggaggcccaccagttcattaaggctcctggcattactactgccattgagcaggctgctct

SEQ ID NO: 90842 - DNA, 80 bp, synthetic construct
  source 1..80: mol_type = other DNA
tgccatcagcgctacttacgtacgcaggccatttctaaaggcatgcgtcggctagaggttgagcacgcccaaaaatttat

SEQ ID NO: 90843 - DNA, 80 bp, synthetic construct
  source 1..80: mol_type = other DNA
aacttcttaaagaaagttgccggaaaattttgttgttttatgaaatggttagggcaggagtgcacctgctttttggagcc

SEQ ID NO: 90844 - DNA, 80 bp, synthetic construct
  source 1..80: mol_type = other DNA
agcggaaggcctggttggcgactgtggccatgataacgaggcttatgaggggtctgaggtggaccccgctgagcctgctc

SEQ ID NO: 90845 - DNA, 80 bp, synthetic construct
  source 1..80: mol_type = other DNA
attgcagcccgtgcgtcacgtttgacggctactgtagaacttgccgccagcccaggtcgactcgagtgccgtacggtgct

SEQ ID NO: 90846 - DNA, 80 bp, synthetic construct
  source 1..80: mol_type = other DNA
ttgatgactctcgtcaggccatgggggctgggcctcacagcctcacgtatgaacttgtccctgccggcctgcaagtcaaa

SEQ ID NO: 90847 - DNA, 80 bp, synthetic construct
  source 1..80: mol_type = other DNA
atatcttctaatggcttggattgtaccgctacatttccccccggtggggcaccaagcgccgcaccaagtgaagtggcggc

SEQ ID NO: 90848 - DNA, 80 bp, synthetic construct
  source 1..80: mol_type = other DNA
tttctgtagcgccctgtacaggtacaataggttcacccagcgccattcactgaccggtgggttgtggctgcaccccgagg

SEQ ID NO: 90849 - DNA, 80 bp, synthetic construct
  source 1..80: mol_type = other DNA
tatacacgaacttggtctacatctggtttttctagcgacttctccccacccgaggcggcccatgctgtcccagcacctga

SEQ ID NO: 90850 - DNA, 80 bp, synthetic construct
  source 1..80: mol_type = other DNA
cacgggactgccctcgggtgctccctcgtccgctagtgatatttgggtgttcccaccgccctctgagaggtcgacgatcg

SEQ ID NO: 90851 - DNA, 80 bp, synthetic construct
  source 1..80: mol_type = other DNA
ccccaccacccgtgaccccggttagtaagccagctaacccgccaagtcctactacatctagaccccttgtccttgagccg

SEQ ID NO: 90852 - DNA, 80 bp, synthetic construct
  source 1..80: mol_type = other DNA
ccaacaccaccaccagccctaaccccggttactacacataggcctcccgtccgtaagccgcctacaccactatcggcccg

SEQ ID NO: 90853 - DNA, 80 bp, synthetic construct
  source 1..80: mol_type = other DNA
tacccgccggctcctttatacataccctgatggggccaaggtgtatgcgggttctttgtttgagtcagattgtgattggc

SEQ ID NO: 90854 - DNA, 80 bp, synthetic construct
  source 1..80: mol_type = other DNA
tggttaatgcgtctaaccctggccaccgtcctggtggtggtctttgccatgcattctatcaacgcttcccggagtctttc

SEQ ID NO: 90855 - DNA, 80 bp, synthetic construct
  source 1..80: mol_type = other DNA
catccgactgattttgttatgcgtgagggtctcgccgcatatactttgagcccgcgtccgatcattcatgctgtggcccc

SEQ ID NO: 90856 - DNA, 80 bp, synthetic construct
  source 1..80: mol_type = other DNA
tgactatagggttgagcagaaccccaagaggttagaggcggcataccgtgagacttgctcccgtctcggtacagctgcct

SEQ ID NO: 90857 - DNA, 80 bp, synthetic construct
  source 1..80: mol_type = other DNA
gccgctgtcttgaagtgggcgctcatccaagatctatcaatgataaccccaatgttctgcaccggtgctttctccgcccg

SEQ ID NO: 90858 - DNA, 80 bp, synthetic construct
  source 1..80: mol_type = other DNA
ccgtaggtttaagtttcgacgcctgggagcgtaaccatcgcccaggcgatgaattgtatcttactgagcctgctgccacc

SEQ ID NO: 90859 - DNA, 80 bp, synthetic construct
  source 1..80: mol_type = other DNA
tggttcgaggctaataagccaacccaaccagccctaacaattactgaggatacagcccgcacagctaaccttgcgcttga

SEQ ID NO: 90860 - DNA, 80 bp, synthetic construct
  source 1..80: mol_type = other DNA
gattgactctgctactgaggtgggccgtgcttgcgccggctgtactattacccccgggattgtccactatcaattcaccg

SEQ ID NO: 90861 - DNA, 80 bp, synthetic construct
  source 1..80: mol_type = other DNA
ccggggttcctggctctgggaagtctagatctatacagcaggaggatgttgatgtcgtagtcgtgccgactcgtgagctc

SEQ ID NO: 90862 - DNA, 80 bp, synthetic construct
  source 1..80: mol_type = other DNA
cgtaacagttggcgacgccgtggctttgctgcttttacaccccacacagcagcccgtgttactgccggccgacgtgttgt

SEQ ID NO: 90863 - DNA, 80 bp, synthetic construct
  source 1..80: mol_type = other DNA
gatagatgaggcaccttcgcttccaccgcacttgttgctgctccatatgcagcgagcctcatcggtccatcttcttggtg

SEQ ID NO: 90864 - DNA, 80 bp, synthetic construct
  source 1..80: mol_type = other DNA
accccaaccagatccctgccattgattttgagcacgccggtttggtcccagcaattcgccctgagctagctcctactagt

SEQ ID NO: 90865 - DNA, 80 bp, synthetic construct
  source 1..80: mol_type = other DNA
tggtggcatgtcacccaccgctgccccgccgatgtgtgtgagctcatacgcggggcctatcccaagattcagacgaccag

SEQ ID NO: 90866 - DNA, 80 bp, synthetic construct
  source 1..80: mol_type = other DNA
ccgtgtgctgagatctttattctggaatgagcctgcggtgggtcagaggctggtttttacgcaggcggccaaagcggcca

SEQ ID NO: 90867 - DNA, 80 bp, synthetic construct
  source 1..80: mol_type = other DNA
gttggaagagatgtccagcgctggtattcagctcctacccgtggtccagcggctaactgccgccgttctgcgctacgcgg

SEQ ID NO: 90868 - DNA, 80 bp, synthetic construct
  source 1..80: mol_type = other DNA
accccggcgcaatcaccgtccatgaggcccagggtgctacgttcactgagactactattatagccacggccgatgctaga

SEQ ID NO: 90869 - DNA, 80 bp, synthetic construct
  source 1..80: mol_type = other DNA
taccataccgcgcggcaatccagaccaaaacttagacaccctgcgagcattccctccgtcctgccagattagtgcctacc

SEQ ID NO: 90870 - DNA, 80 bp, synthetic construct
  source 1..80: mol_type = other DNA
accaattggctgaggagctaggtcaccggccggccccagtggccgccgtcctgcccccttgccctgagcttgagcaggtg

SEQ ID NO: 90871 - DNA, 80 bp, synthetic construct
  source 1..80: mol_type = other DNA
ctactctacatgccgcaggagctaacggtgtccgatagtgtcctgatttttgaactcactgacatagttcactgccgtat

SEQ ID NO: 90872 - DNA, 80 bp, synthetic construct
  source 1..80: mol_type = other DNA
ggctgcccccagtcaacgtaaggcggtcctttctacactcgtcggcaggtacggccgccgaacgaagctgtatgaagcgg

SEQ ID NO: 90873 - DNA, 80 bp, synthetic construct
  source 1..80: mol_type = other DNA
cccattctgatgttcgtgagtctttaggaaggttcattcctactatcgggccggtccaggccaccacatgtgagttatat

SEQ ID NO: 90874 - DNA, 80 bp, synthetic construct
  source 1..80: mol_type = other DNA
gagctggttgaggccatggtggagaagggccaggatggctccgccgtgcttgagctcgacctctgcagccgagatgtctc

SEQ ID NO: 90875 - DNA, 80 bp, synthetic construct
  source 1..80: mol_type = other DNA
gcgtattacattcttccagaaggactgtaataaatttacaacaggtgagaccattgcccacggcaaggtgggccagggta

SEQ ID NO: 90876 - DNA, 80 bp, synthetic construct
  source 1..80: mol_type = other DNA
tttcggcttggagtaagaccttctgtgctttatttggcccgtggttccgtgccattgagaaagagatccttgccctgctt

SEQ ID NO: 90877 - DNA, 80 bp, synthetic construct
  source 1..80: mol_type = other DNA
ggtttctggaagaagcattctggcgagcctggcactcttctttggaacaccgtttggaacatggcgatcatagcacactg

SEQ ID NO: 90878 - DNA, 80 bp, synthetic construct
  source 1..80: mol_type = other DNA
tcccgagcgcgccgaacagctacgcctagcagtttgtgatttccttcgagggctgacgaatgttgcgcaggtttgtgttg

SEQ ID NO: 90879 - DNA, 80 bp, synthetic construct
  source 1..80: mol_type = other DNA
atgtagactctcgtggtgctattttgcgccgtcagtataatttgtccacctcccctttaacctcatctgttgcttctgga

SEQ ID NO: 90880 - DNA, 80 bp, synthetic construct
  source 1..80: mol_type = other DNA
actaatcttgtcttgtatgccgccccgcttaaccctcttctgcctctccaagacggcaccaatactcacatcatggcgac

SEQ ID NO: 90881 - DNA, 80 bp, synthetic construct
  source 1..80: mol_type = other DNA
atcgccctttggtgccgaatgccgtcggcggttatgcaatatctatttccttttggcctcagactacaactacacccacc

SEQ ID NO: 90882 - DNA, 80 bp, synthetic construct
  source 1..80: mol_type = other DNA
catttacctcctgaggttctgttaccacctggcacctaccatacaacctcctatcttctgatccacgacggcaatcgtgc

SEQ ID NO: 90883 - DNA, 80 bp, synthetic construct
  source 1..80: mol_type = other DNA
tctgttgacatgaattcaatcacttctactgatgttaggattttagttcagccaggcatagcctctgagctggtcatccc

SEQ ID NO: 90884 - DNA, 80 bp, synthetic construct
  source 1..80: mol_type = other DNA
cacccgtgtgtccagatacactagtacagcccggcaccgtctgcgccgtggtgccgatgggacagccgagcttacaacta

SEQ ID NO: 90885 - DNA, 80 bp, synthetic construct
  source 1..80: mol_type = other DNA
cgtcgtgacttatgagggtgatactagtgcgggttataatcacgatgtgtctatacttcgtgcatggatccgcaccacca

SEQ ID NO: 90886 - DNA, 80 bp, synthetic construct
  source 1..80: mol_type = other DNA
tgactggtctaaggtcaccttggacggtcggccacttactaccatccagcagtactctaagacattttatgtactgccgc

SEQ ID NO: 90887 - DNA, 80 bp, synthetic construct
  source 1..80: mol_type = other DNA
tgtctctgcagtaggcgttctagctccgcactctgctttagctgtgcttgaagataccattgattatcccgcccgtgccc

SEQ ID NO: 90888 - DNA, 80 bp, synthetic construct
  source 1..80: mol_type = other DNA
atactttcgacgatttctgccctgagtgccgcaatctcggcttgcagggctgtgctttccagtctactgttgctgagctt

SEQ ID NO: 90889 - DNA, 80 bp, synthetic construct
  source 1..80: mol_type = other DNA
aaatgaaggtaggtaagacccgggagtcttaattaattcccctttgtgcccccttctaaattttgttctgttattttctt

SEQ ID NO: 90890 - DNA, 80 bp, synthetic construct
  source 1..80: mol_type = other DNA
cccgagccatccccaatgccttatgtcccgtaccctcgctcaacagaggtgtatgttaggtctatattcggccctggtgg

SEQ ID NO: 90891 - DNA, 80 bp, synthetic construct
  source 1..80: mol_type = other DNA
gtcgccttctctttttccgtcggcctgctctaccaagtctacattccacgccgtcccggtccatatttgggatcggctta

SEQ ID NO: 90892 - DNA, 80 bp, synthetic construct
  source 1..80: mol_type = other DNA
gagcgcagatgctgtcggtcgatgccatggaggcccatcagttcattaaggctcctggcatcactactgccattgagcaa

SEQ ID NO: 90893 - DNA, 80 bp, synthetic construct
  source 1..80: mol_type = other DNA
ttgctgccttggagccaccccaccccacaccccccgctagtgacatctgggtgctgccgccgccttctgaagaacaccag

SEQ ID NO: 90894 - DNA, 80 bp, synthetic construct
  source 1..80: mol_type = other DNA
attgatgcggtgcctgtcccccccacccctgagcttgctcagctgcccagctctgttgagcctagaggccccgtgcgtaa

SEQ ID NO: 90895 - DNA, 80 bp, synthetic construct
  source 1..80: mol_type = other DNA
gccgccgccgccgccaccgtctcgcactcgtcgcctcctttatacttacccagacggcgccaaggtgtatgcggggtcac

SEQ ID NO: 90896 - DNA, 80 bp, synthetic construct
  source 1..80: mol_type = other DNA
gtagcgacatacgcacatgtggtcgatgccatggaggcccatcagttcattaaggctcctggcattactactgccatcga

SEQ ID NO: 90897 - DNA, 80 bp, synthetic construct
  source 1..80: mol_type = other DNA
tttgggtgctgccgccaccctcagaagaatctcaggttgatgctgtgccagccccccctgctcctgagcccgcccagccg

SEQ ID NO: 90898 - DNA, 80 bp, synthetic construct
  source 1..80: mol_type = other DNA
cccagccctgctgggccaaagactcccgtgcgtaagccatcattaccaccgcccccgcgcacccgtcgcctcctttacac

SEQ ID NO: 90899 - DNA, 80 bp, synthetic construct
  source 1..80: mol_type = other DNA
ttttccccgcccgaggcgactgctcttgtgtcagcccctgccccgggagtgccccgccccacaccccctgttagtgatat

SEQ ID NO: 90900 - DNA, 80 bp, synthetic construct
  source 1..80: mol_type = other DNA
tactatctctctatgggtcgacgccatggaggcccatcagttcattaaggctcctggcattactactgccattgagcaag

SEQ ID NO: 90901 - DNA, 80 bp, synthetic construct
  source 1..80: mol_type = other DNA
taccacatctaggctccccgcctgtgagccacccacaccaccaccggccctagccccggttagtaatcaagctaacccgt

SEQ ID NO: 90902 - DNA, 80 bp, synthetic construct
  source 1..80: mol_type = other DNA
ctagccttactacacccaggccctctgcctgcgagccgcctacaccgccaccggctcgcactcgccggctcctttatgta

SEQ ID NO: 90903 - DNA, 80 bp, synthetic construct
  source 1..80: mol_type = other DNA
ggtgccccctcgtccgtaggcgatgtctgggtgtttccaccgccctctgaagggccggcgatcgtcccgccgcccgtgac

SEQ ID NO: 90904 - DNA, 80 bp, synthetic construct
  source 1..80: mol_type = other DNA
taccacacttaggcctcctgcccgtgagctgtctacaccaccaccggccctaaccccggccagtaattcagctaacccgc

SEQ ID NO: 90905 - DNA, 80 bp, synthetic construct
  source 1..80: mol_type = other DNA
cctgcctagacctcccacacccaggtcccccgttcgtaagccacctacaccaccaccagcccgcactcgccggctccttt

SEQ ID NO: 90906 - DNA, 80 bp, synthetic construct
  source 1..80: mol_type = other DNA
atgacgcatcgtctgaatgtggtcgatgccatggaggcccatcagttcattaaggctcctggcattactactgccattga

SEQ ID NO: 90907 - DNA, 80 bp, synthetic construct
  source 1..80: mol_type = other DNA
attaattcctccttgtgccccttctatctctgctctgttatttcttttttctgcggttcccgctccgaaaaatgatttgg

SEQ ID NO: 90908 - DNA, 80 bp, synthetic construct
  source 1..80: mol_type = other DNA
ggagaatcaaataagtggatatcaatgggatcatcatgtactgtgaaagtgtgtcctctgaatacacaaacgttaggaat

SEQ ID NO: 90909 - DNA, 80 bp, synthetic construct
  source 1..80: mol_type = other DNA
tgaaagcaccctttacactcgaacctggtccgtgttgggcttctccagctgtttctctcctctcgagtctcatgccccga

SEQ ID NO: 90910 - DNA, 80 bp, synthetic construct
  source 1..80: mol_type = other DNA
agctgccaccttcagatgacattggcatgtctgtagttactgataccccgccactggtttctcctgtgcagactcagccc

SEQ ID NO: 90911 - DNA, 80 bp, synthetic construct
  source 1..80: mol_type = other DNA
caaactcccggccctgttgcgcccccaccagattcggttgatggtggtgctggccctggcctgattagcgtccctgcggt

SEQ ID NO: 90912 - DNA, 80 bp, synthetic construct
  source 1..80: mol_type = other DNA
gcccccggtgcccgcgcagcccgtaactcagcccgggccccgtcgacgactgctccatacttaccccgatggctcaaaag

SEQ ID NO: 90913 - DNA, 80 bp, synthetic construct
  source 1..80: mol_type = other DNA
gctcggtcttcagggttgtgcttttcagtcaactgttgctgaattgcagcgccttaaaatgaaggtgggtaaatcgcggg

SEQ ID NO: 90914 - DNA, 80 bp, synthetic construct
  source 1..80: mol_type = other DNA
agtataatgaggagagttccgcatccccttcgacagcctcacaaacaaacttcatgtcactagatgagaggcaagttggg

SEQ ID NO: 90915 - DNA, 80 bp, synthetic construct
  source 1..80: mol_type = other DNA
tcaaaatcctccactaaatgaaatgaaatctctgacaggatgattttcctcaaataggatgacttccctgtcaagaccat

SEQ ID NO: 90916 - DNA, 80 bp, synthetic construct
  source 1..80: mol_type = other DNA
gcaaatgatgtagacctttagcaactttcccttctcccagttcttttagttgttcaatagaagttctcttcccataattg

SEQ ID NO: 90917 - DNA, 80 bp, synthetic construct
  source 1..80: mol_type = other DNA
gaaattgttgattttatttttccttccatctctttgaagaaaagtgtctcctcttctccttcaaaataaacatcaccttc

SEQ ID NO: 90918 - DNA, 80 bp, synthetic construct
  source 1..80: mol_type = other DNA
attagtctccttattctcgccacgtcctttctctgaaccaagaactaacctggacactaacttggacaccttgtattcat

SEQ ID NO: 90919 - DNA, 80 bp, synthetic construct
  source 1..80: mol_type = other DNA
aagtagcttgttgaagtcgtactcaagaaggcgttccccatttaggtgcttgttgacaacaacactcttgttacttgcca

SEQ ID NO: 90920 - DNA, 80 bp, synthetic construct
  source 1..80: mol_type = other DNA
agtatctcagcaatttgtaaaccaccctctcagcacaagttatcaaatcttctttcaatttgtccattagtgtcacagaa

SEQ ID NO: 90921 - DNA, 80 bp, synthetic construct
  source 1..80: mol_type = other DNA
gagaagtctgagactaaggccataactaagtacctcacattttggacttgtttctgattcctcttggttgggtttgttag

SEQ ID NO: 90922 - DNA, 80 bp, synthetic construct
  source 1..80: mol_type = other DNA
tccttaaaccccttttgtctgtcagtcgtccttcgtctacctggaatgtgtaatcttcaaattttgtgtagtacattact

SEQ ID NO: 90923 - DNA, 80 bp, synthetic construct
  source 1..80: mol_type = other DNA
gggtggttcccctgtcttttgaattcctcaaatttgttgagtgtaatctggcattcaagagccaaatcttctgacaatcc

SEQ ID NO: 90924 - DNA, 80 bp, synthetic construct
  source 1..80: mol_type = other DNA
atagtgttcaaaactaaggccaactgcagaaaggcatcttttaatttttagaatgaagtcttgtattgagtttttgaaca

SEQ ID NO: 90925 - DNA, 80 bp, synthetic construct
  source 1..80: mol_type = other DNA
actcttccaaggttgtgtttttatttgacctggaccttttcctgtttcttaaaacccttaaaaattctgtctttgtgctg

SEQ ID NO: 90926 - DNA, 80 bp, synthetic construct
  source 1..80: mol_type = other DNA
caataacttactaacctgtcgttcacactactataacaaagccccacccagtgtttttcatttacaagagcctcgagatt

SEQ ID NO: 90927 - DNA, 80 bp, synthetic construct
  source 1..80: mol_type = other DNA
gctttgtttgatcaaggaggaaagacagaggacatccaaattgagtaattgtctcctcctggtgttcaaaagtttcaggc

SEQ ID NO: 90928 - DNA, 80 bp, synthetic construct
  source 1..80: mol_type = other DNA
agcatcgatagtagcctttcataaatggtgctgcttgtcggacatctcctatgcccttcagtgtctcctgcaatgaatct

SEQ ID NO: 90929 - DNA, 80 bp, synthetic construct
  source 1..80: mol_type = other DNA
cattaatgggcaagactcaattgcctccctactcaaatcttgtatgttgtcaacctctgtcatgttttcataaagatggg

SEQ ID NO: 90930 - DNA, 80 bp, synthetic construct
  source 1..80: mol_type = other DNA
gatgggagaattcttcaattaatgtcttagaatctaccattctaaagcttctggtcagcttccctccatccaagtccctt

SEQ ID NO: 90931 - DNA, 80 bp, synthetic construct
  source 1..80: mol_type = other DNA
tgctttgcttgtttctatgactaaccatagttttagtgtacaaaagcatgtgggtgctcctgccaacttgcgtgttgttg

SEQ ID NO: 90932 - DNA, 80 bp, synthetic construct
  source 1..80: mol_type = other DNA
gtcactctatgcaaggcactcttttgaagttgactgtcgatgttgctaaccctagcactccagcctatacttttactaca

SEQ ID NO: 90933 - DNA, 80 bp, synthetic construct
  source 1..80: mol_type = other DNA
caactcttgcgctaacttatgtgatattcttgcagactactaaacttactttgtggaattacttgtttgaaactatacct

SEQ ID NO: 90934 - DNA, 80 bp, synthetic construct
  source 1..80: mol_type = other DNA
acacagttgtttccacttttgtttgtgactatggcttgtgttatgttgttggtgaagcataaacacacctttttgacatt

SEQ ID NO: 90935 - DNA, 80 bp, synthetic construct
  source 1..80: mol_type = other DNA
tattttactcttggtggcaaaattgatatacttacaccacgcaacaagtggagtggtatagctaaaatgcctctcaaaca

SEQ ID NO: 90936 - DNA, 80 bp, synthetic construct
  source 1..80: mol_type = other DNA
aagaattctttacacattctatggtaaagagtctcttcaagatccttcttacatctaccattctgcgtttactgattgtg

SEQ ID NO: 90937 - DNA, 80 bp, synthetic construct
  source 1..80: mol_type = other DNA
aatctggtaaagccaaaccaccactcaatcgtaattatgtttttactggttatcatataaccaaaaatagtaaagtgcag

SEQ ID NO: 90938 - DNA, 80 bp, synthetic construct
  source 1..80: mol_type = other DNA
gacaatgtcgatgctgtgtcatcttttattgagctgctttttgactgtgttggtctctcagtggcttcaacctattttat

SEQ ID NO: 90939 - DNA, 80 bp, synthetic construct
  source 1..80: mol_type = other DNA
ccactgacgtgcttgttaatttttataagagcaaacgctaaaattgttaccttgcctggtagtgatgctagtggcgattg

SEQ ID NO: 90940 - DNA, 80 bp, synthetic construct
  source 1..80: mol_type = other DNA
cccatctgtagatatgcagcccgattattttataaaatataattggcctgaaccaattgacatgaataaagccgacggtg

SEQ ID NO: 90941 - DNA, 80 bp, synthetic construct
  source 1..80: mol_type = other DNA
aattcgcctgttagaagataaaactggcgattttatgtccactattattacttcctgtcaaaatgctgtcagtaagcttc

SEQ ID NO: 90942 - DNA, 80 bp, synthetic construct
  source 1..80: mol_type = other DNA
tcatttacccaaatggccgcacttattcaaatattacattacagactacaaatctgtttcctaaaaatggtgacctaggc

SEQ ID NO: 90943 - DNA, 80 bp, synthetic construct
  source 1..80: mol_type = other DNA
actcaatatgtctactcaccatctaatcataaaagcaacactaatgatgcttttattagtaattattcctactatggcaa

SEQ ID NO: 90944 - DNA, 80 bp, synthetic construct
  source 1..80: mol_type = other DNA
tccatttggcgatggaattgtcatacgtataggtcaaaatgctaataagactggcagtgtaattgtaggacaagcacaga

SEQ ID NO: 90945 - DNA, 80 bp, synthetic construct
  source 1..80: mol_type = other DNA
ctactatgaaaaagatttaccctgcacttatgttgggtagttcttttggtaatttttctgctaataataagtcgggtgct

SEQ ID NO: 90946 - DNA, 80 bp, synthetic construct
  source 1..80: mol_type = other DNA
tattttaatcacacccttcttatcttacctagcaagtgtggaactgtcttccaagttgcatattgtttacttcagcctcg

SEQ ID NO: 90947 - DNA, 80 bp, synthetic construct
  source 1..80: mol_type = other DNA
cactgagtctatgtgtccaggcaatagtaactatgttagttactttttagccgattcacctagtgattgttcttccactt

SEQ ID NO: 90948 - DNA, 80 bp, synthetic construct
  source 1..80: mol_type = other DNA
ctgatgaaatacgcagaaatgggttacgcgacattagaaaattcttcaacctggtcaattgtacctattttgaagagttt

SEQ ID NO: 90949 - DNA, 80 bp, synthetic construct
  source 1..80: mol_type = other DNA
aatgtcacagcagacgaaagggcagagtggtttggcatcgtgcaagatgctcaaggtgtccacctgtacacttcgcgtaa

SEQ ID NO: 90950 - DNA, 80 bp, synthetic construct
  source 1..80: mol_type = other DNA
aaatggtttcaattcaaacaatttatttttgtttgcaactgtgcccatatatgataagcttaattactatacagtaatac

SEQ ID NO: 90951 - DNA, 80 bp, synthetic construct
  source 1..80: mol_type = other DNA
cgcgctccgtcatacaaccgtccaatcagcgagatgcttgggctgcgttttacatatatccactacatcaacttagctac

SEQ ID NO: 90952 - DNA, 80 bp, synthetic construct
  source 1..80: mol_type = other DNA
ttgctaaactttgacgtcaatggttatattacccaggctgcagattgtgggtataatgattatacccagcttatctgttc

SEQ ID NO: 90953 - DNA, 80 bp, synthetic construct
  source 1..80: mol_type = other DNA
gtatggtgattttaatatgaagtctggtgtgtactcaacctcatactattcggccaaacctgtaggcgcatattatgagg

SEQ ID NO: 90954 - DNA, 80 bp, synthetic construct
  source 1..80: mol_type = other DNA
ttgaggctacagaggcaactctcagttttcttttggatttggcgggattgtttaaagtcttcatccgcggagcatatgtg

SEQ ID NO: 90955 - DNA, 80 bp, synthetic construct
  source 1..80: mol_type = other DNA
ctcatgtttaccccgattgcaattttactgaattgtttagggaaagagcccctacaatcatgcagtataagcgtgaagtt

SEQ ID NO: 90956 - DNA, 80 bp, synthetic construct
  source 1..80: mol_type = other DNA
tttacgcgttgtaattacaatctctcactcttgctttctctagtgcaagttgacgagtttgtatgtgataagattacacc

SEQ ID NO: 90957 - DNA, 80 bp, synthetic construct
  source 1..80: mol_type = other DNA
cgaagctcttgcaactgggtgttattcttctttaactgtcgattggtttgcttttccttatgcttggaaatcttaccttg

SEQ ID NO: 90958 - DNA, 80 bp, synthetic construct
  source 1..80: mol_type = other DNA
ctataggttctgcagaccgtatcgtacgttttaattataaccaggactatagtaatccctcttgtcgaattcattctaaa

SEQ ID NO: 90959 - DNA, 80 bp, synthetic construct
  source 1..80: mol_type = other DNA
gtgaattcttcgataggaatttcatatgctggtgcatacagttatataactaactgcaattatggagccacaaataaaga

SEQ ID NO: 90960 - DNA, 80 bp, synthetic construct
  source 1..80: mol_type = other DNA
cgatgttgttaaaccgggagggcgcgccagtcaacaatgtattactggtgctcttaactctcctacaactggtcaacttt

SEQ ID NO: 90961 - DNA, 80 bp, synthetic construct
  source 1..80: mol_type = other DNA
gggcttataattttggtggcgttccttacagagtgtcacgtcttacttatacggaccatcttagtgatccactagatatg

SEQ ID NO: 90962 - DNA, 80 bp, synthetic construct
  source 1..80: mol_type = other DNA
gtctatgttattacagttaaatatgaaccaggagcagaaactgtttgtcccaaacagatacgccctgattatagtaccaa

SEQ ID NO: 90963 - DNA, 80 bp, synthetic construct
  source 1..80: mol_type = other DNA
cattactcatttgttaggttcatgtattagttatgacatttatggcataacaggcacgggtgttttccagctatgcaacg

SEQ ID NO: 90964 - DNA, 80 bp, synthetic construct
  source 1..80: mol_type = other DNA
caactggaatccgccagcaaaagtttgtctatgacaaatttgataatataattggctttcactctgatgatggcaattac

SEQ ID NO: 90965 - DNA, 80 bp, synthetic construct
  source 1..80: mol_type = other DNA
tatacttcacagggctttgtggttcttcaaggtaaagtttctacacttgttaaacaagtgttagacttacttaataaggg

SEQ ID NO: 90966 - DNA, 80 bp, synthetic construct
  source 1..80: mol_type = other DNA
tattgtgttgcaccctgtgttagtgtgcctgtttctgttatatatgatgacaacactaaccaatacgctaccttgtttgg

SEQ ID NO: 90967 - DNA, 80 bp, synthetic construct
  source 1..80: mol_type = other DNA
tagtgttgcttgtcaacatatatccacaatggctgctcagttttctcgtgaaactagagcttctcttgtttcaagaaaca

SEQ ID NO: 90968 - DNA, 80 bp, synthetic construct
  source 1..80: mol_type = other DNA
tgcaaaatcttcttcaaacctctgttggttgtgtcatgggtttccacgaaacaaatgacactgttgaagagtgcaatctt

SEQ ID NO: 90969 - DNA, 80 bp, synthetic construct
  source 1..80: mol_type = other DNA
tctttgggacaatcactctgtgccatacctcctaacaccaacttgcgttcaggacgctccacatttggactaggttcttt

SEQ ID NO: 90970 - DNA, 80 bp, synthetic construct
  source 1..80: mol_type = other DNA
agcctataacagtcccttgcgtgttgatgctcttaactcttctgagtttaaggtgtccttgccgcttaattttacatttg

SEQ ID NO: 90971 - DNA, 80 bp, synthetic construct
  source 1..80: mol_type = other DNA
gtgttacacaagaatatattgagactagcatacagaagattacagttgactgtaagcagtatgtatgtaatggttttgct

SEQ ID NO: 90972 - DNA, 80 bp, synthetic construct
  source 1..80: mol_type = other DNA
aagtgtgagaaactgcttgaacaatatggtcagttttgctcaaaaattaatcaagctcttcatggtgctaatttgcgcca

SEQ ID NO: 90973 - DNA, 80 bp, synthetic construct
  source 1..80: mol_type = other DNA
agatgactcagttcgcaacttgtttgagagtgtcaaaacacctcagacagttcctcttactacaggctttggtggtgaat

SEQ ID NO: 90974 - DNA, 80 bp, synthetic construct
  source 1..80: mol_type = other DNA
tcaacctcactctccttgagccgctttctgtttctactggttcttctaatgcacgtagtgctttggaagaattattattt

SEQ ID NO: 90975 - DNA, 80 bp, synthetic construct
  source 1..80: mol_type = other DNA
gatagtgtcacaatagctgacccaggttacatgcaaggttacgatgactgcatgcaacaaggacctgcgtctgctagaga

SEQ ID NO: 90976 - DNA, 80 bp, synthetic construct
  source 1..80: mol_type = other DNA
tatgcagcttttgcacactaaaatctcatgggctggttctaaaattaatgcagtcatctataacggtagagagtctttga

SEQ ID NO: 90977 - DNA, 80 bp, synthetic construct
  source 1..80: mol_type = other DNA
caactactaatgaggctttccagaaagtccaagatgccgtgaacacaaatgctcaggctttagctaagttagctagtgaa

SEQ ID NO: 90978 - DNA, 80 bp, synthetic construct
  source 1..80: mol_type = other DNA
ttgtctaatacttttggcgctatttcttcctccattggtgacatcattcaacgtcttgatgttctcgaacaggaggttca

SEQ ID NO: 90979 - DNA, 80 bp, synthetic construct
  source 1..80: mol_type = other DNA
tcgttcagcacagttggctaaggataaagtcaatgagtgcgttaaatcccagtccactaggtctggtttttgtggtcaag

SEQ ID NO: 90980 - DNA, 80 bp, synthetic construct
  source 1..80: mol_type = other DNA
gcactcatatagtgtcttttgttattaatgcccctaatggcctttattttatgcatgttggttatcatcctagccaacat

SEQ ID NO: 90981 - DNA, 80 bp, synthetic construct
  source 1..80: mol_type = other DNA
tcttctctactggtacctattattgtgtcaccaccaaggcaaagtctgttcaacaagattttgatgtggttttgccaggt

SEQ ID NO: 90982 - DNA, 80 bp, synthetic construct
  source 1..80: mol_type = other DNA
taaaaatcaaactactaggagtgctgatgaatggtcgtacacgggttcttctttctatgcacctgaacccatcaccactc

SEQ ID NO: 90983 - DNA, 80 bp, synthetic construct
  source 1..80: mol_type = other DNA
taaatacaaggtatgttgcaccccaagtaacattccagaacatctctaataacctccctcctcctttgcttagtaattct

SEQ ID NO: 90984 - DNA, 80 bp, synthetic construct
  source 1..80: mol_type = other DNA
actggcacagacttcaaggatgagttggatgagtttttcaaaaatgttagcaccaatataccaaattttggtgctttaac

SEQ ID NO: 90985 - DNA, 80 bp, synthetic construct
  source 1..80: mol_type = other DNA
gactcttagctctagctttatgtgttttcttcatactgtgttgcacaggttgtggcacaagttgcttgggaaaatttaaa

SEQ ID NO: 90986 - DNA, 80 bp, synthetic construct
  source 1..80: mol_type = other DNA
tgtaatcgttgttgtgataaatatgaagaatacgacctcgagccgcataagattcatgttcactaattaacgaacttcca

SEQ ID NO: 90987 - DNA, 80 bp, synthetic construct
  source 1..80: mol_type = other DNA
ttccaatgagagtccaaagaccacttactcttttgttagtggtaacactctcgcttttggccaatgctttttcaaaaccc

SEQ ID NO: 90988 - DNA, 80 bp, synthetic construct
  source 1..80: mol_type = other DNA
ttttatatacctgaacattgccagaattattctggtcgtatgctcagagcttgtattaggactgcccaaactgatactgt

SEQ ID NO: 90989 - DNA, 80 bp, synthetic construct
  source 1..80: mol_type = other DNA
tttgtacacaaatcttagaattgatctcccatctacagactctactggcacagagtcagttactgttgatcgtggatcat

SEQ ID NO: 90990 - DNA, 80 bp, synthetic construct
  source 1..80: mol_type = other DNA
gagtgtttaaagaagcagctaggattgcttcaacctactgacaattcaacaacagttagtgttactgtgtccagtaatac

SEQ ID NO: 90991 - DNA, 80 bp, synthetic construct
  source 1..80: mol_type = other DNA
tttcaactcatgatgacattagtgagtctgtcactagtgtgaatctttttgatgttggttacacagttaattaacgaact

SEQ ID NO: 90992 - DNA, 80 bp, synthetic construct
  source 1..80: mol_type = other DNA
agagatggaggaatacccgatggatgttcactctacttacggcactcaagcctactccctacgtgtgaggaagaggcgtc

SEQ ID NO: 90993 - DNA, 80 bp, synthetic construct
  source 1..80: mol_type = other DNA
attcaccaggtaaaaaccttcgatacgttaaacgtaggttttcttctttacgccctgaagatcttagtgtggttacacaa

SEQ ID NO: 90994 - DNA, 80 bp, synthetic construct
  source 1..80: mol_type = other DNA
cccacacattacatcagggttacattttctgacccgaacatgtggtatctacgttctggtcatcacttacactcagttca

SEQ ID NO: 90995 - DNA, 80 bp, synthetic construct
  source 1..80: mol_type = other DNA
tacacctatggccgtggaactcgtttccatacgatctgcagctgaaggtaccaaacaaattattcattcacaccccattt

SEQ ID NO: 90996 - DNA, 80 bp, synthetic construct
  source 1..80: mol_type = other DNA
tacatgatccaggattttaacgaactatggccttttctgcggccttgtttaaacctgtacaattggttcctgtttctcct

SEQ ID NO: 90997 - DNA, 80 bp, synthetic construct
  source 1..80: mol_type = other DNA
gtagatcatggtgttgaatctaatgattctgttgtttttacatacattccagctggcggttatgttgctgctttagctgt

SEQ ID NO: 90998 - DNA, 80 bp, synthetic construct
  source 1..80: mol_type = other DNA
taatgtttgtctcatacctttattactactgctacgtcaggatacttgtcgtcgtagcatttgtaggacgttggtcttgt

SEQ ID NO: 90999 - DNA, 80 bp, synthetic construct
  source 1..80: mol_type = other DNA
acctgttagttctttataatctcttattagccattatattagttaatggcatacattatccaactggaggctttcttata

SEQ ID NO: 91000 - DNA, 80 bp, synthetic construct
  source 1..80: mol_type = other DNA
gccttcttagttattcttataatactctggtttgtagacagaattcgtttctgcctcatgctgggttcttatattccact

SEQ ID NO: 91001 - DNA, 80 bp, synthetic construct
  source 1..80: mol_type = other DNA
ccatcatctatggcactatccatttttagtgctgtctatccaatagacttagcttcccagattatttctggcatcattgc

SEQ ID NO: 91002 - DNA, 80 bp, synthetic construct
  source 1..80: mol_type = other DNA
agccatctcaggaatgatgtgggtttcctactttgttcagagtattcggctgtttatgagaactggctcttggtggtcat

SEQ ID NO: 91003 - DNA, 80 bp, synthetic construct
  source 1..80: mol_type = other DNA
ctaccttatttaaacttaagggtggtgcacctgttagagagctgacctttggtgacgatgaagtacatgaggtagcagct

SEQ ID NO: 91004 - DNA, 80 bp, synthetic construct
  source 1..80: mol_type = other DNA
ttaacccagagacaaattgcctcttgaatgtgccacttggtggaacaacagttgtgcgcccacttgtagaagattctact

SEQ ID NO: 91005 - DNA, 80 bp, synthetic construct
  source 1..80: mol_type = other DNA
ataagaagtgttactgttgagtacaacattcatgttgtattagacgcacttttggcttcttctagtcttagaacctttgt

SEQ ID NO: 91006 - DNA, 80 bp, synthetic construct
  source 1..80: mol_type = other DNA
ggagctcccggaggagacttgctctacctagatttgctgaacagacttcaagctttggagtctggcaaaacaaagcagtc

SEQ ID NO: 91007 - DNA, 80 bp, synthetic construct
  source 1..80: mol_type = other DNA
acagcctaaagtcatcactaagaaggatgctgctgctgctaaaaataagatgcgccataagcgtgtcgccaccaaaagtt

SEQ ID NO: 91008 - DNA, 80 bp, synthetic construct
  source 1..80: mol_type = other DNA
tcaacatggttcaagccttcggtctccgtggcgcaggtgacctgcagggaaactttggtgatttacaacttaacaaactt

SEQ ID NO: 91009 - DNA, 80 bp, synthetic construct
  source 1..80: mol_type = other DNA
ggcacagaggaccctcgttggcctcagatagctgagcttgctccatctgccagtgcttttatgggtatgtctcaatttaa

SEQ ID NO: 91010 - DNA, 80 bp, synthetic construct
  source 1..80: mol_type = other DNA
cccagcgctccaagtctcggcctagtgtggcacctggtccaatgactgatgttaacactgagtagtgttattcaaagtaa

SEQ ID NO: 91011 - DNA, 80 bp, synthetic construct
  source 1..80: mol_type = other DNA
tagacaagtctttatcagttgatgaatttgtccatgtggtaaaggagcaggttgtagacttgcttgttaaattgctacgt

SEQ ID NO: 91012 - DNA, 80 bp, synthetic construct
  source 1..80: mol_type = other DNA
caagagcgcggcaaccgttgatgtttggtaaccccatctcaccatcgtttgtccactcttgcacagaatggaatcatgtt

SEQ ID NO: 91013 - DNA, 80 bp, synthetic construct
  source 1..80: mol_type = other DNA
ggtaagcaaattcccgattttgatttagacgattttattgacacaccatgctattgttttaatagtgatggtgatttatc

SEQ ID NO: 91014 - DNA, 80 bp, synthetic construct
  source 1..80: mol_type = other DNA
ttggtcttcaactatgatcttttcattacaccctgtggagtgtgaagatgattatgttgaagaagaagctgatggtgccg

SEQ ID NO: 91015 - DNA, 80 bp, synthetic construct
  source 1..80: mol_type = other DNA
aggaagaagtcaccgttgatactactgttgagtcagctgcacaggctgacttgcagcatgaagattctgatgatgacggt

SEQ ID NO: 91016 - DNA, 80 bp, synthetic construct
  source 1..80: mol_type = other DNA
tgggctgcagctgttgaagaagcattcccccttgatgaatctgaagaagtttctgttgaggttgtgtgcgaagatgtcac

SEQ ID NO: 91017 - DNA, 80 bp, synthetic construct
  source 1..80: mol_type = other DNA
ccaacttgcagaagaacctgctaaggatatacctgagaaggtctctttggtttctgtacaggaattagtgcagaatacta

SEQ ID NO: 91018 - DNA, 80 bp, synthetic construct
  source 1..80: mol_type = other DNA
tggatgaagttgtacctgagcaggtaacacttcctaaagaacctcaagttattcaacctgaggttttagaggtaactcct

SEQ ID NO: 91019 - DNA, 80 bp, synthetic construct
  source 1..80: mol_type = other DNA
gtctatgaggctgacaccgaacagacacagagtgccattgcaaagcctaagagattacgcaagaagcgtaatgttgaccc

SEQ ID NO: 91020 - DNA, 80 bp, synthetic construct
  source 1..80: mol_type = other DNA
aatgctacgaacagtctgtgttagttaatgctgctaacacacatcttaagcatggcggtggtatagccgctgctattaat

SEQ ID NO: 91021 - DNA, 80 bp, synthetic construct
  source 1..80: mol_type = other DNA
tacaaaactttcaccatggttcatggacggctatgaagcctgtgaagcggtgaaggtcatgttatctaacaatgagcaat

SEQ ID NO: 91022 - DNA, 80 bp, synthetic construct
  source 1..80: mol_type = other DNA
tcatttgattatcttattagagaaattgaaactagggtactagttgttgttaattctcaggatgtctataaaagtcttac

SEQ ID NO: 91023 - DNA, 80 bp, synthetic construct
  source 1..80: mol_type = other DNA
aactgtgagtattcctcagggtttgactttttcatatgatgggttgcgtggcgccatacgtaaagctaaagattatgggt

SEQ ID NO: 91024 - DNA, 80 bp, synthetic construct
  source 1..80: mol_type = other DNA
aatcccttaacgttgatggtgtgcaatattattgttacacggctagggatgctttagacacaattttacaagaggctaat

SEQ ID NO: 91025 - DNA, 80 bp, synthetic construct
  source 1..80: mol_type = other DNA
aagtctattggtattgtatctatgcccttggggtatgtgtctcacggtctagatttaatgcaagctggaactattgtacg

SEQ ID NO: 91026 - DNA, 80 bp, synthetic construct
  source 1..80: mol_type = other DNA
taaggtcaaagtaccttatgtatgccttctagctaataaggagcaacaagctattttgatgtctgaagatgttaagttaa

SEQ ID NO: 91027 - DNA, 80 bp, synthetic construct
  source 1..80: mol_type = other DNA
agaaccagagttttaacaagctccttcattggtcagatcaaaccatatgttataaggatgataagttttatgtggtaaag

SEQ ID NO: 91028 - DNA, 80 bp, synthetic construct
  source 1..80: mol_type = other DNA
aacaatgttactttgccatttgaaactgttgaggcttgtcgcacttatcttgattcacgtacgacacagcaattaacaat

SEQ ID NO: 91029 - DNA, 80 bp, synthetic construct
  source 1..80: mol_type = other DNA
tgctctttgtgcccatccatttggctgggtatactaagcatctcccaggccctcgtgtttacctggttgagaggctgatc

SEQ ID NO: 91030 - DNA, 80 bp, synthetic construct
  source 1..80: mol_type = other DNA
cgaagtgttggtcactgtcgatggtgttaattttagaacagttgttctaaataataagaactcctataggtcacagttgg

SEQ ID NO: 91031 - DNA, 80 bp, synthetic construct
  source 1..80: mol_type = other DNA
tcaagtgtgttgatccattcatggttaaccagttggcttatagctctagtgcaaatgatggccttgttggcacaactttg

SEQ ID NO: 91032 - DNA, 80 bp, synthetic construct
  source 1..80: mol_type = other DNA
ccctccataacttattcaccagctacaattctaactggtagtgtttatactaatagttgcctagtatcttcagatggaga

SEQ ID NO: 91033 - DNA, 80 bp, synthetic construct
  source 1..80: mol_type = other DNA
gccaggcggtgatgctattagtttaagctttaataaccttttagggtttgattctagcaaaccagtcactaagaagtata

SEQ ID NO: 91034 - DNA, 80 bp, synthetic construct
  source 1..80: mol_type = other DNA
tctgcgtcaaatttttgacgtagctcctgttgaaattgaaaacaaatttacacctttgagtgtagaacctacacctatag

SEQ ID NO: 91035 - DNA, 80 bp, synthetic construct
  source 1..80: mol_type = other DNA
aggatgcagaaacacccgctttacaggtgtctctaactcaatcagaaatgactattgtcaaatgcaagggcttgagtaag

SEQ ID NO: 91036 - DNA, 80 bp, synthetic construct
  source 1..80: mol_type = other DNA
ccttttgttaaggacaatgtcagttttgttgttgatgatttaggcattcctgttgttgaatacctatctaaggaagattt

SEQ ID NO: 91037 - DNA, 80 bp, synthetic construct
  source 1..80: mol_type = other DNA
gcatacgctttatgtagatcctaagtatcaagtcattgtcttaaaagataatgtactttctactatgcttagactgcaca

SEQ ID NO: 91038 - DNA, 80 bp, synthetic construct
  source 1..80: mol_type = other DNA
gctgtgcgtcatttaggttttactaaaggtattttcgcaaactgctttagttttgttaagatgctatttatgctcccact

SEQ ID NO: 91039 - DNA, 80 bp, synthetic construct
  source 1..80: mol_type = other DNA
agtttattttagtgattcaaaacctagcactactgaagttaaagtgagtgctttaaaaacagctggcgttgtaacaggta

SEQ ID NO: 91040 - DNA, 80 bp, synthetic construct
  source 1..80: mol_type = other DNA
gccgtggtggttatcactacaagcgagtgccttaccagcgtaataacacctcatttcctgagtggattgatgatcttgaa

SEQ ID NO: 91041 - DNA, 80 bp, synthetic construct
  source 1..80: mol_type = other DNA
acgtaagttctatcaacacgttattaacggttgtaaggacacggcatgccttctttgttataaaaggaatcgtcttacca

SEQ ID NO: 91042 - DNA, 80 bp, synthetic construct
  source 1..80: mol_type = other DNA
gagttgaagcttctaccgttgtctgtggtggaaaacgtacgttttacattgcagctaatggtggtatttcattctgtcgt

SEQ ID NO: 91043 - DNA, 80 bp, synthetic construct
  source 1..80: mol_type = other DNA
gctgatccaaagggcaagtatgctcagaatctgcttaagaagttgactggtggtgatgtaacgcctgtcgaccaatatat

SEQ ID NO: 91044 - DNA, 80 bp, synthetic construct
  source 1..80: mol_type = other DNA
tgttggcaacactagtgaaattgccatcaagatgtttgattcctttgttaatagtttcgtctcgttgtataatgtcacac

SEQ ID NO: 91045 - DNA, 80 bp, synthetic construct
  source 1..80: mol_type = other DNA
tgtgctgtgttaatgtatttttgtttacctacattttccatggcgtcagttgaattttatgatgaccgcattctagaatt

SEQ ID NO: 91046 - DNA, 80 bp, synthetic construct
  source 1..80: mol_type = other DNA
taaagttctagataatggtatcattagggatattaaccccgatgataagtgctttgctaataagtaccggtcttttactc

SEQ ID NO: 91047 - DNA, 80 bp, synthetic construct
  source 1..80: mol_type = other DNA
gcggactatactcagtgtgccgtgattgccgtatgtgctgccattcttaatagtttgtgcatttgctttgttgcttctat

SEQ ID NO: 91048 - DNA, 80 bp, synthetic construct
  source 1..80: mol_type = other DNA
acccctttgtatagtcccatacactgcattgtactactatgctacattttattttaccaatgaaccagcatttattatgc

SEQ ID NO: 91049 - DNA, 80 bp, synthetic construct
  source 1..80: mol_type = other DNA
tcggcgcaatcgcaggtttcatagaaaatggttgggaagggatggtagacggttggtatggtttcaggcatcaaaactct

SEQ ID NO: 91050 - DNA, 80 bp, synthetic construct
  source 1..80: mol_type = other DNA
ggcaagcggcagatcttaaaagcactcaagcggcaatcaaccaaatcaccgggaaactaaatagagtaatcaagaagacg

SEQ ID NO: 91051 - DNA, 80 bp, synthetic construct
  source 1..80: mol_type = other DNA
aatgaaaaatttcatcagatcgaaaaagaattcacagaagtagaagggagaattcaggacctagagagatacgttgaaga

SEQ ID NO: 91052 - DNA, 80 bp, synthetic construct
  source 1..80: mol_type = other DNA
gtcctgctaggattcattatgtgggcatgccaaaaaggcaacattaggtgcaacatttgcatttgaatgcattaattaaa

SEQ ID NO: 91053 - DNA, 80 bp, synthetic construct
  source 1..80: mol_type = other DNA
gtttctacctctgtgaattctttttcgatctgatgaaatttttcattcgtcttcttgattactctatttagtttcccggt

SEQ ID NO: 91054 - DNA, 80 bp, synthetic construct
  source 1..80: mol_type = other DNA
tactgagctggtccagagtacctcaaaaggtgaaatatgcagtagtcctcaccaaatccttgatggaaaaaattgtacac

SEQ ID NO: 91055 - DNA, 80 bp, synthetic construct
  source 1..80: mol_type = other DNA
cgactgttacccttattatgtgccggagtatgcctcccttaggtcactagttgcctcatccggcaccctggaatttactc

SEQ ID NO: 91056 - DNA, 80 bp, synthetic construct
  source 1..80: mol_type = other DNA
attggactggagttactcaagacggagcaagctattcttgcagaaggggatctgaaaaaagtttctttagtagattgaat

SEQ ID NO: 91057 - DNA, 80 bp, synthetic construct
  source 1..80: mol_type = other DNA
tggttatataggttggaattcaaatatccagcgctgaacgtaactatgccaaacaatgacaaatttgacaaattgtacat

SEQ ID NO: 91058 - DNA, 80 bp, synthetic construct
  source 1..80: mol_type = other DNA
ttggggggtacaccacccgggtacggacacggaccagaccagtctatatactcaagcatcagggagagttacagtctcca

SEQ ID NO: 91059 - DNA, 80 bp, synthetic construct
  source 1..80: mol_type = other DNA
aatgtcgggtctagaccctgggtaaggggtgtctccagcataataagcatctattggacaatagtaaaaccgggagacat

SEQ ID NO: 91060 - DNA, 80 bp, synthetic construct
  source 1..80: mol_type = other DNA
acagcacagggaatctaattgcccctcggggttacttcaaaatacaaagtggaaaaagctcaataatgaggtcagatgca

SEQ ID NO: 91061 - DNA, 80 bp, synthetic construct
  source 1..80: mol_type = other DNA
agtgacaacagcatggcaacgctgtgcctggggcatcacgcagtaccaaacggaacgttagtgaaaacaataaccgatga

SEQ ID NO: 91062 - DNA, 80 bp, synthetic construct
  source 1..80: mol_type = other DNA
ggtacggacacggaccagaccagtctatatactcaagcatcagggagagttacagtctccaccaaatggagccaacaaac

SEQ ID NO: 91063 - DNA, 80 bp, synthetic construct
  source 1..80: mol_type = other DNA
gctaggttggaggacgatgcgagaaaagaaatgacaaattgctctttcaatgtcaccactataggaaataaaaggcagga

SEQ ID NO: 91064 - DNA, 80 bp, synthetic construct
  source 1..80: mol_type = other DNA
atatgcacttttttataagcttgatgtagtaaaaatagatgcaaataggacaacctatacattgataaactgtaatacct

SEQ ID NO: 91065 - DNA, 80 bp, synthetic construct
  source 1..80: mol_type = other DNA
cacctgatagatgcccgccaacatgcatctacatagcagggatggctgagttgggggctttcttttccattttacaggac

SEQ ID NO: 91066 - DNA, 80 bp, synthetic construct
  source 1..80: mol_type = other DNA
gttctcaattggtcaatatatcatcgggttcgcactggccattgttttgaaagcattgtacatgctgtcaactcgtggga

SEQ ID NO: 91067 - DNA, 80 bp, synthetic construct
  source 1..80: mol_type = other DNA
cctggatgtgaatgcaattgatattgatgaaccgagtggacagacagctgattggttctcaattggtcaatacatcatcg

SEQ ID NO: 91068 - DNA, 80 bp, synthetic construct
  source 1..80: mol_type = other DNA
catactttcttgggcgtgagaaggcactgagagaatcacacttgaatgagatagatgacttgatcgagctcgcagcctca

SEQ ID NO: 91069 - DNA, 80 bp, synthetic construct
  source 1..80: mol_type = other DNA
tgcacgtttgtgttactggggatgataggaatgcaactgctagttttatttatgatggggtgcttgtcgacagtattgtt

SEQ ID NO: 91070 - DNA, 80 bp, synthetic construct
  source 1..80: mol_type = other DNA
caggcagcaactagtgtctttgcacaaggaggaaactttaaaggcacaagaaaaaccattaaatgttttaattgtggcaa

SEQ ID NO: 91071 - DNA, 80 bp, synthetic construct
  source 1..80: mol_type = other DNA
taggacatggagtatccatagaatggagacaaggaaaatacaggacacaagttgatcctgaaatggcagacaagctaata

SEQ ID NO: 91072 - DNA, 80 bp, synthetic construct
  source 1..80: mol_type = other DNA
cctctcaagacagggtcaaaaggactgcgctctttatataacaccctggcagttctttattgtgtccatagtaacatatc

SEQ ID NO: 91073 - DNA, 80 bp, synthetic construct
  source 1..80: mol_type = other DNA
tttccaaggacttggttacatgggttaggagaatacatctatcacacatatggagacacctgggagggggtagaggcaat

SEQ ID NO: 91074 - DNA, 80 bp, synthetic construct
  source 1..80: mol_type = other DNA
tatcaggatactacaacaattactgttcatccattataggattggctgtcagcacagcagaatagggattactgttcaag

SEQ ID NO: 91075 - DNA, 80 bp, synthetic construct
  source 1..80: mol_type = other DNA
ttataatagcagtagtagtctgggtattgctatatatagaatataagaaaataaaattgcaggaaaaaatagaacaaata

SEQ ID NO: 91076 - DNA, 80 bp, synthetic construct
  source 1..80: mol_type = other DNA
ggtacacaatacacaagaggctttggacaagataaaagagaaacaggaacagcacaagtctgagccaaagcaaccagaag

SEQ ID NO: 91077 - DNA, 80 bp, synthetic construct
  source 1..80: mol_type = other DNA
agacagagaataagggatggagcagaggacagtggcaaggagattgatggggatgcagagtggttggccattcttctgtc

SEQ ID NO: 91078 - DNA, 80 bp, synthetic construct
  source 1..80: mol_type = other DNA
tcctgatgagcttgacacttgggacacttgggtctgacaattattgggtaacagtgtactatggagtaccagtatggaag

SEQ ID NO: 91079 - DNA, 80 bp, synthetic construct
  source 1..80: mol_type = other DNA
gaagcacataccgttcttttctgcgcctcagatgctaaagcccatagtgcagaggctcacaacatctgggccacacaagc

SEQ ID NO: 91080 - DNA, 80 bp, synthetic construct
  source 1..80: mol_type = other DNA
ggatggaatgagacagtaaaccagactgcaagcccggacatgaaacaaatgagaaattgctcatataatgtcaccaatga

SEQ ID NO: 91081 - DNA, 80 bp, synthetic construct
  source 1..80: mol_type = other DNA
gataagagataaaaagaagcaagtttactctctgttttatgtagatgatgtagtaccactcaatgacagtgtgacaacat

SEQ ID NO: 91082 - DNA, 80 bp, synthetic construct
  source 1..80: mol_type = other DNA
aatgcacacatggaataacaccaataatatccactcagttaatcctaaatggaagcttagatacaaaggatatagttatt

SEQ ID NO: 91083 - DNA, 80 bp, synthetic construct
  source 1..80: mol_type = other DNA
agacatcatagagatagaggaggtagaggtgatctgttggtgcaatggaatgagacagtgtcaatgaactgtacaaggcc

SEQ ID NO: 91084 - DNA, 80 bp, synthetic construct
  source 1..80: mol_type = other DNA
aggaaataattcagtaggacaggtgcagataggacctgctatgacattttacaacatagagaaaatagtaggagacatta

SEQ ID NO: 91085 - DNA, 80 bp, synthetic construct
  source 1..80: mol_type = other DNA
gacaagcacactgtaatgtctctggaaactgggcatcaatgtggaacaaaacaaaagaaaaaatacagaacctactggga

SEQ ID NO: 91086 - DNA, 80 bp, synthetic construct
  source 1..80: mol_type = other DNA
agagtttttcctctgcaacactactaacttatttaatgacagcaagaatgcaactaatgggggtattactctgccctgta

SEQ ID NO: 91087 - DNA, 80 bp, synthetic construct
  source 1..80: mol_type = other DNA
gaataaaacaatttgtgaatttgtggacaagagtaggaaaaggaatttacgcaccaccaattcggggagagctttcctgt

SEQ ID NO: 91088 - DNA, 80 bp, synthetic construct
  source 1..80: mol_type = other DNA
aacttcaatattactggactaatgctagaacatagtggtaacaccaacagtacaatattcctactatatccctcaggagg

SEQ ID NO: 91089 - DNA, 80 bp, synthetic construct
  source 1..80: mol_type = other DNA
aaacatggttaatctctggagacaagagctgtataagtacaaagtagtcagtatagagcccataggagtagcaccaggta

SEQ ID NO: 91090 - DNA, 80 bp, synthetic construct
  source 1..80: mol_type = other DNA
tcttatgatggcatctggaataatttaacctggcaacaatgggatgagaaagtaaaaaactattcaggtgtcattttcgg

SEQ ID NO: 91091 - DNA, 80 bp, synthetic construct
  source 1..80: mol_type = other DNA
tcttatagagcaggcacaagaacaacaaaacacaaatgagaaatcactcttggaattggatcaatgggcaagtctgtgga

SEQ ID NO: 91092 - DNA, 80 bp, synthetic construct
  source 1..80: mol_type = other DNA
ctctcgttgcagacccttatcccgacaacaaccaggggaccagacaggccagaagaaacagaagaaggcgttggagggca

SEQ ID NO: 91093 - DNA, 80 bp, synthetic construct
  source 1..80: mol_type = other DNA
gaaagagcacttttataaaatggggaagagttggtcaaagagcagaataccaggatggccagaaatcagagaaagaatga

SEQ ID NO: 91094 - DNA, 80 bp, synthetic construct
  source 1..80: mol_type = other DNA
gaaaacaaacgcaagaatcagcagtagagccagcagtaggagtaggagcagcctctcaagacctagctaatcgaggagcc

SEQ ID NO: 91095 - DNA, 80 bp, synthetic construct
  source 1..80: mol_type = other DNA
aacaagtgctggtgtggaggtttgacagcgccctggcaagaagacacatagcaaaagagctgcatccggacttttacaag

SEQ ID NO: 91096 - DNA, 80 bp, synthetic construct
  source 1..80: mol_type = other DNA
aactgctgacaagggactttactgctgacaagggactttacacatggggactttccaccaggggctttccggggaggtgt

SEQ ID NO: 91097 - DNA, 80 bp, synthetic construct
  source 1..80: mol_type = other DNA
ggaagtgatatagcagggacaactagtactctggcagaacaggtggcatggatgactgctaaccctcctattccagtagg

SEQ ID NO: 91098 - DNA, 80 bp, synthetic construct
  source 1..80: mol_type = other DNA
atgaaggcactattagtcttgttatatacatttgtaaccacaaatgcagacacattgtgtataggttatcatgcaaataa

SEQ ID NO: 91099 - DNA, 80 bp, synthetic construct
  source 1..80: mol_type = other DNA
attacatatgtgaataacacatgggtgaaccgaacttatgtaaacattagcaataccaacgttgctactgtacaaggtgt

SEQ ID NO: 91100 - DNA, 80 bp, synthetic construct
  source 1..80: mol_type = other DNA
gaattcaataatattatcaggcaattcctctctttgcccagttagtggatgggccatatacagcaaagacaatggcataa

SEQ ID NO: 91101 - DNA, 80 bp, synthetic construct
  source 1..80: mol_type = other DNA
caagcgatgggcaagcctcgtataaaatactcaaagtggaaaaaggaaaaataattaagtcaattgagctgaatgcacct

SEQ ID NO: 91102 - DNA, 80 bp, synthetic construct
  source 1..80: mol_type = other DNA
taatgtgtgtttgcagagacaattggcatgcctctaaccgaccatgggtctctttcgatcagaatcttgattatcagata

SEQ ID NO: 91103 - DNA, 80 bp, synthetic construct
  source 1..80: mol_type = other DNA
aatcctccacgagatgaaaagatatttctgacaagataaccttcctcaaatgggccatcttgcccgacaagacagtctga

SEQ ID NO: 91104 - DNA, 80 bp, synthetic construct
  source 1..80: mol_type = other DNA
agatggtgcagtccctttgtattttctggttcttccctctttcttgtttcatcaccctttttcactcttctataccgtgt

SEQ ID NO: 91105 - DNA, 80 bp, synthetic construct
  source 1..80: mol_type = other DNA
tattgttgagttgaccttatcttctagactcttgaaaaaacttgtctcttcttccccttcaaaacacacatttgctgggc

SEQ ID NO: 91106 - DNA, 80 bp, synthetic construct
  source 1..80: mol_type = other DNA
cctccgggtcggtttcaaccagttcacttaacctcctatcaaataaagtgatctggtcatcacttgaagtataagcttct

SEQ ID NO: 91107 - DNA, 80 bp, synthetic construct
  source 1..80: mol_type = other DNA
cgtcttcttgactctctgcttctgtctccttggagccaataaccagtctagagaccaactttgagactttatactcatag

SEQ ID NO: 91108 - DNA, 80 bp, synthetic construct
  source 1..80: mol_type = other DNA
gtcatcaagacattccttcaaatctggacatgatttaatccatgaaatcatggtttcaaccattttgtgcaacacttcat

SEQ ID NO: 91109 - DNA, 80 bp, synthetic construct
  source 1..80: mol_type = other DNA
cagaatcttgctttatcacttggcaaaatacttctttacactccaccacttgatatcttatagagcctaactgattttgt

SEQ ID NO: 91110 - DNA, 80 bp, synthetic construct
  source 1..80: mol_type = other DNA
tcccaccattgacaaacatctctggacttttacaataaactcacttatagacgtcttgaataactcctcaagagacactt

SEQ ID NO: 91111 - DNA, 80 bp, synthetic construct
  source 1..80: mol_type = other DNA
ttctgtgtacctttgatcttcttctgttcttcagaagcttgataaattcctccttagtgctatgaaaactcactagcctg

SEQ ID NO: 91112 - DNA, 80 bp, synthetic construct
  source 1..80: mol_type = other DNA
tcatttttccttctgtgcccatgaatctctgctgtaatgaatctcattaaaggacaagattcaactgcctctctacacag

SEQ ID NO: 91113 - DNA, 80 bp, synthetic construct
  source 1..80: mol_type = other DNA
tgttaaaatatcgtcactgtcagtaagaggctcataaagttcagagaactccttgatcacacgctcagggctaatccttt

SEQ ID NO: 91114 - DNA, 80 bp, synthetic construct
  source 1..80: mol_type = other DNA
agaggctcataaagttcagagaactccttgatcacacgctcagggctaatcctttgaaagttccttttgagtttcccaat

SEQ ID NO: 91115 - DNA, 80 bp, synthetic construct
  source 1..80: mol_type = other DNA
caaacagcggaagatgttgaaagatgacccttctaactgaggtcgaaacgtacgttctctctatcattccatcaggcacc

SEQ ID NO: 91116 - DNA, 80 bp, synthetic construct
  source 1..80: mol_type = other DNA
aaaagagggccttctacggaaggaatgcctgagtctatgagggaagaatatcggcaggaacagcaagaaatgctttggat

SEQ ID NO: 91117 - DNA, 80 bp, synthetic construct
  source 1..80: mol_type = other DNA
caatatcgtcccatggagctaatggggtaaaaggtttctcgtttaaatatggtaatggtatttggataggaagaaccaaa

SEQ ID NO: 91118 - DNA, 80 bp, synthetic construct
  source 1..80: mol_type = other DNA
aaacacagtgtgaacaacggagtaactaaatcatgttcccacagaggaaatagcagtttttacagaaatttaatatggtt

SEQ ID NO: 91119 - DNA, 80 bp, synthetic construct
  source 1..80: mol_type = other DNA
cgtatcgaatgcgtcgacggatgaatgcaattcgaaatgtcaaacacctcaaggggcaataaacagcagtcttcctttcc

SEQ ID NO: 91120 - DNA, 80 bp, synthetic construct
  source 1..80: mol_type = other DNA
tcatttacgaaaacaatacttgggtaaatcaaacatatattaacatcagcaacaacaattttgttgcagaacagacagca

SEQ ID NO: 91121 - DNA, 80 bp, synthetic construct
  source 1..80: mol_type = other DNA
atctcaatggaattagcgggcaattcttctctctgccctgttagtgggtgggccatatacagtaaagataacagtgtaag

SEQ ID NO: 91122 - DNA, 80 bp, synthetic construct
  source 1..80: mol_type = other DNA
taatttttggtagactggaaactctgatactccttagagctttcacagaggaaggggcaattgtaggtgagatctcaccg

SEQ ID NO: 91123 - DNA, 80 bp, synthetic construct
  source 1..80: mol_type = other DNA
tcgagagagcgaccatcatggcagcatttactgggaacacagaaggtagaacatctgatatgagaactgagattataagg

SEQ ID NO: 91124 - DNA, 80 bp, synthetic construct
  source 1..80: mol_type = other DNA
agcaaaagcaggggataatttaacaaatcaagatggaagtagaaatgtttgtactattctgtgcattcactgcactgaaa

SEQ ID NO: 91125 - DNA, 80 bp, synthetic construct
  source 1..80: mol_type = other DNA
aagactgcaaagacattggtgatttaaaacaatatgacagcaatgaaccagaattgagatcactagcaagctggattcag

SEQ ID NO: 91126 - DNA, 80 bp, synthetic construct
  source 1..80: mol_type = other DNA
cactgacttaatgtaaagggtctctctttctggacctctaacacacttacttcctaatgtcctgcacaacccaatgaatc

SEQ ID NO: 91127 - DNA, 80 bp, synthetic construct
  source 1..80: mol_type = other DNA
tgtcaataactttctctagatcaactactgaagggtgatcttcccctatcaaactgtttttcttactgtaaggttcccta

SEQ ID NO: 91128 - DNA, 80 bp, synthetic construct
  source 1..80: mol_type = other DNA
ttaggggttactcactttgttatagtagaactagaaagagtgtgatggtgcagtctagtattggaagtctcagactaaag

SEQ ID NO: 91129 - DNA, 80 bp, synthetic construct
  source 1..80: mol_type = other DNA
aacctccctgatgtcattgataaggattcacaaagcctagaatattcagactcttcaaagagagcattgctctcctgtga

SEQ ID NO: 91130 - DNA, 80 bp, synthetic construct
  source 1..80: mol_type = other DNA
gaatttggtcattgtagaaagtggttctcccgtctataagggggatgaggtttatgttgactgactcaaggtcggatttt

SEQ ID NO: 91131 - DNA, 80 bp, synthetic construct
  source 1..80: mol_type = other DNA
tctaataggattaaaacgttcccagttaacttataaccatcagggacaacaaagcagagagcaggggttaagatcccatt

SEQ ID NO: 91132 - DNA, 80 bp, synthetic construct
  source 1..80: mol_type = other DNA
tattgtgttcgcacccatttgctctacaggaatcaatctctatgcaaagagaaagaagcttcagaccctccattaatagc

SEQ ID NO: 91133 - DNA, 80 bp, synthetic construct
  source 1..80: mol_type = other DNA
gagtgcacccagcacaaaatgggagccagacagaccaagcaacctcagattgagggatctcctagagcctctctggtgcc

SEQ ID NO: 91134 - DNA, 80 bp, synthetic construct
  source 1..80: mol_type = other DNA
ttgtgactttttgttggaaggaagagagtggtcctacatcgtcgaaaggccatcggcagtgaatggaacgtgttacccgg

SEQ ID NO: 91135 - DNA, 80 bp, synthetic construct
  source 1..80: mol_type = other DNA
tcacacagggtgaatacaataactcctttataaataaagtaatgccatgtgaatcaatcataatagaaaggaacataaca

SEQ ID NO: 91136 - DNA, 80 bp, synthetic construct
  source 1..80: mol_type = other DNA
agtcgcaatgcaattgattaaagatttgtgaaaattttctgattactcttattataactccccactcccgttttgtgacc

SEQ ID NO: 91137 - DNA, 80 bp, synthetic construct
  source 1..80: mol_type = other DNA
caatatcagtgataatatgagaggggaaataaaaaattgctctttcaataccacctccaacataagcgagaaaaagcaga

SEQ ID NO: 91138 - DNA, 80 bp, synthetic construct
  source 1..80: mol_type = other DNA
cagtacatgcacttttttatgacttagatataataaaaatagggacagaggcaaatagtagtaagtatatagtaaaaagt

SEQ ID NO: 91139 - DNA, 80 bp, synthetic construct
  source 1..80: mol_type = other DNA
ataacggaagaaatgaaaaactgttctttctatgtccccacaggtataaaaaataagatgtacagagaatatgcactctt

SEQ ID NO: 91140 - DNA, 80 bp, synthetic construct
  source 1..80: mol_type = other DNA
aatgaaaaactgctctttccatatcaacacagatagaggaaagaaggttaggaaagaatatgcattattctatagtcttg

SEQ ID NO: 91141 - DNA, 80 bp, synthetic construct
  source 1..80: mol_type = other DNA
ttggggaaataaaaaaatgctctttcaatatcaccaccagcataaaagataaggtgcagaaagaaaaagcattgttttat

SEQ ID NO: 91142 - DNA, 80 bp, synthetic construct
  source 1..80: mol_type = other DNA
aaatatgatttagtacaaataactgaagataaaaatagtaatacgagctatagtagctataggttggtaggttgcaacac

SEQ ID NO: 91143 - DNA, 80 bp, synthetic construct
  source 1..80: mol_type = other DNA
aaactgctctttcaatgtcaccacaggcataggaggaaggatgcaaaaagcatatgcacttttttatgcacttgatgtaa

SEQ ID NO: 91144 - DNA, 80 bp, synthetic construct
  source 1..80: mol_type = other DNA
ctctggtttgactctggtaactagagatccctcagactcttttagtcagtgtggaaaatctctagcagtggcgcccgaac

SEQ ID NO: 91145 - DNA, 80 bp, synthetic construct
  source 1..80: mol_type = other DNA
ttgtactttcaataccaccacacccgtaaggaatgaggtgcagaagcaatatgcccttttttatagcacggatataatac

SEQ ID NO: 91146 - DNA, 80 bp, synthetic construct
  source 1..80: mol_type = other DNA
tgagaccgctctccctgacatatcagggacttatgttgtccatgggcggttgttggcagatttgtacagagcactcaata

SEQ ID NO: 91147 - DNA, 80 bp, synthetic construct
  source 1..80: mol_type = other DNA
ctcgttacaggcccaggtcggcttgagtgccgtacgattcttggtaataaaaccttccgcactacggttgttgacggcgc

SEQ ID NO: 91148 - DNA, 80 bp, synthetic construct
  source 1..80: mol_type = other DNA
ccagttggaggccaatgggcctgagcagtacgctctctcatttgacgaagctcatcagtgtatgggtgccgggccgcaca

SEQ ID NO: 91149 - DNA, 80 bp, synthetic construct
  source 1..80: mol_type = other DNA
gcctcgcctatgaactaacccccagtggtctgcaagtcaaaatcacgtcgaatggtctagactgtgtggcggtcttcccc

SEQ ID NO: 91150 - DNA, 80 bp, synthetic construct
  source 1..80: mol_type = other DNA
cctgggagggccccaagtgtagagcccgcagaggtcacggccttttgtagtgccttgtacagatataacaggaccgtgca

SEQ ID NO: 91151 - DNA, 80 bp, synthetic construct
  source 1..80: mol_type = other DNA
gcggcattcgcttgtgggcggactctggctatacccggagggactgttaggcccattccctcccttctcccccggccatc

SEQ ID NO: 91152 - DNA, 80 bp, synthetic construct
  source 1..80: mol_type = other DNA
ctgaggtggccgccggtggcccctctccccccagctcatcccatgtgaccgccacccctgtaggtggtattcaagtcctg

SEQ ID NO: 91153 - DNA, 80 bp, synthetic construct
  source 1..80: mol_type = other DNA
cccttaccctctgcagccccaaagcctgctgaccggcccgttgaggtgcctgggccctcagcccataagcctccggggca

SEQ ID NO: 91154 - DNA, 80 bp, synthetic construct
  source 1..80: mol_type = other DNA
cccgccagcccgtaaccgtcgtctcctttacacctacccggacggggccaagatttactcaggatccttgtttgaatctg

SEQ ID NO: 91155 - DNA, 80 bp, synthetic construct
  source 1..80: mol_type = other DNA
agaccggtccgttcttccatgcccatgactaatgatccgcccttagcggccgaccccccatcaggggctgaccgtccgcc

SEQ ID NO: 91156 - DNA, 80 bp, synthetic construct
  source 1..80: mol_type = other DNA
tggggccgacggtcatccagctttgcctgccctgaccataacagatgacatagcccgaaccgctaacctcgcgttggaga

SEQ ID NO: 91157 - DNA, 80 bp, synthetic construct
  source 1..80: mol_type = other DNA
ttgactctaggacggaggtaggccgtgcttgtactggttgcacccttagccccggggttgttcactatcagtttactgcg

SEQ ID NO: 91158 - DNA, 80 bp, synthetic construct
  source 1..80: mol_type = other DNA
ggtatgccacagtggctaattaagctatatcatctagtacggtcggcctggatcttacaggccccgaaggagtctttgaa

SEQ ID NO: 91159 - DNA, 80 bp, synthetic construct
  source 1..80: mol_type = other DNA
tttgacggtttctccgcctgtgcgtttgcagccgagaccggtattgccctctactctttacatgatctgtggcccgctga

SEQ ID NO: 91160 - DNA, 80 bp, synthetic construct
  source 1..80: mol_type = other DNA
acctctcaacctcgcccctgacatctactgttgcttcaggtactaatcttgttctatatgctgcaccccttaatcctctc

SEQ ID NO: 91161 - DNA, 80 bp, synthetic construct
  source 1..80: mol_type = other DNA
atgggcaaccgcttaccaccattcaacaacactctagaactttctatatccttcctctccgtggcaagctttccttttgg

SEQ ID NO: 91162 - DNA, 80 bp, synthetic construct
  source 1..80: mol_type = other DNA
atgatgacaatgctgttcgtattgctatatacatttacagccgcaaatgcagacacaatatgcataggttatcatgcaaa

SEQ ID NO: 91163 - DNA, 80 bp, synthetic construct
  source 1..80: mol_type = other DNA
acggaaaaaggattgttgaagacattctgaaaagtgagactgatgaaaatcttaaaattgcaattgcatccagccctgct

SEQ ID NO: 91164 - DNA, 80 bp, synthetic construct
  source 1..80: mol_type = other DNA
agcgaaagcaggagtttcataatgaatccaaatcagaaaatcataaccataggcagtattagcattatattaacgacaat

SEQ ID NO: 91165 - DNA, 80 bp, synthetic construct
  source 1..80: mol_type = other DNA
tgggaaaggaagatatggggtaaaaggattcagttttaggtatggggatggtgtttggataggaaggacaaagagcttgg

SEQ ID NO: 91166 - DNA, 80 bp, synthetic construct
  source 1..80: mol_type = other DNA
aatccagaagcgggtttgaaatggtgtgggatgctaatggatgggtgtcgactgacaaggattcaaatggtgtacaggac

SEQ ID NO: 91167 - DNA, 80 bp, synthetic construct
  source 1..80: mol_type = other DNA
attatagataatgataattggtctggttacagtgggagcttcagcattaggggagaaacaacaggcaggaattgcactgt

SEQ ID NO: 91168 - DNA, 80 bp, synthetic construct
  source 1..80: mol_type = other DNA
accatgtttttgggttgagatgataagaggacagcccaaagaaaagaccatatggaccagtggtagtagtattgcattct

SEQ ID NO: 91169 - DNA, 80 bp, synthetic construct
  source 1..80: mol_type = other DNA
gtggtgttaattctgataccacaggttggtcatggcccgatggcgctctgttgccctttgacatagacaagtaatttttc

SEQ ID NO: 91170 - DNA, 80 bp, synthetic construct
  source 1..80: mol_type = other DNA
aggttggtcatggcccgatggcgctctgttgccctttgacatagacaagtaatttttcgaaaaaactccttgtttctact

SEQ ID NO: 91171 - DNA, 80 bp, synthetic construct
  source 1..80: mol_type = other DNA
cttgttctaacaacacgacgaactactacaatgaaacttttgtcaatgtgaccaacgtgcagaacaattacaccacagta

SEQ ID NO: 91172 - DNA, 80 bp, synthetic construct
  source 1..80: mol_type = other DNA
actgagccttcaatccccgatataatccactactctagtgggagagatttgtgcccaataaagggatgggcaccactgag

SEQ ID NO: 91173 - DNA, 80 bp, synthetic construct
  source 1..80: mol_type = other DNA
caaggacaatggaattaggattggatcccgaggcgaagtgtttgttataagggagcccttcatatcatgctccatcagtg

SEQ ID NO: 91174 - DNA, 80 bp, synthetic construct
  source 1..80: mol_type = other DNA
aatgcagaacatttttcttaactcagggagcccttctcaatgacaaacactcaaacggaacagtgaaagacaggagtccc

SEQ ID NO: 91175 - DNA, 80 bp, synthetic construct
  source 1..80: mol_type = other DNA
ttccgcacgttgatgagttgtcccataggagtggctccttctcctagtaatagccgctttgaatctgtggcatggtctgc

SEQ ID NO: 91176 - DNA, 80 bp, synthetic construct
  source 1..80: mol_type = other DNA
tactgcatgtagcgacgggcccggttggctaacactaggaataactggcccagatgctactgctgtagcagtattgaaat

SEQ ID NO: 91177 - DNA, 80 bp, synthetic construct
  source 1..80: mol_type = other DNA
ataatggtataataacagacacattaaaaagctggaaggggaacattatgcgaacacaagagtccgagtgcgtatgccag

SEQ ID NO: 91178 - DNA, 80 bp, synthetic construct
  source 1..80: mol_type = other DNA
gatgaattttgttatactctgataacagacggaccatctgatgcgcaagctttctataaaatactgaaaatcagaaaggg

SEQ ID NO: 91179 - DNA, 80 bp, synthetic construct
  source 1..80: mol_type = other DNA
aggtcttctcctccaaataacaagtttatgctcaatatggtttagccattacaaccaggtgacacagacgcacgaacaac

SEQ ID NO: 91180 - DNA, 80 bp, synthetic construct
  source 1..80: mol_type = other DNA
gaaaatagtaagtatgaaggatgtggatgcaacaggttttcactttgaagagtgttcctgttacccaagtggaatagata

SEQ ID NO: 91181 - DNA, 80 bp, synthetic construct
  source 1..80: mol_type = other DNA
ttgagtgtgtctgtcgggacaattggcggggaagcaatcgaccatggataagattcaatagggatcttgattatcaaatc

SEQ ID NO: 91182 - DNA, 80 bp, synthetic construct
  source 1..80: mol_type = other DNA
ggatatgtatgtagtgggatatttggggacaatcccaggcccgtggatggcacaggctcatgcagtagtccagtgaataa

SEQ ID NO: 91183 - DNA, 80 bp, synthetic construct
  source 1..80: mol_type = other DNA
cctatgaaaataatacttgggtgaatcagacatacatcaacataagtaataccaatttaattgcagaacaggctgtagat

SEQ ID NO: 91184 - DNA, 80 bp, synthetic construct
  source 1..80: mol_type = other DNA
tcagtagcactagcaggtaattcctctctctgtccaatcagtggatgggctatatacagcaaggacaatggtataaggat

SEQ ID NO: 91185 - DNA, 80 bp, synthetic construct
  source 1..80: mol_type = other DNA
gtctggtactacaaattggaaacataatctcaatatgggttagccattcaatccaaactgggagccagaaccacccagaa

SEQ ID NO: 91186 - DNA, 80 bp, synthetic construct
  source 1..80: mol_type = other DNA
gagaaagacatccggaatactaccaagactaagactgctgacacagagattgctgacacagaagaatctgaagggacttt

SEQ ID NO: 91187 - DNA, 80 bp, synthetic construct
  source 1..80: mol_type = other DNA
ggactttccgctggggactttccagaaggcaagccagagggcgggactggagatgctgcatataagcagctgcttttcgc

SEQ ID NO: 91188 - DNA, 80 bp, synthetic construct
  source 1..80: mol_type = other DNA
aggttcaattaggaatacagtactttccgctggggactttcaaggaggttcaattaggaatacactttccgctggggact

SEQ ID NO: 91189 - DNA, 80 bp, synthetic construct
  source 1..80: mol_type = other DNA
agtggcacaacactaacatcattgagtacatagaaaagtcagaggatgatcttttcatgaacaacacagaaccgctgtgt

SEQ ID NO: 91190 - DNA, 80 bp, synthetic construct
  source 1..80: mol_type = other DNA
gacgttaagggttttgcacccttctccaaagacaacggaataaggattgggtcaaagggtcatgtttttgttataaggga

SEQ ID NO: 91191 - DNA, 80 bp, synthetic construct
  source 1..80: mol_type = other DNA
aagttattgcgatcaaatggatttctccttaactaaaggtgtcaacattagtactaaccttgattcatgtttatcagtct

SEQ ID NO: 91192 - DNA, 80 bp, synthetic construct
  source 1..80: mol_type = other DNA
caactgattataagaaggagaaatccaaaaaagataaagtaggaaacactaaccaagggttgaagtagattctgattctg

SEQ ID NO: 91193 - DNA, 80 bp, synthetic construct
  source 1..80: mol_type = other DNA
gcaggaaggagaaatgaaaaactgctctttcaatgttaccacaaacataggaaataaggtgaagaaagcacgtgctattt

SEQ ID NO: 91194 - DNA, 80 bp, synthetic construct
  source 1..80: mol_type = other DNA
tgacggagaaatgaaaaactgctctttcaatgttaccacaaacataagaaatgaggtgaagaacgcacgtgctatttttg

SEQ ID NO: 91195 - DNA, 80 bp, synthetic construct
  source 1..80: mol_type = other DNA
ataaatttgatataatgcatgtagaggataagaatactagtggtactaatggtactgatgatactaaaaattatatattg

SEQ ID NO: 91196 - DNA, 80 bp, synthetic construct
  source 1..80: mol_type = other DNA
gaaggaaggagaaatgaacaactgctctttcaatgttaccactgacgtaagaaatgaggtgaataaagctcatgctattt

SEQ ID NO: 91197 - DNA, 80 bp, synthetic construct
  source 1..80: mol_type = other DNA
ttgataatcgtgatgtaatgcaaatagagaataatggtactaatggtactaatggtactacaagatatatattgagacat

SEQ ID NO: 91198 - DNA, 80 bp, synthetic construct
  source 1..80: mol_type = other DNA
taaggagacagtaatggaggaaggagaaatgaaaaactgctctttcaatgttaccacaaacataggaaataaggtgaaga

SEQ ID NO: 91199 - DNA, 80 bp, synthetic construct
  source 1..80: mol_type = other DNA
ccaccgcccaatggagaggacattgtcatcaagtataccaaaaaggaggagaagatcagcggagtacccaccgtctcaac

SEQ ID NO: 91200 - DNA, 80 bp, synthetic construct
  source 1..80: mol_type = other DNA
cttggcacgtgatctggccaagaagatggcggcgactctcacaggtgaccagagagtagggctcgtcccaagaaacggtg

SEQ ID NO: 91201 - DNA, 80 bp, synthetic construct
  source 1..80: mol_type = other DNA
aggatgctcttcgccttcaggagcttgcggacacctgccctctgacactcaactgtgacagaatagaaaacaagggaaaa

SEQ ID NO: 91202 - DNA, 80 bp, synthetic construct
  source 1..80: mol_type = other DNA
tgcagggcccagaattaccactgtacaattttgaccacaacaaggtggccgctttcaggaagcttgcagctgacaacaaa

SEQ ID NO: 91203 - DNA, 80 bp, synthetic construct
  source 1..80: mol_type = other DNA
tatggtttcatggagaccataaaggcaggcaacaagttgaaggaagttaagacccttgaccagttcaaagaggctgtgaa

SEQ ID NO: 91204 - DNA, 80 bp, synthetic construct
  source 1..80: mol_type = other DNA
aaggacatacgcataaaaccttgcagaataatctacaattccacggcctatgatctagaatcaagtggatctgggagagt

SEQ ID NO: 91205 - DNA, 80 bp, synthetic construct
  source 1..80: mol_type = other DNA
cactgtgaagagagtgggggaccataaagtccaagcccacaatgagctccattctgcccttaacaacctacgcaaggcca

SEQ ID NO: 91206 - DNA, 80 bp, synthetic construct
  source 1..80: mol_type = other DNA
acatcaacaagctgtgggccaagcctgagaggcacgtggaaactcccgtagaacccccaaccccaccgattgaggactgg

SEQ ID NO: 91207 - DNA, 80 bp, synthetic construct
  source 1..80: mol_type = other DNA
actataaatccaattgacacagtccaggaaggcaagaagggtaaaaacaagagtggcaggggcaagaaacacactgcatt

SEQ ID NO: 91208 - DNA, 80 bp, synthetic construct
  source 1..80: mol_type = other DNA
aaatccagggaaggatgatcggaggccagatggggatgctcctcacaggatctaatgctaagaacatggacctcggcact

SEQ ID NO: 91209 - DNA, 80 bp, synthetic construct
  source 1..80: mol_type = other DNA
caaaagaggcaatgactgggtggtcataggggtgcacaccgctgctgccagaggcggcaacacggtaatatgtgccaccc

SEQ ID NO: 91210 - DNA, 80 bp, synthetic construct
  source 1..80: mol_type = other DNA
cagacaccctcaagaagctccatggtgagtctttcccctacacggcctttgacaataattgctatatgttttgctgctgg

SEQ ID NO: 91211 - DNA, 80 bp, synthetic construct
  source 1..80: mol_type = other DNA
ccgagaccagcaaccctggaagccgccaaggaaaccatctgcaacgtgcttgagcagaccattgacccaccccagaagtg

SEQ ID NO: 91212 - DNA, 80 bp, synthetic construct
  source 1..80: mol_type = other DNA
gtcatacacacaagcatgtgcctctctggacaagacaacatcaagtggacacccccaccacaaaaagaaaaatgacaact

SEQ ID NO: 91213 - DNA, 80 bp, synthetic construct
  source 1..80: mol_type = other DNA
ggaacggtgaatcctttactggcgttctggccgatcaagcatcaaaagcaaatctcatgtttgaacaaagaaaacacatg

SEQ ID NO: 91214 - DNA, 80 bp, synthetic construct
  source 1..80: mol_type = other DNA
gtgggggtctgatcttggcacaatgatccgctgtgcaaggtcatttggagggctcatggatgaaatgaaggccaactgtg

SEQ ID NO: 91215 - DNA, 80 bp, synthetic construct
  source 1..80: mol_type = other DNA
cccaacaaaggtgcatcttgggtgtcgcattggaaatcatggttaggttctcagccgaacctgaattggcacaaatagtg

SEQ ID NO: 91216 - DNA, 80 bp, synthetic construct
  source 1..80: mol_type = other DNA
atggggatgacgagatagtcagcacagatataaaattggacccacaaaaattaacagataagttgagagagtatgggcta

SEQ ID NO: 91217 - DNA, 80 bp, synthetic construct
  source 1..80: mol_type = other DNA
gacctgacaaaactgaaggaccactcgtgattaaagagagtttggagggtttgacatttctaaggagagacatatgtagg

SEQ ID NO: 91218 - DNA, 80 bp, synthetic construct
  source 1..80: mol_type = other DNA
acaggaagcatgtgtcaagaaccacgggtttctacagaccctaccaagaatggaataggaagcctttgccaaccatggat

SEQ ID NO: 91219 - DNA, 80 bp, synthetic construct
  source 1..80: mol_type = other DNA
caggaggagcgatcgccgcccccctaactggacaaacaaatttcattgatccctggattagaaataattatgtacaagcg

SEQ ID NO: 91220 - DNA, 80 bp, synthetic construct
  source 1..80: mol_type = other DNA
cccaatggtgaattcactgtgtccccaaggaattcccctggtgaaattttgctcaatttagaattaggccctgaacttaa

SEQ ID NO: 91221 - DNA, 80 bp, synthetic construct
  source 1..80: mol_type = other DNA
tccattcttggcccatttatctagaatgtataatggatatgctggtggcattgatgtccaagtcatcatggcgggcaacg

SEQ ID NO: 91222 - DNA, 80 bp, synthetic construct
  source 1..80: mol_type = other DNA
ccttcaccgctggaaagatcatcttcgcagcagtgccacctcattttcctattgataacatcagccccccacagataacc

SEQ ID NO: 91223 - DNA, 80 bp, synthetic construct
  source 1..80: mol_type = other DNA
tgtttccccatattataatagatgtgagaacccttgaacctgtgaacattcccctgcctgatgtcagaaatagcttcttc

SEQ ID NO: 91224 - DNA, 80 bp, synthetic construct
  source 1..80: mol_type = other DNA
gagggcaaactcaagaaagtggccaacgtgttgttatgtggcctctccggtctgttcaccaggcccatcaaggatctcat

SEQ ID NO: 91225 - DNA, 80 bp, synthetic construct
  source 1..80: mol_type = other DNA
cattacagccagaacaacgagccccgcatgagattgttggccatgttgtatacccctctcagatcaaatggctctgcaga

SEQ ID NO: 91226 - DNA, 80 bp, synthetic construct
  source 1..80: mol_type = other DNA
cgatgtcttcacagtatcctgcagggtcctgaccaagccttctgcagattttgaatttaattatttggttcccccaactg

SEQ ID NO: 91227 - DNA, 80 bp, synthetic construct
  source 1..80: mol_type = other DNA
gacatgctgcacaccagccccactgacaattttattgttcagccacaaaatggcaggtgcaccctggatggtgagctgca

SEQ ID NO: 91228 - DNA, 80 bp, synthetic construct
  source 1..80: mol_type = other DNA
aggcaccactcagttggtcgcttcaaacatatgtgccttcagggggtccatctcagggcacgagaacaatggagatcaac

SEQ ID NO: 91229 - DNA, 80 bp, synthetic construct
  source 1..80: mol_type = other DNA
atcagtggcacttcagtatcaccaaccccaatggcactccatttgacccaactgaagatgtgcccgccccacttgggacc

SEQ ID NO: 91230 - DNA, 80 bp, synthetic construct
  source 1..80: mol_type = other DNA
ccagatttcaaaggtcaactctacggggtcatctcccaacggaatagagaaggaagctctggtaatggcaaccaaaaggc

SEQ ID NO: 91231 - DNA, 80 bp, synthetic construct
  source 1..80: mol_type = other DNA
caataggtcccatgagggagtgatttcaacagtcgcaccaagattcacaccaaaattagggtcggtcatgattggcactt

SEQ ID NO: 91232 - DNA, 80 bp, synthetic construct
  source 1..80: mol_type = other DNA
ggaccactgatgatatacaagaccaaccatctagattcaccccagttgggctgaatgatgatgacaattacaagcaatgg

SEQ ID NO: 91233 - DNA, 80 bp, synthetic construct
  source 1..80: mol_type = other DNA
gaattgccaaattattctggggctctcaccctcaatatggggttggcaccttctgtcttccccacctaccctggtgaaca

SEQ ID NO: 91234 - DNA, 80 bp, synthetic construct
  source 1..80: mol_type = other DNA
aggcaagttgagaccgctaaacatactcaacatcatatctaactgtgattggaccttccccggtgttgttgaagccctca

SEQ ID NO: 91235 - DNA, 80 bp, synthetic construct
  source 1..80: mol_type = other DNA
acttcttttcttccgctcctacataccaatgaagggagggtacggcagtccttacattgattgtcttataccccaagagt

SEQ ID NO: 91236 - DNA, 80 bp, synthetic construct
  source 1..80: mol_type = other DNA
ggatttcccacttttaccaggaatcagccccttcacaaacagatgtggctttaatcaggtatgtgaaccccgacacagga

SEQ ID NO: 91237 - DNA, 80 bp, synthetic construct
  source 1..80: mol_type = other DNA
cgcgtcctgttcgaggccaaattgcacagacaaggatacatcaccgtcgccaagactggtgacagccccattaatgtgcc

SEQ ID NO: 91238 - DNA, 80 bp, synthetic construct
  source 1..80: mol_type = other DNA
caggagctaatgttatcaatcagaaagttgattttgagaataataaatatttgcaaaatgcatcatttgctcatgataaa

SEQ ID NO: 91239 - DNA, 80 bp, synthetic construct
  source 1..80: mol_type = other DNA
gaaatgttgaatgcacaagttgaggcaacaaagaaactgcaggctgatatgattgccattaaacaaggggtcttgaccgc

SEQ ID NO: 91240 - DNA, 80 bp, synthetic construct
  source 1..80: mol_type = other DNA
acggaacaaggtactgggcacctaatgccaccaccacaacatcaatgtcaggtggtttcacaagccaggtcatgcacagg

SEQ ID NO: 91241 - DNA, 80 bp, synthetic construct
  source 1..80: mol_type = other DNA
cccacaccaaatcttaagacaaaccaggcccccaaatccataccgagtagtgggtcttcggtaagatccaactcaaccca

SEQ ID NO: 91242 - DNA, 80 bp, synthetic construct
  source 1..80: mol_type = other DNA
actcaccagtctgagctcgcactcatccggatcatctcggaccagcgggtctacagctatcagttccctaccgtcttcca

SEQ ID NO: 91243 - DNA, 80 bp, synthetic construct
  source 1..80: mol_type = other DNA
gcaggactagggattgggttaaccagcaaaaccttaatttggaaccacatttgcctgggtctcttaaaacagcttttgtc

SEQ ID NO: 91244 - DNA, 80 bp, synthetic construct
  source 1..80: mol_type = other DNA
acatctgcgtttaacacacgcagacagccgctattcgcacaccttcgtagaaggggggagtcaagtgcatagtgaaaaga

SEQ ID NO: 91245 - DNA, 80 bp, synthetic construct
  source 1..80: mol_type = other DNA
tgtggacatttcccccctgcatgacaccgcatatagtgtcccccctctagaccagagagagaaggtggacgcaaaggaac

SEQ ID NO: 91246 - DNA, 80 bp, synthetic construct
  source 1..80: mol_type = other DNA
aatggtgaagacatagtggtcaaatacaccagacaaggtgatgtcatagagggggtacctgctgtctccacagtagacaa

SEQ ID NO: 91247 - DNA, 80 bp, synthetic construct
  source 1..80: mol_type = other DNA
tccgcatcaccagacatagtcggcaccataaatgccctcttagccagaatcgcagctgccagatcactcgcacaccgggc

SEQ ID NO: 91248 - DNA, 80 bp, synthetic construct
  source 1..80: mol_type = other DNA
taaagaagagatgtcatccaggatgcgtccagttgtcatcatgatatctggacgcccaggtatagggaagactcacatgg

SEQ ID NO: 91249 - DNA, 80 bp, synthetic construct
  source 1..80: mol_type = other DNA
catggcacgtgaattggcaaagaggatggcaacaacactctcaggtgaccagagagtgggtttagtaccaagaaatgggg

SEQ ID NO: 91250 - DNA, 80 bp, synthetic construct
  source 1..80: mol_type = other DNA
ccaccaatctgtctggtcctgcccctcttgactatgtcaattttgaagcctgctcccggcgtgttgattttcttgtctat

SEQ ID NO: 91251 - DNA, 80 bp, synthetic construct
  source 1..80: mol_type = other DNA
gatcaatccttgaaatgtgggatggtgagatttatcactatgggttgtatgtggagaaaggccaagttcttggcgtgcac

SEQ ID NO: 91252 - DNA, 80 bp, synthetic construct
  source 1..80: mol_type = other DNA
gggatcatgaagtccctgaccatacactctcttgtagcacgtgccactggtctcctgcacgaaagacttgatgaatttga

SEQ ID NO: 91253 - DNA, 80 bp, synthetic construct
  source 1..80: mol_type = other DNA
cctccagggccctgaactcccactatataattttgaccaaaacaaggtggctgcattcagacaacttgcagctgataaca

SEQ ID NO: 91254 - DNA, 80 bp, synthetic construct
  source 1..80: mol_type = other DNA
aatatagtttcatggacaccataagggccggtaacaaactcaaggaagttaagaccttagaacaattcaaggaagctgtg

SEQ ID NO: 91255 - DNA, 80 bp, synthetic construct
  source 1..80: mol_type = other DNA
aaaaacatacgcataaaaccttgtaagataatgtataaccacactttatacgttctagactcaaatggatcaggaaaggt

SEQ ID NO: 91256 - DNA, 80 bp, synthetic construct
  source 1..80: mol_type = other DNA
cactgtaaacaaggttgaaaatcacaaaatccaaaccaatagtgaactcaattcggcgctaaacaatctacgcggcgcta

SEQ ID NO: 91257 - DNA, 80 bp, synthetic construct
  source 1..80: mol_type = other DNA
gaataaggtactatgtcaagtgtttccaagaaatgatttactcactactacaaattgcaggagcagcctttgtcacaaca

SEQ ID NO: 91258 - DNA, 80 bp, synthetic construct
  source 1..80: mol_type = other DNA
ttaacatgctttggactaagccggaaactcagaccagtgctcccacagagccacctgcccccccagaacgggactggacc

SEQ ID NO: 91259 - DNA, 80 bp, synthetic construct
  source 1..80: mol_type = other DNA
atagcgccagtcgataccatgcaggaaggcaagaaaggcaagaacaagagtggtagaggtaagaaacacactgcattctc

SEQ ID NO: 91260 - DNA, 80 bp, synthetic construct
  source 1..80: mol_type = other DNA
cataagctttgcacgtatagaactgaccacactctcactttattggagagtagtctacgcgccaccatacctagtggcac

SEQ ID NO: 91261 - DNA, 80 bp, synthetic construct
  source 1..80: mol_type = other DNA
agagggccaccttggggctggtctctggcagtgagataagaaagagaaatccagatgacttcaaaccaagaggtaagttg

SEQ ID NO: 91262 - DNA, 80 bp, synthetic construct
  source 1..80: mol_type = other DNA
gggtctcatcaaatttgttcatcacttccacacatgtgatccctccgggggtgaaagaattctttggagtaccaataaac

SEQ ID NO: 91263 - DNA, 80 bp, synthetic construct
  source 1..80: mol_type = other DNA
caaatccaaatacacaggagtggtgagttttgcaaaatgagattccctaaggcaattaggcctgatgtatctggcatggt

SEQ ID NO: 91264 - DNA, 80 bp, synthetic construct
  source 1..80: mol_type = other DNA
gtacgcatggggactcatgccacaatgaaaatacagggtagaatgattggcggtcaaatggggatgcttctcacagggtc

SEQ ID NO: 91265 - DNA, 80 bp, synthetic construct
  source 1..80: mol_type = other DNA
caaaaggggcaatgagtgggttgtcataggagtgcacaccgcagctgctagaggtggcaacacagtgatctgcgccaccc

SEQ ID NO: 91266 - DNA, 80 bp, synthetic construct
  source 1..80: mol_type = other DNA
aaggcccagatggtgaggccactctcgagggtggtgaaaaccatgggacatactgtggggcacccatccttggaccaggc

SEQ ID NO: 91267 - DNA, 80 bp, synthetic construct
  source 1..80: mol_type = other DNA
cagacacacttaagaaactccatggggaaaatttcccttatacagccttcgacaacaactgctattctttttgctgttgg

SEQ ID NO: 91268 - DNA, 80 bp, synthetic construct
  source 1..80: mol_type = other DNA
caagaatcaaaggtgggccatcactccaacaagtcatgagagaccaattaaaacccttcaccgcgccccgcggaaaacca

SEQ ID NO: 91269 - DNA, 80 bp, synthetic construct
  source 1..80: mol_type = other DNA
ccaaggccagcggttctagaagccgcaaaagagacaatttgcaatgtgcttgaacaaaccattgaaccaccccaaaaatg

SEQ ID NO: 91270 - DNA, 80 bp, synthetic construct
  source 1..80: mol_type = other DNA
gtcctactcccaggcttgtgcttcattggacaagacaacgtctagtggttatccccatcataaaaagaaaaatgacaatt

SEQ ID NO: 91271 - DNA, 80 bp, synthetic construct
  source 1..80: mol_type = other DNA
ttctctgggggtcggacttgggcacaatgatccgttgtgcaaggtcttttggtgggctcatggatgaattaaaagcaaac

SEQ ID NO: 91272 - DNA, 80 bp, synthetic construct
  source 1..80: mol_type = other DNA
tgtgtgaatctaccaattagagttggcatgaatgtgaatgaggatggacccataatatttgagaaacattcaaaatataa

SEQ ID NO: 91273 - DNA, 80 bp, synthetic construct
  source 1..80: mol_type = other DNA
ttagcactgatattaaattagatgcacaaaaattgactgacaaattaaggcaatatggattggtgccaaccagaccagac

SEQ ID NO: 91274 - DNA, 80 bp, synthetic construct
  source 1..80: mol_type = other DNA
agaaaatttgtatcaagaaccactggcttttacagaccataccaggactggaacagaaggccactacccacaatggatga

SEQ ID NO: 91275 - DNA, 80 bp, synthetic construct
  source 1..80: mol_type = other DNA
aaaacagaaggaccattggtcatcagggaaagcttagagggcataaccttcctcaggagggacgtgtgcagagacccagc

SEQ ID NO: 91276 - DNA, 80 bp, synthetic construct
  source 1..80: mol_type = other DNA
agggtggtatggcaagcttgaccaatcctcaatcatgaggcaactgtattggaccaggggacctaatcatgaagacccta

SEQ ID NO: 91277 - DNA, 80 bp, synthetic construct
  source 1..80: mol_type = other DNA
ctgaacttaacccatttctggcccatttatctagaatgtacaatgggtatgctggtggcattgatgtccaagtcatcatg

SEQ ID NO: 91278 - DNA, 80 bp, synthetic construct
  source 1..80: mol_type = other DNA
tggcaaactcaagaaggtggctaacgtgctcctgtgtggtttatcaggtctcttcaccagacctattaaagacctcatag

SEQ ID NO: 91279 - DNA, 80 bp, synthetic construct
  source 1..80: mol_type = other DNA
cattataatcaggatagggattcccgtatgaggttggtggctatgttgtacactccccttagatcaaacggttccacaga

SEQ ID NO: 91280 - DNA, 80 bp, synthetic construct
  source 1..80: mol_type = other DNA
ttgagtcaagaactaagcccttttcaataccaatactcacaattggagaaatgacaaattcaaggtttcccttgcccatt

SEQ ID NO: 91281 - DNA, 80 bp, synthetic construct
  source 1..80: mol_type = other DNA
gacatgttgtacaccagcccaactgaaaatttggtagtccaaccccaaaatggcaggtgcacgactgaaggtgaactgtt

SEQ ID NO: 91282 - DNA, 80 bp, synthetic construct
  source 1..80: mol_type = other DNA
gttgggcactactcaattggtaactccaagcatttgctcacttcgtggagcgatcactggtcacgaaggcaatgatgatg

SEQ ID NO: 91283 - DNA, 80 bp, synthetic construct
  source 1..80: mol_type = other DNA
atcacaaatggcacatgacagtcacaagccccaatggtgccgcttttgacccaacagaggatgttcctgctccccttggt

SEQ ID NO: 91284 - DNA, 80 bp, synthetic construct
  source 1..80: mol_type = other DNA
ccccagacttcacaggtgatatatatggagtgctctctcaaagagacagaaacattaatcctggccaaactgcccccgca

SEQ ID NO: 91285 - DNA, 80 bp, synthetic construct
  source 1..80: mol_type = other DNA
aacagagcccatgaagctgttgtttctacaagaagtaacaagttcacaccaaaattgggctctgtaatgattgctacctg

SEQ ID NO: 91286 - DNA, 80 bp, synthetic construct
  source 1..80: mol_type = other DNA
ggaaactacagatgttcttcaacaacctaccaaattcacccctgtaggcctagagagtcccaatcactacaaccagtggc

SEQ ID NO: 91287 - DNA, 80 bp, synthetic construct
  source 1..80: mol_type = other DNA
aactaccaaattattcaggggcactgacactcaacatggggctcgccccatctgtgttcccaacataccccggcgagcaa

SEQ ID NO: 91288 - DNA, 80 bp, synthetic construct
  source 1..80: mol_type = other DNA
gatccaacatttctatcaagaatcagccccctcacaaactgatgtggctttaatcaggtatgtcaaccccgaaacaggac

SEQ ID NO: 91289 - DNA, 80 bp, synthetic construct
  source 1..80: mol_type = other DNA
accttcccaggagtagtggaagccctcattctacttgcagagctgttcggggttttctggacaccaccagacatatctgc

SEQ ID NO: 91290 - DNA, 80 bp, synthetic construct
  source 1..80: mol_type = other DNA
gaaatgctaaatgcacaagttgaggcaacaaagaagctgcaggccgacatgataaacatcaagcaaggagtcttgaccgc

SEQ ID NO: 91291 - DNA, 80 bp, synthetic construct
  source 1..80: mol_type = other DNA
tggcggcttttctcctactgatgcggcccgtggagctataggagctcctatgacaaaagttttagactggaatgggacaa

SEQ ID NO: 91292 - DNA, 80 bp, synthetic construct
  source 1..80: mol_type = other DNA
accaaatgccaccacaacaacttcaatgtcaggtggcttcacaggacaaactgtgcacagagccccaccaaatttcaaaa

SEQ ID NO: 91293 - DNA, 80 bp, synthetic construct
  source 1..80: mol_type = other DNA
ccaatcagactcccaaaagtatacccagtagtggatcatcagtgagatcaaattcaacccaactcaccagtctgagctct

SEQ ID NO: 91294 - DNA, 80 bp, synthetic construct
  source 1..80: mol_type = other DNA
cactcctctggttcatcacgatccagtggatccacagtgatcagctccttaccgtcctccagtaggactggggagtgggt

SEQ ID NO: 91295 - DNA, 80 bp, synthetic construct
  source 1..80: mol_type = other DNA
tttcgttgcctccctgttgggagactacgagatgcaaggccccgaagacatcgcatctgaagttgttccagttatcctgg

SEQ ID NO: 91296 - DNA, 80 bp, synthetic construct
  source 1..80: mol_type = other DNA
atctcccgtccacgacaccgcatatagcgtccctccattagaccagagggagaaggttgatgcaaaagaaccactaactg

SEQ ID NO: 91297 - DNA, 80 bp, synthetic construct
  source 1..80: mol_type = other DNA
cttgcaaggaaattggtaattacggaatagaagtggtgaagttagtaatgaaatggtttttccctactaaaaatgaggct

SEQ ID NO: 91298 - DNA, 80 bp, synthetic construct
  source 1..80: mol_type = other DNA
agtgagatggaaatggtcagaactatagaggatgctgtgctcgactttgaggcgatagagaacaaccacatgacagcatt

SEQ ID NO: 91299 - DNA, 80 bp, synthetic construct
  source 1..80: mol_type = other DNA
accgttgctacagtggacgtcccccccacacacaataccgcctacagtgtcccccccttggatcagagagagaaggttga

SEQ ID NO: 91300 - DNA, 80 bp, synthetic construct
  source 1..80: mol_type = other DNA
tctgcgtccccagacatcattggcaccataaacgcccttctagccaggattgccgccgctagatccctagtccacaaggc

SEQ ID NO: 91301 - DNA, 80 bp, synthetic construct
  source 1..80: mol_type = other DNA
cccgtgacttggccaagaagatggcggcaaccctctcaggtgatcagagggtgggcctcgtaccgaggaatggtgttgat

SEQ ID NO: 91302 - DNA, 80 bp, synthetic construct
  source 1..80: mol_type = other DNA
cccctctagattatgttaattttgaagcctgctctcgccggatcgacttccttgtctatgcagactctccttcggtggac

SEQ ID NO: 91303 - DNA, 80 bp, synthetic construct
  source 1..80: mol_type = other DNA
gtgtcatgaaaacactgaccacacattcccttatcgcccgtgctacgggtctactgcatgagaggttagatgagttcgac

SEQ ID NO: 91304 - DNA, 80 bp, synthetic construct
  source 1..80: mol_type = other DNA
ttgcagggacccgagttgcccgtgtacaactttgatcaaaacagagtcgctgctttcagaaaacttgcagctgacaataa

SEQ ID NO: 91305 - DNA, 80 bp, synthetic construct
  source 1..80: mol_type = other DNA
gtacgggctcatggagaccataaaagtgggcaacaaactgaaaggtgtcaagactctagaacaactcaaggacgccttaa

SEQ ID NO: 91306 - DNA, 80 bp, synthetic construct
  source 1..80: mol_type = other DNA
aagacataagtatcaagccttgcagaatagtctacaattcgatggcttatgaccttgactcgaacgggtcagggagagtc

SEQ ID NO: 91307 - DNA, 80 bp, synthetic construct
  source 1..80: mol_type = other DNA
aggttgtagaccataagatccagactaacaatgagctcaactccgcgctcaacaacctgcgtggcgctagggtgagatac

SEQ ID NO: 91308 - DNA, 80 bp, synthetic construct
  source 1..80: mol_type = other DNA
tatgtcaaatgtgttcaagagatggtgtactcacttctccagatcgctggcgcagccttcgtcacttcaagaatgacacg

SEQ ID NO: 91309 - DNA, 80 bp, synthetic construct
  source 1..80: mol_type = other DNA
gaggctaaacgtcagtggtatttgggccaggccagagaaacaggtggaggccattgaagaacccccaacccccccaactg

SEQ ID NO: 91310 - DNA, 80 bp, synthetic construct
  source 1..80: mol_type = other DNA
aagattggactatagccccagcaaatacagtccaggagggtaaaaagggcaagaacaaaagtggcagaggtaagaaacac

SEQ ID NO: 91311 - DNA, 80 bp, synthetic construct
  source 1..80: mol_type = other DNA
agtcttccgcccaaccagaaaacagcgcagggaggaaagggcaaccctagggctggtcacaggcagtgaaattaggaaga

SEQ ID NO: 91312 - DNA, 80 bp, synthetic construct
  source 1..80: mol_type = other DNA
ctcctagcctctggtcccgaatagtgaacttcggatcgggttggggtttctgggtgtcttctaatctgctgatcacatca

SEQ ID NO: 91313 - DNA, 80 bp, synthetic construct
  source 1..80: mol_type = other DNA
cagaaactctcagaaaactccacggggagtcattcccatacaacgcatttgacaacaattgctacaccttctgctgttgg

SEQ ID NO: 91314 - DNA, 80 bp, synthetic construct
  source 1..80: mol_type = other DNA
acacatgtcatccctccgaacatggctgaggcttttggcgtgccaataaatcagatacaaatacacagaagtggagaatt

SEQ ID NO: 91315 - DNA, 80 bp, synthetic construct
  source 1..80: mol_type = other DNA
ctgtaaaatgaggttccccaaggctataagacctgatgtttcaggcatgatcctcgaggaaggggctcctgaaggaacag

SEQ ID NO: 91316 - DNA, 80 bp, synthetic construct
  source 1..80: mol_type = other DNA
aaatacaaggaaaaatgcttggaggccaaatgggcatgctcctcactggttccaatgccaaaaacatggatctcggcacc

SEQ ID NO: 91317 - DNA, 80 bp, synthetic construct
  source 1..80: mol_type = other DNA
caaggatcaaggggggcccgtcattacagcaggttatgagggatcaactcaaacctttcaccgctccccgagggaaacca

SEQ ID NO: 91318 - DNA, 80 bp, synthetic construct
  source 1..80: mol_type = other DNA
caaggatcaagggtggcccgtcattacagcaggttatgagggatcaactcaaacctttcaccgctccccgagggaaacca

SEQ ID NO: 91319 - DNA, 80 bp, synthetic construct
  source 1..80: mol_type = other DNA
ccacgaccagcgatcctagaggctgctaaagaaaccatttgcaatgtgcttgagcagaccattgaaccaccccaaaaatg

SEQ ID NO: 91320 - DNA, 80 bp, synthetic construct
  source 1..80: mol_type = other DNA
gtcctacgctcaagcctgcgcctcgttggataagacaacatcgagtggttatccccatcacatgaggaagaatgacaact

SEQ ID NO: 91321 - DNA, 80 bp, synthetic construct
  source 1..80: mol_type = other DNA
cctatggggttcagacctgggcacgatggtccgttgcgctagggcttttggcggcctcatggatgaaatgaaagcaaatt

SEQ ID NO: 91322 - DNA, 80 bp, synthetic construct
  source 1..80: mol_type = other DNA
cccagcagagacacatcctaggagctgcccttgaaataatggttagattctcagctgagcccgaattagcacaaatagtg

SEQ ID NO: 91323 - DNA, 80 bp, synthetic construct
  source 1..80: mol_type = other DNA
aaattgtcataaatgagggcttgccctctggggtgccatgcacatcacaatggaactcaatttctcactggctgataaca

SEQ ID NO: 91324 - DNA, 80 bp, synthetic construct
  source 1..80: mol_type = other DNA
ttgtgcgccatatcagaagtttctgggctatcgccagatgtggtgcaaacaaattcctgtttttctttttatggggatga

SEQ ID NO: 91325 - DNA, 80 bp, synthetic construct
  source 1..80: mol_type = other DNA
tgagatagtcagtaccgacatcaagttggatcccatggagctaactaataagctaaaagagtatgggctgatcccaacaa

SEQ ID NO: 91326 - DNA, 80 bp, synthetic construct
  source 1..80: mol_type = other DNA
gaacagaaagcctctaccaaccatggatgagggaaaacttaagaaagtggctaatgtgctcctatgcggcctatctgggc

SEQ ID NO: 91327 - DNA, 80 bp, synthetic construct
  source 1..80: mol_type = other DNA
ggccagataaaacagagggacctctcatagtcaaagagagcctggagggcttgaccttcctcaggagggatgtgtgccgg

SEQ ID NO: 91328 - DNA, 80 bp, synthetic construct
  source 1..80: mol_type = other DNA
gacccagctggttggtatggaaaacttgaccaatcatcaattatgagacagttgttctggactaaaggacccaaccacga

SEQ ID NO: 91329 - DNA, 80 bp, synthetic construct
  source 1..80: mol_type = other DNA
gtcattgttgggagaggcagcattgcatgggccaactttttataagaaagtcagcaaactggtcattactgagctcaaag

SEQ ID NO: 91330 - DNA, 80 bp, synthetic construct
  source 1..80: mol_type = other DNA
gggggagcaatcgcagctcctctcactggacaaacaaatataattgatccctggattagaaataattttgtgcaggcccc

SEQ ID NO: 91331 - DNA, 80 bp, synthetic construct
  source 1..80: mol_type = other DNA
ctgagttgaaccccttcttggctcatctttccagaatgtataatggttttgcaggtggtatggaagtgcaggtgctgatg

SEQ ID NO: 91332 - DNA, 80 bp, synthetic construct
  source 1..80: mol_type = other DNA
gcggggaacgctttcaccgctgggaaagttatcttcgctgcaatcccaccccatttcccagtggagaacctaagcccccc

SEQ ID NO: 91333 - DNA, 80 bp, synthetic construct
  source 1..80: mol_type = other DNA
ttttcactagaccaatcaaggacctcatagggaagctgagaccactaaacatactcaacatcatcaccaactgtgattgg

SEQ ID NO: 91334 - DNA, 80 bp, synthetic construct
  source 1..80: mol_type = other DNA
acaaataactatgtttccccatataatcatagatgttaggaccctagaaccagtcttgttgcccatgcccgatgtgagga

SEQ ID NO: 91335 - DNA, 80 bp, synthetic construct
  source 1..80: mol_type = other DNA
atcaattctttcactacaaccaggtgaacgagcccaggatgcgcttagtggccatgctctatacacccctgaggtcaaat

SEQ ID NO: 91336 - DNA, 80 bp, synthetic construct
  source 1..80: mol_type = other DNA
ggatccaccgaagacgttttcacagtgtcttgtagagtgttgaccaggccttcaccggattttgagttcaattatctggt

SEQ ID NO: 91337 - DNA, 80 bp, synthetic construct
  source 1..80: mol_type = other DNA
tagagtcaagaacaaaaccctttaccttacctatccttacaattggagaaatgacaaattcacgttttcccgcacccata

SEQ ID NO: 91338 - DNA, 80 bp, synthetic construct
  source 1..80: mol_type = other DNA
gatatgctttataccagtcccaatgataatgtggttgtacaaccacagaatggcaggtgcactcttgatggtgagcttca

SEQ ID NO: 91339 - DNA, 80 bp, synthetic construct
  source 1..80: mol_type = other DNA
aggatccacacagctagtcccagcaaatgtgtgtgcgtttaaaggcaaaatcacagcaaggattgttgaccaggcagcac

SEQ ID NO: 91340 - DNA, 80 bp, synthetic construct
  source 1..80: mol_type = other DNA
accaatggcatatgcaaattgacaaccccaatggaacactgtttgacccaactgaggatgtgcctgcacctctcggaacc

SEQ ID NO: 91341 - DNA, 80 bp, synthetic construct
  source 1..80: mol_type = other DNA
cctgatttcaaagctaaaatatttggtgttatatctcaaaggaatgattacaatgatggtagtcaagggcctgcaaacag

SEQ ID NO: 91342 - DNA, 80 bp, synthetic construct
  source 1..80: mol_type = other DNA
ggcgcatgatgccgtggtacctaccacatcagccaaattcaccccaaaattgggttccatattggtgggaacttgggaga

SEQ ID NO: 91343 - DNA, 80 bp, synthetic construct
  source 1..80: mol_type = other DNA
acaacgacatagaaactcagccctccaaattcactccagtcggtctgcttgagatgaatgattttaatcagtggtcacta

SEQ ID NO: 91344 - DNA, 80 bp, synthetic construct
  source 1..80: mol_type = other DNA
accttccccggagttgtggaagctctcatattgcttgcagaactctttggagttttctggacaccaccagacatttccac

SEQ ID NO: 91345 - DNA, 80 bp, synthetic construct
  source 1..80: mol_type = other DNA
tccttttctttaggtcttttatcccgcttaaaggcggccacggcaatccagccattgactgcctcctcccgcaagagtgg

SEQ ID NO: 91346 - DNA, 80 bp, synthetic construct
  source 1..80: mol_type = other DNA
atacagcacttctatcaagagtctgccccttcccaaaccagtgttgctttgattaggtatgtaaaccctgatacaggacg

SEQ ID NO: 91347 - DNA, 80 bp, synthetic construct
  source 1..80: mol_type = other DNA
agtcctgtttgagggaaaactgcataggcagggatttataaccattgcaaagtcaggagatggaccaattgttgtgcccc

SEQ ID NO: 91348 - DNA, 80 bp, synthetic construct
  source 1..80: mol_type = other DNA
caaatggatatttcaggtttgattcttgggtaaaccagttttactcacttgcccccatgggaaatggaaacgggcgtaga

SEQ ID NO: 91349 - DNA, 80 bp, synthetic construct
  source 1..80: mol_type = other DNA
caggggctaatgctattaatcaaaaagttgattttgaaaataataaatatcttcaatcagcatcatttgctcatgataag

SEQ ID NO: 91350 - DNA, 80 bp, synthetic construct
  source 1..80: mol_type = other DNA
gagatgcttaaagcacaaattgaggccactaaacaacttcagtctgatatgattgccatcaagcaaagtgtgttatccgc

SEQ ID NO: 91351 - DNA, 80 bp, synthetic construct
  source 1..80: mol_type = other DNA
tggcggatttgcacctgcggacgcggcaaggggatcagtcaatgcgcccatgacaaaggtccttgactggtgcggcacta

SEQ ID NO: 91352 - DNA, 80 bp, synthetic construct
  source 1..80: mol_type = other DNA
tggcggatttgcacctgcggacgcggcaaggggatcagtcaatgcgcccatgacaaaggtccttgactggggcggcacta

SEQ ID NO: 91353 - DNA, 80 bp, synthetic construct
  source 1..80: mol_type = other DNA
ggtactgggcaccaaattcgacctccacgaccatgtattctggcggtttcacaggacaaccagtgcataggccaacacca

SEQ ID NO: 91354 - DNA, 80 bp, synthetic construct
  source 1..80: mol_type = other DNA
ctttatagcatcactcctgggcgattatgaaatgcagggccctgaggacattgcggttgaagttgtgccagtgatcttgg

SEQ ID NO: 91355 - DNA, 80 bp, synthetic construct
  source 1..80: mol_type = other DNA
aatttctcagtgaagagcaagcccgcgccaagtgctgtaccatcatcctataagtccaattccacagtgtcaactcaact

SEQ ID NO: 91356 - DNA, 80 bp, synthetic construct
  source 1..80: mol_type = other DNA
gagctctgtgtcttctggctcgtccagatccagcgcctccactgcaactagctcaattccatccacaacaagaacaatgg

SEQ ID NO: 91357 - DNA, 80 bp, synthetic construct
  source 1..80: mol_type = other DNA
agtgggtcaggcagcagaacagagagctggaaccacacatgcccggatcgctgaggacggcttttgtcacaccgccaccc

SEQ ID NO: 91358 - DNA, 80 bp, synthetic construct
  source 1..80: mol_type = other DNA
ggtacagtctcaaccgtgcccaagggtgttttggactcctggacgcctatgtttaacacacataggcagccgcttttcgc

SEQ ID NO: 91359 - DNA, 80 bp, synthetic construct
  source 1..80: mol_type = other DNA
gtggtataggtatggtgcttggattcaccaaggagaggatcggccggttgctgagctccgccgcatcctcacttagggca

SEQ ID NO: 91360 - DNA, 80 bp, synthetic construct
  source 1..80: mol_type = other DNA
tgcagggagatcggcaattatgggatagaagtagtgaagctagtgatgaaatggtttttccccaccaaagatgaggcaaa

SEQ ID NO: 91361 - DNA, 80 bp, synthetic construct
  source 1..80: mol_type = other DNA
tgaaatggacatggtgagggcaatagaggatgctgtgcttgactttgaagccatacagaacaaccacatgacagcattac

SEQ ID NO: 91362 - DNA, 80 bp, synthetic construct
  source 1..80: mol_type = other DNA
tcaaagacaaaaacagcctggctactttcctcagggagttggacatggaagaggagaaggcgcgtaagttatcaacaaag

SEQ ID NO: 91363 - DNA, 80 bp, synthetic construct
  source 1..80: mol_type = other DNA
tggggacataatcatcaaatacaccaaacaagatgatgtggttgtaggggtgcccactgtcgctacggtggatgtccccc

SEQ ID NO: 91364 - DNA, 80 bp, synthetic construct
  source 1..80: mol_type = other DNA
cccgcgacctggccaagaagatggcggcgaccctctcaggtgaccagagggtaggactcgtgccgaggaacggtgttgat

SEQ ID NO: 91365 - DNA, 80 bp, synthetic construct
  source 1..80: mol_type = other DNA
ctacagggacctgaactgcctgtgtacaattttgaccaaaacagggtgaccgctttcagaaagcttgcagctgataacaa

SEQ ID NO: 91366 - DNA, 80 bp, synthetic construct
  source 1..80: mol_type = other DNA
gagacataagcatcaagccttgcagaataatctacaactctatggcttatgatcttgactcgaacgggtcagggagggtt

SEQ ID NO: 91367 - DNA, 80 bp, synthetic construct
  source 1..80: mol_type = other DNA
aacgtcaaaaaggttgtagatcataaggtccaaactaacaatgaactcaactccgcgctcaacaacctgcgcggcgctag

SEQ ID NO: 91368 - DNA, 80 bp, synthetic construct
  source 1..80: mol_type = other DNA
tgttcaagagatggtgtactctctcctccagatcgctggcgcggccttcgtcacttcaaggatgacgcgaaggttaaacg

SEQ ID NO: 91369 - DNA, 80 bp, synthetic construct
  source 1..80: mol_type = other DNA
tcagtggtatctgggccaggccagaaaaacaggtggaggccgttgaagaacccccagcccccccacctgaagattggact

SEQ ID NO: 91370 - DNA, 80 bp, synthetic construct
  source 1..80: mol_type = other DNA
ataaccccatcagatgcaattcaagaaggtaaaaagggcaagaacaaaagtggcaggggtaagaaacacactgccttctc

SEQ ID NO: 91371 - DNA, 80 bp, synthetic construct
  source 1..80: mol_type = other DNA
gaaataaaaattagacagagggtctttcgcccaaccagaaaacagcgcagggaggaaagggcaaccctgggattggtcac

SEQ ID NO: 91372 - DNA, 80 bp, synthetic construct
  source 1..80: mol_type = other DNA
gggtagtgaaatcaggaaaaggaacccagacgacttcaaaccaagaggaaaattgtgggctgatgatgaccgcagtgtaa

SEQ ID NO: 91373 - DNA, 80 bp, synthetic construct
  source 1..80: mol_type = other DNA
gggtgtcttctaacctgttaatcacatcaacacacgtcatccccccgaacatgactgaggcttttggtgtaccaataagc

SEQ ID NO: 91374 - DNA, 80 bp, synthetic construct
  source 1..80: mol_type = other DNA
cagatacaaatacacagaagtggagagttctgcaaaatgaggtttcccaaggctataagacctgatgtctcgggcatgat

SEQ ID NO: 91375 - DNA, 80 bp, synthetic construct
  source 1..80: mol_type = other DNA
atacaagggaaaatgcttggaggccaaatgggcatgctcctcacggggtccaacgccaagaacatggacctcggcaccat

SEQ ID NO: 91376 - DNA, 80 bp, synthetic construct
  source 1..80: mol_type = other DNA
ccctggggactgtggttgtccctatgtgtacaagagcggtaatgattgggtggtcataggtgtgcacaccgcagctgcca

SEQ ID NO: 91377 - DNA, 80 bp, synthetic construct
  source 1..80: mol_type = other DNA
ccctggggactgtggttgtccctatgtgtacaagaggggtaatgattgggtggtcataggtgtgcacaccgcagctgcca

SEQ ID NO: 91378 - DNA, 80 bp, synthetic construct
  source 1..80: mol_type = other DNA
gaggtggcaacaccgtaatctgcgccacccaggggccagatggtgaggccacactcgagggaggggacaaccacgggacc

SEQ ID NO: 91379 - DNA, 80 bp, synthetic construct
  source 1..80: mol_type = other DNA
gaggtggcaacaccgtaatctgcgccacccaggggccagatggtgaggccacactcgagggagtggacaaccacgggacc

SEQ ID NO: 91380 - DNA, 80 bp, synthetic construct
  source 1..80: mol_type = other DNA
cagaaacccttagaagactccacggagagtcgttcccatacaatgcatttgacaacaattgctactccttctgttgttgg

SEQ ID NO: 91381 - DNA, 80 bp, synthetic construct
  source 1..80: mol_type = other DNA
ccgcggccagcaaccttagaggctgccaaagagaccatttgcaatgtgcttgagcaggtcattgaaccaccccaaaaatg

SEQ ID NO: 91382 - DNA, 80 bp, synthetic construct
  source 1..80: mol_type = other DNA
gtcttacgctcaggcctgtgcctcattggataagacaacatctagtggtcacccccaccacatgaaaaagaatgacaatt

SEQ ID NO: 91383 - DNA, 80 bp, synthetic construct
  source 1..80: mol_type = other DNA
agatgaactcgttaagactagtaagatctatgaaaacattaagaaaagacttctatggggatcagatctgggcacgatga

SEQ ID NO: 91384 - DNA, 80 bp, synthetic construct
  source 1..80: mol_type = other DNA
gtcttggacttgaatgattcctggcttaacagaaagtttgtttcgaggaccacaggtttctacagaccctaccaagagtg

SEQ ID NO: 91385 - DNA, 80 bp, synthetic construct
  source 1..80: mol_type = other DNA
ctcataacactatgtgccatatcagaagtttcagggctgtcgccagacgtggtacagacaaactcctgcttctccttcta

SEQ ID NO: 91386 - DNA, 80 bp, synthetic construct
  source 1..80: mol_type = other DNA
cggggatgatgagatagtcagcactgatatcaagttggaccccttgaagctgaccaacaagttaaaagagtatggactga

SEQ ID NO: 91387 - DNA, 80 bp, synthetic construct
  source 1..80: mol_type = other DNA
ttccaacaagaccagataagacagagggaccgctcataattaaagagagccttgagggtctaactttcctgaggagggac

SEQ ID NO: 91388 - DNA, 80 bp, synthetic construct
  source 1..80: mol_type = other DNA
gtgtgtcgagacccagctggttggtacggaaagcttgatcaatcttcaattatgagacaactgtattggactaagggaac

SEQ ID NO: 91389 - DNA, 80 bp, synthetic construct
  source 1..80: mol_type = other DNA
gagacaatgatcccacactctcagagacccatacaattaatgtcattgctgggggaggcggcactgcatggtccagcttt

SEQ ID NO: 91390 - DNA, 80 bp, synthetic construct
  source 1..80: mol_type = other DNA
gaacagaaagcctctaccaaccatggatgaggggaaactcaagaaagtggccaatgtgctactgtgcggtctctctggtc

SEQ ID NO: 91391 - DNA, 80 bp, synthetic construct
  source 1..80: mol_type = other DNA
gggggagctatcgcagccccgctcactggacaaacaaatgtaattgatccctggataagaactaattttgtacaagcccc

SEQ ID NO: 91392 - DNA, 80 bp, synthetic construct
  source 1..80: mol_type = other DNA
aaatggtgagttcaccatttctcccagaaattccccaggagaagttttattgaacatggaattgggccctgagttaaacc

SEQ ID NO: 91393 - DNA, 80 bp, synthetic construct
  source 1..80: mol_type = other DNA
ccttcttaggacatttatctagaatgtataatggttatgctggtgggattgaagtccaagttttgatggcgggaaacgcc

SEQ ID NO: 91394 - DNA, 80 bp, synthetic construct
  source 1..80: mol_type = other DNA
cactacagtcaggtggacgaacccaagatgcggttggtggccatgctctacacaccgttgagatctaacgggtctgcaga

SEQ ID NO: 91395 - DNA, 80 bp, synthetic construct
  source 1..80: mol_type = other DNA
agatgtcttcacagtgtcttgcagagtgttgaccaggccatcaccagattttgaattcaattatttggtaccaccaactg

SEQ ID NO: 91396 - DNA, 80 bp, synthetic construct
  source 1..80: mol_type = other DNA
tagaatcaagaaccaagccttttactgtacccatcctaaccattggggaaatgtcaaattcacgcttccctgcccctata

SEQ ID NO: 91397 - DNA, 80 bp, synthetic construct
  source 1..80: mol_type = other DNA
gatatgctctacacaagccccaatgataaccagaatgtgcagccacaaaatggcagatgcaccctagatggggaactgca

SEQ ID NO: 91398 - DNA, 80 bp, synthetic construct
  source 1..80: mol_type = other DNA
aggcaccacccaactggtcccatcaggtgtatgtgcgttcaggggcagaatcacgggccacgagggatcagagcaaaacc

SEQ ID NO: 91399 - DNA, 80 bp, synthetic construct
  source 1..80: mol_type = other DNA
agtggcacatgcaactgaccaacctcaacgggacaccatttgacccaacggaagacatccccgcaccccttggcacccct

SEQ ID NO: 91400 - DNA, 80 bp, synthetic construct
  source 1..80: mol_type = other DNA
gacttcaaaggagaaatatttggattcatatcacaaagaaatgcacaaaatgacccagggcaaagccaaccagccaacag

SEQ ID NO: 91401 - DNA, 80 bp, synthetic construct
  source 1..80: mol_type = other DNA
ggcacacgatgcggtggtatctactagggcaccaaaattcactccaaaattggggtcggtgatgattggcacatgggtga

SEQ ID NO: 91402 - DNA, 80 bp, synthetic construct
  source 1..80: mol_type = other DNA
actctgacattgagaaccaaccctcaaaattcaccccagttgggctaaatagcaatgaaaatttcagacagtgggaacta

SEQ ID NO: 91403 - DNA, 80 bp, synthetic construct
  source 1..80: mol_type = other DNA
ccagattactcaggagtgctaacccttaacatgggattggcgcccgttgtccacccaacctaccccggtgagcaaatcct

SEQ ID NO: 91404 - DNA, 80 bp, synthetic construct
  source 1..80: mol_type = other DNA
attctttaggtcatatatcccactaaaaggtggtcatggcaaccccgccatagactgtctcctcccccaggagtggatcc

SEQ ID NO: 91405 - DNA, 80 bp, synthetic construct
  source 1..80: mol_type = other DNA
agcacttctaccaggagtctgcgccctcccagactgatgttgccttacttaggtatgtgaaccccgatacaggacgagtc

SEQ ID NO: 91406 - DNA, 80 bp, synthetic construct
  source 1..80: mol_type = other DNA
ctgttcgaggccaaattgcacagacagggatacatcaccattgcaaaatcaggggatggaccaattgttgtgcccccaaa

SEQ ID NO: 91407 - DNA, 80 bp, synthetic construct
  source 1..80: mol_type = other DNA
gatgctccaggcacaagtggctgcgaccaagcagctccaatctgacatgattgccatcaagtacggtgtgctatccgctg

SEQ ID NO: 91408 - DNA, 80 bp, synthetic construct
  source 1..80: mol_type = other DNA
gcgggttctcacccactgatgcagcaagaggcgcggtcaacgcacccatgacaaaagtcttggactggagtggaaccaga

SEQ ID NO: 91409 - DNA, 80 bp, synthetic construct
  source 1..80: mol_type = other DNA
acctaatgcggccacaacgaccatgtactccggcgggttcattggtcagccggtgcataggccaacaccaaattttacag

SEQ ID NO: 91410 - DNA, 80 bp, synthetic construct
  source 1..80: mol_type = other DNA
tgaaggataaatctgcacccagttctgcttcatccacgtacaagtccaactccacagcaacgaccagactaaattccagc

SEQ ID NO: 91411 - DNA, 80 bp, synthetic construct
  source 1..80: mol_type = other DNA
tcttcagggtccagtgtctccacagccaccacctcactcccatccaccaccaggacggccgagtgggtgagacaacaaaa

SEQ ID NO: 91412 - DNA, 80 bp, synthetic construct
  source 1..80: mol_type = other DNA
ttttatagcatcacttttgggtgattatgaaatgcagggccctgaggacatcgcagttgaagttgtgccagtaattctcg

SEQ ID NO: 91413 - DNA, 80 bp, synthetic construct
  source 1..80: mol_type = other DNA
caacacacaacaccgcctacagtgtcccccccttggaccagagggagaaggttgaggcaaaggaacctctgacaggctcg

SEQ ID NO: 91414 - DNA, 80 bp, synthetic construct
  source 1..80: mol_type = other DNA
gtggcataggcatggtactcgggttcaccaaagagagaatcggccggttgctgagctctgccgcttcttcacttagggcg

SEQ ID NO: 91415 - DNA, 80 bp, synthetic construct
  source 1..80: mol_type = other DNA
cgagatggacatggtgagggcaatagaggatgccgtgctcgactttgaggccatacaaaataatcacatgacagcattac

SEQ ID NO: 91416 - DNA, 80 bp, synthetic construct
  source 1..80: mol_type = other DNA
ccacaaaggagaatggctcaacccggggccataaagctacagttttcactgggagtgccgacttcgctccaaagctgggc

SEQ ID NO: 91417 - DNA, 80 bp, synthetic construct
  source 1..80: mol_type = other DNA
agtgttcaatttgatactgatacaacacatgattttgaagctcaccaaaatacaaaattcaccccagtcggtgttatcca

SEQ ID NO: 91418 - DNA, 80 bp, synthetic construct
  source 1..80: mol_type = other DNA
ccccaatggctattttaggtttgattcctgggttaatcaattctacacacttgcccccatgggaaatggaacggggcgca

SEQ ID NO: 91419 - DNA, 80 bp, synthetic construct
  source 1..80: mol_type = other DNA
tgcaccttcagaggggatgtcacccacttccaaggttctagtgttttcaaaatgaatttggcttctataaattggaacaa

SEQ ID NO: 91420 - DNA, 80 bp, synthetic construct
  source 1..80: mol_type = other DNA
ttttgacccaacagaagagattccagcccccctggggactccagatttcgtgggaaagatccaaggtgtgctcactcaaa

SEQ ID NO: 91421 - DNA, 80 bp, synthetic construct
  source 1..80: mol_type = other DNA
atggcgtcttcactgtacgcacaattaatctcgcaaaattactattctctaggaaatgaaattttatctgatcaacaaac

SEQ ID NO: 91422 - DNA, 80 bp, synthetic construct
  source 1..80: mol_type = other DNA
cggatataggaggattccagtattcttattcgtcagagatgtcatattattttcagatacctgtaggatcatatcctgga

SEQ ID NO: 91423 - DNA, 80 bp, synthetic construct
  source 1..80: mol_type = other DNA
cgcaccggggatcctaggcgtttagttgcgctagtttgctgtacaacttccttgtgcgaaaccactgggagcagaccaga

SEQ ID NO: 91424 - DNA, 80 bp, synthetic construct
  source 1..80: mol_type = other DNA
aaccccatctagtatctttctagaccctattaactcaagctctagggaatcaccaagtgttaaagggtcttccatataat

SEQ ID NO: 91425 - DNA, 80 bp, synthetic construct
  source 1..80: mol_type = other DNA
cctcaaattcctcggacctgatgtcaaagacaccatcactcaccttgaagatgggatctgatcttaatagatgcaagcac

SEQ ID NO: 91426 - DNA, 80 bp, synthetic construct
  source 1..80: mol_type = other DNA
tcatccaacaatctcctatcaacttcacctttgaagagatgagaacatgataaaaactcagcagtgcctgggctctgcag

SEQ ID NO: 91427 - DNA, 80 bp, synthetic construct
  source 1..80: mol_type = other DNA
ttgacatttcaccaagaaaatcagtgaaaattttctcagacaatcagtattgttttggttatgtgtaaaatcaactgtga

SEQ ID NO: 91428 - DNA, 80 bp, synthetic construct
  source 1..80: mol_type = other DNA
ttgaaaactccaatattcccttggtattatcaagcatataattccataaacccttcaaggatccaaacatccttgggttt

SEQ ID NO: 91429 - DNA, 80 bp, synthetic construct
  source 1..80: mol_type = other DNA
gtcaagccctgcttaatcagtgcagcagtgttgcagacaacatcccccactttgtaggagaaccacccaaagccaaactg

SEQ ID NO: 91430 - DNA, 80 bp, synthetic construct
  source 1..80: mol_type = other DNA
caggtcatctttgaacatgggcctttcaatattcttattgactacttttaaaatgaatgattgaaaaggtcctagtgctt

SEQ ID NO: 91431 - DNA, 80 bp, synthetic construct
  source 1..80: mol_type = other DNA
cacatatcttggtcctctgaattgcaagtcatgttggcaaaagtttgacagtttggtcaggtgtcatgatcactacttat

SEQ ID NO: 91432 - DNA, 80 bp, synthetic construct
  source 1..80: mol_type = other DNA
cagcaccgtcttcagatggcatcatatctttatgggggaaccatgaaaagctgcctaaggtcctggctgttgcaacgaat

SEQ ID NO: 91433 - DNA, 80 bp, synthetic construct
  source 1..80: mol_type = other DNA
tctcgcacaaaagactcaaagtacacctgcttcaaaaagtttttacaaacatcccttgtgctaacaacaaattcatcaac

SEQ ID NO: 91434 - DNA, 80 bp, synthetic construct
  source 1..80: mol_type = other DNA
aaggcttgagtcagagcgctgatgagaattagcaagatctgagaatagcacagtataatgttcatctctcttccatttaa

SEQ ID NO: 91435 - DNA, 80 bp, synthetic construct
  source 1..80: mol_type = other DNA
caacgtgagagataagtgataaggactctgagttaatgtcaatcaacacacaaaggtcaagaaatttaatcctgggactc

SEQ ID NO: 91436 - DNA, 80 bp, synthetic construct
  source 1..80: mol_type = other DNA
catctcatgttttttgaactcatgtcagacatgaacggaagtaactggtcctcaaaaatcttagggtataaccgcctcac

SEQ ID NO: 91437 - DNA, 80 bp, synthetic construct
  source 1..80: mol_type = other DNA
agattgaatcacatgactcaaactaactttgtcttcaagcagtcttgagccctcaggttttcttgccacataatcacacg

SEQ ID NO: 91438 - DNA, 80 bp, synthetic construct
  source 1..80: mol_type = other DNA
ggttcaattgcttgaggcttagattctcaccacccttccccttcacaggctctgccaagacccaaacacctaactcaaaa

SEQ ID NO: 91439 - DNA, 80 bp, synthetic construct
  source 1..80: mol_type = other DNA
gaattgctcaaggaaatgcagatataatcccaaaggatgggccttaaaaaactaatgtggtcactgttggcttgtgggtg

SEQ ID NO: 91440 - DNA, 80 bp, synthetic construct
  source 1..80: mol_type = other DNA
gtcctgcctgtcacagacgtacagcattataccatcttgcttttgaaccttcatcacatgctcatcaacagctagatctt

SEQ ID NO: 91441 - DNA, 80 bp, synthetic construct
  source 1..80: mol_type = other DNA
caagcaccttccttatgtacagattttctctgtttttgtttctcacgcatctgcttcccagagtcttacatagacctatg

SEQ ID NO: 91442 - DNA, 80 bp, synthetic construct
  source 1..80: mol_type = other DNA
gcagacattgtctaaatctcttgctgtctgtctctgacagatgccctctctgcaagtatcccctgccaaccaaactgaga

SEQ ID NO: 91443 - DNA, 80 bp, synthetic construct
  source 1..80: mol_type = other DNA
aaaccagatgatacacaactctggaaagctgacttgttgatcgcttctgatagtagcttttgtgcacccctcgtgaactt

SEQ ID NO: 91444 - DNA, 80 bp, synthetic construct
  source 1..80: mol_type = other DNA
actacagagcttattctggagtgtctttattaatgaagggattctttcttcttggaaagtcatcaccgatggataaacca

SEQ ID NO: 91445 - DNA, 80 bp, synthetic construct
  source 1..80: mol_type = other DNA
ctttttgtctcaaaaccatcctcagcgggaacatctcgttcaagttcaaccaattaatatttgctagttgacttaaatct

SEQ ID NO: 91446 - DNA, 80 bp, synthetic construct
  source 1..80: mol_type = other DNA
tcctcaaaacctaagatgttcgctaactgaagaatggcctctttcttttctctgttaaaaagatccaggaagaactcctc

SEQ ID NO: 91447 - DNA, 80 bp, synthetic construct
  source 1..80: mol_type = other DNA
attaaattcgccgttcttaagcttgtggtgcagctttctcacaagtttcctcataacttttgtttcatcaggacacaatt

SEQ ID NO: 91448 - DNA, 80 bp, synthetic construct
  source 1..80: mol_type = other DNA
cttcaatgagcctttggattctataacctcttgagccgtccaaccagtccttcacatcagtgtttgtattcaacaagaat

SEQ ID NO: 91449 - DNA, 80 bp, synthetic construct
  source 1..80: mol_type = other DNA
ggatccagagggaagttggcatatcttaggagatccagtgttctcctctggatacagttcactaatgatactgggacacc

SEQ ID NO: 91450 - DNA, 80 bp, synthetic construct
  source 1..80: mol_type = other DNA
attcgcaaccgcttgatcagcaattgtgtctatggtttcacaaagttggtgtggctctttgcacttaacattatgtagcg

SEQ ID NO: 91451 - DNA, 80 bp, synthetic construct
  source 1..80: mol_type = other DNA
ctgcagacacaaattttgtgagaagaggaacctcctccccccacacataaaatctggatttaaattcagcagcaaaacgc

SEQ ID NO: 91452 - DNA, 80 bp, synthetic construct
  source 1..80: mol_type = other DNA
ccaactacacttttaggactgatgaacttattaagcaaaccactcaaatgagaatgaaattccagtagaacaagtacctc

SEQ ID NO: 91453 - DNA, 80 bp, synthetic construct
  source 1..80: mol_type = other DNA
gtgtcaacagccccaagctcacctcccccatacgaggagtgacagcctcaaaaacccgacaacaacacacagcccaagag

SEQ ID NO: 91454 - DNA, 80 bp, synthetic construct
  source 1..80: mol_type = other DNA
ctctgggtcactatctaccagctcacttattcttttgtcaaatagagtgatttgatcatcacttgatgtgtaagcctctg

SEQ ID NO: 91455 - DNA, 80 bp, synthetic construct
  source 1..80: mol_type = other DNA
gtctttcaccaaagataacaccaatgcaatagttgatgaatctctcactgattaagccgtagaagtcagaggcattatgt

SEQ ID NO: 91456 - DNA, 80 bp, synthetic construct
  source 1..80: mol_type = other DNA
aagatcccctgtcccatgtcaatgaggctggatatatgggatggaaccactcctctctcaaagtactctctaaagatcct

SEQ ID NO: 91457 - DNA, 80 bp, synthetic construct
  source 1..80: mol_type = other DNA
ttcagtgacagttgtctctgaacccctaagaagctttagttttgatttaacatatgacttcatcattgcattcacaacag

SEQ ID NO: 91458 - DNA, 80 bp, synthetic construct
  source 1..80: mol_type = other DNA
gaaaaggagcctcaacaagtttatgcatgtgccaggttagcagagtgctaacatgatcttttccagagcgcacatattgg

SEQ ID NO: 91459 - DNA, 80 bp, synthetic construct
  source 1..80: mol_type = other DNA
tcatcacctagtttcaaattctggagaagcataaggaacaaaaacgggcacatcattggtccccacttactatgatccat

SEQ ID NO: 91460 - DNA, 80 bp, synthetic construct
  source 1..80: mol_type = other DNA
actgtaatttagaaacccttctctcacattgatggtcattgacagtattgcattttcaaattctttgtcattgtttaaac

SEQ ID NO: 91461 - DNA, 80 bp, synthetic construct
  source 1..80: mol_type = other DNA
atgagcccgaaaagaaactggaaaaggactcaaaatagtcttctactagtcttgtgaacatttttgtcctcaagtcaccg

SEQ ID NO: 91462 - DNA, 80 bp, synthetic construct
  source 1..80: mol_type = other DNA
atataaagctctctgtttcctccaacttgctctttgtaagatagtgcaaacttcagccttccggaatcaggcccaaccga

SEQ ID NO: 91463 - DNA, 80 bp, synthetic construct
  source 1..80: mol_type = other DNA
ggtatatgatgttggtgattcttctgaataaaaacacaagttttttaaggcagcactcatgcatttcgtcaatgacagag

SEQ ID NO: 91464 - DNA, 80 bp, synthetic construct
  source 1..80: mol_type = other DNA
ccttacttaaagactcagaattactctccctttcactaattctcacatcttcttctaatttgtcccagtcaaacttgaaa

SEQ ID NO: 91465 - DNA, 80 bp, synthetic construct
  source 1..80: mol_type = other DNA
ttcaggccctgcctttgcatatgtctgtatttccctgagtatgcatttgcattcatctgtaatagaatcatcttcaaaca

SEQ ID NO: 91466 - DNA, 80 bp, synthetic construct
  source 1..80: mol_type = other DNA
ggaaaaccagtcgccctctgaaaagaactttctgcagagattctttgccatctcatctaagccacactgttctttggtag

SEQ ID NO: 91467 - DNA, 80 bp, synthetic construct
  source 1..80: mol_type = other DNA
atgaagtgaaatacaatgatgatagttctgtggaaccttcaacagcctcacatacaaatttcatatcatcattagtaaga

SEQ ID NO: 91468 - DNA, 80 bp, synthetic construct
  source 1..80: mol_type = other DNA
caggttgggtcaaagtcttctactagatggaaagatatctctgacaaaattattttccttaagtgagccatcttgcctga

SEQ ID NO: 91469 - DNA, 80 bp, synthetic construct
  source 1..80: mol_type = other DNA
caaaacagtttgaagatgatgtagcccctttgtgtttttcaatccttcctcgtcctcttccccacccaccttcttgcttt

SEQ ID NO: 91470 - DNA, 80 bp, synthetic construct
  source 1..80: mol_type = other DNA
tcttgtactgagttattgtggagttgaccttgttttctagacccttgaaaaagtttgtctcctcctctccttcaaagcaa

SEQ ID NO: 91471 - DNA, 80 bp, synthetic construct
  source 1..80: mol_type = other DNA
atatcttctgaatcaccttctaatctccccgcctcagattctttggagccgatgaccaatctagagaccagctttgagac

SEQ ID NO: 91472 - DNA, 80 bp, synthetic construct
  source 1..80: mol_type = other DNA
cttgtactcgtaatctgaatgatgtaatttgtacttctgctttctcataaagccctctgtgatctgactcacagcactaa

SEQ ID NO: 91473 - DNA, 80 bp, synthetic construct
  source 1..80: mol_type = other DNA
caagtaatttattaaaatcatattgtaagagccgttccccatttagatgtttattaacaaccacgcttttattgctggca

SEQ ID NO: 91474 - DNA, 80 bp, synthetic construct
  source 1..80: mol_type = other DNA
ggcaaacacacacacccacaaacccacacccacgcgccccccacaccgggaggcgccccccccgggtgtggcccccggcg

SEQ ID NO: 91475 - DNA, 80 bp, synthetic construct
  source 1..80: mol_type = other DNA
agatctaaagctgttgcacacccagagttggtcattgggtccaaactatttagctttttctcccctttgaagattaatgt

SEQ ID NO: 91476 - DNA, 80 bp, synthetic construct
  source 1..80: mol_type = other DNA
gccgttattgaatgaggagaccatcaggctaaaaacctctaaattaacacctgggcttgtattctgacagtcaatttctt

SEQ ID NO: 91477 - DNA, 80 bp, synthetic construct
  source 1..80: mol_type = other DNA
tactagtgaactttttcatttgctcataaaagacacactcttcttcaggagttatcacttccttgggattaacaaaaaag

SEQ ID NO: 91478 - DNA, 80 bp, synthetic construct
  source 1..80: mol_type = other DNA
ccaaactcacttttaggctcaaagaacttctcaaaacacttaatctgatctgtcaatctgtcaggggtctccttcgtgat

SEQ ID NO: 91479 - DNA, 80 bp, synthetic construct
  source 1..80: mol_type = other DNA
taggtgacatagatatgatacattcagcatgaacttaaattttgcacttaacaacaccttctcaccggtaccaaaaatgg

SEQ ID NO: 91480 - DNA, 80 bp, synthetic construct
  source 1..80: mol_type = other DNA
ttctgaccagatatctgagcagcctatacaccagcttctcagcaggtgtgattaggtcttcctttagtttttccattaat

SEQ ID NO: 91481 - DNA, 80 bp, synthetic construct
  source 1..80: mol_type = other DNA
gatgtggatgaaaagtctgagacaatagccataaccagatatctaatattctggacctgtttctgatttctttttgctgg

SEQ ID NO: 91482 - DNA, 80 bp, synthetic construct
  source 1..80: mol_type = other DNA
gttagtgagcatcagtaatagtagagtcttcaatgcagtttcaatgtcaataagacagtcttttaagtctggacatgacc

SEQ ID NO: 91483 - DNA, 80 bp, synthetic construct
  source 1..80: mol_type = other DNA
taatccatgatatcatagtagcaatcatgttgtgtaacacctcatctgagaaaattggtaagaagaacctctttgggtcc

SEQ ID NO: 91484 - DNA, 80 bp, synthetic construct
  source 1..80: mol_type = other DNA
gcataaaaggaaatcaaatgaccgtctgggccttgtattgagtagcaccttgaagactctccggtcttttgatataataa

SEQ ID NO: 91485 - DNA, 80 bp, synthetic construct
  source 1..80: mol_type = other DNA
ggcccgggcggagccccgcggagacaccgactagtcgatttcctccgccaccggcccggaaagccagtcatcacaggact

SEQ ID NO: 91486 - DNA, 80 bp, synthetic construct
  source 1..80: mol_type = other DNA
ataatattcttcagagtctagttttatcacctggcaaaacacttctttgcactccaccacttgataccttacagaaccta

SEQ ID NO: 91487 - DNA, 80 bp, synthetic construct
  source 1..80: mol_type = other DNA
attgattctgtcttaatctagcaatcgagcttgttttcatactgtttgtcagggctaaacagacagaggacaatcttttt

SEQ ID NO: 91488 - DNA, 80 bp, synthetic construct
  source 1..80: mol_type = other DNA
aagctttgtacatccttcaaacgctctatgttaggttgaaaattgtaatcttcaaactttgtgtaatacattatggggtg

SEQ ID NO: 91489 - DNA, 80 bp, synthetic construct
  source 1..80: mol_type = other DNA
agccccaaccctcatgaagctctcaaactcagcaaatggtatgtcacactcatgcacaaggtgttcagacaacccataat

SEQ ID NO: 91490 - DNA, 80 bp, synthetic construct
  source 1..80: mol_type = other DNA
gctcaaaactgagtccaactattgacagacatctttgaattttcgcgataaagtcatttatggatattttaaataactct

SEQ ID NO: 91491 - DNA, 80 bp, synthetic construct
  source 1..80: mol_type = other DNA
tcaagagacatctttttgcacatccttgactttcttctgtttctcagaagtttgatgtactcctctttggtgctatggaa

SEQ ID NO: 91492 - DNA, 80 bp, synthetic construct
  source 1..80: mol_type = other DNA
gctcactaacctatcattcacactattatagcagcagcccacccaatgcttgtcatcttgtgaacctttggttcttgatt

SEQ ID NO: 91493 - DNA, 80 bp, synthetic construct
  source 1..80: mol_type = other DNA
gcttaatcagtgaagataggcatagaacatctaagttcaacagctgtctcctcctagtgttcaacagcttcaagcttttg

SEQ ID NO: 91494 - DNA, 80 bp, synthetic construct
  source 1..80: mol_type = other DNA
actttgtttaacatagagagaagtctttcatgcctggagctgatctcattccttccctcgtaaccatgggtctctgctgt

SEQ ID NO: 91495 - DNA, 80 bp, synthetic construct
  source 1..80: mol_type = other DNA
gatgaacctcattaaaggacaagactcaaccgcctccttgcacagtgtcgaaatgtcatcatcgtccacaagagtctcat

SEQ ID NO: 91496 - DNA, 80 bp, synthetic construct
  source 1..80: mol_type = other DNA
tccccttgagtctgaatctacccccgaccgtctcatacatcaccgtgttctttgacttactaaaacaaagtctgcagtcc

SEQ ID NO: 91497 - DNA, 80 bp, synthetic construct
  source 1..80: mol_type = other DNA
aaagttcagagaactccttgattagactctcagggttgatttttcggaagtttcttttaagtttcccactttccaaatct

SEQ ID NO: 91498 - DNA, 80 bp, synthetic construct
  source 1..80: mol_type = other DNA
ctcctaaacctgccaaaaagagagttaatgccaaagaccacatcatcacaactcatattagggttcatgccatcatggca

SEQ ID NO: 91499 - DNA, 80 bp, synthetic construct
  source 1..80: mol_type = other DNA
catcttcatgatctcatcattatgaagtgatcttgcgtctttcaaaactttcatagagtccataccagagcgcttgtcaa

SEQ ID NO: 91500 - DNA, 80 bp, synthetic construct
  source 1..80: mol_type = other DNA
cagtggtcttaagagattcacagagtctgaagtactcagattcctcaaaaaccttttcatcttggctggagtacttcaaa

SEQ ID NO: 91501 - DNA, 80 bp, synthetic construct
  source 1..80: mol_type = other DNA
agcttaaataagaggtctctaaacttgaagttcacccattctggcatgaagctattgtcatagctgcaacgaccgtccac

SEQ ID NO: 91502 - DNA, 80 bp, synthetic construct
  source 1..80: mol_type = other DNA
tattgggactagcgtaatgcctgcgacagcaagatcttcctttatacatgccaatttgttggtgtcctctataaatttcc

SEQ ID NO: 91503 - DNA, 80 bp, synthetic construct
  source 1..80: mol_type = other DNA
tttcaaaggtggctggtgtgcttctaacaaagcattcaagcagaatgagagagttgtcgatcagcttataaccatcaggg

SEQ ID NO: 91504 - DNA, 80 bp, synthetic construct
  source 1..80: mol_type = other DNA
atgataagtggtagtccaggacacacaattccggactctataagtattgcctcaactgatttgtcatcatggttgtgtgt

SEQ ID NO: 91505 - DNA, 80 bp, synthetic construct
  source 1..80: mol_type = other DNA
gcagccactcttgtctgcactgtctatctctatgcagcgtgatagcaatttgagcccttcaattaacaccatcctgggct

SEQ ID NO: 91506 - DNA, 80 bp, synthetic construct
  source 1..80: mol_type = other DNA
ctctctgccccagaaagttcaatttttgctttgatagcctctcatcctgttctatatagttcaggcacaactctctcaat

SEQ ID NO: 91507 - DNA, 80 bp, synthetic construct
  source 1..80: mol_type = other DNA
ttgaaggtgaaccagtctggcacaaatgatagtggtgtcagcaacacggacctgtctatgcacagctcttggagaattat

SEQ ID NO: 91508 - DNA, 80 bp, synthetic construct
  source 1..80: mol_type = other DNA
ctgtcaaccatgggtcagggaaaatcccgggagaagagagacaccagcagcacagacagagctgaaattctgccggacac

SEQ ID NO: 91509 - DNA, 80 bp, synthetic construct
  source 1..80: mol_type = other DNA
agatatctctgatcctaacatgtgctcaccagttctaaagcgatgcaggaggagactgccgagaacctcaccgattctgt

SEQ ID NO: 91510 - DNA, 80 bp, synthetic construct
  source 1..80: mol_type = other DNA
cataaccatcaagttccgccaagaaaaccctcatttccttagtctccagcttcacgagaatattctggacaaaattcttc

SEQ ID NO: 91511 - DNA, 80 bp, synthetic construct
  source 1..80: mol_type = other DNA
ccttcaaaaagggcacccatccctatagtcagaggtacaggctcccactcaggcccaaccctctcaaaatcgagagatct

SEQ ID NO: 91512 - DNA, 80 bp, synthetic construct
  source 1..80: mol_type = other DNA
cgcaccggggatcctaggctttttggattgcgctttcctctggatcaactgggtaccagtgtctgtcctgcagaaggatg

SEQ ID NO: 91513 - DNA, 80 bp, synthetic construct
  source 1..80: mol_type = other DNA
tcatcacgagcatcaaagctgtgtacaattttgctacctgcggggtgtttgcactgttgagctttctcctcctggctggc

SEQ ID NO: 91514 - DNA, 80 bp, synthetic construct
  source 1..80: mol_type = other DNA
agatcttgtgcattgtacggtcctgagggacatggcatttacaaagggatctaccaatttaaatcagtggagtttgatat

SEQ ID NO: 91515 - DNA, 80 bp, synthetic construct
  source 1..80: mol_type = other DNA
actgttgcttggcttaatcagaatggactccagcatgttccccccatccaacaatgctgcccctgctttcacagcagcac

SEQ ID NO: 91516 - DNA, 80 bp, synthetic construct
  source 1..80: mol_type = other DNA
cctctgctttcaacaagaaaacctttgaccacacactcatgagcatagtctcgagtctacatctcagcatcagggggaac

SEQ ID NO: 91517 - DNA, 80 bp, synthetic construct
  source 1..80: mol_type = other DNA
tgctctgagtcagtgcagaagttttagaggcagagtcctggatatgttcagaactgcctttgggggcaaatatatgagga

SEQ ID NO: 91518 - DNA, 80 bp, synthetic construct
  source 1..80: mol_type = other DNA
tgatggcaaaaccacttggtgtagccagacgagctatcaatacctgataatacaaaataggacatggcaaaatcactgca

SEQ ID NO: 91519 - DNA, 80 bp, synthetic construct
  source 1..80: mol_type = other DNA
catacgctggtccttttggaatgtccaggattctctttgcccaagaaaagacaaagtttctcactaggagacttgcagga

SEQ ID NO: 91520 - DNA, 80 bp, synthetic construct
  source 1..80: mol_type = other DNA
aaggtgatgggatgggatgttgaaccagaacatcaggagagcacggccaaggcatggtgtgatctcacacaagaagaaaa

SEQ ID NO: 91521 - DNA, 80 bp, synthetic construct
  source 1..80: mol_type = other DNA
gggagtcaccccatcgactttgcccagcacgtttgagagggctgacccagttgacagccccattgaccaacaacccgtaa

SEQ ID NO: 91522 - DNA, 80 bp, synthetic construct
  source 1..80: mol_type = other DNA
tccaaggggctgtttacaactttgatgaagatagggtgtccgccttcacaagccttgctcgtgccaatggcctaggacta

SEQ ID NO: 91523 - DNA, 80 bp, synthetic construct
  source 1..80: mol_type = other DNA
ctagtgacggggtcgacatcggtgttaatgacctgaccactgttcgtggcccattctggaatatgtgtccccttccacca

SEQ ID NO: 91524 - DNA, 80 bp, synthetic construct
  source 1..80: mol_type = other DNA
ataagcatggcaacattaggcaaaaggctcagaagtgtcaaaaccatggagggcctgcgcaatgcattggcgggctacaa

SEQ ID NO: 91525 - DNA, 80 bp, synthetic construct
  source 1..80: mol_type = other DNA
ttgaagggggcccgtccttgcaacaagtgttaagggaccagctaaaaccattcgccgagcctcgtggtaggttgcccgaa

SEQ ID NO: 91526 - DNA, 80 bp, synthetic construct
  source 1..80: mol_type = other DNA
gattggaatggaaattcgttcgtgagagaactgggcgaccaggcagcgcatgccaacagtatgtatgaacttggcaagcc

SEQ ID NO: 91527 - DNA, 80 bp, synthetic construct
  source 1..80: mol_type = other DNA
ttctttggggcgcggatctcggcactgtcatccgcgctgccagagcctttgggccattctgtgaagctataaaacctcat

SEQ ID NO: 91528 - DNA, 80 bp, synthetic construct
  source 1..80: mol_type = other DNA
tggataccagggacggctcgaccgcaattccattgaaagacagctttggtggactcgcgggccaaatcacgacgacccat

SEQ ID NO: 91529 - DNA, 80 bp, synthetic construct
  source 1..80: mol_type = other DNA
gccatggccctatgcttctatcacaaacaactgctatgcgttttgctgtaaggtgatggcactcgatgacacctggcttg

SEQ ID NO: 91530 - DNA, 80 bp, synthetic construct
  source 1..80: mol_type = other DNA
cctgattttagcttcctatttttagtcccccccaacgtggagcaaaagaccaaaccttttagtgtcccaaatcttccatt

SEQ ID NO: 91531 - DNA, 80 bp, synthetic construct
  source 1..80: mol_type = other DNA
gtgacgtcataaagcaaattaatgtcaagcaagaatcagcatttgccccccaccttggtacggtgcaagcagacggcctg

SEQ ID NO: 91532 - DNA, 80 bp, synthetic construct
  source 1..80: mol_type = other DNA
ggaagcagccctgctacattatttagaccctgatactcacagaaaccttggtgagtttaaattgtaccccgatggtttta

SEQ ID NO: 91533 - DNA, 80 bp, synthetic construct
  source 1..80: mol_type = other DNA
acaacgcgtgtcattgattggaatgggactaggattgccgcacccatgtcaactgcaacaacacttagatctggaggata

SEQ ID NO: 91534 - DNA, 80 bp, synthetic construct
  source 1..80: mol_type = other DNA
tatctataggggcagcaaaaataaacaatcaattggtggtggcttttctaatgtaaattatgatccttcagtttcctctt

SEQ ID NO: 91535 - DNA, 80 bp, synthetic construct
  source 1..80: mol_type = other DNA
catttcatccaggtgctctaagaaccacatgggtcactccacctgggtcaacttctacttctacaatttccacagtttcc

SEQ ID NO: 91536 - DNA, 80 bp, synthetic construct
  source 1..80: mol_type = other DNA
gataacattgggtctcgccttatggcgaggatccgtgggcgtataggcctacaacgtggtgaaacaaccacgaagataaa

SEQ ID NO: 91537 - DNA, 80 bp, synthetic construct
  source 1..80: mol_type = other DNA
cttttatgggggttgtagagttaattgtactcctggcagagttgtttgatgtgttttggaccccaccagacatttcgagc

SEQ ID NO: 91538 - DNA, 80 bp, synthetic construct
  source 1..80: mol_type = other DNA
ggggtcacctacaacgcgtgtcattgattggaatgggactaggattgccgcacccatgtcaactgcaacaacacttagat

SEQ ID NO: 91539 - DNA, 80 bp, synthetic construct
  source 1..80: mol_type = other DNA
atatggcacttgacctgctgcgccggtcacaaacaccttccccgtcccggcaagagagcccccccaagagccagagggat

SEQ ID NO: 91540 - DNA, 80 bp, synthetic construct
  source 1..80: mol_type = other DNA
tggaggatagtgaatgatgatggcgtctaatgacgctattgccgctgctgatgtcagcaaacaaaatgctaacaccaaca

SEQ ID NO: 91541 - DNA, 80 bp, synthetic construct
  source 1..80: mol_type = other DNA
taaacggcttggtctctcaacctttcaagaatatcctctcaaaaattaagccactgaatttgttgtctttgctatcaaat

SEQ ID NO: 91542 - DNA, 80 bp, synthetic construct
  source 1..80: mol_type = other DNA
tgtgactggactttcatgggggttgtcgagctagtggtgctattggctgagttgttcgacatcttctggaccccacctga

SEQ ID NO: 91543 - DNA, 80 bp, synthetic construct
  source 1..80: mol_type = other DNA
catctccaacttcatagcatctctcctgcctgacttccacctgcaagggccagaagatttggcaagagacctggtcccat

SEQ ID NO: 91544 - DNA, 80 bp, synthetic construct
  source 1..80: mol_type = other DNA
tgatattggggggtattggcctggctattggctttactagagacaaaattacaaaagtcatgaagagtgctgttgacggc

SEQ ID NO: 91545 - DNA, 80 bp, synthetic construct
  source 1..80: mol_type = other DNA
ccctcaagggcatagagaatgcagtcatagacatggaggtcctgtcgagcaccaatgttacacaactggtgcgcgacaag

SEQ ID NO: 91546 - DNA, 80 bp, synthetic construct
  source 1..80: mol_type = other DNA
aaaacatacatgaacatcctggacaatgaggaggaaaaggcaaggaaactttcagtgcgcagtgcagacccacatgttgt

SEQ ID NO: 91547 - DNA, 80 bp, synthetic construct
  source 1..80: mol_type = other DNA
ggccaccaggtataggaaaaaccaaagctgctgaacacctggccaatcgcctagctggtgagataagacctgggggaaaa

SEQ ID NO: 91548 - DNA, 80 bp, synthetic construct
  source 1..80: mol_type = other DNA
atggcactggatctgatacgcaggtcccaaacaccatcgccaacgcgctcggacccccctcctaaggcgcagcgcgaccg

SEQ ID NO: 91549 - DNA, 80 bp, synthetic construct
  source 1..80: mol_type = other DNA
gttaaccttggtccagtatgtcgacgtgtagactttttggtgtactgcaccgcccccgaaattgaacagaccaggagagc

SEQ ID NO: 91550 - DNA, 80 bp, synthetic construct
  source 1..80: mol_type = other DNA
ccaccctggggacaccaatactatcaagaatttattcaaaccagacttttcccattttaaaatggagatagcaccacaag

SEQ ID NO: 91551 - DNA, 80 bp, synthetic construct
  source 1..80: mol_type = other DNA
aggcggtcgccttaacaatggaaagacaagatgagttccaaatgcagggtgcggtgtataactttgatgaggatcgggtt

SEQ ID NO: 91552 - DNA, 80 bp, synthetic construct
  source 1..80: mol_type = other DNA
aggcggtcgccttaacaatggaaagacaagatgagttccaaatgcagggggcggtgtataactttgatgaggatcgggtt

SEQ ID NO: 91553 - DNA, 80 bp, synthetic construct
  source 1..80: mol_type = other DNA
acagctttcactagcctggcccgggccaacggactgggacttttgagcatggctgcactcggtaaaaagttgcggagcgt

SEQ ID NO: 91554 - DNA, 80 bp, synthetic construct
  source 1..80: mol_type = other DNA
caacaatatggaggggcttcgcaacgccctcaaagggtacaagatcactgaatgtgacattgtgtggaacaacaggactt

SEQ ID NO: 91555 - DNA, 80 bp, synthetic construct
  source 1..80: mol_type = other DNA
ataccattaaaggagatggatcaaatgtgagtgtcatagaaaagcaggtagctgccactcttcagcaacaagccatcagt

SEQ ID NO: 91556 - DNA, 80 bp, synthetic construct
  source 1..80: mol_type = other DNA
tcagtcactctggcactttctaggttacgcgccgcacgagcgttggcgtacgcatcgtgcctccagagcgcagtaaccac

SEQ ID NO: 91557 - DNA, 80 bp, synthetic construct
  source 1..80: mol_type = other DNA
catcttgcaaatggctgggtctgcagtagtgatcagcagggcagttaaacgcatgtttgggacccataccaaccagccag

SEQ ID NO: 91558 - DNA, 80 bp, synthetic construct
  source 1..80: mol_type = other DNA
cactggagggcaaacccagggaacacaactgcagggtccaccgtgctgaaagggaaggtcatggccccattggtcatgac

SEQ ID NO: 91559 - DNA, 80 bp, synthetic construct
  source 1..80: mol_type = other DNA
ggcatcatagaacggtacggtttgtgtgagactgatcaagaagaagaagaaaagatcgagatggaagtgccgactgcaga

SEQ ID NO: 91560 - DNA, 80 bp, synthetic construct
  source 1..80: mol_type = other DNA
caaggaaggcaagaataaaggcaagaacaagaaggggcgaggtaggaagaacaactacaacgccttctctaggcgaggcc

SEQ ID NO: 91561 - DNA, 80 bp, synthetic construct
  source 1..80: mol_type = other DNA
gaccgtcaacggtatgaagaagaattggctgaggtccaagcgggtggagatggcgggatcggtgaaacagaggcagagat

SEQ ID NO: 91562 - DNA, 80 bp, synthetic construct
  source 1..80: mol_type = other DNA
ccgccatcgtgtcttctacaaatccaagagtggcatgcgaaagcaacgtcaggaagaacgccgacagcttggattggtta

SEQ ID NO: 91563 - DNA, 80 bp, synthetic construct
  source 1..80: mol_type = other DNA
caggcactgaaatcagaaagcgcaagcccatagattggacaccacccaagaatgactggtcagaagacaccagacaggtc

SEQ ID NO: 91564 - DNA, 80 bp, synthetic construct
  source 1..80: mol_type = other DNA
ctatgatgagcacatcagctttgaagccccaccttctatttggagtagagtggtaaaatttggcagtggatggggttttt

SEQ ID NO: 91565 - DNA, 80 bp, synthetic construct
  source 1..80: mol_type = other DNA
ggtgcgacttaacagctgaagaaaagaaggaaatcctggacaacaacgagcgcctttttgacgctggcggtgtgactcct

SEQ ID NO: 91566 - DNA, 80 bp, synthetic construct
  source 1..80: mol_type = other DNA
gggtgagttcaacagttttcatcacaaccacacacgtcgttccaccaagtgctaaagaaatttttggggaaaaactttca

SEQ ID NO: 91567 - DNA, 80 bp, synthetic construct
  source 1..80: mol_type = other DNA
gatatagcaatacacagagttggggagttcacacaatttagattctctaagaaaatgagacctgacctcagtggtatggt

SEQ ID NO: 91568 - DNA, 80 bp, synthetic construct
  source 1..80: mol_type = other DNA
cccttgaagggggcgggcaaaacaaagggcattatgcaggccacccaattttgaggtatggcaatggaccctctctctcc

SEQ ID NO: 91569 - DNA, 80 bp, synthetic construct
  source 1..80: mol_type = other DNA
acaaaaaccaaattctggaaatcaaccccccaaccacttccgcctggaacctatgaaccagcttacctaggtgggcgtga

SEQ ID NO: 91570 - DNA, 80 bp, synthetic construct
  source 1..80: mol_type = other DNA
gtagactgccagaaccgagtttgctcgaagcagctgtggagactgtcacaaatgttttagaacaaaccatggacacacct

SEQ ID NO: 91571 - DNA, 80 bp, synthetic construct
  source 1..80: mol_type = other DNA
tcgacagtgccaagtacctttgagagatgtgaaacatctgagcgagtcgacggctgtcaccctgtcaaatggagcgagtc

SEQ ID NO: 91572 - DNA, 80 bp, synthetic construct
  source 1..80: mol_type = other DNA
gtgtcatggagctacagtgatgcctgtatgtcacttgataagaccaccagctcgggctttccacaccacaaacgcaagaa

SEQ ID NO: 91573 - DNA, 80 bp, synthetic construct
  source 1..80: mol_type = other DNA
tgacgattggaacggaagtgcgtttgtgcgtgagcttggagaacaggcggcccatgccaataacatgtatgagttgggca

SEQ ID NO: 91574 - DNA, 80 bp, synthetic construct
  source 1..80: mol_type = other DNA
aatcagtcaaaccggtttacaccgcagcactcaaggatgaactggtgaaacccgagaaagtgtacaaaaaaataaagaag

SEQ ID NO: 91575 - DNA, 80 bp, synthetic construct
  source 1..80: mol_type = other DNA
agactgctttggggcgcagaccttggcacagttattcgagccgcccgagcctttggcccattctgtgaagccataaaacc

SEQ ID NO: 91576 - DNA, 80 bp, synthetic construct
  source 1..80: mol_type = other DNA
ctaatccatcactggctgccgtcgtggctcaggacctgttgtccccatcagaaatggacgtgggtgactacgtgatcagt

SEQ ID NO: 91577 - DNA, 80 bp, synthetic construct
  source 1..80: mol_type = other DNA
gtcaaggatggccttccctcagggttcccatgcacctcacaggtcaatagcataaaccattggatatacactctgtgtgc

SEQ ID NO: 91578 - DNA, 80 bp, synthetic construct
  source 1..80: mol_type = other DNA
tctgtcggaagtcacaggcctagcccctgacgttctgcaggcccaatcctacttctccttctacggggatgatgaaatcg

SEQ ID NO: 91579 - DNA, 80 bp, synthetic construct
  source 1..80: mol_type = other DNA
tctcaactgatgtggaatttgacccaataaagctcacccaagtgcttaaggaatatggcttgaagcccacccggcctgac

SEQ ID NO: 91580 - DNA, 80 bp, synthetic construct
  source 1..80: mol_type = other DNA
tgcgggagtggatttaggcgtggattctctgaccactgtcacaggcccagtgtggaacatgtgcccccttccaccgatag

SEQ ID NO: 91581 - DNA, 80 bp, synthetic construct
  source 1..80: mol_type = other DNA
aaatcggagggacccatcatagtgaaacagcaggtagatgggctagtcttcctgaggcgcactatatcaaaagatgctcg

SEQ ID NO: 91582 - DNA, 80 bp, synthetic construct
  source 1..80: mol_type = other DNA
ttctataggaagattgccaacagagttatacaggaagtcaaggagggggggcttgagctctatataccgggttggcaggc

SEQ ID NO: 91583 - DNA, 80 bp, synthetic construct
  source 1..80: mol_type = other DNA
gttaatgcagctgaacctttaccccttgaaccggtagtgggcgccgcaactgcggctgccactgccggacaagttaattt

SEQ ID NO: 91584 - DNA, 80 bp, synthetic construct
  source 1..80: mol_type = other DNA
tgcatctcaaaatatatcaattggtcaggccaccatgtttccacatgtcatagctgatgtgagggtgctggagcctatag

SEQ ID NO: 91585 - DNA, 80 bp, synthetic construct
  source 1..80: mol_type = other DNA
aaatccctcttgatgatgtgcgcaatgtcttgttccataccaatgagaaccgtcctaccatgcggttgctttgcatgcta

SEQ ID NO: 91586 - DNA, 80 bp, synthetic construct
  source 1..80: mol_type = other DNA
tacacaccccttcgtgctggcggtgcttcatcaggcacggacccctttgtcattgcgggtcgtgtactaacttgccctgc

SEQ ID NO: 91587 - DNA, 80 bp, synthetic construct
  source 1..80: mol_type = other DNA
ccctgattttaatttcctgttccttgtaccccctagtgtagagcagaaaaccaggcagttaactgtgcccaacataccct

SEQ ID NO: 91588 - DNA, 80 bp, synthetic construct
  source 1..80: mol_type = other DNA
tgaacaatatggccaattccagagtgcccgcaatgataaataagatgacagtttctgctgatcaaaaccaggtggtccaa

SEQ ID NO: 91589 - DNA, 80 bp, synthetic construct
  source 1..80: mol_type = other DNA
ttccagaatggtcgttgcacacttgaaggacagctcttgggcacaaccccagtttcagctagtcaagtggcccgcatacg

SEQ ID NO: 91590 - DNA, 80 bp, synthetic construct
  source 1..80: mol_type = other DNA
tggcaaggtcttttccaccgcatctgggaaaggactcaatctgactgagttggatggaactccttaccatgcatttgaga

SEQ ID NO: 91591 - DNA, 80 bp, synthetic construct
  source 1..80: mol_type = other DNA
caggacccaactggggatcaattgggaacattggcctgggtttccccttctactagtggaactagggtagacccttggaa

SEQ ID NO: 91592 - DNA, 80 bp, synthetic construct
  source 1..80: mol_type = other DNA
aattccatcatatggttcaacagtgacagagtccactcatttggcaccacccatatttccaccaggctttggcgaggcca

SEQ ID NO: 91593 - DNA, 80 bp, synthetic construct
  source 1..80: mol_type = other DNA
tctgggagagttcaaattgtaccctgatggatttatcacctgtgtaccaaatacaggtggtggtcctcaaaatttaccta

SEQ ID NO: 91594 - DNA, 80 bp, synthetic construct
  source 1..80: mol_type = other DNA
ggcagccttctccatagctcgtataaccatacaccctatggcagcatggtggcgcgtctgctatgaaccaacagaacagc

SEQ ID NO: 91595 - DNA, 80 bp, synthetic construct
  source 1..80: mol_type = other DNA
agattgagggatctaacgctctattacaaaagaatctttctactcgctataatcttttggttggtgcaggtctttcttca

SEQ ID NO: 91596 - DNA, 80 bp, synthetic construct
  source 1..80: mol_type = other DNA
gctgatgctgcaagatccatcgttggggcccctgtgacaaaaattgtggactggaacggagtgaggatagctgcccctac

SEQ ID NO: 91597 - DNA, 80 bp, synthetic construct
  source 1..80: mol_type = other DNA
gatccatcgttggggcccctgtgacaaaaattgtggactggaacggagtgaggatagctgcccctacgtccactgctact

SEQ ID NO: 91598 - DNA, 80 bp, synthetic construct
  source 1..80: mol_type = other DNA
ttttgctgtcgtgtcatgtccctggacgacacctggttacaacgaaagttggtaacatccggtaggtttaatcaccccac

SEQ ID NO: 91599 - DNA, 80 bp, synthetic construct
  source 1..80: mol_type = other DNA
gttctcgccttatggcgaagctgaaagagcgtataagctctcaacgtggtgaaggaaccacaaaaatcaagaatactgaa

SEQ ID NO: 91600 - DNA, 80 bp, synthetic construct
  source 1..80: mol_type = other DNA
ccaggagtggtccaaggagacacctgatttccatcaagattcaaaattggaaatagtgagagacgcaatactatccgcca

SEQ ID NO: 91601 - DNA, 80 bp, synthetic construct
  source 1..80: mol_type = other DNA
gatggagaaatctaccattacggcctgtacgtggaacgaggtcttatacttggtgtgcataagccaccggcagccatcag

SEQ ID NO: 91602 - DNA, 80 bp, synthetic construct
  source 1..80: mol_type = other DNA
tagtgtacagtggtagcacctacacacttgaggccgatggcaagggtagtgtgaaagttgataaagtgcaaagtgccacc

SEQ ID NO: 91603 - DNA, 80 bp, synthetic construct
  source 1..80: mol_type = other DNA
gtgcaaaccaacaatgaactagccggcgccctacaccacctgaggtgcgccagaattagatactatgttaagtgtgttca

SEQ ID NO: 91604 - DNA, 80 bp, synthetic construct
  source 1..80: mol_type = other DNA
ggaggcactgtattccatcatccaaatcgctggggctgcgttcgtcaccacgcgcatcgccaagcgcatgaacatacaaa

SEQ ID NO: 91605 - DNA, 80 bp, synthetic construct
  source 1..80: mol_type = other DNA
gggtctcccccagtttgttcataacatcaacccatgtcataccccaaggtgcaaaagagttcttcggagtctccatcaaa

SEQ ID NO: 91606 - DNA, 80 bp, synthetic construct
  source 1..80: mol_type = other DNA
cacagttggaggacaaatgggtatgctcttaacaggatccaacgccaagagtatggacttgggcacaacaccaggcgact

SEQ ID NO: 91607 - DNA, 80 bp, synthetic construct
  source 1..80: mol_type = other DNA
gaatggggagtcctttacaggtaaattggcagatcaggcctctaaggccaacctgatgtttgaagagggaaagaacatga

SEQ ID NO: 91608 - DNA, 80 bp, synthetic construct
  source 1..80: mol_type = other DNA
ggggctcggacctggcgaccatgatacggtgcgcccgggcttttgggggccttatggatgaactcaaggcacactgtgtc

SEQ ID NO: 91609 - DNA, 80 bp, synthetic construct
  source 1..80: mol_type = other DNA
ggggctcggacctggcgaccatgatacggtgcgcccgggcttttggtggccttatggatgaactcaaggcacactgtgtc

SEQ ID NO: 91610 - DNA, 80 bp, synthetic construct
  source 1..80: mol_type = other DNA
aaactgaaggaccccttgttatctctgaagatctggatggcctgacattcctccggaggactgtgacccgtgacccagct

SEQ ID NO: 91611 - DNA, 80 bp, synthetic construct
  source 1..80: mol_type = other DNA
ccaggggtcccaaccatgaagatccaaccgaaacaatgataccacactcccaaagacccatacaattgatgtccttgctg

SEQ ID NO: 91612 - DNA, 80 bp, synthetic construct
  source 1..80: mol_type = other DNA
ccccaagaaattcccccggagaagtactcctaaatttggaactgggtcctgaattaaacccttatctggcacacttatct

SEQ ID NO: 91613 - DNA, 80 bp, synthetic construct
  source 1..80: mol_type = other DNA
aggatgtataatggctatgctggaggcatggaggttcagatcatgttagctgggaacgcgttcaccgctggcaaactgat

SEQ ID NO: 91614 - DNA, 80 bp, synthetic construct
  source 1..80: mol_type = other DNA
tttcgctgctgtgcccccacattttcccattgaaaatctgagccctccccaaattacaatgttcccacatgtgattatag

SEQ ID NO: 91615 - DNA, 80 bp, synthetic construct
  source 1..80: mol_type = other DNA
atgttaggactttagaacctgtgttgcttcccatgcccgacatcaggaattctttctttcactttatccagagggatgag

SEQ ID NO: 91616 - DNA, 80 bp, synthetic construct
  source 1..80: mol_type = other DNA
ccaaaaatgagattggtggcgatgctatatacaccactgaggtccaatggttctggggacgatgtattcacagtttcatg

SEQ ID NO: 91617 - DNA, 80 bp, synthetic construct
  source 1..80: mol_type = other DNA
ttgaatcaaagagtaaacctttcactctacctatattaacattgggagaattgacaaattctaggtttcccttgcccatt

SEQ ID NO: 91618 - DNA, 80 bp, synthetic construct
  source 1..80: mol_type = other DNA
gatgttttgtacactaacccaaatgaaaatgcagtggttcagtgtcaaaatggtaggtgcaccctggacggcgagctgca

SEQ ID NO: 91619 - DNA, 80 bp, synthetic construct
  source 1..80: mol_type = other DNA
gggaacgactcaactcctaccaacaggcatctgtgcatttaggggcaaggtcactcagcaggtgcaggatgaccacaggg

SEQ ID NO: 91620 - DNA, 80 bp, synthetic construct
  source 1..80: mol_type = other DNA
gcacacactggaacatgacagtgaccaacttgaatgggaccccatttgacccaactgaggacgttcctgccccactaggc

SEQ ID NO: 91621 - DNA, 80 bp, synthetic construct
  source 1..80: mol_type = other DNA
accccggatttctccggccaaatttatggggtgttaagtcagagaaacaccaacacagttcccgcagaaggaaatctccc

SEQ ID NO: 91622 - DNA, 80 bp, synthetic construct
  source 1..80: mol_type = other DNA
ggccaacagggctcatgaagctgtgattgcaacctacagccccaaattcacacccaaattgggcaatatccagcttagca

SEQ ID NO: 91623 - DNA, 80 bp, synthetic construct
  source 1..80: mol_type = other DNA
cttgggaaacccaagatgtggaccctggacagcccaccaagttcaccccagttggtctggcctctgtggatgctaactcc

SEQ ID NO: 91624 - DNA, 80 bp, synthetic construct
  source 1..80: mol_type = other DNA
cattttgatcagtggaccctccccagttattctggtgctttaactctaaatatgaacttggccccatctgtcgctcctgt

SEQ ID NO: 91625 - DNA, 80 bp, synthetic construct
  source 1..80: mol_type = other DNA
tttccctggagagtgtctcctgttctttaggtctttcatcccattgaaagggggctatgggaaccccgctattgattgct

SEQ ID NO: 91626 - DNA, 80 bp, synthetic construct
  source 1..80: mol_type = other DNA
tgataccacaagaatgggtccagcatctttatcaggagtcagcaccatctcttagcgatgtggctttagtgaggtatgtg

SEQ ID NO: 91627 - DNA, 80 bp, synthetic construct
  source 1..80: mol_type = other DNA
caccatctcttagcgatgtggctttagtgaggtatgtgaacccagaaactgggcgcaccctctttgaagccaagttgcac

SEQ ID NO: 91628 - DNA, 80 bp, synthetic construct
  source 1..80: mol_type = other DNA
cactaaaagtaatagtggggaaaagatggagggagaaataaaaaactgctctttctggattaccacacaaataaaaaata

SEQ ID NO: 91629 - DNA, 80 bp, synthetic construct
  source 1..80: mol_type = other DNA
acatgaagggagaactaaaaaactgctctttcaatatcacttcaggcataaaaaagaaggtgcaaacagaatatgcagtg

SEQ ID NO: 91630 - DNA, 80 bp, synthetic construct
  source 1..80: mol_type = other DNA
tcctactaccaatagtagtggggaagacatgaagggagaactaaaaaactgcactttcaatatcacttcaggcataaaac

SEQ ID NO: 91631 - DNA, 80 bp, synthetic construct
  source 1..80: mol_type = other DNA
ctttaacagtagtattaaaaacatgccagaagaaataaaaaattgctctttctataccacaaacctgggaaagcagagga

SEQ ID NO: 91632 - DNA, 80 bp, synthetic construct
  source 1..80: mol_type = other DNA
acactgatgacattgaaaacgagcccaccaaattcacaccagtggggcttgagagccctgattccttccgccagtgggat

SEQ ID NO: 91633 - DNA, 80 bp, synthetic construct
  source 1..80: mol_type = other DNA
ttgccaagttactcaggggctttgactctcaacatggggctcgccccatctgtgtttccaaccttccccggcgagcagat

SEQ ID NO: 91634 - DNA, 80 bp, synthetic construct
  source 1..80: mol_type = other DNA
cctcttcttccgctcgcacatccctctcaagggtgggtatggggattcatcgattgattgtctcttgccacaggagtgga

SEQ ID NO: 91635 - DNA, 80 bp, synthetic construct
  source 1..80: mol_type = other DNA
gtgcaggcacccaatggtgaattcacaatatcccctagaaattctcctggtgaaattttacttaatttggaattaggccc

SEQ ID NO: 91636 - DNA, 80 bp, synthetic construct
  source 1..80: mol_type = other DNA
cccgcatgaagttggtggccatgctgtacacccccctcagatcaaatggttctgctgatgatgttttcacagtgtcatgc

SEQ ID NO: 91637 - DNA, 80 bp, synthetic construct
  source 1..80: mol_type = other DNA
agggtcctaacaaagccctcagcagattttgagttcaattatttggtccccccgacggttgaatcaagaactaaaccctt

SEQ ID NO: 91638 - DNA, 80 bp, synthetic construct
  source 1..80: mol_type = other DNA
cacaataccaatacttacaattggagagatgacaaattcaagattccctgcggccatcgacatgctgcacaccagcccaa

SEQ ID NO: 91639 - DNA, 80 bp, synthetic construct
  source 1..80: mol_type = other DNA
atgaaaacattgtggtccaaccccagaatggcaggtgcacaattgagggcgagttgctaggcacaacacagttggtgact

SEQ ID NO: 91640 - DNA, 80 bp, synthetic construct
  source 1..80: mol_type = other DNA
agccggtggcgggaggagctatcgcagcccccctcaccggacagacaaattttattgacccctggattagaaataattat

SEQ ID NO: 91641 - DNA, 80 bp, synthetic construct
  source 1..80: mol_type = other DNA
acaggtggcacatgacggtcacaaaccccaacggcaccgccttcgatccaacagaagatgtgcctgcccccctgggcacc

SEQ ID NO: 91642 - DNA, 80 bp, synthetic construct
  source 1..80: mol_type = other DNA
ccggacttcataggcgaggtgtacggggtgctctcccaaaggaacaggaacataacttctggacacactgcccccgcaaa

SEQ ID NO: 91643 - DNA, 80 bp, synthetic construct
  source 1..80: mol_type = other DNA
aacaacagcagccccggtggtatcaaactgcagtgataccatagtaacgtacaataacacggtagtaaacaacataacaa

SEQ ID NO: 91644 - DNA, 80 bp, synthetic construct
  source 1..80: mol_type = other DNA
caacaatagtaactggaacagaaacacatttcagagccccactgccactgtgtcccttccgaggtttcttccccttccac

SEQ ID NO: 91645 - DNA, 80 bp, synthetic construct
  source 1..80: mol_type = other DNA
ggcctttggttagacaattatgtctggtgccctcgtcatgttatggtacctgcagaccaattggctgatcctaactatga

SEQ ID NO: 91646 - DNA, 80 bp, synthetic construct
  source 1..80: mol_type = other DNA
tgctttgttagtctctatgactaatcatagttttagtgtacagaaacatgttggtgcgcccgctaacttaagggttgtgg

SEQ ID NO: 91647 - DNA, 80 bp, synthetic construct
  source 1..80: mol_type = other DNA
gacattccatgcaaggtactttattaaagcttacagtggatgctgctaatcccagcacgccaccttacacttttactact

SEQ ID NO: 91648 - DNA, 80 bp, synthetic construct
  source 1..80: mol_type = other DNA
gtaaaaccaggcgcttcttttagtgttttggcttgctataatggcagtcctacaggtacttttacagttgttatgagacc

SEQ ID NO: 91649 - DNA, 80 bp, synthetic construct
  source 1..80: mol_type = other DNA
tcaggatcgtcaaatttaccaatctcaattaacagacaaatactgcacggttaatgtggtagcttggctttatgcagcta

SEQ ID NO: 91650 - DNA, 80 bp, synthetic construct
  source 1..80: mol_type = other DNA
ttcttaatggttgtaattggtttgttaaaccaagtcgtaccagtatagcttcttttaatgaatgggctatggccaaccaa

SEQ ID NO: 91651 - DNA, 80 bp, synthetic construct
  source 1..80: mol_type = other DNA
tgatgtacctgcacactcatttactcttggaggtaaggttgatttattagtcccacgtaacaagtggaacggtaaatcat

SEQ ID NO: 91652 - DNA, 80 bp, synthetic construct
  source 1..80: mol_type = other DNA
tcacagagttcgttggcacacaagcgcttgatatgttagctgttaaaacaggtgttgccacagaacagcttctttatgtt

SEQ ID NO: 91653 - DNA, 80 bp, synthetic construct
  source 1..80: mol_type = other DNA
attcagcaattgcaccaaggttttaaaggtaaacaaatcctaggtaatacaatgctggaagatgaattcacccctgagga

SEQ ID NO: 91654 - DNA, 80 bp, synthetic construct
  source 1..80: mol_type = other DNA
tgttaatatgcaaatcatgggtgttgttatgcaaagtagtgtgcgaaaagtgacgtatggtacattccattggctggtag

SEQ ID NO: 91655 - DNA, 80 bp, synthetic construct
  source 1..80: mol_type = other DNA
ccacattggttttgttgtacgttgctattcttcagtgcactaagtttacattgtggaactacttgtttgagacaattcca

SEQ ID NO: 91656 - DNA, 80 bp, synthetic construct
  source 1..80: mol_type = other DNA
acacagttgactccactaatgtttgttatagctgcgtgtgttatgcttttagttaaacataaacacacctttttaaccct

SEQ ID NO: 91657 - DNA, 80 bp, synthetic construct
  source 1..80: mol_type = other DNA
ctttttgttgcccacggcattatgtttgacttatgcaaacatagtctatgagccttctactcctatttcttcagccctta

SEQ ID NO: 91658 - DNA, 80 bp, synthetic construct
  source 1..80: mol_type = other DNA
ttgcggttgcaaattggctaacacctactaatatgtatatgagaacaacacatacagatctaggtttatacgtaagtttg

SEQ ID NO: 91659 - DNA, 80 bp, synthetic construct
  source 1..80: mol_type = other DNA
accatagctttggcaattgttgttaagcgtttatataatcccactttgtcaaaccttgcattggctttgtgtagttttgt

SEQ ID NO: 91660 - DNA, 80 bp, synthetic construct
  source 1..80: mol_type = other DNA
catgtggttttatacttatagcgttggtgaacattctagcccaatagcctaccttgttttcttaacctcattaacgagtg

SEQ ID NO: 91661 - DNA, 80 bp, synthetic construct
  source 1..80: mol_type = other DNA
attatactgtcactgtatttgttacagtgaatttggctaaatttttgacttatatcatcttttcctacgcaccacatttt

SEQ ID NO: 91662 - DNA, 80 bp, synthetic construct
  source 1..80: mol_type = other DNA
ctcttagcttgaaggataagattctttacacattttatggtaaaaaatcctttgaacaacattcttacatctatcattct

SEQ ID NO: 91663 - DNA, 80 bp, synthetic construct
  source 1..80: mol_type = other DNA
gctctagtgttaccagaagtaaagatgatattgcttatgtatacctttttaggttacatctcaacttgttattttggtgt

SEQ ID NO: 91664 - DNA, 80 bp, synthetic construct
  source 1..80: mol_type = other DNA
ttcaggtatatgactgccaatggcctacatgcacccagaaattcttgggaagctatggctttgaactttaagctgcttgg

SEQ ID NO: 91665 - DNA, 80 bp, synthetic construct
  source 1..80: mol_type = other DNA
tattggcggcataccttgtataaaggttgctagtgttcaatccaaattaactgatttaaaatgtacatctgtggtattac

SEQ ID NO: 91666 - DNA, 80 bp, synthetic construct
  source 1..80: mol_type = other DNA
tctctgtgttacaacagttacacttagaggctaatagtaaagcatgggcacactgtgttaagtgtcataatgacatattg

SEQ ID NO: 91667 - DNA, 80 bp, synthetic construct
  source 1..80: mol_type = other DNA
gactgctaatgatcctagcgaagcattcgagaagttcgtgtgtttattcgctacacttatgacattttcaggcaatgtgg

SEQ ID NO: 91668 - DNA, 80 bp, synthetic construct
  source 1..80: mol_type = other DNA
atttagataatttagctagtgaattgttggacaatccggcagttttacaagctacattatcagagttctcgcatttagca

SEQ ID NO: 91669 - DNA, 80 bp, synthetic construct
  source 1..80: mol_type = other DNA
agtttcgctgaattagaaactgctcaaaagtcttatcaagaagctttagactcaggtgatgcgtcacctcaagtacttaa

SEQ ID NO: 91670 - DNA, 80 bp, synthetic construct
  source 1..80: mol_type = other DNA
agcattgcagaaggctgttaatgtggctaagaacgcatatgagaaagataagtcagtagccagaaaattggaacgtatgg

SEQ ID NO: 91671 - DNA, 80 bp, synthetic construct
  source 1..80: mol_type = other DNA
gcctttgctgattgcacaagttgcagtaatggaagatggcttacgggcaatgctgtgcaaggatttgcatgtgaatgtgg

SEQ ID NO: 91672 - DNA, 80 bp, synthetic construct
  source 1..80: mol_type = other DNA
cccttagtgttgttccactttgtgcatctaataaacttagagttgtaattccagactttgttgtttggaaccaagttgtt

SEQ ID NO: 91673 - DNA, 80 bp, synthetic construct
  source 1..80: mol_type = other DNA
acttacccctcattaaattatgctggggctatttgggatattacagttataaacaacgtggacaatgaaatagtcagatc

SEQ ID NO: 91674 - DNA, 80 bp, synthetic construct
  source 1..80: mol_type = other DNA
tgttaatacattagcatattatgaacctgtgcaaggtcgtaagatgttaatgggtcttttatctgaaaatgcctatctta

SEQ ID NO: 91675 - DNA, 80 bp, synthetic construct
  source 1..80: mol_type = other DNA
aatgggctaaagttgaaggtaaggatgggtttgttactgttgagttgcagcccccttgcaagtttttgattgctggacct

SEQ ID NO: 91676 - DNA, 80 bp, synthetic construct
  source 1..80: mol_type = other DNA
aagggaccggaaatccgttatttgtattttgttaaaaatcttaacaaccttcatagagggcagctattaggtcatatagc

SEQ ID NO: 91677 - DNA, 80 bp, synthetic construct
  source 1..80: mol_type = other DNA
atcctcaaaaagcttacatggattttgttaattctggtggtacacccttaacaaactgtgttaagatgcttactcccaag

SEQ ID NO: 91678 - DNA, 80 bp, synthetic construct
  source 1..80: mol_type = other DNA
agctgtttatacagcaaatgatgttgacttacaatcttctgggcttgttaaacccagtgcactcttttgtgcaacatgcc

SEQ ID NO: 91679 - DNA, 80 bp, synthetic construct
  source 1..80: mol_type = other DNA
actggtacaggtattgctatatctgtcaagcctgagagtaatgctgatcaagaatcatacggtggcgcatctgtttgtct

SEQ ID NO: 91680 - DNA, 80 bp, synthetic construct
  source 1..80: mol_type = other DNA
tacacagtgtaccagagatcctgttgggttttgtttaacaaatactccctgtaatgtctgtcaatattgggttggatatg

SEQ ID NO: 91681 - DNA, 80 bp, synthetic construct
  source 1..80: mol_type = other DNA
aaggattgcgatgctgttgcacgccatgatttctttgtttttgatgttgataaagtcaaaacaccacatatagtccgtca

SEQ ID NO: 91682 - DNA, 80 bp, synthetic construct
  source 1..80: mol_type = other DNA
aagacttactgagtatactatgatggatttggtatatgctttaagacactttgatcaagatcattgtgaagttttaaagc

SEQ ID NO: 91683 - DNA, 80 bp, synthetic construct
  source 1..80: mol_type = other DNA
acatactagtaaagtatgagtgctgtgaagcatcttactttgataataaactctggtttgattttgtggaaaacccgggt

SEQ ID NO: 91684 - DNA, 80 bp, synthetic construct
  source 1..80: mol_type = other DNA
cctttgctaagggtgatagttgctcttctagttgcaaacacacaatggctcaggtaattagttacctatcagagcgttgt

SEQ ID NO: 91685 - DNA, 80 bp, synthetic construct
  source 1..80: mol_type = other DNA
attataggtgtttatcacaaacttggagaacgtgttcgccaggctgttttaaacaccgttaaattttgtgaccatatggt

SEQ ID NO: 91686 - DNA, 80 bp, synthetic construct
  source 1..80: mol_type = other DNA
tatcagtgggtcttgtaggtgtcttaactttagacaaccaagatcttaatggccaatggtatgattttggtgattttgtt

SEQ ID NO: 91687 - DNA, 80 bp, synthetic construct
  source 1..80: mol_type = other DNA
atcacccaacctggttcaggtgtagctattgttgatagctattattcttatttgatgcctattttgtctatgactgactg

SEQ ID NO: 91688 - DNA, 80 bp, synthetic construct
  source 1..80: mol_type = other DNA
ataaagtacagttgtttgaaaagtacttcaaacattgggatcaacaatatcacgctaattgtgtgaattgttctgatgat

SEQ ID NO: 91689 - DNA, 80 bp, synthetic construct
  source 1..80: mol_type = other DNA
gttgttaagcctgatggtaagtctttcatgctcatctttgggggtgtagtttatgcctaccttggatgcgctgagggtac

SEQ ID NO: 91690 - DNA, 80 bp, synthetic construct
  source 1..80: mol_type = other DNA
tatgtactttgttccgagagccaagtcaattgtgtccacaattggtgaatctattttcactggttgtgtaggctcatgga

SEQ ID NO: 91691 - DNA, 80 bp, synthetic construct
  source 1..80: mol_type = other DNA
ttcgcaaacgtcgttacgttgcggcacatgtatacgtagaccttttctttgttgcaagtgttgttatgatcacgttatag

SEQ ID NO: 91692 - DNA, 80 bp, synthetic construct
  source 1..80: mol_type = other DNA
ataaggtttctaaagttgcaaacctttttcttacacaggcacagcgttcgcttaactttgttggagagtttgtgctcaac

SEQ ID NO: 91693 - DNA, 80 bp, synthetic construct
  source 1..80: mol_type = other DNA
caactcctcataagatggttctgtctgtttcaccatacgtttgtaacgcacctggttgtgacgtttcagatgttactaaa

SEQ ID NO: 91694 - DNA, 80 bp, synthetic construct
  source 1..80: mol_type = other DNA
tactggattatatccaaccattacagtacctgaagaatttgcaaaccatgtagcaaattttcaaaaggtaggttttgtta

SEQ ID NO: 91695 - DNA, 80 bp, synthetic construct
  source 1..80: mol_type = other DNA
aattttccactgtacagggaccacctggcactggtaaaagtcattttgctataggtttggcaatatattaccctactgct

SEQ ID NO: 91696 - DNA, 80 bp, synthetic construct
  source 1..80: mol_type = other DNA
gatattgttgttgccattctctctggcactacaagtaacgtggaaaagttacgcagtttgattcaagatattagttttga

SEQ ID NO: 91697 - DNA, 80 bp, synthetic construct
  source 1..80: mol_type = other DNA
cccagtttcgtctggtgcgtcacacttcggggcacaccatgtcttccgtggcaggtgtggctacgcaaggtgcgcgtagc

SEQ ID NO: 91698 - DNA, 80 bp, synthetic construct
  source 1..80: mol_type = other DNA
aagactgcgtgactatttggctgcctatgacatagaagttacaaagggctcttttgtagaaggcgctattaatgttggca

SEQ ID NO: 91699 - DNA, 80 bp, synthetic construct
  source 1..80: mol_type = other DNA
ctcgtgctcaaaagggtattctttgcgtaatgacatctcaagcgctgtttgattctttacagtttgcggagttgtctact

SEQ ID NO: 91700 - DNA, 80 bp, synthetic construct
  source 1..80: mol_type = other DNA
attaattataaacttcagtctcagattgttactggtttgttcaaagattgttccagagaaatttctggactttctcctgc

SEQ ID NO: 91701 - DNA, 80 bp, synthetic construct
  source 1..80: mol_type = other DNA
atgttccatactcacgtgtaatttctagaatgggatttaagctagatgcaagtattccaggttatcctaaactcttcata

SEQ ID NO: 91702 - DNA, 80 bp, synthetic construct
  source 1..80: mol_type = other DNA
agtggggctccatgttgactagtatagcagcaagacccccacctggtgaacaatttaaacacttggtgccccttatgcat

SEQ ID NO: 91703 - DNA, 80 bp, synthetic construct
  source 1..80: mol_type = other DNA
aaaatggattgcaatttgctgccattactgctccatttttagttctcaatggtttagctgagtcctttaagaaggttgct

SEQ ID NO: 91704 - DNA, 80 bp, synthetic construct
  source 1..80: mol_type = other DNA
gaaaaatgtcgtacgtgcagctttgcttgcaggctcttttgagcgtgtgtatgacattggcaaccctaagggaattccta

SEQ ID NO: 91705 - DNA, 80 bp, synthetic construct
  source 1..80: mol_type = other DNA
tttgctgcactttacgtgacactctagaatattatgcccaaagcatactatatagagtgtttccttatgatatgtcttct

SEQ ID NO: 91706 - DNA, 80 bp, synthetic construct
  source 1..80: mol_type = other DNA
attcgtggtagtgatgtaaaacaaccagtgaagttttatatatataagaaagtgaacaatgatttcattgaattcactga

SEQ ID NO: 91707 - DNA, 80 bp, synthetic construct
  source 1..80: mol_type = other DNA
ttccttctacacacaaggtcgctcttgtagtgactttgagacattaactgatatggagaaggactttctttctttgagta

SEQ ID NO: 91708 - DNA, 80 bp, synthetic construct
  source 1..80: mol_type = other DNA
agaaagtgcaactgttcgtaactattttattacagaaactagcactgcgtcttttaaggcggtgtgctcagttatagatc

SEQ ID NO: 91709 - DNA, 80 bp, synthetic construct
  source 1..80: mol_type = other DNA
gatgtgtcatcattttcagaattgttgttggaatgtgtaggtttcacaacagcatcagtatattttgtggcgcgtctact

SEQ ID NO: 91710 - DNA, 80 bp, synthetic construct
  source 1..80: mol_type = other DNA
taaaacttgacgactttgtagaaattttaaaaagtcaagaccttggcgttgtatccaaggtagtcaaggtgcctattgac

SEQ ID NO: 91711 - DNA, 80 bp, synthetic construct
  source 1..80: mol_type = other DNA
cctaactatgatagaatttatgttatggtgtaaaaatggtcaagttcaaactttctatcctaggctccaagcttctaatg

SEQ ID NO: 91712 - DNA, 80 bp, synthetic construct
  source 1..80: mol_type = other DNA
attggaagccaggcttggccatgccttcactttttaaagttcaaaatgttaatcttgaaccttgtcaattagctaattat

SEQ ID NO: 91713 - DNA, 80 bp, synthetic construct
  source 1..80: mol_type = other DNA
aagcaatcaatacctatgccacgaggtgttcatatgaatgtggctaagtatatgcagttgtgccagtatttgaatacttg

SEQ ID NO: 91714 - DNA, 80 bp, synthetic construct
  source 1..80: mol_type = other DNA
atcgctcctggtacttctgtattacgtcaatggttaccagttgatgcagtgttgattgataatgacctaaatgagtatgt

SEQ ID NO: 91715 - DNA, 80 bp, synthetic construct
  source 1..80: mol_type = other DNA
gtcagatgctgacataagcctatttggtaattgtgttaccgtgcgtgtcggacaacaagtagatcttgtaatatctgata

SEQ ID NO: 91716 - DNA, 80 bp, synthetic construct
  source 1..80: mol_type = other DNA
tgtatgatcctataactaagactgagaaagatactaatgaagcaaaagcattgttctttacgtatctttgcaattttatt

SEQ ID NO: 91717 - DNA, 80 bp, synthetic construct
  source 1..80: mol_type = other DNA
aaaaataatcttgctctgggtggttctgttgctattaaaataacggaacactcttggagtgctgatctttatgaattaat

SEQ ID NO: 91718 - DNA, 80 bp, synthetic construct
  source 1..80: mol_type = other DNA
tgatgagaaagtagaatcgcttctttccaccatcttctcaaattgccagaaggctgttagtgctttcattactacgtgtt

SEQ ID NO: 91719 - DNA, 80 bp, synthetic construct
  source 1..80: mol_type = other DNA
caactgatgtgcttgttaatacttataagaggaagcattagtgacttcgttgatgtaggtcctgatgctactaataacac

SEQ ID NO: 91720 - DNA, 80 bp, synthetic construct
  source 1..80: mol_type = other DNA
ttgtttagaagtgcaagtagatcctaatgccttcatttatgaatggcctatgcctatagaaacaagtaaagccgaaggtg

SEQ ID NO: 91721 - DNA, 80 bp, synthetic construct
  source 1..80: mol_type = other DNA
ttatttatcctacaggccgtacttattcaaatataacattagcctatcaaggtttgtttcccaaacagggtgaccagggt

SEQ ID NO: 91722 - DNA, 80 bp, synthetic construct
  source 1..80: mol_type = other DNA
caaatgtatttatattcagcagcccatgctgatcctaatcgtttcatattgggtaagctatatgttagtaattattctca

SEQ ID NO: 91723 - DNA, 80 bp, synthetic construct
  source 1..80: mol_type = other DNA
tgaagtcaacctctttcaagatggttttgttgtccgaattggtgcttcatctaataagactggtaataatgttatttcac

SEQ ID NO: 91724 - DNA, 80 bp, synthetic construct
  source 1..80: mol_type = other DNA
ccagcactaatactgttattaaaaagatttaccctgcgttcatgcttggaatgtcagttggtaatttttctaataacaaa

SEQ ID NO: 91725 - DNA, 80 bp, synthetic construct
  source 1..80: mol_type = other DNA
acaggccgttatatgaattataccttagttatcctacctgatggctgtggtacttatttaaggactttctattgtataat

SEQ ID NO: 91726 - DNA, 80 bp, synthetic construct
  source 1..80: mol_type = other DNA
agaacctcgtaatggtagtcgttgtcctaatgacaatgcatacacttcatacggtgtttgggacacacccaccttagatt

SEQ ID NO: 91727 - DNA, 80 bp, synthetic construct
  source 1..80: mol_type = other DNA
ttgaagctacaactgccactatcaattatctgatagacctggcaaatcttttttatattttccttaaaaaggcctatatt

SEQ ID NO: 91728 - DNA, 80 bp, synthetic construct
  source 1..80: mol_type = other DNA
gtattaatgggcagtatgataaaaatgcctctctcaactctttcaaggagtattttaacttgcgtgattgcttgtttatg

SEQ ID NO: 91729 - DNA, 80 bp, synthetic construct
  source 1..80: mol_type = other DNA
tacacctttaatattacagaagatgaaacagcagaatggtttggcattacacaaaatgctcaaggtgttcatctttactc

SEQ ID NO: 91730 - DNA, 80 bp, synthetic construct
  source 1..80: mol_type = other DNA
gtatggaactaacatgtttctttttgctagtttgccagtgtatgagactgttaagtactacactgtaatacctcgttcta

SEQ ID NO: 91731 - DNA, 80 bp, synthetic construct
  source 1..80: mol_type = other DNA
ttcgctcttaccatgcagatagaaatgcatgggctgcgttttatgtgtacaaactctacccactgacatacttgttagat

SEQ ID NO: 91732 - DNA, 80 bp, synthetic construct
  source 1..80: mol_type = other DNA
ttttcagtggatgggtatgtacgacgtgccattgactgtggttatgatgacttatcacagttgaggtgttcttatgagtc

SEQ ID NO: 91733 - DNA, 80 bp, synthetic construct
  source 1..80: mol_type = other DNA
ttttgatgttgattctggtgtctactcagtatcatcttttgaagctcaacctcgcggcgaatttgtcgaacaaccacaag

SEQ ID NO: 91734 - DNA, 80 bp, synthetic construct
  source 1..80: mol_type = other DNA
gcgttgagtgtgatttctccaagctgttcaaagccgcacctccccaaatttataatttcagtaggttagtttttaccaac

SEQ ID NO: 91735 - DNA, 80 bp, synthetic construct
  source 1..80: mol_type = other DNA
tgtaattataatttaactaagctcctctcattgtttcatgtgagtgagttttcttgtcatcaggtatcaccaagtgcttt

SEQ ID NO: 91736 - DNA, 80 bp, synthetic construct
  source 1..80: mol_type = other DNA
agcgtctggttgttactcttctttaactgtagattactttgcttacccactttaccttgcttcttatttgcagcaaggtt

SEQ ID NO: 91737 - DNA, 80 bp, synthetic construct
  source 1..80: mol_type = other DNA
tacacatccacaggatttgtagcaataggcgggagagtgtccaatctcactaaacaactgttggaattgctatcaaaagc

SEQ ID NO: 91738 - DNA, 80 bp, synthetic construct
  source 1..80: mol_type = other DNA
ctactggtgagatagcacagtataattataagcaagactttagcaatcctacttgtaggatattagcttcagttcctgct

SEQ ID NO: 91739 - DNA, 80 bp, synthetic construct
  source 1..80: mol_type = other DNA
aatgtaagcattcctaagccagataaatatatttggctttcgcagtgctattcttttagcgcttatagtggcgacgtccc

SEQ ID NO: 91740 - DNA, 80 bp, synthetic construct
  source 1..80: mol_type = other DNA
tcattatgtactacctggacaatacaccccatgcctttatcttactagctctggttttgataattcttatcaaactaata

SEQ ID NO: 91741 - DNA, 80 bp, synthetic construct
  source 1..80: mol_type = other DNA
gagactttcaaaataaaatggctgccactggcgttatatcgtctatgacagacaatttacaaatggcttttgtcatttct

SEQ ID NO: 91742 - DNA, 80 bp, synthetic construct
  source 1..80: mol_type = other DNA
gttcagtatggcactgacactaacagtgtttgtcccatgcaagcgttgcgtaatgacactagtgttgaagataagctagg

SEQ ID NO: 91743 - DNA, 80 bp, synthetic construct
  source 1..80: mol_type = other DNA
tgtctgtattgattacacactctatggtattacaggtagaggtgtatttcaaaactgcacagctgttggtttacgacagc

SEQ ID NO: 91744 - DNA, 80 bp, synthetic construct
  source 1..80: mol_type = other DNA
aaaggtttgtttatgatagttttgacaatttagttggttaccattctgataatggtaactactattgcgtcagaccttgt

SEQ ID NO: 91745 - DNA, 80 bp, synthetic construct
  source 1..80: mol_type = other DNA
gtcagtgtgcctgtttctgtgatatatgacaagccatctgacaaacatgcgacattatttggtagtgtagcttgttcgca

SEQ ID NO: 91746 - DNA, 80 bp, synthetic construct
  source 1..80: mol_type = other DNA
cattactactttcatgccgcaattttcacgtatgacgcaatctgctttacgcatgcgttctacaggacccatacaaacac

SEQ ID NO: 91747 - DNA, 80 bp, synthetic construct
  source 1..80: mol_type = other DNA
ctgtgggttgtgctatgggtatagttaatagctcaatggtagttgatgaatgtacactaccaattggtcagtcactctgt

SEQ ID NO: 91748 - DNA, 80 bp, synthetic construct
  source 1..80: mol_type = other DNA
catgcagttgctacatactaaaatctcatgggcaggtgctaaagttcatgctgttatttataatagtagagaagcacttg

SEQ ID NO: 91749 - DNA, 80 bp, synthetic construct
  source 1..80: mol_type = other DNA
gctgtacctcctacttcttctacagcaaggactacaagtagtgagtttcaattagcttctattaattttaatcaaccact

SEQ ID NO: 91750 - DNA, 80 bp, synthetic construct
  source 1..80: mol_type = other DNA
tgtggttgacacactcaattcgtctggttttgttgtaaccattcccactaatttcacattcagtgtgacacaagagtaca

SEQ ID NO: 91751 - DNA, 80 bp, synthetic construct
  source 1..80: mol_type = other DNA
ttcaaacaaccattcagaagataactgttgattgtaaacagtacgtctgcaatggttttaagaagtgtgaacagctatta

SEQ ID NO: 91752 - DNA, 80 bp, synthetic construct
  source 1..80: mol_type = other DNA
gttgaatatggccagttctgtgctaaaattaatcaagcacttcatggtgctaatttgaaacaagacgagtcagtagcaag

SEQ ID NO: 91753 - DNA, 80 bp, synthetic construct
  source 1..80: mol_type = other DNA
tcttttttctaacattaaaacatcatcaacacaagctctacaagctggtttgaatggtgattttaatttaacattattac

SEQ ID NO: 91754 - DNA, 80 bp, synthetic construct
  source 1..80: mol_type = other DNA
aagtacctgaggtgaccactagtcagtatagttaccgcagtgctatcgaagaccttctatttaacaagatcactattgct

SEQ ID NO: 91755 - DNA, 80 bp, synthetic construct
  source 1..80: mol_type = other DNA
gatcccggttatatgcaaggttatgatgaatgcatgcaacaaggtccacaatctgctcgcgacttgatttgtgcacaata

SEQ ID NO: 91756 - DNA, 80 bp, synthetic construct
  source 1..80: mol_type = other DNA
agtgttaccacctttatatgatgtcaatatggaggctgcttacacatcctccttacttggcagtatagctggggctagtt

SEQ ID NO: 91757 - DNA, 80 bp, synthetic construct
  source 1..80: mol_type = other DNA
ggactgctggtctgtcctcctttgcagctataccttttgcacagagtatcttttacaggctgaatggtgttggtattact

SEQ ID NO: 91758 - DNA, 80 bp, synthetic construct
  source 1..80: mol_type = other DNA
tcttttccacaggaagttatttttgtgtcaattcaaaggcaaatgctattcaacaacagtttaatgtagcattgcctggt

SEQ ID NO: 91759 - DNA, 80 bp, synthetic construct
  source 1..80: mol_type = other DNA
tactactaatgtagcttttgccaaagtgcaagaggctgtgaatgctaatgcacaagcactttctaaactcgcatcagaat

SEQ ID NO: 91760 - DNA, 80 bp, synthetic construct
  source 1..80: mol_type = other DNA
tgtcaaatacttttggtgctatatcttcatcaattagtgatatattaaaacggcttgatgctgtagaacaagaagcacaa

SEQ ID NO: 91761 - DNA, 80 bp, synthetic construct
  source 1..80: mol_type = other DNA
attgatcgtttgatcaatggccgtctcacttcattgaatgcttttgtagcgcaacagttagtacgctctgaggcagctgc

SEQ ID NO: 91762 - DNA, 80 bp, synthetic construct
  source 1..80: mol_type = other DNA
cagatcttctcaattggcttctgacaaggtcaatgaatgtgttaagtcacaatccaaaagaaatggattctgtgggtctg

SEQ ID NO: 91763 - DNA, 80 bp, synthetic construct
  source 1..80: mol_type = other DNA
gcacacatatagtgtcctttgttattaatgctcccaatggactctacttctttcatgtaggttaccaacctacagcacat

SEQ ID NO: 91764 - DNA, 80 bp, synthetic construct
  source 1..80: mol_type = other DNA
gttaatgcaactgccgcctatggcctttgcaactctgaagtaccacctaggtgtatagcacctgtagatggttacttcat

SEQ ID NO: 91765 - DNA, 80 bp, synthetic construct
  source 1..80: mol_type = other DNA
acttaatcaaactaccagagatgctacgaatgagtggtattatactggcagttcttattttaatcctgaacctattacta

SEQ ID NO: 91766 - DNA, 80 bp, synthetic construct
  source 1..80: mol_type = other DNA
tggctaatactaggttcgtttctaaggatgttaaatttgaaaacctcactaataacttgcctccacctcttcttagtaat

SEQ ID NO: 91767 - DNA, 80 bp, synthetic construct
  source 1..80: mol_type = other DNA
cagactgatgtcgatttcaaggatgagctcgaggaattctttaaaaatgtatcttcacaaggtcctaactttgctgagat

SEQ ID NO: 91768 - DNA, 80 bp, synthetic construct
  source 1..80: mol_type = other DNA
atcaaaaataaatactaccttacttgacctctctgaggagttcagagtactaaatgaggtggtaaagcaacttaatgagt

SEQ ID NO: 91769 - DNA, 80 bp, synthetic construct
  source 1..80: mol_type = other DNA
gaattatctaagaagcaacttggtttgcttgaaccccaaactcatgctacgacagtggatgtgaatgtcctgaatgatac

SEQ ID NO: 91770 - DNA, 80 bp, synthetic construct
  source 1..80: mol_type = other DNA
catatattgaccttaaggagcttggtaattattcctattaccagaaatggccatggtatatctggttaggttttatagca

SEQ ID NO: 91771 - DNA, 80 bp, synthetic construct
  source 1..80: mol_type = other DNA
gggttggtagcactagccttatgtgtcttcttcctgttgtgctgcacaggttgtggtacaaattgtatgggtaagcttaa

SEQ ID NO: 91772 - DNA, 80 bp, synthetic construct
  source 1..80: mol_type = other DNA
atgtaatcgttgttgtgataattatgacgactacgactttgagccgcagaagattcatattcactaaacgatcttaatta

SEQ ID NO: 91773 - DNA, 80 bp, synthetic construct
  source 1..80: mol_type = other DNA
tgagagtgcagagacctccaactttgttgttggtcttaaccctcttattcttagctaatgcgaattctaaacctttggtt

SEQ ID NO: 91774 - DNA, 80 bp, synthetic construct
  source 1..80: mol_type = other DNA
ggatatatacctgagcattgtcagtcacatactggttcattgcttaaggcttgtattgagacggcgaaatttgacacaat

SEQ ID NO: 91775 - DNA, 80 bp, synthetic construct
  source 1..80: mol_type = other DNA
tggtttgtatactaatcgtgtcgtctcacctcctaataatgctgatcttagtccgatttctgttgatcgtgattcagcgg

SEQ ID NO: 91776 - DNA, 80 bp, synthetic construct
  source 1..80: mol_type = other DNA
tgggtcatactgagttttatgattcacagcctagcacgtccttttatgacattgctgttagtcaaaattaacgaactcta

SEQ ID NO: 91777 - DNA, 80 bp, synthetic construct
  source 1..80: mol_type = other DNA
tggattacgtatctttgcttaacgaagtttggcaaaagtacactaattctgcttctacatctctggattggtttcccaga

SEQ ID NO: 91778 - DNA, 80 bp, synthetic construct
  source 1..80: mol_type = other DNA
cctcatattgcttataggcctgttcctggcacttccactcatcccgttcagtgggagtgtacatttacctttgcaggttt

SEQ ID NO: 91779 - DNA, 80 bp, synthetic construct
  source 1..80: mol_type = other DNA
tgtaggacaagctgttaacagcagtaaagcattagctaagcaagatgcagccagacaagttgcctgggaattgcatcggg

SEQ ID NO: 91780 - DNA, 80 bp, synthetic construct
  source 1..80: mol_type = other DNA
tgttgaggttgttatgggtcagttagaacaaactaatatgcatagtccagaccttattgtaggtgattatgttattatta

SEQ ID NO: 91781 - DNA, 80 bp, synthetic construct
  source 1..80: mol_type = other DNA
aagggaagcttaacggcttcaagcttcgatggtgtcacccgttttaggaagcgccgtcattctcctcctacaaaacagcg

SEQ ID NO: 91782 - DNA, 80 bp, synthetic construct
  source 1..80: mol_type = other DNA
ctatgctaagcgccgtttttctcctcttaagctagaagatattatggaagttgacatttctcaacctacacattatcttc

SEQ ID NO: 91783 - DNA, 80 bp, synthetic construct
  source 1..80: mol_type = other DNA
gacttatattccctaactacagacagtggcactgtaggtctggtcatttaattgatgaggttcagaactggttatccgct

SEQ ID NO: 91784 - DNA, 80 bp, synthetic construct
  source 1..80: mol_type = other DNA
ttcggcgatgttaaacctgttactgaatatcatctcactttgactcttctttgttgtacagagcaggatctacataaaga

SEQ ID NO: 91785 - DNA, 80 bp, synthetic construct
  source 1..80: mol_type = other DNA
cctaacaccactcgctaacattttgcataatgttaagtttgatgttggtggttttattattatgggtaaaaccttagttt

SEQ ID NO: 91786 - DNA, 80 bp, synthetic construct
  source 1..80: mol_type = other DNA
taaatgccaaagagttagtagacgggtatggtaacaccatgtacgtcaatatggcagtcccacatattaaggagtggctt

SEQ ID NO: 91787 - DNA, 80 bp, synthetic construct
  source 1..80: mol_type = other DNA
aaagtgcaaggttttacgttgtacaatagccgtcttcctttacatatgtctgttgcaaaattgcacaaccttactgacag

SEQ ID NO: 91788 - DNA, 80 bp, synthetic construct
  source 1..80: mol_type = other DNA
ccagcgtgcttatataggttctactgcatatatacaacagtgtgtaacacgctttttcttagctcctatagctgtagagc

SEQ ID NO: 91789 - DNA, 80 bp, synthetic construct
  source 1..80: mol_type = other DNA
tagtttccttgcgtgctgcaaataacggtcataagcagatcgtaaaatcaataccaatccaccatgatactttttcatgg

SEQ ID NO: 91790 - DNA, 80 bp, synthetic construct
  source 1..80: mol_type = other DNA
tggtaacgaactatggcatactcattgtctattttccgtccacttaaccttgttcctgcttttgcagaagaggcacatgg

SEQ ID NO: 91791 - DNA, 80 bp, synthetic construct
  source 1..80: mol_type = other DNA
gtgacaaattatttgtgcgtagtgttgaagatggtgagactgtctactaccctatgtgcactaatggtcaagctgttcct

SEQ ID NO: 91792 - DNA, 80 bp, synthetic construct
  source 1..80: mol_type = other DNA
tggggaagtagacattcagccacaagttctttttacatgcgtacccactgtaggttattcggctgcattagccgtaaacg

SEQ ID NO: 91793 - DNA, 80 bp, synthetic construct
  source 1..80: mol_type = other DNA
catgtctcataccgtttctactttgtcttaatcaagacacttgtaggaatagtgttattaagacattaaccctttatggc

SEQ ID NO: 91794 - DNA, 80 bp, synthetic construct
  source 1..80: mol_type = other DNA
ttgatgttatataattttgtgttagctgctatattagttagcagcacatttgtaccccttggcagttgtcttttgacatt

SEQ ID NO: 91795 - DNA, 80 bp, synthetic construct
  source 1..80: mol_type = other DNA
tgtcatagtactttccatactttggtttgttgacagaattagattctgtctcatacttaagtcctttttacctcttattg

SEQ ID NO: 91796 - DNA, 80 bp, synthetic construct
  source 1..80: mol_type = other DNA
acatgcgctcgcattttgtgcgtgtcagtacgtgttcttcacaaggtatagtagctgttaattctactaaaccctgtttt

SEQ ID NO: 91797 - DNA, 80 bp, synthetic construct
  source 1..80: mol_type = other DNA
gctttgaaaaagttatactagtctcagtcactgacttttcacttggtggtaagtcttctactgtattcgtgcctgctacg

SEQ ID NO: 91798 - DNA, 80 bp, synthetic construct
  source 1..80: mol_type = other DNA
cgtgatacagttcctctacacataatcgcaccaagtgttcttactgtttaagtacactcagcgcttctatgggtccctgt

SEQ ID NO: 91799 - DNA, 80 bp, synthetic construct
  source 1..80: mol_type = other DNA
agaggctaatccatttagtctctattattggacatttggaaaacgaactatgttaccctttgtccaacaacaaatagggt

SEQ ID NO: 91800 - DNA, 80 bp, synthetic construct
  source 1..80: mol_type = other DNA
actttattcagacttaaagggggagcaccaattaagaaagtctcttttggccctgaagaggtacatgaggtgactccagt

SEQ ID NO: 91801 - DNA, 80 bp, synthetic construct
  source 1..80: mol_type = other DNA
ttatgtgtgcagtgtgcagtagggtttaacactctattagttcaacctgccgtgtatatgtataatactggacgctcagt

SEQ ID NO: 91802 - DNA, 80 bp, synthetic construct
  source 1..80: mol_type = other DNA
ctatgtaaagtttcaagagagtaaacctcctctacctcctgacgagtgggtttaacgaactctctaatcatgtctaacga

SEQ ID NO: 91803 - DNA, 80 bp, synthetic construct
  source 1..80: mol_type = other DNA
acgatacgttgacgcaacagcaaattattgctattgtaaaagattggaactttgcatggtccattatcttcttacttata

SEQ ID NO: 91804 - DNA, 80 bp, synthetic construct
  source 1..80: mol_type = other DNA
actgttgtactccaatatggttacccatctaggagtatgactgtttatgttataaagatgctagttttatggctattatg

SEQ ID NO: 91805 - DNA, 80 bp, synthetic construct
  source 1..80: mol_type = other DNA
gccatcttctatagcactatcagtttttagtgctgtctatcctatagacttagcttcccagattatctctggcattttag

SEQ ID NO: 91806 - DNA, 80 bp, synthetic construct
  source 1..80: mol_type = other DNA
tcaaccctgaaacaaactgcctcttgaatgtgcccattggtggtactacagttgtccgtcctctggttgaagattcaact

SEQ ID NO: 91807 - DNA, 80 bp, synthetic construct
  source 1..80: mol_type = other DNA
agtgttacagctgttgtaacaaacggaaacctcaagatggctggtatgcactttggccagtgtgattacgcacagttacc

SEQ ID NO: 91808 - DNA, 80 bp, synthetic construct
  source 1..80: mol_type = other DNA
taatgagataactgttgccaagccgagtgttctcattgctttgaaaatggtaaaaaggcagaattatggcaccaactctg

SEQ ID NO: 91809 - DNA, 80 bp, synthetic construct
  source 1..80: mol_type = other DNA
gtgttgcaatttaccatcgttacaaagccggtaactacaggcgtccacctgttgttttggacgaagaacttgcactactg

SEQ ID NO: 91810 - DNA, 80 bp, synthetic construct
  source 1..80: mol_type = other DNA
tcgtagtgtcacagtcgaatataacattcatgctgtattagacgcactgcttgctaattctaatcttagaactttttcag

SEQ ID NO: 91811 - DNA, 80 bp, synthetic construct
  source 1..80: mol_type = other DNA
cgagcgtaagctcattgtaagagaatgattttaacgaatctttaaattctattgttatggcaactccagtgcagccacgt

SEQ ID NO: 91812 - DNA, 80 bp, synthetic construct
  source 1..80: mol_type = other DNA
gctgtttcttttgcagataacaatgataacaacaatcagcagtccagaggtagaggacgaaaccctaaacctcgacctgc

SEQ ID NO: 91813 - DNA, 80 bp, synthetic construct
  source 1..80: mol_type = other DNA
accaaatacaactgtctcatggtacacaggtcttacccaacacgggaaagttcctttatccttcccaccaggacagggcg

SEQ ID NO: 91814 - DNA, 80 bp, synthetic construct
  source 1..80: mol_type = other DNA
ccaggtctggaaattcctcccgcggctcttcccctggtccagctggagtcggagctgtaagtggagatgcatccagtttg

SEQ ID NO: 91815 - DNA, 80 bp, synthetic construct
  source 1..80: mol_type = other DNA
ctgtacctcaatctcttaagccgtcttgaagcactcgagtctggcaagcagaaaactgcagcaccaaaggttattaccaa

SEQ ID NO: 91816 - DNA, 80 bp, synthetic construct
  source 1..80: mol_type = other DNA
ttgataagagtctctctgttgatgaatttgtcgacgttgttaaagatgaagtaacacaattgttggaaaagttacttcgt

SEQ ID NO: 91817 - DNA, 80 bp, synthetic construct
  source 1..80: mol_type = other DNA
ttaatgtcgttcaggcatttggtctccgtggttcaggagacctccaaggcaattttggtgacatgcagtttaacaaactt

SEQ ID NO: 91818 - DNA, 80 bp, synthetic construct
  source 1..80: mol_type = other DNA
aggttacccatttaagcaatgacactaatggcgaccctgtatacttccttcgatacagtggtgccataaaattagactca

SEQ ID NO: 91819 - DNA, 80 bp, synthetic construct
  source 1..80: mol_type = other DNA
aagaaccccaactaccaaaaatggatggagctccttgattccaacattgatgcctacaagaacttccccaagaaggagaa

SEQ ID NO: 91820 - DNA, 80 bp, synthetic construct
  source 1..80: mol_type = other DNA
aaacaaaaggccagtgaaaaacaaggcggtgaggaagatgaaaacgccatgtttgataaagccgttgcagatgccatgtc

SEQ ID NO: 91821 - DNA, 80 bp, synthetic construct
  source 1..80: mol_type = other DNA
agcgaaggagcagcgtgtacccaaaggtagtattacccaaaggtcacgtcccgtaaaacccgctgtcggcccaatggttg

SEQ ID NO: 91822 - DNA, 80 bp, synthetic construct
  source 1..80: mol_type = other DNA
atgttaactctgaacagagtccgtgaatgtaacaagagtgtggcaaccgctagtgcctggatttcctcgtcataacgcgt

SEQ ID NO: 91823 - DNA, 80 bp, synthetic construct
  source 1..80: mol_type = other DNA
ttgtctactcttgcacagaatggaatcatgttgtaattacagtgcaagaaggtaattataacccatttaattgatagcta

SEQ ID NO: 91824 - DNA, 80 bp, synthetic construct
  source 1..80: mol_type = other DNA
ggcgttgacatagatgattttgacattgatacttttattgataacccttgctactgctttaatgcagatggtgatgaagc

SEQ ID NO: 91825 - DNA, 80 bp, synthetic construct
  source 1..80: mol_type = other DNA
ttggggttcaactatgacattttcagtgcatcctgtagtatgtgatgaagatggtgagttgaattcgctagatggtgatt

SEQ ID NO: 91826 - DNA, 80 bp, synthetic construct
  source 1..80: mol_type = other DNA
gtagcgatgatgatttaagcacagaacaagaagatgcttggtctgttgctgttgatgaagctttccctctggaagaccag

SEQ ID NO: 91827 - DNA, 80 bp, synthetic construct
  source 1..80: mol_type = other DNA
agtgaagaagttatagttcagcaggctgctgaattacatttaacgcttgatgtgcttgaagtcttgacttttgaagtacc

SEQ ID NO: 91828 - DNA, 80 bp, synthetic construct
  source 1..80: mol_type = other DNA
tggcgtttctattgtaaaagctaaacgctccactgagaaagttttggagcgtgcagcagttttagaatgggatattaaac

SEQ ID NO: 91829 - DNA, 80 bp, synthetic construct
  source 1..80: mol_type = other DNA
aatgtcccgctaaatctcaaacatctgatgtttatgaagcagatgctgaaattgttcagcctgctacttctaaatctaag

SEQ ID NO: 91830 - DNA, 80 bp, synthetic construct
  source 1..80: mol_type = other DNA
ttccaagctttcaccatggtttgcggatggcgaaacagcctgcaatacggtgaaagacatactttcaaaggagggaaaac

SEQ ID NO: 91831 - DNA, 80 bp, synthetic construct
  source 1..80: mol_type = other DNA
cgcttgcgtaagaggcgcgatgctaaggtttcagctggtagtgatagtgacacaccttctgaccctcttaataactttaa

SEQ ID NO: 91832 - DNA, 80 bp, synthetic construct
  source 1..80: mol_type = other DNA
gcataaagttctgactgatagtgttaccttagttttaggtgatgctatacagttagctaaatgttttcaagaatgtgttt

SEQ ID NO: 91833 - DNA, 80 bp, synthetic construct
  source 1..80: mol_type = other DNA
tggtaaatgctgctaatacacatcttaaacatggtggtggtatagctgctgccattaataatgcttccaatggagctgtt

SEQ ID NO: 91834 - DNA, 80 bp, synthetic construct
  source 1..80: mol_type = other DNA
caaattgagtcagatgaatatctgactcagcgtggaccacttcaggttggtgatgctgtcttgcttaagggacatggttt

SEQ ID NO: 91835 - DNA, 80 bp, synthetic construct
  source 1..80: mol_type = other DNA
agctaagcatatcctgcatgttgtaggaccagatgcgcgtgctaaacaggatgtttctttactttcaaagtgttacaaag

SEQ ID NO: 91836 - DNA, 80 bp, synthetic construct
  source 1..80: mol_type = other DNA
ccatgaatgattattcaattgtggtaacacctttagtgtcagcaggaatttttggtgttcaaccaaagatttcgcttgaa

SEQ ID NO: 91837 - DNA, 80 bp, synthetic construct
  source 1..80: mol_type = other DNA
tatttgcttcgtgaagtaaagactagagcattagttgctgtcaattcagaagatatctataatactctaacagaagttaa

SEQ ID NO: 91838 - DNA, 80 bp, synthetic construct
  source 1..80: mol_type = other DNA
aatccctcaaggtttgacttttgcttttgatggtttgaggggcggcgtacgtaaggctaaagattatggctttacgatgt

SEQ ID NO: 91839 - DNA, 80 bp, synthetic construct
  source 1..80: mol_type = other DNA
ttgtctgtattgataattcagcaaatacgaaattccttcgtacaaaaggagttgactatactaagaaacagattactgtt

SEQ ID NO: 91840 - DNA, 80 bp, synthetic construct
  source 1..80: mol_type = other DNA
aatggtgtccagtactatttttatagtgctaaagatgacatcaaatctgtagttgctgcagctaataataccataggtat

SEQ ID NO: 91841 - DNA, 80 bp, synthetic construct
  source 1..80: mol_type = other DNA
ttctcttcgtgccactgaatttaagtggttttactaagcacctcccaggccctcgtgtctacctgtgtgagaggctcact

SEQ ID NO: 91842 - DNA, 80 bp, synthetic construct
  source 1..80: mol_type = other DNA
cgtttcacaacccttgggatatgtatcgcatggattggatttgatgcaagccagccagattgttaaaatggtaactgtac

SEQ ID NO: 91843 - DNA, 80 bp, synthetic construct
  source 1..80: mol_type = other DNA
catatgtctgtttactggctaataaagaacagtctgtagttatattatcaaagacggatgtttctacacctgtcgatgat

SEQ ID NO: 91844 - DNA, 80 bp, synthetic construct
  source 1..80: mol_type = other DNA
tttattaaacatgttcaactcgaaggttcgtaccacaattggcattatgtcaatggtgagcttctagttgataatgttaa

SEQ ID NO: 91845 - DNA, 80 bp, synthetic construct
  source 1..80: mol_type = other DNA
atataataaactactacactggtctgatcaaaccgtgtgttatagtggtcaatctctcttcttggtgaagaatggtattg

SEQ ID NO: 91846 - DNA, 80 bp, synthetic construct
  source 1..80: mol_type = other DNA
ttttacctttcgaagatcttactaagtgtcgtacgtatttgacttctcgtacttcacaacaattaacagtcgaagtgctt

SEQ ID NO: 91847 - DNA, 80 bp, synthetic construct
  source 1..80: mol_type = other DNA
gtcacagtcgatgggattaattttagaacttgtattctaaataatcagagcacttacagaatgcagattggtagcgtctt

SEQ ID NO: 91848 - DNA, 80 bp, synthetic construct
  source 1..80: mol_type = other DNA
tctgaatggtgctgatatttctgacactattcctgatgagaaacagaatggtttaagcttgtacttagctgacaatttgt

SEQ ID NO: 91849 - DNA, 80 bp, synthetic construct
  source 1..80: mol_type = other DNA
ctgcttctgagaaagaggtactgctacagctttatggtacttcagattctacatttctacataggtattattccattaag

SEQ ID NO: 91850 - DNA, 80 bp, synthetic construct
  source 1..80: mol_type = other DNA
gctgctgttagcaaatggaagatgcttatgtgtgataaggttcagtctttgagactcagtgatagtaattgctacatgaa

SEQ ID NO: 91851 - DNA, 80 bp, synthetic construct
  source 1..80: mol_type = other DNA
tgtagtacttatgaccattgatgctcttagagacatacgttttactattcctgcactgcagcaagcttttataaaacata

SEQ ID NO: 91852 - DNA, 80 bp, synthetic construct
  source 1..80: mol_type = other DNA
ggcggaaattattccgacccatttatggtaaaccaattagcttatagctctagtgcaagtgaaggccttgttggcactac

SEQ ID NO: 91853 - DNA, 80 bp, synthetic construct
  source 1..80: mol_type = other DNA
ggcacgagagatgtttctataacaggtttaaaagcctgtttttatgttggagtgcaatctattgaagaattgcatcaacc

SEQ ID NO: 91854 - DNA, 80 bp, synthetic construct
  source 1..80: mol_type = other DNA
gatgcttacgacgtgccaatgtggtgctgagcgacatcgtcaattgattgagcatagcacaccttggctgctactttcag

SEQ ID NO: 91855 - DNA, 80 bp, synthetic construct
  source 1..80: mol_type = other DNA
gtaacccaactgagaaattggtgacaacgtcaacaaatcctgaatttgtagcatttaatgtctttatcggctcagagaca

SEQ ID NO: 91856 - DNA, 80 bp, synthetic construct
  source 1..80: mol_type = other DNA
tcagtgggtcactatgtccatgctagagttaaagaatctttaatatataaatatgactcaggttccttgacaaaagcttc

SEQ ID NO: 91857 - DNA, 80 bp, synthetic construct
  source 1..80: mol_type = other DNA
agattggaagtgcaaggttactgacgttttatacccacaacagaagtatactagtcaatgtaatgttgttgtgtactctc

SEQ ID NO: 91858 - DNA, 80 bp, synthetic construct
  source 1..80: mol_type = other DNA
tggatggtaatatgaaggcagaagtcgaccctgacttaactgctttttatgttaaagatggtaagtactttactagtccg

SEQ ID NO: 91859 - DNA, 80 bp, synthetic construct
  source 1..80: mol_type = other DNA
ccacctataactttttcaccagccactgtgttgtctggtagtgtttatactaatagttgcttggttgcttcagatggaaa

SEQ ID NO: 91860 - DNA, 80 bp, synthetic construct
  source 1..80: mol_type = other DNA
gccaggcggtgatgctattagtgcagcgtttaataaccttttgggttatgattttaataaaccaacctccaaaacttgca

SEQ ID NO: 91861 - DNA, 80 bp, synthetic construct
  source 1..80: mol_type = other DNA
cctgcagggcaaagctattggatttttctttccttatgaggaaggtctggaaacaggcactttcacatttaagatccgaa

SEQ ID NO: 91862 - DNA, 80 bp, synthetic construct
  source 1..80: mol_type = other DNA
cctacaccttccttcctgacgaaggaggtgatgtgctgttggcagagtttgttcattatgacccaatgtacaagaatggt

SEQ ID NO: 91863 - DNA, 80 bp, synthetic construct
  source 1..80: mol_type = other DNA
gccatgttgaatggtaaaccagttttgtgggtcaataattctttgtttgatagtgaacttaataagttcaacagagcgtc

SEQ ID NO: 91864 - DNA, 80 bp, synthetic construct
  source 1..80: mol_type = other DNA
attgcgtcaaatttatgaccttgcgccaattgagctggataataagttcactcctttaaaagttgaagaagttcaactac

SEQ ID NO: 91865 - DNA, 80 bp, synthetic construct
  source 1..80: mol_type = other DNA
aagatgtgcaagtcagcgcacaacaagaagtgcaactaaaagttatcaagtgcaaaggtttgtctaaaccatttgtcaaa

SEQ ID NO: 91866 - DNA, 80 bp, synthetic construct
  source 1..80: mol_type = other DNA
ggtgattttagttttattagtgatagtaatggtgttcctgttgtagaataccttactaaggatgatctacatcagttgta

SEQ ID NO: 91867 - DNA, 80 bp, synthetic construct
  source 1..80: mol_type = other DNA
tgtagattctaaatatcaggtgatagttatgaaagataactttttatctgatatattaagagtgcacacagtccaaagtg

SEQ ID NO: 91868 - DNA, 80 bp, synthetic construct
  source 1..80: mol_type = other DNA
gtgatttgcaagttgttgcagatactggttctttaactaagaaagtcaaattaatgttcaaggcttctgctttgtttaaa

SEQ ID NO: 91869 - DNA, 80 bp, synthetic construct
  source 1..80: mol_type = other DNA
gaatttgctagtcgtacatttgaagttgttaccgcagtaggtactgctacaaagtttgttgtacgacatttaggtgtaac

SEQ ID NO: 91870 - DNA, 80 bp, synthetic construct
  source 1..80: mol_type = other DNA
aacaagcattttatctaattgttttacaattatgaagatgctgtttttattgccaataaattatttttggcccaaacagg

SEQ ID NO: 91871 - DNA, 80 bp, synthetic construct
  source 1..80: mol_type = other DNA
aaacaagtactcaagttgaagtgagtgctttaagaactgctggcgttgtaactggtaatgttttaaaacattgttgcata

SEQ ID NO: 91872 - DNA, 80 bp, synthetic construct
  source 1..80: mol_type = other DNA
agaatggtcgtggtgggaatttgttccgcgatagaccatgggattatacctggacaccatatccagaactcatggaagac

SEQ ID NO: 91873 - DNA, 80 bp, synthetic construct
  source 1..80: mol_type = other DNA
gctgctgtagaattaactaaagacaaattacagcgtattgattggaaatcaacattacgtttgttacttgttatttgtac

SEQ ID NO: 91874 - DNA, 80 bp, synthetic construct
  source 1..80: mol_type = other DNA
aagtgacgtcatgttagaagatgctacaggtcttaaatgggtctataaggaatttagatcatacctaggtatcacttcct

SEQ ID NO: 91875 - DNA, 80 bp, synthetic construct
  source 1..80: mol_type = other DNA
cttgtgatggtattgctagtgactatagagcgaattcgttcgatatctctagttattgtgcaaaccgctcagctttatgt

SEQ ID NO: 91876 - DNA, 80 bp, synthetic construct
  source 1..80: mol_type = other DNA
caatggtgtttaattggacaagactctttgaatcgttattcatcactcaagatgatacaaacacatttaagccactatgt

SEQ ID NO: 91877 - DNA, 80 bp, synthetic construct
  source 1..80: mol_type = other DNA
tttgaatatagattggttgtggtttgttcttgagttgtttgttggttatgcattgtacactgcggcttttaactgggtgt

SEQ ID NO: 91878 - DNA, 80 bp, synthetic construct
  source 1..80: mol_type = other DNA
tattagcttgtactttgcagtatttctttgctcagacatcattgtttgtggattggcgttcatacaactatgttatgtcc

SEQ ID NO: 91879 - DNA, 80 bp, synthetic construct
  source 1..80: mol_type = other DNA
agcatttatttattctttactcatataccacttgatggtcttgtaagagcttataatattattgcatgcttatggttttt

SEQ ID NO: 91880 - DNA, 80 bp, synthetic construct
  source 1..80: mol_type = other DNA
gcgtcgtttttacaatcatgtaattaatggctgcaaggataccgcatgccttctttgttataagaggaatcgtttgactc

SEQ ID NO: 91881 - DNA, 80 bp, synthetic construct
  source 1..80: mol_type = other DNA
gtatcgaagcttctaccgtcgtttgtggtgcaaaacgtacattttacatcacagctaatggcggtacgtatttctgttgt

SEQ ID NO: 91882 - DNA, 80 bp, synthetic construct
  source 1..80: mol_type = other DNA
cttgaggcagacccaaagggtaagtactcacagagtctacttaagaagttagtgggtggtaattttactcccattgacca

SEQ ID NO: 91883 - DNA, 80 bp, synthetic construct
  source 1..80: mol_type = other DNA
ttggctagatctgcttgtgtttattactcccaggttttgtgtaaaccaattttgttggttgactcaaacctggtgacatc

SEQ ID NO: 91884 - DNA, 80 bp, synthetic construct
  source 1..80: mol_type = other DNA
cgtaggtgattcttgtgaaatcgctacgaaaatgtttgattcctttgttaatagtttcgtctctctatataacgtcacac

SEQ ID NO: 91885 - DNA, 80 bp, synthetic construct
  source 1..80: mol_type = other DNA
gcgaaaagttagataaacttatatctacagctcgcgatggtgttaagagaggtgaaaatttgcaatcagttttgaaagtt

SEQ ID NO: 91886 - DNA, 80 bp, synthetic construct
  source 1..80: mol_type = other DNA
gtggcttgccagacatatgcactgtattgggtacaatcttaattaaatattatttttcagttagagtgtcgtgtctcttg

SEQ ID NO: 91887 - DNA, 80 bp, synthetic construct
  source 1..80: mol_type = other DNA
tttatagacgctgcacgtggacctgcaggcgttgagtctgatgtggatactacagaacttgtagattctgttcagtatgc

SEQ ID NO: 91888 - DNA, 80 bp, synthetic construct
  source 1..80: mol_type = other DNA
ccataaacatgatataaatcttactaatgagggttttaataattatgtaccttcatatattaaacctgaaagtgtggcta

SEQ ID NO: 91889 - DNA, 80 bp, synthetic construct
  source 1..80: mol_type = other DNA
atacatgtgtggcagtgatggtaaacccattgctgactatgcatttattgcagacaaggagaaattaatctctttggctg

SEQ ID NO: 91890 - DNA, 80 bp, synthetic construct
  source 1..80: mol_type = other DNA
gaactgctctgcatacatgcaactctccgatgctatgaaacgtcaaatacgtatagcttgtcggaaatgtaatcttcctt

SEQ ID NO: 91891 - DNA, 80 bp, synthetic construct
  source 1..80: mol_type = other DNA
ttaggttaacaacctcaaagcttcgtgcacatgacaatatattgtctgttaagtttagtgtcactaaaattgttggtggt

SEQ ID NO: 91892 - DNA, 80 bp, synthetic construct
  source 1..80: mol_type = other DNA
gctccttcttgggttactgcgttatataactttacgttaaaaagttatgtaatagctactgttatcatatttttaaccgc

SEQ ID NO: 91893 - DNA, 80 bp, synthetic construct
  source 1..80: mol_type = other DNA
agtgttgatgtatactattttgcctacatttaacacgcgtaccgttagtttttacgaagaccgcatactggaatttaaag

SEQ ID NO: 91894 - DNA, 80 bp, synthetic construct
  source 1..80: mol_type = other DNA
ttctagataatggtattatcagagatattaatgctgatgataagtgctttgctaacaagtaccggtcttttgttcaatgg

SEQ ID NO: 91895 - DNA, 80 bp, synthetic construct
  source 1..80: mol_type = other DNA
tatcatgagcgagttggtggtacatttgataatgacattgcttgcccattgactgtagctgttattgcaggtgtagccgg

SEQ ID NO: 91896 - DNA, 80 bp, synthetic construct
  source 1..80: mol_type = other DNA
cgctagagtaccaggtgtacctactactttggcttgggtgcaaaaacaaatagttttctttgtttcacgcgtctttgcca

SEQ ID NO: 91897 - DNA, 80 bp, synthetic construct
  source 1..80: mol_type = other DNA
tacctggtgctcatccgtacagtgcaatgaagccccatgttaggtatgacatgtttgatactaacatgtttattaaattt

SEQ ID NO: 91898 - DNA, 80 bp, synthetic construct
  source 1..80: mol_type = other DNA
atgttgcaactgatgttcagtcgcgtgctgatcagaatggttacatcaccttaaaagaaaaattgtatagaatttgctgg

SEQ ID NO: 91899 - DNA, 80 bp, synthetic construct
  source 1..80: mol_type = other DNA
cctgaagtcgtcgttgaaagcacgctcagaattactagaaccttgactactcaatactgtcgtttcggtagttgtgagta

SEQ ID NO: 91900 - DNA, 80 bp, synthetic construct
  source 1..80: mol_type = other DNA
gctcaagagggtgtttgtataactactaatggctcatgggctatctttaatgactttcacgccagtagacctggtgtgta

SEQ ID NO: 91901 - DNA, 80 bp, synthetic construct
  source 1..80: mol_type = other DNA
ttgtggacatgattatatggacataattagaaggcttttgctaactttctttcaacctgttacatatttccaattgacta

SEQ ID NO: 91902 - DNA, 80 bp, synthetic construct
  source 1..80: mol_type = other DNA
cgtcattggttatgggaattggcctctgtggctttcttacattagtcttctattatattaataaagttaaacgtgcgctt

SEQ ID NO: 91903 - DNA, 80 bp, synthetic construct
  source 1..80: mol_type = other DNA
gctgattatacacagtgtgctataattgcagtgctcgctactgtatgtaatagtttgtgtctgtgttttgtggtagcata

SEQ ID NO: 91904 - DNA, 80 bp, synthetic construct
  source 1..80: mol_type = other DNA
cccgttttgtattgctccttacacggcattgtactattatgctacattttactttaccaatgaaccggcatttataatgc

SEQ ID NO: 91905 - DNA, 80 bp, synthetic construct
  source 1..80: mol_type = other DNA
atgtttcttggtttgtgatgtttggagctgttgtacccatgtggatgacatgcctttatttagtagctatgatttttaga

SEQ ID NO: 91906 - DNA, 80 bp, synthetic construct
  source 1..80: mol_type = other DNA
cactttttctgggttatggcctatttcagtcgtaaacatgttacagttttcactgatggtcgccttaattgtacgtttca

SEQ ID NO: 91907 - DNA, 80 bp, synthetic construct
  source 1..80: mol_type = other DNA
ggaagctgcaagtaatatctttttgattacaaaggatacttatgtggcccttagaaactctattagtactgacgtttatg

SEQ ID NO: 91908 - DNA, 80 bp, synthetic construct
  source 1..80: mol_type = other DNA
cccggtacctcgccatgtttaataagtataaatatttctcaggtgctatggatactgctgcataccgtgaggctgctgca

SEQ ID NO: 91909 - DNA, 80 bp, synthetic construct
  source 1..80: mol_type = other DNA
tatgttgagcgtaaagacgttccgtataccaagcaaactatctttactattaatagtgtgatacagaaacaggacattga

SEQ ID NO: 91910 - DNA, 80 bp, synthetic construct
  source 1..80: mol_type = other DNA
tcacatttagctaaggcccttcagacattcagtgaaacaggtagtgatgttctttaccaaccgcctaattgtagtattac

SEQ ID NO: 91911 - DNA, 80 bp, synthetic construct
  source 1..80: mol_type = other DNA
tgtttccatactcagcgttatttactttatatagctctcaatcaaaacattacaagttaacggggagtaggtgggggaaa

SEQ ID NO: 91912 - DNA, 80 bp, synthetic construct
  source 1..80: mol_type = other DNA
acaggatcagaaattcaagtgggtggattcgattactcgtgtacattaaacgctccagcaaatattcagcagtttgaaca

SEQ ID NO: 91913 - DNA, 80 bp, synthetic construct
  source 1..80: mol_type = other DNA
agtcggtattgaaatagcaaaaagatatatagctggaggaaaaatattttttagagctggtataaacttattaaataatg

SEQ ID NO: 91914 - DNA, 80 bp, synthetic construct
  source 1..80: mol_type = other DNA
taccagaaagaatacgaaatgatgtcaactatattttgaatatggatatgaatttgccatcaacagcaagatatattaga

SEQ ID NO: 91915 - DNA, 80 bp, synthetic construct
  source 1..80: mol_type = other DNA
agatggagtggttcgagcagaatgcagggactattaaatcatgggatgagagttataccgagctgaaagttgaagttccc

SEQ ID NO: 91916 - DNA, 80 bp, synthetic construct
  source 1..80: mol_type = other DNA
ttccgtgtcaatgcaaacacggcagccttgagcaacaaggtccttgcagaatacaaagttcctggtgaaattgtgatgtc

SEQ ID NO: 91917 - DNA, 80 bp, synthetic construct
  source 1..80: mol_type = other DNA
gaatggagtggttcgaaaaatttgcaggaaccattaaatcttgggatgaaagctacactgagctgaaggtcgaggttccc

SEQ ID NO: 91918 - DNA, 80 bp, synthetic construct
  source 1..80: mol_type = other DNA
ttccgtgtcaatgcaaatacgacagccttaagccacaaagtcctcgcagagtacaaagtccctggtgaaattgtgatgtc

SEQ ID NO: 91919 - DNA, 80 bp, synthetic construct
  source 1..80: mol_type = other DNA
atactttcttgagcatcagttaattcaaccattaactacaaggaacattgcagaattaattccaactcaattatatcatg

SEQ ID NO: 91920 - DNA, 80 bp, synthetic construct
  source 1..80: mol_type = other DNA
gggacatttcaaagttaaagccaataaaattcataattaattcagattcatccgaatattatttagtacacaataataaa

SEQ ID NO: 91921 - DNA, 80 bp, synthetic construct
  source 1..80: mol_type = other DNA
ttaaatttataattggctcagttttatctaccagaacaatagctgtggaattcataacctcaaactatatgtcactagca

SEQ ID NO: 91922 - DNA, 80 bp, synthetic construct
  source 1..80: mol_type = other DNA
atttaatgactattatgccatcagagattttcttgagagaatcattagttgctatgcaattagcaataataaataccctt

SEQ ID NO: 91923 - DNA, 80 bp, synthetic construct
  source 1..80: mol_type = other DNA
gtgacggagtgctttctagcatggctgtcacttttaaacgagccctcggggcgcggcataaacagcctcccccgagggaa

SEQ ID NO: 91924 - DNA, 80 bp, synthetic construct
  source 1..80: mol_type = other DNA
ttggagcagctcaggatgtcaagaccatgtcggagctcaaacaggcactcaagaatgtcgcaatcaagaattgccagata

SEQ ID NO: 91925 - DNA, 80 bp, synthetic construct
  source 1..80: mol_type = other DNA
gaggggaagatctatctttatggtttgtatgtggagcgaggccttgtacttggggggcacaaacccccagctgccatcac

SEQ ID NO: 91926 - DNA, 80 bp, synthetic construct
  source 1..80: mol_type = other DNA
gaggggaagatctatctttatggtttgtatgtggagcgaggccttgtacttgggtggcacaaacccccagctgccatcac

SEQ ID NO: 91927 - DNA, 80 bp, synthetic construct
  source 1..80: mol_type = other DNA
gttgaactcgcaccactttctctattttggaggccggtgtaccccccacagaatctcatctctccaaaccctcttaggaa

SEQ ID NO: 91928 - DNA, 80 bp, synthetic construct
  source 1..80: mol_type = other DNA
ttctctccagaaccacacctggcccagacagttgcagaagacctcctttcccctagcgtgatggatgtaggtgactttca

SEQ ID NO: 91929 - DNA, 80 bp, synthetic construct
  source 1..80: mol_type = other DNA
gatatcaataagtgagggtctcccctctggggtaccttgtacctcccagtggaattccatcgcccactggctcctcactc

SEQ ID NO: 91930 - DNA, 80 bp, synthetic construct
  source 1..80: mol_type = other DNA
gttgcatggaaagcctttcccttacccggcctttgacaacaactgctatgccttctgttgtgggtatcagaacctaacca

SEQ ID NO: 91931 - DNA, 80 bp, synthetic construct
  source 1..80: mol_type = other DNA
actcggggttgtgcaggaaaatgatccaaaggacacctggttccttcaggccttaccaaaactggaccagaaaacccctc

SEQ ID NO: 91932 - DNA, 80 bp, synthetic construct
  source 1..80: mol_type = other DNA
cccctctggaataactccaatttaaaaaaggaagccaacatattctggggtgcgctatcttcgctattcactaggcctat

SEQ ID NO: 91933 - DNA, 80 bp, synthetic construct
  source 1..80: mol_type = other DNA
actcctggactggcgctttcaacacgcgcaggcagcctctcttcgctcacattcgcaagcgaggggagtcacgggtgtaa

SEQ ID NO: 91934 - DNA, 80 bp, synthetic construct
  source 1..80: mol_type = other DNA
gagaaatgaaaaactgttctttcaatatcaccacaagcataaaaactaagaggagagaatatgcacttttttataacctt

SEQ ID NO: 91935 - DNA, 80 bp, synthetic construct
  source 1..80: mol_type = other DNA
tgtggaaatttgacagtgccctagcacgaagacacatagcccgaaaactgcatcctgattactataaagactgctgactg

SEQ ID NO: 91936 - DNA, 80 bp, synthetic construct
  source 1..80: mol_type = other DNA
acctatctatgacgactgactgcgaagtaatctaactagagcgtaggtgtggccggtgcggggttgggagtgtctatccc

SEQ ID NO: 91937 - DNA, 80 bp, synthetic construct
  source 1..80: mol_type = other DNA
gactgactgcgaagtaatctaactagagcgtaggtgtggccggtgcggggttgggagtgtctatccccagttgctgcata

SEQ ID NO: 91938 - DNA, 80 bp, synthetic construct
  source 1..80: mol_type = other DNA
agtgctgaagtggcagtttgacagctccctagcaagaacacacgtggcccgacaactgcacccagaatattataaagact

SEQ ID NO: 91939 - DNA, 80 bp, synthetic construct
  source 1..80: mol_type = other DNA
catggaatagaggatgcagacagagaagtgctgaagtggcagtttgacagctccctagcaagaacacacgtggcccgaca

SEQ ID NO: 91940 - DNA, 80 bp, synthetic construct
  source 1..80: mol_type = other DNA
cctgttacaccccatgaaccagcagggacatgaggacacagacaaagaagtgctgatgtggaagtttgacagtgccctag

SEQ ID NO: 91941 - DNA, 80 bp, synthetic construct
  source 1..80: mol_type = other DNA
gaattaaggaactgttcctttaatgtgaccacagcaataagggataaaaagcaggaggtctatgcactgttttatagaga

SEQ ID NO: 91942 - DNA, 80 bp, synthetic construct
  source 1..80: mol_type = other DNA
gacttaagagactgttccttcagtactaccacagatctaacagatatgaaacatacggtctatgcactttttgatatgct

SEQ ID NO: 91943 - DNA, 80 bp, synthetic construct
  source 1..80: mol_type = other DNA
gaaccagcatggaatagaggacgaagacagagaagtgctggtgggaagtttgaacagttccctagcacgaacacacagag

SEQ ID NO: 91944 - DNA, 80 bp, synthetic construct
  source 1..80: mol_type = other DNA
actgcctgttacaccccatgagccagcatggaatggaggacgaagacagagaagtgctgatgtggaagtttgacagctcc

SEQ ID NO: 91945 - DNA, 80 bp, synthetic construct
  source 1..80: mol_type = other DNA
acaataacacactcaacagaacccagacctctaacaagacagaaaacaataacacactaaaaacagatgaagtaaaaaac

SEQ ID NO: 91946 - DNA, 80 bp, synthetic construct
  source 1..80: mol_type = other DNA
gagaaatagtaggagatataagaaaagcctattgtgaggtcaattcaagttggcataaaattttagaacgagtaactaaa

SEQ ID NO: 91947 - DNA, 80 bp, synthetic construct
  source 1..80: mol_type = other DNA
agtgctgatgtggaagtttgacagctccctagcaagaagacacatagcccgagaacggcacccagaattctataaagact

SEQ ID NO: 91948 - DNA, 80 bp, synthetic construct
  source 1..80: mol_type = other DNA
ggagaacaaagagaacaaaacaagagagataggaaatataacagatgaagtccaattatgtgattttaatatgaccacag

SEQ ID NO: 91949 - DNA, 80 bp, synthetic construct
  source 1..80: mol_type = other DNA
acaataggaaatataacagatgaagtaagtaactgtacttttaatatgaccacaatgctaagcaataagaagcagcaggt

SEQ ID NO: 91950 - DNA, 80 bp, synthetic construct
  source 1..80: mol_type = other DNA
agtgctaatgtggaagtttaacagtgccctagcacgaaaacacatagcccaagaactgcgtccagagtactataaaaact

SEQ ID NO: 91951 - DNA, 80 bp, synthetic construct
  source 1..80: mol_type = other DNA
tgatgaaacggaaacgggactctagcatacttactgacagtcagacagcgaccaaatgtatccggagtgtcctaaactag

SEQ ID NO: 91952 - DNA, 80 bp, synthetic construct
  source 1..80: mol_type = other DNA
atacatgtcagatcggacagggtgatggtgtcacctctggctgtgacgtggggaaacaaaattggaccaacgacaaaaac

SEQ ID NO: 91953 - DNA, 80 bp, synthetic construct
  source 1..80: mol_type = other DNA
tcccaggtcgatgcggcgcctgctccccctgctcttgagcctgttcaactgcccggccccgttaggccgaaggctcccgt

SEQ ID NO: 91954 - DNA, 80 bp, synthetic construct
  source 1..80: mol_type = other DNA
ttgtcaccagcgttaccttcggactcaggctatatcccggggtatgcgacggttggaggtcgagcacgcccagaaattta

SEQ ID NO: 91955 - DNA, 80 bp, synthetic construct
  source 1..80: mol_type = other DNA
agcttgaggccctgtacggggcacttaatataccgcgtgaaatcgcgactcgcgcatcccacctcgccgcgacagttgag

SEQ ID NO: 91956 - DNA, 80 bp, synthetic construct
  source 1..80: mol_type = other DNA
gtttctgccagtccgggtcgcctagactgccgtaccacgcttggtaacaagactttttccacaacatttgtcgacggcgc

SEQ ID NO: 91957 - DNA, 80 bp, synthetic construct
  source 1..80: mol_type = other DNA
ccgcctagaggttaatggccctgaccagtatgttctctcctttgatgattctctacagtccatgggcgccggcccacaca

SEQ ID NO: 91958 - DNA, 80 bp, synthetic construct
  source 1..80: mol_type = other DNA
gcctcgcctatgagctcaccccaggtggtctgcgggtccgagttacatccaacggcttggactgcgaggtgacttttgcg

SEQ ID NO: 91959 - DNA, 80 bp, synthetic construct
  source 1..80: mol_type = other DNA
cccggcgctgcaccgagcgctacacctggggaggtggcggccttctgcagtgctctctatcggtacaataggttcaccca

SEQ ID NO: 91960 - DNA, 80 bp, synthetic construct
  source 1..80: mol_type = other DNA
ctccggtggcagaggttgccctggtcccaccagcagggcacaccccccttgcaggcgccacatcagaactaccgccccct

SEQ ID NO: 91961 - DNA, 80 bp, synthetic construct
  source 1..80: mol_type = other DNA
cttgaggcggcaccggctggtacaccactgtcccctcctgtaccgcggccagccgatttgcctgctgccgcacagacccc

SEQ ID NO: 91962 - DNA, 80 bp, synthetic construct
  source 1..80: mol_type = other DNA
agtcgcttgtgggtcaccagcgccaccgccgacccggacgcgtcgtttactctatgcctaccccgatgggtctagggtgt

SEQ ID NO: 91963 - DNA, 80 bp, synthetic construct
  source 1..80: mol_type = other DNA
acgccgggtccctatttgagtcggattgcgactggttggttaatgcatctaatcctggccatcgtcccggtggaggcctc

SEQ ID NO: 91964 - DNA, 80 bp, synthetic construct
  source 1..80: mol_type = other DNA
cccgtccgattattcatgcagtagcaccagattataggttagaacataaccctaagaggttagaggcggcttaccgcgag

SEQ ID NO: 91965 - DNA, 80 bp, synthetic construct
  source 1..80: mol_type = other DNA
ttctcagctgctatcgccggggcgagttcttgtatggtctttgagaatgacttctccgagttcgacagcacccagaataa

SEQ ID NO: 91966 - DNA, 80 bp, synthetic construct
  source 1..80: mol_type = other DNA
cgtcacgcggcagccttgatcgccggttgtgggttgaggttaaaagttgactatcgccctgtggggctgtatgctggtgt

SEQ ID NO: 91967 - DNA, 80 bp, synthetic construct
  source 1..80: mol_type = other DNA
ggttgtagcccccggtttggaggcgttgccggatgttgtccgttttgccggccggctgtccgagaaaaattggggccccg

SEQ ID NO: 91968 - DNA, 80 bp, synthetic construct
  source 1..80: mol_type = other DNA
tattcactgcacgacttgtggcctgctgatgttgctgaagccatggcccgccacggcatggcgcgcctctatgtggttct

SEQ ID NO: 91969 - DNA, 80 bp, synthetic construct
  source 1..80: mol_type = other DNA
tcatcttccacctgaagtattattaccacccggcacctaccacacgacctcgtatctcctcattcatgacggtaagcgtg

SEQ ID NO: 91970 - DNA, 80 bp, synthetic construct
  source 1..80: mol_type = other DNA
gcctaattatgctgtgcattcacggctcccctgtaaattcgtacacgaacaccccctataccggtgcattggggctgctt

SEQ ID NO: 91971 - DNA, 80 bp, synthetic construct
  source 1..80: mol_type = other DNA
tcaggtcctaatcgagaatgcatctggctaccttgttgctatctccacttacactactaacctcggtgccggccctgttt

SEQ ID NO: 91972 - DNA, 80 bp, synthetic construct
  source 1..80: mol_type = other DNA
agagcgcgttcgcgcgattggctgtcacttcgtactgcttttgaccgctgcccccgagccctcccctatgccttatgtcc

SEQ ID NO: 91973 - DNA, 80 bp, synthetic construct
  source 1..80: mol_type = other DNA
atcgcttcgttttcaattgatccacaactttattgtgattataatgttgtgctaatgaagcatgattcaacgttagagct

SEQ ID NO: 91974 - DNA, 80 bp, synthetic construct
  source 1..80: mol_type = other DNA
atgattattatgaatgtattaatctaattaagttcttcttaatcattatcaccagcattaagtggatagattttagatct

SEQ ID NO: 91975 - DNA, 80 bp, synthetic construct
  source 1..80: mol_type = other DNA
attaatctaattaagttcttcttaatcattatcaccagcattaagtggatagattttagatcttagtatgcattaggtat

SEQ ID NO: 91976 - DNA, 80 bp, synthetic construct
  source 1..80: mol_type = other DNA
cggggatcctaggcaatttggttgttcatttttgaagctttgtgccctaagacctgcaaaatggggaacagacaagccag

SEQ ID NO: 91977 - DNA, 80 bp, synthetic construct
  source 1..80: mol_type = other DNA
tgatctctgaaattcaggggattgaattgtttacaaattcttatggtatacaatattggcgagttccgttaaacctcaga

SEQ ID NO: 91978 - DNA, 80 bp, synthetic construct
  source 1..80: mol_type = other DNA
ttgtaggaataactccagaaacattgagattcatgattaaatcataactattggaacaaatcactcccatatcaatattg

SEQ ID NO: 91979 - DNA, 80 bp, synthetic construct
  source 1..80: mol_type = other DNA
tttgattcttacttgaacattgggaagactgcatggttctggatctctcagcttgttgtctccgttcaatccatttctct

SEQ ID NO: 91980 - DNA, 80 bp, synthetic construct
  source 1..80: mol_type = other DNA
ctccacccaattatccaccgtctcaagaacagcactcagaaccccagcactgcctggagctgcagttctcagcacagaaa

SEQ ID NO: 91981 - DNA, 80 bp, synthetic construct
  source 1..80: mol_type = other DNA
agaatgatctccagcagtgtgtttgccactctccgatagcttgattcccctttgcatcactccctccactaatattcgca

SEQ ID NO: 91982 - DNA, 80 bp, synthetic construct
  source 1..80: mol_type = other DNA
tacagaaacctcagtattggtgatgccctcttgaactgatgaattagatgcttgacatcgtcttctgtggttaccacctt

SEQ ID NO: 91983 - DNA, 80 bp, synthetic construct
  source 1..80: mol_type = other DNA
atcagaatatagattgttgaactcactaagcagctggctcttctctactttcaaaaattgactttctatctctccttttc

SEQ ID NO: 91984 - DNA, 80 bp, synthetic construct
  source 1..80: mol_type = other DNA
caatatccacccctgaccattgcatccttaatcccagtctgtccaacatcatggcactcagtgcctcaatcagcaggctg

SEQ ID NO: 91985 - DNA, 80 bp, synthetic construct
  source 1..80: mol_type = other DNA
tgtctggctatgagggtggtgcttagaacactctctaaatagatgaacaactgaagcagcaattcactataggatgagat

SEQ ID NO: 91986 - DNA, 80 bp, synthetic construct
  source 1..80: mol_type = other DNA
aactgaagcagcaattcactataggatgagatccataaaagatgaccagaatagatagccttaatgcctaggatcctcgg

SEQ ID NO: 91987 - DNA, 80 bp, synthetic construct
  source 1..80: mol_type = other DNA
agctccagaagtaaagaatagcccaagggccagtctgatcccagatgccacgcacctggggccacagttctgcaagagct

SEQ ID NO: 91988 - DNA, 80 bp, synthetic construct
  source 1..80: mol_type = other DNA
taagggccataagttgagagtaagtaagtccagcgacaaaccctgctgattgtaaggatttattagaacttgtgttctca

SEQ ID NO: 91989 - DNA, 80 bp, synthetic construct
  source 1..80: mol_type = other DNA
gctttctgtggcttctcgcctgattccagatcaacaacggtgttttcccaagccctccctgttattgaggtccttgatgc

SEQ ID NO: 91990 - DNA, 80 bp, synthetic construct
  source 1..80: mol_type = other DNA
cgttgggttagtgtgttgtgtatatacagcagaaagttgaaactatctactgaagtgattagcacaaagcgcaatccaat

SEQ ID NO: 91991 - DNA, 80 bp, synthetic construct
  source 1..80: mol_type = other DNA
cgcacagtggatcctaggctattggattgcgctttgtgctaatcacttcagtagatagtttcaactttctgctgtatata

SEQ ID NO: 91992 - DNA, 80 bp, synthetic construct
  source 1..80: mol_type = other DNA
tttatctcatcagcatatttctacacttggttaggataccaacccatagacacatcaaaggcaagccgtgtcctaaacct

SEQ ID NO: 91993 - DNA, 80 bp, synthetic construct
  source 1..80: mol_type = other DNA
gtttacctcttccacatcacagggactccgggttgtttgtaaagaccacaggagcaaatacccatgtggtttaacctgtg

SEQ ID NO: 91994 - DNA, 80 bp, synthetic construct
  source 1..80: mol_type = other DNA
aaaccctcaccaccccatctctccctgcttgagccccttgaccaccaccagtcatccctatcatgttcaagagagctcgt

SEQ ID NO: 91995 - DNA, 80 bp, synthetic construct
  source 1..80: mol_type = other DNA
tgctgactccgtgtgttttaaatacacacaacaaaatcacccaccaaattgatttacacaaagcgcaatccaatcgccta

SEQ ID NO: 91996 - DNA, 80 bp, synthetic construct
  source 1..80: mol_type = other DNA
gttttaaatacacacaacaaaatcacccaccaaattgatttacacaaagcgcaatccaatcgcctaggatccactgtgcg

SEQ ID NO: 91997 - DNA, 80 bp, synthetic construct
  source 1..80: mol_type = other DNA
tagcccttgattcaggtcgaggagggtgggactgcattatgaccggttatcagtatttagtgatccaaaacacaacctgg

SEQ ID NO: 91998 - DNA, 80 bp, synthetic construct
  source 1..80: mol_type = other DNA
tatttgacttcaacaagcaggccatccagaggctaaaagctgaagcgcaaatgagcatacagttgatcaacaaagcagta

SEQ ID NO: 91999 - DNA, 80 bp, synthetic construct
  source 1..80: mol_type = other DNA
cgcaccggggatcctaggcaatttgattgttctttctattgtctctgctttcccaactcaatcagatgggaaacaaacag

SEQ ID NO: 92000 - DNA, 80 bp, synthetic construct
  source 1..80: mol_type = other DNA
ataacaccagcctccagcagtctgacaagacacatggactcacagcaccggaatacatagcagtcacatcatgcaccaag

SEQ ID NO: 92001 - DNA, 80 bp, synthetic construct
  source 1..80: mol_type = other DNA
ttcaatctcgcagaccctggaggtagcaactcaacagcatcaaggaaatcttcaagtgattcaaatttagaattcatcaa

SEQ ID NO: 92002 - DNA, 80 bp, synthetic construct
  source 1..80: mol_type = other DNA
acctgatgcaatcaactgattttgattaaatttagctggttctatgtcaaagtctatccaggcgtatcccatcattaaat

SEQ ID NO: 92003 - DNA, 80 bp, synthetic construct
  source 1..80: mol_type = other DNA
catgtttgaacattggtctctcaatgcccttgtggatgactttttctacaaatgaggaaaatgggcccaatctttgtaat

SEQ ID NO: 92004 - DNA, 80 bp, synthetic construct
  source 1..80: mol_type = other DNA
ccttcaccttctggaatagatgtcttatgtggaaaccatgtaaaagatcccaaggtccttgttgttgcgacaaatggttt

SEQ ID NO: 92005 - DNA, 80 bp, synthetic construct
  source 1..80: mol_type = other DNA
gcttagttgagtgcaacaatcactacttgtgtctcaactgtcttacactacttctaggtgtaagcaataggtgccccatc

SEQ ID NO: 92006 - DNA, 80 bp, synthetic construct
  source 1..80: mol_type = other DNA
gaaaataatcacaaggattgtgcttaaaaaactccagcaatttggccactttgggttctcccagaacccatgcacccagt

SEQ ID NO: 92007 - DNA, 80 bp, synthetic construct
  source 1..80: mol_type = other DNA
agtatatcactttttgcctcaggaccatcctcaaggggtggtaggcagccaggtttagccaggaatattctaaatcggac

SEQ ID NO: 92008 - DNA, 80 bp, synthetic construct
  source 1..80: mol_type = other DNA
tctgatgggggctcaacgtccaacatctcacacaagttcttaagtgaggagagatgctcaccagataaataatttgtagt

SEQ ID NO: 92009 - DNA, 80 bp, synthetic construct
  source 1..80: mol_type = other DNA
tggagctgcccagtcttcaatttgttgaatagtcttctcagcatggatctgattttcttgcaagcatcaggaattagtct

SEQ ID NO: 92010 - DNA, 80 bp, synthetic construct
  source 1..80: mol_type = other DNA
tgcaaaatgcctctgcccacaaaactaaagccctcaacaaccccaacagcaccaccaggcagcgcaggggaagccgccag

SEQ ID NO: 92011 - DNA, 80 bp, synthetic construct
  source 1..80: mol_type = other DNA
ttctatctgtctcataattctgtagctgcgattgccatccacccaatccctcacatctgtactacagttcaaaaggaagg

SEQ ID NO: 92012 - DNA, 80 bp, synthetic construct
  source 1..80: mol_type = other DNA
ggtcaatgggatatctagcatactgcaagaggctaagagtcctcaattggattaaattacacaggtgaacaggtacccca

SEQ ID NO: 92013 - DNA, 80 bp, synthetic construct
  source 1..80: mol_type = other DNA
tttgctactgattgatcaacaattgtatcaattgtctctgctaactgatgtggttctttacacttaatattatggagggc

SEQ ID NO: 92014 - DNA, 80 bp, synthetic construct
  source 1..80: mol_type = other DNA
ttttaggactcacaaatttgttgagctggtcactcatgtaatagtgaaactccaacactgtcttgaattcctccgaatct

SEQ ID NO: 92015 - DNA, 80 bp, synthetic construct
  source 1..80: mol_type = other DNA
caacagcaccaccaggcagcgcaggggaagccgccaggcccccaccatacagtccctaaccaacccaacacccaccacca

SEQ ID NO: 92016 - DNA, 80 bp, synthetic construct
  source 1..80: mol_type = other DNA
ctttgcaagagatctgtgagggcctgatcaaaaagagagatctgatcatcactagaggtgtaagcatcaaccgtacccct

SEQ ID NO: 92017 - DNA, 80 bp, synthetic construct
  source 1..80: mol_type = other DNA
cctctgtcactgtctgtgaggtttttttcctcagtcccaattgagcctttataaatgatttcatcatggctgatacaaca

SEQ ID NO: 92018 - DNA, 80 bp, synthetic construct
  source 1..80: mol_type = other DNA
ttgaaaggtatctccactaacttatgcatgtgccatgtcaacaaagttgataagtaatctctgctcttgatgtcagcctg

SEQ ID NO: 92019 - DNA, 80 bp, synthetic construct
  source 1..80: mol_type = other DNA
gccgccaccatacagtccctaaccaacccaacacccaccaccaccctctccaccccccgacaccccccggtgggaccgcc

SEQ ID NO: 92020 - DNA, 80 bp, synthetic construct
  source 1..80: mol_type = other DNA
caagtccttagagagaaaaattaagttctgcaaaacagccaaaaataaaaacgggcacatcattggaccccatttgctat

SEQ ID NO: 92021 - DNA, 80 bp, synthetic construct
  source 1..80: mol_type = other DNA
caccaatgtacaactctctgttaccaccaacctgttctttgtacgacagagaaaatttgagtcgccctgtatcgggacct

SEQ ID NO: 92022 - DNA, 80 bp, synthetic construct
  source 1..80: mol_type = other DNA
attgagttgtaagattgcggtgattcctgactgtaaaaacaaagattctttaacattgctgttgtgcagttagtcaatga

SEQ ID NO: 92023 - DNA, 80 bp, synthetic construct
  source 1..80: mol_type = other DNA
taaaatttagatttctggatttataatgagtgtaccttcccataagcttatttgcattcataatcaataatatagattta

SEQ ID NO: 92024 - DNA, 80 bp, synthetic construct
  source 1..80: mol_type = other DNA
cagagaaattttaccaagaattctgtgatgcggtttatgaaaatcagaaattaaagaaaaaatacttttattgcggtcat

SEQ ID NO: 92025 - DNA, 80 bp, synthetic construct
  source 1..80: mol_type = other DNA
gcagagtgtcataatcaaagtcctcaaccatgtgatttgcaagctcactctttattaacctaatgtgaagtttgtctgag

SEQ ID NO: 92026 - DNA, 80 bp, synthetic construct
  source 1..80: mol_type = other DNA
cgccgggggcccccccgggggaggcagccatgcccaatgggtcactcgatgtcttcaatctgctcttctcctttaacaag

SEQ ID NO: 92027 - DNA, 80 bp, synthetic construct
  source 1..80: mol_type = other DNA
atcacctcatctaaatctgcaactgatggttggtcatcatctttagaagctggatttcctctaataggttctctatattg

SEQ ID NO: 92028 - DNA, 80 bp, synthetic construct
  source 1..80: mol_type = other DNA
tcctacaatcttttcaacagtttctctcaactgatcaaaatacagacttgaacccccttcaagtaatacctcatccaaat

SEQ ID NO: 92029 - DNA, 80 bp, synthetic construct
  source 1..80: mol_type = other DNA
caaccttatcaacatcagtttcttgctgtcgagagcctaagactaaattactcattgcctgttgcactttatattcataa

SEQ ID NO: 92030 - DNA, 80 bp, synthetic construct
  source 1..80: mol_type = other DNA
tcttgtttgtcaagacggtatttccccttccttgaaaaaacttcagtgagctgtgtcacagctaatgctgtgagtttgtt

SEQ ID NO: 92031 - DNA, 80 bp, synthetic construct
  source 1..80: mol_type = other DNA
gaaatcataatttaataccctagagccatctgtgtatttatttacaacaacactcttattgctagccagatccagggccg

SEQ ID NO: 92032 - DNA, 80 bp, synthetic construct
  source 1..80: mol_type = other DNA
tggcgcaaccacttgtaataagagggtctttcatctccctttttacctcctttcccttaaacaaggaaccattattgaaa

SEQ ID NO: 92033 - DNA, 80 bp, synthetic construct
  source 1..80: mol_type = other DNA
gatgatgtgaggagagaaaggaacttctttgatacaccaggctttttatattttaacccttgggtactcatacacccctc

SEQ ID NO: 92034 - DNA, 80 bp, synthetic construct
  source 1..80: mol_type = other DNA
tttactcaaaaactttcttgcattatagaccatatcatctaattcttcttccacggccagatctgcagggttcacagtca

SEQ ID NO: 92035 - DNA, 80 bp, synthetic construct
  source 1..80: mol_type = other DNA
catgaccaaattccagctttggttccaaaaacttctcaaagcactttatttgatctgttaatctatctggcgtttctttc

SEQ ID NO: 92036 - DNA, 80 bp, synthetic construct
  source 1..80: mol_type = other DNA
tgataaagtggcacatatatgacacattcaggataaacttgaacctattagtcatcatagattttacatcgcaacacaag

SEQ ID NO: 92037 - DNA, 80 bp, synthetic construct
  source 1..80: mol_type = other DNA
ctcttcacatgttctacccttcaatctcagtttaccagagctagattgtatcatgatcccctttttggacctactgtagc

SEQ ID NO: 92038 - DNA, 80 bp, synthetic construct
  source 1..80: mol_type = other DNA
actaagtttaccaatgctctaatcaacctatagagcagaaattcaacctcagtgattagcctttcttttatcttgtccat

SEQ ID NO: 92039 - DNA, 80 bp, synthetic construct
  source 1..80: mol_type = other DNA
gaggtctttatgatagaagtctgatacgaaggccatcacaaagtacctaagattttgaagaagtttctgactacgcttgc

SEQ ID NO: 92040 - DNA, 80 bp, synthetic construct
  source 1..80: mol_type = other DNA
tagggtgggccagaatcaaaaccaaaatcatctttgtcagtgacctaatgtcgtgcacttttccttccagttcactacag

SEQ ID NO: 92041 - DNA, 80 bp, synthetic construct
  source 1..80: mol_type = other DNA
tcttcaatccaagtgatcatagtgttcactgtggcctgtaaaacctcagatgaaaatattgctggaaaataccttttagg

SEQ ID NO: 92042 - DNA, 80 bp, synthetic construct
  source 1..80: mol_type = other DNA
cagcataaaacgagcagatctcaccaactctattgttgttgatggcataacactttgagcactcccctgttttctggtag

SEQ ID NO: 92043 - DNA, 80 bp, synthetic construct
  source 1..80: mol_type = other DNA
agcaattgaaagtccatgccatccagtgaaaattcttgacagtatgcctccttgcatttcactacctgatatctggctga

SEQ ID NO: 92044 - DNA, 80 bp, synthetic construct
  source 1..80: mol_type = other DNA
tccaaactcattctgtcttattttaacagtagatgaagtcttcatagagttgatcagagcaaggcttagtgatgaaagtc

SEQ ID NO: 92045 - DNA, 80 bp, synthetic construct
  source 1..80: mol_type = other DNA
tctctagatcagtagcctccaacaactcaacatctcccatgacaaaaggaaacctttcttcttgtgatttttcataagtg

SEQ ID NO: 92046 - DNA, 80 bp, synthetic construct
  source 1..80: mol_type = other DNA
attgttggggttatcccagagacatcaaaatttaggaccgagtcatagcaatcggtgcctattatgctcaaatcaacctt

SEQ ID NO: 92047 - DNA, 80 bp, synthetic construct
  source 1..80: mol_type = other DNA
gtactggcttatatcaaccccaacaccctccaaagcaaaagtggcctttgtaatggttctctggatgactgaagcaagaa

SEQ ID NO: 92048 - DNA, 80 bp, synthetic construct
  source 1..80: mol_type = other DNA
acagagcgtaacccttgaactccacccagtcgtccacaataccaagaactgttcctaagatctccaggcctttattgggt

SEQ ID NO: 92049 - DNA, 80 bp, synthetic construct
  source 1..80: mol_type = other DNA
tctgatttccactcaaaggttgggtccctacagacttggaaacctcggcatgctgtcttcgttcaatccacttcttcaag

SEQ ID NO: 92050 - DNA, 80 bp, synthetic construct
  source 1..80: mol_type = other DNA
tccttctttgttgactctaaggaaactaacctgtcatttacactaataaaacaagatccaagccaacctttttgacattt

SEQ ID NO: 92051 - DNA, 80 bp, synthetic construct
  source 1..80: mol_type = other DNA
atgtttcatctgatcatatttgcttgcaagaaggattaatatatcgaacactagaagaagttttctccttgtgttcaaga

SEQ ID NO: 92052 - DNA, 80 bp, synthetic construct
  source 1..80: mol_type = other DNA
ttctcaaagatttgattttattcaagaaagatctccagcattgcatttgacactccccagtgggctgatcagccctctca

SEQ ID NO: 92053 - DNA, 80 bp, synthetic construct
  source 1..80: mol_type = other DNA
caactttccttatcaaaggctgcatacaaaaaccttaatattggggatgccctcttaaactggtaggtcaagtgttcaat

SEQ ID NO: 92054 - DNA, 80 bp, synthetic construct
  source 1..80: mol_type = other DNA
attatcttccatgtccaccgcctcattgatatataaattgttgaactcatctagtagatgatttttttcaactctgacaa

SEQ ID NO: 92055 - DNA, 80 bp, synthetic construct
  source 1..80: mol_type = other DNA
attgatcctctatctctcctttccttaatctattcctaaacacctgatactcttcctcaatctgcattttcacctcatga

SEQ ID NO: 92056 - DNA, 80 bp, synthetic construct
  source 1..80: mol_type = other DNA
cttgatgacataatgagatcacctcttcaaaatgattggaacgattgtctaacagagcattcagactctctactccagag

SEQ ID NO: 92057 - DNA, 80 bp, synthetic construct
  source 1..80: mol_type = other DNA
agtctccccgaagtcaaggataaagattcacataatctgctgtattctgactcttcaaaaagtgaattgctctcttgagc

SEQ ID NO: 92058 - DNA, 80 bp, synthetic construct
  source 1..80: mol_type = other DNA
tatttgagtaaagaaaagagggtatctcttaatttatcattcacccaatcaggtatctgttcattataaaatgatgttct

SEQ ID NO: 92059 - DNA, 80 bp, synthetic construct
  source 1..80: mol_type = other DNA
attactgtcttcagaacagtgacaacatcaacacccgaccattgcaccttcaatcttaatctgtccatcatcatagcact

SEQ ID NO: 92060 - DNA, 80 bp, synthetic construct
  source 1..80: mol_type = other DNA
tccatctatgagtggtataagattaatatcaatgcttctcagatcttctttgagttgttctaatttcttgaaatcctcaa

SEQ ID NO: 92061 - DNA, 80 bp, synthetic construct
  source 1..80: mol_type = other DNA
tgtacttttgctcaaagttagcagaggacgatcttacaaaacactccaacaatattaaaacattgcctgtcagtttatat

SEQ ID NO: 92062 - DNA, 80 bp, synthetic construct
  source 1..80: mol_type = other DNA
atccatctggtaccacaaaacacagagacggagttagaatcccatgatcatgtagaattctttctacagatttatcctca

SEQ ID NO: 92063 - DNA, 80 bp, synthetic construct
  source 1..80: mol_type = other DNA
cacagccatttgcattacaggaatcaatctcgatgcagagagatagaagtttcaatccctccatcaaaagcagtctgggt

SEQ ID NO: 92064 - DNA, 80 bp, synthetic construct
  source 1..80: mol_type = other DNA
tctgtttgaacgaggaatgctaatttttgctttgagagcttctcattgtctgccaggtactttgagactaggtccttgat

SEQ ID NO: 92065 - DNA, 80 bp, synthetic construct
  source 1..80: mol_type = other DNA
gagggctacctcctcttccatgctcaactgtcgagatggtgaccaagtctactagataaagtgttgattgagacactaat

SEQ ID NO: 92066 - DNA, 80 bp, synthetic construct
  source 1..80: mol_type = other DNA
ataaagtgttgattgagacactaatcatatacacaaaaaactcaatctaattagatagccttaatgcctaggatcctcgg

SEQ ID NO: 92067 - DNA, 80 bp, synthetic construct
  source 1..80: mol_type = other DNA
taatgcctcagtcagtatacagtgagaagtatcaccagcctctctcacaaacatctcaaggtcttggtcttgcatcacag

SEQ ID NO: 92068 - DNA, 80 bp, synthetic construct
  source 1..80: mol_type = other DNA
gcaaagggtttaaaagtggagagcagtccgagagccagtctaattccagatgctacacacctgggcccacaattctgcaa

SEQ ID NO: 92069 - DNA, 80 bp, synthetic construct
  source 1..80: mol_type = other DNA
gggtgaaagatgctagccttttatcacattcccacaaacctcctctatgaacaaccagtggaactggctctgtgcaaggt

SEQ ID NO: 92070 - DNA, 80 bp, synthetic construct
  source 1..80: mol_type = other DNA
cccaccaatgtgaaatcatactctgtaaaccgcaacttatctgcatcaacaactatttccataggagtcacctgtcccaa

SEQ ID NO: 92071 - DNA, 80 bp, synthetic construct
  source 1..80: mol_type = other DNA
ctgacttgtgtcgattagaaactcattaatcacttcagtatcaacataccaaggtgacctacctttgaaggtagacccag

SEQ ID NO: 92072 - DNA, 80 bp, synthetic construct
  source 1..80: mol_type = other DNA
gtcttaagcttaaggggaccctccagtactgaaccccaaaggagtctgtcagcaattcaattccttgagtgttggaaatc

SEQ ID NO: 92073 - DNA, 80 bp, synthetic construct
  source 1..80: mol_type = other DNA
cccccccaaaagggggggggccacgggggcgtccatttacaggacgaccttgaggcttgaagttctaaataccatgtctc

SEQ ID NO: 92074 - DNA, 80 bp, synthetic construct
  source 1..80: mol_type = other DNA
gggcgtccatttacaggacgaccttggggcttgaagttctaaataccatgtctctcggaagtacagctctcaaggttggt

SEQ ID NO: 92075 - DNA, 80 bp, synthetic construct
  source 1..80: mol_type = other DNA
actttctgcggtttgctgtccgactcaagatccacaatggtgttttcccaagctctccccacaatggaagttcttgatgc

SEQ ID NO: 92076 - DNA, 80 bp, synthetic construct
  source 1..80: mol_type = other DNA
gatacttggcagtgtatatcagtcctaaatctgtcaatgccagaacagcatcattaagatcaacttgaccctgtttagta

SEQ ID NO: 92077 - DNA, 80 bp, synthetic construct
  source 1..80: mol_type = other DNA
ggcttagtctcgtggaccctgagggtaatgacgcaacggcgtcaaaaaagtcctccaatgagtcaaacttggtactaacc

SEQ ID NO: 92078 - DNA, 80 bp, synthetic construct
  source 1..80: mol_type = other DNA
gtaaaacatcatggtcaaaatcttcaaccatgtggttggataactcacctttaatcaacctgatgtggaacttgttcgaa

SEQ ID NO: 92079 - DNA, 80 bp, synthetic construct
  source 1..80: mol_type = other DNA
ctaaatcattcacagacggctgaccatcatcatcagggcctgagcctggtttaacaggctctctgtactgatcaacgatc

SEQ ID NO: 92080 - DNA, 80 bp, synthetic construct
  source 1..80: mol_type = other DNA
ttttcaacagtctcccttagctgatcaaaataaacacttgcacccccgtcaagcaggatttcgtccaaatcagcctcatc

SEQ ID NO: 92081 - DNA, 80 bp, synthetic construct
  source 1..80: mol_type = other DNA
atcagacccattaatgccctcactaatctatagagtaagaattcagtatctgtgatcagttcttcccttattttatcaac

SEQ ID NO: 92082 - DNA, 80 bp, synthetic construct
  source 1..80: mol_type = other DNA
taggtccttgtgataaaaatctgacacgtaggccattataaagtacctgaggttttgaaggagcttttgagaacgtttgc

SEQ ID NO: 92083 - DNA, 80 bp, synthetic construct
  source 1..80: mol_type = other DNA
ggatgtgtcagaattaaaaccagtatcatcttagtcaatgacctgatattatgcagttgcccttccaactcactacaatc

SEQ ID NO: 92084 - DNA, 80 bp, synthetic construct
  source 1..80: mol_type = other DNA
cagctaccagagatcagaggaggagaagttcccttacatcatggggagtgtagaattgctggaaactgttgacctggaga

SEQ ID NO: 92085 - DNA, 80 bp, synthetic construct
  source 1..80: mol_type = other DNA
attgtaggagtaattccagaaacatcaaaatccatgactgaatcataacaatttggacacattatctccatgtcaacttt

SEQ ID NO: 92086 - DNA, 80 bp, synthetic construct
  source 1..80: mol_type = other DNA
tttgattcttgtttgaacattgggaagactgcatggtcttggacatctcagcctgttgcctccgttcaacccacttcttt

SEQ ID NO: 92087 - DNA, 80 bp, synthetic construct
  source 1..80: mol_type = other DNA
acttgactttatttagaaatgatctccaatattgcatttgacactctttaatggtttgatcactcttctcattggcttcc

SEQ ID NO: 92088 - DNA, 80 bp, synthetic construct
  source 1..80: mol_type = other DNA
ttcccgacattcgcatacagaaatcttagtataggtgatgctcttttgaactggtgaatcaaatattcaacatcgtcttc

SEQ ID NO: 92089 - DNA, 80 bp, synthetic construct
  source 1..80: mol_type = other DNA
tgtggttgacaccttatccatgtacagatcattaaactcattgagtaatctgctcttctcaacttttaggaactggctct

SEQ ID NO: 92090 - DNA, 80 bp, synthetic construct
  source 1..80: mol_type = other DNA
tgtttgatcattgattcggtgatcggaaccttcgaaatggatgttcaaccagggtggcggttcactgtaggatagggctc

SEQ ID NO: 92091 - DNA, 80 bp, synthetic construct
  source 1..80: mol_type = other DNA
tctacaagatgcaactagaccggttagaataaaatgaattaatgaaaagatagcctaaatgcctaggatcctcggtgcgc

SEQ ID NO: 92092 - DNA, 80 bp, synthetic construct
  source 1..80: mol_type = other DNA
gatgaagtgtccccaacttctttaacaaacatctcaaggtcctgatcctgaataactggggtgaaagacgccaacttttt

SEQ ID NO: 92093 - DNA, 80 bp, synthetic construct
  source 1..80: mol_type = other DNA
aagccaaagctccagaaacaaagaacagcccgagggccagtctaatccctgatgccacacacctaggaccacagttttgc

SEQ ID NO: 92094 - DNA, 80 bp, synthetic construct
  source 1..80: mol_type = other DNA
cttccttttctttcttttttgggccttttgtactgagctcccccaaatgggaaacaagcaagccaaagccccagaagcaa

SEQ ID NO: 92095 - DNA, 80 bp, synthetic construct
  source 1..80: mol_type = other DNA
aaacactgaaagtactcatggttaaagtatgtccttgttgacactgccttcgtcaactctccaataggacactgtgacat

SEQ ID NO: 92096 - DNA, 80 bp, synthetic construct
  source 1..80: mol_type = other DNA
cactatgggacaagatcttgtaggaggcacagaagacacaagaagcaaccaaaggcaattaaattagatagccttaatgc

SEQ ID NO: 92097 - DNA, 80 bp, synthetic construct
  source 1..80: mol_type = other DNA
aagagcttttcttggtgtcaatcatatttaggataggatgactttgagccagcctatccaagtctgaagtgttgggatac

SEQ ID NO: 92098 - DNA, 80 bp, synthetic construct
  source 1..80: mol_type = other DNA
ccatctcccattggctaccttgggcttctttcacagagaactagggatatctacattagtaggagacttctggggacatt

SEQ ID NO: 92099 - DNA, 80 bp, synthetic construct
  source 1..80: mol_type = other DNA
cctaggcaatttgattgttcttttttgtgactccaagtatcagtcctcacaaaatgggcagcaaacagtccaaagcccca

SEQ ID NO: 92100 - DNA, 80 bp, synthetic construct
  source 1..80: mol_type = other DNA
ccgacaggacacacgggctcactgcacctgagtacatggcagtcacttcacacaccaagtacttagcttgctgagtcatt

SEQ ID NO: 92101 - DNA, 80 bp, synthetic construct
  source 1..80: mol_type = other DNA
tctgatttttgcttgggtgttgggaagtttgtgtggacttgagtctttcagcctgttgtcttcgctcaagccactttcct

SEQ ID NO: 92102 - DNA, 80 bp, synthetic construct
  source 1..80: mol_type = other DNA
acttaactttattcaggaatgacctccaacattgcatctggcactccctggtatcttgaccatccctcttgttttcattg

SEQ ID NO: 92103 - DNA, 80 bp, synthetic construct
  source 1..80: mol_type = other DNA
cggtttgcattcatgatcaggagtattgacttgaaacactggaagtattcatggtcacaatatgttcttgttgccactgc

SEQ ID NO: 92104 - DNA, 80 bp, synthetic construct
  source 1..80: mol_type = other DNA
gtagtggtccacactgatgccaacatccttcaaagcagcagtggctttcaggatcactttttgaatcattgcattgagaa

SEQ ID NO: 92105 - DNA, 80 bp, synthetic construct
  source 1..80: mol_type = other DNA
aatataaacctaattaacaaggcagtgaatgctttaataaatgaccagttgatcatgaagaaccacttacgagacatcat

SEQ ID NO: 92106 - DNA, 80 bp, synthetic construct
  source 1..80: mol_type = other DNA
ggggataccatactgtaattacagtaaatattggtaccttaatcatacaggcaccgggagaacatcattgcccaagtgtt

SEQ ID NO: 92107 - DNA, 80 bp, synthetic construct
  source 1..80: mol_type = other DNA
tcaaaataccaacccacagacacatcagaggtaaaccatgtcccaaaccccacaggctgaaccacatgggcatctgctcc

SEQ ID NO: 92108 - DNA, 80 bp, synthetic construct
  source 1..80: mol_type = other DNA
tgtggtctttacaaacaacccggtgtccccgtgagctggaagagataaacctccacgggggcgtccatttacaggacgac

SEQ ID NO: 92109 - DNA, 80 bp, synthetic construct
  source 1..80: mol_type = other DNA
tttaggtgttgatgtcctgaataccatgtccctgggcaagactgcccttaggaccggtacttttaatcctcctgacactg

SEQ ID NO: 92110 - DNA, 80 bp, synthetic construct
  source 1..80: mol_type = other DNA
ctttataaagagtagttgtacaagacctaccacatagcaaaaggaaggtgaccagcccaattatgccacacgttgcaaca

SEQ ID NO: 92111 - DNA, 80 bp, synthetic construct
  source 1..80: mol_type = other DNA
tgcattgatcccacaccgcattttcatatttccttgactcaatcttgccaagagcaatgtcaatcaactttatgtccttt

SEQ ID NO: 92112 - DNA, 80 bp, synthetic construct
  source 1..80: mol_type = other DNA
tatttcgaggaagtgcgtctatgacagcactagtcagacctggttgtgcagcaaataggtctgtgacatcaattccatgt

SEQ ID NO: 92113 - DNA, 80 bp, synthetic construct
  source 1..80: mol_type = other DNA
gagtgtcatcaattgagaataagtgagaccagctgcaaagcccgctgactgcaaggacttattggaactattagacccgg

SEQ ID NO: 92114 - DNA, 80 bp, synthetic construct
  source 1..80: mol_type = other DNA
gtaccccaactcatcagatcttgacagactgactcagagtcatcccattttaaatttggttgatgttaacaagagttctt

SEQ ID NO: 92115 - DNA, 80 bp, synthetic construct
  source 1..80: mol_type = other DNA
accccatctttccctgctcgggttccttgattgccaccagccatccctatcatgtttaagagagcccgtctctggtcgag

SEQ ID NO: 92116 - DNA, 80 bp, synthetic construct
  source 1..80: mol_type = other DNA
ctgttgtgaactcagattccccatgtagacacctgagctcaacggcctctctgttctgatgacttttgactttagttttt

SEQ ID NO: 92117 - DNA, 80 bp, synthetic construct
  source 1..80: mol_type = other DNA
ctaggtcagcagctaggaccagcaagtcgtctgacgtcaaagtcccaacccttaacacacttttttgttgagttgatttc

SEQ ID NO: 92118 - DNA, 80 bp, synthetic construct
  source 1..80: mol_type = other DNA
tgttggagcagtagcctgacaattccctcctcagagattgtgtccatagaaaggaccttacctctttggaggcactcatt

SEQ ID NO: 92119 - DNA, 80 bp, synthetic construct
  source 1..80: mol_type = other DNA
gctgaattgatgtgttttagagtcacgtagtgaaaattacccactgaattgattatcacaaagcgcaatcctatagccta

SEQ ID NO: 92120 - DNA, 80 bp, synthetic construct
  source 1..80: mol_type = other DNA
actacataatggtaggcaatgaaacagggttggagctgacactgacaaacactagtatcatcaatcacaagttctgcaac

SEQ ID NO: 92121 - DNA, 80 bp, synthetic construct
  source 1..80: mol_type = other DNA
aaaattacccactgaattgattatcacaaagcgcaatcctatagcctaggatccactgtgcgcaaacagagaagagatga

SEQ ID NO: 92122 - DNA, 80 bp, synthetic construct
  source 1..80: mol_type = other DNA
tgtggatgcagcatcacactgcggtacagttgcaaatggtgtcctgcagaccttcatgagaatggcttggggtggtagtt

SEQ ID NO: 92123 - DNA, 80 bp, synthetic construct
  source 1..80: mol_type = other DNA
agtaggagactcttaggaacattcacatggacattgtcggattctgagggcaaggatacaccaggagggtattgtttgac

SEQ ID NO: 92124 - DNA, 80 bp, synthetic construct
  source 1..80: mol_type = other DNA
agaccctcaccaccccatctttccctgctcgggttccttgattgccaccagccatccctatcatgtttaagagagcccgt

SEQ ID NO: 92125 - DNA, 80 bp, synthetic construct
  source 1..80: mol_type = other DNA
tattcgactttaataagcaggccatccagaggttgaaaactgaagtgcagatgaatataaacctaattaacaaggcagtg

SEQ ID NO: 92126 - DNA, 80 bp, synthetic construct
  source 1..80: mol_type = other DNA
cggggatcctaggcaatttgactgttctttcttggaaccctaagtgtcagtcctcacaaaatgggcagcaaacaatctac

SEQ ID NO: 92127 - DNA, 80 bp, synthetic construct
  source 1..80: mol_type = other DNA
atacttagcttgttgagttattgagccagtgtagtcaaggtggatggcaaaattttccttgaagctagcatcctgacttt

SEQ ID NO: 92128 - DNA, 80 bp, synthetic construct
  source 1..80: mol_type = other DNA
gtctcaagttcgcagaccctgaaggcaatgactcaacagcatcaagaaagtcttcaagtgaatcaaacttagaatcaacc

SEQ ID NO: 92129 - DNA, 80 bp, synthetic construct
  source 1..80: mol_type = other DNA
aaacctgatgcgatcagctggttctgattaaacctggctggctcaatgtcaaaatctatccaagcatagcccatcattaa

SEQ ID NO: 92130 - DNA, 80 bp, synthetic construct
  source 1..80: mol_type = other DNA
ctctcttccattttaccacatgtgacacgagagatagtgcctcacaattaacatctaatgcgacacagaggtccaaaaac

SEQ ID NO: 92131 - DNA, 80 bp, synthetic construct
  source 1..80: mol_type = other DNA
gatataatctcctcaaggaatgaatgatgtgattcagcccaaccctgtcttctaacaattttgatgcagtaggtttcaaa

SEQ ID NO: 92132 - DNA, 80 bp, synthetic construct
  source 1..80: mol_type = other DNA
gggaaataatcacaagggttatgcttaaagaactctaaaactttagtttgtttaggttcccccaagacccatgcacctaa

SEQ ID NO: 92133 - DNA, 80 bp, synthetic construct
  source 1..80: mol_type = other DNA
ttctatcgcagttgataaagaaatacacatgtaatcccataataggggtctaaaataaccaactattccctcatttccat

SEQ ID NO: 92134 - DNA, 80 bp, synthetic construct
  source 1..80: mol_type = other DNA
ttctgagactcagtgggactttccaaaattggatcccataagcatttgttaacaactcgattccttgagtcttggagatt

SEQ ID NO: 92135 - DNA, 80 bp, synthetic construct
  source 1..80: mol_type = other DNA
agtatattattttctgcctcaggaccattctgagagggtgatagctggccagatttaaccaggagtattctaagtcagat

SEQ ID NO: 92136 - DNA, 80 bp, synthetic construct
  source 1..80: mol_type = other DNA
tccgaagggggttcaacatttaacatttcacacagatttttgagtgaagagagatgctctccagacaaatagtttgttgt

SEQ ID NO: 92137 - DNA, 80 bp, synthetic construct
  source 1..80: mol_type = other DNA
tctgcaagatgccccttcccacaaggctgaggccatcaacaaccccatcagcgccaccaaccaacacagacagcgccgcc

SEQ ID NO: 92138 - DNA, 80 bp, synthetic construct
  source 1..80: mol_type = other DNA
tgaagttgcccagtttttagtctattgaacaactttctcaacatagacctgatcttgctacaagcgttagggatcaaccc

SEQ ID NO: 92139 - DNA, 80 bp, synthetic construct
  source 1..80: mol_type = other DNA
ctctatctgtctcattattctgtaactacggtttccatccacccagtctctaacatccgtttcacagttcaatagaaatg

SEQ ID NO: 92140 - DNA, 80 bp, synthetic construct
  source 1..80: mol_type = other DNA
tttgcaactgattgatcaatgattgtgtctattgtttccgctagctgatgtggttctttacattttatattatgaagggc

SEQ ID NO: 92141 - DNA, 80 bp, synthetic construct
  source 1..80: mol_type = other DNA
tcagcgccaccaaccaacacagacagcgccgccaatcctccaccgtacagcccctaatccactgtccagctccacaacct

SEQ ID NO: 92142 - DNA, 80 bp, synthetic construct
  source 1..80: mol_type = other DNA
tctgggtctctctgcatcaaatctgtgagagcttggtcaaaaagagagatttgatcatcactagaagtgtaagcatctat

SEQ ID NO: 92143 - DNA, 80 bp, synthetic construct
  source 1..80: mol_type = other DNA
tctgttattgattgtgcagtacttttcctcagtcccagttgggctttgatgtaggatttcatcatggctgacacaacatt

SEQ ID NO: 92144 - DNA, 80 bp, synthetic construct
  source 1..80: mol_type = other DNA
aatcctccaccgtacagcccctaatccactgtccagctccacaacctcctccaccccccgacaccccccgggaggaccac

SEQ ID NO: 92145 - DNA, 80 bp, synthetic construct
  source 1..80: mol_type = other DNA
gaaaggtatttcaaccatcttatgcatatgccatgttaacaaagttgaaagataatctcttccctttatgtcagcttgca

SEQ ID NO: 92146 - DNA, 80 bp, synthetic construct
  source 1..80: mol_type = other DNA
cttgaaatttagattccttgatttatagtgagtatacctgcccataagtttgtttgcattcatgatcaggagtattgact

SEQ ID NO: 92147 - DNA, 80 bp, synthetic construct
  source 1..80: mol_type = other DNA
ggatggtttctataaggaattttgtgatgctgtttatggaaatcacaggttgaaggagaagtacttttactgtggccaca

SEQ ID NO: 92148 - DNA, 80 bp, synthetic construct
  source 1..80: mol_type = other DNA
ccgccgggggcccccccgggggaggcagccaccgtcgggaagctattcaatgtcttcaaccttctcactctcctcaacta

SEQ ID NO: 92149 - DNA, 80 bp, synthetic construct
  source 1..80: mol_type = other DNA
ggtaagacttcctgatcaaaatcttcaaccatatggtttgacagttcagttttgattagtctgatgtagaacttatttga

SEQ ID NO: 92150 - DNA, 80 bp, synthetic construct
  source 1..80: mol_type = other DNA
gatcacttcatccaaatcagccactgaaggctgaccactgtctccaaaaccaaagtttgatttaacaggctccttatatt

SEQ ID NO: 92151 - DNA, 80 bp, synthetic construct
  source 1..80: mol_type = other DNA
gatccacaatcttttcaacagtctcctttaattgatcgaagtaaatgcttgcactcccttcgagtaaaacctcatctaag

SEQ ID NO: 92152 - DNA, 80 bp, synthetic construct
  source 1..80: mol_type = other DNA
gtcctgcttattgaggagatgtttccccttccttgaaaaaacttctgtcaattgtgacacggccagtgctgtgagcttat

SEQ ID NO: 92153 - DNA, 80 bp, synthetic construct
  source 1..80: mol_type = other DNA
tgaaatcatagtttagtattctagaaccatctgtatacttattgacaacaacacttttgttactggctaaatctaaagcc

SEQ ID NO: 92154 - DNA, 80 bp, synthetic construct
  source 1..80: mol_type = other DNA
aagatgtgagaagggaaaggaactttcttgacacaccaggttttttatactttggtgcattagtacttgtacacccttct

SEQ ID NO: 92155 - DNA, 80 bp, synthetic construct
  source 1..80: mol_type = other DNA
atggccaaagtctaattttggttctaaaaacttctcaaaacattttacttgatctgtcaatctatctggtgtctcctttg

SEQ ID NO: 92156 - DNA, 80 bp, synthetic construct
  source 1..80: mol_type = other DNA
gctccttgcatgttctaccttttagtcttagcttgccactgcttgattgtatcatagtcatcttctttgacctgctgtag

SEQ ID NO: 92157 - DNA, 80 bp, synthetic construct
  source 1..80: mol_type = other DNA
tagggtgagccaaaatcaaaaccaaaaccatttttgttaatgatctaatattgtttaattgctcttctaactcactgcaa

SEQ ID NO: 92158 - DNA, 80 bp, synthetic construct
  source 1..80: mol_type = other DNA
tcttcaatccaggtgatcatagtgttcactgtagcttgcagaacttcagctgaaaatattgctgggaagtacctcttagg

SEQ ID NO: 92159 - DNA, 80 bp, synthetic construct
  source 1..80: mol_type = other DNA
cagcataaaatgaacagacttcgccaaccatattgtcattgaccgcataacattttgaacactctcctgtcttttgatag

SEQ ID NO: 92160 - DNA, 80 bp, synthetic construct
  source 1..80: mol_type = other DNA
accaactgaaagtcagcgccacttgatgagaactcttgacaatatgcttctttgcacctcactacttgatatctggcagg

SEQ ID NO: 92161 - DNA, 80 bp, synthetic construct
  source 1..80: mol_type = other DNA
cccgaattcattttgcctcaacttgacagtagacgaggttttcattgagttgattaaggcaagactcagtgaagaaagtc

SEQ ID NO: 92162 - DNA, 80 bp, synthetic construct
  source 1..80: mol_type = other DNA
tttcaagatcgagtgtttccgacagttctacagcccccatagtatagggaaacttctcttcttgtgacttttgatagcta

SEQ ID NO: 92163 - DNA, 80 bp, synthetic construct
  source 1..80: mol_type = other DNA
cagagggcatagcctttgaactccacccaatcatccactacctccaaaactgctttcaaaacttccatgtgattgttagg

SEQ ID NO: 92164 - DNA, 80 bp, synthetic construct
  source 1..80: mol_type = other DNA
aacactgtcttctgaggctatcatatcatcaacatataaattattaaattcattgagcaagtgttccttttcaaccttca

SEQ ID NO: 92165 - DNA, 80 bp, synthetic construct
  source 1..80: mol_type = other DNA
caaattgactttttatttctcctttcctaagtctattcctaaacacctggtactcttcctcaatttgagacttcacctca

SEQ ID NO: 92166 - DNA, 80 bp, synthetic construct
  source 1..80: mol_type = other DNA
taggctgttagcttattgtttatgccttgatgacatgcagcaatcagctcttcataatggtttgagcgattgtctaatag

SEQ ID NO: 92167 - DNA, 80 bp, synthetic construct
  source 1..80: mol_type = other DNA
catcaccatttttaatacacaaatgatgtctacccctgaccattgcattcttaattttaacctatccaacatcatagcac

SEQ ID NO: 92168 - DNA, 80 bp, synthetic construct
  source 1..80: mol_type = other DNA
tacctgagcaaagaaaagagtatatcccttagtttatcattgacccaatcaggtatctgctcattataaaacgatgtcct

SEQ ID NO: 92169 - DNA, 80 bp, synthetic construct
  source 1..80: mol_type = other DNA
ccatccggaactacaaaacacagtgagggagttaggattccatgatcatgaaggattctctctacagatttgtcctcact

SEQ ID NO: 92170 - DNA, 80 bp, synthetic construct
  source 1..80: mol_type = other DNA
gttatgtatgcagccatttgcatcacaggaatccacctcgatgcagatggataaaagctttagcccttccatcaaaagca

SEQ ID NO: 92171 - DNA, 80 bp, synthetic construct
  source 1..80: mol_type = other DNA
tcctgggttctgtttggacaagaaatgccagcttctgtctcgaaagcttctcgttgtctactaaatattttgcaaccaaa

SEQ ID NO: 92172 - DNA, 80 bp, synthetic construct
  source 1..80: mol_type = other DNA
aaagcttctcgttgtctactaaatattttgcaaccaaatctttggcacaggctatgtcttcctccatatttaaaaggtga

SEQ ID NO: 92173 - DNA, 80 bp, synthetic construct
  source 1..80: mol_type = other DNA
tcaatgctccagtcagtaaaccatgggaggaatctcccacctctctcacaaacatttcgagatcttgatcctgaataaca

SEQ ID NO: 92174 - DNA, 80 bp, synthetic construct
  source 1..80: mol_type = other DNA
agtcccagaagcaaaagacagcccaagggctagtttgattccagacgccacacatctaggaccacagttctgcaaaagct

SEQ ID NO: 92175 - DNA, 80 bp, synthetic construct
  source 1..80: mol_type = other DNA
ggggtgaaagacgccaacttcttatcacattcccacaaacctcctctgtgcacaaccagtggcaccggctctacagaagg

SEQ ID NO: 92176 - DNA, 80 bp, synthetic construct
  source 1..80: mol_type = other DNA
gcccaccaacgtgaaatcgtactctgtgaactgcagcctttccacatctacaacaatatccatgggagtcacccgtccca

SEQ ID NO: 92177 - DNA, 80 bp, synthetic construct
  source 1..80: mol_type = other DNA
attgattcgtatcagttagaaactcattgatcacctcagtatcaacataccacgccgatttgcccttgaaggtgggccca

SEQ ID NO: 92178 - DNA, 80 bp, synthetic construct
  source 1..80: mol_type = other DNA
atgagatctttatgatagtagtcagatacataagccatgatgaagtacctcagattctggagtagtttttgagaacgttt

SEQ ID NO: 92179 - DNA, 80 bp, synthetic construct
  source 1..80: mol_type = other DNA
ctcttactgccactgtcatcaatacttgcatacaagaatctcagtattggtgatgctcttttgaactggtaaatcaagtg

SEQ ID NO: 92180 - DNA, 80 bp, synthetic construct
  source 1..80: mol_type = other DNA
gagcgtcattagttgggaataggtgagcccagctgcaaagcctgttgattgtaaggacttgttggagctattgggcccag

SEQ ID NO: 92181 - DNA, 80 bp, synthetic construct
  source 1..80: mol_type = other DNA
tgcatccagaacatcaataacagggagagcttgggagaacactgtcgtagacctagagtcggatgggaaaccacaaaaag

SEQ ID NO: 92182 - DNA, 80 bp, synthetic construct
  source 1..80: mol_type = other DNA
gtccataagaaggattttacttccttggaagcactcattgctgcgttggtgtatgctggagttcaggaagtacacgatgg

SEQ ID NO: 92183 - DNA, 80 bp, synthetic construct
  source 1..80: mol_type = other DNA
cggggatcctaggcatttttgatagcgcagtttaagtatcttttgagatgggacaggttataactttctttcaagaagta

SEQ ID NO: 92184 - DNA, 80 bp, synthetic construct
  source 1..80: mol_type = other DNA
agtatacagttaatcaacaaagcagtgaatgctctaataaatgaccagctgatcatgaagaaccatctgcgggatattat

SEQ ID NO: 92185 - DNA, 80 bp, synthetic construct
  source 1..80: mol_type = other DNA
gggaatcaaggagtttctttatgtcctcagaaccctgacaggtgataaccatgtttcgagggagtgcatctattactgca

SEQ ID NO: 92186 - DNA, 80 bp, synthetic construct
  source 1..80: mol_type = other DNA
ctaatgtgtttagaatacacacagtgagaatcacccactaagtagattaacacaaagcgcaatctaatagcctaggatcc

SEQ ID NO: 92187 - DNA, 80 bp, synthetic construct
  source 1..80: mol_type = other DNA
gcgggatcctaggcaatttgattgctctttcttgaattccaagtgccgaccccagcagaatgggcaacaaacaaaccaaa

SEQ ID NO: 92188 - DNA, 80 bp, synthetic construct
  source 1..80: mol_type = other DNA
aataactcagcaagccaaatacttggtatgtgaagtagttgctatgtattcaggtgcggtgagcccatgtgttctatcgg

SEQ ID NO: 92189 - DNA, 80 bp, synthetic construct
  source 1..80: mol_type = other DNA
gaaccagtgtaattaagatgaatagcaaaactctctttaaaactggcatcttgacttctaatgcggaatctcactgtctg

SEQ ID NO: 92190 - DNA, 80 bp, synthetic construct
  source 1..80: mol_type = other DNA
ctaaatcacccaccgatggctgactactgtctttaaagctagagtttgacttggtgggttccctatattgatctacaatc

SEQ ID NO: 92191 - DNA, 80 bp, synthetic construct
  source 1..80: mol_type = other DNA
tcctcagttagctccttgcatgttctgccctttaatctcaacttgccaccacttgactgtatcataatcattttctttga

SEQ ID NO: 92192 - DNA, 80 bp, synthetic construct
  source 1..80: mol_type = other DNA
ctaaattcactagtgacctcatcagcctatagagtagaaactcaacatcagtgattagtttttccttaactttgtcaata

SEQ ID NO: 92193 - DNA, 80 bp, synthetic construct
  source 1..80: mol_type = other DNA
aattgtaggaaccacaccagacatgtcaaagttcataacagagtcataactgtcaaggctaaccactcccatgtcaatgt

SEQ ID NO: 92194 - DNA, 80 bp, synthetic construct
  source 1..80: mol_type = other DNA
tgtaatgatccacactgatcccaacatccttcaaagcagttgtggctttcaagatcactttttgaattattgcattgaga

SEQ ID NO: 92195 - DNA, 80 bp, synthetic construct
  source 1..80: mol_type = other DNA
tccaggtctctcttcgttgactctaatgacaccaacctatcattaacacttatgaaagaagttcccaaccaaccttttgt

SEQ ID NO: 92196 - DNA, 80 bp, synthetic construct
  source 1..80: mol_type = other DNA
ctccacccaatcttccacagtttctaaaactgttcccaagaccaccatataattgttaggtatcgccgctctcaatgtag

SEQ ID NO: 92197 - DNA, 80 bp, synthetic construct
  source 1..80: mol_type = other DNA
acacttgtgctttgtctgatcatgcttgcttgcaaggagaatcagcacatcaaaaatcagtaaaagtttcctccttgtgt

SEQ ID NO: 92198 - DNA, 80 bp, synthetic construct
  source 1..80: mol_type = other DNA
acttgactttgttcaaaaatgacctccagcattgcatctggcattctctagtgtctaagttatctcttttatcatcatca

SEQ ID NO: 92199 - DNA, 80 bp, synthetic construct
  source 1..80: mol_type = other DNA
ccatcaatacttgcatacaggaatctcagtattggcgatgctcttttaaactggtagattaaatgctcaacactatcttc

SEQ ID NO: 92200 - DNA, 80 bp, synthetic construct
  source 1..80: mol_type = other DNA
aaacaatgtctactcctgaccactgcatcctcaattttgacctgtctaacatcatagcacttaatgctccagtcagtaag

SEQ ID NO: 92201 - DNA, 80 bp, synthetic construct
  source 1..80: mol_type = other DNA
gtctttggcacaggctatatcctcttccatgcttggctggtggtgcagtggctaagttttggtggcttggggaatggttt

SEQ ID NO: 92202 - DNA, 80 bp, synthetic construct
  source 1..80: mol_type = other DNA
gaaggatggtttggggaactgcccaaaaagatagttagttaaaagatagcttaaaaggatagccttaatgcctaggatcc

SEQ ID NO: 92203 - DNA, 80 bp, synthetic construct
  source 1..80: mol_type = other DNA
atgggggcaaaggttgctaatctcttgtcgcattcccacaaaccccctctatgcacaaccaatggaactggctccacaca

SEQ ID NO: 92204 - DNA, 80 bp, synthetic construct
  source 1..80: mol_type = other DNA
aaattacttcatctaaatcacccaccgatggttgattactgtctttaaagcaagagtttgacttagtgggttctctatat

SEQ ID NO: 92205 - DNA, 80 bp, synthetic construct
  source 1..80: mol_type = other DNA
tgatccacaatcttttcaatagtctccttcaactgatcaaaataaatgctggcatttccttcaagtagaacttcatccaa

SEQ ID NO: 92206 - DNA, 80 bp, synthetic construct
  source 1..80: mol_type = other DNA
actcaatgtcctcaatcctctcatcatcctcagccagctctttgcatgttctacccctcagtctcaacttgccaccactt

SEQ ID NO: 92207 - DNA, 80 bp, synthetic construct
  source 1..80: mol_type = other DNA
tctaggtctctcttcgttgattctaatgacaccaatctatcattaacactgataaaagaggatcccaaccaaccttttgg

SEQ ID NO: 92208 - DNA, 80 bp, synthetic construct
  source 1..80: mol_type = other DNA
aaaatgacctccaacattgcatctggcattctctagcgtctaagctatctctcttattatcatcactatcaatacttgca

SEQ ID NO: 92209 - DNA, 80 bp, synthetic construct
  source 1..80: mol_type = other DNA
ccgaagttgtcatgtcatcagaatacaaactgttaaattcatcaagtaagtgttctttgtcaacctccacgaattgagct

SEQ ID NO: 92210 - DNA, 80 bp, synthetic construct
  source 1..80: mol_type = other DNA
cttcacccctagccaagtatggaagaggacatagcctgtgccaaagacttagttgcaaaatacctggcagacaatgaaag

SEQ ID NO: 92211 - DNA, 80 bp, synthetic construct
  source 1..80: mol_type = other DNA
acctagcatattgtaggagactcaaagttcttgtttgaattaagttgcataaatgaacaggaacaccgtttgcaattgat

SEQ ID NO: 92212 - DNA, 80 bp, synthetic construct
  source 1..80: mol_type = other DNA
gaaagaaaaatcagattctgcagcacagctaagaaaagaaatggacacatcatcggaccccatttgctgtggtccatact

SEQ ID NO: 92213 - DNA, 80 bp, synthetic construct
  source 1..80: mol_type = other DNA
aattgtgggaactacaccagacatatcaaagctcataacagaatcgtaacagtcaaggctgaccactcccatgtcaatgc

SEQ ID NO: 92214 - DNA, 80 bp, synthetic construct
  source 1..80: mol_type = other DNA
atcaccattctcaatgtagaaacaatatccactcctgtccattgcatcttcaattttgacctgtctaatatcatggcact

SEQ ID NO: 92215 - DNA, 80 bp, synthetic construct
  source 1..80: mol_type = other DNA
caccggggatcctaggcaatttgattgttctctcttcttccttttcgaatcccaggtgtaagtccccgcagaatgggcaa

SEQ ID NO: 92216 - DNA, 80 bp, synthetic construct
  source 1..80: mol_type = other DNA
ctcattgatcacctcagtatcaacataccatgctgatttccccttgaaggtaggcccagacaagactagcctccaacagt

SEQ ID NO: 92217 - DNA, 80 bp, synthetic construct
  source 1..80: mol_type = other DNA
taccagtataatcaagatgaatggcaaaactttctttgaaactagcatcttgactcctaatgcgaaatcttactgtctga

SEQ ID NO: 92218 - DNA, 80 bp, synthetic construct
  source 1..80: mol_type = other DNA
ctcaacttcgcagatcctgagggcaatgattcaacagcatcaagaaaatcctcaagtgaatcaaacctggaatcaactaa

SEQ ID NO: 92219 - DNA, 80 bp, synthetic construct
  source 1..80: mol_type = other DNA
tcctgatgcaatcaactgattttggttgaacctggctggctcaatatcaaagtctatccaagcataacccatcattagat

SEQ ID NO: 92220 - DNA, 80 bp, synthetic construct
  source 1..80: mol_type = other DNA
ctctcttccatttcaccacatgtgacacgagggatagggcctcacaattgacatccaatgcaacacaaaggtctaagaac

SEQ ID NO: 92221 - DNA, 80 bp, synthetic construct
  source 1..80: mol_type = other DNA
tttattctgggtgaccacttcattttggtagatgctaaatcactcataaagggtaatatatgcttctcaaatactgatgg

SEQ ID NO: 92222 - DNA, 80 bp, synthetic construct
  source 1..80: mol_type = other DNA
gtttggttgaatgtaacaaccattacttatgtcttaattgtctttcattgcttctgagtgtcagcagtaggtgccccatc

SEQ ID NO: 92223 - DNA, 80 bp, synthetic construct
  source 1..80: mol_type = other DNA
tctatcgcagttgataaagaaatgcacatgtaatcccacaacaaaggtctaaaataactaattattccctcatttccgtt

SEQ ID NO: 92224 - DNA, 80 bp, synthetic construct
  source 1..80: mol_type = other DNA
tgatttctaacacccaaggaattgaattgttaacaaacactcatggagttcagttctggaaagttccactggatcttaga

SEQ ID NO: 92225 - DNA, 80 bp, synthetic construct
  source 1..80: mol_type = other DNA
gagactgtatagatcttatgtataaactttctttatttggtcctcgaacacacttactacccaatgttctacataaaccc

SEQ ID NO: 92226 - DNA, 80 bp, synthetic construct
  source 1..80: mol_type = other DNA
agtatattattttttgcctcaaaaccattctaagagggtgatggctagccagatttaaccaagagtactctaggtcagat

SEQ ID NO: 92227 - DNA, 80 bp, synthetic construct
  source 1..80: mol_type = other DNA
tctgatgggggctcaacacctagcatttcgcatagatttttgagtgaagagaggtgctctccagataggtagtttgttgt

SEQ ID NO: 92228 - DNA, 80 bp, synthetic construct
  source 1..80: mol_type = other DNA
tgaagttgcccagtctttagtctgttgaacaatttcctcaacatggacctgatcttgttacaagcatcaggaatcaaccc

SEQ ID NO: 92229 - DNA, 80 bp, synthetic construct
  source 1..80: mol_type = other DNA
ttctatctgtctcataattctgtaactacgattcccatctacccagtctctaacatccgtttcacaattcaataagaatg

SEQ ID NO: 92230 - DNA, 80 bp, synthetic construct
  source 1..80: mol_type = other DNA
tgcaaaatgccccttcccacaagactaaggccatcaacagctccaacagcaccaccagtcaacacagacaacaccaccaa

SEQ ID NO: 92231 - DNA, 80 bp, synthetic construct
  source 1..80: mol_type = other DNA
gatcaatggggtacctagcatactgtagaagacttaaggttctcacttgaatcaagttgcataggtggacagggacgccg

SEQ ID NO: 92232 - DNA, 80 bp, synthetic construct
  source 1..80: mol_type = other DNA
tttgcgactgattgatcaataattgtatctattgtctccgcaagttggtgtggttccttacacttaatgttatgaagagc

SEQ ID NO: 92233 - DNA, 80 bp, synthetic construct
  source 1..80: mol_type = other DNA
tgcagcaacaaacttagtcaacaatggcacctcatccccccatacatagaatcttgatttgaactcagcaacaaatctac

SEQ ID NO: 92234 - DNA, 80 bp, synthetic construct
  source 1..80: mol_type = other DNA
ttttggggctcacaaatttgtttagttgatcactcaggtaatagtggaactcaatcaaggttttgaattcttctgggtcc

SEQ ID NO: 92235 - DNA, 80 bp, synthetic construct
  source 1..80: mol_type = other DNA
tcaacagctccaacagcaccaccagtcaacacagacaacaccaccaatcctccaccatacagcccctaatccaccgccca

SEQ ID NO: 92236 - DNA, 80 bp, synthetic construct
  source 1..80: mol_type = other DNA
tcctccaccatacagcccctaatccaccgcccagctccaccaccctctcctccccccgacagcccccgggtggacccgcc

SEQ ID NO: 92237 - DNA, 80 bp, synthetic construct
  source 1..80: mol_type = other DNA
atctaaaattcagattttttgatctgtaatgggtgtacctacccatgagtctatttgcattcataatcaaaagtatagat

SEQ ID NO: 92238 - DNA, 80 bp, synthetic construct
  source 1..80: mol_type = other DNA
ttgaaacattgaaagtattcttgatcacaatatgtccttgttgccactgcctttgtcagttccccaatggggcattgaga

SEQ ID NO: 92239 - DNA, 80 bp, synthetic construct
  source 1..80: mol_type = other DNA
agacaatttctataaagaattttgtgatgctgtgtatgagaaccacaagctaaaaaagaagtacttttattgtggtcaca

SEQ ID NO: 92240 - DNA, 80 bp, synthetic construct
  source 1..80: mol_type = other DNA
ggtaagacttcctgatcaaaatcctcaaccatatgatttgacaactcacttttgattagcctaatatagaatttatttga

SEQ ID NO: 92241 - DNA, 80 bp, synthetic construct
  source 1..80: mol_type = other DNA
aattacttcatccaagtcatccactgacggttgatcactgtctccagagctagaatttgatttgatgggctccctatact

SEQ ID NO: 92242 - DNA, 80 bp, synthetic construct
  source 1..80: mol_type = other DNA
gccgggggcccccccgggggaaggcagccaccgccaaaagctactcaatatcctcgatcctctcactctcctctaccagc

SEQ ID NO: 92243 - DNA, 80 bp, synthetic construct
  source 1..80: mol_type = other DNA
ggtccacaattttctcaacagtctcttttaattgatcaaaatagatgcttgcattcccttcgagtagaacctcatctaaa

SEQ ID NO: 92244 - DNA, 80 bp, synthetic construct
  source 1..80: mol_type = other DNA
tcagctttgtcaacatcagttccttgctgccgagatcccaagactaaattactcattgcctgttgcaccttatactcata

SEQ ID NO: 92245 - DNA, 80 bp, synthetic construct
  source 1..80: mol_type = other DNA
gtcctgtttattcaggagatgctttccttttcttgaaaaaacctcagtcaattgtgacacagccagtgctgtgagtttat

SEQ ID NO: 92246 - DNA, 80 bp, synthetic construct
  source 1..80: mol_type = other DNA
tttagtatcctggaaccatctgtatacttatttacaacaacacttttgttactggctaaatccagagctgtagcgcaacc

SEQ ID NO: 92247 - DNA, 80 bp, synthetic construct
  source 1..80: mol_type = other DNA
acttgtgatgagtgggtctttaatttccttcttcacctctttttctttaaataacgaaccattattgaaagaggatgtaa

SEQ ID NO: 92248 - DNA, 80 bp, synthetic construct
  source 1..80: mol_type = other DNA
tctgagcaaagaggggtgcacaagcaccagtgggcctaattataaaaaaccaggtgtgtcaaagaagtttctttcccttc

SEQ ID NO: 92249 - DNA, 80 bp, synthetic construct
  source 1..80: mol_type = other DNA
aacttttttgcattatagaccatgtcctccagctcttcttctgttgctgcatctgagggattaatgtttacatgtccaaa

SEQ ID NO: 92250 - DNA, 80 bp, synthetic construct
  source 1..80: mol_type = other DNA
tgataaaatgacacatataggacacattcaggatgaatttgaacctattggtcaacatactcttgacatccttgtgtaag

SEQ ID NO: 92251 - DNA, 80 bp, synthetic construct
  source 1..80: mol_type = other DNA
accagattcaccagtgatctcatcagcctatagagtaagaattcagtatcagtgatcagcctttcctttattttatcaat

SEQ ID NO: 92252 - DNA, 80 bp, synthetic construct
  source 1..80: mol_type = other DNA
tgctatagcaaatctaaaaggatgacaatgatacagtcaagtggtggaaagttgagattgaagggtagaacatgtaagga

SEQ ID NO: 92253 - DNA, 80 bp, synthetic construct
  source 1..80: mol_type = other DNA
gagatccttgtgatagtaatcagatacatatgccataataaagtatcttaagttttggaggagtttttgagaacgtttac

SEQ ID NO: 92254 - DNA, 80 bp, synthetic construct
  source 1..80: mol_type = other DNA
tagggtgggccaagattataactaagatcatttttgttagtgatttgatgttgtgtaactgctcttctaactcactgcaa

SEQ ID NO: 92255 - DNA, 80 bp, synthetic construct
  source 1..80: mol_type = other DNA
tcttcaatccaagtgatcatggtgttcactgtagtctgcaagacctcagctgagaatatcgctgggaagtacctcttagg

SEQ ID NO: 92256 - DNA, 80 bp, synthetic construct
  source 1..80: mol_type = other DNA
atcagcataaaacgaacaaacttcgccaactatattatcattgattgcataacattttgagcactcccccgttttttgat

SEQ ID NO: 92257 - DNA, 80 bp, synthetic construct
  source 1..80: mol_type = other DNA
agaccagctgaaaattagcaccacttaatgaaaactcctgacagtacgcctctttgcacctcaccacttgatacctagca

SEQ ID NO: 92258 - DNA, 80 bp, synthetic construct
  source 1..80: mol_type = other DNA
ggcccaaactcattttgtctcaatttgacagtagatgaggttttcattgagttgactaaggcaagacttaatgaggagag

SEQ ID NO: 92259 - DNA, 80 bp, synthetic construct
  source 1..80: mol_type = other DNA
cctttcaaggtcaagagttcctgacaattctacagcccccatggtataaggaaacttttcttcttgtgatttttgataac

SEQ ID NO: 92260 - DNA, 80 bp, synthetic construct
  source 1..80: mol_type = other DNA
taattgtaggagctacaccagacatgtcaaaattcaaaactgaatcataactgtcagggcagattatttccatattgatg

SEQ ID NO: 92261 - DNA, 80 bp, synthetic construct
  source 1..80: mol_type = other DNA
ttgtaatggtctgtactgatcccaacatctttcaaagcaacagtggctttcaaaatcactttttggatcattgcaccaag

SEQ ID NO: 92262 - DNA, 80 bp, synthetic construct
  source 1..80: mol_type = other DNA
aatttgatttttgttcatgtattgggaagcctgtggaaacctggttttttcaacctgttgccttcgctcaagccactttt

SEQ ID NO: 92263 - DNA, 80 bp, synthetic construct
  source 1..80: mol_type = other DNA
ccaaatctctttttgttgattccaaagatactagcctgtcattgacactaatgaaacaagatcccagccaacctcttgaa

SEQ ID NO: 92264 - DNA, 80 bp, synthetic construct
  source 1..80: mol_type = other DNA
cacctgcgcttcatctggtcatgtttgcttgcaaggaggatcaacacatcaaaaatcagtaggagttttctccttgtgtt

SEQ ID NO: 92265 - DNA, 80 bp, synthetic construct
  source 1..80: mol_type = other DNA
attccacccaatcatccacggcttccagaactgcacccaagacccccatatagtcattaggcatcaccatttttagtgta

SEQ ID NO: 92266 - DNA, 80 bp, synthetic construct
  source 1..80: mol_type = other DNA
acttaactttatttaaaaatgatctccagcattgcatctgacactctctagtgtcttggccatccccctcactgccactg

SEQ ID NO: 92267 - DNA, 80 bp, synthetic construct
  source 1..80: mol_type = other DNA
tcatcaatgtttgcatataagaatctcaatattggtgatgctcttttaaattggaaaactaaatgttcaatgctgtcttc

SEQ ID NO: 92268 - DNA, 80 bp, synthetic construct
  source 1..80: mol_type = other DNA
tggggctaccatgtcatcggcatacaaattattaaattcatcaactagatgttccttctcgaccttcacaaactgacttt

SEQ ID NO: 92269 - DNA, 80 bp, synthetic construct
  source 1..80: mol_type = other DNA
ttatttcccctctccttagcctattcctaaatatttgatactcttcttcaatttgagacttcacttcataagctgttagc

SEQ ID NO: 92270 - DNA, 80 bp, synthetic construct
  source 1..80: mol_type = other DNA
ttgttgtttatgccttgatggcacacagcaatcagctcttcataatgatttgaacgattatctaacagagcattcaagct

SEQ ID NO: 92271 - DNA, 80 bp, synthetic construct
  source 1..80: mol_type = other DNA
ctctacacctgacaacctccctgacgtcatagacaaagactcacagagtctactatattctgactcctcaaagagtgagt

SEQ ID NO: 92272 - DNA, 80 bp, synthetic construct
  source 1..80: mol_type = other DNA
tgctctcttgagcgtatctgagcagagaaaaaagcgtgtccctcaacttatcattgacccaatcaggtatctgcttgttg

SEQ ID NO: 92273 - DNA, 80 bp, synthetic construct
  source 1..80: mol_type = other DNA
tagaatgatgtcctcccatctatgagtggtatgagattgatgtcaatgcttttcaaatcctcctttagttgttccagttt

SEQ ID NO: 92274 - DNA, 80 bp, synthetic construct
  source 1..80: mol_type = other DNA
tctaaagtcctcaatgtatttctgttcaaaattggctggagatgatcttacaaaacactctaacagaatcaaaatattgc

SEQ ID NO: 92275 - DNA, 80 bp, synthetic construct
  source 1..80: mol_type = other DNA
ccatccggaactacgaaacatagtgaaggagtcaaaaccccatgttcatggaggattctttctacagacttgtcatcact

SEQ ID NO: 92276 - DNA, 80 bp, synthetic construct
  source 1..80: mol_type = other DNA
gaaatgatatccatccctgaccattgcattctcaattttaacctgtctaacatcattgcacttaatgccccagtcagtaa

SEQ ID NO: 92277 - DNA, 80 bp, synthetic construct
  source 1..80: mol_type = other DNA
gttgtgtacacagcaattcgcatcacaagaatcaatttcaatgcagagggacaagagtttcaacccttccatcaaaagca

SEQ ID NO: 92278 - DNA, 80 bp, synthetic construct
  source 1..80: mol_type = other DNA
ttctaggctctgtttgaacaagaaacgctaacttctgccttgaaagcttctcattatctgctaggtattttgcgaccaag

SEQ ID NO: 92279 - DNA, 80 bp, synthetic construct
  source 1..80: mol_type = other DNA
tccttggcacaggctatgtcctcctccatgttggaagacttattgtttgttctctgactgggcgactggttggggtggca

SEQ ID NO: 92280 - DNA, 80 bp, synthetic construct
  source 1..80: mol_type = other DNA
ctgttcttgttgggtgagacctcgctgggaacagtttgggaagtgcgcagctcaggaggataactgaagagacagcttaa

SEQ ID NO: 92281 - DNA, 80 bp, synthetic construct
  source 1..80: mol_type = other DNA
ttgggaagtgcgcagctcaggaggataactgaagagacagcttaaaagacaggtttttaggatgtccttaatgcctagga

SEQ ID NO: 92282 - DNA, 80 bp, synthetic construct
  source 1..80: mol_type = other DNA
gctatgagaagtgtcccccacttctctcacaaacatttcaagatcctggtcctgcacgacaggggcaaaggacgccaact

SEQ ID NO: 92283 - DNA, 80 bp, synthetic construct
  source 1..80: mol_type = other DNA
caagcagaccaaaactccagaagtgaaagacagtccaagggccagtctgataccagacgccacgcacctggggccacagt

SEQ ID NO: 92284 - DNA, 80 bp, synthetic construct
  source 1..80: mol_type = other DNA
tatcgcattcccacaaaccccctctatgcacaaccaacgggactggttccacagaaggacccaccagcgtgaaatcatac

SEQ ID NO: 92285 - DNA, 80 bp, synthetic construct
  source 1..80: mol_type = other DNA
tctgtgaattgcaacttttccacatctacaacaatatccataggggtcacctgtcccaattgatttgcatcagtcaaaaa

SEQ ID NO: 92286 - DNA, 80 bp, synthetic construct
  source 1..80: mol_type = other DNA
agactcttaccactccatctctccctacctgagttcctcgattaccaccagccattcctatcatgttcaaaagagccctc

SEQ ID NO: 92287 - DNA, 80 bp, synthetic construct
  source 1..80: mol_type = other DNA
atactggagttcacggtggaaatcacccaccaaattgattaacacaaagcgcaatccaatagcctaggatccactgtgcg

SEQ ID NO: 92288 - DNA, 80 bp, synthetic construct
  source 1..80: mol_type = other DNA
ctttttgtttgcacttttttgcattccccttgtgttctaagtgccaaccccaacagaatgggcaacaggcaagtcaaggc

SEQ ID NO: 92289 - DNA, 80 bp, synthetic construct
  source 1..80: mol_type = other DNA
cctctccaccccccggggggaagagactcaccaccaaagaatcactcaatgtcctcaatcctctcatcctcttcagctag

SEQ ID NO: 92290 - DNA, 80 bp, synthetic construct
  source 1..80: mol_type = other DNA
tcactcaatgtcctcaatcctctcatcctcttcagctagctttttgcatgttctgcctttcagcctcaacttgccgccac

SEQ ID NO: 92291 - DNA, 80 bp, synthetic construct
  source 1..80: mol_type = other DNA
ctaaatcacccaccgatggttgaccactgtttttaaagccagagcttgacttactgggttccctatattggtccacaatc

SEQ ID NO: 92292 - DNA, 80 bp, synthetic construct
  source 1..80: mol_type = other DNA
gctatagcaagtcaaagaaaatgattatgatacaatcaagtggcggcaagttgaggctgaaaggcagaacatgcaaaaag

SEQ ID NO: 92293 - DNA, 80 bp, synthetic construct
  source 1..80: mol_type = other DNA
ttacacaaaaccaggttcatcaatgacctcatcaacttataaagtaggaactcaacatcagtaatcagtttttccttcac

SEQ ID NO: 92294 - DNA, 80 bp, synthetic construct
  source 1..80: mol_type = other DNA
agagagcataccccttgaattccacccaatcatccacagcttctagaactgttcccaggacccccatgtaattgtcaggt

SEQ ID NO: 92295 - DNA, 80 bp, synthetic construct
  source 1..80: mol_type = other DNA
tctcgagatcaagagtctccatcagttcaacagcccccatagtgtaaggaaacttctcctcctgtgatctctgataacta

SEQ ID NO: 92296 - DNA, 80 bp, synthetic construct
  source 1..80: mol_type = other DNA
attgtaggaactacaccagacatgttaaagctcataacagagtcataactgttaaggcagaccacccccatgtcaatgtt

SEQ ID NO: 92297 - DNA, 80 bp, synthetic construct
  source 1..80: mol_type = other DNA
atcgctgtcaatactcgcatacaggaacctcagtattggcgatgctctcttgaactggtagattaaatgctcaacagtat

SEQ ID NO: 92298 - DNA, 80 bp, synthetic construct
  source 1..80: mol_type = other DNA
attactatcctcaatatggaaacaatatctactcctgaccattgcatcctcaactttaacctgtccaacatcatggcact

SEQ ID NO: 92299 - DNA, 80 bp, synthetic construct
  source 1..80: mol_type = other DNA
aggccatatcctcttccatgcttgattgggggtgcagtggctaggcctttagcggttgaagaatggtttgaaagacagtt

SEQ ID NO: 92300 - DNA, 80 bp, synthetic construct
  source 1..80: mol_type = other DNA
agacagttaagatgatagcccaaaaagacaattaaaaaagataccttaaaaagatagcctaaatgcctaggatcctcggt

SEQ ID NO: 92301 - DNA, 80 bp, synthetic construct
  source 1..80: mol_type = other DNA
aatcctgagaagtgtccccaacctctctcacaaacatttcaagatcctgatcctgcatgatgggagcaaaggtggccagc

SEQ ID NO: 92302 - DNA, 80 bp, synthetic construct
  source 1..80: mol_type = other DNA
cttttgtcgcattcccacaagccccctctatgcacaaccaatggaaccggctccatacaaggacccaccaacgtaaaatc

SEQ ID NO: 92303 - DNA, 80 bp, synthetic construct
  source 1..80: mol_type = other DNA
tgttaagctgatgtgtttggaatgcacacagtgaagatcactccccaagtagattgtcacaaagcgcaatctaatagcct

SEQ ID NO: 92304 - DNA, 80 bp, synthetic construct
  source 1..80: mol_type = other DNA
gtttggaatgcacacagtgaagatcactccccaagtagattgtcacaaagcgcaatctaatagcctaggatccactgtgc

SEQ ID NO: 92305 - DNA, 80 bp, synthetic construct
  source 1..80: mol_type = other DNA
agactctcaccactccatccctccctgcttgaactccttgattaccaccagccattcctatcatgttcaggagagctctt

SEQ ID NO: 92306 - DNA, 80 bp, synthetic construct
  source 1..80: mol_type = other DNA
cgctgtgttggtgtgtactggggttcacggtgaagatcacccaccagactgatctgcacaaagcgcaatccaatagccta

SEQ ID NO: 92307 - DNA, 80 bp, synthetic construct
  source 1..80: mol_type = other DNA
tggtgtgtactggggttcacggtgaagatcacccaccagactgatctgcacaaagcgcaatccaatagcctaggatccac

SEQ ID NO: 92308 - DNA, 80 bp, synthetic construct
  source 1..80: mol_type = other DNA
agttaaaatgctttgggaatacggcggtagcaaaatgcaatgaaaaacacgacgaggaattctgtgacatgctgagactg

SEQ ID NO: 92309 - DNA, 80 bp, synthetic construct
  source 1..80: mol_type = other DNA
ggggatcctaggcaatttgattgctctttcttagaacttcaggtgcaagtccttgcagaatgggcaacaaacagaccaaa

SEQ ID NO: 92310 - DNA, 80 bp, synthetic construct
  source 1..80: mol_type = other DNA
ggtacactcactacaaatcaaaaaatctgaattttagatttgatatgggtaaactttctgatgatgttaggatcagtgag

SEQ ID NO: 92311 - DNA, 80 bp, synthetic construct
  source 1..80: mol_type = other DNA
agattacttcatctaagtcactcaccgacggttgatcactgcctccagagctagaatttggtttgatgggctccttatac

SEQ ID NO: 92312 - DNA, 80 bp, synthetic construct
  source 1..80: mol_type = other DNA
tggcacaggctatatcctcttccatgttactggaagagtggttgttgattccctaatcgggtgactgactagggtgataa

SEQ ID NO: 92313 - DNA, 80 bp, synthetic construct
  source 1..80: mol_type = other DNA
tgttcttgttgggtggggtctcacggggagtggtttgaagggtgttcacttaacagaataattaaagagacaatttaaaa

SEQ ID NO: 92314 - DNA, 80 bp, synthetic construct
  source 1..80: mol_type = other DNA
tgaagggtgttcacttaacagaataattaaagagacaatttaaaagacaattttttgtaagatggccttaatgcctagga

SEQ ID NO: 92315 - DNA, 80 bp, synthetic construct
  source 1..80: mol_type = other DNA
tgagcatcatcagctgagaataagtgagtccagctgcaaagcctgctgactgtaaagacttattggaaccactaggccca

SEQ ID NO: 92316 - DNA, 80 bp, synthetic construct
  source 1..80: mol_type = other DNA
accttctgtggctttccgtcagattctagatccacaacagtgttttcccaagctcttccagttattgatgtcctcgatgc

SEQ ID NO: 92317 - DNA, 80 bp, synthetic construct
  source 1..80: mol_type = other DNA
aaatcctcaccactccgtctctccctgcttgggctccttgattgccaccagtcattcctatcatgttcaggagggcccgt

SEQ ID NO: 92318 - DNA, 80 bp, synthetic construct
  source 1..80: mol_type = other DNA
tgttgagccgatgtgtttaggaaacacacagtgaaaatcacccaccaagtagattgacacaaagcgcaatctaatagcct

SEQ ID NO: 92319 - DNA, 80 bp, synthetic construct
  source 1..80: mol_type = other DNA
tttaggaaacacacagtgaaaatcacccaccaagtagattgacacaaagcgcaatctaatagcctaggatccactgtgcg

SEQ ID NO: 92320 - DNA, 80 bp, synthetic construct
  source 1..80: mol_type = other DNA
aaccagatggatgttgattgaggctgaattgaaatgttttggtaatacggcggtagcaaaatgtaatgagaaacacgacg

SEQ ID NO: 92321 - DNA, 80 bp, synthetic construct
  source 1..80: mol_type = other DNA
aggaattctgtgacatgctgagactatttgatttcaataagcaagccatccagagattgaagactgaagcacaaatgagt

SEQ ID NO: 92322 - DNA, 80 bp, synthetic construct
  source 1..80: mol_type = other DNA
ggggatcctaggcaatttgagtttctgtctagacaaccctccctggaggaccaacccaccaaccccagcagagagccccc

SEQ ID NO: 92323 - DNA, 80 bp, synthetic construct
  source 1..80: mol_type = other DNA
cccaccagtgtgaaatcatactgtgaaaactgcagcttcctcagatcaacaactatctcaatgggggttacaggccctaa

SEQ ID NO: 92324 - DNA, 80 bp, synthetic construct
  source 1..80: mol_type = other DNA
ttctttagtgtcctctaggaactcattaatgacctcagtatcgacaaaccatgcagatttccccttgaaaacagatccag

SEQ ID NO: 92325 - DNA, 80 bp, synthetic construct
  source 1..80: mol_type = other DNA
acagcacaagcctccagcagtcaggcagcacacattggttgactgatccggaaaacatggcttcaacattatcaactaaa

SEQ ID NO: 92326 - DNA, 80 bp, synthetic construct
  source 1..80: mol_type = other DNA
tacttaccctgatgatttattgagccaatgaaattaagatgaatagaaaaattttctttaaaacttgcgtcttggcttct

SEQ ID NO: 92327 - DNA, 80 bp, synthetic construct
  source 1..80: mol_type = other DNA
gatttggaatcttattgtctggctgaatctcactgaaccaactggtagttcactgattccatctaagaagtcttcaagac

SEQ ID NO: 92328 - DNA, 80 bp, synthetic construct
  source 1..80: mol_type = other DNA
atttaaatttgacatcagttaacccacacatgatcaactgactgtaattgagttttgctggttctaaatcataatcaatc

SEQ ID NO: 92329 - DNA, 80 bp, synthetic construct
  source 1..80: mol_type = other DNA
catgcataacccatcatcaaatcatatttgaacataggtctttctatacctttgtataccaccttctcaacaaaagagga

SEQ ID NO: 92330 - DNA, 80 bp, synthetic construct
  source 1..80: mol_type = other DNA
aaaccagagcaccccagaccaaccctgctacccgacgcatcccacctgggcccccaattctgcaagagctgctggtttga

SEQ ID NO: 92331 - DNA, 80 bp, synthetic construct
  source 1..80: mol_type = other DNA
aaaggggccaagtctctgcaaaccttcaccctctgggatagaggttttatgagggaaccatgtaaatgatccaagcgttc

SEQ ID NO: 92332 - DNA, 80 bp, synthetic construct
  source 1..80: mol_type = other DNA
tagttgttgcaacaaacgatctgatgtacgactcaaaataaatctgtctcataaaattatcaacaacgtcactcgagctg

SEQ ID NO: 92333 - DNA, 80 bp, synthetic construct
  source 1..80: mol_type = other DNA
acaaccctttcttctatcatgggttcatgtgtcctggtgtgtgacaatctcagctcagatgaaagcactatgtagtgttc

SEQ ID NO: 92334 - DNA, 80 bp, synthetic construct
  source 1..80: mol_type = other DNA
ttaattctaggtgaccacttcattttagtcgaggccaaatcactcatgaagggcaacaaatgtttctcaaacagactggg

SEQ ID NO: 92335 - DNA, 80 bp, synthetic construct
  source 1..80: mol_type = other DNA
gtacagtctccttaatgagtgtattatatggttcatgccaactctatcttctagcaatttagaagcagtaggttttaagg

SEQ ID NO: 92336 - DNA, 80 bp, synthetic construct
  source 1..80: mol_type = other DNA
gaaagtagtcacatgggttatgtttgaaaaactccagctgtcctgctggcttagggttccctagaacccatgcccccaac

SEQ ID NO: 92337 - DNA, 80 bp, synthetic construct
  source 1..80: mol_type = other DNA
tctatcgctgttgataatgaaatgcacatataatcccataacaaagatctgaaataagataggacactcttcccttcaga

SEQ ID NO: 92338 - DNA, 80 bp, synthetic construct
  source 1..80: mol_type = other DNA
ctcttctcttaccctcattgggaccctccaaatctggactccaaggtcgttagttaaacactcaacgccctgaattgcca

SEQ ID NO: 92339 - DNA, 80 bp, synthetic construct
  source 1..80: mol_type = other DNA
ggacctcagattgcagtgatttgatgtataggttttccttgttagaccccctcacacacttgctgccaagtgttctgcat

SEQ ID NO: 92340 - DNA, 80 bp, synthetic construct
  source 1..80: mol_type = other DNA
gaacaagggactggtggagtgtaataaccattacctctgtctaaactgtctcacactgcttctcagcgtgagcgacagat

SEQ ID NO: 92341 - DNA, 80 bp, synthetic construct
  source 1..80: mol_type = other DNA
aatcctacaaagcctgaagcgattgaactttggaaagcagatttatttatggcctcagatagcagtttctgagctcctct

SEQ ID NO: 92342 - DNA, 80 bp, synthetic construct
  source 1..80: mol_type = other DNA
agtgaatgtagaagacaatttattctgaatggttttcactattgttggtattctctcatcatctaaactcactgccccag

SEQ ID NO: 92343 - DNA, 80 bp, synthetic construct
  source 1..80: mol_type = other DNA
cataaatcaccttctgtctcagcaccattcttaatgggtgatgtgtagccagattcaaccaacaaatttctagatcagag

SEQ ID NO: 92344 - DNA, 80 bp, synthetic construct
  source 1..80: mol_type = other DNA
tcatccaacatctcagtacccattaactcgcataaattccttaatgaagaaacatgttcacctgacagataattggtggt

SEQ ID NO: 92345 - DNA, 80 bp, synthetic construct
  source 1..80: mol_type = other DNA
aaattcctcatgcaactcacctgtctttaatttgttaaacaactttcttagcattgatcttaccttactacaagcctctg

SEQ ID NO: 92346 - DNA, 80 bp, synthetic construct
  source 1..80: mol_type = other DNA
gggccaactcttcaatcagtctcatgatcctgtaactacggttgccgtcaacccaatccctaacatctgtgttgcaattg

SEQ ID NO: 92347 - DNA, 80 bp, synthetic construct
  source 1..80: mol_type = other DNA
agtaagaatgggtcaatggggtacctcgcatacttcagcaagttcaaagttctcttctgaataagattacataggctaac

SEQ ID NO: 92348 - DNA, 80 bp, synthetic construct
  source 1..80: mol_type = other DNA
tggaacaccgttagcaatggactgatcaattatggtgtcaattgtctctgctaactggtgtggttctttacacttaacat

SEQ ID NO: 92349 - DNA, 80 bp, synthetic construct
  source 1..80: mol_type = other DNA
acttcgtcaagaggggaacctcatcaccccagacataaaatcttgatttaaattctgctacaaatcttccaatcacactt

SEQ ID NO: 92350 - DNA, 80 bp, synthetic construct
  source 1..80: mol_type = other DNA
ttcgggctgacaaacttatttaactgatcactcatatagtaatgaaattctaacagggttttaaactcatcttggtctct

SEQ ID NO: 92351 - DNA, 80 bp, synthetic construct
  source 1..80: mol_type = other DNA
gtcctatttgtaagatgcccctccccaccaagctggcagtccgaacccaaccaagtgcacccccactcaaccagggcaac

SEQ ID NO: 92352 - DNA, 80 bp, synthetic construct
  source 1..80: mol_type = other DNA
agacattaactctgtcaggttctggtcaaaaagagaaatttggtcatcactagaagtgtaagcatcaacttgccctccac

SEQ ID NO: 92353 - DNA, 80 bp, synthetic construct
  source 1..80: mol_type = other DNA
aaacacaactcacagcatagtttataaatctctccgaaatgagtccataaaagtctgaagtgttgtgcagaataccttgc

SEQ ID NO: 92354 - DNA, 80 bp, synthetic construct
  source 1..80: mol_type = other DNA
tctgttagtgtctgagatgtactctttctcaacccaagttgtgcctttatataagatttcatcattgctgacactacatt

SEQ ID NO: 92355 - DNA, 80 bp, synthetic construct
  source 1..80: mol_type = other DNA
aaagggaatttctaccatcttgtgcatgtgccatgccaatagtgttgagagataatcctttcctttggcatcagcctgag

SEQ ID NO: 92356 - DNA, 80 bp, synthetic construct
  source 1..80: mol_type = other DNA
tgtccccagtgagtagaattaagttctgtagggttgcaaggaataggaatgggcacatcataggaccccatttgctgtgg

SEQ ID NO: 92357 - DNA, 80 bp, synthetic construct
  source 1..80: mol_type = other DNA
tccatgctgtaggatacatgtgcttgtgagacatttaatttcattgacaaaattgcattctcaaactctctttcatcatt

SEQ ID NO: 92358 - DNA, 80 bp, synthetic construct
  source 1..80: mol_type = other DNA
taaacaacttcccgagaattgcgtcgtcaatgcttcaaaataatcctctatcaatcttgtgaacattttggtcctaaggt

SEQ ID NO: 92359 - DNA, 80 bp, synthetic construct
  source 1..80: mol_type = other DNA
ctccaatataaagttctctattacctccaacctgctctttgtatgacagcgagaattttagtctccctgtatcaggacca

SEQ ID NO: 92360 - DNA, 80 bp, synthetic construct
  source 1..80: mol_type = other DNA
actgagttgaatgattgtggagattcctggctataaaaacacagatttttcaacatggcagttgtgcaatttgttagtga

SEQ ID NO: 92361 - DNA, 80 bp, synthetic construct
  source 1..80: mol_type = other DNA
actcaatcctccccgcccccctacagcccctaactctcccaagacgggcccgcaccccacacccaggaacccaaccaaac

SEQ ID NO: 92362 - DNA, 80 bp, synthetic construct
  source 1..80: mol_type = other DNA
gagtgctttactaagtgcttcggagttgctctctctttcacttattctagtgtcggttgacagtttgtctgtgtcaaatt

SEQ ID NO: 92363 - DNA, 80 bp, synthetic construct
  source 1..80: mol_type = other DNA
tgaaattgagacacttcgacttatagtgggtatacctccccatcaacctgttgccattcatcaacaagagaattgatttg

SEQ ID NO: 92364 - DNA, 80 bp, synthetic construct
  source 1..80: mol_type = other DNA
aaacacaggaaatattcctgatctgaataagtcctggttacaactgcttttgttagttcaccaatagggcaagacaccat

SEQ ID NO: 92365 - DNA, 80 bp, synthetic construct
  source 1..80: mol_type = other DNA
gggtccacaataaaagtacttctgcttaaactcttggtggtgatacactatgtcacagaactctttataaaaagtgtcag

SEQ ID NO: 92366 - DNA, 80 bp, synthetic construct
  source 1..80: mol_type = other DNA
ggagtgtgttataatcaaagtcctccaccatgtggtttgagagttcccctttaatcaatctgatgtacagtttttcctta

SEQ ID NO: 92367 - DNA, 80 bp, synthetic construct
  source 1..80: mol_type = other DNA
acaatctcatttaaatcgtcaattgaacaaatctccccggttgttgagcgctggtccggtcctttcagatctctatactg

SEQ ID NO: 92368 - DNA, 80 bp, synthetic construct
  source 1..80: mol_type = other DNA
atccacaattttttctatagtttcttttaactcatcaaaatatgacatcgcattcccttcaagcaatatctcatccaggt

SEQ ID NO: 92369 - DNA, 80 bp, synthetic construct
  source 1..80: mol_type = other DNA
cggccctgtctgtttctacatctttcccttgagaccccaaaaccaaattgctcatagcctgctggactttgtactcatag

SEQ ID NO: 92370 - DNA, 80 bp, synthetic construct
  source 1..80: mol_type = other DNA
tcttgcttatctaataaatacttacctttccttgaaaaaacctcggtcaattgtgtaactgctaaggctgttagcttgtt

SEQ ID NO: 92371 - DNA, 80 bp, synthetic construct
  source 1..80: mol_type = other DNA
gaaatcataatttaagaccctacatccatctgtgtacttattaatcacaacactcttattgcttgccagatctaaagcag

SEQ ID NO: 92372 - DNA, 80 bp, synthetic construct
  source 1..80: mol_type = other DNA
acacacacacagacaaacacatagaaagacacacacacacgcacacacacccacagtccccacccgcacccccgggggga

SEQ ID NO: 92373 - DNA, 80 bp, synthetic construct
  source 1..80: mol_type = other DNA
tcgcacagccactggttgacagagggtcttttaattctttcctcacttcttttcctttaaagagtgaaccattgttaaaa

SEQ ID NO: 92374 - DNA, 80 bp, synthetic construct
  source 1..80: mol_type = other DNA
gaagatgtaagcaaggacaagtacttcttggagacaccaggtttcttgtaccttatttcagctgattccacacagcattc

SEQ ID NO: 92375 - DNA, 80 bp, synthetic construct
  source 1..80: mol_type = other DNA
cttacctaagaactttttagcgttgtacaccatttcactcaactcatccgactctgcatgatccagaggattgacgctaa

SEQ ID NO: 92376 - DNA, 80 bp, synthetic construct
  source 1..80: mol_type = other DNA
catgcccaaactctagttttggttctaagaatttctcaaagcacttgatctgatctgttagtctatcaggggtttcctta

SEQ ID NO: 92377 - DNA, 80 bp, synthetic construct
  source 1..80: mol_type = other DNA
gtgataaaatgacacatgtaagaaatgttcaaaacaaatttgaacctgtttgttagcatactagtcacattaggagataa

SEQ ID NO: 92378 - DNA, 80 bp, synthetic construct
  source 1..80: mol_type = other DNA
aacagtgcttaacagggctcttaccactctgaaaagcaagtactcaacatctgtaatcagcttctctttgatcttgttga

SEQ ID NO: 92379 - DNA, 80 bp, synthetic construct
  source 1..80: mol_type = other DNA
ttaagtctttgtgataataatcagagacaaaggccattatgaagtatctaagattttgcaaaaacttctgacatcgctta

SEQ ID NO: 92380 - DNA, 80 bp, synthetic construct
  source 1..80: mol_type = other DNA
ctagggtgggtcaagattaaaaccaaaatcattttggttagcactttaattgaggatatatcatccttaagctcagaaca

SEQ ID NO: 92381 - DNA, 80 bp, synthetic construct
  source 1..80: mol_type = other DNA
atcttcaatccagctgaccatgacttctaccacctttgtcagaacttcactggaaaagattgcggggaaaaacctcttgg

SEQ ID NO: 92382 - DNA, 80 bp, synthetic construct
  source 1..80: mol_type = other DNA
gatccgcataaaaggaacagacttcaccaactaagttgttgtttaccgcataacattttgaacactcgcccgttttttga

SEQ ID NO: 92383 - DNA, 80 bp, synthetic construct
  source 1..80: mol_type = other DNA
ccccccgccgggggcccccccggggggctcagaggctggcatcactcaatgtcctctacctgcaccagtgtgtcgaacaa

SEQ ID NO: 92384 - DNA, 80 bp, synthetic construct
  source 1..80: mol_type = other DNA
taaagtaagctatattccactccatctatgaagaactgttgacagtatgcttctttgcatcttaccttctggtatcttgc

SEQ ID NO: 92385 - DNA, 80 bp, synthetic construct
  source 1..80: mol_type = other DNA
tgctccaagctcattttgcctcaacttaacagtggaggaagtcttcattgaattcaccaatgcaagactcaatgttgaga

SEQ ID NO: 92386 - DNA, 80 bp, synthetic construct
  source 1..80: mol_type = other DNA
gcctttcaagatcagctgactctgaaacgctcactgtgcccattgagtagggaaacagtccttcgtcagacttttgataa

SEQ ID NO: 92387 - DNA, 80 bp, synthetic construct
  source 1..80: mol_type = other DNA
gacattgttggcacaacacctgatgcctcacagttcataactttactaaatacatgcccatccagaattgttagatcaac

SEQ ID NO: 92388 - DNA, 80 bp, synthetic construct
  source 1..80: mol_type = other DNA
cccataggtgtccacatttacatttaggtctttgagggcacttattgctttggtaacagttttctgcaacatgcaactca

SEQ ID NO: 92389 - DNA, 80 bp, synthetic construct
  source 1..80: mol_type = other DNA
agatttgatttctatctaatctaacggagtgagtgcttgatgctgattttgaacattcagattgcaatcttctatcaacc

SEQ ID NO: 92390 - DNA, 80 bp, synthetic construct
  source 1..80: mol_type = other DNA
caccttttcaggtccctcttagtgtattctaaagacaccaagcggtcattcacactgataaaactggatcctaaccagcc

SEQ ID NO: 92391 - DNA, 80 bp, synthetic construct
  source 1..80: mol_type = other DNA
ttcctgagcttgatcttcacatttaatcttgtccctctcataagcaaggagaatcattacatcaaaaatcaatagaagtt

SEQ ID NO: 92392 - DNA, 80 bp, synthetic construct
  source 1..80: mol_type = other DNA
tccttcttgtgttcaaaattctcaaagatttgactttgttgaggaatgacctccaacaatgcatctgactgctgtttgtg

SEQ ID NO: 92393 - DNA, 80 bp, synthetic construct
  source 1..80: mol_type = other DNA
ggtgatgatctatcaaccccattggttaaatctgcatacaagaatttcaacacaggagaggctcttttaaaggaatacat

SEQ ID NO: 92394 - DNA, 80 bp, synthetic construct
  source 1..80: mol_type = other DNA
tttaatgcacgtccttcccttcaatctcagctttccactgcttgactggatcatcacttcttttagtgacttactataac

SEQ ID NO: 92395 - DNA, 80 bp, synthetic construct
  source 1..80: mol_type = other DNA
caattcttccactccatcttcattagaaaccatttcagaatcatacaagcagtgaaattcttttaacagtctttctttgt

SEQ ID NO: 92396 - DNA, 80 bp, synthetic construct
  source 1..80: mol_type = other DNA
caactttaacaaattgatcttctatttggccctgccttaacttgtttctgaatatctgatactcctcctcaatctgattc

SEQ ID NO: 92397 - DNA, 80 bp, synthetic construct
  source 1..80: mol_type = other DNA
ttaacctcatgggcagtcattttgttgttgatgccttgatggcagctggcaattatatcatcaaaatggttggttcgttt

SEQ ID NO: 92398 - DNA, 80 bp, synthetic construct
  source 1..80: mol_type = other DNA
atctaataacacattgatgctttctatacctgaaaaccggctagtgctgactgaaagagattcgcataatctagagtact

SEQ ID NO: 92399 - DNA, 80 bp, synthetic construct
  source 1..80: mol_type = other DNA
cagactcttcaaagagtgaattgctctcctgagcatatttcatcaaggagaatagtgtatctctgagtttgtcattcacc

SEQ ID NO: 92400 - DNA, 80 bp, synthetic construct
  source 1..80: mol_type = other DNA
cagtccggaatttgttcattataaaatgtagttcttccgtcaataagtggtattaggtttatatcaattgacttcaagtc

SEQ ID NO: 92401 - DNA, 80 bp, synthetic construct
  source 1..80: mol_type = other DNA
attctttagttgctctaacttctttaagtcctctaggtacttctgctcaaagttcactggggatgatctcacaaagcact

SEQ ID NO: 92402 - DNA, 80 bp, synthetic construct
  source 1..80: mol_type = other DNA
caaggagtatgaggacattcccattcaatttgaagccatcaggcacaacaaagcataatgatggtgttaaaatccctaat

SEQ ID NO: 92403 - DNA, 80 bp, synthetic construct
  source 1..80: mol_type = other DNA
tcatggagaattacctcaacagagcgtgcattgctgttgtgctcacaaccattggccttgcaggaatcaacctctataca

SEQ ID NO: 92404 - DNA, 80 bp, synthetic construct
  source 1..80: mol_type = other DNA
cagtctgcaccaagaatgccaatttttgtctagataatctctcatcatcagaaagatattttgaaacaagatcttttaca

SEQ ID NO: 92405 - DNA, 80 bp, synthetic construct
  source 1..80: mol_type = other DNA
acagtgagtagcccttgaaatccacccagtcaccaactgcttcaagaagccgaacaagaattggtctttgcaattctaac

SEQ ID NO: 92406 - DNA, 80 bp, synthetic construct
  source 1..80: mol_type = other DNA
tcttttacataagctatctcctcctccattaaagaagttgtcaacaatagagcgtctaaatgcctaggatcctcggtgcg

SEQ ID NO: 92407 - DNA, 80 bp, synthetic construct
  source 1..80: mol_type = other DNA
acaacacagccaagcccacccagcccccagaaccgcccacatcagcaggcatgggcaacaagcagaccaggtccccaccc

SEQ ID NO: 92408 - DNA, 80 bp, synthetic construct
  source 1..80: mol_type = other DNA
acagtcttcttcaacacagaaacaatgtcgacatccacccagtgcttcttgagcttcaatctgtcagaaaacattgagat

SEQ ID NO: 92409 - DNA, 80 bp, synthetic construct
  source 1..80: mol_type = other DNA
cagtgcctctatcaaaagatcttgggaaccatccctaacctcccttatgaacaactccaagtcttgatcgtgaattgctg

SEQ ID NO: 92410 - DNA, 80 bp, synthetic construct
  source 1..80: mol_type = other DNA
gggtaaaagtagcaagtctgctgtcacattcccaaagggctcctctactgatcactaatggtacaggttcaatttcaggc

SEQ ID NO: 92411 - DNA, 80 bp, synthetic construct
  source 1..80: mol_type = other DNA
cacacccaggaacccaaccaaacacacacacacagacaaacacatagaaagacacacacacacgcacacacacccacagt

SEQ ID NO: 92412 - DNA, 80 bp, synthetic construct
  source 1..80: mol_type = other DNA
ggctcagaggctggcatcactcaatgtcctctacctgcaccagtgtgtcgaacaatttaatgcacgtccttcccttcaat

SEQ ID NO: 92413 - DNA, 80 bp, synthetic construct
  source 1..80: mol_type = other DNA
gggtgggctaaaattaagaccaaaatcatcttagttaatgatttaacatcgctcagctgtccttctaattcattgcaatc

SEQ ID NO: 92414 - DNA, 80 bp, synthetic construct
  source 1..80: mol_type = other DNA
aattgtggggacgacaccagacataacaaagttcaagactgaatcataactgtcagggcagactattcccatgtcaatgt

SEQ ID NO: 92415 - DNA, 80 bp, synthetic construct
  source 1..80: mol_type = other DNA
tccttggcgcaagctatgtcttcctccatatttaaaaggtgatttaagaagatagccttaatgcctaggatcctcggtgc

SEQ ID NO: 92416 - DNA, 80 bp, synthetic construct
  source 1..80: mol_type = other DNA
tgctaggttgatgtatctcggagtcacacggtaaaattgcccaccgagttgattaacacaaagcgcaatccaatagccta

SEQ ID NO: 92417 - DNA, 80 bp, synthetic construct
  source 1..80: mol_type = other DNA
tatctcggagtcacacggtaaaattgcccaccgagttgattaacacaaagcgcaatccaatagcctaggatccactgtgc

SEQ ID NO: 92418 - DNA, 80 bp, synthetic construct
  source 1..80: mol_type = other DNA
ccatctcctattggctaccttggacttctctcgcagagaactagggacatctatatcagtagaagactcttggggacatt

SEQ ID NO: 92419 - DNA, 80 bp, synthetic construct
  source 1..80: mol_type = other DNA
cggggatcctaggctatttagtcggacttcagtgaaaaggcttattttagtgactttctgggtcgaaaaatctagttaaa

SEQ ID NO: 92420 - DNA, 80 bp, synthetic construct
  source 1..80: mol_type = other DNA
atacacatataatcccataaaagaggccttagataagtaacagctggatcattcctacccttgacttctgatgacactct

SEQ ID NO: 92421 - DNA, 80 bp, synthetic construct
  source 1..80: mol_type = other DNA
aaggcagcaacacaacccagtgcaccctcaaccgaagcaccccgggacacaacgcccccaccatacaccccgtgagccca

SEQ ID NO: 92422 - DNA, 80 bp, synthetic construct
  source 1..80: mol_type = other DNA
aacgcccgcaccatacaccccgtgagcccagagcccacactcccacctccgcaacccaccccccacccccgggaggaccc

SEQ ID NO: 92423 - DNA, 80 bp, synthetic construct
  source 1..80: mol_type = other DNA
tagatacaaggagcgaaatgaacttcttggaaacaccgggtttcttgtatctcactttgtccacatccacacaacattct

SEQ ID NO: 92424 - DNA, 80 bp, synthetic construct
  source 1..80: mol_type = other DNA
tcatggttccgttctcccttgggtggtagagtttctaggcctctgcctttattcctctttctactgtccatccaccgttt

SEQ ID NO: 92425 - DNA, 80 bp, synthetic construct
  source 1..80: mol_type = other DNA
tgagctgaagcttgtgtttgtatgatctgcagatcagttagtagtgccccacataagttctcacagaaatgagagtcaat

SEQ ID NO: 92426 - DNA, 80 bp, synthetic construct
  source 1..80: mol_type = other DNA
tttgtatgatctgcagatcagttagtagtgccccacataagttctcacagaaatgagagtcaatatgcctaggatcctcg

SEQ ID NO: 92427 - DNA, 80 bp, synthetic construct
  source 1..80: mol_type = other DNA
caattttggagaagtcaaactcagtaaactgtaacttttcctgatcaacaaccagtttcataggtataacatctcctaat

SEQ ID NO: 92428 - DNA, 80 bp, synthetic construct
  source 1..80: mol_type = other DNA
ccccgtgacgtctcgggggcgtccatttacaggacgactctaggtgttgatgttctgaacaccatgtctctgggcagcac

SEQ ID NO: 92429 - DNA, 80 bp, synthetic construct
  source 1..80: mol_type = other DNA
actaaaagaagtcaacaaactatagttccggatatcgggtctagaccctgggtgaggggcatctccagtaggataagcat

SEQ ID NO: 92430 - DNA, 80 bp, synthetic construct
  source 1..80: mol_type = other DNA
aagggtctgtaatatgttttgtaaattccaaaagccatttttggttacaaccattagcagatgccaaaataggtatgtta

SEQ ID NO: 92431 - DNA, 80 bp, synthetic construct
  source 1..80: mol_type = other DNA
gcaatactgaagtggaaactcagcagatgttacaggtagaagggcgccatgagactgaaacaccatgtagtcagtatagt

SEQ ID NO: 92432 - DNA, 80 bp, synthetic construct
  source 1..80: mol_type = other DNA
cgaaatattttaaatgtactaaaaactagtaatgcaaaggcagcaatgttagcaaaatttaaagagttatacggggtgag

SEQ ID NO: 92433 - DNA, 80 bp, synthetic construct
  source 1..80: mol_type = other DNA
gttttttaatgaactgttattacttaacaatgcgacacaaacgttctgcaaaacgcacaaaacgtgcatcggccacccaa

SEQ ID NO: 92434 - DNA, 80 bp, synthetic construct
  source 1..80: mol_type = other DNA
catctgtaccttccattgccccagatgtatcaggatttagtattactacttcaactgataccacacctgctatattagat

SEQ ID NO: 92435 - DNA, 80 bp, synthetic construct
  source 1..80: mol_type = other DNA
aacaactatacatgatataatattagaatgtgtgtactgcaagcaacagttactgcgacgtgaggtatatgactttgctt

SEQ ID NO: 92436 - DNA, 80 bp, synthetic construct
  source 1..80: mol_type = other DNA
ccagaaagttaccacatttatgcacagagctgcaaacaactatacatgatataatattagaatgtgtgtactgcaagcaa

SEQ ID NO: 92437 - DNA, 80 bp, synthetic construct
  source 1..80: mol_type = other DNA
acaatattcctttagtatcaggacctgatatacctattaatacaactgaccaaactccttcattaattcctatagttcca

SEQ ID NO: 92438 - DNA, 80 bp, synthetic construct
  source 1..80: mol_type = other DNA
actatgtgcaactactgaatcactatgtacattgtgtcatataaaataaattactatgcgccaacgccttaaataccgct

SEQ ID NO: 92439 - DNA, 80 bp, synthetic construct
  source 1..80: mol_type = other DNA
ggatatagttgctttacataggccagcattaacctctaggcgtactggcattaggtacagtagaattggtaataaacaaa

SEQ ID NO: 92440 - DNA, 80 bp, synthetic construct
  source 1..80: mol_type = other DNA
agtgtatgagcttaatgataagaactggaaatcctttttctcaaggacgtggtccagattaagtttgcacgaggacgagg

SEQ ID NO: 92441 - DNA, 80 bp, synthetic construct
  source 1..80: mol_type = other DNA
tcggttgaaccgaaaccggttagtataaaagcagacactttatgcacccaaagagaactgcaatgtttcaggacccacag

SEQ ID NO: 92442 - DNA, 80 bp, synthetic construct
  source 1..80: mol_type = other DNA
ctcaagttaaaataccaaaaactattacagtgtctactggatttatgtctatatgacaaatcttgatactgcatccacaa

SEQ ID NO: 92443 - DNA, 80 bp, synthetic construct
  source 1..80: mol_type = other DNA
tatatgactttgcttttcgggatttatgcatagtatatagagatgggaatccatatgcagtgtgtgataaatgtttaaag

SEQ ID NO: 92444 - DNA, 80 bp, synthetic construct
  source 1..80: mol_type = other DNA
tcacaatatagtaatgaaaagtggacattacaagacgttagccttgaagtgtatttaactgcaccaacaggatgtataaa

SEQ ID NO: 92445 - DNA, 80 bp, synthetic construct
  source 1..80: mol_type = other DNA
acaggcggacgcactgggtatattccattaggaacaaggcctcccacagctacagatacacttgctcctgtaagaccccc

SEQ ID NO: 92446 - DNA, 80 bp, synthetic construct
  source 1..80: mol_type = other DNA
atgataagaactggaaatcctttttctcaaggacgtggtccagattaagtttgcacgaggacgaggacaaggaaaacgat

SEQ ID NO: 92447 - DNA, 80 bp, synthetic construct
  source 1..80: mol_type = other DNA
ggtaatattatgtcctacatctgtgtttagcagcaacgaagtatcctctcctgaaattattaggcagcacttggccaacc

SEQ ID NO: 92448 - DNA, 80 bp, synthetic construct
  source 1..80: mol_type = other DNA
tttaacagctcacacaaaggacggattaactgtaatagtaacactacacccatagttcatttaaaaggtgatgctaatac

SEQ ID NO: 92449 - DNA, 80 bp, synthetic construct
  source 1..80: mol_type = other DNA
gctttttggcacaaaatgtgtttttttaaatagttctatgtcagcaactatagtttaaacttgtacgtttcctgcttgcc

SEQ ID NO: 92450 - DNA, 80 bp, synthetic construct
  source 1..80: mol_type = other DNA
cgcagcctcacccacttctattaataatggattatatgatatttatgcagatgactttattacagatacttctacaaccc

SEQ ID NO: 92451 - DNA, 80 bp, synthetic construct
  source 1..80: mol_type = other DNA
attcggttgcatgctttttggcacaaaatgtatttttttaaatagttctatgtcagcaactatagtttaaacttgtacgt

SEQ ID NO: 92452 - DNA, 80 bp, synthetic construct
  source 1..80: mol_type = other DNA
catcattaataatattggtattactattgtggataacagcagcctctgcgtttaggtgttttattgtatatattatattt

SEQ ID NO: 92453 - DNA, 80 bp, synthetic construct
  source 1..80: mol_type = other DNA
agcacacacgtagacattcgtactttggaagacctgttaatgggcacactaggaattgtgtgccccatctgttctcagaa

SEQ ID NO: 92454 - DNA, 80 bp, synthetic construct; identical to SEQ ID NO: 18113
  source 1..80: mol_type = other DNA

SEQ ID NO: 92455 - DNA, 80 bp, synthetic construct
  source 1..80: mol_type = other DNA
tgcaccaacatctgtaccttccattgcccgagatgtatcaggatttagtattactacttcaactgataccacacctgcta

SEQ ID NO: 92456 - DNA, 80 bp, synthetic construct
  source 1..80: mol_type = other DNA
atgctggtgcaccaacatctgtaccttccattgccccagatgtatcaggatttagtattactacttcaactgataccaca

SEQ ID NO: 92457 - DNA, 80 bp, synthetic construct
  source 1..80: mol_type = other DNA
agacagcacatgcgttgtttactgcacaggaagcaaaacaacatagagatgcagtacaggttctaaaacgaaagtatttg

SEQ ID NO: 92458 - DNA, 80 bp, synthetic construct
  source 1..80: mol_type = other DNA
accccgccgcgacccataccaaagccgtcgccttgggcaccgaagaaacacagacgactatccagcgaccaagatcagag

SEQ ID NO: 92459 - DNA, 80 bp, synthetic construct
  source 1..80: mol_type = other DNA
attaataatactgttactactgttactacacataataatcccactttcactgacccatctgtattgcagcctccaacacc

SEQ ID NO: 92460 - DNA, 80 bp, synthetic construct
  source 1..80: mol_type = other DNA
taaccgaagtcggttgaaccgaaaccggttagtataaaagcagacattttatgcaccaaaagagaactgcaatgtttcag

SEQ ID NO: 92461 - DNA, 80 bp, synthetic construct
  source 1..80: mol_type = other DNA
atccctattttcctattaaaaaacctaacaataacaaaatattagttcctaaagtatcaggattacaatacagggtattt

SEQ ID NO: 92462 - DNA, 80 bp, synthetic construct
  source 1..80: mol_type = other DNA
aagcaaagacatctggacaaaaagcaaagattccataatataaggggtcggtggaccggtcgatgtatgtcttgttgcag

SEQ ID NO: 92463 - DNA, 80 bp, synthetic construct
  source 1..80: mol_type = other DNA
ggctttatgtagaggctgtagtggaaaaaaaaacaggggatgctatatcagatgacgagaacgaaaatgacagtgataca

SEQ ID NO: 92464 - DNA, 80 bp, synthetic construct
  source 1..80: mol_type = other DNA
gtttaccatattttttttcagatgtctctttggctgcctagtgaggccactgtctacttgcctcctgtcccagtatctaa

SEQ ID NO: 92465 - DNA, 80 bp, synthetic construct
  source 1..80: mol_type = other DNA
aacaccacttacaaatattttaaatgtactaaaaactagtaatgcaaaggcagcaatgttagcaaaatttaaagagttat

SEQ ID NO: 92466 - DNA, 80 bp, synthetic construct
  source 1..80: mol_type = other DNA
aatcctcactgcatttaacagctcacacaaaggacggattaactgtaatagtaacactacacccatagtacatttaaaag

SEQ ID NO: 92467 - DNA, 80 bp, synthetic construct
  source 1..80: mol_type = other DNA
acaggagcgacccagaaagttaccacagttatgcacagagctgcaaacaactatacatgatataatattagaatgtgtgt

SEQ ID NO: 92468 - DNA, 80 bp, synthetic construct
  source 1..80: mol_type = other DNA
ggtttaaacttctaaggccaactaaatgtcaccctagttcatacatgaactgtgtaagggttagtcatacattgttcatt

SEQ ID NO: 92469 - DNA, 80 bp, synthetic construct
  source 1..80: mol_type = other DNA
taacctaattgcatatttggcataaggtttaaacttctaaggccaactaaatgtcaccctagttcatacatgaactgtgt

SEQ ID NO: 92470 - DNA, 80 bp, synthetic construct
  source 1..80: mol_type = other DNA
cctgaagaaaagcaaagacatctggacaaaaagcaaagattccataatataaggggtcggtggaccggtcgatgtatgtc

SEQ ID NO: 92471 - DNA, 80 bp, synthetic construct
  source 1..80: mol_type = other DNA
atgaattccactattttggaggactggaattttggtctacaacctcccccaggaggcacactagaagatacttataggtt

SEQ ID NO: 92472 - DNA, 80 bp, synthetic construct
  source 1..80: mol_type = other DNA
gaaccgaaaccggttagtataaaagcagacattttatgcaccaaaagagaactgcaatgtttcaggacccacaggagcga

SEQ ID NO: 92473 - DNA, 80 bp, synthetic construct
  source 1..80: mol_type = other DNA
agaccattggtacaactaaaatggcctccattattaattacatctaacattaatgctggtacagattctaggtggcctta

SEQ ID NO: 92474 - DNA, 80 bp, synthetic construct
  source 1..80: mol_type = other DNA
ggagactctttgccaacgtttaaatgtgtgtcaggacaaaatactaacacattatgaaaatgatagtacagacctacgtg

SEQ ID NO: 92475 - DNA, 80 bp, synthetic construct
  source 1..80: mol_type = other DNA
agcacttggccaaccactccgccgcgacccataccaaagccgtcgccttgggcaccgaagaaacacagacgactatccag

SEQ ID NO: 92476 - DNA, 80 bp, synthetic construct
  source 1..80: mol_type = other DNA
aataccaaaaactattacagtgtctactggatttatgtctatatgacaaatcttgatactgcatccacaacattactggc

SEQ ID NO: 92477 - DNA, 80 bp, synthetic construct
  source 1..80: mol_type = other DNA
attcctttagtatcaggtcctgatatacccattaatataactgaccaagctccttcattaattcctatagttccagggtc

SEQ ID NO: 92478 - DNA, 80 bp, synthetic construct
  source 1..80: mol_type = other DNA
gatgatgctacagtgccctgttggaactacatagatgacaatttaagaaatgcattggatggaaatttagtttctatgga

SEQ ID NO: 92479 - DNA, 80 bp, synthetic construct
  source 1..80: mol_type = other DNA
attgtgtcatatcaaataaatcactatgcgccaacgccttacataccgctgttaggcacatattttgggcttgttttaac

SEQ ID NO: 92480 - DNA, 80 bp, synthetic construct
  source 1..80: mol_type = other DNA
tatgatttgagtactattgatcctgcagaagaaatagaattacaaactataacaccttctacatatactaccacttcaca

SEQ ID NO: 92481 - DNA, 80 bp, synthetic construct
  source 1..80: mol_type = other DNA
attattattatgatttcagtactattgatcctgcggaagaaatagaattacaaactataacaccttctacatatactacc

SEQ ID NO: 92482 - DNA, 80 bp, synthetic construct
  source 1..80: mol_type = other DNA
catataattgttgtataccatcacttactgatttttcttttgtatttttatatataatttttttttttctttcattgttt

SEQ ID NO: 92483 - DNA, 80 bp, synthetic construct
  source 1..80: mol_type = other DNA
aaactaagggcgtaaccgaaatcggttgaaccgaaaccggttagtataaaagcagacattttatgcaccaaaagagaact

SEQ ID NO: 92484 - DNA, 80 bp, synthetic construct
  source 1..80: mol_type = other DNA
tacttgcagttggacatccctattttcctattaaaaaacctaacaataacaaaatattagttcctaaagtatcaggatta

SEQ ID NO: 92485 - DNA, 80 bp, synthetic construct
  source 1..80: mol_type = other DNA
ctattatgtgtgtctccaatgtgtatgatgatagagcctccaaaattgcgtagtacagcagcagcattatattggtataa

SEQ ID NO: 92486 - DNA, 80 bp, synthetic construct
  source 1..80: mol_type = other DNA
atgaagactatcattgctttgagctacattctatgtctggttttcgctcaaaaaattcctggaaatgacaatagcacggc

SEQ ID NO: 92487 - DNA, 80 bp, synthetic construct
  source 1..80: mol_type = other DNA
ggcgcaatagcgggtttcatagaaaatggttgggagggaatggtggatggttggtacggtttcaggcatcaaaactctga

SEQ ID NO: 92488 - DNA, 80 bp, synthetic construct
  source 1..80: mol_type = other DNA
ggcaagcagcagatctcaaaagcactcaagcagcaatcgatcaaatcaatgggaagctgaatcgattgatcgggaaaacc

SEQ ID NO: 92489 - DNA, 80 bp, synthetic construct
  source 1..80: mol_type = other DNA
aagggagttgagctgaagtcagggtacaaagattggatcctatggatttcctttgccatatcatgttttttgctttgtgt

SEQ ID NO: 92490 - DNA, 80 bp, synthetic construct
  source 1..80: mol_type = other DNA
ttttgctttgtgttgctttgttggggttcatcatgtgggcctgccaaaagggcaacattaggtgcaacatttgcatttga

SEQ ID NO: 92491 - DNA, 80 bp, synthetic construct
  source 1..80: mol_type = other DNA
tactgagctggttcagaattcctcaataggtgaaatatgcgacagtcctcatcagatccttgatggagaaaactgcacac

SEQ ID NO: 92492 - DNA, 80 bp, synthetic construct
  source 1..80: mol_type = other DNA
actgttacccttatgatgtgccggattatgcctcccttaggtcactagttgcctcatccggcacactggagtttaaaaat

SEQ ID NO: 92493 - DNA, 80 bp, synthetic construct
  source 1..80: mol_type = other DNA
attggactggagtcactcaaaacggaacaagttctgcttgcataaggagatctaaaagcagtttctttagtagattaaat

SEQ ID NO: 92494 - DNA, 80 bp, synthetic construct
  source 1..80: mol_type = other DNA
gggttcaccacccgggtacggacaaggaccaaatcttcctgtatgctcaatcatcaggaagaatcacagtatctaccaaa

SEQ ID NO: 92495 - DNA, 80 bp, synthetic construct
  source 1..80: mol_type = other DNA
caaatatcggatctagacccagaataagggataatagtaaaaccgggagacatacttttgattaacagcacagggaatct

SEQ ID NO: 92496 - DNA, 80 bp, synthetic construct
  source 1..80: mol_type = other DNA
aattgctcctaggggttacttcaaaatacgaagtgggaaaagctcaataatgagatcagatgcacccattggcaaatgca

SEQ ID NO: 92497 - DNA, 80 bp, synthetic construct
  source 1..80: mol_type = other DNA
aacgctgtgccttgggcaccatgcagtaccaaacggaacgatagtgaaaacaatcacaaatgaccgaattgaagttacta

SEQ ID NO: 92498 - DNA, 80 bp, synthetic construct
  source 1..80: mol_type = other DNA
acggggcctgtcccagatatgttaagcatagcactctgaaattggcaacaggaatgcgaaatgtaccagagaaacaaact

SEQ ID NO: 92499 - DNA, 80 bp, synthetic construct
  source 1..80: mol_type = other DNA
tctgggaccaccatggatgccattgctggtgtgacctacccaagagccatgatgcatcccagctttgctggactgattga

SEQ ID NO: 92500 - DNA, 80 bp, synthetic construct
  source 1..80: mol_type = other DNA
aatatggggaagatccgaaaatcgaaacaaacaaattcgcatcaatatgcacacacttagaagtctgcagcgaaagcagg

SEQ ID NO: 92501 - DNA, 80 bp, synthetic construct
  source 1..80: mol_type = other DNA
acattactgtagagagagaaagttgccccacagtagcagactacagagtttggtcaaaaccccaatgccaaattaagggt

SEQ ID NO: 92502 - DNA, 80 bp, synthetic construct
  source 1..80: mol_type = other DNA
tcgaccggaacagaatcacagcattcagacaattggctgcagaaaacaagtatggactggtggataccatgaaagttggc

SEQ ID NO: 92503 - DNA, 80 bp, synthetic construct
  source 1..80: mol_type = other DNA
tatcttctaaggacatcaaggaggaaggaaagaaggggaaaaataaaactggccgtggcaagaaacacactgcattctcc

SEQ ID NO: 92504 - DNA, 80 bp, synthetic construct
  source 1..80: mol_type = other DNA
ggcgcatctattgctgccccagtggcgggacaaactaatataattgacccctggataagaacaaattttgtgcaagcccc

SEQ ID NO: 92505 - DNA, 80 bp, synthetic construct
  source 1..80: mol_type = other DNA
ggatgtacaatggatatgctggaggtgttgaggtgcaagtgcttcttgctgggaacgcgttcacagcaggaaagatatta

SEQ ID NO: 92506 - DNA, 80 bp, synthetic construct
  source 1..80: mol_type = other DNA
tttgcagcaatcccacccaactttcctgtagatatgattagcccagctcaaattactatgctcccccatttgattgtaga

SEQ ID NO: 92507 - DNA, 80 bp, synthetic construct
  source 1..80: mol_type = other DNA
tgttaggacattggaacctattatgatacccttacctgatgttaggaatgtgttctatcattttaataatcaaccccagc

SEQ ID NO: 92508 - DNA, 80 bp, synthetic construct
  source 1..80: mol_type = other DNA
ctaggatgagattagtggctatgctctataccccattgagatctaatggttcaggagatgatgttttcactgtgtcttgt

SEQ ID NO: 92509 - DNA, 80 bp, synthetic construct
  source 1..80: mol_type = other DNA
tagagtccaaaactaaaccattcacactcccaatattgaccatttctgaactaaccaattcccggtttcccatcccaatt

SEQ ID NO: 92510 - DNA, 80 bp, synthetic construct
  source 1..80: mol_type = other DNA
gagcaactgtacacggccccaaatgagaataatgttgtacagtgtcaaaatggaaggtgcaccttggatggagagcttca

SEQ ID NO: 92511 - DNA, 80 bp, synthetic construct
  source 1..80: mol_type = other DNA
gggtaccacccagctgctatcaagtgcagtttgctcttacaggagcaggactgtggctaacagtggggacaattgggacc

SEQ ID NO: 92512 - DNA, 80 bp, synthetic construct
  source 1..80: mol_type = other DNA
gggtaccacccagctgctatcaagtgcagtttgctcttacaggggcaggactgtggctaacagtggggacaattgggacc

SEQ ID NO: 92513 - DNA, 80 bp, synthetic construct
  source 1..80: mol_type = other DNA
agaatttgctccagctgacctacccaagtggtgcaagctatgaccccactgatgaagtaccagcacccttgggcacccaa

SEQ ID NO: 92514 - DNA, 80 bp, synthetic construct
  source 1..80: mol_type = other DNA
gatttcagtgggatattgtatggggtgttaacccaagataatgtaagtgagggtacaggggaggccaaaaatgctaaggg

SEQ ID NO: 92515 - DNA, 80 bp, synthetic construct
  source 1..80: mol_type = other DNA
gatttcagtgggatattgtatggggtgttaacccaagataatgtaagtgagggtacaggtgaggccaaaaatgctaaggg

SEQ ID NO: 92516 - DNA, 80 bp, synthetic construct
  source 1..80: mol_type = other DNA
agtatatatttccaccaccagtggaagatttaccccaaaaattgggacaattggattgcattcaataactgaaaatgtgc

SEQ ID NO: 92517 - DNA, 80 bp, synthetic construct
  source 1..80: mol_type = other DNA
accccaatcagcaatcacggttcacccccgttggggtcgctcagaatgaaaacacccccttccagcaatgggttctacca

SEQ ID NO: 92518 - DNA, 80 bp, synthetic construct
  source 1..80: mol_type = other DNA
cactacgcaggtgctctcgcactaaacaccaatttggcacccgctgttgccccgactttccctggtgagcaattgctgtt

SEQ ID NO: 92519 - DNA, 80 bp, synthetic construct
  source 1..80: mol_type = other DNA
tttcaggtcccgtgttccatgtgttcaaggtctgcaggggcaggatgctttcatagactgtctcctacctcaagagtggg

SEQ ID NO: 92520 - DNA, 80 bp, synthetic construct
  source 1..80: mol_type = other DNA
tgaaccatttttatcaggaggctgctccctcccaagcagacgtcgccctcatcaggtatgtcaaccctgatactggtcgt

SEQ ID NO: 92521 - DNA, 80 bp, synthetic construct
  source 1..80: mol_type = other DNA
gtcacacactggtgcctaccctcttgtggtccccccgaatggtcattttaggtttgactcttgggttaaccaattctact

SEQ ID NO: 92522 - DNA, 80 bp, synthetic construct
  source 1..80: mol_type = other DNA
gtctagccggtgatatgctgacttctgctgttggttcactgacctctgcaggagccaatgccatcaatcagaaattaaat

SEQ ID NO: 92523 - DNA, 80 bp, synthetic construct
  source 1..80: mol_type = other DNA
tttgattataacaaacaactccaaaatgcatcctttcaacatgataaggaaatgttgcaggcccaaattgatgctacaaa

SEQ ID NO: 92524 - DNA, 80 bp, synthetic construct
  source 1..80: mol_type = other DNA
gaagctccaatcagaaatgattgcaatcaagcatggggttttgaccgcgggcggcttttccccagctgatgcagccagag

SEQ ID NO: 92525 - DNA, 80 bp, synthetic construct
  source 1..80: mol_type = other DNA
gtcagggacacgctactacgctccaaattctgtgcaaaccaccagttattctgggcaattcaccccctcgccagtccatc

SEQ ID NO: 92526 - DNA, 80 bp, synthetic construct
  source 1..80: mol_type = other DNA
gggcgcaggtgaagttcccttctaattcatcccagcggactgcagctccaagcagtatccgcagcctgtcaacccaatca

SEQ ID NO: 92527 - DNA, 80 bp, synthetic construct
  source 1..80: mol_type = other DNA
acttctttaggctccacctcctcaagggggtcctctgcagcctcctctagttcgaggacagcagattgggtgcaacaaca

SEQ ID NO: 92528 - DNA, 80 bp, synthetic construct
  source 1..80: mol_type = other DNA
gagggctcttagcccgtacatgcagggagccctgcagacggcatacgtcacaccgccgtctagtagggcttccagtatga

SEQ ID NO: 92529 - DNA, 80 bp, synthetic construct
  source 1..80: mol_type = other DNA
gctctgtctcaacagtgcccaaaggggttttggactcctggacacctgtgtttaacacacgcaggcagccgctgtttgca

SEQ ID NO: 92530 - DNA, 80 bp, synthetic construct
  source 1..80: mol_type = other DNA
tcaggaagaggggggagtcacaggcttagtgaaaaggataatcaacttttaaaatgtgattttattttccttttaaaaaa

SEQ ID NO: 92531 - DNA, 80 bp, synthetic construct
  source 1..80: mol_type = other DNA
caggtggatttgaagtgcaggtggtcctagctggaaatgcgtttacagcaggaaagataatctttgcagctattccccct

SEQ ID NO: 92532 - DNA, 80 bp, synthetic construct
  source 1..80: mol_type = other DNA
aattttccaattgataatttaagtgcagcacagatcacaatgtgcccacatgtgattgtggatgtcagacagttggaacc

SEQ ID NO: 92533 - DNA, 80 bp, synthetic construct
  source 1..80: mol_type = other DNA
agtcaacctcccgatgcctgacgttcgcaataacttctttcattataatcaagggtctgattcgaggttacgcctaattg

SEQ ID NO: 92534 - DNA, 80 bp, synthetic construct
  source 1..80: mol_type = other DNA
cgatgctatatacacctctcagggcaaacaattctggggatgatgtttttactgtgtcttgtagagtgctaactagacct

SEQ ID NO: 92535 - DNA, 80 bp, synthetic construct
  source 1..80: mol_type = other DNA
tggagtcaaagacaaagccctttttccttcctatcctgactatctctgaaatgtccaattctaggttcccagtaccaatt

SEQ ID NO: 92536 - DNA, 80 bp, synthetic construct
  source 1..80: mol_type = other DNA
gggcaccacccaactcttgcctagccaaatctgcgcttttaggggcgttctcaccagatcaacaagcagggccagtgatc

SEQ ID NO: 92537 - DNA, 80 bp, synthetic construct
  source 1..80: mol_type = other DNA
tgatgccacgactagggcacatgaagcaaaaatagacaccacatctggccgcttcaccccaaagctaggctcattagaga

SEQ ID NO: 92538 - DNA, 80 bp, synthetic construct
  source 1..80: mol_type = other DNA
gactttcaacaatggaccctacccgactacgctggtcagtttacacacaacatgaacttagccccagctgttgctcccaa

SEQ ID NO: 92539 - DNA, 80 bp, synthetic construct
  source 1..80: mol_type = other DNA
tggtcccccaagaatgggtgcagcacttctaccaagagtcagccccctctcagtctcaagtggccctggttaggtatgtt

SEQ ID NO: 92540 - DNA, 80 bp, synthetic construct
  source 1..80: mol_type = other DNA
atggaacaagatactgggcaccaggtgccacctccacaacctccatgtcgggtggctttacacatcaaactgtgcacaga

SEQ ID NO: 92541 - DNA, 80 bp, synthetic construct
  source 1..80: mol_type = other DNA
gcagaaggggggagtcaaatgtttagtgaaaagattattttagatttggtttaaaattaggtttaatttggaatctttta

SEQ ID NO: 92542 - DNA, 80 bp, synthetic construct
  source 1..80: mol_type = other DNA
gcagtgatagtttgaactgcactagcaacaatagcgtcagcagtagcagcagtgatagtttgaactgcactttcaacatg

SEQ ID NO: 92543 - DNA, 80 bp, synthetic construct
  source 1..80: mol_type = other DNA
atacttaactgacatgaccattgaagaactgtcaagagactggttcatgttaatacccaaacagaaagtagaagggcctc

SEQ ID NO: 92544 - DNA, 80 bp, synthetic construct
  source 1..80: mol_type = other DNA
tgactatccaaaatattccaaagaatcaatgctaaacagggagaaaatctatggattgaagttggaatcaatgggagtct

SEQ ID NO: 92545 - DNA, 80 bp, synthetic construct
  source 1..80: mol_type = other DNA
aatcctatgtaaacaacaaggagaaagaggtccttgtgctatggggagttcatcacccgtcaaacataagggaccagagg

SEQ ID NO: 92546 - DNA, 80 bp, synthetic construct
  source 1..80: mol_type = other DNA
gcaaaagcaggagtaaaaatgaatccaaatcaaaagataataacaattggttctgcttctatcatcatcacaacagcttg

SEQ ID NO: 92547 - DNA, 80 bp, synthetic construct
  source 1..80: mol_type = other DNA
tactggtgactaatataacattgcatctaaagcaatatgagtacgactcttctccaaacaataaagcgataccgtgcgaa

SEQ ID NO: 92548 - DNA, 80 bp, synthetic construct
  source 1..80: mol_type = other DNA
cctatgatgatagaaagaaatataaccaagataatatatttgactaatggcaccatagagagagagatatgccccaaatc

SEQ ID NO: 92549 - DNA, 80 bp, synthetic construct
  source 1..80: mol_type = other DNA
attgaggtacagaaattggtcaaaggtgcaatgcaaaatcacagggtttgctcctttttccaaggacaattcaattcggc

SEQ ID NO: 92550 - DNA, 80 bp, synthetic construct
  source 1..80: mol_type = other DNA
gagacatttgggttacaagagaaccttatgtatcctgcgatcctagcaagtgctatcagtttgcgttagggcaagggact

SEQ ID NO: 92551 - DNA, 80 bp, synthetic construct
  source 1..80: mol_type = other DNA
gtcggcgacacacccagaaacaacgacagatctagcaacagcaattgcgtggatcccaataatgaaaaggggaatcatgg

SEQ ID NO: 92552 - DNA, 80 bp, synthetic construct
  source 1..80: mol_type = other DNA
gggaactgaacacatcgacgacgtgatggggatgattggaatattaccagacatgacacctagtaccgaaatgtcaatga

SEQ ID NO: 92553 - DNA, 80 bp, synthetic construct
  source 1..80: mol_type = other DNA
agggacatctggaatagagtccgctgttctaagaggattcctcattctaggcaaggaggatagaagatacgggccagcat

SEQ ID NO: 92554 - DNA, 80 bp, synthetic construct
  source 1..80: mol_type = other DNA
gcaaaagcaggggaaattaaaaccaaaatgaaatcaaaattactggtcctgttgtgtgcacttacagttacagatgcaga

SEQ ID NO: 92555 - DNA, 80 bp, synthetic construct
  source 1..80: mol_type = other DNA
tgaaggtggatggactggcatgatagatggatggtacggttaccatcatcagaatgaacaggggtctggtttcgctgcag

SEQ ID NO: 92556 - DNA, 80 bp, synthetic construct
  source 1..80: mol_type = other DNA
tgtgaaagccctatatgaaaaagtaaaaggccagttaaagaataatgccaaggaaataggaaatgggtgttttgaattct

SEQ ID NO: 92557 - DNA, 80 bp, synthetic construct
  source 1..80: mol_type = other DNA
aatgggggtctatcagattcttgcgatctactcaactatcgccagctcactggtgcttttggtctccctggtggcaatca

SEQ ID NO: 92558 - DNA, 80 bp, synthetic construct
  source 1..80: mol_type = other DNA
caattgggaaaatgcagcattgctggatggatcttaggaaaccctaaatgtgaaacactactttttaagaagtcatggtc

SEQ ID NO: 92559 - DNA, 80 bp, synthetic construct
  source 1..80: mol_type = other DNA
ttacattgcagaagcaccaaaccccgagtatgggatgtgttacccaggacactttgccgattatgaggaactaaaggagc

SEQ ID NO: 92560 - DNA, 80 bp, synthetic construct
  source 1..80: mol_type = other DNA
aaccataacgtaactagaggagtaacgatgtcatgttcccatgagggaaaaagcagtttctacagaaatttgttatggct

SEQ ID NO: 92561 - DNA, 80 bp, synthetic construct
  source 1..80: mol_type = other DNA
ttgtgctatggggaattcatcacccatccaacatgaaagatcaaatggccatttatagcaaagaaagtgctcatgtgtct

SEQ ID NO: 92562 - DNA, 80 bp, synthetic construct
  source 1..80: mol_type = other DNA
gtaatgtcctcgcattacaacaggcgattcattccagaaatagcggaacgacctaaagtaagaaatcaaggagggaggat

SEQ ID NO: 92563 - DNA, 80 bp, synthetic construct
  source 1..80: mol_type = other DNA
taactactactggactctattggaacctggggacacaataatatttgaagctaacggtaatttaatagcaccacgttatg

SEQ ID NO: 92564 - DNA, 80 bp, synthetic construct
  source 1..80: mol_type = other DNA
catgatatgcattggctatcatgcgaacaactcaactgacactgttgacacaatactcgaaaaaaacgtgacagtgacac

SEQ ID NO: 92565 - DNA, 80 bp, synthetic construct
  source 1..80: mol_type = other DNA
acaagtgctcatcattatttggtgtggcaatgtctttactatttaaagaaatctggacaaggctatttccagaattggac

SEQ ID NO: 92566 - DNA, 80 bp, synthetic construct
  source 1..80: mol_type = other DNA
tcctatacaaataaaaaggggaaagaagtccttgtactatggggtgttcatcacccatctaacatagaggaccaaagggc

SEQ ID NO: 92567 - DNA, 80 bp, synthetic construct
  source 1..80: mol_type = other DNA
ccttcgaattgagtaagggttttggatcaggaatcattacttcaaatgcaccaatgggtgaatgtaatgcaaaatgtcaa

SEQ ID NO: 92568 - DNA, 80 bp, synthetic construct
  source 1..80: mol_type = other DNA
agcaaaagcaggtccctcggggagaatgcgctctctaaccgaggtcgaaacgtacgttctttctatcatcccgtcaggcc

SEQ ID NO: 92569 - DNA, 80 bp, synthetic construct
  source 1..80: mol_type = other DNA
atccacgacctaatgataaaacaggcagttgtggaccagtattttctaatggggcaaatggggtaaaaggattttcgttt

SEQ ID NO: 92570 - DNA, 80 bp, synthetic construct
  source 1..80: mol_type = other DNA
ttaaaccacatgcaggaggagatccagaaatcacaacgcatcattttaattgtaagggggaatttttctattgcgacaca

SEQ ID NO: 92571 - DNA, 80 bp, synthetic construct
  source 1..80: mol_type = other DNA
acaaaactgtttaatgaaacccagtggctgaagaataatgataatggcactatcatacttccatgcaggataaagcaaat

SEQ ID NO: 92572 - DNA, 80 bp, synthetic construct
  source 1..80: mol_type = other DNA
cactgactgctgacacagaagggactttccactggggcgttccaggaggtgtggtctgggcgggactagggagtggctaa

SEQ ID NO: 92573 - DNA, 80 bp, synthetic construct
  source 1..80: mol_type = other DNA
attcctccaactacgtttgaggctgcgtacaagtcaaggaagacagtgatttgttatgatttggcctgtaatcaaacaca

SEQ ID NO: 92574 - DNA, 80 bp, synthetic construct
  source 1..80: mol_type = other DNA
ctaccgaaaaattacagttaacttctgtcacatccttatgtatgttaattggaaataccacagtaattccaagtccacaa

SEQ ID NO: 92575 - DNA, 80 bp, synthetic construct
  source 1..80: mol_type = other DNA
taatttaacttttactgtttattctgatttactatccttcgtttctgcagacacggttgaacctattaacgcaattgctt

SEQ ID NO: 92576 - DNA, 80 bp, synthetic construct
  source 1..80: mol_type = other DNA
cattgagttagttgtggcagtgctactatttgctatccatactgtccaaaaaagtaccttgtttctactccgcatcaggt

SEQ ID NO: 92577 - DNA, 80 bp, synthetic construct
  source 1..80: mol_type = other DNA
aggatcttatttcttcggagacaatgcagaggagtacgacaattaaagaaaaatacccttgtttctactccgcatcaggt

SEQ ID NO: 92578 - DNA, 80 bp, synthetic construct
  source 1..80: mol_type = other DNA
agtggagcaagagataagaactttctcgtttcagcttatttaataataaaaaacacccttgtttctactccgcatcaggt

SEQ ID NO: 92579 - DNA, 80 bp, synthetic construct
  source 1..80: mol_type = other DNA
atggggctgatatcaatctcatgcctatataagctttcgcaattttagaaaaaactccttgtttctactccgcatcaggt

SEQ ID NO: 92580 - DNA, 80 bp, synthetic construct
  source 1..80: mol_type = other DNA
gaggctcttgggagcattcacctggactttggcagactccgaagggaaagagacaccgggtggttactgtcttgtaagat

SEQ ID NO: 92581 - DNA, 80 bp, synthetic construct
  source 1..80: mol_type = other DNA
tcacaagctacaagtacctcattatccagaacaccacatgggaagatcattgccagttctcaaggccatcccctatggga

SEQ ID NO: 92582 - DNA, 80 bp, synthetic construct
  source 1..80: mol_type = other DNA
atggggcagatagtgactttctttcaggaagtcccatatgtcatagaggaggtgatgaacattgttctcattgccttgtc

SEQ ID NO: 92583 - DNA, 80 bp, synthetic construct
  source 1..80: mol_type = other DNA
gcatcccatattgcaactatagcaaatactggtatctaaaccacacctcctcaggcaggacttcactacccaagtgttgg

SEQ ID NO: 92584 - DNA, 80 bp, synthetic construct
  source 1..80: mol_type = other DNA
ttgatttccaatggcagctaccttaacgagaccaagttctcagatgagattgatcaacaggcggacaacatgatcacaga

SEQ ID NO: 92585 - DNA, 80 bp, synthetic construct
  source 1..80: mol_type = other DNA
aatgcttcagaaggaatatattgataggcaaggaaagacacccctgagtcttgttgatttgtttgtgttcagcacgagtt

SEQ ID NO: 92586 - DNA, 80 bp, synthetic construct
  source 1..80: mol_type = other DNA
ggagatcatgctcactgatctacaagggtggatatgaacttcaaaccttggagctcaacatggaatcccttaacatgacc

SEQ ID NO: 92587 - DNA, 80 bp, synthetic construct
  source 1..80: mol_type = other DNA
atgcctctgtcctgcactaagaacaacagccaccactacattagggtggggaatgacaccggtcttgagttgactctgac

SEQ ID NO: 92588 - DNA, 80 bp, synthetic construct
  source 1..80: mol_type = other DNA
caataccagcatactggaccacaagttctgcaatctgtcagatgctcatagaaggaacctatatgatcgtgctctcatga

SEQ ID NO: 92589 - DNA, 80 bp, synthetic construct
  source 1..80: mol_type = other DNA
gtattgtgaccacattccacctttcaattcctcacttcaatcaatacgaggcgatgagttgtgacttcaacggtggcaaa

SEQ ID NO: 92590 - DNA, 80 bp, synthetic construct
  source 1..80: mol_type = other DNA
atcagtgtgcaatacaatttgagtcatgcctactcaggggatgctgccaaacactgtggcacagttgcaaatggtgtgct

SEQ ID NO: 92591 - DNA, 80 bp, synthetic construct
  source 1..80: mol_type = other DNA
acagactttcatgagaatggcttggggtggaagtttcttagccctagattcaggcaaggggaattgggactgtatcatga

SEQ ID NO: 92592 - DNA, 80 bp, synthetic construct
  source 1..80: mol_type = other DNA
tctacttatgtatatgtctctagttctctgtgacagaaggcctagatatcccatgggggatggctttgagaattggcaat

SEQ ID NO: 92593 - DNA, 80 bp, synthetic construct
  source 1..80: mol_type = other DNA
catccttgctatactgaagggagtgtataatgttgcgacatgcggtattatcagcctgatagcattcctcttcctatgtg

SEQ ID NO: 92594 - DNA, 80 bp, synthetic construct
  source 1..80: mol_type = other DNA
gaggaattctgtgacatgttgagactgtttgactttaataagcaagcaattagaagactgagagcagaggctcagttgag

SEQ ID NO: 92595 - DNA, 80 bp, synthetic construct
  source 1..80: mol_type = other DNA
tatacagttaatcaataaagcggtcaatgcactaattaacgatcaactgatcatgaagaaccacttgagagacatcatgg

SEQ ID NO: 92596 - DNA, 80 bp, synthetic construct
  source 1..80: mol_type = other DNA
ttgtaagatggatgttaattgaatcagagctgaaatgctttgggaacacagcagtggcaaagtgcaacgagaaacatgat

SEQ ID NO: 92597 - DNA, 80 bp, synthetic construct
  source 1..80: mol_type = other DNA
ggtaacccctcattgtgcactgctggactgcatcatgtttgatgcagctgtggtgggtagttcaaactactcagtactga

SEQ ID NO: 92598 - DNA, 80 bp, synthetic construct
  source 1..80: mol_type = other DNA
agctcgaccaaaggaaggctctcctagagatgatcgggatgggtaacagactccagaacacccagccaagtggagatggg

SEQ ID NO: 92599 - DNA, 80 bp, synthetic construct
  source 1..80: mol_type = other DNA
tggaaaccatcaaggttacaccacagacaatggatggaatcctcaagtcaatcttgaaagtaaagaaaagcgtaggcatg

SEQ ID NO: 92600 - DNA, 80 bp, synthetic construct
  source 1..80: mol_type = other DNA
acgtacagccttgattgggagggcatgggaaaacactgtggttgatttggagagtaatccaaaacctagaaaaccagaga

SEQ ID NO: 92601 - DNA, 80 bp, synthetic construct
  source 1..80: mol_type = other DNA
tgcacacaggcgtagttgttgagaaaaagaagagaggaggcaaagaggaggtaacccctcattgtgcactgctggactgc

SEQ ID NO: 92602 - DNA, 80 bp, synthetic construct
  source 1..80: mol_type = other DNA
gttgatctaaatgatgttgttcaggctttgacagacttggggttgatctacacagcaaagtacccaaactcctcagactt

SEQ ID NO: 92603 - DNA, 80 bp, synthetic construct
  source 1..80: mol_type = other DNA
atgggataagtacaaggacctatgtcacatgcacacaggcgtggttgtcgaaaagaagaagagaggaggtaaagaagagg

SEQ ID NO: 92604 - DNA, 80 bp, synthetic construct
  source 1..80: mol_type = other DNA
aagctgtcaataaccttgttgaattgaagtcagttcagcagaagagtgtgctaagggtgggtaccctcagcacggacgat

SEQ ID NO: 92605 - DNA, 80 bp, synthetic construct
  source 1..80: mol_type = other DNA
ctactcacacttgctgctgacctggaaaagctcagatcaaaggtgacgagaacagaaaggcctttaagctcaggtgttta

SEQ ID NO: 92606 - DNA, 80 bp, synthetic construct
  source 1..80: mol_type = other DNA
gcctcactaagcaggggcaagttgatctaaatgatgttgtccaggctttgacagacctggggttgatctacacagcaaag

SEQ ID NO: 92607 - DNA, 80 bp, synthetic construct
  source 1..80: mol_type = other DNA
aggccaattccacagggtcatctggtcttccctcaatgtcaatccatgtttttgcattgggatccaactgcagcatcgag

SEQ ID NO: 92608 - DNA, 80 bp, synthetic construct
  source 1..80: mol_type = other DNA
ataagtacaaggacctatgtcatatgcacacaggcgtggttgttgaaaagaagaagaggggaggcaaagaagaggtgact

SEQ ID NO: 92609 - DNA, 80 bp, synthetic construct
  source 1..80: mol_type = other DNA
ggtgactccccattgtgcgttgctggactgcatcatgtttgacgcggctgttacaggtggcttcaactattcagtgctga

SEQ ID NO: 92610 - DNA, 80 bp, synthetic construct
  source 1..80: mol_type = other DNA
cgcgcacggccttgatcgggagagcatgggaaaataccgtagttgatctagaaagcagtcccagacctaagaagccggag

SEQ ID NO: 92611 - DNA, 80 bp, synthetic construct
  source 1..80: mol_type = other DNA
cctcccgccgcaaatgcaggtcaattatattcagtatggaaagaataaaagaactacggaatctgatactgacaaaaacc

SEQ ID NO: 92612 - DNA, 80 bp, synthetic construct
  source 1..80: mol_type = other DNA
ccgtgacaagtacggtccggttaaaacatggaacctttggccctgtccattttagaaatcaagtcaagatacgcagaaga

SEQ ID NO: 92613 - DNA, 80 bp, synthetic construct
  source 1..80: mol_type = other DNA
cccaaatggaagcattcccaatgacaaaccattccaaaatgtaaacaggatcacatacggggcctgtcccagatatgtta

SEQ ID NO: 92614 - DNA, 80 bp, synthetic construct
  source 1..80: mol_type = other DNA
caacgctgtgccttgggcaccatgcagtaacaatcacgaatgaccgaattgaagttactaatgctactgagctggttcag

SEQ ID NO: 92615 - DNA, 80 bp, synthetic construct
  source 1..80: mol_type = other DNA
ccccccgggtggaccccccgccgggggcccccccggaggcaagcacggtggaatgatcactcgatatcctcaatcgatcc

SEQ ID NO: 92616 - DNA, 80 bp, synthetic construct
  source 1..80: mol_type = other DNA
tcacaagaaccatcataccacagtcaggcattatctttgtgagcagttggactatgtctactcctgtccattgtactctt

SEQ ID NO: 92617 - DNA, 80 bp, synthetic construct
  source 1..80: mol_type = other DNA
agtttcaatctatctgacatcatagcaactaaggccccaaccaacatgtcatgattatgatcattaacttccctaataaa

SEQ ID NO: 92618 - DNA, 80 bp, synthetic construct
  source 1..80: mol_type = other DNA
gatctcgagatcctgatcctggacaataggtgtgaatgtagccaacctcttgtcacactcccacagtgctcctctactta

SEQ ID NO: 92619 - DNA, 80 bp, synthetic construct
  source 1..80: mol_type = other DNA
tgctagggtgagctaagaccagaatgagtatcatttttgtcaatgatttaatatcaattaactgattttttaattcacca

SEQ ID NO: 92620 - DNA, 80 bp, synthetic construct
  source 1..80: mol_type = other DNA
atctcatttttacacaccagtatagatgattgggggaccttagcttgttgtcttttctccatccacttctttaagtctcg

SEQ ID NO: 92621 - DNA, 80 bp, synthetic construct
  source 1..80: mol_type = other DNA
atccttaaggactttaccttgttcaggaacgatctccaacattgcatttggcaaccatcaacagaagggcttttgggtct

SEQ ID NO: 92622 - DNA, 80 bp, synthetic construct
  source 1..80: mol_type = other DNA
tctgtcttctaagtctgcataaagaaaccttaaaattggtgaggctctcttgaactggtaggataattgctctatgctat

SEQ ID NO: 92623 - DNA, 80 bp, synthetic construct
  source 1..80: mol_type = other DNA
tgacccccaagtcaattcctcacatgtcctacccttgagtctcattctcccactgcttgattgtatcatcacctttcctt

SEQ ID NO: 92624 - DNA, 80 bp, synthetic construct
  source 1..80: mol_type = other DNA
atgggtggcaaacaatccagacctccaaagaaagtggacagtccaagagccaacctgattcctgatgcttcttacatggg

SEQ ID NO: 92625 - DNA, 80 bp, synthetic construct
  source 1..80: mol_type = other DNA
ctatgtatttcccccgctggcacatcgaaccactaaattctaggtgaatggaaaaattctccctaaaactagcctcctga

SEQ ID NO: 92626 - DNA, 80 bp, synthetic construct
  source 1..80: mol_type = other DNA
cttttgatttgaaacctaatggtttgactcagctttgtagacccaggtggcaatgtggccacagactcaaaaaagtcttc

SEQ ID NO: 92627 - DNA, 80 bp, synthetic construct
  source 1..80: mol_type = other DNA
caatgattccgccttaaaatcaactaatcctgatgcgatcaattggttttggttgaatcttgctggttcaatatcataat

SEQ ID NO: 92628 - DNA, 80 bp, synthetic construct
  source 1..80: mol_type = other DNA
catatttaaacattggtctctccactcctttgtagataaccttctcaacaaatgaagagaatggtcctagtctttgcaga

SEQ ID NO: 92629 - DNA, 80 bp, synthetic construct
  source 1..80: mol_type = other DNA
ccttcaccccccggaatagatgttttatgcgggaaccatgtgaaggaactaagagtcctcgttgttgccacaaatgatct

SEQ ID NO: 92630 - DNA, 80 bp, synthetic construct
  source 1..80: mol_type = other DNA
cacatacgactcaaagtagacctgtctcataaaattgtcgactgcgtcattagtgctgacaactctttcttctatcattg

SEQ ID NO: 92631 - DNA, 80 bp, synthetic construct
  source 1..80: mol_type = other DNA
ctcgcttccacttaactatatgagaaacaagagacaatgcttcacaattcacatctagtgctacacaaagatccaaaaat

SEQ ID NO: 92632 - DNA, 80 bp, synthetic construct
  source 1..80: mol_type = other DNA
tttattctaggcgaccacttcattttagtagaggctagatcactcataaaaggcaaaatgtgtttttcaaatatagtggg

SEQ ID NO: 92633 - DNA, 80 bp, synthetic construct
  source 1..80: mol_type = other DNA
atacaatctcctgagagaatggatgatgtggctcacacccaccctgtcttccaacagtttagatactgtaggctttaacg

SEQ ID NO: 92634 - DNA, 80 bp, synthetic construct
  source 1..80: mol_type = other DNA
ggaagtagtcgcatggattatgcttaaaaaactccattgaattgggctcctttggttcccctaagacccaagctcccagt

SEQ ID NO: 92635 - DNA, 80 bp, synthetic construct
  source 1..80: mol_type = other DNA
tctgtaagatgcctctacctacaaagctcaaggcatccaccagtccgacagcccctcccatcataggaaccaacaccaca

SEQ ID NO: 92636 - DNA, 80 bp, synthetic construct
  source 1..80: mol_type = other DNA
tcaattgcagttgacaaagagatacacatgtaatcccatagtaagggtcgaaaatagccagccacatctacagactcttg

SEQ ID NO: 92637 - DNA, 80 bp, synthetic construct
  source 1..80: mol_type = other DNA
tctcacctttagagggaccctccagaattgaaccccgtgttcagctgtcagtgcgtcaatttcctgaatatttgcaattg

SEQ ID NO: 92638 - DNA, 80 bp, synthetic construct
  source 1..80: mol_type = other DNA
ctggtgaaagtagatgacaatttattttggatggtctttactattgtcgggacctcttcttcttccaagttgactgcacc

SEQ ID NO: 92639 - DNA, 80 bp, synthetic construct
  source 1..80: mol_type = other DNA
tgaatagataatcttttgtctaagcaccatcctcaatgggtgataagctgttagattcagccagcagtattctaggtcag

SEQ ID NO: 92640 - DNA, 80 bp, synthetic construct
  source 1..80: mol_type = other DNA
agtctgataaggactcaacacccatcatgttacaaaggttttttaatgaagatgaatgttcactggaaaggtagttagtt

SEQ ID NO: 92641 - DNA, 80 bp, synthetic construct
  source 1..80: mol_type = other DNA
gtaaattcctcatgaaggtccccaaccttcaacttgttgaacagcttcctcagcattgatcggacctttttgcaggactc

SEQ ID NO: 92642 - DNA, 80 bp, synthetic construct
  source 1..80: mol_type = other DNA
aggaatgagcctctcaatttgcctcataatcctgtatgaacggttgccatcaacccagtccctcacatcagtcccacaat

SEQ ID NO: 92643 - DNA, 80 bp, synthetic construct
  source 1..80: mol_type = other DNA
tcagaagaaatgggtcaatcgggtatctagcatactgcaacaatgacagtgttctcaattgaaccaagttgcatagacgc

SEQ ID NO: 92644 - DNA, 80 bp, synthetic construct
  source 1..80: mol_type = other DNA
acaggcaccccatttgcgactgactggtcaacaattgtatctattgtttccgccaattgatgtggttctttacactttat

SEQ ID NO: 92645 - DNA, 80 bp, synthetic construct
  source 1..80: mol_type = other DNA
ttttgggacttacaaacttgttaagctgatcactcatgtaaaagtgaaactctaacaacatcttaaattcatctggatct

SEQ ID NO: 92646 - DNA, 80 bp, synthetic construct
  source 1..80: mol_type = other DNA
cgtgacatcagttctgtcagattttgatcaaataaagatatctggtcatcactggatgtataagcatcaattacccctcc

SEQ ID NO: 92647 - DNA, 80 bp, synthetic construct
  source 1..80: mol_type = other DNA
acaaacacttcctatagcatagttaatgaacctctcagagatgagtgcatagaagtctgaagtgttatgtaagatacctt

SEQ ID NO: 92648 - DNA, 80 bp, synthetic construct
  source 1..80: mol_type = other DNA
gtcccatatctaaaatggaacttatgtgagaaggcacccgacccatttgaaagttagagtagaaaaagtcttcggtgaca

SEQ ID NO: 92649 - DNA, 80 bp, synthetic construct
  source 1..80: mol_type = other DNA
gtctgtgacgtgttggtccttagacccagctgtgccttaataaaagacttcatcattgctgatacaacattgaatggtat

SEQ ID NO: 92650 - DNA, 80 bp, synthetic construct
  source 1..80: mol_type = other DNA
ctccaccattttatgcatgtgccatgttagtagagtggaaaggtaatcacgccctttgatgtctgcttgtaagtcctttg

SEQ ID NO: 92651 - DNA, 80 bp, synthetic construct
  source 1..80: mol_type = other DNA
ataacacaaccagattttgtaatattgtaaggaataagaaaggacacatcatggggccccatttgctatgatccatgctg

SEQ ID NO: 92652 - DNA, 80 bp, synthetic construct
  source 1..80: mol_type = other DNA
cccctatgtagagctccctattacccccaacttgttctttataagacagggagaacttcaatctccctgtgtcgggtcca

SEQ ID NO: 92653 - DNA, 80 bp, synthetic construct
  source 1..80: mol_type = other DNA
gttgaattgtaggactgtggtgattcttgactataaaagcataaattcttcaacattgctgttgtgcagtttgttagaga

SEQ ID NO: 92654 - DNA, 80 bp, synthetic construct
  source 1..80: mol_type = other DNA
tagagctttactaagagcttctgaattactctccctctcgctaattctcacatcatcagaaagtttgttagtgtcaaatt

SEQ ID NO: 92655 - DNA, 80 bp, synthetic construct
  source 1..80: mol_type = other DNA
taaaatttagacacttagatctataatgagaatatttgcccatgagcttatttccgttcattgacaataatattgattta

SEQ ID NO: 92656 - DNA, 80 bp, synthetic construct
  source 1..80: mol_type = other DNA
aagcattgaaaaaattcacagtcgaaatatgtccttgtggttacagcttttgtaagttccccgattgggcagtttgtcat

SEQ ID NO: 92657 - DNA, 80 bp, synthetic construct
  source 1..80: mol_type = other DNA
agaaccacaataaaagtacttctccctcatgttacagtcattataaagagcatcacaaaattctttataaaaaccctccg

SEQ ID NO: 92658 - DNA, 80 bp, synthetic construct
  source 1..80: mol_type = other DNA
gtaagatttcaaaatcaaaatcctcaatcatgtggtgtgataattcccctttaatcaatctaatataaaacttatttgag

SEQ ID NO: 92659 - DNA, 80 bp, synthetic construct
  source 1..80: mol_type = other DNA
ctaagtcacttattgaaggctgatcacctgtctcaagatgtgggctttgtttcacaggttctttatactgatctacaatt

SEQ ID NO: 92660 - DNA, 80 bp, synthetic construct
  source 1..80: mol_type = other DNA
ctttcaactgtttctcttaactgatcaaagtacattgaagctccgccatctaggagtacctcatccaaatcagtcttgtc

SEQ ID NO: 92661 - DNA, 80 bp, synthetic construct
  source 1..80: mol_type = other DNA
aatttctaaatcctgtcctttagaacccatcactaaactgctcattgcttgctgaatcttgtattcatagtcttgcttgt

SEQ ID NO: 92662 - DNA, 80 bp, synthetic construct
  source 1..80: mol_type = other DNA
tgagtaaaaacttcccctttcgggaaaagacctcagttaactgtgtgacagctagtgcagtaagtttattaaagtcataa

SEQ ID NO: 92663 - DNA, 80 bp, synthetic construct
  source 1..80: mol_type = other DNA
ttaaggattctggagccatctgtgtacttgttgatcaccacactcttattgctggccaagtccaaggctgttgcacagcc

SEQ ID NO: 92664 - DNA, 80 bp, synthetic construct
  source 1..80: mol_type = other DNA
gcttgtaacaatggggtccttcatctccttctttatctctttttccttgaaaagacttccattattgaaagaggatgtca

SEQ ID NO: 92665 - DNA, 80 bp, synthetic construct
  source 1..80: mol_type = other DNA
aaagggagaggaacttctttgacacgccaggccttttgtagctcaacttcttggcattagtgcatccctccttactcaga

SEQ ID NO: 92666 - DNA, 80 bp, synthetic construct
  source 1..80: mol_type = other DNA
aatctttttgcattgcacaccatttcatctaattcttcttcagtggctttatctgtcgggttgacagtgacatgtccaaa

SEQ ID NO: 92667 - DNA, 80 bp, synthetic construct
  source 1..80: mol_type = other DNA
atccaatttcggttcaagaaatttttcgaaacactttatttgatctgttaacctatctggggtttccttagttataaaat

SEQ ID NO: 92668 - DNA, 80 bp, synthetic construct
  source 1..80: mol_type = other DNA
gacacatgtaagaaatattcaacacaaacttaaatctatttgtaagcatgcttttaacatccttatgcaacactatattc

SEQ ID NO: 92669 - DNA, 80 bp, synthetic construct
  source 1..80: mol_type = other DNA
agcagagatcttatgagcttaaatagcaaaaactcagtctctgtgatcaacttttcttttaacttgtcaatcagctcttt

SEQ ID NO: 92670 - DNA, 80 bp, synthetic construct
  source 1..80: mol_type = other DNA
ccaagactaaaacgagtatcatttttgtcaatgacttaatatcaattaattgactttttaattcactacagtcttctatc

SEQ ID NO: 92671 - DNA, 80 bp, synthetic construct
  source 1..80: mol_type = other DNA
caactcaccatggtttctacagttgtgtgtagaacttcaactgagaaaattgatgggaagtacctttttggatcagcata

SEQ ID NO: 92672 - DNA, 80 bp, synthetic construct
  source 1..80: mol_type = other DNA
aaatgaacaaacctcaccaaccacagcattgttgactgcataacattttgaacactcacctgtcttttggtaaagtagct

SEQ ID NO: 92673 - DNA, 80 bp, synthetic construct
  source 1..80: mol_type = other DNA
gaaattcaactccttctagagagaattcttggcaatatgcctctttacatctcacaacttgatacctagctgccccaaat

SEQ ID NO: 92674 - DNA, 80 bp, synthetic construct
  source 1..80: mol_type = other DNA
tttctaaatctgtagtacccaaaatgtctatagatcccattatgtatggaaatttctcttcttgtgacttctgataacta

SEQ ID NO: 92675 - DNA, 80 bp, synthetic construct
  source 1..80: mol_type = other DNA
attgttggagttactcctgaaatatcaagtttcaatattgagtcataaatatcacaattgagcacatccatattcactcc

SEQ ID NO: 92676 - DNA, 80 bp, synthetic construct
  source 1..80: mol_type = other DNA
gtaatgatccacgctgatacccacagctgtcagagctgcaatggctttggtcacagtcttttggaccacagactttagga

SEQ ID NO: 92677 - DNA, 80 bp, synthetic construct
  source 1..80: mol_type = other DNA
tttcatttttgcacaccagtgtgggtgatttagatacctcaatttgttgccttctttccatccatttctttaaatccctc

SEQ ID NO: 92678 - DNA, 80 bp, synthetic construct
  source 1..80: mol_type = other DNA
tttgttgactccaaagagactaaccgatcatttacactaatgaaacatgaaccaagccacccttttggatgtctgcctct

SEQ ID NO: 92679 - DNA, 80 bp, synthetic construct
  source 1..80: mol_type = other DNA
gttctttacttgatcatttatactggcaagaagcactaagatgtcaaagaccaacaataactttcttctggtgttcagga

SEQ ID NO: 92680 - DNA, 80 bp, synthetic construct
  source 1..80: mol_type = other DNA
tccttaaggactttaccttgtttaggaacgacctccaacattgcatttggcatccatctacagcaggacctctaggttct

SEQ ID NO: 92681 - DNA, 80 bp, synthetic construct
  source 1..80: mol_type = other DNA
ctgctttctaggtctgcataaagaaacctcagaattggtgagactctcttaaactggtaggtcaattgttctatgctatc

SEQ ID NO: 92682 - DNA, 80 bp, synthetic construct
  source 1..80: mol_type = other DNA
ttcactaacaactccttcatcagtatataaaccattgaactcatgcattagctcctcttgatctactctgatgaactgac

SEQ ID NO: 92683 - DNA, 80 bp, synthetic construct
  source 1..80: mol_type = other DNA
attctatttctccctgcctgattctgttcctgaacacctggtactcctcttcaatttgtgtttttacttcatgtgccgac

SEQ ID NO: 92684 - DNA, 80 bp, synthetic construct
  source 1..80: mol_type = other DNA
aatttgttattgataccctgatggcaaagagtgattatgtcctcataatgattggcgcgattgtctgttaagacattcaa

SEQ ID NO: 92685 - DNA, 80 bp, synthetic construct
  source 1..80: mol_type = other DNA
actctccacaccagagagtctgccggacgtcatagaaagagactcacaaagcctgacatactctgattcttcaaaaagtg

SEQ ID NO: 92686 - DNA, 80 bp, synthetic construct
  source 1..80: mol_type = other DNA
aaaccgtaatagtgagaataatgtttctctcaacttgtcattaacccaatcagggatttgctcattataaaatgatgtcc

SEQ ID NO: 92687 - DNA, 80 bp, synthetic construct
  source 1..80: mol_type = other DNA
tcccatcaatgagtgggatgagattgatctctacggatttaagatcttctttcaattgctctaattttctgaggtcttca

SEQ ID NO: 92688 - DNA, 80 bp, synthetic construct
  source 1..80: mol_type = other DNA
gtgtatttctgttcaaagttggctggtgaagacctcacaaagcactcaagtaaaatgagaacatttccactcagcttata

SEQ ID NO: 92689 - DNA, 80 bp, synthetic construct
  source 1..80: mol_type = other DNA
gcaaccaaggctccaactagcatgtcatgagagctatcattgacttccttgataaagatctcgagatcttggtcttgaat

SEQ ID NO: 92690 - DNA, 80 bp, synthetic construct
  source 1..80: mol_type = other DNA
tgttgtgttcacaaccatttgcattacatgaatcaagctcaatgcagagggatagcaactttaacccctccataagaagc

SEQ ID NO: 92691 - DNA, 80 bp, synthetic construct
  source 1..80: mol_type = other DNA
caactttaacccctccataagaagcattctgggctctgtctgaacaaggaatgcaattttttgcctagaaagtttctcat

SEQ ID NO: 92692 - DNA, 80 bp, synthetic construct
  source 1..80: mol_type = other DNA
aacaggagtgaatgtggctaacctcttgtcacactcccacagtgctcctctattcacaacaagtggaactggttctgttt

SEQ ID NO: 92693 - DNA, 80 bp, synthetic construct
  source 1..80: mol_type = other DNA
tcctcagttttgcaaaagttgctggtttgaaaacaagggcctagttgaatgcaacaaccactatctatgcctcaactgtc

SEQ ID NO: 92694 - DNA, 80 bp, synthetic construct
  source 1..80: mol_type = other DNA
ggggacccaccatagtgaaatcatactctgaaaaatgaagttcatgtacatcaacatcaatttcaagaggagtaacaggt

SEQ ID NO: 92695 - DNA, 80 bp, synthetic construct
  source 1..80: mol_type = other DNA
cccagttgtcttgtatctatcaagaactcgttgataacctcagtgtctacatataaatgagaacctctcttgtaggtggg

SEQ ID NO: 92696 - DNA, 80 bp, synthetic construct
  source 1..80: mol_type = other DNA
tccagacaacaccaacctccagcagtctggtagaacacatgagttcactgtaccagaatacatgacattaacactatcaa

SEQ ID NO: 92697 - DNA, 80 bp, synthetic construct
  source 1..80: mol_type = other DNA
tgctagggtgagccaagactaaaacgagtatcatttttgtcaatgacttaatatcaattaattgactttttaattcacta

SEQ ID NO: 92698 - DNA, 80 bp, synthetic construct
  source 1..80: mol_type = other DNA
cttgactgtatcatcacctttcccttggatttactaaaacacaaagcgtatcctttgaagtcaatccagtcgtccattgc

SEQ ID NO: 92699 - DNA, 80 bp, synthetic construct
  source 1..80: mol_type = other DNA
aatgaccttatccaaatcatttattgaaggctgactacctgccgcaggatgtgagttgcgcttcacaggctctttgtact

SEQ ID NO: 92700 - DNA, 80 bp, synthetic construct
  source 1..80: mol_type = other DNA
catgttctgaaaactggagcatgtgtatgtcaatgtcagcctcaagaggggtgacagaccccaactgccgtgcatctatc

SEQ ID NO: 92701 - DNA, 80 bp, synthetic construct
  source 1..80: mol_type = other DNA
tttttgcttcacttgatcatttatactcgcaagaagcactaaagtatcaaataccaacagtaatttcctcctggtgttca

SEQ ID NO: 92702 - DNA, 80 bp, synthetic construct
  source 1..80: mol_type = other DNA
cggggggaccccccgccgggggcccccccggaggagccacaccaaactcactactcaatatcctcaacattgtccatctc

SEQ ID NO: 92703 - DNA, 80 bp, synthetic construct
  source 1..80: mol_type = other DNA
tcttggaagaatgtcacaatctgtcccatcttgatcgaatgaatccctaacaaggtcttcaaaaatgcgcaatcctaaat

SEQ ID NO: 92704 - DNA, 80 bp, synthetic construct
  source 1..80: mol_type = other DNA
actgcagtgacttatttgagcccccattcccggtcttttgtggtttgttatctgactctaagtcaaccacagtgttctcc

SEQ ID NO: 92705 - DNA, 80 bp, synthetic construct
  source 1..80: mol_type = other DNA
ttacattgctcttgattccagacatgggagttgggattgtataatgactagttatcagtacctgatcatccagaacacaa

SEQ ID NO: 92706 - DNA, 80 bp, synthetic construct
  source 1..80: mol_type = other DNA
gttcaatggtctacaaaggagtttatgaactacaaacccttgaattgaacatggagacattaaatatgactatgccattg

SEQ ID NO: 92707 - DNA, 80 bp, synthetic construct
  source 1..80: mol_type = other DNA
actgcaatgacttgtttgaacctccatttccggttttttgtggtttgttgtctgattccagatcaaccacagtgttttcc

SEQ ID NO: 92708 - DNA, 80 bp, synthetic construct
  source 1..80: mol_type = other DNA
atcattacatccgtgtgggaaatgatactgggcttgaactcaccctgaccaacaatactttactcaaccataagttttgc

SEQ ID NO: 92709 - DNA, 80 bp, synthetic construct
  source 1..80: mol_type = other DNA
tgttatgaaagctgtctggttgttgcacttggcgggctctcagcacagttgtcccacagatgtgagctatgcaaagcgca

SEQ ID NO: 92710 - DNA, 80 bp, synthetic construct
  source 1..80: mol_type = other DNA
taagtcacagttacgcagttgatgcagcaaaccactgcggcacagtggcaaatggtgtgctgcagacatttatgagaatg

SEQ ID NO: 92711 - DNA, 80 bp, synthetic construct
  source 1..80: mol_type = other DNA
gtgactccaggagtttcttgatgtcctctgacccttgacaggtgatgaccatatttcgtggaagtgcttctatgactgca

SEQ ID NO: 92712 - DNA, 80 bp, synthetic construct
  source 1..80: mol_type = other DNA
taagagtcataagttgggaataagttagtcctgcagggtaaccagcggactgcagggatctattagatccgctgttccca

SEQ ID NO: 92713 - DNA, 80 bp, synthetic construct
  source 1..80: mol_type = other DNA
agtttttgaggcttgttgtccgactccaaatctactacagtattttcccaagccctaccaatgattgaggttcttgatgc

SEQ ID NO: 92714 - DNA, 80 bp, synthetic construct
  source 1..80: mol_type = other DNA
agacagctctcttctcaaggactgagtccacaggaatgacttcacttctttcgaagcgctcattgttgttgttgggctgt

SEQ ID NO: 92715 - DNA, 80 bp, synthetic construct
  source 1..80: mol_type = other DNA
tctatctcatcagcattttccttcatttaattaagataccgaaccacaggcacattgtgggtaagccatgccccaaaccc

SEQ ID NO: 92716 - DNA, 80 bp, synthetic construct
  source 1..80: mol_type = other DNA
gtgattccaagagtttcttaatgtcttctgacccttgacaggtaatgaccatgtttcgtgggagcgcctctatcactgcg

SEQ ID NO: 92717 - DNA, 80 bp, synthetic construct
  source 1..80: mol_type = other DNA
tgagggtcattagctgagaataagtcagtcctgaagggaagccagcagattgtagggatctgttggacccgttgttccca

SEQ ID NO: 92718 - DNA, 80 bp, synthetic construct
  source 1..80: mol_type = other DNA
agacagctctctcctcaaggactgagtccacaagaatgacttcacttcctttgaggcactcattgttgttgttgaactgc

SEQ ID NO: 92719 - DNA, 80 bp, synthetic construct
  source 1..80: mol_type = other DNA
ccaacgtaagtatcataaaccacagattctgtaatctttctgatgcacacaagaggaatctctatgatcacaccctcatg

SEQ ID NO: 92720 - DNA, 80 bp, synthetic construct
  source 1..80: mol_type = other DNA
ggccatctcccattggttatcttggacttctttcacagaggaccagagatatttacatcagtagaaggctgttgggaaca

SEQ ID NO: 92721 - DNA, 80 bp, synthetic construct
  source 1..80: mol_type = other DNA
ccccggggggcgggtggccagatttcactcaatatcctcaacacatctctctggctcaaataactccgagcatgttctcc

SEQ ID NO: 92722 - DNA, 80 bp, synthetic construct
  source 1..80: mol_type = other DNA
tcactcagtatgctgatgtggtctataggtctctgctttgtaaggactgagacaatatctacacctgtccattgaatcct

SEQ ID NO: 92723 - DNA, 80 bp, synthetic construct
  source 1..80: mol_type = other DNA
agcattatcaattccactattccccttttttgaccctagaaccaagttgctcattgcttgctgtattttatagtcataat

SEQ ID NO: 92724 - DNA, 80 bp, synthetic construct
  source 1..80: mol_type = other DNA
cctgtttattaagcaggaacttacctttacgtgcaaacacttcggttagctgtgttacagccaaagccgttagcttgttg

SEQ ID NO: 92725 - DNA, 80 bp, synthetic construct
  source 1..80: mol_type = other DNA
gtctctctaagtccgttgtactcaaaatgtcaatgacaccaagggtgtaggggaacacaccttcctgagacctttgatag

SEQ ID NO: 92726 - DNA, 80 bp, synthetic construct
  source 1..80: mol_type = other DNA
ctcatggtgggtgtgactccagagacttcaatgctcatgactgcatcaaaaacgtcacagtcaaggattttgaaatcaat

SEQ ID NO: 92727 - DNA, 80 bp, synthetic construct
  source 1..80: mol_type = other DNA
gctcatgatttcgtccttctttggatgacagagtatctgtgtccttggttttcaccccccttctgctgtcaatccaacgt

SEQ ID NO: 92728 - DNA, 80 bp, synthetic construct
  source 1..80: mol_type = other DNA
aaacatttattaccatgcttcaaatagtccagccggttagcaagaagaattaacacatcaaaaacaaggaggagttttct

SEQ ID NO: 92729 - DNA, 80 bp, synthetic construct
  source 1..80: mol_type = other DNA
ccttgtattaagaatcctcagggactttatcttgttcagaaaggatctccagcattgcatctgctcaccctgaaaactag

SEQ ID NO: 92730 - DNA, 80 bp, synthetic construct
  source 1..80: mol_type = other DNA
caacctttccctcactggaatccagatctgcgtataaaaacttaagaactggagaggctcttctaaattgaaatgttaac

SEQ ID NO: 92731 - DNA, 80 bp, synthetic construct
  source 1..80: mol_type = other DNA
gctcaatactatcgtcatgagtgttaattttatcattgtacaagtttccaaagtcctccagtagcttcactttgtcagac

SEQ ID NO: 92732 - DNA, 80 bp, synthetic construct
  source 1..80: mol_type = other DNA
ttgacaaattggctctctatgtctccctgcctcaatttattcctgaagatctgatactcctcttcgattaaacccttgac

SEQ ID NO: 92733 - DNA, 80 bp, synthetic construct
  source 1..80: mol_type = other DNA
gtctctttaaaactagcatcttgacttttaattttgtatctgactgtctgatgaaattgcacagaacccactggcattgt

SEQ ID NO: 92734 - DNA, 80 bp, synthetic construct
  source 1..80: mol_type = other DNA
cctaggcatttaggattgcgcttttagagatctttgtgtgagtgagcttcatcaagccatggggcaaattataacatttt

SEQ ID NO: 92735 - DNA, 80 bp, synthetic construct
  source 1..80: mol_type = other DNA
tatccaactgataaacaaagcagtgaatgcactaatcaatgaccagctgattatgaagaatcatttgagagatatcatgg

SEQ ID NO: 92736 - DNA, 80 bp, synthetic construct
  source 1..80: mol_type = other DNA
aactgttgcaaaaggagtacatagacaggcaaggaaaaacacccttagggttagtagatctttttgtcttcagcaccagt

SEQ ID NO: 92737 - DNA, 80 bp, synthetic construct
  source 1..80: mol_type = other DNA
atctacaatgttgctacatgtggcctttttggactggtgtcctttctcctcttatgtggaagatcatgctcaacaactta

SEQ ID NO: 92738 - DNA, 80 bp, synthetic construct
  source 1..80: mol_type = other DNA
ataagctttatgtcccttcttccttgagagtccaagagtctcttaatatcatctgaaccttgacaggtcagtaccatatt

SEQ ID NO: 92739 - DNA, 80 bp, synthetic construct
  source 1..80: mol_type = other DNA
gcgagggagggcttcaatgactgcactggtcaaaccaggttgagcagggaaaagatctgctacatcaatcccgtgagaat

SEQ ID NO: 92740 - DNA, 80 bp, synthetic construct
  source 1..80: mol_type = other DNA
ctatgtaaggccagccgtcaccagaaagacagatcttataaagtatgttttcgtaagggttcctctcaccaggtgtatct

SEQ ID NO: 92741 - DNA, 80 bp, synthetic construct
  source 1..80: mol_type = other DNA
gaaacaaacattcccaaagatcttttcacctttaaaacagacttcaagattccatccattgtctgaggtgtaaccttgat

SEQ ID NO: 92742 - DNA, 80 bp, synthetic construct
  source 1..80: mol_type = other DNA
ggtctccaacatgttccccccatcaagcatacaagctccagctttcactgcagctcctaaactgaaattgtaaccagaaa

SEQ ID NO: 92743 - DNA, 80 bp, synthetic construct
  source 1..80: mol_type = other DNA
aaatagctccgacctggacagactttcccaaagccatcctatattaaatatggtggacaccaagaagagctccttgaaca

SEQ ID NO: 92744 - DNA, 80 bp, synthetic construct
  source 1..80: mol_type = other DNA
gagacatgctaatgtcagactaggcatggtgccgaactggttgttcagaagatccggattcttaacatcccacaccctaa

SEQ ID NO: 92745 - DNA, 80 bp, synthetic construct
  source 1..80: mol_type = other DNA
caactccgtctcttccaggttgggtaccctgagccccaccaaccatgcctatcatgttcagcaatgctcttctttgctca

SEQ ID NO: 92746 - DNA, 80 bp, synthetic construct
  source 1..80: mol_type = other DNA
agctgctgtgtactcaaattccccatgtaaacacctgagcttagtggcctttctgttctaatgaccttcgactttagctt

SEQ ID NO: 92747 - DNA, 80 bp, synthetic construct
  source 1..80: mol_type = other DNA
ctaagtcagctgccaatgtcagcaggtcatctgaggtcaaggtcccaactcttaagatgctcttttgttgtgtcgatttg

SEQ ID NO: 92748 - DNA, 80 bp, synthetic construct
  source 1..80: mol_type = other DNA
cctgattcaaatctctgagacgtttcagatcaccatcatccctcttttgtttgcgcattaagcgttgtacattgctgact

SEQ ID NO: 92749 - DNA, 80 bp, synthetic construct
  source 1..80: mol_type = other DNA
tcagaaaaatcaagaccatgaaggagagcctgagcatccttaacaacttgaagttttatgctggagcaataacctgaaag

SEQ ID NO: 92750 - DNA, 80 bp, synthetic construct
  source 1..80: mol_type = other DNA
acaactcccaccattacatcagggtcggaaatgagactggcttagagttgactttaacaaatacaagcattatcaaccac

SEQ ID NO: 92751 - DNA, 80 bp, synthetic construct
  source 1..80: mol_type = other DNA
ctccctcctcaatgactgtgtccagagaaatgacttcacttccttggaagcactcatcttagtctggatacttagagatc

SEQ ID NO: 92752 - DNA, 80 bp, synthetic construct
  source 1..80: mol_type = other DNA
tctggatacttagagatctactggttgaaagtttcactcagtaagtcaatgaaaagcgcaatccagtagcctaggatcca

SEQ ID NO: 92753 - DNA, 80 bp, synthetic construct
  source 1..80: mol_type = other DNA
atccattcctaactttaatcagtacgaagcaatgagctgtgacttcaatggagggaagataagtgtgcagtacaacctca

SEQ ID NO: 92754 - DNA, 80 bp, synthetic construct
  source 1..80: mol_type = other DNA
tgtggatgcggccaaccactgcggaaccattgccaatggcgttcttcagacttttatgaggatggcttggggtggcagtt

SEQ ID NO: 92755 - DNA, 80 bp, synthetic construct
  source 1..80: mol_type = other DNA
tgattccggaaaggggaactgggattgcataatgacttcctaccaatatctgataattcaaaacaccacttgggaagatc

SEQ ID NO: 92756 - DNA, 80 bp, synthetic construct
  source 1..80: mol_type = other DNA
tcagtcgaagactccttgggacttttacttggactctctctgactctgaaggtaatgaaacaccgggtgggtattgtcta

SEQ ID NO: 92757 - DNA, 80 bp, synthetic construct
  source 1..80: mol_type = other DNA
cccgccgggggcccccccggggggggcggacagccttcctctactcaatgtcctcaatgcacttctccggcccaaacagc

SEQ ID NO: 92758 - DNA, 80 bp, synthetic construct
  source 1..80: mol_type = other DNA
ttcctctactcaatgtcctcaatgcacttctccggcccaaacagctccgtacatgttcttccctttagtctcaggctacc

SEQ ID NO: 92759 - DNA, 80 bp, synthetic construct
  source 1..80: mol_type = other DNA
catcgccaggtatggcacctgtattggttttaggcttgtgcctgtatggcttgtgggtcagctagtggtgccccacaaaa

SEQ ID NO: 92760 - DNA, 80 bp, synthetic construct
  source 1..80: mol_type = other DNA
attcagttggacttcagtggtaaggctctttttagtgaatccccgaatcaaagcacccagtaaaatgggcaacagacagg

SEQ ID NO: 92761 - DNA, 80 bp, synthetic construct
  source 1..80: mol_type = other DNA
ctagagtacctggcaaagatgggcaacaaacaggccaaatcgacaaaagtcgatgaacatcaaagagcacatctagtgcc

SEQ ID NO: 92762 - DNA, 80 bp, synthetic construct
  source 1..80: mol_type = other DNA
cagaaggaaaggatcaataggatacttagcataacataacaaacttaaagtcctcttttgaatttgattacacagatcaa

SEQ ID NO: 92763 - DNA, 80 bp, synthetic construct
  source 1..80: mol_type = other DNA
ctgaattagagtgcctactcaaaatgggcaacagacaggccaaatcgaccaaagtcgctgaacatcaaagagctcatctg

SEQ ID NO: 92764 - DNA, 80 bp, synthetic construct
  source 1..80: mol_type = other DNA
acaaactggccttctatgtccccttgccttagtttgttcctgaagatttgatactcctcctcaattaaactcttaacctc

SEQ ID NO: 92765 - DNA, 80 bp, synthetic construct
  source 1..80: mol_type = other DNA
tactgagcttgaacttgtgtctgtatggattgtgggtcagttggtggtgtctcaaaaaagtccttacagaaatgagagac

SEQ ID NO: 92766 - DNA, 80 bp, synthetic construct
  source 1..80: mol_type = other DNA
tgtgtctgtatggattgtgggtcagttggtggtgtctcaaaaaagtccttacagaaatgagagacaatatgcctaggatc

SEQ ID NO: 92767 - DNA, 80 bp, synthetic construct
  source 1..80: mol_type = other DNA
cttgaaagaatgtcactatttgtcccatagtttgatgaaactcaatcacacaaagatttctttaagcgcaatcctaaatg

SEQ ID NO: 92768 - DNA, 80 bp, synthetic construct
  source 1..80: mol_type = other DNA
gagtgtcattagttgagaataagtaagccctgttgggaaccctgcagattgcagagacttgttagacccagcagcaccca

SEQ ID NO: 92769 - DNA, 80 bp, synthetic construct
  source 1..80: mol_type = other DNA
caatgactgtgtccaaaggaatgatttcacttccttagaagcactcattttgctcaatgtcaaccaaaactcactggttg

SEQ ID NO: 92770 - DNA, 80 bp, synthetic construct
  source 1..80: mol_type = other DNA
ggccaaatcaacaaaagtcgatgaacatcaaagagctcatctagtgccagatgcatcccatctaggcccccagttttgca

SEQ ID NO: 92771 - DNA, 80 bp, synthetic construct
  source 1..80: mol_type = other DNA
gtcctcaatgcacttctccggtccaaacaactctgaacatgtccttccctttagtctcaggctgcccccacttgactgga

SEQ ID NO: 92772 - DNA, 80 bp, synthetic construct
  source 1..80: mol_type = other DNA
tgtggcacctatgttggacttgggcttgtacctgtatggtgtgtgagtcagctggcagtgccctacaaaagctcttacag

SEQ ID NO: 92773 - DNA, 80 bp, synthetic construct
  source 1..80: mol_type = other DNA
cctgaatcaaagtgcccagttaaaatgggcaacaaacaggccaaatcgacaaaaatcgatgatcatcaaagagctcatct

SEQ ID NO: 92774 - DNA, 80 bp, synthetic construct
  source 1..80: mol_type = other DNA
tgcacttctctggtccaaacaactctgaacatgtcctccccttcagtcttaggctgcccccacttgactgaatcataact

SEQ ID NO: 92775 - DNA, 80 bp, synthetic construct
  source 1..80: mol_type = other DNA
atcgccaattgtggcacctgtattgggtttgggtttgtgccagaatggcttgtgggttagtcggcggtgcccctcaaaag

SEQ ID NO: 92776 - DNA, 80 bp, synthetic construct
  source 1..80: mol_type = other DNA
actcatcctggtctggacacttggaggtttgccggttgaaagtatcactcagtgagtcaatgaaaggcgcaatccaatag

SEQ ID NO: 92777 - DNA, 80 bp, synthetic construct
  source 1..80: mol_type = other DNA
tgatttcagaggctatgctctttgttatagtaaatcaaggcaaagagttatgattcagtcaagtaagggcagcctaagac

SEQ ID NO: 92778 - DNA, 80 bp, synthetic construct
  source 1..80: mol_type = other DNA
accacgtctgattcaacaaaccaggctgacctacctttgaaagttggacccgacaaagcaagtctccaacagtcagacag

SEQ ID NO: 92779 - DNA, 80 bp, synthetic construct
  source 1..80: mol_type = other DNA
cccgccgggggcccccccggggggcaggcagctcaaccctactcaatatcctcaacacacctctctggcccaaacaactc

SEQ ID NO: 92780 - DNA, 80 bp, synthetic construct
  source 1..80: mol_type = other DNA
ggcagctcaaccctactcaatatcctcaacacacctctctggcccaaacaactctgaacatgtcctccccttcagtctta

SEQ ID NO: 92781 - DNA, 80 bp, synthetic construct
  source 1..80: mol_type = other DNA
tgagcttgggtttgtgccgatgtagtttgtgggtcagttggtgatgccccacagaagctcttacagaaatgagagtcaat

SEQ ID NO: 92782 - DNA, 80 bp, synthetic construct
  source 1..80: mol_type = other DNA
gtggtgaggcttattttagtaaatccctgaatcaaagttcccagtcaaaatgggcaatagacaggccaagtcgacaaaag

SEQ ID NO: 92783 - DNA, 80 bp, synthetic construct
  source 1..80: mol_type = other DNA
catcgccaattgtggcacctgtattgggtttgggtttgtgccaatatggcttgtaggtcagctggtgatgccccacaaaa

SEQ ID NO: 92784 - DNA, 80 bp, synthetic construct
  source 1..80: mol_type = other DNA
ttgtgtgagtgggtttcatcaagccatgggacaaatcataacatttttccaggaagtacctcatgttatagaggaggtga

SEQ ID NO: 92785 - DNA, 80 bp, synthetic construct
  source 1..80: mol_type = other DNA
catgtagggccagccgtcaccagaaagacagatcttgtaaagtatgttctcgtaagggttcctctcaccaggtacatccg

SEQ ID NO: 92786 - DNA, 80 bp, synthetic construct
  source 1..80: mol_type = other DNA
acctctgacttttgatggcactttccacatctggattccattgtctcctaccactgcttcaatgccctgaatttccaata

SEQ ID NO: 92787 - DNA, 80 bp, synthetic construct
  source 1..80: mol_type = other DNA
actgagactgcacagacctaatgtaaaggttctccttattggggcccctaacgcatttactacccagtgtcctgcacaat

SEQ ID NO: 92788 - DNA, 80 bp, synthetic construct
  source 1..80: mol_type = other DNA
ccaccactttatccagatcagatattgaaggcatactgcagttcaccttttggtgtttctctggtaactccctatactgg

SEQ ID NO: 92789 - DNA, 80 bp, synthetic construct
  source 1..80: mol_type = other DNA
ctaacaatattatcaacagtgcacctcagttggtcaaaatactcagatgctcctccgtctaacaatatctcatctaaatc

SEQ ID NO: 92790 - DNA, 80 bp, synthetic construct
  source 1..80: mol_type = other DNA
tcattatcaggaccaatcttggaaaagtcaaactcagtaaactgtagtttttctagatcaacaaccaatttcataggtat

SEQ ID NO: 92791 - DNA, 80 bp, synthetic construct
  source 1..80: mol_type = other DNA
atattaaaattaagatcatcttagttaataacctaatatttgttaattgttcagtcaactctgtacactcctctatccag

SEQ ID NO: 92792 - DNA, 80 bp, synthetic construct
  source 1..80: mol_type = other DNA
ctatctaggtcgatcgtatctaaaatgtcaatagtgccaagagtataagggaacatgtcttcctgagctctctgatagct

SEQ ID NO: 92793 - DNA, 80 bp, synthetic construct
  source 1..80: mol_type = other DNA
aatagtgggtgtgaccccagagacttcaatgtccattattgcatcataaacatcacaatcaaggatcttaaagtcaattc

SEQ ID NO: 92794 - DNA, 80 bp, synthetic construct
  source 1..80: mol_type = other DNA
ctcatggttccgttctcccttgggtggtggagttgctaaatctctgcctttgatcatctttctattgtccatccatcgtt

SEQ ID NO: 92795 - DNA, 80 bp, synthetic construct
  source 1..80: mol_type = other DNA
gcacttatcaccatgcctcacacaatctagccggttagcaaggagaattagaacgtcaaaaataaggaggagttttctcc

SEQ ID NO: 92796 - DNA, 80 bp, synthetic construct
  source 1..80: mol_type = other DNA
tggtattgagaatcctcagagatttgatcttgtttaagaaggatctccagcactgcatctgttcactctgggtgtcagta

SEQ ID NO: 92797 - DNA, 80 bp, synthetic construct
  source 1..80: mol_type = other DNA
tgagttgagtcttgtgtttatatgatctgtgtattaattggtagtgccccacataagctcacacaaaaatgagagtcaat

SEQ ID NO: 92798 - DNA, 80 bp, synthetic construct
  source 1..80: mol_type = other DNA
tgtgtttatatgatctgtgtattaattggtagtgccccacataagctcacacaaaaatgagagtcaatatgcctaggatc

SEQ ID NO: 92799 - DNA, 80 bp, synthetic construct
  source 1..80: mol_type = other DNA
ctctccggcccaaacaactctgaacatgtccttcccttcagtcttaggctgcctccacttgactgaatcataactctttg

SEQ ID NO: 92800 - DNA, 80 bp, synthetic construct
  source 1..80: mol_type = other DNA
atccaacctcactcaatgtccacaacatgcttttctggctcaaacaactctgaacatgttctccccttgagtctaagact

SEQ ID NO: 92801 - DNA, 80 bp, synthetic construct
  source 1..80: mol_type = other DNA
attggcaatgccttcctccattgttggttgcaatgcttggatcgagttgaagcttgtacctgtatgatgtgcacgtcaac

SEQ ID NO: 92802 - DNA, 80 bp, synthetic construct
  source 1..80: mol_type = other DNA
cccgccgggggcccccccggggggagcagacgcacaattcaaccttactcaatgtccacaacatctttttctggctcgaa

SEQ ID NO: 92803 - DNA, 80 bp, synthetic construct
  source 1..80: mol_type = other DNA
gggagcagacgcacaattcaaccttactcaatgtccacaacatctttttctggctcgaataactctgagcacatcctccc

SEQ ID NO: 92804 - DNA, 80 bp, synthetic construct
  source 1..80: mol_type = other DNA
atatttatcattgtgtcttaaacagtctagtcggctagcaaggaggactagaacatcaaaaacaagaaggagttttctcc

SEQ ID NO: 92805 - DNA, 80 bp, synthetic construct
  source 1..80: mol_type = other DNA
tgagatctttggcatcggcaatgccttcctccattgttgattgcagtgcctgaatcaggttaggacctgtatctgtatga

SEQ ID NO: 92806 - DNA, 80 bp, synthetic construct
  source 1..80: mol_type = other DNA
ttgttgattgcagtgcctgaatcaggttaggacctgtatctgtatgatgtgcacgtcaactggtgaactctggatgaagc

SEQ ID NO: 92807 - DNA, 80 bp, synthetic construct
  source 1..80: mol_type = other DNA
gggttgtgtcatacaatcaaaatgggcaataggcaagctaaaccaaccgaggccattgagcaaaacagggctcatctggt

SEQ ID NO: 92808 - DNA, 80 bp, synthetic construct
  source 1..80: mol_type = other DNA
cccgccgggggcccccccggggggagcgggcgcacagtccaacctcactcaatgtccacaacatgcatttctggctcaaa

SEQ ID NO: 92809 - DNA, 80 bp, synthetic construct
  source 1..80: mol_type = other DNA
gggcgcacagtccaacctcactcaatgtccacaacatgcatttctggctcaaacaactctgaacacgtcctccctttaag

SEQ ID NO: 92810 - DNA, 80 bp, synthetic construct
  source 1..80: mol_type = other DNA
ggtctttggcattggcaatgccttcctccattgctgattgcaatgcttgggtcaaattgagacctgtgcctgtgctatgt

SEQ ID NO: 92811 - DNA, 80 bp, synthetic construct
  source 1..80: mol_type = other DNA
gccagacgcatcccatctggggccccaattctgcaagagctgctggtttgaaaacaaaggattagtggagtgcaacaacc

SEQ ID NO: 92812 - DNA, 80 bp, synthetic construct
  source 1..80: mol_type = other DNA
ggttctatatcaaaatctatccatgcataacccatcattagatcaaacttaaacataggtctctctatccctttgtaaat

SEQ ID NO: 92813 - DNA, 80 bp, synthetic construct
  source 1..80: mol_type = other DNA
ccaattgcactctttggactcacaaatttatttagctgatcactcatgtagtaatggaattctaacaatgttctgaattc

SEQ ID NO: 92814 - DNA, 80 bp, synthetic construct
  source 1..80: mol_type = other DNA
tgacaactccgtcttttccaggttgggctctctgagtgccaccaaccatgcctatcatactcaacagcaccttcctctgc

SEQ ID NO: 92815 - DNA, 80 bp, synthetic construct
  source 1..80: mol_type = other DNA
tcaagttgttgtgtgcttaagttccccatgtacacacctgaacttagcggcctttctgtcctaatgacctttgacttcaa

SEQ ID NO: 92816 - DNA, 80 bp, synthetic construct
  source 1..80: mol_type = other DNA
gtgactgtgtccaaaggaatgatttcacttccttggaagcactcattttagtcgatgttgatcggaactcactggttgaa

SEQ ID NO: 92817 - DNA, 80 bp, synthetic construct
  source 1..80: mol_type = other DNA
acgtagagctcatcttgtgccggatgcatctcatctaggtcctcaattttgcaagagctgttggttcgagaacaagggac

SEQ ID NO: 92818 - DNA, 80 bp, synthetic construct
  source 1..80: mol_type = other DNA
gatctcctcggacccaaacagctccgaacacgtccttcccttcagtctgaagctacctttgcttgactgtatcatgatct

SEQ ID NO: 92819 - DNA, 80 bp, synthetic construct
  source 1..80: mol_type = other DNA
gtcactagtccccttcttggaacccaaaactagatcactcatggcttgttgtattttataatcatagtcttgcttgttta

SEQ ID NO: 92820 - DNA, 80 bp, synthetic construct
  source 1..80: mol_type = other DNA
gaacatagtcttcggtcctctgcttggtgagaacagccacaatgtccactcctgtcaactggactctttgcttcagtctg

SEQ ID NO: 92821 - DNA, 80 bp, synthetic construct
  source 1..80: mol_type = other DNA
tcagatatcattgactttaatgcaccactcaagagatctgatgaactttcaccaatctctctaacaaatatttctaaatc

SEQ ID NO: 92822 - DNA, 80 bp, synthetic construct
  source 1..80: mol_type = other DNA
ccaactgctcaatattattgttgcaaacgccaatgttatccctgtacaagctcttaaaatctctcaataatgtcatcttg

SEQ ID NO: 92823 - DNA, 80 bp, synthetic construct
  source 1..80: mol_type = other DNA
tcagtcttgatgaactgatttactatgtccccttgcctcaatttgtttctgaagacctgatactcttcctcaatcagatt

SEQ ID NO: 92824 - DNA, 80 bp, synthetic construct
  source 1..80: mol_type = other DNA
actcatcctgatctatacactcagggactcactggttgaaagtatcactcagtaagtcagtgaaatgcgcaatccaatag

SEQ ID NO: 92825 - DNA, 80 bp, synthetic construct
  source 1..80: mol_type = other DNA
tctttcaggaaatacctcatgtcatagaagaggtgatgaatattgtcctgattaccctcagtcttctggcgatattgaag

SEQ ID NO: 92826 - DNA, 80 bp, synthetic construct
  source 1..80: mol_type = other DNA
gagagtcatgagctgtgaataagttaaccctgttgggaaccctgcggactgcaaagacttattggacccagtagttccta

SEQ ID NO: 92827 - DNA, 80 bp, synthetic construct
  source 1..80: mol_type = other DNA
tgagcaccctgaagctcactagttgaatatatcacccagtaaatcaataaaaggcgcaatccagtagcctaggatccact

SEQ ID NO: 92828 - DNA, 80 bp, synthetic construct
  source 1..80: mol_type = other DNA
ctctactcaatgtcctcaacacacctctccggcccaaacaactctgagcaagtccttcccttcagtcttaggctaccccc

SEQ ID NO: 92829 - DNA, 80 bp, synthetic construct
  source 1..80: mol_type = other DNA
cctaggcattttggattgcgcttttaaggacctttgtggaactgagttttattgagtatggggcagataataacattctt

SEQ ID NO: 92830 - DNA, 80 bp, synthetic construct
  source 1..80: mol_type = other DNA
taagtgtcatcaactgggaataagtcaacccagctggaaaacctgcagattggagggacttgttggatccagcagggcct

SEQ ID NO: 92831 - DNA, 80 bp, synthetic construct
  source 1..80: mol_type = other DNA
attttctgtggtttcccatctgattcaagatccacagtagtgttttcccaagctctacccacaatggaggttcttgatgc

SEQ ID NO: 92832 - DNA, 80 bp, synthetic construct
  source 1..80: mol_type = other DNA
gtccaaaggaatgatttcacttctttggaagcactcattttgagagtgtgctttgagactcactggttgaaactgtcacc

SEQ ID NO: 92833 - DNA, 80 bp, synthetic construct
  source 1..80: mol_type = other DNA
ttttggagatctttgtgtgagtgggcttcatcaagccatgggacaaatcataacatttttccaggaagtacctcatgtca

SEQ ID NO: 92834 - DNA, 80 bp, synthetic construct
  source 1..80: mol_type = other DNA
ataactctttgctttgatttgctatagcaaagagcatagcctttgaagtcaatccattctccaagggactcaagaagttc

SEQ ID NO: 92835 - DNA, 80 bp, synthetic construct
  source 1..80: mol_type = other DNA
aaccaacaacggaaggggtgggaacagcagcagtcggggtgggagaagtatctcgagacctggaaaagcatggagcaata

SEQ ID NO: 92836 - DNA, 80 bp, synthetic construct
  source 1..80: mol_type = other DNA
gacatcgagctttctacaagggactttccgctggggctttccggggaggcgtggccggggcgggaccggggagtggcgag

SEQ ID NO: 92837 - DNA, 80 bp, synthetic construct
  source 1..80: mol_type = other DNA
gaacagcagagtgctgtggatgttgacgatggtcattttgtcaacatagagctagagtaaaaaactaccttgtttctact

SEQ ID NO: 92838 - DNA, 80 bp, synthetic construct
  source 1..80: mol_type = other DNA
cgcgcagagactcgaagacctcatggaatggctaaagacaagaccaatcctgtcacctctgactaaggggattttagggt

SEQ ID NO: 92839 - DNA, 80 bp, synthetic construct
  source 1..80: mol_type = other DNA
cattctcaatcaccctgcgaaagcagggtgattgagaatgaatccaaatcagaaactatttgcactatctggagtggcaa

SEQ ID NO: 92840 - DNA, 80 bp, synthetic construct
  source 1..80: mol_type = other DNA
actgttccaatccgataactgggagtcccggcgctccgggggtgaagggattcgggtttctaaatggtgataacacatgg

SEQ ID NO: 92841 - DNA, 80 bp, synthetic construct
  source 1..80: mol_type = other DNA
cttggtaggaccatcagtcccaggtcaagaagtggattcgaaatgttgaaaatacccaatgcaggtactgatcccaattc

SEQ ID NO: 92842 - DNA, 80 bp, synthetic construct
  source 1..80: mol_type = other DNA
tagaatagcagaacgacaggaaattgtcgacaataacaattggtcaggctattcaggaagcttcattgactattggaatg

SEQ ID NO: 92843 - DNA, 80 bp, synthetic construct
  source 1..80: mol_type = other DNA
acaacagcgagtgctacaatccatgcttttacgtagagttaattagaggaagacccgaagaggccaaatacgtatggtgg

SEQ ID NO: 92844 - DNA, 80 bp, synthetic construct
  source 1..80: mol_type = other DNA
acaagtaatagtctaattgccctatgtggaagcccattcccagttgggtccggttccttccccgatggggcacagatcca

SEQ ID NO: 92845 - DNA, 80 bp, synthetic construct
  source 1..80: mol_type = other DNA
cccaaacaagaggagaatttaacatgcacgaccattaatcaaaacaacactactgtagtagaaaacacatatgtaaataa

SEQ ID NO: 92846 - DNA, 80 bp, synthetic construct
  source 1..80: mol_type = other DNA
tacaacagtaattaccaaggaagctgattggaaaacaccaagctatctgctgttgaacaagagcctatgcaatgttgaag

SEQ ID NO: 92847 - DNA, 80 bp, synthetic construct
  source 1..80: mol_type = other DNA
gctgggtcgtgatagcaaaggacaacgcaataagatttggggaaagtgaacaaatcattgttaccagggagccgtatgta

SEQ ID NO: 92848 - DNA, 80 bp, synthetic construct
  source 1..80: mol_type = other DNA
tcatgcgacccaacaggatgcaagatgtatgccctgcaccaagggaccaccattagaaacaaacattcaaatggaacgat

SEQ ID NO: 92849 - DNA, 80 bp, synthetic construct
  source 1..80: mol_type = other DNA
tcatgacagaacagctttcagaggtctcatctccactccattgggcactccaccaaccgtaagtaacagtgacttcatgt

SEQ ID NO: 92850 - DNA, 80 bp, synthetic construct
  source 1..80: mol_type = other DNA
gtgttgggtggtcaagcacgacttgccatgatgggattggcagaatgactatttgtatacaaggaaataatgacaacgcc

SEQ ID NO: 92851 - DNA, 80 bp, synthetic construct
  source 1..80: mol_type = other DNA
acagcaacggtttattataacggaaggctgaccaccaccattaagacctgggcaagaaacatcctgaggactcaagagtc

SEQ ID NO: 92852 - DNA, 80 bp, synthetic construct
  source 1..80: mol_type = other DNA
agaatgtgtgtgccacaatggcacatgcgcagttgtgatgaccgacggatcggctagcagtcaagcctatacaaaagtaa

SEQ ID NO: 92853 - DNA, 80 bp, synthetic construct
  source 1..80: mol_type = other DNA
tagcgcttagtgtactgaacttattaataggaatctcaaatgtcggattgaacgtttccctacatctgaaggaaaaaggg

SEQ ID NO: 92854 - DNA, 80 bp, synthetic construct
  source 1..80: mol_type = other DNA
tgtatttccacaaggggttagtgattaaggaggaggcattaaaaggatcggccagacacattgaggaatgctcctgttac

SEQ ID NO: 92855 - DNA, 80 bp, synthetic construct
  source 1..80: mol_type = other DNA
ggacacagtcaaaaggtgacctgtgtgtgtagagataactggcagggagcaaacaggcctattatagaaattgacatgaa

SEQ ID NO: 92856 - DNA, 80 bp, synthetic construct
  source 1..80: mol_type = other DNA
cacattggaacacacaagtagatacgtatgcactggaattctcacagacaccagcagacctggtgacaaatctagtggtg

SEQ ID NO: 92857 - DNA, 80 bp, synthetic construct
  source 1..80: mol_type = other DNA
gaaaaactgttccttcaatgtcacctcaaacataagagataaatatcagaaagaatatgcaatgttgtataagcttgatt

SEQ ID NO: 92858 - DNA, 80 bp, synthetic construct
  source 1..80: mol_type = other DNA
gcagtaagtattgttaagtagtatatagtatatgtaatgtcattagacttagcaacagcattaagcatagcagcattagt

SEQ ID NO: 92859 - DNA, 80 bp, synthetic construct
  source 1..80: mol_type = other DNA
cacactggcctgtagacaatttttaaataattctagcttagttgttactattggtattgccttttgtcaatccttggagg

SEQ ID NO: 92860 - DNA, 80 bp, synthetic construct
  source 1..80: mol_type = other DNA
gaccagcctgggcaacatagcgagacccccatctctacaaaaaattttttaaaaaaattacctgggtgtgcccgaacagg

SEQ ID NO: 92861 - DNA, 80 bp, synthetic construct
  source 1..80: mol_type = other DNA
ttgtttttttccttagatttcaggttacttggttgttgccctgtgatctgggctctctgatgtattcagggaagctgtag

SEQ ID NO: 92862 - DNA, 80 bp, synthetic construct
  source 1..80: mol_type = other DNA
tttcccccacttaataccgacgctctcgcacccatctctctccttctagcctccgctagtcaaaaatgtggcgcccgaac

SEQ ID NO: 92863 - DNA, 80 bp, synthetic construct
  source 1..80: mol_type = other DNA
aaagaaaaggggggactggtgtgtagttctgccaatcagggaagtagccttgtgtgtggtagatccgaagacaagacatc

SEQ ID NO: 92864 - DNA, 80 bp, synthetic construct
  source 1..80: mol_type = other DNA
aaactgcactttcaacatcaccacaccaatgcaagataggagggaaaaagaatgggcattttttaatgcactagatgtag

SEQ ID NO: 92865 - DNA, 80 bp, synthetic construct
  source 1..80: mol_type = other DNA
taccactagccctaacattactagccctaacattaccactagccctacggaaatgaaaaattgctctttcaatattacca

SEQ ID NO: 92866 - DNA, 80 bp, synthetic construct
  source 1..80: mol_type = other DNA
caccccagagggataagacgaaggaagaatatgcatttttttatagccaagatgtagtaccaatagaagaagaaaaaagt

SEQ ID NO: 92867 - DNA, 80 bp, synthetic construct
  source 1..80: mol_type = other DNA
taatgtcactagtgacgaaataaaaaattgctcttttcatactcatataggagaccaaaagcaaagagaatatgcaatat

SEQ ID NO: 92868 - DNA, 80 bp, synthetic construct
  source 1..80: mol_type = other DNA
ttcatacacttgatatggtaccaataaaaaatgataatattagtaataagaatgatactttgtataggttaatgcattgt

SEQ ID NO: 92869 - DNA, 80 bp, synthetic construct
  source 1..80: mol_type = other DNA
aaaagtaccacaagaaatagcgacctgatggaagagccaggggcaatacaaaactgttctttcaatgcatccacaatagt

SEQ ID NO: 92870 - DNA, 80 bp, synthetic construct
  source 1..80: mol_type = other DNA
aaaagataagaagcggaaagatcatgcacttttttatagcctggatataatacgactcgagagcagtaatgatagtagaa

SEQ ID NO: 92871 - DNA, 80 bp, synthetic construct
  source 1..80: mol_type = other DNA
agctgcatcaacaacatttaaaaattatgtgtcaaaactatcagagcagttactcttttcaaagaataacatagtatcca

SEQ ID NO: 92872 - DNA, 80 bp, synthetic construct
  source 1..80: mol_type = other DNA
taggggggatgagaatggtggacatactcaggcagaatccaacggaggagcaagccgttgacatatgcaaagcagcaatg

SEQ ID NO: 92873 - DNA, 80 bp, synthetic construct
  source 1..80: mol_type = other DNA
agcaaaagcaggggaaaatcaaatcaaccaagatgaaggcaaaactatttgtgctgttctgtacattcactgtgttaaaa

SEQ ID NO: 92874 - DNA, 80 bp, synthetic construct
  source 1..80: mol_type = other DNA
aagagcactaaactaaggatggcaacaggactaaggaacgttccatctattcaagccagagggctatttggagcaattgc

SEQ ID NO: 92875 - DNA, 80 bp, synthetic construct
  source 1..80: mol_type = other DNA
aaaaggtcaggtcacagctgaggaataatgccaaagagactgggaatggttgttttgagttctaccacaagtgtgatgat

SEQ ID NO: 92876 - DNA, 80 bp, synthetic construct
  source 1..80: mol_type = other DNA
aatgggagtttatcagattttggcgatctactccacagtcgccagttctctagttttgttagtctccctgggggcaatca

SEQ ID NO: 92877 - DNA, 80 bp, synthetic construct
  source 1..80: mol_type = other DNA
tctgcagcctgaatggagtagctcctttacaattggggaagtgcagcgtagcagggtggctcctcggcaatccagagtgt

SEQ ID NO: 92878 - DNA, 80 bp, synthetic construct
  source 1..80: mol_type = other DNA
gaccttctactcactgcaaactcatggtcctatataatagagacatcgaagtcagaaaatggaacatgctaccctggcga

SEQ ID NO: 92879 - DNA, 80 bp, synthetic construct
  source 1..80: mol_type = other DNA
gttcatagattatgaagagttgagagagcagctgagttcagtttcttcatttgagaagtttgaaattttcccgaaagcga

SEQ ID NO: 92880 - DNA, 80 bp, synthetic construct
  source 1..80: mol_type = other DNA
gctcatggccaaatcatgaaacaactaaaggcgttacagcagcatgctcttactcaggagctagcagtttctacaggaat

SEQ ID NO: 92881 - DNA, 80 bp, synthetic construct
  source 1..80: mol_type = other DNA
ctcctgtggataacgaaaaagggaagctcatacccaaaactcagcaaatcatataccaataataaagggaaagaagtgct

SEQ ID NO: 92882 - DNA, 80 bp, synthetic construct
  source 1..80: mol_type = other DNA
tgtactatggggtgtgcatcaccctccaaccgcccaagaacaacaaaccctatatcagaacacagatgcatatgtctcgg

SEQ ID NO: 92883 - DNA, 80 bp, synthetic construct
  source 1..80: mol_type = other DNA
ttggatcgtccaaatacaatcgaaggttcgctcctgagatagcggctagacctaaagttagagggcaggctggcagaatg

SEQ ID NO: 92884 - DNA, 80 bp, synthetic construct
  source 1..80: mol_type = other DNA
aactattactggacactattagatcaaggagacaccataacgtttgaggccactgggaatttagtagctccatggtatgc

SEQ ID NO: 92885 - DNA, 80 bp, synthetic construct
  source 1..80: mol_type = other DNA
gctgacaccatctgtgtaggctaccatgcaaacaattccacagacactgttgacacagtactagaaaagaacgtgactgt

SEQ ID NO: 92886 - DNA, 80 bp, synthetic construct
  source 1..80: mol_type = other DNA
tttcgcattgaacaaaggcttggattctggaattataacgtccgatgctccagttcataactgtgacacaaagtgtcaga

SEQ ID NO: 92887 - DNA, 80 bp, synthetic construct
  source 1..80: mol_type = other DNA
cccctcacggggctttgaacagcagccttccttttcagaatgttcatcctatcactatcggagaatgtcccaaatacgtc

SEQ ID NO: 92888 - DNA, 80 bp, synthetic construct
  source 1..80: mol_type = other DNA
acgtgtcagaaaacagttgagagaaaacgcagaggaggatgggaccggctgttttgaaatattccacaaatgtgacgata

SEQ ID NO: 92889 - DNA, 80 bp, synthetic construct
  source 1..80: mol_type = other DNA
gacccggtaaaattaagtagtgggtacaaggacataatcttatggtttagcttcggggcatcatgtttcttccttcttgc

SEQ ID NO: 92890 - DNA, 80 bp, synthetic construct
  source 1..80: mol_type = other DNA
attctggggatattgacaggtcccccacagtgtgatcagttcctggaatttgaatccgatctgattgttgaacgacaaga

SEQ ID NO: 92891 - DNA, 80 bp, synthetic construct
  source 1..80: mol_type = other DNA
cagacaatgctgcattcccacagacaaccaaatcctacaggaatcccagaaataagcctgccttaataacctggggaatc

SEQ ID NO: 92892 - DNA, 80 bp, synthetic construct
  source 1..80: mol_type = other DNA
ccagcaatctttcaccccaagcccaggagcaaggccacaagtgaacggacaatcagggaggatagattttcattggttgc

SEQ ID NO: 92893 - DNA, 80 bp, synthetic construct
  source 1..80: mol_type = other DNA
gagcccactaccattccaaaacatcaactccaggactgtcgggaaatgccccaggtacgttaagcaaccaagcctcctat

SEQ ID NO: 92894 - DNA, 80 bp, synthetic construct
  source 1..80: mol_type = other DNA
tggcaacagggatgaggaacgttccagaaaaaccaaagacaagagggctattcggggcaattgctgggtttatagaaaat

SEQ ID NO: 92895 - DNA, 80 bp, synthetic construct
  source 1..80: mol_type = other DNA
agcaaaagcaggggaatttcacaaccaatcaagatggaagcaaaagctctgatagctgcacttctgattgtaacaacgag

SEQ ID NO: 92896 - DNA, 80 bp, synthetic construct
  source 1..80: mol_type = other DNA
aaggagtcgggatggctgcagacaaagaatcgacccaagaagcaattgacaaaataacatccaaagtgaacaacataatt

SEQ ID NO: 92897 - DNA, 80 bp, synthetic construct
  source 1..80: mol_type = other DNA
cagatacaggatatctgggcttacaatgcagaattattggtactacttgaaaaccagaagacactggatgaacatgatgc

SEQ ID NO: 92898 - DNA, 80 bp, synthetic construct
  source 1..80: mol_type = other DNA
aatctgtataacaaagtaaaaagagccttgggatccaacgcaattgaagacggaaatggatgctttgacttgtatcataa

SEQ ID NO: 92899 - DNA, 80 bp, synthetic construct
  source 1..80: mol_type = other DNA
gtgtgatgaccagtgtatggagacaatcagaaacgggacctatgacaggcaaaaataccaggaagagtcaagattggaga

SEQ ID NO: 92900 - DNA, 80 bp, synthetic construct
  source 1..80: mol_type = other DNA
gacagaaaatagaaggagtaaaactggaatcagaggggacttacaaaattcttaccatctattctacggtcgcctcatct

SEQ ID NO: 92901 - DNA, 80 bp, synthetic construct
  source 1..80: mol_type = other DNA
ctgtgacacacacaaaggagctgcttcacacggagcacaacggaatgctgtgtgcaacagacttggggcgtccccttata

SEQ ID NO: 92902 - DNA, 80 bp, synthetic construct
  source 1..80: mol_type = other DNA
tttctgttctgggccatgtccaatggttcttgcagatgcaacatttgtatataattagcaaaaacacccttgtttctact

SEQ ID NO: 92903 - DNA, 80 bp, synthetic construct
  source 1..80: mol_type = other DNA
ttagacacatgcaccatcgagggactagtctatggcaacccctcttgtgatatattgttgggagggaaagaatggtctta

SEQ ID NO: 92904 - DNA, 80 bp, synthetic construct
  source 1..80: mol_type = other DNA
aactgaggtctctattcagctctgccaggtcttataagaggatccagatattccctgatacaatatggaatgttacctac

SEQ ID NO: 92905 - DNA, 80 bp, synthetic construct
  source 1..80: mol_type = other DNA
agcggaacaagcagggcatgttcgaactcattttaccggagcatgaggtggctaactcacaagagtaattcctacccttt

SEQ ID NO: 92906 - DNA, 80 bp, synthetic construct
  source 1..80: mol_type = other DNA
tcaggacgcccaatacaccaacactgaaggggagaacatccttttcatgtggggcatacatcatccgccaactgacactg

SEQ ID NO: 92907 - DNA, 80 bp, synthetic construct
  source 1..80: mol_type = other DNA
ggcctcttgtcaatggccaacaggggaggattgattactactggtctgttctgaaacctggccagacattacgagtgagg

SEQ ID NO: 92908 - DNA, 80 bp, synthetic construct
  source 1..80: mol_type = other DNA
caaagcggacaagatctgtatagggtaccaatcaacgaactccacagagactgttgatacactgatagagaccaatgtcc

SEQ ID NO: 92909 - DNA, 80 bp, synthetic construct
  source 1..80: mol_type = other DNA
aactgtatagtgcagtgccaaaccgagaggggaggcctcaacacaacactacctttccacaacattagcaaatatgcatt

SEQ ID NO: 92910 - DNA, 80 bp, synthetic construct
  source 1..80: mol_type = other DNA
tgggaactgccccaaatatgttggagtgaaaagtctcaaattggcagtcggtctgaggaatgtacctgctgcatcgagta

SEQ ID NO: 92911 - DNA, 80 bp, synthetic construct
  source 1..80: mol_type = other DNA
atgagcaatgaaggatcttatttcttcggagacaatgctgaggagtttgacaattaaagaaaaatacccttgtttctact

SEQ ID NO: 92912 - DNA, 80 bp, synthetic construct
  source 1..80: mol_type = other DNA
ctgggaaagaccccaagaagactggagggccaatatacagaaggagagatgggaagtggataagagaactcatcctctat

SEQ ID NO: 92913 - DNA, 80 bp, synthetic construct
  source 1..80: mol_type = other DNA
cctagcaacaactgtgacattgcacttcaagcaaaatgaatgcaacgctcccgcaaacaaccaagtggtgccatgtgatc

SEQ ID NO: 92914 - DNA, 80 bp, synthetic construct
  source 1..80: mol_type = other DNA
catcgatggatgggtcacacctaactctaagtcacaggtaaacaggcaaatcattgttgacaataacaactggtctggct

SEQ ID NO: 92915 - DNA, 80 bp, synthetic construct
  source 1..80: mol_type = other DNA
gagggaggccgcaagagaccagagtatggtggacctctaatagtatcgttgtattttgtggaacttcaggtacttatgga

SEQ ID NO: 92916 - DNA, 80 bp, synthetic construct
  source 1..80: mol_type = other DNA
gaaaagaacgtaacagaaatagtgtacctaaataataccatcatcgaaagggagatttgtcccaaatcagcagaatacag

SEQ ID NO: 92917 - DNA, 80 bp, synthetic construct
  source 1..80: mol_type = other DNA
aaattggtcaaaaccacaatgccagatcaaggggtttgctcccttctccaaagacaactcgattcggctctcagccggtg

SEQ ID NO: 92918 - DNA, 80 bp, synthetic construct
  source 1..80: mol_type = other DNA
gagacatttgggtgaccagagagccttatgtgtcatgtgatcctagtaagtgttaccagtttgcgcttggacagggaacc

SEQ ID NO: 92919 - DNA, 80 bp, synthetic construct
  source 1..80: mol_type = other DNA
atgtgtttgcagagacaactggaaaggctctaacagacctattatagatataaatatggcagattacagtgttgattcca

SEQ ID NO: 92920 - DNA, 80 bp, synthetic construct
  source 1..80: mol_type = other DNA
agatctgcaaggactgctgacactgagccttctacaagggactttccgctggggacttgccagggaggcgcggcctgggc

SEQ ID NO: 92921 - DNA, 80 bp, synthetic construct
  source 1..80: mol_type = other DNA
gctgacatcgagaattctgcaaggactgctgacactgagctttctacaagggactttccgctggagacttgccagggagg

SEQ ID NO: 92922 - DNA, 80 bp, synthetic construct
  source 1..80: mol_type = other DNA
aatcctcaagggactcaagcttcagctcctctgtcaagcctgaggcgatgagttgattcaagttcatcttggccggttca

SEQ ID NO: 92923 - DNA, 80 bp, synthetic construct
  source 1..80: mol_type = other DNA
tcaaaatccctacccacagacatgtcatagggaagccctgccccaagccacacagactcaaccacatgggcatatgctca

SEQ ID NO: 92924 - DNA, 80 bp, synthetic construct
  source 1..80: mol_type = other DNA
tgtggtctgtacaaacatcctggtgtaccagtcaagtggaaaagataggagatagacccacccatgggcccccgtgaccc

SEQ ID NO: 92925 - DNA, 80 bp, synthetic construct
  source 1..80: mol_type = other DNA
tattgcgaggaagggcttcaatgactgcactggtcaagccaggttgagcagggaaaagatctgccacatcaatcccatga

SEQ ID NO: 92926 - DNA, 80 bp, synthetic construct
  source 1..80: mol_type = other DNA
catcttgcttgaactgtttcaagtctgttggttctctgaagaagtgtatgtagcagcccgacataggttggtaaagagct

SEQ ID NO: 92927 - DNA, 80 bp, synthetic construct
  source 1..80: mol_type = other DNA
tcttttgtggttttccatctgactcgagatccacagtggtgttctcccaagctctacccacaatggaagttcttgaagct

SEQ ID NO: 92928 - DNA, 80 bp, synthetic construct
  source 1..80: mol_type = other DNA
ctgtggatgcagctaaccattgtgggaccattgccaatggagtccttcaaactttcatgaggatggcctggggtggcagt

SEQ ID NO: 92929 - DNA, 80 bp, synthetic construct
  source 1..80: mol_type = other DNA
caccctaacaactccgtcccttccaggttgggtgccctgagccccgccaaccatacctatcatgttcagcaatgctcttc

SEQ ID NO: 92930 - DNA, 80 bp, synthetic construct
  source 1..80: mol_type = other DNA
ccgtcccttccaggttgggtgccctgagccccgccaaccatacctatcatgttcagcaatgctcttctttgctcaagttg

SEQ ID NO: 92931 - DNA, 80 bp, synthetic construct
  source 1..80: mol_type = other DNA
aaatgtccctggttctttgtgacagtagccccagataaccgataggggatgggcgagaaaactggcagtgatcttcccaa

SEQ ID NO: 92932 - DNA, 80 bp, synthetic construct
  source 1..80: mol_type = other DNA
acatcagccgaaggctccttggaacttttacttggactctctctgactctgagggcaatgaaacaccgggtgggtattgt

SEQ ID NO: 92933 - DNA, 80 bp, synthetic construct
  source 1..80: mol_type = other DNA
gtatccaactaataaataaagcagtgaacgcattgatcaatgaccagctcattatgaagaatcatttaagagatatcatg

SEQ ID NO: 92934 - DNA, 80 bp, synthetic construct
  source 1..80: mol_type = other DNA
ggaattccttactgcaattacagcaagtattggtacttaaaccacactgtaacagggaagacatcgttgccaagatgctg

SEQ ID NO: 92935 - DNA, 80 bp, synthetic construct
  source 1..80: mol_type = other DNA
aattgttacagaaagagtacattgacaggcaagggaaaacacccttagggttggtggatctttttgtcttcagcactagc

SEQ ID NO: 92936 - DNA, 80 bp, synthetic construct
  source 1..80: mol_type = other DNA
tatttccacagggtcttctggacgaccttctatgtctatccaggttttggcacttggatcaagctgcatcattgagtctt

SEQ ID NO: 92937 - DNA, 80 bp, synthetic construct
  source 1..80: mol_type = other DNA
aagttgttgtgtgctcaagtttcccatatacacgcctgaacttagtggcctctctgtcctaatgacctttgacttcaatt

SEQ ID NO: 92938 - DNA, 80 bp, synthetic construct
  source 1..80: mol_type = other DNA
tttcattaagccatggggcaaatcataacatttttccaggaagtgcctcatgtcattgaggaggtgatgaacattgtctt

SEQ ID NO: 92939 - DNA, 80 bp, synthetic construct
  source 1..80: mol_type = other DNA
gaacgcattaatcaatgaccagctcattatgaagaatcatttaagagatatcatgggaattccttactgcaattacagca

SEQ ID NO: 92940 - DNA, 80 bp, synthetic construct
  source 1..80: mol_type = other DNA
ttctcttatgtggaaggtcatgctcaacaacttacaagggtgtttatgagcttcaaactctggagctggatatggcaagc

SEQ ID NO: 92941 - DNA, 80 bp, synthetic construct
  source 1..80: mol_type = other DNA
gtgcatctgaaacaaacattcccaaagatctctttacctttaagatagatttcaagatgccatccattgtctgaggtgta

SEQ ID NO: 92942 - DNA, 80 bp, synthetic construct
  source 1..80: mol_type = other DNA
cttaacatgacaatgcccttatcctgcacgaagaacaacagccaccactacatcatggttggaaatgagactggcttgga

SEQ ID NO: 92943 - DNA, 80 bp, synthetic construct
  source 1..80: mol_type = other DNA
accttgatggtctccaacatgttccccccatcaagcatacaggctccagctttcactgcagctcctaaactgaagttgta

SEQ ID NO: 92944 - DNA, 80 bp, synthetic construct
  source 1..80: mol_type = other DNA
ccgacttggacagactttctcaaagccatcctatactgaatatggtggacactaagaagagctccttgaatatttctggt

SEQ ID NO: 92945 - DNA, 80 bp, synthetic construct
  source 1..80: mol_type = other DNA
aggacaagttgatctaaatgatgccgtcttagcactaacagacctgggtctaatatacacagctaagtacccaaacagct

SEQ ID NO: 92946 - DNA, 80 bp, synthetic construct
  source 1..80: mol_type = other DNA
tgtttggtgagacatgctaatgtcagactaggcatggtgccgaattggttgttcaaaagatccggattcttgacatccca

SEQ ID NO: 92947 - DNA, 80 bp, synthetic construct
  source 1..80: mol_type = other DNA
gtttgcgcatcaagcgctgaacattgctgacctcagaaaagtcaagaccatgaaggagagcctgagcatccttaacaact

SEQ ID NO: 92948 - DNA, 80 bp, synthetic construct
  source 1..80: mol_type = other DNA
tgaagctttatgctggagcagaaacctgagagctccctcctcaatgactgtgtccaaaggaatgattttacttccttgga

SEQ ID NO: 92949 - DNA, 80 bp, synthetic construct
  source 1..80: mol_type = other DNA
tgagagctccctcctcaatgactgtgtccaaaggaatgattttacttccttggaagcactcatcctgatctagacaatca

SEQ ID NO: 92950 - DNA, 80 bp, synthetic construct
  source 1..80: mol_type = other DNA
gctgactttaacaaacacaagtatcatcaaccacaagttctgcaacctttctgatgcacataaaaagaatctctatgacc

SEQ ID NO: 92951 - DNA, 80 bp, synthetic construct
  source 1..80: mol_type = other DNA
acttcaatggaggaaagataagtgttcagtataacctcagccatgcttatgctgtggatgcagccaaccattgtgggacc

SEQ ID NO: 92952 - DNA, 80 bp, synthetic construct
  source 1..80: mol_type = other DNA
tgattctggaaaggggagttgggattgtataatgacgtcctaccaatatttgataatccaaaacaccagttgggaagatc

SEQ ID NO: 92953 - DNA, 80 bp, synthetic construct
  source 1..80: mol_type = other DNA
aggctccttggaacttttacctggactctctctgactctgagggcaatgaaacaccaggtggatattgtttgacaagatg

SEQ ID NO: 92954 - DNA, 80 bp, synthetic construct
  source 1..80: mol_type = other DNA
gattgctctcagccttctagcagtgctaaaagggatttataatgttgctacttgtggcctctttgggttggtgtcctttc

SEQ ID NO: 92955 - DNA, 80 bp, synthetic construct
  source 1..80: mol_type = other DNA
atggaaagaatagtgattgcctttgcattaatcagcactgtcacaagtgaccaaatctgcattggatatcatgcaaacaa

SEQ ID NO: 92956 - DNA, 80 bp, synthetic construct
  source 1..80: mol_type = other DNA
ggaggatgactttttggatgtatggacctacaatgcagaacttctagtgctcatggaaaacgagagaactctggatctcc

SEQ ID NO: 92957 - DNA, 80 bp, synthetic construct
  source 1..80: mol_type = other DNA
aaaccacatggaaagaattcaaatattccctagaaattcttggaccaaccacaatgcctcagcaggagtaagctcagcat

SEQ ID NO: 92958 - DNA, 80 bp, synthetic construct
  source 1..80: mol_type = other DNA
agctcccgaatatgcatacaaaatcgtaaaacaagggaaatcaacaatcatgaaaagtgaattggattatggtaattgta

SEQ ID NO: 92959 - DNA, 80 bp, synthetic construct
  source 1..80: mol_type = other DNA
caggactaagaaatgtcccccaaagggaaacacgaggtttatttggagcaatagccggattcatcgaagggggatggcaa

SEQ ID NO: 92960 - DNA, 80 bp, synthetic construct
  source 1..80: mol_type = other DNA
cattggttcggtctgtatgacaattggaatggctaacttaatattacaaattggaaacataatctcaatatgggttagcc

SEQ ID NO: 92961 - DNA, 80 bp, synthetic construct
  source 1..80: mol_type = other DNA
cccaagtacattggggtcaagagtctcaaactggcaatcggtctgagaaacgtgcctgctaagtcaagtagagggctttt

SEQ ID NO: 92962 - DNA, 80 bp, synthetic construct
  source 1..80: mol_type = other DNA
ggacagcaggagtggaatctgcagttctgagaggattcttaattctaggcaaagaagacaaacgatacggaccggcattg

SEQ ID NO: 92963 - DNA, 80 bp, synthetic construct
  source 1..80: mol_type = other DNA
ttgcgccctagtgagtaacaactgtatttgtgtttgtggtatgggtgttgcttgttgggctatatattgtcctgtatttt

SEQ ID NO: 92964 - DNA, 80 bp, synthetic construct
  source 1..80: mol_type = other DNA
ttttagagtcacgtagtgaagatcgcccactgaattgatagacacaaagcgcaatcctatagcctaggatccactgtgcg

SEQ ID NO: 92965 - DNA, 80 bp, synthetic construct
  source 1..80: mol_type = other DNA
cctaggcaatttgattattctttcttgacttccaggtgccaatcccaacagaatgggcaacaaacaaactaaaaccccag

SEQ ID NO: 92966 - DNA, 80 bp, synthetic construct
  source 1..80: mol_type = other DNA
ccaatgaatcactcaatgtcctcaaccctcttatcctcctcagctagctctctgcatgttctgccctttagtctcaactt

SEQ ID NO: 92967 - DNA, 80 bp, synthetic construct
  source 1..80: mol_type = other DNA
gcagagagcataacccttaaactccacccaatcttccacagcttctaacactgttcccaagaccaccatataattgtcag

SEQ ID NO: 92968 - DNA, 80 bp, synthetic construct
  source 1..80: mol_type = other DNA
gcatcactattttcaatatagaaacaatatccactcctgaccactgcatcctcaattttgacctatctaacatcatggca

SEQ ID NO: 92969 - DNA, 80 bp, synthetic construct
  source 1..80: mol_type = other DNA
aatccttggcacaggctatttcctcttccatacttggttggggatgcagcagccaagtcttggaagcttaaggaatgatt

SEQ ID NO: 92970 - DNA, 80 bp, synthetic construct
  source 1..80: mol_type = other DNA
tgaaagatggtttgggggacagcctagaaagtgattaaaagatagattaaaaggatagcttaaaaggatagccttaatgc

SEQ ID NO: 92971 - DNA, 80 bp, synthetic construct
  source 1..80: mol_type = other DNA
ggacagcctagaaagtgattaaaagatagattaaaaggatagcttaaaaggatagccttaatgcctaggatcctcggtgc

SEQ ID NO: 92972 - DNA, 80 bp, synthetic construct
  source 1..80: mol_type = other DNA
ttctatcgcagttgacagggaaatgcacatataatcccacaataaaggtctaaaataactgagtatctcctcacctctac

SEQ ID NO: 92973 - DNA, 80 bp, synthetic construct
  source 1..80: mol_type = other DNA
cggtagagtttcttggtcaaaatcctcaaccatgtgatttgacaattcacttttaatcagtctaatataaaacttatttg

SEQ ID NO: 92974 - DNA, 80 bp, synthetic construct
  source 1..80: mol_type = other DNA
cgccgggggcccccccgggggagaaatccaccaccaatgaatcactcaatgtcctcaaccctctcatcatcctcagttaa

SEQ ID NO: 92975 - DNA, 80 bp, synthetic construct
  source 1..80: mol_type = other DNA
gtttgatttttacatgagtgttgagggacctctgtgaacttggatttttcagcctgttgtctccgctccagccacttttt

SEQ ID NO: 92976 - DNA, 80 bp, synthetic construct
  source 1..80: mol_type = other DNA
cttttggacacttatgctttatctgatcatgcttgcttgcaaggagaatcagtacatcaaaaatcagtaaaagcttcctc

SEQ ID NO: 92977 - DNA, 80 bp, synthetic construct
  source 1..80: mol_type = other DNA
atgagcagtcaacttgttgtttatcccttgatggcatatggcaattaactcttcataatggtttgagcgattatctaaca

SEQ ID NO: 92978 - DNA, 80 bp, synthetic construct
  source 1..80: mol_type = other DNA
gcattaccatcctcaatgtagaaacaatatctactcctgaccattgcatcctcagttttgacctgtccaacatcatggca

SEQ ID NO: 92979 - DNA, 80 bp, synthetic construct
  source 1..80: mol_type = other DNA
aggctatgtcctcttccatacttggctaggggtgcagtgtccaagttttggtagcttaaagagtggtttgaaagatggtt

SEQ ID NO: 92980 - DNA, 80 bp, synthetic construct
  source 1..80: mol_type = other DNA
agatggtttgggggatagctaaaagatagttaagaagatagcttaaaaggatagccttaatgcctaggatcctcggtgcg

SEQ ID NO: 92981 - DNA, 80 bp, synthetic construct
  source 1..80: mol_type = other DNA
accggggatcctaggcaatttggttgttcttctcttgaagcttcttggtttgagcctcactaaatgggaaacaagcaagc

SEQ ID NO: 92982 - DNA, 80 bp, synthetic construct
  source 1..80: mol_type = other DNA
atgaaccagcaaaccaagtatttagtgcatgatgtggctgttatgtattctggtgcagttaatccatgtgttctgttgga

SEQ ID NO: 92983 - DNA, 80 bp, synthetic construct
  source 1..80: mol_type = other DNA
cttagtttcgcagaccctgagggtagtgacgcaacagcgtcaaagaagtcctccaatgagtcaaacttgatgtcaaccag

SEQ ID NO: 92984 - DNA, 80 bp, synthetic construct
  source 1..80: mol_type = other DNA
ccatcagatcacagaggttcttcaatgaggagaggtgttcactagataggtaatttgtagtgaattcttcatggagttgc

SEQ ID NO: 92985 - DNA, 80 bp, synthetic construct
  source 1..80: mol_type = other DNA
aaataacttcgtctaggtcactcacagatggctgaccattgtcatcagggcctgagcctactttgacaggctctctgtac

SEQ ID NO: 92986 - DNA, 80 bp, synthetic construct
  source 1..80: mol_type = other DNA
tgatcaacgatcttctcaacagcctctcttagctgatcaaaataaacacttgcacctccgtcaagtaggatttcgtccaa

SEQ ID NO: 92987 - DNA, 80 bp, synthetic construct
  source 1..80: mol_type = other DNA
atcagcttcatcagcatcagtcttatgctgtcgagttcccagaactaaattgctcatcgcctgttgcactttatattcat

SEQ ID NO: 92988 - DNA, 80 bp, synthetic construct
  source 1..80: mol_type = other DNA
ttaaataaggatggatgcacaagtgccaaggggccagactacaaaaggcctggtgtctcgaagaaattcttatccctcct

SEQ ID NO: 92989 - DNA, 80 bp, synthetic construct
  source 1..80: mol_type = other DNA
agatagaattaaactcaacaatgccctcaccaatctatagagtaagaattcagtatctgtaattagctcttcctttattt

SEQ ID NO: 92990 - DNA, 80 bp, synthetic construct
  source 1..80: mol_type = other DNA
tatcaatcaggtccttgtgatgaaaatctgacacgtaggccattataaagtacctaaggttttgaagaagtttttgggaa

SEQ ID NO: 92991 - DNA, 80 bp, synthetic construct
  source 1..80: mol_type = other DNA
ggatgtgccagaattaaaaccagtatcattttggtcagtgacctgatatcacgaagttgcccttccaactcactgcaatc

SEQ ID NO: 92992 - DNA, 80 bp, synthetic construct
  source 1..80: mol_type = other DNA
accaactgaaattcagtgtcgcccaataagaactcctggcagtatgcttctttgcatctgaccacctggtaccttgcagg

SEQ ID NO: 92993 - DNA, 80 bp, synthetic construct
  source 1..80: mol_type = other DNA
tctctaagtcaacggtttccagcaattcaacaccccccatgatgtaagggaatctcccctcctctgacctctggtagctg

SEQ ID NO: 92994 - DNA, 80 bp, synthetic construct
  source 1..80: mol_type = other DNA
attgtaggagttattccagagacatcaaagtccatgactagatcataactatttgagcatattatcttcatgtcaacttt

SEQ ID NO: 92995 - DNA, 80 bp, synthetic construct
  source 1..80: mol_type = other DNA
gtactgatccacactgatccccacatccttcagggcagtggtggccttcgagatggtcttctgcaacattgaattgagaa

SEQ ID NO: 92996 - DNA, 80 bp, synthetic construct
  source 1..80: mol_type = other DNA
tttgattcttgcttgggcgttgagaagactgcatggttttggacatctcagcctgctgtctccgttcaacccacttctcc

SEQ ID NO: 92997 - DNA, 80 bp, synthetic construct
  source 1..80: mol_type = other DNA
ctctcagactcttgtatttcatttgatcatgcttactcgcgaggagaatcaatacatcaaaaatcaatagaagctttctc

SEQ ID NO: 92998 - DNA, 80 bp, synthetic construct
  source 1..80: mol_type = other DNA
acttgatcttatttaggaatgatctccaacattgcatttgacactctttaatggtttgattactcctttcattagcttcc

SEQ ID NO: 92999 - DNA, 80 bp, synthetic construct
  source 1..80: mol_type = other DNA
tttccgacattcgcatataaaaatcttagtattggtgatgctcttttgaactggtaaatcaaatgttcaacatcatcctc

SEQ ID NO: 93000 - DNA, 80 bp, synthetic construct
  source 1..80: mol_type = other DNA
cgtggctgacagctcatccatgtacagaccattgaactcatcaagtaatcgacacttatcaacttttaggaactgactct

SEQ ID NO: 93001 - DNA, 80 bp, synthetic construct
  source 1..80: mol_type = other DNA
tgcctaatcattgacacagtaatcggaaccttcgaaatagatgttcaactggggtggcggttcactgttggataggacct

SEQ ID NO: 93002 - DNA, 80 bp, synthetic construct
  source 1..80: mol_type = other DNA
ttacaagatgcaactaaaccggatgaaatgaaatgaagtgaaatgaaaagacagcctaaatgcctaggatcctcggtgcg

SEQ ID NO: 93003 - DNA, 80 bp, synthetic construct
  source 1..80: mol_type = other DNA
caaagctccagaaacaaagagcagcccgagggccagtttaatccctgatgccacacacctaggaccacagttctgtaaga

SEQ ID NO: 93004 - DNA, 80 bp, synthetic construct
  source 1..80: mol_type = other DNA
gagagtcataagctgagaataggtgagcccagctgtgaaccctgcagactgcaaggatttgttagagttgttgctcccaa

SEQ ID NO: 93005 - DNA, 80 bp, synthetic construct
  source 1..80: mol_type = other DNA
agagagcttttcttggtatcaatcatatttagaatagggtggctctgggttaatctatctaggtctgaggtgttagggta

SEQ ID NO: 93006 - DNA, 80 bp, synthetic construct
  source 1..80: mol_type = other DNA
tcgctgatttggtgtattgtgtgtaacagcagagtgtcgaaattatccgctgaagtaattggtacaaagcgcaatccaat

SEQ ID NO: 93007 - DNA, 80 bp, synthetic construct
  source 1..80: mol_type = other DNA
ctgacagctgcatacttagtgcctcaaagtagtcttcaattagtctggtaaacatcttcgttctgaggtcaccaatgtat

SEQ ID NO: 93008 - DNA, 80 bp, synthetic construct
  source 1..80: mol_type = other DNA
gtgatcaccttgtccaaatcagccactgacgcttgaccattgtctccggagccagaatttgatttgataggttccctata

SEQ ID NO: 93009 - DNA, 80 bp, synthetic construct
  source 1..80: mol_type = other DNA
ctgatccacaatcttttcaacagtctctctcagctgatcaaaataaatgcttgcattcccctcgagtagaatctcatcca

SEQ ID NO: 93010 - DNA, 80 bp, synthetic construct
  source 1..80: mol_type = other DNA
aattgtaggaacaataccggatatatcaaagtttagaactgaatcgtaactgtcagagcagattattcccatgtcaatgt

SEQ ID NO: 93011 - DNA, 80 bp, synthetic construct
  source 1..80: mol_type = other DNA
aacaaagggcatagcctttgaattccacccaatcatccaccacttccaagactactcccaagacctccatgtatttatca

SEQ ID NO: 93012 - DNA, 80 bp, synthetic construct
  source 1..80: mol_type = other DNA
tgtaatgatccacactgataccaacatcttttagggtagcagtggctttctgaatcactttttgaatcgttgaattgaga

SEQ ID NO: 93013 - DNA, 80 bp, synthetic construct
  source 1..80: mol_type = other DNA
atttggttcttacttgagcattgaaaggcctgtgtgaacttggatctttcagcctgttgtcttcgttcaagccacttttc

SEQ ID NO: 93014 - DNA, 80 bp, synthetic construct
  source 1..80: mol_type = other DNA
taaatctctttttgttgattctaaagacaccaacctatcattgacactaataaaacaggatccaagccaaccctttgaac

SEQ ID NO: 93015 - DNA, 80 bp, synthetic construct
  source 1..80: mol_type = other DNA
gagtgtttagactctccacacctgacaacctccctgaagtcatagataaggactcacacaatctactatactctgactct

SEQ ID NO: 93016 - DNA, 80 bp, synthetic construct
  source 1..80: mol_type = other DNA
ctttagcacaggctatgtcttcctccatattttaaaaggcgatttaaaaagataaccttaatgcctaggatcctcggtgc

SEQ ID NO: 93017 - DNA, 80 bp, synthetic construct
  source 1..80: mol_type = other DNA
tcatctcttccagctcacaggaacaccaggttgtttgtaaaaaccacaggagcaaacacccatatgatttaacctatggg

SEQ ID NO: 93018 - DNA, 80 bp, synthetic construct
  source 1..80: mol_type = other DNA
aaactctcaccaccccatctcttcctgctcgagttccttgattgccactagtcattcctatcatgttcaaaagagcccgt

SEQ ID NO: 93019 - DNA, 80 bp, synthetic construct
  source 1..80: mol_type = other DNA
tctcggagtcacgcagtgaaaattgttcaccaaattggttaacacaaagcgcaatccaatagcctaggatccactgtgcg

SEQ ID NO: 93020 - DNA, 80 bp, synthetic construct
  source 1..80: mol_type = other DNA
ctatttgattttaataagcaggctatccaaaggttgaaaactgaagcacaaataagtattcagttaatcaacaaagcagt

SEQ ID NO: 93021 - DNA, 80 bp, synthetic construct
  source 1..80: mol_type = other DNA
taaattcttcatgaagttgcccagtctttaatctattgaacagcttcctcaacatagacctaatcttactgcatgcatca

SEQ ID NO: 93022 - DNA, 80 bp, synthetic construct
  source 1..80: mol_type = other DNA
cgccgggggcccccccgggggagaagtccaccaccaaagaatcactcaatgtcctcaatcctttcattctcctcagctag

SEQ ID NO: 93023 - DNA, 80 bp, synthetic construct
  source 1..80: mol_type = other DNA
ttctcaatagtttccctcagttgatcaaaataaatgtttgcatctccttcgagcagaacttcatccaagtcggctttgtc

SEQ ID NO: 93024 - DNA, 80 bp, synthetic construct
  source 1..80: mol_type = other DNA
ctaattgtagggactacaccagacatgtcaaagttcatgacagagtcgtaactgtcaggacagaccactctcatgtcaat

SEQ ID NO: 93025 - DNA, 80 bp, synthetic construct
  source 1..80: mol_type = other DNA
gttgtaatgatctacactgattccaacatccttcaaagcagttgtggctttcaagatcaccctttggattattgtattga

SEQ ID NO: 93026 - DNA, 80 bp, synthetic construct
  source 1..80: mol_type = other DNA
gaatttgatttttgcatgagcattgaggaaactctgtgaacttggatttttcagcctgttgtcttcgctcaagccacttt

SEQ ID NO: 93027 - DNA, 80 bp, synthetic construct
  source 1..80: mol_type = other DNA
attccacccaatcgtccacagcttctagaactgttcccaagacccccatgtaattgtcaagcatcaccatcctcagtatg

SEQ ID NO: 93028 - DNA, 80 bp, synthetic construct
  source 1..80: mol_type = other DNA
acacttgtgcttcatctgatcatgcttgcttgcaagaagaaccagtatatcaaaaatcaataaaagtttccttcttgtgt

SEQ ID NO: 93029 - DNA, 80 bp, synthetic construct
  source 1..80: mol_type = other DNA
aaaatgacctccagcattgcatctggcattctctagtgtccaggccatctcccttattgtcgtcactgtcaatatttgca

SEQ ID NO: 93030 - DNA, 80 bp, synthetic construct
  source 1..80: mol_type = other DNA
tacaggaatctcagtattggcgatgcccttttaaactgatagattaaatgctcaacactatctcctgtggttgtcatgtc

SEQ ID NO: 93031 - DNA, 80 bp, synthetic construct
  source 1..80: mol_type = other DNA
gagacaatatctacccctgaccattgcatcctcaactttgacctatctaacatcatggcacttagtgctccagtcagtaa

SEQ ID NO: 93032 - DNA, 80 bp, synthetic construct
  source 1..80: mol_type = other DNA
aagctatgtcctcttccatacttggttgggggttcagtagctaagcttttgacagcttttaataaaaaggtagtttaaaa

SEQ ID NO: 93033 - DNA, 80 bp, synthetic construct
  source 1..80: mol_type = other DNA
ttttaataaaaaggtagtttaaaagatagtttaaaaagatagtttaaaaagatagccttaatgcctaggatcctcggtgc

SEQ ID NO: 93034 - DNA, 80 bp, synthetic construct
  source 1..80: mol_type = other DNA
aactctgagaggtgtccccaacctctctcacaaacatttcgaggtcttgatcttgtataatgggggcaaaggttgccaac

SEQ ID NO: 93035 - DNA, 80 bp, synthetic construct
  source 1..80: mol_type = other DNA
ctcttgtcacattcccacaagccccctctatgcacaaccaatgggactggctccatgcaaggacctactaacgtgaaatc

SEQ ID NO: 93036 - DNA, 80 bp, synthetic construct
  source 1..80: mol_type = other DNA
tggttaggtatgttaatcctgacactggtagagtgttatttgaggccaaactacataaactaggtttcatgactatagcc

SEQ ID NO: 93037 - DNA, 80 bp, synthetic construct
  source 1..80: mol_type = other DNA
aagaatggtgattctccaataactgtccctccaaatggatactttaggtttgaatcctgggtcaatcaattctacacact

SEQ ID NO: 93038 - DNA, 80 bp, synthetic construct
  source 1..80: mol_type = other DNA
gaataacttctttcattataatcaagggtctgactcgaggttacgcctaattgcaatgctatacacacctcttagggcaa

SEQ ID NO: 93039 - DNA, 80 bp, synthetic construct
  source 1..80: mol_type = other DNA
acaattctggggatgatgtttttactgtgtcttgtagagtgctaactagacctagtcctgatttctcattcaatttcctt

SEQ ID NO: 93040 - DNA, 80 bp, synthetic construct
  source 1..80: mol_type = other DNA
gattccctacacaccagtcccactgagaatattgttgttcagtgccaaaatgggcgcgtcacccttgatggtgagctgat

SEQ ID NO: 93041 - DNA, 80 bp, synthetic construct
  source 1..80: mol_type = other DNA
ggcgaaaaaggtggcatccactctcacgggagatcaaagagttggactcataccaagaaatggtgtagaccattgggatg

SEQ ID NO: 93042 - DNA, 80 bp, synthetic construct
  source 1..80: mol_type = other DNA
aggttcgaggttaatagtggaatctctggtctacctgagctcacgacagttgtccaaccggatgcgaccaatacggcatt

SEQ ID NO: 93043 - DNA, 80 bp, synthetic construct
  source 1..80: mol_type = other DNA
tatcctccaaagaaatcaaggaggaagggaagaagggcaaaaacaagactggccgtggcaagaaacatactgcattctcg

SEQ ID NO: 93044 - DNA, 80 bp, synthetic construct
  source 1..80: mol_type = other DNA
ccacgggcctcgtcccagagatcaacaacgagacccttcctctggaaccggtagcgggtgcagctattgccgcgcctgtt

SEQ ID NO: 93045 - DNA, 80 bp, synthetic construct
  source 1..80: mol_type = other DNA
ttcgctgccgttccaccaaatttcccagttgaattcttgagtcctgcacaaatcaccatgttgccacatttgatagttga

SEQ ID NO: 93046 - DNA, 80 bp, synthetic construct
  source 1..80: mol_type = other DNA
attggtagccatgttgtacacccccctgagatctaatggttctggtgatgatgttttcacagtgtcatgtagagtgctaa

SEQ ID NO: 93047 - DNA, 80 bp, synthetic construct
  source 1..80: mol_type = other DNA
ctagacccaccccagattttgagtttacatatttggtccccccttcggtagagtctaagactaagcccttttctctgccc

SEQ ID NO: 93048 - DNA, 80 bp, synthetic construct
  source 1..80: mol_type = other DNA
atactaaccatctctgaattgaccaattcaagatttcctgtaccggtagattcattgttcacagcccaaaacaataatct

SEQ ID NO: 93049 - DNA, 80 bp, synthetic construct
  source 1..80: mol_type = other DNA
taatgtccagtgtcaaaatggtcgctgcactttagatggtgagttgcaaggaaccactcagttgcaaccatcaggcatct

SEQ ID NO: 93050 - DNA, 80 bp, synthetic construct
  source 1..80: mol_type = other DNA
gcgccttcagaggcaaaataacggcagatgtacgtccaagccacgatgacaggtggcatatgcaactgacaaatctcaat

SEQ ID NO: 93051 - DNA, 80 bp, synthetic construct
  source 1..80: mol_type = other DNA
ggaacccccttcgacccaacagaggatgtaccagctccactgggcaccccagatttcacaggccttctcttcggagtggc

SEQ ID NO: 93052 - DNA, 80 bp, synthetic construct
  source 1..80: mol_type = other DNA
aagccaaagaaatgtccaacctaacccaaacaccaccagggcacatgaagccgtgatatccacaaccagttcacagtttg

SEQ ID NO: 93053 - DNA, 80 bp, synthetic construct
  source 1..80: mol_type = other DNA
tgccaaaattaggatcaatcaactttggtagcacaagtgaagatttcattgtgggccagcccacaaaattcacaccagtt

SEQ ID NO: 93054 - DNA, 80 bp, synthetic construct
  source 1..80: mol_type = other DNA
ggcatcaagattgaggatgggcatgcatttgaccaatggaccctacctaggtattcaggccatttaactctcaatatgaa

SEQ ID NO: 93055 - DNA, 80 bp, synthetic construct
  source 1..80: mol_type = other DNA
ccttgccccacctgttgccccaaatttccctggtgaacaactactcttctttaggtcaaatgtcccctgtgctggcggca

SEQ ID NO: 93056 - DNA, 80 bp, synthetic construct
  source 1..80: mol_type = other DNA
ttagtgatggtgtcatcgactgcctgctgcctcaggagtggatacagcacttctaccaagagtctgctccctcccagtcc

SEQ ID NO: 93057 - DNA, 80 bp, synthetic construct
  source 1..80: mol_type = other DNA
gatgtggccctgatcagatacgtcaaccccgacacgggccgcacacttttcgaggcgaaactccatagaacaggttacat

SEQ ID NO: 93058 - DNA, 80 bp, synthetic construct
  source 1..80: mol_type = other DNA
cactgttgctcattcaggtgattatccccttgttgtcccctccaatggatactttagatttgattcttgggtgaaccaat

SEQ ID NO: 93059 - DNA, 80 bp, synthetic construct
  source 1..80: mol_type = other DNA
gtctagcaggtgacatgctcaccaacacagttggctcattggcaaacgccggggccaatgccatcacacaaaagatagac

SEQ ID NO: 93060 - DNA, 80 bp, synthetic construct
  source 1..80: mol_type = other DNA
aagtggctgccaccaagcagttacaggctgatatgatcgccatcaagcaggggatactgaccgcgggcggcttttcccct

SEQ ID NO: 93061 - DNA, 80 bp, synthetic construct
  source 1..80: mol_type = other DNA
actgatgcggcgagaggagcagtgggtgcacccatgaccaaggtcctcgactggtctggtactcgttactgggctccaaa

SEQ ID NO: 93062 - DNA, 80 bp, synthetic construct
  source 1..80: mol_type = other DNA
actcagggcagttcacatcagcaccagtgcacatgcccacaaaaaccattcagcctactcctgttaaaaggactcaacct

SEQ ID NO: 93063 - DNA, 80 bp, synthetic construct
  source 1..80: mol_type = other DNA
ctttcttcctcttcaggtagtgtctatagtcttccaacacagagcaccgccttgactaagccctcttcaggtccttctgt

SEQ ID NO: 93064 - DNA, 80 bp, synthetic construct
  source 1..80: mol_type = other DNA
ttcttctgcttctacacaatctacaaaattgagttcagtttcttcaatggatagaacagcaaattgggtaaatcagcaaa

SEQ ID NO: 93065 - DNA, 80 bp, synthetic construct
  source 1..80: mol_type = other DNA
gaagccttagccccttcatgagtggtgcactcaacatatctcatgtaacacctccatcgagcagggcttcgagttcgggg

SEQ ID NO: 93066 - DNA, 80 bp, synthetic construct
  source 1..80: mol_type = other DNA
agtgaggggggagtcacgtgtttagtgaaaagaattaattagttttaattagattttgtttgaatttaattggatctttt

SEQ ID NO: 93067 - DNA, 80 bp, synthetic construct
  source 1..80: mol_type = other DNA
tagtgtatagtggttgcacttacatgcttgagtctgatggcaagggcaatgtgaaagttgacagaatccaaagtgccgcc

SEQ ID NO: 93068 - DNA, 80 bp, synthetic construct
  source 1..80: mol_type = other DNA
agggcaccgtggtcacactactcatcaaaaggtccactggggaactcatgcccctagcagttaggatggagacccatgcg

SEQ ID NO: 93069 - DNA, 80 bp, synthetic construct
  source 1..80: mol_type = other DNA
agggcaccgtggtcacactactcatcaaaaggtccactggggaactcatgcccctagcagttaggatggggacccatgcg

SEQ ID NO: 93070 - DNA, 80 bp, synthetic construct
  source 1..80: mol_type = other DNA
ggcaagccaccaaaaccaagtgtattagaagctgccaagaagaccatcattaatgtccttgagcaaacaattgatccacc

SEQ ID NO: 93071 - DNA, 80 bp, synthetic construct
  source 1..80: mol_type = other DNA
aggtagtcgcggaagaccttctttcccccagtgtggtggacgtgggcgacttcacaatatcaatcaatgagggtcttccc

SEQ ID NO: 93072 - DNA, 80 bp, synthetic construct
  source 1..80: mol_type = other DNA
gttgagctggcaccactctccttgtactggagacctgtgtacactcctcagtacctcatctctccagacactctcaaaaa

SEQ ID NO: 93073 - DNA, 80 bp, synthetic construct
  source 1..80: mol_type = other DNA
agcccgcggggcaattaacgctcccatgacaaaagctttggactggagcgggacaaggtactgggctcccgatgctagga

SEQ ID NO: 93074 - DNA, 80 bp, synthetic construct
  source 1..80: mol_type = other DNA
atcgggggcactgccaggaagagctaatcttagggatactgtccctgctcggggttcctctagcaaatcttctaactctt

SEQ ID NO: 93075 - DNA, 80 bp, synthetic construct
  source 1..80: mol_type = other DNA
gaggggagtcacgggtgtaatgtgaaaagacaaaattgattatctttctttcttttctttttctttagtgtcttttaaaa

SEQ ID NO: 93076 - DNA, 80 bp, synthetic construct
  source 1..80: mol_type = other DNA
cggggcgcggtctaaacagccgcccccgaaggacaaaccaccaaggcccccaagaccacccacaccagaattggttaaat

SEQ ID NO: 93077 - DNA, 80 bp, synthetic construct
  source 1..80: mol_type = other DNA
acaataaatgccttactatcaaggattgcagctgcccgatctctagtgcacagggccaaggaggagctgtcaagcaggcc

SEQ ID NO: 93078 - DNA, 80 bp, synthetic construct
  source 1..80: mol_type = other DNA
aaaacccatttagctagagagttggcaaagaagatcgcctcctcactcacaggtgaccagagggtgggtctcatcccacg

SEQ ID NO: 93079 - DNA, 80 bp, synthetic construct
  source 1..80: mol_type = other DNA
cggatcacagctcaagaatgtcaagaccatgacagaacttaagcaggctctcaaaaacatctcagtcaagaagtgtcagc

SEQ ID NO: 93080 - DNA, 80 bp, synthetic construct
  source 1..80: mol_type = other DNA
aacggggaggacgaaccaatcatttcttacaacgctgaaaagggtgtctctggtttgcctgaacttacaactgtcaccca

SEQ ID NO: 93081 - DNA, 80 bp, synthetic construct
  source 1..80: mol_type = other DNA
accacccctttgccgcccggaacctacgagccagcttatctgggcggcaaggatcctagagtaaaaggtggcccctcact

SEQ ID NO: 93082 - DNA, 80 bp, synthetic construct
  source 1..80: mol_type = other DNA
gaggtaaaccacccaaaccaagcgtgctagaagctgccaagaggactataatcaatgtgcttgagcaaacaatagaccca

SEQ ID NO: 93083 - DNA, 80 bp, synthetic construct
  source 1..80: mol_type = other DNA
gttgagctgacccctttgtccttgtattggagaccagtgtacaccccacaatatctcatttcccctgacactctcagaaa

SEQ ID NO: 93084 - DNA, 80 bp, synthetic construct
  source 1..80: mol_type = other DNA
actgagaatattgttgtccagtgtcagaatgggcgcgttacccttgatggtgagctgatgggctccacccaactcttacc

SEQ ID NO: 93085 - DNA, 80 bp, synthetic construct
  source 1..80: mol_type = other DNA
cccttagggataccagatttccaaggcagagtctttggcgtggccagccagagaaatcctgacaccacaactagggcaca

SEQ ID NO: 93086 - DNA, 80 bp, synthetic construct
  source 1..80: mol_type = other DNA
ttgatgaaaacgaaccaacaagattcaccccagttggcattggggttgacaatgaggcacactttaaacaatgggctctt

SEQ ID NO: 93087 - DNA, 80 bp, synthetic construct
  source 1..80: mol_type = other DNA
agcatttctaccaagaatcagccccctcccaatctcaagtggccctggttaggtatgtcaaccctgacactggcagagtg

SEQ ID NO: 93088 - DNA, 80 bp, synthetic construct
  source 1..80: mol_type = other DNA
ttatttgaggccaagctgcacaaattaggtttcatgactgtagccaagaatggtgattctccaataactgtccctccaaa

SEQ ID NO: 93089 - DNA, 80 bp, synthetic construct
  source 1..80: mol_type = other DNA
acgggacgagatactgggcaccaggcgccacctccacaacttcgttgtcgggtggcttcacaaatcaaaccgtacacaga

SEQ ID NO: 93090 - DNA, 80 bp, synthetic construct
  source 1..80: mol_type = other DNA
cccacaccaaattttagaacgggccagtctcccaaacccgcacccagcagtgggtcttcagtgagatcaaactcaaccca

SEQ ID NO: 93091 - DNA, 80 bp, synthetic construct
  source 1..80: mol_type = other DNA
atgactccaaagtgaaaaaggtggccaatattgtcctctgtgccctctcagcattgtttacaagaccaattaaggacatt

SEQ ID NO: 93092 - DNA, 80 bp, synthetic construct
  source 1..80: mol_type = other DNA
caggggaccagcgtgtgggtctgatcccacgcaatggcgtcgaccactgggacgcatacaagggtgaaagagttgtccta

SEQ ID NO: 93093 - DNA, 80 bp, synthetic construct
  source 1..80: mol_type = other DNA
ccctcatcgcccgagcgtcaggattactccacgagaggctagatgaatatgaattacaaggcccagccctcaccactttt

SEQ ID NO: 93094 - DNA, 80 bp, synthetic construct
  source 1..80: mol_type = other DNA
aactttgaccgcaacaagatacttgcgtttagacagcttgctgccgaaaacaagtatgggctaatggacacaatgagagt

SEQ ID NO: 93095 - DNA, 80 bp, synthetic construct
  source 1..80: mol_type = other DNA
gtcgagctggcaccactctctttgttctggagacctgtgtataccccccagtacctcatctctccagacactcttaggag

SEQ ID NO: 93096 - DNA, 80 bp, synthetic construct
  source 1..80: mol_type = other DNA
aatcctcacgcttggggaactctccaattctagatttccagtgtccatagaccagatgtacaccagccccaatgaagtta

SEQ ID NO: 93097 - DNA, 80 bp, synthetic construct
  source 1..80: mol_type = other DNA
ggaactccaaggaacaacacaacttcaagtcagtggcatctgtgctttcaagggagaggtgaccgcccacttgcatgacg

SEQ ID NO: 93098 - DNA, 80 bp, synthetic construct
  source 1..80: mol_type = other DNA
ggacacgacgccgtggtccctacttacacagcacagtacaccccgaaattgggtcaaattcaaattggcacatggcagac

SEQ ID NO: 93099 - DNA, 80 bp, synthetic construct
  source 1..80: mol_type = other DNA
ggcagacatgatggctataaagcagggggtcttgaccgctggcggcttctcccctgctgacgcagccagaggtgctgtga

SEQ ID NO: 93100 - DNA, 80 bp, synthetic construct
  source 1..80: mol_type = other DNA
tccgtaagaggggggagtcacaagcctagtgaaaaggaaaaatttatctaaatgaattgattttatcttttaaaaaaaaa

SEQ ID NO: 93101 - DNA, 80 bp, synthetic construct
  source 1..80: mol_type = other DNA
gacttcgaccggtcgttgtgatgatttcagggagaccaggtatagggaagacccatctagctagagagttggcaaagaag

SEQ ID NO: 93102 - DNA, 80 bp, synthetic construct
  source 1..80: mol_type = other DNA
atggatatgctggaggtgttgaggtgcaagtgcttcttgctgggaacgcgttcacagcaggaaagatattatttgcagca

SEQ ID NO: 93103 - DNA, 80 bp, synthetic construct
  source 1..80: mol_type = other DNA
atcccacccaactttcctgtagatatgattagcccagctcaaattactatgcttccccatttgattgtagatgttaggac

SEQ ID NO: 93104 - DNA, 80 bp, synthetic construct
  source 1..80: mol_type = other DNA
attggaacctattatgatacccttacctgatgttaggaatgtgttctaccattttaataatcaaccccaacctaggatga

SEQ ID NO: 93105 - DNA, 80 bp, synthetic construct
  source 1..80: mol_type = other DNA
gattagtggctatgctctataccccattgagatctaatggttcaggagatgatgtttttactgtgtcttgtagagtgttg

SEQ ID NO: 93106 - DNA, 80 bp, synthetic construct
  source 1..80: mol_type = other DNA
acgctgtttgaggccaaattgcacaggtcaggtttcattactgtatcacacactggtacctaccctcttgtggtcccccc

SEQ ID NO: 93107 - DNA, 80 bp, synthetic construct
  source 1..80: mol_type = other DNA
gaatggtcattttaggtttgattcttgggttaaccaattctactcactcgcccccatgggaactggcaatgggcgcagaa

SEQ ID NO: 93108 - DNA, 80 bp, synthetic construct
  source 1..80: mol_type = other DNA
gtttgcacacctcaggaagaggggggagtcacaggcttagtgaaaaggataatcaatttttaaaatgtgattttattttc

SEQ ID NO: 93109 - DNA, 80 bp, synthetic construct
  source 1..80: mol_type = other DNA
ggggtggtggaaatggtcatactattacttgaactctttggtgtgttctggaacccgcctgatgtatccaattttatagc

SEQ ID NO: 93110 - DNA, 80 bp, synthetic construct
  source 1..80: mol_type = other DNA
actcactagagtcagatggcaatggtgtcaacattaaagaggagaggaacatcttaacccaacaacaacagtcagtgtgt

SEQ ID NO: 93111 - DNA, 80 bp, synthetic construct
  source 1..80: mol_type = other DNA
ttgacaccacagttaaggaagagatcctagacaaccacaaagaatggtttgacgctggtggtttgggcccttgcacaatg

SEQ ID NO: 93112 - DNA, 80 bp, synthetic construct
  source 1..80: mol_type = other DNA
gccccgagggcacagtgtgttcagtactgataaaaagggactctggtgaactactgccattggctgtaagaatgggcgca

SEQ ID NO: 93113 - DNA, 80 bp, synthetic construct
  source 1..80: mol_type = other DNA
tggagtggaacgcctcacaacagtgagtgggcctgagtggaatctttgccccttaccccccattgaacttaggaacatgg

SEQ ID NO: 93114 - DNA, 80 bp, synthetic construct
  source 1..80: mol_type = other DNA
gccccgacaaaagcgagggcccaataattgtgaggaagagtgtggatggtttggtctttctgcgtcgcactatctcccgc

SEQ ID NO: 93115 - DNA, 80 bp, synthetic construct
  source 1..80: mol_type = other DNA
acacgccgctccgcactggtggggggtctggtagttctgattcctttgtagttgctggcagggttctcacagcccctagt

SEQ ID NO: 93116 - DNA, 80 bp, synthetic construct
  source 1..80: mol_type = other DNA
gcaaaccttgtccaattctaggttcccttccctcatccaggggatgattctgtcccccgatgcatctcaagtggtccaat

SEQ ID NO: 93117 - DNA, 80 bp, synthetic construct
  source 1..80: mol_type = other DNA
tccaaaatgggcgttgccttatagatggtcaactcttaggcactacacccgctacatcaggacagctgttcagagtaaga

SEQ ID NO: 93118 - DNA, 80 bp, synthetic construct
  source 1..80: mol_type = other DNA
acctgtggggttccccgattttggaaaatgtgattggcacatgagaatcagcaaaaccccgaacaacacaagttcaggtg

SEQ ID NO: 93119 - DNA, 80 bp, synthetic construct
  source 1..80: mol_type = other DNA
accccatgcgcagtgtcagcgtgcaaaccaatgtgcagggttttgtgccacacctgggaagtatacaatttgatgaagtg

SEQ ID NO: 93120 - DNA, 80 bp, synthetic construct
  source 1..80: mol_type = other DNA
gtgaggcccttgtatactttgtttctgctttcccgggccccaataaccgctcagccccgaatgatgtaccctgtcttctc

SEQ ID NO: 93121 - DNA, 80 bp, synthetic construct
  source 1..80: mol_type = other DNA
atggggtaggtgccggtcctcaacagctccctctcaatggtgtttttctctttgtttcttgggtgtctcgtttttaccag

SEQ ID NO: 93122 - DNA, 80 bp, synthetic construct
  source 1..80: mol_type = other DNA
ttggagtacgccgtatataatggcccaagccatcataggagcaattgccgcgtcagctgcaggctcagcattgggtgcgg

SEQ ID NO: 93123 - DNA, 80 bp, synthetic construct
  source 1..80: mol_type = other DNA
gcatccaggctggtgccgaggctgcgcttcagagtcaaagataccaacaagacttagccctgcaaaggaatacttttgaa

SEQ ID NO: 93124 - DNA, 80 bp, synthetic construct
  source 1..80: mol_type = other DNA
catgataaggatatgctttcctaccaggtccaggcaagtaatgcacttttggcaaagaatctcaatacccgctattctat

SEQ ID NO: 93125 - DNA, 80 bp, synthetic construct
  source 1..80: mol_type = other DNA
gcttgttgcagggggtctttctagtgctgatgcttctcgggctgttgctggggcccctgtaacacaattgattgattgga

SEQ ID NO: 93126 - DNA, 80 bp, synthetic construct
  source 1..80: mol_type = other DNA
gcttgttgcaggtggtctttctagtgctgatgcttctcgggctgttgctggggcccctgtaacacaattgattgattgga

SEQ ID NO: 93127 - DNA, 80 bp, synthetic construct
  source 1..80: mol_type = other DNA
acggcactcgggttgccgcccccaggtcaagtgcaacaactctgaggtctggtggttttatggcagtccccatgcctgtt

SEQ ID NO: 93128 - DNA, 80 bp, synthetic construct
  source 1..80: mol_type = other DNA
caacccaaatctaaggccttgcaatcctctgggttttccaatcctgcttatgacacgtccacagtttcttctaggacttc

SEQ ID NO: 93129 - DNA, 80 bp, synthetic construct
  source 1..80: mol_type = other DNA
ttcttgggtgcagtcacagaattccctgcgaagtgtatcaccctttcataggcaggcccttcaaactgtatgggttactc

SEQ ID NO: 93130 - DNA, 80 bp, synthetic construct
  source 1..80: mol_type = other DNA
cacctgggtctacttcctcttcttctgtttcctcaacaccttatggtgtttttaatacggataggatgccgctattcgca

SEQ ID NO: 93131 - DNA, 80 bp, synthetic construct
  source 1..80: mol_type = other DNA
aatttgcggcgttaatgttgtaatataatgcagcagtgggcactatattcaatttggtttaattagtgaataatttggct

SEQ ID NO: 93132 - DNA, 80 bp, synthetic construct
  source 1..80: mol_type = other DNA
catacgcggccataaccaataattgttttgaattctgctgtcaagtcatgaaccttgaggacacgtggctgcaaaggcga

SEQ ID NO: 93133 - DNA, 80 bp, synthetic construct
  source 1..80: mol_type = other DNA
accatcaacgccatattagctaggatagctgctgctagatccctactacataaggccaaagaggagatgttcagtaggat

SEQ ID NO: 93134 - DNA, 80 bp, synthetic construct
  source 1..80: mol_type = other DNA
caaaggtaccaaagcgcccagcagtaatcaaaattgccccacagttaaaatcgggcctaaaacgttaacaattcctcctg

SEQ ID NO: 93135 - DNA, 80 bp, synthetic construct
  source 1..80: mol_type = other DNA
agttgactctagccccccagggtgggtttgataagaatggcaataccccacacggcaagggtaccatgcggtccttaacc

SEQ ID NO: 93136 - DNA, 80 bp, synthetic construct
  source 1..80: mol_type = other DNA
caggggtccctaactgcgagagtcgcaggccttgtccatgagaggagggacgaattccagctccaaggaaatgacctcca

SEQ ID NO: 93137 - DNA, 80 bp, synthetic construct
  source 1..80: mol_type = other DNA
gaagacaatgcttcccagactgtgaacgaggtgcattcagcacttcttagactcaggcaggcaagggccagatactacat

SEQ ID NO: 93138 - DNA, 80 bp, synthetic construct
  source 1..80: mol_type = other DNA
cagctgcttccaagacctcgtttacactctcatgcaggttgcaggggcatcattcgtcgtcagtaggatctccagaaggt

SEQ ID NO: 93139 - DNA, 80 bp, synthetic construct
  source 1..80: mol_type = other DNA
accgtacaatttgatgcaaagtcagaaactataattgggctaccagacttgacaacggtgcaaaacgaacacgaaaacaa

SEQ ID NO: 93140 - DNA, 80 bp, synthetic construct
  source 1..80: mol_type = other DNA
aggggcgtgcttggcttggtcactggctcagacatcagaaagaggagacccgatgacttccaaccaaagggcaacctgtg

SEQ ID NO: 93141 - DNA, 80 bp, synthetic construct
  source 1..80: mol_type = other DNA
cccggggtggcaacactgttatatgcgccacccaagggcaagacggggaagcagtccttgagggaaatgaggaccttggc

SEQ ID NO: 93142 - DNA, 80 bp, synthetic construct
  source 1..80: mol_type = other DNA
cccgggggggcaacactgttatatgcgccacccaagggcaagacggggaagcagtccttgagggaaatgaggaccttggc

SEQ ID NO: 93143 - DNA, 80 bp, synthetic construct
  source 1..80: mol_type = other DNA
cttaatagaagatgcatttccagaactaccggcttcttcaaaccataccagtcttggaatagaaaacctctcccaactgt

SEQ ID NO: 93144 - DNA, 80 bp, synthetic construct
  source 1..80: mol_type = other DNA
gatattgggctcctggtgccatgaggacaacaggctactcagggaccttcactcacttgcctcctatgcaatctgcttca

SEQ ID NO: 93145 - DNA, 80 bp, synthetic construct
  source 1..80: mol_type = other DNA
tatgttaataatcagaatagacaactttttaaagtggatccttctccctcttcttcaagtggttcttctgtttcttctgt

SEQ ID NO: 93146 - DNA, 80 bp, synthetic construct
  source 1..80: mol_type = other DNA
caaggacatctgattgggtgcgtagccaaaatgaaagattgagcccctttatgaatggagcattgcaaacagcgtatgta

SEQ ID NO: 93147 - DNA, 80 bp, synthetic construct
  source 1..80: mol_type = other DNA
ggggagtcacagatttagtgaaaagattaattaggaaagtttgattagttttcttttctattattcctttaatttttctt

SEQ ID NO: 93148 - DNA, 80 bp, synthetic construct
  source 1..80: mol_type = other DNA
tgatgatggaaagatcaaaaaggtggccaatgcaatcctctgtgcactcggttcgctgttttcaaaaccaatcaaagacc

SEQ ID NO: 93149 - DNA, 80 bp, synthetic construct
  source 1..80: mol_type = other DNA
caggagaccagcgcgtaggcctcatcccacgtaacggcgtcgaccattgggatgcttacaaggtggagagggttgtcctt

SEQ ID NO: 93150 - DNA, 80 bp, synthetic construct
  source 1..80: mol_type = other DNA
caggagaccagcgcgtaggcctcatcccacgtaacggcgtcgaccattgggatgcttacaagggggagagggttgtcctt

SEQ ID NO: 93151 - DNA, 80 bp, synthetic construct
  source 1..80: mol_type = other DNA
caaaccacaagtggaaaacacagaggaaaccaccaacaaagacggatgcccaaaacccaaagatgatgaggagtttgtca

SEQ ID NO: 93152 - DNA, 80 bp, synthetic construct
  source 1..80: mol_type = other DNA
tctggggtgccctgcacctctcagtggaattctgtcgcccattggcttctcacactctgcgcgctctctgaagtcacaaa

SEQ ID NO: 93153 - DNA, 80 bp, synthetic construct
  source 1..80: mol_type = other DNA
ctaggggccccaaccatggagacccatctgaaacaatgattccacactcccaaaggcctatacaattgatgtccctattg

SEQ ID NO: 93154 - DNA, 80 bp, synthetic construct
  source 1..80: mol_type = other DNA
ccacgaaatcgaatggctcgacacgcggccacaaagccacagtgctcactgggagcaccgactttactccaaaactgggt

SEQ ID NO: 93155 - DNA, 80 bp, synthetic construct
  source 1..80: mol_type = other DNA
agaattcaatttgcaactgacacagaccatgattttgaagctaaccaaaatacaaaattcaccccagtcggtgtcatcca

SEQ ID NO: 93156 - DNA, 80 bp, synthetic construct
  source 1..80: mol_type = other DNA
ttcgtaagcgaggggagtcacgggcttaatgtgaaaagacaaaattgattatttttctttttctttctttagtgtctttt

SEQ ID NO: 93157 - DNA, 80 bp, synthetic construct
  source 1..80: mol_type = other DNA
atagggaagttaaagcccctcaatatcctcaacatcttagcctcatgtgattggaccttcgcaggtatcgtggagtccct

SEQ ID NO: 93158 - DNA, 80 bp, synthetic construct
  source 1..80: mol_type = other DNA
attctggtgaggatgtgttcacagtgtcttgcagagtcctgacccgcccagcccctgacttccagttcacatttttggta

SEQ ID NO: 93159 - DNA, 80 bp, synthetic construct
  source 1..80: mol_type = other DNA
tccgcagattcaacagattcagccccacgggtgaggaaccaccctctccacgtacagctgaagaacctcgatgggacacc

SEQ ID NO: 93160 - DNA, 80 bp, synthetic construct
  source 1..80: mol_type = other DNA
atatgatccaacagatgaggtgccggcagttctgggcgctatagattttaaaggaactgtgtttggggtcgctagtcaaa

SEQ ID NO: 93161 - DNA, 80 bp, synthetic construct
  source 1..80: mol_type = other DNA
ggaacaccacagggggctctataggagcgacccgcgcccatgaagtgcacatagacactacaaaccctagatacacccca

SEQ ID NO: 93162 - DNA, 80 bp, synthetic construct
  source 1..80: mol_type = other DNA
aagcttggctctgtactgatgtattctgaatccactgattttgatgacggacaacccacccgcttcacccccattggtat

SEQ ID NO: 93163 - DNA, 80 bp, synthetic construct
  source 1..80: mol_type = other DNA
gggagccgatgattggcaccaatgggaattgcccgaatattctggtcaccttactcttaatatgaacctggcccccgcag

SEQ ID NO: 93164 - DNA, 80 bp, synthetic construct
  source 1..80: mol_type = other DNA
ttgcccctgctttccccggtgagcgcattctcttcttcagatcagtggtgccgtctgctggcggctatgggtcaggtcac

SEQ ID NO: 93165 - DNA, 80 bp, synthetic construct
  source 1..80: mol_type = other DNA
ccagtaatcctgtgcataggcaacccactttgtcccgttctgactcccccaaaattaaggctaatagtgattctgctagt

SEQ ID NO: 93166 - DNA, 80 bp, synthetic construct
  source 1..80: mol_type = other DNA
gtttatagttctgcatctactgtttcctcacaatcaactcactcaacggctttgactgcggagtctaaaccatctaggcc

SEQ ID NO: 93167 - DNA, 80 bp, synthetic construct
  source 1..80: mol_type = other DNA
aacatcctcttccacagcaacttctactctatctagaactagtgactgggtgagagggcaaaatgagaggcttagcccgt

SEQ ID NO: 93168 - DNA, 80 bp, synthetic construct
  source 1..80: mol_type = other DNA
atgaagatggcgtcgaatgacgccgctccatctaatgatggtgctgctggtctcgtaccagaggacaacaacgagaccct

SEQ ID NO: 93169 - DNA, 80 bp, synthetic construct
  source 1..80: mol_type = other DNA
gtccagtcactttaaattgtgataggatcgagaataaggggaagatgtttgatagtgatgtcatcataatcacgaccaac

SEQ ID NO: 93170 - DNA, 80 bp, synthetic construct
  source 1..80: mol_type = other DNA
tatgtcaacaatcaaagtagacaacctcttaaagtagattctcctcctccttcttcgagtagttcttctgtttcttctgt

SEQ ID NO: 93171 - DNA, 80 bp, synthetic construct
  source 1..80: mol_type = other DNA
caggcagccactcttcgcccatttgcgtaggcgaggggagtcacagatttagtgaaaagattggttaggaaagttgatta

SEQ ID NO: 93172 - DNA, 80 bp, synthetic construct
  source 1..80: mol_type = other DNA
atggcgctcgaccttttacgccggtcacaaacaccatctccatgtcggcaagacagcgcccccaaggctcaaagggaccg

SEQ ID NO: 93173 - DNA, 80 bp, synthetic construct
  source 1..80: mol_type = other DNA
tccagggggctgtctacaactttgacgaggatagagtggccgccttcaccaatctagctcgagctaatggtctggggctt

SEQ ID NO: 93174 - DNA, 80 bp, synthetic construct
  source 1..80: mol_type = other DNA
tccagggggctgtctacaactttgacgaggatagagtggccgccttcaccaatctagctcgagctaatggtctggtgctt

SEQ ID NO: 93175 - DNA, 80 bp, synthetic construct
  source 1..80: mol_type = other DNA
ataagtatggcaacattaggcaagaagctgagaagtgttaagtccatggaaggcttgcgcaatgcactactgggatataa

SEQ ID NO: 93176 - DNA, 80 bp, synthetic construct
  source 1..80: mol_type = other DNA
tcccccgcgaaccgcttcagaggtaaaaagggcgctggggtgggatgctgaaccagaacaccaagaaagcacggctaggg

SEQ ID NO: 93177 - DNA, 80 bp, synthetic construct
  source 1..80: mol_type = other DNA
tcccccgcgaaccgcttcagaggtaaaaagggcgctggcgtgggatgctgaaccagaacaccaagaaagcacggctaggg

SEQ ID NO: 93178 - DNA, 80 bp, synthetic construct
  source 1..80: mol_type = other DNA
acagccaccctggcgctctctagactgcgggctgccagagcccttgcgtacgcttcctgtttacaaagtgcagtgttgtc

SEQ ID NO: 93179 - DNA, 80 bp, synthetic construct
  source 1..80: mol_type = other DNA
aatcattgaacgttatggtctgtgtgagagtgagcaggaaggagaagatgaccaaactgtggagttgcccaccgctgaca

SEQ ID NO: 93180 - DNA, 80 bp, synthetic construct
  source 1..80: mol_type = other DNA
ttcgaatgggagcagtggcctcaatgaagatccaagggaagctcatgcatggtcagtcagggatgttgctcaccggtgcc

SEQ ID NO: 93181 - DNA, 80 bp, synthetic construct
  source 1..80: mol_type = other DNA
accccagggttgaaggtggtccatctttgcagcaagtgttgcgagaccagttaaaaccatttgctgaaccccgtggcagg

SEQ ID NO: 93182 - DNA, 80 bp, synthetic construct
  source 1..80: mol_type = other DNA
gttaaagatggtctaccatctggctttccatgcacctcacaagtgaacagtatcaaccattggatctacactttgtgcgc

SEQ ID NO: 93183 - DNA, 80 bp, synthetic construct
  source 1..80: mol_type = other DNA
cttatcagaggttactggtttggctcctgatgtaatacagtcacagtcttacttttcattttatggtgatgatgaaatag

SEQ ID NO: 93184 - DNA, 80 bp, synthetic construct
  source 1..80: mol_type = other DNA
tttgaaaccttggtcccacacacgcagaggaaggtccaattaatatccctattaggtgaggccgcactccatggtgagaa

SEQ ID NO: 93185 - DNA, 80 bp, synthetic construct
  source 1..80: mol_type = other DNA
actcaatgttctatcaaattcaagggtgccgtcactgataaaattcatgatggtgtcacaggaccatggacagatggtac

SEQ ID NO: 93186 - DNA, 80 bp, synthetic construct
  source 1..80: mol_type = other DNA
aatttcagaatggcagggtcacactggatggacagctccagggcactacaccaacatcggccagccagctctgcaagatg

SEQ ID NO: 93187 - DNA, 80 bp, synthetic construct
  source 1..80: mol_type = other DNA
cgggggacggtttaccatgcctccggtggtcaagggctcaatttaactgagattgatggcaccccctatcatgcatttga

SEQ ID NO: 93188 - DNA, 80 bp, synthetic construct
  source 1..80: mol_type = other DNA
aagcccagctcccattggtttccctgacataggagacagcgattggcatatcaacgcttcacccgccaccgcttttggca

SEQ ID NO: 93189 - DNA, 80 bp, synthetic construct
  source 1..80: mol_type = other DNA
gtggcgaaagcgtcaaaagactagatatggaacagggctcttcatttgccccacatttgggtactgtacagctatactac

SEQ ID NO: 93190 - DNA, 80 bp, synthetic construct
  source 1..80: mol_type = other DNA
atgccagctatgagagccaacactgacctgatctgctcattggagtggctatccccgcctagcggaggcactccaaacaa

SEQ ID NO: 93191 - DNA, 80 bp, synthetic construct
  source 1..80: mol_type = other DNA
agtcaacccttgggccattccacggtatggttcaactttaactgaagctgctcagctagccccaccaatttacccccctg

SEQ ID NO: 93192 - DNA, 80 bp, synthetic construct
  source 1..80: mol_type = other DNA
ttggagaagctatagttttctttatgtctgattttcctatagcaaatggtcaagatgggttaagagtgccctgcactata

SEQ ID NO: 93193 - DNA, 80 bp, synthetic construct
  source 1..80: mol_type = other DNA
ccccaagaatttgtaacccattttgtcaatgaacaagcaccaacccgtggggaagctgcccttcttcattatgttgaccc

SEQ ID NO: 93194 - DNA, 80 bp, synthetic construct
  source 1..80: mol_type = other DNA
cgacacacaccgcaatttgggtgagtttaagttataccctgaaggatttatgacttgtgtaccaaattctagtggtagtg

SEQ ID NO: 93195 - DNA, 80 bp, synthetic construct
  source 1..80: mol_type = other DNA
caggcattcaggctggtactgaggctgcactccaatatcagcggttccagcaggatttaacgttgcagagcaacactttc

SEQ ID NO: 93196 - DNA, 80 bp, synthetic construct
  source 1..80: mol_type = other DNA
aaacatgacaaagaaatgctagggctacaggttggtgcctccactgctcttttgcaaaacagcctcaacacccgctacaa

SEQ ID NO: 93197 - DNA, 80 bp, synthetic construct
  source 1..80: mol_type = other DNA
catgctcacaaatgctggtctctcgtcctcagatgcagcacgcgtggtggttggcgcgccagctacacgtgttgttgact

SEQ ID NO: 93198 - DNA, 80 bp, synthetic construct
  source 1..80: mol_type = other DNA
ggaacggcaccagggtgtcagcaccacaatctacagctaccacgttgaggtctggtgggttcatgacaatcccaactctg

SEQ ID NO: 93199 - DNA, 80 bp, synthetic construct
  source 1..80: mol_type = other DNA
tacaagggcaaacaacagcagaaaccaactgaaattggcttatctaacccaaattatggttcatctgtctcgtcttctag

SEQ ID NO: 93200 - DNA, 80 bp, synthetic construct
  source 1..80: mol_type = other DNA
ggcgtgtgtgttacatccccactagccaacaacgccttacctacgaacagcttaaggagttggagaatgaaccatggccc

SEQ ID NO: 93201 - DNA, 80 bp, synthetic construct
  source 1..80: mol_type = other DNA
atattcaattggatttgattaattattaatttggtttaattattgatttggtttaatttggattttgatgttaaaaaaaa

SEQ ID NO: 93202 - DNA, 80 bp, synthetic construct
  source 1..80: mol_type = other DNA
tatgcctcaatcaccaacaactgttatgagttttgctgtaaagtgatggcacttgatgatacctggctccaaagaagact

SEQ ID NO: 93203 - DNA, 80 bp, synthetic construct
  source 1..80: mol_type = other DNA
cttttatgggggttgtggaattaatagtgcttgtggctgaattattcaatgtattttggacaccaccagacatatctagt

SEQ ID NO: 93204 - DNA, 80 bp, synthetic construct
  source 1..80: mol_type = other DNA
tttattgcatcattattgcctgacttccaccttcagggtccagaggatttggcaaaagatctggtccctattatactagg

SEQ ID NO: 93205 - DNA, 80 bp, synthetic construct
  source 1..80: mol_type = other DNA
tggaatcggtcttgcaattggcttcacaagagacaaaatcactaaggtcatgaagagtgccgttgatggactgcgctcag

SEQ ID NO: 93206 - DNA, 80 bp, synthetic construct
  source 1..80: mol_type = other DNA
aattataaagaaatacttctttggaggtgaccagacagagaggaccctacggggcatcgaagatgctgtgatagacatgg

SEQ ID NO: 93207 - DNA, 80 bp, synthetic construct
  source 1..80: mol_type = other DNA
aaggcatacatgaacatattggacatcgaggaggaaaaagccagaaaactttctgtccgtagtgctgacccacacatagt

SEQ ID NO: 93208 - DNA, 80 bp, synthetic construct
  source 1..80: mol_type = other DNA
atggcgcttgacctcctgcgccgttcacaaacaccttccccatcccgacaagaccaccccccaaaagatcagagggatcg

SEQ ID NO: 93209 - DNA, 80 bp, synthetic construct
  source 1..80: mol_type = other DNA
gtcccccaggcattggcaaaacaaaagctgctgagcatctagctagccggttggccactgagattagaccaggtggcaag

SEQ ID NO: 93210 - DNA, 80 bp, synthetic construct
  source 1..80: mol_type = other DNA
gtgggcctcgtaccacgtgaatccatagaccactgggatggttaccatggtgaagaggtcttgttgtgggacgactacgg

SEQ ID NO: 93211 - DNA, 80 bp, synthetic construct
  source 1..80: mol_type = other DNA
gtcaatttaggacccgtgtgtagacgagtggacttcttggtctactgctctgcacctgaaattgagcagacccgcagggc

SEQ ID NO: 93212 - DNA, 80 bp, synthetic construct
  source 1..80: mol_type = other DNA
ccatccaggcgactccaatgccataaaagacctatacaagaaagatttctcacacttgaaaatggacctagccccacaag

SEQ ID NO: 93213 - DNA, 80 bp, synthetic construct
  source 1..80: mol_type = other DNA
ggggttttgataaccagggtaacacgccctttggcaagggtgtaatgaagcccaccacccttaatcggttgctaatccaa

SEQ ID NO: 93214 - DNA, 80 bp, synthetic construct
  source 1..80: mol_type = other DNA
tccaaggtaaggtttacaactttgatgaagacagagtggctgcgttcaccaacttagcccgcgctaatggattagggctt

SEQ ID NO: 93215 - DNA, 80 bp, synthetic construct
  source 1..80: mol_type = other DNA
atcagtatggcaacccttggcaagaaactaagaagtgttaaaaccatggaaggattgcgtaatgcactagttgggtatcg

SEQ ID NO: 93216 - DNA, 80 bp, synthetic construct
  source 1..80: mol_type = other DNA
tccaccgcgcaccgccctagaggtgaaaaagtcaatgggatgggacgaagagccacaacaacaagagagcaccgctaagg

SEQ ID NO: 93217 - DNA, 80 bp, synthetic construct
  source 1..80: mol_type = other DNA
ggtggaggagtgcgacataatttggaacaccagaatctactcaatcaagagtgacggtaagagtgtgatagtcaaggaga

SEQ ID NO: 93218 - DNA, 80 bp, synthetic construct
  source 1..80: mol_type = other DNA
agcaaaaccagacctcgtcccaacaccaagctgtcagcacggccaccctcgcactttccaggttgcgagctgcccgagcg

SEQ ID NO: 93219 - DNA, 80 bp, synthetic construct
  source 1..80: mol_type = other DNA
gtagcatatgcgtcctgtctgcagagcgccgtcttatccatactccaggtggctggttctgcggtggtggtgagcagagc

SEQ ID NO: 93220 - DNA, 80 bp, synthetic construct
  source 1..80: mol_type = other DNA
agtaaaacgcatgtttggcacgagtaccgaacagcccgcactggagggtggggagagagaacacaactgcagggttcacc

SEQ ID NO: 93221 - DNA, 80 bp, synthetic construct
  source 1..80: mol_type = other DNA
gggcacaggccgcaggccgcggtcccatagggcatgatgggatcattgagcgctatggtttgtgtgagagcgagcaagag

SEQ ID NO: 93222 - DNA, 80 bp, synthetic construct
  source 1..80: mol_type = other DNA
gatgaaaatgaacaagttgtggaactaccatcagccaacaaggaaggtaaaaataagggcaaaaccaagaaaggccgtgg

SEQ ID NO: 93223 - DNA, 80 bp, synthetic construct
  source 1..80: mol_type = other DNA
gggaattgctcccgcagttttaccaagcacattcgagagagctacaccacaagaaagcactggtggatgccagacagtag

SEQ ID NO: 93224 - DNA, 80 bp, synthetic construct
  source 1..80: mol_type = other DNA
gacggggggccatctttgcaacaagtgctcagagatcagttaaagccattcgctgaaccccgaggcaggttgccagaagc

SEQ ID NO: 93225 - DNA, 80 bp, synthetic construct
  source 1..80: mol_type = other DNA
tgttgtggggagcggaccttggtaccgtcatccgagctgccagagcatttggccctttctgtgatgctataaaaccccat

SEQ ID NO: 93226 - DNA, 80 bp, synthetic construct
  source 1..80: mol_type = other DNA
tctggtctgccagtgacggtgtggacattggtgtggatgacctgaaaacagtccgtggccctcattggaacatgtgcccc

SEQ ID NO: 93227 - DNA, 80 bp, synthetic construct
  source 1..80: mol_type = other DNA
tcgggtaccaagggcggcttgaccgcaactctattgaaagacaactctggtggactcgaggccccaatcatgatgaccct

SEQ ID NO: 93228 - DNA, 80 bp, synthetic construct
  source 1..80: mol_type = other DNA
aggaaggtgggctagaaatctacatccctggatggcaagccatgttccgctggatgcgattccatgatatgagtttgtgg

SEQ ID NO: 93229 - DNA, 80 bp, synthetic construct
  source 1..80: mol_type = other DNA
ttaccacccttagaggcgcgcattgacggtcctgcgagagagccccgtataggggatatgattgagttttatgagggtca

SEQ ID NO: 93230 - DNA, 80 bp, synthetic construct
  source 1..80: mol_type = other DNA
tgaaggttagggtcctactcgctggtaatgccttcacggcgggtaagataataatcagttgtgtccccccaggatttgca

SEQ ID NO: 93231 - DNA, 80 bp, synthetic construct
  source 1..80: mol_type = other DNA
aagttcctttggaggatgtgaggaatgtgcttttccataacaatgattctaccccaactatgagattggtttgcatgttg

SEQ ID NO: 93232 - DNA, 80 bp, synthetic construct
  source 1..80: mol_type = other DNA
tcctgattttaatttcttattccttgtgcctcccaatgttgaacagaaaactaaaccatttagtgtacccaatcttcctc

SEQ ID NO: 93233 - DNA, 80 bp, synthetic construct
  source 1..80: mol_type = other DNA
tcaatgttctatcaaattctagggtcccttctttgataagatccatgatggtttcccaagaccacgggcagatggtacag

SEQ ID NO: 93234 - DNA, 80 bp, synthetic construct
  source 1..80: mol_type = other DNA
ttccagaacggtagggttacattagatgggcagctccaaggcactacccccacttcagctagtcagctctgcaagatccg

SEQ ID NO: 93235 - DNA, 80 bp, synthetic construct
  source 1..80: mol_type = other DNA
agggacggttttccatgcaactggtggtcaagggctcaacttgactgaggttgatggggccccctaccatgcatttgaga

SEQ ID NO: 93236 - DNA, 80 bp, synthetic construct
  source 1..80: mol_type = other DNA
gccctgccccaattggttttcctgatataggtgaatgtgattggcacattaatgcatctcctgctaatgcttttacaaat

SEQ ID NO: 93237 - DNA, 80 bp, synthetic construct
  source 1..80: mol_type = other DNA
ggtgccatcatacaaagacttgatgtggtccaagattccacttttgctccccatttaggcactatccagttacaccacat

SEQ ID NO: 93238 - DNA, 80 bp, synthetic construct
  source 1..80: mol_type = other DNA
gctgaatttgagtgctaatgttagcctgatgtgttcacttgagtggctttctcctccaagtggcggtgcttcaaagaaag

SEQ ID NO: 93239 - DNA, 80 bp, synthetic construct
  source 1..80: mol_type = other DNA
tgaacccatggaccattcctcggtatggctcaactttaactgaggctgctcagttggcccctccaatatacccccctggc

SEQ ID NO: 93240 - DNA, 80 bp, synthetic construct
  source 1..80: mol_type = other DNA
tacaagggtaaacagcagcagaagccaactgaaattggcctatctaatccaaattatgggtcgtctgcctcatcttcaag

SEQ ID NO: 93241 - DNA, 80 bp, synthetic construct
  source 1..80: mol_type = other DNA
ggcgtgtgtgctatacacccactgaccagcagaggctcacctatgatcaattgaaagaattggagaatgagccgtggccc

SEQ ID NO: 93242 - DNA, 80 bp, synthetic construct
  source 1..80: mol_type = other DNA
aacatgaggaaataattttgtaatatgaaatgtgggcatcatattcaattggatttgattaatattaatttggtttaatt

SEQ ID NO: 93243 - DNA, 80 bp, synthetic construct
  source 1..80: mol_type = other DNA
tatgcctcaattaccaacaattgctatgagttttgctgtaaagtgatggcccttgatgatacttggctccaacggaaatt

SEQ ID NO: 93244 - DNA, 80 bp, synthetic construct
  source 1..80: mol_type = other DNA
agttaccactggaaaattcaaccaccccacacaggattggtcaaaagacacccccgatttccatcaggattcaaaacttg

SEQ ID NO: 93245 - DNA, 80 bp, synthetic construct
  source 1..80: mol_type = other DNA
cggggcgcggcctaaacagccgcccccgaaggaaataccacccagacccccacgaccgcccaccccagaattggtcaaaa

SEQ ID NO: 93246 - DNA, 80 bp, synthetic construct
  source 1..80: mol_type = other DNA
aacggggaggatgaactagtggtctcctacagcgccagagatggcgtttccggactgcctgagctcaccactgtcagaca

SEQ ID NO: 93247 - DNA, 80 bp, synthetic construct
  source 1..80: mol_type = other DNA
gggtgtcccccagcctgtttataacttcaacccatgtcatacctcaaggtgcaaaagagttcttcggagtctctatcaag

SEQ ID NO: 93248 - DNA, 80 bp, synthetic construct
  source 1..80: mol_type = other DNA
gaggcaaaccaccaagaccaaatgttctagaagctgccaagaaaaccatcatcaatgttcttgagcaaacaattgaccca

SEQ ID NO: 93249 - DNA, 80 bp, synthetic construct
  source 1..80: mol_type = other DNA
aggtagttgcagaagatctcctttcccctagcgttatggatgtaggtgactttcaaatatcaataagtgaggggctcccc

SEQ ID NO: 93250 - DNA, 80 bp, synthetic construct
  source 1..80: mol_type = other DNA
tccggggtaccttgtacctcccagtggaattccatcgcccactggctcctcactctttgtgcactctctgaagtcacgga

SEQ ID NO: 93251 - DNA, 80 bp, synthetic construct
  source 1..80: mol_type = other DNA
attacatggagagtcattcccctacactgcttttgacaacaattgctacgccttttgttgttgggtattagacctaaacg

SEQ ID NO: 93252 - DNA, 80 bp, synthetic construct
  source 1..80: mol_type = other DNA
tccccctcaagggtggttatggaaatccagctattgattgtctgctaccacaagagtgggtgcaacatttctatcaggaa

SEQ ID NO: 93253 - DNA, 80 bp, synthetic construct
  source 1..80: mol_type = other DNA
ttagagccattgaagacgctgtattggacctggaggccattgagaacaaccatatgaccactctattgaaagacaagaac

SEQ ID NO: 93254 - DNA, 80 bp, synthetic construct
  source 1..80: mol_type = other DNA
ttggggcccggcccaaacagccggccccgagggaaaaacccccaagaccccctagaccaccaacaccagaattaattaaa

SEQ ID NO: 93255 - DNA, 80 bp, synthetic construct
  source 1..80: mol_type = other DNA
agccttgcagcctacatgaagaccctggacatggaagaggaaaaagctaggaagttatccaccaaatcagcctcccctga

SEQ ID NO: 93256 - DNA, 80 bp, synthetic construct
  source 1..80: mol_type = other DNA
accataaacgccctgttggctaggatcgctgccgcgcgttccttagttcatagggccaaggaggagctctccagcaggcc

SEQ ID NO: 93257 - DNA, 80 bp, synthetic construct
  source 1..80: mol_type = other DNA
aaggccggtcgtcttgatgatctctggcaagccagggataggaaagacccacttggccagagaactggcaaagaaaatcg

SEQ ID NO: 93258 - DNA, 80 bp, synthetic construct
  source 1..80: mol_type = other DNA
cctcaacactcacaggagaccagagagtgggcctcatcccacggaatggagttgaccattgggatgcctacaaaggtgag

SEQ ID NO: 93259 - DNA, 80 bp, synthetic construct
  source 1..80: mol_type = other DNA
acgatgcgttgaggttgcaagaactggcagacacatgtccattgactctaaattgtgacaggattgagaacaaggggaaa

SEQ ID NO: 93260 - DNA, 80 bp, synthetic construct
  source 1..80: mol_type = other DNA
gtcttcgacagcgatgcgatcataattaccaccaatttggtcaatcccgcgccgctggattatgtcaactttgaggcctg

SEQ ID NO: 93261 - DNA, 80 bp, synthetic construct
  source 1..80: mol_type = other DNA
agaatcccccccccaccacctaatgatggggatgaaccaaccgtgatgtttagcactgcaggtggtgtgtctggcctacc

SEQ ID NO: 93262 - DNA, 80 bp, synthetic construct
  source 1..80: mol_type = other DNA
gaggctagatgagtacgaattgcaaggtccacccctctcaaccttcaactttgaccgcaacaaaatcgcagcgttcagac

SEQ ID NO: 93263 - DNA, 80 bp, synthetic construct
  source 1..80: mol_type = other DNA
tgggtaaccagctcagaaatgtcacgaccatggatgaactcaagaaggctatcaagaacatcacaatcagaaagtgccag

SEQ ID NO: 93264 - DNA, 80 bp, synthetic construct
  source 1..80: mol_type = other DNA
atagtctatggtggcaacacttacacgcttgagtctgacggcaagggtagagttgtggttgagagggtgcagaacgccag

SEQ ID NO: 93265 - DNA, 80 bp, synthetic construct
  source 1..80: mol_type = other DNA
cgtgcaaatcaacaatgagatcgctggtgcagtacaccaccttagatgtgccagaatacggtattatgttaagtgtgtcc

SEQ ID NO: 93266 - DNA, 80 bp, synthetic construct
  source 1..80: mol_type = other DNA
ggcacggtgtttgtcacttcacgcatcgtaagccgcatgaacatccaaaatttatggtccaggccattaactgaagatgc

SEQ ID NO: 93267 - DNA, 80 bp, synthetic construct
  source 1..80: mol_type = other DNA
agatgaggccaccacgaaagaggggtgccctaaacctagggatgaagaagaatttgtcgtctcctcagaagatatcaagc

SEQ ID NO: 93268 - DNA, 80 bp, synthetic construct
  source 1..80: mol_type = other DNA
tgagctcacaacagtcggtcaaccacctgaagctaacacggcctttagcgtgcctcccctcagccaaagggaaaacaggg

SEQ ID NO: 93269 - DNA, 80 bp, synthetic construct
  source 1..80: mol_type = other DNA
tcttcaggccaactagaaagcaacgcaaggaagaaagagccaaccttggcctcgtcaccggatctgagatcaggaagagg

SEQ ID NO: 93270 - DNA, 80 bp, synthetic construct
  source 1..80: mol_type = other DNA
gatgggggttttgggtgtcacctagcctcttcataacatcaacacatgtcataccccaaggcataactgaagcctttggt

SEQ ID NO: 93271 - DNA, 80 bp, synthetic construct
  source 1..80: mol_type = other DNA
cacggtgggcggccaaatgggaatgctgctcactgggtccaatgcaaagagcatggatcttggcaccacgcctggtgact

SEQ ID NO: 93272 - DNA, 80 bp, synthetic construct
  source 1..80: mol_type = other DNA
cctctacaacaccactccctcccggcacatacgagccggcatatctgggaggaaaagacccccgagtcaaaggtggacca

SEQ ID NO: 93273 - DNA, 80 bp, synthetic construct
  source 1..80: mol_type = other DNA
caaaaagacaattatcaatgtgctagagcaaacaatagaccccccacagaagtggacgtacgcgcaagcgtgcgcgtctc

SEQ ID NO: 93274 - DNA, 80 bp, synthetic construct
  source 1..80: mol_type = other DNA
ttgacaaaaccacatctagtgggtttccccaccacgtgcgcaaaaacgagcactggaatggggaatctttcacaggaaaa

SEQ ID NO: 93275 - DNA, 80 bp, synthetic construct
  source 1..80: mol_type = other DNA
gacggggagatttatcactatggactgtatgtggaaaaagggcttgtgttaggcgtgcacaagccaccggctgccatcag

SEQ ID NO: 93276 - DNA, 80 bp, synthetic construct
  source 1..80: mol_type = other DNA
ggctctgatctggccacaatggtgcggtgcgcgcgctcttttggtggtttgatggacgaacttaaggcccactgtgtaac

SEQ ID NO: 93277 - DNA, 80 bp, synthetic construct
  source 1..80: mol_type = other DNA
ttctggctgcggccatggagattatggttaaattttcagcagaaccacaactagcccaaatagttgcagaggatctactg

SEQ ID NO: 93278 - DNA, 80 bp, synthetic construct
  source 1..80: mol_type = other DNA
tgaccttcttgaggagaaccgtcacccgcgaccctgcaggatggtttggcaaactggaccagagctctatactcaggcaa

SEQ ID NO: 93279 - DNA, 80 bp, synthetic construct
  source 1..80: mol_type = other DNA
catagccaaagtggaattaacgcctctctcactgtattggaggcctgtgtacacgcctcagtacctcatatctccagaca

SEQ ID NO: 93280 - DNA, 80 bp, synthetic construct
  source 1..80: mol_type = other DNA
gtcactcttgggcgaagcagcactgcatgaaccatcgttttacagcaagatcagcaagcttgtgatatctgagttgaaag

SEQ ID NO: 93281 - DNA, 80 bp, synthetic construct
  source 1..80: mol_type = other DNA
aaggtggaatggatttttacgtgcccaggcaagaacccatgttcaggtggatgagattctcggatttgagcacgtgggag

SEQ ID NO: 93282 - DNA, 80 bp, synthetic construct
  source 1..80: mol_type = other DNA
ccttgaggaaactccacggtgaactatttccctatacagcctttgaaaacaactgttatgccttctgctgttgggttttg

SEQ ID NO: 93283 - DNA, 80 bp, synthetic construct
  source 1..80: mol_type = other DNA
ggagcttcaggggacaacacaactccaagtcagtggcatttgtgctttcaagggggaagtgaccgcccatttacatgaca

SEQ ID NO: 93284 - DNA, 80 bp, synthetic construct
  source 1..80: mol_type = other DNA
gaccttaacgattcatggctaagcaggaggatgattagtaggactactggctttttcaggccctaccaagagtggaacag

SEQ ID NO: 93285 - DNA, 80 bp, synthetic construct
  source 1..80: mol_type = other DNA
cacacctccgtaagaggggggagtcacaagcttagtgaaaaggtggaaaatttgtttagaataaattgattttacctttt

SEQ ID NO: 93286 - DNA, 80 bp, synthetic construct
  source 1..80: mol_type = other DNA
acattctggcctcgtgcgactggaccttcgctggcatagttgagtcactaatcctcttggctgaactctttgatgtgttc

SEQ ID NO: 93287 - DNA, 80 bp, synthetic construct
  source 1..80: mol_type = other DNA
ggtctaaactatcaaaatggaaagaatagtgattgcccttgcaataaccagcattgtcaaagctgatcaaatctgcattg

SEQ ID NO: 93288 - DNA, 80 bp, synthetic construct
  source 1..80: mol_type = other DNA
ttttggatgtgctcaaatggatcattgcagtgcagaatttgcatctagaagtgtgagttcagattataattaaaaacccc

SEQ ID NO: 93289 - DNA, 80 bp, synthetic construct
  source 1..80: mol_type = other DNA
gccctgtggctggatggcttcttggaaagtcaactcctgctgaaatactgaatgcaaaggaatggtcatgcaatgggtgt

SEQ ID NO: 93290 - DNA, 80 bp, synthetic construct
  source 1..80: mol_type = other DNA
tttgatgttctagtcaatcgcttgtgctatccagatgactgcatggaaagtgtgagaatggaacatataacgaaatactc

SEQ ID NO: 93291 - DNA, 80 bp, synthetic construct
  source 1..80: mol_type = other DNA
aaacaatcaagagaacattgaaataaatccgcggagctcaaggtgcaatcatggttacttatcagtactgagctcagcgt

SEQ ID NO: 93292 - DNA, 80 bp, synthetic construct
  source 1..80: mol_type = other DNA
agctcctgaatatgcatacaagattgtcaaaaggggagattcagcaatcatgaaaagtgaactggaatatggtgattgtg

SEQ ID NO: 93293 - DNA, 80 bp, synthetic construct
  source 1..80: mol_type = other DNA
atgaacattcaattcggagcagtcgggaaagaattcaatgacttagaaagaagaatagaaaatttaaataagaaaatgga

SEQ ID NO: 93294 - DNA, 80 bp, synthetic construct
  source 1..80: mol_type = other DNA
ggatggattcttagatgtatggacttacaatgcagaactcctggtactaatggaaaacgaaagaactctggatttccatg

SEQ ID NO: 93295 - DNA, 80 bp, synthetic construct
  source 1..80: mol_type = other DNA
aagacttagggaactatgcccttgacatactcaaattggtcatgaaatggttctttccaaagaaagaggagaaagccgag

SEQ ID NO: 93296 - DNA, 80 bp, synthetic construct
  source 1..80: mol_type = other DNA
gccttcatgaaaaccttggatctggaagaagagaaagcaaggaagctacccaccaaatcatcctcaccggacatcgtcgg

SEQ ID NO: 93297 - DNA, 80 bp, synthetic construct
  source 1..80: mol_type = other DNA
tggtgaagacactgtgcagtttgatgcaaaatcggaaactgtaattgggctaccagacttgacaacagtgcaaaatgaac

SEQ ID NO: 93298 - DNA, 80 bp, synthetic construct
  source 1..80: mol_type = other DNA
aggggggtacttggcttagtaactggctcagacatcaggaagaggagaccagatgattttcagccgaaaggcaacctatg

SEQ ID NO: 93299 - DNA, 80 bp, synthetic construct
  source 1..80: mol_type = other DNA
tggttggggcttctgggtctcatcaaaccttctgatcacaacaacacatgtcctgcccaagggggtcaaggaactctttg

SEQ ID NO: 93300 - DNA, 80 bp, synthetic construct
  source 1..80: mol_type = other DNA
tggttggggcttctgggtctcatcaaaccttctgatcacaacaacacatgtcctgcccaaggtggtcaaggaactctttg

SEQ ID NO: 93301 - DNA, 80 bp, synthetic construct
  source 1..80: mol_type = other DNA
ctgctaaaccatggacttattcacaagcatgtgcttcactagacaagaccacttctagtggaagccctcaccatgtcagg

SEQ ID NO: 93302 - DNA, 80 bp, synthetic construct
  source 1..80: mol_type = other DNA
tctgtgggggtcagaccttggtacgatgatcaggtgtgccagagcttttggcggccttatggacagtatgaaggcaagtt

SEQ ID NO: 93303 - DNA, 80 bp, synthetic construct
  source 1..80: mol_type = other DNA
ctctgggggttcacaaacctccggcagctataagcctcgcgacgatagagctcacccccatatccctatattggaggcct

SEQ ID NO: 93304 - DNA, 80 bp, synthetic construct
  source 1..80: mol_type = other DNA
cgggacccagctggatggtttggaaaattggatcaagactcaatcctcaggcaattgtactggacaaggggacccaatca

SEQ ID NO: 93305 - DNA, 80 bp, synthetic construct
  source 1..80: mol_type = other DNA
ttagaggtaccctgatcagccagactgcgagagcggccgattcaacagactcccctcagagagcccgtgatcacccgttg

SEQ ID NO: 93306 - DNA, 80 bp, synthetic construct
  source 1..80: mol_type = other DNA
tagcagccccgttcatagatctcctgctcccctccagcacactgccccaccaaaaagtaagttgcaaagtgattctgtta

SEQ ID NO: 93307 - DNA, 80 bp, synthetic construct
  source 1..80: mol_type = other DNA
accacccccacgtccacagcaacctccaccctgtctaggaccagcgactgggtcagaggacagaatgaaaggcttagccc

SEQ ID NO: 93308 - DNA, 80 bp, synthetic construct
  source 1..80: mol_type = other DNA
tgctaggcaaactcaagccattgaacttattacatctgctcgcgtcgtgtgattggacgtttgcaggtatagtggagaca

SEQ ID NO: 93309 - DNA, 80 bp, synthetic construct
  source 1..80: mol_type = other DNA
gtcatcttaatggcagaactcttcaatgtcttttggaccccgccagacgtctctaacttcatagcctccctgataggtga

SEQ ID NO: 93310 - DNA, 80 bp, synthetic construct
  source 1..80: mol_type = other DNA
ggatgggacgaacaatcatggttggttctcgcgctagtaaacatatttttacggccatggttggacggaccctggctcat

SEQ ID NO: 93311 - DNA, 80 bp, synthetic construct
  source 1..80: mol_type = other DNA
tctcactcacaaataagtaagccattcttaattgacactaacgactgggctggtcattcctttttcttctctgttgcagg

SEQ ID NO: 93312 - DNA, 80 bp, synthetic construct
  source 1..80: mol_type = other DNA
caaagaatgcatcggcgggtgtttttatgtggaattgaaaggagagaaaccgaacgaacacagagtgggacgtacatcaa

SEQ ID NO: 93313 - DNA, 80 bp, synthetic construct
  source 1..80: mol_type = other DNA
cttccttctttgcattctgtgcaccctcacgtacgtatggagctcgctcctggcctgatcgaacaactatctccttcctg

SEQ ID NO: 93314 - DNA, 80 bp, synthetic construct
  source 1..80: mol_type = other DNA
ttgcattctgtgcaccctcacgtacgtatggagctcgctcctggcctgatcgaacaactatctccttcctgcctatataa

SEQ ID NO: 93315 - DNA, 80 bp, synthetic construct
  source 1..80: mol_type = other DNA
cgatcataatagaaaggaacacaatgcatttgaatagcaccaccatagagagggaaatttgccccaaagtagcggagtac

SEQ ID NO: 93316 - DNA, 80 bp, synthetic construct
  source 1..80: mol_type = other DNA
attattcataagagaagggaaaattatgaatattagcccattgtcaggactcgctctgtacgttaatgatcgctcctgcc

SEQ ID NO: 93317 - DNA, 80 bp, synthetic construct
  source 1..80: mol_type = other DNA
cttaacaacgaccatgacactacatttcgggcagactgaatgcagtaacccattgaataatcaagtgatgccatgtgaac

SEQ ID NO: 93318 - DNA, 80 bp, synthetic construct
  source 1..80: mol_type = other DNA
cccccctccttcctgaaattgtgtgtgtttgcacaaatgattggactggctccagcccgcccattatatatatatgtatg

SEQ ID NO: 93319 - DNA, 80 bp, synthetic construct
  source 1..80: mol_type = other DNA
gctgattatttcattcaatccatttatgtgtgctccggacttgttgcccacccacaaagaaatgatgatccctccaccac

SEQ ID NO: 93320 - DNA, 80 bp, synthetic construct
  source 1..80: mol_type = other DNA
caccgcctgcacacaccctactaacgaaggacggctcccaggagtgggtggatggttttttaacgacgggaatgatgttt

SEQ ID NO: 93321 - DNA, 80 bp, synthetic construct
  source 1..80: mol_type = other DNA
aaagggagaccaccggaaccaacagtgtggtggacttcctatagcatccttgtattctgtggaacctctggtacatatgg

SEQ ID NO: 93322 - DNA, 80 bp, synthetic construct
  source 1..80: mol_type = other DNA
aatgctcttgttacccccggtatcctgaagttaggtgtgtctgcctacacaattggaagggctcccataggcccgttcta

SEQ ID NO: 93323 - DNA, 80 bp, synthetic construct
  source 1..80: mol_type = other DNA
gttggcgacccacccacaaatgatgatagctccctccgccgccactgcctacaccctactaacgaaagaggggccccccg

SEQ ID NO: 93324 - DNA, 80 bp, synthetic construct
  source 1..80: mol_type = other DNA
cagggctaagaaacgtacctcagagagaagcgaggggtctatttggagcaatagcaggattcatagaaggagggtggcaa

SEQ ID NO: 93325 - DNA, 80 bp, synthetic construct
  source 1..80: mol_type = other DNA
caaaatgaccactcaaattctgctactcgctcttacagcgattatccctataaatgcagacaaaatttgtcttggacatc

SEQ ID NO: 93326 - DNA, 80 bp, synthetic construct
  source 1..80: mol_type = other DNA
attgctggggacgataattggaccacctcaatgtgaccaattcctagaattttcagctgatttggtcattgagagacggg

SEQ ID NO: 93327 - DNA, 80 bp, synthetic construct
  source 1..80: mol_type = other DNA
attcagacaatgctgctttcccgtcaacgacaaaatcatacagaaatacaagaaaagatccagctctgatagtttgggga

SEQ ID NO: 93328 - DNA, 80 bp, synthetic construct
  source 1..80: mol_type = other DNA
atccatcattccgggtccactgcagaacagaccaaactatatgggagtggaaacaaattaataacagtcgggagttctaa

SEQ ID NO: 93329 - DNA, 80 bp, synthetic construct
  source 1..80: mol_type = other DNA
accagcagtcttttgtaccgagcccaggagcacgaccacaagtaaacggccaatccggaaggattgatttccattggttg

SEQ ID NO: 93330 - DNA, 80 bp, synthetic construct
  source 1..80: mol_type = other DNA
atactggatcccaacgacacggttactttcagtttcaatggtgcttttatagcaccagatcgcgcaagctttatgagggg

SEQ ID NO: 93331 - DNA, 80 bp, synthetic construct
  source 1..80: mol_type = other DNA
atgccattccaaacggaaccaaagtaaacacactaactgagaaagaagtagaagtagtcaatgcaactgaaacagtggag

SEQ ID NO: 93332 - DNA, 80 bp, synthetic construct
  source 1..80: mol_type = other DNA
gaaattgctaccatagtggaggcacaataataagcaatttgccctttcaaaatatcaatagcagggcggttggggaatgt

SEQ ID NO: 93333 - DNA, 80 bp, synthetic construct
  source 1..80: mol_type = other DNA
cccagatatgtgagacaagagagcctactactggcaacaggaatgaaaaatgtccctgaaggcccaaaagaaagaggtct

SEQ ID NO: 93334 - DNA, 80 bp, synthetic construct
  source 1..80: mol_type = other DNA
agccatcaggtggcacaggacaagcagcagatctcaaaagcactcaagcagcaatcgatcaaattaatgggaagctgaat

SEQ ID NO: 93335 - DNA, 80 bp, synthetic construct
  source 1..80: mol_type = other DNA
tcgttttttttttttattccaaagcaggtagatattgaaagatgagtcttctaaccgaggtcgaaacgtacgttctctct

SEQ ID NO: 93336 - DNA, 80 bp, synthetic construct
  source 1..80: mol_type = other DNA
gctgtggatgttgacgatggtcattttgtcaacatagagctggagtagaaaactaccttgtttctagtgtgtaaaagtgc

SEQ ID NO: 93337 - DNA, 80 bp, synthetic construct
  source 1..80: mol_type = other DNA
cctataggccgcctagcatttcatcacgtggcccgagagatgcatccggagtactacaagaactgatgacattgtcttga

SEQ ID NO: 93338 - DNA, 80 bp, synthetic construct
  source 1..80: mol_type = other DNA
gtccactctgctactgctactgctacagcattaagctattcaatagcgctaatttttaattcctgactccaatataacag

SEQ ID NO: 93339 - DNA, 80 bp, synthetic construct
  source 1..80: mol_type = other DNA
ttagtacaattgcaggactgataatagcgctaatcttagcaatagtagtgtggactatagtaggtatagaaattaggaag

SEQ ID NO: 93340 - DNA, 80 bp, synthetic construct
  source 1..80: mol_type = other DNA
gtgtaacaggcagttgttttctcttttgttgtcctcttctatttctcttggatcaactggtactagtttgagccaccaac

SEQ ID NO: 93341 - DNA, 80 bp, synthetic construct
  source 1..80: mol_type = other DNA
cagtatggacaagaggacgaacacagagaagtgctgatgtggaagtttgacagtgccctagcacgaagacacatagcccg

SEQ ID NO: 93342 - DNA, 80 bp, synthetic construct
  source 1..80: mol_type = other DNA
agagatgaagccagacttctttaaagacttctttattagatgctgctaccctacgacttccgctggggactttccagggg

SEQ ID NO: 93343 - DNA, 80 bp, synthetic construct
  source 1..80: mol_type = other DNA
ctgacccagccatacgtagatcctggggtctttctaggactgtgcctccctgcttgacctatgctccaggaccctgccct

SEQ ID NO: 93344 - DNA, 80 bp, synthetic construct
  source 1..80: mol_type = other DNA
tccaggaccctgccctcaacccttgtcagctccctaagtcttcctgtttcccagtctcagattgagtgggtgctctcatt

SEQ ID NO: 93345 - DNA, 80 bp, synthetic construct
  source 1..80: mol_type = other DNA
tggggaatcttctgggatactggggtcaggaactaaagagtagtgctatcaatctattagataccatagcaatggcgccc

SEQ ID NO: 93346 - DNA, 80 bp, synthetic construct
  source 1..80: mol_type = other DNA
gcacatctggggtggagtctgctgtcctgagaggatttctcattttaagcatcaatgaactgagcaatcttgcaaaagga

SEQ ID NO: 93347 - DNA, 80 bp, synthetic construct
  source 1..80: mol_type = other DNA
gaggtcgaaacgtacgttctgtctataatcccgtcaggccccctcaaagccgagatcgcgcagagacttgaggatatatt

SEQ ID NO: 93348 - DNA, 80 bp, synthetic construct
  source 1..80: mol_type = other DNA
gatgacgaatttcgctacaaggaagattgttatctatggcacataagaaagctactcagtatgagagacatgtgtgatgc

SEQ ID NO: 93349 - DNA, 80 bp, synthetic construct
  source 1..80: mol_type = other DNA
gacgtcgtggatggagtcaatcataagattaatattacagtgaatacatgtactatacggaattgcaaaaaattaggacc

SEQ ID NO: 93350 - DNA, 80 bp, synthetic construct
  source 1..80: mol_type = other DNA
agccttaataaactgatgggcctccatggcatcgaccacatgcgtggtactgcctggaggcccatcagtttattaaggct

SEQ ID NO: 93351 - DNA, 80 bp, synthetic construct
  source 1..80: mol_type = other DNA
acgggaggccacctccaggtaccccctcttctgctagtggcgtctgggcgctcccgccaccctctgaggggtcggcggtt

SEQ ID NO: 93352 - DNA, 80 bp, synthetic construct
  source 1..80: mol_type = other DNA
ttctgctagtggcgtctgggcgctcccgccaccctctgaggggtcggcggttgccccgccgcttacagcctcggctagta

SEQ ID NO: 93353 - DNA, 80 bp, synthetic construct
  source 1..80: mol_type = other DNA
gccccgccgcttacagcctcggctagtaagcctacttgcccccctcgccccgtcacgcctaagccccccgttcgtaagtc

SEQ ID NO: 93354 - DNA, 80 bp, synthetic construct
  source 1..80: mol_type = other DNA
ctggctctgggaagcgctggtctatacagggaagcgctgggaacgtagtggttgtccccacccgggagctccggaatagc

SEQ ID NO: 93355 - DNA, 80 bp, synthetic construct
  source 1..80: mol_type = other DNA
tctgggtgttgccgtcaccctctgaagaactccaggtcgacacgatgcccgcccctcttgctcctgagctagatccgctg

SEQ ID NO: 93356 - DNA, 80 bp, synthetic construct
  source 1..80: mol_type = other DNA
ccgagccccgctacatccaacgcgcccgctcgtaagccatccccaccgccaccggctcgtacccgccggctcctctatac

SEQ ID NO: 93357 - DNA, 80 bp, synthetic construct
  source 1..80: mol_type = other DNA
agcccgtctagccttactacatacaggcctcctgcccgtaagccacccacaccaccaccggctcgcactcgccggctcct

SEQ ID NO: 93358 - DNA, 80 bp, synthetic construct
  source 1..80: mol_type = other DNA
cgagatgttgattatagaggaactatcttacgccgtcaggaaaatttcttcgcctctcccctatattcatctgttgcttc

SEQ ID NO: 93359 - DNA, 80 bp, synthetic construct
  source 1..80: mol_type = other DNA
tctgggtgttgccgtcaccctctgaagaactccaggtcgacacgatgcccccccctcttgctcctgagcccgtccaaccg

SEQ ID NO: 93360 - DNA, 80 bp, synthetic construct
  source 1..80: mol_type = other DNA
cccagcctggccaaacctgagacccctgtgcgtaagccgtcaacaccaccgcttcgccgtacccgtcgcctcctttacac

SEQ ID NO: 93361 - DNA, 80 bp, synthetic construct
  source 1..80: mol_type = other DNA
caaatcattaaatagaaggaggggatttattatttacatatttcttttatttatagtaaaagaagggggagtggttactg

SEQ ID NO: 93362 - DNA, 80 bp, synthetic construct
  source 1..80: mol_type = other DNA
tactgagtgtgtttataatggattagcaccgattcgacatactagaactggagttccattatctctatcatctagatcta

SEQ ID NO: 93363 - DNA, 80 bp, synthetic construct
  source 1..80: mol_type = other DNA
atagagataatatgataagatttagatttggaaatagcgtcaaaaagatagaaggagtggtttataaatggtccgaaata

SEQ ID NO: 93364 - DNA, 80 bp, synthetic construct
  source 1..80: mol_type = other DNA
acacaaaatgtgacggtccttccaggcccatttgcacagactagatacgctccagttaattggtttcacggagagattaa

SEQ ID NO: 93365 - DNA, 80 bp, synthetic construct
  source 1..80: mol_type = other DNA
atatagagaatagttcagataaatggaaatttttcgaaatgtttaaaggtagtagtcagagtgatttttctaatagacgg

SEQ ID NO: 93366 - DNA, 80 bp, synthetic construct
  source 1..80: mol_type = other DNA
ttatcgagatatcattataagatttatatttggtaatagtgtcaaaaaattaggagggatgggttataaatgtcccgaaa

SEQ ID NO: 93367 - DNA, 80 bp, synthetic construct
  source 1..80: mol_type = other DNA
gtgacccgaataatggactactttatatatagatttttgttaatttttatggcattatttgtcttaactaaagcacagaa

SEQ ID NO: 93368 - DNA, 80 bp, synthetic construct
  source 1..80: mol_type = other DNA
attcatcgggagaatcaaataagtggatatcaatgggatcatcatgtactgtgaaagtgtgtccactgaatacaccaacg

SEQ ID NO: 93369 - DNA, 80 bp, synthetic construct
  source 1..80: mol_type = other DNA
acccgaataatggactacattatatatagagttttgttaatttttgtagcattatttgccttaactaaagctcagaacta

SEQ ID NO: 93370 - DNA, 80 bp, synthetic construct
  source 1..80: mol_type = other DNA
ctacggcatgtaccattcgaaattgtaagaagttaggtccaagagagaatgtggctttttttctaagtggtggttctaat

SEQ ID NO: 93371 - DNA, 80 bp, synthetic construct
  source 1..80: mol_type = other DNA
atggcatactccaactctactcacgacggagtagtgctaacatccacattatgtccggtggttcgaatggaagcaagtac

SEQ ID NO: 93372 - DNA, 80 bp, synthetic construct
  source 1..80: mol_type = other DNA
ccaattacaaattgtttttgacatcgaccctgagtttatgctatcctgataatgctacaacagatctaaatgatgctcaa

SEQ ID NO: 93373 - DNA, 80 bp, synthetic construct
  source 1..80: mol_type = other DNA
tggacgaaaccaataacgcaaatgatttggacaaaaggatggccagctggttcaatatattttaaggaatacgatgatat

SEQ ID NO: 93374 - DNA, 80 bp, synthetic construct
  source 1..80: mol_type = other DNA
accaacaaacggatgaagcaaacaaatggatagcgatgggacaatcatgtacaataaaagtgtgtccattgaacacccaa

SEQ ID NO: 93375 - DNA, 80 bp, synthetic construct
  source 1..80: mol_type = other DNA
ccaacggtgtaccaccaattcagaatactagaaatgtagtaccattatcattatcatccagatctatacagtatagaaga

SEQ ID NO: 93376 - DNA, 80 bp, synthetic construct
  source 1..80: mol_type = other DNA
attaactcaaacacaaatggagtagtatatgagagtacaaataatagtgacttttggactgcagttattgctgttgaacc

SEQ ID NO: 93377 - DNA, 80 bp, synthetic construct
  source 1..80: mol_type = other DNA
aaatacttgtgctcaaagatcctaactgacacaagtcggcctaatgatcccggaagcgggaactgtgatgcaccgataac

SEQ ID NO: 93378 - DNA, 80 bp, synthetic construct
  source 1..80: mol_type = other DNA
aggaggaagcccagatcctggcgtaaaaggatttgcattcttagatggagggaattcctggttgggaaggaccataagca

SEQ ID NO: 93379 - DNA, 80 bp, synthetic construct
  source 1..80: mol_type = other DNA
aagattcaagatcagggtatgagatgctaaaagttccgaatgcagaaacagacaatcaatccggtccagttgcacatcag

SEQ ID NO: 93380 - DNA, 80 bp, synthetic construct
  source 1..80: mol_type = other DNA
gtaatagtgaacaatcaaaattggtcaggatactcaggagcattcatagattattgggccgacagagactgcttcaatcc

SEQ ID NO: 93381 - DNA, 80 bp, synthetic construct
  source 1..80: mol_type = other DNA
ttgcttctatgtggaattgatcagaggcaggccaaaagagagtagtgtactgtggacgtccaatagtatagtagcactct

SEQ ID NO: 93382 - DNA, 80 bp, synthetic construct
  source 1..80: mol_type = other DNA
gtggatccaaggagcgattgggatcttggtcatggcatgatggggctgaaatcatctactttaagtagaaaagattttgg

SEQ ID NO: 93383 - DNA, 80 bp, synthetic construct
  source 1..80: mol_type = other DNA
ttgggatcttggtcatggcatgatggggctgaaatcatctactttaagtagaaaagattttggaaaaacacccttgtttc

SEQ ID NO: 93384 - DNA, 80 bp, synthetic construct
  source 1..80: mol_type = other DNA
ctatccgtagtaagtctgctaataggattggccaacctgggactgaacattgggcttcatttcaaggtaggagacgcacc

SEQ ID NO: 93385 - DNA, 80 bp, synthetic construct
  source 1..80: mol_type = other DNA
agaaacaggaccccctagtaccaatgagacaaactccacaaccacaataatcaactacaacacccaaaacaacttcacga

SEQ ID NO: 93386 - DNA, 80 bp, synthetic construct
  source 1..80: mol_type = other DNA
atgtgaccaacattgtgttaattaaagaagaaaacaaaatattcacaaacctttctaagcccttgtgtgaagtaaactca

SEQ ID NO: 93387 - DNA, 80 bp, synthetic construct
  source 1..80: mol_type = other DNA
tggcacattctatctaaggacaatgcgatcagaataggggaggatgcccacattcttgtcacaagagaaccatatctctc

SEQ ID NO: 93388 - DNA, 80 bp, synthetic construct
  source 1..80: mol_type = other DNA
atgtggaccacatgagtgcagaatgtttgccctcagccaaggtaccacactaaggggtcggcatgcaaatgggactatac

SEQ ID NO: 93389 - DNA, 80 bp, synthetic construct
  source 1..80: mol_type = other DNA
atgacagaagcccatttagggcattaataagttgggaaatggggcaagcaccgagtccatacaatgtcagagtagaatgt

SEQ ID NO: 93390 - DNA, 80 bp, synthetic construct
  source 1..80: mol_type = other DNA
gttggatggtccagcacttcatgccatgacggcatctcaagaatgtcaatctgtatgtcaggccctaacaacaatgcttc

SEQ ID NO: 93391 - DNA, 80 bp, synthetic construct
  source 1..80: mol_type = other DNA
atggaagacctgtcaccgaaattgcttcatgggcagggaatatattaaggactcaggaatcggaatgtgtatgccataat

SEQ ID NO: 93392 - DNA, 80 bp, synthetic construct
  source 1..80: mol_type = other DNA
attcatcttcaccctgcaaaagcagggtgaagatgaatccaaatcagaagataatatgcatctcagcaacaggaatgaca

SEQ ID NO: 93393 - DNA, 80 bp, synthetic construct
  source 1..80: mol_type = other DNA
ggaatatgccctgtggtgatgacggatggtccagccaataacagagcagagacaaaaataatttatttcaaggagggaaa

SEQ ID NO: 93394 - DNA, 80 bp, synthetic construct
  source 1..80: mol_type = other DNA
aatacagaagatagaggaactgacaggaagtgcacagcatatagaagaatgctcgtgctatggagcagaagaggtgatta

SEQ ID NO: 93395 - DNA, 80 bp, synthetic construct
  source 1..80: mol_type = other DNA
aatgcatttgtagggacaattggaaaggcgcaaacagaccagtaatcaccataaacccaacaacaatgacccatacgagc

SEQ ID NO: 93396 - DNA, 80 bp, synthetic construct
  source 1..80: mol_type = other DNA
gtctcgggttgacgcagcatctgagccccccgtctctgagcctgctggactgtccagccctattgtgcttaccccctccc

SEQ ID NO: 93397 - DNA, 80 bp, synthetic construct
  source 1..80: mol_type = other DNA
ctcccccccctccccttgtgcgtaagccatcaataacccctcgctcccgcactcgccgtctcctctatacctatcccgac

SEQ ID NO: 93398 - DNA, 80 bp, synthetic construct
  source 1..80: mol_type = other DNA
ctgggttgttaatttccgatggaggccccaatctatataatattaggaatctccacattcctgaagtctgcttgaagtgg

SEQ ID NO: 93399 - DNA, 80 bp, synthetic construct
  source 1..80: mol_type = other DNA
gtggtgagcatcatagtaacgatattggtcctaggaaaagatggaaacaacaagacctgcaatgaaacaatagtgagaga

SEQ ID NO: 93400 - DNA, 80 bp, synthetic construct
  source 1..80: mol_type = other DNA
cttgtaaagattattggagcaagaccttccacataataagagaaaggtaatcagaccaatgagaccacatgtagcaatgt

SEQ ID NO: 93401 - DNA, 80 bp, synthetic construct
  source 1..80: mol_type = other DNA
tccaataatctttacaagggggtgtatgaactgcaatctttggatctgaacatggaatcactcaacatgaccatgcccct

SEQ ID NO: 93402 - DNA, 80 bp, synthetic construct
  source 1..80: mol_type = other DNA
caccctttataaaggagtctatcagcttcaaactctagagttgaacatggagacactgaacatgaccatgcccctttcct

SEQ ID NO: 93403 - DNA, 80 bp, synthetic construct
  source 1..80: mol_type = other DNA
aaactctaaaacacagggggtaaaaaatcctcaaatacctaaaaaacctagtgtgctattaaaaacagaaactaaaaaat

SEQ ID NO: 93404 - DNA, 80 bp, synthetic construct
  source 1..80: mol_type = other DNA
agtgctattagtttacttaatgcaacagcaatagcagtagctaattaaacaaataggcttataaaagtaaaacaaaaagc

SEQ ID NO: 93405 - DNA, 80 bp, synthetic construct
  source 1..80: mol_type = other DNA
tttaaaagctttacttcacgtacctaaaaaaataaaacagaagcttaaaaaaattttgctataaaataagtagcaagtag

SEQ ID NO: 93406 - DNA, 80 bp, synthetic construct
  source 1..80: mol_type = other DNA
tcaaaaagtaaaatatttaaatagtctactgtaaaaaaaaaaataaatcaagctaagccagcagcagttaaaataaaagc

SEQ ID NO: 93407 - DNA, 80 bp, synthetic construct
  source 1..80: mol_type = other DNA
agtctctcaaaacctaaaaaaacatgaagcaatcacatctaacaatacagcagctaccaataatgcttgtgcctagttaa

SEQ ID NO: 93408 - DNA, 80 bp, synthetic construct
  source 1..80: mol_type = other DNA
ctgtttgtgaatcagcgcttgcggatgcaaaagaaactttattggcgaatgttaccgcggtacgtcaagagtatgctatg

SEQ ID NO: 93409 - DNA, 80 bp, synthetic construct
  source 1..80: mol_type = other DNA
tttaaaagatgtacccaatcattatatgatggtttgcgtgatgaaaaactaaaaaattgtgttgttgatgcattgagaaa

SEQ ID NO: 93410 - DNA, 80 bp, synthetic construct
  source 1..80: mol_type = other DNA
tttctgcatcaattaaaggaaactggctacaaggcaacttaaataaatgctcttcattatttggggccgcaatatcattg

SEQ ID NO: 93411 - DNA, 80 bp, synthetic construct
  source 1..80: mol_type = other DNA
ctgggtgttgccgccaccctccgaagaacttcaggttgatgcagtgcctgcccctcctgtccccgagcctgctctatcgc

SEQ ID NO: 93412 - DNA, 80 bp, synthetic construct
  source 1..80: mol_type = other DNA
ccagccccgttgagccaggggtccccgtgcgtaagccggcggcatcaccacctccgcgtacccgccggcttctttatact

SEQ ID NO: 93413 - DNA, 80 bp, synthetic construct
  source 1..80: mol_type = other DNA
ctcagcttgatgtggcacctgtgccccctactcccgagcccgccggattgcccagtcccattatgcctaccccccccccc

SEQ ID NO: 93414 - DNA, 80 bp, synthetic construct
  source 1..80: mol_type = other DNA
ccccccccccccgtgcgtaagccaccagcacccccactatcccgcactcgccgtcttctctacacctaccccgacggcgc

SEQ ID NO: 93415 - DNA, 80 bp, synthetic construct
  source 1..80: mol_type = other DNA
ccccagcacccggtggggggcagcccccaggaacccccccttctgttagcgacgtttgggtgctcccgccgccctctgag

SEQ ID NO: 93416 - DNA, 80 bp, synthetic construct
  source 1..80: mol_type = other DNA
ttctgttagcgacgtttgggtgctcccgccgccctctgagggatcagtggctgctgcaccgcctgcagccccggttagta

SEQ ID NO: 93417 - DNA, 80 bp, synthetic construct
  source 1..80: mol_type = other DNA
ccccggttagtaagcctactggcccgcctagccctgccatatctaaaccccccgttcgcaagccatcttcaccaccaccg

SEQ ID NO: 93418 - DNA, 80 bp, synthetic construct
  source 1..80: mol_type = other DNA
tgatcgtaagccacctacaccgccaccggctcgcacccgtcggctcctctacacttaccccgatggtgctaaggtgtatg

SEQ ID NO: 93419 - DNA, 80 bp, synthetic construct
  source 1..80: mol_type = other DNA
gagttagtggctactccttacctattagccccggttagtaagcccactagcccgcctagccctgctgtacctaagccccc

SEQ ID NO: 93420 - DNA, 80 bp, synthetic construct
  source 1..80: mol_type = other DNA
ccccaactcctgatggggggttgcctttgggtaccccctcttctgttagtgatgtttgggtgctcccgccaccctcagag

SEQ ID NO: 93421 - DNA, 80 bp, synthetic construct
  source 1..80: mol_type = other DNA
ttgcctttgggtaccccctcttctgttagtgatgtttgggtgctcccgccaccctcagaggggtcagtggttgctccgcc

SEQ ID NO: 93422 - DNA, 80 bp, synthetic construct
  source 1..80: mol_type = other DNA
tcgggagttatagtttatttgcttgtgccccccttctctctattgcttatttctcttttctgcgtttcgcgctccctgaa

SEQ ID NO: 93423 - DNA, 80 bp, synthetic construct
  source 1..80: mol_type = other DNA
ttcaaaaaacgttataacactagtgataattcaagaggtatgaattatgaaacaactatgttcaataaggtggctaattt

SEQ ID NO: 93424 - DNA, 80 bp, synthetic construct
  source 1..80: mol_type = other DNA
atgcaagcaatatcactgattactatagtactggtggtgacaataagtaatgcagataaaatctgcattggccaccaatc

SEQ ID NO: 93425 - DNA, 80 bp, synthetic construct
  source 1..80: mol_type = other DNA
tgcttgcaatagggtttgctgcctttttattctgggctatgtccaatggatcatgcaggtgcaacgtttgtatataatta

SEQ ID NO: 93426 - DNA, 80 bp, synthetic construct
  source 1..80: mol_type = other DNA
acgggaacaagcaaatcgtgttcagattctttctatagaaatatgagatggttaactcaaaagaatggggcttatccagt

SEQ ID NO: 93427 - DNA, 80 bp, synthetic construct
  source 1..80: mol_type = other DNA
tacacagacggatttatacactaggaccgacacaacaacaagcataacaacggagaatttagataggactttcaaaccct

SEQ ID NO: 93428 - DNA, 80 bp, synthetic construct
  source 1..80: mol_type = other DNA
ctaatatacagacagctactctataactcatattcagtggatttatcagatgaaataactaatataggtgcagaaaagaa

SEQ ID NO: 93429 - DNA, 80 bp, synthetic construct
  source 1..80: mol_type = other DNA
aacacctggatgaatcatacatatgttaacattagcaacactaatgttattgctgagaaggacaaaacttcagtgacatt

SEQ ID NO: 93430 - DNA, 80 bp, synthetic construct
  source 1..80: mol_type = other DNA
aaacagcgaatattgagaacacaagagtctgaatgtgtctgcatgaacggatcatgtttcaccataatgaccgatggccc

SEQ ID NO: 93431 - DNA, 80 bp, synthetic construct
  source 1..80: mol_type = other DNA
tccttatgcaagcggccatcttggtaaccactgtaacattgcatttcaagcaatatgaatgcaacccaattccaaacaac

SEQ ID NO: 93432 - DNA, 80 bp, synthetic construct
  source 1..80: mol_type = other DNA
gtagactaaattggttgactaagtcaggaaatgcttacccagtgctgaatgtgactatgccgaatagcggcgattttgac

SEQ ID NO: 93433 - DNA, 80 bp, synthetic construct
  source 1..80: mol_type = other DNA
tgttggtaataaacagtaatgggaacttaatagccccccgggggtacttcaaaatgcgtccagggaaaagctctgtgatg

SEQ ID NO: 93434 - DNA, 80 bp, synthetic construct
  source 1..80: mol_type = other DNA
aaggatctgggcatactaagtctattctcaacctccggactaacactgagaccaataatccgtgtgccaaaaccatcgtt

SEQ ID NO: 93435 - DNA, 80 bp, synthetic construct
  source 1..80: mol_type = other DNA
atgaagaccatcattgttctaagttatcttttctgtctggctctcggccaagattactcagagagaaacaacagcaccgc

SEQ ID NO: 93436 - DNA, 80 bp, synthetic construct
  source 1..80: mol_type = other DNA
aagggtctgttcggtgcaatagccggatttatagaaaatggatgggaaggaatgatagacggctggtatggtttcagaca

SEQ ID NO: 93437 - DNA, 80 bp, synthetic construct
  source 1..80: mol_type = other DNA
caagctgcagacctgaaaagcacacaggcagccattgaccagattaatgggaagttgaaccgagtaatcgagaaaacaaa

SEQ ID NO: 93438 - DNA, 80 bp, synthetic construct
  source 1..80: mol_type = other DNA
tgaaaagtttcatcagattgaaaaggaattctctgaagtggaagggagaatccaggaccttgagaaatatgtagaagaca

SEQ ID NO: 93439 - DNA, 80 bp, synthetic construct
  source 1..80: mol_type = other DNA
aaaaacgaggcggcaattgagggagaatgccgaagacatgggcaatggttgcttcaaaatataccacaaatgtgacaact

SEQ ID NO: 93440 - DNA, 80 bp, synthetic construct
  source 1..80: mol_type = other DNA
catgtatagaatcaatcagaaacgggacctatgatcatgacatatacagagacgaagcattaaacaaccgattccacatc

SEQ ID NO: 93441 - DNA, 80 bp, synthetic construct
  source 1..80: mol_type = other DNA
aagggtgtggagctaaaatctggatacaaagattggatcttatggatttcctttgccatatcatgctttttgctttgtgt

SEQ ID NO: 93442 - DNA, 80 bp, synthetic construct
  source 1..80: mol_type = other DNA
ccactgaattagtccagagttcttcaacagggaagatatgcaacaatccacatagaatccttgatggaggggactgcaca

SEQ ID NO: 93443 - DNA, 80 bp, synthetic construct
  source 1..80: mol_type = other DNA
ctgatagatgccctactgggagacccccactgtgatgtattccaagatgaaacctgggacctttatgtagaacgtagcag

SEQ ID NO: 93444 - DNA, 80 bp, synthetic construct
  source 1..80: mol_type = other DNA
tgcattcagcaactgctatccctatgacgtaccagactatgcatcgctcaggtctctagttgcctcctcaggaaccctag

SEQ ID NO: 93445 - DNA, 80 bp, synthetic construct
  source 1..80: mol_type = other DNA
agttcttcgcagaaggattcacatgggcaggagtcactcaaaatggcaatgcctgcatgagagggcctgctggtggtagc

SEQ ID NO: 93446 - DNA, 80 bp, synthetic construct
  source 1..80: mol_type = other DNA
agtggtgaactccccagacgtacaatttgtctaggccaatcaaataatgacaactttgacaaattgtacgtctggggagt

SEQ ID NO: 93447 - DNA, 80 bp, synthetic construct
  source 1..80: mol_type = other DNA
tcaccacccaagcacaaaccaggagcaaaccaacctatatgttcaggcatcaggaagggtaacagtttcaaccagaagga

SEQ ID NO: 93448 - DNA, 80 bp, synthetic construct
  source 1..80: mol_type = other DNA
aatattggatccaggcctttggtcaggggccaatcagggaggataagcatctactggacaatagtgaagccggtggatgt

SEQ ID NO: 93449 - DNA, 80 bp, synthetic construct
  source 1..80: mol_type = other DNA
actggtaattaacagtaatggtaatctaatcgctcctcgagggtacttcaaaatgcgcactgggaaaagttcaataatga

SEQ ID NO: 93450 - DNA, 80 bp, synthetic construct
  source 1..80: mol_type = other DNA
tacactgtgcttagggcatcatgcagtacagaatgggacaatagtgaagacaattacggatgatcaaattgaagtgacca

SEQ ID NO: 93451 - DNA, 80 bp, synthetic construct
  source 1..80: mol_type = other DNA
acggagcatgccctaagtatgtcaaacagagcactttgaaactggcaacagggatgaggaatgtgcctgagaaacaaacc

SEQ ID NO: 93452 - DNA, 80 bp, synthetic construct
  source 1..80: mol_type = other DNA
tgagaatgagcactaagcacatgatcatcggactccattacacagtggtggctacatcagatgtgagcatcccaatcatg

SEQ ID NO: 93453 - DNA, 80 bp, synthetic construct
  source 1..80: mol_type = other DNA
ccaaatcagaaaataataaccattggatcggtatccttaggattggtggtccttaatattctcttacatatagttagcat

SEQ ID NO: 93454 - DNA, 80 bp, synthetic construct
  source 1..80: mol_type = other DNA
agttcgaaatgaatccaaatcagaaaataataaccattgggtctgtttgcatgatactagggataatcagcttaatactg

SEQ ID NO: 93455 - DNA, 80 bp, synthetic construct
  source 1..80: mol_type = other DNA
caagtagggaacataatttctatatgggttagccactcaattcaaactggagacaaaaaacgtccagaaacatgtaatca

SEQ ID NO: 93456 - DNA, 80 bp, synthetic construct
  source 1..80: mol_type = other DNA
tgtatcttgaccagttaaagcctgttggaagtgcttataaattgatcacagtccggtatagtcggaaagtgtgtgtccaa

SEQ ID NO: 93457 - DNA, 80 bp, synthetic construct
  source 1..80: mol_type = other DNA
tccagaaccattgcctggcgctatcctggagatgtgggatggcgagatctatcactacggcctgtatgtggagcgaggac

SEQ ID NO: 93458 - DNA, 80 bp, synthetic construct
  source 1..80: mol_type = other DNA
ctactggctagaattgccgctgcccgctccttggtacacaaggccaaggaagaattatccagcaggctgagaccagttgt

SEQ ID NO: 93459 - DNA, 80 bp, synthetic construct
  source 1..80: mol_type = other DNA
acatgtggaagaacgcttacagccctgatttctcacacatcaagatgttactagctccccagggtggttttgataagaac

SEQ ID NO: 93460 - DNA, 80 bp, synthetic construct
  source 1..80: mol_type = other DNA
ggaaacaccccacacgggaaaggagtcatgaagaccctcacaatgggctccctcattgcccgcgcttcagggctcctcca

SEQ ID NO: 93461 - DNA, 80 bp, synthetic construct
  source 1..80: mol_type = other DNA
gagactggacgagttcgagttgcaaggacccagccccacaactttcaactttgaccgcaacaaaatacaggcattcagac

SEQ ID NO: 93462 - DNA, 80 bp, synthetic construct
  source 1..80: mol_type = other DNA
tagtgtatggtggcaacacttatacactcgaatctgacggcaaagggaatgtgaaagtggagaaagtgcaaaacaccagt

SEQ ID NO: 93463 - DNA, 80 bp, synthetic construct
  source 1..80: mol_type = other DNA
gtccaaatcaacaacgagctggaaggtgctctacaccacctccggtgcgccaggatcaggtactatgtcaaatgtgtcca

SEQ ID NO: 93464 - DNA, 80 bp, synthetic construct
  source 1..80: mol_type = other DNA
ggaggccctcttttccatcatccaaatcgccggggccgcgtttgtgaccacgcgcattgtgaagcgcatgaacatacaaa

SEQ ID NO: 93465 - DNA, 80 bp, synthetic construct
  source 1..80: mol_type = other DNA
caaggccaccagtgggagacacggaggaggtcactaacaatagtaactctaagcccaaggatgatgaggagttcgtcatc

SEQ ID NO: 93466 - DNA, 80 bp, synthetic construct
  source 1..80: mol_type = other DNA
atacctccaggacagagacaagtactatgatgaggtggccatagccagggcaactgaggaagacttctgtgaggaagaag

SEQ ID NO: 93467 - DNA, 80 bp, synthetic construct
  source 1..80: mol_type = other DNA
aacccggatgacctcaaacctaaaggaaagttgtgggctgatgatgaaagagtcgtcgactataatgaaaaactcagctt

SEQ ID NO: 93468 - DNA, 80 bp, synthetic construct
  source 1..80: mol_type = other DNA
gggtatcacccagtctgtttattacatcaacccatgtcatacctcagggcactcaggaattctttggtgtgcctatcaac

SEQ ID NO: 93469 - DNA, 80 bp, synthetic construct
  source 1..80: mol_type = other DNA
tggggttcggacctggcaacgatgatccgccgtgcgcgggcgtttggaggactgatggatgaactcaaggcccactgtgt

SEQ ID NO: 93470 - DNA, 80 bp, synthetic construct
  source 1..80: mol_type = other DNA
atgactccaagttgaagaagatggccaacatacttttgtgtgctttgtcgtcattattcaccagacctatcaaggacgta

SEQ ID NO: 93471 - DNA, 80 bp, synthetic construct
  source 1..80: mol_type = other DNA
ttctcaccagaaccacacttagcccaaattgttgcagaggacctcttggcccccagtgtaatggatgtaggtgattttaa

SEQ ID NO: 93472 - DNA, 80 bp, synthetic construct
  source 1..80: mol_type = other DNA
aataacaatcaatgagggtctgccctccggggtaccatgcacgtcgcagtggaactccattgctcattggctcctcacac

SEQ ID NO: 93473 - DNA, 80 bp, synthetic construct
  source 1..80: mol_type = other DNA
ctgagggacccctgatcatatccgaggacttgaatgggctgacttttctgcggaggaccgtaacccgagacccagctggg

SEQ ID NO: 93474 - DNA, 80 bp, synthetic construct
  source 1..80: mol_type = other DNA
attgggaaactcaggcctcttaacatcctcaacatcctggcctcttgtgattggactttcgcatgtatagttgaatcttt

SEQ ID NO: 93475 - DNA, 80 bp, synthetic construct
  source 1..80: mol_type = other DNA
ctcacctggagagattttactaaatttagaattaggccctgaactaaatccctatttggcacacctttccagaatgtaca

SEQ ID NO: 93476 - DNA, 80 bp, synthetic construct
  source 1..80: mol_type = other DNA
atggctacgcggggggagtggaagtgcaagtactactagctgggaacgcgttcacagctggtaaactggtatttgcagca

SEQ ID NO: 93477 - DNA, 80 bp, synthetic construct
  source 1..80: mol_type = other DNA
cccttgagccagtcttactgcccctcccagatgtcagaaatagattcttccattacaatcaagcccctgaaccaaggatg

SEQ ID NO: 93478 - DNA, 80 bp, synthetic construct
  source 1..80: mol_type = other DNA
ccatcttaaccatgggtgaattgaccaattccagattcccagtacctatagatgagctctacacgagccccaatggagac

SEQ ID NO: 93479 - DNA, 80 bp, synthetic construct
  source 1..80: mol_type = other DNA
gtgagttgcagggtacaacacaactccttcccactgcagtgtgctctttccgtgggcgcatcaacacaaaagtacaaggg

SEQ ID NO: 93480 - DNA, 80 bp, synthetic construct
  source 1..80: mol_type = other DNA
gacgatcacgtttggaacatgcaagtcaccaatatcaatgggacaccctttgaccccacggaagaagtcccagcaccatt

SEQ ID NO: 93481 - DNA, 80 bp, synthetic construct
  source 1..80: mol_type = other DNA
gggtactcctgacttctcaggcaggatctttggtgtactcagccagagagaccgtgacaacgcctgcaggagtcacgatg

SEQ ID NO: 93482 - DNA, 80 bp, synthetic construct
  source 1..80: mol_type = other DNA
ggtgccgtgcaagttggaacatgggaacagactgacgttcacgtcaacgaacccaccagattcaccccagtcggtctgct

SEQ ID NO: 93483 - DNA, 80 bp, synthetic construct
  source 1..80: mol_type = other DNA
cgacacagatggcttccaacaatggactcttccaaactactctggagccctgacattaaatatggggctagcaccacccg

SEQ ID NO: 93484 - DNA, 80 bp, synthetic construct
  source 1..80: mol_type = other DNA
tagcccccacttttcctggtgaacaacttctcttcttcagatcacacatccccctcaaggggggagtggaagacccagtc

SEQ ID NO: 93485 - DNA, 80 bp, synthetic construct
  source 1..80: mol_type = other DNA
tcctaccacaggaatggatacagcacctctatcaggaatctgccccctcgcaaacagatgtggccttaatcagattcaca

SEQ ID NO: 93486 - DNA, 80 bp, synthetic construct
  source 1..80: mol_type = other DNA
gggagggggttttgaccgcgggcggcttctcccccactgatgcagcaagaggagcggtcaatgcaccattgactcaagtc

SEQ ID NO: 93487 - DNA, 80 bp, synthetic construct
  source 1..80: mol_type = other DNA
atggattggaatggcaccaggtactgggcccccggggccataaggactaccttctactcaggtggattcaccagcaccgc

SEQ ID NO: 93488 - DNA, 80 bp, synthetic construct
  source 1..80: mol_type = other DNA
ccatgccaggaccgccgacctgtctaagaaagcatcaactgcgccagcatcctcaatgcctatttctagacctagttctc

SEQ ID NO: 93489 - DNA, 80 bp, synthetic construct
  source 1..80: mol_type = other DNA
ctgtgtcttcaaattcaactcgttcaacagtggttagtgggtcttctgctccttcttctataaggagttcttctagcact

SEQ ID NO: 93490 - DNA, 80 bp, synthetic construct
  source 1..80: mol_type = other DNA
tcctcttcctctgcttcctcccggaccagtgattgggtgcggagtcagaatagggccttggagccgtacatgagggtggc

SEQ ID NO: 93491 - DNA, 80 bp, synthetic construct
  source 1..80: mol_type = other DNA
tcctcttcctctgcttcctcccggaccagtgattgggtgcggagtcagaatagggccttggagccgtacatgaggggggc

SEQ ID NO: 93492 - DNA, 80 bp, synthetic construct
  source 1..80: mol_type = other DNA
gttgcaaacagcatacgtcacgcctccttctagtagggcttcgagcaatggcacagtctcaaccgtgccaaaagaagttt

SEQ ID NO: 93493 - DNA, 80 bp, synthetic construct
  source 1..80: mol_type = other DNA
tcttcgctcatctccgtaagagaggggagtcacaggcttagtgaaaagatagggtactctttttccttttatttgaaaat

SEQ ID NO: 93494 - DNA, 80 bp, synthetic construct
  source 1..80: mol_type = other DNA
aagatgcaatcctagatctcgaggctgttgagaacaaccatatgactgccttacttaaagacaaagatagcctcgcgacc

SEQ ID NO: 93495 - DNA, 80 bp, synthetic construct
  source 1..80: mol_type = other DNA
ctctagatttggaagaagaaaaggccagaaagctctcctccaagtctgcttcacctgacatagtgggcacggtcaacgcc

SEQ ID NO: 93496 - DNA, 80 bp, synthetic construct
  source 1..80: mol_type = other DNA
tcaatcaaaagtgatggcaacactgtcacaattaaagaaaaacaagccccaacctcatctcaacaccaggccatatgtac

SEQ ID NO: 93497 - DNA, 80 bp, synthetic construct
  source 1..80: mol_type = other DNA
gaaccgcctctgaagtgaagaaagcgatgggatgggatgtcgaaccagaacatcaggagagcacagccaaggcatggtgc

SEQ ID NO: 93498 - DNA, 80 bp, synthetic construct
  source 1..80: mol_type = other DNA
tggggtttctgggtaagttcaacagtcttcataaccacaactcatgttataccacctggggccaaagaggtctttggtga

SEQ ID NO: 93499 - DNA, 80 bp, synthetic construct
  source 1..80: mol_type = other DNA
gggagtcactccatcgaccttgcctagcacgtttgagagggctgactcagtcgacagtcccattgaacagcaacctgtaa

SEQ ID NO: 93500 - DNA, 80 bp, synthetic construct
  source 1..80: mol_type = other DNA
aggggacatgatagaattctatgaaggtcatatattccattatgccatttacatcggacagggcaaaaccataggggttc

SEQ ID NO: 93501 - DNA, 80 bp, synthetic construct
  source 1..80: mol_type = other DNA
aggggacatgatagaattctatgaaggtcatatattccattatgccatttacatcggacagggcaaaaccataggtgttc

SEQ ID NO: 93502 - DNA, 80 bp, synthetic construct
  source 1..80: mol_type = other DNA
ctacaaaagaattccttcaatcatgataaagagatgatgggcttacaggttgaggcttcaactgcactccttcaaaacag

SEQ ID NO: 93503 - DNA, 80 bp, synthetic construct
  source 1..80: mol_type = other DNA
gccatggccctatgcttcaattacaaacaactgctatgaattttgctgtagagtaatggcacttgatgacacctggcttg

SEQ ID NO: 93504 - DNA, 80 bp, synthetic construct
  source 1..80: mol_type = other DNA
aatctctggcctgcccgagctcacaacagtcccccaaccggatgtggccaacacggcattcagtgtcccaccgctgagct

SEQ ID NO: 93505 - DNA, 80 bp, synthetic construct
  source 1..80: mol_type = other DNA
gccgctatttgcacacctcaggaagaggggggagtcacaggcttagtgaaaataaaatcacatttaaacattgattatcc

SEQ ID NO: 93506 - DNA, 80 bp, synthetic construct
  source 1..80: mol_type = other DNA
gtgactggacatttatgggggtcgtggaaatggtggtcctccttttggagctttttggggtgttctggaacccacctgat

SEQ ID NO: 93507 - DNA, 80 bp, synthetic construct
  source 1..80: mol_type = other DNA
agtggtcctgggtggtattggtctggctataggatttactagggacaaggtgggtaaaatgatgaaaaatgctgttgacg

SEQ ID NO: 93508 - DNA, 80 bp, synthetic construct
  source 1..80: mol_type = other DNA
gactgcgggctgcgactcagctcggacagtacggcctggaaatattctcactattaaagaagtacttctttggtggagac

SEQ ID NO: 93509 - DNA, 80 bp, synthetic construct
  source 1..80: mol_type = other DNA
ccctgaaagatatagagtcagctgttattgacatggaagtgctgtcgtccacctcagtgacccaactcgtaagggataag

SEQ ID NO: 93510 - DNA, 80 bp, synthetic construct
  source 1..80: mol_type = other DNA
caatctgcgcgggcttacatggctatcttggataatgaagaagaaaaagccagaaagctgtccgttaggaatgctgaccc

SEQ ID NO: 93511 - DNA, 80 bp, synthetic construct
  source 1..80: mol_type = other DNA
ttagtccaggcgacactaatgcactaaaggattgttttaaacctgatttctctcacatgaaaatggaactggccccccag

SEQ ID NO: 93512 - DNA, 80 bp, synthetic construct
  source 1..80: mol_type = other DNA
ggtggttttgataaccaagggaacactccatttggcaagggtacaatgaagccaactaccataaatagattgttaatcca

SEQ ID NO: 93513 - DNA, 80 bp, synthetic construct
  source 1..80: mol_type = other DNA
ccaaggtcctacttatgactttgacactgatagggtctctgcatttactaagatggcccgagctaatgggataggtctta

SEQ ID NO: 93514 - DNA, 80 bp, synthetic construct
  source 1..80: mol_type = other DNA
tatccatggcctccctgggcaagaaattgcgtggggtttccaccattgaaggcttgaagaatgcccttctaggatacaag

SEQ ID NO: 93515 - DNA, 80 bp, synthetic construct
  source 1..80: mol_type = other DNA
atagcaaagtgcagtatacagtggcagtcaagggtgtacattatagaatcagatggtggcaatgtacacatcaaggagga

SEQ ID NO: 93516 - DNA, 80 bp, synthetic construct
  source 1..80: mol_type = other DNA
tagcttacgcctcatgttttcaatctgccgtcaccaccatactacaaatggcagggtctgctctggtcatcaatcgggca

SEQ ID NO: 93517 - DNA, 80 bp, synthetic construct
  source 1..80: mol_type = other DNA
gttaagcgcatgtttggcacccgtacggcagccatggcgctagagggaccagaaaaggaacataattgtagggttcataa

SEQ ID NO: 93518 - DNA, 80 bp, synthetic construct
  source 1..80: mol_type = other DNA
aagctaaggaagctggaaaggggcctataggacatgatgacatgatagaaaagtttggtctgtgtgagactgaagaggaa

SEQ ID NO: 93519 - DNA, 80 bp, synthetic construct
  source 1..80: mol_type = other DNA
ataaccccaaatgatgccattccagaggggaagaacaaaggtaagaccaagaagggccgcggccgcaaaaataattacaa

SEQ ID NO: 93520 - DNA, 80 bp, synthetic construct
  source 1..80: mol_type = other DNA
cgaaacaacagatacttgatgagcatgctgaatggtttgatgctggtggcttaggcccaagcacacttcctagcaaccat

SEQ ID NO: 93521 - DNA, 80 bp, synthetic construct
  source 1..80: mol_type = other DNA
ggtcagggtggggcttctgggtcagtccaaccgtgttcatcaccaccacgcatgtggtgccaactggcgtgaaggaattc

SEQ ID NO: 93522 - DNA, 80 bp, synthetic construct
  source 1..80: mol_type = other DNA
ggaccttggaactataccaggtgactgtggggcaccatacgtccacaagcgcggtaatgactgggtcgtgtgtggtgtcc

SEQ ID NO: 93523 - DNA, 80 bp, synthetic construct
  source 1..80: mol_type = other DNA
ggaccttggaactataccaggtgactgtggggcaccatacgtccacaagcgcggtaatgactgggtcgtgtgtggggtcc

SEQ ID NO: 93524 - DNA, 80 bp, synthetic construct
  source 1..80: mol_type = other DNA
gacaaggggcattatgcgggtcatgaaattgtaaggcacgggaatggcccagcattgtcaactaaaacaaagttctggag

SEQ ID NO: 93525 - DNA, 80 bp, synthetic construct
  source 1..80: mol_type = other DNA
gaggaaaggaccctcgtgtccaaaacggcccctccctccaacaggttctgcgtgaccaattgaaacccttcgcagaaccc

SEQ ID NO: 93526 - DNA, 80 bp, synthetic construct
  source 1..80: mol_type = other DNA
gaacgtcactcaaatgatgatagtggaggccatcaagtgaaatggtcggctaaagagggtgtgaatctcgggataggagg

SEQ ID NO: 93527 - DNA, 80 bp, synthetic construct
  source 1..80: mol_type = other DNA
gttatggggtgctgatctcgggactgtaatcagagctgcccgagcttttggcccattttgtgatgctataaagccacatg

SEQ ID NO: 93528 - DNA, 80 bp, synthetic construct
  source 1..80: mol_type = other DNA
tcattaagctaccaataaaggttggtatgaacataatagaagatggccccctaatttatgctgagcatgccaagtacaaa

SEQ ID NO: 93529 - DNA, 80 bp, synthetic construct
  source 1..80: mol_type = other DNA
gcttacaaccgttcccgggcccgagtggaacatgtgcccgctacccccagcagatcaaaggagtacgacacctgcagtcg

SEQ ID NO: 93530 - DNA, 80 bp, synthetic construct
  source 1..80: mol_type = other DNA
agcccataataggtgatatgatcgaattttatgaaggtcatatctaccattatgccatttatatcggccaaggcaagaca

SEQ ID NO: 93531 - DNA, 80 bp, synthetic construct
  source 1..80: mol_type = other DNA
ctggctggtaatgctttcactgcaggtaagatcatagtctcctgtatacctcctggttttggatcgcataatctcactat

SEQ ID NO: 93532 - DNA, 80 bp, synthetic construct
  source 1..80: mol_type = other DNA
tgggtgtccactctcctcaagcagcattttcaataacaagaatcaccatacaacctatatcagcatggtggcggatatgt

SEQ ID NO: 93533 - DNA, 80 bp, synthetic construct
  source 1..80: mol_type = other DNA
ggtcgagtgttactgaggcaacacatctggccccatcagttttcccacccggcttcggggaagtgctggttttcttcatg

SEQ ID NO: 93534 - DNA, 80 bp, synthetic construct
  source 1..80: mol_type = other DNA
tcaaagatgccagggcctggcgcctacaatctgccctgtttgctgccacaagagtacatctcacattttgcaagtgaaca

SEQ ID NO: 93535 - DNA, 80 bp, synthetic construct
  source 1..80: mol_type = other DNA
accttggggagttcaaagcataccccgatggattcctcacttgtgtccccaatggagccagctcgggtccacaacaatta

SEQ ID NO: 93536 - DNA, 80 bp, synthetic construct
  source 1..80: mol_type = other DNA
ccaatcaatggggtttttgtttttgtctcttgggtgtctaggttctatcaattgaagcctgtgggaactgccagctcggc

SEQ ID NO: 93537 - DNA, 80 bp, synthetic construct
  source 1..80: mol_type = other DNA
ccgtgctggaggcctatccagtgctgatgcggcaaggtccatagcgggagccccagtgacccgaatcgtggactggaacg

SEQ ID NO: 93538 - DNA, 80 bp, synthetic construct
  source 1..80: mol_type = other DNA
gtgtgagggtgtcagcccctgagtcttctgtaaccacattgaggtctggtggctttatgtcggtgccaataccatacaca

SEQ ID NO: 93539 - DNA, 80 bp, synthetic construct
  source 1..80: mol_type = other DNA
gtgccacgtggctatttcaatacagatagattgccattgttcgcaaacaataggcgataatgttgtaatatgaaatgtgg

SEQ ID NO: 93540 - DNA, 80 bp, synthetic construct
  source 1..80: mol_type = other DNA
tgctttgaattctgctgtcaggtcatgtgtctagatgacacttggctacaaagaaagctcatctcctctggacggttcca

SEQ ID NO: 93541 - DNA, 80 bp, synthetic construct
  source 1..80: mol_type = other DNA
ccatccaacccaggattggtctcgggacactccagagtttcaacaagacagcaaacttgagatggtcagagatgcagtgc

SEQ ID NO: 93542 - DNA, 80 bp, synthetic construct
  source 1..80: mol_type = other DNA
tgtgagtggaacaacgactccacctaattctatacaaataactaaccaaagtatggctctggggctaattggccaggccc

SEQ ID NO: 93543 - DNA, 80 bp, synthetic construct
  source 1..80: mol_type = other DNA
ctacacggccacagaactaagtgatcagaaaaagcaagagtacgcatttttttataaatatgaggtagcaaatgttacaa

SEQ ID NO: 93544 - DNA, 80 bp, synthetic construct
  source 1..80: mol_type = other DNA
gactaccaccacctgtacatttgggaaaagtaagaattttggaccaagggcccaatatttaaaaaaaaaaaacccaacat

SEQ ID NO: 93545 - DNA, 80 bp, synthetic construct
  source 1..80: mol_type = other DNA
gtaacacggagggaagtccacatatattacctagagaaagccaacaaaataaaatggaagactttgtgcgacaatgcttc

SEQ ID NO: 93546 - DNA, 80 bp, synthetic construct
  source 1..80: mol_type = other DNA
atgctactatttgctatccatactgtccaaaaaaatcccaaacatataactgaactcctcacacccaattggaccaatct

SEQ ID NO: 93547 - DNA, 80 bp, synthetic construct
  source 1..80: mol_type = other DNA
tgaggcagcaagtccaagctgacaggaatgttgttaattatccatcaattttacatccaattgatcatgcatttaatgaa

SEQ ID NO: 93548 - DNA, 80 bp, synthetic construct
  source 1..80: mol_type = other DNA
tgtagcgaagtatctacaaaatggaatgaaatgtgtaagtttgttaaaaatgtgaatgcttattttgatgttttgaaaac

SEQ ID NO: 93549 - DNA, 80 bp, synthetic construct
  source 1..80: mol_type = other DNA
gcaggcaatacaaaagttaagggaagtaatggagagcaggaagtctgcaagtgccgctaaggaagaaacaagcgtaaggc

SEQ ID NO: 93550 - DNA, 80 bp, synthetic construct
  source 1..80: mol_type = other DNA
agcaagttcaatggattactagggccaaccactctatcccagtaggagacatctatagaaaatggatagtgctgggacta

SEQ ID NO: 93551 - DNA, 80 bp, synthetic construct
  source 1..80: mol_type = other DNA
atcaagatctaaaaggaggatacacagcagtattcatgcaaagaggacaaaatccaagtaggaagggacctataaaatgt

SEQ ID NO: 93552 - DNA, 80 bp, synthetic construct
  source 1..80: mol_type = other DNA
ctcctgcatccagcttgtgcacatggttttggagatccacacggagaaatactgaaatggcagtttgacagatcactagg

SEQ ID NO: 93553 - DNA, 80 bp, synthetic construct
  source 1..80: mol_type = other DNA
cagctccaccgctggaggaagagaggaagggacaagagaatcaggaacagaagggggacccaaacgaactctatccgttt

SEQ ID NO: 93554 - DNA, 80 bp, synthetic construct
  source 1..80: mol_type = other DNA
caccacccatgttgctatgataactaacccagagctcttccccaaggactgaactgctgacacagagggactttccaaca

SEQ ID NO: 93555 - DNA, 80 bp, synthetic construct
  source 1..80: mol_type = other DNA
gagactgctgacactgcggggactttccagtgtgggagggataggggcggttcggggagtggctaaccctcagatgctgc

SEQ ID NO: 93556 - DNA, 80 bp, synthetic construct
  source 1..80: mol_type = other DNA
ttagccctacaggattccaaagaaacagtaaatatagtaacagattcacaatatgcattgggcgtcatctcctcccaacc

SEQ ID NO: 93557 - DNA, 80 bp, synthetic construct
  source 1..80: mol_type = other DNA
tctgggaagaccagaaactggcattacaggcatcactttgaatctagaaatccaagattcagttcaggtgtatatattcc

SEQ ID NO: 93558 - DNA, 80 bp, synthetic construct
  source 1..80: mol_type = other DNA
agtagggatggcttgtatagcagtgaccacatattggggactgatgccaggggaaagagaggatcagttgggacatgggg

SEQ ID NO: 93559 - DNA, 80 bp, synthetic construct
  source 1..80: mol_type = other DNA
tgagtatagaatggcagtacaaaaggtatacaacacagattgaccctgaaacagcagacaggataatacatctgtattat

SEQ ID NO: 93560 - DNA, 80 bp, synthetic construct
  source 1..80: mol_type = other DNA
tttacttgttttacagagtcagcaatcagaacagccattctagggcagagagtactgatcaggtgtgaatacactgcagg

SEQ ID NO: 93561 - DNA, 80 bp, synthetic construct
  source 1..80: mol_type = other DNA
gtgtccagaaattaacagaagatagatggagcaagccccggaggatcagggaccagccagggagccattcaatgaatggg

SEQ ID NO: 93562 - DNA, 80 bp, synthetic construct
  source 1..80: mol_type = other DNA
cactagagaccctagaagaactaaaaacagaagcatcgagacatttccctaggtattggctacaggccttgggacaatac

SEQ ID NO: 93563 - DNA, 80 bp, synthetic construct
  source 1..80: mol_type = other DNA
atttatgacacttttggagacacctgggtaggagttatggcaattacaagaatcttacaacaactgctattcgtccattt

SEQ ID NO: 93564 - DNA, 80 bp, synthetic construct
  source 1..80: mol_type = other DNA
aaatgctattgcaaaaaatgctgctatcattgctatgtttgtttcacaagcaagggtttgggaatctcctatggcaggaa

SEQ ID NO: 93565 - DNA, 80 bp, synthetic construct
  source 1..80: mol_type = other DNA
gaagcgacgacgtccagccactgctgcacgccatccggataataaagatcctgtaccagagcagtaagtaacgctgatgc

SEQ ID NO: 93566 - DNA, 80 bp, synthetic construct
  source 1..80: mol_type = other DNA
agcatagggacctgctaataattattagtgctttgctgattataaatgtaattctatggatgtttattcttaggcaatgc

SEQ ID NO: 93567 - DNA, 80 bp, synthetic construct
  source 1..80: mol_type = other DNA
ttagaccaaaagaaacaagctaaaagggaaagagaaataattgacaggttaagaagaataagagaaattagggatgatag

SEQ ID NO: 93568 - DNA, 80 bp, synthetic construct
  source 1..80: mol_type = other DNA
gatgcaaccccaatactattctgtgcctcagatgctaacctaacaagcactgagaagcataatgtttgggcatcacaagc

SEQ ID NO: 93569 - DNA, 80 bp, synthetic construct
  source 1..80: mol_type = other DNA
gacaacagaacagacaacacaacagagaaaacaggaaacagcacattaggctcagaaaaccctatgaaaaggtgtgagtt

SEQ ID NO: 93570 - DNA, 80 bp, synthetic construct
  source 1..80: mol_type = other DNA
taatgtaaccacaattctcaaggacaaaaaggagaaaaaacaggctctattctatgtatcagatttgaataaactagaca

SEQ ID NO: 93571 - DNA, 80 bp, synthetic construct
  source 1..80: mol_type = other DNA
aaaataagaattatgggaaaagatattacggccactgcgaaaactatcatagtgaccctaaattccactataaacataac

SEQ ID NO: 93572 - DNA, 80 bp, synthetic construct
  source 1..80: mol_type = other DNA
ctgtgagagaccagggaatcagtcagtacaagagatgaaaataggcccaatggcctggtacagcatggccctaggagcag

SEQ ID NO: 93573 - DNA, 80 bp, synthetic construct
  source 1..80: mol_type = other DNA
gatcaaacagctcaaggatagcttattgcaattatagcaccaatagttggacagaagccttaaaaaacacagctgaaagg

SEQ ID NO: 93574 - DNA, 80 bp, synthetic construct
  source 1..80: mol_type = other DNA
tatttggagcttataaataatacaaaagagaatataacaatagtattcaatcaaagccatgctggatctgacgcagaggt

SEQ ID NO: 93575 - DNA, 80 bp, synthetic construct
  source 1..80: mol_type = other DNA
atcccatttgcattttaactgtcatggagagttcttctattgtaacacatctgggatgtttaattataccttttcacgca

SEQ ID NO: 93576 - DNA, 80 bp, synthetic construct
  source 1..80: mol_type = other DNA
ataggaccaactgtaatatccaaagtaacagtagcaataatggcacgataccttgcaagttgaaacaggtggtaagagca

SEQ ID NO: 93577 - DNA, 80 bp, synthetic construct
  source 1..80: mol_type = other DNA
tggatgaggggagggtcgggactctatgcacctcccatcaaaggtaacctaatatgcagatcaaacataactggaatgct

SEQ ID NO: 93578 - DNA, 80 bp, synthetic construct
  source 1..80: mol_type = other DNA
tctagaaatagatgggccatggaacaaaacaaccacaaacaagagcacatttagaccaacagggggagagatgaaagata

SEQ ID NO: 93579 - DNA, 80 bp, synthetic construct
  source 1..80: mol_type = other DNA
tatggagaactgaattgttcaaatataaagcagtgagggtaaaaccttttagtgtggcacctacatcaattgcaaggcca

SEQ ID NO: 93580 - DNA, 80 bp, synthetic construct
  source 1..80: mol_type = other DNA
tgctgagagcgatacaggcccagcaagaattgctgaggctatctgtatggggtatcagacaactccgagctcgcctgcta

SEQ ID NO: 93581 - DNA, 80 bp, synthetic construct
  source 1..80: mol_type = other DNA
gccttagaaaccttcatacagaatcagcaactcctaaccctatggggctgtaaaggaaggctaatctgctacacatcagt

SEQ ID NO: 93582 - DNA, 80 bp, synthetic construct
  source 1..80: mol_type = other DNA
aaaatggaatgagacatggagaaatacaactgatataaaccaaatttgggaaaacctaacatggcaggaatgggatcggc

SEQ ID NO: 93583 - DNA, 80 bp, synthetic construct
  source 1..80: mol_type = other DNA
agatagacaatgtaagtgccatcatatatgaggaaatacaaagggcacaagtacagcaggagcaaaatgagaaaaagttg

SEQ ID NO: 93584 - DNA, 80 bp, synthetic construct
  source 1..80: mol_type = other DNA
ctctcattacagatccccacccatcaccactcggaagcagaaacgccaggaagaacaggagaaggaggtggagacgaagg

SEQ ID NO: 93585 - DNA, 80 bp, synthetic construct
  source 1..80: mol_type = other DNA
caggcccagattgataccctcgccgcaagggttcttgccactgttatacacggacctcaggacaatagtcttgtggagtt

SEQ ID NO: 93586 - DNA, 80 bp, synthetic construct
  source 1..80: mol_type = other DNA
accacctcttgagcagcttagcatcagggatccagacggtgatcagccatctgagacttggactgtggatcctagggaag

SEQ ID NO: 93587 - DNA, 80 bp, synthetic construct
  source 1..80: mol_type = other DNA
aagataattgatgcttacagaatttgtgcagctgtaacacaatactggctacaagaattgcagaagagtgctacaagcct

SEQ ID NO: 93588 - DNA, 80 bp, synthetic construct
  source 1..80: mol_type = other DNA
actagatacctgtgcagtggcagttgccaattggactgacggcataatcctaggattacaaaggataggaagaggaattc

SEQ ID NO: 93589 - DNA, 80 bp, synthetic construct
  source 1..80: mol_type = other DNA
ttaacatcccacggagaataagacagggcttagaaagaagtttattgtaacatgggaaacgtattgggaaaagctagatt

SEQ ID NO: 93590 - DNA, 80 bp, synthetic construct
  source 1..80: mol_type = other DNA
tggaggatggtcagcagtaagagaaagaatgagaaaaacttcccctgatcctgaaccatgtgcacctggggtagggcaag

SEQ ID NO: 93591 - DNA, 80 bp, synthetic construct
  source 1..80: mol_type = other DNA
tgtccagggaattaacagctagaggagggataccaagttcccatactcctcaaaacaatgcagcccttgcattcttagaa

SEQ ID NO: 93592 - DNA, 80 bp, synthetic construct
  source 1..80: mol_type = other DNA
gcaataaacaagttaaaggaagtgatggggagcaggaagtctgcgagtgctgctaaggaagaaacaagcgtaaagcagac

SEQ ID NO: 93593 - DNA, 80 bp, synthetic construct
  source 1..80: mol_type = other DNA
gccttacaagtactaaaggaagtaatcaatgaggaagcagcagattgggatagaactcacccaccagcggtagggccatt

SEQ ID NO: 93594 - DNA, 80 bp, synthetic construct
  source 1..80: mol_type = other DNA
ttactagagctaacaaccctatcccggtaggagacatctatagaaaatggatagtgttaggactaaacaaaatggtaaaa

SEQ ID NO: 93595 - DNA, 80 bp, synthetic construct
  source 1..80: mol_type = other DNA
ctcctgcatccagcttgtgcacacggttatgaagatgagcataaagaaacactgaaatggcagtttgatagatcactagg

SEQ ID NO: 93596 - DNA, 80 bp, synthetic construct
  source 1..80: mol_type = other DNA
caacgtccatgttgctatggtaactcacccagagctcttccttaaagactaaaactgttgacctgaagatgctgacactg

SEQ ID NO: 93597 - DNA, 80 bp, synthetic construct
  source 1..80: mol_type = other DNA
ggctgaattaatggcagtgttattagccctacaggattctaaagaaacagtaaatatagtaacagattcacaatatgcat

SEQ ID NO: 93598 - DNA, 80 bp, synthetic construct
  source 1..80: mol_type = other DNA
tgggcatcatatcctcccaacccacacaaagtgactcccctttagttcagcagataatagaagagctaacaaaaaaggaa

SEQ ID NO: 93599 - DNA, 80 bp, synthetic construct
  source 1..80: mol_type = other DNA
gtatccagaagttaacagaagataaatggaacaagcacctgagaatcagggaccagccagagagccattcactgaatgga

SEQ ID NO: 93600 - DNA, 80 bp, synthetic construct
  source 1..80: mol_type = other DNA
cagctaagggacctactaatattactaagtattattgctttgcttcttataaatgtaatgctatggatgtttgttcttag

SEQ ID NO: 93601 - DNA, 80 bp, synthetic construct
  source 1..80: mol_type = other DNA
gcagtgtttagaacataagaaacaagaaagaagggaaagagaaataattaacagaataagaagaataagagaagttagag

SEQ ID NO: 93602 - DNA, 80 bp, synthetic construct
  source 1..80: mol_type = other DNA
tcccacagaccccactccatatgaatatccattaggaaatgtgacagataacttcaatatatggaacaattacatggtgg

SEQ ID NO: 93603 - DNA, 80 bp, synthetic construct
  source 1..80: mol_type = other DNA
aacaaatgcatgctgacattattgatttatgggaccaaagtttaaaaccttgtgttcaaatgactttcatgtgtatacaa

SEQ ID NO: 93604 - DNA, 80 bp, synthetic construct
  source 1..80: mol_type = other DNA
atgaattgtacagacacaaacagcacaaaagctaacagtacgtcagaaaaccctatgaagaagtgtgaatttaatgtaac

SEQ ID NO: 93605 - DNA, 80 bp, synthetic construct
  source 1..80: mol_type = other DNA
cacagttctcaaagacaaaaaggagaaaaaacaggctctattttatgtatcagatttagctaaagtggaaaataacactg

SEQ ID NO: 93606 - DNA, 80 bp, synthetic construct
  source 1..80: mol_type = other DNA
ttacttgtacacatggcatcaagccaacagtgagcactcaactaatattaaatgggacactctctgagggaaaaataaga

SEQ ID NO: 93607 - DNA, 80 bp, synthetic construct
  source 1..80: mol_type = other DNA
attatgaaaaaacacaatatcatagtgaccctaaattctactataaatatgacctgtgtgagagaaggaaatcagacaat

SEQ ID NO: 93608 - DNA, 80 bp, synthetic construct
  source 1..80: mol_type = other DNA
acaagagataaaaataggtccaatggcctggtatagcatggacctagcaaatataggggcagggaacagctcaaggacag

SEQ ID NO: 93609 - DNA, 80 bp, synthetic construct
  source 1..80: mol_type = other DNA
cttattgcaattatagtgccactaattgggaaaaagccttaaaacaaacagctgaaagatatttagaacttatgaacaat

SEQ ID NO: 93610 - DNA, 80 bp, synthetic construct
  source 1..80: mol_type = other DNA
accaacaacattaatataactttcaatcatactaaccctggtggagacccagagacaacccatttgcattttaattgtca

SEQ ID NO: 93611 - DNA, 80 bp, synthetic construct
  source 1..80: mol_type = other DNA
tggagaattcttttattgtgacacatctgggatgtttaattataccttttcatgtaacgggagcaattgtattaataccc

SEQ ID NO: 93612 - DNA, 80 bp, synthetic construct
  source 1..80: mol_type = other DNA
aaaataacagcagcagaaatgacactactatgttttgtaaattgagacaggtagtaaggtcatggatggggggagagtca

SEQ ID NO: 93613 - DNA, 80 bp, synthetic construct
  source 1..80: mol_type = other DNA
tttgtaaattgagacaggtagtaaggtcatggatggggggagagtcaggactctatgcacctcccatccgaggtcaccta

SEQ ID NO: 93614 - DNA, 80 bp, synthetic construct
  source 1..80: mol_type = other DNA
ggactctatgcacctcccatccgaggtcacctacaatgcagctcaaacataactggaatgattctagaactggataatcc

SEQ ID NO: 93615 - DNA, 80 bp, synthetic construct
  source 1..80: mol_type = other DNA
atggaacagcagccacagcaacaacacatttagaccaacagggggaaatatgaaagatatatggagaactgaattgttca

SEQ ID NO: 93616 - DNA, 80 bp, synthetic construct
  source 1..80: mol_type = other DNA
aatacaaagtagtaagggtaaaaccttttggtgtggcacctacacatattgcaagaccagtcataggcacgggcactcgt

SEQ ID NO: 93617 - DNA, 80 bp, synthetic construct
  source 1..80: mol_type = other DNA
atggggatgtaagggaaggctaatctgttacacatcagtaaaatggaacgagacatgggcaaatggaattggaatggatc

SEQ ID NO: 93618 - DNA, 80 bp, synthetic construct
  source 1..80: mol_type = other DNA
atatacaaggcacaagtacagcaggaacaaaatgagaaaaatttgctggagttagatgaatgggcttctatttggaattg

SEQ ID NO: 93619 - DNA, 80 bp, synthetic construct
  source 1..80: mol_type = other DNA
gcttgacataactaaatggttgtggtatataaaaatagcaataatcatagtagcagcactaataggtgtgagaattgtca

SEQ ID NO: 93620 - DNA, 80 bp, synthetic construct
  source 1..80: mol_type = other DNA
tgtttgtacttaatctagtaagaggtattaggcagggatatcaacccctctcgttacagatccccacccatcaccaaccg

SEQ ID NO: 93621 - DNA, 80 bp, synthetic construct
  source 1..80: mol_type = other DNA
gaagcagaaacgccaggaagaacaggaggaggaggtggagaagaaggcaggcccagattgataccctcgccgcaagggtt

SEQ ID NO: 93622 - DNA, 80 bp, synthetic construct
  source 1..80: mol_type = other DNA
cttgcaactgttgtacacggacctccggacgataattgtgtggatttaccagctcttgagcagcttaacatcagggatcc

SEQ ID NO: 93623 - DNA, 80 bp, synthetic construct
  source 1..80: mol_type = other DNA
agacagtgatcagccatctgggacttggactgtggattctagggcaaaagacaattaatgcttgcagaatttgtctagct

SEQ ID NO: 93624 - DNA, 80 bp, synthetic construct
  source 1..80: mol_type = other DNA
gtgatacaatattggctacaagaattgcagaagagtgctacaagcctactagataccattgcagtggcagttgccaattg

SEQ ID NO: 93625 - DNA, 80 bp, synthetic construct
  source 1..80: mol_type = other DNA
gactgacggcataatcttagggatacaaagaataggaagaggaattcttaacatcccacggagaattagacagggcttag

SEQ ID NO: 93626 - DNA, 80 bp, synthetic construct
  source 1..80: mol_type = other DNA
aaagaggtttattgtaaacatgggaaacgtattgggaaaatgtaaatttgcaggatggccagcagtaagagaaagaatga

SEQ ID NO: 93627 - DNA, 80 bp, synthetic construct
  source 1..80: mol_type = other DNA
gaagaacctcccctgaccctgaaccatgtgcacctggagtaggaccagtttccagggacttagcagctagaggagggata

SEQ ID NO: 93628 - DNA, 80 bp, synthetic construct
  source 1..80: mol_type = other DNA
ccaacttcccatactcctcaaaacaatgcagcccttgcattcctagaaagtcaccaagaggaagaagaggtaggcttccc

SEQ ID NO: 93629 - DNA, 80 bp, synthetic construct
  source 1..80: mol_type = other DNA
agcagtgtgtgctcatctgttcaaccctggtgtctagagatccctcagatcacgtagactgaggcggaaaatctctagca

SEQ ID NO: 93630 - DNA, 80 bp, synthetic construct
  source 1..80: mol_type = other DNA
tgggacaactagcaaccagcgagagcaagttcactggattaccagggccaaccctatcccagtaggagacatctatagaa

SEQ ID NO: 93631 - DNA, 80 bp, synthetic construct
  source 1..80: mol_type = other DNA
tgtaatgggacagaaggaaagaaaccaaatgctactgctaccaacagcccagagatccctgtgaaacaatgtgaatttaa

SEQ ID NO: 93632 - DNA, 80 bp, synthetic construct
  source 1..80: mol_type = other DNA
tgggaaaaatatcatagtgaccctaactgatcctataaacataacctgtaagagaccatggaatcaggcagtgcaagaga

SEQ ID NO: 93633 - DNA, 80 bp, synthetic construct
  source 1..80: mol_type = other DNA
taagtataggtccaatggcctggtacagtatgggcttaaagaatgatggaaacaggaataactcaaggtcagccttttgc

SEQ ID NO: 93634 - DNA, 80 bp, synthetic construct
  source 1..80: mol_type = other DNA
agttaacaggacattgatattcaatcacagcgctggtggagatgcagaggtatccaatttacattttaattgtcatggag

SEQ ID NO: 93635 - DNA, 80 bp, synthetic construct
  source 1..80: mol_type = other DNA
agttcttctattgcaacacatctaagctgtttgattataccttttcatgtaacggacccaactgtacaaataaccattct

SEQ ID NO: 93636 - DNA, 80 bp, synthetic construct
  source 1..80: mol_type = other DNA
accacaaaagcactatatttagaccagaagggggagacatgaaagatatatggagaactgaattgttcagatacaaagta

SEQ ID NO: 93637 - DNA, 80 bp, synthetic construct
  source 1..80: mol_type = other DNA
atggggctgtaagggaaggctagtctgctacacatcagtaacatggaacaaaacatgggcaaatgacactagtttagagg

SEQ ID NO: 93638 - DNA, 80 bp, synthetic construct
  source 1..80: mol_type = other DNA
ttggatgcatgggaacaaattaggttaaagccaggaagtaaaaagaaatacagactaaaacatttagtatgggcaagcag

SEQ ID NO: 93639 - DNA, 80 bp, synthetic construct
  source 1..80: mol_type = other DNA
aatgccataggaggacatcaaggagctttacaagtactaaaggaagtaatcaatgatgaggcagcagattgggatagaac

SEQ ID NO: 93640 - DNA, 80 bp, synthetic construct
  source 1..80: mol_type = other DNA
cccaggcagagcaaattcactggactaccagggccaaccaggctatcccagtaggagatatctatagaaaatggatagtg

SEQ ID NO: 93641 - DNA, 80 bp, synthetic construct
  source 1..80: mol_type = other DNA
cagcccctccgatggaggaggacccgaagggacagaagaatcaggaacaacaagggagtccgaccgagctctatccgttt

SEQ ID NO: 93642 - DNA, 80 bp, synthetic construct
  source 1..80: mol_type = other DNA
caacacccatgttgctatgataaccaaccccgagctcttccagaaggactaaaagcagcagacctaaagagtgctgacgc

SEQ ID NO: 93643 - DNA, 80 bp, synthetic construct
  source 1..80: mol_type = other DNA
gctagcacaagaggaagaggaagaagaaatggatccagtagatcctgaggtgcccccttggcaacaccctggaagtcagc

SEQ ID NO: 93644 - DNA, 80 bp, synthetic construct
  source 1..80: mol_type = other DNA
attctgtacgaaagcagtaagtaacgctaatgcatcataaggaattgctaatattagtagctgttagtgctttgctggtt

SEQ ID NO: 93645 - DNA, 80 bp, synthetic construct
  source 1..80: mol_type = other DNA
ataactgtaattttatggacatttattcttagaaaatacttagaacaaaagaaacaagacaaaagggaaagagaaatact

SEQ ID NO: 93646 - DNA, 80 bp, synthetic construct
  source 1..80: mol_type = other DNA
tcagaggttaagaggaatagaagcaattagggatgatagcgattatgaaagcaatggagaagaagaacaggaagttatgg

SEQ ID NO: 93647 - DNA, 80 bp, synthetic construct
  source 1..80: mol_type = other DNA
attttgtatatagttatggctttgataaccccatgtttgagcaataaacagcggtatgcaacagtctatgctggggtgcc

SEQ ID NO: 93648 - DNA, 80 bp, synthetic construct
  source 1..80: mol_type = other DNA
tgtatgggaagatgcaacaccaacattattttgtgcttcagatgctaacttaacaagcactgagaagcataatatttggg

SEQ ID NO: 93649 - DNA, 80 bp, synthetic construct
  source 1..80: mol_type = other DNA
attgtagaagaaaccaacagctcatcagcagagaaacctttacaatgtgagtttaatgtaaccactgttgtcaaggacaa

SEQ ID NO: 93650 - DNA, 80 bp, synthetic construct
  source 1..80: mol_type = other DNA
aaaagagaaaaaacaggctctattttatagatcagatttaatgaaattagatgaaacaaacgaaacaatgtatacattaa

SEQ ID NO: 93651 - DNA, 80 bp, synthetic construct
  source 1..80: mol_type = other DNA
acagtaagtactcagctactatttaatgggacactctctaaaggaaaaataagaattatgggaaaaaatgttaaggccac

SEQ ID NO: 93652 - DNA, 80 bp, synthetic construct
  source 1..80: mol_type = other DNA
gggggaaaatatcatagtgaccctaaattctaccctaaacatgacctgtcagagaccaggaatggaagtgcaacagatag

SEQ ID NO: 93653 - DNA, 80 bp, synthetic construct
  source 1..80: mol_type = other DNA
ccgtaggtccaatgtcagtgtatagcttgtaccttcagaatacagaagacccagaccgctcaaggacagcttattgtgag

SEQ ID NO: 93654 - DNA, 80 bp, synthetic construct
  source 1..80: mol_type = other DNA
tataatgccactgcttgggaaagaacattaaagcaaatagctcaaaggtatttagaacttgtaaacaatacagataatgt

SEQ ID NO: 93655 - DNA, 80 bp, synthetic construct
  source 1..80: mol_type = other DNA
caacatgacatttgcaaacagcagcggtggagatatggagataacctatttacattttaactgtcatggagaattcttct

SEQ ID NO: 93656 - DNA, 80 bp, synthetic construct
  source 1..80: mol_type = other DNA
attgtgacacaactaagatgtttaattataccttccgatgtaacggaaacacctgtgatgatggcaatgataaccaaagt

SEQ ID NO: 93657 - DNA, 80 bp, synthetic construct
  source 1..80: mol_type = other DNA
aacaataaaactcagataccttgcaggctgaaacaggtggtaaggtcatggatacagggaggatcgggaatctatgcacc

SEQ ID NO: 93658 - DNA, 80 bp, synthetic construct
  source 1..80: mol_type = other DNA
tcccatcaaaggtaatctaacatgtgcatcacgcataactggaatgattctacaattagatgtgccatggggaaacaaga

SEQ ID NO: 93659 - DNA, 80 bp, synthetic construct
  source 1..80: mol_type = other DNA
gcagcaatggacacaatagcagcactgcaatatttagaccagtagggggagatatgaaagacatatggagaactgaattg

SEQ ID NO: 93660 - DNA, 80 bp, synthetic construct
  source 1..80: mol_type = other DNA
ttcaactacaaagtagtaaggataaagccttttagtgtggcacccacatatattacaaggccagtcgtaggcactagcac

SEQ ID NO: 93661 - DNA, 80 bp, synthetic construct
  source 1..80: mol_type = other DNA
gtggggctgtaaaggaaggctagtatgctacacatcagtaaaatggaataatacctgggcagaagccaatgacagcatgt

SEQ ID NO: 93662 - DNA, 80 bp, synthetic construct
  source 1..80: mol_type = other DNA
ggaacaatctaacatggcaggaatgggatcagcagataaaccacgtaagcaacttcatatatgagaaaatacaagaggca

SEQ ID NO: 93663 - DNA, 80 bp, synthetic construct
  source 1..80: mol_type = other DNA
taaatggttgtggtatataaaaatagcaataattatagtaggagcactagtaggtatgagagtcatcatgataatactta

SEQ ID NO: 93664 - DNA, 80 bp, synthetic construct
  source 1..80: mol_type = other DNA
acctagtgaaaaacattaggcagggatatcaacccctctcgttacagatccccatccaacaccgagtggaagcagaaacg

SEQ ID NO: 93665 - DNA, 80 bp, synthetic construct
  source 1..80: mol_type = other DNA
ccaggagaaacaggagaaggaggtggagaagaaggcaggcccaagttgagaccctcgctgcaaggtttcttgccactatt

SEQ ID NO: 93666 - DNA, 80 bp, synthetic construct
  source 1..80: mol_type = other DNA
gctatctggaacttggactggggatcctagggcagaagataattaatgcttgcagaatttgtacagctgtaacacaatac

SEQ ID NO: 93667 - DNA, 80 bp, synthetic construct
  source 1..80: mol_type = other DNA
tggctacaagaattgcagaatagtgctataagtttattagatacagttgcagtagcagtagccaattggactgacagcat

SEQ ID NO: 93668 - DNA, 80 bp, synthetic construct
  source 1..80: mol_type = other DNA
actctctggaatacaaagaataggaagaggaattcgtaacatcccaaggagaactagacagggcttagaaagaattttat

SEQ ID NO: 93669 - DNA, 80 bp, synthetic construct
  source 1..80: mol_type = other DNA
tgtaacatgggaaacgcatttagcaaggataaatttgagggatgggcaaaagtaagagatagaatgagaaaaacttcccc

SEQ ID NO: 93670 - DNA, 80 bp, synthetic construct
  source 1..80: mol_type = other DNA
tgagcctgaaccatgtgcacctggagtaggacagatctctagggaattagcagctagaggaggaatatcaagttcccata

SEQ ID NO: 93671 - DNA, 80 bp, synthetic construct
  source 1..80: mol_type = other DNA
cggatttctaccgagactgagactgctgacacagagattgctgacacagaagattctaaaggggactttccgctggggac

SEQ ID NO: 93672 - DNA, 80 bp, synthetic construct
  source 1..80: mol_type = other DNA
agaggtggtccaggagtgaaagggtgggccatagacaatgcaaacgatgtagggatggcacgcacaatcaacaattgtta

SEQ ID NO: 93673 - DNA, 80 bp, synthetic construct
  source 1..80: mol_type = other DNA
ctccgcaggtctccagaccttgaaagtaagaggaggttggacaatggctaattccaaccagaaaataaatgggcaagtca

SEQ ID NO: 93674 - DNA, 80 bp, synthetic construct
  source 1..80: mol_type = other DNA
attcgactcaaacggcaattgatagagtgagatccaaagtaaatttaattgtccataagatggacacgcagtctcagaga

SEQ ID NO: 93675 - DNA, 80 bp, synthetic construct
  source 1..80: mol_type = other DNA
gctgatcatgaattctgtaaggttggaactagactcaatatgattaattacaagcttgatgcccaaatacaatacgtatg

SEQ ID NO: 93676 - DNA, 80 bp, synthetic construct
  source 1..80: mol_type = other DNA
cgatggaacaattgaatcatgtacaaattctttgtacaggaatatgagatggctgactcaaaagaatgggctttacccca

SEQ ID NO: 93677 - DNA, 80 bp, synthetic construct
  source 1..80: mol_type = other DNA
ttcaagacgctcaatacacaaacaatcagggaaaagacattcttttcgtttggggcatacatcatccacccactgatact

SEQ ID NO: 93678 - DNA, 80 bp, synthetic construct
  source 1..80: mol_type = other DNA
attcgactcaaacggcaattgatagagtgagatccaatgggaatttaattgtccatggtatggacacgttctctcaaata

SEQ ID NO: 93679 - DNA, 80 bp, synthetic construct
  source 1..80: mol_type = other DNA
tggaaacaatatcacgtatgactatactactggtagtaacaacaagcaatgcagacaaaatctgcatcggtcaccagtca

SEQ ID NO: 93680 - DNA, 80 bp, synthetic construct
  source 1..80: mol_type = other DNA
taagagtcataagctgggagtagttgagtccagcagcaaaccctgcagactgcaaggacttgtttgagttgttgttccca

SEQ ID NO: 93681 - DNA, 80 bp, synthetic construct
  source 1..80: mol_type = other DNA
accttttgtggcttcccacctgattctaaatcaacaacagtgttttcccaagctcttcctgttatagaagttcttgatgc

SEQ ID NO: 93682 - DNA, 80 bp, synthetic construct
  source 1..80: mol_type = other DNA
agagctctcttcacttttaagatggacttgaggatgccatccattgtttgaggtgacaccttgattgtctctaacatgtt

SEQ ID NO: 93683 - DNA, 80 bp, synthetic construct
  source 1..80: mol_type = other DNA
agaaatgaaaaactgctctttcaacacttccacaagcatacaggataaaaggcagaaacagtatgcactattttataaac

SEQ ID NO: 93684 - DNA, 80 bp, synthetic construct
  source 1..80: mol_type = other DNA
ccaatggctattttagatttgattcctgggtcaaccagttttacacacttgcccccatgggaaatgggtcggggcgtaga

SEQ ID NO: 93685 - DNA, 80 bp, synthetic construct
  source 1..80: mol_type = other DNA
agatggtgccgcccaccgaaatgaaccccaacaatgggtgctcccaagttactcaggcagaggcacccacaatgtgcacc

SEQ ID NO: 93686 - DNA, 80 bp, synthetic construct
  source 1..80: mol_type = other DNA
tgcaccttcagaggtgatgtcacccacactgcaggcacccatcgctacacaatgaatctggcttcccaaaattggaacag

SEQ ID NO: 93687 - DNA, 80 bp, synthetic construct
  source 1..80: mol_type = other DNA
aaatgctgaggagtgttccttggcaatagagggagctttaaatcagtatagggcagaagacaacctcagggacctcaatg

SEQ ID NO: 93688 - DNA, 80 bp, synthetic construct
  source 1..80: mol_type = other DNA
ccattttgatacatgttgaacaatcaaatacagtgttagtatgttgtcatctatgcataaccctctatgagcacaatagt

SEQ ID NO: 93689 - DNA, 80 bp, synthetic construct
  source 1..80: mol_type = other DNA
aaatttggatctgctataagaaatagaaactggcttgctgatacttctagagcagctaaattagatgaggatgtaaacaa

SEQ ID NO: 93690 - DNA, 80 bp, synthetic construct
  source 1..80: mol_type = other DNA
ccattttgatacatgttgaacaatcacaattattaactcttcttttgaagctgcagttgtagctgcaacctcagctcttg

SEQ ID NO: 93691 - DNA, 80 bp, synthetic construct
  source 1..80: mol_type = other DNA
aggagtggggaaaaccacaaacagcaagaaggaagcgggagatcaggaagaacaggttgcaagttttttattcgatagtt

SEQ ID NO: 93692 - DNA, 80 bp, synthetic construct
  source 1..80: mol_type = other DNA
aaggaagcgggagatcaggaagaacaggttgcaagttttttattcgatagttgactataacaatcaaactgttcaagcaa

SEQ ID NO: 93693 - DNA, 80 bp, synthetic construct
  source 1..80: mol_type = other DNA
ccagatttgtggtttacttcaaggacagctcaattgtcctttgtgcaggtgcgggcatttgggtaacaagagaaccttat

SEQ ID NO: 93694 - DNA, 80 bp, synthetic construct
  source 1..80: mol_type = other DNA
aggcagaccatatttgtggtcgatgccatggaggcccatcagtttatcaaggctcctggcatcactactgctattgagca

SEQ ID NO: 93695 - DNA, 80 bp, synthetic construct
  source 1..80: mol_type = other DNA
gcgccctcgttgctaacgagggctggaatgccactgaggacgcgctcaccgcagttattacagcggcgtacctcacaatt

SEQ ID NO: 93696 - DNA, 80 bp, synthetic construct
  source 1..80: mol_type = other DNA
tgccatcaacgttacctgcggacgcaggcgatttccaaaggcatgcgccggctcgagctcgagcacgcccaaaaattcat

SEQ ID NO: 93697 - DNA, 80 bp, synthetic construct
  source 1..80: mol_type = other DNA
ctctcgtctctacagctggttatttgagaagtcgggccgcgattacatcccgggccgtcagttgcaattttatgcccagt

SEQ ID NO: 93698 - DNA, 80 bp, synthetic construct
  source 1..80: mol_type = other DNA
gccgccgttggctttctgccgggtttcatcttgaccctcggaccctagtttttgatgaatcagtcacctgtagctgccgg

SEQ ID NO: 93699 - DNA, 80 bp, synthetic construct
  source 1..80: mol_type = other DNA
actattgctcgacggattgcagggaaattttgctgttttatgaagtggctcggccaggagtgctcttgctttctccagcc

SEQ ID NO: 93700 - DNA, 80 bp, synthetic construct
  source 1..80: mol_type = other DNA
gctccgacgtcgaccccgccgagcccgccaccttggatatcacaggctcgtatatcgtggatggtcaatccctccagact

SEQ ID NO: 93701 - DNA, 80 bp, synthetic construct
  source 1..80: mol_type = other DNA
gtctatcaggcactcgacctgccgcttgagctggtggctcgtgccgcccgtctctctgccacggttgttgtcactgagac

SEQ ID NO: 93702 - DNA, 80 bp, synthetic construct
  source 1..80: mol_type = other DNA
ccccggccgcctagactgtcgaactgtaattggtaataaaactttcctcacgaccttcgtagatggggcacgtcttgaag

SEQ ID NO: 93703 - DNA, 80 bp, synthetic construct
  source 1..80: mol_type = other DNA
tcagtgggcctgagcagttaaatttatcttttgacagtcagcagtgcagcatggcggccggcccattctgcctcacttat

SEQ ID NO: 93704 - DNA, 80 bp, synthetic construct
  source 1..80: mol_type = other DNA
gccgctgtgcctggcgggcttgaggtccgctttgccgccgctgggctcgagagccgtgtcactttcccttctggcgaagc

SEQ ID NO: 93705 - DNA, 80 bp, synthetic construct
  source 1..80: mol_type = other DNA
accaggcgccccacctggcgaggtcactgcgttctgctcagctctctacaggcataaccgatcgagccaacgccagtcgg

SEQ ID NO: 93706 - DNA, 80 bp, synthetic construct
  source 1..80: mol_type = other DNA
ttgtcggcggcctgtggctccatcccgagggcctgttgggtctgttcccgcccttttctcctgggcatgagtggcagtct

SEQ ID NO: 93707 - DNA, 80 bp, synthetic construct
  source 1..80: mol_type = other DNA
gccaacccattttgcggcgagagtaccctttacacccgcacctggtcgacggccactgactcgccgctagttgctgacca

SEQ ID NO: 93708 - DNA, 80 bp, synthetic construct
  source 1..80: mol_type = other DNA
ggcctcgggctcagcagagcttgtcgcccgcccgatagagccctccattgctgtcgcgggccttgtaggtggcccgcctg

SEQ ID NO: 93709 - DNA, 80 bp, synthetic construct
  source 1..80: mol_type = other DNA
gttttccaggccctggttctgcttctgttgctgtagacggcccccactcctccggggcccacctggtcatacctaatccc

SEQ ID NO: 93710 - DNA, 80 bp, synthetic construct
  source 1..80: mol_type = other DNA
cgtggtgccccgcagcgccgcctactgcatacctaccctgacggcgccaaggtttatgttggctccattttcgagtccga

SEQ ID NO: 93711 - DNA, 80 bp, synthetic construct
  source 1..80: mol_type = other DNA
atgtacctggcttgttaatgcgtcgaacgccggccaccgtcccggtggtgggctttgtcacgcattctatcaacgctacc

SEQ ID NO: 93712 - DNA, 80 bp, synthetic construct
  source 1..80: mol_type = other DNA
ctgactcgtttgatgccactaagtttattatgcgcgacggtctggccgcctacacccttactccccggccaattattcat

SEQ ID NO: 93713 - DNA, 80 bp, synthetic construct
  source 1..80: mol_type = other DNA
tcgaggccgcctatcgcgagacctgcgctcgtcgtgggaccgccgcctatccgctcctcggcgctggtatttaccaggtg

SEQ ID NO: 93714 - DNA, 80 bp, synthetic construct
  source 1..80: mol_type = other DNA
cctgttagcttaagttttgacgcctgggagcgaaaccatcgcccgtctgacgagctttacctgactgagctggcagctaa

SEQ ID NO: 93715 - DNA, 80 bp, synthetic construct
  source 1..80: mol_type = other DNA
gtcgctgccttgaggtcggagctcacccgcgctctattaatgacaaccccaatgttctccatcgctgcttccttcgcccc

SEQ ID NO: 93716 - DNA, 80 bp, synthetic construct
  source 1..80: mol_type = other DNA
gtggttcgaagctaaccgcccggatcatcctacgttgaacataactgaggacaccgcccgtgcggccaatctggccctgg

SEQ ID NO: 93717 - DNA, 80 bp, synthetic construct
  source 1..80: mol_type = other DNA
agcttgactccgagagtgaggtcggccgcgcgtgcgccggttgtaaagttgagcctggcttagtgcggtatcagttcacg

SEQ ID NO: 93718 - DNA, 80 bp, synthetic construct
  source 1..80: mol_type = other DNA
gctggtgtccctggttcgggtaaatctaggtccgtgcagcaggcggacgtagatgttgttgttgtgcctacccgcgaact

SEQ ID NO: 93719 - DNA, 80 bp, synthetic construct
  source 1..80: mol_type = other DNA
ccgaaatgcctggcggcggcgtggttttgcggcgttcacgccacatactgcggcccgtgttacgcgcggccgcagggttg

SEQ ID NO: 93720 - DNA, 80 bp, synthetic construct
  source 1..80: mol_type = other DNA
tcatcgacgaggccccctcactccccccgcatttgctgctccttcacatgcagcgagccgcgtctgtgcaccttcttggc

SEQ ID NO: 93721 - DNA, 80 bp, synthetic construct
  source 1..80: mol_type = other DNA
tcacccaccgttgccccgcggatgtttgcgagctgatccgcggcgcttaccctaagatacagaccacaagcaaggtgctt

SEQ ID NO: 93722 - DNA, 80 bp, synthetic construct
  source 1..80: mol_type = other DNA
cgctccctcttttggggtgaaccggccaccggccagacattggtgttcacacaagccgcaaaggctgctcaccctgggtc

SEQ ID NO: 93723 - DNA, 80 bp, synthetic construct
  source 1..80: mol_type = other DNA
gataacggtccatgaggcccagggtgcaactttcactaccacgaccataattgcgaccgcggatgcccgtggcctcatac

SEQ ID NO: 93724 - DNA, 80 bp, synthetic construct
  source 1..80: mol_type = other DNA
aatcctcgcgggcccacgccatagtagccctcacacgacacactgaaaggtgcgtcatacttgatgcccccggcttatta

SEQ ID NO: 93725 - DNA, 80 bp, synthetic construct
  source 1..80: mol_type = other DNA
gtcggccgggatgtccagcgttggtacacggccccgactagggggcccgcggcgagctgccgccgttcggcgcttcgtgg

SEQ ID NO: 93726 - DNA, 80 bp, synthetic construct
  source 1..80: mol_type = other DNA
cgcgaggtgggcatttcagatgccattgtaaataactttttcctctcgggtggtgaggctggccatcataggccgtcggt

SEQ ID NO: 93727 - DNA, 80 bp, synthetic construct
  source 1..80: mol_type = other DNA
catcccgcgcggcaaccccgaccgtaatgtcgatgtgctagctgcgttcccgccctcatgtcagataagtgcctaccatc

SEQ ID NO: 93728 - DNA, 80 bp, synthetic construct
  source 1..80: mol_type = other DNA
agcttgctgaggagctgggccaccggcctgtgccggtggcggctgtgctccctccttgccctgagcttgaacagggtctc

SEQ ID NO: 93729 - DNA, 80 bp, synthetic construct
  source 1..80: mol_type = other DNA
ctctatatgcctcaggagctggcatcttgtgacagtgttgtaacattcgagcttactgatgttgtgcattgccgtatggc

SEQ ID NO: 93730 - DNA, 80 bp, synthetic construct
  source 1..80: mol_type = other DNA
ggcccccagccagaggaaggctgttttatccacgctagtgggccgctacggtagacgaacaaggctttacgacgccggac

SEQ ID NO: 93731 - DNA, 80 bp, synthetic construct
  source 1..80: mol_type = other DNA
ataccgacgttcgtgcctccctcgggcgattcatcccaaccctcgggcaggtccgcgccaccacctgcgagctctttgag

SEQ ID NO: 93732 - DNA, 80 bp, synthetic construct
  source 1..80: mol_type = other DNA
ctcgtggaagcgatggttgagaagggtcaggatggttctgctgtccttgagctagacctgtgcaaccgtgacgtctcccg

SEQ ID NO: 93733 - DNA, 80 bp, synthetic construct
  source 1..80: mol_type = other DNA
ctggggagacgattgcacatggtaaggtcggtcagggcatctcagcctggagtaaaactttttgcgccctgttcggcccg

SEQ ID NO: 93734 - DNA, 80 bp, synthetic construct
  source 1..80: mol_type = other DNA
cacaaactgttttctatggggacgcctatgatgaatcggtgttctctgccgctgtggcaggtgcaggtcgtgccatggtg

SEQ ID NO: 93735 - DNA, 80 bp, synthetic construct
  source 1..80: mol_type = other DNA
tctgccaccagccgaccgtacctattgttttgatggttttgctggctgcagttttgccgctgagactggtgtggcccttt

SEQ ID NO: 93736 - DNA, 80 bp, synthetic construct
  source 1..80: mol_type = other DNA
tttgaaaacgatttctctgagtttgactcgacccagaataacttttccttaggccttgagtgcgctattatggaggagtg

SEQ ID NO: 93737 - DNA, 80 bp, synthetic construct
  source 1..80: mol_type = other DNA
gtatgcctctgtggcttgtcaggctataccacgtcgttcggtcggcgtggatcctgcaggccccgaaggagtcactgagg

SEQ ID NO: 93738 - DNA, 80 bp, synthetic construct
  source 1..80: mol_type = other DNA
ggtttttggaagaagcattccggtgaaccgggtaccctactctggaatacggtatggaatatggcaatcatcgcccattg

SEQ ID NO: 93739 - DNA, 80 bp, synthetic construct
  source 1..80: mol_type = other DNA
ctatgagtttcgggacctccaagtcgccgcctttaagggggacgattcggtcgtcctttgtagtgagtaccgccagagtc

SEQ ID NO: 93740 - DNA, 80 bp, synthetic construct
  source 1..80: mol_type = other DNA
cgggcgccggcccacttatagcgggttgtggcttgaagctgaaggtagattttcggccgattgggctgtatgccgtggtt

SEQ ID NO: 93741 - DNA, 80 bp, synthetic construct
  source 1..80: mol_type = other DNA
gttgttgggggggggcttggggccctatcttttgtcgttcagtttgtcgggcggctctcagagaagaaatggggtcgggg

SEQ ID NO: 93742 - DNA, 80 bp, synthetic construct
  source 1..80: mol_type = other DNA
cccggaacgggccgagcagctccgcctagccgtacaggattttctccgcaagctcacgaatgtggcacagatttgtgttg

SEQ ID NO: 93743 - DNA, 80 bp, synthetic construct
  source 1..80: mol_type = other DNA
aggtggtgtctagggtctacggcgtctccccgggcctggtgcataacctaataggcatgctccagaccgttggtgatggt

SEQ ID NO: 93744 - DNA, 80 bp, synthetic construct
  source 1..80: mol_type = other DNA
aaagcgcacttcactgagtctgtaaaacccatacttgatttgacccattcaattatacatcggattgaatgaataacatg

SEQ ID NO: 93745 - DNA, 80 bp, synthetic construct
  source 1..80: mol_type = other DNA
ttgtctgctgcgcccatgggctcgtcaccatgcgccctaggcctcttctgctgttgctcctcctgtttttgcctatgctg

SEQ ID NO: 93746 - DNA, 80 bp, synthetic construct
  source 1..80: mol_type = other DNA
actccctccatgatctacaaccggctgatgtcgctgaggctatggcccgccacggcatgactcgcctatttgcagccttc

SEQ ID NO: 93747 - DNA, 80 bp, synthetic construct
  source 1..80: mol_type = other DNA
tcccgtcgccgacctgccaccgctggggctgcgccgctgacggcggttgcgcccgcccatgatacctctcctgtccctga

SEQ ID NO: 93748 - DNA, 80 bp, synthetic construct
  source 1..80: mol_type = other DNA
gccagtataatttgtctacgtcgcccctaacatcctctgtggcctctggcactaatttggttctgtatgccgccccttta

SEQ ID NO: 93749 - DNA, 80 bp, synthetic construct
  source 1..80: mol_type = other DNA
aacccccttctgccgctccaggacggcactaacacccatataatggccacggaggcttccaattatgcacagtaccgggt

SEQ ID NO: 93750 - DNA, 80 bp, synthetic construct
  source 1..80: mol_type = other DNA
atcgacccttggtgccgaatgctgttgggggctatgcaatatcaatatctttttggccccagactaccacaacccccaca

SEQ ID NO: 93751 - DNA, 80 bp, synthetic construct
  source 1..80: mol_type = other DNA
tctgtcgacatgaactctattacttctactgatgttaggatccttgttcaacctggcattgcatctgagttagtcattcc

SEQ ID NO: 93752 - DNA, 80 bp, synthetic construct
  source 1..80: mol_type = other DNA
tagcgagcgcctccactaccggaatcagggttggccctcagtcgagacgtctggtgttgctgaggaagaggcgacatcag

SEQ ID NO: 93753 - DNA, 80 bp, synthetic construct
  source 1..80: mol_type = other DNA
gtctcgtcatgttgtgcatacacggttccccggttaattcctacaccaatacaccctatactggtgcccttggtttacta

SEQ ID NO: 93754 - DNA, 80 bp, synthetic construct
  source 1..80: mol_type = other DNA
cacctgcccccggaggttcttctgccccccggcacttaccggacatcgtcttatctgctgatccatgacggaaagcgtgc

SEQ ID NO: 93755 - DNA, 80 bp, synthetic construct
  source 1..80: mol_type = other DNA
gattttgcattggagcttgagtttcgtaatcttacccctggtaataccaacacgcgtgtgtcccgttattccagcacagc

SEQ ID NO: 93756 - DNA, 80 bp, synthetic construct
  source 1..80: mol_type = other DNA
cgccaccggcttcgccgtggtgcagatggcactgctgagctgactacaactgccgctactagattcatgaaggaccttca

SEQ ID NO: 93757 - DNA, 80 bp, synthetic construct
  source 1..80: mol_type = other DNA
ttttactggcctcaatggggttggtgaagttggccgtgggatagcgttaacattatttaatcttgctgacacactcctcg

SEQ ID NO: 93758 - DNA, 80 bp, synthetic construct
  source 1..80: mol_type = other DNA
gcgggctcccgacagaattgatttcgtcggccggtggacagttgttctactctcgcccagttgtctcagccaatgccgag

SEQ ID NO: 93759 - DNA, 80 bp, synthetic construct
  source 1..80: mol_type = other DNA
gtgactcgcgcgtggtcatccaggattatgacaatcagcacgagcaggaccgccccaccccctcaccggcaccgtcccgt

SEQ ID NO: 93760 - DNA, 80 bp, synthetic construct
  source 1..80: mol_type = other DNA
cccttttctgtcctccgtgcgaatgatgtgctctggctgtcccttactggggccgagtatgaccaatcaacatacgggtc

SEQ ID NO: 93761 - DNA, 80 bp, synthetic construct
  source 1..80: mol_type = other DNA
cgactggtccaaggttactcttgacgggcggcccctccctactactgagcagtattccaagtcattctttgtgctgcccc

SEQ ID NO: 93762 - DNA, 80 bp, synthetic construct
  source 1..80: mol_type = other DNA
ttcgtggtaagctctctttttgggaggctggtactacgaaggcgggttacccctacaattataatactacagctagtgac

SEQ ID NO: 93763 - DNA, 80 bp, synthetic construct
  source 1..80: mol_type = other DNA
cgtcgtcacttacgagggcgacactagtgcaggctataatcatgatgttgccaccctccgttcatggatccggacaacta

SEQ ID NO: 93764 - DNA, 80 bp, synthetic construct
  source 1..80: mol_type = other DNA
cagattttgatcgagaatgcagccggccatcgagttgctatctcgacctataccaccagtcttggggctggcccggtcgc

SEQ ID NO: 93765 - DNA, 80 bp, synthetic construct
  source 1..80: mol_type = other DNA
aatttctgcggccgcagtcttagccccccgttcggccttggcccttcttgaggatacccttgattacccggcacgggccc

SEQ ID NO: 93766 - DNA, 80 bp, synthetic construct
  source 1..80: mol_type = other DNA
atacatttgacgatttttgccctgagtgccgtgccctaggcctccagggttgtgcctttcaatccactgttgctgagctc

SEQ ID NO: 93767 - DNA, 80 bp, synthetic construct
  source 1..80: mol_type = other DNA
aagtcgtgggtgagcaccctttggtgatcgagcgggtgcggggcataggttgccattttgtgctgttgattactgctgcc

SEQ ID NO: 93768 - DNA, 80 bp, synthetic construct
  source 1..80: mol_type = other DNA
cctgaaccttcaccgatgccctacgttccttacccacgctcgacagaagtttatgtgcggtccattttcgggcctggcgg

SEQ ID NO: 93769 - DNA, 80 bp, synthetic construct
  source 1..80: mol_type = other DNA
ctctccatcgcttttcccgaccgcctgcactgttaagtcaacttttcatgccgtccccacccacatctgggaccgcctca

SEQ ID NO: 93770 - DNA, 80 bp, synthetic construct
  source 1..80: mol_type = other DNA
tgcttttcggggccacccttgatgatcaggctttttgctgctctaggctcatgacctaccttcgcggcattagttataag

SEQ ID NO: 93771 - DNA, 80 bp, synthetic construct
  source 1..80: mol_type = other DNA
tctattaatgacaaccccaatgttctccatcgctgcttccttcgccccgtcggccgggatgtccagcgttggtacacggc

SEQ ID NO: 93772 - DNA, 80 bp, synthetic construct
  source 1..80: mol_type = other DNA
gctataagataaatggcaaatagtcaaaatgtagtataaataaatagtctactgtaaaagaaagaataaaaagagctaag

SEQ ID NO: 93773 - DNA, 80 bp, synthetic construct
  source 1..80: mol_type = other DNA
ttctgctttggctgggttctaataccaactattacaatgatattattgaaagtattaattgcattcgcatacttatgttc

SEQ ID NO: 93774 - DNA, 80 bp, synthetic construct
  source 1..80: mol_type = other DNA
tgttcgtacctagtgatacagttcaaataataaaggtatcaccgtttccagcgacccctccggagcagagcagaatgcaa

SEQ ID NO: 93775 - DNA, 80 bp, synthetic construct
  source 1..80: mol_type = other DNA
agaaggtagacttcgaggaatgcaaagacattaaagatctaaaacagtataacagtgatgaaccagagtttagatcgtta

SEQ ID NO: 93776 - DNA, 80 bp, synthetic construct
  source 1..80: mol_type = other DNA
gctcatctttgtctgggcactcagagattcactagttgaaagcttcactcaattagtcaataaaaagcgcaatccaacag

SEQ ID NO: 93777 - DNA, 80 bp, synthetic construct
  source 1..80: mol_type = other DNA
tggtctagacgctctgggatttactggttgaagatttcactcagtaagccaatgaaaagcgcaatccaatagcctaggat

SEQ ID NO: 93778 - DNA, 80 bp, synthetic construct
  source 1..80: mol_type = other DNA
gcttgtgtcaaatggttcctacctgaatgagacacatttttctgatgacatcgaacaacaagcagacaacatgataacag

SEQ ID NO: 93779 - DNA, 80 bp, synthetic construct
  source 1..80: mol_type = other DNA
catgaaggagagcctgagcatccttaacaacttgaagttttatgttggagcaataacctgaaagctccctcctcaatgac

SEQ ID NO: 93780 - DNA, 80 bp, synthetic construct
  source 1..80: mol_type = other DNA
tcataacatttttccaggaagtacctcatgtcatagaggaagtgatgaacattgtcctgattgctctcagccttctggcg

SEQ ID NO: 93781 - DNA, 80 bp, synthetic construct
  source 1..80: mol_type = other DNA
ccagagaaatgatttcacttctttagaagcactcatcttggtttggacacttgagaattcactggttgaaagtatcactt

SEQ ID NO: 93782 - DNA, 80 bp, synthetic construct
  source 1..80: mol_type = other DNA
gcttttagagatctttgtgtgagtaggcttcatcaagccatgggacaaattgtgacattcttccaggaagtacctcatgt

SEQ ID NO: 93783 - DNA, 80 bp, synthetic construct
  source 1..80: mol_type = other DNA
cttgatctagacactcggatttactggttgaaagtatcactcagtaagtcaatgaaaggcgcaatccaatagcctaggat

SEQ ID NO: 93784 - DNA, 80 bp, synthetic construct
  source 1..80: mol_type = other DNA
tcattttggtctggacacttagggattcactggttaaaggttttactcagtgagtcagtgaaaagcgcaatccaatagcc

SEQ ID NO: 93785 - DNA, 80 bp, synthetic construct
  source 1..80: mol_type = other DNA
tccagagaaatgacttcacttccttggaagcactcatcttggtctggacgcttagagattcactggttgaaagtattacc

SEQ ID NO: 93786 - DNA, 80 bp, synthetic construct
  source 1..80: mol_type = other DNA
accaattgtggtgcctatattgggtttgggtttgtgtcagaatggctcgtgggtcagctgatgatgcctcacaaaagctc

SEQ ID NO: 93787 - DNA, 80 bp, synthetic construct
  source 1..80: mol_type = other DNA
ctgtgttaggtttgggtttgtgccagtatggcctgcaggtcagctggtggtgccccacagaaattctcacagaaatgaga

SEQ ID NO: 93788 - DNA, 80 bp, synthetic construct
  source 1..80: mol_type = other DNA
ggcacctgtattgggtttgggtttatgccagaataacttgtgggtcagctagtggtgccccactaaagctcctacagaga

SEQ ID NO: 93789 - DNA, 80 bp, synthetic construct
  source 1..80: mol_type = other DNA
cttcagtggtaaggctcattttagtgattccttgaatcagagtatctaatcaaaatgggcaacaaacaggtcaaatcggc

SEQ ID NO: 93790 - DNA, 80 bp, synthetic construct
  source 1..80: mol_type = other DNA
atacacatgtaatcccataaaagaggcctcaaataagtaacagctgtatcatctttactcttagcctctgatgaaactct

SEQ ID NO: 93791 - DNA, 80 bp, synthetic construct
  source 1..80: mol_type = other DNA
tataaaaatatttgtctctcagaactgcatcattgtatacactctcacaaattttgaagtactggtcttcaggcaggatt

SEQ ID NO: 93792 - DNA, 80 bp, synthetic construct
  source 1..80: mol_type = other DNA
ccaccactttatctagatcagatgttgaaggcacattgcaatccacccgtttttgtttctcaggcagttccttgtactga

SEQ ID NO: 93793 - DNA, 80 bp, synthetic construct
  source 1..80: mol_type = other DNA
ctaacaatattatcaacagtgcatctcaattggtcaaaatattcagatgcccctccatccaataatatttcatccaaatc

SEQ ID NO: 93794 - DNA, 80 bp, synthetic construct
  source 1..80: mol_type = other DNA
agcattgtcaatgtcactactccctctcttggatcccaagacaaggttactcattgcctgctgtatcttgtaatcatagt

SEQ ID NO: 93795 - DNA, 80 bp, synthetic construct
  source 1..80: mol_type = other DNA
atatcaaaactaagatcatcttggtcaataacttgatactcattagctgttcggacaactctgtgcactcttctatccag

SEQ ID NO: 93796 - DNA, 80 bp, synthetic construct
  source 1..80: mol_type = other DNA
ctatctagatcgattgcatctaaaatgtcaacagtgccgagtgtataagggaacatatcttcctgggttctctgatagct

SEQ ID NO: 93797 - DNA, 80 bp, synthetic construct
  source 1..80: mol_type = other DNA
aatagtaggtgtgaccccggagatttcaacatccattattacatcataaacatcgcaatcaaggatcttgagatcaattc

SEQ ID NO: 93798 - DNA, 80 bp, synthetic construct
  source 1..80: mol_type = other DNA
caaatgagttggtctctatacctacttcttttagagcattagtggcccgagtcaaaaccctgtcaatgatagcaagaagt

SEQ ID NO: 93799 - DNA, 80 bp, synthetic construct
  source 1..80: mol_type = other DNA
cagtgaggcacttatcaccatgtctaatacgatccaaccggttagcaaggagaattagaacatcaaaaacgaggaggagc

SEQ ID NO: 93800 - DNA, 80 bp, synthetic construct
  source 1..80: mol_type = other DNA
cgttggcaatgtcttcctccatcattaaatgtggtacttaagttgagttgaagtttatgtttgtatgatctgcagatcaa

SEQ ID NO: 93801 - DNA, 80 bp, synthetic construct
  source 1..80: mol_type = other DNA
agtaaactgtagcttttcttgatcaacaactaacttcataggtacaacatctcccaattgctgtgtgtcctttaaaaatt

SEQ ID NO: 93802 - DNA, 80 bp, synthetic construct
  source 1..80: mol_type = other DNA
cttcagtggtgaggcttgttttagtgagcccctgagtcaaagtgccctgtgaaaatgggcaacaaacaggctaaatcaat

SEQ ID NO: 93803 - DNA, 80 bp, synthetic construct
  source 1..80: mol_type = other DNA
cccgccgggggcccccccgggggggcagacagtccagccctactcgatgtcctcaatacacctctccggctcaaacaact

SEQ ID NO: 93804 - DNA, 80 bp, synthetic construct
  source 1..80: mol_type = other DNA
tccagccctactcgatgtcctcaatacacctctccggctcaaacaactctgagcatgtccttccctttagtcttaagcca

SEQ ID NO: 93805 - DNA, 80 bp, synthetic construct
  source 1..80: mol_type = other DNA
gtcttaagccacccccacttgattgaatcatgactcttcgttttgatttgctgtaacagagggcatagcctttaaaatca

SEQ ID NO: 93806 - DNA, 80 bp, synthetic construct
  source 1..80: mol_type = other DNA
taggtttgaacttgtatttgtatgacttgtaggtcagttagtagtgtcccataaaagctcctatagaaatgagagacaat

SEQ ID NO: 93807 - DNA, 80 bp, synthetic construct
  source 1..80: mol_type = other DNA
acttgtatttgtatgacttgtaggtcagttagtagtgtcccataaaagctcctatagaaatgagagacaatatgcctagg

SEQ ID NO: 93808 - DNA, 80 bp, synthetic construct
  source 1..80: mol_type = other DNA
ctcttttcagtgaatccctgagtcaaagtacccagtaaaatgggcaacagacaaactaaatcgacaaaagtcgatgaaca

SEQ ID NO: 93809 - DNA, 80 bp, synthetic construct
  source 1..80: mol_type = other DNA
agataagatctttggcattggcgatgtcttcctccatcgccaattgtagcacctgtattggatttgggtttatgccagag

SEQ ID NO: 93810 - DNA, 80 bp, synthetic construct
  source 1..80: mol_type = other DNA
tcatttacaacaaactcaccacattgattaacaagtcctttcatattgagatggatggaaaaagtctctttaaaactagc

SEQ ID NO: 93811 - DNA, 80 bp, synthetic construct
  source 1..80: mol_type = other DNA
actaggatgtgtcagtatcaaaactaagatcatcttggttaacaacttaatagtgatcaattgttcagacagctctgtgc

SEQ ID NO: 93812 - DNA, 80 bp, synthetic construct
  source 1..80: mol_type = other DNA
atgcagagagataacagtttcaacccctccatgagcaacattctaggttcagtctggaccagaaaagccaacttctgtct

SEQ ID NO: 93813 - DNA, 80 bp, synthetic construct
  source 1..80: mol_type = other DNA
cttcagtggtgaggctcgctttagtgaatccctggatcaaaataccctgtaaaatgggcaacagacaggctaaatcggca

SEQ ID NO: 93814 - DNA, 80 bp, synthetic construct
  source 1..80: mol_type = other DNA
gtgtaaaggctcatcttagtgaatccctgaatcaaagtgctcagttaaaatgggcaacagacagaccaaatcgaccaaag

SEQ ID NO: 93815 - DNA, 80 bp, synthetic construct
  source 1..80: mol_type = other DNA
cacacttctccggcccaaacaactctgaacatgtccttccctttagtcttaggctgcctctacttgactgaatcatgact

SEQ ID NO: 93816 - DNA, 80 bp, synthetic construct
  source 1..80: mol_type = other DNA
ttgggactgtaccagaatggcttgtgggtcagctggtggtgccccacagaagcctccacagaaatgagagacaatatgcc

SEQ ID NO: 93817 - DNA, 80 bp, synthetic construct
  source 1..80: mol_type = other DNA
ttgggcttgggtttgtgtcggtgtggcttgtgggtcagctggtgatgccctacaaaagctcctacagaaatgagagacaa

SEQ ID NO: 93818 - DNA, 80 bp, synthetic construct
  source 1..80: mol_type = other DNA
aggcaattcagttggactttagtggtaagactcattttagtgaatccctgagtcaaagtgctcaattaaaatgggcaaca

SEQ ID NO: 93819 - DNA, 80 bp, synthetic construct
  source 1..80: mol_type = other DNA
ggcaatttagctggactttagtggtgaggctcacctcagtgaatccctgaaccaaagtgcccagtcaaaatgggcaacaa

SEQ ID NO: 93820 - DNA, 80 bp, synthetic construct
  source 1..80: mol_type = other DNA
tccattgccaattgtagtacctatattgggtttgggcctgtacctgtatagcttgtgggccagttagtagtgtccacaag

SEQ ID NO: 93821 - DNA, 80 bp, synthetic construct
  source 1..80: mol_type = other DNA
accactgttagtagtaacaccaatagcactgatatgaaaaactgctctttcaatatccccacaaatataagagatagagt

SEQ ID NO: 93822 - DNA, 80 bp, synthetic construct
  source 1..80: mol_type = other DNA
aaggaagccgcagaaagaaaatgcatttttttataaccttgatttaatacgaatagaggaagaggatagtaataatagct

SEQ ID NO: 93823 - DNA, 80 bp, synthetic construct
  source 1..80: mol_type = other DNA
cttttgacgttagtcagagcactatggctgccggttcctttagtcttacctatgccgcctctgctgctgggttggaggtg

SEQ ID NO: 93824 - DNA, 80 bp, synthetic construct
  source 1..80: mol_type = other DNA
tctacactcgtacttggtcggaggttgacgcagcctccggcccggcccagcccgacttaggccctgtacctgaatcctcc

SEQ ID NO: 93825 - DNA, 80 bp, synthetic construct
  source 1..80: mol_type = other DNA
atgtctagtagggccgccacacccaccttggcggcccctttatctcctgttatattaggcccctcttctcccccttctgc

SEQ ID NO: 93826 - DNA, 80 bp, synthetic construct
  source 1..80: mol_type = other DNA
cccggcgtttagcgggccggcccccggtgctagtactggggtcccggccataacccaccagacagtccggcatcgccgcc

SEQ ID NO: 93827 - DNA, 80 bp, synthetic construct
  source 1..80: mol_type = other DNA
cttagtaactactatgacactacatttcaatcagagcgaatacaccaactcttcgaagaatcatgtagtgcattgcgacc

SEQ ID NO: 93828 - DNA, 80 bp, synthetic construct
  source 1..80: mol_type = other DNA
gacaaggagaacatatttaattgctctttcgaaacaaccacaggaataagagataagaaacagagtgtgtatgcaacttt

SEQ ID NO: 93829 - DNA, 80 bp, synthetic construct
  source 1..80: mol_type = other DNA
ttatattaaccagattgtacaggtaatgtaatctactatagtataaaatacttgccacacagtccaaacacacccaacac

SEQ ID NO: 93830 - DNA, 80 bp, synthetic construct
  source 1..80: mol_type = other DNA
aaataataatgcttcggcaaaggatgaggaaggaatgaaaaactgctctttctatgtatttgacagtataaggaataaga

SEQ ID NO: 93831 - DNA, 80 bp, synthetic construct
  source 1..80: mol_type = other DNA
caggccgaaaagcacgggtcttatcatgcaaattatgatcaaatcactgggaaactgaatagacttattgaaaaaaccaa

SEQ ID NO: 93832 - DNA, 80 bp, synthetic construct
  source 1..80: mol_type = other DNA
tacatatagttagcgttacaataacagtgttgattctccccaaagatgggaataatgggaactgcagtggaacagtcatt

SEQ ID NO: 93833 - DNA, 80 bp, synthetic construct
  source 1..80: mol_type = other DNA
agcaatcgactccatggatatgaatccaaatcagaagataataacaattggctctgtttctctcatcattgccacaatat

SEQ ID NO: 93834 - DNA, 80 bp, synthetic construct
  source 1..80: mol_type = other DNA
tatcctctaacggggcatatggagtgaaagggttttctttcaaatatggcaatggagtttggatcgggagaaccaaaagc

SEQ ID NO: 93835 - DNA, 80 bp, synthetic construct
  source 1..80: mol_type = other DNA
tttagaataatatgacctagatgcagtaagataaagaaattagtaattacacaatcacaatatacaggttgcttgaagac

SEQ ID NO: 93836 - DNA, 80 bp, synthetic construct
  source 1..80: mol_type = other DNA
aaatacaaaactgttctttcaatgtcacaaaaataggaagcaagttacagaaagagtatgcacttttttataaacttgat

SEQ ID NO: 93837 - DNA, 80 bp, synthetic construct
  source 1..80: mol_type = other DNA
gaatattagtagtagtaatgattgggggaatattagtagtagtaatgattgggaaacaaaaaactgctctttcaatatca

SEQ ID NO: 93838 - DNA, 80 bp, synthetic construct
  source 1..80: mol_type = other DNA
acacactacttgaagtagtgtgtgcccgtctgttgtgtgactctggtaactagagatcccgccaaaaataaaattttgac

SEQ ID NO: 93839 - DNA, 80 bp, synthetic construct
  source 1..80: mol_type = other DNA
tagtgctcccagcagtaatagcagtaatgttgcttataatattagcgggatagagaaagaaatgacaaactgctctttca

SEQ ID NO: 93840 - DNA, 80 bp, synthetic construct
  source 1..80: mol_type = other DNA
tagtcccttgaaggaagaaatgaaaaattgctctttcaatatcaccacaaacatagagaagaagtggcaaaaccaatatg

SEQ ID NO: 93841 - DNA, 80 bp, synthetic construct
  source 1..80: mol_type = other DNA
ttgtgtcgatgtgttccagcacagaattcctgggacaatggaactggcctgatggggctaaaatagagtacttcctctaa

SEQ ID NO: 93842 - DNA, 80 bp, synthetic construct
  source 1..80: mol_type = other DNA
acttgcacatgcagggataattggcaaggttcaaatagaccagtcattcaaattgatccagtgtcaatgacacataccag

SEQ ID NO: 93843 - DNA, 80 bp, synthetic construct
  source 1..80: mol_type = other DNA
atgaaggcaaaactatttgtgctgttctgtacattcactgtactgaaagctgacaccatctgtgtaggctaccatgcaaa

SEQ ID NO: 93844 - DNA, 80 bp, synthetic construct
  source 1..80: mol_type = other DNA
gacgcgaacgtgaagaacctgtatgaaagggtaaagtcacaactacgggacaatgccaatgatttaggtaatggatgttt

SEQ ID NO: 93845 - DNA, 80 bp, synthetic construct
  source 1..80: mol_type = other DNA
atgggaagaatagtaatcgcccttgcgataatcagccttgccaaaggtgatcaaatttgcattggttatcatgcaaacaa

SEQ ID NO: 93846 - DNA, 80 bp, synthetic construct
  source 1..80: mol_type = other DNA
tatcactggcaatcatggtggctggtctatccttgtggatgtgctccaatggatcgttgcagtgcagaatttgcatctag

SEQ ID NO: 93847 - DNA, 80 bp, synthetic construct
  source 1..80: mol_type = other DNA
aaaccattttgaaaaaattcacataattccaagggcctcttggtccaatcatgatgcctcagcaggagtaagttcggcat

SEQ ID NO: 93848 - DNA, 80 bp, synthetic construct
  source 1..80: mol_type = other DNA
caggactaagaaacataccccaaagggaaacaaggggcctttttggagcaatagcaggattcatagaaggagggtggcaa

SEQ ID NO: 93849 - DNA, 80 bp, synthetic construct
  source 1..80: mol_type = other DNA
atgtacaaaatagtgttgctactcacgcttcttggagcggtggacagccttgacaaaatctgcctggggcaccatgcagt

SEQ ID NO: 93850 - DNA, 80 bp, synthetic construct
  source 1..80: mol_type = other DNA
tgggttcatagagaatggatgggaaggaatggtagacggttggtatggcttccggcaccagaatgcccagggcaatggcc

SEQ ID NO: 93851 - DNA, 80 bp, synthetic construct
  source 1..80: mol_type = other DNA
aggcagcggattataaaagcactcagacagcaatagaccaaataactggaaagctaaacagactgatcgagaaaactaat

SEQ ID NO: 93852 - DNA, 80 bp, synthetic construct
  source 1..80: mol_type = other DNA
acggaatttgaatcaatagaatccgaattcagcgagatagaacatcaaattggcaatgtgataaattggactaaagactc

SEQ ID NO: 93853 - DNA, 80 bp, synthetic construct
  source 1..80: mol_type = other DNA
cataaccgacatttggacctatcaggctgagttgctggttgcaatggaaaaccagcacacaattgacatggccgactctg

SEQ ID NO: 93854 - DNA, 80 bp, synthetic construct
  source 1..80: mol_type = other DNA
agatgctgaaactgtatgagcgagtgaggaagcaactaaggcagaatgctgaagaagatggtaaaggatgttttgaaata

SEQ ID NO: 93855 - DNA, 80 bp, synthetic construct
  source 1..80: mol_type = other DNA
tatcatagctgtgataataattgcatggaaagcattagaaacaatacttatgaccacacacagtacagagaggaagcact

SEQ ID NO: 93856 - DNA, 80 bp, synthetic construct
  source 1..80: mol_type = other DNA
cctcaacaggctcaacataaacccggtgaaactctcatctgggtacaaagacattgtattatggtttagcttcggggcat

SEQ ID NO: 93857 - DNA, 80 bp, synthetic construct
  source 1..80: mol_type = other DNA
ccctggacagactctgcatgaaaggtcggaactacaaggatctgggtggttgtcatccgataggaatgttgctcgggact

SEQ ID NO: 93858 - DNA, 80 bp, synthetic construct
  source 1..80: mol_type = other DNA
catgctttctgattttggctgtaattatggggcttgttttcttttgtctaaaaaatggaaacatgcgatgcacaatctgt

SEQ ID NO: 93859 - DNA, 80 bp, synthetic construct
  source 1..80: mol_type = other DNA
cccgcatgtgacttgcatctcaccggaacatgggacactttaatagaaagagaaaactccattgcctattgttacccagg

SEQ ID NO: 93860 - DNA, 80 bp, synthetic construct
  source 1..80: mol_type = other DNA
tgcgaccgtgaatgaggaagcactcagacaaaaggtcatggagagcggaggagttgacaagataagcacggggttcacat

SEQ ID NO: 93861 - DNA, 80 bp, synthetic construct
  source 1..80: mol_type = other DNA
acggatcaaacatcaactctgctggaactaccaaagcatgcatgagaaacggagcaaacagcttctatgcagaattaaag

SEQ ID NO: 93862 - DNA, 80 bp, synthetic construct
  source 1..80: mol_type = other DNA
tggctggtatcaaagaccaagggacagaactttccatcaacaacaaacacatacaggaacacggactcagtagagcacct

SEQ ID NO: 93863 - DNA, 80 bp, synthetic construct
  source 1..80: mol_type = other DNA
cgtaatttggggaatccaccatccctctagtccacaagaaaagaatgatctatacggaactcagtcactctctatatcag

SEQ ID NO: 93864 - DNA, 80 bp, synthetic construct
  source 1..80: mol_type = other DNA
taggaagctccacctaccagaacaactttgtacctgtggtggaggcacgaccacaagtaaatggtcaaagtgggcggatt

SEQ ID NO: 93865 - DNA, 80 bp, synthetic construct
  source 1..80: mol_type = other DNA
gacttccattggacattagtgcaaccaggtgacaacatcaccttctcacacaatggtgggctcattgctcctagtagggt

SEQ ID NO: 93866 - DNA, 80 bp, synthetic construct
  source 1..80: mol_type = other DNA
tcccaatggcaccattgtaagaactctaacaaatgagagagaagaggtaacaaatgcaacggagacaattgaaagccaga

SEQ ID NO: 93867 - DNA, 80 bp, synthetic construct
  source 1..80: mol_type = other DNA
gagtaaattgaaggggagaggcctaggcattcaatcaggatctcaagtagataataattgtgagtcaaagtgcttctgga

SEQ ID NO: 93868 - DNA, 80 bp, synthetic construct
  source 1..80: mol_type = other DNA
aaggcgggtctatcagcactaaacttccctttcaaaatttgtcacctagaaccgttggtcagtgtcccaaatatgtaaac

SEQ ID NO: 93869 - DNA, 80 bp, synthetic construct
  source 1..80: mol_type = other DNA
aagaagagcctgctgcttgcaacgggaatgaggaacgttcctgaaatcattcatgaaagaggcctgtttggagcaatagc

SEQ ID NO: 93870 - DNA, 80 bp, synthetic construct
  source 1..80: mol_type = other DNA
atgaatccaaatcagaaattatttgcactatctggtgtggcgatagcactgagtattgtaaacctgctaatagggatatc

SEQ ID NO: 93871 - DNA, 80 bp, synthetic construct
  source 1..80: mol_type = other DNA
ggtcaaaggatttgggtttttgaatggtggcagcacatggctaggccgcacaataagtcctcgatccaggagtggctttg

SEQ ID NO: 93872 - DNA, 80 bp, synthetic construct
  source 1..80: mol_type = other DNA
agatgttgaagatacccaatgctgaaaccgatccaaattcgaaaatcaccgagaggcaagaaatcgttgacaataacaac

SEQ ID NO: 93873 - DNA, 80 bp, synthetic construct
  source 1..80: mol_type = other DNA
tggtcagggtattcagggagtttcatagattactgggatgacagtaatgattgctataatccctgtttctatgttgaatt

SEQ ID NO: 93874 - DNA, 80 bp, synthetic construct
  source 1..80: mol_type = other DNA
aataagaggaagacctgaagaggccaaatatgtctggtggacaagcaacagcttagttgcactgtgtggaagcccagtcc

SEQ ID NO: 93875 - DNA, 80 bp, synthetic construct
  source 1..80: mol_type = other DNA
tagttgcactgtgtggaagcccagtcccagttgggtccggttctttccccgacggggcacagatccaatacttttcgtaa

SEQ ID NO: 93876 - DNA, 80 bp, synthetic construct
  source 1..80: mol_type = other DNA
aaaacaacacaaccttaattgagaacacatacgtcaacaatactactgtcatcaacagggagacagatgcaaaggggcaa

SEQ ID NO: 93877 - DNA, 80 bp, synthetic construct
  source 1..80: mol_type = other DNA
caatacctgatgctaaataaaagcctgtgtaaggttgaagggtgggtagtggtagccaaagacaatgcaataagatttgg

SEQ ID NO: 93878 - DNA, 80 bp, synthetic construct
  source 1..80: mol_type = other DNA
ggagaatgagcagataattgtaacaagggagccatatgtgtcatgtgacccaactgggtgcagaatgtatgcattacacc

SEQ ID NO: 93879 - DNA, 80 bp, synthetic construct
  source 1..80: mol_type = other DNA
aagggactactattaggaacaagcattcaaatggcaccgtacacgacagaacagcctttagaggtttaatatcaacccct

SEQ ID NO: 93880 - DNA, 80 bp, synthetic construct
  source 1..80: mol_type = other DNA
ttggggagcccccctgtaatcagcaatagtgacttcctttgtgttgggtggtctagcacaagttgccatgatggcatagg

SEQ ID NO: 93881 - DNA, 80 bp, synthetic construct
  source 1..80: mol_type = other DNA
tagaatgacaatttgtgtacaggggaataacgataatgcaacggccacagtctattacgaaagaaagctaacaacaacaa

SEQ ID NO: 93882 - DNA, 80 bp, synthetic construct
  source 1..80: mol_type = other DNA
taaagacgtgggcaaagaacatccttagaacgcaggagtcagaatgtgtgtgccataatggaacgtgtgtggtggtgatg

SEQ ID NO: 93883 - DNA, 80 bp, synthetic construct
  source 1..80: mol_type = other DNA
accgatggctcagcaaatagccaggcagacacaaggattatgtatttccgtaaagggagaataattaaagaggaaaacct

SEQ ID NO: 93884 - DNA, 80 bp, synthetic construct
  source 1..80: mol_type = other DNA
caatgtgggattgaatgtttcattgcatatgagagccaatgacgatcaagataagaattggacctgcacaagcataacac

SEQ ID NO: 93885 - DNA, 80 bp, synthetic construct
  source 1..80: mol_type = other DNA
aaagggctcagcgagacatatagaggagtgctcttgctatggacacaacgcaaaagtcacatgcgtgtgcagggacaact

SEQ ID NO: 93886 - DNA, 80 bp, synthetic construct
  source 1..80: mol_type = other DNA
ggcaaggggcaaataggccagtgattgacataaacatggagtccatggatcatacaagccagtatctgtgtactggagtt

SEQ ID NO: 93887 - DNA, 80 bp, synthetic construct
  source 1..80: mol_type = other DNA
ctcactgacaccagtagaccgtcagataaactaaccggagattgtcgcaacccaatcactggtagtccaggagccccagg

SEQ ID NO: 93888 - DNA, 80 bp, synthetic construct
  source 1..80: mol_type = other DNA
tattcgttaaagaggggaagattactcatattagcccgttgtcagggagcgctcagcatatagaggagtgttcctgttac

SEQ ID NO: 93889 - DNA, 80 bp, synthetic construct
  source 1..80: mol_type = other DNA
atgaacacaaatcaaagaataataaccattgggacagcttgtatgataattggaataattagtctattggtgcagatagg

SEQ ID NO: 93890 - DNA, 80 bp, synthetic construct
  source 1..80: mol_type = other DNA
ctgaaactgatagtaatttctctaagaaacaggatattatatcactaactgattggtcaggatacagtgggagttttgtc

SEQ ID NO: 93891 - DNA, 80 bp, synthetic construct
  source 1..80: mol_type = other DNA
ttacatatgtaaataacacatgggtgaaccgaacttttgtaaatattagcaataccaacattgctactgtgcaggatgtg

SEQ ID NO: 93892 - DNA, 80 bp, synthetic construct
  source 1..80: mol_type = other DNA
aaacatagtatcgttgtgggttagccattcaattcagatcggagggaaaaatcacactaatatgtgcagccaaaatgtca

SEQ ID NO: 93893 - DNA, 80 bp, synthetic construct
  source 1..80: mol_type = other DNA
acaaaatggtccccaggagataactctgcaaaattccgaagattcacccaggcattacatgatggtctacgagatgacaa

SEQ ID NO: 93894 - DNA, 80 bp, synthetic construct
  source 1..80: mol_type = other DNA
acccggaattggactgcttctttgaatttgcacaccattctgacgatgcattgtttatctatggttatcttgaacctact

SEQ ID NO: 93895 - DNA, 80 bp, synthetic construct
  source 1..80: mol_type = other DNA
acccagaattagactgcttttttgagttcgcacaccattctgatgatgcattgtttatttatggctatcttgaacctact

SEQ ID NO: 93896 - DNA, 80 bp, synthetic construct
  source 1..80: mol_type = other DNA
ctacatgatggtttacgagatgacaaactgaaaaggtgtgtagtggatgctttgcggaacatatacgagactgatttttt

SEQ ID NO: 93897 - DNA, 80 bp, synthetic construct
  source 1..80: mol_type = other DNA
ttacatgatggtttacgagatgataaattaaaaaggtgtgtagtggatgccttgcggaatatatatgaaactgatttttt

SEQ ID NO: 93898 - DNA, 80 bp, synthetic construct
  source 1..80: mol_type = other DNA
atagcagtagtaatagcatttatagtagcaataatatcagcaataattgtgtggactgtagcatatgtagattataagaa

SEQ ID NO: 93899 - DNA, 80 bp, synthetic construct
  source 1..80: mol_type = other DNA
agtgttacggcaaagaagaattaataggttatatggaagaataatagaaagagcagacgacagcggcaatgagagtgagg

SEQ ID NO: 93900 - DNA, 80 bp, synthetic construct
  source 1..80: mol_type = other DNA
acagcttcttattacaccccagctgtcagcatggaatggaggacgacgacagagaagtgctggtcaggagatttgacagc

SEQ ID NO: 93901 - DNA, 80 bp, synthetic construct
  source 1..80: mol_type = other DNA
ttctacaaagactgagagaatctgttgacagcggagagcatacgtgctgactacagagagatctctacaacgtggagcgt

SEQ ID NO: 93902 - DNA, 80 bp, synthetic construct
  source 1..80: mol_type = other DNA
cagaagcttctaaggggactttgctgacacagaagaatctaagagggactttccgctggggacttccagagggcgtccag

SEQ ID NO: 93903 - DNA, 80 bp, synthetic construct
  source 1..80: mol_type = other DNA
ttccatcgtgtattgcggctcgcgcattacgtttgacggccactgtggaacttgtcgccagcccaggccgacttgagtgc

SEQ ID NO: 93904 - DNA, 80 bp, synthetic construct
  source 1..80: mol_type = other DNA
ggcaccccctcatctgttggtgatgcttgggcgcccccgccgccctctgaggggtcggtggttgccctgccacccgaacc

SEQ ID NO: 93905 - DNA, 80 bp, synthetic construct
  source 1..80: mol_type = other DNA
cccggccagtaagcccacttgcccgtctaatcttatcacacctagacccccagctcgtaagctacccacactaccacctg

SEQ ID NO: 93906 - DNA, 80 bp, synthetic construct
  source 1..80: mol_type = other DNA
agattgctgacacagaagaatctaaaggggactttccactggggactttccggagggcgggccagagggcggactgggag

SEQ ID NO: 93907 - DNA, 80 bp, synthetic construct
  source 1..80: mol_type = other DNA
atgcacgcattgatttcgaatctggaaggattaagaaagaagagtttgctgagatcatgaagatctgttccaccattgaa

SEQ ID NO: 93908 - DNA, 80 bp, synthetic construct
  source 1..80: mol_type = other DNA
caaatacaaacaattcaaataataaagtgaagagggcatcgggttccaatgcaggaaaagatgggaaaggatgtttcgag

SEQ ID NO: 93909 - DNA, 80 bp, synthetic construct
  source 1..80: mol_type = other DNA
ctataccacaaatgtgatgaccagagcatggagacaattcggaacgggacctacaactggaggaagtatcaagaggagtc

SEQ ID NO: 93910 - DNA, 80 bp, synthetic construct
  source 1..80: mol_type = other DNA
ttgtgattgcaatggggtctgctgccttcttgttctgggccatgcacaaggggtatagcagatgcgtcatttgtatataa

SEQ ID NO: 93911 - DNA, 80 bp, synthetic construct
  source 1..80: mol_type = other DNA
ttgtgaatcagttggtagtgccccacaaaaaactcttacaaaaatgagagacaatatgcctaggatcctcggtgcggtgg

SEQ ID NO: 93912 - DNA, 80 bp, synthetic construct
  source 1..80: mol_type = other DNA
cgccccccggggggcaggcagcttggctctactcaatgtcctcaacacacttctctggcccaaacaactctgagcatgtc

SEQ ID NO: 93913 - DNA, 80 bp, synthetic construct
  source 1..80: mol_type = other DNA
caggcagcttggctctactcaatgtcctcaacacacttctctggcccaaacaactctgagcatgtccttccctttagtct

SEQ ID NO: 93914 - DNA, 80 bp, synthetic construct
  source 1..80: mol_type = other DNA
cttgtaggtcaattaatggcgccctacaaaagctcctacagaaatgagagacaatatgcctaggatcctcggtgcgtggt

SEQ ID NO: 93915 - DNA, 80 bp, synthetic construct
  source 1..80: mol_type = other DNA
ggctattgtgagagtcttctgtggaacttttgaattgatacccatcccacagcatgggtggcaaacaatccaaacttcca

SEQ ID NO: 93916 - DNA, 80 bp, synthetic construct
  source 1..80: mol_type = other DNA
tccaccgcaccgaggatcctaggcatttcaggctttcttctttgaaatgcttttaaagtttaactgagagcctctttgag

SEQ ID NO: 93917 - DNA, 80 bp, synthetic construct
  source 1..80: mol_type = other DNA
tctaagacaaccttgtctaagtcatttattgaaggttgatcatctgctgtaaggtgtgagttctgttttacaggctcttt

SEQ ID NO: 93918 - DNA, 80 bp, synthetic construct
  source 1..80: mol_type = other DNA
tcaaccctcaacacttttctccaatttgaatctttgtgcagcagaattctccaggaagcttcactcaatgtcttctatcg

SEQ ID NO: 93919 - DNA, 80 bp, synthetic construct
  source 1..80: mol_type = other DNA
caacaaagaccttgtgagtttgaatagcaagaactcagtctctgtaattaatttctctttcaacttgtcaactagttcct

SEQ ID NO: 93920 - DNA, 80 bp, synthetic construct
  source 1..80: mol_type = other DNA
accctgctccccaggtcagctcctcacatgtcctacccttgagtctcattcttccactgcttgattgtatcatcactctt

SEQ ID NO: 93921 - DNA, 80 bp, synthetic construct
  source 1..80: mol_type = other DNA
ccttgaattcaacccaatcatccattgccttcaacaattcggcaagaacaatcacaccgcaatcaggcatggtctttgcg

SEQ ID NO: 93922 - DNA, 80 bp, synthetic construct
  source 1..80: mol_type = other DNA
cattgtcagctaaatactttgccactaggtctttggccatggcaatctcatcctccattcgcctcgctgtgcttgccccc

SEQ ID NO: 93923 - DNA, 80 bp, synthetic construct
  source 1..80: mol_type = other DNA
gcctgttttagtagctttctgggttaaagcatccagtcaaaatgggtaacagacaggccaagccagccaaagccactgag

SEQ ID NO: 93924 - DNA, 80 bp, synthetic construct
  source 1..80: mol_type = other DNA
aggcaggtaaagattcaatgcctagaagcttaaacaaattctgtagtgaccttgtgtgttcacctgataagtagttggtg

SEQ ID NO: 93925 - DNA, 80 bp, synthetic construct
  source 1..80: mol_type = other DNA
tcaactgaggcaccccaagacacagcgcccccaccatacaccccgtaagccccgaaaccacaccctcaccctcacaaccc

SEQ ID NO: 93926 - DNA, 80 bp, synthetic construct
  source 1..80: mol_type = other DNA
agcgcccccaccatacaccccgtaagccccgaaaccacaccctcaccctcacaacccacccgccaccctcgggaggaccc

SEQ ID NO: 93927 - DNA, 80 bp, synthetic construct
  source 1..80: mol_type = other DNA
tccaccgggggcccaccgggggggcagacaacccagctctaatcaatgtcctcaacacacctctctggcccaaatagctc

SEQ ID NO: 93928 - DNA, 80 bp, synthetic construct
  source 1..80: mol_type = other DNA
gggcagacaacccagctctaatcaatgtcctcaacacacctctctggcccaaatagctctgaacatgttcttcccttcaa

SEQ ID NO: 93929 - DNA, 80 bp, synthetic construct
  source 1..80: mol_type = other DNA
tgcactgtcaatgtcattacttcctcttttagaacccaaaacaaggttgctcattgcttgctgtattttgtaatcatagt

SEQ ID NO: 93930 - DNA, 80 bp, synthetic construct
  source 1..80: mol_type = other DNA
tttttcgcgttatagaccatttcagtgagctcctcctctgatgcatcatcttttggattcacactaacatgtccaaattc

SEQ ID NO: 93931 - DNA, 80 bp, synthetic construct
  source 1..80: mol_type = other DNA
taggatgtgttagtatcaaaactaagatcatcttggtcagtaacctaatatttattagctgttcagacaactctgtgcac

SEQ ID NO: 93932 - DNA, 80 bp, synthetic construct
  source 1..80: mol_type = other DNA
gttcatggttccgttctcccttgagtggtagagcttctaggcctttgcctttagtcctctttctactatccatccacctt

SEQ ID NO: 93933 - DNA, 80 bp, synthetic construct
  source 1..80: mol_type = other DNA
attggcaatgtcttcctccattattaagtgtaacactcaagttgagttgaagtttaagtttgaatgatctgcagatcaat

SEQ ID NO: 93934 - DNA, 80 bp, synthetic construct
  source 1..80: mol_type = other DNA
attttggcgaagtcaaactcggcaaactgtagcttttcttgatcaacaactaacttcataggtacaacatctcctaactg

SEQ ID NO: 93935 - DNA, 80 bp, synthetic construct
  source 1..80: mol_type = other DNA
tactaggctgttgtgagtgtcttctgtggaacccctgagtgagactcatcccacaacatgggtggcagacaatccaggcc

SEQ ID NO: 93936 - DNA, 80 bp, synthetic construct
  source 1..80: mol_type = other DNA
gactaccttgtccaaatcatttattgaaggctgatcacctgccgcaagatgtgagttttgttttacaggctctctatact

SEQ ID NO: 93937 - DNA, 80 bp, synthetic construct
  source 1..80: mol_type = other DNA
ccgagtcagcctccaacattccttcccaatctagaaccctgcacagcaagattccttgagaagtctcaatcgatatcctc

SEQ ID NO: 93938 - DNA, 80 bp, synthetic construct
  source 1..80: mol_type = other DNA
caccagtcttgttccccaagttagctcctcacatgttctacccttgagcctcattcttccactgcttgactgtatcatca

SEQ ID NO: 93939 - DNA, 80 bp, synthetic construct
  source 1..80: mol_type = other DNA
tgtggatcttttatcctccaagtctgcataaaggaaccttaaaattggtgaggctcttttgaactggtgagacaattgtt

SEQ ID NO: 93940 - DNA, 80 bp, synthetic construct
  source 1..80: mol_type = other DNA
ctatgctatcctcattatcaatcccctcatcagtatataaaccattgaactcatgcattagctcctcctgatccactcta

SEQ ID NO: 93941 - DNA, 80 bp, synthetic construct
  source 1..80: mol_type = other DNA
ttgtcagctaggtacttcgccactaggtctttggcgatagcaatctcatcttccatttgctttgttgtgcttgccccccc

SEQ ID NO: 93942 - DNA, 80 bp, synthetic construct
  source 1..80: mol_type = other DNA
cgcaccggggatcctaggcaatttgtaagacttctgtgtggagcttttgagtcaaaaacctatcccacaggatgggtggc

SEQ ID NO: 93943 - DNA, 80 bp, synthetic construct
  source 1..80: mol_type = other DNA
ggggatcctcttttataagtgggtccagacaacactaacctccaacaatctggcaagacacatgagttcactctaccaga

SEQ ID NO: 93944 - DNA, 80 bp, synthetic construct
  source 1..80: mol_type = other DNA
gtacatgacattgacattgtcgaccatatacttccctcgctggctcactgaaccactaaactctaggtgaatagagaagc

SEQ ID NO: 93945 - DNA, 80 bp, synthetic construct
  source 1..80: mol_type = other DNA
tttccttaaaactagcctcttgacttttgatctggaatctaatagtttgattcaactttgtagatccaggtgataatgca

SEQ ID NO: 93946 - DNA, 80 bp, synthetic construct
  source 1..80: mol_type = other DNA
gctacagattcaaagaagtcttccagtgactcccctttaaaattgaccagtcccgatgcaaccagctggttttggttgag

SEQ ID NO: 93947 - DNA, 80 bp, synthetic construct
  source 1..80: mol_type = other DNA
ccttgctggttcgatatcataatcaatccatgcataccccatcatcaaatcatatttgaacattggtctctccactcctt

SEQ ID NO: 93948 - DNA, 80 bp, synthetic construct
  source 1..80: mol_type = other DNA
tgtgaatgaccttctccacgaatgaagagaatggccccagtctctgcaggccttcaccttctggaacagatgttttgtgc

SEQ ID NO: 93949 - DNA, 80 bp, synthetic construct
  source 1..80: mol_type = other DNA
gctcatgtgttctgctgtgggatactcgcaattcagatgacagcacaatatagtgttcttctcgtttccatttaactatg

SEQ ID NO: 93950 - DNA, 80 bp, synthetic construct
  source 1..80: mol_type = other DNA
tttattctgggcgaccacttcattttagtggaagccagatcgctcataaaaggtaagatatgtttttcgaatgtggcagg

SEQ ID NO: 93951 - DNA, 80 bp, synthetic construct
  source 1..80: mol_type = other DNA
atataatctcctaagagaatggatgatgtgactcacacctaccctgtcctccaacaacttagatgcagtaggcttcagtg

SEQ ID NO: 93952 - DNA, 80 bp, synthetic construct
  source 1..80: mol_type = other DNA
ggaaataatcacacggattgtgcctaaaaaactgtactggacttggctctttcggttcccccaagacccaggctcccaac

SEQ ID NO: 93953 - DNA, 80 bp, synthetic construct
  source 1..80: mol_type = other DNA
tcaattgctgttgacagagaaatgcacatgtagtcccacaataaaggtcgaaagtaaccagccacatctgcaaactcttg

SEQ ID NO: 93954 - DNA, 80 bp, synthetic construct
  source 1..80: mol_type = other DNA
tctcaccttcagagggactctccagaactggactccgtgttcacccaccaatgcctcaatttcttggatgtctgtaattg

SEQ ID NO: 93955 - DNA, 80 bp, synthetic construct
  source 1..80: mol_type = other DNA
acgaatccagacgcaatcgagctttgaaatgcagatttgttgattgcttcagataggagtttttgtgcacccctagtgaa

SEQ ID NO: 93956 - DNA, 80 bp, synthetic construct
  source 1..80: mol_type = other DNA
tgattttctgtctaagcaccattctcagtgggtggtaagctgtcagattcaaccaacagtattctaagtcagaatcagac

SEQ ID NO: 93957 - DNA, 80 bp, synthetic construct
  source 1..80: mol_type = other DNA
aaaggctcaacacccatcatatcgcaaaggttctttagcgaagatgaatgctcatttgaaaggtaattggttgtgaactc

SEQ ID NO: 93958 - DNA, 80 bp, synthetic construct
  source 1..80: mol_type = other DNA
ttcatgaaggtcaccaaccttcagcttattaaacagttttcttagcattgatcggatctttatgcaggattcaggtatga

SEQ ID NO: 93959 - DNA, 80 bp, synthetic construct
  source 1..80: mol_type = other DNA
tgcaagatgcccctacccacaaaactcagagcatccaccagtccaacggccccctccatcacagaggccgacaccacaaa

SEQ ID NO: 93960 - DNA, 80 bp, synthetic construct
  source 1..80: mol_type = other DNA
gcctttcaatttgtctcatgattctgtatgaacgattgccgtcaacccaatctctcacgtcagtcccacaattcaagagg

SEQ ID NO: 93961 - DNA, 80 bp, synthetic construct
  source 1..80: mol_type = other DNA
aatgggtcaatcgggtatctagcatattgcagcagtgacaacgttctcaattggatcaagttgcacaaggacacaggtac

SEQ ID NO: 93962 - DNA, 80 bp, synthetic construct
  source 1..80: mol_type = other DNA
cccatttgcaactgactgatcaataattgtgtcgattgtttctgctaattgatgtggttctttacactttatgttgtgga

SEQ ID NO: 93963 - DNA, 80 bp, synthetic construct
  source 1..80: mol_type = other DNA
ttttgggactcacgaatttgttaagctgatcactcatgtaaaagtgaaattctaacagcattttgaattcatctgggtct

SEQ ID NO: 93964 - DNA, 80 bp, synthetic construct
  source 1..80: mol_type = other DNA
cgtgacatcagttctgttaaattttgatcgaatagagatatttggtcatcactagatgtgtaggcatcgatcatccctcc

SEQ ID NO: 93965 - DNA, 80 bp, synthetic construct
  source 1..80: mol_type = other DNA
acaaacactccctatagcatgattgatgaacctctcagagatgagcgcatagaaatctgaagtgttatgtagaatgcctt

SEQ ID NO: 93966 - DNA, 80 bp, synthetic construct
  source 1..80: mol_type = other DNA
gtcccatgtccaaaatggaactaatgtgagaaggtactaggcccatttggaagttagagtagaaaaagtcttcggtgata

SEQ ID NO: 93967 - DNA, 80 bp, synthetic construct
  source 1..80: mol_type = other DNA
gtttgtgaagtattggtccttaaacctagttgtgctttgatgaaggacttcatcattgctgacacgacattgaatggtat

SEQ ID NO: 93968 - DNA, 80 bp, synthetic construct
  source 1..80: mol_type = other DNA
ttctaccatcttatgcatgtgccatgttagaagagttgagaggtaatcacgccctctaatatccgcttgcaaatcctttg

SEQ ID NO: 93969 - DNA, 80 bp, synthetic construct
  source 1..80: mol_type = other DNA
acaacacaaccaaattttgcagtattgtaaggaataagaagggacacatcataggaccccacttactatgatccatgctg

SEQ ID NO: 93970 - DNA, 80 bp, synthetic construct
  source 1..80: mol_type = other DNA
tgaggcagctcccagacaattgctggcttagtgcttcaaaataatcctcaatcagcctagtgaacatttttgttcttaaa

SEQ ID NO: 93971 - DNA, 80 bp, synthetic construct
  source 1..80: mol_type = other DNA
tcccctatatagagctccctgttgcccccaacctgttccttgtaagatagggaaaattttagtcttcctgtgtcaggccc

SEQ ID NO: 93972 - DNA, 80 bp, synthetic construct
  source 1..80: mol_type = other DNA
agttgagttgtaagattgtggtgattcctgactgtaaaagcacagattttttaacattgctgtggtgcaatttgtcagag

SEQ ID NO: 93973 - DNA, 80 bp, synthetic construct
  source 1..80: mol_type = other DNA
cagagccttactaagggcttccgaattactctctctttcactgattctcacatcatcagaaagtttgttggtatcaaatt

SEQ ID NO: 93974 - DNA, 80 bp, synthetic construct
  source 1..80: mol_type = other DNA
tgaaatttaagcacttggatctgtagtgggaatatttgcccataagcttgtttccattcatcagcaatagtattgactta

SEQ ID NO: 93975 - DNA, 80 bp, synthetic construct
  source 1..80: mol_type = other DNA
aagcactgaaaaaactcatggtcaaggtatgttcttgtggccacagcttttgtaagctcaccgataggacagcctgtcat

SEQ ID NO: 93976 - DNA, 80 bp, synthetic construct
  source 1..80: mol_type = other DNA
cagaaaatttttataaagaattttgtgatactctctataatgattgtggcatgaaagagaagtacttttactgtggtcct

SEQ ID NO: 93977 - DNA, 80 bp, synthetic construct
  source 1..80: mol_type = other DNA
gtaaaatttcaaaatcaaaatcctcaatcatatggtgtgagagctctcctttaatcaatcttatataaaacttattggaa

SEQ ID NO: 93978 - DNA, 80 bp, synthetic construct
  source 1..80: mol_type = other DNA
ataactctatctaaatcatttattgaaggttgattacctgtcacaggatgtgagctttgtctcacaggttccttatactg

SEQ ID NO: 93979 - DNA, 80 bp, synthetic construct
  source 1..80: mol_type = other DNA
atccacaatcttttcgactgtctctctcaactgatcaaagtacatcgaggctccaccatccagaagcacttcatccaagt

SEQ ID NO: 93980 - DNA, 80 bp, synthetic construct
  source 1..80: mol_type = other DNA
cagttttatcaatttctggaccccgtccttcagaacccattaccaaactgctcattgcttgttgaactttatattcataa

SEQ ID NO: 93981 - DNA, 80 bp, synthetic construct
  source 1..80: mol_type = other DNA
tcttgtttgttgagcagaaatttccctttccgagagaagacctcagtcaactgtgtgacagccagtgcagtgagcttgtt

SEQ ID NO: 93982 - DNA, 80 bp, synthetic construct
  source 1..80: mol_type = other DNA
aaaatcataattgagtactctagacccatccgtgtatttattgatgaccacactcttgttactggccaaatccaaggctg

SEQ ID NO: 93983 - DNA, 80 bp, synthetic construct
  source 1..80: mol_type = other DNA
ttgcacagccactcgtgacaatgggatccttcatctccttctttatctctttccctttaaagagagatccattattaaat

SEQ ID NO: 93984 - DNA, 80 bp, synthetic construct
  source 1..80: mol_type = other DNA
gaggatgtcaggagggagagatacttctttgacacaccaggtcttttataatttaacttcgtagcattggtgcatccttc

SEQ ID NO: 93985 - DNA, 80 bp, synthetic construct
  source 1..80: mol_type = other DNA
tttactcaaaaacttttttgcattgtaaaccatttcatccaattcttcttcagtggccttgtctgctggattcacagtga

SEQ ID NO: 93986 - DNA, 80 bp, synthetic construct
  source 1..80: mol_type = other DNA
ttataaaatggcacatgtaagaaacattcaacacgaatttgaatctgtttgtaagcatacttttaacatccttatgtagc

SEQ ID NO: 93987 - DNA, 80 bp, synthetic construct
  source 1..80: mol_type = other DNA
ccacaattggctttgtcccccaaatcagctcttcacatgtcctgcccttgagtctcattcccccgctgcttgactgtatc

SEQ ID NO: 93988 - DNA, 80 bp, synthetic construct
  source 1..80: mol_type = other DNA
actatgtttaacaggaacctcagaagcctgaatagcaggaattcagtctctgtaattaatttctccttcaatttgtcaat

SEQ ID NO: 93989 - DNA, 80 bp, synthetic construct
  source 1..80: mol_type = other DNA
cagttctctatggtagaagtcagaaacgtaagccattacaaagtaccttaagttttgcaggaatttttgacatcgtttac

SEQ ID NO: 93990 - DNA, 80 bp, synthetic construct
  source 1..80: mol_type = other DNA
ttgggtgagctaaaatcacaactagtatcatctttgtcaatgatttgatactaattaattggtctttcaactcattgcaa

SEQ ID NO: 93991 - DNA, 80 bp, synthetic construct
  source 1..80: mol_type = other DNA
tcttctatccaactcaccatggtttccacagttgcatgtaaaactttagctgagaagattgatgggaagtacctttttgg

SEQ ID NO: 93992 - DNA, 80 bp, synthetic construct
  source 1..80: mol_type = other DNA
ggtagagcaattgaaagtcaattccctccaaagaaaattcttgacagtatgcttctttgcacttcacaacttgatacctg

SEQ ID NO: 93993 - DNA, 80 bp, synthetic construct
  source 1..80: mol_type = other DNA
gctgccccgaattcattttgtcttattttcacagttgaggaggtcttcatagagttcactagggctaaacttaaagatga

SEQ ID NO: 93994 - DNA, 80 bp, synthetic construct
  source 1..80: mol_type = other DNA
aagtctttctaagtctattgaattcaaaatgtcaacagatcccaatgtatacggaaatctctcttcttgtgacttctgat

SEQ ID NO: 93995 - DNA, 80 bp, synthetic construct
  source 1..80: mol_type = other DNA
aactgattgttggggttactcctgaaatgtcaaacttaagtattgaatcataaatgtcacagtcaagcagatccatgttt

SEQ ID NO: 93996 - DNA, 80 bp, synthetic construct
  source 1..80: mol_type = other DNA
actccataatgatccacactgatgcccacagctgcaagagcagcaacagctttatccacagtcttcaaaatcactgacct

SEQ ID NO: 93997 - DNA, 80 bp, synthetic construct
  source 1..80: mol_type = other DNA
atcaccctccctttggacttgctaaaacacagagcatatcctttaaagtcagtccaatcattcattgtctccaatatctt

SEQ ID NO: 93998 - DNA, 80 bp, synthetic construct
  source 1..80: mol_type = other DNA
cagtatctcatttttgcacatcaaagtagatgttttagaaacctcaatctgttgccttctttctatccatttctttaagt

SEQ ID NO: 93999 - DNA, 80 bp, synthetic construct
  source 1..80: mol_type = other DNA
ctcgctttgttgactccagagaaactaaccgatcatttacactaatgaaacatgagccaagccacccctttggatgcttg

SEQ ID NO: 94000 - DNA, 80 bp, synthetic construct
  source 1..80: mol_type = other DNA
cccccgtgtctcacttgatcgtttatactcgcaaggagcactaaagcatcaaagaccaacagcaacttcctcctagtgtt

SEQ ID NO: 94001 - DNA, 80 bp, synthetic construct
  source 1..80: mol_type = other DNA
caaaatcctcaaagacttcaccttgtttaagaatgatctccagcactgcatttggcacccatctataattaagctttcag

SEQ ID NO: 94002 - DNA, 80 bp, synthetic construct
  source 1..80: mol_type = other DNA
actctctgttttctaagtctgcataaagaaacctcaaaattggtgagattcttttgtattgataagtaagctgttctatg

SEQ ID NO: 94003 - DNA, 80 bp, synthetic construct
  source 1..80: mol_type = other DNA
ctatccccaccagcaatcccctcatcagtatacaaatcattgaacttttgcatcagttcctcttgatccactctgatgaa

SEQ ID NO: 94004 - DNA, 80 bp, synthetic construct
  source 1..80: mol_type = other DNA
ctggcactctatctctccctgccttattctgttcctgaatacttggtactcttcttcaatctgcatcttcacctcatgag

SEQ ID NO: 94005 - DNA, 80 bp, synthetic construct
  source 1..80: mol_type = other DNA
ctgatggcagagggtgattatgtcctcataatgattagcacgattgtctgtcaggacgtttaagctttctacaccagata

SEQ ID NO: 94006 - DNA, 80 bp, synthetic construct
  source 1..80: mol_type = other DNA
gtctaccggatgtcatagagagagattcacaaagcctgacatactctgattcttcaaaaagagaattgctttcttgggca

SEQ ID NO: 94007 - DNA, 80 bp, synthetic construct
  source 1..80: mol_type = other DNA
aaccgtagtaatgaaaacagtgtttctcttagcttgtcattcacccagtcaggaatttgttcgttataaaacgatgttct

SEQ ID NO: 94008 - DNA, 80 bp, synthetic construct
  source 1..80: mol_type = other DNA
aacaaggacgctcataccgcagtcaggcatgatgcccatgagcaattgaacaatgtccacccctgtccactgtaccttca

SEQ ID NO: 94009 - DNA, 80 bp, synthetic construct
  source 1..80: mol_type = other DNA
tccatcaataagtgggatgagattgatttctacagatttgagatcttccttcaattgttccaactttctaaggtcttcag

SEQ ID NO: 94010 - DNA, 80 bp, synthetic construct
  source 1..80: mol_type = other DNA
tatacttttgttcaaagttggcaggtgaagatctcacaaagcattcaagcaaaatgagaacgtttccactcagtttatac

SEQ ID NO: 94011 - DNA, 80 bp, synthetic construct
  source 1..80: mol_type = other DNA
ccatcaggaacgacaaagcatagagaaggggttaagattccaaaatcatggaggatgttctcaacagatttgtcttctgt

SEQ ID NO: 94012 - DNA, 80 bp, synthetic construct
  source 1..80: mol_type = other DNA
gttatgctcacaaccatttgcattgcatgaatcaatctcaatacagagagataataactttaacccctccatgagaagca

SEQ ID NO: 94013 - DNA, 80 bp, synthetic construct
  source 1..80: mol_type = other DNA
ccgtttgaacaaggaaagcaatcttttgccttgacaacctctcattgtcagccaggtattttgccacaaggtccttggca

SEQ ID NO: 94014 - DNA, 80 bp, synthetic construct
  source 1..80: mol_type = other DNA
atggcgatctcatcttccatggcttcttaagggggcctattgtgcaaaggtctggtttaaaagaaaagaaaattttcgaa

SEQ ID NO: 94015 - DNA, 80 bp, synthetic construct
  source 1..80: mol_type = other DNA
gcaaaggtctggtttaaaagaaaagaaaattttcgaaaaatgcctcaaagaggagagcctcagatgcctaggatcctcgg

SEQ ID NO: 94016 - DNA, 80 bp, synthetic construct
  source 1..80: mol_type = other DNA
atctcagtctgtctgacatcatagcagccagagccctaatcaacatgtcacgtgaactatctttaacttctctgataaag

SEQ ID NO: 94017 - DNA, 80 bp, synthetic construct
  source 1..80: mol_type = other DNA
agacaatccaagtctccgaagaaagtggacagcccaagagccagtctgattcctgatgcctcccacatgggcccccagtt

SEQ ID NO: 94018 - DNA, 80 bp, synthetic construct
  source 1..80: mol_type = other DNA
atctcaagatcttgatcctgaatgataggtgtgaatgtggccagcctcttgtcacattcccacagtgcccctctatttac

SEQ ID NO: 94019 - DNA, 80 bp, synthetic construct
  source 1..80: mol_type = other DNA
aaccaacggaactggctccgtttgagggcccaccataacaaagtcatactctgaaaactggagtttatgcatgtcaatat

SEQ ID NO: 94020 - DNA, 80 bp, synthetic construct
  source 1..80: mol_type = other DNA
caatttcaagaggagtaacaggccctaactgccttgcatctatcaaaaattctttgatcacctcagtatccacatacaag

SEQ ID NO: 94021 - DNA, 80 bp, synthetic construct
  source 1..80: mol_type = other DNA
catatcctttaaagtcagttcaatcattcattgtctccaatatcttaacaaggacgctcacagagcagaatcagtcgatg

SEQ ID NO: 94022 - DNA, 80 bp, synthetic construct
  source 1..80: mol_type = other DNA
agtcttgttccccagaccaactcctcacatgttctgcccttgagtctcatccctccactacttgactgtatcatcactct

SEQ ID NO: 94023 - DNA, 80 bp, synthetic construct
  source 1..80: mol_type = other DNA
tctcgttgtcagccaaatattttgccactaagtctttgacggtggcaacctcatcttccatttgctttgttgtgcttgcc

SEQ ID NO: 94024 - DNA, 80 bp, synthetic construct
  source 1..80: mol_type = other DNA
aagaaggtggacagcccaagggccagcttgattcctgatgcttcccacttgggtccccaattttgcaaaagctgctggtt

SEQ ID NO: 94025 - DNA, 80 bp, synthetic construct
  source 1..80: mol_type = other DNA
ctagcgacctccaccggggatcctaggcaatttgtgtgacttttgtgtagagccttttaaccaaaacccatcctacagca

SEQ ID NO: 94026 - DNA, 80 bp, synthetic construct
  source 1..80: mol_type = other DNA
agccctccaccgtacagcccctaaatcacccagagtccccaccacctcctccctccagcccctaaatcacccagatgtgg

SEQ ID NO: 94027 - DNA, 80 bp, synthetic construct
  source 1..80: mol_type = other DNA
aatgattttatctaaatcatttattgaaggttgatcgcctgtcgcaaattgtgagttttgtcttacaggctccttatact

SEQ ID NO: 94028 - DNA, 80 bp, synthetic construct
  source 1..80: mol_type = other DNA
agcaaatccaaagggaaggtaatgatacaatcaagcagtgggggaatgagactcaagggtaggacatgtgaagagctggc

SEQ ID NO: 94029 - DNA, 80 bp, synthetic construct
  source 1..80: mol_type = other DNA
tcaagattctcaaagactttaccttatttagaaatgatctccaacattgcatctggcacccatcaaaacccggactttca

SEQ ID NO: 94030 - DNA, 80 bp, synthetic construct
  source 1..80: mol_type = other DNA
gactccttgtcccctaagtctgcataaagaaacctcagaactggtgaggctcttttgtattgatagatgagctgttctac

SEQ ID NO: 94031 - DNA, 80 bp, synthetic construct
  source 1..80: mol_type = other DNA
actatcctcatcaacaactccttcatcagcatacaaatcattgaacttttgcattaatacctcttgatccactctgacga

SEQ ID NO: 94032 - DNA, 80 bp, synthetic construct
  source 1..80: mol_type = other DNA
cgacggcaatctcgtcttccatgacttttgggagagcctatcgtgcaagggctcaaattggagaggtaatgcggaagctg

SEQ ID NO: 94033 - DNA, 80 bp, synthetic construct
  source 1..80: mol_type = other DNA
atgacttttgggagagcctatcgtgcaagggctcaaattggagaggtaatgcggaagctgacccaggctagtggaggtcg

SEQ ID NO: 94034 - DNA, 80 bp, synthetic construct
  source 1..80: mol_type = other DNA
ccccctaaagcgcgcgcgcgcgcaccggggatcctaggcaatttttgtgagacttttgtgtggagcttttgagctgaaac

SEQ ID NO: 94035 - DNA, 80 bp, synthetic construct
  source 1..80: mol_type = other DNA
agccctccaccatacagcccctaaaccatccagaaccctcaccatccctccaatccaacggcccccttccccccggtgtg

SEQ ID NO: 94036 - DNA, 80 bp, synthetic construct
  source 1..80: mol_type = other DNA
accccccgccgggggcccccccggggcaagcagaacagaatcagtcgatgtcttcaattggctttgtcccccaaaccagc

SEQ ID NO: 94037 - DNA, 80 bp, synthetic construct
  source 1..80: mol_type = other DNA
tgacaacctctcattgtcagccaagtattttgccactaggtccttggcaatggcaatctcatcttccatggcttcctggg

SEQ ID NO: 94038 - DNA, 80 bp, synthetic construct
  source 1..80: mol_type = other DNA
aatggcaatctcatcttccatggcttcctgggggggcctgttgcacaggggtctggtttaaaggaaagattttcgtaaag

SEQ ID NO: 94039 - DNA, 80 bp, synthetic construct
  source 1..80: mol_type = other DNA
ctcaatcgatcttgtttcccaagttagctcctcacatgttctacccttgagcctcatttttccactgcttgactgtatca

SEQ ID NO: 94040 - DNA, 80 bp, synthetic construct
  source 1..80: mol_type = other DNA
tcaacagctcggcaagaacagtcatgccgcagtcaggcaaggtttttgtaaataattggacaatatccacccctgtccat

SEQ ID NO: 94041 - DNA, 80 bp, synthetic construct
  source 1..80: mol_type = other DNA
attcttaaagatttcaccttatttaggaacgatctccaacattgcatttggcatccatctacagtaggacctacgggtct

SEQ ID NO: 94042 - DNA, 80 bp, synthetic construct
  source 1..80: mol_type = other DNA
cttcattatcaatcccctcatcagtatataaaccattgaactcacgcattaactcctcttgatccactctaatgaactga

SEQ ID NO: 94043 - DNA, 80 bp, synthetic construct
  source 1..80: mol_type = other DNA
cgatggcaatctcatcttccatggttccccagaggatgctgctgcgcaaggctttttggattggggaggagcgttggagg

SEQ ID NO: 94044 - DNA, 80 bp, synthetic construct
  source 1..80: mol_type = other DNA
aggagcgttggaggctaactcaagagagctctcggtgaagccttaaaagtatctcaaaagaaagaaagcctgaaatgcct

SEQ ID NO: 94045 - DNA, 80 bp, synthetic construct
  source 1..80: mol_type = other DNA
cgccgggagcccccccggggggggcaaacacagcgagggaatcaatcaatgtcttcaattggccttgcctcgcagaccag

SEQ ID NO: 94046 - DNA, 80 bp, synthetic construct
  source 1..80: mol_type = other DNA
gaacaaccttgtccaggtcacttaatgagggttggccactcatcatagaatgttggctttgttttacaggttctttgtac

SEQ ID NO: 94047 - DNA, 80 bp, synthetic construct
  source 1..80: mol_type = other DNA
gcaaacacagcgagggaatcaatcaatgtcttcaattggccttgcctcgcagaccagctcctcacacgttctgcccttaa

SEQ ID NO: 94048 - DNA, 80 bp, synthetic construct
  source 1..80: mol_type = other DNA
gagctaaaattaaaatgagtatcatctttgtcaatgacttaatgtcgaccaattgttctttcagctcactacaatcctct

SEQ ID NO: 94049 - DNA, 80 bp, synthetic construct
  source 1..80: mol_type = other DNA
tcaagtccttgcccttgtgccttatctggtcgttcatacttgcaaggagtattaatgtatcaaagaccaacattaacttt

SEQ ID NO: 94050 - DNA, 80 bp, synthetic construct
  source 1..80: mol_type = other DNA
ccatggtttcctggacggggcagatgttctggagtcgagctgaggctgtgtgtggtctgtctggatgggccttcagcgtg

SEQ ID NO: 94051 - DNA, 80 bp, synthetic construct
  source 1..80: mol_type = other DNA
atttaactaaacttcagtgaacacttcttgccctgtgtgcctcagcatagagagtggttagtccagaatgggcagcaaac

SEQ ID NO: 94052 - DNA, 80 bp, synthetic construct
  source 1..80: mol_type = other DNA
gatgacttgcctttgaaagtcggacctgacagagcaagcctccagcaatcaggtaagacacatgggctcacagacccaga

SEQ ID NO: 94053 - DNA, 80 bp, synthetic construct
  source 1..80: mol_type = other DNA
atatagtgcttgtacatcatccactacaaactcaccagactgattgataaagcccaccatgttgagatggatggaaaagg

SEQ ID NO: 94054 - DNA, 80 bp, synthetic construct
  source 1..80: mol_type = other DNA
tttctttgaagttagcatcctgactcttaattctgtatctgactgtctgagaaaactgtacagatccagctgacattgtg

SEQ ID NO: 94055 - DNA, 80 bp, synthetic construct
  source 1..80: mol_type = other DNA
cttagcaagtcaaggaagtcttcaagagactccaatcttgactcctctgtcaagcctgaagcaataagttgattgaagtt

SEQ ID NO: 94056 - DNA, 80 bp, synthetic construct
  source 1..80: mol_type = other DNA
caacctggctggctcaatatcaaagtctatccatgcatagcccatcattaagtcaaacttgaacatgggcctctctatcc

SEQ ID NO: 94057 - DNA, 80 bp, synthetic construct
  source 1..80: mol_type = other DNA
ctttgtagatggccttctccacaaatgaagaaaaggggcccagtcgctgcagaccttcaccttctggtattgaggtttta

SEQ ID NO: 94058 - DNA, 80 bp, synthetic construct
  source 1..80: mol_type = other DNA
tgagggaaccaagtgaatgaccccaaggtccttgtcgtggccacaaaggagcggacatatgattcaaagtagacctgtct

SEQ ID NO: 94059 - DNA, 80 bp, synthetic construct
  source 1..80: mol_type = other DNA
aaaagttgctggtttgagaacaagggactggtggaatgcaacaatcactacctgtgtcttaattgcctaagtttacttct

SEQ ID NO: 94060 - DNA, 80 bp, synthetic construct
  source 1..80: mol_type = other DNA
catgaaattatctactgcatcagtggtgctgactaccctttcttctaccataggttcatgggtgcgagaatgtgagtctc

SEQ ID NO: 94061 - DNA, 80 bp, synthetic construct
  source 1..80: mol_type = other DNA
ttaattcagacgccaatacaacataatgctcttctctcttccacttaacaatgtgtgagacaagtgagagtgcctcacaa

SEQ ID NO: 94062 - DNA, 80 bp, synthetic construct
  source 1..80: mol_type = other DNA
gtataaacgcctcagagaatggatgatgtgactcatgccaactctatcttctagcaactttgaaaaagtaggcttcaaag

SEQ ID NO: 94063 - DNA, 80 bp, synthetic construct
  source 1..80: mol_type = other DNA
ggaaataatcgcaagggttgtgcttgaagaagtctagaacctgcgcttgctttggttccccgagtacccatgcaccaagc

SEQ ID NO: 94064 - DNA, 80 bp, synthetic construct
  source 1..80: mol_type = other DNA
tctatggctgtagatagtgttatgcacatgtaatcccagagaagaggtcttaaataactaacagcaacatcattcctgct

SEQ ID NO: 94065 - DNA, 80 bp, synthetic construct
  source 1..80: mol_type = other DNA
tttagtttctggtgacactttccatatctgaatcccattatcccctaccaccatctcaacaccctgggttcccaatagtt

SEQ ID NO: 94066 - DNA, 80 bp, synthetic construct
  source 1..80: mol_type = other DNA
gggactgtatagatctaatgtaaaggttttccttgtttgggcctctaacacacttactacccaatgtcctgcacagccct

SEQ ID NO: 94067 - DNA, 80 bp, synthetic construct
  source 1..80: mol_type = other DNA
acaaatccagatgctatagaactttgaaaagctgacttatttatagcttcagataacagcttctgagcgcctctagtgaa

SEQ ID NO: 94068 - DNA, 80 bp, synthetic construct
  source 1..80: mol_type = other DNA
tgtcgatgataacctattttgtaatgtcttcacaattgtggggaccttttcatcctccagattcacagctccagaataga

SEQ ID NO: 94069 - DNA, 80 bp, synthetic construct
  source 1..80: mol_type = other DNA
tagcgtgagcagcaggtgccccatctgcaaaatgcctcttcccaccaggctaaaggcagcaacgcagcccagtgcacccc

SEQ ID NO: 94070 - DNA, 80 bp, synthetic construct
  source 1..80: mol_type = other DNA
ttattttctgtcttaataccattctgagtgggtgatgagtagctagattcaaccaatggtattctaagtcggaagcagat

SEQ ID NO: 94071 - DNA, 80 bp, synthetic construct
  source 1..80: mol_type = other DNA
aagggctcaacacccaagagtttaaatagattctgtaatgatgatgtgtgttcacctgacaggtagttagtagtaaactc

SEQ ID NO: 94072 - DNA, 80 bp, synthetic construct
  source 1..80: mol_type = other DNA
ctcatgaagttcaccagttttcaacttgttaaacaatattctgagcattgacctcattttcttacaagcatctggaacca

SEQ ID NO: 94073 - DNA, 80 bp, synthetic construct
  source 1..80: mol_type = other DNA
acttctctatctgtctcattattctataactacgattcccatccacccagtctctaacatcagtctcacagttcagaagg

SEQ ID NO: 94074 - DNA, 80 bp, synthetic construct
  source 1..80: mol_type = other DNA
gatcaacagggtatttcgcataacacaacaaactcaacgtcctcttttgaattctgttgcacaagtcgactggcacaccg

SEQ ID NO: 94075 - DNA, 80 bp, synthetic construct
  source 1..80: mol_type = other DNA
tgcggcaacaaattttgttaacagaggaacctcatcaccccagacataaaaccttgatttgaactctgcaacgaacctac

SEQ ID NO: 94076 - DNA, 80 bp, synthetic construct
  source 1..80: mol_type = other DNA
ttttcggactcacaaacttgtttaattggtcactcatatagtaatgaaattctaacagtgtcttaaactcttcttcatcc

SEQ ID NO: 94077 - DNA, 80 bp, synthetic construct
  source 1..80: mol_type = other DNA
ctcaacaacaggtctgttaaggtttggtcaaataatgatatctgatcatcactagacgtataagcatcaacttgcccacc

SEQ ID NO: 94078 - DNA, 80 bp, synthetic construct
  source 1..80: mol_type = other DNA
gcacacgcactttattgcgaaattgatgaacctttcagaaattagtgcatagaaatctgaagtattgtgcaagatgccct

SEQ ID NO: 94079 - DNA, 80 bp, synthetic construct
  source 1..80: mol_type = other DNA
aaatcaacgcgccccaaggcacaacacctccaccatacagtccatagatccaagatacccaccccaactctcaccaacca

SEQ ID NO: 94080 - DNA, 80 bp, synthetic construct
  source 1..80: mol_type = other DNA
ggcccatgtcaagaattgaactaatgtgtgaaggaaccgtcccattctggaagttacagttgaagaaatcttcagtcatt

SEQ ID NO: 94081 - DNA, 80 bp, synthetic construct
  source 1..80: mol_type = other DNA
gtttgagttgtcttcttcttcaacccaagttgagacttaatatatgatttcatcattgctgacacaacattgaatgggat

SEQ ID NO: 94082 - DNA, 80 bp, synthetic construct
  source 1..80: mol_type = other DNA
ttccaccagcttatgcatgtgccatgtcaacagtgttgataggtaatctttgccctttaagtcggcttgcaggtcattgg

SEQ ID NO: 94083 - DNA, 80 bp, synthetic construct
  source 1..80: mol_type = other DNA
ataataaaatgagattttgaatcattgttaaaaacaggaaggggcacatcattgggccccacttactatgatccatgcta

SEQ ID NO: 94084 - DNA, 80 bp, synthetic construct
  source 1..80: mol_type = other DNA
caaacagctacctgagagttgtaatgtgagtgcttcaaaataatcctcaatgagtcttgtgaacatttttgttctaaggt

SEQ ID NO: 94085 - DNA, 80 bp, synthetic construct
  source 1..80: mol_type = other DNA
caccaatatacaattctctattacctcccacttgttccttgtaagataaggaaaatttcagcctaccagtgtcagggcca

SEQ ID NO: 94086 - DNA, 80 bp, synthetic construct
  source 1..80: mol_type = other DNA
gttgagttgtaagactgaggtgattcttgactataaaaacacaagttcttcaacattgctgttgtgcagttggtcaagga

SEQ ID NO: 94087 - DNA, 80 bp, synthetic construct
  source 1..80: mol_type = other DNA
cagagctttactgagtgcttctgaattactctctcgttcacttattctgacatcatcagctaatttccctgtgtcaaact

SEQ ID NO: 94088 - DNA, 80 bp, synthetic construct
  source 1..80: mol_type = other DNA
tgaaattcagacatttggtcttgtagtgagaatacttccccatcaatctatttccattcatcattagtaaaactgacttg

SEQ ID NO: 94089 - DNA, 80 bp, synthetic construct
  source 1..80: mol_type = other DNA
cccatcctcccccccggggggaccccccgccggaggcccccccgggcgaggcagacagacagaccagctctagtcaatat

SEQ ID NO: 94090 - DNA, 80 bp, synthetic construct
  source 1..80: mol_type = other DNA
aaacattgaaagtattcttgatctaagtatgttcttgtcaccacagccttagtcaactcacttatagggcatgaattcat

SEQ ID NO: 94091 - DNA, 80 bp, synthetic construct
  source 1..80: mol_type = other DNA
tgggccagtgtaaaaatatttattccttaagaccttatcattataaatgttattgcagattttgacatattgatcttcag

SEQ ID NO: 94092 - DNA, 80 bp, synthetic construct
  source 1..80: mol_type = other DNA
gtagaatctcctggtcaaaatcttcaatcatgtgatttgatagttcacatttaatcagccttatgaagagcttctcttcc

SEQ ID NO: 94093 - DNA, 80 bp, synthetic construct
  source 1..80: mol_type = other DNA
accactttgtcaagatcagagattgagggtgcatcacaatttattttttgctgtttctcaggtaattctctgtactggct

SEQ ID NO: 94094 - DNA, 80 bp, synthetic construct
  source 1..80: mol_type = other DNA
gggaggcagacagacagaccagctctagtcaatatcctcgagaatttcttcaggctcaaataactcagagcatgtcctcc

SEQ ID NO: 94095 - DNA, 80 bp, synthetic construct
  source 1..80: mol_type = other DNA
tgtttgttcagtaaaaatttacccttccgattgaacacctcagtcaattgtgtcactgccaaagctgtaagtttattaaa

SEQ ID NO: 94096 - DNA, 80 bp, synthetic construct
  source 1..80: mol_type = other DNA
gtcatagtctaagacacgggatccatctgtgtatttatttacaacaacacttttgttgctggccaagtctagagccgtgg

SEQ ID NO: 94097 - DNA, 80 bp, synthetic construct
  source 1..80: mol_type = other DNA
cacaaccacttgtgataagaggatctcgtagcgccttcttcacctctttccctttgaatagtgagccattgttgaagctg

SEQ ID NO: 94098 - DNA, 80 bp, synthetic construct
  source 1..80: mol_type = other DNA
gatgtaagaagtgagatgaactttctggacaccccaggcttcttgtacttcactctgtctgcttctacacaacattcctt

SEQ ID NO: 94099 - DNA, 80 bp, synthetic construct
  source 1..80: mol_type = other DNA
cctcgagaatttcttcaggctcaaataactcagagcatgtcctcccttttaatctaaagctgcctctactcgactgtatc

SEQ ID NO: 94100 - DNA, 80 bp, synthetic construct
  source 1..80: mol_type = other DNA
gttcaaaaattttcttgcattataaaccatctcatcaagttcctcttccgatgcatcatccttggggttcacactaacat

SEQ ID NO: 94101 - DNA, 80 bp, synthetic construct
  source 1..80: mol_type = other DNA
gcccaaattccagtttaggttcaaggaacttttcaaaacacttgatttggtcagttaatctatcaggtgtttctttggtg

SEQ ID NO: 94102 - DNA, 80 bp, synthetic construct
  source 1..80: mol_type = other DNA
ataaaatgacacatataggaaacatttaagatgaacttaaacctgttagtcatcatgctggtaacatttccagacaacac

SEQ ID NO: 94103 - DNA, 80 bp, synthetic construct
  source 1..80: mol_type = other DNA
aatccccaacaaagagcgaattaatttgtagagtaaatactcagcctctgtgattagatcctctttaattttctccatca

SEQ ID NO: 94104 - DNA, 80 bp, synthetic construct
  source 1..80: mol_type = other DNA
aatctctgtgatggaagtcagacacaaaggccattatgaaatatctgatgttctgtaggaacttctgacatctcttactg

SEQ ID NO: 94105 - DNA, 80 bp, synthetic construct
  source 1..80: mol_type = other DNA
gggtgagttaatattaaaaccaagatcattttcgttagtgactttatagcaagcaattgttcagacagctctttacactc

SEQ ID NO: 94106 - DNA, 80 bp, synthetic construct
  source 1..80: mol_type = other DNA
ctctatccaactgaccataacatcaattactttctgtagaacatcgctagaaaaaatagaaggaaaaaaccgtttggggt

SEQ ID NO: 94107 - DNA, 80 bp, synthetic construct
  source 1..80: mol_type = other DNA
cagcatagaacgagcaaatttctccaacctcattattgttaatggcataacactttgaacactcacctgttttttggtac

SEQ ID NO: 94108 - DNA, 80 bp, synthetic construct
  source 1..80: mol_type = other DNA
agtaacttaaattccatctttttaacaaagaattcttgacagtaagcttctttacatcttacaacttgatacctggaagg

SEQ ID NO: 94109 - DNA, 80 bp, synthetic construct
  source 1..80: mol_type = other DNA
tccaaattcattttgccttagtttcacggttgaagatgtcttcatagagtttatcaaagccaagcttagtgtggataatc

SEQ ID NO: 94110 - DNA, 80 bp, synthetic construct
  source 1..80: mol_type = other DNA
atgaccctttgccttgatctactgtaacaaagagaatagcccttaaagtcaacccattcctccagggcttcaagaagttt

SEQ ID NO: 94111 - DNA, 80 bp, synthetic construct
  source 1..80: mol_type = other DNA
tctccagatctgtcacacccaatatatccacagtacccaaggtgtaagggaacttatcttcttgagatctttggtagctt

SEQ ID NO: 94112 - DNA, 80 bp, synthetic construct
  source 1..80: mol_type = other DNA
atggtaggtgtaatcccagatatctccatatccatgattgcatcataggcatcacagttgagtatttcgaaatctgtccc

SEQ ID NO: 94113 - DNA, 80 bp, synthetic construct
  source 1..80: mol_type = other DNA
catggttcctcctttctttaagtgtcagagtatctgtgagtgatacggttttatcattgtttattcttctactatcaatc

SEQ ID NO: 94114 - DNA, 80 bp, synthetic construct
  source 1..80: mol_type = other DNA
caacgttttaagtccctttttgtggactctaatgagactaacctatcgttaacactcacaaaacaagaacccagccaacc

SEQ ID NO: 94115 - DNA, 80 bp, synthetic construct
  source 1..80: mol_type = other DNA
tgcagaatttccactgttgtgctttaagcgatccaatcgatcagcaagaagaatcaaaacgtcaaaaacaagaagaagct

SEQ ID NO: 94116 - DNA, 80 bp, synthetic construct
  source 1..80: mol_type = other DNA
ttcttctagtattcaagattctcaaagatttaaccttgttcagaaaggacctccaacattgcatttgctcaccttggggg

SEQ ID NO: 94117 - DNA, 80 bp, synthetic construct
  source 1..80: mol_type = other DNA
ttaacagttctgtccccactaaagtccagatctgcgtataaaaactttaaaactggagaagctctcttaaactgaaattc

SEQ ID NO: 94118 - DNA, 80 bp, synthetic construct
  source 1..80: mol_type = other DNA
taattgctcaacatcatcatcacaagcatcaaccttttctctgtacaaattttttaagtctctcaataatgcctctttat

SEQ ID NO: 94119 - DNA, 80 bp, synthetic construct
  source 1..80: mol_type = other DNA
cagttttgatgaattgattcactatttccccttgcctcaatctgttcctgaagacctgatactcttcctcgatcagattc

SEQ ID NO: 94120 - DNA, 80 bp, synthetic construct
  source 1..80: mol_type = other DNA
acccagtatctgggcatggtctgtgggtctctgctttgtaaggattgagacaatgtccacccctgtcaactggaccctct

SEQ ID NO: 94121 - DNA, 80 bp, synthetic construct
  source 1..80: mol_type = other DNA
ttaacttcatgggctgaaagcttgttgttgattccttggtggcagctggaaattatctcttcaaagtgttttgcacgttt

SEQ ID NO: 94122 - DNA, 80 bp, synthetic construct
  source 1..80: mol_type = other DNA
gtcagtcagaacattgatactctcaattcctgaaagtctcccagaagtcaaagccagtgattcacagagtctcgaatatt

SEQ ID NO: 94123 - DNA, 80 bp, synthetic construct
  source 1..80: mol_type = other DNA
ctgactcttcaaacagcgcattgctttcttgtgaatacttcaacagggtgaacaggatgtctctgattttgtcgttaacc

SEQ ID NO: 94124 - DNA, 80 bp, synthetic construct
  source 1..80: mol_type = other DNA
cagtcaggtatctgctcattgtaaaatgtcgtcctgccatctataaggggaatgagactgatgccaacagtttctaaatc

SEQ ID NO: 94125 - DNA, 80 bp, synthetic construct
  source 1..80: mol_type = other DNA
agcttttagttgttccaactttttgtagtcctccaaatatttctgctcaaaattagcgggagatgaccttacaaaacact

SEQ ID NO: 94126 - DNA, 80 bp, synthetic construct
  source 1..80: mol_type = other DNA
caagtaatattaagacattaccggtaagcttgtatccatcagggaccacaaagcacaggacaaaggtggaggttaaaaca

SEQ ID NO: 94127 - DNA, 80 bp, synthetic construct
  source 1..80: mol_type = other DNA
catctgaccctgccgacgaatagaaaggtgaagatctcggagaggagggggagctcagtgttgtgttcacaaccattggc

SEQ ID NO: 94128 - DNA, 80 bp, synthetic construct
  source 1..80: mol_type = other DNA
cagtctgaactaagaaggccaacttctgcctcgacagtttgtcattgtctgcaagatgttttgaaattaggtctttggca

SEQ ID NO: 94129 - DNA, 80 bp, synthetic construct
  source 1..80: mol_type = other DNA
gcagcgatgtcttcttccatggcttgaccgtaactcttggattgggtttgggtttgtaccagtatggcttgtaagtcagc

SEQ ID NO: 94130 - DNA, 80 bp, synthetic construct
  source 1..80: mol_type = other DNA
gcttcaatctgtcagacatcattgaccgcagggcaccacttagaaggtgtggtgagctgtccccaatctctctcacaaat

SEQ ID NO: 94131 - DNA, 80 bp, synthetic construct
  source 1..80: mol_type = other DNA
gtcagctggtgatgccccacacaagctttcccacaattgagagccaatatgcctaggatcctcggtgcgtggaggtcgct

SEQ ID NO: 94132 - DNA, 80 bp, synthetic construct
  source 1..80: mol_type = other DNA
aaactaagtcaacagaggccaacgaacaacaaagggcccaagtaataccagatgcatcccacctaggaccccagttctgc

SEQ ID NO: 94133 - DNA, 80 bp, synthetic construct
  source 1..80: mol_type = other DNA
acttctagatcctggtcttcaatggatggtgtgaatgttgcaatctttttatcagactcccacagtgctcctctacatac

SEQ ID NO: 94134 - DNA, 80 bp, synthetic construct
  source 1..80: mol_type = other DNA
aactaatggcacaggctcaatgtcagggccaaccttaatgaaatcaaattcagtgaattgtagtttatcagagtcaatga

SEQ ID NO: 94135 - DNA, 80 bp, synthetic construct
  source 1..80: mol_type = other DNA
ttaattttatagggatcacatctcccaattgttgtgtatcttttaaaaactcatttactgcatctgactcaatgaaccaa

SEQ ID NO: 94136 - DNA, 80 bp, synthetic construct
  source 1..80: mol_type = other DNA
gctctgtttatgtcactgttcccttctttagaacccaagacaaggctgctcattgcctgctgtatcttgtagtcataatc

SEQ ID NO: 94137 - DNA, 80 bp, synthetic construct
  source 1..80: mol_type = other DNA
gggggaccccccgccgggggcccccccgggaggaggacagccaaaccggtgctactcgatgtccttcacagtctcctcag

SEQ ID NO: 94138 - DNA, 80 bp, synthetic construct
  source 1..80: mol_type = other DNA
tgctactcgatgtcctccacagtctcctcaggtccaaacagttctgagcatgttcttcccttcagtctgagactcccttt

SEQ ID NO: 94139 - DNA, 80 bp, synthetic construct
  source 1..80: mol_type = other DNA
gtcgatagtcctcttttcactggagcctaaatctgcatatagaaactttaagacaggagaagctctcttaaactgaaact

SEQ ID NO: 94140 - DNA, 80 bp, synthetic construct
  source 1..80: mol_type = other DNA
ccaattgctcaaaatcattgttacagatgccaatgttgtctctgtacaagttcttgaaatccttcaggagcatcatcttg

SEQ ID NO: 94141 - DNA, 80 bp, synthetic construct
  source 1..80: mol_type = other DNA
aatttagttgtacttcactagaaagacttgtcttgtgagttcctgggttgtgccacacagtcaaaatgggcaacaggcaa

SEQ ID NO: 94142 - DNA, 80 bp, synthetic construct
  source 1..80: mol_type = other DNA
cacaacatgcttttctggttcaaataactctgaacacgttctccccttaagtctaagactgcccccacttgattgaatca

SEQ ID NO: 94143 - DNA, 80 bp, synthetic construct
  source 1..80: mol_type = other DNA
tgagatccttagcattggcaatgccctcctccattgttgaccacgatgcttggatcgagttggggtttacacttgtttga

SEQ ID NO: 94144 - DNA, 80 bp, synthetic construct
  source 1..80: mol_type = other DNA
agttggggtttacacttgtttgatgtgcacgtcagttagtgatactctaagtaaagttctacaaagatgagagtcaatat

SEQ ID NO: 94145 - DNA, 80 bp, synthetic construct
  source 1..80: mol_type = other DNA
aatttggtaggtcttcagtaggttgacttgtcttgtgagttcctgaattgtaccacacagtcaagatgggcaataagcaa

SEQ ID NO: 94146 - DNA, 80 bp, synthetic construct
  source 1..80: mol_type = other DNA
caatggcactctttggacttacaaatttgtttagctgatcactcatgtaataatgaaattccagcagtgtcttaaactcc

SEQ ID NO: 94147 - DNA, 80 bp, synthetic construct
  source 1..80: mol_type = other DNA
agaaccgttaacaccactgcttccctcttttgatcctaaaacaaggttactcattgcttgttgtatcttgtaatcataat

SEQ ID NO: 94148 - DNA, 80 bp, synthetic construct
  source 1..80: mol_type = other DNA
atatgcttgtcattatgctttaggcaatctagccgactagcaaggaggattagaacatcaaatactagaaggagttttct

SEQ ID NO: 94149 - DNA, 80 bp, synthetic construct
  source 1..80: mol_type = other DNA
tctagtgttaagaatcctcaaagatttcaccttattcaagaaagatctccaacactgcatctgtccattctgagggtgag

SEQ ID NO: 94150 - DNA, 80 bp, synthetic construct
  source 1..80: mol_type = other DNA
ggcccctcttcactggagctgagatctgcatacaagaacttaaggactggagaggctctctggaactgaaatgttaattg

SEQ ID NO: 94151 - DNA, 80 bp, synthetic construct
  source 1..80: mol_type = other DNA
tgcaatgctttcatcatgaatgcttatcttatcattatacagattcctgaaatcctccaacaacttcaccttgtcagtct

SEQ ID NO: 94152 - DNA, 80 bp, synthetic construct
  source 1..80: mol_type = other DNA
attggcaatgccctcctccattgttgattgcggtgtttggatcgggttgggacttgtacctgtatgatgtgcacgtcaac

SEQ ID NO: 94153 - DNA, 80 bp, synthetic construct
  source 1..80: mol_type = other DNA
ggttgggacttgtacctgtatgatgtgcacgtcaactagtgatgctccaagtaaaatcctacagaaatgagagtcaatat

SEQ ID NO: 94154 - DNA, 80 bp, synthetic construct
  source 1..80: mol_type = other DNA
aatttggttggactttactaggaagacttgtcttgtgaggtcctgggttgtgccatacaattaaaatgggcaacaggcaa

SEQ ID NO: 94155 - DNA, 80 bp, synthetic construct
  source 1..80: mol_type = other DNA
tcagccgaggcaccccagaacgcaacccccccaccatacagcccataggtccaagatccaacacccagtctccaccaccc

SEQ ID NO: 94156 - DNA, 80 bp, synthetic construct
  source 1..80: mol_type = other DNA
aacccccccaccatacagcccataggtccaagatccaacacccagtctccaccacccaccccccacccccgggaaggcag

SEQ ID NO: 94157 - DNA, 80 bp, synthetic construct
  source 1..80: mol_type = other DNA
acgcacggtgcaacttcactcaatgtccacaacacacctttccggctcgaataactctgagcacgtcctccctttgagtc

SEQ ID NO: 94158 - DNA, 80 bp, synthetic construct
  source 1..80: mol_type = other DNA
cgttggcgatgccttcctccattgttgattgcaatgcttggatcgagttgggacctgtacctgtatgaagtgcacgacga

SEQ ID NO: 94159 - DNA, 80 bp, synthetic construct
  source 1..80: mol_type = other DNA
agttgggacctgtacctgtatgaagtgcacgacgactagcaacactctgggtgaggcctcacagaaatgagagtcaatat

SEQ ID NO: 94160 - DNA, 80 bp, synthetic construct
  source 1..80: mol_type = other DNA
ctcttcactcctccatactgacccacacagacgcgcaccggggatcctaggcaattttggctttctttcctttgaaggat

SEQ ID NO: 94161 - DNA, 80 bp, synthetic construct
  source 1..80: mol_type = other DNA
tgttccttgtctacaactaactcaaggggcacaacatcacctagttgtctagaatcaatcaggaactcgttgaagacctc

SEQ ID NO: 94162 - DNA, 80 bp, synthetic construct
  source 1..80: mol_type = other DNA
tgtgttcacataccatgcagatctccctctaaagggggaatctgctaaaaccaatctccagcagtcaggcaggacacatt

SEQ ID NO: 94163 - DNA, 80 bp, synthetic construct
  source 1..80: mol_type = other DNA
ggttgacagatccggaatacatcacctttgtgtctagtacattgtacctgtgtttgctatctatatcacctgaaaattca

SEQ ID NO: 94164 - DNA, 80 bp, synthetic construct
  source 1..80: mol_type = other DNA
aggtgaaccgagaaggtctccttgaatgcagcatcctgactcttgatccggaatctgactgtttgattaaattttactgc

SEQ ID NO: 94165 - DNA, 80 bp, synthetic construct
  source 1..80: mol_type = other DNA
tccggtagttaaaccactcattacatcaagtaagtcctcaagtgactcataaccggtctctgtcaaacctgaggcaataa

SEQ ID NO: 94166 - DNA, 80 bp, synthetic construct
  source 1..80: mol_type = other DNA
gctggttttcgttgagttgtgctggttcaacatcaaagtctatccaagcataccccattatcaagtcatatttgtacatc

SEQ ID NO: 94167 - DNA, 80 bp, synthetic construct
  source 1..80: mol_type = other DNA
ggtctctcaacacctttataaatcactttttccacaaatgatgagaaaggaccaagccgttgcaacccctctccaccagg

SEQ ID NO: 94168 - DNA, 80 bp, synthetic construct
  source 1..80: mol_type = other DNA
accacaaccgcagacatgggcaataaggggaccaagtccgccccaaccccagaaccccacagggccagcctggtgcctga

SEQ ID NO: 94169 - DNA, 80 bp, synthetic construct
  source 1..80: mol_type = other DNA
tatggaactcttatgagggaaccaagtgaaagaacctaaggtcctcgttgttgccacaaaggacctaacatatgattcaa

SEQ ID NO: 94170 - DNA, 80 bp, synthetic construct
  source 1..80: mol_type = other DNA
ctctcttccacttgaccacatgtgacacaagagacaatgcttcacaattcacatccagtgcaacacacaagtccagaaac

SEQ ID NO: 94171 - DNA, 80 bp, synthetic construct
  source 1..80: mol_type = other DNA
ttaatgcgaggtgaccacttcattcgggttgctgccaagtcactcataaacggcagcaggtgcttttcgaacaagcttgg

SEQ ID NO: 94172 - DNA, 80 bp, synthetic construct
  source 1..80: mol_type = other DNA
atacaaccttctcaaagagtggattatgtgattcagccccaccctatcctcaaggagcttggaaactgttggttttaagg

SEQ ID NO: 94173 - DNA, 80 bp, synthetic construct
  source 1..80: mol_type = other DNA
ggaaataatcacaaggattgtgctttaataaatcggaagatgttggtttctttggttccccaagaacccaggcacccaat

SEQ ID NO: 94174 - DNA, 80 bp, synthetic construct
  source 1..80: mol_type = other DNA
tcgattgctgttgaaagtgagatgcacatgtagtcccacaacaaaggcctaaagtaagataaaacgacattcttttcgga

SEQ ID NO: 94175 - DNA, 80 bp, synthetic construct
  source 1..80: mol_type = other DNA
cccaatttctgctggcaccttccagaactgcacaccaaaagcatcactaaaggactcaataccctcaagttctgcaatct

SEQ ID NO: 94176 - DNA, 80 bp, synthetic construct
  source 1..80: mol_type = other DNA
gtgattgtatagatttgatgtatagattttccttatttggccctctaacacacttgctacctagtgttctgcacagcccc

SEQ ID NO: 94177 - DNA, 80 bp, synthetic construct
  source 1..80: mol_type = other DNA
acaaagccagacgcaattgaactctgaaaggctgatttgttgatggcctcagacaacaatttttgtgcacccctggtgaa

SEQ ID NO: 94178 - DNA, 80 bp, synthetic construct
  source 1..80: mol_type = other DNA
tgcaagccacatgggcccccagttctgtaagagctgctggttcgagaacaaagggttggtagagtgcaacaatcactatc

SEQ ID NO: 94179 - DNA, 80 bp, synthetic construct
  source 1..80: mol_type = other DNA
ggtggaggacaatttgttttgaactgttttcacaattgttggtattttttcatcttccaggctgactgcacctgagtaga

SEQ ID NO: 94180 - DNA, 80 bp, synthetic construct
  source 1..80: mol_type = other DNA
taattttctggcgtaaaaccattcttaatggatgatgagctgctaaattcaaccagcagaattgtaggtctgatggttcc

SEQ ID NO: 94181 - DNA, 80 bp, synthetic construct
  source 1..80: mol_type = other DNA
aaaggctcagtgtcaagcaatttgcataaatttattaatgaggtcacatgttctcctgataaataattagtagtgaattc

SEQ ID NO: 94182 - DNA, 80 bp, synthetic construct
  source 1..80: mol_type = other DNA
ctcatgtagttctcctgtcttcaacttgttgtacagtctgcgtaacatcgacctgaccttccgacaaccatcaggaatga

SEQ ID NO: 94183 - DNA, 80 bp, synthetic construct
  source 1..80: mol_type = other DNA
ttctttccacttgtctcataattctataacttcgattcccgtcaacccagtctctaacatctgaatcgcagtttaagagg

SEQ ID NO: 94184 - DNA, 80 bp, synthetic construct
  source 1..80: mol_type = other DNA
aatgggtctatggggtatcgtgcataacgtagcaggttcaatgttctaacttgaatcagattgcaaacccggattggtac

SEQ ID NO: 94185 - DNA, 80 bp, synthetic construct
  source 1..80: mol_type = other DNA
accattagcaactgattgatcaataattgtgtcaattgtttcagccagctgatggggctctttacacttaatgttgtgga

SEQ ID NO: 94186 - DNA, 80 bp, synthetic construct
  source 1..80: mol_type = other DNA
tttttgggcttacaaatttattgagttggtcacttaagtaataatgaaactctaatagaatttcaaattcctctgggtct

SEQ ID NO: 94187 - DNA, 80 bp, synthetic construct
  source 1..80: mol_type = other DNA
tttgacctccacaaagacacccaattgcatagttgatgaacctctccgtaattaaggcataaaagtcagaagtattatga

SEQ ID NO: 94188 - DNA, 80 bp, synthetic construct
  source 1..80: mol_type = other DNA
agtatgccttgtcccatatccagaattgaactgatgtgggaaggaacagttccacctctaaaattagagtaaaagaagtc

SEQ ID NO: 94189 - DNA, 80 bp, synthetic construct
  source 1..80: mol_type = other DNA
tcagttactgtttgtgaagtgcttttcttcagcccaagttgagcttttatgtaagatttcatcattgctgacactacatt

SEQ ID NO: 94190 - DNA, 80 bp, synthetic construct
  source 1..80: mol_type = other DNA
aaaaggaatctcaaccattttatgcatgtgccaagctagcaaagtggacaaatagtcccttccttttaaatcagcttgca

SEQ ID NO: 94191 - DNA, 80 bp, synthetic construct
  source 1..80: mol_type = other DNA
aatcccctgataaaaggattaggttttgaagtgttgcaagaaataaaaacggacacatcattggaccccacttgctgtgg

SEQ ID NO: 94192 - DNA, 80 bp, synthetic construct
  source 1..80: mol_type = other DNA
tccatgctgtatgaaacatgtgccagagacacattcaacttcattgataagatggcattttcaaactctttttcatcatt

SEQ ID NO: 94193 - DNA, 80 bp, synthetic construct
  source 1..80: mol_type = other DNA
taaacagctgcctgataactgagtggttaaggcttcaaagtaatcttctattaatctggtaaacatttttgttcttaaat

SEQ ID NO: 94194 - DNA, 80 bp, synthetic construct
  source 1..80: mol_type = other DNA
caccaatatacagctccctgttgcctccaacttgttctttgtaagataatgagaactttagacgacctgtgtctggccct

SEQ ID NO: 94195 - DNA, 80 bp, synthetic construct
  source 1..80: mol_type = other DNA
actgaattgaatgactgtggtgattcctgactataaaaacacagatttttcagcattgctgttgtacagtttgtcaatga

SEQ ID NO: 94196 - DNA, 80 bp, synthetic construct
  source 1..80: mol_type = other DNA
taaagctctgctcaatgcctcagagttgctttgtctctcactgattctggcatcattagacagtttatcagtatcaaact

SEQ ID NO: 94197 - DNA, 80 bp, synthetic construct
  source 1..80: mol_type = other DNA
agggcttccagtaaccccagcgcacctccagcggaggccaccctcccaaaacaacctcccccgtacagcccctagaacgc

SEQ ID NO: 94198 - DNA, 80 bp, synthetic construct
  source 1..80: mol_type = other DNA
tgaaattcaaacatttagttttataatgtgaatacttccccattagcctattcccgttcatcaataacagtaaagactta

SEQ ID NO: 94199 - DNA, 80 bp, synthetic construct
  source 1..80: mol_type = other DNA
aagcactgaaagtattcatggtcctgataggttctggttgccactgcctttgttagctcaccaatggggcatgaacccat

SEQ ID NO: 94200 - DNA, 80 bp, synthetic construct
  source 1..80: mol_type = other DNA
ggaaccactgtaaaagtattttggtttcaattcactgttgttaaaaactgcatcacagaactctctgtaaaaatcctcag

SEQ ID NO: 94201 - DNA, 80 bp, synthetic construct
  source 1..80: mol_type = other DNA
ggaatgtctcatagtcaaaatcctcaaccatatggttggatagctcccctttgatcaacctgatatgaaacttgtcttgc

SEQ ID NO: 94202 - DNA, 80 bp, synthetic construct
  source 1..80: mol_type = other DNA
acaactttatctagatcagatatactaggtgaacacaccccttgggaagtagcgcaggacctggctgactctttgtattg

SEQ ID NO: 94203 - DNA, 80 bp, synthetic construct
  source 1..80: mol_type = other DNA
gtccacaatcctttccacagtttctctcaaactgtcaaagtaaagtgaagcactgccctcaagtaaaatttcatctaaac

SEQ ID NO: 94204 - DNA, 80 bp, synthetic construct
  source 1..80: mol_type = other DNA
cagacttatttgtatccgagtgtgcctggcttgcaccaagcaccaagttactcattgcctgttgaactttgtagtcatag

SEQ ID NO: 94205 - DNA, 80 bp, synthetic construct
  source 1..80: mol_type = other DNA
tcttgtttgtccaacaagaatttgccctttcttgagaaaacctcagttaactgtgtcactgctagtgctgtaagtttgtt

SEQ ID NO: 94206 - DNA, 80 bp, synthetic construct
  source 1..80: mol_type = other DNA
aaaatcataatttagaatcctggtaccatctgtgtatttgttaacaacaacacttttgttgctagcaagatccagagcag

SEQ ID NO: 94207 - DNA, 80 bp, synthetic construct
  source 1..80: mol_type = other DNA
tggcacagccactcgtaattaatggatcttttaactcctttttcacttccttccccttaaaaagagaaccattgttaaag

SEQ ID NO: 94208 - DNA, 80 bp, synthetic construct
  source 1..80: mol_type = other DNA
gaagacgttaagagtgaaagaaactttttcgaaacaccaggaattttgtacttggtgtcgttcgaatccataacagtttc

SEQ ID NO: 94209 - DNA, 80 bp, synthetic construct
  source 1..80: mol_type = other DNA
cttactcagaaatttctttgcattatcaatcacttcctgcagttcactgtcctcagcctgatcggatgggttgacaacaa

SEQ ID NO: 94210 - DNA, 80 bp, synthetic construct
  source 1..80: mol_type = other DNA
catgcccgaactccaactttggttctaagaacttctcaaaacacttaatttgatcagtcaatctatcaggggtctcctta

SEQ ID NO: 94211 - DNA, 80 bp, synthetic construct
  source 1..80: mol_type = other DNA
gttataaagtgacacatataagagatgttaaggatgaatttgaacctgtttgttagaacactgttgacatctctggatag

SEQ ID NO: 94212 - DNA, 80 bp, synthetic construct
  source 1..80: mol_type = other DNA
aattatactaagcaaacacctaactaacctataaaggaggaactcaacatctgtgataagtttttctttaattttgcaga

SEQ ID NO: 94213 - DNA, 80 bp, synthetic construct
  source 1..80: mol_type = other DNA
tcaaatccttatgataataatcggaaacataggccataataaagtatctgatgttctgtaaaaacttctgacaacgtttg

SEQ ID NO: 94214 - DNA, 80 bp, synthetic construct
  source 1..80: mol_type = other DNA
gtaggatgagccagaatgagaaccaaaatcatcttggttagtgtctttatagcatccaagtggtctgcaagttcagcaca

SEQ ID NO: 94215 - DNA, 80 bp, synthetic construct
  source 1..80: mol_type = other DNA
atctctcagccagtcaaccatcacattaacgacagtttgcaagacatcagctgaaaatatggctggaaaatatcttttag

SEQ ID NO: 94216 - DNA, 80 bp, synthetic construct
  source 1..80: mol_type = other DNA
ggtctgcatagaatgaacaaacttcacctactaagtggttgttaatagcgtaacacttagagcactcaccagtcttctgg

SEQ ID NO: 94217 - DNA, 80 bp, synthetic construct
  source 1..80: mol_type = other DNA
tagagcaatttgaagtcaactccattcacagagaattcttgacaataggcttctttacatcggacgacctgatatctagc

SEQ ID NO: 94218 - DNA, 80 bp, synthetic construct
  source 1..80: mol_type = other DNA
tgacccaaactcattctgtcttaatttaactgttgaagaggttttcattgagttaatcacagctaaacttaatgttgaaa

SEQ ID NO: 94219 - DNA, 80 bp, synthetic construct
  source 1..80: mol_type = other DNA
gacgctctaaatctcctgactctaatatactttcacttcccatcttatagggaaaaacatcgtctgaagatctctgataa

SEQ ID NO: 94220 - DNA, 80 bp, synthetic construct
  source 1..80: mol_type = other DNA
ctcatcgtaggcataggcccggaggcctcaagattcatcaccacatcatatatttcacaatcaagaacacctgtgtctat

SEQ ID NO: 94221 - DNA, 80 bp, synthetic construct
  source 1..80: mol_type = other DNA
accataatggctaactcccacacccacggcatccaaagcatctatagctcttgttactgttttctgaataatagacctta

SEQ ID NO: 94222 - DNA, 80 bp, synthetic construct
  source 1..80: mol_type = other DNA
agatattgttttttgactgagcgggagatagcgtctggttattcttgagttcaagctgcatcctcctgtctaaccacttc

SEQ ID NO: 94223 - DNA, 80 bp, synthetic construct
  source 1..80: mol_type = other DNA
ttaaggtccctttttgtggactccaatgagaccaaccggtcgttaacactaataaaactagaacccagccaccctttggg

SEQ ID NO: 94224 - DNA, 80 bp, synthetic construct
  source 1..80: mol_type = other DNA
atccctgacagctcccttcatttggtccacattgcttgcaagaagtattatcacatcaaaaatcaagagcagcttcctcc

SEQ ID NO: 94225 - DNA, 80 bp, synthetic construct
  source 1..80: mol_type = other DNA
tagtatttagaatctttaaggacttcaccttgttaagaaatgatctccaacattgcatctggttgccatcaacgagtggc

SEQ ID NO: 94226 - DNA, 80 bp, synthetic construct
  source 1..80: mol_type = other DNA
aagtaagctgactcattcactatttcacaatataagaatttcaatattggtgatgctctcttaaagtggaaaaccaattc

SEQ ID NO: 94227 - DNA, 80 bp, synthetic construct
  source 1..80: mol_type = other DNA
atcaatactctcagatcctgttgtgatctcatcatcataaagtttattgaaactatccaatagttcttctttatcaactt

SEQ ID NO: 94228 - DNA, 80 bp, synthetic construct
  source 1..80: mol_type = other DNA
actgcttgattgaatcatgaccttatccttcgacctgctatagcataaggcataacccctaaagtcaacccattccccca

SEQ ID NO: 94229 - DNA, 80 bp, synthetic construct
  source 1..80: mol_type = other DNA
ttctgaactgattctttatgtttcctctccttaatttgtttctaaaaacctgatattcgtcttccaaaatcattttgacc

SEQ ID NO: 94230 - DNA, 80 bp, synthetic construct
  source 1..80: mol_type = other DNA
tcatgagctgacaacttgttgtctatgccttgatggcagatagagattatttcatcaaagtggttggaacgcttgtcaga

SEQ ID NO: 94231 - DNA, 80 bp, synthetic construct
  source 1..80: mol_type = other DNA
caatgtgtttatactttctatacctgaaaacttgttcgtagttgctgtcagtgattcacagagccttgcatactcagact

SEQ ID NO: 94232 - DNA, 80 bp, synthetic construct
  source 1..80: mol_type = other DNA
cctcaaaaagggagttactctcttgggcatatttcaacaaagaaaaaagagtttcccttaatttgtcgttcacccaatca

SEQ ID NO: 94233 - DNA, 80 bp, synthetic construct
  source 1..80: mol_type = other DNA
ggaatctgttcattgtaaaatgatgttctcccatctattagtggaatgaggttaatatcgacagattttaaatcatcttt

SEQ ID NO: 94234 - DNA, 80 bp, synthetic construct
  source 1..80: mol_type = other DNA
gagctgctctaacttcttaagatcttcaagatatttctgctcaaaatttgctggggacgacctgacaaagcattcaagta

SEQ ID NO: 94235 - DNA, 80 bp, synthetic construct
  source 1..80: mol_type = other DNA
agatcaacacattcccagtcaacttgaaaccatcggggacaacaaaacataaagacggcgtgagaaccccaaaatcctgg

SEQ ID NO: 94236 - DNA, 80 bp, synthetic construct
  source 1..80: mol_type = other DNA
aggatagcctcaacagacttgttctctgagttgtgctcacatccattggccttgcatgaatctaattctatgcataggga

SEQ ID NO: 94237 - DNA, 80 bp, synthetic construct
  source 1..80: mol_type = other DNA
gagcagctttagcccctccattaacaacatcctgggttctgtttgcaatagaaaagctatcttttgtctcgaaagtcttt

SEQ ID NO: 94238 - DNA, 80 bp, synthetic construct
  source 1..80: mol_type = other DNA
cgttgtctgctagatacttggaaactaagtctttgacataagccacatcttcttccatggtgtggtgttttttgcgaagc

SEQ ID NO: 94239 - DNA, 80 bp, synthetic construct
  source 1..80: mol_type = other DNA
gaccttcaaggatcttgcctagaatagttaagtgtttatcaggcataagcctggtgaagatagatacaatgtccacctcc

SEQ ID NO: 94240 - DNA, 80 bp, synthetic construct
  source 1..80: mol_type = other DNA
tcttgtgcttggcgcctgttgggtgctggagacaggtgtggtgtgggggtcggactggtggatggtttgggtggtgtgtg

SEQ ID NO: 94241 - DNA, 80 bp, synthetic construct
  source 1..80: mol_type = other DNA
tgaagcagctgggatggcactctaaaataacactgaaaagacacttaaaaagattcttaaaaagattccagaaatgccta

SEQ ID NO: 94242 - DNA, 80 bp, synthetic construct
  source 1..80: mol_type = other DNA
gcactctaaaataacactgaaaagacacttaaaaagattcttaaaaagattccagaaatgcctaggatcctcggtgcgcg

SEQ ID NO: 94243 - DNA, 80 bp, synthetic construct
  source 1..80: mol_type = other DNA
tatttctggctgaattccaacgtcaaattcagtggtcttgacaaaccactctcttcactcctccatactgacccacacag

SEQ ID NO: 94244 - DNA, 80 bp, synthetic construct
  source 1..80: mol_type = other DNA
actaactgtttcctcatcctcaatctatctgacatcatagataccaaaatcccggtcaattcctcactataacaatcatt

SEQ ID NO: 94245 - DNA, 80 bp, synthetic construct
  source 1..80: mol_type = other DNA
gacatccctaatgaagatctctaggtcctggtcttggatggtaggtgcaaaactagcaagcctcacatcacgttcccaca

SEQ ID NO: 94246 - DNA, 80 bp, synthetic construct
  source 1..80: mol_type = other DNA
aagaacccctacacaccacaagtggcaccggttctgcatcaggacccaccagagtgaaatcatactcagtaaactgcagc

SEQ ID NO: 94247 - DNA, 80 bp, synthetic construct
  source 1..80: mol_type = other DNA
gttcatgtgacctactgtgtgaatttctaagttcagaagataacacaatataatgctcttctctcttccacttgaccaca

SEQ ID NO: 94248 - DNA, 80 bp, synthetic construct
  source 1..80: mol_type = other DNA
aggtgatcagtcaatatcctctacattagttaacctattgtctagctcttcacatgtcctccctttaagtcttagcttac

SEQ ID NO: 94249 - DNA, 80 bp, synthetic construct
  source 1..80: mol_type = other DNA
tatggtgggcgtaatcccagatgcctccatatccatgattgcatcatagacatcacagttgagtatctcaagatttattc

SEQ ID NO: 94250 - DNA, 80 bp, synthetic construct
  source 1..80: mol_type = other DNA
catatgaatcaatctctatattgacttccttcaaagcactaatggacctgtccaggaccttcttgatgatggtggagagc

SEQ ID NO: 94251 - DNA, 80 bp, synthetic construct
  source 1..80: mol_type = other DNA
agcagcgatgtcttcttccatggttaactgcggctcttgaattgaggttgatcttgttcttgtgtgtagagttactcaat

SEQ ID NO: 94252 - DNA, 80 bp, synthetic construct
  source 1..80: mol_type = other DNA
caatcgatggtgctttgcacaggctcttccacaattgagagtcaatatgcctaggatcctcggtgcgcgtggaggtcgct

SEQ ID NO: 94253 - DNA, 80 bp, synthetic construct
  source 1..80: mol_type = other DNA
tctattactgtgtgctcttaattggactgaagacaatttggcaacatgggtggcaaacactccaaaccaccgggagaatc

SEQ ID NO: 94254 - DNA, 80 bp, synthetic construct
  source 1..80: mol_type = other DNA
caagttctattgcagtagacaatgagatgcacatgtagtcccacaataagggtctaaaataagacaagacatttccacat

SEQ ID NO: 94255 - DNA, 80 bp, synthetic construct
  source 1..80: mol_type = other DNA
tcactcctaatcttcagaggaaccctccagaattgcaccccataattgtttttaagtatttcaatgtctttaatggcagc

SEQ ID NO: 94256 - DNA, 80 bp, synthetic construct
  source 1..80: mol_type = other DNA
tattgacgaaattattgattttatgtagagattctccttgtttggccctctcacacatttactacccagtgttctacaca

SEQ ID NO: 94257 - DNA, 80 bp, synthetic construct
  source 1..80: mol_type = other DNA
agcaccccaagtcggacaaatcgaccccacaaaccctccgccatacagtccctaaaccacccccaacaacaacacaccag

SEQ ID NO: 94258 - DNA, 80 bp, synthetic construct
  source 1..80: mol_type = other DNA
cacagacacaactaatggcgaagtttatgaacctctcggaaatcaaagcataaaaatctgatgtgttatgcagaatacct

SEQ ID NO: 94259 - DNA, 80 bp, synthetic construct
  source 1..80: mol_type = other DNA
tacttagtgcttctgagttgctttctctttcactaattctagtatcctcagagagtctactcgtgtcgaatttgaagttt

SEQ ID NO: 94260 - DNA, 80 bp, synthetic construct
  source 1..80: mol_type = other DNA
ccgccgggggcccccccggggggctgcgtcgaggctgctactcaatgtcctcaatatttccaacttcctctagcaattcc

SEQ ID NO: 94261 - DNA, 80 bp, synthetic construct
  source 1..80: mol_type = other DNA
acacaattttctctaaatcattcatcaaagggatgctgtcacctttcgtgtgtggggatgatttgactggctccttgtac

SEQ ID NO: 94262 - DNA, 80 bp, synthetic construct
  source 1..80: mol_type = other DNA
gggctgcgtcgaggctgctactcaatgtcctcaatatttccaacttcctctagcaattcctcacatgtcctacccttaag

SEQ ID NO: 94263 - DNA, 80 bp, synthetic construct
  source 1..80: mol_type = other DNA
tgatctattatcttttcaactgtctctcttaattgatcaaaatattccgatgcccccccatcaagaagggtttcatctag

SEQ ID NO: 94264 - DNA, 80 bp, synthetic construct
  source 1..80: mol_type = other DNA
atcagtgctgtcaatatcagtagtgcgggttttggaacctaataccagattactcattgcctgttgtattttatactcat

SEQ ID NO: 94265 - DNA, 80 bp, synthetic construct
  source 1..80: mol_type = other DNA
aatcttgcttgttaagtagatgtttacctttccgtgagaatgtctcagtcaactgtgtcacggctagtgctgtgagcttg

SEQ ID NO: 94266 - DNA, 80 bp, synthetic construct
  source 1..80: mol_type = other DNA
agcagagataagtactttttagaaatgcctggtttcttataactcaattcacccatttcagtgcatcccttcttgctcaa

SEQ ID NO: 94267 - DNA, 80 bp, synthetic construct
  source 1..80: mol_type = other DNA
tcacatgtcctacccttaagcctcagccttccaccactcgactgaatcataatcttccccttggacttgctgaaacataa

SEQ ID NO: 94268 - DNA, 80 bp, synthetic construct
  source 1..80: mol_type = other DNA
aattgaaaactttccccatccaaaatgaaatcctgactatatgcctccttgcattttactacttgatatctagccgctcc

SEQ ID NO: 94269 - DNA, 80 bp, synthetic construct
  source 1..80: mol_type = other DNA
ctagatccactgagtccataatgtcgactgttcccattggatagggaaacttctcctcctcggatttctgataactaatt

SEQ ID NO: 94270 - DNA, 80 bp, synthetic construct
  source 1..80: mol_type = other DNA
ctcctcctcggatttctgataactaattgtaggggtgatcccggagacattaaagcttaagacatcatcataggcttggg

SEQ ID NO: 94271 - DNA, 80 bp, synthetic construct
  source 1..80: mol_type = other DNA
gtaggggtgatcccggagacattaaagcttaagacatcatcataggcttgggtggtgattatgctcatatcaatgccata

SEQ ID NO: 94272 - DNA, 80 bp, synthetic construct
  source 1..80: mol_type = other DNA
ggtttttatctgaacaagggagagaagctgccccatggggcttggagacttctactctacaccttctctctatccacttc

SEQ ID NO: 94273 - DNA, 80 bp, synthetic construct
  source 1..80: mol_type = other DNA
cgcctagtgtttaaaatccttagtgatttaaccttgttaaggaatgatctccagcattgcatctggtcttcaatggttac

SEQ ID NO: 94274 - DNA, 80 bp, synthetic construct
  source 1..80: mol_type = other DNA
aatatctttgtcaactctgccctcaatgtttgcatacaagaacctcataattggcgacactcttttatattgatggatca

SEQ ID NO: 94275 - DNA, 80 bp, synthetic construct
  source 1..80: mol_type = other DNA
aacaatcaattgcatcctcttggatcacgacctcatcattatacaagttattaaatttgtgcatcaagtcctcttggtcg

SEQ ID NO: 94276 - DNA, 80 bp, synthetic construct
  source 1..80: mol_type = other DNA
acttttacaaactgactctctatgtctccctgtctaattctgttcctaaaaatttggtactcttcctcaatttgtgtttt

SEQ ID NO: 94277 - DNA, 80 bp, synthetic construct
  source 1..80: mol_type = other DNA
aaggctatatcctcctccataactcttgggaactcctagaggaccttaacaaaagaatctttacaaaagaatatcaaggg

SEQ ID NO: 94278 - DNA, 80 bp, synthetic construct
  source 1..80: mol_type = other DNA
tcctccataactcttgggaactcctagaggaccttaacaaaagaatctttacaaaagaatatcaagggtaaatcacagaa

SEQ ID NO: 94279 - DNA, 80 bp, synthetic construct
  source 1..80: mol_type = other DNA
tctagcgacctccacccctccggggggcaagcacggcgaggtaatcagtcaatgtcttcaattgactttgtctcgcagac

SEQ ID NO: 94280 - DNA, 80 bp, synthetic construct
  source 1..80: mol_type = other DNA
gaacaactttgtccagatcacttaatgaaggttggccacccgtcgcagagtgtgagccttgttttataggttctttatat

SEQ ID NO: 94281 - DNA, 80 bp, synthetic construct
  source 1..80: mol_type = other DNA
caatcttctatccaacttaccataatttccacggttgcatgaagaacttcagctgaaaaaattgaaggaaagtatctttt

SEQ ID NO: 94282 - DNA, 80 bp, synthetic construct
  source 1..80: mol_type = other DNA
catcaccttccctttggacttactgaagcacaaagcataccctttgaactccacccagtcatctactgtcctcagcagtt

SEQ ID NO: 94283 - DNA, 80 bp, synthetic construct
  source 1..80: mol_type = other DNA
gactctaggcttttcagactccaagtctgcatataaaaaccttagaatcggtgaggctcttttgtattgataggccagat

SEQ ID NO: 94284 - DNA, 80 bp, synthetic construct
  source 1..80: mol_type = other DNA
cagcgagagtatccataccacaaccaggcataattttcataagcaattgaacaatatccacccctgtccattgcatcctt

SEQ ID NO: 94285 - DNA, 80 bp, synthetic construct
  source 1..80: mol_type = other DNA
catggtctcctggacgggtggatgtctggggttcgagctggggctgtctggtgttggctcgggaggatcttcagcaagag

SEQ ID NO: 94286 - DNA, 80 bp, synthetic construct
  source 1..80: mol_type = other DNA
ggcatttgaggctctcatccttaggttgtcatcaagattctcactgaattcctaggaagcctcaatcaatgtcctccact

SEQ ID NO: 94287 - DNA, 80 bp, synthetic construct
  source 1..80: mol_type = other DNA
cagtggcaacctcatcttccatggctccttaggagttcagtgaggatcttaatgacaacctaaggatgaaagcctcaaat

SEQ ID NO: 94288 - DNA, 80 bp, synthetic construct
  source 1..80: mol_type = other DNA
tggtctcgttccctgaaccaactcctcacatgttctacccttgagtctcatccttccactacttgactgtatcatcactc

SEQ ID NO: 94289 - DNA, 80 bp, synthetic construct
  source 1..80: mol_type = other DNA
agtggcaatctcatcttccatggcttcctaggtattcagtgaaaatcttaatgacaacctaagaatgagagcctcaaatg

SEQ ID NO: 94290 - DNA, 80 bp, synthetic construct
  source 1..80: mol_type = other DNA
attcagtgaaaatcttaatgacaacctaagaatgagagcctcaaatgcctaggatcctcggtgccggtggaggtcgctag

SEQ ID NO: 94291 - DNA, 80 bp, synthetic construct
  source 1..80: mol_type = other DNA
tcattgtcagccaagtattttgccactaggtctttgacagtggcgatctcatcttccatggctccttaggagttcagtga

SEQ ID NO: 94292 - DNA, 80 bp, synthetic construct
  source 1..80: mol_type = other DNA
agcccaagggccagcttgattcctgatgcttcccacttaggtcctcaattttgcaaaagctgctggtttgaaaacagagg

SEQ ID NO: 94293 - DNA, 80 bp, synthetic construct
  source 1..80: mol_type = other DNA
ataacacctccaccgtacaccccatgatcccgggggtggggcggcctggctctactcaatgtcctcaatacacttcttcg

SEQ ID NO: 94294 - DNA, 80 bp, synthetic construct
  source 1..80: mol_type = other DNA
atcaaagcaaagagttatgattcagtcaagtgggggcagcctaagactgaagggaaggacatgttcagagttgtttgggc

SEQ ID NO: 94295 - DNA, 80 bp, synthetic construct
  source 1..80: mol_type = other DNA
attgtgagagtcttttgtggagtctctgaattgagatcagcaccagaacatgggtggtagacaatccagacctccaaaga

SEQ ID NO: 94296 - DNA, 80 bp, synthetic construct
  source 1..80: mol_type = other DNA
ggggaagcacaacaagcgatcactcaatgtcctcaattagtcttgtaccccaggttagctcttcacatgttctacccttg

SEQ ID NO: 94297 - DNA, 80 bp, synthetic construct
  source 1..80: mol_type = other DNA
gataatcttgtccaaatcatttattgaaggttgatcacctaccgcaagatgagagtttcgccccgcaggctccttgtact

SEQ ID NO: 94298 - DNA, 80 bp, synthetic construct
  source 1..80: mol_type = other DNA
tgctagggtaagctaagactaaaacgattatcatttttgtcaatgacttaatgtcaatcaattggtttttcaactcacta

SEQ ID NO: 94299 - DNA, 80 bp, synthetic construct
  source 1..80: mol_type = other DNA
aacactcgcttctacgtctcattctgtcatctatgctggcaagaagcaccaaggtatcaaagaccaacagcaactttctc

SEQ ID NO: 94300 - DNA, 80 bp, synthetic construct
  source 1..80: mol_type = other DNA
ctagtgttcaggattctcagggactttaccttattcaggaaagatctccaacattgcatttggcatccatctacaatcgg

SEQ ID NO: 94301 - DNA, 80 bp, synthetic construct
  source 1..80: mol_type = other DNA
acctttaggccttctgccttctaagtctgcataaagaaacctcaaaattggtgaaattcttttgtactggtaagataatt

SEQ ID NO: 94302 - DNA, 80 bp, synthetic construct
  source 1..80: mol_type = other DNA
aacggcaatttcatcttccatggctccctgagaggccctgatgtatgtgagtttagactcgggaaggccctcagcaaaac

SEQ ID NO: 94303 - DNA, 80 bp, synthetic construct
  source 1..80: mol_type = other DNA
tagactcgggaaggccctcagcaaaacctcgaatcttaaagtttttcaaagaagaaagcctgaaatgcctaggatcctcg

SEQ ID NO: 94304 - DNA, 80 bp, synthetic construct
  source 1..80: mol_type = other DNA
caattgtgagagtcttctgtgcagcctttgagttgaaacccttctcacagcatgggtggcagacaatctaagcctccaga

SEQ ID NO: 94305 - DNA, 80 bp, synthetic construct
  source 1..80: mol_type = other DNA
ggggaagcacaacagagagatcactcgatatcctcaattgatcttgcttcccaagtcagctcctcacatgttctgccctt

SEQ ID NO: 94306 - DNA, 80 bp, synthetic construct
  source 1..80: mol_type = other DNA
gaatccttagggactttaccttatttaagaatgatctccaacattgcatttggcatccatccacaggagaagatttgggt

SEQ ID NO: 94307 - DNA, 80 bp, synthetic construct
  source 1..80: mol_type = other DNA
cctctgttctctaagtctgcatagaggaaccttaaaattggtgaggccctcttaaactggtaagacaattgttccatgct

SEQ ID NO: 94308 - DNA, 80 bp, synthetic construct
  source 1..80: mol_type = other DNA
ctagatacttagccactaggtctttggcaatggcaatctcgtcctccatggcttcctgggggcctttctgcacaggggtt

SEQ ID NO: 94309 - DNA, 80 bp, synthetic construct
  source 1..80: mol_type = other DNA
caggttggagaaaagtgttttgggttgactcagggaagctctcagtttatccttaaaagcatctcaaagaagaaagcctg

SEQ ID NO: 94310 - DNA, 80 bp, synthetic construct
  source 1..80: mol_type = other DNA
ccacgcaccggggatcctaggcaatttgtgagtttcatctttgagactttaggactgaaatccaccacaaagtatgggcg

SEQ ID NO: 94311 - DNA, 80 bp, synthetic construct
  source 1..80: mol_type = other DNA
gaggacctaccataataaaatcatactctgaaaactggagcttatgcaagtcaacatcaagctcaagagggacaactggc

SEQ ID NO: 94312 - DNA, 80 bp, synthetic construct
  source 1..80: mol_type = other DNA
cccagctgccttgagtcaatcaagaactctttgataatctcagtgtctacatacagaggagactttcctttataggtggg

SEQ ID NO: 94313 - DNA, 80 bp, synthetic construct
  source 1..80: mol_type = other DNA
tccagatagcaccaacctccaacaatctggtaaaacacacgagttcactgtgccagaatacatggcctcaacatcatcaa

SEQ ID NO: 94314 - DNA, 80 bp, synthetic construct
  source 1..80: mol_type = other DNA
ctatgtatttcccccgttgactcattgaaccactaaagttaaggtggatagaaaagctttctctgaagctagcctcttga

SEQ ID NO: 94315 - DNA, 80 bp, synthetic construct
  source 1..80: mol_type = other DNA
cttctaatttggaatctaatggtttgactcaacttagtggatccagatggtaatgcagctacagactcaaagaagtcctc

SEQ ID NO: 94316 - DNA, 80 bp, synthetic construct
  source 1..80: mol_type = other DNA
caatgattcatctttgatgtcaaccaatcctgatgcaatcaactgactctgattgaatcttgctggttcaatgtcataat

SEQ ID NO: 94317 - DNA, 80 bp, synthetic construct
  source 1..80: mol_type = other DNA
catatttaaacatgggtctctctatacccttgtgaataaccttttccacaaatgaagagaacggtcctagtctctgtaga

SEQ ID NO: 94318 - DNA, 80 bp, synthetic construct
  source 1..80: mol_type = other DNA
ttctgcaaaagctgctggtttgagaacaaaggcctagttgaatgcaacaaccattacttatgtctcaactgcctttcgct

SEQ ID NO: 94319 - DNA, 80 bp, synthetic construct
  source 1..80: mol_type = other DNA
ccttcgccttcaggaactgatgtcttatgcggaaaccaagtgaaggaacccagagtccttgtcgtcgctacaaacgacct

SEQ ID NO: 94320 - DNA, 80 bp, synthetic construct
  source 1..80: mol_type = other DNA
cacatatgactcaaagtagatttgcctcatataattgtcaactgcatcactagtactaacaaccctctcctctatcattg

SEQ ID NO: 94321 - DNA, 80 bp, synthetic construct
  source 1..80: mol_type = other DNA
gctcatgcgttctactgtgagacactcgtagttcagatgacagaacaatgtagtgttcctcccgcttccatttaactaca

SEQ ID NO: 94322 - DNA, 80 bp, synthetic construct
  source 1..80: mol_type = other DNA
tgagaaacaagggacaatgcctcacagttcacatccagcgcaacacagaggtccaaaaattttattctaggcgaccactt

SEQ ID NO: 94323 - DNA, 80 bp, synthetic construct
  source 1..80: mol_type = other DNA
cattttggtggaggccagatcactcataaatggtaatatatgtttttcaaatatagtgggatacaatctcctaagagaat

SEQ ID NO: 94324 - DNA, 80 bp, synthetic construct
  source 1..80: mol_type = other DNA
ggatgatgtgactcacacccactctgtcttctaatagcttagacgctgtgggctttaatgggaagtaatcacacggatta

SEQ ID NO: 94325 - DNA, 80 bp, synthetic construct
  source 1..80: mol_type = other DNA
tgtttgaaaaactccattggtcttggctgtttgggctcccctaagacccaagctcccaattcgatcgcagttgataaaga

SEQ ID NO: 94326 - DNA, 80 bp, synthetic construct
  source 1..80: mol_type = other DNA
gatacacatataatcccacaataagggccgaaagtaaccagctacctccacaaactcttgtctcaccttttgagggactc

SEQ ID NO: 94327 - DNA, 80 bp, synthetic construct
  source 1..80: mol_type = other DNA
tccagaactgaatgccgtgctcacccatcagtggttcaatttcttgaacatttgcaattgatgattgtattgactttatg

SEQ ID NO: 94328 - DNA, 80 bp, synthetic construct
  source 1..80: mol_type = other DNA
tagaggttttctttattcggccctctcacacacttgctacccagtgttctgcacaacccaacaaagccagatgcgattga

SEQ ID NO: 94329 - DNA, 80 bp, synthetic construct
  source 1..80: mol_type = other DNA
gctcctaagtgtcagcagcagatgccccatctgcaagatgcccctacccactaggctcagggcatccaccagtccaacag

SEQ ID NO: 94330 - DNA, 80 bp, synthetic construct
  source 1..80: mol_type = other DNA
gctttgaaacgcagacttgttgactgcttcagacaggagtttctgtgcacctctagtgaatgtagatgacaatttatttt

SEQ ID NO: 94331 - DNA, 80 bp, synthetic construct
  source 1..80: mol_type = other DNA
atccttaaggggtgatgggcggtcagattcaaccagcagtattctaaatctgagtctagcaggggctcaacgcccatcat

SEQ ID NO: 94332 - DNA, 80 bp, synthetic construct
  source 1..80: mol_type = other DNA
actaaaaaggtttttcaatgaggatgaatgttcacttgagagataattggttgtaaactcttcatgaaggtctccaactt

SEQ ID NO: 94333 - DNA, 80 bp, synthetic construct
  source 1..80: mol_type = other DNA
tcaacttattaaatagttttcttaacattgatcgaaccttgccacaagcttcaggaatgagtctttcaatctgcctcatt

SEQ ID NO: 94334 - DNA, 80 bp, synthetic construct
  source 1..80: mol_type = other DNA
agcatattgcaacagtgatagtgttcttagttgaaccaaattacataagctcacaggcactccatttgcaactgactgat

SEQ ID NO: 94335 - DNA, 80 bp, synthetic construct
  source 1..80: mol_type = other DNA
cgatgacacttttgggactcacaaatttgttaagctgatcactcatgtaaaagtggaattctaatagtgtttcaaattca

SEQ ID NO: 94336 - DNA, 80 bp, synthetic construct
  source 1..80: mol_type = other DNA
ctcccccaatcggagaagccaacactgcgaatcccccaccatacagcccctagtccacccagagccccgcccagtggctc

SEQ ID NO: 94337 - DNA, 80 bp, synthetic construct
  source 1..80: mol_type = other DNA
tccggatcccgagacatcagttcagtgagattttgatcgaacagggatatttgatcatcactagatgtgtaagcatcgat

SEQ ID NO: 94338 - DNA, 80 bp, synthetic construct
  source 1..80: mol_type = other DNA
tacccctccacagatgcatccaatagcataattaatgaacctttcagaaatgagtgcatagaaatctgaagtgttatgca

SEQ ID NO: 94339 - DNA, 80 bp, synthetic construct
  source 1..80: mol_type = other DNA
aaatgccctgtcccatgtctaagacagaacttatgtgagaaggcactaaacccatttgaaagttggagtaaaaaaagtct

SEQ ID NO: 94340 - DNA, 80 bp, synthetic construct
  source 1..80: mol_type = other DNA
tcggtgacagtctgtgatgtgctagccctcaaacccagctgtgccttaatgaaagatttcatcatcgccgaaacaacatt

SEQ ID NO: 94341 - DNA, 80 bp, synthetic construct
  source 1..80: mol_type = other DNA
gaatggaatctctaccatcttgtgtacatgccatgtcaaaagagttgaaaggtaatcacgccccttaatgtctgcttgta

SEQ ID NO: 94342 - DNA, 80 bp, synthetic construct
  source 1..80: mol_type = other DNA
aatcttttgaaaggacaaccaagttttgcaaaattgtgaggaataagaaaggacacatcatgggtccccatttgctgtga

SEQ ID NO: 94343 - DNA, 80 bp, synthetic construct
  source 1..80: mol_type = other DNA
tccatactgtaggaaacatgagccaatgacacattcagcttcattgagagtatagcattttcaaattctttctcattgtt

SEQ ID NO: 94344 - DNA, 80 bp, synthetic construct
  source 1..80: mol_type = other DNA
taaggcaacttccagataactgccgactcagtgcctcaaaataatcttcgatcaacctagtgaacatttttgttcttaaa

SEQ ID NO: 94345 - DNA, 80 bp, synthetic construct
  source 1..80: mol_type = other DNA
tcacctatataaagttccctattgcctccgacctgctctttataagataaagaaaattttaatctccctgtatcaggtcc

SEQ ID NO: 94346 - DNA, 80 bp, synthetic construct
  source 1..80: mol_type = other DNA
agttgaattataggactgtggtgactcctgactgtagaaacacaaattcttcaacattgctgtagtgcagtttgttaacg

SEQ ID NO: 94347 - DNA, 80 bp, synthetic construct
  source 1..80: mol_type = other DNA
acagggctttactaagagcttccgagttgctctccctttcactaatcctcacatcatcagagagcctgtttgtgtcaaat

SEQ ID NO: 94348 - DNA, 80 bp, synthetic construct
  source 1..80: mol_type = other DNA
ttaaagttcaagcacttagatttgtaatgggagtatttacccatgagcttatttccgttcatcaataataatatcgactt

SEQ ID NO: 94349 - DNA, 80 bp, synthetic construct
  source 1..80: mol_type = other DNA
aaaacattggaaatactcaccgtcaacatatgtccttgtagctacagcctttgtgagttcactaatagggcagcctgtca

SEQ ID NO: 94350 - DNA, 80 bp, synthetic construct
  source 1..80: mol_type = other DNA
tagggccacaatagaagtacctctcctttagctcacaatcattgtaaaaagcatcacaaaactctttataaaagccttct

SEQ ID NO: 94351 - DNA, 80 bp, synthetic construct
  source 1..80: mol_type = other DNA
ggcaagatctcaaaatcaaaatcctcaaccatatggtgtgataactctcctttgatcaaccttatatgaaatctatttgg

SEQ ID NO: 94352 - DNA, 80 bp, synthetic construct
  source 1..80: mol_type = other DNA
aatgaccttgtctaagtcatttattgaggctcgatcacccgttatagaatgtgaattctgtctcagaggttccttatact

SEQ ID NO: 94353 - DNA, 80 bp, synthetic construct
  source 1..80: mol_type = other DNA
gatccacaatcttctcaactgtctctcttaactgatcaaagtacattgatgctccaccatccaagagaacttcatccaaa

SEQ ID NO: 94354 - DNA, 80 bp, synthetic construct
  source 1..80: mol_type = other DNA
tcagtctcatcaatctctggactctgtcctttggagcccatgactaaactgctcattgcctgctgaattttgtactcgta

SEQ ID NO: 94355 - DNA, 80 bp, synthetic construct
  source 1..80: mol_type = other DNA
gtcttgcttattgagtaaaaacttccctttccgagagaaaacttcagttagttgtgtgacagctagtgcagtaagtttat

SEQ ID NO: 94356 - DNA, 80 bp, synthetic construct
  source 1..80: mol_type = other DNA
tgaagtcatagttgagcactctggagccgtctgtatatttgttaatgaccacacttttgttgctagccagatctagggcc

SEQ ID NO: 94357 - DNA, 80 bp, synthetic construct
  source 1..80: mol_type = other DNA
gttgcacaaccacttgtaacaatggggtccctcatctctttctttatttccttctccttaaaaagagatccattattgaa

SEQ ID NO: 94358 - DNA, 80 bp, synthetic construct
  source 1..80: mol_type = other DNA
tgaggatgttaagagggagagaaacctctttgacacaccaggtctcttataattcagcttcttagcactagtgcatccct

SEQ ID NO: 94359 - DNA, 80 bp, synthetic construct
  source 1..80: mol_type = other DNA
ctttacttaggaacttttttgcattatatatcatctcatccaattcttctacagtggctttatctgctggattcacagca

SEQ ID NO: 94360 - DNA, 80 bp, synthetic construct
  source 1..80: mol_type = other DNA
acatgtccaaaattcagtttaggctcaaggaatttctcaaaacacttaatttggtctgtcaacctatctggagtttcttt

SEQ ID NO: 94361 - DNA, 80 bp, synthetic construct
  source 1..80: mol_type = other DNA
agttataaagtggcacatataagaaacattcaatacaaatttgaatctgtttgtaagcatacttttaacatcctcatgca

SEQ ID NO: 94362 - DNA, 80 bp, synthetic construct
  source 1..80: mol_type = other DNA
gcactatattcagcagggacctcaagagcctgaacaacagaaattcagtctctgtaatcaacttctcccttaatttgtcg

SEQ ID NO: 94363 - DNA, 80 bp, synthetic construct
  source 1..80: mol_type = other DNA
ataagctctctgtgataaaaatcagaaacgtaggccatcacaaagtacctcaagttttgtaagaacttctgacaccgctt

SEQ ID NO: 94364 - DNA, 80 bp, synthetic construct
  source 1..80: mol_type = other DNA
gctagggtgagccaaaatcacaatgagaatcatctttgtcagtgtctttatgtcaatcaacctattctttagttcgttac

SEQ ID NO: 94365 - DNA, 80 bp, synthetic construct
  source 1..80: mol_type = other DNA
agtcctctatccaacttaccatggtttccacagttgactgtagaacctcagcagaaaagattgatggaaagtaccttttc

SEQ ID NO: 94366 - DNA, 80 bp, synthetic construct
  source 1..80: mol_type = other DNA
ggatcggcatagaatgaacacacttcaccgacaacatcattgttgactgcatagcatttcgaacactcacctgttttttg

SEQ ID NO: 94367 - DNA, 80 bp, synthetic construct
  source 1..80: mol_type = other DNA
gtagagtaattgaaattcaacccctcccagagagaattcctgacagtatgcctctttacacctcaccacttggtatctgg

SEQ ID NO: 94368 - DNA, 80 bp, synthetic construct
  source 1..80: mol_type = other DNA
ctgccccaaattcgttttgtctcaacttcacagtcgaagaggtcttcatggaatttaccagagcaagactcaaagatgaa

SEQ ID NO: 94369 - DNA, 80 bp, synthetic construct
  source 1..80: mol_type = other DNA
tttctaagtctataagactcaaaatgtcaacagatcccattgtgtatggaaacctttcctcctgcgatttttgataactg

SEQ ID NO: 94370 - DNA, 80 bp, synthetic construct
  source 1..80: mol_type = other DNA
attgttggggtcactcctgagatatcgaggtccaacactaagtcatagacattgcactcaaacacattcatgttcactcc

SEQ ID NO: 94371 - DNA, 80 bp, synthetic construct
  source 1..80: mol_type = other DNA
ataatgatccacactgattcccacagctgcaagagcagcaacagctttagtcacagtcttctggatcactaattttagta

SEQ ID NO: 94372 - DNA, 80 bp, synthetic construct
  source 1..80: mol_type = other DNA
tttcattcttacatactagcatggatgatttggagacctcaatctgttgtctcctttctatccacttctttaagtctcgc

SEQ ID NO: 94373 - DNA, 80 bp, synthetic construct
  source 1..80: mol_type = other DNA
tttgttgactctagagagaccagccggtcattaacactaatgaaacaagagccaagccatcccttaggatgcctgttctt

SEQ ID NO: 94374 - DNA, 80 bp, synthetic construct
  source 1..80: mol_type = other DNA
atgttttacttgatcatgtatactcgcaagaagcaccaatgtgtcaaagactaacaacagttttctcctagtgtttaaga

SEQ ID NO: 94375 - DNA, 80 bp, synthetic construct
  source 1..80: mol_type = other DNA
ttctcaaggacttcaccttgttcaaaaacgacctccagcactgcatttgagacccatctgcggttgagccattagattct

SEQ ID NO: 94376 - DNA, 80 bp, synthetic construct
  source 1..80: mol_type = other DNA
ctactctcaaagtctgcataaagaaacctcaaaattggagaagttctcttatattgataaattaaatgctccacactatc

SEQ ID NO: 94377 - DNA, 80 bp, synthetic construct
  source 1..80: mol_type = other DNA
gtcagatgtgtataaggtactgccttaagcctcattcctccactgctcgactgtatcatcaccttccccttagatttgct

SEQ ID NO: 94378 - DNA, 80 bp, synthetic construct
  source 1..80: mol_type = other DNA
ttcaccaacaatcccttcgtcagcatataaattattgaatttacacatcagctctcctttatctactctgatgaactggc

SEQ ID NO: 94379 - DNA, 80 bp, synthetic construct
  source 1..80: mol_type = other DNA
gctctatttctccttgtctaattctattcctaaacacctggtactcctcttcaatctgcattttcacctcatgagctgat

SEQ ID NO: 94380 - DNA, 80 bp, synthetic construct
  source 1..80: mol_type = other DNA
aacttattgttaatgccttgatggcaaagagcaatcatgtcttcataatgattggcacggttgtctattaaggcatttaa

SEQ ID NO: 94381 - DNA, 80 bp, synthetic construct
  source 1..80: mol_type = other DNA
gctctccacacctgaaagtctgccagatgtcatagagagggactcacagagcctagcatactctgactcttcaaaaagtg

SEQ ID NO: 94382 - DNA, 80 bp, synthetic construct
  source 1..80: mol_type = other DNA
agttgctttcttgagcgaatcgtagtaatgagaacaatgtctccctaagcttgtcatttacccaatcagggatttgctca

SEQ ID NO: 94383 - DNA, 80 bp, synthetic construct
  source 1..80: mol_type = other DNA
ttgtaaaatgatgaccttccgtcaatgagcgggatgagattgatctccacagacttgagatcatctttcagttgttctaa

SEQ ID NO: 94384 - DNA, 80 bp, synthetic construct
  source 1..80: mol_type = other DNA
ttttctgagatcttcagtgtacttctgttcaaagttagctggtgaagatctcacaaaacactcaagtaaaatgaggacat

SEQ ID NO: 94385 - DNA, 80 bp, synthetic construct
  source 1..80: mol_type = other DNA
ttccattcagcttgtatccatcaggaacaacaaagcagagggaaggggttggaatcccaaagtcgtggagaatgctttcg

SEQ ID NO: 94386 - DNA, 80 bp, synthetic construct
  source 1..80: mol_type = other DNA
acagacttgccctctgtgttgtgttcacacccatttgcattgcatgagtcaagctcaatacaaagagacagcaactttag

SEQ ID NO: 94387 - DNA, 80 bp, synthetic construct
  source 1..80: mol_type = other DNA
tccttccataagaagcattctgggctctgtttgaacgagaaatgcaattttttgccttgatagtttttcattatcagcaa

SEQ ID NO: 94388 - DNA, 80 bp, synthetic construct
  source 1..80: mol_type = other DNA
atagcatagggcataccctctgaattcaacccaatcatccattgccttcaacaactcagttaggacattcacaccgagat

SEQ ID NO: 94389 - DNA, 80 bp, synthetic construct
  source 1..80: mol_type = other DNA
ggtacctcgcaactaaatctttaacggtggcaacctcgtcctccatagaaaagcaacacagaccaccaacacctattagc

SEQ ID NO: 94390 - DNA, 80 bp, synthetic construct
  source 1..80: mol_type = other DNA
acacctattagctaaatacgatcactagtatagaaagtctctgatccatccatcctctatctttactgtatgtaaatgat

SEQ ID NO: 94391 - DNA, 80 bp, synthetic construct
  source 1..80: mol_type = other DNA
gcaaacaaacaaagtcctcaaaggaaactgacagcccaagagccagtctgattcctgatgcctcccacatgggtcctcag

SEQ ID NO: 94392 - DNA, 80 bp, synthetic construct
  source 1..80: mol_type = other DNA
caggcatggtctttataagtagttgaaaaatgtctacacctgtccattgtatcctcaacttcagtctatctgtcatcatg

SEQ ID NO: 94393 - DNA, 80 bp, synthetic construct
  source 1..80: mol_type = other DNA
gcgactaaagctccaatcaacatgtcatgggagctgtcattgacttccttaataaaaacttcgagatcttgatcctgaat

SEQ ID NO: 94394 - DNA, 80 bp, synthetic construct
  source 1..80: mol_type = other DNA
gatgggtgtgaatgttgccaacttcctgtcacattcccacaatgctcctctatttacaaccagtggaactggctccactt

SEQ ID NO: 94395 - DNA, 80 bp, synthetic construct
  source 1..80: mol_type = other DNA
cccaagggacctcagtggggtgggttttttatgttgtgacacggctcacaacgagatctacacaggcgtatcgtcggcag

SEQ ID NO: 94396 - DNA, 80 bp, synthetic construct
  source 1..80: mol_type = other DNA
tatttagtcggactttagtgaaaaggcctgttttagtagctttctgggttaaagtatccaaccaaaatgggtaacagaca

SEQ ID NO: 94397 - DNA, 80 bp, synthetic construct
  source 1..80: mol_type = other DNA
cccttggcctctgatgaaaccctccatatttggatcccactgtccttcaccactgcttcaatgccctgagtttccaacaa

SEQ ID NO: 94398 - DNA, 80 bp, synthetic construct
  source 1..80: mol_type = other DNA
aacgcccgcaccatacaccccgtaaactccgaacccacacctccacctccacaacccacccccccctcagccgaggcacc

SEQ ID NO: 94399 - DNA, 80 bp, synthetic construct
  source 1..80: mol_type = other DNA
ccagagcacgtggggcccccccggggggacagcctggctctaatcaatgtcctcaacacacctctctggtccaaataact

SEQ ID NO: 94400 - DNA, 80 bp, synthetic construct
  source 1..80: mol_type = other DNA
gggacagcctggctctaatcaatgtcctcaacacacctctctggtccaaataactctgaacatgttcttccctttaatct

SEQ ID NO: 94401 - DNA, 80 bp, synthetic construct
  source 1..80: mol_type = other DNA
atatcaaaactaagatcattttggtcagtaacttaatatttgtcagctgttcggataactctgtgcactcctcaatccag

SEQ ID NO: 94402 - DNA, 80 bp, synthetic construct
  source 1..80: mol_type = other DNA
ctgaccattacattgaccatcttctgcagcacactactggaaaagaccgaaggaaaaaaccgtttggggtcagcataaaa

SEQ ID NO: 94403 - DNA, 80 bp, synthetic construct
  source 1..80: mol_type = other DNA
ctagatcgattgcatctaaaatatcaacagtgccaagagtataagggaacatatcctcctgggttctctgatagctaata

SEQ ID NO: 94404 - DNA, 80 bp, synthetic construct
  source 1..80: mol_type = other DNA
ttgagatccttctttgttgattctaatgagaccaacctgtcgttaacagatacaaagcaggagcctagccacccagtaag

SEQ ID NO: 94405 - DNA, 80 bp, synthetic construct
  source 1..80: mol_type = other DNA
gcatttatcaccatgtcttatgcgatccagccggtcagcaagtagaattagaacgtcaaaaataaggaggagtttcctcc

SEQ ID NO: 94406 - DNA, 80 bp, synthetic construct
  source 1..80: mol_type = other DNA
gtattgagaatcctcagagatttaatcttatttaggaaggatctccagcattgcatttgtccacttggggtatcagcagt

SEQ ID NO: 94407 - DNA, 80 bp, synthetic construct
  source 1..80: mol_type = other DNA
cttttcatcactggaacctaaatctgcatataggaacttaagaactggggaggctctccggaactgaaatgttaactgct

SEQ ID NO: 94408 - DNA, 80 bp, synthetic construct
  source 1..80: mol_type = other DNA
tgaggtctttggcgttggcaatgtcttcctccattattgaatgtagcacttaagttgagttgaggtttgtgtttgtgtga

SEQ ID NO: 94409 - DNA, 80 bp, synthetic construct
  source 1..80: mol_type = other DNA
agttgaggtttgtgtttgtgtgatctgcagatcaattgatagtaccccgcataatttctcacagaaatgagagtcaatat

SEQ ID NO: 94410 - DNA, 80 bp, synthetic construct
  source 1..80: mol_type = other DNA
aacctagtgcgtcgaccagaaggtgtgaagaactgtcaccaatctctcttacaaacatttctaaatcttggtcctgaata

SEQ ID NO: 94411 - DNA, 80 bp, synthetic construct
  source 1..80: mol_type = other DNA
atcttggagaagtcaaactcagtaaactgtagcttttcttgatcaacaactaatttcataggtacaacatttcccaattg

SEQ ID NO: 94412 - DNA, 80 bp, synthetic construct
  source 1..80: mol_type = other DNA
tatttagttggaccttagtgaaaaggcttgttttggtagctttctgggtcaaagcatccagttaaaatgggcaacagaca

SEQ ID NO: 94413 - DNA, 80 bp, synthetic construct
  source 1..80: mol_type = other DNA
aacgcccccaccatacaccccgtgagcccagagcccacacctccacctccacaacccagcgcaccctcaactaaggcacc

SEQ ID NO: 94414 - DNA, 80 bp, synthetic construct
  source 1..80: mol_type = other DNA
ccaggacacgtggcgcccaccatcagctctagtcaatgtcttctccacacctctctggtccaaacaattccaaacatgtc

SEQ ID NO: 94415 - DNA, 80 bp, synthetic construct
  source 1..80: mol_type = other DNA
atattaaaattaagatcatcttagttaataacttaatactttgcagctgttccgacaactctgtgcactcctctatccag

SEQ ID NO: 94416 - DNA, 80 bp, synthetic construct
  source 1..80: mol_type = other DNA
agcagcgatgtcttcttccatagttgactgtaactcttgaattaaggttgatcttgtccttgtatgaagagtcactcttt

SEQ ID NO: 94417 - DNA, 80 bp, synthetic construct
  source 1..80: mol_type = other DNA
tgatcttgtccttgtatgaagagtcactctttcaatggcactctacacaagttttttataattgagagtcagtggaggtc

SEQ ID NO: 94418 - DNA, 80 bp, synthetic construct
  source 1..80: mol_type = other DNA
gggctgaccatctagcgacctccacggcattttggattgcgcatttctggaatcattggagggagtgtcacacccagata

SEQ ID NO: 94419 - DNA, 80 bp, synthetic construct
  source 1..80: mol_type = other DNA
tttgcacacttagattcacaagggtgaatagcacttaaagcgcaatccaatagcctaggatccactgtggaggtcgctag

SEQ ID NO: 94420 - DNA, 80 bp, synthetic construct
  source 1..80: mol_type = other DNA
caagtgatgcggctacgcattgtggtaccctagcaaatggtgtgctacagacttttatgaggatggcctggggtgggagt

SEQ ID NO: 94421 - DNA, 80 bp, synthetic construct
  source 1..80: mol_type = other DNA
ggccatctcctataggttatctcggacttctctcacagagaactagagacatctacatcagtagaaggctgctaggaacg

SEQ ID NO: 94422 - DNA, 80 bp, synthetic construct
  source 1..80: mol_type = other DNA
ttagagtcatcagctgtgaataagtcaaacctgttggaaaccctgcggactgcaaggacttatttgacccagtagttcct

SEQ ID NO: 94423 - DNA, 80 bp, synthetic construct
  source 1..80: mol_type = other DNA
tgagtatccaaaaaacttactagttgaagtgtgtcacccagttggtctataaaaggcgcaatccagtagcctaggatcca

SEQ ID NO: 94424 - DNA, 80 bp, synthetic construct
  source 1..80: mol_type = other DNA
ttgttggctgtagttttgttcaaacaacacgccgcccaccatattctgaccgttaggggtcgtcggcagcgtctagttgt

SEQ ID NO: 94425 - DNA, 80 bp, synthetic construct
  source 1..80: mol_type = other DNA
tttaccttatcagcatcttccttcatttggtcaagatcccaactcataggcatattgtgggcaaatcatgccccaagcct

SEQ ID NO: 94426 - DNA, 80 bp, synthetic construct
  source 1..80: mol_type = other DNA
cagacatgggacaaatagtgacattctttcaagaagtccctcatgttattgaggaagtcatgaacattgtcctcattgct

SEQ ID NO: 94427 - DNA, 80 bp, synthetic construct
  source 1..80: mol_type = other DNA
ggattgtatcatgtttgatgcagctgtagtgggtgggcttgatgccaagatcttaagagctgtgctacccagggatatgg

SEQ ID NO: 94428 - DNA, 80 bp, synthetic construct
  source 1..80: mol_type = other DNA
gcatgtgacataagtccttatattgatcccaaacggcattctcaaacttcctggagtccggtttgctcatggaaatgtcc

SEQ ID NO: 94429 - DNA, 80 bp, synthetic construct
  source 1..80: mol_type = other DNA
tcgtggaagtgcctctataactgcacttgtcagaccgggttgtgcagcaaataaatcacctacatcaatcccatgtgaat

SEQ ID NO: 94430 - DNA, 80 bp, synthetic construct
  source 1..80: mol_type = other DNA
attttgcatcttgtttgaattgtttgaggtcagttggctccctaaagaaatggatgtaacaacctgagcttggctggtat

SEQ ID NO: 94431 - DNA, 80 bp, synthetic construct
  source 1..80: mol_type = other DNA
agggctatctcaactggatcatctggccttccttcaatgtccatccaagttttggcgtttgggtccaattgcagcatgga

SEQ ID NO: 94432 - DNA, 80 bp, synthetic construct
  source 1..80: mol_type = other DNA
gcttctgaggcctgctgtctgactccaaatctactatggtgttttcccaagccctaccagtgattgaggttcttgatgca

SEQ ID NO: 94433 - DNA, 80 bp, synthetic construct
  source 1..80: mol_type = other DNA
ttgtccctgcttgcaattctcaaggggatatacaactttgccacatgtggccttattggcctgatcacattcctctttct

SEQ ID NO: 94434 - DNA, 80 bp, synthetic construct
  source 1..80: mol_type = other DNA
gaatgtctgatacaaacatccccaagctcctcttgactttcaggattgattttaaaatcccgtccatagtttggggtgaa

SEQ ID NO: 94435 - DNA, 80 bp, synthetic construct
  source 1..80: mol_type = other DNA
actttgattgtctctaacatattgccgccatcaagcatgcaggctcctgccttcactgcagcacctagactgaagttgta

SEQ ID NO: 94436 - DNA, 80 bp, synthetic construct
  source 1..80: mol_type = other DNA
ctatgccatctcttccagcgcttgccccttgtccacctccagtcataccaatcatgtttaacagagcccttctctgatca

SEQ ID NO: 94437 - DNA, 80 bp, synthetic construct
  source 1..80: mol_type = other DNA
agttgctgggagctcagattccccatgtagactcctgagcttaatggcctctcagtacggataactttggacttcaattt

SEQ ID NO: 94438 - DNA, 80 bp, synthetic construct
  source 1..80: mol_type = other DNA
ttctaaatcagctgccaaagtcaacaaatcatcagagctgagagtcccaactctgagaacactcttttgttgtgtagatt

SEQ ID NO: 94439 - DNA, 80 bp, synthetic construct
  source 1..80: mol_type = other DNA
taagctcaacaaggttattaactgcctgattcaagtctctaaggcgttttagatcaccgtcatctctcttctgcttgcgc

SEQ ID NO: 94440 - DNA, 80 bp, synthetic construct
  source 1..80: mol_type = other DNA
ttgtggaaggtcgtgttcgacaatctacaaggggagctatcaactccaaacaattgagctaaacatggaaacactcaaca

SEQ ID NO: 94441 - DNA, 80 bp, synthetic construct
  source 1..80: mol_type = other DNA
attaatcgctgtacattgctgacttcagagaagtcaagaccgtgcaggagagcttgagcatctttgaccacctgcaactt

SEQ ID NO: 94442 - DNA, 80 bp, synthetic construct
  source 1..80: mol_type = other DNA
tatgttggagcaatagccggacaactctctcctcagggactgagtccacaagaatgacttcacttcttttgaagcactca

SEQ ID NO: 94443 - DNA, 80 bp, synthetic construct
  source 1..80: mol_type = other DNA
ttgttgttgttgggctgtgggccttttgcacacttgatctcacaaggatgattagcactctaagcgcaatccaatagcct

SEQ ID NO: 94444 - DNA, 80 bp, synthetic construct
  source 1..80: mol_type = other DNA
cgcaatccaatagcctaggatccactgtgcgcttgacaggtgatgaccatctagcgacctccacttccacgaaacatggt

SEQ ID NO: 94445 - DNA, 80 bp, synthetic construct
  source 1..80: mol_type = other DNA
tgactatgcccctatcctgtacaaaaaacagcagtcaccactacataagagtgggcaatgagacaggactggaattgacc

SEQ ID NO: 94446 - DNA, 80 bp, synthetic construct
  source 1..80: mol_type = other DNA
ttaactaatacaagtatcataaaccacaaattttgcaatctttctgatgcacacaaaaagaatctctatgaccacgccct

SEQ ID NO: 94447 - DNA, 80 bp, synthetic construct
  source 1..80: mol_type = other DNA
acttcaatggaggcaagatcagtgtccagtataatctgagtcatgcttatgcagtagatgcagctagtcattgcggcact

SEQ ID NO: 94448 - DNA, 80 bp, synthetic construct
  source 1..80: mol_type = other DNA
tctaatggacagccacataccggggatcctaggcattttggaacgcgcatttctagaatcattgagaagtgcctcacagt

SEQ ID NO: 94449 - DNA, 80 bp, synthetic construct
  source 1..80: mol_type = other DNA
tcagcaggagactgttgggaacgttcacatggacactatcagactctgaaggcaaagagaccccaggaggctactgctta

SEQ ID NO: 94450 - DNA, 80 bp, synthetic construct
  source 1..80: mol_type = other DNA
attttggaacgcgcatttctagagccattgaggagggctccacctcagatatgggacagatagtgacattctttcaagaa

SEQ ID NO: 94451 - DNA, 80 bp, synthetic construct
  source 1..80: mol_type = other DNA
ctgtatgcatatggcaaaggtccttaaactgatcccagacaacgttctcgaactttctagagtctgatttacttaaggaa

SEQ ID NO: 94452 - DNA, 80 bp, synthetic construct
  source 1..80: mol_type = other DNA
atgtctaccaattttatatccctccttccttgtgactccaacagtttcctgatgtcttctgacccttgacaggtaatgac

SEQ ID NO: 94453 - DNA, 80 bp, synthetic construct
  source 1..80: mol_type = other DNA
catgttccgtgggagtgcctctattacagcacttgttaggccaggttgtgcagcaaacaggtcactcacatcaattccat

SEQ ID NO: 94454 - DNA, 80 bp, synthetic construct
  source 1..80: mol_type = other DNA
acttagcagtgtaaattagccccaaatccgtcaaggcttgaacagcatcatttaagtccacctgcccttgcttagttaag

SEQ ID NO: 94455 - DNA, 80 bp, synthetic construct
  source 1..80: mol_type = other DNA
aagcgcaatccaatcgcctaggatccacagtggaggtcgctagatggtcttgatttctctgaagtcagtaatgtgcaacg

SEQ ID NO: 94456 - DNA, 80 bp, synthetic construct
  source 1..80: mol_type = other DNA
tcattgaagagagtgttacacccagatatgggacaaatagtaacattctttcaagaaatccctcatgttgttgaggaaat

SEQ ID NO: 94457 - DNA, 80 bp, synthetic construct
  source 1..80: mol_type = other DNA
attttggattgcgcattttgagagccaaaagggggagagtgtcccactcagatatggggcaaatagtgacattcttccag

SEQ ID NO: 94458 - DNA, 80 bp, synthetic construct
  source 1..80: mol_type = other DNA
gagattctagaagtttcttgatgtcctccgacccttgacaagtgattaccatgtttcgtgggagtgcttctatcactgca

SEQ ID NO: 94459 - DNA, 80 bp, synthetic construct
  source 1..80: mol_type = other DNA
cttgtcaagccaggctgcacagcaaatagatcacctatgtcgatcccgtgtgagtattttgcatcctgtttgaactgctt

SEQ ID NO: 94460 - DNA, 80 bp, synthetic construct
  source 1..80: mol_type = other DNA
aatccttgagagtcataagctgtgagtaggttagtcctgctgggaaaccagctgtttgcaatgatctgttggattccttg

SEQ ID NO: 94461 - DNA, 80 bp, synthetic construct
  source 1..80: mol_type = other DNA
agaccctaacaatgccatcccttccagtttttgcctcttgactaccaccagtcatgccaatcatgttcagcagggccctc

SEQ ID NO: 94462 - DNA, 80 bp, synthetic construct
  source 1..80: mol_type = other DNA
ctctggtctagttgctgggtgctcaaatttcccatgtagacacctgagctcagcggcctctcagtgcggataaccttgga

SEQ ID NO: 94463 - DNA, 80 bp, synthetic construct
  source 1..80: mol_type = other DNA
cgctcattattgccactgagctgtgagctctgcacacttagatctacaaggatgagttgcacctaaagcgcaatccaata

SEQ ID NO: 94464 - DNA, 80 bp, synthetic construct
  source 1..80: mol_type = other DNA
aaatgctacaaaaggagtatatggatagacaaggaaagacacctctagggcttgtggatatttttatctttagtaccagt

SEQ ID NO: 94465 - DNA, 80 bp, synthetic construct
  source 1..80: mol_type = other DNA
cactcactcagaagtcaaatcagagaaaatcaaatcaaagaaaaccaaagaacagcgcaatccaatagcctaggatcact

SEQ ID NO: 94466 - DNA, 80 bp, synthetic construct
  source 1..80: mol_type = other DNA
agatttgtataagagacagcctccacccaccggggatcctaggcatttgggattgcgcttttaagtgaaccttgtgtgat

SEQ ID NO: 94467 - DNA, 80 bp, synthetic construct
  source 1..80: mol_type = other DNA
cattcaactcataaataaagcagtcaatgcactaatcaatgaccaactaattatgaagaatcatttgagagacatcatgg

SEQ ID NO: 94468 - DNA, 80 bp, synthetic construct
  source 1..80: mol_type = other DNA
gcatcccttactgtaattatagtagatactggtacctgaacaacacgaaaacaggtaaatcatcactaccaaaatgctgg

SEQ ID NO: 94469 - DNA, 80 bp, synthetic construct
  source 1..80: mol_type = other DNA
cttgtttcaaatggttcttatctaaatgagacacacttttctgatgacattgagcaacaagcagataatatgataacaga

SEQ ID NO: 94470 - DNA, 80 bp, synthetic construct
  source 1..80: mol_type = other DNA
tcaagattccgactcacaggcatatcactgggaaaccttgtcccaagccacacaggctcaaccacatgggcatttgctca

SEQ ID NO: 94471 - DNA, 80 bp, synthetic construct
  source 1..80: mol_type = other DNA
tgtggcttgtataaacaacctggtgtgccagtcaaatggaaaagataggaggtagtcccacccatgggcccccgtgaccc

SEQ ID NO: 94472 - DNA, 80 bp, synthetic construct
  source 1..80: mol_type = other DNA
tctaattgcactcagtcttctggcaatattaaaaggaatttacaatattgccacttgtgggctctttgggctgatctcct

SEQ ID NO: 94473 - DNA, 80 bp, synthetic construct
  source 1..80: mol_type = other DNA
ccatgtctctcggaagtacagcccttagggttggtatattaagtcctcctgacacggctgcatcaaacattatgcaatcc

SEQ ID NO: 94474 - DNA, 80 bp, synthetic construct
  source 1..80: mol_type = other DNA
atgagctttatgtccctcctcccttgagaatccaagagtttcttgatatcatctgagccttggcaggttaagaccatgtt

SEQ ID NO: 94475 - DNA, 80 bp, synthetic construct
  source 1..80: mol_type = other DNA
gcgggggagagcctcgatcactgcactggtgagaccaggctgggcagagaaaagatctgccacatcaatcccgtgtgagt

SEQ ID NO: 94476 - DNA, 80 bp, synthetic construct
  source 1..80: mol_type = other DNA
actttgcatcttgtttaaactgctttaaatctgttggctctctgaagaagtgtatgtaacagcctgaaacaggctggtaa

SEQ ID NO: 94477 - DNA, 80 bp, synthetic construct
  source 1..80: mol_type = other DNA
aagtgtcatcagctgagagtaggtcaaccctgctggaaatcctgcagactgtagtgacttgtttgagcctgtaatgccca

SEQ ID NO: 94478 - DNA, 80 bp, synthetic construct
  source 1..80: mol_type = other DNA
ttcttcttctgtgcggtagatcatgttcaacaacctacaagggtgtttatgagttgcaaactttggaactggatatggca

SEQ ID NO: 94479 - DNA, 80 bp, synthetic construct
  source 1..80: mol_type = other DNA
cttgaccttgtttggtaagacatgccagagtcaaacttggcatggtgccgaattgattgttcaagaggtctgagttcttc

SEQ ID NO: 94480 - DNA, 80 bp, synthetic construct
  source 1..80: mol_type = other DNA
acatcccatattctgacaaccccgtctcttccaggttgggcaccctgagacccaccagtcatacctatcatgtttaatag

SEQ ID NO: 94481 - DNA, 80 bp, synthetic construct
  source 1..80: mol_type = other DNA
tgctttcctttgctcaagttgttgtgagctcagattccccatgtacacaccggagctcaacggcctctccgttctagtca

SEQ ID NO: 94482 - DNA, 80 bp, synthetic construct
  source 1..80: mol_type = other DNA
ctttagattttaacttctccagatcagcagccagtgtcagcaggtcatctgaagtcagtgttccaaccctcaaaatactt

SEQ ID NO: 94483 - DNA, 80 bp, synthetic construct
  source 1..80: mol_type = other DNA
ttctgttgcactgactttagttcaacaagattgttcactgcctgatttaaatccctgagacgtttcaggtcattgtcatc

SEQ ID NO: 94484 - DNA, 80 bp, synthetic construct
  source 1..80: mol_type = other DNA
cagacgttgcacattactgacttcagaaaagtcaagaccgtgaagaagggcctgagcgtctttgacaacttgaagcttta

SEQ ID NO: 94485 - DNA, 80 bp, synthetic construct
  source 1..80: mol_type = other DNA
aaccttaacatgacaatgcctttatcctgtacaaaaaacaacagtcatcattacattatggttgggaatgagacaggtct

SEQ ID NO: 94486 - DNA, 80 bp, synthetic construct
  source 1..80: mol_type = other DNA
tgtttgagcaataacctgagagctctctcctcagcgactgtgtccaaaggaatgattttacttctttggaaacactcatt

SEQ ID NO: 94487 - DNA, 80 bp, synthetic construct
  source 1..80: mol_type = other DNA
ctgactgatgcactctgattgttgggtgagagtgtcaccgggcaggtcaagaagggtaaaaggatttcaaagaacttcaa

SEQ ID NO: 94488 - DNA, 80 bp, synthetic construct
  source 1..80: mol_type = other DNA
ggaatttcaaagtatcttgaaattcaaagaatttcaaagaaattcaaagaaaagcgcaatccaatagcctaggatccact

SEQ ID NO: 94489 - DNA, 80 bp, synthetic construct
  source 1..80: mol_type = other DNA
ttgaaattcaaagaatttcaaagaaattcaaagaaaagcgcaatccaatagcctaggatccactgtgcggtggaggtccg

SEQ ID NO: 94490 - DNA, 80 bp, synthetic construct
  source 1..80: mol_type = other DNA
tgttgatgcagccaatcactgtggaactgttgcaaatggggttttgcaaactttcatgagaatggcttggcgtgggagtt

SEQ ID NO: 94491 - DNA, 80 bp, synthetic construct
  source 1..80: mol_type = other DNA
tgattctgggaagggaaattgggactgtataatgacttcctatcagtatttaataattcaaaacaccacctgggaggatc

SEQ ID NO: 94492 - DNA, 80 bp, synthetic construct
  source 1..80: mol_type = other DNA
cagatctactagatcatgggacagataataaccttctttcaagaggtgccccatgttatagaagaggtgatgaatatagt

SEQ ID NO: 94493 - DNA, 80 bp, synthetic construct
  source 1..80: mol_type = other DNA
agacttctcggtactttcacctggactctctctgattctgaaggaaatgatgcacctggtgggtactgtttgactagatg

SEQ ID NO: 94494 - DNA, 80 bp, synthetic construct
  source 1..80: mol_type = other DNA
tagtctcctggcgatactgaaggggatctacaatgttgctacttgtggcctttttggactgatcacctttcttcttctgt

SEQ ID NO: 94495 - DNA, 80 bp, synthetic construct
  source 1..80: mol_type = other DNA
cttggaaacactcattttggtcgaatcagaactcactggttgaagtgtcacacagcaaatcaacagtaggcgcaatctaa

SEQ ID NO: 94496 - DNA, 80 bp, synthetic construct
  source 1..80: mol_type = other DNA
tttgatcgatgctaataagaactcactgattgaaaatgctgaccagcaaatcaacagtagtaggcgcaatccaaaagcct

SEQ ID NO: 94497 - DNA, 80 bp, synthetic construct
  source 1..80: mol_type = other DNA
ataagaactcactgattgaaaatgctgaccagcaaatcaacagtagtaggcgcaatccaaaagcctaggatccactgtgc

SEQ ID NO: 94498 - DNA, 80 bp, synthetic construct
  source 1..80: mol_type = other DNA
tggggatcctaggcatttaggattgcgcatcttggaactccttttgaacttgagatttctgagtcatgggtcagataatc

SEQ ID NO: 94499 - DNA, 80 bp, synthetic construct
  source 1..80: mol_type = other DNA
ggattccctactgcaattacagtaagtactggtatctcaaccataccttgacggggaaaacctcactaccgagatgctgg

SEQ ID NO: 94500 - DNA, 80 bp, synthetic construct
  source 1..80: mol_type = other DNA
ctcatttcaaatgggtcttacctaaatgagactcatttttcagacgacattgagcagcaagctgataatatgattactga

SEQ ID NO: 94501 - DNA, 80 bp, synthetic construct
  source 1..80: mol_type = other DNA
aatgctacagaaagagtacatggaaagacagggtaaaacaccattggggttggttgacctctttgtgtttagcacaagtt

SEQ ID NO: 94502 - DNA, 80 bp, synthetic construct
  source 1..80: mol_type = other DNA
ttaagataccaacacacaggcacattgtcggcaaaccctgtccaaaaccacacaggctcaaccacatgggcatatgctca

SEQ ID NO: 94503 - DNA, 80 bp, synthetic construct
  source 1..80: mol_type = other DNA
tgtgggctttacaagcaacctggtgtaccagtcaaatggaagagatagactccacactggagcccccgtgacccaccgcc

SEQ ID NO: 94504 - DNA, 80 bp, synthetic construct
  source 1..80: mol_type = other DNA
aaaaggcatttacaacttcgcaacctgtgggatcattggcctggtgtcattcttgctgttatgcggaaggtcctgctcaa

SEQ ID NO: 94505 - DNA, 80 bp, synthetic construct
  source 1..80: mol_type = other DNA
ccatgtctctaggaagcactgctcttaaaatgggtgcattgaggcctcccgagacagctgcatcaaacataatacagtct

SEQ ID NO: 94506 - DNA, 80 bp, synthetic construct
  source 1..80: mol_type = other DNA
gcatatgacagaggtctttgaactgatcccacacttcattctcaaaccttcttgagtcagctttgctcagtgagatgtct

SEQ ID NO: 94507 - DNA, 80 bp, synthetic construct
  source 1..80: mol_type = other DNA
atttggcatcctgcttgaactgctttagatcagtaggctctctaaagaagtgtatatagcaacctgaactcggctgataa

SEQ ID NO: 94508 - DNA, 80 bp, synthetic construct
  source 1..80: mol_type = other DNA
cctcaatctacaaagggcagtatgaactacagaccctggaactagacatggaatcgttaaatatgaccatgcctttgtcc

SEQ ID NO: 94509 - DNA, 80 bp, synthetic construct
  source 1..80: mol_type = other DNA
gggtgtcagacacaaacatccccaaagctctcttgactttcaaaattgacttcaaaatgccatccattgtttggggagag

SEQ ID NO: 94510 - DNA, 80 bp, synthetic construct
  source 1..80: mol_type = other DNA
accttgattgtctccagcatgttccctccatcaagcatgcaggctccagctttcactgctgcgcccagactgaaattgta

SEQ ID NO: 94511 - DNA, 80 bp, synthetic construct
  source 1..80: mol_type = other DNA
gcctgatatgttcaaggagctcttgttgacatctatcatgttcagtatggggtgattcattgacagcctgtctaagtctg

SEQ ID NO: 94512 - DNA, 80 bp, synthetic construct
  source 1..80: mol_type = other DNA
tgtttggttagacatgccaatgtcaaacttggcatagtgccaaattgattgttgagcaagtctgcatttttcacatccca

SEQ ID NO: 94513 - DNA, 80 bp, synthetic construct
  source 1..80: mol_type = other DNA
acaccatctctgccagactgattgccttgattgccaccattcatcccaatcatgtttagaagtgccctcctttgatctag

SEQ ID NO: 94514 - DNA, 80 bp, synthetic construct
  source 1..80: mol_type = other DNA
ctgctgtgagcttaggttacccatgtaaacacccgaactgaggggcctttcagttcttaccaccttggatttcaactttt

SEQ ID NO: 94515 - DNA, 80 bp, synthetic construct
  source 1..80: mol_type = other DNA
ccaggtctgctgctaagaccaataggtcatctgagctcagtgttccaaccctaagaacactcttttgctgagtggactta

SEQ ID NO: 94516 - DNA, 80 bp, synthetic construct
  source 1..80: mol_type = other DNA
agctctactaaattgttgacagcttggttgaggtccctcaacctttttaagtcattgtcatctctcctctgcttacgcat

SEQ ID NO: 94517 - DNA, 80 bp, synthetic construct
  source 1..80: mol_type = other DNA
tgaggcgctggacattgttgacttcggagaagtcaaggccatgcagaagtgcttgagcatctttcacaacttgcaatttg

SEQ ID NO: 94518 - DNA, 80 bp, synthetic construct
  source 1..80: mol_type = other DNA
tgcagcaagaatactagccaccactacatcagagctggaaacgacacaggactagaattgacacttacaaataccagtat

SEQ ID NO: 94519 - DNA, 80 bp, synthetic construct
  source 1..80: mol_type = other DNA
atgttggtacaatagccagacagttctctcctgagagattgagtccaaaggaacgatttcacctcctttgaattgctcat

SEQ ID NO: 94520 - DNA, 80 bp, synthetic construct
  source 1..80: mol_type = other DNA
cctgagagattgagtccaaaggaacgatttcacctcctttgaattgctcatggtgatctggaagtctcaatggatggcag

SEQ ID NO: 94521 - DNA, 80 bp, synthetic construct
  source 1..80: mol_type = other DNA
aataaaccataaattctgcaacctatccgatgctcataaaaagaatctttatgatcatactcttatgagcataatctcta

SEQ ID NO: 94522 - DNA, 80 bp, synthetic construct
  source 1..80: mol_type = other DNA
atcagtttgaagcaatgagctgtgatttcaatggaggcaagattagtgtccagtacaacttgagtcattctaatgctgaa

SEQ ID NO: 94523 - DNA, 80 bp, synthetic construct
  source 1..80: mol_type = other DNA
ggggcagcaaaccattgtggaacagttgcaaatggaatattacagaccttcatgaggatggcatggggaggaagctatct

SEQ ID NO: 94524 - DNA, 80 bp, synthetic construct
  source 1..80: mol_type = other DNA
tgactcagggaaaggcaattgggattgtataatgaccagctaccaattcttaattattcaaaacacaacctgggaggatc

SEQ ID NO: 94525 - DNA, 80 bp, synthetic construct
  source 1..80: mol_type = other DNA
attgtcaattctcaaggccttccccaattggttatttgggcttgctttcccaaaaaaccagagacatctatataagcagg

SEQ ID NO: 94526 - DNA, 80 bp, synthetic construct
  source 1..80: mol_type = other DNA
accttcttccaggaggtgccacaagtcatagaggaggtgatgaacattgttctgatagcactctctcttttggctgtgtt

SEQ ID NO: 94527 - DNA, 80 bp, synthetic construct
  source 1..80: mol_type = other DNA
aggcttcttgggacctttacctggacactttcagactctgaaggccacgacacaccagggggctattgtctgagtagatg

SEQ ID NO: 94528 - DNA, 80 bp, synthetic construct
  source 1..80: mol_type = other DNA
gatgttgatagaggccgaacttaagtgctttggaaacacagctattgcgaaatgtaatgaaaagcatgatgaggagtttt

SEQ ID NO: 94529 - DNA, 80 bp, synthetic construct
  source 1..80: mol_type = other DNA
gtgatatgttgagattgtttgacttcaacaagcaagctatccaaagactcaagacagaggctcagatgagcattcagctt

SEQ ID NO: 94530 - DNA, 80 bp, synthetic construct
  source 1..80: mol_type = other DNA
aacaactccggtgtgcatatgacagaggtctttgaactgatcccacacttcattctcaaaccttcttgagtcagctttgc

SEQ ID NO: 94531 - DNA, 80 bp, synthetic construct
  source 1..80: mol_type = other DNA
tccggggtaatgcttccaaaactgcactggtcaagccaggctgtgctgcaaacagatcagtcaggtcaattccatgggaa

SEQ ID NO: 94532 - DNA, 80 bp, synthetic construct
  source 1..80: mol_type = other DNA
acactctcaccacaccatctctgccagactgattgccttgattgccaccattcatcccaatcatgtttagaagtgccctc

SEQ ID NO: 94533 - DNA, 80 bp, synthetic construct
  source 1..80: mol_type = other DNA
tctttgttggctcactcaggagtcaaatcagagaaaatcaagaagagtcaaagaatagcgcaatccaatagcctaggatc

SEQ ID NO: 94534 - DNA, 80 bp, synthetic construct
  source 1..80: mol_type = other DNA
catgctttaatgagtatcatttccacctttcacctatcaatcccaaatttcaaccagtatgaggctatgagttgcgactt

SEQ ID NO: 94535 - DNA, 80 bp, synthetic construct
  source 1..80: mol_type = other DNA
attttggattgcgcatttctagagccaacgaaaggagcacttcacccaagcatgggtcagatagtgacattctttcagga

SEQ ID NO: 94536 - DNA, 80 bp, synthetic construct
  source 1..80: mol_type = other DNA
taccaaccttatatcctttctcccttgtgactctaggagtttcttgatgtcctccgacccctggcatgtgataaccatat

SEQ ID NO: 94537 - DNA, 80 bp, synthetic construct
  source 1..80: mol_type = other DNA
tctgtggaaggtcatgttcgatgacctacaaagggaattatcaacttgaaacccttgaactgaacatggagatgcttaac

SEQ ID NO: 94538 - DNA, 80 bp, synthetic construct
  source 1..80: mol_type = other DNA
gagagtcatgagctgggagtaggtcagtcctgctgggaagccagctgactgtagagatctgttggattcgttgttcccgg

SEQ ID NO: 94539 - DNA, 80 bp, synthetic construct
  source 1..80: mol_type = other DNA
gttttttaggcttgtcatctgactctaaatccactacagtgttttcccaggctctaccagtgattgaggttcttgacgca

SEQ ID NO: 94540 - DNA, 80 bp, synthetic construct
  source 1..80: mol_type = other DNA
gagtgtctgacacaaacatccctagggttcttttaacctttaggatcgatttcaagatcccatctatagattgaggtgaa

SEQ ID NO: 94541 - DNA, 80 bp, synthetic construct
  source 1..80: mol_type = other DNA
gatgaatttgggtactttgcagtgtaaatcagtcctaaatctgtcagggcctgaacagcatcattcaagtctacctgtcc

SEQ ID NO: 94542 - DNA, 80 bp, synthetic construct
  source 1..80: mol_type = other DNA
aaacaagctagagtcaagcttggcattgtcccaaactgattatttaatagttccggatttcttacgtcccagactcttac

SEQ ID NO: 94543 - DNA, 80 bp, synthetic construct
  source 1..80: mol_type = other DNA
gataccatctcttccggcacttgttccttgactgccaccaaccataccgatcatgttcagcaaggctctcctctggtcaa

SEQ ID NO: 94544 - DNA, 80 bp, synthetic construct
  source 1..80: mol_type = other DNA
gttgctgggtgctcaggttacccatataaactcctgagctcagcggtctttcagtgcgaatcacctttgatttcaacttc

SEQ ID NO: 94545 - DNA, 80 bp, synthetic construct
  source 1..80: mol_type = other DNA
ctttcgaagcactcattgttaccgccgagttggttgccgccaaactggggtcttggtgcacttgggcggtggaggtcgct

SEQ ID NO: 94546 - DNA, 80 bp, synthetic construct
  source 1..80: mol_type = other DNA
atcagtatgaagctatgagttgtgacttcaacggaggcaagatcagcatccaatacaatttgagccacacctatgcagga

SEQ ID NO: 94547 - DNA, 80 bp, synthetic construct
  source 1..80: mol_type = other DNA
atgtaaacttctctggtcctttgagagaggagcccaagatagccaatgggtgatggtctcgagaattgacaatggtcctc

SEQ ID NO: 94548 - DNA, 80 bp, synthetic construct
  source 1..80: mol_type = other DNA
gaggaattctgtgacatgctgaggctttttgatttcaacaaacaagccattcggagattgaaggctgagactcaaatgag

SEQ ID NO: 94549 - DNA, 80 bp, synthetic construct
  source 1..80: mol_type = other DNA
ctacaatgcctgtatgcatatgacataggtctttgaattgatcccaaacaacattctcaaactttctggagtccaattta

SEQ ID NO: 94550 - DNA, 80 bp, synthetic construct
  source 1..80: mol_type = other DNA
attgtaaggatctattggacccattgttcccaggtttctgaggtttgttgtctgtctccaaatccaccatggtgttttcc

SEQ ID NO: 94551 - DNA, 80 bp, synthetic construct
  source 1..80: mol_type = other DNA
acttggcagtgtaaatcagtcctaaatccgttagggcttggacaacatcatttaagtccacctgtccttgtttagtcaaa

SEQ ID NO: 94552 - DNA, 80 bp, synthetic construct
  source 1..80: mol_type = other DNA
tgttgttatcgagctgtgtctcttctgcacacttagacccacaaggatgaaaagccggataactctctcctcaaagactg

SEQ ID NO: 94553 - DNA, 80 bp, synthetic construct
  source 1..80: mol_type = other DNA
ggtccacaagaatgacttcacttctttcgaagcactcattgttgttatcgagctgtgtctcttctgcacacttagaccca

SEQ ID NO: 94554 - DNA, 80 bp, synthetic construct
  source 1..80: mol_type = other DNA
cattttggattgcgcatttctggaatcattgaagagagtgccacacccagacatggggcaaatagtgacattctttcaag

SEQ ID NO: 94555 - DNA, 80 bp, synthetic construct
  source 1..80: mol_type = other DNA
ttcgtgggagagcctccaatacagcacttgttagaccaggttgtgcagcaaataggtcacttacatcaatcccatgtgag

SEQ ID NO: 94556 - DNA, 80 bp, synthetic construct
  source 1..80: mol_type = other DNA
actgtagggatctattggacccattgttcccaggtttttgaggcttgttatctgtctccaaatccaccacagtattttcc

SEQ ID NO: 94557 - DNA, 80 bp, synthetic construct
  source 1..80: mol_type = other DNA
caagctctaccaacaattgaagttctcgatgcaatgtagggccatccgtctcctgaaaggcaaatcttgtacagaatgtt

SEQ ID NO: 94558 - DNA, 80 bp, synthetic construct
  source 1..80: mol_type = other DNA
tgttgttgctgagctgtaagtctcctgcacacttagattcacaagggtgaatagccggataattctctcctcaaggactg

SEQ ID NO: 94559 - DNA, 80 bp, synthetic construct
  source 1..80: mol_type = other DNA
agtccacagaaatgactttacttccttcgaaacactcattgttgttgctgagctgtaagtctcctgcacacttagattca

SEQ ID NO: 94560 - DNA, 80 bp, synthetic construct
  source 1..80: mol_type = other DNA
ccatctagcgacctccactgtgaccatctagcgacctccaccggggatcctaggcattttggattgcgcattttggaatc

SEQ ID NO: 94561 - DNA, 80 bp, synthetic construct
  source 1..80: mol_type = other DNA
tatatcctttctcccttgtgattccaaaagccttttgatgtcttctgatccttgacaggtgatgaccatgttccttggga

SEQ ID NO: 94562 - DNA, 80 bp, synthetic construct
  source 1..80: mol_type = other DNA
taagagtcataagttgagaataagtcagccctgcaggaaaaccagcagattgcagagacttgttggatctgttgtcccca

SEQ ID NO: 94563 - DNA, 80 bp, synthetic construct
  source 1..80: mol_type = other DNA
ggtttctgaggcttgctgtctgactccaaatccacaatggtgttttcccaagccctaccagtaattgatgtcctggatgc

SEQ ID NO: 94564 - DNA, 80 bp, synthetic construct
  source 1..80: mol_type = other DNA
tagctgttctcgagctgtgagccttctgcacacttggacttgttggggtgaatagcacttgaagcgcaatccaatagcct

SEQ ID NO: 94565 - DNA, 80 bp, synthetic construct
  source 1..80: mol_type = other DNA
gtgagccttctgcacacttggacttgttggggtgaatagcacttgaagcgcaatccaatagcctaggatccactcgacct

SEQ ID NO: 94566 - DNA, 80 bp, synthetic construct
  source 1..80: mol_type = other DNA
atttaagagagagaacgttgtgttctagtatggggcagatagtgacgttctttcaagaggtccctcatgttattgaggaa

SEQ ID NO: 94567 - DNA, 80 bp, synthetic construct
  source 1..80: mol_type = other DNA
aaatgctgcagaaggaatacattgacagacaagggaaaactccacttggattagttgacctctttgtatttagtactagc

SEQ ID NO: 94568 - DNA, 80 bp, synthetic construct
  source 1..80: mol_type = other DNA
ccacgatgcctgtatgcatatgacacagatccttaaattgatcccagacagcattctcgaactttctggcgtctggtttg

SEQ ID NO: 94569 - DNA, 80 bp, synthetic construct
  source 1..80: mol_type = other DNA
gagggtcattaactgggaataagtcaatcctgcagggaagccagcggattgtaaggatctgttggacccattgttcccag

SEQ ID NO: 94570 - DNA, 80 bp, synthetic construct
  source 1..80: mol_type = other DNA
ccaatgtgagcattataaaccataagttttgcaacctttctgatgcacacaaaaagaatctctatgatcacaccctcatg

SEQ ID NO: 94571 - DNA, 80 bp, synthetic construct
  source 1..80: mol_type = other DNA
caccaattttatgtccttccttccttgtgactctaacagtttcttgatatcttctgacccttgacaagtgatgaccatgt

SEQ ID NO: 94572 - DNA, 80 bp, synthetic construct
  source 1..80: mol_type = other DNA
gagggtcatcagctgtgaataagtcagtcctgcagggaaaccagcagattgtagggaccgattggacccactgttcccag

SEQ ID NO: 94573 - DNA, 80 bp, synthetic construct
  source 1..80: mol_type = other DNA
tctttattggctcactcagaggtttactggttgaaagtttatcagtaagtcaatgaatagcgcaatccaatagcctagga

SEQ ID NO: 94574 - DNA, 80 bp, synthetic construct
  source 1..80: mol_type = other DNA
ttgtgggctatataaacagccaggagtgtctgtgaggtggaagagatagagccccccacgggcccccgtgacccaccgcc

SEQ ID NO: 94575 - DNA, 80 bp, synthetic construct
  source 1..80: mol_type = other DNA
ggactgcatcatgtttgatgcagctgtgatgggtggattcgacgcgagagtcttgagggctgtgctgcccagagacatgg

SEQ ID NO: 94576 - DNA, 80 bp, synthetic construct
  source 1..80: mol_type = other DNA
gcgactctaggagtctcttgatatcttccgacccctggcatgtgataaccatatttcgtggaagtgcctctatcactgca

SEQ ID NO: 94577 - DNA, 80 bp, synthetic construct
  source 1..80: mol_type = other DNA
ttgtttagttaaacaagctagagtcaaacttggcattgtcccaaactgattatttaatagttctgggtttcttacgtccc

SEQ ID NO: 94578 - DNA, 80 bp, synthetic construct
  source 1..80: mol_type = other DNA
agacccttacaataccatcccttccagcacttgttccttgactgccaccaaccatgccgatcatgtttagcagggctctc

SEQ ID NO: 94579 - DNA, 80 bp, synthetic construct
  source 1..80: mol_type = other DNA
ctctggtcaagctgctgggtgctcaggttccccatgtaaactcctgagctcagcggtctttcagtgcgaattacctttga

SEQ ID NO: 94580 - DNA, 80 bp, synthetic construct
  source 1..80: mol_type = other DNA
gctcattgttgtcatcaaactgtgggtcttggtgcacttgggctcacaaggatgaatagcactcaaagcgcaatccaata

SEQ ID NO: 94581 - DNA, 80 bp, synthetic construct
  source 1..80: mol_type = other DNA
ccatcacctattggctatcttgggctcctttctcaaaggaccagagaaatttacatcagtagaagactgctaggaacatt

SEQ ID NO: 94582 - DNA, 80 bp, synthetic construct
  source 1..80: mol_type = other DNA
tttaggagccttgcctgaaggtcacacaattaggatgggacagatcgtgacatttttccaagaagttcctcatgttattg

SEQ ID NO: 94583 - DNA, 80 bp, synthetic construct
  source 1..80: mol_type = other DNA
cctaaccaattacactttgctcaaccataaattctgcaacctctcagatgctcataagaaaaatctttatgatcatgctc

SEQ ID NO: 94584 - DNA, 80 bp, synthetic construct
  source 1..80: mol_type = other DNA
tgattctagacatggaaattgggattgtataatgactagttatagatacttgattatccagaacacaacttgggaagacc

SEQ ID NO: 94585 - DNA, 80 bp, synthetic construct
  source 1..80: mol_type = other DNA
ccatccccaattggctaccttgggctcctctcacagaagaccagggatgtctacattagtagaagactactgggaacatt

SEQ ID NO: 94586 - DNA, 80 bp, synthetic construct
  source 1..80: mol_type = other DNA
ggaaatgaaacaccaggaggatactgcctcactagatggatgctgatcgaggctgagttaaagtgttttgggaacacggc

SEQ ID NO: 94587 - DNA, 80 bp, synthetic construct
  source 1..80: mol_type = other DNA
atattgtcccttattgcattatccctcctagcaattctaaagggactatacaatgttgccacatgtggcttaattggact

SEQ ID NO: 94588 - DNA, 80 bp, synthetic construct
  source 1..80: mol_type = other DNA
tcgcccttgattctagacatggaagttgggactgtataatgactagttaccagtacttgatcattcagaacacaacttgg

SEQ ID NO: 94589 - DNA, 80 bp, synthetic construct
  source 1..80: mol_type = other DNA
agagaactagagacatttacatcagcaggaggctgttggggacatttacctggacactatcagactcagagggaaacgag

SEQ ID NO: 94590 - DNA, 80 bp, synthetic construct
  source 1..80: mol_type = other DNA
gctttctacaaaagactttccactaaagactttccagaagaggcgtggcctaggcaagactagaagtagcgagccctcag

SEQ ID NO: 94591 - DNA, 80 bp, synthetic construct
  source 1..80: mol_type = other DNA
gccagcagcagaaaaagtaggaacagcatctcgagacctagacaaatatagagcaatcacaagtagcaatacagcacaga

SEQ ID NO: 94592 - DNA, 80 bp, synthetic construct
  source 1..80: mol_type = other DNA
acgaaaggagaaataaaaaactgctctttcaacctcacttcaagcataagcgataagcctcagaaacaacgtgcactttt

SEQ ID NO: 94593 - DNA, 80 bp, synthetic construct
  source 1..80: mol_type = other DNA
tactagagtcaaaaaataaagaatagtgctatcagcttgctcaacgccacagctataacagtagctaagagaacagataa

SEQ ID NO: 94594 - DNA, 80 bp, synthetic construct
  source 1..80: mol_type = other DNA
gacttcaagcatgagcgataagcctcagaaacaacgtgcacttttttataagcttgatgtggtacaaataaatgagacta

SEQ ID NO: 94595 - DNA, 80 bp, synthetic construct
  source 1..80: mol_type = other DNA
gacgcaagaagtaaaaagccctcaaatattagtagaatctcctgcagtactaaagtcaagaaataaagaatagtactatc

SEQ ID NO: 94596 - DNA, 80 bp, synthetic construct
  source 1..80: mol_type = other DNA
agaaataaaaaactgctctttcaacatcacttcaagcatgagcgataagcctcaggaacaacgtgcacttttttataagc

SEQ ID NO: 94597 - DNA, 80 bp, synthetic construct
  source 1..80: mol_type = other DNA
cttaattgaaaaatcgcagatccagcaggaaataaataaacaagaactattagcattagataagtaggcaagcctgtaaa

SEQ ID NO: 94598 - DNA, 80 bp, synthetic construct
  source 1..80: mol_type = other DNA
gtaggacagagaaattcaaaattacacaaagataatatacaacttacttgaggaatcgcaaatccaacaggaaaagaaat

SEQ ID NO: 94599 - DNA, 80 bp, synthetic construct
  source 1..80: mol_type = other DNA
gaagcagatccaaaaaattaataactaaattcttaccactcatctaagacgacctacagagcctgtgccttttcagctac

SEQ ID NO: 94600 - DNA, 80 bp, synthetic construct
  source 1..80: mol_type = other DNA
caccacttaaaagacttactcttaattgtactaaagactatgcaagttctaagacacaaaaagtaaaagatcctcaagta

SEQ ID NO: 94601 - DNA, 80 bp, synthetic construct
  source 1..80: mol_type = other DNA
ctagtaaagtctcctgcagtattagattcaaaaactaaaaaatagtgctattagcttgctcaataccatagctatcgcag

SEQ ID NO: 94602 - DNA, 80 bp, synthetic construct
  source 1..80: mol_type = other DNA
agagaaattcaaaattacacaaagataatatacaacttacttaaagaatcgcaaatccaacagaaaaagaataaaaaaga

SEQ ID NO: 94603 - DNA, 80 bp, synthetic construct
  source 1..80: mol_type = other DNA
agcctggcgtttcatcatagagcccaagaacaacatccagagtactacaaagactgctgacactgagctatctacaaaag

SEQ ID NO: 94604 - DNA, 80 bp, synthetic construct
  source 1..80: mol_type = other DNA
caacttacttgaggaatcgcaaatccaacaggaaaaaaatgaaaaggaattattagaactaaatcaataggcaaatttgt

SEQ ID NO: 94605 - DNA, 80 bp, synthetic construct
  source 1..80: mol_type = other DNA
gagatagtagtacaaaagatagtagtacaactaatagtacaaagaagaccttcagacctagagaaaaaaatatgaaggac

SEQ ID NO: 94606 - DNA, 80 bp, synthetic construct
  source 1..80: mol_type = other DNA
caacttacttgaaaaatcgcaaatccaacaagaaaagaataaaaagaaattattaaaactagatcaataggcaaatttgt

SEQ ID NO: 94607 - DNA, 80 bp, synthetic construct
  source 1..80: mol_type = other DNA
tattaaattcaagaactaaagaatagtgctgttagcttgctcaataccatagctatcgcagtaactgaagaaacagataa

SEQ ID NO: 94608 - DNA, 80 bp, synthetic construct
  source 1..80: mol_type = other DNA
acaacatccagagtactacaaagactgctgacactgagctatctacaaaagactttccgctgaagactttccaaagaagt

SEQ ID NO: 94609 - DNA, 80 bp, synthetic construct
  source 1..80: mol_type = other DNA
tgcgtcgagagagctcctctggtttctctttcgctttcaagtccctgttcgggcgccactgctaagattagggacctgaa

SEQ ID NO: 94610 - DNA, 80 bp, synthetic construct
  source 1..80: mol_type = other DNA
atgagatttagactaacatgacctagaagcagtaagaaaaagaaattgacaattacacagacacaatatataacttaatt

SEQ ID NO: 94611 - DNA, 80 bp, synthetic construct
  source 1..80: mol_type = other DNA
ttcaagtctctgttcgggcgccactgctagagatttaggacctgaaagcgaaagagaaaccagaggagctctctcgacgc

SEQ ID NO: 94612 - DNA, 80 bp, synthetic construct
  source 1..80: mol_type = other DNA
tttttctactgtaatacaacacagctgtttaatagtacttagaataatagtacttagaatagtactaataattaaaatag

SEQ ID NO: 94613 - DNA, 80 bp, synthetic construct
  source 1..80: mol_type = other DNA
tcaataaagcttgcctaggtaagcattatccaacccaagggaccaaggcgaaacgcggaagccctctttcgcttgaacaa

SEQ ID NO: 94614 - DNA, 80 bp, synthetic construct
  source 1..80: mol_type = other DNA
ccagaggagctctctcgacgcaggactcggcttgctgagcgcgcacttcaagtccctgttcgggcgccactgctagagat

SEQ ID NO: 94615 - DNA, 80 bp, synthetic construct
  source 1..80: mol_type = other DNA
ctagaagcagtaagaaaaagaaattgacaattacacagacatgatatataacttaattgaacaatcacagatccaacaag

SEQ ID NO: 94616 - DNA, 80 bp, synthetic construct
  source 1..80: mol_type = other DNA
tagactaacatgacctagaagcagtaggaaaaagaaattgacaattatacagacacaatatataacttaattgaacaatc

SEQ ID NO: 94617 - DNA, 80 bp, synthetic construct
  source 1..80: mol_type = other DNA
cccgaaaacctgcatagaatagaagacgaacacagagaagtattgcagtaaaagtttgacagccgcctagcatttcatca

SEQ ID NO: 94618 - DNA, 80 bp, synthetic construct
  source 1..80: mol_type = other DNA
acaactgcttgttaagccccgaaaacctgcatagaataaaagacgaacacagagaagtattgcagtaaaagtttgacagc

SEQ ID NO: 94619 - DNA, 80 bp, synthetic construct
  source 1..80: mol_type = other DNA
aggactcggcttgctgaagcgcgcacggtaccataatttcactaagggagctcgatgctgcatataagcagctgcttttt

SEQ ID NO: 94620 - DNA, 80 bp, synthetic construct
  source 1..80: mol_type = other DNA
agccagcagcagatgaggtaagagcagcatctcgagacctagaaaggcatagagctctcacaagtaacaatacatcagtt

SEQ ID NO: 94621 - DNA, 80 bp, synthetic construct
  source 1..80: mol_type = other DNA
gggacctgaaagcgaaagagaaaccagaggagctctctcgacgcaggactcggcttgctgaagctagcggaggctagaag

SEQ ID NO: 94622 - DNA, 80 bp, synthetic construct
  source 1..80: mol_type = other DNA
cccgaacagggacctgaaagcgaaagagaaaccagaggagctctctcgacgcaggactcttttgactagcggaggctaga

SEQ ID NO: 94623 - DNA, 80 bp, synthetic construct
  source 1..80: mol_type = other DNA
ggagctctctcgacgcaggactcggcttgctgaagcgcgcacagcaagaggcgaggggcgagcgagggacctgaaagcga

SEQ ID NO: 94624 - DNA, 80 bp, synthetic construct
  source 1..80: mol_type = other DNA
aagacgagctcagccagcagcagataaggtaagagcagcatctcgagacctagaaaggcatagagctctcacaagtaaca

SEQ ID NO: 94625 - DNA, 80 bp, synthetic construct
  source 1..80: mol_type = other DNA
catgaattcttaacaattatctaggtcgacctgcgaagcctgttcctcttcagctaccaccacttaaaaaacttactctt

SEQ ID NO: 94626 - DNA, 80 bp, synthetic construct
  source 1..80: mol_type = other DNA
ttctcagatatctgtcgtcttttcatcaattttttttttttgctaccaaatgtgtggcacataatgctgtgttttcatta

SEQ ID NO: 94627 - DNA, 80 bp, synthetic construct
  source 1..80: mol_type = other DNA
tcatgattaaacctcctgcttaggaaagtcaaataccgcacttacaagtgggagctaaacaatggggtacacatggacac

SEQ ID NO: 94628 - DNA, 80 bp, synthetic construct
  source 1..80: mol_type = other DNA
acagagtaaaataagagacattggagactccagaaggtgggagggaggtgaggctccacaggctgcccattgcgtgcagt

SEQ ID NO: 94629 - DNA, 80 bp, synthetic construct
  source 1..80: mol_type = other DNA
cttgctgtgcctttgatcattctgatgtgtcattgttgatagctccccacgcttttgtgtaaagtctgttgtgtccgaga

SEQ ID NO: 94630 - DNA, 80 bp, synthetic construct
  source 1..80: mol_type = other DNA
cagcagatagggaacgagctgagccagcagcaaatggggtggaagcagcatctagagacctaaaaaaatataaagcactt

SEQ ID NO: 94631 - DNA, 80 bp, synthetic construct
  source 1..80: mol_type = other DNA
aatatcaccacaagcataaaggataagatgaaaaaagaagcggcacttttttataaaattgatttagtaaaaatagatga

SEQ ID NO: 94632 - DNA, 80 bp, synthetic construct
  source 1..80: mol_type = other DNA
aagagaaatgacaaactgcactttcaatatcaccacaagcataaaggataagatgaaaaaagaagcagcacttttttata

SEQ ID NO: 94633 - DNA, 80 bp, synthetic construct
  source 1..80: mol_type = other DNA
ggttttcatgggttcagaagggagaaagtgcatgctaattggtccatgggcggccaatggaccggaaaaagccctgtaac

SEQ ID NO: 94634 - DNA, 80 bp, synthetic construct
  source 1..80: mol_type = other DNA
cccgccgggtcccacccctttgcactcacgagcctgtctgcctcctgctgccatcaatcacagagcccaggctgttcggg

SEQ ID NO: 94635 - DNA, 80 bp, synthetic construct
  source 1..80: mol_type = other DNA
ctgctctttcaataccactgcaagcataagagataaggtacagagaaaatttgcgcttttttataaactagatatagtac

SEQ ID NO: 94636 - DNA, 80 bp, synthetic construct
  source 1..80: mol_type = other DNA
aaataaataataataataataccagtagtgccaatgataataagaccagtgccaatgccagtgccaatgccagtgccagc

SEQ ID NO: 94637 - DNA, 80 bp, synthetic construct
  source 1..80: mol_type = other DNA
tcaatgccactgatgatagttggaaggaaatgaaaaactgcactttcaataccactgcaggcataagagataaggtgaag

SEQ ID NO: 94638 - DNA, 80 bp, synthetic construct
  source 1..80: mol_type = other DNA
aaaactgctctttcaataccactgcaagcataaaggataaggtgcaaggagaatttgcgcttttttatacacaagatata

SEQ ID NO: 94639 - DNA, 80 bp, synthetic construct
  source 1..80: mol_type = other DNA
aagttttctacaaaagactttccgctaaagactttccagaaaaagtgtggcctaggcaggacagagaagtggcaagccct

SEQ ID NO: 94640 - DNA, 80 bp, synthetic construct
  source 1..80: mol_type = other DNA
gccactgatgatagttggaaggaaataaaaaactgcactttcaataccactacaagcataaaagataaggtgaaaaagga

SEQ ID NO: 94641 - DNA, 80 bp, synthetic construct
  source 1..80: mol_type = other DNA
ggaaataaaaaactgcactttcaataccactacaagcataaaaaataagatgaaaaaggaatttgcgcttttttatacac

SEQ ID NO: 94642 - DNA, 80 bp, synthetic construct
  source 1..80: mol_type = other DNA
tcaataccactgcaagcataaaggataaggtgcagggagaatttgcgcttttttatacacaagatatagtatcaatagac

SEQ ID NO: 94643 - DNA, 80 bp, synthetic construct
  source 1..80: mol_type = other DNA
aatactttaaaggaaatgaaaaactgctctttcaataccactgcaagcataagagataaggtgaaaagagaatttgcgct

SEQ ID NO: 94644 - DNA, 80 bp, synthetic construct
  source 1..80: mol_type = other DNA
acattaagaaagaaatgaaaaactgctcttttaataccactgcaagcataaaagataaagtacagagagaatttgcgctt

SEQ ID NO: 94645 - DNA, 80 bp, synthetic construct
  source 1..80: mol_type = other DNA
ttttataaactagatatagtacaaataaataataaaaatattaccagtgccaatgccagtgccagctataagttaataag

SEQ ID NO: 94646 - DNA, 80 bp, synthetic construct
  source 1..80: mol_type = other DNA
gatagttggaaggaaataaaaaactgcactttcaataccactacaagcataaaaaataaggtgaaaaaggaatttgcgct

SEQ ID NO: 94647 - DNA, 80 bp, synthetic construct
  source 1..80: mol_type = other DNA
ctgcactttcaataccactacaagcataaaaaataaggtgaaaaaagaatttgcgcttttttatacactagatatagtac

SEQ ID NO: 94648 - DNA, 80 bp, synthetic construct
  source 1..80: mol_type = other DNA
gataggtggcaagtagtcaaaacatagtaagagcgaatagactaatgtaagaaaaaaaatggcacaggctgaggcagcag

SEQ ID NO: 94649 - DNA, 80 bp, synthetic construct
  source 1..80: mol_type = other DNA
catcatcctcatatcccgaacagggacctgaaagcgaaagagaaaccagaggagctctctcgacgcaggactcaaaaaat

SEQ ID NO: 94650 - DNA, 80 bp, synthetic construct
  source 1..80: mol_type = other DNA
agaagaggcgcggcctaggcaagactagaagtagcgagccctcagatgctgcatataagcagctgcttttgcctatacta

SEQ ID NO: 94651 - DNA, 80 bp, synthetic construct
  source 1..80: mol_type = other DNA
aaaaaatctacctaacataaataccaacacacaaaaaaattaaaaaaaataaacaagtaaataaattagtcaatgctaaa

SEQ ID NO: 94652 - DNA, 80 bp, synthetic construct
  source 1..80: mol_type = other DNA
atcaaaaaaatattattcttaaataaaataaacaaagcccaaaaaaaacataaaaaatatcacaataattaaaaagcaat

SEQ ID NO: 94653 - DNA, 80 bp, synthetic construct
  source 1..80: mol_type = other DNA
agaaattagcaatgtcacggacataatatacagattaattaaaaactcgcaaaaccaacaaaaaaaaaataaaaaaaact

SEQ ID NO: 94654 - DNA, 80 bp, synthetic construct
  source 1..80: mol_type = other DNA
cacctagcatttcgtcacatagcccaaaagctgcatccaaagtactacaaagactgctgacaccaagttttctgcaaaag

SEQ ID NO: 94655 - DNA, 80 bp, synthetic construct
  source 1..80: mol_type = other DNA
agagcaagtaaaagcggccactagaaaagagaacaactgcttgttacaccctttgaaccagcataagatagatgacccag

SEQ ID NO: 94656 - DNA, 80 bp, synthetic construct
  source 1..80: mol_type = other DNA
cactttaattaaaaaatcacaaagccagcaagaaaaaaatgaacaagaattattggcactaaataagtaagacagcttgt

SEQ ID NO: 94657 - DNA, 80 bp, synthetic construct
  source 1..80: mol_type = other DNA
tttttttactgtaattcaacacaactgtttaatagtacttaaaataataatagtactaatacttagaatagtacaagtaa

SEQ ID NO: 94658 - DNA, 80 bp, synthetic construct
  source 1..80: mol_type = other DNA
ttccgctaaagactttccagaagaggcgtggcctaggcaaaactaagagtggcgagccctcagatgctgcatataagcag

SEQ ID NO: 94659 - DNA, 80 bp, synthetic construct
  source 1..80: mol_type = other DNA
taatggtcccacataaaagtacttatctctcaaggtagcatcattgtagacattctcacaaattttgatgtattgatcct

SEQ ID NO: 94660 - DNA, 80 bp, synthetic construct
  source 1..80: mol_type = other DNA
cggggatcctaggcaattcagctggacttcagtggaaagactctttttagtgaatccctgaatcaaagtgcctaatcaaa

SEQ ID NO: 94661 - DNA, 80 bp, synthetic construct
  source 1..80: mol_type = other DNA
caacctcaattcctctgtcagacctgaagcaataagttggttcaagtttatctgagctggttctatatcaaaatctatcc

SEQ ID NO: 94662 - DNA, 80 bp, synthetic construct
  source 1..80: mol_type = other DNA
atgcatagcccatcattagatcaaacttaaacataggtctctctatccctttgtaaacagctttctcaatgaatgaggag

SEQ ID NO: 94663 - DNA, 80 bp, synthetic construct
  source 1..80: mol_type = other DNA
aagggacccagtcgttgcagaccctcaccctctggaattgaggttttatgaggaaaccaagtgaatgatccaagtgtcct

SEQ ID NO: 94664 - DNA, 80 bp, synthetic construct
  source 1..80: mol_type = other DNA
tctcttttccacttaacaatgtgtgagacaagtgaaagtgcctcacaattcacatctagggcaacacaaagatcaaggaa

SEQ ID NO: 94665 - DNA, 80 bp, synthetic construct
  source 1..80: mol_type = other DNA
ctttattctaggtgaccatttcatctttgtggaagctaaatcactcataaatggcaatatgtgcttctcaaatagagacg

SEQ ID NO: 94666 - DNA, 80 bp, synthetic construct
  source 1..80: mol_type = other DNA
gatataaacgtctcaaggaatgaatgatgtggctcataccaaccctgtcctctagcagtttcgaaacagtgggtctcaag

SEQ ID NO: 94667 - DNA, 80 bp, synthetic construct
  source 1..80: mol_type = other DNA
gggaagtaatcacaaggattatgtttaaaaaagtccaaggtctgagcttgttttggttccccgagcacccacgctccaag

SEQ ID NO: 94668 - DNA, 80 bp, synthetic construct
  source 1..80: mol_type = other DNA
ttctatagctgtagatagtgttatgcacatataatcccataaaagaggtctcaaataagtgatgatagtgtcacttccat

SEQ ID NO: 94669 - DNA, 80 bp, synthetic construct
  source 1..80: mol_type = other DNA
ttctgacttctggtgaaactttccatatctggattccattgtcccccatcactgcttcaacaccttgagtccctagtagc

SEQ ID NO: 94670 - DNA, 80 bp, synthetic construct
  source 1..80: mol_type = other DNA
tgagtttgtatggatctaatgtaaagattctccttgttggggcccctaacacacttgctacctagtgttctgcacaaccc

SEQ ID NO: 94671 - DNA, 80 bp, synthetic construct
  source 1..80: mol_type = other DNA
tacaaacccagaagctatggaactttggaaagctgacttatttattgcttcagacagcagtttctgagcccctctagtga

SEQ ID NO: 94672 - DNA, 80 bp, synthetic construct
  source 1..80: mol_type = other DNA
aatagattatcttctgccgcaacaccattctaagcggatggtgggtggctaaattcaaccaatgatagcctaagtcagaa

SEQ ID NO: 94673 - DNA, 80 bp, synthetic construct
  source 1..80: mol_type = other DNA
tcagacaaaggttcaatgtctagaagtttgaacaagttctgcaatgatgttgtgtgttggcctgataagtagttggtagt

SEQ ID NO: 94674 - DNA, 80 bp, synthetic construct
  source 1..80: mol_type = other DNA
gaattcctcatgaagctcaccagttttcaatttattgaacagtatcctaagcattgacctcatccttttgcatgcatcag

SEQ ID NO: 94675 - DNA, 80 bp, synthetic construct
  source 1..80: mol_type = other DNA
gaattagcctctcaatttgccttattatcctataactacgattcccgtccacccaatctcttacatcagtctcacaattc

SEQ ID NO: 94676 - DNA, 80 bp, synthetic construct
  source 1..80: mol_type = other DNA
agcatagcctttgaaatcaatccattctccaagggattcaagaagttcactcagtatgtccgcatgatccacaggtctct

SEQ ID NO: 94677 - DNA, 80 bp, synthetic construct
  source 1..80: mol_type = other DNA
ccgtcaggtaccacaaaacacaaagctggggtaagaatcccatgatcactcaaaatggattcaaccgttttgtcttcagt

SEQ ID NO: 94678 - DNA, 80 bp, synthetic construct
  source 1..80: mol_type = other DNA
gttatgttcacatccattagccttgcaggagtcaatctcaatgcaaagagataatagcttcaatccctccataagcaaca

SEQ ID NO: 94679 - DNA, 80 bp, synthetic construct
  source 1..80: mol_type = other DNA
tctttagcattggcaatgtcttcctccatcgccaattgtggcgcctgtgttgggtttgggtttgtgccagtatggcttgt

SEQ ID NO: 94680 - DNA, 80 bp, synthetic construct
  source 1..80: mol_type = other DNA
gggtttgtgccagtatggcttgtaaatcagctggtggtgccccacaaaagctcctacaaaaatgagagacaatatgccta

SEQ ID NO: 94681 - DNA, 80 bp, synthetic construct
  source 1..80: mol_type = other DNA
gcaccaactaaaaggtgcggggaactatcaccaatctcctttacaaacatctccaaatcttgatcttggatgggtggtgc

SEQ ID NO: 94682 - DNA, 80 bp, synthetic construct
  source 1..80: mol_type = other DNA
atgggcaacaaacagactagatcgacaaaagtggatgaacatcaaagagctcatctagtgccagatgcatcccatttagg

SEQ ID NO: 94683 - DNA, 80 bp, synthetic construct
  source 1..80: mol_type = other DNA
aaacgtagccacccttttattagattcccatagtgctcccctacatacaaccaatggcactggttcgttgtcaggtccga

SEQ ID NO: 94684 - DNA, 80 bp, synthetic construct
  source 1..80: mol_type = other DNA
ccttggaaaagtcaaactcactgaactgcaatttatctggatcaattatcagcctcataggtataacatcccctaactgc

SEQ ID NO: 94685 - DNA, 80 bp, synthetic construct
  source 1..80: mol_type = other DNA
tgtgtatcctttaagaattcatttatcacatctgattcaacgaaccaagctgacctgcctttgaacgttggacccgacaa

SEQ ID NO: 94686 - DNA, 80 bp, synthetic construct
  source 1..80: mol_type = other DNA
atccatactatatgatacatgtgccgatgagacattcagcttcattgataaaatggcattgtcaaactccttctcattgt

SEQ ID NO: 94687 - DNA, 80 bp, synthetic construct
  source 1..80: mol_type = other DNA
ccttctagccagctaaccataacatcgactactttctgcaacacatcactggagaaaactgaaggaaaaaaccgtttagg

SEQ ID NO: 94688 - DNA, 80 bp, synthetic construct
  source 1..80: mol_type = other DNA
catgagaagtgagcttgttattaatgccctgatgacacgtagaaattatttcctcaaagtgttttgcacgcttgtcagta

SEQ ID NO: 94689 - DNA, 80 bp, synthetic construct
  source 1..80: mol_type = other DNA
tggattcttgacatcccacactctaacaactccgtctcttccaggttgggtgccctgagccccaccaaccatgcctatca

SEQ ID NO: 94690 - DNA, 80 bp, synthetic construct
  source 1..80: mol_type = other DNA
gggtttttattggttggaaatatcactggttgagaatataactcagtgagtcaatgaaaagcgcaatccaatagcctagg

SEQ ID NO: 94691 - DNA, 80 bp, synthetic construct
  source 1..80: mol_type = other DNA
gttggaaatatcactggttgagaatataactcagtgagtcaatgaaaagcgcaatccaatagcctaggatccactgtgcg

SEQ ID NO: 94692 - DNA, 80 bp, synthetic construct
  source 1..80: mol_type = other DNA
acatagagcctgtctagtgccggatgcatcccacctgggtcctcagttttgcaagagctgttggttcgagaacaaggggc

SEQ ID NO: 94693 - DNA, 80 bp, synthetic construct
  source 1..80: mol_type = other DNA
tcctggcttctggagacactttccacacctggaccccatcatcccctaccaccatattaacaccctgaatcccaagcagt

SEQ ID NO: 94694 - DNA, 80 bp, synthetic construct
  source 1..80: mol_type = other DNA
tttcagaatcgggatgtagtctctgggcctcagtttggtgaggacagctacaacatccacccctgtcaattggactctct

SEQ ID NO: 94695 - DNA, 80 bp, synthetic construct
  source 1..80: mol_type = other DNA
ctgcagagttttctttgttgctgtttaaacagtccagccgatcggcaagaaggatcagaatgtcgaatacaaggagaagc

SEQ ID NO: 94696 - DNA, 80 bp, synthetic construct
  source 1..80: mol_type = other DNA
tttctcctggtattgagaattctcagtgatttcaccttattcaagaaggacctccaacactgcatctgcccacctcgagg

SEQ ID NO: 94697 - DNA, 80 bp, synthetic construct
  source 1..80: mol_type = other DNA
gcttcagtctgtcagatatcatcgattttaatgcaccactcaagaggtctgatgagctttcaccaacttccctaacaaat

SEQ ID NO: 94698 - DNA, 80 bp, synthetic construct
  source 1..80: mol_type = other DNA
acttcccgttccactgaagcccaagtcagcatacagaaattttaaaacaggagaggctctcttgaactgaaattctaatt

SEQ ID NO: 94699 - DNA, 80 bp, synthetic construct
  source 1..80: mol_type = other DNA
gctcaacatcattattgcaagtgccaatcttatctctgtacaggctcttaaaatctctcaataatgctatcttgtcagtc

SEQ ID NO: 94700 - DNA, 80 bp, synthetic construct
  source 1..80: mol_type = other DNA
cttcagtgcaaagattcgctttaataaatccctaaatcaaagtgcctaatcaaaatgggcaacaaacagaccaaatcgac

SEQ ID NO: 94701 - DNA, 80 bp, synthetic construct
  source 1..80: mol_type = other DNA
gaacagagcccactggcattgggcttaacaaatcaaagaaatcttcaagggagtccaacctcaattcctctgtcaggcct

SEQ ID NO: 94702 - DNA, 80 bp, synthetic construct
  source 1..80: mol_type = other DNA
gaagcaataagctggttcaagtttatctgagctggttctatatcaaaatctatccatgcataacccatcattagatcaaa

SEQ ID NO: 94703 - DNA, 80 bp, synthetic construct
  source 1..80: mol_type = other DNA
cttgaacataggtctctctatccctttgtaaacagctttctcaacgaatgaggagaagggacccagtcgttgcagacctt

SEQ ID NO: 94704 - DNA, 80 bp, synthetic construct
  source 1..80: mol_type = other DNA
caccctctggaattgaggttttatgaggaaaccaagtgaatgatccaagtgtccttgttgttgctacaaaagagcgaaca

SEQ ID NO: 94705 - DNA, 80 bp, synthetic construct
  source 1..80: mol_type = other DNA
tatgattcaaagtagatttgtctcataaagttatccactgcatcaggagtactaaccaccctttcttccatcatgggctc

SEQ ID NO: 94706 - DNA, 80 bp, synthetic construct
  source 1..80: mol_type = other DNA
agacaagtgaaagtgcctcccaattcacatctagggcaacacaaagatcaaggaactttattctaggtgaccatttcatc

SEQ ID NO: 94707 - DNA, 80 bp, synthetic construct
  source 1..80: mol_type = other DNA
ttgagaacagaggcttggtggagtgcaacaaccactacctgtgtctcaactgcctcagcctgctcctcagcgtcagtagc

SEQ ID NO: 94708 - DNA, 80 bp, synthetic construct
  source 1..80: mol_type = other DNA
tttgtggaagctaaatcactcataaatggcaatatgtggttgtcaaatagagacggatataaacgtctcaaggaatgaat

SEQ ID NO: 94709 - DNA, 80 bp, synthetic construct
  source 1..80: mol_type = other DNA
tatctcgattccattgtgccccatcactgcttcaacaccttgagtccctagtagctgagtctgtatggatctaatgtaaa

SEQ ID NO: 94710 - DNA, 80 bp, synthetic construct
  source 1..80: mol_type = other DNA
aacaagttctgtaatgatgttgtgtgttcgcctgataagtaattggtagtgaattcctcatgaagctcaccagttttcaa

SEQ ID NO: 94711 - DNA, 80 bp, synthetic construct
  source 1..80: mol_type = other DNA
tttattgaacagtatcctaagcattgacctcatctttttgcatgcatcaggaattagtctttcaatttgcctcattatcc

SEQ ID NO: 94712 - DNA, 80 bp, synthetic construct
  source 1..80: mol_type = other DNA
tctgcatctcttgtgagtaactctgttaagttctgatcaaacaatgaaatctgatcgtcactggacgtgtaagcatcaat

SEQ ID NO: 94713 - DNA, 80 bp, synthetic construct
  source 1..80: mol_type = other DNA
aaatgggatctcaaccattttgtgcatatgccatgttaatagtgttgataggtaatctttaccttttaaatcagcttgta

SEQ ID NO: 94714 - DNA, 80 bp, synthetic construct
  source 1..80: mol_type = other DNA
acagggccttgctgagtgcttcagaattgctctcacgttcacttatcctgacatcatcagccaatcttcctgtgtcaaat

SEQ ID NO: 94715 - DNA, 80 bp, synthetic construct
  source 1..80: mol_type = other DNA
cactaccttgtcaagatcagatatcgatggtgcattggaatctgcctgctgctgtctttccggttgctccttatactgac

SEQ ID NO: 94716 - DNA, 80 bp, synthetic construct
  source 1..80: mol_type = other DNA
ctgtttattaagtaagaatttgcctttacgtgcaaatacttcagttaattgtgtgacagccaaagctgtaagcttgttga

SEQ ID NO: 94717 - DNA, 80 bp, synthetic construct
  source 1..80: mol_type = other DNA
agatacaaggagtgaaatgaattttttggagacaccagggcttttataccaaactttatctgcatctgcacaacactctt

SEQ ID NO: 94718 - DNA, 80 bp, synthetic construct
  source 1..80: mol_type = other DNA
tattgtgggtgtgataccggagatttcaatgtccatgatggcatcataaacatcacaatcaaggatcttgagatcaattc

SEQ ID NO: 94719 - DNA, 80 bp, synthetic construct
  source 1..80: mol_type = other DNA
cataagagttggtttctatgccgacctccctcaaagcattagtggctcgagtcaaaactctattgatgatggcaaggagc

SEQ ID NO: 94720 - DNA, 80 bp, synthetic construct
  source 1..80: mol_type = other DNA
tcacaattccgttcttctttaaatgatgggacaccgacagttctgtctctagttctcttcctgctgtccatccaccgttt

SEQ ID NO: 94721 - DNA, 80 bp, synthetic construct
  source 1..80: mol_type = other DNA
gcctgtcaccatgccttatttggtccagccggctagcaagaagaatcagaacgtcaaaaataaggagaagtttcctcctg

SEQ ID NO: 94722 - DNA, 80 bp, synthetic construct
  source 1..80: mol_type = other DNA
cctttcctcaccaaaattcaaatctgcatacaagaacttaaggactggagaggcccttcggaactggaatgttaactgtt

SEQ ID NO: 94723 - DNA, 80 bp, synthetic construct
  source 1..80: mol_type = other DNA
caatgttgtcgtcacaggtgtctatcttatcattatatagctttctgaaatcctctaataacttcaccttatcagtctta

SEQ ID NO: 94724 - DNA, 80 bp, synthetic construct
  source 1..80: mol_type = other DNA
tcccatagtgctcccctacatacaaccaatggcactggctcgttgtcaggtccgaccttagaaaagtcaaactcactgaa

SEQ ID NO: 94725 - DNA, 80 bp, synthetic construct
  source 1..80: mol_type = other DNA
aatggattcaaccgttttgtcttcagtgttatgttcacatccattagccttgcaagaatcaatctcaatgcaaagagata

SEQ ID NO: 94726 - DNA, 80 bp, synthetic construct
  source 1..80: mol_type = other DNA
atagcttcaatccctccataagcaacatcctgggttctgtttgaaccagaaaagctaacttctgtcttgatagcttctca

SEQ ID NO: 94727 - DNA, 80 bp, synthetic construct
  source 1..80: mol_type = other DNA
ttgtccgcaaggtactttgagataagatctttagcattggcaatgtcttcctccatcgccaattgtggcgcctgtgttcg

SEQ ID NO: 94728 - DNA, 80 bp, synthetic construct
  source 1..80: mol_type = other DNA
ctgcaatttatctggattaatgatcagcttcataggtataacatcccctaactgctgtgtgtccttcaagaattcattta

SEQ ID NO: 94729 - DNA, 80 bp, synthetic construct
  source 1..80: mol_type = other DNA
aaaagtcgatgaacatcaaagagctcatctagtgccagatgcatcccatttaggacctcagttctgcaagagttgctggt

SEQ ID NO: 94730 - DNA, 80 bp, synthetic construct
  source 1..80: mol_type = other DNA
acacatgggctcacagacccagaatatagtgcctgtacatcattcactacaaactcaccacattgattaataagtcccgt

SEQ ID NO: 94731 - DNA, 80 bp, synthetic construct
  source 1..80: mol_type = other DNA
ttttgtgattgtcgtttgtggaacctctgagtgagactcatcccacagcatgggtggtagacaatccaagtctccaaaga

SEQ ID NO: 94732 - DNA, 80 bp, synthetic construct
  source 1..80: mol_type = other DNA
attcttaaagacttcaccttatttaggaatgatctccaacactgcatttggcatccatctacaatagggtccacgggttt

SEQ ID NO: 94733 - DNA, 80 bp, synthetic construct
  source 1..80: mol_type = other DNA
tttatcctccaagtctgcatagagaaaccttaaaattggcgaggctcttttaaactggtgagacaattgttctatgctat

SEQ ID NO: 94734 - DNA, 80 bp, synthetic construct
  source 1..80: mol_type = other DNA
ccttgaactcaacccaaccatccattgtcttcaacagctcggcaagaacagtcatgccgcagtcaggcatggtttttgta

SEQ ID NO: 94735 - DNA, 80 bp, synthetic construct
  source 1..80: mol_type = other DNA
catggaagatgagattgccatcgccaaagacctagtggcaaagtacctagctgacaatgagaaactatcaaggcaaaaga

SEQ ID NO: 94736 - DNA, 80 bp, synthetic construct
  source 1..80: mol_type = other DNA
aacaattggacaatatccacccctgtccattgtattcttagttttaatctatctgccatcatggcaaccaaggacccaac

SEQ ID NO: 94737 - DNA, 80 bp, synthetic construct
  source 1..80: mol_type = other DNA
aattcagctggacttcagtggaaagactcttgttagtgaatccctgaaacaaagtgcctaataaaatgggcaacaaacag

SEQ ID NO: 94738 - DNA, 80 bp, synthetic construct
  source 1..80: mol_type = other DNA
gtctctttaaaactagcatcctgacttttgattttatacctaattgtctgataaaactgaacagagcccactggcattgc

SEQ ID NO: 94739 - DNA, 80 bp, synthetic construct
  source 1..80: mol_type = other DNA
aaggagctcagaattccgttcttctttaagtgataggacacctgcatttctgtctctagttcttttcctgctgtctatcc

SEQ ID NO: 94740 - DNA, 80 bp, synthetic construct
  source 1..80: mol_type = other DNA
gaacctaaggactggagaggctcttcggaactggaatgttaactgttcaatgctgtcatcacaggtgtctatcttatcac

SEQ ID NO: 94741 - DNA, 80 bp, synthetic construct
  source 1..80: mol_type = other DNA
accggggatcctaggcaatttagctggacttcagtagcaaaactcattctagtgaatctctgaatcaaagtgtgtgttaa

SEQ ID NO: 94742 - DNA, 80 bp, synthetic construct
  source 1..80: mol_type = other DNA
aaatgggcaacaaacaggccaaaccggcagaggtcgatgaacatcaaagagccaatctagtaccagatgcatcccactta

SEQ ID NO: 94743 - DNA, 80 bp, synthetic construct
  source 1..80: mol_type = other DNA
aattcagctggacttcagtagtaaggttcattttagtgaatctctgaattaaagtgcctagtaaaatgggcaacaaacag

SEQ ID NO: 94744 - DNA, 80 bp, synthetic construct
  source 1..80: mol_type = other DNA
tagccttcttggttcaaaccgaacccagaatgctgcttatggagggattgaagctactatctctttgcattgagattgac

SEQ ID NO: 94745 - DNA, 80 bp, synthetic construct
  source 1..80: mol_type = other DNA
gcaaccattaccatgtctcatgccatccagccggctagcaagaagaattagaacgtcaaaaacaaggaggagcttcctcc

SEQ ID NO: 94746 - DNA, 80 bp, synthetic construct
  source 1..80: mol_type = other DNA
tggtattaaggatcctcaaagacttaatcttattaagaaaggatctccagcattgcatttgctcactttgagagtcagta

SEQ ID NO: 94747 - DNA, 80 bp, synthetic construct
  source 1..80: mol_type = other DNA
attggcaatgtcttcctccatcgctaattgcagtacctatattggatttaaacttatgtctgtatagtttgttgaccagt

SEQ ID NO: 94748 - DNA, 80 bp, synthetic construct
  source 1..80: mol_type = other DNA
tattggatttaaacttatgtctgtatagtttgttgaccagtcaatggtgccccgaaaaaaccctctacagaaatgagaga

SEQ ID NO: 94749 - DNA, 80 bp, synthetic construct
  source 1..80: mol_type = other DNA
gggcaagaagcaaactaaaacaactgaagtcactgaacaaaacagggctcatctggtgccagacgcatcccatctgggac

SEQ ID NO: 94750 - DNA, 80 bp, synthetic construct
  source 1..80: mol_type = other DNA
ggcaattcagttggacctcagcgggaaggctcttttagtgaattcctgaatcaaagtacccaattaaaatgggcaacaga

SEQ ID NO: 94751 - DNA, 80 bp, synthetic construct
  source 1..80: mol_type = other DNA
acacttctccggcccaaataagtctgaacatgtcctgcccttcagtcttaggctacccccacttgactgaatcataactc

SEQ ID NO: 94752 - DNA, 80 bp, synthetic construct
  source 1..80: mol_type = other DNA
gattagaacattaccagtgagtttgtaaccgtcagggaccacaaaacacaaagctggggtgagaatcccatgatcactca

SEQ ID NO: 94753 - DNA, 80 bp, synthetic construct
  source 1..80: mol_type = other DNA
attcagctgaacttcagtggtaaggctccccatagtgaatccctgaattaaagaacccagtaaaatgggcaacagacagg

SEQ ID NO: 94754 - DNA, 80 bp, synthetic construct
  source 1..80: mol_type = other DNA
gtacctatataacttgtaggtcagttagtggtgtcccacaaaagctcctgcagaaatgagagacaatatgcctaggatcc

SEQ ID NO: 94755 - DNA, 80 bp, synthetic construct
  source 1..80: mol_type = other DNA
ggggatcctaggctatttgtaagattcttgtgtggagactcgtagccgagatccatctcacactatgggcaacaaacaaa

SEQ ID NO: 94756 - DNA, 80 bp, synthetic construct
  source 1..80: mol_type = other DNA
cccagacatcaccaatctccaacaatccggcaggacacatgagttcaccacaccagaatacaaaacatcaacatctccaa

SEQ ID NO: 94757 - DNA, 80 bp, synthetic construct
  source 1..80: mol_type = other DNA
caatgtatttccctcgctggctcattgaaccgctaaaattgaggtgaatagcaaaggtttccttgaaactagcttcctgg

SEQ ID NO: 94758 - DNA, 80 bp, synthetic construct
  source 1..80: mol_type = other DNA
cttctaatttggaatctgatggtttgactcaattttatagatccagatggcaattcagctagagtttcaaaaaagccttc

SEQ ID NO: 94759 - DNA, 80 bp, synthetic construct
  source 1..80: mol_type = other DNA
tagtgactcctctttgagatcaaccaatcctgatgcaattaattggttctgattaaaccttgctggctcaatgtcatagt

SEQ ID NO: 94760 - DNA, 80 bp, synthetic construct
  source 1..80: mol_type = other DNA
caatccatgcgtaccccatcatcaagtcatacttaaacattggcctctcaatacctttatgaataaccttttccacaaat

SEQ ID NO: 94761 - DNA, 80 bp, synthetic construct
  source 1..80: mol_type = other DNA
aggccttcaccctctgggatggatgttctatgtggaaaccatgtaaacgaacctagagtccttgttgttgctacaaatga

SEQ ID NO: 94762 - DNA, 80 bp, synthetic construct
  source 1..80: mol_type = other DNA
tcttacatatgactcaaagtagagttgtctcatatagttgtcaactacatcactcgtgctaacaactttttcctctatca

SEQ ID NO: 94763 - DNA, 80 bp, synthetic construct
  source 1..80: mol_type = other DNA
agttgttggtttgaaaacagaggcctagttgagtgcaacaaccactacctgtgtctcaattgcctctcattacttctaag

SEQ ID NO: 94764 - DNA, 80 bp, synthetic construct
  source 1..80: mol_type = other DNA
ttggctcatgtgttctactatgagacactcgtaactcagatgacaagacaatatagtgttcctctcgcttccacttaact

SEQ ID NO: 94765 - DNA, 80 bp, synthetic construct
  source 1..80: mol_type = other DNA
atgtgagagacaagggacaaagcttcacaattcacatctagtgccacacagagatccaagaactttattctaggtgacca

SEQ ID NO: 94766 - DNA, 80 bp, synthetic construct
  source 1..80: mol_type = other DNA
cttcattttagtagaagccaagtcactcatgaaaggcagtatatgtttctcaaatgtagcagggtacaatcttctaagag

SEQ ID NO: 94767 - DNA, 80 bp, synthetic construct
  source 1..80: mol_type = other DNA
gaaagtaatcacatggattgtgtttaaaaaacttcattgagttcggctccttaggctctcctaagacccatgctcccagt

SEQ ID NO: 94768 - DNA, 80 bp, synthetic construct
  source 1..80: mol_type = other DNA
tcaattgcggttgacaaggagatgcacatgtaatcccacaataagggtcgaaagtaactagctacatccccaaattcctg

SEQ ID NO: 94769 - DNA, 80 bp, synthetic construct
  source 1..80: mol_type = other DNA
ttttaccgttagagggactctccaaaactgaattccgaactcatccaccaatgcctcgacatcacggatgcttgcaattg

SEQ ID NO: 94770 - DNA, 80 bp, synthetic construct
  source 1..80: mol_type = other DNA
atgattgaattgactttatatagaggttttctttatttggccctctcacacacttactgcccagtgttctacacaaaccg

SEQ ID NO: 94771 - DNA, 80 bp, synthetic construct
  source 1..80: mol_type = other DNA
ctggtgaatgttgatgacaatttattctggatagtcttcactattgttgggatcttttcctcatccaagttgacagcacc

SEQ ID NO: 94772 - DNA, 80 bp, synthetic construct
  source 1..80: mol_type = other DNA
tgagtagataattttctgtctaagcaccatcctcaatgggtggtgggctgtcagattaagccagcagtattctaagtcag

SEQ ID NO: 94773 - DNA, 80 bp, synthetic construct
  source 1..80: mol_type = other DNA
aatccagtaaaggctcaacacccatcatgtcacacaggtttttcagtgaagatgaatgctcagttgagagataattggtt

SEQ ID NO: 94774 - DNA, 80 bp, synthetic construct
  source 1..80: mol_type = other DNA
gtgaattcttcatgaagatccccaaccttcagtttgttgaacagtcttcttaacattgacctgatctttttgcaagcctc

SEQ ID NO: 94775 - DNA, 80 bp, synthetic construct
  source 1..80: mol_type = other DNA
tctgcaaaatgcccctacctacaagactcagtgcatccaccagcccgactgccccctccatcagagaggcgaacaccaca

SEQ ID NO: 94776 - DNA, 80 bp, synthetic construct
  source 1..80: mol_type = other DNA
tgggatgagcctttcaatctgtctcatgatcctataggaacggttgccatcaacccaatccctcacatcagtcccacaat

SEQ ID NO: 94777 - DNA, 80 bp, synthetic construct
  source 1..80: mol_type = other DNA
ggtcaattgggtacctagcatactgcagtagtgacaatgtcctcagttgaatcaagttacataagtgcacaggtacccca

SEQ ID NO: 94778 - DNA, 80 bp, synthetic construct
  source 1..80: mol_type = other DNA
tttgcaactgattggtcaacaattgtgtcaatcgtctctgctaattgatgtggctctttacactttatattgtgaagggc

SEQ ID NO: 94779 - DNA, 80 bp, synthetic construct
  source 1..80: mol_type = other DNA
ttttagggctcacaaatttgtttaactgatcactcatataaaaatgaaattctagtaaagtttcaaactcttccgggtcc

SEQ ID NO: 94780 - DNA, 80 bp, synthetic construct
  source 1..80: mol_type = other DNA
cgtgacatcagctcagtaagactctggtcgaatagagatatttgatcatcactggatgtgtaagcatcaataactccccc

SEQ ID NO: 94781 - DNA, 80 bp, synthetic construct
  source 1..80: mol_type = other DNA
aaatgcccggccccatgtccaaaatggagcttatatgagaaggcactacacctatttgaaagttagaatagaagaagtct

SEQ ID NO: 94782 - DNA, 80 bp, synthetic construct
  source 1..80: mol_type = other DNA
tcggtgacggtctgtgatgtattggtcctcaggcccaactgtgctttgatgaaggacttcatcatcgctgatacaacatt

SEQ ID NO: 94783 - DNA, 80 bp, synthetic construct
  source 1..80: mol_type = other DNA
gaatggtatttccaccattttatgtatgtgccatgttaaaagggttgagagataatcacgccctttaatatctgtctgca

SEQ ID NO: 94784 - DNA, 80 bp, synthetic construct
  source 1..80: mol_type = other DNA
aatcctttgataagacaacaagattctgcaatactgtgagaaatagaaagggacacatcatgggtccccatttgctatga

SEQ ID NO: 94785 - DNA, 80 bp, synthetic construct
  source 1..80: mol_type = other DNA
tccatgctgtaggacacatgagctagagacacatttagtttcatcgagagaatagcattttcaaattctttctcattatt

SEQ ID NO: 94786 - DNA, 80 bp, synthetic construct
  source 1..80: mol_type = other DNA
taaggcagcttccagataactgctgacttaatgcttcaaagtagtcttcaatcaacctggtaaacatttttgttcttaag

SEQ ID NO: 94787 - DNA, 80 bp, synthetic construct
  source 1..80: mol_type = other DNA
tctcctatgtaaagttccctattacctccaacttgttccttataggataaagaaaactttaacctccctgtgtcaggccc

SEQ ID NO: 94788 - DNA, 80 bp, synthetic construct
  source 1..80: mol_type = other DNA
agtagaattgtaggactgcggtgactcttgactgtaaaagcacagatttttcaacattgctgtggtacagtttgttaaag

SEQ ID NO: 94789 - DNA, 80 bp, synthetic construct
  source 1..80: mol_type = other DNA
acagagccttactgagagcttctgaattgctctccctttcactaattctcacatcatcagagagcctgttggtgtcaaac

SEQ ID NO: 94790 - DNA, 80 bp, synthetic construct
  source 1..80: mol_type = other DNA
ttaaaattcaggcacttggatttatagtgggagtattttcccataagcttatttccgttcatcaacaagagtattgactt

SEQ ID NO: 94791 - DNA, 80 bp, synthetic construct
  source 1..80: mol_type = other DNA
gaaacactgaaaaaattcacagtcaagatatgtccttgtagccacagcttttgtaagttcccctataggacaacccgtca

SEQ ID NO: 94792 - DNA, 80 bp, synthetic construct
  source 1..80: mol_type = other DNA
tagggccacagtaaaaatacttctcttttagactgcagtctttgtaaatagcattgcaaaattcttcatagaaactctcc

SEQ ID NO: 94793 - DNA, 80 bp, synthetic construct
  source 1..80: mol_type = other DNA
ggcaaggtctcatggtcaaagtcttcaaccatatggtgtgacagttctcctttgattagcctcacataaaatttgtttgg

SEQ ID NO: 94794 - DNA, 80 bp, synthetic construct
  source 1..80: mol_type = other DNA
gttccacaatgtttccaactgtctctcttaactgatcaaagtacattgatgctccgccatccagaagcacttcatctaaa

SEQ ID NO: 94795 - DNA, 80 bp, synthetic construct
  source 1..80: mol_type = other DNA
tcagtattgtcaatttgcgagacttgtcctttggaccccattaccagactactcattgcttgctgaattttatactcata

SEQ ID NO: 94796 - DNA, 80 bp, synthetic construct
  source 1..80: mol_type = other DNA
gtcttgcttattaagcagaaacttccccttcctagagaaaacctcagttaactgtgtgacagccaatgcagtgagcttgt

SEQ ID NO: 94797 - DNA, 80 bp, synthetic construct
  source 1..80: mol_type = other DNA
tgaaatcatagttaagtactctagagccatctgtatacttgttgatgaccacactcttgttactggctaaatctagagcc

SEQ ID NO: 94798 - DNA, 80 bp, synthetic construct
  source 1..80: mol_type = other DNA
gttgcacagccactagcaatgataggatccctcatctccctctttatctctttttctttgaagagagatccattgttaaa

SEQ ID NO: 94799 - DNA, 80 bp, synthetic construct
  source 1..80: mol_type = other DNA
tgaggacgttagaagggagaggaatttctttgacacaccaggtgttttatatcttagcttctcagcattggtgcaaccct

SEQ ID NO: 94800 - DNA, 80 bp, synthetic construct
  source 1..80: mol_type = other DNA
ccttactcaaaaacctttttgcactgtagatcatctcatccagttcctcactggtggcctcatcctctgggtttacagta

SEQ ID NO: 94801 - DNA, 80 bp, synthetic construct
  source 1..80: mol_type = other DNA
acatgtccgaaatttaattttggttcgagaaatttctcgaagcacttgatttgatctgttagtctgtctggagtttcttt

SEQ ID NO: 94802 - DNA, 80 bp, synthetic construct
  source 1..80: mol_type = other DNA
agttataaaatgacacatataagaaatgttcagcacaaacttgaacctatttgtaagcatgctctttacatcctcatgta

SEQ ID NO: 94803 - DNA, 80 bp, synthetic construct
  source 1..80: mol_type = other DNA
ataccatcttcagcagagaccttaagagtctaaatagtagaaattcagtctctgtgatcagtttttctttgaatttgtca

SEQ ID NO: 94804 - DNA, 80 bp, synthetic construct
  source 1..80: mol_type = other DNA
attagctctttgtggtaaaagtcggaaacataagccatcacaaagtacctcaaattctgtaaaaacttttgacaccgctt

SEQ ID NO: 94805 - DNA, 80 bp, synthetic construct
  source 1..80: mol_type = other DNA
aatcttctatccaactcaccatggtttctacggttgcatgtagaacttcagctgaaaaaattgatgggaaatatctcttt

SEQ ID NO: 94806 - DNA, 80 bp, synthetic construct
  source 1..80: mol_type = other DNA
gggtcagcataaaatgagcaaacctcaccgactgcatcattgttgactgcatagcactttgaacactcacctgttttctg

SEQ ID NO: 94807 - DNA, 80 bp, synthetic construct
  source 1..80: mol_type = other DNA
atagagcaactgaaattcaattcctcccaaagagaattcttgacaatatgcctccttgcactttaccacttggtatctgg

SEQ ID NO: 94808 - DNA, 80 bp, synthetic construct
  source 1..80: mol_type = other DNA
ctgctccatgctcattctgccttattttcacagtcgaagaagttttcatggagttcactaaggccaaactcagagatgaa

SEQ ID NO: 94809 - DNA, 80 bp, synthetic construct
  source 1..80: mol_type = other DNA
agcctctccaagtctataggatccaaaatgcctatagaacccaatgtgtatggaaacttctcctcctgtgatttttgata

SEQ ID NO: 94810 - DNA, 80 bp, synthetic construct
  source 1..80: mol_type = other DNA
actgattgttggggtcactcctgaaacatcaaacttcaatactaaatcataaacatcacagtcaaatatatccatgctca

SEQ ID NO: 94811 - DNA, 80 bp, synthetic construct
  source 1..80: mol_type = other DNA
ccccataatgatctacacagatgcctacagcttcaagggcagcggtggctttagtcacagtcttctgaatcactgacctt

SEQ ID NO: 94812 - DNA, 80 bp, synthetic construct
  source 1..80: mol_type = other DNA
aagatctcatttttacacactagtgtagatgatttagaaacctcaagttgttgcctcttttccatccacttcttcaaatc

SEQ ID NO: 94813 - DNA, 80 bp, synthetic construct
  source 1..80: mol_type = other DNA
tcgcttcgttgactccaaggaaactaaccgatcatttacactgacgaaacaagatccaagccatccttttgacgtcctgc

SEQ ID NO: 94814 - DNA, 80 bp, synthetic construct
  source 1..80: mol_type = other DNA
ctttgtgtttcatctggtcgttcatacttgcaaggagtatcaatgtatcaaaaactaacattaattttcttctggtattc

SEQ ID NO: 94815 - DNA, 80 bp, synthetic construct
  source 1..80: mol_type = other DNA
aagattctcaaggacttcactttatttaaaaatgatctccagcattgcatttggcctccgtctacagttgggcttttaga

SEQ ID NO: 94816 - DNA, 80 bp, synthetic construct
  source 1..80: mol_type = other DNA
cctctcagactctaagtctgcatataaaaaccttagaatcggtgaggctctcttgtactggtagattaaatgatctatgt

SEQ ID NO: 94817 - DNA, 80 bp, synthetic construct
  source 1..80: mol_type = other DNA
tgtcctcatcaacaagcccctcatcagcatataaattgttaaacttgcacatcagttcccctttatctactctaacaaac

SEQ ID NO: 94818 - DNA, 80 bp, synthetic construct
  source 1..80: mol_type = other DNA
tgatactctatctcaccttgcctaattctgtttctaaacacctgatattcttcttcaatctgcatcttcacctcataggc

SEQ ID NO: 94819 - DNA, 80 bp, synthetic construct
  source 1..80: mol_type = other DNA
tgacaacttgttgttgatgccttggtgacaaagagcaattatgtcctcataatggttagcacgattgtctgtcaagacat

SEQ ID NO: 94820 - DNA, 80 bp, synthetic construct
  source 1..80: mol_type = other DNA
tcaagctctccacgccagagagtctgccagatgtcatggagagggactcacaaagcctgacatactctgattcttcaaaa

SEQ ID NO: 94821 - DNA, 80 bp, synthetic construct
  source 1..80: mol_type = other DNA
cgggcgttgctctcctgagcaaatcgtaataatgaaaagagtgtctccctcagcttgtcattgacccagtcagggatttg

SEQ ID NO: 94822 - DNA, 80 bp, synthetic construct
  source 1..80: mol_type = other DNA
caggcatgaccttcatgagcaattgaacaatatctacccctgtccactgcaccctcagcctcagcctatctgtcatcatg

SEQ ID NO: 94823 - DNA, 80 bp, synthetic construct
  source 1..80: mol_type = other DNA
ttcgttataaaatgatgttctgccgtcgataagtgggatgagatttatgtctatagatttgagatcatctttcaactgct

SEQ ID NO: 94824 - DNA, 80 bp, synthetic construct
  source 1..80: mol_type = other DNA
ctagttttgtgaggtcttcagtgtatttttgttcaaaattggctggtgaggatctcacaaaacactcaagtaaaatcagg

SEQ ID NO: 94825 - DNA, 80 bp, synthetic construct
  source 1..80: mol_type = other DNA
ttcaacagatttgctctctgtgttgtgctcacagccatttgcattgcatgagtcaagctcgatacagagggacagcagct

SEQ ID NO: 94826 - DNA, 80 bp, synthetic construct
  source 1..80: mol_type = other DNA
ttaatccttccataagaagcattctgggttctgtctgaacaaggaatgaaatcttctgtcttgataatttctcgttgtca

SEQ ID NO: 94827 - DNA, 80 bp, synthetic construct
  source 1..80: mol_type = other DNA
gccaggtacttcgccactaggtctttagcggtggcaatttcgtcttccatggtttcctggacggaggagatgcttgggga

SEQ ID NO: 94828 - DNA, 80 bp, synthetic construct
  source 1..80: mol_type = other DNA
gcaggcagtgccccggttaacatgctatgagaactatcataaacctctttgatgaagacctctagatcttgatcttggat

SEQ ID NO: 94829 - DNA, 80 bp, synthetic construct
  source 1..80: mol_type = other DNA
ccaggaccgaaaaaaagacagacagcccaagagctagtctgatccctgatgcttcctacatgggaccccaattctgcaag

SEQ ID NO: 94830 - DNA, 80 bp, synthetic construct
  source 1..80: mol_type = other DNA
aataggagtgaatgtggccagcctcctatcacactcccacagtgctcccctactcacaaccagcgggactggttccgcat

SEQ ID NO: 94831 - DNA, 80 bp, synthetic construct
  source 1..80: mol_type = other DNA
gaggacccaccattatgaaatcatgctctgaaaactggagtttctgtacatcaatatcaatttcaagaggagttacaggc

SEQ ID NO: 94832 - DNA, 80 bp, synthetic construct
  source 1..80: mol_type = other DNA
cctaattgtcttgtatctatcaagaactccttaacaatttcggtgtccacatataagggggaccttcccttgtaggtggg

SEQ ID NO: 94833 - DNA, 80 bp, synthetic construct
  source 1..80: mol_type = other DNA
agtaggtttttgttcgaacaattggacaatgtctacccctgtccattgtatccttaattttaacctatccgccatcatgg

SEQ ID NO: 94834 - DNA, 80 bp, synthetic construct
  source 1..80: mol_type = other DNA
acaacttgagggcgtacaatgagtcactcgattaatgttataatcaaaaaaccttaccatatatgagagccaatatgcct

SEQ ID NO: 94835 - DNA, 80 bp, synthetic construct
  source 1..80: mol_type = other DNA
gggatcctaggcaatttagttggacttcactacgaagacttgtcttgtgagttcctggattgtgccacacagtcaagatg

SEQ ID NO: 94836 - DNA, 80 bp, synthetic construct
  source 1..80: mol_type = other DNA
catttatcacaaattcaccatgttgattaatgaatcctttcatattgaggtggatggaaaaagtctccttgaagctagca

SEQ ID NO: 94837 - DNA, 80 bp, synthetic construct
  source 1..80: mol_type = other DNA
tcctgacttttgattttatatctaactgtctgataaaactgcacagaatcttttggcattgtactcaagaagtcaagaaa

SEQ ID NO: 94838 - DNA, 80 bp, synthetic construct
  source 1..80: mol_type = other DNA
tgtcaaaatctatccatgcatagcccatcatcaaatcaaatttaaacatgggtctttctatccccttgtaaatggctttc

SEQ ID NO: 94839 - DNA, 80 bp, synthetic construct
  source 1..80: mol_type = other DNA
tcaacaaatgaggaaaagggacccagtcgctgcaaaccttcgccctctggtattgaagttttatgagggaaccaagtaaa

SEQ ID NO: 94840 - DNA, 80 bp, synthetic construct
  source 1..80: mol_type = other DNA
tgatcccaaagtccttgttgttgccacaaacgatcgaacatatgactcaaagtaaacttgtctcatgaagttgtctactg

SEQ ID NO: 94841 - DNA, 80 bp, synthetic construct
  source 1..80: mol_type = other DNA
ccaattctgcaagagctgttggtttgaaaacagaggtttagtggagtgcaacaaccactacctgtgtctcaactgtctca

SEQ ID NO: 94842 - DNA, 80 bp, synthetic construct
  source 1..80: mol_type = other DNA
gttcatgtgtgcgggagtgtgaatttctcagctcagatgccaacacaacataatgttcctctcttttccacttgacaata

SEQ ID NO: 94843 - DNA, 80 bp, synthetic construct
  source 1..80: mol_type = other DNA
tgtgaaacaagtgagagtgcctcacagttcacatctagagcaacacagaggtcaagaaactttattctaggtgaccattt

SEQ ID NO: 94844 - DNA, 80 bp, synthetic construct
  source 1..80: mol_type = other DNA
gatacaagcgtctcaaagagtgaatgatgtggctcatgccaaccctgtcctccagtaactttgaattggtgggtcttaaa

SEQ ID NO: 94845 - DNA, 80 bp, synthetic construct
  source 1..80: mol_type = other DNA
ggaaaataatcacaagggttgtatttcaaaaagtccaagacctgagcttgtttaggttctccgagtacccatgctccaag

SEQ ID NO: 94846 - DNA, 80 bp, synthetic construct
  source 1..80: mol_type = other DNA
ctctatagctgtagacagtgttatgcacatataatcccatagaaggggtctcaggtaagtgacagcggtgctgcccccat

SEQ ID NO: 94847 - DNA, 80 bp, synthetic construct
  source 1..80: mol_type = other DNA
ccttggcttctggtgacactctccatatctggactccattatcccccatcactacctcaacaccttgagtttccaacaac

SEQ ID NO: 94848 - DNA, 80 bp, synthetic construct
  source 1..80: mol_type = other DNA
tgagactgtatggatctaatgtaaagattctccctgttaggacctctaacacacttgctgcctagtgtcctacacaaccc

SEQ ID NO: 94849 - DNA, 80 bp, synthetic construct
  source 1..80: mol_type = other DNA
cacgaatccggatgctatagagctttggaaggcagacttatttattgcttcagacaataatttctgagcccctctggtga

SEQ ID NO: 94850 - DNA, 80 bp, synthetic construct
  source 1..80: mol_type = other DNA
acgttgatgacaacctattctgcagagtcttcactattgtagggaccctgtcatcctccaagttcacagcaccagaataa

SEQ ID NO: 94851 - DNA, 80 bp, synthetic construct
  source 1..80: mol_type = other DNA
gcttgctcctcagtgtcagcagcagatgtccaatctgcaagatgccccttcccaccaggctgaaggcatcggcacagccc

SEQ ID NO: 94852 - DNA, 80 bp, synthetic construct
  source 1..80: mol_type = other DNA
attatcttttgtcgcaacaccatcctaagtggataatgggttgccaggttcagccaatgaaactctagatcagaattgga

SEQ ID NO: 94853 - DNA, 80 bp, synthetic construct
  source 1..80: mol_type = other DNA
caggggttcaatgttcaaaagtttgaaaagattctgcagcgatgtcatgtgttcacctgacagataattggtggtaaatt

SEQ ID NO: 94854 - DNA, 80 bp, synthetic construct
  source 1..80: mol_type = other DNA
cttcatggagctcaccggcttttaatttattaaacaatatccgaagcattgacctcatttttttacatgcatcaggaacc

SEQ ID NO: 94855 - DNA, 80 bp, synthetic construct
  source 1..80: mol_type = other DNA
agtctctcaatttgcctcattatcctgtagctacgattcccgtccacccagtctctcacatcagtctcacaatttaagag

SEQ ID NO: 94856 - DNA, 80 bp, synthetic construct
  source 1..80: mol_type = other DNA
ggtctatagggtccttagcataacacaacaagcttaatgttctcttttgaatctgattgcacaaatcaactggaacaccg

SEQ ID NO: 94857 - DNA, 80 bp, synthetic construct
  source 1..80: mol_type = other DNA
tttgccacagactgatcaattatggtgtcaattgtttctgctaactgatggggctccttacactttatgttgtgcagagc

SEQ ID NO: 94858 - DNA, 80 bp, synthetic construct
  source 1..80: mol_type = other DNA
tcagtcactgattgagtggtcttcttcttcaatccaagttgagatttgatgtatgatttcatcattgctgacacaacatt

SEQ ID NO: 94859 - DNA, 80 bp, synthetic construct
  source 1..80: mol_type = other DNA
aaaaggaatctccaccatcttgtgcatatgccatgtcagtaatgttgacaggtaatctttgccttttagatcagcctgca

SEQ ID NO: 94860 - DNA, 80 bp, synthetic construct
  source 1..80: mol_type = other DNA
ggtcatcagaaagtaaaatcagattctgaataattgttaggaatagaaagggacacatcattggaccccacttactgtga

SEQ ID NO: 94861 - DNA, 80 bp, synthetic construct
  source 1..80: mol_type = other DNA
tccatgctatatgaaacgtgtgctgatgagacatttaacttcattgataaaatggcattatcgaattctttctcattgtt

SEQ ID NO: 94862 - DNA, 80 bp, synthetic construct
  source 1..80: mol_type = other DNA
tagacagctgcctgtcaattgtgatgtaagtgcctcaaagtaatcctcgatgagccttgtgaacatctttgttctgaggt

SEQ ID NO: 94863 - DNA, 80 bp, synthetic construct
  source 1..80: mol_type = other DNA
gaccagttggattgtaagactgaggtgactcttgactataaaaacatagattctttaacattgctgtggtacaattggtt

SEQ ID NO: 94864 - DNA, 80 bp, synthetic construct
  source 1..80: mol_type = other DNA
agagataaagctttgctaagtgcctcagaattactctcccgctcacttattctgacatcatcagccaacttccctgtgtc

SEQ ID NO: 94865 - DNA, 80 bp, synthetic construct
  source 1..80: mol_type = other DNA
aaacttgaaatttagacatttgcttttataatgggaatatttccccattaatctgttcccattcatcaccaataaaattg

SEQ ID NO: 94866 - DNA, 80 bp, synthetic construct
  source 1..80: mol_type = other DNA
atttgaaacattggaaatattcctggtctaagaaagtccttgttaccactgcctttgtcaactctcctataggacaggaa

SEQ ID NO: 94867 - DNA, 80 bp, synthetic construct
  source 1..80: mol_type = other DNA
ttcattggtcctgtgtaaaaatatttgtctcttaaaatctcatcactatatatgctttcacaaattctgacatattgatc

SEQ ID NO: 94868 - DNA, 80 bp, synthetic construct
  source 1..80: mol_type = other DNA
ttccggcaagatttctcgatcaaagtcttctatcatgtgattggagagttcactcttgatcaatcttatgaagagctttt

SEQ ID NO: 94869 - DNA, 80 bp, synthetic construct
  source 1..80: mol_type = other DNA
cctccaccaccttgtcaaggtcagatattgagggtgaattgcaatctacttgctgttgtcttcctggtaactccctatat

SEQ ID NO: 94870 - DNA, 80 bp, synthetic construct
  source 1..80: mol_type = other DNA
tgactaataatattgtcaacagtgcactttaggtgatcaaagtattctgatgctcctccatctagtagtatctcatcaag

SEQ ID NO: 94871 - DNA, 80 bp, synthetic construct
  source 1..80: mol_type = other DNA
atcagtgttatcaacatcaccgcttccctcttttgaacctaagacaagattactcattgcttgttgtatcttataatcgt

SEQ ID NO: 94872 - DNA, 80 bp, synthetic construct
  source 1..80: mol_type = other DNA
agtcctgtttgtttagcagatatttgcctttgcgtgcgaacacctctgttaattgtgtgacagctaatgctgtcaacttg

SEQ ID NO: 94873 - DNA, 80 bp, synthetic construct
  source 1..80: mol_type = other DNA
ttgaaatcataatccaaaacacgagacccatctgtatacttgtttacgacaacacttttattgctggccagatccaaagc

SEQ ID NO: 94874 - DNA, 80 bp, synthetic construct
  source 1..80: mol_type = other DNA
tgtagcacaaccacttgtgataacggggtcttgcagtgccttttttacttcctttcccttgaatagagagccattgttaa

SEQ ID NO: 94875 - DNA, 80 bp, synthetic construct
  source 1..80: mol_type = other DNA
aactagacacgagaagtgaaatgaacttcttggacacaccaggcttcttatatcttaccttgtctgcatctgcacaagac

SEQ ID NO: 94876 - DNA, 80 bp, synthetic construct
  source 1..80: mol_type = other DNA
tctttacttaggaactttctcgcattgtagatcatttcatgaagctcttcttctgacgcatcatcctttgggttcacact

SEQ ID NO: 94877 - DNA, 80 bp, synthetic construct
  source 1..80: mol_type = other DNA
gacatgcccaaaatccaatttgggttcaaggaatttctcgaagcatttaatttggtcagtcaatctgtcaggtgtttctt

SEQ ID NO: 94878 - DNA, 80 bp, synthetic construct
  source 1..80: mol_type = other DNA
tagtaatgaaatgacacatgtatgagatgttcaagacaaacttgaacctattggtcatcatactgacaacctcctcagat

SEQ ID NO: 94879 - DNA, 80 bp, synthetic construct
  source 1..80: mol_type = other DNA
aaaattattcctaacaaatgacggacaagcttatagagcaggtattcaacctctgtaattaaatcctctctaattttgtc

SEQ ID NO: 94880 - DNA, 80 bp, synthetic construct
  source 1..80: mol_type = other DNA
tactggggtgtgttaatattagaaccaggatcattttggtcaacagtttgatagtgatcagctgttcagataattctgag

SEQ ID NO: 94881 - DNA, 80 bp, synthetic construct
  source 1..80: mol_type = other DNA
cactcttctatccagctgaccataacattgaccactttctggaagacatcactagagaaaactgcaggaaagaatcgttt

SEQ ID NO: 94882 - DNA, 80 bp, synthetic construct
  source 1..80: mol_type = other DNA
ggggtcagcataaaatgagcagacctctccaactacattgttattgatagcataacactttgaacattcacctgtctttt

SEQ ID NO: 94883 - DNA, 80 bp, synthetic construct
  source 1..80: mol_type = other DNA
ataacaatttaaatcctatcttgttgacaaagaactcttgacaataagcttccttgcatctaacaacctgatatctagaa

SEQ ID NO: 94884 - DNA, 80 bp, synthetic construct
  source 1..80: mol_type = other DNA
ggtccaaactcattttgcctcagcttcacggttgaagatgtcttcattgaattgatgagagccaggctaagtgttgatag

SEQ ID NO: 94885 - DNA, 80 bp, synthetic construct
  source 1..80: mol_type = other DNA
cttactataacagagggcataacctttaaagtcaatccactcttctagagactcaagaagtccgctcagtatatcaacat

SEQ ID NO: 94886 - DNA, 80 bp, synthetic construct
  source 1..80: mol_type = other DNA
cctttccaagtctgttgcgtttaggatatcaacaacaccaagggtatacgggaacatgtcttcttgagacttttgatagc

SEQ ID NO: 94887 - DNA, 80 bp, synthetic construct
  source 1..80: mol_type = other DNA
tcatagtaggtgtgatcccagaaacctcaatactcataattgtgtcatagacatcacaatcaagaactttaagatcaatt

SEQ ID NO: 94888 - DNA, 80 bp, synthetic construct
  source 1..80: mol_type = other DNA
ccatatgaatcaacctcaataccaacttctttcaaagcattagtggctcgagttaaaaccttgttaatgatggctaaaag

SEQ ID NO: 94889 - DNA, 80 bp, synthetic construct
  source 1..80: mol_type = other DNA
ctcgtggtttcgtccccctatggatgatggaagatttgcacttttgtccctggctctccttctattatctatccaccgtt

SEQ ID NO: 94890 - DNA, 80 bp, synthetic construct
  source 1..80: mol_type = other DNA
ttagatccctttttgttgattctaatgaaactagtctgtcattaacactaacaaaacaagagcctagccaaccaacgaga

SEQ ID NO: 94891 - DNA, 80 bp, synthetic construct
  source 1..80: mol_type = other DNA
tacttgttgttatgccctaaacaatccaaccggcttgcaaggaggattagaatgtcaaaaacaagaagaagttttcttct

SEQ ID NO: 94892 - DNA, 80 bp, synthetic construct
  source 1..80: mol_type = other DNA
agtgttgagaatccttagtgatttcaccttattcaagaaggatctccaacactgcatctgtccattctgagggtcagcag

SEQ ID NO: 94893 - DNA, 80 bp, synthetic construct
  source 1..80: mol_type = other DNA
gcttttcctcactggaatttagacctgcatataagaatttgaggactggagaggctctctgaaactggaatgtcaattgt

SEQ ID NO: 94894 - DNA, 80 bp, synthetic construct
  source 1..80: mol_type = other DNA
tcaatactttcatcattagtgctaatcttatcattgtatagattcctgaaatcctccaataacttcatcttgtcagtctt

SEQ ID NO: 94895 - DNA, 80 bp, synthetic construct
  source 1..80: mol_type = other DNA
tataaattgactttctatgcctccctgcctcaacttatttctgaagatttgatattcttcctcaattgagcttttgacat

SEQ ID NO: 94896 - DNA, 80 bp, synthetic construct
  source 1..80: mol_type = other DNA
aatccacaggcctctgtcttgttaagatcgaaacaatgtcaacatttgtccactgaactctttgttttaatctatcagac

SEQ ID NO: 94897 - DNA, 80 bp, synthetic construct
  source 1..80: mol_type = other DNA
catgggcagaaagcttgttgttaataccttgatggcagctagaaattaattcctcaaagtgctttgcacgattatcaatt

SEQ ID NO: 94898 - DNA, 80 bp, synthetic construct
  source 1..80: mol_type = other DNA
agagcattgatgctttctattccggagagtctaccagaagttaaagctaatgactcacagagtcttgaatactcagactc

SEQ ID NO: 94899 - DNA, 80 bp, synthetic construct
  source 1..80: mol_type = other DNA
ctcaaataatgcattgctttcctgtgaatatttcaataaggcaaataaagtatccctaagcttatcattcacccagtcag

SEQ ID NO: 94900 - DNA, 80 bp, synthetic construct
  source 1..80: mol_type = other DNA
gtatctgctcgttgtaaaaagttgttctaccgtctataagagggatgaggttgatgccaacagactccagatcacctttc

SEQ ID NO: 94901 - DNA, 80 bp, synthetic construct
  source 1..80: mol_type = other DNA
agttgttctaacttcttatagtcctccagatacttttgctcaaagttggcaggggatgatctaacaaaacactcaagcag

SEQ ID NO: 94902 - DNA, 80 bp, synthetic construct
  source 1..80: mol_type = other DNA
agccatcaggaaccacgaaacataaggcaggggtgagcaccccatgatcattgaggatggattcaactgttttgtcctct

SEQ ID NO: 94903 - DNA, 80 bp, synthetic construct
  source 1..80: mol_type = other DNA
gtattgtgttcgcagccattagccttgcaagagtcaatctcaatacagagagataacaatttcaacccctccatgagcag

SEQ ID NO: 94904 - DNA, 80 bp, synthetic construct
  source 1..80: mol_type = other DNA
atcatcgatttcagtgcaccgattaggaggtgtggagaactgtcaccaatttccttcacaaacacttccaaatcttgatc

SEQ ID NO: 94905 - DNA, 80 bp, synthetic construct
  source 1..80: mol_type = other DNA
ggcaacaggcaaaccaggccaactggagccactgaacagagcagggctcacttggtaccagatgcatcccacctaggacc

SEQ ID NO: 94906 - DNA, 80 bp, synthetic construct
  source 1..80: mol_type = other DNA
ttgaatggatggcgtaaatgtagcaatcctcctgtcagactcccatagtgctcccctgcacacaaccaacggcacaggtt

SEQ ID NO: 94907 - DNA, 80 bp, synthetic construct
  source 1..80: mol_type = other DNA
cactatcaggcccgacctttgagaagtcaaactcagtaaactgtagcttgtctggatcaacaaccagcttcaggggtgtg

SEQ ID NO: 94908 - DNA, 80 bp, synthetic construct
  source 1..80: mol_type = other DNA
acatctcccaattgttgtgtatcccttaagaactcatttattacatctgattcaacaaaccaggctgacctacccttgaa

SEQ ID NO: 94909 - DNA, 80 bp, synthetic construct
  source 1..80: mol_type = other DNA
gaaagacttttcttagtgaatccctgagtcagagtgcctaatcaaaatgggcaacaaacagaccaaatcgacaaaagttg

SEQ ID NO: 94910 - DNA, 80 bp, synthetic construct
  source 1..80: mol_type = other DNA
ggcaatttagttggacttcagtggaaagcctctcccagtgaatccctgaatcaaagtgtctagtcaaaatgggcaacaga

SEQ ID NO: 94911 - DNA, 80 bp, synthetic construct
  source 1..80: mol_type = other DNA
ctgtgttgggtttgggtttgtgccaatatagcttgtgggtcagctagtgatgtcccacagatggtgcaacagaaatgaga

SEQ ID NO: 94912 - DNA, 80 bp, synthetic construct
  source 1..80: mol_type = other DNA
cagcaggcctttcctgaccagaatccaaatctgcatacaagaatttaaggactggagaggctcttcggaactggaatgtt

SEQ ID NO: 94913 - DNA, 80 bp, synthetic construct
  source 1..80: mol_type = other DNA
gctgagtttgggtttgtgccagaatgacttgtgggtcagctggtggtgccccataaaagctcctacaaaagtgagagaca

SEQ ID NO: 94914 - DNA, 80 bp, synthetic construct
  source 1..80: mol_type = other DNA
atgacttgtgggtcagctggtgatgccccgtaaaaggcttcaacagaaatgagagacaatatgcctaggatcctcggtgc

SEQ ID NO: 94915 - DNA, 80 bp, synthetic construct
  source 1..80: mol_type = other DNA
tgcacaaccgcttgtgataagagggtctcgcagtgtcttctttacttcgttttctttaaacaatgaaccattattgaaac

SEQ ID NO: 94916 - DNA, 80 bp, synthetic construct
  source 1..80: mol_type = other DNA
cctgtgttgggcttgggcttgtacttgtatggcgtgtgggccagctggcagcgcctcacaaaagctcttacagaaatgag

SEQ ID NO: 94917 - DNA, 80 bp, synthetic construct
  source 1..80: mol_type = other DNA
ggtcagataatcacctttttccaagaggtgccccatgtgatagaggaggtgatgaatatagtcctaattgcactcagtct

SEQ ID NO: 94918 - DNA, 80 bp, synthetic construct
  source 1..80: mol_type = other DNA
ctgaaagttgcctccttaatgattgtgtccagagaaatgacttcacttccttcgaagcactcatcttggtctggacacct

SEQ ID NO: 94919 - DNA, 80 bp, synthetic construct
  source 1..80: mol_type = other DNA
taagtgtcatcaactgagagtaggtcaaccctgttggaaaccctgctgactgtaaagatttattagacccagcagtgccc

SEQ ID NO: 94920 - DNA, 80 bp, synthetic construct
  source 1..80: mol_type = other DNA
ctgtcatcccttttttgtttgcgcattaaacgctgcacattgctgacttcagaaaagtcaaggccatgaaggagagcctg

SEQ ID NO: 94921 - DNA, 80 bp, synthetic construct
  source 1..80: mol_type = other DNA
atctttgtgtgagtgggcttcattaagccatgggacaaatcataacatttttccaggaagtacctcatgtcatagaggaa

SEQ ID NO: 94922 - DNA, 80 bp, synthetic construct
  source 1..80: mol_type = other DNA
caccatcatcccgtttttgtttgcgcattaagcgttgcacattgctgacttcagcaaagtcaagaccatgaaggagagcc

SEQ ID NO: 94923 - DNA, 80 bp, synthetic construct
  source 1..80: mol_type = other DNA
acttctttagaagcactcatcttgatctagacactctgggatttattggttgaaagtatcacccaataagtcaatgaaaa

SEQ ID NO: 94924 - DNA, 80 bp, synthetic construct
  source 1..80: mol_type = other DNA
tttcttcttctgtgtgggagatcatgctcggtgacttacaaaggcgtatatgaactacaaactctggagctggacatggc

SEQ ID NO: 94925 - DNA, 80 bp, synthetic construct
  source 1..80: mol_type = other DNA
gggagatcgtgctcagcgatttataaagggagctatcaacttgagactcttgagttgaacatggagacactcaatatgac

SEQ ID NO: 94926 - DNA, 80 bp, synthetic construct
  source 1..80: mol_type = other DNA
ttcccaggtttttgaggcttattgtctgactccagatctaccacagtgttttcccaagctctgccagtgattgaggttct

SEQ ID NO: 94927 - DNA, 80 bp, synthetic construct
  source 1..80: mol_type = other DNA
tccatttacaggacgaccttggggcttgaggttctaaacaccatgtctctggggagaactgctcttaaaactggtatatt

SEQ ID NO: 94928 - DNA, 80 bp, synthetic construct
  source 1..80: mol_type = other DNA
ttgaagtcctaaagaccatatctctaggcaacacagctcttaagactttggtatcgagcccacccatcacagctgcatca

SEQ ID NO: 94929 - DNA, 80 bp, synthetic construct
  source 1..80: mol_type = other DNA
tgcatatggcataggtccttgaactgatcccagacaacattctcgaactttctagagtctggcttactcaaagaaatgtc

SEQ ID NO: 94930 - DNA, 80 bp, synthetic construct
  source 1..80: mol_type = other DNA
tgagggtcataagctgtgaataagtcagccctgtagggaaaccagcagattgcaaggatctattggacccattgttccca

SEQ ID NO: 94931 - DNA, 80 bp, synthetic construct
  source 1..80: mol_type = other DNA
aaatcctcactatgccgtctcttccggtgtttggcccttgattgccattagtcatgccaatcatattcaagaaggccctt

SEQ ID NO: 94932 - DNA, 80 bp, synthetic construct
  source 1..80: mol_type = other DNA
ctttggtcaagttgctgagaactcagatttcccatataaactcctgagcttaatggtctttcagtacggatcaccttaga

SEQ ID NO: 94933 - DNA, 80 bp, synthetic construct
  source 1..80: mol_type = other DNA
cggatagttctctcctcaaagactgagtccataggaacgactttacttcctttgaagcactcatcgttgttgttaagctg

SEQ ID NO: 94934 - DNA, 80 bp, synthetic construct
  source 1..80: mol_type = other DNA
gagttctacaagattgttgacagcctgatttaaatccctgagacgtttcagatcactatcatccctcttttgtttgcgca

SEQ ID NO: 94935 - DNA, 80 bp, synthetic construct
  source 1..80: mol_type = other DNA
gatttcacttctttagaagcactcatcttggtttggacacttcgacattcactggttgaaagtatcacttagtaagtcaa

SEQ ID NO: 94936 - DNA, 80 bp, synthetic construct
  source 1..80: mol_type = other DNA
taagcgtcatcaactgagaatagctcagccctgttgggaaccccgctgactgtaaagatttgttggatccagcagtgccc

SEQ ID NO: 94937 - DNA, 80 bp, synthetic construct
  source 1..80: mol_type = other DNA
tccagaggaatgattttacttccttagaagcactcatcctggtctgaacacttagggacttgctggttgaatgtatcact

SEQ ID NO: 94938 - DNA, 80 bp, synthetic construct
  source 1..80: mol_type = other DNA
caccggggatcctaggcattttggattgcgcatttctggaatcattgaagagagtgtcacacccagacatggggcaaata

SEQ ID NO: 94939 - DNA, 80 bp, synthetic construct
  source 1..80: mol_type = other DNA
ccacgatgcctgtatgcatgtgacatagatctttgtactgatcccagacaacattctcgaattttctagagtctgattta

SEQ ID NO: 94940 - DNA, 80 bp, synthetic construct
  source 1..80: mol_type = other DNA
ccaccaactttatgtccttccttccttgtgattccaatagtttcttgatgtcttctgacccttgacaggtaatgaccatg

SEQ ID NO: 94941 - DNA, 80 bp, synthetic construct
  source 1..80: mol_type = other DNA
acttggcggtgtaaattagccctaaatccgttagggcttggacagcatcatttaagtccacctgcccctgtttagttaga

SEQ ID NO: 94942 - DNA, 80 bp, synthetic construct
  source 1..80: mol_type = other DNA
tacatagcacttgattctgggaaggggagctgggactgtatagtgacttcctaccaatatttaataatccaaaacaccac

SEQ ID NO: 94943 - DNA, 80 bp, synthetic construct
  source 1..80: mol_type = other DNA
tcatcctggtcgatgttgatcggaactcactggttgaaagtgttacccagtaaatcaacagtagtaggcgcaatctgaaa

SEQ ID NO: 94944 - DNA, 80 bp, synthetic construct
  source 1..80: mol_type = other DNA
taagtgtcatcaactgagaataggtcagccctgttggaaaccccgctgactgtaaagacttgttggacccaacagcaccc

SEQ ID NO: 94945 - DNA, 80 bp, synthetic construct
  source 1..80: mol_type = other DNA
aagtggaaggttgagatgatactcattagagcatggtcataaagattctttttgtgtgcatcagagaggttacaaaactt

SEQ ID NO: 94946 - DNA, 80 bp, synthetic construct
  source 1..80: mol_type = other DNA
ttggaagcactcatcttgctctggacacctgggagttactggtttaaagtatcaatcagtaagtcaatgaaaagcgcaat

SEQ ID NO: 94947 - DNA, 80 bp, synthetic construct
  source 1..80: mol_type = other DNA
cttaaagaaatgtccaccaattttatgtctttccttccttgtgattctaacaatttcttgatgtcttctgacccttgaca

SEQ ID NO: 94948 - DNA, 80 bp, synthetic construct
  source 1..80: mol_type = other DNA
ggtgatgaccatgtttcgtgggagtgcttctattacagcacttgttaggccaggttgtgcagcaaacaagtcactcacat

SEQ ID NO: 94949 - DNA, 80 bp, synthetic construct
  source 1..80: mol_type = other DNA
cgactttacttcgtttgaagcactcatcgttgttggtgagcggtgtgtcttttgcacactttgatccacaaaggtgaata

SEQ ID NO: 94950 - DNA, 80 bp, synthetic construct
  source 1..80: mol_type = other DNA
ttgaccttcgtcaatgtctctgcatcactctatgtctctgtatcactaataactatagcagaggaactaagaacctgtac

SEQ ID NO: 94951 - DNA, 80 bp, synthetic construct
  source 1..80: mol_type = other DNA
aaagttgctggttccctgtgcatcagaatagaccaggcaataatggataaaaccattacattgaaagcaaatttcagtgt

SEQ ID NO: 94952 - DNA, 80 bp, synthetic construct
  source 1..80: mol_type = other DNA
atgcatacaaaattgctaagaaaggggattcagcaattatgaagagtgaactggaatatggtaattgtgataccaaatgt

SEQ ID NO: 94953 - DNA, 80 bp, synthetic construct
  source 1..80: mol_type = other DNA
cattcctggattcccaaaaggtggagatcctccatacagccatggaacagggacagggtacactatggacacagtcacca

SEQ ID NO: 94954 - DNA, 80 bp, synthetic construct
  source 1..80: mol_type = other DNA
gaagtgctgcaacttgttcgagaaatttttccctagaccgattggaatttctagcatggtggaggccatggtgtctaggg

SEQ ID NO: 94955 - DNA, 80 bp, synthetic construct
  source 1..80: mol_type = other DNA
agtggtcaaaacgaagtgggggtggatgggctctggctagctagggaacccactgcttaagcctcaataaagcttgcctt

SEQ ID NO: 94956 - DNA, 80 bp, synthetic construct
  source 1..80: mol_type = other DNA
aaagtagaaccagaggagctctctcgacgcaggactcggcttgctgaagcgcgcacggcaagaggcgtagaactttaaat

SEQ ID NO: 94957 - DNA, 80 bp, synthetic construct
  source 1..80: mol_type = other DNA
tatagaaatttgacagcaaactagcacatcatcatatagccagagaaatgcacccagagttctacagagactgaaagact

SEQ ID NO: 94958 - DNA, 80 bp, synthetic construct
  source 1..80: mol_type = other DNA
aaactagcacatcatcatatagccagagaaatgcacccggagttctacagagactgaaagactgctgacatcgagctttc

SEQ ID NO: 94959 - DNA, 80 bp, synthetic construct
  source 1..80: mol_type = other DNA
agaaatgcacccggagttctacagagactgaaagactgctgacatcgagctttctacaagactgctgacaagggactttc

SEQ ID NO: 94960 - DNA, 80 bp, synthetic construct
  source 1..80: mol_type = other DNA
gtgtgtgcccgtctgttgtgtgactctggtaactagagatccagcctgtccaaaatggcaaacccctgtctctactaaaa

SEQ ID NO: 94961 - DNA, 80 bp, synthetic construct
  source 1..80: mol_type = other DNA
taagataagtggcaaaaagtcaaagatgaaggaatagtctcttataagagaaaaaatgagacgaactgagccaacaacag

SEQ ID NO: 94962 - DNA, 80 bp, synthetic construct
  source 1..80: mol_type = other DNA
gcgaaagggaaaccagaggagctctctcgacgcaggactcggcttgctgaagctcgctttgactagcggaggctagaagg

SEQ ID NO: 94963 - DNA, 80 bp, synthetic construct
  source 1..80: mol_type = other DNA
ccggagttctacagagactgaaagactgctgacatcgagctttctacaagactgctgacagaggactttccgctggggac

SEQ ID NO: 94964 - DNA, 80 bp, synthetic construct
  source 1..80: mol_type = other DNA
aaaactgctctttcaatgtcaccacggacagaagagataaagtgcagacaacctatgcattgtttaataaacttgatgtg

SEQ ID NO: 94965 - DNA, 80 bp, synthetic construct
  source 1..80: mol_type = other DNA
agataaaaaactgctctttcaatgtcaccacagatagaagagataaagtgcagacaacctatgcattgtttaataaactt

SEQ ID NO: 94966 - DNA, 80 bp, synthetic construct
  source 1..80: mol_type = other DNA
gcgaaagggaaaccagaggagctctctcgacgcaggactcggcttgctgaagcgcgctcagcgagagtacgccaaatatt

SEQ ID NO: 94967 - DNA, 80 bp, synthetic construct
  source 1..80: mol_type = other DNA
cactatcactaataatagcactgtcactaatagtaccaatggcactaatagtagtgggttagagatagagagaggagaaa

SEQ ID NO: 94968 - DNA, 80 bp, synthetic construct
  source 1..80: mol_type = other DNA
caatgtcactagtggtaccactgtcactcccagtgccaatgccactaatagtagttggttaaagatagagacaggagaaa

SEQ ID NO: 94969 - DNA, 80 bp, synthetic construct
  source 1..80: mol_type = other DNA
ggacctgaaagcgaaagtagaaccagagaagttctctcgacgcaggactcggcttgctgaagcgcgcacggcagatgggt

SEQ ID NO: 94970 - DNA, 80 bp, synthetic construct
  source 1..80: mol_type = other DNA
tagtaacaatgtcagtgccactgtcactcctagtgcccatgccactaatagtagttggttaaagatagagacaggagaaa

SEQ ID NO: 94971 - DNA, 80 bp, synthetic construct
  source 1..80: mol_type = other DNA
gggacctgaaagcgaaagtagaaccagaggagttctctcgacgcaggactcggcttgctgaagcgcgcacgactagcgga

SEQ ID NO: 94972 - DNA, 80 bp, synthetic construct
  source 1..80: mol_type = other DNA
agaagaatcgaagaagaaggtagagagaaagacagagacacatccggacagttagcggatggcttgttgacacttatcta

SEQ ID NO: 94973 - DNA, 80 bp, synthetic construct
  source 1..80: mol_type = other DNA
cgaagaagaaagtagaaaaaaagacagagacatatccggacagttagcgaatagcttgttgacacttatctaggtcgacc

SEQ ID NO: 94974 - DNA, 80 bp, synthetic construct
  source 1..80: mol_type = other DNA
cgaagaagaaggtagagaaaaagacagaaacacatccagacagttagcagatagcttgttgacacttatctaagtcgacc

SEQ ID NO: 94975 - DNA, 80 bp, synthetic construct
  source 1..80: mol_type = other DNA
aaagccctcaagtattagtagaatctcctgcagtattagattcaaaaactaaagaatagtactgttagcttgtttaacgc

SEQ ID NO: 94976 - DNA, 80 bp, synthetic construct
  source 1..80: mol_type = other DNA
cccggaagaatcgaagaagaaagtggagagagagacagaggcatatccagacagtcagcagatggcttgttgacacttat

SEQ ID NO: 94977 - DNA, 80 bp, synthetic construct
  source 1..80: mol_type = other DNA
caggaactaaaaaatagtactgttagcttgttcaacgccatcgccattgcagtagctgagaggacagataagattttaga

SEQ ID NO: 94978 - DNA, 80 bp, synthetic construct
  source 1..80: mol_type = other DNA
ggaacccgacaggcccagaggaatcgaagaagaaagtagaaagaaagacagagacatatccggacagttagcagatggct

SEQ ID NO: 94979 - DNA, 80 bp, synthetic construct
  source 1..80: mol_type = other DNA
tagctaagaggacaaataaagttttagaaacagtacaaagattaagtagaagtattcttcatatacctagaaaaataaga

SEQ ID NO: 94980 - DNA, 80 bp, synthetic construct
  source 1..80: mol_type = other DNA
caaggcttagaaaagcttttgctataagataggtggcaggtagtcaagacttaggaggaataaatgaaagaccataaaag

SEQ ID NO: 94981 - DNA, 80 bp, synthetic construct
  source 1..80: mol_type = other DNA
aaggactgaactgctgacatctgaattgctgacatcgagctttctacaaggactttccgctaaagactttccaggagagg

SEQ ID NO: 94982 - DNA, 80 bp, synthetic construct
  source 1..80: mol_type = other DNA
tgtctcgcattctatcacatggcctgagagctgcatctagatttctataaagactgaactgctgacatctggaggacttt

SEQ ID NO: 94983 - DNA, 80 bp, synthetic construct
  source 1..80: mol_type = other DNA
tgagagctgcatctagatttctataaagactgaactgctgacatctggaggactttccaggagaggtgtggccagggcag

SEQ ID NO: 94984 - DNA, 80 bp, synthetic construct
  source 1..80: mol_type = other DNA
cgtctcgcattccatcacatggcccgagagctgcatccggatttctataaggactaaactgctgacatctgaactgctga

SEQ ID NO: 94985 - DNA, 80 bp, synthetic construct
  source 1..80: mol_type = other DNA
gagctgcatccggatttctataaggactaaactgctgacatctgaactgctgacatcaagctttctacaaggactttccg

SEQ ID NO: 94986 - DNA, 80 bp, synthetic construct
  source 1..80: mol_type = other DNA
agaacccgacaagcccagaaaaatcaaaaaagaaagtagaaaaaaagacagagacacatccagacagttagcagatagct

SEQ ID NO: 94987 - DNA, 80 bp, synthetic construct
  source 1..80: mol_type = other DNA
gataggtggcagatagtcaagacttaaaaaaaatagataaaaaaccataaagaaaagaatgagacgagctaagtcagcaa

SEQ ID NO: 94988 - DNA, 80 bp, synthetic construct
  source 1..80: mol_type = other DNA
agagacatatccggacagttagcagatagcttgttgacacttatctaagtcgacctgaagagcctgtgcctcttcagcta

SEQ ID NO: 94989 - DNA, 80 bp, synthetic construct
  source 1..80: mol_type = other DNA
cgaatctctgcagaagttggaaaagcaggtgtgggtgaaagacaggggaccccaagagcctgggctgaaacaacccccac

SEQ ID NO: 94990 - DNA, 80 bp, synthetic construct
  source 1..80: mol_type = other DNA
ttaggccaatctcactcaatctcagtctagctccctttctgagcctgtttcccctatctataaaatgagggtgggtgccc

SEQ ID NO: 94991 - DNA, 80 bp, synthetic construct
  source 1..80: mol_type = other DNA
tgagccagatgccataccttcccaatcctcatgagctctcgggcacggtctagctctgtcagccaaaattaccctatagt

SEQ ID NO: 94992 - DNA, 80 bp, synthetic construct
  source 1..80: mol_type = other DNA
tacatactgaccctcaggtgccgggggcatggcactcagatccacgggctgccccttctccagggcctccaggacagcac

SEQ ID NO: 94993 - DNA, 80 bp, synthetic construct
  source 1..80: mol_type = other DNA
tgaagagcctgtgcctcttcagctaccaccgcttaagagacttactcttgattgtaacaaaagttctagaactcttaaga

SEQ ID NO: 94994 - DNA, 80 bp, synthetic construct
  source 1..80: mol_type = other DNA
ttggtaaaatctcctgcagtattgaattcaggaactaaaaaatagtactgttagcttgttcaacgccatcgccattgcag

SEQ ID NO: 94995 - DNA, 80 bp, synthetic construct
  source 1..80: mol_type = other DNA
tagctaaagaaacaaataaaattttaaaagcagtacaaaaattaggtaaaggtattcttcatatacctagaaaaataaaa

SEQ ID NO: 94996 - DNA, 80 bp, synthetic construct
  source 1..80: mol_type = other DNA
aaggactgaactgctgacatctaaactgctaacatcaagctttctacagaaactttccgctggaaactttccaggggaag

SEQ ID NO: 94997 - DNA, 80 bp, synthetic construct
  source 1..80: mol_type = other DNA
ctaggtcgacctaaaaagcctgtgcctcttcagctaccaccgcttaagagacttactcttgattgtaacaaaggctctag

SEQ ID NO: 94998 - DNA, 80 bp, synthetic construct
  source 1..80: mol_type = other DNA
aagcagtacaaagattaagtaaaagtattctgcatatacctagaagaataagacaaagcttaaaaagctgtaagataagt

SEQ ID NO: 94999 - DNA, 80 bp, synthetic construct
  source 1..80: mol_type = other DNA
agcagatggtcaagacttaagaagaatagataagagaccataaaagaaaaaataagacgagctaagccagcaactgaacc

SEQ ID NO: 95000 - DNA, 80 bp, synthetic construct
  source 1..80: mol_type = other DNA
cgaagaagaaggtgaagaaagagacaaaggcatatccagacagtcagcagatggcttgttgacacttatctaagtcgacc

SEQ ID NO: 95001 - DNA, 80 bp, synthetic construct
  source 1..80: mol_type = other DNA
taaggagcctgtgcctcttcagctaccaccgcttaagagacttactcttaattgtaacgaaggctctagaactaaggtag

SEQ ID NO: 95002 - DNA, 80 bp, synthetic construct
  source 1..80: mol_type = other DNA
ggaacccgacaggcccagagaaatcaaaaaagaaggtgaagagaaagacagagacacatccagacagttagcagatagct

SEQ ID NO: 95003 - DNA, 80 bp, synthetic construct
  source 1..80: mol_type = other DNA
aaaggaaagggaaaccagaggagctctctcgacgcaggactcggcttgctgaagcgcgcacagcaagaggcgaggggcgg

SEQ ID NO: 95004 - DNA, 80 bp, synthetic construct
  source 1..80: mol_type = other DNA
ggaacccgacaggcccagagaaatcgaaaaaaaaagtagagagagagacagaggcatatccagacagtcagcagatggct

SEQ ID NO: 95005 - DNA, 80 bp, synthetic construct
  source 1..80: mol_type = other DNA
caggaactaaagaatagtattgttagcttgttcaacgccatcgccattgcagtagctaagaagacaaataaagttttaaa

SEQ ID NO: 95006 - DNA, 80 bp, synthetic construct
  source 1..80: mol_type = other DNA
ataggtggcaggtggtcaagacttaaaaaaaatagatagaagaccataaaaaaaagaatgagacgagctgagccagcaac

SEQ ID NO: 95007 - DNA, 80 bp, synthetic construct
  source 1..80: mol_type = other DNA
atagaaaagaccaccgcagaggagaacaactgcttgttacaccctatgaaccagcatagaatagatgacccaaagaaaga

SEQ ID NO: 95008 - DNA, 80 bp, synthetic construct
  source 1..80: mol_type = other DNA
tttttctactgtaatacaacagcactgtttaatagtacttaagatgataatacaaatagtactagagaaaaagaaaatat

SEQ ID NO: 95009 - DNA, 80 bp, synthetic construct
  source 1..80: mol_type = other DNA
cccagaagaatcgaagaagaaagtagaaagaaagacagagacacatccagacagttagcagatagcttgttgacacttat

SEQ ID NO: 95010 - DNA, 80 bp, synthetic construct
  source 1..80: mol_type = other DNA
tattagattcaagaactaaaaaatagtactgttagcttgttcaacgccatcgccattgcagtagctaagaagacagataa

SEQ ID NO: 95011 - DNA, 80 bp, synthetic construct
  source 1..80: mol_type = other DNA
gatggcttgttgacacttatctaggtcgacctgaggagcctgtgcctcttcagctaccaccgcttaagagacttactctt

SEQ ID NO: 95012 - DNA, 80 bp, synthetic construct
  source 1..80: mol_type = other DNA
gataagtggcaagtggtcaagacttaagaagaatagataagagaccataagaaaaagaatgagacgagctaagccagcaa

SEQ ID NO: 95013 - DNA, 80 bp, synthetic construct
  source 1..80: mol_type = other DNA
aaggactgaactgctgacatctgaactgctgacatcgagctttctacagagactttccgctgaggactttccaaaggagg

SEQ ID NO: 95014 - DNA, 80 bp, synthetic construct
  source 1..80: mol_type = other DNA
tacagcttaattaaaaactcacagaaccagcagaaaaaaaataaacagaaattattagcattaaataaataggcaaattt

SEQ ID NO: 95015 - DNA, 80 bp, synthetic construct
  source 1..80: mol_type = other DNA
ggaacccgacaggcccggagaaatcgaaaaaaaaggtgaaaaaaaagacagagacacatccggacagttagcgaatggct

SEQ ID NO: 95016 - DNA, 80 bp, synthetic construct
  source 1..80: mol_type = other DNA
cgaaaaagaaagtagagagagagacagaggcatatccagacagtcagcagatagcttgttgacacttatctaggtcgacc

SEQ ID NO: 95017 - DNA, 80 bp, synthetic construct
  source 1..80: mol_type = other DNA
aagcagtacaaagattaagtaaaagtattcttcatatacctagaagaataagacaaagcttaaaaagacttttgctataa

SEQ ID NO: 95018 - DNA, 80 bp, synthetic construct
  source 1..80: mol_type = other DNA
gataagtggcagatggtcaagacttaagagaaatagataagagaccataaaagaaaaaataagacgagctaagccagcaa

SEQ ID NO: 95019 - DNA, 80 bp, synthetic construct
  source 1..80: mol_type = other DNA
tgttgacacttatctaggtcgacctaaggagcctgtgcctcttcagctaccaccgcttgagagacttactcttgattgta

SEQ ID NO: 95020 - DNA, 80 bp, synthetic construct
  source 1..80: mol_type = other DNA
aaggactaaacaaaagacatctgaactgctgacatcgagctttctacagggactttccgctggggactttccaggggagg

SEQ ID NO: 95021 - DNA, 80 bp, synthetic construct
  source 1..80: mol_type = other DNA
catccggatttctataaggactgaactgctgacatctgaactgctgacatcgagctttctacagggactttccgctgggg

SEQ ID NO: 95022 - DNA, 80 bp, synthetic construct
  source 1..80: mol_type = other DNA
agggaaaccagaggagctctctcgacgcaggactcggcttgctgaagcgcgcacagcaatttttgactagcggaggctag

SEQ ID NO: 95023 - DNA, 80 bp, synthetic construct
  source 1..80: mol_type = other DNA
ctgctgatcacaagtactaagaactgctgacagtgaactctcaacaagggactttccgctggggactttccaggggaggc

SEQ ID NO: 95024 - DNA, 80 bp, synthetic construct
  source 1..80: mol_type = other DNA
ctgctctttcaatatcactgcaggagttcgagataaggtgaataaagaatatgcattcttttataaatatgatgtagtac

SEQ ID NO: 95025 - DNA, 80 bp, synthetic construct
  source 1..80: mol_type = other DNA
gtgggagttcttcaagaactaagaactgctgatcacaagtactaagaactgctgacagtgaactctcaacaagggacttt

SEQ ID NO: 95026 - DNA, 80 bp, synthetic construct
  source 1..80: mol_type = other DNA
aaataaattattagcacttatctgaatcgacttaagaagcctgtgcaccttcagctaccaccgcttaaaaaacttagtat

SEQ ID NO: 95027 - DNA, 80 bp, synthetic construct
  source 1..80: mol_type = other DNA
aaactacaaaaagctggtaaaactatcctccgcataccaacaaaaataaaacagggcttaaaaagggctttggtgtaaaa

SEQ ID NO: 95028 - DNA, 80 bp, synthetic construct
  source 1..80: mol_type = other DNA
tagaaggcaaatggtcaaaaggtagtatagttgaatagactaaagtaaaaaaaaaataaaacgagctggagcagcagcgt

SEQ ID NO: 95029 - DNA, 80 bp, synthetic construct
  source 1..80: mol_type = other DNA
tctttcaatatcactgcagaagttcaaaataaggtaaataaaaaatatgcactcttttataaatataatgtagtacccat

SEQ ID NO: 95030 - DNA, 80 bp, synthetic construct
  source 1..80: mol_type = other DNA
ctagtgtagaaatttgacagcaagctagcagttcatcacgtagcccgaatgctgcatccagagttcttcaagaactaaga

SEQ ID NO: 95031 - DNA, 80 bp, synthetic construct
  source 1..80: mol_type = other DNA
gtagatagattattagcacttatctagatcgacttaaagagcctgtgcatcttcagctaccaccgcttgagagacttagt

SEQ ID NO: 95032 - DNA, 80 bp, synthetic construct
  source 1..80: mol_type = other DNA
aagaactaagaactgctgatcacaagtactaagaactgctgacagtgaactctcaacaagggactttccgctaaggactt

SEQ ID NO: 95033 - DNA, 80 bp, synthetic construct
  source 1..80: mol_type = other DNA
aaaaaactgctctttcaatatcactgcagaagttcgagataaagtaaataaaaaatatgcattcttttataaatataatg

SEQ ID NO: 95034 - DNA, 80 bp, synthetic construct
  source 1..80: mol_type = other DNA
aaaaaaattagcaaatattcaaagacaatatacagcttacttaaaaaatcacaaaaccaacagaaaaaaaatgaacaaga

SEQ ID NO: 95035 - DNA, 80 bp, synthetic construct
  source 1..80: mol_type = other DNA
agggacagatccgaaaaattagtgaataaattattagcacttatctaaatcaacttaaggagcctgtgcaccttcagtta

SEQ ID NO: 95036 - DNA, 80 bp, synthetic construct
  source 1..80: mol_type = other DNA
ccaccgcttaaaagacttagtattaattgcagcaagaactgtaaaactgctggaacgcagggggtaaaaagccctcaaat

SEQ ID NO: 95037 - DNA, 80 bp, synthetic construct
  source 1..80: mol_type = other DNA
attagtaaaatctcctaaagtattgaagtcaaaaaataaaaaatagtgctattagcttgcttaacgccaccgccatagta

SEQ ID NO: 95038 - DNA, 80 bp, synthetic construct
  source 1..80: mol_type = other DNA
aattagaagaacaatttaataaaacaataacattcaatcagtcctcaaaaaagaacccagaaattacaatgcacagtgtt

SEQ ID NO: 95039 - DNA, 80 bp, synthetic construct
  source 1..80: mol_type = other DNA
aattgtagaaagaaatttttctactgtaatacaacaccactgtttaatcaaaatagaacaataaataacactgaagatat

SEQ ID NO: 95040 - DNA, 80 bp, synthetic construct
  source 1..80: mol_type = other DNA
cagcttacttgaagaatcacaaaaccaacaaaaaaagaatgaacaagaattattatcattagacaagtaagacagtttgt

SEQ ID NO: 95041 - DNA, 80 bp, synthetic construct
  source 1..80: mol_type = other DNA
aataaaaaactgctctttcaatatcactgcaggagttcgagataaagtgaataaagaatatgcactcttttataaatatg

SEQ ID NO: 95042 - DNA, 80 bp, synthetic construct
  source 1..80: mol_type = other DNA
agagagacatccggagttttaccaagactgagactgctgacacagagactgctgacacagggattctaaagggactttcc

SEQ ID NO: 95043 - DNA, 80 bp, synthetic construct
  source 1..80: mol_type = other DNA
aaagggactttccgctggggactttccagaaaggcggcccagaagggcgggacatgggagtggctaaccctcagatgctg

SEQ ID NO: 95044 - DNA, 80 bp, synthetic construct
  source 1..80: mol_type = other DNA
atgctgctattagtaacaacaaacaatgcagacaaaatatgcattggccatcaatcaacaaattctacggaaactgtgga

SEQ ID NO: 95045 - DNA, 80 bp, synthetic construct
  source 1..80: mol_type = other DNA
ccccctatacaaaaaattgaaaggggctttagcccccaatgcgatggaagatgggaaaggctgcttcgagttataccaca

SEQ ID NO: 95046 - DNA, 80 bp, synthetic construct
  source 1..80: mol_type = other DNA
ataacaggagaaagtacatggaggaatcaagactaggaaggcagaaaatagagggagttaaactggaatctgaggggact

SEQ ID NO: 95047 - DNA, 80 bp, synthetic construct
  source 1..80: mol_type = other DNA
tcctacttcactctgaatagttacgtggccaccattttcccaagatttaaccggagcatttgtcaacaagtaagtcttaa

SEQ ID NO: 95048 - DNA, 80 bp, synthetic construct
  source 1..80: mol_type = other DNA
cgtatattaacattagtaataccaattttcttgctgaacaggctgttacttcagtgacattagcgggtaattcatctctt

SEQ ID NO: 95049 - DNA, 80 bp, synthetic construct
  source 1..80: mol_type = other DNA
ggggatgtgtttgttataagagagccgttcatctcatgctcccatttggaatgtagaacctttttcctgacccaggtggc

SEQ ID NO: 95050 - DNA, 80 bp, synthetic construct
  source 1..80: mol_type = other DNA
tctactgaatgacaaacattctaatgggaccgtcaaagatagaagcccctacagaactttaatgagttgtcccgtgggtg

SEQ ID NO: 95051 - DNA, 80 bp, synthetic construct
  source 1..80: mol_type = other DNA
actgctgacactgagctatctacaagggactttccctgttcgggcgccactgctagagattttctacgctgaatagatgg

SEQ ID NO: 95052 - DNA, 80 bp, synthetic construct
  source 1..80: mol_type = other DNA
attagcgggagcggcatacgcttttctggtgtagacagtgacactgtgggttggtcttggccagacggtgctgagttgcc

SEQ ID NO: 95053 - DNA, 80 bp, synthetic construct
  source 1..80: mol_type = other DNA
atgaatccaattcagaagataacagcaattggcttggtttttttaatcatggcgataatatgtctcctaatgcaaattgc

SEQ ID NO: 95054 - DNA, 80 bp, synthetic construct
  source 1..80: mol_type = other DNA
cattttagcaacgactatgacattacatttcgggcagaaagaatgcagtaccccatcgaataatcaagtgatgccatgtg

SEQ ID NO: 95055 - DNA, 80 bp, synthetic construct
  source 1..80: mol_type = other DNA
atacaacctctactgggggaaacaacacaacctctaatgagggaaacagcacgatagggtgtgttaaggaacaactaaca

SEQ ID NO: 95056 - DNA, 80 bp, synthetic construct
  source 1..80: mol_type = other DNA
accaataagacagtgatatttgaacaaccccccccaggaggagatttagaagttacaatgcatcattttacttgtagagg

SEQ ID NO: 95057 - DNA, 80 bp, synthetic construct
  source 1..80: mol_type = other DNA
ggaattcttctattgcaatacaacaaaactgtttgataatgaaaccacagggccgtgtaatgacaccattatacttccat

SEQ ID NO: 95058 - DNA, 80 bp, synthetic construct
  source 1..80: mol_type = other DNA
aggcatagaaaagataggaaatataacagatgaaatgagcaactgtacttttaatatgactacagagataaaagatagga

SEQ ID NO: 95059 - DNA, 80 bp, synthetic construct
  source 1..80: mol_type = other DNA
gagaagtgttgatgtggaagtttgacagctccctagcacgaagacacataagccgagaactgcacccagagtactatcaa

SEQ ID NO: 95060 - DNA, 80 bp, synthetic construct
  source 1..80: mol_type = other DNA
tgagggactgtgggacacaataactacatcaaattacattttggcaagatctgtagtaccagatttaaaggaattagtat

SEQ ID NO: 95061 - DNA, 80 bp, synthetic construct
  source 1..80: mol_type = other DNA
tcacaacaaaatgaacgtctgcaagaaaaagaaactgaaaagaatacagacgtaactatggagagtaaaactaatactaa

SEQ ID NO: 95062 - DNA, 80 bp, synthetic construct
  source 1..80: mol_type = other DNA
atttgaaggaaaaagaattagtttcaactgaagctcagatacagaagatgtctcaggatttgcaacttgaagctttaaca

SEQ ID NO: 95063 - DNA, 80 bp, synthetic construct
  source 1..80: mol_type = other DNA
catctcttccaattgctagactatcaaatcgtgtatttagagataaattatttccatttattataaatatacataaaaaa

SEQ ID NO: 95064 - DNA, 80 bp, synthetic construct
  source 1..80: mol_type = other DNA
cgaatcgcgtatttagagataaattatttaaaacgttatcagtaaatcatgataaactagtcaatattggtccgcgtaat

SEQ ID NO: 95065 - DNA, 80 bp, synthetic construct
  source 1..80: mol_type = other DNA
caattgcttactaattcatataccgtaaatttatcagatgagatacaagaaatcgggtctacgaaaactcaaaacattac

SEQ ID NO: 95066 - DNA, 80 bp, synthetic construct
  source 1..80: mol_type = other DNA
ggttttgctaagagctttcagtgaagggggagcaatcgtgggagaaatttcccctttaccttatcttgcaggacatatta

SEQ ID NO: 95067 - DNA, 80 bp, synthetic construct
  source 1..80: mol_type = other DNA
caaggggaccaaagcacccagtagtggtcagcactgccccacggtcaagatcggggccaaaacattaacggtcccccctg

SEQ ID NO: 95068 - DNA, 80 bp, synthetic construct
  source 1..80: mol_type = other DNA
acgcaatggagtcgatcactgggacgcttacaggggagaaagggtggtcttatgggatgattacggcatgggaaaccctg

SEQ ID NO: 95069 - DNA, 80 bp, synthetic construct
  source 1..80: mol_type = other DNA
tgctccttacaggggcaaatgcgaagaacatggatcttggcaccggtcctggtgactgcggttgtccttacatctacaaa

SEQ ID NO: 95070 - DNA, 80 bp, synthetic construct
  source 1..80: mol_type = other DNA
aggggactgtctttggtgtggccagtcagagagacgtgtcagggcaacaagtgggagcgactcgagcccatgaagtgcat

SEQ ID NO: 95071 - DNA, 80 bp, synthetic construct
  source 1..80: mol_type = other DNA
tagcagccctgttcataagtctcctgctccttcccagcatgctgttccgtcaaagagtaggttgcaaagtgattctgtta

SEQ ID NO: 95072 - DNA, 80 bp, synthetic construct
  source 1..80: mol_type = other DNA
cgcccatctacgcaggcgaggggagtcacaaatttagtgaaaagattgattagattttctctccctacttcttttctctc

SEQ ID NO: 95073 - DNA, 80 bp, synthetic construct
  source 1..80: mol_type = other DNA
gcgtattctatgcttttataaataatgtaactacagaaaatgtgttgatacagccatttttaatatttaggacgttagtt

SEQ ID NO: 95074 - DNA, 80 bp, synthetic construct
  source 1..80: mol_type = other DNA
aaggattcaataattacatcatatgacttgtttaggcatattcggattagaatcgatatctttatcatccaaacccagga

SEQ ID NO: 95075 - DNA, 80 bp, synthetic construct
  source 1..80: mol_type = other DNA
gtatttcgagaagatcgcatcaaataagattctcagaatctgcgactcaatggatacattttcagagatctgtcaaacaa

SEQ ID NO: 95076 - DNA, 80 bp, synthetic construct
  source 1..80: mol_type = other DNA
tatttgaactatcggcactaatatcgtttcaggacactgtttataaccatttatctattacagatataattagcagatct

SEQ ID NO: 95077 - DNA, 80 bp, synthetic construct
  source 1..80: mol_type = other DNA
ttaaagatggatttatctacaaattggagaagttgttgtagaaggtggaaaatattcgaacacgcaccaattgaattaat

SEQ ID NO: 95078 - DNA, 80 bp, synthetic construct
  source 1..80: mol_type = other DNA
aagaatatataaacagagtgttaaagtataacttatgcagacatgcatttgatcttaaaagatggatttatttacactca

SEQ ID NO: 95079 - DNA, 80 bp, synthetic construct
  source 1..80: mol_type = other DNA
accactgaacttaggttggagttctaccatatattactactatggtgtaccattgaaaccaaaatatacatgcttggagc

SEQ ID NO: 95080 - DNA, 80 bp, synthetic construct
  source 1..80: mol_type = other DNA
tccatcttatggatttataaacagtattctcattggaaacatatccattagacctccttctacaataaaagaattatttt

SEQ ID NO: 95081 - DNA, 80 bp, synthetic construct
  source 1..80: mol_type = other DNA
tagaccaacaggaaaagccaaagtgtgttgtgtttggaaattaacagctatggatctagaattcaatcacgcaataatta

SEQ ID NO: 95082 - DNA, 80 bp, synthetic construct
  source 1..80: mol_type = other DNA
aaacaatcgcttttcgcatacacctataatgcattgatttattacagatataattatgcatttgatcttaaaagatggat

SEQ ID NO: 95083 - DNA, 80 bp, synthetic construct
  source 1..80: mol_type = other DNA
tataggagaaataaaaaactgctcttttaatatcaccacaagcaccaaggagaaggtgaaagactatgcactcttttatg

SEQ ID NO: 95084 - DNA, 80 bp, synthetic construct
  source 1..80: mol_type = other DNA
ggagaaataaaaaactgctcttttaatatcaccacaagcacaaatgatagggtgaaagactatgcacttttttataaact

SEQ ID NO: 95085 - DNA, 80 bp, synthetic construct
  source 1..80: mol_type = other DNA
ggtgaaggactcaggagaaatgaaaaactgctcttttaatatcaccacaagcacaaaagataaggtgaaagactatgcat

SEQ ID NO: 95086 - DNA, 80 bp, synthetic construct
  source 1..80: mol_type = other DNA
taatagtagtagaccttgcaatgttagtggagaaatgatagaagaagtaaaaaattgctctttcaatgttacagaaggaa

SEQ ID NO: 95087 - DNA, 80 bp, synthetic construct
  source 1..80: mol_type = other DNA
taagaaataagatacaaaaagtatatgcaacttttaatacacttgatatagtaccaatagatgggggaagaataataact

SEQ ID NO: 95088 - DNA, 80 bp, synthetic construct
  source 1..80: mol_type = other DNA
attgtactactaagggaaatattagtgaatgggaaagggtggaacaaggagacctaaaaaactgctcttttaatattacc

SEQ ID NO: 95089 - DNA, 80 bp, synthetic construct
  source 1..80: mol_type = other DNA
acaagcacaggtgataaggtaaaaaactattcaatttttgatagccaagatgtagtaccaataaataagaatagtgataa

SEQ ID NO: 95090 - DNA, 80 bp, synthetic construct
  source 1..80: mol_type = other DNA
cttaataacaatcttagtttaaaaaagaggagggaccgaaaacggttcaaccgaaaacggttatatataaaccagcccaa

SEQ ID NO: 95091 - DNA, 80 bp, synthetic construct
  source 1..80: mol_type = other DNA
ggaggcggatgctcattatgcgactgtgcaggacctaaaacgaaagtatttaggcagtccatatgtcagtcctataagca

SEQ ID NO: 95092 - DNA, 80 bp, synthetic construct
  source 1..80: mol_type = other DNA
atgtagctaatgcagtagaaagtgagataagtccacggttagacgccattaaacttacaacacagccaaaaaaggtaaag

SEQ ID NO: 95093 - DNA, 80 bp, synthetic construct
  source 1..80: mol_type = other DNA
cgacggctgtttgaaacacgggaattaacggacagtggatatggctattctgaagtggaagctgcaacgcaggtagagaa

SEQ ID NO: 95094 - DNA, 80 bp, synthetic construct
  source 1..80: mol_type = other DNA
acatggcgacccggaaaatggtggagatggtcaggaaagggacacagggagcgacatagagggtgagggagtggaacata

SEQ ID NO: 95095 - DNA, 80 bp, synthetic construct
  source 1..80: mol_type = other DNA
gagaggcggaagcagtagacgacagcacccgagagcatgcagacacatcaggaatattagaattactaaaatgtaaggat

SEQ ID NO: 95096 - DNA, 80 bp, synthetic construct
  source 1..80: mol_type = other DNA
atacgatctacattacatggtaagtttaaagactgctttgggctgtcatttgttgatttaattaggccatttaaaagtga

SEQ ID NO: 95097 - DNA, 80 bp, synthetic construct
  source 1..80: mol_type = other DNA
tagaaccacatgtgccgattgggtggttgcaggatttggtatacatcatagcatagcagatgcatttcaaaagttaattg

SEQ ID NO: 95098 - DNA, 80 bp, synthetic construct
  source 1..80: mol_type = other DNA
taatctttctttgcacactctgcaaattcagtgcgtgttttgcaggaatgcactgaccaccgcagagatatatgcatatg

SEQ ID NO: 95099 - DNA, 80 bp, synthetic construct
  source 1..80: mol_type = other DNA
agccattaagtttatatgcacatatacaatggcttacaaatgcatggggaatggtactattagtattaataaggtttaaa

SEQ ID NO: 95100 - DNA, 80 bp, synthetic construct
  source 1..80: mol_type = other DNA
gtaaataagagcagatgtaccgtggcacgtacattaggtacgttattaaatatacctgaaaatcacatgttaattgagcc

SEQ ID NO: 95101 - DNA, 80 bp, synthetic construct
  source 1..80: mol_type = other DNA
tcctaaaatacaaagtggcgtagcagccctgtattggtttaggacaggcatttcaaatgcaagtacagttataggggagg

SEQ ID NO: 95102 - DNA, 80 bp, synthetic construct
  source 1..80: mol_type = other DNA
cgccggaatggataacgcgccagaccgttattgaacatagtttggctgacagtcaatttaaattaactgaaatggtgcag

SEQ ID NO: 95103 - DNA, 80 bp, synthetic construct
  source 1..80: mol_type = other DNA
tgggcatatgataatgatatttgtgaagaaagtgagatagcatttgaatatgcacagcgtggagactttgactccaatgc

SEQ ID NO: 95104 - DNA, 80 bp, synthetic construct
  source 1..80: mol_type = other DNA
aagggcctttttaaatagtaatatgcaggctaaatatgtaaaagattgtgcaattatgtgcagacattataaacatgcag

SEQ ID NO: 95105 - DNA, 80 bp, synthetic construct
  source 1..80: mol_type = other DNA
aaatgaaaaagatgtctattaaacaatggattaagtataggggtactaaagttgacagtgtaggtaactggaagccaatt

SEQ ID NO: 95106 - DNA, 80 bp, synthetic construct
  source 1..80: mol_type = other DNA
gtgcagtttctaagacatcaaaacatagaatttattccatttttaagcaaactaaaattatggctgcacggaacgcccaa

SEQ ID NO: 95107 - DNA, 80 bp, synthetic construct
  source 1..80: mol_type = other DNA
aaaaaattgtatagccattgtagggccacctgacactgggaagtcgtgcttttgcatgagtttaattaagtttttggtgg

SEQ ID NO: 95108 - DNA, 80 bp, synthetic construct
  source 1..80: mol_type = other DNA
gaacagttattagttatgttaattcctgcagccatttttggctacagccactaacggatgcaaaagtggcattattggat

SEQ ID NO: 95109 - DNA, 80 bp, synthetic construct
  source 1..80: mol_type = other DNA
cctataagaacctaaaggttgtgtggcgagacaactttccctttgcagcgtgtgcctgttgcttagaactgcaagggaaa

SEQ ID NO: 95110 - DNA, 80 bp, synthetic construct
  source 1..80: mol_type = other DNA
gatgccacacaaccatgttggacatatatggatacatatatgagaaacctattagatggtaatcctatgagcatagatag

SEQ ID NO: 95111 - DNA, 80 bp, synthetic construct
  source 1..80: mol_type = other DNA
atagagcattaacattaattaagtgtccaccgctactggttacatcaaatatagacattagcaaagaggagaaatacaaa

SEQ ID NO: 95112 - DNA, 80 bp, synthetic construct
  source 1..80: mol_type = other DNA
acacattatgcattggaaatgcatacgattggaaagtgtattactacacaaagcaaaacaaatgggcctgagccacattg

SEQ ID NO: 95113 - DNA, 80 bp, synthetic construct
  source 1..80: mol_type = other DNA
ggctacaagtagtaccaccattaactgtgtcagagactaaaggacataatgctattgaaatgcaaatgcatttagaatcc

SEQ ID NO: 95114 - DNA, 80 bp, synthetic construct
  source 1..80: mol_type = other DNA
ttagcaaaaactcagtatggtgtggaaccttggacattacaggacaccagttatgaaatgtggctaacaccacccaaacg

SEQ ID NO: 95115 - DNA, 80 bp, synthetic construct
  source 1..80: mol_type = other DNA
gtgctttaaaaaacagggaaatactgtggaggtaaaatttgatggctgtgaagacaatgtaatggagtatgtggtatgga

SEQ ID NO: 95116 - DNA, 80 bp, synthetic construct
  source 1..80: mol_type = other DNA
cacatatatacctgcaggacaacgactcatgggtaaaagtaactagttccgtagatgccaagggcatatattatacatgt

SEQ ID NO: 95117 - DNA, 80 bp, synthetic construct
  source 1..80: mol_type = other DNA
attaaccaatatagacactttaattatgctgcatatgcacctacagtagaagaagaaactaatgaagatattttaaaagt

SEQ ID NO: 95118 - DNA, 80 bp, synthetic construct
  source 1..80: mol_type = other DNA
ggacaatttaaaacatattatgtaaattttaataaagaggcacaaaagtatggtagtaccaatcattgggaagtatgtta

SEQ ID NO: 95119 - DNA, 80 bp, synthetic construct
  source 1..80: mol_type = other DNA
cccccgcacagaccagcgagcacgtggaccgtccactaacaacaccctgtgtgtggccaacattagatccgtggacagta

SEQ ID NO: 95120 - DNA, 80 bp, synthetic construct
  source 1..80: mol_type = other DNA
caatcaacaacatcgtcactgacaattacaacaagcaccaaagaaggaacaactgtcacagtgcagctacgcctatagtg

SEQ ID NO: 95121 - DNA, 80 bp, synthetic construct
  source 1..80: mol_type = other DNA
caactgcaaggtgattccaattgtttaaaatgttttagatatcgactgaatgacaaatatagacatttgtttgaattagc

SEQ ID NO: 95122 - DNA, 80 bp, synthetic construct
  source 1..80: mol_type = other DNA
atcttcaacgtggcattgggcctcacctgaggcaccacataaaaatgcaattgtaacattaacatatagcagtgaggaac

SEQ ID NO: 95123 - DNA, 80 bp, synthetic construct
  source 1..80: mol_type = other DNA
aacgtcagcaatttttaaacagtgtaaaaataccacccaccattaggcataaggtggggtttatgtcattacatttattg

SEQ ID NO: 95124 - DNA, 80 bp, synthetic construct
  source 1..80: mol_type = other DNA
taaccattgcacctgtatatatgtatatgtgtacataacatacgtgtatggaggtagtgcctgtacaaattgctgcagca

SEQ ID NO: 95125 - DNA, 80 bp, synthetic construct
  source 1..80: mol_type = other DNA
acaactacaacattgatattgcctgttgttattgcatttgcagtatgttttcttagtattgtacttataatattaatatc

SEQ ID NO: 95126 - DNA, 80 bp, synthetic construct
  source 1..80: mol_type = other DNA
tgattttctagtatatacatctgtgctggtactaacacttcttttatatttgcttttgtggcttttattaacaacccctt

SEQ ID NO: 95127 - DNA, 80 bp, synthetic construct
  source 1..80: mol_type = other DNA
gttaattcgttgttacctgtgtcacaagccgttgtgtgaaatagaaaaactaaagcacatattgggaaaggcacgcttca

SEQ ID NO: 95128 - DNA, 80 bp, synthetic construct
  source 1..80: mol_type = other DNA
tgcaattctttttactaacactgtgtgtgtgctattttcctgccttttatatacacatatacattgtgcaaacgcaacaa

SEQ ID NO: 95129 - DNA, 80 bp, synthetic construct
  source 1..80: mol_type = other DNA
taatggtgatgttaacctgtcacttaaatgatggtgatacatggttgtttctgtggttgtttactgcatttgttgtagct

SEQ ID NO: 95130 - DNA, 80 bp, synthetic construct
  source 1..80: mol_type = other DNA
gtacttggattgttgttactacattacagggctgtacatggtactgaaaaaactaaatgtgctaagtgtaaatcaaaccg

SEQ ID NO: 95131 - DNA, 80 bp, synthetic construct
  source 1..80: mol_type = other DNA
caatactactgtggattatgtgtatatgtcacatggtgataatggagattatgtgtacatgaactagagtaaaccttttt

SEQ ID NO: 95132 - DNA, 80 bp, synthetic construct
  source 1..80: mol_type = other DNA
tatacagtgtgtggtgtacgttagttatatataatgaaacctagggcacgcagacgtaaacgtgcgtcagccacacaact

SEQ ID NO: 95133 - DNA, 80 bp, synthetic construct
  source 1..80: mol_type = other DNA
atatcaaacatgcaaggccactggtacatgtcccccagatgtaattcctaaagttgaacatactactattgcagatcaaa

SEQ ID NO: 95134 - DNA, 80 bp, synthetic construct
  source 1..80: mol_type = other DNA
ggtcgtgcagggtatatacccttgggaagctctcctaagcctgctattactgggaggccagcagcacgtccgccagtgct

SEQ ID NO: 95135 - DNA, 80 bp, synthetic construct
  source 1..80: mol_type = other DNA
tgtggagcctgttgccccttccgatccctccattgtgtccttaattgaggagtctgctattattaatgctggtgcacctg

SEQ ID NO: 95136 - DNA, 80 bp, synthetic construct
  source 1..80: mol_type = other DNA
aggtggtaccccctacacagggtggctttactataacatcatctgaatcgactacacctgctattttagatgtgtctgtt

SEQ ID NO: 95137 - DNA, 80 bp, synthetic construct
  source 1..80: mol_type = other DNA
accaatcacactaccactagtgtgtttcaaaatccactgtttacagaaccgtctgtaatacagccccaaccacctgtgga

SEQ ID NO: 95138 - DNA, 80 bp, synthetic construct
  source 1..80: mol_type = other DNA
taaaactaaataaccagtggaagggtcgttgcttacactgctggacaacatgcatggaagacttgttaccctaaaggata

SEQ ID NO: 95139 - DNA, 80 bp, synthetic construct
  source 1..80: mol_type = other DNA
ggccagtggtcacatacttatatctgccccaacaataacatcccaacatgtagaagacattccactagacacttttgttg

SEQ ID NO: 95140 - DNA, 80 bp, synthetic construct
  source 1..80: mol_type = other DNA
tatcctctagtgatagtggacctacatccagtactcctcttcctcgtgcttttcctcggcctcgggtgggtttgtatagt

SEQ ID NO: 95141 - DNA, 80 bp, synthetic construct
  source 1..80: mol_type = other DNA
cgtgccttacagcaggtacaggttacggaccccgcgtttttgtccacgccacagcgattggtaacttatgacaaccctgt

SEQ ID NO: 95142 - DNA, 80 bp, synthetic construct
  source 1..80: mol_type = other DNA
ctatgaaggagaagatgtaagtttacaatttacccatgagtctatccacaatgcacctgatgaagcatttatggatatta

SEQ ID NO: 95143 - DNA, 80 bp, synthetic construct
  source 1..80: mol_type = other DNA
ttagactacatagaccagctataacgtccagacggggtcttgtgcgttttagtcgcattgggcaacgggggtccatgtac

SEQ ID NO: 95144 - DNA, 80 bp, synthetic construct
  source 1..80: mol_type = other DNA
acacgcagtggacaacatataggtgcccgcatacattattttcaggacatttcaccagttacacaagctgcagaggaaat

SEQ ID NO: 95145 - DNA, 80 bp, synthetic construct
  source 1..80: mol_type = other DNA
agaactgcaccctctagtggctgcagaaaatgacacgtttgatatttatgctgaaccatttgaccctatccctgaccctg

SEQ ID NO: 95146 - DNA, 80 bp, synthetic construct
  source 1..80: mol_type = other DNA
tccaacattctgttacacagtcttatcttacctccacacctaataccctttcacaatcgtggggtaataccacagtccca

SEQ ID NO: 95147 - DNA, 80 bp, synthetic construct
  source 1..80: mol_type = other DNA
ttgtcaatccctagtgactggtttgtgcagtctgggcctgacataacttttcctactgcatctatgggaacaccctttag

SEQ ID NO: 95148 - DNA, 80 bp, synthetic construct
  source 1..80: mol_type = other DNA
tcctgtaactcctgctttacctacaggccctgtttttattacaggttctgacttctatttgcatcctacatggtactttg

SEQ ID NO: 95149 - DNA, 80 bp, synthetic construct
  source 1..80: mol_type = other DNA
tagtactagacctgcagcctcctgaccctgtagggttacattgctatgagcaattagaagacagctcagaagatgaggtg

SEQ ID NO: 95150 - DNA, 80 bp, synthetic construct
  source 1..80: mol_type = other DNA
cacgcagacgccgtaaacgtattcccttattttttacagatgtggcggcctagcgacagcacagtatatgtgcctcctcc

SEQ ID NO: 95151 - DNA, 80 bp, synthetic construct
  source 1..80: mol_type = other DNA
caaccctgtatccaaggttgttgccacggatgcgtatgttaaacgcaccaacatattttatcatgccagcagttctagac

SEQ ID NO: 95152 - DNA, 80 bp, synthetic construct
  source 1..80: mol_type = other DNA
tccttgctgtgggacatccatattactctatcaaaaaagttaacaaaacagttgtaccaaaggtgtctggatatcaatat

SEQ ID NO: 95153 - DNA, 80 bp, synthetic construct
  source 1..80: mol_type = other DNA
atctctgtttgaccccactacacagcgtttagtatgggcgtgcacagggttggaggtaggcaggggtcaacctttaggcg

SEQ ID NO: 95154 - DNA, 80 bp, synthetic construct
  source 1..80: mol_type = other DNA
ttggtgttagtgggcatccattgctaaacaaatatgatgatgtagaaaatagtggtgggtatggtggtaatcctggtcag

SEQ ID NO: 95155 - DNA, 80 bp, synthetic construct
  source 1..80: mol_type = other DNA
gataatagggttaatgtaggtatggattataaacaaacccagctatgtatggtgggctgtgctccaccgttaggtgaaca

SEQ ID NO: 95156 - DNA, 80 bp, synthetic construct
  source 1..80: mol_type = other DNA
ttggggtaagggtacacaatgttcaaatacctctgtacaaaatggtgactgccccccgttggaacttattaccagtgtta

SEQ ID NO: 95157 - DNA, 80 bp, synthetic construct
  source 1..80: mol_type = other DNA
tacaggatggggacatggttgatacaggctttggtgctatgaattttgcagacttacaaaccaataaatcggatgttccc

SEQ ID NO: 95158 - DNA, 80 bp, synthetic construct
  source 1..80: mol_type = other DNA
cttgatatttgtggaactgtctgcaaatatcctgattatttgcaaatggctgcagacccgtatggtgataggttgttttt

SEQ ID NO: 95159 - DNA, 80 bp, synthetic construct
  source 1..80: mol_type = other DNA
gacaaggtggacaaacaagactcacaacctttaacacaacattaccaaatactgacctgttgctgtggatgtgacagcaa

SEQ ID NO: 95160 - DNA, 80 bp, synthetic construct
  source 1..80: mol_type = other DNA
ttatttgcgaaaggaacaaatgtttgctagacacttttttaatagggccggtactgtgggggaacctgtgcctgatgacc

SEQ ID NO: 95161 - DNA, 80 bp, synthetic construct
  source 1..80: mol_type = other DNA
tgttggtaaaagggggtaataacagatcatctgtagctagtagtatttatgtacatacacctagtggctcattggtgtct

SEQ ID NO: 95162 - DNA, 80 bp, synthetic construct
  source 1..80: mol_type = other DNA
cacgcagtacaaatatgacactatgtgcatctgtgtctaaatctgctacatacactaattcagattataaggaatacatg

SEQ ID NO: 95163 - DNA, 80 bp, synthetic construct
  source 1..80: mol_type = other DNA
cgccatgtggaggagtttgatttacagtttatttttcaattgtgtagcattacattatctgcagaagtcatggcctatat

SEQ ID NO: 95164 - DNA, 80 bp, synthetic construct
  source 1..80: mol_type = other DNA
acacacaatgaatccttctgttttggaggactggaactttggtttatcgcctccaccaaatggtacactggaggatactt

SEQ ID NO: 95165 - DNA, 80 bp, synthetic construct
  source 1..80: mol_type = other DNA
atagatatgtacagtcacaggccattacctgtcagaaacccacacctgaaaaagaaaaacaggatccctataaggatatg

SEQ ID NO: 95166 - DNA, 80 bp, synthetic construct
  source 1..80: mol_type = other DNA
gacgtaagtttttattgcaaagtggatatcgaggacggacgtctgctcgtacaggtataaagcgcccagctgtgtctaag

SEQ ID NO: 95167 - DNA, 80 bp, synthetic construct
  source 1..80: mol_type = other DNA
ccctctacagcccccaaacgaaaacgtaccaaaaccaaaaagtaatatatgtgtgtcagtgtgttgtgttatttatatgt

SEQ ID NO: 95168 - DNA, 80 bp, synthetic construct
  source 1..80: mol_type = other DNA
cgtccgactggttgtggagtgcacagacggagacatcagacaactacaagaccttttgctgggcacactaaatattgtgt

SEQ ID NO: 95169 - DNA, 80 bp, synthetic construct
  source 1..80: mol_type = other DNA
tgttgtagtgtgtatatgtttcttgtattgtgtatatgtgtatatgtttgtgtatatgtgtatgttatgtatgttatgtt

SEQ ID NO: 95170 - DNA, 80 bp, synthetic construct
  source 1..80: mol_type = other DNA
gttatgtatgtttgtgtgtttcgtgtgtgtatatatttgtggaatgtgtatgtatgtttttgtgcaataaacaattatta

SEQ ID NO: 95171 - DNA, 80 bp, synthetic construct
  source 1..80: mol_type = other DNA
tgtgtgttctgttacacccagtgactaagttgtgtttgcacgcgccgtttgtgttgccttcatattatattatacatatt

SEQ ID NO: 95172 - DNA, 80 bp, synthetic construct
  source 1..80: mol_type = other DNA
tgtaatatacctatactatgttaccccccccccacttgcaaccgttttcggttgcccttacatacacttacctcaaattt

SEQ ID NO: 95173 - DNA, 80 bp, synthetic construct
  source 1..80: mol_type = other DNA
gttataacgtgttttgtactaatcccatatgttgtgtgccaaggtacatattgccctgccaagtatcttgccaacaacac

SEQ ID NO: 95174 - DNA, 80 bp, synthetic construct
  source 1..80: mol_type = other DNA
acctggcgccagggcgcggtattgcatgactaatgtacaataaacctgtcggtttgtacaatgttgtggattgcagccaa

SEQ ID NO: 95175 - DNA, 80 bp, synthetic construct
  source 1..80: mol_type = other DNA
aggttaaaagcatttttggcttctagctgaacatttttgtacccttagtatattatgcacaatacccacaaaatgagtaa

SEQ ID NO: 95176 - DNA, 80 bp, synthetic construct
  source 1..80: mol_type = other DNA
tacccacaaaatgagtaacctaaggtcacacacctgcaaccggtttcggttacccacaccctacatatttccttcttata

SEQ ID NO: 95177 - DNA, 80 bp, synthetic construct
  source 1..80: mol_type = other DNA
aaaattagcagacgaggcattatggaaagtaaagatgcctccacgtctgcaacatccatagaccagttgtgcaagacgtt

SEQ ID NO: 95178 - DNA, 80 bp, synthetic construct
  source 1..80: mol_type = other DNA
gtcccatctgcgcaccaaaaccataacaaggatggcggacgattcaggtacagaaaatgaggggtcggggtgtacaggat

SEQ ID NO: 95179 - DNA, 80 bp, synthetic construct
  source 1..80: mol_type = other DNA
ggtttatggtagaagccatagtagagcacactacaggtacacaaatatcagaagatgaggaagaggaggtggaggacagt

SEQ ID NO: 95180 - DNA, 80 bp, synthetic construct
  source 1..80: mol_type = other DNA
gggtatgacatggtggactttattgatgacaggcatattacacaaaattctgtggaagcacaggcattgtttaataggca

SEQ ID NO: 95181 - DNA, 80 bp, synthetic construct
  source 1..80: mol_type = other DNA
ttaggtattggtacaggggctggtagtggcggtcgtgcagggtatatacccttgggaagctctcctaagcctgctattac

SEQ ID NO: 95182 - DNA, 80 bp, synthetic construct
  source 1..80: mol_type = other DNA
tttaatcgccccagaatatggattcaaaatatcaaaaagaggaagctcaggaatcatgaaaacagataaaacacttgaaa

SEQ ID NO: 95183 - DNA, 80 bp, synthetic construct
  source 1..80: mol_type = other DNA
atgaagacgatattagtaatattactgtatacatttacgactgcatacgcagacacattatgtataggatatcatgcaaa

SEQ ID NO: 95184 - DNA, 80 bp, synthetic construct
  source 1..80: mol_type = other DNA
gactatagtatcatttccagttatatatgctcaggacttgtcggagacacgcccagaaagaatgaccgctttagcagtag

SEQ ID NO: 95185 - DNA, 80 bp, synthetic construct
  source 1..80: mol_type = other DNA
tgatccattcagttcaaactagaggaaaaaatcactcagagatatgcagtcaaaatttcattacatatgaaaacaacaca

SEQ ID NO: 95186 - DNA, 80 bp, synthetic construct
  source 1..80: mol_type = other DNA
tagtggaagcagcatttctttctgtggtgtgggcagtgaaaccacaagctggtcatggccagacggagcttatctgcctt

SEQ ID NO: 95187 - DNA, 80 bp, synthetic construct
  source 1..80: mol_type = other DNA
cagtgaaaccacaagctggtcatggccagacggagcttatctgcctttcactattgacaagtagtttatcctaaaaaact

SEQ ID NO: 95188 - DNA, 80 bp, synthetic construct
  source 1..80: mol_type = other DNA
tgggtaaatcaaacctttgtaaacattagcaataccaacattgctattgggcagggtgtgactccaaatttcctaattgg

SEQ ID NO: 95189 - DNA, 80 bp, synthetic construct
  source 1..80: mol_type = other DNA
caattcctccctttgtccagtaagtggatgggccatatacagcaaagacaataacataaggattggttctaaaggagaca

SEQ ID NO: 95190 - DNA, 80 bp, synthetic construct
  source 1..80: mol_type = other DNA
aataatagccagacctaaagtcagaaaccaagcaggcagaataaattattactggacattgttggaccaaggagacacca

SEQ ID NO: 95191 - DNA, 80 bp, synthetic construct
  source 1..80: mol_type = other DNA
acggtgtgaagctagagacaatgggaattcaccagattttggcgatctactccacagtcgccagttccctggtcctgtta

SEQ ID NO: 95192 - DNA, 80 bp, synthetic construct
  source 1..80: mol_type = other DNA
atgcccaatacaccctctatcagcataatcatacttatgtctcagttggatcatcaaaatactaccgaaggttcatacca

SEQ ID NO: 95193 - DNA, 80 bp, synthetic construct
  source 1..80: mol_type = other DNA
gagtgaaaggctgggcttttgatgatggagatgatttgtggatgggaagaacaataagtgaggattcacgctcaggttat

SEQ ID NO: 95194 - DNA, 80 bp, synthetic construct
  source 1..80: mol_type = other DNA
agagaagaacagaacggagatagtgtacttaactaacattaccatagaaagagaaatatgccacaaaacagttgagtaca

SEQ ID NO: 95195 - DNA, 80 bp, synthetic construct
  source 1..80: mol_type = other DNA
agcaaaagcaggggtaaatggaaacaaccaaaatgagaactaaactattaatcctgttgtatgcgctttcagctgcagat

SEQ ID NO: 95196 - DNA, 80 bp, synthetic construct
  source 1..80: mol_type = other DNA
tgaagggggatggaccggaatgatagatggatggtatggttatcatcaccagaatgaacagggatctggatatgctgcgg

SEQ ID NO: 95197 - DNA, 80 bp, synthetic construct
  source 1..80: mol_type = other DNA
aatgggagtctatcaaattctgtcaatatactcaactgttgccagttcactagtgcttttagtctccctgggggcaatca

SEQ ID NO: 95198 - DNA, 80 bp, synthetic construct
  source 1..80: mol_type = other DNA
aatgggtctttgcagtgcagaatatgcatatgatactagaattccagaaatgtaagaaaaaaacacccttggtttctact

SEQ ID NO: 95199 - DNA, 80 bp, synthetic construct
  source 1..80: mol_type = other DNA
tgcaattggggaaatgcagcattgctggatggatcctggggaacccagaatgtgaatcactattttctaagaaatcatgg

SEQ ID NO: 95200 - DNA, 80 bp, synthetic construct
  source 1..80: mol_type = other DNA
tcctatattgcagaaacaacaaatcctgaaaatggaatatgttacccagggtatttctccgactatgaggagttaaggga

SEQ ID NO: 95201 - DNA, 80 bp, synthetic construct
  source 1..80: mol_type = other DNA
ccataaagggaaaagcagtttttacagaaacctgctatggctgacggagaaaaatggcatttacccaactctgagcaagt

SEQ ID NO: 95202 - DNA, 80 bp, synthetic construct
  source 1..80: mol_type = other DNA
cttatgcaaacaacagagatgaagaagtccttgtgttatggggtgttcatcacccgtctaatatagaggatcaaagggcc

SEQ ID NO: 95203 - DNA, 80 bp, synthetic construct
  source 1..80: mol_type = other DNA
atctaccgtaaagaaactgcttatgtttctgtagtgtcctcacactacaacaagaggtttatcccagaaattgcaaaaag

SEQ ID NO: 95204 - DNA, 80 bp, synthetic construct
  source 1..80: mol_type = other DNA
acccaaaataaggaatcaagaagggagaattaactactattggactctactagaacccaaggacacaataatatttgagg

SEQ ID NO: 95205 - DNA, 80 bp, synthetic construct
  source 1..80: mol_type = other DNA
accccccagggggcaataaacagcagtctccctttccaaaatgtacatccagtaacaataggagaatgcccaaagtacgt

SEQ ID NO: 95206 - DNA, 80 bp, synthetic construct
  source 1..80: mol_type = other DNA
tgtgaagagtttatacaacaaagtaaaaggccaattaaagaataatgccaaagaaatagggaacgggtgttttgaattct

SEQ ID NO: 95207 - DNA, 80 bp, synthetic construct
  source 1..80: mol_type = other DNA
ctaatgggtcattgcaatgcagagtatgcatttgagacttgaatttcaaaatgtacggaaaaacacatccagaaactact

SEQ ID NO: 95208 - DNA, 80 bp, synthetic construct
  source 1..80: mol_type = other DNA
cgggatcagcaacaaagtgaactcaataattgaaaaaatgaactttcaatttacttcaataggcaaagagttcaataatc

SEQ ID NO: 95209 - DNA, 80 bp, synthetic construct
  source 1..80: mol_type = other DNA
gccccaacctagtgaaatacaggaattgggcaaaaccacaatgtaaaatcacaggctttgcgcctttttccaaggacaat

SEQ ID NO: 95210 - DNA, 80 bp, synthetic construct
  source 1..80: mol_type = other DNA
ggaattgctgagtacggtttcatcattcgaaaaatttgaaattttcccaggaacaacctcatggcaaggtcatgatacaa

SEQ ID NO: 95211 - DNA, 80 bp, synthetic construct
  source 1..80: mol_type = other DNA
ccagaggtaccacaactgcatgctccaagtctggagcctcaagtttttatcggaatttgctatggataacaaagaaggga

SEQ ID NO: 95212 - DNA, 80 bp, synthetic construct
  source 1..80: mol_type = other DNA
aaataagcaagtcatacaaaaacaacaaaaagaaagaagtgcttgtaatatggggagtgcaccatcctccgacctacgga

SEQ ID NO: 95213 - DNA, 80 bp, synthetic construct
  source 1..80: mol_type = other DNA
cacacaagtcgcaattgacgggatcagcaacaaggtgaactcaataattgaaaaaatgaatactcaatttaattcagtgg

SEQ ID NO: 95214 - DNA, 80 bp, synthetic construct
  source 1..80: mol_type = other DNA
agcaaaagcaggggatgatcaaaacaaccaagatgaagacaaaactatttgtattattctgtgtattcaatgcactgaaa

SEQ ID NO: 95215 - DNA, 80 bp, synthetic construct
  source 1..80: mol_type = other DNA
ctgggtatcgacattgaaacagctactcgctccgggaagcagataatagagcggattctggatgaagaatcagatgaggc

SEQ ID NO: 95216 - DNA, 80 bp, synthetic construct
  source 1..80: mol_type = other DNA
aagtttagtggtcccctctgcatcaaaatggatcaggcagtcatagacaaagacatcacactgaaggcaaattttagtgt

SEQ ID NO: 95217 - DNA, 80 bp, synthetic construct
  source 1..80: mol_type = other DNA
gatattcaaccgattggaaaccctcgtgctgctaagggctttcaccaatgagggagcagtagttggcgaaatttcacaat

SEQ ID NO: 95218 - DNA, 80 bp, synthetic construct
  source 1..80: mol_type = other DNA
cctggtaattactgtaacattgcatctcaagcagcatgagtgctactccccagcgaaaaatcaagtagagccatgtgaac

SEQ ID NO: 95219 - DNA, 80 bp, synthetic construct
  source 1..80: mol_type = other DNA
gaaagaaatacaacggagatagtatacttgactaacgtcaccatagagagagaaacataccccaaaattgtggagtatag

SEQ ID NO: 95220 - DNA, 80 bp, synthetic construct
  source 1..80: mol_type = other DNA
cctaataactactgtaacattgcatttcaagcaatatgaatgcgattcccctgcaaacaaccaagtaatgccgtgtgaac

SEQ ID NO: 95221 - DNA, 80 bp, synthetic construct
  source 1..80: mol_type = other DNA
tgggcctttgatgacggaaatgacacatggatgggaagaactatcaacaaggactcacgcttaggttacgaaaccttcaa

SEQ ID NO: 95222 - DNA, 80 bp, synthetic construct
  source 1..80: mol_type = other DNA
ggttgttggtggttggtcccaacccaattccaaattgcaggcaaataggcaagtcattgttgacagtgataatagatcag

SEQ ID NO: 95223 - DNA, 80 bp, synthetic construct
  source 1..80: mol_type = other DNA
atcaatttcatgcctatataagctttcgcaatttcagaaaaaactccttgtttccggtactggtattttctctgttgagg

SEQ ID NO: 95224 - DNA, 80 bp, synthetic construct
  source 1..80: mol_type = other DNA
gggccatttgggtcacgagagaaccttatgtgtcatgtgattctaacaagtgttatcagtttgcattaggacagggaacc

SEQ ID NO: 95225 - DNA, 80 bp, synthetic construct
  source 1..80: mol_type = other DNA
ggtgtgtttgcagggacaactggaaaggttcaaataggcccgtcgtagacataaggatgaaagattatagcattagttcc

SEQ ID NO: 95226 - DNA, 80 bp, synthetic construct
  source 1..80: mol_type = other DNA
gttggcgacacacccagaaacaatgatggggctagtaatagcaattgccgaaatcctaacaatgagagagggaatcatgg

SEQ ID NO: 95227 - DNA, 80 bp, synthetic construct
  source 1..80: mol_type = other DNA
cacacaaatcgcaattgatggaatcagtaacaaagtaaactcagtaattgaaaaaatgaatattcaatttacttcggtgg

SEQ ID NO: 95228 - DNA, 80 bp, synthetic construct
  source 1..80: mol_type = other DNA
cttacgaaaacaacacttgggtaaatcagacatatgttaatataagcaataacaattttattactgaaaaagcagtgagt

SEQ ID NO: 95229 - DNA, 80 bp, synthetic construct
  source 1..80: mol_type = other DNA
cttacgaaaacaacacttgggtaaatcagacatatgtcaacatcagcaacaataattttgttgctgaattggcatcagtc

SEQ ID NO: 95230 - DNA, 80 bp, synthetic construct
  source 1..80: mol_type = other DNA
cacacaactcgcaattgatgggatcagcaacaaagtaaattcagtgattgaaaaaatgaacattcaatttacctcagtgg

SEQ ID NO: 95231 - DNA, 80 bp, synthetic construct
  source 1..80: mol_type = other DNA
cttacgaaaacaaaacttggataaatcagacatatgttaatatcagcaatatcaattttattgctgaacagacagcgatt

SEQ ID NO: 95232 - DNA, 80 bp, synthetic construct
  source 1..80: mol_type = other DNA
agcaaaagcaggggaaaattaaataaaccaaaatggaagcaaaattgtttgtactattctgtgcgttagctggactgaaa

SEQ ID NO: 95233 - DNA, 80 bp, synthetic construct
  source 1..80: mol_type = other DNA
agcaaaagcaggggataattaaatcaaccaaaatggaagtaaaactgtttgtattattctgttcattcactgcactgaaa

SEQ ID NO: 95234 - DNA, 80 bp, synthetic construct
  source 1..80: mol_type = other DNA
ccagctacttgtgtggggaaacaaatagtgaagcgtattctggaggaagaatacgatgaagcacttaaaataactatcgc

SEQ ID NO: 95235 - DNA, 80 bp, synthetic construct
  source 1..80: mol_type = other DNA
aagattgtagggatatcagtgatttaaaacagtatgatagtgatgaaccaaaaaatagatcactggcaagctggattcag

SEQ ID NO: 95236 - DNA, 80 bp, synthetic construct
  source 1..80: mol_type = other DNA
ttgagggttcgagatcatcgagggaatgtactcctatcccctgaggaggttagcgagacacagggaacagagaaattaac

SEQ ID NO: 95237 - DNA, 80 bp, synthetic construct
  source 1..80: mol_type = other DNA
tcgtgcagggaaacaaatagtggagcgtattctggaggaagaatatgatgaagcacttaagataaatatcgcttctatgc

SEQ ID NO: 95238 - DNA, 80 bp, synthetic construct
  source 1..80: mol_type = other DNA
cagacggtgctgagttgccattcaccattgacaagtaattcgttcaaaaaactccttgtttcgagggctgactttcaata

SEQ ID NO: 95239 - DNA, 80 bp, synthetic construct
  source 1..80: mol_type = other DNA
agacaatggggcagtagctgtattgaaatacaataacgtaattacagacactatcaagagttggagaaacaacatattga

SEQ ID NO: 95240 - DNA, 80 bp, synthetic construct
  source 1..80: mol_type = other DNA
cacattgaaagcaaacttcagtgctgtttttggtcgactggaaaccctgatactccttagagctttcacggaagaagggg

SEQ ID NO: 95241 - DNA, 80 bp, synthetic construct
  source 1..80: mol_type = other DNA
cataagaggtaattccccagtatttaactacaataagacaacaaaaaggctaacggttctcggaaaggacgctggtgcat

SEQ ID NO: 95242 - DNA, 80 bp, synthetic construct
  source 1..80: mol_type = other DNA
ggcaaggagttcaataatctagagaaaaggattgagaacttgaacaagaaggtcgatgatggatttttggatgtatggac

SEQ ID NO: 95243 - DNA, 80 bp, synthetic construct
  source 1..80: mol_type = other DNA
catatattaacattagcaacaacaattttgttactgagcatgcagtaatttcagtaaaattagcgggcaattcttctctc

SEQ ID NO: 95244 - DNA, 80 bp, synthetic construct
  source 1..80: mol_type = other DNA
acggctggggttgaatctgcagtactgagagggttcttaattatagggaaggaaaacaaaaggtacggaccagcattgag

SEQ ID NO: 95245 - DNA, 80 bp, synthetic construct
  source 1..80: mol_type = other DNA
gaagattgcaaggatatcagtgatttaaaacagtatgatagtgatgagccgaaagttaggtcacttgcaagctggattca

SEQ ID NO: 95246 - DNA, 80 bp, synthetic construct
  source 1..80: mol_type = other DNA
gaaataggagacatgattctacgaacttcaattggccaagtctcgagaccaatgttcctatatgtgaggaccaatggaac

SEQ ID NO: 95247 - DNA, 80 bp, synthetic construct
  source 1..80: mol_type = other DNA
gtgaatcgacaatagtagaacccagtgatccaaatgcactcctaaaacacaggtttgaaataattgagggaagagatcgc

SEQ ID NO: 95248 - DNA, 80 bp, synthetic construct
  source 1..80: mol_type = other DNA
tggtggaccccccagtactcaacggtccaaattcttgctgatggacgccttaaaattgagcattgaggatccgagtcatg

SEQ ID NO: 95249 - DNA, 80 bp, synthetic construct
  source 1..80: mol_type = other DNA
gggaactgaacctattgatgctatcatgggaatgataggtatattacccgatatgactccaaacacagaggtgtcattaa

SEQ ID NO: 95250 - DNA, 80 bp, synthetic construct
  source 1..80: mol_type = other DNA
caggcactacatgatggtttacgagatgacaaattaaagaggtgtgtagttgatgctttaagaaacatatatgaaactga

SEQ ID NO: 95251 - DNA, 80 bp, synthetic construct
  source 1..80: mol_type = other DNA
acaaggaaacttgaataagtgttcttcattatttggtgctgctgtttctctgttatttagaaaagtctggaatcttttgt

SEQ ID NO: 95252 - DNA, 80 bp, synthetic construct
  source 1..80: mol_type = other DNA
tcaaggaaatctaaataaatgctcatctttatttggtgctgcagtttccctgctatttagaaaaatttggagtcttcttt

SEQ ID NO: 95253 - DNA, 80 bp, synthetic construct
  source 1..80: mol_type = other DNA
caagctttgcatgatggtctgcgggatgataaattaaaaaaatgtgtggttgatgcactgagaaacatatatgaaactga

SEQ ID NO: 95254 - DNA, 80 bp, synthetic construct
  source 1..80: mol_type = other DNA
gcaggggaacctaaacaaatgttcttctttatttggggcagcagtgtccctgttatttaggaaagtctggaacctccttt

SEQ ID NO: 95255 - DNA, 80 bp, synthetic construct
  source 1..80: mol_type = other DNA
gtctacaaaattttgtccctcaagtacactaggaaagtctgcatccaattaggtactgaacaaacatgtaagacaattga

SEQ ID NO: 95256 - DNA, 80 bp, synthetic construct
  source 1..80: mol_type = other DNA
agtgcccagagcatgcaggctcctttagaaaaaagtgctcttttgccacattaccatcatgtcaatatgatggaaatacc

SEQ ID NO: 95257 - DNA, 80 bp, synthetic construct
  source 1..80: mol_type = other DNA
aaagtatataaaatattgtcactcaagtatacaaggaaagtatgtattcagcttggaactgaacaaacttgtaagacaat

SEQ ID NO: 95258 - DNA, 80 bp, synthetic construct
  source 1..80: mol_type = other DNA
agtgtcctgagcatgctggttcttttaggaaaaaatgctcatttgctacacttccatcttgtcaatatgatggcaataca

SEQ ID NO: 95259 - DNA, 80 bp, synthetic construct
  source 1..80: mol_type = other DNA
ctgaaattgatgatttgattgaccttgcagcctcaggcgatccaacaccaccagactctataaaaccgccacaggcacca

SEQ ID NO: 95260 - DNA, 80 bp, synthetic construct
  source 1..80: mol_type = other DNA
ctgagattgatgatttgattgaccttgcagagtcaggagacccaacaccaccagattctataaaatcaccacaggcacca

SEQ ID NO: 95261 - DNA, 80 bp, synthetic construct
  source 1..80: mol_type = other DNA
agaatgagccaaataatgaaggagatggaagggctaatttactcccagcaaagacaggatatccttgatctgtgggtcta

SEQ ID NO: 95262 - DNA, 80 bp, synthetic construct
  source 1..80: mol_type = other DNA
caacagtggtgctggcactagtactcctaccactagcactactgttgctagtaccactagtagtctaaaaatggagaaag

SEQ ID NO: 95263 - DNA, 80 bp, synthetic construct
  source 1..80: mol_type = other DNA
aaaaattgtaatgcacagttttatttgtaaaaaaaaatttttctactgtaattcaacaccactgtttaatagtacttaaa

SEQ ID NO: 95264 - DNA, 80 bp, synthetic construct
  source 1..80: mol_type = other DNA
agagggagggagcacgagctaagccagcagcagcaggggtgagagcagtatctcgaaacctggcagaacgtagagcaatc

SEQ ID NO: 95265 - DNA, 80 bp, synthetic construct
  source 1..80: mol_type = other DNA
aaatttttctactgtaatacaacaaaactatttaatagtacttaaaatagtactaaaaaattaaatattactaaaaaatc

SEQ ID NO: 95266 - DNA, 80 bp, synthetic construct
  source 1..80: mol_type = other DNA
aaaataacataacctaaataaagtaaaaaaaaaaaattaacaattacacaaacacaatatacaccttacttaaaaaatcg

SEQ ID NO: 95267 - DNA, 80 bp, synthetic construct
  source 1..80: mol_type = other DNA
tattaaagtcaaaaactaaaaaatagtgctgttagcttgttcaacgccatagccatagcagtagctaaagaaacaaataa

SEQ ID NO: 95268 - DNA, 80 bp, synthetic construct
  source 1..80: mol_type = other DNA
agccaaaaaaaaagaaagcacgcgctaagccagcagcagcaaagataaaagcagtatctcaaaacctggcaaaacgtaaa

SEQ ID NO: 95269 - DNA, 80 bp, synthetic construct
  source 1..80: mol_type = other DNA
gcaatcacagttagcaatacagcagctaacaatgctaattgtgcctggctaaaagcacaaaaaaataaaaaagtaagttt

SEQ ID NO: 95270 - DNA, 80 bp, synthetic construct
  source 1..80: mol_type = other DNA
cgcctagcatttactcatgtagcccaagagctgcatccaaagttttacaagaactgctaacatcaagctttctacaaggg

SEQ ID NO: 95271 - DNA, 80 bp, synthetic construct
  source 1..80: mol_type = other DNA
agccagagaaagaaagagcacaagctgagccagcagcagcagaggtaagagcaatatctcgagacctggcagaacgtaga

SEQ ID NO: 95272 - DNA, 80 bp, synthetic construct
  source 1..80: mol_type = other DNA
aaaaaaataaaaaaaaaagcaaaaaacagtggcaataagagcgaaaaaaataaaaaacagctggcagcacttgtaaaaaa

SEQ ID NO: 95273 - DNA, 80 bp, synthetic construct
  source 1..80: mol_type = other DNA
ctttcaataccaccacaaaagtaaaaaataaagtgcagcaacaaaatgctctcttctataaccttaatatgctataaatt

SEQ ID NO: 95274 - DNA, 80 bp, synthetic construct
  source 1..80: mol_type = other DNA
caaaactgtttaatagtacctaaacctaaaaaaatagtactaaaagctgaaatagtactaaaaggccagaaaagaacact

SEQ ID NO: 95275 - DNA, 80 bp, synthetic construct
  source 1..80: mol_type = other DNA
tacaacttacttaaaaaatcacaaaaccagcaaaaaaaaaataaacaaaaactattaaaattaaataagtaggcaagctt

SEQ ID NO: 95276 - DNA, 80 bp, synthetic construct
  source 1..80: mol_type = other DNA
aataaattagtttaacataacacaatagctgtagtatataaaaccagcagcaaagccagcagcaaaaaaagtaaaagcag

SEQ ID NO: 95277 - DNA, 80 bp, synthetic construct
  source 1..80: mol_type = other DNA
catctcaaaacctaaaaaaacataaagcaatcacaagtagcaatattaataatgctaataatacttagctacaagcacaa

SEQ ID NO: 95278 - DNA, 80 bp, synthetic construct
  source 1..80: mol_type = other DNA
cgcctggcatttcgtcacgtagccagagagctgcatccggagtactacaaaaactaataacaccaaaatacaaaaactgc

SEQ ID NO: 95279 - DNA, 80 bp, synthetic construct
  source 1..80: mol_type = other DNA
actacaaaaactaataacaccaaaatacaaaaactgctaacactaagcttttacacgggactttccgctggggactttcc

SEQ ID NO: 95280 - DNA, 80 bp, synthetic construct
  source 1..80: mol_type = other DNA
caaagctactattaacaaaaaatagtagtaaccagactgacgacaacaacaccaagatcttcagacctcaaaaaaaaaat

SEQ ID NO: 95281 - DNA, 80 bp, synthetic construct
  source 1..80: mol_type = other DNA
agttataaaagtagtactaaaaatttataaaactatcctccacatacctaaaaaaataagacaaagctttaaaaaaattt

SEQ ID NO: 95282 - DNA, 80 bp, synthetic construct
  source 1..80: mol_type = other DNA
tactataagataagtaacaaatagtcaaaaagttagcctgctataaaaaaaaaaataagacaagctaagccagcagcaga

SEQ ID NO: 95283 - DNA, 80 bp, synthetic construct
  source 1..80: mol_type = other DNA
aacctggggattaatgaaacaaggaaaaataaaaaactgctctttcaaaaccaccacagacagacaaaataaaacacaga

SEQ ID NO: 95284 - DNA, 80 bp, synthetic construct
  source 1..80: mol_type = other DNA
taacataaatgcagtaaaaaaaaaaaattaacaattacacaagcttaatatataacttacttgcaaaatcgcaaaaccaa

SEQ ID NO: 95285 - DNA, 80 bp, synthetic construct
  source 1..80: mol_type = other DNA
taataccaataataaaacctgggaattaagattaatggaaaaaggaaaaataaaaaactgctctttcaaaaccaccacaa

SEQ ID NO: 95286 - DNA, 80 bp, synthetic construct
  source 1..80: mol_type = other DNA
aaaaaaacaaaaacaaatccggtcaattagtaactaaattcttagcaatcatctgggtcaacctgcggagcctgtgcctc

SEQ ID NO: 95287 - DNA, 80 bp, synthetic construct
  source 1..80: mol_type = other DNA
gagcacgagctaagccagcagcagcaggggtagaagcagtatctcgagacctggcaaaacgtaaagcaatcacagttaaa

SEQ ID NO: 95288 - DNA, 80 bp, synthetic construct
  source 1..80: mol_type = other DNA
actacaaagactgatgacaccaagatacaaagactgctgacactgagcttttacacgggactttccgctggggacagtcc

SEQ ID NO: 95289 - DNA, 80 bp, synthetic construct
  source 1..80: mol_type = other DNA
aaaaataaaaaactgctctttcaaaaccaccacaaacagacaaaataaaaaacagaaaaactatgcatttttttataaac

SEQ ID NO: 95290 - DNA, 80 bp, synthetic construct
  source 1..80: mol_type = other DNA
ggagcacgagctaagccagcagcagcaggggtgaaagcagtatctcaaaacctggcagaacgtgaagcaatcacagttag

SEQ ID NO: 95291 - DNA, 80 bp, synthetic construct
  source 1..80: mol_type = other DNA
caatacagcagctaccaatgctaattgtgcctggctaaaagcacaaaagaataagaaagtgggttttccagtcaaacctc

SEQ ID NO: 95292 - DNA, 80 bp, synthetic construct
  source 1..80: mol_type = other DNA
caccttaattaaaaaatcgcaaaaccaacaaaaaaaaaaatgaacaaaaattattaaaattagataaataggctgactat

SEQ ID NO: 95293 - DNA, 80 bp, synthetic construct
  source 1..80: mol_type = other DNA
cacattgtaacattagtaaagaaaattaaaataaaactataaaacaggtaattaaaaaattaaagggacaatatgaggta

SEQ ID NO: 95294 - DNA, 80 bp, synthetic construct
  source 1..80: mol_type = other DNA
taaaaaaataaaacagagctttaaaagaattttattataaaataggtaacaagtggtcaaagagttggcctgctgtaaag

SEQ ID NO: 95295 - DNA, 80 bp, synthetic construct
  source 1..80: mol_type = other DNA
aaaaatataaaacaagcacattgtaacattagtaaaaaaaattaaactgacactttaaaacaggtagttaaaaaattaaa

SEQ ID NO: 95296 - DNA, 80 bp, synthetic construct
  source 1..80: mol_type = other DNA
aagacaatataaaaaaaataaaacaatagtctttaatagttcctcagaaagaaacccagaaattgtaatgcatagcttta

SEQ ID NO: 95297 - DNA, 80 bp, synthetic construct
  source 1..80: mol_type = other DNA
cttgtaaaaaaaaatttttctactgtaattcaacaccactgtttaatagtacttaaaatggtactaaccagtcaaatcac

SEQ ID NO: 95298 - DNA, 80 bp, synthetic construct
  source 1..80: mol_type = other DNA
taaaaagcctgtgcctcttcagctaccaccgcttaaaaaacttactcttaattgcagcaaaaactgtaaaacttctagaa

SEQ ID NO: 95299 - DNA, 80 bp, synthetic construct
  source 1..80: mol_type = other DNA
cgcaaagggtaaaaaatcctcaaatactggtaaaatctcctacagtattaaagtcagaaactaaaaaatagtgctgttaa

SEQ ID NO: 95300 - DNA, 80 bp, synthetic construct
  source 1..80: mol_type = other DNA
cttgttcaataccactgctatagcagtagctaaaagaacaaataaagttataaaagtaatactaaaaatttataaagcta

SEQ ID NO: 95301 - DNA, 80 bp, synthetic construct
  source 1..80: mol_type = other DNA
aagtagtgctaaaaatttatagggctatcctccacatacctaaaaaaataagacagggctttaaaaaaattttactataa

SEQ ID NO: 95302 - DNA, 80 bp, synthetic construct
  source 1..80: mol_type = other DNA
gaggctttaaaaaaattttactataaaataggtaacaagtggtcaaaaagttggcctgctgtaagggaaaaaataagaca

SEQ ID NO: 95303 - DNA, 80 bp, synthetic construct
  source 1..80: mol_type = other DNA
atgagccagcataggatggatgacccggagagagaagagctaaagtaggagtttgacagccaactagcatttcgtcacgt

SEQ ID NO: 95304 - DNA, 80 bp, synthetic construct
  source 1..80: mol_type = other DNA
aagagctaaagtaggagtttgacagccaactagcatttcgtcacgtggccagagagctgcatccagagtactacaaagac

SEQ ID NO: 95305 - DNA, 80 bp, synthetic construct
  source 1..80: mol_type = other DNA
aagacccgacaggcccgaaaaaaccgaagaagaaagtaaagaaagagacagagacagatccagtccattagtaaatagat

SEQ ID NO: 95306 - DNA, 80 bp, synthetic construct
  source 1..80: mol_type = other DNA
gccagcagcagataaggtaagagcagcatctcgagacctagaaaaacataaggcaatcacaagtagcaatattaacaatg

SEQ ID NO: 95307 - DNA, 80 bp, synthetic construct
  source 1..80: mol_type = other DNA
gagggtaagggaaagaatggaaagagctagaccagcagcagagcaacgagctagaccagcagcagagccagcagcagagg

SEQ ID NO: 95308 - DNA, 80 bp, synthetic construct
  source 1..80: mol_type = other DNA
cgcaaaactcagcttgctaaagcgcgcgcagcaaaaggcaaaaggcggcggctggtaagtacgccttttttaactagcaa

SEQ ID NO: 95309 - DNA, 80 bp, synthetic construct
  source 1..80: mol_type = other DNA
ccagagcagtaagtagcacatgtaataacacccttacacatatataacatattagtaatagtagcatttgtaatagtaac

SEQ ID NO: 95310 - DNA, 80 bp, synthetic construct
  source 1..80: mol_type = other DNA
aagtaaattatataaatataaagtagtaaaaattaaaccattaaaagtagcacccaccaaagcaaaaaaaaaagtagtgc

SEQ ID NO: 95311 - DNA, 80 bp, synthetic construct
  source 1..80: mol_type = other DNA
ataaattattagcacttatctgaataaatctgcgaagcctgtgcctcttctgctaccaccaattaaaaaacttaatatta

SEQ ID NO: 95312 - DNA, 80 bp, synthetic construct
  source 1..80: mol_type = other DNA
attgcagcaaaaattgtaaaacttctaaaacgcagggggtaaaaaatcctcaagtactggtaaaatcttctacagtatta

SEQ ID NO: 95313 - DNA, 80 bp, synthetic construct
  source 1..80: mol_type = other DNA
aagtcaaaaactaaaaaatagtgctgttaacttgctcaataccacagccatagtagtagctaaaaaaacaaataaagtta

SEQ ID NO: 95314 - DNA, 80 bp, synthetic construct
  source 1..80: mol_type = other DNA
gccagcagcaaataaagtaaaagcagcatctcaaaacctaaaaaaacatagggcaatcacaagtagcaatgttaacaata

SEQ ID NO: 95315 - DNA, 80 bp, synthetic construct
  source 1..80: mol_type = other DNA
gccagcagcagcaggagtgggagcagtatctcgagacctggcagtagagcaatcacagttaaaaatacagcagctaacaa

SEQ ID NO: 95316 - DNA, 80 bp, synthetic construct
  source 1..80: mol_type = other DNA
aacgcaggaagtggaaaatcctcaagtactggtaaaatctcctacagtattaaagtcaaaaactaaaaaatagtgctgtt

SEQ ID NO: 95317 - DNA, 80 bp, synthetic construct
  source 1..80: mol_type = other DNA
tgctagtaccactagtactgctatcaatggcactatggttgctagtaccactagtagtctaaaaatggagagtggagaaa

SEQ ID NO: 95318 - DNA, 80 bp, synthetic construct
  source 1..80: mol_type = other DNA
gggacccgacaggcccgaagaaacagacgaaaaaagtaaaaagaaagacagagacagatccggtccattagtaactgaat

SEQ ID NO: 95319 - DNA, 80 bp, synthetic construct
  source 1..80: mol_type = other DNA
gccagcagcaaatggggtgggagcagcatctcaagacctaaaaaaacatggggcaatcacaagtagcaatgttaacaata

SEQ ID NO: 95320 - DNA, 80 bp, synthetic construct
  source 1..80: mol_type = other DNA
atatcccctgaccttcgggtggtgcttcaagctagtaccagttgagccagataatgagccaaatataatgaaggagagaa

SEQ ID NO: 95321 - DNA, 80 bp, synthetic construct
  source 1..80: mol_type = other DNA
ataaattattagcacttatctgagtaaatctaaaaaacctgtgcctcttcagctaccaccgcttaaaaaacttactctta

SEQ ID NO: 95322 - DNA, 80 bp, synthetic construct
  source 1..80: mol_type = other DNA
tctgttgtgtaactctagtaactaaaaatccctcaaaccaatttagtcagtaaaaaaaatctctagcagtggcgcccgaa

SEQ ID NO: 95323 - DNA, 80 bp, synthetic construct
  source 1..80: mol_type = other DNA
atataaaggacaattaaaaaaataaattatataaataaaaaaagtaaaaaaaaaaacaaagacagatccagtccattagt

SEQ ID NO: 95324 - DNA, 80 bp, synthetic construct
  source 1..80: mol_type = other DNA
aacaaatagtttaaaagtaataaaacaatagtctttaatcaatctgcaaaaaaaaacccaaaaattgtaatgcacaattt

SEQ ID NO: 95325 - DNA, 80 bp, synthetic construct
  source 1..80: mol_type = other DNA
taattgtaaaagaaaatttttctactgtaatacaacaaaactatttaatagtacttaaaatagtactaaaaaattaaata

SEQ ID NO: 95326 - DNA, 80 bp, synthetic construct
  source 1..80: mol_type = other DNA
ttaaaatactagttaaagtaataaatcttataaaaaaatttaaaataacataacctaaataaagtaaaaaaaaaaaatta

SEQ ID NO: 95327 - DNA, 80 bp, synthetic construct
  source 1..80: mol_type = other DNA
acaattacacaaacacaatatacaccaaacaaatccggtcaattagtaactaaattcttagcaatcatctgggtcaacct

SEQ ID NO: 95328 - DNA, 80 bp, synthetic construct
  source 1..80: mol_type = other DNA
ccagcagcagcaggggtaaaagcagtatctcaaaacctggcaaaacgtaaagcaatcacagttagcaatacagcagctac

SEQ ID NO: 95329 - DNA, 80 bp, synthetic construct
  source 1..80: mol_type = other DNA
aaatcttcaaacctctagtaaaaattaaaccattaaaagtagcacccaccaaagcaaaaaaaaaagtagtgcagaaaaaa

SEQ ID NO: 95330 - DNA, 80 bp, synthetic construct
  source 1..80: mol_type = other DNA
taacataaatgcagtaaaaaaaaaaaattaacaattacacaggcttaatatataaataacaagtagtcaaaaagttagcc

SEQ ID NO: 95331 - DNA, 80 bp, synthetic construct
  source 1..80: mol_type = other DNA
tgctgtaaaaaaaaaaataaaacaagctaaaccagcagcaaatagggtaaaagcagcatctcaaaacctaaaaaaacata

SEQ ID NO: 95332 - DNA, 80 bp, synthetic construct
  source 1..80: mol_type = other DNA
aggcaatcacaagtagcaatgttaacaataatacttgtgtctggctaaaagcacaagagaagaagaaagtagagtttcca

SEQ ID NO: 95333 - DNA, 80 bp, synthetic construct
  source 1..80: mol_type = other DNA
aaaaacagtaatagtaaaaacaaaagccagcccaaaatcttcaaacctaaagaagaaaatataaaaaataattaaaaaag

SEQ ID NO: 95334 - DNA, 80 bp, synthetic construct
  source 1..80: mol_type = other DNA
gtaaaataaacaaatccggtccattagtaaataaattattagcacttatctaggtaaatctacaaagcctgtgcctcttc

SEQ ID NO: 95335 - DNA, 80 bp, synthetic construct
  source 1..80: mol_type = other DNA
catctcaaaacctgaaaaaacataaagcaatcacaagcagcaatgttaacaataatacttgtgtctggctaaaagcacaa

SEQ ID NO: 95336 - DNA, 80 bp, synthetic construct
  source 1..80: mol_type = other DNA
tattagagccagaaactaaaaaatagtgctgttaacttattcaataccactgctactataaaatgagtaacaagtagtca

SEQ ID NO: 95337 - DNA, 80 bp, synthetic construct
  source 1..80: mol_type = other DNA
cttagacagtggcaatgaaagtgacggggatcaggaacaattgcttatgaaaatggggcatcttaatcttaagaatgtta

SEQ ID NO: 95338 - DNA, 80 bp, synthetic construct
  source 1..80: mol_type = other DNA
agaaacaaatccagtcaattagtaaataaattattagcacttatctaagtcaatctacaaagcctgtgcctcttcagcta

SEQ ID NO: 95339 - DNA, 80 bp, synthetic construct
  source 1..80: mol_type = other DNA
gcaaataaggtaaaagcagtatctcaaaacctaaaaaaacatagagcaatcacaagtagcaatattaacaatgctacttg

SEQ ID NO: 95340 - DNA, 80 bp, synthetic construct
  source 1..80: mol_type = other DNA
tgtctggctaaaagcacaaaaaaaaaaaacgtaaagtttccagtcaaacctcaggtaccgttaaaaccaataaattacaa

SEQ ID NO: 95341 - DNA, 80 bp, synthetic construct
  source 1..80: mol_type = other DNA
taacctaaatgaagtgaaaaaaaaaattaacaattacacaggcaaaatatacaccttacttaagaaatcgcagaaccagc

SEQ ID NO: 95342 - DNA, 80 bp, synthetic construct
  source 1..80: mol_type = other DNA
gggacccgacaagcccaaaagaacagaagaaaaaggtaaaaaaaaagacagagacagatccggtccattagtaactaaat

SEQ ID NO: 95343 - DNA, 80 bp, synthetic construct
  source 1..80: mol_type = other DNA
actgtttaataatacctaaacctaaaataatagtactaaaagctaaaatagtactaaaaagccagaaaaaaacactatca

SEQ ID NO: 95344 - DNA, 80 bp, synthetic construct
  source 1..80: mol_type = other DNA
tattaaagcaaagagctaaaaaatagtgctgttagcttgcttaattccacagcaatagcagtagctaaagaaacaaataa

SEQ ID NO: 95345 - DNA, 80 bp, synthetic construct
  source 1..80: mol_type = other DNA
aattataaaaatagtactaatagtttgtaaagctattcgccgcatacctacaagaataagacagggcttaaaaaaagctt

SEQ ID NO: 95346 - DNA, 80 bp, synthetic construct
  source 1..80: mol_type = other DNA
tattataaaataaaaagcaagtatcacaagtagtaatattaataatgctaataatacctggctacaagcacaagaggaag

SEQ ID NO: 95347 - DNA, 80 bp, synthetic construct
  source 1..80: mol_type = other DNA
agaaaaagtaaaaaactgctctttcaaaaccaccacagacagacaaaataagaaacagacaaaccatgcattttttaata

SEQ ID NO: 95348 - DNA, 80 bp, synthetic construct
  source 1..80: mol_type = other DNA
gcactcctgttgctattaccaatagtagtctaaaaataaaaagtaaaaaaataaaaaactgttctttcaatgtcacctca

SEQ ID NO: 95349 - DNA, 80 bp, synthetic construct
  source 1..80: mol_type = other DNA
aacataaaaaataaggtgcaaaaaaaatatgcacttttttataaacttaatgtaaagcaaataagtaaaagtaataataa

SEQ ID NO: 95350 - DNA, 80 bp, synthetic construct
  source 1..80: mol_type = other DNA
agccagaaaagaaaagcacaagctgagccagcagcagcaggggtggaagcagtatcccgaaacctagcagaacgtaaagc

SEQ ID NO: 95351 - DNA, 80 bp, synthetic construct
  source 1..80: mol_type = other DNA
ggaacccaacaggcccaaaaaaaccgaaaaaaaaggtgaagaaaaagacagcaacaaatccggtccattagtaaataaat

SEQ ID NO: 95352 - DNA, 80 bp, synthetic construct
  source 1..80: mol_type = other DNA
tattagcacttatctgagtgaatctaaaaagcctgtgcctcttcagctaccaccgcttgaaaaacttactcttaattgca

SEQ ID NO: 95353 - DNA, 80 bp, synthetic construct
  source 1..80: mol_type = other DNA
gcgagaattgtaaaacttctaaaacgcagagggtagaaaatcctcaagtactagtaaaatctcctacagtattaaagtca

SEQ ID NO: 95354 - DNA, 80 bp, synthetic construct
  source 1..80: mol_type = other DNA
gaaactaaaaaatagtgctgttaacttgttcaataccactgctatagtagtagctaaagaaacagataaagttataaaag

SEQ ID NO: 95355 - DNA, 80 bp, synthetic construct
  source 1..80: mol_type = other DNA
tgaggtgaaagcagcatctcaaaacctaaaaaaacatgaggcaatcacaagtagcaatgttaacaataatacttgtgtct

SEQ ID NO: 95356 - DNA, 80 bp, synthetic construct
  source 1..80: mol_type = other DNA
tttttctactgtaattcaacaccactgtttaatagtacttaaaataatactaacaagtcacttcaccatggagaaaatag

SEQ ID NO: 95357 - DNA, 80 bp, synthetic construct
  source 1..80: mol_type = other DNA
aaaatatatataaagtagtaaaaattaagccattaaaagtagcacccaccaaggcaaggaggagagtggtgcaaaaaaaa

SEQ ID NO: 95358 - DNA, 80 bp, synthetic construct
  source 1..80: mol_type = other DNA
cccaaggaaacccgacaggcccagagaaaccgaaaaaaaaggtaaaaaaaaagacagaaacaaatccggtccattaataa

SEQ ID NO: 95359 - DNA, 80 bp, synthetic construct
  source 1..80: mol_type = other DNA
tattaaagtcaaaaactaaagaatagtgctgttaacttgttcaataccactgctatagcagtagctaaaaaaacagatag

SEQ ID NO: 95360 - DNA, 80 bp, synthetic construct
  source 1..80: mol_type = other DNA
aagccaagcaacaaattcagctacaataataatgcaaaaaagcaattataaaaatcaaaaaaaaagtgttaagtgtttca

SEQ ID NO: 95361 - DNA, 80 bp, synthetic construct
  source 1..80: mol_type = other DNA
tctaccagagcagtaagtagcacatgtaataacatccttaggcataaaaaccatattagtaatagtagcatttgtagtag

SEQ ID NO: 95362 - DNA, 80 bp, synthetic construct
  source 1..80: mol_type = other DNA
taacaataataacaatagttgtgtagtccatagtattcataaaataaacagtagcaataaaagtaaaaaaaatcagaaaa

SEQ ID NO: 95363 - DNA, 80 bp, synthetic construct
  source 1..80: mol_type = other DNA
aattatcagcacttatggagatggggcatcatgctcctaaaaatattaataatctgtagtgctgcaaaaaatttataagt

SEQ ID NO: 95364 - DNA, 80 bp, synthetic construct
  source 1..80: mol_type = other DNA
taacataaatgcagtaaaaaaaaaaaattaacaattacacaggcttaatataaaaaaaaacaaaaacaaatccagtccat

SEQ ID NO: 95365 - DNA, 80 bp, synthetic construct
  source 1..80: mol_type = other DNA
aaataaagttataaaaatagtgctaaaaatttataaagctatcctccacatacctaaaaaaataaaacaaagctttaaaa

SEQ ID NO: 95366 - DNA, 80 bp, synthetic construct
  source 1..80: mol_type = other DNA
aacctaaaaaataaaaaactgctctttcaaaaccaccacagacagacaaaataaaacacagaaaaactatgcattttttt

SEQ ID NO: 95367 - DNA, 80 bp, synthetic construct
  source 1..80: mol_type = other DNA
atgttttgtctgtgtttgagtcttctcggtctactactatggcggccagtaggtgcaagaaacctattagaattaaaagt

SEQ ID NO: 95368 - DNA, 80 bp, synthetic construct
  source 1..80: mol_type = other DNA
gatggttagctattccattattgtcaatgatagtaatccgatttcttttaatattcacatacctgtgttcaaagtatagt

SEQ ID NO: 95369 - DNA, 80 bp, synthetic construct
  source 1..80: mol_type = other DNA
ctcttagtacctatgagccaaagcgtggtctctaccgaacactatctatgttccgttatagaagtaagtgctatgttgga

SEQ ID NO: 95370 - DNA, 80 bp, synthetic construct
  source 1..80: mol_type = other DNA
agtgggtcgatccagatagctctctcaaagaccatgtcaaccttatcgtcaacagagatttatcatttcaggatttagca

SEQ ID NO: 95371 - DNA, 80 bp, synthetic construct
  source 1..80: mol_type = other DNA
tgctcatagcactatttatattttctttattattgttcagtctttgctgcccacgccgccaaaattataaaaagaacaaa

SEQ ID NO: 95372 - DNA, 80 bp, synthetic construct
  source 1..80: mol_type = other DNA
acagagatccacaatagaatgagggaatgtgttccaggagaggtttctgcagtagagtgcctggacctactagataggtt

SEQ ID NO: 95373 - DNA, 80 bp, synthetic construct
  source 1..80: mol_type = other DNA
tgtgatgattgacggtgtcaattggtgctttagtaaggttatgagcttagacctgaatcggttactggccctgaacatat

SEQ ID NO: 95374 - DNA, 80 bp, synthetic construct
  source 1..80: mol_type = other DNA
gcatccagattcattatcaacagatctacaggtgatgagagaaggtgtttatagagaactgggtttggatataaactatc

SEQ ID NO: 95375 - DNA, 80 bp, synthetic construct
  source 1..80: mol_type = other DNA
actgggcttagagtgcgccatccaattaataaatcatttactatcactatacaggcaggtggctttcgagcaatggcaca

SEQ ID NO: 95376 - DNA, 80 bp, synthetic construct
  source 1..80: mol_type = other DNA
ttcatgaagggattacctgctgcaattccaccagcagcttactcactaatcatgaataaagctaaaatctcagtggactt

SEQ ID NO: 95377 - DNA, 80 bp, synthetic construct
  source 1..80: mol_type = other DNA
cggattcccttttctctttcagacatgctgatattctccttaggaggttatttccaaaggattcagctgcttcattttat

SEQ ID NO: 95378 - DNA, 80 bp, synthetic construct
  source 1..80: mol_type = other DNA
tatagcatcagatcaatacgatacaaaagttggctgcttagaaatattaaaaaatcatcctgagacaccgatacaaattt

SEQ ID NO: 95379 - DNA, 80 bp, synthetic construct
  source 1..80: mol_type = other DNA
atggtagggtgggtttgcatcttcctcgtggtccttactactgcaactgctgggttaacacggaatctttatgagttaaa

SEQ ID NO: 95380 - DNA, 80 bp, synthetic construct
  source 1..80: mol_type = other DNA
tgagttgtacagagaatagctttcaaggttattacatctgttttattgggaaacattcagagcccttgtttgtgccaaca

SEQ ID NO: 95381 - DNA, 80 bp, synthetic construct
  source 1..80: mol_type = other DNA
gcttcttagtagcaaagaaattgggaacacaactgaaattagctgttgagttagaaaaattgattactggggtaagttgt

SEQ ID NO: 95382 - DNA, 80 bp, synthetic construct
  source 1..80: mol_type = other DNA
tgtccttggggttggtagtccttaatattctcctacatatagtgagcattacagtaacagtattagttcttcctagaaat

SEQ ID NO: 95383 - DNA, 80 bp, synthetic construct
  source 1..80: mol_type = other DNA
cttattagctcaaatacagatggagtagtttatgaaagtacaaataatagtgacttttggacagcagtcatcgctgttga

SEQ ID NO: 95384 - DNA, 80 bp, synthetic construct
  source 1..80: mol_type = other DNA
tggtggcaagtttggatgtatggaattgaagcggatcaaactactacaccccaaactgatcttgagatgcgagttaagtg

SEQ ID NO: 95385 - DNA, 80 bp, synthetic construct
  source 1..80: mol_type = other DNA
taaaaaatggtggcaagtttgaaacagagattgctgatagttcatggaaagacacattgtcacagttatttttgacaaaa

SEQ ID NO: 95386 - DNA, 80 bp, synthetic construct
  source 1..80: mol_type = other DNA
atggaagcaaaattgattgtactattttgcacattcactgcactgaaagctgacactatttgtgtaggctatcatgctaa

SEQ ID NO: 95387 - DNA, 80 bp, synthetic construct
  source 1..80: mol_type = other DNA
ctccgactaatagtgatcaattaaccctctaccagaacaatcacacatatgtctcagttggatcatcaaaatactacaaa

SEQ ID NO: 95388 - DNA, 80 bp, synthetic construct
  source 1..80: mol_type = other DNA
gtcgcttaatggagctaatgggataaaagggttttcgttcaaatacgggaatggtgtttggatagggagaactaaaagta

SEQ ID NO: 95389 - DNA, 80 bp, synthetic construct
  source 1..80: mol_type = other DNA
atgaatccaaataagaagataataatcatcagttcaatctgtttgataaatggaatcgtcagcttgatattacaaattgg

SEQ ID NO: 95390 - DNA, 80 bp, synthetic construct
  source 1..80: mol_type = other DNA
gataataatcattggttcgatctgtttgataaatgggattgctagcttgatattgcaaattgggaacataatctcaatat

SEQ ID NO: 95391 - DNA, 80 bp, synthetic construct
  source 1..80: mol_type = other DNA
cttacgagaacaagacttgggtaaatcagacatatgtcaacatcagaaacaatttagttgttaaacaagaagctgtttca

SEQ ID NO: 95392 - DNA, 80 bp, synthetic construct
  source 1..80: mol_type = other DNA
atgaagttagcgggcaattcgtctctctgctctattagtgggtgggctatatacagtaaagataacagtgtaagagtcgg

SEQ ID NO: 95393 - DNA, 80 bp, synthetic construct
  source 1..80: mol_type = other DNA
tattgaaggctagaactaaaaaagagtgccattagtttgcttgataccatagcagtagtagtagctaaaagaacagatcc

SEQ ID NO: 95394 - DNA, 80 bp, synthetic construct
  source 1..80: mol_type = other DNA
aattgtaagaataatacaaagaatttaaagagcaatctacaacatacctagaagaataagacaaggctttgaagcatctt

SEQ ID NO: 95395 - DNA, 80 bp, synthetic construct
  source 1..80: mol_type = other DNA
tactataaaataagagccaaatggtcaaaaagcagtaaggctagatggcctgctgtaagagagagaataagaagaactag

SEQ ID NO: 95396 - DNA, 80 bp, synthetic construct
  source 1..80: mol_type = other DNA
gccagtaaaagaagaaaataagccagcagcagaaagagtaagagcagcctctcaagatttagctaagcataaggcactta

SEQ ID NO: 95397 - DNA, 80 bp, synthetic construct
  source 1..80: mol_type = other DNA
gtttgcttgataccatagcagtagtagtagctgaaggaacagatccaattgtaagaataatacaaggaatttggagagca

SEQ ID NO: 95398 - DNA, 80 bp, synthetic construct
  source 1..80: mol_type = other DNA
agacacaatatacatgttgcttgagaaatctcaaaaccagcaggaactaaatgaaaaggatttactagcattagacagtt

SEQ ID NO: 95399 - DNA, 80 bp, synthetic construct
  source 1..80: mol_type = other DNA
ctggagaacccactaggtctctctcggtagaccagatctgagcctaggagctctctggctatctggagaacccactgggt

SEQ ID NO: 95400 - DNA, 80 bp, synthetic construct
  source 1..80: mol_type = other DNA
ctctctcggtagaccagatctgagcctaggagctctctggctatctggagaacccactgggtctctctcggtagaccaga

SEQ ID NO: 95401 - DNA, 80 bp, synthetic construct
  source 1..80: mol_type = other DNA
aaactctatggcataacaccttgcaaaacgtaagtaaaaaattaaaaaaacacttccctaatgcaacaatacaatttaac

SEQ ID NO: 95402 - DNA, 80 bp, synthetic construct
  source 1..80: mol_type = other DNA
cagagacaaatccattcaattagtaagcgaattcttagcacttgcctgagacaacctgcaaagcctgtgccttttctgct

SEQ ID NO: 95403 - DNA, 80 bp, synthetic construct
  source 1..80: mol_type = other DNA
accaccaattaagaaacttcatattactgacagcaaaagcagtgaaacttctaaaacgcagcagtctcaagggactccag

SEQ ID NO: 95404 - DNA, 80 bp, synthetic construct
  source 1..80: mol_type = other DNA
agggggtggaaaatccttaagtatctaaaaagcctattgcagtattgggggctaaaactaaaaaaaagtgccattagttt

SEQ ID NO: 95405 - DNA, 80 bp, synthetic construct
  source 1..80: mol_type = other DNA
acttaataccatagcagtagtagtagctaaaaaaacaaatccaattgtaaaaataatacaaaaaatttaaaaagcaatct

SEQ ID NO: 95406 - DNA, 80 bp, synthetic construct
  source 1..80: mol_type = other DNA
acaacatacctaaaaaaataaaacagggctttaaagcatctttactataaaataaaagccaaatagtcaaaaagcagtaa

SEQ ID NO: 95407 - DNA, 80 bp, synthetic construct
  source 1..80: mol_type = other DNA
taaaagcagcctctcgaaatttagctaagcatgaggcacttacaagcagtaacacagccacctctaatcctaattgtgcc

SEQ ID NO: 95408 - DNA, 80 bp, synthetic construct
  source 1..80: mol_type = other DNA
aaatagcagatgtaatgtttgaatcagtaaattataaattagaagtagcagcacttataatagcattcattatagcaata

SEQ ID NO: 95409 - DNA, 80 bp, synthetic construct
  source 1..80: mol_type = other DNA
catgttgcttaagaaatctcaaaaccagcaggaactaaataaaaagaatttactagcattagacagttaaaaaaatttgt

SEQ ID NO: 95410 - DNA, 80 bp, synthetic construct
  source 1..80: mol_type = other DNA
cgtaatagaaaagaaacaaatgatactaaagagacattcagacctaaaagagaagatataagaaataattaaaaaagtga

SEQ ID NO: 95411 - DNA, 80 bp, synthetic construct
  source 1..80: mol_type = other DNA
agaaattagtaattatacaggcataatatacaccttgcttacagactcgcaaacccagcagaaaaaaaataaaaaagatt

SEQ ID NO: 95412 - DNA, 80 bp, synthetic construct
  source 1..80: mol_type = other DNA
aacttctaagaagcagcagtctcagaagactacaaaggaggtaggaactccttaaatatctaagaagccttgtgcagtat

SEQ ID NO: 95413 - DNA, 80 bp, synthetic construct
  source 1..80: mol_type = other DNA
taaagtctagagctaaaaaagagtgctgttagcctattagataccatagcaataacagtagctgaaagaacagataaagt

SEQ ID NO: 95414 - DNA, 80 bp, synthetic construct
  source 1..80: mol_type = other DNA
cataaaaaggctacaaagaattagtagagctatctgcagtatacccagaagaataagaaagggcgttgacgcagctttgc

SEQ ID NO: 95415 - DNA, 80 bp, synthetic construct
  source 1..80: mol_type = other DNA
agtaaaataaaaggcaaatagtcaaaaagcagtatagttagttggcctactgtaagagaaagaataagaaaagctaggcc

SEQ ID NO: 95416 - DNA, 80 bp, synthetic construct
  source 1..80: mol_type = other DNA
aagagaaagaataaaagaaaatgagccagcagcagaaaaagtaagggcagcttctcaagacttagataaacatagggcac

SEQ ID NO: 95417 - DNA, 80 bp, synthetic construct
  source 1..80: mol_type = other DNA
ggaaattagcaattacacaaatgaaatatacattttgcttaaagaatcgcagaatcagcaagagaaaaatgaaaaagatt

SEQ ID NO: 95418 - DNA, 80 bp, synthetic construct
  source 1..80: mol_type = other DNA
tatctaggaagccttgtgcagtattgaggtctagagctaaaaaagagtgctgttagcctattagataccatagcaataac

SEQ ID NO: 95419 - DNA, 80 bp, synthetic construct
  source 1..80: mol_type = other DNA
agtagctgaaagaacagatagagttatagaaaggctacaaagaattggtagagctatctgcagtatacccagaagaataa

SEQ ID NO: 95420 - DNA, 80 bp, synthetic construct
  source 1..80: mol_type = other DNA
tgacatggatgcagtaggataagaaaattagcaattacacaaatgaaatatacattttgcttgaagaatcgcagaatcag

SEQ ID NO: 95421 - DNA, 80 bp, synthetic construct
  source 1..80: mol_type = other DNA
gaaaaggcgttgacgcagctttgcagtaaaatagagagcaaatggtcaaaaagcagtatagttagttggcctgctgtaag

SEQ ID NO: 95422 - DNA, 80 bp, synthetic construct
  source 1..80: mol_type = other DNA
agaaagaataagaagagctaggccaaaagaaagaatgaaagaaaatgagccagcagcagaaagagtaaaggcagcttctc

SEQ ID NO: 95423 - DNA, 80 bp, synthetic construct
  source 1..80: mol_type = other DNA
gaggactacaaaaggggtaggaactccttaaatatctaggaagccttgtgcagtattgaggtctaaagctaaaaaagagt

SEQ ID NO: 95424 - DNA, 80 bp, synthetic construct
  source 1..80: mol_type = other DNA
ccttttcagctaccaccgattaaaagacttactattagtgacaacaagagcggtaaaacttctaaggagcagcagtctca

SEQ ID NO: 95425 - DNA, 80 bp, synthetic construct
  source 1..80: mol_type = other DNA
tgctgttagcctattagataccatagcaataacagtagctgaaaaaacagatagagttatagaaaggctacaaagaatta

SEQ ID NO: 95426 - DNA, 80 bp, synthetic construct
  source 1..80: mol_type = other DNA
gtagagctatctgcagtatacccagaaaaataagaaggggcgttgacgcagctttgcagtaaaataaaaggcaagtagtc

SEQ ID NO: 95427 - DNA, 80 bp, synthetic construct
  source 1..80: mol_type = other DNA
aaaaagcagtatagttagttagcctgctgtaagagaaagaatgaaaagagctaggccaagagaaagaatgagagaaaata

SEQ ID NO: 95428 - DNA, 80 bp, synthetic construct
  source 1..80: mol_type = other DNA
agccagcagcagaagaagtaaaggcagcttctcaagacttagataaacataaggcacttacaagtagcaacaccccaacc

SEQ ID NO: 95429 - DNA, 80 bp, synthetic construct
  source 1..80: mol_type = other DNA
gataaaagaaataatagaaaaaataactcaattaagacattcagaccaagaaaaaaagatataaaagacaattgaagaag

SEQ ID NO: 95430 - DNA, 80 bp, synthetic construct
  source 1..80: mol_type = other DNA
taaattatataaatataaagtagtaaaagttaaaccattaaaagtagcgcccactgcagcaaaaaagaaagtagtagaaa

SEQ ID NO: 95431 - DNA, 80 bp, synthetic construct
  source 1..80: mol_type = other DNA
tttaaagagcctgtgccttttcagctaccaccgattaagagacttactattaatgacaacaagagcagtagaacttctga

SEQ ID NO: 95432 - DNA, 80 bp, synthetic construct
  source 1..80: mol_type = other DNA
agagcagcagtctcagaagactacaaagaaagtaagaactccttaaatatctaagaagccttgtgcagtattgaagtcta

SEQ ID NO: 95433 - DNA, 80 bp, synthetic construct
  source 1..80: mol_type = other DNA
aagctaaaaaaaagtgctgttagcctattagataccatagcaataacagtagctaaaagaacagataaagtcataaaaag

SEQ ID NO: 95434 - DNA, 80 bp, synthetic construct
  source 1..80: mol_type = other DNA
gctacaaaaaattagtagagctatctgcagtatacccagaagaataagaaagggcgttgacgcagctttgcagtaaaata

SEQ ID NO: 95435 - DNA, 80 bp, synthetic construct
  source 1..80: mol_type = other DNA
aaaggcaagtagtcaaaaagcagtataattagttggcctgctgtaaaaaaaagaataagaaaagctaggccaagaaaaaa

SEQ ID NO: 95436 - DNA, 80 bp, synthetic construct
  source 1..80: mol_type = other DNA
aataaaagaaaataagccagcagcagaaagagtaagagcagcttctcaagacttaaataaacataaggcacttacaagta

SEQ ID NO: 95437 - DNA, 80 bp, synthetic construct
  source 1..80: mol_type = other DNA
taagaaaaggcgttgacgcagctttgcagtaaaatggggggcaagtggtcaaaaagcagtatagttagttagcctgctgt

SEQ ID NO: 95438 - DNA, 80 bp, synthetic construct
  source 1..80: mol_type = other DNA
agtaaaatggggggcaagtggtcaaaaagcagtatagttagttagcctgctgtaaaagaaaaaatgagaagagctaggcc

SEQ ID NO: 95439 - DNA, 80 bp, synthetic construct
  source 1..80: mol_type = other DNA
gacactggcctagcacgcagacacgtcgcccgcgagctatatccagagtactataaaaactaatgacacagaaaagactt

SEQ ID NO: 95440 - DNA, 80 bp, synthetic construct
  source 1..80: mol_type = other DNA
tgtaaaaaaaagaatgagaagagctaggccaagaaaaagaataagagaaaatgagccagcagcagagggagtaaaggcag

SEQ ID NO: 95441 - DNA, 80 bp, synthetic construct
  source 1..80: mol_type = other DNA
aggggactacagagaggataagaaatccttaaatatctaagaaaccttgtgcagtattaaggtctagaattaaaaaaaag

SEQ ID NO: 95442 - DNA, 80 bp, synthetic construct
  source 1..80: mol_type = other DNA
taggttactatcagaagcacaaagccagcagaataaaaatgaaaaaaatttattagaattggacaagtagaatgatctgt

SEQ ID NO: 95443 - DNA, 80 bp, synthetic construct
  source 1..80: mol_type = other DNA
attaatagtagcatttattatagcaataattgtgtgaatcatagcatatctaaaatataaaaaagtgcagaaacaaagaa

SEQ ID NO: 95444 - DNA, 80 bp, synthetic construct
  source 1..80: mol_type = other DNA
aaataaacaggctaattaaaaaaattagaaaaaaagcagaaaatagtggcaatgacagtgatgggaacacggaagaattg

SEQ ID NO: 95445 - DNA, 80 bp, synthetic construct
  source 1..80: mol_type = other DNA
aaatataatgcaactaatgagacattcagacctgcaaaagaaaatataaagaataattaaaaaagtaaattatataaata

SEQ ID NO: 95446 - DNA, 80 bp, synthetic construct
  source 1..80: mol_type = other DNA
aaaaatcaataattacacaaacacaatatataggttactatcagaagcacaaagccagcaaaataaaaatgaaaaaaatt

SEQ ID NO: 95447 - DNA, 80 bp, synthetic construct
  source 1..80: mol_type = other DNA
ctagaacaacctaagaagcctgtgccttttctgctaccaccaattaagaaacttcatattagtaacagcaaaagcagcga

SEQ ID NO: 95448 - DNA, 80 bp, synthetic construct
  source 1..80: mol_type = other DNA
aacttctggaacgcagcagcctcaaggaactacaaagggaataaaaaatccttaaatatctggaaaaccttgtgcagtat

SEQ ID NO: 95449 - DNA, 80 bp, synthetic construct
  source 1..80: mol_type = other DNA
taaaagagcattagacctcagcttctttttaaaagaaaaggggggactggaaggttagttcactctcaaaaaaggcaaga

SEQ ID NO: 95450 - DNA, 80 bp, synthetic construct
  source 1..80: mol_type = other DNA
catccttgatttgtgggtctatcacacacaaggctatttccctgattggcaaaactacacaccgggaccaggggtcagat

SEQ ID NO: 95451 - DNA, 80 bp, synthetic construct
  source 1..80: mol_type = other DNA
atccactgacctttggatggtgcttcaagctagtaccagttgacacaagggaagtagaagaggaaaaccaaggagagaac

SEQ ID NO: 95452 - DNA, 80 bp, synthetic construct
  source 1..80: mol_type = other DNA
aactgtttgctgcaccctatgcaccagcatggaatggatgatacagagagagaagtgttaaagtggaaatttgacagtct

SEQ ID NO: 95453 - DNA, 80 bp, synthetic construct
  source 1..80: mol_type = other DNA
cctagcacacagacacatggcccgcgagctacatccggagtattacaaagactgctgatgcagcagggactttccgctgg

SEQ ID NO: 95454 - DNA, 80 bp, synthetic construct
  source 1..80: mol_type = other DNA
gaccagatttgagcctaggagctctctggctatctaagagaacccactgcttaagcctcaataaagcttgccttgagtgc

SEQ ID NO: 95455 - DNA, 80 bp, synthetic construct
  source 1..80: mol_type = other DNA
atagtaagaatgtatagccctgtcagcattctagacataaaacaagggccaaaggaaccctttagggactatgtggaccg

SEQ ID NO: 95456 - DNA, 80 bp, synthetic construct
  source 1..80: mol_type = other DNA
gactttccactggggcgttccagggggtgtggtctgggcgggacgaggagtggtcaaccctcagatgctgcatataagca

SEQ ID NO: 95457 - DNA, 80 bp, synthetic construct
  source 1..80: mol_type = other DNA
gctgcttttcgcctgtactaggtctctctaagtagaccagatttgagcctaggagctctctggctatctaagagaaccca

SEQ ID NO: 95458 - DNA, 80 bp, synthetic construct
  source 1..80: mol_type = other DNA
gttctttaaaactttaagagctgaacaagccacacaagaggtaaaaaattggatgacagacgccttactgatccaaaatg

SEQ ID NO: 95459 - DNA, 80 bp, synthetic construct
  source 1..80: mol_type = other DNA
cgaacccagactgtaagactattttaagagcattaagaccaaaggcgacattagaaaaaatgatgacagcatgtcaaaga

SEQ ID NO: 95460 - DNA, 80 bp, synthetic construct
  source 1..80: mol_type = other DNA
gtaagaagacctagccacaaagcaaaagtgttggcagaggcaatgagccaagcaaacacaaacataatgatgcagagagg

SEQ ID NO: 95461 - DNA, 80 bp, synthetic construct
  source 1..80: mol_type = other DNA
caatttcaaaggccctaaaagaactattaaatgtttcaactgtgacaaggggtcgctgctaaagagtgatttgagggaag

SEQ ID NO: 95462 - DNA, 80 bp, synthetic construct
  source 1..80: mol_type = other DNA
cggcaagaggcgagagcggcggctggtgagtacgccaatttttatttgactagcggaggctagaaggagagagatgggtg

SEQ ID NO: 95463 - DNA, 80 bp, synthetic construct
  source 1..80: mol_type = other DNA
tggctaagtgcccttctttgccacagtttattattcctgcaatgggaggggcatacattgctattcctactttctgccac

SEQ ID NO: 95464 - DNA, 80 bp, synthetic construct
  source 1..80: mol_type = other DNA
ggtccccccctgaggatgggttaaacactattgttttagtagggaagtgttgtcttaacttttcacttaccctttgtaaa

SEQ ID NO: 95465 - DNA, 80 bp, synthetic construct
  source 1..80: mol_type = other DNA
cgagagcgtcagtattaagaggcgaaaaattagatgaatgggaaaaaattaggctaaggccagggggaaagaaacgttat

SEQ ID NO: 95466 - DNA, 80 bp, synthetic construct
  source 1..80: mol_type = other DNA
attgaaagagcaattttttatttcttccttatcagccatggtagcattactaacattactcctggtaccattgtagttag

SEQ ID NO: 95467 - DNA, 80 bp, synthetic construct
  source 1..80: mol_type = other DNA
atgctaaaacacataatatgggcaagcagggagctggaaagatttgcacttaaccctggccttttggagacatcagaagg

SEQ ID NO: 95468 - DNA, 80 bp, synthetic construct
  source 1..80: mol_type = other DNA
actctttctagcaagtttaacattacatacatatacttactgctttgatataagatcttgatgatcctcactgcttggag

SEQ ID NO: 95469 - DNA, 80 bp, synthetic construct
  source 1..80: mol_type = other DNA
ctgtaaacagataatggcacagctacaaccagctcttaagacaggaacagaggaacttaaatcattatacaacacagtag

SEQ ID NO: 95470 - DNA, 80 bp, synthetic construct
  source 1..80: mol_type = other DNA
caactctctattgtgtacatagaaggataaaagtacaagacaccaaggaagccttagacaagatagaggaagaacaaaaa

SEQ ID NO: 95471 - DNA, 80 bp, synthetic construct
  source 1..80: mol_type = other DNA
caatgtcagcaaaaaacacagcaggcagaagcggctggtggaaataccagtcaaaattatcctatagtacagaatcttca

SEQ ID NO: 95472 - DNA, 80 bp, synthetic construct
  source 1..80: mol_type = other DNA
agggcaaatggtacatcaagccatatcacccagaaccttgaatgcatgggtgaaagtaatagaagaaaaggcttttagcc

SEQ ID NO: 95473 - DNA, 80 bp, synthetic construct
  source 1..80: mol_type = other DNA
cagaggtaatacccatgtttacagcattatcagaaggagccaccccccaagatttaaacactatgttaaatacagtaggg

SEQ ID NO: 95474 - DNA, 80 bp, synthetic construct
  source 1..80: mol_type = other DNA
gcgcccgaacagggacttgaaagcgaaagtagaaccagagaagaactctcgacgcaggactcggcttgctgaagtgcact

SEQ ID NO: 95475 - DNA, 80 bp, synthetic construct
  source 1..80: mol_type = other DNA
ggacatcaagcagccatgcaaatgttaaaagataccatcaatgaggaggctgcagaatgggatagactgcatccagtaca

SEQ ID NO: 95476 - DNA, 80 bp, synthetic construct
  source 1..80: mol_type = other DNA
tgcagggcctgctgcaccaggccaaataagagaaccaaggggaagtgatatagcaggaactactagtacccttcaggaac

SEQ ID NO: 95477 - DNA, 80 bp, synthetic construct
  source 1..80: mol_type = other DNA
aaatagcatggatgacaggtaacccacctgttccagtaggagacatctataaaaggtggataattctgaggttaaataaa

SEQ ID NO: 95478 - DNA, 80 bp, synthetic construct
  source 1..80: mol_type = other DNA
gggactggaaggttagttcactctcaaaaaaggcaagacatccttgatttgtgggtctatcacacacaaggctatttccc

SEQ ID NO: 95479 - DNA, 80 bp, synthetic construct
  source 1..80: mol_type = other DNA
gacttactattagtgacaacaagagcagtagaacttctgaggagcagcagtctcagaggactacaaagaaagtaagaact

SEQ ID NO: 95480 - DNA, 80 bp, synthetic construct
  source 1..80: mol_type = other DNA
ccttaaatatctaagaagccttgtgcagtattgaagtctagagctaaaaaaaagtgctgttagcctattagataccatag

SEQ ID NO: 95481 - DNA, 80 bp, synthetic construct
  source 1..80: mol_type = other DNA
caataacagtagctgaaagaacagataaagttatagaaaggctacaaagaattggtagagctatctgcagtatacccaga

SEQ ID NO: 95482 - DNA, 80 bp, synthetic construct
  source 1..80: mol_type = other DNA
gaaggtagaaagcccttaaatatctaggaaatcttgtgcagtactaaggtctagagctaaaaagaagtgctattagtctg

SEQ ID NO: 95483 - DNA, 80 bp, synthetic construct
  source 1..80: mol_type = other DNA
gcgcccgaacagggacttgaaagcgaaagtaagaccagaggagctctctcgacgcaggactaaaaagtggatgacagaca

SEQ ID NO: 95484 - DNA, 80 bp, synthetic construct
  source 1..80: mol_type = other DNA
caggttgcttgaagactcacaaaaccagcagaagaaaaataaaaaagatttactagcactggacagttagaacagcttgt

SEQ ID NO: 95485 - DNA, 80 bp, synthetic construct
  source 1..80: mol_type = other DNA
gaagaaacaggagcagctccaggagtaggagcagcgtctaaggacttagctactcataaggcactgacaagtagcaacac

SEQ ID NO: 95486 - DNA, 80 bp, synthetic construct
  source 1..80: mol_type = other DNA
atctaaggaatcttgtgctgtattaaggtctagagctaaaaaaaagtgctattagtctgcttaataccatagcaatagta

SEQ ID NO: 95487 - DNA, 80 bp, synthetic construct
  source 1..80: mol_type = other DNA
tgctgtaaaagatagaataagaagaactgctccagcagcagaaggagtaagaccagcatctcaagacttagataaacata

SEQ ID NO: 95488 - DNA, 80 bp, synthetic construct
  source 1..80: mol_type = other DNA
agtgcatggaatttttaaaaaaggagttaatgtgattcaaaagtttaatgacatcaggtgaaaatagtggggtctttaaa

SEQ ID NO: 95489 - DNA, 80 bp, synthetic construct
  source 1..80: mol_type = other DNA
atgcccagttctgttgcaaatcctaaataaagtttaatagagtaaacaaatcctataaaaccttggtgtttttctttctt

SEQ ID NO: 95490 - DNA, 80 bp, synthetic construct
  source 1..80: mol_type = other DNA
cctcttggtaacatggtgctgatttggtgcgttttggttttgaggagaggagacattttaattttgaatgttgacagcaa

SEQ ID NO: 95491 - DNA, 80 bp, synthetic construct
  source 1..80: mol_type = other DNA
tgattaagggtaagagctcacatttgttaagtaaaataagatcaacattcagataagtgcttatgtgctgaactctgctg

SEQ ID NO: 95492 - DNA, 80 bp, synthetic construct
  source 1..80: mol_type = other DNA
aatgccagagataacacaagttaggtttttgaaccaactgtctttcaagcacagcaggcaaatcctgttttgcttaccat

SEQ ID NO: 95493 - DNA, 80 bp, synthetic construct
  source 1..80: mol_type = other DNA
gcttgaaaaagccctgcattggtcctgactgttccttgagtatttttgtgtgactgagcaagcttcttttctgatggaca

SEQ ID NO: 95494 - DNA, 80 bp, synthetic construct
  source 1..80: mol_type = other DNA
agttttttcttgctaggccaagagccactgtgtttctttgaaggaatttatcatgtccctcctcctgttatgtgttgttg

SEQ ID NO: 95495 - DNA, 80 bp, synthetic construct
  source 1..80: mol_type = other DNA
acataggtctgtggtagcttttctttcctgaagttcttgagtgtatttcatggtctctcctttgcttctatcactgcctg

SEQ ID NO: 95496 - DNA, 80 bp, synthetic construct
  source 1..80: mol_type = other DNA
cacttcccagctataaatgttggtagctgttttatagtatctatcaatagtatgttgtattagttatctactattgtctg

SEQ ID NO: 95497 - DNA, 80 bp, synthetic construct
  source 1..80: mol_type = other DNA
acaaattaccaccagcttaaaacaacatttgttctctgacagtttctgtgggtcaggattctgggcatagcttatacctg

SEQ ID NO: 95498 - DNA, 80 bp, synthetic construct
  source 1..80: mol_type = other DNA
gatcttctgcctaggttatgagggtgccatcagggtgttggctgggctgcgttcttaactggaagttcaactgagggaga

SEQ ID NO: 95499 - DNA, 80 bp, synthetic construct
  source 1..80: mol_type = other DNA
atccacttgtagacttagtttgctggcagaattcatatcctatggttgtaggattgaggggcctatcttcttgttggctg

SEQ ID NO: 95500 - DNA, 80 bp, synthetic construct
  source 1..80: mol_type = other DNA
tcagtaataagctgcattgaccacctaaagaccatgtgaagttcttgtcatgtggactttcccaacatgcctacttgctt

SEQ ID NO: 95501 - DNA, 80 bp, synthetic construct
  source 1..80: mol_type = other DNA
cagggcaacaaagaaagtctagaggtagtctggtagtaagacagaatcttactgtataacatgacttaatcactggggta

SEQ ID NO: 95502 - DNA, 80 bp, synthetic construct
  source 1..80: mol_type = other DNA
agaaagataggaataccaggtggtggagatcatggagggtcatgcaaacttagaactttatgaagtaaggcttgtttagt

SEQ ID NO: 95503 - DNA, 80 bp, synthetic construct
  source 1..80: mol_type = other DNA
catttattcatcagatatttattgatgttaacatatacttttagccgtgacagagtaactggtatttgagttttcctcta

SEQ ID NO: 95504 - DNA, 80 bp, synthetic construct
  source 1..80: mol_type = other DNA
gtcatcaacaattagaaaacaggaccaaaaatatgaaatagagctgtttttagcactgaaccttagaaagggaacaaaca

SEQ ID NO: 95505 - DNA, 80 bp, synthetic construct
  source 1..80: mol_type = other DNA
aggtgagccccatgtgctttggaacggttgcctgacggtggtacggagagtggagctcaagcagagcaaagaagttcagt

SEQ ID NO: 95506 - DNA, 80 bp, synthetic construct
  source 1..80: mol_type = other DNA
tgagctgaggatgcacaaattggagtcctgggctgctgaagtggttggaacttgctaggcagggtatcagagaagaagga

SEQ ID NO: 95507 - DNA, 80 bp, synthetic construct
  source 1..80: mol_type = other DNA
gccaaagtgtacgtgtatgttctccctgggtgcttggctgaggcctgggttgcacatgcatagctgatactctgcaaggt

SEQ ID NO: 95508 - DNA, 80 bp, synthetic construct
  source 1..80: mol_type = other DNA
ctagtagatagtggatgttgtagggttaagagtggacaaaagatactgaacgtcttatgatgctgggaaatgttggattc

SEQ ID NO: 95509 - DNA, 80 bp, synthetic construct
  source 1..80: mol_type = other DNA
cagctcattcaaagtggagagacatctggctacatactaggcagttacttgagatgccagaaaggccatgattttggagt

SEQ ID NO: 95510 - DNA, 80 bp, synthetic construct
  source 1..80: mol_type = other DNA
aaggatcatacatcagagcaggagttggcaaatgtggtccactgactgtttttgcatggcctgtgatataagagtagttt

SEQ ID NO: 95511 - DNA, 80 bp, synthetic construct
  source 1..80: mol_type = other DNA
ttacatttttaagtggttagaaaaaaatttaaaaaaatattttgtgacgtgaaaattgcatgaaatacagatttagtgat

SEQ ID NO: 95512 - DNA, 80 bp, synthetic construct
  source 1..80: mol_type = other DNA
gaccataaataaagttgcattgaaatgcatccactcatggaaattcatatacatattgtctatgactgctttgcggctac

SEQ ID NO: 95513 - DNA, 80 bp, synthetic construct
  source 1..80: mol_type = other DNA
aacagcctagttgagtatttgggatagagactgtatgacctgcacagtgttaaatatttactgtctaatcctttacagaa

SEQ ID NO: 95514 - DNA, 80 bp, synthetic construct
  source 1..80: mol_type = other DNA
agtttgccaatctctattgccagtctttaaccctagagtaagagttgctctggacctgcctttttaggattaaggagagc

SEQ ID NO: 95515 - DNA, 80 bp, synthetic construct
  source 1..80: mol_type = other DNA
tgccagtaagttaactgccagccagaacaaaacttagcatcttaaaggaagacagtataatctagaatccttacaacata

SEQ ID NO: 95516 - DNA, 80 bp, synthetic construct
  source 1..80: mol_type = other DNA
ttcacagtgtccaccatacaatcaacaactacttgacttgcaaataagcaagaaaatatggtccatatcaaataaaaaaa

SEQ ID NO: 95517 - DNA, 80 bp, synthetic construct
  source 1..80: mol_type = other DNA
aattttactctcaatagaaactgacctaagagaatccacatcttggtactaccggaaaaatgaattaaagcaactattat

SEQ ID NO: 95518 - DNA, 80 bp, synthetic construct
  source 1..80: mol_type = other DNA
aaattcagtaacttaaaaaaaccacaaaattgtagaactgcttagaaaaatatctgaaatgaggaatttactacatgggc

SEQ ID NO: 95519 - DNA, 80 bp, synthetic construct
  source 1..80: mol_type = other DNA
ttaacagcaaattaaagatggcagaagtaaggttctttgaactcaaagacagatcgatagaagttacccagtttggagaa

SEQ ID NO: 95520 - DNA, 80 bp, synthetic construct
  source 1..80: mol_type = other DNA
tagagagatggaaattggtatagaggaaaaacagagcctctgggataatatcaggcagtctgcatgtaattggattcaag

SEQ ID NO: 95521 - DNA, 80 bp, synthetic construct
  source 1..80: mol_type = other DNA
gagaggagagagaatgggtcagaagaaatatttttaagaaataatggttacactcctcagtgtcaaagctataataatca

SEQ ID NO: 95522 - DNA, 80 bp, synthetic construct
  source 1..80: mol_type = other DNA
agactgtgtgtgggttgcctacagaaagggagaaaatatttgcaaatcatatactatctaataacagtttaatatacgga

SEQ ID NO: 95523 - DNA, 80 bp, synthetic construct
  source 1..80: mol_type = other DNA
atatggaaataacttgataataaaaagaaacccaattaaaaattagtcaaaggattcgaatagacatttctgtaaagttc

SEQ ID NO: 95524 - DNA, 80 bp, synthetic construct
  source 1..80: mol_type = other DNA
ccccacacaacgagttaccccttcacgccctctagattggttatcatcaaaaagatgatgtacaaggctgggtgtggtgg

SEQ ID NO: 95525 - DNA, 80 bp, synthetic construct
  source 1..80: mol_type = other DNA
ctcatgcctataatcccagcactttgtggggatgaggcagttgtatcacttgagctcaggattttgagaccagtgtggtc

SEQ ID NO: 95526 - DNA, 80 bp, synthetic construct
  source 1..80: mol_type = other DNA
aacataacgagaactcatctctactaaaataatattttaaaaaatagcctggtgtggtggcatgtgcctatagtcccagc

SEQ ID NO: 95527 - DNA, 80 bp, synthetic construct
  source 1..80: mol_type = other DNA
tatttggaaggctgaggtgtgaggatctcttgagcctgggaggagcagtgattcctgatggcatgtctgcaacccagcct

SEQ ID NO: 95528 - DNA, 80 bp, synthetic construct
  source 1..80: mol_type = other DNA
gggtgacaagagtgcaaccctgtctccaaaaaaaaacaacaaaatacagaaaacagtaacacatgatggagagggtatag

SEQ ID NO: 95529 - DNA, 80 bp, synthetic construct
  source 1..80: mol_type = other DNA
gttaattagacccttcacacgttgctgatgagaatgtaaaatggtgtcgcctttttggaaagcagtttggtatgtcatca

SEQ ID NO: 95530 - DNA, 80 bp, synthetic construct
  source 1..80: mol_type = other DNA
aatgatatacttaccacattacacagcagttctattcctagtaatattcccaagagaactgaatatgtaattctgatatg

SEQ ID NO: 95531 - DNA, 80 bp, synthetic construct
  source 1..80: mol_type = other DNA
caaaatagggaaataacttgcgtccacacaaaagcttatacatgaatgttcataataggcaaagtggaaataacccaatg

SEQ ID NO: 95532 - DNA, 80 bp, synthetic construct
  source 1..80: mol_type = other DNA
tccatcagctgatgaataaacaaaatactgtatgtatccttacaatggagtataatttggtcatgaaaaggagtgaatta

SEQ ID NO: 95533 - DNA, 80 bp, synthetic construct
  source 1..80: mol_type = other DNA
ctgataatatgctacaaccttgaaaataccatgttaagtgaaagaagacacaaaagactgcacattatataatgcattta

SEQ ID NO: 95534 - DNA, 80 bp, synthetic construct
  source 1..80: mol_type = other DNA
tattaattgaataaataactttgtgccaataaatttgacagatggacaaattcaatgaaaacacaagtcaccaaaaccga

SEQ ID NO: 95535 - DNA, 80 bp, synthetic construct
  source 1..80: mol_type = other DNA
cataagaaataacagaaatgaatagctgttgataagtaactttgatttgtaattttaaaagcctcagagagtaaaacacc

SEQ ID NO: 95536 - DNA, 80 bp, synthetic construct
  source 1..80: mol_type = other DNA
ctgcacagatcgtttcattggtgaagtctataaaatacctaagaactagtcgggcgcggtggcacatgcctgttgtccca

SEQ ID NO: 95537 - DNA, 80 bp, synthetic construct
  source 1..80: mol_type = other DNA
tgggcagcataatgagaccctgtctctaaaaataaaaataaaataaaatatttaagaaataatattacaaactttacaag

SEQ ID NO: 95538 - DNA, 80 bp, synthetic construct
  source 1..80: mol_type = other DNA
ctttgttactctgtacaaactttttccagaaatgagacacttgccaacttgtgttagaggccagaataaccctgatactg

SEQ ID NO: 95539 - DNA, 80 bp, synthetic construct
  source 1..80: mol_type = other DNA
aaacctgataaagacattaaaagaaaattataagccagtatatttcatgatcatggatgcaagagccttcaacagagtac

SEQ ID NO: 95540 - DNA, 80 bp, synthetic construct
  source 1..80: mol_type = other DNA
tagcaaattgaatctcgtaataattaaaaaggatggtacacaccatgactgagttgagtttatcctaggagtacaaaatt

SEQ ID NO: 95541 - DNA, 80 bp, synthetic construct
  source 1..80: mol_type = other DNA
gattcaacattcaaatctcaatccgtgtaggccaggtgcagtggctcatgcccgtaatcccagtactttgggaggctgaa

SEQ ID NO: 95542 - DNA, 80 bp, synthetic construct
  source 1..80: mol_type = other DNA
cagaggttgaggctgcaataaggtgtgattgtgccactgtgctccagcctgggtggcacagtgagaccctctcaaaataa

SEQ ID NO: 95543 - DNA, 80 bp, synthetic construct
  source 1..80: mol_type = other DNA
aaaaatctcaatccatgtaaatcacagaataaaatagaaaaatcaatagatacagaaaaagtcattcatggacagaattt

SEQ ID NO: 95544 - DNA, 80 bp, synthetic construct
  source 1..80: mol_type = other DNA
aatacgtgtttgtcatcaaaacttatagcaagcttaggaatagaagggaatttacttaatttgacaaaggatagatatga

SEQ ID NO: 95545 - DNA, 80 bp, synthetic construct
  source 1..80: mol_type = other DNA
aaagcctacagttaaagtcatgctacatgatggtttatcgaatgttttaccaaactaagatcaggaaaaaggcaagaatg

SEQ ID NO: 95546 - DNA, 80 bp, synthetic construct
  source 1..80: mol_type = other DNA
tctgctcagtgtaagcacttccataatgcatcgtatgtgttcttaactttgctattaaaaattgtacagtaaaaaccaca

SEQ ID NO: 95547 - DNA, 80 bp, synthetic construct
  source 1..80: mol_type = other DNA
ggacttttggaggaaagggttacttctggggcaaagggttaggggcacaacatccacaaacttacactgataaaaaaaca

SEQ ID NO: 95548 - DNA, 80 bp, synthetic construct
  source 1..80: mol_type = other DNA
tttcatgttgcaaagactggaactttgcttgcagaaatggacatagaagacttgcgccgtgacaggtgaagtgaaaggag

SEQ ID NO: 95549 - DNA, 80 bp, synthetic construct
  source 1..80: mol_type = other DNA
gattttctggaatcggacaagaaattgtagcacctgatgtagatgagtacagctcataacatgaattgaagtagctggtc

SEQ ID NO: 95550 - DNA, 80 bp, synthetic construct
  source 1..80: mol_type = other DNA
cattttggaggtgtgcacatgtgtgcattgtatgttttcctagctgattggtttagctaggtgaaattttctgttcacct

SEQ ID NO: 95551 - DNA, 80 bp, synthetic construct
  source 1..80: mol_type = other DNA
agcaattcttgtgaacagtatttacatatgcaaccataaaattcacattatactcaacttgttctctattagttgctttt

SEQ ID NO: 95552 - DNA, 80 bp, synthetic construct
  source 1..80: mol_type = other DNA
aaacaaatgcaaaaaaacttagttcacagaacatatatgaatttaccaacaaacatgaaaaggcactcaacatctttagt

SEQ ID NO: 95553 - DNA, 80 bp, synthetic construct
  source 1..80: mol_type = other DNA
gtagcaagtttgaggacacggagtaaccagaactcttatacattgctagtgggagtgtaaaattgtacatcatgttgaaa

SEQ ID NO: 95554 - DNA, 80 bp, synthetic construct
  source 1..80: mol_type = other DNA
aatagtttggcagtttttaagtaaagttagaacatacacttactctgtgacccagcatttctttttccagctgtataccc

SEQ ID NO: 95555 - DNA, 80 bp, synthetic construct
  source 1..80: mol_type = other DNA
aagaaagatgaagacgtgtctataaaagacttgtgtattaatgttcatagcagctttttaaataatagccagtatctaga

SEQ ID NO: 95556 - DNA, 80 bp, synthetic construct
  source 1..80: mol_type = other DNA
aacaatcccagtgtctattaacaagtttttagataaacagattgtggtgtattcattaaatggcctgctactcagcaaca

SEQ ID NO: 95557 - DNA, 80 bp, synthetic construct
  source 1..80: mol_type = other DNA
aaaaggaattaattactgatatgtgtagtaacaggaatgaatctcaaaaatatgctaagtgaaagatactaagttacata

SEQ ID NO: 95558 - DNA, 80 bp, synthetic construct
  source 1..80: mol_type = other DNA
atactgcaattctgtttatatgagattttattacaggcaaaactaatctggtgttatgtcattatcagtaattccttggg

SEQ ID NO: 95559 - DNA, 80 bp, synthetic construct
  source 1..80: mol_type = other DNA
aagggaatgagggaactgactgcaaagggcacagaggaacttttgtgggtgatggtaatgctgtatacttgggctgacag

SEQ ID NO: 95560 - DNA, 80 bp, synthetic construct
  source 1..80: mol_type = other DNA
ttactcattgtcaaaactcatttaattgtactcttgatttctgcatttcactgtatgtgaatcataagtttgacttttaa

SEQ ID NO: 95561 - DNA, 80 bp, synthetic construct
  source 1..80: mol_type = other DNA
aaaagtttattgagagagatgaggaatggtatctttaatcactttcaattaattcctgctttccatcagtgtttcatagt

SEQ ID NO: 95562 - DNA, 80 bp, synthetic construct
  source 1..80: mol_type = other DNA
cactcaggagcttctttctttatcttttcatttcattctttttatgaaggctccatgacagggttaattgaatgttgttt

SEQ ID NO: 95563 - DNA, 80 bp, synthetic construct
  source 1..80: mol_type = other DNA
gtgaatacagtaaccggagtaggctataactaaatgctgtttttttgccatttttagctccttttaaatttattaaagga

SEQ ID NO: 95564 - DNA, 80 bp, synthetic construct
  source 1..80: mol_type = other DNA
catataggataataactttgtaaaataatgtttgaatataatgattatcttaaatatttaagtctttggaggaagtgata

SEQ ID NO: 95565 - DNA, 80 bp, synthetic construct
  source 1..80: mol_type = other DNA
ttgtacagtggttaaaatgtaggacttgagtcaaattagccttaaatcctagccccatgactatcaagctgaatgacact

SEQ ID NO: 95566 - DNA, 80 bp, synthetic construct
  source 1..80: mol_type = other DNA
tgcgacttgagacattccctaagctttaatttttttatctgtaaaatagcaataataataatgtttacctcaagtgttgt

SEQ ID NO: 95567 - DNA, 80 bp, synthetic construct
  source 1..80: mol_type = other DNA
taggattaaataagataatccatataaaaagttttaatacggtgtcacagtaagtgttcagtaactgttagctgttatta

SEQ ID NO: 95568 - DNA, 80 bp, synthetic construct
  source 1..80: mol_type = other DNA
tattaaagtctaaagataaaaaagaaggccattagtctgcttgatactgtagcaatagcagtagctgaaagaacagataa

SEQ ID NO: 95569 - DNA, 80 bp, synthetic construct
  source 1..80: mol_type = other DNA
atatctaaagagtcttgtgcagtattaaagtctaaagataaaaaagagtgccattagtctgcttgatactatagcaatag

SEQ ID NO: 95570 - DNA, 80 bp, synthetic construct
  source 1..80: mol_type = other DNA
cagtagctgaaagaacagataagattataaaaatcatacaaaaagtttgcagaagtatcctcaacatacctacaagaata

SEQ ID NO: 95571 - DNA, 80 bp, synthetic construct
  source 1..80: mol_type = other DNA
agacaaggctttgaagcagctttgcaataagatagaaagcaagtagtcaaaaagcagtatagttaaatagcctgatgtaa

SEQ ID NO: 95572 - DNA, 80 bp, synthetic construct
  source 1..80: mol_type = other DNA
aagaaaaaataagaaaaactaatccaacaacagaaaaagaaaataagtcagcagcagaaaaagtaaaagcagcatcccaa

SEQ ID NO: 95573 - DNA, 80 bp, synthetic construct
  source 1..80: mol_type = other DNA
gaaacccttaaatatctaaggaatcttgtgctgtattaaggtctagagctaaaaaagagtgctattagtctgcttgatac

SEQ ID NO: 95574 - DNA, 80 bp, synthetic construct
  source 1..80: mol_type = other DNA
catagcaatagtagtagctgaaagaacagatagaattatagagaggttacaaagaattagtagagttatctacaacatcc

SEQ ID NO: 95575 - DNA, 80 bp, synthetic construct
  source 1..80: mol_type = other DNA
ctagaagaataagacaaagctttgaagcagctttgcaataaaataaggaacaaatagtcaaagagctggcctgctgtaag

SEQ ID NO: 95576 - DNA, 80 bp, synthetic construct
  source 1..80: mol_type = other DNA
gacgcaacaggtaggaaacccttaaatatctaaggaatcttgtgctgtattaaggtctagagctaaaaaagagtgctatt

SEQ ID NO: 95577 - DNA, 80 bp, synthetic construct
  source 1..80: mol_type = other DNA
agtctgcttgataccatagcaatagtagtagctgaaggaacagataaaattatagaaaggttacaaggaattagtagagc

SEQ ID NO: 95578 - DNA, 80 bp, synthetic construct
  source 1..80: mol_type = other DNA
tatctacaacatccctagaagaataagacaaggctttgaagcagctttacaataaaatgaaaaacaaatggtcaaagagc

SEQ ID NO: 95579 - DNA, 80 bp, synthetic construct
  source 1..80: mol_type = other DNA
ataaaataagaagaactgctccagcagcagaaggagtaagaccagcatctcaagacttagataaacataaggcactcacc

SEQ ID NO: 95580 - DNA, 80 bp, synthetic construct
  source 1..80: mol_type = other DNA
gcctgcttaataccatagcaataacagtagctaaggaaacagataaaattataaaagaattacaaaaaattggtaaagct

SEQ ID NO: 95581 - DNA, 80 bp, synthetic construct
  source 1..80: mol_type = other DNA
aacacaaagagtatgcacttttttaatataacaccacttaataagaacaatagcacatctgagcaggagtatagaataat

SEQ ID NO: 95582 - DNA, 80 bp, synthetic construct
  source 1..80: mol_type = other DNA
tcacatttctctttctatcttttacttctgtggtcacctggaaggtgcaattttttacttcttcataactgatctcctct

SEQ ID NO: 95583 - DNA, 80 bp, synthetic construct
  source 1..80: mol_type = other DNA
gtactattagcagttcctgttccattgccagttttagtaacatttgtacactttccagtatcatttgtacaatttctagt

SEQ ID NO: 95584 - DNA, 80 bp, synthetic construct
  source 1..80: mol_type = other DNA
tgcaataaaataaggaacaaatggtcaaagagctggcctgctgtaaaagatagaataagaagaactgctccagcagcaga

SEQ ID NO: 95585 - DNA, 80 bp, synthetic construct
  source 1..80: mol_type = other DNA
gggagtaagaccagcatctcaagacttagataaacatgaggcgctcaccagcagcaacatagacaccagtaatgccacta

SEQ ID NO: 95586 - DNA, 80 bp, synthetic construct
  source 1..80: mol_type = other DNA
tgacctagatgcaataagatagagaaattagtaattacacaaatacaatatataaattgcttgaagactcgcaaacccag

SEQ ID NO: 95587 - DNA, 80 bp, synthetic construct
  source 1..80: mol_type = other DNA
attcaaacctaaaggtagtcatataaaaaacaattaaaaaagtgaattatataaatataaagtggtaaaaattaaaccat

SEQ ID NO: 95588 - DNA, 80 bp, synthetic construct
  source 1..80: mol_type = other DNA
gtgaaataaaaaaattaacaattacacaaacacaatatacaggttgcttaaaaactcacaaaaccagcaggagaaaaatg

SEQ ID NO: 95589 - DNA, 80 bp, synthetic construct
  source 1..80: mol_type = other DNA
agaaagtttcgattggactggagttgcccaaaatggatcaagctatgcttgcatgagaaaatctgacaagagtttcttca

SEQ ID NO: 95590 - DNA, 80 bp, synthetic construct
  source 1..80: mol_type = other DNA
agtaaagatgaatccaaatcaaaagataataacaatcggctctgtctctattgtcattgccacgatttgctttcttatgc

SEQ ID NO: 95591 - DNA, 80 bp, synthetic construct
  source 1..80: mol_type = other DNA
gtagataatcactcaatgagtgacatcgaagccatggcgtctcaaggcaccaaacggacatatgaacaaatggagactgg

SEQ ID NO: 95592 - DNA, 80 bp, synthetic construct
  source 1..80: mol_type = other DNA
gaaaataaaacaaccagaatgaaggcaatattgttggtcttgctacatacatttgcagccacaagtgcagacacaatatg

SEQ ID NO: 95593 - DNA, 80 bp, synthetic construct
  source 1..80: mol_type = other DNA
aggatgaacacgcagttcacagcagtgggtaaagaattcagcaacttagaaaagagaatagagaacttaaacaaaaaagt

SEQ ID NO: 95594 - DNA, 80 bp, synthetic construct
  source 1..80: mol_type = other DNA
agcagcttgcccttatgctggagcaagcagtttctacagaaatttaatatggctggtgaaaaaggataacttatacccaa

SEQ ID NO: 95595 - DNA, 80 bp, synthetic construct
  source 1..80: mol_type = other DNA
tgctcaacatatcctatgttaacaatagggggaaagaagtccttgtgctatggggcattcaccacccacctactaaaaat

SEQ ID NO: 95596 - DNA, 80 bp, synthetic construct
  source 1..80: mol_type = other DNA
ctcagaaaatttcaattggactggagttgcccaagatggatcaagttatgcttgcagaaggaaatcgaacaacagtttct

SEQ ID NO: 95597 - DNA, 80 bp, synthetic construct
  source 1..80: mol_type = other DNA
ctgtggtccctaatatcggatctagaccctgggtgaggggtgttcccagcataataagcatccactggacaatagtaaaa

SEQ ID NO: 95598 - DNA, 80 bp, synthetic construct
  source 1..80: mol_type = other DNA
ttggttgcatcaattggattacaaatatccagcgctgaacgtaactatgccaaacaatgacaaatttgacaagttgtaca

SEQ ID NO: 95599 - DNA, 80 bp, synthetic construct
  source 1..80: mol_type = other DNA
ccgaaaacggttgtatataaaccagccctaaaatttagcaaacgaggcattatggaaagtgcaaatgcctccacgtctgc

SEQ ID NO: 95600 - DNA, 80 bp, synthetic construct
  source 1..80: mol_type = other DNA
atggttatgcaggggtggttgaagtgcaggtgctgctcgctgggaacgcgtttacagcggggaaactggtatttgcagca

SEQ ID NO: 95601 - DNA, 80 bp, synthetic construct
  source 1..80: mol_type = other DNA
atggttatgcagggggggttgaagtgcaggtgctgctcgctgggaacgcgtttacagcggggaaactggtatttgcagca

SEQ ID NO: 95602 - DNA, 80 bp, synthetic construct
  source 1..80: mol_type = other DNA
atccctccacattttccccttgaaaatttgagccctggacaaattactatgtttcctcatgtgattattgatgttaggac

SEQ ID NO: 95603 - DNA, 80 bp, synthetic construct
  source 1..80: mol_type = other DNA
cgttagaacctgtcctcttacctctcccagatgttagaaataacttcttccattacaatcagcaacccgaaccccgaatg

SEQ ID NO: 95604 - DNA, 80 bp, synthetic construct
  source 1..80: mol_type = other DNA
aggcttgttgctatgttgtatacccctcttagatctaatggttctggtgatgatgtgtttacagtttcttgcagggttct

SEQ ID NO: 95605 - DNA, 80 bp, synthetic construct
  source 1..80: mol_type = other DNA
caattttgactattggggaattgtcaaattctaggttcccagctccaatagatgaactgtataccagccccaatgaagga

SEQ ID NO: 95606 - DNA, 80 bp, synthetic construct
  source 1..80: mol_type = other DNA
gtggtggtgcaaccacaaaatggtagatcaacactcgatggtgaactactgggcaccacacaacttgtgccttcaaacat

SEQ ID NO: 95607 - DNA, 80 bp, synthetic construct
  source 1..80: mol_type = other DNA
ttgtgcgatgcgaggacgcatcaatgcccaagtgccagacgatcaccatcaatggaacttgcaggtcacaaatacaaatg

SEQ ID NO: 95608 - DNA, 80 bp, synthetic construct
  source 1..80: mol_type = other DNA
ggacccccttcgaccccaccgaagatgtccctgcaccattgggcacgccggacttcctggcaaacatctatggagtcacc

SEQ ID NO: 95609 - DNA, 80 bp, synthetic construct
  source 1..80: mol_type = other DNA
agtcagagaaacccagacaatacttgtcgtgcccacgacggggttttggcaacttggagccctaagttcacacccaaatt

SEQ ID NO: 95610 - DNA, 80 bp, synthetic construct
  source 1..80: mol_type = other DNA
gggatccgttgtcctaggtacctgggaagatagagactttgatcttaaccaacccacaaggttcacacctgttggattgt

SEQ ID NO: 95611 - DNA, 80 bp, synthetic construct
  source 1..80: mol_type = other DNA
atgatacagaacattttgaccagtgggtcctgcctaattactctggaagattgaccttgaacatgaatttggcaccctct

SEQ ID NO: 95612 - DNA, 80 bp, synthetic construct
  source 1..80: mol_type = other DNA
gtatctcccctctttccaggtgaacaaatactcttctttaggtcccatataccacttaagggaggcacttctaatggtgc

SEQ ID NO: 95613 - DNA, 80 bp, synthetic construct
  source 1..80: mol_type = other DNA
cattgactgcctgctaccccaggaatggattcagcatttctaccaggaatcagccccgtcacccacggatgtggctctaa

SEQ ID NO: 95614 - DNA, 80 bp, synthetic construct
  source 1..80: mol_type = other DNA
ttaggtataccaaccctgacacaggtcgagtcttgtttgaggccaaattgcacagacaggggttcattacagtggcaaat

SEQ ID NO: 95615 - DNA, 80 bp, synthetic construct
  source 1..80: mol_type = other DNA
gtcttgctggtgacatagtcaccaatggcattgggacactggtaaatgctggggcaaatgcaataaatcaaaaggtagat

SEQ ID NO: 95616 - DNA, 80 bp, synthetic construct
  source 1..80: mol_type = other DNA
acaaggggtgttgaccgcgggcggcttctctcctactgatgcagcaaggggggcggttggtgcacctatgacgcaagtct

SEQ ID NO: 95617 - DNA, 80 bp, synthetic construct
  source 1..80: mol_type = other DNA
acaaggtgtgttgaccgcgggcggcttctctcctactgatgcagcaagggtggcggttggtgcacctatgacgcaagtct

SEQ ID NO: 95618 - DNA, 80 bp, synthetic construct
  source 1..80: mol_type = other DNA
tggactggaatgggactaggcattgggcccctggagccataaaaacaacatctttctccggtgggttcactagctcttcc

SEQ ID NO: 95619 - DNA, 80 bp, synthetic construct
  source 1..80: mol_type = other DNA
catgctagaactcttgatttgccaaagaaaacaacaactgcaccaaccccgatgcctgtatctagacccagttcttctgc

SEQ ID NO: 95620 - DNA, 80 bp, synthetic construct
  source 1..80: mol_type = other DNA
ttctacagtttctacccgctcaacagtcattagtgggtcctctaatcccccttcctcgattaggagctcctctagtgttt

SEQ ID NO: 95621 - DNA, 80 bp, synthetic construct
  source 1..80: mol_type = other DNA
cttcccaatctactccctcttcttcccgggttagtgagtgggtgcaaaatcagaatagggcactggagccgtatatgagg

SEQ ID NO: 95622 - DNA, 80 bp, synthetic construct
  source 1..80: mol_type = other DNA
ggggcgctacaaacagcttacgtgacgcccccctccagtagggcttccagtagtggcacagtctcaaccgtgccaaaaga

SEQ ID NO: 95623 - DNA, 80 bp, synthetic construct
  source 1..80: mol_type = other DNA
ggagcagaaggagtaggagggtatcaaaacctagacagacagggagcaacaagcaacgatagacagggagcaacaagcag

SEQ ID NO: 95624 - DNA, 80 bp, synthetic construct
  source 1..80: mol_type = other DNA
acccggagttagattgtttctttgaatttgcacatcactctgatgatgcattgtttatatacggttatttagagccagtt

SEQ ID NO: 95625 - DNA, 80 bp, synthetic construct
  source 1..80: mol_type = other DNA
gtgtagttgatgcattgagaaatatatatgagactgatttttttatgtcaaggaaactccacagatatattgatgggatg

SEQ ID NO: 95626 - DNA, 80 bp, synthetic construct
  source 1..80: mol_type = other DNA
gcaaaatttaggaggttcacacaagcattacatgatgggctaagggatgacaaacttaaaaggtgtgttgtagatgcact

SEQ ID NO: 95627 - DNA, 80 bp, synthetic construct
  source 1..80: mol_type = other DNA
catctctatttggtgctgcagtatccctattatttaggaaaatctggaacctattataccccgaattggactgtttcttt

SEQ ID NO: 95628 - DNA, 80 bp, synthetic construct
  source 1..80: mol_type = other DNA
gcaaaattcaggagatttacacaaacattacatgatggtttaagagatgacaaactcaaaagatgtgttgtagatgcact

SEQ ID NO: 95629 - DNA, 80 bp, synthetic construct
  source 1..80: mol_type = other DNA
acagggtgtacagcttgtggtgtctatttggataagttaagatcagtagggaaagtttacaaaatcctatccttgaaata

SEQ ID NO: 95630 - DNA, 80 bp, synthetic construct
  source 1..80: mol_type = other DNA
acaggatgtacagcatgtggtgtttatctagataaattacggtcagttgggaaagtttataaaatattatccttaaaata

SEQ ID NO: 95631 - DNA, 80 bp, synthetic construct
  source 1..80: mol_type = other DNA
ttattaacagagatgtgtcatttcaggatcttgctgagaatccatgtcaaatagacctgagtgtttcatcaattgatgga

SEQ ID NO: 95632 - DNA, 80 bp, synthetic construct
  source 1..80: mol_type = other DNA
ttgttaatagagatttatcatttcaggatttggctgagaacccatgtcaaatagacttgagtgtttcatcaattgatggg

SEQ ID NO: 95633 - DNA, 80 bp, synthetic construct
  source 1..80: mol_type = other DNA
aacctactcctgagccccatgctcccatcatgtcaatatgatggcaatacagtctctgggtatcaaagaatgatagcaac

SEQ ID NO: 95634 - DNA, 80 bp, synthetic construct
  source 1..80: mol_type = other DNA
ctcatattactccagctgattgcccaggggtagatcctgacagttcactaaaggaccatgtcaatctgattgttaacagg

SEQ ID NO: 95635 - DNA, 80 bp, synthetic construct
  source 1..80: mol_type = other DNA
gagtttctcattaagccatgtccgtttttaaagaagcagggtggtcccaacaaagatgaggactttttagtcagcaacga

SEQ ID NO: 95636 - DNA, 80 bp, synthetic construct
  source 1..80: mol_type = other DNA
ttgttttgaaggcattgtacatgttatcaactcgtgggaggcagacaattaaagaaaacaaaggcacaagaatcaggttt

SEQ ID NO: 95637 - DNA, 80 bp, synthetic construct
  source 1..80: mol_type = other DNA
cacctgatagatgccctcctacgtgcatctatgtggctggaatggcagaacttggtgcattcttttcaattctccaggac

SEQ ID NO: 95638 - DNA, 80 bp, synthetic construct
  source 1..80: mol_type = other DNA
cacctgatagatgccccccgacatgcatatatgtggctgggatggctgaactgggaccctttttctcaattttacaggat

SEQ ID NO: 95639 - DNA, 80 bp, synthetic construct
  source 1..80: mol_type = other DNA
aatttttcaggagagaaccccggaagaattctaaagaatgatttaaaaagggggaggtgcacagtgcagtgtcaaacaaa

SEQ ID NO: 95640 - DNA, 80 bp, synthetic construct
  source 1..80: mol_type = other DNA
agctgcacagtgcagggtcaaacaaaaaaaggcatgcaacaacaagcattggcctgccaaaatgtaagtaagtatgcatc

SEQ ID NO: 95641 - DNA, 80 bp, synthetic construct
  source 1..80: mol_type = other DNA
tggaaactgctcaaagtgcagatgtgtaaagagtgtcaaacttgcagctggtctgaggaatgttcgttctagatatagta

SEQ ID NO: 95642 - DNA, 80 bp, synthetic construct
  source 1..80: mol_type = other DNA
caaatgtacacaatctatataatcaactaacaacagctttcggttccaatgcggtggaagacgggaaagggtgcttcgag

SEQ ID NO: 95643 - DNA, 80 bp, synthetic construct
  source 1..80: mol_type = other DNA
ttataccacaaatgtgatgaccaatgcatgcagacaattcgaaacgggacttataacagaaggaaatatcaagaggagtc

SEQ ID NO: 95644 - DNA, 80 bp, synthetic construct
  source 1..80: mol_type = other DNA
ctatggaacaagcgacacatgctcaggctcattctacagaaacgtgagatggttgactcgaaaggacggcaattacccta

SEQ ID NO: 95645 - DNA, 80 bp, synthetic construct
  source 1..80: mol_type = other DNA
ctcaagacgcccaatacacaaataatcaagggaataacattcttttcatgtggggcataaataacccacccaccgatgat

SEQ ID NO: 95646 - DNA, 80 bp, synthetic construct
  source 1..80: mol_type = other DNA
agagccacggaagaattctgaggactgatctaaaaaagcgtaggtgcccagtgctacgtcagacagagaaacgtgcctta

SEQ ID NO: 95647 - DNA, 80 bp, synthetic construct
  source 1..80: mol_type = other DNA
tacgcatttcgaagctgctcagaattcattggtgtaaagagcctcaaacttgcagctggtctgaggaatgtgccttctag

SEQ ID NO: 95648 - DNA, 80 bp, synthetic construct
  source 1..80: mol_type = other DNA
ttcggggccatagcagagtttatagaagcagttggttcaggactagttgagggtagatatcggtttcagcatagaaatga

SEQ ID NO: 95649 - DNA, 80 bp, synthetic construct
  source 1..80: mol_type = other DNA
aaagggaaactgctcaaaatacatgggaataaagagcctgaaacttgcagttggtctgaggaatgtgccttcgggatcta

SEQ ID NO: 95650 - DNA, 80 bp, synthetic construct
  source 1..80: mol_type = other DNA
cgaaaggatggcaattaccctattcaagacgcccaatacccaaataaccctgggaagaacattcttttcatgtggggaat

SEQ ID NO: 95651 - DNA, 80 bp, synthetic construct
  source 1..80: mol_type = other DNA
tgatattcagataaatctgtacactataaccgacacgacatcgagtgtggcaacggatgaaataaataggatcttcaaac

SEQ ID NO: 95652 - DNA, 80 bp, synthetic construct
  source 1..80: mol_type = other DNA
agtggaaaaaagaaagacagaaaatagagggggccaagctggaatctgaaggaacctacaaaatcgtctccatttattcg

SEQ ID NO: 95653 - DNA, 80 bp, synthetic construct
  source 1..80: mol_type = other DNA
atggagacagtatcactcttacctatactactattgtcaacagtgagcaatgctgacaagatctgcatcggctaccattc

SEQ ID NO: 95654 - DNA, 80 bp, synthetic construct
  source 1..80: mol_type = other DNA
aaaaaatctaaaacagctaaggtcactttttacttctgctaagtcctatcaaaaaatccaaattttcccggacccgatct

SEQ ID NO: 95655 - DNA, 80 bp, synthetic construct
  source 1..80: mol_type = other DNA
tacacgaagtggtctgtacacgagaaccgacacaacaacgagtgtggcaacagaagaaataaataggatcttcaaaccat

SEQ ID NO: 95656 - DNA, 80 bp, synthetic construct
  source 1..80: mol_type = other DNA
agagccactgtagacttctgaagcctgatctaaaaaggggtagctgcacagtggaatgtcagacagagaaagatggctta

SEQ ID NO: 95657 - DNA, 80 bp, synthetic construct
  source 1..80: mol_type = other DNA
ctatgggacaagcgacacctgctcacgttcattctacacactcgtgagatggttgactcaaaagaacagcaattacccta

SEQ ID NO: 95658 - DNA, 80 bp, synthetic construct
  source 1..80: mol_type = other DNA
tccaagacgcccaatacacaaataaacctggaaataccattcttttcatgtggggcataaatcacccgcccaccgatgat

SEQ ID NO: 95659 - DNA, 80 bp, synthetic construct
  source 1..80: mol_type = other DNA
atctgatggaaatctactagctccatggtatggatatattctttcacgagagagccacggaagaatcatgacgactgatc

SEQ ID NO: 95660 - DNA, 80 bp, synthetic construct
  source 1..80: mol_type = other DNA
agatacacagtgtcatgtcagacagataaagatggcttacacacaacattgtcgttccacaatgtaagtaagtatgcatc

SEQ ID NO: 95661 - DNA, 80 bp, synthetic construct
  source 1..80: mol_type = other DNA
agacagtgtggacactgtaccagaaaattatgttcctgtgacacatgccgtggaactgctccacacagagcataatggga

SEQ ID NO: 95662 - DNA, 80 bp, synthetic construct
  source 1..80: mol_type = other DNA
acaattagaaagacagaaaatggaggtggtcaagcaggaattggaaggaacctgcaaaatcgtctccatttattcgaggg

SEQ ID NO: 95663 - DNA, 80 bp, synthetic construct
  source 1..80: mol_type = other DNA
cgaaagaacggcaattaccctatccaagacgcccaatacacaaataatcaagggaacaacattcttttcatgtggggcat

SEQ ID NO: 95664 - DNA, 80 bp, synthetic construct
  source 1..80: mol_type = other DNA
ttctctcaggagagagccacggtagcattgtcaacgatgccttaaaaaggggtagatgcgcagcgcaatgtcagacagat

SEQ ID NO: 95665 - DNA, 80 bp, synthetic construct
  source 1..80: mol_type = other DNA
aacctatacaacaaagtaaagcgggcggcgtgttctaatccggtggaagatgggaaaggatgtttggagctgtaccacaa

SEQ ID NO: 95666 - DNA, 80 bp, synthetic construct
  source 1..80: mol_type = other DNA
tacccagataagtttgtacacgataaatgatacaacaacgagtgtagcaacagaagaaataaataggatcttcaaaccat

SEQ ID NO: 95667 - DNA, 80 bp, synthetic construct
  source 1..80: mol_type = other DNA
atctgatgggaatcaactagctccatggtatggatacgttctcttcagagagagcaacggaagaattgtggcaactgatc

SEQ ID NO: 95668 - DNA, 80 bp, synthetic construct
  source 1..80: mol_type = other DNA
tacatacgggtagatgcacagtgcgatgtcagacagagacaggtggcttgcacacaacacagcgttgccaaaatgtaagt

SEQ ID NO: 95669 - DNA, 80 bp, synthetic construct
  source 1..80: mol_type = other DNA
ttctttccgaaaagagccacggaagaatccgacaaccggatttaataaggggtagctgcgcagttcatggtcagacagag

SEQ ID NO: 95670 - DNA, 80 bp, synthetic construct
  source 1..80: mol_type = other DNA
atggagacagtatcactaatccctatactaccgttccttgccgtgagtaatgaaggatctatctgcttcggatatcatgc

SEQ ID NO: 95671 - DNA, 80 bp, synthetic construct
  source 1..80: mol_type = other DNA
aaaggagtccgacaaaactgtgaacacactattggaaaacaatgtccctgagaatcttgccaaagaactgctccacacag

SEQ ID NO: 95672 - DNA, 80 bp, synthetic construct
  source 1..80: mol_type = other DNA
atggagacagtatcactaatccctatcgtactggcattaacagtaagcaatgcagatacaatctgcttcggatatcaagc

SEQ ID NO: 95673 - DNA, 80 bp, synthetic construct
  source 1..80: mol_type = other DNA
gagtgattgcaatggggttttttgccttgagtttctgggccatgtataattggtcaggcagatgcaacatttgtatataa

SEQ ID NO: 95674 - DNA, 80 bp, synthetic construct
  source 1..80: mol_type = other DNA
atggacacagtatcactagtaactatactactactatcaacagtaagctatgcagataaaatctgcatcggctaccaatc

SEQ ID NO: 95675 - DNA, 80 bp, synthetic construct
  source 1..80: mol_type = other DNA
aaaaaaagaaagacagaaaatagagggggtcaaccaggaatttgaaggaacctgcaaagtcgtgtccatttattcgactg

SEQ ID NO: 95676 - DNA, 80 bp, synthetic construct
  source 1..80: mol_type = other DNA
gagtgattgcaatggggtttgttgccatgttgattggaggcatgtataatgggtcttgcagacagaacatatatatataa

SEQ ID NO: 95677 - DNA, 80 bp, synthetic construct
  source 1..80: mol_type = other DNA
agagccacggaagaattctgaagacgaggataaggaggcacagctgcactgtgcaatgtcagacagaaaaagatcgctta

SEQ ID NO: 95678 - DNA, 80 bp, synthetic construct
  source 1..80: mol_type = other DNA
aaaattagaaagacagagaatggaggggctcaacctggaatctgaacgaacctacaaaatcctctccacttattcgaggg

SEQ ID NO: 95679 - DNA, 80 bp, synthetic construct
  source 1..80: mol_type = other DNA
caaatgtgaacaatctgtggaacaaagtaaagaggggagcatgttccaatgcggtggaagatgggaaaggatgtttggta

SEQ ID NO: 95680 - DNA, 80 bp, synthetic construct
  source 1..80: mol_type = other DNA
cagtaccacaaatgtaatgaccaatgcatggagacaattcggaacgggacctacaacagaaggaagtatcaagcggagtc

SEQ ID NO: 95681 - DNA, 80 bp, synthetic construct
  source 1..80: mol_type = other DNA
agttgcacatgtcagtgtcagacagagaaaggtggcttcaacaacgcacatggcatccaaaatgtgagtaagtatacatc

SEQ ID NO: 95682 - DNA, 80 bp, synthetic construct
  source 1..80: mol_type = other DNA
tggaaaatgctcaaaatatagaggcataaagtgtgtcaaacttgcagctggtctgaggaatgtgcgttctagatatagta

SEQ ID NO: 95683 - DNA, 80 bp, synthetic construct
  source 1..80: mol_type = other DNA
gagtgattgcaatggggtttgctgccattttgttttgggccatgtacaatgggtcggcaaggcagaatagttgtacataa

SEQ ID NO: 95684 - DNA, 80 bp, synthetic construct
  source 1..80: mol_type = other DNA
ttgtgattgcaatggggtctgttgccttgttgttctgggccatgtccaatgggtctggcaggccaaatatttgtatataa

SEQ ID NO: 95685 - DNA, 80 bp, synthetic construct
  source 1..80: mol_type = other DNA
ttctttcagtagagagctacggtagacttctgatcactgatttaaaaaggggtagctgcacagagcaatgtcacacagag

SEQ ID NO: 95686 - DNA, 80 bp, synthetic construct
  source 1..80: mol_type = other DNA
aactgcacagtgcgacgagcgattaacaaaggtcgcttaaacacaacacagccattcccaaatgtaagtaagtatgcatt

SEQ ID NO: 95687 - DNA, 80 bp, synthetic construct
  source 1..80: mol_type = other DNA
atggagaccgtatcggtaataactatgctactgggatccaccgaaagcaatgcaaatgaaatctgcctcggctatcaatc

SEQ ID NO: 95688 - DNA, 80 bp, synthetic construct
  source 1..80: mol_type = other DNA
ttggtcaggattagttggagggtggtatgggttccagcattcaaatgaccaaggggttggtatggcagcagatagagact

SEQ ID NO: 95689 - DNA, 80 bp, synthetic construct
  source 1..80: mol_type = other DNA
acaagccgtatgaaatcattggtcttgaattcattgtggtaggaactagaatggacacgagtggtcataagttcgatgat

SEQ ID NO: 95690 - DNA, 80 bp, synthetic construct
  source 1..80: mol_type = other DNA
caaatccaggatatatgggcatataatgcagaatcaatagttttgctcgaaaaccagaaaacacttgatgagcaggacgc

SEQ ID NO: 95691 - DNA, 80 bp, synthetic construct
  source 1..80: mol_type = other DNA
aaatgtaagcaatggagggaataaagtaaagagggcattgggttctaatgaggtggaagatgagaacggatgtttcgagc

SEQ ID NO: 95692 - DNA, 80 bp, synthetic construct
  source 1..80: mol_type = other DNA
tggagggggtcaagctggaatctgaaggaaccagggaaatcctctccttgtattcgagggtggcatcatatctagtgatt

SEQ ID NO: 95693 - DNA, 80 bp, synthetic construct
  source 1..80: mol_type = other DNA
tagtgattgcaatgcggtctgctgccttgttgattggggccatgtccaatgggtattgcagatgcaatgagtgtatataa

SEQ ID NO: 95694 - DNA, 80 bp, synthetic construct
  source 1..80: mol_type = other DNA
tgctgtgtgcaccaaacttgggacaacctcttattttggacacctgctccattgaagggctaatctatggctatccttct

SEQ ID NO: 95695 - DNA, 80 bp, synthetic construct
  source 1..80: mol_type = other DNA
tgtgatctatctctggaaggaagagaatggtcctatatcgtccaaataccatcaacagtacacggattgtgttaccccgg

SEQ ID NO: 95696 - DNA, 80 bp, synthetic construct
  source 1..80: mol_type = other DNA
gaatgtccaatatcaagaagagctaaggtcactttttagttctgctacgtcttatcaaaaaatccagatcttcccacaca

SEQ ID NO: 95697 - DNA, 80 bp, synthetic construct
  source 1..80: mol_type = other DNA
ccatctggaatgtttcttacgatgggacaagcatgccatgctcaggatcattctacatctccttgatatggttgactccc

SEQ ID NO: 95698 - DNA, 80 bp, synthetic construct
  source 1..80: mol_type = other DNA
ctaaactgtgatcaccctatccaagaccccccctacccaaataatctggagctgaacattcttttcatgtggtggataaa

SEQ ID NO: 95699 - DNA, 80 bp, synthetic construct
  source 1..80: mol_type = other DNA
tcacacgcccaccgatgatactcagataaggctgtacacaataaccgacacaactttctgtgtggcaacagatgaaataa

SEQ ID NO: 95700 - DNA, 80 bp, synthetic construct
  source 1..80: mol_type = other DNA
atacgatcttcaaacaattaatagaaccaaggcctctcgtcaacgaattgatgacaagaatcaattattataggtctgta

SEQ ID NO: 95701 - DNA, 80 bp, synthetic construct
  source 1..80: mol_type = other DNA
ttgatgccgggtcagacactgcaagtaaaatctgatgtgaatctactagcttcctggtatggacccatactttcacgaga

SEQ ID NO: 95702 - DNA, 80 bp, synthetic construct
  source 1..80: mol_type = other DNA
tgcaaactccgcagaaactgtggacacactaacacaacactatgtccctgtgacacatgccaaagaactgctccacactc

SEQ ID NO: 95703 - DNA, 80 bp, synthetic construct
  source 1..80: mol_type = other DNA
gagctacggagcacttctgaccactgatttaaaaaggggtaactgcactgtgcaatgtcagacagagaaaggtggcttaa

SEQ ID NO: 95704 - DNA, 80 bp, synthetic construct
  source 1..80: mol_type = other DNA
acacaacacagtcatgccaaaatgtaagtaagcaggcatccggaaactgttcaaaatatattggcataaagagtgtcaaa

SEQ ID NO: 95705 - DNA, 80 bp, synthetic construct
  source 1..80: mol_type = other DNA
cttgcagttggtctgaggaaggtgcgttgtcgatatattagaggagtattcggggcagtagcagggttcatagagcgagg

SEQ ID NO: 95706 - DNA, 80 bp, synthetic construct
  source 1..80: mol_type = other DNA
gataagatctgcatcggctatcaatcaacaaactccacggaaactgtagacacactaacagaaaacaatgtccctgtgac

SEQ ID NO: 95707 - DNA, 80 bp, synthetic construct
  source 1..80: mol_type = other DNA
catttattcgactgtcgcctcatctcttgtgattgcaatggggtttgctgccttcttgttctgggccatgtccaatgggt

SEQ ID NO: 95708 - DNA, 80 bp, synthetic construct
  source 1..80: mol_type = other DNA
atccattattggaaggaagagaatggtcctatatcgtagagagaccatctgctgttaatggattgtgttatcccgggaat

SEQ ID NO: 95709 - DNA, 80 bp, synthetic construct
  source 1..80: mol_type = other DNA
tcaagacgctcaatacacaaataatcaagaaaagaacattcttttcatgtggagaaccgacacaacaacgagtgtggcaa

SEQ ID NO: 95710 - DNA, 80 bp, synthetic construct
  source 1..80: mol_type = other DNA
cagaagaaataaataggaccttcaagcctttgataggaccaaggcctcttgtcaacggtttaacgggaagaattaattat

SEQ ID NO: 95711 - DNA, 80 bp, synthetic construct
  source 1..80: mol_type = other DNA
tattggtcggtattaaaaccgggccaaacactgcgaataaaatctaatgggaatctaatagctccatggtatggacacat

SEQ ID NO: 95712 - DNA, 80 bp, synthetic construct
  source 1..80: mol_type = other DNA
ccagaacaaacgataaattctcagtaaagcaagatatcattggaataaatgattggtcaggatacagtggaagttttgtt

SEQ ID NO: 95713 - DNA, 80 bp, synthetic construct
  source 1..80: mol_type = other DNA
tgatttaaattcaataacttgtaatggtggtagctataattttgcattgcctgtaggaaattttccagttatgtcaggag

SEQ ID NO: 95714 - DNA, 80 bp, synthetic construct
  source 1..80: mol_type = other DNA
gtgccgtatcgttacatccatctggagtgacattgtcaactcagttcacagattatgtatctcttaactcgttaaggttt

SEQ ID NO: 95715 - DNA, 80 bp, synthetic construct
  source 1..80: mol_type = other DNA
aggttcagattagcggtcgaagaacctccgttttcaataacgcgtacacgagtaagtagattgtatggattgccagcagt

SEQ ID NO: 95716 - DNA, 80 bp, synthetic construct
  source 1..80: mol_type = other DNA
accgtcaaatgatgattatcaaacgccagtaatgaattcagtaacagtcagacaagatctcgagagacaacttggagaac

SEQ ID NO: 95717 - DNA, 80 bp, synthetic construct
  source 1..80: mol_type = other DNA
tacgtaatgaatttaatgcattatcccaacaaattgcgatgtctcagcttatagatctagcgctgttaccattagatatg

SEQ ID NO: 95718 - DNA, 80 bp, synthetic construct
  source 1..80: mol_type = other DNA
atgacatttcagctgcagtcctgaaaacaaaaatagataaatccattcaggtatcaccaactacattgccagatatagta

SEQ ID NO: 95719 - DNA, 80 bp, synthetic construct
  source 1..80: mol_type = other DNA
ctttcaatttactcagatcggatcctagagtattacgagaattcataaatcaagaaaatccgataattcgtaatagaata

SEQ ID NO: 95720 - DNA, 80 bp, synthetic construct
  source 1..80: mol_type = other DNA
tattacgagaattcataaatcaagaaaatccgataattcgtaatagaatagaacaacttatactacaatgtagactataa

SEQ ID NO: 95721 - DNA, 80 bp, synthetic construct
  source 1..80: mol_type = other DNA
acgttattcgctccaaatgacaagggtatagtcgctgaactgacaaataatacagatatatggttagtcatcattctaat

SEQ ID NO: 95722 - DNA, 80 bp, synthetic construct
  source 1..80: mol_type = other DNA
tgaaccaaatgtacctcaagagacaagaatgtacactatatttgggcagcaagtcaacttaataattgagaatgtgtcac

SEQ ID NO: 95723 - DNA, 80 bp, synthetic construct
  source 1..80: mol_type = other DNA
aaacaaaatggaaatttgttgattttcgtagaagaagtcaacatgatacttatgtgcttgaaggtacacttttgtcagat

SEQ ID NO: 95724 - DNA, 80 bp, synthetic construct
  source 1..80: mol_type = other DNA
acaaagctacaagctgcaatgaaatatggagcaaaactattcacgttcattggggacacaccgagtgcagcaccgcagga

SEQ ID NO: 95725 - DNA, 80 bp, synthetic construct
  source 1..80: mol_type = other DNA
atatggatatgaaaccaataactacagtgcaattgaagtaaaatcgttttgtgatttttacatagtgccacgtttaccac

SEQ ID NO: 95726 - DNA, 80 bp, synthetic construct
  source 1..80: mol_type = other DNA
gagaagtgtgcagaaattacattaacaacggtcttccaccaatgcaaaatactagaaacgtagtgccggtcgcattatca

SEQ ID NO: 95727 - DNA, 80 bp, synthetic construct
  source 1..80: mol_type = other DNA
gctagagatgtgatagcgcaaagagtaagtgttaatgaagatatcgtgatatctaaaacgtccttatggaaagaaatgca

SEQ ID NO: 95728 - DNA, 80 bp, synthetic construct
  source 1..80: mol_type = other DNA
cattgaagtcacaagatgttacgataaatcctggaccatttgcacaaactgggtatgcttcagtaaattggggtcctggc

SEQ ID NO: 95729 - DNA, 80 bp, synthetic construct
  source 1..80: mol_type = other DNA
caaatgtaaacaatctatataataacgtaaagaggggggcgtgttccaatgcggtggaagatgggaacggatgtttggat

SEQ ID NO: 95730 - DNA, 80 bp, synthetic construct
  source 1..80: mol_type = other DNA
ttccaatgcggtggaagatgggaacggatgtttggatctatgccacaaatgtgatgaccaaggcaccgagacaatccgga

SEQ ID NO: 95731 - DNA, 80 bp, synthetic construct
  source 1..80: mol_type = other DNA
ctatgccacaaatgtgatgaccaaggcaccgagacaatccggaacgggacctacaacagaaggaagtatcaagaggagtc

SEQ ID NO: 95732 - DNA, 80 bp, synthetic construct
  source 1..80: mol_type = other DNA
aaagaaagaaagagagaaaatggaggaggccaagctggaatctgatggttccagggaaagggtctcctcgtattcgacgg

SEQ ID NO: 95733 - DNA, 80 bp, synthetic construct
  source 1..80: mol_type = other DNA
aaagaaggaaagacagaaaatggagggggccaagctggaatctgaaggaacctggaaaatcctctccatttattcgacgg

SEQ ID NO: 95734 - DNA, 80 bp, synthetic construct
  source 1..80: mol_type = other DNA
atggacaccgtctcactcatctctatgctactactatcccatgtaagcattgcagataagatctgcatcggctatcaatc

SEQ ID NO: 95735 - DNA, 80 bp, synthetic construct
  source 1..80: mol_type = other DNA
tggctaaactgtacaagcagtatgaaattattgatcttgagttcagtgaggtagaaactagactcaacacgatcaataat

SEQ ID NO: 95736 - DNA, 80 bp, synthetic construct
  source 1..80: mol_type = other DNA
cagtggaacaatgatagcatgctccaattcattctacctctccatgagatggttgaccctccccaacaacgcttacccta

SEQ ID NO: 95737 - DNA, 80 bp, synthetic construct
  source 1..80: mol_type = other DNA
tccaggatgccctctacacaaatgaatctgagaataccattcttttcatgtggggtataaatcacccgcccaccgaacct

SEQ ID NO: 95738 - DNA, 80 bp, synthetic construct
  source 1..80: mol_type = other DNA
atgcacactgtatcggctatcactatgctacttatagcaacagtaagcaatgcagataagatctgcatcggctatcaatc

SEQ ID NO: 95739 - DNA, 80 bp, synthetic construct
  source 1..80: mol_type = other DNA
tggctaaactgtacaagcagtatgaaattcttgatcatgcaatcatcgaggtaggaactagaatcaacccgatcaatcat

SEQ ID NO: 95740 - DNA, 80 bp, synthetic construct
  source 1..80: mol_type = other DNA
aaggtcgatgatcaaatccaggatatatgggcatataacgcagaatcaatagttttccttgataaccagaaaacactcga

SEQ ID NO: 95741 - DNA, 80 bp, synthetic construct
  source 1..80: mol_type = other DNA
ttcaaataccaacaatctatataataaagtgaagagggcggcgggttccaatgcgatggaggatgggaaaggatgttcag

SEQ ID NO: 95742 - DNA, 80 bp, synthetic construct
  source 1..80: mol_type = other DNA
aggaaagttggaaagacagaaaatggagggggccaagctggaatctgaaggaacctacaaaatcctctccatgtattcta

SEQ ID NO: 95743 - DNA, 80 bp, synthetic construct
  source 1..80: mol_type = other DNA
tggccaaactgtacaagcagtatgaaatcattgatcatgaaattagcgaggtaggaactagaattaacacgagcagtaat

SEQ ID NO: 95744 - DNA, 80 bp, synthetic construct
  source 1..80: mol_type = other DNA
caaaaccaggagcggagggtaataaagtaaagagggcggcgggttccaatgcggtggaagatggaaaaggatgttcggag

SEQ ID NO: 95745 - DNA, 80 bp, synthetic construct
  source 1..80: mol_type = other DNA
ttataccacaaatgtgatgaccaatgcatggagacaattgggaacgggaccttcaacagaagggagtatcaggcggagtc

SEQ ID NO: 95746 - DNA, 80 bp, synthetic construct
  source 1..80: mol_type = other DNA
aaagttagaaagacagaaaatagaggggctcaagcaggaatttgatcgaacctgcgaaattgtctccatgagttcgaggg

SEQ ID NO: 95747 - DNA, 80 bp, synthetic construct
  source 1..80: mol_type = other DNA
caaaaccaaacaatctatataataaagtaaagaggggggcatgttccaatgcggtggaagatggaaaaggatgttcggag

SEQ ID NO: 95748 - DNA, 80 bp, synthetic construct
  source 1..80: mol_type = other DNA
tgcggtggaagatggaaaaggatgttcggagttataccacaaatgtgagaaagaatgcatggagacaattcggaaccgga

SEQ ID NO: 95749 - DNA, 80 bp, synthetic construct
  source 1..80: mol_type = other DNA
agaggcacggaagaaatgagaagaatgatttacataggggtagctgcacagtgcaatgtcagacagagaaagatggctta

SEQ ID NO: 95750 - DNA, 80 bp, synthetic construct
  source 1..80: mol_type = other DNA
cataaaaccaaacaatggaggtaataaagtaaagagggcggcgggttccaatgcgatggaagatgggaaaggatgtttgg

SEQ ID NO: 95751 - DNA, 80 bp, synthetic construct
  source 1..80: mol_type = other DNA
agctatgccacaaatgtgatgaccaatgcatggagacaattgggaacgggacctacaacagaagagagtatcaagaggag

SEQ ID NO: 95752 - DNA, 80 bp, synthetic construct
  source 1..80: mol_type = other DNA
aaagaaagaaagacagaaaatggaggtggtcaagctggaatctgatcgaacctgggaaatcctctccttttattctaggg

SEQ ID NO: 95753 - DNA, 80 bp, synthetic construct
  source 1..80: mol_type = other DNA
atgcacacagtatcactaatctctatgctactaatagccacattaagcaatgcagataagatctgcatcggctatcaatc

SEQ ID NO: 95754 - DNA, 80 bp, synthetic construct
  source 1..80: mol_type = other DNA
tggccaaactgtacaagccgtatgaaatcattggtcttgaattcagtgtggtaggaacgagaattatcacgagcaataat

SEQ ID NO: 95755 - DNA, 80 bp, synthetic construct
  source 1..80: mol_type = other DNA
tataaaaccaaacaaggagggtaataaagtaaagagggcggcgggttccaatgcggtggaagatggaaacggatgttcgg

SEQ ID NO: 95756 - DNA, 80 bp, synthetic construct
  source 1..80: mol_type = other DNA
agttataccacaaacgcgataaagaatgcatggagacaattcggaacgggacctacaacagaagagaatgtcaggcggag

SEQ ID NO: 95757 - DNA, 80 bp, synthetic construct
  source 1..80: mol_type = other DNA
aaagaaagaaagacagaaaatggaggggctcaagcaggaattggatcgaaccagggaaattgtctccttttactcgaggg

SEQ ID NO: 95758 - DNA, 80 bp, synthetic construct
  source 1..80: mol_type = other DNA
agagccacggaagagttgtggagcatgatttacataggggtagctgcacagcgcaatgtcagacagagaacggtcggttg

SEQ ID NO: 95759 - DNA, 80 bp, synthetic construct
  source 1..80: mol_type = other DNA
ctcatgccgtggaactgctccacactcagcataatgggatgctgtgtgctccaagcttgggacaacctcttattttagac

SEQ ID NO: 95760 - DNA, 80 bp, synthetic construct
  source 1..80: mol_type = other DNA
aaaattagaaagacagaaaatggaggggctcaacctggaatctgatcgaacctgggaaattctctccatgtattcgaggg

SEQ ID NO: 95761 - DNA, 80 bp, synthetic construct
  source 1..80: mol_type = other DNA
tataaatgtaaggaatctatataataaagtaaagaggggggcatgttccaatgcggtggaagatggaaaaggatgttcgg

SEQ ID NO: 95762 - DNA, 80 bp, synthetic construct
  source 1..80: mol_type = other DNA
gggcatgttccaatgcggtggaagatggaaaaggatgttcggagttataccacaaatgtgatgaaagatgcatggagaca

SEQ ID NO: 95763 - DNA, 80 bp, synthetic construct
  source 1..80: mol_type = other DNA
aaagaaagaaagacagagaatggaggtggtcgagctggaatcggatggaacctggggaggtgtctccatttattctaggg

SEQ ID NO: 95764 - DNA, 80 bp, synthetic construct
  source 1..80: mol_type = other DNA
tgacatggtatcgaatgattgcaatggggtcctttgccttgaggattgaaggcttgtacaattggtcttgcagatgcaac

SEQ ID NO: 95765 - DNA, 80 bp, synthetic construct
  source 1..80: mol_type = other DNA
gaatgattgcaatggggtcctttgccttgaggattgaaggcttgtacaattggtcttgcagatgcaacatttgtatataa

SEQ ID NO: 95766 - DNA, 80 bp, synthetic construct
  source 1..80: mol_type = other DNA
actcgtacaggtgagaggcagggaagaattgtgaagcatgatttacataggggtagctgcgcagcgcaatgtcagagaga

SEQ ID NO: 95767 - DNA, 80 bp, synthetic construct
  source 1..80: mol_type = other DNA
gaacggtcggctaaactcaacacagccattgctcaatgtaagtaagcatgcattcggaaaatgctcgaaatacatgggca

SEQ ID NO: 95768 - DNA, 80 bp, synthetic construct
  source 1..80: mol_type = other DNA
atggacgcagtatcactaatcactatactactaatattaacagtgagcaatgcaaataaaatctgcatcggctatcaatc

SEQ ID NO: 95769 - DNA, 80 bp, synthetic construct
  source 1..80: mol_type = other DNA
tactcagagagatctgtacacgagaactgacacaacatcgagtgtggcaacagaagagataaataggatcttcacaccat

SEQ ID NO: 95770 - DNA, 80 bp, synthetic construct
  source 1..80: mol_type = other DNA
atggacacagtatcactcatctctatgctactaactatcccattaaccaatgcagataggagcagcatcggctatcgctc

SEQ ID NO: 95771 - DNA, 80 bp, synthetic construct
  source 1..80: mol_type = other DNA
aaaattagaaagacagaaaatggagaggctcaagcaggaatctgatcgaacctgcgaaggggactccatgtattcgaggg

SEQ ID NO: 95772 - DNA, 80 bp, synthetic construct
  source 1..80: mol_type = other DNA
tgaaatggtatcgagcgatggcaatggggtcttttgccttgaggattggggccttgtacaattggtcttgcagatgcaac

SEQ ID NO: 95773 - DNA, 80 bp, synthetic construct
  source 1..80: mol_type = other DNA
agcatcatgggatgctgggtgatccaagcttgggacaccctcttattttagacacctgctccattgaagggctaatcgat

SEQ ID NO: 95774 - DNA, 80 bp, synthetic construct
  source 1..80: mol_type = other DNA
aacaaattccggcaactgtgtgaacactctttcgcagaacaatgtccctgtgactactgctgtggaactgctccacactc

SEQ ID NO: 95775 - DNA, 80 bp, synthetic construct
  source 1..80: mol_type = other DNA
tggcaaaacgatcaaccgctttgaaagtcttgatcatgaattcagtgaggtggaaaacaggaatgacatcatcaatacta

SEQ ID NO: 95776 - DNA, 80 bp, synthetic construct
  source 1..80: mol_type = other DNA
agatccacgatcaaattcaagatatatgggcatgtaaaccagaaatcatagttctgcttcaataccagaaaacactggag

SEQ ID NO: 95777 - DNA, 80 bp, synthetic construct
  source 1..80: mol_type = other DNA
caaatgtaaacaatcggtataataaccagacgacggagggcatttccaatgcggtggaagattcgaaacgatgtttcggt

SEQ ID NO: 95778 - DNA, 80 bp, synthetic construct
  source 1..80: mol_type = other DNA
acataccacaaatgtgatggaaagagcatggagtcaattaggaacgcgaggaacaacagaaggaggtatcaagaggagtg

SEQ ID NO: 95779 - DNA, 80 bp, synthetic construct
  source 1..80: mol_type = other DNA
gaaattagtaagacagaaaatggagggggccaagccggaatctgaaggaactcacagaatcctcatcatttatctgtcgg

SEQ ID NO: 95780 - DNA, 80 bp, synthetic construct
  source 1..80: mol_type = other DNA
tggtaattgcaagggggttcgttgcactcgagttatggaccatgtccaattggtcttgcagatgcaacatttgtatataa

SEQ ID NO: 95781 - DNA, 80 bp, synthetic construct
  source 1..80: mol_type = other DNA
aagagggaggtgcacagtccactgtcagacagagttccgaggattagacacaacatcaccattgcaaaatgtgagcaagt

SEQ ID NO: 95782 - DNA, 80 bp, synthetic construct
  source 1..80: mol_type = other DNA
accagccgtttgaaattcttgatcctgaattcagcgaggttggaaacaggattaacctgatcaataataagattgatgat

SEQ ID NO: 95783 - DNA, 80 bp, synthetic construct
  source 1..80: mol_type = other DNA
caaattccagatttatgggcatataaagcagaaatcattggtctgcttgaaaacccaaaaaccattgatgaacctggagc

SEQ ID NO: 95784 - DNA, 80 bp, synthetic construct
  source 1..80: mol_type = other DNA
aaaagtaaaccatttatataataaaatgaagagggcggtgggtttcaatgcggttgaaggttggaaaggatgtttcggtg

SEQ ID NO: 95785 - DNA, 80 bp, synthetic construct
  source 1..80: mol_type = other DNA
agtggaaattagaaagaccgaaaatagaaggggtcaaaccggaatttgaaggaaactacaaaatcctcctcctttatttg

SEQ ID NO: 95786 - DNA, 80 bp, synthetic construct
  source 1..80: mol_type = other DNA
ttgtaaatgcaaaggggtttgtttcccttttgttttggggcatgtccaaagggttagacagatgcaacatttgtatataa

SEQ ID NO: 95787 - DNA, 80 bp, synthetic construct
  source 1..80: mol_type = other DNA
caaatgtaaacaatcggagggataaagtgaagacggagggcggttgcaatgcggtggaagattcgaaacgatttttcgat

SEQ ID NO: 95788 - DNA, 80 bp, synthetic construct
  source 1..80: mol_type = other DNA
cgaaagaagtcagacagaaaatggagggggtcaagccggaagatgaaggattccagggaatcctcgccttttatttgtcg

SEQ ID NO: 95789 - DNA, 80 bp, synthetic construct
  source 1..80: mol_type = other DNA
gtcgaatcgtctatggaaacgcaagggcggttcgttgccctcgagttatggagcatgtccaattggtctgacagatgcaa

SEQ ID NO: 95790 - DNA, 80 bp, synthetic construct
  source 1..80: mol_type = other DNA
tggaaacgcaagggcggttcgttgccctcgagttatggagcatgtccaattggtctgacagatgcaacagttgtatataa

SEQ ID NO: 95791 - DNA, 80 bp, synthetic construct
  source 1..80: mol_type = other DNA
aatcggtataataaagtgaagagggagggcggttgcaatgcggtggaagattcgaaacgatgtttcggtacataccacaa

SEQ ID NO: 95792 - DNA, 80 bp, synthetic construct
  source 1..80: mol_type = other DNA
atgtgatggaaagagcatggggtcaattaggaacgggaggaacaacagaagtaggtatcaagaggagtcgaaattagaaa

SEQ ID NO: 95793 - DNA, 80 bp, synthetic construct
  source 1..80: mol_type = other DNA
gaaggaaaatggagggggccaagccggaagatgaatcattccagggaatcctcgtctttgatttgtcggtcgaatcggct

SEQ ID NO: 95794 - DNA, 80 bp, synthetic construct
  source 1..80: mol_type = other DNA
aaacgatcaagcagtatgaaattctcgatcatgaattcagtgaggttgaaaccaggattaacatgatcaatactaagatt

SEQ ID NO: 95795 - DNA, 80 bp, synthetic construct
  source 1..80: mol_type = other DNA
cacgatcaaatccaagatatatgggcatataatgcagaattcatagttctgcttcaaaaccagaaaacactggatgagca

SEQ ID NO: 95796 - DNA, 80 bp, synthetic construct
  source 1..80: mol_type = other DNA
agggaaagaaagaaagagagaaaatggaggggctcaagctggaatttgaacgaacctacaaaatcctctccatttactct

SEQ ID NO: 95797 - DNA, 80 bp, synthetic construct
  source 1..80: mol_type = other DNA
gcacaagcagtatgaaattgtcgatcaagaattcagtgaggtcgaaagtagacttaacgtgatcagtaatcagttttacg

SEQ ID NO: 95798 - DNA, 80 bp, synthetic construct
  source 1..80: mol_type = other DNA
aaaattagaaagacagaaaatagggggggtccaggtgcaatatgaaggtcattacaaaatcctcgccttttattggtctg

SEQ ID NO: 95799 - DNA, 80 bp, synthetic construct
  source 1..80: mol_type = other DNA
gtccaggtgcaatatgaaggtcattacaaaatcctcgccttttattggtctgtggcgtcatgtcttgtaattgcaatggg

SEQ ID NO: 95800 - DNA, 80 bp, synthetic construct
  source 1..80: mol_type = other DNA
agttgggaagtgctcaaaatacattggcataaagagtctcaaacttgcaggtggtctgaggaatgtgctttgtagatcta

SEQ ID NO: 95801 - DNA, 80 bp, synthetic construct
  source 1..80: mol_type = other DNA
atggacaccgcatcactgatcactatgctactactattaacagtaagcattgcagatggtatctgcctccgctatcaatc

SEQ ID NO: 95802 - DNA, 80 bp, synthetic construct
  source 1..80: mol_type = other DNA
cgagagaagtaatacggaaaatggagggggtcaagccggaatctgaaggaacccacaaaatcctcgtcatttatttgacg

SEQ ID NO: 95803 - DNA, 80 bp, synthetic construct
  source 1..80: mol_type = other DNA
tggtaattgcaatggggtttgttgcacatgagttatgggccatgtccattgtgtcttgcagatgcaacatttgtatataa

SEQ ID NO: 95804 - DNA, 80 bp, synthetic construct
  source 1..80: mol_type = other DNA
agggaaagttagcaagacagaaaatggaggggctcaagctggaatctgatcgaaccagggaaagggtctccatttattcg

SEQ ID NO: 95805 - DNA, 80 bp, synthetic construct
  source 1..80: mol_type = other DNA
caaatccagacaatgtatataataaagtaaagagggctttgggttccaatgcggtggaagatgggaaaggatgttcagaa

SEQ ID NO: 95806 - DNA, 80 bp, synthetic construct
  source 1..80: mol_type = other DNA
agggaaagaaagaaatagagaaaatagagggggtcaagctggaattggaaggaaccagcgaagtcgtctccatttattcg

SEQ ID NO: 95807 - DNA, 80 bp, synthetic construct
  source 1..80: mol_type = other DNA
cagtatcataaatgtgagaaagaatgcatggagacaattgggaacgggaccttcaacagaagggagtgtcaggcggagtc

SEQ ID NO: 95808 - DNA, 80 bp, synthetic construct
  source 1..80: mol_type = other DNA
aaagaaagaaagacagaaaatagagggggtcgacctggagtctgatcgaacctggaaaatcctctccatttactcgaggg

SEQ ID NO: 95809 - DNA, 80 bp, synthetic construct
  source 1..80: mol_type = other DNA
atggagactgtattcctcataactatactactcttgtcaacagtgatcaatgctgatttgatctgcatcggctatcattc

SEQ ID NO: 95810 - DNA, 80 bp, synthetic construct
  source 1..80: mol_type = other DNA
gcatattcgataccatagcagggtctatagagggaggttggtcagtattagttgctggttggcatgggttacagcattca

SEQ ID NO: 95811 - DNA, 80 bp, synthetic construct
  source 1..80: mol_type = other DNA
tgcaaatgtaatcaatctacataataaagtaaagacgacggtggggtccaatggggtggaagatgtaaatcgatatttcg

SEQ ID NO: 95812 - DNA, 80 bp, synthetic construct
  source 1..80: mol_type = other DNA
agatataccgcaaatgtggtgtgagaagcatggagtcaatttggaacgggtcctccgacggaaggagatatcaagaggag

SEQ ID NO: 95813 - DNA, 80 bp, synthetic construct
  source 1..80: mol_type = other DNA
aaaattagaaagacagaaaatagagggggtcaagctggaatttgaaggaacttacaaaatcctcaccatttatttggcag

SEQ ID NO: 95814 - DNA, 80 bp, synthetic construct
  source 1..80: mol_type = other DNA
tgatacgcagagaaatctgtacacgagaaccgacacaacaacgagtgtggcaacagaagacataaataggatcttcaaac

SEQ ID NO: 95815 - DNA, 80 bp, synthetic construct
  source 1..80: mol_type = other DNA
ctaaaatagaaagacacaaaaaagagggggtcaagagggaatgtgaaggaacttacaaaatcctcaccacttattcgagt

SEQ ID NO: 95816 - DNA, 80 bp, synthetic construct
  source 1..80: mol_type = other DNA
tccgctgccgctgctgctaccagcaacaacgacaacgcaaaatcttcaagtgacggagtactaagtagtatggctgtcac

SEQ ID NO: 95817 - DNA, 80 bp, synthetic construct
  source 1..80: mol_type = other DNA
attcacttctggcacggattgcagctgcccgttccctggtacatcgggcaaaagaagagctttccagtaggccaagaccc

SEQ ID NO: 95818 - DNA, 80 bp, synthetic construct
  source 1..80: mol_type = other DNA
gttgttgtcatgatatcaggaaagccagggatagggaaaacccaccttgccagagatttggcaaagaaagttgcagccac

SEQ ID NO: 95819 - DNA, 80 bp, synthetic construct
  source 1..80: mol_type = other DNA
ggaagctttgtattccatcatccaaattgctggagccgcgtttgtcaccacgcgcattgcaaagcgcatgaacatacaaa

SEQ ID NO: 95820 - DNA, 80 bp, synthetic construct
  source 1..80: mol_type = other DNA
ctgcctgagctatccaccgtcaggcagccagatgggacaaacacagcatttagtgtccccccactcaaccagagggaaaa

SEQ ID NO: 95821 - DNA, 80 bp, synthetic construct
  source 1..80: mol_type = other DNA
caaaaagacaattattaacgtccttgagcaaactatagatccaccccagaaatggacgttcgcacaggcgtgcgcctccc

SEQ ID NO: 95822 - DNA, 80 bp, synthetic construct
  source 1..80: mol_type = other DNA
aaaggttattatggggctcagatctggcaaccatgattcgttgtgctcgagcgttcggagggttgatggatgagctcaag

SEQ ID NO: 95823 - DNA, 80 bp, synthetic construct
  source 1..80: mol_type = other DNA
tctgaggacttagatggtctgacctttttgcggagaactgtgacccgtgatccagcaggttggtttggaaaattggaaca

SEQ ID NO: 95824 - DNA, 80 bp, synthetic construct
  source 1..80: mol_type = other DNA
gttgaactaacaccactgtctctgtactggaggccagtgtacacccctcagtacctcatatccccagaaactctcaaaaa

SEQ ID NO: 95825 - DNA, 80 bp, synthetic construct
  source 1..80: mol_type = other DNA
gtccctattgggtgaagctgcattgcatggcccatcgttctacagcaaaatcagcaaattggtcatctcagagttgaaag

SEQ ID NO: 95826 - DNA, 80 bp, synthetic construct
  source 1..80: mol_type = other DNA
gttacatggagagacattcccttacacggcctttgacaacaactgttacgccttttgttgttgggtcttggatctaaatg

SEQ ID NO: 95827 - DNA, 80 bp, synthetic construct
  source 1..80: mol_type = other DNA
aggatctgtggttttgggcacttgggaagaacaagatcttgatctcaaccaacctaccagattcacacctgtcggtttgt

SEQ ID NO: 95828 - DNA, 80 bp, synthetic construct
  source 1..80: mol_type = other DNA
tcttctttgactaggagctcttttaattcccagcccacctcctcttcttctcggactagcgaatgggtgcgtggtcaaaa

SEQ ID NO: 95829 - DNA, 80 bp, synthetic construct
  source 1..80: mol_type = other DNA
tgtgttcaacacccacagacaaccgcttttcgctcatctccgtcggagaggggagtcacaggtttagtgaaaagatgatt

SEQ ID NO: 95830 - DNA, 80 bp, synthetic construct
  source 1..80: mol_type = other DNA
ggcccattaaggacataataggaaaactaaggcccctaaacatactcaatatactagcttcctgcgactggactttcgcg

SEQ ID NO: 95831 - DNA, 80 bp, synthetic construct
  source 1..80: mol_type = other DNA
atgaacactcaaatcttggcactcattgcttgtatgctgattggagctaaaggagacaaaatatgtcttgggcaccatgc

SEQ ID NO: 95832 - DNA, 80 bp, synthetic construct
  source 1..80: mol_type = other DNA
tcccagagaacccaaaaccagaggcccctttccaaccagaggcccagaggagaggcctctttggagcaattgccggattc

SEQ ID NO: 95833 - DNA, 80 bp, synthetic construct
  source 1..80: mol_type = other DNA
acaatggtacatgtgcggttgtcatgactgacggatcagctaatagtcaggcctataccaggataatatattttcataaa

SEQ ID NO: 95834 - DNA, 80 bp, synthetic construct
  source 1..80: mol_type = other DNA
atataacaaatgaaataaaaaactgtacttttaacacgaccacagagataacaggtaagcagcaggggacctatgcactt

SEQ ID NO: 95835 - DNA, 80 bp, synthetic construct
  source 1..80: mol_type = other DNA
atctaggaagtcttgcacagtattaaggtttagaactaaaaaggagtgctattaatctgcttgataccacagcaataata

SEQ ID NO: 95836 - DNA, 80 bp, synthetic construct
  source 1..80: mol_type = other DNA
taaaaagtcttgcacagtattagggtttgaaactaaaaaaaagtgctattaatctgcttaataccacagcaataatagta

SEQ ID NO: 95837 - DNA, 80 bp, synthetic construct
  source 1..80: mol_type = other DNA
agtcttgcacagtattaaagtttagaactaaaaaggagtgctattaatctgcttgataccacagcaataatagtagctga

SEQ ID NO: 95838 - DNA, 80 bp, synthetic construct
  source 1..80: mol_type = other DNA
aagaagtcttgtgcaatattaaggtctaaagctaaaaaggagtgctattagtctgcttgataccatagcaataacagtag

SEQ ID NO: 95839 - DNA, 80 bp, synthetic construct
  source 1..80: mol_type = other DNA
ctgaaagaacagatagaattatagaatatatacaaagagtttttatagccatctgcaacagacaagaataagacaggatt

SEQ ID NO: 95840 - DNA, 80 bp, synthetic construct
  source 1..80: mol_type = other DNA
gaagaggtaagaagcccttaagtatctaagaagtcttgtgcaatattaaggtctagagctaaaaaagagtgctattagtc

SEQ ID NO: 95841 - DNA, 80 bp, synthetic construct
  source 1..80: mol_type = other DNA
tgcttgataccatagcaataacagtagctgaaagaacagataaaattatagaatatatacaaagagtttttatagccatc

SEQ ID NO: 95842 - DNA, 80 bp, synthetic construct
  source 1..80: mol_type = other DNA
tgcaacagacaagaataagacaggatttgaaagcagctttgctataaaataaagggcaagtggtcaaaacgcaccagagt

SEQ ID NO: 95843 - DNA, 80 bp, synthetic construct
  source 1..80: mol_type = other DNA
gaggtataagaaataatcagacagagacattcagacctaaaggaggcaatataaaagacaattagagcaatgaattatat

SEQ ID NO: 95844 - DNA, 80 bp, synthetic construct
  source 1..80: mol_type = other DNA
gtagctgaaagaacagataagattattgaagtaatacaaagattctgtagagctatccttaatatacctagcagaataag

SEQ ID NO: 95845 - DNA, 80 bp, synthetic construct
  source 1..80: mol_type = other DNA
ttagtaaaacacaataaaatattactttaaaaaaagtaaaaaagaaactacaagaacacttcaataaaacaatacaattc

SEQ ID NO: 95846 - DNA, 80 bp, synthetic construct
  source 1..80: mol_type = other DNA
aacagatcaatcagattagtcagcagattcttagcacttgcctaagacgacttgaagagcctatgccttttcagctacca

SEQ ID NO: 95847 - DNA, 80 bp, synthetic construct
  source 1..80: mol_type = other DNA
ccgcttaaaagacttcacattaattgtgacgagagtagtagaacttctaagacgcagcagtctcaaaagactacaaaaaa

SEQ ID NO: 95848 - DNA, 80 bp, synthetic construct
  source 1..80: mol_type = other DNA
aataccatagcaataacagtaactaaaagaacagataagattataaaatatatacaaaaagtttttatagccatctacaa

SEQ ID NO: 95849 - DNA, 80 bp, synthetic construct
  source 1..80: mol_type = other DNA
cagacaagaataagacaagatttaaaagcagctttgctataaaataaaaggcaagtggtcaaaacgcatcagaagtaaat

SEQ ID NO: 95850 - DNA, 80 bp, synthetic construct
  source 1..80: mol_type = other DNA
ggcctgctgtaaaagaaaaaataagacaaactaatccagcagcagaaaaagtaagagcagcgtctcaaaatttaaataag

SEQ ID NO: 95851 - DNA, 80 bp, synthetic construct
  source 1..80: mol_type = other DNA
agaataagacaagatttaaaagcagctttgctatagaatagaaggcaagtggtcaaaacgcatcagagttgaatggcctg

SEQ ID NO: 95852 - DNA, 80 bp, synthetic construct
  source 1..80: mol_type = other DNA
ctgtaagaaaaagaataagacaaactgatccagcagcagaaaaagtaagagcagcgtctcaagatttagataagcataag

SEQ ID NO: 95853 - DNA, 80 bp, synthetic construct
  source 1..80: mol_type = other DNA
tattaaggtctagagctaaaaaggagtgctattagtctgcttgataccatagcaataacagtagctgaaggaacagataa

SEQ ID NO: 95854 - DNA, 80 bp, synthetic construct
  source 1..80: mol_type = other DNA
ctgtgttgaagagggtcatgaaggttctgaacgctgcctttgaggcggtggatgactgggttgaatttaaaggctatgca

SEQ ID NO: 95855 - DNA, 80 bp, synthetic construct
  source 1..80: mol_type = other DNA
cttgcaaggagtattagtgcatcgaaaatcagtaggagttttctccttgtgttcaatatccttaaagatttgactttatt

SEQ ID NO: 95856 - DNA, 80 bp, synthetic construct
  source 1..80: mol_type = other DNA
caaatgaaacaaggatgcctgaaagggtggctagggtctagttttatcagtgtcaatgataggctggtttccctagagtc

SEQ ID NO: 95857 - DNA, 80 bp, synthetic construct
  source 1..80: mol_type = other DNA
aacaaaaagggatttggagaaatggattgaacggaggcagcaggctgaaaggtctagagttatgcagccctcccaatgtt

SEQ ID NO: 95858 - DNA, 80 bp, synthetic construct
  source 1..80: mol_type = other DNA
aactcatgttcagaatatgttcttgttgacacagcctttgtcaactctccaatggggcattgtgacatatgtccgcagta

SEQ ID NO: 95859 - DNA, 80 bp, synthetic construct
  source 1..80: mol_type = other DNA
gagtttttagttgacacaaaccaactaggacatgtgacacctgttgaaattgttgttgacgtggaaaagctgcagttcac

SEQ ID NO: 95860 - DNA, 80 bp, synthetic construct
  source 1..80: mol_type = other DNA
agtcccactagttgtaaataggggaggtctatgggaatgtggaaagaaattggcatcctttacgcctgtaatacaggatc

SEQ ID NO: 95861 - DNA, 80 bp, synthetic construct
  source 1..80: mol_type = other DNA
caagtagtggtaaattgagactaaggggcagaacatgtgaggagttgattgaaaaagacgagcgtattgaggatatcgag

SEQ ID NO: 95862 - DNA, 80 bp, synthetic construct
  source 1..80: mol_type = other DNA
atggaagaggatatagcctatgtaaaagacttaatctcaaagtacctggtggacaatgtgaaactctcaagacagaagtt

SEQ ID NO: 95863 - DNA, 80 bp, synthetic construct
  source 1..80: mol_type = other DNA
agtaaaaggggatgcacagcccctgggggaccagaatacaaaaggcctggagtttcgaggagattcctttccctccttac

SEQ ID NO: 95864 - DNA, 80 bp, synthetic construct
  source 1..80: mol_type = other DNA
ctgtattgaagagggtcatggaggtcttgagcactgcttttgaggtagtggatgactgggttgagtttaagggctatgca

SEQ ID NO: 95865 - DNA, 80 bp, synthetic construct
  source 1..80: mol_type = other DNA
ccagtggtggaaagttgaggttgaaaggcagaacatgtgaagagcttctcagggaagaagaacaggttgaagacatagaa

SEQ ID NO: 95866 - DNA, 80 bp, synthetic construct
  source 1..80: mol_type = other DNA
gttcgatgagtggacaaggcaaatatttagttcaagatgtggtggctatgtattctggtgcagtgaacccctgtgtattg

SEQ ID NO: 95867 - DNA, 80 bp, synthetic construct
  source 1..80: mol_type = other DNA
tgtctccacgctgagggctgtggtgtggattttgagtgcggttcttgaggcagtggacaactgggtggaattcaagggtt

SEQ ID NO: 95868 - DNA, 80 bp, synthetic construct
  source 1..80: mol_type = other DNA
aaccaagccaaaaactcagtggtggagagcagcccaagagctagtctgataccggatgccacgcaccttgggccacaatt

SEQ ID NO: 95869 - DNA, 80 bp, synthetic construct
  source 1..80: mol_type = other DNA
gccaaaccagaagtgggaagcagcccaagggctagtttgattccggatgccacgcaccttggaccgcagttctgcaagag

SEQ ID NO: 95870 - DNA, 80 bp, synthetic construct
  source 1..80: mol_type = other DNA
atggggaacaaacaaaccaaggacccaaaggcagaaagcagcccaagggccagtctgattccagatgccacgcaccttgg

SEQ ID NO: 95871 - DNA, 80 bp, synthetic construct
  source 1..80: mol_type = other DNA
tctactaatgtaaacatccctagtcctctgtgagagaagaccaagataaccaatgggggatggtcttgagaactgacagt

SEQ ID NO: 95872 - DNA, 80 bp, synthetic construct
  source 1..80: mol_type = other DNA
ctttgaccaacacaagcataattagtcacaagttctgtaatctgtcagatgctcacaagaagaatttatatgatcacaca

SEQ ID NO: 95873 - DNA, 80 bp, synthetic construct
  source 1..80: mol_type = other DNA
atcaatatgaaagaatgagttgtgactttaatgggggcaagatcagtgtgcaatacaatttaagccactcttatgctgga

SEQ ID NO: 95874 - DNA, 80 bp, synthetic construct
  source 1..80: mol_type = other DNA
acattgccacatgtggtctgattggcctgatcactttccttttgctctgtgggaggtcctgctcctctactatttacaaa

SEQ ID NO: 95875 - DNA, 80 bp, synthetic construct
  source 1..80: mol_type = other DNA
cttgaccaacatcagcttactcaaccacaagttctgcaacctttcagatgcccacaaggagaacttgtatgaccacgcac

SEQ ID NO: 95876 - DNA, 80 bp, synthetic construct
  source 1..80: mol_type = other DNA
gagggctgaacacactggtcctcagggctgtactgcccagagacatggtgtttagaacatcaacaccaaaagtcgtcctg

SEQ ID NO: 95877 - DNA, 80 bp, synthetic construct
  source 1..80: mol_type = other DNA
ctttgaacatctcaggctacaatttcagtctgggtgctgcagtaaaagcaggtgcctgcatgttagatggtggtaacatg

SEQ ID NO: 95878 - DNA, 80 bp, synthetic construct
  source 1..80: mol_type = other DNA
cctacattatagaagcacccatttctgataatggagcatgttacccagggcagttcgccgattatgaagagctaagggaa

SEQ ID NO: 95879 - DNA, 80 bp, synthetic construct
  source 1..80: mol_type = other DNA
ccctctaccacacggaaaatgcttatgtctctgtaatgtcttcacattatagcagaagattcaccccagaaatagccaaa

SEQ ID NO: 95880 - DNA, 80 bp, synthetic construct
  source 1..80: mol_type = other DNA
ttttctgtttgttgctgtacaatccgttcggatggaaattgcacttgtattcccatccctttgttttgggctttcggaaa

SEQ ID NO: 95881 - DNA, 80 bp, synthetic construct
  source 1..80: mol_type = other DNA
agaatgaaaatcaaagactgttttagaaaactccctgttaatcggcctattgattggaaagtatgtcaaagaattgtggg

SEQ ID NO: 95882 - DNA, 80 bp, synthetic construct
  source 1..80: mol_type = other DNA
gtaggtcctataaaaacgacaaagggaaagaagtccttatactatggggtgttcaccatccgcctgacatagagaaccaa

SEQ ID NO: 95883 - DNA, 80 bp, synthetic construct
  source 1..80: mol_type = other DNA
acctcaaatgcacatatggacggatgtgatacaaagtgtcaaacacctcaaggagctataaacagcagtcttccgtttca

SEQ ID NO: 95884 - DNA, 80 bp, synthetic construct
  source 1..80: mol_type = other DNA
cgaccgctggcacaaccagcacaaacagtgaaattcacaacaaagatgagaatccctcatcaaacatatttgccaacatg

SEQ ID NO: 95885 - DNA, 80 bp, synthetic construct
  source 1..80: mol_type = other DNA
gcggcattggtatggtcctcggtttcaccaaagagaaaattggtcggctgctgagctccgcggcatcatcccttagagca

SEQ ID NO: 95886 - DNA, 80 bp, synthetic construct
  source 1..80: mol_type = other DNA
tctacgcggactccccctcagttgacaaggcaaagagagactttccaggccagccagacatgtggaaggacgcctttaag

SEQ ID NO: 95887 - DNA, 80 bp, synthetic construct
  source 1..80: mol_type = other DNA
atgtcaaaaaggtaggggaccaaagggtccaggccaacaatgaactcaactccgcactcaatagactgcgcggagccaga

SEQ ID NO: 95888 - DNA, 80 bp, synthetic construct
  source 1..80: mol_type = other DNA
atcagatactatgtgaagtgctttcaagaaatggtctactcactcctccagattgctggtgcggcttttgtcacatcgag

SEQ ID NO: 95889 - DNA, 80 bp, synthetic construct
  source 1..80: mol_type = other DNA
tatcaacaagctgtgggcaaaaccaggaaaacaattggagacccccgcagaaccacccacccctccagctgaagaatgga

SEQ ID NO: 95890 - DNA, 80 bp, synthetic construct
  source 1..80: mol_type = other DNA
ctataacaccaatggatgcagtccaggaaggtaagaaaggcaaaaacaagagtggcaggggcaagaaacacactgctttc

SEQ ID NO: 95891 - DNA, 80 bp, synthetic construct
  source 1..80: mol_type = other DNA
tctccactgcagacatatctcctctgcacgacactgcgtacagtgtccctcccctggaccaaagggaaaaggtagacgca

SEQ ID NO: 95892 - DNA, 80 bp, synthetic construct
  source 1..80: mol_type = other DNA
gctggggtttctgggtttcctccaatctgtttatcacttccacacatgtcatcccacaaaacatgtccgaagcctttggt

SEQ ID NO: 95893 - DNA, 80 bp, synthetic construct
  source 1..80: mol_type = other DNA
agggaccagatggtgaggccaccctcgaggggggtgacaaccatgggacatactgtggtgcgcccatactagggccaggg

SEQ ID NO: 95894 - DNA, 80 bp, synthetic construct
  source 1..80: mol_type = other DNA
agggaccagatggtgaggccaccctcgagggtggtgacaaccatgggacatactgtggtgcgcccatactagggccagtg

SEQ ID NO: 95895 - DNA, 80 bp, synthetic construct
  source 1..80: mol_type = other DNA
cacaacaaagacatgtcttaggtgctgcacttgaaataatggtcaggtactcagccgagcccgaattggcacaaattgtg

SEQ ID NO: 95896 - DNA, 80 bp, synthetic construct
  source 1..80: mol_type = other DNA
acgaaacgatgatcccacactcccagagacctgtgcaattgatgtccctacttggtgaagcggccctacacggaccagct

SEQ ID NO: 95897 - DNA, 80 bp, synthetic construct
  source 1..80: mol_type = other DNA
attctcctggggaaatcctactaaatttggaattaggtcccgaactaaatccatacctggcacatctttctagaatgtat

SEQ ID NO: 95898 - DNA, 80 bp, synthetic construct
  source 1..80: mol_type = other DNA
ctgacactcttaagaagctccatggtgaaacctttccctacacagcattcgacaacaactgttactcattctgttgctgg

SEQ ID NO: 95899 - DNA, 80 bp, synthetic construct
  source 1..80: mol_type = other DNA
ggagttgcatggcacgactcagctccttcccacggcggtttgctcgttcaggggccggattaaccaaaaggtgagtggag

SEQ ID NO: 95900 - DNA, 80 bp, synthetic construct
  source 1..80: mol_type = other DNA
tggcccctactttccctggtgaacaacttcttttctttagatcccacatccctcttaaaggaggtgtggcagacccagtc

SEQ ID NO: 95901 - DNA, 80 bp, synthetic construct
  source 1..80: mol_type = other DNA
ggcttgccggtgacatagtcaccaatggcatcggttcactcgtgaatgccggggccaatgcaataaaccaaagagtagac

SEQ ID NO: 95902 - DNA, 80 bp, synthetic construct
  source 1..80: mol_type = other DNA
ttcgctcacctccgccggaggggggagtcacaagcttagtgaaaagatgatttttctttcttccctttgaaaatttctgt

SEQ ID NO: 95903 - DNA, 80 bp, synthetic construct
  source 1..80: mol_type = other DNA
tgttcactaggcccattaaagaccttataggtaagcttaaaccactaaacatcctcaacattgtcaccaactgcgactgg

SEQ ID NO: 95904 - DNA, 80 bp, synthetic construct
  source 1..80: mol_type = other DNA
accttccctggcgttgtggaatcaataatcctccttgcagaactctttggcatcttttggacaccaccagacatatctgc

SEQ ID NO: 95905 - DNA, 80 bp, synthetic construct
  source 1..80: mol_type = other DNA
tttcgttgcatccttattaggtgactatgaaatgcaaggtcctgaagatatcgcaaccgagattgttccagtcatccttg

SEQ ID NO: 95906 - DNA, 80 bp, synthetic construct
  source 1..80: mol_type = other DNA
gctctaggggcgagaccaaagcagtccgctcctggagccacatcaagcgataagaatgggaaaaccaccatcccctctat

SEQ ID NO: 95907 - DNA, 80 bp, synthetic construct
  source 1..80: mol_type = other DNA
caccatccccccaatacctcccccaccacctaatggggaggacattgtcgtcacgtacacaaaacaagacgacaaaatca

SEQ ID NO: 95908 - DNA, 80 bp, synthetic construct
  source 1..80: mol_type = other DNA
cccgggacttagccaagaggatggcgtccacactctcgggagaccagagagtgggccttgtaccaagaaacggcgtcgac

SEQ ID NO: 95909 - DNA, 80 bp, synthetic construct
  source 1..80: mol_type = other DNA
tttacaggggacagagctaccaatgtacaactttgaccaaaacaaagtggccgcattcaggaggctagcggccgacaaca

SEQ ID NO: 95910 - DNA, 80 bp, synthetic construct
  source 1..80: mol_type = other DNA
agtacggcctaatggaaaccttaaaggcgggcaacaagttgaaggaggtcaagaccctagaacacttcaaggaggctgtc

SEQ ID NO: 95911 - DNA, 80 bp, synthetic construct
  source 1..80: mol_type = other DNA
aaggacatccgcataaaaccatgcaggataatctacaattccaccgcttacgaattggagtcaagcgggactgggagagt

SEQ ID NO: 95912 - DNA, 80 bp, synthetic construct
  source 1..80: mol_type = other DNA
agtgggtgaccagaaggtgcaagccaataatgaactctactctgccctcaacaatctgcgcagagctaggatcaggtact

SEQ ID NO: 95913 - DNA, 80 bp, synthetic construct
  source 1..80: mol_type = other DNA
acattggcagactgtgggccaaaccggaaaagcaagtggaagcctctgtagagccccccccccctcctattgaagactgg

SEQ ID NO: 95914 - DNA, 80 bp, synthetic construct
  source 1..80: mol_type = other DNA
accataagcccaactgacacagtccaggaaggcaagaagggcaaaaacaagagcggtagaggcaagaaacataccgcctt

SEQ ID NO: 95915 - DNA, 80 bp, synthetic construct
  source 1..80: mol_type = other DNA
ccaaatccaagtccacaggagcggagagttctgcaaaatgaggttccccaaggccatcaggcctgatgtttctgggatga

SEQ ID NO: 95916 - DNA, 80 bp, synthetic construct
  source 1..80: mol_type = other DNA
aaatacagggaagaatgattggtggccaaatgggaatgctcctcacagggtccaacgccaaaaacatggatcttggcacc

SEQ ID NO: 95917 - DNA, 80 bp, synthetic construct
  source 1..80: mol_type = other DNA
caagaggggcaatgagtgggttgtgatcggggtacacaccgctgcggccagaggtggcaacacggtgatatgtgcaacac

SEQ ID NO: 95918 - DNA, 80 bp, synthetic construct
  source 1..80: mol_type = other DNA
caagaggggcaatgagtgggttgtgatcggggtacacaccgctgcggccagagggggcaacacggtgatatgtgcaacac

SEQ ID NO: 95919 - DNA, 80 bp, synthetic construct
  source 1..80: mol_type = other DNA
ggaaggatcctagagtcaagggtggcccatcactacagcaagtcatgagagaacaactcaagccattcactgccccgcgc

SEQ ID NO: 95920 - DNA, 80 bp, synthetic construct
  source 1..80: mol_type = other DNA
cacctaggccggcaatcttggaagctgcaaaggagaccatctgcaacgtgctcgagcaaaccatcgaaccacctcaaaaa

SEQ ID NO: 95921 - DNA, 80 bp, synthetic construct
  source 1..80: mol_type = other DNA
cagacaccctcaggaaactccatggggaatccttcccctacacagcatttgacaataactgttacatgttctgctgttgg

SEQ ID NO: 95922 - DNA, 80 bp, synthetic construct
  source 1..80: mol_type = other DNA
tggtcttacgcgcaagcctgcgcttccctggacaagaccacgtcaagtggctacccccatcataagaaaaagaatgacaa

SEQ ID NO: 95923 - DNA, 80 bp, synthetic construct
  source 1..80: mol_type = other DNA
gtggggctctgacctgggcacgatgattcgttgcgcaaggtcgtttggtggcctgatggatgagatgaaagctaactgtg

SEQ ID NO: 95924 - DNA, 80 bp, synthetic construct
  source 1..80: mol_type = other DNA
gtggggctctgacctgggcacgatgattcgttgcgcaaggtcgtttgggggcctgatggatgagatgaaagctaactgtg

SEQ ID NO: 95925 - DNA, 80 bp, synthetic construct
  source 1..80: mol_type = other DNA
atggagacgacgagatagtcagcacagacataaaattggacccacaaaaactgacagacaagctgaaagaatatggactg

SEQ ID NO: 95926 - DNA, 80 bp, synthetic construct
  source 1..80: mol_type = other DNA
gtcctggatcttaacgattcgtggctcaacaggaagttcgtgtcaaggactacaggattctacagaccctaccaggactg

SEQ ID NO: 95927 - DNA, 80 bp, synthetic construct
  source 1..80: mol_type = other DNA
gcagttaatgtctctccttggtgaagcttccctacacggccctgctttttacaagaaagttagcaaattggtcatcactg

SEQ ID NO: 95928 - DNA, 80 bp, synthetic construct
  source 1..80: mol_type = other DNA
ggaggagcaatcgctgcccctctaactggacaaacaaatttcattgatccctggattagaaataattatgtgcaggcacc

SEQ ID NO: 95929 - DNA, 80 bp, synthetic construct
  source 1..80: mol_type = other DNA
ccgagctcaaccctttcttggcccatttgtctaggatgtataatggttttgctggcggcattgaggttcaggtcatcatg

SEQ ID NO: 95930 - DNA, 80 bp, synthetic construct
  source 1..80: mol_type = other DNA
gcgggcaacgccttcaccgctggtaagatcatctttgcagcagtgcctcccaattttcccacagaaaatcttagccctcc

SEQ ID NO: 95931 - DNA, 80 bp, synthetic construct
  source 1..80: mol_type = other DNA
gaacaggaagcccctgcccaccatggatgaaggcaaacttaagaaggtagccaatgtgctactgtgtggtctatccagct

SEQ ID NO: 95932 - DNA, 80 bp, synthetic construct
  source 1..80: mol_type = other DNA
acaaatcaccatgtttccccacgtcataatagatgtgagaaccctcgagcctgtcaacattcccttgcctgatgttagaa

SEQ ID NO: 95933 - DNA, 80 bp, synthetic construct
  source 1..80: mol_type = other DNA
ataatttcttccattatagccaaaataatgagccccgcatgagattgttagcaatgttgtataccccactcagatcaaat

SEQ ID NO: 95934 - DNA, 80 bp, synthetic construct
  source 1..80: mol_type = other DNA
ggttctgcagaagatgttttcactgtgtcgtgtagggtcctcaccaaaccctcaccagattttgaattcaactacttggt

SEQ ID NO: 95935 - DNA, 80 bp, synthetic construct
  source 1..80: mol_type = other DNA
gatttcctgcacaccagccccactgagaacatcgttgttcagccgcaaaacggcaggtgcacgctggatggtgaactgca

SEQ ID NO: 95936 - DNA, 80 bp, synthetic construct
  source 1..80: mol_type = other DNA
gggcaccactcaattggtcacttctaacatctgtgccttcagagggtccatctcaggacatgagaatgcaggagataacc

SEQ ID NO: 95937 - DNA, 80 bp, synthetic construct
  source 1..80: mol_type = other DNA
accaatggcattttaatatcaccaaccccaatggcactccgtttgaccccacagaggatgtgcctgctccacttggaacc

SEQ ID NO: 95938 - DNA, 80 bp, synthetic construct
  source 1..80: mol_type = other DNA
ccagatttcacaggccagctctatggagtcatttctcaacggaacagggaggggactcctggtgaaaacaaccagaaggc

SEQ ID NO: 95939 - DNA, 80 bp, synthetic construct
  source 1..80: mol_type = other DNA
caacaggtcccatgagggagtgatctcaacactcgcaccaagatttacaccaaagctggggtcggtcatgattggcacat

SEQ ID NO: 95940 - DNA, 80 bp, synthetic construct
  source 1..80: mol_type = other DNA
ggaccaccaatgacattgaaaaccaaccctccagattcgctccaattggcttaaatgatgatgacaattacaaccagtgg

SEQ ID NO: 95941 - DNA, 80 bp, synthetic construct
  source 1..80: mol_type = other DNA
caattgccaaactactccggggcactcactctcaacatggggttggcctcgtctgttttccctacttaccctggtgaaca

SEQ ID NO: 95942 - DNA, 80 bp, synthetic construct
  source 1..80: mol_type = other DNA
gcttcttttcttccgctcatacatcccaatgaaggggggatatggcagcccattcatcgactgccttataccccaagagt

SEQ ID NO: 95943 - DNA, 80 bp, synthetic construct
  source 1..80: mol_type = other DNA
gggtctcccatttctatcaagaatcagcaccctcacagacagatgtggctctgatcaggtatgtcaaccccgacacagga

SEQ ID NO: 95944 - DNA, 80 bp, synthetic construct
  source 1..80: mol_type = other DNA
tgctaatggttatttcagatttgattcttgggttaatcagttttactctctcgcccccatgggaactgggaatgggcgca

SEQ ID NO: 95945 - DNA, 80 bp, synthetic construct
  source 1..80: mol_type = other DNA
gagatgttacaagcacaagttgaggccacaagaaaactgcaggccgaaatgattgccatcaaacaaggggttttgaccgc

SEQ ID NO: 95946 - DNA, 80 bp, synthetic construct
  source 1..80: mol_type = other DNA
aggcggcttttccccttctgatgcggcccgtggggcaattaacgcccctatgacaaaagtcttagattggaatgggacaa

SEQ ID NO: 95947 - DNA, 80 bp, synthetic construct
  source 1..80: mol_type = other DNA
gatactgggcccccaacgccacctctacaacctctatgtcaggtggcttcacgggtcaaaccgtgcacaggcccacacca

SEQ ID NO: 95948 - DNA, 80 bp, synthetic construct
  source 1..80: mol_type = other DNA
aatttcaaaacaaaccaggcgcccaaatctatacccagtagtggatcctcagtaaggtcaaacacgacccaactttctag

SEQ ID NO: 95949 - DNA, 80 bp, synthetic construct
  source 1..80: mol_type = other DNA
tctgagttcacattcctctgggtcttcccgatccagcgggtccacaactgtcagctccctaccatcatccagtaggacta

SEQ ID NO: 95950 - DNA, 80 bp, synthetic construct
  source 1..80: mol_type = other DNA
gggactgggttgatcagcaaaatctcaatttggaaccacatatgcctggatccctcagaacagcttttgtcactccacca

SEQ ID NO: 95951 - DNA, 80 bp, synthetic construct
  source 1..80: mol_type = other DNA
tttgcacaccttcggagaaggggggagtcaaatgtttagtgaaaagattagtttaaatttgatttaatttggatttaaag

SEQ ID NO: 95952 - DNA, 80 bp, synthetic construct
  source 1..80: mol_type = other DNA
cgaccgctggcaaaaccagctcaaacagtgaaattcacaacgatgacgccacaccagcgtcaaacatcttcgccaacatg

SEQ ID NO: 95953 - DNA, 80 bp, synthetic construct
  source 1..80: mol_type = other DNA
gtggcattggaatggtcctcggcttcacaagggaaaagatagggcgtatactgagttctgccgcctcatcactcagagca

SEQ ID NO: 95954 - DNA, 80 bp, synthetic construct
  source 1..80: mol_type = other DNA
tgcagggagattggcaactacggtatagaggtggtgaagctcgtgatgaagtggttcttcccttccaagaacgaggcgag

SEQ ID NO: 95955 - DNA, 80 bp, synthetic construct
  source 1..80: mol_type = other DNA
cgagatggacatggtcagagcaatagaggatgcagtgcttgatttcgaagccattgaaaacaaccacatgacatctctgc

SEQ ID NO: 95956 - DNA, 80 bp, synthetic construct
  source 1..80: mol_type = other DNA
tctgcctctccagacattgttggaaccataaatgcactcctagccagaattgcagctgccagatccctcgtccaccgcgc

SEQ ID NO: 95957 - DNA, 80 bp, synthetic construct
  source 1..80: mol_type = other DNA
caaagaagagatgtcatccaggatgcgtcctgttgtcatcatgatctctgggcggccagggatagggaaaacacacttgg

SEQ ID NO: 95958 - DNA, 80 bp, synthetic construct
  source 1..80: mol_type = other DNA
cttggcacgcgacctggctaagaagatggcagcaaccctcgctggtgatcaaagggttggccttgtcccgagaaatggtg

SEQ ID NO: 95959 - DNA, 80 bp, synthetic construct
  source 1..80: mol_type = other DNA
gagaaccctccctccaataccacccccaccacccaatggtgaggatattgtcatcaagtacaccaaacagggtgaccttg

SEQ ID NO: 95960 - DNA, 80 bp, synthetic construct
  source 1..80: mol_type = other DNA
tacaggggcctgaactcccagtctataactttgaccagaacaaagtggcgtcgttcaggcgactcgccgccgacaacaag

SEQ ID NO: 95961 - DNA, 80 bp, synthetic construct
  source 1..80: mol_type = other DNA
tatggccttatggaaaccatcaaagctggcaataaactaaaagaggtcaagacactggaacagttcaaggaggctgtgaa

SEQ ID NO: 95962 - DNA, 80 bp, synthetic construct
  source 1..80: mol_type = other DNA
aaacatacggataaacccctgcagaataatctacaactccatagcttatgacttggactcgaatggagcaggcaaagtca

SEQ ID NO: 95963 - DNA, 80 bp, synthetic construct
  source 1..80: mol_type = other DNA
aggtgggcgacaccaagatccagacgagcaatgagctcatctccgcactcaccaacttacgcggcgccagaattagatac

SEQ ID NO: 95964 - DNA, 80 bp, synthetic construct
  source 1..80: mol_type = other DNA
tatgtgaagtgcttccaagaaatgatctactcacttctacagatcgctggcgcagcgtttgtgacgacgcggatggccaa

SEQ ID NO: 95965 - DNA, 80 bp, synthetic construct
  source 1..80: mol_type = other DNA
tggagggggtccccgcggtttccaccgtggagatcccccctacactggacaccgcatatagtgtcccccccttagaccag

SEQ ID NO: 95966 - DNA, 80 bp, synthetic construct
  source 1..80: mol_type = other DNA
tggaggtggtccccgcggtttccaccgtggagatcccccctacactggacaccgcatatagtgtcccccccttagaccag

SEQ ID NO: 95967 - DNA, 80 bp, synthetic construct
  source 1..80: mol_type = other DNA
aagaataaacatcaacaagatctggtccaagcctgaggaaaagccgattgtcagcccaggacccccagcgcctccagaag

SEQ ID NO: 95968 - DNA, 80 bp, synthetic construct
  source 1..80: mol_type = other DNA
aacactggaccatcgccccaagcgacacgattcaggagggcaagaagggcaagaacaagagtggcagaggcaagaaacac

SEQ ID NO: 95969 - DNA, 80 bp, synthetic construct
  source 1..80: mol_type = other DNA
tctttcgtcctaccagaaaacagcgcaaggaggaaagggccaccctagggttagtgacaggcagtgaaattaggaagagg

SEQ ID NO: 95970 - DNA, 80 bp, synthetic construct
  source 1..80: mol_type = other DNA
gctggggtttctgggtgtcatctaacctatttataacctccacacacgtgatccccccaaacatatcagaagcatttggt

SEQ ID NO: 95971 - DNA, 80 bp, synthetic construct
  source 1..80: mol_type = other DNA
gtcccaatcaatcagatacaggttcacaggtgtggcgagttctgcaagatgaggtttcccaaggccatcaggcctgatgt

SEQ ID NO: 95972 - DNA, 80 bp, synthetic construct
  source 1..80: mol_type = other DNA
agggagaagcttgatgccaaagagccgctaacaggctcaataattgaaatgtgggatggagagatttaccattatgggct

SEQ ID NO: 95973 - DNA, 80 bp, synthetic construct
  source 1..80: mol_type = other DNA
attcaagggagaatgattggaggtcaaatgggtatgctccttacaggttccaatgctaagaacatggaccttggcaccgt

SEQ ID NO: 95974 - DNA, 80 bp, synthetic construct
  source 1..80: mol_type = other DNA
caagagaggaaatgattgggttgtgatcggagtccacactgccgccgccagaggaggcaacacagtaatctgtgccaccc

SEQ ID NO: 95975 - DNA, 80 bp, synthetic construct
  source 1..80: mol_type = other DNA
agggtccagatgaggaggctacactggaagggagtgataaccatggcacctactgtggggcgccaatactgggacccggt

SEQ ID NO: 95976 - DNA, 80 bp, synthetic construct
  source 1..80: mol_type = other DNA
agggtccagatggggaggctacactggaagggggtgataaccatggcacctactgtggggcgccaatactgggacccggt

SEQ ID NO: 95977 - DNA, 80 bp, synthetic construct
  source 1..80: mol_type = other DNA
caaggagaccatatgtggtgtgcttgaacagaccattgacccaccccaacagtggtcctacgcgcaggcctgctcctcac

SEQ ID NO: 95978 - DNA, 80 bp, synthetic construct
  source 1..80: mol_type = other DNA
ttatgtggagcgaggcttgattctcggcgtgcacaagccacctgcagcaattagcttcgcccgcattgagttgacccctc

SEQ ID NO: 95979 - DNA, 80 bp, synthetic construct
  source 1..80: mol_type = other DNA
gtggggatcagacttgggaaccatgattcggtgtgcaagatcttttggtgggcttatggatgaaatgaaggcaaactgtg

SEQ ID NO: 95980 - DNA, 80 bp, synthetic construct
  source 1..80: mol_type = other DNA
ggaactcaataacccattggctgctgaccctgtgcgcaatgtcagaagtatctggattgtcaccagacgttgtgcaagca

SEQ ID NO: 95981 - DNA, 80 bp, synthetic construct
  source 1..80: mol_type = other DNA
acggggatgatgagatagtcagcacagacattaaattggatgccttcaaattaacagaaaaactcaaagagtatgggctg

SEQ ID NO: 95982 - DNA, 80 bp, synthetic construct
  source 1..80: mol_type = other DNA
atcccaaccaggccagacaagacagaaggaccactagtgataaaagagaaactagaggggttgactttcctgaggaggga

SEQ ID NO: 95983 - DNA, 80 bp, synthetic construct
  source 1..80: mol_type = other DNA
tgtgtgtagggacccagctggatggtatggcaagcttgaccagtcatcaatcataaggcaactgtattggaccaaaggac

SEQ ID NO: 95984 - DNA, 80 bp, synthetic construct
  source 1..80: mol_type = other DNA
tctctctttattggagagctgtctacacaccaccctacctagtggacccacaaaacctgaagaaactccatggcgagtcc

SEQ ID NO: 95985 - DNA, 80 bp, synthetic construct
  source 1..80: mol_type = other DNA
gtcacttcttggtgaggcggctctccacggaccgtccttttacaagaaggtgagcaaattggttatcacagagctaaaag

SEQ ID NO: 95986 - DNA, 80 bp, synthetic construct
  source 1..80: mol_type = other DNA
agccagtagcaggaggggcaattgctgctcccctgactgggcaaacaaatttcattgatccctggattagaaacaactat

SEQ ID NO: 95987 - DNA, 80 bp, synthetic construct
  source 1..80: mol_type = other DNA
agttcacagtgtcccctagaaactcccctggtgaaattttactcaatttggaactaggccctgagctcaaccctttcttg

SEQ ID NO: 95988 - DNA, 80 bp, synthetic construct
  source 1..80: mol_type = other DNA
gcccacctgtctaggatgtacaacgggtttgctggtggcattgaggttcaagtcatcatggcgggcaacgccttcactgc

SEQ ID NO: 95989 - DNA, 80 bp, synthetic construct
  source 1..80: mol_type = other DNA
tgttcccacacattataatagatgtaagaacccttgaacctgtaaatatcccactacccgatgtcaggaatagtttcttc

SEQ ID NO: 95990 - DNA, 80 bp, synthetic construct
  source 1..80: mol_type = other DNA
cattacagccaaaataatgagccccgtatgagactattagctatgttgtatacccctctcagatcaaatggttctgcaga

SEQ ID NO: 95991 - DNA, 80 bp, synthetic construct
  source 1..80: mol_type = other DNA
ttcccttacaccgcatttgacaacaactgctactccttctgctgttgggttttggacttgaatgattcatggttcaacag

SEQ ID NO: 95992 - DNA, 80 bp, synthetic construct
  source 1..80: mol_type = other DNA
tgatgtcttcacagtttcttgtagggtccttaccaagccttcccctgattttgagttcaattatttggtccccccaactg

SEQ ID NO: 95993 - DNA, 80 bp, synthetic construct
  source 1..80: mol_type = other DNA
ttgagtctaggacaaagcccttcacaataccaatacttacgattggagaaatgacaaactcaaggttccccgtggccatt

SEQ ID NO: 95994 - DNA, 80 bp, synthetic construct
  source 1..80: mol_type = other DNA
gacatgctacacaccagtcctactgagaacattgttgtccaaccacaaaatggcagatgcactctggacggtgagttgca

SEQ ID NO: 95995 - DNA, 80 bp, synthetic construct
  source 1..80: mol_type = other DNA
agggggtccatccatgatcaccagaccaatggagacgaacatcagtggcatttcaacatcactaaccccaatggcactcc

SEQ ID NO: 95996 - DNA, 80 bp, synthetic construct
  source 1..80: mol_type = other DNA
gtttgaccccactgaggacgtgcccgctccacttgggaccccggacttcaagggacaactctacggagtcatctctcaaa

SEQ ID NO: 95997 - DNA, 80 bp, synthetic construct
  source 1..80: mol_type = other DNA
gagaccgagagggaactcctggtgaaaacaaccagaaggctaacaggtcccatgaaggggtgatctcaacagttgcgcca

SEQ ID NO: 95998 - DNA, 80 bp, synthetic construct
  source 1..80: mol_type = other DNA
aggttcacaccaaagttagggtcagtcatgatcggcacttggactactgatgatataagaaatcaaccctccagattcac

SEQ ID NO: 95999 - DNA, 80 bp, synthetic construct
  source 1..80: mol_type = other DNA
cccagttggtttgaatgatgatgataattataggcagtgggaactaccaaattattctggagcactcacccttaacatgg

SEQ ID NO: 96000 - DNA, 80 bp, synthetic construct
  source 1..80: mol_type = other DNA
tcttttcttccgctcctacatgccaatgaagggaggatatggcagtccatacatcgattgccttatacctcaagaatgga

SEQ ID NO: 96001 - DNA, 80 bp, synthetic construct
  source 1..80: mol_type = other DNA
aaaacatgtgtcaaggactacggggttttacagaccctatcaggagtggaatagaaaaccaatgcccaccatggatgaag

SEQ ID NO: 96002 - DNA, 80 bp, synthetic construct
  source 1..80: mol_type = other DNA
tttctcatttctatcaggaatcagcaccctcccaaactgatgtggctttgattaggtatgtgaaccccgacacaggacga

SEQ ID NO: 96003 - DNA, 80 bp, synthetic construct
  source 1..80: mol_type = other DNA
gtcctgttcgaggccaaattacacagacaaggattcatcaccgttgccaagactggtgacagccccatcaatgtacctgc

SEQ ID NO: 96004 - DNA, 80 bp, synthetic construct
  source 1..80: mol_type = other DNA
caggggctaatgcaattaatcagaaagttgattttgaaaacaataaatatttacaaaatgcatcatttgctcatgataag

SEQ ID NO: 96005 - DNA, 80 bp, synthetic construct
  source 1..80: mol_type = other DNA
gagatgttgaaggcacaaattgaggcaacaaaacaactgcaggctgacatgattgcaatcaagcaaggggttctgaccgc

SEQ ID NO: 96006 - DNA, 80 bp, synthetic construct
  source 1..80: mol_type = other DNA
tggcggcttttcccccactgatgctgcacgtggggccataaatgcccccatgacaaaagttttggattggaatggaacaa

SEQ ID NO: 96007 - DNA, 80 bp, synthetic construct
  source 1..80: mol_type = other DNA
accaaatgccacctccacaacctcaatgtcgggtggcttcacaggacaagttgtgcacagaaccacgccaaattttaaaa

SEQ ID NO: 96008 - DNA, 80 bp, synthetic construct
  source 1..80: mol_type = other DNA
cgagccaggcccccaaatcaacacccagtagtgggtcctcagtcaggtcaaactctacccagcttactagtctgagctca

SEQ ID NO: 96009 - DNA, 80 bp, synthetic construct
  source 1..80: mol_type = other DNA
cactcctctggatcatctcgttccagtggatccacagctgtcagctctctaccatcctccaataggactagggaatgggt

SEQ ID NO: 96010 - DNA, 80 bp, synthetic construct
  source 1..80: mol_type = other DNA
gaaaacttaagaaagtggccaatgtgttcttgtgtgccatctctggccttttcaccaggccaatcaaggacatcataggg

SEQ ID NO: 96011 - DNA, 80 bp, synthetic construct
  source 1..80: mol_type = other DNA
actgttggcttgaagaaagccttgggggcacggcctaaacagcctacccccagggccccttctcctcctaaggagaagaa

SEQ ID NO: 96012 - DNA, 80 bp, synthetic construct
  source 1..80: mol_type = other DNA
acattccctggtgtcgtggaatccctcatattgcttgctgaattatttggggtcttctggacaccgccagacatctccgc

SEQ ID NO: 96013 - DNA, 80 bp, synthetic construct
  source 1..80: mol_type = other DNA
tttcgtggcatccctcttgggtgattacgaaatgcaggggcctgaagatatagccactgagatcgtgccagtcatcctcg

SEQ ID NO: 96014 - DNA, 80 bp, synthetic construct
  source 1..80: mol_type = other DNA
cacattgaaagcaaacttcagtgtgatttttgaccaattagaaaccctaatactactcagagctttcacagaagaaggag

SEQ ID NO: 96015 - DNA, 80 bp, synthetic construct
  source 1..80: mol_type = other DNA
tgggcactataaacgccctgctggctaggatcgctgccgcgcgttccctagttcatagggccaaggaggagctctccagc

SEQ ID NO: 96016 - DNA, 80 bp, synthetic construct
  source 1..80: mol_type = other DNA
aattgcctcgacactcacaggagaccaaagggttggtcttatcccacggaatggagttgaccattgggacgcctacaaag

SEQ ID NO: 96017 - DNA, 80 bp, synthetic construct
  source 1..80: mol_type = other DNA
aactcgccgctgaaaacaagtacggtctggtagacacgatgagggtgggcaaccagctcagaaatgtcacgaccatggat

SEQ ID NO: 96018 - DNA, 80 bp, synthetic construct
  source 1..80: mol_type = other DNA
gaactcaagaaggctatcaagaacatcataatcagaaagtgccagatagtctatggtggcaacacttacacgcttgagtc

SEQ ID NO: 96019 - DNA, 80 bp, synthetic construct
  source 1..80: mol_type = other DNA
tgacggcaagggcaaggttgtagttgagagggtgcagagcgccagcgtgcaaatcaacaatgagatcgctggtgcagtac

SEQ ID NO: 96020 - DNA, 80 bp, synthetic construct
  source 1..80: mol_type = other DNA
accatcttagatgtgccagaataaggtattatgtcaagtgtgtccaagaggccatatactcactcctccagattgccggc

SEQ ID NO: 96021 - DNA, 80 bp, synthetic construct
  source 1..80: mol_type = other DNA
acggtgtttgtcacttcacgcatcgtaagccgcatgaacatccaaaatctgtggtctaggccactatctgaagatgcaga

SEQ ID NO: 96022 - DNA, 80 bp, synthetic construct
  source 1..80: mol_type = other DNA
tgaagccaccataaaagaggggtgccctaaacctagagatgaagaagaattcatcgtctcctcagatgatattaagccag

SEQ ID NO: 96023 - DNA, 80 bp, synthetic construct
  source 1..80: mol_type = other DNA
agggcaagaaaggcaaaaacaagagtggccggggcaagaaacacacggcattctcaagtaaagggctcagtgatgaggag

SEQ ID NO: 96024 - DNA, 80 bp, synthetic construct
  source 1..80: mol_type = other DNA
aggttaagattcgtcagaggatcttcaggccaacaagaaagcaacgcaaggaagaaagagccaaccttggcctcgttacc

SEQ ID NO: 96025 - DNA, 80 bp, synthetic construct
  source 1..80: mol_type = other DNA
acgctaaggaaccgttaactggggctattctggaaatgtgggatggggagatttatcattatggactgtatgtggaaaaa

SEQ ID NO: 96026 - DNA, 80 bp, synthetic construct
  source 1..80: mol_type = other DNA
tctctgcaacaagtcatgcgagaccaactgaagccattcaccgaaccccgtggcaagccaccaaaaccaagtgtccttga

SEQ ID NO: 96027 - DNA, 80 bp, synthetic construct
  source 1..80: mol_type = other DNA
gaggttactttggggctctgacttggccaccatggtgaggtgtgcgcgctcctttggcggcttgatggacgaactcaagg

SEQ ID NO: 96028 - DNA, 80 bp, synthetic construct
  source 1..80: mol_type = other DNA
cccactgtgtgacactcccgataagggttggcatgaatatgaatgaagatggaccaatagtctttgagaaacattccaga

SEQ ID NO: 96029 - DNA, 80 bp, synthetic construct
  source 1..80: mol_type = other DNA
ctgagggccccttgattattagcgaggatctgaatggcctgaccttcctgaggagaactgtcacccgcgaccctgcagga

SEQ ID NO: 96030 - DNA, 80 bp, synthetic construct
  source 1..80: mol_type = other DNA
aagtggaattaacacccctctcactgtattggaggcctgtgtacacgcctcagtacctcatatctcctgataccttgagg

SEQ ID NO: 96031 - DNA, 80 bp, synthetic construct
  source 1..80: mol_type = other DNA
aaactccacggtgagttatttccctatacagcctttgaaaacaactgttatgccttctgttgttgggttttggacctcaa

SEQ ID NO: 96032 - DNA, 80 bp, synthetic construct
  source 1..80: mol_type = other DNA
atgactcaaaattgaagaaggtcgcaaacatcgttctgtgtgcattgtcatcattgttcactaggcccattaaggatata

SEQ ID NO: 96033 - DNA, 80 bp, synthetic construct
  source 1..80: mol_type = other DNA
atcggcaaacttaaaccccttaacaccctaaatattctggcctcatgcgattggaccttcgctggcatagtagaatcact

SEQ ID NO: 96034 - DNA, 80 bp, synthetic construct
  source 1..80: mol_type = other DNA
ccgaattcttaaggaagaataagatatattttatgcagaggcaagaagtactggataagaaccatgtggttgatattgac

SEQ ID NO: 96035 - DNA, 80 bp, synthetic construct
  source 1..80: mol_type = other DNA
aaggccttatatatgttgtcaacacgtggaagacaaactgttaaggagaataaagggacccgtattaggtttaaggatga

SEQ ID NO: 96036 - DNA, 80 bp, synthetic construct
  source 1..80: mol_type = other DNA
tcttgaaggccttatatatgttgtcaacccgcgggagacaaactgtgaaggagaacaaagggactcgcattcgatttaaa

SEQ ID NO: 96037 - DNA, 80 bp, synthetic construct
  source 1..80: mol_type = other DNA
agtgtatggatagtgtgaggggtgggacttatgactatccaaagtattccgaagaatcaaaattaaacagggagaaaatt

SEQ ID NO: 96038 - DNA, 80 bp, synthetic construct
  source 1..80: mol_type = other DNA
tcctatacaaacaaaaaggagaaagaaatccttgtactgtggggtgttcctcatccatctaacatggaagaccaaagggc

SEQ ID NO: 96039 - DNA, 80 bp, synthetic construct
  source 1..80: mol_type = other DNA
acagcacatgcaccactgggtgaatgctgtgcaaaatgtcaaacacctccaggggctatgaacgttactcttcccttcca

SEQ ID NO: 96040 - DNA, 80 bp, synthetic construct
  source 1..80: mol_type = other DNA
caccgtaccccccctatccataggtgagtgtgcaacttttgtcagatttactgaattaaggagggttacaatgctaagga

SEQ ID NO: 96041 - DNA, 80 bp, synthetic construct
  source 1..80: mol_type = other DNA
tagcggaagcagcatctccttttgtggcgtaaatagtgaaacagcaagctggtcatggccggacggatctgatctgccat

SEQ ID NO: 96042 - DNA, 80 bp, synthetic construct
  source 1..80: mol_type = other DNA
ttacatatgtaaataatacatgggtgaatcgaacttatgtgaacattagcaataccaacattgctactatacaggatatg

SEQ ID NO: 96043 - DNA, 80 bp, synthetic construct
  source 1..80: mol_type = other DNA
aagtatagtctcattatggattagccattcaattcagaccggatgggaaaaccacaccgagatgtgcaaccaaagtgtca

SEQ ID NO: 96044 - DNA, 80 bp, synthetic construct
  source 1..80: mol_type = other DNA
aaaacaaaaagatggggttattccctaaacttcatgggctacataattggaagttggggaactttgccacaggatcatat

SEQ ID NO: 96045 - DNA, 80 bp, synthetic construct
  source 1..80: mol_type = other DNA
acattttatgggttatgtcattggtagttggggatcattaccccaagatcacattgtacacaaaatcaaggaatgctttc

SEQ ID NO: 96046 - DNA, 80 bp, synthetic construct
  source 1..80: mol_type = other DNA
gaaaaactgctctttcaatgttaccacgaagatagcaaatatggtgaataatgaacgtgatgtatttgatgtagttgata

SEQ ID NO: 96047 - DNA, 80 bp, synthetic construct
  source 1..80: mol_type = other DNA
acttaagcttcaaatacacagcattgggggtgagtatgccaatcaacgaactatttgatagatcgtacctctgggtggtt

SEQ ID NO: 96048 - DNA, 80 bp, synthetic construct
  source 1..80: mol_type = other DNA
cgccatccggccacgtataaggacctgatcgccctctctgctcaagcagcagggagaatcatagtatctaccaagagaaa

SEQ ID NO: 96049 - DNA, 80 bp, synthetic construct
  source 1..80: mol_type = other DNA
ccaacaagctgtgattccaaatatcgggtctagacccagagtaagggatatccctagcagaataagcatctattggacaa

SEQ ID NO: 96050 - DNA, 80 bp, synthetic construct
  source 1..80: mol_type = other DNA
cttacggaacgccagtggcgctagcaggcaattcttctctctgtcccattagtgggtgggctatatacagcaaggacaat

SEQ ID NO: 96051 - DNA, 80 bp, synthetic construct
  source 1..80: mol_type = other DNA
tagggatggtactagggactcctgtgtgtgaactacatcttactggaacatgggacactttaatagagagagacaattct

SEQ ID NO: 96052 - DNA, 80 bp, synthetic construct
  source 1..80: mol_type = other DNA
agtgggacaagcaaatcgtgttcagattcattctataggaacatgaggtggctaactcaaaagaatgggttgtatccagt

SEQ ID NO: 96053 - DNA, 80 bp, synthetic construct
  source 1..80: mol_type = other DNA
atactttcattaatcatgaagaccgtcattgctctaagctacattttctgtctggctttcggccaggacctcccggggaa

SEQ ID NO: 96054 - DNA, 80 bp, synthetic construct
  source 1..80: mol_type = other DNA
aaagaatacaatgaaacaataagaattgagaaggtgacacaatggcacaatactagtgtcattgagtatatagagagacc

SEQ ID NO: 96055 - DNA, 80 bp, synthetic construct
  source 1..80: mol_type = other DNA
tacatatagttagcataacagtgacagttctggttctccccgggaatgaagataataggaactgcagtgaagtaatcatt

SEQ ID NO: 96056 - DNA, 80 bp, synthetic construct
  source 1..80: mol_type = other DNA
aataggggacatgattctacgaacttcaattggtcaagtatcgaggccaatgtttctgtatgttagaaccaatggaacct

SEQ ID NO: 96057 - DNA, 80 bp, synthetic construct
  source 1..80: mol_type = other DNA
atgggcctgccagaaaggcaacattaggtgcaacatttgcatctgatttattggtaattaaaaacacccttgtttctact

SEQ ID NO: 96058 - DNA, 80 bp, synthetic construct
  source 1..80: mol_type = other DNA
gaatggtttgacgctggtggtttgggcccttgcacaatgcctccaacatatgaacgggtcagggacgacagtccacctgg

SEQ ID NO: 96059 - DNA, 80 bp, synthetic construct
  source 1..80: mol_type = other DNA
tatgggggctattgcctctatgaggatacagggtcgccttgttcatggccaatcaggtatgctattgacaggagcgaatg

SEQ ID NO: 96060 - DNA, 80 bp, synthetic construct
  source 1..80: mol_type = other DNA
tctaaacagaaacaaatccaatcatctggtattagtaatccaaattattctccttcttccatctctcgaaccactagttg

SEQ ID NO: 96061 - DNA, 80 bp, synthetic construct
  source 1..80: mol_type = other DNA
cacaaaattcatcaagatttgggaatttatccccataccacacagaggccctcaatacagtgtggttgaccccacctggt

SEQ ID NO: 96062 - DNA, 80 bp, synthetic construct
  source 1..80: mol_type = other DNA
tgaacaggttaaatggtccgcacgtgatggagttaacattggagtggaacgcctcacgacagtgagtgggcctgagtgga

SEQ ID NO: 96063 - DNA, 80 bp, synthetic construct
  source 1..80: mol_type = other DNA
tcaatcagagcgaatgcaccaactcttcgaaaaatcatgtagtgcattgcgactcggtcatgatagagaggaacataaca

SEQ ID NO: 96064 - DNA, 80 bp, synthetic construct
  source 1..80: mol_type = other DNA
ctatcctttctatgaagttaaatgtctctctagcacatgtttcctatagtatggatcacagtaaatggggaccaatgatg

SEQ ID NO: 96065 - DNA, 80 bp, synthetic construct
  source 1..80: mol_type = other DNA
aagttagctgtcagaccagttgacgatatagatatgtcgaaagaatttaatcagaaaaatatcagaacgctagatgagtg

SEQ ID NO: 96066 - DNA, 80 bp, synthetic construct
  source 1..80: mol_type = other DNA
ccaatccccaagacatcagaatacaggaactggtcaaaaccacaatgtcaaattacagggtttgctcctttctccaagga

SEQ ID NO: 96067 - DNA, 80 bp, synthetic construct
  source 1..80: mol_type = other DNA
accaggtgataattcagctaaatttaaaagatttactcaatcattatatgatggattacgtgatgagaagttaaagaatt

SEQ ID NO: 96068 - DNA, 80 bp, synthetic construct
  source 1..80: mol_type = other DNA
acctggtgacaattcggctaaattcaaaagatttacccagtcattgtatgatggattgcgtgacgaaaaattaaagaatt

SEQ ID NO: 96069 - DNA, 80 bp, synthetic construct
  source 1..80: mol_type = other DNA
ctggcgataattcagctaaatttaagaggtttacccagtcattgtatgatggattacgtgatgaaaaactaaaaaattgt

SEQ ID NO: 96070 - DNA, 80 bp, synthetic construct
  source 1..80: mol_type = other DNA
acctggtgataactcagctaaatttaaaaggtttacacagtcattgtatgatggattacgtgatgaaaaattaaagaatt

SEQ ID NO: 96071 - DNA, 80 bp, synthetic construct
  source 1..80: mol_type = other DNA
acctggtgataattctgcaaagtttaaaagatttacacaatccttatatgatggtttacgtgatgaaaaactaaagaatt

SEQ ID NO: 96072 - DNA, 80 bp, synthetic construct
  source 1..80: mol_type = other DNA
acctggtgataactctgcaaagtttaaaagattcacacagtcattatatgatggtttacgtgatgagaagttaaaaaact

SEQ ID NO: 96073 - DNA, 80 bp, synthetic construct
  source 1..80: mol_type = other DNA
acctggtgataactctgctaaatttagacgatttactcaatctttatatgatggactacgtgatgataaattaaaaaatt

SEQ ID NO: 96074 - DNA, 80 bp, synthetic construct
  source 1..80: mol_type = other DNA
tcctggtgataattcagcaaaatttaagagattcacgcaatcgttgtatgatgggttacgtgatgagaagttaaaaaatt

SEQ ID NO: 96075 - DNA, 80 bp, synthetic construct
  source 1..80: mol_type = other DNA
acctggtgataattcagcaaagttccggcgcttcacacagtcattgtacgatggattacgtgatgacaaattgaaaaact

SEQ ID NO: 96076 - DNA, 80 bp, synthetic construct
  source 1..80: mol_type = other DNA
acttattacctcaaatacaaatggagtagtatacgagagtacaaataataatggcttttggactgcagccattgctgttg

SEQ ID NO: 96077 - DNA, 80 bp, synthetic construct
  source 1..80: mol_type = other DNA
actgctgacacagctgggactttccactgggggagtggtctgggcggtactggggagtggccagccctcagatgctgcct

SEQ ID NO: 96078 - DNA, 80 bp, synthetic construct
  source 1..80: mol_type = other DNA
aacttagatcttttttcagttccgtcaattcctatcaaaggatccagatctttccagacaaaatctggaatgtgacttac

SEQ ID NO: 96079 - DNA, 80 bp, synthetic construct
  source 1..80: mol_type = other DNA
tcgaaagggctaccattatggccgcgtttaaagggaataccgagggaagaacatctgacatgagaactgaaataataagg

SEQ ID NO: 96080 - DNA, 80 bp, synthetic construct
  source 1..80: mol_type = other DNA
tgacagtggtagggtaatggtgaagggaggagacatgaaaaactgctctttcaatgttacagacataacaaataaggtgc

SEQ ID NO: 96081 - DNA, 80 bp, synthetic construct
  source 1..80: mol_type = other DNA
tagtagtactactaccaataacagtagtgtgggagagatggaactaaaagaatgctctttcaatgttgccacaaacatag

SEQ ID NO: 96082 - DNA, 80 bp, synthetic construct
  source 1..80: mol_type = other DNA
gaaataaggtgcagaaagaatctgctctttttaataaatttgatgtagaaccaatagataataaaaataataaaagcatg

SEQ ID NO: 96083 - DNA, 80 bp, synthetic construct
  source 1..80: mol_type = other DNA
tcggcgccatagcaggtttcatagagaatggttgggagggaatggtagacggttggtacggtttcaggcaccaaaattct

SEQ ID NO: 96084 - DNA, 80 bp, synthetic construct
  source 1..80: mol_type = other DNA
caagcagcagatcttaaaagcactcaagcagcaatcgatcaaatcaacggaaagctgaacagattaaccgagaaaacgaa

SEQ ID NO: 96085 - DNA, 80 bp, synthetic construct
  source 1..80: mol_type = other DNA
catcaaatcgaaaaagaattcacagaagtagaagggagaattcaggacctcgagaaatatgttgaagatactaaaataga

SEQ ID NO: 96086 - DNA, 80 bp, synthetic construct
  source 1..80: mol_type = other DNA
aaaagtgttgagctgaggtcagaatataaaaactggatcctatggatttcctttgccatatcatgctttttactttgcat

SEQ ID NO: 96087 - DNA, 80 bp, synthetic construct
  source 1..80: mol_type = other DNA
aattttgctgggatttattatgtgggcttgccaaaaaggcaacgttaagtgcaacatttgcatctgagtgcattaattaa

SEQ ID NO: 96088 - DNA, 80 bp, synthetic construct
  source 1..80: mol_type = other DNA
tactgagctggtccagaattcctcaataggccgaatatgcaacagcccccatagaatcattgatgggagaaattgcacac

SEQ ID NO: 96089 - DNA, 80 bp, synthetic construct
  source 1..80: mol_type = other DNA
tgatagatactctattaggagaccctcattgtgatgatttccaaaacaaggaatgggatctttttgttgaacgcagcaga

SEQ ID NO: 96090 - DNA, 80 bp, synthetic construct
  source 1..80: mol_type = other DNA
cggttgttacccttatgatgtctcgggttatgcctcccttaggtctctagttgcctcatcaggcactctggagtttatca

SEQ ID NO: 96091 - DNA, 80 bp, synthetic construct
  source 1..80: mol_type = other DNA
attggacgggggtttctcagaatggaggaagctatgcctgcaaacgggaatccattaacagtttcttcagtagattgaat

SEQ ID NO: 96092 - DNA, 80 bp, synthetic construct
  source 1..80: mol_type = other DNA
tggctttatgcattagaatccaaatatccagcattgaacgtgactatgccgaacgaaggcaaatttgataaattgtacat

SEQ ID NO: 96093 - DNA, 80 bp, synthetic construct
  source 1..80: mol_type = other DNA
ttggggagtccaccaccccagcacggacaaagaacaaaccactctatatgtccgagcatcagggagagtcacagtctcta

SEQ ID NO: 96094 - DNA, 80 bp, synthetic construct
  source 1..80: mol_type = other DNA
aatatagggtatagaccctgggtaaggggtctgtctagtagaataagcatctattggacaatagtaaaaccaggagacat

SEQ ID NO: 96095 - DNA, 80 bp, synthetic construct
  source 1..80: mol_type = other DNA
atagcaccgggaacctaattgctcctcggggttacttcaaaatacgaattggggaaagctcaataatgagatcagatgca

SEQ ID NO: 96096 - DNA, 80 bp, synthetic construct
  source 1..80: mol_type = other DNA
acaataaaagcacagcaacgctgtgcctaggacatcatgcagtgccaaatggaacattagtgagaacaatcacaaatgac

SEQ ID NO: 96097 - DNA, 80 bp, synthetic construct
  source 1..80: mol_type = other DNA
ggggcatgtcccagatatgttaaacaaaacactctgaaattggcaacagggatgcgaaatataccagaaagacaaggaag

SEQ ID NO: 96098 - DNA, 80 bp, synthetic construct
  source 1..80: mol_type = other DNA
atacgttattgtactgcgtctgcttatgcaatttgcaattgtaaagattataatgtcaatgggacatgtacaagtgacaa

SEQ ID NO: 96099 - DNA, 80 bp, synthetic construct
  source 1..80: mol_type = other DNA
tgtcatctcaggaccatgcacacatggaactaagccattgacatcaacgctattacttgtaaatgtgacacaagcacaag

SEQ ID NO: 96100 - DNA, 80 bp, synthetic construct
  source 1..80: mol_type = other DNA
agcaaaagcaggggaatttcttaactagcagaatggagacaatatcactaatgactatactactgatagcggcagcaagc

SEQ ID NO: 96101 - DNA, 80 bp, synthetic construct
  source 1..80: mol_type = other DNA
taattaaagggacttacaacaacacaggaaaccagccaatactttatttctggggtgttcatcatcctcctagtaccagg

SEQ ID NO: 96102 - DNA, 80 bp, synthetic construct
  source 1..80: mol_type = other DNA
ctacaagactccttgtatggatccggtgatagatacgttaggatgggaactgaaagcatgaattttgccaagagtccgga

SEQ ID NO: 96103 - DNA, 80 bp, synthetic construct
  source 1..80: mol_type = other DNA
aaagactgctgacactaagctatctacaaaagactttccgctaaagactttccaaggaagtgtagcctaggcaagaccga

SEQ ID NO: 96104 - DNA, 80 bp, synthetic construct
  source 1..80: mol_type = other DNA
aatacaatacaggaaaaaaaaatgacaaactactctttcaatatcaccacaaaaataaaaaataaagtgcaaaaagaata

SEQ ID NO: 96105 - DNA, 80 bp, synthetic construct
  source 1..80: mol_type = other DNA
cagcctggcgtttcatcataaagcccgaaaacaacatccggagtactacaaaaactgctaacactaagctatctacaagg

SEQ ID NO: 96106 - DNA, 80 bp, synthetic construct
  source 1..80: mol_type = other DNA
ttagaatactagttagagcaataaatcttacagtaccatctaagataacatgacctagatgcagtaagacaaaaaaattc

SEQ ID NO: 96107 - DNA, 80 bp, synthetic construct
  source 1..80: mol_type = other DNA
aaaattacacaaaaataatatacaacttacttgaaaaatcgcaaatccaacagaaaaaaaataaaaaaaaattattaaaa

SEQ ID NO: 96108 - DNA, 80 bp, synthetic construct
  source 1..80: mol_type = other DNA
ctagattcttaccactcatctaagacaacctacaaagcctatgccttttcagctaccaccacttaaaagacttactcttg

SEQ ID NO: 96109 - DNA, 80 bp, synthetic construct
  source 1..80: mol_type = other DNA
attatgctgaagactgtgcaagttctaagacacaaaaagtaaaagatcctcaaatactagtaaagtctcctgcagtatta

SEQ ID NO: 96110 - DNA, 80 bp, synthetic construct
  source 1..80: mol_type = other DNA
gattcaagaactaaagaatagtgctgttagcttgctcaataccatagctatcgcagtagctaaaagaacaaataaagtta

SEQ ID NO: 96111 - DNA, 80 bp, synthetic construct
  source 1..80: mol_type = other DNA
ggacctgaaagcgaaagagaaaccagaggagctctctcgacgcaggactcggcttgctgaaatttacctaaggccagggg

SEQ ID NO: 96112 - DNA, 80 bp, synthetic construct
  source 1..80: mol_type = other DNA
ctttcgctttcaggtccctgaaagcgaaagagaaaccagaggagctctctcgacgcaggactcggcttgctgaagcgcgc

SEQ ID NO: 96113 - DNA, 80 bp, synthetic construct
  source 1..80: mol_type = other DNA
taaaaacaataatagcaatagttgtatagtctatagtactcataaaatataaaaaaatattaagacaaaaaaaaataaat

SEQ ID NO: 96114 - DNA, 80 bp, synthetic construct
  source 1..80: mol_type = other DNA
aaaataataaataaaatagtaaaaaaagcagaaaacagtggcaataaaagtaaaagagaccaagaaaagttatcagcact

SEQ ID NO: 96115 - DNA, 80 bp, synthetic construct
  source 1..80: mol_type = other DNA
aaggaggcgtggcctaggcaagactaagagtggcgagccctcagatgctgcatataagcagccgctttcgcctgtactag

SEQ ID NO: 96116 - DNA, 80 bp, synthetic construct
  source 1..80: mol_type = other DNA
cttggtgactaatgtaacattgcattttaatcagtatggatgcaactaccccccaaacaaccgagtaatactgtgcgaac

SEQ ID NO: 96117 - DNA, 80 bp, synthetic construct
  source 1..80: mol_type = other DNA
gtaaaatttgctccaagctcagggggagatccagaagttgagacacataattttaattgtagaggagaatttttctattg

SEQ ID NO: 96118 - DNA, 80 bp, synthetic construct
  source 1..80: mol_type = other DNA
gggatttattagcaaaagtagattataaaataggagtaggagccctgggaatagcagcaatcttagttatagttgtgtgg

SEQ ID NO: 96119 - DNA, 80 bp, synthetic construct
  source 1..80: mol_type = other DNA
tttgcaccatccgcaggaggggatccagaagtcacaacacacagctttaattgtagaggggaatttttttattgtaatac

SEQ ID NO: 96120 - DNA, 80 bp, synthetic construct
  source 1..80: mol_type = other DNA
aaaatataacatttgcaccatccgcaggaggggatccagaagtcacaacacacagctttaattgtagaggggaatttttt

SEQ ID NO: 96121 - DNA, 80 bp, synthetic construct
  source 1..80: mol_type = other DNA
tattgtaatactacaaaactgtttacagaaccgttttcaaatacatcaatcaatggatccctcataatcccatgcaggat

SEQ ID NO: 96122 - DNA, 80 bp, synthetic construct
  source 1..80: mol_type = other DNA
aaataaaaaattgtactttcagtacaaccacagaaataggagataagaaacaacaggcgtatgcacttttttatagatct

SEQ ID NO: 96123 - DNA, 80 bp, synthetic construct
  source 1..80: mol_type = other DNA
acagaaagagatacacgataagaagaaaaaagaacgtgcacttttttatagacttgatgtagtatcactcaataacgaga

SEQ ID NO: 96124 - DNA, 80 bp, synthetic construct
  source 1..80: mol_type = other DNA
tataagagacagcactgctagagattttttcagggttcccctgctagccagagagctcccaggctctatctggtctacca

SEQ ID NO: 96125 - DNA, 80 bp, synthetic construct
  source 1..80: mol_type = other DNA
gtgggttcccgtctgttgtgtgactctggtacctagagatccctcagaccattatagtcagtgtagacagccattatagt

SEQ ID NO: 96126 - DNA, 80 bp, synthetic construct
  source 1..80: mol_type = other DNA
tggaacaagcagtaaaaaactgttcttttaatgtaaccacagaactatgggacaagcagcaaagggtccgtgcacttttt

SEQ ID NO: 96127 - DNA, 80 bp, synthetic construct
  source 1..80: mol_type = other DNA
caccaggagggtactgtctgaccaggtggatgttgatcgaagctgagttgaaatgcttcggtaacacagctgtagcaaaa

SEQ ID NO: 96128 - DNA, 80 bp, synthetic construct
  source 1..80: mol_type = other DNA
cctttgtaaagagttgttgcacaggacctgccacaaagcagaagaaaggcaatgaggccaatgaggccacatgttgctac

SEQ ID NO: 96129 - DNA, 80 bp, synthetic construct
  source 1..80: mol_type = other DNA
ctttgtagagggttgctgtacaggacctgccacaaagtaggagaaaggcaatgaggccaaagaggccacatgttgccaca

SEQ ID NO: 96130 - DNA, 80 bp, synthetic construct
  source 1..80: mol_type = other DNA
ctttgtaaaggggtgttgaacaagacctgccacatagtagaaggaaagcaataaggccaatgagaccacatgttgccaca

SEQ ID NO: 96131 - DNA, 80 bp, synthetic construct
  source 1..80: mol_type = other DNA
aatgttcctagtagtctcctgctaatgtagatatctcttgttctctgtgataggagcccaaggtaaccaataggagatgg

SEQ ID NO: 96132 - DNA, 80 bp, synthetic construct
  source 1..80: mol_type = other DNA
ccttgtaaagggttgatgtacaggacctaccacaaagtagaagaaaagcaatgaggccaataaggccacatgttgccaca

SEQ ID NO: 96133 - DNA, 80 bp, synthetic construct
  source 1..80: mol_type = other DNA
aaggcaaagatacaccaggaggatactgtttgaccaggtggatgttgattgaggctgaattaaaatgttttggtaacaca

SEQ ID NO: 96134 - DNA, 80 bp, synthetic construct
  source 1..80: mol_type = other DNA
ccttgtaaagggttgttgtacaagacctgccacaaagtagaaggaaagtgatgaggccaatgaggccacatgttgctaca

SEQ ID NO: 96135 - DNA, 80 bp, synthetic construct
  source 1..80: mol_type = other DNA
ccatctcccattggttatttagggctcctgtcacagagaacaagggatatctacattagtaggagactgctaggcacatt

SEQ ID NO: 96136 - DNA, 80 bp, synthetic construct
  source 1..80: mol_type = other DNA
ggctagccctcagatgctctctttttcacatctccgagcccacgagaccgaggctgatctcgtatgccgtcttctgcttg

SEQ ID NO: 96137 - DNA, 80 bp, synthetic construct
  source 1..80: mol_type = other DNA
caatagtaggactgatagtagcgctaatcttagcaatagttgtgtggactataatacttaaaataataaaagaaagaaga

SEQ ID NO: 96138 - DNA, 80 bp, synthetic construct
  source 1..80: mol_type = other DNA
ctaaaagataaaaaaaaaaaagaatatgcccttttttataaagaggatgtactaccagctgaaaataacagtaatcatta

SEQ ID NO: 96139 - DNA, 80 bp, synthetic construct
  source 1..80: mol_type = other DNA
tcgaagctcaaatctccagaccagcacatctttcttttgcttctccattccatgctgaccgatggggtgtagtagactgg

SEQ ID NO: 96140 - DNA, 80 bp, synthetic construct
  source 1..80: mol_type = other DNA
acaaagaactgctgacacagaagggactttctgctgggactttccactggggcgttccaggagggagtggtctgggcggg

SEQ ID NO: 96141 - DNA, 80 bp, synthetic construct
  source 1..80: mol_type = other DNA
aacgcaaagagaactgtatactagaaccgacacaacaacgagtgtggcaaccgaagaaataaataggaccttcaagccgt

SEQ ID NO: 96142 - DNA, 80 bp, synthetic construct
  source 1..80: mol_type = other DNA
gcaggagtgaaaatgaatccaaaccagaagataacagcaattggctctgtctctctaactattgcgataatatgcctcct

SEQ ID NO: 96143 - DNA, 80 bp, synthetic construct
  source 1..80: mol_type = other DNA
cgtccgctcctctctgcgtgactttgctttgtacccccgcaaatccgccccacaacccccctgtctttcccaaaataaga

SEQ ID NO: 96144 - DNA, 80 bp, synthetic construct
  source 1..80: mol_type = other DNA
aataaataaataagaaataaaaaaaatgaatttttatattgttcttttaatatgaacaaaatactaaaagataagaagga

SEQ ID NO: 96145 - DNA, 80 bp, synthetic construct
  source 1..80: mol_type = other DNA
ctgtcaaagtatgtttgattggaactgtgtcaaaatttcaaccatcagataccctgttatttctaggcccacttgagcag

SEQ ID NO: 96146 - DNA, 80 bp, synthetic construct
  source 1..80: mol_type = other DNA
gttcaagccatgaggctaatacaggttgatataaattttgtgagagaacatttaattaaaaatgaagaaagaggagctct

SEQ ID NO: 96147 - DNA, 80 bp, synthetic construct
  source 1..80: mol_type = other DNA
ttttattatgtcagattagcctgcaagcaccatatttaccatctacaattgcttctgaccaatatgatacacggtcagca

SEQ ID NO: 96148 - DNA, 80 bp, synthetic construct
  source 1..80: mol_type = other DNA
caaatgtcggattgaatgtatctctacacttaaaaggagaaggacccaaaaaggaagagaattcaacatgcacgatcagt

SEQ ID NO: 96149 - DNA, 80 bp, synthetic construct
  source 1..80: mol_type = other DNA
tgttccagcacagagttccttggacaatggaactggcctgatggagctaagatagagtacttcctctaagacacagaaaa

SEQ ID NO: 96150 - DNA, 80 bp, synthetic construct
  source 1..80: mol_type = other DNA
cagctgtgctgacggctggtagaatcagggaaattgcggtctgcattggaacaatccctgcggctaatcctgatgatgct

SEQ ID NO: 96151 - DNA, 80 bp, synthetic construct
  source 1..80: mol_type = other DNA
cagttaaggtgtgtttaattggaactgtgtcaaaatttcaaccatcagatactttattatttctaggtccacttgaacaa

SEQ ID NO: 96152 - DNA, 80 bp, synthetic construct
  source 1..80: mol_type = other DNA
ttcttctgtgtcaaatcagcctgcaagccccttatttaccatctacaattgcttctgaccaatatgacactcgttcagca

SEQ ID NO: 96153 - DNA, 80 bp, synthetic construct
  source 1..80: mol_type = other DNA
ttcttttgtgtcaaattagtttgcaagctccatatttgccatctacaattgcttctgaccagtatgacactcgtctagca

SEQ ID NO: 96154 - DNA, 80 bp, synthetic construct
  source 1..80: mol_type = other DNA
tgaaaagagggccttctacggaaggagtgcctgagtccatgagggaagaatatcaacaggagcagcagagtgctgtggtt

SEQ ID NO: 96155 - DNA, 80 bp, synthetic construct
  source 1..80: mol_type = other DNA
agtagaaacaaggggaatttcacaatcaaccgagatggaggcaacagtactaataactatactactaacggtagcaacaa

SEQ ID NO: 96156 - DNA, 80 bp, synthetic construct
  source 1..80: mol_type = other DNA
agtagaaacaaggggatttctacaatcaaccaagatggaaacaacaacactagtagctatactgctaatggtaactacaa

SEQ ID NO: 96157 - DNA, 80 bp, synthetic construct
  source 1..80: mol_type = other DNA
ccgatgaaagcacagctggagtagaatctgctgttctaagaggattcctcattttgggcaaagaagacaaaagatatggc

SEQ ID NO: 96158 - DNA, 80 bp, synthetic construct
  source 1..80: mol_type = other DNA
agttggcttttgcacaggcgttaaactatgaacaccgcttctacgcagtgttagcacccaaggcacagttaggaggagca

SEQ ID NO: 96159 - DNA, 80 bp, synthetic construct
  source 1..80: mol_type = other DNA
agaactacgagataggaaagagaacagacatgcacttttttataaacagggtgtagtaccacttgatgagaagaataata

SEQ ID NO: 96160 - DNA, 80 bp, synthetic construct
  source 1..80: mol_type = other DNA
cgcaccggggatcctaggcaatttggacgttcttctttctgaagccttgtgtgctgaactcctccaaatgggaaacaagc

SEQ ID NO: 96161 - DNA, 80 bp, synthetic construct
  source 1..80: mol_type = other DNA
cgctgtgggacgggatcccgtggggggcacagaaaacacaaaaggcaatcgaagacaatcaaattagacaatcaaattgg

SEQ ID NO: 96162 - DNA, 80 bp, synthetic construct
  source 1..80: mol_type = other DNA
gggcacagaaaacacaaaaggcaatcgaagacaatcaaattagacaatcaaattggatagccttaatgcctaggatcctc

SEQ ID NO: 96163 - DNA, 80 bp, synthetic construct
  source 1..80: mol_type = other DNA
cgatgggacaagcaaatcatgctcaaattcgttctacaggaatatgagatggctaactcaaaagaatggaaattatccta

SEQ ID NO: 96164 - DNA, 80 bp, synthetic construct
  source 1..80: mol_type = other DNA
ttcaagacgcccaatacacaaacaaccgggggaaggacattctcttcatttggggcatacgtcatccacccactgatact

SEQ ID NO: 96165 - DNA, 80 bp, synthetic construct
  source 1..80: mol_type = other DNA
gcacagacgaatttatacacaagaaccgacacgacaacaagcgtcacaacggaaaatctggacaggaccttcaaaccatt

SEQ ID NO: 96166 - DNA, 80 bp, synthetic construct
  source 1..80: mol_type = other DNA
gcaatacaaaagttaaaggaagtaatggagagcagaaagcctgcaggtgccgctaaagaagacacaagcgcaaggcagac

SEQ ID NO: 96167 - DNA, 80 bp, synthetic construct
  source 1..80: mol_type = other DNA
cagccccaccgatggaggaggaagtgaagggacaagagaatcaggaacagaagggggagtcgggcgaactctacccattt

SEQ ID NO: 96168 - DNA, 80 bp, synthetic construct
  source 1..80: mol_type = other DNA
caagaggtcaatatagcggattcgtaagggttctattccagcaaatgcgtgatgtactagggacatttgacactgttcaa

SEQ ID NO: 96169 - DNA, 80 bp, synthetic construct
  source 1..80: mol_type = other DNA
caggtagggcagacactagggtattgttcataagagaagggaaaattataaatattagcccactgtcaggaagtgctcag

SEQ ID NO: 96170 - DNA, 80 bp, synthetic construct
  source 1..80: mol_type = other DNA
agcaaaagcaggagtaaaaaatgaatccaaaccagaagataacggcaattggatctgtctctctaatcattgcgataatg

SEQ ID NO: 96171 - DNA, 80 bp, synthetic construct
  source 1..80: mol_type = other DNA
agtgttatttataagagaagggaaaattacaactattagcccattgtcaggaagtgcacagcacgttgaagaatgctctt

SEQ ID NO: 96172 - DNA, 80 bp, synthetic construct
  source 1..80: mol_type = other DNA
ctggggaccagcgtgtgggtctcatcccgcgcaatggtgttgatcactgggatgcgtacaagggagaaagagtggttctt

SEQ ID NO: 96173 - DNA, 80 bp, synthetic construct
  source 1..80: mol_type = other DNA
aattttctccagaaccacacctagcccaggtagttgcagaagacctcctttcccctagtgtaatggatgtgggtgacttt

SEQ ID NO: 96174 - DNA, 80 bp, synthetic construct
  source 1..80: mol_type = other DNA
cttctcactctttgtgcactctctgaagtcacggatttgtcccctgatattattcaggccaattcccttttctccttcta

SEQ ID NO: 96175 - DNA, 80 bp, synthetic construct
  source 1..80: mol_type = other DNA
cagtgtcccccagaaacgctccaggtgaaatactatggagcgcgcctttgggccccgatttgaacccttatctttctcat

SEQ ID NO: 96176 - DNA, 80 bp, synthetic construct
  source 1..80: mol_type = other DNA
tgtacctttagaggagatctcacccacattgcaggcactcgccaattcacaatgcatttggcctctccgaactggaacaa

SEQ ID NO: 96177 - DNA, 80 bp, synthetic construct
  source 1..80: mol_type = other DNA
ccacaaaaggagatggctcgacccgcggccacaaagccatagtgtccactggggctgccgactttgccccaaaatcaggc

SEQ ID NO: 96178 - DNA, 80 bp, synthetic construct
  source 1..80: mol_type = other DNA
aacattcgattcggcactgacacagaagatgatctccaatctggcacaaacacgaaattcaccccaattggcgtcgtcca

SEQ ID NO: 96179 - DNA, 80 bp, synthetic construct
  source 1..80: mol_type = other DNA
agatggtgaaaacccccactttagtgaaccccaacaatgggtgctcccaagttacacaggtagaactggacataatgtgc

SEQ ID NO: 96180 - DNA, 80 bp, synthetic construct
  source 1..80: mol_type = other DNA
atttggcccctgctgttgcccccacttacccgggtgagcaactccttttcttcaggtccaccatgcccggatgcagcggg

SEQ ID NO: 96181 - DNA, 80 bp, synthetic construct
  source 1..80: mol_type = other DNA
atgctggggctggagctatcaatcaaaaagttgaatttgaaaataatagaaaattgcaacaagctgctttccaatttagt

SEQ ID NO: 96182 - DNA, 80 bp, synthetic construct
  source 1..80: mol_type = other DNA
agctcgtggggcaattaacgcccccatgacaaaggccttggattggagtggaacaagatactgggcacctgatgctaggg

SEQ ID NO: 96183 - DNA, 80 bp, synthetic construct
  source 1..80: mol_type = other DNA
cttcgggggcattgccaggaaggactaatctcagggctactctccccactcggggttcttctagtgttacttctgcttct

SEQ ID NO: 96184 - DNA, 80 bp, synthetic construct
  source 1..80: mol_type = other DNA
tctgctacttctgtgtattcaaataaaactgtctcaacgaggcttggttcttcagcaggttctggcaccagcgcctcaag

SEQ ID NO: 96185 - DNA, 80 bp, synthetic construct
  source 1..80: mol_type = other DNA
atcaaaacagaaacttgtcacccttcatgagtggggctctcaacacatcattcgtcaccccaccatctagcagatcctcc

SEQ ID NO: 96186 - DNA, 80 bp, synthetic construct
  source 1..80: mol_type = other DNA
tcatgtccgtaggcgaggggagtcacgggtgtaatgtgaaaagacaaaattgattatctatcctttctttattgtctttt

SEQ ID NO: 96187 - DNA, 80 bp, synthetic construct
  source 1..80: mol_type = other DNA
atagggaagttgaaaccccttaacatcctcaatattctggccacatgcgactggaccttcgcaggcatagtggagtcctt

SEQ ID NO: 96188 - DNA, 80 bp, synthetic construct
  source 1..80: mol_type = other DNA
tacagggctgtgctttccagtttactattgctgagcttcagggtcttaaaaagaaggtaggtaagacccgggagttttaa

SEQ ID NO: 96189 - DNA, 80 bp, synthetic construct
  source 1..80: mol_type = other DNA
atcgaaccagctactcgtgcaggaagacaaatagtggagcgcattctggaagaagagcacgatggagcacttaaaattgc

SEQ ID NO: 96190 - DNA, 80 bp, synthetic construct
  source 1..80: mol_type = other DNA
cttacgaaaacaacacttgggtcaaccagacgtatgttaacgtcagcaatactaatattgttgctgaacaggtagtagct

SEQ ID NO: 96191 - DNA, 80 bp, synthetic construct
  source 1..80: mol_type = other DNA
tctttaagatagaaaggggaaaagtaatcaaatcagttgagttgaatgcccctaattatcattatgaggaatgctcctgt

SEQ ID NO: 96192 - DNA, 80 bp, synthetic construct
  source 1..80: mol_type = other DNA
ggcctgagaggatcaagttttatcagagggacaaaggtggtcccaagaggacaattgtccaccagaggggttcaaattga

SEQ ID NO: 96193 - DNA, 80 bp, synthetic construct
  source 1..80: mol_type = other DNA
tcgagagaaagcccatcagggcagcatttactggaaacactgaaggcagaacatctgacatgaggcgagaaatcataaga

SEQ ID NO: 96194 - DNA, 80 bp, synthetic construct
  source 1..80: mol_type = other DNA
gagccataccagaagatgtggcagaacaggggcggggagtattcgagctctcggaagaaaaggcacagaacccgattatg

SEQ ID NO: 96195 - DNA, 80 bp, synthetic construct
  source 1..80: mol_type = other DNA
attcaacagataacgttgtggcagctacagcaacagccgctgcgaaaaaatttagagttaaagagttcacaacggagttt

SEQ ID NO: 96196 - DNA, 80 bp, synthetic construct
  source 1..80: mol_type = other DNA
tctttcgccccactagaaaacaaaggaaggaagaaagggccacgctaggactagtgactggttcagaaatcagaaaaaga

SEQ ID NO: 96197 - DNA, 80 bp, synthetic construct
  source 1..80: mol_type = other DNA
ggtagacctccaagacctagtgtactggaggcagctaaacaaaccatcatcaacgtcctcgagcaaaccttggacccccc

SEQ ID NO: 96198 - DNA, 80 bp, synthetic construct
  source 1..80: mol_type = other DNA
ctcgcctggtgaaattttgttaaatttggagttagggcctgaattaaatccatacttagcccatttagcaaggatgtata

SEQ ID NO: 96199 - DNA, 80 bp, synthetic construct
  source 1..80: mol_type = other DNA
atggttatgcaggtggggttgaggtgcaggtactgctggctggaaatgcgtttacagcaggcaaacttgtatttgcagca

SEQ ID NO: 96200 - DNA, 80 bp, synthetic construct
  source 1..80: mol_type = other DNA
cacttgaacctgtcttgttaccattacctgatgttagaaataatttctttcactataatcaacagagtgatcagcgcatg

SEQ ID NO: 96201 - DNA, 80 bp, synthetic construct
  source 1..80: mol_type = other DNA
agacttgttgctatgctttatacccctcttagatctaatggttcaggtgatgatgtcttcactgtgtcatgcagggtcct

SEQ ID NO: 96202 - DNA, 80 bp, synthetic construct
  source 1..80: mol_type = other DNA
ctgttcatttaggggaaaaatcacaacacatttgtcagatgataggcacttgtggaacatccaagtctccaatttgaatg

SEQ ID NO: 96203 - DNA, 80 bp, synthetic construct
  source 1..80: mol_type = other DNA
gcactccgtttgacccaacagacgacgtgcccgcaccattgggtatgccagacttctctgggcaaatatttggggtggtt

SEQ ID NO: 96204 - DNA, 80 bp, synthetic construct
  source 1..80: mol_type = other DNA
agtcaaagggacacaggcaccaaccccgcaaacagagctcatgacgctgttcttgcaacctacagcgccaaatacacacc

SEQ ID NO: 96205 - DNA, 80 bp, synthetic construct
  source 1..80: mol_type = other DNA
taagctcggctcagtccaaattggaacatgggacaccgaggatttgcttgaaagacagcctgtcaagttcacgcccgttg

SEQ ID NO: 96206 - DNA, 80 bp, synthetic construct
  source 1..80: mol_type = other DNA
gtctcaatgaaatagggcaagacaagcatttcgaccaatgggtgttgccaaattattctggtgccctgggactcaacatg

SEQ ID NO: 96207 - DNA, 80 bp, synthetic construct
  source 1..80: mol_type = other DNA
cacctggctcctgctgtatccccactctttcccggagagagattattgttctttagatcatatatacctctaaaaggtgg

SEQ ID NO: 96208 - DNA, 80 bp, synthetic construct
  source 1..80: mol_type = other DNA
cctcggtggctctactgaggtatgtgaatccagacacaggtcgcactctatttgaggccaaattacacaaggaagggttt

SEQ ID NO: 96209 - DNA, 80 bp, synthetic construct
  source 1..80: mol_type = other DNA
atcaccgtctctagcacggaaaataggcctgtgattgtccccccaaatggttactttaggtttgactcttgggttaacca

SEQ ID NO: 96210 - DNA, 80 bp, synthetic construct
  source 1..80: mol_type = other DNA
gacttgctggtgacattgtcactaacggcattggttcgcttgtgaacgctggagccaatgctataaaccaaaaagttgat

SEQ ID NO: 96211 - DNA, 80 bp, synthetic construct
  source 1..80: mol_type = other DNA
atggaactagacattgggcccctggagcctcaagaactaccagcttctctggtgggttcaccaattctacccgtgccaga

SEQ ID NO: 96212 - DNA, 80 bp, synthetic construct
  source 1..80: mol_type = other DNA
acagttgagccacctaaaagttccccccctgttcaaaatactttgatctctgcttctagacctagctctactgtctcatc

SEQ ID NO: 96213 - DNA, 80 bp, synthetic construct
  source 1..80: mol_type = other DNA
ttcctctacccgttcgactgtggttactagctcttctactcccccatctattaggtcttctgtaactagaagttcacccc

SEQ ID NO: 96214 - DNA, 80 bp, synthetic construct
  source 1..80: mol_type = other DNA
gcagtgtttctcaatctgtttctcctgtttcttctcgcactggtgattgggtgcaaaaccaaaatagaatgctggagcca

SEQ ID NO: 96215 - DNA, 80 bp, synthetic construct
  source 1..80: mol_type = other DNA
tgagatggaaatggtcagaacaatagaggacgcagtgctcgactttgaggcaattgaaaacaatcacatgacagctctac

SEQ ID NO: 96216 - DNA, 80 bp, synthetic construct
  source 1..80: mol_type = other DNA
tcaaagacaaaaatagtctggccaccttcctcagggcactggatgtggaagaagagaaagcgcggagattatcaaccaaa

SEQ ID NO: 96217 - DNA, 80 bp, synthetic construct
  source 1..80: mol_type = other DNA
gctctaggggcgagatcaaaacagtccgcccctggagcccaaacaactaacaagaatgggagaaccaccatccctcccat

SEQ ID NO: 96218 - DNA, 80 bp, synthetic construct
  source 1..80: mol_type = other DNA
tccgcgtcccccgacataatcggcactataaatgcactcctggcgagaattgccgctgctaggtcactggtgcacagggc

SEQ ID NO: 96219 - DNA, 80 bp, synthetic construct
  source 1..80: mol_type = other DNA
cccgcgacctagctaagaagatggcggccactctgtcaggtgaccagagagtgggcctggtcccaaggaatggtgttgac

SEQ ID NO: 96220 - DNA, 80 bp, synthetic construct
  source 1..80: mol_type = other DNA
tatggtctcatggacactttgagggcaggcaacaaactgaaggaggttaagagtctagaccaattcaaggaagcggtgaa

SEQ ID NO: 96221 - DNA, 80 bp, synthetic construct
  source 1..80: mol_type = other DNA
agacatccgcataaagccttgcaggataatctacaactcaatggcttatgacctggattcaaatgggtcaggcagagtca

SEQ ID NO: 96222 - DNA, 80 bp, synthetic construct
  source 1..80: mol_type = other DNA
agtgggagaccaaaaggtccaggccaacaatgaactcaactccgcactcaacaaactgcgcggggctagaatcagatact

SEQ ID NO: 96223 - DNA, 80 bp, synthetic construct
  source 1..80: mol_type = other DNA
tcaacaagctgtggacaaaaccagaaaaacaacaggaggcctctgcagggccccccacccccccaactgaagagtggacc

SEQ ID NO: 96224 - DNA, 80 bp, synthetic construct
  source 1..80: mol_type = other DNA
ataacaccaatggacacgatccaggaaggtaagaagggcaagaacaaaagtggtaggggtaagaaacacactgcattctc

SEQ ID NO: 96225 - DNA, 80 bp, synthetic construct
  source 1..80: mol_type = other DNA
tctccactgcagacatatccccattgcatgacaccgcatatagtgtcccccccttggaccagagggaaaaggtggacgca

SEQ ID NO: 96226 - DNA, 80 bp, synthetic construct
  source 1..80: mol_type = other DNA
ttggggcttctgggtctcatcaaatttgttcatcacctccacacacgtcatcccacaaaacatgtctgaagctttcggag

SEQ ID NO: 96227 - DNA, 80 bp, synthetic construct
  source 1..80: mol_type = other DNA
tgccaataagccagatccaaatacataggagtggagagttctgcaaaatgaggttcccaaaggccatcaggcccgatgtc

SEQ ID NO: 96228 - DNA, 80 bp, synthetic construct
  source 1..80: mol_type = other DNA
aaatacaggggaggatgattggaggtcaaatggggatgcttctcacaggatccaacgccaaaaacatggaccttggcacc

SEQ ID NO: 96229 - DNA, 80 bp, synthetic construct
  source 1..80: mol_type = other DNA
gtggggttcagacctcggcacaatgatacgctgtgccaggtcatttggtggtctcatggatgaaatgaaggcaaactgtg

SEQ ID NO: 96230 - DNA, 80 bp, synthetic construct
  source 1..80: mol_type = other DNA
agatactcagccgaaccagaactggcacaaatcgtggctgaggacttgctgtcgcctagcgtcatggacgttggcgactt

SEQ ID NO: 96231 - DNA, 80 bp, synthetic construct
  source 1..80: mol_type = other DNA
taaaatcaccataaatgagggcttaccatcgggagtcccgtgcacatcccagtggaactcaatagctcattggctgttaa

SEQ ID NO: 96232 - DNA, 80 bp, synthetic construct
  source 1..80: mol_type = other DNA
ctaggcccgacaaaacagaaggaccacttataatcagagagagtctagaaggcctaacattcttaaggagggatgtgtgc

SEQ ID NO: 96233 - DNA, 80 bp, synthetic construct
  source 1..80: mol_type = other DNA
agagacccagcagggtggtatggcaaacttgaccaatcatcaatcatgagacagttatactggacaaaaggacccaacca

SEQ ID NO: 96234 - DNA, 80 bp, synthetic construct
  source 1..80: mol_type = other DNA
caggaggagcaattgcagccccactaactggacaaacaaatttcattgatccctggattagaggtaattatgtgcaagca

SEQ ID NO: 96235 - DNA, 80 bp, synthetic construct
  source 1..80: mol_type = other DNA
ttcgcccggtgaaattttgcttaatttagaattaggccctgaactcaacccattcttgtcccatctatctagaatgtaca

SEQ ID NO: 96236 - DNA, 80 bp, synthetic construct
  source 1..80: mol_type = other DNA
atgggtatgctggcggtattgatgtccaagtcatcatggcaggcaatgccttcaccgctggtaagatcatctttgcagca

SEQ ID NO: 96237 - DNA, 80 bp, synthetic construct
  source 1..80: mol_type = other DNA
atacctccccatttccccgtggaaaatcttagtccccctcagatcactatgttccctcatattatagtggatgtcaggac

SEQ ID NO: 96238 - DNA, 80 bp, synthetic construct
  source 1..80: mol_type = other DNA
ccttgaacccataaatatccctgtaccagatgttaggaacaacttcttccattataatcaaaacaatgagtctcgcatga

SEQ ID NO: 96239 - DNA, 80 bp, synthetic construct
  source 1..80: mol_type = other DNA
gactggtggccatgttgtatacccctcttaggtctaacgggtctgctgaagatgttttcacagtgtcatgtagggtctta

SEQ ID NO: 96240 - DNA, 80 bp, synthetic construct
  source 1..80: mol_type = other DNA
ctgacacccttaagaagctccatggtgagacattcccctacgcagcatttgataacaactgctactcattttgttgttgg

SEQ ID NO: 96241 - DNA, 80 bp, synthetic construct
  source 1..80: mol_type = other DNA
acaaaaccatctgcagactttgaatttaattatctagtccccccaactgtagagtcaaggactaaacccttcacaatacc

SEQ ID NO: 96242 - DNA, 80 bp, synthetic construct
  source 1..80: mol_type = other DNA
gacatgctccatactagtccaacagaaaacattgttgttcaaccacaaaatggcaggtgcaccatagatggtgagttgct

SEQ ID NO: 96243 - DNA, 80 bp, synthetic construct
  source 1..80: mol_type = other DNA
tggcaccactcaactgatcacttccaatatctgttcattcagaggatccatctcagggcatgaaggcaatgatgacgaac

SEQ ID NO: 96244 - DNA, 80 bp, synthetic construct
  source 1..80: mol_type = other DNA
acctgtggcacttcaacatcacaaaccccaatggcactccatttgaccccactgaagatgtgcctgcccccctcggaacc

SEQ ID NO: 96245 - DNA, 80 bp, synthetic construct
  source 1..80: mol_type = other DNA
ccagatttcaggggtcaattgtacggtgtcatctcccagcgagacagagagggaacaccctcggcgaacaatcagaaggc

SEQ ID NO: 96246 - DNA, 80 bp, synthetic construct
  source 1..80: mol_type = other DNA
aaacaggtcccaccagggagtgatttcaacaatctcaccaaaatttgtccctaagttaggttcagtcatgattggcacat

SEQ ID NO: 96247 - DNA, 80 bp, synthetic construct
  source 1..80: mol_type = other DNA
ggactactgatgatatcaagaaccagccatccaagttcgccccaattggcctcaatgatgatgataattttaaacaatgg

SEQ ID NO: 96248 - DNA, 80 bp, synthetic construct
  source 1..80: mol_type = other DNA
aatccttttcttccgctcctatctgccaatgaagggagggtacggtagtccatttattgactgcctagtacctcaagaat

SEQ ID NO: 96249 - DNA, 80 bp, synthetic construct
  source 1..80: mol_type = other DNA
gggtcgctcacttctaccaggagtcagcacccgcacaaacagatgtggccctaatcaggtatgtaaaccccgaaacagga

SEQ ID NO: 96250 - DNA, 80 bp, synthetic construct
  source 1..80: mol_type = other DNA
gatatgctgaatgcacaggttgaggcgaccaagaaacttcaggctgacatgattgccatcaagcaaggggtattagtcgc

SEQ ID NO: 96251 - DNA, 80 bp, synthetic construct
  source 1..80: mol_type = other DNA
gggcggcttttcccctactgatgcagctcggggagcaatcaacgcccccatgacaagagctctagattggaatggaacaa

SEQ ID NO: 96252 - DNA, 80 bp, synthetic construct
  source 1..80: mol_type = other DNA
cgccaaatgccacctccaccacttcaatgtcaggtggcttcacaggacaggtttcgcacaggaccacaccaaattttaaa

SEQ ID NO: 96253 - DNA, 80 bp, synthetic construct
  source 1..80: mol_type = other DNA
accaaccaggcccccaagcccccacctagtagtgggtcttcagtaagatccaactcaacccaactcactagtctgagctc

SEQ ID NO: 96254 - DNA, 80 bp, synthetic construct
  source 1..80: mol_type = other DNA
ccactcctctgggtcatcccgatccagcggatcaacaatggttagctctttgccttcttctagcaggactagggattggg

SEQ ID NO: 96255 - DNA, 80 bp, synthetic construct
  source 1..80: mol_type = other DNA
gaacaggaaaccattgccaaccatggacgaaggaaagcttaagaaggtggccaacgtcttcctgtgtggcttgtctgggc

SEQ ID NO: 96256 - DNA, 80 bp, synthetic construct
  source 1..80: mol_type = other DNA
aggggggagtcaaatgtttagtgaaaagattattttaaatttgatttaatttgaatttgattggcatcttttaaaaaaaa

SEQ ID NO: 96257 - DNA, 80 bp, synthetic construct
  source 1..80: mol_type = other DNA
ttttcaccaggcccatcaaagatctcataggcaaactgaaaccactgaacattcttaacattgtcaccaattgtgattgg

SEQ ID NO: 96258 - DNA, 80 bp, synthetic construct
  source 1..80: mol_type = other DNA
acgttcccgggagtcgtagaggcggtcatcctcctcgcagagctctttgggatcttctggacaccaccagacatatctgc

SEQ ID NO: 96259 - DNA, 80 bp, synthetic construct
  source 1..80: mol_type = other DNA
cttcgtcgcctctctgttaggtgactatgagatgcaaggccccgaggacattgcgaccgaaatagtcccagtcattctag

SEQ ID NO: 96260 - DNA, 80 bp, synthetic construct
  source 1..80: mol_type = other DNA
tgcagagagatcggcaactatgggatagaggtggtgaaactggtaatgaagtggttcttcccgaccaaaagtgaggttaa

SEQ ID NO: 96261 - DNA, 80 bp, synthetic construct
  source 1..80: mol_type = other DNA
tgcagtgcttgactttgaggcgatagagaacaaccacatgacagctttactcaaagacaagaacagtctggccacctttc

SEQ ID NO: 96262 - DNA, 80 bp, synthetic construct
  source 1..80: mol_type = other DNA
gctctgggggcgagatcaaagcaactcgcccctggagccacaccaaacaacaaaattgggaaaaccatcatcccccctgt

SEQ ID NO: 96263 - DNA, 80 bp, synthetic construct
  source 1..80: mol_type = other DNA
cacgcgacctggccaaaaagatggcggccaccttatcgggtgaccagagagtgggccttgtcccaagaaacggtgtcgat

SEQ ID NO: 96264 - DNA, 80 bp, synthetic construct
  source 1..80: mol_type = other DNA
tgcaaggtccagagctaccagtgtacaattttgatcaaaacaaggtggccgcgttccgaaaactcgcagctgacaacaag

SEQ ID NO: 96265 - DNA, 80 bp, synthetic construct
  source 1..80: mol_type = other DNA
tatggtttcatggacaccttgagagcaggtaacaaattgaaggaagtcaaaaccctggaccagtttaaagaagcagtgaa

SEQ ID NO: 96266 - DNA, 80 bp, synthetic construct
  source 1..80: mol_type = other DNA
aaggacatacgcataaaaccctgcaggataatttacaactcactagcctatgatttggattcaaatgggtcaggaaaggt

SEQ ID NO: 96267 - DNA, 80 bp, synthetic construct
  source 1..80: mol_type = other DNA
caatgtcaaaaaggtgagggaccaacgaatccaggccaacaatgagctcaactctgcactcaacaaactgcgcggggcca

SEQ ID NO: 96268 - DNA, 80 bp, synthetic construct
  source 1..80: mol_type = other DNA
caatgtcaaaaaggtgggggaccaacgaatccaggccaacaatgagctcaactctgcactcaacaaactgcgcggggcca

SEQ ID NO: 96269 - DNA, 80 bp, synthetic construct
  source 1..80: mol_type = other DNA
gaatcagatactatgtgaaatgtttccaagaaatgatctactcacttctccaaattgctggtgcggccttcgtcacgtct

SEQ ID NO: 96270 - DNA, 80 bp, synthetic construct
  source 1..80: mol_type = other DNA
tcaacaaactgtgggccaagccagaaaaacagtcagagaccctcacggaaccacctacccctccaattgaagattggacc

SEQ ID NO: 96271 - DNA, 80 bp, synthetic construct
  source 1..80: mol_type = other DNA
ataacaccagcagacacagtccaagagggtaagaaaggtaaaaacaagagtggcaggggcaagaagcacactgcgttctc

SEQ ID NO: 96272 - DNA, 80 bp, synthetic construct
  source 1..80: mol_type = other DNA
tctccaccgtagacatatcccctccacatgacactgcatacagtgtcccccccctggaccaaagggagaaggtggatgca

SEQ ID NO: 96273 - DNA, 80 bp, synthetic construct
  source 1..80: mol_type = other DNA
ccaagaccagcgatcttggaggccgcaaaggaaaccatctgtaatgtactagaacagaccattgaaccaccccaaaagtg

SEQ ID NO: 96274 - DNA, 80 bp, synthetic construct
  source 1..80: mol_type = other DNA
gtcctacgcgcaagcctgcgcgtccctagacaagacaacttcaagcggacacccacaccataaaaagaaaaatgacaatt

SEQ ID NO: 96275 - DNA, 80 bp, synthetic construct
  source 1..80: mol_type = other DNA
ttttatggggatcagacttgggcacgatgatacgctgtgctagatcatttggtggtctcatggacgagatgaaggcaaac

SEQ ID NO: 96276 - DNA, 80 bp, synthetic construct
  source 1..80: mol_type = other DNA
ttctcagccgagccagaattggcacaaattgtggctgaagatctcttgtcgcccagcgtcatggacgtcggtgacttcaa

SEQ ID NO: 96277 - DNA, 80 bp, synthetic construct
  source 1..80: mol_type = other DNA
aattactataaatgaaggcttgccctctggggtcccatgcacgtcccagtggaattcaattgctcattggttgttgacat

SEQ ID NO: 96278 - DNA, 80 bp, synthetic construct
  source 1..80: mol_type = other DNA
tatgtgccatggcagaggtctcaggattgtcaccagatgtgatacagtcaaattcctgcttctccttttacggagacgat

SEQ ID NO: 96279 - DNA, 80 bp, synthetic construct
  source 1..80: mol_type = other DNA
gagatagtcagcacagatatcaaattggaccctcaaaaattaacagacaagctaaaagagtacggcttgatcccaaccag

SEQ ID NO: 96280 - DNA, 80 bp, synthetic construct
  source 1..80: mol_type = other DNA
acctgacaagacagaaggccctctgataatcaaagaaagtttggagggtttaacctttctgagaagagatgtgtgtagag

SEQ ID NO: 96281 - DNA, 80 bp, synthetic construct
  source 1..80: mol_type = other DNA
atccagttgggtggtttggtaaacttgatcagtcttcaatcatgagacaactgtattggactaaaggacccaatcatgaa

SEQ ID NO: 96282 - DNA, 80 bp, synthetic construct
  source 1..80: mol_type = other DNA
gtccctactaggtgaagcagccctacatggaccagctttctacaaaaaggtcagcaaattggttatcactgaactcaaag

SEQ ID NO: 96283 - DNA, 80 bp, synthetic construct
  source 1..80: mol_type = other DNA
aaccagtggcgggcggggcaatcgccgcacccctcactggtcaaacaaatataattgacccctggatcatgaataatttt

SEQ ID NO: 96284 - DNA, 80 bp, synthetic construct
  source 1..80: mol_type = other DNA
cggggggagtggaggtgcaagtgattatggctggcaacgctttcaccgcgggaaaagtcatcttcgcagctgtaccaccg

SEQ ID NO: 96285 - DNA, 80 bp, synthetic construct
  source 1..80: mol_type = other DNA
cacttcccagttgacaacctcagcccccctcaggtgactatgtttccacatgttatagttgatgttaggacctttgagcc

SEQ ID NO: 96286 - DNA, 80 bp, synthetic construct
  source 1..80: mol_type = other DNA
aatcctacttccccttccagatgtgagaaatagcttctatcattataatcaggtgaatgattcaaggatgaggttgattg

SEQ ID NO: 96287 - DNA, 80 bp, synthetic construct
  source 1..80: mol_type = other DNA
tagacatgctgtacaccagcccaactgaaaacatagtagttcagccccaaaatggtaggtgcacgttggaaggagaacta

SEQ ID NO: 96288 - DNA, 80 bp, synthetic construct
  source 1..80: mol_type = other DNA
ctgggcacaacccagttagtgaccccgaacatctgcgcgctacgtggggagatcaggtggcatgaaggcagtggtgacaa

SEQ ID NO: 96289 - DNA, 80 bp, synthetic construct
  source 1..80: mol_type = other DNA
ctgggcacaacccagttagtgaccccgaacatctgcgcgctacgtggggagatcagggggcatgaaggcagtggtgacaa

SEQ ID NO: 96290 - DNA, 80 bp, synthetic construct
  source 1..80: mol_type = other DNA
ccacaaatggcattttatggtgaggagccccaatggggcagcttttgacccaactgaggatgtgcccgcccccctaggca

SEQ ID NO: 96291 - DNA, 80 bp, synthetic construct
  source 1..80: mol_type = other DNA
cccctgatttcataggtgatgtgtttggagtcctctcacaaagaaacagaaacactgacagtggtcagtctggtcctgca

SEQ ID NO: 96292 - DNA, 80 bp, synthetic construct
  source 1..80: mol_type = other DNA
aacagatcacatgatgctgttgtttccacaagggacagcagattcactccaaaactaggatctgtgatgatagccacctg

SEQ ID NO: 96293 - DNA, 80 bp, synthetic construct
  source 1..80: mol_type = other DNA
ggagaccagtgacatccaagaccagcccaccagattcactccagtaggccttgaaaaccctgatcattacaaccaatggc

SEQ ID NO: 96294 - DNA, 80 bp, synthetic construct
  source 1..80: mol_type = other DNA
aattaccaaattattcaggggcattaactctaaacatggggctggccccatctgtgtttccaacctaccccggagagcaa

SEQ ID NO: 96295 - DNA, 80 bp, synthetic construct
  source 1..80: mol_type = other DNA
atcctcttcttccgctcgtacatcccacttaagggcggatatggagattcccacattgattgcctggtaccacaggaatg

SEQ ID NO: 96296 - DNA, 80 bp, synthetic construct
  source 1..80: mol_type = other DNA
gttttggacctgaacgattcctggctcaacagaaagtttgtgtctcgaaccacgggcttctacagaccctaccaagattg

SEQ ID NO: 96297 - DNA, 80 bp, synthetic construct
  source 1..80: mol_type = other DNA
gtcctgttcgaggccaagttgcataggcaaggttacataacagttgcaaggagtggcagcagtcccatcaatgtcccggc

SEQ ID NO: 96298 - DNA, 80 bp, synthetic construct
  source 1..80: mol_type = other DNA
caatggctatttcagattcgactcctgggtcaaccaattctactcactcgcccccatgggaactggaaacgggcgcagaa

SEQ ID NO: 96299 - DNA, 80 bp, synthetic construct
  source 1..80: mol_type = other DNA
gattggcaggcgatatcgccactaacaccatggggtctttggtcagtgcaggggctaatgcaatcaatcagaaagttgat

SEQ ID NO: 96300 - DNA, 80 bp, synthetic construct
  source 1..80: mol_type = other DNA
aggaaatgttgaatgcacaggttgaagccacaaagaaactccagatggacatgattaacatcaaacaaggggtcttgact

SEQ ID NO: 96301 - DNA, 80 bp, synthetic construct
  source 1..80: mol_type = other DNA
aattttgggaacaagcaagcccccaggcccgcgcctagcattgcttcatctgagagatcaaattctacccaactcaccag

SEQ ID NO: 96302 - DNA, 80 bp, synthetic construct
  source 1..80: mol_type = other DNA
tctgagctcccactcctctggatcttcgaggtccagtggatccaccgtggtcagctcactgccctcttcgagtaggacta

SEQ ID NO: 96303 - DNA, 80 bp, synthetic construct
  source 1..80: mol_type = other DNA
gggagtgggtagacagtcaaaatttcaatttggaaccccatttgcctgggtcgctgaagacagcctttgtcaccccacca

SEQ ID NO: 96304 - DNA, 80 bp, synthetic construct
  source 1..80: mol_type = other DNA
tagaaggggggagtcaaatgtttagtgaaaagattgtttgattaaatttgatttaatttggcttaaatcttttaaaaaaa

SEQ ID NO: 96305 - DNA, 80 bp, synthetic construct
  source 1..80: mol_type = other DNA
tgttcaccaggcccatcaaagacattataggtaagttgaagccgctgaatttccttaacatcgttgccaactgcgactgg

SEQ ID NO: 96306 - DNA, 80 bp, synthetic construct
  source 1..80: mol_type = other DNA
ccagaggagatctctcgacgcaggactcggcttgctgaagcgcgcacagcaagaggcgagggggccagcagctacactag

SEQ ID NO: 96307 - DNA, 80 bp, synthetic construct
  source 1..80: mol_type = other DNA
ataaaaaactgctccttcaatgttagcacaagtgtaagagataagagtaagagagaacatgcacttttctatgacagtga

SEQ ID NO: 96308 - DNA, 80 bp, synthetic construct
  source 1..80: mol_type = other DNA
tacagagaaaggagaactgagaggagaactgaaaaactgctctttcaatgtcacctcaagcagaagtgatgttaagaaaa

SEQ ID NO: 96309 - DNA, 80 bp, synthetic construct
  source 1..80: mol_type = other DNA
aaattataaacatgtggcaaggagtaggacagccaatgtataccgctgctaatgtcagcaatatgtcctgtaagttcaaa

SEQ ID NO: 96310 - DNA, 80 bp, synthetic construct
  source 1..80: mol_type = other DNA
aggggagataaaaaactgctcttttaatatcaccacaagaatagggaataggctgcaggaatatgcactttttcataagc

SEQ ID NO: 96311 - DNA, 80 bp, synthetic construct
  source 1..80: mol_type = other DNA
aaaaactgctctttcaatatcaccacaaacataggaggtaggaggaagaactgggcacttttttatagccttgatatagt

SEQ ID NO: 96312 - DNA, 80 bp, synthetic construct
  source 1..80: mol_type = other DNA
agttctaatactacctctcctccttggagtatactggataaaggggaaataaaaaactgttctttcaatatcacaacaat

SEQ ID NO: 96313 - DNA, 80 bp, synthetic construct
  source 1..80: mol_type = other DNA
taagtagtttatgtaatgacaaacttaacaatactcacaataatagcttttgtagtagtagcaataatagcaatagttgt

SEQ ID NO: 96314 - DNA, 80 bp, synthetic construct
  source 1..80: mol_type = other DNA
accactaacaatgctactaatacctggaacacgatggccgtaaaacagtgctctttcaatgtaaccacagatgtacaaga

SEQ ID NO: 96315 - DNA, 80 bp, synthetic construct
  source 1..80: mol_type = other DNA
ccaggggcaatacaaaattgttctttcaatatgaccacagcagtgcaagacaaaaagcagaaagcatctgcactttttta

SEQ ID NO: 96316 - DNA, 80 bp, synthetic construct
  source 1..80: mol_type = other DNA
aataggaatatagcagatgaagtaagaaactgttcttttaatataaccacagaaataagagatagagcaggagaatctta

SEQ ID NO: 96317 - DNA, 80 bp, synthetic construct
  source 1..80: mol_type = other DNA
tcaatgtagctgaagaaagtagagataagaaaaagacagcacgtgcactcttttatgcgcttgatatagtacaaattaat

SEQ ID NO: 96318 - DNA, 80 bp, synthetic construct
  source 1..80: mol_type = other DNA
acaactaaagcaactaacacagcaaatagtacaactaaaacaactagggcaacttataggttaacacattgtaatgcttc

SEQ ID NO: 96319 - DNA, 80 bp, synthetic construct
  source 1..80: mol_type = other DNA
ggtaacaggtggaaaccacttgctctagctgcattttctggcgagttagttaaactaaagtctcttatgtcattatacag

SEQ ID NO: 96320 - DNA, 80 bp, synthetic construct
  source 1..80: mol_type = other DNA
aaccccttcaatcgtccaagattcacagtcagagcaccactcattccagaaatctcgcaccagaattcaaataccagaat

SEQ ID NO: 96321 - DNA, 80 bp, synthetic construct
  source 1..80: mol_type = other DNA
atgcaagattcacgtggcaatactcaaatattcagccaagcaaattcaatggtaaaaagaacatggagattactattccg

SEQ ID NO: 96322 - DNA, 80 bp, synthetic construct
  source 1..80: mol_type = other DNA
tacttgaggtgggtgactcagtaattggtgatttccagattttttcctttttacgctcaatagatcaggctatcacttaa

SEQ ID NO: 96323 - DNA, 80 bp, synthetic construct
  source 1..80: mol_type = other DNA
caattttattaagggacatacagccaaattcttctgactttgtaccacacttgggtagtgtggcggtcactactgcaatt

SEQ ID NO: 96324 - DNA, 80 bp, synthetic construct
  source 1..80: mol_type = other DNA
gatacggctggggattatactggaacaattcagtggacttcccagccatccaatgtcaccccagtccctgatgtcaactt

SEQ ID NO: 96325 - DNA, 80 bp, synthetic construct
  source 1..80: mol_type = other DNA
ctggaccattccccagtatggatcaaatttggcagaagcttcccagctggcccccgtagtgtaccccccaggatttggtg

SEQ ID NO: 96326 - DNA, 80 bp, synthetic construct
  source 1..80: mol_type = other DNA
aggctatagtatattttatgtcccctataccaggccctaatacagcacacaaacccaatttggtgccctgcctactccca

SEQ ID NO: 96327 - DNA, 80 bp, synthetic construct
  source 1..80: mol_type = other DNA
caagaatttgtgacccactttgttagtgaacaagctccatctatgggtgaggcagctctcgtccactatgtagacccaga

SEQ ID NO: 96328 - DNA, 80 bp, synthetic construct
  source 1..80: mol_type = other DNA
atggtactggtccacaacaacttcccctcaatggagtctttgtctttgcctcttgggtttctagattctaccaattaaag

SEQ ID NO: 96329 - DNA, 80 bp, synthetic construct
  source 1..80: mol_type = other DNA
cttgggtttctagattctaccaattaaagcctgtgggaacggccaactcggccagaggtaggcttggagttagaagataa

SEQ ID NO: 96330 - DNA, 80 bp, synthetic construct
  source 1..80: mol_type = other DNA
tctaggactctctctatagcccaggctacactctttccccacatcatagctgatgtgcgaaccttagaaccaattgaaat

SEQ ID NO: 96331 - DNA, 80 bp, synthetic construct
  source 1..80: mol_type = other DNA
ccccctagaggatgttaggaatacattatatcacactaatgacaatcagccaacaatgcgcctactatgcacgctctaca

SEQ ID NO: 96332 - DNA, 80 bp, synthetic construct
  source 1..80: mol_type = other DNA
cgccactgcgcaccggtggtggctctggcggtacagacgcatttgttgtggcaggccgagttctgacttctcctagtcct

SEQ ID NO: 96333 - DNA, 80 bp, synthetic construct
  source 1..80: mol_type = other DNA
gattttaatttcttgttcctggttccacctactgtggaacagaaaacccgcccctttagtgcgcctaatatacctttgca

SEQ ID NO: 96334 - DNA, 80 bp, synthetic construct
  source 1..80: mol_type = other DNA
attgctttctaattcccgtgtccccaacctaatacaaagcatggtcctctcacccgatcaggcccagaatgtccaattcc

SEQ ID NO: 96335 - DNA, 80 bp, synthetic construct
  source 1..80: mol_type = other DNA
agaatggccgctgtaccactgatgggcaacttttaggtacaacacctgtttctgttagccagattctgaagtttagagga

SEQ ID NO: 96336 - DNA, 80 bp, synthetic construct
  source 1..80: mol_type = other DNA
aaggtgtcagctggttctaaagttattaatctcactgaattagatggttccccctttctggcttttgaagccccagcacc

SEQ ID NO: 96337 - DNA, 80 bp, synthetic construct
  source 1..80: mol_type = other DNA
cacgggtttccccgatttggggaccagtgattggcacattgagatgagccttaattcaaatagccaaagttctggcaatc

SEQ ID NO: 96338 - DNA, 80 bp, synthetic construct
  source 1..80: mol_type = other DNA
ccagtgccgagtaccaaatacttgtcaaacaagaatcagcatttgcccctcaccttggccatgtgcaggctgacaatcta

SEQ ID NO: 96339 - DNA, 80 bp, synthetic construct
  source 1..80: mol_type = other DNA
cttgggtttctcgcttctatcaattaaagcctgtgggaactgctggtccagcacgtaggcttggcattagaagatcataa

SEQ ID NO: 96340 - DNA, 80 bp, synthetic construct
  source 1..80: mol_type = other DNA
acacacctcttagggctagtggtagttcatcaggcactgacccatttgtcattgcaggaagggttctaacttgcccgagc

SEQ ID NO: 96341 - DNA, 80 bp, synthetic construct
  source 1..80: mol_type = other DNA
ccggattttagtttcttatttcttgttcccccaaatgtagaacagaagactaagcccttctctgtgcccaacttaccatt

SEQ ID NO: 96342 - DNA, 80 bp, synthetic construct
  source 1..80: mol_type = other DNA
gggaaagtcttccacgctagtggaggcaatggtctgaacttgactgaattgaacggctctgcttaccatgcttttgaaag

SEQ ID NO: 96343 - DNA, 80 bp, synthetic construct
  source 1..80: mol_type = other DNA
cgatgatgttcaaaatcaaccaacaaaattcacaccaattggcctgaacgaaatcagtgatggccatcgatttgaacagt

SEQ ID NO: 96344 - DNA, 80 bp, synthetic construct
  source 1..80: mol_type = other DNA
cgtcttctcttcttccgttcttatgtaccactgaagggtgggcttggaaaccctgctatagattgtctggtgcctcagga

SEQ ID NO: 96345 - DNA, 80 bp, synthetic construct
  source 1..80: mol_type = other DNA
gtgggtccaacacttctaccaggaatctgccccctccctgggagacgtggccttagttagatacgtcaacccagacaccg

SEQ ID NO: 96346 - DNA, 80 bp, synthetic construct
  source 1..80: mol_type = other DNA
ggcgtgttctctttgaggccaaactccacaagggtgggttcttaactgtttcaagcaccagtacagggcctgttgtggtg

SEQ ID NO: 96347 - DNA, 80 bp, synthetic construct
  source 1..80: mol_type = other DNA
gtgggttcttaactgtttcaagcaccagtacagggcctgttgtggtgccagccaatggttatttcaggtttgaatcttgg

SEQ ID NO: 96348 - DNA, 80 bp, synthetic construct
  source 1..80: mol_type = other DNA
actaggccttcccctgaatttgactttacatatttagtgccaccaacagtagagtcaaagactaagcctttcacactgcc

SEQ ID NO: 96349 - DNA, 80 bp, synthetic construct
  source 1..80: mol_type = other DNA
ccctccccattgatgagatggttaccagccctaatgaatccatagtagtccagccacagaatggtagagttacactagat

SEQ ID NO: 96350 - DNA, 80 bp, synthetic construct
  source 1..80: mol_type = other DNA
ggtgagctgttgggaacaacccagttacaagcatgcaacatctgttctttaagagggagaatcacagggcaagttcccaa

SEQ ID NO: 96351 - DNA, 80 bp, synthetic construct
  source 1..80: mol_type = other DNA
ttggtgtgcccgattttgcgggtgaggtttttggcgtgcttagtcaaagaaaccggaatgagggcaatccatcaaacagg

SEQ ID NO: 96352 - DNA, 80 bp, synthetic construct
  source 1..80: mol_type = other DNA
taggtttcttgactatagctaagaatggtgactctccaataactgtccccccaaatggatacttcagatttgactcttgg

SEQ ID NO: 96353 - DNA, 80 bp, synthetic construct
  source 1..80: mol_type = other DNA
aacttcccaattgacaatctaagcgcagcgcaaattacaatgtgcccacatgtgattgtggatgtcaggcagttggaact

SEQ ID NO: 96354 - DNA, 80 bp, synthetic construct
  source 1..80: mol_type = other DNA
ggtcaaccttccgatgcctgatgttcgcaataacttcttccattacaaccaaggttccgattcgagattgcgcttaattg

SEQ ID NO: 96355 - DNA, 80 bp, synthetic construct
  source 1..80: mol_type = other DNA
agggattcatcacagtagcaaattctggttctagacctattgttgtccctcctaatggctatttcagatttgaagcttgg

SEQ ID NO: 96356 - DNA, 80 bp, synthetic construct
  source 1..80: mol_type = other DNA
ctttggaacctgtcctcttgcctttgccagatgttagaaataatttctttcattataatcagcagcctgagccccgtatg

SEQ ID NO: 96357 - DNA, 80 bp, synthetic construct
  source 1..80: mol_type = other DNA
aatgcagaatatgcatttaagaattctaccacaaatgtgataacacatgtatggaaagtgtcaaaaatgggacttataat

SEQ ID NO: 96358 - DNA, 80 bp, synthetic construct
  source 1..80: mol_type = other DNA
cagcatcgtctaatggagtgaatggggaaaaattattttccttcaactacgtggatggtggtaggatgggaagaactagc

SEQ ID NO: 96359 - DNA, 80 bp, synthetic construct
  source 1..80: mol_type = other DNA
agcattagttcaagaagaggttttgagatgagttggcctaagaaagggtcggctggggctgacaaaaaattaacaaaaaa

SEQ ID NO: 96360 - DNA, 80 bp, synthetic construct
  source 1..80: mol_type = other DNA
agaaaatatcggaagaattgaagagtggggagggaacagggggagttttgatcagcatccagaactactaggtgtggatt

SEQ ID NO: 96361 - DNA, 80 bp, synthetic construct
  source 1..80: mol_type = other DNA
cgagcgggggcagcagatctttttgtggagacaatagcgccactgtttgttgttcttggccagacgctgctgagtcgcca

SEQ ID NO: 96362 - DNA, 80 bp, synthetic construct
  source 1..80: mol_type = other DNA
aactcccctgtattcaactacaataggacaacccgaaggctcaccgttcttggaaaggacgcaggtgcattgacagaaga

SEQ ID NO: 96363 - DNA, 80 bp, synthetic construct
  source 1..80: mol_type = other DNA
gaacctggaagaactcagaacttttttcagttctgcacgctcctataaaagactcctgctctttccagacagaacttgga

SEQ ID NO: 96364 - DNA, 80 bp, synthetic construct
  source 1..80: mol_type = other DNA
atgtgacttacactggaacgagcaaagcatgctcaaactcattctacagaagtatgagatggctgacacacaagagcgat

SEQ ID NO: 96365 - DNA, 80 bp, synthetic construct
  source 1..80: mol_type = other DNA
aactaaggtcctttttcagttctgctcgttcctacaaaagactcctgctttttccagaccacacttggaatgtgacttac

SEQ ID NO: 96366 - DNA, 80 bp, synthetic construct
  source 1..80: mol_type = other DNA
actggaacaagcaaagcatgctcaggttcattctacagaagtatgagatggctaacacacaaaagcaattcgtaccctat

SEQ ID NO: 96367 - DNA, 80 bp, synthetic construct
  source 1..80: mol_type = other DNA
atggaaataatagcactaatagctatactggtagtgacaggaacgagcaatgctgataaaatttgcattggatatcagtc

SEQ ID NO: 96368 - DNA, 80 bp, synthetic construct
  source 1..80: mol_type = other DNA
ctgtgattcgctactgggaggaaaagaatggtcctacattgttgaaagatcatcagccgttcatgggatgtgttaccctg

SEQ ID NO: 96369 - DNA, 80 bp, synthetic construct
  source 1..80: mol_type = other DNA
aactaagatcttttttcagttctgcccgctcctacaaaaaactcctgctcttcccagaccgcacttggaatgtgacttac

SEQ ID NO: 96370 - DNA, 80 bp, synthetic construct
  source 1..80: mol_type = other DNA
atgaacggggtgaatcaataattgtattgaagcaccgatttgagataattgaaggaagagaccgaatcatggcctggaca

SEQ ID NO: 96371 - DNA, 80 bp, synthetic construct
  source 1..80: mol_type = other DNA
tcaaatatattcaatatggagagaataaaagagctgagagatctaatgtcgcagtcccgcaaaacaaaagcaacaaaaat

SEQ ID NO: 96372 - DNA, 80 bp, synthetic construct
  source 1..80: mol_type = other DNA
tcaaatatattcaatatggagagaataaaagagctgagagatctaatgtcgcagtcccgcgtagataatcactcaatgag

SEQ ID NO: 96373 - DNA, 80 bp, synthetic construct
  source 1..80: mol_type = other DNA
tcaaatatattcaatatggagagaataaaagagctgagagatctaatgtcgcagtcccgcatgagtcttctaaccgaggt

SEQ ID NO: 96374 - DNA, 80 bp, synthetic construct
  source 1..80: mol_type = other DNA
tcaaatatattcaatatggagagaataaaagagctgagagatctaatgtcgcagtcccgcgacaaaaacataatggaatc

SEQ ID NO: 96375 - DNA, 80 bp, synthetic construct
  source 1..80: mol_type = other DNA
tgaggacttcgattggactggagttgcccagaatggaacaagctattcttgtaaaaggaattctgttaacagtttcttta

SEQ ID NO: 96376 - DNA, 80 bp, synthetic construct
  source 1..80: mol_type = other DNA
ttggttgtacaaactgaactacaagtatccagcactaaatgttactatgccaaacaatgacgaatttgacaagttgtaca

SEQ ID NO: 96377 - DNA, 80 bp, synthetic construct
  source 1..80: mol_type = other DNA
ccagcagcagccactgtctaaatcctaacaatgaagaagggggtcatggagtaaaaggatgggcctttgatgatgaaaat

SEQ ID NO: 96378 - DNA, 80 bp, synthetic construct
  source 1..80: mol_type = other DNA
atagcgaccattggctccgtttcattggggttggttgtattcaatgttctactgcatgccctgagcatcatattaatgat

SEQ ID NO: 96379 - DNA, 80 bp, synthetic construct
  source 1..80: mol_type = other DNA
aggggtcagggaaagggggacaaagcggttcttcctttaaatgctgtcatggagaagattgttcccagataggactccat

SEQ ID NO: 96380 - DNA, 80 bp, synthetic construct
  source 1..80: mol_type = other DNA
acattttgacaaagtcaacgggatttttgagatagaaaacagtaaaatgtttgatgatggggcaccccaaagtggaataa

SEQ ID NO: 96381 - DNA, 80 bp, synthetic construct
  source 1..80: mol_type = other DNA
ttgtcccgtgggtattcctactattttcattggtattacttagtatcctttgtcctgttagaaaacataagaagtcatga

SEQ ID NO: 96382 - DNA, 80 bp, synthetic construct
  source 1..80: mol_type = other DNA
gttaccgttggcgcacttgtcgccaacgagggctggaatgcctcggaggatgcgcttaccgctgtgattactgcagcgta

SEQ ID NO: 96383 - DNA, 80 bp, synthetic construct
  source 1..80: mol_type = other DNA
tctgactatctgtcatcagcgctacttacgaacacaggctatttctaagggcatgcgtcgattggaggttgaacatgccc

SEQ ID NO: 96384 - DNA, 80 bp, synthetic construct
  source 1..80: mol_type = other DNA
aaaagttcatcacaaggttatatagttggctatttgaaaaatcaggccgtgattatatccccggtcgccagcttcagttt

SEQ ID NO: 96385 - DNA, 80 bp, synthetic construct
  source 1..80: mol_type = other DNA
tatgcacagtgccgccgttggctctcggctggctttcatctggaccctagagttctcgtttttgacgaggcggtcccctg

SEQ ID NO: 96386 - DNA, 80 bp, synthetic construct
  source 1..80: mol_type = other DNA
ccgctgccggagtttcttaaagaaggctgccggaaaattttgctgttttatgaaatggctggggcaggagtgtacttgtt

SEQ ID NO: 96387 - DNA, 80 bp, synthetic construct
  source 1..80: mol_type = other DNA
tcctggagccagcggagggcctagttggtgattgtggccatgataacgaggcctatgaggggtctgaggtggaccccgcc

SEQ ID NO: 96388 - DNA, 80 bp, synthetic construct
  source 1..80: mol_type = other DNA
gagcctgctcaccttgatgtctccgggacctatgcggttcatggccgtcagctcgaggctctatatagagcgcttaatat

SEQ ID NO: 96389 - DNA, 80 bp, synthetic construct
  source 1..80: mol_type = other DNA
cccggatgacatcgcggctcgtgcgtcgcgtctgacggctactgtggagctcgccgccagcccaggccgactcgagtgcc

SEQ ID NO: 96390 - DNA, 80 bp, synthetic construct
  source 1..80: mol_type = other DNA
tagacctgaggtcctctggaaccatccgatccagcgagtcatacacaatgagttggagcaatactgccgagcccgcgctg

SEQ ID NO: 96391 - DNA, 80 bp, synthetic construct
  source 1..80: mol_type = other DNA
gcaccgtgcttgggaataaaacttttcgaacatcaataactgatggcgcccacctcgaagccaacggccccgagcagtac

SEQ ID NO: 96392 - DNA, 80 bp, synthetic construct
  source 1..80: mol_type = other DNA
gtcttgacatttgatgactctcgccaggcaatgggggctgggcctcacagcctcacgtatgaacttgtccccgccggcct

SEQ ID NO: 96393 - DNA, 80 bp, synthetic construct
  source 1..80: mol_type = other DNA
gcaggttaaaatatcttctaatggcttggattgtaccgctatattcccccctggtggggcgcctagcgctacaccaggtg

SEQ ID NO: 96394 - DNA, 80 bp, synthetic construct
  source 1..80: mol_type = other DNA
atgtggctgctttctgcagcgccctatataggtacaataggttcactcagcgccattcgctgacaggtgggctatggctg

SEQ ID NO: 96395 - DNA, 80 bp, synthetic construct
  source 1..80: mol_type = other DNA
caccctgaggggctccttggcctgttcccaccattctccccgggacatctttgggagtctgcaaaccccttttgcggcga

SEQ ID NO: 96396 - DNA, 80 bp, synthetic construct
  source 1..80: mol_type = other DNA
gagtacactttatacacgaacttggtctacatccggtttttctagtgacttctctccacccgaggcagctcaagccgccc

SEQ ID NO: 96397 - DNA, 80 bp, synthetic construct
  source 1..80: mol_type = other DNA
cagtccctgccgtggggctgcctacgagtgcccccccatctgttagtgatgtttgggcacttccaccgccctctgatggg

SEQ ID NO: 96398 - DNA, 80 bp, synthetic construct
  source 1..80: mol_type = other DNA
tcggtggttgttccgctacccgaaacccccgccagtaagccggctaacccgcctagccctaccattcctaggccccccgt

SEQ ID NO: 96399 - DNA, 80 bp, synthetic construct
  source 1..80: mol_type = other DNA
ccgtaagccgcctacacccccgccggcccgcactcgccggcttctttacatatatcctgacggggccaaggtgtatgcag

SEQ ID NO: 96400 - DNA, 80 bp, synthetic construct
  source 1..80: mol_type = other DNA
gttctttgtttgagtctgactgtgactggctggttaatgcatccaaccctggccaccgccctggtggtggtctctgtcat

SEQ ID NO: 96401 - DNA, 80 bp, synthetic construct
  source 1..80: mol_type = other DNA
gccgttgtctcgaggtgggcgcacacccaagatccattaatgacaaccccaatgttctgcaccggtgcttcctccgcccg

SEQ ID NO: 96402 - DNA, 80 bp, synthetic construct
  source 1..80: mol_type = other DNA
gcattttatcagcgctttccggagtcgtttcacccgactgattttgtcatgcgtgaaggcctcgccgcatacactctgag

SEQ ID NO: 96403 - DNA, 80 bp, synthetic construct
  source 1..80: mol_type = other DNA
cccacgtccaatcatccacgccgtggctcctgactacagggttgagcagaaccccaagaggttagaggcggcatatcgtg

SEQ ID NO: 96404 - DNA, 80 bp, synthetic construct
  source 1..80: mol_type = other DNA
agacctgctcccgcctcggcacagctgcctaccctttattggggtcggggatctaccaggtgcctgtaggcttaagtttt

SEQ ID NO: 96405 - DNA, 80 bp, synthetic construct
  source 1..80: mol_type = other DNA
gacgcctgggagcgcaaccaccgcccaggcgatgaactctatctcactgagccagccgctgcctggtttgaggccaataa

SEQ ID NO: 96406 - DNA, 80 bp, synthetic construct
  source 1..80: mol_type = other DNA
gccaacccagccagccttaacaattactgaggataccgctcgcacggccaaccttgcgcttgagattgattcggccactg

SEQ ID NO: 96407 - DNA, 80 bp, synthetic construct
  source 1..80: mol_type = other DNA
aggtgggccgtgcctgtgtcggctgcactgttaatcccgggattgtccattaccagttcactgccggggtccctggctcc

SEQ ID NO: 96408 - DNA, 80 bp, synthetic construct
  source 1..80: mol_type = other DNA
gggaagtctaggtctatacagcagggggatgttgatgttgtggtcgtgccgactcgtgagctccgcaacagttggcgacg

SEQ ID NO: 96409 - DNA, 80 bp, synthetic construct
  source 1..80: mol_type = other DNA
ccgtggctttgctgctttcacaccccacacagcagctcgtgttactgctggccggcgtgtggtgatagatgaggcgcctt

SEQ ID NO: 96410 - DNA, 80 bp, synthetic construct
  source 1..80: mol_type = other DNA
cactcccgccgcacctgctgttactccatatgcagcgagcttcatcggttcatcttctcggcgaccccaaccagatccct

SEQ ID NO: 96411 - DNA, 80 bp, synthetic construct
  source 1..80: mol_type = other DNA
gctattgattttgagcatgccggtttggtcccagcgattcgccctgagctcgctcccactagttggtggcatgtcaccca

SEQ ID NO: 96412 - DNA, 80 bp, synthetic construct
  source 1..80: mol_type = other DNA
gttggaagagacgtccagcgttggtattctgcccccacccgtggcccagcggccaattgccgccgctccgcgctacgcgg

SEQ ID NO: 96413 - DNA, 80 bp, synthetic construct
  source 1..80: mol_type = other DNA
tcgctgccccgccgatgtgtgcgagctcatacgcggggcttacccaaagatccagacgaccagccgtgtgttgcgatctt

SEQ ID NO: 96414 - DNA, 80 bp, synthetic construct
  source 1..80: mol_type = other DNA
tattttggaatgagcctgcagtgggtcagaggctggttttcacgcaggcagctaaggcggccaaccccggcgcaattacc

SEQ ID NO: 96415 - DNA, 80 bp, synthetic construct
  source 1..80: mol_type = other DNA
agggtgccacgtttaccgagactaccatcatagccacggccgatgctagaggtcttattcagtcttctcgtgcgcatgct

SEQ ID NO: 96416 - DNA, 80 bp, synthetic construct
  source 1..80: mol_type = other DNA
atcgttgcacttacccgccacacagaaaaatgcgttattctcgacgctcctggcctactacgtgaggtcggcatttctga

SEQ ID NO: 96417 - DNA, 80 bp, synthetic construct
  source 1..80: mol_type = other DNA
cataattgttaataatttcttcctggctggcggtgaagtgggccaccatcgcccctctatcataccccgtggcaacccag

SEQ ID NO: 96418 - DNA, 80 bp, synthetic construct
  source 1..80: mol_type = other DNA
accagaacttggacaccctacgcgctttccctccgtcttgtcaaattagtgcttaccatcagttggctgaggagttgggc

SEQ ID NO: 96419 - DNA, 80 bp, synthetic construct
  source 1..80: mol_type = other DNA
caccggccagccccagtggccgccgtcctgcctccctgccctgagcttgagcagggactgctctacatgccgcaggagct

SEQ ID NO: 96420 - DNA, 80 bp, synthetic construct
  source 1..80: mol_type = other DNA
cacggtgtccgatagcgtcctaacttttgaactcacggacatagttcactgccgtatggccgcccctagtcaacgtaagg

SEQ ID NO: 96421 - DNA, 80 bp, synthetic construct
  source 1..80: mol_type = other DNA
cagtcctttcgacgcttgtcggtaggtacggccgccgaacaaagctgtatgaggcggcccattcagatgtccgcgagtct

SEQ ID NO: 96422 - DNA, 80 bp, synthetic construct
  source 1..80: mol_type = other DNA
ctagggaggttcatccctactatcggaccagtccaggccaccacgtgcgagttatatgagctggttgaggctatggtgga

SEQ ID NO: 96423 - DNA, 80 bp, synthetic construct
  source 1..80: mol_type = other DNA
tttgccccctgtcgatcgtacttactgcttcgacgggttctcccgctgcacctttgccgctgagaccgggattgctctat

SEQ ID NO: 96424 - DNA, 80 bp, synthetic construct
  source 1..80: mol_type = other DNA
aaagggccaggacggctccgccgtgctcgagcttgatctctgcagccgcgatgtctcgcgtatcacatttttccagaagg

SEQ ID NO: 96425 - DNA, 80 bp, synthetic construct
  source 1..80: mol_type = other DNA
actgtaataaatttacaacaggtgagaccattgcccacggcaaggtgggccagggcatttcggcctggagcaagactttt

SEQ ID NO: 96426 - DNA, 80 bp, synthetic construct
  source 1..80: mol_type = other DNA
cgcctaacatcttttatggcgatgcctatgaggagtcagtattctctgcagccatttctggggctggctccagtatggtt

SEQ ID NO: 96427 - DNA, 80 bp, synthetic construct
  source 1..80: mol_type = other DNA
tttgagaatgatttttctgagtttgatagcacccaaaataatttctctcttggccttgagtgtgtcattatggaggagtg

SEQ ID NO: 96428 - DNA, 80 bp, synthetic construct
  source 1..80: mol_type = other DNA
gcatgccccagtggcttatccgactgtatcatttagttaggtcagcctggaccctgcaggccccgaaagagtctttgaag

SEQ ID NO: 96429 - DNA, 80 bp, synthetic construct
  source 1..80: mol_type = other DNA
ggcttttggaaaaaacattccggcgagcctggcactctcctttggaacaccgtctggaacatggcgattattgcacattg

SEQ ID NO: 96430 - DNA, 80 bp, synthetic construct
  source 1..80: mol_type = other DNA
ctatgaattccgtgacctgagagtggcagcgtttaagggggatgattcagtggttctctgcagtgattaccgccagagcc

SEQ ID NO: 96431 - DNA, 80 bp, synthetic construct
  source 1..80: mol_type = other DNA
gcaatgcggccaccctgatagccggttgtggattgaaactgaaggttgactaccggcccataggattgtatgctggcgtt

SEQ ID NO: 96432 - DNA, 80 bp, synthetic construct
  source 1..80: mol_type = other DNA
actcactgcatgatctttggccttcggacgttgcggaggctatggcccgccatgggatgacacgcttgtatgctgccctc

SEQ ID NO: 96433 - DNA, 80 bp, synthetic construct
  source 1..80: mol_type = other DNA
ggggtccgggccctgagcgcgccgagcagttgcgcctagcggtttgtgattttcttcgagggttgacgaatgttgcgcag

SEQ ID NO: 96434 - DNA, 80 bp, synthetic construct
  source 1..80: mol_type = other DNA
gtctgtgttgatgttgtgtcccgtgtttatggggttagccctgggctggtgcataaccttattggcatgttacagactat

SEQ ID NO: 96435 - DNA, 80 bp, synthetic construct
  source 1..80: mol_type = other DNA
tgctgatgggaaggcccactttactgagactgtcaagcctgtgctggatcttacaaattctatcatacagaggttggaat

SEQ ID NO: 96436 - DNA, 80 bp, synthetic construct
  source 1..80: mol_type = other DNA
gaataacatgttctgtgcatcgcccatgggatcgccatgcgccctagggctgttctgttgctgttcttcgtgcttttgcc

SEQ ID NO: 96437 - DNA, 80 bp, synthetic construct
  source 1..80: mol_type = other DNA
gacatcgggtgtggccgaggaggaggcgacatcaggcttggttatgctttgcattcatggttcccctgttaattcttata

SEQ ID NO: 96438 - DNA, 80 bp, synthetic construct
  source 1..80: mol_type = other DNA
ctaatacgccctatactggggcattgggacttcttgactttgcactcgagcttgagtttagaaatctgacccctgggaac

SEQ ID NO: 96439 - DNA, 80 bp, synthetic construct
  source 1..80: mol_type = other DNA
actaacacccgtgtgtcccgttatactagtacagcccggcaccgtttgcgccgcggtgctgatgggacggctgagctcac

SEQ ID NO: 96440 - DNA, 80 bp, synthetic construct
  source 1..80: mol_type = other DNA
aaccactgcagccacacgtttcatgaaggacttgcatttcaccgggacaaatggtgttggcgaggtaggccgtggtatag

SEQ ID NO: 96441 - DNA, 80 bp, synthetic construct
  source 1..80: mol_type = other DNA
cacttaccccctgaggtcctgctaccacctggcacttaccacacaacctcctatcttctgattcacgacggcaaccgtgc

SEQ ID NO: 96442 - DNA, 80 bp, synthetic construct
  source 1..80: mol_type = other DNA
ccctaacgctatttaaccttgctgatacacttctcggcgggctgccgacagaattgatttcgtcggctggaggccagctg

SEQ ID NO: 96443 - DNA, 80 bp, synthetic construct
  source 1..80: mol_type = other DNA
ccgactgtcaagttatacacctctgtcgagaatgcacagcaagacaagggcattgccataccacacgatatagatctagg

SEQ ID NO: 96444 - DNA, 80 bp, synthetic construct
  source 1..80: mol_type = other DNA
cgattcccgtgtggttatacaagactatgacaaccagcatgaacaggatcgacctaccccttcgccggccccgtctcgcc

SEQ ID NO: 96445 - DNA, 80 bp, synthetic construct
  source 1..80: mol_type = other DNA
ccttttcagtccttcgagccaatgatgtcctgtggctctctttaactgcggctgaatacgaccagaccatttatggctcg

SEQ ID NO: 96446 - DNA, 80 bp, synthetic construct
  source 1..80: mol_type = other DNA
tcgaccaacccaatgtatgtttcagatactgtcacatttgttaatgtggcgactggtgcccaggctgttgcccgctctct

SEQ ID NO: 96447 - DNA, 80 bp, synthetic construct
  source 1..80: mol_type = other DNA
cgattggtctaaggtcactttggacggccgtccactcactaccatccagcagtactccaagacattttatgtgctgccgc

SEQ ID NO: 96448 - DNA, 80 bp, synthetic construct
  source 1..80: mol_type = other DNA
ttcgtggcaagctttccttctgggaggctggtacgactaaggctggctacccttataattacaacactactgctagtgac

SEQ ID NO: 96449 - DNA, 80 bp, synthetic construct
  source 1..80: mol_type = other DNA
cagattttgatcgagaatgcagccggccaccgtgttgccatatctacttacactactagtctcggtgctggccctgtgtc

SEQ ID NO: 96450 - DNA, 80 bp, synthetic construct
  source 1..80: mol_type = other DNA
gttggtgttcttgctccgcactctgccttatctgtgcttgaagatactattgactatcctgctcgtgctcatactttcga

SEQ ID NO: 96451 - DNA, 80 bp, synthetic construct
  source 1..80: mol_type = other DNA
cttgctccgcactctgccttatctgtgcttgaagatactattgactatcctgctcgtgctcatactttcgatgatttctg

SEQ ID NO: 96452 - DNA, 80 bp, synthetic construct
  source 1..80: mol_type = other DNA
cgtcgtgacttacgagggtgacaccagtgcgggctacaaccacgatgtgtctatacttcgtgcatgggtccgcactacta

SEQ ID NO: 96453 - DNA, 80 bp, synthetic construct
  source 1..80: mol_type = other DNA
aaatagttggtgaccacccattggtaattgagagggttcgcgctatcggctgtcattttgttttactccttactgcagcc

SEQ ID NO: 96454 - DNA, 80 bp, synthetic construct
  source 1..80: mol_type = other DNA
cctgagccatccccaatgccatatgttccgtaccctcgttctacggaggtgtatgttagatctatatttggccctggcgg

SEQ ID NO: 96455 - DNA, 80 bp, synthetic construct
  source 1..80: mol_type = other DNA
gctgtggtggttcggccgttcttatcccgtgttcaaactgatatccttattaacttgatgcaaccccggcagcttgtatt

SEQ ID NO: 96456 - DNA, 80 bp, synthetic construct
  source 1..80: mol_type = other DNA
gtcgccttccctttttccatcagcctgttctactaaatctacattccatgctgttccggttcacatttgggaccggctta

SEQ ID NO: 96457 - DNA, 80 bp, synthetic construct
  source 1..80: mol_type = other DNA
tgctttttggtgccaccttggatgatcaggctttctgctgctcgcggcttatgacctatctccgcgggattagctataaa

SEQ ID NO: 96458 - DNA, 80 bp, synthetic construct
  source 1..80: mol_type = other DNA
cctggtgacaattctgcaaaatttaggaggtttacccaatccttatatgatggtttacgtgatgataaacttaaaaattg

SEQ ID NO: 96459 - DNA, 80 bp, synthetic construct
  source 1..80: mol_type = other DNA
gactcctcaaagacgatgaggaaacaggctacagaaggattattgaaagactgaacaacaaaaaaggaaaaaacagactg

SEQ ID NO: 96460 - DNA, 80 bp, synthetic construct
  source 1..80: mol_type = other DNA
ccaggtgataattcagcaaagtttagaagatttactcaatccttatatgatggtttacgtgatgacaagctaaaaaattg

SEQ ID NO: 96461 - DNA, 80 bp, synthetic construct
  source 1..80: mol_type = other DNA
aaccagatgaaggcacaactggagtggagtctgctgtcctgagggggttcctcattttgggcaaggaagacaagagatat

SEQ ID NO: 96462 - DNA, 80 bp, synthetic construct
  source 1..80: mol_type = other DNA
tctatatcgcaaagatgatgcttatgtctctgtatcatctttacattacagcgaaagattcaccccagaaataaccaaaa

SEQ ID NO: 96463 - DNA, 80 bp, synthetic construct
  source 1..80: mol_type = other DNA
ggcccaaagtaagaaatcaggaaggaagaatcaactactactggactctgctagaacccggggatacgataatatttgag

SEQ ID NO: 96464 - DNA, 80 bp, synthetic construct
  source 1..80: mol_type = other DNA
acagggacctgcctccaggaactccctcttctgtcagtggcgtttgggcgtttccgccaccttctgaggggtcagtagct

SEQ ID NO: 96465 - DNA, 80 bp, synthetic construct
  source 1..80: mol_type = other DNA
gctcctccgcctgcagctccggctagtaagcctactagcccacccagccccgccacacctaagccttctgtccgtaagcc

SEQ ID NO: 96466 - DNA, 80 bp, synthetic construct
  source 1..80: mol_type = other DNA
accttcaccgccaccggctcgtatccgccggcttctttgttgggcgtttccgccaccttctgaggggtcagtagctgctc

SEQ ID NO: 96467 - DNA, 80 bp, synthetic construct
  source 1..80: mol_type = other DNA
tcaccgccaccggctcgtacccgccggcttctttacacttacccggacggagctaaggtctatgcgggttccctgtttga

SEQ ID NO: 96468 - DNA, 80 bp, synthetic construct
  source 1..80: mol_type = other DNA
ccgggagtcctaattaattttactctgtacccccttctaggcttgcttattctttttttctgcgttccgcgcccccggaa

SEQ ID NO: 96469 - DNA, 80 bp, synthetic construct
  source 1..80: mol_type = other DNA
gccccaccacccgtagcctcagttagtaagatgaggaaattgttaaggaagtcagcacttacattaagaaaattggctac

SEQ ID NO: 96470 - DNA, 80 bp, synthetic construct
  source 1..80: mol_type = other DNA
aaccccgccagccaatccgccaagttttgctacaccttggccccccgctcgtgagccgcctacaccaccaccagctctca

SEQ ID NO: 96471 - DNA, 80 bp, synthetic construct
  source 1..80: mol_type = other DNA
ccccgggcagtaagccagctagcccgtctagccccactacacacaggcctcctgcccgtaagccatccacaccgccaccg

SEQ ID NO: 96472 - DNA, 80 bp, synthetic construct
  source 1..80: mol_type = other DNA
acatggggctaccttcccgcaacaagatagcaggttatgtcacgcatctgatgaagcgaattcagagaggcccagtaaga

SEQ ID NO: 96473 - DNA, 80 bp, synthetic construct
  source 1..80: mol_type = other DNA
tgcaggaggaggagagagaaaggagagagggcgccccctcgtccactagtgatatctgggtgttcccaccgccctctgag

SEQ ID NO: 96474 - DNA, 80 bp, synthetic construct
  source 1..80: mol_type = other DNA
acctacgccaccaccggctctcaccccggctagtaaaccagctagcctgtctagccctactacatataggcctcccgccc

SEQ ID NO: 96475 - DNA, 80 bp, synthetic construct
  source 1..80: mol_type = other DNA
cgccggccgccattcaggggctgcttgaccctacaccccctgccagtgacatacaccaggaaggtgagatcttcgacaca

SEQ ID NO: 96476 - DNA, 80 bp, synthetic construct
  source 1..80: mol_type = other DNA
gaaaaagagaaatatgagattacggagcagcgcaagattgatcagaaagctgtggactcacaaattttaccaaaaatcaa

SEQ ID NO: 96477 - DNA, 80 bp, synthetic construct
  source 1..80: mol_type = other DNA
agctattcctcagctccagggctacctgcgatctgtgtttgcttgcgtgctgccgccaccctccgaggagctccaggtcg

SEQ ID NO: 96478 - DNA, 80 bp, synthetic construct
  source 1..80: mol_type = other DNA
atacgaaacctgcctcccccacccttgagcctgctttatcgcccaggcctgttgagcctaagacccctgtgcgtaagccc

SEQ ID NO: 96479 - DNA, 80 bp, synthetic construct
  source 1..80: mol_type = other DNA
ccttccagtccactgttgctgagcttcagcgtcttaagatgaaggtaggtaaaacccgggagtcctaattaattccttct

SEQ ID NO: 96480 - DNA, 80 bp, synthetic construct
  source 1..80: mol_type = other DNA
gccccaccacccgtagcctcagttagtaagcagccaatccgccttgtaactgtggtaattctagagctaatacatgccga

SEQ ID NO: 96481 - DNA, 80 bp, synthetic construct
  source 1..80: mol_type = other DNA
cgggcctgacccccttcgcgaggggatgcgtgcatttatcagaagttttgctacaccttggccccccgctcgtgagccgc

SEQ ID NO: 96482 - DNA, 80 bp, synthetic construct
  source 1..80: mol_type = other DNA
ctacaccaccaccagctctcaccccgggcagtaagccagctagcccgtctagccccactacacacaggcctcctgcccgt

SEQ ID NO: 96483 - DNA, 80 bp, synthetic construct
  source 1..80: mol_type = other DNA
taagatggagatttaacagtagactagcatttgaacacaaggccaaacaactgcacccggaattctataaagactgctga

SEQ ID NO: 96484 - DNA, 80 bp, synthetic construct
  source 1..80: mol_type = other DNA
atcataggaaatctaacagatgaagtaagaaagaccataggaaatctaacagatgaagtaagaaactgtacttttaacgt

SEQ ID NO: 96485 - DNA, 80 bp, synthetic construct
  source 1..80: mol_type = other DNA
tgcttgaggactcgcaaattcagcaggaaagaaatgagaaagatctattagcattggacagttggaaaaatctatggagt

SEQ ID NO: 96486 - DNA, 80 bp, synthetic construct
  source 1..80: mol_type = other DNA
cctcagcagtagtcattgcctagaccctaacaatgaggaaggtggtcatggggtgaaaggctgggcctttgatgatggag

SEQ ID NO: 96487 - DNA, 80 bp, synthetic construct
  source 1..80: mol_type = other DNA
cctggtaactactgtaaaattgcatttcaagcagcacgattgcaacttctcctcaaacaaccaagtagtactttgtgaac

SEQ ID NO: 96488 - DNA, 80 bp, synthetic construct
  source 1..80: mol_type = other DNA
tgggaagaacgatcaatgagaagttccgcttaggctatgaaaccttcaaagtcatcaaagggtggtctaaacctaactcc

SEQ ID NO: 96489 - DNA, 80 bp, synthetic construct
  source 1..80: mol_type = other DNA
atatcaatctcatgcctatataagctttcgcaattttagaaaaaaactccttgtttctttctattattgttggttcacaa

SEQ ID NO: 96490 - DNA, 80 bp, synthetic construct
  source 1..80: mol_type = other DNA
tataactggggatgatgaaaatgcaactgctagcttcatttacaatgggaggcttgtagacagtattggttcatggtcca

SEQ ID NO: 96491 - DNA, 80 bp, synthetic construct
  source 1..80: mol_type = other DNA
attattcattgtggaggggaaaatcgtccatgttagcaaattatcaggaagtgcccagcatgtcgaggagtgctcctgtt

SEQ ID NO: 96492 - DNA, 80 bp, synthetic construct
  source 1..80: mol_type = other DNA
ataagaggaagaaaacaggaggacatcaatctcatgcctgtatgagctttcgcaattttagaaaaaactggacatcaatc

SEQ ID NO: 96493 - DNA, 80 bp, synthetic construct
  source 1..80: mol_type = other DNA
ttgaaagcgaaagagaaaccagagaagttctctcgacgcaggactcggcttgctgaagcgcgcgactagcggaggctaga

SEQ ID NO: 96494 - DNA, 80 bp, synthetic construct
  source 1..80: mol_type = other DNA
tgaagtggagatttaacagcagactagcatttgaacacaaggccaaaataatgcatccggagtattataagaactgctga

SEQ ID NO: 96495 - DNA, 80 bp, synthetic construct
  source 1..80: mol_type = other DNA
caaccattaaccaaaacaacactactatagtagaaaacacatacgtaaacaatacaacaatagttacccaagaaactgac

SEQ ID NO: 96496 - DNA, 80 bp, synthetic construct
  source 1..80: mol_type = other DNA
ggattgataattaaagaagaggaattaaagggatcagctaggcatattgaagaatgctcctgttatgggcacaatcaaaa

SEQ ID NO: 96497 - DNA, 80 bp, synthetic construct
  source 1..80: mol_type = other DNA
tatgacagaagcctggcagcaagacatgtagctcgggagctgcatccggagttctataaagactgatgacacagaagctg

SEQ ID NO: 96498 - DNA, 80 bp, synthetic construct
  source 1..80: mol_type = other DNA
tagaaaatgatacatacaaagaaatatcaaaatgctctttctatatggacacatggagaaaagataagagaaagaaagac

SEQ ID NO: 96499 - DNA, 80 bp, synthetic construct
  source 1..80: mol_type = other DNA
tatgcaattttttctaaacttgatctagtaccaatagaagatgatgagactaagaatgtcaacagcaatattagcaaata

SEQ ID NO: 96500 - DNA, 80 bp, synthetic construct
  source 1..80: mol_type = other DNA
aaaagggaggcaaactgagccagcagcagagggagtagggacagcgtcccaagacttagagagacatggggcatttacaa

SEQ ID NO: 96501 - DNA, 80 bp, synthetic construct
  source 1..80: mol_type = other DNA
aggctctcaagggtagcacagagccttcccacctggacatgtgcagcagctgcagccttaaaggagtatctcccagtggg

SEQ ID NO: 96502 - DNA, 80 bp, synthetic construct
  source 1..80: mol_type = other DNA
ccggggctgccccaccccacaccccctgttagtgatatttgggtgttaccgtcactttctgaagaatcccaggttgatgc

SEQ ID NO: 96503 - DNA, 80 bp, synthetic construct
  source 1..80: mol_type = other DNA
aacgccagccacccctgtccctgagtctgctcaactgcccagccctgttgggtcaaagacccccgtgcgtaagccatcaa

SEQ ID NO: 96504 - DNA, 80 bp, synthetic construct
  source 1..80: mol_type = other DNA
ctttaaaacacaggcttatgagaagcacccagagttcttcaaagactgatgacacagaagttgctgacagggactttcca

SEQ ID NO: 96505 - DNA, 80 bp, synthetic construct
  source 1..80: mol_type = other DNA
aactgctctttcaacacctcctcaataacagcagataagaaacagcgggagtttgcactcttttataaacttgatgtagt

SEQ ID NO: 96506 - DNA, 80 bp, synthetic construct
  source 1..80: mol_type = other DNA
acctggttgcacttggagtctactggaccctgacactggcaatgcctaaaaccatttatgaacttaagatggagtgccca

SEQ ID NO: 96507 - DNA, 80 bp, synthetic construct
  source 1..80: mol_type = other DNA
tatacagaattcacaaagttaccttcgaatagtgggacctattacagcaaaagtgccttcgactagttccacagataccc

SEQ ID NO: 96508 - DNA, 80 bp, synthetic construct
  source 1..80: mol_type = other DNA
atgataatgaagcaaactcctccagcaacagagggaataggaatacaaatgataatggttatatctggcaaagagcacaa

SEQ ID NO: 96509 - DNA, 80 bp, synthetic construct
  source 1..80: mol_type = other DNA
ataatgatggtgaagcaaactcctccagcaacagaaggagtaggaatacaaataatgatagtcatgtctggctaggagca

SEQ ID NO: 96510 - DNA, 80 bp, synthetic construct
  source 1..80: mol_type = other DNA
aagcagcaatagaacctttacagatagcagcaatagtaggattagtaatagcatcaataatagcaatagttgtatggact

SEQ ID NO: 96511 - DNA, 80 bp, synthetic construct
  source 1..80: mol_type = other DNA
tacatgtaatgcaatctttacagaaagcagcaatagaacctttacagatagcagcaatagtaggattagtaatagcattc

SEQ ID NO: 96512 - DNA, 80 bp, synthetic construct
  source 1..80: mol_type = other DNA
cctgaaggtaacaataccactaatattactaacaatggtggtgatgatttaagaaattgctctttcaatatgaccacaat

SEQ ID NO: 96513 - DNA, 80 bp, synthetic construct
  source 1..80: mol_type = other DNA
ggaagtttgacagcgccctagcacgaagacacatagcccgagaactgcacccagaatactataaagactaagactgctga

SEQ ID NO: 96514 - DNA, 80 bp, synthetic construct
  source 1..80: mol_type = other DNA
gtatcagtcttgagagtgtgtgtgaagcatcctgcatgcaatatgtcagacaacttcatacttctgttgctcatgtgcac

SEQ ID NO: 96515 - DNA, 80 bp, synthetic construct
  source 1..80: mol_type = other DNA
ggtcacctctcgtaagtcctcccacagctgagcccttcaagtctttttatgctaaagggttcttggtaatagattcaggt

SEQ ID NO: 96516 - DNA, 80 bp, synthetic construct
  source 1..80: mol_type = other DNA
tacttctctgctaaatgctatccgaaagcatcaaactcggggctccagctaattaatgttacccaacactcaattaaaat

SEQ ID NO: 96517 - DNA, 80 bp, synthetic construct
  source 1..80: mol_type = other DNA
cagctcttaacccagcgcacaatgcaaccaccaatggtcaaaagcagtctgtcagcataacgccaatggctcagtcaagc

SEQ ID NO: 96518 - DNA, 80 bp, synthetic construct
  source 1..80: mol_type = other DNA
acagtgactcagaccactgtagcacaagccgaggaggtggatggctctggtgggtctactacactctctgctgtgatctc

SEQ ID NO: 96519 - DNA, 80 bp, synthetic construct
  source 1..80: mol_type = other DNA
ttgtcgtaatggggagtgtcctcttggcagtctccttactagttagggggctgattgacagcatcaacagtgcccttttc

SEQ ID NO: 96520 - DNA, 80 bp, synthetic construct
  source 1..80: mol_type = other DNA
cttcaaggtagttgtcaaagccagcaacaaagtcctattcattagaaatgtcataaacactacttttgttgtatgcatac

SEQ ID NO: 96521 - DNA, 80 bp, synthetic construct
  source 1..80: mol_type = other DNA
ttgtgatggtggtctgcatagccagttcggccgctgtagagatggaaaatctaccagcaggaacttgggaaagagaagaa

SEQ ID NO: 96522 - DNA, 80 bp, synthetic construct
  source 1..80: mol_type = other DNA
caccccagtcacaacaaccacccatgccaatcagaagttagcttcaaccgtgaacacaatcaccacgagcccagaggaca

SEQ ID NO: 96523 - DNA, 80 bp, synthetic construct
  source 1..80: mol_type = other DNA
ccacaccaacagctctgaccggcaaaagcatcccaacgtcacagtcccgaacaggcccatctaatagaaccaatatgcac

SEQ ID NO: 96524 - DNA, 80 bp, synthetic construct
  source 1..80: mol_type = other DNA
ccaacaccacatagcacacatcaacccctgaggaagctcctctccgcagtaagcaccgaagtggcatcccaaacctcacc

SEQ ID NO: 96525 - DNA, 80 bp, synthetic construct
  source 1..80: mol_type = other DNA
acacacatcggataatgaagccgatggagccccatcgtacgtatgaagcaacagccacaccaatcccctcatcctcagtc

SEQ ID NO: 96526 - DNA, 80 bp, synthetic construct
  source 1..80: mol_type = other DNA
cctgtaaatcttgcatcaaccgtcacaaaagtacacggcaaacggtcagccagtgggcaatgctgcctaacaacatcatc

SEQ ID NO: 96527 - DNA, 80 bp, synthetic construct
  source 1..80: mol_type = other DNA
atctccctctgacatacctacataacagaacactgcactgcatgatattgcctcagcttttacctactcgttgatatctt

SEQ ID NO: 96528 - DNA, 80 bp, synthetic construct
  source 1..80: mol_type = other DNA
aacagcagtcacaacggatgatacaggagcctccaccatcccacaagtcaccactgacacctccccacctattccaaccc

SEQ ID NO: 96529 - DNA, 80 bp, synthetic construct
  source 1..80: mol_type = other DNA
aggtcacgtccccagcaggcagcagttcgaacagcacatcaaaccaccccaaaacaacactccagccaacatcctcagga

SEQ ID NO: 96530 - DNA, 80 bp, synthetic construct
  source 1..80: mol_type = other DNA
tgttttccatcaacaccccaaggatgtcggcgcaaacgtccacccaatcgactcatccaacagcacaacaggtgctagca

SEQ ID NO: 96531 - DNA, 80 bp, synthetic construct
  source 1..80: mol_type = other DNA
ccccagggccttaagaaatactacagtaaaatattaaagctgctgcatctcactttagaagaagattctgaaggcttact

SEQ ID NO: 96532 - DNA, 80 bp, synthetic construct
  source 1..80: mol_type = other DNA
gtacaagaacactgaaacaggcatgtgatgatggctacttccaagaaagaataaaggaattctttttgacaggggaaggt

SEQ ID NO: 96533 - DNA, 80 bp, synthetic construct
  source 1..80: mol_type = other DNA
tcaaatgattgcgaataggaatttcaatgtctgcaagagattgactggaaggagtaccggagagaggcttccaagaagtg

SEQ ID NO: 96534 - DNA, 80 bp, synthetic construct
  source 1..80: mol_type = other DNA
tgaaggtagcaacctggtcaatttctacaaagtcatatgtatctcgggtgataacactaaatggggccccatccactgct

SEQ ID NO: 96535 - DNA, 80 bp, synthetic construct
  source 1..80: mol_type = other DNA
atgattgcgaataggaatttcaatgtttgtaagaggttgacaggcaggagtaccggagaaagactcccaagaagtgttag

SEQ ID NO: 96536 - DNA, 80 bp, synthetic construct
  source 1..80: mol_type = other DNA
aggcagcaatctagttaatttctacaaagttatttgcatctccggagataacaccaagtggggcccaatacactgctgtt

SEQ ID NO: 96537 - DNA, 80 bp, synthetic construct
  source 1..80: mol_type = other DNA
ccagccaaaatggaaataatagcactaacaattgtactattagcaacaacaacgagcaatgcagacaaaatctgcattgg

SEQ ID NO: 96538 - DNA, 80 bp, synthetic construct
  source 1..80: mol_type = other DNA
gtgcatttggttagctccactggcattgttaagaagggactggagtggttcgagaaaaatgcaggaaccattaaatcttg

SEQ ID NO: 96539 - DNA, 80 bp, synthetic construct
  source 1..80: mol_type = other DNA
ggctccatttcattagggttggttgtattcaatgttctattgcatgccgtgagcatcatattaatgatgttagccctggg

SEQ ID NO: 96540 - DNA, 80 bp, synthetic construct
  source 1..80: mol_type = other DNA
aattgtctgggagggaatgcttagtcccctgtttttgggttgaaatgatcagaggcaggccagaagaaggaacaatctgg

SEQ ID NO: 96541 - DNA, 80 bp, synthetic construct
  source 1..80: mol_type = other DNA
gcacaaacaaatctgtacacaaggactgacacaacaacaagtgtagcgacggaagacataaataggaccttcaaaccatt

SEQ ID NO: 96542 - DNA, 80 bp, synthetic construct
  source 1..80: mol_type = other DNA
ccgcaagtggaggtatttgggtgacaagagaaccttatgtatcgtgcggtcttggtaaatgttatcagtttgcacttggg

SEQ ID NO: 96543 - DNA, 80 bp, synthetic construct
  source 1..80: mol_type = other DNA
attgttcataagagagggaaaaattataaacatcagccctttgtcagggagtgctcagcacgtggaggaatgctcctgtt

SEQ ID NO: 96544 - DNA, 80 bp, synthetic construct
  source 1..80: mol_type = other DNA
aaatcattttgagaaaattcagatatttcctaggaactcttggcccaaccacgatgcctcatcaggagttagctcagcat

SEQ ID NO: 96545 - DNA, 80 bp, synthetic construct
  source 1..80: mol_type = other DNA
aggggtatcaaacatcaaaatgaaaagaacagtgattgctctcgcaataatcagcattgtttcaggtgaccaaatctgca

SEQ ID NO: 96546 - DNA, 80 bp, synthetic construct
  source 1..80: mol_type = other DNA
acagggctaagaaatgtaccccaaagagaaaaaagaggtctgtttggagcaatagcaggtttcatagaaggaggatggca

SEQ ID NO: 96547 - DNA, 80 bp, synthetic construct
  source 1..80: mol_type = other DNA
gcctgcctttccacaatgtccaccctttttctctaggggagtgtcccaaatatgttaggttggagagacttgtccttgca

SEQ ID NO: 96548 - DNA, 80 bp, synthetic construct
  source 1..80: mol_type = other DNA
aaagcaggagtaaaaatgaatccaaaccagaagataataacaattggctccgtctctctggccgtttcagtggcatgttt

SEQ ID NO: 96549 - DNA, 80 bp, synthetic construct
  source 1..80: mol_type = other DNA
atgaacacccaattcgaagctatcgggaaagaattcaacaaccttgaaaggagggtagaaaacctgaacaagaaaatgga

SEQ ID NO: 96550 - DNA, 80 bp, synthetic construct
  source 1..80: mol_type = other DNA
ggcccaaccacaatgcttcagcaggagttagctcagcatgttcacacaatggtaagtcctcttttttcaggaatgtagtg

SEQ ID NO: 96551 - DNA, 80 bp, synthetic construct
  source 1..80: mol_type = other DNA
tggttaatcaagaaggacaatgtgtatcgaacaatcacaaggacctacaacaacaccaatgtagaagaccttttaatatt

SEQ ID NO: 96552 - DNA, 80 bp, synthetic construct
  source 1..80: mol_type = other DNA
tgaaatcgggcgattcaatcacctttgagagcactgggaactttatagctcccgaatatgcatataagattgttaaaagg

SEQ ID NO: 96553 - DNA, 80 bp, synthetic construct
  source 1..80: mol_type = other DNA
gggagctctgcaattatgaaaagtgaactaaattatggtaactgtgatgccaaatgtcagaccccgattggtgctattaa

SEQ ID NO: 96554 - DNA, 80 bp, synthetic construct
  source 1..80: mol_type = other DNA
acgaatgcagcatccccgttaacagccaagtagtgccatgtgaaccaatcataatagagagaagcacaaactatcgtgag

SEQ ID NO: 96555 - DNA, 80 bp, synthetic construct
  source 1..80: mol_type = other DNA
atggagagaacagtgattgcctttgcaataatcagcattgttacaggtgaccaaatatgcattggttaccatgcaaacaa

SEQ ID NO: 96556 - DNA, 80 bp, synthetic construct
  source 1..80: mol_type = other DNA
ataaaccattttgagaagattcagatcttttctaggaactcttggcccaaccacaatgcatcagcaggagttagctcagc

SEQ ID NO: 96557 - DNA, 80 bp, synthetic construct
  source 1..80: mol_type = other DNA
aggtcattggtggttgggctactgctaattccaagtcacagaccaatagacaagtcatagttgacaataacaactggtct

SEQ ID NO: 96558 - DNA, 80 bp, synthetic construct
  source 1..80: mol_type = other DNA
gagagggacacgaactatagagattggtcaaaatcacagtgccggatcactggatttgctcctttttccaaggacaactc

SEQ ID NO: 96559 - DNA, 80 bp, synthetic construct
  source 1..80: mol_type = other DNA
tgcacatctgtgttactggagatgatagaaatgcaactgctagtttcatttatgatggagtgctcgtcgacagtgtgggt

SEQ ID NO: 96560 - DNA, 80 bp, synthetic construct
  source 1..80: mol_type = other DNA
gcctgcctctccacaatgttcaccccttttccattggggagtgtcccaaatatgttagattggaaagacttgtccttgcg

SEQ ID NO: 96561 - DNA, 80 bp, synthetic construct
  source 1..80: mol_type = other DNA
agtagtaatagtactgagactaatgctactgccatggagaaagaagacatgaaaaattgctctttcaatgttaccacagt

SEQ ID NO: 96562 - DNA, 80 bp, synthetic construct
  source 1..80: mol_type = other DNA
tctagcagattcccttctgtgtcctgagtcaaagtcacagagttcacagtttctactgttactgtgtcagaatcctcttc

SEQ ID NO: 96563 - DNA, 80 bp, synthetic construct
  source 1..80: mol_type = other DNA
cacccgcctcaccctcccaaagtgctgggatttcaggtgtgagccaccgtgcccggccttgtttgttttgttttttaaga

SEQ ID NO: 96564 - DNA, 80 bp, synthetic construct
  source 1..80: mol_type = other DNA
ttgtggtaaactatacataacgtaaaatttactattaaaaaatttttaagtatgataaaaatgtaacataaaatttacaa

SEQ ID NO: 96565 - DNA, 80 bp, synthetic construct
  source 1..80: mol_type = other DNA
tcttacttcttttaagtatacacttcagtgatattaaacattcaccttgttatacaactataaccacagtccatctccag

SEQ ID NO: 96566 - DNA, 80 bp, synthetic construct
  source 1..80: mol_type = other DNA
catacaacaaaaagcacagatagaactataagacaagcatcttgccaaattagtagagcagtttggaatgaaactttaaa

SEQ ID NO: 96567 - DNA, 80 bp, synthetic construct
  source 1..80: mol_type = other DNA
aattagtagagcagtttggaatgaaactttaaagcaggtagctggaaaattgcatgaaaaatttaataaaacaatagtct

SEQ ID NO: 96568 - DNA, 80 bp, synthetic construct
  source 1..80: mol_type = other DNA
ctgtgattcgctactaggagggaaagagtggtcttacattgtcgaaagatcatcagctgttaatggaatgtgctaccctg

SEQ ID NO: 96569 - DNA, 80 bp, synthetic construct
  source 1..80: mol_type = other DNA
aactcaggtcttttttcagctctgctcgctcctacaaaaaactcctactctttccagaccgtacttggaatgtgactttc

SEQ ID NO: 96570 - DNA, 80 bp, synthetic construct
  source 1..80: mol_type = other DNA
aatgggacaagcagagcatgctcaggctcattctacagaagtatgagatggttgacacacaaggacaattcttaccctat

SEQ ID NO: 96571 - DNA, 80 bp, synthetic construct
  source 1..80: mol_type = other DNA
gggaatttcacaacaaaccgaaatggaaacaatagcattaatagctatactattattgacaacagcaggcaatgcagaca

SEQ ID NO: 96572 - DNA, 80 bp, synthetic construct
  source 1..80: mol_type = other DNA
tgttatgtgcaacagccctaggacaccctcttattctagacaaatgcagtatagaaggattggtatacggtaatcctgct

SEQ ID NO: 96573 - DNA, 80 bp, synthetic construct
  source 1..80: mol_type = other DNA
caaatgtgtacagaactcaaactcagtgacaatgaagggaggctgatccagaataaaagcagggtagataatcactcact

SEQ ID NO: 96574 - DNA, 80 bp, synthetic construct
  source 1..80: mol_type = other DNA
gcttatttaatgataaaagttatttactcaaagctattctccgtaatttttaatctatgtcgtacttcttcaatcaacca

SEQ ID NO: 96575 - DNA, 80 bp, synthetic construct
  source 1..80: mol_type = other DNA
ataagctttcgcaattttagaaaaaactccttgtttctgcactggcactttcaagaaaagtaaagtcggattgacatcca

SEQ ID NO: 96576 - DNA, 80 bp, synthetic construct
  source 1..80: mol_type = other DNA
gataagaactttctcgtttcagcttatttaatctatgtcgtacttcttcaatcaaccatcttatctcttcgaacttctgg

SEQ ID NO: 96577 - DNA, 80 bp, synthetic construct
  source 1..80: mol_type = other DNA
tctagggcccgaattgatgcacgaattgacttcgaatctggaaggattaagaaacaaggcattttttcatgaaggacaag

SEQ ID NO: 96578 - DNA, 80 bp, synthetic construct
  source 1..80: mol_type = other DNA
cttacaaaatcctcaccatttattcgactgttgcctcatctcttgtgattgcaagggtgtttttgccaattatatacaaa

SEQ ID NO: 96579 - DNA, 80 bp, synthetic construct
  source 1..80: mol_type = other DNA
gtgtgctcttccgatcttgggtgacaaagacataatggattccaatactgtgtcaagcttccaggtagactgctttcttt

SEQ ID NO: 96580 - DNA, 80 bp, synthetic construct
  source 1..80: mol_type = other DNA
atggaaataaaaatgtttgtattattttgtgcattcactgcactgaaagctgacaccatttgtgtaggataccatgccaa

SEQ ID NO: 96581 - DNA, 80 bp, synthetic construct
  source 1..80: mol_type = other DNA
ccagttccctgatcttattagtctccctgggggcaatcagcttctggatgtgttctaatgggtcattacaatgcagaata

SEQ ID NO: 96582 - DNA, 80 bp, synthetic construct
  source 1..80: mol_type = other DNA
aatcacagcgtaaacaaaggagtgactgcatcatgctcccaaaagggaaaaagcagtttttacagaaacttactatggct

SEQ ID NO: 96583 - DNA, 80 bp, synthetic construct
  source 1..80: mol_type = other DNA
tcctatatgtacaacaacaggaaagaagtccttgtattatggggtgttcaccacccgtctaatatggaggatcaaatggc

SEQ ID NO: 96584 - DNA, 80 bp, synthetic construct
  source 1..80: mol_type = other DNA
cttttgcactgaataagggctttagttcaggaatcatgatctcggatgctcaggtggagagttgcactacgaagtgtcaa

SEQ ID NO: 96585 - DNA, 80 bp, synthetic construct
  source 1..80: mol_type = other DNA
cggaatcagcaacaaagtaaactcagtaattgagaaaatgaatgttcaatttacttcagtgggcaaggagttcaataatc

SEQ ID NO: 96586 - DNA, 80 bp, synthetic construct
  source 1..80: mol_type = other DNA
cacacaaatcgcaattgacgggatcagcaacaaagtaaattcaataattgaaaagatgaacatccaatttacttctgtgg

SEQ ID NO: 96587 - DNA, 80 bp, synthetic construct
  source 1..80: mol_type = other DNA
atgaaagcaaaattgtttgtactgttctgtgcattcactgcactaaaagccgacaccatttgtgtaggctatcatgctaa

SEQ ID NO: 96588 - DNA, 80 bp, synthetic construct
  source 1..80: mol_type = other DNA
atggaagcaaaactgtttgtattgttttgtatattcactacactgaaagctgacaccatttgtgtgggctatcatgccaa

SEQ ID NO: 96589 - DNA, 80 bp, synthetic construct
  source 1..80: mol_type = other DNA
gtacgcaaatcgcaattgacgggataagcaacaaagtaaactcagtgattgaaaaaatgaacattcaatttacttcagtg

SEQ ID NO: 96590 - DNA, 80 bp, synthetic construct
  source 1..80: mol_type = other DNA
atggaattaaaactatttgtattattctgtgcattcactgcactaaaagccgacaccatttgtataggctaccatgctaa

SEQ ID NO: 96591 - DNA, 80 bp, synthetic construct
  source 1..80: mol_type = other DNA
acaattaccataaatattcagaagaatccaaattgaaaagggaggaaatagacggtgtgaaattagaatcaatgggaatt

SEQ ID NO: 96592 - DNA, 80 bp, synthetic construct
  source 1..80: mol_type = other DNA
agacaatggggcagtggctgtgctgaagtacaataacataatagtagacactatcaagagttggagaaacaacatattga

SEQ ID NO: 96593 - DNA, 80 bp, synthetic construct
  source 1..80: mol_type = other DNA
atttacaaaaacagcacttggataaatcagacatatattaacatcagcaacaacaattttgttgttgaaaagacagtgat

SEQ ID NO: 96594 - DNA, 80 bp, synthetic construct
  source 1..80: mol_type = other DNA
gagaggaacagaacgaagataatgcacttatttaacatcaccatagagaaagagatatgccccaaattagtggaatacag

SEQ ID NO: 96595 - DNA, 80 bp, synthetic construct
  source 1..80: mol_type = other DNA
tccaggggcggggagtcttcgagctctcggacgaaaaggcaacgaacccgatcgtgccttcctttgacatgagtaatgaa

SEQ ID NO: 96596 - DNA, 80 bp, synthetic construct
  source 1..80: mol_type = other DNA
tccaggggcggggagtcttcgagctctcggacgaaaaggcaacgaacccgatcgggcctcctcaaaacatggataatgag

SEQ ID NO: 96597 - DNA, 80 bp, synthetic construct
  source 1..80: mol_type = other DNA
tgagaagcccaggttccttccggatctatatgattataaagagaaccgattcattgaaattggtgtaacaagaagggaag

SEQ ID NO: 96598 - DNA, 80 bp, synthetic construct
  source 1..80: mol_type = other DNA
gtgaatcaacaatagttgaatccagcgacccaaatgcactcctaaagcacagatttgaaatcattgagggaagagatcgc

SEQ ID NO: 96599 - DNA, 80 bp, synthetic construct
  source 1..80: mol_type = other DNA
aatggaccaccctgttcccaacgatcaaaattcctgcttatggatgccttaaaattaagcattgaagatccgagtcatga

SEQ ID NO: 96600 - DNA, 80 bp, synthetic construct
  source 1..80: mol_type = other DNA
ggacagctggagtggaatctgcagtgctgagagggttcctaattctagggaaggaaaacaaaaaatatggaccagcattg

SEQ ID NO: 96601 - DNA, 80 bp, synthetic construct
  source 1..80: mol_type = other DNA
gggaactgaaagtattgatgacatcatgggaatgataggtgtattacccgatatgactccaagcacagaaatgtcattga

SEQ ID NO: 96602 - DNA, 80 bp, synthetic construct
  source 1..80: mol_type = other DNA
gtaactccccagtatttaactacaataaggcaaccaaaaggctaacggtcctcggaaaggacgcaggtgcattggcggag

SEQ ID NO: 96603 - DNA, 80 bp, synthetic construct
  source 1..80: mol_type = other DNA
ttcacctaatgggtaactccaaatcaaaatcaaagccaactgccgatcagcatgaacaacaagtactcaacaacaccaaa

SEQ ID NO: 96604 - DNA, 80 bp, synthetic construct
  source 1..80: mol_type = other DNA
atgtggacaatttgtatgtctaatgtgattttaactaactcgctagtgaaacagtttaagatgtctgataaatcatttct

SEQ ID NO: 96605 - DNA, 80 bp, synthetic construct
  source 1..80: mol_type = other DNA
ggatggttgatttaatctaaattcttggaatgatccataggaactcaatgtgattgtttcttctgtgagattggaacata

SEQ ID NO: 96606 - DNA, 80 bp, synthetic construct
  source 1..80: mol_type = other DNA
aaatccttcaattcagacagaatttctgagagggggtcttgcatgactgccagaagttttagttatggttctgcctagga

SEQ ID NO: 96607 - DNA, 80 bp, synthetic construct
  source 1..80: mol_type = other DNA
tttatagtcaaggttgcctttatgatgtgagagaagttgtcaggagtgacctttatggtttccagcatgttaccaccatc

SEQ ID NO: 96608 - DNA, 80 bp, synthetic construct
  source 1..80: mol_type = other DNA
ctctcaatttgtcaaggtctccatcattccttttggactttctgaggattctttgaacaagagagacttgagtgaagtca

SEQ ID NO: 96609 - DNA, 80 bp, synthetic construct
  source 1..80: mol_type = other DNA
accggtgttgtgaactcactgagccctcttctcagggactgagtccatctgaagctggggacttcctttgagctgctcat

SEQ ID NO: 96610 - DNA, 80 bp, synthetic construct
  source 1..80: mol_type = other DNA
tcaaggataccatccttcaaagactaggtgtcctgtttggttcaagaattgcattctcagatcttcagaagattggccca

SEQ ID NO: 96611 - DNA, 80 bp, synthetic construct
  source 1..80: mol_type = other DNA
aagacgtttttattgattagaaatacaacttggagtaaccaatgtgtaatgaatcatgtaaactccatgcatctgatgtt

SEQ ID NO: 96612 - DNA, 80 bp, synthetic construct
  source 1..80: mol_type = other DNA
tttcagttttgtggatttattacatattaagagtataactagaatgatggaccatataattgataaatttttgattatag

SEQ ID NO: 96613 - DNA, 80 bp, synthetic construct
  source 1..80: mol_type = other DNA
tagcagtaattgaagtaggtggtgctgatgtacttgatataacgtctgatccgacaaccaaatccacaaactgaactaaa

SEQ ID NO: 96614 - DNA, 80 bp, synthetic construct
  source 1..80: mol_type = other DNA
tgatgtccttgatataacgtctgatccgacaactaaatacacaaactgtacggatgatgagaataaattggaaaaaatgg

SEQ ID NO: 96615 - DNA, 80 bp, synthetic construct
  source 1..80: mol_type = other DNA
ccccctctacacagctacttataactcatattcagtagatttatcagatgaatatctaatatatgtgcagaaagaaagag

SEQ ID NO: 96616 - DNA, 80 bp, synthetic construct
  source 1..80: mol_type = other DNA
cttggtaaccactgtaacattacatttcaagcaatatgaatgcaattcaacctcaaacaaccaagtaacgctgtgtgagc

SEQ ID NO: 96617 - DNA, 80 bp, synthetic construct
  source 1..80: mol_type = other DNA
acccaacaacaacaacccctacgataccgagctacggcgatgccacaataacatacaataacactataataaacaacata

SEQ ID NO: 96618 - DNA, 80 bp, synthetic construct
  source 1..80: mol_type = other DNA
acaacaacgataataactgaagcagaaaggcctttcaagtcaccactaccgctgtgccccttcagaggattcttcccttt

SEQ ID NO: 96619 - DNA, 80 bp, synthetic construct
  source 1..80: mol_type = other DNA
acaaacgggggagtgtgttattgtcgcctgaagaagtcagtgagacacaagggacagagaagctgacaataacttattcg

SEQ ID NO: 96620 - DNA, 80 bp, synthetic construct
  source 1..80: mol_type = other DNA
atggaaagaatagtaattgcctttgcgataatcaacattgtcacaggagaccgcatctgcattggttatcatgcaaacaa

SEQ ID NO: 96621 - DNA, 80 bp, synthetic construct
  source 1..80: mol_type = other DNA
tatcactggcaatcatgatagctggtctgtctttttggatgtgttccaatgggtcattgcagtgcagagtttgcatctag

SEQ ID NO: 96622 - DNA, 80 bp, synthetic construct
  source 1..80: mol_type = other DNA
aaaacaaaccaacttgagaaaattcagatattccctaggggctcctggcccaatcatgacgcctcatcaggagtgagctc

SEQ ID NO: 96623 - DNA, 80 bp, synthetic construct
  source 1..80: mol_type = other DNA
caggactgagaaacataccccaaagagggaaaagaggcctatttggagcaatagccgggttcatagaaggaggatggcaa

SEQ ID NO: 96624 - DNA, 80 bp, synthetic construct
  source 1..80: mol_type = other DNA
tcaaccagaacgaatgcagcattcccaccaacaatcaagtgatgccctgtgaaccaatcataatcgaaaagagcatcgac

SEQ ID NO: 96625 - DNA, 80 bp, synthetic construct
  source 1..80: mol_type = other DNA
tatcctagatacccaaatgtcagatgtgtatgcagggacaactggaagggttctaacagacccattgtagacataaatat

SEQ ID NO: 96626 - DNA, 80 bp, synthetic construct
  source 1..80: mol_type = other DNA
gaatgtatggaaagcataaaaaatggcacatacaattacccaaaatactcagaagaatccaaactgaagagagaggaaat

SEQ ID NO: 96627 - DNA, 80 bp, synthetic construct
  source 1..80: mol_type = other DNA
agtagagacttcaaattcaataaatggggcatgctaccctgggaaattcgctaattacgaggaattgaaggaactattga

SEQ ID NO: 96628 - DNA, 80 bp, synthetic construct
  source 1..80: mol_type = other DNA
atgtgctttttcatgcaagttgccattctagtaactactgtaacattacatttcaaacaatgtgagtgcaactccaccgc

SEQ ID NO: 96629 - DNA, 80 bp, synthetic construct
  source 1..80: mol_type = other DNA
tctgagggtaatgaaacaccgggtgggtattgtctaacaagatggatgctgattgaggctgagttgaagtgctttgggaa

SEQ ID NO: 96630 - DNA, 80 bp, synthetic construct
  source 1..80: mol_type = other DNA
gcggctttgacagtcagggcaacacaccttttgggaaaggtgtcatgaagaccacaactctcaacagattgctaatacag

SEQ ID NO: 96631 - DNA, 80 bp, synthetic construct
  source 1..80: mol_type = other DNA
tccagggagctgtctacaactttgatgaggacagagtggctgccttcaccaatctggcccgcgctaatggcctaggactc

SEQ ID NO: 96632 - DNA, 80 bp, synthetic construct
  source 1..80: mol_type = other DNA
ataagtatggctacattaggtaagaaactaaggagtgttaagtccatggaaggcctgcgcaacgcattattgggatacaa

SEQ ID NO: 96633 - DNA, 80 bp, synthetic construct
  source 1..80: mol_type = other DNA
gtgacgggagcaatgtgataattaaagaaaggcaggcaccgtcctcaccccaacaccaagccatttccacagctacccta

SEQ ID NO: 96634 - DNA, 80 bp, synthetic construct
  source 1..80: mol_type = other DNA
agaaaatgaggcctgacctctctggcatggtccttgaagaggggtgccctgaaggcacagtgtgtaccataatgataaaa

SEQ ID NO: 96635 - DNA, 80 bp, synthetic construct
  source 1..80: mol_type = other DNA
agagactctggagagctgttaccgttggccgttcgtatgggagcagtggcctcaatgaaaattcagggaaaactcatgca

SEQ ID NO: 96636 - DNA, 80 bp, synthetic construct
  source 1..80: mol_type = other DNA
aattttagctttctatttctagtgccccctaatgtggaacaaaagactaggccttttagtgtccctaatatacctttgaa

SEQ ID NO: 96637 - DNA, 80 bp, synthetic construct
  source 1..80: mol_type = other DNA
gaatacattatcaaactcaagggtgccatcattgatcaagtccatgactgtatccagagatcagaaccagataattcaat

SEQ ID NO: 96638 - DNA, 80 bp, synthetic construct
  source 1..80: mol_type = other DNA
gagcaaaggtcgtgcgcctatcagtcacccagggcgcagcttttgctccgcatctgggcaccatacattataccaccact

SEQ ID NO: 96639 - DNA, 80 bp, synthetic construct
  source 1..80: mol_type = other DNA
cccttggcagataccaacttatggatcaactttaactgaagccgctcagttggcgcctcccatcttccctcctggatttg

SEQ ID NO: 96640 - DNA, 80 bp, synthetic construct
  source 1..80: mol_type = other DNA
gagaaacattggttttctttctatcagatttccctatctctaatggtaagaatggactcagtgtaccgtgcaccctccca

SEQ ID NO: 96641 - DNA, 80 bp, synthetic construct
  source 1..80: mol_type = other DNA
ctactatttcttcagcttcatctatacctagattctttaatactgaaagattacccttattcgcaaataataagaggtga

SEQ ID NO: 96642 - DNA, 80 bp, synthetic construct
  source 1..80: mol_type = other DNA
atggcgagactccgtgggcatttaggcccacagcgtggtgaaaccaccacaaaaatcaaagatgccaatatggcattaga

SEQ ID NO: 96643 - DNA, 80 bp, synthetic construct
  source 1..80: mol_type = other DNA
cctttatgggggttgttgagttgattgtactaatggctgaattatttgatgtattttggacaccacctgatatatcaagc

SEQ ID NO: 96644 - DNA, 80 bp, synthetic construct
  source 1..80: mol_type = other DNA
tattaagaagtacttctttggaggtgaccaaacagagcggacgctgcgaggcattgaggatgcagtaatagatatggagg

SEQ ID NO: 96645 - DNA, 80 bp, synthetic construct
  source 1..80: mol_type = other DNA
ctgtcatggaggtgaagaggtccatgggttgggatgatgaaccagaacaaaaagagagtacagtcagggcatggtgcgac

SEQ ID NO: 96646 - DNA, 80 bp, synthetic construct
  source 1..80: mol_type = other DNA
aggccacagctttgaccatggaaaggcaggatgagtttcaattacagggagcaatctacaattttgatgaggatagagtg

SEQ ID NO: 96647 - DNA, 80 bp, synthetic construct
  source 1..80: mol_type = other DNA
gctgcctttaccagtatggcccgagccaatggtttggggcttatcaacatggcaactctaggtaagaaactgagaagtgt

SEQ ID NO: 96648 - DNA, 80 bp, synthetic construct
  source 1..80: mol_type = other DNA
caagaccatggagggaatgcgaaatgcactagtgggttacaaaattgaagaatgtgatataatctggaacacccgaacct

SEQ ID NO: 96649 - DNA, 80 bp, synthetic construct
  source 1..80: mol_type = other DNA
actcaattaagagtgatggtaaaactgtcacagtcaaagagaaacaaagtccatcatcagcccagcaccaagctgtctgt

SEQ ID NO: 96650 - DNA, 80 bp, synthetic construct
  source 1..80: mol_type = other DNA
acggccacccttgccctatccaggttgcgtgcggcccgggctctggcttacgcctcttgtttccagagtgcggttttgtc

SEQ ID NO: 96651 - DNA, 80 bp, synthetic construct
  source 1..80: mol_type = other DNA
tgtgctccagatggccggctctgctgtggtggtaagtagagcagtcaagcgtatgttcggcacgcgcacagatcaaccag

SEQ ID NO: 96652 - DNA, 80 bp, synthetic construct
  source 1..80: mol_type = other DNA
ctcttgaaggtggccacaaggaacacaactgtagggtccaccgcgcagaggctgcaggccgtggccctatagggcacgac

SEQ ID NO: 96653 - DNA, 80 bp, synthetic construct
  source 1..80: mol_type = other DNA
gcgcaacaacgagaggttgttcgatgccggtggggtaaccccttcaactatacccagcacatttgagagagacagttcaa

SEQ ID NO: 96654 - DNA, 80 bp, synthetic construct
  source 1..80: mol_type = other DNA
ggtgtcattgagcgctacggcttgtgtgagagtgaacaagaagatggagatgagcaaacattagaactgccaactgctaa

SEQ ID NO: 96655 - DNA, 80 bp, synthetic construct
  source 1..80: mol_type = other DNA
aggagggcaagaataagggtaaaaccaaaaagggccgaggtcgcaagtccaactttagtgccttctcaaggcgtggcctt

SEQ ID NO: 96656 - DNA, 80 bp, synthetic construct
  source 1..80: mol_type = other DNA
gtgacactgtcgatgaacaccagacagtgtcctggtctgccactaacggagttgacattggggttggagaactgacaact

SEQ ID NO: 96657 - DNA, 80 bp, synthetic construct
  source 1..80: mol_type = other DNA
caagagtggaagggggcccatcattgcaacaagttttgagggaccagctcaaaccctttgctgagcctcgcggtaggttg

SEQ ID NO: 96658 - DNA, 80 bp, synthetic construct
  source 1..80: mol_type = other DNA
cctggagttttaatgatgcatgcatgtccttggataagaccaccagttctggctaccctcatcataagaggaagaatgat

SEQ ID NO: 96659 - DNA, 80 bp, synthetic construct
  source 1..80: mol_type = other DNA
ccaataatatgtttgagcttggaaaatctatgaaacctgtgtacactgcagcacttaaagatgagctcgttaagccagat

SEQ ID NO: 96660 - DNA, 80 bp, synthetic construct
  source 1..80: mol_type = other DNA
gttcgcgggccttactggaacttatgccccctcccaccattggacacccgcaacaatggccccgcaaaggaacctcttat

SEQ ID NO: 96661 - DNA, 80 bp, synthetic construct
  source 1..80: mol_type = other DNA
ctgtggggagcggaccttggcacagtcattcgtgccgctagagcatttggtccgttttgtgaagccataaaacctcatgt

SEQ ID NO: 96662 - DNA, 80 bp, synthetic construct
  source 1..80: mol_type = other DNA
aagtctgacggtcccatagtagtcaagcaacaggtggacggcctcgtctttcttcggcgaaccatctcaaaagatgccat

SEQ ID NO: 96663 - DNA, 80 bp, synthetic construct
  source 1..80: mol_type = other DNA
tggttaccagggtcgtctagaccgaaactccattgagaggcagctttggtggacgcgtggacccaaccatgatgacccgt

SEQ ID NO: 96664 - DNA, 80 bp, synthetic construct
  source 1..80: mol_type = other DNA
aggagacatgatagaattttatgaaggtcatattttccactatgcaatctacattggacaaggtaaaaccattggagtcc

SEQ ID NO: 96665 - DNA, 80 bp, synthetic construct
  source 1..80: mol_type = other DNA
aagttccccttgaggatgttagaaatgtgctctttcataataatgataattcccctactatgagattggtctgcatgtta

SEQ ID NO: 96666 - DNA, 80 bp, synthetic construct
  source 1..80: mol_type = other DNA
tatacacctcttagggctagtggcagctcatcaggtactgacccatttgtcattgcaggaagggtcttgacttgcccgag

SEQ ID NO: 96667 - DNA, 80 bp, synthetic construct
  source 1..80: mol_type = other DNA
cccggattttagcttcttgtttctggtccccccgaatgtagaacagaaaactaagcccttctctgtgcccaacttgccac

SEQ ID NO: 96668 - DNA, 80 bp, synthetic construct
  source 1..80: mol_type = other DNA
taaatacactctccaactcgagggttccttcacttatcaatgctatgatgatttccagagaccatgggcagatggtgcag

SEQ ID NO: 96669 - DNA, 80 bp, synthetic construct
  source 1..80: mol_type = other DNA
ttccaaaatggtagggtcacacttgatggccagctgcagggtacaacccctacctcattgagccagctatgtaagattag

SEQ ID NO: 96670 - DNA, 80 bp, synthetic construct
  source 1..80: mol_type = other DNA
agggaaagtcttccttgctagtggaggcaatggtctgaatctcactgaattggatggatctgcttatcatgcctttgaaa

SEQ ID NO: 96671 - DNA, 80 bp, synthetic construct
  source 1..80: mol_type = other DNA
gccctgctccaattgggttcccagatattggtgattgtgattggcatatgaacgccacaactactagcaattttactggg

SEQ ID NO: 96672 - DNA, 80 bp, synthetic construct
  source 1..80: mol_type = other DNA
tccaacgatgagcaccaaatacttgtcaaacaagagtcaacatttgccccccaccttggtcatgtgcaggctgaccacct

SEQ ID NO: 96673 - DNA, 80 bp, synthetic construct
  source 1..80: mol_type = other DNA
accggaagtcgctaacactgaccttatggtgtctttgagttggatatcccctgtttcagaccaacacaggcgtgacgtgg

SEQ ID NO: 96674 - DNA, 80 bp, synthetic construct
  source 1..80: mol_type = other DNA
acccatgggtcataccgcgttatggctctaccctcactgaagctgcccagttggccccacctatttatcctcctggattt

SEQ ID NO: 96675 - DNA, 80 bp, synthetic construct
  source 1..80: mol_type = other DNA
ggtgaagctatagtgttctttatgtctgatttcccagtggtgtcgggtgttaatggtatgaggattccatgcacactacc

SEQ ID NO: 96676 - DNA, 80 bp, synthetic construct
  source 1..80: mol_type = other DNA
ccaggaatatgtggctcattttgtaaatgagcaagcccccactcgaggtgaggcagctctcttgcattatgttgatcctg

SEQ ID NO: 96677 - DNA, 80 bp, synthetic construct
  source 1..80: mol_type = other DNA
tggcattcaggctggaactgaggctgctctccagcatcagcgttttcaacaggatcttaccttacaaagtaattccttta

SEQ ID NO: 96678 - DNA, 80 bp, synthetic construct
  source 1..80: mol_type = other DNA
aacatgataaagaaatgattggacttcaggtaggtgcctctacagcattgttgcaaaacagtttgaacactcggtacaac

SEQ ID NO: 96679 - DNA, 80 bp, synthetic construct
  source 1..80: mol_type = other DNA
ttattaacacaggcaggcatgtcaacagctgatgcagccagggctgtggtaggtgcgccaaccacgcgagtggtagactg

SEQ ID NO: 96680 - DNA, 80 bp, synthetic construct
  source 1..80: mol_type = other DNA
gaatggcaccagaattgcagcccctacgtcctccgccaccactttgaggtcaggtggcttcatgacagtgccaacactct

SEQ ID NO: 96681 - DNA, 80 bp, synthetic construct
  source 1..80: mol_type = other DNA
atagaggctctaagaccaattctcaattgtcaagtggctttcctaatgctaattatatgtctagtagtgcatctaggact

SEQ ID NO: 96682 - DNA, 80 bp, synthetic construct
  source 1..80: mol_type = other DNA
tctgaatgggtttcttctcaaaactcttctagatcttccttgggaccttaccacccaaatgcattgcaaactgcttgggt

SEQ ID NO: 96683 - DNA, 80 bp, synthetic construct
  source 1..80: mol_type = other DNA
cacccctccagggtcaacctccacctcctctttatcatctgcttctacagcaccaagatattttaatacagaaaggcttc

SEQ ID NO: 96684 - DNA, 80 bp, synthetic construct
  source 1..80: mol_type = other DNA
ctctttatcatctgcttctacagcaccaagatattttaatacagaaaggcttcctttattcgcaaatttaaggaagtgaa

SEQ ID NO: 96685 - DNA, 80 bp, synthetic construct
  source 1..80: mol_type = other DNA
tttactacgccggtcacaaacaccctcccctacccggcatgagcacccccctaaagaccaaagagaccgcccaccacgga

SEQ ID NO: 96686 - DNA, 80 bp, synthetic construct
  source 1..80: mol_type = other DNA
ggctctttaactgtggaaaacacccactctccaagttcacatgcatttgttaggactaatgaaaaataatcccacaaaat

SEQ ID NO: 96687 - DNA, 80 bp, synthetic construct
  source 1..80: mol_type = other DNA
gatcaatttttgacctgtcaacaggggttctcaattccagcatttgtaataatgccaggaaaagtgcaggactcattgtt

SEQ ID NO: 96688 - DNA, 80 bp, synthetic construct
  source 1..80: mol_type = other DNA
ttgccaggggtctacacatcacacccttcagtctgaatgacccctgggtgtctgatatcacaagctctttgagtgattta

SEQ ID NO: 96689 - DNA, 80 bp, synthetic construct
  source 1..80: mol_type = other DNA
ggggagcagagtatagccagaactaacaaccttaatatgggcccagtgtcattcattaatccggtgtcaaaatccagcca

SEQ ID NO: 96690 - DNA, 80 bp, synthetic construct
  source 1..80: mol_type = other DNA
cagataaataaactgaataacacctggacctttcacctgtcttctgatagaaaagaaagccaactaaactctcagccaaa

SEQ ID NO: 96691 - DNA, 80 bp, synthetic construct
  source 1..80: mol_type = other DNA
acccatcggggatcacctttggtaaagttggacataaaatcccattgtcagatagtattacatctacgaatctttgatca

SEQ ID NO: 96692 - DNA, 80 bp, synthetic construct
  source 1..80: mol_type = other DNA
tcgcctaggatccactgtgcgcactggccgtcgttttacacgccttcaccacagcacatccaaacttaacgacggcctag

SEQ ID NO: 96693 - DNA, 80 bp, synthetic construct
  source 1..80: mol_type = other DNA
actgtgcgcactggccgtcgttttacacgccttcaccacagcacatccaaacttaacgacggcctaggatccactgtgcg

SEQ ID NO: 96694 - DNA, 80 bp, synthetic construct
  source 1..80: mol_type = other DNA
cagagctccccacaatgggcaactgcaataagcctcccaagaggcctcccaacacacaaacatcatccaaccaaccctca

SEQ ID NO: 96695 - DNA, 80 bp, synthetic construct
  source 1..80: mol_type = other DNA
ggaaaatccacctaaatccaaggtaacatttctcattaagaaattatcatttgagccagccagatttgactcgattaaca

SEQ ID NO: 96696 - DNA, 80 bp, synthetic construct
  source 1..80: mol_type = other DNA
gaaatggttagagaatcacaaagaaatggaattgcaccacaatcagattcacttagaaaattgtcaggcattaagttcaa

SEQ ID NO: 96697 - DNA, 80 bp, synthetic construct
  source 1..80: mol_type = other DNA
cgttccagttgatgagaccaccaaatatgacaccagcagtagcagcattattcccaaatgcgcaaccatttgagcatcat

SEQ ID NO: 96698 - DNA, 80 bp, synthetic construct
  source 1..80: mol_type = other DNA
aagtgcttactgaaatgccagactatttattattaaaagatatggcagtagaaaataaaaactctagggatgcaggtaaa

SEQ ID NO: 96699 - DNA, 80 bp, synthetic construct
  source 1..80: mol_type = other DNA
tagtactagtagcccgaatcctactacggaggcaccacaaatgacaaactgttctttcaatgttaccacaggcataaagg

SEQ ID NO: 96700 - DNA, 80 bp, synthetic construct
  source 1..80: mol_type = other DNA
ttttctccagagccacacttggcccagatagttgcagaagacctcctctcccctagtgtaatggatgtgggtgacttcca

SEQ ID NO: 96701 - DNA, 80 bp, synthetic construct
  source 1..80: mol_type = other DNA
tgctggggacgatgtcttcacagtctcttgccgggtcctcacgagaccgtcccccgattttgattttatattcctagtgc

SEQ ID NO: 96702 - DNA, 80 bp, synthetic construct
  source 1..80: mol_type = other DNA
tgcaccttcagaggagatctcactcacatcgcaaatagtcataattatacaatgaatttggcttctcaaaattggaacaa

SEQ ID NO: 96703 - DNA, 80 bp, synthetic construct
  source 1..80: mol_type = other DNA
ataagtatggcaacattaggtaaaagactcagaagcgtcaaaaccatggaaggcctacgtaatgcattggtggggtacaa

SEQ ID NO: 96704 - DNA, 80 bp, synthetic construct
  source 1..80: mol_type = other DNA
gaggagttactccatcgactctgcccagcacgtttgagagggctgactcagttgacaattccattgatcagcaatctgtg

SEQ ID NO: 96705 - DNA, 80 bp, synthetic construct
  source 1..80: mol_type = other DNA
ttgaggggggcccatctttgcaacaagtgctaagggaccagttaaaaccatttgccgagccccgtggcaggttgcccgaa

SEQ ID NO: 96706 - DNA, 80 bp, synthetic construct
  source 1..80: mol_type = other DNA
acatggtctgctagtggcggggtagatattggtattaatgacttgaccactgtccgtggtccgttctggaacatgtgtcc

SEQ ID NO: 96707 - DNA, 80 bp, synthetic construct
  source 1..80: mol_type = other DNA
gtgatgtcataaaacaaattaatgtcaagcaggagtcagcatttgccccccatcttggcacggtgcaagcagatggtttg

SEQ ID NO: 96708 - DNA, 80 bp, synthetic construct
  source 1..80: mol_type = other DNA
agtgatgtaagtgccaataccaacatgatagctaaactgggatgggtgtcacccgtcagtgatgggcataggagcaatgt

SEQ ID NO: 96709 - DNA, 80 bp, synthetic construct
  source 1..80: mol_type = other DNA
tgacccgtgggttattccacgatacgggtcaactctcactgaggccgcccaattggcccctccaatataccctccaggtt

SEQ ID NO: 96710 - DNA, 80 bp, synthetic construct
  source 1..80: mol_type = other DNA
ggaagcagcactgctacactatttggaccctgatactcacaggaatcttggtgagtttaaattatacccagatggtttca

SEQ ID NO: 96711 - DNA, 80 bp, synthetic construct
  source 1..80: mol_type = other DNA
acaggggtggtaaggataagcaatcaattggtggtggtttttctaataaaaattatgacccctcagtttcttcttctcga

SEQ ID NO: 96712 - DNA, 80 bp, synthetic construct
  source 1..80: mol_type = other DNA
ggtaagtaatttttgtaatatgaattagtgggcatcatattcaatttggaatcaattagatatttcatattcaatttgga

SEQ ID NO: 96713 - DNA, 80 bp, synthetic construct
  source 1..80: mol_type = other DNA
atcatattcaatttggaatcaattagatatttcatattcaatttggaatcaattagatatttagattggcagatgatgtt

SEQ ID NO: 96714 - DNA, 80 bp, synthetic construct
  source 1..80: mol_type = other DNA
gccatggccctatgcttctattacaaacaactgttatgaattttgttgcagggtcatggcactagatgacacttggcttg

SEQ ID NO: 96715 - DNA, 80 bp, synthetic construct
  source 1..80: mol_type = other DNA
gaaagcgaaagtagaaccagaggagctctctcgacgcaggactcggcttgctgaagcgcgcacagccagccctccagaca

SEQ ID NO: 96716 - DNA, 80 bp, synthetic construct
  source 1..80: mol_type = other DNA
aaccagaggagctctctcgacgcaggactcggcttgctgaagcgcgcacagcaagaggcgaggggcgaaggagagagatg

SEQ ID NO: 96717 - DNA, 80 bp, synthetic construct
  source 1..80: mol_type = other DNA
aaccagaggagctctctcgacgcaggactcggcttgctgaagcgcgcacggcaagaggcgaggggagcgtcagtattaag

SEQ ID NO: 96718 - DNA, 80 bp, synthetic construct
  source 1..80: mol_type = other DNA
aagacatgaaaaactgttctttcaatgtcaccacaattgtaagggataaggtgactaaagaatatgcactttttcataaa

SEQ ID NO: 96719 - DNA, 80 bp, synthetic construct
  source 1..80: mol_type = other DNA
agaaaaatttttctactgtaatacaacaaagctgtttaatagtacctagaatgctactagtactaacataacaaaaattg

SEQ ID NO: 96720 - DNA, 80 bp, synthetic construct
  source 1..80: mol_type = other DNA
agcagcagaaaaagtaagagcagtatctcaagacctaaagagacataaggcagtcactagtagcaacataaataatgctg

SEQ ID NO: 96721 - DNA, 80 bp, synthetic construct
  source 1..80: mol_type = other DNA
acagggacctgaaagcgaaagagaaccagagaagctctctcgacgcaggactcggcttgctccctggcctgctagaaaca

SEQ ID NO: 96722 - DNA, 80 bp, synthetic construct
  source 1..80: mol_type = other DNA
aagacccgacaggcccgaaagaatcaaagaagaaagtaaagaaaaagacagaggcagatccagtcaattagtagacagat

SEQ ID NO: 96723 - DNA, 80 bp, synthetic construct
  source 1..80: mol_type = other DNA
cccaaaaaaatcgaagaagaaggtgaaaaaaaagacaaaggcagatccagtcaattagtagacagattcttgacactctg

SEQ ID NO: 96724 - DNA, 80 bp, synthetic construct
  source 1..80: mol_type = other DNA
tattaaagccaagaactaaaaaatagtgctgttagcttgcttaatgccactgccatagcagtagctaaaaagacagatag

SEQ ID NO: 96725 - DNA, 80 bp, synthetic construct
  source 1..80: mol_type = other DNA
agccaacaacagaaagaaagagacaagctgaaccagcagcagaagaagtaagagcagtatctcaagatctggctagacat

SEQ ID NO: 96726 - DNA, 80 bp, synthetic construct
  source 1..80: mol_type = other DNA
tgaactgctgacagcgagctttctacaaaggactttccgctaaggactttcagaggaggcgtgacctaggcaggactaaa

SEQ ID NO: 96727 - DNA, 80 bp, synthetic construct
  source 1..80: mol_type = other DNA
gtaataatactatcaataatagtacatgaaaaaaattaaagaaggatatgggaaaaataaaaaactgctcttttaatatc

SEQ ID NO: 96728 - DNA, 80 bp, synthetic construct
  source 1..80: mol_type = other DNA
accacaagcataaaaaataaaatgcagaaagtatatgcatatttttataaatctaatgtagtacagataaataataacac

SEQ ID NO: 96729 - DNA, 80 bp, synthetic construct
  source 1..80: mol_type = other DNA
taacctgaatgcagtggaaaaaaaaaattgacaaacacacagaaacaatatacaccttacttaaacaagcgcaaaaccag

SEQ ID NO: 96730 - DNA, 80 bp, synthetic construct
  source 1..80: mol_type = other DNA
ccaataatactatcaccaatagtaatgatactatcagtaaaaaattgaaggtggatggaggagacataaaaaactgctct

SEQ ID NO: 96731 - DNA, 80 bp, synthetic construct
  source 1..80: mol_type = other DNA
taattgtaccaccaatagtactaaaaataccagtaataatagtacatggaaaaaattgaaggaggagaaaggagaaataa

SEQ ID NO: 96732 - DNA, 80 bp, synthetic construct
  source 1..80: mol_type = other DNA
agaaaagtacccagagtactacaaaaactaagaactgctaacaccaagctacctgaactgctgacagcgagatttctaca

SEQ ID NO: 96733 - DNA, 80 bp, synthetic construct
  source 1..80: mol_type = other DNA
ccagaggagctctctcgacgcaggactcggcttgctgaagcgcgcacggcaagaggcgaggattgggaccaggagcttca

SEQ ID NO: 96734 - DNA, 80 bp, synthetic construct
  source 1..80: mol_type = other DNA
caatggaaaattatgtaaactgagagggatagccccattgcatttaggtaaatgtaacattgctggatggctcctaggga

SEQ ID NO: 96735 - DNA, 80 bp, synthetic construct
  source 1..80: mol_type = other DNA
tttacaaccgcaaatgcagacacattatgtataggttatcatgcgaacaattcaacagacactgtagatacagtactaga

SEQ ID NO: 96736 - DNA, 80 bp, synthetic construct
  source 1..80: mol_type = other DNA
gcagagaaaaaatagatggagtaaagctggactcaacaaggatctaccagattttggcgatctattcaactgtcgccagt

SEQ ID NO: 96737 - DNA, 80 bp, synthetic construct
  source 1..80: mol_type = other DNA
atgttctctcaggagagagccatgggagaatcctgaagaccaatctgaatagcggtaattgtgtagttcaatgtcagact

SEQ ID NO: 96738 - DNA, 80 bp, synthetic construct
  source 1..80: mol_type = other DNA
agtttcataatgaatccgaatcaaaagatcataactattggtagtgtcagtgttgcactaacaacagtagggttactcct

SEQ ID NO: 96739 - DNA, 80 bp, synthetic construct
  source 1..80: mol_type = other DNA
agcaggggttcactttgtcaaaatgaaggaaatagttcttctctttgcaacaatcagccttgtcaaaagcgatcatattt

SEQ ID NO: 96740 - DNA, 80 bp, synthetic construct
  source 1..80: mol_type = other DNA
ccatcccccattggttatcttgggctcctatcacagagaacaagggacgtctacattagtaggagactactgggcacatt

SEQ ID NO: 96741 - DNA, 80 bp, synthetic construct
  source 1..80: mol_type = other DNA
tcagattctgaaggaaaagacacaccaggagggtattgtttgaccagatggatgttgattgaagctgaattgaaatgctt

SEQ ID NO: 96742 - DNA, 80 bp, synthetic construct
  source 1..80: mol_type = other DNA
ttttcttctactttgtggcaggtcctgtacaacaactctttacaagggggtgtataaacttcaagctctggaaatgaaca

SEQ ID NO: 96743 - DNA, 80 bp, synthetic construct
  source 1..80: mol_type = other DNA
cacccctttgtaaaggggtgttgtacaggacctgccacaaagtagaagaaaagtaatgaagccaatgatgccacatgttg

SEQ ID NO: 96744 - DNA, 80 bp, synthetic construct
  source 1..80: mol_type = other DNA
ctttataaaggggggctgtacaggacctgccacacagtagaagaaaagcaacaaggccaatgagaccacatgttgccaca

SEQ ID NO: 96745 - DNA, 80 bp, synthetic construct
  source 1..80: mol_type = other DNA
ccttgtaaagggttgttgtacaggacctgccacaaagtaagaggaaggcaatgaggccaatgattccacatgttgctaca

SEQ ID NO: 96746 - DNA, 80 bp, synthetic construct
  source 1..80: mol_type = other DNA
ccatcccccatcgggtatcttgggctcctatcacagagaacaagagacatctacattagtaggagactgttaggtacatt

SEQ ID NO: 96747 - DNA, 80 bp, synthetic construct
  source 1..80: mol_type = other DNA
ccttgtaaagggttgttgtgcaggacctgccacagagcagaaggaaagcaatgaggccaatgagaccacatgttgccaca

SEQ ID NO: 96748 - DNA, 80 bp, synthetic construct
  source 1..80: mol_type = other DNA
gggtgtacgaacttcagactttagaattgaacatggagacactcaacatgaccatgcccctgtcctgtacaagaaatgac

SEQ ID NO: 96749 - DNA, 80 bp, synthetic construct
  source 1..80: mol_type = other DNA
tatattgctcttgattcaggccatgatggatggcattgcattatgaccagtcatcaggatttgataattcagaacacaac

SEQ ID NO: 96750 - DNA, 80 bp, synthetic construct
  source 1..80: mol_type = other DNA
aaagtaaagacgcaccaggagggtactgtttgacaaggtggatgttgattgaggctgagttgaagtgctttggtaacaca

SEQ ID NO: 96751 - DNA, 80 bp, synthetic construct
  source 1..80: mol_type = other DNA
tcctcccgacactgctgcgtcaaacatgatacagtccatcagtgcacagtgaggagttgtctcctctttgccacctctct

SEQ ID NO: 96752 - DNA, 80 bp, synthetic construct
  source 1..80: mol_type = other DNA
tactgctcaaggggtaaacataactaataacactgtcaacttaggaaatataacacaggaaatgaaaaactgttctttta

SEQ ID NO: 96753 - DNA, 80 bp, synthetic construct
  source 1..80: mol_type = other DNA
cacaggggtgacatgcaaatccaaacaaaaagatcatttgagctaaaaaaactatgggaacagacccattcaaaggcagg

SEQ ID NO: 96754 - DNA, 80 bp, synthetic construct
  source 1..80: mol_type = other DNA
tgcatctgtagagacaactggaaaggctccaatagacctgtcgttgatataagtgtaatggattatagcattgtttccag

SEQ ID NO: 96755 - DNA, 80 bp, synthetic construct
  source 1..80: mol_type = other DNA
taacctaaatgcagtaaaaaaaaaaaattggcaattacacagacataatatacaacttacttaaacaatcacaacaccaa

SEQ ID NO: 96756 - DNA, 80 bp, synthetic construct
  source 1..80: mol_type = other DNA
caaaaaaaaaataaacaagatttattagcattaaaaaaataggacagtttataaaattggtttagcatatcaaactggct

SEQ ID NO: 96757 - DNA, 80 bp, synthetic construct
  source 1..80: mol_type = other DNA
aattgaactaggagaagtaaaaaattgctctttcaatatcaccacaagaataagagataaggtgcaaaaacaagaggcaa

SEQ ID NO: 96758 - DNA, 80 bp, synthetic construct
  source 1..80: mol_type = other DNA
tagtaatgacacaaaagataacaagaccttcagacctcaaaaaagaaacataaaaaataattaaagaagtgaattatata

SEQ ID NO: 96759 - DNA, 80 bp, synthetic construct
  source 1..80: mol_type = other DNA
aattataaaaagactccaaaaagcttatagaactattctccatatacctagaaaaataaaacaaaacttaaaaaaagctt

SEQ ID NO: 96760 - DNA, 80 bp, synthetic construct
  source 1..80: mol_type = other DNA
tgctataaaataagtagcaaatagtcaaaacgtatagaaaatagataagctactataaaaaaaaaaataagacgcgctaa

SEQ ID NO: 96761 - DNA, 80 bp, synthetic construct
  source 1..80: mol_type = other DNA
gccagcagtaaagccaccagcagttaaagtaaaagcagtatctcaaaacctaagaagacataaagcaatcacaagtagca

SEQ ID NO: 96762 - DNA, 80 bp, synthetic construct
  source 1..80: mol_type = other DNA
aattaaaccaggaaaagtaaaaaattgctctttcaatatcaccacaggaataaaaaataaggtgcaaaaacaaaatgcaa

SEQ ID NO: 96763 - DNA, 80 bp, synthetic construct
  source 1..80: mol_type = other DNA
tacaacttacttaaacaatcgcaacaccaacaaaaaaaaaatgaacaaaatttattagcattaaaaaaataaaacagttt

SEQ ID NO: 96764 - DNA, 80 bp, synthetic construct
  source 1..80: mol_type = other DNA
ctataaacctacatggaatagaggacccaaatagagaagtattaatgtggaaatttgacagccacctaacatatcgtcac

SEQ ID NO: 96765 - DNA, 80 bp, synthetic construct
  source 1..80: mol_type = other DNA
taaacaaattctgttctctgacaagtcttttaaagtagtattccccaaatgagtaagactattaataagcagacaacttt

SEQ ID NO: 96766 - DNA, 80 bp, synthetic construct
  source 1..80: mol_type = other DNA
aagtgctgggattacaagggtgagccactgcgcccagccttgtatggtttttgaataacaaagtgtcttccaaaaatgtc

SEQ ID NO: 96767 - DNA, 80 bp, synthetic construct
  source 1..80: mol_type = other DNA
aacaggaaactaacacgggctttgtagataagacaaaagcctgtacccttgttcttgtttgatcacttactagataaaga

SEQ ID NO: 96768 - DNA, 80 bp, synthetic construct
  source 1..80: mol_type = other DNA
ccctctctgtaaaccatcgtcaccgccgttagcttagggatggttaatgaagaaacagaaagctgtacaataatccaggt

SEQ ID NO: 96769 - DNA, 80 bp, synthetic construct
  source 1..80: mol_type = other DNA
gagagaggatggtggcttcaacccacatggtagcagcctgaaaaggagccaccctctgttaagcccccctaaagcttcct

SEQ ID NO: 96770 - DNA, 80 bp, synthetic construct
  source 1..80: mol_type = other DNA
aagttggtatattgtttttatgtaagtcctgagttacagactctgcctttagaacttattaacaggaaaagatacaaatt

SEQ ID NO: 96771 - DNA, 80 bp, synthetic construct
  source 1..80: mol_type = other DNA
tcccccgaagagtatgctttcttcacatgagaattatgtaataggatattcccccccaccttttttttttgcctctatta

SEQ ID NO: 96772 - DNA, 80 bp, synthetic construct
  source 1..80: mol_type = other DNA
agagataaaagactttaaggttaaaaaaaaacaaaaccttgtgtttaaaagcagagagtagctattataatgacagcagc

SEQ ID NO: 96773 - DNA, 80 bp, synthetic construct
  source 1..80: mol_type = other DNA
ttttattatttacacggagggagggtgttaagccctttatatgcaatatcttcctgacatgccaaaactcatgcattcaa

SEQ ID NO: 96774 - DNA, 80 bp, synthetic construct
  source 1..80: mol_type = other DNA
tttgtatggaatgcttgctatgtgacaggcaacattctcgatgcttggggacgatttcagtaattaaaagaaaccaaagt

SEQ ID NO: 96775 - DNA, 80 bp, synthetic construct
  source 1..80: mol_type = other DNA
cactacctccaaagaagtcccattggagggggtggtgaagagggagaaaagaatagaaataagtaaactacactgtatgt

SEQ ID NO: 96776 - DNA, 80 bp, synthetic construct
  source 1..80: mol_type = other DNA
tgatggacgtaagtgctacggataaaaatataaagcaggaaggcgggctggagtgttgcggagagtttgcttttaaatag

SEQ ID NO: 96777 - DNA, 80 bp, synthetic construct
  source 1..80: mol_type = other DNA
catggtcactatagggtcttcctgcaaggtgatgacagcggacgtcagccgtgcagacaatgtctactgcaaacaccctg

SEQ ID NO: 96778 - DNA, 80 bp, synthetic construct
  source 1..80: mol_type = other DNA
cggtgggaaatgttcctggccttttaaaggaacaaaaaggaggctggagaggcaaaggggaaaataggagatgaaaagtc

SEQ ID NO: 96779 - DNA, 80 bp, synthetic construct
  source 1..80: mol_type = other DNA
agaagtaatgggaagggtgagaatcgtgtagaacctagtaggccacagggatagctgtagctcttacccagagggagaca

SEQ ID NO: 96780 - DNA, 80 bp, synthetic construct
  source 1..80: mol_type = other DNA
gcaactctgagcagaggatctgagcagagggttctctgggtgctctgctgagatcagactgagggtagagggcagcaagc

SEQ ID NO: 96781 - DNA, 80 bp, synthetic construct
  source 1..80: mol_type = other DNA
tttcaagccagagcagtcaggaagtgaatgcaccaatataggtgagatacggtggcttccatcaggacagtggtggagga

SEQ ID NO: 96782 - DNA, 80 bp, synthetic construct
  source 1..80: mol_type = other DNA
agtagtgagaaggggtaagattctgtatttattttgaagctagacttgataggatttgctgcagggctgagaaataagat

SEQ ID NO: 96783 - DNA, 80 bp, synthetic construct
  source 1..80: mol_type = other DNA
ccaaggatgactatgaagcttgagatctgtgtagctggaaagatggagctgcctctaacagagacagggaagactctggg

SEQ ID NO: 96784 - DNA, 80 bp, synthetic construct
  source 1..80: mol_type = other DNA
agcagtaggttttgtggagttctgttttgctcatgttactcttggatggctaataaacatccaagctgtcaaacaggcag

SEQ ID NO: 96785 - DNA, 80 bp, synthetic construct
  source 1..80: mol_type = other DNA
ccggatggagcgtgtgaggctcagagcagaaaggctgccagcttacagatggtatttacagccatgaaactaagtgcgcc

SEQ ID NO: 96786 - DNA, 80 bp, synthetic construct
  source 1..80: mol_type = other DNA
cacaggagtggcagtagctagagaaggccagggtctgggccctggaccctccaacagccagaggttgtaaggctgcagca

SEQ ID NO: 96787 - DNA, 80 bp, synthetic construct
  source 1..80: mol_type = other DNA
cagcaaaggaaacagaagcaatagccacggaggcagaagggtgcagtcctaggagtctctgagctgggaactgctgctgc

SEQ ID NO: 96788 - DNA, 80 bp, synthetic construct
  source 1..80: mol_type = other DNA
cttcgcggagaagcagcagaggctcagccttgtgtctggggcttgttcatttcttactttactttagcggcttcaagtct

SEQ ID NO: 96789 - DNA, 80 bp, synthetic construct
  source 1..80: mol_type = other DNA
ttcttagaagcaaggtggatatacattgaacatgactttgggcatgtcacttagcccttaacctgcatgtcctcttctct

SEQ ID NO: 96790 - DNA, 80 bp, synthetic construct
  source 1..80: mol_type = other DNA
aaaatagaggtaacgtcacgcctgagtactcatctgctaaggttgtgcaaaatcaatgaaatactaccacgtaaaaggag

SEQ ID NO: 96791 - DNA, 80 bp, synthetic construct
  source 1..80: mol_type = other DNA
ttttcttcgtaagtgtatacacctactatgtacccacaattttttaaaagtagtcctttacttgaaagttattaaatagt

SEQ ID NO: 96792 - DNA, 80 bp, synthetic construct
  source 1..80: mol_type = other DNA
tgtgtgagagaatctttcttttttttgacacagggtcttattccattgcccaggctggagtacagtggcacaatcacagc

SEQ ID NO: 96793 - DNA, 80 bp, synthetic construct
  source 1..80: mol_type = other DNA
tcactgcagccttgatctcctgggctcaaggacatcctgtcttacgtaaattgtgcctaaaagtgctaaatgtgtggttt

SEQ ID NO: 96794 - DNA, 80 bp, synthetic construct
  source 1..80: mol_type = other DNA
ttgcaatagagcacctgcattttattacgtctttttctaacatttcccaaatacatttttacaatgataagtagctttcc

SEQ ID NO: 96795 - DNA, 80 bp, synthetic construct
  source 1..80: mol_type = other DNA
tgataaatgtgtcttgaacacactcttgcccaagaatccgtttgagagatctgaatatcatgctcagttatattcaactc

SEQ ID NO: 96796 - DNA, 80 bp, synthetic construct
  source 1..80: mol_type = other DNA
tgggatttcgccacattgcccaggctggtctcaaactcctgggctcagctcaagcaatccatttgcattggcccttcaaa

SEQ ID NO: 96797 - DNA, 80 bp, synthetic construct
  source 1..80: mol_type = other DNA
gtgctaggaatacaggcatgagccaccgtgcccagcccagaattttaaaaatatataataaagctgaggaaataaagctt

SEQ ID NO: 96798 - DNA, 80 bp, synthetic construct
  source 1..80: mol_type = other DNA
aaataaaatagctcttgggtgaaaagtgccactttacaaacacctttctgacaaaacattataactaaaattttacttac

SEQ ID NO: 96799 - DNA, 80 bp, synthetic construct
  source 1..80: mol_type = other DNA
taacgccattgtttatattttgatgtcaataaaataaactgatttaaaagtattcatgccgagcacagtggctcacgcct

SEQ ID NO: 96800 - DNA, 80 bp, synthetic construct
  source 1..80: mol_type = other DNA
gaaactctgtctcaaaaaaacccaaaattaattaattaattaaagtattcatatataagtgatggctcattattgtgtag

SEQ ID NO: 96801 - DNA, 80 bp, synthetic construct
  source 1..80: mol_type = other DNA
ctgtggctgtattaaccaatgaagccggtgggactgtaatgaaaatagtttgtcttttgtgtggtgtggaagttgttcct

SEQ ID NO: 96802 - DNA, 80 bp, synthetic construct
  source 1..80: mol_type = other DNA
gtattaaaacatggagtggcctttttcctttgatttaaattttactaaacaattgccctaattgaggggagggaacagat

SEQ ID NO: 96803 - DNA, 80 bp, synthetic construct
  source 1..80: mol_type = other DNA
ggctggatttactggagattagaaagccataagaatccaaaatgttctaaaatcagaaactttttgagtgacaacatgat

SEQ ID NO: 96804 - DNA, 80 bp, synthetic construct
  source 1..80: mol_type = other DNA
gctgaaagaaatgcccattggagcattttgtatttctggactggggatgctgaactggtatgatgaagcaaatattccaa

SEQ ID NO: 96805 - DNA, 80 bp, synthetic construct
  source 1..80: mol_type = other DNA
aatccgaaatctgcattgcttctggtcccaagcatttcagataagggacactcaacccacatatcctgtaaaacctaaaa

SEQ ID NO: 96806 - DNA, 80 bp, synthetic construct
  source 1..80: mol_type = other DNA
tggagaaacattcccatttaccttccaggttggccctattgacacccacacttttgggtaacagttccccagttacagta

SEQ ID NO: 96807 - DNA, 80 bp, synthetic construct
  source 1..80: mol_type = other DNA
aatccaaattcactagtcatgattatttggcaagaggaaattcattttgaatgttactgaagtaacattacctgtcttca

SEQ ID NO: 96808 - DNA, 80 bp, synthetic construct
  source 1..80: mol_type = other DNA
gtttccttatgtccaaagcactgcatgttccttagaagaaaggtgtcacccgggacactggcaccgcctaagcatgtgaa

SEQ ID NO: 96809 - DNA, 80 bp, synthetic construct
  source 1..80: mol_type = other DNA
aaggcaaagcaggaggagtgttctcacagtcccatcttgatgggggccatggactcggatctgtcctgagagcaaagtgt

SEQ ID NO: 96810 - DNA, 80 bp, synthetic construct
  source 1..80: mol_type = other DNA
ccctccacatctctgtgcttctgtccctcctgtacccacccccaactttcctgcccagtgtctccactccttttcttagc

SEQ ID NO: 96811 - DNA, 80 bp, synthetic construct
  source 1..80: mol_type = other DNA
atttaatttaaaaacctgattctcacccagacacagtggctcatgcccataatcccagtacttcgggaggccaaggcagg

SEQ ID NO: 96812 - DNA, 80 bp, synthetic construct
  source 1..80: mol_type = other DNA
acaaacaaacaaaaaccccaatttctcctggagtcttggacaccaatctccctgttccctcgctgggcttctgatgctct

SEQ ID NO: 96813 - DNA, 80 bp, synthetic construct
  source 1..80: mol_type = other DNA
cacttgtccctggcatctggtcttgctgttcagtttcgctcagtaagctcagatgtacctttgcacacatttggcatgaa

SEQ ID NO: 96814 - DNA, 80 bp, synthetic construct
  source 1..80: mol_type = other DNA
tgccccagtgactcatagttgggttttacaaataaaacatacctaaaaataaactaagcactctccaactcatcctgcct

SEQ ID NO: 96815 - DNA, 80 bp, synthetic construct
  source 1..80: mol_type = other DNA
tatctaaattgtgcctaaaagtgctaaatgtggctgggtgcggtggctcacgcctgtaatcccaacactttgggaggtca

SEQ ID NO: 96816 - DNA, 80 bp, synthetic construct
  source 1..80: mol_type = other DNA
aaaaaaaaaaaaaaagtgctaaatgcgttgtttttaaaacagagcatctccattttattacttctttttctaacatttcc

SEQ ID NO: 96817 - DNA, 80 bp, synthetic construct
  source 1..80: mol_type = other DNA
caaataaatctctacactgatagctttcttgatgaatgtctttcttgaacatactcttgcccaagaatcagtttcaaaga

SEQ ID NO: 96818 - DNA, 80 bp, synthetic construct
  source 1..80: mol_type = other DNA
tttgaatatcatgctcagttaaattcaactattaattatagagcatctcaaagtacaaggtcctgagctaaaaatcagat

SEQ ID NO: 96819 - DNA, 80 bp, synthetic construct
  source 1..80: mol_type = other DNA
attcaatcagttctcttctgaatttgattttaccttatgcatagactgataagccaaatttgacttaagaatatttggct

SEQ ID NO: 96820 - DNA, 80 bp, synthetic construct
  source 1..80: mol_type = other DNA
actttataagcaaatgaattattttttctacagtaaaaataataaaatgggcaggtagctcaggtataaaacaaatttta

SEQ ID NO: 96821 - DNA, 80 bp, synthetic construct
  source 1..80: mol_type = other DNA
gcctcaaaaaaaaaaaaaaagaatgtgtctcagcagtttaaatagtaagaactttgctggaaaatattaagccagaagat

SEQ ID NO: 96822 - DNA, 80 bp, synthetic construct
  source 1..80: mol_type = other DNA
aagcccattttattaaacataacttttctacacatttaaaaatatttcccaataaaaagcaaaaaaaaagctggtgtggt

SEQ ID NO: 96823 - DNA, 80 bp, synthetic construct
  source 1..80: mol_type = other DNA
tttgggcaacgagagcaaaactccagctcaaaaacaaacaaacaaacaaacattttgtttcttttaaaaatattcacggc

SEQ ID NO: 96824 - DNA, 80 bp, synthetic construct
  source 1..80: mol_type = other DNA
tgggagcggtggctcacgcctgtaataccagcactttgggaggccaaggtgggcagatcacctgcagcgagccaagatcg

SEQ ID NO: 96825 - DNA, 80 bp, synthetic construct
  source 1..80: mol_type = other DNA
ttcacaactcttctgttgtgcaatttttaaaattttactctatcacctcttatcttcatttccctcaaaagctttgagca

SEQ ID NO: 96826 - DNA, 80 bp, synthetic construct
  source 1..80: mol_type = other DNA
agagcaatgatgtgatgcaacaatttacacgtggatttttggtttgctttgctaggtttactttaactgccctggatgat

SEQ ID NO: 96827 - DNA, 80 bp, synthetic construct
  source 1..80: mol_type = other DNA
ggtcacatgtacactgggaccccccgctgccaggggagcaaggtcagagctcaaaggtattggtaaagaaatctaattct

SEQ ID NO: 96828 - DNA, 80 bp, synthetic construct
  source 1..80: mol_type = other DNA
ttttattttttttaaaagcaaatacctgaaatacatatactatttattactctggcacatttaatagcagatacctgaat

SEQ ID NO: 96829 - DNA, 80 bp, synthetic construct
  source 1..80: mol_type = other DNA
taagttaggaccaaggctatgcaaacagaacatcacatttgataagcttgatgaacattctctgttgacagtggcggtac

SEQ ID NO: 96830 - DNA, 80 bp, synthetic construct
  source 1..80: mol_type = other DNA
agggtgtgcaggtggcaggagcagacaagactgaacttacttcagaacctgaaagagtccaggtgtcacggatgttggtc

SEQ ID NO: 96831 - DNA, 80 bp, synthetic construct
  source 1..80: mol_type = other DNA
tcaccattccagctccactaatggtccccagatgaacctgaggatagtagactgtccggagagctaatcttgaagactgc

SEQ ID NO: 96832 - DNA, 80 bp, synthetic construct
  source 1..80: mol_type = other DNA
aaccgtgtcttaatgacttctagtggacaagtgaaaatagcaccaactgtgcctccacacctgtaagggaaaccaaagca

SEQ ID NO: 96833 - DNA, 80 bp, synthetic construct
  source 1..80: mol_type = other DNA
gatcagagaagctatactattccctacacaatggaatgctaagcttagcttttctctctttaaaactagaacgtgccggg

SEQ ID NO: 96834 - DNA, 80 bp, synthetic construct
  source 1..80: mol_type = other DNA
cactgcactcctgtctgggtaacagagcaagactccatctcaaaaaaaaagttgtctgcttattaatagtcttactcatt

SEQ ID NO: 96835 - DNA, 80 bp, synthetic construct
  source 1..80: mol_type = other DNA
tggggaatactactttaaaagacttgtcagagaacagaatttgtttatagaaagtttattttcaaaattcagagaaaaaa

SEQ ID NO: 96836 - DNA, 80 bp, synthetic construct
  source 1..80: mol_type = other DNA
ctgttaacatattgcctttttgctttttaagtaactattaaaaaaaaaagataggttcgagataggttcttcaatagaga

SEQ ID NO: 96837 - DNA, 80 bp, synthetic construct
  source 1..80: mol_type = other DNA
atattctctattctgttaaagaaaagtattctgttaaagaaaaaaattctctattgaagaacctatctcgaacctatctt

SEQ ID NO: 96838 - DNA, 80 bp, synthetic construct
  source 1..80: mol_type = other DNA
tttttttttaatagttacttaaaaagcaaaaaggcaatatgttaacagattcaggtatctgctattaaatgtgccagagt

SEQ ID NO: 96839 - DNA, 80 bp, synthetic construct
  source 1..80: mol_type = other DNA
aataaatagtatatgtatttcaggtatttgcttttaaaaaaaataaaaatcttctggcttaatattttccagcaaagttc

SEQ ID NO: 96840 - DNA, 80 bp, synthetic construct
  source 1..80: mol_type = other DNA
atttttttctttaacagaatacttttctttaacagaatagagaatatttttttctctgaattttgaaaataaactttcta

SEQ ID NO: 96841 - DNA, 80 bp, synthetic construct
  source 1..80: mol_type = other DNA
gcgcccgaacagggacttgaaagcgaaagagaaaccagaggagctctctcgacgcaggactaggcaattttagaaatcaa

SEQ ID NO: 96842 - DNA, 80 bp, synthetic construct
  source 1..80: mol_type = other DNA
gcgcccgaacagggacttgaaagcgaaaggaaaaccagaggaagagcaaaacaaaagtaagaaaaaagcacagcaagcag

SEQ ID NO: 96843 - DNA, 80 bp, synthetic construct
  source 1..80: mol_type = other DNA
tgcgcccgaacagggacttgaaagcgaaaggaaaaccagaggagctctctcgacgcaggactcggcttaaaaattgcagg

SEQ ID NO: 96844 - DNA, 80 bp, synthetic construct
  source 1..80: mol_type = other DNA
acagaaaggacccgacaggccagaaagaacaaaagaagaaagtaaaaaaagagacaaagacaaatccagcagattagtaa

SEQ ID NO: 96845 - DNA, 80 bp, synthetic construct
  source 1..80: mol_type = other DNA
ataaattcttaacacttatctaaatcgacctaaaaagcctgttcctcttcagctaccaccgcttaaaaaacttactctta

SEQ ID NO: 96846 - DNA, 80 bp, synthetic construct
  source 1..80: mol_type = other DNA
attacaacgaaaattataaaacttctaaaacgcagaagttaaaaaactctcaaatattaataaagtctcctacaatatta

SEQ ID NO: 96847 - DNA, 80 bp, synthetic construct
  source 1..80: mol_type = other DNA
aagtcagaaaataaaaaaaagtgctgttagcttattcaacgccaccgccatagcagtagctgaaagaacaaataaaatta

SEQ ID NO: 96848 - DNA, 80 bp, synthetic construct
  source 1..80: mol_type = other DNA
taaaagcagcacaaaaagtttgtaaaagcatccacaacatacctaaaaaaataagacaaagcttaaaaaaaagtttacta

SEQ ID NO: 96849 - DNA, 80 bp, synthetic construct
  source 1..80: mol_type = other DNA
taaaatataaaataagtagcaagtaatcaaaatgcaacgcacctaaatagtctactataaaaaaaaaaataaaacaagca

SEQ ID NO: 96850 - DNA, 80 bp, synthetic construct
  source 1..80: mol_type = other DNA
aagccagcaacaaaaccagcagcagaaaaagtaaaagcagtatctcaaaacctaaaaaagcataaagcaatcacaagtag

SEQ ID NO: 96851 - DNA, 80 bp, synthetic construct
  source 1..80: mol_type = other DNA
caacacagtaaataacaatgctacttgtgcataagtaaaaacacaaaaaaaaaacaacaaagtaagttttccagtcaaac

SEQ ID NO: 96852 - DNA, 80 bp, synthetic construct
  source 1..80: mol_type = other DNA
gttagcaaattaaaagaacaaaaacaatttaaaaataaaacaatagtctttaatcaatcctcaagagaagacccagaaat

SEQ ID NO: 96853 - DNA, 80 bp, synthetic construct
  source 1..80: mol_type = other DNA
tgtaatgcacagttttaattatagaaaaaagtttttctactgtaatacaacgcagttatttaatagcacttaagataaaa

SEQ ID NO: 96854 - DNA, 80 bp, synthetic construct
  source 1..80: mol_type = other DNA
caccttaattaaaaaatcgcagatccagcaaaaaaaaaataaacataacttactagcattaaataattaggcaagtttgt

SEQ ID NO: 96855 - DNA, 80 bp, synthetic construct
  source 1..80: mol_type = other DNA
cagcgcacctagatagtctgctataaaagagagaatgagacgagcagagccagcaacagaaccagcagcagaaggagtaa

SEQ ID NO: 96856 - DNA, 80 bp, synthetic construct
  source 1..80: mol_type = other DNA
gcagcgcacctagatagtctgctataaaagaaagaataagacgagcagagccagcaacagagccagcagcagagaaggta

SEQ ID NO: 96857 - DNA, 80 bp, synthetic construct
  source 1..80: mol_type = other DNA
taaaaaaaaagctgttaaacattttcctaggccatggctacatgaattaaaacaacacatctataacacttatggggaca

SEQ ID NO: 96858 - DNA, 80 bp, synthetic construct
  source 1..80: mol_type = other DNA
actgctctttcaatatcaccacaagcataaaaaatcaggtgcaaaaacaatatgcaactttttataacataaatctagtg

SEQ ID NO: 96859 - DNA, 80 bp, synthetic construct
  source 1..80: mol_type = other DNA
ttaaaaaaacaaaaacaatttaaaaataaaacaatagtctttaatcaatcctcaaaaaaaaacccaaaaattgtaatgca

SEQ ID NO: 96860 - DNA, 80 bp, synthetic construct
  source 1..80: mol_type = other DNA
cagttttaattgtaaaaaaaagtttttctactgtaatacaacgcagttgtttaatagcacttaaaataaaaatagtacta

SEQ ID NO: 96861 - DNA, 80 bp, synthetic construct
  source 1..80: mol_type = other DNA
acaacagcttgctacaccctataagcctgcatggaataaataacccagagaaaaaagtgctgcagtgaaagtttaacagc

SEQ ID NO: 96862 - DNA, 80 bp, synthetic construct
  source 1..80: mol_type = other DNA
ccaaaaagaacagaagaagaaagtaaagaaaaagacagagacagatccagcagattagtagatagattcttaacacttat

SEQ ID NO: 96863 - DNA, 80 bp, synthetic construct
  source 1..80: mol_type = other DNA
cagcgcacctaaatagtctactataaaggaaaaaataagacgagcagagccagcaacagaaccagcagcaaaaaaagtaa

SEQ ID NO: 96864 - DNA, 80 bp, synthetic construct
  source 1..80: mol_type = other DNA
aagcagtatctcgagacctagaaaagcataaagcaatcacaagtagcaacacagtaagtaacaatgctgcttgtgcataa

SEQ ID NO: 96865 - DNA, 80 bp, synthetic construct
  source 1..80: mol_type = other DNA
acagaaaagacccgacaggccagaaagaacagaagaagaaagtagaaaaaaagacagagacagatccggcagattagtag

SEQ ID NO: 96866 - DNA, 80 bp, synthetic construct
  source 1..80: mol_type = other DNA
acctagatagtctgctataaagaaaagaataagacgagcagagccaacaacagaaccagcagcagaagaagtaaaagcag

SEQ ID NO: 96867 - DNA, 80 bp, synthetic construct
  source 1..80: mol_type = other DNA
ggtgatattgaaagagcagtttttcatttcttctgtaatgttaggagtattcctattactagtggcattagtagcattca

SEQ ID NO: 96868 - DNA, 80 bp, synthetic construct
  source 1..80: mol_type = other DNA
gattatagaaacagcacaaagagcttgtagaagtatccgcaacatacctaaaaaaataagacaaagcttagaaagaagtt

SEQ ID NO: 96869 - DNA, 80 bp, synthetic construct
  source 1..80: mol_type = other DNA
ttcaatatcaccacaagcataagaaatcaagtgcagaaacaatatgcaactttttataacatgaatctggtgccaataaa

SEQ ID NO: 96870 - DNA, 80 bp, synthetic construct
  source 1..80: mol_type = other DNA
agcgcacctaaatggtctgctataaggaaaaaaataaaacgagcagagccagcaacaaaaccagcagcagagggggtaag

SEQ ID NO: 96871 - DNA, 80 bp, synthetic construct
  source 1..80: mol_type = other DNA
tattagagtcagaagataaaaaaaagtgctgttagcttattcaacgccaccgccatagcagtagctgaaagaacagataa

SEQ ID NO: 96872 - DNA, 80 bp, synthetic construct
  source 1..80: mol_type = other DNA
atgaaaaactgctctttcaatatcaccacaagcataagagatcaggtgcagaaacaatatgcaactttttataacattga

SEQ ID NO: 96873 - DNA, 80 bp, synthetic construct
  source 1..80: mol_type = other DNA
gagtcaggagataaagaagagtgctgttagcttattcaacgccaccgccatagaagtagctgaaagaacagataagatta

SEQ ID NO: 96874 - DNA, 80 bp, synthetic construct
  source 1..80: mol_type = other DNA
taagagcagcacaaagagtttgtagaggcatccgcaacatacctagaagaataagacaaagcttagaaaagagtttacta

SEQ ID NO: 96875 - DNA, 80 bp, synthetic construct
  source 1..80: mol_type = other DNA
taaaatataaaataagtggcaagtagtcaaaatgcagcgcacctagatggtctactataaaggagagaataagacgagca

SEQ ID NO: 96876 - DNA, 80 bp, synthetic construct
  source 1..80: mol_type = other DNA
acctagatggtctactataaagaagagaatgagacgagcagagccagcaacaaaaccaacagcagaagaggtaagagcag

SEQ ID NO: 96877 - DNA, 80 bp, synthetic construct
  source 1..80: mol_type = other DNA
gattataaaagcagcacaaaaagtttgtagaggcatccgcaacatacctaaaaaaataagacaaagcttagaaaagagtt

SEQ ID NO: 96878 - DNA, 80 bp, synthetic construct
  source 1..80: mol_type = other DNA
tactataaaatataaaataggtggcaagtagtcaaaacgcagcgcacctagatggtctgctataaaggagaaaataagac

SEQ ID NO: 96879 - DNA, 80 bp, synthetic construct
  source 1..80: mol_type = other DNA
agaagaaaaaagtggaaaaagagacagagacagatccggcagattagtagatagattcttaacacttatctaaatcgacc

SEQ ID NO: 96880 - DNA, 80 bp, synthetic construct
  source 1..80: mol_type = other DNA
gcgctgaaccaagagaaataaaaaaatgccttttcaatatcaccacagaaaaaaaaaataaagtgcaaaaacaaaaggca

SEQ ID NO: 96881 - DNA, 80 bp, synthetic construct
  source 1..80: mol_type = other DNA
aaaacatgacctaaatgcagtaagaaaaagaaattgacaattacacagacataatatacaacttaattaaacaatcgcaa

SEQ ID NO: 96882 - DNA, 80 bp, synthetic construct
  source 1..80: mol_type = other DNA
taaaaaaaaaagcaaaaaacagtagtaataaaagtaataaaaatcagaaaaaattatcagctcttgtggagagggggcac

SEQ ID NO: 96883 - DNA, 80 bp, synthetic construct
  source 1..80: mol_type = other DNA
tttttctactgtaatacagcacaactgtttaatagcacttagcctttaaatagtactgtaaaacataaaaataatactac

SEQ ID NO: 96884 - DNA, 80 bp, synthetic construct
  source 1..80: mol_type = other DNA
ttaaaatactacttaaagtaataaatctctaaataacatttaaaacataacctaaatgcagtaaaaaaaaaaaattaaca

SEQ ID NO: 96885 - DNA, 80 bp, synthetic construct
  source 1..80: mol_type = other DNA
gtactccaaaaagcttaaaaagctatccgtaccagttgggccagagaacaatgaagaaaaaacaacagcttgttacaccc

SEQ ID NO: 96886 - DNA, 80 bp, synthetic construct
  source 1..80: mol_type = other DNA
tataagcctgcatgaaataaaaaacccagaaaaaaaagtgttaatgtaaaaatttaacagccgcctagcatatcatcaca

SEQ ID NO: 96887 - DNA, 80 bp, synthetic construct
  source 1..80: mol_type = other DNA
tgaaaaaaaaaaattggcaattacacagacataatatacaacttacttaaacaatcgcaacaccaacaaaaaaaaaataa

SEQ ID NO: 96888 - DNA, 80 bp, synthetic construct
  source 1..80: mol_type = other DNA
tacaacttacttaaacaatcgcaacaccaacaaaaaaagaataaacaagacttattaaaattgaataaatgaaacagttt

SEQ ID NO: 96889 - DNA, 80 bp, synthetic construct
  source 1..80: mol_type = other DNA
gctgttaaacattttcctaagtcatggctccatggcttaaggcaatatatctataaaacttataaaaatacctagacaga

SEQ ID NO: 96890 - DNA, 80 bp, synthetic construct
  source 1..80: mol_type = other DNA
tttttatactgtaatacaacacaactgtttaatagcacttaaaataaaaataaaactgcagggtcaaacaatactacaga

SEQ ID NO: 96891 - DNA, 80 bp, synthetic construct
  source 1..80: mol_type = other DNA
cctaaatgcagtgaaaaaaaaaaattaacaattacacaggcataatatataacttaattaaacaatcgcaaaaccaacaa

SEQ ID NO: 96892 - DNA, 80 bp, synthetic construct
  source 1..80: mol_type = other DNA
tacaccctataagcctgcatagaataaaaaacccagagaaaaaagtgttaatgtaaaagtttaacagccgcctagcatat

SEQ ID NO: 96893 - DNA, 80 bp, synthetic construct
  source 1..80: mol_type = other DNA
atagtagcgacttaaaaaactgctctttcaatatcaccacagaaataaaaaataaggtgcaaaaaaaaaagcattgtttt

SEQ ID NO: 96894 - DNA, 80 bp, synthetic construct
  source 1..80: mol_type = other DNA
aattgaaccaggagaaataaaacaatgctatttcaatatcaccacaggaagaagaaataaggtgcaagaacaatatgcaa

SEQ ID NO: 96895 - DNA, 80 bp, synthetic construct
  source 1..80: mol_type = other DNA
ccaggagaaatacaaaaatgctttttcaatatcaccacaggaagaagaaataaggtgcaagaacaatatgcaatgtttta

SEQ ID NO: 96896 - DNA, 80 bp, synthetic construct
  source 1..80: mol_type = other DNA
tactgcaggagctgcagtgaagatgatacacaaaaatgtgttgacacaagacttgagcagccacagagcatactaattga

SEQ ID NO: 96897 - DNA, 80 bp, synthetic construct
  source 1..80: mol_type = other DNA
gatgaggaaacaggctacagaaggattattgaaagactgaacagcaaaaaagggaaaaacaggctgcttgacggtgaaag

SEQ ID NO: 96898 - DNA, 80 bp, synthetic construct
  source 1..80: mol_type = other DNA
aggaggcagaaatgaaaaactgctctttctatacacacccaaacctaggagataagaagaagagagaatatgcacttttt

SEQ ID NO: 96899 - DNA, 80 bp, synthetic construct
  source 1..80: mol_type = other DNA
cctgaaagcgaaagtagaaccagaggagatctctcgacgcaggactcggcttgctgaaagcgcgctcggcaagaggcctt

SEQ ID NO: 96900 - DNA, 80 bp, synthetic construct
  source 1..80: mol_type = other DNA
acctgaaagcgaaagagaaaccagaggagatctctcgacgcaggactcggcttgctgagcgcgcgcggtagaggagaagg

SEQ ID NO: 96901 - DNA, 80 bp, synthetic construct
  source 1..80: mol_type = other DNA
ataaaaaactgctctttcaacctctcttcaagcataagcgataagcctcagaaacaacgtgcacttttttataagcttga

SEQ ID NO: 96902 - DNA, 80 bp, synthetic construct
  source 1..80: mol_type = other DNA
gcaggtagaaaaggccaccgaaagaaaaaacaacagcctattacatcctatataccagcataagataaataacccaaaga

SEQ ID NO: 96903 - DNA, 80 bp, synthetic construct
  source 1..80: mol_type = other DNA
aaaaaatgttaatgtaaaagtttaacagccgcctaacatttcatcacatagccaaaaagaaacaccctaagttctacaaa

SEQ ID NO: 96904 - DNA, 80 bp, synthetic construct
  source 1..80: mol_type = other DNA
gactgctgacatcaagcttcctacaaaagtgctgacagcgagctttctacaaaaaactttccactaaaaactttccaaag

SEQ ID NO: 96905 - DNA, 80 bp, synthetic construct
  source 1..80: mol_type = other DNA
gacctgaaagcgaaagtagaaccagaggagatctctcgacgcaggactcggcttgctgaagcgcgcacgaggcacagcaa

SEQ ID NO: 96906 - DNA, 80 bp, synthetic construct
  source 1..80: mol_type = other DNA
tctagcagtggcgcccctcagcactatggcggacagattttttcaagtagcctaggttagctctagtttaatttttctcg

SEQ ID NO: 96907 - DNA, 80 bp, synthetic construct
  source 1..80: mol_type = other DNA
ctagcgtctgttgtgtgactctggtaactagcccacagggacctgaaagcgaaagcgtctgttgtgtgactctggtaact

SEQ ID NO: 96908 - DNA, 80 bp, synthetic construct
  source 1..80: mol_type = other DNA
gacgcaaaaggtaagaagctctcaaatattagtgaaatctcctgcagtactagagtcaagaaataaagaatagtgctatc

SEQ ID NO: 96909 - DNA, 80 bp, synthetic construct
  source 1..80: mol_type = other DNA
agcttgctcaacgccacagctatagcagtagctaaaaagacagataaaatcataaaagtagtacaaagagcttaaagagc

SEQ ID NO: 96910 - DNA, 80 bp, synthetic construct
  source 1..80: mol_type = other DNA
tggtaactaggtctgttgtgtgactctggtaactagacagggacctgaaagcgtctgttgtgtgactctggtaactagac

SEQ ID NO: 96911 - DNA, 80 bp, synthetic construct
  source 1..80: mol_type = other DNA
cagttttttatttctcctttcgtctcctccaatgtactttctcctttcttctcatacgatctactactattagtgctggt

SEQ ID NO: 96912 - DNA, 80 bp, synthetic construct
  source 1..80: mol_type = other DNA
aagagaaacaccctgagttctacaaggctataagatgggtggaaagtggtcaaaaaagagtgggggtggatggcctgctg

SEQ ID NO: 96913 - DNA, 80 bp, synthetic construct
  source 1..80: mol_type = other DNA
cagttttttatttctcctttcgtctcctccaatgtactactactattagtgccggtggtgtcagcatcagtgcaatttaa

SEQ ID NO: 96914 - DNA, 80 bp, synthetic construct
  source 1..80: mol_type = other DNA
cctgaaagcgaaagtgagaccagaggagttctctcgacgcaggactcggcttgctgaagcgcgcgcggcaccagtattaa

SEQ ID NO: 96915 - DNA, 80 bp, synthetic construct
  source 1..80: mol_type = other DNA
cctgaaagcgaaagtgagaccagaggagttctctcgacgcaggactcggcttgctgaagcgcgcgcagcagatacaagac

SEQ ID NO: 96916 - DNA, 80 bp, synthetic construct
  source 1..80: mol_type = other DNA
tggggaagcagaaatgaaaaactgctctttctataccaacccaagcctaggagataagaggaagagagaatatgcacttt

SEQ ID NO: 96917 - DNA, 80 bp, synthetic construct
  source 1..80: mol_type = other DNA
caacctcgcttcaagcataagcgataagcctcagaaacaacgtgcacttttttataagcttgatgtggtacaaacaaatg

SEQ ID NO: 96918 - DNA, 80 bp, synthetic construct
  source 1..80: mol_type = other DNA
catttggattgcgcatttaaagcgaaattccaattcaggagaccttatcttttgaaatggggcaaattgtaaccttcttc

SEQ ID NO: 96919 - DNA, 80 bp, synthetic construct
  source 1..80: mol_type = other DNA
catttggattgcgcatttgaggcgaaattcccattcaggagaccttatttttccgaaatgggacagattgtaaccttctt

SEQ ID NO: 96920 - DNA, 80 bp, synthetic construct
  source 1..80: mol_type = other DNA
tgacgttctaaacaccatgtctctaggtagaacagctcccaaaacagtggcatttaggcctccggacacggccgcatcaa

SEQ ID NO: 96921 - DNA, 80 bp, synthetic construct
  source 1..80: mol_type = other DNA
aaaccctcacaacaccatctcctttgggttgattgttctggttcccaccgctcatccctatcatgttcaggagagctttc

SEQ ID NO: 96922 - DNA, 80 bp, synthetic construct
  source 1..80: mol_type = other DNA
tccaaatagaacactagtgtgataactatcaacacaaggctatcactacaccaaggaagtgttgtaagcgcagcctttaa

SEQ ID NO: 96923 - DNA, 80 bp, synthetic construct
  source 1..80: mol_type = other DNA
acaccgccttaaccatatggggatctgctcttgtggactgtacaagcagcctggtgtcccaaccagatggaagagataag

SEQ ID NO: 96924 - DNA, 80 bp, synthetic construct
  source 1..80: mol_type = other DNA
tagaattgctcatcttgctccaaatagaacactagtgtgataactatcaacacaaggctatcactacaccaaggcagtgt

SEQ ID NO: 96925 - DNA, 80 bp, synthetic construct
  source 1..80: mol_type = other DNA
cctcacgaactgtcatcattggtagggcatgggaaaatactgtggttgatttggagtctgatagcagaccacaaaaacct

SEQ ID NO: 96926 - DNA, 80 bp, synthetic construct
  source 1..80: mol_type = other DNA
attgattgtctccagcatgttgcccccatcaagcatacaagccccagtcttgattgcggcccccaggctgtaattgtaac

SEQ ID NO: 96927 - DNA, 80 bp, synthetic construct
  source 1..80: mol_type = other DNA
cattcagttaataaataaagcagtgaatgcattgataaatgatcagctcatcatgaagaaccatttgagagatataatgg

SEQ ID NO: 96928 - DNA, 80 bp, synthetic construct
  source 1..80: mol_type = other DNA
cccacactgggcccgtgacctcacgggggcgttcacttacagaacgactttgggtgatgacgttctaaacaccatgtctc

SEQ ID NO: 96929 - DNA, 80 bp, synthetic construct
  source 1..80: mol_type = other DNA
gataactatcaacacaaggctatcactacaccaaggaagtgttgtaagcgcagcctttaagcctaggatccactgtggag

SEQ ID NO: 96930 - DNA, 80 bp, synthetic construct
  source 1..80: mol_type = other DNA
actttaacggaggtaaaatcagtgtacaatataatcttagtcatgcttatgcaggtgatgctgccagtcactgcggaaca

SEQ ID NO: 96931 - DNA, 80 bp, synthetic construct
  source 1..80: mol_type = other DNA
gttgcaaatggtgtgctgcagacattcatgaggatggcttggggaggaagttacattgcacttgactctgggagtggcaa

SEQ ID NO: 96932 - DNA, 80 bp, synthetic construct
  source 1..80: mol_type = other DNA
gaggagttctgcgatatgttaaggttgtttgacttcaataaacaggcaattcagaggcttaagtcagaggcacaaatgag

SEQ ID NO: 96933 - DNA, 80 bp, synthetic construct
  source 1..80: mol_type = other DNA
tcagaattaaaagataaaaaacagaaacaaagagcaattttttctgaacttgatgtagtaccacttgataatgataattc

SEQ ID NO: 96934 - DNA, 80 bp, synthetic construct
  source 1..80: mol_type = other DNA
aggggtgggaaacccttaagtatttgggaagtcttgtgcagtattggggtctggagatttggagagctatcctccacata

SEQ ID NO: 96935 - DNA, 80 bp, synthetic construct
  source 1..80: mol_type = other DNA
agagattagcaattattcagacacaatatacaggttgcttgaaatatcgcaaaaccagcaggaacaaaatgaaaaggatt

SEQ ID NO: 96936 - DNA, 80 bp, synthetic construct
  source 1..80: mol_type = other DNA
caccgagccccctaggcattttgatgttcttttgggttgtgctctttggagaacactgaagcccgtgctgcacagggttc

SEQ ID NO: 96937 - DNA, 80 bp, synthetic construct
  source 1..80: mol_type = other DNA
tttgtggtgaaagtcagacacaaaagccatgatgaaatatctaaggttctgtaagaatttttggcagcgtttgctggggt

SEQ ID NO: 96938 - DNA, 80 bp, synthetic construct
  source 1..80: mol_type = other DNA
tctaaaaggaatctcaccaacttatataagatcagttcagcctcagtgatgagatcttccttgatcttatccatcaaatc

SEQ ID NO: 96939 - DNA, 80 bp, synthetic construct
  source 1..80: mol_type = other DNA
tcctgtagagcaaatgggtgcgaacataacaccgaagataagtccgttgaagttatccttaatgagaatgggatcttaac

SEQ ID NO: 96940 - DNA, 80 bp, synthetic construct
  source 1..80: mol_type = other DNA
gatggtgatctagatgatatactttttgaaggcggggcatcagagtactttgaaaggttgagagcaactgtagacaaaat

SEQ ID NO: 96941 - DNA, 80 bp, synthetic construct
  source 1..80: mol_type = other DNA
tgtcagtcagtatagagaaattaacgttaagaagaacagtttgataggggaggatcacccttcagtagcagatctagaga

SEQ ID NO: 96942 - DNA, 80 bp, synthetic construct
  source 1..80: mol_type = other DNA
ggttaattgaggattattttgaagcattgaccgggcaattaacaggaagttgtttaaataatgaaaaagagttcgataat

SEQ ID NO: 96943 - DNA, 80 bp, synthetic construct
  source 1..80: mol_type = other DNA
ttaaactgttagatgtggaaccactctctgattcagaccttggacattactggatgaatttggctgcacatcacccactg

SEQ ID NO: 96944 - DNA, 80 bp, synthetic construct
  source 1..80: mol_type = other DNA
atattaagtcagtacaagctcaggttatgagtattgagggcatacagcttgaattagatgggcaagggattcaactatgg

SEQ ID NO: 96945 - DNA, 80 bp, synthetic construct
  source 1..80: mol_type = other DNA
ttcaacaatgagaataaaatgtctctcagtttgtcattcacccaatcaggaatttggtcattgtaaaaagtggttcttcc

SEQ ID NO: 96946 - DNA, 80 bp, synthetic construct
  source 1..80: mol_type = other DNA
caccagaaccctagggtcctttacttggtttccacacaagtcatctgtacctgagggtgaaggtcttaagaggcttgggc

SEQ ID NO: 96947 - DNA, 80 bp, synthetic construct
  source 1..80: mol_type = other DNA
gctcgggctcgtgggacttagaggctgtatagtggggaagttagaggttgtgccggtgcccctggaggtgcactgggagc

SEQ ID NO: 96948 - DNA, 80 bp, synthetic construct
  source 1..80: mol_type = other DNA
gacctccacagcaccgaggatcctaggcattttgatgttctttagggttgtgctctttggggaacactgaagcccgtgcc

SEQ ID NO: 96949 - DNA, 80 bp, synthetic construct
  source 1..80: mol_type = other DNA
atgcagggcttaatgaggatgcaggaagagtgagaccggctgattgtgacgaacagatgcagtgttggagatcattttta

SEQ ID NO: 96950 - DNA, 80 bp, synthetic construct
  source 1..80: mol_type = other DNA
ctggccagaaggatgatagtatcaaaaatcaacagaagtttcctccttgtatttaatatcctcagtgactttatcttgtt

SEQ ID NO: 96951 - DNA, 80 bp, synthetic construct
  source 1..80: mol_type = other DNA
tagatttgatctatccaaatctaagcagagattcccatcaggctggttgggttccagcttcgaaagtgtcaatgatcggc

SEQ ID NO: 96952 - DNA, 80 bp, synthetic construct
  source 1..80: mol_type = other DNA
tagtctcattggaatccacaaagagagatgtaaagaagtggatagaagggaggttaaccaagaatggtgggcaaagaccc

SEQ ID NO: 96953 - DNA, 80 bp, synthetic construct
  source 1..80: mol_type = other DNA
agaggagtcaatagattgtctgaccgaaatgaaactctattgagtgtcataaagaaaacattagacaaggccatctctac

SEQ ID NO: 96954 - DNA, 80 bp, synthetic construct
  source 1..80: mol_type = other DNA
attaaaggatgtaggcattgaaattaccatgtacaaagtcaatatggccatatttgactgtgacgtgtttgataccatca

SEQ ID NO: 96955 - DNA, 80 bp, synthetic construct
  source 1..80: mol_type = other DNA
tgggatttgaaatgtcaggaatagtcccaaccatgagttatcagaaaacacagagtgagatgtttccttacacactagga

SEQ ID NO: 96956 - DNA, 80 bp, synthetic construct
  source 1..80: mol_type = other DNA
gtcgttgaccttgaggagacgatagacttgaagcgactgtcagtggtgtgcttggccctcattaactccatgaagacatc

SEQ ID NO: 96957 - DNA, 80 bp, synthetic construct
  source 1..80: mol_type = other DNA
cgaggtatttgattgacaatgagaggttaactaagcagaaattagcatttcttgtacagacagaacccaggatgttatta

SEQ ID NO: 96958 - DNA, 80 bp, synthetic construct
  source 1..80: mol_type = other DNA
gtcgacagtaagactgagacagaatgaatttggtccagcaaggtatcaacaggtcagatgtaaagaagcttactgccaga

SEQ ID NO: 96959 - DNA, 80 bp, synthetic construct
  source 1..80: mol_type = other DNA
gtttcactattgacgggattgaattcaagctcctttatcagaagacaggtgagtgttccaaatgctatgcgatcaacaac

SEQ ID NO: 96960 - DNA, 80 bp, synthetic construct
  source 1..80: mol_type = other DNA
cggatcctaagaggttctttccagcaattttttcagatagtgtgcttcaatcagtggtagacataatgatgagctggatt

SEQ ID NO: 96961 - DNA, 80 bp, synthetic construct
  source 1..80: mol_type = other DNA
gaggattgtattgaattgaaagccaagttgaaggctgtcaaactgttaaccaaaatgatcttagttatagtcttggtgca

SEQ ID NO: 96962 - DNA, 80 bp, synthetic construct
  source 1..80: mol_type = other DNA
acattactgtcaagtgacattagcagcatgatgacaaataggtttaaattcatcttaaatgtttcctacatgtgtcactt

SEQ ID NO: 96963 - DNA, 80 bp, synthetic construct
  source 1..80: mol_type = other DNA
ggcatgtgagtgtcaatccaagagaccacccagaagaggaagaactagaagacatgattcacagcattagacggttttta

SEQ ID NO: 96964 - DNA, 80 bp, synthetic construct
  source 1..80: mol_type = other DNA
aagaaggacacatgtacggatggggaaggaattaaatttaaaaagcctggggtctctaaaaagtatttgtcactgctgac

SEQ ID NO: 96965 - DNA, 80 bp, synthetic construct
  source 1..80: mol_type = other DNA
gtctagttttaacaatggctctttattcaaggaaaaagaggtcaagcgtgaattgaaggatcccttgattacaagtggtt

SEQ ID NO: 96966 - DNA, 80 bp, synthetic construct
  source 1..80: mol_type = other DNA
gcaagattatgactacaaaatacagcaggccatgagcaacttagtcttaggaccggatcaacaaaaagttggcatcgaag

SEQ ID NO: 96967 - DNA, 80 bp, synthetic construct
  source 1..80: mol_type = other DNA
gtcagtcagtatagagaacctaacgttgagaagaacagtttgatgggggaaggtcacccttcagtagcagatctagaaag

SEQ ID NO: 96968 - DNA, 80 bp, synthetic construct
  source 1..80: mol_type = other DNA
tcttgccagaagaattttacaaaggcttttgtgactccatctatgatgacagtgacctacaaaagaagtacttttatagt

SEQ ID NO: 96969 - DNA, 80 bp, synthetic construct
  source 1..80: mol_type = other DNA
ggtcctatgaattcctgtcctattggtgagttaacaaaggctgttgttaccagaacgtatcttgaggcagaatacttcca

SEQ ID NO: 96970 - DNA, 80 bp, synthetic construct
  source 1..80: mol_type = other DNA
taagtccgttgaagttatcctaaatgaaagtgggatcttaacccctgctctctgctttgttgtccctgatggttacaagt

SEQ ID NO: 96971 - DNA, 80 bp, synthetic construct
  source 1..80: mol_type = other DNA
atgtttcaaatcgatcttattagttatgaatgccaataagctcatgggcaggtattcacactatagagcaaagtgtctga

SEQ ID NO: 96972 - DNA, 80 bp, synthetic construct
  source 1..80: mol_type = other DNA
cccttcaatgtggcctctgcaatgatgaaatcatacattaaatcacaacttggtttgaggaaaagaacaagccggacagt

SEQ ID NO: 96973 - DNA, 80 bp, synthetic construct
  source 1..80: mol_type = other DNA
caaatggagttccagtgcatctttgcaacttgattcagtcgagaacacttgcgttactacactattctagatacccatta

SEQ ID NO: 96974 - DNA, 80 bp, synthetic construct
  source 1..80: mol_type = other DNA
tgaaagattgacgccagatgcatgcaagaaggtaaggtcaatgttgagaattctgtttaacaaactgaagacaggtgaac

SEQ ID NO: 96975 - DNA, 80 bp, synthetic construct
  source 1..80: mol_type = other DNA
ccttgaggactttaagaagttggagcaattgaaatccgatcttgagtcagtcaacataaacctcatccctctaatagacg

SEQ ID NO: 96976 - DNA, 80 bp, synthetic construct
  source 1..80: mol_type = other DNA
gaaccactctctgaatcagaccttggatactactggatgaatttagctgcacatcacccactgagaatggtcctaagaca

SEQ ID NO: 96977 - DNA, 80 bp, synthetic construct
  source 1..80: mol_type = other DNA
aaagatagtttattcaggtgcagtaaacctggatgaagaaaaggtgccgacaatagtgaagacactacaaaataagctat

SEQ ID NO: 96978 - DNA, 80 bp, synthetic construct
  source 1..80: mol_type = other DNA
gcaagctcaggtcatgagtattgaaggcatacagcttgaattagatgggcaagggattcaactatggaaagttcctcctg

SEQ ID NO: 96979 - DNA, 80 bp, synthetic construct
  source 1..80: mol_type = other DNA
gtgtaaggcttgaccagaaccctgcaacaagttatctaagacccttaatgtgggattacatgtgcattgcattgtctact

SEQ ID NO: 96980 - DNA, 80 bp, synthetic construct
  source 1..80: mol_type = other DNA
gctattgaacttggtgcatgggtcctaggggagcccaaagaagcaaaaaacttggggttcttcaaacataacccctgtga

SEQ ID NO: 96981 - DNA, 80 bp, synthetic construct
  source 1..80: mol_type = other DNA
ccctttcctcaaccatgggttcgtgtatcctagtgtgagagtttctaagttcagaagcaagtacaatatagtgttcttct

SEQ ID NO: 96982 - DNA, 80 bp, synthetic construct
  source 1..80: mol_type = other DNA
ttgttagtacagcagatgttttagacaacttcatgagacaagtttactttgagtcatatgtacgatcatttgtagccacc

SEQ ID NO: 96983 - DNA, 80 bp, synthetic construct
  source 1..80: mol_type = other DNA
gattaacagaagaaatgaaacttgattcactagagaccttcctagattgcatgagtgaactgccaataggatcaataaag

SEQ ID NO: 96984 - DNA, 80 bp, synthetic construct
  source 1..80: mol_type = other DNA
tttacacagacaattagatataggattaagagccaggatgcttctttcaaagagacgttctcaattcatttgaatatgtc

SEQ ID NO: 96985 - DNA, 80 bp, synthetic construct
  source 1..80: mol_type = other DNA
tggctttgtcgatcaacaaggaaggtacgtggtttgtgatgttcaaccaatgtattcaggacctgtttgcacctctgtcc

SEQ ID NO: 96986 - DNA, 80 bp, synthetic construct
  source 1..80: mol_type = other DNA
tagtggattgctggcgattggctgcatcaagtccagtgttcaagggtaagtcgacctggtttataaactccgaggttgta

SEQ ID NO: 96987 - DNA, 80 bp, synthetic construct
  source 1..80: mol_type = other DNA
aatgagtttcttgatcacacagaacaaatgggtgatgtcatcccaattgacctagtgatagaggcagataagttgcagtt

SEQ ID NO: 96988 - DNA, 80 bp, synthetic construct
  source 1..80: mol_type = other DNA
tcatgaatatgactttgtgatggtaggtccagaagtggaacctgtaccgttggttgtctgtaggggatccttatgggagg

SEQ ID NO: 96989 - DNA, 80 bp, synthetic construct
  source 1..80: mol_type = other DNA
gtgataaaaggttggcgtcgttctcacccacaatccatgaccaggatctggatatgttcataaaggaggctggtgatagt

SEQ ID NO: 96990 - DNA, 80 bp, synthetic construct
  source 1..80: mol_type = other DNA
tcaaaggatcttctggttggcgccttgaagtctatgatatctgacagattaaggcagagggtgcaatggacaggagttga

SEQ ID NO: 96991 - DNA, 80 bp, synthetic construct
  source 1..80: mol_type = other DNA
tattgtggctgtactaacaagacagagacccgatgatcataaagatgttctgagcacactcctcgagggtttagatgact

SEQ ID NO: 96992 - DNA, 80 bp, synthetic construct
  source 1..80: mol_type = other DNA
agactaaaggggaggacctgtgttgagcttttcaaagaaccggtctctgttgaagatatagagtagtgtggaggtgctgt

SEQ ID NO: 96993 - DNA, 80 bp, synthetic construct
  source 1..80: mol_type = other DNA
cttggtggggagaggcatcttgcagatgggacacctgttgctgacactgagtagaaggctgaggcaattgaggcaaaggt

SEQ ID NO: 96994 - DNA, 80 bp, synthetic construct
  source 1..80: mol_type = other DNA
gccctttgttctcaaaccagcaactcttgcagaactggggtcctagatagcttgcgtcgggcaccagggaggctctagga

SEQ ID NO: 96995 - DNA, 80 bp, synthetic construct
  source 1..80: mol_type = other DNA
gctgtcaggaatagaaagtatcaatgttctcaaagacaatcgcactgatcactttacggaaataatagccaactgtcatc

SEQ ID NO: 96996 - DNA, 80 bp, synthetic construct
  source 1..80: mol_type = other DNA
gacctctcattgtggggctgcttggtttgtctagctcccattctgtgctaggtgcagcctgggtggatgtgttgtgggtg

SEQ ID NO: 96997 - DNA, 80 bp, synthetic construct
  source 1..80: mol_type = other DNA
tgggtggatgtgttgtgggtggatgaccacagtcactctgaatggctatctgcttcaagtgacaatcaaatttgcctagg

SEQ ID NO: 96998 - DNA, 80 bp, synthetic construct
  source 1..80: mol_type = other DNA
aaggcatcaacaacaagatgacatctcatgaggttaaaacaatggtagaagaggaatatcagacctttaggaataaactc

SEQ ID NO: 96999 - DNA, 80 bp, synthetic construct
  source 1..80: mol_type = other DNA
ccacagggttcccctcccacaccaggtcaactgcccctccaccatggaagaggacatagcccaggtcaaagatctagttt

SEQ ID NO: 97000 - DNA, 80 bp, synthetic construct
  source 1..80: mol_type = other DNA
aggcaaggtgttattgagagtcagtttgttgctactgacaaagagaatctgttgagcaggttctccaagctgtatgaagg

SEQ ID NO: 97001 - DNA, 80 bp, synthetic construct
  source 1..80: mol_type = other DNA
ggagatagctgactatgatgataatttagatcaacttgttcaccaatttaaaagagcttcacctcttctgaggtttttgt

SEQ ID NO: 97002 - DNA, 80 bp, synthetic construct
  source 1..80: mol_type = other DNA
caacaaactacttgtcgggagagcacacagcatcactccggaatttgtttaaactgttagatgtggaaccactctctgaa

SEQ ID NO: 97003 - DNA, 80 bp, synthetic construct
  source 1..80: mol_type = other DNA
ggcttaggggctccacggtggtggagttcggggttgtgcctgggccgctggaggtgcactgggagcgtttgacactctca

SEQ ID NO: 97004 - DNA, 80 bp, synthetic construct
  source 1..80: mol_type = other DNA
ttgtttgtcctgaatctgtattgagcagcacagaactatccactgctgaaattgctacacagctacacgcctacaacacc

SEQ ID NO: 97005 - DNA, 80 bp, synthetic construct
  source 1..80: mol_type = other DNA
ttttaaaatatggcagcatggctgtgttttttggggggttgggaattggttctggatctggcacaggtggaagatctgga

SEQ ID NO: 97006 - DNA, 80 bp, synthetic construct
  source 1..80: mol_type = other DNA
ttggttctggatctggcacaggtggaagatctggatatgttccactgggtacaacacctccaacggctgccacaaacatt

SEQ ID NO: 97007 - DNA, 80 bp, synthetic construct
  source 1..80: mol_type = other DNA
gttgttgtatgtatgtcagtacgcaataaaagtgatgtgtgtgtttataattaacactgtattgttgtatgactatgggt

SEQ ID NO: 97008 - DNA, 80 bp, synthetic construct
  source 1..80: mol_type = other DNA
tcgcaagctaaaattgtaaaagattgtgcaacaatgtgtagacattataaacgagctggaaaaagagaaatgacaatgtc

SEQ ID NO: 97009 - DNA, 80 bp, synthetic construct
  source 1..80: mol_type = other DNA
tttaaaaaacatggggttacagtggaagtacaatttgatggtgataaacaaaatactatgcattatactaattggacaca

SEQ ID NO: 97010 - DNA, 80 bp, synthetic construct
  source 1..80: mol_type = other DNA
tatgttccactgggtacaacacctccaacggctgccacaaacattcctatacgaccccctgtaactgtggaaagtatacc

SEQ ID NO: 97011 - DNA, 80 bp, synthetic construct
  source 1..80: mol_type = other DNA
tgggggtgacttttatttacaccctagttattatttattaaaacgacgtcgtaaacgtatcccatatttttttgcagatg

SEQ ID NO: 97012 - DNA, 80 bp, synthetic construct
  source 1..80: mol_type = other DNA
ttttgttgtgcttttgtgtgcctttgtgcttgtgtctgcttgtacgttcgctattgctatctgtgtcattatactcagca

SEQ ID NO: 97013 - DNA, 80 bp, synthetic construct
  source 1..80: mol_type = other DNA
tgaataaattgatcacatggtataaccatgcgacaccaaaggtctacaaaacgtgttaaacgtgcatctgcaacacaact

SEQ ID NO: 97014 - DNA, 80 bp, synthetic construct
  source 1..80: mol_type = other DNA
tgcatatgttcctagcaatactactataccattaagtagtggctatgatattcctataacagcagggccagacattgtat

SEQ ID NO: 97015 - DNA, 80 bp, synthetic construct
  source 1..80: mol_type = other DNA
ggagcaccaaacacaggtaaatcattatttggaatgagtctaatgcatttcttacaaggagctattatatcctatgtaaa

SEQ ID NO: 97016 - DNA, 80 bp, synthetic construct
  source 1..80: mol_type = other DNA
aagtagattttgtggcatttttatctgcactaaaaaattttttacatggtgtgcctaaaaaaaattgcatacttatatat

SEQ ID NO: 97017 - DNA, 80 bp, synthetic construct
  source 1..80: mol_type = other DNA
ggcctaattttagattaggtaagcgtgcagctccagcatctacatctaaaaaatcttctactaaacgtagaaaagtaaaa

SEQ ID NO: 97018 - DNA, 80 bp, synthetic construct
  source 1..80: mol_type = other DNA
tacaaactgcatgatttgtgcaacgaggtagaagaaagcatccatgaaatttgtttgaattgtgtatactgcaaacaaga

SEQ ID NO: 97019 - DNA, 80 bp, synthetic construct
  source 1..80: mol_type = other DNA
tttaaaggaaaagttttctgcagacttagatcaatttccgttgggccgtaaagttttgttacaagcaggactaaaggcca

SEQ ID NO: 97020 - DNA, 80 bp, synthetic construct
  source 1..80: mol_type = other DNA
gtgtagaaacatattatgttaattttagggaagaggctaaaaagtatggaaaaaaaaatatatgggaagtgcatgtgggt

SEQ ID NO: 97021 - DNA, 80 bp, synthetic construct
  source 1..80: mol_type = other DNA
atttttcatacttgtggtccacccacacttgtaacacttgtaacagtgcttttaggcacatatttgttgcatttctaaag

SEQ ID NO: 97022 - DNA, 80 bp, synthetic construct
  source 1..80: mol_type = other DNA
aatacctaacacagttacagtgtctaaaggatatatgtctatatgatagaccttacagcttccagtactgtgttgctgtg

SEQ ID NO: 97023 - DNA, 80 bp, synthetic construct
  source 1..80: mol_type = other DNA
ctttacattacctttcaaccgatttcggttgctgttggcaagctttatatgttttttacaaaaacattcctacctcagca

SEQ ID NO: 97024 - DNA, 80 bp, synthetic construct
  source 1..80: mol_type = other DNA
tttgtgcaacgaggtagaagaaagcatccatgaaatttgtttgaattgtgtatactgcaaacaagaattacagcggagtg

SEQ ID NO: 97025 - DNA, 80 bp, synthetic construct
  source 1..80: mol_type = other DNA
tacagtaaaactacctaacacagttacagtgtctaaaggatatatgtctatatgatagaccttacagcttccagtactgt

SEQ ID NO: 97026 - DNA, 80 bp, synthetic construct
  source 1..80: mol_type = other DNA
catacttacatagcagggtagtggtctttacatttcacaatgaattcccatttgataaaaatggaaacccagtgtatggg

SEQ ID NO: 97027 - DNA, 80 bp, synthetic construct
  source 1..80: mol_type = other DNA
cagttctaggctattagctgtgggtcacccatactatgctattaaaaaacaagattctaataaaatagcagtacccaagg

SEQ ID NO: 97028 - DNA, 80 bp, synthetic construct
  source 1..80: mol_type = other DNA
taaaagcagaagtgcacaaaaaagcagaagtggacagacattgtaaggtgcggtatgtttcaggacccagctgaaagacc

SEQ ID NO: 97029 - DNA, 80 bp, synthetic construct
  source 1..80: mol_type = other DNA
ctataggtgaacattggggaaaaggcacaccttgtaatgctaaccaggtaaaagcaggtgaatgtcctcctttggagtta

SEQ ID NO: 97030 - DNA, 80 bp, synthetic construct
  source 1..80: mol_type = other DNA
tcctgccaactttaagttaaaacatgcatgtaaaacattactcactgtattacacattgttatatgcacacaggtgtgtc

SEQ ID NO: 97031 - DNA, 80 bp, synthetic construct
  source 1..80: mol_type = other DNA
agggtaccactggcacattgcctagtactagttattttcctactcctagtggctctatggtaacctccgatgcacaaata

SEQ ID NO: 97032 - DNA, 80 bp, synthetic construct
  source 1..80: mol_type = other DNA
ccttaaccctgatacaaccttacaatttgagcatgaggatattagcttagctccggatcctgactttatggacattatag

SEQ ID NO: 97033 - DNA, 80 bp, synthetic construct
  source 1..80: mol_type = other DNA
tgtaacatcacaggctgtaacttgtcaaaaacccagtgcaccaaaacctaaagatgatccattaaaaaattatacttttt

SEQ ID NO: 97034 - DNA, 80 bp, synthetic construct
  source 1..80: mol_type = other DNA
caacacaactatatcgtacttgcaaagctgcaggaacttgtccaccagatattatacctaaggttgagggtaatactgtt

SEQ ID NO: 97035 - DNA, 80 bp, synthetic construct
  source 1..80: mol_type = other DNA
ttatactcagcattaatattactggttttaatactgtgggttactgtagcaacaccactacgttgcttttgttgttttct

SEQ ID NO: 97036 - DNA, 80 bp, synthetic construct
  source 1..80: mol_type = other DNA
acacgattgtgtttaataggttgtaggcctcctataggtgaacattggggaaaaggcacaccttgtaatgctaaccaggt

SEQ ID NO: 97037 - DNA, 80 bp, synthetic construct
  source 1..80: mol_type = other DNA
cgatgaaaaacaaatagcaattgtaacattaacttacacaacagaatatcaaagggataaatttttaactacagtaaaaa

SEQ ID NO: 97038 - DNA, 80 bp, synthetic construct
  source 1..80: mol_type = other DNA
aaaggtacccagcaggttaaggttgttgaccctgcctttatgacttctcctgcaaaacttattacatatgataatcctgc

SEQ ID NO: 97039 - DNA, 80 bp, synthetic construct
  source 1..80: mol_type = other DNA
gtgtatggtggttttattttttgttgttcattgtatattttgtttttttactgtttttaaacatttttatttctgtgttt

SEQ ID NO: 97040 - DNA, 80 bp, synthetic construct
  source 1..80: mol_type = other DNA
gtactacaagacggggacatggtagacacaggatttggtgcaatggattttactacattacaagctaataaaagtgatgt

SEQ ID NO: 97041 - DNA, 80 bp, synthetic construct
  source 1..80: mol_type = other DNA
acagacagcaataatatgactgatagcacgcctattccagggtctcgccctacgacacgcctaggattatatagtaaagg

SEQ ID NO: 97042 - DNA, 80 bp, synthetic construct
  source 1..80: mol_type = other DNA
attgtttatatatacatatacaatgtttatcgtgttcatggggtatggtaattctagcattattacgatttaaatgtgca

SEQ ID NO: 97043 - DNA, 80 bp, synthetic construct
  source 1..80: mol_type = other DNA
acatgtacaaacgataaaaaacaaatagcaattgtaacattaacttacacaacagaatatcaaagggataaatttttaac

SEQ ID NO: 97044 - DNA, 80 bp, synthetic construct
  source 1..80: mol_type = other DNA
gtggaaagtataccattagacacaattggccctttagattcttctatagtgtcattagtagaggaaactagttttattga

SEQ ID NO: 97045 - DNA, 80 bp, synthetic construct
  source 1..80: mol_type = other DNA
gaggaagatactattgacggtccagctggacaagcaaaaccagacacctccaattataatattgtaacgtcctgttgtaa

SEQ ID NO: 97046 - DNA, 80 bp, synthetic construct
  source 1..80: mol_type = other DNA
ctgtttgtgttgtacatggcgtgtaaatgtgtgtataatattgtgcaatgtgttgtacgtgggtgttttttgtatgtatg

SEQ ID NO: 97047 - DNA, 80 bp, synthetic construct
  source 1..80: mol_type = other DNA
atgagcaattgtgtgacagctcagaggaggaggaagatactattgacggtccagctggacaagcaaaaccagacacctcc

SEQ ID NO: 97048 - DNA, 80 bp, synthetic construct
  source 1..80: mol_type = other DNA
ccctacgacacgcctaggattatatagtaaaggtacccagcaggttaaggttgttgaccctgcctttatgacttctcctg

SEQ ID NO: 97049 - DNA, 80 bp, synthetic construct
  source 1..80: mol_type = other DNA
taccgaaaacggttgccataaaagcagaagtgcacaaaaaagcagaagtggacagacattgtaaggtgcggtatgtttca

SEQ ID NO: 97050 - DNA, 80 bp, synthetic construct
  source 1..80: mol_type = other DNA
gtatcgtacttgcaaagctgcaggaacttgtccaccagatgttatacctaaggttgagggtaatactgttgctgatcaaa

SEQ ID NO: 97051 - DNA, 80 bp, synthetic construct
  source 1..80: mol_type = other DNA
cgccttctggtaccttagaggacacatatcgctatgtaacatcacaggctgtaacttgtcaaaaacccagtgcaccaaaa

SEQ ID NO: 97052 - DNA, 80 bp, synthetic construct
  source 1..80: mol_type = other DNA
tgtagaagcagtagttagtagacgtacggaggatccagtgtcagaggacgaaaatgaagatgactgtgacaggggggagg

SEQ ID NO: 97053 - DNA, 80 bp, synthetic construct
  source 1..80: mol_type = other DNA
gggatccagtgtcagaggacgaaaatgaagatgactgtgacaggggggaggatatggtggactttataaatgatacagat

SEQ ID NO: 97054 - DNA, 80 bp, synthetic construct
  source 1..80: mol_type = other DNA
gtgtgtggccgcatttggaatagccccaagtgtggcggaaagtttaaaaacattaattaaaccatattgtttatatatac

SEQ ID NO: 97055 - DNA, 80 bp, synthetic construct
  source 1..80: mol_type = other DNA
catcggtggacggtggacaggtcggtgtatgtcctgttggaaaccaacacgtagagaaaccgaggtgtaatcatgcatgg

SEQ ID NO: 97056 - DNA, 80 bp, synthetic construct
  source 1..80: mol_type = other DNA
cacagtggattaaaaggcgatgtgaaaaggtggacgatgacggtgactggagggacatagtacgatttttaagatatcaa

SEQ ID NO: 97057 - DNA, 80 bp, synthetic construct
  source 1..80: mol_type = other DNA
ccacacggggacttggctcaacacgcagccacacagccacagtgctcactgggagcgcccactttgccccaaaattggtg

SEQ ID NO: 97058 - DNA, 80 bp, synthetic construct
  source 1..80: mol_type = other DNA
ccacacggggacttggctcaacacgcagccacacagccacagtgctcactgggagcgcccactttgccccaaaattgggg

SEQ ID NO: 97059 - DNA, 80 bp, synthetic construct
  source 1..80: mol_type = other DNA
aaagttcgatttgacactgacacatccaatgatctttatactgaccaaaacacaaagttcaccccagttggtgtcattca

SEQ ID NO: 97060 - DNA, 80 bp, synthetic construct
  source 1..80: mol_type = other DNA
tttattacagtggctcatactggccaatatgatgtggttattccccctaatggttattttagatttgattcctgggtcaa

SEQ ID NO: 97061 - DNA, 80 bp, synthetic construct
  source 1..80: mol_type = other DNA
tgcaccttcagaggagatgtcaccaacatcggagatagtcgcacctactcaatgaatttggcttctcaaaattggaacaa

SEQ ID NO: 97062 - DNA, 80 bp, synthetic construct
  source 1..80: mol_type = other DNA
ggttgacttggtacagaactccatgaaatttcatcatggatatgatattttctttttgagacggagtcttgctctatcgc

SEQ ID NO: 97063 - DNA, 80 bp, synthetic construct
  source 1..80: mol_type = other DNA
ggaagagtatggacatttcatggtgaaacaccaaaagctactacagataattcgaatactgcggatttaaacaatatctc

SEQ ID NO: 97064 - DNA, 80 bp, synthetic construct
  source 1..80: mol_type = other DNA
gcttcaggagatatacaaactaaggcagctgattctatagctaatttggcactcattaaaacagtattgtcaaggatcgc

SEQ ID NO: 97065 - DNA, 80 bp, synthetic construct
  source 1..80: mol_type = other DNA
gactgatagagaatttatattaactaaaattatacaaatgacatctgtagccattactggatcactaaggctatttccat

SEQ ID NO: 97066 - DNA, 80 bp, synthetic construct
  source 1..80: mol_type = other DNA
cagtatggtgctgttgcttcaggagaaacacaaactaaggcagctaattctatagctaacttagcactcattaaaacagt

SEQ ID NO: 97067 - DNA, 80 bp, synthetic construct
  source 1..80: mol_type = other DNA
tgagaaaagaggacaaagtacgcaatgggatcaggcagcagtatcatactctaatgatattgtaaacagacttagaggat

SEQ ID NO: 97068 - DNA, 80 bp, synthetic construct
  source 1..80: mol_type = other DNA
caagatgacttaacggtattgagatacgctaatgaaatggaagggtatataaataaagtatatagtataacctatgctga

SEQ ID NO: 97069 - DNA, 80 bp, synthetic construct
  source 1..80: mol_type = other DNA
tagtggtgtgctatcgacttattttaaattatataatatgttctatagaaatcatatcacgtttggacaatcgcgaatgt

SEQ ID NO: 97070 - DNA, 80 bp, synthetic construct
  source 1..80: mol_type = other DNA
gctagcattgagggtggcaaatattatgaacatgctccaatagaacttatttacgcatgtaggtcagcgagagaatttgc

SEQ ID NO: 97071 - DNA, 80 bp, synthetic construct
  source 1..80: mol_type = other DNA
ttacaacgcgttttataaagaacagattacatttggaccgtcaagaatgtttataccgcatataaccttgagctttagta

SEQ ID NO: 97072 - DNA, 80 bp, synthetic construct
  source 1..80: mol_type = other DNA
aaaaaacgttataatactagtgataattcgagaggaatgaattatgaaacgattatgtttaataaggtggctgccttaat

SEQ ID NO: 97073 - DNA, 80 bp, synthetic construct
  source 1..80: mol_type = other DNA
cagttagaaaaaagatttgaatcactaaaacagagggttaatgagaaatacaatacttgggtacaaaaagcgaagaaagt

SEQ ID NO: 97074 - DNA, 80 bp, synthetic construct
  source 1..80: mol_type = other DNA
atagattggaaatccagatatgatcaacttgaaagacgatttgagtcgttaaaacagcgtgttaatgaaaagtacaataa

SEQ ID NO: 97075 - DNA, 80 bp, synthetic construct
  source 1..80: mol_type = other DNA
gttgaattgcttaaacgtatacatgacaatctgataactagaccagctgacgttataaatatgtcaaaggaattcaatca

SEQ ID NO: 97076 - DNA, 80 bp, synthetic construct
  source 1..80: mol_type = other DNA
ctgcagtttccctgttgtttcgaaaaatatggaatttattgtacccggagcttgactgtttctttgaatttgcccaccac

SEQ ID NO: 97077 - DNA, 80 bp, synthetic construct
  source 1..80: mol_type = other DNA
tttagacgatttacacaggcattacatgacgggttacgtgatgacaaattaaaaaaatgtgtagtaaatgcattaagaaa

SEQ ID NO: 97078 - DNA, 80 bp, synthetic construct
  source 1..80: mol_type = other DNA
ctgcagtttccctgttattccggaaaatatggaacctattgtatccagagcttgattgtttttttgaatttgcccaccac

SEQ ID NO: 97079 - DNA, 80 bp, synthetic construct
  source 1..80: mol_type = other DNA
atctttttttatgatatcttttttggtagccatggctgcttttaaagatacttgttattactataagagattaaataaat

SEQ ID NO: 97080 - DNA, 80 bp, synthetic construct
  source 1..80: mol_type = other DNA
aggagaaaaaacaaattaattattctcatttttctattaacatattggaaaatttgcacaatccaaattttaaaatacaa

SEQ ID NO: 97081 - DNA, 80 bp, synthetic construct
  source 1..80: mol_type = other DNA
gatcttgcagaatcaggggatccaacaccacctgactccatcaaatcaccacaagcaccttgggtatttgcttgtgcacc

SEQ ID NO: 97082 - DNA, 80 bp, synthetic construct
  source 1..80: mol_type = other DNA
accttgctgagattgatgacctgattgaccttgcagaatcaggggacccaacaccacctgactccataaagtcaccacag

SEQ ID NO: 97083 - DNA, 80 bp, synthetic construct
  source 1..80: mol_type = other DNA
acaggttgtactgcttgtggtgtatacctggataaacttcgatctgtcgggaaagtctataagattctctccttgaaata

SEQ ID NO: 97084 - DNA, 80 bp, synthetic construct
  source 1..80: mol_type = other DNA
cacccggaaagtctgcatacagttagggactgaacaaacatgtaaaaccattgattcgaatgactgcctcgttacaacct

SEQ ID NO: 97085 - DNA, 80 bp, synthetic construct
  source 1..80: mol_type = other DNA
acaggctgtacagcatgtggtgtttatctagataaattaagatctgttggtaaagtgtataaaatattatcactcaagta

SEQ ID NO: 97086 - DNA, 80 bp, synthetic construct
  source 1..80: mol_type = other DNA
caccagatagatgccctcctacgtgcatctatgtggctggaatggcggagcttggtgcatttttctcaatcctccaagat

SEQ ID NO: 97087 - DNA, 80 bp, synthetic construct
  source 1..80: mol_type = other DNA
ttgttctaaaggcactgtacatgttgtcaactcgtggaaggcaaacaattaaagagaataaaggcaccagaatcaggttc

SEQ ID NO: 97088 - DNA, 80 bp, synthetic construct
  source 1..80: mol_type = other DNA
gataattgttatgtttatggttgcctggggaaaggaggcagtggacaacttccatctcggtgatgacatggatcccgagc

SEQ ID NO: 97089 - DNA, 80 bp, synthetic construct
  source 1..80: mol_type = other DNA
tattggagttcagagctaaaaaagagtgctattagcctgtataacgctacagcaataacagtagctgaaggaacagatag

SEQ ID NO: 97090 - DNA, 80 bp, synthetic construct
  source 1..80: mol_type = other DNA
caaaacttacaaaaaattcagtcatatcatattgtatgtgtaatggactatcaagaatatcaacaattcctagctagaat

SEQ ID NO: 97091 - DNA, 80 bp, synthetic construct
  source 1..80: mol_type = other DNA
aagtagttattatccgtatagaccctgtaagtagagacctgcacatcaactccgataggttcaaagaaatttaccccaca

SEQ ID NO: 97092 - DNA, 80 bp, synthetic construct
  source 1..80: mol_type = other DNA
cattttatatggggacctcacaattcagggaatagcaacaattcaacctttaaactcatactgctttctaagtcactgca

SEQ ID NO: 97093 - DNA, 80 bp, synthetic construct
  source 1..80: mol_type = other DNA
caaaacttacagaaaattcagtcatatcacaatatatgcataatggactatcaagagtatcaacaattcttggctaggat

SEQ ID NO: 97094 - DNA, 80 bp, synthetic construct
  source 1..80: mol_type = other DNA
cattttatatggggagcccataacccaggaaatagtaataatgcaaccttcaaactcatattgctttcaaagtccttaca

SEQ ID NO: 97095 - DNA, 80 bp, synthetic construct
  source 1..80: mol_type = other DNA
atgtttcaggacccacaggagcgacccagaaagttaccacatttatgcacagagctgcaaacaactatacatgatataat

SEQ ID NO: 97096 - DNA, 80 bp, synthetic construct
  source 1..80: mol_type = other DNA
tgtaaagcatagaccattggtacaactaaaatgccctccattattaattacatctaacattaatgctggtacagattcta

SEQ ID NO: 97097 - DNA, 80 bp, synthetic construct
  source 1..80: mol_type = other DNA
gcacaaactgtatttttttaaatagttctatgtcagcaactatagtttaaacttgtacgtttcctgcttgccatgcgtgc

SEQ ID NO: 97098 - DNA, 80 bp, synthetic construct
  source 1..80: mol_type = other DNA
aaccaaaatttacattaggaaaacgaaaagctacacccaccacctcatctacctctacaactgctaaacgcaaaaaacgt

SEQ ID NO: 97099 - DNA, 80 bp, synthetic construct
  source 1..80: mol_type = other DNA
tatttttggcttgttttaactcacctaattgcatatttggcataaggtttaaacttttaaggccaactaaatgtcacctt

SEQ ID NO: 97100 - DNA, 80 bp, synthetic construct
  source 1..80: mol_type = other DNA
tgctaatactttaaaatgtttaagatatagatttaaaaagcattgtacattgtatactgcagtgtcgtctacatggcatt

SEQ ID NO: 97101 - DNA, 80 bp, synthetic construct
  source 1..80: mol_type = other DNA
cagtgccctgttggaactacatagatgacaatttaagaaatgcattggatggaaatttagtttctatggatgtaaagcat

SEQ ID NO: 97102 - DNA, 80 bp, synthetic construct
  source 1..80: mol_type = other DNA
ttatgcacccaaagagaactgcaatgtttcaggacccacaggagcgacccagaaagttaccacatttatgcacagagctg

SEQ ID NO: 97103 - DNA, 80 bp, synthetic construct
  source 1..80: mol_type = other DNA
ttacaagcaattgaactgcaactaacgttagaaacaatatataactcacaatatagtaatgaaaagtggacattacaaga

SEQ ID NO: 97104 - DNA, 80 bp, synthetic construct
  source 1..80: mol_type = other DNA
atatttgtgaagaagcatcagtaactgtggtagagggtcaagttgactattatggtttatattatgttcatgaaggaata

SEQ ID NO: 97105 - DNA, 80 bp, synthetic construct
  source 1..80: mol_type = other DNA
ccagacaccggaaacccctgccacaccactaagttgttgcacagagactcagtggacagtgctccaatcctcactgcatt

SEQ ID NO: 97106 - DNA, 80 bp, synthetic construct
  source 1..80: mol_type = other DNA
gcacaacacaacaggttaaagttgtagaccctgcttttgtaaccactcccactaaacttattacatatgataatcctgca

SEQ ID NO: 97107 - DNA, 80 bp, synthetic construct
  source 1..80: mol_type = other DNA
acaatagataaaaatgagaaagagaatgcacttttttataaacttgatatagtaccacttgagaactctagtgagtatag

SEQ ID NO: 97108 - DNA, 80 bp, synthetic construct
  source 1..80: mol_type = other DNA
ccccccccctcctcatttaaaaaaggggggaaaaaccccgccggttgttttaataagtggaggggaaaaaaacctacgct

SEQ ID NO: 97109 - DNA, 80 bp, synthetic construct
  source 1..80: mol_type = other DNA
ttaataagtggaggggaaaaaaacctacgctggcagtctgacaaaacccgcctactaccacttatattggggtgcgtagc

SEQ ID NO: 97110 - DNA, 80 bp, synthetic construct
  source 1..80: mol_type = other DNA
tatcttttattttaacaataattgtgtggactatgttaattatagaatttagaaaaataaaaaagcacaataaaatatgc

SEQ ID NO: 97111 - DNA, 80 bp, synthetic construct
  source 1..80: mol_type = other DNA
aggttccttggaacaatatgaaaaagatcaaaatgcggaggaaatgaactttaaggggacacttattaattggctaaact

SEQ ID NO: 97112 - DNA, 80 bp, synthetic construct
  source 1..80: mol_type = other DNA
ggctcaaatggggaactttgatccttgggttgggttcctgtttggaggcctccaaattctgggttattttttattttgga

SEQ ID NO: 97113 - DNA, 80 bp, synthetic construct
  source 1..80: mol_type = other DNA
ggtcctgggtggaaagatgcaaatgccaccttatttggctactcatatccgaaaacccacaaaaactaacccacaaaaga

SEQ ID NO: 97114 - DNA, 80 bp, synthetic construct
  source 1..80: mol_type = other DNA
ttgggctggacatggctgtgtaccattttaccctaacccaaaataaataaatctagccatcgtgtaaatgttcactcctc

SEQ ID NO: 97115 - DNA, 80 bp, synthetic construct
  source 1..80: mol_type = other DNA
tgctgcggttactttgtacttgtactgcagctagttctacccaaaataattttacccagactaattctactcagagtggt

SEQ ID NO: 97116 - DNA, 80 bp, synthetic construct
  source 1..80: mol_type = other DNA
ggcaaactcctgcagcagcaaaaggagtaggagcaccatcacaaggagtaggaaaactttctccagatctagccaaacat

SEQ ID NO: 97117 - DNA, 80 bp, synthetic construct
  source 1..80: mol_type = other DNA
gagaagtgctggtctggaagtttgacagcagcctggcatttaaacacggagccctagagctgcatccggagtactttaag

SEQ ID NO: 97118 - DNA, 80 bp, synthetic construct
  source 1..80: mol_type = other DNA
ctgcgctcagccacgcagcttggacaatatggccttgaggtgttttcgatcataaagaaatatttctttggtggagacca

SEQ ID NO: 97119 - DNA, 80 bp, synthetic construct
  source 1..80: mol_type = other DNA
aactgagaaaaccctcaagggcatagagaatgcagtcatagacatggaggtcctgtcgagtaccaatgtcacacaactgg

SEQ ID NO: 97120 - DNA, 80 bp, synthetic construct
  source 1..80: mol_type = other DNA
aacaacagtcaacaacctcatttcgcgcatatctatggcgcgatcagcacttgccaaggctcaagctgagatgactaacc

SEQ ID NO: 97121 - DNA, 80 bp, synthetic construct
  source 1..80: mol_type = other DNA
gggcacgccccgtggtcataatgatgtgcgggccaccaggtataggaaagaccaaagctgctgaacacctggccaatcgc

SEQ ID NO: 97122 - DNA, 80 bp, synthetic construct
  source 1..80: mol_type = other DNA
ctagctggtgagataagacctgggggaaaagtgggcttagtgcctagagaatccattgaccattgggatggttaccatgg

SEQ ID NO: 97123 - DNA, 80 bp, synthetic construct
  source 1..80: mol_type = other DNA
ccctccgaggactgtgtcagaagtcaagcaggttttaggatgggatggccctactggtaaggattatggggcccgagcat

SEQ ID NO: 97124 - DNA, 80 bp, synthetic construct
  source 1..80: mol_type = other DNA
agcccagagaacacaactgcagggtccaccgggctgaaagggaaggtcgtggccccattggtcatgatggcatcatagaa

SEQ ID NO: 97125 - DNA, 80 bp, synthetic construct
  source 1..80: mol_type = other DNA
cggtacggtctgtgtgagactgatcaagaagaagaagaaaagatcgagatggaagtgccgactgcagacaaggaaggtaa

SEQ ID NO: 97126 - DNA, 80 bp, synthetic construct
  source 1..80: mol_type = other DNA
gaacaaaggcaagaacaagaaggggcgaggtaggaagaataactataacgccttctctaggcgaggcctaagtgatgagg

SEQ ID NO: 97127 - DNA, 80 bp, synthetic construct
  source 1..80: mol_type = other DNA
tttctacaaatccaagagtggcatgcgaaagcaacgtcaagaagaacgccgacagcttggattggttacaggcactgaaa

SEQ ID NO: 97128 - DNA, 80 bp, synthetic construct
  source 1..80: mol_type = other DNA
tcagaaaacgcaagcccatagattggacaccacccaagaatgattggtcagaagacaccagacaggttaactatgatgag

SEQ ID NO: 97129 - DNA, 80 bp, synthetic construct
  source 1..80: mol_type = other DNA
gatggggtttttgggtgagttcaacagtttttatcacaaccacacacgttgtaccaccaagtgctaaagaaatttttggg

SEQ ID NO: 97130 - DNA, 80 bp, synthetic construct
  source 1..80: mol_type = other DNA
gaatggacctgggcaccatccctggtgactgtggagctccatacgtgcataaaaggggaaatgactgggtggtgtgtgga

SEQ ID NO: 97131 - DNA, 80 bp, synthetic construct
  source 1..80: mol_type = other DNA
ttgagacattgataccccatcaacaaagaaagatccaactaatttccctgcttggtgaagccgcacttcatggagaaaaa

SEQ ID NO: 97132 - DNA, 80 bp, synthetic construct
  source 1..80: mol_type = other DNA
attcacgtaacaatggccctgctagtgagccacgcattggagatatgatagaattttatgaagggcacatatttcattat

SEQ ID NO: 97133 - DNA, 80 bp, synthetic construct
  source 1..80: mol_type = other DNA
tctgtttgatctgcatctaggaccacaccttaatccctttttgcagcatttatcccaaatgtacaatggttgggtgggca

SEQ ID NO: 97134 - DNA, 80 bp, synthetic construct
  source 1..80: mol_type = other DNA
cccagccccccttggtttccctgacatcggagcctgtgattggcatgtgtcaacctttaaagtggatcagaacctttcag

SEQ ID NO: 97135 - DNA, 80 bp, synthetic construct
  source 1..80: mol_type = other DNA
tagtttattttatgtcagattttcccattgtctcaggcaccactgcccaagtcccctgcactctgccccaggaatttgtc

SEQ ID NO: 97136 - DNA, 80 bp, synthetic construct
  source 1..80: mol_type = other DNA
tcacactttgtggagcaacaggcaccgattcgaggagaagctgccctgcttcattatgtggacccagacactcaccgtaa

SEQ ID NO: 97137 - DNA, 80 bp, synthetic construct
  source 1..80: mol_type = other DNA
acaggtggtggtcctcaaaatttacctacaaatggagtctttgtcttttcttcctgggtttctaggtattaccaattaaa

SEQ ID NO: 97138 - DNA, 80 bp, synthetic construct
  source 1..80: mol_type = other DNA
gtccactgccactacactccgatctggcaattttatgaatataccagtcacactcaaaaaggagcctcaaaacttgccgc

SEQ ID NO: 97139 - DNA, 80 bp, synthetic construct
  source 1..80: mol_type = other DNA
cacgctctacgggcttttctaatcctaattatgattcatctacaatgatttctaggacaactcagtgggtagagtcacaa

SEQ ID NO: 97140 - DNA, 80 bp, synthetic construct
  source 1..80: mol_type = other DNA
aattcaatcaggaatttatcgcctttccatacctcagccctgaggaccacctgggtgacccctcctggttctacttctac

SEQ ID NO: 97141 - DNA, 80 bp, synthetic construct
  source 1..80: mol_type = other DNA
ttctactttttctactgtttcttctgcgccacggttctttaacaccgagcgcctccctctgttcgcaaacaataggaaat

SEQ ID NO: 97142 - DNA, 80 bp, synthetic construct
  source 1..80: mol_type = other DNA
gtaatataatgtgggcatcatattcatatttaattttgttgatttggcttaattagctaattagatttgaattggatgtt

SEQ ID NO: 97143 - DNA, 80 bp, synthetic construct
  source 1..80: mol_type = other DNA
aacgcctcagctatgaccaattaaaagaacttgagaatgaaccgtggccctatgcatccataacgaacaactgttatgaa

SEQ ID NO: 97144 - DNA, 80 bp, synthetic construct
  source 1..80: mol_type = other DNA
ctcacttatttctttagttccaactaatgatgattatcaaactccaattatgaattcagtaacagtaaggcaagatttag

SEQ ID NO: 97145 - DNA, 80 bp, synthetic construct
  source 1..80: mol_type = other DNA
ttatctggacaatagtagcattagtagtagtgtctatcatagcaatagttgtgtggactttagtagctatagaatatagg

SEQ ID NO: 97146 - DNA, 80 bp, synthetic construct
  source 1..80: mol_type = other DNA
gctgccgttgctggcaaaaacaacaacaacgacaaggaaaaatcttcaagtgacagcctgtttgctaacatgtctgtaac

SEQ ID NO: 97147 - DNA, 80 bp, synthetic construct
  source 1..80: mol_type = other DNA
tgatgagcctgaagacagagggggatgccccaagcccagggatgaagatgacctcactattgactctagagacattaaag

SEQ ID NO: 97148 - DNA, 80 bp, synthetic construct
  source 1..80: mol_type = other DNA
ccgagtgtttggtctaggatagtcaactttggcacaggctggggattctgggtttctccaagtctctttataacttcaac

SEQ ID NO: 97149 - DNA, 80 bp, synthetic construct
  source 1..80: mol_type = other DNA
ggagtacacaaaccacctgctgcaataagctttgccaaaattgaaataacaccgctgtctctctactggagagtggtcta

SEQ ID NO: 97150 - DNA, 80 bp, synthetic construct
  source 1..80: mol_type = other DNA
tggactcctggacgtctgcgtttaacacacacagacagccgctcttcgcacacctcagagtgaggggggagtcacgtgtt

SEQ ID NO: 97151 - DNA, 80 bp, synthetic construct
  source 1..80: mol_type = other DNA
cctcgcggcgcggtctaaacaaccgcccccgggagaaacaaaacaaatacaaaaaccaccaaggccaccgacaccggaat

SEQ ID NO: 97152 - DNA, 80 bp, synthetic construct
  source 1..80: mol_type = other DNA
ctttcatgggggtcgtagagttggttgtgctcctagcggagttgttcgatgtgttctggaccccaccagatatctcaagc

SEQ ID NO: 97153 - DNA, 80 bp, synthetic construct
  source 1..80: mol_type = other DNA
tggggcttttgggtgagctcaacagtgttcataactacaacccatgtcataccacctggggccaaagaaatcttcggcga

SEQ ID NO: 97154 - DNA, 80 bp, synthetic construct
  source 1..80: mol_type = other DNA
aggaatcaccccatcaaccttgcctagcacgtttgagagggccgacccgattgacaaccccggtgaacagcaacctgtaa

SEQ ID NO: 97155 - DNA, 80 bp, synthetic construct
  source 1..80: mol_type = other DNA
ctttggggcgcggaccttggcaccgtcattcgcgctgctagagcatttgggccgttctgtgaggccataaagccccatgt

SEQ ID NO: 97156 - DNA, 80 bp, synthetic construct
  source 1..80: mol_type = other DNA
ctgttagtggtggggtcgatattggtgtcagtgaactgaccaccgttcgtggcccactttggaacatgtgccccctccca

SEQ ID NO: 97157 - DNA, 80 bp, synthetic construct
  source 1..80: mol_type = other DNA
atatgaaagttagggtgctgcttgctggtaacgctttcacagcgggcaaaataataatcagttgtgtccccccgggtttt

SEQ ID NO: 97158 - DNA, 80 bp, synthetic construct
  source 1..80: mol_type = other DNA
gcagcccagaatatctcaatagcccaagctactatgttccctcacgttattgcagatgtgcgggtgcttgaaccaattga

SEQ ID NO: 97159 - DNA, 80 bp, synthetic construct
  source 1..80: mol_type = other DNA
ggtcccattagaggatgttaggaatgtgcttttccataataatgattctactcctactatgaggttgatctgcatgcttt

SEQ ID NO: 97160 - DNA, 80 bp, synthetic construct
  source 1..80: mol_type = other DNA
acacccctcttcgcgctagtggtagctcctctggcacagatccatttgttatagctggtcgggttctcacctgtcccagt

SEQ ID NO: 97161 - DNA, 80 bp, synthetic construct
  source 1..80: mol_type = other DNA
cctgactttaactttttatttcttgtgccccccaatgttgaacagaaaactaaaccattcagtgtacctgaccttcctct

SEQ ID NO: 97162 - DNA, 80 bp, synthetic construct
  source 1..80: mol_type = other DNA
caatgttctctcgaattctagagtcccctccttgataagatccatgatggtctctcaagaccatggacagatggtgcaat

SEQ ID NO: 97163 - DNA, 80 bp, synthetic construct
  source 1..80: mol_type = other DNA
gggacggtttatcacgcaactaatggtgaagggcttaatttaactgaaattgatggcaccccctaccacgcatttgaaag

SEQ ID NO: 97164 - DNA, 80 bp, synthetic construct
  source 1..80: mol_type = other DNA
ccctgccccaattggcttccccgatttaggtgattgtgattggcatattaatgcatctcctgccactgcctttacaaatg

SEQ ID NO: 97165 - DNA, 80 bp, synthetic construct
  source 1..80: mol_type = other DNA
gtagcattatacaaagacttgatgtggttcaggattccacttttgctccccatttaggcactatccattatgccaatgct

SEQ ID NO: 97166 - DNA, 80 bp, synthetic construct
  source 1..80: mol_type = other DNA
aattatgatgcaaatgttagcctgatttgttcacttgaatggctttctcctccaagtaatggtgtcccaaaggcaaaccc

SEQ ID NO: 97167 - DNA, 80 bp, synthetic construct
  source 1..80: mol_type = other DNA
ttggtgaagcaattgttttcttcatgtctgattttccaatagccaatggttcagatggcctaagtgtcccttgcacttta

SEQ ID NO: 97168 - DNA, 80 bp, synthetic construct
  source 1..80: mol_type = other DNA
attctagtggcagtggcccccaaacactacccatcaatggggtcttcaccttcatctcttgggtttcccgtttttatcaa

SEQ ID NO: 97169 - DNA, 80 bp, synthetic construct
  source 1..80: mol_type = other DNA
acgaccggtccggttcgtaggctcgggatcaggagatcataatggcccaagcaataattggagcaatagctgcgacggct

SEQ ID NO: 97170 - DNA, 80 bp, synthetic construct
  source 1..80: mol_type = other DNA
aaacatgacaaggagatgttaggactgcaggttggtgcctctactgcccttttacaaaatagcctcaacacacgctacaa

SEQ ID NO: 97171 - DNA, 80 bp, synthetic construct
  source 1..80: mol_type = other DNA
catgctcactaatgccggcctctcatcttcggatgcagctcgcatggtggttggcgcgcccgctacgcgcgttatagatt

SEQ ID NO: 97172 - DNA, 80 bp, synthetic construct
  source 1..80: mol_type = other DNA
gccatggccctacgcttccatcacaaacaattgttacgagttctgctgcagggtaatggcacttgatgacacgtggttag

SEQ ID NO: 97173 - DNA, 80 bp, synthetic construct
  source 1..80: mol_type = other DNA
aaacccctcaacatactcaacatcctgtccaactgtgattggacctttatgggagtggttgaaatggtcatactattact

SEQ ID NO: 97174 - DNA, 80 bp, synthetic construct
  source 1..80: mol_type = other DNA
tgaactctttggtgtattttggaacccacctgatgtgtctaatttcatagcgtccctcctccctgactttcatctccagg

SEQ ID NO: 97175 - DNA, 80 bp, synthetic construct
  source 1..80: mol_type = other DNA
ggcccgaagatttagcacgagacctagtcccagtgatccttggcggcataggactagctattgggttcaccagggacaag

SEQ ID NO: 97176 - DNA, 80 bp, synthetic construct
  source 1..80: mol_type = other DNA
tttattgctctgctcctgaagtggagcaagtgaggagagtcagccctggtgatacatcagcactgaaagactgctttaaa

SEQ ID NO: 97177 - DNA, 80 bp, synthetic construct
  source 1..80: mol_type = other DNA
cacgacaatggagggcttgaagaacgcactgaagggatacaaaattagtgcatgcacaataaaatggcaagccaaagtgt

SEQ ID NO: 97178 - DNA, 80 bp, synthetic construct
  source 1..80: mol_type = other DNA
ctaggacccaagaggaggttcagtatggtatggggtggtctgataagcccgttgaccaaaatgtcaagtcttgggaagag

SEQ ID NO: 97179 - DNA, 80 bp, synthetic construct
  source 1..80: mol_type = other DNA
actcattagaatcagatggcagtaatgtcaatattaaagaagagaggaacatcttgacccaacagcagcagtcagtatgt

SEQ ID NO: 97180 - DNA, 80 bp, synthetic construct
  source 1..80: mol_type = other DNA
gctgcctccgtcgcgcttactcgtctccgggctgcgcgtgcggtggcttatgcttcatgtatccaatcagccataacttc

SEQ ID NO: 97181 - DNA, 80 bp, synthetic construct
  source 1..80: mol_type = other DNA
agaaggcaagaataaaggaaagaacaagaaaggacgtggccggaggaacaactacaacgccttctcccgtaggggactca

SEQ ID NO: 97182 - DNA, 80 bp, synthetic construct
  source 1..80: mol_type = other DNA
ccggatggggcttctgggtcagttccacagtcttcataaccacaacgcacgttataccaactagtgcgaaagaattcttt

SEQ ID NO: 97183 - DNA, 80 bp, synthetic construct
  source 1..80: mol_type = other DNA
gccccgagggtacggtgtgttcggtactaataaagagagactctggtgaactgttgccactggccgtgagaatgggcgca

SEQ ID NO: 97184 - DNA, 80 bp, synthetic construct
  source 1..80: mol_type = other DNA
gaaggggagactacacttgaaggtggcgataagggtcactatgctgggcatgaaataattaagcatggctgtggaccagc

SEQ ID NO: 97185 - DNA, 80 bp, synthetic construct
  source 1..80: mol_type = other DNA
cctccaacatatgaacgggtcaagggtgatgacacacctggcgaacaagtcaggtggtccgcacgtgatggggtcaatat

SEQ ID NO: 97186 - DNA, 80 bp, synthetic construct
  source 1..80: mol_type = other DNA
gttgtggggagcagacttgggcacggtggtccgtgctgcacgggctttcgggcctttctgtgatgccataaagccccaca

SEQ ID NO: 97187 - DNA, 80 bp, synthetic construct
  source 1..80: mol_type = other DNA
caattaaattacctatcaaagttgggatgaattcaattgaggatgggccattgatttatgctgaacattcaaagtataaa

SEQ ID NO: 97188 - DNA, 80 bp, synthetic construct
  source 1..80: mol_type = other DNA
acggcttgggactcaactcaaaataggcaaatcatgactgagtcgttttcaatcatgtgccgacttacagcatcacccga

SEQ ID NO: 97189 - DNA, 80 bp, synthetic construct
  source 1..80: mol_type = other DNA
attagctacggtggtggctcaagacctacttgcaccttcagaaatggatgttggcgactatgtcataagagtcaaggagg

SEQ ID NO: 97190 - DNA, 80 bp, synthetic construct
  source 1..80: mol_type = other DNA
tggggtagaacgcctcacgacagtgagtggacctgaatggaacctctgccccttaccccccattgatttgaggaacatgg

SEQ ID NO: 97191 - DNA, 80 bp, synthetic construct
  source 1..80: mol_type = other DNA
gagatagtatcaactgacatagaatttgatccagtaaaactaacacaagttctcagagagtatggacttaagcccacccg

SEQ ID NO: 97192 - DNA, 80 bp, synthetic construct
  source 1..80: mol_type = other DNA
ccctgacaagagcgagggcccaataatcgtaaggaagagtgtggatggtttggtcttcttacgtcgcaccatttcccgtg

SEQ ID NO: 97193 - DNA, 80 bp, synthetic construct
  source 1..80: mol_type = other DNA
acttcttcctctcttaccatagcccaggctacattgttcccccatgtgattgctgatgtgaggactcttgagccaataga

SEQ ID NO: 97194 - DNA, 80 bp, synthetic construct
  source 1..80: mol_type = other DNA
aatgccacttgaggatgtgcgtaacgtcctctatcacaccaatgataaccaaccaacaatgcgattggtgtgtatgctgt

SEQ ID NO: 97195 - DNA, 80 bp, synthetic construct
  source 1..80: mol_type = other DNA
acacgccactccgcactggtggaggatctggcagttctgattctttcgtagttgctggtagggtgctcacggcccctagc

SEQ ID NO: 97196 - DNA, 80 bp, synthetic construct
  source 1..80: mol_type = other DNA
agcgactttagcttcttatttctcgtaccacccactatagaacagaaaactcgggccttcactgtgcctaacattccctt

SEQ ID NO: 97197 - DNA, 80 bp, synthetic construct
  source 1..80: mol_type = other DNA
gcaagccttgtccaattctaggtttccctcccccatccaagggatgattctatcccctgacacatcccaagtagttcaat

SEQ ID NO: 97198 - DNA, 80 bp, synthetic construct
  source 1..80: mol_type = other DNA
tccagaatgggcgctgcctcatagacggccaactcctaggtaccacacctgctacatcaggacagctattcaaagtaaga

SEQ ID NO: 97199 - DNA, 80 bp, synthetic construct
  source 1..80: mol_type = other DNA
ggaaagataaaccaaggaggccgtacactcaatctcacagaagtggatggtaaaccattcatggcatttgactcccctgc

SEQ ID NO: 97200 - DNA, 80 bp, synthetic construct
  source 1..80: mol_type = other DNA
acctgtggggttccctgactttggaaaatgtgattggcatatgaggatcagtaaaactccaaatagtacaagttcaggtg

SEQ ID NO: 97201 - DNA, 80 bp, synthetic construct
  source 1..80: mol_type = other DNA
accctatgcatagtgtcagcgtgcaaactaacgtacagggttttgtgcctcatttgggaagtatacaatttgatgaagca

SEQ ID NO: 97202 - DNA, 80 bp, synthetic construct
  source 1..80: mol_type = other DNA
ttcaaccactccacaggtgattacattggtactattgaatggatttcccagccatctacacccattggaacggacatcaa

SEQ ID NO: 97203 - DNA, 80 bp, synthetic construct
  source 1..80: mol_type = other DNA
gtgaggctcttgtgtactttatttctgctttcccaggtcccaatagccgttcagctccaaatgatgtgccctgtcttctt

SEQ ID NO: 97204 - DNA, 80 bp, synthetic construct
  source 1..80: mol_type = other DNA
ccccaagagtacataacccactttgttagcgagcaggccccaactatgggtgacgcagctttgctgcattacgtcgatcc

SEQ ID NO: 97205 - DNA, 80 bp, synthetic construct
  source 1..80: mol_type = other DNA
tgacactaataggaaccttggggaattcaaactataccctggaggttatgtcacctgtgtgccaaatggggttggtgctg

SEQ ID NO: 97206 - DNA, 80 bp, synthetic construct
  source 1..80: mol_type = other DNA
ggccacaacagctccctcttaatggtgtctttctttttgtctcttgggtatctcgcttttatcaactcaagcctgtggga

SEQ ID NO: 97207 - DNA, 80 bp, synthetic construct
  source 1..80: mol_type = other DNA
acatgctttcctaccaagttcaggcaagtaatgcactcctagctaagaacctcaacacccgctattctatgcttgttgca

SEQ ID NO: 97208 - DNA, 80 bp, synthetic construct
  source 1..80: mol_type = other DNA
ggaggcctttccagtgctgatgcttcaagggctgttgctggggctccagtgacacaattaattgattggaacggtactcg

SEQ ID NO: 97209 - DNA, 80 bp, synthetic construct
  source 1..80: mol_type = other DNA
ggtagctgcccccagatctaatgcaacaaccctgaggtctggtggttttatggcagtccctatgcctgttcagtctaaat

SEQ ID NO: 97210 - DNA, 80 bp, synthetic construct
  source 1..80: mol_type = other DNA
ccaaggcaccgcaatcttctgggttctctaaccccgcttatgacatgtcaacagtttcttctaggacttcttcttgggta

SEQ ID NO: 97211 - DNA, 80 bp, synthetic construct
  source 1..80: mol_type = other DNA
caatcacaaaattccttacgaagtgtgtcaccattccataggcaagcccttcagaccgtgtgggtcaccccacctgggtc

SEQ ID NO: 97212 - DNA, 80 bp, synthetic construct
  source 1..80: mol_type = other DNA
tacctcttcttcttctgtttcttccacaccttatggtgtttttaatacagacagaatgccgctattcgcaaatctgcggc

SEQ ID NO: 97213 - DNA, 80 bp, synthetic construct
  source 1..80: mol_type = other DNA
gttgattacatcgggcaggttccatcaccccacccaatcgtggtcacagcagacccctgaattccagcaagatagcaaat

SEQ ID NO: 97214 - DNA, 80 bp, synthetic construct
  source 1..80: mol_type = other DNA
tagagttggtcagagacgctatactagctgcggtgaatggccttgtctcgcaaccttttaaaaacttcttgggtaaactc

SEQ ID NO: 97215 - DNA, 80 bp, synthetic construct
  source 1..80: mol_type = other DNA
cccactagaggacgttaggaatgtgcttttccacaataatgattctactccaactatgaggttgatttgcatgctttaca

SEQ ID NO: 97216 - DNA, 80 bp, synthetic construct
  source 1..80: mol_type = other DNA
gacttcaactttttgttccttgtgccccccaatgttgaacagaaaaccaaaccattcagtgtgcctaatctacctctcaa

SEQ ID NO: 97217 - DNA, 80 bp, synthetic construct
  source 1..80: mol_type = other DNA
tgttctctcaaattctagagtcccctccttggtaaggtccatgatggtctcccaagaccatggacagatggtacagttcc

SEQ ID NO: 97218 - DNA, 80 bp, synthetic construct
  source 1..80: mol_type = other DNA
aaaatggtagggtcacattagacggacagctccaaggcaccacccccacttcagctagtcagctctgtaagattcgaggg

SEQ ID NO: 97219 - DNA, 80 bp, synthetic construct
  source 1..80: mol_type = other DNA
acggtttatcatgcgactggtggtcaagggcttaatttaactgagattgatggcaccccctaccacgcatttgagagccc

SEQ ID NO: 97220 - DNA, 80 bp, synthetic construct
  source 1..80: mol_type = other DNA
tgccccaattggcttccccgatttaggagagtgtgattggcacattaatgcatctcctgccaatgcctttacagatggta

SEQ ID NO: 97221 - DNA, 80 bp, synthetic construct
  source 1..80: mol_type = other DNA
gcattatacatagaattgatgtggcccaggattccacttttgccccccatttaggcactatccattacaccaatgctagt

SEQ ID NO: 97222 - DNA, 80 bp, synthetic construct
  source 1..80: mol_type = other DNA
tatgatgcaaatgttagcctgatttgttcacttgaatggctttctcctccaagtggtggtgctccaaaggtaaacccatg

SEQ ID NO: 97223 - DNA, 80 bp, synthetic construct
  source 1..80: mol_type = other DNA
aaacacgacaaggaaatgttaggattgcaggttggtgcttccactgcccttttacaaaatagcctcaatacccgctataa

SEQ ID NO: 97224 - DNA, 80 bp, synthetic construct
  source 1..80: mol_type = other DNA
ttgcctctattcgcgaatatgaggaaataattttgtaatatgaaatgtgggcatcatattcaattggatttggttaatta

SEQ ID NO: 97225 - DNA, 80 bp, synthetic construct
  source 1..80: mol_type = other DNA
aaccatggccctacgcttccatcacaaacaattgttatgagttttgctgcagagtgatggcacttgacgacacgtggctt

SEQ ID NO: 97226 - DNA, 80 bp, synthetic construct
  source 1..80: mol_type = other DNA
taatactggggggcatcggcctggctattggtttcactagagacaagatcacgaaggttatgaagagcgccgttgatggc

SEQ ID NO: 97227 - DNA, 80 bp, synthetic construct
  source 1..80: mol_type = other DNA
aaactggctaaaacatacatgaatatcctggacaatgaagaggaaagggcaagaaaactttcagtgcgaagtgctgaccc

SEQ ID NO: 97228 - DNA, 80 bp, synthetic construct
  source 1..80: mol_type = other DNA
acatgttgtgacaacagtcaataatctcatttcgcgcatatctatggcgcgatcagctcttgccaaggcccaagctgaga

SEQ ID NO: 97229 - DNA, 80 bp, synthetic construct
  source 1..80: mol_type = other DNA
tggtgtattgcaccgcccccgaaattgaacagaccaggagaacccaccctggggacaccaatgctatcaagaatttgttc

SEQ ID NO: 97230 - DNA, 80 bp, synthetic construct
  source 1..80: mol_type = other DNA
gggtactatgaaatcaaccacactcagtaggttactcatccaggcagttgctttgacaatggagagacaagatgaattcc

SEQ ID NO: 97231 - DNA, 80 bp, synthetic construct
  source 1..80: mol_type = other DNA
agatgcagggggcagtgtataactttgatgaggaccgggtcacggctttcactagcctagcccgggccaacggactagga

SEQ ID NO: 97232 - DNA, 80 bp, synthetic construct
  source 1..80: mol_type = other DNA
agatgcaggtggcagtgtataactttgatgaggaccgggtcacggctttcactagcctagcccgggccaacggactagga

SEQ ID NO: 97233 - DNA, 80 bp, synthetic construct
  source 1..80: mol_type = other DNA
cttttgagtatggctgcactcggcaagaagttgcggagtgtcaacaatatggagggactccgcaacgccctcaaagggta

SEQ ID NO: 97234 - DNA, 80 bp, synthetic construct
  source 1..80: mol_type = other DNA
ccctccaaggacagtatcagaagtcaaacaagttttgggttgggatgaccctgccagtaaggattatggggcccgagcgt

SEQ ID NO: 97235 - DNA, 80 bp, synthetic construct
  source 1..80: mol_type = other DNA
caagatcactccgtgtgacattgtgtggaacaacagaacttacaccattaaggcagatggatcaagtgtgagcgtcacag

SEQ ID NO: 97236 - DNA, 80 bp, synthetic construct
  source 1..80: mol_type = other DNA
aaaagcaggcagctgccactctccagcaacaagctaccagctcggttactctggcactttctaggctacgcgccgcgcgg

SEQ ID NO: 97237 - DNA, 80 bp, synthetic construct
  source 1..80: mol_type = other DNA
gcgttggcgtatgcatcatgtttccagagcgcagtgaccaccatcttgcaaatggctgggtctgcagtggtgatcagcag

SEQ ID NO: 97238 - DNA, 80 bp, synthetic construct
  source 1..80: mol_type = other DNA
ggcagtcaaacgcatgtttgggacccacaccaaccagccagccctagagggcaaacccagagaacataactgcagggtcc

SEQ ID NO: 97239 - DNA, 80 bp, synthetic construct
  source 1..80: mol_type = other DNA
accgagctgaaagagaaggacgtggccctattggtcatgatggcatcatagaacggtacggcctgtgtgaaactgaccaa

SEQ ID NO: 97240 - DNA, 80 bp, synthetic construct
  source 1..80: mol_type = other DNA
gaagaagaagagaagatcgagatggaagtgccaactgcagacaaagagggtaagaataaaggcaaaaacaagaaggggcg

SEQ ID NO: 97241 - DNA, 80 bp, synthetic construct
  source 1..80: mol_type = other DNA
aggtaggaaaaataactacaacgccttttctagacgaggcctgagtgatgaggagtatgaagaatacaagaaggtcagag

SEQ ID NO: 97242 - DNA, 80 bp, synthetic construct
  source 1..80: mol_type = other DNA
tttctataaatccaagagtggcatgcgaaaacaacgccaagaggagcgtcggcagcttgggttagtcacaggcaccgaga

SEQ ID NO: 97243 - DNA, 80 bp, synthetic construct
  source 1..80: mol_type = other DNA
tagtggtatggtccttgaggagggttgcccggagggcacggtgtgcaccataatggtgaagagagattcaggtgagctgt

SEQ ID NO: 97244 - DNA, 80 bp, synthetic construct
  source 1..80: mol_type = other DNA
tagtgtgcgcaatacagtcaggtgaaggtgaagcaacccttgaagggggtggacaaaacaaagggcattatgcaggccac

SEQ ID NO: 97245 - DNA, 80 bp, synthetic construct
  source 1..80: mol_type = other DNA
ccaatcttaaggtatggcaatgggccctctctctctacaaaaaccaaattctggaaatcaaccccccaaccgctcccgcc

SEQ ID NO: 97246 - DNA, 80 bp, synthetic construct
  source 1..80: mol_type = other DNA
tcgacagtaccaagcacttttgagaggtgtggtgcacctgagcgagtcgacggctgccaccccgtcaagtggagcgagtc

SEQ ID NO: 97247 - DNA, 80 bp, synthetic construct
  source 1..80: mol_type = other DNA
gtgccttggagcttcaatgacgcctgtatgtctcttgacaagaccaccagctcaggttatccgcaccataaacgcaagaa

SEQ ID NO: 97248 - DNA, 80 bp, synthetic construct
  source 1..80: mol_type = other DNA
tgatgattggaatggtaatgcgtttgtgcgtgaacttggggaacaggcggctcatgccaataacatgtatgaattgggta

SEQ ID NO: 97249 - DNA, 80 bp, synthetic construct
  source 1..80: mol_type = other DNA
agtcagtcaagccggtttacacagcggcactcaaagatgaattagtgaaacctgaaaaagtgtatacaagaattaaaaag

SEQ ID NO: 97250 - DNA, 80 bp, synthetic construct
  source 1..80: mol_type = other DNA
agactgctttggggtgcggatcttggcacagtcatccgggccgctcgagctttcggcccattctgtgaggcgataaaacc

SEQ ID NO: 97251 - DNA, 80 bp, synthetic construct
  source 1..80: mol_type = other DNA
aagctcacagccaatccatcactggctgctgttgtggcacaggacctactgtctccatcagagatggatgtgggggatta

SEQ ID NO: 97252 - DNA, 80 bp, synthetic construct
  source 1..80: mol_type = other DNA
cacaggagtggatttgggagtagattctctgaccactgttacaggtccggtatggaatatgtgcccccttccaccaattg

SEQ ID NO: 97253 - DNA, 80 bp, synthetic construct
  source 1..80: mol_type = other DNA
tgtcaactgatgttgagtttgacccaataaagctcacccaggtgctcagagagtatggtttgaagcccacccgacctgat

SEQ ID NO: 97254 - DNA, 80 bp, synthetic construct
  source 1..80: mol_type = other DNA
aaatcagaagggcccatcatagttaaacaacagatagatgggctggttttcctcaggcgcactatatcaaaagacgctgc

SEQ ID NO: 97255 - DNA, 80 bp, synthetic construct
  source 1..80: mol_type = other DNA
tggctaccaggggcgtttagatcgcaactccattgaaaggcaactgtggtggactcggggaccaaaccatgacgacccct

SEQ ID NO: 97256 - DNA, 80 bp, synthetic construct
  source 1..80: mol_type = other DNA
ttataccccatcaacagaggaagattcagttgatatccctgcttggtgaagctgcactccatggagagaaattttacagg

SEQ ID NO: 97257 - DNA, 80 bp, synthetic construct
  source 1..80: mol_type = other DNA
aggagggagggcttgagctctacataccaggttggcaggccatgtttcgctggatgcgatttcatgacttgagcatgtgg

SEQ ID NO: 97258 - DNA, 80 bp, synthetic construct
  source 1..80: mol_type = other DNA
cagctgaacctctaccccttgaaccggtggtgggcgccgcaactgcggctgccactgctgggcaggttaatttaatagac

SEQ ID NO: 97259 - DNA, 80 bp, synthetic construct
  source 1..80: mol_type = other DNA
tcttatttgatttgcgcctggggccacaccttaatcctttcctcctacatttatcccagatgtataatggttgggttgtg

SEQ ID NO: 97260 - DNA, 80 bp, synthetic construct
  source 1..80: mol_type = other DNA
tcttatttgatttgcgcctggggccacaccttaatcctttcctcctacatttatcccagatgtataatggttgggttggg

SEQ ID NO: 97261 - DNA, 80 bp, synthetic construct
  source 1..80: mol_type = other DNA
attcacgtaacaatggtccagcaagtgaaccacgtattggagatatgatagaattctttgaagggcacatattccactat

SEQ ID NO: 97262 - DNA, 80 bp, synthetic construct
  source 1..80: mol_type = other DNA
tgaatcccagaacatatcaattggacaggctactatgttcccccatgtcatagctgatgtaagagtcctggagcccatag

SEQ ID NO: 97263 - DNA, 80 bp, synthetic construct
  source 1..80: mol_type = other DNA
agatcccacttgatgatgtgcgcaacgttctgtaccacacaaatgagaaccgcccaaccatgcgattgctctgcatgttg

SEQ ID NO: 97264 - DNA, 80 bp, synthetic construct
  source 1..80: mol_type = other DNA
tacacgcctctccgcgccggaggggcttcatcaggcacagacccttttgtcattgctggccgtgtgttgacttgccctgc

SEQ ID NO: 97265 - DNA, 80 bp, synthetic construct
  source 1..80: mol_type = other DNA
ccctgactttaattttctgtttcttgtgccccccagtgtagaacagaaaaccaggcaactgactatacccaatataccct

SEQ ID NO: 97266 - DNA, 80 bp, synthetic construct
  source 1..80: mol_type = other DNA
tttcaaaatggccgttgcacacttgaaggacaactcttaggtacaactcctgtttcagccaaccaagttgcccgcatacg

SEQ ID NO: 97267 - DNA, 80 bp, synthetic construct
  source 1..80: mol_type = other DNA
tggtaaagtcttctctactaactccggaacggggcttaatttaactgaaacagatggaaccccctaccatgcatttgaga

SEQ ID NO: 97268 - DNA, 80 bp, synthetic construct
  source 1..80: mol_type = other DNA
gcccggcccccctcggttttcctgacataggtgattgtgattggcatgtgtatgcttttaaggtgaatcaaaatacgggg

SEQ ID NO: 97269 - DNA, 80 bp, synthetic construct
  source 1..80: mol_type = other DNA
gatcccatgtacagattggatataacacaaggaaactcatttgcgccgcatcttggctccattgagttcacttctgatca

SEQ ID NO: 97270 - DNA, 80 bp, synthetic construct
  source 1..80: mol_type = other DNA
gaacccatcaggagatcaattaggcacacttacttggatctcccctctcaataattcctccagggttgacccctggaaaa

SEQ ID NO: 97271 - DNA, 80 bp, synthetic construct
  source 1..80: mol_type = other DNA
tcccatcatatggttcaacattgactgagtccactaacctggcaccgcccatctttccaccaggctttggtgaggccata

SEQ ID NO: 97272 - DNA, 80 bp, synthetic construct
  source 1..80: mol_type = other DNA
gtctacttcatgtcagatttccctattgtgtcaggtaacactgcccaaatcccctgcaccctgccccaagagttcatctc

SEQ ID NO: 97273 - DNA, 80 bp, synthetic construct
  source 1..80: mol_type = other DNA
atcctttgtggaacaacaggcacccatccgaggtgaggctgctctactgcattatgtggacccagacacccatcgcaatt

SEQ ID NO: 97274 - DNA, 80 bp, synthetic construct
  source 1..80: mol_type = other DNA
tgggagaattcaaactgtatcctgatgggttcatcacttgtgtgccaaacacgggtggcggtccccaaaacctcccttca

SEQ ID NO: 97275 - DNA, 80 bp, synthetic construct
  source 1..80: mol_type = other DNA
aatggtgtctttatcttttcttcttgggtctctagatattaccaattgaagcctgtgggaacagccggtccggctaggcg

SEQ ID NO: 97276 - DNA, 80 bp, synthetic construct
  source 1..80: mol_type = other DNA
ggcagctttttccatagctcgtataactatacaccctatggcagcatggtggcgtgtctgttacgagccaacagatcagc

SEQ ID NO: 97277 - DNA, 80 bp, synthetic construct
  source 1..80: mol_type = other DNA
ttccaacaagaccttactctgcaggagaattcttttaagcatgatgaaagaatgttgggtttacaaattgaggggtctaa

SEQ ID NO: 97278 - DNA, 80 bp, synthetic construct
  source 1..80: mol_type = other DNA
cgctttgctacaaaagaacctttccactcgctataattttttagttggtgcaggtctttcctcagctgatgccgcaaggt

SEQ ID NO: 97279 - DNA, 80 bp, synthetic construct
  source 1..80: mol_type = other DNA
ctattgctggggccccagtgacaaaaatcgtggactggaatggggtgagaattgctgcccctacatccactgccaccact

SEQ ID NO: 97280 - DNA, 80 bp, synthetic construct
  source 1..80: mol_type = other DNA
ctccgttctggcaacttcatgagcataccagttacacctaaaagggagccccaaaaattgccagcacgttctgtgggcct

SEQ ID NO: 97281 - DNA, 80 bp, synthetic construct
  source 1..80: mol_type = other DNA
ctctaatcctaattatgattcatccactatgatttctaggacaacacaatgggtggaatcgcaaaattcaatcaggaatt

SEQ ID NO: 97282 - DNA, 80 bp, synthetic construct
  source 1..80: mol_type = other DNA
tgtcaccttttcatagctctgctttgaggactacttgggtaacccctcctggttctacttctacttcaaccttttctact

SEQ ID NO: 97283 - DNA, 80 bp, synthetic construct
  source 1..80: mol_type = other DNA
gtttcttcggcgccacgatactttaataccgagcgccttcctttgttcgcaaacaataggaaatagtttttgtaatataa

SEQ ID NO: 97284 - DNA, 80 bp, synthetic construct
  source 1..80: mol_type = other DNA
tgtgggcatcatattcatatttggtttattaattggattaacttgatcaattggatattttatatttggtttattaattg

SEQ ID NO: 97285 - DNA, 80 bp, synthetic construct
  source 1..80: mol_type = other DNA
gattaacttgatcaattggatattttatatttggtttattaattggattaatttgattaattggatttgaattggatgtt

SEQ ID NO: 97286 - DNA, 80 bp, synthetic construct
  source 1..80: mol_type = other DNA
atcggcaataaatgggctggtctcccagcccttcaaaaacatcctagcaaaaattaaaccactgaatctgatgtctcttt

SEQ ID NO: 97287 - DNA, 80 bp, synthetic construct
  source 1..80: mol_type = other DNA
cctttatgggggttgtggagatggtagtattgatggctgaattgtttgacatcttctggaccccacctgacatttccaac

SEQ ID NO: 97288 - DNA, 80 bp, synthetic construct
  source 1..80: mol_type = other DNA
tttatagcttctcttttgccagatttccacctacaagggccagaggatctggcaagggacttggtcccgttgatacttgg

SEQ ID NO: 97289 - DNA, 80 bp, synthetic construct
  source 1..80: mol_type = other DNA
gggtattggcctggccattggtttcaccagggataaagtcacaaaggtaatgaagagtgctgttgatggtttgcggtctg

SEQ ID NO: 97290 - DNA, 80 bp, synthetic construct
  source 1..80: mol_type = other DNA
tatcaagaagtatttctttggaggagatcagactgagaagaccctcaagggcatagaaaacgctgtgatagacatggaag

SEQ ID NO: 97291 - DNA, 80 bp, synthetic construct
  source 1..80: mol_type = other DNA
tcctgtcaagcaccaatgtgactcaactggtgcgtgacaagaaactggctaagacatatatgaatatattagacaatgag

SEQ ID NO: 97292 - DNA, 80 bp, synthetic construct
  source 1..80: mol_type = other DNA
gaagaaaaagcacgaaaactttcagtgcgcagtgctgacccacatgtagtaacaacagttaacaacctcatatcacgtat

SEQ ID NO: 97293 - DNA, 80 bp, synthetic construct
  source 1..80: mol_type = other DNA
atccatggcaagatctgctcttgctaaggcccaggcagaaatgaccagccgtgctcgcccagtagttatcatgatgtgtg

SEQ ID NO: 97294 - DNA, 80 bp, synthetic construct
  source 1..80: mol_type = other DNA
atggcgctcgaactaatacgtaggtctcaaacaccatcacctacacgcccagaactgccaccaaaagggcaacgtgaccg

SEQ ID NO: 97295 - DNA, 80 bp, synthetic construct
  source 1..80: mol_type = other DNA
gaccaccaggcataggaaaaaccaaggcagccgagcaccttgcaaaccggctagccggtgaaataaggccaggaggtaaa

SEQ ID NO: 97296 - DNA, 80 bp, synthetic construct
  source 1..80: mol_type = other DNA
gtcggattggtgcccagggaatccattgatcactgggatgggtaccatggggaagaagtcctattgtgggatgactatgg

SEQ ID NO: 97297 - DNA, 80 bp, synthetic construct
  source 1..80: mol_type = other DNA
tggtgtattgcactgcccctgaaatagagcaaacaagaaggacccaccccggggacacaaatgctattaaggatctattc

SEQ ID NO: 97298 - DNA, 80 bp, synthetic construct
  source 1..80: mol_type = other DNA
aagaaagacttctcacacctaaaaatggaaatagccccccaagggggttttgataaccaaggcaacacaccttttggaaa

SEQ ID NO: 97299 - DNA, 80 bp, synthetic construct
  source 1..80: mol_type = other DNA
ccaccgcgttgaccatggagaggcaagatgagttccagatgcagggggctgtctacaactttgatgaggaccggatagca

SEQ ID NO: 97300 - DNA, 80 bp, synthetic construct
  source 1..80: mol_type = other DNA
gctttcaccaatctagctcgtgccaatggactgggcatcttgagcatggcagccctcgggaagaaactgcggagtgtcaa

SEQ ID NO: 97301 - DNA, 80 bp, synthetic construct
  source 1..80: mol_type = other DNA
cagcatggagggacttcgtaatgcccttaaagggtacaaaatttctgaatgtgacattatatggaacaacaggacctata

SEQ ID NO: 97302 - DNA, 80 bp, synthetic construct
  source 1..80: mol_type = other DNA
ccctccaaggacagtgtccgaagtcaaacggacgttaggttgggatgcccccgcccataaagattatggagctcgtccat

SEQ ID NO: 97303 - DNA, 80 bp, synthetic construct
  source 1..80: mol_type = other DNA
ccatcaaaggtgatgggtcaagtgtgagtatatcagaaaaacaagtgaccaccaccctacaacaacaagccattagttcg

SEQ ID NO: 97304 - DNA, 80 bp, synthetic construct
  source 1..80: mol_type = other DNA
gtaaccctggcactcaccagattgcgcgctgcccgtgcattagcatatgcatcctgcttccagagtgcggtggtcactat

SEQ ID NO: 97305 - DNA, 80 bp, synthetic construct
  source 1..80: mol_type = other DNA
cttgcagatggcaggttctgcagtggtcattagcagggcagttaaacgcatgtttgggacccacaccaaccaaccaacac

SEQ ID NO: 97306 - DNA, 80 bp, synthetic construct
  source 1..80: mol_type = other DNA
tagagggaaaacccaaagaacacaattgcagagtccaccgagctgaaagagaaggtcatggccccataggtcacgatggt

SEQ ID NO: 97307 - DNA, 80 bp, synthetic construct
  source 1..80: mol_type = other DNA
gttattgaacgctacggcctgtgtgaaagtgaccaggatgaagaaaaggatttagtagaactgccaacggccagccaaga

SEQ ID NO: 97308 - DNA, 80 bp, synthetic construct
  source 1..80: mol_type = other DNA
gggcaagaacaaaggaaagaacaagaaggggcgcggtcgtaaaaataactacaacgccttctcgagacgtggcttgagtg

SEQ ID NO: 97309 - DNA, 80 bp, synthetic construct
  source 1..80: mol_type = other DNA
atgaggagtatgaggagtataagaaagttagagaggagaggggtggtaattacagtatccaggagtacctagaagaccgg

SEQ ID NO: 97310 - DNA, 80 bp, synthetic construct
  source 1..80: mol_type = other DNA
tatgaagaggagttggcagaggtgcaggccggtggtgatggcgggatgggtgaaacagaagctgagatccgctaccgggt

SEQ ID NO: 97311 - DNA, 80 bp, synthetic construct
  source 1..80: mol_type = other DNA
attctacaagtccaaaagtgggatgcgaaagcaacgccaggaggagcgccgacaacttgggctggtttcaggcactgaaa

SEQ ID NO: 97312 - DNA, 80 bp, synthetic construct
  source 1..80: mol_type = other DNA
ggtgtgaactaacagcagaagagaagaaagagatcctggacaacaacgagcgtttatttgatgctggtggggtcacacct

SEQ ID NO: 97313 - DNA, 80 bp, synthetic construct
  source 1..80: mol_type = other DNA
gatggggcttctgggttagcccaactgtgttcatcacaaccacacatgttataccgccagaagcaaaggaaatatttgga

SEQ ID NO: 97314 - DNA, 80 bp, synthetic construct
  source 1..80: mol_type = other DNA
gagaaagtctctgacatagcaatacatagggtcggagagttcacccagtttaggttctcaaagaaaatgaggccagatct

SEQ ID NO: 97315 - DNA, 80 bp, synthetic construct
  source 1..80: mol_type = other DNA
cagtggcatggtactggaagaggggtgtcctgagggcacggtttgcaccatcatgataaaaagggactcaggtgagctgt

SEQ ID NO: 97316 - DNA, 80 bp, synthetic construct
  source 1..80: mol_type = other DNA
tgcccttggcagttcgcatgggtgctgtggcatccatgaaaatacagggtaagctcatgcatggtcagtctggtatgttg

SEQ ID NO: 97317 - DNA, 80 bp, synthetic construct
  source 1..80: mol_type = other DNA
ttgtttgtgccatacagtcaggtgagggggaagccaccctcgaaggaggtggacagaataaagggcactacgcaggccat

SEQ ID NO: 97318 - DNA, 80 bp, synthetic construct
  source 1..80: mol_type = other DNA
ccaattctcagatatggtaatggcccttccctctccaccaagactaagttctggaagtcaaccccacaacccctcccgcc

SEQ ID NO: 97319 - DNA, 80 bp, synthetic construct
  source 1..80: mol_type = other DNA
gaaggtgggccatcacttcaacaggtcttacgagatcagcttaaaccctttgctgaacctcgaggtagattaccagaacc

SEQ ID NO: 97320 - DNA, 80 bp, synthetic construct
  source 1..80: mol_type = other DNA
tccgatgtgcctagcactttcgagaggagtgagacaactgagtgtttggatgacagccatgcagttagatggagtgaaac

SEQ ID NO: 97321 - DNA, 80 bp, synthetic construct
  source 1..80: mol_type = other DNA
aagcctacttgaagcagctgtggaaacagtcacgaatgtgctagaacagactatggacactccaataccgtggagctaca

SEQ ID NO: 97322 - DNA, 80 bp, synthetic construct
  source 1..80: mol_type = other DNA
attggaatggcagcacatttgtgcgggagcttggtgatcaggcagcacacgccaataacatgtatgaaatggggaagtcc

SEQ ID NO: 97323 - DNA, 80 bp, synthetic construct
  source 1..80: mol_type = other DNA
atgaagccagtgtatactgctgcactgaaggatgagctagtgaagcctgagaaagtgtatacaaaggtcaaaaagaggct

SEQ ID NO: 97324 - DNA, 80 bp, synthetic construct
  source 1..80: mol_type = other DNA
tactttggggtgcagatctcggcacggtcattcgcgccgctcgagcgtttggccctttttgtgaggccataaaaccacat

SEQ ID NO: 97325 - DNA, 80 bp, synthetic construct
  source 1..80: mol_type = other DNA
ccctttcagaggtaacaggtctggcacctgatgttctgcagtctcaatcatatttctctttttatggagatgatgaaatt

SEQ ID NO: 97326 - DNA, 80 bp, synthetic construct
  source 1..80: mol_type = other DNA
tgcaggggtggaccttggcgtggattccttgactacggtcactggtccagtttggaacatgtgccctcttcccccgattg

SEQ ID NO: 97327 - DNA, 80 bp, synthetic construct
  source 1..80: mol_type = other DNA
gtgtcaactgatgtggaatttgaccctgtgaaactcacccaggtacttaaagagtatggtttaaaacccacccgccctga

SEQ ID NO: 97328 - DNA, 80 bp, synthetic construct
  source 1..80: mol_type = other DNA
taaatcagaaggacccatcatagtgaagcaatgtgtggatggtctagttttcctaaggcgcaccatatcgagggatgctg

SEQ ID NO: 97329 - DNA, 80 bp, synthetic construct
  source 1..80: mol_type = other DNA
cagggtaccaagggcgactggatcgcaactccatagaaagacaactttggtggacccggggcccaaatcatgatgaccca

SEQ ID NO: 97330 - DNA, 80 bp, synthetic construct
  source 1..80: mol_type = other DNA
ggtgcctcatcagcaaagaaagatacaactgatttccttgcttggggaggctgcacttcacggagaaaaattctacagaa

SEQ ID NO: 97331 - DNA, 80 bp, synthetic construct
  source 1..80: mol_type = other DNA
agattgccaacagagtgattcaggaagtcaaagaggggggccttgagctttatgtgcccggctggcagcccatgttccgc

SEQ ID NO: 97332 - DNA, 80 bp, synthetic construct
  source 1..80: mol_type = other DNA
gaataataacacctcagaaccaatcaacatggaaccagtcgcgggcgcggtcactgccgcagctacggctggccaggtga

SEQ ID NO: 97333 - DNA, 80 bp, synthetic construct
  source 1..80: mol_type = other DNA
agtcgcgcaataatggtcctgcagccgaaccacacataggggacatgatcgagttctatgagggacacattttccattat

SEQ ID NO: 97334 - DNA, 80 bp, synthetic construct
  source 1..80: mol_type = other DNA
ggtggtgttggctggcaatgccttttctgcgggaaagatcatagtgtgctgtataccacctggattctctgcaccaaaca

SEQ ID NO: 97335 - DNA, 80 bp, synthetic construct
  source 1..80: mol_type = other DNA
tatccatagcccaggcaactatgttccctcatgttattgctgatgttcgggtcttggagcccattgatattccccttgat

SEQ ID NO: 97336 - DNA, 80 bp, synthetic construct
  source 1..80: mol_type = other DNA
gatgtcaggaatgttctgtttcataataatgataatggtaatcagactatgagattgctgtgcatgttgtatacaccact

SEQ ID NO: 97337 - DNA, 80 bp, synthetic construct
  source 1..80: mol_type = other DNA
ccgtagtggaggcacatccagtggaactgacccgtttgtgattgctggtagggttctaacctgccctactccagatttta

SEQ ID NO: 97338 - DNA, 80 bp, synthetic construct
  source 1..80: mol_type = other DNA
atttcttgttcttggttcccccaaccgttgagcaaaagaccaaacagtttagtgtgcctaaccttcccctcaatgttatg

SEQ ID NO: 97339 - DNA, 80 bp, synthetic construct
  source 1..80: mol_type = other DNA
tctaattctagagttccatcactcctaaatgctatggtggtgtcaccagatcaggcccaagtggtgcaatttcaaaatgg

SEQ ID NO: 97340 - DNA, 80 bp, synthetic construct
  source 1..80: mol_type = other DNA
caggtgtacccttgatgggcaaatgttgggcaccaccactgtatcagctagctgtgttgcaagattcagagggaaaactt

SEQ ID NO: 97341 - DNA, 80 bp, synthetic construct
  source 1..80: mol_type = other DNA
ttcaagcctctgacaacaggttaggtatcaatctggctgaaattagtggagaaccataccatgcatttgaaagccctgcc

SEQ ID NO: 97342 - DNA, 80 bp, synthetic construct
  source 1..80: mol_type = other DNA
cccctaggtttccctgactttggggatggagattggcacgtcactgcaacaaaagtaaccccctcacagcttgaagctaa

SEQ ID NO: 97343 - DNA, 80 bp, synthetic construct
  source 1..80: mol_type = other DNA
tgaccctgtggtcatggggaatgtccaaccatataacccacagtttgcccctcacctgggcaccctagtcgtagaaaacc

SEQ ID NO: 97344 - DNA, 80 bp, synthetic construct
  source 1..80: mol_type = other DNA
ctaccccagacaatgtgaccaccgggactgacttattgttcaacataacctggctttccaatcgtgctaataatcggttt

SEQ ID NO: 97345 - DNA, 80 bp, synthetic construct
  source 1..80: mol_type = other DNA
aacccttgggttatcccaaattatggttcaactctcactgaggcagcacagctggcaccttcaatatttccccctggctt

SEQ ID NO: 97346 - DNA, 80 bp, synthetic construct
  source 1..80: mol_type = other DNA
tggtgaaactatagtatatttcaattccactttcccagctgtgggggccaccacccatgcagctataccctgtctgcttc

SEQ ID NO: 97347 - DNA, 80 bp, synthetic construct
  source 1..80: mol_type = other DNA
cacaagaatttgttgctcattttgttaatgaacaggcccccatacgtggagaggctgctttgctccactacattgaccct

SEQ ID NO: 97348 - DNA, 80 bp, synthetic construct
  source 1..80: mol_type = other DNA
gatactcaccgtaatcttggtgagttcaaaatttatccagagggctttgtaacgtgtgttcctaatgtgggtggcacggg

SEQ ID NO: 97349 - DNA, 80 bp, synthetic construct
  source 1..80: mol_type = other DNA
tagtattgacgccggcacacaggctgcactacaataccagcgttatcaacaggatcttgacctccaatctaaatctttcc

SEQ ID NO: 97350 - DNA, 80 bp, synthetic construct
  source 1..80: mol_type = other DNA
tccatgatgagcgtatgcttggtttgcaagtagatgctagtaatgctttgttgcaaaagaatctatctactaggtataat

SEQ ID NO: 97351 - DNA, 80 bp, synthetic construct
  source 1..80: mol_type = other DNA
ctattgctttcttctggtatgtcttcctctgatgctgctcgcatgattgctggcgcaccaccaacaaaaatagttgattg

SEQ ID NO: 97352 - DNA, 80 bp, synthetic construct
  source 1..80: mol_type = other DNA
gaatggagtccgggtggcagccccaaggtcctcagctacaactttacgttctgggggctttatgccggttgcttcactgt

SEQ ID NO: 97353 - DNA, 80 bp, synthetic construct
  source 1..80: mol_type = other DNA
ccacgaccccaaaaatgaagaatgatggtgcaggtatagtaaaccccaattatgcacctagccacagttcaatggtctct

SEQ ID NO: 97354 - DNA, 80 bp, synthetic construct
  source 1..80: mol_type = other DNA
cgaaccacacaatgggtcgaaagccagaactccctgagaagtctagagccattccaccacggagccttgcagactgcatg

SEQ ID NO: 97355 - DNA, 80 bp, synthetic construct
  source 1..80: mol_type = other DNA
ggtgaccccaccaggttcttcttccacctccacagtgtctagtgtgtcaactgcaccaagatattttaatactgaaagac

SEQ ID NO: 97356 - DNA, 80 bp, synthetic construct
  source 1..80: mol_type = other DNA
agaacgtcagcgtctcagctatgaccaactaaaagagcttgagaatgaaccatggccttacgcctccataaccaacaact

SEQ ID NO: 97357 - DNA, 80 bp, synthetic construct
  source 1..80: mol_type = other DNA
ttcctctattcgcaaatttgaggaaatgatttttgtaatatgaattagtgggcatcatattcaatttggttcaatttgga

SEQ ID NO: 97358 - DNA, 80 bp, synthetic construct
  source 1..80: mol_type = other DNA
ggaaatgatttttgtaatatgaattagtgggcatcatattcaatttggttcaatttggatttcaattggtttgtgatgtt

SEQ ID NO: 97359 - DNA, 80 bp, synthetic construct
  source 1..80: mol_type = other DNA
gctctcgccttatggcgaagctgaaggagcgaataagctcccaacgtggtgagaacaccacaaaaatcaagagcacagaa

SEQ ID NO: 97360 - DNA, 80 bp, synthetic construct
  source 1..80: mol_type = other DNA
gctatgagttttgctgccgcgtgatgtcactcgatgacacatggttgcagcggaaactggtaacatcaggcaagttcaat

SEQ ID NO: 97361 - DNA, 80 bp, synthetic construct
  source 1..80: mol_type = other DNA
caccctacccaggagtggtccaaggacacaccagacttccatcaagattcaaaactggaaatggtcagggatgctatcct

SEQ ID NO: 97362 - DNA, 80 bp, synthetic construct
  source 1..80: mol_type = other DNA
gcgattcctgttggcaggcttgctactggtggtgttgctcctgttgctgaaatgcgtgttgtcttttggtttggattcat

SEQ ID NO: 97363 - DNA, 80 bp, synthetic construct
  source 1..80: mol_type = other DNA
tggtagctctctgtggatccggggagcgattgggatcatggtcccggcacgatggcgcagaaatcacctacctcaagtag

SEQ ID NO: 97364 - DNA, 80 bp, synthetic construct
  source 1..80: mol_type = other DNA
agggatcttatttcttcggagacaatgcagaggagtatgacagttaaagagattgctctgtgctcccactgcttgtacgt

SEQ ID NO: 97365 - DNA, 80 bp, synthetic construct
  source 1..80: mol_type = other DNA
ggggattgaacctattgataatatcatgggaatgataggtgtgttacccgatatgactccaagcacagaaatgtcattaa

SEQ ID NO: 97366 - DNA, 80 bp, synthetic construct
  source 1..80: mol_type = other DNA
tcgagcgggaaaccaaatagtgaagcgtattctggaagaagaatatgatgaagcacttaaactaaccattgcttctgtac

SEQ ID NO: 97367 - DNA, 80 bp, synthetic construct
  source 1..80: mol_type = other DNA
atcgagccatcaactcgtgcggggatgcagatagtagagcgtattctgaaggaagagtacgatgaaacacttaaaataac

SEQ ID NO: 97368 - DNA, 80 bp, synthetic construct
  source 1..80: mol_type = other DNA
agcaaaagcaggggataattaaataaaccaagatgaaagcaaaattgtttgtcttgttttgtgcattcactgcactggaa

SEQ ID NO: 97369 - DNA, 80 bp, synthetic construct
  source 1..80: mol_type = other DNA
gtacacaaaacgcaatcaatggaatcaccaacaaagtaaactccataattgaaaaaatgaacattcaatttacttcagtg

SEQ ID NO: 97370 - DNA, 80 bp, synthetic construct
  source 1..80: mol_type = other DNA
gaatgcatagaaagcataaagaatggcacatataattatcccagatattcagaagaatccaaattgaatagagagaaaat

SEQ ID NO: 97371 - DNA, 80 bp, synthetic construct
  source 1..80: mol_type = other DNA
agtttaaaatgaatccaaatcagaagataataatcattagttctatatgtatggcaaatggaattgttaacttgatacta

SEQ ID NO: 97372 - DNA, 80 bp, synthetic construct
  source 1..80: mol_type = other DNA
tattgtctaatggggcaaatggggtaaaagggttttcgtttaaatacggcaatggtatttggatagggagaactaaaagc

SEQ ID NO: 97373 - DNA, 80 bp, synthetic construct
  source 1..80: mol_type = other DNA
atcgaatcagctacccgtgcagggaagcaaatagttaagcgtattctggaagaagaatacgatgaagtacttaaaataac

SEQ ID NO: 97374 - DNA, 80 bp, synthetic construct
  source 1..80: mol_type = other DNA
atcgaatcagctactcgtgcggggaaacaaatagtcaatcgtatcctggaagaagaattcgatgaagcacttaaaataac

SEQ ID NO: 97375 - DNA, 80 bp, synthetic construct
  source 1..80: mol_type = other DNA
ctttacaacaactgtaacattacatttaaaacaatatgaatgcggattccctgcaaacagtcaagtaataacatgtgagc

SEQ ID NO: 97376 - DNA, 80 bp, synthetic construct
  source 1..80: mol_type = other DNA
caatagtaatagaaaggaacaaaacggagatagtatacttggtcaacaccaccatagagaaagaaatatgccccaaaaca

SEQ ID NO: 97377 - DNA, 80 bp, synthetic construct
  source 1..80: mol_type = other DNA
agcaaaagcaggggataattaagtaaaccagaatggaagcaaaattgtttgtactattctgtgcattcactgcattgaga

SEQ ID NO: 97378 - DNA, 80 bp, synthetic construct
  source 1..80: mol_type = other DNA
gttggagatacacctagaaacaacgacaggttaagtagtagctattgccgtaaccctaataatgagaaaggaaaccatgg

SEQ ID NO: 97379 - DNA, 80 bp, synthetic construct
  source 1..80: mol_type = other DNA
agcaaaagcaggggataattaaataagccaagatggaagcaaaattgtttgtattattctgtgcattcaccgcgctgaaa

SEQ ID NO: 97380 - DNA, 80 bp, synthetic construct
  source 1..80: mol_type = other DNA
gtacacaaatcgcaattgatgggatcagcaccaaagtgaattcaataattgaaaaaatgaacactcaatttacttcagtg

SEQ ID NO: 97381 - DNA, 80 bp, synthetic construct
  source 1..80: mol_type = other DNA
ggcaaagaattcaataatctagagaaaagaattgagaatctgaataaaaaggtcgatgatggatttctggatgtatggac

SEQ ID NO: 97382 - DNA, 80 bp, synthetic construct
  source 1..80: mol_type = other DNA
atcgaatcagctactcgtgcggggaaacaaatagttcatcgtattctggaagaggaatgtgatgaagaacttaacataac

SEQ ID NO: 97383 - DNA, 80 bp, synthetic construct
  source 1..80: mol_type = other DNA
cattgcttctgtgcccgtttcacgctatttgactgacatgactcttgaagagatgtcaagggactggttcatgctcatgc

SEQ ID NO: 97384 - DNA, 80 bp, synthetic construct
  source 1..80: mol_type = other DNA
ctaaacacagcataggggcgactgcatcatgctcctataaggggaaaagcagcttttatagaaatttgttatggctgaca

SEQ ID NO: 97385 - DNA, 80 bp, synthetic construct
  source 1..80: mol_type = other DNA
gagaaaaatggctcttatccaaacttgagtatgtcatatgtgaacgacaaagaaaaagaagtccttgtactatggggtgt

SEQ ID NO: 97386 - DNA, 80 bp, synthetic construct
  source 1..80: mol_type = other DNA
cacagaggcgacatgcaaatccaaacgaaaagatcattcgagttaagaaagctatgggaacaaacccattcaaaggcagg

SEQ ID NO: 97387 - DNA, 80 bp, synthetic construct
  source 1..80: mol_type = other DNA
agaagcccaaattccttccagacctatttgactataaggagaatcgattcattgaaatcggtgtaacaaggagggaagtc

SEQ ID NO: 97388 - DNA, 80 bp, synthetic construct
  source 1..80: mol_type = other DNA
acaaagagttcaacaatctagagaaaaggattgagaatttgaataaaaaagtcgatgatgggtttttggacgtatggact

SEQ ID NO: 97389 - DNA, 80 bp, synthetic construct
  source 1..80: mol_type = other DNA
agtttcaaaatgaatccaaatcaaaagataataatcattagttcaatctgtatgacaaatggaatcgccaacttaatatt

SEQ ID NO: 97390 - DNA, 80 bp, synthetic construct
  source 1..80: mol_type = other DNA
acggagtggaattgaaatcgatgggagtctatcagattctggcgatatactcaactgtcgccagttcactagtgctttta

SEQ ID NO: 97391 - DNA, 80 bp, synthetic construct
  source 1..80: mol_type = other DNA
ggaataaccaacaaggtgaattcagtaattgagaaaatgaacacccaattcattgcaatgggcaaggaatttaacaatct

SEQ ID NO: 97392 - DNA, 80 bp, synthetic construct
  source 1..80: mol_type = other DNA
atgaacacccaattcgaggctgttgggaaagaattcagtaatttggagaaaaggctggaaaatctgaacaaaaagatgga

SEQ ID NO: 97393 - DNA, 80 bp, synthetic construct
  source 1..80: mol_type = other DNA
attgcgaaaccaaatgccaaactcccttaggagcaataaacacaacattgccctttcacaatatccacccgttaaccatt

SEQ ID NO: 97394 - DNA, 80 bp, synthetic construct
  source 1..80: mol_type = other DNA
ggtgagtgccccaaatatgtaaaatcggagaggttagtcttggcaacaggattaagaaatgtccctcagattgaatcaag

SEQ ID NO: 97395 - DNA, 80 bp, synthetic construct
  source 1..80: mol_type = other DNA
agatccatttaaagattatgtattttgggaggttaatttaaaagaaaagttttctgcagatttagatcagtttccactgg

SEQ ID NO: 97396 - DNA, 80 bp, synthetic construct
  source 1..80: mol_type = other DNA
cgacgctaccactgcctttggcagccaaaactctgtcaatgacagtgtcaacaccgccccttctaataaagaagaggttg

SEQ ID NO: 97397 - DNA, 80 bp, synthetic construct
  source 1..80: mol_type = other DNA
cagcaaccctgtgcataggcaacccactttaccccgttctgaacccccaaaaattaaggttaatagtgattctgctagtg

SEQ ID NO: 97398 - DNA, 80 bp, synthetic construct
  source 1..80: mol_type = other DNA
tgtatagttttgcatctactgctccttcacaatcaactcattcaacggctttgactgcggggtctagctcatctaggaca

SEQ ID NO: 97399 - DNA, 80 bp, synthetic construct
  source 1..80: mol_type = other DNA
acatcctcttctgcagtagcttccaccctatctaggactagtgactgggtgagaggacaaaatgagaggcttagcccgtt

SEQ ID NO: 97400 - DNA, 80 bp, synthetic construct
  source 1..80: mol_type = other DNA
gaaaaactgctctttcaatatcaccggaagcgtaggaaataaaaggcagaaacaatatgcaatttttaataaacttgatg

SEQ ID NO: 97401 - DNA, 80 bp, synthetic construct
  source 1..80: mol_type = other DNA
agactgctctttcaatgtcagcacaggaaagggagagaaggcaaagaaagaacgtgcactcttttatggaattgatgtaa

SEQ ID NO: 97402 - DNA, 80 bp, synthetic construct
  source 1..80: mol_type = other DNA
ctctttcaatgtcaccactggcataggaaatagggtgaaaaaagaatatgcaacgttctataaatctgatatagtaccaa

SEQ ID NO: 97403 - DNA, 80 bp, synthetic construct
  source 1..80: mol_type = other DNA
agttgtgaaacaccagacgaaatgaaaaattgctctttcgatgtcaccactggcataagagataaggtgaagcaagaaca

SEQ ID NO: 97404 - DNA, 80 bp, synthetic construct
  source 1..80: mol_type = other DNA
taatgtcacagaggacatgaaaaactgctcgttcgatatccccacaatagtaagagataaaatgaagagggaatatgcac

SEQ ID NO: 97405 - DNA, 80 bp, synthetic construct
  source 1..80: mol_type = other DNA
atattagcactagggatagcagcattaatagtagcagcaatattagtaatagttgtgtggactatagtatatatagaata

SEQ ID NO: 97406 - DNA, 80 bp, synthetic construct
  source 1..80: mol_type = other DNA
gaactgctctttcaacatcaccacaagcctaaaagataaagtgagagactatgcactttttaatagctttgatatagaac

SEQ ID NO: 97407 - DNA, 80 bp, synthetic construct
  source 1..80: mol_type = other DNA
aacgataacgacccctgcgataataactgaagcagaaaggcctttcaagtctccactaccgctgtgccccttcagaggat

SEQ ID NO: 97408 - DNA, 80 bp, synthetic construct
  source 1..80: mol_type = other DNA
ttttctaacatggctgtcacttttaagcgggccctcggggcgcggcctaaacagccgcccccgaaggagataccacccag

SEQ ID NO: 97409 - DNA, 80 bp, synthetic construct
  source 1..80: mol_type = other DNA
tgtgatgatatcgggaagaccagggatagggactgtctcttatacacatctgctggccaagaagatcgcggcctccctca

SEQ ID NO: 97410 - DNA, 80 bp, synthetic construct
  source 1..80: mol_type = other DNA
tgggacgactatggaatgagcaaccccatccatgatgccctcaggttgcaggagcttgctgacacttgccccctcacgct

SEQ ID NO: 97411 - DNA, 80 bp, synthetic construct
  source 1..80: mol_type = other DNA
ccttgccaaggtcgagctaacaccactctctttgttttggagacctgtatacaccccccagtatctcatctctccagaca

SEQ ID NO: 97412 - DNA, 80 bp, synthetic construct
  source 1..80: mol_type = other DNA
tgtggggttcagacctggcgaccatgatacggtgcgcccgagcttttggaggccttatggatgaactcaaggcgcactgt

SEQ ID NO: 97413 - DNA, 80 bp, synthetic construct
  source 1..80: mol_type = other DNA
cgctccaggtgaaatactatggagcgcgcccttgggccctgatctaaatccctacctatcccatctggccagaatgtaca

SEQ ID NO: 97414 - DNA, 80 bp, synthetic construct
  source 1..80: mol_type = other DNA
actcctggactggcgctttcaacacgcgcaggcagatattcctcactcacattcgtaagcgaggggagtcacgggcgtaa

SEQ ID NO: 97415 - DNA, 80 bp, synthetic construct
  source 1..80: mol_type = other DNA
gggaactgagcccattgacgatgtcatggggatgatcggaatattacctgacatgactcccagcacagaaacatcgctga

SEQ ID NO: 97416 - DNA, 80 bp, synthetic construct
  source 1..80: mol_type = other DNA
acaaaaagaagccagatgaacttggaagtgctttgtggtaggataaacgtggagaatgggctgtctcttggagagccagg

SEQ ID NO: 97417 - DNA, 80 bp, synthetic construct
  source 1..80: mol_type = other DNA
atagccaatgagatctacactaaggctagatccatggatgcagacattgagctacagaagagtgaggaagagcttgaggc

SEQ ID NO: 97418 - DNA, 80 bp, synthetic construct
  source 1..80: mol_type = other DNA
ttagtagtagtgaaagtgtgatagggaaagtagagatgaaaagctgctcttacgatgttaccacaatcataggaaataag

SEQ ID NO: 97419 - DNA, 80 bp, synthetic construct
  source 1..80: mol_type = other DNA
ataccggtaacagtagtagggtagagataaagggaggagacatgaaaaaatgctctttcaatgttacaaacataagaaat

SEQ ID NO: 97420 - DNA, 80 bp, synthetic construct
  source 1..80: mol_type = other DNA
gctctgtgttacgttaactgcagtgatgctaatagaactagtagtgatgctagtaataatgctaatggaactagtaacta

SEQ ID NO: 97421 - DNA, 80 bp, synthetic construct
  source 1..80: mol_type = other DNA
tgagcaagctaaagggaagaggccttggcattcaatcaggagcttcagtagacaatggctgtgagtcaaaatgtttctgg

SEQ ID NO: 97422 - DNA, 80 bp, synthetic construct
  source 1..80: mol_type = other DNA
atggagaaatacacagagatccacaatagaatgagagaatgtgtccctggggaggtgtctgcagtggagtgtttagatct

SEQ ID NO: 97423 - DNA, 80 bp, synthetic construct
  source 1..80: mol_type = other DNA
agaatgagtgctcaagaattatagagaagatcttgtcagatttagaaataaatgttggtgaaacaacacaaggtttggaa

SEQ ID NO: 97424 - DNA, 80 bp, synthetic construct
  source 1..80: mol_type = other DNA
cagtatccattgacggggttacttggtgctttagtaaaattatgagcttagacctcaatagattgttagcattaaacata

SEQ ID NO: 97425 - DNA, 80 bp, synthetic construct
  source 1..80: mol_type = other DNA
aggttacactattaaggatgtggttgatggactaatacctgttgaacaacaactcttttgccaagaagtagtagaacttt

SEQ ID NO: 97426 - DNA, 80 bp, synthetic construct
  source 1..80: mol_type = other DNA
tttgtctgcaagtgttacccttattgaggcaataaggttcctcaatcaatcacaacaaaatccctcagttttagaaatgt

SEQ ID NO: 97427 - DNA, 80 bp, synthetic construct
  source 1..80: mol_type = other DNA
gggacacgtgagaaattcctgaaatatcaagcaggtttggaatacatcgaacaattactacagcaagaggcctctcgtgg

SEQ ID NO: 97428 - DNA, 80 bp, synthetic construct
  source 1..80: mol_type = other DNA
ttgctgcagcagactcgtttgcccaaagtttcaagccttcacagagtgatatggagttgtttcaaactttagtgaattgt

SEQ ID NO: 97429 - DNA, 80 bp, synthetic construct
  source 1..80: mol_type = other DNA
aaatcatttaccattacaatacaagcaggcggtttccgagcaatggcacagctggatgaggagaatccacggtttttgtt

SEQ ID NO: 97430 - DNA, 80 bp, synthetic construct
  source 1..80: mol_type = other DNA
agcacatgcatatcacaacctcaaggatgtcagatatcaagctcttcaagcaattggtaatatttggtttaaaacacaac

SEQ ID NO: 97431 - DNA, 80 bp, synthetic construct
  source 1..80: mol_type = other DNA
gaattattctaatggccagatatatgtctaaacattatgaatttaataagatcccactttcattactgaatccatacgac

SEQ ID NO: 97432 - DNA, 80 bp, synthetic construct
  source 1..80: mol_type = other DNA
cttacagaatttgaaagcatagtcaaaggctggggagaatgtgtaaatgataggtttattgaatatgaccaggaagcaga

SEQ ID NO: 97433 - DNA, 80 bp, synthetic construct
  source 1..80: mol_type = other DNA
attcattattttcttttaggcatgcagatattcttctcaggagactgtttccaaaggactcagctgcttcattttattaa

SEQ ID NO: 97434 - DNA, 80 bp, synthetic construct
  source 1..80: mol_type = other DNA
agtatcgaccgcaacaattgtgtaatcctaacattgataatctgttgaattactgtaaaaattggcttactagggagcat

SEQ ID NO: 97435 - DNA, 80 bp, synthetic construct
  source 1..80: mol_type = other DNA
tacgtgcaacaggaagcatgacaaaagcgataagaccacagtgcaccattaatgaagcaaaatggaacaacactttaaaa

SEQ ID NO: 97436 - DNA, 80 bp, synthetic construct
  source 1..80: mol_type = other DNA
tagtgtgggaaagatggaactaaaagaatgctctttctatgttcccacaaacataggaaataaggtgcagaaagaatctg

SEQ ID NO: 97437 - DNA, 80 bp, synthetic construct
  source 1..80: mol_type = other DNA
tcagagactagtactagttcagcgagtaataagactagaatcataaatgaaagtgggacagcgggagaggacatgagaaa

SEQ ID NO: 97438 - DNA, 80 bp, synthetic construct
  source 1..80: mol_type = other DNA
atgaaagacaagcacattgtaacattagtggcgaagaatgggacaacgctttaagaaaggtagctataaaattaggagaa

SEQ ID NO: 97439 - DNA, 80 bp, synthetic construct
  source 1..80: mol_type = other DNA
gaaattagtgcaatagtagggctgatagtagcgctaattgcagcaatagtagtttggaccatagtatttatagagtgtat

SEQ ID NO: 97440 - DNA, 80 bp, synthetic construct
  source 1..80: mol_type = other DNA
tgaagtaaaaaattgcacttttaatatgaccacagacacaatagatgagaagcagaaggtctttgcgctttttcataagc

SEQ ID NO: 97441 - DNA, 80 bp, synthetic construct
  source 1..80: mol_type = other DNA
aatacaacagatgaaataaaaaactgctcttttaatgtggacacagaaataagaggtaggcagcagaaggtccggacgct

SEQ ID NO: 97442 - DNA, 80 bp, synthetic construct
  source 1..80: mol_type = other DNA
ggaaatataacagatgaaataatgaattgtacttttagaatggacacagaagtaaaagataaaaagaagaaagtcaatgc

SEQ ID NO: 97443 - DNA, 80 bp, synthetic construct
  source 1..80: mol_type = other DNA
aaaaattagcctgtctctcagtagtgcaatccttcatttgatgtggcttcaagtagtgtgtgcccgtctgtgttaggact

SEQ ID NO: 97444 - DNA, 80 bp, synthetic construct
  source 1..80: mol_type = other DNA
gagtccaggagaaataaaaaactgtaccttcaatgtcactacaaacataagaaatagggtgaagacagaatatgcaattt

SEQ ID NO: 97445 - DNA, 80 bp, synthetic construct
  source 1..80: mol_type = other DNA
ttaataggcttgatttagtaccaatagatgatgagaaaggtaatacaagtgagaaaagtaatacaagttatatcttgata

SEQ ID NO: 97446 - DNA, 80 bp, synthetic construct
  source 1..80: mol_type = other DNA
gtaaaaaactgttcctttaatgtaatcacagaaataagagataggcggaagataggcttgatttagtagaaatagaagat

SEQ ID NO: 97447 - DNA, 80 bp, synthetic construct
  source 1..80: mol_type = other DNA
actgctagagattttactcagtctagagtggtctgtgttaggactctggtaactagagatccctcagaccactctagacc

SEQ ID NO: 97448 - DNA, 80 bp, synthetic construct
  source 1..80: mol_type = other DNA
agaaaaaatatagaatgaaacatatagtatatctgaagcacacatagtgcttcaagtagtgtgtgcccgtctgtgttagg

SEQ ID NO: 97449 - DNA, 80 bp, synthetic construct
  source 1..80: mol_type = other DNA
aagaagtaaaaaattgtacttttaatatgaccacagaactaaaagtttttataggcttgatatagtaaaaatagatgcaa

SEQ ID NO: 97450 - DNA, 80 bp, synthetic construct
  source 1..80: mol_type = other DNA
taagggccagaaaagaattaagtgcttcaactgtggaaaggaaggctgtgttaggactctggtaactagagatccctcag

SEQ ID NO: 97451 - DNA, 80 bp, synthetic construct
  source 1..80: mol_type = other DNA
actttaccattaaagtaggtttaaataaaaccattaacataggcaatcaaaaaaagagataagcagaagaaaatccatgc

SEQ ID NO: 97452 - DNA, 80 bp, synthetic construct
  source 1..80: mol_type = other DNA
cttcaagtagtgtgtgcccgtctgtgttaggactctggtaactagagatccctcagaccactgtggcgcccgaacaggga

SEQ ID NO: 97453 - DNA, 80 bp, synthetic construct
  source 1..80: mol_type = other DNA
tggccaaataaaaaatatgacagaggaagtaaaaaactgtacttttaatatgaccacagaaataaaagataaacagaaga

SEQ ID NO: 97454 - DNA, 80 bp, synthetic construct
  source 1..80: mol_type = other DNA
ataacagatgaagtaaaagactgttctttttatatgaccacaatactacaagacaagacgcagcaggtccgtgcaatttt

SEQ ID NO: 97455 - DNA, 80 bp, synthetic construct
  source 1..80: mol_type = other DNA
tacacaacagatgaagaaaaaaattgtacttttaatgtggccccaggactaagcgataataagcagaaggtccatgcact

SEQ ID NO: 97456 - DNA, 80 bp, synthetic construct
  source 1..80: mol_type = other DNA
tcaatattaactgggggaaaattagatgcatgggaaaagattaggcatctcctatggcaggaagatggccaatagatgca

SEQ ID NO: 97457 - DNA, 80 bp, synthetic construct
  source 1..80: mol_type = other DNA
gtgcacacagcaagaggcgagagcggcgactggcttaggcatctcctatggcaggaagatggaaaacacttcaagtagtg

SEQ ID NO: 97458 - DNA, 80 bp, synthetic construct
  source 1..80: mol_type = other DNA
tattaagaacccaggagtcggaatgcgtctgtattaatggaacttgtacaatagtcatgactgatggaagcgcttccgga

SEQ ID NO: 97459 - DNA, 80 bp, synthetic construct
  source 1..80: mol_type = other DNA
gtagtctccctgggggcaatcagtttctggatgtgctctaatgggtctctacagtgtagaatatgtatttaacattagga

SEQ ID NO: 97460 - DNA, 80 bp, synthetic construct
  source 1..80: mol_type = other DNA
tacagtttcttcatttgaaagatttgaaatcttcccaaagaacacctcatggccacagcataatgcagatggaggtacca

SEQ ID NO: 97461 - DNA, 80 bp, synthetic construct
  source 1..80: mol_type = other DNA
cccgaatgccgttgtccaaagagccctctaccaaaatactaatacatatgtttcagttggatcatcaaaatactaccaaa

SEQ ID NO: 97462 - DNA, 80 bp, synthetic construct
  source 1..80: mol_type = other DNA
gatttacaccagaagtagtagccagaccaaaagtcagagaacaagaaggcagaatgaactactattggacactgttaaat

SEQ ID NO: 97463 - DNA, 80 bp, synthetic construct
  source 1..80: mol_type = other DNA
ctgagtgacatctacatcatggcgtctcaaggcaccaaacgatcttatgaacaaatggaaactggtggagaacgccagaa

SEQ ID NO: 97464 - DNA, 80 bp, synthetic construct
  source 1..80: mol_type = other DNA
cataagaggaaactcccccgtatttaactacaataaagtaaccaaaaggttaacagtcctcgggaaggatgcaggtgcat

SEQ ID NO: 97465 - DNA, 80 bp, synthetic construct
  source 1..80: mol_type = other DNA
cttacgaaaataacacttgggtgaatcagacatatgttaacatcagcaacaacaattttgtttctggccagaaattagtt

SEQ ID NO: 97466 - DNA, 80 bp, synthetic construct
  source 1..80: mol_type = other DNA
ccggaggcaccacagttgcatgctccaactccggaaccaagagcttttatcggaacttgctgtggatagtaaaaaaagaa

SEQ ID NO: 97467 - DNA, 80 bp, synthetic construct
  source 1..80: mol_type = other DNA
aactcctaccctaagctcagcaagtcatacaaaaacgacaaggggaaagaagtgcttgtaatctggggagtgcaccaccc

SEQ ID NO: 97468 - DNA, 80 bp, synthetic construct
  source 1..80: mol_type = other DNA
cttcaacttacagtgatcaacaagccctctaccataacaaccacacatatgtttcagttgaaacatcaaaatattaccaa

SEQ ID NO: 97469 - DNA, 80 bp, synthetic construct
  source 1..80: mol_type = other DNA
aggttcacaccagagatagtggccagacctaaaatcagagaacaagcaggaagaataaattattattggacactgttaga

SEQ ID NO: 97470 - DNA, 80 bp, synthetic construct
  source 1..80: mol_type = other DNA
ttaataggtgcttttatgtagagctaataagaggaaggaaacaagaaactagagtatggtggacttcaaacagtattgtt

SEQ ID NO: 97471 - DNA, 80 bp, synthetic construct
  source 1..80: mol_type = other DNA
gagaagaacataacaaaaattgtgtatttaaccaataccaccacagaaaaagaggtagtccccagattagtgaaatacag

SEQ ID NO: 97472 - DNA, 80 bp, synthetic construct
  source 1..80: mol_type = other DNA
cacacaactcgcagttaataagatcagcaataaagtgaactcaataattgagaagatgaacattcaatttacttcagtgg

SEQ ID NO: 97473 - DNA, 80 bp, synthetic construct
  source 1..80: mol_type = other DNA
aattttattacttacgaaaacaacacttgggtaaatcagacatatgttaacatcagcaacaattttgttgctgaaaagac

SEQ ID NO: 97474 - DNA, 80 bp, synthetic construct
  source 1..80: mol_type = other DNA
accagtttcaatgaaattagcaggcaattcttctctttgccctgttagtgggtgggccatacacagtaaagataacagtg

SEQ ID NO: 97475 - DNA, 80 bp, synthetic construct
  source 1..80: mol_type = other DNA
gaagtgaatgccaggattgacccattcttaagggaaacaccacgtccccttagattacctgatggacctccttgttctca

SEQ ID NO: 97476 - DNA, 80 bp, synthetic construct
  source 1..80: mol_type = other DNA
cctacgaaaacaacacctgggtaaaccaaacctatgttaacatcagcaacaacaactttgtttctaagcagacatcagtt

SEQ ID NO: 97477 - DNA, 80 bp, synthetic construct
  source 1..80: mol_type = other DNA
tcagtgaaattaatgggcaattcttctctctgtcctgttagggggtgggctatacacagtaaagacaacagtgtaagaat

SEQ ID NO: 97478 - DNA, 80 bp, synthetic construct
  source 1..80: mol_type = other DNA
tcgtacagggaaacaaatagtagagcgcattctgaaagaagagcacgatgaagcacttaaaataactatcgcttcagtgc

SEQ ID NO: 97479 - DNA, 80 bp, synthetic construct
  source 1..80: mol_type = other DNA
cacacaaatagcaattgatgggataagcaacaaagtgaactcaataattgagaaaatgaatatccaatttacttcagtag

SEQ ID NO: 97480 - DNA, 80 bp, synthetic construct
  source 1..80: mol_type = other DNA
tgacctgttgactacaacaaactcgtggtcttatataatagagaactcaaatccaaaaaatggaacatgctaccctgggg

SEQ ID NO: 97481 - DNA, 80 bp, synthetic construct
  source 1..80: mol_type = other DNA
caggtaccacagttgcatgctccaaatctgggtccaacagtttttatcggaatttgctctggataacaaagaaagactcc

SEQ ID NO: 97482 - DNA, 80 bp, synthetic construct
  source 1..80: mol_type = other DNA
ggtttacgccagaaataatagccagacctgaaattaggaaacaaaaaggcagaatgacttattattggacactattagac

SEQ ID NO: 97483 - DNA, 80 bp, synthetic construct
  source 1..80: mol_type = other DNA
aatctttgttgaagaagggaagattattcacattagcccattgtcagggagcgcacagcacgtggaggaatgttcttgtt

SEQ ID NO: 97484 - DNA, 80 bp, synthetic construct
  source 1..80: mol_type = other DNA
cacacaagtagcaatcgatgggatcagcaataaagtgaactcaataattgagaaaatgaacattcaattcacttcagtgg

SEQ ID NO: 97485 - DNA, 80 bp, synthetic construct
  source 1..80: mol_type = other DNA
ccggctactcgtatagggaaacaaatagtgaagcgcattctggaagaagagcacgatgaagcacttaaaataactattgc

SEQ ID NO: 97486 - DNA, 80 bp, synthetic construct
  source 1..80: mol_type = other DNA
cccattcagttaatttactagagaccagccataacggaaaactctgcagcctaaataaaaaaacccccctacaactgggg

SEQ ID NO: 97487 - DNA, 80 bp, synthetic construct
  source 1..80: mol_type = other DNA
gccccaaattagtggaatacagggagtgggcaaaaccacagtgtaaaatcacaggatttgcacctttttccaaggacaat

SEQ ID NO: 97488 - DNA, 80 bp, synthetic construct
  source 1..80: mol_type = other DNA
tagtcttgttagtctccctgggggcaatcagcttctggatgtgttccaatgggtcattgcagtgcaaagtgtgcatttaa

SEQ ID NO: 97489 - DNA, 80 bp, synthetic construct
  source 1..80: mol_type = other DNA
tagaggctccaaatccgacaaatggtgcttgttaccccggtgaattcgctaactatgaggaattaagggagcagctgagt

SEQ ID NO: 97490 - DNA, 80 bp, synthetic construct
  source 1..80: mol_type = other DNA
ctccaaataacaacgaccaacaagccctctaccaaaataaccatacatatgtttcagttgaatcgtcaaaatactaccaa

SEQ ID NO: 97491 - DNA, 80 bp, synthetic construct
  source 1..80: mol_type = other DNA
aggttcacaccagaaataacagccagacctaaagtcagagaccaagcgggcagaataaattattactggacactgttgga

SEQ ID NO: 97492 - DNA, 80 bp, synthetic construct
  source 1..80: mol_type = other DNA
atttacgaaaacaacacttgggtgaatcagacatacgttaacatcagcaataacaattttgttgctgaacaagcattagt

SEQ ID NO: 97493 - DNA, 80 bp, synthetic construct
  source 1..80: mol_type = other DNA
tcgcgcaggaaaacgaatagtagagcgaattttggaagaagagcacgatgaagcacttaaaataactattgcttctgtgc

SEQ ID NO: 97494 - DNA, 80 bp, synthetic construct
  source 1..80: mol_type = other DNA
tgattctctgctcacggcaacttcgtggtcttacataatagaaacttcaaatccaaaaaatggagtatgctaccccggag

SEQ ID NO: 97495 - DNA, 80 bp, synthetic construct
  source 1..80: mol_type = other DNA
aatttgctaactatgaggaattgaaagagcaattgagtacaatttcttcatttgaaagatttgaaatctttccaaaagag

SEQ ID NO: 97496 - DNA, 80 bp, synthetic construct
  source 1..80: mol_type = other DNA
atgagaacaaaactgtttgtattattctgtgcagtcactgcactcaaagctgacaccatttgtgtaggctatcatgctaa

SEQ ID NO: 97497 - DNA, 80 bp, synthetic construct
  source 1..80: mol_type = other DNA
ccggtacaacagcttcatgctcccactatggagctccaagtttttataggaacttgctatggataataaaaaaggagggc

SEQ ID NO: 97498 - DNA, 80 bp, synthetic construct
  source 1..80: mol_type = other DNA
tatcccagatcagtgaaatacaggaattgggcaaagccacaatgcaaaattacagggtttgcacccttttccaaggacaa

SEQ ID NO: 97499 - DNA, 80 bp, synthetic construct
  source 1..80: mol_type = other DNA
atggaataagcaacaaagtgaactcaataattgaaaagatgaactttcaattcacttcagtgggcaaggagttcaataat

SEQ ID NO: 97500 - DNA, 80 bp, synthetic construct
  source 1..80: mol_type = other DNA
ttctgataactactataacattgcatttcaagcaacacgggtgcaattcctccgcattcaatcagacaacgccgtgtgaa

SEQ ID NO: 97501 - DNA, 80 bp, synthetic construct
  source 1..80: mol_type = other DNA
gggaattgaatccattgacaatgtaatgggaatgatcggaatagggataagagtcagcaaaacaggagtagacgaatatt

SEQ ID NO: 97502 - DNA, 80 bp, synthetic construct
  source 1..80: mol_type = other DNA
cacacaaattgcaattgatgggatcagcaacaaggtgaactctataattgaaaaaatgaacatacagtttacttcagtgg

SEQ ID NO: 97503 - DNA, 80 bp, synthetic construct
  source 1..80: mol_type = other DNA
cacccaaattgcaattgatgggatcagcaacaaagtgaactcaataattgaaaaaatgaatgttcaatttacttcagcgg

SEQ ID NO: 97504 - DNA, 80 bp, synthetic construct
  source 1..80: mol_type = other DNA
aaattcataccagaaataataacaaggcctaaaatcagagaacaagcaggcagaatgaactattactggacactgctaga

SEQ ID NO: 97505 - DNA, 80 bp, synthetic construct
  source 1..80: mol_type = other DNA
gattggtaccaagaataatagtagggaaatagatgaagaagaaatgaaaaacttgagaaactgctcttttaatgttacca

SEQ ID NO: 97506 - DNA, 80 bp, synthetic construct
  source 1..80: mol_type = other DNA
gggccgtccctaaggctccgaaacagcatggcagcatacaaaaaccgccgatcgtcgagatcgatggtgtggccatgcgt

SEQ ID NO: 97507 - DNA, 80 bp, synthetic construct
  source 1..80: mol_type = other DNA
tccaactacagggtgatgaactacaggtttataactttgacacaaacaaggtctctgcatttagaaaactagcagctgac

SEQ ID NO: 97508 - DNA, 80 bp, synthetic construct
  source 1..80: mol_type = other DNA
aagggggccaagtatagagtcgcctcggatggctgtggcagtgtctcagtttccaagatcaaggatgttgtgtcgcagac

SEQ ID NO: 97509 - DNA, 80 bp, synthetic construct
  source 1..80: mol_type = other DNA
aagcccgggccaggtattacatcagctgcttccaagacctcatatacaccctaatacaggttgctggagcctcatttgtg

SEQ ID NO: 97510 - DNA, 80 bp, synthetic construct
  source 1..80: mol_type = other DNA
gcactggctggggtttctgggtctcctccaacctcctcataacaacaacacacgtcctgccaaaaggattgaaggagctg

SEQ ID NO: 97511 - DNA, 80 bp, synthetic construct
  source 1..80: mol_type = other DNA
aggagcaaatgccaaaaacatggatttgggcacgaaccctggtgattgtggatgcccgtacatttttaagaggggcaatg

SEQ ID NO: 97512 - DNA, 80 bp, synthetic construct
  source 1..80: mol_type = other DNA
ggttctgatctgggtaccatggtcaggtgtgccagggcttttggtgggttgatggatagcatgaaagagagttgtgtggt

SEQ ID NO: 97513 - DNA, 80 bp, synthetic construct
  source 1..80: mol_type = other DNA
tccccccctctgtagagagtaagctgaaacagttcacccttccaaacctgcagccaaatgaaatgaccaattcaagattc

SEQ ID NO: 97514 - DNA, 80 bp, synthetic construct
  source 1..80: mol_type = other DNA
tcagaggagtcacctcaactgaagttgatgcaactgacagttccagagtggcagggtcgcatagaattatggtgcagctc

SEQ ID NO: 97515 - DNA, 80 bp, synthetic construct
  source 1..80: mol_type = other DNA
catgggaaatggcaatggccgcaggggtagaagaagggagttataatggctggagctttctttgcaggtcttgcttctga

SEQ ID NO: 97516 - DNA, 80 bp, synthetic construct
  source 1..80: mol_type = other DNA
gcaagaggagctgtcaacgcccctatgacacaaatcttggattggaatggcaccagatactgggccccgggtgcgatgaa

SEQ ID NO: 97517 - DNA, 80 bp, synthetic construct
  source 1..80: mol_type = other DNA
actaaacatttgcctttgtttgctcatgttaggaaaaggggacaatctcaagtttaatctaccactcatggtttgattga

SEQ ID NO: 97518 - DNA, 80 bp, synthetic construct
  source 1..80: mol_type = other DNA
acataaagttaatgttggctcctcagggtggttttgataagaacggcaacaccccacatggaaaaggtgtcatgaaaacc

SEQ ID NO: 97519 - DNA, 80 bp, synthetic construct
  source 1..80: mol_type = other DNA
tcaaaaagattccacctcccccgcccaacggggaggacgatttagtggtatcctacagtgccaaagaggtggtctccggc

SEQ ID NO: 97520 - DNA, 80 bp, synthetic construct
  source 1..80: mol_type = other DNA
tcaaaaagattccacctcccccgcccaacggggaggacgatttagtggtatcctacagtgccaaagagggggtctccggc

SEQ ID NO: 97521 - DNA, 80 bp, synthetic construct
  source 1..80: mol_type = other DNA
attgtggcgccccaatcctaggtccaggaaatgcccccaaactcagtactaaaaccaaattctggaggtcctcaacagca

SEQ ID NO: 97522 - DNA, 80 bp, synthetic construct
  source 1..80: mol_type = other DNA
gaggtaagccaccaaagcccagtgtactagaagcagccaaaaagacaatcattaatgtccttgagcaaacaatagaccca

SEQ ID NO: 97523 - DNA, 80 bp, synthetic construct
  source 1..80: mol_type = other DNA
aaaatatcaatcactgaaggactcccctctggggtgccttgcacctcacaatggaattctattgctcattggctcctcac

SEQ ID NO: 97524 - DNA, 80 bp, synthetic construct
  source 1..80: mol_type = other DNA
actgaagggcctctggtcatttctgaggacttagatggtctgaccttcttacggaggactgtgacccgtgacccagcagg

SEQ ID NO: 97525 - DNA, 80 bp, synthetic construct
  source 1..80: mol_type = other DNA
attcgcctggggaagtcctactaaacttggaattaggccctgaactaaatccatatttggcacacctttccagaatgtac

SEQ ID NO: 97526 - DNA, 80 bp, synthetic construct
  source 1..80: mol_type = other DNA
ccatcttgaccataggggagttaaccaattccagattccctgtgcctatagatgaactctacactagccccaatgagagt

SEQ ID NO: 97527 - DNA, 80 bp, synthetic construct
  source 1..80: mol_type = other DNA
agaaccatgtttggaatatgcaagtcaccaacattaacggaaccccttttgatccaacagaggatgttccagctcctcta

SEQ ID NO: 97528 - DNA, 80 bp, synthetic construct
  source 1..80: mol_type = other DNA
caccagcctctatgcctgtctctaggcccagttctactgcctctactgtttccacccgttctaccttgattagtggatcc

SEQ ID NO: 97529 - DNA, 80 bp, synthetic construct
  source 1..80: mol_type = other DNA
tctaatccttcttctctagctaggagttcttccagtatttcttcccaatctacttcctcatcctctcggactagtgattg

SEQ ID NO: 97530 - DNA, 80 bp, synthetic construct
  source 1..80: mol_type = other DNA
gcggggcgctgcgtacaacctacgtgacacctccatccagtagggcttctagcaatggcacagtctcaaccgtgccaaaa

SEQ ID NO: 97531 - DNA, 80 bp, synthetic construct
  source 1..80: mol_type = other DNA
cggagaggggagtcacaagtttagtgaaaagatggtcttttctttcattcctttgaaatctctatcttttaaaaaaaaaa

SEQ ID NO: 97532 - DNA, 80 bp, synthetic construct
  source 1..80: mol_type = other DNA
tttcaattgctccttcaatatcacctcaaaaatgcacacaaatttggccctttataatacactttatgaaaagcctgaag

SEQ ID NO: 97533 - DNA, 80 bp, synthetic construct
  source 1..80: mol_type = other DNA
aagagaccataaaatataactatatgtctagatattggaacacatcttgcatcacctcagcttgcccacagatttgcttt

SEQ ID NO: 97534 - DNA, 80 bp, synthetic construct
  source 1..80: mol_type = other DNA
gaaacatttcccgtaccttttcgcaccccttatggtaccccgattgtatttggtaatgaaaaggattacgatgagaaatg

SEQ ID NO: 97535 - DNA, 80 bp, synthetic construct
  source 1..80: mol_type = other DNA
cactggtacaagtgcctgcacaaatgactgcacacatgaatgtacgcctgtaatgacgcctctcctgctgactcatgtgc

SEQ ID NO: 97536 - DNA, 80 bp, synthetic construct
  source 1..80: mol_type = other DNA
tgctaactggcagccaagcagaagtagaaatagtacttagatctaaaaattttacgaacaatgtaaaactagaagagaac

SEQ ID NO: 97537 - DNA, 80 bp, synthetic construct
  source 1..80: mol_type = other DNA
aaggccagtcgttctgatgatctctggcaaaccagggataggaaagacccatctggccagagaattggcaaagaaaattg

SEQ ID NO: 97538 - DNA, 80 bp, synthetic construct
  source 1..80: mol_type = other DNA
caaaacgggacttccccggtcaaccggacatgtggaaggacgcctatcgctctgatttctcacatattaaattgcaactt

SEQ ID NO: 97539 - DNA, 80 bp, synthetic construct
  source 1..80: mol_type = other DNA
aaagattagatgagtacgagttacagggtccgcccctctcaaccttcaactttgaccgcaacaaaattgcagcgttcaga

SEQ ID NO: 97540 - DNA, 80 bp, synthetic construct
  source 1..80: mol_type = other DNA
ccccaccacccaatgatggggacgaaccaaccgtgatgtttagcactgtaggtggcgtgtctggtctacctgagctcaca

SEQ ID NO: 97541 - DNA, 80 bp, synthetic construct
  source 1..80: mol_type = other DNA
gcagatgaggcaaccatgaaagaggggtgccctaaacctagggaagaagaggagtttatcgtctcttcggatgacatcaa

SEQ ID NO: 97542 - DNA, 80 bp, synthetic construct
  source 1..80: mol_type = other DNA
acagttggccaaccacctgaagctaacacggcctttagtgtgcctcccctcagccaaagggagaatagggacgctaagga

SEQ ID NO: 97543 - DNA, 80 bp, synthetic construct
  source 1..80: mol_type = other DNA
gggtgtcacccagcctcttcataacatcaacacatgtcatacctcaaggcataactgaggcctttggtgtacccataagg

SEQ ID NO: 97544 - DNA, 80 bp, synthetic construct
  source 1..80: mol_type = other DNA
cacagctgcccttaaggatgaactggtcaaaaccgagaaagtgtatggaaaaataaagaagaggttgctttggggctctg

SEQ ID NO: 97545 - DNA, 80 bp, synthetic construct
  source 1..80: mol_type = other DNA
acctggccaccatggtgcggtgcgcgcgctcctttggcggtctgatggacgaactcaaggcccactgtgtgacacttccg

SEQ ID NO: 97546 - DNA, 80 bp, synthetic construct
  source 1..80: mol_type = other DNA
tgactttcctgagaaggaccgtcacccgtgaccctgcagggtggtttggcaaactggaccagagctccatacttaggcaa

SEQ ID NO: 97547 - DNA, 80 bp, synthetic construct
  source 1..80: mol_type = other DNA
aagtggagttaacgcccctctcactgtactggagacctgtttacacgcctcagtaccttatatctcccgactccttgagg

SEQ ID NO: 97548 - DNA, 80 bp, synthetic construct
  source 1..80: mol_type = other DNA
aaactccatggtgaattgtttccctacacagcctttgaaaacaactgttatgctttctgctgttgggttttggatcttaa

SEQ ID NO: 97549 - DNA, 80 bp, synthetic construct
  source 1..80: mol_type = other DNA
cgactcatggctaagcaggaggatgattagtaggactactggctttttcaggccctaccaggagtggaataggaagcccc

SEQ ID NO: 97550 - DNA, 80 bp, synthetic construct
  source 1..80: mol_type = other DNA
agtactaacctctcccaatcaacagtttccagagctacgtctaggactggtgagtgggttagagaccaaaatagaaattt

SEQ ID NO: 97551 - DNA, 80 bp, synthetic construct
  source 1..80: mol_type = other DNA
gcacacctccgcaagaggggggagtcacaagcttagtgaaaaggtgaaaatctaattgatcttaccttttaaaaaaaaaa

SEQ ID NO: 97552 - DNA, 80 bp, synthetic construct
  source 1..80: mol_type = other DNA
attggcaaactcaaacccctcaacatcctaaatatcctggcctcatgcgactggacctttgctagcatagtggagtcact

SEQ ID NO: 97553 - DNA, 80 bp, synthetic construct
  source 1..80: mol_type = other DNA
ctccgtgcagaccaacaacgaattggctggtgtccttcaccatttgaaacacgccagaatcagatactatgttaagtgtt

SEQ ID NO: 97554 - DNA, 80 bp, synthetic construct
  source 1..80: mol_type = other DNA
aggggaaattgtgggctgacgatgaaagaagtgtggactacaatgagagactcagttttgaggccccaccaagcatctgg

SEQ ID NO: 97555 - DNA, 80 bp, synthetic construct
  source 1..80: mol_type = other DNA
caccgttggaggccaaatgggtatgcttttgacaggatccaacgccaaaagcatggacttaggcaccacacctggtgatt

SEQ ID NO: 97556 - DNA, 80 bp, synthetic construct
  source 1..80: mol_type = other DNA
gatggagaaatctaccattatggcctgtatgtggatcaaggtcttgtactgggtgtgcacagaccaccgtctgccgtcag

SEQ ID NO: 97557 - DNA, 80 bp, synthetic construct
  source 1..80: mol_type = other DNA
ctaagggttctaaccatgaagatccatctgaaacaatgattccacactcccaaagacccatacaattgatgtccctacta

SEQ ID NO: 97558 - DNA, 80 bp, synthetic construct
  source 1..80: mol_type = other DNA
aggatcgagctggcaccactctccttgtattggagacctgtgtacactccccagtacctcatccctccagactcactcaa

SEQ ID NO: 97559 - DNA, 80 bp, synthetic construct
  source 1..80: mol_type = other DNA
actggaacctgtgttacttcccttacccgatgttaggaacaatttctaccactacactcaatcaaatgatcccaccctca

SEQ ID NO: 97560 - DNA, 80 bp, synthetic construct
  source 1..80: mol_type = other DNA
gaagttgcatggagaaacgttcccctacatagcctttgacaacaattgctatgccttttgttgctgggtcctggacctaa

SEQ ID NO: 97561 - DNA, 80 bp, synthetic construct
  source 1..80: mol_type = other DNA
tgcaacttcagagggggtgtcacccaaattggaagtactcaagcatacacaatgaatctggcctcccaaaattggagcaa

SEQ ID NO: 97562 - DNA, 80 bp, synthetic construct
  source 1..80: mol_type = other DNA
ttatgacccaacagaggaaatcccagcccccctgggtaccccagacttcgtgggcaggatccaaggtgtgctcacccaaa

SEQ ID NO: 97563 - DNA, 80 bp, synthetic construct
  source 1..80: mol_type = other DNA
ccacaaagcgggatggctcgacccgcggtcacaaagccacagtgagcactggagatgcctacttcaccccaaagctgggc

SEQ ID NO: 97564 - DNA, 80 bp, synthetic construct
  source 1..80: mol_type = other DNA
aaaattcgattctccactgatacaagtagtgatcttgaggccaatgaaaacacgaaattcaccccagtcggagttgtcca

SEQ ID NO: 97565 - DNA, 80 bp, synthetic construct
  source 1..80: mol_type = other DNA
ggatggtagcaccacccacaaaaatgaacccaaacagtggatgctcccagattattcaggtagggatacccacaatgtgc

SEQ ID NO: 97566 - DNA, 80 bp, synthetic construct
  source 1..80: mol_type = other DNA
tgatgtagctctgctaaggtttgtgaatccagatacgggtagggttctgtttgagtgcaagctccatagacaaggttttg

SEQ ID NO: 97567 - DNA, 80 bp, synthetic construct
  source 1..80: mol_type = other DNA
cggcccgtggggcaatcaacgcccccatgacaaaggctttggattggagcgggacaagatactgggctcccgatgctagg

SEQ ID NO: 97568 - DNA, 80 bp, synthetic construct
  source 1..80: mol_type = other DNA
ttcaccctcgggggcaccaccaggaagaattagggttgctgctcccactcgggattcctctagtatatcttctaaatctt

SEQ ID NO: 97569 - DNA, 80 bp, synthetic construct
  source 1..80: mol_type = other DNA
cctaacccagggatccctaaccgcaagagttgcaggtcttgtccatgagaggagagacgagtttcagctccaaggaaatg

SEQ ID NO: 97570 - DNA, 80 bp, synthetic construct
  source 1..80: mol_type = other DNA
aggggtgtgcttggcttggtcaccggctcagacatcagaaagaggagaccagacgattttcaaccaaaaggcaacctatg

SEQ ID NO: 97571 - DNA, 80 bp, synthetic construct
  source 1..80: mol_type = other DNA
tagtgctttctttgcaaatttggcaggaggcgtcgcctccaatggaattagttcactcataaatgctggggctaatgcta

SEQ ID NO: 97572 - DNA, 80 bp, synthetic construct
  source 1..80: mol_type = other DNA
atgttaataatcaaattagacaaccccttaaagtagatccttctccctcttcttcgagtggttcctctgtttcctctgtc

SEQ ID NO: 97573 - DNA, 80 bp, synthetic construct
  source 1..80: mol_type = other DNA
aaggacttcagattgggtgcgtagccaaaatgagaggttgagcccttacatgaatggagcgctgcaaacagcgtatgtaa

SEQ ID NO: 97574 - DNA, 80 bp, synthetic construct
  source 1..80: mol_type = other DNA
gtgaaaagattggttaggaaagtttgattagtttgttcttttcttttactgttcctttaattctttcttttaaaaaaaaa

SEQ ID NO: 97575 - DNA, 80 bp, synthetic construct
  source 1..80: mol_type = other DNA
tgttaggcaaactcaagccattgaatctattacacttgcttgcgtcctgtgattggacgtttgcaggtatagtagagaca

SEQ ID NO: 97576 - DNA, 80 bp, synthetic construct
  source 1..80: mol_type = other DNA
gtcatcttaatggcggaactttttaatgtcttctggaccccaccagatgtttctaattttatagcttccctgataggtga

SEQ ID NO: 97577 - DNA, 80 bp, synthetic construct
  source 1..80: mol_type = other DNA
tggggatcaatagagccaggagaaataaaaaattgctccttccagattactacagacatgggaaataagaaggagaaaga

SEQ ID NO: 97578 - DNA, 80 bp, synthetic construct
  source 1..80: mol_type = other DNA
cccaatggtcatgtacttattcctccctataatttcagtgtcacgcaatagtaaaagttgtacacccggtccgcttttgg

SEQ ID NO: 97579 - DNA, 80 bp, synthetic construct
  source 1..80: mol_type = other DNA
tgtagttcaactatgtgtcatgcacatatattatattgtcctacacaccttaaactgcttttaggcacatattttgtagc

SEQ ID NO: 97580 - DNA, 80 bp, synthetic construct
  source 1..80: mol_type = other DNA
tgccacacataatgtttccccttctactgctgtacagtccacatctgctgtgtctgcctatgtacctacaaataccactg

SEQ ID NO: 97581 - DNA, 80 bp, synthetic construct
  source 1..80: mol_type = other DNA
gttcctttggacatttgtaattctatttgtaaatatccagattatcttaaaatggttgctgagccatatggcgatacatt

SEQ ID NO: 97582 - DNA, 80 bp, synthetic construct
  source 1..80: mol_type = other DNA
gctgctatgttaggtaaatttaaagaattatatggtgtaagttttatggaactaattaggccatttcaaagcaataaaag

SEQ ID NO: 97583 - DNA, 80 bp, synthetic construct
  source 1..80: mol_type = other DNA
ctattgttactacttgtccctgctcctccctgctcctcccaatagtcatgtacttatttctccctataatttaagtgtca

SEQ ID NO: 97584 - DNA, 80 bp, synthetic construct
  source 1..80: mol_type = other DNA
tatgtaatgcatgtgtctgtatgtgtatgtgcttgtgctgtattgtatatgtgtgtgtttgtgtgttatatatggtgtat

SEQ ID NO: 97585 - DNA, 80 bp, synthetic construct
  source 1..80: mol_type = other DNA
ttaaaagtagtaattttaaagagtatttaagacatggtgaggaatttgatttacaatttatatttcagttatgcaaaata

SEQ ID NO: 97586 - DNA, 80 bp, synthetic construct
  source 1..80: mol_type = other DNA
gattatatatatccttgattgcagtgctggcttttgcacatgtttaaactgccaaggttgtgtcatgcattataaataag

SEQ ID NO: 97587 - DNA, 80 bp, synthetic construct
  source 1..80: mol_type = other DNA
gtaccaaaggtgtcaggattacaatatagggtatttagggttcgtttaccagatccaaacaactttggatttcctgatac

SEQ ID NO: 97588 - DNA, 80 bp, synthetic construct
  source 1..80: mol_type = other DNA
gatcatatagactattggaaacatattcgacttgaatgtgtattaatgtataaagcaagagaaatgggaatacacagtat

SEQ ID NO: 97589 - DNA, 80 bp, synthetic construct
  source 1..80: mol_type = other DNA
ctattgttcctacttgttcctacttgttcctgctcctcccaatagtcatgtacttatttctgcctataatttacgtgtca

SEQ ID NO: 97590 - DNA, 80 bp, synthetic construct
  source 1..80: mol_type = other DNA
tgccactaagtacaggttttgacattcccatattttctgggcctgatgtacctatagagcatgcacctacacaggttttt

SEQ ID NO: 97591 - DNA, 80 bp, synthetic construct
  source 1..80: mol_type = other DNA
gttatttgttactgtggtagataccacacgtagtaccaatatgtctgtgtgtgctgcaattgcaaacagtgatactacat

SEQ ID NO: 97592 - DNA, 80 bp, synthetic construct
  source 1..80: mol_type = other DNA
gcttacagtccacatctgctgtgtctgcctatgtacctacaaataccactgtgccactaagtacaggttttgacattccc

SEQ ID NO: 97593 - DNA, 80 bp, synthetic construct
  source 1..80: mol_type = other DNA
caaaactggaaatccgttttctcaaggacgtggtgcagattaaatttgcacgaggaagaggacaaagaaaacgatggaga

SEQ ID NO: 97594 - DNA, 80 bp, synthetic construct
  source 1..80: mol_type = other DNA
ccatggagtttgcatgaaatgtttaaaattttattcaaaagtaagtgaatatagatggtatagatatagtgtgtatggaa

SEQ ID NO: 97595 - DNA, 80 bp, synthetic construct
  source 1..80: mol_type = other DNA
gaactgcttttaggcacatattttgtagattatctatatccttgattgcagtgctggcttttgcacatgtttaaactgcc

SEQ ID NO: 97596 - DNA, 80 bp, synthetic construct
  source 1..80: mol_type = other DNA
tagtagactaggtaataaacaaactttgcgcactcgtagtggtgctactattggtgcaagggtgcattattattatgata

SEQ ID NO: 97597 - DNA, 80 bp, synthetic construct
  source 1..80: mol_type = other DNA
acctacatagcagactggtggtttttacatttccaaatccatttccatttgacaaaaacggaaatccagtatatgaatta

SEQ ID NO: 97598 - DNA, 80 bp, synthetic construct
  source 1..80: mol_type = other DNA
tatatacctatgtatagatggccaatgtactgttgtggaagggcaagttaattgtaagggcatttattatgtacatgaag

SEQ ID NO: 97599 - DNA, 80 bp, synthetic construct
  source 1..80: mol_type = other DNA
gggtgatttttatttgcaccctagttattatatgttaaaacgtcgacgtaaacgtgtatcatattttttgacagatgtct

SEQ ID NO: 97600 - DNA, 80 bp, synthetic construct
  source 1..80: mol_type = other DNA
aaggttgtgtcatgcattataaataagttgtatgttactcatataattaattgcatataggtattacaccgttttcggtt

SEQ ID NO: 97601 - DNA, 80 bp, synthetic construct
  source 1..80: mol_type = other DNA
gcgcatgtgggtggtcaggtaattgtttttcctgaatctgtatttagcagtgacgaaatatcctttgctgggattgttac

SEQ ID NO: 97602 - DNA, 80 bp, synthetic construct
  source 1..80: mol_type = other DNA
tgttggagaagacctcgtactgaaacccaagtgtaaacatgcgtggagaaacacctacattgcaagactatgtgttagat

SEQ ID NO: 97603 - DNA, 80 bp, synthetic construct
  source 1..80: mol_type = other DNA
cacatgtactgattggtgtgtagctgcgtttggagttacaggtacagttgcagaaggatttaaaaccctattgcaaccat

SEQ ID NO: 97604 - DNA, 80 bp, synthetic construct
  source 1..80: mol_type = other DNA
gtgtgtcttgtcatacgtccacttgtgctgtctgtgtcggtatatgcaacactactattattaattgtggttttatgggt

SEQ ID NO: 97605 - DNA, 80 bp, synthetic construct
  source 1..80: mol_type = other DNA
gtcgcaaatttttattacaggcaggatatagggcacgtcctaaatttaaagcaggtaaacgtagtgcaccctcagcatct

SEQ ID NO: 97606 - DNA, 80 bp, synthetic construct
  source 1..80: mol_type = other DNA
aggtaattgtttttcctgaatctgtatttagcagtgacgaaatatcctttgctgggattgttacaaagctaccaacagcc

SEQ ID NO: 97607 - DNA, 80 bp, synthetic construct
  source 1..80: mol_type = other DNA
atacaagatggggatatggttgatacaggctttggagctatggattttactgctttacaagacactaaaagtaatgttcc

SEQ ID NO: 97608 - DNA, 80 bp, synthetic construct
  source 1..80: mol_type = other DNA
agtacaaatatgctgatacagtagtcctgcggtttttggtttcctgaatactagtttttgccaacatcctggcttgtagt

SEQ ID NO: 97609 - DNA, 80 bp, synthetic construct
  source 1..80: mol_type = other DNA
gcacattagaaaaattgacaaacaaaggtatatgtgatttattaattaggtgtataacgtgtcagagaccgttgtgtcca

SEQ ID NO: 97610 - DNA, 80 bp, synthetic construct
  source 1..80: mol_type = other DNA
agtacatcacaaagagacgattttttaaatactgtaaaaatacctaacacagtatcagtgtcaacaggatatatgactat

SEQ ID NO: 97611 - DNA, 80 bp, synthetic construct
  source 1..80: mol_type = other DNA
ggttctttggaggatacctataggtttgtaacctcacaggccattacatgtcagaaaactgccccccaaaagcccaagga

SEQ ID NO: 97612 - DNA, 80 bp, synthetic construct
  source 1..80: mol_type = other DNA
actaaatatttctacagtaagcattgtgctatgctttttgctttgcttttgtgtgctactatttgtgtgtcttgtcatac

SEQ ID NO: 97613 - DNA, 80 bp, synthetic construct
  source 1..80: mol_type = other DNA
gtccacttgtgctgtctgtgtcggtatatgcaacactactattattaattgtgattttatgggttattgcaacctctcca

SEQ ID NO: 97614 - DNA, 80 bp, synthetic construct
  source 1..80: mol_type = other DNA
ttagcctaatgattgaactagatatttctacagtaagcattgtgctatgctttttgctttgcttttgtgtgctactattt

SEQ ID NO: 97615 - DNA, 80 bp, synthetic construct
  source 1..80: mol_type = other DNA
cgtgtatggaacaacattagaaaaattgacaaacaaaggtatatgtgatttattaattaggtgtataacgtgtcagagac

SEQ ID NO: 97616 - DNA, 80 bp, synthetic construct
  source 1..80: mol_type = other DNA
acgattttttaaatactgtaaaaatacctaacacagtatcagtgtcaacaggatatatgactatttagcctaatgattga

SEQ ID NO: 97617 - DNA, 80 bp, synthetic construct
  source 1..80: mol_type = other DNA
gaatactagtttttgccaacatcctggcttgtagtttcctgcctaacacaccttgccaacatataatccagtccaacttt

SEQ ID NO: 97618 - DNA, 80 bp, synthetic construct
  source 1..80: mol_type = other DNA
gtacagagcacacaagtagatattcgcatattgcaagagctgttaatgggctcatttggaatcgtgtgccccaactgttc

SEQ ID NO: 97619 - DNA, 80 bp, synthetic construct
  source 1..80: mol_type = other DNA
ggagtctacacttcgtttgtgtgtacagagcacacaagtagatattcgcatattgcaagagctgttaatgggctcatttg

SEQ ID NO: 97620 - DNA, 80 bp, synthetic construct
  source 1..80: mol_type = other DNA
ggagtgaccgaaggtggtgaaccgaaaacggttggtatataaagcacatagtattttgtgcaaacctacagacgccatgt

SEQ ID NO: 97621 - DNA, 80 bp, synthetic construct
  source 1..80: mol_type = other DNA
acatattttgtagattatctatatccttgattgcagtgctggcttttgcacatgtttaaactgccaaggttgtgtcatgc

SEQ ID NO: 97622 - DNA, 80 bp, synthetic construct
  source 1..80: mol_type = other DNA
cgggtatggcaatactgaagtggaaacgcagcagatggtacaggtagaggagcaacaaacaacattaagttgtaatggta

SEQ ID NO: 97623 - DNA, 80 bp, synthetic construct
  source 1..80: mol_type = other DNA
aataccactgtgccactaagtacaggttttgacattcccatattttctgggcctgatgtacctatagagcatgcacctac

SEQ ID NO: 97624 - DNA, 80 bp, synthetic construct
  source 1..80: mol_type = other DNA
ctcctcccaatagtcatgtacttatttctgcctataatttaggtgtcacgccatagtaaaagttgtacacccggtccgct

SEQ ID NO: 97625 - DNA, 80 bp, synthetic construct
  source 1..80: mol_type = other DNA
tgcaaaggtcagttaacagaaacagaggtattagattttgcatttacagatttaacaatagtatatagggacgacacacc

SEQ ID NO: 97626 - DNA, 80 bp, synthetic construct
  source 1..80: mol_type = other DNA
cgccatagtaaaagttgtacacccggtccgttttttgcaactaaagctactccattttgattttatgcagccattttaaa

SEQ ID NO: 97627 - DNA, 80 bp, synthetic construct
  source 1..80: mol_type = other DNA
gtttttgccaacattctggcttgtagtttcctgcctaacacaccttgccaacatataatccagtccaactttgcaattat

SEQ ID NO: 97628 - DNA, 80 bp, synthetic construct
  source 1..80: mol_type = other DNA
actattggctccatttcattgggattggttgtattcaatgttctactgcatgccatgagcctcatattaatggtgttagc

SEQ ID NO: 97629 - DNA, 80 bp, synthetic construct
  source 1..80: mol_type = other DNA
agaaagaacaatctggacctctagtagctccattgtaatgtgtggagttgatcatgaaattgccgattggtcatggcacg

SEQ ID NO: 97630 - DNA, 80 bp, synthetic construct
  source 1..80: mol_type = other DNA
aaacatcggacttcactataagatgggtgatgcaccaactgttgatatcccgagcatgaatggaaccaactcaaccacaa

SEQ ID NO: 97631 - DNA, 80 bp, synthetic construct
  source 1..80: mol_type = other DNA
acattcgtactttggaagacctgttaatgggcacactaggaattgtgtgccccatctgttctcagaaaccataatctacc

SEQ ID NO: 97632 - DNA, 80 bp, synthetic construct
  source 1..80: mol_type = other DNA
taactacaaccatgatttataaaataagggagggaccgaaaacggttcaaccgaaagcggtacatataaaagcggatgta

SEQ ID NO: 97633 - DNA, 80 bp, synthetic construct
  source 1..80: mol_type = other DNA
cagctacaggcagatgtagaggcagtgcaacaattaaaacgaaagtatataggcagtccgtatgtaagtcctgttgcaaa

SEQ ID NO: 97634 - DNA, 80 bp, synthetic construct
  source 1..80: mol_type = other DNA
cagcgaaccctgtgtagaaaaggacctaagcccccggctaggggctatatccctaggacggcggtcagctaaagccaaac

SEQ ID NO: 97635 - DNA, 80 bp, synthetic construct
  source 1..80: mol_type = other DNA
gacggctgtttgataaggcccaaccgccaccaaatggccatactgacgtggaagctgcggtggaggtaaataccgagagg

SEQ ID NO: 97636 - DNA, 80 bp, synthetic construct
  source 1..80: mol_type = other DNA
acagaacaaacagaaacagagcaagtgcagacagcatctggggagacaagtacagatagcctaggaaggcagcaaattac

SEQ ID NO: 97637 - DNA, 80 bp, synthetic construct
  source 1..80: mol_type = other DNA
agaactaatacataacacaaatattcgtgtagcattatttggtatgtttaaagaactgtatggattgagttttatggacc

SEQ ID NO: 97638 - DNA, 80 bp, synthetic construct
  source 1..80: mol_type = other DNA
tagcacggtcctttaaaagtgacagaacagtgtgtacagattgggtaattgcagcatttgggatatatcacggtattaca

SEQ ID NO: 97639 - DNA, 80 bp, synthetic construct
  source 1..80: mol_type = other DNA
gagggatttaaaacattattagagccacattgtttgtatggccatattcaatggctaacatgtagatggggtatggtatt

SEQ ID NO: 97640 - DNA, 80 bp, synthetic construct
  source 1..80: mol_type = other DNA
atgcaatattcctatgcatagtttgcaacttccttgtgccttttgcaagcggacagtgtgtacagcagatatttatgcat

SEQ ID NO: 97641 - DNA, 80 bp, synthetic construct
  source 1..80: mol_type = other DNA
attattattaacaagatttaaatgtggcaaaaacagactaacagtaggtaaatgtttaggaatgttattaaatataccag

SEQ ID NO: 97642 - DNA, 80 bp, synthetic construct
  source 1..80: mol_type = other DNA
aaacccaaatgttaatagatcctccaaaattacggacgcctgctgcagccttgtattggtatagacaagggctgtctaat

SEQ ID NO: 97643 - DNA, 80 bp, synthetic construct
  source 1..80: mol_type = other DNA
gcaagtgagatatttggtacacccccggaatggctgtcaagacaaactgtaatagaatgtagcttagcagacagccagtt

SEQ ID NO: 97644 - DNA, 80 bp, synthetic construct
  source 1..80: mol_type = other DNA
tgatttatcaaaaatggtacaatgggcatatgaccataattatgttgatgacagtataattgccctggaatatgcaaaat

SEQ ID NO: 97645 - DNA, 80 bp, synthetic construct
  source 1..80: mol_type = other DNA
tagctgatatagatgaaaatgcggctgccttcctaggaagtaattgtcaggctaaatatgtaaaagactgtggaacaatg

SEQ ID NO: 97646 - DNA, 80 bp, synthetic construct
  source 1..80: mol_type = other DNA
tgtagacattatttaagggcacaaaaaatgcaaatgacaatggcacaatggattaaacatcgttgtgatttagtagagga

SEQ ID NO: 97647 - DNA, 80 bp, synthetic construct
  source 1..80: mol_type = other DNA
agaaggtaattggaaagaaatagtaagattccttagattccaacatgtggattttatatcatttatgatagcattaaaga

SEQ ID NO: 97648 - DNA, 80 bp, synthetic construct
  source 1..80: mol_type = other DNA
aatttttacaaggaataccaaaacacaattgtatattaatatatggaccgccagacacaggaaaatccaattttgccatg

SEQ ID NO: 97649 - DNA, 80 bp, synthetic construct
  source 1..80: mol_type = other DNA
ttagctttttaggaggtgcagtgttatcatatgtaaattccagtagccatttttggttagaacctttggcagatgccaaa

SEQ ID NO: 97650 - DNA, 80 bp, synthetic construct
  source 1..80: mol_type = other DNA
attgctatgctagacgatgctacaacacaatgctggaactatatggacatttatatgcgcaatgcattagatggcaatcc

SEQ ID NO: 97651 - DNA, 80 bp, synthetic construct
  source 1..80: mol_type = other DNA
ttcaatataaagacctatatgtggtgtggagacacggctttccatatgctgcttgtgcactgtgcctagaactgcacggg

SEQ ID NO: 97652 - DNA, 80 bp, synthetic construct
  source 1..80: mol_type = other DNA
tatgtgctttgatagaaaacatcgagctatggtgcaaacaaaatgtcctccactactagtgacctctaatataaatgtta

SEQ ID NO: 97653 - DNA, 80 bp, synthetic construct
  source 1..80: mol_type = other DNA
gtacagacgacagatggcgctacctacacagtagagtcaaatgtttttgttttcccaatagatttccatttgatagtaat

SEQ ID NO: 97654 - DNA, 80 bp, synthetic construct
  source 1..80: mol_type = other DNA
ggaaacgctgtgtatgatataagtaataaaaattggaaatcattctttaaaaggtcatggtcacgtttagcgctgaacga

SEQ ID NO: 97655 - DNA, 80 bp, synthetic construct
  source 1..80: mol_type = other DNA
caacgataacgaggaggaggaggaaaatggagactctagcaacacgtttagatgtgtgccaggaaaggcttctagaccta

SEQ ID NO: 97656 - DNA, 80 bp, synthetic construct
  source 1..80: mol_type = other DNA
tatgaaaaggatagtgataaactagaggaccaaatagaacattggaaatgcatacgcctggagtgtgcattgcaatacaa

SEQ ID NO: 97657 - DNA, 80 bp, synthetic construct
  source 1..80: mol_type = other DNA
agcccgggaattgggatacaaagtgttacagcaccaggcactgcctgcacttgctgtgtcaaagggcaaagggcacaagg

SEQ ID NO: 97658 - DNA, 80 bp, synthetic construct
  source 1..80: mol_type = other DNA
ccattgaactgcaacttgcattacagacattgcaacagacagtgtacagcaccgaatcgtggacattacaggacacatgc

SEQ ID NO: 97659 - DNA, 80 bp, synthetic construct
  source 1..80: mol_type = other DNA
ctggaacggtgggatgcaccacctacggggtgctttaaaaaacgtggacaaacagtagatgttatatttgatgggcataa

SEQ ID NO: 97660 - DNA, 80 bp, synthetic construct
  source 1..80: mol_type = other DNA
ggaaaacgcaatgcaatatgtaatgtgggcatatatttattttccaaactgtgatggggagggatggactaaggtgtgca

SEQ ID NO: 97661 - DNA, 80 bp, synthetic construct
  source 1..80: mol_type = other DNA
gtaatatagatgcaatgggtatttattatatggatgcagaatacaaagtgtattatgtggattttgctaaggaagcatct

SEQ ID NO: 97662 - DNA, 80 bp, synthetic construct
  source 1..80: mol_type = other DNA
caaataaattatagaaggcatcgcgaccgtgcgtgcctgtgggaaacagtagaacaagagtgtggaaagccattggaaga

SEQ ID NO: 97663 - DNA, 80 bp, synthetic construct
  source 1..80: mol_type = other DNA
aagtatggggaacatggacagtgggaggtgcgtatgggcagcagcatcatattttctcctgcatctgtatctagtaccga

SEQ ID NO: 97664 - DNA, 80 bp, synthetic construct
  source 1..80: mol_type = other DNA
agaggcattgtcaatatcctctactggcactgctgaacacaccagagcgaccaattccacaccacgtgccgacaactcca

SEQ ID NO: 97665 - DNA, 80 bp, synthetic construct
  source 1..80: mol_type = other DNA
caaaagcacccccgtgcacgccgccgcctagaaaacgagctagagcgtacagcacagaccaacaaccacacagcacttca

SEQ ID NO: 97666 - DNA, 80 bp, synthetic construct
  source 1..80: mol_type = other DNA
gactccgtgggctgtgacaacaacagacacatcagtgacgataacagcaacaaaggacggcatacaagtagtggtgacac

SEQ ID NO: 97667 - DNA, 80 bp, synthetic construct
  source 1..80: mol_type = other DNA
tacacccatagtgcactttaaaggtgaacctaatactttaaaatgttttaggcaaagaatacaaaagtataaacatttgt

SEQ ID NO: 97668 - DNA, 80 bp, synthetic construct
  source 1..80: mol_type = other DNA
ttgaacaagcatcctcaacatggcattgggcatgtgtaccaggtaccactaagaataggggcattgtaacaataacctat

SEQ ID NO: 97669 - DNA, 80 bp, synthetic construct
  source 1..80: mol_type = other DNA
agtagtgtagaacaaagacaagaatttttattaactgttcgcattccacctagtatatctatgtcattaggggtaatgtc

SEQ ID NO: 97670 - DNA, 80 bp, synthetic construct
  source 1..80: mol_type = other DNA
attataatactataattaaatgtaaatatgtaattgtacacatttgtaccacaaccagccaatactgctgtaaggtatgt

SEQ ID NO: 97671 - DNA, 80 bp, synthetic construct
  source 1..80: mol_type = other DNA
atggtaagtatggtagtgagtgcatgcaggcctgcagtgaatgaggtgtgtgtgtagtgtatgcattaataatgttgtat

SEQ ID NO: 97672 - DNA, 80 bp, synthetic construct
  source 1..80: mol_type = other DNA
acagtaagttggttaacatgttggtttttattgtctatggtattatggcaatgtattacaacagcatttactttttttct

SEQ ID NO: 97673 - DNA, 80 bp, synthetic construct
  source 1..80: mol_type = other DNA
aatatatataaggtgctggctgtgccataaacctttgtgcaacgtggaaaaacaacggcacgtagataacggcaggcgat

SEQ ID NO: 97674 - DNA, 80 bp, synthetic construct
  source 1..80: mol_type = other DNA
tgtagcctttatgctattgtgggtacctgccctgtgtgtatatgtgcgccttgccaggcttcttgaacttgaccttcact

SEQ ID NO: 97675 - DNA, 80 bp, synthetic construct
  source 1..80: mol_type = other DNA
ttacataaggtgttactgctggatgccctgtgtaacctgattactatagtacaataaatattgtgtacatatatttgtgt

SEQ ID NO: 97676 - DNA, 80 bp, synthetic construct
  source 1..80: mol_type = other DNA
attatggctaaagcaagagccccacgacgaaaacgtgcatctgcaacacaattatatcaaacatgcaaggcctctggcac

SEQ ID NO: 97677 - DNA, 80 bp, synthetic construct
  source 1..80: mol_type = other DNA
cagatcaaatcctgcgatggggtagtatgggtgtgttttttggaggcctgggaataggtactggtagtggcacaggtgga

SEQ ID NO: 97678 - DNA, 80 bp, synthetic construct
  source 1..80: mol_type = other DNA
cgcacaggttatataccactgggacgaccctctaccacccttgaacccggtcctgttgtacgtcctgcaggtgcagtaga

SEQ ID NO: 97679 - DNA, 80 bp, synthetic construct
  source 1..80: mol_type = other DNA
aacagtggccccctcagacccttccattgtgtccttggtagaggaatctagtgttgtggatgttggggcaccaactccta

SEQ ID NO: 97680 - DNA, 80 bp, synthetic construct
  source 1..80: mol_type = other DNA
ctattccaacacacggcgggtttgaaattacaacatccagtgatgccacccctgctatattagatgtaacctccactacc

SEQ ID NO: 97681 - DNA, 80 bp, synthetic construct
  source 1..80: mol_type = other DNA
acacctattagagtgtctgtaacgtcccatactaatcctatatatacagagccatctttattagaccctccccctccagt

SEQ ID NO: 97682 - DNA, 80 bp, synthetic construct
  source 1..80: mol_type = other DNA
acaaatggatggtcgggttttagtatctacctcaacgttgccatcgtccacagctgaacatatacctatggacaccttta

SEQ ID NO: 97683 - DNA, 80 bp, synthetic construct
  source 1..80: mol_type = other DNA
taattatgcaggaccatataggcacaacaactagtacacctgtaccacggccgcctgcacgcccacgcttgggtttatat

SEQ ID NO: 97684 - DNA, 80 bp, synthetic construct
  source 1..80: mol_type = other DNA
tccactgtgttggtggctattggaagggtaggtgtctacattgctggaagccataatgcatggaaatgtggccacaattg

SEQ ID NO: 97685 - DNA, 80 bp, synthetic construct
  source 1..80: mol_type = other DNA
tcccgtgcattgcagcaggtgcctgtacatgaccctgcgtttttacaacagccttccagtcttataacatatgacaatcc

SEQ ID NO: 97686 - DNA, 80 bp, synthetic construct
  source 1..80: mol_type = other DNA
tgtatatgaaggtaacccagatgttactttacactttgagcagcccacaatacataatgcacctgatcccgcctttatgg

SEQ ID NO: 97687 - DNA, 80 bp, synthetic construct
  source 1..80: mol_type = other DNA
gcccacaatacataatgcacctgatcccgcctttatggacatctttgccttacatagaccagctcttacaactcgcaggg

SEQ ID NO: 97688 - DNA, 80 bp, synthetic construct
  source 1..80: mol_type = other DNA
acatctttgccttacatagaccagctcttacaactcgcaggagggttgtacgttatagtagggtgggcgaaagggccact

SEQ ID NO: 97689 - DNA, 80 bp, synthetic construct
  source 1..80: mol_type = other DNA
gtacacacacgtagtggcctgcaacttaaaccccgtgtgcattattttcaagacttaagccctattgctcatgttcctga

SEQ ID NO: 97690 - DNA, 80 bp, synthetic construct
  source 1..80: mol_type = other DNA
ggaaatagaattacaccctttaatatctgcaaacaatacaagcattaataatggtctttactcagatatatatgatgtat

SEQ ID NO: 97691 - DNA, 80 bp, synthetic construct
  source 1..80: mol_type = other DNA
atgctgacacagattttgctgacactggtggtgtttccacttctactgtatcacgtagttctgtacatacaaccctacaa

SEQ ID NO: 97692 - DNA, 80 bp, synthetic construct
  source 1..80: mol_type = other DNA
actacatctataccatctcagtatggtaataccacagttcccctaactgcatcatcgccatatacacccatacctacatc

SEQ ID NO: 97693 - DNA, 80 bp, synthetic construct
  source 1..80: mol_type = other DNA
ctttaggccctcctccggtcaggccccatttattccagcacgtcctatatttccacaaacacctattgctgttaatggtg

SEQ ID NO: 97694 - DNA, 80 bp, synthetic construct
  source 1..80: mol_type = other DNA
gggatttttacctgcatcctagttatacttccttacgcaaacgccgtaaacgtctcccatattttcttgcagatggctat

SEQ ID NO: 97695 - DNA, 80 bp, synthetic construct
  source 1..80: mol_type = other DNA
gtggcggcctagcgagaacaaggtatacctgcctcctaccccagtttctaaggttgtcagcacggatgaatatgtgactc

SEQ ID NO: 97696 - DNA, 80 bp, synthetic construct
  source 1..80: mol_type = other DNA
aggatatagtccttgatttaacaccagaaccgtgtgacctgtactgcagagagcaattagaagactctgatgcagaagat

SEQ ID NO: 97697 - DNA, 80 bp, synthetic construct
  source 1..80: mol_type = other DNA
atccatattttaaagtgcaaaaatccactaataaacagagtattcctaaagtatcaggatatcaatatagggtgtttagg

SEQ ID NO: 97698 - DNA, 80 bp, synthetic construct
  source 1..80: mol_type = other DNA
agtttatataatcctgagacacaacgccttgtatgggcatgcacaggtgtggaggttggtagaggccagccattaggtct

SEQ ID NO: 97699 - DNA, 80 bp, synthetic construct
  source 1..80: mol_type = other DNA
agttggatgatactgaaaatgcccctaaatatgttggtgcaggaactgataatagagaaaatgttagcatggactacaaa

SEQ ID NO: 97700 - DNA, 80 bp, synthetic construct
  source 1..80: mol_type = other DNA
attgggctaaaggcaacctatgtacacctaatacattggctgctggagactgtcctcctttggaattagtaaatacatat

SEQ ID NO: 97701 - DNA, 80 bp, synthetic construct
  source 1..80: mol_type = other DNA
atttcaatgccttacaaacctctaaaagcgaggtaccccttgatattgctacctcaatttgtaaatatcctgattacctt

SEQ ID NO: 97702 - DNA, 80 bp, synthetic construct
  source 1..80: mol_type = other DNA
ggcatatgttaaacagggcaggtaccatgggtgagcctgtacctaatgacttatacattaagaaatcctcaggtaaccct

SEQ ID NO: 97703 - DNA, 80 bp, synthetic construct
  source 1..80: mol_type = other DNA
gagacagcagtaatacaacctgacaaacaagcatttaaggtgttaagccagtgtggaggtgtgtgttgtaagacagtgcg

SEQ ID NO: 97704 - DNA, 80 bp, synthetic construct
  source 1..80: mol_type = other DNA
gacagttctatttatgctgcaactcccagtggctctatggtaacatctgaataccaaatatttaataagccctactggtt

SEQ ID NO: 97705 - DNA, 80 bp, synthetic construct
  source 1..80: mol_type = other DNA
gttggggcaatcaattgtttttaacagttgtagataccacccgcagtactaacctaactttatgtgctacagcaacctcg

SEQ ID NO: 97706 - DNA, 80 bp, synthetic construct
  source 1..80: mol_type = other DNA
caggatacgtttaataatgctaactttaaggagtatataagacatgtggaggaatatgatttacaatttatatttcagtt

SEQ ID NO: 97707 - DNA, 80 bp, synthetic construct
  source 1..80: mol_type = other DNA
ccactattttggaggactggaactttggtataacccccccagctacaagtagtttggaggacacatataggtttgtacag

SEQ ID NO: 97708 - DNA, 80 bp, synthetic construct
  source 1..80: mol_type = other DNA
tcacaggccattgcatgtcaaaaaaataatgcccctgcaaaggaaaaggaagatccttacagtaaatatgctttttggac

SEQ ID NO: 97709 - DNA, 80 bp, synthetic construct
  source 1..80: mol_type = other DNA
tgttgaccttaaggaacggttttcatctgaccttgaccagtttcccttgggtcgcaagtttttactacaggctggcctac

SEQ ID NO: 97710 - DNA, 80 bp, synthetic construct
  source 1..80: mol_type = other DNA
gtgcacgtccgcgccttaggcctgtaaagcgtgcggccccttcctcctctggaggtacatcacgcaagcgtgctaaaact

SEQ ID NO: 97711 - DNA, 80 bp, synthetic construct
  source 1..80: mol_type = other DNA
aaaaggtaacagtgttatatgttgtgttattgtgtttgtactgtgtctatgttatatgtagtatgttatgtgtggaatgt

SEQ ID NO: 97712 - DNA, 80 bp, synthetic construct
  source 1..80: mol_type = other DNA
ttgtgtgtcctatttatgttgtgactcgtgtgttatatatgttgtatgttttcctgtgtgttttttgtttgtttcctgta

SEQ ID NO: 97713 - DNA, 80 bp, synthetic construct
  source 1..80: mol_type = other DNA
gctatgtgtgtatagcacgcacacaggcataagggtactgcaggaactgcttcatcagggcgcactggaaatagtgtgtc

SEQ ID NO: 97714 - DNA, 80 bp, synthetic construct
  source 1..80: mol_type = other DNA
ttaaatgtaataaagactttggttgcaccctatgagtaacttttgtgtgatgcctggtagccattaccttttcacctttc

SEQ ID NO: 97715 - DNA, 80 bp, synthetic construct
  source 1..80: mol_type = other DNA
gtctccattttgtaaaaggttttatatacccgaaaccgttttcggttgctgttggcactaaaactgttttttaagcagtt

SEQ ID NO: 97716 - DNA, 80 bp, synthetic construct
  source 1..80: mol_type = other DNA
tcatatcgtacatctaatcttttgggcgccgccacatcctgccctagtagttctgccagcacatctgcacacccacacat

SEQ ID NO: 97717 - DNA, 80 bp, synthetic construct
  source 1..80: mol_type = other DNA
ttataactgtcagtacaacttcactttccattgtgtaaaaacacaccctgtgcattcctaaattgatttatatgatttta

SEQ ID NO: 97718 - DNA, 80 bp, synthetic construct
  source 1..80: mol_type = other DNA
cccaataaaacatgctggtaggcacatattttagctttgtaaacttactaagtgcatagttggcaaaatagtacataggt

SEQ ID NO: 97719 - DNA, 80 bp, synthetic construct
  source 1..80: mol_type = other DNA
gtatgccaggtacgtgtctgtacaacagtgactaattcaggaaaccgatttcggttacctacccattatcttttttatca

SEQ ID NO: 97720 - DNA, 80 bp, synthetic construct
  source 1..80: mol_type = other DNA
gaaaacagttatttgggggcaatgtctgttactgagccccacacggaggagccgcgtaccctagctgatttatgcaaggt

SEQ ID NO: 97721 - DNA, 80 bp, synthetic construct
  source 1..80: mol_type = other DNA
ccacctgtgcttcaagaccataacggcatggcggataaccaaggtacagaggaggaggggactgggtgtaatggatggtt

SEQ ID NO: 97722 - DNA, 80 bp, synthetic construct
  source 1..80: mol_type = other DNA
ctttgtggaagcaattgtagaacgtaaaacaggggatattatttcagatgatgagcctgaggatgtggaggacagtgggc

SEQ ID NO: 97723 - DNA, 80 bp, synthetic construct
  source 1..80: mol_type = other DNA
ttgatatggtggactttattgataatagtatatcacaggcagaggggcaggaaaatccacaggcattgttacatgcccaa

SEQ ID NO: 97724 - DNA, 80 bp, synthetic construct
  source 1..80: mol_type = other DNA
caagcctgcacggaatggatgacccagagaaagaagtgttagaatggaggtttgacagcaccctagcacatcaccacagg

SEQ ID NO: 97725 - DNA, 80 bp, synthetic construct
  source 1..80: mol_type = other DNA
attgatgagcggggtgaatcagtgattgtcgaatctggtgatccaaatgccctcttaaaacatagatttgagataatcga

SEQ ID NO: 97726 - DNA, 80 bp, synthetic construct
  source 1..80: mol_type = other DNA
gtgagtcgataattgtggagtctggcgatccaaatgccctcctaaaacaccggtttgagataatcgaagggagagatcgc

SEQ ID NO: 97727 - DNA, 80 bp, synthetic construct
  source 1..80: mol_type = other DNA
cagaagggcctccttgcttccagcgatcgaaatttctgctgatggacgctctaaagcttagcattgaagacccaagtcat

SEQ ID NO: 97728 - DNA, 80 bp, synthetic construct
  source 1..80: mol_type = other DNA
cctgaggtgtaatggaacccgccaaaattgcacaccataggaatttgtcaatagttcaatcccctcaatatcagaaatca

SEQ ID NO: 97729 - DNA, 80 bp, synthetic construct
  source 1..80: mol_type = other DNA
acctggcatattgtaaaagacttaaagtcctcatctgaatcaggttgcacaaatggacagggactccatttgcaattgat

SEQ ID NO: 97730 - DNA, 80 bp, synthetic construct
  source 1..80: mol_type = other DNA
ctcaacacagagacaacatccacccctgaccactgcatcctcagtcctagtctgtctaacatcatgtgtccccgacttct

SEQ ID NO: 97731 - DNA, 80 bp, synthetic construct
  source 1..80: mol_type = other DNA
ccaaatcatttactgacggctggccatcattagggctcattcccattttaacaggctctctatattgatcaacaattttt

SEQ ID NO: 97732 - DNA, 80 bp, synthetic construct
  source 1..80: mol_type = other DNA
ttgagcaaagatggatgtacaagtgtcaaggggcccgattacaaaaggcctggtgtctcaaggaaattcttgtccctcct

SEQ ID NO: 97733 - DNA, 80 bp, synthetic construct
  source 1..80: mol_type = other DNA
tagggtgagctagtattaaaactaagatcatcttcgtcaatgacctaatgttatgaagatgttcctctagctcactacag

SEQ ID NO: 97734 - DNA, 80 bp, synthetic construct
  source 1..80: mol_type = other DNA
atggtgggaataactccagaaacattaaaattcatgatcaaatcgtaactattaggacaaaccacttccatatcaatttt

SEQ ID NO: 97735 - DNA, 80 bp, synthetic construct
  source 1..80: mol_type = other DNA
gtaatgttctatattgattccaacatcctttaaagcagtagtggccttcaaaatggttttctgaaacactgaattgagga

SEQ ID NO: 97736 - DNA, 80 bp, synthetic construct
  source 1..80: mol_type = other DNA
tttgattcttattcgaccattgggaaggctgttttgtactagacctttcagcctgttgtctccgttcaatccatttctct

SEQ ID NO: 97737 - DNA, 80 bp, synthetic construct
  source 1..80: mol_type = other DNA
acttgactttgtttaagaatgacctccagcactgcatctgacactctccgatagcttgattcccggtaccatcatttcct

SEQ ID NO: 97738 - DNA, 80 bp, synthetic construct
  source 1..80: mol_type = other DNA
ccatcaaaattcgcatataaaaacctcagtattggtgatgctctcttaaactgatgaactaactgctcaacatcgtcttt

SEQ ID NO: 97739 - DNA, 80 bp, synthetic construct
  source 1..80: mol_type = other DNA
tgtggccatcactttatcaacgtacagattgttgaactcattaagcaactgactcttctcgactctcagaaattgatttt

SEQ ID NO: 97740 - DNA, 80 bp, synthetic construct
  source 1..80: mol_type = other DNA
tctgtaaactgtagtttttctgtgtcaatgacaatctcaacaggggttacgtgccccagttgatgtgtgtcaaccagaaa

SEQ ID NO: 97741 - DNA, 80 bp, synthetic construct
  source 1..80: mol_type = other DNA
ctaaatactttgacactaagtctttgacacaggctatgtcttcctccatggaatagatagtcttaatgcctaggatcctc

SEQ ID NO: 97742 - DNA, 80 bp, synthetic construct
  source 1..80: mol_type = other DNA
taagggtcatgagttgagaataagtaagcccagcagcgaaccctgctgactgcagtgacttgttggagttcgtgttccca

SEQ ID NO: 97743 - DNA, 80 bp, synthetic construct
  source 1..80: mol_type = other DNA
gctttctgtggcttcccgcctgattctaagtcaacgacagtgttttcccaagctcttcctgtgattgatgttcttgatgc

SEQ ID NO: 97744 - DNA, 80 bp, synthetic construct
  source 1..80: mol_type = other DNA
aaactcttactactccatccctcccagcccgagccccttgaccactaccactcattcctatcatgtctaggagagcccgt

SEQ ID NO: 97745 - DNA, 80 bp, synthetic construct
  source 1..80: mol_type = other DNA
tgtcgagttggtgtcttgtgaacacacagcagaaagttgagactgtctgctaaagtgattagcacaaagcgcaatccaat

SEQ ID NO: 97746 - DNA, 80 bp, synthetic construct
  source 1..80: mol_type = other DNA
agtaccaccaatagtagtagtggaatgatggaggaaggggaaatgaaaaactgctctttcaatgttaccacaaacatagg

SEQ ID NO: 97747 - DNA, 80 bp, synthetic construct
  source 1..80: mol_type = other DNA
gaaatgaaaaactgctctttcaatgttaccacaaacataggaaatggggtgaagaaagcacgtgctatttttgataaact

SEQ ID NO: 97748 - DNA, 80 bp, synthetic construct
  source 1..80: mol_type = other DNA
acgagaaaggggagcagggatttaagggctggccttttgatgatggaatagatgtgtggatgggaagaacaataaacgag

SEQ ID NO: 97749 - DNA, 80 bp, synthetic construct
  source 1..80: mol_type = other DNA
tgcattggtagggacaacgggaaaggttccaatagaccagtggtaaaaataaaggtaaaggataaaagcattgcttcaat

SEQ ID NO: 97750 - DNA, 80 bp, synthetic construct
  source 1..80: mol_type = other DNA
ttatgtgtgttcagggcttgtgggggacacacccggaaaagacgacaaatccagcggtggcaatggtttgaaccctaaaa

SEQ ID NO: 97751 - DNA, 80 bp, synthetic construct
  source 1..80: mol_type = other DNA
aggaaaggatgcaacgagctagaccagcagcagaaggggccgcagcaggggtgggagcagcatctcgagacctggaaaga

SEQ ID NO: 97752 - DNA, 80 bp, synthetic construct
  source 1..80: mol_type = other DNA
cgggtaacactaataatgccactaataatgccacaacaagcaccacagcaagccccacagcaagccccacagcaagcata

SEQ ID NO: 97753 - DNA, 80 bp, synthetic construct
  source 1..80: mol_type = other DNA
accacataagaaactgctcgtacaatgcgaccacagaattatgggataaaaaacaaaaaatgcgttcattattttataaa

SEQ ID NO: 97754 - DNA, 80 bp, synthetic construct
  source 1..80: mol_type = other DNA
gagaagaatgtgacaaaaatagtgcacttaaataatactatcatagaaaaggaaatatgcccccaattagtggagtacag

SEQ ID NO: 97755 - DNA, 80 bp, synthetic construct
  source 1..80: mol_type = other DNA
caggatgggcccacaccagatttttatttgttagagaagggaaaattatccacagtagcccattatcaggaagtgttcag

SEQ ID NO: 97756 - DNA, 80 bp, synthetic construct
  source 1..80: mol_type = other DNA
caggtggaggaattctcttcctaccctcaatacccagaagttaggtgtgtgtgcagagacaattggaaggggtccaatag

SEQ ID NO: 97757 - DNA, 80 bp, synthetic construct
  source 1..80: mol_type = other DNA
agcaggggaaattcttaactagcaaaatggaaacaatatcactaataagtatactgctggtagtagcaacaagcaatgca

SEQ ID NO: 97758 - DNA, 80 bp, synthetic construct
  source 1..80: mol_type = other DNA
catggatatgaggacccggagaaagaagtgttggtgtggagatttaacagcagactagcatttgaacataaggccaaaca

SEQ ID NO: 97759 - DNA, 80 bp, synthetic construct
  source 1..80: mol_type = other DNA
aattgtctggatgtaaagagcaggttactaccaaagaggctcttctggaaagggagtttttaaatgttaaagagatgaga

SEQ ID NO: 97760 - DNA, 80 bp, synthetic construct
  source 1..80: mol_type = other DNA
gggtttcatccaaccttctgatcacaacaacacacgttctgcctaaaggggttaaggaactctttggagttgaaattaaa

SEQ ID NO: 97761 - DNA, 80 bp, synthetic construct
  source 1..80: mol_type = other DNA
ggggaacgcgttcaccgctgggaaggtcatatttgccgcagtcccaccaaatttcccaactgaaggcttgagccccagcc

SEQ ID NO: 97762 - DNA, 80 bp, synthetic construct
  source 1..80: mol_type = other DNA
gggcaccagatgctaggttaaccacaacatacactggccgcttttccacccctcaaccatcggtggcactgccaggaaga

SEQ ID NO: 97763 - DNA, 80 bp, synthetic construct
  source 1..80: mol_type = other DNA
ataggaaaattgaaacctcttaacattctcaatattctggctacatgtgattggaccttcgcaggtatagtggagtccct

SEQ ID NO: 97764 - DNA, 80 bp, synthetic construct
  source 1..80: mol_type = other DNA
tgtcatgatctcaggcaaaccaggtatcgggaagacccacttggctagagagttggcaaagaaggttgctgctacactga

SEQ ID NO: 97765 - DNA, 80 bp, synthetic construct
  source 1..80: mol_type = other DNA
atgattacggaatgagcaaccctgttcatgatgccttgagactccaagagctagctgacacttgccccttgacactaaac

SEQ ID NO: 97766 - DNA, 80 bp, synthetic construct
  source 1..80: mol_type = other DNA
gccccccaaggtggttttgacaagaacggcaacacgcctcatggcaaaggggtcatgaaatctttaaccttgggttccct

SEQ ID NO: 97767 - DNA, 80 bp, synthetic construct
  source 1..80: mol_type = other DNA
ccgtgcagaccaacaatgagctgtccggcgcactgcaccacctgaggtgcgccaggatcagatactatgtcaagtgtgtc

SEQ ID NO: 97768 - DNA, 80 bp, synthetic construct
  source 1..80: mol_type = other DNA
caggagtccatctactccattcttcaaatcgctggggctgcgtttgtgacaacgcgcattgttaagcgcatgaacataca

SEQ ID NO: 97769 - DNA, 80 bp, synthetic construct
  source 1..80: mol_type = other DNA
ctaaaccaccattggtagacacagaagagacagccaccgaggaaggctgcccaaaacccaaagatgacgaagagttcatc

SEQ ID NO: 97770 - DNA, 80 bp, synthetic construct
  source 1..80: mol_type = other DNA
atctcctctgatgacattaaaactgagggcaagaaaggaaagaacaagtctggccggggtaagaaacacacagccttctc

SEQ ID NO: 97771 - DNA, 80 bp, synthetic construct
  source 1..80: mol_type = other DNA
tattcaggccgaccaagaaacaacgcaaggaggaacgcacttctctcggtctcgtcaccggctctgagatcagaaaacgg

SEQ ID NO: 97772 - DNA, 80 bp, synthetic construct
  source 1..80: mol_type = other DNA
gggtctccccaagcttattcattacatcaacccatgtcataccccaaggcgcccaggagttctttggggtgcccatcaag

SEQ ID NO: 97773 - DNA, 80 bp, synthetic construct
  source 1..80: mol_type = other DNA
cacagttggtggtcaaatgggcatgctattgacagggtccaacgctaagagcatggatctgggaacaacaccaggcgact

SEQ ID NO: 97774 - DNA, 80 bp, synthetic construct
  source 1..80: mol_type = other DNA
ttgataaaaccacgtccagtggccaccctcaccatgttcggaaaaatgattactggaatggggaaactttcacaggcaag

SEQ ID NO: 97775 - DNA, 80 bp, synthetic construct
  source 1..80: mol_type = other DNA
ggggctcagacttagcaacaatgatccggtgcgcacgagcatttggaggactaatggacgagctcaaagcccactgcatc

SEQ ID NO: 97776 - DNA, 80 bp, synthetic construct
  source 1..80: mol_type = other DNA
cctaacgtgcatctggcccccgctgtagcccccacttttccaggtgagcaactcctcttcttcagatccaccatgcccgg

SEQ ID NO: 97777 - DNA, 80 bp, synthetic construct
  source 1..80: mol_type = other DNA
tttaggtttgattcctgggtcaaccagttctacacgcttgcccccatgggaaatggaacggggcgtagacgtgcagtata

SEQ ID NO: 97778 - DNA, 80 bp, synthetic construct
  source 1..80: mol_type = other DNA
aaaatcccatttcatcttcagataagcaagcaaataattcatgcagaaatacaacatttaggtcattggatggatggtac

SEQ ID NO: 97779 - DNA, 80 bp, synthetic construct
  source 1..80: mol_type = other DNA
gccttcagacactttactatttcttggcccactcgaacagggtggattaatattcaagcagtggtgcaccactacatgtc

SEQ ID NO: 97780 - DNA, 80 bp, synthetic construct
  source 1..80: mol_type = other DNA
agtttggtgaccctggagacataatgagcacacctactggaatgaagtgtccagaattaagtggttcttttagaaagaaa

SEQ ID NO: 97781 - DNA, 80 bp, synthetic construct
  source 1..80: mol_type = other DNA
aaaatcccattccacctacagataagcaaacaagtaattcatgcagaaattcaacatttaggtcactggatggatggcac

SEQ ID NO: 97782 - DNA, 80 bp, synthetic construct
  source 1..80: mol_type = other DNA
aatttggagaccctggggatataatgagcacccctactggaatgaaatgtccagaattaagcggttcatttagaaaaaaa

SEQ ID NO: 97783 - DNA, 80 bp, synthetic construct
  source 1..80: mol_type = other DNA
gccatcagacaccttactatttttaggcccacttgaacaaggtggattaatatttaagcagtggtgtactactacatgtc

SEQ ID NO: 97784 - DNA, 80 bp, synthetic construct
  source 1..80: mol_type = other DNA
tttggttgcgcaattcaagtatcctttttaacatggggcaagtggtgactttctttcaggaagtacctcatgtaatagag

SEQ ID NO: 97785 - DNA, 80 bp, synthetic construct
  source 1..80: mol_type = other DNA
atgaagatggcgtcgaatgacgccgctccatctaatgggtccgcggccaacctcgtcccagagatcaacactgagaccct

SEQ ID NO: 97786 - DNA, 80 bp, synthetic construct
  source 1..80: mol_type = other DNA
ttcgctgccgtaccaccaaatttcccagttgagttcttaagtcctgcccaaatcactatgctcccacatttgatagtgga

SEQ ID NO: 97787 - DNA, 80 bp, synthetic construct
  source 1..80: mol_type = other DNA
ccctagagccaattatgatacctctccccgatgttaggaacaatttcttccattacaatcaacagactgatccgcgcatt

SEQ ID NO: 97788 - DNA, 80 bp, synthetic construct
  source 1..80: mol_type = other DNA
aacctggtagccatgctgtacacaccacttagatctaataactcgggggacgatgtcttcacagtctcttgcagggtcct

SEQ ID NO: 97789 - DNA, 80 bp, synthetic construct
  source 1..80: mol_type = other DNA
cacgagaccatcccccgattttgattttatatttctagtgccacccacagttgagtcaagaactaagccattctctgtcc

SEQ ID NO: 97790 - DNA, 80 bp, synthetic construct
  source 1..80: mol_type = other DNA
tcccctggaaccagtggctggtgcagctattgctgcggctgtcactggtcaaaacaatataattgatccctggattagaa

SEQ ID NO: 97791 - DNA, 80 bp, synthetic construct
  source 1..80: mol_type = other DNA
gcgaaagagaaaccggagcagctctctcgacgcaggactcggcttgctgaagcgcgcacagccaagcagccatgcaaatg

SEQ ID NO: 97792 - DNA, 80 bp, synthetic construct
  source 1..80: mol_type = other DNA
gcctagtcctgcgtcgagagagctcctctggtttttctttcgcctgaaagcgaaagaaaaaccagaggagctctctcgac

SEQ ID NO: 97793 - DNA, 80 bp, synthetic construct
  source 1..80: mol_type = other DNA
ctaggtctgttgtgtgactctggtaactagcacagggacctgaaagcgacagggacctgaaagcgaaagcgtctgttgtg

SEQ ID NO: 97794 - DNA, 80 bp, synthetic construct
  source 1..80: mol_type = other DNA
tctgttgtgtgactctctagttaccagagtcacacaacagacaatcacaaaaacaagttgacctttttgtgatccttgag

SEQ ID NO: 97795 - DNA, 80 bp, synthetic construct
  source 1..80: mol_type = other DNA
cagggacctgaaagcgaaagtctgttgtgtgactctggtaactagccatctctagcagtggcgccctgttgtgtgactct

SEQ ID NO: 97796 - DNA, 80 bp, synthetic construct
  source 1..80: mol_type = other DNA
ggtaactagcgtctgttgtgtgactctggtaactagagatccctcatggctctagcagtggcgcccgaacagactctggt

SEQ ID NO: 97797 - DNA, 80 bp, synthetic construct
  source 1..80: mol_type = other DNA
tgtgactctggtaactagagatccctcatggctctagcagtggcgcccgaacagactctggtaactagagatccctcatg

SEQ ID NO: 97798 - DNA, 80 bp, synthetic construct
  source 1..80: mol_type = other DNA
aatctctagcagtggcgcccgaacaaaatctctagcagtggcgcccgaacaaaatctctagcagtggcgcccgaacaggg

SEQ ID NO: 97799 - DNA, 80 bp, synthetic construct
  source 1..80: mol_type = other DNA
gttgtgtgactctggtaactagacagggacctgaaagcgaaaaggaaaccagagaagatctctcgacgcaggactcggct

SEQ ID NO: 97800 - DNA, 80 bp, synthetic construct
  source 1..80: mol_type = other DNA
cgcctagcgtttcatcacatggccaaagagctgcatccggagtacttcaaagattgctgacatcgagctttctacaattg

SEQ ID NO: 97801 - DNA, 80 bp, synthetic construct
  source 1..80: mol_type = other DNA
tccacgaacctaagaaaataagataagtggcaagtggtcaaaacgcagagaagatagatagtctaccataaaagaaagaa

SEQ ID NO: 97802 - DNA, 80 bp, synthetic construct
  source 1..80: mol_type = other DNA
gacctgaaagcgaaagagaaaccagaggagctctctcgacgcaggactcggaaatgggaaaaaattcggttaaggccagg

SEQ ID NO: 97803 - DNA, 80 bp, synthetic construct
  source 1..80: mol_type = other DNA
tagcacagggacctgaaagcgaaagacgtctgttgtgtgactctggtaactagcacagggacctgaaagcgaaaggcgcc

SEQ ID NO: 97804 - DNA, 80 bp, synthetic construct
  source 1..80: mol_type = other DNA
gactctggtaactagactacagggacctgaaagcgaaagagaaaccggaggaggctctcgacgcaggactcggcttgccg

SEQ ID NO: 97805 - DNA, 80 bp, synthetic construct
  source 1..80: mol_type = other DNA
ccccaataatactaataatactactaataataccactgtaaagccagagatagtagaagatgtaaaaaactgctctttca

SEQ ID NO: 97806 - DNA, 80 bp, synthetic construct
  source 1..80: mol_type = other DNA
acatcaccgcaagcataaaagacaaggtgcagaaaggatatgcagtgtttaatacacttgatatagtgccaatagagaat

SEQ ID NO: 97807 - DNA, 80 bp, synthetic construct
  source 1..80: mol_type = other DNA
cgaacagactctggtaactagagatccctcacgtctgttgtgtgactctggtaactagagatccctcacgtctgttgtgt

SEQ ID NO: 97808 - DNA, 80 bp, synthetic construct
  source 1..80: mol_type = other DNA
ccccaataatactactaataataccactgtaaagccagagatagtagaagatgtaaaaaactgctctttcaacatcaccg

SEQ ID NO: 97809 - DNA, 80 bp, synthetic construct
  source 1..80: mol_type = other DNA
gtctgttgtgtgactctggtaactagcgtctgttgtgtgactctggtaactagacagggacctgaaagcgaaacgtctgt

SEQ ID NO: 97810 - DNA, 80 bp, synthetic construct
  source 1..80: mol_type = other DNA
agcaaacatagaaggagacataaaacgagcatattgtaacattagtagagtacaatggaataacactttaaaacaaatag

SEQ ID NO: 97811 - DNA, 80 bp, synthetic construct
  source 1..80: mol_type = other DNA
ggtgaagggaagctcagaatatttgggactaagattaaaataaataagtaaataaataaaactatacaggtggaaccaaa

SEQ ID NO: 97812 - DNA, 80 bp, synthetic construct
  source 1..80: mol_type = other DNA
agcattgactatgtacccaccaggcaccattaggtgcttaccatatatcagttcatttcatctttacaaccctgaggggg

SEQ ID NO: 97813 - DNA, 80 bp, synthetic construct
  source 1..80: mol_type = other DNA
gtctatatcaaccccattttacaaagtaggaaattgggtattagagaggctatataacttgttcaagatcacagagctac

SEQ ID NO: 97814 - DNA, 80 bp, synthetic construct
  source 1..80: mol_type = other DNA
acagaggattccctatcccaatacagatgtttaactccctgacttcccagcctctcctctgctttaacagcagacaagga

SEQ ID NO: 97815 - DNA, 80 bp, synthetic construct
  source 1..80: mol_type = other DNA
actaagccattaggagaatgattgggggcggggagcaaacactaatatagatgcggcacagcaagcagcagctgacacag

SEQ ID NO: 97816 - DNA, 80 bp, synthetic construct
  source 1..80: mol_type = other DNA
agcactttgcaaatagccattgaatgaatatcagtactggccaaaaaaaaaaaaattgacctaatcaacaccacttactg

SEQ ID NO: 97817 - DNA, 80 bp, synthetic construct
  source 1..80: mol_type = other DNA
caacttacttgaagaatcgcaaatctaacaaaaaaagaatgaaaaagaattattagaactagatcaataggcacatttgt

SEQ ID NO: 97818 - DNA, 80 bp, synthetic construct
  source 1..80: mol_type = other DNA
gtaagacaaagaaattcaaaattacacaaagataatatacaacttacttaaagaatcgcaaatccaacaaaaaaagaata

SEQ ID NO: 97819 - DNA, 80 bp, synthetic construct
  source 1..80: mol_type = other DNA
accagatctgagcctgggatgcctcaataaagcttgccttgagtgcttcaagtagtgtgtgcccgtctgttgtgtgactc

SEQ ID NO: 97820 - DNA, 80 bp, synthetic construct
  source 1..80: mol_type = other DNA
ttcaagtccctgttcgggcgccaaggacctgaaagcgaaagagaaaccagaggagctctctcgacgcaggactgagcttc

SEQ ID NO: 97821 - DNA, 80 bp, synthetic construct
  source 1..80: mol_type = other DNA
gacctgaaagcgaaagagaaaccagaggagctctctcgacgcaggactcggcttgctgagaacaaaacaaaagtaagaaa

SEQ ID NO: 97822 - DNA, 80 bp, synthetic construct
  source 1..80: mol_type = other DNA
acctgaaagcgaaagagaaaccagaggagctctctcgacgcaggactcggcttgctgaagcgcgcacagcctttttgact

SEQ ID NO: 97823 - DNA, 80 bp, synthetic construct
  source 1..80: mol_type = other DNA
gaaagcgaaagagaaaccagaggagctctctcgacgcaggactcggcttgctgaagcgcgcacggctttaaaacatatag

SEQ ID NO: 97824 - DNA, 80 bp, synthetic construct
  source 1..80: mol_type = other DNA
ggacctgaaagcgaaagagaaaccagaggagctctctcgacgcaggactcggcttgctgaagcgcgcacagcaagaggcg

SEQ ID NO: 97825 - DNA, 80 bp, synthetic construct
  source 1..80: mol_type = other DNA
taatagagcttcctttagttgcccccctatctctagcgtggcgcccgaacagggacttgaaagcggcatgccagggagtg

SEQ ID NO: 97826 - DNA, 80 bp, synthetic construct
  source 1..80: mol_type = other DNA
gaaagcgaaagagaaaccagaggagctctctcgacgcaggactcggcttgctgaagcgcgcacagcaaattaccctatag

SEQ ID NO: 97827 - DNA, 80 bp, synthetic construct
  source 1..80: mol_type = other DNA
ggacctgaaagcgaaagagaaaccagaggagctctctcgacgcaggactcggcttgctgaagcgggggagaattagacaa

SEQ ID NO: 97828 - DNA, 80 bp, synthetic construct
  source 1..80: mol_type = other DNA
tgagagaagaactacacagaagactgagctgctggcaaacgggctgtcttctcagacagtcactgagggctttaggcact

SEQ ID NO: 97829 - DNA, 80 bp, synthetic construct
  source 1..80: mol_type = other DNA
ggaagcttacccagtgcaggtaaaatggaaggtgcgctaacctgggttcaaactctgactcctccacttatttaaccaga

SEQ ID NO: 97830 - DNA, 80 bp, synthetic construct
  source 1..80: mol_type = other DNA
cctgaaagcgaaagaaaaaccagaggagctctctcgacgcaggactcggcttgctgaagcgcgcaggaagctgcagaatg

SEQ ID NO: 97831 - DNA, 80 bp, synthetic construct
  source 1..80: mol_type = other DNA
ttctaatactactacttggggagaaatgacaaactgcactttcaatatcaccacaagcataaaggataagatgaaaaaag

SEQ ID NO: 97832 - DNA, 80 bp, synthetic construct
  source 1..80: mol_type = other DNA
agtcacagaaagcataggtgctggctctattttcaaaatacacgctgaataggatcactactcatcagctctaacgctac

SEQ ID NO: 97833 - DNA, 80 bp, synthetic construct
  source 1..80: mol_type = other DNA
ctactggaccaagccatcatctataatgtgggttataaaatggtctcctaacaagtctttttggaatgattaaaacatct

SEQ ID NO: 97834 - DNA, 80 bp, synthetic construct
  source 1..80: mol_type = other DNA
tttttggaatgattaaaacatcttctatcttgattgtggtcaaattcatcaagctgtacactttttatgggtagattttc

SEQ ID NO: 97835 - DNA, 80 bp, synthetic construct
  source 1..80: mol_type = other DNA
ggaaggagaaatacaaaactgttctttcctggtcaccccaagcataagagataaaacgaaacaagagtatgcacttttta

SEQ ID NO: 97836 - DNA, 80 bp, synthetic construct
  source 1..80: mol_type = other DNA
atagacttgatatagtaccaataaatgatggtaatactagtgagggaaatattagctataggttggtaagttgtaacacc

SEQ ID NO: 97837 - DNA, 80 bp, synthetic construct
  source 1..80: mol_type = other DNA
aaacagggacctgaaagcgacgtctgttgtgtgactctggtaactaccgacagggacctgaaagcgaaagagaaaccaga

SEQ ID NO: 97838 - DNA, 80 bp, synthetic construct
  source 1..80: mol_type = other DNA
aaataaaaaactgttctttctgggtcaccccaagcataagagatacaaagaaaacagagcgtgcattttttaatagactt

SEQ ID NO: 97839 - DNA, 80 bp, synthetic construct
  source 1..80: mol_type = other DNA
agggggacagggacctgaaagcgaaagagaaaccagaggagatctctcgacgcaggactcggcttgctgacggaaaatta

SEQ ID NO: 97840 - DNA, 80 bp, synthetic construct
  source 1..80: mol_type = other DNA
ggaggaggaaggagaaataaaaaactgttctttcctggtcaccccaagcataagagataaacagaaaacagagtatgcac

SEQ ID NO: 97841 - DNA, 80 bp, synthetic construct
  source 1..80: mol_type = other DNA
taaaagcagcagcagcatatcaagtcctagaagaacagagagcaagcacaagtagcaatacagcaactaacaatactagt

SEQ ID NO: 97842 - DNA, 80 bp, synthetic construct
  source 1..80: mol_type = other DNA
ctgaaagcgaaagagaaaccagaggagatctctcgacgcaggactcggcttgctgaagcgccctagaaggagagagatgg

SEQ ID NO: 97843 - DNA, 80 bp, synthetic construct
  source 1..80: mol_type = other DNA
cagcaacagcatctcgagtcctagaagaacaaggagcaagcacaagtagcaatacagcaactaacaatgttaatgctgaa

SEQ ID NO: 97844 - DNA, 80 bp, synthetic construct
  source 1..80: mol_type = other DNA
actctggtaactagacagggtcctgaaagcgaaagacagggacctgaaagcgaaagacgtctgttgtgtgactctggtaa

SEQ ID NO: 97845 - DNA, 80 bp, synthetic construct
  source 1..80: mol_type = other DNA
gcgaaagacaggacctgaaagcgaacgacagggacctgaaagcgaaagagaaaccagaggagatctctcgacgcaggact

SEQ ID NO: 97846 - DNA, 80 bp, synthetic construct
  source 1..80: mol_type = other DNA
cctggaagaacagggaacaagcacaagtagcaatacagcaactaacaatgctaatgctgaagcacaagaggaggaagtgg

SEQ ID NO: 97847 - DNA, 80 bp, synthetic construct
  source 1..80: mol_type = other DNA
aagcagcagcatctcgagtcatggaagaacagagagcaagcacaagtagcaatatagcaactaacaatgctaatgctgaa

SEQ ID NO: 97848 - DNA, 80 bp, synthetic construct
  source 1..80: mol_type = other DNA
tatcataggcagcgtcaacaaagtatcagaaacagccaaaaagcgaaagtaagaccagagaagctctctcgacgcaggac

SEQ ID NO: 97849 - DNA, 80 bp, synthetic construct
  source 1..80: mol_type = other DNA
cctcagactctggtaactagagatccctcagactctggtaactagagatccctcaaatctctagcagtggcgcccgaaca

SEQ ID NO: 97850 - DNA, 80 bp, synthetic construct
  source 1..80: mol_type = other DNA
agtgtgtgcccgtctgttgtgtgactctggtaactagcacagggacctgaaagcgaaaggtctgttgtgtgactctggta

SEQ ID NO: 97851 - DNA, 80 bp, synthetic construct
  source 1..80: mol_type = other DNA
actagcgacagggacctgaaagcgaaaggtctgttgtgtgactctggtaactagcgtctgttgtgtgactctggtaacta

SEQ ID NO: 97852 - DNA, 80 bp, synthetic construct
  source 1..80: mol_type = other DNA
aacagatgacaaactgctctttcaatgtcaccaatataggaaatgagaggcggaaagagtatgcactttttgataaactt

SEQ ID NO: 97853 - DNA, 80 bp, synthetic construct
  source 1..80: mol_type = other DNA
gatttagtacaactaaagaatgatagtaaaagctatatgggtaatacaagctttaggttgatacactgtaacacctcagt

SEQ ID NO: 97854 - DNA, 80 bp, synthetic construct
  source 1..80: mol_type = other DNA
tggaacaaatgacagaacagatgacaaactgctctttcaatgtcaccaatataggaaatgagaggcggaaagagtatgca

SEQ ID NO: 97855 - DNA, 80 bp, synthetic construct
  source 1..80: mol_type = other DNA
ctttttgataaacttgatttagtacaactaaagaatgatagtaaaagctatatgagtaatacaagctttaggttgataca

SEQ ID NO: 97856 - DNA, 80 bp, synthetic construct
  source 1..80: mol_type = other DNA
acaaactgctctttcaatgtcaccaatataggaaatgagaggcggaaagagtatgcactttttgataaacttgatttagt

SEQ ID NO: 97857 - DNA, 80 bp, synthetic construct
  source 1..80: mol_type = other DNA
aagtaagaccagagaagctctctcgacgcaggactcggcttgctgaagcgcgcacggcaagaggcgaggaaagaaaaaat

SEQ ID NO: 97858 - DNA, 80 bp, synthetic construct
  source 1..80: mol_type = other DNA
gaaagcgaaagagaaaccagagaagctctcttgacgcaggactcggcttgctgttaaccgaaaggttggaggttttatca

SEQ ID NO: 97859 - DNA, 80 bp, synthetic construct
  source 1..80: mol_type = other DNA
gtgcccgtctgttgtgtgactctggtaactaggtctgttgtgtgactctggtaactagagatccctcagactctggtggg

SEQ ID NO: 97860 - DNA, 80 bp, synthetic construct
  source 1..80: mol_type = other DNA
tgtgactctggtaactagagatccctcagactctggtggggggactctggtaactagagatccctcacgtctgttgtgtg

SEQ ID NO: 97861 - DNA, 80 bp, synthetic construct
  source 1..80: mol_type = other DNA
ttctttccaggtcaccccaagcataagagatagaaagaaaacagagtatgcattttttaatagacttgatatagtaccaa

SEQ ID NO: 97862 - DNA, 80 bp, synthetic construct
  source 1..80: mol_type = other DNA
agcgaaagaatgagaagagcacatagggtagaagaagcagcagcatctcgagtcatggaagaacagagagcaagcacaag

SEQ ID NO: 97863 - DNA, 80 bp, synthetic construct
  source 1..80: mol_type = other DNA
agttgcgaggaaataaagaaggaaataaaaaactgttctttctggatcaccccaagcataagagataacaggaaaaaaga

SEQ ID NO: 97864 - DNA, 80 bp, synthetic construct
  source 1..80: mol_type = other DNA
agcagaagagatcacacctggtagatataggacagcaatctgtggactttatcctgcacaaattaaggcaagacaaatga

SEQ ID NO: 97865 - DNA, 80 bp, synthetic construct
  source 1..80: mol_type = other DNA
cattaggcaatatggaaacaaaagagtccaaggctatacgccagcatgcagaggcagcaggctgtagcatgattgaggac

SEQ ID NO: 97866 - DNA, 80 bp, synthetic construct
  source 1..80: mol_type = other DNA
aaaataagcagtttaacgtagaaaatagttcagataaatggaaatttttcgaaatgtttaaaggtagtagtcagagtgat

SEQ ID NO: 97867 - DNA, 80 bp, synthetic construct
  source 1..80: mol_type = other DNA
tgaaatatttagagcaagaactcatgacatttttccataggggagaactacaaaacccttataaaattacatttaaagta

SEQ ID NO: 97868 - DNA, 80 bp, synthetic construct
  source 1..80: mol_type = other DNA
caaaaaaggggatgatgatgggcatgttcaacatgctgagtacagtcctaggggtttcaatcctaaatcttggacagaaa

SEQ ID NO: 97869 - DNA, 80 bp, synthetic construct
  source 1..80: mol_type = other DNA
ctggaaggattaagaaggaagagtttgctgagatcatgaagatctgttccaccattgaagagctcagacggcaaaaatag

SEQ ID NO: 97870 - DNA, 80 bp, synthetic construct
  source 1..80: mol_type = other DNA
caattgggagctacctgataagagcgctgacactgaacacaatgaccaaggatgcggaaagaggcaaattgaagaggcgt

SEQ ID NO: 97871 - DNA, 80 bp, synthetic construct
  source 1..80: mol_type = other DNA
cattcattgtaatagcgacactggtaacaaccggaaaatcagacaaaatatgtgttggatatcatgctaacaattcaaca

SEQ ID NO: 97872 - DNA, 80 bp, synthetic construct
  source 1..80: mol_type = other DNA
caggaatctcctttggataataaaacacaccacatcatcatatccagtacttaaaggaactttcagaaacactggagaca

SEQ ID NO: 97873 - DNA, 80 bp, synthetic construct
  source 1..80: mol_type = other DNA
atactatactagagaagaatgtaaccgtcacacactccgtggaattgctggagaaccagaaggaagaaagattctgcaaa

SEQ ID NO: 97874 - DNA, 80 bp, synthetic construct
  source 1..80: mol_type = other DNA
gcaggggaattttcacaaccactcaagatggagacagtatcactaataactatactactagtagcaacagtaagcaatgc

SEQ ID NO: 97875 - DNA, 80 bp, synthetic construct
  source 1..80: mol_type = other DNA
tgtgatccattgctgggaggaagagaatggtcctatatcgtcgagaggccatcagctgttaacggattgtgttaccccgg

SEQ ID NO: 97876 - DNA, 80 bp, synthetic construct
  source 1..80: mol_type = other DNA
atctaatagctccatggtatggatacattctttcaggagagagccacggaagaatcctaaagactgaccacggaagaatc

SEQ ID NO: 97877 - DNA, 80 bp, synthetic construct
  source 1..80: mol_type = other DNA
ctaaagactgatttaaaaaggggtagctgcacagtgcagtgtcagacagagaaaggtggcttaaacacaacattgccctt

SEQ ID NO: 97878 - DNA, 80 bp, synthetic construct
  source 1..80: mol_type = other DNA
cagccggaagatcagacaaaatctgcattgggtatcatgccaataattcaacgacacgggtagatactatacttgagaag

SEQ ID NO: 97879 - DNA, 80 bp, synthetic construct
  source 1..80: mol_type = other DNA
cgatactggtaacaaccggaaaatcagacaagatatgcattggatatcatgctaacaattcaacgacaaaggtggataca

SEQ ID NO: 97880 - DNA, 80 bp, synthetic construct
  source 1..80: mol_type = other DNA
ttcagggtcaggttatgagagttttagggtgataaatggttggaggatgggtaattcaaagtcagagataaatagggaag

SEQ ID NO: 97881 - DNA, 80 bp, synthetic construct
  source 1..80: mol_type = other DNA
tattgggggatgttgtctgttgaaggcaaagaatgcatcaacaggtgtttttatgtggagttgataagagggagaccaca

SEQ ID NO: 97882 - DNA, 80 bp, synthetic construct
  source 1..80: mol_type = other DNA
gaagacaacagcaaccggctctgcctctccaatcatcgcgacaacatgtctccccatgcaaaccgccatcccagcaacga

SEQ ID NO: 97883 - DNA, 80 bp, synthetic construct
  source 1..80: mol_type = other DNA
attatttataagagaaggggaaattataaatattagcccattgtcaggaagtgcccagcacgttgaggaatgctcttgtt

SEQ ID NO: 97884 - DNA, 80 bp, synthetic construct
  source 1..80: mol_type = other DNA
gaaatagtgtatttgaacaacaccattatagaaaaggagccttgcttcaaaatggtagaatacaggaattggtcgaaacc

SEQ ID NO: 97885 - DNA, 80 bp, synthetic construct
  source 1..80: mol_type = other DNA
atgaatccaaatcagaagataataacaattggtgtagtgaacacaaccctatcagcaatagcccttctcattggaattgg

SEQ ID NO: 97886 - DNA, 80 bp, synthetic construct
  source 1..80: mol_type = other DNA
gttgggaaggacagtatcaactaccggaagatcaggctttgaaatcatcaaggttacagagggatggatcaactccctca

SEQ ID NO: 97887 - DNA, 80 bp, synthetic construct
  source 1..80: mol_type = other DNA
atcatgctaaatcagttacacaaacactagtatcgaacactgattggtcaggttattcagggagtttcattattgagaac

SEQ ID NO: 97888 - DNA, 80 bp, synthetic construct
  source 1..80: mol_type = other DNA
aatggctgtttccagccctgcttctatattgaactcatacggggaaggcccaataggaacgacgacgtttcttggacaag

SEQ ID NO: 97889 - DNA, 80 bp, synthetic construct
  source 1..80: mol_type = other DNA
caatagtatagttactttctgtggactagacaatgaacctggatcgggaaattggcctgatggttccaacattgggttta

SEQ ID NO: 97890 - DNA, 80 bp, synthetic construct
  source 1..80: mol_type = other DNA
ttactttctgtggactagacaatgaacctggatcgggaaattggcctgatggttccaacattgggtttatgcccaagtaa

SEQ ID NO: 97891 - DNA, 80 bp, synthetic construct
  source 1..80: mol_type = other DNA
tgataccaaactgcagcgacaccacaattacatacaacaacactgtagtaaacaacataacaacaacaataataaacaaa

SEQ ID NO: 97892 - DNA, 80 bp, synthetic construct
  source 1..80: mol_type = other DNA
gcagaaaagcagttcaagccctcactgccactgtgccccttccgaggcttcttccccttccataaggacaatgcaatacg

SEQ ID NO: 97893 - DNA, 80 bp, synthetic construct
  source 1..80: mol_type = other DNA
attaggtgagaacaaagatgtaatagtcacaagggagccttatgtcagttgtgacaatgatgattgctggtcctttgccc

SEQ ID NO: 97894 - DNA, 80 bp, synthetic construct
  source 1..80: mol_type = other DNA
ttgcccaaggggctctactaggaactaaacacagtaatggaaccatcaaggacaggacaccgtatagatcattgatcagg

SEQ ID NO: 97895 - DNA, 80 bp, synthetic construct
  source 1..80: mol_type = other DNA
tttccaataggaacagccccggtgctgggtaactacaaggagatatgtgttgcttggtcaagtagcagttgtttcgatgg

SEQ ID NO: 97896 - DNA, 80 bp, synthetic construct
  source 1..80: mol_type = other DNA
aaaggaatggatgcatgtttgcatgactggaaatgacaatgatgctagtggccagataatatatgcagggaagatgactc

SEQ ID NO: 97897 - DNA, 80 bp, synthetic construct
  source 1..80: mol_type = other DNA
aagagtctgaatgtcaatgcattgacggaacctgtattgtcgctgtcacagatggccctgcagctagtagtgcagatcat

SEQ ID NO: 97898 - DNA, 80 bp, synthetic construct
  source 1..80: mol_type = other DNA
cgaatttactggatacaggaagggaagataataaagtatgaaaacattcccaaaacaaagatacagcatttagaggaatg

SEQ ID NO: 97899 - DNA, 80 bp, synthetic construct
  source 1..80: mol_type = other DNA
gaatctgattttcaacactgttatacatgagaaagtaggagtccaccaaaatgtggtatacccaacaataacacccccag

SEQ ID NO: 97900 - DNA, 80 bp, synthetic construct
  source 1..80: mol_type = other DNA
ttcttgctatgtggacaccgatgtgtactgcatatgtagggacaattggaaaggttctaacaggccttggatgaggatca

SEQ ID NO: 97901 - DNA, 80 bp, synthetic construct
  source 1..80: mol_type = other DNA
acaatgagaccatactagaaacagggtatgtatgcagcaaattccattcagacactcccaggccagctgatccttcaaca

SEQ ID NO: 97902 - DNA, 80 bp, synthetic construct
  source 1..80: mol_type = other DNA
gtgtcatgtgattccccaagtaacatcaatggaggacctggagtcaaaggatttggctttagagcgggtaatgatgtatg

SEQ ID NO: 97903 - DNA, 80 bp, synthetic construct
  source 1..80: mol_type = other DNA
gacatcaacgctatggcttctcaaggcaccaaacgatcttatgagcagatggaaactaatggagagcgccagaatgccac

SEQ ID NO: 97904 - DNA, 80 bp, synthetic construct
  source 1..80: mol_type = other DNA
cagtgggagaaggaaaggatggtgggattcattgtacagaaggatgagatggttgagtgaaaagaagaagggttacggaa

SEQ ID NO: 97905 - DNA, 80 bp, synthetic construct
  source 1..80: mol_type = other DNA
gggaagatggtgaatacagaaataatgaaggaaagaagattgttttgatgtggggtataaatgagggagtgagggatagt

SEQ ID NO: 97906 - DNA, 80 bp, synthetic construct
  source 1..80: mol_type = other DNA
ggggagacaaatctgtacaccagaaccgacacaacaacgagtgtggcaacagaggaaatgaataggatctttaaaccatt

SEQ ID NO: 97907 - DNA, 80 bp, synthetic construct
  source 1..80: mol_type = other DNA
agacggaattacaaccaaggtcaattccataattgataagatgaacacacaatttgaggctgtaggtcatgaattttcaa

SEQ ID NO: 97908 - DNA, 80 bp, synthetic construct
  source 1..80: mol_type = other DNA
ccgaaatgggacccgccaccccggaacaccaaatgaggcagaagaatcaaaggcacccaccggaccaggagaaggggcag

SEQ ID NO: 97909 - DNA, 80 bp, synthetic construct
  source 1..80: mol_type = other DNA
aaagacccgagatgtctcccaaaagcacatgggcaggagtggacaccaacagtggagcaacaagctcccgtccccccggc

SEQ ID NO: 97910 - DNA, 80 bp, synthetic construct
  source 1..80: mol_type = other DNA
agtggcccatccctctacaggaatcccccccggacaacaaaacacaccacaccaccatatccagtacttaaaggaacttt

SEQ ID NO: 97911 - DNA, 80 bp, synthetic construct
  source 1..80: mol_type = other DNA
cagaaacactggagacaagtcggttctctatttttggggtgtacaccacccaattgacacaactgagcaaaatgttctgt

SEQ ID NO: 97912 - DNA, 80 bp, synthetic construct
  source 1..80: mol_type = other DNA
ccaaacatgaatgagaccaacccaacaacaacaaacatcactaacattataatgaataaaacaacaaacatcactaacat

SEQ ID NO: 97913 - DNA, 80 bp, synthetic construct
  source 1..80: mol_type = other DNA
tataatgaataaaaccgaagaaagaacatttctcaaattgaccaagccgctatgtgaagtcaactcatggcacattctat

SEQ ID NO: 97914 - DNA, 80 bp, synthetic construct
  source 1..80: mol_type = other DNA
gacaaattgctctttcaatgtaaccacaatagtaagagataggactcagacaaaatctgcattattttataaacttgatg

SEQ ID NO: 97915 - DNA, 80 bp, synthetic construct
  source 1..80: mol_type = other DNA
atgaaagcaagattatttgtattattctgtgcattcactgcattaaaagctgacaccatttgtgtaggctaccatgccaa

SEQ ID NO: 97916 - DNA, 80 bp, synthetic construct
  source 1..80: mol_type = other DNA
aacactggtgattgtactactagtagtaacaacaagcaatgcagataaaatctgcatcggtcaccaatcaacaaattcca

SEQ ID NO: 97917 - DNA, 80 bp, synthetic construct
  source 1..80: mol_type = other DNA
aagagcgacagccattctaaggaaagcaaccagaaggctaatccaattaatagtgagtgggagggacgagcagtcaatcg

SEQ ID NO: 97918 - DNA, 80 bp, synthetic construct
  source 1..80: mol_type = other DNA
gctttcgctccctgtatacaccaggaggagaggtgagaaatgatgatgttgatcagagtttgatcattgctgctagaaag

SEQ ID NO: 97919 - DNA, 80 bp, synthetic construct
  source 1..80: mol_type = other DNA
tccagcaggacaaatacaccaacctctccaacaaccaaacggtgccatgtgaaccgaccacaacagagaggaacaaaacg

SEQ ID NO: 97920 - DNA, 80 bp, synthetic construct
  source 1..80: mol_type = other DNA
gcacagacgaatttatatacaaggaccgacacaacaacaagtgtaacaacggagactttagataggaccttcaaaccatt

SEQ ID NO: 97921 - DNA, 80 bp, synthetic construct
  source 1..80: mol_type = other DNA
atgttctctcaggtgagagccatgggagaatcctgagaactgatttaagcagcggtaattgtgtggtacaatgtcagact

SEQ ID NO: 97922 - DNA, 80 bp, synthetic construct
  source 1..80: mol_type = other DNA
ttggcgatgctccattccttgataggcttcgccgagaccagaaatctctaaaaggaagaagcataaccctttgtctggaa

SEQ ID NO: 97923 - DNA, 80 bp, synthetic construct
  source 1..80: mol_type = other DNA
atggattcaaacactgtgtcaagctttcaggtagactgctttctttggcatgtccgcaaacgatttgcagactgtgggct

SEQ ID NO: 97924 - DNA, 80 bp, synthetic construct
  source 1..80: mol_type = other DNA
ttgaaccggccactcatgctgggaaacaaatagtgaagcgtatcctaaaagaagaatacaatgaggcatttaaactaact

SEQ ID NO: 97925 - DNA, 80 bp, synthetic construct
  source 1..80: mol_type = other DNA
tggtgatgccccctttcttgataggctccgccgagatcaaaggtccctgagggggagaggcagcactcttggtctggaaa

SEQ ID NO: 97926 - DNA, 80 bp, synthetic construct
  source 1..80: mol_type = other DNA
aaggctggagtggagtctgcagtactaagagggttcttaattctagggaaggagaataaaagatatggaccagcgttgag

SEQ ID NO: 97927 - DNA, 80 bp, synthetic construct
  source 1..80: mol_type = other DNA
cagacacagtccactatcctaaagtgtacaaaacatattttgaaaaagttgaaagattgaagcatgggacatttggtccc

SEQ ID NO: 97928 - DNA, 80 bp, synthetic construct
  source 1..80: mol_type = other DNA
acaaagagaagtcaacaaatcgtaatcccgaatatcgggtctagaccttgggtaagaggtttgtctagtaggataagcat

SEQ ID NO: 97929 - DNA, 80 bp, synthetic construct
  source 1..80: mol_type = other DNA
atgggatcagcaacaaagtgaattcaataattgaaaaaatgaacacccaatttgtttcagtgggcaaggagttcaatgat

SEQ ID NO: 97930 - DNA, 80 bp, synthetic construct
  source 1..80: mol_type = other DNA
gaatgcatggaaagcgtaaagaatggcacgtataattatccaaaatattcaagagaatctaaattgaatagagagaaaat

SEQ ID NO: 97931 - DNA, 80 bp, synthetic construct
  source 1..80: mol_type = other DNA
cgtataatgcagaattgctggttctgttggaaaatgaaaggaccttggattttcatgactctaatgtaaagagcttatat

SEQ ID NO: 97932 - DNA, 80 bp, synthetic construct
  source 1..80: mol_type = other DNA
aaacacagtgtaggatcaactgcatcatgccccaagcaagggaaaaacagtttttatacaaatctactatggctaactga

SEQ ID NO: 97933 - DNA, 80 bp, synthetic construct
  source 1..80: mol_type = other DNA
aaaaaatggttcttatccaaatttaaccatgtcctatatgaacgacaaagagagagaagtccttgtgctatggggtgtcc

SEQ ID NO: 97934 - DNA, 80 bp, synthetic construct
  source 1..80: mol_type = other DNA
ctccaacttacagagaccaacaaaccctatatcagaataatcatacatatgtttcagtcgaatcatctaaatactatcgg

SEQ ID NO: 97935 - DNA, 80 bp, synthetic construct
  source 1..80: mol_type = other DNA
aggttcacaccagaaatagtaaccagaccaaagatcagagaacaagaaggtagaatgaattattattggacactgctaga

SEQ ID NO: 97936 - DNA, 80 bp, synthetic construct
  source 1..80: mol_type = other DNA
aagattgcaaggacatcggtgatttaaaacagtatgatagcgatgagccaaaaattagatcgctggcaagctgggtccaa

SEQ ID NO: 97937 - DNA, 80 bp, synthetic construct
  source 1..80: mol_type = other DNA
cagatggacctccctgttcccaacggtcaaaattcctgcttatggacgccttaaaattgagcattgaggatccaagtcat

SEQ ID NO: 97938 - DNA, 80 bp, synthetic construct
  source 1..80: mol_type = other DNA
cattcctcgataggcttcgccgagaccagaagtctctaagaggaagaagtagcacccttggtctggagattgaaccagct

SEQ ID NO: 97939 - DNA, 80 bp, synthetic construct
  source 1..80: mol_type = other DNA
agacaatggggcagtggctgtattgaaatacaacaacatcataacagacactatcaagagttgggaaaacaaaatattga

SEQ ID NO: 97940 - DNA, 80 bp, synthetic construct
  source 1..80: mol_type = other DNA
cccctattggcgcctgcaattcagaatgcattactccaaacggaagcatacccaatgacaaaccctttcaaaacgtaaac

SEQ ID NO: 97941 - DNA, 80 bp, synthetic construct
  source 1..80: mol_type = other DNA
agcaaaagcaggggaatttcttaattatcaaaatggaagcaataccactgttgactctactactagtggtaacaacaagc

SEQ ID NO: 97942 - DNA, 80 bp, synthetic construct
  source 1..80: mol_type = other DNA
gacatagcatacagatatattaatttgactagagaagacatgataaattattatgctcccaggatccaattcaagcaaac

SEQ ID NO: 97943 - DNA, 80 bp, synthetic construct
  source 1..80: mol_type = other DNA
acagaatgtgagagaaccaggcacattcaaactgacttctagtatgctgagggcagaatctaaagcaatgctggacctcc

SEQ ID NO: 97944 - DNA, 80 bp, synthetic construct
  source 1..80: mol_type = other DNA
tcatttattaggtttatcacagtgtttagagttgggccaggtctagttgatagggacaacctggacacagtgctgctaga

SEQ ID NO: 97945 - DNA, 80 bp, synthetic construct
  source 1..80: mol_type = other DNA
tggtgaatatcaatggggagtttcaaaggtcatgagtattgacttaaataggttactagcactaaacattgcatttgaaa

SEQ ID NO: 97946 - DNA, 80 bp, synthetic construct
  source 1..80: mol_type = other DNA
tgtcacatcattatattctggattcccttcactgatagagaagttgttcgagagaccctttaagtcagcattagaagtat

SEQ ID NO: 97947 - DNA, 80 bp, synthetic construct
  source 1..80: mol_type = other DNA
gtttactggtagcccttgcacaaaataataaagctcgtttttattcaaaggttaagttgttaggtctgacagtagatcag

SEQ ID NO: 97948 - DNA, 80 bp, synthetic construct
  source 1..80: mol_type = other DNA
tctcatcttctgttacaatcattgaggctattcgatatctgtccaattctagacacaacccgagcttgctaaaattatat

SEQ ID NO: 97949 - DNA, 80 bp, synthetic construct
  source 1..80: mol_type = other DNA
ggatttgttatagcaaaaatggctacacgttggagaattgagagtagcgaggattattttgaggcaatagcaaacaacat

SEQ ID NO: 97950 - DNA, 80 bp, synthetic construct
  source 1..80: mol_type = other DNA
ctgccatgacaatgcagtcaccctggcagctccgatttagaaggcaagccaagcagcacaggaaggggtctagaatggat

SEQ ID NO: 97951 - DNA, 80 bp, synthetic construct
  source 1..80: mol_type = other DNA
gatgttttagatacagcaaaatttcctgattctttgtcagttgacctaaagactatgaaggatggagtttaccgtgaact

SEQ ID NO: 97952 - DNA, 80 bp, synthetic construct
  source 1..80: mol_type = other DNA
ccaggtttttactggctcatgctttccacaccattagagacattcggtatcaagcagtagatgcagtgagtaatgtatgg

SEQ ID NO: 97953 - DNA, 80 bp, synthetic construct
  source 1..80: mol_type = other DNA
ccttagaagcaatgtttaatctaaagtttaatattagtactcacaagagccaaccatactatatacctgattataaaggg

SEQ ID NO: 97954 - DNA, 80 bp, synthetic construct
  source 1..80: mol_type = other DNA
ctgatcaaatagatagtaggagagcttgctcatacattttaaacctaatcccagatacacctgcatctcacttaattcat

SEQ ID NO: 97955 - DNA, 80 bp, synthetic construct
  source 1..80: mol_type = other DNA
gtaactccccagtattcaactacaataaggcaacaaaaaggctaacggtcctcgggaaagacgcaggtgcattaacagaa

SEQ ID NO: 97956 - DNA, 80 bp, synthetic construct
  source 1..80: mol_type = other DNA
agcagatacagttcactatcctaaagtatacagaacatattttgaaagagttgaaagattgaagcatggaacctttggtc

SEQ ID NO: 97957 - DNA, 80 bp, synthetic construct
  source 1..80: mol_type = other DNA
aagattgcaaagatatcagtgatttaaagcagtatgatagtgatgagccaaaaattagatcattggcaagctggattcaa

SEQ ID NO: 97958 - DNA, 80 bp, synthetic construct
  source 1..80: mol_type = other DNA
gatccaagtcatgagggggaggggataccgctatatgatgcaatcaaatgtatgaagacatttttcggatggaaagagcc

SEQ ID NO: 97959 - DNA, 80 bp, synthetic construct
  source 1..80: mol_type = other DNA
tccacttcatcgatgagcgaggtgaaacgacaatagtagaatccagtgatccaaatgcactcctaaaacacagatttgaa

SEQ ID NO: 97960 - DNA, 80 bp, synthetic construct
  source 1..80: mol_type = other DNA
agggaaacaccacgccttctaaggttacccgatggacctctttgctctcaaaggtcaaaattcctgctgatggacgcttt

SEQ ID NO: 97961 - DNA, 80 bp, synthetic construct
  source 1..80: mol_type = other DNA
ctagtgctggaaaacaaatagttgagtgcattctggaaaaagagcatgatgaagcactcaaaataagtatcgcctctgtg

SEQ ID NO: 97962 - DNA, 80 bp, synthetic construct
  source 1..80: mol_type = other DNA
atgtaatcaaagcgttaccatttatgaaaacaacacttgggtaaatcagacatatattaacataagcaacaacaattttg

SEQ ID NO: 97963 - DNA, 80 bp, synthetic construct
  source 1..80: mol_type = other DNA
aaactgtttgtactattctgtgtattcactgcattaaaagccgacaccatttgtgtaggctaccatgccaacaactccac

SEQ ID NO: 97964 - DNA, 80 bp, synthetic construct
  source 1..80: mol_type = other DNA
atggaagcaaaactgtttgtattattctgtgcatttactgcattgaaagctgacacaatttgtgtaggctatcatgctaa

SEQ ID NO: 97965 - DNA, 80 bp, synthetic construct
  source 1..80: mol_type = other DNA
tttacgaaaacaacacttgggtaaatcaaacatatgtgaacatcagtaacaacaattttgtagctgaacagacagtagtt

SEQ ID NO: 97966 - DNA, 80 bp, synthetic construct
  source 1..80: mol_type = other DNA
cataatctcaatatggattagccattcaattcaaattgggacccaaaaccagaccgaaacatgcaaccgaagcactatta

SEQ ID NO: 97967 - DNA, 80 bp, synthetic construct
  source 1..80: mol_type = other DNA
cgtacaatgcagaattgttggttctactagaaaatgaaaggaccttggatttccatgacgcaaatgtaaaaagcttatat

SEQ ID NO: 97968 - DNA, 80 bp, synthetic construct
  source 1..80: mol_type = other DNA
atgtaaactgaaaggagtggcaccattacatttgggaaaatgcagcatcgcaggatggattttagggaatccagaatgtg

SEQ ID NO: 97969 - DNA, 80 bp, synthetic construct
  source 1..80: mol_type = other DNA
agatcatggccaaaacacggcatgggagcaactgcagcatgctcgaagcaggggagaagcagtttttataaaaatctgct

SEQ ID NO: 97970 - DNA, 80 bp, synthetic construct
  source 1..80: mol_type = other DNA
atggctaactgagaaaaatggttcttatccaaatctgaacatgtcctatatgaacgacaaaaagagagaagtccttgtgc

SEQ ID NO: 97971 - DNA, 80 bp, synthetic construct
  source 1..80: mol_type = other DNA
gccacgaatgaaaaattagggattacggaggttgggaaagggggccaattaaaatggaacgggaccacaaaatcttgttc

SEQ ID NO: 97972 - DNA, 80 bp, synthetic construct
  source 1..80: mol_type = other DNA
aattagaaaatggaaaaaattaggaccaagggaaaaccgttcccgttttcggttggggggcccaaatgttcttgaactaa

SEQ ID NO: 97973 - DNA, 80 bp, synthetic construct
  source 1..80: mol_type = other DNA
aaattaggaccaagggaaaaccgttcccgttttcggttggggggcccaaatgttcttgaactaaccccgggttccaaaac

SEQ ID NO: 97974 - DNA, 80 bp, synthetic construct
  source 1..80: mol_type = other DNA
actaaccccgggttccaaaaccacccccaaaaaagaaaaaatttggcggggaatttggaaaaagtgggggaagttttttt

SEQ ID NO: 97975 - DNA, 80 bp, synthetic construct
  source 1..80: mol_type = other DNA
aataaccggggatccaaggaaaaccccccaaacagaaaaaattggccgagggaattgggaaaaatggaggcaagtttttt

SEQ ID NO: 97976 - DNA, 80 bp, synthetic construct
  source 1..80: mol_type = other DNA
gccacgaatgaaaaattagggaatacggaggttggaaaaggagtccatcctaatttggatgggacaacaaaacctggtac

SEQ ID NO: 97977 - DNA, 80 bp, synthetic construct
  source 1..80: mol_type = other DNA
aattgaaaattgtaaaaaattgggaccaggggaaaaccttgcccgttttcgggttgggggtccaaatgccttggaaataa

SEQ ID NO: 97978 - DNA, 80 bp, synthetic construct
  source 1..80: mol_type = other DNA
aataaccctttatcccagggcaacccccccaaaacaaaaaattccccggggaatttggaaaaagttggtgcaagttttta

SEQ ID NO: 97979 - DNA, 80 bp, synthetic construct
  source 1..80: mol_type = other DNA
actatatactccttacctcgattcgaagtatggagtacagtatatatagctctttgtcactttttgtagcattatgtgtc

SEQ ID NO: 97980 - DNA, 80 bp, synthetic construct
  source 1..80: mol_type = other DNA
gggataaatcataaattaaatttgacaactacaacatgtactattcgaaattgtaagaagttaggtccaagaaagaatgt

SEQ ID NO: 97981 - DNA, 80 bp, synthetic construct
  source 1..80: mol_type = other DNA
gggataaatcataaaaataaattgaaaactacaacatgtactattccgaattgtaagaagttaggtccaagagaaaattt

SEQ ID NO: 97982 - DNA, 80 bp, synthetic construct
  source 1..80: mol_type = other DNA
tgatttgcaaacgaatttgtacacacgaacagacacgacaacaagcgtgacaacagaaaatttggatagaactttcaaac

SEQ ID NO: 97983 - DNA, 80 bp, synthetic construct
  source 1..80: mol_type = other DNA
ttctctcaggagagagccatgggagaatcctgaagaccaatttaaataacggaaactgtgtggtgcaatgccagactgaa

SEQ ID NO: 97984 - DNA, 80 bp, synthetic construct
  source 1..80: mol_type = other DNA
ttagaccggtggttgttatgatctcaggcagacctggtattggcaaaactcatatggcgagacatctggctaaaaacatc

SEQ ID NO: 97985 - DNA, 80 bp, synthetic construct
  source 1..80: mol_type = other DNA
tgtgggatgattatggaatggggaaccctgtcaaagatgctttaacactacaagagctagctgacacatgcccagtcact

SEQ ID NO: 97986 - DNA, 80 bp, synthetic construct
  source 1..80: mol_type = other DNA
cactcacccaggggtccctgaccgcaagggttgcaggccttgttcatgagagaaaggatgagttccagctacaaggggat

SEQ ID NO: 97987 - DNA, 80 bp, synthetic construct
  source 1..80: mol_type = other DNA
actgtacagtttgacgcaaaatcggaaactgtaattgggataccggacttgacaacagtgcaaaatgaacatgaaaacac

SEQ ID NO: 97988 - DNA, 80 bp, synthetic construct
  source 1..80: mol_type = other DNA
cccggggtggcaacactgtcatttgtgccactcaaggacaagacggagaggcagtcctcgagggaaatgaagaccttggc

SEQ ID NO: 97989 - DNA, 80 bp, synthetic construct
  source 1..80: mol_type = other DNA
cccgggggggcaacactgtcatttgtgccactcaaggacaagacggagaggcagtcctcgagggaaatgaagaccttggc

SEQ ID NO: 97990 - DNA, 80 bp, synthetic construct
  source 1..80: mol_type = other DNA
gtaggcgaggggagtcacagatttagtgaaaagagtgattaggctttcttttcctttttccttcccttttctctctttta

SEQ ID NO: 97991 - DNA, 80 bp, synthetic construct
  source 1..80: mol_type = other DNA
acgctctctcagattacccgttggacctccctgttctcaacgatcaaaattcctactgatggatgccttaaaattaagca

SEQ ID NO: 97992 - DNA, 80 bp, synthetic construct
  source 1..80: mol_type = other DNA
attacgaaaataacacttgggtaaatcagacttatattaacatcagcaacaacaattttgttactgaacagacaacattt

SEQ ID NO: 97993 - DNA, 80 bp, synthetic construct
  source 1..80: mol_type = other DNA
ccagcaaaattagcgggaagttcctctctatgcccaattagcggatgggctatatacagcaaagataacagtgtgagaat

SEQ ID NO: 97994 - DNA, 80 bp, synthetic construct
  source 1..80: mol_type = other DNA
cataatctcaatatggattagccatccaactcaaattgggaaccaaagccagaatgaaacatgcaatagaaacgtcgtca

SEQ ID NO: 97995 - DNA, 80 bp, synthetic construct
  source 1..80: mol_type = other DNA
gaacgagtaagggcccaattgaagaataatgccaaagagataggaaacgggtgctttgaattttaccacaagtgtgacaa

SEQ ID NO: 97996 - DNA, 80 bp, synthetic construct
  source 1..80: mol_type = other DNA
acctcatggccaaaacacagcatagggtcaactgcatcatgccctaagcaagggagaagcagtttttatacaaacctgat

SEQ ID NO: 97997 - DNA, 80 bp, synthetic construct
  source 1..80: mol_type = other DNA
atggctaactgaaaaaaatgggtcttatccaaatttaaccatgtcctatatgaacaacaaagagagagaagtccttgttc

SEQ ID NO: 97998 - DNA, 80 bp, synthetic construct
  source 1..80: mol_type = other DNA
tatggggtgtccaccatccgtccaacatagaggaccaaagggcaatctatcgtagagaaacggcctatgtttctgtgatg

SEQ ID NO: 97999 - DNA, 80 bp, synthetic construct
  source 1..80: mol_type = other DNA
atggaagcaagattgttcgtactattctgtgtattcgctgcactgaaagctgacaccatttgtgtaggctatcatgctaa

SEQ ID NO: 98000 - DNA, 80 bp, synthetic construct
  source 1..80: mol_type = other DNA
atggaagctaaactggttgtattattctgtgcattcactgcactgaaagcagacaccatttgtgtgggctaccatgctaa

SEQ ID NO: 98001 - DNA, 80 bp, synthetic construct
  source 1..80: mol_type = other DNA
atggcttctctcgtatatagacaacttctagcaaactcatacacttcagatatacaagatacgatagatgatatttcagc

SEQ ID NO: 98002 - DNA, 80 bp, synthetic construct
  source 1..80: mol_type = other DNA
aaatgctgaatttaatccagtcagctgtaatggaggtagctataacttccgcttaccagtagggaattggccacaaatga

SEQ ID NO: 98003 - DNA, 80 bp, synthetic construct
  source 1..80: mol_type = other DNA
gaggcggtaatgtgacgttgcactccgacgctgtgacattgtcaacgcaatatactgattttgtgtctcttaattctctg

SEQ ID NO: 98004 - DNA, 80 bp, synthetic construct
  source 1..80: mol_type = other DNA
cgtttcagatttaaaccagaaattggtgagccattttttgaaataactagaacaagggaacgaagactgtatggtttgcc

SEQ ID NO: 98005 - DNA, 80 bp, synthetic construct
  source 1..80: mol_type = other DNA
agctgctaatccaatgaatggtatagactattacgaaactaaaggaagattctcattaatatccttagtaccatcaaatg

SEQ ID NO: 98006 - DNA, 80 bp, synthetic construct
  source 1..80: mol_type = other DNA
acgattatcaaacaccaattcacaattcgactaccgtcagacaagatttagagcaacaaatatcagacttacgggaagaa

SEQ ID NO: 98007 - DNA, 80 bp, synthetic construct
  source 1..80: mol_type = other DNA
tttaatcaactatcatcggaaatagcaatgtctcagttaattgatctagcgctattaccactcgatatgttctctatgtt

SEQ ID NO: 98008 - DNA, 80 bp, synthetic construct
  source 1..80: mol_type = other DNA
ttctggcattaaatctacagttagcgccgtcaaatctgtgacgacatcagtaatgaaaaaattaaagacgtcaactttag

SEQ ID NO: 98009 - DNA, 80 bp, synthetic construct
  source 1..80: mol_type = other DNA
atataccagttgatgagacagtcgaaccaacacttgacggaccttactcagcttcatcgattgtaatacagccgcaatac

SEQ ID NO: 98010 - DNA, 80 bp, synthetic construct
  source 1..80: mol_type = other DNA
cgaaatctgtgtcaactataactgaagaactatctgacgctgctacatctatatcacgcgcatcatccttaaaatctaat

SEQ ID NO: 98011 - DNA, 80 bp, synthetic construct
  source 1..80: mol_type = other DNA
gcgtctgtttggaataatttagtggatacagttactcaaacatcaacagctactagtgacatagcaacgcaaacatcaaa

SEQ ID NO: 98012 - DNA, 80 bp, synthetic construct
  source 1..80: mol_type = other DNA
aatagcgactaagctaagagttaaagaatttgcaacacaaattgacggtgggttaagttttaatgatatatcagcagctg

SEQ ID NO: 98013 - DNA, 80 bp, synthetic construct
  source 1..80: mol_type = other DNA
tattaaaaacgaaaattgataaattagacgcagtacaacctaagatacttccaacactggttgctgattcagttgataaa

SEQ ID NO: 98014 - DNA, 80 bp, synthetic construct
  source 1..80: mol_type = other DNA
ttcattccgtctagagaatatagaatttttgataaagatattgcttatgaaatctctaataatggacgatatttcgcata

SEQ ID NO: 98015 - DNA, 80 bp, synthetic construct
  source 1..80: mol_type = other DNA
atatccgctatagttgactttagaactctgaagaatctgaatgacaattttggtattacaaaggagcaagcctataattt

SEQ ID NO: 98016 - DNA, 80 bp, synthetic construct
  source 1..80: mol_type = other DNA
acttagatctgatccaagagttcttaaagagttcataaatcaaaataatcccataatacgaaatagaatagagcagttaa

SEQ ID NO: 98017 - DNA, 80 bp, synthetic construct
  source 1..80: mol_type = other DNA
tggatattagtgaatccaacgaatcaagatgttgttattgaagctgatgcgcagaataaaaaattcgcgtgtattttact

SEQ ID NO: 98018 - DNA, 80 bp, synthetic construct
  source 1..80: mol_type = other DNA
gccgccaaatactcctgaatctgctagacaatatacaattttagggaaacaagtaacaataagtttgggtaatacggaca

SEQ ID NO: 98019 - DNA, 80 bp, synthetic construct
  source 1..80: mol_type = other DNA
cagtgaattataaattttatgatttattaagtagtgatggtataacttatacgaaatcaatagagcttaccactccgcat

SEQ ID NO: 98020 - DNA, 80 bp, synthetic construct
  source 1..80: mol_type = other DNA
cgattaaatgcgtttatgaaggatactggtaaattatatgcatatagcggtacagtgccaacgattaaaagagaatatca

SEQ ID NO: 98021 - DNA, 80 bp, synthetic construct
  source 1..80: mol_type = other DNA
tacactagataatatagaaaatgtacagactaatataaaatgtgaatattatatagtaccaaatagtcaagtaaatacgc

SEQ ID NO: 98022 - DNA, 80 bp, synthetic construct
  source 1..80: mol_type = other DNA
tagaagaatacttaaaaaatggattgccgcctatccaacaatcacgttatataatgccagttgctcaaaatgttgtaact

SEQ ID NO: 98023 - DNA, 80 bp, synthetic construct
  source 1..80: mol_type = other DNA
ctgtaccgggcaaaaccgaatgaagacatagtgatttcaaaaacttcactttggaaggaaatgcaatataatagagacat

SEQ ID NO: 98024 - DNA, 80 bp, synthetic construct
  source 1..80: mol_type = other DNA
tcaaaaaactgaaaatgttactgttaatccaggaccgtttgctcagacaggttatgccccagtagagtggacacatggag

SEQ ID NO: 98025 - DNA, 80 bp, synthetic construct
  source 1..80: mol_type = other DNA
gctataaatgggctgaaatttcgtttaaaccaatgaattatgagtatacatatgagcgtgatggtgaaacggttgtagcc

SEQ ID NO: 98026 - DNA, 80 bp, synthetic construct
  source 1..80: mol_type = other DNA
catactacatgttctgttgccggaattaataattttggttataattcaggatcgttaccaacagatttcgtagtgtcaag

SEQ ID NO: 98027 - DNA, 80 bp, synthetic construct
  source 1..80: mol_type = other DNA
atggcttctctagtatatagacagcttttagctaattcatacacttcagatttacaagacaatattgatgatatttctgc

SEQ ID NO: 98028 - DNA, 80 bp, synthetic construct
  source 1..80: mol_type = other DNA
gatgattatcaaacaccaatccaaaattcaactacagtaaggctagacttggaacagcaaatagcggatttacgtgaaga

SEQ ID NO: 98029 - DNA, 80 bp, synthetic construct
  source 1..80: mol_type = other DNA
atttaatcagttatcatctgagatagcagtgtctcaacttgtagatttagctttacttccactagatatgttttctatgt

SEQ ID NO: 98030 - DNA, 80 bp, synthetic construct
  source 1..80: mol_type = other DNA
ttaaatctacagttagtgccgtcaaatctgtgacaacatcagtaatgaaaaaattaaagacgtcaactctagcaaaatct

SEQ ID NO: 98031 - DNA, 80 bp, synthetic construct
  source 1..80: mol_type = other DNA
gtgtcaactataactgaagaactatctgacgccgctacatctatatcacgcgcatcatctttaaaatctaatgcgtctgt

SEQ ID NO: 98032 - DNA, 80 bp, synthetic construct
  source 1..80: mol_type = other DNA
ttggaataatttagtggacacagctactcaaacatcaacagctactagtgacatagcgacgcaaacatcaaaaatagcga

SEQ ID NO: 98033 - DNA, 80 bp, synthetic construct
  source 1..80: mol_type = other DNA
ctaagttaagagttaaagaatttgcaacacaaactgacggtgggttgagctttaatgatatatcagcagctgtgttaaag

SEQ ID NO: 98034 - DNA, 80 bp, synthetic construct
  source 1..80: mol_type = other DNA
acgaaaattgataaattagacgtagtacaacctaagatacttccaacactggttgctgattcagttgataaatttattcc

SEQ ID NO: 98035 - DNA, 80 bp, synthetic construct
  source 1..80: mol_type = other DNA
atctagagaatacagaatttttgataaagatattgcctatgaaatctctaataacggacgctatttcgcatataaagtag

SEQ ID NO: 98036 - DNA, 80 bp, synthetic construct
  source 1..80: mol_type = other DNA
ttcttaaagagtttataaaccaaaacaatcccataatacgaaatagaatagagcagttaataatgcaatgtagaatataa

SEQ ID NO: 98037 - DNA, 80 bp, synthetic construct
  source 1..80: mol_type = other DNA
ccataccgcgcaaaaccaaatgaagatatagtgatatcgaagacttcattatggaaagaaatgcaatataatagggacat

SEQ ID NO: 98038 - DNA, 80 bp, synthetic construct
  source 1..80: mol_type = other DNA
cgaaaaaactcaaggagtaacgattaattcaggaccttttgctcaaactggctatgcaccagtagaatggacacatggag

SEQ ID NO: 98039 - DNA, 80 bp, synthetic construct
  source 1..80: mol_type = other DNA
cgtttaagccaatgaattatgagtatacatatgagcgtgatggtgaaactgttgtagctcacactacatgttctgttgcc

SEQ ID NO: 98040 - DNA, 80 bp, synthetic construct
  source 1..80: mol_type = other DNA
ggaattaataattttggttataattcaggatcattaccaacagattttgtagtgtcaaggtacgaagtactaaaaggaaa

SEQ ID NO: 98041 - DNA, 80 bp, synthetic construct
  source 1..80: mol_type = other DNA
ccttggcagccagaaagctaccaatgacagctatagcacaccccctcccaacaaggaggaggctagtgtgctcaccaacg

SEQ ID NO: 98042 - DNA, 80 bp, synthetic construct
  source 1..80: mol_type = other DNA
aagcccgagccagatactacatcagctgcttccaagaccttatctacaccctgattcaggttgccggagcctcattcgtg

SEQ ID NO: 98043 - DNA, 80 bp, synthetic construct
  source 1..80: mol_type = other DNA
gaacggggcgtccttgggctagtcaccggttcagaaattaggaagagaagaccagatgacttccagcctaaaggtaattt

SEQ ID NO: 98044 - DNA, 80 bp, synthetic construct
  source 1..80: mol_type = other DNA
atgaatccaaatcaaaagataatcacaatgggctctatttccatgattatagcaataatatgtctgcttatgcaaattgc

SEQ ID NO: 98045 - DNA, 80 bp, synthetic construct
  source 1..80: mol_type = other DNA
accaattataatagaaaggaacatgacaaggattgtgtatctgaataacacaattatagaaaaagaaaaatgctccaaat

SEQ ID NO: 98046 - DNA, 80 bp, synthetic construct
  source 1..80: mol_type = other DNA
cgattgaatacagaaattggtcgaaaccacaatgcaaaattacagggtttgcacctttttccaaggacaattcaatccga

SEQ ID NO: 98047 - DNA, 80 bp, synthetic construct
  source 1..80: mol_type = other DNA
tatactggtggtgactgtaacatcacattttaaacagcatgagaatggatcctctccaaacaatcaagtaataccgtgtg

SEQ ID NO: 98048 - DNA, 80 bp, synthetic construct
  source 1..80: mol_type = other DNA
cttatgaaaataacacttgggtaaatccgacacctgtcaacctcggcaacaccaattttcctgcgggactcatggtgatt

SEQ ID NO: 98049 - DNA, 80 bp, synthetic construct
  source 1..80: mol_type = other DNA
tccatgaaaatagcaggcaattcctcacgcagccctgttagtggatgggatatatacagtaaagacaggagtatacgaat

SEQ ID NO: 98050 - DNA, 80 bp, synthetic construct
  source 1..80: mol_type = other DNA
ccttactaaatgacaaacattccaatactcctattaagatctggacaccatatcagaccctgatgagcaatcatattgag

SEQ ID NO: 98051 - DNA, 80 bp, synthetic construct
  source 1..80: mol_type = other DNA
gcggtcccctctccacacaactcaagacttgagtcagtcgcttggtcaccaagtgcttgtcatgatggcatcagctgctt

SEQ ID NO: 98052 - DNA, 80 bp, synthetic construct
  source 1..80: mol_type = other DNA
ggtcttcaggatagaaaaagggaagatagtccaatcagtcgaaatgaatgcccgtaattatcactatgagggatgctcct

SEQ ID NO: 98053 - DNA, 80 bp, synthetic construct
  source 1..80: mol_type = other DNA
atgaagaatggcactatcacaattccatgcaaaataaagcaaattgtacgcatgtggcaaggaacggggcaagcaatgta

SEQ ID NO: 98054 - DNA, 80 bp, synthetic construct
  source 1..80: mol_type = other DNA
gactttccgcggggactttccactggggcgttccaggaggtgtggtctgggcgggactgggagtggctaaccctcagatg

SEQ ID NO: 98055 - DNA, 80 bp, synthetic construct
  source 1..80: mol_type = other DNA
aatgatggactacattgtatatagatttttgttcttgattacaatagtgtcattgtatacgaaagctcaaaactatggaa

SEQ ID NO: 98056 - DNA, 80 bp, synthetic construct
  source 1..80: mol_type = other DNA
ttaatttaccgataacagggtcgatggatggtgcgtatactaacatgactgatgataagccatttttaacgtcaacacta

SEQ ID NO: 98057 - DNA, 80 bp, synthetic construct
  source 1..80: mol_type = other DNA
tgtatatactacccaacagtcgcatctactgatttagctgatccagattggaaaaatactgtgtcacagttgtttttgac

SEQ ID NO: 98058 - DNA, 80 bp, synthetic construct
  source 1..80: mol_type = other DNA
ctgaattttcaatcaatccgcaacttttttgtgattacaacgtagtgttgatgaaatatgaatcagatttggagatggat

SEQ ID NO: 98059 - DNA, 80 bp, synthetic construct
  source 1..80: mol_type = other DNA
gctgtaaacgagaaattggtaatcactgacgtagttgatggagtgaatcataaactggacattacaaatgcgacatgtac

SEQ ID NO: 98060 - DNA, 80 bp, synthetic construct
  source 1..80: mol_type = other DNA
caatctcatggatgggtacgatcatgaattgtccgacatcgaataaaatgcattataattatgccagcacaagaccgtct

SEQ ID NO: 98061 - DNA, 80 bp, synthetic construct
  source 1..80: mol_type = other DNA
gggtacgatcatgaattgtccgacatcgaataaaatgcattataattatgccagcacaagaccgtctgcactagagtagc

SEQ ID NO: 98062 - DNA, 80 bp, synthetic construct
  source 1..80: mol_type = other DNA
tccacagtcgccagttccctggtcttgttagtctccctgggggcattctccttgaggatgtgttctaatggatcattgca

SEQ ID NO: 98063 - DNA, 80 bp, synthetic construct
  source 1..80: mol_type = other DNA
taatgttgcaagcaataacaatgctaacaacactagtgctacatctcgatttttatcgagatttaaaggcttaggaggtg

SEQ ID NO: 98064 - DNA, 80 bp, synthetic construct
  source 1..80: mol_type = other DNA
ggagtggttgaaatggttatactgttgcttgaactctttggtgtgttctggaacccacctgatgtgtccaacttcatagc

SEQ ID NO: 98065 - DNA, 80 bp, synthetic construct
  source 1..80: mol_type = other DNA
atcttcaggggcccgaagacttagcacgagacctagtcccagtgatccttggcggtatggggttagctattgggttcacc

SEQ ID NO: 98066 - DNA, 80 bp, synthetic construct
  source 1..80: mol_type = other DNA
acagggactgctggccccccacctaagcaacagagggaccgacctcccaggacccaagaggaggtccagtatggtatggg

SEQ ID NO: 98067 - DNA, 80 bp, synthetic construct
  source 1..80: mol_type = other DNA
ttgttaatctcggcccagtgtgcaggcgggttgacttcctagtttattgttccgctcctgaagtggagcaagtaaggaga

SEQ ID NO: 98068 - DNA, 80 bp, synthetic construct
  source 1..80: mol_type = other DNA
cagttgcagggaaagatgtatgattttgatgatgacagggtctcagcattcacttccatggcacgtgacaacggcctagg

SEQ ID NO: 98069 - DNA, 80 bp, synthetic construct
  source 1..80: mol_type = other DNA
actcactagagtcagatggcagcaatgtcaacattaaagaagagaggaacatcctgactcaacaacaacagtcagtgtgc

SEQ ID NO: 98070 - DNA, 80 bp, synthetic construct
  source 1..80: mol_type = other DNA
gtgaagagaatgtttggcacgcgcactgccaccttgtccctagagggcccccccagagaacacaaatgcagggtccatat

SEQ ID NO: 98071 - DNA, 80 bp, synthetic construct
  source 1..80: mol_type = other DNA
atagcatcaatgcgcatacagggccgtcttgtccacggacaatctggcatgttactcactggagccaacgccaagggcat

SEQ ID NO: 98072 - DNA, 80 bp, synthetic construct
  source 1..80: mol_type = other DNA
tattgtggggggcagatttgggcacggtagtccgtgctgcacgggctttcggcccattctgtgatgccataaagtcccac

SEQ ID NO: 98073 - DNA, 80 bp, synthetic construct
  source 1..80: mol_type = other DNA
tggaatagaacgtctcacaacagtgagtggacctgaatggaacctctgccctctaccccccattgacctgaggaacatgg

SEQ ID NO: 98074 - DNA, 80 bp, synthetic construct
  source 1..80: mol_type = other DNA
agattatacagcttgggactcaactcaaaataggcaaatcatgactgagtcattttcaatcatgtgccgactcacagcat

SEQ ID NO: 98075 - DNA, 80 bp, synthetic construct
  source 1..80: mol_type = other DNA
agcgacttcagcttcttgttcctcgttccacctactatagaacagaaaacccgggctttcactgtgcctaacattcccct

SEQ ID NO: 98076 - DNA, 80 bp, synthetic construct
  source 1..80: mol_type = other DNA
gcaaaccttgtccaattctaggttcccttccctcattcaaggaatgattctatcccctgacacatcccaagtggtccaat

SEQ ID NO: 98077 - DNA, 80 bp, synthetic construct
  source 1..80: mol_type = other DNA
ggaaagataaatcagggaggccgcacactcaaccttacagaggtggatggcaaaccgttcatggcatttgattcccctgc

SEQ ID NO: 98078 - DNA, 80 bp, synthetic construct
  source 1..80: mol_type = other DNA
acccgtggggttccctgattttggaaaatgtgattggcatatgaggatcagcaagactccaaataacacaagagcaggtg

SEQ ID NO: 98079 - DNA, 80 bp, synthetic construct
  source 1..80: mol_type = other DNA
accccatgcgtagtgtcagtgtgcaaaccaacgtgcagggttttgtgcctcatctgggaagcatacagcttgatgaagaa

SEQ ID NO: 98080 - DNA, 80 bp, synthetic construct
  source 1..80: mol_type = other DNA
cttgtgggagattcccgattatgggtcatctctttcccaagcagctaatttggcccctccagtgttcccccccggatttg

SEQ ID NO: 98081 - DNA, 80 bp, synthetic construct
  source 1..80: mol_type = other DNA
gtgaggctcttgtgtacttcacttctgcttttccaggtcccaataatcgttcagtttcaaatgatgtgccttgccttctt

SEQ ID NO: 98082 - DNA, 80 bp, synthetic construct
  source 1..80: mol_type = other DNA
atatgctctcctaccaagtccaggcaagcaacgcactcctagccaaaaatctcaacacccgctattctatgcttgttgca

SEQ ID NO: 98083 - DNA, 80 bp, synthetic construct
  source 1..80: mol_type = other DNA
gcgcaagcccccctagccctataaaaataaagagtactgaaatggccctggggttaattggtaaaacgaccccagaggca

SEQ ID NO: 98084 - DNA, 80 bp, synthetic construct
  source 1..80: mol_type = other DNA
ggagttggtcagggatgctatacttgctgcagtgaatggccttgtctcacaaccttttaaaaatttcttgggtaaactca

SEQ ID NO: 98085 - DNA, 80 bp, synthetic construct
  source 1..80: mol_type = other DNA
ctactgctgctagcaaaaattgtgctagtgacaatagcaatacaattaagaatcgcttattagcgaaacttaaaaatata

SEQ ID NO: 98086 - DNA, 80 bp, synthetic construct
  source 1..80: mol_type = other DNA
aattgtgactggaccttcatgggggtcgtggagactgtgatcctcttgatggaactcttcgggatattctggaacccacc

SEQ ID NO: 98087 - DNA, 80 bp, synthetic construct
  source 1..80: mol_type = other DNA
actcttaccagacatgcacttgcagggccctgaggatttggctagagacttgatacctctaatactcggtggcataggtc

SEQ ID NO: 98088 - DNA, 80 bp, synthetic construct
  source 1..80: mol_type = other DNA
ttggcagaggttcatcaccaacccctcccactgagccccccaagcagcagcgtgaccgtgcaccacggagtgctgctgag

SEQ ID NO: 98089 - DNA, 80 bp, synthetic construct
  source 1..80: mol_type = other DNA
agaagacactaaaagacattgaagcggcagtgatagacatggaagtcatttcaaccacagccataacacaattggttaga

SEQ ID NO: 98090 - DNA, 80 bp, synthetic construct
  source 1..80: mol_type = other DNA
gacaagcaatcagccaggacatatatggctattctagatgcagaagaggagaaagccagaaagctctcagtgaagcatgc

SEQ ID NO: 98091 - DNA, 80 bp, synthetic construct
  source 1..80: mol_type = other DNA
tgacccccatgtggtatccactaccaatgccctcattgcacgcatatcgctagcccgttctgcattggctaaggcgcaag

SEQ ID NO: 98092 - DNA, 80 bp, synthetic construct
  source 1..80: mol_type = other DNA
cagagatgaccaatagagttaaacctgtggtcatcatgatgtgtggtccgccaggcattgggaaaactaaggcagcagag

SEQ ID NO: 98093 - DNA, 80 bp, synthetic construct
  source 1..80: mol_type = other DNA
tctattgttcggcccccgatgtcgagcagacccgtcgcactaatcctggtgacactggggccctcaaggactgcttcaaa

SEQ ID NO: 98094 - DNA, 80 bp, synthetic construct
  source 1..80: mol_type = other DNA
acacaacaggccttggggtgggttgaacaaccactagatcagaatctaccaacctgggaagaactgagtgaagctgagaa

SEQ ID NO: 98095 - DNA, 80 bp, synthetic construct
  source 1..80: mol_type = other DNA
aggcagttgccctcaccatggagcggcaagatgagttccaaatgcaaggaccaacttatgactttgatgttgatagaatc

SEQ ID NO: 98096 - DNA, 80 bp, synthetic construct
  source 1..80: mol_type = other DNA
tggccaagcttgggaagaaactgcggggtgtggattccatccatggtcttaagaatgcactcaatgggtacaccataaca

SEQ ID NO: 98097 - DNA, 80 bp, synthetic construct
  source 1..80: mol_type = other DNA
ccctgtagcataaaatggcaggcaagaatctataatatagaatctgatggcacgacagtaaaaattaaagaggacactgc

SEQ ID NO: 98098 - DNA, 80 bp, synthetic construct
  source 1..80: mol_type = other DNA
agcacagactcaacgccaacacacaattgacaccgcggtgttggccttaacccgcttaagagctgctagggctgcagcat

SEQ ID NO: 98099 - DNA, 80 bp, synthetic construct
  source 1..80: mol_type = other DNA
atgcatcatgtctacaaagtgcaattacaaccattctccagatggcaggctcagcacttgtcattaatcgagctgtcaaa

SEQ ID NO: 98100 - DNA, 80 bp, synthetic construct
  source 1..80: mol_type = other DNA
cgcatgtttggtacccacactaacaccatctcattggaaggtccccccagagaacaccgttgtagggtccacgtggccaa

SEQ ID NO: 98101 - DNA, 80 bp, synthetic construct
  source 1..80: mol_type = other DNA
agccaatggtggcggcccaattgggcacgatgatgtaatagagagatttggcctgtgtgaaactgaagaagatgatgaca

SEQ ID NO: 98102 - DNA, 80 bp, synthetic construct
  source 1..80: mol_type = other DNA
gccaggagcttaaagtcagcctgcccactgccacccatgaaggtaagaacaagggtaagacgaagaaaggcagaggtaga

SEQ ID NO: 98103 - DNA, 80 bp, synthetic construct
  source 1..80: mol_type = other DNA
cgtgccaattacaacgctttctcaaggaggggcctcagtgatgaggaatatgaggagtacaagaagatcagagaagaaaa

SEQ ID NO: 98104 - DNA, 80 bp, synthetic construct
  source 1..80: mol_type = other DNA
acgtgacatcatggcaaggaacgagaactggttcgatgctggtggcctggcaccagcatccatccccagtacgcatgagc

SEQ ID NO: 98105 - DNA, 80 bp, synthetic construct
  source 1..80: mol_type = other DNA
gggatggcggcattggagaaaccgagatggagatccggcatcgtgtcttctataaatccaaaactaggaagaaccggcag

SEQ ID NO: 98106 - DNA, 80 bp, synthetic construct
  source 1..80: mol_type = other DNA
accagttaggtcttgttactgggagtgatatcaggaagagaaagccaattgattggacgccccccaaaaatgagtgggct

SEQ ID NO: 98107 - DNA, 80 bp, synthetic construct
  source 1..80: mol_type = other DNA
gctggggattctgggtcagccctacagtcttcattactacaacccatgtcatcccaacaaatgtgagggaattctttgga

SEQ ID NO: 98108 - DNA, 80 bp, synthetic construct
  source 1..80: mol_type = other DNA
acaccatcgccatccatcgagctggtgaatttacacagctaaggttttctagaaaaataaggcctgatttaaccggcatg

SEQ ID NO: 98109 - DNA, 80 bp, synthetic construct
  source 1..80: mol_type = other DNA
gttcttgaagaaggttgcccagaaggtgtggtctgttcaatcctcataaaaagggactctggagaacttctcccattggc

SEQ ID NO: 98110 - DNA, 80 bp, synthetic construct
  source 1..80: mol_type = other DNA
tgttcggatgggtgccattgcctcaatgaagattcaagggcgcctggtccatggccaatcagggatgctgctgacaggtg

SEQ ID NO: 98111 - DNA, 80 bp, synthetic construct
  source 1..80: mol_type = other DNA
tgttcggatgggtgccattgcctcaatgaagattcaagggcgcctggtccatggccaatcagggatgctgctgacagggg

SEQ ID NO: 98112 - DNA, 80 bp, synthetic construct
  source 1..80: mol_type = other DNA
ggaccttggtactctccccggtgactgtggggctccgtatgtctacaaaaggaacaatgattgggtagtctgtggtgtcc

SEQ ID NO: 98113 - DNA, 80 bp, synthetic construct
  source 1..80: mol_type = other DNA
acgctgcagccacaaaatctgggaatacagttgtgtgtgcagtgcaggcaggtgagggggagaccacactggaaggaggg

SEQ ID NO: 98114 - DNA, 80 bp, synthetic construct
  source 1..80: mol_type = other DNA
acgctgcagccacaaaatctgggaatacagttgtgtgtgcagtgcaggcaggtgaggtggagaccacactggaaggagtg

SEQ ID NO: 98115 - DNA, 80 bp, synthetic construct
  source 1..80: mol_type = other DNA
gtgcccaagatgatgagccatcaggactccaaataaaatggagtgccaatgctggtgttgatcttggggttggggacctc

SEQ ID NO: 98116 - DNA, 80 bp, synthetic construct
  source 1..80: mol_type = other DNA
tttggcggtcaactactgatcctctaccaccaggggtgtatgagccagcttaccttggaggtcgcgaccctagggttaaa

SEQ ID NO: 98117 - DNA, 80 bp, synthetic construct
  source 1..80: mol_type = other DNA
ggcggcccatcactacaacaagtattgagggatcagttgaaaccatttgctgaaccgcgtgggcgtatgcctgaacctgg

SEQ ID NO: 98118 - DNA, 80 bp, synthetic construct
  source 1..80: mol_type = other DNA
tttactagaggcagctgttgagacagtcacatcagtattagagcaggtcatggataccccagttccctggacttatgccg

SEQ ID NO: 98119 - DNA, 80 bp, synthetic construct
  source 1..80: mol_type = other DNA
tgaaacccctttacacagctgcactcaaggatgaattggtcaaacctgagaaagtgtaccagaagattaagaagcggctt

SEQ ID NO: 98120 - DNA, 80 bp, synthetic construct
  source 1..80: mol_type = other DNA
ttgtggggcgctgatctctcaacagtgatccgcgctgctagagcctttggtccattctgtgatgcaataaagccccatgt

SEQ ID NO: 98121 - DNA, 80 bp, synthetic construct
  source 1..80: mol_type = other DNA
acatctgttactggccccgcgtggaacatgtgccctatgccgccaatggaccagcgcaatagtgggcctgcaaaagaacc

SEQ ID NO: 98122 - DNA, 80 bp, synthetic construct
  source 1..80: mol_type = other DNA
agctggcttcagtggtggctaaagaccttctcgcaccatcagagatggatgttggggattatatcataagggtcaaagaa

SEQ ID NO: 98123 - DNA, 80 bp, synthetic construct
  source 1..80: mol_type = other DNA
ggcctcccttcaggcttcccctgcacttcacaagtcaacagcataaaccactggctgatcaccctctgtgctctctctga

SEQ ID NO: 98124 - DNA, 80 bp, synthetic construct
  source 1..80: mol_type = other DNA
ctacacgcccagataagagcgaagggccaatagtattaaggaggcagattgatgggttggtgtttctcaggaggaccata

SEQ ID NO: 98125 - DNA, 80 bp, synthetic construct
  source 1..80: mol_type = other DNA
tcaaaagatgcagctggttttcaaggccgattggacagaggttctattgagagacaactttggtggactcgtggcccaaa

SEQ ID NO: 98126 - DNA, 80 bp, synthetic construct
  source 1..80: mol_type = other DNA
actcattggcgacatgcttgagttttatgagggacgtatataccactatgccatatacatcgggcaaggtaaatccattg

SEQ ID NO: 98127 - DNA, 80 bp, synthetic construct
  source 1..80: mol_type = other DNA
aatgctgaaccactgccacttgacccagtggcgggggcttctactgcccttgccactgctggacaagttaacatgattga

SEQ ID NO: 98128 - DNA, 80 bp, synthetic construct
  source 1..80: mol_type = other DNA
tgcgggttagggttatcttggccggcaatgccttcactgctggtaaagttataatttgttgtgtcccccctggctttcaa

SEQ ID NO: 98129 - DNA, 80 bp, synthetic construct
  source 1..80: mol_type = other DNA
tctagaaccctttctatagctcaggccacactctttcctcatgtcatagctgatgtgcgaactttggaaccaattgagat

SEQ ID NO: 98130 - DNA, 80 bp, synthetic construct
  source 1..80: mol_type = other DNA
ccctctagaggatgttaggaatactctctatcatactaatgataatcaaccaacaatgcgcttactgtgtatgctttaca

SEQ ID NO: 98131 - DNA, 80 bp, synthetic construct
  source 1..80: mol_type = other DNA
caccactgcgcaccggtggcggttctggtggcacagatgcgtttgttgtggcgggccgagtcttaacttgccctagttct

SEQ ID NO: 98132 - DNA, 80 bp, synthetic construct
  source 1..80: mol_type = other DNA
gattttaactttttattcctggtccctcccactgtggagcagaagacacgccccttcagtgtacctaacatacccttgca

SEQ ID NO: 98133 - DNA, 80 bp, synthetic construct
  source 1..80: mol_type = other DNA
gttgctgtctaattcccgtgttcccaacctcatacagagcatggttctctcgcctgatcaggctcagaatgtccaatttc

SEQ ID NO: 98134 - DNA, 80 bp, synthetic construct
  source 1..80: mol_type = other DNA
agaatggccgctgtaccaccgatgggcagctcctgggcacaacacctgtctcagttagtcagattttaaagtttagagga

SEQ ID NO: 98135 - DNA, 80 bp, synthetic construct
  source 1..80: mol_type = other DNA
aaggtatcagctggctctaaagttattaatcttactgaactggatggttccccctttttagcttttgaggccccagcacc

SEQ ID NO: 98136 - DNA, 80 bp, synthetic construct
  source 1..80: mol_type = other DNA
cacaggctttcctgacctggggaccagtgattggcatgttgaaatgagcctcaactcaaatagccagagttctggcaatc

SEQ ID NO: 98137 - DNA, 80 bp, synthetic construct
  source 1..80: mol_type = other DNA
caatcctactaagggacatacaaccaaattcttcagacttcgtgccacatttgggtagtgtatccgtcactgctgcaatt

SEQ ID NO: 98138 - DNA, 80 bp, synthetic construct
  source 1..80: mol_type = other DNA
gaagtggctggagattacactggtacaattcaatggacctctcaaccatccaatgtcactccagtccctgatgttaattt

SEQ ID NO: 98139 - DNA, 80 bp, synthetic construct
  source 1..80: mol_type = other DNA
ctggactatcccccactatggatcaaatttggcagaagcctcccagttggcccctgtggtataccccccgggatttggtg

SEQ ID NO: 98140 - DNA, 80 bp, synthetic construct
  source 1..80: mol_type = other DNA
aagctatagtgtattttatgtctcccataccaggcccaaacactgcacacaaacccaatttagtaccctgcctactccca

SEQ ID NO: 98141 - DNA, 80 bp, synthetic construct
  source 1..80: mol_type = other DNA
caagaatttgtaactcattttgtcagtgagcaagctccatccatgggtgaggcagctcttgtccattacgtggacccaga

SEQ ID NO: 98142 - DNA, 80 bp, synthetic construct
  source 1..80: mol_type = other DNA
caccaaccgcaatttgggcgagttcaaactgtatcctgaaggttttattacttgtgtgccaaatggtactggcccacaac

SEQ ID NO: 98143 - DNA, 80 bp, synthetic construct
  source 1..80: mol_type = other DNA
ggcgagtgtgctatgtcccaagtgctgagcagagactaaattatgaccaacttaaagaacttgagaatgagccatggccg

SEQ ID NO: 98144 - DNA, 80 bp, synthetic construct
  source 1..80: mol_type = other DNA
ttgctgcatcagcggctgggagtgcccttggagctggtatccaagcaggtgctgaggccgccctccagagccaaaggttt

SEQ ID NO: 98145 - DNA, 80 bp, synthetic construct
  source 1..80: mol_type = other DNA
cagcaggacctcactcttcaacaaaattcttttaaacatgataaggagatgatgtcatatcaagttgaaatgtctaatgc

SEQ ID NO: 98146 - DNA, 80 bp, synthetic construct
  source 1..80: mol_type = other DNA
tttgctagctaaaaatcttaatactcgctatgctttacttcaatctggtggtctatctagtgctgatgctgcccgtgctg

SEQ ID NO: 98147 - DNA, 80 bp, synthetic construct
  source 1..80: mol_type = other DNA
tggcaggtgcgcctgtcacaaggattgttgattggaacggtacaagggtggcagccccaaactcctctgcaacaactctt

SEQ ID NO: 98148 - DNA, 80 bp, synthetic construct
  source 1..80: mol_type = other DNA
agatctggtggattcatgtctgtccccatacctgttcaacccaaacagaagccacctaccacctcagggtttaacaatcc

SEQ ID NO: 98149 - DNA, 80 bp, synthetic construct
  source 1..80: mol_type = other DNA
agcatatggagaaactatgtcaagggtttcctcttgggttcagtcccagaattcgagtagaagtatgcctccttttcaca

SEQ ID NO: 98150 - DNA, 80 bp, synthetic construct
  source 1..80: mol_type = other DNA
attctgcccttaggactgtttgggtcacaccaccaggttcaacttcttcttcatctgtttcatctgtgcctatgggtgtg

SEQ ID NO: 98151 - DNA, 80 bp, synthetic construct
  source 1..80: mol_type = other DNA
acaggctccccctattcgcaaataggaggtaatattgttgtaataagaataataatgtgggcatcttattcaatttggtc

SEQ ID NO: 98152 - DNA, 80 bp, synthetic construct
  source 1..80: mol_type = other DNA
ataagaataataatgtgggcatcttattcaatttggtctaattaattatatgattaggtttgatttggacaattgatgtt

SEQ ID NO: 98153 - DNA, 80 bp, synthetic construct
  source 1..80: mol_type = other DNA
tatgccgcagtcaccaataattgctatgaattttgttgtcgagtcatgggcgtgcaagacacttggctcgagcgtcggct

SEQ ID NO: 98154 - DNA, 80 bp, synthetic construct
  source 1..80: mol_type = other DNA
ccataaatggcctagtttcaaaaccatttaaagacctcttggggaagttgaaacctctaaatgttctcaacctactttcc

SEQ ID NO: 98155 - DNA, 80 bp, synthetic construct
  source 1..80: mol_type = other DNA
tgctgatgtcagcaataacaatgctaacaccaacaatgataacattggatcccgcctcatggcgaggatccgtgggcgta

SEQ ID NO: 98156 - DNA, 80 bp, synthetic construct
  source 1..80: mol_type = other DNA
cttttatgggggtggtagaactaattgtactcctagcagagctgtttgatgtattctggactccaccagatgtttcaagc

SEQ ID NO: 98157 - DNA, 80 bp, synthetic construct
  source 1..80: mol_type = other DNA
aagaccttgcggggtatagaggacgcagtgatagatatggaggtgttatccagtaccaatgtgacacaactagttaaaga

SEQ ID NO: 98158 - DNA, 80 bp, synthetic construct
  source 1..80: mol_type = other DNA
ttgaggggggcccatccttacagcaagtgttgagggaccagttgaaaccattcgccgagccccgtggtaggttgcccgaa

SEQ ID NO: 98159 - DNA, 80 bp, synthetic construct
  source 1..80: mol_type = other DNA
cagtggtggggtcgacattggcatcaacgatctaaccactgtccgtggcccattctggaacatgtgcccccttccaccat

SEQ ID NO: 98160 - DNA, 80 bp, synthetic construct
  source 1..80: mol_type = other DNA
ggaagcagccctattgcattatttagaccctgacaccaatagaaatcttggtgagtttaaattataccctgagggcttta

SEQ ID NO: 98161 - DNA, 80 bp, synthetic construct
  source 1..80: mol_type = other DNA
gggggcgcctacaacacgtgtcattgattggaatgggactagggtcgccgcacccatgtcaaccgcaacgacacttaggt

SEQ ID NO: 98162 - DNA, 80 bp, synthetic construct
  source 1..80: mol_type = other DNA
tgctgatgtcagcaataacaatgctaacaccaacaatgaaaacattgggtctcgccttatggcgagactccgcggacgtg

SEQ ID NO: 98163 - DNA, 80 bp, synthetic construct
  source 1..80: mol_type = other DNA
cttttatgggggttgtggagctgatagtgcttgtggctgaactatttgatgtattttggacaccaccagacatctccagt

SEQ ID NO: 98164 - DNA, 80 bp, synthetic construct
  source 1..80: mol_type = other DNA
tttatcgcatcactattgcctgattttcatcttcagggtccagaggatttggcaaaggatctggtcccccttatactagg

SEQ ID NO: 98165 - DNA, 80 bp, synthetic construct
  source 1..80: mol_type = other DNA
tggaattggcctcgcgattggcttcacaagagacagagtcaccaaggttatgaagagtgctgttgacggattgcgttcgg

SEQ ID NO: 98166 - DNA, 80 bp, synthetic construct
  source 1..80: mol_type = other DNA
ccttacgaggcattgaagatgctgtgatagacatggaagttctgtccagtacaaatgtgacacaattagttagagataag

SEQ ID NO: 98167 - DNA, 80 bp, synthetic construct
  source 1..80: mol_type = other DNA
aaatcagctaaagcatatatgaatgtattggacattgaggaggaaaaggccagaaaactttcagtccgtagcgctgaccc

SEQ ID NO: 98168 - DNA, 80 bp, synthetic construct
  source 1..80: mol_type = other DNA
ccttccccatcccggcaagaccaccccccaaaagatcagagagatcgtccaccgcgcactgctctggaggtgaggaagac

SEQ ID NO: 98169 - DNA, 80 bp, synthetic construct
  source 1..80: mol_type = other DNA
gccccccaggcattggcaaaacaaaagctgccgagcacttagccagtcgattggcctccgaaatcaggccaggtggtaag

SEQ ID NO: 98170 - DNA, 80 bp, synthetic construct
  source 1..80: mol_type = other DNA
gttggactcgtgcctcgcgagtccatagaccattgggacggctatcatggtgaagaggtcctgttatgggatgactatgg

SEQ ID NO: 98171 - DNA, 80 bp, synthetic construct
  source 1..80: mol_type = other DNA
tcgtcaatttggggcccgtgtgcagacgagttgactttctagtctactgttccgcacccgaaattgaacagacacggagg

SEQ ID NO: 98172 - DNA, 80 bp, synthetic construct
  source 1..80: mol_type = other DNA
gcccacccaggcgatgccaatgctataaaagacctgtataagagagacttctcacacctaaaaatggatctggctccaca

SEQ ID NO: 98173 - DNA, 80 bp, synthetic construct
  source 1..80: mol_type = other DNA
ccactgcgctgactatggaaaggcaagatgaatttcaactccaaggcatggtttacaattttgatgaggatagggtggca

SEQ ID NO: 98174 - DNA, 80 bp, synthetic construct
  source 1..80: mol_type = other DNA
gcattcaccagcttggctcgtgccaacggattagggcttattagtatggcaactctgggcaagaaactaagaggtgttaa

SEQ ID NO: 98175 - DNA, 80 bp, synthetic construct
  source 1..80: mol_type = other DNA
gaccatggaaggactgcgcaatgcgctggtggggtaccgaatagaagagtgtgacataatttggaacactagagcctact

SEQ ID NO: 98176 - DNA, 80 bp, synthetic construct
  source 1..80: mol_type = other DNA
aatggggtgggatgaagagccaaggcaacaggagagcaccgctaaggcgtggtgcgacctcacaaaggaggaaaaagagg

SEQ ID NO: 98177 - DNA, 80 bp, synthetic construct
  source 1..80: mol_type = other DNA
gtgatggcaaatgtgtgacagtcaaggaaaggcaaagtcaaacctcatcccaacatcaagctgtcagcacggccaccctc

SEQ ID NO: 98178 - DNA, 80 bp, synthetic construct
  source 1..80: mol_type = other DNA
gcgctctccaggctgcgagctgctcgagcgatagcatacgcatcctgcctacaaagcgccgttctttccatacttcaggt

SEQ ID NO: 98179 - DNA, 80 bp, synthetic construct
  source 1..80: mol_type = other DNA
ggctggctccgctgtggtggttagcagggcagtgaaacgcatgtttggtacgagcaccgaacagcccgcattggagggcg

SEQ ID NO: 98180 - DNA, 80 bp, synthetic construct
  source 1..80: mol_type = other DNA
gacataaagaacacaactgcagggtccatcgggcacaggccgcaggccatggtcccatagggcatgatgggatcattgag

SEQ ID NO: 98181 - DNA, 80 bp, synthetic construct
  source 1..80: mol_type = other DNA
cgctatggtttgtgtgagagcgagcaagaggatgaaagtgatcaagtcatggaactgccatcagccaacagggaaggtaa

SEQ ID NO: 98182 - DNA, 80 bp, synthetic construct
  source 1..80: mol_type = other DNA
caggcggggatggtggaattggtgaaactgaggcagaaatccgccaccggatcttctataagtcaaaatctggcatgaga

SEQ ID NO: 98183 - DNA, 80 bp, synthetic construct
  source 1..80: mol_type = other DNA
agataatgcgcaacaacgagaagctctttgatgctgggggggttgcccctgcaattttgccaagcacgttcgagagggcc

SEQ ID NO: 98184 - DNA, 80 bp, synthetic construct
  source 1..80: mol_type = other DNA
acgccacaagaaaacaccgacgagtgtcaggcagtcacctggtccgccagtgatggtgtggacattggtgtggacagttt

SEQ ID NO: 98185 - DNA, 80 bp, synthetic construct
  source 1..80: mol_type = other DNA
ctctggggagcagatctcggcactgtcatccgtgctgctagggcatttgggccattctgtgaggccataaaaccccatgt

SEQ ID NO: 98186 - DNA, 80 bp, synthetic construct
  source 1..80: mol_type = other DNA
agctcactgctaatccttccctagccgcggtagtggcacaagacctgctttccccatctgaaatggatgttggtgactac

SEQ ID NO: 98187 - DNA, 80 bp, synthetic construct
  source 1..80: mol_type = other DNA
aaaaacagtccgtggccctccttggaatatgtgccccctgccacctttagaggctcgcaatagcggacctgcaagagagc

SEQ ID NO: 98188 - DNA, 80 bp, synthetic construct
  source 1..80: mol_type = other DNA
tcgggtaccaggtgcggcttgaccgcaattccattgagaggcaactttggtggacccgtgggcccaatcatgaagaccca

SEQ ID NO: 98189 - DNA, 80 bp, synthetic construct
  source 1..80: mol_type = other DNA
tcgggtaccaggggcggcttgaccgcaattccattgagaggcaactttggtggacccgtgggcccaatcatgaagaccca

SEQ ID NO: 98190 - DNA, 80 bp, synthetic construct
  source 1..80: mol_type = other DNA
ttcgagaccttagtcccacacacacaaaggaaggttcagctgatatctctgctgggcgaagctgcactccatggggaaaa

SEQ ID NO: 98191 - DNA, 80 bp, synthetic construct
  source 1..80: mol_type = other DNA
cccttataggggatatggttgagttttatgagggtcacatttttcattatgccatttacattgggcaaggaaagaccatt

SEQ ID NO: 98192 - DNA, 80 bp, synthetic construct
  source 1..80: mol_type = other DNA
actcaatgttctttcaaactcgagagtaccatccctaataaaatccatgatggtgtcacaggaccacggacaaatggtgc

SEQ ID NO: 98193 - DNA, 80 bp, synthetic construct
  source 1..80: mol_type = other DNA
aatttcaaaatggcagagtcacgctggacggacagctccagggcactacgccaacctcagccagccaactctgcaagatg

SEQ ID NO: 98194 - DNA, 80 bp, synthetic construct
  source 1..80: mol_type = other DNA
cgggggacggtttatcacgcctctggtggccaagggctcaatttgactgaaattgatggcactccctaccacgcctttga

SEQ ID NO: 98195 - DNA, 80 bp, synthetic construct
  source 1..80: mol_type = other DNA
aagcccagcccctattggtttccctgacataggagacagcgattggcacattaatgcttcacctgccaccacctttgaca

SEQ ID NO: 98196 - DNA, 80 bp, synthetic construct
  source 1..80: mol_type = other DNA
gcggtgaaagcatcaaaaggctagacatggaacagggctcctcattcgccccacatttgggtactgtgcactacacaaat

SEQ ID NO: 98197 - DNA, 80 bp, synthetic construct
  source 1..80: mol_type = other DNA
gctgactatcctgccaatactgacttaatttgctcattggaatggctgtccccccctagtgggggcaccccaaacaaagt

SEQ ID NO: 98198 - DNA, 80 bp, synthetic construct
  source 1..80: mol_type = other DNA
caacccttggaccatcccgcggtacggttcaaccttaactgaagccgcccaattggccccaccaatttacccccccggtt

SEQ ID NO: 98199 - DNA, 80 bp, synthetic construct
  source 1..80: mol_type = other DNA
ttggtgaagcaatagttttcttcatgtctgatttccctatagcaaatggtcaagatggattgaaagtaccctgcactata

SEQ ID NO: 98200 - DNA, 80 bp, synthetic construct
  source 1..80: mol_type = other DNA
ctccagtggcagcggtccccaaacgctgcccattaatggggtcttcacttttgtctcttgggtttcccgtttctatcaat

SEQ ID NO: 98201 - DNA, 80 bp, synthetic construct
  source 1..80: mol_type = other DNA
ggcgagtgtgttacacacccacagatcaacagagacttacttatgaccaattaagagaactggagaatgaaccatggccc

SEQ ID NO: 98202 - DNA, 80 bp, synthetic construct
  source 1..80: mol_type = other DNA
aagcatgataaggaaatgttaggactgcaggttggtgcttccaccgcccttttacaaaacagcctcaccacccgctacaa

SEQ ID NO: 98203 - DNA, 80 bp, synthetic construct
  source 1..80: mol_type = other DNA
catgcttaccaatgctggcctctcatcctcagacgcagcacgcatggtggttggcgcgccaaccacacgcgtcgtggact

SEQ ID NO: 98204 - DNA, 80 bp, synthetic construct
  source 1..80: mol_type = other DNA
ggaacggtaccaggatatcagcaccacaatccactgctactacactgaggtctggcgggtttatgacaattccaacttta

SEQ ID NO: 98205 - DNA, 80 bp, synthetic construct
  source 1..80: mol_type = other DNA
tataagggcaaacaacagcagaaagctccaactgaaattggcttatctaatccaaattatgggtcatctgccctctcaag

SEQ ID NO: 98206 - DNA, 80 bp, synthetic construct
  source 1..80: mol_type = other DNA
aactgctgattgggtttcttctcaaaattcttctcgctcttccttgggcccataccaccctaatgccttgcagacaacat

SEQ ID NO: 98207 - DNA, 80 bp, synthetic construct
  source 1..80: mol_type = other DNA
gcaaatatgaggaaataattttgtaatatgaaatgtgggcatcatattcaattgaatttaattaatcatttggtctaatt

SEQ ID NO: 98208 - DNA, 80 bp, synthetic construct
  source 1..80: mol_type = other DNA
tatgcctcagtcaccaataactgttatgagttctgctgcaaggtaatggcacttgatgactcttggctccaacggaaatt

SEQ ID NO: 98209 - DNA, 80 bp, synthetic construct
  source 1..80: mol_type = other DNA
taggtccgcagcgtggtgaaaacaccacaaaaataaaggacgccaatatggcgctcgaccttttgcgccggtcacagaca

SEQ ID NO: 98210 - DNA, 80 bp, synthetic construct
  source 1..80: mol_type = other DNA
gatcactactggaaaatttaaccaccctacacaggaatggtcaaaagacacccccgactttcaccaagattcaaagcttg

SEQ ID NO: 98211 - DNA, 80 bp, synthetic construct
  source 1..80: mol_type = other DNA
ccttcatgggtgtcgtagagctgatcgtgctcttggcagaattatttgatgtgttctggaccccaccagacatctcaagt

SEQ ID NO: 98212 - DNA, 80 bp, synthetic construct
  source 1..80: mol_type = other DNA
ctgaggacttggccagagacttggtccccctcatattgggtggtattggtctagcaattggttttacaagggacagaata

SEQ ID NO: 98213 - DNA, 80 bp, synthetic construct
  source 1..80: mol_type = other DNA
atatggcacttgaactgttacgccggtcacaaacaccatccccatctcgacaagataacaactgcccccctaaagctcaa

SEQ ID NO: 98214 - DNA, 80 bp, synthetic construct
  source 1..80: mol_type = other DNA
acaaaggtgatgaagagtgccgttgatgggctgcggtcagcaacacagcttgggcagtatgggttagagatattttcaat

SEQ ID NO: 98215 - DNA, 80 bp, synthetic construct
  source 1..80: mol_type = other DNA
tggtggcaaagttggccttgtaccccgagagtctatagatcattgggatggataccatggtgaggatgttctactctggg

SEQ ID NO: 98216 - DNA, 80 bp, synthetic construct
  source 1..80: mol_type = other DNA
tgggggcaaagttggccttgtaccccgagagtctatagatcattgggatggataccatggtgaggatgttctactctggg

SEQ ID NO: 98217 - DNA, 80 bp, synthetic construct
  source 1..80: mol_type = other DNA
ttttagtctactgttctgctcctgagattgagcagacgcggagggctcatccaggtgacgctaatgccatcaaggacctg

SEQ ID NO: 98218 - DNA, 80 bp, synthetic construct
  source 1..80: mol_type = other DNA
gtggcttcgacagtcagggcaacacaccgtttgggaagggtgttatgaagaccacaactctcaacaggttgttgattcag

SEQ ID NO: 98219 - DNA, 80 bp, synthetic construct
  source 1..80: mol_type = other DNA
accgcctcagaggtgaagagggcaatgggatgggatactgagccagaacatcaagaaagcacagctagagcatggtgtga

SEQ ID NO: 98220 - DNA, 80 bp, synthetic construct
  source 1..80: mol_type = other DNA
tccaaggagccgtctacaactttgatgaggacagagtgaccgctttcaccaacctagctcgcgccaatggcttggggctc

SEQ ID NO: 98221 - DNA, 80 bp, synthetic construct
  source 1..80: mol_type = other DNA
ataagcatggcaacattaggcaagaaattgaggagtgtcaaatctatggaaggtctgcgcaatgcattggtgggatacaa

SEQ ID NO: 98222 - DNA, 80 bp, synthetic construct
  source 1..80: mol_type = other DNA
gtgatgggagcaccattacggtcaaagaaagacaagccccatcctcaccccaacgtcaagctatctccacagccaccctt

SEQ ID NO: 98223 - DNA, 80 bp, synthetic construct
  source 1..80: mol_type = other DNA
ggatcatagaacgctatggtctgtgtgagagcgaacaggatggggaagatgaccagattgtggaattgcccaccgccgat

SEQ ID NO: 98224 - DNA, 80 bp, synthetic construct
  source 1..80: mol_type = other DNA
aggtgttactccttcgaccttgcccagcacatttgagagggctgattcaagctgtgtcactaatgaacaacaggctgtga

SEQ ID NO: 98225 - DNA, 80 bp, synthetic construct
  source 1..80: mol_type = other DNA
ttgaggggggcccatccttacagcaggtattgagggaccaactaaaaccatttgctgagcctcgtggcagattacccgaa

SEQ ID NO: 98226 - DNA, 80 bp, synthetic construct
  source 1..80: mol_type = other DNA
catggtctgctagtgatggggttaatattggcgttaatgacttgaccaccgttcgtggcccgttttggaacatgtgcccc

SEQ ID NO: 98227 - DNA, 80 bp, synthetic construct
  source 1..80: mol_type = other DNA
gcaagcttactgctaatccttccctagccgcagtagtggcacaagatctgctttccccatctgagatggatgtcggtgac

SEQ ID NO: 98228 - DNA, 80 bp, synthetic construct
  source 1..80: mol_type = other DNA
tttcaacggatattgaattcgattcaaacagattgacacaagtgttaaaagagtatggcctaaaacccacaaggcctgac

SEQ ID NO: 98229 - DNA, 80 bp, synthetic construct
  source 1..80: mol_type = other DNA
aaaactgatggtccaatcataattagacaacaggttgatggcttggtcttcctccgacgcaccatctcaaaagatgctat

SEQ ID NO: 98230 - DNA, 80 bp, synthetic construct
  source 1..80: mol_type = other DNA
cctgctaaggaaccccgtataggggacatgatagaattctatgagggccatatattccattatgctatttatattgggca

SEQ ID NO: 98231 - DNA, 80 bp, synthetic construct
  source 1..80: mol_type = other DNA
ctggtgaaagtgtcaagaggctggatatggaacaaggttcctcattcgccccgcatttgggcactgtgcattataccaat

SEQ ID NO: 98232 - DNA, 80 bp, synthetic construct
  source 1..80: mol_type = other DNA
gctgactatgacgccaacactgatttaatctgctcattggaatggctgtccccccccagtgggggtaccccaaacaaagt

SEQ ID NO: 98233 - DNA, 80 bp, synthetic construct
  source 1..80: mol_type = other DNA
caatccctgggccataccacggtacggttcgaccttaaccgaagccgctcaattggccccaccaatctacccccctggct

SEQ ID NO: 98234 - DNA, 80 bp, synthetic construct
  source 1..80: mol_type = other DNA
aaacatgataaagaaatgttaggattacaggttggtgcttccactgccctattacaaaatagtctcagcacccgctacaa

SEQ ID NO: 98235 - DNA, 80 bp, synthetic construct
  source 1..80: mol_type = other DNA
ccactgaccagcagcgcctcacctatgatcaacttaaggaattagaaaatgaaccatggccctatgcctctattaccaac

SEQ ID NO: 98236 - DNA, 80 bp, synthetic construct
  source 1..80: mol_type = other DNA
actgcacctagatattttaatattgataggttgcctctattcgcaaatatgaggaaataattttgtaatatgaaatgtgg

SEQ ID NO: 98237 - DNA, 80 bp, synthetic construct
  source 1..80: mol_type = other DNA
aactgctatgagttctgttgcaaggtgatggcacttgacgacaactggctccaaagaaaattggtcaacagtgggaagtt

SEQ ID NO: 98238 - DNA, 80 bp, synthetic construct
  source 1..80: mol_type = other DNA
accgcctctgaggtgaggagagtgatgggatgggatgttgaaccagaacatcaagagagcacggccaaagcatggtgtga

SEQ ID NO: 98239 - DNA, 80 bp, synthetic construct
  source 1..80: mol_type = other DNA
tccaaggggctgtctacaactttgatgaggatagggtgtccgcctttacaagcctggcccgcgccaacggcttagggctc

SEQ ID NO: 98240 - DNA, 80 bp, synthetic construct
  source 1..80: mol_type = other DNA
gtgagcatggcaacgctgggtaaaaggctcagaagcgtcaagtccatggagggtctgcgcaatgcattagtgggctataa

SEQ ID NO: 98241 - DNA, 80 bp, synthetic construct
  source 1..80: mol_type = other DNA
gtgacggtagtaccgtcacaattaaagaaaaacaggccccaacctcctctcagcatcaggccatctgcacagccactctc

SEQ ID NO: 98242 - DNA, 80 bp, synthetic construct
  source 1..80: mol_type = other DNA
gggagttactccatcaaccttacctagcacatttgaaagagctggcccagttgacagccccggtgaacagcaacctgtaa

SEQ ID NO: 98243 - DNA, 80 bp, synthetic construct
  source 1..80: mol_type = other DNA
gtggggctccctatgtccacaaaagaggaaacgattgggtagtatgtggggtccatgcggctgccacaaaatcaggcaac

SEQ ID NO: 98244 - DNA, 80 bp, synthetic construct
  source 1..80: mol_type = other DNA
ctttggggcgcggatcttggcaccgtcatccgcgctgccagagcttttgggccattctgtgaagccataaaatcccatgt

SEQ ID NO: 98245 - DNA, 80 bp, synthetic construct
  source 1..80: mol_type = other DNA
cagtagtggggttgatatcggcattgacgacctaactactgttcgtggcccattctggaacatgtgtccccttccaccat

SEQ ID NO: 98246 - DNA, 80 bp, synthetic construct
  source 1..80: mol_type = other DNA
tagtcccacactcgcagaggaaggttcagctgatatctctgctgggtgaagcagcactccatggtgagaaattctatagg

SEQ ID NO: 98247 - DNA, 80 bp, synthetic construct
  source 1..80: mol_type = other DNA
ttggggacatgatagagttttacgagggccacatatttcattatgccatctatattggacagggtaagaccattggggtt

SEQ ID NO: 98248 - DNA, 80 bp, synthetic construct
  source 1..80: mol_type = other DNA
ttggggacatgatagagttttacgagggccacatatttcattatgccatctatattggacagggtaagaccattgtggtt

SEQ ID NO: 98249 - DNA, 80 bp, synthetic construct
  source 1..80: mol_type = other DNA
tgaaagtcagagtgctgcttgctggtaatgcttttacagcgggtaagataataattagttgtgttcccccaggcttcgca

SEQ ID NO: 98250 - DNA, 80 bp, synthetic construct
  source 1..80: mol_type = other DNA
acacccctctccgtgccagtggtagttcttccggcactgacccatttgttatagctggccgggttctcacctgccccagc

SEQ ID NO: 98251 - DNA, 80 bp, synthetic construct
  source 1..80: mol_type = other DNA
cctgatttcaactttttgttccttgtgccccctaatgttgagcagaaaactaagccatttagtgtgcccaatctacccct

SEQ ID NO: 98252 - DNA, 80 bp, synthetic construct
  source 1..80: mol_type = other DNA
taatgttctttcaaattctagagttccctctttgataaagtccatgatggtctcccaagaccatgggcagatggtgcaat

SEQ ID NO: 98253 - DNA, 80 bp, synthetic construct
  source 1..80: mol_type = other DNA
tccaaaatggcagggtcacattggatgggcagctccaaggcaccacccccacttcagccagtcaactttgtaagattcgg

SEQ ID NO: 98254 - DNA, 80 bp, synthetic construct
  source 1..80: mol_type = other DNA
gggacggtctaccatgcaactggtggccaagggctcaacttgactgagatagatggtaccccctaccatgcatttgagag

SEQ ID NO: 98255 - DNA, 80 bp, synthetic construct
  source 1..80: mol_type = other DNA
ccccgccccaattggctttcccgatgtgggtgagtgtgattggcacattaatgcatctcctgccaatacttttacaaatg

SEQ ID NO: 98256 - DNA, 80 bp, synthetic construct
  source 1..80: mol_type = other DNA
aattatgatgctaatgttagtctgatttgctcgcttgaatggctttctcccccaagtaatggtgccccaaaggtaaatcc

SEQ ID NO: 98257 - DNA, 80 bp, synthetic construct
  source 1..80: mol_type = other DNA
atgggctattcctcggtatggttcaactctaactgaggctgctcagctggccccaccaatatacccccctggttttggcg

SEQ ID NO: 98258 - DNA, 80 bp, synthetic construct
  source 1..80: mol_type = other DNA
atggggttttcactttcatttcttgggtttcccgtttttaccagttgaagcctgtgggaacgaccggaccggttcgtagg

SEQ ID NO: 98259 - DNA, 80 bp, synthetic construct
  source 1..80: mol_type = other DNA
catgctcactaatgctggcctctcgtcctcggacgcagcccgcatggtggttggcgcgcctgccacgcgtattgtggact

SEQ ID NO: 98260 - DNA, 80 bp, synthetic construct
  source 1..80: mol_type = other DNA
ggaatggcaccagagtatcggcaccacggtccactgccaccacgctgaggtctggtggtttcatgacaatcccaacttta

SEQ ID NO: 98261 - DNA, 80 bp, synthetic construct
  source 1..80: mol_type = other DNA
tacaaaggcaaacaacagcagaaagctccaactgaaattggcttatctaacccaaattatgggtcaactgtatcttcaag

SEQ ID NO: 98262 - DNA, 80 bp, synthetic construct
  source 1..80: mol_type = other DNA
aatagttttgtaatatgaaatgtgggcatcatattcaattggatttgattaattgctaatctggtctaattatcaatttg

SEQ ID NO: 98263 - DNA, 80 bp, synthetic construct
  source 1..80: mol_type = other DNA
aaccatggccctatgcctccatcacaaacaactgctatgaattctgttgcagagtgatggcacttgacgacacctggctt

SEQ ID NO: 98264 - DNA, 80 bp, synthetic construct
  source 1..80: mol_type = other DNA
tactgctgctagcaaaaattctgctagcgacaatagtaacacaattaagggtcgcttattagcgaaacttaagaatatag

SEQ ID NO: 98265 - DNA, 80 bp, synthetic construct
  source 1..80: mol_type = other DNA
cttgccatcgggttcaccaaggacaaggtaacaaaagttatgaaaagtgcagtagatggtctacgggctgcaactcaact

SEQ ID NO: 98266 - DNA, 80 bp, synthetic construct
  source 1..80: mol_type = other DNA
tggccaatacggtcttgagatctttgccgtattaaagaaatacttctttggaggtgaccagacagagaagacacttaaag

SEQ ID NO: 98267 - DNA, 80 bp, synthetic construct
  source 1..80: mol_type = other DNA
atccccatgtggtatcctctaccaatgcccttattgcacgcatagcgctagcccgttccgctttggctaaggcgcaggca

SEQ ID NO: 98268 - DNA, 80 bp, synthetic construct
  source 1..80: mol_type = other DNA
cccgttgagccccccaaacaacagcgtgaccgtgcaccacggagtactgctgagacccaacaggccatggagtgggttga

SEQ ID NO: 98269 - DNA, 80 bp, synthetic construct
  source 1..80: mol_type = other DNA
cccgttgagccccccaaacaacagcgtgaccgtgcaccacggagtactgctgagacccaacaggccatggggtgggttga

SEQ ID NO: 98270 - DNA, 80 bp, synthetic construct
  source 1..80: mol_type = other DNA
gcaattgctgacacggcccctttgacattgaactgcgacaggatagagaagaaagggctccaatttgtatctgatgccat

SEQ ID NO: 98271 - DNA, 80 bp, synthetic construct
  source 1..80: mol_type = other DNA
gatgacttctcacatttaaaaatggagattgccccccaaggtggatttgataatcagggtaataccccgtttggcaaagg

SEQ ID NO: 98272 - DNA, 80 bp, synthetic construct
  source 1..80: mol_type = other DNA
acaaccattagatcagaacctgccgacctgggaagaactgagtgaagcagagaaacgcgaaatcatagcacagaatgaga

SEQ ID NO: 98273 - DNA, 80 bp, synthetic construct
  source 1..80: mol_type = other DNA
agcgcagacccaacgccagcatacaattgatactgcagtattggccctaacccgcttaagggctgctagggctgcagcat

SEQ ID NO: 98274 - DNA, 80 bp, synthetic construct
  source 1..80: mol_type = other DNA
atgcatcatgcctgcaaagtgcaattacatctattctccaaatggcgggctcagcacttgtcatccatcgagctgtcaaa

SEQ ID NO: 98275 - DNA, 80 bp, synthetic construct
  source 1..80: mol_type = other DNA
cgcatgtttggcactcacaccaataccatctcactggaaggcccccctagagaacaccattgcagggttcacgtggcgaa

SEQ ID NO: 98276 - DNA, 80 bp, synthetic construct
  source 1..80: mol_type = other DNA
aggcgcgccaattataatgctttctcaaggaggggactcagtgatgaggagtatgaggaatacaagaagatcagagacga

SEQ ID NO: 98277 - DNA, 80 bp, synthetic construct
  source 1..80: mol_type = other DNA
actggtttgatgctggtggcttggcaccagcatccatccctagcacacatgagcgtgcccaaaatgatgagccaccaggg

SEQ ID NO: 98278 - DNA, 80 bp, synthetic construct
  source 1..80: mol_type = other DNA
gttggggattctgggtcagccctacagttttcatcaccacaacacatgttatcccaacaagtgcgagagaattctttggg

SEQ ID NO: 98279 - DNA, 80 bp, synthetic construct
  source 1..80: mol_type = other DNA
gagccactcgacaccattgccatccatcgagctggtgaattcacacagctaagattttccagaaagataagacctgactt

SEQ ID NO: 98280 - DNA, 80 bp, synthetic construct
  source 1..80: mol_type = other DNA
tcccgttggctgttcggatgggtgccattgcttcgatgaagattcaagggcgtctagtccatgggcaatcaggaatgttg

SEQ ID NO: 98281 - DNA, 80 bp, synthetic construct
  source 1..80: mol_type = other DNA
tagtctgtggtgtccacgccgcagccacaaaatctggaaacacagttgtgtgtgcagtgcaagcaggtgaaggggagacc

SEQ ID NO: 98282 - DNA, 80 bp, synthetic construct
  source 1..80: mol_type = other DNA
acactggaaggaggagataagggacattatgccgggcatgaaataattaagcatagtaagggaccagcactatctagtaa

SEQ ID NO: 98283 - DNA, 80 bp, synthetic construct
  source 1..80: mol_type = other DNA
aaccaaattttggcggtcaaccactgaacccctaccaccaggagtgtatgagccagcttaccttggaggtcgcgacccta

SEQ ID NO: 98284 - DNA, 80 bp, synthetic construct
  source 1..80: mol_type = other DNA
gggttaaaggcggcccgtcactgcaacaagtgttgagggaccagctgaagccatttgctgaaccgcgtgggcgtatgcct

SEQ ID NO: 98285 - DNA, 80 bp, synthetic construct
  source 1..80: mol_type = other DNA
caccaaataagatggagcgccaatgatggcgttgatcttggggttggtgacctcacctctgtcactggccctgcatggaa

SEQ ID NO: 98286 - DNA, 80 bp, synthetic construct
  source 1..80: mol_type = other DNA
gaacctggcctactagaggcagctgttgagacagtcacgtcagcgctggagcaggtcatggataccccaatcccctggac

SEQ ID NO: 98287 - DNA, 80 bp, synthetic construct
  source 1..80: mol_type = other DNA
ctttggggcgctgatctatcaacagtaatccgtgccgctagagcctttggcccattttgtgatgcaataaagtcccatgt

SEQ ID NO: 98288 - DNA, 80 bp, synthetic construct
  source 1..80: mol_type = other DNA
gtgtcgcctcacggcctcaccagagctggcctcagtggtggctaaagaccttctcgcaccatctgagatggatgttgggg

SEQ ID NO: 98289 - DNA, 80 bp, synthetic construct
  source 1..80: mol_type = other DNA
actacatcataagagttaaagaaggtctcccttcaggcttcccctgcacttcacaagttaatagcataaaccattggcta

SEQ ID NO: 98290 - DNA, 80 bp, synthetic construct
  source 1..80: mol_type = other DNA
taatcactctttgtgccctctctgagattactggactctctcctgatgtcatacaatcacagtcatacttctcattttat

SEQ ID NO: 98291 - DNA, 80 bp, synthetic construct
  source 1..80: mol_type = other DNA
catgtgtcccatgccaccaatggatcaacgcaatagtgggcccgcaaaagaaccactcattggcgacatgcttgaattct

SEQ ID NO: 98292 - DNA, 80 bp, synthetic construct
  source 1..80: mol_type = other DNA
ctacacgtccagacaagagtgaaggaccaatagtgttaaggaagcaaattgatgggctagtgtttctcaggaggaccata

SEQ ID NO: 98293 - DNA, 80 bp, synthetic construct
  source 1..80: mol_type = other DNA
ccacgacgaccccaatgagaccctgataccccaccaacaaagaaaggttcagctcatatcactacttggtgaagcctcac

SEQ ID NO: 98294 - DNA, 80 bp, synthetic construct
  source 1..80: mol_type = other DNA
tcttggccggtaatgccttcactgctggtaaagtcataatctgttgtgttccccctggttttcaatctagaaccctttcc

SEQ ID NO: 98295 - DNA, 80 bp, synthetic construct
  source 1..80: mol_type = other DNA
atagctcaggccacactctttccccatgtcatagctgatgtgcgaactctggaaccaatcgagatccctttagaagatgt

SEQ ID NO: 98296 - DNA, 80 bp, synthetic construct
  source 1..80: mol_type = other DNA
taggaacactctctatcataataatgacaatcaaccaacaatgcgcttgctgtgcatgctctacacgccactacgcaccg

SEQ ID NO: 98297 - DNA, 80 bp, synthetic construct
  source 1..80: mol_type = other DNA
gtggcggttctggcggcacagacgcgtttgttgtggcaggtcgagttttaacttgccctagtcctgattttaatttcttg

SEQ ID NO: 98298 - DNA, 80 bp, synthetic construct
  source 1..80: mol_type = other DNA
ttcctagtcccacccactgtagagcagaagacacgcccctttagcctgcccaatatacccttgcacttgcagtctaattc

SEQ ID NO: 98299 - DNA, 80 bp, synthetic construct
  source 1..80: mol_type = other DNA
ccgtgtccccaatcccatacagagcatggttatttcgcctgatcaggctcagaatacccaattccagaatggccgctgca

SEQ ID NO: 98300 - DNA, 80 bp, synthetic construct
  source 1..80: mol_type = other DNA
ccaccgatgggcaactcttgggtacaacacctgtctcagctagtcagatcttaaagtttagaggaaaggtatcacctggt

SEQ ID NO: 98301 - DNA, 80 bp, synthetic construct
  source 1..80: mol_type = other DNA
tccaaagttatcaatctcactgagttggatggttccccttttctggcttttgaggcccctgcacccacgggctttcctga

SEQ ID NO: 98302 - DNA, 80 bp, synthetic construct
  source 1..80: mol_type = other DNA
cttgggaacttgcgattggcatgttgaattgagccttaactcaagtggccaaagttctggcaatccaattgtatcaaggg

SEQ ID NO: 98303 - DNA, 80 bp, synthetic construct
  source 1..80: mol_type = other DNA
acatacaaccaaattcttcagattttgtgccacacttgggcagtgtggccgtcaccgctgcaattgaaacagctggggat

SEQ ID NO: 98304 - DNA, 80 bp, synthetic construct
  source 1..80: mol_type = other DNA
tatactggcacaatccagtggatctcccagccatccaatgtctccccagttcccaatgtcaacctgtggactatccccaa

SEQ ID NO: 98305 - DNA, 80 bp, synthetic construct
  source 1..80: mol_type = other DNA
ttatggatcaaatttggcagaagcctcccagttggcccctgtggtttaccccccgggatttggtgaagccgtagtatact

SEQ ID NO: 98306 - DNA, 80 bp, synthetic construct
  source 1..80: mol_type = other DNA
ttatgtctcacataccgggcccaaatactgaacacaaacccaatctggtaccctgcctacttccacaagaatttataact

SEQ ID NO: 98307 - DNA, 80 bp, synthetic construct
  source 1..80: mol_type = other DNA
cattttgtcagtgaacaagccccacccatgggtgaggcagctcttatccattatgtggatccagatactaatcgtaatct

SEQ ID NO: 98308 - DNA, 80 bp, synthetic construct
  source 1..80: mol_type = other DNA
gggtgagttcaaattgtatcctgagggtattatcacctgtgtgccgaatggcactggtccacaacaactccccctcaatg

SEQ ID NO: 98309 - DNA, 80 bp, synthetic construct
  source 1..80: mol_type = other DNA
agatctggtggattcatgtctgttcctatacctattcagcccaaacaaaagccccctaccatctcaggatttaacaatcc

SEQ ID NO: 98310 - DNA, 80 bp, synthetic construct
  source 1..80: mol_type = other DNA
ttcaacaccgataggcttcccctattcgcaaataggagataatattgttgtaataagaataacaatgtgggcatcttatt

SEQ ID NO: 98311 - DNA, 80 bp, synthetic construct
  source 1..80: mol_type = other DNA
aataggagataatattgttgtaataagaataacaatgtgggcatcttattcaatttggtctaattaatttcataattagg

SEQ ID NO: 98312 - DNA, 80 bp, synthetic construct
  source 1..80: mol_type = other DNA
tacgccgcagttaccaacaattgctacgagttttgttgtcgcgtcatgggcgtccaagacagttggctcgagcgtcggct

SEQ ID NO: 98313 - DNA, 80 bp, synthetic construct
  source 1..80: mol_type = other DNA
gcaataacaatcagcctataaagatagaaaatactcatatggccttagggctcattggtagaggtccatcaccagcccct

SEQ ID NO: 98314 - DNA, 80 bp, synthetic construct
  source 1..80: mol_type = other DNA
cataagttcgggccgcttcaatcaccccacacaggattggtctaaagacactccagatttccaacaagacagtaaattag

SEQ ID NO: 98315 - DNA, 80 bp, synthetic construct
  source 1..80: mol_type = other DNA
ccataaacggccttgtttcacaaccatttaaaaaccttttggggaagttgaagcccctgaatgttctcaacctactctcc

SEQ ID NO: 98316 - DNA, 80 bp, synthetic construct
  source 1..80: mol_type = other DNA
taataccaaacccattaaaattgaaaacacacagatggctcttgggcttctgagccgggagccatcaccatcgcccaacc

SEQ ID NO: 98317 - DNA, 80 bp, synthetic construct
  source 1..80: mol_type = other DNA
tgacaaaggtgatgaaaagtgcagttgatggtttgcgtgcggccactcagctagggcaatatggcttggagatcttcgca

SEQ ID NO: 98318 - DNA, 80 bp, synthetic construct
  source 1..80: mol_type = other DNA
gacccccacgtggtgtcaaccaccaacgcactaatttcgcgcatctcaatggcgcgttctgccctagctaaagcacaagc

SEQ ID NO: 98319 - DNA, 80 bp, synthetic construct
  source 1..80: mol_type = other DNA
cctgttgaccaaaacctgccaacatgggaagagctgagccagtctgagaagcagaagatcatagctgagaattcaaagtg

SEQ ID NO: 98320 - DNA, 80 bp, synthetic construct
  source 1..80: mol_type = other DNA
gttagccccggagacactagcgcactcaaagattgcttcaaggatgacttctctcaccttaagatggaaattgcaccaca

SEQ ID NO: 98321 - DNA, 80 bp, synthetic construct
  source 1..80: mol_type = other DNA
gggtggatttgataaccaagggaacacgccatttggcaagggcgtcatgcgccccaccactataaacaggcttttaatcc

SEQ ID NO: 98322 - DNA, 80 bp, synthetic construct
  source 1..80: mol_type = other DNA
atggcaagtctcggaaagagactacgcagtgtcaactcagtccatggcctcaaaaatgccctagccggttacaccattac

SEQ ID NO: 98323 - DNA, 80 bp, synthetic construct
  source 1..80: mol_type = other DNA
accatgcaccataaaatggcaagccaggttctatgatatagaatctgacggtaatgtggtcaagatctgtgagaacacaa

SEQ ID NO: 98324 - DNA, 80 bp, synthetic construct
  source 1..80: mol_type = other DNA
gtttgatgctggtggtctaggcccggctaccctgccatcgaattactgtcgagtacaggacagtggtgatggtgaccatc

SEQ ID NO: 98325 - DNA, 80 bp, synthetic construct
  source 1..80: mol_type = other DNA
tacgcatcttgcctacaatgtgctatcacgactgtattgcagatggcaggttcagcccttgttatacaccgagccgtcaa

SEQ ID NO: 98326 - DNA, 80 bp, synthetic construct
  source 1..80: mol_type = other DNA
gcgcatgtttggcactcacaccaatgccgtctccttggaaggtcctgacagggaacatcgctgtcgagtgcaccaagcca

SEQ ID NO: 98327 - DNA, 80 bp, synthetic construct
  source 1..80: mol_type = other DNA
caggagcaagaaaccaccatggaattacccactgcaagccatgaaggtaagaacaaggggaagaccaagaagggccgagg

SEQ ID NO: 98328 - DNA, 80 bp, synthetic construct
  source 1..80: mol_type = other DNA
ccgaagagctaattacaacgccttctctagacgtggtctaagtgatgaggaatacgaggagtacaagaaggttagagaag

SEQ ID NO: 98329 - DNA, 80 bp, synthetic construct
  source 1..80: mol_type = other DNA
gcgatggtggaataggtgagacggagatggaaatacgccatcgggtcttctttaagtctaaaacgaagaagaaccgccag

SEQ ID NO: 98330 - DNA, 80 bp, synthetic construct
  source 1..80: mol_type = other DNA
aggttaaatggaatgctagagatggtgtcaacctgggagttgacaccttaacaactgtccaaggccccccgtggaattta

SEQ ID NO: 98331 - DNA, 80 bp, synthetic construct
  source 1..80: mol_type = other DNA
ttacccgattcggttccggatgggggttttgggttagccccacggtgttcatcaccaccacccacgtcataccaactggg

SEQ ID NO: 98332 - DNA, 80 bp, synthetic construct
  source 1..80: mol_type = other DNA
ggtcaatctggcatgctcctaactggtgccaatgcaaaaggtatggacctgggtaccctcccaggtgattgtggggcacc

SEQ ID NO: 98333 - DNA, 80 bp, synthetic construct
  source 1..80: mol_type = other DNA
atgattgggtggtctgcggtgtccacgcagcagccaccaagtctggtaacactgtggtttgtgcagtacaagcaggtgag

SEQ ID NO: 98334 - DNA, 80 bp, synthetic construct
  source 1..80: mol_type = other DNA
ggggagaccactctagaaggtggtgataagggacactatgccgggcatgaaatagttaggaatagtaagggccccgcgct

SEQ ID NO: 98335 - DNA, 80 bp, synthetic construct
  source 1..80: mol_type = other DNA
ggggagaccactctagaagggggtgataagggacactatgccgggcatgaaatagttaggaatagtaagggccccgcgct

SEQ ID NO: 98336 - DNA, 80 bp, synthetic construct
  source 1..80: mol_type = other DNA
ctcatctaaaactaagttctggagatcaacaccagaaccccttcctccaggtgtctatgaaccagcttacctagggggca

SEQ ID NO: 98337 - DNA, 80 bp, synthetic construct
  source 1..80: mol_type = other DNA
aagatcctagggttaagggtggcccttctttacaccaggtccttcgggaccaactgaaaccctttgctgagccacgtggg

SEQ ID NO: 98338 - DNA, 80 bp, synthetic construct
  source 1..80: mol_type = other DNA
cgcatgccagagccaggtttgttggaggctgctgttgagacagtgacttctatgctggaacaggttatggatacgcctac

SEQ ID NO: 98339 - DNA, 80 bp, synthetic construct
  source 1..80: mol_type = other DNA
tgcccacttcccccagtcgaccaacgtaatagcggggcagctaaagagcccctgattggagacatgattgagttctatga

SEQ ID NO: 98340 - DNA, 80 bp, synthetic construct
  source 1..80: mol_type = other DNA
accatggtcatatgcagatgcctgccagtcattagacaagaccaccagttctggatacccataccacaagaggaagaatg

SEQ ID NO: 98341 - DNA, 80 bp, synthetic construct
  source 1..80: mol_type = other DNA
atttggcggctgttgtggctagagacctgctagccccttctgaaatggacgtgggggactttgtaattagagttaaggag

SEQ ID NO: 98342 - DNA, 80 bp, synthetic construct
  source 1..80: mol_type = other DNA
ggtctcccatcaggcttcccctgcacttcacaagtcaatagtataaaccactggctcatcacattgtgtgccctgtctga

SEQ ID NO: 98343 - DNA, 80 bp, synthetic construct
  source 1..80: mol_type = other DNA
agggcacatataccattatgccatgtacataggtcagggaaaaacaattggtgtgcattctcctagggctgctttttcca

SEQ ID NO: 98344 - DNA, 80 bp, synthetic construct
  source 1..80: mol_type = other DNA
tggttaccaaggccggttggataggaactctatagaaagacaactgtggtggacccgtggccccaatcatgatgatccaa

SEQ ID NO: 98345 - DNA, 80 bp, synthetic construct
  source 1..80: mol_type = other DNA
tacctaggatcaccatacacccaatcgctgcttggtggagggtgtgctatgtccccacccaggaacaaaggctaagttat

SEQ ID NO: 98346 - DNA, 80 bp, synthetic construct
  source 1..80: mol_type = other DNA
tcaaggatctctcaaactccagagtgccaaccttgattcaaggcatgtttgtttctcctgatgttaatcaatcagtgcaa

SEQ ID NO: 98347 - DNA, 80 bp, synthetic construct
  source 1..80: mol_type = other DNA
ggttatcctctacttccattctaaatttcctggttctggtcctgctgataaacttagggtcccatgtctgatgccacaag

SEQ ID NO: 98348 - DNA, 80 bp, synthetic construct
  source 1..80: mol_type = other DNA
atgcctgtccctatacccctagcccaaaaatccaaacaacctctgatggctgggcaagataaccctaattatgctgcttc

SEQ ID NO: 98349 - DNA, 80 bp, synthetic construct
  source 1..80: mol_type = other DNA
ttggtgacatcaggccgctttaatcacccaactcaggactggtccaaggacaccccagatttccaacaagacagtaagct

SEQ ID NO: 98350 - DNA, 80 bp, synthetic construct
  source 1..80: mol_type = other DNA
gtggcccccctaaacaacaacgggacagggcaccacggaatgtggctgaaacccaacaggcgatgggatggacagaccca

SEQ ID NO: 98351 - DNA, 80 bp, synthetic construct
  source 1..80: mol_type = other DNA
aaccactaaacattctcaacctattatccaactgtgattggaccttcatgggtatagttgaaaccataatattgctgatg

SEQ ID NO: 98352 - DNA, 80 bp, synthetic construct
  source 1..80: mol_type = other DNA
tgctgatgtcagcaataacaaagctaacaccaacaatgaaaacattgggtctcgcctcatggcgaggcttcgtgggcatt

SEQ ID NO: 98353 - DNA, 80 bp, synthetic construct
  source 1..80: mol_type = other DNA
agcctctaaacctcattaacctcctttctaattgtgactggacctttatgggggttgttgagctgatcgtgctaatggct

SEQ ID NO: 98354 - DNA, 80 bp, synthetic construct
  source 1..80: mol_type = other DNA
gaattatttgatgtgttttggacaccacctgacatttcaagctttatagcctcactgctaccagaattccacttgcaagg

SEQ ID NO: 98355 - DNA, 80 bp, synthetic construct
  source 1..80: mol_type = other DNA
cagaagatctggctaaagacctagtccctctcatacttggtggtattggtttggcaataggctttacaagggacaaggtt

SEQ ID NO: 98356 - DNA, 80 bp, synthetic construct
  source 1..80: mol_type = other DNA
atatggcattggatttgttacgccggtcacaaacaccctcccctacccggcataaccacccccccaaagaccagagagac

SEQ ID NO: 98357 - DNA, 80 bp, synthetic construct
  source 1..80: mol_type = other DNA
cgcccgccacggactgccatggaggtgaaaagaactatgggttgggatgatgagccagaacaagaagagagcacagctag

SEQ ID NO: 98358 - DNA, 80 bp, synthetic construct
  source 1..80: mol_type = other DNA
acatccaggtgacaccaatgcaatcaaggatttgtataagaaggatttctcacacttgaagatggaaatagccccccagg

SEQ ID NO: 98359 - DNA, 80 bp, synthetic construct
  source 1..80: mol_type = other DNA
acggccactctcgctctatccaggttgcgtgcggcccgagcattggcttatgcctcttgttttcagagtgcggttttgtc

SEQ ID NO: 98360 - DNA, 80 bp, synthetic construct
  source 1..80: mol_type = other DNA
gaggatctcaaaaacgtggccattcatagggttggtgagtttacccaattccgcttctccaaaaagatgagacctgacct

SEQ ID NO: 98361 - DNA, 80 bp, synthetic construct
  source 1..80: mol_type = other DNA
cgcggtaggctgcctgaagcaggtcttttggaagccgcagtggaaacagtcaccaatgccattgaacaagtcatggacac

SEQ ID NO: 98362 - DNA, 80 bp, synthetic construct
  source 1..80: mol_type = other DNA
gctactaatggagttgatattggggttggagacctgacaaccgttcgcgggccttattggaatctatgcccccttccacc

SEQ ID NO: 98363 - DNA, 80 bp, synthetic construct
  source 1..80: mol_type = other DNA
tataaagttacctatcaaagttggtatgaatgctattgaagatggccccctaatctatgcagagcatgccaaatacaagt

SEQ ID NO: 98364 - DNA, 80 bp, synthetic construct
  source 1..80: mol_type = other DNA
gtgaaagacggcctgccatcaggcttcccgtgtacctcacaagtcaacagcataaatcactggattctcaccctgtgtgc

SEQ ID NO: 98365 - DNA, 80 bp, synthetic construct
  source 1..80: mol_type = other DNA
attgtcagaagtcaccgggctctccccagatgtgttgcagtcacagtcgtatttttccttctatggggatgatgagatag

SEQ ID NO: 98366 - DNA, 80 bp, synthetic construct
  source 1..80: mol_type = other DNA
ttctacagaaagatagcaagcagagtcatccaggaagttaaagaaggggggttagaaatttacatccctgggtggcaggc

SEQ ID NO: 98367 - DNA, 80 bp, synthetic construct
  source 1..80: mol_type = other DNA
ggtccctcttgaagatgttagaaatgtgcttttccacaataatgatagttcccccactatgagattggtctgcatgttgt

SEQ ID NO: 98368 - DNA, 80 bp, synthetic construct
  source 1..80: mol_type = other DNA
tccaaaatggcagagtcacgcttgatggccagttgcagggtacaacccctacttcactgagccagctatgcaagattaga

SEQ ID NO: 98369 - DNA, 80 bp, synthetic construct
  source 1..80: mol_type = other DNA
gggaaagtcttccatgccagtgggggcaatggtctgaatctgactgaattagatggttctgcttatcatgcttttgaaag

SEQ ID NO: 98370 - DNA, 80 bp, synthetic construct
  source 1..80: mol_type = other DNA
tcctgctccaattgggtttccggacatcggtgactgtgactggcacatgaacgccacagccactaacaatttcactgggt

SEQ ID NO: 98371 - DNA, 80 bp, synthetic construct
  source 1..80: mol_type = other DNA
ccagcaatgaatatcaaatactcattaaacaagaatcagcatttgctccccaccttggccatgtgcaggctgataatctg

SEQ ID NO: 98372 - DNA, 80 bp, synthetic construct
  source 1..80: mol_type = other DNA
tcagcaggcgccaacactgatcttatagtgtccttgagttggatatcccctgtttcagaccaacataggcatgacgtgga

SEQ ID NO: 98373 - DNA, 80 bp, synthetic construct
  source 1..80: mol_type = other DNA
tccatgggtcataccacgttatggttcttccctcactgaagctgcccaattggccccgcccatttaccctcctggctttg

SEQ ID NO: 98374 - DNA, 80 bp, synthetic construct
  source 1..80: mol_type = other DNA
ctttattcgcaaacttaaggaagtaaaatttttgtaatatgaattagtgggcatcatattcaattggaattttaaattag

SEQ ID NO: 98375 - DNA, 80 bp, synthetic construct
  source 1..80: mol_type = other DNA
gcaaacttaaggaagtaaaatttttgtaatatgaattagtgggcatcatattcaattggaattttaaattagttttaatt

SEQ ID NO: 98376 - DNA, 80 bp, synthetic construct
  source 1..80: mol_type = other DNA
tgctgatgtcagcaaacaaaatgctaacaccaacaacgaaaacatcggttctcgcctcatggcgagactgaaggagcgta

SEQ ID NO: 98377 - DNA, 80 bp, synthetic construct
  source 1..80: mol_type = other DNA
tgtgattggacttttatgggggtcgtggagctggtagtgctaatggctgaactatttgacatcttctggacccctcctga

SEQ ID NO: 98378 - DNA, 80 bp, synthetic construct
  source 1..80: mol_type = other DNA
tgtctccaactttatagcatctcttttgcccgactttcacctacaaggaccagaggatttggcaaaagatctggtcccgc

SEQ ID NO: 98379 - DNA, 80 bp, synthetic construct
  source 1..80: mol_type = other DNA
tgatattggggggcattggcctggccattggattcaccagagacaagataacaaaagtcatgaagagtgctgttgatggc

SEQ ID NO: 98380 - DNA, 80 bp, synthetic construct
  source 1..80: mol_type = other DNA
ccatccccaacgcgctcggatcctcctcccaaatcacagcgtgaccgccctccaagaactgtatcagaagtaaagcaagc

SEQ ID NO: 98381 - DNA, 80 bp, synthetic construct
  source 1..80: mol_type = other DNA
acagctttcaccagcttggctcgggccaatgggctaggactcttaagcatggcagcacttggcaaaaagttgcgaagtgt

SEQ ID NO: 98382 - DNA, 80 bp, synthetic construct
  source 1..80: mol_type = other DNA
attaggttggggtgattccacccataaggattatggggcccgagcatggtgtgacctaacagctgaagagaagaaagaga

SEQ ID NO: 98383 - DNA, 80 bp, synthetic construct
  source 1..80: mol_type = other DNA
ataccattaagggagatggatcaaatgtgggtgttactgagaaacaggtggtggcctctcttcagcaacaagccgtcagc

SEQ ID NO: 98384 - DNA, 80 bp, synthetic construct
  source 1..80: mol_type = other DNA
ccctggagggtaaacccaaggaacacaattgcagggtccaccgtgccgaaagggaaggccatggacctattggtcatgat

SEQ ID NO: 98385 - DNA, 80 bp, synthetic construct
  source 1..80: mol_type = other DNA
agaaggtaaaaacaaaggtaagaacaagaaagggcgaggtaggaaaaacaattacaacgccttttccagacgaggcctaa

SEQ ID NO: 98386 - DNA, 80 bp, synthetic construct
  source 1..80: mol_type = other DNA
ggtggagatggcgggatcggtgagacagaagcagagattcgccatcgggtcttctataaatccaagagtggcatgcgcaa

SEQ ID NO: 98387 - DNA, 80 bp, synthetic construct
  source 1..80: mol_type = other DNA
aaaacgtaaacccatagattggacaccgcctaaaaatgactggtcagaagatactagggaagtcaattatgatgaacaca

SEQ ID NO: 98388 - DNA, 80 bp, synthetic construct
  source 1..80: mol_type = other DNA
tcttggataataacgagcgcctctttgatgctggcggtgtgactccatcaacagtgccgagtacttttgaaagatatgag

SEQ ID NO: 98389 - DNA, 80 bp, synthetic construct
  source 1..80: mol_type = other DNA
aattctggaaatcaactccccaacccctcccacctggaacctacgagccagcttacttgggtgggcgtgaccccagagtg

SEQ ID NO: 98390 - DNA, 80 bp, synthetic construct
  source 1..80: mol_type = other DNA
gatggtggaccatcacttcaacaggtcctgcgcgatcagctcaaaccttttgctgaacctcgtggtaggatgccagaacc

SEQ ID NO: 98391 - DNA, 80 bp, synthetic construct
  source 1..80: mol_type = other DNA
gcatttgatcaaactaatgatggccattctgttagatggaacgaatccacgggagtagatctaggtgtgggttctctaac

SEQ ID NO: 98392 - DNA, 80 bp, synthetic construct
  source 1..80: mol_type = other DNA
aagcttactagaagcagctgtagagactgtcacaaacgtcttagagcaaaccatggacacacctgtaccatggagctaca

SEQ ID NO: 98393 - DNA, 80 bp, synthetic construct
  source 1..80: mol_type = other DNA
attggaatggcagtgcatttgtgcgtgagcttggggaacaggcagctcacgccaacaacatgtatgaactaggcaaatca

SEQ ID NO: 98394 - DNA, 80 bp, synthetic construct
  source 1..80: mol_type = other DNA
gttaaaccagtttacactgcagcactcaaagatgaactggtaaaacctgaaaaagtgtacacaaaaataaagaaaagact

SEQ ID NO: 98395 - DNA, 80 bp, synthetic construct
  source 1..80: mol_type = other DNA
acagcttgggattcaacccagaacagagaaatcatgttagaatcttttaacatcatgtgcaaactcacggctaatccatc

SEQ ID NO: 98396 - DNA, 80 bp, synthetic construct
  source 1..80: mol_type = other DNA
tctgtcggaggtcacgggcttggctcctgatgttttgcagtcccaatcttatttttccttctatggggatgatgaaattg

SEQ ID NO: 98397 - DNA, 80 bp, synthetic construct
  source 1..80: mol_type = other DNA
cacagttgcaggtccagtgtggaatatgtgtcctcttccaccgattgattcacgcaataatggtcctgcaagtgaaccac

SEQ ID NO: 98398 - DNA, 80 bp, synthetic construct
  source 1..80: mol_type = other DNA
cggttaccaggggcgtctggaccgcaactctattgaaagacaactgtggtggactcggggcccaaaccatgatgacccct

SEQ ID NO: 98399 - DNA, 80 bp, synthetic construct
  source 1..80: mol_type = other DNA
agattgccaacagagttatacaggaagtcaaggaaggggggcttgagctctacataccaggttggcaggccatgttccgc

SEQ ID NO: 98400 - DNA, 80 bp, synthetic construct
  source 1..80: mol_type = other DNA
gcatcggggacatgatagaattctatgaaggacacatatttcattatgccatatatcttggccaagggaagaccataggg

SEQ ID NO: 98401 - DNA, 80 bp, synthetic construct
  source 1..80: mol_type = other DNA
cttgcggggaatgcgttcactgctggtaaaatcataatttgttgtgtcccaccaggttttgcatcccaaaacatatcaat

SEQ ID NO: 98402 - DNA, 80 bp, synthetic construct
  source 1..80: mol_type = other DNA
tggacaagccacgatgttccctcatgtcatagcagatgtgagggtgctggagcctattgaaatcccccttgatgatgtac

SEQ ID NO: 98403 - DNA, 80 bp, synthetic construct
  source 1..80: mol_type = other DNA
gcaatgtcttatttcacaccaatgagaaccgccccaccatgcggttgctctgcatgctgtacacacccctccgtgctgga

SEQ ID NO: 98404 - DNA, 80 bp, synthetic construct
  source 1..80: mol_type = other DNA
ggtgcttcatcaggcacagatccttttgtcattgcaggtcgtgtgctaacttgcccttcccccgatttcaattttctgtt

SEQ ID NO: 98405 - DNA, 80 bp, synthetic construct
  source 1..80: mol_type = other DNA
ccaagacccaactggggaccaattaggcacactagcctgggtctccccctccactagcggagctagggttgatccctgga

SEQ ID NO: 98406 - DNA, 80 bp, synthetic construct
  source 1..80: mol_type = other DNA
atacaggcggtggcccccaaaaccttcctacaaatggagtttttgtcttttcttcttgggtttctagatattatcaatta

SEQ ID NO: 98407 - DNA, 80 bp, synthetic construct
  source 1..80: mol_type = other DNA
aacaggatctcaccttacaggagaactcttttaaacatgatgaaaggatgttgggtttgcagattgagggatcaaatgct

SEQ ID NO: 98408 - DNA, 80 bp, synthetic construct
  source 1..80: mol_type = other DNA
cgtcggggcccccgtaacaaagattgtggattggaatggggtgaggatcgccgcccctacgtccactgccaccacccttc

SEQ ID NO: 98409 - DNA, 80 bp, synthetic construct
  source 1..80: mol_type = other DNA
gatctggcaattttatgaacataccagtcacacttaaaaaggagtcccaaaacctgtcagcacgttctgtaggtctttcc

SEQ ID NO: 98410 - DNA, 80 bp, synthetic construct
  source 1..80: mol_type = other DNA
aacgcctcagctatgaccaattaaaagagctcgagaatgaaccatggccttatgcatccataacaaataattgttatgag

SEQ ID NO: 98411 - DNA, 80 bp, synthetic construct
  source 1..80: mol_type = other DNA
aatcctaattacgactcatccacaatggtctctagaacaacccaatgggtggagtcacaaaattcaattagaaatttatc

SEQ ID NO: 98412 - DNA, 80 bp, synthetic construct
  source 1..80: mol_type = other DNA
caactttttccactgtttcttcggcgccacggttctttaatactgagcgccttcctttgttcgcaaacaataggaaatag

SEQ ID NO: 98413 - DNA, 80 bp, synthetic construct
  source 1..80: mol_type = other DNA
taagctcccaacgtggtgaaggcaccacaaagattaagaacactgaaatggcattggaactgatacgtaggtcccaaaca

SEQ ID NO: 98414 - DNA, 80 bp, synthetic construct
  source 1..80: mol_type = other DNA
ttttgttgccgtgtcatgtccctggacgactcttggttacagcgaaaattggtgacctctggtaggttcaatcaccccac

SEQ ID NO: 98415 - DNA, 80 bp, synthetic construct
  source 1..80: mol_type = other DNA
tcaggagtggtctagggatacaccggacttccatcaagattcaaaattagagatagtgagagacgcaattctgtctgcta

SEQ ID NO: 98416 - DNA, 80 bp, synthetic construct
  source 1..80: mol_type = other DNA
taaatggcctagtctctcaacctttcaaaaacattctttccaagattaaaccattaaacttgttatccttgttgtcaaat

SEQ ID NO: 98417 - DNA, 80 bp, synthetic construct
  source 1..80: mol_type = other DNA
accggcaatggtacttatgctcccaaaattggtcaggtcaggttctattcaacttcaaacaattttgaagtaaaccaacc

SEQ ID NO: 98418 - DNA, 80 bp, synthetic construct
  source 1..80: mol_type = other DNA
tgctggagaatttactgtttcccctaggaatgccccaggtgagttcttgcttgatttagaattaggtcctgatttgaacc

SEQ ID NO: 98419 - DNA, 80 bp, synthetic construct
  source 1..80: mol_type = other DNA
cctatctggcacatttggcaagaatgtacaacggtcatgcgggtggtatggaagtgcaaatagtactagctgggaatgcg

SEQ ID NO: 98420 - DNA, 80 bp, synthetic construct
  source 1..80: mol_type = other DNA
ttcacagctggtaaaatcctgttcgccgtcataccgcctggatttccgtatgaaaacttgtccccagcacaactcacgat

SEQ ID NO: 98421 - DNA, 80 bp, synthetic construct
  source 1..80: mol_type = other DNA
gtgcccccacgtcgtggttgatgtaaggcagcttgagcctgtcatgctgcccatgccagacattaggaatacattctttc

SEQ ID NO: 98422 - DNA, 80 bp, synthetic construct
  source 1..80: mol_type = other DNA
attataatcaagatggtgggccaaaattgaggttgattgctatgctgtatacccctctaagagctaataattcaggtgat

SEQ ID NO: 98423 - DNA, 80 bp, synthetic construct
  source 1..80: mol_type = other DNA
gatgtgttcactgtttcctgtagggttcttacaaggcctgcccctgattttgaatttacatttttagttcccccctctgt

SEQ ID NO: 98424 - DNA, 80 bp, synthetic construct
  source 1..80: mol_type = other DNA
ggcactactctcgtctctccagtctctgtgtgcaatttcaagggaaacttgcaaactgaggtcccaggtgaacgccagct

SEQ ID NO: 98425 - DNA, 80 bp, synthetic construct
  source 1..80: mol_type = other DNA
ccgctgttgccaacagcaacaacgacatcgcaaaatcttcaagtgacggagtgctttctagcatggctgtcacttttaaa

SEQ ID NO: 98426 - DNA, 80 bp, synthetic construct
  source 1..80: mol_type = other DNA
aacggggaggatgaaatagtggtttcctatagtgtcaaagatggtgtttccggcttgcccgaactttccaccgtcagaca

SEQ ID NO: 98427 - DNA, 80 bp, synthetic construct
  source 1..80: mol_type = other DNA
gaggcagaccaccaaagccaagtgtgttggaagccgccaagaaaactattatcaatgtccttgaacaaacaattgaccca

SEQ ID NO: 98428 - DNA, 80 bp, synthetic construct
  source 1..80: mol_type = other DNA
ggggctcggacttagcgaccatgatccggtgcgcccgagcgtttgggggcttaatggatgaactcaaagcacactgtgtc

SEQ ID NO: 98429 - DNA, 80 bp, synthetic construct
  source 1..80: mol_type = other DNA
ggggctcggacttagcgaccatgatccggtgcgcccgagcgtttggtggcttaatggatgaactcaaagcacactgtgtc

SEQ ID NO: 98430 - DNA, 80 bp, synthetic construct
  source 1..80: mol_type = other DNA
aggtagtcgcagaagaccttctctctcctagcgtggttgatgtgggcgacttcaaaatatcaatcaatgagggtctcccc

SEQ ID NO: 98431 - DNA, 80 bp, synthetic construct
  source 1..80: mol_type = other DNA
aaattacacggggagtcgtttccctacacagcctttgacaacaattgctatgccttctgttgttgggtcttggacctaaa

SEQ ID NO: 98432 - DNA, 80 bp, synthetic construct
  source 1..80: mol_type = other DNA
gcagagtccaattcgccactgacacagacaacgatttcgagtctggcgaaaacacgaaattcaccccagtcggcgtcatc

SEQ ID NO: 98433 - DNA, 80 bp, synthetic construct
  source 1..80: mol_type = other DNA
caggatggttccaccacccaccggaatgaaccccaacaatgggtgctcccaaattactcaggtagaactggtcataatgt

SEQ ID NO: 98434 - DNA, 80 bp, synthetic construct
  source 1..80: mol_type = other DNA
tcgctcacattcgtaggcgaggggagtcacgggtgtaatgtgaaaagacaaaattgattatctttcttttctttttcttt

SEQ ID NO: 98435 - DNA, 80 bp, synthetic construct
  source 1..80: mol_type = other DNA
caggggaccagcgggtaggtctcatcccacgcaatggcgttgaccactgggacgcatacaagggagagagggtcgtcctc

SEQ ID NO: 98436 - DNA, 80 bp, synthetic construct
  source 1..80: mol_type = other DNA
aacggggaggacgaaccagtggtttcttatagcgtcaaagatggcgtctccggtttgcctgagctttccactgtcaggca

SEQ ID NO: 98437 - DNA, 80 bp, synthetic construct
  source 1..80: mol_type = other DNA
gtgcagaccaacaacgaactggctggcgctctacaccacctcagatgtgccagaattaggtactatgtcaagtgtgtcca

SEQ ID NO: 98438 - DNA, 80 bp, synthetic construct
  source 1..80: mol_type = other DNA
ggaggccctgtattccatcatccaaattgctggagctgcatttgtcaccacgcgcattgtcaaacgcatgaacatacagg

SEQ ID NO: 98439 - DNA, 80 bp, synthetic construct
  source 1..80: mol_type = other DNA
aattctccccagaaccacacctggcccagatagttgcagaagatctcctctctcccagtgtgatggatgtaggtgacttt

SEQ ID NO: 98440 - DNA, 80 bp, synthetic construct
  source 1..80: mol_type = other DNA
ctgagggacccctgattatttctgaagacctgaatggtttgaccttcctgcggaggactgtaacccgtgacccagctggt

SEQ ID NO: 98441 - DNA, 80 bp, synthetic construct
  source 1..80: mol_type = other DNA
aatccttacactcggggagctttccaattccagattcccggtatctatagaccaaatgttcactagccctaatgaagtca

SEQ ID NO: 98442 - DNA, 80 bp, synthetic construct
  source 1..80: mol_type = other DNA
ggagctccaagggacaacacagctccaagtcagtggtatttgtgcattcaaaggagaagtgaccgcccatttacacgata

SEQ ID NO: 98443 - DNA, 80 bp, synthetic construct
  source 1..80: mol_type = other DNA
tcggcatcattagccaaagagataatcacaatgtcagtggacataaccagcctgcaaacagggggcatgacgctgtggtc

SEQ ID NO: 98444 - DNA, 80 bp, synthetic construct
  source 1..80: mol_type = other DNA
ccaacctatacagctcaatacaccccaaaattgggtcaaattcaaattggcacgtggcagactgatgacctaaaagttaa

SEQ ID NO: 98445 - DNA, 80 bp, synthetic construct
  source 1..80: mol_type = other DNA
aacctgccaagttcaccccagttggtctcaatgatatggagcattttaatcaatgggtggttcccagatacgctggtgca

SEQ ID NO: 98446 - DNA, 80 bp, synthetic construct
  source 1..80: mol_type = other DNA
ctaaatttaaacacaaatcttgccccttccgttgcaccagtattcccaggagaacggttgctcttcttcagatcatacct

SEQ ID NO: 98447 - DNA, 80 bp, synthetic construct
  source 1..80: mol_type = other DNA
tcctctcaaaggtggttacggcaacccagccattgactgcctggtgccacaggaatggatacagcacttctaccaagaag

SEQ ID NO: 98448 - DNA, 80 bp, synthetic construct
  source 1..80: mol_type = other DNA
ctgccccctcaatgagtgaggttgcccttgttaggtacatcaacccggacactggtcgggcgctgtttgaggccaagctc

SEQ ID NO: 98449 - DNA, 80 bp, synthetic construct
  source 1..80: mol_type = other DNA
gtttagcaggagacgtgctcagcaatgggctcggctcattaattaatgcaggtgctaatgcaataaatcagagagcagag

SEQ ID NO: 98450 - DNA, 80 bp, synthetic construct
  source 1..80: mol_type = other DNA
atggtacaaggtactgggcaccaggctccatgagaacaacttcctactccggaaggttcacatcaaccgctccagcaaga

SEQ ID NO: 98451 - DNA, 80 bp, synthetic construct
  source 1..80: mol_type = other DNA
tactctacacaatcctcaagaccaaccttaaccacaattgcagggtcttcacacagctcaacctcatccaattcgacccg

SEQ ID NO: 98452 - DNA, 80 bp, synthetic construct
  source 1..80: mol_type = other DNA
tagcacaaatctcccctcgactatttctagagccacttctaggactagtgaatgggttagagaccaaaataggaatttgg

SEQ ID NO: 98453 - DNA, 80 bp, synthetic construct
  source 1..80: mol_type = other DNA
aaccctacatgcatggtgctttacaaacggcctttgttacaccaccttctagcagggcatccgatgggacggtctcaacc

SEQ ID NO: 98454 - DNA, 80 bp, synthetic construct
  source 1..80: mol_type = other DNA
ttggactcctggacacctgcgttcaacacccgcaggcagccgctttttgcacacctccgtaagaggggggagtcacaagc

SEQ ID NO: 98455 - DNA, 80 bp, synthetic construct
  source 1..80: mol_type = other DNA
caaaaaccccaaggcacccagcggtgaccagcactgtcccacggttaagattggacctaaaactttagtgatcccaccag

SEQ ID NO: 98456 - DNA, 80 bp, synthetic construct
  source 1..80: mol_type = other DNA
agcccccaaacggtgaagatgttgtgcagtttgacgcgaagtcggaaactgtgcgtgggattcccgatctgacgacagtg

SEQ ID NO: 98457 - DNA, 80 bp, synthetic construct
  source 1..80: mol_type = other DNA
cctaacccaagggtccctgactgcaagagtcgcaggtctcgttcatgagaggagagatgaattccagctacaaggggatg

SEQ ID NO: 98458 - DNA, 80 bp, synthetic construct
  source 1..80: mol_type = other DNA
aatcgaagacctcacatctcagactgcaaacgaggtgagctcagccctcctcaggctcagacaagcaagggccagatact

SEQ ID NO: 98459 - DNA, 80 bp, synthetic construct
  source 1..80: mol_type = other DNA
agaggggggtgcttggcctggttactggctcggacatcagaaagaggagaccagatgacttccagccaaagggtaacttg

SEQ ID NO: 98460 - DNA, 80 bp, synthetic construct
  source 1..80: mol_type = other DNA
ccggttggggtttttgggtctcatccaacctccttatcacaacaacacatgtcctacctaagggcatcaaggaactcttt

SEQ ID NO: 98461 - DNA, 80 bp, synthetic construct
  source 1..80: mol_type = other DNA
cccgaggtggcaacactgtcatctgcgccacccaagggcaggatggggaggcagtccttgaagggaatgagaatcttggc

SEQ ID NO: 98462 - DNA, 80 bp, synthetic construct
  source 1..80: mol_type = other DNA
cccgagggggcaacactgtcatctgcgccacccaagggcaggatggggaggcagtccttgaagggaatgagaatcttggc

SEQ ID NO: 98463 - DNA, 80 bp, synthetic construct
  source 1..80: mol_type = other DNA
cagaggcaaaccaccaaggcccacagtcctagaagaggctaaaaagacagtgatgaatgtcctagaacaaaccattgacc

SEQ ID NO: 98464 - DNA, 80 bp, synthetic construct
  source 1..80: mol_type = other DNA
ttgtcatctcagtccaggaaggtttaccatcaggagtcccatgcacatcacaatggaactcgatagcgcattggatttta

SEQ ID NO: 98465 - DNA, 80 bp, synthetic construct
  source 1..80: mol_type = other DNA
agcagctataagcctcgcgacaatagagctcacccccatatctctctactggcggcctgtctacaccccaaattatttgg

SEQ ID NO: 98466 - DNA, 80 bp, synthetic construct
  source 1..80: mol_type = other DNA
tctgtccagacacattgaagggccttgctggtgaaaagtttccctacacggccttcagtaataactgctacaacttctgt

SEQ ID NO: 98467 - DNA, 80 bp, synthetic construct
  source 1..80: mol_type = other DNA
attctggtgaggacgtgttcactgtgtcctgcagggttttgactcgtcccgctccagattttgagttcacatttttagtg

SEQ ID NO: 98468 - DNA, 80 bp, synthetic construct
  source 1..80: mol_type = other DNA
ggctgctatagatatgctttatactgatcctaatgaatcaatagttgtacaaccccaaaatggtaggtgcactcttgatg

SEQ ID NO: 98469 - DNA, 80 bp, synthetic construct
  source 1..80: mol_type = other DNA
ttagaggcactctgatcagccagaccgcgagagcggccgactcaacagattccccccagagagcccgtgatcatccatta

SEQ ID NO: 98470 - DNA, 80 bp, synthetic construct
  source 1..80: mol_type = other DNA
caaaggtacagtttttggagtggccagtcaaagggatgtctctgggcaacaagaacagggccactatgccacccgagccc

SEQ ID NO: 98471 - DNA, 80 bp, synthetic construct
  source 1..80: mol_type = other DNA
tttactacaaatcagcccattaggttcactccggtgggcatgggtgacaacaattggagacagtgggagttacctgatta

SEQ ID NO: 98472 - DNA, 80 bp, synthetic construct
  source 1..80: mol_type = other DNA
ttctggtagattaactttgaacatgaacctcgctcccgctgtttctccgtctttccctggtgaacgaattcttttcttca

SEQ ID NO: 98473 - DNA, 80 bp, synthetic construct
  source 1..80: mol_type = other DNA
ggtctatagtaccatcagccggaggcttcggatccggttatatagactgtctcatacctcaggaatgggtacagcacttc

SEQ ID NO: 98474 - DNA, 80 bp, synthetic construct
  source 1..80: mol_type = other DNA
ctgggaacaatcctattgtggtcccccccaatggttattttagatttgaagcttgggttaatcagttttatacacttgcc

SEQ ID NO: 98475 - DNA, 80 bp, synthetic construct
  source 1..80: mol_type = other DNA
tagcagccctgttcatagatcctttgctaccccccagcatactgctccaccaaagggcaagttgcaaggtgattctgcta

SEQ ID NO: 98476 - DNA, 80 bp, synthetic construct
  source 1..80: mol_type = other DNA
gtgtgtacagttctccctctaccatttcttcacaatcaacccattcaacagcgctgtctgcaggaactgggtcgtccagg

SEQ ID NO: 98477 - DNA, 80 bp, synthetic construct
  source 1..80: mol_type = other DNA
cgtaggcgaggggagtcacaaatttagtgaaaagagtgattaggttttctttccctttctcttctccttttctctctttt

SEQ ID NO: 98478 - DNA, 80 bp, synthetic construct
  source 1..80: mol_type = other DNA
ttttgggaaaactcaaaccactaaacctactacacctactcgcgtcctgtgactggacattcgcaggcatagtggagacg

SEQ ID NO: 98479 - DNA, 80 bp, synthetic construct
  source 1..80: mol_type = other DNA
gcagtgcaaacgctaccagcgacagcattcaagactcccagaataacaacgagggagtctcattattatccaacgtaaag

SEQ ID NO: 98480 - DNA, 80 bp, synthetic construct
  source 1..80: mol_type = other DNA
tcaccacagagaagctcggccggatgctgacctccgcagcatccaccttgcgcgcgtgtaaagatcttggtgggtacgcg

SEQ ID NO: 98481 - DNA, 80 bp, synthetic construct
  source 1..80: mol_type = other DNA
cttgacatactcaaacttgtcatgaagtggttcttcccccccaaggaagaaaaggcagagatggagacactcagggcaat

SEQ ID NO: 98482 - DNA, 80 bp, synthetic construct
  source 1..80: mol_type = other DNA
tagaggatgcagtcctcgatatggaagctataggaaataaccacttgaccagcttgctcaaggacaaagacagcctccaa

SEQ ID NO: 98483 - DNA, 80 bp, synthetic construct
  source 1..80: mol_type = other DNA
tggcacgattaatgctatactggctagaatcgcagctgctaggtcgctcttacacaaagcaaaggaagagatgtgttcaa

SEQ ID NO: 98484 - DNA, 80 bp, synthetic construct
  source 1..80: mol_type = other DNA
gaataagacccgtcgtcgtcatgatatcaggccgccccgggattggtaaaacccacatggcaagacatctggcaaaaacg

SEQ ID NO: 98485 - DNA, 80 bp, synthetic construct
  source 1..80: mol_type = other DNA
gtggcaggtacaatgactggcgaccaaagagttggccttgtgcctaggaatggggttgaccactgggacgcgtacaggtg

SEQ ID NO: 98486 - DNA, 80 bp, synthetic construct
  source 1..80: mol_type = other DNA
gtggcaggtacaatgactggcgaccaaagagttggccttgtgcctaggaatggggttgaccactgggacgcgtacagggg

SEQ ID NO: 98487 - DNA, 80 bp, synthetic construct
  source 1..80: mol_type = other DNA
tgagagaattgtgctgtgggatgactatggcatgggcagccccgtgaaggacgcactaaccctccaggaattggctgaca

SEQ ID NO: 98488 - DNA, 80 bp, synthetic construct
  source 1..80: mol_type = other DNA
aataaaaggggagatgttacgggtccctgacccccctccaaacggggaagatgtggtgacctacaagagggatggagacc

SEQ ID NO: 98489 - DNA, 80 bp, synthetic construct
  source 1..80: mol_type = other DNA
accctcgccccccaaggtgggtttgacaagaacggtaatacgccccatggaaaaggagtgatgaagactctttcgcaagg

SEQ ID NO: 98490 - DNA, 80 bp, synthetic construct
  source 1..80: mol_type = other DNA
gtcgctcacggcaaggatcgcgggactcgttcacgagaggcgcgacgagttccagcttcaaggcgaagacatacaaactt

SEQ ID NO: 98491 - DNA, 80 bp, synthetic construct
  source 1..80: mol_type = other DNA
atgattttgacaccagcacaattggctcgttccggaaactggctgcagacaacaaatacagcctgatggagacaatgagg

SEQ ID NO: 98492 - DNA, 80 bp, synthetic construct
  source 1..80: mol_type = other DNA
gtcggtaaacagcttaaagatgtcaagaccatggatcaactcaagctcgctatcaaagacttcagggtcaaagagtgcaa

SEQ ID NO: 98493 - DNA, 80 bp, synthetic construct
  source 1..80: mol_type = other DNA
gatcatatataagggaaacctgtataggatgtcatcagatggcaaggggaaggttagtgtcaacagggaagcttctgcca

SEQ ID NO: 98494 - DNA, 80 bp, synthetic construct
  source 1..80: mol_type = other DNA
ccagtcagactgtcaatgaggccatatcagccatcaaccggttgagacaggcaagaatcaggttctatgtgcaaagtgcc

SEQ ID NO: 98495 - DNA, 80 bp, synthetic construct
  source 1..80: mol_type = other DNA
aaataacaggtatacctgatttgacaacagtccgagatgaaactggcaacaccccctacactgtgccacctcttagtgag

SEQ ID NO: 98496 - DNA, 80 bp, synthetic construct
  source 1..80: mol_type = other DNA
caggagatcatcctgaccttgctgcaagtggcgggagccgcctttgttgttggcaggatatcaaggaggttcaactgggg

SEQ ID NO: 98497 - DNA, 80 bp, synthetic construct
  source 1..80: mol_type = other DNA
caggagatcatcctgaccttgctgcaagtggcgggagccgcctttgttgttggcaggatatcaaggaggttcaactggtg

SEQ ID NO: 98498 - DNA, 80 bp, synthetic construct
  source 1..80: mol_type = other DNA
caaagccattggagaggacaaaacgatagagggagaccacgaccaacccgcagagactggcagtgacaagtggaagataa

SEQ ID NO: 98499 - DNA, 80 bp, synthetic construct
  source 1..80: mol_type = other DNA
agattgatgacgctgagactgagggtaagaaaggtaagaacaagaaagggagaggcaagaaacacacagctttctccagc

SEQ ID NO: 98500 - DNA, 80 bp, synthetic construct
  source 1..80: mol_type = other DNA
aggggcgtgttgggcttggtcactggctctgaaatcaggaagagaagaccagatgatttccagccaaagggaaaactgtg

SEQ ID NO: 98501 - DNA, 80 bp, synthetic construct
  source 1..80: mol_type = other DNA
ctataatgagagactagactttgaggccccacccagtatatggtctcgcatagtcccatttggcaccggctgggctttct

SEQ ID NO: 98502 - DNA, 80 bp, synthetic construct
  source 1..80: mol_type = other DNA
gggtatcgcctagcctcctgataacaaccacccatgtagtgccgaagggactaaatgaagcctttggcgttgacatcaaa

SEQ ID NO: 98503 - DNA, 80 bp, synthetic construct
  source 1..80: mol_type = other DNA
caaatacaagtccacaggtccggtgagttctgtaggctcaggttcccaaggccaatcaggacagatgtgactggcatgat

SEQ ID NO: 98504 - DNA, 80 bp, synthetic construct
  source 1..80: mol_type = other DNA
cctcgaagagggcgcaccagaagggacggtttgctcgattctgataaagcgtgccactggtgagatgctccctctagctg

SEQ ID NO: 98505 - DNA, 80 bp, synthetic construct
  source 1..80: mol_type = other DNA
agagagcacaggccagccaccgaaccactacctggctcaattcttgaaatgtgggacggcgagttcttccattacgcact

SEQ ID NO: 98506 - DNA, 80 bp, synthetic construct
  source 1..80: mol_type = other DNA
tccgcatggggacacatgcttcaatgaagatacaaggcaagacagtaggtggacagatgggcatgctgctcactggctcg

SEQ ID NO: 98507 - DNA, 80 bp, synthetic construct
  source 1..80: mol_type = other DNA
aatgcaaagaacatggacctcggcacgagcccaggggactgtggctgcccgtacgtctacaagaggggcaacgatctggt

SEQ ID NO: 98508 - DNA, 80 bp, synthetic construct
  source 1..80: mol_type = other DNA
ggaaggagaaccttggaacctactgtggggcccctatactatccactggcaaggcaccaaagctcagtaccaaaacaaaa

SEQ ID NO: 98509 - DNA, 80 bp, synthetic construct
  source 1..80: mol_type = other DNA
ttctggaggtcatcaccagaggcattgcccccggggacctatgaacctgcctacctcggcgggaaagacccaagggtgga

SEQ ID NO: 98510 - DNA, 80 bp, synthetic construct
  source 1..80: mol_type = other DNA
ttctggaggtcatcaccagaggcattgcccccggggacctatgaacctgcctacctcggcgggaaagacccaagtgtgga

SEQ ID NO: 98511 - DNA, 80 bp, synthetic construct
  source 1..80: mol_type = other DNA
gggaagccaccaaaccccaaagtccttgaagaggccaagaagactatcatgaatgtcctggaacagacaatagacccacc

SEQ ID NO: 98512 - DNA, 80 bp, synthetic construct
  source 1..80: mol_type = other DNA
acaaaaatggacgtaccagcaggcatgccagtccctggacaagacaacgtccagtggtagcccgcatcatgtcagaaaga

SEQ ID NO: 98513 - DNA, 80 bp, synthetic construct
  source 1..80: mol_type = other DNA
atgaacactggaacggggaatcgtttactgggccacttgccgatcaggcttctaaagccaacctaatgtatgagcagggc

SEQ ID NO: 98514 - DNA, 80 bp, synthetic construct
  source 1..80: mol_type = other DNA
attaaaggatgaattggtcaaaactagcaaattgtacaaaactataaagaaaagactcttgtggggatcagaccttggta

SEQ ID NO: 98515 - DNA, 80 bp, synthetic construct
  source 1..80: mol_type = other DNA
caatgattcggtgtgcgcgggcatttggcgggctccttgacagtatgaaggccagctgtatagcactaccctgcagagtg

SEQ ID NO: 98516 - DNA, 80 bp, synthetic construct
  source 1..80: mol_type = other DNA
ggcatgaacatgaatgaagatggccccatcatcttcgaaaaacattctaggttcaaataccattatgatgctgattactc

SEQ ID NO: 98517 - DNA, 80 bp, synthetic construct
  source 1..80: mol_type = other DNA
gcacaagtagtcgcagaggacttggtggcccctagcagtcttgatgtcggtgattttgtggtgtctgtccaggaaggcct

SEQ ID NO: 98518 - DNA, 80 bp, synthetic construct
  source 1..80: mol_type = other DNA
ccgccgccatcagcatggccaccatcgagctcacaccaatctcactgtactggagggtggtttacacccccccgtacctc

SEQ ID NO: 98519 - DNA, 80 bp, synthetic construct
  source 1..80: mol_type = other DNA
accatctggagttccatgcacatcacagtggaactccatctcccactggctgctaaccctttgtgctatgtcagaagtct

SEQ ID NO: 98520 - DNA, 80 bp, synthetic construct
  source 1..80: mol_type = other DNA
ctggattgtcacccgatgtggtccaggcatattccctgttctctttttatggtgacgatgagatagtgagcaccgacatt

SEQ ID NO: 98521 - DNA, 80 bp, synthetic construct
  source 1..80: mol_type = other DNA
gatatcgacccagagaagctcacacaacaactgaggagctatggactcgtgcccactaggccagacaaaaccgagggccc

SEQ ID NO: 98522 - DNA, 80 bp, synthetic construct
  source 1..80: mol_type = other DNA
gctgattatctctaaagacctcacaaatctgaccttcctgagaagaaccatcacaagagatcctgcaggatggtttggaa

SEQ ID NO: 98523 - DNA, 80 bp, synthetic construct
  source 1..80: mol_type = other DNA
agctggacaaagattcaatactcagacaactctattggacaaaggggccaaatcatgagaatccatatgagagtatgata

SEQ ID NO: 98524 - DNA, 80 bp, synthetic construct
  source 1..80: mol_type = other DNA
ccacatgcacagagagcaacacagctaatggcactcctaggagagtctgccctgcacggccctcaattttacaaaaaggt

SEQ ID NO: 98525 - DNA, 80 bp, synthetic construct
  source 1..80: mol_type = other DNA
gtgtcaccagactcccttaagggattggctggggagaaatttccgtacaccgcgttcagcaacaattgttacaacttttg

SEQ ID NO: 98526 - DNA, 80 bp, synthetic construct
  source 1..80: mol_type = other DNA
tgcaggtgagtttactgtttcccctagaaattcccccggagagatcttgcttgatttggaattgggaccagaattaaacc

SEQ ID NO: 98527 - DNA, 80 bp, synthetic construct
  source 1..80: mol_type = other DNA
gtgcccacatgtcataattgatgttaggcaattggagccagttcttttgcctatgccagacattaggaataatttcttcc

SEQ ID NO: 98528 - DNA, 80 bp, synthetic construct
  source 1..80: mol_type = other DNA
attataatcagggcaatgatccaaaattgaggctagttgctatgctctacactcctttaagggccaataactctggtgat

SEQ ID NO: 98529 - DNA, 80 bp, synthetic construct
  source 1..80: mol_type = other DNA
gatgtgttcacagtttcttgcagggtgcttacaaaaccttcacccgactttgaattcacattcttagtcccccccacagt

SEQ ID NO: 98530 - DNA, 80 bp, synthetic construct
  source 1..80: mol_type = other DNA
atgtgatgtacacggccaggaatgagaaccaggtcgtccaaccacagaatggtagagttacgctcgacggtgagctgttg

SEQ ID NO: 98531 - DNA, 80 bp, synthetic construct
  source 1..80: mol_type = other DNA
ggcaccacccccctgctggctgttaatatatgtaaatttaagggagaagtcatagccaagaatggagatgtgaggtccta

SEQ ID NO: 98532 - DNA, 80 bp, synthetic construct
  source 1..80: mol_type = other DNA
cagaatggatatggaaatcaccaacactgatggaacacctattgaccctacagaggacacacccggtcccattggctcac

SEQ ID NO: 98533 - DNA, 80 bp, synthetic construct
  source 1..80: mol_type = other DNA
cagattttcaaggcatactctttggcgttgccagtcagcgcaataagaatgagcagaaccctgccacgagggctcatgag

SEQ ID NO: 98534 - DNA, 80 bp, synthetic construct
  source 1..80: mol_type = other DNA
gccaacatcaacactggtggggaccagtatgcccccaaactagcccaagtgaagttcttttcagagtcccaagattttga

SEQ ID NO: 98535 - DNA, 80 bp, synthetic construct
  source 1..80: mol_type = other DNA
ggtgcaccaacccacgatcttcaccccggttggagtggcaggggacacctctcacccgttcagacaatggacgctgccac

SEQ ID NO: 98536 - DNA, 80 bp, synthetic construct
  source 1..80: mol_type = other DNA
gatacggtggacacctcaccaataatacccatctggctccagcagtggcaccactgttcccaggagagcagctcctgttt

SEQ ID NO: 98537 - DNA, 80 bp, synthetic construct
  source 1..80: mol_type = other DNA
ctatcgaggaagtcgatcacaaggactacaggtttcttcagaccctaccaaacctggaacagaaaaccggcaccttccgt

SEQ ID NO: 98538 - DNA, 80 bp, synthetic construct
  source 1..80: mol_type = other DNA
ttcaggtcacaaatacccagttctggtggtcatgaacagggttacatggattgtcttgtcccacaagaatgggtccagca

SEQ ID NO: 98539 - DNA, 80 bp, synthetic construct
  source 1..80: mol_type = other DNA
cttctaccaggaagctgccacggcccaatctgaggtggccctcataagattcatcaacccagacaccggtagagtcctct

SEQ ID NO: 98540 - DNA, 80 bp, synthetic construct
  source 1..80: mol_type = other DNA
ctggggctaatgccatcaaccagaaggttgagtttgattataacaaacaactccaaaatgcatcattttcacatgacaag

SEQ ID NO: 98541 - DNA, 80 bp, synthetic construct
  source 1..80: mol_type = other DNA
gaaatgctccaagcccaaattgaagctaccaaacgcctgcaacaagagatgattgacataaaacagggtgtgttgtcagc

SEQ ID NO: 98542 - DNA, 80 bp, synthetic construct
  source 1..80: mol_type = other DNA
tgcagggttctcccccacggatgccgcgaggggctccgtcaatgcaccaatgacaaagttagtggattggaatggtacca

SEQ ID NO: 98543 - DNA, 80 bp, synthetic construct
  source 1..80: mol_type = other DNA
gatattgggcacctggtgctatgagaacaacaggctattcagggaccttctctcacctgtctcctatgcaacttgcccca

SEQ ID NO: 98544 - DNA, 80 bp, synthetic construct
  source 1..80: mol_type = other DNA
catattagtaatcagagtgggcaatcccctaaggtagatcttccctccccttccttgagtggttcttcagtttcttctat

SEQ ID NO: 98545 - DNA, 80 bp, synthetic construct
  source 1..80: mol_type = other DNA
tgacgacagcaaaatcaagaaagtcgctaacgcgatactgtgtgctcttgggtccctcttttctaggcccatcaaagatc

SEQ ID NO: 98546 - DNA, 80 bp, synthetic construct
  source 1..80: mol_type = other DNA
taaaacacaatcaaccaccctttcgggcacttcaagaactggctcttcgtcacagtcaactctgtcgaccagaccgagct

SEQ ID NO: 98547 - DNA, 80 bp, synthetic construct
  source 1..80: mol_type = other DNA
caagaacatccgactgggttcgcagtcagaatgagaggctgagcccattcatgaatggagcgttacaaacaacctacgtg

SEQ ID NO: 98548 - DNA, 80 bp, synthetic construct
  source 1..80: mol_type = other DNA
cttgcgtaggcgaggggagtcacagatttagtgaaaagattgattaggaaaacttttcccgcttttctttaattctttct

SEQ ID NO: 98549 - DNA, 80 bp, synthetic construct
  source 1..80: mol_type = other DNA
tcctagggaagttgaagccactgaacgtactcaatctattggcttcgtgtgattggtcattctcaggtgttgtagaaacc

SEQ ID NO: 98550 - DNA, 80 bp, synthetic construct
  source 1..80: mol_type = other DNA
gttggatttaaaaagatgttagggtcttccaccagagatagaccaccaactccggtggaaagaccacaacaaactgttaa

SEQ ID NO: 98551 - DNA, 80 bp, synthetic construct
  source 1..80: mol_type = other DNA
atggccttgctggcagaactctttggtgtcttttggagccccccagacatatccaactttatcacctcaatcatagggga

SEQ ID NO: 98552 - DNA, 80 bp, synthetic construct
  source 1..80: mol_type = other DNA
tatggagctgcagggcccccaagacctcgctgctgacttggtcccagtggtcatgggtggcatcggcatggtccttggat

SEQ ID NO: 98553 - DNA, 80 bp, synthetic construct
  source 1..80: mol_type = other DNA
cctttggcagccaaaactctgtcaacgacagtactaacaccaccccttctaatagagaagaggttggtgcgttttccaac

SEQ ID NO: 98554 - DNA, 80 bp, synthetic construct
  source 1..80: mol_type = other DNA
caagggcaccaaaacgcccagcagtgatcaacactgccccacagttaagatcgggcctaagacattagtgatcccacctg

SEQ ID NO: 98555 - DNA, 80 bp, synthetic construct
  source 1..80: mol_type = other DNA
cagaccagtggttgttatgatctcaggcaggcccggcattggcaagacccatatggcaagacacctggctaagagcatcg

SEQ ID NO: 98556 - DNA, 80 bp, synthetic construct
  source 1..80: mol_type = other DNA
cgcgtaacggggtcgaccactgggacgcctacaggggggagagggtggttttatgggatgactacggcatggggagccct

SEQ ID NO: 98557 - DNA, 80 bp, synthetic construct
  source 1..80: mol_type = other DNA
cgcgtaacggggtcgaccactgggacgcctacagggtggagatggtggttttatgggatgactacggcatgtggagccct

SEQ ID NO: 98558 - DNA, 80 bp, synthetic construct
  source 1..80: mol_type = other DNA
aaaaggttaagagagattttcctggtcaacctgatatgtggaaagaccacttcaagccggatttttcccatataaagtta

SEQ ID NO: 98559 - DNA, 80 bp, synthetic construct
  source 1..80: mol_type = other DNA
taacccaggggtccctaactgcaagagttgctgggcttgttcatgagaggagagatgaatttcagctccaagggagcgac

SEQ ID NO: 98560 - DNA, 80 bp, synthetic construct
  source 1..80: mol_type = other DNA
atgtcgtgcagtttgatgcgaagttggaaactgtacgtgggttaccagacttgacaacggtgcaaaatgagcatgaaaac

SEQ ID NO: 98561 - DNA, 80 bp, synthetic construct
  source 1..80: mol_type = other DNA
tctgttgggaaaggtgggttaaaccaactgagacccaggagacgagtgaacccgagaaggagaccgctcagggcaggtgg

SEQ ID NO: 98562 - DNA, 80 bp, synthetic construct
  source 1..80: mol_type = other DNA
tggttggggtttctgggtctcatccaacctcttgatcacgacaacacacgtccttcctaagggactcaaagaactttttg

SEQ ID NO: 98563 - DNA, 80 bp, synthetic construct
  source 1..80: mol_type = other DNA
ctaggggtaaaccaccgagacctgcagtcctagaagaggccaaaaagacagtgatgaacgttttggaacaaaccattgac

SEQ ID NO: 98564 - DNA, 80 bp, synthetic construct
  source 1..80: mol_type = other DNA
actggaatggagaatccttcacaggtcccctcgcagatcaagcatctaaagccaacctcatgtatgaacaggccaagcat

SEQ ID NO: 98565 - DNA, 80 bp, synthetic construct
  source 1..80: mol_type = other DNA
ctgggggtccacaaaccccctgcagctataagcctcgcgacaattgagctcacccccatatctctttactggcggcccgt

SEQ ID NO: 98566 - DNA, 80 bp, synthetic construct
  source 1..80: mol_type = other DNA
ctggtggtccacaaaccccctgcagctataagcctcgcgacaattgagctcacccccatatctctttactggcggcccgt

SEQ ID NO: 98567 - DNA, 80 bp, synthetic construct
  source 1..80: mol_type = other DNA
ttgtcatctcagttcaggaaggcctaccatcaggggttccatgcacgtcacaatggaattcaatagcacactggatccta

SEQ ID NO: 98568 - DNA, 80 bp, synthetic construct
  source 1..80: mol_type = other DNA
attggacaagagggcccaatcatgagaacccatacgaaagcatggtcccccattctcagcgagccacacagctcatggcc

SEQ ID NO: 98569 - DNA, 80 bp, synthetic construct
  source 1..80: mol_type = other DNA
ctacactcccaactacttggtttgtccagacacattaaagggccttgctggtgagaagtttccctacactgccttcagca

SEQ ID NO: 98570 - DNA, 80 bp, synthetic construct
  source 1..80: mol_type = other DNA
tttgtacaagcccctgctggtgaatttacagtctcccctagaaattctcccggagaacttttgcttgatttagagctggg

SEQ ID NO: 98571 - DNA, 80 bp, synthetic construct
  source 1..80: mol_type = other DNA
ccctgaactaaatccttatcttgcacatctggctagaatgtataatgggcatgcgggaggaatggaagtgcagatagtac

SEQ ID NO: 98572 - DNA, 80 bp, synthetic construct
  source 1..80: mol_type = other DNA
tagctgggaatgcgttcacagctggtaagatcctatttgctgccatcccacctagcttcccctatgaaaatttgtcaccc

SEQ ID NO: 98573 - DNA, 80 bp, synthetic construct
  source 1..80: mol_type = other DNA
gctcaactgactatgtgcccccacgtgatagtggatgtgagacaactggaaccggttctcctgccaatgcctgacataag

SEQ ID NO: 98574 - DNA, 80 bp, synthetic construct
  source 1..80: mol_type = other DNA
gaatgttttctatcactacaaccaaaacaacagccccaaactcaggcttgtagcaatgctgtacactcctctgagagcta

SEQ ID NO: 98575 - DNA, 80 bp, synthetic construct
  source 1..80: mol_type = other DNA
acaactcaggtgatgacgtgttcacggtgtcatgccgcgttttaacacgtccctccccagatttccaattcacctttctg

SEQ ID NO: 98576 - DNA, 80 bp, synthetic construct
  source 1..80: mol_type = other DNA
gtcccacctacagttgagtctaaaactaaaaatttcactctacctgttctcagagtctccgagatgacaaactcaaggtt

SEQ ID NO: 98577 - DNA, 80 bp, synthetic construct
  source 1..80: mol_type = other DNA
tccagtcgttctggaccaaatgtacacgagcaggaatgaaaacatcattgtccaaccccaaaatggcaggtgcacgactg

SEQ ID NO: 98578 - DNA, 80 bp, synthetic construct
  source 1..80: mol_type = other DNA
acggtgagctccttggcaccaccatcttgcagtccgtgtctatttgcaactttaaaggaaccatgcaggcagaattgagt

SEQ ID NO: 98579 - DNA, 80 bp, synthetic construct
  source 1..80: mol_type = other DNA
gatcaaccacgataccaataccaactgcaacttaccaatttggatggctcacccatagacccaacagatgatgtgcctgc

SEQ ID NO: 98580 - DNA, 80 bp, synthetic construct
  source 1..80: mol_type = other DNA
ccctcttggcacaccagattttcaagctatgttgtatggcgttgcgagtcaacgttcctccagagacaatgccactaggg

SEQ ID NO: 98581 - DNA, 80 bp, synthetic construct
  source 1..80: mol_type = other DNA
cacatgatgcacaaattgacactgcgggtgacacattcgccccaaagattggccaggttcgtttcaaatcaagttccaat

SEQ ID NO: 98582 - DNA, 80 bp, synthetic construct
  source 1..80: mol_type = other DNA
gactttgacctacatgaccctacaaaattcacgcccattggcgtcaatgtggacgaccagcacccttttagacaatggtc

SEQ ID NO: 98583 - DNA, 80 bp, synthetic construct
  source 1..80: mol_type = other DNA
tctaccaaattatggtggtcatcttgccctgaataatcatttggcccctgctgtaacgccactcttccctggcgaacaaa

SEQ ID NO: 98584 - DNA, 80 bp, synthetic construct
  source 1..80: mol_type = other DNA
ttttattcttcagatcatacattccaagcgctggaggtcacacagacggtgctatggattgcttgctaccccaagaatgg

SEQ ID NO: 98585 - DNA, 80 bp, synthetic construct
  source 1..80: mol_type = other DNA
attgagcacttctaccaagagtcagccccttcccaatctgacattgcattagtgaggttcataaaccctgacacaggaag

SEQ ID NO: 98586 - DNA, 80 bp, synthetic construct
  source 1..80: mol_type = other DNA
agtgctctttgaagccaaattgcacaaacaaggcttcctcacaattgcagcatctggagaccaccccatcgtgatgccca

SEQ ID NO: 98587 - DNA, 80 bp, synthetic construct
  source 1..80: mol_type = other DNA
ctaatggttatttcaggtttgaagcttgggtcaaccccttctacactctcgcccccgtgggaactgggtctgggcgcaga

SEQ ID NO: 98588 - DNA, 80 bp, synthetic construct
  source 1..80: mol_type = other DNA
ggatccaataatggcaggagctttccttgcaggcttggcaggcgatgttgtgacttccagtttgggctcgctcgtgggtg

SEQ ID NO: 98589 - DNA, 80 bp, synthetic construct
  source 1..80: mol_type = other DNA
ctggagccaacgccatcaaccaaaaagtggagtatgactttaacagacagcttcaggaggcatctttcagacatgacaag

SEQ ID NO: 98590 - DNA, 80 bp, synthetic construct
  source 1..80: mol_type = other DNA
gacatgctcaaagcccaggttgcagcaacagcaggccttcaacaggctatgattgacatcaaacgggaggcattgaccgc

SEQ ID NO: 98591 - DNA, 80 bp, synthetic construct
  source 1..80: mol_type = other DNA
atggttccaggtattgggctcccaactccatgaggacaacaggttattcaggtacatttgtttcccagggtgtcaaaaat

SEQ ID NO: 98592 - DNA, 80 bp, synthetic construct
  source 1..80: mol_type = other DNA
cttccccatttgtctagtcaaactccaagtatttctagaccctccagagcttcaccatccatgtctagttcttctagtgt

SEQ ID NO: 98593 - DNA, 80 bp, synthetic construct
  source 1..80: mol_type = other DNA
gtatagttctccctctactgctccttcgcaatcaacacaatcaacaacgctgtctgcggggactgggtcgtccaggccta

SEQ ID NO: 98594 - DNA, 80 bp, synthetic construct
  source 1..80: mol_type = other DNA
acaccgcgtccacaggaacatccacactgtctagaacaagtgattgggttagaggtcagaatgagatgcttggcccgttc

SEQ ID NO: 98595 - DNA, 80 bp, synthetic construct
  source 1..80: mol_type = other DNA
atgagtggtgcactccaaactgcttacgtcacaccaccatcgagcaaggcctcatcacaagggacggtctcgaccgtgcc

SEQ ID NO: 98596 - DNA, 80 bp, synthetic construct
  source 1..80: mol_type = other DNA
cacttgcgtaggcgaggggagtcacagatttagtgaaaaggatgattagggttttcttcctttccccttcttattctttt

SEQ ID NO: 98597 - DNA, 80 bp, synthetic construct
  source 1..80: mol_type = other DNA
acttcgagttgcaagggcctgaggacttggccgtggagctcgtccctgtggttatgggtggcataggaatggttctcggt

SEQ ID NO: 98598 - DNA, 80 bp, synthetic construct
  source 1..80: mol_type = other DNA
aggacgcagtattggatcttgaagcaattgaaaacaaccacatgacctctttgctcaaagacaaggacagtttggcaacc

SEQ ID NO: 98599 - DNA, 80 bp, synthetic construct
  source 1..80: mol_type = other DNA
ctctagatcttgaagaggaaaaggctagaaaactctccaccaagtctgcctctcctgacattgtgggcacaattaatgcc

SEQ ID NO: 98600 - DNA, 80 bp, synthetic construct
  source 1..80: mol_type = other DNA
ctattggcgcggatcgcagccgcccgctccctggtgcatcgtgcaaaagaagagctttctagcaggccaaggcccgttgt

SEQ ID NO: 98601 - DNA, 80 bp, synthetic construct
  source 1..80: mol_type = other DNA
tgtgatgatatcaggcaaaccgggaataggaaagactcacctcgctagagagttagcaaagaaaattgcagccaccctca

SEQ ID NO: 98602 - DNA, 80 bp, synthetic construct
  source 1..80: mol_type = other DNA
ataaagttaatgctggcccctcaaggtgggtttgataagaacggcaacaccccacacggaaagggcgtcatgaaaaccct

SEQ ID NO: 98603 - DNA, 80 bp, synthetic construct
  source 1..80: mol_type = other DNA
ctaacggggaggacgaattagtggtctcctatagtgtgaaagatggcgtctccggtttgcctgagctctctaccgtcagt

SEQ ID NO: 98604 - DNA, 80 bp, synthetic construct
  source 1..80: mol_type = other DNA
tgggaagtcagctcaagggagtcaaaactgtgtcagagcttaagcagacgcttaagaacattgcaattaaaaagtgccag

SEQ ID NO: 98605 - DNA, 80 bp, synthetic construct
  source 1..80: mol_type = other DNA
atagtctacaatggttctacatactcacttgaatctgatggcaaaggtaatgtaaaagttgaaaaggtacagagtgcaac

SEQ ID NO: 98606 - DNA, 80 bp, synthetic construct
  source 1..80: mol_type = other DNA
tgtgcaaaccaataacgagctatctggtgcactacactatctcagatgcgccaggatcaggtattatgttaagtgtgtcc

SEQ ID NO: 98607 - DNA, 80 bp, synthetic construct
  source 1..80: mol_type = other DNA
ctaagccacaggtggaggatgcagaagaaaccatcaataaagatgggtgtccaaaacaaaaagatgatgaggagtttgtc

SEQ ID NO: 98608 - DNA, 80 bp, synthetic construct
  source 1..80: mol_type = other DNA
atcgcgtctgaagacatcaaagttgagggcaagaagggaaagaacaagtctggccgaggcaagaagcacacagccttttc

SEQ ID NO: 98609 - DNA, 80 bp, synthetic construct
  source 1..80: mol_type = other DNA
caaccagacgaggccaacacagcatttagtgtccccccactaaaccagagggagaacagggatgctaaggaaccactgcc

SEQ ID NO: 98610 - DNA, 80 bp, synthetic construct
  source 1..80: mol_type = other DNA
tggggtttctgggtttcaccaagtttgtttataacatccacccatgttatacctcagggatcacaggagttcttcggggt

SEQ ID NO: 98611 - DNA, 80 bp, synthetic construct
  source 1..80: mol_type = other DNA
ttccattaaacagattcaaatccataaatcgggtgagttctgccgactaaggtttccaaagccaatcagaactgatgtga

SEQ ID NO: 98612 - DNA, 80 bp, synthetic construct
  source 1..80: mol_type = other DNA
gatggagagatctaccattatggcctgtacgtggaacggggtctggtgcttggagtacacaagccaccagcggctatcag

SEQ ID NO: 98613 - DNA, 80 bp, synthetic construct
  source 1..80: mol_type = other DNA
tcgttttcacaagcatgcgcatcgcttgacaaaaccacctccagtgaccacccgcaccacatgcggaagaatgaatgttg

SEQ ID NO: 98614 - DNA, 80 bp, synthetic construct
  source 1..80: mol_type = other DNA
ttttccccagaaccacacctcgcccagatagtcgcagaagaccttctgtcccctagtgtgatggacgtgggcgattttaa

SEQ ID NO: 98615 - DNA, 80 bp, synthetic construct
  source 1..80: mol_type = other DNA
gttgagttggcaccattgtctctatattggagaccagtgtacaccccccagtatcttatgtccccggacactctcaaaaa

SEQ ID NO: 98616 - DNA, 80 bp, synthetic construct
  source 1..80: mol_type = other DNA
actgaaggacctctggtcatctctgaggacttgaatggcctgaccttcctgcggagaactgtgacccgcgacccagctgg

SEQ ID NO: 98617 - DNA, 80 bp, synthetic construct
  source 1..80: mol_type = other DNA
agatctaaatccttatttggcccatctatcaagaatgtataatggttatgctggaggtgttgaggtgcaagtactccttg

SEQ ID NO: 98618 - DNA, 80 bp, synthetic construct
  source 1..80: mol_type = other DNA
ctgggaatgcgttcacagcaggtaagatactgtttgcagcaatcccccctaactttcctgtagacatgattagtccagcc

SEQ ID NO: 98619 - DNA, 80 bp, synthetic construct
  source 1..80: mol_type = other DNA
gctacatggagaattattcccttacacggcctttgacaataactgttacgccttctgttgttgggtcttagatctaaacg

SEQ ID NO: 98620 - DNA, 80 bp, synthetic construct
  source 1..80: mol_type = other DNA
cagatcactatgcttccccacttgattgtagatgttaggaccttggaacctatcatgatacctttgcctgatgttagaaa

SEQ ID NO: 98621 - DNA, 80 bp, synthetic construct
  source 1..80: mol_type = other DNA
tgtgttctatcacttcaacaaccaaccccaacctagaatgaggctagtagctatgctttacaccccattgaggtctaatg

SEQ ID NO: 98622 - DNA, 80 bp, synthetic construct
  source 1..80: mol_type = other DNA
gttcaggagatgatgttttcactgtgtcttgtagagtgctaactaggccaactcctgattttgagtttatttatttggta

SEQ ID NO: 98623 - DNA, 80 bp, synthetic construct
  source 1..80: mol_type = other DNA
caatactgaccatttctgaattgaccaactctcgattccctattccaattgagcaattgtacacggccccaaatgagaac

SEQ ID NO: 98624 - DNA, 80 bp, synthetic construct
  source 1..80: mol_type = other DNA
aatgttgtccagtgccaaaatggcaggtgcaccttggatggtgagctccaaggcacgacccaactgctgtcaagtgcgat

SEQ ID NO: 98625 - DNA, 80 bp, synthetic construct
  source 1..80: mol_type = other DNA
atgctcttataggggcaggactgtggccaacaatggggataattgggaccagaatctgctccagctgacctatccaagtg

SEQ ID NO: 98626 - DNA, 80 bp, synthetic construct
  source 1..80: mol_type = other DNA
gtgcaagttatgaccccaccgatgaagtgccagcaccattgggcactcaggattttagtgggatgttgtatggagtgctg

SEQ ID NO: 98627 - DNA, 80 bp, synthetic construct
  source 1..80: mol_type = other DNA
acccaggacaatacaaatgtgagtgcaggggaggccaaaaatgctaagggaatatatatatctaccaccagtgggaaatt

SEQ ID NO: 98628 - DNA, 80 bp, synthetic construct
  source 1..80: mol_type = other DNA
caccccaaaaattgggtcaattggattgcattcaataactgagcatgtgcaccctaaccaacagtcgcggtttactcctg

SEQ ID NO: 98629 - DNA, 80 bp, synthetic construct
  source 1..80: mol_type = other DNA
ttggagttgccgtgaatgagaatacccccttccaacaatgggttctaccacactatgcaggtagccttgctctcaacacc

SEQ ID NO: 98630 - DNA, 80 bp, synthetic construct
  source 1..80: mol_type = other DNA
aatttggcacccgctgttgccccaaccttccctggtgagcaattgttattcttcaggtcccgtgttccatgtgttcaagg

SEQ ID NO: 98631 - DNA, 80 bp, synthetic construct
  source 1..80: mol_type = other DNA
ccagcaggggcaagatgtgttcatggattgtctcctaccccaagagtgggtaaatcatttttatcaagaagcagctcctt

SEQ ID NO: 98632 - DNA, 80 bp, synthetic construct
  source 1..80: mol_type = other DNA
ctcaagcagacgttgccctcatcaggtatgtcaaccctgacactggccgtacgctgtttgaagccaaattgcatagatca

SEQ ID NO: 98633 - DNA, 80 bp, synthetic construct
  source 1..80: mol_type = other DNA
gtcacatactggtgcttaccctcttgtggtccccccaaatggtcactttaggtttgattcttgggttaatcaattttatt

SEQ ID NO: 98634 - DNA, 80 bp, synthetic construct
  source 1..80: mol_type = other DNA
tttgattacaacaaacaactccaaagcgcatccttccagcatgacaaggaaatgttgcaggctcaaattgacgccacaaa

SEQ ID NO: 98635 - DNA, 80 bp, synthetic construct
  source 1..80: mol_type = other DNA
gtcaggaacacgctactatgccccaaattctgcacaaaccactagttactctgggcaattcaccccctcgccagttcatc

SEQ ID NO: 98636 - DNA, 80 bp, synthetic construct
  source 1..80: mol_type = other DNA
gggtgcaggtgaagccttcctctagctcaactcagcggactgcagctccaagcagtgtccgcagtctgtcaactcaatca

SEQ ID NO: 98637 - DNA, 80 bp, synthetic construct
  source 1..80: mol_type = other DNA
acctctgtgactggctcagcttccctgggggggtcttctacaatctcttccagctctaggacagcagattgggtgcaaca

SEQ ID NO: 98638 - DNA, 80 bp, synthetic construct
  source 1..80: mol_type = other DNA
gcaaagggctcttagcccatacatgcatggagccctgcagacggcgtatgtcacaccgccgtcaagtagggcctccaatg

SEQ ID NO: 98639 - DNA, 80 bp, synthetic construct
  source 1..80: mol_type = other DNA
gcacacctcaggaagaggggggagtcacaggcttagtgaaaaggataatcaatgattaaatgtgattttgttctcctttt

SEQ ID NO: 98640 - DNA, 80 bp, synthetic construct
  source 1..80: mol_type = other DNA
attggaaagttgagaccactaaacatcctcaacatattggcttcctgcgattggacttttgcaggtatagtagaatccct

SEQ ID NO: 98641 - DNA, 80 bp, synthetic construct
  source 1..80: mol_type = other DNA
cggggcccggcctaagcaaccgcccccgagggaaacaacacaaaaacaaaaacccccacgaccgcccactccagagttgg

SEQ ID NO: 98642 - DNA, 80 bp, synthetic construct
  source 1..80: mol_type = other DNA
aagtcttcaagtgacggcttgtttgctaacatgactgtcacttttaagaaggccctcggggcgcggcctaaacagccgcc

SEQ ID NO: 98643 - DNA, 80 bp, synthetic construct
  source 1..80: mol_type = other DNA
ggaaaacccacctcgccagagagatagctaagaaggttgcatcaacgttggcgggtgatcaaagaattgggttggtgccc

SEQ ID NO: 98644 - DNA, 80 bp, synthetic construct
  source 1..80: mol_type = other DNA
aggaacggtgtggaccactgggacgcctacaaaggagaaagggtggtgctatgggatgactatggcatgagcaaccctat

SEQ ID NO: 98645 - DNA, 80 bp, synthetic construct
  source 1..80: mol_type = other DNA
gcgtggcaaagtgtcagttgacaaagtgcaaaatgcaacagttcaaaccaacaacgaacttgtgggagcgctacaccacc

SEQ ID NO: 98646 - DNA, 80 bp, synthetic construct
  source 1..80: mol_type = other DNA
ccgtcacgcagcctgacgcacaaaacacagcctatagtgttcccccactcagtcaaagagaggtgggtgacgcgaaggaa

SEQ ID NO: 98647 - DNA, 80 bp, synthetic construct
  source 1..80: mol_type = other DNA
acaatgagtcagaagacaaagaggggtgccccaagcccagagatgaggatgagttcactgttgactccaaggacatcaag

SEQ ID NO: 98648 - DNA, 80 bp, synthetic construct
  source 1..80: mol_type = other DNA
gtggaaggaaagaaaggcaagaacaagtctggcagaggaaagaaacacacggctttctccagtaagggcctcagtgatga

SEQ ID NO: 98649 - DNA, 80 bp, synthetic construct
  source 1..80: mol_type = other DNA
aggggcacctactgcggagctcccatcctggggcctggtaacgcaccaaaactgagcaccaaaacaaaattttggaggtc

SEQ ID NO: 98650 - DNA, 80 bp, synthetic construct
  source 1..80: mol_type = other DNA
tggagcgtggtcatatactcggggtacacaaaccacccgctgcaataagcctcgctaaaattgagttaacaccattgtct

SEQ ID NO: 98651 - DNA, 80 bp, synthetic construct
  source 1..80: mol_type = other DNA
cttatggggttccgacctctccaccatgattcggtgtgccagggcattcggcggtctcatggatgagctcaaagcacatt

SEQ ID NO: 98652 - DNA, 80 bp, synthetic construct
  source 1..80: mol_type = other DNA
ctgaggggccactggtgatcagtgaagacttgaacgggttaacgttcctccgtcggacagtgacccgtgatccagcaggt

SEQ ID NO: 98653 - DNA, 80 bp, synthetic construct
  source 1..80: mol_type = other DNA
ttttcgctgccgtgccaccaaatttcccagttgaattcttgagtcctgcccaaatcactatgctaccacatttgattgtt

SEQ ID NO: 98654 - DNA, 80 bp, synthetic construct
  source 1..80: mol_type = other DNA
cccttgagcccattatgataccactccctgatgttagaaacaccttcttccattataataatcagcctgcccaacgcatg

SEQ ID NO: 98655 - DNA, 80 bp, synthetic construct
  source 1..80: mol_type = other DNA
cgcctagtggccatgttatacacccctctgaggtccaatggttctggtgatgatgttttcactgtttcttgcagagtttt

SEQ ID NO: 98656 - DNA, 80 bp, synthetic construct
  source 1..80: mol_type = other DNA
attttaactatctctgagctgactaattcaagatttcctgcacctatagattcactgttcacggcccaaaacaatgccct

SEQ ID NO: 98657 - DNA, 80 bp, synthetic construct
  source 1..80: mol_type = other DNA
caatgtccaatgccagaatggccggtgcacactggatggtgagctacagggaaccactcaactgttgccatcaggtatat

SEQ ID NO: 98658 - DNA, 80 bp, synthetic construct
  source 1..80: mol_type = other DNA
gtgccttcagaggcaggttgacagcagatgtaaatcagcaacacgatgacagatggcacatgcaactgacaaaccttaat

SEQ ID NO: 98659 - DNA, 80 bp, synthetic construct
  source 1..80: mol_type = other DNA
ggaactccctttgatccaacagaggatgtgccagcccctctaggtaccccagactttacaggtctcctctacggtgtggc

SEQ ID NO: 98660 - DNA, 80 bp, synthetic construct
  source 1..80: mol_type = other DNA
cagccagagaaacagtgacaacaccaccagagcacacgaggtcgtgatttccacaactagctcacaattcgtgcctaaat

SEQ ID NO: 98661 - DNA, 80 bp, synthetic construct
  source 1..80: mol_type = other DNA
tggggtcaatcaactttgggagtacaagtactgattttcagttgcagcaacccaccagatttacaccggttggaatcaaa

SEQ ID NO: 98662 - DNA, 80 bp, synthetic construct
  source 1..80: mol_type = other DNA
attgaagacggacatgaatttaatcaatggaccctacccaggtattcaggccatttgacccttaacatgaaccttgcccc

SEQ ID NO: 98663 - DNA, 80 bp, synthetic construct
  source 1..80: mol_type = other DNA
acctattgctccaaatttccctggtgaacagttgctattctttagatcaaatgtcccttgtgccggtggcatcaatgctg

SEQ ID NO: 98664 - DNA, 80 bp, synthetic construct
  source 1..80: mol_type = other DNA
gcatcattgactgcctgttgcctcaagagtggatacagcatttctatcaggaatctgccccctctcaatcagacgtggcc

SEQ ID NO: 98665 - DNA, 80 bp, synthetic construct
  source 1..80: mol_type = other DNA
gcacgctctttgaggcaaagctccacagatcaggttacatcactgttgcccactcaggtgactatccacttgttgtcccc

SEQ ID NO: 98666 - DNA, 80 bp, synthetic construct
  source 1..80: mol_type = other DNA
gtcttgcaggtgacatgctcaccaacgcagtcggctcactggcaaacgctggggccaatgccataacccaaaagatagat

SEQ ID NO: 98667 - DNA, 80 bp, synthetic construct
  source 1..80: mol_type = other DNA
gtagctgccaccaaacaattgcaggctgacatgatcgccatcaaacaggggatactgaccgctggcggcttctcccctac

SEQ ID NO: 98668 - DNA, 80 bp, synthetic construct
  source 1..80: mol_type = other DNA
tgatgcggcgagaggagcagtgggtgcacccatgaccaaggtccttgattggtccggcactcgctattgggcaccaaatt

SEQ ID NO: 98669 - DNA, 80 bp, synthetic construct
  source 1..80: mol_type = other DNA
tcgggacagttcacatcaacgcccgtacacatgcctgttaaacagcccacccctgttagaaagacccagcccccttcctc

SEQ ID NO: 98670 - DNA, 80 bp, synthetic construct
  source 1..80: mol_type = other DNA
ttcttctggtagtgtctatagtctttcaacacagagtaccactttgtctgtaccttcttccagttcttctgctccttctg

SEQ ID NO: 98671 - DNA, 80 bp, synthetic construct
  source 1..80: mol_type = other DNA
cttcaacgcaattaacaaaattgagttcagcttcctctatggataggacagcaaattgggttaatcaacagagaagcctt

SEQ ID NO: 98672 - DNA, 80 bp, synthetic construct
  source 1..80: mol_type = other DNA
agcccctacatgagcggtgctctcaacatctctcacgtgacacctccgtcgagcagggcttcaagttcggggacagtctc

SEQ ID NO: 98673 - DNA, 80 bp, synthetic construct
  source 1..80: mol_type = other DNA
tcgcacacctcagagtgaggggggagtcacgagtttagtgaaaagaatcaattgattttaaattagatttaaattggatt

SEQ ID NO: 98674 - DNA, 80 bp, synthetic construct
  source 1..80: mol_type = other DNA
aggatgcagtgttggacctcgaagcaattgaaaacaaccacttgaccaccttgcttaaggacaaggacagcctggcgact

SEQ ID NO: 98675 - DNA, 80 bp, synthetic construct
  source 1..80: mol_type = other DNA
ctaatggggaggatgaaccagtggtctcttatagtgtcagagatggtgtctccgggctgcctgagctctccactgtcagg

SEQ ID NO: 98676 - DNA, 80 bp, synthetic construct
  source 1..80: mol_type = other DNA
tcttcagaccaacaaggaaacaacgcaaggaagagagagcttctctcggcctagtcacgggctccgaaatcaggaaaaga

SEQ ID NO: 98677 - DNA, 80 bp, synthetic construct
  source 1..80: mol_type = other DNA
gggtttctcctagtctgttcataacatcaactcatgtcataccccagggcacacaggagttctttggagtacccatcaaa

SEQ ID NO: 98678 - DNA, 80 bp, synthetic construct
  source 1..80: mol_type = other DNA
cactgttggaggtcaaatgggtatgctcctaacagggtctaatgctaagagtatggacctgggcaccacacccggtgact

SEQ ID NO: 98679 - DNA, 80 bp, synthetic construct
  source 1..80: mol_type = other DNA
cagagttaagggtggtccatcactacaacaggtcatgagggatcagttgaaaccattcacagaaccacgaggcaaacaac

SEQ ID NO: 98680 - DNA, 80 bp, synthetic construct
  source 1..80: mol_type = other DNA
ctccaatttatacaggtgccctcaaggatgagttagtcaaaactgacaagatatatggtaagatcaagaagaggctgctt

SEQ ID NO: 98681 - DNA, 80 bp, synthetic construct
  source 1..80: mol_type = other DNA
tggggatcggacctggcaaccatgatccggtgcgcccgggcgttcggaggcctgatggatgagctcaaggcccactgtgt

SEQ ID NO: 98682 - DNA, 80 bp, synthetic construct
  source 1..80: mol_type = other DNA
aattctccccagagccacacttggcccagatagttgcagaagacctcttatcccctagtgtgatggacgtaggtgatttc

SEQ ID NO: 98683 - DNA, 80 bp, synthetic construct
  source 1..80: mol_type = other DNA
aagatatcaatcaacgagggccttccctccggggtaccttgcacctcacaatggaactccatcgctcactggctcctcac

SEQ ID NO: 98684 - DNA, 80 bp, synthetic construct
  source 1..80: mol_type = other DNA
ccggtggggagtttacagtgtctcctagaaatgccccaggtgaaatattatggagtatgcctttaagccctgaattgaac

SEQ ID NO: 98685 - DNA, 80 bp, synthetic construct
  source 1..80: mol_type = other DNA
ccctacctttcacatttatctaggatgtataatgggtatgcaggtggttttgaggtgcaggtgatcctcgcggggaatgc

SEQ ID NO: 98686 - DNA, 80 bp, synthetic construct
  source 1..80: mol_type = other DNA
actgcatggggaactgttcccttacacagcctttgacaacaattgctatgccttctgttgctgggttctagaactgaatg

SEQ ID NO: 98687 - DNA, 80 bp, synthetic construct
  source 1..80: mol_type = other DNA
gttcaccgcggggaagatcatattcgcagcaatccccccaaattttcccactgatggcctgagtcctagtcaggtcacca

SEQ ID NO: 98688 - DNA, 80 bp, synthetic construct
  source 1..80: mol_type = other DNA
tgctggagatgatgtttttactgtttcttgccgtgtattaacaaggccatcccctgattttgatttcatattcttggtcc

SEQ ID NO: 98689 - DNA, 80 bp, synthetic construct
  source 1..80: mol_type = other DNA
ctatactgactgttgatgaaatgaccaattcgaggttccctacccccctggagaaattgcatacgggcccaaacaactct

SEQ ID NO: 98690 - DNA, 80 bp, synthetic construct
  source 1..80: mol_type = other DNA
atagttgtccaacctcagaatggaaggtgcacaattgatggcgtcctcttgggcactacgcagttgtccaccgtcaacat

SEQ ID NO: 98691 - DNA, 80 bp, synthetic construct
  source 1..80: mol_type = other DNA
ctgcaactttagaggtagcaccacacgtgcaggtcagtcacacgcctacacgatgaatttggtctctcaaaattggaaca

SEQ ID NO: 98692 - DNA, 80 bp, synthetic construct
  source 1..80: mol_type = other DNA
attatgacccaacagaggagattccagcccctttggggacaccagactttgtcgggaagatcgtgggcatgctctcgcag

SEQ ID NO: 98693 - DNA, 80 bp, synthetic construct
  source 1..80: mol_type = other DNA
accaccagagagaacagttcaacgcgagcccacaaggccacggtgagcactggagatgcccacttcacgccaaagtcagg

SEQ ID NO: 98694 - DNA, 80 bp, synthetic construct
  source 1..80: mol_type = other DNA
cagtgtcttgttcaccactgacactgacgacctccaaaatggccaaaatacaagattcaccccagtcggagttgcacaag

SEQ ID NO: 98695 - DNA, 80 bp, synthetic construct
  source 1..80: mol_type = other DNA
atggtgaaccccaccagaatgagccacaacaatggcgactcccaaattattctggcacacccggccacaatgtgcacctg

SEQ ID NO: 98696 - DNA, 80 bp, synthetic construct
  source 1..80: mol_type = other DNA
gcaccccctgtcgcacccactttcccaggtgaacagttgctcttctttaggtccaccatgccaggttgtggtggttatcc

SEQ ID NO: 98697 - DNA, 80 bp, synthetic construct
  source 1..80: mol_type = other DNA
acatcacagtctctcacactggtccctatgacttggtcattccacctaatggttactttagatttgattcctgggttaat

SEQ ID NO: 98698 - DNA, 80 bp, synthetic construct
  source 1..80: mol_type = other DNA
ggctttctttgctggattagcgtctgacgtactcggcaccggccttggttctctaatcggcgccggggctggcgccatca

SEQ ID NO: 98699 - DNA, 80 bp, synthetic construct
  source 1..80: mol_type = other DNA
atcagaaagtggaatatgagaataacagaaaattgcagcaggcttccttccaatttagtagtgatttacagcaagcttct

SEQ ID NO: 98700 - DNA, 80 bp, synthetic construct
  source 1..80: mol_type = other DNA
gcaacccaaaaattgcaacatgatcttatgagagtcaagcaggcagtgctactagagggaggcttttcccccaccgacgc

SEQ ID NO: 98701 - DNA, 80 bp, synthetic construct
  source 1..80: mol_type = other DNA
tgcacgtggtgcaatcaacgcacctatgacaaaggtcttggactggagcgggactcgctactgggctcctggtgctaggg

SEQ ID NO: 98702 - DNA, 80 bp, synthetic construct
  source 1..80: mol_type = other DNA
tgcacgtggtgcaatcaacgcacctatgacaaaggtcttggactggagcgggactcgctactgggctcctggggctaggg

SEQ ID NO: 98703 - DNA, 80 bp, synthetic construct
  source 1..80: mol_type = other DNA
ttacaacatctaacgcaggccaattctctttctcacaacccatccgggagccatctggcaggaccgcccccgcccgaagt

SEQ ID NO: 98704 - DNA, 80 bp, synthetic construct
  source 1..80: mol_type = other DNA
cccgccaatcgagcttctagtgtatctgcaccctcttctacactttctaatcaaacaacctcaacgagacttggcacttc

SEQ ID NO: 98705 - DNA, 80 bp, synthetic construct
  source 1..80: mol_type = other DNA
agcaggttctggtgccagtgtctcgggctcttcatcggcctcgagggttaggagctgggtagagggccaaaacaggagcc

SEQ ID NO: 98706 - DNA, 80 bp, synthetic construct
  source 1..80: mol_type = other DNA
tttcgcccttcatggacggggcgctccacacttcatttgtcacacccccatcaagtaagtcctctagccaaggcacagtc

SEQ ID NO: 98707 - DNA, 80 bp, synthetic construct
  source 1..80: mol_type = other DNA
cttcgcccacgtgcgcagacaaggggagtcacgagtttaaagtgaaaagattacttaaaattttctttttcttaagatta

SEQ ID NO: 98708 - DNA, 80 bp, synthetic construct
  source 1..80: mol_type = other DNA
cgtgcgcagacaaggggagtcacgagtttaaagtgaaaagattacttaaaattttctttttcttaagattagtgtctttt

SEQ ID NO: 98709 - DNA, 80 bp, synthetic construct
  source 1..80: mol_type = other DNA
accaatcaaggacataatagggaagctaagaccccttaacatccttaacatcttggcttcatgtgattggacctttgcag

SEQ ID NO: 98710 - DNA, 80 bp, synthetic construct
  source 1..80: mol_type = other DNA
cggggcacggcctaagcagccgcccccgagggagataccacaaagacccccacgaccgcccactccggagttggtcaaga

SEQ ID NO: 98711 - DNA, 80 bp, synthetic construct
  source 1..80: mol_type = other DNA
ctgctgcttccaccctgagggcctgcaaagaccttggcgcttatggactggaaattctgaaactggtcatgaaatggttt

SEQ ID NO: 98712 - DNA, 80 bp, synthetic construct
  source 1..80: mol_type = other DNA
aggacgcagtcctagatctcgaggctattgagaacaaccatatgacagctctactcaaagacaaagatagcctcgcgaca

SEQ ID NO: 98713 - DNA, 80 bp, synthetic construct
  source 1..80: mol_type = other DNA
ccctactggctagaatcgccgctgctcgttcccttgtgcacagggccaaggaagaactgtccagcaggctaaggccagtt

SEQ ID NO: 98714 - DNA, 80 bp, synthetic construct
  source 1..80: mol_type = other DNA
gttgtgatgatatctggtaagccaggcatcgggaagacccatctggctagagaattggcaaagaagatcgctacaaccct

SEQ ID NO: 98715 - DNA, 80 bp, synthetic construct
  source 1..80: mol_type = other DNA
ctaacggggaggacgaaccggtcgttcactatagtgctaaagatggtataactgggctgcccgaacttacaacagtgagg

SEQ ID NO: 98716 - DNA, 80 bp, synthetic construct
  source 1..80: mol_type = other DNA
acatgtggaagagcgcttacagctccgacttctcacacatcaagctaatgctggctccccagggtggttttgacaaaaat

SEQ ID NO: 98717 - DNA, 80 bp, synthetic construct
  source 1..80: mol_type = other DNA
aaagattggatgagttcgagctacaaggacccaacctcacaactttcaattttgaccgtaataaaatacaggctttcagg

SEQ ID NO: 98718 - DNA, 80 bp, synthetic construct
  source 1..80: mol_type = other DNA
cagcttgccgctgaaaacaaatatggcctggtggacacaatgagagtgggtggacaactcaagggtgtcagaactatgcc

SEQ ID NO: 98719 - DNA, 80 bp, synthetic construct
  source 1..80: mol_type = other DNA
agaactcaagcaggccctcaagaacatatcaatcaaaaggtgccagatagtgtatggtggcagcacctatacacttgaat

SEQ ID NO: 98720 - DNA, 80 bp, synthetic construct
  source 1..80: mol_type = other DNA
gtccaaatcaacaacgagctaactggtgctttacaccatctccggtgcgccaggatcaggtactatgttaaatgtgttca

SEQ ID NO: 98721 - DNA, 80 bp, synthetic construct
  source 1..80: mol_type = other DNA
caaggccaccagtaggagatgcggaggaggttgctggccaggatagttgcccaaagcccaaaggtgatgaggagttcgtc

SEQ ID NO: 98722 - DNA, 80 bp, synthetic construct
  source 1..80: mol_type = other DNA
atctcgtctagtgacatcacacctgaaggcaagaaaggaaagaacaagactggccgcggcaagaaacacacagccttctc

SEQ ID NO: 98723 - DNA, 80 bp, synthetic construct
  source 1..80: mol_type = other DNA
cagccagaagaggccgctacagcattcagcgtcccacccctcgaccagagagagaacagggacgctaaagaaccattgac

SEQ ID NO: 98724 - DNA, 80 bp, synthetic construct
  source 1..80: mol_type = other DNA
gatgaaagggtcgtcgactataatgagaaactcagttttgaggcccccccgagcatctggtcaaggatagtcaactttgg

SEQ ID NO: 98725 - DNA, 80 bp, synthetic construct
  source 1..80: mol_type = other DNA
gggtgtcccccagcctgtttattacatcaacccatgtcataccccaaggcactcaggaattctttggtgtacccatcaag

SEQ ID NO: 98726 - DNA, 80 bp, synthetic construct
  source 1..80: mol_type = other DNA
cacggttggaggtcagatgggtatgttgctaacagggtccaatgctaagagcatggatttgggtacaacacctggtgact

SEQ ID NO: 98727 - DNA, 80 bp, synthetic construct
  source 1..80: mol_type = other DNA
cggcaccatcttggagatgtgggatggcgagatctaccattatggcctatatgtggagcgagggctggtgcttggcgtgc

SEQ ID NO: 98728 - DNA, 80 bp, synthetic construct
  source 1..80: mol_type = other DNA
tttggggctcggacctggcaacgatggttcgttgtgctcgggcgtttggagggttgatggatgagcttaaggcccattgt

SEQ ID NO: 98729 - DNA, 80 bp, synthetic construct
  source 1..80: mol_type = other DNA
gtaacacttcctgtcagggttgggatgaacatgaatgaggatggacccataatctttgaaagacactccaggttctcata

SEQ ID NO: 98730 - DNA, 80 bp, synthetic construct
  source 1..80: mol_type = other DNA
gtgatttcaaaataacaattaatgagggtctaccctcgggagtaccctgcacatcgcagtggaattccatcgcccactgg

SEQ ID NO: 98731 - DNA, 80 bp, synthetic construct
  source 1..80: mol_type = other DNA
ctaggggccccaaccatgaggacccgtccgaaacaatgataccacactcccagaggcctatacagctgatgtctcttttg

SEQ ID NO: 98732 - DNA, 80 bp, synthetic construct
  source 1..80: mol_type = other DNA
aatcctcacactcggggagctttccaattctagatttccagtgtccatagatcagatgttcactagccccaatgaagtca

SEQ ID NO: 98733 - DNA, 80 bp, synthetic construct
  source 1..80: mol_type = other DNA
ggagcttcaaggaacaacgcaactccaagtcagtggtatctgtgcatttagaggagaagtgactgcccacttgcatgata

SEQ ID NO: 98734 - DNA, 80 bp, synthetic construct
  source 1..80: mol_type = other DNA
ggtgtcatcagtcagagagacaactacaatgccagtggacataaccagcctgcaaacaggggacacgatgctgtggttcc

SEQ ID NO: 98735 - DNA, 80 bp, synthetic construct
  source 1..80: mol_type = other DNA
catcagccgctccaacaaggcaggctgactttcaacacactcagggccgaccttcgagtggttcttccgtttcctcctac

SEQ ID NO: 98736 - DNA, 80 bp, synthetic construct
  source 1..80: mol_type = other DNA
tccacacaatcctcaagaccaaccttaaccacaactacagggtcctcacatagcacaacatcatccaatttgacccgcag

SEQ ID NO: 98737 - DNA, 80 bp, synthetic construct
  source 1..80: mol_type = other DNA
cacaaatcttccctcgactacttctagagcaacctctaggactagtgaatgggttagagaacaaaatagaaatttggaac

SEQ ID NO: 98738 - DNA, 80 bp, synthetic construct
  source 1..80: mol_type = other DNA
ttttgcacacctccgtaagaggggggagtcacaagtttagtgaaaaggtaaaattttaaaataatcttattctgcctttt

SEQ ID NO: 98739 - DNA, 80 bp, synthetic construct
  source 1..80: mol_type = other DNA
attgggaaactcaggcctctcaacattcttaacatcctggcttcttgtgattggactttcgcaggtatagtggagtctct

SEQ ID NO: 98740 - DNA, 80 bp, synthetic construct
  source 1..80: mol_type = other DNA
ttggagcttacgggttagaaatcttgaagctggtcatgaagtggtttttcccgaagaaagacgaggtgaacgaactcgca

SEQ ID NO: 98741 - DNA, 80 bp, synthetic construct
  source 1..80: mol_type = other DNA
aacactctagatcttgaagaggagaaagctagaagactgtccaccaagtctgcctcccctgacatcgtgggtacaataaa

SEQ ID NO: 98742 - DNA, 80 bp, synthetic construct
  source 1..80: mol_type = other DNA
cgccctgctggcacggatcgcagccgctcgttccctggtgcatcgggcaaaagaggagctttctagcagaccaaggcccg

SEQ ID NO: 98743 - DNA, 80 bp, synthetic construct
  source 1..80: mol_type = other DNA
aacggggaggacgagttggtggtctcctatagcgtaaaagatggcgtttccggtttgcctgagctctccaccgtcagcca

SEQ ID NO: 98744 - DNA, 80 bp, synthetic construct
  source 1..80: mol_type = other DNA
tgggaagccagctcaagggtgtcaaaaccatgtcagagcttaaacaggcactcaagaacatcgcaatcaaaaagtgtcaa

SEQ ID NO: 98745 - DNA, 80 bp, synthetic construct
  source 1..80: mol_type = other DNA
atagtctatggaggttcaacatattcacttgaatctgatggcaaaggcaatgtaaaggtcgagagagtgcagagcgcaac

SEQ ID NO: 98746 - DNA, 80 bp, synthetic construct
  source 1..80: mol_type = other DNA
tgtgcagaccaacaacgaactgacaggtgctctgcaccatctcagatgcgccaggatcaggtattacgttaagtgtgtcc

SEQ ID NO: 98747 - DNA, 80 bp, synthetic construct
  source 1..80: mol_type = other DNA
aggaggccctgtactctatcatccaaattgctggggccgcgtttgtcaccacgcgcattgcaaaacgcatgaacatacaa

SEQ ID NO: 98748 - DNA, 80 bp, synthetic construct
  source 1..80: mol_type = other DNA
caggccacaagtggaggacacagaagagaccatcaacaaagatgggtgcccaaagcccaaagatgatgaggagtttgtcg

SEQ ID NO: 98749 - DNA, 80 bp, synthetic construct
  source 1..80: mol_type = other DNA
tatcgtctgaggacataaaagttgagggcaagaagggaaagaacaagtctggtcgtggtaagaaacacacagccttctca

SEQ ID NO: 98750 - DNA, 80 bp, synthetic construct
  source 1..80: mol_type = other DNA
gggtctcaccaagcctgttcataacatccactcatgttatacctcagggagcacaggagttcttcggggtttccattagg

SEQ ID NO: 98751 - DNA, 80 bp, synthetic construct
  source 1..80: mol_type = other DNA
caccgtcgggggtcaaatggggatgcttttgacaggatccaatgccaagagcatggacttgggcaccacaccaggtgact

SEQ ID NO: 98752 - DNA, 80 bp, synthetic construct
  source 1..80: mol_type = other DNA
ggggatcagacctggcaaccatgatccgttgtgctcgagcattcggaggactaatggatgaactcaaggcccactgtgtc

SEQ ID NO: 98753 - DNA, 80 bp, synthetic construct
  source 1..80: mol_type = other DNA
ctattagagttgggatgaacatgaatgaagatggccccattatctttgagaaacattctaggtaccactaccattatgat

SEQ ID NO: 98754 - DNA, 80 bp, synthetic construct
  source 1..80: mol_type = other DNA
aattctcttcagaaccacatctagcccaggtagtcgcagaagaccttttgtctcccagtgtgatggacgtgggcgatttc

SEQ ID NO: 98755 - DNA, 80 bp, synthetic construct
  source 1..80: mol_type = other DNA
cgggaaagcttacagccaagttaatagagtatgggctaaaaccaactcgccctgacaagactgaagggcctctggtcatc

SEQ ID NO: 98756 - DNA, 80 bp, synthetic construct
  source 1..80: mol_type = other DNA
gttgagctgacaccattgtccctgtactggagaccagtgtacacccctcagtaccttatatccccggacaccctcagaaa

SEQ ID NO: 98757 - DNA, 80 bp, synthetic construct
  source 1..80: mol_type = other DNA
tctacagcaggatcagtaagctggtcattgcagagttgaaggaaggtggcatggacttttacgtgcctagacaggagcca

SEQ ID NO: 98758 - DNA, 80 bp, synthetic construct
  source 1..80: mol_type = other DNA
ggggcttcaatagcggctccactcactggtcaaaataatattatagacccctggattagattaaattttgtacaggcccc

SEQ ID NO: 98759 - DNA, 80 bp, synthetic construct
  source 1..80: mol_type = other DNA
ctcacctggagaagtcttgctaaacttagaattaggccctgaactaaatccttatttgtcacatctatctagaatgtata

SEQ ID NO: 98760 - DNA, 80 bp, synthetic construct
  source 1..80: mol_type = other DNA
caggaggagtggaggtgcaagtgttgctggccgggaatgcgttcacagctggaaaattggtgtttgctgcagtccctccc

SEQ ID NO: 98761 - DNA, 80 bp, synthetic construct
  source 1..80: mol_type = other DNA
actacacggggagtcattcccttacacggcctttgacaacaactgttacgccttctgttgttgggtcctggacctgaacg

SEQ ID NO: 98762 - DNA, 80 bp, synthetic construct
  source 1..80: mol_type = other DNA
tatcctaactatgggtgagctgaccaattctaggtttcctgtacctatagatgaactttacaccagccccaatgagaacc

SEQ ID NO: 98763 - DNA, 80 bp, synthetic construct
  source 1..80: mol_type = other DNA
ggagttgcaggggacaacccagcttcttcccacggcagtctgctcgttccgtggccgcataaacacaaaggtggccgggg

SEQ ID NO: 98764 - DNA, 80 bp, synthetic construct
  source 1..80: mol_type = other DNA
ggagttgcaggggacaacccagcttcttcccacggcagtctgctcgttccgtggccgcataaacacaaaggtggccggtg

SEQ ID NO: 98765 - DNA, 80 bp, synthetic construct
  source 1..80: mol_type = other DNA
aagataatgtttggaacatgcaagtcactaatatcaatggaacaccctttgacccaactgaggatgtcccagcaccattg

SEQ ID NO: 98766 - DNA, 80 bp, synthetic construct
  source 1..80: mol_type = other DNA
ggcacccccgacttttcagggaaaatcttcggcgtactcagccaaagaaatacaaacaatgcctgcagagcccatgatgc

SEQ ID NO: 98767 - DNA, 80 bp, synthetic construct
  source 1..80: mol_type = other DNA
agtggtggcaaccaacagccccaaatttaccccaaaattgggttctctccatattggaacttgggaacaaactgatattg

SEQ ID NO: 98768 - DNA, 80 bp, synthetic construct
  source 1..80: mol_type = other DNA
acaccaaccagcccactaaattcaccccagtcgggctacatgaacacacagattataaccagtggactttgcctaattat

SEQ ID NO: 98769 - DNA, 80 bp, synthetic construct
  source 1..80: mol_type = other DNA
tctggtgcattaaccctcaatatgggattggcccctcctgttgctcccactttccctggtgaacagattctcttctttag

SEQ ID NO: 98770 - DNA, 80 bp, synthetic construct
  source 1..80: mol_type = other DNA
ggcttgcaggtgacatagtcactaacagcattggctcacttgtgaacgctggggccaacgcaataaaccagaaagtagac

SEQ ID NO: 98771 - DNA, 80 bp, synthetic construct
  source 1..80: mol_type = other DNA
ggcagggggttttgaccgcaggcggcttttcccccactgatgcagcgagaggtgcagtcaacgcaccgatgactcaagtc

SEQ ID NO: 98772 - DNA, 80 bp, synthetic construct
  source 1..80: mol_type = other DNA
atggtactaggtactgggctcctggggctacaaggacaactgccttttcaggaggattcaccagctccacccataccaag

SEQ ID NO: 98773 - DNA, 80 bp, synthetic construct
  source 1..80: mol_type = other DNA
actgttgatttatccaataaaacaacagctgcaccaatcccctcaaagcccatatctaggcctagttcttctgtttcttc

SEQ ID NO: 98774 - DNA, 80 bp, synthetic construct
  source 1..80: mol_type = other DNA
aaattcaacccgctcaactctagttagtgggtcttctacctctccttctgtgaggagtctgtctagtgtttcttcccagt

SEQ ID NO: 98775 - DNA, 80 bp, synthetic construct
  source 1..80: mol_type = other DNA
cttcctctccttcttcccgaaccagtgagtgggtgcggagtcagaatagagcactggaaccatacatgagggtggcgttg

SEQ ID NO: 98776 - DNA, 80 bp, synthetic construct
  source 1..80: mol_type = other DNA
cttcctctccttcttcccgaaccagtgagtgggtgcggagtcagaatagagcactggaaccatacatgaggggggcgttg

SEQ ID NO: 98777 - DNA, 80 bp, synthetic construct
  source 1..80: mol_type = other DNA
caaacagcttacgttacgcctccctctagtagggcttccagcaatggcacagtctcaaccgtgccaaaggaaattttgga

SEQ ID NO: 98778 - DNA, 80 bp, synthetic construct
  source 1..80: mol_type = other DNA
tctccgtcggagaggggagtcacaagcttagtgaaaagatagaatttctctttttacctcttcttttatttctgtctttt

SEQ ID NO: 98779 - DNA, 80 bp, synthetic construct
  source 1..80: mol_type = other DNA
acctattaaggacataattggaaaactaagacccctaaacatcctcaacatattggcttcctgcgattggacctttgcag

SEQ ID NO: 98780 - DNA, 80 bp, synthetic construct
  source 1..80: mol_type = other DNA
acctctggtccaaaccacaggtggaggatttggaggagactagcagcggggagggttgcccaaaacctaaaaatgatgag

SEQ ID NO: 98781 - DNA, 80 bp, synthetic construct
  source 1..80: mol_type = other DNA
gaatttgttatttcctccgatgacatcaaagccgagggcaagaaaggaaagaataaagctggccgtggcaagaagcacac

SEQ ID NO: 98782 - DNA, 80 bp, synthetic construct
  source 1..80: mol_type = other DNA
gagccatcttggaaatgtgggacggggagatctaccattatggcttgtacgtggaacgaggattggtgctcggcgtacac

SEQ ID NO: 98783 - DNA, 80 bp, synthetic construct
  source 1..80: mol_type = other DNA
aagatatcaatcaatgaggggttaccctctggcgtaccttgcacctcacaatggaactccattgcccattggctcctcac

SEQ ID NO: 98784 - DNA, 80 bp, synthetic construct
  source 1..80: mol_type = other DNA
aatcctcacattaggggagatgtccaattcaagatttccagtgcctatagatcaaatgtacactagccctaatgaagtta

SEQ ID NO: 98785 - DNA, 80 bp, synthetic construct
  source 1..80: mol_type = other DNA
ggagctccaagggacaacccagctccaggtcagtggtatttgcgcattcaagggacaagtgaccgcccacctacaggaca

SEQ ID NO: 98786 - DNA, 80 bp, synthetic construct
  source 1..80: mol_type = other DNA
tcggtgtcatcagccaaagagataattacaattttggtggacaaaaccagcctgcaaataggtctcatgatgctgtggtc

SEQ ID NO: 98787 - DNA, 80 bp, synthetic construct
  source 1..80: mol_type = other DNA
ccaacttacacagctcaatatactccaaaattgggtcaaattcaaattggcacgtggcagactgatgatataacagtcga

SEQ ID NO: 98788 - DNA, 80 bp, synthetic construct
  source 1..80: mol_type = other DNA
gatacagcacttctaccaagaagctgctccctcactgagtgaggtcgcccttgtcaggtatatcaatccggacactggtc

SEQ ID NO: 98789 - DNA, 80 bp, synthetic construct
  source 1..80: mol_type = other DNA
taaagcaggaggtgttgactgctggcggcttctcccccgctgatgcagccaggggcgctgtaaatgcgcccatgacacaa

SEQ ID NO: 98790 - DNA, 80 bp, synthetic construct
  source 1..80: mol_type = other DNA
taaagcagggggtgttgactgctggcggcttctcccccgctgatgcagccaggggcgctgtaaatgcgcccatgacacaa

SEQ ID NO: 98791 - DNA, 80 bp, synthetic construct
  source 1..80: mol_type = other DNA
catcaaccactccaataagacaggctgattttcaacacacccaaacccggccttcaagtggttcttccgtggcctcctac

SEQ ID NO: 98792 - DNA, 80 bp, synthetic construct
  source 1..80: mol_type = other DNA
tccacacagtcctcaagaccaacctcaataacaactgcggggtcttcaaccacgtccaactcgacccgcagtacaaatct

SEQ ID NO: 98793 - DNA, 80 bp, synthetic construct
  source 1..80: mol_type = other DNA
cccctcgacagtttctagggccacctctagaactagtgagtgggttagagaccaaaataggaatttggaaccctacatgc

SEQ ID NO: 98794 - DNA, 80 bp, synthetic construct
  source 1..80: mol_type = other DNA
gctctttgcacacctccgtaagaggggggagtcacaagcctagtgaaaaggaaaattttaaaatgatttgatttgccttt

SEQ ID NO: 98795 - DNA, 80 bp, synthetic construct
  source 1..80: mol_type = other DNA
tagtccacaaagcaaaagaagagctgtcaagcagacaaaggcctgttgtcgttatgatatctggcaggccgggcataggg

SEQ ID NO: 98796 - DNA, 80 bp, synthetic construct
  source 1..80: mol_type = other DNA
aaaactcaccttgccagagagctggccaagaaagttgcaacaacactggcaggtgaccaaaggattggcctggtgcccag

SEQ ID NO: 98797 - DNA, 80 bp, synthetic construct
  source 1..80: mol_type = other DNA
tgggaaaccagctaaagggtgtcaaaaccatggatgagttgaaacgagccatcaataacatcaccatcaaaaagtgccag

SEQ ID NO: 98798 - DNA, 80 bp, synthetic construct
  source 1..80: mol_type = other DNA
gacgtggcaaagtgttagttgacaaagtgcaaaacacaacagttcaaaccaacaatgagctctcgggggccctgcaccac

SEQ ID NO: 98799 - DNA, 80 bp, synthetic construct
  source 1..80: mol_type = other DNA
ggtgcagcttttgtcacctcacgcatagtgaggcgaatgaacatctcaaacctatggtcgaagccacctgctgaagacaa

SEQ ID NO: 98800 - DNA, 80 bp, synthetic construct
  source 1..80: mol_type = other DNA
tgatgaatcagaggacaaaggagggtgtcccaaacccagagatgaggatgagttcaccgttgattccaaagacatcaaag

SEQ ID NO: 98801 - DNA, 80 bp, synthetic construct
  source 1..80: mol_type = other DNA
tgtcacgcagcctgatgcacaatgtacagcctatagcgtccccccgctcagtcaaagagaggcgggtgacgcgaaggaac

SEQ ID NO: 98802 - DNA, 80 bp, synthetic construct
  source 1..80: mol_type = other DNA
cttggaggaaggtgcccctgagggaaccgtcgcaaccatccttgtcaaacggccgacaggggagttgatgcccttggctg

SEQ ID NO: 98803 - DNA, 80 bp, synthetic construct
  source 1..80: mol_type = other DNA
ctagaatgggaacccatgccacaatgaagatccaagggagaatggtgggtggccagatgggcatgttgctcaccggctca

SEQ ID NO: 98804 - DNA, 80 bp, synthetic construct
  source 1..80: mol_type = other DNA
tttgtggtcatcggcgtacacaccgcagcagcacgcggaggcaacacagtcatatgtgccacacaaggaagtgaaggtga

SEQ ID NO: 98805 - DNA, 80 bp, synthetic construct
  source 1..80: mol_type = other DNA
ccttgcaacaagtcatgagagaccagctcaagcctttcactgaacccagagggaaaccaccaaacccaagtgttctggaa

SEQ ID NO: 98806 - DNA, 80 bp, synthetic construct
  source 1..80: mol_type = other DNA
ttccatccggcgtgccttgcacgtcccagtggaactcaatctcccactggttgctcacattgtgtgccttatctgaagtg

SEQ ID NO: 98807 - DNA, 80 bp, synthetic construct
  source 1..80: mol_type = other DNA
ctgagggaccattggtgattagtgaagacttgaacgggttgacattccttcgccgcactgtgacccgtgatccagcaggc

SEQ ID NO: 98808 - DNA, 80 bp, synthetic construct
  source 1..80: mol_type = other DNA
gcctcgtcccagagatcaacaccgagacccttcccctggaaccagtggctggtgcagctcttgctgcggctgtcactggt

SEQ ID NO: 98809 - DNA, 80 bp, synthetic construct
  source 1..80: mol_type = other DNA
acctagaaattccccaggagaagtcctcctaaatttagaattaggtcctgatttaaatccttatttggcacacttatcta

SEQ ID NO: 98810 - DNA, 80 bp, synthetic construct
  source 1..80: mol_type = other DNA
cccttgagccaattatgatacccctccccgacgtgagaaacaccttcttccattacaacaataggccctctgagcgtatg

SEQ ID NO: 98811 - DNA, 80 bp, synthetic construct
  source 1..80: mol_type = other DNA
cgtttggtggccatgttgtacacacccctgagatccaacggttcaggtgatgatgtcttcacagtctcatgcagggtgct

SEQ ID NO: 98812 - DNA, 80 bp, synthetic construct
  source 1..80: mol_type = other DNA
aactagacccactccagattttgaatttacctacctagttccaccctcagtagagtctaagacaaagcctttctctcttc

SEQ ID NO: 98813 - DNA, 80 bp, synthetic construct
  source 1..80: mol_type = other DNA
ccatcttaaccatttctgaattgactaattcaaggtttccagcacccattgattcattgtttactgcccaaaataacaat

SEQ ID NO: 98814 - DNA, 80 bp, synthetic construct
  source 1..80: mol_type = other DNA
cttaatgtccaatgtcagaatggtcggtgcacactagatggtgagttgcagggaaccacccagctgctcccaactggaat

SEQ ID NO: 98815 - DNA, 80 bp, synthetic construct
  source 1..80: mol_type = other DNA
atgtgccttcagagggaaaatatcagcagatgtgcaaaacagtcaccaagacaggtggcacatgcagttgacaaatctca

SEQ ID NO: 98816 - DNA, 80 bp, synthetic construct
  source 1..80: mol_type = other DNA
atggaaccccatttgacccaacagatgatgtcccagctccgcttggcacccctgacttcacaggtctactgtttggagtt

SEQ ID NO: 98817 - DNA, 80 bp, synthetic construct
  source 1..80: mol_type = other DNA
gcaagtcaaagaaacgttggtggaacaggtaacaacactaccagggcccacgaggtagtgatagcaacaactagcacaca

SEQ ID NO: 98818 - DNA, 80 bp, synthetic construct
  source 1..80: mol_type = other DNA
atttgtaccaaaattgggttctattaattttgggagtgaaagtgatgatttccaagtgggcccaccaaccaaattcacac

SEQ ID NO: 98819 - DNA, 80 bp, synthetic construct
  source 1..80: mol_type = other DNA
cagttggaatcaaagttgagaccgggcatcctttcagacaatgggacctacctaactattctggagcactgaccctcaac

SEQ ID NO: 98820 - DNA, 80 bp, synthetic construct
  source 1..80: mol_type = other DNA
atgaaccttgccccacctgttgccccaaacttcccaggtgagcagctgctcttctttagatcaaatgttccttgtgctgg

SEQ ID NO: 98821 - DNA, 80 bp, synthetic construct
  source 1..80: mol_type = other DNA
tggtgtcagtgagggtgtcattgactgcctactgcctcaagagtggatacaacatttctaccaggaatccgctccatctc

SEQ ID NO: 98822 - DNA, 80 bp, synthetic construct
  source 1..80: mol_type = other DNA
gtcttgcaggtgacatgctcacctctgctgtaggctcactggcgaatgccggagcaaatgccataacacagaaaattgac

SEQ ID NO: 98823 - DNA, 80 bp, synthetic construct
  source 1..80: mol_type = other DNA
acaagtggatgcaaccaagcagctgcaggcagaaatgattgccatcaaacaggggatcttgaccgctggcggcttctccc

SEQ ID NO: 98824 - DNA, 80 bp, synthetic construct
  source 1..80: mol_type = other DNA
ctgctgacgcagcaagaggggctgtaggggcacccatgaccaaggtgcttgactggtctggcacacgctattgggcacca

SEQ ID NO: 98825 - DNA, 80 bp, synthetic construct
  source 1..80: mol_type = other DNA
tccgggcagttcacatcaacgcctgtgcacacaccaaatttcaacagcaaacccaggcctcctgccaaaacccagccttc

SEQ ID NO: 98826 - DNA, 80 bp, synthetic construct
  source 1..80: mol_type = other DNA
ttcttcttcttctggtagtgtttatagtctttcaactcaatcaactttactccctggaccctcttcttcgggttcatctg

SEQ ID NO: 98827 - DNA, 80 bp, synthetic construct
  source 1..80: mol_type = other DNA
acgagcccaagatcaagaaagttgcaaacgccgtcctatgtgctctctcttcactcttcaccagacccattaaagacatc

SEQ ID NO: 98828 - DNA, 80 bp, synthetic construct
  source 1..80: mol_type = other DNA
tttcttctgtctcaacacaatcaacaaaattgagttcagtttcttctatgagtagaacagcagattgggttaatcaacaa

SEQ ID NO: 98829 - DNA, 80 bp, synthetic construct
  source 1..80: mol_type = other DNA
aggagcctcagcccttacatgagcggggcccttaatatttctcatgtgacacctccatcaagcaggacttcaagttcggg

SEQ ID NO: 98830 - DNA, 80 bp, synthetic construct
  source 1..80: mol_type = other DNA
tgaggggggagtcacgtgtttagtgaaaagaatcaattagttttaattaggttaaattttaaattttaattggatctttt

SEQ ID NO: 98831 - DNA, 80 bp, synthetic construct
  source 1..80: mol_type = other DNA
cggggcgcggcctaaacagccgcccccgggagaaacaaagcaaatctctaaaccgccaagaccgccgacaccggaattgg

SEQ ID NO: 98832 - DNA, 80 bp, synthetic construct
  source 1..80: mol_type = other DNA
cccttggcagccaaaactctgtcaatgacagtaacaacaccgccccttctagtaaagaagaggttggtgcattctccaac

SEQ ID NO: 98833 - DNA, 80 bp, synthetic construct
  source 1..80: mol_type = other DNA
ctaaggggactaaaacgcccagtagtgaccagccctgccccacggttaagatcgggaccaaaacattagcagttccccct

SEQ ID NO: 98834 - DNA, 80 bp, synthetic construct
  source 1..80: mol_type = other DNA
cgcgcaacggggtcgatcactgggacgcctacaggggagagagggtagtcttgtgggatgactatggcatgggtaaccct

SEQ ID NO: 98835 - DNA, 80 bp, synthetic construct
  source 1..80: mol_type = other DNA
accgtacagtttgatgcgaagtcagaaactgtacgtgggttgccagacttaacaacggtgcaaaatgaacacgaaaacac

SEQ ID NO: 98836 - DNA, 80 bp, synthetic construct
  source 1..80: mol_type = other DNA
aggggggtgcttggtttgatcaccggttcagatatcaggaagaggagaccagacgacttccaaccaaagggcaacctatg

SEQ ID NO: 98837 - DNA, 80 bp, synthetic construct
  source 1..80: mol_type = other DNA
caaggggcaaaccacctagacctgcagtcttagaagaagccaaaaggacagtgatgaatgttctagagcaaaccatcgac

SEQ ID NO: 98838 - DNA, 80 bp, synthetic construct
  source 1..80: mol_type = other DNA
ctaggggtgcacaaacccccagcagcaataagtctcgcgacgatagagctcacccccatatctctttactggaggcctgt

SEQ ID NO: 98839 - DNA, 80 bp, synthetic construct
  source 1..80: mol_type = other DNA
tggacacggggccccaaccatgaaaacccatacgagagcatggtccctcattctcagcgggccacacagctcatggctct

SEQ ID NO: 98840 - DNA, 80 bp, synthetic construct
  source 1..80: mol_type = other DNA
attctggtgaggatgtattcacggtgtcttgcagagtcctgacccgcccagcccccgactttgagttcactttcttagtg

SEQ ID NO: 98841 - DNA, 80 bp, synthetic construct
  source 1..80: mol_type = other DNA
ccaccaactgtggagtcaaagaccaagcccttcacactccctattctgactcttggagagctgtccaattctagattccc

SEQ ID NO: 98842 - DNA, 80 bp, synthetic construct
  source 1..80: mol_type = other DNA
cgttcagctgaagaacctcgacgggacaccatatgatccaacagatgaggtgccagcggtcctgggagccatagatttca

SEQ ID NO: 98843 - DNA, 80 bp, synthetic construct
  source 1..80: mol_type = other DNA
aagggactgtgtttggagtcgctagccaaaggaacaccacgggaaactctgtaggggcgacccgtgcccatgaagtacac

SEQ ID NO: 98844 - DNA, 80 bp, synthetic construct
  source 1..80: mol_type = other DNA
ttactctcaacatgaacctggcccccgcggttgcccctgcttttcctggtgagcgtatcctcttcttcaggtcagtggta

SEQ ID NO: 98845 - DNA, 80 bp, synthetic construct
  source 1..80: mol_type = other DNA
ccatctgccggcggttatgggtcaggtcaaatagattgcctcatcccacaggaatgggttcagcatttctatcaggaggc

SEQ ID NO: 98846 - DNA, 80 bp, synthetic construct
  source 1..80: mol_type = other DNA
acaagaattttggattggaatggaacgaggtattttgccccaaacagtatgaaaacaaccagttattcaggtcagttctc

SEQ ID NO: 98847 - DNA, 80 bp, synthetic construct
  source 1..80: mol_type = other DNA
cagtaaccctgtgcatgtgcaacccaccctgtctcgttctaattcctcaaaaattaaggttaatagtgattctgctagtg

SEQ ID NO: 98848 - DNA, 80 bp, synthetic construct
  source 1..80: mol_type = other DNA
tggactcctatgttcaacacccatagacagccattcttcgctcacgttcgtaggcgaggggagtcacaaatttagtgaaa

SEQ ID NO: 98849 - DNA, 80 bp, synthetic construct
  source 1..80: mol_type = other DNA
ccctcttggcaagaattgcggctgctagatcactagttcacaaagcaaaggaggaactgtcgagcagacaaaggcctgtt

SEQ ID NO: 98850 - DNA, 80 bp, synthetic construct
  source 1..80: mol_type = other DNA
aagacccaccttgcaagggagctggccaagaaaattgccacaacattagcaggtgaccaaagggtggggctagtgcccag

SEQ ID NO: 98851 - DNA, 80 bp, synthetic construct
  source 1..80: mol_type = other DNA
aagacccaccttgcaagggagctggccaagaaaattgccacaacattagcaggtgaccaaagggtggtgctagtgcccag

SEQ ID NO: 98852 - DNA, 80 bp, synthetic construct
  source 1..80: mol_type = other DNA
cccccacctaatggcgaggacgaaccaacggttacttatagggcgggggaaggcgtgtcaggactgcctgacttaacaac

SEQ ID NO: 98853 - DNA, 80 bp, synthetic construct
  source 1..80: mol_type = other DNA
ggcaactggcagctgagaacaaatatggcatgatggacaccctaagagttggtaatcaactaaagagtgttaaaaccatg

SEQ ID NO: 98854 - DNA, 80 bp, synthetic construct
  source 1..80: mol_type = other DNA
gatgaacttaagcgggccattaggaacgtcaccatcagaaagtgccagatagtgtacaatgggtgcacctacaccattga

SEQ ID NO: 98855 - DNA, 80 bp, synthetic construct
  source 1..80: mol_type = other DNA
gcgcggcaaagtgtcagtcgacaaggtgcagagtgcaacggtccagacaaacaatgaacttgtgggagcactacaccatc

SEQ ID NO: 98856 - DNA, 80 bp, synthetic construct
  source 1..80: mol_type = other DNA
tcaggtctgcaagaataaggtactatgtcaagtgcttccaggaggcagtctattccatactacaaattgccggtgcggcc

SEQ ID NO: 98857 - DNA, 80 bp, synthetic construct
  source 1..80: mol_type = other DNA
aagatgatgaaactgaggacaaagatggatgccccaaacccagagaagaggatgaaatcataatcgtctctaaggacatc

SEQ ID NO: 98858 - DNA, 80 bp, synthetic construct
  source 1..80: mol_type = other DNA
aaagaagaggggaagaagggcaaaaacaaaaccggccgtggtaagaaacacacggctttctccagcaaaggcctcagtga

SEQ ID NO: 98859 - DNA, 80 bp, synthetic construct
  source 1..80: mol_type = other DNA
tgtcagacaacctgatgcgcaaaacacagcctacagtgtccccccactcagccagagagaagctggagaagccagagaac

SEQ ID NO: 98860 - DNA, 80 bp, synthetic construct
  source 1..80: mol_type = other DNA
gcgaccattcttgtgaaacggccaactggagagctaatgccccttgcagccagaatgggaacccatgctacaatgaaaat

SEQ ID NO: 98861 - DNA, 80 bp, synthetic construct
  source 1..80: mol_type = other DNA
aaagaggcaatgacttcgtagtcattggcgtgcacactgcagcagcacgcgggggcaacaccgtcatctgtgccacacaa

SEQ ID NO: 98862 - DNA, 80 bp, synthetic construct
  source 1..80: mol_type = other DNA
cattacaacaggtcatgagagatcaattgaagcccttcactgagcccaggggaaaacagccaaacccaaaagtccttgaa

SEQ ID NO: 98863 - DNA, 80 bp, synthetic construct
  source 1..80: mol_type = other DNA
gcagcaaaacaaactataatcaatgtacttgagcagaccatagacccccctcaaaaatggacctatgcccaagcttgtgc

SEQ ID NO: 98864 - DNA, 80 bp, synthetic construct
  source 1..80: mol_type = other DNA
aagacaacatctagtggtcatccctatcacgttcgcaagaacgactactggagtggtgagtctttcacaggaaaattggc

SEQ ID NO: 98865 - DNA, 80 bp, synthetic construct
  source 1..80: mol_type = other DNA
tggatcgtggcaacgtactcggggttcacaaaccgcctgctgcaataagcctcgccaaaattgaattaacacctttatca

SEQ ID NO: 98866 - DNA, 80 bp, synthetic construct
  source 1..80: mol_type = other DNA
ggggttcagacctttccaccatgatacggtgtgccagggcatttggcggcctaatggatgagctcaaagcgcactgtgtg

SEQ ID NO: 98867 - DNA, 80 bp, synthetic construct
  source 1..80: mol_type = other DNA
accttctggtgtgccttgcacgtcgcagtggaattccatctcccattggctactcacactgtgtgccttgtctgaagtga

SEQ ID NO: 98868 - DNA, 80 bp, synthetic construct
  source 1..80: mol_type = other DNA
cagaaaagctaactgcaaaactcaaggaatacggcctcaagcccacccgccctgacaaaaccgaggggccattggtgatt

SEQ ID NO: 98869 - DNA, 80 bp, synthetic construct
  source 1..80: mol_type = other DNA
agtgaagacctgaatggactgactttcctccgacggacagtaacccgtgacccagcaggctggtttgggaaactggacca

SEQ ID NO: 98870 - DNA, 80 bp, synthetic construct
  source 1..80: mol_type = other DNA
cactcctcagtatttgatgtcaccagacacattgaagaacctaaatggagaatcattcccctacacagcatttgacaaca

SEQ ID NO: 98871 - DNA, 80 bp, synthetic construct
  source 1..80: mol_type = other DNA
atcctaacgctttctgaattaacaaattccagattcccagtccctattgattcactctttactgctcagaacaatgtgct

SEQ ID NO: 98872 - DNA, 80 bp, synthetic construct
  source 1..80: mol_type = other DNA
gcaggtgcagtgccaaaatggtaggtgtacgcttgatggtgagctacaaggcacaacccaattactgccagcagggattt

SEQ ID NO: 98873 - DNA, 80 bp, synthetic construct
  source 1..80: mol_type = other DNA
ctacatatgacccaactgatgatgtgccagccccacttggcacacccgacttcaaaggtcttctctttggagttgcaagt

SEQ ID NO: 98874 - DNA, 80 bp, synthetic construct
  source 1..80: mol_type = other DNA
cagagaaatgtgggtggcagcacaccaggtgccaccagagcacatgaggtagtcatctcaacaactagttcccaatttgt

SEQ ID NO: 98875 - DNA, 80 bp, synthetic construct
  source 1..80: mol_type = other DNA
ccccaaattaggttcagtcaattttggaagcaccagtgatgattttgacgaaggtcaaccaacaaaattcacacctgtgg

SEQ ID NO: 98876 - DNA, 80 bp, synthetic construct
  source 1..80: mol_type = other DNA
gcattaaagtagaacaaaaccacactttcagacaatgggagctgccagactactcaggacggctcactctaaatatgaac

SEQ ID NO: 98877 - DNA, 80 bp, synthetic construct
  source 1..80: mol_type = other DNA
cttgcacccccagttgcaccaaactttcccggtgagcagctgctgttcttcagatccaatgtcccatgcgccggaggata

SEQ ID NO: 98878 - DNA, 80 bp, synthetic construct
  source 1..80: mol_type = other DNA
tgaccctggcatcattgattgtcttattccacaggaatggatccaacacttctatcaggaatcagctccctctcagtcag

SEQ ID NO: 98879 - DNA, 80 bp, synthetic construct
  source 1..80: mol_type = other DNA
cataaaacaggggattctgaccgcaggcggcttttcccctactgatgcagcaagaggggccatcaacgcacccatgacaa

SEQ ID NO: 98880 - DNA, 80 bp, synthetic construct
  source 1..80: mol_type = other DNA
tccgggcaattcacctcctcacctgtgcatcgtcccagcccgactgttcctcaaccaaaagctgtgaaatccaaatcatc

SEQ ID NO: 98881 - DNA, 80 bp, synthetic construct
  source 1..80: mol_type = other DNA
tgcatattcttcttcttctggtagtgtttatagtttgtctacccaatcaacaatgttaccatcagattcttctaatagtt

SEQ ID NO: 98882 - DNA, 80 bp, synthetic construct
  source 1..80: mol_type = other DNA
atgagcccaaaatcaagaaagtcgcaaacgcccttctttgcgcactctcctcactcttcacgaggcccattaaagacatc

SEQ ID NO: 98883 - DNA, 80 bp, synthetic construct
  source 1..80: mol_type = other DNA
tagtttcttctgcttcaacaaaaatgacaaatttgagtggctcttctagagataggacagcagagtgggtcaaccaacag

SEQ ID NO: 98884 - DNA, 80 bp, synthetic construct
  source 1..80: mol_type = other DNA
gagtgaggggggagtcacgtgtttagtgaaaagaatcaattggatttaaaattttaaaatttggcctatttgaatctttt

SEQ ID NO: 98885 - DNA, 80 bp, synthetic construct
  source 1..80: mol_type = other DNA
cctttggcagtcaaaattctgtcaatgacagcaacaatgccaccccttctaacaaagaagaggttggtgcattctccaac

SEQ ID NO: 98886 - DNA, 80 bp, synthetic construct
  source 1..80: mol_type = other DNA
accctagagtggaaaaaggtccttcccttcaacaagtcatgagagatcagttgagacccttcacggaacccaggggcaaa

SEQ ID NO: 98887 - DNA, 80 bp, synthetic construct
  source 1..80: mol_type = other DNA
ccacctaggcctgcagttttggaggaagccaaaaagacagtgatgaatgttctagaacaaaccattgaccccgccaagcc

SEQ ID NO: 98888 - DNA, 80 bp, synthetic construct
  source 1..80: mol_type = other DNA
tgctggtgaatttacagtttcccctagaaactctcctggagaacttcttcttgatttggaattgggtcctgaacttaatc

SEQ ID NO: 98889 - DNA, 80 bp, synthetic construct
  source 1..80: mol_type = other DNA
cctatcttgcacatctgtctaggatgtacaatgggcatgcaggaggaatggaagtgcagatagtactggctgggaatgcg

SEQ ID NO: 98890 - DNA, 80 bp, synthetic construct
  source 1..80: mol_type = other DNA
ttcacagctggtaagattctatttgctgccatcccgcctagcttcccctatgaaaatttgtcacccgctcaattgactat

SEQ ID NO: 98891 - DNA, 80 bp, synthetic construct
  source 1..80: mol_type = other DNA
gaaatgttttctaccattataatcagaacaatggtcccaagcttaggcttgtagctatgctttatacccctctgagggct

SEQ ID NO: 98892 - DNA, 80 bp, synthetic construct
  source 1..80: mol_type = other DNA
aacaactcaggtgatgacgtgttcacggtgtcttgccgggttttgacacgcccttctccagattttcagttcacttttct

SEQ ID NO: 98893 - DNA, 80 bp, synthetic construct
  source 1..80: mol_type = other DNA
gacggtgagctacttggcactaccatcttacagtctgtgtccatttgcaactttaaagggacaatgcaggcaaagctgaa

SEQ ID NO: 98894 - DNA, 80 bp, synthetic construct
  source 1..80: mol_type = other DNA
tgaggagccacgataccagctacaaatcaccaacttggatggatcacctatagatccaacagatgatatgcctgctcctc

SEQ ID NO: 98895 - DNA, 80 bp, synthetic construct
  source 1..80: mol_type = other DNA
ttggcacaccagatttccaggccatgttatatggcgttgcaagccaacgctcttccagtgacaatgccaccagggcacat

SEQ ID NO: 98896 - DNA, 80 bp, synthetic construct
  source 1..80: mol_type = other DNA
gatgcacagattgacactgcgggtgacacattcgccccgaaaattggccaggttcggtttaaatcaagctctagtgattt

SEQ ID NO: 98897 - DNA, 80 bp, synthetic construct
  source 1..80: mol_type = other DNA
tgacctacatgaccctacaaaattcacacctattggagtcaatgtggatgaccagcaccctttcagacagtggtccctgc

SEQ ID NO: 98898 - DNA, 80 bp, synthetic construct
  source 1..80: mol_type = other DNA
caaactacggtgggcaccttgccctgaacaatcacttagccccagctgtgacaccactcttccctggagagcagattttg

SEQ ID NO: 98899 - DNA, 80 bp, synthetic construct
  source 1..80: mol_type = other DNA
ttctttaggtcatacatcccaagcgccggaggccacacagacggtgctatggactgcctgctgccccaagagtggatcga

SEQ ID NO: 98900 - DNA, 80 bp, synthetic construct
  source 1..80: mol_type = other DNA
gcacttctatcaggaagcggctccttcccaatctgacatcgcactggtaaggttcattaaccctgacacaggaagagtgc

SEQ ID NO: 98901 - DNA, 80 bp, synthetic construct
  source 1..80: mol_type = other DNA
tctttgaagctaaattgcacaaacaaggtttcctcacaattgcagcatctggggatcaccctattgtgatgcccactaat

SEQ ID NO: 98902 - DNA, 80 bp, synthetic construct
  source 1..80: mol_type = other DNA
ggattcaataatggctggagctttcctcgcaggcttggcaggtgacgttgtgacttccagcttgggctcacttgtgggcg

SEQ ID NO: 98903 - DNA, 80 bp, synthetic construct
  source 1..80: mol_type = other DNA
atggttccaggtattgggctcctaactctatgaagacaactggctattcaggtacatttgtctcccaaggcattagaaat

SEQ ID NO: 98904 - DNA, 80 bp, synthetic construct
  source 1..80: mol_type = other DNA
tcccctcatctgtctaatcaaactccaagtgctgttaaacctattaaacctttgctatctatatctagttcttctagtgt

SEQ ID NO: 98905 - DNA, 80 bp, synthetic construct
  source 1..80: mol_type = other DNA
atatagttctccttctactgccccctcacaatcaacacaatcaacaacgctgtctgcagggacagggtcctccagaccta

SEQ ID NO: 98906 - DNA, 80 bp, synthetic construct
  source 1..80: mol_type = other DNA
acactgtgtccacaaagacctccacactgtcgaggacaagtgactgggtcagaggccaaaatgagatgcttggcccgttc

SEQ ID NO: 98907 - DNA, 80 bp, synthetic construct
  source 1..80: mol_type = other DNA
tcccatgtttaatacccacaggcagcctctcttcgcccatttgcgtaggcgaggggagtcacagatttagtgaaaaggat

SEQ ID NO: 98908 - DNA, 80 bp, synthetic construct
  source 1..80: mol_type = other DNA
actttgaattacaagggcctgaggacctggccgtggagctcgttcccgtggttatgggcggcatagggatggttctcggt

SEQ ID NO: 98909 - DNA, 80 bp, synthetic construct
  source 1..80: mol_type = other DNA
tcgtgcacagagccaaagaagagctgtccagtaggctgagacctgtcgtggtgatgatctctgggaagccaggcattggg

SEQ ID NO: 98910 - DNA, 80 bp, synthetic construct
  source 1..80: mol_type = other DNA
aagacccaccttgctagggaactggcgaagaaaatcgctatgaccctcacaggggaccagagggtgggcttaatcccacg

SEQ ID NO: 98911 - DNA, 80 bp, synthetic construct
  source 1..80: mol_type = other DNA
gcgtgcctcctcccccacccaacggggaggatgaactggtcatccattacagtgccaagggaggtgtctcgggtcttccc

SEQ ID NO: 98912 - DNA, 80 bp, synthetic construct
  source 1..80: mol_type = other DNA
acacaatgagggtagggggacaactcaaaggtgtcaaaactgtgtcagagcttaaacaagcacttaagaacattgcaatc

SEQ ID NO: 98913 - DNA, 80 bp, synthetic construct
  source 1..80: mol_type = other DNA
aaaagctgccagatagtgtatggcggcaacacatactcacttgaatctgatgggaagggtgtcgtgaaaatcgacaaagt

SEQ ID NO: 98914 - DNA, 80 bp, synthetic construct
  source 1..80: mol_type = other DNA
ccagaacaccaatatccaaactaacaatgaactttctggcgccctgcaccacctaaaatgtgccagaatcagatactatg

SEQ ID NO: 98915 - DNA, 80 bp, synthetic construct
  source 1..80: mol_type = other DNA
tcaaatgtgtccaagagtccatctacaccatcctccagattgccggggccgcttttgtcacgacacgcatagcaagacgc

SEQ ID NO: 98916 - DNA, 80 bp, synthetic construct
  source 1..80: mol_type = other DNA
atcaacatccagaacctctggtcgaaaccacaaatagaagacacagaggacaccactactaaggatggatgcccgaaacc

SEQ ID NO: 98917 - DNA, 80 bp, synthetic construct
  source 1..80: mol_type = other DNA
gaactctcgacggtcagccaaccagaggaaaccaacacggcatttagcgttccccctcttaaccaaagggagaacaggga

SEQ ID NO: 98918 - DNA, 80 bp, synthetic construct
  source 1..80: mol_type = other DNA
caaagacgatgaggagttcatcatctcatctgaagacatcaaggcagagggcaagaaggggaagaacaagaccggtcgtg

SEQ ID NO: 98919 - DNA, 80 bp, synthetic construct
  source 1..80: mol_type = other DNA
tggggcttctgggtctctccaagcctattcataacatcaactcatgtcataccccatggtgctcaggaattctttggagt

SEQ ID NO: 98920 - DNA, 80 bp, synthetic construct
  source 1..80: mol_type = other DNA
gcccgtcaaacaaatccaaatacacaagacaggtgagttctgtcgtatgagatttccaaaaccaatcaggactgacgtga

SEQ ID NO: 98921 - DNA, 80 bp, synthetic construct
  source 1..80: mol_type = other DNA
tgctaaagagcccctgaccggcaccattctagaaatgtgggacggggagatttatcattatggtttatatgtagagcgtg

SEQ ID NO: 98922 - DNA, 80 bp, synthetic construct
  source 1..80: mol_type = other DNA
catggttggtggccaaatgggcatgctgctgacaggttccaacgctaagagcatggacctaggcacaacacccggtgatt

SEQ ID NO: 98923 - DNA, 80 bp, synthetic construct
  source 1..80: mol_type = other DNA
aagaccaaattttggagatcctcaaacacacccctcccgcccggcacctacgaaccagcttatttgggtggcaaagaccc

SEQ ID NO: 98924 - DNA, 80 bp, synthetic construct
  source 1..80: mol_type = other DNA
ggcaagccacctaaaccagatgtcttggaggccgccaagaaaaccatcatcaatgtgctagagcagacaatagacccacc

SEQ ID NO: 98925 - DNA, 80 bp, synthetic construct
  source 1..80: mol_type = other DNA
aaagactcttatggaggtcagacctagcaaccatgatcagatgtgcccgggcctttgggggattgatggacgaacttaag

SEQ ID NO: 98926 - DNA, 80 bp, synthetic construct
  source 1..80: mol_type = other DNA
aaagactcttatgggggtcagacctagcaaccatgatcagatgtgcccgggcctttgggggattgatggacgaacttaag

SEQ ID NO: 98927 - DNA, 80 bp, synthetic construct
  source 1..80: mol_type = other DNA
ggttagtacttggcgtgcacaaaccaccagcagccattagcctcgccaaagtggagctgacacctctgtctctatactgg

SEQ ID NO: 98928 - DNA, 80 bp, synthetic construct
  source 1..80: mol_type = other DNA
gcacactgtgttgcgctccccatcagggttggtatgaacatgaatgaggatggccccataatctttgagaaacattccag

SEQ ID NO: 98929 - DNA, 80 bp, synthetic construct
  source 1..80: mol_type = other DNA
caggaaaactgacagcaaagctgagggaatacgggttgaagccaacacgccctgataaaactgaagggcccctactcatc

SEQ ID NO: 98930 - DNA, 80 bp, synthetic construct
  source 1..80: mol_type = other DNA
agaccagtgtacaccccccagtatcttattcccccagacaccctaaagaaattacacggggagtcgttcccttacactgc

SEQ ID NO: 98931 - DNA, 80 bp, synthetic construct
  source 1..80: mol_type = other DNA
cggggcccggcccaaacagccgcccccgagggaaaaaccaccgagacccccccgaccacccactcctgaactaataagga

SEQ ID NO: 98932 - DNA, 80 bp, synthetic construct
  source 1..80: mol_type = other DNA
caggggaccaacgtgtgggcctcataccgcgcaatggtgttgaccattgggacgcatacaagggagaaagggtggtccta

SEQ ID NO: 98933 - DNA, 80 bp, synthetic construct
  source 1..80: mol_type = other DNA
ttggaaaacagctcaaggatgtcaagaccatgccagacctcaagcaagctctcaaaaatgtctcgatcaagaagtgtcaa

SEQ ID NO: 98934 - DNA, 80 bp, synthetic construct
  source 1..80: mol_type = other DNA
cgtgcaaaccaacaatgaactaactggtgccctacaccatctaaggtgcgccagaattaggtactatgtcaagtgtgtcc

SEQ ID NO: 98935 - DNA, 80 bp, synthetic construct
  source 1..80: mol_type = other DNA
cacagttggggggcaaatgggcatgcttctgacagggtccaacgccaaaagtatggacctaggcacaacaccgggtgact

SEQ ID NO: 98936 - DNA, 80 bp, synthetic construct
  source 1..80: mol_type = other DNA
cacagttgggaggcaaatgggcatgcttctgacagggtccaacgccaaaagtatggacctaggcacaacaccgggtgact

SEQ ID NO: 98937 - DNA, 80 bp, synthetic construct
  source 1..80: mol_type = other DNA
ggggctcagacctggcgaccatgatccggtgcgctcgagcctttggaggccttatggatgaacttaaggcacactgtgtt

SEQ ID NO: 98938 - DNA, 80 bp, synthetic construct
  source 1..80: mol_type = other DNA
aggtagttgcagaagacctcctctcccccagtgtaatggatgtgggtgatttccaaatctcaataagtgagggactcccc

SEQ ID NO: 98939 - DNA, 80 bp, synthetic construct
  source 1..80: mol_type = other DNA
gtcctgatttgaatccgtatttggcacacctatctagaatgtataatgggtatgctggtggcgtagaagtccaagtcctc

SEQ ID NO: 98940 - DNA, 80 bp, synthetic construct
  source 1..80: mol_type = other DNA
actgcatggagaatcattcccctacacagcatttgacaataattgctacgccttctgttgttgggtgttggaactaaacg

SEQ ID NO: 98941 - DNA, 80 bp, synthetic construct
  source 1..80: mol_type = other DNA
cccttgaacctatcatgataccactcccagatgtcaggaacaccttcttccattacaacaatcaacctgccaatcgcatg

SEQ ID NO: 98942 - DNA, 80 bp, synthetic construct
  source 1..80: mol_type = other DNA
ccatattgaccatctctgaattgaccaactcaagattccctgtaccggtggattcattgttcacagcccaaaacaacaat

SEQ ID NO: 98943 - DNA, 80 bp, synthetic construct
  source 1..80: mol_type = other DNA
ctcaatgtccagtgtcaaaatggtcgttgcacactggatggtgagttgcagggaaccactcagttacaaccatcaggcat

SEQ ID NO: 98944 - DNA, 80 bp, synthetic construct
  source 1..80: mol_type = other DNA
ctgcgcctttagaggcaaaataacggcagatgtgcaccatagccacgatgacagatggcacatgcaactgacaaatctca

SEQ ID NO: 98945 - DNA, 80 bp, synthetic construct
  source 1..80: mol_type = other DNA
atggaacccccttcgatccaacagaggatgtgccagctccactgggcactccagacttcacaggccttctctacggagtt

SEQ ID NO: 98946 - DNA, 80 bp, synthetic construct
  source 1..80: mol_type = other DNA
gcgagccaaaggaatgttcaacccaacccaaacaccaccagagcacatgaagctgtgatctccacaaccagttcgcagtt

SEQ ID NO: 98947 - DNA, 80 bp, synthetic construct
  source 1..80: mol_type = other DNA
tgtgccaaaattagggtcaatcaactttggtagcacaagtgaagacttcgtcgtgggccaacctaccaaattcacaccag

SEQ ID NO: 98948 - DNA, 80 bp, synthetic construct
  source 1..80: mol_type = other DNA
ttggtattaagattgagactggacatgatttcgatcaatggaccctacctagatattcaggccatttgacactcaatatg

SEQ ID NO: 98949 - DNA, 80 bp, synthetic construct
  source 1..80: mol_type = other DNA
aaccttgccccacccgttgctccaaatttccctggtgaacagttacttttcttcagatcaaacgtcccctgtgccggtgg

SEQ ID NO: 98950 - DNA, 80 bp, synthetic construct
  source 1..80: mol_type = other DNA
ctgatgtggccctgatcagatatgtcaaccctgacacgggtcgtacactctttgaggcgaaactccacagaacgggctac

SEQ ID NO: 98951 - DNA, 80 bp, synthetic construct
  source 1..80: mol_type = other DNA
gtctagcaggtgacatgctcaccaacacagttggttcactggtgaatgccggggccaatgctatcacccaaaaggtggac

SEQ ID NO: 98952 - DNA, 80 bp, synthetic construct
  source 1..80: mol_type = other DNA
tcagggcagttcacatcaacacccgtgcatatgcccacaaagacaactcagcctgctcctgcaaaaaggactcaaccccc

SEQ ID NO: 98953 - DNA, 80 bp, synthetic construct
  source 1..80: mol_type = other DNA
ttcttcctcttcaggtagcatttatagtctttcaacacagagtactgttttgaccaagccttcttcaggctcctcttctg

SEQ ID NO: 98954 - DNA, 80 bp, synthetic construct
  source 1..80: mol_type = other DNA
gtgaggggggagtcacgtgtttagtgaaaagaaccaattaattttaattagttgtgattgagttctaaattggatctttt

SEQ ID NO: 98955 - DNA, 80 bp, synthetic construct
  source 1..80: mol_type = other DNA
atagggaagctaaaacctcttaacatcctcaatattttggccacatgtgattggaccttcgcaggcatagtggaatccct

SEQ ID NO: 98956 - DNA, 80 bp, synthetic construct
  source 1..80: mol_type = other DNA
cgaccgctggcaaaaccagcacaaacagtgaaattcacaatcaagatgcaaaccctacatcaaacctctttgccaacatg

SEQ ID NO: 98957 - DNA, 80 bp, synthetic construct
  source 1..80: mol_type = other DNA
aatgcaaggccctgaggatatcgcggttgaggtcgtgccggtgatcctcggtggcataggcatggtgcttggattcacca

SEQ ID NO: 98958 - DNA, 80 bp, synthetic construct
  source 1..80: mol_type = other DNA
tgcagggagattggtaactacgggatagaagtggtgaaactggtgatgaagtggtttttccccaccaaggatgagacaaa

SEQ ID NO: 98959 - DNA, 80 bp, synthetic construct
  source 1..80: mol_type = other DNA
cgagatggatatggtgagggcgatagaggatgctgtgctcgattttgaagccatacagaacaatcatatgacagcattac

SEQ ID NO: 98960 - DNA, 80 bp, synthetic construct
  source 1..80: mol_type = other DNA
tcaaagacaaaaacagtctggcaaccttcctcagggagttagatatggaagaggaaaaggcgcggaagctgtcaacgaaa

SEQ ID NO: 98961 - DNA, 80 bp, synthetic construct
  source 1..80: mol_type = other DNA
cttggctcgtgacctggccaagaagatggcagcgaccctctcaggtgatcagagggtggggctcgtaccgaggaatggtg

SEQ ID NO: 98962 - DNA, 80 bp, synthetic construct
  source 1..80: mol_type = other DNA
gctcgataccactcccagagccccctctcccaacaagggaggaaaaatcaacatccccccaataccacccccaccgccca

SEQ ID NO: 98963 - DNA, 80 bp, synthetic construct
  source 1..80: mol_type = other DNA
gctcgataccactcccagagccccctctcccaacaagggaggaaaaatcaacatccccccaataccaccgccaccgccca

SEQ ID NO: 98964 - DNA, 80 bp, synthetic construct
  source 1..80: mol_type = other DNA
acgactacggcatgagcaaccctgtgaccgacgcactgcggctccaggagttggccgacacatgccccttgacactcaat

SEQ ID NO: 98965 - DNA, 80 bp, synthetic construct
  source 1..80: mol_type = other DNA
tcagacttttcacatataaagcttcagttggcgccacaagggggctttgataagaacggaaacaccccccacgggaaagg

SEQ ID NO: 98966 - DNA, 80 bp, synthetic construct
  source 1..80: mol_type = other DNA
tgtcatgaaaacgctgaccacacactcccttattgcccgcgccacgggcctcctgcacgagagactggatgagttcgacc

SEQ ID NO: 98967 - DNA, 80 bp, synthetic construct
  source 1..80: mol_type = other DNA
tgcagggacctgagttgcctgtgtacaactttgaccacaacagggtggctgctttcaggagacttgcagctgacaacaag

SEQ ID NO: 98968 - DNA, 80 bp, synthetic construct
  source 1..80: mol_type = other DNA
tatggccttatggaaaccatgaaagtgggcaacaaactgaagggtgtcaagaatctggaacaactcaaggatgctctaaa

SEQ ID NO: 98969 - DNA, 80 bp, synthetic construct
  source 1..80: mol_type = other DNA
ggacataagtatcagaccttgcaggatagtctacaactcgatggcttacgacctcgactcgaacgggtcagggagagtca

SEQ ID NO: 98970 - DNA, 80 bp, synthetic construct
  source 1..80: mol_type = other DNA
acgtcaaaaaggctgtagaccacaaggtccaaaccaacaacgaactcaactccgcgctcaacaatctgcgtggcgccaga

SEQ ID NO: 98971 - DNA, 80 bp, synthetic construct
  source 1..80: mol_type = other DNA
acggtgaggacatagtcatcaaatacaccaaacaagatgatgtagttgaaggggtacccaccgtcgccacggtggacgtt

SEQ ID NO: 98972 - DNA, 80 bp, synthetic construct
  source 1..80: mol_type = other DNA
tcagcagtatttgggccaggccagaaaaacaaatggaggccgctgaggaacccccagcccccccaactgaggactggact

SEQ ID NO: 98973 - DNA, 80 bp, synthetic construct
  source 1..80: mol_type = other DNA
ataataccagcaaatgcagcccaggaaggtaagaagggtaagaacaagagtggtagaggcaagaaacacaccgccttctc

SEQ ID NO: 98974 - DNA, 80 bp, synthetic construct
  source 1..80: mol_type = other DNA
gaaataaaaattagacagagggtcttccgcccgaccaggaaacagcgtaaggaagagagagcgactctgggcctggttac

SEQ ID NO: 98975 - DNA, 80 bp, synthetic construct
  source 1..80: mol_type = other DNA
gggcagtgaaataaggaagaggaacccagatgacttcaagccaaagggaaaactgtgggctgatgatgaccgcagtgtaa

SEQ ID NO: 98976 - DNA, 80 bp, synthetic construct
  source 1..80: mol_type = other DNA
gggtgtcttccaatttgttcatcacatcaacacatgtcatccccccaaacatgaccgaggcttttggtgtaccaataggt

SEQ ID NO: 98977 - DNA, 80 bp, synthetic construct
  source 1..80: mol_type = other DNA
caaatacaagtgcacaggagtggggagttctgcaaaatgaggttccctaaagctataagacctgatgtctcaggcatgat

SEQ ID NO: 98978 - DNA, 80 bp, synthetic construct
  source 1..80: mol_type = other DNA
cctcttacacacaacaccgcctacagtgttccccccttggaccagagggaaaaggttgatgcgaaggaacccctgacagg

SEQ ID NO: 98979 - DNA, 80 bp, synthetic construct
  source 1..80: mol_type = other DNA
aaatacaggggaagatgcttggaggccaaatgggcatgcttctcacagggtccaatgccaagaacatggatcttggcacc

SEQ ID NO: 98980 - DNA, 80 bp, synthetic construct
  source 1..80: mol_type = other DNA
caccacgaccggcgatcctggaggctgctaaagagaccatctgcaatgtgcttgaacaaatcattgacccacccctaaaa

SEQ ID NO: 98981 - DNA, 80 bp, synthetic construct
  source 1..80: mol_type = other DNA
tggtcttacgcccaagcctgtgcctcattggataagacaacatcaagtggccaccctcatcatatgaaaaagaatgacaa

SEQ ID NO: 98982 - DNA, 80 bp, synthetic construct
  source 1..80: mol_type = other DNA
cctatggggctcagatctgggcacaatggttcgctgtgctagagcttttggtggtcttatggatgagatgaaagcaaatt

SEQ ID NO: 98983 - DNA, 80 bp, synthetic construct
  source 1..80: mol_type = other DNA
gtgtgaacttaccaattagagttggcatgaacatgaacgaggatgggcccattatttttgaaaaacattcaaagtataag

SEQ ID NO: 98984 - DNA, 80 bp, synthetic construct
  source 1..80: mol_type = other DNA
ctaataacattatgtgccatatcagaagtctcagggttgtcgccagatgtggtgcaaacaaactcctgtttctctttcta

SEQ ID NO: 98985 - DNA, 80 bp, synthetic construct
  source 1..80: mol_type = other DNA
cggggatgatgagatagtcagcactgacatcaagttagatcccatgaaactaaccaacaagttgaaggagtacgggttga

SEQ ID NO: 98986 - DNA, 80 bp, synthetic construct
  source 1..80: mol_type = other DNA
gtgtgccgggacccagctggttggtacggaaaacttgatcaatcctcaatcatgagacaattgttctggaccaagggacc

SEQ ID NO: 98987 - DNA, 80 bp, synthetic construct
  source 1..80: mol_type = other DNA
cataagctttgcacgcatagaactcactcccctttctctatactggagggtagtctataccccaccttacctaatagccc

SEQ ID NO: 98988 - DNA, 80 bp, synthetic construct
  source 1..80: mol_type = other DNA
tggaacccgtggtgggggcatctttagccgcccctgtcactggccaaactaatataatagacccctggattagaactaat

SEQ ID NO: 98989 - DNA, 80 bp, synthetic construct
  source 1..80: mol_type = other DNA
ctcccctggagaggtattggtcaatttggagctaggtccagaactgaacccttatctgggacacttagctaggatgtaca

SEQ ID NO: 98990 - DNA, 80 bp, synthetic construct
  source 1..80: mol_type = other DNA
cagaaaccctcaggaaactccatggggagtcgtttccatacacagcctttgacaataactgctattccttctgctgttgg

SEQ ID NO: 98991 - DNA, 80 bp, synthetic construct
  source 1..80: mol_type = other DNA
ctgtactaacactgggagaattgtctaactctagatttcccctctctattgatgaaatggttaccagccccaatgagtcc

SEQ ID NO: 98992 - DNA, 80 bp, synthetic construct
  source 1..80: mol_type = other DNA
atagttgtccagccacagaatggtagggttacgctggatggggagctgttgggcacaactcaattacaagcatgcaacat

SEQ ID NO: 98993 - DNA, 80 bp, synthetic construct
  source 1..80: mol_type = other DNA
ttgctctataagggggaaggtaacagggcaggttcctaatgaacaacatatgtggaacctagagatcacaaacctaaatg

SEQ ID NO: 98994 - DNA, 80 bp, synthetic construct
  source 1..80: mol_type = other DNA
ggacacaatttgaccccacagatgatgtcccagccccccttggtgtgcccgactttgcaggtgaggtttttggtgtactc

SEQ ID NO: 98995 - DNA, 80 bp, synthetic construct
  source 1..80: mol_type = other DNA
agccagagaaatagaggtgagagcaatccagcaaacagggctcatgatgctgtcgtggctacctacagtgacaagtacac

SEQ ID NO: 98996 - DNA, 80 bp, synthetic construct
  source 1..80: mol_type = other DNA
ccccaaactgggcttagtgcaaattggaacttggaacaccaatgatgttgaaaatcagccaacaaaattcaccccaattg

SEQ ID NO: 98997 - DNA, 80 bp, synthetic construct
  source 1..80: mol_type = other DNA
gtttgaatgaggttgccaatggccatcgatttgaacagtggactttgcctaggtattctggtgccctaacactaaacatg

SEQ ID NO: 98998 - DNA, 80 bp, synthetic construct
  source 1..80: mol_type = other DNA
aatttagcccctgctgtggctccgctctttcctggagagcgtctccttttcttccgctcttatgttccattaaaaggtgg

SEQ ID NO: 98999 - DNA, 80 bp, synthetic construct
  source 1..80: mol_type = other DNA
atttggtaaccctgctatagattgtctggtgcctcaagagtgggttcaacacttctatcaggagtctgccccctctctgg

SEQ ID NO: 99000 - DNA, 80 bp, synthetic construct
  source 1..80: mol_type = other DNA
gggatgtggccttggtcaggtacgtcaacccagacaccgggcgcgtcctttttgaggccaaactccacaagggtggattc

SEQ ID NO: 99001 - DNA, 80 bp, synthetic construct
  source 1..80: mol_type = other DNA
ctgactgtgtcaagcactagcacagggcctgttgtggtgccagccaatggctatttcagatttgattcttgggttaatca

SEQ ID NO: 99002 - DNA, 80 bp, synthetic construct
  source 1..80: mol_type = other DNA
tttgattttaataggcaattgcaacaaaattctttcaatcatgataaagaaatgttaagtgcccaaattcaagcaacaaa

SEQ ID NO: 99003 - DNA, 80 bp, synthetic construct
  source 1..80: mol_type = other DNA
aggaagtttgtgtcaaggaccacgggtttctacaggccctaccaagagtggaacagaaaacccctaccaactatggatga

SEQ ID NO: 99004 - DNA, 80 bp, synthetic construct
  source 1..80: mol_type = other DNA
acagttgcaggctgatatgatagcaatcaaacagggagtcctggctgctggaggtttctccccaactgatgcagccagag

SEQ ID NO: 99005 - DNA, 80 bp, synthetic construct
  source 1..80: mol_type = other DNA
agctactctggaaagtttgtgtccatgaatcctgttaggcaggttgaattcccgcagcccaaaaagagtgcggccatacc

SEQ ID NO: 99006 - DNA, 80 bp, synthetic construct
  source 1..80: mol_type = other DNA
atcaagtgccagctccgtgtcttctggtagaactaatttgacaaattccactcaatcaactgttgttagtgcttcctcag

SEQ ID NO: 99007 - DNA, 80 bp, synthetic construct
  source 1..80: mol_type = other DNA
tgccaccttctaggggcccctctgctccttctactctgtcaagggccacagccagaacttccaattgggttgaggaacaa

SEQ ID NO: 99008 - DNA, 80 bp, synthetic construct
  source 1..80: mol_type = other DNA
aacaggaatttggaaccctacatgaagggtgcccttcaaacagcatttgtcacccccccctctagccgggcatctagtaa

SEQ ID NO: 99009 - DNA, 80 bp, synthetic construct
  source 1..80: mol_type = other DNA
ccgcttttcgcttaccttcgtaagaagggggagtcacaagcttagtgaaaagataattaatgattaataattgatctttt

SEQ ID NO: 99010 - DNA, 80 bp, synthetic construct
  source 1..80: mol_type = other DNA
gggaaagcttaagaaggtggccaatgtgctcctatgtggcctctctgggctctttactaggcccatcaaggacctcatag

SEQ ID NO: 99011 - DNA, 80 bp, synthetic construct
  source 1..80: mol_type = other DNA
actgttggcttgaagagggccctggtggcgaggccaaaacagtccgctcccagggtctcctcccccaacagggagtgaaa

SEQ ID NO: 99012 - DNA, 80 bp, synthetic construct
  source 1..80: mol_type = other DNA
actgttggcttgaagagggccctgggggcgaggccaaaacagtccgctcccagggtctcctcccccaacagggagggaaa

SEQ ID NO: 99013 - DNA, 80 bp, synthetic construct
  source 1..80: mol_type = other DNA
gaaaattgaggccgctgaacatactcaacatcatcaccaattgtgattggaccttccccggagttgtggaggctctcata

SEQ ID NO: 99014 - DNA, 80 bp, synthetic construct
  source 1..80: mol_type = other DNA
ctacttgcagaactctttggagtcttttggacaccaccagacatttccacctttatagcatcactgctgggtgattatga

SEQ ID NO: 99015 - DNA, 80 bp, synthetic construct
  source 1..80: mol_type = other DNA
ccatcttgaccattggggagttaaccaactctaggttccctgtgcccatagatcagatctacaccagtcccaatgagaat

SEQ ID NO: 99016 - DNA, 80 bp, synthetic construct
  source 1..80: mol_type = other DNA
ataaccatgtttggaacatgcaggtcaccaacatcaacgggaccccttttgacccaacagaggatgttccggctccccta

SEQ ID NO: 99017 - DNA, 80 bp, synthetic construct
  source 1..80: mol_type = other DNA
cagctgcctctacattaagagcttgcaaggacctcggggcctacgggctagaaatactcaaactagtcatgaaatggttt

SEQ ID NO: 99018 - DNA, 80 bp, synthetic construct
  source 1..80: mol_type = other DNA
aggacgcggtgctggacctagaggctatagaaaacaaccacatgaccactctcctcaaagacaaagacagtttggcaact

SEQ ID NO: 99019 - DNA, 80 bp, synthetic construct
  source 1..80: mol_type = other DNA
aagacccatcttgctagagaactggccaagaaggttgccgcgacgttggcgggtgaccagagggtggggttgatacccag

SEQ ID NO: 99020 - DNA, 80 bp, synthetic construct
  source 1..80: mol_type = other DNA
aagacccatcttgctagagaactggccaagaaggttgccgcgacgttggcgggtgaccagagggtgtggttgatacccag

SEQ ID NO: 99021 - DNA, 80 bp, synthetic construct
  source 1..80: mol_type = other DNA
gaatggtgtggaccactgggacgcctacaagggtgagagagtggtcctatgggatgattatggaatgagtaaccctattc

SEQ ID NO: 99022 - DNA, 80 bp, synthetic construct
  source 1..80: mol_type = other DNA
cccccacctaacggcgagggcgaacccgtggtggtgtatagggtaggagaaggggtgtcaggactgcctgacctaaccac

SEQ ID NO: 99023 - DNA, 80 bp, synthetic construct
  source 1..80: mol_type = other DNA
ggcaattggcagctgaaaacaggtatggcatgatggatacacttagagttggcaaccagttaaagagtgtcaaaaccatg

SEQ ID NO: 99024 - DNA, 80 bp, synthetic construct
  source 1..80: mol_type = other DNA
agcgagctcaaacaggccataaagaacatcactatcaagaagtgccaaatagtttacaatgggtgcacctacaccatgga

SEQ ID NO: 99025 - DNA, 80 bp, synthetic construct
  source 1..80: mol_type = other DNA
gcgtggtgcagtctcagttgaaaaggtgcaaagtacaacagttcaaaacaataatgagcttgtgggggccctataccatc

SEQ ID NO: 99026 - DNA, 80 bp, synthetic construct
  source 1..80: mol_type = other DNA
ttagatctgcaagaataaggtactatgtcaaatgtttccaagaggcactctattctgtgttgcaaattgctggtgcagct

SEQ ID NO: 99027 - DNA, 80 bp, synthetic construct
  source 1..80: mol_type = other DNA
ttcgttacatcacgcattataaaacgcatgaacatctcaaacctgtggtcaaaaccgccagttgaagatagtgatgagac

SEQ ID NO: 99028 - DNA, 80 bp, synthetic construct
  source 1..80: mol_type = other DNA
tgaaagcaaggaaggctgccctaaacccagagatgatgaatatgaatttgtagttgattcaaaggacatcaaggtggagg

SEQ ID NO: 99029 - DNA, 80 bp, synthetic construct
  source 1..80: mol_type = other DNA
agtcacacagcctgacgcacaaaacacagcttacagcatccccccactcagtcagagagaacctggcgacgccaaagaac

SEQ ID NO: 99030 - DNA, 80 bp, synthetic construct
  source 1..80: mol_type = other DNA
tattccgcccaaccagaaaacagagaaaggaagagagggccacactcgggctagtcacaggatcagagatcaggaaaaga

SEQ ID NO: 99031 - DNA, 80 bp, synthetic construct
  source 1..80: mol_type = other DNA
tcgcaaccatccttgtcaagcggccaacaggagagctgatgccacttgcagccagaatggggactcatgccacaatgaag

SEQ ID NO: 99032 - DNA, 80 bp, synthetic construct
  source 1..80: mol_type = other DNA
aaaggggcaatgactttgtagtcattggtgttcacactgcggcagcacgtgggggaaacacagtcatttgtgccacacag

SEQ ID NO: 99033 - DNA, 80 bp, synthetic construct
  source 1..80: mol_type = other DNA
cgctgccaggatcaatcatagagatgtgggatggggagatataccattacgggctgtacgtggaacgaggtcacgtgctt

SEQ ID NO: 99034 - DNA, 80 bp, synthetic construct
  source 1..80: mol_type = other DNA
ggctctgacctctccaccatgataaggtgtgctagggcctttggtggactcatggatgaatttaaagcacactgcatcac

SEQ ID NO: 99035 - DNA, 80 bp, synthetic construct
  source 1..80: mol_type = other DNA
tagagccagtggcaggtgcagcaatagcagcacctctcactggccagcaaaacataattgatccctggattatgaataat

SEQ ID NO: 99036 - DNA, 80 bp, synthetic construct
  source 1..80: mol_type = other DNA
acctaggaactcccctggtgaagtacttcttaatttagaattaggtccagaaataaacccctatttggctcaccttgcta

SEQ ID NO: 99037 - DNA, 80 bp, synthetic construct
  source 1..80: mol_type = other DNA
ggatgtacaatggttatgcaggtgggtttgaggtgcaggtagtcctggctggaaatgcgtttacagcaggaaaggtgatc

SEQ ID NO: 99038 - DNA, 80 bp, synthetic construct
  source 1..80: mol_type = other DNA
tttgcagctataccccccaatttcccaattgacaatctgagcgcagcacagattacaatgtgcccgcatgtgattgtgga

SEQ ID NO: 99039 - DNA, 80 bp, synthetic construct
  source 1..80: mol_type = other DNA
tgtcagacaattggaaccaatcaaccttccgatgcctgatgtccgtaataatttctttcattataatcaagggtctgatt

SEQ ID NO: 99040 - DNA, 80 bp, synthetic construct
  source 1..80: mol_type = other DNA
cgaggttgcgtttaattgcaatgttatacacacctcttagggcaaataattcaggagatgatgttttcactgtgtcttgt

SEQ ID NO: 99041 - DNA, 80 bp, synthetic construct
  source 1..80: mol_type = other DNA
agggtattaactaggcctagccctgatttctcattcaattttctcgttccacctactgtggaatcaaagacaaagccttt

SEQ ID NO: 99042 - DNA, 80 bp, synthetic construct
  source 1..80: mol_type = other DNA
caccctccccattttgactatttctgaaatgtctaattctagatttccagtgccaattgactctctgcacactagcccga

SEQ ID NO: 99043 - DNA, 80 bp, synthetic construct
  source 1..80: mol_type = other DNA
agtcaaatatgtgctttcaggggcacgctcaccagatcaacaagcagggccggtgaccaagctgacacggcaacccctag

SEQ ID NO: 99044 - DNA, 80 bp, synthetic construct
  source 1..80: mol_type = other DNA
attgttcaattattattggcacatacaattggataacctaaatggaaccccctatgaccctgcagaagacataccagccc

SEQ ID NO: 99045 - DNA, 80 bp, synthetic construct
  source 1..80: mol_type = other DNA
ctttgggaacaccagacttccggggcaaggtctttggcgtagctagccagagaaaccctgacagcacaacaagagcacat

SEQ ID NO: 99046 - DNA, 80 bp, synthetic construct
  source 1..80: mol_type = other DNA
gaagcaaaagtggacacaacatctggtcgcttcgccccgaaattgggttccctagaaatatccactgaatccagtgactt

SEQ ID NO: 99047 - DNA, 80 bp, synthetic construct
  source 1..80: mol_type = other DNA
tgactcaaaccaaccaacaaggttcaccccagttggcattggggttgacaatgaggcagattttcagcaatggtccttac

SEQ ID NO: 99048 - DNA, 80 bp, synthetic construct
  source 1..80: mol_type = other DNA
ctgactactccggtcagttcactcataacatgaacttagccccagctgtcgcccccaatttccctggtgagcagcttctt

SEQ ID NO: 99049 - DNA, 80 bp, synthetic construct
  source 1..80: mol_type = other DNA
tcagcagaaggatgattcaaaggaccaccggtttcttcaggccataccaggaatggaacagaaagcccctaccaactatt

SEQ ID NO: 99050 - DNA, 80 bp, synthetic construct
  source 1..80: mol_type = other DNA
ttcttccgctcacagttgccatcttctggtgggcggtctaacgggattctggactgcctggttccccaggaatgggttca

SEQ ID NO: 99051 - DNA, 80 bp, synthetic construct
  source 1..80: mol_type = other DNA
acacttctaccaggaatcagcccctgcccaaacacaggtagccctggttagatatgttaaccctgacactggtagagtgc

SEQ ID NO: 99052 - DNA, 80 bp, synthetic construct
  source 1..80: mol_type = other DNA
caggggctagtgccatcaatcaaaaagttgattttgagaataataaatacttacaaaatgcatcttttgctcatgataag

SEQ ID NO: 99053 - DNA, 80 bp, synthetic construct
  source 1..80: mol_type = other DNA
accaaacgccacctccacaacctcaatgtcaggtggcttcacaagccaaactgtgcacagaaccgcaccaaattttaaga

SEQ ID NO: 99054 - DNA, 80 bp, synthetic construct
  source 1..80: mol_type = other DNA
cgaaccaggcccccaagtccgcacccagcagtgggtcttcagtgaggtcaaattcaacccaactcactagcttgagttca

SEQ ID NO: 99055 - DNA, 80 bp, synthetic construct
  source 1..80: mol_type = other DNA
cactcctccgggtcgtctcgatccagcgggtctacggttgtcagctcattgccatcttccaacaggactagggattgggt

SEQ ID NO: 99056 - DNA, 80 bp, synthetic construct
  source 1..80: mol_type = other DNA
acaaccgctattcgcacaccttcgtagaaggggggagtcaaatgtttagtgaaaagattattttaaatttaacttggatt

SEQ ID NO: 99057 - DNA, 80 bp, synthetic construct
  source 1..80: mol_type = other DNA
cctcggggcgcggccgaaacagccgcccccgggagaaacaaagcaaacatcaaaaccaccaagaccaccaacaccggaat

SEQ ID NO: 99058 - DNA, 80 bp, synthetic construct
  source 1..80: mol_type = other DNA
gaagaggcagggtctcagttgacaaggtgcaaaatacaacagttcaaactaataatgagctttcaggagcgctacaccac

SEQ ID NO: 99059 - DNA, 80 bp, synthetic construct
  source 1..80: mol_type = other DNA
ccgtggcgcggcctgacgcacaaaacacagcttatagtgttcccccacttagccagagggaggtaggcgaagctaaagag

SEQ ID NO: 99060 - DNA, 80 bp, synthetic construct
  source 1..80: mol_type = other DNA
ctgaagggccgctggtggtcagtgaagatttggatgggttgacgttcctccgccgaacagtcacccgtgacccagcaggt

SEQ ID NO: 99061 - DNA, 80 bp, synthetic construct
  source 1..80: mol_type = other DNA
attggaaccaatcaatctcccgatgcctgatgtccgcaacaatttcttccattacaatcaagggtctgattcgaggttac

SEQ ID NO: 99062 - DNA, 80 bp, synthetic construct
  source 1..80: mol_type = other DNA
actaggcctagccctgatttctcattcaatttccttgtcccgcccactgtggagtcaaagacaaaacccttcacccttcc

SEQ ID NO: 99063 - DNA, 80 bp, synthetic construct
  source 1..80: mol_type = other DNA
cattctaactatttctgaaatgtctaattccaggtttccagtgccaattgactctctgcacaccagcccgactgaaaata

SEQ ID NO: 99064 - DNA, 80 bp, synthetic construct
  source 1..80: mol_type = other DNA
tgcgctttcaggggcactctcaccagatcaacaagcagggccagtgaccaagctgacacagcaacccctaggcttttcaa

SEQ ID NO: 99065 - DNA, 80 bp, synthetic construct
  source 1..80: mol_type = other DNA
ctattattggcatatacaattgaataacctaaatggaaccccctacgaccctgcagaggacataccagcccctttgggga

SEQ ID NO: 99066 - DNA, 80 bp, synthetic construct
  source 1..80: mol_type = other DNA
cgccagactttcggggcaaggtctttggcgtagccagccagagaaaccctgatagcacaacaagagcacatgaagcaaaa

SEQ ID NO: 99067 - DNA, 80 bp, synthetic construct
  source 1..80: mol_type = other DNA
gtggacacaacatctggccgtttcgccccaaagttgggctccctggaaatatccactgaaaccgacgactttaaccaaaa

SEQ ID NO: 99068 - DNA, 80 bp, synthetic construct
  source 1..80: mol_type = other DNA
ccaaccaacaagatttaccccagttggcattggggttgataatgaggcagattttcaacaatggtccttgcctgactact

SEQ ID NO: 99069 - DNA, 80 bp, synthetic construct
  source 1..80: mol_type = other DNA
ccggtcagttcacccacaacatgaacttggccccagctgtcgcacccaacttccccggtgaacagcttctcttcttccgc

SEQ ID NO: 99070 - DNA, 80 bp, synthetic construct
  source 1..80: mol_type = other DNA
tcacagctgccatcctctggtgggcggtccagtgggattctagactgcctggtcccccaagaatgggttcaacacttcta

SEQ ID NO: 99071 - DNA, 80 bp, synthetic construct
  source 1..80: mol_type = other DNA
ccaagaatcagcccctgcgcaaacacaggtggctctggtcaggtatgtcaaccctgatactggtagagtgttatttgagg

SEQ ID NO: 99072 - DNA, 80 bp, synthetic construct
  source 1..80: mol_type = other DNA
ccaagctacataaattaggtttcatgaccatagctaagaatggtgactctccaataactgtccctccaaatggatacttt

SEQ ID NO: 99073 - DNA, 80 bp, synthetic construct
  source 1..80: mol_type = other DNA
aggtttgaatcttgggtgaaccccttttatacactagcccccatgggaactggaaatgggcgtagaaggattcaataatg

SEQ ID NO: 99074 - DNA, 80 bp, synthetic construct
  source 1..80: mol_type = other DNA
tactcatctgggtcgtctcgatctagcggatccacgattgtcagctcattgccatcttccagcaggaccagggattgggt

SEQ ID NO: 99075 - DNA, 80 bp, synthetic construct
  source 1..80: mol_type = other DNA
ctttggcagtcaaaactctgtcaatgacagtattaacaccgccccttctgatagagaagaggttggtgcattctccaaca

SEQ ID NO: 99076 - DNA, 80 bp, synthetic construct
  source 1..80: mol_type = other DNA
caaaagcaccaaaacgcccagcagtgatcaacaacgccccacagttaagatcgggcccaaaacattagtagtcccacctg

SEQ ID NO: 99077 - DNA, 80 bp, synthetic construct
  source 1..80: mol_type = other DNA
ctctaacccagggttccctaactgcaagggttgcaggattagttcatgagaggagagatgaattccaactccaaggaaat

SEQ ID NO: 99078 - DNA, 80 bp, synthetic construct
  source 1..80: mol_type = other DNA
atgttgtgcagtttgatgcaaagtcagaaactgtgagtgggttaccagatctgacaacggtgcagaatgaacatgaaaac

SEQ ID NO: 99079 - DNA, 80 bp, synthetic construct
  source 1..80: mol_type = other DNA
tttgctgggaaaggtgggttaaaccaaccgagactcaagagacagttgagcccgagaaggagactgctcaaggcaggtgg

SEQ ID NO: 99080 - DNA, 80 bp, synthetic construct
  source 1..80: mol_type = other DNA
tggttggggtttttgggtctcatctaaccttctgattactactacacatgtcctgcccaagggactcaaagaactctttg

SEQ ID NO: 99081 - DNA, 80 bp, synthetic construct
  source 1..80: mol_type = other DNA
gcaagatggagaggcagttcttgaaggaaatgaaaacctcggcacttactgcggtgccccaattctaggccctggcaagg

SEQ ID NO: 99082 - DNA, 80 bp, synthetic construct
  source 1..80: mol_type = other DNA
actggaatggggagtctttcacaggtcctcttgcagatcaagcatccaaagccaatctcatgtatgagcaggccaagcat

SEQ ID NO: 99083 - DNA, 80 bp, synthetic construct
  source 1..80: mol_type = other DNA
aacgagctacacagctcatggccctccttggtgaagcctcattacatgggccccagttttacaagaaggttagcaaaatg

SEQ ID NO: 99084 - DNA, 80 bp, synthetic construct
  source 1..80: mol_type = other DNA
gaaatgttttctaccattacaaccagaacaacagccctaaacttaggcttgtagctatgctctatactcccctgagagct

SEQ ID NO: 99085 - DNA, 80 bp, synthetic construct
  source 1..80: mol_type = other DNA
gacggtgagctgctcggcactaccatcttgcagtctgtatctatttgtaatttcagagggactatgcaggcaaagttgaa

SEQ ID NO: 99086 - DNA, 80 bp, synthetic construct
  source 1..80: mol_type = other DNA
tgaacaaccacgataccaactacaacttaccaacttggatggctcacccatagatccaacagatgacatgcctgccccac

SEQ ID NO: 99087 - DNA, 80 bp, synthetic construct
  source 1..80: mol_type = other DNA
ttggcacaccagactttcaggctatgttgtatggcgttgcaagtcaacgatcttccagagacaacgccactagggcacat

SEQ ID NO: 99088 - DNA, 80 bp, synthetic construct
  source 1..80: mol_type = other DNA
ttcttcaggtcatacattccaagtgctggaggccacacagacggcgctatggactgcttgctaccccaagagtggataga

SEQ ID NO: 99089 - DNA, 80 bp, synthetic construct
  source 1..80: mol_type = other DNA
atggctctaggtattgggcccccaactccatgaagacaacaggttactcaggcacatttgcttcccaaggcatcaaaaat

SEQ ID NO: 99090 - DNA, 80 bp, synthetic construct
  source 1..80: mol_type = other DNA
cttccccacctgtctagtcaagctccaagtgctgctagacccaccaaagcttcaccgtctatatctagttcttctagtgt

SEQ ID NO: 99091 - DNA, 80 bp, synthetic construct
  source 1..80: mol_type = other DNA
tattgggcaagctcaaaccactgaatcttctgcatctgctcgcgtcatgtgattggacctttgcgggtatagtggagacg

SEQ ID NO: 99092 - DNA, 80 bp, synthetic construct
  source 1..80: mol_type = other DNA
gtcatcttaatggcggaactctttaacgtcttttggactccgccagatgtctccaatttcattgcctccctgataggtga

SEQ ID NO: 99093 - DNA, 80 bp, synthetic construct
  source 1..80: mol_type = other DNA
acctaggaattccccaggagagattcttctaaatttggaattaggtcctgatctaaatccttatttggcacacctatcca

SEQ ID NO: 99094 - DNA, 80 bp, synthetic construct
  source 1..80: mol_type = other DNA
gaatgtacaatggctatgctggtggagtggaagttcaggttctcctggcggggaacgcgttcactgctggaaagatcctc

SEQ ID NO: 99095 - DNA, 80 bp, synthetic construct
  source 1..80: mol_type = other DNA
ttcgctgctgtgccaccaaatttcccagttgaatttctgagtcctgctcaaattactatgctcccacacttgatagttga

SEQ ID NO: 99096 - DNA, 80 bp, synthetic construct
  source 1..80: mol_type = other DNA
cttgaaccaatcatgatacccctccccgatgtgagaaacaccttcttccactacaacaaccggccttctgagcgcatgcg

SEQ ID NO: 99097 - DNA, 80 bp, synthetic construct
  source 1..80: mol_type = other DNA
cttggtagccatgctgtacacacctctgaggtccaatggttcaggtgatgatgttttcacagtttcatgtagagtgctga

SEQ ID NO: 99098 - DNA, 80 bp, synthetic construct
  source 1..80: mol_type = other DNA
ctagacctaccccagattttgagtttacttatttagttccaccttcagtagaatctaaaacaaaacctttctctctccct

SEQ ID NO: 99099 - DNA, 80 bp, synthetic construct
  source 1..80: mol_type = other DNA
atactgactatttctgaattaactaactcaagattcccagcacctattgattcattgttcactgctcaaaacaatgtcct

SEQ ID NO: 99100 - DNA, 80 bp, synthetic construct
  source 1..80: mol_type = other DNA
caatgtccaatgtcagaatggccgatgcacactggatggtgaactacaggggaccactcaactgctcccaactggcatat

SEQ ID NO: 99101 - DNA, 80 bp, synthetic construct
  source 1..80: mol_type = other DNA
gctcctttagaggaaagataacagcaaatgtggagggcagccacgatgacaagtggcatatgagtttgacaaacctcaat

SEQ ID NO: 99102 - DNA, 80 bp, synthetic construct
  source 1..80: mol_type = other DNA
ggaaccccatttgacccaacggaggatgtcccagccccactaggtacccctgacttcacaggtctcctctttggagtcgc

SEQ ID NO: 99103 - DNA, 80 bp, synthetic construct
  source 1..80: mol_type = other DNA
aagccaaaggaacgtcggtgggacagccaacaacaccaccagggcacatgaggctgtgatatcaacaaccagcacacaat

SEQ ID NO: 99104 - DNA, 80 bp, synthetic construct
  source 1..80: mol_type = other DNA
ttgtgccaaaattaggttctgtcaactttgggagtgagagtccggatttccagattggccagccaaccagatttacacca

SEQ ID NO: 99105 - DNA, 80 bp, synthetic construct
  source 1..80: mol_type = other DNA
gttggaatcaaaattgaagatgggcatccttttgaacaatggaagttaccaaactatgctggagcactgaccctcaacat

SEQ ID NO: 99106 - DNA, 80 bp, synthetic construct
  source 1..80: mol_type = other DNA
gaaccttgccccacccattgctcccaatttcccaggtgagcagttgcttttcttcagatcaaatgttccttgtgctggtg

SEQ ID NO: 99107 - DNA, 80 bp, synthetic construct
  source 1..80: mol_type = other DNA
gtatcagtgacggtgtcattgactgtctgctacctcaggagtggatacagcatttctaccaagaatctgccccgtcccaa

SEQ ID NO: 99108 - DNA, 80 bp, synthetic construct
  source 1..80: mol_type = other DNA
tcagacgtggcgctgatcagatatgtcaaccctgacacgggccgcactctctttgaggcgaagcttcacaggactggcta

SEQ ID NO: 99109 - DNA, 80 bp, synthetic construct
  source 1..80: mol_type = other DNA
catcactgttgcccacactggtgattatccccttgttgtcccctccaatggctacttcagatttgattcttgggtaaatc

SEQ ID NO: 99110 - DNA, 80 bp, synthetic construct
  source 1..80: mol_type = other DNA
gtcttgcaggtgacatgctcaccaacgctgttggctctctggcgaacgccggagcaaatgccataactcaaaagatagat

SEQ ID NO: 99111 - DNA, 80 bp, synthetic construct
  source 1..80: mol_type = other DNA
aagtggatgcaaccaaacaactgcaatcagagatgatcgccatcaggcagggggttttgaccgcgggcggcttttcccct

SEQ ID NO: 99112 - DNA, 80 bp, synthetic construct
  source 1..80: mol_type = other DNA
aagtggatgcaaccaaacaactgcaatcagagatgatcgccatcaggcaggaggttttgaccgcgggcggcttttcccct

SEQ ID NO: 99113 - DNA, 80 bp, synthetic construct
  source 1..80: mol_type = other DNA
actgatgcagcgagaggggctgtgggagcacccatgactaaagttcttgattggtctggcacccgttactgggcaccaaa

SEQ ID NO: 99114 - DNA, 80 bp, synthetic construct
  source 1..80: mol_type = other DNA
tcggggcaattcacatcaacacctgtgcacacaccaaatttgagtagcaaacccaaacccacaaacgttaaaacccaacc

SEQ ID NO: 99115 - DNA, 80 bp, synthetic construct
  source 1..80: mol_type = other DNA
cctttcttcttcttctggtagtgtttatagtctttcaactcagtcaactacactgtccggaccttcttcaggttcatctg

SEQ ID NO: 99116 - DNA, 80 bp, synthetic construct
  source 1..80: mol_type = other DNA
ctcttcgcacacctcagagtgaggggggagtcacgtgtttagtgaaaagaaataattgatttttaattaggcttaaaatt

SEQ ID NO: 99117 - DNA, 80 bp, synthetic construct
  source 1..80: mol_type = other DNA
caaaagcaccaaggcacccagcggtgaccagcactgccccactgttaagattgggtctaaaacactagcgatcccaccag

SEQ ID NO: 99118 - DNA, 80 bp, synthetic construct
  source 1..80: mol_type = other DNA
gggatgcctacaggggagagagggtagtcctatgggacgactacggtatggggaaccctgtcaaagatgccttaacatta

SEQ ID NO: 99119 - DNA, 80 bp, synthetic construct
  source 1..80: mol_type = other DNA
agcccccaaacggtgaggacgttgtgcagtttgatgcaaaatcggaaactgtacgtgggctacccgacctgacgacagtg

SEQ ID NO: 99120 - DNA, 80 bp, synthetic construct
  source 1..80: mol_type = other DNA
agggggccgtctttggagtagccagccagagggatgtttcagggactcaagtggaggcaactcgtgctcatgaagtgcac

SEQ ID NO: 99121 - DNA, 80 bp, synthetic construct
  source 1..80: mol_type = other DNA
agggggccgtctttggagtagccagccagagggatgtttcagggactcaagtgggggcaactcgtgctcatgaagtgcac

SEQ ID NO: 99122 - DNA, 80 bp, synthetic construct
  source 1..80: mol_type = other DNA
aacctacaaacatacaactttgacaccaatagggtctctgcgtttaggaaactagccgcagataacaagtatggaatcat

SEQ ID NO: 99123 - DNA, 80 bp, synthetic construct
  source 1..80: mol_type = other DNA
gcaaaatgaacatgagaacaccccatacacagtccctccactgagtgaaagggaacatagaccagccgctgagccgctcc

SEQ ID NO: 99124 - DNA, 80 bp, synthetic construct
  source 1..80: mol_type = other DNA
gaacactccaagggactacccagctggtgcccacccaaatttgctcctttaggggcacgctaattagccagacgtcgagg

SEQ ID NO: 99125 - DNA, 80 bp, synthetic construct
  source 1..80: mol_type = other DNA
atatgatccaacagatgaggtaccagcagttctgggtgccatagatttcaaaggaactgtgtttggagttgctagccaga

SEQ ID NO: 99126 - DNA, 80 bp, synthetic construct
  source 1..80: mol_type = other DNA
gaaacaccacagggagctctgcaggagcgacccgtgctcatgaggtgcacatagataccacaaaccccagatacacccca

SEQ ID NO: 99127 - DNA, 80 bp, synthetic construct
  source 1..80: mol_type = other DNA
aaacttggttctgtgttgatgtattctgagtctactgattttgatgatggacaacccacccgtttcacccctattggcat

SEQ ID NO: 99128 - DNA, 80 bp, synthetic construct
  source 1..80: mol_type = other DNA
tcgcccctgctttccccggtgagcgcatcctcttctttaggtcggtggtgccatctgctggtggttatgggtcaggccag

SEQ ID NO: 99129 - DNA, 80 bp, synthetic construct
  source 1..80: mol_type = other DNA
atagactgcctcatcccacaggaatgggttcagcacttctatcaggaggccgccccatcacaatctgcggtggctcttat

SEQ ID NO: 99130 - DNA, 80 bp, synthetic construct
  source 1..80: mol_type = other DNA
tagtaaccctgtacataggcaacctactttgtcccgttctgaccccccaaaagttaaggttaatagtgattctgctagtg

SEQ ID NO: 99131 - DNA, 80 bp, synthetic construct
  source 1..80: mol_type = other DNA
tgtatagttctgcatctattgccccttcacaatcaacccattcaacggttctgactgcagggtctgggtcatccaggaca

SEQ ID NO: 99132 - DNA, 80 bp, synthetic construct
  source 1..80: mol_type = other DNA
acctcttcgtccacagcagcttccaccctatctaggactagcgactgggtaaggggacaaaatgagaggcttagcccgtt

SEQ ID NO: 99133 - DNA, 80 bp, synthetic construct
  source 1..80: mol_type = other DNA
tctggcacacctcctcaggtttataatttcaagcgtttggtttttaccaattgcaattataatcttaccaaattgctttc

SEQ ID NO: 99134 - DNA, 80 bp, synthetic construct
  source 1..80: mol_type = other DNA
ttcaatatggtacagacaccaatagtgtttgccccaagcttgaatttgctaatgacacaaaaattgcctctcaattaggc

SEQ ID NO: 99135 - DNA, 80 bp, synthetic construct
  source 1..80: mol_type = other DNA
ttgtctccatacggtcttccaatcagggtaataaacaaattgttcattcttatcccattttacatcatccaggattttaa

SEQ ID NO: 99136 - DNA, 80 bp, synthetic construct
  source 1..80: mol_type = other DNA
ccaactaagaaactgcgctacgttaagcgtagattttctcttctgcgccctgaagaccttagtgatgtcagggttacatt

SEQ ID NO: 99137 - DNA, 80 bp, synthetic construct
  source 1..80: mol_type = other DNA
ccagggtaaacgtccctcctcccacctggtcctttaaaaattggaaaaagttgggacctaaaaaaaattttgcagcctcc

SEQ ID NO: 99138 - DNA, 80 bp, synthetic construct
  source 1..80: mol_type = other DNA
ggtcctttaaaaattggaaaaagttgggacctaaaaaaaattttgcagcctcccaagaggggggttcaaaggtcttagaa

SEQ ID NO: 99139 - DNA, 80 bp, synthetic construct
  source 1..80: mol_type = other DNA
aaaaaatatctgaataccgcttcattccaaatggacccacactttagtggtgataatagtgttgtcctgaggaagtatga

SEQ ID NO: 99140 - DNA, 80 bp, synthetic construct
  source 1..80: mol_type = other DNA
gaataagtgtatatcggggagacagctttgtactataaaggtatgtccattgagtgcgcagactttaggaataggttgta

SEQ ID NO: 99141 - DNA, 80 bp, synthetic construct
  source 1..80: mol_type = other DNA
tgtattaccacaaatacagcgacatttgaggaggtgcctacaagtaaaaaattagtatcaacggattttgttaatggtgt

SEQ ID NO: 99142 - DNA, 80 bp, synthetic construct
  source 1..80: mol_type = other DNA
ggtattaaccccattccagccgcacttgaaaagggggctacaattgaaaaatttataataaccattttttttaagggtgg

SEQ ID NO: 99143 - DNA, 80 bp, synthetic construct
  source 1..80: mol_type = other DNA
cgtcataacatttgatgaggtagcaaatgcgcaaaaactaattataactgacgtcgtggatggagtcaatcacagaatta

SEQ ID NO: 99144 - DNA, 80 bp, synthetic construct
  source 1..80: mol_type = other DNA
atcaacggacagatgaagcgaataaatggatatcatggggagaatcatgtacagttaaagtatgtcccttaaatacccaa

SEQ ID NO: 99145 - DNA, 80 bp, synthetic construct
  source 1..80: mol_type = other DNA
agcaaaagcaggggttcaatctgtcaaaatggagaaaatagtgcttcttcttgtagtgattagccttgttaaaagtgatc

SEQ ID NO: 99146 - DNA, 80 bp, synthetic construct
  source 1..80: mol_type = other DNA
gagagatatccgcagttctaccaagactgagactgctgagactgctacagaagactgctgacacagaagaatctagaggg

SEQ ID NO: 99147 - DNA, 80 bp, synthetic construct
  source 1..80: mol_type = other DNA
tccgcagttctaccaagactgagactgctgagactgctacagaagactgctgacacagaagaatctagagggactttccg

SEQ ID NO: 99148 - DNA, 80 bp, synthetic construct
  source 1..80: mol_type = other DNA
gctgagactgctacagaagactgctgacacagaagaatctagagggactttccgctggggactttccaggggggcgggcc

SEQ ID NO: 99149 - DNA, 80 bp, synthetic construct
  source 1..80: mol_type = other DNA
atggaagcgaaactattcgtattattctgcatgttcactgcattaaaagccgacaccatctgtataggctaccatgcaaa

SEQ ID NO: 99150 - DNA, 80 bp, synthetic construct
  source 1..80: mol_type = other DNA
gcatggagttccacaatttggagttgagaattgagaatacgaataaaaaggttgttgatgggttcctagacatttggcat

SEQ ID NO: 99151 - DNA, 80 bp, synthetic construct
  source 1..80: mol_type = other DNA
aacggaagctagaacagaaataaatgacaatgagtggacgagtacgttatcacagttgttcttaacaaagggatggccga

SEQ ID NO: 99152 - DNA, 80 bp, synthetic construct
  source 1..80: mol_type = other DNA
cctctaatatggggtcaccttcgggtgccccctcctccgctagtgacatttgggtgttctcgccgccttctgaggtgccg

SEQ ID NO: 99153 - DNA, 80 bp, synthetic construct
  source 1..80: mol_type = other DNA
cccacctagccttactatatctaggctccccatctgtgaatcgcttacatcaccaccggctctaaccccggttaataacc

SEQ ID NO: 99154 - DNA, 80 bp, synthetic construct
  source 1..80: mol_type = other DNA
caccggccattgtctcggagttgccccacctcaccccgcctgccagtgatatttgggtattaccaccaccctctgaggag

SEQ ID NO: 99155 - DNA, 80 bp, synthetic construct
  source 1..80: mol_type = other DNA
tcccgggttgatgcggccattgtaccgtccaccccagagcccgttaggttgcctgaccgtactgaacccgtcccccccgt

SEQ ID NO: 99156 - DNA, 80 bp, synthetic construct
  source 1..80: mol_type = other DNA
gcgtaagccaccaacaccgcagtctccccgaacccgccgcctcctttacacataccctgacggcgctaaggtgtatgcgg

SEQ ID NO: 99157 - DNA, 80 bp, synthetic construct
  source 1..80: mol_type = other DNA
tcaaatcctaattgaaaatgctgctggccaccgtgttgctatttctacttacactactagcttgggtgccgcgcccacct

SEQ ID NO: 99158 - DNA, 80 bp, synthetic construct
  source 1..80: mol_type = other DNA
caatttcagcagtcggtgtattggccccgcatacggctcttgctgttcttgaggatactattgactaccccgctcgcgcc

SEQ ID NO: 99159 - DNA, 80 bp, synthetic construct
  source 1..80: mol_type = other DNA
gtgcccccttcatagtactcttttgatatatttctttgttcggttcctcgcccccggaaaaaaacaggagacaaaaatgc

SEQ ID NO: 99160 - DNA, 80 bp, synthetic construct
  source 1..80: mol_type = other DNA
ttgggtgttgccgccaccctctgaagagtcccaggttgatgcggcgcctactcctcctgttcctgggcttgttcaaccac

SEQ ID NO: 99161 - DNA, 80 bp, synthetic construct
  source 1..80: mol_type = other DNA
ccggccctgctaaaccgaaggcccccgagcgtaagtcaccaataccgccacctccgcgtacccgccgcctcctctacact

SEQ ID NO: 99162 - DNA, 80 bp, synthetic construct
  source 1..80: mol_type = other DNA
ctgtgcccccttcctaaatcctaaattttttcaaaatttccggaagtccccgccccccgaaaaaaagaaaaaaacattct

SEQ ID NO: 99163 - DNA, 80 bp, synthetic construct
  source 1..80: mol_type = other DNA
cacaggccgccattcaggggccctcccgtcctccaccccctgccagtgacatttgggtgttgccgccgccctctgaggag

SEQ ID NO: 99164 - DNA, 80 bp, synthetic construct
  source 1..80: mol_type = other DNA
tctcaagtcgacgctggacctgctcccctcacctccgagcctgctccactacctaggcttgttgagcctagggcccctgt

SEQ ID NO: 99165 - DNA, 80 bp, synthetic construct
  source 1..80: mol_type = other DNA
tttttgtgcccccttcataactccccattaaaataattttacttttctggtttccgcgccccccgagaaaaaagaaaaaa

SEQ ID NO: 99166 - DNA, 80 bp, synthetic construct
  source 1..80: mol_type = other DNA
cctttcgagtcttgctacacctgggcctcctgcccgtgagccgcctacaccgccgccggctctaaccccggtcagtaact

SEQ ID NO: 99167 - DNA, 80 bp, synthetic construct
  source 1..80: mol_type = other DNA
agcctgcttagtcccactacactcaggcccctcgtctgcaagccacctacaccatcaccgtccctagccccggttagtaa

SEQ ID NO: 99168 - DNA, 80 bp, synthetic construct
  source 1..80: mol_type = other DNA
gtggccacccctcctcccttaaccctggtcagtaagccaactaactcgtttagtcttgctacacctcggcccctcgcctg

SEQ ID NO: 99169 - DNA, 80 bp, synthetic construct
  source 1..80: mol_type = other DNA
tgagccacctacatcgccaccggccctaaccccggccagtaggccagctaacctgcctagcccagttacacccaggctct

SEQ ID NO: 99170 - DNA, 80 bp, synthetic construct
  source 1..80: mol_type = other DNA
ccgcccgcgagctgcccacgctgccaccagcccgcactcgccggctcctctatacatatcctgatggggccaaggtgtat

SEQ ID NO: 99171 - DNA, 80 bp, synthetic construct
  source 1..80: mol_type = other DNA
tagggccgccccaccttataccccctgctagtgacatccgggtgctgccgccgctctccgaagagcatcagattgatgca

SEQ ID NO: 99172 - DNA, 80 bp, synthetic construct
  source 1..80: mol_type = other DNA
gtgcctgttccccctgcccctgggcctgctcagccacctagccccgttaagcctagaggtcccgtgcgtaagccgccgac

SEQ ID NO: 99173 - DNA, 80 bp, synthetic construct
  source 1..80: mol_type = other DNA
cagtctctgcggttggtgtgttagccccacattcggcccttgctattcttgaagatactgttgactatccagcccgtgct

SEQ ID NO: 99174 - DNA, 80 bp, synthetic construct
  source 1..80: mol_type = other DNA
ggtgcccccttctaaattttctttgttatttcttttttctgcggttcccgccccgagaaaaccgtaataaaaaaaaaaaa

SEQ ID NO: 99175 - DNA, 80 bp, synthetic construct
  source 1..80: mol_type = other DNA
ctcgcccaatttttccatacctaggcctcccgcctgtgagccacctacgccattaccggccccaactccggtcagtaagc

SEQ ID NO: 99176 - DNA, 80 bp, synthetic construct
  source 1..80: mol_type = other DNA
tgtacccccttccaaatctgctctgatatataatatcatctgcgttcgtcgccccgacaaaaatgaaaaaagaaaaaaat

SEQ ID NO: 99177 - DNA, 80 bp, synthetic construct
  source 1..80: mol_type = other DNA
gtctacatcattatcggccctaactccagtcggtaagccagctaacctgtctagcctcactgcacctaagccccccgttc

SEQ ID NO: 99178 - DNA, 80 bp, synthetic construct
  source 1..80: mol_type = other DNA
gattacatccccggccgtcagctccaattctatgcacagtgccgccgctggttatcggccggtttccacctcgacccaag

SEQ ID NO: 99179 - DNA, 80 bp, synthetic construct
  source 1..80: mol_type = other DNA
ggtgcttgtttttgatgagtctgctccctgccgttgtaggacgtttctcaagaaggttgcaggtaagttctgttgtttta

SEQ ID NO: 99180 - DNA, 80 bp, synthetic construct
  source 1..80: mol_type = other DNA
tgaagtggctggggcaggagtgcacctgcttcctgggaccagctgagggtctggttggtgaccatggccacgataatgaa

SEQ ID NO: 99181 - DNA, 80 bp, synthetic construct
  source 1..80: mol_type = other DNA
actcgaggccctgtacagggcgcttaacatcccgcacgatattgccgctcgagcctcccgtttaactgccactgttgaac

SEQ ID NO: 99182 - DNA, 80 bp, synthetic construct
  source 1..80: mol_type = other DNA
ttactgcaggcccagaccgtttggagtgtcgcactgtgctcgggaataagaccttccggacaacggtggtcgatggtgct

SEQ ID NO: 99183 - DNA, 80 bp, synthetic construct
  source 1..80: mol_type = other DNA
catcttgaagcgaatggccccgagcagtatgtcctttcgttcgacgcctcctgccagtctatgggggccgggccgcataa

SEQ ID NO: 99184 - DNA, 80 bp, synthetic construct
  source 1..80: mol_type = other DNA
cgggtggagcccctagtgcagctccgggggaggtagcagctttttgcagtgccctctacaggtacaacaggtttacccag

SEQ ID NO: 99185 - DNA, 80 bp, synthetic construct
  source 1..80: mol_type = other DNA
tttctccccctgaggcggctgccgctgtgccggccgctgccacagggttgccccatcctacaacccccgttagtgacatt

SEQ ID NO: 99186 - DNA, 80 bp, synthetic construct
  source 1..80: mol_type = other DNA
tgggtgctgccgccaccttctgaggggtctcaggttgatgcagcgcctgcttctctagtccctgagcccgttcaaccgct

SEQ ID NO: 99187 - DNA, 80 bp, synthetic construct
  source 1..80: mol_type = other DNA
cggccttgttaggccgaaggcccccgtgtgtaagccaccaacaccaccacctccgcgtacccgccgcctcctctacactt

SEQ ID NO: 99188 - DNA, 80 bp, synthetic construct
  source 1..80: mol_type = other DNA
tgatggtcttgccgcatatactctgactcctcggcctattatccatgcggtggctcccgattatagggttgagcagaacc

SEQ ID NO: 99189 - DNA, 80 bp, synthetic construct
  source 1..80: mol_type = other DNA
gtcgctgtttggaggttggggcccacccaagatcgatcaacgacaacccgaatgttttgcatcgctgcttcctacgacca

SEQ ID NO: 99190 - DNA, 80 bp, synthetic construct
  source 1..80: mol_type = other DNA
cgaagaggcttgaggcagcataccgagagacctgctcccgccgtggcaccgccgcctacccactcctcggctcaggtata

SEQ ID NO: 99191 - DNA, 80 bp, synthetic construct
  source 1..80: mol_type = other DNA
taccgagttcccgttagtctcagctttgatgcttgggagcgtaaccaccgtcccggggatgagctttacttgaccgacct

SEQ ID NO: 99192 - DNA, 80 bp, synthetic construct
  source 1..80: mol_type = other DNA
cgccgctacctggttcgaggccaacaagccagcacaaccggccctcacaataactgaagatacagcccgtacagccaacc

SEQ ID NO: 99193 - DNA, 80 bp, synthetic construct
  source 1..80: mol_type = other DNA
tagcactagagatcgacgctgctacggaggttggccgggcttgtgccggttgtacagttagccctggggttgtgcactac

SEQ ID NO: 99194 - DNA, 80 bp, synthetic construct
  source 1..80: mol_type = other DNA
caatttaccgccggggttccaggttcggggaagtcgcggtctatacagcaaggggacgttgatgtggtggttgtccccac

SEQ ID NO: 99195 - DNA, 80 bp, synthetic construct
  source 1..80: mol_type = other DNA
tcgggagcttcggaatagttggcgtcgtcggggttttgcagctttcacgcctcacacggcggcccgcgttaccacgggcc

SEQ ID NO: 99196 - DNA, 80 bp, synthetic construct
  source 1..80: mol_type = other DNA
gtcgtgtcgtgattgatgaggccccatcccttccgccgcacctactgcttttacatatgcagcgggcctcgtcggtccac

SEQ ID NO: 99197 - DNA, 80 bp, synthetic construct
  source 1..80: mol_type = other DNA
gatccccgctatagactttgagcatgctggtctggtccccgcaatacgccccgagcttgcacccaccagctggtggcatg

SEQ ID NO: 99198 - DNA, 80 bp, synthetic construct
  source 1..80: mol_type = other DNA
gattacagttcatgaggcccagggtgccactttcacggagactacagttatagccacggccgatgccagggggctcattc

SEQ ID NO: 99199 - DNA, 80 bp, synthetic construct
  source 1..80: mol_type = other DNA
aatcttcccgagctcatgccatagtcgcacttacccgccacacggagaagtgcgttatccttgatgcccccggtttgtta

SEQ ID NO: 99200 - DNA, 80 bp, synthetic construct
  source 1..80: mol_type = other DNA
cgtgaagttggtatatctgatataattgtcaacaatttcttccttgccggtggggaagtgggccaccaccgcccctctgt

SEQ ID NO: 99201 - DNA, 80 bp, synthetic construct
  source 1..80: mol_type = other DNA
gataccccgcggcaatcctgaccagaacctcgcgacattacaggcttttccaccttcctgtcagatcagtgcttatcatc

SEQ ID NO: 99202 - DNA, 80 bp, synthetic construct
  source 1..80: mol_type = other DNA
agttagctgaggagctgggccaccgcccggcccccgtcgctgccgtcctgcccccctgccccgaactcgagcagggtctg

SEQ ID NO: 99203 - DNA, 80 bp, synthetic construct
  source 1..80: mol_type = other DNA
ctgtatatgccacaagagctcactgtgtctgatagcgtgttggtctttgaactcacggacatagttcattgccggatggc

SEQ ID NO: 99204 - DNA, 80 bp, synthetic construct
  source 1..80: mol_type = other DNA
tgctcctagccagcggaaggctgtcctatcgacgcttgtaggtaggtatggccgccggacgaagctgtatgaggcggctc

SEQ ID NO: 99205 - DNA, 80 bp, synthetic construct
  source 1..80: mol_type = other DNA
actccgatgtccgtgagtccctgacaagattcatccccaccatcgggcccgttcaggcaaccacgtgtgagttatacgaa

SEQ ID NO: 99206 - DNA, 80 bp, synthetic construct
  source 1..80: mol_type = other DNA
ctggttgaggccatggtggataagggtcaggacggctctgccgtacttgagcttgatctctgcaatcgtgatgtgtcgcg

SEQ ID NO: 99207 - DNA, 80 bp, synthetic construct
  source 1..80: mol_type = other DNA
tattacatttttccagaaggattgtaacaagttcaccacaggggagaccattgcccacggtaaggtcggccagggcatct

SEQ ID NO: 99208 - DNA, 80 bp, synthetic construct
  source 1..80: mol_type = other DNA
cctcccacccgctgaccgcacctactgttttgatggattttctcgctgcccgtttgctgcggagactggtgttgccctct

SEQ ID NO: 99209 - DNA, 80 bp, synthetic construct
  source 1..80: mol_type = other DNA
cggcttggagcaagaccttctgtgccctctttggcccgtggttccgtgctattgaaaaagaaatactggccctgctcccg

SEQ ID NO: 99210 - DNA, 80 bp, synthetic construct
  source 1..80: mol_type = other DNA
cgcccaacatcttctacggcgatgcatatgaagagtctgtgtttgctgccgccgtgtctggggcaggctcatgcatggta

SEQ ID NO: 99211 - DNA, 80 bp, synthetic construct
  source 1..80: mol_type = other DNA
tttgagaatgatttttcagagtttgatagcactcaaaataatttctccctcggccttgagtgtgtagtcatggaggaatg

SEQ ID NO: 99212 - DNA, 80 bp, synthetic construct
  source 1..80: mol_type = other DNA
ggggccctgggccggagcgggccgagcagctgcgtcttgctgtttgtgattttcttcgcgggctgacgaatgttgcgcag

SEQ ID NO: 99213 - DNA, 80 bp, synthetic construct
  source 1..80: mol_type = other DNA
cccacgtcgtcgacctgccccaactggggctgcgccgctgactgctatatcacctgctcctgatgcggcccccgtgcctg

SEQ ID NO: 99214 - DNA, 80 bp, synthetic construct
  source 1..80: mol_type = other DNA
atgttgattcccgtggcgctatattgcggcgccagtataatttatctacatccccactcacatcatccgttgcctcgggc

SEQ ID NO: 99215 - DNA, 80 bp, synthetic construct
  source 1..80: mol_type = other DNA
tgaggcgtccaactatgcccagtaccgggttgtccgagctacgatccgttacaggccgctggtgccgaatgctgtcggtg

SEQ ID NO: 99216 - DNA, 80 bp, synthetic construct
  source 1..80: mol_type = other DNA
ctgttgacatgaattctattacttccactgatgttaggatcctagttcagcccggtattgcttccgagttagttattcct

SEQ ID NO: 99217 - DNA, 80 bp, synthetic construct
  source 1..80: mol_type = other DNA
catctcccccccgaagtgttactaccgcctggtacttaccacacaacttcataccttcttattcacgacggcgatcgtgc

SEQ ID NO: 99218 - DNA, 80 bp, synthetic construct
  source 1..80: mol_type = other DNA
cgggtgtggccgaggaggaggccacttctggtttggttatgctatgcattcatggttcccctgttaactcctacaccaat

SEQ ID NO: 99219 - DNA, 80 bp, synthetic construct
  source 1..80: mol_type = other DNA
ccggctgttaagttatatacatctgtggagaacgcgcagcaggataaagggattgctattccacatgacatagacttagg

SEQ ID NO: 99220 - DNA, 80 bp, synthetic construct
  source 1..80: mol_type = other DNA
tgactctcgtgtggttattcaagattatgacaatcagcacgagcaggatcggcccaccccctcgcccgccccatctcgcc

SEQ ID NO: 99221 - DNA, 80 bp, synthetic construct
  source 1..80: mol_type = other DNA
tgactggtctaaagttactctagatggccgcccccttactaccattcagcagtactccaaaactttttatgttctcccgc

SEQ ID NO: 99222 - DNA, 80 bp, synthetic construct
  source 1..80: mol_type = other DNA
ttcgcgggaagctatctttttgggaggctgggacaactaaagccggttatccttataattataacacgactgctagtgac

SEQ ID NO: 99223 - DNA, 80 bp, synthetic construct
  source 1..80: mol_type = other DNA
cagattttaattgaaaatgcagctggtcaccgggttgccatctctacttatactaccaaccttggcgctggtcctgtatc

SEQ ID NO: 99224 - DNA, 80 bp, synthetic construct
  source 1..80: mol_type = other DNA
agtttctgcagtcggtgtgctagccccacattcggctcttgcagtccttgaggatactactgactaccctgctcgcgccc

SEQ ID NO: 99225 - DNA, 80 bp, synthetic construct
  source 1..80: mol_type = other DNA
gcggttcgcgcccccccggaaaaataaaatatgggggtgtgtgggcgagtagagttatttatacgtctgcggtgttctta

SEQ ID NO: 99226 - DNA, 80 bp, synthetic construct
  source 1..80: mol_type = other DNA
atacgtctgcggtgttcttactctgcgagcgatataccctactactagtcgtcccaccatactgaagtacacgcgactct

SEQ ID NO: 99227 - DNA, 80 bp, synthetic construct
  source 1..80: mol_type = other DNA
agatagttggcgaccatccgctggtgatagagcgtgtgcgggctattggctgccactttgtgttgctgctcactgcggcc

SEQ ID NO: 99228 - DNA, 80 bp, synthetic construct
  source 1..80: mol_type = other DNA
atccccgtccctgtttccatcagcttgctctacaaaatccacatttcatgccgtcccagttcatatctgggaccggctta

SEQ ID NO: 99229 - DNA, 80 bp, synthetic construct
  source 1..80: mol_type = other DNA
tgctctttggtgccaccctggacgatcaggcgttttgctgctcacggcttatgacttaccttcgtgggattagttacaag

SEQ ID NO: 99230 - DNA, 80 bp, synthetic construct
  source 1..80: mol_type = other DNA
gcgacattacaggcttttccaccttcctgtcagatcagtgcttatcatcagttagctgaggagctgggccaccgcccggc

SEQ ID NO: 99231 - DNA, 80 bp, synthetic construct
  source 1..80: mol_type = other DNA
ccggctgcctctccgaggttacccccccccacaccccctgttagtgatatttgggtgttgccgccgccttctgaagaact

SEQ ID NO: 99232 - DNA, 80 bp, synthetic construct
  source 1..80: mol_type = other DNA
ccaggttgacgcagcgcctgccgtcccggctccagagtctgttcaatcgcccggtcctgtcgagccgaagacccccacgc

SEQ ID NO: 99233 - DNA, 80 bp, synthetic construct
  source 1..80: mol_type = other DNA
gtaagccaccaacaccaccagccccgcgtactcgccgcctcctttatacttacccggacggggcaaaggtgtacgcggtg

SEQ ID NO: 99234 - DNA, 80 bp, synthetic construct
  source 1..80: mol_type = other DNA
cggtcaccgtgttgctatttccacctacaccaccagccgacgaaatgaaattctgtccatttctgcagtcggtgtgttag

SEQ ID NO: 99235 - DNA, 80 bp, synthetic construct
  source 1..80: mol_type = other DNA
gccgccgttggctctcggccggttttcacctggaccccagggttctcgtatttgacgaggcggtcccttgccgctgccgg

SEQ ID NO: 99236 - DNA, 80 bp, synthetic construct
  source 1..80: mol_type = other DNA
agcttcctgaagaaggttgctgggaaattttgctgctttatgaaatggctgggccaggagtgcacctgttttttggagcc

SEQ ID NO: 99237 - DNA, 80 bp, synthetic construct
  source 1..80: mol_type = other DNA
gttctgaggtggaccccgccgagcctgctcacctcgacgtttccgggacctatgcggtccacggccgtcagctcgaggcc

SEQ ID NO: 99238 - DNA, 80 bp, synthetic construct
  source 1..80: mol_type = other DNA
ctatatagagcgcttaacatcccagatgacattgcggctcgcgcgtcacgtctgacggccactgtagaactagccgccag

SEQ ID NO: 99239 - DNA, 80 bp, synthetic construct
  source 1..80: mol_type = other DNA
cccaggccgactcgagtgtcgtacggtgcttgggaataagacttttcgtacatcaataactgatggcgcccaccttgaag

SEQ ID NO: 99240 - DNA, 80 bp, synthetic construct
  source 1..80: mol_type = other DNA
ccaacggtcccgagcagtacgttttgacatttgatgactctcgccaggctatgggggctgggccccacagcctcacgtat

SEQ ID NO: 99241 - DNA, 80 bp, synthetic construct
  source 1..80: mol_type = other DNA
gaacttgtccctgccggtttgcaggtcagaatatcttctaatggcttggattgtaccgccatattccctcctggtggggc

SEQ ID NO: 99242 - DNA, 80 bp, synthetic construct
  source 1..80: mol_type = other DNA
accgagtgctgcaccaggtgaagtggcggccttctgtagcgccctatacaggtacaatagattcacccagcgccattcgc

SEQ ID NO: 99243 - DNA, 80 bp, synthetic construct
  source 1..80: mol_type = other DNA
tgaccggtgggctgtggctgcaccctgaggggctccttggcctgttcccccctttctctccgtggcacctttgggagtct

SEQ ID NO: 99244 - DNA, 80 bp, synthetic construct
  source 1..80: mol_type = other DNA
gcaaaccccttttgcggtgagagcacactttatacgcggacctggtctacatctggtttctctagcgacttctccccacc

SEQ ID NO: 99245 - DNA, 80 bp, synthetic construct
  source 1..80: mol_type = other DNA
tgaggcagcttacgccgccccagcacccgacatagggccaccctcgggtgccacctcatctgctagtgatatctgggtgt

SEQ ID NO: 99246 - DNA, 80 bp, synthetic construct
  source 1..80: mol_type = other DNA
ttccgccgccctctgagaggtcggcggtcgcaccgccacccgtagccccggttagtaagccagttaactcgccaagtttt

SEQ ID NO: 99247 - DNA, 80 bp, synthetic construct
  source 1..80: mol_type = other DNA
actaaggcccacagcgacaaggccaaggagagcattcgagccaagtgcgtgcagtacctagaccgggccgagaagctgaa

SEQ ID NO: 99248 - DNA, 80 bp, synthetic construct
  source 1..80: mol_type = other DNA
ggattatttacgaagcaaagagaaacacggcaagaagccagtcaaagagaaccagagtgagggcaagggcagtgcaccca

SEQ ID NO: 99249 - DNA, 80 bp, synthetic construct
  source 1..80: mol_type = other DNA
agccccttgctcgtgagccgcccacaccaccaccggctctaactccggtcagtgatccggcgaactcgtctagccttact

SEQ ID NO: 99250 - DNA, 80 bp, synthetic construct
  source 1..80: mol_type = other DNA
acatataagccccccgtccgtaagccgcccacaccaccaccggcccgcactcgccggctcctttacacataccctgatgg

SEQ ID NO: 99251 - DNA, 80 bp, synthetic construct
  source 1..80: mol_type = other DNA
gccgctgtttagaggtcggcgctcatcctagatccatcaatgacaatcccaatgtcctgcaccggtgtttccttcgccct

SEQ ID NO: 99252 - DNA, 80 bp, synthetic construct
  source 1..80: mol_type = other DNA
ggccaaggtgtatgtaggttctttgttcgagtcagattgtgactggctggttaacgcatctaaccctggccaccgtcctg

SEQ ID NO: 99253 - DNA, 80 bp, synthetic construct
  source 1..80: mol_type = other DNA
gcggaggtctctgtcatgcattttaccagcgtttcccggaatcgttccatccgactgattttgttatgcgtgagggtctt

SEQ ID NO: 99254 - DNA, 80 bp, synthetic construct
  source 1..80: mol_type = other DNA
gccgcatatactctgagcccgcgcccgatcatccatgctgtggcccccgattacagggttgagcagaaccccaagaggct

SEQ ID NO: 99255 - DNA, 80 bp, synthetic construct
  source 1..80: mol_type = other DNA
tgaggcggcatatcgtgagacctgctcccgtctcggcacagctgcttatcctctattggggtcagggatttaccaggtcc

SEQ ID NO: 99256 - DNA, 80 bp, synthetic construct
  source 1..80: mol_type = other DNA
ctgtgagtttaagtttcgacgcttgggagcgcaatcaccgcccaggcgatgaactctatctcactgagccagctgccgcc

SEQ ID NO: 99257 - DNA, 80 bp, synthetic construct
  source 1..80: mol_type = other DNA
tggtttgaggccaataagccaacccagccagctttaacgattactgaggacaccgcccgtacagctaaccttgcgcttga

SEQ ID NO: 99258 - DNA, 80 bp, synthetic construct
  source 1..80: mol_type = other DNA
gtcgggagagacgtccagcgctggtattctgcccctacccgcggcccagcggctaactgccgccgctcagcgctacgtgg

SEQ ID NO: 99259 - DNA, 80 bp, synthetic construct
  source 1..80: mol_type = other DNA
accccaaccagattcctgccattgactttgagcacgctggtttggtcccagcgatccgccccgaactagcccctactagt

SEQ ID NO: 99260 - DNA, 80 bp, synthetic construct
  source 1..80: mol_type = other DNA
ccgcgtgttgagatctctattttggaacgagcctgcggtgggtcagaagctggttttcacgcaggctgccaaggctgcca

SEQ ID NO: 99261 - DNA, 80 bp, synthetic construct
  source 1..80: mol_type = other DNA
agggtgccacgttcactgagactactatcatagccacggccgacgctagaggtcttattcaatcttcccgcgcacatgcc

SEQ ID NO: 99262 - DNA, 80 bp, synthetic construct
  source 1..80: mol_type = other DNA
atcgttgcgcttactcgccacacagagaaatgcgtcattctcgacgctcccggcctgctgcgtgaggtcggtatttctga

SEQ ID NO: 99263 - DNA, 80 bp, synthetic construct
  source 1..80: mol_type = other DNA
tataattgtcaataactttttcttggctggtggtgaagtgggccaccaccgcccttccgccataccgcgtggcaatccag

SEQ ID NO: 99264 - DNA, 80 bp, synthetic construct
  source 1..80: mol_type = other DNA
accaaaatttagacaccttacgggcgtttcccccgtcctgccaaatcagtgcctaccaccaattggctgaggagctgggc

SEQ ID NO: 99265 - DNA, 80 bp, synthetic construct
  source 1..80: mol_type = other DNA
cggttctttctacgctcgtcggcaggtatggccgccgaacgaagctgtacgaagcggcccattctgatgttcgcgagtct

SEQ ID NO: 99266 - DNA, 80 bp, synthetic construct
  source 1..80: mol_type = other DNA
ctggggaggtttatccctactatcgggccggtgcaggccaccacatgtgagttatatgagctggttgaggccatggtgga

SEQ ID NO: 99267 - DNA, 80 bp, synthetic construct
  source 1..80: mol_type = other DNA
gaaaggccaggatggctccgccgtgcttgagctcgacctctgcagccgagatgtctcgcgtattacattcttccagaagg

SEQ ID NO: 99268 - DNA, 80 bp, synthetic construct
  source 1..80: mol_type = other DNA
gcaatgcggctaccctgatagccggctgtgggttgaaactgaaggttgattaccggcctataggtctgtatgccggtgtt

SEQ ID NO: 99269 - DNA, 80 bp, synthetic construct
  source 1..80: mol_type = other DNA
actcactgcatgacctttggccctcggacgttgcggaggccatggctcgccacgggatgacgcgcctgtacgccgccctc

SEQ ID NO: 99270 - DNA, 80 bp, synthetic construct
  source 1..80: mol_type = other DNA
atgtagactctcgtggtgccatcctgcgccgccagtataatttgtccacctccccactaacttcatctgttgcttctggg

SEQ ID NO: 99271 - DNA, 80 bp, synthetic construct
  source 1..80: mol_type = other DNA
ctgttgatatgaattctattacttctactgatgttaggattctggtccagcctggcatagcctctgagctggtcatcccc

SEQ ID NO: 99272 - DNA, 80 bp, synthetic construct
  source 1..80: mol_type = other DNA
acaccctatactggggcattagggctccttgactttgcgcttgagcttgagttcaggaatttgacccccgggaacactaa

SEQ ID NO: 99273 - DNA, 80 bp, synthetic construct
  source 1..80: mol_type = other DNA
ccttttcagtcctccgagccaacgatgtcttgtggctctctctaactgcagctgaatatgaccagaccacctatggctcg

SEQ ID NO: 99274 - DNA, 80 bp, synthetic construct
  source 1..80: mol_type = other DNA
tctaccaatcctatgtatgtctcagatactgtcacatttgttaatgtggcgacgggtgcccaggccgttgcccgatccct

SEQ ID NO: 99275 - DNA, 80 bp, synthetic construct
  source 1..80: mol_type = other DNA
gtcggcgtccttgccccacactctgctttagctgtgcttgaagatactattgattatcccgctcgtgctcatacttttga

SEQ ID NO: 99276 - DNA, 80 bp, synthetic construct
  source 1..80: mol_type = other DNA
tgatttttgccctgagtgccgcaatcttggtctacagggctgtgctttccagtctactgttgctgagcttcagcgtctta

SEQ ID NO: 99277 - DNA, 80 bp, synthetic construct
  source 1..80: mol_type = other DNA
gtctactgttgctgagcttcagcgtcttaaaatgaaggtaggtaagacccgggagtcttaattatttccccctttgtgcc

SEQ ID NO: 99278 - DNA, 80 bp, synthetic construct
  source 1..80: mol_type = other DNA
tactacatccaggccccctgcctgtgaaccgcccacaccaccaccggccctaactccggtcagtgatccagctaacccgc

SEQ ID NO: 99279 - DNA, 80 bp, synthetic construct
  source 1..80: mol_type = other DNA
gtgccagccgctgctccgggagtgctccgccccacaccccctgttagtgatatttgggtgttaccacctgcctctgaaga

SEQ ID NO: 99280 - DNA, 80 bp, synthetic construct
  source 1..80: mol_type = other DNA
ctgggctgatgcggcgcctgatcccgctgtctctgagcatgctcaatcgtctagctctgttaagcctagggtcccggtgc

SEQ ID NO: 99281 - DNA, 80 bp, synthetic construct
  source 1..80: mol_type = other DNA
ataagccaccgacaccgccgccccctcgtacccgccgcctcctttacacctatccagacggcgctaaggtttatgcaggg

SEQ ID NO: 99282 - DNA, 80 bp, synthetic construct
  source 1..80: mol_type = other DNA
aacttgacgctgccactgaggctggtcgcgcctgcgccggttgcacagtcagtcccggcattgtgcactatcagtttacc

SEQ ID NO: 99283 - DNA, 80 bp, synthetic construct
  source 1..80: mol_type = other DNA
agcgtcttaaaatgaaggtaggtaaaacccgggagtcttaattaattccccccttgtgcccccttctgagttttacaatg

SEQ ID NO: 99284 - DNA, 80 bp, synthetic construct
  source 1..80: mol_type = other DNA
gttcctctagtgatttctccccgcctgagacgacttatgccgccccagcccccgatgtggggctatcctcgagtgccccc

SEQ ID NO: 99285 - DNA, 80 bp, synthetic construct
  source 1..80: mol_type = other DNA
ctccggtcgctgccccggggccgccccatcctaccccgcctgttagtgatatttgggtattgccaccgccttcagaggga

SEQ ID NO: 99286 - DNA, 80 bp, synthetic construct
  source 1..80: mol_type = other DNA
tctcaggtcgatgcggcgcccgtgccccctgtccctgagccagctgggttgcctagttccactgtgcttacccctccccc

SEQ ID NO: 99287 - DNA, 80 bp, synthetic construct
  source 1..80: mol_type = other DNA
cccgcccagcctcactacacttacgccccccgcccgtaagccacctacaccacccccggctcgcacccgtcggcttcttt

SEQ ID NO: 99288 - DNA, 80 bp, synthetic construct
  source 1..80: mol_type = other DNA
tgtctgtattcttttttctgcgtccgtccgagaaaaactcctgctctcctgcagcgcacttgtgtatatctctggctcgt

SEQ ID NO: 99289 - DNA, 80 bp, synthetic construct
  source 1..80: mol_type = other DNA
tcctgctctcctgcagcgcacttgtgtatatctctggctcgtccatcgggggccaaatagtaccgaggttggttagcagc

SEQ ID NO: 99290 - DNA, 80 bp, synthetic construct
  source 1..80: mol_type = other DNA
ttctgcgtccgctccgacgaaaatattcttggggggttggagggccaaagaggaattattacgttctgtccccaagacga

SEQ ID NO: 99291 - DNA, 80 bp, synthetic construct
  source 1..80: mol_type = other DNA
gacgaaaatattcttgggaggttggagggccaaagaggaattattacgttctgtccccaagacgagcgggtgcgcgataa

SEQ ID NO: 99292 - DNA, 80 bp, synthetic construct
  source 1..80: mol_type = other DNA
ggtgtgccttccagtccactatcgctgagcttcagcgtcttaaaatgaaggtaggcaaaacccgggagttttaattaatt

SEQ ID NO: 99293 - DNA, 80 bp, synthetic construct
  source 1..80: mol_type = other DNA
ccctttggtgcccctctacttctttgtattctttttctgcgttccctccgaaaaaaatgaacgctagcggataccgggaa

SEQ ID NO: 99294 - DNA, 80 bp, synthetic construct
  source 1..80: mol_type = other DNA
tctttttctgcgttccctccgaaaaaaatgaacgctagcggataccgggaaaaattattgccgcgcctgcatgtgtgtga

SEQ ID NO: 99295 - DNA, 80 bp, synthetic construct
  source 1..80: mol_type = other DNA
cgccggttgctgccttggagccaccccaccttacaccccctgctagcgatatctgggtgctgccgccgccttccgaggaa

SEQ ID NO: 99296 - DNA, 80 bp, synthetic construct
  source 1..80: mol_type = other DNA
catcagattgatgcggtgcctgccccccccgcccctgagcttgctcagccgtctagccctgtcaagcctagaggtcccgt

SEQ ID NO: 99297 - DNA, 80 bp, synthetic construct
  source 1..80: mol_type = other DNA
gcgtaagccgccgacaccgccaccgcctcgcacccgccgcctcctttatacttacccagacggcgccaaggtgtatgcgg

SEQ ID NO: 99298 - DNA, 80 bp, synthetic construct
  source 1..80: mol_type = other DNA
cccgtcaagccttgctacacctaggcctcccgttcgtgagccacccacaccaccaccggctctcgccccggttagcaaat

SEQ ID NO: 99299 - DNA, 80 bp, synthetic construct
  source 1..80: mol_type = other DNA
cagctagcccgtctagccctaccacatataggcctcccgcccgtaagccacccacaccaccaccggctcgcactcgccgg

SEQ ID NO: 99300 - DNA, 80 bp, synthetic construct
  source 1..80: mol_type = other DNA
attccccttttgtgcccccttctaaactttgttctgttatttcttttttctgggtccgccccccccccccgggaaaaaaa

SEQ ID NO: 99301 - DNA, 80 bp, synthetic construct
  source 1..80: mol_type = other DNA
tactacatctgggccccctgtctgcgagccatctatactactaccggccctaaccccggtcagtaacccggccaactcgg

SEQ ID NO: 99302 - DNA, 80 bp, synthetic construct
  source 1..80: mol_type = other DNA
ctagtttcactacacctaggccctccgcccgtgagccgcccgtactgccgccggcccgcactcgccggttactttacaca

SEQ ID NO: 99303 - DNA, 80 bp, synthetic construct
  source 1..80: mol_type = other DNA
gcccgcgccaccactggctttagctccggtcggtgacccagctaaccagtctagccttactacaaacaggccccccgccc

SEQ ID NO: 99304 - DNA, 80 bp, synthetic construct
  source 1..80: mol_type = other DNA
acatagggccacccccgggtaccccctcatctgttagtggtgtttgggtgcttccgccaccttccgaggggtcggcgatc

SEQ ID NO: 99305 - DNA, 80 bp, synthetic construct
  source 1..80: mol_type = other DNA
gtcttgccacctgaaattccggccagtaagtcttctagctcgcctagccttatcacacctagaccccccgctcataagcc

SEQ ID NO: 99306 - DNA, 80 bp, synthetic construct
  source 1..80: mol_type = other DNA
ctactgttgctgagcttcagcgtcttaaaatgaaggtaggtaagacccgggagtcttaattaattcctttgctgtgcccc

SEQ ID NO: 99307 - DNA, 80 bp, synthetic construct
  source 1..80: mol_type = other DNA
ttgctgagcttcagcgtcttaaaatgaaggtaggtaaaacccgggagttttaattaatttcctctgtgcccccttcatag

SEQ ID NO: 99308 - DNA, 80 bp, synthetic construct
  source 1..80: mol_type = other DNA
tactgtacctaggccccccgcccgtgagccgcccacaccaccaccggtcccaaccccggtcagtgggccagctaactcgc

SEQ ID NO: 99309 - DNA, 80 bp, synthetic construct
  source 1..80: mol_type = other DNA
ggtcactgttggcgcccttgtcgctaatgaggggtggaatgcctcggaggacgctcttaccgctgttatcactgcagcgt

SEQ ID NO: 99310 - DNA, 80 bp, synthetic construct
  source 1..80: mol_type = other DNA
gtatgcgccgactggaggttgagcacgcccaaaaattcattacaagactttatagttggctgttcgagaagtccggccgt

SEQ ID NO: 99311 - DNA, 80 bp, synthetic construct
  source 1..80: mol_type = other DNA
gactatatccccggccgccagctccagttttatgcacaatgccgccgttggttatcagcgggattccatcttgacccaag

SEQ ID NO: 99312 - DNA, 80 bp, synthetic construct
  source 1..80: mol_type = other DNA
ggtgcttgtttttgatgagtctgtgccctgccgttgtaggacatttcttaagaaggctgtgggtaagttctgctgtttta

SEQ ID NO: 99313 - DNA, 80 bp, synthetic construct
  source 1..80: mol_type = other DNA
tgaagtggttaggacaggagtgcacctgctttttggaaccagcagagggtctggtcggcgaccatggccacgataatgaa

SEQ ID NO: 99314 - DNA, 80 bp, synthetic construct
  source 1..80: mol_type = other DNA
gcctatgagggctctgaggtcgatcaagccgagcccgcccatcttgatgtttctgggacttatgccgtccatggccgcca

SEQ ID NO: 99315 - DNA, 80 bp, synthetic construct
  source 1..80: mol_type = other DNA
acttgaggccctgtatagggcgcttaacatcccgcatgacatcgctgcccgagcctcccgtttgaccgccaccgtcgaac

SEQ ID NO: 99316 - DNA, 80 bp, synthetic construct
  source 1..80: mol_type = other DNA
tcgttgcaggcccagaccgcttggagtgccgcactgtgctcgggaataagactttccggacgacggtggttgatggcgct

SEQ ID NO: 99317 - DNA, 80 bp, synthetic construct
  source 1..80: mol_type = other DNA
catcttgagtcgaacggccccgagcagtacgttctttcgtttgacgcctctcgccaggctatgggggctgggccgcatag

SEQ ID NO: 99318 - DNA, 80 bp, synthetic construct
  source 1..80: mol_type = other DNA
tcgtcctgaagtgctctggaatcatcctatccaacgggttatccataatgaacttgaacagtactgtcgggcccgggctg

SEQ ID NO: 99319 - DNA, 80 bp, synthetic construct
  source 1..80: mol_type = other DNA
tctctcctacgagctcactcctgctggtttgcaggtcaagatttcatctaatggcctggattgcactgcaacattccccc

SEQ ID NO: 99320 - DNA, 80 bp, synthetic construct
  source 1..80: mol_type = other DNA
cgggcggggcccctagcgctgctccgggggaggtagcagccttttgcagtgctctttataggtacaacaggttcactcag

SEQ ID NO: 99321 - DNA, 80 bp, synthetic construct
  source 1..80: mol_type = other DNA
cgccattcgcttataggtggcttgtggctgcatcctgaggggctgttgggtatcttcccccctttttctcccgggcacct

SEQ ID NO: 99322 - DNA, 80 bp, synthetic construct
  source 1..80: mol_type = other DNA
ttgggagtccgctaaccctttttgtggggagggaaccttgtacacccggacatggtcaacatctggtttttctagtgact

SEQ ID NO: 99323 - DNA, 80 bp, synthetic construct
  source 1..80: mol_type = other DNA
tttccccccctgaggcagccgttgcagcgccggccgctactccggggttatgccaccctacacctcctgttagtgacatc

SEQ ID NO: 99324 - DNA, 80 bp, synthetic construct
  source 1..80: mol_type = other DNA
tgggtgttgccgccgccttctgaagaatttcaggttgacacagcgcccgcttcccccgcccctgagcctgcccaaccatc

SEQ ID NO: 99325 - DNA, 80 bp, synthetic construct
  source 1..80: mol_type = other DNA
tagccctgctgggccaaaggctcctgtgcgtaagccgccaacgccaccacccccgcgcactcgccgccttctttacacct

SEQ ID NO: 99326 - DNA, 80 bp, synthetic construct
  source 1..80: mol_type = other DNA
atccggatggggcaaaggtgtatgcggggtcactgtttgagtctgattgtgattggctggttaatgcgtcgaatcccggc

SEQ ID NO: 99327 - DNA, 80 bp, synthetic construct
  source 1..80: mol_type = other DNA
catcgtcccggaggcggcctttgccatgctttttaccaacgctaccccgagtctttccacccaaccgagttcatcatgcg

SEQ ID NO: 99328 - DNA, 80 bp, synthetic construct
  source 1..80: mol_type = other DNA
cgacggtctcgccgcgtacactttaactccccggcctattattcatgcagtggcccctgattatagggttgagcacaacc

SEQ ID NO: 99329 - DNA, 80 bp, synthetic construct
  source 1..80: mol_type = other DNA
ccgttagcctcagctttgatgcttgggagcgtaaccatcgccccggggacgaactttacctgaccgaccttgcagctacc

SEQ ID NO: 99330 - DNA, 80 bp, synthetic construct
  source 1..80: mol_type = other DNA
tggttcgaggctaataagccaacacagccggcccttacaataactgaggatgcagcccgcacagccaacctagcactgga

SEQ ID NO: 99331 - DNA, 80 bp, synthetic construct
  source 1..80: mol_type = other DNA
gatcgatgctgccacggaggtcggccgggcttgtgccggctgtgcagttagtcccggggttgtgcactatcagttcactg

SEQ ID NO: 99332 - DNA, 80 bp, synthetic construct
  source 1..80: mol_type = other DNA
ccggggtcccaggttcggggaagtcgcgatctatacagcaggtggatgttgacgttgtggttgttcccacccgggagctc

SEQ ID NO: 99333 - DNA, 80 bp, synthetic construct
  source 1..80: mol_type = other DNA
cggaatagttggcgccgccgaggtttcgcagcttttacaccccatacggcggcccgtgttaccacgggccgccgtgttgt

SEQ ID NO: 99334 - DNA, 80 bp, synthetic construct
  source 1..80: mol_type = other DNA
gattgatgaggccccatcccttccaccgcatttgttgttactacacatgcagcgggcctcgtcggtccaccttctcggcg

SEQ ID NO: 99335 - DNA, 80 bp, synthetic construct
  source 1..80: mol_type = other DNA
gatccctgccatagatttcgagcatgccggcctggtccccgcaatacgccctgagcttgcgcccaccagttggtggcatg

SEQ ID NO: 99336 - DNA, 80 bp, synthetic construct
  source 1..80: mol_type = other DNA
tcacccaccgctgccccgctgacgtgtgcgagcttatacgcggggcctatcccaaaatccaaaccactagccgcgtgctg

SEQ ID NO: 99337 - DNA, 80 bp, synthetic construct
  source 1..80: mol_type = other DNA
cggtctttgttctggaatgagcctgccattggccagaagctggttttcacccaggctgctaaggccgccaaccccggtgc

SEQ ID NO: 99338 - DNA, 80 bp, synthetic construct
  source 1..80: mol_type = other DNA
gttgggagagatgttcagcgctggtactctgcccccacccgcggtcctgcggctaactgccgccgttctgccttgcgtgg

SEQ ID NO: 99339 - DNA, 80 bp, synthetic construct
  source 1..80: mol_type = other DNA
agggcgccactttcacggaaactacaatcatagccacggctgatgctagggggctcatccaatcttcccgagctcatgcc

SEQ ID NO: 99340 - DNA, 80 bp, synthetic construct
  source 1..80: mol_type = other DNA
atagtcgcacttacccgccacacagagaagtgcgttattcttgatgcccccggcttgttacgtgaggttggtatatcgga

SEQ ID NO: 99341 - DNA, 80 bp, synthetic construct
  source 1..80: mol_type = other DNA
tgtgattgtcaacaattttttcctcgctggcggagaggtaggtcaccatcgcccctctgtgatacctcgcggtaatcctg

SEQ ID NO: 99342 - DNA, 80 bp, synthetic construct
  source 1..80: mol_type = other DNA
accagaacctcgcgacactacaggcctttccaccttcctgccagattagtgcctatcaccagttagctgaggaacttggc

SEQ ID NO: 99343 - DNA, 80 bp, synthetic construct
  source 1..80: mol_type = other DNA
caccgcccagctcccgtcgccgctgtctttatgccgcaggagcttacggtgtctgatagcgtgctggtctttgagcttac

SEQ ID NO: 99344 - DNA, 80 bp, synthetic construct
  source 1..80: mol_type = other DNA
ggacatagtccactgccggatggctgcccccagccagcggaaggccgtcctatcgacgctcgtgggtaggtacggccgtc

SEQ ID NO: 99345 - DNA, 80 bp, synthetic construct
  source 1..80: mol_type = other DNA
ggacgaagctgtatgaagcagctcactctgacgtccgtgagtccctggctaggttcatccccaccattgggcccgttcag

SEQ ID NO: 99346 - DNA, 80 bp, synthetic construct
  source 1..80: mol_type = other DNA
gctactacgtgtgagttatacgagctagttgaggctatggtggagaaaggtcaggacggctctgccgtgcttgagctcga

SEQ ID NO: 99347 - DNA, 80 bp, synthetic construct
  source 1..80: mol_type = other DNA
caggggagaccatcgcccacggcaaggtcggccagggtatctcggcttggagtaaaaccttctgtgccctgtttggtccg

SEQ ID NO: 99348 - DNA, 80 bp, synthetic construct
  source 1..80: mol_type = other DNA
ccttccccccgttgatcgtacctattgttttgacggattctctcgctgctcatttgctgcagaaactggggttgcccttt

SEQ ID NO: 99349 - DNA, 80 bp, synthetic construct
  source 1..80: mol_type = other DNA
cgcctaatattttctacggcgacgcatacgaggagtctgtgtttgccgccgctgtgtcaggggcaggttcaagcatggta

SEQ ID NO: 99350 - DNA, 80 bp, synthetic construct
  source 1..80: mol_type = other DNA
ccgcaacgcagcggccctgattgcaggctgcggactcaaactgaaggttgattatcgccctattgggttgtatgctggtg

SEQ ID NO: 99351 - DNA, 80 bp, synthetic construct
  source 1..80: mol_type = other DNA
ggggccctgggccggagcgggctgagcaattgcgcctagctgtttgtgacttccttcgagggttaacgaatgttgcgcag

SEQ ID NO: 99352 - DNA, 80 bp, synthetic construct
  source 1..80: mol_type = other DNA
gtgtgtgtcgatgttgtgtcccgagtttatggagttagccccgggctggtacataaccttattggcatgttgcaaaccat

SEQ ID NO: 99353 - DNA, 80 bp, synthetic construct
  source 1..80: mol_type = other DNA
attctttgcatgacctctggccggccgatgttgcggaggctatggcccgacacgggatgacacgcttgtatgctgcacta

SEQ ID NO: 99354 - DNA, 80 bp, synthetic construct
  source 1..80: mol_type = other DNA
cccacgtcgtcgacctcccccagctggggctgcgccgctgaccgctatatcacctgctcccgatacagctcctgtacctg

SEQ ID NO: 99355 - DNA, 80 bp, synthetic construct
  source 1..80: mol_type = other DNA
atgttgactcgcgcggcgccatattgcgacgccagtacaatttatccacatctccgctcacatcatctgtcgcctcgggt

SEQ ID NO: 99356 - DNA, 80 bp, synthetic construct
  source 1..80: mol_type = other DNA
accaatctggttctttatgctgccccgctaaaccctttgctgccccttcaggatggcactaacactcacattatggccac

SEQ ID NO: 99357 - DNA, 80 bp, synthetic construct
  source 1..80: mol_type = other DNA
ataggccattggtgccaaatgctgtcggcggttatgcgatatctatctcattctggcctcagactactaccacccccacg

SEQ ID NO: 99358 - DNA, 80 bp, synthetic construct
  source 1..80: mol_type = other DNA
tctgttgatatgaactctattacttccactgatgttaggattttagttcagcctggcattgcttctgagttggttattcc

SEQ ID NO: 99359 - DNA, 80 bp, synthetic construct
  source 1..80: mol_type = other DNA
catctccctcctgaagtactactaccacccggtacttaccatacaacttcataccttctgatccacgacggtgatcgtgc

SEQ ID NO: 99360 - DNA, 80 bp, synthetic construct
  source 1..80: mol_type = other DNA
cgggtgtggctgaggaggaggctacttctggtttagtaatgctttgtattcatggttctcctgttaactcttacaccaac

SEQ ID NO: 99361 - DNA, 80 bp, synthetic construct
  source 1..80: mol_type = other DNA
accccctataccggggcacttggactccttgattttgctttagagcttgagtttaggaatctgacacccgggaacaccaa

SEQ ID NO: 99362 - DNA, 80 bp, synthetic construct
  source 1..80: mol_type = other DNA
cacccgtgtgtcccggtatacaagcacagcccgtcatcggctgcgccgcggtgctgatggcaccgccgaacttaccacca

SEQ ID NO: 99363 - DNA, 80 bp, synthetic construct
  source 1..80: mol_type = other DNA
cagcagccacgcgcttcatgaaggacctgcacttcaccggtacgaatggggtcggcgaggtgggtcgtggtattgctctc

SEQ ID NO: 99364 - DNA, 80 bp, synthetic construct
  source 1..80: mol_type = other DNA
gtgactcccgtgtggtcatccaggactatgacaaccagcatgagcaggatcggcccaccccctcgcctgccccttctcgc

SEQ ID NO: 99365 - DNA, 80 bp, synthetic construct
  source 1..80: mol_type = other DNA
ttccaccaacccgatgtatgtctcggatactgtcacatttgtcaacgtggctacaggagcccaggctgtcgcccgttccc

SEQ ID NO: 99366 - DNA, 80 bp, synthetic construct
  source 1..80: mol_type = other DNA
tgttgtgacctatgaaggtgatactagtgcaggctacaatcatgatgtctccatacttcgtgcatggatccgcacaacta

SEQ ID NO: 99367 - DNA, 80 bp, synthetic construct
  source 1..80: mol_type = other DNA
cttcgcggaaagctatctttttgggaggccgggacgactaaagccggctacccctataattacaatacaactgctagtga

SEQ ID NO: 99368 - DNA, 80 bp, synthetic construct
  source 1..80: mol_type = other DNA
tcagattttgattgaaaatgcagccggtcatcgtgttgctatttccacgtatactactagcttgggcgccggccctgtat

SEQ ID NO: 99369 - DNA, 80 bp, synthetic construct
  source 1..80: mol_type = other DNA
ctgtttctgcagtcggtgttttagccccacattcggctcttgcagtccttgaagacactattgattaccctgcccgtgcc

SEQ ID NO: 99370 - DNA, 80 bp, synthetic construct
  source 1..80: mol_type = other DNA
aaatgaaggtaggcaaaacccgggagttttaattaattttcctttgtgcccccttcatagcttttgatattatttatctt

SEQ ID NO: 99371 - DNA, 80 bp, synthetic construct
  source 1..80: mol_type = other DNA
gcgtgttgtgggggggccaggggctttatttataataccagggagaaaaatgagagaagaagagagagatgatcctatga

SEQ ID NO: 99372 - DNA, 80 bp, synthetic construct
  source 1..80: mol_type = other DNA
agatagtcggcgatcatccgctggtgatagaacgtgtgcgggctattggctgccattttgtactgctgcttactgcagcc

SEQ ID NO: 99373 - DNA, 80 bp, synthetic construct
  source 1..80: mol_type = other DNA
cctgagccatcaccaatgccttatgttccatacccccggtcgacagaggtgtatgtccgctctatatttggccctggcgg

SEQ ID NO: 99374 - DNA, 80 bp, synthetic construct
  source 1..80: mol_type = other DNA
ggtccccatccctattcccatctgcttgctccacgaaatccacatttcacgctgtcccggttcatatttgggaccggctc

SEQ ID NO: 99375 - DNA, 80 bp, synthetic construct
  source 1..80: mol_type = other DNA
atgctttttggcgctaccctggatgatcaggcattctgctgttcacggcttatgacctacctccgcgggattagttataa

SEQ ID NO: 99376 - DNA, 80 bp, synthetic construct
  source 1..80: mol_type = other DNA
gggccaggggctttatttataataccagggagaaaaatgagagaagaagagagagatgatcctatgactgatctctttct

SEQ ID NO: 99377 - DNA, 80 bp, synthetic construct
  source 1..80: mol_type = other DNA
ctgtctacaccaccattggccctaaccccagtacgtaagccagctaactcgtttagctttactgcacccagaccccccgt

SEQ ID NO: 99378 - DNA, 80 bp, synthetic construct
  source 1..80: mol_type = other DNA
tactgcacctcggcttcctgctagtgggccgcttacaccaccaccggccctaaccccggtcagtaagccagctaacccgt

SEQ ID NO: 99379 - DNA, 80 bp, synthetic construct
  source 1..80: mol_type = other DNA
cgtgaaaaaaaaaataaaaaaattctggggtagcggcgtgcggggggggcgcaagtcggaggcattttcatagggttagc

SEQ ID NO: 99380 - DNA, 80 bp, synthetic construct
  source 1..80: mol_type = other DNA
aaaaaaattctggggtagcggcgggcggggggggcgcaagtcgggagcattttcatagggttaggagaatagttaaatac

SEQ ID NO: 99381 - DNA, 80 bp, synthetic construct
  source 1..80: mol_type = other DNA
gtctacaccaccacttactctgaccccagctagtaagccagctaattcgcctagcctcactgcacctaggcctcctgttc

SEQ ID NO: 99382 - DNA, 80 bp, synthetic construct
  source 1..80: mol_type = other DNA
gcgagccgtccacaccgccatcagctcgcactcgccggcttctttacacatatcctgatggggccaaagtgtatgcgggc

SEQ ID NO: 99383 - DNA, 80 bp, synthetic construct
  source 1..80: mol_type = other DNA
ttacccctctatctgctttgtattcattatattccgcggttcccgctccggaatatgaaacgtgtctcggaagaaattcc

SEQ ID NO: 99384 - DNA, 80 bp, synthetic construct
  source 1..80: mol_type = other DNA
ctccggaatatgaaacgtgtctcggaagaaattccgcgcctctcagctcttagcaaacctggagggagcccacttgcagt

SEQ ID NO: 99385 - DNA, 80 bp, synthetic construct
  source 1..80: mol_type = other DNA
gtgcccccttctaaactttgctctttaatatttcttttttctgcgttctcgctcccgaaaaggatggtactaaaaaaacg

SEQ ID NO: 99386 - DNA, 80 bp, synthetic construct
  source 1..80: mol_type = other DNA
ggtaccccttcttctgctagtgatgtctgggtgctcccgccaccctctgagaggtcggcggttgttttgccacccgaaac

SEQ ID NO: 99387 - DNA, 80 bp, synthetic construct
  source 1..80: mol_type = other DNA
tctgtgagccgcctacattatcaccggccctagccccggtcagtgagccagccaacctgcctagccttgctacacccacg

SEQ ID NO: 99388 - DNA, 80 bp, synthetic construct
  source 1..80: mol_type = other DNA
cctcctgcccgcgagccccccacgccatcaccagcccgcacccgtcggctcctttatacgtaccctgatggggccaaggt

SEQ ID NO: 99389 - DNA, 80 bp, synthetic construct
  source 1..80: mol_type = other DNA
tgcgtccgtccgagaaaaactcctgctctcctgcagcgcacttgtgtatatctctggctcgtccatcgggggccaaatag

SEQ ID NO: 99390 - DNA, 80 bp, synthetic construct
  source 1..80: mol_type = other DNA
tccccctttgtgcccccttctaaatctcgcttagtattcatatttctgcgttccgcgctccccggaacagaacaaaaaaa

SEQ ID NO: 99391 - DNA, 80 bp, synthetic construct
  source 1..80: mol_type = other DNA
taaaacccgggagtcttaattaattcttccttgtgcccccttctaagctttactctgttattttcttttttctgcggttc

SEQ ID NO: 99392 - DNA, 80 bp, synthetic construct
  source 1..80: mol_type = other DNA
cggacatcctggtgctatttccacgtataccaccaaccttggcgctggccctgaggctggctcagcaatccgtgttttaa

SEQ ID NO: 99393 - DNA, 80 bp, synthetic construct
  source 1..80: mol_type = other DNA
tgaagaaacaaatgaataccctgcccgtgcccacccttttgaaaatttttgcccggaatgtcccgctcctggtttgcagg

SEQ ID NO: 99394 - DNA, 80 bp, synthetic construct
  source 1..80: mol_type = other DNA
ccacccttttgaaaatttttgcccggaatgtcccgctcctggtttgcaggggggggccttccagtctaataacgctaaaa

SEQ ID NO: 99395 - DNA, 80 bp, synthetic construct
  source 1..80: mol_type = other DNA
taataacgctaaaattccgcgccctaaaatgaaggtaagaaaaacccgggagttttaaacaatttcctttgaaccccctt

SEQ ID NO: 99396 - DNA, 80 bp, synthetic construct
  source 1..80: mol_type = other DNA
atccacctagtcttgctgcacctaaacctcctgttcgtaagccgccttcgccaccgccggcccgcacccgtcggctcctc

SEQ ID NO: 99397 - DNA, 80 bp, synthetic construct
  source 1..80: mol_type = other DNA
atatgaggctaccacctagtaccccctcttctgctagtgatatctgggtgctcccgtcgctttctgaggggtcggttatt

SEQ ID NO: 99398 - DNA, 80 bp, synthetic construct
  source 1..80: mol_type = other DNA
gttccgccacccgagaccccagctagtaagcctgctaacccacttagccctgctgcacctaggccccctgctcgtaagcc

SEQ ID NO: 99399 - DNA, 80 bp, synthetic construct
  source 1..80: mol_type = other DNA
ggagtcttaattaattttccttttgtgcccccttctgagcttcaccttgttatttctttttttctgcggatctcgccccc

SEQ ID NO: 99400 - DNA, 80 bp, synthetic construct
  source 1..80: mol_type = other DNA
cccacctgactacactacacttaggccacttgtccgcgagccgtccacaccaccatcgaccttgaccccagttagtaagc

SEQ ID NO: 99401 - DNA, 80 bp, synthetic construct
  source 1..80: mol_type = other DNA
ctacagttcccaatacggtgttacctctgggcacctcctcctctgctagtgatgtttgggtgttcccgccaccctctgag

SEQ ID NO: 99402 - DNA, 80 bp, synthetic construct
  source 1..80: mol_type = other DNA
gctgtggtggttcggccgtttctttctcgcgtgcagacagagattctcattaatttgatgcaaccccggcagctggtgtt

SEQ ID NO: 99403 - DNA, 80 bp, synthetic construct
  source 1..80: mol_type = other DNA
gcgcccttgtcgctaatgaggggtggaatgcctcagaagacgccctcactgctgttattactgcagcgtatttgaccatc

SEQ ID NO: 99404 - DNA, 80 bp, synthetic construct
  source 1..80: mol_type = other DNA
gattatatccctggtcgccagctccagttttatgcacagtgtcgccgctggctatcagcggggttccatcttgaccctag

SEQ ID NO: 99405 - DNA, 80 bp, synthetic construct
  source 1..80: mol_type = other DNA
agtgctcgtctttgatgagtcagtgccctgccgctgtaggacgtttctcaagaaagttgcaggtaaattttgttgtttta

SEQ ID NO: 99406 - DNA, 80 bp, synthetic construct
  source 1..80: mol_type = other DNA
tgaaatggttggggcaggagtgcacttgtttcctggagccagcagagggtctagtcggcgatcacggtcatgataatgag

SEQ ID NO: 99407 - DNA, 80 bp, synthetic construct
  source 1..80: mol_type = other DNA
gcttatgagggctctgaggtcgatcaggctgagcccgcacatcttgacatttctgggacctatgctgttcacggccgcca

SEQ ID NO: 99408 - DNA, 80 bp, synthetic construct
  source 1..80: mol_type = other DNA
gctcgaggccctgtatagggcacttaacatcccacatgacatcgctgtccgtgcatcccgtttaaccgccactgttgagc

SEQ ID NO: 99409 - DNA, 80 bp, synthetic construct
  source 1..80: mol_type = other DNA
ttgtggcaagcccggagcgcctagagtgccgcactgtgctcgggaataaaactttccgaacaacggtggttgacggtgcc

SEQ ID NO: 99410 - DNA, 80 bp, synthetic construct
  source 1..80: mol_type = other DNA
catcttgaggcaaacggtcctgagcagtatgtcctttcgtttgatgcttctcgccagtcaatgggggctgggtcgcacag

SEQ ID NO: 99411 - DNA, 80 bp, synthetic construct
  source 1..80: mol_type = other DNA
ccgacctgaggtgctctggaatcatcctattcagcgggttattcataatgaattagaacagtactgccgggcccgggctg

SEQ ID NO: 99412 - DNA, 80 bp, synthetic construct
  source 1..80: mol_type = other DNA
cctaacttatgaacttacccccgctggtttgcaagttaagattacatctaacggtttagattgcatcgcaacattccctc

SEQ ID NO: 99413 - DNA, 80 bp, synthetic construct
  source 1..80: mol_type = other DNA
ccggcggcgcccccagcgccgcaccaggggaggtggccgctttctgcagcgccctttataggtacaacaggtttactcag

SEQ ID NO: 99414 - DNA, 80 bp, synthetic construct
  source 1..80: mol_type = other DNA
cggcattcgctgacggttgggttgtggctgcaccccgaggggttgttgggtattttcccccctttctcccctggacacct

SEQ ID NO: 99415 - DNA, 80 bp, synthetic construct
  source 1..80: mol_type = other DNA
ctgggagtctgctaaccccttctgtggggagggaactctgtatactcggacttggtctacatctggtttttctagtgatt

SEQ ID NO: 99416 - DNA, 80 bp, synthetic construct
  source 1..80: mol_type = other DNA
ttgcccccccggaggcggttgtccctgtgccggccgctactctggggctacctcgcccaacacctcccactagtgatatt

SEQ ID NO: 99417 - DNA, 80 bp, synthetic construct
  source 1..80: mol_type = other DNA
tgggtgctgccgccaccttctgaggaactccaggttgatacagtgcccgcccccacagtttctgagcccgttcaatcacc

SEQ ID NO: 99418 - DNA, 80 bp, synthetic construct
  source 1..80: mol_type = other DNA
cagtcctgtcgaatctgtggcccccgtgcgtaagtcgccaacaccattgcctcaccgcacccgccgtcttctttccaggt

SEQ ID NO: 99419 - DNA, 80 bp, synthetic construct
  source 1..80: mol_type = other DNA
tgatacagtgcccgcccccacagtttctgagcccgttcaatcacccagtcctgtcgaatctgtggcccccgtgcgtaagc

SEQ ID NO: 99420 - DNA, 80 bp, synthetic construct
  source 1..80: mol_type = other DNA
taagtcgccaacaccattgcctcaccgcacccgccgtcttctttacacctacccggacggtgctaaagtgtatgcaggat

SEQ ID NO: 99421 - DNA, 80 bp, synthetic construct
  source 1..80: mol_type = other DNA
gccgttgtttagaggttggggcccacccaaggtccattaatgataaccccaatgtcttacaccggtgttttctgcgaccg

SEQ ID NO: 99422 - DNA, 80 bp, synthetic construct
  source 1..80: mol_type = other DNA
cgttgtttgagtcggactgcgactggctggttaatgcatcaaaccctggccaccgacctgggggaggtatttgtcatgct

SEQ ID NO: 99423 - DNA, 80 bp, synthetic construct
  source 1..80: mol_type = other DNA
ttctaccagcgttaccctgagtcattccacccaactgagtttattatgcgtgacggcctcgccgcgtatactctgacacc

SEQ ID NO: 99424 - DNA, 80 bp, synthetic construct
  source 1..80: mol_type = other DNA
ccgccctatcatccatgcagtggcccccgattatagggttgagcagaacccaaagaggctcgaggcagcgtatcgggaga

SEQ ID NO: 99425 - DNA, 80 bp, synthetic construct
  source 1..80: mol_type = other DNA
cctgctcccgtcgcgggactgccgcctatccactcttaggctcgggcatatatcaagttcctgtcagccttagttttgat

SEQ ID NO: 99426 - DNA, 80 bp, synthetic construct
  source 1..80: mol_type = other DNA
gcctgggagcggaaccatcgccccggggacgaactttacctgaccgaccccgctgctacctggtttgaggctaataagcc

SEQ ID NO: 99427 - DNA, 80 bp, synthetic construct
  source 1..80: mol_type = other DNA
gacacagccggccctcacaataacagaggatacggcccgcacggctaacctagcattagagatcgatgccgccacggagg

SEQ ID NO: 99428 - DNA, 80 bp, synthetic construct
  source 1..80: mol_type = other DNA
ttggccgtgcttgtgcaggttgcatggttcgtcccgtggtcgtgcattaccaatttactgctggggttccaggttcaggg

SEQ ID NO: 99429 - DNA, 80 bp, synthetic construct
  source 1..80: mol_type = other DNA
aaatcaaggtctatacagcagggggatgttgatgtggtggttgtccccacccgggagcttcgcaatagctggcgccgcag

SEQ ID NO: 99430 - DNA, 80 bp, synthetic construct
  source 1..80: mol_type = other DNA
gggttttgcagcctttacacctcatacggcggcccgcgtcaccacaggccgccgtgttgtaattgatgaggccccgtccc

SEQ ID NO: 99431 - DNA, 80 bp, synthetic construct
  source 1..80: mol_type = other DNA
gattcccgccatagacttcgagcatgccggtctggtccctgcaatacgccctgagctcgcacctaccagctggtggcatg

SEQ ID NO: 99432 - DNA, 80 bp, synthetic construct
  source 1..80: mol_type = other DNA
gtcgggagggacgtccagcgttggtattctgcccccacccgcggccctgcggctaattgccgccgctccgccctgcgtgg

SEQ ID NO: 99433 - DNA, 80 bp, synthetic construct
  source 1..80: mol_type = other DNA
tcacacaccgctgtcctgctgatgtgtgcgagcttattcgtggggcctacccgaaaatccagactactagtcgcgtgctg

SEQ ID NO: 99434 - DNA, 80 bp, synthetic construct
  source 1..80: mol_type = other DNA
cggtccttattctggaatgagcccgccattggccagaagctagttttcacacaggccgctaaggctgccaaccctggtgc

SEQ ID NO: 99435 - DNA, 80 bp, synthetic construct
  source 1..80: mol_type = other DNA
gattacagtccacgaagcccagggcgctacctttacagagaccacagttatagctacagctgatgctaggggcctcattc

SEQ ID NO: 99436 - DNA, 80 bp, synthetic construct
  source 1..80: mol_type = other DNA
aatcttcccgggcccatgctatagttgcactcacccgccatacagagaagtgcgtcattcttgatgcccctggcctgctt

SEQ ID NO: 99437 - DNA, 80 bp, synthetic construct
  source 1..80: mol_type = other DNA
cgtgaagtcgggatatcggatattattgttaacaacttctttcttgccggcggagaggtgggccaccatcgcccctctgt

SEQ ID NO: 99438 - DNA, 80 bp, synthetic construct
  source 1..80: mol_type = other DNA
gataccccgcggtatccctgaccaaaaccttgagacactgcaagccttcccgccttcctgtcagattagtgcctaccatc

SEQ ID NO: 99439 - DNA, 80 bp, synthetic construct
  source 1..80: mol_type = other DNA
agttggccgaggaactaggccatcgcccagcccccgttgctgccgtcctgcctccctgccctgaacttgagcagggtttg

SEQ ID NO: 99440 - DNA, 80 bp, synthetic construct
  source 1..80: mol_type = other DNA
ttgtatatgccgcaggagctcacggtgtctgatagcgtgttggtatttgaactcacggatattgttcactgccgcatggc

SEQ ID NO: 99441 - DNA, 80 bp, synthetic construct
  source 1..80: mol_type = other DNA
tgcccccagccagcggaaggccgtcctatctacgcttgtgggtaggtacggccgtaaaacgaaactgtatgaggcagctc

SEQ ID NO: 99442 - DNA, 80 bp, synthetic construct
  source 1..80: mol_type = other DNA
gtcttccccctgccgaccgcacctactgttttgacgggttttcccgctgtgcttttgctgcggagactggcatagccctt

SEQ ID NO: 99443 - DNA, 80 bp, synthetic construct
  source 1..80: mol_type = other DNA
attctgatgtccgtgagtctttagctaggttcattcccacaattgggcctgtccaggccacaacatgtgaattatatgag

SEQ ID NO: 99444 - DNA, 80 bp, synthetic construct
  source 1..80: mol_type = other DNA
ttggttgaggctatggtggagaagggccaggatggctctgcagtgctcgaacttgacctttgcaaccgcgatgtatcacg

SEQ ID NO: 99445 - DNA, 80 bp, synthetic construct
  source 1..80: mol_type = other DNA
ccggggagaccattgctcacggtaaggtcggccagggcatctcggcctggagcaagaccttctgtgctctgttcggcccg

SEQ ID NO: 99446 - DNA, 80 bp, synthetic construct
  source 1..80: mol_type = other DNA
cgcctaacatcttttatggcgacgcatatgaggagtctgtatttgctgccgctgtgtcgggggcggggtcgtgcatggtg

SEQ ID NO: 99447 - DNA, 80 bp, synthetic construct
  source 1..80: mol_type = other DNA
tttgagaatgacttctcagagtttgacagcactcaaaataacttctcccttggtctcgaatgtgtagtcatggaggaatg

SEQ ID NO: 99448 - DNA, 80 bp, synthetic construct
  source 1..80: mol_type = other DNA
tggcatgccccagtggctaattcggttgtaccacttggttcggtcggcctggattttgcaggccccgaaggagtccctta

SEQ ID NO: 99449 - DNA, 80 bp, synthetic construct
  source 1..80: mol_type = other DNA
aaggattttggaagaagcattctggtgagcccggcaccctcctatggaacaccgtttggaacatggcgatcatagcgcac

SEQ ID NO: 99450 - DNA, 80 bp, synthetic construct
  source 1..80: mol_type = other DNA
tgctatgagtttcgcgattttagggttgccgcttttaaaggcgatgattcggtggtcctctgtagtgactaccgtcagag

SEQ ID NO: 99451 - DNA, 80 bp, synthetic construct
  source 1..80: mol_type = other DNA
cgcaacgctgcagccctgattgctggttgcgggctcaaattgaaggttgattaccgccctattgggttgtatgctggtgt

SEQ ID NO: 99452 - DNA, 80 bp, synthetic construct
  source 1..80: mol_type = other DNA
tattccctgcacgacctgtggccggctgatgtcgcagaggccatggccagacatgggatgacacgtttgtatgccgcact

SEQ ID NO: 99453 - DNA, 80 bp, synthetic construct
  source 1..80: mol_type = other DNA
ggggccctgggccagaacgtgctgagcagttgcgtcttgcagtttgtgatttccttcgagggttgacgaatgttgcgcag

SEQ ID NO: 99454 - DNA, 80 bp, synthetic construct
  source 1..80: mol_type = other DNA
tgctgatggtaaggcccattttacagagactgtgaaacctgtgcttgaccttacaaattccatcatacagcgggtagaat

SEQ ID NO: 99455 - DNA, 80 bp, synthetic construct
  source 1..80: mol_type = other DNA
ctccgctgccccccgccgtcgatctaccccagctggggctgcgccgctgactgccgtatcgccggcccccgatacagccc

SEQ ID NO: 99456 - DNA, 80 bp, synthetic construct
  source 1..80: mol_type = other DNA
ctgttccagatgttgactcgcgcggggccatcttgcgacgacagtacaatttgtccacatctccccttacatcatctgtc

SEQ ID NO: 99457 - DNA, 80 bp, synthetic construct
  source 1..80: mol_type = other DNA
gcctcgggcactaatttagtcctttatgctgctccactaaatcctcttctacctctccaggatggcaccaatacccatat

SEQ ID NO: 99458 - DNA, 80 bp, synthetic construct
  source 1..80: mol_type = other DNA
acacctcccccctgaggtgcttctaccacccggcacctaccacacaacttcatatcttttgatccacgatggagatcgtg

SEQ ID NO: 99459 - DNA, 80 bp, synthetic construct
  source 1..80: mol_type = other DNA
tatggcaactgaggcgtctaattacgcccagtatcgggtcgttcgggccacgatccgttaccggccgttggtgccaaatg

SEQ ID NO: 99460 - DNA, 80 bp, synthetic construct
  source 1..80: mol_type = other DNA
ctgtcggcggttatgcaatttctatctcattttggccccagactactaccacccctacatctgttgatatgaactccatc

SEQ ID NO: 99461 - DNA, 80 bp, synthetic construct
  source 1..80: mol_type = other DNA
acctccaccgatgtcaggattctggttcaacctggtatcgcctccgagttagtcatccctagtgagcgcctccactaccg

SEQ ID NO: 99462 - DNA, 80 bp, synthetic construct
  source 1..80: mol_type = other DNA
cgggtgtggctgaagaggaggctacctccggccttgtgatgctttgtatccatggctctcctgttaattcctatactaac

SEQ ID NO: 99463 - DNA, 80 bp, synthetic construct
  source 1..80: mol_type = other DNA
accccttatactggggcgcttgggctccttgattttgcattagagcttgagttcaggaatttgacaccagggaacactaa

SEQ ID NO: 99464 - DNA, 80 bp, synthetic construct
  source 1..80: mol_type = other DNA
cacccgtgtgtcccggtacacaagtacagcccgccatcggctgcgtcgcggcgccgacggcactgccgagctcactacca

SEQ ID NO: 99465 - DNA, 80 bp, synthetic construct
  source 1..80: mol_type = other DNA
cggcagctacgcgcttcatgaaggacctgcatttcaccggcacgaatggggtaggcgaggtgggccgtggtattgccctg

SEQ ID NO: 99466 - DNA, 80 bp, synthetic construct
  source 1..80: mol_type = other DNA
acattgtttaatcttgctgacacgcttctcggtggtctgccgacagaattaatttcgtcggccgggggacagttgttcta

SEQ ID NO: 99467 - DNA, 80 bp, synthetic construct
  source 1..80: mol_type = other DNA
ccgttgtgacttatgagggggatactagtgcaggttataatcatgatgtctctatactccgtgcatggatccgcacaacc

SEQ ID NO: 99468 - DNA, 80 bp, synthetic construct
  source 1..80: mol_type = other DNA
gtgactctcgtgtggtgatccaagactatgacaatcagcatgagcaggatcggcccaccccttcacctgccccatcccgt

SEQ ID NO: 99469 - DNA, 80 bp, synthetic construct
  source 1..80: mol_type = other DNA
cctttctcagtccttcgcgctaacgatgttctatggctttcccttactgctgccgagtatgaccagactacatatgggtc

SEQ ID NO: 99470 - DNA, 80 bp, synthetic construct
  source 1..80: mol_type = other DNA
gtccaccaacccgatgtatgtctcggataccgttacatttgttaatgtagctacaggagcccaggccgttgctcgctccc

SEQ ID NO: 99471 - DNA, 80 bp, synthetic construct
  source 1..80: mol_type = other DNA
ttgactggtctaaggttactctggacggccgccctcttaccaccatccagcagtactctaaaacattttatgtcctcccg

SEQ ID NO: 99472 - DNA, 80 bp, synthetic construct
  source 1..80: mol_type = other DNA
ctacgtgggaagttatccttttgggaggctggcacaactaaggctggctatccttataattataatactactgctagtga

SEQ ID NO: 99473 - DNA, 80 bp, synthetic construct
  source 1..80: mol_type = other DNA
ccagattttgatcgagaatgcagctggccatcgtgttgctatctccacttacaccactagcctgggcgccggccctgtgt

SEQ ID NO: 99474 - DNA, 80 bp, synthetic construct
  source 1..80: mol_type = other DNA
cggtctctgcagtcggtgtgttggccccgcattcggctcttgccgctcttgaggataccactgattacccggctcgcgcc

SEQ ID NO: 99475 - DNA, 80 bp, synthetic construct
  source 1..80: mol_type = other DNA
catacttttgatgacttttgcccggagtgtcgcgcccttggtttgcaggggtgcgccttccagtctactgttgctgagct

SEQ ID NO: 99476 - DNA, 80 bp, synthetic construct
  source 1..80: mol_type = other DNA
aaatgaaggtaggtaaaacccgggagttttaattaattcctttcttgtgcccccttcatagctctctgctttattctctt

SEQ ID NO: 99477 - DNA, 80 bp, synthetic construct
  source 1..80: mol_type = other DNA
ccgggagttttaattaattcctttcttgtgcccccttcatagctctctgctttattctcttttctggttccccgctcccc

SEQ ID NO: 99478 - DNA, 80 bp, synthetic construct
  source 1..80: mol_type = other DNA
aagatagttggtgaccacccgttggtgatagagcgtgtacgggccattggttgtcactttgtgctgctgcttaccgcggc

SEQ ID NO: 99479 - DNA, 80 bp, synthetic construct
  source 1..80: mol_type = other DNA
ccctgagccgtcaccgatgccctatgttccataccctaggtcaacagaggtgtatgtccgctctatatttggccccggcg

SEQ ID NO: 99480 - DNA, 80 bp, synthetic construct
  source 1..80: mol_type = other DNA
ggtccccgtcattgttcccgtcagcttgctccacaaaatccacatttcatgccgttccggttcacatctgggaccggctc

SEQ ID NO: 99481 - DNA, 80 bp, synthetic construct
  source 1..80: mol_type = other DNA
atgctttttggcgccacccttgatgatcaggcattctgctgctcgcggcttatgacttatctccgagggattagctacaa

SEQ ID NO: 99482 - DNA, 80 bp, synthetic construct
  source 1..80: mol_type = other DNA
actgccgtatcgccggcccccgatacagcccctgttccagatgttgactcgcgcggggccatcttgcgacgacagtacaa

SEQ ID NO: 99483 - DNA, 80 bp, synthetic construct
  source 1..80: mol_type = other DNA
ttctccccccccgaggcggccacttctgcgccggccgccattcaggggccacctgatcctaccccccccgccagtgatat

SEQ ID NO: 99484 - DNA, 80 bp, synthetic construct
  source 1..80: mol_type = other DNA
ttgggtgctgccgccactctctgaggagttccaggccgacgtgcaaccagcccccctcactcccgaacttgcctctctac

SEQ ID NO: 99485 - DNA, 80 bp, synthetic construct
  source 1..80: mol_type = other DNA
ccaggcccgttgagcctagggtccctgttcgtaagccttcgtcaccaccatctcctcgcacccgccgcctcctctacact

SEQ ID NO: 99486 - DNA, 80 bp, synthetic construct
  source 1..80: mol_type = other DNA
ttctggagccagcggaaggcctggtcggtgactgcggtcatgataatgaggcctatgaagggtctgaggtggaccccgcc

SEQ ID NO: 99487 - DNA, 80 bp, synthetic construct
  source 1..80: mol_type = other DNA
cccagatgacattgcggctcgtgcgtcacgcctgacggctactgtggaacttgctgccagtccaggccgactcgagtgcc

SEQ ID NO: 99488 - DNA, 80 bp, synthetic construct
  source 1..80: mol_type = other DNA
gtacggtgcttgggaataagaccttccgcacatcaataactgacggtgcccacctcgaggccaacggtcctgagcagtat

SEQ ID NO: 99489 - DNA, 80 bp, synthetic construct
  source 1..80: mol_type = other DNA
gcaggtcaaaatatcctctaatggcttggattgtactgctgtattcccccctggcggagcgccaagcgctgcaccatgtg

SEQ ID NO: 99490 - DNA, 80 bp, synthetic construct
  source 1..80: mol_type = other DNA
aagtacgctttacacacggacttggtccacatcaggtttctctagcgacttctccccacccgaggtcgcttgtgcagcac

SEQ ID NO: 99491 - DNA, 80 bp, synthetic construct
  source 1..80: mol_type = other DNA
cggcccctgacatagggttaccctcgggtaccccttcgtccgctggcgatatctgggtgttttcaccgccctctgaggtg

SEQ ID NO: 99492 - DNA, 80 bp, synthetic construct
  source 1..80: mol_type = other DNA
tcggcgaccgtaccgccgcccgtaaccccggttagtaagccagccgattcgcctagtctaattatacccaggccccccgt

SEQ ID NO: 99493 - DNA, 80 bp, synthetic construct
  source 1..80: mol_type = other DNA
ccgtgagccgcccacgtcatcgccggtcctaccctcgttcggtaaaccagctaacccacctagtcttactacctctagac

SEQ ID NO: 99494 - DNA, 80 bp, synthetic construct
  source 1..80: mol_type = other DNA
ccctcgtccgcgagccgcctacacctccaacgacccgtacccgccggctcctttatacatatcctgatggggccaaggtg

SEQ ID NO: 99495 - DNA, 80 bp, synthetic construct
  source 1..80: mol_type = other DNA
tatgcaggctctttgtttgagtcagattgcgactggttggttaatgcatctaatcctggccatcgccccggtggtggcct

SEQ ID NO: 99496 - DNA, 80 bp, synthetic construct
  source 1..80: mol_type = other DNA
ttgtcatgcattttaccagcgcttccctgagtcgtttcatccgactgactttgtcatgcgtgaaggtctcgccgcttaca

SEQ ID NO: 99497 - DNA, 80 bp, synthetic construct
  source 1..80: mol_type = other DNA
ctttgagcccgcgcccgatcattcatgctgtggcccccgactacagggttgagcagaaccccaagaggttagaggcggca

SEQ ID NO: 99498 - DNA, 80 bp, synthetic construct
  source 1..80: mol_type = other DNA
taccgtgagacctgttcccgccttggcacagctgcctacccgctactggggtcggggatttatcaggtccctgtaggctt

SEQ ID NO: 99499 - DNA, 80 bp, synthetic construct
  source 1..80: mol_type = other DNA
aagctttgacgcttgggagcgtaaccaccgcccgggcgatgaactctaccttactgagccagctgccgcctggttcgagg

SEQ ID NO: 99500 - DNA, 80 bp, synthetic construct
  source 1..80: mol_type = other DNA
ctaataagccaacccagccagccctaacaattactgaggataccgcccgcacggctaaccttgcacttcagattgattct

SEQ ID NO: 99501 - DNA, 80 bp, synthetic construct
  source 1..80: mol_type = other DNA
gctaccgaggtgggtcgtgcctgcgctggctgcactattaaccctgggattgtccactaccagtttactgctggggtccc

SEQ ID NO: 99502 - DNA, 80 bp, synthetic construct
  source 1..80: mol_type = other DNA
cggctccgggaagtctaggtctatacagcagggggatgttgatgttgttgtcgtgccgactcgagagctccgtaacagct

SEQ ID NO: 99503 - DNA, 80 bp, synthetic construct
  source 1..80: mol_type = other DNA
ggcgacgccgcggttttgctgcttttacaccccacacagcagctcgtgtcaccgccggccggcgtgtggtgatagatgag

SEQ ID NO: 99504 - DNA, 80 bp, synthetic construct
  source 1..80: mol_type = other DNA
gcaccttcacttccaccgcacttgctcctgcttcatatgcagcgggcctcttcggtccaccttcttggtgaccccaacca

SEQ ID NO: 99505 - DNA, 80 bp, synthetic construct
  source 1..80: mol_type = other DNA
gattcctgccatcgattttgagcacgctggtttggtcccagcgattcgccctgagctagcccctactagttggtggcacg

SEQ ID NO: 99506 - DNA, 80 bp, synthetic construct
  source 1..80: mol_type = other DNA
ttacccaccgctgccccgctgatgtgtgtgagctcatacgcggggcttacccaaagattcagacgaccagccgcgtgctg

SEQ ID NO: 99507 - DNA, 80 bp, synthetic construct
  source 1..80: mol_type = other DNA
aggtctttattttggaatgagcctgcagtgggtcagaggctggttttcacgcaggcagccaaggctgctaaccctggcgc

SEQ ID NO: 99508 - DNA, 80 bp, synthetic construct
  source 1..80: mol_type = other DNA
aattactgttcatgaggctcagggcgctacatttactgagactaccatcatagccacggccgatgctagaggtcttattc

SEQ ID NO: 99509 - DNA, 80 bp, synthetic construct
  source 1..80: mol_type = other DNA
agtcctcccgtgcacacgccatcgttgcacttactcgccacacagaaaaatgcgtcattcttgacgcccctggcctgttg

SEQ ID NO: 99510 - DNA, 80 bp, synthetic construct
  source 1..80: mol_type = other DNA
cgtgaggtcggcatttctgatataattgttaataacttcttcctggctggtggcgaagtgggccaccatcgcccctctgt

SEQ ID NO: 99511 - DNA, 80 bp, synthetic construct
  source 1..80: mol_type = other DNA
tatacctcgcggcaacccagaccagaacttagacaccctacaagcattccctccgtcctgccaaattagtgcctaccacc

SEQ ID NO: 99512 - DNA, 80 bp, synthetic construct
  source 1..80: mol_type = other DNA
agctggctgaggagctgggccatcggccggctccagtagccgccgtcctgcccccctgccctgagcttgagcaggggtta

SEQ ID NO: 99513 - DNA, 80 bp, synthetic construct
  source 1..80: mol_type = other DNA
ctctatatgccgcaggagcttacggtgtctgatagtgttctagtttttgagctcacggacatagttcactgccgtatggc

SEQ ID NO: 99514 - DNA, 80 bp, synthetic construct
  source 1..80: mol_type = other DNA
attcagatgtccgcgagtctttaaggaggttcatccctactattggaccggtccaggccacaacatgcgagctatatgag

SEQ ID NO: 99515 - DNA, 80 bp, synthetic construct
  source 1..80: mol_type = other DNA
cttgttgaggccatggtggagaagggccaggacggctccgccgttctcgagcttgacctctgtagccgtgatgtctcgcg

SEQ ID NO: 99516 - DNA, 80 bp, synthetic construct
  source 1..80: mol_type = other DNA
tctgccccctgtcgatcgtacatactgttttgatgggttttcccgctgcgcctttgccgctgagaccgggattgccttat

SEQ ID NO: 99517 - DNA, 80 bp, synthetic construct
  source 1..80: mol_type = other DNA
ggcgagactatcgcccacggcaaggtgggccagggcatctcggcttggagtaaaaccttttgtgctttatttggcccgtg

SEQ ID NO: 99518 - DNA, 80 bp, synthetic construct
  source 1..80: mol_type = other DNA
gttccgcgccattgagaaggagatcttggcccttctcccgcccaacattttctatggcgatgcttatgaggagtcagtgt

SEQ ID NO: 99519 - DNA, 80 bp, synthetic construct
  source 1..80: mol_type = other DNA
tttctgcagccatttctggggctggctctagcatggtttttgagaacgatttttctgagttcgatagcacccaaaataac

SEQ ID NO: 99520 - DNA, 80 bp, synthetic construct
  source 1..80: mol_type = other DNA
gcatgccccagtggcttatccgtttttaccacctagtcagatcagcctggaccctgcaagccccgaaagagtctttgaaa

SEQ ID NO: 99521 - DNA, 80 bp, synthetic construct
  source 1..80: mol_type = other DNA
ctatgaattccgtgacttgagagtggcagcgttcaagggagatgattcagtggttctttgtaatgattaccgtcagagcg

SEQ ID NO: 99522 - DNA, 80 bp, synthetic construct
  source 1..80: mol_type = other DNA
gcaatgcggccaccttgatagccggatgtgggttgaagttgaaggttgattaccggcctataggtttgtagcgcctagca

SEQ ID NO: 99523 - DNA, 80 bp, synthetic construct
  source 1..80: mol_type = other DNA
gtttgtgacttccttcgaaggatgacgaatgttgcgcaggtctgtgttgatgttgtgtcccgtgtttatggagttagccc

SEQ ID NO: 99524 - DNA, 80 bp, synthetic construct
  source 1..80: mol_type = other DNA
cgggctggtgcataaccttggcatgctgcagactattgctgacgggaaggcccattttactgagactgtcaagcctgtgc

SEQ ID NO: 99525 - DNA, 80 bp, synthetic construct
  source 1..80: mol_type = other DNA
tggatcttacaaactctatcatacagaggttagaatgaataacatgtcttgtgcatcgcccatgggatcgccatgcgccc

SEQ ID NO: 99526 - DNA, 80 bp, synthetic construct
  source 1..80: mol_type = other DNA
ccccgccaccccccgtcgtcgatctaccccaactggggctgcgccgctaactgctgtttcaccagcgcctgatacagccc

SEQ ID NO: 99527 - DNA, 80 bp, synthetic construct
  source 1..80: mol_type = other DNA
cagttcctgatgttgactctcgcggcgctatcttgcgccgccagtataatttgtccacttctcccctgacttcgtctgtc

SEQ ID NO: 99528 - DNA, 80 bp, synthetic construct
  source 1..80: mol_type = other DNA
gcctctggaactaatcttgtcttgtatgccgccccgcttaatcctcttttgcctctccaagacggcactaacactcacat

SEQ ID NO: 99529 - DNA, 80 bp, synthetic construct
  source 1..80: mol_type = other DNA
gagtgagcgccttcattatcgcaatcagggctggcgctccgttgagacatcgggtgtggctgaggaggaggcgacttcag

SEQ ID NO: 99530 - DNA, 80 bp, synthetic construct
  source 1..80: mol_type = other DNA
gcttggttatgctctgtattcatggttcccctgttaattcctataccaacacgccctatactggggcattggggctcctt

SEQ ID NO: 99531 - DNA, 80 bp, synthetic construct
  source 1..80: mol_type = other DNA
gactttgcactcgagcttgaatttagaaatttaactcctgggaacactaacacccgtgtgtcccgttacactagtacagc

SEQ ID NO: 99532 - DNA, 80 bp, synthetic construct
  source 1..80: mol_type = other DNA
ccggcatcgtttgcgccgtggtgctgatgggacggctgagcttacgaccactgcagccacacgttttatgaaggacctgc

SEQ ID NO: 99533 - DNA, 80 bp, synthetic construct
  source 1..80: mol_type = other DNA
atctcaccgggacaaatggtgttggtgaggtgggccgtggtatagccctaacactattcaatcttgctgatacacttctc

SEQ ID NO: 99534 - DNA, 80 bp, synthetic construct
  source 1..80: mol_type = other DNA
ggcgggttgccgacagaattgatttcgtcggctggaggtcaactgttttactcccgcccggttgtctcagccaatggcga

SEQ ID NO: 99535 - DNA, 80 bp, synthetic construct
  source 1..80: mol_type = other DNA
tcgaccaaccctatgtatgtctcagacactgtcacatttgtcaatgtggctacgggtgctcaggctgtttctcgatccct

SEQ ID NO: 99536 - DNA, 80 bp, synthetic construct
  source 1..80: mol_type = other DNA
tgtcgtgacctacgagggggacactagtgcgggttataaccacgatgtgtctatacttcgtgcatgggtccgtaccacta

SEQ ID NO: 99537 - DNA, 80 bp, synthetic construct
  source 1..80: mol_type = other DNA
aaatgaatgtaggtaagacccgggagtcttaattatttccccttttgtgcccccttctaaatcttgcacctgttattaat

SEQ ID NO: 99538 - DNA, 80 bp, synthetic construct
  source 1..80: mol_type = other DNA
ttgtgcccccttctaaatcttgcacctgttattaattatatctgcgttcgccgctccgacgaaaataaattagcagaaac

SEQ ID NO: 99539 - DNA, 80 bp, synthetic construct
  source 1..80: mol_type = other DNA
aagtagttggtgatcatccactggtaatagagagggttcgtgccatcggctgccattttgttttactccttactgcagcc

SEQ ID NO: 99540 - DNA, 80 bp, synthetic construct
  source 1..80: mol_type = other DNA
tggaatcagaaatgttaagaggattcttaattttaggcaaagaggacaaaagatatggaccagcattgagtatcaatgaa

SEQ ID NO: 99541 - DNA, 80 bp, synthetic construct
  source 1..80: mol_type = other DNA
aatgaggttttggatgtgctctaatgggtcattgcaatgcagaatatgcatttaataattgaatttcacagtgtacagaa

SEQ ID NO: 99542 - DNA, 80 bp, synthetic construct
  source 1..80: mol_type = other DNA
agatggacatggaatatgatgctgttgcaactacacattcttggaaacaaaaaagaaattttttttttctatgagccaag

SEQ ID NO: 99543 - DNA, 80 bp, synthetic construct
  source 1..80: mol_type = other DNA
cttacaatattgtgtaatcctcttaatgcattagggaaggggaaggggatggactcggtaaacagtacacagcaaacacc

SEQ ID NO: 99544 - DNA, 80 bp, synthetic construct
  source 1..80: mol_type = other DNA
agtacagggagggaagatggacatggaatatgatgctgttgcaactacacattcttggataccaaaaaggaatcgttcta

SEQ ID NO: 99545 - DNA, 80 bp, synthetic construct
  source 1..80: mol_type = other DNA
cgggtatgctcaaacagactgtgtcctggaggcaatggctttccttgaagaatcccacccaggaatatttgaaaactctt

SEQ ID NO: 99546 - DNA, 80 bp, synthetic construct
  source 1..80: mol_type = other DNA
ggaaaacaaaagcaacaaaaatgaaggctatactagtagttctgctatatacatttgctacagcagatgcagacacatta

SEQ ID NO: 99547 - DNA, 80 bp, synthetic construct
  source 1..80: mol_type = other DNA
tctggatgtgctctaatgggtctctacagtgtagaatatgtatttaatgttaggatttcagaagcatgagaaaaaacacc

SEQ ID NO: 99548 - DNA, 80 bp, synthetic construct
  source 1..80: mol_type = other DNA
caattgagttcaatatcatcgtttgagagattcgaaatatttccgaaagagagttcatggcccaaacacagtgtaaacaa

SEQ ID NO: 99549 - DNA, 80 bp, synthetic construct
  source 1..80: mol_type = other DNA
atctcaaattcatcgatagacaattgtgacacaaagtgtcaaacaccccgggaggcaataaacagcagccttcctttcca

SEQ ID NO: 99550 - DNA, 80 bp, synthetic construct
  source 1..80: mol_type = other DNA
agtgaaaatgaatccaaatcaaaagataatagcacttggctctgtttctctaaccattgcagcagtctgtttactcatgc

SEQ ID NO: 99551 - DNA, 80 bp, synthetic construct
  source 1..80: mol_type = other DNA
aatgctcctgttatcctcggtatccagaagttgtatgtgtttgcagagacaattggaaggggtctaatagacccgtgctg

SEQ ID NO: 99552 - DNA, 80 bp, synthetic construct
  source 1..80: mol_type = other DNA
acccccaatgctaataccactggtggtcctaataccaccagtggtacagtgacggaggacggaggaatgacaaactgctc

SEQ ID NO: 99553 - DNA, 80 bp, synthetic construct
  source 1..80: mol_type = other DNA
tttcaatactaccacatacatagtaaataaggtaaagaaagaatatgctcttttttataaatctgatgtagagccaatag

SEQ ID NO: 99554 - DNA, 80 bp, synthetic construct
  source 1..80: mol_type = other DNA
cagtagggtgaaagagatggagatagatgcagtgaaaaactgttctttcaatgttacaagtacaaacataaaagataaat

SEQ ID NO: 99555 - DNA, 80 bp, synthetic construct
  source 1..80: mol_type = other DNA
tctttcaatgttaccacaaacataagaaatgaggtgaagaaagcacgtgctatttttgataaacttgatgtaatgcaagt

SEQ ID NO: 99556 - DNA, 80 bp, synthetic construct
  source 1..80: mol_type = other DNA
caatagtagtggcactggtggtgctaatagcactggtaatagcactattagtagcggggaagggacacagatggaacaaa

SEQ ID NO: 99557 - DNA, 80 bp, synthetic construct
  source 1..80: mol_type = other DNA
taatgttgctaatgctggtagtggcactggtgataatagtagcactagtaataacactagtagtagcggggaaggaaaac

SEQ ID NO: 99558 - DNA, 80 bp, synthetic construct
  source 1..80: mol_type = other DNA
gacaacggtagtagcaatagtgacagtaataggaacagtagcaatagcactagtagtagcggggaagggaaacagatgga

SEQ ID NO: 99559 - DNA, 80 bp, synthetic construct
  source 1..80: mol_type = other DNA
aatgaaaaattgctctttcaataccacctcagacatacaagatagaaggcaaaataagtatgcattattttataaaattg

SEQ ID NO: 99560 - DNA, 80 bp, synthetic construct
  source 1..80: mol_type = other DNA
taaagtggagatttaacagcaaactagcatttgaacataaggcccgaatgctgcatccggagttctacaaagactgctga

SEQ ID NO: 99561 - DNA, 80 bp, synthetic construct
  source 1..80: mol_type = other DNA
caccagtgctaatattatctgaaatttgcgtcactctgcactcagatttttccctctaattgcttcaatcagtcgcttta

SEQ ID NO: 99562 - DNA, 80 bp, synthetic construct
  source 1..80: mol_type = other DNA
ttggataagcataaggatgaggtagacaaggctagtgctgacggcatggtgacaaacctcctcaagcacattgccaaaag

SEQ ID NO: 99563 - DNA, 80 bp, synthetic construct
  source 1..80: mol_type = other DNA
cgtcagtacgtaagtgttaactttgagtgtgcatcaagggcgacttgtaggcaacacgatgttctgccttaggctcgtgc

SEQ ID NO: 99564 - DNA, 80 bp, synthetic construct
  source 1..80: mol_type = other DNA
agagtttttcgtaactggtacaggctacttcaatgatgtcctacaatttaggttgcacaacacacccagtactactgagt

SEQ ID NO: 99565 - DNA, 80 bp, synthetic construct
  source 1..80: mol_type = other DNA
ccactctgaccccttcacctacaaccatgcccttcaaatcctactatgccagggggtctttgacctttgattcaggctac

SEQ ID NO: 99566 - DNA, 80 bp, synthetic construct
  source 1..80: mol_type = other DNA
ggcagtacaggactgagataagaattgggcagacctttgtaggctcaaggagattgcttgcagaggtaggcagcagtgac

SEQ ID NO: 99567 - DNA, 80 bp, synthetic construct
  source 1..80: mol_type = other DNA
taacagtttgtaacggttctacaattgtggaccagaggcttggcagtgagttaggctgctatacagttaacagaataagg

SEQ ID NO: 99568 - DNA, 80 bp, synthetic construct
  source 1..80: mol_type = other DNA
atgggcttactaggcacgtggctcagtgtcccaagcgtaaggaaaaggttgaggagactgagttgtacttaaacctagaa

SEQ ID NO: 99569 - DNA, 80 bp, synthetic construct
  source 1..80: mol_type = other DNA
tttaccaaattagagaaagctatacaagtatttgcctcttcatgctaggaagcatcctctttgcagtctcttggttaata

SEQ ID NO: 99570 - DNA, 80 bp, synthetic construct
  source 1..80: mol_type = other DNA
aaggccttggttgatggcattggcaacagtttctttcctggattatctatctgcaaaacatgctctatcggcagtgtgaa

SEQ ID NO: 99571 - DNA, 80 bp, synthetic construct
  source 1..80: mol_type = other DNA
cggattcgagatagagtcacacaagtgttactgcagtctattttgctgtccttactgtagagcttgctcctctgatagga

SEQ ID NO: 99572 - DNA, 80 bp, synthetic construct
  source 1..80: mol_type = other DNA
ctgtcgaagcaagcagcaaagccttactcataagaagtatcataaattccacttttgtggtatgcattctagtgttagca

SEQ ID NO: 99573 - DNA, 80 bp, synthetic construct
  source 1..80: mol_type = other DNA
gagcttaggcgttgaagaagcctccgagcagaagacactcaccatttctgtcatggatctatcgcaaatgtactctcctg

SEQ ID NO: 99574 - DNA, 80 bp, synthetic construct
  source 1..80: mol_type = other DNA
tgctggggagttggaacaggttgcacttgttgcggcctggatgtgaaagagctattcacagactacatgctggtcaagtg

SEQ ID NO: 99575 - DNA, 80 bp, synthetic construct
  source 1..80: mol_type = other DNA
aaggaccagagggctactgaggtacaagcacttaaaggacgaagaagatgctggatacaagaagatcattgatagactca

SEQ ID NO: 99576 - DNA, 80 bp, synthetic construct
  source 1..80: mol_type = other DNA
gttagtcaaccaaacagagtttctgctgcagcagcgcttgtcctttcaatgttgctatatgctttcctgctaaatcatgc

SEQ ID NO: 99577 - DNA, 80 bp, synthetic construct
  source 1..80: mol_type = other DNA
tctagttagcaagcctttcactacttttcagcatttgcaatttacaacagttaatcatgctgcctgttaccaccttggcc

SEQ ID NO: 99578 - DNA, 80 bp, synthetic construct
  source 1..80: mol_type = other DNA
gcaagcctttcactacttttcagcatttgcaatttacaacagttaatcatgctgcctgttaccaccttggcctaatctga

SEQ ID NO: 99579 - DNA, 80 bp, synthetic construct
  source 1..80: mol_type = other DNA
ctgaagcagccttggctccaagcggctcatcgatagctgagagcaacacaacacccataccagctcaagaaaccaccacc

SEQ ID NO: 99580 - DNA, 80 bp, synthetic construct
  source 1..80: mol_type = other DNA
aaaggaattagtgacaacaaccaccactgctgctactactctagccgactcaataagcagatctaagagagactcaaatg

SEQ ID NO: 99581 - DNA, 80 bp, synthetic construct
  source 1..80: mol_type = other DNA
tacaggtaatactgactttccctcaaggccttaggaaatactatagcaaggtgttgaagctcttacacctgactcaagag

SEQ ID NO: 99582 - DNA, 80 bp, synthetic construct
  source 1..80: mol_type = other DNA
gattctgagggcttgctcgagtggtgcacgcggatgttaaaacaggcatgtgacgacagttactttgacaagagaattga

SEQ ID NO: 99583 - DNA, 80 bp, synthetic construct
  source 1..80: mol_type = other DNA
gttctacagatagaaagaagcttttacctcaatcagtgttttctgattctaaggttgttttatcaaggatcaaattcaag

SEQ ID NO: 99584 - DNA, 80 bp, synthetic construct
  source 1..80: mol_type = other DNA
aggacatcaaaccgagtttgaccatgttgatacaaaccttgttccctgacaaattcgaagatttcttggatcgaactcag

SEQ ID NO: 99585 - DNA, 80 bp, synthetic construct
  source 1..80: mol_type = other DNA
agcttgatttaatgaattcactctgttccgatgagaaaagggatgccagaaacgcaagacttcttctgggttgcccgaat

SEQ ID NO: 99586 - DNA, 80 bp, synthetic construct
  source 1..80: mol_type = other DNA
cgccccagtgttagcttcactaaggaagaggtcttaataaaaaggttggagaaaaacttccttaagcagcacaatcagga

SEQ ID NO: 99587 - DNA, 80 bp, synthetic construct
  source 1..80: mol_type = other DNA
tgaagtggggaaagaaactctatgaactttttgctgatgattctttccaggaaaacagaatctacatgcaccccgctgtg

SEQ ID NO: 99588 - DNA, 80 bp, synthetic construct
  source 1..80: mol_type = other DNA
cttgcaatctaccagcaggcagctctaaagtggagaaaggatattggttttcgtgtcaatgctaatacggcagccctgag

SEQ ID NO: 99589 - DNA, 80 bp, synthetic construct
  source 1..80: mol_type = other DNA
cttgcggcacgtcagtacgtaagtatcaactttgagtgtgtgtaaggagcgacagtgagcgtcatgctgtcccattataa

SEQ ID NO: 99590 - DNA, 80 bp, synthetic construct
  source 1..80: mol_type = other DNA
tgagctcaacacaatccaacctgacactctcaaccaccccaaacggcatagcttctgagcagggaccatcaatagccgca

SEQ ID NO: 99591 - DNA, 80 bp, synthetic construct
  source 1..80: mol_type = other DNA
accacagagaagacatcaagcacaactgtcggcatgacgagcgcacaggtcaccacagatgatggctctggggagtccag

SEQ ID NO: 99592 - DNA, 80 bp, synthetic construct
  source 1..80: mol_type = other DNA
atggcattggcaacagtttctttcctggattatctatctgcaaaacatgctctatcggcagtgtgaacggattcgaaata

SEQ ID NO: 99593 - DNA, 80 bp, synthetic construct
  source 1..80: mol_type = other DNA
cacagatcccttaattatcagtgaagcaacttctcctagccccatcatctccactcaggtgcagaaggtggaaacaccca

SEQ ID NO: 99594 - DNA, 80 bp, synthetic construct
  source 1..80: mol_type = other DNA
caaccccaagaccaaacactacagcagacccaggcatgaccaccctagacagcatcacactaggctcatcggatcccatc

SEQ ID NO: 99595 - DNA, 80 bp, synthetic construct
  source 1..80: mol_type = other DNA
ttaaagcaagaccaacatttggagccggagaggtgactgtgttggtggaagttgcagatctagagttgcacacaaagaaa

SEQ ID NO: 99596 - DNA, 80 bp, synthetic construct
  source 1..80: mol_type = other DNA
attgaagtgtcgggtttaaaatttgcaagcctgacctgctctgggtgttactcctgcagctctggcatctcctgcaaggt

SEQ ID NO: 99597 - DNA, 80 bp, synthetic construct
  source 1..80: mol_type = other DNA
ccaaccacgtttctggtcccacaggcagacacatcactcagccccagcaaaacaccaatatcacctactacacaccatca

SEQ ID NO: 99598 - DNA, 80 bp, synthetic construct
  source 1..80: mol_type = other DNA
tttacaacagttaatcaagctgcctgttaccaccttggcctaatctcacttggacttaatcttgactgcgtgccgccact

SEQ ID NO: 99599 - DNA, 80 bp, synthetic construct
  source 1..80: mol_type = other DNA
accaaacgactccagcagtgaccacaaccaaggaagacccaaccacagtcagtcctctaatagttaaagatagcacggcg

SEQ ID NO: 99600 - DNA, 80 bp, synthetic construct
  source 1..80: mol_type = other DNA
gtcatatcaacccgaaacattatcaaccatagcactccaggacagatcaaccccacaacaccaggggctatctccgtgac

SEQ ID NO: 99601 - DNA, 80 bp, synthetic construct
  source 1..80: mol_type = other DNA
ccaaacaacgcaaagacaagaggtaaaggaattagtgacaacaaccaccactgctgctactactctagccgactcaatca

SEQ ID NO: 99602 - DNA, 80 bp, synthetic construct
  source 1..80: mol_type = other DNA
acctatgctatgggtttatttcgccctttgtcagctgctttggagcgatgttgggaccaccaatgggatcagtgtaaatt

SEQ ID NO: 99603 - DNA, 80 bp, synthetic construct
  source 1..80: mol_type = other DNA
gcagatctaagagagactcaaatgtacaggtaatactgactttccctcaaggccttaggaaatactatagcaaggtgttg

SEQ ID NO: 99604 - DNA, 80 bp, synthetic construct
  source 1..80: mol_type = other DNA
ggatattcttattaaacatgaagaccattatcgctctaagctacgttttctgtctagcctttagtcaggaccttctagga

SEQ ID NO: 99605 - DNA, 80 bp, synthetic construct
  source 1..80: mol_type = other DNA
aatgctatgtactcgactctcttcctcctaaactgtcacctgcaactgcgactctcaatcacgttcattttatttgctta

SEQ ID NO: 99606 - DNA, 80 bp, synthetic construct
  source 1..80: mol_type = other DNA
tctcaaagaaatacttgcggcacgtcagtacgtaagtataaactttgtgagtgtgaaaagccatatcccctgagccatgc

SEQ ID NO: 99607 - DNA, 80 bp, synthetic construct
  source 1..80: mol_type = other DNA
tcaatgaggtcttattgtttagaacacctaccacaccagatgtgaccgcaccttcacgggcaaagacatctactaatcag

SEQ ID NO: 99608 - DNA, 80 bp, synthetic construct
  source 1..80: mol_type = other DNA
ccttttaagtcttaccatgctacaggatttgtgacaatcgactcaggctacttctctgcaaagtgctatccgagggtatc

SEQ ID NO: 99609 - DNA, 80 bp, synthetic construct
  source 1..80: mol_type = other DNA
taattcaggcttgcaattgattaacacgacacaacacccctttaacattgccgacacccctggcccgaagcactcaagcc

SEQ ID NO: 99610 - DNA, 80 bp, synthetic construct
  source 1..80: mol_type = other DNA
ttaagacagttaactgcattaatattaaggtttcaacagacaaggaacacaatgaggttgaagtcaatgtactcctccct

SEQ ID NO: 99611 - DNA, 80 bp, synthetic construct
  source 1..80: mol_type = other DNA
caggttgctatcaacctttcgaattgccaggttcagattaagtcgcatgtttgtgactactcactggaagctgatggagc

SEQ ID NO: 99612 - DNA, 80 bp, synthetic construct
  source 1..80: mol_type = other DNA
aataaagctacctcagattacacatgaaggaacctttattccaggaacatacaaaatagtaattgacaaagcaaacaaat

SEQ ID NO: 99613 - DNA, 80 bp, synthetic construct
  source 1..80: mol_type = other DNA
ttaatgataggtgttcgcttataaccaattgtgtcatcaagggaagagaaattaggaaaggacagtcagctctaagacag

SEQ ID NO: 99614 - DNA, 80 bp, synthetic construct
  source 1..80: mol_type = other DNA
tctccaaaggccgatgtttcaaaccatacaaatgccgaccacagaaacaccaccagcaatgccattccagaccaagcacc

SEQ ID NO: 99615 - DNA, 80 bp, synthetic construct
  source 1..80: mol_type = other DNA
tacagaacagagatcaaaatcggccaggcagcttccggttccagaagactactagctgaaggtggtaccagtgactgtat

SEQ ID NO: 99616 - DNA, 80 bp, synthetic construct
  source 1..80: mol_type = other DNA
ttcaaggacacagttaattaagacagagacagcagaaatccatgacgacggttatggtggacccggtgaaaaaattacca

SEQ ID NO: 99617 - DNA, 80 bp, synthetic construct
  source 1..80: mol_type = other DNA
ttcaggttatgtgaaaacagtgctaaaggaaagggctgtatagtagatagcgtcccagtcaagtgcagacaaggattttg

SEQ ID NO: 99618 - DNA, 80 bp, synthetic construct
  source 1..80: mol_type = other DNA
aacctagttgatctaggctgtccaaatgtcccacttctaggaaggacagctatatacatctgcagaatgtccaaccatcc

SEQ ID NO: 99619 - DNA, 80 bp, synthetic construct
  source 1..80: mol_type = other DNA
caagactaccatggcatttctcttttggttcagcttcgggtacgtggttacatgtatactgtgcaaggcattattttatg

SEQ ID NO: 99620 - DNA, 80 bp, synthetic construct
  source 1..80: mol_type = other DNA
tgcttatagtagtaggcatgctaggaaaaaggctcaagcagtacagagagctgaaaccacaggtgtgcaccatctgcgag

SEQ ID NO: 99621 - DNA, 80 bp, synthetic construct
  source 1..80: mol_type = other DNA
acatctcccgtgaatgctattgatgctgagatgcatgacctcaactgtagttacaacatatgtccttactgtgcatccag

SEQ ID NO: 99622 - DNA, 80 bp, synthetic construct
  source 1..80: mol_type = other DNA
accaggcacaaccccaaaatcaacagctgagagcagtacaacgcaagctgcggaaattgagggctccggagacagcactc

SEQ ID NO: 99623 - DNA, 80 bp, synthetic construct
  source 1..80: mol_type = other DNA
atgaacttaccagacatgttgtccggtgcccaaggcggaaggagaaagtggatgaaactgaactttacctgaatctggag

SEQ ID NO: 99624 - DNA, 80 bp, synthetic construct
  source 1..80: mol_type = other DNA
agagtgccctggcttgtgagaaaacttttattagtttctgagtcaacaggtatagccatgaagaggagcagctggctact

SEQ ID NO: 99625 - DNA, 80 bp, synthetic construct
  source 1..80: mol_type = other DNA
agtgctcatcatactacttgttgtttccatgtcacctgtgtactcggcaccagtcagccaaagagaagaaattgtagcat

SEQ ID NO: 99626 - DNA, 80 bp, synthetic construct
  source 1..80: mol_type = other DNA
accaaatgagggaaagctacacaggtgtctgtctttttttgcttggtggagttctattcttgacttctaaattaattaaa

SEQ ID NO: 99627 - DNA, 80 bp, synthetic construct
  source 1..80: mol_type = other DNA
ggcatagcagacagcattaacaataacttcttcccagggctctcattctgcaaaacttgctcgatcggcagcataaatgg

SEQ ID NO: 99628 - DNA, 80 bp, synthetic construct
  source 1..80: mol_type = other DNA
ttttgaaatagaatcacacaaatgctactgcagccttctctgctgcccctattgcagagcttgttcaactgatagagaga

SEQ ID NO: 99629 - DNA, 80 bp, synthetic construct
  source 1..80: mol_type = other DNA
gagacacaccaatttcacttgagtgtatgcagagggagaaggaccggaagcagtgtcatgctagccgtctgcaaacgcat

SEQ ID NO: 99630 - DNA, 80 bp, synthetic construct
  source 1..80: mol_type = other DNA
gtgctttagaacaactatggaagtaaacagaaaagcaacccacatcagaaatgccatcaatgccaccttcattgtgtgca

SEQ ID NO: 99631 - DNA, 80 bp, synthetic construct
  source 1..80: mol_type = other DNA
tactaatactggccacctgtattatcagcacgtctgctgtggatatggaagatctgcctgcaggcacttgggagagagaa

SEQ ID NO: 99632 - DNA, 80 bp, synthetic construct
  source 1..80: mol_type = other DNA
gaggacctaaccaacttctgccaccaggagtgccaggtaacagagacggaatgtctctgcccttatgaaactgttttgct

SEQ ID NO: 99633 - DNA, 80 bp, synthetic construct
  source 1..80: mol_type = other DNA
cctcctttcactccattagcatccaaccaggtgcaacccgaccacagcctgtcacagacctacccacctcagtagacacc

SEQ ID NO: 99634 - DNA, 80 bp, synthetic construct
  source 1..80: mol_type = other DNA
atcatccagcacacgaacagtgcaacatctggcaccttcaacgatgagagcgtcacaattgctgacctccaatcaaatgc

SEQ ID NO: 99635 - DNA, 80 bp, synthetic construct
  source 1..80: mol_type = other DNA
agccaatggtcttgaagagcatccgacacctcagagcccccatcatctgtcaaggggtcttctctcagcacagagcacag

SEQ ID NO: 99636 - DNA, 80 bp, synthetic construct
  source 1..80: mol_type = other DNA
cttgattcagtcagaagttttttttatgggctcaagaacatgctcagtggtgtctttggcaatgtcttcctgggcatcct

SEQ ID NO: 99637 - DNA, 80 bp, synthetic construct
  source 1..80: mol_type = other DNA
cctattttttgcaccatttattctgttaatccttttcttcttcttaggttggaggatcctgttctgcttgaagtgctgta

SEQ ID NO: 99638 - DNA, 80 bp, synthetic construct
  source 1..80: mol_type = other DNA
gaaggacaagggggctgcttaaacacaagcacactaaagacgacggggagactggttataggagaatcattgacagacta

SEQ ID NO: 99639 - DNA, 80 bp, synthetic construct
  source 1..80: mol_type = other DNA
aaaacacacattggttaacctgggagaatgctgtaccgtgtacgacaggttcccgccttcaacactaccaaaagcaaact

SEQ ID NO: 99640 - DNA, 80 bp, synthetic construct
  source 1..80: mol_type = other DNA
cagctctactatctaacttcatcatttctgtatggctaatcacaaaactgcacaatgcccttcttagctttactttgata

SEQ ID NO: 99641 - DNA, 80 bp, synthetic construct
  source 1..80: mol_type = other DNA
tatggctaatcacaaaactgcacaatgcccttcttagctttactttgataatattgactgcgtgccgccactatatcttt

SEQ ID NO: 99642 - DNA, 80 bp, synthetic construct
  source 1..80: mol_type = other DNA
agcaggggcatcaagcagtaaccacagccacagtcacggaaaaggacatgaataccgacagctcacaggcaacacccgaa

SEQ ID NO: 99643 - DNA, 80 bp, synthetic construct
  source 1..80: mol_type = other DNA
aaccacacccacactccaatcccagaccatcgccctacaggagaaggccccaacagcaccccaagccaggccacatctct

SEQ ID NO: 99644 - DNA, 80 bp, synthetic construct
  source 1..80: mol_type = other DNA
ctcgcagtcacagctaactaaccccaaggagggcccaactccaccgagcaccatcctgaaagccgtgtcccacccgccgc

SEQ ID NO: 99645 - DNA, 80 bp, synthetic construct
  source 1..80: mol_type = other DNA
cgtgctacgctacgtttgtctcattgggatttctcatcttgtgccagcagccatgggcggctgaggcaaaggcctggaca

SEQ ID NO: 99646 - DNA, 80 bp, synthetic construct
  source 1..80: mol_type = other DNA
aggccgatctcaccaacctaacaagtagatctaggaggaactctgatgtagagataatcctgacactctcccagggtttg

SEQ ID NO: 99647 - DNA, 80 bp, synthetic construct
  source 1..80: mol_type = other DNA
aaaaagtaccacagtaagttgttgaggctaatgcacctcacactggaagaagactcagaaggtctacttgagtggtgcac

SEQ ID NO: 99648 - DNA, 80 bp, synthetic construct
  source 1..80: mol_type = other DNA
acgcaatttaggccagacctgtgatgacagctatttccagaaaaggttggtggagttttttttgactggagtgggatact

SEQ ID NO: 99649 - DNA, 80 bp, synthetic construct
  source 1..80: mol_type = other DNA
ctctatgtgccttctactttcaaaacgaatgcagcaaaagagatgggcccagatgttctttcacggcattgttaagccta

SEQ ID NO: 99650 - DNA, 80 bp, synthetic construct
  source 1..80: mol_type = other DNA
ataagaacaaaaaaaagttcataacaaattgccttctcagtacggcattgtctggaaagaaggtgtacaaggtccttggc

SEQ ID NO: 99651 - DNA, 80 bp, synthetic construct
  source 1..80: mol_type = other DNA
aacatgctagctatgcaggttgataacattttcctacgccctgtggacagacaggacagtttgaattagactaatcacta

SEQ ID NO: 99652 - DNA, 80 bp, synthetic construct
  source 1..80: mol_type = other DNA
atactgaatcttttacacagattgactgctttacatttccattaattggattggcctagatgtgctgtcactcatctttc

SEQ ID NO: 99653 - DNA, 80 bp, synthetic construct
  source 1..80: mol_type = other DNA
tacacagattgactgctttacatttccattaattggattggcctagatgtgctgtcactcatctttcctcactattctct

SEQ ID NO: 99654 - DNA, 80 bp, synthetic construct
  source 1..80: mol_type = other DNA
gcctagatgtgctgtcactcatctttcctcactattctcttagtagttttattattacaagggtgtggggggaacgattt

SEQ ID NO: 99655 - DNA, 80 bp, synthetic construct
  source 1..80: mol_type = other DNA
aacttagggaatgaactgctgtataaggcacctagaaaagccttagctactgtctgtagtgccctattcgggaagcagat

SEQ ID NO: 99656 - DNA, 80 bp, synthetic construct
  source 1..80: mol_type = other DNA
gagaagccttccgccagggagaaagatggtggtctggcggaacaagacagccagcaaggttccaatgagcacgggaactc

SEQ ID NO: 99657 - DNA, 80 bp, synthetic construct
  source 1..80: mol_type = other DNA
cgacaactgccacccgaatggtataagtatcagcaatgtatccaatgtgtgcaagaggtgccccaagatagaagtggtta

SEQ ID NO: 99658 - DNA, 80 bp, synthetic construct
  source 1..80: mol_type = other DNA
ccaagctactgatctgtttatatcgggaaaatgacgaagaactaataaatagttccagtttaaaacttggttttttggta

SEQ ID NO: 99659 - DNA, 80 bp, synthetic construct
  source 1..80: mol_type = other DNA
agtttggacgaagtcactatatccaagaggcaggcagagctgttgagacaaaaggcatctcagttgtccaagctggtcaa

SEQ ID NO: 99660 - DNA, 80 bp, synthetic construct
  source 1..80: mol_type = other DNA
atggagtctactcagcagatggcatcttctatcattaactcttcttttgaagttgcagcgacaactgcagcttcaaaaga

SEQ ID NO: 99661 - DNA, 80 bp, synthetic construct
  source 1..80: mol_type = other DNA
atgggtaagcttttccatctcaattccgcattgagcgcgctctctctaaggaacagaacactacatacaatactagagga

SEQ ID NO: 99662 - DNA, 80 bp, synthetic construct
  source 1..80: mol_type = other DNA
cccccagctgaagaatagcttccttcttctctctattaaagaggtctagaaaaaactcctcattaaaatcaccattttta

SEQ ID NO: 99663 - DNA, 80 bp, synthetic construct
  source 1..80: mol_type = other DNA
gtgtccaggaggcactgtattccatcattcaaatcgctggggctgcgttcgtcaccacgcgcatcgccaagcgcatgaac

SEQ ID NO: 99664 - DNA, 80 bp, synthetic construct
  source 1..80: mol_type = other DNA
tttgtggggctcggacttggcgaccatgatacggtgcgcccgggcttttggaggccttatggatgagctcaaggcacact

SEQ ID NO: 99665 - DNA, 80 bp, synthetic construct
  source 1..80: mol_type = other DNA
ctatcgggggcaccgccaggaagagccaatcttagggatgctgtccctgctcggggttcctccaataaaacttctaattc

SEQ ID NO: 99666 - DNA, 80 bp, synthetic construct
  source 1..80: mol_type = other DNA
atcaaagtaggaatttgtcacctttcatgaggggggcccacaacatttcgtatgtcaccccaccatctagtagaccctcc

SEQ ID NO: 99667 - DNA, 80 bp, synthetic construct
  source 1..80: mol_type = other DNA
accccaccatctagtagaccctccagccaaggcacagtctcaaccgtgcctaaagaggttttggactcctggactggcgc

SEQ ID NO: 99668 - DNA, 80 bp, synthetic construct
  source 1..80: mol_type = other DNA
ttgggaacaagagctacagcatgggaggttattcttcaaaacctcgaaaaggcatggggacgaatctttctgttcccaat

SEQ ID NO: 99669 - DNA, 80 bp, synthetic construct
  source 1..80: mol_type = other DNA
atcactcaccaacctcttgtcctctaatttgtcctggctatcgctagatgtgtctgcggcgttttatcatattcctcttc

SEQ ID NO: 99670 - DNA, 80 bp, synthetic construct
  source 1..80: mol_type = other DNA
ctgggaacaagagctacagcatggggcagaatctttccaccagcaatcctctgggattctttcccgaccaccagttggat

SEQ ID NO: 99671 - DNA, 80 bp, synthetic construct
  source 1..80: mol_type = other DNA
atcactcaccaacctcctgtcctccaacctgtcctggttatcgttggatgtgtctgcggcgttttatcatcttcctcttc

SEQ ID NO: 99672 - DNA, 80 bp, synthetic construct
  source 1..80: mol_type = other DNA
tcttattgggaaacaaattgtggattggattttgaaagaagggtccagcgagacacttaagatgaccactgcttctatgc

SEQ ID NO: 99673 - DNA, 80 bp, synthetic construct
  source 1..80: mol_type = other DNA
aaccacactgtaaccggagtgtcagcctcatgctcccacaatggggaaggaagtttttacagaaatctggtctggctgac

SEQ ID NO: 99674 - DNA, 80 bp, synthetic construct
  source 1..80: mol_type = other DNA
acctctaaagcaccaatggacaagtgtgatgcaaagtgtcaaacacctaaaggagctataaacagcaatcttcctttcca

SEQ ID NO: 99675 - DNA, 80 bp, synthetic construct
  source 1..80: mol_type = other DNA
caggagaccagcgcgtgggcctcattccacgcaatggcgtcgaccattgggacgcgtacaaaggggagagagtcgttcta

SEQ ID NO: 99676 - DNA, 80 bp, synthetic construct
  source 1..80: mol_type = other DNA
accacttgaggagcgctagaatcaggtactatgtcaagtgtgtccaagaggccttgtattccatcatccaaattgctggg

SEQ ID NO: 99677 - DNA, 80 bp, synthetic construct
  source 1..80: mol_type = other DNA
attggaacctgtgatgatccccctacccgatgttaggaacaatttctaccattacaaccagacaaatgaccccaccctca

SEQ ID NO: 99678 - DNA, 80 bp, synthetic construct
  source 1..80: mol_type = other DNA
attgtccggagaaacattcccctacgtggcctttgacaacaactgttacaccttctgttgctgggtcctggatctaaatg

SEQ ID NO: 99679 - DNA, 80 bp, synthetic construct
  source 1..80: mol_type = other DNA
ccacaaggggagatggctcgacccgtgctcacaaagccacagtgtacactgggagcgcccccttttccccaaaattgggc

SEQ ID NO: 99680 - DNA, 80 bp, synthetic construct
  source 1..80: mol_type = other DNA
agaatccagtttgaaaccgacacggaccgtgaccttgaagccaaccaaaacacaaagttcaccccagtcggtgtcatcca

SEQ ID NO: 99681 - DNA, 80 bp, synthetic construct
  source 1..80: mol_type = other DNA
cctcgggggcgctgccaggaagagctagggctgccgcccctacccggggttcctccagcatgtcttctatctcctcttct

SEQ ID NO: 99682 - DNA, 80 bp, synthetic construct
  source 1..80: mol_type = other DNA
gctacctctgtgtattcaaatcaaaccacttcaacgaggcttagttctacagctggttctggaactagtgtctcgagcct

SEQ ID NO: 99683 - DNA, 80 bp, synthetic construct
  source 1..80: mol_type = other DNA
ggtcagaataggggtttcaccccaccatctagcagatcctccagccaaggcacagtctcaaccgtgcccaaagaagtttt

SEQ ID NO: 99684 - DNA, 80 bp, synthetic construct
  source 1..80: mol_type = other DNA
ggcgctttcaacacgcgcaggcagcctctcttcgcccacattcgcaggcgaggggagtcacgggtgtaaagtgaaaagac

SEQ ID NO: 99685 - DNA, 80 bp, synthetic construct
  source 1..80: mol_type = other DNA
accctgctttcgctgatcacgcgtaagcagggttgataatcactcaatgagtgacatcgaagccatggcgtctcaaggca

SEQ ID NO: 99686 - DNA, 80 bp, synthetic construct
  source 1..80: mol_type = other DNA
atgtgcaaccaaagtgtcattacatatgtaaataacacatgggtgaaccgaacttatgtgaacattagcaataccaacat

SEQ ID NO: 99687 - DNA, 80 bp, synthetic construct
  source 1..80: mol_type = other DNA
gtctattgttacagataggaaacatagtctcgttatggattagccattcaattcagaccggatgggaaaatcacactgag

SEQ ID NO: 99688 - DNA, 80 bp, synthetic construct
  source 1..80: mol_type = other DNA
ataagacaagcacattgtaaccttagtaaaacacaatgggaaaacactttagaacagatagctataaaattaaaagaaca

SEQ ID NO: 99689 - DNA, 80 bp, synthetic construct
  source 1..80: mol_type = other DNA
atttgggaataataaaacaataatctttaatccatcctcaggaggggacccagaaattgtaacacacagttttaattgtg

SEQ ID NO: 99690 - DNA, 80 bp, synthetic construct
  source 1..80: mol_type = other DNA
gaggggaatttttctactgtaattcaacacaactgtttacttggaatgatactagaaagttaaataacactggaagaaat

SEQ ID NO: 99691 - DNA, 80 bp, synthetic construct
  source 1..80: mol_type = other DNA
aggacaaattagatgttcatcaaatattacagggctgctattaacaagagatagtggtaaggacacgaacgggactgaga

SEQ ID NO: 99692 - DNA, 80 bp, synthetic construct
  source 1..80: mol_type = other DNA
cttggatgaaatgggaaagagaaattgacaattacacacacataatatactccttaattgaacaatcgcagaaccaacaa

SEQ ID NO: 99693 - DNA, 80 bp, synthetic construct
  source 1..80: mol_type = other DNA
gaagaagaaggtggagagagagacagagacagatccggtccattagtggatggatccttagcacttatctgggacgatct

SEQ ID NO: 99694 - DNA, 80 bp, synthetic construct
  source 1..80: mol_type = other DNA
aagtattacaagcagcttatagagctattcgccacatacctagaagaataagacagggcttggaaaggattttgctataa

SEQ ID NO: 99695 - DNA, 80 bp, synthetic construct
  source 1..80: mol_type = other DNA
ttgctcaatgccacagccatagcagtagctgaggggacagatagggttatagaagtattacaagcagcttatagagctat

SEQ ID NO: 99696 - DNA, 80 bp, synthetic construct
  source 1..80: mol_type = other DNA
acaagcataagagataaggtacagaaagaatatgcacttttttataaccttgatgtagtaccaatagataatgctagcta

SEQ ID NO: 99697 - DNA, 80 bp, synthetic construct
  source 1..80: mol_type = other DNA
taggttgataagttgtaacacctcagtcattacacaggcctgtccaaaggtatcctttgagccaattcccatacattatt

SEQ ID NO: 99698 - DNA, 80 bp, synthetic construct
  source 1..80: mol_type = other DNA
gtgccccggctggttttgcgattctaaaatgtaatgataaaaagttcaatggaacaggaccatgtacaaatgtcagcaca

SEQ ID NO: 99699 - DNA, 80 bp, synthetic construct
  source 1..80: mol_type = other DNA
atgagagcgacggaaatcaggaagaattatcagcacttgtggaaagggggcaccttgctccttgggatgttgatgatctg

SEQ ID NO: 99700 - DNA, 80 bp, synthetic construct
  source 1..80: mol_type = other DNA
gtacaatgtacacatggaattaggccagtagtatcaactcaactgctgttaaatggcagtctagcagaagaagagatagt

SEQ ID NO: 99701 - DNA, 80 bp, synthetic construct
  source 1..80: mol_type = other DNA
aattagatctgaaaatttcacaaacaatgctaaaactataatagtacagctgaacgaatctgtagtaattaattgtacaa

SEQ ID NO: 99702 - DNA, 80 bp, synthetic construct
  source 1..80: mol_type = other DNA
gacccaacaacaatacaagaaaaagtataaatataggaccagggagagcattgtatacaacaggagaaataataggagat

SEQ ID NO: 99703 - DNA, 80 bp, synthetic construct
  source 1..80: mol_type = other DNA
tgaatgaagatggcgtctaacgacgcttccgctgccgctggcaactttaacattgccaacaacagtgaaaacactccccc

SEQ ID NO: 99704 - DNA, 80 bp, synthetic construct
  source 1..80: mol_type = other DNA
attcaccgccgagaagatcggccgaatgctatcatcagctgcatcgacccttagggcctgtaaagacctaggtaactacg

SEQ ID NO: 99705 - DNA, 80 bp, synthetic construct
  source 1..80: mol_type = other DNA
tagaggatgctgtcttagacatggaagcgattggaaataatcacctcactgctctgctgaaagacagggacagcctccta

SEQ ID NO: 99706 - DNA, 80 bp, synthetic construct
  source 1..80: mol_type = other DNA
acctacatgaagactctagacctcgaagaggaaaaggcaagaaagttatccacaaaatcatcttcccctgacatcgtggg

SEQ ID NO: 99707 - DNA, 80 bp, synthetic construct
  source 1..80: mol_type = other DNA
taccatcaatgccatactagccagaattgccgcggctaggtctctcctacacagagccaaagaagaaatgtacagcagac

SEQ ID NO: 99708 - DNA, 80 bp, synthetic construct
  source 1..80: mol_type = other DNA
ctaggcctgtcgtggtgatgatatcaggaagaccaggggttggtaaaacccatatggctagacacctcgccaagagtgtg

SEQ ID NO: 99709 - DNA, 80 bp, synthetic construct
  source 1..80: mol_type = other DNA
gcgggcaccatgagcggtgaccaaagggttggcctcatcccccgtaatggagttgatcactgggatgcctacagggtgga

SEQ ID NO: 99710 - DNA, 80 bp, synthetic construct
  source 1..80: mol_type = other DNA
gcgggcaccatgagcggtgaccaaagggtgggcctcatcccccgtaatggagttgatcactgggatgcctacagggggga

SEQ ID NO: 99711 - DNA, 80 bp, synthetic construct
  source 1..80: mol_type = other DNA
ccaagccaccagaagtgaaaaccaaagatcaacccagggtgctggtcaatggtaaggccctggaggtgccgcccccacca

SEQ ID NO: 99712 - DNA, 80 bp, synthetic construct
  source 1..80: mol_type = other DNA
acgagttgtcttgtgggacgactatggcatgggtaacccagtgaaggacgcccttgctctgcaagaactagcagacactt

SEQ ID NO: 99713 - DNA, 80 bp, synthetic construct
  source 1..80: mol_type = other DNA
acgcagaggccccgaccattgagaaggcgaagaaggatttccccgggcaaccagacatgtggaaggagcacttcaaagca

SEQ ID NO: 99714 - DNA, 80 bp, synthetic construct
  source 1..80: mol_type = other DNA
gacttctctcatctcaaactcacactggctccgcaaggcggttttgacaagaacggcaacacgccacatgggaaggggac

SEQ ID NO: 99715 - DNA, 80 bp, synthetic construct
  source 1..80: mol_type = other DNA
tatgaagaccttaacacagggttccctcacagcaagagtggctgggcttgtgcacgaaaggaaagacgagttccagttac

SEQ ID NO: 99716 - DNA, 80 bp, synthetic construct
  source 1..80: mol_type = other DNA
agggtggggagttgcaggtctacaactttgacacaaacaaggtatcggctttcaggaagcttgctgcagacaacaactat

SEQ ID NO: 99717 - DNA, 80 bp, synthetic construct
  source 1..80: mol_type = other DNA
gacaatgagagtcggctcctcactcaaggacgtcaagacagtggaagatcttaaatgtgccctcaggagtgtcagtttca

SEQ ID NO: 99718 - DNA, 80 bp, synthetic construct
  source 1..80: mol_type = other DNA
aagaatgtgagataatctacaagaatgtcaagtaccgcatatcatcagacggttgcggtaaggtcagcatagagaaactg

SEQ ID NO: 99719 - DNA, 80 bp, synthetic construct
  source 1..80: mol_type = other DNA
gcagataacaactcccaaacaaccagagagattatcacggccgtcactagactacgacaggctcgtgctaggtactacat

SEQ ID NO: 99720 - DNA, 80 bp, synthetic construct
  source 1..80: mol_type = other DNA
ccaaatggtgaagacgtggtttactataacagcaaggatgacactgtgcacggcctaccaaatctaacaacagtcagctg

SEQ ID NO: 99721 - DNA, 80 bp, synthetic construct
  source 1..80: mol_type = other DNA
cagctgtttccaagacctagtctacacactcttgcaggttgccggagcctcatttgtcattaatagaatagttaagaagt

SEQ ID NO: 99722 - DNA, 80 bp, synthetic construct
  source 1..80: mol_type = other DNA
tcaactgggaacgatgggtcaaggctccggaaacagatgaacccacaccaagtaatgacaagcccgacactgaagaggaa

SEQ ID NO: 99723 - DNA, 80 bp, synthetic construct
  source 1..80: mol_type = other DNA
tgggagatcgcccccaaagatgtggactctgagggtaaaaaggggaagaacaagaagggcaggtgacgtaagcacactgc

SEQ ID NO: 99724 - DNA, 80 bp, synthetic construct
  source 1..80: mol_type = other DNA
tgggagatcgcccccaaagatgtggactctgagggtaaaaaggggaagaacaagaagggcaggggacgtaagcacactgc

SEQ ID NO: 99725 - DNA, 80 bp, synthetic construct
  source 1..80: mol_type = other DNA
attctccagcaaagggcttagtgatgaggagtatgatgaattcaaaagactgagggaagagaaacagggccgctacacaa

SEQ ID NO: 99726 - DNA, 80 bp, synthetic construct
  source 1..80: mol_type = other DNA
tagaggagtacctccaggacagagaccggtactatgaagagctggcagtggcccgggccactgaagagaacttctgtgaa

SEQ ID NO: 99727 - DNA, 80 bp, synthetic construct
  source 1..80: mol_type = other DNA
agcggggggttctgggactcgtcacaggagcagacatcaggaaacggagacccgatgatttccaaccaaaaggaaaactg

SEQ ID NO: 99728 - DNA, 80 bp, synthetic construct
  source 1..80: mol_type = other DNA
tgggcagatgattctaggagcgtcgactacaatgagaagatcgagtttgaagctcctcctagcgtctggtcaagaatcgt

SEQ ID NO: 99729 - DNA, 80 bp, synthetic construct
  source 1..80: mol_type = other DNA
cccgcttgggactggttggggattctgggtctcatccaacttactaatcaccaccacacatgtgctgcccaaaggcatca

SEQ ID NO: 99730 - DNA, 80 bp, synthetic construct
  source 1..80: mol_type = other DNA
aagagctttttggggtggacatcaaacaagtccaagttcacaaatcaggtgaattttgcagattcaggttcccaaaacca

SEQ ID NO: 99731 - DNA, 80 bp, synthetic construct
  source 1..80: mol_type = other DNA
tgaaggcgaaaaccttccgtacacagttcctcctctcagcgagagagagcacagggcagcaccagaaccattacctggca

SEQ ID NO: 99732 - DNA, 80 bp, synthetic construct
  source 1..80: mol_type = other DNA
gtgaggccagatgtctctgggttggtactagaagaaggggcccccgaaggcacagtgtgctctgttctcatcaagaggtc

SEQ ID NO: 99733 - DNA, 80 bp, synthetic construct
  source 1..80: mol_type = other DNA
aacaggagagatgatcccccttgcagttaggatgggcacccacgcctctatgaagatccaggggcgcgctgttggcggcc

SEQ ID NO: 99734 - DNA, 80 bp, synthetic construct
  source 1..80: mol_type = other DNA
tgctgctcactggagccaacgctaagaacatggatttgggtaccggccccggggattgtggttgcccgtacatatacaag

SEQ ID NO: 99735 - DNA, 80 bp, synthetic construct
  source 1..80: mol_type = other DNA
aggggcaatgacatcgtggtggccggcgtccacacagcagcagcgcgtggaggcaacacggtcatctgtgcaacccaagg

SEQ ID NO: 99736 - DNA, 80 bp, synthetic construct
  source 1..80: mol_type = other DNA
aggggcaatgacatcgtggtggccggcgtccacacagcagcagcgcgtgggggcaacacggtcatctgtgcaacccaagg

SEQ ID NO: 99737 - DNA, 80 bp, synthetic construct
  source 1..80: mol_type = other DNA
acctgatggtgaggcagtgttggaagggggagaggaccacggtacttactgtggagccccaatattagcccctggtaaag

SEQ ID NO: 99738 - DNA, 80 bp, synthetic construct
  source 1..80: mol_type = other DNA
cgccgaagcttagcacaaagactaagttttggcgctcatcccctgattcccttccccctgggacgtatgaaccagcttac

SEQ ID NO: 99739 - DNA, 80 bp, synthetic construct
  source 1..80: mol_type = other DNA
cttgggggtaaggatccccgtgtggagaaagggccatcactccaacaagtgatgcgagaccaactcaaacccttcacaga

SEQ ID NO: 99740 - DNA, 80 bp, synthetic construct
  source 1..80: mol_type = other DNA
acccaggggcaagccacctaggccgtcagtgctggaggaagccaagaagacagtcatgaatgtactggagcagaccatag

SEQ ID NO: 99741 - DNA, 80 bp, synthetic construct
  source 1..80: mol_type = other DNA
atggacctactctcaagcctgtgcttcattggataaaacaacatccagtggcagtcctcaccacgtcaggaagaatgaac

SEQ ID NO: 99742 - DNA, 80 bp, synthetic construct
  source 1..80: mol_type = other DNA
ccatactagagatgtgggatggtgaattctaccattatgcgatatatgtctctggtggtaaggccataggggtgcacaaa

SEQ ID NO: 99743 - DNA, 80 bp, synthetic construct
  source 1..80: mol_type = other DNA
gaggttgttgtgggggtctgatctggggacaatggtgaggtgtgctcgagcgtttggaggattgctcgacagcatgaaag

SEQ ID NO: 99744 - DNA, 80 bp, synthetic construct
  source 1..80: mol_type = other DNA
agagctgcatctccttaccctgtagggttggcatgaacataaatgaagatggaccactcatatttgaaaaacattccaaa

SEQ ID NO: 99745 - DNA, 80 bp, synthetic construct
  source 1..80: mol_type = other DNA
tcctgagtgcagccatggaggtaatggtgaaattctctgctgagccggaactggctcaggtggttgccgaagacctcctt

SEQ ID NO: 99746 - DNA, 80 bp, synthetic construct
  source 1..80: mol_type = other DNA
gcacccagccgtcttgacgtgggtgacttcgtcatctccgttcaagagggtcttccatcgggtgtcccctgcacgtcaca

SEQ ID NO: 99747 - DNA, 80 bp, synthetic construct
  source 1..80: mol_type = other DNA
ctgaggttgtgcaagccaactcctgtttctcattctatggggatgatgagatagtcagcacagatataaacctagaccca

SEQ ID NO: 99748 - DNA, 80 bp, synthetic construct
  source 1..80: mol_type = other DNA
gaaaaactcaccaggaaactgagggagtatggcctcgtcccaacaaggccagacaaaactgagggcccacttgtgatcac

SEQ ID NO: 99749 - DNA, 80 bp, synthetic construct
  source 1..80: mol_type = other DNA
tcaggatttgaatggtctcacattcttgaggcgaaccatagtgcgggaccccgcaggttggtttggaaaattggaccgtg

SEQ ID NO: 99750 - DNA, 80 bp, synthetic construct
  source 1..80: mol_type = other DNA
attccattctaaggcagttatactggaccagaggacccaatcatgagaacccctttgaaagcatgattccccactcccag

SEQ ID NO: 99751 - DNA, 80 bp, synthetic construct
  source 1..80: mol_type = other DNA
cccccagctgcaatcagccttgccaccatcgagcttacacctatatcgctttactggaggcctgtttatgtccccaatta

SEQ ID NO: 99752 - DNA, 80 bp, synthetic construct
  source 1..80: mol_type = other DNA
ccatagagcctgttgcaggggcctctttagcagcccctgtcgtaggacaacttaatataattgatccctggattagaaat

SEQ ID NO: 99753 - DNA, 80 bp, synthetic construct
  source 1..80: mol_type = other DNA
tgctggagaattcactgtttcgcctagaaatgctccaggtgaatttttgttagatctagagttaggtccagaactgaatc

SEQ ID NO: 99754 - DNA, 80 bp, synthetic construct
  source 1..80: mol_type = other DNA
cttatcttgctcaccttgcacgcatgtataatgggcatgcaggtggtatggaggtgcagatagtgcttgctgggaatgcg

SEQ ID NO: 99755 - DNA, 80 bp, synthetic construct
  source 1..80: mol_type = other DNA
ttcacagcgggcaaaatactgtttgcagtcataccacctggattcccctatgaaaatttgtcacctgcacaattgaccat

SEQ ID NO: 99756 - DNA, 80 bp, synthetic construct
  source 1..80: mol_type = other DNA
gtgcccgcatgtagtggtggatgtgagacagcttgaaccaatcctgctgcccatgccagacatccgtaatacattcttcc

SEQ ID NO: 99757 - DNA, 80 bp, synthetic construct
  source 1..80: mol_type = other DNA
attacaatcagagcaatgggccaaaactcagattagtagccatgctttacacacccctaagggctaacaatgctggtgat

SEQ ID NO: 99758 - DNA, 80 bp, synthetic construct
  source 1..80: mol_type = other DNA
cttggtccaccctgacacactcaagagcttagctggtgaaaaatttccatacaccgcatttagcaataattgttacaatt

SEQ ID NO: 99759 - DNA, 80 bp, synthetic construct
  source 1..80: mol_type = other DNA
gatgtcttcacagtctcctgcagggttttgactcgtccgtcaccagattttgaattcaattttcttgtccccccatctgt

SEQ ID NO: 99760 - DNA, 80 bp, synthetic construct
  source 1..80: mol_type = other DNA
tgaatctaagactaaagctttcactcttccaattcttaagatatctgagatgacaaattcaagatttcccataccagttg

SEQ ID NO: 99761 - DNA, 80 bp, synthetic construct
  source 1..80: mol_type = other DNA
accagatgtatactagtaggaatgaaaatatagttgttcaaccacagaatggcagggtgacacttgatggagagttacag

SEQ ID NO: 99762 - DNA, 80 bp, synthetic construct
  source 1..80: mol_type = other DNA
ggcacaaccacacttcaaccggtgtccatttgtggcttccgagggacgctgcagaccaggctggcagatcaaccaaatta

SEQ ID NO: 99763 - DNA, 80 bp, synthetic construct
  source 1..80: mol_type = other DNA
cacataccaagtgcaccttgagaatttggacggctcacccgtcgatccgacagatgaagtcccagcccccctggggacgc

SEQ ID NO: 99764 - DNA, 80 bp, synthetic construct
  source 1..80: mol_type = other DNA
cagattttcaggcccagctatttggagttgtcagtcaaaggagtagtgataatgccaccagggcacatgaggctagggtc

SEQ ID NO: 99765 - DNA, 80 bp, synthetic construct
  source 1..80: mol_type = other DNA
aacaccaacgatcctaccttcgcgccccagatcgcccaggtgcgtttcaaatcaccatcccacgacttctttgacaatga

SEQ ID NO: 99766 - DNA, 80 bp, synthetic construct
  source 1..80: mol_type = other DNA
acccatcaagttcacaccagttggaattagtgttgatagcgaaaacagctacaaccaatggctccttcccaggtatggcg

SEQ ID NO: 99767 - DNA, 80 bp, synthetic construct
  source 1..80: mol_type = other DNA
ggcacttgacaaacaacacccacctggccccctctgtgtccccaatgttccccggcgagcagattctcttcttccgctcg

SEQ ID NO: 99768 - DNA, 80 bp, synthetic construct
  source 1..80: mol_type = other DNA
ttcatgccaggtgccagtggtcatactgatggtgctattgactgcctcttaccacaagagtgggttgcccacttctatca

SEQ ID NO: 99769 - DNA, 80 bp, synthetic construct
  source 1..80: mol_type = other DNA
ggaggccgcaactgcgcaaacagatgtggctctgattagatttgtgaaccccgacacaggcagagtgctatttgaaggga

SEQ ID NO: 99770 - DNA, 80 bp, synthetic construct
  source 1..80: mol_type = other DNA
agctacacaagcagggctttataaccatctccaacagtggggaccaccccattgttatgcctgctaatggatacttcagg

SEQ ID NO: 99771 - DNA, 80 bp, synthetic construct
  source 1..80: mol_type = other DNA
gtctggctggtgatgtggtgacccctggcatcgggtcgctcatcaatgcaggtgctaatgcagtgaaccaaaaggttgaa

SEQ ID NO: 99772 - DNA, 80 bp, synthetic construct
  source 1..80: mol_type = other DNA
cttaaccgcagatcaataactagaacaaccggtttcttcaagccttatcaaccctggaacaagaaaccacttccgacggt

SEQ ID NO: 99773 - DNA, 80 bp, synthetic construct
  source 1..80: mol_type = other DNA
tatgacttcaataggcaacttcaagaagcttcttttaaacatgacaaggagatgttgaatgctcaaattaatgccacaac

SEQ ID NO: 99774 - DNA, 80 bp, synthetic construct
  source 1..80: mol_type = other DNA
caaattgcagagggacatgattgccatcaagcagggggttttgaccgctggcggcttttcccccactgatgctgcaagag

SEQ ID NO: 99775 - DNA, 80 bp, synthetic construct
  source 1..80: mol_type = other DNA
gttccatcaatgctccaaccaccaaaattcttgactggaatggatctaggtactgggcgccaggatcaatgagaacaaca

SEQ ID NO: 99776 - DNA, 80 bp, synthetic construct
  source 1..80: mol_type = other DNA
gcatactctggcaatttcatatcacagggagttaagcaacctacacccattgttagatctgtgaaacctcaagtacagca

SEQ ID NO: 99777 - DNA, 80 bp, synthetic construct
  source 1..80: mol_type = other DNA
atctcctgccccttcttctgtttattctgtaggttctgttaagtcacaatcaacacaatcaactcaattaacagggtcag

SEQ ID NO: 99778 - DNA, 80 bp, synthetic construct
  source 1..80: mol_type = other DNA
ggactgtatcaagggcacccaccccctcaacaaccacaacactgtccagaacaagtgagtgggtgaggagccagaatgat

SEQ ID NO: 99779 - DNA, 80 bp, synthetic construct
  source 1..80: mol_type = other DNA
aggctgagcccctttatgggaggcgcactccagacagctttcatcacgcccccatcgagtaaggcttcatcctcatcagg

SEQ ID NO: 99780 - DNA, 80 bp, synthetic construct
  source 1..80: mol_type = other DNA
gaggggagtcacgggcttagtgaaaagaatgatttggttagattatatctttttcttacctattctatcttttaaaaaaa

SEQ ID NO: 99781 - DNA, 80 bp, synthetic construct
  source 1..80: mol_type = other DNA
tcccgttaaggaagaggcgagtgtcctatccaacgtaaaagttggattcaagaaaatattgggggctgtgcctaagcagc

SEQ ID NO: 99782 - DNA, 80 bp, synthetic construct
  source 1..80: mol_type = other DNA
cttgatcgggaagctgaaaccactgaatttcttgaatctcctcgcttcgtgcgactggaccttctccggagtggttgaga

SEQ ID NO: 99783 - DNA, 80 bp, synthetic construct
  source 1..80: mol_type = other DNA
ccgtcatactagctgctgaactattcggtgtgttttggaccccccccgacgtgtcgaacttcatcgcgtcactcatcggg

SEQ ID NO: 99784 - DNA, 80 bp, synthetic construct
  source 1..80: mol_type = other DNA
gacttcgagttgcagggtccagaggatttagctgtggagttggtgccgattatcatgggcggcatcgggatggtgctggg

SEQ ID NO: 99785 - DNA, 80 bp, synthetic construct
  source 1..80: mol_type = other DNA
gaggggagtcacgggcgtaacgtgaaaagacaaaacctgattattttctttttcttttctttagtgtcttttaaaaaaaa

SEQ ID NO: 99786 - DNA, 80 bp, synthetic construct
  source 1..80: mol_type = other DNA
ggggagtcacaggtttagtgaaaagatggtttttctttcttccacttttctgaaatttccatcttttaaaaaaaaaaaaa

SEQ ID NO: 99787 - DNA, 80 bp, synthetic construct
  source 1..80: mol_type = other DNA
tagcagccccgttcataagtctcctgctcctccccagcatgttgtttcatcaaagagtagattgcaaaatgattctgcta

SEQ ID NO: 99788 - DNA, 80 bp, synthetic construct
  source 1..80: mol_type = other DNA
gcaggcgaggggagtcacaagtttagtgaaaagagtgatcaggttttctctcctttttcttttctctcttttaaaaaaaa

SEQ ID NO: 99789 - DNA, 80 bp, synthetic construct
  source 1..80: mol_type = other DNA
ggacacgacgctgtggtccccacttacacagcacagtatactccaaaacttggacaaattcaaattggcacatggcaaac

SEQ ID NO: 99790 - DNA, 80 bp, synthetic construct
  source 1..80: mol_type = other DNA
ctaagggcgctaaggctcccagcagtgatcagcactgtccaataattaagatcggacccaaaacattaacagtcccccct

SEQ ID NO: 99791 - DNA, 80 bp, synthetic construct
  source 1..80: mol_type = other DNA
cgcgcaatggggttgaccactgggacgcttacagaggagagagggtggtcttgtgggacgattatggaatggggaaccct

SEQ ID NO: 99792 - DNA, 80 bp, synthetic construct
  source 1..80: mol_type = other DNA
cgcgcaatggggttgaccactgggacgcttacagaggagagagggtggtcttgtgggacgattatggaatggagaaccct

SEQ ID NO: 99793 - DNA, 80 bp, synthetic construct
  source 1..80: mol_type = other DNA
cctcacccaggggtccctgaccgcaagggttgcaggcctcgtccatgaaaggaaggatgagttccaactacaagggaatg

SEQ ID NO: 99794 - DNA, 80 bp, synthetic construct
  source 1..80: mol_type = other DNA
gcaagatggagaggcagtccttgagggaaatgaaaaccttggtacctattgtggtgctccaattctgggccccggcaaag

SEQ ID NO: 99795 - DNA, 80 bp, synthetic construct
  source 1..80: mol_type = other DNA
ggtctcgctggtgagaagttcccctacacggccttcagcaacaattgctacaacttctgctgctgggtgcttgagctcaa

SEQ ID NO: 99796 - DNA, 80 bp, synthetic construct
  source 1..80: mol_type = other DNA
gaggggagtcacaaatttagtgaaaagagtgattaggttttctttccctctttcctttttccttttctctcttttaaaaa

SEQ ID NO: 99797 - DNA, 80 bp, synthetic construct
  source 1..80: mol_type = other DNA
atggcgtctcaaggcaccaaacgatcttatgaacagatggaaactggtggagagcgccagaatgctactgagatcagggc

SEQ ID NO: 99798 - DNA, 80 bp, synthetic construct
  source 1..80: mol_type = other DNA
aaatgatgccctgatgcaaggatcaactctcccgaggagatctggagctgccggtgcagcagtgaagggggtaggaacaa

SEQ ID NO: 99799 - DNA, 80 bp, synthetic construct
  source 1..80: mol_type = other DNA
tcacaatcccgcactcgcgagatactgacaaaaaccactgtggaccatatgacagcggacaagagaataatggagatgat

SEQ ID NO: 99800 - DNA, 80 bp, synthetic construct
  source 1..80: mol_type = other DNA
ataaatgcaaagaaatggtggactatattctatacgataattgattacattaatacaattgtacaatcaatgactcccag

SEQ ID NO: 99801 - DNA, 80 bp, synthetic construct
  source 1..80: mol_type = other DNA
tttaaggatgcttgttttcattatagaagaattacaaaactaaacagagaactactgagaattggagcgaactcagtatg

SEQ ID NO: 99802 - DNA, 80 bp, synthetic construct
  source 1..80: mol_type = other DNA
atctgaagagtatgagctcctaatctcggattctgaagatgatgactaatgcctaaattaactatcaacacggttttgcc

SEQ ID NO: 99803 - DNA, 80 bp, synthetic construct
  source 1..80: mol_type = other DNA
ttacaatgtattattgatctacataatttgttatttccaatcaatcctggtattattaataaattcaaaaaggcagttaa

SEQ ID NO: 99804 - DNA, 80 bp, synthetic construct
  source 1..80: mol_type = other DNA
gcagagaaagtgtaggaatgaacttgacaaatcatggtataatcaattgttacttccaattactttgaatgctgcagttt

SEQ ID NO: 99805 - DNA, 80 bp, synthetic construct
  source 1..80: mol_type = other DNA
gactccagtctcttcgaataaaattagagggtggtgtattgaatgttgtcaactaactgaattaaccttttgtcacggat

SEQ ID NO: 99806 - DNA, 80 bp, synthetic construct
  source 1..80: mol_type = other DNA
ttcaaattggactaacttctcatataatgtatttaatgtcttcagtatagtgaatgtcttcataacactagtgctctcgt

SEQ ID NO: 99807 - DNA, 80 bp, synthetic construct
  source 1..80: mol_type = other DNA
acactgaaaacatcatgatgataatgataatgctacatatttccagtatgagaattcatgagatagcgccgctcttaata

SEQ ID NO: 99808 - DNA, 80 bp, synthetic construct
  source 1..80: mol_type = other DNA
aatgccatacctaatctgtctactcaaatgggaaaaattactttacctgacatagtcacagaggcatctgagaaatttat

SEQ ID NO: 99809 - DNA, 80 bp, synthetic construct
  source 1..80: mol_type = other DNA
ccagaggaattgaggaaggctctattgggaaagtatgcagaaccctactagcgaagtctgtgttcaacagtctgtacgca

SEQ ID NO: 99810 - DNA, 80 bp, synthetic construct
  source 1..80: mol_type = other DNA
atgaccatcacttttctaatcctcctgttcacagtagtaaaaggggaccaaatatgtatcggataccatgccaacaattc

SEQ ID NO: 99811 - DNA, 80 bp, synthetic construct
  source 1..80: mol_type = other DNA
ctgtaatagaaaagatgaacactcagtttgaggctattgggaaagagttcaacaacctagaaagaagactagaaaactta

SEQ ID NO: 99812 - DNA, 80 bp, synthetic construct
  source 1..80: mol_type = other DNA
tgtcactggcaatcatgatagctgggatttctttctggatgtgttctaacgggtctctgcaatgcagaatttgcatttga

SEQ ID NO: 99813 - DNA, 80 bp, synthetic construct
  source 1..80: mol_type = other DNA
attgtgagaccagatgccagacccccttaggggccataaacacaacattgccctttcacaacattcacccattaacgata

SEQ ID NO: 99814 - DNA, 80 bp, synthetic construct
  source 1..80: mol_type = other DNA
ggtgagtgccccaagtatgttaagacagatagactggtcttagcaacagggctaaggaatgctcctcagattgaatcaag

SEQ ID NO: 99815 - DNA, 80 bp, synthetic construct
  source 1..80: mol_type = other DNA
gctctctcgacgcaggactcggcttgctgaagcgcgcacggcaagaggcgaggggcggcgactgaaaattttaactagcg

SEQ ID NO: 99816 - DNA, 80 bp, synthetic construct
  source 1..80: mol_type = other DNA
agaggagatctctcgacgcaggactcggcttgctgaagcgcgcacagcaagaggctgacaactttaaatgcatgggtaaa

SEQ ID NO: 99817 - DNA, 80 bp, synthetic construct
  source 1..80: mol_type = other DNA
gcgaaagcaggggaaaataaaaccaaccaaaatgaaaacaaaattgctagttctgttatgtgcattcacagttacagatg

SEQ ID NO: 99818 - DNA, 80 bp, synthetic construct
  source 1..80: mol_type = other DNA
aatgggggtctatcagattctggcgatctattcaactgccgccagctcactgacacttctggtctccctggtggcaatca

SEQ ID NO: 99819 - DNA, 80 bp, synthetic construct
  source 1..80: mol_type = other DNA
taatggatctttgcagtgcagaatttgcatttgagaccaggatttcagaaatataagagaaaaacacccttgtttctact

SEQ ID NO: 99820 - DNA, 80 bp, synthetic construct
  source 1..80: mol_type = other DNA
caattgggtaattgcagcattgctggatggatcttaggaaacccagaatgcgaatcattgttttctagaacatcgtggtc

SEQ ID NO: 99821 - DNA, 80 bp, synthetic construct
  source 1..80: mol_type = other DNA
ttacattgcagagacaacaaaacccgagattggaatatgttacccagggcatttctccgactatgaggaactaagggagc

SEQ ID NO: 99822 - DNA, 80 bp, synthetic construct
  source 1..80: mol_type = other DNA
gtccccataaggggagaagcagcttctacagaaatctgttatggttgacggaaaaaaacggcttatacccaaatcttagc

SEQ ID NO: 99823 - DNA, 80 bp, synthetic construct
  source 1..80: mol_type = other DNA
aagtcttatgtgaacgacaaagggaaggaggtccttatactatggggtgttcatcatccatccaacatgagggaccaaaa

SEQ ID NO: 99824 - DNA, 80 bp, synthetic construct
  source 1..80: mol_type = other DNA
ggccatctacaatacagaaaatgcttatgtctcagtagtgtctccacattacaacaagagattcactcctgaaataataa

SEQ ID NO: 99825 - DNA, 80 bp, synthetic construct
  source 1..80: mol_type = other DNA
atccgaaaatcgaaactatgtattcagatttccatttcatcgacgagcggggtgaatcaataattgtagaatctggtgac

SEQ ID NO: 99826 - DNA, 80 bp, synthetic construct
  source 1..80: mol_type = other DNA
aaccacaccgtaaccgggggatcaaaatcatgctcccataatggggaaaacagtttttacagaaatttgctatggctgac

SEQ ID NO: 99827 - DNA, 80 bp, synthetic construct
  source 1..80: mol_type = other DNA
aatcctacacaaacaacaaagagaaagaagttctcatactatggggtgttcatcacccgtcaaacataggggaccagaag

SEQ ID NO: 99828 - DNA, 80 bp, synthetic construct
  source 1..80: mol_type = other DNA
taactctcaaaagtattccgaggaatcaaagttaaacagggaaataattgagggggtaaaactggaatcagtgggagtct

SEQ ID NO: 99829 - DNA, 80 bp, synthetic construct
  source 1..80: mol_type = other DNA
aaccacaccataaccggagcatccgcatcatgctcccataaggggaaaagcagtttttacaaaaatttgctatggctgac

SEQ ID NO: 99830 - DNA, 80 bp, synthetic construct
  source 1..80: mol_type = other DNA
aaccacactgtgacaggagtatcagcatcatgctcccataatgggagaagcagtttttacaaaaatttgctatggctgac

SEQ ID NO: 99831 - DNA, 80 bp, synthetic construct
  source 1..80: mol_type = other DNA
agtatcagcatcatgctcccataatgggaaaagcagtttttacagaaatttgctatggctgacgaggaaaaatggtttgt

SEQ ID NO: 99832 - DNA, 80 bp, synthetic construct
  source 1..80: mol_type = other DNA
tgatctggatacgccagcaaagcaggagtaaagatgaatccaaatcaaaagataataacaattggctctgtttctctcat

SEQ ID NO: 99833 - DNA, 80 bp, synthetic construct
  source 1..80: mol_type = other DNA
agtatcagcatcatgctcctacaatgggaaaggaaatttttacagaaatttgctatggataacgaccaagaatgggttgt

SEQ ID NO: 99834 - DNA, 80 bp, synthetic construct
  source 1..80: mol_type = other DNA
ttggttgtacaatttaaactacaaatatccagcgcaaaatgtgtcaatgccaaataatgacgaatttgacaaattgtaca

SEQ ID NO: 99835 - DNA, 80 bp, synthetic construct
  source 1..80: mol_type = other DNA
aaggcagagacacaccaggagggtactgcttgaccagatggatgttgattgaggctgaactgaaatgctttggtaacaca

SEQ ID NO: 99836 - DNA, 80 bp, synthetic construct
  source 1..80: mol_type = other DNA
ctttgtagagaggtgttgtgcaagacctaccacacaatagaagaaaagcaatgaggccaatgataccacatgttgccaca

SEQ ID NO: 99837 - DNA, 80 bp, synthetic construct
  source 1..80: mol_type = other DNA
agagagacgtccggacttctacagagattgagattgctgacacagggattgctgacacagaagaatctgaagggactttc

SEQ ID NO: 99838 - DNA, 80 bp, synthetic construct
  source 1..80: mol_type = other DNA
tgttctttcaatgcatccacagaagtaaaagataagtggcggagagaatatgcagttttttataatcttgatataataca

SEQ ID NO: 99839 - DNA, 80 bp, synthetic construct
  source 1..80: mol_type = other DNA
agttctaccaagactgagactgctgacacagagattgctgacacagaagaatctggagggactttccactggggactttc

SEQ ID NO: 99840 - DNA, 80 bp, synthetic construct
  source 1..80: mol_type = other DNA
atccaatgatcgtcgagcttgcggaaaaggcaatgaaagaatatggagaagatccgaaaaccgaaactaacaagttcgct

SEQ ID NO: 99841 - DNA, 80 bp, synthetic construct
  source 1..80: mol_type = other DNA
gctgcatttttattcagatttttgctcaaaaacttcccggaaatgacaacagcatggcaacgctgtgcctgggacaccat

SEQ ID NO: 99842 - DNA, 80 bp, synthetic construct
  source 1..80: mol_type = other DNA
tcctttgccatatcatgctttttgctttgtgttgttttgctggggttcattatgtgggcctgccaaaagggcaacattag

SEQ ID NO: 99843 - DNA, 80 bp, synthetic construct
  source 1..80: mol_type = other DNA
ctcaaggcaccaaacgatcatatgaacaaatggatactggtggagaacgccaggatgccacagaaatcagagcatctgtc

SEQ ID NO: 99844 - DNA, 80 bp, synthetic construct
  source 1..80: mol_type = other DNA
ctcgaacagtattgttgtattttgtggcacttcaggcacatatggaacaggctcatggcctgatggagctgatatcaatc

SEQ ID NO: 99845 - DNA, 80 bp, synthetic construct
  source 1..80: mol_type = other DNA
ggggatcgagcccatcgacagtgtaatgggaatgatcgggatattgcctgatatgactccaagcacggaaatgtcaatga

SEQ ID NO: 99846 - DNA, 80 bp, synthetic construct
  source 1..80: mol_type = other DNA
actgccattgagcaagctgctctggctgcggccaattctgccctggcgaatgctgtggtggttcggccgtttttatctcg

SEQ ID NO: 99847 - DNA, 80 bp, synthetic construct
  source 1..80: mol_type = other DNA
gcgcccttgtcgctaacgaggggtggaatgcttcggaggacgctcttaccgctgttattaccgcagcgtatttgaccatc

SEQ ID NO: 99848 - DNA, 80 bp, synthetic construct
  source 1..80: mol_type = other DNA
tatgcacagtgccgccgttggttatcggcgggtttccaccttgacccaagggtgcttatttttgatgagtctgtgccctg

SEQ ID NO: 99849 - DNA, 80 bp, synthetic construct
  source 1..80: mol_type = other DNA
ccgttgtaggacatttcttaagaaggccgtgggtaagttctgctgttttatgaagtggttgggacaggagtgcacctgct

SEQ ID NO: 99850 - DNA, 80 bp, synthetic construct
  source 1..80: mol_type = other DNA
ttttagaaccagcagagggtctagttggcgaccgtggccacgacaatgaagcctatgagggctctgaggtcgatcaggcc

SEQ ID NO: 99851 - DNA, 80 bp, synthetic construct
  source 1..80: mol_type = other DNA
gagcccgtccatctcgatgtctctgggacttatgccgtccatggtagccaacttgaggccctgtatagggcgcttaacat

SEQ ID NO: 99852 - DNA, 80 bp, synthetic construct
  source 1..80: mol_type = other DNA
cccgcatgacattgctgcccgagcctcccgtttgactgccaccgtcgaactcactgcaggttcagaccgcttggagtgcc

SEQ ID NO: 99853 - DNA, 80 bp, synthetic construct
  source 1..80: mol_type = other DNA
tccaacgggttattcataatgaacttgaacattactgtcgggcccgcgctggtcgttgtctagaggttggggcccaccca

SEQ ID NO: 99854 - DNA, 80 bp, synthetic construct
  source 1..80: mol_type = other DNA
gcactgtgctcgggaataagactttccggacgacggtggttgatggcgcccaccttgaggcgaacggccccgagcagtat

SEQ ID NO: 99855 - DNA, 80 bp, synthetic construct
  source 1..80: mol_type = other DNA
gttctttctttcgacgcctctcgccagtcaatgggggccgggccgcatagtctctcctacgagctcacttctgctggttt

SEQ ID NO: 99856 - DNA, 80 bp, synthetic construct
  source 1..80: mol_type = other DNA
gcaggtcaagatctcatctaatggcctggattgcactgcaacatttcccccgggcggggcccctagcgctgctccgggtg

SEQ ID NO: 99857 - DNA, 80 bp, synthetic construct
  source 1..80: mol_type = other DNA
aggtagcagccttttgcagtgccctttacaggtacaacaggttcacccagtgccattcgcttataggtggcttgtggctg

SEQ ID NO: 99858 - DNA, 80 bp, synthetic construct
  source 1..80: mol_type = other DNA
catcctgaggggttgttgggtatcttcccccctttttctcccgggcacctttgggagtccgctaaccctttttgtgtgga

SEQ ID NO: 99859 - DNA, 80 bp, synthetic construct
  source 1..80: mol_type = other DNA
gggaaccttgtacacccggacttggtcaacatctggtttttctagtgacttttccccccctgaggcagctgtcgcagcgc

SEQ ID NO: 99860 - DNA, 80 bp, synthetic construct
  source 1..80: mol_type = other DNA
cggccgctacaccggggttacgtcaccccactgacataacaggtccaaaagttgatattaatatcgaaggcaagtcaaag

SEQ ID NO: 99861 - DNA, 80 bp, synthetic construct
  source 1..80: mol_type = other DNA
aaatctcgttttaagcttcccaaatttaattttccgggctctaaagttcagacacctgaagtggatgtcaaaggtaaaaa

SEQ ID NO: 99862 - DNA, 80 bp, synthetic construct
  source 1..80: mol_type = other DNA
accagatatatcttctgttagtgacgtccgggtgttaccgccaccctctgaagaatttcaggttgatacagcatccaccc

SEQ ID NO: 99863 - DNA, 80 bp, synthetic construct
  source 1..80: mol_type = other DNA
cccctgcccctgagcccgctcaaccacctagctccgctgggccaaagactcccgtgcgtaagcggtcggcctggatctta

SEQ ID NO: 99864 - DNA, 80 bp, synthetic construct
  source 1..80: mol_type = other DNA
agatccattaatgacaacccaaatgttcttcatcggtgttttctacgaccagtagggagagatgttcaacgttggtattc

SEQ ID NO: 99865 - DNA, 80 bp, synthetic construct
  source 1..80: mol_type = other DNA
caggcgtcgaaggagtctcttaagggtttttggaagaagcattctggtgagcctggtaccctcctttcgacagcatccac

SEQ ID NO: 99866 - DNA, 80 bp, synthetic construct
  source 1..80: mol_type = other DNA
cccccctgcccctgagcccgctcaaccacctagctccgctgggccaaagactcccgtgcgtaagccgccaacgccaccat

SEQ ID NO: 99867 - DNA, 80 bp, synthetic construct
  source 1..80: mol_type = other DNA
ccccgcgcacccgccgccttctttacacctatccggatggggcaaaggtgtatgcggggtcactgtttgagtctgactgt

SEQ ID NO: 99868 - DNA, 80 bp, synthetic construct
  source 1..80: mol_type = other DNA
gattggctggttaatgcgtcgaatcccggtcatcgtcctggaggtggcatttgccatgctttctaccaacgctaccccga

SEQ ID NO: 99869 - DNA, 80 bp, synthetic construct
  source 1..80: mol_type = other DNA
gtctttccacccaactgagttcatcatgcgcgacggtcttgccgcgtacactttaactccccggcctattattcatgcag

SEQ ID NO: 99870 - DNA, 80 bp, synthetic construct
  source 1..80: mol_type = other DNA
ccgtcagcctcagcttcgacgcctgggaacgtaaccaccgccccggggacgagctctacctaaccgacctcgccgccacc

SEQ ID NO: 99871 - DNA, 80 bp, synthetic construct
  source 1..80: mol_type = other DNA
gatcgatgctgctactgaggttggccgggcttgtgccggctacgcggttagtcctggggttgtgcactatcagtttactg

SEQ ID NO: 99872 - DNA, 80 bp, synthetic construct
  source 1..80: mol_type = other DNA
tgctcctacccgcggccctgcggctaactgccgccgttctgccttgcgtggccttccccccgttgatcgtacctattgtt

SEQ ID NO: 99873 - DNA, 80 bp, synthetic construct
  source 1..80: mol_type = other DNA
acccaaaccagattcctgccatagacttcgagcatgccggcctggtccccgcaatacgccctgagcttgcacccaccagt

SEQ ID NO: 99874 - DNA, 80 bp, synthetic construct
  source 1..80: mol_type = other DNA
tggtggcatgttacccatcgctgccccgctgatgtgtgcgagctcatccgcggggcttatcccaaaattcaaaccactag

SEQ ID NO: 99875 - DNA, 80 bp, synthetic construct
  source 1..80: mol_type = other DNA
ccgcgtgctgcggtctctattctggaatgagcctgccattggccagaagttagttttcacccaggccgctaaggccgcta

SEQ ID NO: 99876 - DNA, 80 bp, synthetic construct
  source 1..80: mol_type = other DNA
ttgatggattctcccgctgctcatttgccgcagaaactggggttgccctttattccctgcacgacctctggccggccgat

SEQ ID NO: 99877 - DNA, 80 bp, synthetic construct
  source 1..80: mol_type = other DNA
cttgttatatatgccgcaggagcttacggtgtctgatagcgtgttggtctttgaactcacggacatagtccactgccgga

SEQ ID NO: 99878 - DNA, 80 bp, synthetic construct
  source 1..80: mol_type = other DNA
tggctgcccccagccagcggaaggccgtcctatcgacgctcgtgggtaggtacggccgtcggacgaagctgtatgaagca

SEQ ID NO: 99879 - DNA, 80 bp, synthetic construct
  source 1..80: mol_type = other DNA
gctcactctgacgttcgtgggtccctggctagatttatccccaccattgggcccgttcaggctactacgtgtgagttata

SEQ ID NO: 99880 - DNA, 80 bp, synthetic construct
  source 1..80: mol_type = other DNA
tgagctggttgaggccatggtggagaaaggtcaggatggctctgccgtgcttgagctcgacctctgtaatcgtgatgtat

SEQ ID NO: 99881 - DNA, 80 bp, synthetic construct
  source 1..80: mol_type = other DNA
gttgcggaggctatggcccgacacgggatgacacgcttgtatgctgcactacatctcccccctgaagtactattaccacc

SEQ ID NO: 99882 - DNA, 80 bp, synthetic construct
  source 1..80: mol_type = other DNA
tgctatgaatttcgtgattttagggttgctgctttcaagggagatgattccgtggtcctctgtagcgactaccgtcagag

SEQ ID NO: 99883 - DNA, 80 bp, synthetic construct
  source 1..80: mol_type = other DNA
agccgatggcaaagcccatttcacagaggttgttaaacctgtgcttgacctcacgaattctatcatacagcgggtggaat

SEQ ID NO: 99884 - DNA, 80 bp, synthetic construct
  source 1..80: mol_type = other DNA
tggtacttaccatacaacttcataccttctgattcacgacggtgatcgtgctgttgtgacctatgaaggcgatactagtg

SEQ ID NO: 99885 - DNA, 80 bp, synthetic construct
  source 1..80: mol_type = other DNA
ctccgctgtcccacgtcgtcgatctgccccagccggggctgcgccgctgactgccatatcacctgcccccgatacagctc

SEQ ID NO: 99886 - DNA, 80 bp, synthetic construct
  source 1..80: mol_type = other DNA
ctgtacctgatgttgattcgcgcggcgccatattgcgacgccagtacaatttatccacatccccgctcacatcatctgtt

SEQ ID NO: 99887 - DNA, 80 bp, synthetic construct
  source 1..80: mol_type = other DNA
gcttcgggtactaatctggttctttatgctgccccgctaaaccctttgttgccccttcaggatggtactaatacacacat

SEQ ID NO: 99888 - DNA, 80 bp, synthetic construct
  source 1..80: mol_type = other DNA
catggccactgaggcatctaattatgcccagtatcgggttgtccgagctacgattcgttacaggccattggtgccaaatg

SEQ ID NO: 99889 - DNA, 80 bp, synthetic construct
  source 1..80: mol_type = other DNA
ctgtcgggggctatgcaatatctatctcattctggccccagacaactaccacccccacgtctgttgacatgaactctatt

SEQ ID NO: 99890 - DNA, 80 bp, synthetic construct
  source 1..80: mol_type = other DNA
acttccactgatgttaggattctagttcagcccggcatcgcttctgagctggttatccctagtgagcgcctccattatcg

SEQ ID NO: 99891 - DNA, 80 bp, synthetic construct
  source 1..80: mol_type = other DNA
cgggtgtggctgaagaggaggctacttctggtttggtaatgctctgtatccatggctcccctgttaattcctacaccaat

SEQ ID NO: 99892 - DNA, 80 bp, synthetic construct
  source 1..80: mol_type = other DNA
caggctacaaccatgatgtttccatacttcgtgcatggatccgcacaactaagatagtcggcgatcatccgctggtgata

SEQ ID NO: 99893 - DNA, 80 bp, synthetic construct
  source 1..80: mol_type = other DNA
acactctttaatcttgctgatacgcttctcggtggtttgccgacagaattaatttcgtcggctggggggcagttatttta

SEQ ID NO: 99894 - DNA, 80 bp, synthetic construct
  source 1..80: mol_type = other DNA
cctttttcggttcttcgcactaatgatgttttatggctttcccttactgccgccgagtacgaccagactacatatgggtc

SEQ ID NO: 99895 - DNA, 80 bp, synthetic construct
  source 1..80: mol_type = other DNA
tcgactggtccaaagttactctggacggccgccctctcactactatccagcagtactccaaaacattttatgttctcccg

SEQ ID NO: 99896 - DNA, 80 bp, synthetic construct
  source 1..80: mol_type = other DNA
gagcgtgtgcgggctattggctgccattttgtgctgttgcttactgcagcccctgagccgtcaccaatgccttatgttcc

SEQ ID NO: 99897 - DNA, 80 bp, synthetic construct
  source 1..80: mol_type = other DNA
tgtacaaactgagattcttattaatttgatgcaaccccggcagttggtttttcggcctgaagtgctctggaatcatccta

SEQ ID NO: 99898 - DNA, 80 bp, synthetic construct
  source 1..80: mol_type = other DNA
gtcggtgaggtgggtcgtggtattgctctcacactctttaatcttgctgatacgcttctcggtggtttgccgacagaatt

SEQ ID NO: 99899 - DNA, 80 bp, synthetic construct
  source 1..80: mol_type = other DNA
tactactaagggctttcactgaggagggagcaatcgttggagaaatttcaccattaccttctcttccaggacatactaac

SEQ ID NO: 99900 - DNA, 80 bp, synthetic construct
  source 1..80: mol_type = other DNA
aaccacaccgtaaccggagtgtcatcatcatgctcccataacgggaacagcagcttctacagaaatttgctatggctgac

SEQ ID NO: 99901 - DNA, 80 bp, synthetic construct
  source 1..80: mol_type = other DNA
acatcaaatgcaccaatgggtgaatgcaatgcaaaatgtcaaacacctcagggggctataaacagcagtcttcctttcca

SEQ ID NO: 99902 - DNA, 80 bp, synthetic construct
  source 1..80: mol_type = other DNA
ccaataacattacaatctctatcaattgaattagatggtgatgtgtattacgtatttggatattatgatagtatgagtga

SEQ ID NO: 99903 - DNA, 80 bp, synthetic construct
  source 1..80: mol_type = other DNA
aagcgttataatactaatgataactcaagaggtatgaattatgagacaactatgtttaataaggtggctattttgatttg

SEQ ID NO: 99904 - DNA, 80 bp, synthetic construct
  source 1..80: mol_type = other DNA
aatgtcattgattttaatttactagaccaaagaataatttggcaaaactggtatgcgtttacatcttccatgaaacaagg

SEQ ID NO: 99905 - DNA, 80 bp, synthetic construct
  source 1..80: mol_type = other DNA
atttacatactctgtggaaggctggtattttatataagagagaaactactcgcagcgcctcattttgtgggtcaccttat

SEQ ID NO: 99906 - DNA, 80 bp, synthetic construct
  source 1..80: mol_type = other DNA
tacatactctttggaaggcgggtatcttatataaaagagagacaacacgtagcgcctcattttgcgggtcaccttatacc

SEQ ID NO: 99907 - DNA, 80 bp, synthetic construct
  source 1..80: mol_type = other DNA
ggttggtccacacccaattctaaacttcagataaataggcaagtgatggttgatagcagcaataggtcaggttactctgg

SEQ ID NO: 99908 - DNA, 80 bp, synthetic construct
  source 1..80: mol_type = other DNA
agcaaaagcaggggataactaaataaaccaagatggaagcaaaactgttcgtactattttgtgcattcactgcattgaag

SEQ ID NO: 99909 - DNA, 80 bp, synthetic construct
  source 1..80: mol_type = other DNA
aaacacaacgcaactggaggagtaactaaatcatgtccccacaagggacaaagcagcttttatagaaatttaatatggat

SEQ ID NO: 99910 - DNA, 80 bp, synthetic construct
  source 1..80: mol_type = other DNA
cgtctcaaatgtatcaatggatgagtgtgacgcagaatgtcaaacacctcagggggcaataaacaatagcctcccctttc

SEQ ID NO: 99911 - DNA, 80 bp, synthetic construct
  source 1..80: mol_type = other DNA
aatggagtaaccaaatcatgctcacataggggaaaaagcagtttttacagaaacttaatatggttaacggagaaaaatgg

SEQ ID NO: 99912 - DNA, 80 bp, synthetic construct
  source 1..80: mol_type = other DNA
aatcatatgtgaacaaaaaagaaaaagaagtccttgtactgtggggtatccatcacccgtcaaacattgaggatcaaaga

SEQ ID NO: 99913 - DNA, 80 bp, synthetic construct
  source 1..80: mol_type = other DNA
atatcaaacgcatcaatggatgaatgtaactcgaagtgccaaacacctcaaggggcaataaacagcagccttcctttcca

SEQ ID NO: 99914 - DNA, 80 bp, synthetic construct
  source 1..80: mol_type = other DNA
agacaatggggctgtggctgtgctaaaatacaatgatgtaataacagacactatcaagagttggaaaaacaacatattga

SEQ ID NO: 99915 - DNA, 80 bp, synthetic construct
  source 1..80: mol_type = other DNA
ttgatgggatccgcaacaaagtgaactcagtgattgagaagatgaatattcaattcacttcagtgggcgaggagttcaat

SEQ ID NO: 99916 - DNA, 80 bp, synthetic construct
  source 1..80: mol_type = other DNA
tacaactggaggcaccacagcatcatgctctcactctggaaacagtagtttttatcggaatttgtcatggataacaaaga

SEQ ID NO: 99917 - DNA, 80 bp, synthetic construct
  source 1..80: mol_type = other DNA
aaagaaactcctaccctaaactcagcagatcatacacaaacaaccaagggaaagaggtgctcgtaatatggggagtgcac

SEQ ID NO: 99918 - DNA, 80 bp, synthetic construct
  source 1..80: mol_type = other DNA
cctaataattactgtaaaatactcccctgcaaacaatcaagtgataacatgtgagccactaataatagaaaggaacacaa

SEQ ID NO: 99919 - DNA, 80 bp, synthetic construct
  source 1..80: mol_type = other DNA
gagtgaagggttgggccttcgacgatggaaatgatgtatggatgggaagaacgatcaaagaagattcacggtcaggctat

SEQ ID NO: 99920 - DNA, 80 bp, synthetic construct
  source 1..80: mol_type = other DNA
cgaagatagtgcaattagccaacatcaccatagagaaaggaacatgccccaaaacagtggagtacagaaattggtcaaag

SEQ ID NO: 99921 - DNA, 80 bp, synthetic construct
  source 1..80: mol_type = other DNA
tgcatttgccgagacaattggaggggctccaataggcctgttgtggatataaatgtaaaagattatagtattgattccag

SEQ ID NO: 99922 - DNA, 80 bp, synthetic construct
  source 1..80: mol_type = other DNA
accatttacaaaaacagcacttgggtaaaccaaacatatattaacatcagcaataacaattttattgttgaaaagacagt

SEQ ID NO: 99923 - DNA, 80 bp, synthetic construct
  source 1..80: mol_type = other DNA
ggctccagttaaattaatgggcaattcttccctctgccctgttagtgggtgggccatatacagtaaagataacagtgtaa

SEQ ID NO: 99924 - DNA, 80 bp, synthetic construct
  source 1..80: mol_type = other DNA
taattaccccagatactcggaagaatccaagttgaatagagaggaaatatacggtgtgaaactagaatcaggggaagttc

SEQ ID NO: 99925 - DNA, 80 bp, synthetic construct
  source 1..80: mol_type = other DNA
cctaataactactgtaaaattacattttaaacaatatgagtgcaactcccttgcaaacaaccaagtggtaacatgtgagc

SEQ ID NO: 99926 - DNA, 80 bp, synthetic construct
  source 1..80: mol_type = other DNA
gagtgaagggttgggcccttgacgatggaaacgatgtatggatgggaagaacgatcaacgaaagttcacgattaggttat

SEQ ID NO: 99927 - DNA, 80 bp, synthetic construct
  source 1..80: mol_type = other DNA
cactaataatagaaaggaacacaacgaagatagtgcacttagccaacatcaccatagagaaagaaacatgccccaaaaca

SEQ ID NO: 99928 - DNA, 80 bp, synthetic construct
  source 1..80: mol_type = other DNA
gtggagtacagaaattggtcaaagcctcaatgcaaaatcacaggatttgcacctttttctaaggacaattctatacggct

SEQ ID NO: 99929 - DNA, 80 bp, synthetic construct
  source 1..80: mol_type = other DNA
tatcccagataccctggggtaaggtgtgtttgcagagacaactggaaaggttctaacaggcccgttgtagatataaatct

SEQ ID NO: 99930 - DNA, 80 bp, synthetic construct
  source 1..80: mol_type = other DNA
agcaaaagcaggagtaaaatgaatccaaatcagaagataatagcaattggtgccgtctctctaactattgcgataacatg

SEQ ID NO: 99931 - DNA, 80 bp, synthetic construct
  source 1..80: mol_type = other DNA
agagggactccaggagttaaagggtgggcctttgacagtggaaatgacatttggatgggaagaactattgaaaaggattc

SEQ ID NO: 99932 - DNA, 80 bp, synthetic construct
  source 1..80: mol_type = other DNA
agcaaaagcaggggttcactctgtcaaaatggagaagacaattattctattagcaacaatcagccttgttaagagcgatc

SEQ ID NO: 99933 - DNA, 80 bp, synthetic construct
  source 1..80: mol_type = other DNA
taaaccagagattggtacccaaaatagccactagatccagaataaaagggcaaagtggcaggatagatttcttttggata

SEQ ID NO: 99934 - DNA, 80 bp, synthetic construct
  source 1..80: mol_type = other DNA
cttagttacaaccatgacactacatttccagcataatggatgcaccaatgcctcgaacaatcaagcagtgccgtgtggac

SEQ ID NO: 99935 - DNA, 80 bp, synthetic construct
  source 1..80: mol_type = other DNA
agcactaccttagagaaggaaatttgtcctagggcagcaggatacaggaattggtcgaaaccacaatgtcaaataacagg

SEQ ID NO: 99936 - DNA, 80 bp, synthetic construct
  source 1..80: mol_type = other DNA
tagacaatagtcactcaaatggaacaacacatgataggactccttataggacacttttgatgaatgagttgggtgttcca

SEQ ID NO: 99937 - DNA, 80 bp, synthetic construct
  source 1..80: mol_type = other DNA
cttactaccgatagtgttactcctgttgctgaaatgcatgttatcctttgatttggattcattttcaccctgcttttgct

SEQ ID NO: 99938 - DNA, 80 bp, synthetic construct
  source 1..80: mol_type = other DNA
ataggagggaacccagaccctggggtaaaagggtttgcattcctagatggagggaattcatggcttggtaggacaattag

SEQ ID NO: 99939 - DNA, 80 bp, synthetic construct
  source 1..80: mol_type = other DNA
gggggaattcatggcttggtaggacaattagcaaagactccagatcaggctacgaaatgttaaaggtcccaaatgcagaa

SEQ ID NO: 99940 - DNA, 80 bp, synthetic construct
  source 1..80: mol_type = other DNA
caaagactccagatcaggctacgaaatgttaaaggtcccaaatgcagaaatcgatactcaatcagggccaatctcatacc

SEQ ID NO: 99941 - DNA, 80 bp, synthetic construct
  source 1..80: mol_type = other DNA
agctgattgtcaacaaccaaaattggtcagggtactcaggggcattcatagactactgggcaaacaaggagtgcttcaat

SEQ ID NO: 99942 - DNA, 80 bp, synthetic construct
  source 1..80: mol_type = other DNA
ccttgtttttacgtggagctaatcagggggagacccaaagagagtagtgtactgtggacttccaatagcatggtagctct

SEQ ID NO: 99943 - DNA, 80 bp, synthetic construct
  source 1..80: mol_type = other DNA
ctgtggatccagggagcgattggggtcatggtcctggcatgatggtgcagaaatcatctactttaagtagaaatgattta

SEQ ID NO: 99944 - DNA, 80 bp, synthetic construct
  source 1..80: mol_type = other DNA
catggtcctggcatgatggtgcagaaatcatctactttaagtagaaatgatttaaggaaaaaaacacccttgtttctact

SEQ ID NO: 99945 - DNA, 80 bp, synthetic construct
  source 1..80: mol_type = other DNA
caaacatgaatgagaccaacccaacaacaacaaacatcactaacattataatgaataaagacgaagaaagaacatttctc

SEQ ID NO: 99946 - DNA, 80 bp, synthetic construct
  source 1..80: mol_type = other DNA
aaattgaccaagccgctatgtgaagtcaactcatggcacattctatcgaaagacaatgcgataagaataggtgaggatgc

SEQ ID NO: 99947 - DNA, 80 bp, synthetic construct
  source 1..80: mol_type = other DNA
acatatactagtcacaagggagccttacctgtcctgtgatccacaaggatgcagaatgtttgctctgagtcagggcacaa

SEQ ID NO: 99948 - DNA, 80 bp, synthetic construct
  source 1..80: mol_type = other DNA
cactcagagggcaacatgcgaatggaaccatacatgataggagcccatttcgagctcttataagttgggaaatgggtcag

SEQ ID NO: 99949 - DNA, 80 bp, synthetic construct
  source 1..80: mol_type = other DNA
gcacccagtccatacaatactagggtcgaatgcataggatggtcaagcacgtcatgccatgatggcatatcgaggatgtc

SEQ ID NO: 99950 - DNA, 80 bp, synthetic construct
  source 1..80: mol_type = other DNA
ccggggcagaccagtaacagaaatcccatcatgggcagggaacattcttagaactcaagaatcagaatgtgtgtgtcata

SEQ ID NO: 99951 - DNA, 80 bp, synthetic construct
  source 1..80: mol_type = other DNA
aaggaatatgcccagttgtcatgacagatggtccagcaaacaacaaggcagctactaaaataatctacttcaaagaggga

SEQ ID NO: 99952 - DNA, 80 bp, synthetic construct
  source 1..80: mol_type = other DNA
aagatacaaaagactgaagaactgcaagggaaagcccaacacatcgaagaatgttcatgctacggagcagcagggatgat

SEQ ID NO: 99953 - DNA, 80 bp, synthetic construct
  source 1..80: mol_type = other DNA
cctgctaataggaatcaccaatttgggcctaaacatcggactacactacaaagtgagtgattcaacaactataaacattc

SEQ ID NO: 99954 - DNA, 80 bp, synthetic construct
  source 1..80: mol_type = other DNA
caagtgtgtatgcagggacaattggaagggggcaaataggccaataatcactatagatcccgaaaggatgtcccacacaa

SEQ ID NO: 99955 - DNA, 80 bp, synthetic construct
  source 1..80: mol_type = other DNA
gcaaatacttgtgttcgaaaatcttaaccgacacaagtcgtcctaatgaccccaccaatgggaactgtgatgcgccaata

SEQ ID NO: 99956 - DNA, 80 bp, synthetic construct
  source 1..80: mol_type = other DNA
tcataataagtaagaacgaagaggggaagtttctcaacctgacaaagccgctatgtgaggtcaattcatggcatattcta

SEQ ID NO: 99957 - DNA, 80 bp, synthetic construct
  source 1..80: mol_type = other DNA
aagtactgaagaccgaggaactgaagggaaacgctcaacacattgaagagtgttcatgttatggagcatcagggatgatc

SEQ ID NO: 99958 - DNA, 80 bp, synthetic construct
  source 1..80: mol_type = other DNA
taaagaattgtagtgtagctggatggcttcttggaaacccaatgtgtgacgagctcatcagtgtaccggaatggtcttac

SEQ ID NO: 99959 - DNA, 80 bp, synthetic construct
  source 1..80: mol_type = other DNA
acaacaccaacaaagaagatcttttgatactgtggggaatccatcattccaacagtgcagaggagcaggcagatctctac

SEQ ID NO: 99960 - DNA, 80 bp, synthetic construct
  source 1..80: mol_type = other DNA
aagaacccaaccacctatgtctccgttgggacatcaacactaaaccagaggttggtgccaaaaatagctactagatccca

SEQ ID NO: 99961 - DNA, 80 bp, synthetic construct
  source 1..80: mol_type = other DNA
agtaaatgggcaacgtggaagaatggatttcttctggacaatcttaagaccgaatgatgcaatccacttcgagagtaatg

SEQ ID NO: 99962 - DNA, 80 bp, synthetic construct
  source 1..80: mol_type = other DNA
gccgacaggattgcagcaggaaaaaacatcgggcaagaccgggatcctacaggggtagagccaggtgatcatctcaagga

SEQ ID NO: 99963 - DNA, 80 bp, synthetic construct
  source 1..80: mol_type = other DNA
gtaaaccagagaagatctctcgacgcgaggactcggcttgctgaagcgcgcacagcaagaggcgaggggtgcgagagcgt

SEQ ID NO: 99964 - DNA, 80 bp, synthetic construct
  source 1..80: mol_type = other DNA
tggtaactagagatccctcagaccatttagtcagtgtggaaaatctctagcagtggcgcccgtaggccaaaaattttgac

SEQ ID NO: 99965 - DNA, 80 bp, synthetic construct
  source 1..80: mol_type = other DNA
tggtaactagagatccctcagacacttttagtcagtgtggaaaatttctagcagtggcgcccgaacgattcgcagttaac

SEQ ID NO: 99966 - DNA, 80 bp, synthetic construct
  source 1..80: mol_type = other DNA
gcagccccggacatctaagggcatcacagacctgtgcagggttgataatcactcactgagtgacatcaaaatcatggcgt

SEQ ID NO: 99967 - DNA, 80 bp, synthetic construct
  source 1..80: mol_type = other DNA
tgaattttgtcaacagagcaaatcagcggttgaaccccatgcatcagcttttaaggcattttcagaaagatgcgaaaaag

SEQ ID NO: 99968 - DNA, 80 bp, synthetic construct
  source 1..80: mol_type = other DNA
tatcactgatgatagcctgggaacaatggagcgaggagaagtaaaaaactgctcattcaagatcaccacaaatatgaaag

SEQ ID NO: 99969 - DNA, 80 bp, synthetic construct
  source 1..80: mol_type = other DNA
ggaacaatgttactgctgattggggaaatatagagaaaggagacatgaagaactgctctttcaatatcaccacagacata

SEQ ID NO: 99970 - DNA, 80 bp, synthetic construct
  source 1..80: mol_type = other DNA
gacaataagagggaaagaggatattcatttttttctaaacttgatgtagaattaatagacaataatagtactaataatag

SEQ ID NO: 99971 - DNA, 80 bp, synthetic construct
  source 1..80: mol_type = other DNA
acaccagtaacaaataaaatgaaaaaagactatgctctcttctatagccttgatataatttcaatagaggataacaatga

SEQ ID NO: 99972 - DNA, 80 bp, synthetic construct
  source 1..80: mol_type = other DNA
aaggaccaggagacagctgagagaaaacgctgaagacatgggcaacggttgtttcaagatataccacaaatgtgacaatg

SEQ ID NO: 99973 - DNA, 80 bp, synthetic construct
  source 1..80: mol_type = other DNA
taataccaatagtgaagatcttttgatactgtgggggattcatcattctaacaacgcagcagaacaaacagatctctata

SEQ ID NO: 99974 - DNA, 80 bp, synthetic construct
  source 1..80: mol_type = other DNA
tcaaaacgctcaatacaccaacaacaatggaaagagtctccttttcatgtggggcatacatcacccacctactgataccg

SEQ ID NO: 99975 - DNA, 80 bp, synthetic construct
  source 1..80: mol_type = other DNA
atttgatcgctccatggtatgggcacattctttcaggggagagtcatggaagaatcttaaaaactgatttgaacaccgga

SEQ ID NO: 99976 - DNA, 80 bp, synthetic construct
  source 1..80: mol_type = other DNA
cacttggaggtgtgtttcatgtattcagatttccatttcatcaatgaacaaggcgaatcaatagtagtagaacttgacga

SEQ ID NO: 99977 - DNA, 80 bp, synthetic construct
  source 1..80: mol_type = other DNA
atgaatcccaatcagaaaatagcgaccattggctccatctcattgggactagttgtattcaatgttctactgcatgcctt

SEQ ID NO: 99978 - DNA, 80 bp, synthetic construct
  source 1..80: mol_type = other DNA
aggtttcgggtttcgacagggaactgatgtgtggatggggcggacaattagtcgaacctccaggtcagggtttgaaataa

SEQ ID NO: 99979 - DNA, 80 bp, synthetic construct
  source 1..80: mol_type = other DNA
taagggtaaagaatggttggacgcagacaagcaaagaacagattagaaggcaggtggttgttgataatttgaattggtcg

SEQ ID NO: 99980 - DNA, 80 bp, synthetic construct
  source 1..80: mol_type = other DNA
ggatacagtgggtctttcactttaccagtagaattgtctgggagggaatgtttagtcccctgtttttgggtcgaaatgat

SEQ ID NO: 99981 - DNA, 80 bp, synthetic construct
  source 1..80: mol_type = other DNA
cagaggcaggccagaagaaagaacaatctggacctctagtagctccattgtaatgtgtggagttgatcatgaaattgccg

SEQ ID NO: 99982 - DNA, 80 bp, synthetic construct
  source 1..80: mol_type = other DNA
atgaaacagttaggatagagaaagtgacccagtggtacaacactagtgtagtcgaacatgtaccgcattggaacgagggc

SEQ ID NO: 99983 - DNA, 80 bp, synthetic construct
  source 1..80: mol_type = other DNA
gcttatataaacaacaccgaaccaatatgtgatgtcaagggctttgcacctttttccaaggacaacggaataagaattgg

SEQ ID NO: 99984 - DNA, 80 bp, synthetic construct
  source 1..80: mol_type = other DNA
ctccagaggacatatttttgtcataagggagcctttcgtctcttgttcacctgtagagtgcagaactttcttcctcactc

SEQ ID NO: 99985 - DNA, 80 bp, synthetic construct
  source 1..80: mol_type = other DNA
agggagctctactcaatgacaaacactcaaatggaacagtgaaggataggagcccattcagaactctcatgagtgtcgaa

SEQ ID NO: 99986 - DNA, 80 bp, synthetic construct
  source 1..80: mol_type = other DNA
gtgggtcaatcacccactgtgtatcaagcaaggtttgaagctgtagcatggtcagcaacagcctgtcatgatggtaagaa

SEQ ID NO: 99987 - DNA, 80 bp, synthetic construct
  source 1..80: mol_type = other DNA
atggatgacgattggtgtgacagggccagattcgaaagcaatagcagtagtccattacggaggagtgcccactgatattg

SEQ ID NO: 99988 - DNA, 80 bp, synthetic construct
  source 1..80: mol_type = other DNA
ttaactcctgggcaggagaaatattacggactcaggagtcatcttgtacttgcattcaaggtaattgttattgggtaatg

SEQ ID NO: 99989 - DNA, 80 bp, synthetic construct
  source 1..80: mol_type = other DNA
actgacggtccatccaatagacaggcgcagtatagaatatacaaagcaaatcaaggcaaaataattgaccaagctgatgt

SEQ ID NO: 99990 - DNA, 80 bp, synthetic construct
  source 1..80: mol_type = other DNA
gagcatcatattaatggtgttagccctggggaaaagtgaaaacaatggaatctgcaagggaactatagtaagggaatata

SEQ ID NO: 99991 - DNA, 80 bp, synthetic construct
  source 1..80: mol_type = other DNA
cagctttagtggagggcatattgaggaatgctcttgttatccaaatgatggtaaagtggaatgcgtgtgtagagacaact

SEQ ID NO: 99992 - DNA, 80 bp, synthetic construct
  source 1..80: mol_type = other DNA
ggatgggaactaacaggcctgtgctagttatctcgcctgacctctcttacagggttgggtatttatgtgcgggattgccc

SEQ ID NO: 99993 - DNA, 80 bp, synthetic construct
  source 1..80: mol_type = other DNA
agtgacaccccaagaggggaagatgcccaatttgtcggttcgtgcactagtcccatgggaaatcaggggtatggcgtaaa

SEQ ID NO: 99994 - DNA, 80 bp, synthetic construct
  source 1..80: mol_type = other DNA
gccattcaatccaaacagggaatcaatatgtcaacatcagcaataccaattttcttgctgagcaggatgttacttcggta

SEQ ID NO: 99995 - DNA, 80 bp, synthetic construct
  source 1..80: mol_type = other DNA
cttgttgactacagttacgttgcatttcaagcaacacgattgcaacccccctccaaacaaccaagtaatgctgtgtgaac

SEQ ID NO: 99996 - DNA, 80 bp, synthetic construct
  source 1..80: mol_type = other DNA
ttggttgcacaaattagaatacaaatatccagcactaaatgtgacaatgcaaaataatggcaaatttgacaaattataca

SEQ ID NO: 99997 - DNA, 80 bp, synthetic construct
  source 1..80: mol_type = other DNA
atactaagaatacggcaacactgtgcctgggacaccatgcagttccaaacggaacgctagtgaagacaatcactagtgat

SEQ ID NO: 99998 - DNA, 80 bp, synthetic construct
  source 1..80: mol_type = other DNA
cctggtaaccactgttacattacatttcaagcagcatgaatgcagctcccccccaaaaaaagaaaaagaaaaccaggtaa

SEQ ID NO: 99999 - DNA, 80 bp, synthetic construct
  source 1..80: mol_type = other DNA
tgccatgtaaaccgacagtaatagaaagaaaaacaacagaggtagtgtatctgaacaacaccatcatagagaaggagaat

SEQ ID NO: 100000 - DNA, 80 bp, synthetic construct
  source 1..80: mol_type = other DNA
cttactaccgatagtgtcattcctgtagctgagatgcatattatcttctgatttggattcattgttaccctgcttttgct

SEQ ID NO: 100001 - DNA, 80 bp, synthetic construct
  source 1..80: mol_type = other DNA
aggaggaggcccggatcctggagtcaaaggatttgcattcctagatggggaaaattcatggctgggaaggacaattagca

SEQ ID NO: 100002 - DNA, 80 bp, synthetic construct
  source 1..80: mol_type = other DNA
aagactcccggtcaggctacgaaatgctaaaagtcccaaatgcggaaaccagcactcaatctggtccaaccgcacaccag

SEQ ID NO: 100003 - DNA, 80 bp, synthetic construct
  source 1..80: mol_type = other DNA
gtggttgtcaacaaccagaactggtcaggatactcaggagcattcatagactactgggcaaacaaggaatgctttaatcc

SEQ ID NO: 100004 - DNA, 80 bp, synthetic construct
  source 1..80: mol_type = other DNA
ctgtttctatgtagagctaattagagggaaacccaaagaaagcagtgtattgtggacttcaaacagcattgtagcacttt

SEQ ID NO: 100005 - DNA, 80 bp, synthetic construct
  source 1..80: mol_type = other DNA
caaatgggaatggcacaaacacagcaacaacaataatcaacaacaataccaacaatttcacaaacatcaccaatattgtc

SEQ ID NO: 100006 - DNA, 80 bp, synthetic construct
  source 1..80: mol_type = other DNA
caaaataaaaatgaggagaagacatttctaaatttaactaagcctctatgcgcggtcaactcatggcacatcctgtcaaa

SEQ ID NO: 100007 - DNA, 80 bp, synthetic construct
  source 1..80: mol_type = other DNA
ggacaatgcaataagaattggagaaaatgctcacatattagtcacaagggagccttacctatcctgtgacccacaagggt

SEQ ID NO: 100008 - DNA, 80 bp, synthetic construct
  source 1..80: mol_type = other DNA
gcagaatgtttgctctaagtcaaggcacaacactcagaggacagcatgcaaatggaactatacatgatagaagcccttac

SEQ ID NO: 100009 - DNA, 80 bp, synthetic construct
  source 1..80: mol_type = other DNA
agagccctagtaagttgggaaatgggtcaggcacccagtccatataatgtcaaagtagaatgtataggttggtcgagcac

SEQ ID NO: 100010 - DNA, 80 bp, synthetic construct
  source 1..80: mol_type = other DNA
atcatgccatgacggcaggtcaaggatgtctatatgtatgtcaggaccaaacaataatgcttcagctgtagtatggtatg

SEQ ID NO: 100011 - DNA, 80 bp, synthetic construct
  source 1..80: mol_type = other DNA
ggggtagaccgataactgagattccatcatgggcaggtaacattctcagaactcaagaatcagagtgtgtgtgccataat

SEQ ID NO: 100012 - DNA, 80 bp, synthetic construct
  source 1..80: mol_type = other DNA
ggaatttgcccggtaatcatgacagatggcccagcaaataataaagcagcaactaaaataatttactttaaagaagggaa

SEQ ID NO: 100013 - DNA, 80 bp, synthetic construct
  source 1..80: mol_type = other DNA
cctcctgataggaattgccaacttaggtttgaacatcggactccactacaaggcttgtgatgcaccagattcacctagcc

SEQ ID NO: 100014 - DNA, 80 bp, synthetic construct
  source 1..80: mol_type = other DNA
aattcaaaaaattgaagatctgacagggagcgcccaacacattgaagaatgctcatgctatggagcaaaaggagtgatca

SEQ ID NO: 100015 - DNA, 80 bp, synthetic construct
  source 1..80: mol_type = other DNA
aatgcatatgcagagacaattggaaaggagcaaataggccggtaatcactatagatcctgaaatgatgacccacagcagc

SEQ ID NO: 100016 - DNA, 80 bp, synthetic construct
  source 1..80: mol_type = other DNA
aaatatttgtgttcaaaagtcctaactgataccagtcgtcctaatgatccaaataatgggaactgcgacgcaccaataac

SEQ ID NO: 100017 - DNA, 80 bp, synthetic construct
  source 1..80: mol_type = other DNA
tatcgtgaccaaagaagaggaaaggacatttctaaatctgactaaacctctatgtgaggtaaactcatggcacattctgt

SEQ ID NO: 100018 - DNA, 80 bp, synthetic construct
  source 1..80: mol_type = other DNA
cgaaggtcgtgcacatgtcagtcccccaaggcgcagcctttgccccacacttaggcaccatacattacaccaccaatgac

SEQ ID NO: 100019 - DNA, 80 bp, synthetic construct
  source 1..80: mol_type = other DNA
actgattatagcccccccaccagcataatttgcacactagattggctgtctcaaactgctggccagaacaatgtcgaccc

SEQ ID NO: 100020 - DNA, 80 bp, synthetic construct
  source 1..80: mol_type = other DNA
ctggcagataccaagttatggatctactttaaccgaggctgcccagttggcacctcctatttacccccctgggtttggtg

SEQ ID NO: 100021 - DNA, 80 bp, synthetic construct
  source 1..80: mol_type = other DNA
aaacattggttttctttctatcagatttccctatttccaatggtaagaatggacttagtgtgccttgtacccttccacaa

SEQ ID NO: 100022 - DNA, 80 bp, synthetic construct
  source 1..80: mol_type = other DNA
gagaggccgccctcttgcattatgtggatcctgatactcgtcgtaatcttggtgagttcaaattgtacccagaaggtttc

SEQ ID NO: 100023 - DNA, 80 bp, synthetic construct
  source 1..80: mol_type = other DNA
atgacttgtgttcctaatggtagtagtggtggtcctcaaactttacctattaatggagtttttgtttttgtttcttgggt

SEQ ID NO: 100024 - DNA, 80 bp, synthetic construct
  source 1..80: mol_type = other DNA
cttgggtctctcgcttttatcagttgaagcctgtgggaacggccggcgtggctcgtaggcttggaatcaggagatcataa

SEQ ID NO: 100025 - DNA, 80 bp, synthetic construct
  source 1..80: mol_type = other DNA
tcccaaaacatttccattgctcaaatgacaatgttccctcacgttattgctgacgtgagggtcctagaacctatagagat

SEQ ID NO: 100026 - DNA, 80 bp, synthetic construct
  source 1..80: mol_type = other DNA
acttttagcttccttttcttagtaccccccaatgttgagcaaaagactaggccttttagtgtccccaacatacctttgaa

SEQ ID NO: 100027 - DNA, 80 bp, synthetic construct
  source 1..80: mol_type = other DNA
aaaatggtagggttacattggatggtcaactgcagggtaccacacccacgtcagtgagccaattgtgtaagattagaggc

SEQ ID NO: 100028 - DNA, 80 bp, synthetic construct
  source 1..80: mol_type = other DNA
accaattatcatgcacaagggggtagtgggataaatttgacagagctgaatggtgaaccttaccatgcctttgagagtcc

SEQ ID NO: 100029 - DNA, 80 bp, synthetic construct
  source 1..80: mol_type = other DNA
cgctccaatagggtttccagatcttggcaattgtgattggcatctcactgcaacccccacgcaggctttcaacgacggat

SEQ ID NO: 100030 - DNA, 80 bp, synthetic construct
  source 1..80: mol_type = other DNA
ttgttccaaaattaggttctgtcaactttgggagtgaaagtcccgattttcaggtttctcagccaactaggttcacacca

SEQ ID NO: 100031 - DNA, 80 bp, synthetic construct
  source 1..80: mol_type = other DNA
gttgggatcaaaattgaaactggacacccttttgaacaatggaaattgcccaactatgctggagcactaacacttaatat

SEQ ID NO: 100032 - DNA, 80 bp, synthetic construct
  source 1..80: mol_type = other DNA
gtgtcagtgacggcgtcattgactgtctgcttcctcaggagtggatacaacacttctatcaggagtctgctccttctcag

SEQ ID NO: 100033 - DNA, 80 bp, synthetic construct
  source 1..80: mol_type = other DNA
tcagatgtagctctaatcaggtatgtcaaccctgacacgggtcgcactctctttgaggcgaagctccacaggaccggata

SEQ ID NO: 100034 - DNA, 80 bp, synthetic construct
  source 1..80: mol_type = other DNA
ccggatacatcactgttgcccataccggcgattatcctcttgttgtcccctctaatggcttcttcagatttgactcctgg

SEQ ID NO: 100035 - DNA, 80 bp, synthetic construct
  source 1..80: mol_type = other DNA
ttttcgccgctgtgccaccaaattttccagttgaatttcttagtcctgctcaaataactatgcttccacatttgatagtt

SEQ ID NO: 100036 - DNA, 80 bp, synthetic construct
  source 1..80: mol_type = other DNA
gatgttagaactcttgaaccaatcatgatacctctccctgatgtgagaaataccttcttccattacaacaaccggccctc

SEQ ID NO: 100037 - DNA, 80 bp, synthetic construct
  source 1..80: mol_type = other DNA
tgagcgcatgcgcttagtggctatgctgtatactcctttaagatctaatggttcaggtgatgatgttttcacagtctcgt

SEQ ID NO: 100038 - DNA, 80 bp, synthetic construct
  source 1..80: mol_type = other DNA
atcctgaccatctctgaattgaccaattcaagattcccagcacctattgattcactgtttactgctcagaataatgtcct

SEQ ID NO: 100039 - DNA, 80 bp, synthetic construct
  source 1..80: mol_type = other DNA
caatgtccagtgtcaaaatggtcggtgcactctggatggtgagttgcaaggaaccacccaattactcccaactggaatat

SEQ ID NO: 100040 - DNA, 80 bp, synthetic construct
  source 1..80: mol_type = other DNA
gtgccttcaggggaaagataacagcagatgtagaacatcagcatgatgacaggtggcatatgagtttaacaaacctcaat

SEQ ID NO: 100041 - DNA, 80 bp, synthetic construct
  source 1..80: mol_type = other DNA
ggaaccccttttgatccaacagaagatgtcccagccccattaggcacccctgacttcacaggcctcctcttcggagttgc

SEQ ID NO: 100042 - DNA, 80 bp, synthetic construct
  source 1..80: mol_type = other DNA
aagtcaaagaaatgctgacaacactaccagggcccatgaggcagtggtagcaacaactagcacacaatttgtaccaaaat

SEQ ID NO: 100043 - DNA, 80 bp, synthetic construct
  source 1..80: mol_type = other DNA
taggctctgtcaactttgggagtagaagtggtgatttccaagtgggccaaccaaccaaattcacaccagttggaatctca

SEQ ID NO: 100044 - DNA, 80 bp, synthetic construct
  source 1..80: mol_type = other DNA
actgatgatgagaatcctttcaagcaatgggacctacctcactattctggagtactgacccttaatatgaatcttgcccc

SEQ ID NO: 100045 - DNA, 80 bp, synthetic construct
  source 1..80: mol_type = other DNA
tcctgttgccccaaacttcccgggtgagcagctgcttttccttagatcaaatgtcccctgtgccggtggtatcagtgatg

SEQ ID NO: 100046 - DNA, 80 bp, synthetic construct
  source 1..80: mol_type = other DNA
gcgtcattgactgcctaatgcctcaagagtggatacaacacttctaccaggagtccgctccatctcaatcagacgtggca

SEQ ID NO: 100047 - DNA, 80 bp, synthetic construct
  source 1..80: mol_type = other DNA
ctgatcaggtacgtcaaccctgacacgggccgcactctctttgaggcaaagctccacagaactggctacatcaccgttgc

SEQ ID NO: 100048 - DNA, 80 bp, synthetic construct
  source 1..80: mol_type = other DNA
ctggctacatcaccgttgctcacactggtgactatcctcttgttgttccttctaatggctattttagatttgagtcttgg

SEQ ID NO: 100049 - DNA, 80 bp, synthetic construct
  source 1..80: mol_type = other DNA
ccattttgatcattgctgaattgaccaactcaagatttccagcacccattgattcattgttcactgcccaaaataataat

SEQ ID NO: 100050 - DNA, 80 bp, synthetic construct
  source 1..80: mol_type = other DNA
gtgccttcagagggaagataacagcagatgtggaaagcagtcaccgagacaggtggcacatgcagttgacaaacctcaat

SEQ ID NO: 100051 - DNA, 80 bp, synthetic construct
  source 1..80: mol_type = other DNA
ggtgccccatttgacccaacagatgatgtgccggctccgcttggcactcctgacttcacgggtctgctgtttggagttgc

SEQ ID NO: 100052 - DNA, 80 bp, synthetic construct
  source 1..80: mol_type = other DNA
ggtgcagctctcgctgcggctgtcactggtcaaaataatataattgatccctggattagaacaaattttgtacaagcacc

SEQ ID NO: 100053 - DNA, 80 bp, synthetic construct
  source 1..80: mol_type = other DNA
agaaaccagaggagctctctcgacgcaggactcggcttgctgaagcgcgcgcagcaagaggcgaggccataaagcaagag

SEQ ID NO: 100054 - DNA, 80 bp, synthetic construct
  source 1..80: mol_type = other DNA
taaaaccagaggagatctctcgacgcaggactcggcttgctgagcgcgcacagcaagaggcgaggaaaatttttgactag

SEQ ID NO: 100055 - DNA, 80 bp, synthetic construct
  source 1..80: mol_type = other DNA
ccccaaagccagggattggtagattctatgattaagaaattaaagaaaatattagaccagttaggggatcaagtggaaca

SEQ ID NO: 100056 - DNA, 80 bp, synthetic construct
  source 1..80: mol_type = other DNA
attttctgttatctgtgggtatccatttaaatactgctaaaacaaaaagatggggttacaccctacatttcatgggttat

SEQ ID NO: 100057 - DNA, 80 bp, synthetic construct
  source 1..80: mol_type = other DNA
aataaagaactgctctttcaatgtcactaaaataagaaataagtggaaacaagaatatgcacttttttctaaatttgatg

SEQ ID NO: 100058 - DNA, 80 bp, synthetic construct
  source 1..80: mol_type = other DNA
catgggatagatgaccccgagagagaagtgctacagtggaagtttgacgaacgcctagaacatcaccatacagcccgcat

SEQ ID NO: 100059 - DNA, 80 bp, synthetic construct
  source 1..80: mol_type = other DNA
attgaaccagctactcgtgctggaaaacaaatagtgaaacgtattctagaagaagaatacggtgaaacacttgagatgac

SEQ ID NO: 100060 - DNA, 80 bp, synthetic construct
  source 1..80: mol_type = other DNA
tactgcttctgtgcctgcttcacgctatttaactgaaatgactcttgaagaaatgtccagagactggttcatgctcatgc

SEQ ID NO: 100061 - DNA, 80 bp, synthetic construct
  source 1..80: mol_type = other DNA
catatatcaacatcagtaacaacaattttgttgctgaacaaacagtaattccattgaaattagcgggcagctcatccctc

SEQ ID NO: 100062 - DNA, 80 bp, synthetic construct
  source 1..80: mol_type = other DNA
cacacaactcgcaattgatgggatcaacaacaaagtgaactcaataattgagaagatgaacatccaatttacctccgtgg

SEQ ID NO: 100063 - DNA, 80 bp, synthetic construct
  source 1..80: mol_type = other DNA
ctaaaggtacgacaggttcatgctcccgctctggaaccaaaagtttttatcagaatttgctatggataacaaagaaaaac

SEQ ID NO: 100064 - DNA, 80 bp, synthetic construct
  source 1..80: mol_type = other DNA
ccccacctacagtgaccaacaagccctctatcagagtaatcatacgtatgtttcagttgtaacgtcaaagtactaccaac

SEQ ID NO: 100065 - DNA, 80 bp, synthetic construct
  source 1..80: mol_type = other DNA
ggttcacacccgaaatagtagacagacctaaaatcagaaaacaagcgggcagaatgaattattattggacactattagac

SEQ ID NO: 100066 - DNA, 80 bp, synthetic construct
  source 1..80: mol_type = other DNA
atggagtcagcaataaagtgaacacaataattgagaaaatgaatattcaatttgcttcagtgggcaaggagttcaatgaa

SEQ ID NO: 100067 - DNA, 80 bp, synthetic construct
  source 1..80: mol_type = other DNA
ggcgggaacaacagtttcatgctccaaatctggagctaatagtttttatcggaatttgctatggataacaagcaagggaa

SEQ ID NO: 100068 - DNA, 80 bp, synthetic construct
  source 1..80: mol_type = other DNA
aaccttattctaaactcagcaagtcatacaaaaacaacaaggggaaagaagttcttgtaatatggggggtgcaccaccct

SEQ ID NO: 100069 - DNA, 80 bp, synthetic construct
  source 1..80: mol_type = other DNA
gggaaagaagttcttgtaatatggggggtgcaccaccctccgacatacagtgatcaacaaaccctctaccagaataacca

SEQ ID NO: 100070 - DNA, 80 bp, synthetic construct
  source 1..80: mol_type = other DNA
agtgaagatgaatccaaatcagaagataataacgattggtcttgtatccttaaccactgcaacaatgtgttttttcatgc

SEQ ID NO: 100071 - DNA, 80 bp, synthetic construct
  source 1..80: mol_type = other DNA
ggtaaaaggctgggcctttgacgatggaaatgacatatggatgggaagaaccatcaacaatgagttgcgtttgggttacg

SEQ ID NO: 100072 - DNA, 80 bp, synthetic construct
  source 1..80: mol_type = other DNA
aaactttcaaggttattgatggttggaccaggtctaattccaaatctcagacaaataggcaagtcatagttgatagcact

SEQ ID NO: 100073 - DNA, 80 bp, synthetic construct
  source 1..80: mol_type = other DNA
catatggctcaggctcatggcctgatggggctgacatcaatctcatgcctatataagctttcgcaatttcagaaaaaact

SEQ ID NO: 100074 - DNA, 80 bp, synthetic construct
  source 1..80: mol_type = other DNA
tcgtgtgcaccaatagtaatagagaaaaacaggacagaaattgtgtatttaaccaataccaccatagagaaagagatatg

SEQ ID NO: 100075 - DNA, 80 bp, synthetic construct
  source 1..80: mol_type = other DNA
gggccatttggattacgagagaaccttatgtatcatgcgaccctagcaagtgttaccaatttgcgcttggacaagggacc

SEQ ID NO: 100076 - DNA, 80 bp, synthetic construct
  source 1..80: mol_type = other DNA
tataactgggtatgataataatgcaactgctagcttcatatatgatggaaggcttgtggacagcattggttcgtggtccc

SEQ ID NO: 100077 - DNA, 80 bp, synthetic construct
  source 1..80: mol_type = other DNA
atgaaatcctccgaacccaggaatcagaatgcgtttgtatcaacggtacctgcacagtggtgatgaccgatggaagtgct

SEQ ID NO: 100078 - DNA, 80 bp, synthetic construct
  source 1..80: mol_type = other DNA
aagttgccattttggtaactactgtaacattgcatttcaagcagtatgagtacaattcctctgcaatcaatcaagtagcg

SEQ ID NO: 100079 - DNA, 80 bp, synthetic construct
  source 1..80: mol_type = other DNA
ttctggttatgtgtgctcaggccttgttggcgatacacccagaaacaacgatagttatagcaacagcaattgccaagccc

SEQ ID NO: 100080 - DNA, 80 bp, synthetic construct
  source 1..80: mol_type = other DNA
gttggcgatacacccagaaacaacgatagttatagcaacagcaattgccaagcccctaataatgagaaagggtggcatgg

SEQ ID NO: 100081 - DNA, 80 bp, synthetic construct
  source 1..80: mol_type = other DNA
gtcacaaaccagtagaatacaagagctgggcaaaaccacaatgtaaaatcacaggatttgcacctttctccaaggacaat

SEQ ID NO: 100082 - DNA, 80 bp, synthetic construct
  source 1..80: mol_type = other DNA
ggagtgaagggctgggcttttgacgatggaaatgatgtatggatgggaagaactatcagtgaagattcacggtcaggtta

SEQ ID NO: 100083 - DNA, 80 bp, synthetic construct
  source 1..80: mol_type = other DNA
cataatctcaatttggattagccatacaattcaaacggggaaccaaacccataccgaaacatgcaatcaaagcattatca

SEQ ID NO: 100084 - DNA, 80 bp, synthetic construct
  source 1..80: mol_type = other DNA
tgaaaaagttgagaggttaaagaatggtacctttggtccagtccatttccgaaaccaagttaaaatacgcagaagagtcg

SEQ ID NO: 100085 - DNA, 80 bp, synthetic construct
  source 1..80: mol_type = other DNA
ccagctactcgtgcaggaaaacaaatagtggaacgcattctggaagaagagcacgatgaagcacttaaaataaccatcgc

SEQ ID NO: 100086 - DNA, 80 bp, synthetic construct
  source 1..80: mol_type = other DNA
agtttaaaatgaatccaaatcagaagataataatcatcagctcaatatgcatgataaatggaattgctagcttaatgtta

SEQ ID NO: 100087 - DNA, 80 bp, synthetic construct
  source 1..80: mol_type = other DNA
catatgtcaatatcagtaacaacaattttattgctgaacaggcaacagttccagtgaaattagcgggcagttcttctctc

SEQ ID NO: 100088 - DNA, 80 bp, synthetic construct
  source 1..80: mol_type = other DNA
aagtcccctccccgtacaactcaaaatttgagtcagttgcttggtcagcaagtgcttgccatgatgggtccagttggttg

SEQ ID NO: 100089 - DNA, 80 bp, synthetic construct
  source 1..80: mol_type = other DNA
ggatatttgaatcaaccaagatgaaagcaaaactgtttgtattattttgtacattcactgcactgagagctgacaccatt

SEQ ID NO: 100090 - DNA, 80 bp, synthetic construct
  source 1..80: mol_type = other DNA
agtttaaaatgaatccaaatcagaagataatgatcatcggctcaatctgtatgacaaatggaattgctagcctgatatta

SEQ ID NO: 100091 - DNA, 80 bp, synthetic construct
  source 1..80: mol_type = other DNA
aagtcccctctccctataattcaagatttgagtcggttgcttggtcagcaagtgcttgccacgacggatccagttggttg

SEQ ID NO: 100092 - DNA, 80 bp, synthetic construct
  source 1..80: mol_type = other DNA
cttccagctccagatatacctaccgcagaaaactaacaaatccgcttgaagaaacacaaggaattgaccttcacattgag

SEQ ID NO: 100093 - DNA, 80 bp, synthetic construct
  source 1..80: mol_type = other DNA
gtcctaacagttctgtttacactacataaagcgtcaatcccaacaatgaaaattgcgctgaaaacatcaaagtgttcata

SEQ ID NO: 100094 - DNA, 80 bp, synthetic construct
  source 1..80: mol_type = other DNA
gatgcggaaagattcagttttccaagagtgattaattcagctgacggagcaactacatggtactttaatccagtaattgc

SEQ ID NO: 100095 - DNA, 80 bp, synthetic construct
  source 1..80: mol_type = other DNA
ctatacatttttgatgtatctagagttccggacgaccaaatgtatagattaagggatagattacgtttattgccagtaga

SEQ ID NO: 100096 - DNA, 80 bp, synthetic construct
  source 1..80: mol_type = other DNA
atttacatcataaggaattattttacataaatgacgtgcaaaaacttaaagataattcaatactatatatagatataaga

SEQ ID NO: 100097 - DNA, 80 bp, synthetic construct
  source 1..80: mol_type = other DNA
ctcaaatacagatggagtagtttatgaaagtacaaataatagtgacttttggacagcagttatcgctgttgaaccacatg

SEQ ID NO: 100098 - DNA, 80 bp, synthetic construct
  source 1..80: mol_type = other DNA
tacttagacgtatttatgatagattaactacacgtgagattgagcaagttgagttacttagacgtatttatgatagattc

SEQ ID NO: 100099 - DNA, 80 bp, synthetic construct
  source 1..80: mol_type = other DNA
aaataaagcgagaaagtaatcctttattgaggacgtcaatgcgtatgaaacaaggtaatactcttcgggtgagtaactaa

SEQ ID NO: 100100 - DNA, 80 bp, synthetic construct
  source 1..80: mol_type = other DNA
ggtcgaattacttaaacgtatatatgataaattagcagttagaccatttgacgctatagatatgtcaaaagagattaatc

SEQ ID NO: 100101 - DNA, 80 bp, synthetic construct
  source 1..80: mol_type = other DNA
tccagttaatgcgtccaccaaatatgacgccagccgtaaatgcattatttccgcaagcccaaccttttcaacaccatgcg

SEQ ID NO: 100102 - DNA, 80 bp, synthetic construct
  source 1..80: mol_type = other DNA
ttttagatcaaaactttattgaatacaaaattaccttgaacgaagataaaccaatttcagatatatgcgttaaagaactt

SEQ ID NO: 100103 - DNA, 80 bp, synthetic construct
  source 1..80: mol_type = other DNA
ctcaccagcttttcgattagatcgaatgcagttaagacaaatgcagacgctggcgtgtctatggattcatcgacgcaatc

SEQ ID NO: 100104 - DNA, 80 bp, synthetic construct
  source 1..80: mol_type = other DNA
attgtaaatataagaaaaaatatttcgcactaagaatgaggatgaagcgggtcacaaaacgggagtggggagctccctag

SEQ ID NO: 100105 - DNA, 80 bp, synthetic construct
  source 1..80: mol_type = other DNA
ggtcaatcaaaagaaattgaaactactgccactgccgaaggaggagaaatagtattccaaaatgctacttttactatgtg

SEQ ID NO: 100106 - DNA, 80 bp, synthetic construct
  source 1..80: mol_type = other DNA
atgtcatcagcttcaaatggtgaatcaaggcaacttaaatttggtcgcaaaacaatattttcaactaagaaaaatatgca

SEQ ID NO: 100107 - DNA, 80 bp, synthetic construct
  source 1..80: mol_type = other DNA
gtgctgttgcttcaggagaaaaacaaactaaggcagctaattctatagctaatttggcactcattaaaacagtattgtca

SEQ ID NO: 100108 - DNA, 80 bp, synthetic construct
  source 1..80: mol_type = other DNA
tccagcaggacaaacacacctacctttccaacaaccaagcggtgccatgtgaaccgatcataatagagagaaacaaaacg

SEQ ID NO: 100109 - DNA, 80 bp, synthetic construct
  source 1..80: mol_type = other DNA
gaaatagtgtacttgaacaacattaccatagagagagaaagttgccccacagtagcagattacagagtttggtcaaaacc

SEQ ID NO: 100110 - DNA, 80 bp, synthetic construct
  source 1..80: mol_type = other DNA
gcatcgggaatcaagctagcccttgggctgtccaccttcttcatggatctggcttgtttgttgcccattttgtaagatgg

SEQ ID NO: 100111 - DNA, 80 bp, synthetic construct
  source 1..80: mol_type = other DNA
ttgattgtatcattacctttcctttggatttgctaaaacacagagcgtatcctttaaagtcaatccagtcgtccattgtt

SEQ ID NO: 100112 - DNA, 80 bp, synthetic construct
  source 1..80: mol_type = other DNA
aatgactttatccaaatcacttattgaaggttgattgcccgcagcagaatgtgagccatgctttacaggctccttgtact

SEQ ID NO: 100113 - DNA, 80 bp, synthetic construct
  source 1..80: mol_type = other DNA
ccatggaagatgagatcgccattgccaaggacttggtggcaaaatacctggctgacaatgaaaaattgtcaagacaaaag

SEQ ID NO: 100114 - DNA, 80 bp, synthetic construct
  source 1..80: mol_type = other DNA
acttttgatctgaaacctgatggtctgatttaatcttacgcatccgggtggtaatgcagccacagactcaaagaagtctt

SEQ ID NO: 100115 - DNA, 80 bp, synthetic construct
  source 1..80: mol_type = other DNA
acttcagcaaggacactcataccgcagtcaggtaaggcacccatgagtagttggacaatatctactcctgtccattgtac

SEQ ID NO: 100116 - DNA, 80 bp, synthetic construct
  source 1..80: mol_type = other DNA
caccaattttatgtctttccttccctgtgactccaagagtttcttaatgtcctctgacccctgacaggtgatgaccatgt

SEQ ID NO: 100117 - DNA, 80 bp, synthetic construct
  source 1..80: mol_type = other DNA
taacatcccaaactctcactatgccatctctcccagcatttgtcccttgaccaccaccagtcataccaatcatactcaat

SEQ ID NO: 100118 - DNA, 80 bp, synthetic construct
  source 1..80: mol_type = other DNA
ccatctcccattggttaccttggacttctatcacaaagaaccagagatatttacatcagcaggagactgttgggaacgtt

SEQ ID NO: 100119 - DNA, 80 bp, synthetic construct
  source 1..80: mol_type = other DNA
cggggggcaagcacaacaaggcaatcagtcgatatcctccactggtctcattccccagaccaattcttcacatgttctgc

SEQ ID NO: 100120 - DNA, 80 bp, synthetic construct
  source 1..80: mol_type = other DNA
gcagaccttcaccctctggaatagacgttctatgtgggaaccatgtaaaagagcccagggtcctcgttgttgctacaaat

SEQ ID NO: 100121 - DNA, 80 bp, synthetic construct
  source 1..80: mol_type = other DNA
gacctcacatacgattcaaagtaaatttgtctcataaaattgtcgactgcatcagtggtgctgacaactctttcttctat

SEQ ID NO: 100122 - DNA, 80 bp, synthetic construct
  source 1..80: mol_type = other DNA
gctcatgtattctactatgagatactcgtagttcagatgacaagacgatgtaatgttcttcacgcttccacttaactata

SEQ ID NO: 100123 - DNA, 80 bp, synthetic construct
  source 1..80: mol_type = other DNA
tgagagacgagggacaatgcttcacaattcacatctagtgccacacagaggtctaagaactttattctaggcgaccactt

SEQ ID NO: 100124 - DNA, 80 bp, synthetic construct
  source 1..80: mol_type = other DNA
cattttggtggaggccaaatcactcataaagggcagtatgtgtttttcaaatgtggcaggatacaacctcctaagagagt

SEQ ID NO: 100125 - DNA, 80 bp, synthetic construct
  source 1..80: mol_type = other DNA
gaatgatgtggcttacacccactctatcttccagcaacttagatgctgtgggctttaacgggaagtaatcacatggatta

SEQ ID NO: 100126 - DNA, 80 bp, synthetic construct
  source 1..80: mol_type = other DNA
tgcttaaagaacttcattggggttgactccttcggctcccccaggacccatgctcctaattcaattgcggttgacagaga

SEQ ID NO: 100127 - DNA, 80 bp, synthetic construct
  source 1..80: mol_type = other DNA
aactcaatccagtcatctattgtcttcaatagctcggcaaggacactcataccacaatcaggcatgatcttcatgagcag

SEQ ID NO: 100128 - DNA, 80 bp, synthetic construct
  source 1..80: mol_type = other DNA
aatacacatgtaatcccacagcaaaggtcggaagtaactagccacatcctcaaactcctgccttactttcagagggaccc

SEQ ID NO: 100129 - DNA, 80 bp, synthetic construct
  source 1..80: mol_type = other DNA
tccaaaattgaattccgaattcatccaccagtgcctcaatttcctgaatatttgcaattgatgactggattgattttata

SEQ ID NO: 100130 - DNA, 80 bp, synthetic construct
  source 1..80: mol_type = other DNA
taaagattttctttctttggccctcttacacatttactacccagtgtcctacataaaccaacgaagccagacgcaattga

SEQ ID NO: 100131 - DNA, 80 bp, synthetic construct
  source 1..80: mol_type = other DNA
actttgaaatgcagacttgttgatagcttcggacaagagcttctgtgcacctctagtgaatgtagatgataatttgtttt

SEQ ID NO: 100132 - DNA, 80 bp, synthetic construct
  source 1..80: mol_type = other DNA
ggatggtcttcactattgttgggaccttttcttcatctaagttgactgcacctgagtaaatgattttctgcctaagcacc

SEQ ID NO: 100133 - DNA, 80 bp, synthetic construct
  source 1..80: mol_type = other DNA
attctcagtgggtgatgagctgttaaatttagccagcaatattctaagtcagaatctgatagaggctcaacacccatcat

SEQ ID NO: 100134 - DNA, 80 bp, synthetic construct
  source 1..80: mol_type = other DNA
atcacagagatttttaagtgaggatgaatgttcatttgaaaggtagttggttgtgaattcctcatgaagatccccaactt

SEQ ID NO: 100135 - DNA, 80 bp, synthetic construct
  source 1..80: mol_type = other DNA
tcaacttgttgaacagctttcttaacattgaccgaatcttcttacaggcttcaggggtaagcctctcaatttgcctcatg

SEQ ID NO: 100136 - DNA, 80 bp, synthetic construct
  source 1..80: mol_type = other DNA
ctggacaacatccacccctgtccattgtaccctcaacttcagcctatctgccatcatggcagccaatgccccaaccaaca

SEQ ID NO: 100137 - DNA, 80 bp, synthetic construct
  source 1..80: mol_type = other DNA
ttttgggacttacaaatttattcaactgatcactcatataaaaatgaaattctaataatgtcttgaactcatctgggtcc

SEQ ID NO: 100138 - DNA, 80 bp, synthetic construct
  source 1..80: mol_type = other DNA
cgtgacatcagttctgtaagactctgatcaaacaaagatatttggtcatcactggatgtgtaagcgtcgatcacccctcc

SEQ ID NO: 100139 - DNA, 80 bp, synthetic construct
  source 1..80: mol_type = other DNA
acaaacacatccgatagcatagttaataaatctttcagaaatgagtgcatagaaatccgaagtattatgtagaatgcctt

SEQ ID NO: 100140 - DNA, 80 bp, synthetic construct
  source 1..80: mol_type = other DNA
gccccatgtctatgatggagctcacatgggaaggcaccaaaccaatttgaaagttggagtagaaaaagtcttcaatgata

SEQ ID NO: 100141 - DNA, 80 bp, synthetic construct
  source 1..80: mol_type = other DNA
gtctgtgatgtgctttttcttagacctaattgtgctttaatataagacttcatcattgctgacacaacattgaatggtat

SEQ ID NO: 100142 - DNA, 80 bp, synthetic construct
  source 1..80: mol_type = other DNA
ctccaccatcttatgcatgtgccatgtcagaagagttgaaagataatcacgccctttaatgtccgcctgcaagtcttttg

SEQ ID NO: 100143 - DNA, 80 bp, synthetic construct
  source 1..80: mol_type = other DNA
acaagacaaccaaattctgcagcactgtgagaaacaggaaaggacacatcatgggtccccatttactgtgatccatacta

SEQ ID NO: 100144 - DNA, 80 bp, synthetic construct
  source 1..80: mol_type = other DNA
tgagacagcttccagacagctgccggcttaacgcctcaaagtaatcctcaattaaccttgtaaacatttttgtcctcaag

SEQ ID NO: 100145 - DNA, 80 bp, synthetic construct
  source 1..80: mol_type = other DNA
tgttgtgagaactatcattgacttctctgatgaatatctcaaggtcttgatcctgaatgacgggtgtgaatgtagctaac

SEQ ID NO: 100146 - DNA, 80 bp, synthetic construct
  source 1..80: mol_type = other DNA
tcccctatgtaaagctctctattgcccccaacctgctctttataagataaagagaactttagtcttcccgtatcaggccc

SEQ ID NO: 100147 - DNA, 80 bp, synthetic construct
  source 1..80: mol_type = other DNA
agtggagttataagattgtggtgattcttgactataaaaacacaaattcttcagcattgctgtggtacaatttgtcaaag

SEQ ID NO: 100148 - DNA, 80 bp, synthetic construct
  source 1..80: mol_type = other DNA
aaagacagggccttactaagagcttccgaattgctctccctttcactaattctcacatcatcagagagcttgttagtgtc

SEQ ID NO: 100149 - DNA, 80 bp, synthetic construct
  source 1..80: mol_type = other DNA
aaatttgaagtttaggcacctagacttatagtgggagtatttgcccataagcttgtttccgttcatcagtaacaatattg

SEQ ID NO: 100150 - DNA, 80 bp, synthetic construct
  source 1..80: mol_type = other DNA
atttaaaacactggaaaaattcacagtcaagatatgttcttgttgccacagcttttgtgagttcaccaataggacaaccc

SEQ ID NO: 100151 - DNA, 80 bp, synthetic construct
  source 1..80: mol_type = other DNA
gtcataggaccacagtagaagtacttttcttttaaactacagtccttataaatggcattacagaattcttcatagaaact

SEQ ID NO: 100152 - DNA, 80 bp, synthetic construct
  source 1..80: mol_type = other DNA
ctctggcaagatctcatgatcaaagtcttcaatcatgtggtgtgagagttctcctttaattagccttacatgaaacttgt

SEQ ID NO: 100153 - DNA, 80 bp, synthetic construct
  source 1..80: mol_type = other DNA
tcgcgacgaccttatctagatcatttattgtaggttgttctcctattgtgagatgtaagttttgttttaccggttccctg

SEQ ID NO: 100154 - DNA, 80 bp, synthetic construct
  source 1..80: mol_type = other DNA
tactgttccacaattttcccaactgtctctcttaactgatcaaaatatattgatgctccaccatccaagagcacctcgtc

SEQ ID NO: 100155 - DNA, 80 bp, synthetic construct
  source 1..80: mol_type = other DNA
caaatcaaccttgtcaatctccatattttgccctttggaacccatcaccagactactcattgcctgctggattttgtact

SEQ ID NO: 100156 - DNA, 80 bp, synthetic construct
  source 1..80: mol_type = other DNA
ctcttatcacattcccacagtgcccctctattcacaacaagtgggaccggttctgtgtgaggacccaccatgacaaaatc

SEQ ID NO: 100157 - DNA, 80 bp, synthetic construct
  source 1..80: mol_type = other DNA
catagtcttgtttgttgagcaagaacttcccctttcgagagaaaacctcagttaactgtgtgacagccaatgcagtgagc

SEQ ID NO: 100158 - DNA, 80 bp, synthetic construct
  source 1..80: mol_type = other DNA
ttgttgaaatcataattgagaactctagagccatccgtatacttattgataaccacactcttgttgctggccaaatccag

SEQ ID NO: 100159 - DNA, 80 bp, synthetic construct
  source 1..80: mol_type = other DNA
agccgttgcgcaaccacttgtaacaatgggatcctttatttccttcttaatctccttttctttaaaaagggatccgttgt

SEQ ID NO: 100160 - DNA, 80 bp, synthetic construct
  source 1..80: mol_type = other DNA
tgaatgaagatgttagtagggagaggaacttcttcgacacaccgggtcttttataatttaacttattggcactagtacat

SEQ ID NO: 100161 - DNA, 80 bp, synthetic construct
  source 1..80: mol_type = other DNA
ccttctttacttaaaaacttttttgcattataaatcatttcatctaactcttccacagtagctctatctgctgggtttac

SEQ ID NO: 100162 - DNA, 80 bp, synthetic construct
  source 1..80: mol_type = other DNA
agtgacatgtccaaagctcaattttggctcaagaaacttttcgaagcacttaatttgatctgttaatctgtctggagttt

SEQ ID NO: 100163 - DNA, 80 bp, synthetic construct
  source 1..80: mol_type = other DNA
ctttggttatgaaatgacacatataagaaatgtttagtacaaatttgaatctgtttgtaagcatactcttcacatcttca

SEQ ID NO: 100164 - DNA, 80 bp, synthetic construct
  source 1..80: mol_type = other DNA
tgcaacactatgttcaacaaagaccttagaagcctaaatagcaaaaattcagtctctgtgattaatttttccttaagttt

SEQ ID NO: 100165 - DNA, 80 bp, synthetic construct
  source 1..80: mol_type = other DNA
gtcaattagttccttgtggtaaaagtcagagacataagccatcacaaagtacctcaagttctgtaaaaacttttgacacc

SEQ ID NO: 100166 - DNA, 80 bp, synthetic construct
  source 1..80: mol_type = other DNA
gtttgctagggtgagctaagaccacaacaagtatcatttttgttaatgacttcacattaactagttgatcttttagctca

SEQ ID NO: 100167 - DNA, 80 bp, synthetic construct
  source 1..80: mol_type = other DNA
atactctgaaaactggagcttgtgtgcatcaacgtcaatctcaagaggagtaacaggccccaattgctttgcatctgtca

SEQ ID NO: 100168 - DNA, 80 bp, synthetic construct
  source 1..80: mol_type = other DNA
ttgcagtcttctatccaactcaccatagtttctacagttgtacatagaacctcagttgagaagattgatgggaagtatct

SEQ ID NO: 100169 - DNA, 80 bp, synthetic construct
  source 1..80: mol_type = other DNA
ctttgggtcagcataaaatgagcagacttcaccaaccgcatcattgttaactgcataacactttgagcactcgcctgttt

SEQ ID NO: 100170 - DNA, 80 bp, synthetic construct
  source 1..80: mol_type = other DNA
tttgatagagtaactggaattcaatccccctcaagaagaactcttggcagtatgcctctttacatctcaccacttggtac

SEQ ID NO: 100171 - DNA, 80 bp, synthetic construct
  source 1..80: mol_type = other DNA
ctagctgctccatgttcattctgccttatcttcacagtcgaagaggtcttcatagaatttactaaagctaaactcaaaga

SEQ ID NO: 100172 - DNA, 80 bp, synthetic construct
  source 1..80: mol_type = other DNA
agagagcctttccaagtctgtggaatctaaaatctcaacagtccctagtgtgtatggaaatttctcctcttgtgattttt

SEQ ID NO: 100173 - DNA, 80 bp, synthetic construct
  source 1..80: mol_type = other DNA
gataactaattgttggggttacccctgaaacatcaagttttaatatcgaatcataaacactgcagtcaaacacatccatg

SEQ ID NO: 100174 - DNA, 80 bp, synthetic construct
  source 1..80: mol_type = other DNA
ctcaccccataatgatccacactaatgccaacagctgcaagagcagcagtggctttagtcacagtcttttgaatcactga

SEQ ID NO: 100175 - DNA, 80 bp, synthetic construct
  source 1..80: mol_type = other DNA
cctcagaatctcgtttctacacactagtgtggatgacttggaaacctcaagttgctgcctcctttctatccatttcttta

SEQ ID NO: 100176 - DNA, 80 bp, synthetic construct
  source 1..80: mol_type = other DNA
agtctcgttttgttgactctaaggatactaaccgatcatttacactgatgaaacaagaaccaagccacccttttgagctc

SEQ ID NO: 100177 - DNA, 80 bp, synthetic construct
  source 1..80: mol_type = other DNA
ctacctttgcacttcacctgatcattaatgcttgcaaggagtattattgtgtcaaagactaacattaactttcttctggt

SEQ ID NO: 100178 - DNA, 80 bp, synthetic construct
  source 1..80: mol_type = other DNA
agaattccttaataatttcagtatctacatacagaggagacctccccttgtaggtaggaccagacagcaccagcctccaa

SEQ ID NO: 100179 - DNA, 80 bp, synthetic construct
  source 1..80: mol_type = other DNA
attcaagatcctcaaggatttcactttgttcaagaacgatctccaacattgcatttgacaccagtctacagttggatctt

SEQ ID NO: 100180 - DNA, 80 bp, synthetic construct
  source 1..80: mol_type = other DNA
tggattcttcagtgtccaagtccgcatacaaaaacctcaaaattggtgaagccctcttatactggtaaatcaaatgttct

SEQ ID NO: 100181 - DNA, 80 bp, synthetic construct
  source 1..80: mol_type = other DNA
atgctatcttcatccataatcccctcatctacatatagactgttgaatttgcacatcagatcccctttttccaccttaac

SEQ ID NO: 100182 - DNA, 80 bp, synthetic construct
  source 1..80: mol_type = other DNA
aaactgacactctatctccccttgtctaattctgtttctgaacacctggtactcctcttcaatttgcatttttacctcat

SEQ ID NO: 100183 - DNA, 80 bp, synthetic construct
  source 1..80: mol_type = other DNA
aagccgacaacttgttgttaatgccctgatggcaaagagcaattatatcctcataatggtcagtgcggttgtctgtcaag

SEQ ID NO: 100184 - DNA, 80 bp, synthetic construct
  source 1..80: mol_type = other DNA
acatttaggctctccacaccagaaagtctaccggatgtcatagagagggactcacagagccgaacatattctgattcctc

SEQ ID NO: 100185 - DNA, 80 bp, synthetic construct
  source 1..80: mol_type = other DNA
aaaaagagcattgttttcttgagcaaatcgcaataatgagaatagtgtctctcttaacttatcattgacccaatcaggga

SEQ ID NO: 100186 - DNA, 80 bp, synthetic construct
  source 1..80: mol_type = other DNA
tctgctcattgtaaaatgatgttctgccgtcaataagtggaatgagattaatatcaacagatttaagatcgtttttcagt

SEQ ID NO: 100187 - DNA, 80 bp, synthetic construct
  source 1..80: mol_type = other DNA
tgctctagttttgtgagatcttcagtgtacttttgttcaaagttagctggtgaggatcttacaaagcactcaagtagaat

SEQ ID NO: 100188 - DNA, 80 bp, synthetic construct
  source 1..80: mol_type = other DNA
caatctggcaggacacatgaattcactgcaccagagtacatgacatcaacatcatcaaccaaatatttcccccgctgact

SEQ ID NO: 100189 - DNA, 80 bp, synthetic construct
  source 1..80: mol_type = other DNA
ccatcagggacgacaaagcagagagaaggggttggaattccaaaatcgtggaggatattttcgacggatttgtcctctgt

SEQ ID NO: 100190 - DNA, 80 bp, synthetic construct
  source 1..80: mol_type = other DNA
gttgtgttcacatccatttgcgttacatgagtcgagttcaatacaaagagataataactttaacccttccataagaagca

SEQ ID NO: 100191 - DNA, 80 bp, synthetic construct
  source 1..80: mol_type = other DNA
ttctaggttctgtttgaaccaagaatgctaatttttgccttgataacttctcattgtcaaccaggtattttgccactaag

SEQ ID NO: 100192 - DNA, 80 bp, synthetic construct
  source 1..80: mol_type = other DNA
tgtccaccttcttcatggatctggcttgtttgttgcccattttgtaagatgggacccaactatgagattctttacagtgg

SEQ ID NO: 100193 - DNA, 80 bp, synthetic construct
  source 1..80: mol_type = other DNA
tcatggatctggcttgtttgttgcccattttgtaagatgggacccaactatgagattctttacagtggtctcacaaaaag

SEQ ID NO: 100194 - DNA, 80 bp, synthetic construct
  source 1..80: mol_type = other DNA
cattgagccactgaaatttaggtgaatagaaaaattttctctgaagctagcctcctgacttctaatctgaaatctaatag

SEQ ID NO: 100195 - DNA, 80 bp, synthetic construct
  source 1..80: mol_type = other DNA
ccttgagtctcattcttccaccacttgactgtatcatcactctttctctagacttgctaaagcataaagcataccctctg

SEQ ID NO: 100196 - DNA, 80 bp, synthetic construct
  source 1..80: mol_type = other DNA
tctgactcaactttacagatccaggtggcaattcagccacagattcaaaaaagtcttccagagattcttctttgagatca

SEQ ID NO: 100197 - DNA, 80 bp, synthetic construct
  source 1..80: mol_type = other DNA
actaaccccgatgcaatcaactgattctggttaaatcttgctggttcaatgtcataatcgatccatgcataccccatcat

SEQ ID NO: 100198 - DNA, 80 bp, synthetic construct
  source 1..80: mol_type = other DNA
caagtcatacttgaacattggcctctcaatgcctttatgaatgactttttccacaaatgaagagaatggccctagtcttt

SEQ ID NO: 100199 - DNA, 80 bp, synthetic construct
  source 1..80: mol_type = other DNA
gcaatcttgaaaggtgtatacaatttggccacgtgtggccttattggtctgataacattccttttcctttgtggaaggtc

SEQ ID NO: 100200 - DNA, 80 bp, synthetic construct
  source 1..80: mol_type = other DNA
tgagtccataggaatgatttcacttctttcgagacgctcattgttgtcaccaaactgtgggtcttggtgcacttgagctc

SEQ ID NO: 100201 - DNA, 80 bp, synthetic construct
  source 1..80: mol_type = other DNA
agcaccccaggtcatacaaactgaccccacaaatcctccaccatacagtccctaggccaccccaaacaacagcacaccgg

SEQ ID NO: 100202 - DNA, 80 bp, synthetic construct
  source 1..80: mol_type = other DNA
ctccagatcactcattagagggataccatcacccttcatatgtgaaggtggcttggtcggctccttgtactggtctatta

SEQ ID NO: 100203 - DNA, 80 bp, synthetic construct
  source 1..80: mol_type = other DNA
agtaaggataaatactttttagaaatgcctggtttcttatagcttaacctgttcacttcagtgcatcctttcttgctcaa

SEQ ID NO: 100204 - DNA, 80 bp, synthetic construct
  source 1..80: mol_type = other DNA
tttttgtccaagcaagggaaagaagcagttatatgggacttggaggcttctactctaatccttctctctagccacttctt

SEQ ID NO: 100205 - DNA, 80 bp, synthetic construct
  source 1..80: mol_type = other DNA
tattacatttattcttcataaagtctctcctacttgcaaggagtatcaggatgtcaaaaaccaacatcagttttcgccta

SEQ ID NO: 100206 - DNA, 80 bp, synthetic construct
  source 1..80: mol_type = other DNA
gtatttaagatccttaatgatttaatcttattcaagaatgatctccagcattgcatctgatcctcagtgcttataacatc

SEQ ID NO: 100207 - DNA, 80 bp, synthetic construct
  source 1..80: mol_type = other DNA
tgtgttgactctgccctcaatacctgcatataagaacctcataattggcgacactctcttgtattgatgaatcaagcaat

SEQ ID NO: 100208 - DNA, 80 bp, synthetic construct
  source 1..80: mol_type = other DNA
atgagctgacatcttattgttgatgccctgatggcaaagagtgattatctcttcatagtgagtggcacgtttgtctgtta

SEQ ID NO: 100209 - DNA, 80 bp, synthetic construct
  source 1..80: mol_type = other DNA
gggtattgatgctctccacaccagaaagcctaccagatgtcattgacaaagattcacaaagcctagaatattcagactct

SEQ ID NO: 100210 - DNA, 80 bp, synthetic construct
  source 1..80: mol_type = other DNA
cttaacagaggctatgtcctcctccatgactcctgagagctcccaagagattttggctggcggatatcaaaagtagttca

SEQ ID NO: 100211 - DNA, 80 bp, synthetic construct
  source 1..80: mol_type = other DNA
gtgcaacatttgcatttgagtgcattaattaaaaacacacgacagtcattttgtcagcatagaattggagtaaaaaacta

SEQ ID NO: 100212 - DNA, 80 bp, synthetic construct
  source 1..80: mol_type = other DNA
tttccgactatgccagttgattataaaagatcaatccaaagaggaatattgttattatctaacagattaggtcagttagt

SEQ ID NO: 100213 - DNA, 80 bp, synthetic construct
  source 1..80: mol_type = other DNA
accgacttcaaccacaaaagtttacaagcaagtaccacaaccttttgatttcagagcgtcaatgcacatgttaacatcta

SEQ ID NO: 100214 - DNA, 80 bp, synthetic construct
  source 1..80: mol_type = other DNA
ccctaaaagatatagaatcagctgtcattgacatggaggtgttgtcatccacctcagtgacccagctcgtgagggataag

SEQ ID NO: 100215 - DNA, 80 bp, synthetic construct
  source 1..80: mol_type = other DNA
caagcaggctctaacccccttacaacagacaattaacacagcctccttggctatcacacggcttaaagcggctagagctg

SEQ ID NO: 100216 - DNA, 80 bp, synthetic construct
  source 1..80: mol_type = other DNA
tggcttacgcctcatgcttccaatctgctgtcaccaccatattacaaatggcagggtccgcattggtcatcaatcgggca

SEQ ID NO: 100217 - DNA, 80 bp, synthetic construct
  source 1..80: mol_type = other DNA
caggtggcgacggtggtataggggagactgagatggagattcgccacagagttttctacaaatccaaaagcagaaagcac

SEQ ID NO: 100218 - DNA, 80 bp, synthetic construct
  source 1..80: mol_type = other DNA
caacaggaacaacgacgtcaacttggcctggtaactggatcggatatcaggaaacgcaagcctattgattggaccccacc

SEQ ID NO: 100219 - DNA, 80 bp, synthetic construct
  source 1..80: mol_type = other DNA
tggggcttctgggtcagtccaaccgtgttcattaccaccacacatgtggtgccaactggcgtgaaggaattctttggcga

SEQ ID NO: 100220 - DNA, 80 bp, synthetic construct
  source 1..80: mol_type = other DNA
gtcctgaagggacagtttgttcagtcctgatcaaacgagactcaggcgagcttctcccactggctgtccgtatgggggcc

SEQ ID NO: 100221 - DNA, 80 bp, synthetic construct
  source 1..80: mol_type = other DNA
attgcctctatgaggatacagggccgccttgttcatggccaatcaggaatgctactgacaggagcgaatgcaaaagggat

SEQ ID NO: 100222 - DNA, 80 bp, synthetic construct
  source 1..80: mol_type = other DNA
aacgccacccaaacgatgatagtggaggccaccaagttaaatggtcggctaaagagggtgtgaatctcggaatagatgga

SEQ ID NO: 100223 - DNA, 80 bp, synthetic construct
  source 1..80: mol_type = other DNA
ctcactactgttcccggacccgagtggaacatgtgcccgttacccccagcagatcaaaggagcacgacgcctgcagtcga

SEQ ID NO: 100224 - DNA, 80 bp, synthetic construct
  source 1..80: mol_type = other DNA
ctggccggcaacgcctttactgcaggtaagatcatagtttcctgtatacctcctggttttgggtcgcataatcttactat

SEQ ID NO: 100225 - DNA, 80 bp, synthetic construct
  source 1..80: mol_type = other DNA
tgattggatatcaagttgaggcttcaaatcaattgctagccaagaatcttgcaaccagatactcactccttcgtgctgga

SEQ ID NO: 100226 - DNA, 80 bp, synthetic construct
  source 1..80: mol_type = other DNA
ggtctatccagtgctgatgcagcaaggtccatcgcgggagccccagtgacccgaatcgtggactggaatggtgtgagagt

SEQ ID NO: 100227 - DNA, 80 bp, synthetic construct
  source 1..80: mol_type = other DNA
gtcagctcctgaatcttctgcaactacattgagatctggtggctttatgtcagtgccaataccatatgcatctaagcaaa

SEQ ID NO: 100228 - DNA, 80 bp, synthetic construct
  source 1..80: mol_type = other DNA
gataatgttgtaatatgaaatgtgggcatcatattcagttaattaggcttaattaggtttgatttgatgttaaaaaaaaa

SEQ ID NO: 100229 - DNA, 80 bp, synthetic construct
  source 1..80: mol_type = other DNA
cagaacccaagaggaagttcagtacggcatggggtggactgaaaggcccgtggaccagaatgttaagtcatgggaggaac

SEQ ID NO: 100230 - DNA, 80 bp, synthetic construct
  source 1..80: mol_type = other DNA
ggagaggccgccctcctccactacgtagaccctgatacggggcgaaacttggaggaatttaaactttatcctgatgggtt

SEQ ID NO: 100231 - DNA, 80 bp, synthetic construct
  source 1..80: mol_type = other DNA
ggggaggccgccctcctccactacgtagaccctgatacggggcgaaacttgggggaatttaaactttatcctgatgggtt

SEQ ID NO: 100232 - DNA, 80 bp, synthetic construct
  source 1..80: mol_type = other DNA
ccagtgggcaccatattcagatttgatttttaattggattgttttaattaaaatttggcttaattggtgttaaaaaaaaa

SEQ ID NO: 100233 - DNA, 80 bp, synthetic construct
  source 1..80: mol_type = other DNA
atgatgatggcgtctaacgacgctattgcagctactgctgctagtgctgaaaacactagtgacaatagtgattctataaa

SEQ ID NO: 100234 - DNA, 80 bp, synthetic construct
  source 1..80: mol_type = other DNA
tgtgattggacatttatgggggtggttgagacgataatactacttatggaactgtttgggatcttctggaacccccctga

SEQ ID NO: 100235 - DNA, 80 bp, synthetic construct
  source 1..80: mol_type = other DNA
tgtgtccagcttcatagcctcattattgcctgatatgcacttacaaggaccggaagatctggctaaagacttgataccat

SEQ ID NO: 100236 - DNA, 80 bp, synthetic construct
  source 1..80: mol_type = other DNA
tggtattggggggtgtggggcttgcaattgggttcaccaaggacaaagttacaaaggtcatgaagagtgctgttgaagtg

SEQ ID NO: 100237 - DNA, 80 bp, synthetic construct
  source 1..80: mol_type = other DNA
tggtattggggggtgtggggcttgcaattgggttcaccaaggacaaagttacaaaggtcatgaagagtgctgttgaaggg

SEQ ID NO: 100238 - DNA, 80 bp, synthetic construct
  source 1..80: mol_type = other DNA
agaagaccttaaaagatattgagacagccgtaattgacatggaggttatctcaacaactgctgttactcaactagtcagg

SEQ ID NO: 100239 - DNA, 80 bp, synthetic construct
  source 1..80: mol_type = other DNA
acttaattagtaggggtccatctccaattccacaagataagccccctaaagaccagagggataaacccccaaggaatgtg

SEQ ID NO: 100240 - DNA, 80 bp, synthetic construct
  source 1..80: mol_type = other DNA
aaaagtgatttctctcatctaaaaatggagttggctccacagggcggattcgacaatcaaggaaacactccatttggtaa

SEQ ID NO: 100241 - DNA, 80 bp, synthetic construct
  source 1..80: mol_type = other DNA
agggaccatgcggcctaccacattaaaccgcctccttatacaggccgtggcactaaccatggagcgtcaggatgagttcc

SEQ ID NO: 100242 - DNA, 80 bp, synthetic construct
  source 1..80: mol_type = other DNA
gtcaagtgtacgattttgatgctgacaggatctctgccttcaccagtttagcaagagccaatggtttgggtctcattagc

SEQ ID NO: 100243 - DNA, 80 bp, synthetic construct
  source 1..80: mol_type = other DNA
gctgagacccagcaggcaatgggatggattgacccccccatggaccagaatctaccaacctgggaggagttgagccaaac

SEQ ID NO: 100244 - DNA, 80 bp, synthetic construct
  source 1..80: mol_type = other DNA
cccctgtagcataaagtggcaagctagggtatatgacattgaatcagatggtaccaatgtacgcataaaggaaaacacct

SEQ ID NO: 100245 - DNA, 80 bp, synthetic construct
  source 1..80: mol_type = other DNA
cagcccagacacaacgccagcaatcaattgacacagcagccctagcacttaccagacttaaagcagcacgggcagcagca

SEQ ID NO: 100246 - DNA, 80 bp, synthetic construct
  source 1..80: mol_type = other DNA
tatgcagcttgcatacaaagcgcaataacaactatcctgcagatggctgggtcagccatcgttataaatcgtgctgttaa

SEQ ID NO: 100247 - DNA, 80 bp, synthetic construct
  source 1..80: mol_type = other DNA
aaggatgttcggtgcacactcgagcactatagcccttgaaggacccccaagagaacatcggtgcagggctcacttagcta

SEQ ID NO: 100248 - DNA, 80 bp, synthetic construct
  source 1..80: mol_type = other DNA
aggctgcaggtggtgggccaataggccatgatgatgtcattgataagtatggcctatgtgagactgaagaagagggtacc

SEQ ID NO: 100249 - DNA, 80 bp, synthetic construct
  source 1..80: mol_type = other DNA
agtgaggagataaatgtggagctacccaccgccacttccgaaggtaaaaacaaaggaaagaccaagaaaggaaggggcag

SEQ ID NO: 100250 - DNA, 80 bp, synthetic construct
  source 1..80: mol_type = other DNA
aagggccaactacaatgctttttcacggcgcggcctgagtgatgaggagtatgaggagtataagaagatcagggaagaaa

SEQ ID NO: 100251 - DNA, 80 bp, synthetic construct
  source 1..80: mol_type = other DNA
acataaaatcttttacaagtccaaaaagggccgccagaatgaacgccgccaattagggctagtcactggtagtgatatca

SEQ ID NO: 100252 - DNA, 80 bp, synthetic construct
  source 1..80: mol_type = other DNA
agaaaaacaagagatactcaagaacaattcaaactggtttgatgctggtggtttggcaccagctagcatccctactggtt

SEQ ID NO: 100253 - DNA, 80 bp, synthetic construct
  source 1..80: mol_type = other DNA
gaacccattgagtccattgcaatccatcgtgctggtgaattcacacaattcagattttcacacaaggtccgcccagatct

SEQ ID NO: 100254 - DNA, 80 bp, synthetic construct
  source 1..80: mol_type = other DNA
gtgacaaaggccactatgcaggccatgaaataatcaagcatagtaagggcccagctctatccactaagaccaagttttgg

SEQ ID NO: 100255 - DNA, 80 bp, synthetic construct
  source 1..80: mol_type = other DNA
aggtcaacccctgaaccattgccgccaggtgtttatgaaccagcataccttgggggtcgtgatccaagggtaaaaggtgg

SEQ ID NO: 100256 - DNA, 80 bp, synthetic construct
  source 1..80: mol_type = other DNA
atgtgaagaatacagagcaacaaccccctgaccaccaagtcaagtggagtgccagtaatggggttgatcttggggtaggc

SEQ ID NO: 100257 - DNA, 80 bp, synthetic construct
  source 1..80: mol_type = other DNA
aaccatttgctgagccgcgaggtcgaatgccagagcctggtctacttgaggcagctgttgaaactgtcacgtccatgctt

SEQ ID NO: 100258 - DNA, 80 bp, synthetic construct
  source 1..80: mol_type = other DNA
ccaacaacatgtacgaattaggcaaatctatgaaaccactatacactgcagccttaaaagacgagttagtcaagcccgag

SEQ ID NO: 100259 - DNA, 80 bp, synthetic construct
  source 1..80: mol_type = other DNA
aaagtttaccaaaagatcaagaagaggcttctctggggtgctgatctctcaacagttataagagctgccagggcctttgg

SEQ ID NO: 100260 - DNA, 80 bp, synthetic construct
  source 1..80: mol_type = other DNA
accattttgtgatgctataaagccccatgtcattaaactccccatcaaagtcggtatgaactccatagaggatggcccaa

SEQ ID NO: 100261 - DNA, 80 bp, synthetic construct
  source 1..80: mol_type = other DNA
attacatcatccgtgtaaaagaaggcttgccatcaggattcccttgcacatcacaggtgaacagtataaaccactggttg

SEQ ID NO: 100262 - DNA, 80 bp, synthetic construct
  source 1..80: mol_type = other DNA
atcacactgtgtgccatgtctgaagtcacgggtttgtcacccgatgtcatacaatcccaatcttacttttctttctatgg

SEQ ID NO: 100263 - DNA, 80 bp, synthetic construct
  source 1..80: mol_type = other DNA
aatctaacaactgtgccaggtccagcatggaatctgtgccccatgccaccaattgaccaacgcaataatggtccagcaaa

SEQ ID NO: 100264 - DNA, 80 bp, synthetic construct
  source 1..80: mol_type = other DNA
tctcaacagacattgactttgaccccgctcgcctcacccaagtgcttaaggaatatgggttgagacccaccagaccagac

SEQ ID NO: 100265 - DNA, 80 bp, synthetic construct
  source 1..80: mol_type = other DNA
aggctttcagggaaggctagataggggctcaattgaaagacagctgtggtggacccggggccctaaccatgatgacccca

SEQ ID NO: 100266 - DNA, 80 bp, synthetic construct
  source 1..80: mol_type = other DNA
gcctcatctgaatcctttcctttcccatctttctcagatgtacaatggctgggtgggtaacatgcgagtacgcgttgttt

SEQ ID NO: 100267 - DNA, 80 bp, synthetic construct
  source 1..80: mol_type = other DNA
ggaatgtattgtatcacaataatgacactcaacctaccatgcgcctcctttgcatgttgtacacccctcttcgaactggg

SEQ ID NO: 100268 - DNA, 80 bp, synthetic construct
  source 1..80: mol_type = other DNA
ggatcccaaaccctattgagggtatgtctttgtcacctgaccagacccaaaatgttcaattccagaatggtaggtgtaca

SEQ ID NO: 100269 - DNA, 80 bp, synthetic construct
  source 1..80: mol_type = other DNA
gagggtgctcaatttgacagaattggatggttcaccttttatggcctttgccgctcccgcccccgcgggctttccagatc

SEQ ID NO: 100270 - DNA, 80 bp, synthetic construct
  source 1..80: mol_type = other DNA
ttggatcttgtgattggcatattgaaatgagtaaaattccaaactccagcacccagaacaatccaatagtagttaattct

SEQ ID NO: 100271 - DNA, 80 bp, synthetic construct
  source 1..80: mol_type = other DNA
ttcactcacctcaagcggccttttcaatagccaggataactatacaccccatcgccgcttggtggagggtttgttatgtg

SEQ ID NO: 100272 - DNA, 80 bp, synthetic construct
  source 1..80: mol_type = other DNA
ggtctagtctagcagaagcctcacagctggcccccgctgtctatccacctggtttcaatgaggtgattgtgtactttatg

SEQ ID NO: 100273 - DNA, 80 bp, synthetic construct
  source 1..80: mol_type = other DNA
tgctgaagctgcgttacaggcacagagatatcaacaagatttgactttacagcaaaattctttcaatcatgataaggaga

SEQ ID NO: 100274 - DNA, 80 bp, synthetic construct
  source 1..80: mol_type = other DNA
tgttaggttatcaagtagaaatgtctaataagttattagctaaaaatctcaatacccgctattctcttctccaggcgggt

SEQ ID NO: 100275 - DNA, 80 bp, synthetic construct
  source 1..80: mol_type = other DNA
ggtctctccccctctgatgcggctagggctgtggccggggcccctgtcactaggttggttgactggggtggagttcgtgt

SEQ ID NO: 100276 - DNA, 80 bp, synthetic construct
  source 1..80: mol_type = other DNA
ggtctctccccctctgatgcggctagggctgtggccggggcccctgtcactaggttggttgactggtgtggagttcgtgt

SEQ ID NO: 100277 - DNA, 80 bp, synthetic construct
  source 1..80: mol_type = other DNA
tgcggcacctcaatcatctgccaccacactgagatctggcaattttatggcagtgccactcccagcccagccaaagcaga

SEQ ID NO: 100278 - DNA, 80 bp, synthetic construct
  source 1..80: mol_type = other DNA
aacctcttgctagtgagggatattccaatccagcttatgaccccatgcagcgtacagcttcttgggttcaatcccaaaat

SEQ ID NO: 100279 - DNA, 80 bp, synthetic construct
  source 1..80: mol_type = other DNA
tccagccggaattggtccccataccacaggcaagctctccaaactgtgtgggtgaccccccctggttccacctcttcttc

SEQ ID NO: 100280 - DNA, 80 bp, synthetic construct
  source 1..80: mol_type = other DNA
ttctatttcttctgtttctactgcccctcgagggtattttaatacagatagattgcctctgttcgcaaacttgaggcgct

SEQ ID NO: 100281 - DNA, 80 bp, synthetic construct
  source 1..80: mol_type = other DNA
agcatcctattcaaatttggctttatataatttgattgtatttggcttttaattttgatttggttgatgttaaaaaaaaa

SEQ ID NO: 100282 - DNA, 80 bp, synthetic construct
  source 1..80: mol_type = other DNA
catatgctgcagttaccaataattgttatgagttctgctgcaggattctcaatcttcaagactcttggttggaacgtcgc

SEQ ID NO: 100283 - DNA, 80 bp, synthetic construct
  source 1..80: mol_type = other DNA
gaaccgtttcttcacaaagttgaagaatttaggttctaacaataagcctataaaaattgagaacacccacatggccctta

SEQ ID NO: 100284 - DNA, 80 bp, synthetic construct
  source 1..80: mol_type = other DNA
ttggtcacatctggccgtttcaaccacccagcacaagactggtccagggacacgcctgacttccagcaagatagcaagtt

SEQ ID NO: 100285 - DNA, 80 bp, synthetic construct
  source 1..80: mol_type = other DNA
tcaatggcttggtatcaaaacctttcaaagacctcctaaacaaacttaagccactcaacgtgctcaacctactctctaac

SEQ ID NO: 100286 - DNA, 80 bp, synthetic construct
  source 1..80: mol_type = other DNA
ggcaatcatcgtggctggtctatcgcaatggatgcgttccaatgggtcggtacacgcaagaatttgcatttaaatgttga

SEQ ID NO: 100287 - DNA, 80 bp, synthetic construct
  source 1..80: mol_type = other DNA
aggactaacccagctaatgacctctgttacccagggagcctcaatgactatgaagaactaaaacacctgttgagcagaat

SEQ ID NO: 100288 - DNA, 80 bp, synthetic construct
  source 1..80: mol_type = other DNA
taaaaacccaaccacctatatttcagttgggacatcaacgttaaaccagagattggtaccaaaaatagctactagatccc

SEQ ID NO: 100289 - DNA, 80 bp, synthetic construct
  source 1..80: mol_type = other DNA
tatgccattccacaatatatatccgtgtacgatcggggaatgccccaaatacgtgaagtcaaaccagttggtccttgcaa

SEQ ID NO: 100290 - DNA, 80 bp, synthetic construct
  source 1..80: mol_type = other DNA
atgccccaatccttacggtcctgggtgctacaccagcccgaaaccagatacgaggaagatccagtgcgccagctcgtaag

SEQ ID NO: 100291 - DNA, 80 bp, synthetic construct
  source 1..80: mol_type = other DNA
ctcctgtacagaacaacaacactccatcaggtgcaatggaaggataccagatcgggttactgggggtatttttctggtgg

SEQ ID NO: 100292 - DNA, 80 bp, synthetic construct
  source 1..80: mol_type = other DNA
acaaaagtcctagaaatactcgcgaggctcgacttgtggtggacttctctcagttttctcggtggcccaacaaggtgcaa

SEQ ID NO: 100293 - DNA, 80 bp, synthetic construct
  source 1..80: mol_type = other DNA
tggccaagcttcgcttccccaaacctacgggcattgtctgagttattgcccccgggaatgtcctgggtatccttggatgt

SEQ ID NO: 100294 - DNA, 80 bp, synthetic construct
  source 1..80: mol_type = other DNA
gtctgcggcgttttatcatattcctgttaatcctgctgctgcttctcttctgctggttggcatacctggactgccaaggg

SEQ ID NO: 100295 - DNA, 80 bp, synthetic construct
  source 1..80: mol_type = other DNA
atgatccccatttgtgggagctgcctgaatcaatcttcagagacctgtacctgcacggaagggacgagctgttgttgctg

SEQ ID NO: 100296 - DNA, 80 bp, synthetic construct
  source 1..80: mol_type = other DNA
ctgcatcaaaggggagaacaacgtctgccacggcgaaccctggggtttcgcaaaattcctatgggtattggtcttagccc

SEQ ID NO: 100297 - DNA, 80 bp, synthetic construct
  source 1..80: mol_type = other DNA
gtttctcctttctctcttttcttcaatactggttcagtttgctcgccgggaatttgtggatctttttgctttttcttaca

SEQ ID NO: 100298 - DNA, 80 bp, synthetic construct
  source 1..80: mol_type = other DNA
ggggtttatatcaaaaccaggaatgtacctttaatcctgagtggaaaattccagagttcaatgatatatttgtaaaggaa

SEQ ID NO: 100299 - DNA, 80 bp, synthetic construct
  source 1..80: mol_type = other DNA
tggatgacttggtcctgggggctcgaactgaaactcatcttgcaagttgttgcgattctctactatattttttccgggag

SEQ ID NO: 100300 - DNA, 80 bp, synthetic construct
  source 1..80: mol_type = other DNA
atggggataaagatcaatgaagaaaagacccgattcaccggaacatcgttgtttttcttgggacttcacattcgggacat

SEQ ID NO: 100301 - DNA, 80 bp, synthetic construct
  source 1..80: mol_type = other DNA
tggcatattaccccaggaggaaaaatccgaaagagtcattgctttattagaagcaattgatacaagaatcgaatatgact

SEQ ID NO: 100302 - DNA, 80 bp, synthetic construct
  source 1..80: mol_type = other DNA
ttaaaatcattcagagactgattggacacttagcctatcttgctcccttcactcgaccaggttatcctttgttaatgcca

SEQ ID NO: 100303 - DNA, 80 bp, synthetic construct
  source 1..80: mol_type = other DNA
ttgtatcatgcttgtaacctgaaacgtaattaccgatttgacatgttctataaatatgcattgatttattggtattcaaa

SEQ ID NO: 100304 - DNA, 80 bp, synthetic construct
  source 1..80: mol_type = other DNA
attgtacccagtgcgaaaaaacccccaagggtttgcacaggtatttgtggacgcaactcctacatcaatagcttatattg

SEQ ID NO: 100305 - DNA, 80 bp, synthetic construct
  source 1..80: mol_type = other DNA
attatcagaccagatcaatacagagtgcgtcaatccctgcatgccctatccatgtagcagagctaatggcagtatgttgg

SEQ ID NO: 100306 - DNA, 80 bp, synthetic construct
  source 1..80: mol_type = other DNA
gcaaagatggaaacaggcgcatcaattatagccactgataacactatagcgttatcaaagaaatttaccaagttcccatg

SEQ ID NO: 100307 - DNA, 80 bp, synthetic construct
  source 1..80: mol_type = other DNA
ggaactggcctgtttagctaacgccctcttgatctatacgaggttgatctacatcagatcaaaggagaatccagcggatt

SEQ ID NO: 100308 - DNA, 80 bp, synthetic construct
  source 1..80: mol_type = other DNA
taccttcacggggaatccactacattctaccttatccacaggtcaagcacgcaggagagccacaggttaatcacctaaac

SEQ ID NO: 100309 - DNA, 80 bp, synthetic construct
  source 1..80: mol_type = other DNA
attataaaggattatattccctcacgtaagtggaaactattattacctgcaaaattgtatgtacctagtgctcattattt

SEQ ID NO: 100310 - DNA, 80 bp, synthetic construct
  source 1..80: mol_type = other DNA
ctaaaggtgtttcctacctctcctccacagcacacaccttcacaggtgcgttttttaacagtttaacggcaaaattggac

SEQ ID NO: 100311 - DNA, 80 bp, synthetic construct
  source 1..80: mol_type = other DNA
catttggcacagggccaaaacactgtccctttaattggacagatgccaattttttccggagctcggtcactgcctggcgc

SEQ ID NO: 100312 - DNA, 80 bp, synthetic construct
  source 1..80: mol_type = other DNA
caagccagggcaatttgccaaagggaaaatagccagttggcgcaaaataaataaaaaacagaatgtacagccaaaaccac

SEQ ID NO: 100313 - DNA, 80 bp, synthetic construct
  source 1..80: mol_type = other DNA
atggaatgttctagaaagtgattacaccctttaggaacaacatgtttatgagttttaagggtatatatacgatcggctgc

SEQ ID NO: 100314 - DNA, 80 bp, synthetic construct
  source 1..80: mol_type = other DNA
acaatgcctttagtttttcggtcacagatcgttttactcctgtgtttaactttcgaacctgtatttttcaaacccttgaa

SEQ ID NO: 100315 - DNA, 80 bp, synthetic construct
  source 1..80: mol_type = other DNA
tgggagtgccttgggcattgcaggggagatgagcaacactgtcgcacccgacccataccttgaattcggcttggataacc

SEQ ID NO: 100316 - DNA, 80 bp, synthetic construct
  source 1..80: mol_type = other DNA
gtcttattgatatactgccccaggattttttccccactgcggaggatttggtaaatttgattttagcccagttcggggat

SEQ ID NO: 100317 - DNA, 80 bp, synthetic construct
  source 1..80: mol_type = other DNA
ggactggactcatcaagccacctctccccacattatacagcactaaggcaagtactggtctgttattttgggtggaagga

SEQ ID NO: 100318 - DNA, 80 bp, synthetic construct
  source 1..80: mol_type = other DNA
attaatggaaaaacttgatccggggacactaatcgaacctctaagatcggccatacgccagatacaaactcacggtaaca

SEQ ID NO: 100319 - DNA, 80 bp, synthetic construct
  source 1..80: mol_type = other DNA
ccgtggatgggttaagggtgcggaaagcgctgtggtttcattgggcaagtttaactttcggggatcacacggttaaggat

SEQ ID NO: 100320 - DNA, 80 bp, synthetic construct
  source 1..80: mol_type = other DNA
tttcggggatcacacggttaaggattttataatatcctttgctacgtggataagaacccctgctgcctataggccggtga

SEQ ID NO: 100321 - DNA, 80 bp, synthetic construct
  source 1..80: mol_type = other DNA
tgggcataatagggctattaagaacaaatataataaagctgaaagtttgcatcaactattgtgtttgaaatatttgcatg

SEQ ID NO: 100322 - DNA, 80 bp, synthetic construct
  source 1..80: mol_type = other DNA
aactttataagcagggaattttatatctcagagaagataatcaccattggaaggtaaggggccccctttattcctgggag

SEQ ID NO: 100323 - DNA, 80 bp, synthetic construct
  source 1..80: mol_type = other DNA
gtctcagcactgcgtgataatggggagtgcgggatcaaacttcggcgcaggggataccccagcttcccgaggtccggcaa

SEQ ID NO: 100324 - DNA, 80 bp, synthetic construct
  source 1..80: mol_type = other DNA
gtgtagcaatgtgggccctatcaaaccccttagtggcgttcatatgggcagtgatgcctcaggaggcaaaatggggaatg

SEQ ID NO: 100325 - DNA, 80 bp, synthetic construct
  source 1..80: mol_type = other DNA
aagcccccaccaaagccaggtccgatgaaagaggtacccctattctcttacacggaccaggtaactctgtatggcggtca

SEQ ID NO: 100326 - DNA, 80 bp, synthetic construct
  source 1..80: mol_type = other DNA
tccaccttatcaaattcacgaggaagaagtaccagcaggtacaccacctctaccaaccattcccgcccccagaatagtgg

SEQ ID NO: 100327 - DNA, 80 bp, synthetic construct
  source 1..80: mol_type = other DNA
ccagaatagtggtcttaaagaagccggcaccaaggggacgactcccaactcccagaaccttctcgaaccgagggtccttt

SEQ ID NO: 100328 - DNA, 80 bp, synthetic construct
  source 1..80: mol_type = other DNA
agccgctcaccttcccctagacgtaaatctccaaggcgctccccttcacctggaaggaaatcataagcttctttccttga

SEQ ID NO: 100329 - DNA, 80 bp, synthetic construct
  source 1..80: mol_type = other DNA
tcttaaagaagccggcaccaaggggacgactcccaactcccagaaccttctcgaaccgagggtcctttcggggggcggca

SEQ ID NO: 100330 - DNA, 80 bp, synthetic construct
  source 1..80: mol_type = other DNA
gtttggccacagtacaacaaatcgaaacctcaaaagcccagccttctctccaacgaggttccacttccacagaccctccc

SEQ ID NO: 100331 - DNA, 80 bp, synthetic construct
  source 1..80: mol_type = other DNA
tgcagagacaagcttcaacacggcgcctacactagcagccgctgcaggcataattccgccttcacctccaccgccgagtg

SEQ ID NO: 100332 - DNA, 80 bp, synthetic construct
  source 1..80: mol_type = other DNA
ttctcccggtgttggcttcgctcccctgcactctcaaacgcaagtcacgcctctctttcaaggttccataggttaccatg

SEQ ID NO: 100333 - DNA, 80 bp, synthetic construct
  source 1..80: mol_type = other DNA
acaaggcgcttcacatagagtagccttagatgacgagtcaatgaaggggattttacatcttatgcatgcagaattggaca

SEQ ID NO: 100334 - DNA, 80 bp, synthetic construct
  source 1..80: mol_type = other DNA
cagtcttgcgaagaaaattgtggtggcatacaaactgcctcatttggggtgaagctcaaactgcagaatatacagcaaag

SEQ ID NO: 100335 - DNA, 80 bp, synthetic construct
  source 1..80: mol_type = other DNA
ttgagaacttggctgatgacacctgcagcctacagaaaccagtatgctccgacaattgaagctcttacaagagccaccaa

SEQ ID NO: 100336 - DNA, 80 bp, synthetic construct
  source 1..80: mol_type = other DNA
ggcggtccacctcgccgcaagacctagtagatcaactactcagtctacttcctctaggagaaggagatctagcaaatcaa

SEQ ID NO: 100337 - DNA, 80 bp, synthetic construct
  source 1..80: mol_type = other DNA
aatcaagatccgcttccaggtccaaatctcctagaaaaaactagacacaacttaggaaatctaaaaggtctatatatcga

SEQ ID NO: 100338 - DNA, 80 bp, synthetic construct
  source 1..80: mol_type = other DNA
caatcccccttcagtttttaacaaacagtggattattccttcccacgaaccgttacatctgtcagaaaagctgcctcttt

SEQ ID NO: 100339 - DNA, 80 bp, synthetic construct
  source 1..80: mol_type = other DNA
tattaccgtctagagtatggaagtacctcatgccggctagattttggccaaaggtaacaaaatggtaccatccctctaga

SEQ ID NO: 100340 - DNA, 80 bp, synthetic construct
  source 1..80: mol_type = other DNA
tccacagcatagcatgagaagtgatattccaagcacaagctttcacagcgcagacaatgatgaacataaccacactgatt

SEQ ID NO: 100341 - DNA, 80 bp, synthetic construct
  source 1..80: mol_type = other DNA
ggagtgaaagacaagtacccaggatttacgcaagagcataaatcattagctaaagagtatcttgaaaagttatataaagc

SEQ ID NO: 100342 - DNA, 80 bp, synthetic construct
  source 1..80: mol_type = other DNA
aggagtactttataaacgacactctcagcatacctggtctattcacccttctgtctcactgtattcctgggaaaccaaaa

SEQ ID NO: 100343 - DNA, 80 bp, synthetic construct
  source 1..80: mol_type = other DNA
gactaatacaacatgggacaaggacaaatgaaatcgataagcgtcaggagagcagaaggaggagaactcctcctaaaaag

SEQ ID NO: 100344 - DNA, 80 bp, synthetic construct
  source 1..80: mol_type = other DNA
ggtcatcgaccttgcaacgccgattccccaatatgctcaatactcagggctaccaacgtacgaccaaatccaaagtccgc

SEQ ID NO: 100345 - DNA, 80 bp, synthetic construct
  source 1..80: mol_type = other DNA
caacgccccctccgtgggcaccgcctccaccaatcagacaccagccaaagatccaccctcctacatacaagacagtgccg

SEQ ID NO: 100346 - DNA, 80 bp, synthetic construct
  source 1..80: mol_type = other DNA
ccgccgcagccagccgccccacatctgccttacagagggattcgacctaccggcgacgaatacagaccaccagaacagcc

SEQ ID NO: 100347 - DNA, 80 bp, synthetic construct
  source 1..80: mol_type = other DNA
agctccgccaacgccgtcgcctacagtcaccctgccgccgacgacagctcctccgccgaagtcaaagccgccgaagatga

SEQ ID NO: 100348 - DNA, 80 bp, synthetic construct
  source 1..80: mol_type = other DNA
agtcagcagccgttctcctaatggctacagctgcctccctgttggggtcagcaccgcaagggacgacaactgcctctccc

SEQ ID NO: 100349 - DNA, 80 bp, synthetic construct
  source 1..80: mol_type = other DNA
ccagcccagaatccctggaaggacattctgggaaatttcacggccaacatcactcagctaaagacttgtgcgacagcagt

SEQ ID NO: 100350 - DNA, 80 bp, synthetic construct
  source 1..80: mol_type = other DNA
tttctcattagaactgctagtcgcattcctcgccgcgttactggtggtttgtttcttgttgataaaaatcctcacgactc

SEQ ID NO: 100351 - DNA, 80 bp, synthetic construct
  source 1..80: mol_type = other DNA
aggataaacatccagaaagcaaatccaataccatgaatcatgaggcattgttaacataatttcattgcacacttcacgag

SEQ ID NO: 100352 - DNA, 80 bp, synthetic construct
  source 1..80: mol_type = other DNA
tacgcattgtagactcgtcgttgatttctctcagttctccaggtcaccaaacatgccctttcccaaatactgggttccaa

SEQ ID NO: 100353 - DNA, 80 bp, synthetic construct
  source 1..80: mol_type = other DNA
acctctacgcacttaaaagtggactgcccgtacgcatgcagaggatttctttggatctgtctgaggcgttttatcatatt

SEQ ID NO: 100354 - DNA, 80 bp, synthetic construct
  source 1..80: mol_type = other DNA
cctatgtctgttggttctagtcatcatcttctggtatctgacggccatagggccatttatggctttcgtaaagcgcctat

SEQ ID NO: 100355 - DNA, 80 bp, synthetic construct
  source 1..80: mol_type = other DNA
gggagttggtcttagcccttttctcctacatctcttttcatctgccctggccactttcatccgttcctattatcctgtac

SEQ ID NO: 100356 - DNA, 80 bp, synthetic construct
  source 1..80: mol_type = other DNA
attgtttggcttatatggatgattttcttctctccgcccgggaccctgccactctcagcagttgctgcactcacatccta

SEQ ID NO: 100357 - DNA, 80 bp, synthetic construct
  source 1..80: mol_type = other DNA
tgtgctttcagcgactggggaatccgcataaactttgacaagtctacaccggctcctctgacctcgcttcggttcctcgg

SEQ ID NO: 100358 - DNA, 80 bp, synthetic construct
  source 1..80: mol_type = other DNA
ctacgagataacggacacggacattcgccctcacgctaaggccatggcaaccgtggccgacctcctgcggtcgttgcgga

SEQ ID NO: 100359 - DNA, 80 bp, synthetic construct
  source 1..80: mol_type = other DNA
cttatgtcctctacgattacaaggtcatccaacgcttcttgggccatttggcctgggtagctccgttcactgtcctccag

SEQ ID NO: 100360 - DNA, 80 bp, synthetic construct
  source 1..80: mol_type = other DNA
taccttctcctgcagcctatgtacacggccgctgcccataagcatgatttctccttttctcgcacgtacaaatctttgct

SEQ ID NO: 100361 - DNA, 80 bp, synthetic construct
  source 1..80: mol_type = other DNA
tatctctaacttcggccattaccaccggcagcagctgggctttcgcccgaagcagccttctacgttcgtggacgccaccc

SEQ ID NO: 100362 - DNA, 80 bp, synthetic construct
  source 1..80: mol_type = other DNA
atataacaccatattcttcgtggacattacagtcgaccacagcgggttgctcagaagaaaagtatctgaagcgcaccaaa

SEQ ID NO: 100363 - DNA, 80 bp, synthetic construct
  source 1..80: mol_type = other DNA
tcacctctggtgcggctgtcaccacgaacggccgcttcctttgggccgtcaccttcccaggtgaccagcctattcatgtc

SEQ ID NO: 100364 - DNA, 80 bp, synthetic construct
  source 1..80: mol_type = other DNA
tatgaactctgtgtcgcagcagcatgtgcttactttcagcgcccgcgctctctcggctcggattctctctttgtctgcta

SEQ ID NO: 100365 - DNA, 80 bp, synthetic construct
  source 1..80: mol_type = other DNA
cagatccttcgcctccctgcctcttttgtttgcgctgcgctgcatgcagctgctctttcgcctgcctgtcgcctacgttc

SEQ ID NO: 100366 - DNA, 80 bp, synthetic construct
  source 1..80: mol_type = other DNA
tgtcgcctacgttccgtctgcgcggaacccggcggacgccccgactcgtggccgggccacccggccgttctctgccactc

SEQ ID NO: 100367 - DNA, 80 bp, synthetic construct
  source 1..80: mol_type = other DNA
cgtctgcgcggaacccggcggacgccccgactcgtggccgggccacccggccgttctctgccactcgggcgcccctccct

SEQ ID NO: 100368 - DNA, 80 bp, synthetic construct
  source 1..80: mol_type = other DNA
cccgactcgtggccgggccacccggccgttctctgccactcgggcgcccctcccttttccgctctttcccccacctccta

SEQ ID NO: 100369 - DNA, 80 bp, synthetic construct
  source 1..80: mol_type = other DNA
ggaaaacggtcgtggtaatatccaccatgaggttcagcatatctgtaacccatctctgtgaaaaataaaaataagaatgt

SEQ ID NO: 100370 - DNA, 80 bp, synthetic construct
  source 1..80: mol_type = other DNA
tataaatcagtaagaaacaaaaattgttattgcgacaaaatataaagtgtcttacctgttccaagtttatctggtacatg

SEQ ID NO: 100371 - DNA, 80 bp, synthetic construct
  source 1..80: mol_type = other DNA
aaatgatctttggactgtaactgtactcgtgttctgtttactcgttaatcattgtacaaagtacataagctgatcaagtt

SEQ ID NO: 100372 - DNA, 80 bp, synthetic construct
  source 1..80: mol_type = other DNA
aatcatgaacctatgtaaacatattgttgctataaaattgcctgtactcctgtaaccagtatcttttaccatgctctcgc

SEQ ID NO: 100373 - DNA, 80 bp, synthetic construct
  source 1..80: mol_type = other DNA
attaaacatataatgctcgcgccatttgtcttatggttttacttctacccgtggttgcataaccgtatatgtccggatgc

SEQ ID NO: 100374 - DNA, 80 bp, synthetic construct
  source 1..80: mol_type = other DNA
ctctcggacactggcacagtgccaattctttatttcagcgcacatcatttacataggacatcaacaattcagtagtaaaa

SEQ ID NO: 100375 - DNA, 80 bp, synthetic construct
  source 1..80: mol_type = other DNA
agtgagacagatggatcctttggtacaatcggctttggaaggaattgctactttacccaacgacttcttccccgaattgg

SEQ ID NO: 100376 - DNA, 80 bp, synthetic construct
  source 1..80: mol_type = other DNA
gagaccaggtaaaattttctagagacgctatagctgaatacgaaaagtcagaatcgactaacagacatatagcagttatc

SEQ ID NO: 100377 - DNA, 80 bp, synthetic construct
  source 1..80: mol_type = other DNA
aaatgcgcactagatacttatgttggggtagctcgcatctattctacgatcagaacagctacatttaccgctgacgacgc

SEQ ID NO: 100378 - DNA, 80 bp, synthetic construct
  source 1..80: mol_type = other DNA
agtttcctaaagaaggtcgccggaaaattttgctgctttatgaagtggctggggcaggagtgcacttgttttttagagcc

SEQ ID NO: 100379 - DNA, 80 bp, synthetic construct
  source 1..80: mol_type = other DNA
ggtctgaggtggaccccgccgacaccgcccatcttgatgtctctgggacttatgcggtccacggccgtcagcttgaggcc

SEQ ID NO: 100380 - DNA, 80 bp, synthetic construct
  source 1..80: mol_type = other DNA
ctatatagagcgcttaatatcccagatgacattgcagcccgtgcgtcacgtctaacggctaccgtggagcttgccgccag

SEQ ID NO: 100381 - DNA, 80 bp, synthetic construct
  source 1..80: mol_type = other DNA
tccaggcagactcgaatgccgcacggtgcttgggaataagattttccgtacatcaataactgatggtgcccatctcgagg

SEQ ID NO: 100382 - DNA, 80 bp, synthetic construct
  source 1..80: mol_type = other DNA
tgactggcgggctgtggctgctccccgaggtgctccttgggctgttccccccgttctccccggggcatctttgggaatct

SEQ ID NO: 100383 - DNA, 80 bp, synthetic construct
  source 1..80: mol_type = other DNA
ttccgtcacccataaccccggccggtaggccaactaattcgcctggtcatactacacctgggccacccgcccgtgagccg

SEQ ID NO: 100384 - DNA, 80 bp, synthetic construct
  source 1..80: mol_type = other DNA
cccataccaccaccggccctaaccccagttagtaagccagctaatccgcctagccttactgcacctagcccccccgtccg

SEQ ID NO: 100385 - DNA, 80 bp, synthetic construct
  source 1..80: mol_type = other DNA
caagccgtccacatcgccatcggctcgcactcgtcggcttctttatacatatcctgacggggccaaggtgtatgcaggct

SEQ ID NO: 100386 - DNA, 80 bp, synthetic construct
  source 1..80: mol_type = other DNA
ctttgtttgagtcagattgttactggctggttaatgcgtctaaccccggccatcgtcctggtggaggtctctgccatgca

SEQ ID NO: 100387 - DNA, 80 bp, synthetic construct
  source 1..80: mol_type = other DNA
ttctaccagcgcttcccagagctggaggcggcatatcgtgagacctgctcccgcctcggcacagctgcctacccacttct

SEQ ID NO: 100388 - DNA, 80 bp, synthetic construct
  source 1..80: mol_type = other DNA
cgcaatagttggcggcgccgtggctttgctgcttttacacctcacacagcagctcgtgttactgccggtcggcgtgtggt

SEQ ID NO: 100389 - DNA, 80 bp, synthetic construct
  source 1..80: mol_type = other DNA
atcctggcgcaattaccgttcacgaggcccagggggccacgttcactgagactaccatcatagccacggctgacgctaga

SEQ ID NO: 100390 - DNA, 80 bp, synthetic construct
  source 1..80: mol_type = other DNA
ggccttattcaatcctctcgcgcacatgccatcgttgcacttactcgccatacagaaaagtgcgttattctagacgctcc

SEQ ID NO: 100391 - DNA, 80 bp, synthetic construct
  source 1..80: mol_type = other DNA
tggcctattgcgtgaggttggcatttctgatgtaattgtaaataactttttcctggctggtggtgaagtgggccaccatc

SEQ ID NO: 100392 - DNA, 80 bp, synthetic construct
  source 1..80: mol_type = other DNA
gcccttctatcatcccccgcggcaacccagaccggaacttagataccctccaagcgttccctccgtcctgccaaatcagc

SEQ ID NO: 100393 - DNA, 80 bp, synthetic construct
  source 1..80: mol_type = other DNA
gcttaccaccagctggccgaggagctgggccaccggccggccccagtggccgccgtcctgcccccctgccctgagcttga

SEQ ID NO: 100394 - DNA, 80 bp, synthetic construct
  source 1..80: mol_type = other DNA
gcaggggttactctacatgccgcaggagcttacggtgtccgacagtgtcctaatttttgaactcacggatatagttcact

SEQ ID NO: 100395 - DNA, 80 bp, synthetic construct
  source 1..80: mol_type = other DNA
gccgtatggccgcccctagtcaacgtaaggcggttctttctacgctcgtcggcaggtacggccgccgaacgaagctgtat

SEQ ID NO: 100396 - DNA, 80 bp, synthetic construct
  source 1..80: mol_type = other DNA
gaagtggcccactctgatgtccgcgagtctttagggaggttcatccccactatcggaccggtccaggccaccacatgtga

SEQ ID NO: 100397 - DNA, 80 bp, synthetic construct
  source 1..80: mol_type = other DNA
gctatatgaactggttgaggccatggtggagaagggccaggatggctccgctgtgcttgagcttgacctctgcaaccgtg

SEQ ID NO: 100398 - DNA, 80 bp, synthetic construct
  source 1..80: mol_type = other DNA
atgtctcgcgtattacattcttccagaaggattgtaacaaatttacaacgggtgagactatcgcccatggtaaggtgggt

SEQ ID NO: 100399 - DNA, 80 bp, synthetic construct
  source 1..80: mol_type = other DNA
caggggatttcggcttggagtaaaaccttctgcgctttatttggcccatggttccgtgccatcgagaaggagattttggc

SEQ ID NO: 100400 - DNA, 80 bp, synthetic construct
  source 1..80: mol_type = other DNA
tctgctcccacccaatattttctatggcgatgcctatgaggagtcagtgttttctgcggccatctccggggctggctcca

SEQ ID NO: 100401 - DNA, 80 bp, synthetic construct
  source 1..80: mol_type = other DNA
gtatggtttttgagaacgatttttctgagtttgacagcacccaaaataatttctcccttggccttgagtgcgttattatg

SEQ ID NO: 100402 - DNA, 80 bp, synthetic construct
  source 1..80: mol_type = other DNA
gtagtggctccgggtctcggtgcacttccagatgttgtccgctttgcaggccgactatctgagaagaattggtgtccggg

SEQ ID NO: 100403 - DNA, 80 bp, synthetic construct
  source 1..80: mol_type = other DNA
tcacaatccggggctggagctcgccctagacagccggcccgccccgtcggctcctccaggcgtgaccagtcccagcgccc

SEQ ID NO: 100404 - DNA, 80 bp, synthetic construct
  source 1..80: mol_type = other DNA
cagtccctgatgttgactctcgtggcgctgtcctgcgccgtcagtataatctgtccacctctcccttaacttcatctgtt

SEQ ID NO: 100405 - DNA, 80 bp, synthetic construct
  source 1..80: mol_type = other DNA
gcttctggaactaatcttgtcttgtatgctgccccactcaatcccctcctgcctcttcaggacggctccaattcccacat

SEQ ID NO: 100406 - DNA, 80 bp, synthetic construct
  source 1..80: mol_type = other DNA
cacggccactgaggcttctaagtacgccgattatcgggtcgtccggtctactatccgctatcggcccttggtgccgaatg

SEQ ID NO: 100407 - DNA, 80 bp, synthetic construct
  source 1..80: mol_type = other DNA
cacctaccccctgaagttctgttaccgcctggaacttaccacacaacctcctatcttctgatccacgacggcaatcgtgc

SEQ ID NO: 100408 - DNA, 80 bp, synthetic construct
  source 1..80: mol_type = other DNA
ccgtcggtggttatgcaatctctatttctttctggcctcagactacaactacacccacctctatcgacatgaattctatt

SEQ ID NO: 100409 - DNA, 80 bp, synthetic construct
  source 1..80: mol_type = other DNA
acttctactgacgttaggattttagtccagcctggcatagcttctgagttggtcatcccgagtgagcgccttcactatcg

SEQ ID NO: 100410 - DNA, 80 bp, synthetic construct
  source 1..80: mol_type = other DNA
tatactgtcccatttgttaatgtggcgacaggcgcccaggccgttgcccgatcccttgattggtccaaggtcactttgga

SEQ ID NO: 100411 - DNA, 80 bp, synthetic construct
  source 1..80: mol_type = other DNA
cggtcggccactcactaccatccagcagcactccaagacattttatgtgctgccgcttcgtggcaagctttccttttggg

SEQ ID NO: 100412 - DNA, 80 bp, synthetic construct
  source 1..80: mol_type = other DNA
aagctggtacgactaaggctggctacccttataattacaacactactgctagtgaccaaatcctgattgagaatgcagcc

SEQ ID NO: 100413 - DNA, 80 bp, synthetic construct
  source 1..80: mol_type = other DNA
ggtcaccgtgttgctatatctacttacactactagtcttggcgccggccctgtgtctgtttccgcagtcggcgttcttgc

SEQ ID NO: 100414 - DNA, 80 bp, synthetic construct
  source 1..80: mol_type = other DNA
cttggcgccggccctgtgtctgtttccgcagtcggcgttcttgcaccgcactctgctttagctgtgcttgaagatactat

SEQ ID NO: 100415 - DNA, 80 bp, synthetic construct
  source 1..80: mol_type = other DNA
agatagttggtgaccacccgctggtaatagagagggtccgcgccattggctgccattttgtcttactccttactgcagct

SEQ ID NO: 100416 - DNA, 80 bp, synthetic construct
  source 1..80: mol_type = other DNA
ggaacttagataccctccaagcgttccctccgtcctgccaaatcagcgcttaccaccagctggccgaggagctgggccac

SEQ ID NO: 100417 - DNA, 80 bp, synthetic construct
  source 1..80: mol_type = other DNA
tatattcatccaaccaaaccctttgcctccgacgtcgtatcacaatccggggctggagctcgccctagacagccggcccg

SEQ ID NO: 100418 - DNA, 80 bp, synthetic construct
  source 1..80: mol_type = other DNA
agtccgcctagtcctgctgtacctaagcttcctgctcgtaagccgcctgcgccaccaccggctcgtacccgccggctcct

SEQ ID NO: 100419 - DNA, 80 bp, synthetic construct
  source 1..80: mol_type = other DNA
cactttacaggtgtggattgggtaggcgaagtgggtcgtggtatagccctaacgttattcaatcttgctgacacacttct

SEQ ID NO: 100420 - DNA, 80 bp, synthetic construct
  source 1..80: mol_type = other DNA
cgccggttgccattcaggggccttatcaccctacaccccctgccagcgacatttgggtgctgccgccgccctctgaggtg

SEQ ID NO: 100421 - DNA, 80 bp, synthetic construct
  source 1..80: mol_type = other DNA
tctcaggtcgacgtgagacctgccccccccaacctcgaacccgctccgctatccaggcctgctgagtccgggagccttgt

SEQ ID NO: 100422 - DNA, 80 bp, synthetic construct
  source 1..80: mol_type = other DNA
gcgtaagccaccgacaccaccaccccctcgcacccgccgcctcctttacacctatccggacggtgctaaggtgtacgctg

SEQ ID NO: 100423 - DNA, 80 bp, synthetic construct
  source 1..80: mol_type = other DNA
ctataggtcttgacacggggttgcccccgggcaccccctcctctgctagtgatgtctgggtgctcccgccgccctctgag

SEQ ID NO: 100424 - DNA, 80 bp, synthetic construct
  source 1..80: mol_type = other DNA
gccccaccgcttgaagccccagctagtaagcctgctagcccgcctagtcttattacacctgcatcccctgctcgtaagcc

SEQ ID NO: 100425 - DNA, 80 bp, synthetic construct
  source 1..80: mol_type = other DNA
acgtagggcagacatttcagaaagtgaaggggaaactcatcagccgcatcaaacagagtgaactttctgccaagatgcgg

SEQ ID NO: 100426 - DNA, 80 bp, synthetic construct
  source 1..80: mol_type = other DNA
gagtggttttcagtaccttcgggtgccccctcgtccgctagcgatgtccgggtatttccgccaccttctgaagggtcggc

SEQ ID NO: 100427 - DNA, 80 bp, synthetic construct
  source 1..80: mol_type = other DNA
acacgggacctccctcgggcgtctcctcctccgttggtgatatctgggtgtttccgccgccctctgaggggtcggcgatt

SEQ ID NO: 100428 - DNA, 80 bp, synthetic construct
  source 1..80: mol_type = other DNA
attccgccgcccataactccggtcggtaagccaactaatctacctggtcgcactacacccagaccacccgcccgtgagcc

SEQ ID NO: 100429 - DNA, 80 bp, synthetic construct
  source 1..80: mol_type = other DNA
gtctacaccgccgccggccctaaccccagttagtaagccagttaacccgtccggtcccgctgcacctaggccccttgtcc

SEQ ID NO: 100430 - DNA, 80 bp, synthetic construct
  source 1..80: mol_type = other DNA
atggaaataataccactgatgactatgctgctattagtaacaacaaacaatgcagacaaaatatgcattggccaccaatc

SEQ ID NO: 100431 - DNA, 80 bp, synthetic construct
  source 1..80: mol_type = other DNA
ctgcccctaaggggaccaaagcacccaatagtgagcagcactgccccatagttaagatcgggaccagaacactagcggtt

SEQ ID NO: 100432 - DNA, 80 bp, synthetic construct
  source 1..80: mol_type = other DNA
cagaccagtggtcgttatgatctcaggcaagcctggtattggtaaaactcatatggcaagacacttggctaagagcatcg

SEQ ID NO: 100433 - DNA, 80 bp, synthetic construct
  source 1..80: mol_type = other DNA
gagaaccaagcatctcaaactgcaaatgaggtaggctcagcacttcttagactcaggcaggcaagggccagatactatat

SEQ ID NO: 100434 - DNA, 80 bp, synthetic construct
  source 1..80: mol_type = other DNA
aagctgctttcaagaccttgtttacactctaatacaggttgccggagcgtcattcgttgttaacagaatctccaagaggt

SEQ ID NO: 100435 - DNA, 80 bp, synthetic construct
  source 1..80: mol_type = other DNA
agaggggggtgcttggactggtcactggttcagacattaggaagaggagaccagacgatttccaaccaaagggtaacctg

SEQ ID NO: 100436 - DNA, 80 bp, synthetic construct
  source 1..80: mol_type = other DNA
tggatggggcttctgggtctcgtctaaccttctgatcacgacgacacatgtcctgcctaaagggattaaggaactttttg

SEQ ID NO: 100437 - DNA, 80 bp, synthetic construct
  source 1..80: mol_type = other DNA
caggggcaagccgcccaggcctgcagtcttagaagaagccaaaaagacagtgatgaatgttctagaacagaccatcgacc

SEQ ID NO: 100438 - DNA, 80 bp, synthetic construct
  source 1..80: mol_type = other DNA
attggaacggagagtcctttactggcccccttgcagatcaggcatccaaagccaacctcatgtatgaacaggccaaacac

SEQ ID NO: 100439 - DNA, 80 bp, synthetic construct
  source 1..80: mol_type = other DNA
aatagagcccgtcgcaggcgcatcaatcgctgctcctgtggtgggacaacaaaatattattgatccctggataagaaata

SEQ ID NO: 100440 - DNA, 80 bp, synthetic construct
  source 1..80: mol_type = other DNA
attttgtacaggcacctgctggagaatttaccgtttcccctaggaatgccccaggtgagttcttgcttgatttagaactg

SEQ ID NO: 100441 - DNA, 80 bp, synthetic construct
  source 1..80: mol_type = other DNA
ggccctgatttgaatccctatctggcacatttggcaagaatgtacaacgggcatgcgggtggtatggaagtgcaaatagt

SEQ ID NO: 100442 - DNA, 80 bp, synthetic construct
  source 1..80: mol_type = other DNA
actagctgggaatgcgttcacagctggtaaaatcctgtttgccgtcataccgcctggattcccgtatgaaaatttgtccc

SEQ ID NO: 100443 - DNA, 80 bp, synthetic construct
  source 1..80: mol_type = other DNA
catcacaactcacgatgtgcccccacgtcgtggttgatgtaaggcaacttgagcctgtcatgttgcccatgccagacatt

SEQ ID NO: 100444 - DNA, 80 bp, synthetic construct
  source 1..80: mol_type = other DNA
aggaatacattctttcattataatcaagatggtgggccaaaattgaggctgattgctatgctgtacacccctctaagagc

SEQ ID NO: 100445 - DNA, 80 bp, synthetic construct
  source 1..80: mol_type = other DNA
taataattcaggtgatgatgtgttcactgtttcctgtagggttctaacaagacctgcccctgattttgaattcacatttt

SEQ ID NO: 100446 - DNA, 80 bp, synthetic construct
  source 1..80: mol_type = other DNA
ttgagtcaaagactaaggcatttaccatcccagtgcttaaaatttctgaaatgataaactcaagattccctgtaccagtt

SEQ ID NO: 100447 - DNA, 80 bp, synthetic construct
  source 1..80: mol_type = other DNA
gaccaaatgtacaccagcaggagtgaaggaatcgtggttcagcctcaaaacggtagggccacaattgacggagagttact

SEQ ID NO: 100448 - DNA, 80 bp, synthetic construct
  source 1..80: mol_type = other DNA
tggcaccactctcgtctctccagtctctgtgtgtaatttcaagggaaacttgcagactcaggtcccaaatgaacaccagc

SEQ ID NO: 100449 - DNA, 80 bp, synthetic construct
  source 1..80: mol_type = other DNA
tttaccaactgcagctgactaacctcgatggttcacccattgaccccactgatgacacacctgggccactgggttgtcca

SEQ ID NO: 100450 - DNA, 80 bp, synthetic construct
  source 1..80: mol_type = other DNA
gacttcactggtctcctctatggggttgccagccagcgtggtccaggtgatgctacgcgggcccatgaggcacggattga

SEQ ID NO: 100451 - DNA, 80 bp, synthetic construct
  source 1..80: mol_type = other DNA
caccggcaacagcacttatgctcctaaaattggtcaggtcaggttctactcaacttcaaataattttgagataaatcaac

SEQ ID NO: 100452 - DNA, 80 bp, synthetic construct
  source 1..80: mol_type = other DNA
ccacacacttcaccccagtagggatctatattgagggtaattcttctgattttaatcaatggcagctccccaggtatggg

SEQ ID NO: 100453 - DNA, 80 bp, synthetic construct
  source 1..80: mol_type = other DNA
ggtcatctagctaacaacaaccatttggcacccgctgtttctcccctctttcctggagagcaaattcttttctttagatc

SEQ ID NO: 100454 - DNA, 80 bp, synthetic construct
  source 1..80: mol_type = other DNA
attcatcccaggagccagtggccacacaaatggagagatggattgtctcctgccacaggagtttgtgcagcacttctacc

SEQ ID NO: 100455 - DNA, 80 bp, synthetic construct
  source 1..80: mol_type = other DNA
aggaagcggcaactgcacagtcagaagtggccttgctgaggtttgtcaaccctgacactggaagggttttgtttgagtct

SEQ ID NO: 100456 - DNA, 80 bp, synthetic construct
  source 1..80: mol_type = other DNA
aaactccataagcaaggattcatgacaattgcaagttcaggtgaccaccctattatcatgccaactaatggttattttag

SEQ ID NO: 100457 - DNA, 80 bp, synthetic construct
  source 1..80: mol_type = other DNA
gattggctggggacgttctgtcctctggcgttggttcgctggtgaacgcgggttccaatgctatcaaccaaaatgttgaa

SEQ ID NO: 100458 - DNA, 80 bp, synthetic construct
  source 1..80: mol_type = other DNA
tataatttcaacaggcagctccaggaagcatctttcaaacatgataaggaaatgctcaatgcccaaattgctgcgacaac

SEQ ID NO: 100459 - DNA, 80 bp, synthetic construct
  source 1..80: mol_type = other DNA
gcagctgcaaaaagacataatagcaataaagcagggggttttgtccgctggcggcttctccccaactgatgccgcgagag

SEQ ID NO: 100460 - DNA, 80 bp, synthetic construct
  source 1..80: mol_type = other DNA
gttcagtgggggccccaatgaccaagattttggattggaatggatcaagatattgggctccaaattcaatgaggaccaca

SEQ ID NO: 100461 - DNA, 80 bp, synthetic construct
  source 1..80: mol_type = other DNA
ggttactctggcaacttcacttcccagggtgttaggcaagtgtttcaacctgctcaaggcactcccaacccaagcacctt

SEQ ID NO: 100462 - DNA, 80 bp, synthetic construct
  source 1..80: mol_type = other DNA
gagaaatgctcccaaggctccctcttcagtgaattcttttagtacccaatctacccaatcaacaaaattgagtggctcca

SEQ ID NO: 100463 - DNA, 80 bp, synthetic construct
  source 1..80: mol_type = other DNA
caacaggaacctctattccctcatccagaaccactacactttcaagaaccagtgagtgggtgagagggcagaatgagaga

SEQ ID NO: 100464 - DNA, 80 bp, synthetic construct
  source 1..80: mol_type = other DNA
cttagccctttcatgagtggcgcgctacaaacaaccttcgtgacgccaccatcaagcaagtcttcttctgtagggacagt

SEQ ID NO: 100465 - DNA, 80 bp, synthetic construct
  source 1..80: mol_type = other DNA
ctcgaccgtccctaaggaggttttggactcctggacgcctgtctttaacacacgcaggcagccactcttcgcccacgttc

SEQ ID NO: 100466 - DNA, 80 bp, synthetic construct
  source 1..80: mol_type = other DNA
gaggggagtcacagatttagtgaaaagaatgatttgaatttgattctttgttttattcttgtctttcttctaaaaaaaaa

SEQ ID NO: 100467 - DNA, 80 bp, synthetic construct
  source 1..80: mol_type = other DNA
atactttcattaatcatgaagaccattattgcattgagctacattttctgcctggcttttggtcagaaccttccagggaa

SEQ ID NO: 100468 - DNA, 80 bp, synthetic construct
  source 1..80: mol_type = other DNA
gcgaagtgctggtctggagatttgacagtaaactggcatttaatcatgtagctcgagagaagcatccggagttctacaaa

SEQ ID NO: 100469 - DNA, 80 bp, synthetic construct
  source 1..80: mol_type = other DNA
ctcagtcaatggggattcaactcgaccagaggataatcctgttatacatgcttgagtggggaaaggagatggtcgaccac

SEQ ID NO: 100470 - DNA, 80 bp, synthetic construct
  source 1..80: mol_type = other DNA
tccaggtgacaattcggctaagtttaaaaggtttactcaagcattatacgatggacttcgtgatgataaattaaaaaatt

SEQ ID NO: 100471 - DNA, 80 bp, synthetic construct
  source 1..80: mol_type = other DNA
actatttggtgcagctatctcactgcttttcaaaagggtatggtccaagttgtatcctgagttagaatgcttttttgagt

SEQ ID NO: 100472 - DNA, 80 bp, synthetic construct
  source 1..80: mol_type = other DNA
tatttggtgctgctatttcactgcttttcaaaagagtatggtctaagctgtatcctgagttagaatgtttctttgagttt

SEQ ID NO: 100473 - DNA, 80 bp, synthetic construct
  source 1..80: mol_type = other DNA
tgacaattgactaaaaaaatggagaaatatagagaaattcataacaaactaaaggagtttactattggtacactgacagc

SEQ ID NO: 100474 - DNA, 80 bp, synthetic construct
  source 1..80: mol_type = other DNA
tctgttagcttgattacgaagattctttcagatttggagcttaatataacagaaccatcatcacaagagttttcaacttc

SEQ ID NO: 100475 - DNA, 80 bp, synthetic construct
  source 1..80: mol_type = other DNA
taaacatacttatgttgataatgtgcttgacaggtttttccagaatgaaacacagaaataccttattgatattcttagga

SEQ ID NO: 100476 - DNA, 80 bp, synthetic construct
  source 1..80: mol_type = other DNA
agacaacagcctggcatataggacatcttgttagagacatcactgagagtcttatagcacattcaggtctaaagaggtca

SEQ ID NO: 100477 - DNA, 80 bp, synthetic construct
  source 1..80: mol_type = other DNA
aaatactggtcattacatttttataataatgggaatattgttctgttcatacttccatcaaaatccctagaagttgcagg

SEQ ID NO: 100478 - DNA, 80 bp, synthetic construct
  source 1..80: mol_type = other DNA
gttcttatataaggtttataacagtgtttaggatcgggcctggtttggtagatagggataacctggacactgtgttggta

SEQ ID NO: 100479 - DNA, 80 bp, synthetic construct
  source 1..80: mol_type = other DNA
gatggggattcacagtggggtgtttcaaaagtcatgagcattgatttaaataggttgctagcattgaatatagcctttga

SEQ ID NO: 100480 - DNA, 80 bp, synthetic construct
  source 1..80: mol_type = other DNA
agctttttgacaggccctttaagtcttcattggaggtatacatctactacaacataaaaagtttattagttgccttagcc

SEQ ID NO: 100481 - DNA, 80 bp, synthetic construct
  source 1..80: mol_type = other DNA
cagaataacaaggcacgattttattcgaaagtaaagttattaggccttacagtggatcaatcaactgttggtgcaagtgg

SEQ ID NO: 100482 - DNA, 80 bp, synthetic construct
  source 1..80: mol_type = other DNA
agagatttggagaggctctagttgagaatggttatatgataggtgagctaagggaggattcaagattagcagaacaacag

SEQ ID NO: 100483 - DNA, 80 bp, synthetic construct
  source 1..80: mol_type = other DNA
ctatattgtcaggatgcggttgaattggcagcaattgaattaaacaaagttcttattacgaaatctcaagtcgtggcaaa

SEQ ID NO: 100484 - DNA, 80 bp, synthetic construct
  source 1..80: mol_type = other DNA
cagtattcttaacaaaaactgggaagaaccctattttagtcagacaaggaatattagcttaaagggtatgtctggccagg

SEQ ID NO: 100485 - DNA, 80 bp, synthetic construct
  source 1..80: mol_type = other DNA
tttcttcatcggttacgattattgaagccattagatatttatctaattccagacacaatccaagccttttgaaattgtac

SEQ ID NO: 100486 - DNA, 80 bp, synthetic construct
  source 1..80: mol_type = other DNA
gaggaaacacggggtcataaggccatggctagaattgttaggaagtatcaacgcactgaggctgatcgcggcttttttat

SEQ ID NO: 100487 - DNA, 80 bp, synthetic construct
  source 1..80: mol_type = other DNA
caagaatattactgaagaatacatctcatacgggggtgagaagaagattttagccatacagtcagctttagagaaagcat

SEQ ID NO: 100488 - DNA, 80 bp, synthetic construct
  source 1..80: mol_type = other DNA
tacgatgggcatctggtgaaagttttatagagttgagtaatcaaaagtttatacggatgaagagaaagcttatgtatgtg

SEQ ID NO: 100489 - DNA, 80 bp, synthetic construct
  source 1..80: mol_type = other DNA
tgggatcggcatgtcagacaaaaatcaattaaagcgggccttagttggctatatgcacaagcgacagaaatcgatgcttt

SEQ ID NO: 100490 - DNA, 80 bp, synthetic construct
  source 1..80: mol_type = other DNA
gattgaaatatgaagctggattgacctatatagagcaagagctacataacttctttcttaagggggatctctctcagcct

SEQ ID NO: 100491 - DNA, 80 bp, synthetic construct
  source 1..80: mol_type = other DNA
atattctcggcctgtttaagtttctaatgaatctatctgatgaaacatttcaacatgaacgccttgggcaattttcattt

SEQ ID NO: 100492 - DNA, 80 bp, synthetic construct
  source 1..80: mol_type = other DNA
ttgcacccatgctgtataaatttgcaaaatctcgtgttgttattgtgcagggtaatgtcgaggggactgctgaagcaata

SEQ ID NO: 100493 - DNA, 80 bp, synthetic construct
  source 1..80: mol_type = other DNA
tgtgcctactggttgaaatccatgtcacttgtaaaaaccattagggttaaaccacacaaggaagtaattcaagctgtatc

SEQ ID NO: 100494 - DNA, 80 bp, synthetic construct
  source 1..80: mol_type = other DNA
caggtaaacaatatgatgcctattgtgtgcagacctataatgaaatgactaagttatatgaaggggatttaagagtaacc

SEQ ID NO: 100495 - DNA, 80 bp, synthetic construct
  source 1..80: mol_type = other DNA
tttaattttggattagactgtgctcgcctagaggtcttctgggataaacaggcatacatcttggaaacatcaattacaca

SEQ ID NO: 100496 - DNA, 80 bp, synthetic construct
  source 1..80: mol_type = other DNA
atggagtcgtacaatatatgcggctagtacaggcagagattagctatgtgagggagcacctagtgaaaccagaagaacgg

SEQ ID NO: 100497 - DNA, 80 bp, synthetic construct
  source 1..80: mol_type = other DNA
ggtattaagttatatctgaacccgataatttcatctgggttgtttgaaaattttatgaagaatttacctgcagcaatccc

SEQ ID NO: 100498 - DNA, 80 bp, synthetic construct
  source 1..80: mol_type = other DNA
tgctgagattaatcaacccatataatactttagatctgtctgggcttgagacaaccggtgagggattcagtactgtcagt

SEQ ID NO: 100499 - DNA, 80 bp, synthetic construct
  source 1..80: mol_type = other DNA
gatcttttaatcagtgctgaagagacagaggtaaagaagatgagaggaatagttaagatcttagaaccagtaaggctgat

SEQ ID NO: 100500 - DNA, 80 bp, synthetic construct
  source 1..80: mol_type = other DNA
ctaaaacatttaatttaactaataggcaagtttccttgttggacccttatgatctaactgagttagaaagcgtggtaaga

SEQ ID NO: 100501 - DNA, 80 bp, synthetic construct
  source 1..80: mol_type = other DNA
tacaaagggattgatccaattggtgcaaacatggacgaccttgtgcagtactctcgtgagtggttatcacgtgcacaaaa

SEQ ID NO: 100502 - DNA, 80 bp, synthetic construct
  source 1..80: mol_type = other DNA
tttttcattctttgaggtaaagggagcttctgtgtttgagtgctttaatgtaaatgagacggaccactgcttaaagtacc

SEQ ID NO: 100503 - DNA, 80 bp, synthetic construct
  source 1..80: mol_type = other DNA
cagtgctttctgatcagatagatagtcgccgagcttgctcatttattctcaatcttatacctgatacacctgcttctttt

SEQ ID NO: 100504 - DNA, 80 bp, synthetic construct
  source 1..80: mol_type = other DNA
ccaaagagtggacatggacatagttgtctattgtaatggtcagaagaagaccatcctgaccaaaacacttgtgatcggtc

SEQ ID NO: 100505 - DNA, 80 bp, synthetic construct
  source 1..80: mol_type = other DNA
ataagagccgaaagtcaatcatttgctatgacttgtcatgcaatatcactcattgcaaacctaccctgtatatgatagtt

SEQ ID NO: 100506 - DNA, 80 bp, synthetic construct
  source 1..80: mol_type = other DNA
aataaaaactataaacaataaaaccctctgtaaatagttactaatatttcacagttttcatttatcctgttatagcttac

SEQ ID NO: 100507 - DNA, 80 bp, synthetic construct
  source 1..80: mol_type = other DNA
ttttgttgctgtaaagggtagtacttacaaaatatttgaggaagtaaaaaaatcatttgcccttaactgcaatgatacag

SEQ ID NO: 100508 - DNA, 80 bp, synthetic construct
  source 1..80: mol_type = other DNA
agctcaagcacaacaacattaagcctgacagcattctcaggaattcctgcatattcatcgtttagtattctggcaggatc

SEQ ID NO: 100509 - DNA, 80 bp, synthetic construct
  source 1..80: mol_type = other DNA
cattgagcccaagcatgtttttagtccaggtctttttcctaggttgaatcatacaaagtgcaccaagtcagccataccat

SEQ ID NO: 100510 - DNA, 80 bp, synthetic construct
  source 1..80: mol_type = other DNA
tgatttggactggtcgtgtggatttacccgggtattatgaggccatccatccatgcacagttttctgtgtgttgtcaggt

SEQ ID NO: 100511 - DNA, 80 bp, synthetic construct
  source 1..80: mol_type = other DNA
ttcaatattacttctccaatgtgtcttgtttcaaaacaaaacaggtttcggtcttcagagcagcaggttaactttgtgtg

SEQ ID NO: 100512 - DNA, 80 bp, synthetic construct
  source 1..80: mol_type = other DNA
acaacagagggagtagaaatgagaaactgttctttcaatgtcaccacaagcataaaaactaaggtgagagactatgcact

SEQ ID NO: 100513 - DNA, 80 bp, synthetic construct
  source 1..80: mol_type = other DNA
ccaccattgaagaactcagacggcaaaagtagtgaatttagcttgtccttcatgaaaaaatgtatcctccagtgggaaac

SEQ ID NO: 100514 - DNA, 80 bp, synthetic construct
  source 1..80: mol_type = other DNA
aatatgcaatcagagtgttgtcatttacaaaaacaacacatgggtgaatcaaacatatgttaacatcagcaacaataatt

SEQ ID NO: 100515 - DNA, 80 bp, synthetic construct
  source 1..80: mol_type = other DNA
ttgttgctgaacaaacatcaatttcagtgaaattagcaggcaattcttctctatgccctgttagtggatgggctatatac

SEQ ID NO: 100516 - DNA, 80 bp, synthetic construct
  source 1..80: mol_type = other DNA
gtacacaaattgcaattgacggaatcaacaacaaagtgaactcaataattgaaaaaatgaacgttcaatttacttcagtg

SEQ ID NO: 100517 - DNA, 80 bp, synthetic construct
  source 1..80: mol_type = other DNA
gggatcagcaataaagtaaactcggtgattgaaaaaatgaacattcaatttacttcagtgggtaaggagttcaataatct

SEQ ID NO: 100518 - DNA, 80 bp, synthetic construct
  source 1..80: mol_type = other DNA
gagtgcatggaaagcgtaaagaatggtacatacaattatcccaaatattcagaagaatcaaaattgaatagagagagaat

SEQ ID NO: 100519 - DNA, 80 bp, synthetic construct
  source 1..80: mol_type = other DNA
aggcgcaaacccaaactatcttctagcctggaaacaagtgctagctgaactacaggacattgagaatgaggagaaaatcc

SEQ ID NO: 100520 - DNA, 80 bp, synthetic construct
  source 1..80: mol_type = other DNA
ataggatcagtaacaaagtgaactcaataattgaaaaaatgaacactcagtttgcttcagtgagcaaggagttcaataat

SEQ ID NO: 100521 - DNA, 80 bp, synthetic construct
  source 1..80: mol_type = other DNA
gagtgaaggggtgggcctttgatgatggaaatgatgtatggatgggaagaacgatcaccgaagattcacgagcaggttat

SEQ ID NO: 100522 - DNA, 80 bp, synthetic construct
  source 1..80: mol_type = other DNA
gatcaagcaataatggataaaaaaataacattgaaagcaaatttcagcgtgatttttggtcaactggaaactctgatact

SEQ ID NO: 100523 - DNA, 80 bp, synthetic construct
  source 1..80: mol_type = other DNA
catcagaggtaactccccagtgtttaactataataaggcaacaaaaaggctaacggtcctcggaaaggacgcaggggcat

SEQ ID NO: 100524 - DNA, 80 bp, synthetic construct
  source 1..80: mol_type = other DNA
attgcacctgagaaggtggattttgaagattgcaaagatgtcggtgatttaaaacagtatgatagtgaagagccagaaat

SEQ ID NO: 100525 - DNA, 80 bp, synthetic construct
  source 1..80: mol_type = other DNA
atgagcggggtgaatcgacaatagtagaatccggtgatccgaatgcactcttaaaacacagatttgaaataattgaggga

SEQ ID NO: 100526 - DNA, 80 bp, synthetic construct
  source 1..80: mol_type = other DNA
agcaaaagcaggggatgattaaatcaaccaagatgaaaacaaaactgtttgtattattctgtgcattcacaacactgaaa

SEQ ID NO: 100527 - DNA, 80 bp, synthetic construct
  source 1..80: mol_type = other DNA
aaattcaagccagaaatagtgaccagacctaaaatcagtaaacaagcgggcagaatgaattattattggacactgcttga

SEQ ID NO: 100528 - DNA, 80 bp, synthetic construct
  source 1..80: mol_type = other DNA
actcctcagagctttcacagaagaaggggcaattgtgggtgagatctcaccattaccttctcttccaggacatactaatg

SEQ ID NO: 100529 - DNA, 80 bp, synthetic construct
  source 1..80: mol_type = other DNA
taaattataatcttatactagtaaaaaatagggtgtaaccgaaaacggtcagaccgaaaccggtgtatatatatagaaca

SEQ ID NO: 100530 - DNA, 80 bp, synthetic construct
  source 1..80: mol_type = other DNA
atgcacaggaaggggaggatgatttacatgctgtgtctgcagtaaaacgaaagtttacaagcagtccggaaagtgctggg

SEQ ID NO: 100531 - DNA, 80 bp, synthetic construct
  source 1..80: mol_type = other DNA
tcaagtggggtgggggctagtaattcagatgtaagttgtactagtatagaggacaatgaggaaaatagtaatagaacgct

SEQ ID NO: 100532 - DNA, 80 bp, synthetic construct
  source 1..80: mol_type = other DNA
tccaagacctccgcggtgtccgtgggtgccaaagacacacccctacaaccaccacaaaaacgacgaccattggaccagta

SEQ ID NO: 100533 - DNA, 80 bp, synthetic construct
  source 1..80: mol_type = other DNA
tattttccaatgttttgtattcactgtcatgcacagtatttggcacaactgcaataactgtacatgtagattggctacat

SEQ ID NO: 100534 - DNA, 80 bp, synthetic construct
  source 1..80: mol_type = other DNA
aaaatatggcagcctaggggtgttttttggaggtttgggtataggtacaggtgcaggctctggtggtagggcaggctatg

SEQ ID NO: 100535 - DNA, 80 bp, synthetic construct
  source 1..80: mol_type = other DNA
attggggtaagggaaccccttgtaataataattcaggaaatcctggggattgtcctcccctacagctcattaacagtgta

SEQ ID NO: 100536 - DNA, 80 bp, synthetic construct
  source 1..80: mol_type = other DNA
atacaggatggggacatggtagatacaggatttggttgcatggattttaataccttgcaagctagtaaaagtgatgtgcc

SEQ ID NO: 100537 - DNA, 80 bp, synthetic construct
  source 1..80: mol_type = other DNA
gcatcatcggccccacgtacctccacaaagaagaaaaaggttaaaaggtaaccattgtctgttgggtaattgtctgtgtc

SEQ ID NO: 100538 - DNA, 80 bp, synthetic construct
  source 1..80: mol_type = other DNA
actaaactatttatagtagtcttatgttatggttgcacccacatgagtaacaatacagttgctcctaatctattgcatct

SEQ ID NO: 100539 - DNA, 80 bp, synthetic construct
  source 1..80: mol_type = other DNA
gcacggccatgtttgaggatccagcaacacgaccccggaccctgcacgaattgtgtgaggtgctggaagaatcggtgcat

SEQ ID NO: 100540 - DNA, 80 bp, synthetic construct
  source 1..80: mol_type = other DNA
gatggttgcacccacatgagtgacaatacagttgctcctaatctattgcatctcctgccctaccctgtgtcccctgccct

SEQ ID NO: 100541 - DNA, 80 bp, synthetic construct
  source 1..80: mol_type = other DNA
aggtaattgtttgtcctgcatctgtatctagtaacgaaggtattgtaacaataacgtacagtgatgaaacacaacgtcaa

SEQ ID NO: 100542 - DNA, 80 bp, synthetic construct
  source 1..80: mol_type = other DNA
caatttttaaaaactgttaaaataccaaatactgtgcaagttatacaaggtgtcatgtcattgtgatatgtgtacatatg

SEQ ID NO: 100543 - DNA, 80 bp, synthetic construct
  source 1..80: mol_type = other DNA
ggtaataaggccaccctactaatacaggatggggacatggtagatacaggatttggttgcatggattttaataccttgca

SEQ ID NO: 100544 - DNA, 80 bp, synthetic construct
  source 1..80: mol_type = other DNA
gtttgacatatatagatgattatatgagaaataaggaaaacgatggagtcgataccggcacgtttaaatgcagtgcagga

SEQ ID NO: 100545 - DNA, 80 bp, synthetic construct
  source 1..80: mol_type = other DNA
aacaggagataacatttcagaggacgaggatgaaaatgcatatgatagtggaacagatctaatagattttatagatgatt

SEQ ID NO: 100546 - DNA, 80 bp, synthetic construct
  source 1..80: mol_type = other DNA
tttggagtgttgtgtatgtcaaacacaggttaaaaggtaaccattgtttgttatgtaattgttttgtgtgtgtactgtgt

SEQ ID NO: 100547 - DNA, 80 bp, synthetic construct
  source 1..80: mol_type = other DNA
cagtaatgaatgtacaaataataaactaggtattgtaacaataacaacgtcaacaatttttgaaaactgttaaaatacca

SEQ ID NO: 100548 - DNA, 80 bp, synthetic construct
  source 1..80: mol_type = other DNA
gttggacatatatagatgattatatgagaaatgcacagatgtaaagcatagagccttagtacaaataaaatgcccaccat

SEQ ID NO: 100549 - DNA, 80 bp, synthetic construct
  source 1..80: mol_type = other DNA
cccagtaattaaaggtacttacaacaacactgggaaacagccgattatttatttctggggtgtgcatcaccctcctgatg

SEQ ID NO: 100550 - DNA, 80 bp, synthetic construct
  source 1..80: mol_type = other DNA
cacctcgatacgcatacagatttttcagctcaaataaaaggggaatcatttttaaatcaaatttgcccatagagaactgt

SEQ ID NO: 100551 - DNA, 80 bp, synthetic construct
  source 1..80: mol_type = other DNA
caatccaaccctcgagacattagaatacaggaactggtcaaaaccacaatgccaaattacagggtttgctcctttcacca

SEQ ID NO: 100552 - DNA, 80 bp, synthetic construct
  source 1..80: mol_type = other DNA
ggggaaccaacactctaatggtacaatacatgataggacccctcatcgaacacttttgatgaacgaattgggcatcccgt

SEQ ID NO: 100553 - DNA, 80 bp, synthetic construct
  source 1..80: mol_type = other DNA
aaggtagcggaaatatgaaggaatgtgtcacaactgggagggcgccccttcctgcggtgaacccaggacaggaggcatgt

SEQ ID NO: 100554 - DNA, 80 bp, synthetic construct
  source 1..80: mol_type = other DNA
atcaaggttaagaggatcaacctaaaatgtaagaagtcatcatcatattttgtccctgatgctcggtccaggtgcacatc

SEQ ID NO: 100555 - DNA, 80 bp, synthetic construct
  source 1..80: mol_type = other DNA
aagggagcgggaacatgagagaatgtgtcacaactgggagggcgctccttcctgcggtgaatccaggacaagaggcatgt

SEQ ID NO: 100556 - DNA, 80 bp, synthetic construct
  source 1..80: mol_type = other DNA
cccatctgccagcatggattggaggacgcagacagagaagtgctggtctggagatttgacagtaaactggcagctcacca

SEQ ID NO: 100557 - DNA, 80 bp, synthetic construct
  source 1..80: mol_type = other DNA
gtctggagatttgacagtaaactagcatttaaacatgaagcccgagagaggcatccggagttttacaaggactgaagctg

SEQ ID NO: 100558 - DNA, 80 bp, synthetic construct
  source 1..80: mol_type = other DNA
ctgaaaaactgctctttcaatactaccacaagcatacaaaataagtttcagaaagaatatgcaattttctataagcttga

SEQ ID NO: 100559 - DNA, 80 bp, synthetic construct
  source 1..80: mol_type = other DNA
aaatctatgcaatagcagcattaataatagtgtttctcatagcagtagttgtgtggactagagtaggcatagaatatagg

SEQ ID NO: 100560 - DNA, 80 bp, synthetic construct
  source 1..80: mol_type = other DNA
ggggaaatgaaaaattgctctttcgaggtcaccaaaagcataggaagagagatgcacagggactatgcacttttctatag

SEQ ID NO: 100561 - DNA, 80 bp, synthetic construct
  source 1..80: mol_type = other DNA
gaaggggcacgaagaattagggaagctattcgctacatatttagaggggccttgaaaagcttttgctataagatgggtgg

SEQ ID NO: 100562 - DNA, 80 bp, synthetic construct
  source 1..80: mol_type = other DNA
cactcaaactgcaattgatgggatcagaaacaaagtaaattcaataattgaaaaaatgaacattcaatttacttcagtgg

SEQ ID NO: 100563 - DNA, 80 bp, synthetic construct
  source 1..80: mol_type = other DNA
cactcaaatcgcaattgatggaatcaacaacaaagtgaactcagtaattgagaagatgaacaatcaatttacttcagtgg

SEQ ID NO: 100564 - DNA, 80 bp, synthetic construct
  source 1..80: mol_type = other DNA
aacagtgaccaacaaactctataccagaataacaatacatatatttcagttgaatcgtcaaaatactatcgaaggttcaa

SEQ ID NO: 100565 - DNA, 80 bp, synthetic construct
  source 1..80: mol_type = other DNA
atgcatttgcagagacaactggaagggttccaacaggcccgtagtggatataaatgttaaagattatagtattagttcca

SEQ ID NO: 100566 - DNA, 80 bp, synthetic construct
  source 1..80: mol_type = other DNA
atcgaatcggctactcgtgcggggaaacaaatagtgaagcgtattctggaagaagaatacgaaggggcgcttaaaatggc

SEQ ID NO: 100567 - DNA, 80 bp, synthetic construct
  source 1..80: mol_type = other DNA
tcaaatatatccaatatggagaggataaaagaattaagagatctgatgtcgcagtctcgcactcgcgagatactgacaaa

SEQ ID NO: 100568 - DNA, 80 bp, synthetic construct
  source 1..80: mol_type = other DNA
tgagagttcgagatcagcagggaaatatactactgtctcctgaggaggttagtgaaacacaaggaacggagaaattgaca

SEQ ID NO: 100569 - DNA, 80 bp, synthetic construct
  source 1..80: mol_type = other DNA
gtaactctccagtgtttaactacaataaggcaacaaaaaggctaactgtactcggaaaggacgcaggtgcgttaacagaa

SEQ ID NO: 100570 - DNA, 80 bp, synthetic construct
  source 1..80: mol_type = other DNA
agagactctagcatacttactgacagccagacagcgaccaaaaggattcggttggccatcaattaatgttgaattgttta

SEQ ID NO: 100571 - DNA, 80 bp, synthetic construct
  source 1..80: mol_type = other DNA
ggcaaggaattcaatgaactagagaaaaggattgggaatttgaacaaaaaagtcgatgatgggtttttggacgtatggac

SEQ ID NO: 100572 - DNA, 80 bp, synthetic construct
  source 1..80: mol_type = other DNA
aatgtttgttgaagaagggaagatcatacacattagttcattgtcaggaagtgcacagcatgtggaagagtgttcttgtt

SEQ ID NO: 100573 - DNA, 80 bp, synthetic construct
  source 1..80: mol_type = other DNA
aaagaggggccccaggagtgaaagggtgggcttttgacgacgggaatgatgtttggatgggacggacaatcaaaaatggt

SEQ ID NO: 100574 - DNA, 80 bp, synthetic construct
  source 1..80: mol_type = other DNA
catagatggttggaccatggctaattcaaagtcacagataaataggcaagtcatagtcgacagcgacgactggtctgggt

SEQ ID NO: 100575 - DNA, 80 bp, synthetic construct
  source 1..80: mol_type = other DNA
cgatcataatagaaaggaacacagtgcatttgaatagtactaccataaaaagggaaatttgtcctaaagcagcaaaatat

SEQ ID NO: 100576 - DNA, 80 bp, synthetic construct
  source 1..80: mol_type = other DNA
ctcaaaggacaactcatttaggctttctgcaggtggggatatctgggtaacaaaaaaaccttatgtctcatgcagtcccc

SEQ ID NO: 100577 - DNA, 80 bp, synthetic construct
  source 1..80: mol_type = other DNA
acaaatgttatcatttcccacttgggcaggaaaccactctgaaaaacaaccactcaaatggcactacacttgataaaacc

SEQ ID NO: 100578 - DNA, 80 bp, synthetic construct
  source 1..80: mol_type = other DNA
gaatgaattaggggtcccatttcatctagaaaccaaacaagtgtgtatagcatggtctagttcaagctgccatgatggaa

SEQ ID NO: 100579 - DNA, 80 bp, synthetic construct
  source 1..80: mol_type = other DNA
aatgctcctgttatccccggtatcctgaaattagatgtgtttgtagagataattggaagggatccaataggcccatcata

SEQ ID NO: 100580 - DNA, 80 bp, synthetic construct
  source 1..80: mol_type = other DNA
cttcacaaccactatgactttacttttcgggcaaaaagaatgcagccccccatcgaataatcatgtgatgccatgtgaac

SEQ ID NO: 100581 - DNA, 80 bp, synthetic construct
  source 1..80: mol_type = other DNA
gctcctgcaggatatcatggattactttcctgtgatatctgttgatttgcagagtggtcgacgtgttgtgtcagtggagt

SEQ ID NO: 100582 - DNA, 80 bp, synthetic construct
  source 1..80: mol_type = other DNA
ggtggggatagttcggtgtgagagacgaagagatgctaagcaaatagggagagaaaccatggcagggattgcaatgacag

SEQ ID NO: 100583 - DNA, 80 bp, synthetic construct
  source 1..80: mol_type = other DNA
gataggacaaattattgggatatccaggcttagaaacttatgcaataatactttagatgtaagcttagttgtaatttggg

SEQ ID NO: 100584 - DNA, 80 bp, synthetic construct
  source 1..80: mol_type = other DNA
ttctcccccctcccccccaaattacaactaagcttacatctaaagtattattgcataagtttctaagcctggatatccca

SEQ ID NO: 100585 - DNA, 80 bp, synthetic construct
  source 1..80: mol_type = other DNA
gtgccccaagattggaggacatggtagtaagaagtgcactggggacgcagcattttgctctgcttatgagtgcactgctc

SEQ ID NO: 100586 - DNA, 80 bp, synthetic construct
  source 1..80: mol_type = other DNA
ttttttttttttgtctgacaaactggtcttctttttaaatggtttgtacagcattgtacactgtttgcgctattctcttc

SEQ ID NO: 100587 - DNA, 80 bp, synthetic construct
  source 1..80: mol_type = other DNA
ggaagattgtgtaatcctttgaatccattcgtcaaccataagggaattgagtccgtgaatagtgccgtggtagtgccagc

SEQ ID NO: 100588 - DNA, 80 bp, synthetic construct
  source 1..80: mol_type = other DNA
cagcattatttccaaatgcgcagccatttgaacatcttgctacagtaggactgacactgagaattgaatcagcagtttgt

SEQ ID NO: 100589 - DNA, 80 bp, synthetic construct
  source 1..80: mol_type = other DNA
ataacaatatatttccagcaggacaaatataccaacctctccaacaaccaagcggtgccatgtgaaccgatcataataga

SEQ ID NO: 100590 - DNA, 80 bp, synthetic construct
  source 1..80: mol_type = other DNA
gaggaacaaaacggagatagtatatttgaacaacattaccatagagagagaaagttaccccacagtagcagactacagag

SEQ ID NO: 100591 - DNA, 80 bp, synthetic construct
  source 1..80: mol_type = other DNA
tggcgctgtaagagaccactagttcatcctccccgttgggtgggggaggagggatctttttgaccaattctggtgtgggt

SEQ ID NO: 100592 - DNA, 80 bp, synthetic construct
  source 1..80: mol_type = other DNA
tggcgctgtaagagaccactagttcatcctccccgttgggtgggggaggagggatctttttgaccaattctggtgtgtgt

SEQ ID NO: 100593 - DNA, 80 bp, synthetic construct
  source 1..80: mol_type = other DNA
cgcaccggggatcctaggcttattagattgcgctttgcattggggcctgttacacgtgaaccggtctcagcaccagcacc

SEQ ID NO: 100594 - DNA, 80 bp, synthetic construct
  source 1..80: mol_type = other DNA
ctgcccaccttgagaatgttcttcttagaagttgatttcaactccacaagagaatggactgtttggttcaggcccctcag

SEQ ID NO: 100595 - DNA, 80 bp, synthetic construct
  source 1..80: mol_type = other DNA
gagtccattgaaagctcttaacttctttggacaaggacattgtaatggtcttcactgtgtctccgtgaaatgcgcattca

SEQ ID NO: 100596 - DNA, 80 bp, synthetic construct
  source 1..80: mol_type = other DNA
tcagtctatgtcctgcagtgacggctccctcagccagtcatcacaggacttccccttgagcctgtaccctccactcactg

SEQ ID NO: 100597 - DNA, 80 bp, synthetic construct
  source 1..80: mol_type = other DNA
ctctgaaggaaaaccagtctggcacacctttcagtggtgagagtaggatagactttgtgatgtgtaactcctgcacgata

SEQ ID NO: 100598 - DNA, 80 bp, synthetic construct
  source 1..80: mol_type = other DNA
ttcctagcaacgtaatcacaagcgtttaattgttttggcactgacttaacaatttcccttgctttaatgggctctgccaa

SEQ ID NO: 100599 - DNA, 80 bp, synthetic construct
  source 1..80: mol_type = other DNA
cacaaatgtacaaagatatgtcatcgcctttctggattcttaagacgtggttgtcccgcgatagatcctccaggaccctt

SEQ ID NO: 100600 - DNA, 80 bp, synthetic construct
  source 1..80: mol_type = other DNA
atttagaacatagcttgttctgaagggtctttatcaatgagggtactttttcttcttgaaaactcatcactgatgggtag

SEQ ID NO: 100601 - DNA, 80 bp, synthetic construct
  source 1..80: mol_type = other DNA
gtatttatctctgaattaatcaggtgctcgcctgttctaaatctgtgaaggagaaggtcactgagcaccttatcgactcc

SEQ ID NO: 100602 - DNA, 80 bp, synthetic construct
  source 1..80: mol_type = other DNA
tcaaaatagtccctaaaaatttcttctgttgctgttgtctgtgttccttttaaaagtttcaacttggctttgatgtaaga

SEQ ID NO: 100603 - DNA, 80 bp, synthetic construct
  source 1..80: mol_type = other DNA
cacataaccttctagttcagccagcatgactctaaggtcttttgtctccaagttgaccatgatgttttgaacgaagtttc

SEQ ID NO: 100604 - DNA, 80 bp, synthetic construct
  source 1..80: mol_type = other DNA
agtatagtggagagagttctgtgttcccctcgacagcctcacagattaacttcatatcatcgggagagagacaggctgga

SEQ ID NO: 100605 - DNA, 80 bp, synthetic construct
  source 1..80: mol_type = other DNA
tcaaaatcttctaccagatggaatgaaatttctgacagtatgattttccttaaataagatgacctccctgtcaagactat

SEQ ID NO: 100606 - DNA, 80 bp, synthetic construct
  source 1..80: mol_type = other DNA
gcaaatgatgcaggcctttggcaccttttcccccttcctgatctcttagttgttcgattgttgctctccttccatagtgg

SEQ ID NO: 100607 - DNA, 80 bp, synthetic construct
  source 1..80: mol_type = other DNA
actaacaccctcattcttctttgatcttttctctgtgttaagaaccaatctggacaccaacttggacaccttgtactcat

SEQ ID NO: 100608 - DNA, 80 bp, synthetic construct
  source 1..80: mol_type = other DNA
aatcagtgtggttcaacttatacttggtctttctaacaaacccctcggtgatctggcttacagcactgacaagtagtttg

SEQ ID NO: 100609 - DNA, 80 bp, synthetic construct
  source 1..80: mol_type = other DNA
ttgaaatcatactcaagaagtcgctccccattcaggtgtttgttgacaacaacactcttgttgcttgctaaatccagtgc

SEQ ID NO: 100610 - DNA, 80 bp, synthetic construct
  source 1..80: mol_type = other DNA
agctaaaataagattagatttcaacaattccaactcaacagagtcacccagcacaattgggtctatcatataatcctcaa

SEQ ID NO: 100611 - DNA, 80 bp, synthetic construct
  source 1..80: mol_type = other DNA
acaataatatcagcgtccttaaagcagtttcgatgtcattgatctgctcgactaaatcagggcaggatctaatccaagag

SEQ ID NO: 100612 - DNA, 80 bp, synthetic construct
  source 1..80: mol_type = other DNA
cattgtccaccttagctatttgaaagaagacttctttacactccaccacctggtacctaattgagcctaattggttttgt

SEQ ID NO: 100613 - DNA, 80 bp, synthetic construct
  source 1..80: mol_type = other DNA
tctttaaactccttatatctgttagctgttttaattctgtttggaaagtgtaatcttcaaaccttgtataatgcattact

SEQ ID NO: 100614 - DNA, 80 bp, synthetic construct
  source 1..80: mol_type = other DNA
gggtgaaccccgtgtcttttgaattcctcgaactcattgagtgtgatctgacattcaattactagatcttcagacagccc

SEQ ID NO: 100615 - DNA, 80 bp, synthetic construct
  source 1..80: mol_type = other DNA
atagtgtccaaaactaagacccactgcggaaaggcatcttttaatctttgaaataaagtcctgtatggagtttttgaaca

SEQ ID NO: 100616 - DNA, 80 bp, synthetic construct
  source 1..80: mol_type = other DNA
attcatcggaacgaatatcaaaagtgctatctctggccttgaaaagaggatctgttcttaataaacttagacactcatct

SEQ ID NO: 100617 - DNA, 80 bp, synthetic construct
  source 1..80: mol_type = other DNA
gctcttccagaggtgtacttttgtttgatttagatcttttcctatttcttaagacccttaaaaactcctcctttgtgcta

SEQ ID NO: 100618 - DNA, 80 bp, synthetic construct
  source 1..80: mol_type = other DNA
gaggagagacagaggacatccaaattaagcaactgcttccttctggtattcagaagcttcaagctcttcactttgtttaa

SEQ ID NO: 100619 - DNA, 80 bp, synthetic construct
  source 1..80: mol_type = other DNA
cattgaaagcagcctttcatatacggtgttattcgttggaccccttctatgtccctcagtatcccctgtgataaacctca

SEQ ID NO: 100620 - DNA, 80 bp, synthetic construct
  source 1..80: mol_type = other DNA
aactccttaatcagtgttttagggtccaccattctaaagtttcttgccagtttccctccctccaaatctcttctaaacct

SEQ ID NO: 100621 - DNA, 80 bp, synthetic construct
  source 1..80: mol_type = other DNA
actaaagagggagttaatacccataaccacctcatcgcagctcattgtggggttcacaccatcgtggcacattttcatga

SEQ ID NO: 100622 - DNA, 80 bp, synthetic construct
  source 1..80: mol_type = other DNA
aacagttttctgtccacctcgcccttgaacatataagtgcatgataaaaactcagcaattcctggatcaagtagtctaca

SEQ ID NO: 100623 - DNA, 80 bp, synthetic construct
  source 1..80: mol_type = other DNA
ggccgggacacacaacccctgactctatgagaatggcctctacagacttgtcctcaaaattgtgtacgcagccactttta

SEQ ID NO: 100624 - DNA, 80 bp, synthetic construct
  source 1..80: mol_type = other DNA
tctgcgctgtccatttcgatgcaccttgagagcagtttgagaccctcaatcagcatcagcttgggctctctctgtcccaa

SEQ ID NO: 100625 - DNA, 80 bp, synthetic construct
  source 1..80: mol_type = other DNA
aacttttgccttgataatcgctcatcttgctcaatgtagttcagacaaagattccttaactctgatatgatttcctccat

SEQ ID NO: 100626 - DNA, 80 bp, synthetic construct
  source 1..80: mol_type = other DNA
cttcactgtgaacatcaatgagaatttccttaagtgttctgtattgttttgattgtgtgtgaaatcaacagtcaatgtga

SEQ ID NO: 100627 - DNA, 80 bp, synthetic construct
  source 1..80: mol_type = other DNA
attctaatagaccttctctgtggttgagaaaatattcccacatattcttcaatgttccaaatgtccttgagtttaccata

SEQ ID NO: 100628 - DNA, 80 bp, synthetic construct
  source 1..80: mol_type = other DNA
ccttgctttatcaacatggctgcattacaaactgtgtcccccaaacgataagaaaaccatccatacccgaattgtagatc

SEQ ID NO: 100629 - DNA, 80 bp, synthetic construct
  source 1..80: mol_type = other DNA
tcagtctatgtcctgcaacaacgactccctcagccagtcatcacaggacttccccttaagcctatacctgccactcactg

SEQ ID NO: 100630 - DNA, 80 bp, synthetic construct
  source 1..80: mol_type = other DNA
catggtttaaattaattttgtcctccaaaagtcttgaactctcgggtttcctagcaacgtaatcacaagcgttgagctgt

SEQ ID NO: 100631 - DNA, 80 bp, synthetic construct
  source 1..80: mol_type = other DNA
cttggtactgacttaacagattcccttgctttagtgggctctgccaacacccacacacccagctcgaatgaattactcaa

SEQ ID NO: 100632 - DNA, 80 bp, synthetic construct
  source 1..80: mol_type = other DNA
aatggtaagagtaagatggactttgtgatgtgtaactcctgtataatggtatttatctctgaattaatcaggtgctcgcc

SEQ ID NO: 100633 - DNA, 80 bp, synthetic construct
  source 1..80: mol_type = other DNA
cacaaatgtacaaaaatatgtcatcacctctttggattctagagacgtggctgtctcgtgacaggtcctctagaaccctt

SEQ ID NO: 100634 - DNA, 80 bp, synthetic construct
  source 1..80: mol_type = other DNA
tttatatacaggttttctttatctttgtccctgacacacctactccccagagtcttgcaaagacctataaatcctgagga

SEQ ID NO: 100635 - DNA, 80 bp, synthetic construct
  source 1..80: mol_type = other DNA
aagaacttcagcaagctgtagaatggcatccttcttctctctgttgaagaggtctagaaaaaattcctcattgaactcac

SEQ ID NO: 100636 - DNA, 80 bp, synthetic construct
  source 1..80: mol_type = other DNA
tgttctaaatctgtgcaggagaaggtcactaagcaccttgtcagttctcacataaccttccagttcagccaacatgactc

SEQ ID NO: 100637 - DNA, 80 bp, synthetic construct
  source 1..80: mol_type = other DNA
tacctgaatcaaagtagtccctgaaaatttcttctgttgctgttgtctgtgttccctttaaaagtttcaacttggccttg

SEQ ID NO: 100638 - DNA, 80 bp, synthetic construct
  source 1..80: mol_type = other DNA
tgaggtctttggtctccaagttgaccatgatattttgaacaaagtttctcccctcatagaaagcgccacaccttacagtc

SEQ ID NO: 100639 - DNA, 80 bp, synthetic construct
  source 1..80: mol_type = other DNA
aaaatcctctaccaaatggaatgaaatttctgatagtatgacttttctcaaatgagatgacctccctgtcaagattattt

SEQ ID NO: 100640 - DNA, 80 bp, synthetic construct
  source 1..80: mol_type = other DNA
gcagatgatgcaggcctttggcgcctttccccccctcttgatctcttagttgctcgattgttgttctctttccatagtgg

SEQ ID NO: 100641 - DNA, 80 bp, synthetic construct
  source 1..80: mol_type = other DNA
gatattgttgactttatcttatcttccatctctttaaagaaaagtgtctcttcttccccttcgaaataagtgtcatctac

SEQ ID NO: 100642 - DNA, 80 bp, synthetic construct
  source 1..80: mol_type = other DNA
actggcttccttgttctcatttggtcctttctctgtattgagaaccaacctggacactaacttagacaccttgtactcat

SEQ ID NO: 100643 - DNA, 80 bp, synthetic construct
  source 1..80: mol_type = other DNA
aagggtacaggttcccactcaggccccaccctgttgaagtcaaaagatttgacatcagccaaaatatggttggacttcag

SEQ ID NO: 100644 - DNA, 80 bp, synthetic construct
  source 1..80: mol_type = other DNA
aagaggaaaccataagactaaagatctccaagtttacacctggaactacagtttgacagtctacatctttactgacaaac

SEQ ID NO: 100645 - DNA, 80 bp, synthetic construct
  source 1..80: mol_type = other DNA
tttttcatctgctcaaagaaagcgtcttcctcttggggcgaaatcacctctttggggtttacaaagaacccaaattgagt

SEQ ID NO: 100646 - DNA, 80 bp, synthetic construct
  source 1..80: mol_type = other DNA
acagtaaaattagcgtcctcaaagcagtttcgatgtcatgaatctgctcaaccagatcaggacaggatctgatccaagag

SEQ ID NO: 100647 - DNA, 80 bp, synthetic construct
  source 1..80: mol_type = other DNA
cagttccaattcaacagaatcacccagcacaattgggtctgtcatataatcctcgaattcttcggaacgaatatcaaagg

SEQ ID NO: 100648 - DNA, 80 bp, synthetic construct
  source 1..80: mol_type = other DNA
cataaaaagaaattagatggcctgtaggcccctgcagagaatagcatctcgagcactcacctgttttttggtataataga

SEQ ID NO: 100649 - DNA, 80 bp, synthetic construct
  source 1..80: mol_type = other DNA
cattgcccactttagccacttgaaagaagacttctttacattccaccacttggtacctaattgaacctaattgattttgt

SEQ ID NO: 100650 - DNA, 80 bp, synthetic construct
  source 1..80: mol_type = other DNA
atctgttaactgttcttcgtctgtctggaaagtgtaatcttcaaaccttgtgtagtgcattactggatgaaccccttgtc

SEQ ID NO: 100651 - DNA, 80 bp, synthetic construct
  source 1..80: mol_type = other DNA
ttttgaattcctcaaattcataaagtgtgatttgacattcagtcactaagtcttcagacaacccatagtgtccaaaagca

SEQ ID NO: 100652 - DNA, 80 bp, synthetic construct
  source 1..80: mol_type = other DNA
agacctactgcagagaggcatcttttaatcttcaaaatgaagtcttgtatagattttttaaacagttcttctaaaggtgt

SEQ ID NO: 100653 - DNA, 80 bp, synthetic construct
  source 1..80: mol_type = other DNA
gctcttatttgatttagatcttttcctgtttctcaagacccttaaaaactcctcttttgtactgtaataacttaccagtc

SEQ ID NO: 100654 - DNA, 80 bp, synthetic construct
  source 1..80: mol_type = other DNA
tatcatttacgctactatagcaaactcctacccagtgtttctcatttaatagagcctcagagtgaccttgtttgattaag

SEQ ID NO: 100655 - DNA, 80 bp, synthetic construct
  source 1..80: mol_type = other DNA
aaagagagacagaggacatccaaattaagtaattgcttccttctagtgtttagaagtttcaaactctttactttgttcaa

SEQ ID NO: 100656 - DNA, 80 bp, synthetic construct
  source 1..80: mol_type = other DNA
tgctatctttggccttgaagatagggtctgttctcaataaactaaggcattcatccaacagtttcctatccacctcgccc

SEQ ID NO: 100657 - DNA, 80 bp, synthetic construct
  source 1..80: mol_type = other DNA
tcaacgggcaagactcaattgcttctctacacagatcatgaatgttatcaacttccatttcgtcttcataaagatgagag

SEQ ID NO: 100658 - DNA, 80 bp, synthetic construct
  source 1..80: mol_type = other DNA
aactcttcaatcagtgtttcagggttcaccattctaaagtttcttgccagtcttccttcctccaaatcccttctaaacct

SEQ ID NO: 100659 - DNA, 80 bp, synthetic construct
  source 1..80: mol_type = other DNA
actaaagagggagttgatacccataaccacttcatcacggctcatggtagggttcacaccgtcgtgacacatcttcatga

SEQ ID NO: 100660 - DNA, 80 bp, synthetic construct
  source 1..80: mol_type = other DNA
ttaaacatataggtgcatgacaggaattcagcaattcctggatcaagtagtctacatttcactgtgaacatcaatgagaa

SEQ ID NO: 100661 - DNA, 80 bp, synthetic construct
  source 1..80: mol_type = other DNA
gaatggactctacagacttgtcttcagaattgtgtacgcagccacttttgtctgcactgtccatttcgatgcaccttgaa

SEQ ID NO: 100662 - DNA, 80 bp, synthetic construct
  source 1..80: mol_type = other DNA
ccctctgtcccaagaaattcaacttttgtcttgatagtcgctcatcttgctcaatgtaattcagacaaagatttctcaac

SEQ ID NO: 100663 - DNA, 80 bp, synthetic construct
  source 1..80: mol_type = other DNA
aacaggccttttgtgtgattaagaatatactcccacatatccctcaatgtcccaaatgtccttgggtttaccatgccttg

SEQ ID NO: 100664 - DNA, 80 bp, synthetic construct
  source 1..80: mol_type = other DNA
tctcaaacataatggtatcccttgacctgctgtaacagagcctacaatctctaaaagcaaaccagtctggcacgttcttt

SEQ ID NO: 100665 - DNA, 80 bp, synthetic construct
  source 1..80: mol_type = other DNA
ctttattagcatggctgcattgcagactgtgtcccccagacggtaagaaaaccatccatacccgaactgtagatcggttt

SEQ ID NO: 100666 - DNA, 80 bp, synthetic construct
  source 1..80: mol_type = other DNA
ataataacaattggtgtagtgaatactactctgtcaacaatagcccttcttattggaattgggaatctgattctcaacac

SEQ ID NO: 100667 - DNA, 80 bp, synthetic construct
  source 1..80: mol_type = other DNA
aggacaacccatctaatgacttgtgctacccagggagttttgacgattatgaagaactgaaacatttgatgagcagcaca

SEQ ID NO: 100668 - DNA, 80 bp, synthetic construct
  source 1..80: mol_type = other DNA
aaccacttggagaggattcagatatttcctagaaattcttggcccaatcacgattcctcctcaggagttagctcagcatg

SEQ ID NO: 100669 - DNA, 80 bp, synthetic construct
  source 1..80: mol_type = other DNA
agctcccgaatatgcctacaaggttactaaaaaagggaaatcagcagtcatgaaaagtgagttggattatggtaattgta

SEQ ID NO: 100670 - DNA, 80 bp, synthetic construct
  source 1..80: mol_type = other DNA
ctggactaagaaatgtaccccaaaagagaaaaagaggattatttggagcaatagccggattcattgaagggggatggcaa

SEQ ID NO: 100671 - DNA, 80 bp, synthetic construct
  source 1..80: mol_type = other DNA
aggttgttggtggttgggcaattgccaattccaagtcacaaatcaatagacaagttatagttgataacaacaattggtct

SEQ ID NO: 100672 - DNA, 80 bp, synthetic construct
  source 1..80: mol_type = other DNA
cagttgtggtagagaaaagtattgaataccgaaattggtcaaaacctcaatgtcacatctcaggatttgctcccttttcc

SEQ ID NO: 100673 - DNA, 80 bp, synthetic construct
  source 1..80: mol_type = other DNA
cctatcgaccactatgacactacacttcaagcaacatgagtgcagcgtctctgctaataaccaagtggtaacatgtgaac

SEQ ID NO: 100674 - DNA, 80 bp, synthetic construct
  source 1..80: mol_type = other DNA
gctcttgttatcctcgataccccaatgtcagatgtgtttgtagagacaattggaaaggctctaatagaccggtgatagat

SEQ ID NO: 100675 - DNA, 80 bp, synthetic construct
  source 1..80: mol_type = other DNA
ttcgtggtctcaaaacatccttagaacccaggagtcggagtgtgtttgcattaataaggtttgtacagttgtaatgactg

SEQ ID NO: 100676 - DNA, 80 bp, synthetic construct
  source 1..80: mol_type = other DNA
cagggagtgctgacacaagaatactattcattgaagaggggaaagtcattcacatcagcccattggcaggaagtgcccag

SEQ ID NO: 100677 - DNA, 80 bp, synthetic construct
  source 1..80: mol_type = other DNA
ggacggtatttaccgaacactaaaaagaaactacaccaacaccaatgcagaagatcttttaataacatggggagttcatc

SEQ ID NO: 100678 - DNA, 80 bp, synthetic construct
  source 1..80: mol_type = other DNA
accctaatgatgcggaagtacaggtaaaactctaccagaacccggccacttatgtgtcagtgggaacatcaacattaaac

SEQ ID NO: 100679 - DNA, 80 bp, synthetic construct
  source 1..80: mol_type = other DNA
atggaaaggatagtaattgcctttgcaataatcagcattgttacaggtgatcaaatctgcattggttatcaagcaaacaa

SEQ ID NO: 100680 - DNA, 80 bp, synthetic construct
  source 1..80: mol_type = other DNA
atgaacacccaattcgacgccatcggaaaagaattcaacaacctagaaaggagaatagaaaatttgaacaagaaaatgga

SEQ ID NO: 100681 - DNA, 80 bp, synthetic construct
  source 1..80: mol_type = other DNA
gtaaaggacattcttgaaaagacgcataatggaaaattgtgcagattaagcgggattcctccattggaattgggggattg

SEQ ID NO: 100682 - DNA, 80 bp, synthetic construct
  source 1..80: mol_type = other DNA
cgcaccggggatcctaggcttattggattgcgcttccattggggcttgttgcacgtagactggtctcagtatcagtgcca

SEQ ID NO: 100683 - DNA, 80 bp, synthetic construct
  source 1..80: mol_type = other DNA
gctgctcctggggaaggtcttggtgaactggacacaggcccgttgccagacaagtcaatcgttgtgttttcccatgctct

SEQ ID NO: 100684 - DNA, 80 bp, synthetic construct
  source 1..80: mol_type = other DNA
tgcaatgcagaatttgcatttgactatgagtcaatttgtaattaaaaacacccttgtttctacgcgtgatcagtagaaac

SEQ ID NO: 100685 - DNA, 80 bp, synthetic construct
  source 1..80: mol_type = other DNA
atcttatttcttcggagacaatgctgaggagtatgacaattaaagaaaaatacccttgtttctacgcgtgatcagtagaa

SEQ ID NO: 100686 - DNA, 80 bp, synthetic construct
  source 1..80: mol_type = other DNA
gtgaatcgataatcgtggaatccggtgatccaaatgcactcctaaaacaccggtttgaaataattgaagggagagatcgt

SEQ ID NO: 100687 - DNA, 80 bp, synthetic construct
  source 1..80: mol_type = other DNA
gttttggttagaacgacactcaaatgacgttgctgatgcaaataaaatttataagcgtagactagatttatttaccatag

SEQ ID NO: 100688 - DNA, 80 bp, synthetic construct
  source 1..80: mol_type = other DNA
ttcctccagtaaacgtagatagaccaattccactgggtcgtagagatgttcctggacgaagaacaagaattatatttata

SEQ ID NO: 100689 - DNA, 80 bp, synthetic construct
  source 1..80: mol_type = other DNA
tactacgctcgagagatggatgagtgacttgacagatatccaagaggagataacccgccatgagcaacaacttgttgttg

SEQ ID NO: 100690 - DNA, 80 bp, synthetic construct
  source 1..80: mol_type = other DNA
agcccctaaagatatgattgtagtaagcttatatcgctaattataggaatagtgaattactaacatgtgtattattcata

SEQ ID NO: 100691 - DNA, 80 bp, synthetic construct
  source 1..80: mol_type = other DNA
tattcagggattatattgattaattgtttactagttgaattatgcgggtttgagaattataattatcagggtttttaatt

SEQ ID NO: 100692 - DNA, 80 bp, synthetic construct
  source 1..80: mol_type = other DNA
tcaccgtcccaatcttaactgttgaggaaatgtccaattcaagattccccattcctttggaaaagttgtacacgggtcct

SEQ ID NO: 100693 - DNA, 80 bp, synthetic construct
  source 1..80: mol_type = other DNA
tgtaactttaggggggatgtcacccatattgtgggcagccatgattatacaatgaatctggcttcccaaaattggagcaa

SEQ ID NO: 100694 - DNA, 80 bp, synthetic construct
  source 1..80: mol_type = other DNA
tgtgggcagccatgattatacaatgaatctggcttcccaaaattggagcaattatgacccaacagaagaaatcccagccc

SEQ ID NO: 100695 - DNA, 80 bp, synthetic construct
  source 1..80: mol_type = other DNA
ttatgacccaacagaagaaatcccagcccccctgggaacaccagattttgtggggaagatccaaggcctgctcacccaga

SEQ ID NO: 100696 - DNA, 80 bp, synthetic construct
  source 1..80: mol_type = other DNA
agtgttcaattcaccactgacacaaacaatgatttccaaactggccaaaacacgaaattcaccccagttggcgtcatcca

SEQ ID NO: 100697 - DNA, 80 bp, synthetic construct
  source 1..80: mol_type = other DNA
ggacggtgatcaccatcagaatgagccccaacaatgggtactcccaaattactcaggtagaactggtcataatgtgcacc

SEQ ID NO: 100698 - DNA, 80 bp, synthetic construct
  source 1..80: mol_type = other DNA
tatcacagtggctcacaccggcccgtatgacttggttatcccccccaatggttattttagatttgattcctgggtcaacc

SEQ ID NO: 100699 - DNA, 80 bp, synthetic construct
  source 1..80: mol_type = other DNA
ggcgtgcattacaccaccaccaccaccactaatcacataattaaaaatgttaaccatctacacatgaccctctatgagca

SEQ ID NO: 100700 - DNA, 80 bp, synthetic construct
  source 1..80: mol_type = other DNA
gggcgccggcgcaacgaacttctctctgttaaagcaagcaggagacgtggaagaaaaccccggtcctgctagcaaaccat

SEQ ID NO: 100701 - DNA, 80 bp, synthetic construct
  source 1..80: mol_type = other DNA
cagaggagatctctcgacgcaggactcggcttgctgaagcgcgcacagcaagaggcgaggggcggcgactattatttaat

SEQ ID NO: 100702 - DNA, 80 bp, synthetic construct
  source 1..80: mol_type = other DNA
cagaggagatctctcgacgcaggactcggcttgctgaagcgcgcacagcaagaggcgaggggcggttagaccaatgggaa

SEQ ID NO: 100703 - DNA, 80 bp, synthetic construct
  source 1..80: mol_type = other DNA
cagaggagatctctcgacgcaggactcggcttgctgaagcgcgcacggcaagaggcgaggggacgggggagatctataaa

SEQ ID NO: 100704 - DNA, 80 bp, synthetic construct
  source 1..80: mol_type = other DNA
cagaggagctctctcgacgcaggactcggcttgctgagcgcgcacggcaagaggcgaggggcggcggctggtggggacat

SEQ ID NO: 100705 - DNA, 80 bp, synthetic construct
  source 1..80: mol_type = other DNA
ataagccctatttcagccaaactagaaatataagcctcaaaggtatgtcaggggcattacaagaagatggtcatttagct

SEQ ID NO: 100706 - DNA, 80 bp, synthetic construct
  source 1..80: mol_type = other DNA
ttacatggcaatttaacagaggaggcaaagatacaccttgagacagttgaatgggctcgaaaatttagagaaaaggaaag

SEQ ID NO: 100707 - DNA, 80 bp, synthetic construct
  source 1..80: mol_type = other DNA
agagtgagattagagattattgaagactattatgatgccatagctaaagttgttcctgaagaatacatctcatatggggg

SEQ ID NO: 100708 - DNA, 80 bp, synthetic construct
  source 1..80: mol_type = other DNA
atggttcggtgtttccttgttgttaagaaggttacatcaggtgataatatgaaaattgaaaagaactttgagactcttgt

SEQ ID NO: 100709 - DNA, 80 bp, synthetic construct
  source 1..80: mol_type = other DNA
aaaatccctttccatctacaaataagcaaacaagtaatccatgcagagatccaacatttaggtcattggatggatggtac

SEQ ID NO: 100710 - DNA, 80 bp, synthetic construct
  source 1..80: mol_type = other DNA
agaaagaaatgtgcatttgcaaccacacctgtctgtcagtttgatgggaatacaatttctggctataaaagaatgattgc

SEQ ID NO: 100711 - DNA, 80 bp, synthetic construct
  source 1..80: mol_type = other DNA
agggatcatatcaatgtgattgtagggcgtgatttatctttccaagatctgagtgaaacaccatgtcaagtagatttaac

SEQ ID NO: 100712 - DNA, 80 bp, synthetic construct
  source 1..80: mol_type = other DNA
ttaaatgggaattggatggttgtggcagtcttgatagcattgtttatattgtctatctttttattcacactatgctgtcc

SEQ ID NO: 100713 - DNA, 80 bp, synthetic construct
  source 1..80: mol_type = other DNA
agctatacatatagacgacaactgcaaaacccagcaaacgaacaggaaaaaatccctttccatttacaaataagcaaaca

SEQ ID NO: 100714 - DNA, 80 bp, synthetic construct
  source 1..80: mol_type = other DNA
gccagacagcagactggtatacaataggggtatatgtgattggatttacactccctattattctgaaggccctatatatg

SEQ ID NO: 100715 - DNA, 80 bp, synthetic construct
  source 1..80: mol_type = other DNA
gccagacagcagactggtatacaataggggtgtatgtcattgggttcacactccctattatcctgaaagctttgtatatg

SEQ ID NO: 100716 - DNA, 80 bp, synthetic construct
  source 1..80: mol_type = other DNA
gcgatgaaccagaaccaagatctcttgcaagttggatccaaagtgagttcaacaaggcttgcgaattaacagactcaagc

SEQ ID NO: 100717 - DNA, 80 bp, synthetic construct
  source 1..80: mol_type = other DNA
catacaatggcatggactgtggacagcatctgtaacaccacgggagtcgagaaacccgtctcccaagggagtagaagaag

SEQ ID NO: 100718 - DNA, 80 bp, synthetic construct
  source 1..80: mol_type = other DNA
aatacggagaggacccgaagatagagacaaataagtttgcggcgatatgcactcatctggaggtctgttttatgtactcc

SEQ ID NO: 100719 - DNA, 80 bp, synthetic construct
  source 1..80: mol_type = other DNA
ttgatggaattacaaataaggtcaattccataatagacaaaatgaatacacaatttgaggctgtggatcacgagttctca

SEQ ID NO: 100720 - DNA, 80 bp, synthetic construct
  source 1..80: mol_type = other DNA
tagaaagacctgcagctcaaaatggaatctgttatccaggagtcttaagtgaagtagaagaactgaaggcactcattgag

SEQ ID NO: 100721 - DNA, 80 bp, synthetic construct
  source 1..80: mol_type = other DNA
agggctcatggccaaaccacaccgtaaccggggtatcatcatcatgctcccataatgggaacagcagcttctacagaaat

SEQ ID NO: 100722 - DNA, 80 bp, synthetic construct
  source 1..80: mol_type = other DNA
tccagagggggtgggaagcccttaaatatttgggaagtcttatacagtattggggtccagaactacaaaggagggctatc

SEQ ID NO: 100723 - DNA, 80 bp, synthetic construct
  source 1..80: mol_type = other DNA
taaccactcctcaggaggggacttagaggtcacacagcatatctttaattgtagaggagaatttttctattgcaatacaa

SEQ ID NO: 100724 - DNA, 80 bp, synthetic construct
  source 1..80: mol_type = other DNA
caaaactgtttaacggtcaatataacagtacaggaaatacttcaaattcaacaacaaacatcataatcccatgcaggata

SEQ ID NO: 100725 - DNA, 80 bp, synthetic construct
  source 1..80: mol_type = other DNA
atgacctagatgcagtaagatagagaaatcaataattacacatataaaatatacaagttgcttgaaaaatcacaaaacca

SEQ ID NO: 100726 - DNA, 80 bp, synthetic construct
  source 1..80: mol_type = other DNA
gcagaaaaaaaataaaaaaaagttactagcattagacagttagaacagtctataaaattagttcaacatatcaaattagc

SEQ ID NO: 100727 - DNA, 80 bp, synthetic construct
  source 1..80: mol_type = other DNA
tagaaaaataagacaaagttttgaagcagctttacagtaaaataagaggcaagtggtcaaaatggccttctgtgttagac

SEQ ID NO: 100728 - DNA, 80 bp, synthetic construct
  source 1..80: mol_type = other DNA
agaataagaagaactagaataaagccagaagatcaagacttaaataaagatagacccacaaacagcaatacagacaataa

SEQ ID NO: 100729 - DNA, 80 bp, synthetic construct
  source 1..80: mol_type = other DNA
ggtaactagagatccctcagtaaatctctagcagtggcgcccgaacagggacctgaaaacgactctggtaactagagatc

SEQ ID NO: 100730 - DNA, 80 bp, synthetic construct
  source 1..80: mol_type = other DNA
ccgaacagggactctggtaactagagatccctcataaatctctagcagtggcgcccgaacagggacctgaaagcgactct

SEQ ID NO: 100731 - DNA, 80 bp, synthetic construct
  source 1..80: mol_type = other DNA
cgcccgaacagcaatccaaagggcatggaaaaggccacagcagacagtgaggtagctggtgcccagctaagtcatgctgg

SEQ ID NO: 100732 - DNA, 80 bp, synthetic construct
  source 1..80: mol_type = other DNA
attattcagtccatcagcaagtatccacagagcgtccacaaggtaaccggtatcccatgaggcactcagaatgcttgttt

SEQ ID NO: 100733 - DNA, 80 bp, synthetic construct
  source 1..80: mol_type = other DNA
aagaatagacagtccctgagctctagaggcacttataagaaattctgatctccatcttcctcaggcttgcctggtccttc

SEQ ID NO: 100734 - DNA, 80 bp, synthetic construct
  source 1..80: mol_type = other DNA
acacctcacaatgtgctaccatgtatacgccctcatacaatactcacaacaaacctgtaaagttgtcagggagaatctaa

SEQ ID NO: 100735 - DNA, 80 bp, synthetic construct
  source 1..80: mol_type = other DNA
ttatccccatttgttagccactaaggcacagagagcttgagcaacttgcccaagctcacacagatagtaaatgacaggcc

SEQ ID NO: 100736 - DNA, 80 bp, synthetic construct
  source 1..80: mol_type = other DNA
gggggcttggacctggcctcccatcgctaaggccaatgctgttctcagaataccacaactgcctcaagaacagctgtgat

SEQ ID NO: 100737 - DNA, 80 bp, synthetic construct
  source 1..80: mol_type = other DNA
aacagagggctcagagcaaaggaataattagcagagagccatcattagaactgaagtcatggggatgagaaggcaccgcc

SEQ ID NO: 100738 - DNA, 80 bp, synthetic construct
  source 1..80: mol_type = other DNA
taccacttctgggccttttggccaagatcaagtgtaggaagcatgagctacggcagggggtgggctcccctcccctgggg

SEQ ID NO: 100739 - DNA, 80 bp, synthetic construct
  source 1..80: mol_type = other DNA
tggtgggggctgggggtccaggcagtgagggaaatgggatgcaaacacctgggctcacctctcctccctctccacagatg

SEQ ID NO: 100740 - DNA, 80 bp, synthetic construct
  source 1..80: mol_type = other DNA
gtgaaggcaatccaggtcctgagaatccacctgctggagctggagaaagtcaatgaactctgcaaggacttttgtaaccg

SEQ ID NO: 100741 - DNA, 80 bp, synthetic construct
  source 1..80: mol_type = other DNA
gcaaggacttttgtaaccgttacatcacctgcctcaaaaccaagatgcacagcgacaacctgctcaggaatgatctaggg

SEQ ID NO: 100742 - DNA, 80 bp, synthetic construct
  source 1..80: mol_type = other DNA
ttacatcacctgcctcaaaaccaagatgcacagcgacaacctgctcaggaatgatctaggggggccctactcccccaacc

SEQ ID NO: 100743 - DNA, 80 bp, synthetic construct
  source 1..80: mol_type = other DNA
agccctccatcaaccttcactcacaggtaacacccagagctgggtcccatctcttaagccaggctcctaagcccagctct

SEQ ID NO: 100744 - DNA, 80 bp, synthetic construct
  source 1..80: mol_type = other DNA
ggagccacgcgtggaggaaggtcccctggtgaccttcactgggttagacccactgggttcctttgccatgagggccctcc

SEQ ID NO: 100745 - DNA, 80 bp, synthetic construct
  source 1..80: mol_type = other DNA
tctgatgcactcttcttcatatccattaggccatcccatcccttttttacacacagtctgccctgccagggcattagtat

SEQ ID NO: 100746 - DNA, 80 bp, synthetic construct
  source 1..80: mol_type = other DNA
tcccttgaaaatgaccagatcggagagggacaatgtccaaaatcattcctggcttcctggcccaaggtatcccccagaat

SEQ ID NO: 100747 - DNA, 80 bp, synthetic construct
  source 1..80: mol_type = other DNA
gagcaccagagctaaggagaaggaaagctctcctggaggatgagctgggacaggcttcttaagaggctgcggcttgctga

SEQ ID NO: 100748 - DNA, 80 bp, synthetic construct
  source 1..80: mol_type = other DNA
gccatctgcatttctgggaaagggcatttggggaaagcagtcattccctgaatcctgcccacctaatgggtgaagccagc

SEQ ID NO: 100749 - DNA, 80 bp, synthetic construct
  source 1..80: mol_type = other DNA
ttcccatgggcctgctgctccctaatcattctccaggcactcacgctactctggcatctctgtccccctaaggttcaggg

SEQ ID NO: 100750 - DNA, 80 bp, synthetic construct
  source 1..80: mol_type = other DNA
ccatggtcaaggtcacctcaaaccaccctgttcccaggttcccctgccacctccttcctgagacctgggaaatgcagaaa

SEQ ID NO: 100751 - DNA, 80 bp, synthetic construct
  source 1..80: mol_type = other DNA
tgctgactacacgctttgggcaagaatggggtttcccctccagggcaggatattttccccaaacctacaaaccgagaaag

SEQ ID NO: 100752 - DNA, 80 bp, synthetic construct
  source 1..80: mol_type = other DNA
ctgcctggcaataccttcccgcccaactcacagacatctgcataagccacaggcttgagactttgttccccttccactga

SEQ ID NO: 100753 - DNA, 80 bp, synthetic construct
  source 1..80: mol_type = other DNA
gctcctgagtcctggaagacacctggagggtccccaaggagtcctctgtagcctcttctcattaaacaatcaggcatggg

SEQ ID NO: 100754 - DNA, 80 bp, synthetic construct
  source 1..80: mol_type = other DNA
gatgcaggtaaactttctaggagtgagtgccgagaggtgctggaagtagtgccaaagaaaggctgtgccgtttttgtccc

SEQ ID NO: 100755 - DNA, 80 bp, synthetic construct
  source 1..80: mol_type = other DNA
tagacccctaaggaaccacccatgtactctatctccccagattggtggagtcaggggaggggacaggctgacttctagaa

SEQ ID NO: 100756 - DNA, 80 bp, synthetic construct
  source 1..80: mol_type = other DNA
ggccagccttgctttgcacattttgacaacaagcacaaaagatacactcggtatcacatccaacccaccccagtgggctc

SEQ ID NO: 100757 - DNA, 80 bp, synthetic construct
  source 1..80: mol_type = other DNA
tttgtgagactccgtagtgagtactgcccaggacatagggcaagaagtttacttcctcttcctctcgcttgaaatcacca

SEQ ID NO: 100758 - DNA, 80 bp, synthetic construct
  source 1..80: mol_type = other DNA
agtcactttattacagatctaaaaacacccgcccgggcttctgcctgctaatattctcttgaaatagactcattccttca

SEQ ID NO: 100759 - DNA, 80 bp, synthetic construct
  source 1..80: mol_type = other DNA
gagtcttattgtactttcccttatgatcaaaattagcaagaaacttgcataaaagaggacaataattgctcaacgagcat

SEQ ID NO: 100760 - DNA, 80 bp, synthetic construct
  source 1..80: mol_type = other DNA
ctcgtttgtaatttattagtttctattattgtgggttaccatggtgacgctgcgcagtcccggtgatgggagagatgcaa

SEQ ID NO: 100761 - DNA, 80 bp, synthetic construct
  source 1..80: mol_type = other DNA
gataggagctgaggaggctgtgaggcctcgccaaatggagatgcacatttttatcagtaattttcatgaaaataataagt

SEQ ID NO: 100762 - DNA, 80 bp, synthetic construct
  source 1..80: mol_type = other DNA
gaggagttaatgagatggaaagccatcctgtggctattgtgaattttttttaagtgttgatctaattagaatgcatcggt

SEQ ID NO: 100763 - DNA, 80 bp, synthetic construct
  source 1..80: mol_type = other DNA
caggaaaagtaatgaggatttagtgcctcacagagatgtgaggatcatatcagaaaattagcacaagtctttggaaataa

SEQ ID NO: 100764 - DNA, 80 bp, synthetic construct
  source 1..80: mol_type = other DNA
tcaggtccttggagaggcactggatttcccctcctgggccctccaactccacctcgagctctggagctgggggtgcacca

SEQ ID NO: 100765 - DNA, 80 bp, synthetic construct
  source 1..80: mol_type = other DNA
gggtagtgggggaaggaaggaggggcagagggcttagcagccacctcagccccctcagggttggaggtctgagactgaca

SEQ ID NO: 100766 - DNA, 80 bp, synthetic construct
  source 1..80: mol_type = other DNA
agttggtctgcagaaaccagtcggtcactggagaagtggggtttgcagaaaaggataacgcggactctggatggttaagt

SEQ ID NO: 100767 - DNA, 80 bp, synthetic construct
  source 1..80: mol_type = other DNA
tctcagagatgctgccacctgcaaaaatcagtccccctggagaatcccggcactcagccttctgagctttgaggaaagac

SEQ ID NO: 100768 - DNA, 80 bp, synthetic construct
  source 1..80: mol_type = other DNA
agaagaattttgattcctatcactggaagcatcagatctctgcctggaagtgaggctggccctggggtacccacggcaga

SEQ ID NO: 100769 - DNA, 80 bp, synthetic construct
  source 1..80: mol_type = other DNA
aaggccattgatcagctgggaaagaggaatcagacaattgcgtggtgggtgtgggggagggggtgatgcaagcgaggcac

SEQ ID NO: 100770 - DNA, 80 bp, synthetic construct
  source 1..80: mol_type = other DNA
tgagaaagagaaaagacactagtgaggtattcctacttggtattactcaaacttgtccctgcattttctctgactgccac

SEQ ID NO: 100771 - DNA, 80 bp, synthetic construct
  source 1..80: mol_type = other DNA
cacctgctttgttctggcttcgggggtaaatacggtgattacacataggctatgacaggagcttcctaacctgctctcct

SEQ ID NO: 100772 - DNA, 80 bp, synthetic construct
  source 1..80: mol_type = other DNA
ggccatccctcagcccacctgcacacccatgcatctcttaagcttctgctgctggattcatctttctaactttgttcatg

SEQ ID NO: 100773 - DNA, 80 bp, synthetic construct
  source 1..80: mol_type = other DNA
tcattcgcctgctcagaaaccctgcttgccatgcccctgggggtggaagggagggctttcacatctgcccacctgacatt

SEQ ID NO: 100774 - DNA, 80 bp, synthetic construct
  source 1..80: mol_type = other DNA
caaggccctcctaggtctggcttcagccttcctgggtgggccaatctgactgttcaaggtgctgtaaccatcactccatg

SEQ ID NO: 100775 - DNA, 80 bp, synthetic construct
  source 1..80: mol_type = other DNA
cctgtctgttcgggcgccactgctagagatttactgagggatctctagttaccagagtcgttttcaggtccctgttcggg

SEQ ID NO: 100776 - DNA, 80 bp, synthetic construct
  source 1..80: mol_type = other DNA
cgccactgctagagatttactgagggatctctagttaccagagtcctttctctttcgctttcaagtccctgttcgggcgc

SEQ ID NO: 100777 - DNA, 80 bp, synthetic construct
  source 1..80: mol_type = other DNA
aagggactacagaggaggtaggaagtccttaaatatctaggaagtcttgtgcagtattaaggtctagagataaaaaggag

SEQ ID NO: 100778 - DNA, 80 bp, synthetic construct
  source 1..80: mol_type = other DNA
aagggactacagagggggtgaaaagtccttaaatatctagaaagtcttgtgcagtattggggtctagaaataaaaaaaag

SEQ ID NO: 100779 - DNA, 80 bp, synthetic construct
  source 1..80: mol_type = other DNA
tgctattaggctgcttaatactgtagcagtagcagtagctgaagaaacagataaaattataaaagtaatacaaaaaattg

SEQ ID NO: 100780 - DNA, 80 bp, synthetic construct
  source 1..80: mol_type = other DNA
aaaggactacagaaaaggtaagaagtccttaaatatctaagaagtcttgtgcagtattaaagtctaaagataaaaaagag

SEQ ID NO: 100781 - DNA, 80 bp, synthetic construct
  source 1..80: mol_type = other DNA
atagactctggtaactagagatccctcacagtagggactctggtaactagagatccctcataaatctctagcagtggcgc

SEQ ID NO: 100782 - DNA, 80 bp, synthetic construct
  source 1..80: mol_type = other DNA
ccgaacagagattgactctggtaactagagatccctcataaatctctagcagtggcccccgaacagagattgactctggt

SEQ ID NO: 100783 - DNA, 80 bp, synthetic construct
  source 1..80: mol_type = other DNA
gcgcccgaacagggacttgaaagcgaaagtaaggccagagaagatctctcgacgcaggactcgaggagagagatgggtgc

SEQ ID NO: 100784 - DNA, 80 bp, synthetic construct
  source 1..80: mol_type = other DNA
agaggactacagaaaaagtaagaaacccttaaatatctaggaagccttgtgcagtattaaggtctagagctaaaaaggag

SEQ ID NO: 100785 - DNA, 80 bp, synthetic construct
  source 1..80: mol_type = other DNA
aaagaaaatgggacagagacattcagacctcaaggagaaaatataaggaataactgaaaaagtaaattatataaatataa

SEQ ID NO: 100786 - DNA, 80 bp, synthetic construct
  source 1..80: mol_type = other DNA
gaaaaggtaggaaacccttaaatatctaggaagccttgtgcagtattaaggtctagagctaaaaaagagtgctgttagtt

SEQ ID NO: 100787 - DNA, 80 bp, synthetic construct
  source 1..80: mol_type = other DNA
agactacagagaaggtaagaagcaattaaatatctaagaagtctcatacagtattaaagtttagagctaaaaaagagtgc

SEQ ID NO: 100788 - DNA, 80 bp, synthetic construct
  source 1..80: mol_type = other DNA
cattagtttgcttgatactctagcaataacagtagctgaaggaacagataaaattataaaagtaatacaaaaaatttgta

SEQ ID NO: 100789 - DNA, 80 bp, synthetic construct
  source 1..80: mol_type = other DNA
aagctatcctcaacatacatacaagacaaggctaagaagcagctttgcaataaaataaggagcaagtggtcaaaaagcag

SEQ ID NO: 100790 - DNA, 80 bp, synthetic construct
  source 1..80: mol_type = other DNA
atggagaaaatagtacttcttctttcagtggttagccttgttaaaagtgatcagatttgcattggttaccatgcaaacaa

SEQ ID NO: 100791 - DNA, 80 bp, synthetic construct
  source 1..80: mol_type = other DNA
ggcccaatcatacatcatcaggggtgagcgcagcatgtccataccagggaatgccctccttttttagaaatgtggtatgg

SEQ ID NO: 100792 - DNA, 80 bp, synthetic construct
  source 1..80: mol_type = other DNA
aaaacccaaccacctatatttccgctgggacctcaacattaaaccagagattggttcccaaaatagctactagatcccaa

SEQ ID NO: 100793 - DNA, 80 bp, synthetic construct
  source 1..80: mol_type = other DNA
atgcagtaggaaaaagaaattgacaattacacaggcataatatttgacttacttgaaatagcacagaaccagcaagaaaa

SEQ ID NO: 100794 - DNA, 80 bp, synthetic construct
  source 1..80: mol_type = other DNA
acagaaccagtagataaagtaaataatagtacagaaaaagtagataatagtacaaaaaattatatattaagaagctgtaa

SEQ ID NO: 100795 - DNA, 80 bp, synthetic construct
  source 1..80: mol_type = other DNA
gctctttctataccagaccaatagtagacagaaaaagaaaagaacatgcactttttaatacacttgatataaaactatta

SEQ ID NO: 100796 - DNA, 80 bp, synthetic construct
  source 1..80: mol_type = other DNA
agtaagagtacagaaccagtagataaagtagataatggtacagaaaaagtaaataatagtacaaaaaattatatattaaa

SEQ ID NO: 100797 - DNA, 80 bp, synthetic construct
  source 1..80: mol_type = other DNA
tgatttagaactattagataatagtacagaaccagtagataaagtagataatggtacagaaaaagtagataatagtacaa

SEQ ID NO: 100798 - DNA, 80 bp, synthetic construct
  source 1..80: mol_type = other DNA
agaaataaaaaactgctctttctataccagaccaatagcagacagaaaaagaaaagaacatgcactttttaatacacttg

SEQ ID NO: 100799 - DNA, 80 bp, synthetic construct
  source 1..80: mol_type = other DNA
ataccagaccaatagtagacagaaaaagaaaagaacatgcactttttaatacacttgatttagaactattagataatagt

SEQ ID NO: 100800 - DNA, 80 bp, synthetic construct
  source 1..80: mol_type = other DNA
gacagaaaaagaaaagaacatgcactttttaatacacttgatatagaactattagataatagtacaaaaagttatatatt

SEQ ID NO: 100801 - DNA, 80 bp, synthetic construct
  source 1..80: mol_type = other DNA
atgataatacatttccagcaggacaaatgcaccaacctctacaacaaccaatctgtgccctgtgaaccgatcataataga

SEQ ID NO: 100802 - DNA, 80 bp, synthetic construct
  source 1..80: mol_type = other DNA
tccagcaggacaaatacaccaacatttacaacaaccaatctgtgccatgtgaaccgatcataatagagaggaacaaaaca

SEQ ID NO: 100803 - DNA, 80 bp, synthetic construct
  source 1..80: mol_type = other DNA
tgcaaaagagctggaatcacataggaaaagctgttcaatcgggtcatgtccttattgtcttaacccatctgaggcaacaa

SEQ ID NO: 100804 - DNA, 80 bp, synthetic construct
  source 1..80: mol_type = other DNA
cacttagggcactggatggatgctacatttaatctaaaaactgcatttcattgctatggttcgtgtgaaaaatatgctta

SEQ ID NO: 100805 - DNA, 80 bp, synthetic construct
  source 1..80: mol_type = other DNA
attacaatgatactgttgaaaatattaattgcatttgcatacctttgttctaagtataatacagattcaaaatttagaat

SEQ ID NO: 100806 - DNA, 80 bp, synthetic construct
  source 1..80: mol_type = other DNA
ttaattgcatttgcatatctttgttctaagtataacacagattcaaaattcaggattttgattgaaaaagtgaaaaagga

SEQ ID NO: 100807 - DNA, 80 bp, synthetic construct
  source 1..80: mol_type = other DNA
actgcccaggagtagggacaggttgtgctgcctgtggggcctatcttgacaaattaaaatcagttgggaaagtcttcaaa

SEQ ID NO: 100808 - DNA, 80 bp, synthetic construct
  source 1..80: mol_type = other DNA
acaatgatactgttgaaaatattaattgcatttgcatatctctgctctaaatataatacagattcaaaattcaggatttt

SEQ ID NO: 100809 - DNA, 80 bp, synthetic construct
  source 1..80: mol_type = other DNA
tggggcctatcttgacaaattaaaatcagttgggaaagtctttaaaattgtgtccctaaggtataccaggaaagtgtgta

SEQ ID NO: 100810 - DNA, 80 bp, synthetic construct
  source 1..80: mol_type = other DNA
cagaggagctctctcgacgcaggactcggcttgctgaagcgcgcacagcaagaggcgaggggcggcgactagcgggggag

SEQ ID NO: 100811 - DNA, 80 bp, synthetic construct
  source 1..80: mol_type = other DNA
cagaggagctctctcgacgcaggactcggcttgctgaagcgcgcaacagattagatagatgggaaaaaattcggctaaga

SEQ ID NO: 100812 - DNA, 80 bp, synthetic construct
  source 1..80: mol_type = other DNA
cagaggagctctctcgacgcaggactcggcttgctgaagcgcgcaacagcaagaggcgagcctgttagaaacatcagaag

SEQ ID NO: 100813 - DNA, 80 bp, synthetic construct
  source 1..80: mol_type = other DNA
gtggtttccaagaagaaataacaaactgctctttcaatgccacctcagacttgaaagataagactcggggacaatatgca

SEQ ID NO: 100814 - DNA, 80 bp, synthetic construct
  source 1..80: mol_type = other DNA
ttgctctttctacatcaatccaatctttaataacaagaggaaaaaagaatatgcactattttataagcttgatgtagtgc

SEQ ID NO: 100815 - DNA, 80 bp, synthetic construct
  source 1..80: mol_type = other DNA
agcgaaagcaggagttaaaatgaatccaattcaaaggataataacaattggttctgtttctctcacctttgcaatagtgt

SEQ ID NO: 100816 - DNA, 80 bp, synthetic construct
  source 1..80: mol_type = other DNA
gaaaaaaacgcaactgaaatagtatatttgactaacaccaccatagaaaaagaggtatgcccaaaatcaggagaatacag

SEQ ID NO: 100817 - DNA, 80 bp, synthetic construct
  source 1..80: mol_type = other DNA
cccaacctccaatcactcaccaacctcctgtcctccaacttgtcctggttatcgctggatgtgtctgcggcgttttatca

SEQ ID NO: 100818 - DNA, 80 bp, synthetic construct
  source 1..80: mol_type = other DNA
aacttacaaggcctttctgtgtaaacaatacctgaacctttaccccgttgctcggcaacggccaggtctgtgccaagtgt

SEQ ID NO: 100819 - DNA, 80 bp, synthetic construct
  source 1..80: mol_type = other DNA
taacaattatatgttactaaaagggtgtaaccgaaaacggttgcaaccgaaaccggtacatataaaagtaaaaggctagc

SEQ ID NO: 100820 - DNA, 80 bp, synthetic construct
  source 1..80: mol_type = other DNA
cattgtttcaggcacaacaaaaacaggcaaatacaaaggcagtgcgcaatttaaaacgaaagttactaggtagtcagaac

SEQ ID NO: 100821 - DNA, 80 bp, synthetic construct
  source 1..80: mol_type = other DNA
agcccgttgcaagacataacaaatcaacacagacagcaaagcgacagtcagcagaatacacaccaagtaaataattcaca

SEQ ID NO: 100822 - DNA, 80 bp, synthetic construct
  source 1..80: mol_type = other DNA
ggccaaaaggagagccgtggacagtgtaccggacagcgggtatggctatactgaagtggaaactcttacgcccgtacagg

SEQ ID NO: 100823 - DNA, 80 bp, synthetic construct
  source 1..80: mol_type = other DNA
tagataaacaatatgaagaaaatggcgggttgcctagtgtgtgtagtcagggggggtcaaatgcctcagtggaagatatc

SEQ ID NO: 100824 - DNA, 80 bp, synthetic construct
  source 1..80: mol_type = other DNA
gatgtagacacacatgtaaacagtgttacacaaatatgtgaattattaaaatgtagtaatgtaaaagcagcattgttaag

SEQ ID NO: 100825 - DNA, 80 bp, synthetic construct
  source 1..80: mol_type = other DNA
taaatttaaaacagtatatggtgtaagttttgcagaactagtacgggtgtttaaaagtgacaaaacatgctgttcagatt

SEQ ID NO: 100826 - DNA, 80 bp, synthetic construct
  source 1..80: mol_type = other DNA
gggtgtgtgcagcattcggtgtggcaggctctgtagcagaaagtattaaatcattaatacaacaatattgtttatattat

SEQ ID NO: 100827 - DNA, 80 bp, synthetic construct
  source 1..80: mol_type = other DNA
ctttgcaaaatttgcaggtacagtgtgtatattgcaaggaaaccttacaatgggctgatgtatataattttgcaatttgt

SEQ ID NO: 100828 - DNA, 80 bp, synthetic construct
  source 1..80: mol_type = other DNA
catatacaatgtttaacatgtaattggggagtaatagtactaatgctagtgcgctttacatgtgcaaaaaacagaacaac

SEQ ID NO: 100829 - DNA, 80 bp, synthetic construct
  source 1..80: mol_type = other DNA
aattaaaaactgcctatgtatgttattaaatgtgccagaaacgcaattactaattgaaccaccaaaattgcgaagtacag

SEQ ID NO: 100830 - DNA, 80 bp, synthetic construct
  source 1..80: mol_type = other DNA
cgatctatgtgtatgtcacaatggctacaatatagatgttctaaaatagaagagggcgggtcgtggaaggaaattgccaa

SEQ ID NO: 100831 - DNA, 80 bp, synthetic construct
  source 1..80: mol_type = other DNA
aagggtaccccaaagcacaattgtatagtaatatatggaccgccaaatactggtaagtcacagtttgcaatgagttttat

SEQ ID NO: 100832 - DNA, 80 bp, synthetic construct
  source 1..80: mol_type = other DNA
agaagatgcaaaagttgcagtattagatgatgctacatatagctgctggttatatattgataaatatttacgtaactttt

SEQ ID NO: 100833 - DNA, 80 bp, synthetic construct
  source 1..80: mol_type = other DNA
gacctaagagtagtatatagagataggagtccgtatgctgcatgcaaaagatgtgtaatattttattcaaaaataacaga

SEQ ID NO: 100834 - DNA, 80 bp, synthetic construct
  source 1..80: mol_type = other DNA
cctgttgtatagacagaaaacatagaagcctactgcaagttacatgccccccattaataattacctcaaatataaatcct

SEQ ID NO: 100835 - DNA, 80 bp, synthetic construct
  source 1..80: mol_type = other DNA
caagaagataactcacttttgtatttacatagtagagtaacagtgataccatttccaaatacatttccatttgacagcaa

SEQ ID NO: 100836 - DNA, 80 bp, synthetic construct
  source 1..80: mol_type = other DNA
tgggaatcctgtatatgcattgactgatgtaaattggaaaagctttttttccaccacctggtccagattagatttggagg

SEQ ID NO: 100837 - DNA, 80 bp, synthetic construct
  source 1..80: mol_type = other DNA
acagtaataaattaactgatcaaattgattattggaaactggtacgatatgaatgtgcaatattttataaagctcgtgaa

SEQ ID NO: 100838 - DNA, 80 bp, synthetic construct
  source 1..80: mol_type = other DNA
ggaaacatgcaatgtataaaccaccaggtggtgccctctactgttgtgtgtaaacaaaaggcatggcaggcaattgaaat

SEQ ID NO: 100839 - DNA, 80 bp, synthetic construct
  source 1..80: mol_type = other DNA
acatatagcattgcagtcgttaataaacacggactataatacagaagcttggacaatgcgagacacaagctatgaaatgt

SEQ ID NO: 100840 - DNA, 80 bp, synthetic construct
  source 1..80: mol_type = other DNA
atatgacagaacctaaacattgttttaaaaaagaaggaacaacggtaacagtggtatttgattgtaataaggaaaataca

SEQ ID NO: 100841 - DNA, 80 bp, synthetic construct
  source 1..80: mol_type = other DNA
atggattatattaggtggaaatatgtgtattataaaactgatatagggtggtgtaaaggtactggagatgttgatgcaaa

SEQ ID NO: 100842 - DNA, 80 bp, synthetic construct
  source 1..80: mol_type = other DNA
agggatatattatacacaaggggcatataagcagtattacgtggactttaaacaagaggcggaaaaatatgggacaggtg

SEQ ID NO: 100843 - DNA, 80 bp, synthetic construct
  source 1..80: mol_type = other DNA
gtatagacgctatacatgttctgtgtatggtgcaacattagaagccttaactaaaaaaagtttatgtaatttgttaataa

SEQ ID NO: 100844 - DNA, 80 bp, synthetic construct
  source 1..80: mol_type = other DNA
tgcaatgggctgtacatgtgtgtggtcaggtaatctgttgtcctgaatttgtatctagtacctgcagcagcaaccaaata

SEQ ID NO: 100845 - DNA, 80 bp, synthetic construct
  source 1..80: mol_type = other DNA
tccactgctaaaactgctgagccagtatcaaacgccaccacccagaccaccgaagcctacgtgcccgtgggcaccaagga

SEQ ID NO: 100846 - DNA, 80 bp, synthetic construct
  source 1..80: mol_type = other DNA
aaccgaggcgccatacccaggaaagcgacgacgactcagtggacctgacaccaccgtcaccacagtcaccactgtcacca

SEQ ID NO: 100847 - DNA, 80 bp, synthetic construct
  source 1..80: mol_type = other DNA
cagctgccacacagcccggacagtcagtggactatacaaacaacaacctacacagtacaagtggaggccatcacccggga

SEQ ID NO: 100848 - DNA, 80 bp, synthetic construct
  source 1..80: mol_type = other DNA
agggacacgagtagtgaccaaactgtgtttatagtacacctaaaaggtgatacaaatagtttaaaatgtttaagatatag

SEQ ID NO: 100849 - DNA, 80 bp, synthetic construct
  source 1..80: mol_type = other DNA
cagtaatgataccaatcaacaaggcattgtaacaattacctttaacagtataacacaacgtaataattttttaacaactg

SEQ ID NO: 100850 - DNA, 80 bp, synthetic construct
  source 1..80: mol_type = other DNA
ttaaaataccacaaagtataacttcaacattgggaataatgtcattgtaatatagtgtatattttaccaacacacaagcc

SEQ ID NO: 100851 - DNA, 80 bp, synthetic construct
  source 1..80: mol_type = other DNA
aatatgtgctgctaacacacctatatacctgtaatcattattccttttatagtttatgtgtttgtgctttgcgtgtgtgt

SEQ ID NO: 100852 - DNA, 80 bp, synthetic construct
  source 1..80: mol_type = other DNA
gtgtgtgttgctgtgttgtttgttgccacttttgctttccatttatgtgtttgcagcctcgctattattagtgttttgtt

SEQ ID NO: 100853 - DNA, 80 bp, synthetic construct
  source 1..80: mol_type = other DNA
tttggtttgtggtatctacatcatatataactacctatattgtgtatatttgcttattttttatacctgcttgtttttta

SEQ ID NO: 100854 - DNA, 80 bp, synthetic construct
  source 1..80: mol_type = other DNA
catttttatactgtaatggtaattgctacttagtccctttaataaacgtgttacaatggtagctgtccgtgcccctcgac

SEQ ID NO: 100855 - DNA, 80 bp, synthetic construct
  source 1..80: mol_type = other DNA
gcaaacgagcatcagctacagacttatacaaaacatgtaaggccgctggtacgtgccctcctgatgttattcctaaaatt

SEQ ID NO: 100856 - DNA, 80 bp, synthetic construct
  source 1..80: mol_type = other DNA
aagaaaaacaaagaattgtggatgaaaagcgacgatttcacgaaatagcagggcagtggaaagggttgtgtacaaattgt

SEQ ID NO: 100857 - DNA, 80 bp, synthetic construct
  source 1..80: mol_type = other DNA
gtgggcgtactggatacattcccctaggagggggtggtagaccctctgttgtggatatcggccctacccgtccgcccatt

SEQ ID NO: 100858 - DNA, 80 bp, synthetic construct
  source 1..80: mol_type = other DNA
attattgaacctgtgggtcctacagaaccttctatagttactttggtggaggaatctagtattatacaatctggagcccc

SEQ ID NO: 100859 - DNA, 80 bp, synthetic construct
  source 1..80: mol_type = other DNA
tatacctacatttagtggtggcaatggctttgaacttaccacatcctctgcaacaacacctgctgtgttggacatcaccc

SEQ ID NO: 100860 - DNA, 80 bp, synthetic construct
  source 1..80: mol_type = other DNA
atattgaaccccctatagatataccacaggccggggaagcatcaggtcatatatttactacaacgtccacagctggcaca

SEQ ID NO: 100861 - DNA, 80 bp, synthetic construct
  source 1..80: mol_type = other DNA
ctggtatacaacgagtgtcagctcctcgtttgtatagtaaggcctatcaacaggtaaaggttacagatcccaattttatt

SEQ ID NO: 100862 - DNA, 80 bp, synthetic construct
  source 1..80: mol_type = other DNA
ggtaatccctccacatttgttacctttgataatcctgcatatgaacctatagatgaaacacttacatatgcttccagtag

SEQ ID NO: 100863 - DNA, 80 bp, synthetic construct
  source 1..80: mol_type = other DNA
tactgtagcacctgaccccgattttttggacattattgcattgcatcgtccggcccttacatctcgcaaaggtactgtac

SEQ ID NO: 100864 - DNA, 80 bp, synthetic construct
  source 1..80: mol_type = other DNA
tggagaccaaggcgccaaacagaaacacaagtgtaaagaacaatgcatggaaacataattaatattgaagatgtaatact

SEQ ID NO: 100865 - DNA, 80 bp, synthetic construct
  source 1..80: mol_type = other DNA
tagtcctatacagtcttttgctgaacacgaagaaattgaattgcagcctttacatacatctacccattcatctgcacctt

SEQ ID NO: 100866 - DNA, 80 bp, synthetic construct
  source 1..80: mol_type = other DNA
tgtttgatatatatgcagaccctgatacagttcctagcatacatacgccgcgcatgtcatattcccctacaacattacca

SEQ ID NO: 100867 - DNA, 80 bp, synthetic construct
  source 1..80: mol_type = other DNA
gttccaagatatgcctccaatgtgttttcctctattaatacttccactaccaatgttactgtgcctttatccacctcatt

SEQ ID NO: 100868 - DNA, 80 bp, synthetic construct
  source 1..80: mol_type = other DNA
tgaactacctgtatatagtgggtcagacatttacacgcccacatcttccccgacatggccatcattgccccccccaccca

SEQ ID NO: 100869 - DNA, 80 bp, synthetic construct
  source 1..80: mol_type = other DNA
ccactaacttacctgcaatagttgtgcatggggataattattatttatggccctatatttatttaatccataaacgccgt

SEQ ID NO: 100870 - DNA, 80 bp, synthetic construct
  source 1..80: mol_type = other DNA
cgggttgtcaacacggatgaatatgtaactcgcaccggcatatattattatgcgggcagctctcgtttattaacattagg

SEQ ID NO: 100871 - DNA, 80 bp, synthetic construct
  source 1..80: mol_type = other DNA
acatccatatttttccatacctaaaactggccaaaaggccgaaattcctaaggtatctgcctatcagtacagggtattta

SEQ ID NO: 100872 - DNA, 80 bp, synthetic construct
  source 1..80: mol_type = other DNA
tccacagttatataatcctgacacagaacgcctggtgtgggcctgtgttggtgttgaagttggtagaggacagccattag

SEQ ID NO: 100873 - DNA, 80 bp, synthetic construct
  source 1..80: mol_type = other DNA
agatctggtgccgcaacccgaaattgacctacgctgctacgaacaattggactatgaacaatttgacagctcagatgagg

SEQ ID NO: 100874 - DNA, 80 bp, synthetic construct
  source 1..80: mol_type = other DNA
atgataccgaaaactctcatttggctactgtaaatgcagacactgacaacagggacaatgtttcagttgataataaacaa

SEQ ID NO: 100875 - DNA, 80 bp, synthetic construct
  source 1..80: mol_type = other DNA
acacagttatgtattataggttgtacaccgcccttgggagagcactggggtattggcactatatgtaaaaatacacagac

SEQ ID NO: 100876 - DNA, 80 bp, synthetic construct
  source 1..80: mol_type = other DNA
acaacgtggggattgcccccccttagaattaatttccagcattattgaggatggcgatatgattgatacaggctttggag

SEQ ID NO: 100877 - DNA, 80 bp, synthetic construct
  source 1..80: mol_type = other DNA
attttactgccttacaggctaccaaatcagatgtgcccattgatattagtcaatccacatgtaaatatcctgattatctt

SEQ ID NO: 100878 - DNA, 80 bp, synthetic construct
  source 1..80: mol_type = other DNA
aaaatgtctgcagatacatatggaaacagcatgtttttttttcttcgccgggaacaattatttgccagacatttttataa

SEQ ID NO: 100879 - DNA, 80 bp, synthetic construct
  source 1..80: mol_type = other DNA
aaggcggtggctgttggggatgctatacccaccactttgtatattaaaggtgctgaatcaggcagggagccccctacatc

SEQ ID NO: 100880 - DNA, 80 bp, synthetic construct
  source 1..80: mol_type = other DNA
ttctatttattctgctacacctagtggctctatggttacttcggatgcacaactatttaataagccatactggttacaac

SEQ ID NO: 100881 - DNA, 80 bp, synthetic construct
  source 1..80: mol_type = other DNA
ctaaccttaccattagtacattatctgcagcatctgcatccactccatttaaaccatctgattataaacaatttataaga

SEQ ID NO: 100882 - DNA, 80 bp, synthetic construct
  source 1..80: mol_type = other DNA
catggcgaagaatatgaattacaatttatatttcagttgtgtaaaataacacttacaacagatgttatggcttacataca

SEQ ID NO: 100883 - DNA, 80 bp, synthetic construct
  source 1..80: mol_type = other DNA
atgaaacagataatatgcgtgaccagcaggccagacaagctggacaagaagtgtgttacagaattgaagcacaatgttgt

SEQ ID NO: 100884 - DNA, 80 bp, synthetic construct
  source 1..80: mol_type = other DNA
tttaatgaatgcctccatattggaggattggaattttggactaaccttacctcccactgctagtttggaagatgcctata

SEQ ID NO: 100885 - DNA, 80 bp, synthetic construct
  source 1..80: mol_type = other DNA
ggtttattaaaaactctgctactacctgtcagcgtaacgcccctcctgtgccaaaggaagatccttttcaaaaatttaaa

SEQ ID NO: 100886 - DNA, 80 bp, synthetic construct
  source 1..80: mol_type = other DNA
ttttgggatgtagatttaaaagaaaaattttctattgatttggatcaatttccactagggcgtaagtttatgttacaggc

SEQ ID NO: 100887 - DNA, 80 bp, synthetic construct
  source 1..80: mol_type = other DNA
cggcatacaacggcggccgaaactaggcaccaaacgtcccttatcttctacctcttcctctaccaaacgcaaaaaacgta

SEQ ID NO: 100888 - DNA, 80 bp, synthetic construct
  source 1..80: mol_type = other DNA
aacttactaaataattccgcatgtttgtgtgtgtgtatatgtttgtggtatgttatgtaaggtgtgtttgtatgtgtgta

SEQ ID NO: 100889 - DNA, 80 bp, synthetic construct
  source 1..80: mol_type = other DNA
caactgtatgtaatgtaaaggcgtgttttgtatgtatgtattatatgtatgcatggttatgtgttttcctgtttgtatgc

SEQ ID NO: 100890 - DNA, 80 bp, synthetic construct
  source 1..80: mol_type = other DNA
atacttgttatttaataaagtatgaatgtgtcttcatgcatggttacatgtctttactacactatttgtcatttgtttta

SEQ ID NO: 100891 - DNA, 80 bp, synthetic construct
  source 1..80: mol_type = other DNA
cccctgaggtaatgggaggaaccttaggtggtgtcccttataattattatattacacaagtttaccttttatatgtattt

SEQ ID NO: 100892 - DNA, 80 bp, synthetic construct
  source 1..80: mol_type = other DNA
cactaaacttttgtagtgttatatttttactttttatattttctattactatctattgtcccaaccgttttcggtcgttc

SEQ ID NO: 100893 - DNA, 80 bp, synthetic construct
  source 1..80: mol_type = other DNA
cttattttagtttttatccaactttcatgctgtatcctgcaggaacagttaatcctttggcagacaacacatcctgcctc

SEQ ID NO: 100894 - DNA, 80 bp, synthetic construct
  source 1..80: mol_type = other DNA
atgtgtaatagtatagtgcagctagctgtgcagagcagtcgacagaacgttcgagtgctggagcagatgttaatggaaga

SEQ ID NO: 100895 - DNA, 80 bp, synthetic construct
  source 1..80: mol_type = other DNA
ctacgcttggcttgccattttggcactataagtggcgcgcctgtattagtcacatatatttaaacaatacttacataagc

SEQ ID NO: 100896 - DNA, 80 bp, synthetic construct
  source 1..80: mol_type = other DNA
actttttcttacattataataaaactgctgttaggcacatatttttattttattttataggtcttttaagtgcatagttg

SEQ ID NO: 100897 - DNA, 80 bp, synthetic construct
  source 1..80: mol_type = other DNA
gctaacatatacacttttgtttgccaactatgtgtctgacacatactgttgtaacccatagttaaacacaggtgtgtatg

SEQ ID NO: 100898 - DNA, 80 bp, synthetic construct
  source 1..80: mol_type = other DNA
gtaacccatagttaaacacaggtgtgtatgtaaccgaaatgtgttttgttaatgcatgcaagtttctttataataacttt

SEQ ID NO: 100899 - DNA, 80 bp, synthetic construct
  source 1..80: mol_type = other DNA
tacgtgcaaaacagctatgttcgaggatcctagagaacgacccagaacgctacatgagctatgtgaaagcttgaatacta

SEQ ID NO: 100900 - DNA, 80 bp, synthetic construct
  source 1..80: mol_type = other DNA
cgtgtccttggtgtgccatcagtgtgctgcacagtaaacctgcaatggactgtgaaggtacaaatgaggaggggcgggtg

SEQ ID NO: 100901 - DNA, 80 bp, synthetic construct
  source 1..80: mol_type = other DNA
tgtacagggtggttttcagtagaagctatagtggaaaaacatacaggggacacaatatcagatgatgaaacagacaatag

SEQ ID NO: 100902 - DNA, 80 bp, synthetic construct
  source 1..80: mol_type = other DNA
tagtgatacagggtcggacctaataggatttatagatgatagtagtataagtgattatgcagaacaggaggtaacccagg

SEQ ID NO: 100903 - DNA, 80 bp, synthetic construct
  source 1..80: mol_type = other DNA
ggacagcgggtatggctatactgaagtggaaactcttacgcccgtacaggtagataaacaatatgaagaaaatggcgggt

SEQ ID NO: 100904 - DNA, 80 bp, synthetic construct
  source 1..80: mol_type = other DNA
taattgttacattatgtaatattgtattacaataatacctggtatatacaatactacacacgccatatatgctgctaggc

SEQ ID NO: 100905 - DNA, 80 bp, synthetic construct
  source 1..80: mol_type = other DNA
aacacaaaacctgggctgataaaatattgcaatggggtagtttatttacattttttggaggccttggtattggcactggc

SEQ ID NO: 100906 - DNA, 80 bp, synthetic construct
  source 1..80: mol_type = other DNA
ctgatacaaatatatttaatcctgaccaggagcggcttgtatgggcctgtgtagggctagagattggccgtggacagcct

SEQ ID NO: 100907 - DNA, 80 bp, synthetic construct
  source 1..80: mol_type = other DNA
ggaacaatcagttatttgtaactgttgtggataccaccaggaatacaaacatgactctttccgcaaccacacagtctatg

SEQ ID NO: 100908 - DNA, 80 bp, synthetic construct
  source 1..80: mol_type = other DNA
acaaatgcttatgggcacagtggagcttgtgtgccccctctgcgcaacaaggcgataactgcaatggcgtcacctgaagg

SEQ ID NO: 100909 - DNA, 80 bp, synthetic construct
  source 1..80: mol_type = other DNA
gtgattggacgttcatgggggtcgtggagatggtggtcctccttttagaactctttggaatcttttggaacccacctgat

SEQ ID NO: 100910 - DNA, 80 bp, synthetic construct
  source 1..80: mol_type = other DNA
gggctacgtccccacccaactcgataaagataaccaaccaagatatggctctggggctgattggacaggtcccagcgcca

SEQ ID NO: 100911 - DNA, 80 bp, synthetic construct
  source 1..80: mol_type = other DNA
agtattgggggggatcggcttagccataggattcaccagagacaaggtaagtaagatgatgaagaatgctgttgatggac

SEQ ID NO: 100912 - DNA, 80 bp, synthetic construct
  source 1..80: mol_type = other DNA
ccaggggcctacgtatgactttgatactgacagagtagctgcgttcacgaggatggcccgagccaacgggttgggtctca

SEQ ID NO: 100913 - DNA, 80 bp, synthetic construct
  source 1..80: mol_type = other DNA
ggctaaggaagctggaaaggggcccataggtcatgatgacatggtagaaaggtttggcctatgtgaaactgaagaggagg

SEQ ID NO: 100914 - DNA, 80 bp, synthetic construct
  source 1..80: mol_type = other DNA
tggggcttttgggtcagcccgacagtgttcatcacaaccacacatgtagtgccaactggtgtgaaagaattctttggtga

SEQ ID NO: 100915 - DNA, 80 bp, synthetic construct
  source 1..80: mol_type = other DNA
tatggaggctattgcctccatgaggatacagggtcggcttgtccatggccaatcagggatgttactgacaggggccaatg

SEQ ID NO: 100916 - DNA, 80 bp, synthetic construct
  source 1..80: mol_type = other DNA
tatgggggctattgcctccatgaggatacagggtcggcttgtccatggccaatcagggatgttactgacaggggccaatg

SEQ ID NO: 100917 - DNA, 80 bp, synthetic construct
  source 1..80: mol_type = other DNA
gacaaggggcattatgccggccacgagattgtgaggtatggaagtggcccagcactgtcaactaaaacaaaattctggag

SEQ ID NO: 100918 - DNA, 80 bp, synthetic construct
  source 1..80: mol_type = other DNA
ggggcaaggacccccgtgtacagaatggcccatccctacaacaggtactacgtgaccaactgaaaccctttgcggacccc

SEQ ID NO: 100919 - DNA, 80 bp, synthetic construct
  source 1..80: mol_type = other DNA
ctatggggcgccgatctcggaacagtggtcagggccgcccgggcttttggcccattttgtgacgctataaaatcacatgt

SEQ ID NO: 100920 - DNA, 80 bp, synthetic construct
  source 1..80: mol_type = other DNA
ctagctggtaatgcctttactgcggggaagataatagtttcctgcataccccctggttttggttcacataatcttactat

SEQ ID NO: 100921 - DNA, 80 bp, synthetic construct
  source 1..80: mol_type = other DNA
tgggtgtacactcccctcaagcagccttctcaataacgaggatcaccatacagcccatatcagcttggtggcgagtctgt

SEQ ID NO: 100922 - DNA, 80 bp, synthetic construct
  source 1..80: mol_type = other DNA
tcttggggaattcaaagcataccctgatggtttcctcacttgtgtccccaatggggctagctcgggtccacaacagctgc

SEQ ID NO: 100923 - DNA, 80 bp, synthetic construct
  source 1..80: mol_type = other DNA
ccgtgctgggggtttgaccagtgctgatgcagcaagatctgtggcaggagctccagtcacccgcattgtagattggaatg

SEQ ID NO: 100924 - DNA, 80 bp, synthetic construct
  source 1..80: mol_type = other DNA
gtctgctcccgagtcctctgctaccacattgagatccggtggcttcatgtcagttcccataccatttgcctctaagcaaa

SEQ ID NO: 100925 - DNA, 80 bp, synthetic construct
  source 1..80: mol_type = other DNA
ccacccgacccaagattggtcccgagacactccagaattccaacaagacagcaagttagagatggttagggatgcagtgc

SEQ ID NO: 100926 - DNA, 80 bp, synthetic construct
  source 1..80: mol_type = other DNA
gccaagaccatgactaacgatcacagcccctccaagaaaacatctaggaaagtcgggtgctctgagtggatatgctcggc

SEQ ID NO: 100927 - DNA, 80 bp, synthetic construct
  source 1..80: mol_type = other DNA
tcagcaagtttcaatctccacctcttcaaatcctgcccctgtctcagagatggatgtaagaactctttctcgaaagcttc

SEQ ID NO: 100928 - DNA, 80 bp, synthetic construct
  source 1..80: mol_type = other DNA
tcctggacaatctgaatacttacccttctttttgtttggtggtgggtgatggatcagggggaatctcaagaaccgtccta

SEQ ID NO: 100929 - DNA, 80 bp, synthetic construct
  source 1..80: mol_type = other DNA
ggtaacagacatagcatctgtgaacaagataacattacttatgtcagattttgttctgtctatagatggacccgtcgact

SEQ ID NO: 100930 - DNA, 80 bp, synthetic construct
  source 1..80: mol_type = other DNA
tgatatttaagtcatatgggtctatgttggtggacccggactataaagcaattcaacatctctccagggcttttccccag

SEQ ID NO: 100931 - DNA, 80 bp, synthetic construct
  source 1..80: mol_type = other DNA
gtgactggatacattactcaactaacatcctccttctcgtcagagctgtatttaaggttttctaaaagggggaaattctt

SEQ ID NO: 100932 - DNA, 80 bp, synthetic construct
  source 1..80: mol_type = other DNA
tagacctcgcactggcggacgatggaactgtcaattcgtatgatgaggattatctctcaggggagacgaggagcccggag

SEQ ID NO: 100933 - DNA, 80 bp, synthetic construct
  source 1..80: mol_type = other DNA
ccagttgacttgtcaaaggaagtcgagaaacacttaagaggatataacagatggataaccctcaatgatgtgaaatctag

SEQ ID NO: 100934 - DNA, 80 bp, synthetic construct
  source 1..80: mol_type = other DNA
gtcgtctcttctggattacagctgtctttgatgcaagcctctcataggtttttcttttgaaaatatgtttggagagaaaa

SEQ ID NO: 100935 - DNA, 80 bp, synthetic construct
  source 1..80: mol_type = other DNA
ttttgaaaatatgtttggagagaaaagcctgaaaaaaacatatgcaagattcagaacatatacttgtttgaatggaaggg

SEQ ID NO: 100936 - DNA, 80 bp, synthetic construct
  source 1..80: mol_type = other DNA
ccatcagtctcggccgaactcgtttgctgaattcctaaacaagacatactcgagtgattcttaactagacgctcaagcct

SEQ ID NO: 100937 - DNA, 80 bp, synthetic construct
  source 1..80: mol_type = other DNA
gattcataaactatcaggaaggttgcttcttcttccaagaaaaaaactaacacccctccttttgtaccatcttcaatatg

SEQ ID NO: 100938 - DNA, 80 bp, synthetic construct
  source 1..80: mol_type = other DNA
atcggaacatcgaggacaatcaagctcatctccagggtgagcctatagaagtcgacagcctacctgaagagattgggaag

SEQ ID NO: 100939 - DNA, 80 bp, synthetic construct
  source 1..80: mol_type = other DNA
ctcaatatcaatgaggcaaagcctcaaagctttgagaacaatcccatagacatagatggtaggatgaatgaagacttcca

SEQ ID NO: 100940 - DNA, 80 bp, synthetic construct
  source 1..80: mol_type = other DNA
ttacgttggagccaactttcccaacccttctgggaagacgactgagagcaagtcaacccagacgacacccaagaaggtga

SEQ ID NO: 100941 - DNA, 80 bp, synthetic construct
  source 1..80: mol_type = other DNA
agcctgaacccccttcagctccaaccgagaaacccgaacaattgtccaggaccagcatggctcccgagacgacatcaggc

SEQ ID NO: 100942 - DNA, 80 bp, synthetic construct
  source 1..80: mol_type = other DNA
cccctggccctagactggtcagcaacaaatgatgatgatgatgtctctgtggaggccgagatcgcacatcagattgcaga

SEQ ID NO: 100943 - DNA, 80 bp, synthetic construct
  source 1..80: mol_type = other DNA
cgaggggtgtgccaggcatcatccgtcttgccaaggagggtcttcgcctccctctaagatgtatcctcggatgggttgca

SEQ ID NO: 100944 - DNA, 80 bp, synthetic construct
  source 1..80: mol_type = other DNA
tcgtctcactccaagaagtttcaactgctagttgggtcagagaagctgagcaagattatgcaggatgatctgaaccgtta

SEQ ID NO: 100945 - DNA, 80 bp, synthetic construct
  source 1..80: mol_type = other DNA
atatgtcatgttgatctgttctgctatacaagacaaactattcagccagcgtcagctgtcttactcatatcatgaggaag

SEQ ID NO: 100946 - DNA, 80 bp, synthetic construct
  source 1..80: mol_type = other DNA
actgtcaacaccactgataaaatgaactttctacgcaagatagttaggaattgcaaggatgaggacgaccagaagccccc

SEQ ID NO: 100947 - DNA, 80 bp, synthetic construct
  source 1..80: mol_type = other DNA
gcatctacgcttccgaatgacgacgacctgtggcttccccctcccgaatatgttcctctaaccgagatcaccggtaaaaa

SEQ ID NO: 100948 - DNA, 80 bp, synthetic construct
  source 1..80: mol_type = other DNA
tcctggaatctcttgacgagatctactcggggaaccatagaatgatcgggctggtcaaagtggtcatggatctgacatta

SEQ ID NO: 100949 - DNA, 80 bp, synthetic construct
  source 1..80: mol_type = other DNA
cccgcggtccattggacggagaagagctggaatactctcaggaaatcacatgggatgatgactctgagtttgtcggccta

SEQ ID NO: 100950 - DNA, 80 bp, synthetic construct
  source 1..80: mol_type = other DNA
aacaatctgaagatcacaaaaatagttctctcctcttagaatagtaatgtcttcttcatgtccactcactggtttacctc

SEQ ID NO: 100951 - DNA, 80 bp, synthetic construct
  source 1..80: mol_type = other DNA
cataaggagaacagatattcagggcagctgggctctggcaggggggcaggactttaccagagaccctacaatcgcagagc

SEQ ID NO: 100952 - DNA, 80 bp, synthetic construct
  source 1..80: mol_type = other DNA
caggactttaccagagaccctacaatcgcagagcatgcatctctggtgggtcttcttctgagcctctacagattgagcaa

SEQ ID NO: 100953 - DNA, 80 bp, synthetic construct
  source 1..80: mol_type = other DNA
gggtcttgctcaggagcctcaatcccttcagttttttgctcaactaatcacgactatacactgtggatgccagaggattc

SEQ ID NO: 100954 - DNA, 80 bp, synthetic construct
  source 1..80: mol_type = other DNA
caattccgggatgtcttgcgacatttttacaatgagcaaaggaaaaaaagcgtcaaagggaggcaaggtgtgtgggttcg

SEQ ID NO: 100955 - DNA, 80 bp, synthetic construct
  source 1..80: mol_type = other DNA
acaccaacatacagagttacttgaatcctcagttatacctctcatccatccgctggcagatccatccaccatcttcaggg

SEQ ID NO: 100956 - DNA, 80 bp, synthetic construct
  source 1..80: mol_type = other DNA
catccgctggcagatccatccaccatcttcaggggggatgatgaggccgagggattcattgaggtccatcttccggacat

SEQ ID NO: 100957 - DNA, 80 bp, synthetic construct
  source 1..80: mol_type = other DNA
ccaaaagcaagtctctggaatcgacttgggtctctcagagtgggagagatatttgataataggtatttcggcgataatcc

SEQ ID NO: 100958 - DNA, 80 bp, synthetic construct
  source 1..80: mol_type = other DNA
cctgttcattctagcaataattttcacgatctgttgtagaaggtgcaagaggcggaaaaagatcagaactgatcatatag

SEQ ID NO: 100959 - DNA, 80 bp, synthetic construct
  source 1..80: mol_type = other DNA
agctggatcgtaaggtgtcagtcacctctcagagtgggaagtcgatcccttcctgggagtcatacaaatcgagacagggg

SEQ ID NO: 100960 - DNA, 80 bp, synthetic construct
  source 1..80: mol_type = other DNA
cactccagatcatgagtcaccagttgtcgacaaagtctttctgcaatcagctctcttcttgacgccagagagcagttcca

SEQ ID NO: 100961 - DNA, 80 bp, synthetic construct
  source 1..80: mol_type = other DNA
cccatcgatcactcatgagccatatgcaatactaagactcacaagacagaatggctctcacacatcattcctattgatca

SEQ ID NO: 100962 - DNA, 80 bp, synthetic construct
  source 1..80: mol_type = other DNA
aaaacaaatatattggactaatcaagtagaggagaatactaaagaattgcctccttacgctcctccttgtaaatatctac

SEQ ID NO: 100963 - DNA, 80 bp, synthetic construct
  source 1..80: mol_type = other DNA
ccatttgtcttagagtataactcatcttgttgagagaggaaggttcttccttcgagagaaatgtatgttcagcccttgtt

SEQ ID NO: 100964 - DNA, 80 bp, synthetic construct
  source 1..80: mol_type = other DNA
tgtcaattgagacaggagttgggtgtgcatattagcagcaagttgaatcatcatgaccatataaccatgagaaaaacatc

SEQ ID NO: 100965 - DNA, 80 bp, synthetic construct
  source 1..80: mol_type = other DNA
atcccagcaaggggcaacacccctcctcaaaaaaacatccttgtcaggatgattgacccaggtgaggtatatgacgatcc

SEQ ID NO: 100966 - DNA, 80 bp, synthetic construct
  source 1..80: mol_type = other DNA
aattgaccccgttgagcctgaacccgaactaaaaaccaacaatgcagttatccccaacatcctcaggaactcggattata

SEQ ID NO: 100967 - DNA, 80 bp, synthetic construct
  source 1..80: mol_type = other DNA
attcccctctgatagaacacccatctaggcttatgttagagtggttaaccaccgggaataagcccatgagattgaccctt

SEQ ID NO: 100968 - DNA, 80 bp, synthetic construct
  source 1..80: mol_type = other DNA
acagacaattgcatccgctcctataaaactctgaaatgttactttagaaaagtagacatcggttctgtgaaagtcggagg

SEQ ID NO: 100969 - DNA, 80 bp, synthetic construct
  source 1..80: mol_type = other DNA
tcctgctgcacaagccatgacatccctatggcttcatggggaacactctgagtcaaacagaagtaggaagtgtctatcag

SEQ ID NO: 100970 - DNA, 80 bp, synthetic construct
  source 1..80: mol_type = other DNA
cgccagagggggtccttctctgtttgaagaaagtagattatgataggtctttcgggagatatctagcaaacatttactct

SEQ ID NO: 100971 - DNA, 80 bp, synthetic construct
  source 1..80: mol_type = other DNA
tcataaacagtttggtgcagagagccgaagagtttagaccgttgatacactcactgggagactttcccctattcattagg

SEQ ID NO: 100972 - DNA, 80 bp, synthetic construct
  source 1..80: mol_type = other DNA
gagaaagtgggacagcttgaaggaacattcggtccaagtgcaagaaggttttttcaagttttggatcaagtggacaacat

SEQ ID NO: 100973 - DNA, 80 bp, synthetic construct
  source 1..80: mol_type = other DNA
ccaggaatgctctctcgatttacagagccatagaagatggagcatctaaattgggccttattataaagaaggaagaaaca

SEQ ID NO: 100974 - DNA, 80 bp, synthetic construct
  source 1..80: mol_type = other DNA
tcctcttcctcaaatcgatcgagccgttgttccctaggttcctcagcgaactatttagctcttctttcctgggcataccc

SEQ ID NO: 100975 - DNA, 80 bp, synthetic construct
  source 1..80: mol_type = other DNA
ggggacgaaaacgtgttggaactactgttccgcatccgtcagaaatgttagctttactgccaaagtcctcaatctcttgt

SEQ ID NO: 100976 - DNA, 80 bp, synthetic construct
  source 1..80: mol_type = other DNA
ccatgtggtctaacagggagtgagaatccgagagtatcgatttctgtgttaccttcaatttatcagtccttcttctccag

SEQ ID NO: 100977 - DNA, 80 bp, synthetic construct
  source 1..80: mol_type = other DNA
attaactggtttatatctcgaaattcgaatctagcccagactctgatcagaaatataatctctctaacaggcccccagtt

SEQ ID NO: 100978 - DNA, 80 bp, synthetic construct
  source 1..80: mol_type = other DNA
ccaaaatgcatcagatcaatagatgacgtcattctggtacacccccaggtatttgatttccccgatgtatccaaaaggat

SEQ ID NO: 100979 - DNA, 80 bp, synthetic construct
  source 1..80: mol_type = other DNA
ctcaagaatggtgtctggcgctgtacctagttcccagatacttcccgaggtcaacttgttgccaggtcactttgagtctc

SEQ ID NO: 100980 - DNA, 80 bp, synthetic construct
  source 1..80: mol_type = other DNA
gatcctgggtacaatgatggcaccatattcccagtgaacatctacagtaagatatctcctaaagattacctcagagggct

SEQ ID NO: 100981 - DNA, 80 bp, synthetic construct
  source 1..80: mol_type = other DNA
gcgcacagtggatcctaggcattgctttcacgctttgaggtgaaccacctcactggagcaccagatttcatctaatgggt

SEQ ID NO: 100982 - DNA, 80 bp, synthetic construct
  source 1..80: mol_type = other DNA
aactatgaggggatcaatcatcgaagaaaacaaaaattgaactttaaaattgtagcaaacttgctgaggacttaaaccaa

SEQ ID NO: 100983 - DNA, 80 bp, synthetic construct
  source 1..80: mol_type = other DNA
tatttgtctaaaatgtttgaacataatgttggggaagtcttctttttgtgacatttgtggtgaagagctccccacatcca

SEQ ID NO: 100984 - DNA, 80 bp, synthetic construct
  source 1..80: mol_type = other DNA
tggggtccccactttgagtggtccatggaaagactaaagtcaccattgtttactgccattttcatatcacaaattgccct

SEQ ID NO: 100985 - DNA, 80 bp, synthetic construct
  source 1..80: mol_type = other DNA
cccccgggtggccccacaggggccccccgcggggagtccccggtgtggtgtggtttactcaatgtcttcaacggactgct

SEQ ID NO: 100986 - DNA, 80 bp, synthetic construct
  source 1..80: mol_type = other DNA
gggtggtgtggtttactcaatgtcttcaacggactgctgctgtctaaatagtctgcaggtaacacccttgagccttaagt

SEQ ID NO: 100987 - DNA, 80 bp, synthetic construct
  source 1..80: mol_type = other DNA
atcttttaccatctcatcaacaacgaagttcaacatgattaagtctaaaaacaatagtgtgttcctcctggtattaaaga

SEQ ID NO: 100988 - DNA, 80 bp, synthetic construct
  source 1..80: mol_type = other DNA
agattttcaaaaccaaggctttgattgttggtcttggccaaactatggattaatctatgatattcttgttcttcaatttc

SEQ ID NO: 100989 - DNA, 80 bp, synthetic construct
  source 1..80: mol_type = other DNA
gtaattgctgcggccatctacaacggggactaatgtaacacctatcttgcctaggtctgtttttagagagattaatttgc

SEQ ID NO: 100990 - DNA, 80 bp, synthetic construct
  source 1..80: mol_type = other DNA
ttcagacagggttcctaagagggggtcttgcatgactgccagaagtttaagttacggttctgcctaggatccactgtgcg

SEQ ID NO: 100991 - DNA, 80 bp, synthetic construct
  source 1..80: mol_type = other DNA
ctggggctgtccagtgccccaagtgccttaattatggtgtcaccaaaaatctccacctttaagtaagacaacttctgatt

SEQ ID NO: 100992 - DNA, 80 bp, synthetic construct
  source 1..80: mol_type = other DNA
acagtcaagcagggcgcaatgtggttctgttgattgtgaggggtctttgtcttttttcttttttggcaccacaaccccat

SEQ ID NO: 100993 - DNA, 80 bp, synthetic construct
  source 1..80: mol_type = other DNA
gcgaccatgtgtgtctaaaagtcttttgatgtcatcagagccttgggcggttaggaccatgtcttgtggtaacaacccta

SEQ ID NO: 100994 - DNA, 80 bp, synthetic construct
  source 1..80: mol_type = other DNA
aaggagtccaggttgggccgattccaagtcctttagtagcattccatgtgaatgtctacttccattcttgaatcctttct

SEQ ID NO: 100995 - DNA, 80 bp, synthetic construct
  source 1..80: mol_type = other DNA
ggttttcataggggttcctgtttcctggtctctcatcgataaacatattttctcttttctttacacccaaaactgtcttg

SEQ ID NO: 100996 - DNA, 80 bp, synthetic construct
  source 1..80: mol_type = other DNA
actgagccgaactggttgttcagtctggtgggatcagccacgtcccaaattctaacaacacctgtggatctcacctgtgg

SEQ ID NO: 100997 - DNA, 80 bp, synthetic construct
  source 1..80: mol_type = other DNA
atctcttttgagttgctcatgatggaaaggctttctgataagaaattgcttaccaaaaatgcctaggatccactgtgcga

SEQ ID NO: 100998 - DNA, 80 bp, synthetic construct
  source 1..80: mol_type = other DNA
tgcaaggggtgttcacttggacgatcacagatgctgctggcaacgacatgcctggaggttattgtttggaaaggtggatg

SEQ ID NO: 100999 - DNA, 80 bp, synthetic construct
  source 1..80: mol_type = other DNA
ctgacctgaaatgttttggcaacactgctcttgcaaagtgtaacttaaatcatgactctgagttctgtgacatgttgaaa

SEQ ID NO: 101000 - DNA, 80 bp, synthetic construct
  source 1..80: mol_type = other DNA
ttggggttatccaaaatggtagccttagttggaagttttacgcttgagaaaacccattcacccaactcacaggcattggt

SEQ ID NO: 101001 - DNA, 80 bp, synthetic construct
  source 1..80: mol_type = other DNA
ggctaaaaaggaataaaataatgcagggctcatgtgggggccccattttgaatgatccaatgacatactaatatcaccat

SEQ ID NO: 101002 - DNA, 80 bp, synthetic construct
  source 1..80: mol_type = other DNA
cccccggggggccccaatggggccccccgcggggagtccccggaggcgaatgtggagcttactcgatctcctgaatacat

SEQ ID NO: 101003 - DNA, 80 bp, synthetic construct
  source 1..80: mol_type = other DNA
gggcgaatgtggagcttactcgatctcctgaatacattggtctcttctgaagggccgacaggtgatgcctttcaacctta

SEQ ID NO: 101004 - DNA, 80 bp, synthetic construct
  source 1..80: mol_type = other DNA
cttaaggcattacccaactcatctaacttagggacaacaacacttttattactagataagtccaaagcagtactagtgaa

SEQ ID NO: 101005 - DNA, 80 bp, synthetic construct
  source 1..80: mol_type = other DNA
tgagatggggaacctctgaacataacattccttgagcctgacatttccataatagcgagaatagtccttttcattaatta

SEQ ID NO: 101006 - DNA, 80 bp, synthetic construct
  source 1..80: mol_type = other DNA
cttgattaaaatcaattgttttctttatggatttcaaatatggccagagattgcatagcaagttttcaatttctctgtct

SEQ ID NO: 101007 - DNA, 80 bp, synthetic construct
  source 1..80: mol_type = other DNA
ggggtgcacctgtgaaagaagtgcgtctttctggaaagatagctctactaattctgggacatactttcttacaagatcct

SEQ ID NO: 101008 - DNA, 80 bp, synthetic construct
  source 1..80: mol_type = other DNA
tttcttacaagatccttcaattccagtaaaaaagtgtccattattcacttagacaaaattcgcctaggatccactgtgcg

SEQ ID NO: 101009 - DNA, 80 bp, synthetic construct
  source 1..80: mol_type = other DNA
ccattttggaacacaatggggttttcctgttcttccggcccaactagaacgtaagagtatttgtccctcagttcatccaa

SEQ ID NO: 101010 - DNA, 80 bp, synthetic construct
  source 1..80: mol_type = other DNA
acacaaagctggtgcatcaaatgtttgaaataacaatcttgttgatagtccttgccaccttgtttatactggtggttggg

SEQ ID NO: 101011 - DNA, 80 bp, synthetic construct
  source 1..80: mol_type = other DNA
catttgaagtctctggataggtaccctttcttcaattcacactatcatcacagagcactattagaagcacactatgataa

SEQ ID NO: 101012 - DNA, 80 bp, synthetic construct
  source 1..80: mol_type = other DNA
cattgtgaaggtgagttctactacctcctgtaatgagacaaaattcaaagatgctgagtgctccaaagaaatcaggaaat

SEQ ID NO: 101013 - DNA, 80 bp, synthetic construct
  source 1..80: mol_type = other DNA
tggcttacaagtgcccaagaggagtttcagggataatatatgctgactctaaaggggaaattggaggcatctactgtaag

SEQ ID NO: 101014 - DNA, 80 bp, synthetic construct
  source 1..80: mol_type = other DNA
gaaaatgaggaattaatggagaactgcatccaatgcaggaaagtgcagaggaagaagccccagaaaggtcttctgatgca

SEQ ID NO: 101015 - DNA, 80 bp, synthetic construct
  source 1..80: mol_type = other DNA
gctgcaagatatggtgtgccagccagactcaattgattacactggccccaaacaaattctaaaaggttactgcaagatag

SEQ ID NO: 101016 - DNA, 80 bp, synthetic construct
  source 1..80: mol_type = other DNA
gaatggttaattacaggcattgtgagcatttcgccagcatggaggaggttgttcctttcgcgatattcaagaacaaaggg

SEQ ID NO: 101017 - DNA, 80 bp, synthetic construct
  source 1..80: mol_type = other DNA
aagctatacatggatagtatgagaattaggaataaggatgtcctagagaaagagaacttcatttgttatggagcaaagga

SEQ ID NO: 101018 - DNA, 80 bp, synthetic construct
  source 1..80: mol_type = other DNA
gagatactgggggtttgagatggccaaaatgccaggctttgacttgcattgccgctttaatgaagaaggtgactccagat

SEQ ID NO: 101019 - DNA, 80 bp, synthetic construct
  source 1..80: mol_type = other DNA
gaatgcagatgctgattcttcaaatcatgggggcaaagtttcagtgaaggtcacagagtgtaagaatgttgatccatcac

SEQ ID NO: 101020 - DNA, 80 bp, synthetic construct
  source 1..80: mol_type = other DNA
aaagcaagatctgctctggtgatagcactttctgttccaagtttgcatgtgacaatgagttgcctgaggtccattgtgaa

SEQ ID NO: 101021 - DNA, 80 bp, synthetic construct
  source 1..80: mol_type = other DNA
gtggctccgggagctggcccaatcgaggtctattacggaggagtctggatacagcccatgtgcttagggtatgagagggc

SEQ ID NO: 101022 - DNA, 80 bp, synthetic construct
  source 1..80: mol_type = other DNA
tgtggtgttgagagaaatgccacctccagtcgaaacctcagaagacacttgtgacagctgctactctgagtgcttagaca

SEQ ID NO: 101023 - DNA, 80 bp, synthetic construct
  source 1..80: mol_type = other DNA
gtcatatacttgtcaggtctaccgggttcatgatatctggtgcagtggcatgctctcacggagcatgcacttcgctaact

SEQ ID NO: 101024 - DNA, 80 bp, synthetic construct
  source 1..80: mol_type = other DNA
ataatgccttcaactgagataatgatcccttatcctggtatggcgtcatcaattggtggtgacattgggatacacttgtc

SEQ ID NO: 101025 - DNA, 80 bp, synthetic construct
  source 1..80: mol_type = other DNA
tcatgatgaggttcaagtcagttcacattatagagttcactgtgagcctaaagatccatgtgttgctcactcttgtgtca

SEQ ID NO: 101026 - DNA, 80 bp, synthetic construct
  source 1..80: mol_type = other DNA
tttgtgctgagggagtcatcaactaccagtgccacacagccctaagcgcattcgttgttgtaacattggtagtgctagtt

SEQ ID NO: 101027 - DNA, 80 bp, synthetic construct
  source 1..80: mol_type = other DNA
gtcttgatgtctctaattgtgttgaagaggtgtttagtgttgttcagggtggcacctgccgtcttgctgattcccttttc

SEQ ID NO: 101028 - DNA, 80 bp, synthetic construct
  source 1..80: mol_type = other DNA
atggataatcaagctggcatgctggacatctaggaagttgaaattaagtactgaaagaagaatagccagaataaatgaag

SEQ ID NO: 101029 - DNA, 80 bp, synthetic construct
  source 1..80: mol_type = other DNA
acatgacacatgagaatgccatgaaacagattaagattgtcacaacagctccagacaccatgaagttctcctgcagagat

SEQ ID NO: 101030 - DNA, 80 bp, synthetic construct
  source 1..80: mol_type = other DNA
aaattggatggaggccagaggaagccagggctacacataggatgagagacagagacagaaggcctatacctaggtcagca

SEQ ID NO: 101031 - DNA, 80 bp, synthetic construct
  source 1..80: mol_type = other DNA
gtttacctggcaatcctgttccttatcagtgtgacaagcgcatgttcggatcacaccattgcgagctcaaagatagtcaa

SEQ ID NO: 101032 - DNA, 80 bp, synthetic construct
  source 1..80: mol_type = other DNA
atgtgttgctaagggttctaaaagtgtttgcactatctcaggactggtcaatgtaaaggcaggtcctattggctctgaga

SEQ ID NO: 101033 - DNA, 80 bp, synthetic construct
  source 1..80: mol_type = other DNA
cttgtgttactttaaaaggacctgactcagctgacaagaaattcctgaccatcaagaccattgccagtgagttgatctgc

SEQ ID NO: 101034 - DNA, 80 bp, synthetic construct
  source 1..80: mol_type = other DNA
tcagaaggtcagtcttactggacaagtcagtatggagttgaatgtttaagctcaagaagatgccatggggtcgccgaatg

SEQ ID NO: 101035 - DNA, 80 bp, synthetic construct
  source 1..80: mol_type = other DNA
caaaggtgatgcttgccagaggtggaacaacactcttgtctcaagagaatttcaggggataaccaacaattcagtcattt

SEQ ID NO: 101036 - DNA, 80 bp, synthetic construct
  source 1..80: mol_type = other DNA
ctgaaaacagatgcatcgaacaatgcggaggggttggctgtgcttgcttcagtgtttatgcctcatgtctatttgtccat

SEQ ID NO: 101037 - DNA, 80 bp, synthetic construct
  source 1..80: mol_type = other DNA
gctagactaagagcaacaaagagagaagcaataaaagtcttcaattgcattgactggagccatagactggtccttgaaat

SEQ ID NO: 101038 - DNA, 80 bp, synthetic construct
  source 1..80: mol_type = other DNA
caccgacttcaatgggaaaaaggaaaaagtctcaatgacgggcatgacaacacaattcttcagctggggttccatgactc

SEQ ID NO: 101039 - DNA, 80 bp, synthetic construct
  source 1..80: mol_type = other DNA
tagccctagattttgagggtataaccggaacaaactcatacagctttctcaggtcttcttcaggagccttctccctggtt

SEQ ID NO: 101040 - DNA, 80 bp, synthetic construct
  source 1..80: mol_type = other DNA
gagacagagtctttagggctatccataacaaatgatgggacaaaaaatatgatggggcctgccattatttactgtgatac

SEQ ID NO: 101041 - DNA, 80 bp, synthetic construct
  source 1..80: mol_type = other DNA
gatgaggccatgtctatggaacctagaagaggcttcctaggggaaattagatgttcttcagaagcagccgctctcacagc

SEQ ID NO: 101042 - DNA, 80 bp, synthetic construct
  source 1..80: mol_type = other DNA
tcacaaaagctgtattgtagcacctgacattatccggtacaaaccaatgactgacattgtggattgttccacttctctca

SEQ ID NO: 101043 - DNA, 80 bp, synthetic construct
  source 1..80: mol_type = other DNA
ttgatccatttgcagtgttcttgcgaggggctttaccacagaccaggaatgggaagacatttagtagctctatagacaaa

SEQ ID NO: 101044 - DNA, 80 bp, synthetic construct
  source 1..80: mol_type = other DNA
aagactatacaggcattcacctctggcattgtgcatgcctctatgtctctgagctttgacaactttgaagttgagttcga

SEQ ID NO: 101045 - DNA, 80 bp, synthetic construct
  source 1..80: mol_type = other DNA
agaggagagggtttcttgcctggccagctttgtcaacatcacaggctgctattcttgtaatgagggtgccagagtgtgta

SEQ ID NO: 101046 - DNA, 80 bp, synthetic construct
  source 1..80: mol_type = other DNA
tacaggcagcagcagacaaaaacacaacactccacgtacatactttggacaactcactaactatagtgatggatgttttt

SEQ ID NO: 101047 - DNA, 80 bp, synthetic construct
  source 1..80: mol_type = other DNA
agtcctaagtccactgactgtagagttgtccacctttctacacctcaagtcaaaatggatgtggtttatagttgcgatgg

SEQ ID NO: 101048 - DNA, 80 bp, synthetic construct
  source 1..80: mol_type = other DNA
ttactacaaggccatgtctattgttggaaccttggtagcaatgaacccttttgatgatagaagacatgaagagacaaatt

SEQ ID NO: 101049 - DNA, 80 bp, synthetic construct
  source 1..80: mol_type = other DNA
caaattctgttgttgtcaaccctaaaactggcagatgggacttctccaattgggcatctggcttggtagactggcttggg

SEQ ID NO: 101050 - DNA, 80 bp, synthetic construct
  source 1..80: mol_type = other DNA
ctaaggacagcaggcgtaatacttggctatataatactggcaattgtattcttagttgtgctggtgctgtgtgtgccaaa

SEQ ID NO: 101051 - DNA, 80 bp, synthetic construct
  source 1..80: mol_type = other DNA
caaagaatttattaggaatataactacaggtgagcagcctccaagagttgattatgagaagctaaagaagaacgcagaag

SEQ ID NO: 101052 - DNA, 80 bp, synthetic construct
  source 1..80: mol_type = other DNA
attggtggggttgattagaactgccctgctcaagaaaaagctgtaagtaaacttgcatccaaagagatggaacatttatc

SEQ ID NO: 101053 - DNA, 80 bp, synthetic construct
  source 1..80: mol_type = other DNA
ttgcaacagaaaaccaaaataaaaacagaaaaccaaaaaacaaaataagataataaaatatcaaaaaaacaaaaaaacaa

SEQ ID NO: 101054 - DNA, 80 bp, synthetic construct
  source 1..80: mol_type = other DNA
aagacaacaagatggtgggaggtgaggggtaattggtggtgtgctcagatttctcaaattaggattggtggttggtttag

SEQ ID NO: 101055 - DNA, 80 bp, synthetic construct
  source 1..80: mol_type = other DNA
ggtgggtgagcagcgggatagtctgagtggcattgccaaccgcagtgcccaacagttttgattacaacatgagagtgagg

SEQ ID NO: 101056 - DNA, 80 bp, synthetic construct
  source 1..80: mol_type = other DNA
actgtctttcagctgcataattgatcgaaaatgttgttggtggtttagtttatcattagggaatcatgcaccagtctttg

SEQ ID NO: 101057 - DNA, 80 bp, synthetic construct
  source 1..80: mol_type = other DNA
agaaagatgctactattcagagaaagaccaaagagatggaggaggtgagagccgttctagattccaggatccaaatagca

SEQ ID NO: 101058 - DNA, 80 bp, synthetic construct
  source 1..80: mol_type = other DNA
caccatgagatccagcagaaggagaatgaaatccaaaagctaagaaatgaccttagagatgctattaagaagggccaaga

SEQ ID NO: 101059 - DNA, 80 bp, synthetic construct
  source 1..80: mol_type = other DNA
gcatgagtcaatgaaactcagagttgaggagtctgatgctagggtgaggggtctgaaggaagagctgaagcaattgactt

SEQ ID NO: 101060 - DNA, 80 bp, synthetic construct
  source 1..80: mol_type = other DNA
acaaaatctttgaccaccaagcgacaaaagatgagcttcaacgtgctaaatcagagatgcaatccctgagaaagaagatt

SEQ ID NO: 101061 - DNA, 80 bp, synthetic construct
  source 1..80: mol_type = other DNA
aatcttaaacttgagtccaaaatggggaacagccttacatcaacttgcttctcccagaacactgggccagggataattga

SEQ ID NO: 101062 - DNA, 80 bp, synthetic construct
  source 1..80: mol_type = other DNA
aaggactttgagtctgttccccaggcaaaaaaaccaagcaacagctctgttgcacttgtaaccacagcagtgttgtcact

SEQ ID NO: 101063 - DNA, 80 bp, synthetic construct
  source 1..80: mol_type = other DNA
attaggatcctcaatggctgcttctcctgaagcaggtatgaatgcagctatacacataaataatagaccaggccttggga

SEQ ID NO: 101064 - DNA, 80 bp, synthetic construct
  source 1..80: mol_type = other DNA
agtttgccctgctaacaacaggaactgaggatgagcattgtaaaaagatcgattatggcgtcacctgcagtagatttgac

SEQ ID NO: 101065 - DNA, 80 bp, synthetic construct
  source 1..80: mol_type = other DNA
acacaaaggcgcctgtacaaaatgaattccataatagaacgtcaagaacctctaggagaaggtttcacaagacgtcagct

SEQ ID NO: 101066 - DNA, 80 bp, synthetic construct
  source 1..80: mol_type = other DNA
tgatgcactagcagagctcaatgttgatggagatggtgtcatggcatcaatatggtcaaaggtagcctatgaagcaaaag

SEQ ID NO: 101067 - DNA, 80 bp, synthetic construct
  source 1..80: mol_type = other DNA
ttgaaggaatagaaagaatgatggatgacaaggaagcagaacttgagcaggctctagaagggagccttgacagacctgat

SEQ ID NO: 101068 - DNA, 80 bp, synthetic construct
  source 1..80: mol_type = other DNA
cttcgaaataagtatcatcgtgtccacctcagcttgactgctaacgagcaagcatatatagctgctcttggtgttggagg

SEQ ID NO: 101069 - DNA, 80 bp, synthetic construct
  source 1..80: mol_type = other DNA
gaagaagagaaaagattcccctagtgtgacacaagctcgagcaaagagcaagttgcccttttcactgtatcacaatacaa

SEQ ID NO: 101070 - DNA, 80 bp, synthetic construct
  source 1..80: mol_type = other DNA
gagatttggagtcatttctcaactctgatgacatgagcttgtttgagcatgagatgggtttgtatagtcccctcactgaa

SEQ ID NO: 101071 - DNA, 80 bp, synthetic construct
  source 1..80: mol_type = other DNA
gatctaccccttagaactgctgctgctgctattcatcaacccacgctgattggtagagaaggaaggaatgagattattca

SEQ ID NO: 101072 - DNA, 80 bp, synthetic construct
  source 1..80: mol_type = other DNA
agcacaccaaaacttcatggaatcacagtttgggtcctggacgcagatggttagtttgataggggctgagctttcagcat

SEQ ID NO: 101073 - DNA, 80 bp, synthetic construct
  source 1..80: mol_type = other DNA
agattgacagggagagctttgacttgaactcaaccactggcaacagcatgaagaacgagagatatcagttttcagcattg

SEQ ID NO: 101074 - DNA, 80 bp, synthetic construct
  source 1..80: mol_type = other DNA
cagtaaaacagcatgtgaaacccaaccactttgttataaagaggctcctgaattctggaatttacctgttgattaagcca

SEQ ID NO: 101075 - DNA, 80 bp, synthetic construct
  source 1..80: mol_type = other DNA
acctcctcaaagagccatatttttgtgtcttttgctgtagagaaatctaggctgatacacaccttctgtgacagtcatgt

SEQ ID NO: 101076 - DNA, 80 bp, synthetic construct
  source 1..80: mol_type = other DNA
attcaggaattgtgaggatgcaggtgacctcttagtcactgattttgtctcctacaaattaagcaaaataactaatcttt

SEQ ID NO: 101077 - DNA, 80 bp, synthetic construct
  source 1..80: mol_type = other DNA
gcaagacaaactctttggcagaggcctcattcttcttttggtctgagtgctacggttataacgtttgggaggcccagaat

SEQ ID NO: 101078 - DNA, 80 bp, synthetic construct
  source 1..80: mol_type = other DNA
agcttgcaagttaacactagtatgtcaagggacatatccttcatgactaaacttagcactctaacactgctggaggacaa

SEQ ID NO: 101079 - DNA, 80 bp, synthetic construct
  source 1..80: mol_type = other DNA
aagccacaaaaaatgtgcaagaagtttcctaaggttctgagaactgagctacaagtgtttattatgaacaaggtcataga

SEQ ID NO: 101080 - DNA, 80 bp, synthetic construct
  source 1..80: mol_type = other DNA
actttaagaataaagaggaggaaacagagccttcatctctatcaaatctgtacaagaaaatcatagaattagaagatcaa

SEQ ID NO: 101081 - DNA, 80 bp, synthetic construct
  source 1..80: mol_type = other DNA
aaaccagacaatgacaacttccttggagcaggtgatcctgagtccccccaaatgcatgagttcagcaggagttacttgaa

SEQ ID NO: 101082 - DNA, 80 bp, synthetic construct
  source 1..80: mol_type = other DNA
cctaactttgtccatgatttcacatttgggcatttaactcctcttacagatgtcccctttgtcagtgcttttggcaaatt

SEQ ID NO: 101083 - DNA, 80 bp, synthetic construct
  source 1..80: mol_type = other DNA
gaaggtttgtgatcatggcaaacttctgctcacacgagtatttggtcaaaattttaaagaccaaatagattctagcataa

SEQ ID NO: 101084 - DNA, 80 bp, synthetic construct
  source 1..80: mol_type = other DNA
tgagagaaatcaattctatcaccttagagagattggcaaccctaaaagccactagtaactttggggagtcatggtatgtt

SEQ ID NO: 101085 - DNA, 80 bp, synthetic construct
  source 1..80: mol_type = other DNA
tacaaagatgtcaaagacaaatcctatagtagagatagactactagttaagatggcctcatttgccagagaggggaaggc

SEQ ID NO: 101086 - DNA, 80 bp, synthetic construct
  source 1..80: mol_type = other DNA
gatggcctcatttgccagagaggggaaggcacttgcaattgagaaatttgaggattgcatgtcaataatagaggaaaggg

SEQ ID NO: 101087 - DNA, 80 bp, synthetic construct
  source 1..80: mol_type = other DNA
acttgcaattgagaaatttgaggattgcatgtcaataatagaggaaaggggggcaatgcatatctgtcttttcaaaaaac

SEQ ID NO: 101088 - DNA, 80 bp, synthetic construct
  source 1..80: mol_type = other DNA
aacaacacggtgggttgagagaaatctatgtgttgggagctgaagagagagtcgttcaatcaataattgaggcaattgcc

SEQ ID NO: 101089 - DNA, 80 bp, synthetic construct
  source 1..80: mol_type = other DNA
agatcaatagggaggttttttcattcagacactctctgcaacccagcaaacaagatgaagatcccagaaagtcatgggag

SEQ ID NO: 101090 - DNA, 80 bp, synthetic construct
  source 1..80: mol_type = other DNA
gagggccaggtctcattgtaaaggtccagtgtggactactgctacatcagacgatgccagaaaatggaaccaagggcact

SEQ ID NO: 101091 - DNA, 80 bp, synthetic construct
  source 1..80: mol_type = other DNA
caatgatgctatgtgagttcacacatccaaggtggcatcctataataataagaggatgttctatgttcacaaacaagtac

SEQ ID NO: 101092 - DNA, 80 bp, synthetic construct
  source 1..80: mol_type = other DNA
cctccaattcatttcaatcctagatggcagaaaagaactgcctgttgaggatgaatttgtgcaggatttatttgaaggct

SEQ ID NO: 101093 - DNA, 80 bp, synthetic construct
  source 1..80: mol_type = other DNA
cagagatggttatgaccatttgagccccgatgtgatcttcaagacaaccgcaaatagcttttttattgtggaattcacaa

SEQ ID NO: 101094 - DNA, 80 bp, synthetic construct
  source 1..80: mol_type = other DNA
atcatgggaacaaaacacttccttgggtaaaacctgggtgcacttatttgcagacgacaacagggatgatgcaggggatt

SEQ ID NO: 101095 - DNA, 80 bp, synthetic construct
  source 1..80: mol_type = other DNA
ttcatatcaaatattctgaagctaagtgttctaataaattcctggtgtagggtgtgtaggagtgaggaagtgtagtgaag

SEQ ID NO: 101096 - DNA, 80 bp, synthetic construct
  source 1..80: mol_type = other DNA
ggtgagggaagatatgagcactagagtggtagtggatatgatgcaggggtccgatgatagcgccatgttgtgtagtttcc

SEQ ID NO: 101097 - DNA, 80 bp, synthetic construct
  source 1..80: mol_type = other DNA
catgttcggatgagcacctcttatcaaagtgcaaggtggcagccacaatttgcttcagggttaaaaaactgctaggaatt

SEQ ID NO: 101098 - DNA, 80 bp, synthetic construct
  source 1..80: mol_type = other DNA
tatctggcaatctacccttcagaaaagagcacacaaaacacggactttgttttggaatataattctgaattcttcttcca

SEQ ID NO: 101099 - DNA, 80 bp, synthetic construct
  source 1..80: mol_type = other DNA
gtcttgccaccagggtctccacctcaggaagactacagctagcagcaacccacctaattgtaggtcttatgtgctgtgag

SEQ ID NO: 101100 - DNA, 80 bp, synthetic construct
  source 1..80: mol_type = other DNA
aagaggaagcctcaaatttgatgacctccatttctgaaggaggaggaacattctccctatctgccatgattcagcagagc

SEQ ID NO: 101101 - DNA, 80 bp, synthetic construct
  source 1..80: mol_type = other DNA
cagtgtacattgcactatatgctcatgggaatgggtgtctctgacctattctcagaatacaaaagagccattctcaagtg

SEQ ID NO: 101102 - DNA, 80 bp, synthetic construct
  source 1..80: mol_type = other DNA
gagagatcctggccttggattctttcttctcgacaaccctttctgtgcaggtctaggagggttcagacacaatttgtata

SEQ ID NO: 101103 - DNA, 80 bp, synthetic construct
  source 1..80: mol_type = other DNA
atgctgtgacaaaaacaaaccttgggaaagtgtatgcttattatctgaggaaggttgtaggcaagtcccaagacgatgaa

SEQ ID NO: 101104 - DNA, 80 bp, synthetic construct
  source 1..80: mol_type = other DNA
cctttagaggaggggaacggggttgcagagcagctgcaaataacaagttaataaagtatgaagttgcctgtgagtctaga

SEQ ID NO: 101105 - DNA, 80 bp, synthetic construct
  source 1..80: mol_type = other DNA
ttcaatgatgaagagaggtgtagtgtgagtgcaggcggggcgatagtcctgagctcatctctcaagtggggttcgaggaa

SEQ ID NO: 101106 - DNA, 80 bp, synthetic construct
  source 1..80: mol_type = other DNA
gaagtttcaacaacttcgagacagactggatatccctgacgactggatagaccagattaatgacaaccctgaagtcttat

SEQ ID NO: 101107 - DNA, 80 bp, synthetic construct
  source 1..80: mol_type = other DNA
accgagcccccaagacaggagcggagataatactaaggatttctgaaaagctacacagtcctggggttgtctcctctcta

SEQ ID NO: 101108 - DNA, 80 bp, synthetic construct
  source 1..80: mol_type = other DNA
tcaacaggcaatgcaatctgtaaggtcatggcatcctctgtctacttcttatcagctgcaatttttgaggacactggtaa

SEQ ID NO: 101109 - DNA, 80 bp, synthetic construct
  source 1..80: mol_type = other DNA
gccagagtttagacccttcaatgaatctagatatagtctcttacaaaggatgatgaagtatgaaatttatgaagaaggag

SEQ ID NO: 101110 - DNA, 80 bp, synthetic construct
  source 1..80: mol_type = other DNA
acagtgtcactaatgaagatctgattttcttattcccaaacattgaagacttgtctcagttgaacactattgttcacgac

SEQ ID NO: 101111 - DNA, 80 bp, synthetic construct
  source 1..80: mol_type = other DNA
aggaggaggattgaagtgatcaggaggcagggtgggagagaagccactcagactagagttgtggtctttgacacccccca

SEQ ID NO: 101112 - DNA, 80 bp, synthetic construct
  source 1..80: mol_type = other DNA
gatcaggatgtctcctgagaagctagtttctgacaagtggtttgcaacccaaaagtcaaaaatagggaaaacaggttttg

SEQ ID NO: 101113 - DNA, 80 bp, synthetic construct
  source 1..80: mol_type = other DNA
agactgaatgggcaaagctgaggcaagtggttaagtggttggatgacaccccatctgacaccttactcaaaagcccattg

SEQ ID NO: 101114 - DNA, 80 bp, synthetic construct
  source 1..80: mol_type = other DNA
cttaatcacatacagataaagaatttctttgcaagaatggagatcaggcctaggacagtcagagtcacaggagcacccgt

SEQ ID NO: 101115 - DNA, 80 bp, synthetic construct
  source 1..80: mol_type = other DNA
tcagcacgagagagacttggtttgtttgtgatagctgtacacagaaatggcatctggacaaacctctctctagaagacac

SEQ ID NO: 101116 - DNA, 80 bp, synthetic construct
  source 1..80: mol_type = other DNA
gaagaagagatctggattaagcaagttgtcagtagtgatccgtgataacttctgcagaggtggctatgtgaaggggatag

SEQ ID NO: 101117 - DNA, 80 bp, synthetic construct
  source 1..80: mol_type = other DNA
aggacgtaagcggagctcataggagtatgtgggcagagctgattaaacatttgttgttttgtgttttgcaagggcctttt

SEQ ID NO: 101118 - DNA, 80 bp, synthetic construct
  source 1..80: mol_type = other DNA
tcacaagacatgaagatacagctgattcaaaagacactgtacgactccccggtcattgatctaaaggagtctgatgggaa

SEQ ID NO: 101119 - DNA, 80 bp, synthetic construct
  source 1..80: mol_type = other DNA
aacaaagaccaatctgatatctataatgcaaagatacatacatggcgagaaagatgtcctcgatgtgattgagaatgttg

SEQ ID NO: 101120 - DNA, 80 bp, synthetic construct
  source 1..80: mol_type = other DNA
gggcagggattgttggcgggtttgtggttaggcagaaaacaaaggtggacaatggaagggtcctctactacggtcatgga

SEQ ID NO: 101121 - DNA, 80 bp, synthetic construct
  source 1..80: mol_type = other DNA
atctggagaggggttatggatggggttcaggtccaaattgatgttgacaatcacataggtgctcccactaacattgttgc

SEQ ID NO: 101122 - DNA, 80 bp, synthetic construct
  source 1..80: mol_type = other DNA
agtctatatggccaggtctagtgttgggccctgggagctgttgaggactattaaggcttgggcagaggatcagaacataa

SEQ ID NO: 101123 - DNA, 80 bp, synthetic construct
  source 1..80: mol_type = other DNA
gaaatacagatgatgtatcaagaacatccaggaggggtgcccactactggatgcaccagttcaagctaacagcttcaaac

SEQ ID NO: 101124 - DNA, 80 bp, synthetic construct
  source 1..80: mol_type = other DNA
cttcaatttggggcgccagtgatcatggttgaggggagaatggaggcaatatgggacagagagtctgagaacctcgaaat

SEQ ID NO: 101125 - DNA, 80 bp, synthetic construct
  source 1..80: mol_type = other DNA
gacaatcacaaggtctactgtcaacattggaattgttaatgagggtaatgaaagaaggatgaacatcttgtcctatactg

SEQ ID NO: 101126 - DNA, 80 bp, synthetic construct
  source 1..80: mol_type = other DNA
tgaggtcaatgagctagtattcaggtatagaactgctctagacatctttgaagacctcaaaagaaggtaccctgagctat

SEQ ID NO: 101127 - DNA, 80 bp, synthetic construct
  source 1..80: mol_type = other DNA
caacagatggagatctcagtccagagataattgatatattgccgtcagtagaaacaggaaatgtcttaagacactactca

SEQ ID NO: 101128 - DNA, 80 bp, synthetic construct
  source 1..80: mol_type = other DNA
ggacggctaatcaatgcttgggtctactgcagggaactagaattgagggacattcgcagactctccaagatgtacgagag

SEQ ID NO: 101129 - DNA, 80 bp, synthetic construct
  source 1..80: mol_type = other DNA
tggccatgaaggctctataatagatgtagacaggatgaaggatattgttaagacatgtatagagagctctctcaagtcaa

SEQ ID NO: 101130 - DNA, 80 bp, synthetic construct
  source 1..80: mol_type = other DNA
aaataggagcatcattctcttctgtagtgcaaaaggacgacttagaccccaactttgatatgagtgccattgtggagatg

SEQ ID NO: 101131 - DNA, 80 bp, synthetic construct
  source 1..80: mol_type = other DNA
atgatagaggacaccagtacagatatgttcagatgtatagcccaaagactagaggaagatatcaaagtgtcatatgatga

SEQ ID NO: 101132 - DNA, 80 bp, synthetic construct
  source 1..80: mol_type = other DNA
tgctgagtttgataaagatgacattgacctttttgggccttctcattatagggaagttaccaatctagctatggtgtctc

SEQ ID NO: 101133 - DNA, 80 bp, synthetic construct
  source 1..80: mol_type = other DNA
accccttaatggataaatttgtggaccacttagttgacaagatggggaggaaggacctaagaagactcattagcacctgc

SEQ ID NO: 101134 - DNA, 80 bp, synthetic construct
  source 1..80: mol_type = other DNA
tgtgtgtcagaaaaaaacctagataaagctaaattactattcacatttctacagagagacttgtccttaattgaggtaga

SEQ ID NO: 101135 - DNA, 80 bp, synthetic construct
  source 1..80: mol_type = other DNA
tagttcagaagatgagctactgagtggcagtgattcagatgggtttatttaagaagaaacattgaactgatacaataaga

SEQ ID NO: 101136 - DNA, 80 bp, synthetic construct
  source 1..80: mol_type = other DNA
ttaagcaatggctatctgactggccagccagagagaagaccctttattgtacgccacattctaaatgaacttgattgtgt

SEQ ID NO: 101137 - DNA, 80 bp, synthetic construct
  source 1..80: mol_type = other DNA
gaccctttattgtacgccacattctaaatgaacttgattgtgtcattattccattattacattacaggcggtctttgtgt

SEQ ID NO: 101138 - DNA, 80 bp, synthetic construct
  source 1..80: mol_type = other DNA
ctgtggacaatgaagatctaactagagcagaaagtgaactgaggggcattgtgtcttcaatacagctggattggaaaaaa

SEQ ID NO: 101139 - DNA, 80 bp, synthetic construct
  source 1..80: mol_type = other DNA
acttcatctgctttcccacattttaagagagaggtcatcgagagctttagaaacttctctcctgatgaggaatacttgtc

SEQ ID NO: 101140 - DNA, 80 bp, synthetic construct
  source 1..80: mol_type = other DNA
aacacattgcagtgactcattgatgaatgcctatctgcctcaatttgtgatcttacctgataaagatggagtttcaatag

SEQ ID NO: 101141 - DNA, 80 bp, synthetic construct
  source 1..80: mol_type = other DNA
aagaattgtttctggtgtaattgacaaagcacagaaggatctggttagggaaacattttctggcatgcttggtgaacatg

SEQ ID NO: 101142 - DNA, 80 bp, synthetic construct
  source 1..80: mol_type = other DNA
aggatagattcactatgaatgaaaaggaatgtggggccatccttgagaagagcgtggagggctactacacagggagggag

SEQ ID NO: 101143 - DNA, 80 bp, synthetic construct
  source 1..80: mol_type = other DNA
ttcaggcacactaatgactgcaaatcgactgttcagatccctgcatgggtgacagtcccagggcaacctggaaaatctct

SEQ ID NO: 101144 - DNA, 80 bp, synthetic construct
  source 1..80: mol_type = other DNA
ttacctgcctagaagaccttgcagcccgcagcgaagcaagtaagtgcaagtgtggggctaattaggtctctctccttttt

SEQ ID NO: 101145 - DNA, 80 bp, synthetic construct
  source 1..80: mol_type = other DNA
tccctttaattttaaggttaaatggcgcctcccaggaaaagaccccggtgtgccccaccaagtaaagtaacttgtgtgcc

SEQ ID NO: 101146 - DNA, 80 bp, synthetic construct
  source 1..80: mol_type = other DNA
aaagaagtgtcctatacctactccagtgcctaaattgctggttaaaggaggagttgaagttttaaatattattactgggc

SEQ ID NO: 101147 - DNA, 80 bp, synthetic construct
  source 1..80: mol_type = other DNA
ctgatgctactactgaaattgaactctggttagaacccaggatgggtgtaaatgctccaacaggtgacagaaaggaatgg

SEQ ID NO: 101148 - DNA, 80 bp, synthetic construct
  source 1..80: mol_type = other DNA
tatggctatagtgaagtgatacatcatgcagatgggtatgacaacaatttgctgagtgtacagatgcctcaatatagttg

SEQ ID NO: 101149 - DNA, 80 bp, synthetic construct
  source 1..80: mol_type = other DNA
tgcaagggtacaattgcctatgctgaatactgacatgacctgtgaaacactcatgatgtgggaagctgtgtcatgtaaaa

SEQ ID NO: 101150 - DNA, 80 bp, synthetic construct
  source 1..80: mol_type = other DNA
ctgaggtggtagggattggctcactgataagtgtacatctgcttgaggctaaaatggaggcaggacctaattcagatggg

SEQ ID NO: 101151 - DNA, 80 bp, synthetic construct
  source 1..80: mol_type = other DNA
ccttctagacctatagaaggcatgaattatcatatgtttgctgttggaggagaacctctagatttgcaaggtatagaaag

SEQ ID NO: 101152 - DNA, 80 bp, synthetic construct
  source 1..80: mol_type = other DNA
actggttgccaccaagtccgggaaggcagccaaggtcagggctgcctgccaatgtggttaattattacacttgggaacca

SEQ ID NO: 101153 - DNA, 80 bp, synthetic construct
  source 1..80: mol_type = other DNA
taatgggcaaacaaaatatgctactgctataccagccaaaagtatacatccaaatgatatagctaaactgcctgaggaag

SEQ ID NO: 101154 - DNA, 80 bp, synthetic construct
  source 1..80: mol_type = other DNA
ataaggctcaacttcaaggcctagtcccaaaggctaaagctaagcttgataaagatggattttatccagtagaagaatgg

SEQ ID NO: 101155 - DNA, 80 bp, synthetic construct
  source 1..80: mol_type = other DNA
agccctgacccctctagaaatgagaattctagatattatggatcttttgtaggaggtctacaaacccctcctaatttgca

SEQ ID NO: 101156 - DNA, 80 bp, synthetic construct
  source 1..80: mol_type = other DNA
attcacaaatgcagtaagtacagtacttttggatgagaatggagtaggccctctgtgtaagggggatggtttgtttgtgt

SEQ ID NO: 101157 - DNA, 80 bp, synthetic construct
  source 1..80: mol_type = other DNA
cttgtgcagatatttgtggtgtcttggtaaaggcagacaatgaagctattaggtacagaggcctacccagatattttaaa

SEQ ID NO: 101158 - DNA, 80 bp, synthetic construct
  source 1..80: mol_type = other DNA
gtaactttgagaaaaagggctgtaaaaaatccatatcctataaccagcttgctgggaagtctatttacaggcctcatgcc

SEQ ID NO: 101159 - DNA, 80 bp, synthetic construct
  source 1..80: mol_type = other DNA
taaaatggatggacagcctatgtcagggcctgatgctcaggttgaggaagtgagaatttatcaaggaaaagagggtcttc

SEQ ID NO: 101160 - DNA, 80 bp, synthetic construct
  source 1..80: mol_type = other DNA
ctgcagaccctgatatgaaaagatatattgatcagtttggtcaggaacaaacccctactccaaccccagcagcccctgca

SEQ ID NO: 101161 - DNA, 80 bp, synthetic construct
  source 1..80: mol_type = other DNA
gctgttgcagctcttatggaaaagtggaaggaaatgtactcagaggaacataagtttgaccaaatacacaagtggggatt

SEQ ID NO: 101162 - DNA, 80 bp, synthetic construct
  source 1..80: mol_type = other DNA
tagctacccaggatacctatttacagagaaggaatctgcaaaacagaaaccacgagaggtccaaatgccccagaagaccc

SEQ ID NO: 101163 - DNA, 80 bp, synthetic construct
  source 1..80: mol_type = other DNA
caggcggcgcgtggctgctcgccaaacacagcagtaaattgaaggaagttgactctgtgtgatcattgtgaccagccagg

SEQ ID NO: 101164 - DNA, 80 bp, synthetic construct
  source 1..80: mol_type = other DNA
aaacccaggggacagaagtgctaacagagcaaaacctaattactgaagaatatacaacttctgcttctccccctccatct

SEQ ID NO: 101165 - DNA, 80 bp, synthetic construct
  source 1..80: mol_type = other DNA
cttggcggaacaacagatctgcaaaaattaccaggcactgaatctgtttaaacttgaatatatgtttattaaatgtaata

SEQ ID NO: 101166 - DNA, 80 bp, synthetic construct
  source 1..80: mol_type = other DNA
aagtttaataaagttaatgaatatcaattatctccttcatctattaagtcagttaaagggctttctcccacttcaatgtt

SEQ ID NO: 101167 - DNA, 80 bp, synthetic construct
  source 1..80: mol_type = other DNA
ttcaagcattttacaaaagtcagaatggcttacagtcttttcaattatacatttccaattagcaatttcttcttgtagag

SEQ ID NO: 101168 - DNA, 80 bp, synthetic construct
  source 1..80: mol_type = other DNA
acacagcaaattttttcacaggggtataccaaattaacaaaagaaaaagagtgaggcctttctgtaaaattctattagct

SEQ ID NO: 101169 - DNA, 80 bp, synthetic construct
  source 1..80: mol_type = other DNA
actaggcctggagttttgtctacagcagactgtaaatttggtctgcttacaaaatctaattttaagctaaacctcacaaa

SEQ ID NO: 101170 - DNA, 80 bp, synthetic construct
  source 1..80: mol_type = other DNA
taagctaaacctcacaaagagtgtctggggcataaaatattcattcattgtcattacacaggggggaaatacctgacttc

SEQ ID NO: 101171 - DNA, 80 bp, synthetic construct
  source 1..80: mol_type = other DNA
gagtgtctggggcataaaatattcattcattgtcattacacaggggggaaatacctgacttcttttgttcatatgctttt

SEQ ID NO: 101172 - DNA, 80 bp, synthetic construct
  source 1..80: mol_type = other DNA
tatccaagttagaaatgccctggcctggctgtaactttttattgagcatattttgacctttcacatcctcaaacactaca

SEQ ID NO: 101173 - DNA, 80 bp, synthetic construct
  source 1..80: mol_type = other DNA
aaaaatctgtcaattgcacaaccaagttcaaagttcagcttatcagctggacaattcacatttaaagatcttccccctaa

SEQ ID NO: 101174 - DNA, 80 bp, synthetic construct
  source 1..80: mol_type = other DNA
taaatcaaccaaagctgctgcaaaagtagtctttccactgttcacaggccctctaaataatatatttctttgcttaggaa

SEQ ID NO: 101175 - DNA, 80 bp, synthetic construct
  source 1..80: mol_type = other DNA
cgaaacagagacacgcgaccaaacaagagaaagcaagttactgttatttcttgtaagtaaaacttaattttttaattctt

SEQ ID NO: 101176 - DNA, 80 bp, synthetic construct
  source 1..80: mol_type = other DNA
tattttgagttagtagttttaatatttgaaataatatatcatcaaagttctcaaagagatttgcataccaagctactcct

SEQ ID NO: 101177 - DNA, 80 bp, synthetic construct
  source 1..80: mol_type = other DNA
gccatatgatcatatatttctaatgtatctaatgcctgcaaagcttttaactgcttttgaaagcacatagctaataactc

SEQ ID NO: 101178 - DNA, 80 bp, synthetic construct
  source 1..80: mol_type = other DNA
ctctctggtactctcagttaataataaccttctctttgctaacactatatcactggcttgattacagattgacctttgac

SEQ ID NO: 101179 - DNA, 80 bp, synthetic construct
  source 1..80: mol_type = other DNA
ttttacatgcctcaaacaaaacagcattttcatgatgagccttatgatagtcatgagcttttgttttctgatgctcacat

SEQ ID NO: 101180 - DNA, 80 bp, synthetic construct
  source 1..80: mol_type = other DNA
ttcaaacaaggaaatggttgagcaaaatcaagatagtgagctaagattaataaagggtcatctatatcagccaacacagc

SEQ ID NO: 101181 - DNA, 80 bp, synthetic construct
  source 1..80: mol_type = other DNA
aaattcagccaccttattccaattacagttttcttcttttttatcttcaaaatcataactaaacagtccatctttgttag

SEQ ID NO: 101182 - DNA, 80 bp, synthetic construct
  source 1..80: mol_type = other DNA
ctttaacttgggaaaaaggaggtttacataaacattgataacattccaaaggcttaagcacaactttacaaataagaaag

SEQ ID NO: 101183 - DNA, 80 bp, synthetic construct
  source 1..80: mol_type = other DNA
ctgacagtacaaaactgttggcaaaaatttttcatggctgagaccctatgttttgcaatagtcataactaaaaccagacc

SEQ ID NO: 101184 - DNA, 80 bp, synthetic construct
  source 1..80: mol_type = other DNA
ccctcccacatttgctccttcagttaatttatgcaagcttttaaattctattttaaacttgtcaattttctcatacagca

SEQ ID NO: 101185 - DNA, 80 bp, synthetic construct
  source 1..80: mol_type = other DNA
aagaagctttttctaaagtactatataaaataaatgcatttactgttttattgctaaatatagcgtgactgacaaaatca

SEQ ID NO: 101186 - DNA, 80 bp, synthetic construct
  source 1..80: mol_type = other DNA
tttagaatgggaggccttttgtcttccttggtggatatgattgtgatggctactgaactaagtgcagcatcgggattgac

SEQ ID NO: 101187 - DNA, 80 bp, synthetic construct
  source 1..80: mol_type = other DNA
aacaaacaagaaggcaaatcagaaggactatcaggacttttccttttttgttttggtggtgtgctcgcaaagcttgtttg

SEQ ID NO: 101188 - DNA, 80 bp, synthetic construct
  source 1..80: mol_type = other DNA
cgagtcagtataagatccatccaaatcttcagtacctcttcttctctttggtggagactctctctcagtctctgtatttc

SEQ ID NO: 101189 - DNA, 80 bp, synthetic construct
  source 1..80: mol_type = other DNA
ttcctgcagaagagcttccggatgcagacgaactctcggggaattgaggctcactgaacggcgggggtacttcttgggag

SEQ ID NO: 101190 - DNA, 80 bp, synthetic construct
  source 1..80: mol_type = other DNA
gcagtggaggtggaaggggttggggtggaagtaaaggggaaagagttgtatcctgaactttgggtttcatcttcttcatc

SEQ ID NO: 101191 - DNA, 80 bp, synthetic construct
  source 1..80: mol_type = other DNA
agaggaggaggagatgggggactcatcacagtgtagatctgctctcgagtcagacttttcattggtaaatactgaggagc

SEQ ID NO: 101192 - DNA, 80 bp, synthetic construct
  source 1..80: mol_type = other DNA
accagcttgcatatctctttctgaagttggcgctgccataggaatcagaaaagacctgcaaaataaaaaaattaagtatt

SEQ ID NO: 101193 - DNA, 80 bp, synthetic construct
  source 1..80: mol_type = other DNA
ggatttaaaaaattgaataaatttaaaataaaaatacttactaggagacaattgtagcaaagcggcaggcatctgagcaa

SEQ ID NO: 101194 - DNA, 80 bp, synthetic construct
  source 1..80: mol_type = other DNA
tcacatgcttccatatctcaaaggttttccaggtttctctcaatccaaaccacagaataaagcaagaaaagcagaagcag

SEQ ID NO: 101195 - DNA, 80 bp, synthetic construct
  source 1..80: mol_type = other DNA
tttccccaggttaagcacctttttttcccacaaagttttatctgtctatgttgattatacaaacaactagtaatgcaaga

SEQ ID NO: 101196 - DNA, 80 bp, synthetic construct
  source 1..80: mol_type = other DNA
acaagaagtaggtcctttcagcaagcattgagggcttcttaaaaataattcatgaaaaactttagggctacagcatttta

SEQ ID NO: 101197 - DNA, 80 bp, synthetic construct
  source 1..80: mol_type = other DNA
aatggaagctctactaactggggaagccctagctgctttagaaacggaagttttttccctgatgactgtagaaggcttgt

SEQ ID NO: 101198 - DNA, 80 bp, synthetic construct
  source 1..80: mol_type = other DNA
gcagtgaagaatcataacaatcagaaaaagaaacttgacatacctctgagtctcttacttcaatgagaccctcttgaaat

SEQ ID NO: 101199 - DNA, 80 bp, synthetic construct
  source 1..80: mol_type = other DNA
ttttgccagagagaatttaaaagcatcattttttcactgctacctcctttgtcaggatgatagattttagaagccctttt

SEQ ID NO: 101200 - DNA, 80 bp, synthetic construct
  source 1..80: mol_type = other DNA
ataagcagttttcattataggaaaattcccataagcatatctgggtattcctaaaagttctataagcatttctttatcac

SEQ ID NO: 101201 - DNA, 80 bp, synthetic construct
  source 1..80: mol_type = other DNA
aattcccataagcatatctgggtattcctaaaagttctataagcatttctttatcactcttttccagtactttctccatt

SEQ ID NO: 101202 - DNA, 80 bp, synthetic construct
  source 1..80: mol_type = other DNA
caggaatagaagctttagctcagcttgggtggactgctgaacagttttcaaatatggcattcatatcaactactttctca

SEQ ID NO: 101203 - DNA, 80 bp, synthetic construct
  source 1..80: mol_type = other DNA
aatgccataggatatggtgtgttatttcaaacagtctcaggaattagttcactaatttccgctgggattaggttgggaac

SEQ ID NO: 101204 - DNA, 80 bp, synthetic construct
  source 1..80: mol_type = other DNA
aagtgtttcttctgtaaacagacatcaaactgagcaagaacttgagactatatttggaaaaatagctcatctgattcatg

SEQ ID NO: 101205 - DNA, 80 bp, synthetic construct
  source 1..80: mol_type = other DNA
ataagattgaggtagaggcaagaggcctcctgcctcaccacaaattaaaaaaaaaacatctctatgtttgagccctcctg

SEQ ID NO: 101206 - DNA, 80 bp, synthetic construct
  source 1..80: mol_type = other DNA
tgaacttggctttccatctaaatccttttaactggtgtgagtccataggtgggactgttcccacagaatttaatttcctg

SEQ ID NO: 101207 - DNA, 80 bp, synthetic construct
  source 1..80: mol_type = other DNA
tctttagatcagctaagtaaactaggagttgttattgaaaatgggcggtgggtaattcaaactacccccagctttgatcc

SEQ ID NO: 101208 - DNA, 80 bp, synthetic construct
  source 1..80: mol_type = other DNA
tatgtttgaaagtggaatattgattgaaaggtatgagccacctgggggagcatatcaaagagccacacctgactggatgc

SEQ ID NO: 101209 - DNA, 80 bp, synthetic construct
  source 1..80: mol_type = other DNA
aagattaataggtactaattaatacttaggaatccagtttctaaagtttcgctttggaattggattcatttaattgaggc

SEQ ID NO: 101210 - DNA, 80 bp, synthetic construct
  source 1..80: mol_type = other DNA
ccagagctccttatattgttcttctagaggattctattcaaactaagtttgcccctggcagctatcctctactgtggagc

SEQ ID NO: 101211 - DNA, 80 bp, synthetic construct
  source 1..80: mol_type = other DNA
tttctttgccttgaatgcacctcctcagatcccttgtacaaagcaaatctatctaatagcacattccatttggtgatact

SEQ ID NO: 101212 - DNA, 80 bp, synthetic construct
  source 1..80: mol_type = other DNA
gaggcataacaaggatgagaaaatagtttcaatgcctagctttaacctttctactgatcaagagtatgttcagataatcc

SEQ ID NO: 101213 - DNA, 80 bp, synthetic construct
  source 1..80: mol_type = other DNA
ctgcagaaggtggcggcacagcagagagtggcaatctttacttcccttgtattggaaggctcttacacaaacgagtcacc

SEQ ID NO: 101214 - DNA, 80 bp, synthetic construct
  source 1..80: mol_type = other DNA
catcctttatgcaaaaagtcaaattgttcgcgaactgatgatgaatcttgcctgaaaagttattacaatcaagggtcgcc

SEQ ID NO: 101215 - DNA, 80 bp, synthetic construct
  source 1..80: mol_type = other DNA
tcagcaccaagtagtcaactgtctgataaggatcagaaatgcacagagagataatccaacctgggatgttatcacagttg

SEQ ID NO: 101216 - DNA, 80 bp, synthetic construct
  source 1..80: mol_type = other DNA
atctgactaatacatacccaggatcaaggagcaggatctttggaagcttctccaaaccgatgctttatcaatcatcagta

SEQ ID NO: 101217 - DNA, 80 bp, synthetic construct
  source 1..80: mol_type = other DNA
tcatggcatactcttcttcaggtagcagagataacagacctagataagtatcaattggactggttggatacaccctatat

SEQ ID NO: 101218 - DNA, 80 bp, synthetic construct
  source 1..80: mol_type = other DNA
atctcgtcctggaggatctgagtgccctttcggaaattattgtccaacggtatgctgggaagggacatataatgatgtct

SEQ ID NO: 101219 - DNA, 80 bp, synthetic construct
  source 1..80: mol_type = other DNA
atagcttaactccaaataacgatctttttgtcactgtgtatttgaagagtgaacaagttgcagagaacccttatttcgca

SEQ ID NO: 101220 - DNA, 80 bp, synthetic construct
  source 1..80: mol_type = other DNA
atcttctcccgggatcaaatcttgaaagaattccctcttgatgcatggataagcagtgcacgaactacgacaatatcgtg

SEQ ID NO: 101221 - DNA, 80 bp, synthetic construct
  source 1..80: mol_type = other DNA
ttcgcaatgggtgtagggacaacgctggacaaagccatgactgctctaaatataaatagaggatacttggagccagttta

SEQ ID NO: 101222 - DNA, 80 bp, synthetic construct
  source 1..80: mol_type = other DNA
cttcatgttcaacaatgaaatttggtgtatagctgcattagagatcacaagattgaatgatgacatcataagaccaattt

SEQ ID NO: 101223 - DNA, 80 bp, synthetic construct
  source 1..80: mol_type = other DNA
attactctttctggctgcctactgattgccggacaccatatccccacaccggtaagatgaccagggttcccttgcgctcc

SEQ ID NO: 101224 - DNA, 80 bp, synthetic construct
  source 1..80: mol_type = other DNA
acatataactactaattgtatgtaatcagttaaaggaatctattatttctcttctccattatctgattatatcctaagaa

SEQ ID NO: 101225 - DNA, 80 bp, synthetic construct
  source 1..80: mol_type = other DNA
aaacttaggaattcagggtactgcccttaatgacttgcactaatatcaaaatttcaatatacgacgaatgtgattggctt

SEQ ID NO: 101226 - DNA, 80 bp, synthetic construct
  source 1..80: mol_type = other DNA
gtattatcatcataactacctccagccgtatcactgacaaaagatttataagcactggatcacggagtcagagttcaaag

SEQ ID NO: 101227 - DNA, 80 bp, synthetic construct
  source 1..80: mol_type = other DNA
cttactaacgtcaacctcattatatctagttggtgttacagggttacttcgagtcatatatgtaattgcacctgataata

SEQ ID NO: 101228 - DNA, 80 bp, synthetic construct
  source 1..80: mol_type = other DNA
cctctctcatctagtacattacctcaacagtatgatctcggggatccaactacacctcgacaactcataacaatcaacta

SEQ ID NO: 101229 - DNA, 80 bp, synthetic construct
  source 1..80: mol_type = other DNA
aatctgcctcacaattgaccattgccattctctcagtcataaaaaggatcatcccaactgattgattatttctttaaacc

SEQ ID NO: 101230 - DNA, 80 bp, synthetic construct
  source 1..80: mol_type = other DNA
ctaaacgtaaattattcaatcatgtaaaataaacataatactttcagatctacagtgatagagttcttaaatttattcca

SEQ ID NO: 101231 - DNA, 80 bp, synthetic construct
  source 1..80: mol_type = other DNA
atataatcctattaattagcattgagagatctcccatgacatcacttttccagtcagttaaatctcagaaatccactaac

SEQ ID NO: 101232 - DNA, 80 bp, synthetic construct
  source 1..80: mol_type = other DNA
cttcaggctcggccaacgtatggcacgaaacagagtaggaactgttgacactcgaatggctgcagaacttgggctcactt

SEQ ID NO: 101233 - DNA, 80 bp, synthetic construct
  source 1..80: mol_type = other DNA
tgagctaccgtcgaagtcaagcatggagttggaaggtaacgtctcattaacagatatcctctatccagagtgtcatctag

SEQ ID NO: 101234 - DNA, 80 bp, synthetic construct
  source 1..80: mol_type = other DNA
atagtcctttagttacagggaaattgatacaagctctagagtatgcaaatctaactcacaaccaataccttaaggataaa

SEQ ID NO: 101235 - DNA, 80 bp, synthetic construct
  source 1..80: mol_type = other DNA
actttactaaacaatatccaactgaataagtctaaaggaaagagatcccgatacacaattgctcaagaacaattcggtaa

SEQ ID NO: 101236 - DNA, 80 bp, synthetic construct
  source 1..80: mol_type = other DNA
ttttattaaagacaagatcaataatcttagtcagttctaccatgttccttaccctgagtgcaactataatctctttcggt

SEQ ID NO: 101237 - DNA, 80 bp, synthetic construct
  source 1..80: mol_type = other DNA
tatcatctgacagaattgttgccagattaagtgatgtgctaaaagtgccttatgattgctacctatccaatattgaaaaa

SEQ ID NO: 101238 - DNA, 80 bp, synthetic construct
  source 1..80: mol_type = other DNA
ctactagggatgttaactgcggtcgaccgcaaactaggaggacagccgctgtgtaaggatgtcactggttcggcacctga

SEQ ID NO: 101239 - DNA, 80 bp, synthetic construct
  source 1..80: mol_type = other DNA
tgataagcttgtacatttacctgatacaatgaaacagagtgactggtacatgcctttcttgttctggttcactgtcaaga

SEQ ID NO: 101240 - DNA, 80 bp, synthetic construct
  source 1..80: mol_type = other DNA
ctgagctcaggttactacagaaagaatcacagaaagtcaagaacagaggaagctctaacattgttcagttcggtgacaat

SEQ ID NO: 101241 - DNA, 80 bp, synthetic construct
  source 1..80: mol_type = other DNA
catcttactgttgtaatgaacccttctttagtgaccatctgggctcagaagtctaaacaatgctattacctaactcctga

SEQ ID NO: 101242 - DNA, 80 bp, synthetic construct
  source 1..80: mol_type = other DNA
gcatgtattgatgttctgtgacgtccttgagggaaggttaatgatagatgtcacagtcaaatccgatgataggtacaaat

SEQ ID NO: 101243 - DNA, 80 bp, synthetic construct
  source 1..80: mol_type = other DNA
ctgatcaactatcagacctctcaacagccattgttgagtccaatgttgggaagcaggaattaacatcagcaaccagagaa

SEQ ID NO: 101244 - DNA, 80 bp, synthetic construct
  source 1..80: mol_type = other DNA
cattaagaactaagtcaaaagaactctgggaattaatagatcctttttttcctataatagggaatgagacgtataatatt

SEQ ID NO: 101245 - DNA, 80 bp, synthetic construct
  source 1..80: mol_type = other DNA
gtttcaatgttagagccttttacccttgcaactctacaactgaaagacaggtctcaacaattaaggggtgcattcttaca

SEQ ID NO: 101246 - DNA, 80 bp, synthetic construct
  source 1..80: mol_type = other DNA
ccattgtatcaaagatttgaagagtgagttagtatctaacggttttactgatgatgaaaaaattgagagattctgcgaca

SEQ ID NO: 101247 - DNA, 80 bp, synthetic construct
  source 1..80: mol_type = other DNA
aacttgtcaacatactaaataacaacgatatacatatgatagcagaaatgttttctttctttagaacatttggacatcct

SEQ ID NO: 101248 - DNA, 80 bp, synthetic construct
  source 1..80: mol_type = other DNA
actctcgaggcagttacagcagcttcaaaggtcagagattacatgaaagcagacaaagttttagaatacgagacaattat

SEQ ID NO: 101249 - DNA, 80 bp, synthetic construct
  source 1..80: mol_type = other DNA
gaaaggccatgcaattttctgtggaataattatcaatggttaccgtgataaacatggaggggtttggcctcctctaacct

SEQ ID NO: 101250 - DNA, 80 bp, synthetic construct
  source 1..80: mol_type = other DNA
ttccaaagcatgtacatcaggaaatcaaaagactacaatcatcaggggaaagactgacttatgaaatatgtattaaacac

SEQ ID NO: 101251 - DNA, 80 bp, synthetic construct
  source 1..80: mol_type = other DNA
tggaaatcattttgcgggctgaattttaaatgttttatggatcttaatttggatgaagacttgagcatgtatatgaagga

SEQ ID NO: 101252 - DNA, 80 bp, synthetic construct
  source 1..80: mol_type = other DNA
taaagctcttgctgctataaggaatgagtgggacagtgtttatcctaaggaaaatctctcttaccagccaacaaaaaata

SEQ ID NO: 101253 - DNA, 80 bp, synthetic construct
  source 1..80: mol_type = other DNA
caactcctaggaggttagtggattactttatcaatgatgaagatttcgatccttatagcatgctccagtatgtgataaac

SEQ ID NO: 101254 - DNA, 80 bp, synthetic construct
  source 1..80: mol_type = other DNA
ggaagatttgcttccagtgctcccaacatcattgaagttgatgaggaatcagaagatgagcaacctcaacccagacaagg

SEQ ID NO: 101255 - DNA, 80 bp, synthetic construct
  source 1..80: mol_type = other DNA
ggtgattatctgaatgatcctgatttcaatgtatcgtatagtctaaaagagaaagagacaaaggaagtaggaagactctt

SEQ ID NO: 101256 - DNA, 80 bp, synthetic construct
  source 1..80: mol_type = other DNA
ttatggctgaatcattaattgcacatggagtcgggaaattctttaaagagaatggaatggtcaaagatgagcaagatttg

SEQ ID NO: 101257 - DNA, 80 bp, synthetic construct
  source 1..80: mol_type = other DNA
ctgaagtcactttttcagatgtcaatctctggtgtccctagaggaaatatcagaggtggtgctccatctaagatgagtca

SEQ ID NO: 101258 - DNA, 80 bp, synthetic construct
  source 1..80: mol_type = other DNA
atctgaaagaaagatgcgatctcaggacttttacaaatgtcaagtgcacaagcaacacaatgcttctgcgaaagcaaagt

SEQ ID NO: 101259 - DNA, 80 bp, synthetic construct
  source 1..80: mol_type = other DNA
ctcctattgatgataaagggtgttcggaactttgtcaaaggataagagagaatgcacagtacaacagggttattggtaga

SEQ ID NO: 101260 - DNA, 80 bp, synthetic construct
  source 1..80: mol_type = other DNA
tcaagccataattccaaaaataagaatatatataagaaagatttcttttacatgcattatggattagacccaagagactc

SEQ ID NO: 101261 - DNA, 80 bp, synthetic construct
  source 1..80: mol_type = other DNA
aattatcaaggatctcacagctgaagagactgttaaaaggtttgaagaggagaacaacattaagtatgatgttatcagct

SEQ ID NO: 101262 - DNA, 80 bp, synthetic construct
  source 1..80: mol_type = other DNA
cgtttttgactacagattacaagaagttttgtcttaactggagacatgagtcggtagcaatattcgctagaagaatggac

SEQ ID NO: 101263 - DNA, 80 bp, synthetic construct
  source 1..80: mol_type = other DNA
gaaatttacggattgccaaattttttcaactggatgcacaaaatcctagataaaagtacaatttatgtggcagaccctaa

SEQ ID NO: 101264 - DNA, 80 bp, synthetic construct
  source 1..80: mol_type = other DNA
ctgcccaccgagtaacaggagtcatgtagatctagattttcaacctgacgaccacatctatatagttcatcctaagggag

SEQ ID NO: 101265 - DNA, 80 bp, synthetic construct
  source 1..80: mol_type = other DNA
acaacaggcacaatttagagcacagccaacaggcattcaaggaagggaaacccagacaacctctggagttgggaaatcaa

SEQ ID NO: 101266 - DNA, 80 bp, synthetic construct
  source 1..80: mol_type = other DNA
gcttatgagacaggaactaggattgcagctgttgttcaaggggataaccagtcaatagcaatcaccaccaaggtacatcc

SEQ ID NO: 101267 - DNA, 80 bp, synthetic construct
  source 1..80: mol_type = other DNA
aagtctcccctataaaattaagaaagaaattagtgcaagtaaagccaaagaatatttctacagacttagagataatttga

SEQ ID NO: 101268 - DNA, 80 bp, synthetic construct
  source 1..80: mol_type = other DNA
gatcacttggacacgacatgaaggcaactgaaacagtcattagcacaaacttttttatatactctaagaggatttattat

SEQ ID NO: 101269 - DNA, 80 bp, synthetic construct
  source 1..80: mol_type = other DNA
gatggagtaatgctgtcccaagggttgaagacaatatccagatgtgtcttctggtctgagaccttagtggatgaaacaag

SEQ ID NO: 101270 - DNA, 80 bp, synthetic construct
  source 1..80: mol_type = other DNA
taaccaaatcaatagaaaatggaattgatcatcgtttcggattttgtctcaattatcttaagactatgcagcaactctca

SEQ ID NO: 101271 - DNA, 80 bp, synthetic construct
  source 1..80: mol_type = other DNA
atttccttgaatttctcaattaatgaaacaataacagatgacattaagatggcatttacaaatcatcctgaatggtataa

SEQ ID NO: 101272 - DNA, 80 bp, synthetic construct
  source 1..80: mol_type = other DNA
aatatcatctatgataccagctgcactcgggggtttcaattatttgaacgtgtcaagactgtacgtgaggaatataggtg

SEQ ID NO: 101273 - DNA, 80 bp, synthetic construct
  source 1..80: mol_type = other DNA
atgtattggtggcctcattagcagatattaaaagatatataagtaacaatctactgagagacgagatcatccagaaaatc

SEQ ID NO: 101274 - DNA, 80 bp, synthetic construct
  source 1..80: mol_type = other DNA
tacaagaactgagaagcaggctccaaggaaacaggggtctgaatactagcaaggtccaacagagaaatcaaatagatgat

SEQ ID NO: 101275 - DNA, 80 bp, synthetic construct
  source 1..80: mol_type = other DNA
atgacccaggtgccaggtactgcttcttatttagattggggtagtgatccttattctgctaatatacctcatatgcaaag

SEQ ID NO: 101276 - DNA, 80 bp, synthetic construct
  source 1..80: mol_type = other DNA
tattacaaaaatgatcaagacaataactgcaaaaagcatcctttccaactccaagaaccctctgctgaaggggctattcc

SEQ ID NO: 101277 - DNA, 80 bp, synthetic construct
  source 1..80: mol_type = other DNA
attcaaaatcccatgaagaagataatgaattggctgctttcttaatggatagatctatcatcatccctagagctgcacat

SEQ ID NO: 101278 - DNA, 80 bp, synthetic construct
  source 1..80: mol_type = other DNA
aagggctcattagatcagggttaaggaaaggcggaatccagcctaagaccgtagacaagatagcaaactatgactatcag

SEQ ID NO: 101279 - DNA, 80 bp, synthetic construct
  source 1..80: mol_type = other DNA
caattcatcgtccttcaagatttacttctcaatactaattcgaatccgttgattgactacagagcatgttccatagacct

SEQ ID NO: 101280 - DNA, 80 bp, synthetic construct
  source 1..80: mol_type = other DNA
tgcagtagctttaagaactcatatgtggagatcacttgcaaaaggtcgggaaatatacggattagaagtcccagatccat

SEQ ID NO: 101281 - DNA, 80 bp, synthetic construct
  source 1..80: mol_type = other DNA
tagaatgttctaaaggagtattcattaaagggagcgaggagtgttctgagtgtattagtcattccaatgattatacctgg

SEQ ID NO: 101282 - DNA, 80 bp, synthetic construct
  source 1..80: mol_type = other DNA
ttctttgttcctagacttgtgcacttggatcaagtgacatcagaaatgacatctattcgagtcccttatataggttcgac

SEQ ID NO: 101283 - DNA, 80 bp, synthetic construct
  source 1..80: mol_type = other DNA
aaccgaagagcgtagtgacgttaagcttgggacggttaaaaacatgagtagagcacttaaagctgcagtcaggattgcca

SEQ ID NO: 101284 - DNA, 80 bp, synthetic construct
  source 1..80: mol_type = other DNA
ctgtatatacatgggcattcggttccgatgatcaaagttgggatgaagcatgtattttagcaaatcagagagcaaacatt

SEQ ID NO: 101285 - DNA, 80 bp, synthetic construct
  source 1..80: mol_type = other DNA
caaactccggttcaaagttcaaaagatgacaacagaaagagcatggatcttgaattcatagacggttaatgatagaccgg

SEQ ID NO: 101286 - DNA, 80 bp, synthetic construct
  source 1..80: mol_type = other DNA
cagctcgaagtcctcaaaaccataacaccaatcgcaacctctaacaatcttttccatagattgagggacaaaaccactca

SEQ ID NO: 101287 - DNA, 80 bp, synthetic construct
  source 1..80: mol_type = other DNA
attcaaatttgccggtagtgtgataaatagggtctcgcgatatgttactataagcaacgataacataaacttcaaggcag

SEQ ID NO: 101288 - DNA, 80 bp, synthetic construct
  source 1..80: mol_type = other DNA
gtgacgagaaacaagacacaaattttatattccagcaaagtatgttattaggattgtctcatcttgagaaagtgtacaaa

SEQ ID NO: 101289 - DNA, 80 bp, synthetic construct
  source 1..80: mol_type = other DNA
aattacgctcggacaggtagtgagagtattgtctaccatttacacgttgaatcctactgttgcatcaggcctactaaaga

SEQ ID NO: 101290 - DNA, 80 bp, synthetic construct
  source 1..80: mol_type = other DNA
gataccctattgtcatagtttaagaccagtccccttgatagagcatagttctgaaaatgtgctcatctatgatccatcac

SEQ ID NO: 101291 - DNA, 80 bp, synthetic construct
  source 1..80: mol_type = other DNA
ctgcgacaaacaccctcactactaaggtgcgggtgtttgtcccagtaacagatgaacctgagctaagatggagattgact

SEQ ID NO: 101292 - DNA, 80 bp, synthetic construct
  source 1..80: mol_type = other DNA
cagtaacagattatcagaaaatcaaattggagattcagtatctcgataaagaggaattagatttcactgtctggagtact

SEQ ID NO: 101293 - DNA, 80 bp, synthetic construct
  source 1..80: mol_type = other DNA
ttagagttacaggaattactagcagaatccaccgcttacaccataatagatatcataactaaatctgaacgagatcacct

SEQ ID NO: 101294 - DNA, 80 bp, synthetic construct
  source 1..80: mol_type = other DNA
caaagaatttgtgagtgtgtcatctgatgacaatatcagtagtcttatcactgagttcctacttgttgatccggagctgt

SEQ ID NO: 101295 - DNA, 80 bp, synthetic construct
  source 1..80: mol_type = other DNA
tttcttattaccttgggatgtattcagcattaaaatggagcttcgatatccactacaggagacctagagggaaaaatgct

SEQ ID NO: 101296 - DNA, 80 bp, synthetic construct
  source 1..80: mol_type = other DNA
atggtggaaattatccgtgacttactcaatcaggcatcaagacactcatacaaggttattgccaatgctttgtcacatcc

SEQ ID NO: 101297 - DNA, 80 bp, synthetic construct
  source 1..80: mol_type = other DNA
gaagacaacgacaataccacaaccaacagctcccaaaatgcggaacaaacaagccccagaaccccaaggagacagcccag

SEQ ID NO: 101298 - DNA, 80 bp, synthetic construct
  source 1..80: mol_type = other DNA
tagagtattaaagaagtttataaattcaggacttgtcaccccgtcatatggtccatacgtatatcaacaagatttttatg

SEQ ID NO: 101299 - DNA, 80 bp, synthetic construct
  source 1..80: mol_type = other DNA
tgatgtcacagaacttgttaatctcaagttataatatgtttcttactaagatcttgaattcagaaattgttaggattatg

SEQ ID NO: 101300 - DNA, 80 bp, synthetic construct
  source 1..80: mol_type = other DNA
atagcagagcaggatgagaatgttgtggagataagagaaaaaacacaattgagtaaatatctttgtttattgattgatct

SEQ ID NO: 101301 - DNA, 80 bp, synthetic construct
  source 1..80: mol_type = other DNA
gtatgcttatcggggtgagatcccttggattgttgatttagatccctttgagaaagcaatagtgttagaaaattatctct

SEQ ID NO: 101302 - DNA, 80 bp, synthetic construct
  source 1..80: mol_type = other DNA
ttgaacagtgtcagaaggagggaatgattggagtatggaacataacttccccaaaattttcacaatatcgagcatcggtc

SEQ ID NO: 101303 - DNA, 80 bp, synthetic construct
  source 1..80: mol_type = other DNA
acatatctcaggcgaagctctgtcaaacaattacgcatccgacaaaatgatgaggtgatagagatcagtcggttagagaa

SEQ ID NO: 101304 - DNA, 80 bp, synthetic construct
  source 1..80: mol_type = other DNA
tgatgtaatggtaaaatttaactcctcaattttgagccaggttgaccttaacgattcttgcttcttaatgaatcttgagg

SEQ ID NO: 101305 - DNA, 80 bp, synthetic construct
  source 1..80: mol_type = other DNA
aggcaattttccaatcaactgaaattatgacatctcactctgtagtatcaaggagtccgcgacttttagaaaatcatatg

SEQ ID NO: 101306 - DNA, 80 bp, synthetic construct
  source 1..80: mol_type = other DNA
aacagaaggataggaatcaactcaacgtcatgctacaaggctgttgatctaacacctattgtgaaaagatacctcccatc

SEQ ID NO: 101307 - DNA, 80 bp, synthetic construct
  source 1..80: mol_type = other DNA
tgagggacggagactatttctaggagaagggtcaggagctatgatgtatgtataccagaatactcttggtccttcactct

SEQ ID NO: 101308 - DNA, 80 bp, synthetic construct
  source 1..80: mol_type = other DNA
acaaccaaacccggcaccccgcagatccgaacaaagccccgcattcgaccccgaagcgcaaaccaaaaaaaccaccaaat

SEQ ID NO: 101309 - DNA, 80 bp, synthetic construct
  source 1..80: mol_type = other DNA
gttactataattctggtgtaacagatcagggacttgaaggacaaagagaattaaaaatgtatccggcggagtactacctg

SEQ ID NO: 101310 - DNA, 80 bp, synthetic construct
  source 1..80: mol_type = other DNA
tgctcaacatccagtaacagagaggaagaattgctcccttctgtaataccattatttaatggtagaccagaaacaacctg

SEQ ID NO: 101311 - DNA, 80 bp, synthetic construct
  source 1..80: mol_type = other DNA
gataggcaacattgatgcgttcagattaatcacagaatttgtcaatccattggagacagttatgacacactctgacatgg

SEQ ID NO: 101312 - DNA, 80 bp, synthetic construct
  source 1..80: mol_type = other DNA
aatctggcatgactaaggatgaggaaactatcctagtggaacattcacatatcatatcactacatataaatctgacagtt

SEQ ID NO: 101313 - DNA, 80 bp, synthetic construct
  source 1..80: mol_type = other DNA
gaggacagtatattggtgtcaaagatcgcctttggcaataatttaaacatcatgagattgtttaaaatgtatagatcatt

SEQ ID NO: 101314 - DNA, 80 bp, synthetic construct
  source 1..80: mol_type = other DNA
cttttctctagtcattatcgcaatgccaatttcgagtaatccacagtctagtgagatctacttgatttgtttacagaaat

SEQ ID NO: 101315 - DNA, 80 bp, synthetic construct
  source 1..80: mol_type = other DNA
taattagaggaattataacccctcaaagagtccttggcgcttccatggggagtacaccagacatcactctttcattcatc

SEQ ID NO: 101316 - DNA, 80 bp, synthetic construct
  source 1..80: mol_type = other DNA
aatctagtagaaaagatcaaaatgaagaattatttacagatgatcaaggatgatatcaggaaatcagtcagggagcctga

SEQ ID NO: 101317 - DNA, 80 bp, synthetic construct
  source 1..80: mol_type = other DNA
aatgttaatcccagggaagttaacaagcaaggagaaatttctcttgagtattggtttttcagcaaatggaccaactctta

SEQ ID NO: 101318 - DNA, 80 bp, synthetic construct
  source 1..80: mol_type = other DNA
tagaaagtgaaacaggacatgaccctggctcgactaaggaagatctaaggactgctctaataataaccttgaatgaatta

SEQ ID NO: 101319 - DNA, 80 bp, synthetic construct
  source 1..80: mol_type = other DNA
ctgccacagaacagccaaccaaccccaaaggacaccaacgacgcaaaacccgcttaactataaaaaacttaggatcacaa

SEQ ID NO: 101320 - DNA, 80 bp, synthetic construct
  source 1..80: mol_type = other DNA
ctcaaccacttagatcttgagcgccacccttcctcatttttccagccgtatcaagttcttgagaattccaggatattatc

SEQ ID NO: 101321 - DNA, 80 bp, synthetic construct
  source 1..80: mol_type = other DNA
cctcaaagacaagattgcaaagaaatatgctctcttcattctcctgtacattaacactgttgagagcaaaagaaaagtga

SEQ ID NO: 101322 - DNA, 80 bp, synthetic construct
  source 1..80: mol_type = other DNA
tatgcaatctcaaacgtggaaaaatagtgtgtgatttcggtgagaagcaatttttgaaaattttgccaaaaaaattaaga

SEQ ID NO: 101323 - DNA, 80 bp, synthetic construct
  source 1..80: mol_type = other DNA
gaaagagtacacacagctttggaaaactccattcatatcataaaccttgaacgtgtaatccaaaaaagatggtggaaaat

SEQ ID NO: 101324 - DNA, 80 bp, synthetic construct
  source 1..80: mol_type = other DNA
agtaggctacacagggattctgtaaataatatactaatctcctatataaccagctccacacccacgaatttacaaaccag

SEQ ID NO: 101325 - DNA, 80 bp, synthetic construct
  source 1..80: mol_type = other DNA
cccacgaatttacaaaccagttaagaaaaacttaattttgtttttgtaataacaacgagaaatccagacctttgtctggt

SEQ ID NO: 101326 - DNA, 80 bp, synthetic construct
  source 1..80: mol_type = other DNA
ggtacaaaagatccaacagaaagacaaccagcccgactgcacagaacccgaaaacaagccccaaaagaacaaacaaaacc

SEQ ID NO: 101327 - DNA, 80 bp, synthetic construct
  source 1..80: mol_type = other DNA
ccgagaggagaaacaaccaatccccacacccgaacaaccctccacacccacacatagctcgaccacttgctcccaaggag

SEQ ID NO: 101328 - DNA, 80 bp, synthetic construct
  source 1..80: mol_type = other DNA
tcttttcacttcatggacaaagaatcattggttgataatggcatcaaaattattgaattcattcagaaaaataaggatga

SEQ ID NO: 101329 - DNA, 80 bp, synthetic construct
  source 1..80: mol_type = other DNA
gatccaaaagacctatggaagatcccaaattcaagagccaagaaccagagaaagagcagcagcctgggagctctttattc

SEQ ID NO: 101330 - DNA, 80 bp, synthetic construct
  source 1..80: mol_type = other DNA
ggggtgagaatccaagacccgaaggagatagaatggctggagtggatcaacaagatccaactgagagacgagatgacgat

SEQ ID NO: 101331 - DNA, 80 bp, synthetic construct
  source 1..80: mol_type = other DNA
ggcagacccaatactcttgccagagatggagagattggagaaagcggtcccaattatatctcatggtccagcgggggaga

SEQ ID NO: 101332 - DNA, 80 bp, synthetic construct
  source 1..80: mol_type = other DNA
tgatatacagttgggtccaatggtacaagactttgagatcgatgataatggaattaaactacccaactctagagggtcta

SEQ ID NO: 101333 - DNA, 80 bp, synthetic construct
  source 1..80: mol_type = other DNA
accttccttctggatgtaatcagatcgcctattgcacctgacgatttaagaatgggtgcatccatgtcaatattggccat

SEQ ID NO: 101334 - DNA, 80 bp, synthetic construct
  source 1..80: mol_type = other DNA
aatcagctcctagatgcaggagtgttgacaagagcagagcatcagattgggaaagaagtcctgcgagtaatatcgaccat

SEQ ID NO: 101335 - DNA, 80 bp, synthetic construct
  source 1..80: mol_type = other DNA
ttgtccaacctatcaggtggtgggaaagatcttggaaactatataaagaatgtaggagttatggtttatcctcctacagg

SEQ ID NO: 101336 - DNA, 80 bp, synthetic construct
  source 1..80: mol_type = other DNA
agcaggagttgacagaaactcattgactaaaccggtttccggagtcagacaatcaagactatccaaactaacatggacaa

SEQ ID NO: 101337 - DNA, 80 bp, synthetic construct
  source 1..80: mol_type = other DNA
aagaatccccccttgatcaaccagagacagttccagaaacactgaatgatgcttatgtgatcaaagaggcaaccagcaag

SEQ ID NO: 101338 - DNA, 80 bp, synthetic construct
  source 1..80: mol_type = other DNA
aaagaagtcacaccagaagacgggatctccattttgaatcccaatgctgcatccttcactccacggagcactccagcccc

SEQ ID NO: 101339 - DNA, 80 bp, synthetic construct
  source 1..80: mol_type = other DNA
aaagagcgtcgagaaggaaccaaaccagagacaaccagcagggggacacccagaggacaaagggacaccgaacagatcag

SEQ ID NO: 101340 - DNA, 80 bp, synthetic construct
  source 1..80: mol_type = other DNA
aaaatccgaccacgaaatcgacagccatcaaaaatagcaaggtaatcaccaaagcaatggtgcacaccagcccaaacgaa

SEQ ID NO: 101341 - DNA, 80 bp, synthetic construct
  source 1..80: mol_type = other DNA
atcaatcaatccgcacgatcaatgaacatcgagttcgagccaaaaagcaacccctcaacactgaccctcgagactgtcca

SEQ ID NO: 101342 - DNA, 80 bp, synthetic construct
  source 1..80: mol_type = other DNA
accatcgaaccaacaaacgaacaacacaccagcaagtcacccgtccgggaagaccacaagagagctccccaaaggcgccc

SEQ ID NO: 101343 - DNA, 80 bp, synthetic construct
  source 1..80: mol_type = other DNA
aacctcaatccggaacaagccgagccgccaacatcaaggaccccacaactgctccaaacaagacaagcatccaaaccaag

SEQ ID NO: 101344 - DNA, 80 bp, synthetic construct
  source 1..80: mol_type = other DNA
gtatgctgagagacctggcgccttaatcagagggatactgaatgatccagatatagaagtgataattattgacgtcagtg

SEQ ID NO: 101345 - DNA, 80 bp, synthetic construct
  source 1..80: mol_type = other DNA
ccagcaagaaacgccagtggcggcgatgggacaaacccccaaatggcatctcccccaccaccgccagtagtcaccaatcc

SEQ ID NO: 101346 - DNA, 80 bp, synthetic construct
  source 1..80: mol_type = other DNA
cccgctgaagaagagagtgccgaaactctcggaaccgaacactcgggatcatctctcccacccaacggacgagaaacggg

SEQ ID NO: 101347 - DNA, 80 bp, synthetic construct
  source 1..80: mol_type = other DNA
accacggtggaccggcagtcaaaagcaagacccaagcacacagaggactcaacgcagacaacactcaaaattgcactgac

SEQ ID NO: 101348 - DNA, 80 bp, synthetic construct
  source 1..80: mol_type = other DNA
caaccaactccatcctccaacaaggctcaaccccccaaaacaccaaaaccagagaatccacaggcagagccaaaaccaaa

SEQ ID NO: 101349 - DNA, 80 bp, synthetic construct
  source 1..80: mol_type = other DNA
gaaacatgtatcattcccaaacctggatctcaccatcgaagaagaaggaggcacagctgtcgacatcatggtcaacgaaa

SEQ ID NO: 101350 - DNA, 80 bp, synthetic construct
  source 1..80: mol_type = other DNA
caagagaaggagtgatcgatgttcacctgattaaagaggacaataaaattctgaatatggatcaagacaatccatgctca

SEQ ID NO: 101351 - DNA, 80 bp, synthetic construct
  source 1..80: mol_type = other DNA
aaccaaataaccagtcagcaagaaacgggtgtaactaaaaggggcataggagagaattcctcatgtattgggacaaagga

SEQ ID NO: 101352 - DNA, 80 bp, synthetic construct
  source 1..80: mol_type = other DNA
agactcaagacaattgagtggtgcaatccaatctgcacaaaaatccagattgagccagagacaggagaatgcatctgcgg

SEQ ID NO: 101353 - DNA, 80 bp, synthetic construct
  source 1..80: mol_type = other DNA
agagtgcccgacctggtgtgaccagtgtaccatctgatgacccagagtcggaggaagtcaagacatacagagcgtcagat

SEQ ID NO: 101354 - DNA, 80 bp, synthetic construct
  source 1..80: mol_type = other DNA
gcaataatcgagcaattaaacaatgatgaagcacaagattactacagctttcttgatttgatggaaaataccgatgatga

SEQ ID NO: 101355 - DNA, 80 bp, synthetic construct
  source 1..80: mol_type = other DNA
actttgagggggaagttccagttttagagagacgaggaaacagagcgacagaagagatggcggccttaaccagagtagtt

SEQ ID NO: 101356 - DNA, 80 bp, synthetic construct
  source 1..80: mol_type = other DNA
tgacttgatatgtgaagagaccaaattctctcttctgaacactgccagactgataagtttgaattcaaggatagagaaga

SEQ ID NO: 101357 - DNA, 80 bp, synthetic construct
  source 1..80: mol_type = other DNA
tagaagaacaaatcaagaagatccctgcaatggagaagaaactatcagacattgaaaagcttctgcttaaaaccaatact

SEQ ID NO: 101358 - DNA, 80 bp, synthetic construct
  source 1..80: mol_type = other DNA
gcactctccaccattgaaggacatatcacatcaatgatgatcatggttcctgggaaaacagtgaacgaaggagagataca

SEQ ID NO: 101359 - DNA, 80 bp, synthetic construct
  source 1..80: mol_type = other DNA
aataaatgagcagttaaagcctgtaattggaagaaaagatggtgtgtacgacaaaatgatactcccacgagtagacaaga

SEQ ID NO: 101360 - DNA, 80 bp, synthetic construct
  source 1..80: mol_type = other DNA
aaatctcacttgtgactgatcgtacacctctttgtgatgatttcaaagaagatccttacgtgttaaatgagaagcttatc

SEQ ID NO: 101361 - DNA, 80 bp, synthetic construct
  source 1..80: mol_type = other DNA
cttgaccccatcaatccaagcgtaaccaatgcctcggcgttcatacccagttacgacaatatatctcctgctgttcttcg

SEQ ID NO: 101362 - DNA, 80 bp, synthetic construct
  source 1..80: mol_type = other DNA
atccctcataagaagcaatgtagaagacagagagacacgagtggagttgattgagttagtgaatcaagcaagaaatgatt

SEQ ID NO: 101363 - DNA, 80 bp, synthetic construct
  source 1..80: mol_type = other DNA
ctgaactcaatgagatactcgcattagtcaatgacattatagattcaaatcagtctggtgtgtgattcccaaaatcactc

SEQ ID NO: 101364 - DNA, 80 bp, synthetic construct
  source 1..80: mol_type = other DNA
aactaactcaacaaacaacacacaatacccgaagtagaaaacaatgacactagatcgctacataactgtttcgcagtagc

SEQ ID NO: 101365 - DNA, 80 bp, synthetic construct
  source 1..80: mol_type = other DNA
tgcaatagggacacatgtaaatcaccaccgattacacccaccaatctcaaatcacagctgttcacgcatctttactcact

SEQ ID NO: 101366 - DNA, 80 bp, synthetic construct
  source 1..80: mol_type = other DNA
gcagctgccagagaaacaatgagagggagaacacctttcatagatccgagagcgtatacaatggctatccatgacgtatc

SEQ ID NO: 101367 - DNA, 80 bp, synthetic construct
  source 1..80: mol_type = other DNA
gcttaagcaatgatatatgcaagtataattaaacaaaacttagggatcaagcacgatccaacgccggagagcgacaaaga

SEQ ID NO: 101368 - DNA, 80 bp, synthetic construct
  source 1..80: mol_type = other DNA
aaaaccaaaaccagagaaacaccaaccaatctcccaacgaaactaagaggaccccacaacagcgaaacccatccaaaagg

SEQ ID NO: 101369 - DNA, 80 bp, synthetic construct
  source 1..80: mol_type = other DNA
aagaagtcaccccaaaacccaaacccgaaaagacaaagaccgtcccaccgctacatcagcagcgcaggagtccaaccagc

SEQ ID NO: 101370 - DNA, 80 bp, synthetic construct
  source 1..80: mol_type = other DNA
tgaggtcaagaggaggaaggaacagaagtagttctacggacgaaatggaggctatcactaatttcatgccttacacctgg

SEQ ID NO: 101371 - DNA, 80 bp, synthetic construct
  source 1..80: mol_type = other DNA
gaattcggagggtcactaaacaaagtcgaaccggaactagatgagaatgggtccatgataccaaaggttagggtcttgaa

SEQ ID NO: 101372 - DNA, 80 bp, synthetic construct
  source 1..80: mol_type = other DNA
tcctggatacaatgaccggaagagtagtggttaccaatacctgatctgttacggatttgttgaagatattagatctgaat

SEQ ID NO: 101373 - DNA, 80 bp, synthetic construct
  source 1..80: mol_type = other DNA
caaatggtgacaagaaaccgacaatcagaaccaccgcctcatttccactcggagtagggagaagtgatgcatctcctgaa

SEQ ID NO: 101374 - DNA, 80 bp, synthetic construct
  source 1..80: mol_type = other DNA
aatttactggatgaagtttgcaagctttctataacagtcagaagaacatcaggagcagaagagaagatagtatatggggt

SEQ ID NO: 101375 - DNA, 80 bp, synthetic construct
  source 1..80: mol_type = other DNA
atcaggagggatcttgtaccttgacccctggaagaaggtcctcaagaatggtgccatctttactgcaactaaagtgtgca

SEQ ID NO: 101376 - DNA, 80 bp, synthetic construct
  source 1..80: mol_type = other DNA
gaaacattgagtgcgtccttgtggacaaacaccaatctttaaggattttctttctgagcataactaaactaactgaccgc

SEQ ID NO: 101377 - DNA, 80 bp, synthetic construct
  source 1..80: mol_type = other DNA
aacactaatatcagctatagtgactgttgagacccagatatggatactcgttgccaaggcagtcactgctccggatactg

SEQ ID NO: 101378 - DNA, 80 bp, synthetic construct
  source 1..80: mol_type = other DNA
gggtattacaccattcccagaaggatgcttgagttcagatacaacaatgcaatagctctcaacttactagtcactctggc

SEQ ID NO: 101379 - DNA, 80 bp, synthetic construct
  source 1..80: mol_type = other DNA
tataagcactgatacaacgaagtccggtgttagaggaatcaagaatgaagacgggttcaccttagtaacctttatgaccc

SEQ ID NO: 101380 - DNA, 80 bp, synthetic construct
  source 1..80: mol_type = other DNA
atatggggaactttcaaagaagagcaggaaagacttattctcttgagtactgcagcagaaaggtggacaaaatgaaaatg

SEQ ID NO: 101381 - DNA, 80 bp, synthetic construct
  source 1..80: mol_type = other DNA
aaattttcattaggagctattggaggattaagtttccatgtaaggattgatggtgtcataagcaaaagactttttgcaga

SEQ ID NO: 101382 - DNA, 80 bp, synthetic construct
  source 1..80: mol_type = other DNA
aatgggtttcagaagaaacatttgttactgcttgatagacatcaatccttggatcaacaagttaacatggagtaatacct

SEQ ID NO: 101383 - DNA, 80 bp, synthetic construct
  source 1..80: mol_type = other DNA
gcgaaatcaggaatgtagctgctgtccttcaaccttcagttcctagagacttcatgatttatgatgatgtgttcattgat

SEQ ID NO: 101384 - DNA, 80 bp, synthetic construct
  source 1..80: mol_type = other DNA
aatacagggaagattcttccttcaaagcatgcataacaaagatcagtatggtcacctgagcccatcctccacacattccc

SEQ ID NO: 101385 - DNA, 80 bp, synthetic construct
  source 1..80: mol_type = other DNA
acgactcctgagtctcgaccccgaagggcagaaatcacaactgacacgaaccccaaaagacaaaaaaagcaacctagctc

SEQ ID NO: 101386 - DNA, 80 bp, synthetic construct
  source 1..80: mol_type = other DNA
acatctcaacccgctcactaaacaatctcaattgactgaacgctacatctccaatagattgcgataagccttgctaacca

SEQ ID NO: 101387 - DNA, 80 bp, synthetic construct
  source 1..80: mol_type = other DNA
gtttatcaaacagctttgggaattttactctaaatctgaacttttggtcaactaaccgaatattaatctctcaaactatc

SEQ ID NO: 101388 - DNA, 80 bp, synthetic construct
  source 1..80: mol_type = other DNA
cagaggaaagtgagaacaggagatggaataaatatttgcagcaaagacgagtaaatgcactctttgaactaaatcaggga

SEQ ID NO: 101389 - DNA, 80 bp, synthetic construct
  source 1..80: mol_type = other DNA
atattaagggttaatcttgactaaacaaaacttaggaaatcagggcttatccgaaaaagacaaccaacagacgccgaaaa

SEQ ID NO: 101390 - DNA, 80 bp, synthetic construct
  source 1..80: mol_type = other DNA
tcaacacacacaaggaccaaccacagagaaaagaagaagcaacaaacacaggagagacccccaagccaccaccagaaaca

SEQ ID NO: 101391 - DNA, 80 bp, synthetic construct
  source 1..80: mol_type = other DNA
ccacatccaaggcacccccaccccccaacaccccacgccacagcccgtccacagaaagctccgacggcccggagaccccc

SEQ ID NO: 101392 - DNA, 80 bp, synthetic construct
  source 1..80: mol_type = other DNA
aggaacccggaaaccacacaaagaaacaggaccatcggcactcccagagagaccgaaaagaagatcggcgaccaagttcg

SEQ ID NO: 101393 - DNA, 80 bp, synthetic construct
  source 1..80: mol_type = other DNA
aaggaaaagcgagacatccaaagaacccgagaaacaaaacaattcgactcacagcaagctcagtcagcaagcaatatccc

SEQ ID NO: 101394 - DNA, 80 bp, synthetic construct
  source 1..80: mol_type = other DNA
aggaaacaaccctggtacagcacaatgaagaaaaagacggacaatcccacaatatcaaagaggggtcacaaccattctcg

SEQ ID NO: 101395 - DNA, 80 bp, synthetic construct
  source 1..80: mol_type = other DNA
aggaatcaaatctagagcgctactcagagagacagataattattccaatgggctaatagttgagaatttagttagaaact

SEQ ID NO: 101396 - DNA, 80 bp, synthetic construct
  source 1..80: mol_type = other DNA
gtcatcatccaagtaagaacaatctaaactatactaagacacaaaaaagagattctacaatcccttatcgtgtggaagag

SEQ ID NO: 101397 - DNA, 80 bp, synthetic construct
  source 1..80: mol_type = other DNA
agaaaaggacattatccaaagattaaacatcttattgataaatcttacaagcatataaaaagagggaagagaagaaatgg

SEQ ID NO: 101398 - DNA, 80 bp, synthetic construct
  source 1..80: mol_type = other DNA
tcataatgggaacattataactataattctgttgttgattttaattttgaagacacagatgagtgaaggtgctatccatt

SEQ ID NO: 101399 - DNA, 80 bp, synthetic construct
  source 1..80: mol_type = other DNA
tggcttacaattatgagaaatttgattgcaggtagtctctcactgagaaaatttatggtagagttgctcattgaagccaa

SEQ ID NO: 101400 - DNA, 80 bp, synthetic construct
  source 1..80: mol_type = other DNA
acgagactctaagtaagatcggattaataaagggaatcaccagagagtacaaagtcaaaggaactccgtcaagtaaagac

SEQ ID NO: 101401 - DNA, 80 bp, synthetic construct
  source 1..80: mol_type = other DNA
atagtcatcaaattgattccgaatgtcaccggtcttaacaagtgcacgaacatatcaatggaaaactataaagaacaact

SEQ ID NO: 101402 - DNA, 80 bp, synthetic construct
  source 1..80: mol_type = other DNA
tgacaaaatactaattcctattaacaacataattgaattgtatgcaaactcaactaaatcagcccctgggaatgcacgtt

SEQ ID NO: 101403 - DNA, 80 bp, synthetic construct
  source 1..80: mol_type = other DNA
ttgctggcgttataattgcaggagtggcattaggtgttgcagcggcagcccaaataactgccggcattgcactgcatgaa

SEQ ID NO: 101404 - DNA, 80 bp, synthetic construct
  source 1..80: mol_type = other DNA
gctcgacagaatgcagagagaattaatctcttaaaggatagcatttctgccactaacaacgcagtagcagaactccagga

SEQ ID NO: 101405 - DNA, 80 bp, synthetic construct
  source 1..80: mol_type = other DNA
agcaactggtggaatagtaaatgtcattacaggaatgcaagattacatcaatacaaatctagtcccgcagattgacaaac

SEQ ID NO: 101406 - DNA, 80 bp, synthetic construct
  source 1..80: mol_type = other DNA
tgcaatgtagtcagatcaaaacggcattagacatatctctctcccaatactattcagaaatattaacagtgttcggtcca

SEQ ID NO: 101407 - DNA, 80 bp, synthetic construct
  source 1..80: mol_type = other DNA
aaccttcaaaatccagtaactacttccatgtcaatacaagccatatcacaatcctttgggggaaatatagatttgctctt

SEQ ID NO: 101408 - DNA, 80 bp, synthetic construct
  source 1..80: mol_type = other DNA
aaacctactaggttacactgcaaacgacttattggatttgctcgaaagtaaaagtataacaggccaaataacatacataa

SEQ ID NO: 101409 - DNA, 80 bp, synthetic construct
  source 1..80: mol_type = other DNA
atcttgaacattacttcatggtaatcagagtatattatcctataatgacaacaatcagcaatgcttatgtccaggaattg

SEQ ID NO: 101410 - DNA, 80 bp, synthetic construct
  source 1..80: mol_type = other DNA
aatcatgtcatctctgttttcatacactgaagatttcagagcataccaaactaagctaggaagggatggaagacccagcg

SEQ ID NO: 101411 - DNA, 80 bp, synthetic construct
  source 1..80: mol_type = other DNA
aaagggaagtgctgtaaaaggccgggctgtggaaatcatagcagacataggtaattatgtcgaagagacagggatggctg

SEQ ID NO: 101412 - DNA, 80 bp, synthetic construct
  source 1..80: mol_type = other DNA
atcaaaattagcttcaatgtcgatggcagtgaatgggtatctcttgtaccctcgtatatattgattagaaactcatatct

SEQ ID NO: 101413 - DNA, 80 bp, synthetic construct
  source 1..80: mol_type = other DNA
ctcaaacatagacatatcagaatgtctcataaccaaaaattcagtgatatgtcgtcatgactttgcaatgccaatgagtt

SEQ ID NO: 101414 - DNA, 80 bp, synthetic construct
  source 1..80: mol_type = other DNA
acaccttaaaggaatgcctaactggagacactgaaaagtgtccgagagaggctgttgtaacctcatatgtcccaagattt

SEQ ID NO: 101415 - DNA, 80 bp, synthetic construct
  source 1..80: mol_type = other DNA
gctatctccgggggagtgatttatgctaattgtctaagtacaacatgtcaatgctatcaaactggcaaagtaattgctca

SEQ ID NO: 101416 - DNA, 80 bp, synthetic construct
  source 1..80: mol_type = other DNA
agacggcagccaaacattgatgatgatcgataatcaaacatgttcaatagtaagaattgaagaaatcctcatatcaacag

SEQ ID NO: 101417 - DNA, 80 bp, synthetic construct
  source 1..80: mol_type = other DNA
ggaaatatctgggaagtcaggagtacaatacgatgcatgtgtcagtcggcaatcctgtcttcactgacaagctggacata

SEQ ID NO: 101418 - DNA, 80 bp, synthetic construct
  source 1..80: mol_type = other DNA
acaagtcaaatttccaacatcaaccaatccattgaacaatccaaattttatctagataagtctaaggctatacttgacaa

SEQ ID NO: 101419 - DNA, 80 bp, synthetic construct
  source 1..80: mol_type = other DNA
gataaatctcaacttaattggctctgtaccgatatcaatacttttcataattgcgatcttatcattgattctctctatta

SEQ ID NO: 101420 - DNA, 80 bp, synthetic construct
  source 1..80: mol_type = other DNA
taacttttgtgattgtgatgataattgtcagaagatataacaaatacactcctcttataaactctgatccatccagtagg

SEQ ID NO: 101421 - DNA, 80 bp, synthetic construct
  source 1..80: mol_type = other DNA
aggagtactatacaggacgtatatatcatcccgaaccccggagaacattcgattagatcagctgctcgatcaattgacag

SEQ ID NO: 101422 - DNA, 80 bp, synthetic construct
  source 1..80: mol_type = other DNA
agatcgagattgatcaatttttaagatcgatcataggagagatttattcgagaattattgtaaattaaagaacttaataa

SEQ ID NO: 101423 - DNA, 80 bp, synthetic construct
  source 1..80: mol_type = other DNA
tcgagttaagaaaaactcaggagatcaagttttatcactaagactgaatccgcctagatcatccatatatctagtctaat

SEQ ID NO: 101424 - DNA, 80 bp, synthetic construct
  source 1..80: mol_type = other DNA
ctgaccaataatcaatttaatcttcaaatctcaaagcaagtccggattctagatacacttagaatcagtagttgaaataa

SEQ ID NO: 101425 - DNA, 80 bp, synthetic construct
  source 1..80: mol_type = other DNA
gtattataacaactcatcttattgaattcttccaatatgccgcagaagactgtggaattcattaacatgaattcccctct

SEQ ID NO: 101426 - DNA, 80 bp, synthetic construct
  source 1..80: mol_type = other DNA
agaaagaggggtcagcactctttcagataagaagaccctcaatcaatctaaaatcaccaagcaggggtattttgggttag

SEQ ID NO: 101427 - DNA, 80 bp, synthetic construct
  source 1..80: mol_type = other DNA
ccctgcacttgcattgaacgagtttcaaggtgatctcaacatcatcaagaaccttatggaagtgtacaagactcttggtc

SEQ ID NO: 101428 - DNA, 80 bp, synthetic construct
  source 1..80: mol_type = other DNA
gatcccacagtgagagaaattggaagaagcagaagaatcaaaatgatcattacatgactgtttcaaccatgattcttgag

SEQ ID NO: 101429 - DNA, 80 bp, synthetic construct
  source 1..80: mol_type = other DNA
atattagttgtcctgggcatcatgtttaatctcatagttttaactatggtgtattatcagaatgacaacatcaatcaaag

SEQ ID NO: 101430 - DNA, 80 bp, synthetic construct
  source 1..80: mol_type = other DNA
gatggcagaacttacaagcaatatcacagtcctgaatttaaatcttaatcaattgacaaacaaaattcaaagagaaatta

SEQ ID NO: 101431 - DNA, 80 bp, synthetic construct
  source 1..80: mol_type = other DNA
ttcctaggatcactcttattgacacagcaaccaccattacaattcctagtgccattacttacatattagcaactctgaca

SEQ ID NO: 101432 - DNA, 80 bp, synthetic construct
  source 1..80: mol_type = other DNA
accagaatctcggaattattgccgtcaatcaaccaaaagtgtgagttcaagacaccgacacttgtcctgaatgactgcag

SEQ ID NO: 101433 - DNA, 80 bp, synthetic construct
  source 1..80: mol_type = other DNA
aataaactgtaccccaccactaaacccgtctgatggagtgaaaatgagttctcttgccactaacttggttgcacatgggc

SEQ ID NO: 101434 - DNA, 80 bp, synthetic construct
  source 1..80: mol_type = other DNA
cctctccctgtagaaacttttcatccgtacctacaatttactattatcggattccaggattatacaatagaacagcattg

SEQ ID NO: 101435 - DNA, 80 bp, synthetic construct
  source 1..80: mol_type = other DNA
gacgaaagatgtatactaaacccgagattgacaataagcagtacaaaatttgcttatgtccactctgaatatgataaaaa

SEQ ID NO: 101436 - DNA, 80 bp, synthetic construct
  source 1..80: mol_type = other DNA
ttgcaccagaggattcaaatactatgaattgatgacatttggagaaatactggagggtccggaaaaagaacccagaatgt

SEQ ID NO: 101437 - DNA, 80 bp, synthetic construct
  source 1..80: mol_type = other DNA
tttctaggtcattttattcgcccacaaatgctgtgaactatcattcttgtacgccgatcgtgactgtcaatgaaggatat

SEQ ID NO: 101438 - DNA, 80 bp, synthetic construct
  source 1..80: mol_type = other DNA
accagagggaaaattcagaagggtcgttctcgatagaggaaggtcctgatattgtgagcccggaagtggcaaggctcgga

SEQ ID NO: 101439 - DNA, 80 bp, synthetic construct
  source 1..80: mol_type = other DNA
ggaaaagtctcataaaaccaacttgtgagcggttacatgcgccaatgccaaggccatttaataggcggttattgctaaac

SEQ ID NO: 101440 - DNA, 80 bp, synthetic construct
  source 1..80: mol_type = other DNA
tttttggcagacagcaactttgatccatccaaggagttagagtatgtgacaactggagcgtaccttgaagatgaggaatt

SEQ ID NO: 101441 - DNA, 80 bp, synthetic construct
  source 1..80: mol_type = other DNA
caagtaatggcagagtcactcctggccaatcatgcaggcaagctgttcaaagagaacggagttgttcaagataatttaaa

SEQ ID NO: 101442 - DNA, 80 bp, synthetic construct
  source 1..80: mol_type = other DNA
tcttaccaaatccttgttaacaatgtcccagattggattgatctccagacagtcaagacgaaacattagagagaatgtga

SEQ ID NO: 101443 - DNA, 80 bp, synthetic construct
  source 1..80: mol_type = other DNA
caatccttcacaaagtcacaaaaaaccatcaccaaaagttctcatctgccccgagcactaaaactggacaaaagtcacag

SEQ ID NO: 101444 - DNA, 80 bp, synthetic construct
  source 1..80: mol_type = other DNA
caagacgagcagtttgagattgcagctttttatctgactacagatcttgagaagtactgtctcaattggaggtaccagac

SEQ ID NO: 101445 - DNA, 80 bp, synthetic construct
  source 1..80: mol_type = other DNA
tataattatgtttgcaacatcaatgaatagactatatggttatcctcacttatttgagtggattcatccccgactaatga

SEQ ID NO: 101446 - DNA, 80 bp, synthetic construct
  source 1..80: mol_type = other DNA
ggtcaacactgtatgtcggagacccttttaatatgccacgctaccttgatacaactgatcttgacttagttaagaatgaa

SEQ ID NO: 101447 - DNA, 80 bp, synthetic construct
  source 1..80: mol_type = other DNA
gttgggtgagagggccaagtatatggctcttttggagatgtcagaaatgatggattttgcagcagcaaatttcccactcc

SEQ ID NO: 101448 - DNA, 80 bp, synthetic construct
  source 1..80: mol_type = other DNA
ggtattttcatagtctcccccagaggtggtatagagggtctgtgtcagaaactctggacaatgatttccatatctgtcat

SEQ ID NO: 101449 - DNA, 80 bp, synthetic construct
  source 1..80: mol_type = other DNA
tgagcatggtacaaggagacaaccaggcagtcggtattaccaccagagttccaagatgtgtaagtacaaaagagaagaaa

SEQ ID NO: 101450 - DNA, 80 bp, synthetic construct
  source 1..80: mol_type = other DNA
aggattgctttcgagaacagcaaggcattcattgaaaggttgagagtgaacaatcataatttagggcaccacctcaagag

SEQ ID NO: 101451 - DNA, 80 bp, synthetic construct
  source 1..80: mol_type = other DNA
tcaagagactatactcagttcctctttttttgtgtatagtaagagaattttctcaaatggcaggatacttaatcaggctc

SEQ ID NO: 101452 - DNA, 80 bp, synthetic construct
  source 1..80: mol_type = other DNA
ttaagaacatgagcaaagccaacttaatatctgatgtcttaggtgagtgtacccaatcttcatgctcaaacctaacaaca

SEQ ID NO: 101453 - DNA, 80 bp, synthetic construct
  source 1..80: mol_type = other DNA
acactgatgagattgactgaaaacggtgtagaaaaggacatctgttactggctcagctttttcctttctgctaaacagct

SEQ ID NO: 101454 - DNA, 80 bp, synthetic construct
  source 1..80: mol_type = other DNA
tgtttatgatctactgttccctctgctagctcaattcgaagatgaagtgacatctacataccttaacaacccacatctga

SEQ ID NO: 101455 - DNA, 80 bp, synthetic construct
  source 1..80: mol_type = other DNA
tcgggagactttgtgctattccctctcaactgggtggtcttaattactattctttaagtagacttttctgtaggaatata

SEQ ID NO: 101456 - DNA, 80 bp, synthetic construct
  source 1..80: mol_type = other DNA
ggtgatcccctgacatctgcaacagctgacctcaagaggctgattcaacatggagttctaccagagtggtatctcaataa

SEQ ID NO: 101457 - DNA, 80 bp, synthetic construct
  source 1..80: mol_type = other DNA
tctcttcaaaaggaaacctggagatggtaactggactacccttgcagctgacccttatgctttaaatattgactacattt

SEQ ID NO: 101458 - DNA, 80 bp, synthetic construct
  source 1..80: mol_type = other DNA
tatacagttatgcaatgggaatcggaagtgtccaagatcctcaaatgcgaggctatgcatttggcagaccttacttgaat

SEQ ID NO: 101459 - DNA, 80 bp, synthetic construct
  source 1..80: mol_type = other DNA
accctccaacctccttcctgaaaaaacacacccaaagggttctgatggaacacagcacgaatcccatgttggcaggtgta

SEQ ID NO: 101460 - DNA, 80 bp, synthetic construct
  source 1..80: mol_type = other DNA
tttgtagaaagttcttacagcgaagaattagatcttgcaaagttcttgctagacaggcccatggtaatgccgagagtagc

SEQ ID NO: 101461 - DNA, 80 bp, synthetic construct
  source 1..80: mol_type = other DNA
acacattattgtcgaacagacatcatgtggtcggagaaagcaagtacagggttacctagacaccacaagaacaatgatca

SEQ ID NO: 101462 - DNA, 80 bp, synthetic construct
  source 1..80: mol_type = other DNA
aacacgccattacaaaacaaccaccgagcttcagaaaattagagaaaattataaattataataaattgtacttgggttac

SEQ ID NO: 101463 - DNA, 80 bp, synthetic construct
  source 1..80: mol_type = other DNA
aatttggaaatgatacaaaagccagttgggggtagacaaaagatgatagagatagctcacatctcagatttatgcagtat

SEQ ID NO: 101464 - DNA, 80 bp, synthetic construct
  source 1..80: mol_type = other DNA
agatatctcaaagatattaaggagaatctcttggtcgagcttgctcacagggagaccgttggaaggtctagaaacacccg

SEQ ID NO: 101465 - DNA, 80 bp, synthetic construct
  source 1..80: mol_type = other DNA
atccaattgaactcattaatgggtcactgattgatggttgcaatatctgtcaccattgtttatctggggacaggaaattc

SEQ ID NO: 101466 - DNA, 80 bp, synthetic construct
  source 1..80: mol_type = other DNA
acctggttttttatcccttcagggatagaactggacaccccccctgaagacaaccctccaatgagagtcccatatgtggg

SEQ ID NO: 101467 - DNA, 80 bp, synthetic construct
  source 1..80: mol_type = other DNA
ttcaaggacagatgagcggagagtggcatcaattggatatgtcaaaggggcttcaccatcacttaaatcggctctaaggc

SEQ ID NO: 101468 - DNA, 80 bp, synthetic construct
  source 1..80: mol_type = other DNA
ttgcaggcgtgtacatctgggctttcggagatactgagaacaattgggaagatgcactggatcttgcaaatactagagtt

SEQ ID NO: 101469 - DNA, 80 bp, synthetic construct
  source 1..80: mol_type = other DNA
gctgcattttaccaattgggggttgagactgccaatcagcagcaaggctcagtggacaaggagatggcagaagagttggg

SEQ ID NO: 101470 - DNA, 80 bp, synthetic construct
  source 1..80: mol_type = other DNA
tatattgaaatggaccaactaaagactctcacaccaatgcctaccagtgcaaacctcacacaccgattggatgatggctt

SEQ ID NO: 101471 - DNA, 80 bp, synthetic construct
  source 1..80: mol_type = other DNA
gactcaaatgaagtttactcctgctagttcgtacgcatattcttgttttgtgcacatctccaatgacaaccaaaatttag

SEQ ID NO: 101472 - DNA, 80 bp, synthetic construct
  source 1..80: mol_type = other DNA
aacaactagacaggttgttagactccaatctaatctatcagcaagtgatgattttaggtctaggggtcattgagacctgg

SEQ ID NO: 101473 - DNA, 80 bp, synthetic construct
  source 1..80: mol_type = other DNA
ctatcatttccgaaccaaattaatgatgaagacatctctgtccacctgcatacagggggttcttgttgcatcaggccagt

SEQ ID NO: 101474 - DNA, 80 bp, synthetic construct
  source 1..80: mol_type = other DNA
tgacatgtgtgttctaaatgagagtcctaatgtacctccgaccttgaatgttccacaccacaataagttcatctttgatt

SEQ ID NO: 101475 - DNA, 80 bp, synthetic construct
  source 1..80: mol_type = other DNA
cagatcctttagacaaagatcaaattgaggtaattgataatgtcatgattcagtcacgtttatgtggaattgattgttta

SEQ ID NO: 101476 - DNA, 80 bp, synthetic construct
  source 1..80: mol_type = other DNA
acgatagaagaaagaatcccactgcttgcacacctaatttcattgcaatttgctcatacgctgactggactagatgagtc

SEQ ID NO: 101477 - DNA, 80 bp, synthetic construct
  source 1..80: mol_type = other DNA
aacatcactcattaatgatgctgtggtagatgctgattattcagcaaactggatcagcgagtgcctgaatacatatttag

SEQ ID NO: 101478 - DNA, 80 bp, synthetic construct
  source 1..80: mol_type = other DNA
ataaagtattctattatactgcctggaatataatgctggacttggcataccagatgtactacatgaggattatagggctt

SEQ ID NO: 101479 - DNA, 80 bp, synthetic construct
  source 1..80: mol_type = other DNA
cattccataattgactacctaaacatagttttaactaggatcccagggttggcactgactggtatatcatcaactatcaa

SEQ ID NO: 101480 - DNA, 80 bp, synthetic construct
  source 1..80: mol_type = other DNA
actcaccgaagcagacaagcgggcaatggcggccactgttgcacgactcacaacaggaagaggacaacaaggaggcaaca

SEQ ID NO: 101481 - DNA, 80 bp, synthetic construct
  source 1..80: mol_type = other DNA
tcatcccaaaatcttaagacgactcataaacttgggaattctagtcccaaagaactccccctatcttgcaacactgaact

SEQ ID NO: 101482 - DNA, 80 bp, synthetic construct
  source 1..80: mol_type = other DNA
atcataagcttgcaacagaagcaataatgtggggagcgcaccaggctctagcagacatcaggactggagttgatattgaa

SEQ ID NO: 101483 - DNA, 80 bp, synthetic construct
  source 1..80: mol_type = other DNA
cttataataccatctgaagatagtacagaattgtctgatagaacactgaacctagttgcaaggaagttaactctaatagc

SEQ ID NO: 101484 - DNA, 80 bp, synthetic construct
  source 1..80: mol_type = other DNA
aattgctattgcagataatccaaatttgccttacgtgaggggtttagctcctgatcagaagtgcaaggtactcactgaat

SEQ ID NO: 101485 - DNA, 80 bp, synthetic construct
  source 1..80: mol_type = other DNA
acctactagtccaggtgaagcttttaactgctgaaccagagaagcttgctatgtggaagacagtaatctgtgagccaaaa

SEQ ID NO: 101486 - DNA, 80 bp, synthetic construct
  source 1..80: mol_type = other DNA
atgtctgcattccctcacaacctgtactatttaactagaaagattttgaattcgataagggaatcaccactggggcagac

SEQ ID NO: 101487 - DNA, 80 bp, synthetic construct
  source 1..80: mol_type = other DNA
cttaatagatcaattttatagcagttttggttttttagagtcagacccaaacatgaccttaatgaatctggcatcaaatt

SEQ ID NO: 101488 - DNA, 80 bp, synthetic construct
  source 1..80: mol_type = other DNA
tgggcggtgaatttcagagtctaactgtgttcgatgtctccaaggatatttataaggagtcagatgataacgagagatac

SEQ ID NO: 101489 - DNA, 80 bp, synthetic construct
  source 1..80: mol_type = other DNA
cactatccattcctgagccaggactcagtggatcagaccgcaaaatttgcagccccgcctacgcatcatatattgaggcc

SEQ ID NO: 101490 - DNA, 80 bp, synthetic construct
  source 1..80: mol_type = other DNA
tcagcctttctctgttgttggaagccatggcgtccatattcagagcacttgaacaattcactcttgatcaggatggaggg

SEQ ID NO: 101491 - DNA, 80 bp, synthetic construct
  source 1..80: mol_type = other DNA
cattggactctcctccacctcttggtacaaaggaatttcaataatcaattatttggcaaataaaagagttcccctgggca

SEQ ID NO: 101492 - DNA, 80 bp, synthetic construct
  source 1..80: mol_type = other DNA
ttggggtcaatgcaatggctcggagagggcaagcccaaccgcccagacagcaagcaattgataatctaattgatgaagag

SEQ ID NO: 101493 - DNA, 80 bp, synthetic construct
  source 1..80: mol_type = other DNA
atcatctttatctggcagagggtagtggggcactaatgaccataattgaagcttactatccaggagagaagatatattac

SEQ ID NO: 101494 - DNA, 80 bp, synthetic construct
  source 1..80: mol_type = other DNA
aacagcttcttctcaagcggccaatgcccccctcagagaaacttccaacctcttcccacacaattcactgagagtatcat

SEQ ID NO: 101495 - DNA, 80 bp, synthetic construct
  source 1..80: mol_type = other DNA
ctatcaacatctaattaataatattccttgtgaattgggctttgttcaagagttcctaccactctggagcggaaatagta

SEQ ID NO: 101496 - DNA, 80 bp, synthetic construct
  source 1..80: mol_type = other DNA
aacagactgacttaagcaagagagagtgtgttgagtttatattgagtcaagtctccacagggacagtgtcactactagta

SEQ ID NO: 101497 - DNA, 80 bp, synthetic construct
  source 1..80: mol_type = other DNA
tgtgatttagaggaagggttcatatcgaacaactgtgatctatcctgtgcattgatacatgttttactattatctttcat

SEQ ID NO: 101498 - DNA, 80 bp, synthetic construct
  source 1..80: mol_type = other DNA
gttaataatggataatggattacttatcctaaaatcagacctagaaccattccaaaagctgtctacaatagtatccatcc

SEQ ID NO: 101499 - DNA, 80 bp, synthetic construct
  source 1..80: mol_type = other DNA
tgtcatacaggttcaaaaatattaccttagcaagatcagcatactctgaccctcaaagtagtgaagtatttctgatttgc

SEQ ID NO: 101500 - DNA, 80 bp, synthetic construct
  source 1..80: mol_type = other DNA
cttgctggaccagagaaaaccgttgggacattcaatgtggcaagagcccttgcacaacaggataagatggatgggttctc

SEQ ID NO: 101501 - DNA, 80 bp, synthetic construct
  source 1..80: mol_type = other DNA
attgataaatccatgtgttctcaaggatctgcgggaggagatggctgaatcatgcaataatgtaattgatgtgatcgata

SEQ ID NO: 101502 - DNA, 80 bp, synthetic construct
  source 1..80: mol_type = other DNA
tgcagcttaaaatggcacatgcacttgagaatcaagacgatcatgtactgctatcaaggctaggcagcagatcacagaca

SEQ ID NO: 101503 - DNA, 80 bp, synthetic construct
  source 1..80: mol_type = other DNA
gaagaggatgaagaagaagaagaggaagaagagcagaatcttgatgcagaaatagaaagaagatttgcactcaggttagc

SEQ ID NO: 101504 - DNA, 80 bp, synthetic construct
  source 1..80: mol_type = other DNA
aaccagctactccaaacaccacaagccaacactatccaagaagtcattgaaagaatagccaacttggttactatatactt

SEQ ID NO: 101505 - DNA, 80 bp, synthetic construct
  source 1..80: mol_type = other DNA
gaaggagacactgactacaattgaatcttacaatgaagacagaaccaggctcctatttctagcatataatatttcggctt

SEQ ID NO: 101506 - DNA, 80 bp, synthetic construct
  source 1..80: mol_type = other DNA
tcggaaaaattagaacatcagcccaattgacagccagggccgtactggatatcgtgattagaaactggcctataattgat

SEQ ID NO: 101507 - DNA, 80 bp, synthetic construct
  source 1..80: mol_type = other DNA
ttccatatgaggaaagttgtgatagcttctttgaagttgggtgaattcagtgtaagtctagttttgactccaaaatcatt

SEQ ID NO: 101508 - DNA, 80 bp, synthetic construct
  source 1..80: mol_type = other DNA
cctcagtatcactcatgccaggaagtatttttcacaaaaccttggacttgaccaattggatattgaactagggcaaaacc

SEQ ID NO: 101509 - DNA, 80 bp, synthetic construct
  source 1..80: mol_type = other DNA
taaaagttcttctacccagatcagagcaaaaacttatctggaaaaatatcggctgcattaatttgatatctactcttgaa

SEQ ID NO: 101510 - DNA, 80 bp, synthetic construct
  source 1..80: mol_type = other DNA
gatgataataatgatttcaggtatgagccatacccagatgaatctcaggaccagcccgagttcgatctcgctggcgatga

SEQ ID NO: 101511 - DNA, 80 bp, synthetic construct
  source 1..80: mol_type = other DNA
ggcgatgaaatctaattgactaggaagagaaaatgcagtctcagatatttaagaaaaaacttatagattttccccttggt

SEQ ID NO: 101512 - DNA, 80 bp, synthetic construct
  source 1..80: mol_type = other DNA
acaggagcaggaaagatggggacgccgcctggccgaactcgaagccgaaagggcacagacaagacaagggccaggtgcag

SEQ ID NO: 101513 - DNA, 80 bp, synthetic construct
  source 1..80: mol_type = other DNA
agccatagcgtccatattcagagcacttgaacaattcactcttgatcaggatggaggggggagagggggattcgctgacc

SEQ ID NO: 101514 - DNA, 80 bp, synthetic construct
  source 1..80: mol_type = other DNA
caccccagtctgggcaacaccaaaaccagacagacaatgaccaatcagaatacaacagcaatttcgcagaatagcaaggc

SEQ ID NO: 101515 - DNA, 80 bp, synthetic construct
  source 1..80: mol_type = other DNA
tttcaaacaacgagcgggcttgcagcttatacgcattttcttgcaactttacagttataggcttttaagaaaaaactact

SEQ ID NO: 101516 - DNA, 80 bp, synthetic construct
  source 1..80: mol_type = other DNA
ataggcccgaaggttggcaactttcgggcccccctcagccttggctccaaggcgcccccccaatccacccacaagccagc

SEQ ID NO: 101517 - DNA, 80 bp, synthetic construct
  source 1..80: mol_type = other DNA
actaacagccacagcacaactgacagaaaatggaccagccaccatcagatgcggaaatttccgcctggatagagagggga

SEQ ID NO: 101518 - DNA, 80 bp, synthetic construct
  source 1..80: mol_type = other DNA
ctggccactgccaggcacttcgcaccaggcccagtcacgtcccaaagcagtcttgggaagtccaccatcaagaagggaaa

SEQ ID NO: 101519 - DNA, 80 bp, synthetic construct
  source 1..80: mol_type = other DNA
cacaaaacaattggttgactccgcggaattcaccgccgcaacactggcgcccgcaggaggactgcagggatcaatgccct

SEQ ID NO: 101520 - DNA, 80 bp, synthetic construct
  source 1..80: mol_type = other DNA
gctcgattccagcagggcaatctaaggcagggcaaggcgcccggccaaaggttaagaaagctgcccaaactcgagcgacg

SEQ ID NO: 101521 - DNA, 80 bp, synthetic construct
  source 1..80: mol_type = other DNA
cccactaaacctgatgctcctacaattgaaccagtgtatgaggacatagtatccactcctggtagagacaaagcacaagt

SEQ ID NO: 101522 - DNA, 80 bp, synthetic construct
  source 1..80: mol_type = other DNA
gcagcttccatccccaaaattgagcgcaaaagacaaactcctatcggccccgccactccagcaacattccaatatcccca

SEQ ID NO: 101523 - DNA, 80 bp, synthetic construct
  source 1..80: mol_type = other DNA
ctggtccggagggacaaaactttaagagggggctgtcctcaggaagcgccgcctctattagaagaaaccccaatccagga

SEQ ID NO: 101524 - DNA, 80 bp, synthetic construct
  source 1..80: mol_type = other DNA
agccgcctgagacattgcaggcaactatcaaagtctttgtcatcaatactcctgatccaaatcttcgctatagaatgatg

SEQ ID NO: 101525 - DNA, 80 bp, synthetic construct
  source 1..80: mol_type = other DNA
cacagacgagagttcgatcttgtatggggaggaggatcattcacaatgcgagagtggtgcaatccaacctgcagtccaat

SEQ ID NO: 101526 - DNA, 80 bp, synthetic construct
  source 1..80: mol_type = other DNA
cacaccaatccccaggagacatcactgcagatgtggtcagtgccctcgagtctgcaaacagtgtgaaggagattatcagg

SEQ ID NO: 101527 - DNA, 80 bp, synthetic construct
  source 1..80: mol_type = other DNA
tacttgaaggtgatggagaacaagatgaaccagctggagtggaaaattgacaaagtattggctcaaaacaatataataca

SEQ ID NO: 101528 - DNA, 80 bp, synthetic construct
  source 1..80: mol_type = other DNA
gcagattaggaacgaacaaatggttctcaaagcagggatggctacacttgaagggctgataaccacgataaaaattatgg

SEQ ID NO: 101529 - DNA, 80 bp, synthetic construct
  source 1..80: mol_type = other DNA
atcccggagtcggcacgggagctgacgctgctcaagcaaagcgtgcatttaaggatgtgccagtagtagtcagcggacct

SEQ ID NO: 101530 - DNA, 80 bp, synthetic construct
  source 1..80: mol_type = other DNA
gttattggggagaatgatctcatctttgagtccaaactagaagtcggtaatctaggaaggcctcaaaaggtcaatcccac

SEQ ID NO: 101531 - DNA, 80 bp, synthetic construct
  source 1..80: mol_type = other DNA
accccgacgccgtggagtcccgaccgaatccgaattggcaagttacaaattgactctagcaaagttactcaaagactgca

SEQ ID NO: 101532 - DNA, 80 bp, synthetic construct
  source 1..80: mol_type = other DNA
tccctaataacacagcacaatcaaagttccttgacgcgattgaaaagataaaaactgaggctgactttaaggcgctcaaa

SEQ ID NO: 101533 - DNA, 80 bp, synthetic construct
  source 1..80: mol_type = other DNA
cgagagatagtacgtgctgcagtgtgaaaactgtcattgactatcgcttcatatctcaacactttttgcaatcttagcct

SEQ ID NO: 101534 - DNA, 80 bp, synthetic construct
  source 1..80: mol_type = other DNA
aactggtttctctgcttgcactatccgcacaacatctcaaaacaaaaagcattcacctctgttattgcaaatgccaacca

SEQ ID NO: 101535 - DNA, 80 bp, synthetic construct
  source 1..80: mol_type = other DNA
tgcttttgcttgcgcttagtagttagtaattcggcaagaactgggcagagacatggagcactcatgacactgcttagctt

SEQ ID NO: 101536 - DNA, 80 bp, synthetic construct
  source 1..80: mol_type = other DNA
ccaaaaaaatcataacctgaaggtctttaagaaaaaactaaggtgggtccgaacccgttcgaccccgaccgaccccaaaa

SEQ ID NO: 101537 - DNA, 80 bp, synthetic construct
  source 1..80: mol_type = other DNA
tggcgcaccgccaagcaacgattcctgtccatgtggatcaccacagtgagaagaatcatctccgtgctttcccgattgtc

SEQ ID NO: 101538 - DNA, 80 bp, synthetic construct
  source 1..80: mol_type = other DNA
caagcggattcacctgagggcacagaaaaggggcggttaattaaacagatgagattcaaggatctaactcctaggggctc

SEQ ID NO: 101539 - DNA, 80 bp, synthetic construct
  source 1..80: mol_type = other DNA
aactgaaccccctatatcattcataaacacctacgggttcataaaaccacttaggaccagagaggaattcttctcagagt

SEQ ID NO: 101540 - DNA, 80 bp, synthetic construct
  source 1..80: mol_type = other DNA
tgcataagcaatcacagaccccctgtctcactgcatgcagcataccattcggagcaggcccagcgctggatcatccggaa

SEQ ID NO: 101541 - DNA, 80 bp, synthetic construct
  source 1..80: mol_type = other DNA
agactcttggacgaaattgagaaggctttaatagttgtgaggaagagtgccagcacaagtgaggagtgtgtatttgaaat

SEQ ID NO: 101542 - DNA, 80 bp, synthetic construct
  source 1..80: mol_type = other DNA
caggaaacttcccccgatgctgaccaggcaccagcttgcggggaacaagatcctatgtgttccatctgataaatatgtta

SEQ ID NO: 101543 - DNA, 80 bp, synthetic construct
  source 1..80: mol_type = other DNA
aggctcctgggaaattgacctcaggtgtggattacgcttaccacattgtctttatatctgtcacactgtgccctcctagt

SEQ ID NO: 101544 - DNA, 80 bp, synthetic construct
  source 1..80: mol_type = other DNA
caaaaattcagggtacctatgccggtccaaagcttgcgtgcaaaagtcatgaggagtgtgcatttggaagtcatgttaaa

SEQ ID NO: 101545 - DNA, 80 bp, synthetic construct
  source 1..80: mol_type = other DNA
gattgactgtgatccgggttcccctataaccaaaaatttgatatatgattctgagaatgatgtttggcttgcttccatct

SEQ ID NO: 101546 - DNA, 80 bp, synthetic construct
  source 1..80: mol_type = other DNA
gcccactgcagtgatgcagaatcattttaggactgctgaacgctcacctgactgccaaatcgaaagaattgaggtcgatg

SEQ ID NO: 101547 - DNA, 80 bp, synthetic construct
  source 1..80: mol_type = other DNA
ggttccatctatgtaatctatacaaaggccataagcccttcaaagaatacgatgaccatcattttgctgcaaagtgcagg

SEQ ID NO: 101548 - DNA, 80 bp, synthetic construct
  source 1..80: mol_type = other DNA
tcaatgaaactggaagtagggattgttgatctatggggtcccacgtttcttgttaagtcccacgggaaaataccccatgc

SEQ ID NO: 101549 - DNA, 80 bp, synthetic construct
  source 1..80: mol_type = other DNA
agctcggcctttcttcggaaagcatggttgggtctgtcatcccataatggattgtgcacctgcaatttgcaagtcattgt

SEQ ID NO: 101550 - DNA, 80 bp, synthetic construct
  source 1..80: mol_type = other DNA
gggcactgagtgtatctattgtgcaagtaactgcagtcctacaggcatcagatttgtctcaaatggtccgaatgacagat

SEQ ID NO: 101551 - DNA, 80 bp, synthetic construct
  source 1..80: mol_type = other DNA
gtgattttcccgaaaataaaagttaatccggacctacacggccttggcaaatccagatggaacccagtaaccaaaatagt

SEQ ID NO: 101552 - DNA, 80 bp, synthetic construct
  source 1..80: mol_type = other DNA
cagccccgaataaagacaccacaactaggtgcaacaaaagcatcaagaacctgagacatcccccaacattccaaagacag

SEQ ID NO: 101553 - DNA, 80 bp, synthetic construct
  source 1..80: mol_type = other DNA
agtccaaacctcggcatatgacccataatcaatattgctgcaagactgcatagaaatgcttctgctctaagctatagcgg

SEQ ID NO: 101554 - DNA, 80 bp, synthetic construct
  source 1..80: mol_type = other DNA
tagcctgcaagttaatagaaagagctctcacatcactatctgcattatcaaatctgcacactcatttctcaacgcttgct

SEQ ID NO: 101555 - DNA, 80 bp, synthetic construct
  source 1..80: mol_type = other DNA
ttaccaatcttcagatttaagaaaaaacctaatctcaattacaaatgcagaattgagcagtctaaattgggtccgaaccc

SEQ ID NO: 101556 - DNA, 80 bp, synthetic construct
  source 1..80: mol_type = other DNA
gttcggacccgaacccgagacaccaagcgaagacatccactcccccccccaaccccaaaggaagccgactccaaaaagag

SEQ ID NO: 101557 - DNA, 80 bp, synthetic construct
  source 1..80: mol_type = other DNA
gattcgaaccgggaacataccgcatcaggcccaatgcaagaacaccgctgacagtaggggaggttgttgctcttgaagaa

SEQ ID NO: 101558 - DNA, 80 bp, synthetic construct
  source 1..80: mol_type = other DNA
gactccacacaatggcacacataaactcattaattttacttctaatgttgacagagacagggagttctgtgaatattcag

SEQ ID NO: 101559 - DNA, 80 bp, synthetic construct
  source 1..80: mol_type = other DNA
ctgcttcagtcactgggagtaatcaacactcataaacgccaacttgcattttataatcaacaacctccgtcatacctcgt

SEQ ID NO: 101560 - DNA, 80 bp, synthetic construct
  source 1..80: mol_type = other DNA
aattagacttctgccgacactaaatattcctaagcagaattgcactcttaatagtattaacaggtatgaaaaggctgtca

SEQ ID NO: 101561 - DNA, 80 bp, synthetic construct
  source 1..80: mol_type = other DNA
aagatataataaaacccattagtgacaatctcaattggctttctgacaatttaattccaaaaagaagagggaaaagattt

SEQ ID NO: 101562 - DNA, 80 bp, synthetic construct
  source 1..80: mol_type = other DNA
gcgggggcagctataggacttgcagcactcggtgttgcagttgctgcacaggcaacagctgcagtagctctagtggaagc

SEQ ID NO: 101563 - DNA, 80 bp, synthetic construct
  source 1..80: mol_type = other DNA
cagagcaaatgcagagaagatttcctcaatgtcagcagccctacaagagacgaaccaagctgtctcttctttgacagctg

SEQ ID NO: 101564 - DNA, 80 bp, synthetic construct
  source 1..80: mol_type = other DNA
ccatggcgagtagtggtattgcaattcaagcaatacagaatgagatcaataatgtgattcatcctattctcaaccaggta

SEQ ID NO: 101565 - DNA, 80 bp, synthetic construct
  source 1..80: mol_type = other DNA
cagtgtggggtactagactcacaaattgcatccatcttaaacttatatctcataaagatcacaaccatctttaacaatca

SEQ ID NO: 101566 - DNA, 80 bp, synthetic construct
  source 1..80: mol_type = other DNA
actaacaaatcctgctctccatagaatatcgatccaggcattgtctgttctaatgcaaagtactaaagactcactcaaaa

SEQ ID NO: 101567 - DNA, 80 bp, synthetic construct
  source 1..80: mol_type = other DNA
acctcacagccggagatacccaaacctcactggatctgataagaaccaatctaatagagggccagattgttgcagtcaac

SEQ ID NO: 101568 - DNA, 80 bp, synthetic construct
  source 1..80: mol_type = other DNA
atggcagatgatatcccagaggcattggctaataacaccccttttattgatgccaacaccgagatggaagactgtgatga

SEQ ID NO: 101569 - DNA, 80 bp, synthetic construct
  source 1..80: mol_type = other DNA
atgacaacgcttcagatggttatagcagtgtacatcccggcggttgcgaagttggagtcagctgtcctcttagattttat

SEQ ID NO: 101570 - DNA, 80 bp, synthetic construct
  source 1..80: mol_type = other DNA
ttcaattactgtcagctctaatcaatctgaggtaatgctgcagctgccctcaagaatattagaggtcggaaataacatat

SEQ ID NO: 101571 - DNA, 80 bp, synthetic construct
  source 1..80: mol_type = other DNA
atacgtttaagggagatcagtgcacattaactgaaactacagcttactgcttatacagtgatgctgtccctgtcaatgag

SEQ ID NO: 101572 - DNA, 80 bp, synthetic construct
  source 1..80: mol_type = other DNA
aaaatttctgattgcatgaagggaattcaaagctcctgtatatttacaaggatcataggctcctttgctaatagatttgc

SEQ ID NO: 101573 - DNA, 80 bp, synthetic construct
  source 1..80: mol_type = other DNA
cagtgtgaatggggcaatatttgcaaattgtaagagtttaacatgttcttgtacccaacctgatgggttaatatatcagc

SEQ ID NO: 101574 - DNA, 80 bp, synthetic construct
  source 1..80: mol_type = other DNA
ccgataatgtacccttgacaatcattgacaaaattaaatgttcaaagttgaatataggacacctgacctttaatataaga

SEQ ID NO: 101575 - DNA, 80 bp, synthetic construct
  source 1..80: mol_type = other DNA
gatagcacaaatgctactattgatctacatactgatctgtccgattctcagattactattacaaatcctcttgacttatc

SEQ ID NO: 101576 - DNA, 80 bp, synthetic construct
  source 1..80: mol_type = other DNA
cgcagagcttactcaaattaataattcggtaattaattcccacctgcatcttatgaatagtgaaaatatattgagaagaa

SEQ ID NO: 101577 - DNA, 80 bp, synthetic construct
  source 1..80: mol_type = other DNA
ttgatagtggactattcagcaaggcgataatgatcttcttgcttgtgggggtctgctctttaattatagttgttataggt

SEQ ID NO: 101578 - DNA, 80 bp, synthetic construct
  source 1..80: mol_type = other DNA
cttatagtctggattaggtttatactcctccatttaaagagttcttcacacactaatcgccaaggaagcagtttattttc

SEQ ID NO: 101579 - DNA, 80 bp, synthetic construct
  source 1..80: mol_type = other DNA
tattgatagtgtataacaatagcagtagatagaacattatccactacacaggttgcctaatgcataataggtctttcaac

SEQ ID NO: 101580 - DNA, 80 bp, synthetic construct
  source 1..80: mol_type = other DNA
cactactctcctataagttaaaatctgttttaataaaaaacttacagtaaaagtcaggtaacttgggctcgacccagtca

SEQ ID NO: 101581 - DNA, 80 bp, synthetic construct
  source 1..80: mol_type = other DNA
gcccaccagcccacaaatcccgaacggacagggtctgccctcaacaagaacaccatgcatgccagaaactcatcagtcag

SEQ ID NO: 101582 - DNA, 80 bp, synthetic construct
  source 1..80: mol_type = other DNA
tagcatcagtgattccatcgacaatgtgtttgggaaaaggaacactcctgtaatcaaaaggacaggaaaaaaattattta

SEQ ID NO: 101583 - DNA, 80 bp, synthetic construct
  source 1..80: mol_type = other DNA
gactaggctcactcatatttctaatagtaataattagcctaacagttaagataataactgaactctctctagttaagagt

SEQ ID NO: 101584 - DNA, 80 bp, synthetic construct
  source 1..80: mol_type = other DNA
gagtgtagcaatagagaccatgttaccgaaataatcaatttgcagcaaaaagaactcagtctgatgaataacatcataac

SEQ ID NO: 101585 - DNA, 80 bp, synthetic construct
  source 1..80: mol_type = other DNA
aaccttgaacacattattaacaacaaccacggttgacctcccgattaaattgactaactttgggaaaagtatagttgatc

SEQ ID NO: 101586 - DNA, 80 bp, synthetic construct
  source 1..80: mol_type = other DNA
tgatacttgtgacgggtctaatccgtctgtccaaatcttgtctgtagggaaattaattacaggggataatggacaacctg

SEQ ID NO: 101587 - DNA, 80 bp, synthetic construct
  source 1..80: mol_type = other DNA
aacacaagactctttacactcagcaactaagccaaacagatcggttgtatcattgctcagtgactatgaccactttaggt

SEQ ID NO: 101588 - DNA, 80 bp, synthetic construct
  source 1..80: mol_type = other DNA
tgttacattttatgctcaaagccaagggttaatgagacccaggattacgagacaatagggatagagcccatgataatagg

SEQ ID NO: 101589 - DNA, 80 bp, synthetic construct
  source 1..80: mol_type = other DNA
tatgttagggcttgacggagtatatactgatctgggtaaccctgtaggaatctctgacaatagcttatacgcaatgtatc

SEQ ID NO: 101590 - DNA, 80 bp, synthetic construct
  source 1..80: mol_type = other DNA
caggccccgggggaggtgtgatgtataaggattttttggtctttccattgcatggaggggttagattctctgaggcttcc

SEQ ID NO: 101591 - DNA, 80 bp, synthetic construct
  source 1..80: mol_type = other DNA
taccagcaacaaggtaggctgaaccagcattacctgttgcagggagaggtaaggcgaagaatacaggtagcaataagaga

SEQ ID NO: 101592 - DNA, 80 bp, synthetic construct
  source 1..80: mol_type = other DNA
aaaatgttagggaagaacatcacttttcggggcttccctcctagtgacacatgcactgagcatgaaaagagcctgaccca

SEQ ID NO: 101593 - DNA, 80 bp, synthetic construct
  source 1..80: mol_type = other DNA
agagccggctaatatgctaacaagtccttattacggtgaggttttagttcttgactttctttatgtgtgtacgttattgg

SEQ ID NO: 101594 - DNA, 80 bp, synthetic construct
  source 1..80: mol_type = other DNA
ataacatacctggggagtgtagtatacagttaattcctcctgacaacatgacaatgggctctgaatcaaaattgtacaaa

SEQ ID NO: 101595 - DNA, 80 bp, synthetic construct
  source 1..80: mol_type = other DNA
ttgaataactcattgctactttataaacgaagctcatcttggtggccttatacagaagtataccaactaagtctaagggt

SEQ ID NO: 101596 - DNA, 80 bp, synthetic construct
  source 1..80: mol_type = other DNA
gtccaaaaatagcatgaaagtgcgtgaatcagtaaggctgaatatcacttctactactagacctggagtagaaggatgca

SEQ ID NO: 101597 - DNA, 80 bp, synthetic construct
  source 1..80: mol_type = other DNA
gtcgaaatcgactttgagcttgttcttccggagcctctgacttgcctgatttcataagtcagcctttctctgttgttgga

SEQ ID NO: 101598 - DNA, 80 bp, synthetic construct
  source 1..80: mol_type = other DNA
acatcaacaaagtatgtcctaaagtatgtgtaactggagtgtttcaggcaccaggaattataaggaaagcattgagtcca

SEQ ID NO: 101599 - DNA, 80 bp, synthetic construct
  source 1..80: mol_type = other DNA
aaggagtctaatgaggatctgttgtttttccaggcctggacttcagattctatagcacgccaaggtccccttatatctct

SEQ ID NO: 101600 - DNA, 80 bp, synthetic construct
  source 1..80: mol_type = other DNA
atgtagggctgattcatgtgtactgaccatcccgctaggcaattctgatgttttcattggatacacagattcattctgtc

SEQ ID NO: 101601 - DNA, 80 bp, synthetic construct
  source 1..80: mol_type = other DNA
tatcagatagagataatgagaagatctactgtgttgcattattagaactagataacatgccttactctgagatgacaatc

SEQ ID NO: 101602 - DNA, 80 bp, synthetic construct
  source 1..80: mol_type = other DNA
agatcttttttgtaccttatcaaataacaatgtaagaaagagagtcactagaacatacaacatgctaggagctcaggtta

SEQ ID NO: 101603 - DNA, 80 bp, synthetic construct
  source 1..80: mol_type = other DNA
gagtcttccaatcagacaatttttagtcaatgagctccagattgcaagcaaccagggacccattacaggcaagtactatg

SEQ ID NO: 101604 - DNA, 80 bp, synthetic construct
  source 1..80: mol_type = other DNA
catggtaattatctagagtaggatgcaaagcaattttaatcttcttgatgtctcactcataatattaacttcttcgactc

SEQ ID NO: 101605 - DNA, 80 bp, synthetic construct
  source 1..80: mol_type = other DNA
aactatcccccaagaaaaagctacgctatgcttaaattcttctttaagaaaaaagatgggccagaatggctgccccggcc

SEQ ID NO: 101606 - DNA, 80 bp, synthetic construct
  source 1..80: mol_type = other DNA
cagatcatcctccctgaggtgcatctggactctcccattgttgagaacaagttgctatacctaatccaactgggagaatt

SEQ ID NO: 101607 - DNA, 80 bp, synthetic construct
  source 1..80: mol_type = other DNA
accaacttatgattattactacaatcatgactatttcccaggcattgattggagccgaatcaggcatgaagaaagtaaaa

SEQ ID NO: 101608 - DNA, 80 bp, synthetic construct
  source 1..80: mol_type = other DNA
tattccaaagactgagtgaagtaaaggagagactattggccaaatgtctatcttctcaaagaaaacgaaaaaacctgtcc

SEQ ID NO: 101609 - DNA, 80 bp, synthetic construct
  source 1..80: mol_type = other DNA
ttaaatttcaatcctgtaccatggccgaaatgcatgactatactgcacagagtaatcatcaattcgtcacttgaaagatt

SEQ ID NO: 101610 - DNA, 80 bp, synthetic construct
  source 1..80: mol_type = other DNA
taaagatgcagaacatataatcagtcatgcattagcaccgttgtcacctggcctcacaacccttctagaagatgtgtcaa

SEQ ID NO: 101611 - DNA, 80 bp, synthetic construct
  source 1..80: mol_type = other DNA
gcaaaattacagggaaacaaaacctattccaacaaaatattaagtcctgtagttttcacccgaatcattctagacccaat

SEQ ID NO: 101612 - DNA, 80 bp, synthetic construct
  source 1..80: mol_type = other DNA
tctgtcatgcacattgccacaagtgcattccaagtggagtggaaggacaacttcaatcaatggtttttgataaggcattt

SEQ ID NO: 101613 - DNA, 80 bp, synthetic construct
  source 1..80: mol_type = other DNA
aatgagacagctaattatgaggaatagtgagggccacacacagattacacctgtagagattgatgataggattatgagtg

SEQ ID NO: 101614 - DNA, 80 bp, synthetic construct
  source 1..80: mol_type = other DNA
ctatggttgcagacattggtaaatatattatgaatgcaggaatgggaggcttcttcatgacaattaggtttgctttggga

SEQ ID NO: 101615 - DNA, 80 bp, synthetic construct
  source 1..80: mol_type = other DNA
tgatcattacaccagagttagtaaccatttggctatcagagaacaacacaatcatttatctgacttttgagatggtcctg

SEQ ID NO: 101616 - DNA, 80 bp, synthetic construct
  source 1..80: mol_type = other DNA
atgatcactgatctgtatgaaggacgaatgaacatgatgctcctaactaccttaagctgttatttggcaccgcttaaatc

SEQ ID NO: 101617 - DNA, 80 bp, synthetic construct
  source 1..80: mol_type = other DNA
aaggctaaagcagctgttcatcattgtggatgacttaagttccatcatagggaattcagtttactccattgttgcatcta

SEQ ID NO: 101618 - DNA, 80 bp, synthetic construct
  source 1..80: mol_type = other DNA
tggaaagtttagtgtatggtcaactccaactttctgatcctgtacctgatgtagcaggtgaattctattcctttgttgtc

SEQ ID NO: 101619 - DNA, 80 bp, synthetic construct
  source 1..80: mol_type = other DNA
ggagaaatgttaacagcactgacagatacaaaagaattcacaacagatgaggctagaattgtagtggaaagaattactga

SEQ ID NO: 101620 - DNA, 80 bp, synthetic construct
  source 1..80: mol_type = other DNA
gtgttatgaggatttaacaccggacttgattgctgaactgctctgtgtcatgaggatgtggggtcacccatctttgagtg

SEQ ID NO: 101621 - DNA, 80 bp, synthetic construct
  source 1..80: mol_type = other DNA
cagaaaaagctgctgaaaaggtgcgaaaatctatgtgtgctccaaagataatagatttagaaacaactctgaagacactt

SEQ ID NO: 101622 - DNA, 80 bp, synthetic construct
  source 1..80: mol_type = other DNA
gctttctttcatggaatattgatcaatggttacaggaggaagcataatgggatttggcctaaatgtagacttccaccaaa

SEQ ID NO: 101623 - DNA, 80 bp, synthetic construct
  source 1..80: mol_type = other DNA
tgcaggagtaagcctgactgagatgaagcatgacaattctgagctcccacatcagtacatcctaaatcattggaaagaga

SEQ ID NO: 101624 - DNA, 80 bp, synthetic construct
  source 1..80: mol_type = other DNA
ttgcttttatagaatttgagaaaagcttcgattcagacccaggtgatgacttgagtatattcatgaaggataaggctatt

SEQ ID NO: 101625 - DNA, 80 bp, synthetic construct
  source 1..80: mol_type = other DNA
caaaaatggccaccgttagctcttgctgcattctcaggtgagattgtcaagattaaaagtctcatgttacagtatagaag

SEQ ID NO: 101626 - DNA, 80 bp, synthetic construct
  source 1..80: mol_type = other DNA
cctataggggggaaccagtggtcgtttgggacgactatggcatgggaaacatcattaaggatgccatgatgcttcaagaa

SEQ ID NO: 101627 - DNA, 80 bp, synthetic construct
  source 1..80: mol_type = other DNA
tacactcaattgcgaccgtatagagaataggggtaaaatgtttgaaagcgatgtcatcgtcttgaccaccaattcgccca

SEQ ID NO: 101628 - DNA, 80 bp, synthetic construct
  source 1..80: mol_type = other DNA
tgggtaaaccggggggcaccagtccaccggatgaccccccaggtgtcacgatcaagtacgatgctcagagtgacaccatt

SEQ ID NO: 101629 - DNA, 80 bp, synthetic construct
  source 1..80: mol_type = other DNA
aggccgtgggggatgtcagatttaaaaagtgcaggatcatctggaaaggcgtaacttacgaccttgagtcagatggtaag

SEQ ID NO: 101630 - DNA, 80 bp, synthetic construct
  source 1..80: mol_type = other DNA
agacaactggggagattcaccaggctgtcctgcgcttacgccaagctcgggtgcggtattacgtcatgactgctcagaat

SEQ ID NO: 101631 - DNA, 80 bp, synthetic construct
  source 1..80: mol_type = other DNA
aggttggggcttttgggtctcacccaatctcctcatcacatcaacccatgtcataccaaagggtgttgaagagttatttg

SEQ ID NO: 101632 - DNA, 80 bp, synthetic construct
  source 1..80: mol_type = other DNA
gggttccaatcaagcaagtacaaatacacaggtgtggcgagttcaccagacttaggttctcgaagatgatcaggccagat

SEQ ID NO: 101633 - DNA, 80 bp, synthetic construct
  source 1..80: mol_type = other DNA
agatggggcacccgaaggtgtcgtttgtagcatactggtcaagagaccaacaggtgagtgcctgccactagcagtcagga

SEQ ID NO: 101634 - DNA, 80 bp, synthetic construct
  source 1..80: mol_type = other DNA
ctggggatgttgctgactggctccaatgcaaagaacatggacctggggaccacccctggtgactgtggatgcccttacgt

SEQ ID NO: 101635 - DNA, 80 bp, synthetic construct
  source 1..80: mol_type = other DNA
gggggtcgcgaccccagagtcgacggtgggccctcactttaccaggtgatgagggaccaacttaaacatttcacagctcc

SEQ ID NO: 101636 - DNA, 80 bp, synthetic construct
  source 1..80: mol_type = other DNA
gctgtggggtgcagatctcggaaccatggtccggtgcgccagagcattcggcccgttcactgacgcacttaagaagtgct

SEQ ID NO: 101637 - DNA, 80 bp, synthetic construct
  source 1..80: mol_type = other DNA
agctggcctccgttgtggcagaagacttgatttccccaagtatgcttgatgttggcgactatgtcgtccaggtcaatgaa

SEQ ID NO: 101638 - DNA, 80 bp, synthetic construct
  source 1..80: mol_type = other DNA
ctggtgtcccctgcacctcacagttaaacagtattgcccattggatcatcacccttacatccatggctgaggccactggc

SEQ ID NO: 101639 - DNA, 80 bp, synthetic construct
  source 1..80: mol_type = other DNA
ggccaaggccgcaggggtagagtgaggtttcaataatggcttctagcattatggcaggcatagcaggcgatgtgctaggc

SEQ ID NO: 101640 - DNA, 80 bp, synthetic construct
  source 1..80: mol_type = other DNA
tggggttctagtgcatcccaacattcacagctggaaccctttcatccaaacgctctgagagtggcttgggggtctactcc

SEQ ID NO: 101641 - DNA, 80 bp, synthetic construct
  source 1..80: mol_type = other DNA
tggggttctagtgcatcccaacattcacagctggaaccctttcatccaaacgctctgagagtggcttggaggtctactcc

SEQ ID NO: 101642 - DNA, 80 bp, synthetic construct
  source 1..80: mol_type = other DNA
ttggagagagtaggggacgctcttctcactgcgctgggggcactcttctccaagccaataaagaacataattgggaagct

SEQ ID NO: 101643 - DNA, 80 bp, synthetic construct
  source 1..80: mol_type = other DNA
tcgctttcacccgaggggtgcttctaatgtttagtcaacaactcactaatgagtagttgtgagtttttgtaatctgtgaa

SEQ ID NO: 101644 - DNA, 80 bp, synthetic construct
  source 1..80: mol_type = other DNA
tcaacaactcactaatgagtagttgtgagtttttgtaatctgtgaaatgtagattctttaattaattgaaattggcattt

SEQ ID NO: 101645 - DNA, 80 bp, synthetic construct
  source 1..80: mol_type = other DNA
aacaagggggcgtgtttgcaaacatgaagattgggctcaagaaagttcttgaacccaaatctgagacacccacggtaaga

SEQ ID NO: 101646 - DNA, 80 bp, synthetic construct
  source 1..80: mol_type = other DNA
cgaattccaggggcctgaggatttggctgcagaaatagtcccattgatcctaggtggtatagggatggtagtgggtttca

SEQ ID NO: 101647 - DNA, 80 bp, synthetic construct
  source 1..80: mol_type = other DNA
cgaattccaggggcctgaggatttggctgcagaaatagtcccattgatcctagggggtatagggatggtagtgggtttca

SEQ ID NO: 101648 - DNA, 80 bp, synthetic construct
  source 1..80: mol_type = other DNA
cgctattggtggtgatcaattacttctacaaggtggacatcaccctgaccttggattgagtttctacaccaaccttttca

SEQ ID NO: 101649 - DNA, 80 bp, synthetic construct
  source 1..80: mol_type = other DNA
aacaactaaaggaactttacccaacccttaggcttctctccttagggccaccagaaattgcgcacgtagcaaaactggaa

SEQ ID NO: 101650 - DNA, 80 bp, synthetic construct
  source 1..80: mol_type = other DNA
ggcatgagccaccttgaagtctggacggccattcaagaagctggattggattccctgccgggggctggtgcagaaatatt

SEQ ID NO: 101651 - DNA, 80 bp, synthetic construct
  source 1..80: mol_type = other DNA
gaacgaccgtgtccgtatattgatctctatgggtaaatgtggtggtcaagaatggttggatgtgatgcgtgctgcccaca

SEQ ID NO: 101652 - DNA, 80 bp, synthetic construct
  source 1..80: mol_type = other DNA
aaatcaatcttccaacttcggcaaccatgatgtttggacatatgggaaacaatcgaagaacgtttcgagcacttggtatg

SEQ ID NO: 101653 - DNA, 80 bp, synthetic construct
  source 1..80: mol_type = other DNA
gcttcgcgaagtacaaagcgaaaaaccagccgatgcttatggattcatcgcctttatcccttggcctttccaagaggatg

SEQ ID NO: 101654 - DNA, 80 bp, synthetic construct
  source 1..80: mol_type = other DNA
gtggtttgtgaaactcattgctggaagaactagaactggcacccgtagcttttatgtatatcccagctaccaagatgcat

SEQ ID NO: 101655 - DNA, 80 bp, synthetic construct
  source 1..80: mol_type = other DNA
actaacaaatgcaaggtataggcgggagattgctaacttcctttaaaataagcctctgaagcctctccttctttttctaa

SEQ ID NO: 101656 - DNA, 80 bp, synthetic construct
  source 1..80: mol_type = other DNA
caaacctgtcctgactggcttttacctttagttttaggtttgagtggaactgtgacttctacttgggaaaatttgcaaga

SEQ ID NO: 101657 - DNA, 80 bp, synthetic construct
  source 1..80: mol_type = other DNA
tggcccccaagagaaaagcttctaaacctgtttgcagcccaccccccaaaaaggactgcagtcaaacatatgtgaaatgc

SEQ ID NO: 101658 - DNA, 80 bp, synthetic construct
  source 1..80: mol_type = other DNA
aaggactgcagtcaaacatatgtgaaatgccctaaaaggtgtcccaaagttccctgtgtccctaaattgctgataaaggg

SEQ ID NO: 101659 - DNA, 80 bp, synthetic construct
  source 1..80: mol_type = other DNA
cctaaaaggtgtcccaaagttccctgtgtccctaaattgctgataaaggggggtattgaagttttagaaactgtgtctgg

SEQ ID NO: 101660 - DNA, 80 bp, synthetic construct
  source 1..80: mol_type = other DNA
cccagatagcattactcagattgaattatttttacaaccaagaatgggagtgaatacctatgatattgagagatattcta

SEQ ID NO: 101661 - DNA, 80 bp, synthetic construct
  source 1..80: mol_type = other DNA
attggtatgggtatagttatgaatttcacccaaaagatgtaaatgatgtgccctccccagaaactctcccatcttatgct

SEQ ID NO: 101662 - DNA, 80 bp, synthetic construct
  source 1..80: mol_type = other DNA
gcagctagagtgcctctcccccccttaaatgaagatatgacatgtaatatgattatgatgtgggaggctgtttctgtgaa

SEQ ID NO: 101663 - DNA, 80 bp, synthetic construct
  source 1..80: mol_type = other DNA
aactgaagttattggtatcaatactctaatcaatgtgcataaagaaaagcagctggaaattccccaatatggagaacatg

SEQ ID NO: 101664 - DNA, 80 bp, synthetic construct
  source 1..80: mol_type = other DNA
gcagctgctcgtgcttaccaaacgcttcttcagccacactgaggagtgttatgagtcagtttgtcttaagtatctgcacc

SEQ ID NO: 101665 - DNA, 80 bp, synthetic construct
  source 1..80: mol_type = other DNA
ctgcaggaattcctattcaaggcccaaattaccacttcttctctattggaggagagccactagatcttcaaggaatagtg

SEQ ID NO: 101666 - DNA, 80 bp, synthetic construct
  source 1..80: mol_type = other DNA
gctgattatagaacaatgtatccagaaggggaaaataagcctgtaaacataaaaacagtgacaaaaacacctatgacacc

SEQ ID NO: 101667 - DNA, 80 bp, synthetic construct
  source 1..80: mol_type = other DNA
caaaaatcaaggtatggatcctactgcaaaaactaagctacttaaagatggttactatcccatagaaatctggtgccctg

SEQ ID NO: 101668 - DNA, 80 bp, synthetic construct
  source 1..80: mol_type = other DNA
atccctccagaaatgaaaacaccagatactttggatcctttacaggagggacagataccccacctgttttgcaatttaca

SEQ ID NO: 101669 - DNA, 80 bp, synthetic construct
  source 1..80: mol_type = other DNA
aataccttaaccacagtactcttagatgaaaatggaattgggcctttatgcaaagcagatggattatttgtagctgcagc

SEQ ID NO: 101670 - DNA, 80 bp, synthetic construct
  source 1..80: mol_type = other DNA
agatatctgtggctttttccaccaggcctctggcatgaggtacaggggacttcccagatacttcaatgtaactttaagaa

SEQ ID NO: 101671 - DNA, 80 bp, synthetic construct
  source 1..80: mol_type = other DNA
aaagatgggtgaaaaacccctatggaattaattctttgataaacactctttttaacaattttgttccccaactcaaaggt

SEQ ID NO: 101672 - DNA, 80 bp, synthetic construct
  source 1..80: mol_type = other DNA
caacccatgacaggtgacaattcccaggtagaggaagtacgcgtctatgatggcagagaacagttacctggagggttaga

SEQ ID NO: 101673 - DNA, 80 bp, synthetic construct
  source 1..80: mol_type = other DNA
tctgccaaggataatagagcaatttaaacctaagacctttgaagttaatgtgcctgttgtgggtgatgtgggtgataatg

SEQ ID NO: 101674 - DNA, 80 bp, synthetic construct
  source 1..80: mol_type = other DNA
tgggagaagaacatgacaatgacacagataatccaaacaataacagggataatgatcatgatcagcctttgataaacaat

SEQ ID NO: 101675 - DNA, 80 bp, synthetic construct
  source 1..80: mol_type = other DNA
ctgataatctattggaggatatgtttttattttaagtgggttttgtcacacaggaaattgagcaatctcatcaggaagcg

SEQ ID NO: 101676 - DNA, 80 bp, synthetic construct
  source 1..80: mol_type = other DNA
gttcctttaattactgcaatcttgtaaagcaaagcatatcattaaaataaacaattatgtttgcccagagtcctgtgtga

SEQ ID NO: 101677 - DNA, 80 bp, synthetic construct
  source 1..80: mol_type = other DNA
agagtcctgaatcttgtgactcgagatccttctcaggtctggccttctgctgcctctctggttcctccattgtattttca

SEQ ID NO: 101678 - DNA, 80 bp, synthetic construct
  source 1..80: mol_type = other DNA
tgttgatgagggactttagaggcaactggaggctcggcttctgaatcctctggagctgcagcaggcggtgcatcagctgg

SEQ ID NO: 101679 - DNA, 80 bp, synthetic construct
  source 1..80: mol_type = other DNA
agcttctacaaataaatcttcaagagggtcaagtccacattcaacattttgtatcattttttcaaaatgtgcttgaggta

SEQ ID NO: 101680 - DNA, 80 bp, synthetic construct
  source 1..80: mol_type = other DNA
tatctccacggaaggcgtctcgccatctttcaacctcaggcctaatttcatcatcaaatttttccttgggtaacaaccac

SEQ ID NO: 101681 - DNA, 80 bp, synthetic construct
  source 1..80: mol_type = other DNA
ataagccccaaaagtaaagtacatcctctctgcaaaaccctcaatttctgcatgtctatattctttctaagtgaggttct

SEQ ID NO: 101682 - DNA, 80 bp, synthetic construct
  source 1..80: mol_type = other DNA
gagattttccttatgagcaaatgtaattgttatagcaaatctacacataacagtatcaggtattatatattcattacatg

SEQ ID NO: 101683 - DNA, 80 bp, synthetic construct
  source 1..80: mol_type = other DNA
tggtaatactaggaggaaatatttgactccttttattctgatgtttcttttctaaattcacatttacagatccatccata

SEQ ID NO: 101684 - DNA, 80 bp, synthetic construct
  source 1..80: mol_type = other DNA
tgtctaaattatgcattccttggccagaaggtagatctttgttttgtcctctagaacccttaacatcctcaaagcacacc

SEQ ID NO: 101685 - DNA, 80 bp, synthetic construct
  source 1..80: mol_type = other DNA
ataaacaaatcttgtgcacaacccaactcaaaatttaatctatcttgggggcaattaatatttaatgcttttccctctaa

SEQ ID NO: 101686 - DNA, 80 bp, synthetic construct
  source 1..80: mol_type = other DNA
acatcttttgagactgttttttgaactgctcggctggatcattaaccctttgaaaacgtaagtttatcttttctttttta

SEQ ID NO: 101687 - DNA, 80 bp, synthetic construct
  source 1..80: mol_type = other DNA
taaatctaggaatgctgcagcaaggcttgttttaccagagttaatgggccccttaaaaagaacattcctcttctttggaa

SEQ ID NO: 101688 - DNA, 80 bp, synthetic construct
  source 1..80: mol_type = other DNA
tgttatctgtcaacaaattaagaaccttgaaaactttccactcaaaattcccaaacattaccttgtaccaagcaacccct

SEQ ID NO: 101689 - DNA, 80 bp, synthetic construct
  source 1..80: mol_type = other DNA
gcaagaaaaatatacaaagtctccaacttcatttcttgcaattctttcaatttacacagaattttttctcttaacatttc

SEQ ID NO: 101690 - DNA, 80 bp, synthetic construct
  source 1..80: mol_type = other DNA
ttctctagtttgctctaacatttttaacctgttctttgcaatcacaacgtctgcagcctgctgacaaatagttttttgac

SEQ ID NO: 101691 - DNA, 80 bp, synthetic construct
  source 1..80: mol_type = other DNA
ttttacatttcaaaaaaaacttggcattttcataattttttctatgagcttcatgaggcttcaaaggtaatttactgcat

SEQ ID NO: 101692 - DNA, 80 bp, synthetic construct
  source 1..80: mol_type = other DNA
ttatcacataatgcagggtcatttgcaaaatctagataatgagctaaaattattacccagtctgttaaattatagttgca

SEQ ID NO: 101693 - DNA, 80 bp, synthetic construct
  source 1..80: mol_type = other DNA
tgcaaaatcagctactaagttccaattacagcttggctctttgttctctgcaaactcatgatcccagagtccaggtttat

SEQ ID NO: 101694 - DNA, 80 bp, synthetic construct
  source 1..80: mol_type = other DNA
tttctttcaaaaggcaaaacggctctttaatcaggcatgaatataattcaggagacttaattacagccttacataagagg

SEQ ID NO: 101695 - DNA, 80 bp, synthetic construct
  source 1..80: mol_type = other DNA
aaactaacagagcaaaaggtacatgcaaaattcttaattgcagttactctatgtctagttaataagactagaaataacaa

SEQ ID NO: 101696 - DNA, 80 bp, synthetic construct
  source 1..80: mol_type = other DNA
tgctgtgccccctctataattatgcaaacttttaaattctactttatatttttctgaaactttattatataataactcac

SEQ ID NO: 101697 - DNA, 80 bp, synthetic construct
  source 1..80: mol_type = other DNA
gatggggggatttatcagtcttgtcctgagtgtagctgaaattgctactgaactgagtgctgctactggatttgctgttg

SEQ ID NO: 101698 - DNA, 80 bp, synthetic construct
  source 1..80: mol_type = other DNA
ctttttctgcagtggtaaaaattaggaagcaagagtaagtcttattgctaagagtagcgtggctaagaaactcagaaaga

SEQ ID NO: 101699 - DNA, 80 bp, synthetic construct
  source 1..80: mol_type = other DNA
caattagggaaatcaataggatcatcaccctccttgtatcttttctgctttggtggagttgaagaaaaacttcttcgtga

SEQ ID NO: 101700 - DNA, 80 bp, synthetic construct
  source 1..80: mol_type = other DNA
gcctggcgaaggaattcctccaaaactctggttttttctatttctctttggagttgaggcaggagtggattcattggagg

SEQ ID NO: 101701 - DNA, 80 bp, synthetic construct
  source 1..80: mol_type = other DNA
tgaaggagggggctgaagcctgtgaggattcctcctgggatgtaaaggaaaagtgatcagattgtgattttgctgaggcg

SEQ ID NO: 101702 - DNA, 80 bp, synthetic construct
  source 1..80: mol_type = other DNA
ttctcggcttcttcttctgatgaagaaagggattcatcacagaacagggggttttgggccgtgctccgagatctacatcc

SEQ ID NO: 101703 - DNA, 80 bp, synthetic construct
  source 1..80: mol_type = other DNA
tgaacttccaaatagattggatctgctctttttgggtcttggggttgatagattgggtcctgaggtgctgggttgttcat

SEQ ID NO: 101704 - DNA, 80 bp, synthetic construct
  source 1..80: mol_type = other DNA
ttgctactgaactgagtgctgctactggatttgctgttgatgccattgtctcaggagaggctcttgccgccattgaagct

SEQ ID NO: 101705 - DNA, 80 bp, synthetic construct
  source 1..80: mol_type = other DNA
attcaggctcttctgttcctcctggcctcctgtttcttgttgaggaactccttctcggatcaaatccatctgggaagaag

SEQ ID NO: 101706 - DNA, 80 bp, synthetic construct
  source 1..80: mol_type = other DNA
ccatagtgcttgcggtaccaccaagctctaaattgtggcgtgccatatattggatcgtcctagaataacccagagagagg

SEQ ID NO: 101707 - DNA, 80 bp, synthetic construct
  source 1..80: mol_type = other DNA
atgcagagatttattagcatatcaaaaagaaaaaaaatgagacagacagtcatttccttccttagtcctctacttactag

SEQ ID NO: 101708 - DNA, 80 bp, synthetic construct
  source 1..80: mol_type = other DNA
caatgtaggttgagaagatcaacatccatttccaggatcaagtttttatagtcttcaaaggtagcagaatttccaggtaa

SEQ ID NO: 101709 - DNA, 80 bp, synthetic construct
  source 1..80: mol_type = other DNA
atgccattgtctcaggagaggctcttgccgccattgaagctgaggtggcaagtttgatgactatagaaggcttgagtgga

SEQ ID NO: 101710 - DNA, 80 bp, synthetic construct
  source 1..80: mol_type = other DNA
cccaaaccaagtaacaaagcaatagtagcagtaacactcaccccagatgagacacttttttttctgaagtatctttaggc

SEQ ID NO: 101711 - DNA, 80 bp, synthetic construct
  source 1..80: mol_type = other DNA
tcgaatgctgatcagaaagactgcagactatgcatctgcaattgtagaacttactatttatgcaatgaggggatttgaga

SEQ ID NO: 101712 - DNA, 80 bp, synthetic construct
  source 1..80: mol_type = other DNA
aaaggcctttttatgacaggtcccagtagattcttcaaagggttgtcaatttcccaaaaaagagtacttgcctggtaggt

SEQ ID NO: 101713 - DNA, 80 bp, synthetic construct
  source 1..80: mol_type = other DNA
ggaagcccttgcttctgtgaggcttgtagtaaattttccccacagggagtttaattgcatcatgagcacggggtctcctc

SEQ ID NO: 101714 - DNA, 80 bp, synthetic construct
  source 1..80: mol_type = other DNA
ccttgtcaggatgatgcttcaggcatgcttttttaaaagcattcttcattaatggtatattaccatattcttgtggacta

SEQ ID NO: 101715 - DNA, 80 bp, synthetic construct
  source 1..80: mol_type = other DNA
atattaccatattcttgtggactaatgtccaacaagaggcagagctgccttctctcaggagtagtcagcacagcatccat

SEQ ID NO: 101716 - DNA, 80 bp, synthetic construct
  source 1..80: mol_type = other DNA
gcagaagccctggctcaattaggatatactgctgagcaattctctaatttttcccttgtgtcatctcttatgaatcaagc

SEQ ID NO: 101717 - DNA, 80 bp, synthetic construct
  source 1..80: mol_type = other DNA
aattggctatggaaccttgttccaaacagtaactggcgtcagctctcttgttgctgcagggattaagttatctttgcagg

SEQ ID NO: 101718 - DNA, 80 bp, synthetic construct
  source 1..80: mol_type = other DNA
atagatctattattgttactcctttaagcccaggctccagaaacaatatacctggcatgtcatccactttaactttgaaa

SEQ ID NO: 101719 - DNA, 80 bp, synthetic construct
  source 1..80: mol_type = other DNA
atgagtgagaggcaaggtgcctctggcctcccagtagtttgcaaaaaaaggttccacaacctgcgccaagttgtggtttg

SEQ ID NO: 101720 - DNA, 80 bp, synthetic construct
  source 1..80: mol_type = other DNA
gggcatccaaggctggctctagaattttatatagatccattaaactataatcatagtatgttaaatgttttggggcaaaa

SEQ ID NO: 101721 - DNA, 80 bp, synthetic construct
  source 1..80: mol_type = other DNA
attgtgggaaagtattgcagaggagcataaaactctaggtatttacacaaacaaaggaaaactgttagaattggcgcgct

SEQ ID NO: 101722 - DNA, 80 bp, synthetic construct
  source 1..80: mol_type = other DNA
gggaggtcagaggtcaaaattcaaataatttaagtggtaacatggtatactttcctccaccaaacggaggcgccaatcag

SEQ ID NO: 101723 - DNA, 80 bp, synthetic construct
  source 1..80: mol_type = other DNA
ttagtttaaatgagtttagtaaataaatctgataatgtgacaacgatcatcatgtgatctcacacagtcttttttgaact

SEQ ID NO: 101724 - DNA, 80 bp, synthetic construct
  source 1..80: mol_type = other DNA
ggctccacttgtgttgtttctgcactagcagcccatactataatttctgcagtgagtaaaattgcccagactaaaccaac

SEQ ID NO: 101725 - DNA, 80 bp, synthetic construct
  source 1..80: mol_type = other DNA
ataacatcggctcttatacctgaacaccccgagtgtacgatagcaacctcggtggatttctggtttctttagtgatttct

SEQ ID NO: 101726 - DNA, 80 bp, synthetic construct
  source 1..80: mol_type = other DNA
taagaacccttaagctcttcaatacaatcaaagtcacagtaggtatcaagagccatccaaagcaaaatgttgtgagtaaa

SEQ ID NO: 101727 - DNA, 80 bp, synthetic construct
  source 1..80: mol_type = other DNA
gacactgtagcccagccatgcagcccagggacacataactccacagcaatagagtgtgcaacattaggcatcagtgaaaa

SEQ ID NO: 101728 - DNA, 80 bp, synthetic construct
  source 1..80: mol_type = other DNA
gaaattgggttgttgttgttgtacttgttgtggtgttggttatctcaatcttgttatttagttttttgtgccctagaaga

SEQ ID NO: 101729 - DNA, 80 bp, synthetic construct
  source 1..80: mol_type = other DNA
ctcctgctataggaagatagccattccaggtcagtggcatcgtctttttctcacatttactgtggtttgactctggtata

SEQ ID NO: 101730 - DNA, 80 bp, synthetic construct
  source 1..80: mol_type = other DNA
ggcaacaccctgcattgtatcagaagcactagagctcgggactttagccttaacaggccctactacacgtaatgagcctt

SEQ ID NO: 101731 - DNA, 80 bp, synthetic construct
  source 1..80: mol_type = other DNA
gtgcctcatttgggaagtcatgatcttctcctctcggatggacaatcattcgactgacaacttctgctgaacggatgtct

SEQ ID NO: 101732 - DNA, 80 bp, synthetic construct
  source 1..80: mol_type = other DNA
tctaagtttggcacaatcaatggttctgaatgacttcccaaaaaacagacataatatccttgaaatgcattactacagtc

SEQ ID NO: 101733 - DNA, 80 bp, synthetic construct
  source 1..80: mol_type = other DNA
tgtcttaccaacaataccttcaaaagtgttcacaacctttaactgatcagatttttttgcaattaaaaagcacactattg

SEQ ID NO: 101734 - DNA, 80 bp, synthetic construct
  source 1..80: mol_type = other DNA
gtaaagtcagtgtctcatatgtatgagcaggctgagtcaatgtcagtgtgtgtgtggggttgaagcattgaccttctatt

SEQ ID NO: 101735 - DNA, 80 bp, synthetic construct
  source 1..80: mol_type = other DNA
agctgaccataaacacagtgagttttctcaaagacgacttgaactcgactatccaatacactagccatacaactcctaat

SEQ ID NO: 101736 - DNA, 80 bp, synthetic construct
  source 1..80: mol_type = other DNA
ggacatacaagttaggataggagcaatcagatgtagtgtaggacggcaatgagtctggttgcatgataaatcatagcaca

SEQ ID NO: 101737 - DNA, 80 bp, synthetic construct
  source 1..80: mol_type = other DNA
cattcaaaatcccccataaccactctccagactttgtgaaccagcactttaaagtacatggaggtgcaccatcatcataa

SEQ ID NO: 101738 - DNA, 80 bp, synthetic construct
  source 1..80: mol_type = other DNA
gaacagtcttttttatcttcttcaaagtatcatatagatctggtgataaaacacaagttcccctcagattcacccctttt

SEQ ID NO: 101739 - DNA, 80 bp, synthetic construct
  source 1..80: mol_type = other DNA
gactgtgcctcaaatgtttctgcaccagcatttgttgtttctgtaacactagacttttttgcccaatcaacctgtgtata

SEQ ID NO: 101740 - DNA, 80 bp, synthetic construct
  source 1..80: mol_type = other DNA
gctctgttgaaggacagatgttgtatgcaagtcaaaattgcatgagctttctacttttatatcttttacctggcttaacg

SEQ ID NO: 101741 - DNA, 80 bp, synthetic construct
  source 1..80: mol_type = other DNA
gaactaaaccaacatcaactgaaccagtaatgtacccttggcctagaccaacagtatgcgggcattccatctttaactca

SEQ ID NO: 101742 - DNA, 80 bp, synthetic construct
  source 1..80: mol_type = other DNA
gttttttatattagagtaataaatttataatattataagttagtacatataaactggcttttgtaatatgtttaagtgtg

SEQ ID NO: 101743 - DNA, 80 bp, synthetic construct
  source 1..80: mol_type = other DNA
atcgcttacaaatatttaagcttaacaagagatgaactgataaactactacaatcctaaagttcattttcaggctagcag

SEQ ID NO: 101744 - DNA, 80 bp, synthetic construct
  source 1..80: mol_type = other DNA
ccatgaaaattggactttcacaacttaatcctgtttctaaggctgtcttagataatataggtaaacataaatcagaaaag

SEQ ID NO: 101745 - DNA, 80 bp, synthetic construct
  source 1..80: mol_type = other DNA
atagtagagcaaatattgtcgaatatggagatcaatattggagaggctagttcatgtattccatctcctgctaaaaccac

SEQ ID NO: 101746 - DNA, 80 bp, synthetic construct
  source 1..80: mol_type = other DNA
gggtgtagatgagctcctgagtaagttttatgataatgaaattggtaagttcatgctgtctattttacgaaagactgcag

SEQ ID NO: 101747 - DNA, 80 bp, synthetic construct
  source 1..80: mol_type = other DNA
cttggcatttgggtcatcttgtcagagacattactgagagtcttattgcacattcagggctaaagcgttctaaatactgg

SEQ ID NO: 101748 - DNA, 80 bp, synthetic construct
  source 1..80: mol_type = other DNA
ggtttagtagatcctgataatcttgactcaaaggcagaaattgacggagtcatctggtgttactccaaagttatgagtat

SEQ ID NO: 101749 - DNA, 80 bp, synthetic construct
  source 1..80: mol_type = other DNA
ggtatgagttacttataaacaaattttttgagcgcccatttaagagctctcttgatgcttatttatattcaataatgaag

SEQ ID NO: 101750 - DNA, 80 bp, synthetic construct
  source 1..80: mol_type = other DNA
tcattattaataaatctggcacaaaacaataagatcagattttattctaaagttagattacttggattgacggttgacca

SEQ ID NO: 101751 - DNA, 80 bp, synthetic construct
  source 1..80: mol_type = other DNA
gaaggcaagtatggtgatatcttaatgagggaaggttataatattgactcactcctgagaggaaatgttgaggtagaaca

SEQ ID NO: 101752 - DNA, 80 bp, synthetic construct
  source 1..80: mol_type = other DNA
tgtgacactaattgaggctatacggtatctaaaccgttctcaaattaacccaaatgttattgacatgtatgaacaaacta

SEQ ID NO: 101753 - DNA, 80 bp, synthetic construct
  source 1..80: mol_type = other DNA
tagagaaggcattacgatgggcatctggtagttctgaaattataacaagcactggtaagaccttaaaatttaagaggaag

SEQ ID NO: 101754 - DNA, 80 bp, synthetic construct
  source 1..80: mol_type = other DNA
tatattgacagtatggaagattattctgaggcagtcaatgacttcatttcatttttttctggaggggtctcagcaaatgt

SEQ ID NO: 101755 - DNA, 80 bp, synthetic construct
  source 1..80: mol_type = other DNA
gggcagcaatatctctattgttcagggaaatctggaaagaactgtatcctgagctggaatgtttctttgaatttgcacat

SEQ ID NO: 101756 - DNA, 80 bp, synthetic construct
  source 1..80: mol_type = other DNA
aaagtctctccaaaaaagactactgtatccccaacgaatgcagagtttttgtcaacattcttcgaaggctgtgctgtctc

SEQ ID NO: 101757 - DNA, 80 bp, synthetic construct
  source 1..80: mol_type = other DNA
gtggaaaggctctatggtactgcagatggtatggtgaattcaccgatagcattcttgaaggtcaaaaaaagcaatgtgcc

SEQ ID NO: 101758 - DNA, 80 bp, synthetic construct
  source 1..80: mol_type = other DNA
aaaaaagctgaagtatgaggaggggttaaagtatatcgagagtctactagctattgagacaaaaagagggaacctttctg

SEQ ID NO: 101759 - DNA, 80 bp, synthetic construct
  source 1..80: mol_type = other DNA
aacttacctcactaactggacaagacagcatccagtttatgattatattattccaaggggacgtgataatttacttgttt

SEQ ID NO: 101760 - DNA, 80 bp, synthetic construct
  source 1..80: mol_type = other DNA
tccgagaaattctagctgcagctgatagctatgctacaaattataagcccactgaaaaagatttggatttattcaataca

SEQ ID NO: 101761 - DNA, 80 bp, synthetic construct
  source 1..80: mol_type = other DNA
gctaaagagcatgtcacttgttaagactataaaagtaaggcccaaaaaagaagtccttagagctgtgtcattatacaatc

SEQ ID NO: 101762 - DNA, 80 bp, synthetic construct
  source 1..80: mol_type = other DNA
acaactacagaataacttttgcagttgtagctgttaagacagatggatcaaatatatcaacacagtggcctagcaggaga

SEQ ID NO: 101763 - DNA, 80 bp, synthetic construct
  source 1..80: mol_type = other DNA
tgaacaaaacacacaggaatggttatcagcattgtattttgaaaagcaaacccttatggactggattgaaagatttagaa

SEQ ID NO: 101764 - DNA, 80 bp, synthetic construct
  source 1..80: mol_type = other DNA
tttattgctctacgatgttttaggatacaaaggagtattacaaatgcaggcaaataggcgggcttattctggtaaacagt

SEQ ID NO: 101765 - DNA, 80 bp, synthetic construct
  source 1..80: mol_type = other DNA
tagaaacttccataactcaacgccatgtcttaaagctcttaatggatgaagtatcaaaagaacttgtcagatgcgggatg

SEQ ID NO: 101766 - DNA, 80 bp, synthetic construct
  source 1..80: mol_type = other DNA
aagtgtacaattttggtgctgcacctgtggcccttttaaacccatatgatctaacagaattagagagtgtggtaaagggt

SEQ ID NO: 101767 - DNA, 80 bp, synthetic construct
  source 1..80: mol_type = other DNA
tggggagaaattgtcaatgacaggtttctagagttggatcgtgaagcacaaaaactcgtaagggagaaaggagttcaacc

SEQ ID NO: 101768 - DNA, 80 bp, synthetic construct
  source 1..80: mol_type = other DNA
agaagatgtattacctgattctcttttttcattccgacatgttgatgttcttttaagaagattattccctagagacccag

SEQ ID NO: 101769 - DNA, 80 bp, synthetic construct
  source 1..80: mol_type = other DNA
tttctactttctattgactgatttcattattctataactttagtatgtataagttattgttcttttctcggagcatacta

SEQ ID NO: 101770 - DNA, 80 bp, synthetic construct
  source 1..80: mol_type = other DNA
atagacctcaacagctttgccatccgcatatagagaatctggtcaattactgcaagacttggttgacagaagaacatgag

SEQ ID NO: 101771 - DNA, 80 bp, synthetic construct
  source 1..80: mol_type = other DNA
tttgtctttaaggaagttacaggttcaaatgtggcccaagtctttgataagaatgagaaagaacatatgcaaaggtattc

SEQ ID NO: 101772 - DNA, 80 bp, synthetic construct
  source 1..80: mol_type = other DNA
agaatcaagaaagccacgaaattttcttttattacagcttaccgtacaaggtccttacattccatctactatcagctcag

SEQ ID NO: 101773 - DNA, 80 bp, synthetic construct
  source 1..80: mol_type = other DNA
accaatgtgatacccgacttggttgtatggaaatatcaaaggccactccagaaacacctgtacaagctttggctctagat

SEQ ID NO: 101774 - DNA, 80 bp, synthetic construct
  source 1..80: mol_type = other DNA
cttctggagttttaaattagtaacttacttaactaaacctaagatatatggttattgatattatgattaacacaatttct

SEQ ID NO: 101775 - DNA, 80 bp, synthetic construct
  source 1..80: mol_type = other DNA
aatacacagttgatcaactcagcaatatgcatcattatgatcaaaacacttaacataaactaaagattacatacagatta

SEQ ID NO: 101776 - DNA, 80 bp, synthetic construct
  source 1..80: mol_type = other DNA
aacatcaaagaaaacttacacctatgtcttaacaacaattacttatctactgattaaatatgagatgatagtgttgattg

SEQ ID NO: 101777 - DNA, 80 bp, synthetic construct
  source 1..80: mol_type = other DNA
tggccctttacccttagtaatcaccacccccacccatcacattataaaggaacccagtgcaattaattagacagtagccc

SEQ ID NO: 101778 - DNA, 80 bp, synthetic construct
  source 1..80: mol_type = other DNA
ctgagtaacaattggcacaagcccgaaaagccctcaatctttactaccagtctgactcacaacttcaaaggctcttggtt

SEQ ID NO: 101779 - DNA, 80 bp, synthetic construct
  source 1..80: mol_type = other DNA
cagattctgcctcagctgtctggatgaggtccacaatttcagccacctgggattcccgaacttgctgttgtctgttaatt

SEQ ID NO: 101780 - DNA, 80 bp, synthetic construct
  source 1..80: mol_type = other DNA
tagtagtagactccgcaagaagaagcaataactataagccaaggaataaggtagtaaaatgtggcagttaatgcttcttt

SEQ ID NO: 101781 - DNA, 80 bp, synthetic construct
  source 1..80: mol_type = other DNA
gacagcaaaggaagacccagtctatgtctggtcaccagggataataggagaagcaaatcatacacggtgtgataagaaga

SEQ ID NO: 101782 - DNA, 80 bp, synthetic construct
  source 1..80: mol_type = other DNA
tgatccctttaacatggacaggctatgttcctatacctggcgaggtagaaaaaacaaccacatgcacagtgttctgcacc

SEQ ID NO: 101783 - DNA, 80 bp, synthetic construct
  source 1..80: mol_type = other DNA
actggtattttcaatatcagttcaacatcttgtttaataaatagggtccagagattccgaggttctgaacagcaaataaa

SEQ ID NO: 101784 - DNA, 80 bp, synthetic construct
  source 1..80: mol_type = other DNA
gtttgtttgccaaaggatagatgctgatataacagtttattgtaatgggatgaagaaggtaatattaacacaaaccttag

SEQ ID NO: 101785 - DNA, 80 bp, synthetic construct
  source 1..80: mol_type = other DNA
tgataggtcaatgtatttatacaataacaagcttattttctttagctcctagtattgcacattctcttgcagtcgaagtc

SEQ ID NO: 101786 - DNA, 80 bp, synthetic construct
  source 1..80: mol_type = other DNA
attacttatttggtcttaaagtttttactgctatttacctttttattttctaagtataatactgaatcaaaattcaaaag

SEQ ID NO: 101787 - DNA, 80 bp, synthetic construct
  source 1..80: mol_type = other DNA
ggacaaggtttattgatcggttcagctgaattgccaccagtgcatgtagacactatcccttcattgaagttagagagttc

SEQ ID NO: 101788 - DNA, 80 bp, synthetic construct
  source 1..80: mol_type = other DNA
tatattagagagagtcaagcaagagtacaaaaagacgatgggttctatggtttgtgaagtatgctgtcaagagtgtgaga

SEQ ID NO: 101789 - DNA, 80 bp, synthetic construct
  source 1..80: mol_type = other DNA
ctgttaaggagctagaatcacataacaagagttgtcctaatagccattgtccttactgtatgaatccaacagaagcaaca

SEQ ID NO: 101790 - DNA, 80 bp, synthetic construct
  source 1..80: mol_type = other DNA
gaaacagcattacaggctcattttaaagtgtgtaagcttacaaatagattccatgaaaatcttaaaaaatctcttggagg

SEQ ID NO: 101791 - DNA, 80 bp, synthetic construct
  source 1..80: mol_type = other DNA
ttatgagccaaagcaaggttgttataggactctctcagtttttagatataagagtcgttgttatgttggcatggtttgga

SEQ ID NO: 101792 - DNA, 80 bp, synthetic construct
  source 1..80: mol_type = other DNA
tagtactcttaattattgagtctgtgctatgggctgcaagtgcagatgtggcagatgtaaaagtgggctggacagatgtt

SEQ ID NO: 101793 - DNA, 80 bp, synthetic construct
  source 1..80: mol_type = other DNA
gcacatggggtagccttaattcccctccgaacagacatagagttggacttttctttaccatcatcagccacttacactta

SEQ ID NO: 101794 - DNA, 80 bp, synthetic construct
  source 1..80: mol_type = other DNA
tagaagaattttacagaacccagccaatgaagctgagaaaataccattccattttcagctagatagacaggtgattcatg

SEQ ID NO: 101795 - DNA, 80 bp, synthetic construct
  source 1..80: mol_type = other DNA
atgcaattttgacatacatactgcacctttggcacaacagcaagttactaaatggacatgggagaagaaagctgatacga

SEQ ID NO: 101796 - DNA, 80 bp, synthetic construct
  source 1..80: mol_type = other DNA
cactaaaatatacgcgcagagtttgtatacaattaggtcaagaacaaacttgcaaaactatagactctaatgactgtctc

SEQ ID NO: 101797 - DNA, 80 bp, synthetic construct
  source 1..80: mol_type = other DNA
cccgaatggaatgaagtgtccagagcatacaggcacttttagaaaaaaatgcagttttgccactattcctagttgtgaat

SEQ ID NO: 101798 - DNA, 80 bp, synthetic construct
  source 1..80: mol_type = other DNA
atgatgggaacacaatctcaggctttaagaggatgatggcaacacgagattcatttcagtcatttaacattagtgatgtt

SEQ ID NO: 101799 - DNA, 80 bp, synthetic construct
  source 1..80: mol_type = other DNA
cacattacaacaaatgcactggaatggatcgatcctgatagtacattaaaggaccatatcaatatggttttcaacaggga

SEQ ID NO: 101800 - DNA, 80 bp, synthetic construct
  source 1..80: mol_type = other DNA
tatttcatttcaagaccttgcagagaatccatgtaaagtggggatgactacaacatctattgatggggcctggggttcag

SEQ ID NO: 101801 - DNA, 80 bp, synthetic construct
  source 1..80: mol_type = other DNA
gcgttggattcagtcttacttgttctattagcttgacagaatgtgcttcatttatgacagcaataaaggcttgtgataag

SEQ ID NO: 101802 - DNA, 80 bp, synthetic construct
  source 1..80: mol_type = other DNA
tctatgtgctatggagcaaaaacagtaacacttgttagaggacaaaacacagtaattattgttggtaaagggggtcattc

SEQ ID NO: 101803 - DNA, 80 bp, synthetic construct
  source 1..80: mol_type = other DNA
aggttctaaattcaagtgttgtcataatgatgattgctccacaacaggactgcttgcttctcctccacatttggatagag

SEQ ID NO: 101804 - DNA, 80 bp, synthetic construct
  source 1..80: mol_type = other DNA
ctgagtcaacaaatgcagcatcaaccacatttcagtcaaagagttcagaggttcagctaaaaggactttgtgttgtgcca

SEQ ID NO: 101805 - DNA, 80 bp, synthetic construct
  source 1..80: mol_type = other DNA
taaccggttacaatcaactggacactgataaagtgtttgatgacggagctccagagtgtgggatcaaatgctggttcacc

SEQ ID NO: 101806 - DNA, 80 bp, synthetic construct
  source 1..80: mol_type = other DNA
aaatctggtgaatggtttctagggatcttaaatggtaattggattgtgattgcagttttaatctttatccttataatttc

SEQ ID NO: 101807 - DNA, 80 bp, synthetic construct
  source 1..80: mol_type = other DNA
attgtttcttttcagtttatgttgtcctgttcgaagtcgatcacagagaacttaagaatgtacaacctttaaactatctg

SEQ ID NO: 101808 - DNA, 80 bp, synthetic construct
  source 1..80: mol_type = other DNA
gctttaatctttattattataaaacattatatttagtattaacccatattttatgattggtattgttattgacttatact

SEQ ID NO: 101809 - DNA, 80 bp, synthetic construct
  source 1..80: mol_type = other DNA
ctaaaaaaaactaatttcgcattattgttaaacctcatactagttttaccaagattttgttcctgcggagtctactacta

SEQ ID NO: 101810 - DNA, 80 bp, synthetic construct
  source 1..80: mol_type = other DNA
cctctgacatttgagacagcaaacaagctgagaaagacagtaacttgttttgacatatcatgtaatcagacccattgtca

SEQ ID NO: 101811 - DNA, 80 bp, synthetic construct
  source 1..80: mol_type = other DNA
acctacagtttatctagttgctccaatacagacatgtttaacaacaaagagctgtatgttagggttaggtgacatgagaa

SEQ ID NO: 101812 - DNA, 80 bp, synthetic construct
  source 1..80: mol_type = other DNA
ttcaggttagttatgaaaagacatattgtgtttcaggtcagttaattgagggttcttgcttcaatcccattcatacaatg

SEQ ID NO: 101813 - DNA, 80 bp, synthetic construct
  source 1..80: mol_type = other DNA
ctagtcacacatatgatatattcactttactagtaaaatgtttttttgtggctaaaaagcaggcaaatcaagaaagcctt

SEQ ID NO: 101814 - DNA, 80 bp, synthetic construct
  source 1..80: mol_type = other DNA
aagatagagaaaaagctagaaactataatggggaaatctgattgttcaaataataatctacaaggacactatacttgttt

SEQ ID NO: 101815 - DNA, 80 bp, synthetic construct
  source 1..80: mol_type = other DNA
ggggcctactacaaggaatgacttgtgtggcgagaaatgtgttagaaatgaggattgaatgtccacatactcttggttta

SEQ ID NO: 101816 - DNA, 80 bp, synthetic construct
  source 1..80: mol_type = other DNA
cttaggaacaagttcagaacctatatatgtcccattactagaagactacaggtctgctgagattttgtcaaggatgggaa

SEQ ID NO: 101817 - DNA, 80 bp, synthetic construct
  source 1..80: mol_type = other DNA
ctgcacctcatggagaagatcatgacttagacaaccaggctatgggccatgttagggtagtaggaaagctgacaggaaaa

SEQ ID NO: 101818 - DNA, 80 bp, synthetic construct
  source 1..80: mol_type = other DNA
gcaccatcatcagaatcttcagacacagtgcaaggtgttgccttttcaggactaccaatgtatacatcattgtcagtcat

SEQ ID NO: 101819 - DNA, 80 bp, synthetic construct
  source 1..80: mol_type = other DNA
tagtagtagactccgagatagagaagtctactacaaaatggaaaagtatacagatattcgaaggagaataagggaccttg

SEQ ID NO: 101820 - DNA, 80 bp, synthetic construct
  source 1..80: mol_type = other DNA
tgactttggataaggaggacttaataaacttttatagtccaaaatcacattttcaccaaacagtatcagtcaaagagcca

SEQ ID NO: 101821 - DNA, 80 bp, synthetic construct
  source 1..80: mol_type = other DNA
gggacttttaagttaaacttatcaagtttatgcccacaatctcggggacttctagacatggtgtcgaaaaatcatgaaaa

SEQ ID NO: 101822 - DNA, 80 bp, synthetic construct
  source 1..80: mol_type = other DNA
gggaatttttggtgaggttatagacagtatcgatatatccagccagattgatcagaatactagttgtaaattaatcgaaa

SEQ ID NO: 101823 - DNA, 80 bp, synthetic construct
  source 1..80: mol_type = other DNA
aaatattatcaagcctagaggttaatgtgggggagacaacatatggagtgccacaacctaaaaagagcacaggagttgat

SEQ ID NO: 101824 - DNA, 80 bp, synthetic construct
  source 1..80: mol_type = other DNA
aatatgtttcagaagttttatgagaatgaaatgcacaggtatttaataaacattgtgaagaaaactgcagcttggcatat

SEQ ID NO: 101825 - DNA, 80 bp, synthetic construct
  source 1..80: mol_type = other DNA
ctatacatggatattctcatggtagctgtatgttattcatattgccatcaaagtcattggaggttgcagggtcatttata

SEQ ID NO: 101826 - DNA, 80 bp, synthetic construct
  source 1..80: mol_type = other DNA
agatttatcactgtctttaaggatggaattggtttgatagaccatgataatttggactctgtacttgatatcgatggtac

SEQ ID NO: 101827 - DNA, 80 bp, synthetic construct
  source 1..80: mol_type = other DNA
acagtggtgcttcagtaaattgatgagcttagacctcaataggttactttcattgaatattgcatttgaaaaaacactgt

SEQ ID NO: 101828 - DNA, 80 bp, synthetic construct
  source 1..80: mol_type = other DNA
tgtttctcagaagatgaaagtctgtgcattgtttgataatctccgatatctgataccatcggtcacttctttgtattcag

SEQ ID NO: 101829 - DNA, 80 bp, synthetic construct
  source 1..80: mol_type = other DNA
atatttatgtgagtattaaaacattattagtcagcttggcacagaacaataaagttaggttttactctaaagttagactg

SEQ ID NO: 101830 - DNA, 80 bp, synthetic construct
  source 1..80: mol_type = other DNA
aggagcaaaaatatggcagttatataatagaagaaggttatgttattgatgagatttgcaacaggactgttgaagtagaa

SEQ ID NO: 101831 - DNA, 80 bp, synthetic construct
  source 1..80: mol_type = other DNA
caacaattattttgtcaggaggtagttgaattaggtgctcaagagttgaatcattatttacatgcaaagtcacaggtgat

SEQ ID NO: 101832 - DNA, 80 bp, synthetic construct
  source 1..80: mol_type = other DNA
aagtaatacgatcaatggagagaaaaatcataccaggaagcgcatcagggcagattttgaaatcattttttaagatgaca

SEQ ID NO: 101833 - DNA, 80 bp, synthetic construct
  source 1..80: mol_type = other DNA
cgtcactaatagaaatgtatgaaagaactcgacaccataaggcacaagcaaggatagttagaaaatatcaaagaactgaa

SEQ ID NO: 101834 - DNA, 80 bp, synthetic construct
  source 1..80: mol_type = other DNA
acatacagtctgcacttgagaaggcattgagatgggcttcaggtgagagtgagatccaatctagtctaggtcaagttata

SEQ ID NO: 101835 - DNA, 80 bp, synthetic construct
  source 1..80: mol_type = other DNA
atatgatggattgcaagataagaaaattaagcattgtgttgttgatgccttacggaacatttttagtactgaatttttta

SEQ ID NO: 101836 - DNA, 80 bp, synthetic construct
  source 1..80: mol_type = other DNA
tgtcacgaaagcttcataagtatatagatgatatgccaacactgtctgacaaggtagaagactttgttagcttttttcca

SEQ ID NO: 101837 - DNA, 80 bp, synthetic construct
  source 1..80: mol_type = other DNA
aataaagtttcagctgaagtgaagggtaattggctacaaggaaacttgaacaaatgttcatcattatttggggtagcgat

SEQ ID NO: 101838 - DNA, 80 bp, synthetic construct
  source 1..80: mol_type = other DNA
actgctgcgggaatggtaaacaacccttgtgcttttttgaagacagctcgtgaaaatatacctattccgttaggtggtga

SEQ ID NO: 101839 - DNA, 80 bp, synthetic construct
  source 1..80: mol_type = other DNA
tgggtctatgtcaataatggaattaagcactgcgggtatagggatgtctgataagaatgtgttaaagagggctttctatt

SEQ ID NO: 101840 - DNA, 80 bp, synthetic construct
  source 1..80: mol_type = other DNA
cttataggcacactaaaaaagaatcagacaaatatgttctaggtctctttaagtttttaatgagtttgtcagaagatgtg

SEQ ID NO: 101841 - DNA, 80 bp, synthetic construct
  source 1..80: mol_type = other DNA
tttcaacatgacagattaggagagtttagttttgttggaaaagtacaatggaaggttttcacaccaaagtctgagtttga

SEQ ID NO: 101842 - DNA, 80 bp, synthetic construct
  source 1..80: mol_type = other DNA
aaaagacattaaaatatcaagcagggctcgattttatagagagattactgcgtcaggaggcagaaaaaggtaatattcaa

SEQ ID NO: 101843 - DNA, 80 bp, synthetic construct
  source 1..80: mol_type = other DNA
tcttggcagcagcagattcatttgcaactatgtacaatcctacaccaagtgatcttgaattatttaatactctggtaagt

SEQ ID NO: 101844 - DNA, 80 bp, synthetic construct
  source 1..80: mol_type = other DNA
tagagcaaaagtggccagaacattcacagtaagggaacgggatcaagcaatccaaaaccccataacagcagtgataggtt

SEQ ID NO: 101845 - DNA, 80 bp, synthetic construct
  source 1..80: mol_type = other DNA
acaaatatgctaaaactgtggatgaagtaggggatgtattagacagttcctatttccctgattcattatcaactgatttg

SEQ ID NO: 101846 - DNA, 80 bp, synthetic construct
  source 1..80: mol_type = other DNA
caggtgatgagagatggtgtgtatagagaattaggccttgatattagtaatcctgctgtgttaaaaagaattgctccttt

SEQ ID NO: 101847 - DNA, 80 bp, synthetic construct
  source 1..80: mol_type = other DNA
actttataagagtgggaagtcacgtgtggtcattgttcaagggaatgtggaggggactgctgaatctatctgtagttact

SEQ ID NO: 101848 - DNA, 80 bp, synthetic construct
  source 1..80: mol_type = other DNA
gaagcatttcagatcaaattcgatgtggttgcggtgagaactgatggctctaacatctcaacacaatggcccagccagag

SEQ ID NO: 101849 - DNA, 80 bp, synthetic construct
  source 1..80: mol_type = other DNA
tttctctgtattcacaaagagaaaatgtaggtgaccagttaaatcttgctgctacacgtctctgtattgaagtctggaga

SEQ ID NO: 101850 - DNA, 80 bp, synthetic construct
  source 1..80: mol_type = other DNA
tggtgtaaagtgaatgagcaggatcctcatgactggctaaaagcattatattttgaggacaaaacactgatggagtgggt

SEQ ID NO: 101851 - DNA, 80 bp, synthetic construct
  source 1..80: mol_type = other DNA
ggagaaatttagatcaaaaggtgttatatcagttgatcctgaaatacagtgtatggccttgttgttgtatgatattaaag

SEQ ID NO: 101852 - DNA, 80 bp, synthetic construct
  source 1..80: mol_type = other DNA
gatatatggggattttacagctccaagcaaatagaagggcatactcaggaaaacaatatgatgcttattgtctccaagta

SEQ ID NO: 101853 - DNA, 80 bp, synthetic construct
  source 1..80: mol_type = other DNA
agtggggtaagcctaatgtaccttgtattgtatataagaattgcatgttaagaactggtctccgcacaaggcagccaata

SEQ ID NO: 101854 - DNA, 80 bp, synthetic construct
  source 1..80: mol_type = other DNA
aaccaggaatttttaatctcagtccaagctaatggctttcgagcattggcacaagctgatgaagagaatccgcggttttt

SEQ ID NO: 101855 - DNA, 80 bp, synthetic construct
  source 1..80: mol_type = other DNA
tgaaggatataaggtatcaagcattacaagctgttgggaatgtatggtataagtctgctcaacacaaactatttataaat

SEQ ID NO: 101856 - DNA, 80 bp, synthetic construct
  source 1..80: mol_type = other DNA
agaccatgcgaatgatccaagcagatataaattatgtacgtgagcatctaataaagaatgatgagagaagtacgttagag

SEQ ID NO: 101857 - DNA, 80 bp, synthetic construct
  source 1..80: mol_type = other DNA
aattaatcctagtaatattttgaacttagatggcatagaagagacttcagagggttatagcaatgtgacttcaatgtcta

SEQ ID NO: 101858 - DNA, 80 bp, synthetic construct
  source 1..80: mol_type = other DNA
gtagtcaatggtcagaagaggttagtttgacattaggagatgatgatgatgatcctgatgaattaagttatacaatcaat

SEQ ID NO: 101859 - DNA, 80 bp, synthetic construct
  source 1..80: mol_type = other DNA
ctcgatgatatagactttgagaaattggacttagaggaagatatagagcattttctccaagatgagtctgcatatactgg

SEQ ID NO: 101860 - DNA, 80 bp, synthetic construct
  source 1..80: mol_type = other DNA
agacttgcttatccagactgatgaaatggaagtcaaaaggatgagagggttaatacgaatacttgaacctattaggttga

SEQ ID NO: 101861 - DNA, 80 bp, synthetic construct
  source 1..80: mol_type = other DNA
taaagagttgggtgtcgaaaggacttgctattgataaagtatacaatccagtcgggattattttgatggctcgttatatg

SEQ ID NO: 101862 - DNA, 80 bp, synthetic construct
  source 1..80: mol_type = other DNA
aggaaagtaagggaagaaaaattattgccagaagatgtccttcctgattctttattttcttttaggcatgttgatattct

SEQ ID NO: 101863 - DNA, 80 bp, synthetic construct
  source 1..80: mol_type = other DNA
ttaagagacttttttcaagggattcagtttcctccttttattgatttctttttttgctcttttctcggagcatactacta

SEQ ID NO: 101864 - DNA, 80 bp, synthetic construct
  source 1..80: mol_type = other DNA
gccatgtttaatcttaaatttcatattggggggcccaaaactagattatttgacgtgcctgattaccgtgcacaaccttt

SEQ ID NO: 101865 - DNA, 80 bp, synthetic construct
  source 1..80: mol_type = other DNA
tttgacgtgcctgattaccgtgcacaacctttatgtgaacctaatattcaaaggctgatagattattgtaaggaatggtt

SEQ ID NO: 101866 - DNA, 80 bp, synthetic construct
  source 1..80: mol_type = other DNA
atgtgaacctaatattcaaaggctgatagattattgtaaggaatggttaactctaacccatgactttgtttttcatgaag

SEQ ID NO: 101867 - DNA, 80 bp, synthetic construct
  source 1..80: mol_type = other DNA
tccctggtaatgtatcagctgtagagtgtttggatttgttggataggttgtatgcagccaggcatgatgtggttgaccag

SEQ ID NO: 101868 - DNA, 80 bp, synthetic construct
  source 1..80: mol_type = other DNA
taaagggctcaaaagtcttttctgtctttgaggaagaagagaaggctcatgtattgaactatagtaaatcaaggaaacca

SEQ ID NO: 101869 - DNA, 80 bp, synthetic construct
  source 1..80: mol_type = other DNA
cggaatttcttattagttcagacaacaatacagggtccatacatgccctctactattgcatctgatcagtatgatactaa

SEQ ID NO: 101870 - DNA, 80 bp, synthetic construct
  source 1..80: mol_type = other DNA
gactggctgttttgagttattgaaaggtgacgttcaaacaccacttcaaaggcttgtactggatatggcatataaatatg

SEQ ID NO: 101871 - DNA, 80 bp, synthetic construct
  source 1..80: mol_type = other DNA
gcaatggggcaaggatgttgtgaaccatttccacctaggtgatgacatggatcctgagctacgggtgcttgctcaatccc

SEQ ID NO: 101872 - DNA, 80 bp, synthetic construct
  source 1..80: mol_type = other DNA
agcctttgaagctctaagtatttatggcagctgggggtgggggttgtgctcatgtaatcacacattcacaggcagctaaa

SEQ ID NO: 101873 - DNA, 80 bp, synthetic construct
  source 1..80: mol_type = other DNA
ttaatacgggtcataactgggatattagtaagggtcattaatcagggtcacaatttgcactacatgtagacaattagtta

SEQ ID NO: 101874 - DNA, 80 bp, synthetic construct
  source 1..80: mol_type = other DNA
gagtgagtattaattattaagttggttaaataagtgttaattgttaagttagttgtttaaatttatgttattaatgttaa

SEQ ID NO: 101875 - DNA, 80 bp, synthetic construct
  source 1..80: mol_type = other DNA
gtttgttgttaagcttagtaatgttaagttgataattagttatgtcatgtaccctatgttagtattggtaagttgattgt

SEQ ID NO: 101876 - DNA, 80 bp, synthetic construct
  source 1..80: mol_type = other DNA
tttatttagtgttaataagttagtcttattatattattgttagtatgattaaggtgttatataagtgtattggtgttgat

SEQ ID NO: 101877 - DNA, 80 bp, synthetic construct
  source 1..80: mol_type = other DNA
agtctgttgttatgtattagtgattgatgatgtaaactatattagctatcattattagttagtattaatagtaaaagtta

SEQ ID NO: 101878 - DNA, 80 bp, synthetic construct
  source 1..80: mol_type = other DNA
gctagtcattgttactgttttatagttattgcagttgttagtggtgttgaatcattaatatgtgaattaaagtgtcagga

SEQ ID NO: 101879 - DNA, 80 bp, synthetic construct
  source 1..80: mol_type = other DNA
tgtttacagccagctttacttacctgctttatcttaattatatactaaaccgcttactttcttcttttcctttcttctct

SEQ ID NO: 101880 - DNA, 80 bp, synthetic construct
  source 1..80: mol_type = other DNA
tttttactaacaaactaaacccttatttactaacaaccataccctatctacctcaaattaaactaaccactctatactac

SEQ ID NO: 101881 - DNA, 80 bp, synthetic construct
  source 1..80: mol_type = other DNA
atctacctcaaattaaactaaccactctatactacctcattagtgttttctttgattgcttttcaaggagcctactacta

SEQ ID NO: 101882 - DNA, 80 bp, synthetic construct
  source 1..80: mol_type = other DNA
gctggcagatctggtggcaaaacagaagatggatgagagacccgctgacccgactggtgtggaacctgacgaccatctca

SEQ ID NO: 101883 - DNA, 80 bp, synthetic construct
  source 1..80: mol_type = other DNA
gtcagactgctgattggatgtcaatagggacatacattatgggattcacattacctattgtgttgaaagcattgtatatg

SEQ ID NO: 101884 - DNA, 80 bp, synthetic construct
  source 1..80: mol_type = other DNA
ttatccacacgagggagacaaactatcaaagagaacaaaggcacaagaattcggtttaaagatgacagctcttttgatga

SEQ ID NO: 101885 - DNA, 80 bp, synthetic construct
  source 1..80: mol_type = other DNA
ggcagagaaaatagatcagtttttgaaatcaccatgcccgtttttaaaaacacctgctgggaaattgggtttcgacgatg

SEQ ID NO: 101886 - DNA, 80 bp, synthetic construct
  source 1..80: mol_type = other DNA
atgatgaagatgaccctgcaggcctcttaacatcaaatctagcctatttaacaaaccggcaaaggcaacttgaagaatcc

SEQ ID NO: 101887 - DNA, 80 bp, synthetic construct
  source 1..80: mol_type = other DNA
atggtcacagacataacagacttgatagaaacagctgcacaaggtgatccaacactattcaaagatatagattcaccaca

SEQ ID NO: 101888 - DNA, 80 bp, synthetic construct
  source 1..80: mol_type = other DNA
gtcagtttgggtcttctcttgtgccccagacaggtgtccaccaacttgcctgtatgttgcaggaatggctgaacttggtg

SEQ ID NO: 101889 - DNA, 80 bp, synthetic construct
  source 1..80: mol_type = other DNA
aatcaggcggggatgccatttaacacagtagttaatcgcgcagggtatgcaccattagtcatcagcattaccccgacaaa

SEQ ID NO: 101890 - DNA, 80 bp, synthetic construct
  source 1..80: mol_type = other DNA
ggcaagctatataaaagaattataaagcgataattggcaaatcgcatgtaaatcccagcagcaattggcacgctgcatat

SEQ ID NO: 101891 - DNA, 80 bp, synthetic construct
  source 1..80: mol_type = other DNA
gatgtagatttgatgctgcaagaagcaggggcagggtcagtagagacgccccgaggactaattaaagttaccagctattc

SEQ ID NO: 101892 - DNA, 80 bp, synthetic construct
  source 1..80: mol_type = other DNA
gagatctggtggtcagtgcaaagaaggaaaattgtaccgagatcatacgcgacgtgaagaagatgcgcgatctagacata

SEQ ID NO: 101893 - DNA, 80 bp, synthetic construct
  source 1..80: mol_type = other DNA
gaccgccggtattgatttgacaacagaccaatggaacactgtagttcattttaaggaagacaaagctcattcggcagaga

SEQ ID NO: 101894 - DNA, 80 bp, synthetic construct
  source 1..80: mol_type = other DNA
catctaaattgaagaagaactgtaaagatattacagataaagaattggacaagaaaatggcagagcttgcagcggtcatg

SEQ ID NO: 101895 - DNA, 80 bp, synthetic construct
  source 1..80: mol_type = other DNA
cagtgcgttaccctcagcttgcccgagcaacagcgacaggcagagtattcgatatgaataccgggacgctgcgaagctat

SEQ ID NO: 101896 - DNA, 80 bp, synthetic construct
  source 1..80: mol_type = other DNA
gacccgcgtgtcaatctagtgcccgtcaatcgcaagctgccgcacgcgctggttacacaccgctcggagcagccccgtag

SEQ ID NO: 101897 - DNA, 80 bp, synthetic construct
  source 1..80: mol_type = other DNA
tgatttttctacgtttgttagtaagttgaggggtcgaacagtcctggttgtgggagataagatgaatatcactggtaaga

SEQ ID NO: 101898 - DNA, 80 bp, synthetic construct
  source 1..80: mol_type = other DNA
cagtcgactggctgtctgaaaatcctgaggccaccttcaaatcccgtctagaccttggcatcccaaatgggctacccaaa

SEQ ID NO: 101899 - DNA, 80 bp, synthetic construct
  source 1..80: mol_type = other DNA
tatgacatcgtgtttgtgaacgttcggacgccctacaagtatcatcactaccagcaatgtgaagaccatgcgataaagct

SEQ ID NO: 101900 - DNA, 80 bp, synthetic construct
  source 1..80: mol_type = other DNA
agacggaagtgctgtttgttttcatagggtatgaccggagggttcgtacgcacaacccatacaaactatcctctaccctg

SEQ ID NO: 101901 - DNA, 80 bp, synthetic construct
  source 1..80: mol_type = other DNA
accaatatctacaccggatcgcacctgcatgaggccggatgtgccccttcctaccacgtggtacgtggagacattgccaa

SEQ ID NO: 101902 - DNA, 80 bp, synthetic construct
  source 1..80: mol_type = other DNA
ggcgcagaggctttagtacgaccgatgggaagacattctcataccttgaggggactaaatttcatcaggcggctaaggat

SEQ ID NO: 101903 - DNA, 80 bp, synthetic construct
  source 1..80: mol_type = other DNA
ctaatgcaactgaggcgaatgaacagatctgcctgtacatcttgggagagagcatgagcagcattcgttcaaagtgtcca

SEQ ID NO: 101904 - DNA, 80 bp, synthetic construct
  source 1..80: mol_type = other DNA
gttgaagaatcagaagcttcgacaccacccagtacattgccatgcctatgcatccattccatgacacccgaacgagttca

SEQ ID NO: 101905 - DNA, 80 bp, synthetic construct
  source 1..80: mol_type = other DNA
caaacggagaaccctgtggatccacctgaacttccggagccttcagccgtcgccacacctacagcagacggtcagacaga

SEQ ID NO: 101906 - DNA, 80 bp, synthetic construct
  source 1..80: mol_type = other DNA
ggaggccatgagcataatgtcggaaacgactgttgcctctcttgtacctaatgagattgagccatcaaccgccgccacac

SEQ ID NO: 101907 - DNA, 80 bp, synthetic construct
  source 1..80: mol_type = other DNA
ctgcagcagatagtcagacagaggagaccatgagcataatgtcggaaacgactgttgcctcttttgtacctaatgagatt

SEQ ID NO: 101908 - DNA, 80 bp, synthetic construct
  source 1..80: mol_type = other DNA
gtggtcgaagcgcaagtacactcagaccttatgcgcttctcctctagctggtcaataccgcaagcatctgacttcgatgt

SEQ ID NO: 101909 - DNA, 80 bp, synthetic construct
  source 1..80: mol_type = other DNA
gctcgggaataaaacctgtccctgcaccgcgcactgtttttactcaatcaccaaaacctcgcagacggcgccgtcgatct

SEQ ID NO: 101910 - DNA, 80 bp, synthetic construct
  source 1..80: mol_type = other DNA
aaagccagcacgagttctacggcccctctggtgaccacatcccgtgctacatcacgatcaagccttgtctcaaatccacc

SEQ ID NO: 101911 - DNA, 80 bp, synthetic construct
  source 1..80: mol_type = other DNA
tggggaaaaggtgaccacatcccgtgccacatcacgatcaagccttgtctcaaatccacctggggaaaagagggttatta

SEQ ID NO: 101912 - DNA, 80 bp, synthetic construct
  source 1..80: mol_type = other DNA
ggtcaggggcatttacaacaaaagtcagtgaggcagacgacgctgtccgaggtagtacttgaacggacagagttagagca

SEQ ID NO: 101913 - DNA, 80 bp, synthetic construct
  source 1..80: mol_type = other DNA
ggagctacctgaaaacagaaggaaaggttgaatgctaccgtacactgtatcctgttcccgagtattctgcaagcgtcaac

SEQ ID NO: 101914 - DNA, 80 bp, synthetic construct
  source 1..80: mol_type = other DNA
caagtcttttctagtccgcgcgtggctattgaagcatgtaatgctgtattgaaagagaattttccaacagtgacttcata

SEQ ID NO: 101915 - DNA, 80 bp, synthetic construct
  source 1..80: mol_type = other DNA
ctgcataacacccgagtatgacgcctacatggacatggttgatggagcctcctgctgtttagacactgctagcttttgcc

SEQ ID NO: 101916 - DNA, 80 bp, synthetic construct
  source 1..80: mol_type = other DNA
cagcaaagttgcgcagctttccgaaacgacacgcctatctggagccaactattcgttctgcagtaccatcagccatacag

SEQ ID NO: 101917 - DNA, 80 bp, synthetic construct
  source 1..80: mol_type = other DNA
gtgctgacagcccgtaacatcggcttatgcagctcagatgtcatggaacggtctcgtcggggactgtccattttaaggaa

SEQ ID NO: 101918 - DNA, 80 bp, synthetic construct
  source 1..80: mol_type = other DNA
atgatgcaatggcgttgactgctctgatgatattggaggatttgggcgtagatccagagctgctcacactaatagaggct

SEQ ID NO: 101919 - DNA, 80 bp, synthetic construct
  source 1..80: mol_type = other DNA
ataagctgatggccgatagatgtgctacctggctgaacatggaagtcaagatcatcgatgccgtagtaggaacaaaagcc

SEQ ID NO: 101920 - DNA, 80 bp, synthetic construct
  source 1..80: mol_type = other DNA
ctccgagctgtgtaaggccgtagagtcacgctatgaaactacaggtacatctgtaatcataacagccatgactaccctgg

SEQ ID NO: 101921 - DNA, 80 bp, synthetic construct
  source 1..80: mol_type = other DNA
cacagagtgtctccgcattcaaacatctgagaggaaaccctctgaccctctacggctaacctgaatggactgtgacgtag

SEQ ID NO: 101922 - DNA, 80 bp, synthetic construct
  source 1..80: mol_type = other DNA
tacagtccccaaaaatgttcccttatcaaccaaccatgtttccaatgcaaccagcaccctttcgcaatccttatgctgcg

SEQ ID NO: 101923 - DNA, 80 bp, synthetic construct
  source 1..80: mol_type = other DNA
cctagaagaccgtggttcccgaggaccgaccccttcttagctatgcaggtgcaggagttggcccggtcgatggcgaacct

SEQ ID NO: 101924 - DNA, 80 bp, synthetic construct
  source 1..80: mol_type = other DNA
aacagcgtcggggcgccatgccaggcgggccccctgcaaaaaagaagcggaaggaaccacagcagcaggttactcaggcg

SEQ ID NO: 101925 - DNA, 80 bp, synthetic construct
  source 1..80: mol_type = other DNA
caggataagaagaagaatggaaagatgaaaaagaagaaacgtaatggagcagccccccctaaaaataaaaatagtcccaa

SEQ ID NO: 101926 - DNA, 80 bp, synthetic construct
  source 1..80: mol_type = other DNA
ataatgacacccttgccgcattgaagatgaagaaagcatccaaatatgacttagagtatgctgatgtaccccagaacatg

SEQ ID NO: 101927 - DNA, 80 bp, synthetic construct
  source 1..80: mol_type = other DNA
gagaaaccttgaaaggaaaattgcacgtgccctaccttctgtctgatgcgaagtgcactgtgccactggcaccggaacca

SEQ ID NO: 101928 - DNA, 80 bp, synthetic construct
  source 1..80: mol_type = other DNA
atagtgacctttggtttccggtccatttccttaaaattacacccacgcaatccaacctatctgactactcgccaactaga

SEQ ID NO: 101929 - DNA, 80 bp, synthetic construct
  source 1..80: mol_type = other DNA
tggcgagccaaattatacccatgaacttatttcagaaccctcgattagaaattttactgtgacggagcacggatgggaat

SEQ ID NO: 101930 - DNA, 80 bp, synthetic construct
  source 1..80: mol_type = other DNA
taccagtatgcttagcgttcttgtgttgcgcaaggaccgctagggcagagacaacatgggaatccctggatcacctctgg

SEQ ID NO: 101931 - DNA, 80 bp, synthetic construct
  source 1..80: mol_type = other DNA
aatcataatcaaaacatgttttggagccagttgctcattccactagccgcgcttattgtgttgacccgcctactgaagtg

SEQ ID NO: 101932 - DNA, 80 bp, synthetic construct
  source 1..80: mol_type = other DNA
gggccgttcccaaggcttcgagacagcatggcaacacacaaaaaccgtcgaccgttgagatcgatggtgtggccatgcgt

SEQ ID NO: 101933 - DNA, 80 bp, synthetic construct
  source 1..80: mol_type = other DNA
tccaattgcagggggatgaactgcaggtttacaactttgacacaaacaaagtctctgcatttagaaaattggcagctgac

SEQ ID NO: 101934 - DNA, 80 bp, synthetic construct
  source 1..80: mol_type = other DNA
aaaggggctaagtacagggtcgcctcggatggctgtggcagtgtctcggtctccaagatcaaggatgttgcatcacagac

SEQ ID NO: 101935 - DNA, 80 bp, synthetic construct
  source 1..80: mol_type = other DNA
gcccgggccagatattacatcagctgcttccaagatcttatctatacactgatccaggttgctggagcctcatttgtggt

SEQ ID NO: 101936 - DNA, 80 bp, synthetic construct
  source 1..80: mol_type = other DNA
tactggttggggtttctgggtctcctccaacctcctcatctctctggaacgagtcctgccaaaaggagtgagtgagctgt

SEQ ID NO: 101937 - DNA, 80 bp, synthetic construct
  source 1..80: mol_type = other DNA
ttagaggggtcacatcaactgaagtagatgcaactgacagccccagggtggcagggtcacatagaattatggtacagctt

SEQ ID NO: 101938 - DNA, 80 bp, synthetic construct
  source 1..80: mol_type = other DNA
actaagcatttacccctgtttgcccacgttaagaaaaggggacaatctcaagtttaatctaccactcatggttttattga

SEQ ID NO: 101939 - DNA, 80 bp, synthetic construct
  source 1..80: mol_type = other DNA
acctccaggggcccgaagatctggcccgggatctggttccagttattcttggtggtatagggctagccattgggttcacc

SEQ ID NO: 101940 - DNA, 80 bp, synthetic construct
  source 1..80: mol_type = other DNA
gctccaggggaagatgtatgacttcgacgatgatcgagtgtcagcattcaccaccatggcacgcgacaacgggttgggca

SEQ ID NO: 101941 - DNA, 80 bp, synthetic construct
  source 1..80: mol_type = other DNA
cacatcgatggaaggtctgaagaacgccttgaaggggcacaaaattggcatgtgcacaattaagtggcaggccaaggtgt

SEQ ID NO: 101942 - DNA, 80 bp, synthetic construct
  source 1..80: mol_type = other DNA
caggacccaggaggaagttcagtatggtttggggtggactgaaaggcccatggaccaaaatgtcaagtcatgggaggagc

SEQ ID NO: 101943 - DNA, 80 bp, synthetic construct
  source 1..80: mol_type = other DNA
ggggttagtcacaggttccgacattcgaaaaaggaaaccaatcgattggaccccccctaagtcagcatgggcagatgatg

SEQ ID NO: 101944 - DNA, 80 bp, synthetic construct
  source 1..80: mol_type = other DNA
gagggggaaaccacgcttgaaggaggtgacaaaggccactatgccggacatgagatagtcaaacatggatgtggaccagc

SEQ ID NO: 101945 - DNA, 80 bp, synthetic construct
  source 1..80: mol_type = other DNA
tggggggcggacctaggaacagtgatccgggctgcacgagcttttggcccattttgtgatgccataaagtctcacacaat

SEQ ID NO: 101946 - DNA, 80 bp, synthetic construct
  source 1..80: mol_type = other DNA
atgccgcggggttccaggggcgactagaccgggcatccattgaaaggcagatctattggaccagagggcccaaccactca

SEQ ID NO: 101947 - DNA, 80 bp, synthetic construct
  source 1..80: mol_type = other DNA
ggggaagctgctctcctccattacgtggaccctgacacgggacggaacctgggggaattcaaactctatcctgatgggtt

SEQ ID NO: 101948 - DNA, 80 bp, synthetic construct
  source 1..80: mol_type = other DNA
ggggaagctgctctcctccattacgtggaccctgacacgggacggaacctggaggaattcaaactctatcctgatgggtt

SEQ ID NO: 101949 - DNA, 80 bp, synthetic construct
  source 1..80: mol_type = other DNA
gtaataggatgccggtgggcaccatattcagatttaattttaattggatattttaattacaatttggcttaattggtgtt

SEQ ID NO: 101950 - DNA, 80 bp, synthetic construct
  source 1..80: mol_type = other DNA
tgaatgaagatggcgtctaacgacgcttccgttgctagtagcagcactacaactgccacaaacaacgacaaaacccccac

SEQ ID NO: 101951 - DNA, 80 bp, synthetic construct
  source 1..80: mol_type = other DNA
aagctggtcgccttttgtcgtctgcggctgccactctgagagccactaaagaactcggcaactatggactggagattgtt

SEQ ID NO: 101952 - DNA, 80 bp, synthetic construct
  source 1..80: mol_type = other DNA
tgctgtgctggacctagagtctgtagagaacaaccatatcacgcaccttcttaaggacaaagaaaacatggccatctttc

SEQ ID NO: 101953 - DNA, 80 bp, synthetic construct
  source 1..80: mol_type = other DNA
tgcggacactagatctagaggaagagaaagccagaaaactctccaccaaggcggcttctcctgacatagtctcatctgtg

SEQ ID NO: 101954 - DNA, 80 bp, synthetic construct
  source 1..80: mol_type = other DNA
aacgccctcctggcgcggatagccgcagttaggtcactggcttttaaagccaaagaggagatgtgtgccagacaaaggcc

SEQ ID NO: 101955 - DNA, 80 bp, synthetic construct
  source 1..80: mol_type = other DNA
tgtggttgtaatgatatcagggaggccaggcatagggaagactcactatgccagagatcttgcttcccgcatctcaaaac

SEQ ID NO: 101956 - DNA, 80 bp, synthetic construct
  source 1..80: mol_type = other DNA
tgctcaccactgatggaagggtcggtcttgtcccccgtaacggggttgatcactgggacgcctatagaggagaaccagtg

SEQ ID NO: 101957 - DNA, 80 bp, synthetic construct
  source 1..80: mol_type = other DNA
gtagtttgggatgattatggtatgggtaacatcgtgaaggacgcaatgatgttacaagagttggcggacacttgcccggt

SEQ ID NO: 101958 - DNA, 80 bp, synthetic construct
  source 1..80: mol_type = other DNA
gggatggctccaataccagacctcccgatatccaacacagtgagggccaggttcggtttaatgccaaggacgaaacagtc

SEQ ID NO: 101959 - DNA, 80 bp, synthetic construct
  source 1..80: mol_type = other DNA
caccctgaattgtgaccgaatagagaacaagggcaagatgtttgagagcgatgtcatcgttctcaccaccaattcaccaa

SEQ ID NO: 101960 - DNA, 80 bp, synthetic construct
  source 1..80: mol_type = other DNA
ccaagagggatttcccaggagatcccaaggcctggaaaccacacttcaaggatgatcactcacatctcaacctcttgctg

SEQ ID NO: 101961 - DNA, 80 bp, synthetic construct
  source 1..80: mol_type = other DNA
gccccccagggaggctttgatcggaacggcaacacaccccatgggaaggggcaggtcaagaacataacaccaaatggtct

SEQ ID NO: 101962 - DNA, 80 bp, synthetic construct
  source 1..80: mol_type = other DNA
cgttgcccgtgcagtcgcattagcagtggaaaggagggacgacttccagctccaggggggagagccgcagacctataatt

SEQ ID NO: 101963 - DNA, 80 bp, synthetic construct
  source 1..80: mol_type = other DNA
ttgactcctcccaagttgcagccttcaggaaactggcagcagacaacaagtacggccttgctgagactcttcgcgttggg

SEQ ID NO: 101964 - DNA, 80 bp, synthetic construct
  source 1..80: mol_type = other DNA
aggctgttggagatgtcaaatttaagaagtgcaggatcatctggaagggcgtgacctacgatctagagtcagatgggaag

SEQ ID NO: 101965 - DNA, 80 bp, synthetic construct
  source 1..80: mol_type = other DNA
agacaaccggcgagatacaccaggcagtcctgcggctgcgacaggccagagtcagatactatgtcatgaccgcccagaat

SEQ ID NO: 101966 - DNA, 80 bp, synthetic construct
  source 1..80: mol_type = other DNA
caagggatcccggacctaacaacggcgccgatacccaccatccggcaggccaagtgtgtccctcccatgtcagagagaga

SEQ ID NO: 101967 - DNA, 80 bp, synthetic construct
  source 1..80: mol_type = other DNA
gtcgtctatgggctacttcaagccgcaggtgcggcgtttgtcctgaacaggatattcaggagagccgagaaccccttttc

SEQ ID NO: 101968 - DNA, 80 bp, synthetic construct
  source 1..80: mol_type = other DNA
tcgcatgatcaaggtcgaaggggaggatgatgacccccacgccgccccacccgtgccaacaactcctaaagttgagatag

SEQ ID NO: 101969 - DNA, 80 bp, synthetic construct
  source 1..80: mol_type = other DNA
tccaggctgatattgaggaggagggcaagaagaaaggaaagaataaacaggggcgcggtcgcaagcataccgcgttctcg

SEQ ID NO: 101970 - DNA, 80 bp, synthetic construct
  source 1..80: mol_type = other DNA
tctaaaggcctcagtgatgaagagtatgaggaattcaaacaaataagagaagaaaggggtggcaaatattccatacagga

SEQ ID NO: 101971 - DNA, 80 bp, synthetic construct
  source 1..80: mol_type = other DNA
gtatttggaagaccgcgaccggttcgaagaagaggtcgcttatgcccaagcttgtggtggtgactgtgacgacatcgaga

SEQ ID NO: 101972 - DNA, 80 bp, synthetic construct
  source 1..80: mol_type = other DNA
gcatcagaaattccatctttcgccccagcaggaaacagaggaaagaggagagagttaaacttggtctggtgactggaact

SEQ ID NO: 101973 - DNA, 80 bp, synthetic construct
  source 1..80: mol_type = other DNA
ttgaagcccctgcatccatctgggcacgagtggtgcagcttgggacaggatggggattttgggtatcacccaatctcctc

SEQ ID NO: 101974 - DNA, 80 bp, synthetic construct
  source 1..80: mol_type = other DNA
ataacatcgacacacgtcatccccaaaggggtcgaggaacttttcggagtcccaatccagcaagtccaggtgcacaaatg

SEQ ID NO: 101975 - DNA, 80 bp, synthetic construct
  source 1..80: mol_type = other DNA
tggtgaattcacccgcttgaggtttccaaaaatgatcaggcctgatgtttctggaatgatactggaagatggcgccccag

SEQ ID NO: 101976 - DNA, 80 bp, synthetic construct
  source 1..80: mol_type = other DNA
ggttcgtgtggcccaagaaccacaaaccgggtcactgctggagatgtacgatgggtctttctaccactacgccatttaca

SEQ ID NO: 101977 - DNA, 80 bp, synthetic construct
  source 1..80: mol_type = other DNA
aggtggtggtttgcagtatactggtcaagaggccaacaggggaatgcttgcccttggcagtcagaatgggcacccaagct

SEQ ID NO: 101978 - DNA, 80 bp, synthetic construct
  source 1..80: mol_type = other DNA
agggggtggtttgcagtatactggtcaagaggccaacaggggaatgcttgcccttggcagtcagaatgggcacccaagct

SEQ ID NO: 101979 - DNA, 80 bp, synthetic construct
  source 1..80: mol_type = other DNA
acaatgaaaattcaaggtaaggtggtttcaggccagttgggcatgctactcacagggtccaacgctaagaacatggacct

SEQ ID NO: 101980 - DNA, 80 bp, synthetic construct
  source 1..80: mol_type = other DNA
gacgtggagggaacacagtcatttgcgccgttcagacgagtgatggagaggcggtgctggaagggaattctgacaatgga

SEQ ID NO: 101981 - DNA, 80 bp, synthetic construct
  source 1..80: mol_type = other DNA
acatactgtggggcacccattgtctcaaaggggcgagcccctcaactttcaactaaaacaaaattctggaggagctcagt

SEQ ID NO: 101982 - DNA, 80 bp, synthetic construct
  source 1..80: mol_type = other DNA
tgaaccattaccacctggtacctatgagcctgcttaccttggaggtcgcgaccctagggttaacgacgggccatcacttt

SEQ ID NO: 101983 - DNA, 80 bp, synthetic construct
  source 1..80: mol_type = other DNA
cttgctccaggctgctgtcaagacaattgagaacacgcttgaacagaccatagatccgccccagccatggagctattccc

SEQ ID NO: 101984 - DNA, 80 bp, synthetic construct
  source 1..80: mol_type = other DNA
aagcatgccagtcgctagacaagtcaacgtcgagtggctggccccatcacgtccagaagaatacacactggaatggtgag

SEQ ID NO: 101985 - DNA, 80 bp, synthetic construct
  source 1..80: mol_type = other DNA
tcacaggccccctggctgatcaggctagcagggcgaaccttatgtatgaacaggcaaagtccatgacacctcagtacaca

SEQ ID NO: 101986 - DNA, 80 bp, synthetic construct
  source 1..80: mol_type = other DNA
ttgaaaatggattggtggctggtataaatcgaccctctaaggccctaacaactgccactgttgatgttgagcccatagga

SEQ ID NO: 101987 - DNA, 80 bp, synthetic construct
  source 1..80: mol_type = other DNA
tcctgtggggagctgatctaggcactatggtgaggtgtgctagagcgtttggaccattcacagacgcgattaagaaatgc

SEQ ID NO: 101988 - DNA, 80 bp, synthetic construct
  source 1..80: mol_type = other DNA
tgtgtctccctgccaattaaggtcgggcttaacatcaatgaggagggaccaattgtgtttgagaagcattcccagtatga

SEQ ID NO: 101989 - DNA, 80 bp, synthetic construct
  source 1..80: mol_type = other DNA
gttccactacgatgcagactactcacgctgggattccactcaacagagagaggttttggccgcagcactggggattatga

SEQ ID NO: 101990 - DNA, 80 bp, synthetic construct
  source 1..80: mol_type = other DNA
acttggccgcggtggtggcagaagacctcctggcgcccagcatgctggatgtgggagattatgtggttcaagtcaatgag

SEQ ID NO: 101991 - DNA, 80 bp, synthetic construct
  source 1..80: mol_type = other DNA
ggcttaccatctggggttccctgtacatcacagttaaacagcatggcacactggatcctcaccttaacatcgctggcaga

SEQ ID NO: 101992 - DNA, 80 bp, synthetic construct
  source 1..80: mol_type = other DNA
gtcctgacgttgaagctgaaggctgtcggcctggtcccaacgaggccagacaaaacagaaggaccactcattgtctccag

SEQ ID NO: 101993 - DNA, 80 bp, synthetic construct
  source 1..80: mol_type = other DNA
aaaactggagggcctcacctttttgaggagaacaataaccagagataaggcgggactctttggaaagctggacaaggatt

SEQ ID NO: 101994 - DNA, 80 bp, synthetic construct
  source 1..80: mol_type = other DNA
ccatcttgagacagttgtactggaccaagggacccaaccaccaagacccgtcagagagcatgttgccacaccagaaccgg

SEQ ID NO: 101995 - DNA, 80 bp, synthetic construct
  source 1..80: mol_type = other DNA
ttgtggtggcgggtggtctacaccccgccattctctgtctctacctcagcactgtaccacctccaaggggaaaagttccc

SEQ ID NO: 101996 - DNA, 80 bp, synthetic construct
  source 1..80: mol_type = other DNA
gctacccagttgatggctcttctaggcgagtctgcattgcatggccaaaatttttacaagaaggtgagtggcatggtcat

SEQ ID NO: 101997 - DNA, 80 bp, synthetic construct
  source 1..80: mol_type = other DNA
caaggagataaagaacggaggacatgagttctacgtgcccaagtttgagtccatgtacaagtggatgcgcttctcggact

SEQ ID NO: 101998 - DNA, 80 bp, synthetic construct
  source 1..80: mol_type = other DNA
ttccagagagtcatcaagaggttttaccgcttgctcccgtcgcgggtgctgaactagcagcgcctgtggttgggcaaact

SEQ ID NO: 101999 - DNA, 80 bp, synthetic construct
  source 1..80: mol_type = other DNA
gtttctccaaagaatgcccctggtgaaattttggtcaacctggaacttgggccaaatttgaatccttacctagaacattt

SEQ ID NO: 102000 - DNA, 80 bp, synthetic construct
  source 1..80: mol_type = other DNA
gtctagaatgtacaatgcttatgctggtgggatagaggttgagattatccttgcaggcaatgccttcaccgctggaaaga

SEQ ID NO: 102001 - DNA, 80 bp, synthetic construct
  source 1..80: mol_type = other DNA
ttctaattgcggcagtccccccaaatttcccagttgagagtgtgtcagcatcacaagccacccaattccctcatgcaatt

SEQ ID NO: 102002 - DNA, 80 bp, synthetic construct
  source 1..80: mol_type = other DNA
gtggatgttaggacacttgaacccgttcggctccctctcccagatgtgcgatctaatttcttccactatactaccaagga

SEQ ID NO: 102003 - DNA, 80 bp, synthetic construct
  source 1..80: mol_type = other DNA
tgaacccaagatgagattagtgatttggctgtatacccctttgagaacaaatggtagcggagacgactctttcaccgtct

SEQ ID NO: 102004 - DNA, 80 bp, synthetic construct
  source 1..80: mol_type = other DNA
cttataatgcttttgacaacaactgttacaacttctgttgccaagttttggaactcgacgactgctggatgagaaggcgg

SEQ ID NO: 102005 - DNA, 80 bp, synthetic construct
  source 1..80: mol_type = other DNA
ctgggagattgctgacccgcccgtcaatggacttccaattttcttttctggtcccccctacagtggaaaccaaaactgtt

SEQ ID NO: 102006 - DNA, 80 bp, synthetic construct
  source 1..80: mol_type = other DNA
ctgttcacagtccctggtctcaccccccaggagatgagcaactcaagatggcccgcccagatatctggtatggtggtgcg

SEQ ID NO: 102007 - DNA, 80 bp, synthetic construct
  source 1..80: mol_type = other DNA
cggtaatgagccacaagtggttcagttccagaatggtcgctgccataccgatggcacgctattggggaccaccactgtga

SEQ ID NO: 102008 - DNA, 80 bp, synthetic construct
  source 1..80: mol_type = other DNA
gtgaacagtgcatcgctggctttgttggcacctcaacgaacactaggtcagccactggttccactacagagactaggaca

SEQ ID NO: 102009 - DNA, 80 bp, synthetic construct
  source 1..80: mol_type = other DNA
ggtgatacagatctgtggctgcggcttgaagagccgaatgggcaaccctatgacatctttggagaccaacctgcccctct

SEQ ID NO: 102010 - DNA, 80 bp, synthetic construct
  source 1..80: mol_type = other DNA
aggaacacccgatttccgggcagtgatagtagggtttgcatctagaccacagacacagggatcatatatgaatgaagcct

SEQ ID NO: 102011 - DNA, 80 bp, synthetic construct
  source 1..80: mol_type = other DNA
atgtcaacactgtggactcccacttcgccccagccacagggaataccaagatcatcctgagaaggggcggaacaggacac

SEQ ID NO: 102012 - DNA, 80 bp, synthetic construct
  source 1..80: mol_type = other DNA
gtgggaggaggacatctctggaaattcagaccttttggagtggagggaggcgaaggcagagtcagttaccaggaatatgt

SEQ ID NO: 102013 - DNA, 80 bp, synthetic construct
  source 1..80: mol_type = other DNA
attgcccaactattcaggagccactgcctccaatcataacctcgcccctcccgttgccccaagaatgcctggtgagttac

SEQ ID NO: 102014 - DNA, 80 bp, synthetic construct
  source 1..80: mol_type = other DNA
tgctcctgtttgagtccgatatgccggtgtgggacgatggacatggagctgcaccggctcagaagattcactgcttattg

SEQ ID NO: 102015 - DNA, 80 bp, synthetic construct
  source 1..80: mol_type = other DNA
tatgtacagaggacgtcgggtttcttcgacccataccagagctggaacccaaagccgtcgcagtacacagctgactcaaa

SEQ ID NO: 102016 - DNA, 80 bp, synthetic construct
  source 1..80: mol_type = other DNA
ccacaacaatttatcacccatttctttgatagccaggcaccagcactggcggaggccgcactcctccggtacgtgcatcc

SEQ ID NO: 102017 - DNA, 80 bp, synthetic construct
  source 1..80: mol_type = other DNA
cgatagtagccgagtcttgtttgagacaaagctctatagggagggcttcatggtggtgtcggccccaactggtaggtttg

SEQ ID NO: 102018 - DNA, 80 bp, synthetic construct
  source 1..80: mol_type = other DNA
attttccccttgatggctattttaggtttgattcctgggttaattctttctatgtgctttcccccgtgggaagtggccaa

SEQ ID NO: 102019 - DNA, 80 bp, synthetic construct
  source 1..80: mol_type = other DNA
ggccgccggggtagatccaaggtggtataatggctgctaacatctttgctggtattgctggggatattctgggctctacg

SEQ ID NO: 102020 - DNA, 80 bp, synthetic construct
  source 1..80: mol_type = other DNA
gtttccggcttagtcaatgccggcgccaatgcaataaatcagggtgtggaatttggttttaatcaggcccttcaggagaa

SEQ ID NO: 102021 - DNA, 80 bp, synthetic construct
  source 1..80: mol_type = other DNA
ttcttttagacatgatagggatatgcttgaaagacaggttgcagccacccggcagctacagagtgacctcattgccgtgc

SEQ ID NO: 102022 - DNA, 80 bp, synthetic construct
  source 1..80: mol_type = other DNA
gcgagcaggccttgcgccgcggaggcttctctgatgcagatgccgctagaggagctgtgggaggtcccatgacaaaattg

SEQ ID NO: 102023 - DNA, 80 bp, synthetic construct
  source 1..80: mol_type = other DNA
gttgactggaatgggacgcgtcttgccgccccgggggccatgcacaccacagcatactccgggaggttcatcagcgcacc

SEQ ID NO: 102024 - DNA, 80 bp, synthetic construct
  source 1..80: mol_type = other DNA
ccaaaggacaccccatacttatggaacatctaagacccaacaaacaagcactgggactcccctccaaagtgacacttctt

SEQ ID NO: 102025 - DNA, 80 bp, synthetic construct
  source 1..80: mol_type = other DNA
cggtggtgtcacaacctacaacttctacgtccttgtctaggacgcgaacccaatcatgggtctcggaacaacagaggttg

SEQ ID NO: 102026 - DNA, 80 bp, synthetic construct
  source 1..80: mol_type = other DNA
actggagagagtgggcgacgccctcctcaccgccttaggagccttgttctcaaaacccattaagaacatagttggtaaac

SEQ ID NO: 102027 - DNA, 80 bp, synthetic construct
  source 1..80: mol_type = other DNA
cagcccttccaccccaacgctctgcaactcacatggggatctgtcccaagctccagtggtagcagtgttagatcagcatc

SEQ ID NO: 102028 - DNA, 80 bp, synthetic construct
  source 1..80: mol_type = other DNA
cactgtcagtggcacagttcttgattcttggacccctgcctttaatttgaaacatcagccgttgtttgcccgattccatc

SEQ ID NO: 102029 - DNA, 80 bp, synthetic construct
  source 1..80: mol_type = other DNA
attcttggacccctgcctttaatttgaaacatcagccgttgtttgcccgattccatccccgtggggcaagtaacgtgtaa

SEQ ID NO: 102030 - DNA, 80 bp, synthetic construct
  source 1..80: mol_type = other DNA
tcaaaccattgaatttcttgaacttattgtcggcctgcgattggacattcgctggcattgtggagacggcgatcttaata

SEQ ID NO: 102031 - DNA, 80 bp, synthetic construct
  source 1..80: mol_type = other DNA
caacactgggggtgtcttctccaacctgagggttggaattaagaaggccctcaattcaaaacaggggccactggagctta

SEQ ID NO: 102032 - DNA, 80 bp, synthetic construct
  source 1..80: mol_type = other DNA
caacactggaggtgtcttctccaacctgagggttggaattaagaaggccctcaattcaaaacaggggccactggagctta

SEQ ID NO: 102033 - DNA, 80 bp, synthetic construct
  source 1..80: mol_type = other DNA
gcagaactgtttgatatctactgggatccgcctgatgtcactaacttcttgatgcctctgctagatgactttgaactcca

SEQ ID NO: 102034 - DNA, 80 bp, synthetic construct
  source 1..80: mol_type = other DNA
aggaccagaagacgtggcagctgagatagtcccgataatattaggtggcataggaatggtggtggggttcacagcagaga

SEQ ID NO: 102035 - DNA, 80 bp, synthetic construct
  source 1..80: mol_type = other DNA
cttttatgggggttgtggagctgatcgtactcttggctgagttatttgatatcttttggactccgccagatatttcaagc

SEQ ID NO: 102036 - DNA, 80 bp, synthetic construct
  source 1..80: mol_type = other DNA
atggcgctcgatttgttgcgccggtcacaaacaccctctccgtcccgacaggacagcccccccaagagtcaaagagaccg

SEQ ID NO: 102037 - DNA, 80 bp, synthetic construct
  source 1..80: mol_type = other DNA
tgggggaaaggttggccttgtacctagagaatccatagaccactgggatggataccatggcgaggatgtcctgctctgtg

SEQ ID NO: 102038 - DNA, 80 bp, synthetic construct
  source 1..80: mol_type = other DNA
tgggggaaaggttggccttgtacctagagaatccatagaccactgggatggataccatggcgaggatgtcctgctctggg

SEQ ID NO: 102039 - DNA, 80 bp, synthetic construct
  source 1..80: mol_type = other DNA
tccaaggggccatttacaactttgatgaggacagagtagcagccttcactaacctagctcgtgccaatggcttggggctc

SEQ ID NO: 102040 - DNA, 80 bp, synthetic construct
  source 1..80: mol_type = other DNA
ataagcatggccacactaggtaaaaggttaaggactgttaagaccatggaagggctacgcaatgcactggtgggttacaa

SEQ ID NO: 102041 - DNA, 80 bp, synthetic construct
  source 1..80: mol_type = other DNA
actgtctcagaggtaaagaaggtgatggggtgggatgctgaaccggaacaccaagaaagtacggctaaagcgtggtgtga

SEQ ID NO: 102042 - DNA, 80 bp, synthetic construct
  source 1..80: mol_type = other DNA
aggggtcaccccatccaccctacctagcacgtttgaaagagctgaattgagcaacacctcaactgaacagcaaaccgtgt

SEQ ID NO: 102043 - DNA, 80 bp, synthetic construct
  source 1..80: mol_type = other DNA
gaagggggaccgtccctacagcaagtgctaagagaccaactaaaaccatttgctgaaccccgtggcagattgccggaggc

SEQ ID NO: 102044 - DNA, 80 bp, synthetic construct
  source 1..80: mol_type = other DNA
ctttggggggcagatcttggcactgtcatccgcgctgcaagagcctttgggccattctgcgaagccataaaacctcatgt

SEQ ID NO: 102045 - DNA, 80 bp, synthetic construct
  source 1..80: mol_type = other DNA
cagtgatggggttaacattggtgtaaatgacttgaccaccgtccgtgggccattctggaacatgtgccccctaccgccac

SEQ ID NO: 102046 - DNA, 80 bp, synthetic construct
  source 1..80: mol_type = other DNA
tgggtatcaggggcggctcgaccgcaactctattgagagacagttgtggtggactcgcggacccaatcatgatgatccat

SEQ ID NO: 102047 - DNA, 80 bp, synthetic construct
  source 1..80: mol_type = other DNA
aggaaggggggcttgagatctacatacccgggtggcaggccatgttccgctggatgcggttccatgatttgagtttgtgg

SEQ ID NO: 102048 - DNA, 80 bp, synthetic construct
  source 1..80: mol_type = other DNA
cagctgatcctattcctttagaacctgtagtgggggctgcaactgcagccgctacggcaggtcaagttaatatgattgac

SEQ ID NO: 102049 - DNA, 80 bp, synthetic construct
  source 1..80: mol_type = other DNA
ataccccattgcgggccgggggcgcgtctgcgggcacggatccgttcgtgattgcagggcgcgtcttaacgtgcccttct

SEQ ID NO: 102050 - DNA, 80 bp, synthetic construct
  source 1..80: mol_type = other DNA
ttggggacatgatagagttctatgaaggtcacatattccattatgccatatatatgggccagggcaaaaccattggagtg

SEQ ID NO: 102051 - DNA, 80 bp, synthetic construct
  source 1..80: mol_type = other DNA
atgatcccatttcacgcctagatataaaacaaggggcttcctttgccccacacctgggttctattgaatacaccacttcg

SEQ ID NO: 102052 - DNA, 80 bp, synthetic construct
  source 1..80: mol_type = other DNA
cctccagggtttggggagacacttgtttattttatgtctaactttccaattgggcacactagttccagtatggcacaagt

SEQ ID NO: 102053 - DNA, 80 bp, synthetic construct
  source 1..80: mol_type = other DNA
aggggatgcagcattgcttcactatgtggaccctgacacacacagaaatcttggtgagttcaaattataccctgaaggtt

SEQ ID NO: 102054 - DNA, 80 bp, synthetic construct
  source 1..80: mol_type = other DNA
aaattgaggggtctaatgccctattgcaaaagaatctgtcaactaggtataatcttttacttaattcaggtatgtcgtca

SEQ ID NO: 102055 - DNA, 80 bp, synthetic construct
  source 1..80: mol_type = other DNA
ttcgcaaataatggtaggaagtgaatttttgtaatataatgtgggcatcatattcattattggcaattttaattggtttt

SEQ ID NO: 102056 - DNA, 80 bp, synthetic construct
  source 1..80: mol_type = other DNA
gctctgggggcgaggccaaaacaacctccccccaagcccccttccacaaagaaggaggacaaaaccacccttcctccaat

SEQ ID NO: 102057 - DNA, 80 bp, synthetic construct
  source 1..80: mol_type = other DNA
gctctggtggcgaggccaaaacaacctccccccaagcccccttccacaaagaaggaggacaaaaccacccttcctccaat

SEQ ID NO: 102058 - DNA, 80 bp, synthetic construct
  source 1..80: mol_type = other DNA
cacgcgacctggctaagaagatggcagcaaccctctcaggtgaccagagagtgggccttgtaccaagaaacggtgtcgat

SEQ ID NO: 102059 - DNA, 80 bp, synthetic construct
  source 1..80: mol_type = other DNA
ggacatacgcataaagccttgcagaataatctacaattccacagcttatgacctggagtctaacggctcagggaaggtca

SEQ ID NO: 102060 - DNA, 80 bp, synthetic construct
  source 1..80: mol_type = other DNA
agtaggagaccaaaaagtccaagccaacaatgagctctactctgccctcaacaacctgcgtagagccaggattagatact

SEQ ID NO: 102061 - DNA, 80 bp, synthetic construct
  source 1..80: mol_type = other DNA
ttggggtttctgggtctcttccaacctcttcatcacctccacacatgttgttccaccaggcatgacggaggcttttggag

SEQ ID NO: 102062 - DNA, 80 bp, synthetic construct
  source 1..80: mol_type = other DNA
ccaaatccaaattcacaggagtggggaattttgcaagatgagattccccaaagccatcagacctgatgtctctggaatga

SEQ ID NO: 102063 - DNA, 80 bp, synthetic construct
  source 1..80: mol_type = other DNA
gaggatgattggaggccaaatggggatgcttctcacagggtccaatgccaaaaatatggaccttggtaccgtccccggag

SEQ ID NO: 102064 - DNA, 80 bp, synthetic construct
  source 1..80: mol_type = other DNA
gaggatgattgggggccaaatggggatgcttctcacagggtccaatgccaaaaatatggaccttggtaccgtccccggag

SEQ ID NO: 102065 - DNA, 80 bp, synthetic construct
  source 1..80: mol_type = other DNA
caaaagaggtaatgattgggttgtcattggggtgcacaccgccgctgcaaggggtggcaacacggtgatatgtgcaactc

SEQ ID NO: 102066 - DNA, 80 bp, synthetic construct
  source 1..80: mol_type = other DNA
caaaaggggtaatgattgggttgtcattggggtgcacaccgccgctgcaaggggtggcaacacggtgatatgtgcaactc

SEQ ID NO: 102067 - DNA, 80 bp, synthetic construct
  source 1..80: mol_type = other DNA
atggggatgatgagatagtcagcacagacataaagttggacccacaaaaactgacagacaaactgagagagtatgggctc

SEQ ID NO: 102068 - DNA, 80 bp, synthetic construct
  source 1..80: mol_type = other DNA
gacctgataaaacagaggggccactcataattagagagagcttagagggtctgacgttcctcaggagagatatatgtagg

SEQ ID NO: 102069 - DNA, 80 bp, synthetic construct
  source 1..80: mol_type = other DNA
aaccggtggcaggtggggctattgccgcacctctcactggtcaaacaaatataattgacccctggattatgaaaaacttt

SEQ ID NO: 102070 - DNA, 80 bp, synthetic construct
  source 1..80: mol_type = other DNA
ctgggggagtggaggtacaggtgctcatggctggcaatgcattcactgcaggaaaggtcatatttgcggctgtgccgcct

SEQ ID NO: 102071 - DNA, 80 bp, synthetic construct
  source 1..80: mol_type = other DNA
cagacaccctcaagaaactccacggggaatcattcccctacacggcttttgacaacaactgctacaccttttgctgttgg

SEQ ID NO: 102072 - DNA, 80 bp, synthetic construct
  source 1..80: mol_type = other DNA
ccagatttcatagctgacatatatggggttctctcccagagaaatagatccatcgaatctggccagagtggtcctgcaaa

SEQ ID NO: 102073 - DNA, 80 bp, synthetic construct
  source 1..80: mol_type = other DNA
tggggggttctcacccactgatgcggctcgtggagccatcaacgctcctatgacaaaggttctggattggaatgggacta

SEQ ID NO: 102074 - DNA, 80 bp, synthetic construct
  source 1..80: mol_type = other DNA
ggggaacatctgtgagatcaaattcaactcaattgaccagtctgggttcccaatcttctggttcctcccgaagcagtgtg

SEQ ID NO: 102075 - DNA, 80 bp, synthetic construct
  source 1..80: mol_type = other DNA
tagaaggggggagtcaaatgtttagtgaaaagattatttaattagaactaatttcaatttggactaattcggaaaatctt

SEQ ID NO: 102076 - DNA, 80 bp, synthetic construct
  source 1..80: mol_type = other DNA
agtagtgtactaccaagtatagataacgtctgaattttaaagtgaatatcaaagtgaaaagatgattttcatgctaatcc

SEQ ID NO: 102077 - DNA, 80 bp, synthetic construct
  source 1..80: mol_type = other DNA
aacgcaatgatggttggagagagcaaggaaacctttgaacttgaggagctccctgatgacatgctagaaatggctaacaa

SEQ ID NO: 102078 - DNA, 80 bp, synthetic construct
  source 1..80: mol_type = other DNA
tctaaacacttattatatgctctgtgtggcaaattatgcagtcacatggagcttgctaatagttgccttaataataggtt

SEQ ID NO: 102079 - DNA, 80 bp, synthetic construct
  source 1..80: mol_type = other DNA
tattattcaagaaataccaacatcgattcttagatatttatgccatgtactgtgaagagtgcgatatgtatcatgatagg

SEQ ID NO: 102080 - DNA, 80 bp, synthetic construct
  source 1..80: mol_type = other DNA
ggtattaaatggaacggtgatttcacgaataagtgtggccattgcacatgcgggcagtacgaagatgcatccgggctctt

SEQ ID NO: 102081 - DNA, 80 bp, synthetic construct
  source 1..80: mol_type = other DNA
agtgcaccggaaaacatataattgcctaatacagtacaaatctaaatggattatgaactttttggtaacttatgtaatct

SEQ ID NO: 102082 - DNA, 80 bp, synthetic construct
  source 1..80: mol_type = other DNA
tggtattgcttaaagattctgtagttattgttcaggcaaaaggggtggatttcagtgaatgtattgaagcagaaaaagta

SEQ ID NO: 102083 - DNA, 80 bp, synthetic construct
  source 1..80: mol_type = other DNA
aggtggaactgtacaggcccttttgttaatctaggaaactgtgagaaaaaacaaaagaaagaaccatactctaatattgc

SEQ ID NO: 102084 - DNA, 80 bp, synthetic construct
  source 1..80: mol_type = other DNA
tgctcaattaaagggcttgggtgctatctctatactggatgttcctataattgcaagtattcctgaggatattgccggag

SEQ ID NO: 102085 - DNA, 80 bp, synthetic construct
  source 1..80: mol_type = other DNA
cattaagatacatagaagaccagagatcataccactctcagttgactgttgagtatgctatgttgaccagatactgtgat

SEQ ID NO: 102086 - DNA, 80 bp, synthetic construct
  source 1..80: mol_type = other DNA
ttgcctctgaaatgaagaattactactctggtaagcaaagcaagtttgataaggatttgaatttagccctcacatctcta

SEQ ID NO: 102087 - DNA, 80 bp, synthetic construct
  source 1..80: mol_type = other DNA
atgataaaaactgaggccagatatactaagaacagtactggagtattctcaaacaatgtagcaataaggaagtggctagt

SEQ ID NO: 102088 - DNA, 80 bp, synthetic construct
  source 1..80: mol_type = other DNA
caccatgctttcagagggacctcttcatcttacatagcagggttgctatctagtaaagcaaatgatgagttagtgcagta

SEQ ID NO: 102089 - DNA, 80 bp, synthetic construct
  source 1..80: mol_type = other DNA
cacatctaaaattagggagaagttccccgggaatgcactactaaaggcagtaattgactatattgcatatatgaaggggc

SEQ ID NO: 102090 - DNA, 80 bp, synthetic construct
  source 1..80: mol_type = other DNA
ttaccgaaatgagtaacttcaaaaaggatgagttctgggatgagttagtatatgtgcctgaccctactaagcctcccaag

SEQ ID NO: 102091 - DNA, 80 bp, synthetic construct
  source 1..80: mol_type = other DNA
ctatcaagaagcagtggaacagtatatgatttcaaatcagctacatccaacttgggtgaaaagaactgtaaggatgtaaa

SEQ ID NO: 102092 - DNA, 80 bp, synthetic construct
  source 1..80: mol_type = other DNA
gggtgttgtatgcttgtcgcctagatctggtgtgacatatgactcaataatagcttgtggtgaaggatccagtccaaata

SEQ ID NO: 102093 - DNA, 80 bp, synthetic construct
  source 1..80: mol_type = other DNA
tctatagaatacccaaaacaggagtgtaccaatccaattcagaaccatctaattactgtgtgtcggatagccactgcctt

SEQ ID NO: 102094 - DNA, 80 bp, synthetic construct
  source 1..80: mol_type = other DNA
gaagattttgaagtgataaaccaagaggagctagatgctataaaaaagtctagatgctgggaagttgattacctatatgc

SEQ ID NO: 102095 - DNA, 80 bp, synthetic construct
  source 1..80: mol_type = other DNA
taacccttctaaacaaagtgatggcataagaagctgccgtatgagagatgctgggcactgcaatgtcaccacaaatagat

SEQ ID NO: 102096 - DNA, 80 bp, synthetic construct
  source 1..80: mol_type = other DNA
ggccaataatacaatgtgatgacaataaatactactattctgaattgcagagagactatgacaaagagcaagatataggt

SEQ ID NO: 102097 - DNA, 80 bp, synthetic construct
  source 1..80: mol_type = other DNA
ttttgccttagccctaggtgtaccactgtcagattccctatccatccaaaacatgtaagcaactgcgattggcaagtgag

SEQ ID NO: 102098 - DNA, 80 bp, synthetic construct
  source 1..80: mol_type = other DNA
ccactccacagtagataaagtggatgtacataacctggaggatattgagcaatacagaaaagccataacacaaaagctcc

SEQ ID NO: 102099 - DNA, 80 bp, synthetic construct
  source 1..80: mol_type = other DNA
aaaatagcttatcgatatttaagtatgctagaaccaagaatctcccacatataaaacctatatataaatatataacaatt

SEQ ID NO: 102100 - DNA, 80 bp, synthetic construct
  source 1..80: mol_type = other DNA
gatttaaaataaataccaaagaggggaagcatttactagatgttatagcttatgttaagcaagcttcttactcgtcatta

SEQ ID NO: 102101 - DNA, 80 bp, synthetic construct
  source 1..80: mol_type = other DNA
tacaataaaatgtacgtgaccgggcctacagtaggcataaatacaaaacatgatgagttatgcactggcccttgccctgt

SEQ ID NO: 102102 - DNA, 80 bp, synthetic construct
  source 1..80: mol_type = other DNA
taatgtcccacactcagacggatggctgacattcgctagagaaagaactagttcttggggttgtgaggaattcgggtgtt

SEQ ID NO: 102103 - DNA, 80 bp, synthetic construct
  source 1..80: mol_type = other DNA
acagaagaagcaaccaatgttgaattatgcttgactttttcagataagacctactgtacagaattaaatcctataacacc

SEQ ID NO: 102104 - DNA, 80 bp, synthetic construct
  source 1..80: mol_type = other DNA
tataataacaaatctgtttgaagtacaattcaaaactgtagaaacttacagcctgcctagggttgtagcagtccaaaacc

SEQ ID NO: 102105 - DNA, 80 bp, synthetic construct
  source 1..80: mol_type = other DNA
gacaatgattttcaggcatgcaaatttttgcaaagtccaccaagctataggcttgaggaagatgacggatcaatcacagt

SEQ ID NO: 102106 - DNA, 80 bp, synthetic construct
  source 1..80: mol_type = other DNA
gatagattataagaaaatcctcggcacaataaaaatgaaagctatactaggagatgtaaaatataagacatttgcagaga

SEQ ID NO: 102107 - DNA, 80 bp, synthetic construct
  source 1..80: mol_type = other DNA
tatcgatataactgctgaaggagtttgtacaggatgtgtcaattgttttgaaaatatacactgtgagcttacaatacaca

SEQ ID NO: 102108 - DNA, 80 bp, synthetic construct
  source 1..80: mol_type = other DNA
caactatagaggccagttgcccagttactagtccttgcactttatttcatgatcggatattgatcactccagatgaacac

SEQ ID NO: 102109 - DNA, 80 bp, synthetic construct
  source 1..80: mol_type = other DNA
aagtatgctatgaaagtaatttgcacagagaagcaaacaggaacattaccgttcaaaatctgtaactcaaaagtcgatgc

SEQ ID NO: 102110 - DNA, 80 bp, synthetic construct
  source 1..80: mol_type = other DNA
cactttaactttagtagaagccaaacctattctagaactggcctctgttgatcaaactgcatatataagagaaaaagatg

SEQ ID NO: 102111 - DNA, 80 bp, synthetic construct
  source 1..80: mol_type = other DNA
ttatattggtatattttatacttcaatcctcattgttattacaatatttataattatttatgtaatcctgcccatatgtt

SEQ ID NO: 102112 - DNA, 80 bp, synthetic construct
  source 1..80: mol_type = other DNA
ttaaattgaaagacactttacaaaagcatgaagatgcatacaagagagaaatgaaaataagataataagcaaaagggttt

SEQ ID NO: 102113 - DNA, 80 bp, synthetic construct
  source 1..80: mol_type = other DNA
ttagttaataagagggatatatatttagtttagctgtaaaggggaggggaatgccaacagcaggaatttatttgaagaac

SEQ ID NO: 102114 - DNA, 80 bp, synthetic construct
  source 1..80: mol_type = other DNA
atatgccaaaatgttgaaataataatattagtaacactagccttgctgatttttattttacttagtatcataagtaaaac

SEQ ID NO: 102115 - DNA, 80 bp, synthetic construct
  source 1..80: mol_type = other DNA
ttaaaggcatgtccacatacactgattcatttaaggcgttaggaaggatgatggatataggtgataaaattgcagagtac

SEQ ID NO: 102116 - DNA, 80 bp, synthetic construct
  source 1..80: mol_type = other DNA
gaggcttattgtgaatcactgaaggctaaagctcgctcctcatggaagcaaattatgaataaaaagcttgagccaaaaca

SEQ ID NO: 102117 - DNA, 80 bp, synthetic construct
  source 1..80: mol_type = other DNA
aatcaataatgctttaattctatgggaacaacaattcatggttaataacgatatcataagcaagagtgataaggtgaagc

SEQ ID NO: 102118 - DNA, 80 bp, synthetic construct
  source 1..80: mol_type = other DNA
tattgaaggacttttgtgggataggcaagcacaagcagttcaaaaataagatgattgatgatatagatacaaccaagcct

SEQ ID NO: 102119 - DNA, 80 bp, synthetic construct
  source 1..80: mol_type = other DNA
aaaatcttagatttcgatgatgaaagtatcttcttagcaagccttactatgatggaacagagtaaaaaagtactgtcaga

SEQ ID NO: 102120 - DNA, 80 bp, synthetic construct
  source 1..80: mol_type = other DNA
aaatagtggcctgaaagcagacaactttataattaacgaatttggttccaggataagagattgcaataaggaaacttaca

SEQ ID NO: 102121 - DNA, 80 bp, synthetic construct
  source 1..80: mol_type = other DNA
ataatatgcattctattttcttgactagatattggcaatgcatctcagatttttcaacacttatgaagaatatattgtct

SEQ ID NO: 102122 - DNA, 80 bp, synthetic construct
  source 1..80: mol_type = other DNA
gaagagacaaacatattcaaccctgggtgtcttcacggaacatttaaatgcattaatggctatatttcaatatctagagc

SEQ ID NO: 102123 - DNA, 80 bp, synthetic construct
  source 1..80: mol_type = other DNA
aattagactagacaaggaacgatgtcaaagaattgtatcgtccccaggtttatttctgaccacctctctactgctaaagc

SEQ ID NO: 102124 - DNA, 80 bp, synthetic construct
  source 1..80: mol_type = other DNA
atgataaccccacacttgtactaaatgatgttatgaactttgctatatatactagtctatcgattactaaaagtgtctta

SEQ ID NO: 102125 - DNA, 80 bp, synthetic construct
  source 1..80: mol_type = other DNA
aaaggcagagggttcaactaagggacatttatctctccgactatgacataacccaaaaaggaataaaggataatcgagag

SEQ ID NO: 102126 - DNA, 80 bp, synthetic construct
  source 1..80: mol_type = other DNA
ctcacaagtatctggttcccagggagtgtcacactcaaagaatacctaacacaaatatacctaccattctacttcaatgc

SEQ ID NO: 102127 - DNA, 80 bp, synthetic construct
  source 1..80: mol_type = other DNA
atgtcatggtagatttagctaaaactattctggagatagagagtgaacaaagggaaaatataaaagagatatggtcgaat

SEQ ID NO: 102128 - DNA, 80 bp, synthetic construct
  source 1..80: mol_type = other DNA
agacatcaaaccagagctagatccactatccatagaattcccgcatatcacccctgataattatctatttgcaaataaca

SEQ ID NO: 102129 - DNA, 80 bp, synthetic construct
  source 1..80: mol_type = other DNA
aattacacaaagcagacagtaaatttaaaaatattactacattcattatgtaaaaacctattggcagatacatcaaggca

SEQ ID NO: 102130 - DNA, 80 bp, synthetic construct
  source 1..80: mol_type = other DNA
caatcatttgaggaatagaatagaaaatagaaataactttaggagatcaataacaactatttcaacatttactagttcaa

SEQ ID NO: 102131 - DNA, 80 bp, synthetic construct
  source 1..80: mol_type = other DNA
aatcgtgcttgaagataggggatttcagaaaggaaaaggagacacagtcactaaagcaaaaaaagattttggaaaatgag

SEQ ID NO: 102132 - DNA, 80 bp, synthetic construct
  source 1..80: mol_type = other DNA
actagaaagcgtagattagcaaatcctctttttgtaacagacgaacatgtgtctttagaagtcggccactgcaattatgt

SEQ ID NO: 102133 - DNA, 80 bp, synthetic construct
  source 1..80: mol_type = other DNA
atagggaaattgatgaagcaatagaggccttagcagctgatgggtttgagaagaacgtggagaaaatagagaagctatca

SEQ ID NO: 102134 - DNA, 80 bp, synthetic construct
  source 1..80: mol_type = other DNA
ctggggaaagcaaaaggcctaaagatggaaataaatgctgacatgtctaaatggagtgcccaagatgtattctacaaata

SEQ ID NO: 102135 - DNA, 80 bp, synthetic construct
  source 1..80: mol_type = other DNA
tactctatattatcgattacaaggtttcagtttctaatgagagtagcctaataacatttgataagtattttgaattaact

SEQ ID NO: 102136 - DNA, 80 bp, synthetic construct
  source 1..80: mol_type = other DNA
ttttggcttatagctcttgatcccatactatacccccaagaaaaggaaagaatattattctttatgtgcaactatatgca

SEQ ID NO: 102137 - DNA, 80 bp, synthetic construct
  source 1..80: mol_type = other DNA
aaaggagcttattctgcctgatgaattgttatataatttgctcgatcaaaaagtaacatatcaaaatgacatactagcaa

SEQ ID NO: 102138 - DNA, 80 bp, synthetic construct
  source 1..80: mol_type = other DNA
gcatgacaaatcaactgaacacaaacaccgtagaaataaaaagaaactggctccaaggaaattttaactacacttctagt

SEQ ID NO: 102139 - DNA, 80 bp, synthetic construct
  source 1..80: mol_type = other DNA
tatgtacatagctgtgcaatgtcggtttacaaggatattctaaaagagtcgataacactcttagatggctctataatggt

SEQ ID NO: 102140 - DNA, 80 bp, synthetic construct
  source 1..80: mol_type = other DNA
tattcaacttatatggcgagccattttcaatatatggtagattcctattaacctctgtaggggattgtgcatatataggt

SEQ ID NO: 102141 - DNA, 80 bp, synthetic construct
  source 1..80: mol_type = other DNA
tcccagcagaatccagatcagatattccgatagagcttaatggtgttctagatgcgccactgtcgatgattagcacagtt

SEQ ID NO: 102142 - DNA, 80 bp, synthetic construct
  source 1..80: mol_type = other DNA
ggcttagaagctggcaatttatactttttaataaaacttttaaataagtatacacctgtcatgcaaaagagagagtcagt

SEQ ID NO: 102143 - DNA, 80 bp, synthetic construct
  source 1..80: mol_type = other DNA
tataaaccaaatagcttgtgtcaaggattggaaagttgaggatttgacagataatgagatattcaggttaaaaatcctta

SEQ ID NO: 102144 - DNA, 80 bp, synthetic construct
  source 1..80: mol_type = other DNA
aaatagttattgtaaggatagatcctgtaagtaaggaattacatataaattcagacagattcaaggaactattcccgaca

SEQ ID NO: 102145 - DNA, 80 bp, synthetic construct
  source 1..80: mol_type = other DNA
acaggttgctaatgagggacctatctactttaagtattactaatgatgatatacaagtgatttactcatatatgatctta

SEQ ID NO: 102146 - DNA, 80 bp, synthetic construct
  source 1..80: mol_type = other DNA
aatgatcctatgatgatcacaatagcaaatacatacatactatctatatatgggagcccacagaagaggatgggcatgtc

SEQ ID NO: 102147 - DNA, 80 bp, synthetic construct
  source 1..80: mol_type = other DNA
gtttagaagaaaaaatgaaacaacgtatagtcaacaatgagctagaaaaaggacaaagggatattgtattcgaattaaaa

SEQ ID NO: 102148 - DNA, 80 bp, synthetic construct
  source 1..80: mol_type = other DNA
ttggttgtcgatatcaattttaaccaattctttgaccttaagcaactcctctatgagaaatttggtgaagatgaggaatt

SEQ ID NO: 102149 - DNA, 80 bp, synthetic construct
  source 1..80: mol_type = other DNA
tttgttcactgatgcaagggaatctcattaaagacaaagaatggtacactgttcattatttgaagcagatattgtctgga

SEQ ID NO: 102150 - DNA, 80 bp, synthetic construct
  source 1..80: mol_type = other DNA
gttttagattaataacacactttgcagattcctttatagacgcttcttcaagatcggcattcttgcagctggttatgagt

SEQ ID NO: 102151 - DNA, 80 bp, synthetic construct
  source 1..80: mol_type = other DNA
gactttagttacaaggatgttaaagttttcaaattatatgaactaataaagaacgggcacaataggacagacttcatacc

SEQ ID NO: 102152 - DNA, 80 bp, synthetic construct
  source 1..80: mol_type = other DNA
ctgaagcagacagatttggataaatatgatgcaatgaaaagtcatgaaagagttacatggaacgactggcaaacttctag

SEQ ID NO: 102153 - DNA, 80 bp, synthetic construct
  source 1..80: mol_type = other DNA
gcatcttgatatgggttcaatcaacctaactataacaggctacaacagatctataacaataataggagaagacaataagc

SEQ ID NO: 102154 - DNA, 80 bp, synthetic construct
  source 1..80: mol_type = other DNA
aaagaatattaattaggtcgctagattatcttaacaatgatgtcttctctttatcgagaattaaagttgggttggaagaa

SEQ ID NO: 102155 - DNA, 80 bp, synthetic construct
  source 1..80: mol_type = other DNA
aggttgatatgctgtgagggctcggataatattgatgatgggctagaattcttatcagatgaccctatgaattacactga

SEQ ID NO: 102156 - DNA, 80 bp, synthetic construct
  source 1..80: mol_type = other DNA
aataaaattgctaattgaacgtgaaacagctgcctttgaagaagccttcacattcagtacaaatggatttatttcacctg

SEQ ID NO: 102157 - DNA, 80 bp, synthetic construct
  source 1..80: mol_type = other DNA
aaaacctcgggtgccttgaagccatagtatcactcataaaactgttgaaaactaatgagtggtcgactgtgatagataag

SEQ ID NO: 102158 - DNA, 80 bp, synthetic construct
  source 1..80: mol_type = other DNA
tgcatacacatatgtttagtaaaaaatggtatggatcacatgtatcattcgtttgatattccatcatgcttccttgacaa

SEQ ID NO: 102159 - DNA, 80 bp, synthetic construct
  source 1..80: mol_type = other DNA
cccaatatctcggaaagtcaactggatgatgtttaaggaatttgttaatagtctacccagtccggctataccgccttgga

SEQ ID NO: 102160 - DNA, 80 bp, synthetic construct
  source 1..80: mol_type = other DNA
atgtcatggttgacaatttcaaaaggaaatgtattatattgatcaactcaaaatttgaagtccagagggacttttcagaa

SEQ ID NO: 102161 - DNA, 80 bp, synthetic construct
  source 1..80: mol_type = other DNA
ttcacacaaatgatgaaaaaggaaggtgggaaggggaatcttgattttgagtaagtatttcatttcgaatctctcacaat

SEQ ID NO: 102162 - DNA, 80 bp, synthetic construct
  source 1..80: mol_type = other DNA
caacaatttgatctaaattaatttcacaaaagattggcatacaaaaggacaaccaatttaacagcaatagtatagatttg

SEQ ID NO: 102163 - DNA, 80 bp, synthetic construct
  source 1..80: mol_type = other DNA
aatttcacaaaagattggcatacaaaaggacaaccaatttaacagcaatagtatagatttgtagataggagcacactact

SEQ ID NO: 102164 - DNA, 80 bp, synthetic construct
  source 1..80: mol_type = other DNA
caaaaaaagattatgcagattatatatctaaatcagctaggaacattttccttgcaagcggattctacaaacaacccaac

SEQ ID NO: 102165 - DNA, 80 bp, synthetic construct
  source 1..80: mol_type = other DNA
ttggaaacagataatgaataaaaaacttgaaccaaagcaaataaataatgcccttgtgctgtgggaacagcaattcatgg

SEQ ID NO: 102166 - DNA, 80 bp, synthetic construct
  source 1..80: mol_type = other DNA
gatatagacacatctaagccaaaaatattagattttgatgatgcaaatatgtacttagcaagcttaactatgatggaaca

SEQ ID NO: 102167 - DNA, 80 bp, synthetic construct
  source 1..80: mol_type = other DNA
aagcaaaaggatattgtccaaagacagtgggttaaaaccagacaacttcatactgaacgaatttggatctaggataaaag

SEQ ID NO: 102168 - DNA, 80 bp, synthetic construct
  source 1..80: mol_type = other DNA
gaagaagacaatatattcaatccaggctgtctccacggcacatttaaatgtatgaatggttacatatctatatctagagc

SEQ ID NO: 102169 - DNA, 80 bp, synthetic construct
  source 1..80: mol_type = other DNA
aataagactagataaagagagatgccaacgtatagtgtcatcacctggcttgttcttaacaacatgcttgctattcaaac

SEQ ID NO: 102170 - DNA, 80 bp, synthetic construct
  source 1..80: mol_type = other DNA
atgataatcctactttggcaatgaatgatgttatgaatttctctatattcaccagcttatcaataacaaaaagcgtctta

SEQ ID NO: 102171 - DNA, 80 bp, synthetic construct
  source 1..80: mol_type = other DNA
tctttaacagaacccgcacgatacatgattatgaattccttagccatttctagtaatgttaaagattacatagcagagaa

SEQ ID NO: 102172 - DNA, 80 bp, synthetic construct
  source 1..80: mol_type = other DNA
aaagacagcatgttcagcttagagatatatacttatcagattatgatataactcagaaaggcattaaagacaaccgggag

SEQ ID NO: 102173 - DNA, 80 bp, synthetic construct
  source 1..80: mol_type = other DNA
ttgacaagtatatggtttcctgggagtgtaacattaaaagaatatttaacacagatatacctgccattttattttaatgc

SEQ ID NO: 102174 - DNA, 80 bp, synthetic construct
  source 1..80: mol_type = other DNA
atataaaagagatatggtcgacaaattgtactaaacagacagttaacctcaagatactacttcactccctgtgtaaaaat

SEQ ID NO: 102175 - DNA, 80 bp, synthetic construct
  source 1..80: mol_type = other DNA
ctacttgcagatacttccaggcataatcatcttcgcaatcgaatcgaaaataggaataactttaggaggtcaataacaac

SEQ ID NO: 102176 - DNA, 80 bp, synthetic construct
  source 1..80: mol_type = other DNA
tatctctacattcacgagctcaaagtcgtgccttaaaataggcgatttcaggaaagaaaaagaaatgcagtcggttaagc

SEQ ID NO: 102177 - DNA, 80 bp, synthetic construct
  source 1..80: mol_type = other DNA
aaaagaagattctagaaacagaaagccgcaagagaagattggcaaatcccatgtttgttgctgatgagcaagtatccctt

SEQ ID NO: 102178 - DNA, 80 bp, synthetic construct
  source 1..80: mol_type = other DNA
taggctatacgagctactagataaagaagttttaactgacaagcctgtcatagagcaaataatggacacaatggttaatc

SEQ ID NO: 102179 - DNA, 80 bp, synthetic construct
  source 1..80: mol_type = other DNA
acaaaaagttttacttcacattcttcaacaaagggcaaaagacatcaaaagatagggaaatatttgttggagaatatgaa

SEQ ID NO: 102180 - DNA, 80 bp, synthetic construct
  source 1..80: mol_type = other DNA
acagagagatagatgaagcaattgaagccttggctgcggagggatatgaagccaacttagagaagatagagaagctttcg

SEQ ID NO: 102181 - DNA, 80 bp, synthetic construct
  source 1..80: mol_type = other DNA
attagcaaagcaaagggtttgaaaatggaaatcaatgcagacatgtcgaaatggagtgcacaagatgtcttctataaata

SEQ ID NO: 102182 - DNA, 80 bp, synthetic construct
  source 1..80: mol_type = other DNA
aaaaagaattgatcctgccagatgaactactcttcaacctgttggatcaaaaagttgtatatcaaaatgatattatcaca

SEQ ID NO: 102183 - DNA, 80 bp, synthetic construct
  source 1..80: mol_type = other DNA
actatgaccaatcaacttaattctaacacagtaccaattaaaaggaattggctccagggaaactttaattatacatcgag

SEQ ID NO: 102184 - DNA, 80 bp, synthetic construct
  source 1..80: mol_type = other DNA
ctatgtccatagttgtgcaatgtctgtatataaagagatcttaaaagaggcagtgacattgctagatggatctgttctag

SEQ ID NO: 102185 - DNA, 80 bp, synthetic construct
  source 1..80: mol_type = other DNA
gataatcaaacatcaataacgataatacaagataagttggaaaatgataagatcatacattttgcaatgggtgaatttga

SEQ ID NO: 102186 - DNA, 80 bp, synthetic construct
  source 1..80: mol_type = other DNA
ggattagagtctggaaatctatattttttaatcaagctattaaataagtacactccagttatgcagaaaagggagtcagt

SEQ ID NO: 102187 - DNA, 80 bp, synthetic construct
  source 1..80: mol_type = other DNA
tggcggcatgctagagctgttcacctatttacttgagaaacctgaactcttggtcacaaagggtgaagatatgagagact

SEQ ID NO: 102188 - DNA, 80 bp, synthetic construct
  source 1..80: mol_type = other DNA
ttattgagcaaattttattctcccacaagcctgtaatagacttctcaggcataagggacaagtatataaatttgcatgat

SEQ ID NO: 102189 - DNA, 80 bp, synthetic construct
  source 1..80: mol_type = other DNA
ataggctattgatgagagatttgtctagtttagaattaaccaatgatgatatccaggtaatctattcatatataatattg

SEQ ID NO: 102190 - DNA, 80 bp, synthetic construct
  source 1..80: mol_type = other DNA
aatgatccgatgatgataaccatagcaaatacacatatattatctatatatggaagtccacagaagaggatgggtatgtc

SEQ ID NO: 102191 - DNA, 80 bp, synthetic construct
  source 1..80: mol_type = other DNA
ggaacttgaaattaattcatcattccccagcactagttttaagagcttatagcaagaacaaccctgatgttcagggtgct

SEQ ID NO: 102192 - DNA, 80 bp, synthetic construct
  source 1..80: mol_type = other DNA
gatccaactgaaatggctagggatctagttcaccttaaagaatttgttgagaacacaggattagaagaaaagatgaaaat

SEQ ID NO: 102193 - DNA, 80 bp, synthetic construct
  source 1..80: mol_type = other DNA
ctttgctatttagaactggtgacttgaagcagtcagacttagacaaatatgacgctatgaaaagccatgaaagagtgact

SEQ ID NO: 102194 - DNA, 80 bp, synthetic construct
  source 1..80: mol_type = other DNA
gcaggaagttgttgagttcacgccatggtttaaaatttgaaaatatgtccaggatccagacatatcctggcaattactat

SEQ ID NO: 102195 - DNA, 80 bp, synthetic construct
  source 1..80: mol_type = other DNA
attacctttagaaaaaaagatcgccaccaatttgtgtatcagatacattcccatgaatctatcacaagacgcaatgaaga

SEQ ID NO: 102196 - DNA, 80 bp, synthetic construct
  source 1..80: mol_type = other DNA
agagaatcttgataagatctttagattacttaaacaatgatgtcttttccttatctaggatcaaggtaggacttgaagag

SEQ ID NO: 102197 - DNA, 80 bp, synthetic construct
  source 1..80: mol_type = other DNA
tttgcaacaattaaaaaggcacactttagcaaaatggtttcatttgacggtcctccaattaaaactgggcttcttgattt

SEQ ID NO: 102198 - DNA, 80 bp, synthetic construct
  source 1..80: mol_type = other DNA
agttaaattgctaatagaaagagagacaaaagtgtttgaagaagctttcacattcagtagcaatggctttatatcgccag

SEQ ID NO: 102199 - DNA, 80 bp, synthetic construct
  source 1..80: mol_type = other DNA
agaatttaggatgcttagaagcaattgtatcgctaatcaaattactaaaaacaaatgagtggtctacagtcatcgataag

SEQ ID NO: 102200 - DNA, 80 bp, synthetic construct
  source 1..80: mol_type = other DNA
tgtatccacatttgcttaataaagaatggtatggatcacatgtatcattcctttgatgttccgaagtgctttatggaaaa

SEQ ID NO: 102201 - DNA, 80 bp, synthetic construct
  source 1..80: mol_type = other DNA
gaagcaatatagaatttgattagttgatcagaaggggcaagaaacttaaaaattggatcataaattggggagggttttta

SEQ ID NO: 102202 - DNA, 80 bp, synthetic construct
  source 1..80: mol_type = other DNA
tgatcagaaggggcaagaaacttaaaaattggatcataaattggggagggtttttatcaattggctagatatcaaaagag

SEQ ID NO: 102203 - DNA, 80 bp, synthetic construct
  source 1..80: mol_type = other DNA
gtttttacctaagggattgacttggaagtgtgatgtccgatttggtgttttatgatgtcgcatcaacaggtgcaaatgga

SEQ ID NO: 102204 - DNA, 80 bp, synthetic construct
  source 1..80: mol_type = other DNA
caaaagggttttcctaagggaacccacaaaaatagcagctaaatgggtgggtggtaggggacagcaaaaaactataaatc

SEQ ID NO: 102205 - DNA, 80 bp, synthetic construct
  source 1..80: mol_type = other DNA
tcacaataatatcgagaagattgaagtgcacgagttggaaaatctggagcaatataagaaggctataactcaaaagttac

SEQ ID NO: 102206 - DNA, 80 bp, synthetic construct
  source 1..80: mol_type = other DNA
agacaagtttaacattattcaagtattctaaaacaaaaaacctaccccatattaagccaatgtacaaatacataactatt

SEQ ID NO: 102207 - DNA, 80 bp, synthetic construct
  source 1..80: mol_type = other DNA
tgaaatcatggtgggacagataaatgatatcggcgtttattcgaaaggttgcggaaatgtgcaaaaggtaaataatacaa

SEQ ID NO: 102208 - DNA, 80 bp, synthetic construct
  source 1..80: mol_type = other DNA
actatgggaatggtgtacccaaatttgattatttatgccatttagcaagtaggaaagaagtaatagtcagaaaatgcttt

SEQ ID NO: 102209 - DNA, 80 bp, synthetic construct
  source 1..80: mol_type = other DNA
tgtgtaagtcgaaagggccagcatctatactatctgtaataactgcagtattgatactaacatttgtgaccccaataaat

SEQ ID NO: 102210 - DNA, 80 bp, synthetic construct
  source 1..80: mol_type = other DNA
acctgcgcagtgcataatgctgcgacttataggtagtacgctaccctttataacactactggcagtgcataatgctgcct

SEQ ID NO: 102211 - DNA, 80 bp, synthetic construct
  source 1..80: mol_type = other DNA
aggcggtagcagaagctgaagctgtgagagcagctttaccgccacttttgcctgaagtagagagagagaccattgaagca

SEQ ID NO: 102212 - DNA, 80 bp, synthetic construct
  source 1..80: mol_type = other DNA
gacatagatctgataatgcaagaagcaggtgcgggaagtgtcgagacgcccagacggcacataaaagtcacaacatatcc

SEQ ID NO: 102213 - DNA, 80 bp, synthetic construct
  source 1..80: mol_type = other DNA
tgccttgttggtgagctggttgacccaccctttcacgagtttgcatacgaaagtctgaaaacccgtccagcggcgcccca

SEQ ID NO: 102214 - DNA, 80 bp, synthetic construct
  source 1..80: mol_type = other DNA
ggagaccaggttactctacggacgaaggcaaggtgcactcctatctggaaggaacgaggttccaccaaactgccaaagac

SEQ ID NO: 102215 - DNA, 80 bp, synthetic construct
  source 1..80: mol_type = other DNA
ctgcgaccttctgcccggctaagctacgcagtttcccgaaaaagcatagctacttgcgtcctgagataagatcagctgtt

SEQ ID NO: 102216 - DNA, 80 bp, synthetic construct
  source 1..80: mol_type = other DNA
tgccatcatagccgaacatttccaattcggagacgcagtattggaaacagatatcgcttcgttcgacaaaagtgaggatg

SEQ ID NO: 102217 - DNA, 80 bp, synthetic construct
  source 1..80: mol_type = other DNA
ggcgggcgcgtgttcaaaccgctgcatgttgaaggcaagattgacaacgaacagttggccgccattaaattgaagaaagc

SEQ ID NO: 102218 - DNA, 80 bp, synthetic construct
  source 1..80: mol_type = other DNA
aatgtaacggcaggagaacccgtagagacctggaaacccatttcacacagtacaagctggctcgcccatacatagcagac

SEQ ID NO: 102219 - DNA, 80 bp, synthetic construct
  source 1..80: mol_type = other DNA
ggtttcctaccatggttactacatccttgcccagtgtcctcccggagacactgtgacagtggggtttcaagacggtgcca

SEQ ID NO: 102220 - DNA, 80 bp, synthetic construct
  source 1..80: mol_type = other DNA
tcaagcacatgtgcaccatcgcccataaagttgagttcaaacctgtaggaagagagaagtaccgccatcctcctgaacac

SEQ ID NO: 102221 - DNA, 80 bp, synthetic construct
  source 1..80: mol_type = other DNA
ctccatgtgccgttcgtcccggtcacgagcaagtgtaccgcgaccttggcccccgaaccactggtggaacacaagcatcg

SEQ ID NO: 102222 - DNA, 80 bp, synthetic construct
  source 1..80: mol_type = other DNA
atactgtgcaatatcacattaatcgtatgttatattatgtaataacaacaccgtatcatttaaacatatattattttaaa

SEQ ID NO: 102223 - DNA, 80 bp, synthetic construct
  source 1..80: mol_type = other DNA
accctatatatattttataccaattatatctagcgtatatcatattatgtaataacaacactatatcacttttatgaaac

SEQ ID NO: 102224 - DNA, 80 bp, synthetic construct
  source 1..80: mol_type = other DNA
tcactatgggtttccaatatatattcttttaaaaccctacatatattttatatttttgtatattttcttttgttttattt

SEQ ID NO: 102225 - DNA, 80 bp, synthetic construct
  source 1..80: mol_type = other DNA
aatatatattcttttaaaaccctacatatattttatatttttgtatattttcttttgttttattttgtttttaagatttc

SEQ ID NO: 102226 - DNA, 80 bp, synthetic construct
  source 1..80: mol_type = other DNA
ccccgtccttgactttcaagcattgagtgagagtgcaacaatcgtttttaacgaaagggagtttgtaaacagatatctgc

SEQ ID NO: 102227 - DNA, 80 bp, synthetic construct
  source 1..80: mol_type = other DNA
accacattgcaaccaacggaggtgcgctaaacaccgacgaagagtattacaagactgtaaagactctggacacagacgca

SEQ ID NO: 102228 - DNA, 80 bp, synthetic construct
  source 1..80: mol_type = other DNA
atgctgaaacagttctagaaataccaccatcaccggcaacgacaacagttgttgagccgaccgtgccagaacgtattcct

SEQ ID NO: 102229 - DNA, 80 bp, synthetic construct
  source 1..80: mol_type = other DNA
agtccggtgacttctagagcaccaagtgtgggatcactgttatcccttggtggcgtctcgtccagttctgccgagtcgtc

SEQ ID NO: 102230 - DNA, 80 bp, synthetic construct
  source 1..80: mol_type = other DNA
gagcatctccagcgccccaggcttagacgtccaactgtcgtcggacgataccgaatcacactggagcgtaccgagtgcat

SEQ ID NO: 102231 - DNA, 80 bp, synthetic construct
  source 1..80: mol_type = other DNA
caggttttgaagtaaaaattccgtccgtacgggacataaccatcgactgtgcaaggccccgaggattggccgaaataatg

SEQ ID NO: 102232 - DNA, 80 bp, synthetic construct
  source 1..80: mol_type = other DNA
caagacttcaatacggctccattccagttcctttcggaccacagacctgtacctgcaccacggagacgccccattccatc

SEQ ID NO: 102233 - DNA, 80 bp, synthetic construct
  source 1..80: mol_type = other DNA
tcctccaggtgatagtgtaaccgttagcatcacaggcgtagcatcgtgcaccgtagagaaaaagatcaggaggaagttta

SEQ ID NO: 102234 - DNA, 80 bp, synthetic construct
  source 1..80: mol_type = other DNA
actctaacccacctgtggattaacaaccaaccgcttctttgggcacagttgtgcatcccattggcagcgcttattatctt

SEQ ID NO: 102235 - DNA, 80 bp, synthetic construct
  source 1..80: mol_type = other DNA
cgaaagcatcaaactccgggctccagctaattaacattacccagcactcaattaaagtagttaacaccccaggaccaaag

SEQ ID NO: 102236 - DNA, 80 bp, synthetic construct
  source 1..80: mol_type = other DNA
gtcaacccatccaacagcacaacaggtgctagcacagccttcaacccagtgcacaatgcaaccaccgatggtcaaaagca

SEQ ID NO: 102237 - DNA, 80 bp, synthetic construct
  source 1..80: mol_type = other DNA
ttgctttcagaagggggtgatggaggctgcatctcaagaactcaactgataaaaacagaaactgcggaggtgcacggaga

SEQ ID NO: 102238 - DNA, 80 bp, synthetic construct
  source 1..80: mol_type = other DNA
cgattacggtggacctggcgagaaaattaccatctgcaatggttcaaccatcgttgatcagaggttaggtagtgaactgg

SEQ ID NO: 102239 - DNA, 80 bp, synthetic construct
  source 1..80: mol_type = other DNA
gtctactagcacaacaactatggctcggccaagcacagtgactcagatcactacagcacaagccatggaggtggatggct

SEQ ID NO: 102240 - DNA, 80 bp, synthetic construct
  source 1..80: mol_type = other DNA
ctggtgagtccaccacactccccgctgtgacccctactccagctgaaacaactacacatgccaatcagaagtcagcttca

SEQ ID NO: 102241 - DNA, 80 bp, synthetic construct
  source 1..80: mol_type = other DNA
gaacttgggcgttgaagatgcttctgagtcaagaacactcaccatctccgtcatggatctatcacagatgtattcccctg

SEQ ID NO: 102242 - DNA, 80 bp, synthetic construct
  source 1..80: mol_type = other DNA
accatgggtacactcaccacgagtctggaggacactgcgctgatgactctgaccggcagaagtatcctaacatcacaatc

SEQ ID NO: 102243 - DNA, 80 bp, synthetic construct
  source 1..80: mol_type = other DNA
ccaaacaggttcatttgacagaaccagtaagccccaaacaccacgaagcacaaaccaacccctgagaaagctcctctccg

SEQ ID NO: 102244 - DNA, 80 bp, synthetic construct
  source 1..80: mol_type = other DNA
acacacattggataatggagttggtggagcctcaccatccatataaaacaacagctctaccaatcccccatccccaaacc

SEQ ID NO: 102245 - DNA, 80 bp, synthetic construct
  source 1..80: mol_type = other DNA
ctgtaaatcttgcttcaactgtcacaaaggtacacggtaaacagacagccaatgtgcaacgctgccaaatagcatcatct

SEQ ID NO: 102246 - DNA, 80 bp, synthetic construct
  source 1..80: mol_type = other DNA
ccctctgacacactaacttaacaaaataccgcactgcacgatgctgcctcagcttccacttactcgtagataacttcaac

SEQ ID NO: 102247 - DNA, 80 bp, synthetic construct
  source 1..80: mol_type = other DNA
taccgcactgcacgatgctgcctcagcttccacttactcgtagataacttcaactgcgtgccgccactatatctttgaga

SEQ ID NO: 102248 - DNA, 80 bp, synthetic construct
  source 1..80: mol_type = other DNA
cagtaagcaccgaagcagcaccccaaacctcaccaacagcagtcacagcggaccagacagaagcctccaccagcccacaa

SEQ ID NO: 102249 - DNA, 80 bp, synthetic construct
  source 1..80: mol_type = other DNA
gtcaccactgacacctccccatccactccaacccaggtcacgtcctcagctggcagcagttcgagtaacacatcaaacca

SEQ ID NO: 102250 - DNA, 80 bp, synthetic construct
  source 1..80: mol_type = other DNA
ctccaagacaacaccccagctaacatcctcaggctcagaggctcaacaaacccagcccaccaccatgccaaacaccacag

SEQ ID NO: 102251 - DNA, 80 bp, synthetic construct
  source 1..80: mol_type = other DNA
ccctggtcaccccaaccgcacacatcagcccgacaaatagatccaaaaggaactctgaagtggaaataatcctcacactc

SEQ ID NO: 102252 - DNA, 80 bp, synthetic construct
  source 1..80: mol_type = other DNA
caagactgagattgctgacacagagattgctgacacagaagaatataaagggactttccactgagggactttccagaagg

SEQ ID NO: 102253 - DNA, 80 bp, synthetic construct
  source 1..80: mol_type = other DNA
cagaagaatataaagggactttccactgagggactttccagaaggcgggccagagggcggaactggggagtggctcacct

SEQ ID NO: 102254 - DNA, 80 bp, synthetic construct
  source 1..80: mol_type = other DNA
gtggaccagtgagccgcgaacatgtggaatggtgcagagaatttgttaagggtaagtacataatggctttcaacccaccc

SEQ ID NO: 102255 - DNA, 80 bp, synthetic construct
  source 1..80: mol_type = other DNA
gagaatttgttaagggtaagtacataatggctttcaacccaccctggggggacatcaacaagtcaggccgttcggggata

SEQ ID NO: 102256 - DNA, 80 bp, synthetic construct
  source 1..80: mol_type = other DNA
gcgggtgcactgacagaagatccgaatgagggaacagcaggagtagagtctgcagtactgagaggatttctaattctagg

SEQ ID NO: 102257 - DNA, 80 bp, synthetic construct
  source 1..80: mol_type = other DNA
gaaatagtttatttagataacactatcatagaaaaggagccttgttccaaaatggtagaatacagaaattggtcgaaacc

SEQ ID NO: 102258 - DNA, 80 bp, synthetic construct
  source 1..80: mol_type = other DNA
attgttcatcaaggagggaaaaattgttcacactagtccattatcagggagtgctcagcacatagaggaatgttcctgct

SEQ ID NO: 102259 - DNA, 80 bp, synthetic construct
  source 1..80: mol_type = other DNA
ttcaactgtcaaaatggaaaggatagtaatcgcctttgcaataatcagcattgttacaggtgaccaaatctgcattggtt

SEQ ID NO: 102260 - DNA, 80 bp, synthetic construct
  source 1..80: mol_type = other DNA
ccggactcaggaatgtaccccaaagaaaaacaagaggattgtttggagcaatagccggattcatagaaggaggatggcaa

SEQ ID NO: 102261 - DNA, 80 bp, synthetic construct
  source 1..80: mol_type = other DNA
agattgaaggaatcaaattggaatcaacggggacttatcagatactttcaatttattctacagtagtgagttccctaaca

SEQ ID NO: 102262 - DNA, 80 bp, synthetic construct
  source 1..80: mol_type = other DNA
ctatctttttggatgtgttccaatgggtcattgcagtgcagaatttgcatctaaaactgtgagttctaattataattaaa

SEQ ID NO: 102263 - DNA, 80 bp, synthetic construct
  source 1..80: mol_type = other DNA
aaaccacttaaagagaattcaaatatttcctagaaactcttggcccaaccacaatgcctcatcaggagtgagctcagcgt

SEQ ID NO: 102264 - DNA, 80 bp, synthetic construct
  source 1..80: mol_type = other DNA
aaaccacatggagagagtccaaatattttctagaaactcttggtccaatcacaatgcctcatcaggagtgagctcggcat

SEQ ID NO: 102265 - DNA, 80 bp, synthetic construct
  source 1..80: mol_type = other DNA
gacaatcccaacaattgccaccagaccccaagtgaatgggcaaagaggaagaatggaatttttttggacaatattaaagt

SEQ ID NO: 102266 - DNA, 80 bp, synthetic construct
  source 1..80: mol_type = other DNA
atgcatacaagattgttaaaaggggaaaatcagcaattattaaaagtgaactggattacggtaattgtaatgcaaaatgt

SEQ ID NO: 102267 - DNA, 80 bp, synthetic construct
  source 1..80: mol_type = other DNA
tcaagcaaaatgagtgcagcgtccctattaataaccaagtagtaccatgtgaaccagttatggtagagagaagtattgaa

SEQ ID NO: 102268 - DNA, 80 bp, synthetic construct
  source 1..80: mol_type = other DNA
aaatcactttgagagagttcagatatttcctagaaactcttggtccaaccataatgcttcatcaggagtgagctcagcat

SEQ ID NO: 102269 - DNA, 80 bp, synthetic construct
  source 1..80: mol_type = other DNA
cagggttaagaaatgtcccccaaaaagaaacaagaggcttatttggagcaatagccggattcatagaaggaggatggcaa

SEQ ID NO: 102270 - DNA, 80 bp, synthetic construct
  source 1..80: mol_type = other DNA
gacagagaatccacacagaaagcaattaatggaatcactaataaagtcaactcaatcattagcaagatgaacactcaatt

SEQ ID NO: 102271 - DNA, 80 bp, synthetic construct
  source 1..80: mol_type = other DNA
aagacaacccatctaatgacttatgctacccagggaactttgacaattatgaggaattgaaacatttaatgagcagtacc

SEQ ID NO: 102272 - DNA, 80 bp, synthetic construct
  source 1..80: mol_type = other DNA
gtcaattccaacaatagtcaccagaccccaggtgaatggacagagaggacgaatggaatttttttggacagtgttgaagt

SEQ ID NO: 102273 - DNA, 80 bp, synthetic construct
  source 1..80: mol_type = other DNA
agctcccgaatacgcatacaaaattgttaagagggggaaatcaacagtcatgaagagtgaattgaattatggtaattgta

SEQ ID NO: 102274 - DNA, 80 bp, synthetic construct
  source 1..80: mol_type = other DNA
ggctgggcaatcgctaattccaaatcacaggtcaataggcaggctgtagttgacaatgacaactggtctggttattctgg

SEQ ID NO: 102275 - DNA, 80 bp, synthetic construct
  source 1..80: mol_type = other DNA
acatatggaacaggctcatggcctgatggagcgaacatcaatgtcatgcctatataagctttcgcaattttggaaaaaac

SEQ ID NO: 102276 - DNA, 80 bp, synthetic construct
  source 1..80: mol_type = other DNA
caatcgtgctaaagaggaatattgagtacaggaattggtcaaaaccccaatgtcaagtaacaggatttgctcccttttcc

SEQ ID NO: 102277 - DNA, 80 bp, synthetic construct
  source 1..80: mol_type = other DNA
ggagtatttggataacaagagaaccttatgtgtcatgtgacaccagtaagtgttaccaatttgcgcttgggcaaggaact

SEQ ID NO: 102278 - DNA, 80 bp, synthetic construct
  source 1..80: mol_type = other DNA
tgcatgtctgtgtcaccggggatgatagaaatgcgactgctagtttcatttatgatgggatactcactgatagcatcagt

SEQ ID NO: 102279 - DNA, 80 bp, synthetic construct
  source 1..80: mol_type = other DNA
ccagaatattattcattgaggaggggaaagtcattcacatcagcccattggcaggaagtgctcagcatatagaggaatgt

SEQ ID NO: 102280 - DNA, 80 bp, synthetic construct
  source 1..80: mol_type = other DNA
tgtgtttgtagagataattggaaaggctctaatagaccagtgatagatataaatatggcagattatagcattgattccag

SEQ ID NO: 102281 - DNA, 80 bp, synthetic construct
  source 1..80: mol_type = other DNA
agaggaaatccaggagtaaaaggatgggcttttgacgatggagatgatgtttggatgggaaggacaatcagcaaggactc

SEQ ID NO: 102282 - DNA, 80 bp, synthetic construct
  source 1..80: mol_type = other DNA
aagaaaacccatccaatagtctatgctaccctggaagttttgacaattatgaagaactgaagcatttaataagcagcata

SEQ ID NO: 102283 - DNA, 80 bp, synthetic construct
  source 1..80: mol_type = other DNA
aatgacgcggaaacacaggtaaaactctaccagaacccggccacttatgtgtcagtgggaacatcaacattaaaccagag

SEQ ID NO: 102284 - DNA, 80 bp, synthetic construct
  source 1..80: mol_type = other DNA
atgaatccaaaccagaaaatactaacaataggctccatttctctaaccattgctttagcatgtttcctcgtgcaaattgc

SEQ ID NO: 102285 - DNA, 80 bp, synthetic construct
  source 1..80: mol_type = other DNA
aatcttaacgaccaccacaatgctgcatttcaagcaaagtgagtgcaacatccctgccaacaaccaagtggttccatgtg

SEQ ID NO: 102286 - DNA, 80 bp, synthetic construct
  source 1..80: mol_type = other DNA
agcaaaagcaggggtctcagatatcaaaatggaaagaatagtgattgcctttgcaataatcagcattgtcacaggtgacc

SEQ ID NO: 102287 - DNA, 80 bp, synthetic construct
  source 1..80: mol_type = other DNA
agggctaagaaacgtaccccaaagaaaaagaaaaagaaaaacaagaggcctatttggagcaatagccggattcatagaag

SEQ ID NO: 102288 - DNA, 80 bp, synthetic construct
  source 1..80: mol_type = other DNA
acgaaagaactctggatctccatgattcaaatgtcaagaaattatacgatagggtccgactccagctgagagacaatgca

SEQ ID NO: 102289 - DNA, 80 bp, synthetic construct
  source 1..80: mol_type = other DNA
aaagaattaggcaatgggtgctttgaattctaccacaagtgtgacaatgaatgcatggaaagtgtgagaaatggaacgta

SEQ ID NO: 102290 - DNA, 80 bp, synthetic construct
  source 1..80: mol_type = other DNA
gctcaggacatactggaaaaagaacacaatggaagactctgcagtcttaaaggagtgaagcccctcattctgaaggattg

SEQ ID NO: 102291 - DNA, 80 bp, synthetic construct
  source 1..80: mol_type = other DNA
cagtgtagctggatggcttcttggaaatccaatgtgtgatgaattcctgaatgtaccggaatggtcatacattgtggaaa

SEQ ID NO: 102292 - DNA, 80 bp, synthetic construct
  source 1..80: mol_type = other DNA
aagacaatccagccaatggcctgtgctatccgggaaacttcaacgattatgaagaactgaagcatttaatgagcagcaca

SEQ ID NO: 102293 - DNA, 80 bp, synthetic construct
  source 1..80: mol_type = other DNA
tcaggagtgagctctgcatgcccatacaatggtaggtcttcctttttcaggaatgtagtgtggctgatcaagaagaatga

SEQ ID NO: 102294 - DNA, 80 bp, synthetic construct
  source 1..80: mol_type = other DNA
tgtgtaccgaacaataaagaggacctaccataacactaatgtagaagaccttttaatattatggggaattcatcacccta

SEQ ID NO: 102295 - DNA, 80 bp, synthetic construct
  source 1..80: mol_type = other DNA
atgatgcagctgaacagataaaactctaccagaacccgaacacttacgtgtcagtgggaacatcaacattgaatcaaagg

SEQ ID NO: 102296 - DNA, 80 bp, synthetic construct
  source 1..80: mol_type = other DNA
tcaatcccagaaatagccaccagacccaaggtgaacggacagagtggaaggatggaatttttttggacaatactaaggcc

SEQ ID NO: 102297 - DNA, 80 bp, synthetic construct
  source 1..80: mol_type = other DNA
gaacgactcaatcaactttgagagtactgggaactttatagctcctgaatatgcatacaagcttattaaaaaaggagact

SEQ ID NO: 102298 - DNA, 80 bp, synthetic construct
  source 1..80: mol_type = other DNA
aaatctgcattggttatcatgcaaacaattcaacaaaacaggttgacacaatcatggagaagaacgtgacggtcacacat

SEQ ID NO: 102299 - DNA, 80 bp, synthetic construct
  source 1..80: mol_type = other DNA
cagcaatcatgaaaagtgaactgaattatggtaactgtgataccaaatgtcagaccccagtgggtgctataaattccagt

SEQ ID NO: 102300 - DNA, 80 bp, synthetic construct
  source 1..80: mol_type = other DNA
atgccttttcacaatgtccatccttttactattggggagtgccccaagtatgtcaaatcgaaaaaactagttcttgcaac

SEQ ID NO: 102301 - DNA, 80 bp, synthetic construct
  source 1..80: mol_type = other DNA
cagtaacagcagcagcagtttggatgacagaagactagacttaacaaactgctctttcgatataaccacaggagtaaaag

SEQ ID NO: 102302 - DNA, 80 bp, synthetic construct
  source 1..80: mol_type = other DNA
acagcagcagcagtttggatgacagaagattagacttaacaaactgctctttcaagataaccacaggagtaaaagataag

SEQ ID NO: 102303 - DNA, 80 bp, synthetic construct
  source 1..80: mol_type = other DNA
cataggatagaatatgcgactttttataaaagtgatgtgatacccattgagggtaaaaataatcatatgctagtaaattg

SEQ ID NO: 102304 - DNA, 80 bp, synthetic construct
  source 1..80: mol_type = other DNA
ataagcataggaaagaatatgcgactttttataaaagtgatgtgatacccattgagggtaaaaataagaccagttatatg

SEQ ID NO: 102305 - DNA, 80 bp, synthetic construct
  source 1..80: mol_type = other DNA
gggtattcaggaactacaacagatagttctactcgtagaggagattttttctactgcaattcctcagcaatatttaatac

SEQ ID NO: 102306 - DNA, 80 bp, synthetic construct
  source 1..80: mol_type = other DNA
gatgacagaagactagacttaacaaactgctctttcaaggtaaccacaggagtaacagataagcataggcgagaatatgc

SEQ ID NO: 102307 - DNA, 80 bp, synthetic construct
  source 1..80: mol_type = other DNA
gactttttataaaagtgatgtgatacccattgggggtgataatgatagtaccagttatatgctatcaaattgtactatct

SEQ ID NO: 102308 - DNA, 80 bp, synthetic construct
  source 1..80: mol_type = other DNA
gcagcagtttggatgacagaagattagacttaacaaactgctctttcaagataaccacaggagtaagaaataaatataag

SEQ ID NO: 102309 - DNA, 80 bp, synthetic construct
  source 1..80: mol_type = other DNA
gacgagcatattgtaatgtcactgtagcaaactggactgacacgttaaagaaggtagctgtagcattaaagaagcacttt

SEQ ID NO: 102310 - DNA, 80 bp, synthetic construct
  source 1..80: mol_type = other DNA
taacaaactgctctttcaacataaccacaggagtaaaagataagcgtaggacagaatatgcgactttttataaaagtgat

SEQ ID NO: 102311 - DNA, 80 bp, synthetic construct
  source 1..80: mol_type = other DNA
agtaacagggaatataagacgagcatattgtaatgtcactagagcaaactggactgacacgctaagaaaggtagctataa

SEQ ID NO: 102312 - DNA, 80 bp, synthetic construct
  source 1..80: mol_type = other DNA
cacatgcactgaaatagtagtggcaatgctactatttgctatccatactgtccaaaaaagtaccttgtttctacctgtct

SEQ ID NO: 102313 - DNA, 80 bp, synthetic construct
  source 1..80: mol_type = other DNA
acaattggaatggctaacttaatattacaaattggaaacataatctcaatatgggttagccactcaattcaaattggaaa

SEQ ID NO: 102314 - DNA, 80 bp, synthetic construct
  source 1..80: mol_type = other DNA
ggttgaactaataagaggacgacccgaagagaacacaatctggactagcgggagcagcatatccttttgtggtgtagaca

SEQ ID NO: 102315 - DNA, 80 bp, synthetic construct
  source 1..80: mol_type = other DNA
gttatgggttttgcacttgcaatcatcctaaaggaattgtacatgttatcaactaggggaaggcagacaatcaaagagaa

SEQ ID NO: 102316 - DNA, 80 bp, synthetic construct
  source 1..80: mol_type = other DNA
ctgagattgatgatttaattgaccttgcagaatcaggggatccaacaccaccagactcaatcaagtcaccacaggcgcca

SEQ ID NO: 102317 - DNA, 80 bp, synthetic construct
  source 1..80: mol_type = other DNA
aggtcttgcggcatgtacggtcttactggccctgacatttacaaaggggtttatcaattcaagtcagtagagtttgacat

SEQ ID NO: 102318 - DNA, 80 bp, synthetic construct
  source 1..80: mol_type = other DNA
agctcaaacccacttgaggtggacctgctgccccgggcactggtctgggtgaattaaccacaggcttctcatttgttaag

SEQ ID NO: 102319 - DNA, 80 bp, synthetic construct
  source 1..80: mol_type = other DNA
tcgattgttgtgttctcccatgcccttccaacaaccgatgtcctgcaagctatgtatggccatccttcaccagaaagaca

SEQ ID NO: 102320 - DNA, 80 bp, synthetic construct
  source 1..80: mol_type = other DNA
actgttactcggcttgatcaagatagactccaacatattgcctccatccaacaaggctgcccctgctttcacagcagcac

SEQ ID NO: 102321 - DNA, 80 bp, synthetic construct
  source 1..80: mol_type = other DNA
tttgtagctctctccttaatgcctgcgtccactgaaagcttttgacttccttggacaaagacatcctgtcactcagtgat

SEQ ID NO: 102322 - DNA, 80 bp, synthetic construct
  source 1..80: mol_type = other DNA
atagtatcatcagtcacaatcattgcaatttgacctctgctttcaataagaagacctttgatcacacactcatgagcatt

SEQ ID NO: 102323 - DNA, 80 bp, synthetic construct
  source 1..80: mol_type = other DNA
gtttcgagcctacaccttagtatcagagggaattccaactacaaagcagtctcatgtgatttcaacaatggcatcaccat

SEQ ID NO: 102324 - DNA, 80 bp, synthetic construct
  source 1..80: mol_type = other DNA
gggaaaacaacttggtgtagtcaaacaagttaccaatacttaattattcaaaacagaacctgggaaaatcactgtgaata

SEQ ID NO: 102325 - DNA, 80 bp, synthetic construct
  source 1..80: mol_type = other DNA
ttctggagtagacaacccaggcggctactgtttaactagatggatgatcattgccgcagatctcaagtgctttgggaaca

SEQ ID NO: 102326 - DNA, 80 bp, synthetic construct
  source 1..80: mol_type = other DNA
taatcacgagcatcaaggcagtctacaatttcgccacctgcggggtgctcacattaatcagttttcttcttttggctggt

SEQ ID NO: 102327 - DNA, 80 bp, synthetic construct
  source 1..80: mol_type = other DNA
cttctgctgccgctgttgctaacagcaacgacgacaccacaaaatcttcaagtgacaaaatgttttctaacatggctgtc

SEQ ID NO: 102328 - DNA, 80 bp, synthetic construct
  source 1..80: mol_type = other DNA
ctccgtacagaccaacaatgagttgtctggcgccctgcatcacctcaagtgcgccagaatcaggtactatgttaagtgtg

SEQ ID NO: 102329 - DNA, 80 bp, synthetic construct
  source 1..80: mol_type = other DNA
cactgtcgggggacagatgggcatgcttctgacaggttccaacgccaaaagcatggatttaggcaccacaccaggcgact

SEQ ID NO: 102330 - DNA, 80 bp, synthetic construct
  source 1..80: mol_type = other DNA
gtgacttcacaatatcaatcaacgagggtcttccctcgggagtgccctgcacctcccagtggaattccatcgcccactgg

SEQ ID NO: 102331 - DNA, 80 bp, synthetic construct
  source 1..80: mol_type = other DNA
ggggaacgcgttcaccgccgggaaaatcatatttgcagcagtcccaccaaatttcccaactgagggtttaaatcccagcc

SEQ ID NO: 102332 - DNA, 80 bp, synthetic construct
  source 1..80: mol_type = other DNA
gttacacggagagacattcccctacacagccttcgacaacaactgctacgccttttgttgctgggtcctggacctaaacg

SEQ ID NO: 102333 - DNA, 80 bp, synthetic construct
  source 1..80: mol_type = other DNA
tttgcactttcaggggggatgtcgcccacatcccgggttctcgcaattacacaatgaatctggcctctctaaattggagc

SEQ ID NO: 102334 - DNA, 80 bp, synthetic construct
  source 1..80: mol_type = other DNA
gcagtgttcaacttgctactgacacagaaaatgattttgaagcccgccaaaatgcaaaattcactccaatcggtgtcatc

SEQ ID NO: 102335 - DNA, 80 bp, synthetic construct
  source 1..80: mol_type = other DNA
caggatggcaacaccacccaccggaatgaaccccaacaatgggtgctcccaagttactcaggtagaaatgcccacaatgt

SEQ ID NO: 102336 - DNA, 80 bp, synthetic construct
  source 1..80: mol_type = other DNA
acctcacagtgtctcacactggtcaacatgatttggttatccctcccaatggctactttaggtttgattcctgggtcaac

SEQ ID NO: 102337 - DNA, 80 bp, synthetic construct
  source 1..80: mol_type = other DNA
gagccgtctttgcaggaatggcatctgatgtcctcggctccggacttagttccctaatcaatgctggggctggggctatc

SEQ ID NO: 102338 - DNA, 80 bp, synthetic construct
  source 1..80: mol_type = other DNA
aaccagaagattgactttgagaacaataaacaattgcagcaagcctcctttcagtttagcaataatctacaacaaacttc

SEQ ID NO: 102339 - DNA, 80 bp, synthetic construct
  source 1..80: mol_type = other DNA
caactcaggccgcttctccactccccagccttcgggggcactgccaggaagaatcaatcccagaactcccacccccgctc

SEQ ID NO: 102340 - DNA, 80 bp, synthetic construct
  source 1..80: mol_type = other DNA
caactcaggccgcttctccactccccagccttcggtggcactgccaggaagaatcaatcccagaactcccacccccgctc

SEQ ID NO: 102341 - DNA, 80 bp, synthetic construct
  source 1..80: mol_type = other DNA
ggggttcccctagcacatcttctaatgcttctactgtgacttctgtgtattcaaatcaaactgcttcaacgagacttggt

SEQ ID NO: 102342 - DNA, 80 bp, synthetic construct
  source 1..80: mol_type = other DNA
agtacaaaagggaaattcataccccaaagtcaacaagtcttacattaacaataaggaaaaggaagttctcgtgctatggg

SEQ ID NO: 102343 - DNA, 80 bp, synthetic construct
  source 1..80: mol_type = other DNA
gggaggttaagacctcaagccaggagttatacagggcattaaaagccatcattgctgctgatggcttgaacaacatcacc

SEQ ID NO: 102344 - DNA, 80 bp, synthetic construct
  source 1..80: mol_type = other DNA
ctactaagaaggcctcatagatcagtacgtgtagaagcaatatgtagaaataagtagacataagcaaacctaattatgta

SEQ ID NO: 102345 - DNA, 80 bp, synthetic construct
  source 1..80: mol_type = other DNA
agcttagttgtaatttggggtggtggggtgaggcagcagcagtctcaagtgcttgtgaatattctagttggcgtgattgt

SEQ ID NO: 102346 - DNA, 80 bp, synthetic construct
  source 1..80: mol_type = other DNA
atggagtcaaaactactcatactatcctgcatgttcgctgtgctaaaagccgacactatctgtataggctaccatgcaaa

SEQ ID NO: 102347 - DNA, 80 bp, synthetic construct
  source 1..80: mol_type = other DNA
gtacacaaaatgcaatcgatggaataaccaacaaagtgaactcaataattgagaaaatgaacactcagttcactgcagta

SEQ ID NO: 102348 - DNA, 80 bp, synthetic construct
  source 1..80: mol_type = other DNA
aatcctactttgtctaatgctaatttgaatactactactcgaggcaacagtacccatgacataggaaatttagcagatga

SEQ ID NO: 102349 - DNA, 80 bp, synthetic construct
  source 1..80: mol_type = other DNA
atggaagcaagattattagtattattctgtgcattcactacactaaatgcagacaccatttgtgtgggctatcatgccaa

SEQ ID NO: 102350 - DNA, 80 bp, synthetic construct
  source 1..80: mol_type = other DNA
cactcaaagtgcaattgatgggataagcaacaaagtgaacgcagtgattgaaaaaatgaacattcaatttacttcggtgg

SEQ ID NO: 102351 - DNA, 80 bp, synthetic construct
  source 1..80: mol_type = other DNA
cttatgaaaacaacacttgggtcaaccagacttatattaacgtcagcagtattaattttgttaataaacaggtagtagct

SEQ ID NO: 102352 - DNA, 80 bp, synthetic construct
  source 1..80: mol_type = other DNA
tcaatgaaattaatgggcaattcctctctctgtcctgttagtggatgggctatatacagtaaagataatagtgtgcgaat

SEQ ID NO: 102353 - DNA, 80 bp, synthetic construct
  source 1..80: mol_type = other DNA
ctgggaaggaccctaagaaaacagggggacccatatatataacactacacggaaagcggatgagacaactcctcctttat

SEQ ID NO: 102354 - DNA, 80 bp, synthetic construct
  source 1..80: mol_type = other DNA
cactgcagagctactgaatacataatgaagggagcgtacataaactccgccttactcaatgcatcttgtgcagccatgga

SEQ ID NO: 102355 - DNA, 80 bp, synthetic construct
  source 1..80: mol_type = other DNA
tgtgcctactaaagggaatagctcccatacaactgggtaattgcagcgttgctggatggatattaggaaacccagaatgc

SEQ ID NO: 102356 - DNA, 80 bp, synthetic construct
  source 1..80: mol_type = other DNA
tcctataaaaacaacaaggagaaagaagtccttataatatggggtgttcaccatccgccagacatagagaaccaaaggac

SEQ ID NO: 102357 - DNA, 80 bp, synthetic construct
  source 1..80: mol_type = other DNA
actgttgcttcaagtccgtcttcacactacctaactgacatgactattgaagaaatgtcaagggactggctcatgctcat

SEQ ID NO: 102358 - DNA, 80 bp, synthetic construct
  source 1..80: mol_type = other DNA
atgttttgtctgtgtttgagtcttctcggtctactactatattggccagcagatgcaagaaatcttttagagttaaaagt

SEQ ID NO: 102359 - DNA, 80 bp, synthetic construct
  source 1..80: mol_type = other DNA
ggatgggccactatctctttgcttattacattctgctttggttggttagtcattccactcttatccatgatcattattcg

SEQ ID NO: 102360 - DNA, 80 bp, synthetic construct
  source 1..80: mol_type = other DNA
gggtggggttgcaatcctcctgactgcccaggagtggggacaggttgtacagcctgtggtgtatatctagacaagttacg

SEQ ID NO: 102361 - DNA, 80 bp, synthetic construct
  source 1..80: mol_type = other DNA
atcttgatcgggttactggttataatcaaattgatactaataaggtctttgatgatggagctccacagtgcggtgttcat

SEQ ID NO: 102362 - DNA, 80 bp, synthetic construct
  source 1..80: mol_type = other DNA
ttattgcactgttcatattctctttactattatttagcttatgttgcccacgaagacaaaactataaaaagaataagtga

SEQ ID NO: 102363 - DNA, 80 bp, synthetic construct
  source 1..80: mol_type = other DNA
ttcattatcatgaagaccgttattgccttaagctgcattttctgtctggctttaggtcaggacctttcagggagtgacaa

SEQ ID NO: 102364 - DNA, 80 bp, synthetic construct
  source 1..80: mol_type = other DNA
ctgccagagaggcaacattaggtgcaacatttgcatttgagcgtactaataattaaaaacacccttttttatggcaggga

SEQ ID NO: 102365 - DNA, 80 bp, synthetic construct
  source 1..80: mol_type = other DNA
aatccaaatcaaaaaataataaccattgggtccatatcattgggattggttgtattcaatgtcctactgcatgtagtgag

SEQ ID NO: 102366 - DNA, 80 bp, synthetic construct
  source 1..80: mol_type = other DNA
atatcgtccaaaataagaatgaggagagggcatttctaaatttaactaagcctctatgtgctgtaaactcatggcacatc

SEQ ID NO: 102367 - DNA, 80 bp, synthetic construct
  source 1..80: mol_type = other DNA
cttaggtttgaatatcggactccattacaaggtttgtgatatcaacaacaatactcagaacaatttcacaaacatcacca

SEQ ID NO: 102368 - DNA, 80 bp, synthetic construct
  source 1..80: mol_type = other DNA
cacaccttaacatcagctatacaaactttcttactgagcaagctgcggtttcagtggcgttagcaggtaattcatctctt

SEQ ID NO: 102369 - DNA, 80 bp, synthetic construct
  source 1..80: mol_type = other DNA
actcaaatgtcaaaaacctttatgacaaggttcgactgcagcttagggataatgcgaaagaattgggtaatggttgtttt

SEQ ID NO: 102370 - DNA, 80 bp, synthetic construct
  source 1..80: mol_type = other DNA
aagacagtccagtccatggcctctgctatccaggggatttcaacgactatgaagagttgaagcacctgttgagcagcaca

SEQ ID NO: 102371 - DNA, 80 bp, synthetic construct
  source 1..80: mol_type = other DNA
cggcgggagtgagttctgcatgcccatataatggaaggtcttcttttttcaggagtgtagtatggcttatcaagaagaac

SEQ ID NO: 102372 - DNA, 80 bp, synthetic construct
  source 1..80: mol_type = other DNA
taatacaaacaaggaaaaccttttggtgatatgggggattcaccatcctaacgatgcagcggaacaaacaaaactctatc

SEQ ID NO: 102373 - DNA, 80 bp, synthetic construct
  source 1..80: mol_type = other DNA
attaaatcagaggtctattccagaaatagccactaggcccaaagtaaacgggcaaagcggaagaatggagttcttttgga

SEQ ID NO: 102374 - DNA, 80 bp, synthetic construct
  source 1..80: mol_type = other DNA
aaacgggagattcagcaatcatgaaaagcggattggaatatggcaattgcaacaccaaatgtcaaactccagtgggtgca

SEQ ID NO: 102375 - DNA, 80 bp, synthetic construct
  source 1..80: mol_type = other DNA
ataaattcaagcatgccatttcacaacatacatcctctcaccattggagaatgccccaaatacgtaaagtcaggcagatt

SEQ ID NO: 102376 - DNA, 80 bp, synthetic construct
  source 1..80: mol_type = other DNA
agtccttgctactggactcagaaatgtccctcaaagagccacaagaggactatttggggctatagcaggctttatcgagg

SEQ ID NO: 102377 - DNA, 80 bp, synthetic construct
  source 1..80: mol_type = other DNA
tatactgagcaaaaatgaggaaagagaatttctaaatctaaccaaacccctatgtgaggtaaactcatggcatatcctgt

SEQ ID NO: 102378 - DNA, 80 bp, synthetic construct
  source 1..80: mol_type = other DNA
caaaagacaacgcaataagaataggggaagatgctcatatattagtcacgagagaaccctatttgtcctgtgatccccag

SEQ ID NO: 102379 - DNA, 80 bp, synthetic construct
  source 1..80: mol_type = other DNA
tactacagtagaaaaggaaatttgccctaaaatggcagaatatagaaattggtcaaaaccgcaatgtgaaattacaggat

SEQ ID NO: 102380 - DNA, 80 bp, synthetic construct
  source 1..80: mol_type = other DNA
atggccatcatttatctaatccttttgtttgtaacagtgaggggagaccagatatgcatcggataccactccaacaattc

SEQ ID NO: 102381 - DNA, 80 bp, synthetic construct
  source 1..80: mol_type = other DNA
actccaatgttaaaaatctatatgacaaagttagaatgcaattgagggacaatgcaaaagaactagggaatgggtgtttc

SEQ ID NO: 102382 - DNA, 80 bp, synthetic construct
  source 1..80: mol_type = other DNA
atgaggaccgttattgccttgagctacattttctgtctagctttctgtcaggaccttcccgagaatgataacagtacagc

SEQ ID NO: 102383 - DNA, 80 bp, synthetic construct
  source 1..80: mol_type = other DNA
caggaagagtgacggtttctaccaggagaagtcaacaaactataattccaaacattgggtctagaccttgggtgagggga

SEQ ID NO: 102384 - DNA, 80 bp, synthetic construct
  source 1..80: mol_type = other DNA
atggagataatagcattaatagctatactattgggaacaacaactagccatgcagataaaatctgcattggctaccagtc

SEQ ID NO: 102385 - DNA, 80 bp, synthetic construct
  source 1..80: mol_type = other DNA
ttgtgattcgctactgggagagagagaatggtcttatattgtcgaaagaacatcagcaataaatgggatgtgctatcctg

SEQ ID NO: 102386 - DNA, 80 bp, synthetic construct
  source 1..80: mol_type = other DNA
atgaacactcaaattctaatactcacccttacagctgtcatccacacaaatgcagacaaaatctgcattggacatcatgc

SEQ ID NO: 102387 - DNA, 80 bp, synthetic construct
  source 1..80: mol_type = other DNA
gctaccgaaacagtggagcagatgaacatccctaggatatgcactaagggaaagagagcgattgatctcggtcagtgtgg

SEQ ID NO: 102388 - DNA, 80 bp, synthetic construct
  source 1..80: mol_type = other DNA
ggatgagtttcattaatcatgaagaccgttattgctttaagctacattttctgcctggctttcggtcagaaccttctagg

SEQ ID NO: 102389 - DNA, 80 bp, synthetic construct
  source 1..80: mol_type = other DNA
tcaagcagagtactttgaagctggctaccgggatgaggaatgtaccagaaaagcaaatcagaggaatctttggagcaata

SEQ ID NO: 102390 - DNA, 80 bp, synthetic construct
  source 1..80: mol_type = other DNA
gttgataatttgaactggtcaggatatagtggttctttcacattgccggttgaactaacaaagaaaggatgtttagtccc

SEQ ID NO: 102391 - DNA, 80 bp, synthetic construct
  source 1..80: mol_type = other DNA
tagtagtagtatcaatggaacattgaaggcggtagaagaaataaaaaactgctctttcaatgttaccacaaacagaggaa

SEQ ID NO: 102392 - DNA, 80 bp, synthetic construct
  source 1..80: mol_type = other DNA
tgcagagagatcggcaattacggaatagaagtggtaaagttggtgatgaaatggtttttccccaccaaagatgagacaaa

SEQ ID NO: 102393 - DNA, 80 bp, synthetic construct
  source 1..80: mol_type = other DNA
tcaaagacaaaaatagcctagcaaccttccttagggagttagacatggaagaggagaaagcgcggaagttatcaacaaag

SEQ ID NO: 102394 - DNA, 80 bp, synthetic construct
  source 1..80: mol_type = other DNA
cccagggcttcctcccccaatagggaggggaagtctgaaaccaccactaggactccccccctaaacaagggaggaaggga

SEQ ID NO: 102395 - DNA, 80 bp, synthetic construct
  source 1..80: mol_type = other DNA
cccagggcttcctcccccaatagggagaggaagtctgaaaccaccactaggactccccccctaaacaaggtaggaaggga

SEQ ID NO: 102396 - DNA, 80 bp, synthetic construct
  source 1..80: mol_type = other DNA
caacaccccccaaataccccccccgccacccaatggtgaggacataatcatcaaatacaccaaacaggatgatgtgattg

SEQ ID NO: 102397 - DNA, 80 bp, synthetic construct
  source 1..80: mol_type = other DNA
aaataaaaattagacagagggtcttccgcccaaccagaaaacaacgtagggaagaaagggcgaccctaggactggtcacg

SEQ ID NO: 102398 - DNA, 80 bp, synthetic construct
  source 1..80: mol_type = other DNA
ctcctagcctttggtcccgaatagtgaattttgggtcaggatggggtttctgggtgtcttctaacctgttgatcacatca

SEQ ID NO: 102399 - DNA, 80 bp, synthetic construct
  source 1..80: mol_type = other DNA
caggggtgcccactgtcgctacggtggacgtccccccaacacacaacaccgcctacagtgtccctcccttggatcagagg

SEQ ID NO: 102400 - DNA, 80 bp, synthetic construct
  source 1..80: mol_type = other DNA
caccgcgaccagcgattttagaggcagccaaagagaccatctgcaatgtgcttgagcaagtcattgaaccaccccaaaaa

SEQ ID NO: 102401 - DNA, 80 bp, synthetic construct
  source 1..80: mol_type = other DNA
aaatcaccataaatgaaggattgccctctggagtgccgtgtacatcacagtggaactcaatttcccactggctcataaca

SEQ ID NO: 102402 - DNA, 80 bp, synthetic construct
  source 1..80: mol_type = other DNA
atgtgggatggtgaaattttccattatgggctctatgttgagaagggcttggttcttggagtgcacaaacccccggctgc

SEQ ID NO: 102403 - DNA, 80 bp, synthetic construct
  source 1..80: mol_type = other DNA
ctgtgtgccatatcagaagtttcaggactgtcgccagacgtagtgcaaacaaactcctgcttctccttctacggggatga

SEQ ID NO: 102404 - DNA, 80 bp, synthetic construct
  source 1..80: mol_type = other DNA
tgagatagtcagcaccgacatcaagttagatcccatgaaactgaccaacaagttgaaagagtatgggttgattccaacaa

SEQ ID NO: 102405 - DNA, 80 bp, synthetic construct
  source 1..80: mol_type = other DNA
ggccagacaagacagaggggccgctcataattaaagagagtcttgagggcctaactttcctgaggagggacgtgtgtcga

SEQ ID NO: 102406 - DNA, 80 bp, synthetic construct
  source 1..80: mol_type = other DNA
gacccagctggttggtatgggaaacttgaccaatcctcaatcatgagacaactgtattggactaagggaaccaaccatga

SEQ ID NO: 102407 - DNA, 80 bp, synthetic construct
  source 1..80: mol_type = other DNA
cataagctttgcacgcatagagctcacccccctctctttatactggagaacagtctacacaccaccttatctagtggccc

SEQ ID NO: 102408 - DNA, 80 bp, synthetic construct
  source 1..80: mol_type = other DNA
cccccagaaattcccctggtgaagtgttacttaatctggaactaggcccagaaataaatccttacctggcccacctttct

SEQ ID NO: 102409 - DNA, 80 bp, synthetic construct
  source 1..80: mol_type = other DNA
aatcaacctcccaatgcctgatgttcgcaataatttctttcattataatcaagggtctgattcaagattacgcttgatcg

SEQ ID NO: 102410 - DNA, 80 bp, synthetic construct
  source 1..80: mol_type = other DNA
tggaatcaaagacaaagcctttcacccttcctattctgaccatctcggagatgtccaattctaggtttccagtgccaatt

SEQ ID NO: 102411 - DNA, 80 bp, synthetic construct
  source 1..80: mol_type = other DNA
gattctctacacaccagcccaaccgacaatgttattgtccaatgtcaaaacgggcgcgtcactctcgatggcgagctaat

SEQ ID NO: 102412 - DNA, 80 bp, synthetic construct
  source 1..80: mol_type = other DNA
gggtaccactcaactattaccaagccaaatatgtgctttcaggggcacgctcacaacatcaacaaatagggacagggacc

SEQ ID NO: 102413 - DNA, 80 bp, synthetic construct
  source 1..80: mol_type = other DNA
aacctgatgcagcagcccccaggatattcgaccatcgttggcatattcaattggataacctgaatggcaccccttatgat

SEQ ID NO: 102414 - DNA, 80 bp, synthetic construct
  source 1..80: mol_type = other DNA
cctgcagaggacataccagctcccttgggtacgccagattttcagggtaaggtctttggtgtggctagccagaggaaccc

SEQ ID NO: 102415 - DNA, 80 bp, synthetic construct
  source 1..80: mol_type = other DNA
cgatggcacaacaagagcacatgaggcaaaagtggacacaacatctggccgctttactccaaagttgggttccctagaaa

SEQ ID NO: 102416 - DNA, 80 bp, synthetic construct
  source 1..80: mol_type = other DNA
taatcactgaatctggtgattttaatccaaatatgccaacaaaattcaccccagttggtgttggagttgacactgatgaa

SEQ ID NO: 102417 - DNA, 80 bp, synthetic construct
  source 1..80: mol_type = other DNA
gaattccaacaatgggtattgcctagatattctggccaggtcacccacaacatgaatctggccccagctgttgcccccaa

SEQ ID NO: 102418 - DNA, 80 bp, synthetic construct
  source 1..80: mol_type = other DNA
cttccctggtgagcagcttcttttcttccgctcacagctaccatcttctggtgggacgtccagcgggactttggactgct

SEQ ID NO: 102419 - DNA, 80 bp, synthetic construct
  source 1..80: mol_type = other DNA
tggtcccccaggagtgggttcagcatttctaccaggaatcagcccctgcccagacacaggtggccctggtcagatatgtc

SEQ ID NO: 102420 - DNA, 80 bp, synthetic construct
  source 1..80: mol_type = other DNA
aaccctgacactggtagggtgttgtttgaggccaaacttcataaattgggttttataaccatagcaaagaatggtgactc

SEQ ID NO: 102421 - DNA, 80 bp, synthetic construct
  source 1..80: mol_type = other DNA
tagcggcttttcccctgctgatgcagcccgtggggcaatcaatgctccagtgacaaaagtcctggactggagtggaacaa

SEQ ID NO: 102422 - DNA, 80 bp, synthetic construct
  source 1..80: mol_type = other DNA
ggtactgggcaccaaacgccacctccacaacttcaatgtcaggtggctttacaagccaagttgtgcacaggaccacacca

SEQ ID NO: 102423 - DNA, 80 bp, synthetic construct
  source 1..80: mol_type = other DNA
aatttcaagatgagccagactcccaagcccccacccagcagcgggtcttcagtgagatcaaactcaacacagctcactag

SEQ ID NO: 102424 - DNA, 80 bp, synthetic construct
  source 1..80: mol_type = other DNA
cctgagctcacactcatccgggtcacctcgatccagtgggtccacggttatcagctcactaccatcttccagcaggacca

SEQ ID NO: 102425 - DNA, 80 bp, synthetic construct
  source 1..80: mol_type = other DNA
cgtagaaggggggagtcaaatgcttagtgaaaagattatctttgaatttgatttagattaggtttaatttggaatctttt

SEQ ID NO: 102426 - DNA, 80 bp, synthetic construct
  source 1..80: mol_type = other DNA
taaacactacatcaagcctcttcgccaacatgaccgttggcttgaagagggccctgggggcgaggccaaaacagtctgcc

SEQ ID NO: 102427 - DNA, 80 bp, synthetic construct
  source 1..80: mol_type = other DNA
atggacagagtagcagaatcgattttcactggacattggtacagccaggtgataatatcaccttctcacacaatgggggc

SEQ ID NO: 102428 - DNA, 80 bp, synthetic construct
  source 1..80: mol_type = other DNA
aatcgatcaggtcaaattgaatagtggctacaaagatgtgatactttggtttagcttcggggcatcatgcttcctacttc

SEQ ID NO: 102429 - DNA, 80 bp, synthetic construct
  source 1..80: mol_type = other DNA
ggccttcattgctccagaccgtgtgagctttttccaagggaagtccataggaattcaaagtggagtgccagttgatgtta

SEQ ID NO: 102430 - DNA, 80 bp, synthetic construct
  source 1..80: mol_type = other DNA
tagtcttggtgaaggcatcttgccacaaagagtagtcctccatcagggtcttcgtggtggcttcagatacccctgcagtt

SEQ ID NO: 102431 - DNA, 80 bp, synthetic construct
  source 1..80: mol_type = other DNA
caaacacatcttcccgaggcaacaaggggacaccatcaacagagaccccctcaaggaagaccttgatgttgtcaaagcta

SEQ ID NO: 102432 - DNA, 80 bp, synthetic construct
  source 1..80: mol_type = other DNA
gtttagcatccttcagaacatctgacttgacagtctgagtaaattgacttaaacctctccttaaggattgagtccatcta

SEQ ID NO: 102433 - DNA, 80 bp, synthetic construct
  source 1..80: mol_type = other DNA
agtgccttgtgaaaatgggcaacagacaggctaaatcaaccaaagttgacgagcatcaaagagcccatctagtaccagat

SEQ ID NO: 102434 - DNA, 80 bp, synthetic construct
  source 1..80: mol_type = other DNA
attagcaatgtcttcctccattgctaattacagtacctgtgctaagcttaaacttatatttaaatgacttgcaggtcagt

SEQ ID NO: 102435 - DNA, 80 bp, synthetic construct
  source 1..80: mol_type = other DNA
ttatatttaaatgacttgcaggtcagttagtggtgctccattaaagttcctacagaaatgagagacaatatgcctaggat

SEQ ID NO: 102436 - DNA, 80 bp, synthetic construct
  source 1..80: mol_type = other DNA
gccagattaaggtccggggagccacagaggctacacacaccacaccctggctcctcagcagcgccggggatcctaggcaa

SEQ ID NO: 102437 - DNA, 80 bp, synthetic construct
  source 1..80: mol_type = other DNA
ggccaagctgctttgtatctgtcaaaaactcattaatgacttcagtatcaataaaccaaggggacttgcctttataagta

SEQ ID NO: 102438 - DNA, 80 bp, synthetic construct
  source 1..80: mol_type = other DNA
ggtcctgacagtatcaatctccaacaatccggtagcacacacggatttacagagccagaatacatggcactcacatcatc

SEQ ID NO: 102439 - DNA, 80 bp, synthetic construct
  source 1..80: mol_type = other DNA
cacaaagtacttcccttgttggttaattgaaccagtgaactcgagatgaatagaaaaactttctttgaaactagcatctt

SEQ ID NO: 102440 - DNA, 80 bp, synthetic construct
  source 1..80: mol_type = other DNA
gactcttaatcttgtatctaattgtctggtttagcttcactgatccaggtggcaaagactcaatggactcaaagaaatct

SEQ ID NO: 102441 - DNA, 80 bp, synthetic construct
  source 1..80: mol_type = other DNA
tctaaggattcaagcttcacatcaattagccctgaagctatcaactgattttgattgaaccttgctggttcaatatcata

SEQ ID NO: 102442 - DNA, 80 bp, synthetic construct
  source 1..80: mol_type = other DNA
catgtttgaacattggtctctcaatgcctttgtgaattaccttttccacaaatgaggaaaaaggccccagtctctgaagg

SEQ ID NO: 102443 - DNA, 80 bp, synthetic construct
  source 1..80: mol_type = other DNA
ccttccccttctggaatagatgttctgtggggaaaccatgtaaaagatcccaaagtccttgtagtcgcaacgaatgatct

SEQ ID NO: 102444 - DNA, 80 bp, synthetic construct
  source 1..80: mol_type = other DNA
ccattgaaggaatccagcagtcccagagccagcctaattcctgatgcaacacacatgggccctcagttttgcaaaagctg

SEQ ID NO: 102445 - DNA, 80 bp, synthetic construct
  source 1..80: mol_type = other DNA
gctcatgtgttctagtgtgtgaaagtctcaattcagatgaaaggacaatatagtgctcttctcgcttccatttcacaatg

SEQ ID NO: 102446 - DNA, 80 bp, synthetic construct
  source 1..80: mol_type = other DNA
tgtgacacaagggacaatgcctcacagttcacatccaaagccacacaaaggtctaaaaacttgattcttggtgaccactt

SEQ ID NO: 102447 - DNA, 80 bp, synthetic construct
  source 1..80: mol_type = other DNA
gtacaatctcctcaaagaatgaataatgtgattgacacccaccctatcctccagcaacttggatgctgtgggttttaatg

SEQ ID NO: 102448 - DNA, 80 bp, synthetic construct
  source 1..80: mol_type = other DNA
gaaagtaatcacatgggttatgcttaaaaaatgccaacggtttagattcctttggttctccaagaacccatgcgcccagc

SEQ ID NO: 102449 - DNA, 80 bp, synthetic construct
  source 1..80: mol_type = other DNA
tcaattgcagtagacagagagatgcacatgtaatcccacagcagaggtctaaagtaagttaaaacaccttcacattttct

SEQ ID NO: 102450 - DNA, 80 bp, synthetic construct
  source 1..80: mol_type = other DNA
ccttacctctaagggaaccctccaaaattgtactccataatgatttgttagcatctcaactccatcaactctagcaattg

SEQ ID NO: 102451 - DNA, 80 bp, synthetic construct
  source 1..80: mol_type = other DNA
acgaaagcactgactttatatagagattctctttgtttggtcctctaacacacttgctacccaatgttctacacaatcct

SEQ ID NO: 102452 - DNA, 80 bp, synthetic construct
  source 1..80: mol_type = other DNA
tctgatggaggctccacacctaacatctcacagaggttctgtaaggaggttaggtgttcatttgacaaatagctggttgt

SEQ ID NO: 102453 - DNA, 80 bp, synthetic construct
  source 1..80: mol_type = other DNA
gaattcttcatgtaattcaccagtcttcaatctgttgaacaacctccttaacatggacctcattttgcggcatggctctg

SEQ ID NO: 102454 - DNA, 80 bp, synthetic construct
  source 1..80: mol_type = other DNA
gggctagttgctcgatttgcctcattatcctgtatgaacggttcccatcaacccaatctctcacatcagtttcacaattt

SEQ ID NO: 102455 - DNA, 80 bp, synthetic construct
  source 1..80: mol_type = other DNA
aggagaaatgggtcaattggatacctggcatattgcagaagagataatgtcctcaactgaatcaggttgcataggtgaac

SEQ ID NO: 102456 - DNA, 80 bp, synthetic construct
  source 1..80: mol_type = other DNA
aggtactccattggcaactgactgatcaattattgtatcaattgtctctgctagctggtgaggttctttacactttatat

SEQ ID NO: 102457 - DNA, 80 bp, synthetic construct
  source 1..80: mol_type = other DNA
tttttggacttacaaatttgttgagttgatcactcatgtacaaatggaactcaagcagggttttaaattcatctggatct

SEQ ID NO: 102458 - DNA, 80 bp, synthetic construct
  source 1..80: mol_type = other DNA
cttgacataagtgctgttagattctgatcaaacattgatatttgatcatcactagaagtgtatgcatcaactgacccacc

SEQ ID NO: 102459 - DNA, 80 bp, synthetic construct
  source 1..80: mol_type = other DNA
acagacacaacttatggcaaagtttatgaacctttcagagatcaatgcatagaaatctgatgtattgtgcagaatacctt

SEQ ID NO: 102460 - DNA, 80 bp, synthetic construct
  source 1..80: mol_type = other DNA
gtcccatgtcaaggatagagcttatatgggaaggcacctgtccaatttgaaagtttgagtaaaaaaagtcctcagtcaca

SEQ ID NO: 102461 - DNA, 80 bp, synthetic construct
  source 1..80: mol_type = other DNA
tgcaaaatgcctcttcccacaaagctaagggcatcaaccaacccaacagctccccaaatcgaaggcaccacaccaccaaa

SEQ ID NO: 102462 - DNA, 80 bp, synthetic construct
  source 1..80: mol_type = other DNA
ctttgggatgtattttttcttaaccctagttgagcttttatgtaagacttcatcattgctgacacaacattaaagggtat

SEQ ID NO: 102463 - DNA, 80 bp, synthetic construct
  source 1..80: mol_type = other DNA
caagcagctaccagacagttgtaggctgagtccctcaaagtagtcctcgatcaatctagtaaacatctttgtcctaagat

SEQ ID NO: 102464 - DNA, 80 bp, synthetic construct
  source 1..80: mol_type = other DNA
taaaattcatacatctggacttgtaatgggaatactttcccattaacttgttaccattcattaacagcattattgacttg

SEQ ID NO: 102465 - DNA, 80 bp, synthetic construct
  source 1..80: mol_type = other DNA
aagcattgaaagtactcagagtcaaggtaagttcttgttgctactgctttggtgagctctccaatggggcagcctgtcat

SEQ ID NO: 102466 - DNA, 80 bp, synthetic construct
  source 1..80: mol_type = other DNA
tcctcgcccgtacagcccataacccaccgtggacaaccacgaaccacaccctctctccaccccccgacaccccccggtgg

SEQ ID NO: 102467 - DNA, 80 bp, synthetic construct
  source 1..80: mol_type = other DNA
aggtccattataaaagtatttttctcttagttcagagtcattgtggatggcgtcacaaaactctttgtagaaatcttctg

SEQ ID NO: 102468 - DNA, 80 bp, synthetic construct
  source 1..80: mol_type = other DNA
gcaaaatctcataatcaaaatcttcaaccatgtgattcgacagttcactctttattaacctaatgtggaacttgttggat

SEQ ID NO: 102469 - DNA, 80 bp, synthetic construct
  source 1..80: mol_type = other DNA
acaatcttctctaagtcattcatcaaaggaagaccaccacttcccaagtgtgcagatgatttaactggctctctatactg

SEQ ID NO: 102470 - DNA, 80 bp, synthetic construct
  source 1..80: mol_type = other DNA
attgatgatctcctcaactgtttctttcagctggtcaaagtactctgatgcccctccatcaaggagggcctcatccaaat

SEQ ID NO: 102471 - DNA, 80 bp, synthetic construct
  source 1..80: mol_type = other DNA
ctgctttgtcaatttcagccacatgacctcttgaacccaaaaccaagttgctcatcgcttgttggatcttgtattcataa

SEQ ID NO: 102472 - DNA, 80 bp, synthetic construct
  source 1..80: mol_type = other DNA
tcatgtttattaagaagatgtttaccctttcgtgagaaaacctcagtcagctgtgtaacagctaatgctgtgagtttatt

SEQ ID NO: 102473 - DNA, 80 bp, synthetic construct
  source 1..80: mol_type = other DNA
gaaatcataattcagcactcttgagccatctgtgaacttgttaacaacaacactcttgttactagccaaatccaaggctg

SEQ ID NO: 102474 - DNA, 80 bp, synthetic construct
  source 1..80: mol_type = other DNA
ttgcacagccactcatgacaagggggtctttcatctctttctttatctccttttctttaaaaagggagccattgttaaaa

SEQ ID NO: 102475 - DNA, 80 bp, synthetic construct
  source 1..80: mol_type = other DNA
gaggacgtgagtaatgacagatattttttagagatacctggtttcttgtatcttagactttctgtctcagtgcacccttt

SEQ ID NO: 102476 - DNA, 80 bp, synthetic construct
  source 1..80: mol_type = other DNA
cttatccaagaaccttttggcattgtaaaccatttcgtccaactcatccctggttgccaggtctgctggattcacagtga

SEQ ID NO: 102477 - DNA, 80 bp, synthetic construct
  source 1..80: mol_type = other DNA
gaccccccgccgggggcccccccggggggagcagccacaccaagactatcattcaatgtcttcaacattctcagcctttt

SEQ ID NO: 102478 - DNA, 80 bp, synthetic construct
  source 1..80: mol_type = other DNA
catgcccaaaatccagttttggctcaagaaacttttcaaaacacttaatctgatctgtcaatctgtcaggagtctccttt

SEQ ID NO: 102479 - DNA, 80 bp, synthetic construct
  source 1..80: mol_type = other DNA
gtgatgaaatggcacatataagaaacatttaaaatgaatttgaatcggttggttaacatgctcttaacattgttgtgcag

SEQ ID NO: 102480 - DNA, 80 bp, synthetic construct
  source 1..80: mol_type = other DNA
cattattttcaacagtgccctaataagtctgtaaatcaagaattcgacatctgttatcagtttctcttttagctttagaa

SEQ ID NO: 102481 - DNA, 80 bp, synthetic construct
  source 1..80: mol_type = other DNA
ttaagtctttatgatagaagtcagaaacataggccattataaagtatctcaagttctgtaaaagtttttgagcacgttta

SEQ ID NO: 102482 - DNA, 80 bp, synthetic construct
  source 1..80: mol_type = other DNA
cttggatgtgccagagtcaaggttaagatcatcttagttagagacttgatttcggtcatttgacctgctaactcagtaca

SEQ ID NO: 102483 - DNA, 80 bp, synthetic construct
  source 1..80: mol_type = other DNA
gtcttcaatccaactgatcataacattcacggttgtctgtagaacctcagcggagaatattgcagggaaatacctttttg

SEQ ID NO: 102484 - DNA, 80 bp, synthetic construct
  source 1..80: mol_type = other DNA
gatctgcataaaaagaacaaatttcaccaactaaattgtcatttattgcataacatttagaacactcacctgtcttttgg

SEQ ID NO: 102485 - DNA, 80 bp, synthetic construct
  source 1..80: mol_type = other DNA
taaagcagctgaaaactttgcccatttaaagaaaattcctggctgtaagcctctttgcacctcactgtctggtatctagc

SEQ ID NO: 102486 - DNA, 80 bp, synthetic construct
  source 1..80: mol_type = other DNA
tttcccaaactcattttgccttattttcacagtggatgaggtcttcatagaattgattaaagccaggctgagtgaggata

SEQ ID NO: 102487 - DNA, 80 bp, synthetic construct
  source 1..80: mol_type = other DNA
gcctttctaagtcagtcaaatccataatgtcaactgagcctattgggtaaggaaatctttcttcctctgatttctgatag

SEQ ID NO: 102488 - DNA, 80 bp, synthetic construct
  source 1..80: mol_type = other DNA
taagtctaaggagaaagtgatgatacagtcaagtggtggcagattgaggctaaagggtaggacatgtgaagagctgttgg

SEQ ID NO: 102489 - DNA, 80 bp, synthetic construct
  source 1..80: mol_type = other DNA
ctgattgtgggaacaattccagaaatgtcaaagcccaacacatcatcataaacctggggagtgataatgccaacatcaac

SEQ ID NO: 102490 - DNA, 80 bp, synthetic construct
  source 1..80: mol_type = other DNA
accatagtgatccagatttattccaacatcacttaaggcagaggtggcctttgtgatagtcctttgaattatagaattta

SEQ ID NO: 102491 - DNA, 80 bp, synthetic construct
  source 1..80: mol_type = other DNA
gtatttgattcttgtccagacagggaggtgatgttgcaacatgaggtttgatgagttctgttttgcatctcctttccatc

SEQ ID NO: 102492 - DNA, 80 bp, synthetic construct
  source 1..80: mol_type = other DNA
cacttcttcagatctctttgtgtcgactctaaagaaaccagtcggtcattcacactcacaaaacaggatcccaaccaacc

SEQ ID NO: 102493 - DNA, 80 bp, synthetic construct
  source 1..80: mol_type = other DNA
ttttggattgttgcacttgtgctttgttagatctcttctgctcgctaaaaggattagaatgtcaaaaatcaacattaatt

SEQ ID NO: 102494 - DNA, 80 bp, synthetic construct
  source 1..80: mol_type = other DNA
tccgtctggtatttaagatcctcaatgatttaactttattcaaaaatgatctccaacactgcatttgaccttcaacagca

SEQ ID NO: 102495 - DNA, 80 bp, synthetic construct
  source 1..80: mol_type = other DNA
acagcacctttgtcgatcctgcctccaatatctgcatacaaaaacctcataattggtgatgatctcttatattgatggat

SEQ ID NO: 102496 - DNA, 80 bp, synthetic construct
  source 1..80: mol_type = other DNA
caaacaattgatttcatcttcctgaaccacaatctcatcttcatatagactgttaaatttatgcattaagtcttcttgat

SEQ ID NO: 102497 - DNA, 80 bp, synthetic construct
  source 1..80: mol_type = other DNA
caactcttatgaattggctttctatttcaccctgtcttaatctgtttctgaatatgtggtactcattttcaatttgggcc

SEQ ID NO: 102498 - DNA, 80 bp, synthetic construct
  source 1..80: mol_type = other DNA
ttcacctcatgagctgataatctattgttgacaccttggtgacagagggcaataatttcctcatagtggctggcacgatt

SEQ ID NO: 102499 - DNA, 80 bp, synthetic construct
  source 1..80: mol_type = other DNA
ctgaaacataaggcataccccctgaactccacccaatcatctatggttctcaagacatcgcccaggacactcatagcatc

SEQ ID NO: 102500 - DNA, 80 bp, synthetic construct
  source 1..80: mol_type = other DNA
gtctgtcagaatattaatgctttccactcctgagagtctgccggatgtcatagacaaagattcacagagtctcgaatact

SEQ ID NO: 102501 - DNA, 80 bp, synthetic construct
  source 1..80: mol_type = other DNA
accatcaatgagtggaataaggttaatctccacagatttcagatcatcctttaattgttccaacttcttaaaatcctcaa

SEQ ID NO: 102502 - DNA, 80 bp, synthetic construct
  source 1..80: mol_type = other DNA
catatttctgttcaaagttagcaggagatgatctcacaaagcactcaagcaatataaggacgttacctgtcagtttatac

SEQ ID NO: 102503 - DNA, 80 bp, synthetic construct
  source 1..80: mol_type = other DNA
acccgtcagggacaacaaaacaaagagacggtgttaaaattccgtggtcatgaaggatgctttcaacagacttaccttca

SEQ ID NO: 102504 - DNA, 80 bp, synthetic construct
  source 1..80: mol_type = other DNA
gtgttgtgttcacacccattggcataacaagagtccacctcaatacaaagggacagaagcttcaggccctccatcaaaag

SEQ ID NO: 102505 - DNA, 80 bp, synthetic construct
  source 1..80: mol_type = other DNA
cctccatcaaaagcattcttggctctgtttgaacaagaaatgctagtttttgccttgaaagcttttcattgtctcttagg

SEQ ID NO: 102506 - DNA, 80 bp, synthetic construct
  source 1..80: mol_type = other DNA
attgggtatcactttcttcagcaattggacaatatccactcctgacaactggaccctgagcttcagtctgtctgttatca

SEQ ID NO: 102507 - DNA, 80 bp, synthetic construct
  source 1..80: mol_type = other DNA
ttttgtatgccagttttgtgtgctctctatcattatagagtcgtgcacaacctattaacatgggtggcagacaaaccaaa

SEQ ID NO: 102508 - DNA, 80 bp, synthetic construct
  source 1..80: mol_type = other DNA
tagcagccagtgccccagtcaacatgtcatgattactatcattggcttctcttatgaagacttcgagatcttgatccagg

SEQ ID NO: 102509 - DNA, 80 bp, synthetic construct
  source 1..80: mol_type = other DNA
atcacaggcgtaaatgtagccagtcgcttgtcacactcccaaagggcccctctgttgatgaccaatggaactgactcaat

SEQ ID NO: 102510 - DNA, 80 bp, synthetic construct
  source 1..80: mol_type = other DNA
gttaggacctatttgtacaaaatcatactctgtaaattgcaatctttccatatctataataatctcaataggagtaacag

SEQ ID NO: 102511 - DNA, 80 bp, synthetic construct
  source 1..80: mol_type = other DNA
gggagcagccacaccaagactatcattcaatgtcttcaacattctcagccttttccaacagctcttcacatgtcctaccc

SEQ ID NO: 102512 - DNA, 80 bp, synthetic construct
  source 1..80: mol_type = other DNA
gcacagtggatcctaggctattggattgcgctttgcactaatcaaacctttggagtgaccacattcaagacccactaagg

SEQ ID NO: 102513 - DNA, 80 bp, synthetic construct
  source 1..80: mol_type = other DNA
ggacctcgattgtgggaagagcatgggaaaatactgtggtggaccttgagcaagacaacaagccccagaaaattggaaat

SEQ ID NO: 102514 - DNA, 80 bp, synthetic construct
  source 1..80: mol_type = other DNA
gatgcaaagtattcacatggtattgatgtgactgatttgtttgctgcccaacctgggttaaccagtgcagtgatagaagc

SEQ ID NO: 102515 - DNA, 80 bp, synthetic construct
  source 1..80: mol_type = other DNA
acttcaacacctaaagtcgtcctgtagatggacgcccccgtgagatttcacctcttccatctgacaggcacacctggctg

SEQ ID NO: 102516 - DNA, 80 bp, synthetic construct
  source 1..80: mol_type = other DNA
tcgtaagtccctttgtagatcagtgagcatgaccttcctgaaagtagaaggaatgtgacaagccctatcaagccacacgt

SEQ ID NO: 102517 - DNA, 80 bp, synthetic construct
  source 1..80: mol_type = other DNA
ggcaacattgtatagtcccttcagaattgctaggatggatagtgcaataaggacaatattcatcacttcctcaataacat

SEQ ID NO: 102518 - DNA, 80 bp, synthetic construct
  source 1..80: mol_type = other DNA
atcctggccgctgatttagaaaaactgaaatcaaaagtcaccagaacagaaaggcctttgagttcaggagtttatatggg

SEQ ID NO: 102519 - DNA, 80 bp, synthetic construct
  source 1..80: mol_type = other DNA
gaatttgagttcacaacagcttgatcaaaggagagcccttttgaacatgattggcatgactggagtaagtggagggggaa

SEQ ID NO: 102520 - DNA, 80 bp, synthetic construct
  source 1..80: mol_type = other DNA
agggtgccagtgatggcattgtgagagtttgggatgtcaaaaatgcagagttactcaacaatcagttcggaacaatgcca

SEQ ID NO: 102521 - DNA, 80 bp, synthetic construct
  source 1..80: mol_type = other DNA
gtcagacaaccatcacgacaatgagtgcttccaaggaagtgaggtcattcttgtggactcaatccctaagaagggaacta

SEQ ID NO: 102522 - DNA, 80 bp, synthetic construct
  source 1..80: mol_type = other DNA
tctgcaggctttgctgcaggattaacttactctcagttgatgactctcaaagattcaatgcttcaacttgatcccaacgc

SEQ ID NO: 102523 - DNA, 80 bp, synthetic construct
  source 1..80: mol_type = other DNA
ggggatcctaggcaatttgatcgttcttctatagagcttcacaacttaggctcagcaaatggggaacaagcaagccaaag

SEQ ID NO: 102524 - DNA, 80 bp, synthetic construct
  source 1..80: mol_type = other DNA
gtgcccccacagacactgccaatggcataattaataaatctctctgaaataagagcatagaaatccgatgtgttatgcaa

SEQ ID NO: 102525 - DNA, 80 bp, synthetic construct
  source 1..80: mol_type = other DNA
tataccctgacccatgtcaagtatagagctgatatgggagggtaccacgcctatctgaaagttggagtaaaagaaatcct

SEQ ID NO: 102526 - DNA, 80 bp, synthetic construct
  source 1..80: mol_type = other DNA
cactcccacaacccacctctatgtacaaccaaaggaactgcttcaaaacaagggcccaccaaaacaaaatcatgttccat

SEQ ID NO: 102527 - DNA, 80 bp, synthetic construct
  source 1..80: mol_type = other DNA
taagagtcataagttgagagtaggtcagcccagctgggaagcctgcagactggagagatttattggagccattgctgttg

SEQ ID NO: 102528 - DNA, 80 bp, synthetic construct
  source 1..80: mol_type = other DNA
agcaaaagcaggggatacaaaatgaacactcaaattttggcactcattgcttgcatgctgatcggagctaaaggagataa

SEQ ID NO: 102529 - DNA, 80 bp, synthetic construct
  source 1..80: mol_type = other DNA
ggagcgattgctggattcatagagaatgggtgggaaggtctcattgatggatggtacggtttcaggcatcaaaatgcaca

SEQ ID NO: 102530 - DNA, 80 bp, synthetic construct
  source 1..80: mol_type = other DNA
tagacaatgaattcagtgaaatagaacaacagattgggaatgtcattaattggacacgagattcaatgactgaagtgtgg

SEQ ID NO: 102531 - DNA, 80 bp, synthetic construct
  source 1..80: mol_type = other DNA
atgagcgtgtaaggaaacaactgagggagaatgctgaagaggatgggactggatgctttgagatattccataagtgtgat

SEQ ID NO: 102532 - DNA, 80 bp, synthetic construct
  source 1..80: mol_type = other DNA
aggaacggatgtgtgttaccctgggaagttcacaaatgaggaatcactgaggcagatcctccgagggtcaggaggagttg

SEQ ID NO: 102533 - DNA, 80 bp, synthetic construct
  source 1..80: mol_type = other DNA
aagaaccaatggggcaacgagtgcttgcagaagatcaggttcttccttctatgcggagatgaagtggttattgtcaaatt

SEQ ID NO: 102534 - DNA, 80 bp, synthetic construct
  source 1..80: mol_type = other DNA
cagacaatgcggcttttccccaaatgactaagtcatacaggaaccccagaagcaaaccagctctaataatttggggagtg

SEQ ID NO: 102535 - DNA, 80 bp, synthetic construct
  source 1..80: mol_type = other DNA
gagtcactaggagttcaaagtgacgttcctttggatcctagttgtgagggggattgtttccacaatagaggtacgatagt

SEQ ID NO: 102536 - DNA, 80 bp, synthetic construct
  source 1..80: mol_type = other DNA
tagctacagggatgagaaacgtcccagaaaaccccaagaccgataggaagagccgacatcgaaggatcagaggtcttttt

SEQ ID NO: 102537 - DNA, 80 bp, synthetic construct
  source 1..80: mol_type = other DNA
tagtaataatactgtaaataatgctactgccatggagaaaggagacatgaaaaattgctctttcaatgtcaccacagtca

SEQ ID NO: 102538 - DNA, 80 bp, synthetic construct
  source 1..80: mol_type = other DNA
tgactttattgttaacacccttaaaaatatggctgatacaatgacttgcatgcacacagttatttcgtctttttagtgac

SEQ ID NO: 102539 - DNA, 80 bp, synthetic construct
  source 1..80: mol_type = other DNA
ggctgaagaggaggccacctctggtttagtcatgctttgcattcatggctcccccgttaattcttacactaacaccccct

SEQ ID NO: 102540 - DNA, 80 bp, synthetic construct
  source 1..80: mol_type = other DNA
atacgcttctcggtggcctaccgacagaattgatttcgtcggctgggggacagttgttttactcccgccctgtcgtctca

SEQ ID NO: 102541 - DNA, 80 bp, synthetic construct
  source 1..80: mol_type = other DNA
tagtgggagcatcatttctttttgtggtgtgaatagtgatactgtagattggtcttggccagacggtgctgagttgccgt

SEQ ID NO: 102542 - DNA, 80 bp, synthetic construct
  source 1..80: mol_type = other DNA
cctataaagttgttgctgggcaggactcaacttcagtgatattaaccggcaattcatctctttgtcccatccgtgggtgg

SEQ ID NO: 102543 - DNA, 80 bp, synthetic construct
  source 1..80: mol_type = other DNA
ttactgagtctttgatcgcacatgcagggctcaagaggtctaagtactggtctgctcatggctatgcttatggtagtgtc

SEQ ID NO: 102544 - DNA, 80 bp, synthetic construct
  source 1..80: mol_type = other DNA
agggaaaaatagagggagatggaataaagaactgctctttcaatgtcaccaacagcataaataaggtgcagaaacaaaat

SEQ ID NO: 102545 - DNA, 80 bp, synthetic construct
  source 1..80: mol_type = other DNA
gtaagggaaaaatagagggagatggaataaaaaaatgctctttcaatatcaccaccagcctaaataaggtgcagaaacaa

SEQ ID NO: 102546 - DNA, 80 bp, synthetic construct
  source 1..80: mol_type = other DNA
gagaagtaaaaaactgtactttccaggtcaccacaagtgtgggggataagaagctagactatgcacttttttataaactt

SEQ ID NO: 102547 - DNA, 80 bp, synthetic construct
  source 1..80: mol_type = other DNA
agatcgaagattgtagaacttctaagacgcagaaagtaggagatcctcaaatattagtagaacctcctacaatattaaag

SEQ ID NO: 102548 - DNA, 80 bp, synthetic construct
  source 1..80: mol_type = other DNA
agaaaccagaggagctctctcgacgcaggactcggcttgctgagcgcgcacagcaagaggcgagggttgtagacaaatac

SEQ ID NO: 102549 - DNA, 80 bp, synthetic construct
  source 1..80: mol_type = other DNA
aaggaaaaatagaaggagaaagaataaaaaactgcactttcaatatcaccaccaacttaaatgaggtgcggaaacaaaat

SEQ ID NO: 102550 - DNA, 80 bp, synthetic construct
  source 1..80: mol_type = other DNA
gtaaaggaaaaatagaaggagatagaataaagaactgctctttcaatatcaccaccaacttaaataaggtgcaaaaacaa

SEQ ID NO: 102551 - DNA, 80 bp, synthetic construct
  source 1..80: mol_type = other DNA
ttctacaaaggactttccgctaaagactttccagaaaaggcgtagcctaggcaggactaagaagtggcgagccctcagat

SEQ ID NO: 102552 - DNA, 80 bp, synthetic construct
  source 1..80: mol_type = other DNA
tagaaccaggagaagtaaaaaactgtactttccaggtcaccacaagtgtagaagataagaagctagactatgcacttttt

SEQ ID NO: 102553 - DNA, 80 bp, synthetic construct
  source 1..80: mol_type = other DNA
tgacctagatgcagtaggagaaagaaattgacaattacacaaacgaaatatacaccttgcttgcagaatcgcagagccaa

SEQ ID NO: 102554 - DNA, 80 bp, synthetic construct
  source 1..80: mol_type = other DNA
ttagaccagtagttgtcatgatctcaggcagacctggcattggaaaaacccacatggcaagacacttggctaagagcatc

SEQ ID NO: 102555 - DNA, 80 bp, synthetic construct
  source 1..80: mol_type = other DNA
tttgtacaagcccctgctggtgaatttacagtttcccctagaaattctcctggagaactcctacttgatttggaattggg

SEQ ID NO: 102556 - DNA, 80 bp, synthetic construct
  source 1..80: mol_type = other DNA
tcctgaactcaacccctatcttgcacatttggctaggatgtacaatgggcacgcaggaggaatggaagtgcagatagtac

SEQ ID NO: 102557 - DNA, 80 bp, synthetic construct
  source 1..80: mol_type = other DNA
gcccaattgactatgtgcccccatgtgatagtggatgtgaggcaattagaaccagtgctcttgccaatgccagatataag

SEQ ID NO: 102558 - DNA, 80 bp, synthetic construct
  source 1..80: mol_type = other DNA
acaattcaggtgatgatgtgttcacggtgtcttgccgcgttctaacgcgcccttctccagatttccagttcactttcttg

SEQ ID NO: 102559 - DNA, 80 bp, synthetic construct
  source 1..80: mol_type = other DNA
ccccgttgttttggaccaaatgtacacaagcaggaatgaaaacatcattgtccaaccccaaaacggcagatgcacaactg

SEQ ID NO: 102560 - DNA, 80 bp, synthetic construct
  source 1..80: mol_type = other DNA
atggtgagctgcttggtaccactatcttacaatctgtgtctatttgcaatttcaaaggaacaatgcaggcagagctgaat

SEQ ID NO: 102561 - DNA, 80 bp, synthetic construct
  source 1..80: mol_type = other DNA
gaagaaccacgataccagttgcaactcaccaacttggatgggtcacccatagatccaacagatgatatgcctgcccctct

SEQ ID NO: 102562 - DNA, 80 bp, synthetic construct
  source 1..80: mol_type = other DNA
atgctcagattgacactgcgggcgatacattcgccccgaaaattggccaggttcgatttaaatcaagttccagagatttt

SEQ ID NO: 102563 - DNA, 80 bp, synthetic construct
  source 1..80: mol_type = other DNA
gttactttaggtttgaagcttgggttaatcctttctatactctcgcccccgtgggaactgggtctgggcgcaggaggatt

SEQ ID NO: 102564 - DNA, 80 bp, synthetic construct
  source 1..80: mol_type = other DNA
caataatggctggagctttccttgcaggcttggcaggtgacgttgtgacttccagcttgggctcactcgtgggtgctgga

SEQ ID NO: 102565 - DNA, 80 bp, synthetic construct
  source 1..80: mol_type = other DNA
gccaacgccatcaatcagaaagtggagtatgacttcaacaggcaactccaggaggcatcttttagacatgataaggatat

SEQ ID NO: 102566 - DNA, 80 bp, synthetic construct
  source 1..80: mol_type = other DNA
gctcaaagcccaggttgcagcaacagcaggccttcaacaggccatgatagacatcaagcgggaggcattgactgcaggcg

SEQ ID NO: 102567 - DNA, 80 bp, synthetic construct
  source 1..80: mol_type = other DNA
tccccccacctgtctaatcaaaccccaagtgctgttaaacctactaggcctttaccatctatatctagttcttctagtgt

SEQ ID NO: 102568 - DNA, 80 bp, synthetic construct
  source 1..80: mol_type = other DNA
ttgggaggcagctcaaggatgtcaaaaccatgccagaacttaagcaagcactcaagaatatctcaatcaaaaagtgccag

SEQ ID NO: 102569 - DNA, 80 bp, synthetic construct
  source 1..80: mol_type = other DNA
ctgtcagagttggcatgaatatgaatgaggacggtcccatcatcttcgagaagcattccaggtacagataccattatgac

SEQ ID NO: 102570 - DNA, 80 bp, synthetic construct
  source 1..80: mol_type = other DNA
gtcgaattaacaccactctccttgttctggagacctgtgtacactcctcagtacctcatttctccagacaccctcaagaa

SEQ ID NO: 102571 - DNA, 80 bp, synthetic construct
  source 1..80: mol_type = other DNA
tatggatattataaatgtaatgataaataacacatacttaggattcaggtatcaattatttggatctgaacctggtttag

SEQ ID NO: 102572 - DNA, 80 bp, synthetic construct
  source 1..80: mol_type = other DNA
gtcacatataactgaagatggagatgtaactacatacaacattagtttaaatgttgttaattccaattatgcttttaaat

SEQ ID NO: 102573 - DNA, 80 bp, synthetic construct
  source 1..80: mol_type = other DNA
ctatctttataggaccagggaatggtatagttagaggcaataacatgtacttcgtaggatatggggcattaagagataac

SEQ ID NO: 102574 - DNA, 80 bp, synthetic construct
  source 1..80: mol_type = other DNA
actaactatccatcttggtgtatctatgatggatgtcctgccgatcccagttataataaatattgtgagtggtctatgag

SEQ ID NO: 102575 - DNA, 80 bp, synthetic construct
  source 1..80: mol_type = other DNA
gccagattattttggtagattacctgggttaaactgtattattactataacaaattataaagagagtaatagaggaatcc

SEQ ID NO: 102576 - DNA, 80 bp, synthetic construct
  source 1..80: mol_type = other DNA
ttataagagcaatccctaatactaattcttatcctgctgcaggtggaaggttatatgatttaggtgacagagttggtttg

SEQ ID NO: 102577 - DNA, 80 bp, synthetic construct
  source 1..80: mol_type = other DNA
tatttcacaactgcaagctggcagggtaaattgcagtttgctttatttgaagatttcccttcttataaacctatatatgt

SEQ ID NO: 102578 - DNA, 80 bp, synthetic construct
  source 1..80: mol_type = other DNA
caattctgatattatcaccgttagagcacatggttcttgtagggataagaacaattgtccacaagattgttattctcctt

SEQ ID NO: 102579 - DNA, 80 bp, synthetic construct
  source 1..80: mol_type = other DNA
tgtagggataagaacaattgtccacaagattgttattctcctttatatgcagatatttaccctcttaatcttgaagctac

SEQ ID NO: 102580 - DNA, 80 bp, synthetic construct
  source 1..80: mol_type = other DNA
tatatgcagatatttaccctcttaatcttgaagctacacttttcacaagtacacccattttcatggggggagacaatgca

SEQ ID NO: 102581 - DNA, 80 bp, synthetic construct
  source 1..80: mol_type = other DNA
gattatagaactgtaattattaattctaataagattgaaagtttggttcagatgtttgtgaattataaatcgataatggg

SEQ ID NO: 102582 - DNA, 80 bp, synthetic construct
  source 1..80: mol_type = other DNA
tggcagggttcttcctgacaatcaaatatggcctagagatgagatattctgtcttagcatccaatgagctgcaagcagac

SEQ ID NO: 102583 - DNA, 80 bp, synthetic construct
  source 1..80: mol_type = other DNA
tacaacaactacatgttttatgtataaagatgagccttggtgtatcgttacagtaagaggggtgagaaaaggatacagtg

SEQ ID NO: 102584 - DNA, 80 bp, synthetic construct
  source 1..80: mol_type = other DNA
gtgtagaggctatatcatattcttacaaaattaaaaagacgtgtcaaaatactcaacctaaaatagggaatatatcaata

SEQ ID NO: 102585 - DNA, 80 bp, synthetic construct
  source 1..80: mol_type = other DNA
ccagatttcccaagtatcaaacctgttaggtaacaaagtattgattgtttaatctcttcattttgaacggtacattggtc

SEQ ID NO: 102586 - DNA, 80 bp, synthetic construct
  source 1..80: mol_type = other DNA
aaactagattacaatttccattgctttcttaaaagatcttatattattcttaattggatgtgaatcaagtatggacattt

SEQ ID NO: 102587 - DNA, 80 bp, synthetic construct
  source 1..80: mol_type = other DNA
atattctggtcagatacctcattggatgccacaactatttataagagacaattgacagtatgatattttaaggattgtga

SEQ ID NO: 102588 - DNA, 80 bp, synthetic construct
  source 1..80: mol_type = other DNA
taaatcagtgaactgagacatttgattatttattatttgaatcaattacaatccttagatcatgattatatcaattaatt

SEQ ID NO: 102589 - DNA, 80 bp, synthetic construct
  source 1..80: mol_type = other DNA
gtttgctaaataattctcacggatatagcctgcagtaaggtacaaagtaatgtgaagtactgttgtagtatcattcatta

SEQ ID NO: 102590 - DNA, 80 bp, synthetic construct
  source 1..80: mol_type = other DNA
ttagaaggcttgacatatgttcctggtacaaatgactatttgatttgttcttgatttcacttattaatgcagttaagaaa

SEQ ID NO: 102591 - DNA, 80 bp, synthetic construct
  source 1..80: mol_type = other DNA
aacttaggatccaagagatcttacgttaaactaaggccttgttgatatgtaatctaagaatgaatttcaatgatgtatca

SEQ ID NO: 102592 - DNA, 80 bp, synthetic construct
  source 1..80: mol_type = other DNA
gtatcagatattctctaccctgagtgtcatcttgacagccccattgtcacagggaagatcgtacaagcaatcaagtatgc

SEQ ID NO: 102593 - DNA, 80 bp, synthetic construct
  source 1..80: mol_type = other DNA
ctactaactatccagacattgatgaggacttataaagaaataggggtaagagcaccatatatggtattgttagaagattc

SEQ ID NO: 102594 - DNA, 80 bp, synthetic construct
  source 1..80: mol_type = other DNA
ggaaatcccatgcaaccaagtactcacagataacaccttgttgaacgttattaacaagagattatcaacaggcaaactag

SEQ ID NO: 102595 - DNA, 80 bp, synthetic construct
  source 1..80: mol_type = other DNA
gcatgattgggcacaaacaaagacaatacggacaagtattaaggcagacttatcctgacatagaaaaatataatcatatt

SEQ ID NO: 102596 - DNA, 80 bp, synthetic construct
  source 1..80: mol_type = other DNA
ccatacccggaatgcaatttggagttgttcagactagaagatagtaaagtgatagcatatgcaaaggagttgtttgacaa

SEQ ID NO: 102597 - DNA, 80 bp, synthetic construct
  source 1..80: mol_type = other DNA
tgctaaccatgcatatgacaagattgcctcaaggatagtctctttattagacaaagcagagactgatcttattggattag

SEQ ID NO: 102598 - DNA, 80 bp, synthetic construct
  source 1..80: mol_type = other DNA
gttcaagatcagattatcaaactagacaagtctacaaaaacatagaatctctctccaaaattatgaaaggtagccgctgg

SEQ ID NO: 102599 - DNA, 80 bp, synthetic construct
  source 1..80: mol_type = other DNA
tacaacccatttttgttctggttcacaattaaaactgagatgaggggtaacactaaagactgctctaagacatccaaaat

SEQ ID NO: 102600 - DNA, 80 bp, synthetic construct
  source 1..80: mol_type = other DNA
gaaccaacccaatgttgtacaattgacaggcaaatccttatatgttcagataaacatgaatctagtaactatattgcaat

SEQ ID NO: 102601 - DNA, 80 bp, synthetic construct
  source 1..80: mol_type = other DNA
gggacaccaaacaaatatttcatttgacacctgaaatagttttgatgatgagtgatgttttagagggtagattaatgata

SEQ ID NO: 102602 - DNA, 80 bp, synthetic construct
  source 1..80: mol_type = other DNA
gatgtagctatggcatcagatccaaaatatgcaattttatatgatcgaggtcatcagctctgggatttaattgacaatct

SEQ ID NO: 102603 - DNA, 80 bp, synthetic construct
  source 1..80: mol_type = other DNA
tttcccagaattcggtaataatgtttataacatagtttctatgttggagccttttgctttagggatgttacaactgcacg

SEQ ID NO: 102604 - DNA, 80 bp, synthetic construct
  source 1..80: mol_type = other DNA
atcattcagacgaaattgctggatcctttatccattactgcttcactgagcttaaaacagaattaaataacaatgggttt

SEQ ID NO: 102605 - DNA, 80 bp, synthetic construct
  source 1..80: mol_type = other DNA
aacgacttggatgattattatgatttaagcaatagaataatcaatattatgaatattcctgatattcacttgattgcaga

SEQ ID NO: 102606 - DNA, 80 bp, synthetic construct
  source 1..80: mol_type = other DNA
attcttttccttttttaggacatttggccacccaacattggaggctataacggctgcagataaagtgagatctcacatga

SEQ ID NO: 102607 - DNA, 80 bp, synthetic construct
  source 1..80: mol_type = other DNA
cgtggccccctcttactcttcctatacatgcatctaccatcataaagagattgatgtcgagtggtgaaagtctaaccaat

SEQ ID NO: 102608 - DNA, 80 bp, synthetic construct
  source 1..80: mol_type = other DNA
taagcatgtatatgaaagataaggctttgtcaccaattaaagaggagtgggatactgtctatccaagagaatctctcctc

SEQ ID NO: 102609 - DNA, 80 bp, synthetic construct
  source 1..80: mol_type = other DNA
tatcctgtccaaagcaggagtaagtccagaagactggtagatgtttttattaatgatgagaactttgatccttacaatat

SEQ ID NO: 102610 - DNA, 80 bp, synthetic construct
  source 1..80: mol_type = other DNA
tttacagtatatacttagtggtgaatatattcatgaccctgaatttaacatttcttatagcttgaaagaaaaagagacaa

SEQ ID NO: 102611 - DNA, 80 bp, synthetic construct
  source 1..80: mol_type = other DNA
ccatgggtgcactgaatattaataggagctatctggagcctatgtacttcaagctgggtcaaagcatggctaggcaacaa

SEQ ID NO: 102612 - DNA, 80 bp, synthetic construct
  source 1..80: mol_type = other DNA
atggaatggtcaaagacgaacacgaacttctaaaaacattgcatcagttgtcagtatcatctgttccaaaaacagaaagg

SEQ ID NO: 102613 - DNA, 80 bp, synthetic construct
  source 1..80: mol_type = other DNA
tataacgaagggacttgggatcacaaccctggtcataataaagacaaagatgttataataggacaaaatagcaaagtaga

SEQ ID NO: 102614 - DNA, 80 bp, synthetic construct
  source 1..80: mol_type = other DNA
tcatgaggttaaggatattataaatgcttcaaattgggatattatcagaagaaacatttttaagaatttgaagaaaaatg

SEQ ID NO: 102615 - DNA, 80 bp, synthetic construct
  source 1..80: mol_type = other DNA
tcactcctaatccattactaaccatgaatcatcaagttaagagtaagatgtcacatagagtcaatacagacaatatacag

SEQ ID NO: 102616 - DNA, 80 bp, synthetic construct
  source 1..80: mol_type = other DNA
aaatcaagtaagtataagaaagacaagacagagtttgatatttacaaccagccgacaactaaatctgaagaaaaatatga

SEQ ID NO: 102617 - DNA, 80 bp, synthetic construct
  source 1..80: mol_type = other DNA
tattcgctagaagagttgatgagatttacggattgcctggatttttcaactggttacatagtcgattagaaagatgtgtg

SEQ ID NO: 102618 - DNA, 80 bp, synthetic construct
  source 1..80: mol_type = other DNA
tcatgaaaaacacatacccttggactcaacagatgactctggtctatttattcataaccctatgggtggcatcgaagggt

SEQ ID NO: 102619 - DNA, 80 bp, synthetic construct
  source 1..80: mol_type = other DNA
atagtcaaaaattatggaccattattactatcccctttttattccttagtggggttgaaaccaatattagaattgctgca

SEQ ID NO: 102620 - DNA, 80 bp, synthetic construct
  source 1..80: mol_type = other DNA
gttgttcaaggtgataatcagtctattgctataactcataaggttcacccacacctaccgtacaaagagaaaaaacgaga

SEQ ID NO: 102621 - DNA, 80 bp, synthetic construct
  source 1..80: mol_type = other DNA
gcagggtctgtagataggaaaatagctgctgaactagagttatctgatcagcaattagaagatctcaaagaggttatgaa

SEQ ID NO: 102622 - DNA, 80 bp, synthetic construct
  source 1..80: mol_type = other DNA
aagcagtagacaggctaagttatattttcaaaggctcagatcaaacctagcagcccttggtcacaatcttaaggcaacag

SEQ ID NO: 102623 - DNA, 80 bp, synthetic construct
  source 1..80: mol_type = other DNA
acatccttaaaactttgcaacagttgcatgtctcccttaaattttctataaatgagactctaacaccagatgttaccaac

SEQ ID NO: 102624 - DNA, 80 bp, synthetic construct
  source 1..80: mol_type = other DNA
cctatgcttcaaaatgtaagctggatgctgtctgctgccttaatcccagcaccgttaggtgggtttaattacctcaactt

SEQ ID NO: 102625 - DNA, 80 bp, synthetic construct
  source 1..80: mol_type = other DNA
atcaaggatatatgtgaggaatataggtgaccctattacagcatctattgcagatataaaaagaatgataaaagctaagt

SEQ ID NO: 102626 - DNA, 80 bp, synthetic construct
  source 1..80: mol_type = other DNA
tattagcagagagtatgctacaaaagataatgaatcaaacaccgggtgatgcaactttcctggattgggcaagtgatcca

SEQ ID NO: 102627 - DNA, 80 bp, synthetic construct
  source 1..80: mol_type = other DNA
ataatgattttcatcaagaggataagaaattggccgaatttttgatggatagaagcataatattaccaagagcagcacat

SEQ ID NO: 102628 - DNA, 80 bp, synthetic construct
  source 1..80: mol_type = other DNA
gtcagtttcaagccaaagaactgaaacgactctccaagctagagaaggcagatttaatgtagccggaggtgcacttgaag

SEQ ID NO: 102629 - DNA, 80 bp, synthetic construct
  source 1..80: mol_type = other DNA
agggactcattcgaacaggtctaagaaagggtggaattcaacccagattggtttcaagattatcacaccatgactatgag

SEQ ID NO: 102630 - DNA, 80 bp, synthetic construct
  source 1..80: mol_type = other DNA
taatcttatgagaaataatatccatagtgatcttataagaattgggatttgttcagtggagttagcaagagctttaagaa

SEQ ID NO: 102631 - DNA, 80 bp, synthetic construct
  source 1..80: mol_type = other DNA
accacatgtggatgcatcttactaaaggaaggatgatatacgggctagaggtacctgatccattagagtcaatgagaggg

SEQ ID NO: 102632 - DNA, 80 bp, synthetic construct
  source 1..80: mol_type = other DNA
ttacttatcatgggaagcgaaaattgttttctctgtagtaccgaatccagtccctattgttggttttttattcctaaaca

SEQ ID NO: 102633 - DNA, 80 bp, synthetic construct
  source 1..80: mol_type = other DNA
atattggttctagtacagaagaaagatctgagataaaactaggatcagttaagtctgcaagtagagctttgaagtcagca

SEQ ID NO: 102634 - DNA, 80 bp, synthetic construct
  source 1..80: mol_type = other DNA
ataaggattgctactgtttacacttgggcatatggagatgatgatgagtcatggttggaggcgtggtaccttgcaaatca

SEQ ID NO: 102635 - DNA, 80 bp, synthetic construct
  source 1..80: mol_type = other DNA
aagaacatcaatcgatcttgatattttaaaagcaatcacacccatatcaacatcaaataacttagcacacagacttagag

SEQ ID NO: 102636 - DNA, 80 bp, synthetic construct
  source 1..80: mol_type = other DNA
atagatcgacacaagttaaattcacaggctcttcactcaatagagtttcacgatatgtgactataagtaatgatatgctt

SEQ ID NO: 102637 - DNA, 80 bp, synthetic construct
  source 1..80: mol_type = other DNA
acatagatgggacagatgatgaggatgaaggttcttacagacctattagaggtaatgaatttattgattatactgatcca

SEQ ID NO: 102638 - DNA, 80 bp, synthetic construct
  source 1..80: mol_type = other DNA
gaatttaaattgaatgataccaagattgatacgaacctcatttttcaacaagtaatgttacttggcctatctgctatcga

SEQ ID NO: 102639 - DNA, 80 bp, synthetic construct
  source 1..80: mol_type = other DNA
acaaagataccgttaccaaacaacaacaggtaaggataatatcatttatcatttgcatgtagttccgaattgctgtgtgg

SEQ ID NO: 102640 - DNA, 80 bp, synthetic construct
  source 1..80: mol_type = other DNA
tagagatggcacaaattccaccagttccatcgttacttgatccacctgagtatcaggaaatagtagataatccattaata

SEQ ID NO: 102641 - DNA, 80 bp, synthetic construct
  source 1..80: mol_type = other DNA
tatgataaatacccaattatagagtctgaaataaataaattgacagtgcaaacatggagatccaaggatgttgaatttgc

SEQ ID NO: 102642 - DNA, 80 bp, synthetic construct
  source 1..80: mol_type = other DNA
taattggactttaagtgagttacataaatgtttagcacaaacattagcttctacaataatagatattattactaagacag

SEQ ID NO: 102643 - DNA, 80 bp, synthetic construct
  source 1..80: mol_type = other DNA
ttagaatcagcaatacgtaagcattactagaactgttgatcaacactatttttagcccattgttacacttatccataagc

SEQ ID NO: 102644 - DNA, 80 bp, synthetic construct
  source 1..80: mol_type = other DNA
ttgatgttaatctgtttataacatacttaggacagtactgtgcaattaaatggggttttgacatacattacaaaagacca

SEQ ID NO: 102645 - DNA, 80 bp, synthetic construct
  source 1..80: mol_type = other DNA
aaagggaagtggcaaatgatagagctattggaggatctattaagtaatacatccaaacatatattcacagttctcgataa

SEQ ID NO: 102646 - DNA, 80 bp, synthetic construct
  source 1..80: mol_type = other DNA
tgctttatctcacccacgagtgtttcgaaagttctgggaagccgggttgttgtcgccaacttatggtccttatatttaca

SEQ ID NO: 102647 - DNA, 80 bp, synthetic construct
  source 1..80: mol_type = other DNA
atcaggattttactcaaatgtctatagagttaatagttaaatcttatacacaatatttaacattttggttagagggaaga

SEQ ID NO: 102648 - DNA, 80 bp, synthetic construct
  source 1..80: mol_type = other DNA
aatattagaagagctatggagatgattgggagaaatgtggacaaaaatagaagaccactcaatactaataaagaaagaga

SEQ ID NO: 102649 - DNA, 80 bp, synthetic construct
  source 1..80: mol_type = other DNA
tcattggagtatttaatggccgagcaaaatgaagaggctgtagacatgagatatgatatattacaggccagacacttgtg

SEQ ID NO: 102650 - DNA, 80 bp, synthetic construct
  source 1..80: mol_type = other DNA
catcctttgtgatctttattgtaatgaataccttccacctaagattatggatctgtcaccaatccagaagatatctgtgt

SEQ ID NO: 102651 - DNA, 80 bp, synthetic construct
  source 1..80: mol_type = other DNA
tagaagagttcattaaagactgtcaacttaaattagatggtgtggattcatggaatatcaggatgttaaatattgttgtt

SEQ ID NO: 102652 - DNA, 80 bp, synthetic construct
  source 1..80: mol_type = other DNA
tatcctacttctactacttatttgagaaggggtgtgattaaacaaataagaataagagaacatattacaggtgcatttga

SEQ ID NO: 102653 - DNA, 80 bp, synthetic construct
  source 1..80: mol_type = other DNA
tcaaatggaagttgatttgttgcactcaaaatatattgaagaatgtgcaattgactatgttcctcccaatgcgtgtacat

SEQ ID NO: 102654 - DNA, 80 bp, synthetic construct
  source 1..80: mol_type = other DNA
gtctaaagctatgtgaagttgataaaccacataactcaactttatcagtaagaataaatgatacattacctattaatgga

SEQ ID NO: 102655 - DNA, 80 bp, synthetic construct
  source 1..80: mol_type = other DNA
tgggaaagtcataaatataggagagttgggatcaattcaacatctgggtataaagcattagagctttacaccataataca

SEQ ID NO: 102656 - DNA, 80 bp, synthetic construct
  source 1..80: mol_type = other DNA
aagattttatgaaataggctcagacagattatttataggagaagggtcaggatgcatgttaactgtgtacaatgctttgt

SEQ ID NO: 102657 - DNA, 80 bp, synthetic construct
  source 1..80: mol_type = other DNA
taggagatgctgtaaattattacaactccggtattactgagtatgaggtcataggacaaagagaattgaggttgtatcca

SEQ ID NO: 102658 - DNA, 80 bp, synthetic construct
  source 1..80: mol_type = other DNA
tcggaagcttgcatagcagacaagaacttgtcagacaatagtaaattgttacagaccattaagcctttatttaatgggag

SEQ ID NO: 102659 - DNA, 80 bp, synthetic construct
  source 1..80: mol_type = other DNA
tgccgcaaaagaagccttaatgagagatctgatggctagagggaacaaagcaaagggtactcaattgcagaatcaaaatc

SEQ ID NO: 102660 - DNA, 80 bp, synthetic construct
  source 1..80: mol_type = other DNA
acctgaaacaacctggatagggaatagcgattgttttatacacattcttaagagtatcaaatcacatagcattggtttag

SEQ ID NO: 102661 - DNA, 80 bp, synthetic construct
  source 1..80: mol_type = other DNA
tccatagtgatatggagagtggagtggataaagatgattatgaaatattgactgagcatgcacatctcttagctatatct

SEQ ID NO: 102662 - DNA, 80 bp, synthetic construct
  source 1..80: mol_type = other DNA
ataaatgtacttaagactagtggtatactagttagtaaaattaatccttcacacgactttaaaataactaatttgttaag

SEQ ID NO: 102663 - DNA, 80 bp, synthetic construct
  source 1..80: mol_type = other DNA
catgtataatgcttgcttttctgacattcgtgttgctttcccaaaatatagtaactataattctactgaatgttacttaa

SEQ ID NO: 102664 - DNA, 80 bp, synthetic construct
  source 1..80: mol_type = other DNA
tatgctcaatgcctaaaatcttaaccctcacagacccagagaaggttttctcatataactataataagagtgaacttagt

SEQ ID NO: 102665 - DNA, 80 bp, synthetic construct
  source 1..80: mol_type = other DNA
gatatatcaataattaatttcataaccactatcaaatatagagtacatgttgcctttgaaaagaactgcactgacaacta

SEQ ID NO: 102666 - DNA, 80 bp, synthetic construct
  source 1..80: mol_type = other DNA
ctatgatgataaaatcaagggtatatccaagaacttgactgatgatgataaaacattactaagatgtggtttaacactta

SEQ ID NO: 102667 - DNA, 80 bp, synthetic construct
  source 1..80: mol_type = other DNA
acggtcctcatctttgtaacaaattatttggttatgatgttggaagcccagtagaaaccttagtagaggcatcaaagtta

SEQ ID NO: 102668 - DNA, 80 bp, synthetic construct
  source 1..80: mol_type = other DNA
ttactaaatgaggcattgaatatttatgacaaaaaccgacttccgtctaccttctttgaaccataccctgtgcttgagtc

SEQ ID NO: 102669 - DNA, 80 bp, synthetic construct
  source 1..80: mol_type = other DNA
tacaaggattaaatattacatgcataggttaatgagaaagataactgggtatacactcttaactactagtgctaataacc

SEQ ID NO: 102670 - DNA, 80 bp, synthetic construct
  source 1..80: mol_type = other DNA
tgatgacaagagaggatcagtatcaacaagactatgattatcaaagtaattacacacctctgggttcacaagaacttcct

SEQ ID NO: 102671 - DNA, 80 bp, synthetic construct
  source 1..80: mol_type = other DNA
aaactaaagttgatcagattatagataacctgagaagaaaacatatcatactagatttgactgagtactttaagactaca

SEQ ID NO: 102672 - DNA, 80 bp, synthetic construct
  source 1..80: mol_type = other DNA
ttaatacctgactactataaaagaaggatattgggtaacagattcaaactaaactggatactggagctagatacaaaaga

SEQ ID NO: 102673 - DNA, 80 bp, synthetic construct
  source 1..80: mol_type = other DNA
ggttaaaaattggtggaaattattatcttatgtaccgatttaccaattatctcatagatctgacaacaataatattaaca

SEQ ID NO: 102674 - DNA, 80 bp, synthetic construct
  source 1..80: mol_type = other DNA
ttttaattgatgaggcatataatatggaggataaaggctcaacagactcagaagatgagatttacaccaaagtgcctcta

SEQ ID NO: 102675 - DNA, 80 bp, synthetic construct
  source 1..80: mol_type = other DNA
ttgggtaaagaacataatgatctttcttatttgcaaagtgaactaggttatgattctaagatcacttatccagagccaga

SEQ ID NO: 102676 - DNA, 80 bp, synthetic construct
  source 1..80: mol_type = other DNA
agagccagaaccaacttacttctctatattgaatgaataaatcaccaggttaagaaaaacttagttcctatatgttttct

SEQ ID NO: 102677 - DNA, 80 bp, synthetic construct
  source 1..80: mol_type = other DNA
aggtcaaatagatctgaaggcttaacatccaatcatatgcaagatggtctggataatgaacttaatttcctacaatctca

SEQ ID NO: 102678 - DNA, 80 bp, synthetic construct
  source 1..80: mol_type = other DNA
aaattagcactatccatttactcaaatcaactagccatcaatacaggacacacttacagtctgatatcggtacattttat

SEQ ID NO: 102679 - DNA, 80 bp, synthetic construct
  source 1..80: mol_type = other DNA
tattttaaagcagagaacataacgtgaagagcttaatatactacctacacactttatatttcagttttattttttcacaa

SEQ ID NO: 102680 - DNA, 80 bp, synthetic construct
  source 1..80: mol_type = other DNA
ttgatttatgcataaatctgtataattataattataaaaaacttaggatccaagtgatctttcacaaacacaacatctgt

SEQ ID NO: 102681 - DNA, 80 bp, synthetic construct
  source 1..80: mol_type = other DNA
gtaagatcgctcctggattctaaacctttgtttaaaagaaatacctgaggaacagtactcgacctagaagttggaaaatt

SEQ ID NO: 102682 - DNA, 80 bp, synthetic construct
  source 1..80: mol_type = other DNA
gttctagaacatttatctaattcagattaatttgtagattatgacatccatcaacgatgagcatcaaaaacaaattgaga

SEQ ID NO: 102683 - DNA, 80 bp, synthetic construct
  source 1..80: mol_type = other DNA
aagggcttgaggtggttgacttcatccagaaatcaagacaacaaaatttgcctaggcccacctacggacgaagtgcaatt

SEQ ID NO: 102684 - DNA, 80 bp, synthetic construct
  source 1..80: mol_type = other DNA
ttaagagtcaattattacataggattaacttgtgaatagtataagacccaagatgttctccactttaagacacgaaactg

SEQ ID NO: 102685 - DNA, 80 bp, synthetic construct
  source 1..80: mol_type = other DNA
gagttaccaactacaaagcaaagaacagcagcatgggaggcatttggagtatcacagcttgagaactctggagaacaaga

SEQ ID NO: 102686 - DNA, 80 bp, synthetic construct
  source 1..80: mol_type = other DNA
gggggctactgaagttgtcaatggaacaactgatggaggagatgaacatggggttcgagatgatgctgtatctagcagag

SEQ ID NO: 102687 - DNA, 80 bp, synthetic construct
  source 1..80: mol_type = other DNA
aagagggacagagagcttatagagaaggaaaatgggatgatgaagaaggacttatacttgaggacccgatggttacagac

SEQ ID NO: 102688 - DNA, 80 bp, synthetic construct
  source 1..80: mol_type = other DNA
attcaggatgatggtaaaagaagggagattaccaacagcaagtcaccttacaaatctagtcatagcaaggataattacct

SEQ ID NO: 102689 - DNA, 80 bp, synthetic construct
  source 1..80: mol_type = other DNA
atcaggaggtggggatgggaatggaggttatacatctgattcgggttatatgcccagcgtacgctcgagctctatatctg

SEQ ID NO: 102690 - DNA, 80 bp, synthetic construct
  source 1..80: mol_type = other DNA
aagatggaggtgaccaatctggttctgagaaaggaaactatgtgctgaatcccaaggcagctgaattcacgccatccaat

SEQ ID NO: 102691 - DNA, 80 bp, synthetic construct
  source 1..80: mol_type = other DNA
aacaaagagctgaactcaaatagaactctgtcttcctccgattcaaatctggatatgatcttggatgaaccaaatagaaa

SEQ ID NO: 102692 - DNA, 80 bp, synthetic construct
  source 1..80: mol_type = other DNA
gcctaaccatgatcaaatacaaataacacaatccagcatttctatcagttcatcatctaaccctacaccatctaagagga

SEQ ID NO: 102693 - DNA, 80 bp, synthetic construct
  source 1..80: mol_type = other DNA
gattggcagcccttaaaaggagtaaggccggatctgcagtgttggtatcatcagagactggaaacaattcattgatcgac

SEQ ID NO: 102694 - DNA, 80 bp, synthetic construct
  source 1..80: mol_type = other DNA
gttaaaaggggcatagaaaggaattcagtctcggatggaacggagatgagattaccgtccatgagtggtgcaacccactc

SEQ ID NO: 102695 - DNA, 80 bp, synthetic construct
  source 1..80: mol_type = other DNA
agtcattcagagaatatcaagccaatttaggtaggagtggtagaccatcggcagccactgctacattgacaactaaaata

SEQ ID NO: 102696 - DNA, 80 bp, synthetic construct
  source 1..80: mol_type = other DNA
tgtgcaccagtcactgaagaagccaaaagatttcaatgtatgtgcctcagatgtccgagggtttgccaacaagaagactg

SEQ ID NO: 102697 - DNA, 80 bp, synthetic construct
  source 1..80: mol_type = other DNA
tacaggaattggtttctttggagaatcaacggcaaaagaacataataactgacatacaaagaaagaataagcaactgaca

SEQ ID NO: 102698 - DNA, 80 bp, synthetic construct
  source 1..80: mol_type = other DNA
tcaattcacacagtcttagatggactgaaagacatcaagacaaatgtaacaaagacattagaatgtaagaaagggaagaa

SEQ ID NO: 102699 - DNA, 80 bp, synthetic construct
  source 1..80: mol_type = other DNA
accaaatttaaacccaataaatgagggcgaagatttagatgacactggtagtacaataagctttaacgacgatagtctag

SEQ ID NO: 102700 - DNA, 80 bp, synthetic construct
  source 1..80: mol_type = other DNA
aatcagttaaattaacaaatacagatgattgtggcggggattcggccagtgaatgcatggataattccaaaccagaattt

SEQ ID NO: 102701 - DNA, 80 bp, synthetic construct
  source 1..80: mol_type = other DNA
cctagtctcacggatcaagatgttcgagaagctgttgaggttgcatcaaccaatagattagatgtaggtattgatctgga

SEQ ID NO: 102702 - DNA, 80 bp, synthetic construct
  source 1..80: mol_type = other DNA
tgattatatcagtagtttattacagcatgcaaacagtaaacagatcatgggggaagttctaagaaccaatataaaaatta

SEQ ID NO: 102703 - DNA, 80 bp, synthetic construct
  source 1..80: mol_type = other DNA
tggctaaaataaatatgatcgatgaagtcttagataagatggattcacttctgatgaatcaaggcgcagtgatgtcaaag

SEQ ID NO: 102704 - DNA, 80 bp, synthetic construct
  source 1..80: mol_type = other DNA
gtagatgcactagacagagaagttggtaaagttggactcagtatatcagcagtggagcagttggtaacatctatgagaat

SEQ ID NO: 102705 - DNA, 80 bp, synthetic construct
  source 1..80: mol_type = other DNA
tataatacctggagacatcaagaaaggatcgagtgtttcaggtgaatcagacatcagcatgaatccaacactgaaacctg

SEQ ID NO: 102706 - DNA, 80 bp, synthetic construct
  source 1..80: mol_type = other DNA
attgtatttaaccctattggaagagatactactctcaggtgggaagttgtcaaattttgtatgagattgattcagtcaga

SEQ ID NO: 102707 - DNA, 80 bp, synthetic construct
  source 1..80: mol_type = other DNA
taatcgggagacaaaacattaaattagatgaagtcatagatgtagattttgatgaagtcaatctaagcaagggggtgcca

SEQ ID NO: 102708 - DNA, 80 bp, synthetic construct
  source 1..80: mol_type = other DNA
aaaataaaagagagtctattattagaggatctagacatgtccaagacaaatgcatctcaatttatacctgattcaacacc

SEQ ID NO: 102709 - DNA, 80 bp, synthetic construct
  source 1..80: mol_type = other DNA
tgagagtagaagcaccttgtgtgccctgatcgaagctagaattcaagacccagatttacgatcaatgtttatcagtgccg

SEQ ID NO: 102710 - DNA, 80 bp, synthetic construct
  source 1..80: mol_type = other DNA
tattggaatctgacgacgaagacagcatcaaagacatacacaataagataataatggcaattgatgcaggtttttagcat

SEQ ID NO: 102711 - DNA, 80 bp, synthetic construct
  source 1..80: mol_type = other DNA
ttccagagtaccacccatgacacaaccacaagggtgaaaatgatagctccaatccatataccatgcaaaccttggaatga

SEQ ID NO: 102712 - DNA, 80 bp, synthetic construct
  source 1..80: mol_type = other DNA
gcaacatgatcatttgatttgaattctacccaataagaaaggaccattgttgcctttgctgctattcaattatatatagg

SEQ ID NO: 102713 - DNA, 80 bp, synthetic construct
  source 1..80: mol_type = other DNA
tacgatattattgtactctattgcactccttatgaatccaatgattggtccttttctcatatacacaatgctttgctaaa

SEQ ID NO: 102714 - DNA, 80 bp, synthetic construct
  source 1..80: mol_type = other DNA
ccacaaaacaatggtcagctgtaaatattgcgctttactacacagtccgctgcaataattccatactaacaatcatagat

SEQ ID NO: 102715 - DNA, 80 bp, synthetic construct
  source 1..80: mol_type = other DNA
ttaaacaaatatactagttagtagaatgatgtaattacaaaaaacttaggatccaagagatttattagagtattatgcta

SEQ ID NO: 102716 - DNA, 80 bp, synthetic construct
  source 1..80: mol_type = other DNA
ccttctgatctcgatcctgagtattattacttcccagataacaaaagatataagagacataacatcattaagttattccc

SEQ ID NO: 102717 - DNA, 80 bp, synthetic construct
  source 1..80: mol_type = other DNA
gagatcatcacaagcagtcaagatcggtgcgacaatcagcttattaactttgtatgctgaaaatcctggtgccatggtaa

SEQ ID NO: 102718 - DNA, 80 bp, synthetic construct
  source 1..80: mol_type = other DNA
tattatacttagtctctatacattatgtcggctcttgaaggattgtccgatttcaaatcttcctcttgggaggaaggtgg

SEQ ID NO: 102719 - DNA, 80 bp, synthetic construct
  source 1..80: mol_type = other DNA
tattatgagatccatagatgctgaaatagataagaatgggcacatattaccaaagtacaggataactaatccaggtggca

SEQ ID NO: 102720 - DNA, 80 bp, synthetic construct
  source 1..80: mol_type = other DNA
atgacaggaaaagcataggatatatgtacttaattgcttatggatttgttgaggacgctcctattccaggacaggaggat

SEQ ID NO: 102721 - DNA, 80 bp, synthetic construct
  source 1..80: mol_type = other DNA
aaaaaatcaactctgagaacaatagcagcattcccttttggagttggcattagtgatgcaacaccagatgaactcctaca

SEQ ID NO: 102722 - DNA, 80 bp, synthetic construct
  source 1..80: mol_type = other DNA
aagtacctgctcactagaagtttctgtgagaaggactgcgggagcaactgaaaagattgtattaggagcaaaaggacctt

SEQ ID NO: 102723 - DNA, 80 bp, synthetic construct
  source 1..80: mol_type = other DNA
taggtcacttaacaccttggagttctgtactttcatcaggagctatctttaatgcatctaagatctgcaatcatgtagaa

SEQ ID NO: 102724 - DNA, 80 bp, synthetic construct
  source 1..80: mol_type = other DNA
ttaatacagattggaattcaacaaagattacgattgttctttttgtctattactatgttgactgatagaggtatctataa

SEQ ID NO: 102725 - DNA, 80 bp, synthetic construct
  source 1..80: mol_type = other DNA
gataccaaagactattctggatttccgtgaacaaaatgctgtatctttcaatcttctagtctctctcagattaaacactg

SEQ ID NO: 102726 - DNA, 80 bp, synthetic construct
  source 1..80: mol_type = other DNA
acttgactagagcagggatgaaagggactctagataaggatggtaatagattggcaactttcatgttgcatattggtaac

SEQ ID NO: 102727 - DNA, 80 bp, synthetic construct
  source 1..80: mol_type = other DNA
gtaagaagaaggttgaaatgatggatctagtattctcactaggtgctgttggaggtttaagctttcatattaggtttact

SEQ ID NO: 102728 - DNA, 80 bp, synthetic construct
  source 1..80: mol_type = other DNA
ggagcttgatgaacgaccctgatatagaggtagttatagtagacataggatcatttgaaggtgaaattcccaggctggag

SEQ ID NO: 102729 - DNA, 80 bp, synthetic construct
  source 1..80: mol_type = other DNA
ggtaaggtaagtagaagactaattgcatcaatgaaatttcatcgcaatatatgttattccctcatggatataaatccagg

SEQ ID NO: 102730 - DNA, 80 bp, synthetic construct
  source 1..80: mol_type = other DNA
tgcgacaggtaagatactaaagaactagtaagagtatgtaaggttgttttgatcaacaatgagattgcccataacaatag

SEQ ID NO: 102731 - DNA, 80 bp, synthetic construct
  source 1..80: mol_type = other DNA
ttgaatttgattgagcttacatccttatgtgataataaacttcttaattttccaaggattaattgatgaggtaattatga

SEQ ID NO: 102732 - DNA, 80 bp, synthetic construct
  source 1..80: mol_type = other DNA
tcttaacaatgatgtgatcttaagacctttgatttgtagaattcagttacaacttaaatcgatactaaatcttctttaag

SEQ ID NO: 102733 - DNA, 80 bp, synthetic construct
  source 1..80: mol_type = other DNA
ctgtgatttaaaatctacctcctttaatgacatgattatgacatatgatgtcgttatacttctgtgaaatgtgaaataga

SEQ ID NO: 102734 - DNA, 80 bp, synthetic construct
  source 1..80: mol_type = other DNA
acattgataattaatatatgctcgtaatttaatgatttaatttataattaaataaatatttactggctgatggaattaat

SEQ ID NO: 102735 - DNA, 80 bp, synthetic construct
  source 1..80: mol_type = other DNA
tataaaaaacttaggagacaaggattcattatgatgtcataagatgccatcatgtatctatgagtctcctaattctgatt

SEQ ID NO: 102736 - DNA, 80 bp, synthetic construct
  source 1..80: mol_type = other DNA
attctagggtttctcatcgctgtagaactaggtcaattgattataagtgtttatttatcatttcattattagtgatcctc

SEQ ID NO: 102737 - DNA, 80 bp, synthetic construct
  source 1..80: mol_type = other DNA
agaagaggagccattgcagaacaacaaatgagaagttttactgcaattatcaattcagttgcaccaagggatctctttga

SEQ ID NO: 102738 - DNA, 80 bp, synthetic construct
  source 1..80: mol_type = other DNA
acaataacaattatactaagttttatggtcttttggtataatacactaagaaatcaagctggagttattacataccataa

SEQ ID NO: 102739 - DNA, 80 bp, synthetic construct
  source 1..80: mol_type = other DNA
ttcacgagctacagaagatcaaggcagagagagacaggattctatccctcccacaagaagaacgagcatacctaatttta

SEQ ID NO: 102740 - DNA, 80 bp, synthetic construct
  source 1..80: mol_type = other DNA
gacctggaattcctggacagcgcgattgcgagagtagagcagtaccatatcatcagaagtgatataattatagatgctga

SEQ ID NO: 102741 - DNA, 80 bp, synthetic construct
  source 1..80: mol_type = other DNA
tggttttgaagcagctgtattggagattctagataagttatttcttgaaatgcttaagtcattctggatcacttacaacg

SEQ ID NO: 102742 - DNA, 80 bp, synthetic construct
  source 1..80: mol_type = other DNA
ctcatctagctaaggtagaatctgatagacttaaattatcaaatcctggtataccagaatccactgagcctagtcccgaa

SEQ ID NO: 102743 - DNA, 80 bp, synthetic construct
  source 1..80: mol_type = other DNA
aattgaggtcttcatgtagacaaaataaggttgaccaagttaaatttttagatgcagaacaaaagattgatcattgttat

SEQ ID NO: 102744 - DNA, 80 bp, synthetic construct
  source 1..80: mol_type = other DNA
tgatactgtgttttatatagttgtactattgatacttgtttacttctataaactcgtagtaacattcttaaagtccgtta

SEQ ID NO: 102745 - DNA, 80 bp, synthetic construct
  source 1..80: mol_type = other DNA
tatcattataaattttgatacaactaattgattgatcatgtcacttaaattcagacaaagcaccaataacagaacaaata

SEQ ID NO: 102746 - DNA, 80 bp, synthetic construct
  source 1..80: mol_type = other DNA
tcaggttgatattaattattgttctgattaaacatatgttatgtattcactatgaaaacctatcatctgttggtataatc

SEQ ID NO: 102747 - DNA, 80 bp, synthetic construct
  source 1..80: mol_type = other DNA
aaaggtaatacatataattacaaaataaaaggggatccatctactaagatgctagtagttaagctaattccaaacattga

SEQ ID NO: 102748 - DNA, 80 bp, synthetic construct
  source 1..80: mol_type = other DNA
aagaaatgatgtagatgccatgaatatgagggattctggtagatatctcacagctatatcatctattttagcacaggtct

SEQ ID NO: 102749 - DNA, 80 bp, synthetic construct
  source 1..80: mol_type = other DNA
tggtttagggaattgtactgacaagcagatgaaagattacaaaactttagttaagtcaacactccaacctgtcaaagatt

SEQ ID NO: 102750 - DNA, 80 bp, synthetic construct
  source 1..80: mol_type = other DNA
cattggctcaaatgctgaataatgttgaaacatacaatggttatgtcaagttttttggagcggtgatggcaggagcagca

SEQ ID NO: 102751 - DNA, 80 bp, synthetic construct
  source 1..80: mol_type = other DNA
ctgggtgtggcaactgcagcaacagtcacagcaggtatagccttacaccaatctaaccaaaatgcaaaggatattgctaa

SEQ ID NO: 102752 - DNA, 80 bp, synthetic construct
  source 1..80: mol_type = other DNA
tatgaaagatgcaataatgaagacaaatcaagctataacaactctatcttctgcatctcaaaagatgttaactgtaatag

SEQ ID NO: 102753 - DNA, 80 bp, synthetic construct
  source 1..80: mol_type = other DNA
actctatccgtggggaaatcaatcaacaaataatacctgtgttaaatcaattgtcttgtgagactgttggattaaatcta

SEQ ID NO: 102754 - DNA, 80 bp, synthetic construct
  source 1..80: mol_type = other DNA
gggataaagctaacacagtattattcacaaatatcaacattcttcggaccggcattacagaatcctgttcagtcaatatt

SEQ ID NO: 102755 - DNA, 80 bp, synthetic construct
  source 1..80: mol_type = other DNA
aacaattcaagctatatcacatgcatttgggggaaacttcaatgaattgatgactgttatgggttacactgggtcagatt

SEQ ID NO: 102756 - DNA, 80 bp, synthetic construct
  source 1..80: mol_type = other DNA
tccaagatataattcaaggtaatcttattacgggatcagtcatcggggtagatcctgaagtgggttatattgctttagaa

SEQ ID NO: 102757 - DNA, 80 bp, synthetic construct
  source 1..80: mol_type = other DNA
attaggattccttcattaacagtggtgccaaatgcctatgttcaagaacttctaccagtcagttttaatattgatggtga

SEQ ID NO: 102758 - DNA, 80 bp, synthetic construct
  source 1..80: mol_type = other DNA
tgagtggatgaccattgtacctaactatgtgttgactagaactacctatttgtcaaacatagatatcaatagatgcttaa

SEQ ID NO: 102759 - DNA, 80 bp, synthetic construct
  source 1..80: mol_type = other DNA
tcaagaatttgtagaatcaatatctgtactggaccttgaaatcacttgaaccaagctacgtcaaatttctatagccaaga

SEQ ID NO: 102760 - DNA, 80 bp, synthetic construct
  source 1..80: mol_type = other DNA
ggattttggtagccaaatcagttacagcaccagacactgcagaagaaagtgaaggcaaaaggtgggcaaaatatgtgcag

SEQ ID NO: 102761 - DNA, 80 bp, synthetic construct
  source 1..80: mol_type = other DNA
taactgataaaagtgttatatgtggtaatgattatgcgacacctatgtcaaatcaacttattaactgtttgaacggtaat

SEQ ID NO: 102762 - DNA, 80 bp, synthetic construct
  source 1..80: mol_type = other DNA
acacagcactgtgcaagagaagcagtagtcaccagttatgtgcctaaatttgcattatcaggaggggttatatatgcaaa

SEQ ID NO: 102763 - DNA, 80 bp, synthetic construct
  source 1..80: mol_type = other DNA
ttgtcttagtactgtttgcaggtgtattgataaagaccaacccataagtcagtcattgtcacagacactgatgatgttag

SEQ ID NO: 102764 - DNA, 80 bp, synthetic construct
  source 1..80: mol_type = other DNA
ataatcagcactgcaatgtttatcagatttcaaatgtcctgatatctaccggtagatatctaggtgatgctgaatttagg

SEQ ID NO: 102765 - DNA, 80 bp, synthetic construct
  source 1..80: mol_type = other DNA
aatgaaggtattgatttgggtcccccgatcgtggttgacaaaattgatctaggtggtcaaattgcagatataaaccaaac

SEQ ID NO: 102766 - DNA, 80 bp, synthetic construct
  source 1..80: mol_type = other DNA
aatatctgatgcagaggaattcatcgaggaatctaataaaatcttgagtaagataaaccctaagataatttcagtaaaat

SEQ ID NO: 102767 - DNA, 80 bp, synthetic construct
  source 1..80: mol_type = other DNA
ctatggttgtgttatatgtagttgttgctctaatagcaatcttggcaatggtaagtttagtgctgagcatcaggttgaca

SEQ ID NO: 102768 - DNA, 80 bp, synthetic construct
  source 1..80: mol_type = other DNA
atgcaagtcgggaccaaaatcaaccaatttgcctacaccaaacatgtgcctagcatggagaatgttcagtatataggaac

SEQ ID NO: 102769 - DNA, 80 bp, synthetic construct
  source 1..80: mol_type = other DNA
ccgttgatgaattcaagttaatttagcagaagactagggcaaatgatcttcattataaggtaattattcctcattagttt

SEQ ID NO: 102770 - DNA, 80 bp, synthetic construct
  source 1..80: mol_type = other DNA
catgttattaacatagtcggattcacttagaataaccaaaatattatccaagacactatacttaaactatcaatactcac

SEQ ID NO: 102771 - DNA, 80 bp, synthetic construct
  source 1..80: mol_type = other DNA
agcaaaaaagagttgatcctacctacacagtgtcaaaacaatggattaagtcagttagggatataatatctcaaaatctg

SEQ ID NO: 102772 - DNA, 80 bp, synthetic construct
  source 1..80: mol_type = other DNA
tttaagaaaaacttaggatccaggtcagttatgttggatatagtctggcttgttcttttattcctcatatttatagcatt

SEQ ID NO: 102773 - DNA, 80 bp, synthetic construct
  source 1..80: mol_type = other DNA
tctcttaaaattaatcaaggaacaattaatttttgacatagatcctgcgttcaatgatttcacttacatttcagatgaat

SEQ ID NO: 102774 - DNA, 80 bp, synthetic construct
  source 1..80: mol_type = other DNA
aaaaaatcaataatatatgtaaggttataagatctgaataaccaaaccatttaagatcaatcttcataaacattaaaagc

SEQ ID NO: 102775 - DNA, 80 bp, synthetic construct
  source 1..80: mol_type = other DNA
tatgacagacgataacaaaatggtcaaagttggtacagaaactactactcctcacaagtattacggggtagagaaggttg

SEQ ID NO: 102776 - DNA, 80 bp, synthetic construct
  source 1..80: mol_type = other DNA
acaattttgcaggaaaggttgtaagcaacaggatattcattctcacgaatatgatcttgattattactagctctatagta

SEQ ID NO: 102777 - DNA, 80 bp, synthetic construct
  source 1..80: mol_type = other DNA
gccatcacactcaatgtgactaacttagaaagtttatacaatcaaagagaaacacttgctatggtaaaccaagaagtcca

SEQ ID NO: 102778 - DNA, 80 bp, synthetic construct
  source 1..80: mol_type = other DNA
taataagctcggagatgtatcaactataggtaatactattaagggtgatatcaaaccaaaagtcaatctcatcaattccg

SEQ ID NO: 102779 - DNA, 80 bp, synthetic construct
  source 1..80: mol_type = other DNA
cggtcagtgtaagtctacctgctcagatgtcgtctatgcttcagaaaatgttaaataaaatgaatggaattgaggatgct

SEQ ID NO: 102780 - DNA, 80 bp, synthetic construct
  source 1..80: mol_type = other DNA
attgaccagcgatgttcctgttccacactaggaagtttactccctggatcttctcaaagacctcctacagtatctacacc

SEQ ID NO: 102781 - DNA, 80 bp, synthetic construct
  source 1..80: mol_type = other DNA
tggagcaggtgatgatgatgaatcaactgatactgattcaggcagtgtgaccatgatagacttgagtgcctttacaaaat

SEQ ID NO: 102782 - DNA, 80 bp, synthetic construct
  source 1..80: mol_type = other DNA
tcggttaggaaatacatggttgaaaacttgattgaggttaaaaagagtgggtcctcaaaaggaaggttgaatgagatgat

SEQ ID NO: 102783 - DNA, 80 bp, synthetic construct
  source 1..80: mol_type = other DNA
gtacacttgatcgatctaagccttatgcagcatattcattaactggtgttgctcacaatataccaggattgtctgttaac

SEQ ID NO: 102784 - DNA, 80 bp, synthetic construct
  source 1..80: mol_type = other DNA
attgcagataatggtgactgtgtgtctaatgttgcatttgccatatcagagggtatttatgtttatactcaagagattag

SEQ ID NO: 102785 - DNA, 80 bp, synthetic construct
  source 1..80: mol_type = other DNA
aaaaacggactgtctgacagggcaaaaaatctcccaaataacaaccctggggagaattgtagacaaaggacaatctgggc

SEQ ID NO: 102786 - DNA, 80 bp, synthetic construct
  source 1..80: mol_type = other DNA
cgagagtgtcacccctctcgacttacctggaacccgacccttcaagcaaaatatcttgctctgttgccgcatcatcagga

SEQ ID NO: 102787 - DNA, 80 bp, synthetic construct
  source 1..80: mol_type = other DNA
tcaggttgggtcttttgtgtgctaactacgggagagggtgtaaattattcaaagttcggcccatttatcgggtttactct

SEQ ID NO: 102788 - DNA, 80 bp, synthetic construct
  source 1..80: mol_type = other DNA
gtgtatatgaataggagcacaatagttaaaagctaacactgtcaaaaacctaaatggctataggggcgtaatgtgaccaa

SEQ ID NO: 102789 - DNA, 80 bp, synthetic construct
  source 1..80: mol_type = other DNA
ccgatcggggatcctaggcaatttaactgaacttcagtagatactttttgccttgtgtgcctcggtgcaggggacggtca

SEQ ID NO: 102790 - DNA, 80 bp, synthetic construct
  source 1..80: mol_type = other DNA
taacaatattatcaaccgtgcaccttaactgatcaaagtactctgatgccccaccatctaatagaacttcatccaagtca

SEQ ID NO: 102791 - DNA, 80 bp, synthetic construct
  source 1..80: mol_type = other DNA
actctatttacatcaccgttcccttcttttgagcccaagacaaggttgctcattgcctgctgtatcttgtagtcataatc

SEQ ID NO: 102792 - DNA, 80 bp, synthetic construct
  source 1..80: mol_type = other DNA
tgtcctcaggagctccttcgggttcaaatagctcagaacatgtccttcccttcaatctgaaactgcccctgcttgattgt

SEQ ID NO: 102793 - DNA, 80 bp, synthetic construct
  source 1..80: mol_type = other DNA
agcagcgatgtcttcttccatagtcaactgtgatccttaagctaaggtgaggctcgtctttgtataaagagtcacctgat

SEQ ID NO: 102794 - DNA, 80 bp, synthetic construct
  source 1..80: mol_type = other DNA
ataaagagtcacctgatcaatggtgtttcacacaggcttttccacaattgagagtcaatatgcctaggatcctcggtgcg

SEQ ID NO: 102795 - DNA, 80 bp, synthetic construct
  source 1..80: mol_type = other DNA
gtccagaatgggcaacaagcaggccaagccaactgaggccaatgaacaaagggcccatgtgataccggatgcatcccatc

SEQ ID NO: 102796 - DNA, 80 bp, synthetic construct
  source 1..80: mol_type = other DNA
gcgcaccggggatcctaggcatttaggattgcgcttttaaatagactctgtgtgtaaaaaacaaatcacatcaagtcatg

SEQ ID NO: 102797 - DNA, 80 bp, synthetic construct
  source 1..80: mol_type = other DNA
gactgtgtccaaaggaatgactttacctcctttgaggcactcatccttgtcggctcaccctaaggtttgctggctgaaaa

SEQ ID NO: 102798 - DNA, 80 bp, synthetic construct
  source 1..80: mol_type = other DNA
caaaccaagaagagtcattcttataagtgggtcctgacaaaaccagcctccaacaatctggcaaaacacatgagttaaca

SEQ ID NO: 102799 - DNA, 80 bp, synthetic construct
  source 1..80: mol_type = other DNA
atgcttgaaaaatgccagtggctttgaatccttaggctctcctaggacccatgctccgagttctattgcagtagataacg

SEQ ID NO: 102800 - DNA, 80 bp, synthetic construct
  source 1..80: mol_type = other DNA
cattcacccctaaccttcagggggaccctccaaacctgcaccccatgattgtttgtgaacatctcaatatctttaatacc

SEQ ID NO: 102801 - DNA, 80 bp, synthetic construct
  source 1..80: mol_type = other DNA
agctattgatgaaataattgaccttatgtagagattctctttattcggtcctctaacacacttgctacctaacgttctgc

SEQ ID NO: 102802 - DNA, 80 bp, synthetic construct
  source 1..80: mol_type = other DNA
cctggccatgagcatggtgaagttttgatcaaacattgatatttggtcatcactggaggtgtatgcatcaattgatccgt

SEQ ID NO: 102803 - DNA, 80 bp, synthetic construct
  source 1..80: mol_type = other DNA
gcaccccaggtcgaacaaattggccctacaaatcctccaccatacagtccctaacccatcccgaacaacaacacaccaga

SEQ ID NO: 102804 - DNA, 80 bp, synthetic construct
  source 1..80: mol_type = other DNA
ctccagatcacccattagaggggcaccatcacctttcatatgtgaaggtgacttgactggctccttgtattgatctatta

SEQ ID NO: 102805 - DNA, 80 bp, synthetic construct
  source 1..80: mol_type = other DNA
tcttttcaattgtccccctcaattcatcgaaatattcagatgcccctccatcaagaagggcttcatccagatcagtgctg

SEQ ID NO: 102806 - DNA, 80 bp, synthetic construct
  source 1..80: mol_type = other DNA
tcaatatcagtagtgcgagctttgggacctaatactaaattgctcattgcctgttgtatcttgtactcataatcctgctt

SEQ ID NO: 102807 - DNA, 80 bp, synthetic construct
  source 1..80: mol_type = other DNA
tgttactcaatgtcttcaacacctcccacctcctctagcaactcctcacatgtcctgcccttgagcctcagcctcccacc

SEQ ID NO: 102808 - DNA, 80 bp, synthetic construct
  source 1..80: mol_type = other DNA
ttaacagtgctctaatgagtctatagagtaaaaactcaacttctgtgatcagcctttccttaagtttctggatcagctct

SEQ ID NO: 102809 - DNA, 80 bp, synthetic construct
  source 1..80: mol_type = other DNA
ttgtgataaaaatcggagacataagccatcacaaagtaccttaaattttggagaagcttttgactgcgtttacttggatg

SEQ ID NO: 102810 - DNA, 80 bp, synthetic construct
  source 1..80: mol_type = other DNA
tgaaaattttctccgtctagagtaaaatcctgactgtatgcctctttgcactttaccacttgatatctagccgctccaaa

SEQ ID NO: 102811 - DNA, 80 bp, synthetic construct
  source 1..80: mol_type = other DNA
actcgactgtatcataattttccctttggatttgctgtaacataaagcatatcccctaaattctacccattcatctattg

SEQ ID NO: 102812 - DNA, 80 bp, synthetic construct
  source 1..80: mol_type = other DNA
aggtcaactgagtccataacatcaaccgtacccattggataaggaaacttctcttcctcagatttctgataactgatggt

SEQ ID NO: 102813 - DNA, 80 bp, synthetic construct
  source 1..80: mol_type = other DNA
aggggtgatcccggagacatcaaagcttaaaacatcatcataggtttgaagagtgattatgtccatatcaatgccatagt

SEQ ID NO: 102814 - DNA, 80 bp, synthetic construct
  source 1..80: mol_type = other DNA
ttcttgtccaaacaagggaaaggagtagttatatggggcttggaaacttctactctacaccttctctctaaccacttctt

SEQ ID NO: 102815 - DNA, 80 bp, synthetic construct
  source 1..80: mol_type = other DNA
tagtatttaagatccttaatgatttaaccttattcaggaatgatctccagcattgcatctgatcatcagtagttacaaca

SEQ ID NO: 102816 - DNA, 80 bp, synthetic construct
  source 1..80: mol_type = other DNA
agaggctatgtcctcctccatgactcctgagagctcccaggggattccaggaaacggaagtcaaaagtagttcacagaat

SEQ ID NO: 102817 - DNA, 80 bp, synthetic construct
  source 1..80: mol_type = other DNA
gctcccaggggattccaggaaacggaagtcaaaagtagttcacagaatagaacaccaaaatgcctaggatcctcggtgcg

SEQ ID NO: 102818 - DNA, 80 bp, synthetic construct
  source 1..80: mol_type = other DNA
aactttgagtttcagtctatccgccaccatagcagtcaacgctccaaccatcagatcatgagaactatcatcaatctctt

SEQ ID NO: 102819 - DNA, 80 bp, synthetic construct
  source 1..80: mol_type = other DNA
ttacaaagatctcaagatcttgatcttgaataacaggtgtaaatgctgccagttttctgtcacactcccaaagagctccc

SEQ ID NO: 102820 - DNA, 80 bp, synthetic construct
  source 1..80: mol_type = other DNA
atctacgacaattttgatgggggtaacagggccgagctcccttgagtctaccaaaaactccttgatgacttcagtgtcga

SEQ ID NO: 102821 - DNA, 80 bp, synthetic construct
  source 1..80: mol_type = other DNA
cgcaccggggatcctaggcatttaggattgcgcatttttgaaaaccttattgggaattcatacgatcaggatgggacaaa

SEQ ID NO: 102822 - DNA, 80 bp, synthetic construct
  source 1..80: mol_type = other DNA
catacagctgatcaacaaggcagttaatgctctgataaacgatcagctgatcatgaagaatcatttgagggacatcatgg

SEQ ID NO: 102823 - DNA, 80 bp, synthetic construct
  source 1..80: mol_type = other DNA
aaatgttgcaaaaagaatacctggacagacaaggaaagaccccattaggattggtagatctttttgtctttagtacaagt

SEQ ID NO: 102824 - DNA, 80 bp, synthetic construct
  source 1..80: mol_type = other DNA
ttttacttaatcagtattttcctccatctgatcaaaataccaacccatagacacattgtggggaagccttgccccaaacc

SEQ ID NO: 102825 - DNA, 80 bp, synthetic construct
  source 1..80: mol_type = other DNA
atcctgaaaggactctacaacattgctacatgtggtttgataggccttgtcacattcctcctactttctggaaggtcatg

SEQ ID NO: 102826 - DNA, 80 bp, synthetic construct
  source 1..80: mol_type = other DNA
ggactgcatcatgtttgatgctgcagtctcaggaggagttgatgcaaaggtcctgagggctgtccttcccagagatatgg

SEQ ID NO: 102827 - DNA, 80 bp, synthetic construct
  source 1..80: mol_type = other DNA
tcccacacagcattctcaaattttcttgagtccaccttactgagagaaatgtcaatcagttttatatctctcctcccctg

SEQ ID NO: 102828 - DNA, 80 bp, synthetic construct
  source 1..80: mol_type = other DNA
tgttcctaggaagagcctctatcactgcacttgttaaccctggctgtgtagcaaacaaatctgttatatcaataccgtgt

SEQ ID NO: 102829 - DNA, 80 bp, synthetic construct
  source 1..80: mol_type = other DNA
gaatattttgcatcctgtttaaactgcttcaagtctgttggttccctgaagaagtgtatgtagcagcctgaacttggttg

SEQ ID NO: 102830 - DNA, 80 bp, synthetic construct
  source 1..80: mol_type = other DNA
gcatcaaggacttcaattgtgggaagagcttgggagaacactgtggttgatctagagtcggacaacaaatcgcaaaagac

SEQ ID NO: 102831 - DNA, 80 bp, synthetic construct
  source 1..80: mol_type = other DNA
ttcaatgacctacaaaggagtttatgaactacagaccattgaactggacatgaacactctgaatatgactatgccgctat

SEQ ID NO: 102832 - DNA, 80 bp, synthetic construct
  source 1..80: mol_type = other DNA
agatgaacattcccagacttctcttgactttcaagattgactttaagatgccatccatggtttgaggtgagacctttata

SEQ ID NO: 102833 - DNA, 80 bp, synthetic construct
  source 1..80: mol_type = other DNA
gtctccagcatattgcctccatcaagcatgcaggcccctgccttgacggcggctcccaaactaaaattgtaaccagagat

SEQ ID NO: 102834 - DNA, 80 bp, synthetic construct
  source 1..80: mol_type = other DNA
caataccatcactagtggcattccttcccccattcccaccagtcatgccaatcatgttaaggagggctttcctctgatca

SEQ ID NO: 102835 - DNA, 80 bp, synthetic construct
  source 1..80: mol_type = other DNA
agttgctgtgaacttagattccccatgtagattcctgagctcaggggtctctctgtcctgacaacctttgacttcagttt

SEQ ID NO: 102836 - DNA, 80 bp, synthetic construct
  source 1..80: mol_type = other DNA
ttccaggtcagcagccaaaaccaatagatcgtctgaacttagggttccaaccctcaatacactcttttgttgagttgact

SEQ ID NO: 102837 - DNA, 80 bp, synthetic construct
  source 1..80: mol_type = other DNA
tattggagcaatagccagataattctcttctcagagactgagtccacaagaatgatttcacttctttggaagcactcatt

SEQ ID NO: 102838 - DNA, 80 bp, synthetic construct
  source 1..80: mol_type = other DNA
gttgtggtcactgtatgactgtcagagaatggcaggtccccaacacagttgttccacaagtatgaacagtgcaaagcgca

SEQ ID NO: 102839 - DNA, 80 bp, synthetic construct
  source 1..80: mol_type = other DNA
aatggcaggtccccaacacagttgttccacaagtatgaacagtgcaaagcgcaatccaatagcctaggatccactgtgcg

SEQ ID NO: 102840 - DNA, 80 bp, synthetic construct
  source 1..80: mol_type = other DNA
atagccaccactacattatggtaggaaatgagacagggcttgagctcaccttgaccaacactagcttgctcaatcataaa

SEQ ID NO: 102841 - DNA, 80 bp, synthetic construct
  source 1..80: mol_type = other DNA
ttctgcaacctatcagatgctcataagaaaaatctttatgatcacactctcatgagcattgtctccacattccatttgtc

SEQ ID NO: 102842 - DNA, 80 bp, synthetic construct
  source 1..80: mol_type = other DNA
caattgatgcagtaaaccattgtggcacagtggcaaacggtgtgctgcaaacatttatgaggatggcttggggaggtagt

SEQ ID NO: 102843 - DNA, 80 bp, synthetic construct
  source 1..80: mol_type = other DNA
ttgtgacattcttccaggaagtccctcatgttatcgaggaagtgatgaacatcgtcctcatagcattgtcaattttggca

SEQ ID NO: 102844 - DNA, 80 bp, synthetic construct
  source 1..80: mol_type = other DNA
agtagaagactactaggaacgtttacttggacactctctgactcagaaggaaatgagacaccaggaggttactgtctcac

SEQ ID NO: 102845 - DNA, 80 bp, synthetic construct
  source 1..80: mol_type = other DNA
gaagagttttgtgacatgctaaggttatttgacttcaataagcaagctataaggaggttaaaggcagaggcccaaatgag

SEQ ID NO: 102846 - DNA, 80 bp, synthetic construct
  source 1..80: mol_type = other DNA
attgcagtgacttatttgaacccccattcccggtcttttgcgatttgttgtccgactctagatcaaccacagtgttctcc

SEQ ID NO: 102847 - DNA, 80 bp, synthetic construct
  source 1..80: mol_type = other DNA
cgcaccggggatcctaggcaattttgtatgccaatactgtgtgctttccattgagctagaaacagttcatcaatatgggt

SEQ ID NO: 102848 - DNA, 80 bp, synthetic construct
  source 1..80: mol_type = other DNA
aaaccagggagagccacttttataagtgggaccagacagaactagtctccaacaatctggcagaacacatgagttgacag

SEQ ID NO: 102849 - DNA, 80 bp, synthetic construct
  source 1..80: mol_type = other DNA
aaccggaatacattgcattcacatcatcaataatatacttcccctgttgtgtcattgatccaacaaattcaaggtggatg

SEQ ID NO: 102850 - DNA, 80 bp, synthetic construct
  source 1..80: mol_type = other DNA
gagaaactttccttaaaacttgcatcctgactcttaatctgaaacctaactgtctgattcaaccttactgacccaggcga

SEQ ID NO: 102851 - DNA, 80 bp, synthetic construct
  source 1..80: mol_type = other DNA
gagagatcctaaggattcaagaaaatcttccagggactctaatctaacatcaaccaatcctgaagctattaattggtttt

SEQ ID NO: 102852 - DNA, 80 bp, synthetic construct
  source 1..80: mol_type = other DNA
catgtttaaacattggtctctcaatacctttatggattgctttctctacaaatgaggaaaaaggtcccagtctctgaagg

SEQ ID NO: 102853 - DNA, 80 bp, synthetic construct
  source 1..80: mol_type = other DNA
ccttctccttctgggatagatgtcttatgagggaaccatgtgaaggaccccaaagtccgtgttgttgcaacaaatgatct

SEQ ID NO: 102854 - DNA, 80 bp, synthetic construct
  source 1..80: mol_type = other DNA
ttatgtatgactcaaagtaaatttgtctcataaagttatcaactgcatcactagtgctgacaaccctctcctctaccatt

SEQ ID NO: 102855 - DNA, 80 bp, synthetic construct
  source 1..80: mol_type = other DNA
attctgtaagagctgctggtttgagaacaagggcctagtagagtgcaacaatcactatctatgcctgaactgcctttcac

SEQ ID NO: 102856 - DNA, 80 bp, synthetic construct
  source 1..80: mol_type = other DNA
cacgtttccattttacaacatgtgatacaagagacaacgcttcacaattaacatctagtgccacacagagatccaggaac

SEQ ID NO: 102857 - DNA, 80 bp, synthetic construct
  source 1..80: mol_type = other DNA
ttaattctcggagaccacttcatcttcgtagaagccaaatcgctcataaatggcaatatgtgcttctcaaacattgtggg

SEQ ID NO: 102858 - DNA, 80 bp, synthetic construct
  source 1..80: mol_type = other DNA
gaaagtaatcacaagggttgtgtttgaaaaatgttagtggctttgaatccttgggctctcccagaacccatgctcctaat

SEQ ID NO: 102859 - DNA, 80 bp, synthetic construct
  source 1..80: mol_type = other DNA
tctattgcagtagataatgaaatgcacatatagtcccacaataaaggtctaaagtatgccaagacaccctcacctctatt

SEQ ID NO: 102860 - DNA, 80 bp, synthetic construct
  source 1..80: mol_type = other DNA
cctaacctctagaggaaccctccagaactgcactccatgactacttgtcagcatttcaatatctttgatattggttattg

SEQ ID NO: 102861 - DNA, 80 bp, synthetic construct
  source 1..80: mol_type = other DNA
atgaaattattgattttatataaagagtctctttattcggtcccctgacacacttgctgcccaacgttctgcatagcccc

SEQ ID NO: 102862 - DNA, 80 bp, synthetic construct
  source 1..80: mol_type = other DNA
acaaatccagaagctatggagctttgaaatgcagatttatttatggcttctgagagcagcttctgtgcacctctcgtaaa

SEQ ID NO: 102863 - DNA, 80 bp, synthetic construct
  source 1..80: mol_type = other DNA
ggttgatgacaacttgttctgaattgtcttgacaacagttgggattttttcctcatcaaggttaacagcacctgaataaa

SEQ ID NO: 102864 - DNA, 80 bp, synthetic construct
  source 1..80: mol_type = other DNA
tgcttctgtccgtcagcaacaggtgccccatctgcaagatgcctctccccacaaaactgagggcatcaaccaacccaaca

SEQ ID NO: 102865 - DNA, 80 bp, synthetic construct
  source 1..80: mol_type = other DNA
tgactttctgtcgaagtaccattctcagtgggtggtgagcagctaaattcagccaacagagttccaagtcagcttctgat

SEQ ID NO: 102866 - DNA, 80 bp, synthetic construct
  source 1..80: mol_type = other DNA
ggggactctacacccagcatctcactaaggtttcttaaggatgttaggtgctcacctgacaaataattggttgtaaattc

SEQ ID NO: 102867 - DNA, 80 bp, synthetic construct
  source 1..80: mol_type = other DNA
ctcatgcaactcacctgtttttagtttattaaacaaccttctcaacatagatctcattctacggcatgattctggagcca

SEQ ID NO: 102868 - DNA, 80 bp, synthetic construct
  source 1..80: mol_type = other DNA
acttttcaatctgtctcatgattctgtatgagcgattcccatcaacccaatctctcacatcagtttcacaatttaggagg

SEQ ID NO: 102869 - DNA, 80 bp, synthetic construct
  source 1..80: mol_type = other DNA
aatgggtcaataggatacctagcgtattgtaagagggataatgtccttgactggatcaaattacataagtgaacaggcac

SEQ ID NO: 102870 - DNA, 80 bp, synthetic construct
  source 1..80: mol_type = other DNA
tccattggcaactgattgatcaattattgtgtctattgtttctgctagctggtgaggttctttgcattttatgttatgga

SEQ ID NO: 102871 - DNA, 80 bp, synthetic construct
  source 1..80: mol_type = other DNA
tttttggactcacaaacttgttgagctggtcactcatgtacaagtgaaattccaacagaactttgaattcttcaggatct

SEQ ID NO: 102872 - DNA, 80 bp, synthetic construct
  source 1..80: mol_type = other DNA
ctttccataagcatggtaaggttttgatcaaacaatgaaatctggtcatcactagaagtatatgcgtcaattgatccacc

SEQ ID NO: 102873 - DNA, 80 bp, synthetic construct
  source 1..80: mol_type = other DNA
acaaacacagctaatggcaaaatttatgaatctctcagaaatcaacgcataaaaatctgatgtgttgtgtaggatgccct

SEQ ID NO: 102874 - DNA, 80 bp, synthetic construct
  source 1..80: mol_type = other DNA
gcacctcaggctgaagaaaccaagcccacgaatcctccaccatacagcccctaacccatcccaagtgacaacacatcaga

SEQ ID NO: 102875 - DNA, 80 bp, synthetic construct
  source 1..80: mol_type = other DNA
gccccatgtcgaggatggaactgatgtgagaaggcacctggccaacttgaaagtttgaatagaaaaaatcttcagtcaca

SEQ ID NO: 102876 - DNA, 80 bp, synthetic construct
  source 1..80: mol_type = other DNA
gtctgtgatgtactctttcttaaacccaattgagcttttatgtaggatttcatcatggctgaaacaacattaaaaggtat

SEQ ID NO: 102877 - DNA, 80 bp, synthetic construct
  source 1..80: mol_type = other DNA
ctcaaccatcttgtgcatatgccatgttagtaaagttgagagataatcacgtcccttgatatctgcttgcagatcctttg

SEQ ID NO: 102878 - DNA, 80 bp, synthetic construct
  source 1..80: mol_type = other DNA
acatgaatactaggttttgcagaactgcaagaaataaaaatggacacatcattggaccccacttgctgtgatccatacta

SEQ ID NO: 102879 - DNA, 80 bp, synthetic construct
  source 1..80: mol_type = other DNA
taagagacatgcgctagagatacattcaacttcattgaaagtattgcattctcaaattctttctcactatttaaacagct

SEQ ID NO: 102880 - DNA, 80 bp, synthetic construct
  source 1..80: mol_type = other DNA
cccagacaattgcagagtcaatgcttcaaaataatcttcgattagtctggtaaacatttttgtcctgaggtccccgatgt

SEQ ID NO: 102881 - DNA, 80 bp, synthetic construct
  source 1..80: mol_type = other DNA
atagctctctattgccgccaacctgctccttataggacaaggagaactttagcctgcctgtatctggcccaattgaattg

SEQ ID NO: 102882 - DNA, 80 bp, synthetic construct
  source 1..80: mol_type = other DNA
taagactgtggtgattcctgactatagaagcataaattcttcaacattgcagtggtgcagtttgtcaaagataaggcctt

SEQ ID NO: 102883 - DNA, 80 bp, synthetic construct
  source 1..80: mol_type = other DNA
acttagtgcctctgagttactctccctctcactaatcctggcgtcctcagagagtctattcgtatcaaatttaaaattca

SEQ ID NO: 102884 - DNA, 80 bp, synthetic construct
  source 1..80: mol_type = other DNA
aacatttagacttgtaatgagaatacctccccattagtttattgccgttcatcaacaacattattgatttgaaacattgg

SEQ ID NO: 102885 - DNA, 80 bp, synthetic construct
  source 1..80: mol_type = other DNA
ccctctcctcaccccccgacaccccccggggggaccccccgccggaggcccccccggaggagccacgccaagttcactac

SEQ ID NO: 102886 - DNA, 80 bp, synthetic construct
  source 1..80: mol_type = other DNA
aaatactcagaatcaaggtatgttcttgtagccactgccttagtgagctctccaataggacaacctgtcataggtccaca

SEQ ID NO: 102887 - DNA, 80 bp, synthetic construct
  source 1..80: mol_type = other DNA
atagaaatatctttcctttagttcagggtcattgtaagtggtatcacaaaactctttgtaaaagtcttctggtaagatct

SEQ ID NO: 102888 - DNA, 80 bp, synthetic construct
  source 1..80: mol_type = other DNA
cataatcaaagtcctcaaccatgtggtttgacagctcactcttaatcagcctaatatgaaatttgttggatatgatcttc

SEQ ID NO: 102889 - DNA, 80 bp, synthetic construct
  source 1..80: mol_type = other DNA
tccaagtcacccatcagagagatactgtcgcccctcacatgtggggatgacctagctggctctctatactgattcacaat

SEQ ID NO: 102890 - DNA, 80 bp, synthetic construct
  source 1..80: mol_type = other DNA
cttctcaactgtctctctcagttgatcaaaatactctgatgctcctccgtcaagaagagtttcatccaactcagtattgt

SEQ ID NO: 102891 - DNA, 80 bp, synthetic construct
  source 1..80: mol_type = other DNA
caacatcagtagtggactttttggaacccaatactaaattgctcatcgcttgctgaaccttatattcataatcttgccta

SEQ ID NO: 102892 - DNA, 80 bp, synthetic construct
  source 1..80: mol_type = other DNA
ccccccgggggagccacgccaagttcactactcaatatcctcaacattgtccatcccctccagcaactcttcacacattc

SEQ ID NO: 102893 - DNA, 80 bp, synthetic construct
  source 1..80: mol_type = other DNA
ttgagtagatgtttaccctttcgtgaaaacgtctcagtcaactgtgtgacagccaatgcagtaagtttgttgaaatcata

SEQ ID NO: 102894 - DNA, 80 bp, synthetic construct
  source 1..80: mol_type = other DNA
gtttagcactcttgagccatctgtgtacttattgacaacaacacttttattactagctaaatccagagctgttgcacatc

SEQ ID NO: 102895 - DNA, 80 bp, synthetic construct
  source 1..80: mol_type = other DNA
cacttgtgatgagaggatctttcatttcttttcttatctccttttctttaaaaagagaaccattattgaaagaagatgtg

SEQ ID NO: 102896 - DNA, 80 bp, synthetic construct
  source 1..80: mol_type = other DNA
agtaaagatagaaactttttagaaacacctggttccttgtaactcattttttccaggtcagtgcatcctttcttactcaa

SEQ ID NO: 102897 - DNA, 80 bp, synthetic construct
  source 1..80: mol_type = other DNA
tcaatatcctcaacattgtccatcccctccagcaactcttcacacattctacctttgagcctcagtctcccaccgcttga

SEQ ID NO: 102898 - DNA, 80 bp, synthetic construct
  source 1..80: mol_type = other DNA
aaacttttttgcattgtaagtcatatcatccatttcatctctagtggctagatctgaggggttaacagtaacatgaccaa

SEQ ID NO: 102899 - DNA, 80 bp, synthetic construct
  source 1..80: mol_type = other DNA
aatctaacttcggttcaaggaatttttcaaagcatttgatttggtctgttaatcgatcaggagtttcctttgtaatgaag

SEQ ID NO: 102900 - DNA, 80 bp, synthetic construct
  source 1..80: mol_type = other DNA
tggcacatataagaaacatttaaaataaacttaaacctgttagtcaacatgctttttacgtccttgtgtaacattatgtt

SEQ ID NO: 102901 - DNA, 80 bp, synthetic construct
  source 1..80: mol_type = other DNA
tagcaatgctctaacaagtctatagaccaaaaactctacttctgtgattaatctttcttttagtttctggattaactccc

SEQ ID NO: 102902 - DNA, 80 bp, synthetic construct
  source 1..80: mol_type = other DNA
tgtgataaaagtcggaaacataggccatcacaaaatacctcaaattctgaagaagcttctgactgcgtttgcttggatgt

SEQ ID NO: 102903 - DNA, 80 bp, synthetic construct
  source 1..80: mol_type = other DNA
gctagaattagggttaagatcatcttagtcagagatttaatgttaaccatctgatctgccagttcagtgcactctccaat

SEQ ID NO: 102904 - DNA, 80 bp, synthetic construct
  source 1..80: mol_type = other DNA
ccaactgaccataatatccacagttgactgcaaaacctcagctgaaaatattgcaggaaagtacctctttgggtctgcat

SEQ ID NO: 102905 - DNA, 80 bp, synthetic construct
  source 1..80: mol_type = other DNA
aaaaagagcagacttcaccaaccaaattgttgtttatagcgtaacatttagaacactctcctgttttctggtaaagtagc

SEQ ID NO: 102906 - DNA, 80 bp, synthetic construct
  source 1..80: mol_type = other DNA
tgaaaattctccccatccaaggtaaagtcttgactgtatgcctctttacatctcaccacctggtatctagctaccccgaa

SEQ ID NO: 102907 - DNA, 80 bp, synthetic construct
  source 1..80: mol_type = other DNA
ttcattttgtcttatcttcacggtcgatgaggttttcatggagttgatcaaagctagactgagtgatgataatctctcca

SEQ ID NO: 102908 - DNA, 80 bp, synthetic construct
  source 1..80: mol_type = other DNA
ctgtatcatgatttttccttttgacttactgaagcacaaggcatatcccttaaactccacccattcatctattgatctta

SEQ ID NO: 102909 - DNA, 80 bp, synthetic construct
  source 1..80: mol_type = other DNA
aatcaattgaactcataatatcaattgttcccattgggtaaggaaacttttcttcatcagatttctggtaactaattgtg

SEQ ID NO: 102910 - DNA, 80 bp, synthetic construct
  source 1..80: mol_type = other DNA
ggggtgatcccagagacatcaaaacctaagacatcatcataggcttgaggggtaattacttccatatcaacgccgtaatg

SEQ ID NO: 102911 - DNA, 80 bp, synthetic construct
  source 1..80: mol_type = other DNA
gctcacatctatgccaacgtcagctaaagcagaagtagctttcttaatggtcttttggataactgctttcaaaatctgat

SEQ ID NO: 102912 - DNA, 80 bp, synthetic construct
  source 1..80: mol_type = other DNA
ttttatctagacaagggaatgagcccgtcatgtgaggcttggaaacttctgtcttacacctcctctccatccatttcttc

SEQ ID NO: 102913 - DNA, 80 bp, synthetic construct
  source 1..80: mol_type = other DNA
agatctttctttgttgactctagagagaccagccgatcatttacgctaacaaaactggaccctaaccagcctttcggatt

SEQ ID NO: 102914 - DNA, 80 bp, synthetic construct
  source 1..80: mol_type = other DNA
attgcatttattcattaaaaaatctcttctgcttgcaaggagtatcaagatgtcaaaaactaacattaattttcttctgg

SEQ ID NO: 102915 - DNA, 80 bp, synthetic construct
  source 1..80: mol_type = other DNA
tattcaagatcctcaatgatttgactttatttagaaatgacctccagcattgcatctgatcctcagtggtgacgatgtct

SEQ ID NO: 102916 - DNA, 80 bp, synthetic construct
  source 1..80: mol_type = other DNA
ttactgactctaccttcaatgtctgcatataagaacctcatgattggtgacactcttttgtattgataaattagacaatc

SEQ ID NO: 102917 - DNA, 80 bp, synthetic construct
  source 1..80: mol_type = other DNA
aattgtatctttttgagccacaacctcatctccatacaagttattaaacttttgcatcaaatcttcttgatcgaccttca

SEQ ID NO: 102918 - DNA, 80 bp, synthetic construct
  source 1..80: mol_type = other DNA
cgaactgactctctatctccccctgcctcattctgtttctgaaaacttgatattcttcttcaatttgtgtcttcacttca

SEQ ID NO: 102919 - DNA, 80 bp, synthetic construct
  source 1..80: mol_type = other DNA
atacatcattcaaaaccctcatagcatgaccaggtatcaccttctttaatgactggacaatatccacccctgaccattga

SEQ ID NO: 102920 - DNA, 80 bp, synthetic construct
  source 1..80: mol_type = other DNA
tgagctgacattttattactgacaccttgatgacaaagggtaataatctcgtcataatggctagcacgtttatctgtcaa

SEQ ID NO: 102921 - DNA, 80 bp, synthetic construct
  source 1..80: mol_type = other DNA
aatgttgatgctctccacaccagaaagcctaccagatgtcattgacaaagattcacagagtcttgaatactcagattcct

SEQ ID NO: 102922 - DNA, 80 bp, synthetic construct
  source 1..80: mol_type = other DNA
tattttagcagcgagaacaatgtttctctcaacttatcattcacccaatccggtatctgttcattatagaaggatgttcg

SEQ ID NO: 102923 - DNA, 80 bp, synthetic construct
  source 1..80: mol_type = other DNA
cccatcgataaggggaatgagattaatgtccacagtttttaagtcatcttttaactgctccaattttttgaaatcctcaa

SEQ ID NO: 102924 - DNA, 80 bp, synthetic construct
  source 1..80: mol_type = other DNA
tatacttctgctcaaagttaacagaggatgatcttacaaagcactcaagcaatatgaggatgttgcctgtcaatttgtat

SEQ ID NO: 102925 - DNA, 80 bp, synthetic construct
  source 1..80: mol_type = other DNA
atccatcaggaactacaaaacagagagctggtgtcaaaatcccgtgatcatggaggatactttcaacagatttgccttca

SEQ ID NO: 102926 - DNA, 80 bp, synthetic construct
  source 1..80: mol_type = other DNA
gtgttatgttcacatccattggcattgcaagaatctacctcaatgcaaagggacaagagcttcaaaccctccatcaaaag

SEQ ID NO: 102927 - DNA, 80 bp, synthetic construct
  source 1..80: mol_type = other DNA
tgtctgaacaaggaatgctaacttttgtcttgatagcttgtcatcgtccattaagtattttgagactaaatccttgacaa

SEQ ID NO: 102928 - DNA, 80 bp, synthetic construct
  source 1..80: mol_type = other DNA
aagctatgtcttcctccatgacttctgagattcttcagggaaacctcagcaaaaggatgttaaaagcagatcacaaaaca

SEQ ID NO: 102929 - DNA, 80 bp, synthetic construct
  source 1..80: mol_type = other DNA
tcttcagggaaacctcagcaaaaggatgttaaaagcagatcacaaaacagaacctcaaaatgcctaggatcctcggtgcg

SEQ ID NO: 102930 - DNA, 80 bp, synthetic construct
  source 1..80: mol_type = other DNA
actctgagtctcaacctatccattaccatagcagctagtgccccaaccatcaggtcatgagaactatcatcagcttctct

SEQ ID NO: 102931 - DNA, 80 bp, synthetic construct
  source 1..80: mol_type = other DNA
ggtaaacacaccaaaccaccaaaggaatccaacagccccagagcttctctaattcccgatgcaacacacatgggccctca

SEQ ID NO: 102932 - DNA, 80 bp, synthetic construct
  source 1..80: mol_type = other DNA
cacaaagacctcaaggtcttgatcctggatcacaggtgtgaatgtggccagtcttttgtcacactcccacagagcccccc

SEQ ID NO: 102933 - DNA, 80 bp, synthetic construct
  source 1..80: mol_type = other DNA
tattgacaaccaacggaactggctcaacgtgagggcccacctgcacaaaatcatattctgtgaactgcaatttatcaaca

SEQ ID NO: 102934 - DNA, 80 bp, synthetic construct
  source 1..80: mol_type = other DNA
tctacgataatttcaataggggtgactggaccgagttcctttgggtccaccaagaactctccaatgacttcagtatcaac

SEQ ID NO: 102935 - DNA, 80 bp, synthetic construct
  source 1..80: mol_type = other DNA
catgtgacctattatgagacaaccttaattcagacgataaaacgatataatgttcctcacgtttccattttacaacatgt

SEQ ID NO: 102936 - DNA, 80 bp, synthetic construct
  source 1..80: mol_type = other DNA
ggaaataaaaaactgctctttcaatatctccacaagcatgagggacagagtgcagagagaatatgctcttttgtataaac

SEQ ID NO: 102937 - DNA, 80 bp, synthetic construct
  source 1..80: mol_type = other DNA
caggccacgagccgagccagcagcagagggggtgggagcagtatctcgggatctggaaagacatggcgcaatcacaagta

SEQ ID NO: 102938 - DNA, 80 bp, synthetic construct
  source 1..80: mol_type = other DNA
tcagcaagccgagtcctgcgtcgagagtcttctctgtaagaaccagagaagactctcgacgcaggactcggcttgctgaa

SEQ ID NO: 102939 - DNA, 80 bp, synthetic construct
  source 1..80: mol_type = other DNA
ctggtaactagcgtctgttgtgtgactctggtaactaggtctgttgtgtgactctggtaactaggtctgttgtgtgactc

SEQ ID NO: 102940 - DNA, 80 bp, synthetic construct
  source 1..80: mol_type = other DNA
gacctaaaaaactgctcttttcatgtttccacagccagaacagataaactgcagaaagaatatgcattattttataagct

SEQ ID NO: 102941 - DNA, 80 bp, synthetic construct
  source 1..80: mol_type = other DNA
tgatgtaatacaaataggtaatgagacctgtaatagtactgatacccataatagtaatgatacctgtcatacctataggt

SEQ ID NO: 102942 - DNA, 80 bp, synthetic construct
  source 1..80: mol_type = other DNA
agggaagacctaaaaaactgctcttttcatgtttccacagccagaatagataaactgcagaaagaatatgcattatttca

SEQ ID NO: 102943 - DNA, 80 bp, synthetic construct
  source 1..80: mol_type = other DNA
ccaggaacagatggggagaggagaaataaagaactgcactttcaatgtctccataaacagaagaaataagatgacaagag

SEQ ID NO: 102944 - DNA, 80 bp, synthetic construct
  source 1..80: mol_type = other DNA
aacgagccttgttttatagtcttgatatagtaaaaatagatggggggaaaggtaatactaataccacatatgtactgaga

SEQ ID NO: 102945 - DNA, 80 bp, synthetic construct
  source 1..80: mol_type = other DNA
gggaaaggtaatactaataccacatatgtactgagaagttgtaacacctcagtcattacacaggcctgcccaaagatatc

SEQ ID NO: 102946 - DNA, 80 bp, synthetic construct
  source 1..80: mol_type = other DNA
catgcaacagtcgcacttacactacgtattgaatctgcagttcgtaaatcctcgcttgcgtatgcccataacactttatt

SEQ ID NO: 102947 - DNA, 80 bp, synthetic construct
  source 1..80: mol_type = other DNA
ggttcacaccggagataataaccagacccaaaataagaacccaagcaggcagaataaattattattggacactgttgggt

SEQ ID NO: 102948 - DNA, 80 bp, synthetic construct
  source 1..80: mol_type = other DNA
gggttgaaggtgaaaatccgtatgaaccaaaagaggtgactgcatcattgtgagaggttgagctgccgtcgtctgtctac

SEQ ID NO: 102949 - DNA, 80 bp, synthetic construct
  source 1..80: mol_type = other DNA
gcatgtatacaagcgaaacaggctttcactttctcgccaacttacaaggcctttctgagtaaacagtatatgaaccgttg

SEQ ID NO: 102950 - DNA, 80 bp, synthetic construct
  source 1..80: mol_type = other DNA
cttctcgtgttacaggcggtgtgtttcttgttgacaaaaatcctcacaataccacagagtctagactcgtggtggacttc

SEQ ID NO: 102951 - DNA, 80 bp, synthetic construct
  source 1..80: mol_type = other DNA
cccaaatatataggagtaaagagtttcaaactggcaattggtttaagaaatgtgcctgccaagtcaagcagagggctgtt

SEQ ID NO: 102952 - DNA, 80 bp, synthetic construct
  source 1..80: mol_type = other DNA
agtctatgtcctggaccgacgagtccccaagccaatcatcacaagacctccctttgagtctgtacctcccactcaccgtc

SEQ ID NO: 102953 - DNA, 80 bp, synthetic construct
  source 1..80: mol_type = other DNA
tccacctcatgttctttgaactctgatctgacataaacggtaagagctgctcctcgaaaatttgaggatataatctcctg

SEQ ID NO: 102954 - DNA, 80 bp, synthetic construct
  source 1..80: mol_type = other DNA
ccaatctggtacacacttcagtggcggtaacaagatggaccttgtgatgtgtaagtcttgaattataatgtttatctctg

SEQ ID NO: 102955 - DNA, 80 bp, synthetic construct
  source 1..80: mol_type = other DNA
aagcattcagttgttttggtgttgatttgacagtttcccttgccttaataggttctgccaacacccacacacctagctca

SEQ ID NO: 102956 - DNA, 80 bp, synthetic construct
  source 1..80: mol_type = other DNA
caccagagtataaaaacatgtcatcagtcttttggattttcgaaacatgggtgtctcgggataaatcctccaagaccttc

SEQ ID NO: 102957 - DNA, 80 bp, synthetic construct
  source 1..80: mol_type = other DNA
gttggcaaggtcacttagatcatcctctatgttaagaatatccgcaagctgaaggatagcctctctcttgtctctattga

SEQ ID NO: 102958 - DNA, 80 bp, synthetic construct
  source 1..80: mol_type = other DNA
ctcattaccttcgtctcttctgggcataaatcctcaattagcctttgaattctgtaacctctagatccatctagccagtc

SEQ ID NO: 102959 - DNA, 80 bp, synthetic construct
  source 1..80: mol_type = other DNA
aattcaccaggtgctcacctgtcctgaacctgtgcagaaagagggttccgagcacctcatcaacccttgtatagccctcc

SEQ ID NO: 102960 - DNA, 80 bp, synthetic construct
  source 1..80: mol_type = other DNA
ccgtgtgggcattcaataagaagggatctaaaggaaaattcgcatacttcaagagatctagtgttctcctctgaatacag

SEQ ID NO: 102961 - DNA, 80 bp, synthetic construct
  source 1..80: mol_type = other DNA
aattcagctaacatgaccttaaggtctttggtctccaagttaaccaaaatgttttgaacaaaatttctgccttcaaaaaa

SEQ ID NO: 102962 - DNA, 80 bp, synthetic construct
  source 1..80: mol_type = other DNA
caacggagagagctccacactcccttcaacagcctcacagatgaatttcatgtcatcaagtgataggcaggttgggtcaa

SEQ ID NO: 102963 - DNA, 80 bp, synthetic construct
  source 1..80: mol_type = other DNA
aatcctccactaaatggtatgagatttccgacagaatgatcttcctcaggtgggaccacttccctgtcaagactgtctgc

SEQ ID NO: 102964 - DNA, 80 bp, synthetic construct
  source 1..80: mol_type = other DNA
ggcaccacatttcacagtcaagggcacaggctcccactctggcccaaccctattgaagtcaaaagacttggcgtcactca

SEQ ID NO: 102965 - DNA, 80 bp, synthetic construct
  source 1..80: mol_type = other DNA
agatgatgcagacctttggctcttttgccccctcccaactctcctccttgatcaacagcagccctctccccataatgaga

SEQ ID NO: 102966 - DNA, 80 bp, synthetic construct
  source 1..80: mol_type = other DNA
gattgttgactttattttattttccatctctttaaagaaaattgtctcctcttctccctcaaagtaagtgtcacccatac

SEQ ID NO: 102967 - DNA, 80 bp, synthetic construct
  source 1..80: mol_type = other DNA
tagcttctgtgtccttgtcacgcttcttctctgtaccaagaactaacctagacactaacttagatactttgtattcataa

SEQ ID NO: 102968 - DNA, 80 bp, synthetic construct
  source 1..80: mol_type = other DNA
ctcccctttgtggattaatgtaccattgttgaaggaggagaccataggactaaagacctcaagattcacgcctaggatcc

SEQ ID NO: 102969 - DNA, 80 bp, synthetic construct
  source 1..80: mol_type = other DNA
cttcggatcttatgtcaaaaatgccatccctagctttaaagataggatctgttctcagtaagttgagacactcatctaat

SEQ ID NO: 102970 - DNA, 80 bp, synthetic construct
  source 1..80: mol_type = other DNA
agtcttctgtccacctcacccttgaataagtaagtgcatgacaaaaactcagcaaccccagggtcaagtaacctgcatac

SEQ ID NO: 102971 - DNA, 80 bp, synthetic construct
  source 1..80: mol_type = other DNA
cactgtgaacattaatgaaaactttcttaaatgctctgtgttgttctgattatgtgtgaagtcaacagtcaatgtaaatt

SEQ ID NO: 102972 - DNA, 80 bp, synthetic construct
  source 1..80: mol_type = other DNA
aataggccttttgtgtaatcaaggatatactcccacatgtctctcagtgtcttgaatgtcttggggtttgtcatgccctg

SEQ ID NO: 102973 - DNA, 80 bp, synthetic construct
  source 1..80: mol_type = other DNA
ctttattagcactgctgcgttgcaaaccacatctcccagccggtaagagaaccacccatacccaaactgcaaatcagtct

SEQ ID NO: 102974 - DNA, 80 bp, synthetic construct
  source 1..80: mol_type = other DNA
cccttaaaagtgggtcccgacaacaccaacctccaacaatctgttaagacacatggactcactgcaccagaatacataac

SEQ ID NO: 102975 - DNA, 80 bp, synthetic construct
  source 1..80: mol_type = other DNA
taatctctggtgttcagagaattgaattattgaccaattccagtggtgttcagtattggagagtcccactagaccttaaa

SEQ ID NO: 102976 - DNA, 80 bp, synthetic construct
  source 1..80: mol_type = other DNA
ccagatcattaattgaaggctgattattgccatcagggtctgagctcggtttgacaggttgcctatactcatcaacaatt

SEQ ID NO: 102977 - DNA, 80 bp, synthetic construct
  source 1..80: mol_type = other DNA
actcaaaaacttttttgcattgtaaaccatatcatccaactcgtcccttgttgctgtatcctcagggttgacactcacat

SEQ ID NO: 102978 - DNA, 80 bp, synthetic construct
  source 1..80: mol_type = other DNA
tcagacaggaccagattaattaatgatctgatcaatctatagagtaaaaactcaacatcagtgatcaactcttccctcac

SEQ ID NO: 102979 - DNA, 80 bp, synthetic construct
  source 1..80: mol_type = other DNA
gatggaacaatcagcaatttatggtcaacaattaaagacaattaaaattgatatccttaatgcctaggatcctcggtgcg

SEQ ID NO: 102980 - DNA, 80 bp, synthetic construct
  source 1..80: mol_type = other DNA
agactctcaccaccccatctcttccagtccgggtcccttgattaccaccactcatacctatcatgtccaggagagctcgt

SEQ ID NO: 102981 - DNA, 80 bp, synthetic construct
  source 1..80: mol_type = other DNA
tgagtcatggcagcatcaaaagtgcagtcagccattgtggcacagttgcaaacggcgtcttgcagacctttatgaggatg

SEQ ID NO: 102982 - DNA, 80 bp, synthetic construct
  source 1..80: mol_type = other DNA
taactcaaagcgtagtggatgggactgcatcatgactagctatgcatatttaataattcagaacacaacctgggaggacc

SEQ ID NO: 102983 - DNA, 80 bp, synthetic construct
  source 1..80: mol_type = other DNA
cgcaccggggatcctaggcaatttggttgttcctttttgaactttatttactgcattccaccaaatggggaacaagcaag

SEQ ID NO: 102984 - DNA, 80 bp, synthetic construct
  source 1..80: mol_type = other DNA
cgttgatgacttcagtgtcgataaacaacgctgatttacccctaaaagtgggtcctgacaaaaccagcctccagcagtct

SEQ ID NO: 102985 - DNA, 80 bp, synthetic construct
  source 1..80: mol_type = other DNA
cccagtcgaagcagggggcaacaccaaacccccgccctacagcccctgagccagccaccaatcctcaccacccctctcac

SEQ ID NO: 102986 - DNA, 80 bp, synthetic construct
  source 1..80: mol_type = other DNA
tgagccagccaccaatcctcaccacccctctcaccgcccgacaccccccggtgggaccccccgccggaggccccgccggg

SEQ ID NO: 102987 - DNA, 80 bp, synthetic construct
  source 1..80: mol_type = other DNA
ctaaactcattagtcttcttattaatctgtagagtaagaactcaacatcagtgatcaattcttcctttactttgttgagt

SEQ ID NO: 102988 - DNA, 80 bp, synthetic construct
  source 1..80: mol_type = other DNA
aaagagcataacctttgaactccacccaattgtccactgcttcaagaactgcactcaagacttctgtcccatttggcatt

SEQ ID NO: 102989 - DNA, 80 bp, synthetic construct
  source 1..80: mol_type = other DNA
tttgatttttatctgaacattgtggagattgtgtggttttagatctttccgcctgttgcctccgctcaacccatttcttt

SEQ ID NO: 102990 - DNA, 80 bp, synthetic construct
  source 1..80: mol_type = other DNA
actttattttgtttaagaatgatctccaacactgaacctgatattctccagtggtctgatttcccctcctttccctttcc

SEQ ID NO: 102991 - DNA, 80 bp, synthetic construct
  source 1..80: mol_type = other DNA
ccaacctctttaccaatatttgcatacaaaaacctcaacattggtgaggctctcttaaactgatggatcaagtgttcaac

SEQ ID NO: 102992 - DNA, 80 bp, synthetic construct
  source 1..80: mol_type = other DNA
gcagccctcagtacggaaacaatatccactcctgaccactgcattcttagccccagcctatctatcatcatgccacttaa

SEQ ID NO: 102993 - DNA, 80 bp, synthetic construct
  source 1..80: mol_type = other DNA
tgtctagctgtgggtatggtggttgagactctcgggatatgtgatcaactggagtaaaacaatttaaaacaacttaaaat

SEQ ID NO: 102994 - DNA, 80 bp, synthetic construct
  source 1..80: mol_type = other DNA
cgggatatgtgatcaactggagtaaaacaatttaaaacaacttaaaatagatagccttaatgcctaggatcctcggtgcg

SEQ ID NO: 102995 - DNA, 80 bp, synthetic construct
  source 1..80: mol_type = other DNA
gagggtcatgagctgagaataagtaagcccagcagtgaaccctgtcgactgcaaggacttgttggagttgttgctccctg

SEQ ID NO: 102996 - DNA, 80 bp, synthetic construct
  source 1..80: mol_type = other DNA
ctttctgtggtctcccatctgactctagatcaacaacagtgttttcccatgcccttcctgttattgaggttcttgatgca

SEQ ID NO: 102997 - DNA, 80 bp, synthetic construct
  source 1..80: mol_type = other DNA
cacatcccaaaccctcaccaccccatctttcccaactcttgccccttgactaccacctctcatgcctatcatgtttagga

SEQ ID NO: 102998 - DNA, 80 bp, synthetic construct
  source 1..80: mol_type = other DNA
attggattgcgctttgctttgatcactttggcagacagtttcaactctctgctgtgcacatacaacacagcaacccgaca

SEQ ID NO: 102999 - DNA, 80 bp, synthetic construct
  source 1..80: mol_type = other DNA
tgtgatatgttaaggctatttgactttaacaaacaagccattcaaaggttgaaaattgaggcacaaacgagcattcagtt

SEQ ID NO: 103000 - DNA, 80 bp, synthetic construct
  source 1..80: mol_type = other DNA
gggtatcaacctgatcaacaaagcagtgaatgccttaataaatgatcaactaataatgaaaaaccatctacgggacataa

SEQ ID NO: 103001 - DNA, 80 bp, synthetic construct
  source 1..80: mol_type = other DNA
ccttataaagagtagttgtacaagacctaccacacagcagaagaaaggtgaccaagccaatgaggccacatgttgtaaca

SEQ ID NO: 103002 - DNA, 80 bp, synthetic construct
  source 1..80: mol_type = other DNA
tgttccgggggagtgcctctataacagcactagtcaagcctggctgtgcagcaaaaaggtctgcaacatcaattccatgt

SEQ ID NO: 103003 - DNA, 80 bp, synthetic construct
  source 1..80: mol_type = other DNA
cttgcccttgctttgtcaagcatgctagtgtcagacttggcatagttccaaactgattgttgagcaactctgcatttttc

SEQ ID NO: 103004 - DNA, 80 bp, synthetic construct
  source 1..80: mol_type = other DNA
ctagatcagcagctaacactaacaagtcatctgaggtcagagtcccaactctcagaatgctcctttgttgagttgacttc

SEQ ID NO: 103005 - DNA, 80 bp, synthetic construct
  source 1..80: mol_type = other DNA
tattggaacaatagcccgatagttcccttctcagagactgtgtccataagaaggaccttacctcctttgaagcactcatc

SEQ ID NO: 103006 - DNA, 80 bp, synthetic construct
  source 1..80: mol_type = other DNA
actcatcgctgagttgttgtgttgtatgtacacaacagaaggttgaagctatccactagaatagccaaagcaaagcgcaa

SEQ ID NO: 103007 - DNA, 80 bp, synthetic construct
  source 1..80: mol_type = other DNA
caggagatgcagccaaacactgtggcacagttgcaaatggtgttttacagactttcatgaggatggcctggggtggggca

SEQ ID NO: 103008 - DNA, 80 bp, synthetic construct
  source 1..80: mol_type = other DNA
tgactcaggtcacaatggatgggattgtatcatgaccagttatcaatacttgataattcagaacacaacctgggaagatc

SEQ ID NO: 103009 - DNA, 80 bp, synthetic construct
  source 1..80: mol_type = other DNA
gcaccggggatcctaggcaattggttgttgttctcctttgaggcctatcactttgaactccaacaaatggggaacaaaca

SEQ ID NO: 103010 - DNA, 80 bp, synthetic construct
  source 1..80: mol_type = other DNA
gtctgctgatttattgaaccagtgtattcaaggtggatggcgaaactttccttgaaactagcatcttgactctttatgcg

SEQ ID NO: 103011 - DNA, 80 bp, synthetic construct
  source 1..80: mol_type = other DNA
gaaaataatcacaagggttgtgcttaaaaaactccaatgccttaaccatcttgggttctcccaaaacccatgcacctaat

SEQ ID NO: 103012 - DNA, 80 bp, synthetic construct
  source 1..80: mol_type = other DNA
tctattgcagttgacaaggagatgcacatataatcccacaacaagggtctgaagtaactaatcacagtctcatttccatt

SEQ ID NO: 103013 - DNA, 80 bp, synthetic construct
  source 1..80: mol_type = other DNA
attcagacgggggctcgacatccagcaactcacataggtttcttagtgaggagatgtgctcactagacaagtagtttgtt

SEQ ID NO: 103014 - DNA, 80 bp, synthetic construct
  source 1..80: mol_type = other DNA
agataacttctacaaggaattttgtgatgccgtctatgagaatgatgagttgaaggggaagtacttttactgtggacaca

SEQ ID NO: 103015 - DNA, 80 bp, synthetic construct
  source 1..80: mol_type = other DNA
ttctcaacagtctccttcagctgattgaaatagacacttgcacctccatcaagcaaaatttcatctagatcagcttcacc

SEQ ID NO: 103016 - DNA, 80 bp, synthetic construct
  source 1..80: mol_type = other DNA
aacatcagctttatgttgttgagaccctagaactaaattgctcatagcctgttgcaccttatattcatagtcctgtttgt

SEQ ID NO: 103017 - DNA, 80 bp, synthetic construct
  source 1..80: mol_type = other DNA
taagaagatgttttcctttccttgaaaaaacttcagtgagctgtgacacggccaatgccgtgagcttattaaagtcatag

SEQ ID NO: 103018 - DNA, 80 bp, synthetic construct
  source 1..80: mol_type = other DNA
tttaatatcctagatccatctgtgtatttattaacaacaacactcttattactagctaaatctaaggctgtagcacaacc

SEQ ID NO: 103019 - DNA, 80 bp, synthetic construct
  source 1..80: mol_type = other DNA
actagtgataagggggtctctgatttccttcttcacctccctttccttgaatagtgaaccattattgaaagaggatgtga

SEQ ID NO: 103020 - DNA, 80 bp, synthetic construct
  source 1..80: mol_type = other DNA
gctcgtccctctcggttagttcctcacatgttctgcccttcaatctcaatttgccactactagactgcaccatcaccctc

SEQ ID NO: 103021 - DNA, 80 bp, synthetic construct
  source 1..80: mol_type = other DNA
tagggtgagctagaatcaagacaagaatcatctttgtcaaggacctaatgttgcttatttgtccttccagttcactacaa

SEQ ID NO: 103022 - DNA, 80 bp, synthetic construct
  source 1..80: mol_type = other DNA
tcttctatccaagaaatcatagtgctcactgttgtttgcaaaacttcagctgaaaatatggctggaaagtatcttttggg

SEQ ID NO: 103023 - DNA, 80 bp, synthetic construct
  source 1..80: mol_type = other DNA
tctctaggtcggtggttccctgtagttctacaccccccatgttatagggaaacttttcttcctctgacctttgataacta

SEQ ID NO: 103024 - DNA, 80 bp, synthetic construct
  source 1..80: mol_type = other DNA
attgtggggatgactccagagacattgaagtccatgattaaatcataactattagaacaaatcacttccatgttgatctt

SEQ ID NO: 103025 - DNA, 80 bp, synthetic construct
  source 1..80: mol_type = other DNA
atagtgatccacactgattccaacatccttcaaagcagtggtggctctcaaaatggttttctggaacattgagttgagga

SEQ ID NO: 103026 - DNA, 80 bp, synthetic construct
  source 1..80: mol_type = other DNA
tttcattcttgctcgagtactgagaagactgtatgttattagacttttcaacttgttgcctccgttcaacccatttctcc

SEQ ID NO: 103027 - DNA, 80 bp, synthetic construct
  source 1..80: mol_type = other DNA
aagtccctttttgttgactctaaggaaaccagtctatcattgacacttatgaaacaggatcctagccatcctcttaagca

SEQ ID NO: 103028 - DNA, 80 bp, synthetic construct
  source 1..80: mol_type = other DNA
attacttttcatctggtcatgcttacttgcaagaagaatcaatgcatcgaatattaataagagttttctccttgtattca

SEQ ID NO: 103029 - DNA, 80 bp, synthetic construct
  source 1..80: mol_type = other DNA
tttgactttgtttaggaatgatctccagcactgtgcttggcaatctccgatcatttgatctcctttcttgctatcctctt

SEQ ID NO: 103030 - DNA, 80 bp, synthetic construct
  source 1..80: mol_type = other DNA
catcaactgttgcatataaaaatcttaatattggtgacgctctcttgaattgataaatcaaatgttcgacattgtcttct

SEQ ID NO: 103031 - DNA, 80 bp, synthetic construct
  source 1..80: mol_type = other DNA
tatcagtgtataagttgttgaactcgttgagtaactgttccttttcaacccttaaaaactgactctccacttctcctttt

SEQ ID NO: 103032 - DNA, 80 bp, synthetic construct
  source 1..80: mol_type = other DNA
ttggtgacatgaggcgattacttcttcataatgattggaacgattgtctaataagacatttaaactctccacccctgaca

SEQ ID NO: 103033 - DNA, 80 bp, synthetic construct
  source 1..80: mol_type = other DNA
aatgagaaaagtgtatcccttagcttatcattaacccaatcgggtatttgctcattataaaatgatgttctcccatctat

SEQ ID NO: 103034 - DNA, 80 bp, synthetic construct
  source 1..80: mol_type = other DNA
tgtatttctgttcaaaattagcaggggaagatctaacaaaacattccaataatatcaaaacattgcctgtcaacttgtag

SEQ ID NO: 103035 - DNA, 80 bp, synthetic construct
  source 1..80: mol_type = other DNA
cgatgtccagccctgaccactgcatcctcaacccaagcctatccgacatcatgttacttaacgcctcagtcagtaggtca

SEQ ID NO: 103036 - DNA, 80 bp, synthetic construct
  source 1..80: mol_type = other DNA
ccgtctggtaccacaaagcacaatgaaggggtcaagaccccgtgatcgtggaggattctttccacagatctgtcctcact

SEQ ID NO: 103037 - DNA, 80 bp, synthetic construct
  source 1..80: mol_type = other DNA
aagctatgtcttcctccatgtttagtaatgggtgtgatgatcagagcttttggatatatagtcaattgaggtggcagttt

SEQ ID NO: 103038 - DNA, 80 bp, synthetic construct
  source 1..80: mol_type = other DNA
tatatagtcaattgaggtggcagtttactgtggcacaaaatcagatggaacaattagcaacttatggtcaacaattaaag

SEQ ID NO: 103039 - DNA, 80 bp, synthetic construct
  source 1..80: mol_type = other DNA
agtgaaagcttcagaaccaaagaacagcccaagagccagtctgattccagatgctacacacctagggccacaattctgta

SEQ ID NO: 103040 - DNA, 80 bp, synthetic construct
  source 1..80: mol_type = other DNA
tgtcacattcccatagaccccccctatatacaaccagtggaactggctcagcacaagggcccactaatacaaagtcatac

SEQ ID NO: 103041 - DNA, 80 bp, synthetic construct
  source 1..80: mol_type = other DNA
aggggtcacatgccctaattgatttgtgtcaaccaagaactcattgacaacctcagtgtcaacataccatgctgacctac

SEQ ID NO: 103042 - DNA, 80 bp, synthetic construct
  source 1..80: mol_type = other DNA
cacatcccaaaccctcaccactccatctctcccagcccgagctcctcgatcaccaccactcattcctatcatattcaaga

SEQ ID NO: 103043 - DNA, 80 bp, synthetic construct
  source 1..80: mol_type = other DNA
gagggtcatgagctgagaataagtgagcccagcagcgaatcctgccgattgtagggacttactggagttgttgctcccag

SEQ ID NO: 103044 - DNA, 80 bp, synthetic construct
  source 1..80: mol_type = other DNA
aaaccctcaccaccccgtctctcccagctccaaccctttgattactaccactcatgcctatcatatctaggagagctcgc

SEQ ID NO: 103045 - DNA, 80 bp, synthetic construct
  source 1..80: mol_type = other DNA
attggattgcgctttgcattaatcactttagcagacagtttcagctttctgcagtgtgcatataatataacaactcaaca

SEQ ID NO: 103046 - DNA, 80 bp, synthetic construct
  source 1..80: mol_type = other DNA
tgaaattcggtgccattcaaagagaactcttgacagtatgcttctttacatctgacaacctgatatcttgcaggcccaaa

SEQ ID NO: 103047 - DNA, 80 bp, synthetic construct
  source 1..80: mol_type = other DNA
tttgattcctgctcgagcactgggagggctgcaggacctttaacctttcggcttgctgcctccgttcgacccatttctcc

SEQ ID NO: 103048 - DNA, 80 bp, synthetic construct
  source 1..80: mol_type = other DNA
acttgactttatttaggaatgatctccagcactgcatctggcattctccagcaatttgatttccctttttactatcccgt

SEQ ID NO: 103049 - DNA, 80 bp, synthetic construct
  source 1..80: mol_type = other DNA
tcaccaacattcgcatatagaaatctcagtattggtgatgctctcttgaactgatgaatcaaatgctcaacattatcctt

SEQ ID NO: 103050 - DNA, 80 bp, synthetic construct
  source 1..80: mol_type = other DNA
tgcttggttgcaggtgaggtggtcacagttctcaaggtaaatggtcaactgaggtagtgatttgctgtaggacagggttt

SEQ ID NO: 103051 - DNA, 80 bp, synthetic construct
  source 1..80: mol_type = other DNA
cataaaggcaggtgagaacaaacacaaatacaagtacaaatacaattataagacaattaaaatagatagccttaatgcct

SEQ ID NO: 103052 - DNA, 80 bp, synthetic construct
  source 1..80: mol_type = other DNA
gaacaaacacaaatacaagtacaaatacaattataagacaattaaaatagatagccttaatgcctaggatcctcggtgcg

SEQ ID NO: 103053 - DNA, 80 bp, synthetic construct
  source 1..80: mol_type = other DNA
aggccaaagcctcaaagacagaggacagcccaagagccagcctgatcccggacgccacacacctagggcctcagttctgc

SEQ ID NO: 103054 - DNA, 80 bp, synthetic construct
  source 1..80: mol_type = other DNA
caagactgagaccatcggttgccccaacggcacccccagtcggggcagggagcaacaccagacccccgccctacagccac

SEQ ID NO: 103055 - DNA, 80 bp, synthetic construct
  source 1..80: mol_type = other DNA
gtaaaacaccatgatcaaagtcctcaaccatgtgattggatagttcacccttgatcaatctaatataaaacttgtttgag

SEQ ID NO: 103056 - DNA, 80 bp, synthetic construct
  source 1..80: mol_type = other DNA
ttatcgacattgcttttgtcttgcccagaccctagaactagattactcattgcctgttgcactttgtactcatagtcctg

SEQ ID NO: 103057 - DNA, 80 bp, synthetic construct
  source 1..80: mol_type = other DNA
tttgatttttgtctaaacattgtgaagattgcgtggctctagatctttctgcctcttgcctccgctcaacccatttcttt

SEQ ID NO: 103058 - DNA, 80 bp, synthetic construct
  source 1..80: mol_type = other DNA
agatcccttttagttgactccaaagaaaccaatctatcattaacacttataaaacaggtccctagccaccctcttaaacg

SEQ ID NO: 103059 - DNA, 80 bp, synthetic construct
  source 1..80: mol_type = other DNA
ctccacccaattgtccactgcttcaagaactgcactcaagacttctgcaccatttggcattgcagccctcagcacggaaa

SEQ ID NO: 103060 - DNA, 80 bp, synthetic construct
  source 1..80: mol_type = other DNA
actttattttgtttaagaatgatctccaacattgcacctgatatccttcagtggtctgattccccttcctttccttttct

SEQ ID NO: 103061 - DNA, 80 bp, synthetic construct
  source 1..80: mol_type = other DNA
ccaatctctttatcaatatctgcatacaaaaatctcaacattggtgaggctctcttgaactgatgaattaagtgtttgac

SEQ ID NO: 103062 - DNA, 80 bp, synthetic construct
  source 1..80: mol_type = other DNA
caatgtccactcctgaccactgcattcttaacctcagcctatctatcatcatgccacttaatgcctcaatcaacaagtca

SEQ ID NO: 103063 - DNA, 80 bp, synthetic construct
  source 1..80: mol_type = other DNA
tgtttagctgtgggtatagtggttgaagttctcggggtatgtgatcaactggagtaaaacaatttaggacaatttgaaac

SEQ ID NO: 103064 - DNA, 80 bp, synthetic construct
  source 1..80: mol_type = other DNA
aagccaaagcaccaggagcaagagacagtccgagagccagtctgatcccagatgccacacacttaggaccacaattctgt

SEQ ID NO: 103065 - DNA, 80 bp, synthetic construct
  source 1..80: mol_type = other DNA
atgtggtcgatgccatggaggcccatcagtttattaaggctcctggcatctctactgccattgagcaggctgctctggca

SEQ ID NO: 103066 - DNA, 80 bp, synthetic construct
  source 1..80: mol_type = other DNA
gctgtggtggtccggccgtttttatcccgtacccaaactgatattcttatcaacctgatgcaaccccggcagctgatttt

SEQ ID NO: 103067 - DNA, 80 bp, synthetic construct
  source 1..80: mol_type = other DNA
gtcactgttggtgcccttgtcgctaatgagggctggagcgcctctgaggatgcccttactgctgtaatcaccgctgctta

SEQ ID NO: 103068 - DNA, 80 bp, synthetic construct
  source 1..80: mol_type = other DNA
gcatgcgtcgcctggaggttgagcatgcgcagaaatttgtgtcaaggctttacagttggttgtttgaaaagtccggccgg

SEQ ID NO: 103069 - DNA, 80 bp, synthetic construct
  source 1..80: mol_type = other DNA
gattacatccctggtcgtcagctggagttttatgcccagtgccggcgctggctctcggctggtttccacttagaccctag

SEQ ID NO: 103070 - DNA, 80 bp, synthetic construct
  source 1..80: mol_type = other DNA
ggtccttgtcttcgatgagtcggttccctgccggtgccgatgccttctcaacagggccgtgaggaagttctgctgcttca

SEQ ID NO: 103071 - DNA, 80 bp, synthetic construct
  source 1..80: mol_type = other DNA
tgaagtggcttgggcaggaatgcaactgtttcttggagccggtcgagggtttggtgggtgaccaagggcacgacaatgaa

SEQ ID NO: 103072 - DNA, 80 bp, synthetic construct
  source 1..80: mol_type = other DNA
gcctacgaggggtccgaggtagaccctgctgagcctgccgtacttgacatttctggaacctatgttgtctctggccagca

SEQ ID NO: 103073 - DNA, 80 bp, synthetic construct
  source 1..80: mol_type = other DNA
acttgtcaatctgtatagtgccctcaatattccatctgatctagcggcccgagctgcacgcctcgcggccaccgttgagc

SEQ ID NO: 103074 - DNA, 80 bp, synthetic construct
  source 1..80: mol_type = other DNA
ttgcctccagcccaggccgcctagagtgtcggactttgctcgggaataaggttttccgcaccgtcgtaactgacggtgcc

SEQ ID NO: 103075 - DNA, 80 bp, synthetic construct
  source 1..80: mol_type = other DNA
cgtctggaggcaaacggccctgagcaatatgtccttacatttgacgaagcccagcagtccatgggtgccgggccgcacag

SEQ ID NO: 103076 - DNA, 80 bp, synthetic construct
  source 1..80: mol_type = other DNA
tcttacctatgggcttaccaatgctggcctcgaggtcaggatttcatctaatggtctagattgtgcggctgtcttccctc

SEQ ID NO: 103077 - DNA, 80 bp, synthetic construct
  source 1..80: mol_type = other DNA
ccgtcctgaagtgttctggaaccacccgttacagcgtgttatccataatgagttggagcaatactgccgtgcccgtgcgg

SEQ ID NO: 103078 - DNA, 80 bp, synthetic construct
  source 1..80: mol_type = other DNA
gtggggaggccccttgtgctgcacctggtgaggtcgcagccttttgtgcagccttgtacaggtttaataggcatactcaa

SEQ ID NO: 103079 - DNA, 80 bp, synthetic construct
  source 1..80: mol_type = other DNA
agacactcgctaactggtgggttgtggcttcaccctgaggggttgctgggccttttccccccattttcacctggtcactt

SEQ ID NO: 103080 - DNA, 80 bp, synthetic construct
  source 1..80: mol_type = other DNA
ttgggagtcctcgaacccgttctgcggcgaaagtactttgtatactaggacttggtctacatctggcttttctagtgact

SEQ ID NO: 103081 - DNA, 80 bp, synthetic construct
  source 1..80: mol_type = other DNA
tctctcctcctgtagcacccgcccctactcctccgccacctgttgttcttccaaagcttaccccttccaccggtggcccg

SEQ ID NO: 103082 - DNA, 80 bp, synthetic construct
  source 1..80: mol_type = other DNA
cactccctacagttacccccccctgggggtttcgtacccaccccccccctgcccccaccgcctgctccactcactctttc

SEQ ID NO: 103083 - DNA, 80 bp, synthetic construct
  source 1..80: mol_type = other DNA
cccttctccctccccaccgccgcccgctttagaggctacccttgcacctcccgttgctgcacctaggccccccgtacata

SEQ ID NO: 103084 - DNA, 80 bp, synthetic construct
  source 1..80: mol_type = other DNA
agccagccgtgccccaaacccgcacccggcgtttactctatgcctaccctgacggggccaaagtgtatgccggttccctc

SEQ ID NO: 103085 - DNA, 80 bp, synthetic construct
  source 1..80: mol_type = other DNA
ttcgaatcagattgcgactggttggtcaatgcggccaaccctggccaccgccctggtggaggcctttgtcacgcattctt

SEQ ID NO: 103086 - DNA, 80 bp, synthetic construct
  source 1..80: mol_type = other DNA
ccaacgattcccagagtcattcgatcccgccgggttcataatgcgcgatgggttggccgcgtacactctgaccccccggc

SEQ ID NO: 103087 - DNA, 80 bp, synthetic construct
  source 1..80: mol_type = other DNA
cgatcatccatggggttgcccccgactatagggtcgaacgtaaccccaagaggctggaggcagcctatcgtgaaacttgc

SEQ ID NO: 103088 - DNA, 80 bp, synthetic construct
  source 1..80: mol_type = other DNA
gtcgttgccttgaggtcggggcccacccgaggtcgattaatgacaaccagaatgttctccaccgttgctttctccggcct

SEQ ID NO: 103089 - DNA, 80 bp, synthetic construct
  source 1..80: mol_type = other DNA
tcccgccgtggaactgctgcatacccactgcttggctcaggcatctatcaagtccccgttagccttagttttgacgcctg

SEQ ID NO: 103090 - DNA, 80 bp, synthetic construct
  source 1..80: mol_type = other DNA
ggagcgtaaccaccgccctggtgatgaactctacctgaccgagccagcggctgcctggttcgaggctcataagccgaacc

SEQ ID NO: 103091 - DNA, 80 bp, synthetic construct
  source 1..80: mol_type = other DNA
aacccgcgctcgttatatcagaggatgtggcccgcacggccaacctagcgctgcagatcgactccaccacagacgttggc

SEQ ID NO: 103092 - DNA, 80 bp, synthetic construct
  source 1..80: mol_type = other DNA
cgagcttgcgtcggctgctccgtcagccctggtgtggttcactatcagttcactgctggtgtcccggggtccggaaagtc

SEQ ID NO: 103093 - DNA, 80 bp, synthetic construct
  source 1..80: mol_type = other DNA
taggtccatacagcagggtgaagttgatgtggtcgttgtacccacccgcgagctccgcaacagttggcggcgccgcggct

SEQ ID NO: 103094 - DNA, 80 bp, synthetic construct
  source 1..80: mol_type = other DNA
ttgctgcttacacaccccacactgcagcacgtgtgaccaatggtagacgtgtcgtcattgatgaagctccatctcttcca

SEQ ID NO: 103095 - DNA, 80 bp, synthetic construct
  source 1..80: mol_type = other DNA
ccgcatttgctacttcttcacatgcagcgggcctcttctgtccatcttcttggcgaccctaaccagatacctgctataga

SEQ ID NO: 103096 - DNA, 80 bp, synthetic construct
  source 1..80: mol_type = other DNA
ttttgagcatgcgggcctggtcccggcgatccgccctgagctcacgcccacgagctggtggcatgttacacatcgttgcc

SEQ ID NO: 103097 - DNA, 80 bp, synthetic construct
  source 1..80: mol_type = other DNA
ctgcagatgtgtgtgagctcctccgcggcgcctatcctaagatccagaccaccagccgcgtgttgcgctctctgttctgg

SEQ ID NO: 103098 - DNA, 80 bp, synthetic construct
  source 1..80: mol_type = other DNA
aatgaacctgcagcaggtcagctgctggttttcacgcaggccgctaaggcagcgaaccctggctcaattactgtccatga

SEQ ID NO: 103099 - DNA, 80 bp, synthetic construct
  source 1..80: mol_type = other DNA
gccgggagggatgtccaacgctggtactctgcccccactcgcggacctgctgccaactgccggcgctccgcgttgcgcgg

SEQ ID NO: 103100 - DNA, 80 bp, synthetic construct
  source 1..80: mol_type = other DNA
ggcccagggggccacgtttacagtgaccacaattatcgccacagccgacgcaaggtggcttatacaatcttcacgagcgc

SEQ ID NO: 103101 - DNA, 80 bp, synthetic construct
  source 1..80: mol_type = other DNA
acgctattgttgcgctgacccgccacacagagaagtgtgtcattcttgattcacctggtttgctgcgtgaggtcggtata

SEQ ID NO: 103102 - DNA, 80 bp, synthetic construct
  source 1..80: mol_type = other DNA
tctgatgctatcgttaataattttttcctggccggtggtgaggtcggccacaaccgcccctctgttatacctcgtggcga

SEQ ID NO: 103103 - DNA, 80 bp, synthetic construct
  source 1..80: mol_type = other DNA
tgtggagccaaattctgacgtgctccgggctttttatccatcttgtcaggtcagtgcgtaccatcagctggcagaggagc

SEQ ID NO: 103104 - DNA, 80 bp, synthetic construct
  source 1..80: mol_type = other DNA
ttggccaccggcctgcaccggtggctgctgtcctgcccccctgccccgacctagaacagggtctgctctatatgccatat

SEQ ID NO: 103105 - DNA, 80 bp, synthetic construct
  source 1..80: mol_type = other DNA
gagctctctgtatctgacagtgtgttggtcttcgaactcaccgacatagtccactgtcgtatggcggccccgagccaacg

SEQ ID NO: 103106 - DNA, 80 bp, synthetic construct
  source 1..80: mol_type = other DNA
gaaagcggtcctctctacacttgtaggtaggtacgggcgccagactaggctatttgaggcggctcactccgacgtgcggg

SEQ ID NO: 103107 - DNA, 80 bp, synthetic construct
  source 1..80: mol_type = other DNA
gttcgctagcccggttcatccctcccatcggccctgtgaaggccactacatgtgagctattcgagcttgtcgaggctatg

SEQ ID NO: 103108 - DNA, 80 bp, synthetic construct
  source 1..80: mol_type = other DNA
gtcgagaagggtcaggatgggtctgctgtgcttgagcttgacctttgtgaccgtgatgtctcgcgtataaccttctttca

SEQ ID NO: 103109 - DNA, 80 bp, synthetic construct
  source 1..80: mol_type = other DNA
aaaggactgtaataagtttaccactggtgagactatttcccatggcaaggtcggccagggcatatcagcctggagtaaga

SEQ ID NO: 103110 - DNA, 80 bp, synthetic construct
  source 1..80: mol_type = other DNA
cctcccccccgttgaccgcacctactgttttgacgggttctctaggtgtacttttgccgcggagactggtattgctctct

SEQ ID NO: 103111 - DNA, 80 bp, synthetic construct
  source 1..80: mol_type = other DNA
ctttctgcgccctttttggtccctggttccgggctattgaaaaaatgatccttgctttactcccacctaatgtcttctac

SEQ ID NO: 103112 - DNA, 80 bp, synthetic construct
  source 1..80: mol_type = other DNA
ggcgatgcttacgaagagtcggtattctctgccgctatttcgggagcggggtctagtttagtgtttgagaatgatttttc

SEQ ID NO: 103113 - DNA, 80 bp, synthetic construct
  source 1..80: mol_type = other DNA
ggatgccgcagtggctgatcagactttatcacctagtccggtcagcctggattttacaggccccaaaggagtccctgcgg

SEQ ID NO: 103114 - DNA, 80 bp, synthetic construct
  source 1..80: mol_type = other DNA
ggtttttggaagaagcactccggcgagcctggcactctgctctggaatactgtatggaacatggcggtgatatcgcattg

SEQ ID NO: 103115 - DNA, 80 bp, synthetic construct
  source 1..80: mol_type = other DNA
ctatgatttccgtgacctccgggtcgctgcttttaagggggacgactctgtggtcctctgcagcgattaccgtcagagcc

SEQ ID NO: 103116 - DNA, 80 bp, synthetic construct
  source 1..80: mol_type = other DNA
gccatgctgccgctttaattgctggatgcggactgaagttaaaggttgactaccgccctatagggctctatgctggtgtg

SEQ ID NO: 103117 - DNA, 80 bp, synthetic construct
  source 1..80: mol_type = other DNA
gtcgttgcccctggtctcggcgcgctcccggatgtggtacgctttgctggccgactgtctgagaagaactggggtcctgg

SEQ ID NO: 103118 - DNA, 80 bp, synthetic construct
  source 1..80: mol_type = other DNA
ccccgagcgcgctgaggagttgcgtttggctgtttgtgattttctcagaaagcttacgaatgttgcgcaggtctgtgtcg

SEQ ID NO: 103119 - DNA, 80 bp, synthetic construct
  source 1..80: mol_type = other DNA
atgttgtttcccgtggctacggagtgagccccgggctcgtacataaccttattggaatgctacaaactatcgccgctgga

SEQ ID NO: 103120 - DNA, 80 bp, synthetic construct
  source 1..80: mol_type = other DNA
attccctgcacgacctttcgcctgctgatgttgctgaggcgatgtcctcccatgggatgacgcgcctctatgctgtcttg

SEQ ID NO: 103121 - DNA, 80 bp, synthetic construct
  source 1..80: mol_type = other DNA
aaagcacatttcacggagactgttaaacctgtactggatttgacaaattctattatacagaggttagaatgaataacatg

SEQ ID NO: 103122 - DNA, 80 bp, synthetic construct
  source 1..80: mol_type = other DNA
tcccttgcagcgcccatgggatcgccatgctctctcgggctgttttgctgttgttcctcatgcttttgcctatgctgccc

SEQ ID NO: 103123 - DNA, 80 bp, synthetic construct
  source 1..80: mol_type = other DNA
ccacaacccgggcctggaggccgccctcgccagccagcccgtcccctcggctccgcttggcgcgatcagtcccagcgccc

SEQ ID NO: 103124 - DNA, 80 bp, synthetic construct
  source 1..80: mol_type = other DNA
ccccgctgtcacccgtcgtcgatctgccgcagctggggctgcgccgctgactgctgtttcgcccgcgccggatgcggccc

SEQ ID NO: 103125 - DNA, 80 bp, synthetic construct
  source 1..80: mol_type = other DNA
ccgtccccgatgtggactcgcgcggcgctattttgcgccgtcagtacaacttatcaacatccccactgacctctactgta

SEQ ID NO: 103126 - DNA, 80 bp, synthetic construct
  source 1..80: mol_type = other DNA
gcttcgggtactaatcttgttctgtatgctgctccacttaaccctctcttgcctctccaggatggcaccaatacccatat

SEQ ID NO: 103127 - DNA, 80 bp, synthetic construct
  source 1..80: mol_type = other DNA
cacctgccccctgaggtactgctcccacccggaacttaccacactactacctacctgctgatccatgacggcagccgtgc

SEQ ID NO: 103128 - DNA, 80 bp, synthetic construct
  source 1..80: mol_type = other DNA
cagttgacatgaattccatcacttccactgatgttagaatactggttcagcccggggtcgcctccgagcttgtcatcccg

SEQ ID NO: 103129 - DNA, 80 bp, synthetic construct
  source 1..80: mol_type = other DNA
cggcgtggcagaggaagaggcgacgtcagggctggttatgctctgcatccatggttcacccgttaactcatacactaaca

SEQ ID NO: 103130 - DNA, 80 bp, synthetic construct
  source 1..80: mol_type = other DNA
ccccttacactggtgctttgggtctcctcgattttgcgcttgagcttgaattccgaaatttgacgcctggaaacaccaac

SEQ ID NO: 103131 - DNA, 80 bp, synthetic construct
  source 1..80: mol_type = other DNA
acccgtgtgtcccggtataccagcacggcccgccaccgcctccggcgcggtcctgacgggacagccgaacttacaaccac

SEQ ID NO: 103132 - DNA, 80 bp, synthetic construct
  source 1..80: mol_type = other DNA
ggctgccactaggttcatgaaggacttgcactttaacgggactaatggtctgggagaagtgggtcgcggaatagcgctga

SEQ ID NO: 103133 - DNA, 80 bp, synthetic construct
  source 1..80: mol_type = other DNA
cgttgttcaaccttgctgatacgcttctcggcggtttaccgacagaattaatttcgtcggcagggggtcagttattctac

SEQ ID NO: 103134 - DNA, 80 bp, synthetic construct
  source 1..80: mol_type = other DNA
ccagctgtcaaactttacacctcagtcgagaatgcacagcaggataaaggcattgctataccgcatgacatcgaccttgg

SEQ ID NO: 103135 - DNA, 80 bp, synthetic construct
  source 1..80: mol_type = other DNA
tgattcgcgtgtggtgatccaggattatgataatcaacatgagcaagaccggcctacaccatctccggccccctctcgcc

SEQ ID NO: 103136 - DNA, 80 bp, synthetic construct
  source 1..80: mol_type = other DNA
cttttgccgttttacgtgctaatgatgtcttgtggctgtctcttaccgctgctgaatacgaccagtcgacgtacggctcc

SEQ ID NO: 103137 - DNA, 80 bp, synthetic construct
  source 1..80: mol_type = other DNA
tgttgtgacctatgagggtgacactagcgccggctacaaccatgatgtctccatccttcgtgcctggatccgcacaacga

SEQ ID NO: 103138 - DNA, 80 bp, synthetic construct
  source 1..80: mol_type = other DNA
tccaccaatcctctatatgtctctgacactgttacctttgttaatgtagctacgggcgcccaggccgtcgcccggtctct

SEQ ID NO: 103139 - DNA, 80 bp, synthetic construct
  source 1..80: mol_type = other DNA
tgactggtccaaggtcaccctagacggccgcccgcttgtcacaatccagcagcatgctaccacattttatgtcttgccgc

SEQ ID NO: 103140 - DNA, 80 bp, synthetic construct
  source 1..80: mol_type = other DNA
cagattttgattgagaatgttgctccccatcgtgttgctatctctacttacactacaaatctaggtgctggccccgtttc

SEQ ID NO: 103141 - DNA, 80 bp, synthetic construct
  source 1..80: mol_type = other DNA
catctccgctgttggggtgttggctccacattcggcccttgcagtcttggcggacacagtcgactaccctgcccgtgctc

SEQ ID NO: 103142 - DNA, 80 bp, synthetic construct
  source 1..80: mol_type = other DNA
acacctttgatgacttttgcccagagtgccgattactcggccttcaaggttgtgcttttcagtcaactgtagctgagctc

SEQ ID NO: 103143 - DNA, 80 bp, synthetic construct
  source 1..80: mol_type = other DNA
ggagtcttaattaattagctttgtgcccccttctgtgtctgttctttatttctctcttctgcgcttcgcgctccctggag

SEQ ID NO: 103144 - DNA, 80 bp, synthetic construct
  source 1..80: mol_type = other DNA
aggtaaccggcgaccaccctcttgttattgagcgcgtccgcgcaatcggctgccacttcgtgttattattgaccgctgca

SEQ ID NO: 103145 - DNA, 80 bp, synthetic construct
  source 1..80: mol_type = other DNA
cctgaaccgtccccgatgccctatgtgccctacccacgctcaactgatgtctacgtccgttctatcttcgggccgggcgg

SEQ ID NO: 103146 - DNA, 80 bp, synthetic construct
  source 1..80: mol_type = other DNA
ctccccgtctcttttcccgacgggttgttccaacaaatccactttccatgcggtcccagtccacatttgggacaggctta

SEQ ID NO: 103147 - DNA, 80 bp, synthetic construct
  source 1..80: mol_type = other DNA
tgctttttggtgcaacacttgatgatcaggcattctgttgttcgaggcttatgacttacctccggggtattagttacaag

SEQ ID NO: 103148 - DNA, 80 bp, synthetic construct
  source 1..80: mol_type = other DNA
tatattcatccaaccaaccccttcgccgccgatgtcattccacaacccgggcctggaggccgccctcgccagccagcccg

SEQ ID NO: 103149 - DNA, 80 bp, synthetic construct
  source 1..80: mol_type = other DNA
actgctgtttcgcccgcgccggatgcggcccccgtccccgatgtggactcgcgcggcgctattttgcgccgtcagtacaa

SEQ ID NO: 103150 - DNA, 80 bp, synthetic construct
  source 1..80: mol_type = other DNA
ctgaggcggctgcttttgcaccggctgttgccccggggctacctcattctaccccacctgccagtgatatttgggtgttg

SEQ ID NO: 103151 - DNA, 80 bp, synthetic construct
  source 1..80: mol_type = other DNA
tacctcattctaccccacctgccagtgatatttgggtgttgccaccgccctcagaagggtctcaggctgacgcagtacct

SEQ ID NO: 103152 - DNA, 80 bp, synthetic construct
  source 1..80: mol_type = other DNA
ccaccgccctcagaagggtctcaggctgacgcagtacctgcgccacccgcccctgagcccgttgggtcgcccggccccac

SEQ ID NO: 103153 - DNA, 80 bp, synthetic construct
  source 1..80: mol_type = other DNA
tgaacctataccccctgtgcgtaagccgccagcaccaccgccctctcgcacccgccgcctcctctatacatatcctgacg

SEQ ID NO: 103154 - DNA, 80 bp, synthetic construct
  source 1..80: mol_type = other DNA
gggaggtatctgctttttgctcggccctgcacaggtttaaccgctgtgttcaacggcactctctcattggaggcctatgg

SEQ ID NO: 103155 - DNA, 80 bp, synthetic construct
  source 1..80: mol_type = other DNA
aaagcaccctttatacccggacctggtcggtctcgggcttttctagctgcttttcaccacttgactgtgtcccgagcgag

SEQ ID NO: 103156 - DNA, 80 bp, synthetic construct
  source 1..80: mol_type = other DNA
ttgccccccgtcgaggccagtaaacctgcggttttaaatacctcaccttcagagactgcggggcaggcccagcctccggc

SEQ ID NO: 103157 - DNA, 80 bp, synthetic construct
  source 1..80: mol_type = other DNA
ctttgagccggtagcacctttatctgactctgttgataatagcgttagccttactccccctagtgcccccattgtacttc

SEQ ID NO: 103158 - DNA, 80 bp, synthetic construct
  source 1..80: mol_type = other DNA
cggcgtcggcgccacctgtaacccgtccatctgagcctcgccggcggttgctccatacttaccctgacggctcaaaagtg

SEQ ID NO: 103159 - DNA, 80 bp, synthetic construct
  source 1..80: mol_type = other DNA
tcttgagctggacgcagccactgaagtgggccgtgcgtgcgctggctgtcgtgtggaacccggcgtagttcactatcaat

SEQ ID NO: 103160 - DNA, 80 bp, synthetic construct
  source 1..80: mol_type = other DNA
tataccgcgcggcactattgataataatgttgatacactggatgctttcccgccttcttgtcagtttagtgcttaccatc

SEQ ID NO: 103161 - DNA, 80 bp, synthetic construct
  source 1..80: mol_type = other DNA
gcttccgcctgtcgaccggacttactgtttcgatggcttttcaggctgcacatttgccgctgagacgggggttgcactct

SEQ ID NO: 103162 - DNA, 80 bp, synthetic construct
  source 1..80: mol_type = other DNA
aagactgtatagacttaatgtacagattctctttgtttggcccccgtacgcacttgctacccaatgttctgcataaacct

SEQ ID NO: 103163 - DNA, 80 bp, synthetic construct
  source 1..80: mol_type = other DNA
cgccgggggcccccccgggggagccagccacctccaaggaatcactcaatatcctcaacatgctcgtccgcttcagtcaa

SEQ ID NO: 103164 - DNA, 80 bp, synthetic construct
  source 1..80: mol_type = other DNA
ctaggtcacttattgacggccggttcccatcattggggcatgagctcagtttgacaggctccctgtactgatcaacaatt

SEQ ID NO: 103165 - DNA, 80 bp, synthetic construct
  source 1..80: mol_type = other DNA
ctctcgacggtatccctcagctgatcaaagtaaatgcttgcgccgccatcgagcagaatttcatctaggtcagccctatc

SEQ ID NO: 103166 - DNA, 80 bp, synthetic construct
  source 1..80: mol_type = other DNA
aggaccaagcctaataatgctcttatcaatttatagagcaggaactcaacatcagtaattaattcttccctcaccttatt

SEQ ID NO: 103167 - DNA, 80 bp, synthetic construct
  source 1..80: mol_type = other DNA
aatgagatctctgtgatgataatctgagacataggccattatgaaataccttaggttttggagaagtttttgagaacgtt

SEQ ID NO: 103168 - DNA, 80 bp, synthetic construct
  source 1..80: mol_type = other DNA
cctctttgacttgctgtagcagagagcataacccttgaattccacccaattgtccaccgcctcaagaaccgcactcagga

SEQ ID NO: 103169 - DNA, 80 bp, synthetic construct
  source 1..80: mol_type = other DNA
tttgattcttgttcaagcattgggaggattgtgtggttctagatctttcagcctgctgtcttcgctcaacccatttcctt

SEQ ID NO: 103170 - DNA, 80 bp, synthetic construct
  source 1..80: mol_type = other DNA
agatccctttttgttgactctaaggaaacaagtctatcattaacacttatgaagcaagatcctagccatcctcttaagtg

SEQ ID NO: 103171 - DNA, 80 bp, synthetic construct
  source 1..80: mol_type = other DNA
agaatgatctccagcactgcatctgacattccccaattgcttgactctctccttcattgttctcatcatcaatgttcgca

SEQ ID NO: 103172 - DNA, 80 bp, synthetic construct
  source 1..80: mol_type = other DNA
gtagtcaccttatcatcgtacaaattgttaaactcattaagtaactgacccttctcgacctttgagaactgactttctat

SEQ ID NO: 103173 - DNA, 80 bp, synthetic construct
  source 1..80: mol_type = other DNA
gggctgtcagcttattgttgataccttggtggcatgaggcaatcacttcctcataatgattagaacgattgtctagtaag

SEQ ID NO: 103174 - DNA, 80 bp, synthetic construct
  source 1..80: mol_type = other DNA
tatttggctgagggtatggtgatcgagtctcttagggtgcgtgatcggctggggtggtgatccacagtgagacaaggtct

SEQ ID NO: 103175 - DNA, 80 bp, synthetic construct
  source 1..80: mol_type = other DNA
gtctcatcagagacacaggggtcggtcaacagcaaaaacaatctaattagatagccttaatgcctaggatcctcggtgcg

SEQ ID NO: 103176 - DNA, 80 bp, synthetic construct
  source 1..80: mol_type = other DNA
gagggtcatgagctgggagtaggtgagcccagcagtgaaccctgtcgactgtagggacttgttagaaccgttgctcccca

SEQ ID NO: 103177 - DNA, 80 bp, synthetic construct
  source 1..80: mol_type = other DNA
tctactaatataaatgtccctggttctttgtgagaggagcccaaggtaaccgacgggagatggtcttgtgaattggcaat

SEQ ID NO: 103178 - DNA, 80 bp, synthetic construct
  source 1..80: mol_type = other DNA
cgcaccggggatcctaggcaattaggttgttgttttcttcggtgaccttccaccctgaaccccagcagatgggaaacagg

SEQ ID NO: 103179 - DNA, 80 bp, synthetic construct
  source 1..80: mol_type = other DNA
gttcatgtgttctagtgtgagataacctcaattctgatgacaatacaatgtaatgctcttccctcttccacttaactatg

SEQ ID NO: 103180 - DNA, 80 bp, synthetic construct
  source 1..80: mol_type = other DNA
ggtcaataggatatctagcatactgcagaaggctcaaggtcctcttctgtatcaaattgcacaaatggacaggaacacca

SEQ ID NO: 103181 - DNA, 80 bp, synthetic construct
  source 1..80: mol_type = other DNA
aagcactgaaagtattcatgatcaaggtacgtcctggttgatactgcctttgttagctctccaataggacattgtgacat

SEQ ID NO: 103182 - DNA, 80 bp, synthetic construct
  source 1..80: mol_type = other DNA
ccaaatcactgattgagggctggctattgtcattaaggtctgaatttggttttgttggttgcctatactgatcaacaatt

SEQ ID NO: 103183 - DNA, 80 bp, synthetic construct
  source 1..80: mol_type = other DNA
ttaagtaagaatggatgtacgagtgtcgaaggacccaattataagaggcctggcgtctcaaagaaattcttatccctcct

SEQ ID NO: 103184 - DNA, 80 bp, synthetic construct
  source 1..80: mol_type = other DNA
aaacttctttgcattgtaaaccatgtcgtctagttcttcttccatggctacatcctcgggattgacatttacatgtccga

SEQ ID NO: 103185 - DNA, 80 bp, synthetic construct
  source 1..80: mol_type = other DNA
caaattaattaatgatctcatcagtctataaagcaagaactcaacatcagtgatcaattcttccttcactttatcaataa

SEQ ID NO: 103186 - DNA, 80 bp, synthetic construct
  source 1..80: mol_type = other DNA
aattgtagggatgactccatggacatcgaagtccatgatcaagtcataactattaggacaaatgacttccatatcaacct

SEQ ID NO: 103187 - DNA, 80 bp, synthetic construct
  source 1..80: mol_type = other DNA
tgtagtgatccactctgattcctacatccttcagagcagtgatggctttcgagatagtcttctgaaatattgagttgagg

SEQ ID NO: 103188 - DNA, 80 bp, synthetic construct
  source 1..80: mol_type = other DNA
tttggttcttgttcaaacactgggaagactgttcaaccctagacctttcagcttgctgtctccgctcaacccatctctct

SEQ ID NO: 103189 - DNA, 80 bp, synthetic construct
  source 1..80: mol_type = other DNA
acttgactttatttaggaatgatctccaacactgtgcttggcattctccggttgactgatttccgtttccactatctttt

SEQ ID NO: 103190 - DNA, 80 bp, synthetic construct
  source 1..80: mol_type = other DNA
tatcagcatataaattattgaactcattaagtagttggctcttttcaactcttaaaaattggctctctatctctcctttt

SEQ ID NO: 103191 - DNA, 80 bp, synthetic construct
  source 1..80: mol_type = other DNA
tacttgattgtgggtgggatgatcaaagcttctggggtgtgtggtctacttgggcggcaattcaccgcaagacaaggtct

SEQ ID NO: 103192 - DNA, 80 bp, synthetic construct
  source 1..80: mol_type = other DNA
cataaagcaattgacaactgacaatcaataaataaaagacaattaaaatagatagccttaatgcctaggatcctcggtgc

SEQ ID NO: 103193 - DNA, 80 bp, synthetic construct
  source 1..80: mol_type = other DNA
gatgaagtgtccccaacttctctaacaaacatttccagatcctgatcctgtatgatgggtgtgaaagaagccagcttctt

SEQ ID NO: 103194 - DNA, 80 bp, synthetic construct
  source 1..80: mol_type = other DNA
caagccaaggcctcagagacaaaggacagtccgagagccagtctgattccagatgccacacatctggggccacagttctg

SEQ ID NO: 103195 - DNA, 80 bp, synthetic construct
  source 1..80: mol_type = other DNA
agggagcttttgttagtgtcaatcatgtttagaatggggtggctctgagttagcctgtccagatctgaggtgttgtggta

SEQ ID NO: 103196 - DNA, 80 bp, synthetic construct
  source 1..80: mol_type = other DNA
agacccttaccactccatctcttccaacccgagccccctgattaccaccactcattcctatcatattcaggagggctcgt

SEQ ID NO: 103197 - DNA, 80 bp, synthetic construct
  source 1..80: mol_type = other DNA
ttgagtaaggatgggtgcacaagcgtgaaggggccagattacaaaaggcctggtgtctcaaggaaatttttgtccctcct

SEQ ID NO: 103198 - DNA, 80 bp, synthetic construct
  source 1..80: mol_type = other DNA
aaatctccttgcattgtggaccatatcatccagctcttcctccgtggctgcgtcctcgggattgacactcacatggccaa

SEQ ID NO: 103199 - DNA, 80 bp, synthetic construct
  source 1..80: mol_type = other DNA
ttgtgggggtaatcccggaaacattgaaatccatgatcaagtcataactattagaacaaatcactcccatatcaatgttg

SEQ ID NO: 103200 - DNA, 80 bp, synthetic construct
  source 1..80: mol_type = other DNA
acttgattttgtttagaaatgatctccagcactgcatctggcattctccggtggtttgatttcccttttttccatcccct

SEQ ID NO: 103201 - DNA, 80 bp, synthetic construct
  source 1..80: mol_type = other DNA
tgcatatagaaatctcagcattggtgatgctctcttgaactgataaattaaatgttcgacattatcttctgtgaccactt

SEQ ID NO: 103202 - DNA, 80 bp, synthetic construct
  source 1..80: mol_type = other DNA
tgtctgactgtgagaagggtggtcacaggtttcaaagcaagtggtcaactaaagcaatagtttgctgtgaggcagggtat

SEQ ID NO: 103203 - DNA, 80 bp, synthetic construct
  source 1..80: mol_type = other DNA
tatcatgaaagcagacacaaatgacacttttcaactaaaagacaattaaaattgatagtcttaatgcctaggatcctcgg

SEQ ID NO: 103204 - DNA, 80 bp, synthetic construct
  source 1..80: mol_type = other DNA
ggccccaatggggacatcatctcttccatcttacaggcacgccaggttgtttatagaatccacaagagcatatgcccata

SEQ ID NO: 103205 - DNA, 80 bp, synthetic construct
  source 1..80: mol_type = other DNA
actgcagagacttattagagttgttgcctccagttttctgcggtttcccgtctgattccaaatcaacaacagtattttcc

SEQ ID NO: 103206 - DNA, 80 bp, synthetic construct
  source 1..80: mol_type = other DNA
agatcctcaccactccatctcttccggcccgggccccttgattaccaccactcattcctatcatatttaggagagctcgc

SEQ ID NO: 103207 - DNA, 80 bp, synthetic construct
  source 1..80: mol_type = other DNA
attggattgcgctttgctttgatcatttcagcagacagtttcagttctctgctgtgtacacataacacaacaactcagca

SEQ ID NO: 103208 - DNA, 80 bp, synthetic construct
  source 1..80: mol_type = other DNA
gcaccggggatcctaggcaatttgattgttcatctttttgaccccttgtttcttgaattccagcagatgggaaacaagca

SEQ ID NO: 103209 - DNA, 80 bp, synthetic construct
  source 1..80: mol_type = other DNA
agtcctgatgtccaacggaactcgccaatactggacaccataggaatttgtcagtaactcaatcctctgggtgctagaaa

SEQ ID NO: 103210 - DNA, 80 bp, synthetic construct
  source 1..80: mol_type = other DNA
agcaccaccagtcggagcagacaccaataccggacctccaccctacagtccctgaactccccacgaaccccaccctcccc

SEQ ID NO: 103211 - DNA, 80 bp, synthetic construct
  source 1..80: mol_type = other DNA
tgcctgagtgcaggtgaagtaatcacagctttcagtatggatggtcgactggggtgatagtttactatggaatagggtgt

SEQ ID NO: 103212 - DNA, 80 bp, synthetic construct
  source 1..80: mol_type = other DNA
tacaaaacaaatacaaatgaaataaaatgataattaatttagataattaaaatagatagtcctaatgcctaggatcctcg

SEQ ID NO: 103213 - DNA, 80 bp, synthetic construct
  source 1..80: mol_type = other DNA
tcaagataccaactcataggcatgttgtaggaaagccgtgtcctaaaccccacagactaaaccgtatgggaatatgttct

SEQ ID NO: 103214 - DNA, 80 bp, synthetic construct
  source 1..80: mol_type = other DNA
tctctgacacccagaggattgagttgctgacaaattcccatggtgtccaatactggcgagttccgttggacattaggact

SEQ ID NO: 103215 - DNA, 80 bp, synthetic construct
  source 1..80: mol_type = other DNA
ccgccgggggcccccccgggggaggctgaccctctctggggttctactcgatgtcctcgatgtgtctatcctcgccactc

SEQ ID NO: 103216 - DNA, 80 bp, synthetic construct
  source 1..80: mol_type = other DNA
ttgagtaaggatggatgcacaagtgtaaaggggccaagctacaagaggcctggcgtttcaaagaagttcttgtccctcct

SEQ ID NO: 103217 - DNA, 80 bp, synthetic construct
  source 1..80: mol_type = other DNA
tcgtagggacaaccccagaaacatcaaaatccatgatcaagtcataactatttgaacagatcacttccatatcaatttta

SEQ ID NO: 103218 - DNA, 80 bp, synthetic construct
  source 1..80: mol_type = other DNA
ctccacccaactgtccactgcttcgagaaccgcatccaagaccccagtgctgcttggtgctgcaaccctcaacgtggtga

SEQ ID NO: 103219 - DNA, 80 bp, synthetic construct
  source 1..80: mol_type = other DNA
tttgactttattcaggaatgacctccaacactgcatctggcattctccggtggtttgactttccccttttacgtccttct

SEQ ID NO: 103220 - DNA, 80 bp, synthetic construct
  source 1..80: mol_type = other DNA
cagctacattcgcatacaaaaacctcagaatcggtgatgctctcttgaactcataaaccaagtgttcgacattgtctttt

SEQ ID NO: 103221 - DNA, 80 bp, synthetic construct
  source 1..80: mol_type = other DNA
ataatcactttgtcagcgtacaaattattgaactcattgagtaactgactcttctcaacctttgaaaactgactttctat

SEQ ID NO: 103222 - DNA, 80 bp, synthetic construct
  source 1..80: mol_type = other DNA
ctatatcaacccctgaccactgcatcttcagccccagcctatctatcatcatgttactcaatgcctcaatcagtaggtca

SEQ ID NO: 103223 - DNA, 80 bp, synthetic construct
  source 1..80: mol_type = other DNA
tgcctgaatacaggtgaagtgatcacagctttcaatataagtggtcaactgaggtgacagattactatggaacagggtgt

SEQ ID NO: 103224 - DNA, 80 bp, synthetic construct
  source 1..80: mol_type = other DNA
tataaaacaaatgcaaatgaaatgataattaatatagataattaatatagatagtcctaatgcctaggatcctcggtgcg

SEQ ID NO: 103225 - DNA, 80 bp, synthetic construct
  source 1..80: mol_type = other DNA
gcccttaagtacttgggaaatcttgtgcagtattggggttgggaactgaaaaagagtgctattcatctgtttaatactat

SEQ ID NO: 103226 - DNA, 80 bp, synthetic construct
  source 1..80: mol_type = other DNA
atggaaaaaaacgtcactgttacgcatgcccaagacatactggaaaagacacacaaagggaagctctgcaatctgaatgg

SEQ ID NO: 103227 - DNA, 80 bp, synthetic construct
  source 1..80: mol_type = other DNA
aaactgacccagcccatgatctctgttacccagggaccctcaatgactatgaaaaactgaaacacctattgagcaaaata

SEQ ID NO: 103228 - DNA, 80 bp, synthetic construct
  source 1..80: mol_type = other DNA
ggtccaatcatacatcatcaggagtgagcgcagcatgtccatacccaggggtggcctccttttttaaaaatgtggtatgg

SEQ ID NO: 103229 - DNA, 80 bp, synthetic construct
  source 1..80: mol_type = other DNA
atgatgcataccccacaataaagaagaactacaataataccaacaaagaagatcttttgatactgtgggggatccatcat

SEQ ID NO: 103230 - DNA, 80 bp, synthetic construct
  source 1..80: mol_type = other DNA
tccaacagtgcaaaagaacaggcagatctctacaagaacccaaccacctatgtttccgttgggacatcaacactaaacca

SEQ ID NO: 103231 - DNA, 80 bp, synthetic construct
  source 1..80: mol_type = other DNA
gaagttggtgccaaaaatagctactagatcccaagtaaatgggcaacgtggaagaatggatttcttctggacaatcttaa

SEQ ID NO: 103232 - DNA, 80 bp, synthetic construct
  source 1..80: mol_type = other DNA
gaacggaacaaaacggaggttgtgtaccttaccaacaccactgtagagaaggaaatatgtcccaagtcagcagaatacag

SEQ ID NO: 103233 - DNA, 80 bp, synthetic construct
  source 1..80: mol_type = other DNA
tagcggaagcagcatctccttctgtggtgtaaatggtgaaaccgtaagctggtcatggccagacggagctaatctgccat

SEQ ID NO: 103234 - DNA, 80 bp, synthetic construct
  source 1..80: mol_type = other DNA
atcacatatgtaaacaaaacatgggtgaaccgaacttatgtaaacattagcaatactaaaattgttaatgtaaaagacgt

SEQ ID NO: 103235 - DNA, 80 bp, synthetic construct
  source 1..80: mol_type = other DNA
gggttctgtagtattaaccggcaattcctctctttgcccaataagtggctgggctatatacagcaaagacaatagcataa

SEQ ID NO: 103236 - DNA, 80 bp, synthetic construct
  source 1..80: mol_type = other DNA
ggaacatggtttcgttgtggatcagccattcaattcaaactggagagaaaaatcacactgagatgtgcaaccaaaatgtc

SEQ ID NO: 103237 - DNA, 80 bp, synthetic construct
  source 1..80: mol_type = other DNA
ggaatttattagctaacaaaatggaaacagtaacgctgatgactatactactattaataactacaagccttgcagataaa

SEQ ID NO: 103238 - DNA, 80 bp, synthetic construct
  source 1..80: mol_type = other DNA
gcaagccttacaattattgcttgaagtagagcaagagataagaaccttctcgtttcagcttatttgatgataaaaaaaca

SEQ ID NO: 103239 - DNA, 80 bp, synthetic construct
  source 1..80: mol_type = other DNA
ggatactttcattaatcatgaggaccattattgctttaagctacgttttctgtctggccttcggtcaggaccttccaggg

SEQ ID NO: 103240 - DNA, 80 bp, synthetic construct
  source 1..80: mol_type = other DNA
tagggatgataatagggactcccgcttgtgatctacatcttaccggaacatgggacattctgatagagagaaacaattct

SEQ ID NO: 103241 - DNA, 80 bp, synthetic construct
  source 1..80: mol_type = other DNA
tagtgtacaatggtaacacctacacactcgaggccgacggcaggggtagtgtgaaagttgacaaagtgcagagtgccact

SEQ ID NO: 103242 - DNA, 80 bp, synthetic construct
  source 1..80: mol_type = other DNA
agacgaggggagtcacgggtgtaatgtgaaaagacaaattgattacctttcttttctttctttagtgtcttttaaaaaaa

SEQ ID NO: 103243 - DNA, 80 bp, synthetic construct
  source 1..80: mol_type = other DNA
gccgacattagacgggccatatcaaccaaccacattcaatttaccaattgactattggatgctaattgcacctactcaaa

SEQ ID NO: 103244 - DNA, 80 bp, synthetic construct
  source 1..80: mol_type = other DNA
tgaggcaaattgcactatgtggaatactactaataacaatcatagtagtttggaagccaatcataccactagtagtaggg

SEQ ID NO: 103245 - DNA, 80 bp, synthetic construct
  source 1..80: mol_type = other DNA
aacaatcatagtagtttggaagccaatcataccactagtagtaggggggaaagaatggagaacggagaaataaagaaatg

SEQ ID NO: 103246 - DNA, 80 bp, synthetic construct
  source 1..80: mol_type = other DNA
acacactccgtgcagaccactgtggtggcagactcagtataacaagagtaaaggagcgaagaacaacagagatcgactag

SEQ ID NO: 103247 - DNA, 80 bp, synthetic construct
  source 1..80: mol_type = other DNA
gaaaaactgctctttcaatgttaccacaaacataagagataaggtgaaagaagcatatgcagtgtttaatgtgcttgata

SEQ ID NO: 103248 - DNA, 80 bp, synthetic construct
  source 1..80: mol_type = other DNA
cctgggcgggactggggagtggcgagccctcagacactgcatataagcagctgctttgtgcctgtactgggtctctctga

SEQ ID NO: 103249 - DNA, 80 bp, synthetic construct
  source 1..80: mol_type = other DNA
caaggactgctgacactgagcttcttacatcctgggcgggacgggggagtggcgagccctcagacactgcatataagcag

SEQ ID NO: 103250 - DNA, 80 bp, synthetic construct
  source 1..80: mol_type = other DNA
atagtaatcttaataatgaggcttcacctggctagcagcacaacaagaggaggaggaggaggtgggctttccagtcagac

SEQ ID NO: 103251 - DNA, 80 bp, synthetic construct
  source 1..80: mol_type = other DNA
gacaatgacttctgaagaaatgaaaaactgctctttcaatgttaccacaaacataagagataaggtgaaagaagcatatg

SEQ ID NO: 103252 - DNA, 80 bp, synthetic construct
  source 1..80: mol_type = other DNA
gacaacaaagtctgaagaaatgaaaaactgctctttcaatgttaccacaaacataagagatgaggtgaaaaaagaacatg

SEQ ID NO: 103253 - DNA, 80 bp, synthetic construct
  source 1..80: mol_type = other DNA
ctgaagaaatgaaaaactgctctttcaatgttaccacaaacataagagataaggtgaaagaggcatatgcagtgtttaat

SEQ ID NO: 103254 - DNA, 80 bp, synthetic construct
  source 1..80: mol_type = other DNA
cagaggatttggctaaagatctggtcccccttatacttggtggcattggcctggcaataggctttacaagggataaggtc

SEQ ID NO: 103255 - DNA, 80 bp, synthetic construct
  source 1..80: mol_type = other DNA
agcgaacattgcggggtatcgaggatgcagtcatagatatggaagtgttgtccagtacgaatgtgacgcaattggttagg

SEQ ID NO: 103256 - DNA, 80 bp, synthetic construct
  source 1..80: mol_type = other DNA
aaattactgaagattgtaacaaattacaagcaattgcggataccgcaccactttccctcaattgtgacagaattgagaac

SEQ ID NO: 103257 - DNA, 80 bp, synthetic construct
  source 1..80: mol_type = other DNA
gtaaatcttgggccagtgtgtaggcgagtagacttcctggtctactgttccgccccagaaattgaacagatgcgaaggtc

SEQ ID NO: 103258 - DNA, 80 bp, synthetic construct
  source 1..80: mol_type = other DNA
aggccacggccctgaccatggaacgacaagatgagttccagttacaaggagcagtctacaactttgatgaggatagagtg

SEQ ID NO: 103259 - DNA, 80 bp, synthetic construct
  source 1..80: mol_type = other DNA
gccgcctttaccagcatggcccgagccaacggcctagggcttatcagtatggccaccttggggaagagattaagaagtgt

SEQ ID NO: 103260 - DNA, 80 bp, synthetic construct
  source 1..80: mol_type = other DNA
caagaccatggagggattgcgcaatgcattggtaggctataaaattgaagagtgtgatataatctggaacacccgaacct

SEQ ID NO: 103261 - DNA, 80 bp, synthetic construct
  source 1..80: mol_type = other DNA
aacctactcaattaagagcgatggtaaagctgtcacagtgaaagagaaacaaagcccatcatcagctcagcatcaagccg

SEQ ID NO: 103262 - DNA, 80 bp, synthetic construct
  source 1..80: mol_type = other DNA
tctgcacggccactctcgctctatccagactgcgtgcggcccgagcattggcctatgcctcttgccttcagagtgcagtt

SEQ ID NO: 103263 - DNA, 80 bp, synthetic construct
  source 1..80: mol_type = other DNA
atgtccgtgctccaagtggccggctctgctgtggtggtgagtagggcagtcaagcgtatgttcggtacgcgtgcagacca

SEQ ID NO: 103264 - DNA, 80 bp, synthetic construct
  source 1..80: mol_type = other DNA
accaacccttgaaggtggacataaggaacacaactgcagggtccatcgtgcagaggctgcaggtcgtggccccataggac

SEQ ID NO: 103265 - DNA, 80 bp, synthetic construct
  source 1..80: mol_type = other DNA
acgacggtgtcattgaacgctatggcctgtgcgagagtgaacaagaaggagaagatgaacaaacattggagctgccaact

SEQ ID NO: 103266 - DNA, 80 bp, synthetic construct
  source 1..80: mol_type = other DNA
gctagcaatgagggcaagaacaagggtaagactaagaagggccgaggtcgcaagtccaacttcaatgccttttcaagacg

SEQ ID NO: 103267 - DNA, 80 bp, synthetic construct
  source 1..80: mol_type = other DNA
gatggggtttttgggttagttcaacagtttttattaccaccactcatgttatcccaccaggctccaaagaagtttttgga

SEQ ID NO: 103268 - DNA, 80 bp, synthetic construct
  source 1..80: mol_type = other DNA
gcgtaacaacgaaaggttgtttgatgctgggggggtaaccccttcaaccgtgcccagcacatttgagagagacaactcga

SEQ ID NO: 103269 - DNA, 80 bp, synthetic construct
  source 1..80: mol_type = other DNA
caagggtggaaggaggtccgtcactacaacaagttctgagagaccaacttaagccctttgccgagcctcgcggtaggttg

SEQ ID NO: 103270 - DNA, 80 bp, synthetic construct
  source 1..80: mol_type = other DNA
ctggaatggcaccgcattcgttcgggagctaggagatcaagcagcccatgccaataacatgtttgaacttggaaaatcca

SEQ ID NO: 103271 - DNA, 80 bp, synthetic construct
  source 1..80: mol_type = other DNA
atggggccgttgatgaacaccagtctgtatcctggtctgctgccaatggagttgatattggggttggagacctaacaacc

SEQ ID NO: 103272 - DNA, 80 bp, synthetic construct
  source 1..80: mol_type = other DNA
attgtggggggcggaccttggtacagtcatccgtgccgctagagcttttggtccattttgtgaagccataaaaccacatg

SEQ ID NO: 103273 - DNA, 80 bp, synthetic construct
  source 1..80: mol_type = other DNA
gcaagctcaccgccaatccctccctagccgcagtagtggcacaagatttgctttctccttctgaaatggatgttggggat

SEQ ID NO: 103274 - DNA, 80 bp, synthetic construct
  source 1..80: mol_type = other DNA
aaaacagatggtcctatagtggttaagcagcaagtagatggtcttgtctttcttcgacgcactatctcaaaagatgccat

SEQ ID NO: 103275 - DNA, 80 bp, synthetic construct
  source 1..80: mol_type = other DNA
tggttaccaaggtcgtctcgaccggaattccattgagaggcagctttggtggacacgtggtcctaaccacgatgacccat

SEQ ID NO: 103276 - DNA, 80 bp, synthetic construct
  source 1..80: mol_type = other DNA
gtccgcgggccatactggaatctatgtccccttccaccactggatgcccgtaacaatggccccgcacaggagcctatcat

SEQ ID NO: 103277 - DNA, 80 bp, synthetic construct
  source 1..80: mol_type = other DNA
acatgagagtaaagattttgctggctgggaatgcgttcacagcgggtaaaataatcattagttgcattcctcctggtttt

SEQ ID NO: 103278 - DNA, 80 bp, synthetic construct
  source 1..80: mol_type = other DNA
acctcccaaagtgtgtctatagcacagatgactatgttccctcatataatcgctgatgtcagggtgttagaaccaattga

SEQ ID NO: 103279 - DNA, 80 bp, synthetic construct
  source 1..80: mol_type = other DNA
aattcccctggaggacgtgcggaacgtcctgttccataccaatgacaatcggccaactatgcggctggtatgcatgcttt

SEQ ID NO: 103280 - DNA, 80 bp, synthetic construct
  source 1..80: mol_type = other DNA
atacaccactcagggccaatggcagttcttcaggcactgatccttttgtcattgcaggcagggtcttgacttgccccgat

SEQ ID NO: 103281 - DNA, 80 bp, synthetic construct
  source 1..80: mol_type = other DNA
tccaccttcaactttctgttcttggtacccccaaatgtggagcagaaaactaaacagtttagtgtgcctaatctccctct

SEQ ID NO: 103282 - DNA, 80 bp, synthetic construct
  source 1..80: mol_type = other DNA
caattctctttctaattctagggtgcctagcctgatcaagtctatgatgatttctcgtgaccaagctcaagtaattcaat

SEQ ID NO: 103283 - DNA, 80 bp, synthetic construct
  source 1..80: mol_type = other DNA
ttcagaatggtcgggttacattagatggtcaattacagggtacaaccccgacttctgctagccaactctttaagcttcgg

SEQ ID NO: 103284 - DNA, 80 bp, synthetic construct
  source 1..80: mol_type = other DNA
ggcactgttttcactgcttctggcggtaagggactaaatttaacggagctcgacggcacaccctaccatgcctttgagag

SEQ ID NO: 103285 - DNA, 80 bp, synthetic construct
  source 1..80: mol_type = other DNA
atggccataatcgtgagatagcagttactcaagggtcagcatttgcaccccacctaggttctatacatttcactggaggt

SEQ ID NO: 103286 - DNA, 80 bp, synthetic construct
  source 1..80: mol_type = other DNA
ccattgttttctttatgtctgatggccccattgccaatgggctgaatggactgagtgtcccatgcacgctcccgcaagaa

SEQ ID NO: 103287 - DNA, 80 bp, synthetic construct
  source 1..80: mol_type = other DNA
tcgcaacttaggtgagttcaaaatctaccctgaaggatttatgacttgtgtgcctaatgctagtgggagtggtccccaaa

SEQ ID NO: 103288 - DNA, 80 bp, synthetic construct
  source 1..80: mol_type = other DNA
caggcagtgctgttggcgcaggcatccaggctggtacggaggccgcgctacagcatcagcgtttccaacaggacttaact

SEQ ID NO: 103289 - DNA, 80 bp, synthetic construct
  source 1..80: mol_type = other DNA
cttcaaaataatacctttaagcatgacaaggaaatgttagggctacaggttgaagcttcaacagctctcttgcagaatag

SEQ ID NO: 103290 - DNA, 80 bp, synthetic construct
  source 1..80: mol_type = other DNA
cttaggaacccgctacagcatgctcaccaatgctggtctcacctcagctgacgctgccagagctgttgccggggctccgg

SEQ ID NO: 103291 - DNA, 80 bp, synthetic construct
  source 1..80: mol_type = other DNA
taacccgggtggttgactggaatggcacgcgcattgcagcccccacatcaacccagaccactcttaggtcaggtggcttc

SEQ ID NO: 103292 - DNA, 80 bp, synthetic construct
  source 1..80: mol_type = other DNA
atgagtgtgccaatagtgtacagagggaaacaacagcagccttctggtggctttcacaaccccaactacgacgcgcagtc

SEQ ID NO: 103293 - DNA, 80 bp, synthetic construct
  source 1..80: mol_type = other DNA
tacatctactcgcacgtctcagtgggtgtcttcacagtcctcttctttgtcaactctttcaccataccatcctaatgctc

SEQ ID NO: 103294 - DNA, 80 bp, synthetic construct
  source 1..80: mol_type = other DNA
tccgaaccgcttgggtcaccccccccggttcgacatctacgtctacactttcttcaaattctactattactagattcttt

SEQ ID NO: 103295 - DNA, 80 bp, synthetic construct
  source 1..80: mol_type = other DNA
aatactgaaaggttacctctattcgcaaatatgaggagatagttttgtaatatgaaatgtgggcatcatattcaattggc

SEQ ID NO: 103296 - DNA, 80 bp, synthetic construct
  source 1..80: mol_type = other DNA
tacgggcatcaaacccttgataagcaaactctcggacccactgttcaatctcattgcggtccactgcttgagcagcaaac

SEQ ID NO: 103297 - DNA, 80 bp, synthetic construct
  source 1..80: mol_type = other DNA
attagaacctgtgttgatccccttacctgatgttaggaacaacttttatcattataatcagtcaaaagaaaaagatccca

SEQ ID NO: 103298 - DNA, 80 bp, synthetic construct
  source 1..80: mol_type = other DNA
tgcaccttcagaggggacgtcacccacatttcaggctcccacaattacacaatgaatttggcatccctaaattggaacaa

SEQ ID NO: 103299 - DNA, 80 bp, synthetic construct
  source 1..80: mol_type = other DNA
attttcattctttgtcaaggactggccagaaaagatcgaggaattccttatcaaaccatgtccgtttttaaagaagcaag

SEQ ID NO: 103300 - DNA, 80 bp, synthetic construct
  source 1..80: mol_type = other DNA
cctgtgcgcctgatcgatgccctcccacctgtatttatatagctgggatggctgagcttggtgctttcttttcaatactc

SEQ ID NO: 103301 - DNA, 80 bp, synthetic construct
  source 1..80: mol_type = other DNA
gttctctttctttgtgaaggactggccagaaaagaatgaggagtttttaattaagccctgccccttcttaaagaaacagg

SEQ ID NO: 103302 - DNA, 80 bp, synthetic construct
  source 1..80: mol_type = other DNA
cctgtgcgcctgacagatgtcctcccacatgcatttatattgcagggatggctgagcttggagcatttttttcgatactc

SEQ ID NO: 103303 - DNA, 80 bp, synthetic construct
  source 1..80: mol_type = other DNA
ggaaacctaaataaatgctcatcattatttggtgcagcagtttccctgctatttaggaaaatttggagtctgctttaccc

SEQ ID NO: 103304 - DNA, 80 bp, synthetic construct
  source 1..80: mol_type = other DNA
actgccgccttacataatgggctgccagatgaccgtcttagaaattgtgtgattgatgctcttagaaatgtttataaaac

SEQ ID NO: 103305 - DNA, 80 bp, synthetic construct
  source 1..80: mol_type = other DNA
ttgactgtaaatggggagtattaatattagccctgttgcggtacaaatgtggtaaaagtagactaacagttgctaaaggt

SEQ ID NO: 103306 - DNA, 80 bp, synthetic construct
  source 1..80: mol_type = other DNA
gttgcaattccagatagtgtacaaatattggtgggatacatgacaatgtaatatgttatcacttatttttttattttgct

SEQ ID NO: 103307 - DNA, 80 bp, synthetic construct
  source 1..80: mol_type = other DNA
agacggggagggcacggggtgtaacggctggttttatgtacaagctattgtagacaaaaaaacaggagatgtaatatctg

SEQ ID NO: 103308 - DNA, 80 bp, synthetic construct
  source 1..80: mol_type = other DNA
cgaacttaaataaaagccctgctgcttttcgtattgtcgtggcttgccagacatatgcactgcactgggtacagtattaa

SEQ ID NO: 103309 - DNA, 80 bp, synthetic construct
  source 1..80: mol_type = other DNA
tgcattgcttgtctctatgaccaatcatagctttagtgtccagaagcatgtgggtgctccagctaacttacgagttgttg

SEQ ID NO: 103310 - DNA, 80 bp, synthetic construct
  source 1..80: mol_type = other DNA
gtcacactatgcagggaactcttcttaagttgacagtggattcgtctaacccgaatacacctgcctacacttttactact

SEQ ID NO: 103311 - DNA, 80 bp, synthetic construct
  source 1..80: mol_type = other DNA
tcccccacactcatttactcttggaggtaaggtagagctgcttgttccacgtaacaagtggagcggcaattctactcttg

SEQ ID NO: 103312 - DNA, 80 bp, synthetic construct
  source 1..80: mol_type = other DNA
gttaagcctggcgcatcgtttagcgttctggcgtgctataatggccgccctacaggcacttttacagttattatgaggcc

SEQ ID NO: 103313 - DNA, 80 bp, synthetic construct
  source 1..80: mol_type = other DNA
gaattacacaattaagggttctttcttgtgtggatcgtgcggtagtgttggttacactaaggaaggtaatgtaatcaact

SEQ ID NO: 103314 - DNA, 80 bp, synthetic construct
  source 1..80: mol_type = other DNA
ttacagagtttgttggtactcaggcccttgatatgctagctgttaagaccggcgttgccattgaacagctactctctgct

SEQ ID NO: 103315 - DNA, 80 bp, synthetic construct
  source 1..80: mol_type = other DNA
atacaacagctgcaccaaggcttccagggcaaacaaatcctgggaaacagcatgctggaagatgaattcacacccgaaga

SEQ ID NO: 103316 - DNA, 80 bp, synthetic construct
  source 1..80: mol_type = other DNA
tgttaacatgcagattatgggtgttgtaatgcaaagtggtgtacggagagtgacttatggcatgttccattggctcgttg

SEQ ID NO: 103317 - DNA, 80 bp, synthetic construct
  source 1..80: mol_type = other DNA
ctacattggtacttacatacgtcgccatgttacagtgcaccaagttcacattgtggaattacttgtttgagaccattcca

SEQ ID NO: 103318 - DNA, 80 bp, synthetic construct
  source 1..80: mol_type = other DNA
acacagttaactccacttatgatcattgttgctgcatgctttatgtttctcgttaaacataagcacactttcttaactct

SEQ ID NO: 103319 - DNA, 80 bp, synthetic construct
  source 1..80: mol_type = other DNA
gccttaaagagaagattctttacaccttctatggtaaagagtcacttaataatgcatcttacatctaccactctgctttc

SEQ ID NO: 103320 - DNA, 80 bp, synthetic construct
  source 1..80: mol_type = other DNA
ctacttgttgcccgtagctatctcgcttacctatgcgaatatagtctatgagccttcaacccctatttcctctgccctca

SEQ ID NO: 103321 - DNA, 80 bp, synthetic construct
  source 1..80: mol_type = other DNA
ttgccattgccaactggatggcgccgcagagtgtttatatgaggactacccacactgatctaggagtctacctcagcttg

SEQ ID NO: 103322 - DNA, 80 bp, synthetic construct
  source 1..80: mol_type = other DNA
accctagcattggctgttgttgtccgtcgcctgtacacaccatctctgtcgaatctcgcattagccttatgcagtttcgt

SEQ ID NO: 103323 - DNA, 80 bp, synthetic construct
  source 1..80: mol_type = other DNA
tatgtgggtgtatacttatagcattggtgaacattctagtcccattgcctaccttatgtttatcactacgctgactagtg

SEQ ID NO: 103324 - DNA, 80 bp, synthetic construct
  source 1..80: mol_type = other DNA
actatactattactgtcttcgtgtcagtaaaccttgcaaaattcttcacatacgtcatcttcgcatacacacctcatgtg

SEQ ID NO: 103325 - DNA, 80 bp, synthetic construct
  source 1..80: mol_type = other DNA
tctctggttatgccggaagtgaagatgattctcttactgtacacttgtcttggttacatctgtacgtgctattttggtgt

SEQ ID NO: 103326 - DNA, 80 bp, synthetic construct
  source 1..80: mol_type = other DNA
cttctctttattaaactttaagttacgtacacctctcggggtctatgactataaagtttcaactcaggagttcagataca

SEQ ID NO: 103327 - DNA, 80 bp, synthetic construct
  source 1..80: mol_type = other DNA
tctctgtgctgcaacaattgcacttagaggctaatagtaaggcatgggcatactgtgtcaagtgtcataacgatatattg

SEQ ID NO: 103328 - DNA, 80 bp, synthetic construct
  source 1..80: mol_type = other DNA
gcggaatgcacgagttgcggcagtggtcgatggctcacgggtaatgctgtgcagggatttgcatgtgaatgtggtgctca

SEQ ID NO: 103329 - DNA, 80 bp, synthetic construct
  source 1..80: mol_type = other DNA
tcttgataacttagctagtgacctcctcgacacaccctctgtgttgcaggccactctgtctgaattctcacatttggcta

SEQ ID NO: 103330 - DNA, 80 bp, synthetic construct
  source 1..80: mol_type = other DNA
gctttgctgaattggaagctgctcagaagtcttatcaggaagccctggactcaggtgacgcatcacctcaggttcttaag

SEQ ID NO: 103331 - DNA, 80 bp, synthetic construct
  source 1..80: mol_type = other DNA
gctctccaaaaggctgttaatgtggccaagaatgcctatgaaaaggacaaatctgtggctaggaaattagagcgcatggc

SEQ ID NO: 103332 - DNA, 80 bp, synthetic construct
  source 1..80: mol_type = other DNA
tgaacaggctatgacgtccatgtacaagcaagcacgcgctgaggataagaaatccaagatcgttagtgctatgcagacta

SEQ ID NO: 103333 - DNA, 80 bp, synthetic construct
  source 1..80: mol_type = other DNA
cacttagcgttgtaccactttgtgctgctaacaagcttagagttgttattccggacttcaatgtttggaaccaagttgtt

SEQ ID NO: 103334 - DNA, 80 bp, synthetic construct
  source 1..80: mol_type = other DNA
acgtatccctcgctcaattacgcgggtgcgctctgggacattacagtcattaataatgtggacaatgagattgttaaatc

SEQ ID NO: 103335 - DNA, 80 bp, synthetic construct
  source 1..80: mol_type = other DNA
cctctgatattactgagaataacgagaatttgacatggccacttgttcttgaatgcactagggcagcagcatctgctgtt

SEQ ID NO: 103336 - DNA, 80 bp, synthetic construct
  source 1..80: mol_type = other DNA
aagttgcaaaataatgagatcaaacccactggtcttaaaactatgattgtctcggccggtcaggaccaggcaacttgcaa

SEQ ID NO: 103337 - DNA, 80 bp, synthetic construct
  source 1..80: mol_type = other DNA
ttatcatgccaatgatactgagctccaatcctctgggttgatcaagcccaatgctctcttctgcgcaacttgtcccttcg

SEQ ID NO: 103338 - DNA, 80 bp, synthetic construct
  source 1..80: mol_type = other DNA
tgtgagctctctggcatactatgaacctgttcagggtcgtaaaatgcttatgggcttgctttctgagaacgcctacctca

SEQ ID NO: 103339 - DNA, 80 bp, synthetic construct
  source 1..80: mol_type = other DNA
aatgggccaaagttgaaggacaggatggttttataactattgagttacagccaccttgcaaattcttgattgctggacct

SEQ ID NO: 103340 - DNA, 80 bp, synthetic construct
  source 1..80: mol_type = other DNA
ctaccgttcgtctacaggctggttctaacacagaattcgctgctaattcttcagtactttcacttgtgaactttactgtt

SEQ ID NO: 103341 - DNA, 80 bp, synthetic construct
  source 1..80: mol_type = other DNA
gactggtacgggtgttgctatatccgtcaagcctgagagtaatgctgaccaagaatcctacggtggtgcatcagtgtgtc

SEQ ID NO: 103342 - DNA, 80 bp, synthetic construct
  source 1..80: mol_type = other DNA
agtgtactcgagaccctgttggtttctgtttaatgaataccccctgtaatgtctgtcaatattgggttggatacgggtgc

SEQ ID NO: 103343 - DNA, 80 bp, synthetic construct
  source 1..80: mol_type = other DNA
ctaagggtgacagttgctctgctaattgcaaacactcagtggcccagttggtgagcacactgactgagcgctgcactgtt

SEQ ID NO: 103344 - DNA, 80 bp, synthetic construct
  source 1..80: mol_type = other DNA
aaggattgtgatgccgttgcgcgtcatgatttctttgtctttgacgttgataaggtaaagaccccacatattgtccgtca

SEQ ID NO: 103345 - DNA, 80 bp, synthetic construct
  source 1..80: mol_type = other DNA
gaggttgactgaatataccatgatggatcttgtctacgctcttaggcactttgatcaagataattgtgaagttcttaaga

SEQ ID NO: 103346 - DNA, 80 bp, synthetic construct
  source 1..80: mol_type = other DNA
gtattctagttaagtatggctgctgtgatgcatcctactttgataataagctttggtttgatttcgttgagaacccaggc

SEQ ID NO: 103347 - DNA, 80 bp, synthetic construct
  source 1..80: mol_type = other DNA
attattggtgtctatcacaagcttggtgaacgtgttcgtcaggctgtgcttaacaccgtcaaattttgtgaccatatggt

SEQ ID NO: 103348 - DNA, 80 bp, synthetic construct
  source 1..80: mol_type = other DNA
gtcagtaggccttgttggtgtcttaacattagacaaccaagacctcaatggcaagtggtatgattttggtgatttcgtta

SEQ ID NO: 103349 - DNA, 80 bp, synthetic construct
  source 1..80: mol_type = other DNA
tcacccaacctggttcaggagtggctgtcgttgatagttactattcttatttaatgcctgttctgtctatgactgactgt

SEQ ID NO: 103350 - DNA, 80 bp, synthetic construct
  source 1..80: mol_type = other DNA
gtgcctgatggtaagtccttcgtcgtcgtctttgggggcgtagtctacgcctaccttggatgtactgatggtactatgta

SEQ ID NO: 103351 - DNA, 80 bp, synthetic construct
  source 1..80: mol_type = other DNA
ctttgtcccccgtgccaagtcagtcgtctccaagattggtgacgctgtcttcactggatgtgtaggcacgtggtccaagg

SEQ ID NO: 103352 - DNA, 80 bp, synthetic construct
  source 1..80: mol_type = other DNA
ttactaaggttgcaaatctcttcctgcaagaaacgcagcatgccctgaacttcgtcggggaggttgtcattaacgatgtc

SEQ ID NO: 103353 - DNA, 80 bp, synthetic construct
  source 1..80: mol_type = other DNA
caactccccataagatggttctgtctgtctcaccatacgtctgcaatgcacctggttgtgatgttgctgacgttactaaa

SEQ ID NO: 103354 - DNA, 80 bp, synthetic construct
  source 1..80: mol_type = other DNA
aactgtaccttggcggtatgagctacttctgtgtagaccatcgtccagtgtgcagttttcctctctgcagtaatggcctt

SEQ ID NO: 103355 - DNA, 80 bp, synthetic construct
  source 1..80: mol_type = other DNA
gtgtttggtctttacaagaatatgtgcacaggtagtccttctattgttgaattcaataggcttgctacttgtgactggac

SEQ ID NO: 103356 - DNA, 80 bp, synthetic construct
  source 1..80: mol_type = other DNA
gttttggcaatcctctctggcaccacttctaatgtggggaaaatccgacagctcattcaagacgtcagtcttgaaaagct

SEQ ID NO: 103357 - DNA, 80 bp, synthetic construct
  source 1..80: mol_type = other DNA
tactggattatatccaaccattactgtgcctgaagaattttcgagccatgtggccaattttcagaaggcaggttttagta

SEQ ID NO: 103358 - DNA, 80 bp, synthetic construct
  source 1..80: mol_type = other DNA
gcgagattactgtgctgactatgacattgctgtcacagccggtccatatgttgatggagccattaatgttggcaaacacg

SEQ ID NO: 103359 - DNA, 80 bp, synthetic construct
  source 1..80: mol_type = other DNA
ggacctgacatatttcttagtatgtgctacaggtgccctaaggaaattgttaacactgtgagtgccctcgtctatagcaa

SEQ ID NO: 103360 - DNA, 80 bp, synthetic construct
  source 1..80: mol_type = other DNA
caagttgttagctaagcgagaagcctctggtcagtgtttcaaagtactctataagggcaatgttacgcatgatgccagct

SEQ ID NO: 103361 - DNA, 80 bp, synthetic construct
  source 1..80: mol_type = other DNA
cacgcgcgcaaacgggtattctttgtgtaatgacctctcaggcattgtttgattccttacaatttgctgagttgtctact

SEQ ID NO: 103362 - DNA, 80 bp, synthetic construct
  source 1..80: mol_type = other DNA
aataattacaagctccagtcacagatagttactggactttttaaagattgctccagagagtacactggactgcatccagc

SEQ ID NO: 103363 - DNA, 80 bp, synthetic construct
  source 1..80: mol_type = other DNA
ttatgcaccaacatatgttaatgttgatgataagtataagactagtgatgcgctttgcgtgaacctgaatattcccgcaa

SEQ ID NO: 103364 - DNA, 80 bp, synthetic construct
  source 1..80: mol_type = other DNA
atgtgccttattcacgtgttatctcacgcatgggatttaagcttgatgcgaatgtaccaggctatcctaaactcttcatt

SEQ ID NO: 103365 - DNA, 80 bp, synthetic construct
  source 1..80: mol_type = other DNA
actcgtgaggaggctgtcaggcaagtcaggagctggattggcttcgacgttgagggtgcacatgcttcgaggaatgcgtg

SEQ ID NO: 103366 - DNA, 80 bp, synthetic construct
  source 1..80: mol_type = other DNA
gacttgagttcgccgccattactgctcctttcgtgattctcaacgggctcggtgagtcttttaagaaagctgctgccatt

SEQ ID NO: 103367 - DNA, 80 bp, synthetic construct
  source 1..80: mol_type = other DNA
tgttgggcccatggcttcgaattgacatctgcatcctatttttgcaagataggtcgtgagcaacggtgttgtatgtgtaa

SEQ ID NO: 103368 - DNA, 80 bp, synthetic construct
  source 1..80: mol_type = other DNA
aatgttgtgcgtgctgcactcctcgctggatctttcgataaggtctatgacatcggcaaccccaagggaattcctattgt

SEQ ID NO: 103369 - DNA, 80 bp, synthetic construct
  source 1..80: mol_type = other DNA
ccgtttaaggcttgcagctcctttaaggcaactctagagtactatgctgaaaacatactctatagagttttcccctatga

SEQ ID NO: 103370 - DNA, 80 bp, synthetic construct
  source 1..80: mol_type = other DNA
gatgtcgtctgatgtctctgtattctcttcactgcttctggactgcgtcgggttcactgcagcatcaacttactttgtag

SEQ ID NO: 103371 - DNA, 80 bp, synthetic construct
  source 1..80: mol_type = other DNA
attcgtgatagtgaggctgtaaagcaaccagtgaagttctatatttataagagagtcaacagcgagtttgttgatttcac

SEQ ID NO: 103372 - DNA, 80 bp, synthetic construct
  source 1..80: mol_type = other DNA
tgatagttattatactcaaggtcgctcttgcagtgattttgagcccatgtctgacatggagaaagacttcctgtctatgg

SEQ ID NO: 103373 - DNA, 80 bp, synthetic construct
  source 1..80: mol_type = other DNA
aaagtgatgttttcattaagaagtataagttggaaaactatgcttttgagcatgtagtatatggtgatttttcacatact

SEQ ID NO: 103374 - DNA, 80 bp, synthetic construct
  source 1..80: mol_type = other DNA
ttaactatgattcagtttatgctatggtgtaaggatggccaggttcaaaccttttacccaaggctccaagcgagtaacga

SEQ ID NO: 103375 - DNA, 80 bp, synthetic construct
  source 1..80: mol_type = other DNA
tgcgtctgctggacgaaaaagctgaggcacttgtttccactatcttttcttcctgccagaaggcagtggcatccttcatt

SEQ ID NO: 103376 - DNA, 80 bp, synthetic construct
  source 1..80: mol_type = other DNA
tgtatgatccaattacaaagactgaaaaaggtaagaacgatgccaaggcactcttctttacttacctttgcagttttatt

SEQ ID NO: 103377 - DNA, 80 bp, synthetic construct
  source 1..80: mol_type = other DNA
aaaaataatcttgctctaggaggttcagttgcaatcaagatgactgaacattcatggagcgcagatctttatgaattaat

SEQ ID NO: 103378 - DNA, 80 bp, synthetic construct
  source 1..80: mol_type = other DNA
gggaaaattcgcttggtggactgtcttctgcactaacgcgaatgcatcctcttctgaaggatttctcattggaattaatt

SEQ ID NO: 103379 - DNA, 80 bp, synthetic construct
  source 1..80: mol_type = other DNA
actacatgttttgaagcgactgcagccactgtcaatttcctttgggaactggctgatctcttccgaactctcctcaacaa

SEQ ID NO: 103380 - DNA, 80 bp, synthetic construct
  source 1..80: mol_type = other DNA
ctactgatgtgctcgttaacttttataaaagggtatgttgacatgtcacctaatagcccagctgagcaatgccctgacgt

SEQ ID NO: 103381 - DNA, 80 bp, synthetic construct
  source 1..80: mol_type = other DNA
tgacatgcaaccctcctattttactacgttgtggcctgtacctataaatgcctccaatgctgatggaattatctacccga

SEQ ID NO: 103382 - DNA, 80 bp, synthetic construct
  source 1..80: mol_type = other DNA
gtggtagaacttattctaaccttactctcttgcgtagtggtttgtatcctaggcaaggagatttaggtaggcagtttgtg

SEQ ID NO: 103383 - DNA, 80 bp, synthetic construct
  source 1..80: mol_type = other DNA
tatagtgctgcccatactggtaatggtcagaataaacctttcattagtaattattcttactatgcttataattttagcga

SEQ ID NO: 103384 - DNA, 80 bp, synthetic construct
  source 1..80: mol_type = other DNA
cggcattgttattcgtataggacatgccgccggtaaaataggtaatacaatcatttcaccttctactacgaaggcaatga

SEQ ID NO: 103385 - DNA, 80 bp, synthetic construct
  source 1..80: mol_type = other DNA
agaaaatctatccagcccttttactgggttctgcttttggtaaatttccttctagtggtaaattaggttattatattaat

SEQ ID NO: 103386 - DNA, 80 bp, synthetic construct
  source 1..80: mol_type = other DNA
cacactcttattattcttccagaggattgtggtaggagtttgagtgtcctctattgtactctcatccctcgtgcagctag

SEQ ID NO: 103387 - DNA, 80 bp, synthetic construct
  source 1..80: mol_type = other DNA
tcgctgccctgcatttgattcgacttatattagttatgtcttaacggaccccgttaattgtcgcacttcaaatatgaatg

SEQ ID NO: 103388 - DNA, 80 bp, synthetic construct
  source 1..80: mol_type = other DNA
ctacacttaattcatttaagatgtggtttaatttagacaggtgtcatttttggcgccagtataatattactgaggatgag

SEQ ID NO: 103389 - DNA, 80 bp, synthetic construct
  source 1..80: mol_type = other DNA
aaaccagaatggttcggcattactcaggatgctaatggtgtccatttgtacacatcccgtattaatggtggtttagagac

SEQ ID NO: 103390 - DNA, 80 bp, synthetic construct
  source 1..80: mol_type = other DNA
ggcctatgtctacacttccaagggatttgtagcgaccagaggcagagtttccgctcttacaaagcagttgctcgatatgc

SEQ ID NO: 103391 - DNA, 80 bp, synthetic construct
  source 1..80: mol_type = other DNA
tgggaacctctttgagtttgatgtcttacctatctatgatcgcctaaagtattatactgttatgcctcgctccaatcccg

SEQ ID NO: 103392 - DNA, 80 bp, synthetic construct
  source 1..80: mol_type = other DNA
cctctacaaatgatgatagagaggcttgggctgctaattacatctattctctgtcctatggctcatacctattggatttt

SEQ ID NO: 103393 - DNA, 80 bp, synthetic construct
  source 1..80: mol_type = other DNA
gatttgaatggtgtcattactagagctgttgattgtggagctgatgatctttcacagcttatgtgttcttataactcttt

SEQ ID NO: 103394 - DNA, 80 bp, synthetic construct
  source 1..80: mol_type = other DNA
tgatgtggattctggtatatactcagtctcatcttttgaggctaaaccccagggttcattcatagagagtgtctatgaag

SEQ ID NO: 103395 - DNA, 80 bp, synthetic construct
  source 1..80: mol_type = other DNA
gtaatgagtgtgatttcactaagctttttattggacaagttcctcaaccgtatgagtttggtcggcttgtttttactaac

SEQ ID NO: 103396 - DNA, 80 bp, synthetic construct
  source 1..80: mol_type = other DNA
tgtaattataactttactaagttactttcatattttcaggttaacacttttcagtgtcaaaaagttacacctgaatctat

SEQ ID NO: 103397 - DNA, 80 bp, synthetic construct
  source 1..80: mol_type = other DNA
agctacgggttgttattcatcccttactgttgactggtttgcttatagggttgaagataaatccgatttgcttccaggct

SEQ ID NO: 103398 - DNA, 80 bp, synthetic construct
  source 1..80: mol_type = other DNA
cctctagtgaccttcagaggtttaattataaacccacctattctaatcctacttgtttaatttctgcttatactaattta

SEQ ID NO: 103399 - DNA, 80 bp, synthetic construct
  source 1..80: mol_type = other DNA
gttcctttaggtggtgttaaccccactaattacacaacccttactaattgttatggttgtgtggataaggaccctgctaa

SEQ ID NO: 103400 - DNA, 80 bp, synthetic construct
  source 1..80: mol_type = other DNA
tccatggggtgaccagatctgtataccagaatttgttacggaagtagaacctggattcagaccaaaaccttcttgcgccc

SEQ ID NO: 103401 - DNA, 80 bp, synthetic construct
  source 1..80: mol_type = other DNA
ttaccaaggctatgcagctgctgcacaccaaggtttcttgggctggtgctaaggttcgtgctgttatttataacagtcgc

SEQ ID NO: 103402 - DNA, 80 bp, synthetic construct
  source 1..80: mol_type = other DNA
gcgttgggctagaaggtcatatttctggtaatgatacttattcagccattgttactaatggcgaattagactctacgggc

SEQ ID NO: 103403 - DNA, 80 bp, synthetic construct
  source 1..80: mol_type = other DNA
gatcccatttggcgtaaaggtgtagcacttaccaaacagcccattgattctagtcgagctgatttagcattctttgtcag

SEQ ID NO: 103404 - DNA, 80 bp, synthetic construct
  source 1..80: mol_type = other DNA
tgtgcagattgatgctcaatctagttctgtctgtcctcttggtgctcccaagtctaatcatagtgcacctccactggata

SEQ ID NO: 103405 - DNA, 80 bp, synthetic construct
  source 1..80: mol_type = other DNA
ggtgtattgaatatgagctttatggcgtcataggtacgggcgtcttccaagtttgtaatgctactggcgttcgcgaacag

SEQ ID NO: 103406 - DNA, 80 bp, synthetic construct
  source 1..80: mol_type = other DNA
cgtttcgtttacgacaggtttgataatttagttggctattttgcgaataatggattttactactgtattagtccttgtgt

SEQ ID NO: 103407 - DNA, 80 bp, synthetic construct
  source 1..80: mol_type = other DNA
tagtgtacccgtgtcggttatatatgataaggactctaatacacatgccacactattttctagtgttgcttgtactcata

SEQ ID NO: 103408 - DNA, 80 bp, synthetic construct
  source 1..80: mol_type = other DNA
ttacatcttttatgtcgcaattttccagagaaactcagtcattattgcgacgtagagatgtaggaccccttcagtcgccg

SEQ ID NO: 103409 - DNA, 80 bp, synthetic construct
  source 1..80: mol_type = other DNA
gttggttgtcttattgggttcttcaattcttctgaacttgtggaagattgtaatcttccactaggtcaatcactgtgcgc

SEQ ID NO: 103410 - DNA, 80 bp, synthetic construct
  source 1..80: mol_type = other DNA
tatacctccatcaccccactctagaactaactctgggtttgcattatctcttatagcttatccagagcctattgttgtgc

SEQ ID NO: 103411 - DNA, 80 bp, synthetic construct
  source 1..80: mol_type = other DNA
cagttattaatgcctcaacatttgttgcttctattcctaccaattttacttttggggtgactcaggaatttatagaaaca

SEQ ID NO: 103412 - DNA, 80 bp, synthetic construct
  source 1..80: mol_type = other DNA
gactctctagtgtttccctcgggaacctattactgtgttgccaccagagctaaggccatccaggatgatcttgacgtcgc

SEQ ID NO: 103413 - DNA, 80 bp, synthetic construct
  source 1..80: mol_type = other DNA
tccattcagaaagttactgttgattgcaagcagtatgtttgtaatggattttttaaatgtgaacagttgcttaaccagta

SEQ ID NO: 103414 - DNA, 80 bp, synthetic construct
  source 1..80: mol_type = other DNA
tggtcaattctgttctaaaattaatttagctcttcatggtgctaatctacagcaggatgatgcacagaagttgctctttt

SEQ ID NO: 103415 - DNA, 80 bp, synthetic construct
  source 1..80: mol_type = other DNA
ctaacattaagacctcccagtcccaacccttccaggcggggtttgggggtccctttaatctttcacttctagagcccctt

SEQ ID NO: 103416 - DNA, 80 bp, synthetic construct
  source 1..80: mol_type = other DNA
aatgttcaaacgtcccaatatggttatagaagtgctattgaagatcttttgtttaataagattactatagctgaccctgg

SEQ ID NO: 103417 - DNA, 80 bp, synthetic construct
  source 1..80: mol_type = other DNA
ctatatgcagggttatgatgaatgcatgaaacagggacctcaatctgccagggatctgatctgtgctcaatttgttgctg

SEQ ID NO: 103418 - DNA, 80 bp, synthetic construct
  source 1..80: mol_type = other DNA
gatacaaagttctcccgccattatatgaccccaatatggaagctgcttacactgcttctctcttgggtagtatcgctgga

SEQ ID NO: 103419 - DNA, 80 bp, synthetic construct
  source 1..80: mol_type = other DNA
gtcggatacacagctggtctatcatccttcgcagcgatacccttcgcacagtctattttctaccggatgaatggtattgg

SEQ ID NO: 103420 - DNA, 80 bp, synthetic construct
  source 1..80: mol_type = other DNA
tattactcagcaagttctctctgagaatcagaagttaattgccaataaattcaaccaggctttaggtgctatgcaaactg

SEQ ID NO: 103421 - DNA, 80 bp, synthetic construct
  source 1..80: mol_type = other DNA
gctttacgtctactaacatggcatttgctaaggttcaggaggctgtaaatgctaatgctcaggccttatctaagttggca

SEQ ID NO: 103422 - DNA, 80 bp, synthetic construct
  source 1..80: mol_type = other DNA
tctgaattgtcaaatacttttggtgcaatttcttcatctattggtgagatacttaagcgtctcgatgttatagagcaaga

SEQ ID NO: 103423 - DNA, 80 bp, synthetic construct
  source 1..80: mol_type = other DNA
cttacctggtgagcttgctaagaagcaacttggtttgctagaacctactagccactccgctactgtggatgtgaatgtcc

SEQ ID NO: 103424 - DNA, 80 bp, synthetic construct
  source 1..80: mol_type = other DNA
agttcagattgaccggcttattaatggtcggcttactactctcaacgcatttgtcgcgcagcaactcgtgcgttctgaaa

SEQ ID NO: 103425 - DNA, 80 bp, synthetic construct
  source 1..80: mol_type = other DNA
ctgctgcccgatccgctcagttagcccaagataaggttaatgagtgtgttaaatcacaatcattacgtcaaggcttctgc

SEQ ID NO: 103426 - DNA, 80 bp, synthetic construct
  source 1..80: mol_type = other DNA
ggttctggtactcatattgtctcatttgttgtcaatgcaccaaatggtttgtattttatgcatgttggctatttgcctac

SEQ ID NO: 103427 - DNA, 80 bp, synthetic construct
  source 1..80: mol_type = other DNA
gcaacatataaatgttacagctgcctacgggctctgtaactctgctaatccacctcgctgtattgcgcctgttggtggtt

SEQ ID NO: 103428 - DNA, 80 bp, synthetic construct
  source 1..80: mol_type = other DNA
attttataacgcaagatgatgttactcgtgatgcagaacccaagtggttgtttactggtagtagttattacaaccctgaa

SEQ ID NO: 103429 - DNA, 80 bp, synthetic construct
  source 1..80: mol_type = other DNA
cccatcacgagcactaatacaaggccagcttctgctgagtttacatttcagaatatttctactaatttacctcctccttt

SEQ ID NO: 103430 - DNA, 80 bp, synthetic construct
  source 1..80: mol_type = other DNA
actcaacaatgccaccggatccgataaggatttttccgatgagttgaatgagttttttaaaaatgtaacttcttccatac

SEQ ID NO: 103431 - DNA, 80 bp, synthetic construct
  source 1..80: mol_type = other DNA
caaattttggctcagttacacaaattaatgccactgtcttagatctcaaaaatgagatggacattttacaggaagtagtt

SEQ ID NO: 103432 - DNA, 80 bp, synthetic construct
  source 1..80: mol_type = other DNA
aaggctcttaatgagtcatatattgaccttaaggagcttggtaattatacctactatgaaaaatggccgtggtacatatg

SEQ ID NO: 103433 - DNA, 80 bp, synthetic construct
  source 1..80: mol_type = other DNA
gttaggttttatcgcaggactgcttgcccttgccctttgtgttttctttctcttgtgttgcacaggttgtggcaccagtt

SEQ ID NO: 103434 - DNA, 80 bp, synthetic construct
  source 1..80: mol_type = other DNA
aaaacagaacagtagaggtggttgttggccaactggaggaaactaatatgcatggtcctgacatgattgtgggggactat

SEQ ID NO: 103435 - DNA, 80 bp, synthetic construct
  source 1..80: mol_type = other DNA
gtatgggaaagttgaagtgtaaccgttgctgtgataaatatgaagagtacgactttgagccgcataagattcatattcat

SEQ ID NO: 103436 - DNA, 80 bp, synthetic construct
  source 1..80: mol_type = other DNA
taagcaacgagctttattatgagggttcagagggctccacagcctttttccttcttcattttgttcatactcttggctta

SEQ ID NO: 103437 - DNA, 80 bp, synthetic construct
  source 1..80: mol_type = other DNA
tgcattatctaaacctttggttggatatgtacctgagcattgtcagtcatatactggctcaatgcttagggcttgtattg

SEQ ID NO: 103438 - DNA, 80 bp, synthetic construct
  source 1..80: mol_type = other DNA
agcagacgaaatttgacacagctggtatgtacactaaccgtgttatttcagatgttcctgctactgattctaatcagatt

SEQ ID NO: 103439 - DNA, 80 bp, synthetic construct
  source 1..80: mol_type = other DNA
tttgttgatcgtgactcagaggctgatcatactgtgtattatgatcaccagactggcacatcctactatgacgttggtgt

SEQ ID NO: 103440 - DNA, 80 bp, synthetic construct
  source 1..80: mol_type = other DNA
ctctcaaaattaacgaactctatggattacgtgtctctgcttaaccaagtgtggcagagacttactaactcagcttcaaa

SEQ ID NO: 103441 - DNA, 80 bp, synthetic construct
  source 1..80: mol_type = other DNA
tcctggtcagtgggttgccagacctgatatctcctattgccccgttactggtacagctcaacaccctgtccagtggcagt

SEQ ID NO: 103442 - DNA, 80 bp, synthetic construct
  source 1..80: mol_type = other DNA
gtactctcacctttgctggttacactgctcaggcggtcaatagcactaaggcattagccaagcaagatgcagcaagacgg

SEQ ID NO: 103443 - DNA, 80 bp, synthetic construct
  source 1..80: mol_type = other DNA
gttgcctgggaattgcatcgcgacggcaaactgtcaggttgcagccttcgatggcgttatccgtaatcggaaacgccgtc

SEQ ID NO: 103444 - DNA, 80 bp, synthetic construct
  source 1..80: mol_type = other DNA
atgatccttctaagaagactcgctatgctaagcgacgcttctccccacttgtatctcgtgatgtagtgatggctgagtta

SEQ ID NO: 103445 - DNA, 80 bp, synthetic construct
  source 1..80: mol_type = other DNA
gtcatcattagcgataaactctttgtcagaagcgtggaagaaggacagactgtcttctatcctgcctgcatcgacggtaa

SEQ ID NO: 103446 - DNA, 80 bp, synthetic construct
  source 1..80: mol_type = other DNA
cagcctactcactatctcagagtcgtttttgatgaacccagaaactggcattgcctctctgggcacatgtttgatgagtt

SEQ ID NO: 103447 - DNA, 80 bp, synthetic construct
  source 1..80: mol_type = other DNA
gcagcgttggctcggcgcatatggtgtgtcaaccaatccagacttgcatataacattggcccttcttatgtgtgatgaga

SEQ ID NO: 103448 - DNA, 80 bp, synthetic construct
  source 1..80: mol_type = other DNA
cggaaccatttgacgatattgaaccactaactagtctgctgaaaaacgttatgtttgacttatgtggttttactgtgcta

SEQ ID NO: 103449 - DNA, 80 bp, synthetic construct
  source 1..80: mol_type = other DNA
ggcaggactttagtcctaaatgctcatgagactaaccgcgctggagactctcccccggttaacatggcattgccccatat

SEQ ID NO: 103450 - DNA, 80 bp, synthetic construct
  source 1..80: mol_type = other DNA
tagggaatggctgcgtgtacatgcctacaacatctacaatagtggtcttcctcttcatatgtctattgctaagctccacc

SEQ ID NO: 103451 - DNA, 80 bp, synthetic construct
  source 1..80: mol_type = other DNA
accttgatgacaccatgcgtgcctacataggttcgagatcttaccttaagcaatatattacccgtttcaagctgcttcct

SEQ ID NO: 103452 - DNA, 80 bp, synthetic construct
  source 1..80: mol_type = other DNA
cgcgctgtggaagtagtgacaattcggaatactcctaacagtcctaagacgattgttaaatcccttcccatcgtgcatga

SEQ ID NO: 103453 - DNA, 80 bp, synthetic construct
  source 1..80: mol_type = other DNA
cttcaatgcttggtggtaaaaacgaactatggcttactctatgtctctcttcagatccattaacctccttaaacaggatg

SEQ ID NO: 103454 - DNA, 80 bp, synthetic construct
  source 1..80: mol_type = other DNA
agttacatggtggagaagtagatgtcaagccacaaatcctattcacatgcattccaactgttggttatacagctgcatta

SEQ ID NO: 103455 - DNA, 80 bp, synthetic construct
  source 1..80: mol_type = other DNA
gctgttaatgtatgtctcattccgcttctgctaagtcttagtcaagacacttgcaggagtagcattattaaaacccttgt

SEQ ID NO: 103456 - DNA, 80 bp, synthetic construct
  source 1..80: mol_type = other DNA
agctgtacctaccttgttcagactcaagggcggtgcacctcctaagaaggtttcctttggatcagatgaggtccatgagg

SEQ ID NO: 103457 - DNA, 80 bp, synthetic construct
  source 1..80: mol_type = other DNA
cctttacagcctgatggtttataattttgttttagccgctatacttgttagcgacacatatgtaccgctcggaagtgctt

SEQ ID NO: 103458 - DNA, 80 bp, synthetic construct
  source 1..80: mol_type = other DNA
tgctcacttttgtagtggttttatctatcctttggcttatcgacagaatccgtttctgccttatgctgaagtctttgctt

SEQ ID NO: 103459 - DNA, 80 bp, synthetic construct
  source 1..80: mol_type = other DNA
ccacttattgacatgagatcacatttcatccgtgtcactacgtgtgcatcacatggcttagttgctgtcaacaataacaa

SEQ ID NO: 103460 - DNA, 80 bp, synthetic construct
  source 1..80: mol_type = other DNA
gccgtggtttattaaaaactttgagcagcaatgtcgctgttcacgttgtttctatgtgcattctgcttcgtatatcgagt

SEQ ID NO: 103461 - DNA, 80 bp, synthetic construct
  source 1..80: mol_type = other DNA
gcactttcatatcccgtttcaataaagttacactcgtttcagtaactaacttttccttgaacggtcaccattctacagta

SEQ ID NO: 103462 - DNA, 80 bp, synthetic construct
  source 1..80: mol_type = other DNA
tttgtgcctgcaacgcgcgatactgtacctcttcacataatcgcacctagcgtgcttacagtttaagctcgcttagcgct

SEQ ID NO: 103463 - DNA, 80 bp, synthetic construct
  source 1..80: mol_type = other DNA
ttatgtgtgcagtgtatcgtaggggtgaacaccctactcgttcaacctgctgtatttatgtataatactggacggtctgt

SEQ ID NO: 103464 - DNA, 80 bp, synthetic construct
  source 1..80: mol_type = other DNA
ctatgtaaaattccaagagagtaagcctccactacctcccgaggagtggatttaacgaactctctaatcatgtcgaatgg

SEQ ID NO: 103465 - DNA, 80 bp, synthetic construct
  source 1..80: mol_type = other DNA
tgacccctgttcgcagtgttacagtcgagtacaacattcatgctgtattagacgcgctgcttgcaaattcaaacctgaga

SEQ ID NO: 103466 - DNA, 80 bp, synthetic construct
  source 1..80: mol_type = other DNA
taccagtgacaagctcactgatgagcaaatcattgctattataaaagactggaactttgcatggtccgtcatctttctct

SEQ ID NO: 103467 - DNA, 80 bp, synthetic construct
  source 1..80: mol_type = other DNA
ttaaccccgaaactaattgcctcttgaacgtgccaattggtggtactactgttgtgagacctctcgttgaagactctacg

SEQ ID NO: 103468 - DNA, 80 bp, synthetic construct
  source 1..80: mol_type = other DNA
agtgttacagctgtagtcactaatggttacctcaagatggctggtatgcacttcggtcagtgcgactatgctagacttcc

SEQ ID NO: 103469 - DNA, 80 bp, synthetic construct
  source 1..80: mol_type = other DNA
aagtgaaatcactgtcgctaaaccgcaggttctaattgctttgaaaatggttaagagacaagagtacggtgtcaactctg

SEQ ID NO: 103470 - DNA, 80 bp, synthetic construct
  source 1..80: mol_type = other DNA
gtgttgctatctaccatagatacaaagccggtaattacaggtatccaccgactacggtggattcgaaccttgcactgctt

SEQ ID NO: 103471 - DNA, 80 bp, synthetic construct
  source 1..80: mol_type = other DNA
agggcgtaagctcattagtaagagtatgatttaaaatcattaacgaatcttatatttcattgttatggcaactcctgctg

SEQ ID NO: 103472 - DNA, 80 bp, synthetic construct
  source 1..80: mol_type = other DNA
ctccccgtggcgtttcttttgctgataacaatgacaacacctcaaataataacaacaatcagcagttccgagggcgcggt

SEQ ID NO: 103473 - DNA, 80 bp, synthetic construct
  source 1..80: mol_type = other DNA
actttctcagttgacaagtcactcagtgttgaagagttcgtcgatgtcgtgaaggatgaagtgagcgagttgcttacacg

SEQ ID NO: 103474 - DNA, 80 bp, synthetic construct
  source 1..80: mol_type = other DNA
agaaatcttaagcccagacctgctccaaataacaccgtctcctggtacactggacttacccaacacgggaaagcccctct

SEQ ID NO: 103475 - DNA, 80 bp, synthetic construct
  source 1..80: mol_type = other DNA
attggctcccagatggtatttctattacacaggaactggacctgaggccaacctcccattccgtgcagttaaagaaggaa

SEQ ID NO: 103476 - DNA, 80 bp, synthetic construct
  source 1..80: mol_type = other DNA
ttgtttgggtccatgaagaaggcgccactgacgctccttcaacttttgggacgcggaaccctaacaatgatgcagctatt

SEQ ID NO: 103477 - DNA, 80 bp, synthetic construct
  source 1..80: mol_type = other DNA
ggagctgtaggtggtgatcttcctggtcctctctacctcgatcttctcactagactcactgcaattgaggctagtcgcaa

SEQ ID NO: 103478 - DNA, 80 bp, synthetic construct
  source 1..80: mol_type = other DNA
acaagcatccagcggtcctaaggttatcaccaagaaggacgctgctgctgctaaaaataagatgcgccacaagcgtgtcg

SEQ ID NO: 103479 - DNA, 80 bp, synthetic construct
  source 1..80: mol_type = other DNA
tcaatgttgtgcaagcctttggtctccgggggccaggcgaccttcagggaaattttggtgaccttcaattcaacaagctc

SEQ ID NO: 103480 - DNA, 80 bp, synthetic construct
  source 1..80: mol_type = other DNA
tctcctccgtggcatcgagatcgaggatttcgacattgatgacttcattgatacaccctgctattgctttaacagtgatg

SEQ ID NO: 103481 - DNA, 80 bp, synthetic construct
  source 1..80: mol_type = other DNA
ggcactgaagaccctcgctgggctcaaattgctgaacttgccccttcatccagcgctttcatgggtatgtctcaattcaa

SEQ ID NO: 103482 - DNA, 80 bp, synthetic construct
  source 1..80: mol_type = other DNA
agaatcccaactactccaagtggctggaatatcttgaggcaaatattgatgcctacaagacctttcctaagaaggagagg

SEQ ID NO: 103483 - DNA, 80 bp, synthetic construct
  source 1..80: mol_type = other DNA
aaacccaaggctaatactgatgcggcagcctccggtgaggaggaacttgacgtattccaacaagctgtggtcgatgtgat

SEQ ID NO: 103484 - DNA, 80 bp, synthetic construct
  source 1..80: mol_type = other DNA
gcctaaggagcagcgggcacctcgcggtagcattacccagaggtctcgcgcacctaagcccactatcggtcccatgattg

SEQ ID NO: 103485 - DNA, 80 bp, synthetic construct
  source 1..80: mol_type = other DNA
atgttaaccctgaacagggtcagtaaatgtaacaagagtgaggcgatcgctagcgcatggaaaacccatggcgtgacgcg

SEQ ID NO: 103486 - DNA, 80 bp, synthetic construct
  source 1..80: mol_type = other DNA
gtgatgcagagtggggttctactatgatcttctccattcaccccgttgaatcggaagattacatctgggaagatgaggta

SEQ ID NO: 103487 - DNA, 80 bp, synthetic construct
  source 1..80: mol_type = other DNA
gaacatcttgatgaggaagaagtccaggccgatgaagatgcttgggctaatgctgtcgatgaggcttttccacttgatgg

SEQ ID NO: 103488 - DNA, 80 bp, synthetic construct
  source 1..80: mol_type = other DNA
ggatgaagaagaagaacagaccccagtggaaacctctccacttcagcttttcgaagctactctttctactttacagtggg

SEQ ID NO: 103489 - DNA, 80 bp, synthetic construct
  source 1..80: mol_type = other DNA
aggttcttgaggctaaagccttgcaggttcctgctgttaagagggtcaaagctaagtgtgttgcagtcaatgcggcaact

SEQ ID NO: 103490 - DNA, 80 bp, synthetic construct
  source 1..80: mol_type = other DNA
gctagggccactgtacttgttcgggatattaaggaatgtccccaaaaagcttctacttcacagctggaaattcctgaggc

SEQ ID NO: 103491 - DNA, 80 bp, synthetic construct
  source 1..80: mol_type = other DNA
tcaggcctctcccattcctgctgttacgagggctaaggcaaagtgcattgtactcaatgcgccaactgctaaggccactg

SEQ ID NO: 103492 - DNA, 80 bp, synthetic construct
  source 1..80: mol_type = other DNA
ttattgttcgggatatcaaggaatgtcccccaaaagcttcaaatgaagtttatgaagctgatgccgaacaggttgttcag

SEQ ID NO: 103493 - DNA, 80 bp, synthetic construct
  source 1..80: mol_type = other DNA
gaaccagctaagcctaaacgcgttcgcaagaagcgtgaggctaagagcactgacgccagtgatagcgacactgctaagga

SEQ ID NO: 103494 - DNA, 80 bp, synthetic construct
  source 1..80: mol_type = other DNA
tccccttagtgcttttaagcataaggtctttagtgatagtgtcactcttgtactgggtgatgctataaagcttgctaagt

SEQ ID NO: 103495 - DNA, 80 bp, synthetic construct
  source 1..80: mol_type = other DNA
gctttgaacgtagtgttttggtcaatgctgccaatacacacttgaagcatggcggtggcattgctgctgctattaataac

SEQ ID NO: 103496 - DNA, 80 bp, synthetic construct
  source 1..80: mol_type = other DNA
ttctcttcgtgcccgtcgctttaggtgggtttcttaagcatctcccaggccctcgtgtctacctggttgagaggctcact

SEQ ID NO: 103497 - DNA, 80 bp, synthetic construct
  source 1..80: mol_type = other DNA
gcatccgctggtgcagtccaagttgagtctgatgcttacatcaagaccaatggaccactccaggttggtgatgctgtctt

SEQ ID NO: 103498 - DNA, 80 bp, synthetic construct
  source 1..80: mol_type = other DNA
actcaaaggacatggtttagcagccaacatacttcatgtagttgggcctgatgcgcgcgctaaacaggatgtctctctgt

SEQ ID NO: 103499 - DNA, 80 bp, synthetic construct
  source 1..80: mol_type = other DNA
taagtaagtgctacaaggctatgaatcagtaccctttggtagttactcctcttgtgtctgctggtatctttggagtccag

SEQ ID NO: 103500 - DNA, 80 bp, synthetic construct
  source 1..80: mol_type = other DNA
ccgagcatttcttttgaatatcttcagcgggaactcaagactcgcgtcttggttgccgttaattctgaagatatatataa

SEQ ID NO: 103501 - DNA, 80 bp, synthetic construct
  source 1..80: mol_type = other DNA
tgacttaactaaggttacagtacctactggccttacttttgcttttgatggtctacgcggcggcatacgtaaagccaaag

SEQ ID NO: 103502 - DNA, 80 bp, synthetic construct
  source 1..80: mol_type = other DNA
actttgactttaccgtattcgttagtatagacaatgctgctaattgcaagatccttagaaataagggtgttgactatact

SEQ ID NO: 103503 - DNA, 80 bp, synthetic construct
  source 1..80: mol_type = other DNA
aagaagcaggtgactactaatggtgtcaaatacttttgctacactagcaaggacaccattgaagaattagtctctgctgc

SEQ ID NO: 103504 - DNA, 80 bp, synthetic construct
  source 1..80: mol_type = other DNA
caataagactaaaggcataattgctcaaccattgggatatgtctcacatggtttagaccttatgcaagcaggtaaagtca

SEQ ID NO: 103505 - DNA, 80 bp, synthetic construct
  source 1..80: mol_type = other DNA
ttcgtagagttacagtaccctacgtctgtctcctggcaaataaggagcaaattgctattctaacatcgactggtgaaaag

SEQ ID NO: 103506 - DNA, 80 bp, synthetic construct
  source 1..80: mol_type = other DNA
gtctcacctgttgaggattttattaaacatgtcgaaagtgaggggtcatatcattcttggcatcttgtcaagggtgacct

SEQ ID NO: 103507 - DNA, 80 bp, synthetic construct
  source 1..80: mol_type = other DNA
ggcggaacttattccgacccattcatggttaaccagctggcttatagctcaagcgcaggtgatagcctcgtcggcacaac

SEQ ID NO: 103508 - DNA, 80 bp, synthetic construct
  source 1..80: mol_type = other DNA
cattattgacaatgttgtctataagaaactcttacattggtctgatcaaaccttgtgttatagaggacagcaactcttcg

SEQ ID NO: 103509 - DNA, 80 bp, synthetic construct
  source 1..80: mol_type = other DNA
tggtgaagaatggaattgctttgcctttcgaagaccttaataagtgtcgtacgtacttgacttcacgtgcggctcaccag

SEQ ID NO: 103510 - DNA, 80 bp, synthetic construct
  source 1..80: mol_type = other DNA
aggacagtcgaagtactcgttacggtcgacggtataaactttaggacagttgttctaaataatcaaagctcctataggac

SEQ ID NO: 103511 - DNA, 80 bp, synthetic construct
  source 1..80: mol_type = other DNA
gcagatcggcagtgtcttcctaaatggggctgatatttctgataccattcctgatgagaaacagaatggtgaaagcttgt

SEQ ID NO: 103512 - DNA, 80 bp, synthetic construct
  source 1..80: mol_type = other DNA
ataatttatcggctgctgagaaggaggtcctgtcacagttatatggaacctccgatcctactttcttacataggttctac

SEQ ID NO: 103513 - DNA, 80 bp, synthetic construct
  source 1..80: mol_type = other DNA
tccattaaggctgctgtgcagaaatggaggttgcttatgtgtgataaagtacggtctctcaagctcagtgacaacaactg

SEQ ID NO: 103514 - DNA, 80 bp, synthetic construct
  source 1..80: mol_type = other DNA
ctatcttaatgtggttgtgatgatgctggatctcttgggagatatcaagttcaatatacctgcattgcagcaggccttct

SEQ ID NO: 103515 - DNA, 80 bp, synthetic construct
  source 1..80: mol_type = other DNA
taaagcataagggtggggattcattagaatttctcgccctcattatgacttatggtaattgcacatttggtgccccagat

SEQ ID NO: 103516 - DNA, 80 bp, synthetic construct
  source 1..80: mol_type = other DNA
gatgccactcgcctgctccacacactgttggcaaaggcacagctcaatgtgtcggcccgcatgttgtggagagagtggtg

SEQ ID NO: 103517 - DNA, 80 bp, synthetic construct
  source 1..80: mol_type = other DNA
caacgtctgtggcacaaaagatgtcttattagaaggcctcaaggcctgtgtgtatgtgggcgtgcaaactgtcgaagatc

SEQ ID NO: 103518 - DNA, 80 bp, synthetic construct
  source 1..80: mol_type = other DNA
cctgcagggcaagcctgttggattcttcttcccttatgactctgcactcgagactggtacccatacctttctcctgcgca

SEQ ID NO: 103519 - DNA, 80 bp, synthetic construct
  source 1..80: mol_type = other DNA
tgcactctcgcatgacttacacctgccaatgtggtgctgatcgccatcggcaattagtcgagcacaacaccccttggctg

SEQ ID NO: 103520 - DNA, 80 bp, synthetic construct
  source 1..80: mol_type = other DNA
ctactttcagggtccccttgtgaaaaattggtcacaacctcgaccagccctgatttcgtggcattcaatgtctttcaagg

SEQ ID NO: 103521 - DNA, 80 bp, synthetic construct
  source 1..80: mol_type = other DNA
tgtagagacctcagtaggccactacattcacactcgtgtgaaggacggtttattgcacaaatatgactccgggaccttga

SEQ ID NO: 103522 - DNA, 80 bp, synthetic construct
  source 1..80: mol_type = other DNA
gtaagacttctgattggaagtgcaaggttaccgatgtcttgtaccccggacagagatatagcagcagttgcaatgttgtg

SEQ ID NO: 103523 - DNA, 80 bp, synthetic construct
  source 1..80: mol_type = other DNA
ctatattccctggacggtgctaataaggcagaggttgatccagacctttctgctttttacgttaaggatgggaagtactt

SEQ ID NO: 103524 - DNA, 80 bp, synthetic construct
  source 1..80: mol_type = other DNA
tactagtgctccgcccgtaacttactcgccagccactgttatgactggcagtgtctatactaatagctgcttggtttctg

SEQ ID NO: 103525 - DNA, 80 bp, synthetic construct
  source 1..80: mol_type = other DNA
cagatggacagccgggcggtgatgctattagtttagcctttaataacctcttgggttttgatactaataagcctgtttct

SEQ ID NO: 103526 - DNA, 80 bp, synthetic construct
  source 1..80: mol_type = other DNA
cctactcaatccttccggatgagagcggtgatctcttattagcagagtttaaaacttatgacccagtctacaagaatggt

SEQ ID NO: 103527 - DNA, 80 bp, synthetic construct
  source 1..80: mol_type = other DNA
gctatgcttaatggcaaacccgttctctgggtaactgcgggtgcatttgacagtgcactcaataaatttaatagggcttc

SEQ ID NO: 103528 - DNA, 80 bp, synthetic construct
  source 1..80: mol_type = other DNA
tttacggcaaatctatgattatgccccagtggaagtctccaataagttcactcccttacaggttgaggaagaagtaccca

SEQ ID NO: 103529 - DNA, 80 bp, synthetic construct
  source 1..80: mol_type = other DNA
agtatggacgtggtggcaaccgcttccgcgacatgccctgggactacaattggactccctattcggaattcatggatgac

SEQ ID NO: 103530 - DNA, 80 bp, synthetic construct
  source 1..80: mol_type = other DNA
agccacaagttgtcttggatacgccaatcgtaaaagacttaacggttgtcaagtgcaaggggctaaagaagccttttgtc

SEQ ID NO: 103531 - DNA, 80 bp, synthetic construct
  source 1..80: mol_type = other DNA
aaggacagctttagttttgtcagtgatgagcaaggtcttcctgttgttgaatacctgactaaagatgacttacatcaact

SEQ ID NO: 103532 - DNA, 80 bp, synthetic construct
  source 1..80: mol_type = other DNA
gtatgtcgattctaaacatcagctaatagttctcaaagataactattggtctatgttattaagattgcatactgtggaga

SEQ ID NO: 103533 - DNA, 80 bp, synthetic construct
  source 1..80: mol_type = other DNA
gcggtgatctccatgttattgcaactactggctcctttactaagaaggttaaactactgtttaaagcttctgcgttattt

SEQ ID NO: 103534 - DNA, 80 bp, synthetic construct
  source 1..80: mol_type = other DNA
aaggagtttgctagtcgcacacttgatgccgctaccacgttaggtaaggcaaccaagtttgttgtgcgtcatcttggttc

SEQ ID NO: 103535 - DNA, 80 bp, synthetic construct
  source 1..80: mol_type = other DNA
tacttgtagtatcttagcgaattgctttacaattctcaagatgctcatattgttgccaatcaattatttctggcctaaag

SEQ ID NO: 103536 - DNA, 80 bp, synthetic construct
  source 1..80: mol_type = other DNA
agaaaccgcttactgatgttaaagtaagctccttaaaaacggcaggcgttgtaacaggaaatgtacttaaacaatgctgc

SEQ ID NO: 103537 - DNA, 80 bp, synthetic construct
  source 1..80: mol_type = other DNA
agcgctgctgttgatttggctatggataagtatcagcgtatagattggaaggcaactttacgtttggtactcatgctatg

SEQ ID NO: 103538 - DNA, 80 bp, synthetic construct
  source 1..80: mol_type = other DNA
tacaactgggctgttgttgtcttcaatttatcacttgtatgtattcaatcaggtactatcaagtgatgttatgttggaag

SEQ ID NO: 103539 - DNA, 80 bp, synthetic construct
  source 1..80: mol_type = other DNA
ctcgaggctgatcccaaggggaagtactccaagaatcttcttaagaagttgctgggtggtgattacacacccgtcgacca

SEQ ID NO: 103540 - DNA, 80 bp, synthetic construct
  source 1..80: mol_type = other DNA
cctgtgatggattagctagcgagtaccgagccaattcgtttgatatcgatagtttctgtgctaatcgttcggctctatgt

SEQ ID NO: 103541 - DNA, 80 bp, synthetic construct
  source 1..80: mol_type = other DNA
aagtggtgtcttattagtcaagactcaattactcactactcggcactcaagatggttcaaactcacctaacccactacgt

SEQ ID NO: 103542 - DNA, 80 bp, synthetic construct
  source 1..80: mol_type = other DNA
tattaacgttgattgggcgtggtttgctcttgagtgtatcgtagcttacatactgtacactgcggccttcaattgggttt

SEQ ID NO: 103543 - DNA, 80 bp, synthetic construct
  source 1..80: mol_type = other DNA
tggtggcatgcacgttacagtatttctttattcagactgcattgtttgtagactggaggtcatacaactatgttgtcact

SEQ ID NO: 103544 - DNA, 80 bp, synthetic construct
  source 1..80: mol_type = other DNA
tgcatctatttgctttttactcacctgccattaccaggtcttgttagaacgtacaatgtactggcatgtctgtggctcat

SEQ ID NO: 103545 - DNA, 80 bp, synthetic construct
  source 1..80: mol_type = other DNA
gcgtcgcttctatcagcacgttatcaatggctgcaaggatacgacatgcctgctttgttataagaggaatcgtctgactc

SEQ ID NO: 103546 - DNA, 80 bp, synthetic construct
  source 1..80: mol_type = other DNA
gtgtagaggcatctaccttcgtctgcggtggcaaaagaaccttttacatcgcagctaatggaggtactcatttctgttgt

SEQ ID NO: 103547 - DNA, 80 bp, synthetic construct
  source 1..80: mol_type = other DNA
cacaacctccctacgcaggcttgttagacccactgataagtcacactactatgtggattcagttgtggtcaatgatgctg

SEQ ID NO: 103548 - DNA, 80 bp, synthetic construct
  source 1..80: mol_type = other DNA
ttgttcagctttattacagtagagacggtaatacctgctatgagcggtaccccctctgcatctttacacacattgataag

SEQ ID NO: 103549 - DNA, 80 bp, synthetic construct
  source 1..80: mol_type = other DNA
gtacatgtgtggcgtcgatggaaaacccattgccgactatgcagctattgcagctcgtgagaaaattatctcgcttgctg

SEQ ID NO: 103550 - DNA, 80 bp, synthetic construct
  source 1..80: mol_type = other DNA
cttaagttcaaagaggtctgcaaatccaccacgggtgtacctgagcacaatcttatcatctatgactcaactgatcgtgg

SEQ ID NO: 103551 - DNA, 80 bp, synthetic construct
  source 1..80: mol_type = other DNA
ccaggagaatttggctaggtctgcttgtgtttattattcccaagttttgtgtaaaccaatacttttggtcgactcaaact

SEQ ID NO: 103552 - DNA, 80 bp, synthetic construct
  source 1..80: mol_type = other DNA
ctaaataacatttttcagttagagaggcgtgtctcttgtagatctcggtcacaatacccagtttcgtctggtgcgtggca

SEQ ID NO: 103553 - DNA, 80 bp, synthetic construct
  source 1..80: mol_type = other DNA
gcgagaagttggacaaactgattgcaactgctcgcgatgctgtcaagagaggcgatagcctacaagctgttcttaagact

SEQ ID NO: 103554 - DNA, 80 bp, synthetic construct
  source 1..80: mol_type = other DNA
ttcattgatgctgcgcgtggtccagccggtgtggagtctgatgttgaaactactgatatagtagatgctgtacaatatgc

SEQ ID NO: 103555 - DNA, 80 bp, synthetic construct
  source 1..80: mol_type = other DNA
tcacaagcatgatgtccagcttactaatgagagctacaacaattatgtgccctcatatgttaagcctgatagtatcgcta

SEQ ID NO: 103556 - DNA, 80 bp, synthetic construct
  source 1..80: mol_type = other DNA
ctgttgatttaggtagccttattgattgtaatgctgcatctgtgaaccaggttagcatgcgcaatgccaatggtgcgtgc

SEQ ID NO: 103557 - DNA, 80 bp, synthetic construct
  source 1..80: mol_type = other DNA
atctggaattgtgcttcatacattaaactttctgactcccttaagcggcagattcgcattgcgtgtcggaaatgtaatct

SEQ ID NO: 103558 - DNA, 80 bp, synthetic construct
  source 1..80: mol_type = other DNA
tccttttaggttgactacctcgaagctcagagctcaggataatatcctgtctgtcaaattcagtgtcactaagattgttg

SEQ ID NO: 103559 - DNA, 80 bp, synthetic construct
  source 1..80: mol_type = other DNA
gtggtgctcctacttggctcacgtcactctatgacttcacgcttaaaagttattgtgtagtgactgttctcgtcttcatg

SEQ ID NO: 103560 - DNA, 80 bp, synthetic construct
  source 1..80: mol_type = other DNA
acgttgaagctgatgttgcatcacgtgctgatgctgacggcttcatctcattgaaggaaaaactctacagggtggtctgg

SEQ ID NO: 103561 - DNA, 80 bp, synthetic construct
  source 1..80: mol_type = other DNA
tttgccgttttaatgtacttagctttacctacgttttcaatggcaaatgttacattctatgaggaccgtattcttgaata

SEQ ID NO: 103562 - DNA, 80 bp, synthetic construct
  source 1..80: mol_type = other DNA
caaagttctggataacggtatcatcagagacatcaatggtgatgacaggtgcttcgctaataagtatcagtcatttagta

SEQ ID NO: 103563 - DNA, 80 bp, synthetic construct
  source 1..80: mol_type = other DNA
attggtatcatgagcatgtaggtggtagttatgataacgatatcacatgcccattgaccgtagctgtcattgcaggcgtt

SEQ ID NO: 103564 - DNA, 80 bp, synthetic construct
  source 1..80: mol_type = other DNA
tgcctcttctgatagtgtgtgttacacgcctactcatgagataccctataagagtttctctgatagtggatgcatactcc

SEQ ID NO: 103565 - DNA, 80 bp, synthetic construct
  source 1..80: mol_type = other DNA
ctgcagaatgcacgatgtttagggacgcagaagggcggatggtaccttactgttatgaccctactgttctacctggtgct

SEQ ID NO: 103566 - DNA, 80 bp, synthetic construct
  source 1..80: mol_type = other DNA
catgcatatggtgatatgaagccccatgtacgttatgacatgtatgacaataacatgttcatcaagtttcctgaggttgt

SEQ ID NO: 103567 - DNA, 80 bp, synthetic construct
  source 1..80: mol_type = other DNA
ttgtggttatgactatattgacattgttagaaggcttgctatgtcgcttttccagccaatcacctacttccaactgacca

SEQ ID NO: 103568 - DNA, 80 bp, synthetic construct
  source 1..80: mol_type = other DNA
cgtcattggttatgggtattggtctgtgtgccttcctaactctcgtcttctattatattaataaggttaagagagcgctc

SEQ ID NO: 103569 - DNA, 80 bp, synthetic construct
  source 1..80: mol_type = other DNA
gctgactacacacagtgtgctcttgtggctgtgtgcgctactgttcttaatagcttgtgcctttgctttgtggttgcctg

SEQ ID NO: 103570 - DNA, 80 bp, synthetic construct
  source 1..80: mol_type = other DNA
ggcgttccgtatgctaagcaaaccatcttcactttgaatagtgtggtccagcgcgatctgggtacgaatgctgaagacat

SEQ ID NO: 103571 - DNA, 80 bp, synthetic construct
  source 1..80: mol_type = other DNA
cccattgtgcattgcaccatacagcatgctctactattatgctaccttctacttcacaaatgagcccgcatgcataatgc

SEQ ID NO: 103572 - DNA, 80 bp, synthetic construct
  source 1..80: mol_type = other DNA
atgtgtcctggtttgtcatgtttagtgctgttgctcctgcttggatgctctgcttgtatgtagtggctatgtgctttaga

SEQ ID NO: 103573 - DNA, 80 bp, synthetic construct
  source 1..80: mol_type = other DNA
cactgtttctgggttctggcctacttcagtcgtaaacacgttgatgttttcactgatggcaagctcaattgtagttttca

SEQ ID NO: 103574 - DNA, 80 bp, synthetic construct
  source 1..80: mol_type = other DNA
ggaggccgcaggtaacatctttgttatcaacaaggagacctatgtggctctcaggaattccatcactgcagatgtgtatg

SEQ ID NO: 103575 - DNA, 80 bp, synthetic construct
  source 1..80: mol_type = other DNA
cccggtacctagccatgtttaataagtacaaatattattcaggtgctatggatactgccgcatacagagaggctgctgct

SEQ ID NO: 103576 - DNA, 80 bp, synthetic construct
  source 1..80: mol_type = other DNA
tcacatctttgtaaagctcttcagacatacagtgaaactggtagtgacgtgctttaccaaccacccaactgcagcatcac

SEQ ID NO: 103577 - DNA, 80 bp, synthetic construct
  source 1..80: mol_type = other DNA
gtacgtctcggtcacaatacccagttccgtctggtgcgtgacaattcggggcacatcatgtcttccgtggctggtgtggt

SEQ ID NO: 103578 - DNA, 80 bp, synthetic construct
  source 1..80: mol_type = other DNA
ggtttatggttagacaactttgtctggtgcccacgtcatgttatgtgcccagctgatcagttgaatgaccctaattatga

SEQ ID NO: 103579 - DNA, 80 bp, synthetic construct
  source 1..80: mol_type = other DNA
aggtttactcatctctatgactaaccatagtttcacagtccaaaaacatgtgggtgccccagctaacttacgggttgtgg

SEQ ID NO: 103580 - DNA, 80 bp, synthetic construct
  source 1..80: mol_type = other DNA
gtcacaccatgcaagggacacttctcaaattgacggtggattcgccaaacccgaatacaccggcttatacttttactact

SEQ ID NO: 103581 - DNA, 80 bp, synthetic construct
  source 1..80: mol_type = other DNA
gttaaaccaggcgcttcgtttagcgttttggcctgttataatggcagacctactggtacatttacagttattatgcgccc

SEQ ID NO: 103582 - DNA, 80 bp, synthetic construct
  source 1..80: mol_type = other DNA
caaccacactattaagggttcctttttgtgtggatcttgtggtagtgttggttacactaaagaaggtagtgtgattaact

SEQ ID NO: 103583 - DNA, 80 bp, synthetic construct
  source 1..80: mol_type = other DNA
tcaggatcgtcaagtgcaccaggcacaattaacagacaaatactgtacgactaatgtcgtagcttggctttatgcagcga

SEQ ID NO: 103584 - DNA, 80 bp, synthetic construct
  source 1..80: mol_type = other DNA
tactaaatggttgcaattggtttgtaaaacctaatcgcaccagtgttgcttcatttaatgaatgggctatggctaaccaa

SEQ ID NO: 103585 - DNA, 80 bp, synthetic construct
  source 1..80: mol_type = other DNA
ctgcctttgctgaatgcactggttgcggtaatggtagttggctcactggcaatgctgtgcaagggttcgcttgcgattgt

SEQ ID NO: 103586 - DNA, 80 bp, synthetic construct
  source 1..80: mol_type = other DNA
tcactgagtttattggtactcaagcccttgacatgttagctgtcaagactggtgtttctgtagaacagctattgtctgct

SEQ ID NO: 103587 - DNA, 80 bp, synthetic construct
  source 1..80: mol_type = other DNA
atccaacaacttaacaatggtttccagggcaaacagatcctgggtaatagtatgttggaagatgaattcacccctgagga

SEQ ID NO: 103588 - DNA, 80 bp, synthetic construct
  source 1..80: mol_type = other DNA
tgtcaatatgcaaatcatgggtgttgtaatgcaaagtggtgtaaagaaggtgacgtatggtacctttcactggctatttg

SEQ ID NO: 103589 - DNA, 80 bp, synthetic construct
  source 1..80: mol_type = other DNA
ctacattggtactgtcgtacgttgctatcttacaatgcaccaagttcacattatggaattacctgtttcagactattccg

SEQ ID NO: 103590 - DNA, 80 bp, synthetic construct
  source 1..80: mol_type = other DNA
acacagctaactccccttatgtttattgtggctgcgtgtgttatgttgtttgtcaaacacaaacacaccttcctaactct

SEQ ID NO: 103591 - DNA, 80 bp, synthetic construct
  source 1..80: mol_type = other DNA
cttcttattacctactgcactatgtttgacttatgcaaacattgtgtatgagccttctactccggtttcgtcagcactta

SEQ ID NO: 103592 - DNA, 80 bp, synthetic construct
  source 1..80: mol_type = other DNA
ttgcagttgcaaattggctggcgcctaataacatgtatatgagaacaacccacactgacttaggcttgtatgtaagcctt

SEQ ID NO: 103593 - DNA, 80 bp, synthetic construct
  source 1..80: mol_type = other DNA
acattggtgttagcagttgttgtaaagcgtttatacacaccatcactgtcaaacctagcattagcactttgcagttttgt

SEQ ID NO: 103594 - DNA, 80 bp, synthetic construct
  source 1..80: mol_type = other DNA
catgtggttgtatacttatagtgttggagaatattcttctccaattgcctatttggtctttgtaacatcactcaccagtg

SEQ ID NO: 103595 - DNA, 80 bp, synthetic construct
  source 1..80: mol_type = other DNA
attatacagtcactgtctttgttgcagtgaatttggccaaattcttaacttacctcattttctcctattcaccacagact

SEQ ID NO: 103596 - DNA, 80 bp, synthetic construct
  source 1..80: mol_type = other DNA
ggagctacttactcggctaacgatgtcgagctccaatcctctgggattgtgaagcccaatgctcttttctgtgctacttg

SEQ ID NO: 103597 - DNA, 80 bp, synthetic construct
  source 1..80: mol_type = other DNA
atgttggtcttccctgaggtaaagatgattttattaatgtacacttgcattggttacatatgcacgtgttattttggtgt

SEQ ID NO: 103598 - DNA, 80 bp, synthetic construct
  source 1..80: mol_type = other DNA
cttttcactattaaactttaaacttcgttcgcctatgggtgtttatgattttaaagtttctactcaggagttcagataca

SEQ ID NO: 103599 - DNA, 80 bp, synthetic construct
  source 1..80: mol_type = other DNA
tgacagctaatggcctgcatgcacctcgcaattcatgggaggctatggctttgaactttaaactacttggcattggcggc

SEQ ID NO: 103600 - DNA, 80 bp, synthetic construct
  source 1..80: mol_type = other DNA
tttcagtgttacaacagttacatttggaagccaatagtaaagcatgggcgtactgtgttaaatgtcacaatgacatttta

SEQ ID NO: 103601 - DNA, 80 bp, synthetic construct
  source 1..80: mol_type = other DNA
actgctactgacccaacagaggcattcgagaaattcgtttgtctatttgctactttaatgaccttctctggcaatgtaga

SEQ ID NO: 103602 - DNA, 80 bp, synthetic construct
  source 1..80: mol_type = other DNA
accttgaaggcttagctagtgacttgttggataactctgctgtcttacaagcaactttgtctgagttttcgcatttggcg

SEQ ID NO: 103603 - DNA, 80 bp, synthetic construct
  source 1..80: mol_type = other DNA
agcttcgcagaattagaagcagctcagaaatcttatcaagaagccttagactctggtgatgcatcgccacaagtcttaaa

SEQ ID NO: 103604 - DNA, 80 bp, synthetic construct
  source 1..80: mol_type = other DNA
ggcgcttcagaaagctgtgaacgttgctaaaaatgcttatgaaaaggataagtctgtagcacgtaaacttgagcgcatgg

SEQ ID NO: 103605 - DNA, 80 bp, synthetic construct
  source 1..80: mol_type = other DNA
ctgagcaggctatgacttctatgtataagcaagcacgtgctgaggacaagaagtccaaaatcgttagtgctatgcaaact

SEQ ID NO: 103606 - DNA, 80 bp, synthetic construct
  source 1..80: mol_type = other DNA
tcctcttgcaaagggtgacagttgctcttcttcatgcaaacataacattgctcaagtggtgagccacctctctgagcaat

SEQ ID NO: 103607 - DNA, 80 bp, synthetic construct
  source 1..80: mol_type = other DNA
cttacccctcattgaattatgctggggcactctgggatattgcagttattaataatgtggacaatgagattatcaaatcc

SEQ ID NO: 103608 - DNA, 80 bp, synthetic construct
  source 1..80: mol_type = other DNA
tcggatgtttcagaaaacaacgagcatttgacatggccacttgtacttgaatgcactagagctgcagcttctgcggttaa

SEQ ID NO: 103609 - DNA, 80 bp, synthetic construct
  source 1..80: mol_type = other DNA
attgcaaaataatgagattaggcccactggacttaaaactatggtagtaacggctggtcttgaccaggcttcttttaatg

SEQ ID NO: 103610 - DNA, 80 bp, synthetic construct
  source 1..80: mol_type = other DNA
ttaactctttagcttactatgagccaattcagggtcgtaaaatgctaatgggacttttgtctgaaaatgcttacttaaag

SEQ ID NO: 103611 - DNA, 80 bp, synthetic construct
  source 1..80: mol_type = other DNA
tatgctaaggttgaaggccaggatgggtttgtgactattgagttacagcctccttgcaagtttttgatttctggccctaa

SEQ ID NO: 103612 - DNA, 80 bp, synthetic construct
  source 1..80: mol_type = other DNA
gggacctgagatccgatatctctattttgttaaaaaccttaacaacttacatagggggcagcttcttggacatatagctg

SEQ ID NO: 103613 - DNA, 80 bp, synthetic construct
  source 1..80: mol_type = other DNA
atcctaagaaggcttacatggactttgttaatgctggcggtgccccattaacaaactgtgttaagatgcttactcccaag

SEQ ID NO: 103614 - DNA, 80 bp, synthetic construct
  source 1..80: mol_type = other DNA
gtatggttgtacctgatggtaaatccttcactctgacctttggtggcgtcgtatacgcataccttggttgctatgaaggc

SEQ ID NO: 103615 - DNA, 80 bp, synthetic construct
  source 1..80: mol_type = other DNA
actggaacaggtatcgcgatatctgtcaagcctgagagtaatgctgatcaagagacttatggaggcgcctcagtatgtct

SEQ ID NO: 103616 - DNA, 80 bp, synthetic construct
  source 1..80: mol_type = other DNA
agtgcacacgtgatcctgtcgggttttgtcttacaaatgacccctgcactctctgtcaatattggaaaggatatggttgt

SEQ ID NO: 103617 - DNA, 80 bp, synthetic construct
  source 1..80: mol_type = other DNA
aaagactcactgagtatactatgatggatttagtatatgctttacgtcacttcgaccaaaataattgcgaagtgcttaaa

SEQ ID NO: 103618 - DNA, 80 bp, synthetic construct
  source 1..80: mol_type = other DNA
agcatccttgtcaaatacggttgctgtgaagcttcctattttgataataagctctggtttgattttgtcgaaaatccagg

SEQ ID NO: 103619 - DNA, 80 bp, synthetic construct
  source 1..80: mol_type = other DNA
actatgtactttatcccacgtgctaaatccattgtgtcaaggattggcaatgccgtcttcactggatgtacaggcacttg

SEQ ID NO: 103620 - DNA, 80 bp, synthetic construct
  source 1..80: mol_type = other DNA
gattattggtgtctaccataagcttggtgaacgtattcgcaaagctgtgttaaacactgttaaattctgcgaccagatgg

SEQ ID NO: 103621 - DNA, 80 bp, synthetic construct
  source 1..80: mol_type = other DNA
tatctgcaggtctagttggtgttttgactcttgacaaccaagacttgaatggcctctggtatgattttggtgattttgtt

SEQ ID NO: 103622 - DNA, 80 bp, synthetic construct
  source 1..80: mol_type = other DNA
atcacacaacctggttctggagtggctgtcgtcgacagttactattcctatttaatgcctgtgttgtcgatgactgactg

SEQ ID NO: 103623 - DNA, 80 bp, synthetic construct
  source 1..80: mol_type = other DNA
tttagcagctgaaactcacagggattgtgattttaacaagcctctcattgagtggccacttactgagtatgattttactg

SEQ ID NO: 103624 - DNA, 80 bp, synthetic construct
  source 1..80: mol_type = other DNA
ggacaaggttaataaggttgcaaacctttttgtggaacaatcacagcgttgtctcaattttgttggagagtttgcgctca

SEQ ID NO: 103625 - DNA, 80 bp, synthetic construct
  source 1..80: mol_type = other DNA
atcgtcaataccaccaaaagatgctcaaatcgatggcagccacgcgtggtgccacatgcgtcattggaacaacgaagttc

SEQ ID NO: 103626 - DNA, 80 bp, synthetic construct
  source 1..80: mol_type = other DNA
tatggtggttgggactttatgttaaggacattgtacaaagatgtcgaaaatccacatcttatgggttgggattaccctaa

SEQ ID NO: 103627 - DNA, 80 bp, synthetic construct
  source 1..80: mol_type = other DNA
gtgtgatcgtgctatgcctaacatgtgtaggatttttgcatcactgatacttgcacgcaagcatggtacttgctgctcta

SEQ ID NO: 103628 - DNA, 80 bp, synthetic construct
  source 1..80: mol_type = other DNA
ccagtgatagattctaccgcttagctaatgagtgtgctcaggtgctaagcgaatatgtgttgtgtggtggtggctactat

SEQ ID NO: 103629 - DNA, 80 bp, synthetic construct
  source 1..80: mol_type = other DNA
acgaagtcgttgtagccattctttctggcactactactaatgtggacaagcttcgtagtctcattaccaacattgatttt

SEQ ID NO: 103630 - DNA, 80 bp, synthetic construct
  source 1..80: mol_type = other DNA
ttttgggaagaaagcttctatagagaactatacgaagctcccacaactttgcaagctgttggatcctgcgtggtatgcca

SEQ ID NO: 103631 - DNA, 80 bp, synthetic construct
  source 1..80: mol_type = other DNA
ttcgcagacgtcattgcgttgtggcacttgcatacgcagaccctttctctgctgcaaatgttgttatgaccacgttatag

SEQ ID NO: 103632 - DNA, 80 bp, synthetic construct
  source 1..80: mol_type = other DNA
gagaaactacgtagttatttggccgcacatgacattgctgtcactgttggaccctatcttgatggtgctattaatgttgg

SEQ ID NO: 103633 - DNA, 80 bp, synthetic construct
  source 1..80: mol_type = other DNA
caaacaaggattagagttcgctgccattactgcacccttccttgtgcttaccggattaggtgagtcctttaagaaagttg

SEQ ID NO: 103634 - DNA, 80 bp, synthetic construct
  source 1..80: mol_type = other DNA
tactaagaattataagttacaatcgcagattgtgactggattgtttaaagattgttccagagaggtatctggactttcac

SEQ ID NO: 103635 - DNA, 80 bp, synthetic construct
  source 1..80: mol_type = other DNA
gcatgcaaatctattaaggacactttggcctactatgccgagagcattttgtacagagtgtttccctatgagatctcgtc

SEQ ID NO: 103636 - DNA, 80 bp, synthetic construct
  source 1..80: mol_type = other DNA
cagcttatgcaccaacctatgttagtgttgatgataagtataagaccagcgatgagctttgtgtgaatctgaatcttcct

SEQ ID NO: 103637 - DNA, 80 bp, synthetic construct
  source 1..80: mol_type = other DNA
gctatgaaactttcaccatggtttgcggatggcgaaactgcctgcaatacggtgagagaaactcttattaacaaggggaa

SEQ ID NO: 103638 - DNA, 80 bp, synthetic construct
  source 1..80: mol_type = other DNA
atgttccttattcgcgtgtcatttctagaatgggattcaagctagacgcgacaatcccaggttatccaaagcttttcata

SEQ ID NO: 103639 - DNA, 80 bp, synthetic construct
  source 1..80: mol_type = other DNA
actcgtgaagaagctgttaggcaagttcgtagctggataggcttcgacgtagagggtgcccatgcatcgagaaatgcgtg

SEQ ID NO: 103640 - DNA, 80 bp, synthetic construct
  source 1..80: mol_type = other DNA
agtgggggaatatgatgactagcatctcggctagacccccgcccggtgaacaatttaagcacctggtacccctaatgcac

SEQ ID NO: 103641 - DNA, 80 bp, synthetic construct
  source 1..80: mol_type = other DNA
tgatgtctctagtttttcagaactgctgttagactgtgtagggtttacagctgcatcttgctactttgtggtgcgcctac

SEQ ID NO: 103642 - DNA, 80 bp, synthetic construct
  source 1..80: mol_type = other DNA
ggtcttgaaaacatcgcctttaatgttgtaaaacatggccactttgatggtgttgaaggtgaactacccgtagcagtggt

SEQ ID NO: 103643 - DNA, 80 bp, synthetic construct
  source 1..80: mol_type = other DNA
tggatgataaagtagaaacactactgtccactatcttcacttcttgtcagaacgctgtttcaagcttcattaacacttgt

SEQ ID NO: 103644 - DNA, 80 bp, synthetic construct
  source 1..80: mol_type = other DNA
aaatgataaaatcttcaccaagagtggtgtcaatgacatctgcgtctttgagaacaagacaacgttgcctactaatatag

SEQ ID NO: 103645 - DNA, 80 bp, synthetic construct
  source 1..80: mol_type = other DNA
tgatgtcaacgcagccctgaatatctgcttcgacatacgtgataatggagctttggagatgtttcgtaacactcccaatg

SEQ ID NO: 103646 - DNA, 80 bp, synthetic construct
  source 1..80: mol_type = other DNA
ctatactaatatctgatagaaaagtcaagaactacccttgtatggtaggacctgactatgcttacttcaatggcgctatc

SEQ ID NO: 103647 - DNA, 80 bp, synthetic construct
  source 1..80: mol_type = other DNA
attcgtgatagtgatgcttgcaagcaaccagtgaagttttacatttacaagaaagtcaatgatgaatacgttgacttttc

SEQ ID NO: 103648 - DNA, 80 bp, synthetic construct
  source 1..80: mol_type = other DNA
tgattccttctatacacaagggcgttcttgtaatgactttgtgcccatgacagctatggagaaggatttcctttctttgg

SEQ ID NO: 103649 - DNA, 80 bp, synthetic construct
  source 1..80: mol_type = other DNA
aaagcgatgttttcattaagaagtataatttgcaaaattatgcttttgagcacgttgtctatggtgatttctcacataca

SEQ ID NO: 103650 - DNA, 80 bp, synthetic construct
  source 1..80: mol_type = other DNA
caacgttgggtggcctacacttacttattggtctccacaaaaaggctgtggaaggtcatattattatggaggagatgctc

SEQ ID NO: 103651 - DNA, 80 bp, synthetic construct
  source 1..80: mol_type = other DNA
aagggtagtgctaccatccataactactttataactgaaacaaacacagcgtcttttaaggcagtgtgttctgttattga

SEQ ID NO: 103652 - DNA, 80 bp, synthetic construct
  source 1..80: mol_type = other DNA
tttgaggccactgcagcgactgttaatttcattgtcgaccttgccgagctgtttaaggtctttcttaagcagacttatgt

SEQ ID NO: 103653 - DNA, 80 bp, synthetic construct
  source 1..80: mol_type = other DNA
ttaacacttgttgagtttatgctatggtgtaaggatggccaggtgcaaaccttttatcctaggcttcaggcagtgaatga

SEQ ID NO: 103654 - DNA, 80 bp, synthetic construct
  source 1..80: mol_type = other DNA
ctggaaaccaggattggccatgccttcactatttaaggttcaaaatgtcaaccttgaaccttgccagcttgctaactaca

SEQ ID NO: 103655 - DNA, 80 bp, synthetic construct
  source 1..80: mol_type = other DNA
ctacacaacaactggatttgttgttgtaggcggcaaggcgtctcaacttactaagcaactccttgacattttgtctaaag

SEQ ID NO: 103656 - DNA, 80 bp, synthetic construct
  source 1..80: mol_type = other DNA
ctactgatgttcttgttaacactcataagaggagatgttgatccaggtccagactccactgttggcacttgtaacgaagt

SEQ ID NO: 103657 - DNA, 80 bp, synthetic construct
  source 1..80: mol_type = other DNA
agatatcagaccaccctacttcgaaaaagattggccccaacctatagactctctgaaggcagatggcatcatctatccta

SEQ ID NO: 103658 - DNA, 80 bp, synthetic construct
  source 1..80: mol_type = other DNA
caggaaggtcctattctaatatttctctatcttatcaggggctgtttcctagacaaggagatcagggccgcctttatgca

SEQ ID NO: 103659 - DNA, 80 bp, synthetic construct
  source 1..80: mol_type = other DNA
tattctgtctcacatgctgacatgaacactcaaaagccagcaccttggggtattggcaatttgtttatatccaattatag

SEQ ID NO: 103660 - DNA, 80 bp, synthetic construct
  source 1..80: mol_type = other DNA
cacagaaacattgccatttgacaatggtttcgtagttagaattggagcctacgccaaccaaacaggtggcttgattatat

SEQ ID NO: 103661 - DNA, 80 bp, synthetic construct
  source 1..80: mol_type = other DNA
caccatcgacacagaaaaccatttacaaaatttacccggccttcatgcttggaactgctgtaggaaattttgctaatggt

SEQ ID NO: 103662 - DNA, 80 bp, synthetic construct
  source 1..80: mol_type = other DNA
ctccctggtaggtatcttaaccacaccctcgtaatactgcctgatggttgtggtaccaatgtttgggtgttctattgcgt

SEQ ID NO: 103663 - DNA, 80 bp, synthetic construct
  source 1..80: mol_type = other DNA
tctagaaccccgtaatggtactaggtgtcccaatgatggtgcttataagtcatacgtcgtttgggaaacaccccactcag

SEQ ID NO: 103664 - DNA, 80 bp, synthetic construct
  source 1..80: mol_type = other DNA
ccatgcagttgctccacactaaagtctcatgggctggtgccaaagttcgtgctgttgtttacaatagccgggagtctctt

SEQ ID NO: 103665 - DNA, 80 bp, synthetic construct
  source 1..80: mol_type = other DNA
attgtgttggcatagatgaaactgttactcaaaataacagaaatgcctcactaaatgcttttaagacgtacttcaactta

SEQ ID NO: 103666 - DNA, 80 bp, synthetic construct
  source 1..80: mol_type = other DNA
cgtcaatgtaagtttatgtactcttacaatattacagaggatgaaaacgctgagtggtttggtgtaacccaaaatgcgca

SEQ ID NO: 103667 - DNA, 80 bp, synthetic construct
  source 1..80: mol_type = other DNA
aggcgtccacctctacacttctagaaaaggggacttgtatggtggaaatatgtttctctttgcttctttaccagtgtatg

SEQ ID NO: 103668 - DNA, 80 bp, synthetic construct
  source 1..80: mol_type = other DNA
aaactttaaagtactacactgtcattccgcgcagcccccgcattcgtgcatgggaacgcaaggcctggtctgctttttat

SEQ ID NO: 103669 - DNA, 80 bp, synthetic construct
  source 1..80: mol_type = other DNA
atatatagccttcataaactgacctatctgttagatttctcagttaacggctatatacgtagggcaatagattgtggcta

SEQ ID NO: 103670 - DNA, 80 bp, synthetic construct
  source 1..80: mol_type = other DNA
tgatgacctggcacaactacgctgttcttatgaatccttcgatgttgactctggagtttactcagtgtcatccttcgaag

SEQ ID NO: 103671 - DNA, 80 bp, synthetic construct
  source 1..80: mol_type = other DNA
cacaacctcgtggtgcctttatagaacagccacacagcacggagtgtgactttaccagtctgttcaaggcagaaccaccc

SEQ ID NO: 103672 - DNA, 80 bp, synthetic construct
  source 1..80: mol_type = other DNA
caggtttataattttagcaggttggttttcactaactgcaattataatcttacaaaactcctctcgctatttcaagtgag

SEQ ID NO: 103673 - DNA, 80 bp, synthetic construct
  source 1..80: mol_type = other DNA
tgagttttcctgtcatcaggtttcgccaagtgctctcgcgtctggctgctattcctcattgactgtagattactttgcat

SEQ ID NO: 103674 - DNA, 80 bp, synthetic construct
  source 1..80: mol_type = other DNA
acccgttgagtatggcttcgtatctacgtcaaggttctacagggcccattgctcagtttaattataaacaggacttcagt

SEQ ID NO: 103675 - DNA, 80 bp, synthetic construct
  source 1..80: mol_type = other DNA
gtgttcccgtctggcacctattactgtgtcgctgctcaggctaactcagtgcaacaagaatttagcgttgtgttgcctgg

SEQ ID NO: 103676 - DNA, 80 bp, synthetic construct
  source 1..80: mol_type = other DNA
aatcctacttgtaggatactggcttctgttccctctaatgtcactatacccatgccaaagagttatatgtggcttactca

SEQ ID NO: 103677 - DNA, 80 bp, synthetic construct
  source 1..80: mol_type = other DNA
gtgttatactaactcgcctgacaaccctcattacgttgaaccaggccagtacactccgtgtcttggtcttgcaggacgtg

SEQ ID NO: 103678 - DNA, 80 bp, synthetic construct
  source 1..80: mol_type = other DNA
gttttactacattcgacaagactcatattgaccgtgatactggactcacggctagaggtgacaaccagtttgtttctgaa

SEQ ID NO: 103679 - DNA, 80 bp, synthetic construct
  source 1..80: mol_type = other DNA
gaagcccttgaaatggccttcattatctcagtccagtatggcacaaacgctaatagcgtttgtcctttacaggctgtgcg

SEQ ID NO: 103680 - DNA, 80 bp, synthetic construct
  source 1..80: mol_type = other DNA
aaatgacaccaatgttgaagacaagcttggtcgttgtattgattactctctatatggtgttactggtagaggtgtcttcc

SEQ ID NO: 103681 - DNA, 80 bp, synthetic construct
  source 1..80: mol_type = other DNA
aaaactgctcttccgtaggtttgagacagcagcggtttgtttatgatagttttgacaacttagtaggctaccattctgat

SEQ ID NO: 103682 - DNA, 80 bp, synthetic construct
  source 1..80: mol_type = other DNA
atgccacattgtttggcagcgttgcatgtgagcacgttgacacaatgatgacgcaattctcacgtatgacacaagctaga

SEQ ID NO: 103683 - DNA, 80 bp, synthetic construct
  source 1..80: mol_type = other DNA
cttcgcatgcgtgacgttgatggtgcaggccctttacaaacaactgttggttgtgttgtagggcttgttaattcttctat

SEQ ID NO: 103684 - DNA, 80 bp, synthetic construct
  source 1..80: mol_type = other DNA
gatagttgacgaatgccagctacccctaggacaatcgctctgtgctataccctctcccaccattcgtgctgccactggag

SEQ ID NO: 103685 - DNA, 80 bp, synthetic construct
  source 1..80: mol_type = other DNA
cgacatggctaagaagcaacttggattgctggagcctgttaaccaatctgccacagtggatgtgcaagtccaaaataaga

SEQ ID NO: 103686 - DNA, 80 bp, synthetic construct
  source 1..80: mol_type = other DNA
aatcttcacctctgaaacttgctacaattaacttcactgagccacacatgctcactcctatcaattctagcaggttcacc

SEQ ID NO: 103687 - DNA, 80 bp, synthetic construct
  source 1..80: mol_type = other DNA
gttgaaataccaactaatttctcctttggcgtgacacaggaatacatccagacaaccattcagaaggtgactgttgattg

SEQ ID NO: 103688 - DNA, 80 bp, synthetic construct
  source 1..80: mol_type = other DNA
taaacagtatgtctgcaatggttttgaaaagtgcgaagagctgcttagagaatacggtcagttttgcgctaaaattaacc

SEQ ID NO: 103689 - DNA, 80 bp, synthetic construct
  source 1..80: mol_type = other DNA
aggcattgcatggtgctaatcttagacaggatgagtctgtctctaacatctttgcaaatataaagacacaagctacacag

SEQ ID NO: 103690 - DNA, 80 bp, synthetic construct
  source 1..80: mol_type = other DNA
ccgcttgatgcaggtttgactggtgactttaatttgactcttcttcaagtgcctaaagttgtcactagtcagtacagcta

SEQ ID NO: 103691 - DNA, 80 bp, synthetic construct
  source 1..80: mol_type = other DNA
taggagtgctattgaagacttgctgtttaacaaggttactattgctgaccctggttacatgcaaggctacgatgattgta

SEQ ID NO: 103692 - DNA, 80 bp, synthetic construct
  source 1..80: mol_type = other DNA
agtgctgccacccttatatgatgctaacatggagtcaatgtacacgacttcacttgctggcgctatattaggtgctggat

SEQ ID NO: 103693 - DNA, 80 bp, synthetic construct
  source 1..80: mol_type = other DNA
ggactgctggagcatcatcgcttgctgccatcccttttgcacagagcatgttctatcgtatgaatggtattggcatcacg

SEQ ID NO: 103694 - DNA, 80 bp, synthetic construct
  source 1..80: mol_type = other DNA
caacaggttctatcggagaaccagaagcagattgccaacaaattcaaccaggctttaggtgctatgcagactggattcac

SEQ ID NO: 103695 - DNA, 80 bp, synthetic construct
  source 1..80: mol_type = other DNA
ctgtggatgttgtggttggccaactcgaggaaactaatatgcatagtccagaaattgtcgttggagactatgttattatt

SEQ ID NO: 103696 - DNA, 80 bp, synthetic construct
  source 1..80: mol_type = other DNA
caaccacaaaccttgcctttgcaaaagtccaagatgctgtgaatgctaatgcacaagctctttctaagctggcctcagaa

SEQ ID NO: 103697 - DNA, 80 bp, synthetic construct
  source 1..80: mol_type = other DNA
ttgtccaacacttttggtgccatctcttcatctattagtgatattctaaagaggcttgacgccgttgaacaagaggcaca

SEQ ID NO: 103698 - DNA, 80 bp, synthetic construct
  source 1..80: mol_type = other DNA
aattgatcgtttgatcaatgggcgcctcacttctttgaacgcattcgttgcccaacaacttgtgcgctcagaaactgctg

SEQ ID NO: 103699 - DNA, 80 bp, synthetic construct
  source 1..80: mol_type = other DNA
ccaggtctgctcaattggccgttgataaggtcaatgagtgcgtcaaatcgcagtccaaaagaaatggattctgcggatct

SEQ ID NO: 103700 - DNA, 80 bp, synthetic construct
  source 1..80: mol_type = other DNA
ggcaaccatattgtctcgtttgttgtcaatgctccaaacgggttttacttctttcatgtaggctatgtacctactgacca

SEQ ID NO: 103701 - DNA, 80 bp, synthetic construct
  source 1..80: mol_type = other DNA
tataaatgcaactgccgcctacggcctttgcaacacagagaaccctcctaggtgcattgctcctattgatggttactttg

SEQ ID NO: 103702 - DNA, 80 bp, synthetic construct
  source 1..80: mol_type = other DNA
tgcttaatcaaacaactacccgtgatgctgaacctgaatggtactacacgggcagtgctttctataatcctgaaccgatt

SEQ ID NO: 103703 - DNA, 80 bp, synthetic construct
  source 1..80: mol_type = other DNA
actcttgctaacacacgttatgtgtctaaagatactcagtttcaagagttaaataataagctaccaccccctcttctcaa

SEQ ID NO: 103704 - DNA, 80 bp, synthetic construct
  source 1..80: mol_type = other DNA
caaccaaactgatgaaagtttccgagaagagctggaggagttctttaagaatgtatcttcgcaaggtccaaacttccagg

SEQ ID NO: 103705 - DNA, 80 bp, synthetic construct
  source 1..80: mol_type = other DNA
agatatctaaaattaatgctactttgttggacttatcagacgagatgaaagtccttaacgaggtggtcaagcaacttaac

SEQ ID NO: 103706 - DNA, 80 bp, synthetic construct
  source 1..80: mol_type = other DNA
agtggcaagttgtttgtgcgttgcgaggaagatggacagaccgtcttctacccaatgtgcactaatggtcaggctgtgcc

SEQ ID NO: 103707 - DNA, 80 bp, synthetic construct
  source 1..80: mol_type = other DNA
gagtcatacattgaccttaaggagcttggtaattatagcttctaccagaaatggccgtggtacatctggttgggattcat

SEQ ID NO: 103708 - DNA, 80 bp, synthetic construct
  source 1..80: mol_type = other DNA
tgcaggacttgtggctctagccctgtgtgtctttttcttgctctgctgtactggttgcggaaccagttgtatgggcaagc

SEQ ID NO: 103709 - DNA, 80 bp, synthetic construct
  source 1..80: mol_type = other DNA
ttaagtgtaatcgttgctgtgacagttatgatgaatatgatgttgagccacataagattcatgtccattaacgaacttag

SEQ ID NO: 103710 - DNA, 80 bp, synthetic construct
  source 1..80: mol_type = other DNA
ttatgagagtgcaaaaaccactgtttttgttaattgcactttcactctttgctaatgcattctccagacctactgttgtt

SEQ ID NO: 103711 - DNA, 80 bp, synthetic construct
  source 1..80: mol_type = other DNA
tatattcctgagcactgtcagtcctatactggcaaaatgctcaagatttgtattgcacagacgaagtttgacacagctgg

SEQ ID NO: 103712 - DNA, 80 bp, synthetic construct
  source 1..80: mol_type = other DNA
catgtacaccaatcgtgtcatctccgtgcctgtctctactggtgctttcgagcttactgttgaccgtgacgcacaaactg

SEQ ID NO: 103713 - DNA, 80 bp, synthetic construct
  source 1..80: mol_type = other DNA
gccataatgatttttatgatcagtctgttgccacgactcttgtaaacgttgatcccacccaggattaacgaactttatgg

SEQ ID NO: 103714 - DNA, 80 bp, synthetic construct
  source 1..80: mol_type = other DNA
attacgtgtccttgcttaaccaagtgtggcagcaatacactaattctgcagttactactggtgtctgggttccaccacct

SEQ ID NO: 103715 - DNA, 80 bp, synthetic construct
  source 1..80: mol_type = other DNA
gctgttgcttttactcctgtcactggcacatcattgcaccctgtgcagtggcagtgtcaactctcctttgcagggtttac

SEQ ID NO: 103716 - DNA, 80 bp, synthetic construct
  source 1..80: mol_type = other DNA
aggacaggctgttaatagcacaaaggcattagcaaagcaggatgcagcacaacaggttgcctggcaattgcatcgccacg

SEQ ID NO: 103717 - DNA, 80 bp, synthetic construct
  source 1..80: mol_type = other DNA
taccctctttcggttgaagggtggtgcaccgattaagaaagtgacctttggcgaagagaaagtacatgaggtcgctgcta

SEQ ID NO: 103718 - DNA, 80 bp, synthetic construct
  source 1..80: mol_type = other DNA
agtcctctttgtgccggtcaagttggccagctttcttaagcatctcccaggcccacgtgtttacctggttgagaggctca

SEQ ID NO: 103719 - DNA, 80 bp, synthetic construct
  source 1..80: mol_type = other DNA
gcaagctgtcaggcttcagccttcgatggcgtcatgttcaatcgtaaacgccatcaccctactaatacgaagctgcgcta

SEQ ID NO: 103720 - DNA, 80 bp, synthetic construct
  source 1..80: mol_type = other DNA
tgctaagcgtaggttctcacctcttaaaccggaagatgttatggagattgacccacatcctgggccaacccactatcttc

SEQ ID NO: 103721 - DNA, 80 bp, synthetic construct
  source 1..80: mol_type = other DNA
gtgttgtttttccaccgtccaaagactggcgtgtcagctctggacatatgttagatgatgttcagaagtggcttacacct

SEQ ID NO: 103722 - DNA, 80 bp, synthetic construct
  source 1..80: mol_type = other DNA
tatggtgctaaacctattactgaatatcatatcacacttgctcttctctgctgtaagccagatgagcaatttgatgactt

SEQ ID NO: 103723 - DNA, 80 bp, synthetic construct
  source 1..80: mol_type = other DNA
cacccctcttgcgaatatgttaaaagatatcatattcgagctgggtgacttcaatattctgggcagaacccttgttctga

SEQ ID NO: 103724 - DNA, 80 bp, synthetic construct
  source 1..80: mol_type = other DNA
atgcccatgagttacagcgttatggtatgaccagacctgttaacatggcagtcccacatattaaggaatggcttaaagta

SEQ ID NO: 103725 - DNA, 80 bp, synthetic construct
  source 1..80: mol_type = other DNA
catggatacaccatctacaatagccatcttcctctacatctttctgtttctaagctccatgaccttgacgaagcaactcg

SEQ ID NO: 103726 - DNA, 80 bp, synthetic construct
  source 1..80: mol_type = other DNA
ctcgtacataggcaccagagcttatttcaaacagtatgttacgcgtattctcgttgcaccaactgcactcgagcttgtca

SEQ ID NO: 103727 - DNA, 80 bp, synthetic construct
  source 1..80: mol_type = other DNA
caatacgcggcactcctagcaatcctaagcagattgttcagtccttaccaatctcatcagggttttggtaacgaactatg

SEQ ID NO: 103728 - DNA, 80 bp, synthetic construct
  source 1..80: mol_type = other DNA
gctttttctatgtcgctgttcaaggtcattgaacttgtgcctgcctttcctgaacaggaaactgtcagccacaccgacca

SEQ ID NO: 103729 - DNA, 80 bp, synthetic construct
  source 1..80: mol_type = other DNA
caagaagtgttacagtcgagtacaacattcatgctgtattagacgcgctgcttgctaattctaatcttagaactttttct

SEQ ID NO: 103730 - DNA, 80 bp, synthetic construct
  source 1..80: mol_type = other DNA
acagccactaaccgtatttacatgcattcctactgtaggttacagtgcagcgttagctgtgaatgtatgtctcataccgc

SEQ ID NO: 103731 - DNA, 80 bp, synthetic construct
  source 1..80: mol_type = other DNA
tcatactgtgcctaaatcaggacacatgtatgcgtagcattataaagaccctcattctctatggtcttatgttgtataat

SEQ ID NO: 103732 - DNA, 80 bp, synthetic construct
  source 1..80: mol_type = other DNA
tttgttctatcagctatactagtcaatggaactcatttgccacttggaagctgcttgcttacctttgttgtggtcctctc

SEQ ID NO: 103733 - DNA, 80 bp, synthetic construct
  source 1..80: mol_type = other DNA
tgtactttggtttctggacagaattcgtttctgcctcatactaaggtcttttattccacttattgacatgcggtcacatt

SEQ ID NO: 103734 - DNA, 80 bp, synthetic construct
  source 1..80: mol_type = other DNA
ttgtccgtgtctctacgtgctcttcacaaggtttggttgctgttaacaacagcaaaccttactttttaaagaactttgac

SEQ ID NO: 103735 - DNA, 80 bp, synthetic construct
  source 1..80: mol_type = other DNA
cagcattgccgctgctcaaggtgtttctatgttcactccgtggcttacatcgagtgcacatttattactaggtttagtaa

SEQ ID NO: 103736 - DNA, 80 bp, synthetic construct
  source 1..80: mol_type = other DNA
aactcaattagtctctgtgactgagttttcactagacaatcaccgatctactgtattcgtgcctgcttcgcgcgactcag

SEQ ID NO: 103737 - DNA, 80 bp, synthetic construct
  source 1..80: mol_type = other DNA
tcattcatagtaaactttttcattttcaccgtagcttgtgctattatactattagtttgtatggcattccttacggccgc

SEQ ID NO: 103738 - DNA, 80 bp, synthetic construct
  source 1..80: mol_type = other DNA
ttctgttgataaatctctctctgtcgaagaatttgtcgatgtcgttaaggatgaggtaagtgagttacttaccaaactcc

SEQ ID NO: 103739 - DNA, 80 bp, synthetic construct
  source 1..80: mol_type = other DNA
gcgattatgtgtgcagtgtgctatagggttaaacaccctattagttcagcctgccatatatgtctataacacaggacgct

SEQ ID NO: 103740 - DNA, 80 bp, synthetic construct
  source 1..80: mol_type = other DNA
ctgtctatgtgaagtttcaagagagtaagcccccactacctccagaggattgggtttaacgaactctctaatcatgtcta

SEQ ID NO: 103741 - DNA, 80 bp, synthetic construct
  source 1..80: mol_type = other DNA
acactacgctcaccagtgagcaaattgttgctatagtgaaggactggaactttgcttggtccgttatctttttacttata

SEQ ID NO: 103742 - DNA, 80 bp, synthetic construct
  source 1..80: mol_type = other DNA
accatcgtactacaatatggttacccatctcgtagtatgacggtctacgttttcaaaatgtttgtactatggctactttg

SEQ ID NO: 103743 - DNA, 80 bp, synthetic construct
  source 1..80: mol_type = other DNA
ccagcatccatggcgctgtcaattttctgcgccgtttacccgattgacctatcatcccagataatctctggcataatagc

SEQ ID NO: 103744 - DNA, 80 bp, synthetic construct
  source 1..80: mol_type = other DNA
tgcgatctctgcaataatgtggatttcctacttcgtgcagagcatccggctttttaggagaactggctcctggtggtcat

SEQ ID NO: 103745 - DNA, 80 bp, synthetic construct
  source 1..80: mol_type = other DNA
tcaaccccgaaactaattgcctcttgaacgtgccagtcggtggaactactgttgtcagaccccttgttgaagactcaact

SEQ ID NO: 103746 - DNA, 80 bp, synthetic construct
  source 1..80: mol_type = other DNA
agtgtgacagctgttgtcactaatggctacctcaagatcgctgggatgcactttggccagtgcgactttcgctcattacc

SEQ ID NO: 103747 - DNA, 80 bp, synthetic construct
  source 1..80: mol_type = other DNA
caatgaagtgactgtggccaagccgaatgtactaatagctttgaaaatggtaaagagacaagactacggaactaactccg

SEQ ID NO: 103748 - DNA, 80 bp, synthetic construct
  source 1..80: mol_type = other DNA
gagtggctatctaccacagatacaaggctggtaattacaggcgtcctgccattgtgcaggatgaagaacttgcactgctg

SEQ ID NO: 103749 - DNA, 80 bp, synthetic construct
  source 1..80: mol_type = other DNA
tgcgtggcattgatattgaaggcttcgatgtggaagagtttattgacaccccatgctactgcttcaaccgcgatggtgat

SEQ ID NO: 103750 - DNA, 80 bp, synthetic construct
  source 1..80: mol_type = other DNA
cgagcataagctcattagtaagagtatgatttaaaatcattaacgaatcttaattttcattgttatggccacccctgcag

SEQ ID NO: 103751 - DNA, 80 bp, synthetic construct
  source 1..80: mol_type = other DNA
cccctcgtgctgtgaccttcggtgacaacaatgacaacaataccaacactcagcagtctagaggccgaggaagaaatcct

SEQ ID NO: 103752 - DNA, 80 bp, synthetic construct
  source 1..80: mol_type = other DNA
aagcctagacctgctcccaacacttccgtctcctggtacacggggcttacccaacacgggaaggtccctctttcctttcc

SEQ ID NO: 103753 - DNA, 80 bp, synthetic construct
  source 1..80: mol_type = other DNA
accaagtcactggctcccaggtggttcttctactacactggaaccgggcctgaggctaacctccctttcagagctgtcaa

SEQ ID NO: 103754 - DNA, 80 bp, synthetic construct
  source 1..80: mol_type = other DNA
agaaggaattgtctgggtccatgaagatggtgccacagacgctccttccaattttgggacgcgcaaccctaacaacgatg

SEQ ID NO: 103755 - DNA, 80 bp, synthetic construct
  source 1..80: mol_type = other DNA
ggagctgtaggaggtgatgcttccagtattctttacctcagtttgctgaacagactcgaagctctcgaggctggtaaaac

SEQ ID NO: 103756 - DNA, 80 bp, synthetic construct
  source 1..80: mol_type = other DNA
gcacagtggggttctactatgatcttttccgcacacccagtagagtgtgatgatcaggaagaagatgagcctgaagagca

SEQ ID NO: 103757 - DNA, 80 bp, synthetic construct
  source 1..80: mol_type = other DNA
aaaagctgggcctaaggttgtcaccaagaaagatgctgcagctgctaaaaataagatgcgccacaagcgcgtcgccacca

SEQ ID NO: 103758 - DNA, 80 bp, synthetic construct
  source 1..80: mol_type = other DNA
aaggctataatgtcgtgcaagccttcggccgtcggggacccggagacctgcagggcaactttggtgacatgcagcttaac

SEQ ID NO: 103759 - DNA, 80 bp, synthetic construct
  source 1..80: mol_type = other DNA
aagttaggcacagaggaccctcgttggcctcagattgctgaacttgctccctctgccagtgctttcatgggtatgtctca

SEQ ID NO: 103760 - DNA, 80 bp, synthetic construct
  source 1..80: mol_type = other DNA
gctgaagctcacccaccaaagcaatgatgctgatggccaaccagtgtactttctcagatacagtggtgccataaaacttg

SEQ ID NO: 103761 - DNA, 80 bp, synthetic construct
  source 1..80: mol_type = other DNA
aaacagaaggctgatgagaacaaacaggaatcgaccgaagacggccaggacttgtttgaccaagctgttgctgctgcaat

SEQ ID NO: 103762 - DNA, 80 bp, synthetic construct
  source 1..80: mol_type = other DNA
ggccagtgctccacaacctcagcgaatgcctaagggtagtattacccagcgttctcgcacacctcgtgctgctgtaggtc

SEQ ID NO: 103763 - DNA, 80 bp, synthetic construct
  source 1..80: mol_type = other DNA
cgatggaagacgttaatcaggatgaggaacgtcagtaaatgtaacaagagtaaggcgaccgcaagtgattggaaacccca

SEQ ID NO: 103764 - DNA, 80 bp, synthetic construct
  source 1..80: mol_type = other DNA
ggaagatcttgctgaagagtttgaggatagcactggtgatgaagcctgggctacccttgttgatgaggcattcccacttg

SEQ ID NO: 103765 - DNA, 80 bp, synthetic construct
  source 1..80: mol_type = other DNA
atgatgatcaagatgatgcatcagtttgtgaggaaactgcctctcctttagagctctgcactgctgtagagcaacaattt

SEQ ID NO: 103766 - DNA, 80 bp, synthetic construct
  source 1..80: mol_type = other DNA
actgttgaagtgtttgaagctaaggcttttgaaacaccagcagctgtcacttgtaatgtcttttgtgttccagaaacaca

SEQ ID NO: 103767 - DNA, 80 bp, synthetic construct
  source 1..80: mol_type = other DNA
taaggcaactattatagtcagagacattaaacatgctcctgaactacctaaacctgaagtggttgaaattcctgcagaag

SEQ ID NO: 103768 - DNA, 80 bp, synthetic construct
  source 1..80: mol_type = other DNA
tggtccaacaacccacacaagcagctgagccatcttcagaggctaataacaatgaccagcaaactacactagttgcccca

SEQ ID NO: 103769 - DNA, 80 bp, synthetic construct
  source 1..80: mol_type = other DNA
actgctccgcaaaaggcatatgaggctgacgttgaagccgtggagcagcctgtagtccgacccaaagtacgcactcctaa

SEQ ID NO: 103770 - DNA, 80 bp, synthetic construct
  source 1..80: mol_type = other DNA
ctggcggaaatttttccgaccctttcatggttaaccaagtggcttacagctctagtgcaagtgacgccattgttggcact

SEQ ID NO: 103771 - DNA, 80 bp, synthetic construct
  source 1..80: mol_type = other DNA
gaagcgtactcctaaggtcaatgctggtagtgatagtgattccactgtggatcccttatcagcctttaagcataaggttt

SEQ ID NO: 103772 - DNA, 80 bp, synthetic construct
  source 1..80: mol_type = other DNA
gcactgatagcgttaccattgttttgtgtgatgctattaagcttgccaaatgctttaaggagtgtgtcttagtcaatgcg

SEQ ID NO: 103773 - DNA, 80 bp, synthetic construct
  source 1..80: mol_type = other DNA
gctaatacgcaccttaaacatggtggaggcattgcagctgccattaataaagcctcacaaggtgctgttcaacttgaatc

SEQ ID NO: 103774 - DNA, 80 bp, synthetic construct
  source 1..80: mol_type = other DNA
ggatgagtacgttgatcgtaaaggtccgttacaggttggtgatgctgttttacttaaggggcataatttggccaaaaata

SEQ ID NO: 103775 - DNA, 80 bp, synthetic construct
  source 1..80: mol_type = other DNA
tcctccacgttgtggggcctgatatgcggtcaaagcaagatgtctccttacttagtaagtgttacaaggctatgaattca

SEQ ID NO: 103776 - DNA, 80 bp, synthetic construct
  source 1..80: mol_type = other DNA
tatcctttgattgtaacaccactagtttctgcaggtatttttggtgttgaaccaaaattatcttttgagtatcttcagcg

SEQ ID NO: 103777 - DNA, 80 bp, synthetic construct
  source 1..80: mol_type = other DNA
tgaacttcgcactagaactctggtggctgttaactctgaagacatttataataaattaacggaggtaaaggttcctcaag

SEQ ID NO: 103778 - DNA, 80 bp, synthetic construct
  source 1..80: mol_type = other DNA
gtttaaccttttcctttgatggtcttaaaggcggtattcgtaaagctaaggaatatggctttactgtattcgtctgcact

SEQ ID NO: 103779 - DNA, 80 bp, synthetic construct
  source 1..80: mol_type = other DNA
gacaattcagctaataccaagatccttcgtaacaagggtgttgattatactaagaagcaagttgttgtaggtggagtcca

SEQ ID NO: 103780 - DNA, 80 bp, synthetic construct
  source 1..80: mol_type = other DNA
ttattactgctataacagtaaggacttcttacctgaacttgttgctgcagcaaataagactaaaggcataatcgcccacc

SEQ ID NO: 103781 - DNA, 80 bp, synthetic construct
  source 1..80: mol_type = other DNA
accctgcagggcaagccagttggctacttcttcccttatgattctgctcttgagactggtgactacacctttctcctgcg

SEQ ID NO: 103782 - DNA, 80 bp, synthetic construct
  source 1..80: mol_type = other DNA
ctctgggatatatatctcatgggttggatttaatgcaagccagagcttttgttaaaatggtacgtgtgccatatgtctgc

SEQ ID NO: 103783 - DNA, 80 bp, synthetic construct
  source 1..80: mol_type = other DNA
ttgctttctaataaagaacaagttcttgttttgacatctaatggtgaacgtttgtcacctgtagatgaatttattaagca

SEQ ID NO: 103784 - DNA, 80 bp, synthetic construct
  source 1..80: mol_type = other DNA
tgtggaaaaagagggctcttaccataattggcaccttgtcaaaggtgagattcttcttaacaatgtgatttataataagc

SEQ ID NO: 103785 - DNA, 80 bp, synthetic construct
  source 1..80: mol_type = other DNA
tcttgcactggtctgatcaaaccatttgctatagagatcaacaactcttcgtgttgaagaacggttgtgctttaccattt

SEQ ID NO: 103786 - DNA, 80 bp, synthetic construct
  source 1..80: mol_type = other DNA
gaagatcttaataagtgccgtacgtacctgacttctcgtgccgcacaacaattaacaatcgaagtacttgttacggtcga

SEQ ID NO: 103787 - DNA, 80 bp, synthetic construct
  source 1..80: mol_type = other DNA
tggtgttaattttaggacatgtgtcttaaataatcagaccacctatagagcacaggttggttgtgtgtttcttaacggtg

SEQ ID NO: 103788 - DNA, 80 bp, synthetic construct
  source 1..80: mol_type = other DNA
tggatatttctgataccattccggaggaaaagcagaatggtctcagtcttttcttagctgataatttatcagcagctgag

SEQ ID NO: 103789 - DNA, 80 bp, synthetic construct
  source 1..80: mol_type = other DNA
aaggaggtgcttagtgaactctatggcacccccgattctaatttcctatataggtattattccatcagagctaaggtagc

SEQ ID NO: 103790 - DNA, 80 bp, synthetic construct
  source 1..80: mol_type = other DNA
taactggaaaatgcttatgtgcgataaggcgcggtcccttaggttaagtgatgctaactgctatgtcaatgtagtggtta

SEQ ID NO: 103791 - DNA, 80 bp, synthetic construct
  source 1..80: mol_type = other DNA
tgatgcttgatcttcttagggatatacgttttaccattcctgcactgcagcaggcctttattaagcataagggcggtgat

SEQ ID NO: 103792 - DNA, 80 bp, synthetic construct
  source 1..80: mol_type = other DNA
caagaatggacgcggaggtaatcgcttccgccattcccttccacaaccggacagggataccccttatgaactctttgatg

SEQ ID NO: 103793 - DNA, 80 bp, synthetic construct
  source 1..80: mol_type = other DNA
ggcacaaaagatgttaccatacaaggccttaaggcatgttgttatgtgggagtgcagtctcttgaagacttgcatgcacg

SEQ ID NO: 103794 - DNA, 80 bp, synthetic construct
  source 1..80: mol_type = other DNA
cacaacttatacttgtcaatgcggtggtgagcgtcatcgacagatcgttgagcacaacaccccttggctgctcttgtcag

SEQ ID NO: 103795 - DNA, 80 bp, synthetic construct
  source 1..80: mol_type = other DNA
gtaaacctagtgagcagactgttagtactgcaactagtcctgattttgaggcttttaatgtctttcttggttctgagacg

SEQ ID NO: 103796 - DNA, 80 bp, synthetic construct
  source 1..80: mol_type = other DNA
tcagtaggacactacgttcacgcccgtgtgaaagactcattaatttataaatatgactcaggtgctttgactaaatcttc

SEQ ID NO: 103797 - DNA, 80 bp, synthetic construct
  source 1..80: mol_type = other DNA
agagtggaagtgcaaggttactgacattttatacccaggacaaaaatatgccagcgattgtaacgtagtggtatattctt

SEQ ID NO: 103798 - DNA, 80 bp, synthetic construct
  source 1..80: mol_type = other DNA
tggatggtaatacaaaagcagaagtcgatccagacttgtctgcatactatgtcaaggatggcaagtattttacacatacg

SEQ ID NO: 103799 - DNA, 80 bp, synthetic construct
  source 1..80: mol_type = other DNA
ccacctgtggcttattcgcccgcaactgttattgctggcagtgtttatactaatagctgtttaactgctagtgatggaag

SEQ ID NO: 103800 - DNA, 80 bp, synthetic construct
  source 1..80: mol_type = other DNA
cgctagtggtgaccctattagtttagcttttaataatcttttgggttacgatgctagtaaacccacttctaagaaatata

SEQ ID NO: 103801 - DNA, 80 bp, synthetic construct
  source 1..80: mol_type = other DNA
acctggaggctgatcccaaagggaagtactcaaagggtgtcattaagaagctgattggaggtgattttactccaattgac

SEQ ID NO: 103802 - DNA, 80 bp, synthetic construct
  source 1..80: mol_type = other DNA
cttactccatgctccctgatgagtctggagatgtactaatggctgaattcagcacatatgaccctatgtacaagaatggt

SEQ ID NO: 103803 - DNA, 80 bp, synthetic construct
  source 1..80: mol_type = other DNA
gccatgcttaatggcaaaccagtcttgtgggttactaatggagtctttgatggtgcacttactcgcttcaatagagcatc

SEQ ID NO: 103804 - DNA, 80 bp, synthetic construct
  source 1..80: mol_type = other DNA
gctgcgtcaaatttatgaccctgcgcctgttgaattagaaaacaagtttacaccattacttgtagaggacatccctccta

SEQ ID NO: 103805 - DNA, 80 bp, synthetic construct
  source 1..80: mol_type = other DNA
taattgaagaagaaaaacttattgctgtgcaagaattaaagctagtcaaatgcaaaggtttaaccaaaccgtttgttaaa

SEQ ID NO: 103806 - DNA, 80 bp, synthetic construct
  source 1..80: mol_type = other DNA
gatggctttagttttgtatcagatgatactggtatgcaagtagttgaatacttgactcgtgatgacatgcatcaattgta

SEQ ID NO: 103807 - DNA, 80 bp, synthetic construct
  source 1..80: mol_type = other DNA
tgttgatcctaagcatcagataattgtccttaacgacaattttctctcatcgctctttggactgcatactgtgcaaagtg

SEQ ID NO: 103808 - DNA, 80 bp, synthetic construct
  source 1..80: mol_type = other DNA
gagatctaagtgtagttgcagcttctggatccttgacaaagaaagttaaaatgttgtttaaagcttcagctttgtttaag

SEQ ID NO: 103809 - DNA, 80 bp, synthetic construct
  source 1..80: mol_type = other DNA
gagtttgctagtcgcacctttagtgctgtatctgctgtaggtagagctactaaatttgtggtgcgtcattctggtactgt

SEQ ID NO: 103810 - DNA, 80 bp, synthetic construct
  source 1..80: mol_type = other DNA
tgctagcgttttgtatagttgcatgacaattatcaagacattgtgcttaatacctctgcgctattttaaagacagagaaa

SEQ ID NO: 103811 - DNA, 80 bp, synthetic construct
  source 1..80: mol_type = other DNA
ccactggtaccgaagtcgaggtaagtgctttgcgtaccgccggtatagtaactggcaatgttgttaagcagtgttgcaca

SEQ ID NO: 103812 - DNA, 80 bp, synthetic construct
  source 1..80: mol_type = other DNA
caatacatgtgtggcaaggatggtaaccccattcctgactacgcaattcaagcagctagtgaaggcttgaactccctggc

SEQ ID NO: 103813 - DNA, 80 bp, synthetic construct
  source 1..80: mol_type = other DNA
gcagccattgatttgactattaccaagttacaaggtatagactggaaagcatccttacgcttgttacttgtcttatgtac

SEQ ID NO: 103814 - DNA, 80 bp, synthetic construct
  source 1..80: mol_type = other DNA
aactgggctattgttgtcttcaatttatcacttgtacatctttaacgaggtggtttcaagtgatgctatgttagatgatg

SEQ ID NO: 103815 - DNA, 80 bp, synthetic construct
  source 1..80: mol_type = other DNA
ctacaggtattacggcactctacaaagaagcccgatcatacttaggcatcacctctgcttgtgatggagtagcacgtgat

SEQ ID NO: 103816 - DNA, 80 bp, synthetic construct
  source 1..80: mol_type = other DNA
tatagagccaactcatttgacatctctaattactgtgctaatcgttctgttttatgtaagtggtgtctattaggtcaaga

SEQ ID NO: 103817 - DNA, 80 bp, synthetic construct
  source 1..80: mol_type = other DNA
ctccattactcattattcagcccttaagatggttcaaacccatataagccactacgtcttgaacgttgattggttgtggt

SEQ ID NO: 103818 - DNA, 80 bp, synthetic construct
  source 1..80: mol_type = other DNA
ttgcacttgaattgctacttgcatatgttctgtacacaccagctttcaattgggtactgctggcttgtacattacagtac

SEQ ID NO: 103819 - DNA, 80 bp, synthetic construct
  source 1..80: mol_type = other DNA
ttctttagtcagacttcgttatttgtggactggcgttcttacaattacgttgtctcctgcatctttttgtttttcactca

SEQ ID NO: 103820 - DNA, 80 bp, synthetic construct
  source 1..80: mol_type = other DNA
tataccgcttgacggtcttatcagaatttacaatgtcttggcatgcctctggtttcttcgtaggttctataaccatgtta

SEQ ID NO: 103821 - DNA, 80 bp, synthetic construct
  source 1..80: mol_type = other DNA
ttaatggttgtaaggacactgcatgcctcctctgttataaaaggaatcggcttacacgtgttgaagcctctaccgtcgtc

SEQ ID NO: 103822 - DNA, 80 bp, synthetic construct
  source 1..80: mol_type = other DNA
tgatgttgtagctgacgtctctgcccgtgcagattctgaaggctacatcacttttaaagaaaaactctacagagtcgttt

SEQ ID NO: 103823 - DNA, 80 bp, synthetic construct
  source 1..80: mol_type = other DNA
agacataaatggaattgtgttgattgcgacaccgcaggtattgggaacacctttatctgtgaagaagttgcaaatgacct

SEQ ID NO: 103824 - DNA, 80 bp, synthetic construct
  source 1..80: mol_type = other DNA
cactaccactctacggcgccttgtgaaacccacagataagtcccactattatgtggattctgtcgaggttaaggatactg

SEQ ID NO: 103825 - DNA, 80 bp, synthetic construct
  source 1..80: mol_type = other DNA
ctgtgcagcttaattatactagaggtgggcaggtctgctatgagcgcttcccactctgtaactttgctaatctggataag

SEQ ID NO: 103826 - DNA, 80 bp, synthetic construct
  source 1..80: mol_type = other DNA
ttgaagttcaaagaggtttgcaaatctactactggtatacctgaacacaactttatcatttatgacgctagtgatcgtgg

SEQ ID NO: 103827 - DNA, 80 bp, synthetic construct
  source 1..80: mol_type = other DNA
ccaggagaatttggctaggtcagcatgcgtgtactattcccaagtcttgtgtaaatcaatacttttggttgactcaaact

SEQ ID NO: 103828 - DNA, 80 bp, synthetic construct
  source 1..80: mol_type = other DNA
gtgatcgtctcgacaagctcatttcaactgctagagatggtattaagagaggcgagaacttgcagcctgttcttaagact

SEQ ID NO: 103829 - DNA, 80 bp, synthetic construct
  source 1..80: mol_type = other DNA
ttcattgacgcggcccgaggcccggcaggtgtagagtctgatgttgaaactggtgacattgtggatgcagtccaatatgc

SEQ ID NO: 103830 - DNA, 80 bp, synthetic construct
  source 1..80: mol_type = other DNA
ctgtcgatcttggtagcttgattgattctaatgctgcgtcagtcaacccagctaacatgcgcaatgctaatggtgcatgt

SEQ ID NO: 103831 - DNA, 80 bp, synthetic construct
  source 1..80: mol_type = other DNA
ggcatgttgagcgtaagaacgttccgtatgctaagcagactatcttcactattaacagtgtggttcaatgtgacggactc

SEQ ID NO: 103832 - DNA, 80 bp, synthetic construct
  source 1..80: mol_type = other DNA
atctggaatgctgcagcgtatttaaaactttctgatgctcttaagcggcagatacgcatagcttgcaggaagtgtaatct

SEQ ID NO: 103833 - DNA, 80 bp, synthetic construct
  source 1..80: mol_type = other DNA
taactttagactaaccacgtctaaacttcgctcatgtgacaatattttgtcagttcgttttagtgcaactaaagttgttg

SEQ ID NO: 103834 - DNA, 80 bp, synthetic construct
  source 1..80: mol_type = other DNA
gtggtgcaccttcttggctagtgagtctttatagctttacgttaaagagctatattgccattacactcctagtgtttctc

SEQ ID NO: 103835 - DNA, 80 bp, synthetic construct
  source 1..80: mol_type = other DNA
tttactgtgttgatgtactttactttacctacattcaacatgcagtctgtttctttttacgaggaccgcaccctggacta

SEQ ID NO: 103836 - DNA, 80 bp, synthetic construct
  source 1..80: mol_type = other DNA
caaagtcttggacaatggtgtcattagggatataaactctaatgataagtgctttgctaataagtaccagtccttcgttc

SEQ ID NO: 103837 - DNA, 80 bp, synthetic construct
  source 1..80: mol_type = other DNA
agtggtttcacgagcatgttggtggcaattttgacaatgacatcaactgtcccgtgactgtagctgtaatagctggcgta

SEQ ID NO: 103838 - DNA, 80 bp, synthetic construct
  source 1..80: mol_type = other DNA
gcaggtgctagagttccaggcgtaccaactactttggcatgggtgaagagtcaaatcgttttctttgtctctcgcgtctt

SEQ ID NO: 103839 - DNA, 80 bp, synthetic construct
  source 1..80: mol_type = other DNA
tgctaactctcctaatgtctgctacacgccgcgtagtgagataccttataagagcttctcagacagtgggtgcattctgc

SEQ ID NO: 103840 - DNA, 80 bp, synthetic construct
  source 1..80: mol_type = other DNA
cttcagaatgtactatgttcagggatgcggagggcaaaatggtgccttactgctatgatcctactgtcttacctggtgct

SEQ ID NO: 103841 - DNA, 80 bp, synthetic construct
  source 1..80: mol_type = other DNA
catgcttatggttcgatgaagccccatgttcgttatgacatgtttgaaggtaacatgtttattaaattccctgaggtcat

SEQ ID NO: 103842 - DNA, 80 bp, synthetic construct
  source 1..80: mol_type = other DNA
gatcaagtcccaccacactcattcactcttggaggtaagatcgacgtgttagtcccacgaaacaagtggactggcaagac

SEQ ID NO: 103843 - DNA, 80 bp, synthetic construct
  source 1..80: mol_type = other DNA
ctttgaaagtacccttagggttaccaagactcttagcactcagtattgtcgcttcggcagttgtgagtatgctcaagaag

SEQ ID NO: 103844 - DNA, 80 bp, synthetic construct
  source 1..80: mol_type = other DNA
gtgtttgtatcactactaatggctcatgggctatatttaatgacttccatgctaataggcctggagtttattgtggtcat

SEQ ID NO: 103845 - DNA, 80 bp, synthetic construct
  source 1..80: mol_type = other DNA
gattatgtagacattgttaggcgtcttgctttaggcttcttccaacctgttacctatttccaattgactacgtctttggt

SEQ ID NO: 103846 - DNA, 80 bp, synthetic construct
  source 1..80: mol_type = other DNA
tatgggtatcggtttgtgtgccttcatgacgcttgtcttttattatatcaacaaagttaagagagctctcgccgattaca

SEQ ID NO: 103847 - DNA, 80 bp, synthetic construct
  source 1..80: mol_type = other DNA
cgcagtgcgctgtaattgctgtctgtgctactgttatgaatagcttgtgtttgtgctttgtaattgcatgcccgttgtgc

SEQ ID NO: 103848 - DNA, 80 bp, synthetic construct
  source 1..80: mol_type = other DNA
atctctcttggtttgtaatgtttggagcagttgtccctatctggatgagctgtgtttacatcgtggctatgtgttttaga

SEQ ID NO: 103849 - DNA, 80 bp, synthetic construct
  source 1..80: mol_type = other DNA
cacttcttttgggttttagcctacttcagtaagaaacacgttgatgtctttactgatggcaaactaaattgtactttcca

SEQ ID NO: 103850 - DNA, 80 bp, synthetic construct
  source 1..80: mol_type = other DNA
aagaagccgcagctaacatttttgttgttaacaaggatacttatgtggctcttagaaactctattagtgcagatgtttat

SEQ ID NO: 103851 - DNA, 80 bp, synthetic construct
  source 1..80: mol_type = other DNA
gccaggtatcttgccatgttcaacaagtacaagtacttttctggcgccatggataccgccgcatacagagaggctgctgc

SEQ ID NO: 103852 - DNA, 80 bp, synthetic construct
  source 1..80: mol_type = other DNA
tgctcttaatctcaagcacagaatcctctataccttttatggtaaggatgcttttgatgaccattcatacatctaccatt

SEQ ID NO: 103853 - DNA, 80 bp, synthetic construct
  source 1..80: mol_type = other DNA
ttctcatctggctaaagctcttcagacttatagtgaaactggtagtgatcttctttaccaaccacccaactgtagcataa

SEQ ID NO: 103854 - DNA, 80 bp, synthetic construct
  source 1..80: mol_type = other DNA
atggaagcaatatcactgatcattatactactagtagtgacaacaagcaatgcagacaaaatctgcatcggtcaccaatc

SEQ ID NO: 103855 - DNA, 80 bp, synthetic construct
  source 1..80: mol_type = other DNA
atgaggggacaagcaaatcatgctcaaattcgttctacagaaacatgaggtggctgactcaaaagaatgggaattatcct

SEQ ID NO: 103856 - DNA, 80 bp, synthetic construct
  source 1..80: mol_type = other DNA
atctaattgctcagtggttatggggagcactctcaggaaaaagccgggatagaattctgaggactgacttatcaagtggt

SEQ ID NO: 103857 - DNA, 80 bp, synthetic construct
  source 1..80: mol_type = other DNA
tattttttttttttccaaaaggccagagtgaaaatgaatcctaatcaaaagataattgcacttggctctgcttctctaac

SEQ ID NO: 103858 - DNA, 80 bp, synthetic construct
  source 1..80: mol_type = other DNA
aagtaattggtggttggacaatggctaattccaagtcacaaataaataggcaagtcatagttgacagtggtaataggtct

SEQ ID NO: 103859 - DNA, 80 bp, synthetic construct
  source 1..80: mol_type = other DNA
aggctcatggcctgatggggcagatatcagttttatgccgatataagctttcgaaaattttagaaaaaggggagagaaaa

SEQ ID NO: 103860 - DNA, 80 bp, synthetic construct
  source 1..80: mol_type = other DNA
acccggtcattatagagaggaacataacagaggtagtgcatttgaatggtactataataaagaaggaaaattgtcccaga

SEQ ID NO: 103861 - DNA, 80 bp, synthetic construct
  source 1..80: mol_type = other DNA
ccgaattcaaagatttggtggtttttgtttcaatgggacttgtacagtagtaatgactgatggaagtgcatcaggaaggg

SEQ ID NO: 103862 - DNA, 80 bp, synthetic construct
  source 1..80: mol_type = other DNA
acctgggcaggagtgagccagaatggaggaagcagtgcctgcaaaagaggacctgccaacggtttcttcagcagattgaa

SEQ ID NO: 103863 - DNA, 80 bp, synthetic construct
  source 1..80: mol_type = other DNA
gaatcttccagggaaagacagcagtacagcaacactctgtctgggacatcattcagtgccgaatggaacaatagttaaaa

SEQ ID NO: 103864 - DNA, 80 bp, synthetic construct
  source 1..80: mol_type = other DNA
aggtcagatgcacctatagaaacttgcatttcagaatgcattaccccaaatggaagcattcccaatgacaagccttttca

SEQ ID NO: 103865 - DNA, 80 bp, synthetic construct
  source 1..80: mol_type = other DNA
acataagaggttcaggaatgagagtggtggtgagaggcaattctccagtgttcaattacaataaggcaacaaagaggctt

SEQ ID NO: 103866 - DNA, 80 bp, synthetic construct
  source 1..80: mol_type = other DNA
cgtgataaaacaagctgtacagattggtgtataacaggatatggaattagtccatcagtagcagaaagtttaaaagtatt

SEQ ID NO: 103867 - DNA, 80 bp, synthetic construct
  source 1..80: mol_type = other DNA
gttgtatgttactgtgtttgttttatatgtacttgtttgtgtgcatgttctatgtacttgtcagtttcctgtttgtgtat

SEQ ID NO: 103868 - DNA, 80 bp, synthetic construct
  source 1..80: mol_type = other DNA
ctgtatgctaatttgtggaccagcaaatacaggaaagtcatattttggaatgagtttaatacagtttttaaaagggtgtg

SEQ ID NO: 103869 - DNA, 80 bp, synthetic construct
  source 1..80: mol_type = other DNA
agcaaaagcaggagtgataatgaatccaaatcagagaataatagcacttggctctgcttccctaactgttgcgacaatat

SEQ ID NO: 103870 - DNA, 80 bp, synthetic construct
  source 1..80: mol_type = other DNA
gtcaatcacaatagaaagaaacataacggagatagtgcatttgaatggcactatcatagagaaggaaaactgtcccagag

SEQ ID NO: 103871 - DNA, 80 bp, synthetic construct
  source 1..80: mol_type = other DNA
aatgctcttgttatcctcggtacccagaaattaggtgtgtttgcagagacaattggaagggttccaatcgacctgtgcta

SEQ ID NO: 103872 - DNA, 80 bp, synthetic construct
  source 1..80: mol_type = other DNA
agcaaaagcaggggaaattctcaactagcaaaatggaagtaataccattgatgactatgctcctattagcaacaacaaac

SEQ ID NO: 103873 - DNA, 80 bp, synthetic construct
  source 1..80: mol_type = other DNA
gcacagacgaatctgtacacaagaaccgatacaacaacaagcataacaacagaaagtttggataggacattcaaaccatt

SEQ ID NO: 103874 - DNA, 80 bp, synthetic construct
  source 1..80: mol_type = other DNA
aatgcagacaaaatatgcattggccatcaatcaacaaattccactgaaactgtggacacactaacggaaactggtgttcc

SEQ ID NO: 103875 - DNA, 80 bp, synthetic construct
  source 1..80: mol_type = other DNA
caatggatggaacagggagaaataaaaaactgctcttttaatatcacttcaaccataaaagataagatgcaggaagcacg

SEQ ID NO: 103876 - DNA, 80 bp, synthetic construct
  source 1..80: mol_type = other DNA
tgggaattctgggacacagggggtgggagatcctcaaatattggtggaatctcctgcaatattggagtcaggaaccaaag

SEQ ID NO: 103877 - DNA, 80 bp, synthetic construct
  source 1..80: mol_type = other DNA
cctatgagccagcatgggatggaggacccggagggagaagtattagtgtggaagcttgaatgctaggcggctgtcaaaca

SEQ ID NO: 103878 - DNA, 80 bp, synthetic construct
  source 1..80: mol_type = other DNA
gggacacaagacaagcacattgtaacattagtaaagacggatggtataaaactttagaaaaggtagctagcaaaataaga

SEQ ID NO: 103879 - DNA, 80 bp, synthetic construct
  source 1..80: mol_type = other DNA
gaagaaatgaaaaactgcactttcgatatcaccacaagtttaagagataagatgcaaagggtatattcacttttttataa

SEQ ID NO: 103880 - DNA, 80 bp, synthetic construct
  source 1..80: mol_type = other DNA
gctgcatgtttgtataactggggatgatggaaatgcaactgctagcttcatttataatgggatgcttgtagacagcattg

SEQ ID NO: 103881 - DNA, 80 bp, synthetic construct
  source 1..80: mol_type = other DNA
aagttctctcgacgcaggactcggcttgctgcggtgcacacagcaagaggcgagagaggcgactgtagcagaggctagaa

SEQ ID NO: 103882 - DNA, 80 bp, synthetic construct
  source 1..80: mol_type = other DNA
ttctctcaggagaaagccacggaagaatcctgaaaactgatctgaacaacggcaattgcgtagtacaatgccaaactgag

SEQ ID NO: 103883 - DNA, 80 bp, synthetic construct
  source 1..80: mol_type = other DNA
tgagggtccttctttctacaggaatcttctgtggatggtaaaacacacgacatcaaactatccagtagttaagggaactt

SEQ ID NO: 103884 - DNA, 80 bp, synthetic construct
  source 1..80: mol_type = other DNA
acacaaacacttgggataagtcagttctctatttttggggtgtacaccatccgcctgacacaactgaacaaaatgttctg

SEQ ID NO: 103885 - DNA, 80 bp, synthetic construct
  source 1..80: mol_type = other DNA
gtggaacatggcgaacatcatattcgtattccgcgtaccccggcgcgtgtgaccggcggcgtgtttctggtggataaaaa

SEQ ID NO: 103886 - DNA, 80 bp, synthetic construct
  source 1..80: mol_type = other DNA
aatttgcggtgccgaacctgcagagcctgaccaacctgctgagcagcaacctgagctggctgagcctggatgtgagcgcg

SEQ ID NO: 103887 - DNA, 80 bp, synthetic construct
  source 1..80: mol_type = other DNA
gcgttttatcatattccgctgcatccggcggcgatgccgcatctgctgattggcagcagcggcctgagccgttatgtggc

SEQ ID NO: 103888 - DNA, 80 bp, synthetic construct
  source 1..80: mol_type = other DNA
tgtatgtgagcctgatgctgctgtataaaacctatggctggaaactgcatctgtatagccatccgattattctgggcttt

SEQ ID NO: 103889 - DNA, 80 bp, synthetic construct
  source 1..80: mol_type = other DNA
gcagcgtggtgcgtcgtgcgtttccgcattgcctggcgtttagctatatggatgatgtggtgctgggcgcgaaaagcgtg

SEQ ID NO: 103890 - DNA, 80 bp, synthetic construct
  source 1..80: mol_type = other DNA
atgtcgagtccgaggcaggtcccctagaagaagaactccctcgcctcgcagacgaagatctcaatcaccgcgtcacagac

SEQ ID NO: 103891 - DNA, 80 bp, synthetic construct
  source 1..80: mol_type = other DNA
cctgtgcagggaagctaatagtggagcgaattctggagggagagtcagacgaagcacttaaaatgactattgcttctgca

SEQ ID NO: 103892 - DNA, 80 bp, synthetic construct
  source 1..80: mol_type = other DNA
agcaaaagcaggcaaaccatttgaatggatgtcaatccgactctattgttcttaagcacaacattcccttatactggaga

SEQ ID NO: 103893 - DNA, 80 bp, synthetic construct
  source 1..80: mol_type = other DNA
tactgtgcaccaatatatgagtgtgcctgggtcagctccacaggcattgtaaagaaaggtttagagtggtttgagaagaa

SEQ ID NO: 103894 - DNA, 80 bp, synthetic construct
  source 1..80: mol_type = other DNA
gaacatcatccttaacagaggtagcgatgagaatccacgaggcccagtaagtcatgagcacattgagtggtgcagggagt

SEQ ID NO: 103895 - DNA, 80 bp, synthetic construct
  source 1..80: mol_type = other DNA
catctcatatatgaccttgcttctaacgcttctagggagcctttccccagtactccttcccgttaatctcttgcagacgt

SEQ ID NO: 103896 - DNA, 80 bp, synthetic construct
  source 1..80: mol_type = other DNA
cagtatggggctgtagcatcaggagaaaagcagacgaaagcagcgaattcaatagctaatttagcactgatcaaaacggt

SEQ ID NO: 103897 - DNA, 80 bp, synthetic construct
  source 1..80: mol_type = other DNA
acatttaaagtatttgactcggaggactttattatagaatatgggacaactgacgacgaagtatacatacaaagagcgtt

SEQ ID NO: 103898 - DNA, 80 bp, synthetic construct
  source 1..80: mol_type = other DNA
tatggagctgttgcttcgggagaaaaacaaacaaaggcagctaattctatagctaacttagcactcattaaaacggtact

SEQ ID NO: 103899 - DNA, 80 bp, synthetic construct
  source 1..80: mol_type = other DNA
acatttaaagtgtttgattcagaggatatcgttatagagtatggaacaactgatgatgaggtatacatacagagagcatt

SEQ ID NO: 103900 - DNA, 80 bp, synthetic construct
  source 1..80: mol_type = other DNA
tacatttaaggtgtttgattcagaggattttatcatagagtatggaacaactgatgatgaagtatgtatacagagagcat

SEQ ID NO: 103901 - DNA, 80 bp, synthetic construct
  source 1..80: mol_type = other DNA
gaagtaagacgactagatatttttaatttgatattgatgaacatggatcagatagaacgtgcctcagataaaattgcaca

SEQ ID NO: 103902 - DNA, 80 bp, synthetic construct
  source 1..80: mol_type = other DNA
tctactctgatctgcttgcattcgtatcagctgatacggtagaacctataaatgcagttgcgtttgacaatatgcgcatc

SEQ ID NO: 103903 - DNA, 80 bp, synthetic construct
  source 1..80: mol_type = other DNA
gttgaaagacgaagacttgatatatttaacttaatattgatgaatatggagcagatcgaacgagcttcagataaaattgc

SEQ ID NO: 103904 - DNA, 80 bp, synthetic construct
  source 1..80: mol_type = other DNA
gatatgactgagtgagctaaaaacttaacacactagtcatgatgtgacctaacacactagtcatgatgtgacctgtgacc

SEQ ID NO: 103905 - DNA, 80 bp, synthetic construct
  source 1..80: mol_type = other DNA
aaagctagtattgaaggtggtaaatattatgaacatgctccaattgaattgatttatgcatgcagatcagcaagagaatt

SEQ ID NO: 103906 - DNA, 80 bp, synthetic construct
  source 1..80: mol_type = other DNA
aagcgctataacacaaatgataattcaagaggaatgaattatgaaactccaatgtttaataaagtggcggtgttaatttg

SEQ ID NO: 103907 - DNA, 80 bp, synthetic construct
  source 1..80: mol_type = other DNA
cttggatctggtgtaaactgatatccaataggagagttatcaaaaaatacccaaaggatgtcgtccatcctaaccgatgt

SEQ ID NO: 103908 - DNA, 80 bp, synthetic construct
  source 1..80: mol_type = other DNA
taagaaacaggcacagtttggagagtttataaaagaaaaataccctgaactgctaaaatataaaaatccaccatatccat

SEQ ID NO: 103909 - DNA, 80 bp, synthetic construct
  source 1..80: mol_type = other DNA
acaggaacaaagagttgttcagattgagtgatcctctgatatcatccaaattaagtacactgctgaagcatgctaataga

SEQ ID NO: 103910 - DNA, 80 bp, synthetic construct
  source 1..80: mol_type = other DNA
tgttatgattatattgctccaaatctcctaaaacttcttgaaatgacatctcagagactgggaagagatccaaccaaaga

SEQ ID NO: 103911 - DNA, 80 bp, synthetic construct
  source 1..80: mol_type = other DNA
gtggccaaattatcagcatgtgcaacaaaacatccttcaccttagcagggttatggaaggttctgattggtattaccctt

SEQ ID NO: 103912 - DNA, 80 bp, synthetic construct
  source 1..80: mol_type = other DNA
tcttattctggttcacactcaaaacagagatgaggggagcaataaaagactcaaaaaagaagtcaaattaccaacttgca

SEQ ID NO: 103913 - DNA, 80 bp, synthetic construct
  source 1..80: mol_type = other DNA
cagattactgaaatccgatcaaacaaactgataattgttttaaacccaaatcttttagctatttattcaatccaaacaca

SEQ ID NO: 103914 - DNA, 80 bp, synthetic construct
  source 1..80: mol_type = other DNA
ggaggtttactatctaacatttgaaatggttctgatgttttgtgatgtcatagagggaagactaatgatttcagtaggga

SEQ ID NO: 103915 - DNA, 80 bp, synthetic construct
  source 1..80: mol_type = other DNA
tattcgctgacccgaagtacgatatctatcaggaaagaggaccacttttatggggactgatcgatgatttgtttcaaaca

SEQ ID NO: 103916 - DNA, 80 bp, synthetic construct
  source 1..80: mol_type = other DNA
atgggtaataagacttatacagttgttgcaatgcttgaaccactaacactaggagttctccaactaaaagactcatcacc

SEQ ID NO: 103917 - DNA, 80 bp, synthetic construct
  source 1..80: mol_type = other DNA
taaactcagaggttcttttctgcatcattgtacaacagagttgttagaagtactcgttgagaaaactggatttgatcaaa

SEQ ID NO: 103918 - DNA, 80 bp, synthetic construct
  source 1..80: mol_type = other DNA
atgatgctgaggggttcattgataatcttattcaaatagttgacattcctgatattcatttaatagctgagttcttttca

SEQ ID NO: 103919 - DNA, 80 bp, synthetic construct
  source 1..80: mol_type = other DNA
ttttttaggacatttggacaccctactctggaagcagaaaatgccgcaacaaaggttaggacacacatgcacaaagataa

SEQ ID NO: 103920 - DNA, 80 bp, synthetic construct
  source 1..80: mol_type = other DNA
ggtcttagaatatcaaattatgatgaagggccatgcaatattttgtggtatcattatcaatggattccgagatagacatg

SEQ ID NO: 103921 - DNA, 80 bp, synthetic construct
  source 1..80: mol_type = other DNA
gaggtgtttggccctcttgtttccttcctgatcatgcatctccattaatcaaatccaaaaagatgaacggggaggcattg

SEQ ID NO: 103922 - DNA, 80 bp, synthetic construct
  source 1..80: mol_type = other DNA
acctacctggaccccgtgtatttcagacttggtcagaaagttgctcggcatcattcaggcacattagacatgaagatggc

SEQ ID NO: 103923 - DNA, 80 bp, synthetic construct
  source 1..80: mol_type = other DNA
acaatagaggattgcgcagagaattggaagtcgttttgtggatttaactttgattgcttcatgcccttgacactagatga

SEQ ID NO: 103924 - DNA, 80 bp, synthetic construct
  source 1..80: mol_type = other DNA
tgacctgagtatgtacatgaaagataaagctttatcgccaatccgatcacaatgggattcagtataccctacatccaata

SEQ ID NO: 103925 - DNA, 80 bp, synthetic construct
  source 1..80: mol_type = other DNA
tgacctacaatcctcctatttcgacatcatctagaagattagtcgatgtattcatcaatgatgctgacttcgaaccttcg

SEQ ID NO: 103926 - DNA, 80 bp, synthetic construct
  source 1..80: mol_type = other DNA
aaattaattgattatgtcatcagcggagaatacttagatgacaaagaattcaacatctcctatagtctcaaagaaaaaga

SEQ ID NO: 103927 - DNA, 80 bp, synthetic construct
  source 1..80: mol_type = other DNA
atggtatggtgaaagatgaacaggaactattgaagacattacaccagctgtcagtatctgcagtccctagaagaggcaat

SEQ ID NO: 103928 - DNA, 80 bp, synthetic construct
  source 1..80: mol_type = other DNA
cccaaaagatcattttggaaaaatgcttctttgactcatggtaacgggaggtcgaatctatgcaatgtgggagagcaatc

SEQ ID NO: 103929 - DNA, 80 bp, synthetic construct
  source 1..80: mol_type = other DNA
aatccaaaatcattccaaagtaccgagaaagcattcatcatccattgttagtcatacagagtcaaatggtccttgcagag

SEQ ID NO: 103930 - DNA, 80 bp, synthetic construct
  source 1..80: mol_type = other DNA
aagttgataacacatatgaatgtgaattcaaagctctccacgaaagattaaatccgttccggtcgaacaacaatgagaca

SEQ ID NO: 103931 - DNA, 80 bp, synthetic construct
  source 1..80: mol_type = other DNA
agaagcactagggataacagaagatcagaagaaagagttatctcttatgatgggcgatgttgggaaagggacaaatgaga

SEQ ID NO: 103932 - DNA, 80 bp, synthetic construct
  source 1..80: mol_type = other DNA
ggagcagaggtaggaccaagaaaagatttctgtgatccagataataggccacaaagtcatccaactatttgggatcaatc

SEQ ID NO: 103933 - DNA, 80 bp, synthetic construct
  source 1..80: mol_type = other DNA
aaaatcacaaagtgatcaatacgacacagttagttgctttgttaccacagatttagagaaattctgtttgaattggagag

SEQ ID NO: 103934 - DNA, 80 bp, synthetic construct
  source 1..80: mol_type = other DNA
ctgaatctacacggatctttacacagagattaaatgaaatatacgggttgccacaatttttcgactggatgcatcaaatt

SEQ ID NO: 103935 - DNA, 80 bp, synthetic construct
  source 1..80: mol_type = other DNA
cttgaaagatcaactctttatgtctccgatccgtattgtccacctaaattcaaccaccatatagaactggatgagactcc

SEQ ID NO: 103936 - DNA, 80 bp, synthetic construct
  source 1..80: mol_type = other DNA
tgatgatcatatttatattaaatatccaatgggagggattgaagggtattgtcaaaaagtttggaccatcatcactattc

SEQ ID NO: 103937 - DNA, 80 bp, synthetic construct
  source 1..80: mol_type = other DNA
cattcttgttattgagcgcatatgaaacaaatacacgaattgcagcagtagtgcagggagataatgaggctatagcagta

SEQ ID NO: 103938 - DNA, 80 bp, synthetic construct
  source 1..80: mol_type = other DNA
accaaaagagtcatgcctaatttgtcataccgagctaagaaaaatataagtgcaagggctgctgaagaatattttttgaa

SEQ ID NO: 103939 - DNA, 80 bp, synthetic construct
  source 1..80: mol_type = other DNA
attaagatcaaatctgagagcaattggacataatcttaaatggtctgagacaattgttagtaaccattttctgatatact

SEQ ID NO: 103940 - DNA, 80 bp, synthetic construct
  source 1..80: mol_type = other DNA
caaaacgcatttattatgatggatctgttttatcacaatcactaaagagtctgtcaagagtagtattctggtctgaaact

SEQ ID NO: 103941 - DNA, 80 bp, synthetic construct
  source 1..80: mol_type = other DNA
ctagtcgatgagacgaaatcagcatgtagtaatatatctacaactgttgcaaaatcaattgaaaatggatttgataggtc

SEQ ID NO: 103942 - DNA, 80 bp, synthetic construct
  source 1..80: mol_type = other DNA
gtggcaatactgcaagagaagggaaatttactctttctgcaggtgttgttaacctccagaacaattccgacaccaaacct

SEQ ID NO: 103943 - DNA, 80 bp, synthetic construct
  source 1..80: mol_type = other DNA
agtagggtattgcatcaacgtgttaaaaactatacaacaaatacatgtttcattaggcttttctataaactctacactaa

SEQ ID NO: 103944 - DNA, 80 bp, synthetic construct
  source 1..80: mol_type = other DNA
ccccggatcttacaaatgagcctcttcacaatcgttcatggttaataacttgtgcattgttgcctgcagctataggtggt

SEQ ID NO: 103945 - DNA, 80 bp, synthetic construct
  source 1..80: mol_type = other DNA
tacaattatctaaatttatctcggatctacctgagaaatgtaggagatccagttgtagcagcatttgcggaccttaaaag

SEQ ID NO: 103946 - DNA, 80 bp, synthetic construct
  source 1..80: mol_type = other DNA
gatgatagacgccaacattttagatagatcaatcatacaaaaagtcatgaatcaagaaccaggagaagcaagttttctgg

SEQ ID NO: 103947 - DNA, 80 bp, synthetic construct
  source 1..80: mol_type = other DNA
attgggcaagtgacccttactcggtaaatttgccccaatctcaaagcattactaaattaataaagaatgttactgcaaga

SEQ ID NO: 103948 - DNA, 80 bp, synthetic construct
  source 1..80: mol_type = other DNA
actgtattatcacattctgttaaccctgtacttcatgatctttttcatgatcgagcttctgaagaggaccacgagttagc

SEQ ID NO: 103949 - DNA, 80 bp, synthetic construct
  source 1..80: mol_type = other DNA
ggtatttttaatggatagaaaaatgttgttgccaaggacagcccatgagatcctatcaaactcaataacaggggccagag

SEQ ID NO: 103950 - DNA, 80 bp, synthetic construct
  source 1..80: mol_type = other DNA
aggaaatagctggaatgcttgatacaacaaaaggattaatcaggacaggattgagaaaaggtggcattcaaccgaggttg

SEQ ID NO: 103951 - DNA, 80 bp, synthetic construct
  source 1..80: mol_type = other DNA
gtgaacagattatctcaccatgattatgaacaattcagagtcttcaatcaattgattagagagagaaggacaaactcatt

SEQ ID NO: 103952 - DNA, 80 bp, synthetic construct
  source 1..80: mol_type = other DNA
aatttcccacaaggcatgttcagttgatctggctaaagcaatgagagcacacatgtggagggatcttgcatacggaagag

SEQ ID NO: 103953 - DNA, 80 bp, synthetic construct
  source 1..80: mol_type = other DNA
aatctagatgatctgacatctcagatgactcatgatgacagtcttgatctcaaatcagagcttatacagcgattaatatc

SEQ ID NO: 103954 - DNA, 80 bp, synthetic construct
  source 1..80: mol_type = other DNA
taatctatggattggaagttcctgatcctttagagtgtgtcaaaggaactatcataaaaggaagtgaaaactgctcggta

SEQ ID NO: 103955 - DNA, 80 bp, synthetic construct
  source 1..80: mol_type = other DNA
tgtgagtttgaagagaccccttactgttggttctttattccctcagagattcccatagatcggatcaatgttgctacacc

SEQ ID NO: 103956 - DNA, 80 bp, synthetic construct
  source 1..80: mol_type = other DNA
ttcaataagagtaccgtatgttggttctacgacagaagaaaggagtgaaattaaattagggacattaagatctagttcaa

SEQ ID NO: 103957 - DNA, 80 bp, synthetic construct
  source 1..80: mol_type = other DNA
aggcattaaaagcagcaataagaattgctatggtgtatacatgggcttatggggatgacgaagactcctggctagaggca

SEQ ID NO: 103958 - DNA, 80 bp, synthetic construct
  source 1..80: mol_type = other DNA
tggtacttggctaatcaaagagccaacatcccgttagatatattgaaggcagtcacccctatgtcaacatccaacaatct

SEQ ID NO: 103959 - DNA, 80 bp, synthetic construct
  source 1..80: mol_type = other DNA
agcacatagattgagagacagagtaacacaggttaaattctcaggtgcatctctaaatcgtgtttctaaatttgtgacaa

SEQ ID NO: 103960 - DNA, 80 bp, synthetic construct
  source 1..80: mol_type = other DNA
ttagtaatgacaatcttgtgtttaaaattgaaggagaaactattgacacgaatttcatcttccaacaagttatgctatta

SEQ ID NO: 103961 - DNA, 80 bp, synthetic construct
  source 1..80: mol_type = other DNA
ggtctctcgacccttgaagatctattcagattcaatgacagtactggggattcaaatacggtgatgcatttgcatgtaat

SEQ ID NO: 103962 - DNA, 80 bp, synthetic construct
  source 1..80: mol_type = other DNA
tgataactgttgcataagtcaaataccaatcctaccacccctgccctcagaactagaaccgcctgagtaccaagaaatcc

SEQ ID NO: 103963 - DNA, 80 bp, synthetic construct
  source 1..80: mol_type = other DNA
agagcaattctttaatctatgataataacccgatcatcgaaactgatcttaataaactaagtgttcagacatggagatcg

SEQ ID NO: 103964 - DNA, 80 bp, synthetic construct
  source 1..80: mol_type = other DNA
aggtgataagcctgcatctcccgccaagagcatgcaacctaagagtgctattaaagcaataagagaaaggctcaatttgt

SEQ ID NO: 103965 - DNA, 80 bp, synthetic construct
  source 1..80: mol_type = other DNA
agtgaagtccatttcccgacatggtctacccttgagcttcatgagggactagcacaatcactagcagtaacaataattga

SEQ ID NO: 103966 - DNA, 80 bp, synthetic construct
  source 1..80: mol_type = other DNA
gattattagcaaatcagataaagatgaactaaaagaatatgtcactcttcagtcagaagatactgtgaacagcttaatta

SEQ ID NO: 103967 - DNA, 80 bp, synthetic construct
  source 1..80: mol_type = other DNA
ctgagttccttctagtcgacatagaactttttgttctaaatttaggtcttgtatcagcaattaaatggtcatttgatatc

SEQ ID NO: 103968 - DNA, 80 bp, synthetic construct
  source 1..80: mol_type = other DNA
cattacagacgaccacaagggagatatgctatggttgattacttttttgattgtctaaaccaaacctcaaaaaccacctt

SEQ ID NO: 103969 - DNA, 80 bp, synthetic construct
  source 1..80: mol_type = other DNA
tgttgtattagcaaatgccatatcacacccaagagttttcaaaagatttgtagacaggggtatattactgcctcaatatg

SEQ ID NO: 103970 - DNA, 80 bp, synthetic construct
  source 1..80: mol_type = other DNA
gaccttatttacatcagcaagatttcatgtcagcagcaaaagatttgttagctagatcttacatgtcttatttgatcaat

SEQ ID NO: 103971 - DNA, 80 bp, synthetic construct
  source 1..80: mol_type = other DNA
tgggtaactaataagaccttaatatatcctctgatggagcaatctgaagaagtagttgatcagagaatagacatcataca

SEQ ID NO: 103972 - DNA, 80 bp, synthetic construct
  source 1..80: mol_type = other DNA
ggctagacatctctgcatgatctgtgatctttactgtaatgacgcacaaccaccgtggatagttgaaatgaccgcaattg

SEQ ID NO: 103973 - DNA, 80 bp, synthetic construct
  source 1..80: mol_type = other DNA
aaaaatgtgctgtactaactgcgttcatcgagtcactcaggaaatcttcccaaggagctgagaattggaatgtatcccct

SEQ ID NO: 103974 - DNA, 80 bp, synthetic construct
  source 1..80: mol_type = other DNA
ctctctgttattgtttacccatcatcatcaacatatattaggaggggagtgattaaacaattaagaattagagaagttaa

SEQ ID NO: 103975 - DNA, 80 bp, synthetic construct
  source 1..80: mol_type = other DNA
caaccccaaaacgcgatgatgatgttgctgggaatcaagctactaatacgggttcaaatgaggcagatttgcttgcatca

SEQ ID NO: 103976 - DNA, 80 bp, synthetic construct
  source 1..80: mol_type = other DNA
tgaaatagccgaggacccttcacaactgctcagaacggtaccccttaacaaaccttcttctttattattcaatcaaaccg

SEQ ID NO: 103977 - DNA, 80 bp, synthetic construct
  source 1..80: mol_type = other DNA
aaagagatattgtctccatctcttattctgatattttagaagaggaaattatagatctaaatatgagcgcaacattggac

SEQ ID NO: 103978 - DNA, 80 bp, synthetic construct
  source 1..80: mol_type = other DNA
cctgaatcccgttcactagagtcccataaatataggcgagtcgggttaaattcaacttctgcatataaggcattggattt

SEQ ID NO: 103979 - DNA, 80 bp, synthetic construct
  source 1..80: mol_type = other DNA
agcggcttatattgtgcgctattacaaacaatcttcagatcgcctatttataggagaaggttccggatcaatgctattaa

SEQ ID NO: 103980 - DNA, 80 bp, synthetic construct
  source 1..80: mol_type = other DNA
cttacttgtttctgttaggtaaggcaaagtgttactataattcgggagtcacatcagacgtagtcataggtcaacgagaa

SEQ ID NO: 103981 - DNA, 80 bp, synthetic construct
  source 1..80: mol_type = other DNA
ttaaagatatatcctgcagaggtctgcattgctgaccaaaaattaagcactcatcctagtttgttatcgtatgttgtacc

SEQ ID NO: 103982 - DNA, 80 bp, synthetic construct
  source 1..80: mol_type = other DNA
tctctttaacggtagaccagaaacaacatggattggagaaatggatgcatatatgtatattattaatacaataaaagaga

SEQ ID NO: 103983 - DNA, 80 bp, synthetic construct
  source 1..80: mol_type = other DNA
agaaattagggttagttcactctgacatggagtcgggaatcgataaagatttcatccagattttaaaagaacattcacat

SEQ ID NO: 103984 - DNA, 80 bp, synthetic construct
  source 1..80: mol_type = other DNA
ctgatctctatagctattaacctcatgcttgatgaaggtctgttaataagcaaaatatgccctacttgtgactttcccat

SEQ ID NO: 103985 - DNA, 80 bp, synthetic construct
  source 1..80: mol_type = other DNA
cacagctctattaaatttgtataagtcttgctttcacaatctagaactgttatttccgagatattctaatcctgaatctt

SEQ ID NO: 103986 - DNA, 80 bp, synthetic construct
  source 1..80: mol_type = other DNA
gtagaataaaccaatgatctaaaactggtaatactttcatatgctgctttcgaacaaaacatcgcaaaatgatgcggaac

SEQ ID NO: 103987 - DNA, 80 bp, synthetic construct
  source 1..80: mol_type = other DNA
ccgagtgttatatcgcatgctttaatcctaggatcacagggattacttccccagatcggatatttcagttaatcgggcct

SEQ ID NO: 103988 - DNA, 80 bp, synthetic construct
  source 1..80: mol_type = other DNA
tttgggtattcacaccaatcaatagtgatccggaattgagatggagacttttaaattttctcttaaagctaatatggtcg

SEQ ID NO: 103989 - DNA, 80 bp, synthetic construct
  source 1..80: mol_type = other DNA
agcagtcagcaaattgatgaacagttgtataatttcattacaaacacaaaattcaatattgatcaggaactcaaatgtga

SEQ ID NO: 103990 - DNA, 80 bp, synthetic construct
  source 1..80: mol_type = other DNA
ccaaatgaatgattattttgatgtgtatgatattaactcagggctggtatgtgagttgacagatgatgacaaaacattgt

SEQ ID NO: 103991 - DNA, 80 bp, synthetic construct
  source 1..80: mol_type = other DNA
tatctttcggtttgacattgaatgggcctgaaataattaaagagataagctctgttgatccatcgtctttagaagaatca

SEQ ID NO: 103992 - DNA, 80 bp, synthetic construct
  source 1..80: mol_type = other DNA
ttagttcaaaccatcagaatcaacatccaagacatactagatctgactgatgagcggcagaaaccgaggtctttttttga

SEQ ID NO: 103993 - DNA, 80 bp, synthetic construct
  source 1..80: mol_type = other DNA
gccgtatccagtgctggagagttcgagaagaagggagataattcacagagttgtgaagaagttaactgtgttaatgctga

SEQ ID NO: 103994 - DNA, 80 bp, synthetic construct
  source 1..80: mol_type = other DNA
tcaaaggatatcagaaaacagggagtattgacaaagtcattgtaatgaatttacgacaaggatttctcttgattgaaact

SEQ ID NO: 103995 - DNA, 80 bp, synthetic construct
  source 1..80: mol_type = other DNA
catttcttaactcgatccgggctattcagtaagagaatgcttaagaggatttcagaggctgaattagagcctatatggac

SEQ ID NO: 103996 - DNA, 80 bp, synthetic construct
  source 1..80: mol_type = other DNA
gtatcagcttagcaggagggaacaaaagaagtggtggaaattgattagttatctgccattaacctgtcaagtataatgta

SEQ ID NO: 103997 - DNA, 80 bp, synthetic construct
  source 1..80: mol_type = other DNA
gtaaaccaattccatttctagtgtctattgtatctgtttgttttataataattgctatttggatttaagaaaaacttatt

SEQ ID NO: 103998 - DNA, 80 bp, synthetic construct
  source 1..80: mol_type = other DNA
tctatctgtgatacaaccgctaatccctcaatgcattaaatcttgcactttcttatgactcaggactaagcttgaacagg

SEQ ID NO: 103999 - DNA, 80 bp, synthetic construct
  source 1..80: mol_type = other DNA
tacttttcattcagtttcaacaataaacctttcattaattagtaacgcagatttggcatgaataatcatgctatagtctt

SEQ ID NO: 104000 - DNA, 80 bp, synthetic construct
  source 1..80: mol_type = other DNA
tctttagctttcatgcttaagtcacatctgtttagaaaaaacttaggagccaagttatatctagctctttcatcagagag

SEQ ID NO: 104001 - DNA, 80 bp, synthetic construct
  source 1..80: mol_type = other DNA
agattgactggctcaaacttccaattcgcacatccttgagcatttaaacttgcatcatcttcttacataaagattatgtt

SEQ ID NO: 104002 - DNA, 80 bp, synthetic construct
  source 1..80: mol_type = other DNA
agtttcatattaatcccacaaatctcctaattacatacaacctaactattcaatatcattctccaattcatcccaaatat

SEQ ID NO: 104003 - DNA, 80 bp, synthetic construct
  source 1..80: mol_type = other DNA
acatctacagactagcgaaatttctatctacagttaatggacagagagaaatcaattaacaatgggctggaaattatcaa

SEQ ID NO: 104004 - DNA, 80 bp, synthetic construct
  source 1..80: mol_type = other DNA
atttattaagcagaacaggaaggcaatccaggaaacgtacggaaggagctccattgaaaagccttcaactaaggagagaa

SEQ ID NO: 104005 - DNA, 80 bp, synthetic construct
  source 1..80: mol_type = other DNA
ctagagaatgggaagatttcttcaactctcactatcaaggagatctgggacagaaggggttacttcaggaatctcaagat

SEQ ID NO: 104006 - DNA, 80 bp, synthetic construct
  source 1..80: mol_type = other DNA
attggccaagagagagctcctgaattcccaacctcttttgatgggggagatgctcatgacagatctggaactcaacgaac

SEQ ID NO: 104007 - DNA, 80 bp, synthetic construct
  source 1..80: mol_type = other DNA
tcttgattgggattcagcaggagacagattactcctggacacaatggttgcaaaccctcttatcaatgacggtagaaggg

SEQ ID NO: 104008 - DNA, 80 bp, synthetic construct
  source 1..80: mol_type = other DNA
ccggctgcatctgaaagtataaaaactggggcaatgatgtcaattcttgcgctttatactgaaaaaccaggagcatttgt

SEQ ID NO: 104009 - DNA, 80 bp, synthetic construct
  source 1..80: mol_type = other DNA
aaaataccgacatacgagatgctgacaaggaagtacaatcaaggagtaatatcagaaatagagatggagaccgcgttcca

SEQ ID NO: 104010 - DNA, 80 bp, synthetic construct
  source 1..80: mol_type = other DNA
agttcttcatctcatggagttacattcccctgctctagcagagctcttacaaatgatgagggtaggtcatcagcattgga

SEQ ID NO: 104011 - DNA, 80 bp, synthetic construct
  source 1..80: mol_type = other DNA
tgggaagaatgttatggaattaaatacaaaggacaaaatgcaaagaggggagaatgattcatcctctacagttggtacag

SEQ ID NO: 104012 - DNA, 80 bp, synthetic construct
  source 1..80: mol_type = other DNA
gaggagacctgttaagtggtgataaagatttgattgccaaactgtctaaaattagcgaaagggtgacttccagccgtgga

SEQ ID NO: 104013 - DNA, 80 bp, synthetic construct
  source 1..80: mol_type = other DNA
tcagacactgatacatgtgatgaagatgatggcctgattttaattggaggacttacgccaaaagaaatagacaatctaat

SEQ ID NO: 104014 - DNA, 80 bp, synthetic construct
  source 1..80: mol_type = other DNA
cgaagaaagcaataactcggagatagaaagcagaggtcaaccttatcacaataaagggtccttacaagggatgaataagg

SEQ ID NO: 104015 - DNA, 80 bp, synthetic construct
  source 1..80: mol_type = other DNA
agaatcaaggaataatagcagaccagaccggagctcacactcaacccaacaacagtcaacaaaaaggaggccaagccaca

SEQ ID NO: 104016 - DNA, 80 bp, synthetic construct
  source 1..80: mol_type = other DNA
actggcaacagtcgagaaaatgggaaggctgtagcatacagtcatcaggaaggtgatcttaagccgaagggacaagtaac

SEQ ID NO: 104017 - DNA, 80 bp, synthetic construct
  source 1..80: mol_type = other DNA
atcaataattaatgaggaacaaggttatagaacagattcggtaaaagatgattttgtcaaaattgatgttacagaatata

SEQ ID NO: 104018 - DNA, 80 bp, synthetic construct
  source 1..80: mol_type = other DNA
ctaaacccaaaccgaaattgcctaggaaaccagtaagacaaattcgcaaatctgaacaaagtgggaatccaaatgcaata

SEQ ID NO: 104019 - DNA, 80 bp, synthetic construct
  source 1..80: mol_type = other DNA
caggggattggtaaatgatcctgacattgaaattatgactattgatgtcggtgcattcgatggtaatatccccagattgg

SEQ ID NO: 104020 - DNA, 80 bp, synthetic construct
  source 1..80: mol_type = other DNA
ggatccatagagattgaatctacaacaagtgacccgtttgagatcagcatgagacagtttaaaaaaggcataaacgaaac

SEQ ID NO: 104021 - DNA, 80 bp, synthetic construct
  source 1..80: mol_type = other DNA
tacaacatccagtgggacgggaagtttgtcaccgtctacagatggtgcacacctaactgcagagaagacagacccacaac

SEQ ID NO: 104022 - DNA, 80 bp, synthetic construct
  source 1..80: mol_type = other DNA
tgcagacatcaactgcatctgcggacgatgccctattaagtgcccaaaatgtttcgagtgatccaatgtctaatacttat

SEQ ID NO: 104023 - DNA, 80 bp, synthetic construct
  source 1..80: mol_type = other DNA
tacccatcacattctgagttttacaatatagagccaagctatgcttattacctatcatcaatgggtactggtctcaggaa

SEQ ID NO: 104024 - DNA, 80 bp, synthetic construct
  source 1..80: mol_type = other DNA
tcagccagatcgtgacttgtttattgaaatgttgagaacacaagctcttttgcttaacaaagtaaataatctaacattgg

SEQ ID NO: 104025 - DNA, 80 bp, synthetic construct
  source 1..80: mol_type = other DNA
ctgttgatgatataaataaaaggctagtgcaaattgaaaaattcaagactaatcaggaatcaatagaaaggagtctcaca

SEQ ID NO: 104026 - DNA, 80 bp, synthetic construct
  source 1..80: mol_type = other DNA
aaaatccaaactgcactctctactgtggatggccatctgtcatcaatgatgatttctattccaggaaagagtggtttccc

SEQ ID NO: 104027 - DNA, 80 bp, synthetic construct
  source 1..80: mol_type = other DNA
tgacaaagctcagaaaaacccggatttgagacccgtaataggaagagatactatattccagaaagagctatactcacttc

SEQ ID NO: 104028 - DNA, 80 bp, synthetic construct
  source 1..80: mol_type = other DNA
caagtaacccaagagagataaaccaagttaaacctgtcctgagagaggatctgatactggagccagttaacaaacacaca

SEQ ID NO: 104029 - DNA, 80 bp, synthetic construct
  source 1..80: mol_type = other DNA
acctatgcagcaaattttgagcctaatgtagacccggctacaaagatagtgcttaaatcattggttagatcaaatatatc

SEQ ID NO: 104030 - DNA, 80 bp, synthetic construct
  source 1..80: mol_type = other DNA
agagaagaggctcaccagctgagcaggagacagcaattcttgccaggattctgcagtcacgacccacatcagcaagagga

SEQ ID NO: 104031 - DNA, 80 bp, synthetic construct
  source 1..80: mol_type = other DNA
cgatcttaaattacaaactgaattactggagattatcacagctataacagatcaggatgaaatgagagaattttatgaga

SEQ ID NO: 104032 - DNA, 80 bp, synthetic construct
  source 1..80: mol_type = other DNA
tgcttaatgaactcattgaccaaatgcctactcaataatcataatcctcaataatcagtgctccgccttgcttcatagat

SEQ ID NO: 104033 - DNA, 80 bp, synthetic construct
  source 1..80: mol_type = other DNA
tctttaaagtttgattataaaaaacttaggatcaacgattctcataaagatcctgttgcactgcattcataatgtattca

SEQ ID NO: 104034 - DNA, 80 bp, synthetic construct
  source 1..80: mol_type = other DNA
actcacccatttgaaggattctcagattttaattcaaacacctggactgagaagggtacacttgaaaagctcccaacatt

SEQ ID NO: 104035 - DNA, 80 bp, synthetic construct
  source 1..80: mol_type = other DNA
aactgatgcaaatggaactataattcctcagtacagggtgatagatataggggaccaggagagaaagggttctcagtatg

SEQ ID NO: 104036 - DNA, 80 bp, synthetic construct
  source 1..80: mol_type = other DNA
tgtatctcatcacctacgggttcattcaagatttcttagacactaataatagaaatgatttggaagaaactacacaaaag

SEQ ID NO: 104037 - DNA, 80 bp, synthetic construct
  source 1..80: mol_type = other DNA
aagagagcagcagtcagggctgcagtggctctaccactgggtgttggaaagacacattcaagtccacaagatttactgga

SEQ ID NO: 104038 - DNA, 80 bp, synthetic construct
  source 1..80: mol_type = other DNA
tgaaatttgttccttgagaataactatccgcagaactgcaggagctcaagagaaaattgtattcgggatagaaggtagac

SEQ ID NO: 104039 - DNA, 80 bp, synthetic construct
  source 1..80: mol_type = other DNA
tatttcatttactaccatggaagaatgtgctcactaaagggtctatctttagtgccatcaaggtatgtagttctgttgaa

SEQ ID NO: 104040 - DNA, 80 bp, synthetic construct
  source 1..80: mol_type = other DNA
tctgttcggctggacaccccccagatgatgaggccttttttcttaaccatcactaaaatgtgtgagagaggtgtttataa

SEQ ID NO: 104041 - DNA, 80 bp, synthetic construct
  source 1..80: mol_type = other DNA
acaggaccattcattgaggaggcaatcaatcatttggaaattagagaccctgccacattgcttactgctttggctactgt

SEQ ID NO: 104042 - DNA, 80 bp, synthetic construct
  source 1..80: mol_type = other DNA
gatacctaaaagtatcttggacatgaggtgtaataatgcagtagcattcaatttgctcgtgacccttaaaattgatggag

SEQ ID NO: 104043 - DNA, 80 bp, synthetic construct
  source 1..80: mol_type = other DNA
attacaacaaagttggtttgagaggaattgttacaaaggatggtgagaaagcaacaacattcatgatccacattgggaat

SEQ ID NO: 104044 - DNA, 80 bp, synthetic construct
  source 1..80: mol_type = other DNA
ttccgtagacgatcagggaagatgtactctgtagattattgcaggcaaaaggttgaaaagatggatatggagtttgcatt

SEQ ID NO: 104045 - DNA, 80 bp, synthetic construct
  source 1..80: mol_type = other DNA
aggtgcaattggaggtttgagtctgcacatcaagatcaaagggaaaatcagtaaaaggctcttggcacagatgggtttca

SEQ ID NO: 104046 - DNA, 80 bp, synthetic construct
  source 1..80: mol_type = other DNA
aaaaacacatctgttattctctgatggatatgaacccaaatctcaaccgcatggcatgggctcatacatgtgagatcttt

SEQ ID NO: 104047 - DNA, 80 bp, synthetic construct
  source 1..80: mol_type = other DNA
aaggtgactgcagtgtttcaaccatcagtaccagaagactttaaactgtacgatgatgtattgatcgataatactggcaa

SEQ ID NO: 104048 - DNA, 80 bp, synthetic construct
  source 1..80: mol_type = other DNA
gattctaaagaactaattgttcgattaaactatatacatttaaggaaaacttaggagtaaagcctacacagccagtggac

SEQ ID NO: 104049 - DNA, 80 bp, synthetic construct
  source 1..80: mol_type = other DNA
cccacatcactcctcgaacctaaacctactttcacatcttcagctcttgctaaattgtatcttcagaatataatcgcatc

SEQ ID NO: 104050 - DNA, 80 bp, synthetic construct
  source 1..80: mol_type = other DNA
ttgtactagtatagttggctacatactatctgatttagaaagtcaggttgagatggggttcagaaagaatcttagattat

SEQ ID NO: 104051 - DNA, 80 bp, synthetic construct
  source 1..80: mol_type = other DNA
taggtatcttttggttgatcattttgagtgatactgttgattttgaaagattggcatctatcggaggaattaaaggacat

SEQ ID NO: 104052 - DNA, 80 bp, synthetic construct
  source 1..80: mol_type = other DNA
actagggcagatctggattctactagctaaatcagtaactgctcctgacaccgctgaagaaagtgagcaaagaagatggc

SEQ ID NO: 104053 - DNA, 80 bp, synthetic construct
  source 1..80: mol_type = other DNA
agtaaattatacaagattaaaggtcatccaactactaaagatatagtgattaaacttgttccaaatttgaataatctaac

SEQ ID NO: 104054 - DNA, 80 bp, synthetic construct
  source 1..80: mol_type = other DNA
tgtttgttcagaaatgtctattgatgggtacttaaacctcataaatgctgtaattatcccgatcagtcagtcattagaat

SEQ ID NO: 104055 - DNA, 80 bp, synthetic construct
  source 1..80: mol_type = other DNA
taatgagaaacaatgttaaggatggcacacctaatgagaatatctttggtgctatagttgcaggtgctgcattaggtatt

SEQ ID NO: 104056 - DNA, 80 bp, synthetic construct
  source 1..80: mol_type = other DNA
gcaactgcagctcaggtgacatcagttgtggcccttcacaagtcaaatcagaatgcggcaaagattaattccttaaggga

SEQ ID NO: 104057 - DNA, 80 bp, synthetic construct
  source 1..80: mol_type = other DNA
ctcaataactaagacaaatcaagcagttgaacaactttcattaggggttcaggagacagttagtgttttgatgggtctcc

SEQ ID NO: 104058 - DNA, 80 bp, synthetic construct
  source 1..80: mol_type = other DNA
aggatcaaattaatactaatttggtacctaaaataaacatactctcttgcaaacaattaagcaatacccttaatataatg

SEQ ID NO: 104059 - DNA, 80 bp, synthetic construct
  source 1..80: mol_type = other DNA
ctactccaatattatagccaaattttaacggtttttgggccaaatttgcgtgaccctgccactgttccagtttctattca

SEQ ID NO: 104060 - DNA, 80 bp, synthetic construct
  source 1..80: mol_type = other DNA
agcattatcacaattatttgaggggaatttggaacttttgacatcatcactaggaattagttcaaccgacttcaatgatc

SEQ ID NO: 104061 - DNA, 80 bp, synthetic construct
  source 1..80: mol_type = other DNA
tgttgactgggaaactgatcacaggttcaataatctgggcagacacacagggacactaccttatattacgtgtaaatatc

SEQ ID NO: 104062 - DNA, 80 bp, synthetic construct
  source 1..80: mol_type = other DNA
cctgatttaatcgaagtccctggtgctgtaattcaagaatttataaagattgggtacaattttggagggtcactgtggat

SEQ ID NO: 104063 - DNA, 80 bp, synthetic construct
  source 1..80: mol_type = other DNA
aaaagttgatccaacaaagaagagtggatcagcatttcactctttctccttcatggataaatgaggccaggcatctgatc

SEQ ID NO: 104064 - DNA, 80 bp, synthetic construct
  source 1..80: mol_type = other DNA
gcccaccattccaaacaagatcattattagaggttatcatttatcccttattgatagtacgaattgtattataacagaca

SEQ ID NO: 104065 - DNA, 80 bp, synthetic construct
  source 1..80: mol_type = other DNA
attcatatgtctgcgacagagattattctttaccaatgaacccaatactgcgtgaatgttttgagggtaatacatctagt

SEQ ID NO: 104066 - DNA, 80 bp, synthetic construct
  source 1..80: mol_type = other DNA
tgtggaagagaaatggtactgaactcatatataccgctgtatgcactatctgagggtgtaatttatgctaattgtctagc

SEQ ID NO: 104067 - DNA, 80 bp, synthetic construct
  source 1..80: mol_type = other DNA
tacttcctgcaaatgtgcaactactaacaaaccaattgttcaatcaactagtacagtaatcaccatgattgacaattcta

SEQ ID NO: 104068 - DNA, 80 bp, synthetic construct
  source 1..80: mol_type = other DNA
aatgccctgttgtcgaagttgggaaacagatgatttcggttggaagttacctagggcaagtttcacctaacaacttgact

SEQ ID NO: 104069 - DNA, 80 bp, synthetic construct
  source 1..80: mol_type = other DNA
attgaaatcggtccgcctgtctatactgagcctgtcgatataacaaatcaattaggaaatataaatgagaccttatcaaa

SEQ ID NO: 104070 - DNA, 80 bp, synthetic construct
  source 1..80: mol_type = other DNA
aactctagaccttattaaacagtcaaactcaatactggatatgattactggtggtttaaaccctcagatagggtcaatga

SEQ ID NO: 104071 - DNA, 80 bp, synthetic construct
  source 1..80: mol_type = other DNA
tatctttaattcttgctgctattgctattttattaagtggaatcacttgcttattctctacaaaatcctatgttaagtgt

SEQ ID NO: 104072 - DNA, 80 bp, synthetic construct
  source 1..80: mol_type = other DNA
aataagctgcaaatgaactgtttcaaaagttatgaaaggatggatccaatttatcactcccagcaaaattgaatatcttg

SEQ ID NO: 104073 - DNA, 80 bp, synthetic construct
  source 1..80: mol_type = other DNA
attcttaatctgtcattagttattagaaaaaacttaggatccaagcctggcatccaagaccgcctcaaccagtgaaagat

SEQ ID NO: 104074 - DNA, 80 bp, synthetic construct
  source 1..80: mol_type = other DNA
tcatcaaatctttcagtgaggaagttcatggttgaaaacctggtagaattaaggaaatcagagggaactaaaggtcggat

SEQ ID NO: 104075 - DNA, 80 bp, synthetic construct
  source 1..80: mol_type = other DNA
caaatccgaatccaactggacaaacaaacactcttagacaatcaatcatgtctcaaaagaagtccttaatcatcaaaggg

SEQ ID NO: 104076 - DNA, 80 bp, synthetic construct
  source 1..80: mol_type = other DNA
cacgattatagcccgaaggataaaaatcaatcgtcaaaatactacaactcatatgaaagtgatcaggataccatcaatcc

SEQ ID NO: 104077 - DNA, 80 bp, synthetic construct
  source 1..80: mol_type = other DNA
taatgaattcaagtgcatgttgacattaatattcctcgtattactgcttacaatagcctcagtaattgtcctcggaatat

SEQ ID NO: 104078 - DNA, 80 bp, synthetic construct
  source 1..80: mol_type = other DNA
gcaatgtcgttaagcttgaccatgaatcaaagcaaatctccatcaacacaatgtcaatcaacaaagcaattgggaaaata

SEQ ID NO: 104079 - DNA, 80 bp, synthetic construct
  source 1..80: mol_type = other DNA
aatgaactgtattcattaatcaataatgaacttaaaataaggatgatggtaatggacacagctgttaatgtcgatattcc

SEQ ID NO: 104080 - DNA, 80 bp, synthetic construct
  source 1..80: mol_type = other DNA
tgctgatattagtgctctaagcatgaagctcacctcggcgattacctctatcgaagaattgattcaaagccagacttcat

SEQ ID NO: 104081 - DNA, 80 bp, synthetic construct
  source 1..80: mol_type = other DNA
ctgtaccaagcaaccggccgtcaatgaatcaatctgggggctcatctggatctagtcaactttcaaattcgagcagacct

SEQ ID NO: 104082 - DNA, 80 bp, synthetic construct
  source 1..80: mol_type = other DNA
ataccagatcaaggaaatccaaactactgcaactacgacaagccaaaccgtccttctatgtcattcacatccctcaacat

SEQ ID NO: 104083 - DNA, 80 bp, synthetic construct
  source 1..80: mol_type = other DNA
tatcacacctactgagtcagcctatacagaaggttgtcacactgaaacagtcctaacatctgaacagttccaattggttc

SEQ ID NO: 104084 - DNA, 80 bp, synthetic construct
  source 1..80: mol_type = other DNA
cactcaaccaattgctagcaggtgattatggagaggattattgtagtcggtatccttcgctatcactgaggggccgacgc

SEQ ID NO: 104085 - DNA, 80 bp, synthetic construct
  source 1..80: mol_type = other DNA
cgcaggattcagaaagtatcttgcaaatttagggagggaagggaggccaagtgctgcaacatcaagtttgacaactgttg

SEQ ID NO: 104086 - DNA, 80 bp, synthetic construct
  source 1..80: mol_type = other DNA
cacagagatgattgccgacattggcaattacattgaagagacaggattgtcaggatttttcctcacaattaaatttgggc

SEQ ID NO: 104087 - DNA, 80 bp, synthetic construct
  source 1..80: mol_type = other DNA
ttcacatatactgaagaaaggtacagagggtcatgtagtaccagaacaaaggaagctcaaatcatcgtgtatggttacat

SEQ ID NO: 104088 - DNA, 80 bp, synthetic construct
  source 1..80: mol_type = other DNA
aacagattttggttacagacatccaacacttatgatcttagacacatttaaccctccaaactacgacatgatctatcggt

SEQ ID NO: 104089 - DNA, 80 bp, synthetic construct
  source 1..80: mol_type = other DNA
gcacaagtgttaccaaattatcaacagggttggttatctgtctatacacgaatatgacagaatttgagctctatgaatca

SEQ ID NO: 104090 - DNA, 80 bp, synthetic construct
  source 1..80: mol_type = other DNA
ccgaagaacacagacctaattatttttgaagcttttgatgggagtcaacataaaggaacaattttgaatagctctaaatt

SEQ ID NO: 104091 - DNA, 80 bp, synthetic construct
  source 1..80: mol_type = other DNA
tatatacttaaatgacattgatatgttcataccaggtacaggtggagggatctacctaaacaaaacaatatatctacctg

SEQ ID NO: 104092 - DNA, 80 bp, synthetic construct
  source 1..80: mol_type = other DNA
gaattgtcttcaccacaaaccctcctgatgggaatgcgggctgtcctaactcagcttgtactaacaaagatcctaaatta

SEQ ID NO: 104093 - DNA, 80 bp, synthetic construct
  source 1..80: mol_type = other DNA
tgcagaaaaggtcttaagtacattttcaacaattcatattacatggttaatgggtttgcactgatcagccaaaaaggaag

SEQ ID NO: 104094 - DNA, 80 bp, synthetic construct
  source 1..80: mol_type = other DNA
gaaagaatatgaggtcactgtaacaatgattgagacagatgtctatcactttggttctagatcaagggtacagtatttta

SEQ ID NO: 104095 - DNA, 80 bp, synthetic construct
  source 1..80: mol_type = other DNA
attcacgtgcaaagtattatcaagcacccaacgggtggttttcttacccaatatacgggaatatatactttgagaagaat

SEQ ID NO: 104096 - DNA, 80 bp, synthetic construct
  source 1..80: mol_type = other DNA
cagaaaattacctttgatgaagcaaactataccgtttatgagagatacacagaaggctcatgccctattaactcctcctg

SEQ ID NO: 104097 - DNA, 80 bp, synthetic construct
  source 1..80: mol_type = other DNA
tccagcattctgtcattctagtggctacaacgatatttgggcaaatgatattgattccaacattacctttggcatttaca

SEQ ID NO: 104098 - DNA, 80 bp, synthetic construct
  source 1..80: mol_type = other DNA
atcctgcaattgcattaaatgaatttcaatcggatataaatgtaatgcagagcttaatagagctctataaatctcttgga

SEQ ID NO: 104099 - DNA, 80 bp, synthetic construct
  source 1..80: mol_type = other DNA
attcagattcacacagttatgggcgacctgtgttttttatggctaaccaatcaggaatcatgtatgaatttgtaattcca

SEQ ID NO: 104100 - DNA, 80 bp, synthetic construct
  source 1..80: mol_type = other DNA
gggagcataattgcagcaggtcaatcaacaacatcatgtctattattttaccaagaagtctggtgtatgaatgtcataga

SEQ ID NO: 104101 - DNA, 80 bp, synthetic construct
  source 1..80: mol_type = other DNA
aatcaggaaaacactgaattcctcacaagaaatatatggcttctggactaagaccccattagtttgtcctacaaaggacc

SEQ ID NO: 104102 - DNA, 80 bp, synthetic construct
  source 1..80: mol_type = other DNA
agtacgacattgctcatgcatttcctctccctacaccttctccggcacctgcaccatctcaatcagtgcctgtgacagaa

SEQ ID NO: 104103 - DNA, 80 bp, synthetic construct
  source 1..80: mol_type = other DNA
gcttccactattactttaattcaatcagttgaaccacaaggtaccccgacagatattccatccacgacaaatagagatga

SEQ ID NO: 104104 - DNA, 80 bp, synthetic construct
  source 1..80: mol_type = other DNA
catccagaccataacaaacgcaacttcaggctaattgctgctaagattaattcagccttcatgaaacgcaaataaaatat

SEQ ID NO: 104105 - DNA, 80 bp, synthetic construct
  source 1..80: mol_type = other DNA
gctgcttaccttcttgtgcttctaagactttaactactcatacttgcttattatctcagaaaccccacggtactagtata

SEQ ID NO: 104106 - DNA, 80 bp, synthetic construct
  source 1..80: mol_type = other DNA
ctcagacagatagtctggtgatcaacatcaattgattctatttttgagttggtttaataattaagactgagaatttgatt

SEQ ID NO: 104107 - DNA, 80 bp, synthetic construct
  source 1..80: mol_type = other DNA
agctagataaattaggattagaaaaaacttaggagtaatgtgtctatccattactcactgagctcacatcactgcatttg

SEQ ID NO: 104108 - DNA, 80 bp, synthetic construct
  source 1..80: mol_type = other DNA
gtctgatttaatcctgaagaaaaggagataatctaaaagtctactagtgtataacgcttccaaatttcattacagctaga

SEQ ID NO: 104109 - DNA, 80 bp, synthetic construct
  source 1..80: mol_type = other DNA
ttaatacgtttcggttattcctaactccatgattgtgtaggcgggagaaaaaccaattaatttaagctgattatgatcta

SEQ ID NO: 104110 - DNA, 80 bp, synthetic construct
  source 1..80: mol_type = other DNA
gagctttgagacttcccagtatactaacaattattttcctttggaaatggatactgacatttcaatatcagagattctat

SEQ ID NO: 104111 - DNA, 80 bp, synthetic construct
  source 1..80: mol_type = other DNA
atccagagtgtcatcttgactcaccaatagtaacagggaagttaatgcaacatctcgagtacacaggacttccatatacc

SEQ ID NO: 104112 - DNA, 80 bp, synthetic construct
  source 1..80: mol_type = other DNA
aattcattggaggacaagactttaattagaaatatacacataaaaaagcttaaaggagtaagaacatccaatccccttgt

SEQ ID NO: 104113 - DNA, 80 bp, synthetic construct
  source 1..80: mol_type = other DNA
atgaatccaaatcaaaaaataataaccgttggatcagtgtccttgggattagtggtccttaatattctcctacatatagt

SEQ ID NO: 104114 - DNA, 80 bp, synthetic construct
  source 1..80: mol_type = other DNA
gaaatgggaacaatgggagatgcaatgaaacattcattagggaatacaatgacacagtaaggattgagaaggtatcggag

SEQ ID NO: 104115 - DNA, 80 bp, synthetic construct
  source 1..80: mol_type = other DNA
tgagggagggtggacaggaatgatagacggatggtatggttaccaccaccaaaacgaacaaggatcaggatttgcagctg

SEQ ID NO: 104116 - DNA, 80 bp, synthetic construct
  source 1..80: mol_type = other DNA
aaggggtgaaactggaatcaacaaggatctatcagattttggcgatttattcaactgtcgccagttcattggtactgttg

SEQ ID NO: 104117 - DNA, 80 bp, synthetic construct
  source 1..80: mol_type = other DNA
cacttaggtaaatgcaacattgctggatggattttgggaaacccagaatgtgattcattgttcacagtaaaatcatggtc

SEQ ID NO: 104118 - DNA, 80 bp, synthetic construct
  source 1..80: mol_type = other DNA
tggtaaaaaaggaaaattcataccctagaatcaataaaacttacaccaacaataaggggaaagaagtcctcgtgctatgg

SEQ ID NO: 104119 - DNA, 80 bp, synthetic construct
  source 1..80: mol_type = other DNA
ggcattcaccacccatctaccagtaatgatcaacaaactctctaccaaaatgcagatgcctatgtgtttgtaggatcatc

SEQ ID NO: 104120 - DNA, 80 bp, synthetic construct
  source 1..80: mol_type = other DNA
ccttcgcaatgactaaaggttctgagtctggtattatgatttcagacgcacaagttcatgactgtaacacaacctgtcag

SEQ ID NO: 104121 - DNA, 80 bp, synthetic construct
  source 1..80: mol_type = other DNA
acacccaaaggtgctataaacaccagcctaccattccaaaacatacatccaatcacaattggagagtgtccaaaatatgt

SEQ ID NO: 104122 - DNA, 80 bp, synthetic construct
  source 1..80: mol_type = other DNA
atggaagcaatatcactgatgactatactaatggtggtaacaacaagtaatgcagataaaatctgcatcggtcaccaatc

SEQ ID NO: 104123 - DNA, 80 bp, synthetic construct
  source 1..80: mol_type = other DNA
actgggacaagcaaatcatgttcagattccttttataggaatatgagatggttgactcagaagaatgggctttatccaat

SEQ ID NO: 104124 - DNA, 80 bp, synthetic construct
  source 1..80: mol_type = other DNA
gtgaagcaggaataccaaaaaacaatgggttctatggtttgtgaagtttgccaacaagaatgtgagactgcaaaagaatt

SEQ ID NO: 104125 - DNA, 80 bp, synthetic construct
  source 1..80: mol_type = other DNA
tagaacctgggtggacagatacagctcacggttcaggaataatcccacttaaaactgatctagagttagatttttcccta

SEQ ID NO: 104126 - DNA, 80 bp, synthetic construct
  source 1..80: mol_type = other DNA
cactctctatgtttagatacaagagcaaatgctatgtaggattggtctggtgcattttattaactatggagttaatagtg

SEQ ID NO: 104127 - DNA, 80 bp, synthetic construct
  source 1..80: mol_type = other DNA
atcgaatcagctactcatgcagggaaacaaatagtggaacgcattctggaagaagagcatgatgaagcacttaaaataac

SEQ ID NO: 104128 - DNA, 80 bp, synthetic construct
  source 1..80: mol_type = other DNA
tgcccaagcagaaagttgaaaattccctttgcatcagaatggaccaggcaataatgaataaaaccatcacattgagagca

SEQ ID NO: 104129 - DNA, 80 bp, synthetic construct
  source 1..80: mol_type = other DNA
ggttggtctaaatccaactccaagtttcagacaaacagacaggtaatagttggcagcaatgataggtcaggttattcggg

SEQ ID NO: 104130 - DNA, 80 bp, synthetic construct
  source 1..80: mol_type = other DNA
cttacaaaaacagcacttgggtaaatcagacatatattaacatcagcaataataattttgttgctgaattggcgtcagct

SEQ ID NO: 104131 - DNA, 80 bp, synthetic construct
  source 1..80: mol_type = other DNA
aatttcctgctcccagtctagaaacaaaagtttttatcggaacctgctatggatagtacagaaaagaaattcctatccta

SEQ ID NO: 104132 - DNA, 80 bp, synthetic construct
  source 1..80: mol_type = other DNA
agctcaacaattcatacaccaacgacaaaggaaaagaaatacttgtaatatggggaatacaccatcctccaacttacagt

SEQ ID NO: 104133 - DNA, 80 bp, synthetic construct
  source 1..80: mol_type = other DNA
gtcccaaattaatgaagtataggaattgggcaaagccacaatgtaagataacaggatttgctcctttttccaaggacaat

SEQ ID NO: 104134 - DNA, 80 bp, synthetic construct
  source 1..80: mol_type = other DNA
ctttctgtggcgtaaatagtgaaatcgcaagctggtcgtggccagacggagctgaactgccattcaccattgacaaatag

SEQ ID NO: 104135 - DNA, 80 bp, synthetic construct
  source 1..80: mol_type = other DNA
ttacatatgtaaataacacatgggtgaaccaaactcatgtgaacattagcaatattaaaactgatactatacaggatgtg

SEQ ID NO: 104136 - DNA, 80 bp, synthetic construct
  source 1..80: mol_type = other DNA
actccgattatactagccggcaattcatcactttgcccagtaagtgggtgggctatatacagcaaagacaatagcataag

SEQ ID NO: 104137 - DNA, 80 bp, synthetic construct
  source 1..80: mol_type = other DNA
tttatgctactttcaagagtaacaacaagaacggaaatatgctggagtttaatctgttagaccaacgaataatatggcag

SEQ ID NO: 104138 - DNA, 80 bp, synthetic construct
  source 1..80: mol_type = other DNA
gccgaagaagccgttgtgagtatctctgggtcatatattgttaccggcagccagttgcaacccctctatcaagcactcgg

SEQ ID NO: 104139 - DNA, 80 bp, synthetic construct
  source 1..80: mol_type = other DNA
cctgccttccgatcttgccgctcgtgcgagccgacttaccgctacggttgaggtttccgatgctgatggtcgtctcacct

SEQ ID NO: 104140 - DNA, 80 bp, synthetic construct
  source 1..80: mol_type = other DNA
gtaagaccatcatgggtaataagacctttttaacagcctttactgatggcgcccagctggaggccaatgggcctgagcag

SEQ ID NO: 104141 - DNA, 80 bp, synthetic construct
  source 1..80: mol_type = other DNA
tacgttttgtcacttgacctggcgaaacaaaccatggcagcgggcccgcacagtcttagttatactttgacacctgcggg

SEQ ID NO: 104142 - DNA, 80 bp, synthetic construct
  source 1..80: mol_type = other DNA
ccttgaggtgcatgtggtttcggccgggcttgactgcaagaccgtcttcccgtccggcgtagcggccccccctgctgctg

SEQ ID NO: 104143 - DNA, 80 bp, synthetic construct
  source 1..80: mol_type = other DNA
gggaggtgtctgctttctgctcggccttgtacaggtttaaccgctgtgtccagcggcattctcttattggaggcctatgg

SEQ ID NO: 104144 - DNA, 80 bp, synthetic construct
  source 1..80: mol_type = other DNA
cctgcgctccgagcgagttgccccccgaggagactagcaaacctgtgattttaaatacctcaccttcagagattgtggag

SEQ ID NO: 104145 - DNA, 80 bp, synthetic construct
  source 1..80: mol_type = other DNA
caagtccagcctccggcctttaaaccggcagcacctttatctgactcagttgataatagtgttagctctattcctcctag

SEQ ID NO: 104146 - DNA, 80 bp, synthetic construct
  source 1..80: mol_type = other DNA
tgcccccactgcacccccggcgtcggcgccgtctgtaacccgtccatctgagcctcgccggcggttgcttcatacctacc

SEQ ID NO: 104147 - DNA, 80 bp, synthetic construct
  source 1..80: mol_type = other DNA
ctgacggctcaaaagtgtatgccggctctctttttgattctgagtgtacttggctagttaatgcttccaaccccggccac

SEQ ID NO: 104148 - DNA, 80 bp, synthetic construct
  source 1..80: mol_type = other DNA
ccgacagtaaaactttacacttcagtcgagaacgctcagcaggacaagggtatagctattccacatgatattgaccttgg

SEQ ID NO: 104149 - DNA, 80 bp, synthetic construct
  source 1..80: mol_type = other DNA
aatgtcatcacctatgtaaataacacatgggtgaatcgaacttatgtgaacattagcaatatcaaaattgctactataaa

SEQ ID NO: 104150 - DNA, 80 bp, synthetic construct
  source 1..80: mol_type = other DNA
ggatgtgactccggttgtgctatccggcaattcatcactttgcccagtaagtgggtgggctgtatacagcaaagacaata

SEQ ID NO: 104151 - DNA, 80 bp, synthetic construct
  source 1..80: mol_type = other DNA
aagccccatctccgtacaactcaagattcgaatcagttgcttggtcagcaagtgcatgccatgatgggatgggatggcta

SEQ ID NO: 104152 - DNA, 80 bp, synthetic construct
  source 1..80: mol_type = other DNA
agataggaaacatagtctcgttatgggttagccattcaattcagaccagatgggaaaatcacactgaagtgtgcaaccaa

SEQ ID NO: 104153 - DNA, 80 bp, synthetic construct
  source 1..80: mol_type = other DNA
ccgatttgagatagacaggactatgtactggacagtagtgaacagtatctgcaacacaacaggggtagagaagcccaaat

SEQ ID NO: 104154 - DNA, 80 bp, synthetic construct
  source 1..80: mol_type = other DNA
gaagtgagtgcccaaattccacgccccctcagattgcctgatggacctccttgctctcagcggtcaaagttcttgctgat

SEQ ID NO: 104155 - DNA, 80 bp, synthetic construct
  source 1..80: mol_type = other DNA
ggacgtcctttgtctacgtcccgtcggcgctgaatcctgcggacgacccgtctcggggtcgcttggggatctctcgtccc

SEQ ID NO: 104156 - DNA, 80 bp, synthetic construct
  source 1..80: mol_type = other DNA
gtctacgtcccgtcagcgctgaatcctgcggacgacccatctcggggtcgcttggggatctatcgtccccttctccgtct

SEQ ID NO: 104157 - DNA, 80 bp, synthetic construct
  source 1..80: mol_type = other DNA
ttatgtaattggaagttgggggtcattgccacaggaacacatcagaatgaaaatcaaagactgttttagaaaactccctg

SEQ ID NO: 104158 - DNA, 80 bp, synthetic construct
  source 1..80: mol_type = other DNA
ttttcgaggaaaacaataggttcgtatttatgattgattcattcatcgtagcctaggctgtagggtatactgatacaaat

SEQ ID NO: 104159 - DNA, 80 bp, synthetic construct
  source 1..80: mol_type = other DNA
atgtataccctccttgagaagagactgaaacaacggtggtatggacagtatggaaaggagctacgggggttgtgtggtca

SEQ ID NO: 104160 - DNA, 80 bp, synthetic construct
  source 1..80: mol_type = other DNA
gagacgggaggctcttgaagaatatgaggagcacgttaggttgttaggatcggtattgggggacgatcaagtagcaggtg

SEQ ID NO: 104161 - DNA, 80 bp, synthetic construct
  source 1..80: mol_type = other DNA
cgttttgtcgcgggattgttgatgaagaagtaattttgcgagttactaaagatctgtgtgatgagacgaaatttttaatg

SEQ ID NO: 104162 - DNA, 80 bp, synthetic construct
  source 1..80: mol_type = other DNA
gagaggttgggatatgagtgcgagcctgagatttctgagtattctgcagaatttttgaaacagaagggtgtattggtggc

SEQ ID NO: 104163 - DNA, 80 bp, synthetic construct
  source 1..80: mol_type = other DNA
tcctgagctatttcctgaaaggctacttctcttttcttccgaacgtggtgacatggctggatctctaccgttagaccgag

SEQ ID NO: 104164 - DNA, 80 bp, synthetic construct
  source 1..80: mol_type = other DNA
tcaagataatgcttagtatgattgacgagaagattggacgggctcgatgtccgctaccttatgcatccttgatgttattt

SEQ ID NO: 104165 - DNA, 80 bp, synthetic construct
  source 1..80: mol_type = other DNA
gatgtccgctaccttatgcatccttgatgttatttacatcctggatttctggaacagcatccttttctattggtgaaggt

SEQ ID NO: 104166 - DNA, 80 bp, synthetic construct
  source 1..80: mol_type = other DNA
aagcgaagtcgtctatttcttgctgccggagagagtgtcctggacggactgggccgcgttgccgagggactcctgagcag

SEQ ID NO: 104167 - DNA, 80 bp, synthetic construct
  source 1..80: mol_type = other DNA
agccgaggatgccctgaccctggttctgagcgctgtcgccgccgctgcgcgtggcatcgccgaccttctgggtggcggac

SEQ ID NO: 104168 - DNA, 80 bp, synthetic construct
  source 1..80: mol_type = other DNA
ttgtcgccctcgggctgaagggacgaggcagccttgtcataggcgccggaggcagactcggaggccttgtcgagagtaga

SEQ ID NO: 104169 - DNA, 80 bp, synthetic construct
  source 1..80: mol_type = other DNA
cttctgggagtcaggagtgaccttctcctgcacctggtcaccgagacccttgcgaccgagatcagacatgttgctggttg

SEQ ID NO: 104170 - DNA, 80 bp, synthetic construct
  source 1..80: mol_type = other DNA
gtggtatcaggttggccgtcgaccccgtgttattcagatggttgggactgaagggcagctgtcagcttttgtattacata

SEQ ID NO: 104171 - DNA, 80 bp, synthetic construct
  source 1..80: mol_type = other DNA
atgttttaagaccagcgtataagaagacgaggtttacaacttctgggaagaattcaggtgatattcgtgatatgaatatc

SEQ ID NO: 104172 - DNA, 80 bp, synthetic construct
  source 1..80: mol_type = other DNA
gtgctcgagatttctggggagttaggatataagtcatctttggatgtgaaaggtatggattcgtcaacaaagcctttcca

SEQ ID NO: 104173 - DNA, 80 bp, synthetic construct
  source 1..80: mol_type = other DNA
tctctccttaagctgtgtcttctatcgtttgaggggtgaagtgttagggtatcctcctttcttcctaggatcaatgtcct

SEQ ID NO: 104174 - DNA, 80 bp, synthetic construct
  source 1..80: mol_type = other DNA
tcggccataggtgagaacaagccccaagctcatgccataatggttcgtgtcgaagaaattgggctcaaaccatccgcgtg

SEQ ID NO: 104175 - DNA, 80 bp, synthetic construct
  source 1..80: mol_type = other DNA
cttctaaggagaattttgtcctaactaggacgagatatcgtgatgagcacgggactatccttgcggaggaggagtataaa

SEQ ID NO: 104176 - DNA, 80 bp, synthetic construct
  source 1..80: mol_type = other DNA
ttaacctatcctcagtatgttttgttgttgggagcggtgcactggactagcccgactagattcactgatggctatttcca

SEQ ID NO: 104177 - DNA, 80 bp, synthetic construct
  source 1..80: mol_type = other DNA
agagtttgtaatgacatcgaggactgtgtttagatctggtctattaaatactgccgatcagcatacatttttaggggtaa

SEQ ID NO: 104178 - DNA, 80 bp, synthetic construct
  source 1..80: mol_type = other DNA
tagtgctaacaatactaccagtaccactagtgccagtattactactaataccagtagtactaatgccactaatgccacga

SEQ ID NO: 104179 - DNA, 80 bp, synthetic construct
  source 1..80: mol_type = other DNA
tagtgctgacaatactaccagtaccactagtgccactactactactgatgccagtagtactagtgccaataaggccacga

SEQ ID NO: 104180 - DNA, 80 bp, synthetic construct
  source 1..80: mol_type = other DNA
ctagtgccactattgctactgatgccagtggtactaatgccactaatgccacgaagggagaaataaaagaatgcactttc

SEQ ID NO: 104181 - DNA, 80 bp, synthetic construct
  source 1..80: mol_type = other DNA
tgctgacaatgctaccaataccactagtgccaatgttactattaatgccaatagtactgccaatattactactgatgcca

SEQ ID NO: 104182 - DNA, 80 bp, synthetic construct
  source 1..80: mol_type = other DNA
gtagtactaatgccactaatgccacaaagggagaaataaaagaatgcactttcaatatcaccacaaacataagagataag

SEQ ID NO: 104183 - DNA, 80 bp, synthetic construct
  source 1..80: mol_type = other DNA
tgccaatagtactgtcaatattactactaatgccagtagtactaatgccactaatgccacgaagggagaaataaaagaat

SEQ ID NO: 104184 - DNA, 80 bp, synthetic construct
  source 1..80: mol_type = other DNA
gcactttcaatatcaccacaaacataagaaataaggttaaggaagaaaaagcacttttttataaccttgatatagtacca

SEQ ID NO: 104185 - DNA, 80 bp, synthetic construct
  source 1..80: mol_type = other DNA
cagaggagctctctcgacgcaggactcggcttgctgaagcgcgcgcggcaagaggcgaggggcagttaatcctggccttt

SEQ ID NO: 104186 - DNA, 80 bp, synthetic construct
  source 1..80: mol_type = other DNA
ctattggcattagtagtaatattggcactagtggtattggcagtattgtcaccaatataatccttgcattctaaagtaat

SEQ ID NO: 104187 - DNA, 80 bp, synthetic construct
  source 1..80: mol_type = other DNA
ccactactcccaacaatagtaataaaacagaaaaaataaaaaaagtaaaaaactgcactttcaatatcaccacaaacata

SEQ ID NO: 104188 - DNA, 80 bp, synthetic construct
  source 1..80: mol_type = other DNA
tttttctactgtaatacaacacaactgtttaatagcacttaaaaagatactaaatcaaataacacaaaaaataatacaat

SEQ ID NO: 104189 - DNA, 80 bp, synthetic construct
  source 1..80: mol_type = other DNA
ttaaaatgctagttaaagtaataaatctctgaattaaatttagcaaaacataacctaaatgcagtaaaaaaaaaaaatta

SEQ ID NO: 104190 - DNA, 80 bp, synthetic construct
  source 1..80: mol_type = other DNA
acaattacacaggcttaatatacaccttaattaaaaaatcacaaatccaacaaaaaaaaaataaacagaacttattaaaa

SEQ ID NO: 104191 - DNA, 80 bp, synthetic construct
  source 1..80: mol_type = other DNA
tattaaattcagaaactaaaaaatagtgctattagtttgcttaataccacagctgtagtagtagctaaaaaaacaaataa

SEQ ID NO: 104192 - DNA, 80 bp, synthetic construct
  source 1..80: mol_type = other DNA
cagaggagctctcttgacgcaggactcggcttgctgaagcgcgcacagcaagaggcgaggggcggtgcgagagcgtcagt

SEQ ID NO: 104193 - DNA, 80 bp, synthetic construct
  source 1..80: mol_type = other DNA
agtagcataactaatagtgaaataaaaaactgctcgtttaatatcaccacagacataaaaaataaagtacaaaaaacata

SEQ ID NO: 104194 - DNA, 80 bp, synthetic construct
  source 1..80: mol_type = other DNA
caacagatcaaggcgctcagtaaataaattcttagcacttatctagaacaacctgtgaagcctgtgcagtttcagctacc

SEQ ID NO: 104195 - DNA, 80 bp, synthetic construct
  source 1..80: mol_type = other DNA
gccgattaagaaacttaatcttaattgtaacaagaattgtgaaactcctaagacacaaaaggtaaaaaatcctcaagtat

SEQ ID NO: 104196 - DNA, 80 bp, synthetic construct
  source 1..80: mol_type = other DNA
taaaagaacatccttcaatactgaagtcagaaactaaaaaatagtgctgttagcttattcaatactatagccataacagt

SEQ ID NO: 104197 - DNA, 80 bp, synthetic construct
  source 1..80: mol_type = other DNA
atccaacaaaaaatagaaaaactaagccagcagcaaataaggtgaaagcagtatctcaagacctaaaaagacatggggca

SEQ ID NO: 104198 - DNA, 80 bp, synthetic construct
  source 1..80: mol_type = other DNA
cagaggagctctctcgacgcaggactcggcttgctgaagcgcgcacggcaagaggcgagatgggaaaaaattcggttaag

SEQ ID NO: 104199 - DNA, 80 bp, synthetic construct
  source 1..80: mol_type = other DNA
cagaggagctctctcgacgcaggactcggcttgctgaagcgcgcacagcaagaaaatttttgactagcggaggctagaag

SEQ ID NO: 104200 - DNA, 80 bp, synthetic construct
  source 1..80: mol_type = other DNA
atccaacagcagatagaagaactaagccagcagcagaaaaggtaaaagcagtatctcaagacctagaaagacataaggca

SEQ ID NO: 104201 - DNA, 80 bp, synthetic construct
  source 1..80: mol_type = other DNA
ccagcagcagataaagtaagagcagtatctcgagacctagaaaaacataaggcaatcaagtgcttcaagtagtgtgtgcc

SEQ ID NO: 104202 - DNA, 80 bp, synthetic construct
  source 1..80: mol_type = other DNA
cagaggagctctctcgacgcaggactcggcttgctgaagcgcgcacggcaagaggcgaggggcggcgatagataactatg

SEQ ID NO: 104203 - DNA, 80 bp, synthetic construct
  source 1..80: mol_type = other DNA
gtagctagagaaagatagaaaataaagaaataaaaaactgctctttcaatatcaccacaggtatactgataattccagct

SEQ ID NO: 104204 - DNA, 80 bp, synthetic construct
  source 1..80: mol_type = other DNA
atccagcagcagataagcgaactgaaccagcagcagataaagtaagagcagtatctcgaaacctagaaaaacataaggca

SEQ ID NO: 104205 - DNA, 80 bp, synthetic construct
  source 1..80: mol_type = other DNA
ctaaatggtagggaaacactagcagtaatgccaatagtgtagctagctacaggatagcggaaagaagagataaaaaattg

SEQ ID NO: 104206 - DNA, 80 bp, synthetic construct
  source 1..80: mol_type = other DNA
cttctttcaatttcacacaggtataagagataaggtgcaggaaaacaatgcactttttgtataaagtgattagtgaaaat

SEQ ID NO: 104207 - DNA, 80 bp, synthetic construct
  source 1..80: mol_type = other DNA
atccagcaacaaataggcaaactgagccagcagcaaataaggtagaagcagtatctcgaaacctaaaaaaacataaggca

SEQ ID NO: 104208 - DNA, 80 bp, synthetic construct
  source 1..80: mol_type = other DNA
agccaacagcagataagagaactaagccagcagcagataaagtaagagcagtatctcgagacctaaaaagacataaggca

SEQ ID NO: 104209 - DNA, 80 bp, synthetic construct
  source 1..80: mol_type = other DNA
cagaggagctctctcgacgcaggactcggcttgctgaagcgcgcacggcaagaggcgaaggggcgcggagagtacgcaaa

SEQ ID NO: 104210 - DNA, 80 bp, synthetic construct
  source 1..80: mol_type = other DNA
ggcttaacttaccaataacaggatcaatggacactgtatacgctaactctactcaagaaggaatatttctaacatccaca

SEQ ID NO: 104211 - DNA, 80 bp, synthetic construct
  source 1..80: mol_type = other DNA
cagtatgtttcatcagacatcgaagcattcaataaatacatgttgtcgaagtctccagaggatattggaccatctgattc

SEQ ID NO: 104212 - DNA, 80 bp, synthetic construct
  source 1..80: mol_type = other DNA
atgattcagatagtgatgacggtaaatgtaagaattgtaaatataaaaagaaatattttgtattaagaatgaggatgaaa

SEQ ID NO: 104213 - DNA, 80 bp, synthetic construct
  source 1..80: mol_type = other DNA
aggatgtgcaaagaactctgtacaccagaacagacacaacaacgagtgtggcaacagaagaaataaataggatcttcaaa

SEQ ID NO: 104214 - DNA, 80 bp, synthetic construct
  source 1..80: mol_type = other DNA
ttccagagaagttctctcgacgcaggactcggcttgctgaggtgcacacagcaagaggcgagagaggcgactagcggggg

SEQ ID NO: 104215 - DNA, 80 bp, synthetic construct
  source 1..80: mol_type = other DNA
taataccaatggcactgatgaaatgaaaaactgctctttcaacatccacacaggcatgcaagatacaaagaagcgagact

SEQ ID NO: 104216 - DNA, 80 bp, synthetic construct
  source 1..80: mol_type = other DNA
aaagccagagaagctctctcgacgcaggactcggcttgctgaagcgcgcgcagcaagaggcgagtcacaataaagatagg

SEQ ID NO: 104217 - DNA, 80 bp, synthetic construct
  source 1..80: mol_type = other DNA
caggtcagagaaagaataaggcgaacttctccagcaacagaagaagtaagagcagcagtaggagcagcagaagaagaaag

SEQ ID NO: 104218 - DNA, 80 bp, synthetic construct
  source 1..80: mol_type = other DNA
ttccagagaagttctctcgacgcaggactcggcttgctgaggtgcacgcagcaagaggcgagagcggcaacgaccccttg

SEQ ID NO: 104219 - DNA, 80 bp, synthetic construct
  source 1..80: mol_type = other DNA
tacaatgcatcattttaattgtagaggggaatttttctattgcaatacaacaaacctgtggacttgcagaaaaaataaca

SEQ ID NO: 104220 - DNA, 80 bp, synthetic construct
  source 1..80: mol_type = other DNA
cactgcctctccaactgggaataataccactgcctctccaattgggaatctagcagatgaaatgagcaactgtactttta

SEQ ID NO: 104221 - DNA, 80 bp, synthetic construct
  source 1..80: mol_type = other DNA
aggagggggcaagatgagccatcaacagagtcagcagcaacgggggtgggagcagtatcccgagacctggaaaattatgg

SEQ ID NO: 104222 - DNA, 80 bp, synthetic construct
  source 1..80: mol_type = other DNA
taatgaacgctttgcaaattagtgccatagtaggactgatagtagcgctaatcctagcaatagtagtgtggactatagta

SEQ ID NO: 104223 - DNA, 80 bp, synthetic construct
  source 1..80: mol_type = other DNA
gaagtagaggagaacaacaaagaagaaaacaactgcctgctacaccccatgagccagcatggaacagacgacgagcacag

SEQ ID NO: 104224 - DNA, 80 bp, synthetic construct
  source 1..80: mol_type = other DNA
attagtgccatagtaggactgatagtagcgctaatcctagcaatagtagtgtggactatagtagctatacaaattagaag

SEQ ID NO: 104225 - DNA, 80 bp, synthetic construct
  source 1..80: mol_type = other DNA
tggtactaaggaaatattctttcgaccgccctcaggaggagatctagaaattacaatgcatcattttaattgtagagggg

SEQ ID NO: 104226 - DNA, 80 bp, synthetic construct
  source 1..80: mol_type = other DNA
aatttttttattgcaatacaacacggctgtttagtgatacttgcctaaatgatacagccacggagtgtaatgacactatc

SEQ ID NO: 104227 - DNA, 80 bp, synthetic construct
  source 1..80: mol_type = other DNA
cagctccagcggacaatggcacggaggagaatgacaatatctctagaatagtgggaaatataacagaggatataaggaac

SEQ ID NO: 104228 - DNA, 80 bp, synthetic construct
  source 1..80: mol_type = other DNA
acagatacaaatgctacagtggccactaacatgagggagaatgacaatatctctaaaatagtgggaaatataacagatga

SEQ ID NO: 104229 - DNA, 80 bp, synthetic construct
  source 1..80: mol_type = other DNA
gtgaccaatagcacgaacaggtatgacaatatctctaaaatagtggggaatataacagaagatgtaaggaactgctcttt

SEQ ID NO: 104230 - DNA, 80 bp, synthetic construct
  source 1..80: mol_type = other DNA
caggggccagtagcaccaatgacaatatctctacaatagtgggaaatataacagaggatgtaaggaactgttcttttaat

SEQ ID NO: 104231 - DNA, 80 bp, synthetic construct
  source 1..80: mol_type = other DNA
actgtttaattatacttatccaggaaatgaaaccacgggaagtgggaccggaggaaggtataatggcactatcataattc

SEQ ID NO: 104232 - DNA, 80 bp, synthetic construct
  source 1..80: mol_type = other DNA
ggagatccagaagttacaatgcatcacttcaactgtagaggggaatttttctattgcaatacaacaggactatttaacaa

SEQ ID NO: 104233 - DNA, 80 bp, synthetic construct
  source 1..80: mol_type = other DNA
gagaagtgctgatgtggaagtttgacagtgctctagcaagaagacacatagcccgagaacggcgcccagagtactttaag

SEQ ID NO: 104234 - DNA, 80 bp, synthetic construct
  source 1..80: mol_type = other DNA
ggagaagtagaaggagacataaagaaagcatattgcaaggttaatgcaactaattggtatgaaaccttagaacaggtaaa

SEQ ID NO: 104235 - DNA, 80 bp, synthetic construct
  source 1..80: mol_type = other DNA
ggaaaagtagtaggagatacaaaaaaagcaaattgcaaggttaatgcaactaattggtatgaaaccttaaaacaggtagt

SEQ ID NO: 104236 - DNA, 80 bp, synthetic construct
  source 1..80: mol_type = other DNA
taaaaaattacatgggcattttaataagacaatagaatttcaatcaccctcaggaggagatccagaagttacaatgcatc

SEQ ID NO: 104237 - DNA, 80 bp, synthetic construct
  source 1..80: mol_type = other DNA
acttcaactgtagaggggaatttttctattgcaatacaacaggactatttaacaatacttgcataggaaatggaaccata

SEQ ID NO: 104238 - DNA, 80 bp, synthetic construct
  source 1..80: mol_type = other DNA
tgtggaagtttgacagtgctctagcaagaagacacatagcccgagaacggcgcccagagtactttaaggactagactgct

SEQ ID NO: 104239 - DNA, 80 bp, synthetic construct
  source 1..80: mol_type = other DNA
ctagtatgaccaatgacattatcaatatctctaaaatagtgggaaatataacagaagatgcaaagaactgttcttttaat

SEQ ID NO: 104240 - DNA, 80 bp, synthetic construct
  source 1..80: mol_type = other DNA
atatctctaggatgaccgatgacattatcaatatctctaaaatagtgggacagataacagatgatgcaaagaactgttct

SEQ ID NO: 104241 - DNA, 80 bp, synthetic construct
  source 1..80: mol_type = other DNA
ttccagagaagttctctcgacgcaggactcggcttgctgcggtgcacacagcaagaggcgagagctagcggaggctagaa

SEQ ID NO: 104242 - DNA, 80 bp, synthetic construct
  source 1..80: mol_type = other DNA
acccataccaatgtctctagcaataattgtaccaatagcatcaatgactctagcatagcagatgaagtaaggaactgtac

SEQ ID NO: 104243 - DNA, 80 bp, synthetic construct
  source 1..80: mol_type = other DNA
ataatagtattattatattgcgttaaatttaataactttctaatgagagaagattaatgcgtctaacctaagagatcact

SEQ ID NO: 104244 - DNA, 80 bp, synthetic construct
  source 1..80: mol_type = other DNA
gaactaaaaaactgctctttcaacatcacaacggacataaaagatgaggtgaaaggctatgcaatttttgataggcttga

SEQ ID NO: 104245 - DNA, 80 bp, synthetic construct
  source 1..80: mol_type = other DNA
tcacacagaatgacgacaccaactcctctactaacaaagcagtgccatgtgaatcaaccataatagagaggaacataaca

SEQ ID NO: 104246 - DNA, 80 bp, synthetic construct
  source 1..80: mol_type = other DNA
cccgtgcgggaaggcaaattgtggagcagattctagaggaagaatctgacaatgcacttaagacgactattgcttctgta

SEQ ID NO: 104247 - DNA, 80 bp, synthetic construct
  source 1..80: mol_type = other DNA
atatatacaataatagcatttgtagtagtggctggcatagcaatagtagtgtgggctttagcgcttatagaatataggaa

SEQ ID NO: 104248 - DNA, 80 bp, synthetic construct
  source 1..80: mol_type = other DNA
atctatgcaatagtagcattagtagtagtgtttgtcatagcagtagttgtgtggactatagtaggtatagagtgtagaaa

SEQ ID NO: 104249 - DNA, 80 bp, synthetic construct
  source 1..80: mol_type = other DNA
gcggaggtaatcaaatgtatatgcagggacaattggaaaggggcaaatagaccagtaatcattatagatcctgaaatgat

SEQ ID NO: 104250 - DNA, 80 bp, synthetic construct
  source 1..80: mol_type = other DNA
aatcacaaaacaggtgagacaagatcatgcccttatgctgggaaagcaagtttctacagaaatttaatgtggctggtgaa

SEQ ID NO: 104251 - DNA, 80 bp, synthetic construct
  source 1..80: mol_type = other DNA
actatgaaaataataaaataacatctgagttatttttaaccgccagagaaaaccctggctctctgatggatccagcaatt

SEQ ID NO: 104252 - DNA, 80 bp, synthetic construct
  source 1..80: mol_type = other DNA
ccaactcccagtcatgtggtgcccccgccggacttggttgatggtggtgctggccatggtttgactagcgtccctgtggt

SEQ ID NO: 104253 - DNA, 80 bp, synthetic construct
  source 1..80: mol_type = other DNA
gcccccggcgcctgtgcagcctgtaacccagtccggaccccgtcgacgactgcttcacacttatcctgacggctcgaagg

SEQ ID NO: 104254 - DNA, 80 bp, synthetic construct
  source 1..80: mol_type = other DNA
gcacagccggagtagagtctgctgttttaagagggttcctaatcttgggcaaagaagacaaaagatatggcccagcattg

SEQ ID NO: 104255 - DNA, 80 bp, synthetic construct
  source 1..80: mol_type = other DNA
ggaggatctgtggccgtgctgcctgtgatcgacagcaccaatcagtacctgctggatcggatcggcgagctgaagtccgg

SEQ ID NO: 104256 - DNA, 80 bp, synthetic construct
  source 1..80: mol_type = other DNA
cgatgcctgcatcgcagagtatcagcaggcaggaagaggaggaaggggaaggaagtggttctccccttttggcgccaacc

SEQ ID NO: 104257 - DNA, 80 bp, synthetic construct
  source 1..80: mol_type = other DNA
tgtacctgtctatgttttggaggctggagcagggaccagcagcagcaatcggcctgtctctggtcatcggcatcgtgatg

SEQ ID NO: 104258 - DNA, 80 bp, synthetic construct
  source 1..80: mol_type = other DNA
gcagaggtgctgaggaagctgggagcagacaaggtgcgcgtgaagtggccaaatgacctgtatctgcaggataggaagct

SEQ ID NO: 104259 - DNA, 80 bp, synthetic construct
  source 1..80: mol_type = other DNA
ggcaggaatcctggtggagctgaccggcaagacaggcgatgcagcacagatcgtgatcggagcaggcatcaacatggcca

SEQ ID NO: 104260 - DNA, 80 bp, synthetic construct
  source 1..80: mol_type = other DNA
tgcggagagtggaggagagcgtggtgaatcagggatggatcaccctgcaggaggcaggcatcaacctggaccggaataca

SEQ ID NO: 104261 - DNA, 80 bp, synthetic construct
  source 1..80: mol_type = other DNA
ctggccgccatgctgatccgggagctgagagccgccctggagctgttcgagcaggagggcctggcaccatatctgagccg

SEQ ID NO: 104262 - DNA, 80 bp, synthetic construct
  source 1..80: mol_type = other DNA
gtgggagaagctggacaacttcatcaatagacccgtgaagctgatcatcggcgataaggagatctttggcatctccaggg

SEQ ID NO: 104263 - DNA, 80 bp, synthetic construct
  source 1..80: mol_type = other DNA
gaatcgacaagcagggcgccctgctgctggagcaggatggcatcatcaagccatggatgggaggagagatcagcctgcgc

SEQ ID NO: 104264 - DNA, 80 bp, synthetic construct
  source 1..80: mol_type = other DNA
tccgccgagaagggaggcagtggacctggaggaggggcacctgattacaaggatgatgacgacaaataagtattcaatta

SEQ ID NO: 104265 - DNA, 80 bp, synthetic construct
  source 1..80: mol_type = other DNA
tagttattaaaaacttaacagaagacaaaaatggggcaaataagaatttgataagtaccacttaaatttaactcccttgc

SEQ ID NO: 104266 - DNA, 80 bp, synthetic construct
  source 1..80: mol_type = other DNA
acgaggtggctgtggccagatactgcgacctccctagcaaactggggcacagagacccagctttcttgtacaaagtggtt

SEQ ID NO: 104267 - DNA, 80 bp, synthetic construct
  source 1..80: mol_type = other DNA
gattctagaatgaaggataatactgtgcctctgaaactgattgctctgctggctaacggcgagttccattccggcgaaca

SEQ ID NO: 104268 - DNA, 80 bp, synthetic construct
  source 1..80: mol_type = other DNA
gctgggggagaccctgggcatgtctagggccgccatcaacaagcacatccagaccctgagggactggggagtggacgtgt

SEQ ID NO: 104269 - DNA, 80 bp, synthetic construct
  source 1..80: mol_type = other DNA
tcaccgtgccaggcaagggatacagcctgccagagcctatccagctgctgaacgccaagcagatcctgggacagctggac

SEQ ID NO: 104270 - DNA, 80 bp, synthetic construct
  source 1..80: mol_type = other DNA
gtgagcgagctgattaaggagaacatgcacatgaagctgtacatggagggcaccgtgaacaaccaccacttcaagtgcac

SEQ ID NO: 104271 - DNA, 80 bp, synthetic construct
  source 1..80: mol_type = other DNA
acttggatttgatcttaatccagacccagctttcttgtacaaagtggttgattctagaatgaaggataatactgtgcctc

SEQ ID NO: 104272 - DNA, 80 bp, synthetic construct
  source 1..80: mol_type = other DNA
tgaaactgattgctctgctggctaacggcgagttccattccggcgaacagctgggggagaccctgggcatgtctagggcc

SEQ ID NO: 104273 - DNA, 80 bp, synthetic construct
  source 1..80: mol_type = other DNA
gccatcaacaagcacatccagaccctgagggactggggagtggacgtgttcaccgtgccaggcaagggatacagcctgcc

SEQ ID NO: 104274 - DNA, 80 bp, synthetic construct
  source 1..80: mol_type = other DNA
agagcctatccagctgctgaacgccaagcagatcctgggacagctggacggaggatctgtggccgtgctgcctgtgatcg

SEQ ID NO: 104275 - DNA, 80 bp, synthetic construct
  source 1..80: mol_type = other DNA
acagcaccaatcagtacctgctggatcggatcggcgagctgaagtccggcgatgcctgcatcgcagagtatcagcaggca

SEQ ID NO: 104276 - DNA, 80 bp, synthetic construct
  source 1..80: mol_type = other DNA
ggaagaggaggaaggggaaggaagtggttctccccttttggcgccaacctgtacctgtctatgttttggaggctggagca

SEQ ID NO: 104277 - DNA, 80 bp, synthetic construct
  source 1..80: mol_type = other DNA
gggaccagcagcagcaatcggcctgtctctggtcatcggcatcgtgatggcagaggtgctgaggaagctgggagcagaca

SEQ ID NO: 104278 - DNA, 80 bp, synthetic construct
  source 1..80: mol_type = other DNA
atccgagggcgaaggcaagccctacgagggcacccagaccatgagaatcaaggcggtcgagggcggccctctccccttcg

SEQ ID NO: 104279 - DNA, 80 bp, synthetic construct
  source 1..80: mol_type = other DNA
aggtgcgcgtgaagtggccaaatgacctgtatctgcaggataggaagctggcaggaatcctggtggagctgaccggcaag

SEQ ID NO: 104280 - DNA, 80 bp, synthetic construct
  source 1..80: mol_type = other DNA
acaggcgatgcagcacagatcgtgatcggagcaggcatcaacatggccatgcggagagtggaggagagcgtggtgaatca

SEQ ID NO: 104281 - DNA, 80 bp, synthetic construct
  source 1..80: mol_type = other DNA
gggatggatcaccctgcaggaggcaggcatcaacctggaccggaatacactggccgccatgctgatccgggagctgagag

SEQ ID NO: 104282 - DNA, 80 bp, synthetic construct
  source 1..80: mol_type = other DNA
ccgccctggagctgttcgagcaggagggcctggcaccatatctgagccggtgggagaagctggacaacttcatcaataga

SEQ ID NO: 104283 - DNA, 80 bp, synthetic construct
  source 1..80: mol_type = other DNA
cccgtgaagctgatcatcggcgataaggagatctttggcatctccaggggaatcgacaagcagggcgccctgctgctgga

SEQ ID NO: 104284 - DNA, 80 bp, synthetic construct
  source 1..80: mol_type = other DNA
gcaggatggcatcatcaagccatggatgggaggagagatcagcctgcgctccgccgagaagggaggcagtggacctggag

SEQ ID NO: 104285 - DNA, 80 bp, synthetic construct
  source 1..80: mol_type = other DNA
gaggggcacctgattacaaggatgatgacgacaaataactcgaggggaattcgattgcggccgcataacttcgtatagca

SEQ ID NO: 104286 - DNA, 80 bp, synthetic construct
  source 1..80: mol_type = other DNA
tacattatacgaagttatctcgaaatcactagtgaattcgtaaattataattaatatcaactagcaaatcaatgtcacta

SEQ ID NO: 104287 - DNA, 80 bp, synthetic construct
  source 1..80: mol_type = other DNA
acaccattagttaatataaaacttaacagaagacaaaaatggggcaaataaatcaattcagccaacccaaccatggacac

SEQ ID NO: 104288 - DNA, 80 bp, synthetic construct
  source 1..80: mol_type = other DNA
ccttcgacatcctggctaccagcttcatgtacggcagcaaaaccttcatcaaccacacccagggcatccccgacttcttt

SEQ ID NO: 104289 - DNA, 80 bp, synthetic construct
  source 1..80: mol_type = other DNA
aagcagtccttccccgagggcttcacatgggagagagtcaccacatacgaagacgggggcgtgctgaccgctacccagga

SEQ ID NO: 104290 - DNA, 80 bp, synthetic construct
  source 1..80: mol_type = other DNA
caccagcctccaggacggctgcctcatctacaacgtcaagatcagaggggtgaacttcccatccaacggccctgtgatgc

SEQ ID NO: 104291 - DNA, 80 bp, synthetic construct
  source 1..80: mol_type = other DNA
agaagaaaacactcggctgggaggcctccaccgagaccctgtaccccgctgacggcggcctggaaggcagagccgacatg

SEQ ID NO: 104292 - DNA, 80 bp, synthetic construct
  source 1..80: mol_type = other DNA
gccctgaagctcgtgggcgggggccacctgatctgcaacttgaagaccacatacagatccaagaaacccgctaagaacct

SEQ ID NO: 104293 - DNA, 80 bp, synthetic construct
  source 1..80: mol_type = other DNA
aatatacacatggacgtccatggggcaaataatcattggaggaaatccaactaatcacaatatctgttaacatagacaag

SEQ ID NO: 104294 - DNA, 80 bp, synthetic construct
  source 1..80: mol_type = other DNA
cgagttaatacttgataaagtagttaattaaaaattagggcccaacaatgaactaggatatcaagactaacaataacatg

SEQ ID NO: 104295 - DNA, 80 bp, synthetic construct
  source 1..80: mol_type = other DNA
caagatgcccggcgtctactatgtggacagaagactggaaagaatcaaggaggccgacaaagagacctacgtcgagcagc

SEQ ID NO: 104296 - DNA, 80 bp, synthetic construct
  source 1..80: mol_type = other DNA
acgaggtggctgtggccagatactgcgacctccctagcaaactggggcacagatgagtattcaattatagttattaaaaa

SEQ ID NO: 104297 - DNA, 80 bp, synthetic construct
  source 1..80: mol_type = other DNA
cttaacagaagacaaaaatggggcaaataagaatttgataagtaccacttaaatttaactcccttgcttagcgatgggca

SEQ ID NO: 104298 - DNA, 80 bp, synthetic construct
  source 1..80: mol_type = other DNA
ttcttatgaatggggataaagaaatcccaacagtccaacaggggcttacgtacagaggaagatgtgaataagtggtggtt

SEQ ID NO: 104299 - DNA, 80 bp, synthetic construct
  source 1..80: mol_type = other DNA
caagctcatgcctcgcagccttgcaagagactctatctggaggagagcaacatccaggatgggagataatccagttatga

SEQ ID NO: 104300 - DNA, 80 bp, synthetic construct
  source 1..80: mol_type = other DNA
gaggtaacacctggaagattccgtactgctgtgtgtggcctttatcctgcacaaataaaagcaagaaatatggtaagtcc

SEQ ID NO: 104301 - DNA, 80 bp, synthetic construct
  source 1..80: mol_type = other DNA
gggcaccatgcaaatttatggccgaatcccccattgcggggagtttatctgggagccctataaatcgggactacatcagg

SEQ ID NO: 104302 - DNA, 80 bp, synthetic construct
  source 1..80: mol_type = other DNA
cagaggcagggtgcacttgcagggatggagccaaaagagtttcaggcactaaggcaacactcaaaggatgcaggttgtac

SEQ ID NO: 104303 - DNA, 80 bp, synthetic construct
  source 1..80: mol_type = other DNA
acagtgtagaatatgtatttaacattaggatttcagaagcatgagaaaaaacaccctgctttcgctgatatctgcagagc

SEQ ID NO: 104304 - DNA, 80 bp, synthetic construct
  source 1..80: mol_type = other DNA
tcgtgctgggaaacaaatagtgaagcgtattctagaagaagagtgtgatgaagtgcttaacataattgctgcttctgtgc

SEQ ID NO: 104305 - DNA, 80 bp, synthetic construct
  source 1..80: mol_type = other DNA
cactcaaaccgcaattgatgggatcagcaacaaagtgaactcaataattgaaaagatgaacacccaatttgcttcagtgg

SEQ ID NO: 104306 - DNA, 80 bp, synthetic construct
  source 1..80: mol_type = other DNA
tgcagaatatgcatttaaggcttgaatttcaaaatgcacggaaaaaacaccctgctttcgctgatatctgcagagctccg

SEQ ID NO: 104307 - DNA, 80 bp, synthetic construct
  source 1..80: mol_type = other DNA
gattcacaccagaaacagtagccagacctaaaattagagaacaagcaggcagaataaattactattggacacttttgaag

SEQ ID NO: 104308 - DNA, 80 bp, synthetic construct
  source 1..80: mol_type = other DNA
ggctgacatcaatcttatgcctatataagctttcgcaatttcagaaaaaactcctgctttcgctgatatctgcagagctc

SEQ ID NO: 104309 - DNA, 80 bp, synthetic construct
  source 1..80: mol_type = other DNA
gagaaaaacataactgaaattgtgtatttaaccaataccaccataaagacagaggcatgccctaagttagtgaaatacag

SEQ ID NO: 104310 - DNA, 80 bp, synthetic construct
  source 1..80: mol_type = other DNA
attatttgttaacgaagggaagattattcacattagtccattagcagggagtgcacaacatgttgaagagtgttcttgct

SEQ ID NO: 104311 - DNA, 80 bp, synthetic construct
  source 1..80: mol_type = other DNA
ttctggtgaccactgtaacattacattcaaggcagtgtgaatgcaactcctccgcaatcaaccaaataatgccatgtgaa

SEQ ID NO: 104312 - DNA, 80 bp, synthetic construct
  source 1..80: mol_type = other DNA
ctccgactgtaagtgaccaacaaaccctctaccagaacaatcatacatatatttcagttggatcgtcaaaatactaccaa

SEQ ID NO: 104313 - DNA, 80 bp, synthetic construct
  source 1..80: mol_type = other DNA
tgggaagaacaatcaacgagacatcacgctcaggttatgaaaccttcaaagtcattgaaggctggtccaagtctaattcc

SEQ ID NO: 104314 - DNA, 80 bp, synthetic construct
  source 1..80: mol_type = other DNA
gggacatttgggtaacgagagaaccttacgtgtcatgcgatcctgataagtgttatcagtttgcccttggacaaggaaca

SEQ ID NO: 104315 - DNA, 80 bp, synthetic construct
  source 1..80: mol_type = other DNA
tattactgggcatgacgaaaatgcgactgccagcatcatttacaatggaagacttgtagatagtattagttcatggtcca

SEQ ID NO: 104316 - DNA, 80 bp, synthetic construct
  source 1..80: mol_type = other DNA
gggttttgcttaatgcatcttggttcaactccttccttatacatgcactgaaatgattgtggcaatgctactatttgtta

SEQ ID NO: 104317 - DNA, 80 bp, synthetic construct
  source 1..80: mol_type = other DNA
tgggaggaaccactgggtatgattttgagagggaaggatactctctggttggaatagatcctttccgtctgcttcagaac

SEQ ID NO: 104318 - DNA, 80 bp, synthetic construct
  source 1..80: mol_type = other DNA
atggaacaatatcactgatgactatactactattagtagcaacaaacaatgcagataaaatctgtattggtcatcaatca

SEQ ID NO: 104319 - DNA, 80 bp, synthetic construct
  source 1..80: mol_type = other DNA
ggacaagtggttcttctgttacgagagatgaagaagtgctaacaggcaaccttcaaacattgagactgaaagtgcacgaa

SEQ ID NO: 104320 - DNA, 80 bp, synthetic construct
  source 1..80: mol_type = other DNA
ccctcgaggggaagaaaatagtggaacagattctagaggaagaatctgatgaggcactcaaaatgactattgcttctgtg

SEQ ID NO: 104321 - DNA, 80 bp, synthetic construct
  source 1..80: mol_type = other DNA
aatcaatcataatagagaggaacataacagagatagtacatgtgaatggtactatcatagagaaagaaaatggtcccaaa

SEQ ID NO: 104322 - DNA, 80 bp, synthetic construct
  source 1..80: mol_type = other DNA
aatgctcctgctaccctcaatacccagaaattagatgtgtttgcagagacaattggaaggggtccaatagacccgtgtta

SEQ ID NO: 104323 - DNA, 80 bp, synthetic construct
  source 1..80: mol_type = other DNA
ccaggggagtagaaacgggctctattggaaaagtatgcagaaccttactggcgaagtctgtattcaacagtctatatgca

SEQ ID NO: 104324 - DNA, 80 bp, synthetic construct
  source 1..80: mol_type = other DNA
ctaccttaccgatatgaaccttgaagagatgtcaagagactggttcatgctcatgcccaaacaaaaagcagcaggttccc

SEQ ID NO: 104325 - DNA, 80 bp, synthetic construct
  source 1..80: mol_type = other DNA
tcagacaatgtgactttccccaacatgaatctatcgtacacaaatcctaaaaacaaaccagcattaataatttggggagt

SEQ ID NO: 104326 - DNA, 80 bp, synthetic construct
  source 1..80: mol_type = other DNA
gcatcattctggatcggctactgaacaaactaaactatacggaagtggggacaagttgataacagtaggaagttcaaaat

SEQ ID NO: 104327 - DNA, 80 bp, synthetic construct
  source 1..80: mol_type = other DNA
acctgcagtccttcaccccgatcccgggcccacgaccaaaggtgaatgggcaatcaggaaggattgacttccattggttg

SEQ ID NO: 104328 - DNA, 80 bp, synthetic construct
  source 1..80: mol_type = other DNA
cataccagtggatcatcaggaattgggaaactgtgaaaatccaatggtctcaagatcccacaatgttatacaacaagatg

SEQ ID NO: 104329 - DNA, 80 bp, synthetic construct
  source 1..80: mol_type = other DNA
gataaagagccaatgggtttcacctatagtggaataagaaccaatggaacgtcaaatgcttgcaaaaggctcagttcttc

SEQ ID NO: 104330 - DNA, 80 bp, synthetic construct
  source 1..80: mol_type = other DNA
tgcccaagcaaaaaatgacagaatccctctgtatcaaaatggatcaggctattatggataagaaaatcatgctgaaggca

SEQ ID NO: 104331 - DNA, 80 bp, synthetic construct
  source 1..80: mol_type = other DNA
agccagaggctaaagaagaggcccctaagctagaagatgatgaatttgtcatatcctccaaagacatcaaagaggaagga

SEQ ID NO: 104332 - DNA, 80 bp, synthetic construct
  source 1..80: mol_type = other DNA
atggctatgctggaggcatggaggttcagatcatgctagctgggaacgcgttcactgctggcaaattgatctttgctgct

SEQ ID NO: 104333 - DNA, 80 bp, synthetic construct
  source 1..80: mol_type = other DNA
gtgcccccacattttcccgttgaaaatctgagccctccccaaattacaatgttcccacatgtgattatagatgttagaac

SEQ ID NO: 104334 - DNA, 80 bp, synthetic construct
  source 1..80: mol_type = other DNA
ctttagaacctgtgttacttcctatgcccgacatcaggaattctttctttcacttcatccagagggatgagccaaaaatg

SEQ ID NO: 104335 - DNA, 80 bp, synthetic construct
  source 1..80: mol_type = other DNA
agattggtggcaatgttatacacaccactgaggtccaatggttctggggacgatgtattcacagtctcatgcagggttct

SEQ ID NO: 104336 - DNA, 80 bp, synthetic construct
  source 1..80: mol_type = other DNA
cattttgatcaatggactctccccagctattctggtgctttaactttaaacatgaatttggccccatctgtcgccccagt

SEQ ID NO: 104337 - DNA, 80 bp, synthetic construct
  source 1..80: mol_type = other DNA
aacccagaaactgggcgcaccctctttgaagccaagttgcacaggaatggattcctgactgttgctaggaacagcgctgg

SEQ ID NO: 104338 - DNA, 80 bp, synthetic construct
  source 1..80: mol_type = other DNA
acctgtcgtggcccccacaaatggatatttcagatttgattcctgggtcaaccagttttacactttagcccccatgggaa

SEQ ID NO: 104339 - DNA, 80 bp, synthetic construct
  source 1..80: mol_type = other DNA
caggtctgaccggtgacgttcttagcaacggaatcgggtcactcattaatgctggtgccaatgcgattaaccaaaaagct

SEQ ID NO: 104340 - DNA, 80 bp, synthetic construct
  source 1..80: mol_type = other DNA
gagtttgatttcaataggcagctgcaacaaaattcttttaatcatgataaagagatgctccaggcccaagttcaagcaac

SEQ ID NO: 104341 - DNA, 80 bp, synthetic construct
  source 1..80: mol_type = other DNA
aaagcagctgcaggcagacatgatcgccattaagcagggggtgttggccgctggcggcttctcccccactgatgcagcaa

SEQ ID NO: 104342 - DNA, 80 bp, synthetic construct
  source 1..80: mol_type = other DNA
agtggcacgagatactgggctccaggtgccatgagaacatccagttattcaggcaggtttgtgtcgaccactccatctag

SEQ ID NO: 104343 - DNA, 80 bp, synthetic construct
  source 1..80: mol_type = other DNA
gcaagttgagtttcctcagcgtaagaatgctgcatcctccactggttcttcttatggtgggtcttctaggtctacagttt

SEQ ID NO: 104344 - DNA, 80 bp, synthetic construct
  source 1..80: mol_type = other DNA
ctaccactcttggttcttctatatcttctagttctagagcttcacccctaactcaatctagtttggtttctaattcttct

SEQ ID NO: 104345 - DNA, 80 bp, synthetic construct
  source 1..80: mol_type = other DNA
tcagcaagatcaagaactagtgactgggtgcgtgagcaaaaccggagcctagaaccctttatgcatggggctttgcagac

SEQ ID NO: 104346 - DNA, 80 bp, synthetic construct
  source 1..80: mol_type = other DNA
tacttatgtcactcctccatcaagtaaagcttctagcaatgggacggtctcgaccgttccaaaaggtgttttggactctt

SEQ ID NO: 104347 - DNA, 80 bp, synthetic construct
  source 1..80: mol_type = other DNA
ttttcgcataccttcgaccgaagggagagtcacgagtttagtgaaaagattaattttcctttaaatttttcttttaaaaa

SEQ ID NO: 104348 - DNA, 80 bp, synthetic construct
  source 1..80: mol_type = other DNA
agcaaaagcagggggaaacaaaaacaaccaaaatgaaggcaatactgttggtcttgctacacacatttgcagccgcaaat

SEQ ID NO: 104349 - DNA, 80 bp, synthetic construct
  source 1..80: mol_type = other DNA
tgaaggtggatggacaggaatgatagatggatggtacggttatcaccaccaaaatgaccagggatcggggtatgccgctg

SEQ ID NO: 104350 - DNA, 80 bp, synthetic construct
  source 1..80: mol_type = other DNA
tggagtgaagttggattcgacaagggtttatcagattttggcaatatattcaactgtcgccagttcattggtactattag

SEQ ID NO: 104351 - DNA, 80 bp, synthetic construct
  source 1..80: mol_type = other DNA
atgcaaactagggggaaaagccccattgtacttgggtaaatgtaacatagccggatggcttttgggaaacccagagtgtg

SEQ ID NO: 104352 - DNA, 80 bp, synthetic construct
  source 1..80: mol_type = other DNA
aaccatgatacaggtgtgacagcatcatgccctgatgctggaaaaaacagtttctacagaaacttaatgtggctggtgaa

SEQ ID NO: 104353 - DNA, 80 bp, synthetic construct
  source 1..80: mol_type = other DNA
aaaagatggttcatacccaaggctcaacatatcctatgtcaacgataagaggaaagaagttcttgtgctatggggcattc

SEQ ID NO: 104354 - DNA, 80 bp, synthetic construct
  source 1..80: mol_type = other DNA
accacccacctactggtaatgatcagcagtggctctaccagaatgcaaatgcctctgtttttgtgggaacatcaacatac

SEQ ID NO: 104355 - DNA, 80 bp, synthetic construct
  source 1..80: mol_type = other DNA
cttttgcaatgaatagaggatctggatctggtattatagtttcggatgccccaattcacgattgtaatacgacttgtcag

SEQ ID NO: 104356 - DNA, 80 bp, synthetic construct
  source 1..80: mol_type = other DNA
atacctaaaggtgccttaaacaccagcctcccatttcagaatatacatccagtcacaattggagagtgcccaaagtatgt

SEQ ID NO: 104357 - DNA, 80 bp, synthetic construct
  source 1..80: mol_type = other DNA
atcaaaagtcaaaatgaaatggggaatggagatgagacgttgcctccttcagtcactccagcagatcgagagcatgattg

SEQ ID NO: 104358 - DNA, 80 bp, synthetic construct
  source 1..80: mol_type = other DNA
cgtcaatccgaaagaggcgaagaaacaattgaagaaagtctcccaccgaacttctcctgccttgagaattttagagccta

SEQ ID NO: 104359 - DNA, 80 bp, synthetic construct
  source 1..80: mol_type = other DNA
gtgaatgatgatggcgtctaacgacgctattgcagctactgctgccagtgtttcaagcactggtgacaacagtaacacaa

SEQ ID NO: 104360 - DNA, 80 bp, synthetic construct
  source 1..80: mol_type = other DNA
cccagaagatctggccaaggatctgataccacttatattgggtggaatcgggttggccataggcttcactaaggataaag

SEQ ID NO: 104361 - DNA, 80 bp, synthetic construct
  source 1..80: mol_type = other DNA
acaaacaatccgccaggacctatatggccatactagatgctgaagaggaaaaggcccgaaagttgtctgtgaagcatgct

SEQ ID NO: 104362 - DNA, 80 bp, synthetic construct
  source 1..80: mol_type = other DNA
gggcttctgagccgggaaccgtcgccatcgcccaaccgtgacccccctaaacaacaacgggacagggtgccacggaatgt

SEQ ID NO: 104363 - DNA, 80 bp, synthetic construct
  source 1..80: mol_type = other DNA
gaggatttgacaatcaagggaacacaccatttggcaagggcgtcatgcgccctaccaccataaatagacttttgattcag

SEQ ID NO: 104364 - DNA, 80 bp, synthetic construct
  source 1..80: mol_type = other DNA
gcggttgctctcaccatggaacgccaggatgagttccagatgcaaggaccaacctacgattttgactcagacaggatttc

SEQ ID NO: 104365 - DNA, 80 bp, synthetic construct
  source 1..80: mol_type = other DNA
agctttcactagtctagccaaagccaatggtttaagtctgattggtatggcaagtcttgggaagagactacgcagtgtca

SEQ ID NO: 104366 - DNA, 80 bp, synthetic construct
  source 1..80: mol_type = other DNA
actcagtccatggcctcaaaaatgccctaaccggttacactatcacaccatgtaccataaaatggcaagccaggttttat

SEQ ID NO: 104367 - DNA, 80 bp, synthetic construct
  source 1..80: mol_type = other DNA
ggctgaaacccagcaggcaatgggatgggcagacccacctgttgaccaaaatctgccaacatgggaggagctcagccagt

SEQ ID NO: 104368 - DNA, 80 bp, synthetic construct
  source 1..80: mol_type = other DNA
gacatagaatctgatggtagcgtggtcaagatatgtgagaacacaactgcacaaacccagcgccaacagtccattgatac

SEQ ID NO: 104369 - DNA, 80 bp, synthetic construct
  source 1..80: mol_type = other DNA
cgctgtcctcgcgctcacccgactcagggctgcgagggccgctgcgtatgcatcctgtctgcagagtgctatcacgaccg

SEQ ID NO: 104370 - DNA, 80 bp, synthetic construct
  source 1..80: mol_type = other DNA
tgttgcagatggcaggttcagcccttgttatacatcgagccgtcaagcgcatgttcggcacccataccaatgctgtctcc

SEQ ID NO: 104371 - DNA, 80 bp, synthetic construct
  source 1..80: mol_type = other DNA
ctagagggtcctgacagggaacatcgctgtcgagtgcatcaggctaaggctaatggtcgtggccccattggacatgatga

SEQ ID NO: 104372 - DNA, 80 bp, synthetic construct
  source 1..80: mol_type = other DNA
tgtcatagagaaatatgggttgtgtgaaacagaagatgagtctacccaggagcaggaagccaccatggaactgcccactg

SEQ ID NO: 104373 - DNA, 80 bp, synthetic construct
  source 1..80: mol_type = other DNA
caagccatgaaggcaagaacaaggggaagaccaagaagggccgaggccgaagagccaactacaatgccttctctagacgt

SEQ ID NO: 104374 - DNA, 80 bp, synthetic construct
  source 1..80: mol_type = other DNA
cggcagcttggcttagtcacgggcagtgagataagaaagagaaaacccatagattggaccccccccaaaaatgaatgggc

SEQ ID NO: 104375 - DNA, 80 bp, synthetic construct
  source 1..80: mol_type = other DNA
ctgagaaacagaagatcatggctgagaattcaagatggtttgatgctggtggcctaggtccagctaccctaccaacgaat

SEQ ID NO: 104376 - DNA, 80 bp, synthetic construct
  source 1..80: mol_type = other DNA
agacgatgatagagaagtggattacaatgagaaaataaattttgaagcccctcccaccatgtggagccgagtcacacgat

SEQ ID NO: 104377 - DNA, 80 bp, synthetic construct
  source 1..80: mol_type = other DNA
tcggttctgggtgggggttttgggttagccccacagtgttcatcaccaccacccatgttataccaaccggggccaaagaa

SEQ ID NO: 104378 - DNA, 80 bp, synthetic construct
  source 1..80: mol_type = other DNA
tcggttctgggtggtggttttgggttagccccacagtgttcatcaccaccacccatgttataccaaccggggccaaagaa

SEQ ID NO: 104379 - DNA, 80 bp, synthetic construct
  source 1..80: mol_type = other DNA
ttctttggggaaccattagattccattgccatacatcgtgcaggagagttcacacaattccgcttctcaagaaagatacg

SEQ ID NO: 104380 - DNA, 80 bp, synthetic construct
  source 1..80: mol_type = other DNA
gccagatctgacagggatggttcttgaggaagggtgtcctgaaggagtggtttgctcaatcctgatcaagcgtgactcag

SEQ ID NO: 104381 - DNA, 80 bp, synthetic construct
  source 1..80: mol_type = other DNA
gtgagctgctaccgttggctgtgcgcatgggggctatagcttcaatgaaaatacagggccggttagtccatggtcagtct

SEQ ID NO: 104382 - DNA, 80 bp, synthetic construct
  source 1..80: mol_type = other DNA
ggtatgctcctaactggtgccaatgcaaaaggtatggacctgggtactctcccaggtgattgtggggcgccctatgtcta

SEQ ID NO: 104383 - DNA, 80 bp, synthetic construct
  source 1..80: mol_type = other DNA
caagagaaacaatgattgggtggtctgcggtgtccacgcagcggccaccaagtctggtaacactgtggtctgtgcagtac

SEQ ID NO: 104384 - DNA, 80 bp, synthetic construct
  source 1..80: mol_type = other DNA
aagcaggtgaggtggagaccactctagaaggaggtgataggggacattatgctgggcatgaaatagtcaggaatagcaag

SEQ ID NO: 104385 - DNA, 80 bp, synthetic construct
  source 1..80: mol_type = other DNA
aagcaggtgagggggagaccactctagaaggaggtgataggggacattatgctgggcatgaaatagtcaggaatagcaag

SEQ ID NO: 104386 - DNA, 80 bp, synthetic construct
  source 1..80: mol_type = other DNA
ggtcccgcactctcatccaaaactaagttctggagatcaacaccagagcccctgcccccaggtgtctatgaaccagctta

SEQ ID NO: 104387 - DNA, 80 bp, synthetic construct
  source 1..80: mol_type = other DNA
tctagggggcaaagaccctagagtcaagggtggtccttctttgcaccaggtcctccgggatcaactgaaacctttcgctg

SEQ ID NO: 104388 - DNA, 80 bp, synthetic construct
  source 1..80: mol_type = other DNA
tactgtcgtgtacaagacagtagcgatggtgaccatcaggttaaatggagtgctaaggatggtgtcaatctgggagttga

SEQ ID NO: 104389 - DNA, 80 bp, synthetic construct
  source 1..80: mol_type = other DNA
gatacacccacaccatggtcgtatgcagatgcctgccagtcattagacaagaccaccagttctggacacccctaccacaa

SEQ ID NO: 104390 - DNA, 80 bp, synthetic construct
  source 1..80: mol_type = other DNA
ccccttctgtgatgcaataaaatcccatgtgatcaaattacccatcaaggttggtatgaactcaattgaggatggccctc

SEQ ID NO: 104391 - DNA, 80 bp, synthetic construct
  source 1..80: mol_type = other DNA
caccttgacaaccgttcagggccccccatggaacttgtgcccgcttcctccagctgaccaacgcaatagcggggcagcta

SEQ ID NO: 104392 - DNA, 80 bp, synthetic construct
  source 1..80: mol_type = other DNA
gtcacgggtctggcacccgatgttattcagtcacagtcatatttctccttctatggggacgatgaaatcgtgtccacaga

SEQ ID NO: 104393 - DNA, 80 bp, synthetic construct
  source 1..80: mol_type = other DNA
cattgattttgacccggtccggctcacccaggttctcagggagtatgggctgcgtccaactcgtccagacaaaagtgagg

SEQ ID NO: 104394 - DNA, 80 bp, synthetic construct
  source 1..80: mol_type = other DNA
gccccataattttgaggagaaatgtagatggcttggtgttccttaggcgcaccatctccaaagacgcagctggctaccaa

SEQ ID NO: 104395 - DNA, 80 bp, synthetic construct
  source 1..80: mol_type = other DNA
ggccggttggataggaactccatagaaagacaactgtggtggacccgtggccccaatcatgatgatccaaatgagacact

SEQ ID NO: 104396 - DNA, 80 bp, synthetic construct
  source 1..80: mol_type = other DNA
aagagcccctgattggagacatgattgagttttatgaagggcacatataccattatgccatgtacataggccagggaaaa

SEQ ID NO: 104397 - DNA, 80 bp, synthetic construct
  source 1..80: mol_type = other DNA
gttacctctcgaggacgtgcgtaatgtcctctaccacaacaacagccagccacagccaaccatgcgtctggtggctatgc

SEQ ID NO: 104398 - DNA, 80 bp, synthetic construct
  source 1..80: mol_type = other DNA
tatacaccccgctgcgcacaggcggtgggtctggaggcactgatgcttttgtggttgctgggagagtgctgacatgtcct

SEQ ID NO: 104399 - DNA, 80 bp, synthetic construct
  source 1..80: mol_type = other DNA
gcaccagacttcagttttctattccttgttcctccctctgtagagcaaaagactagggtcttcagtgtgcccaatatacc

SEQ ID NO: 104400 - DNA, 80 bp, synthetic construct
  source 1..80: mol_type = other DNA
actcaaggacctttcaaactctcgggtgccaaccttgatacaaggtatgtttgtttctcctgatgttaatcaatcagtgc

SEQ ID NO: 104401 - DNA, 80 bp, synthetic construct
  source 1..80: mol_type = other DNA
aatttcaaaatgggcggtgccaaattgatggccagttacaaggtactactccagtgtccctcagccaattatgtaagatc

SEQ ID NO: 104402 - DNA, 80 bp, synthetic construct
  source 1..80: mol_type = other DNA
aggggtaggacttccagcaatgccagggtactcaaccttagtgaggttgatggaacaccttttgtgccccttgagtcccc

SEQ ID NO: 104403 - DNA, 80 bp, synthetic construct
  source 1..80: mol_type = other DNA
acctgtaggtttcccagatttaggcgggtgtgattggcacgtcggctttacttttgaggcacgagaccaggacccttccc

SEQ ID NO: 104404 - DNA, 80 bp, synthetic construct
  source 1..80: mol_type = other DNA
acgattggtgtgcactcccctagggctgctttttccatacctaggattaccatacacccaatcgctgcttggtggagggt

SEQ ID NO: 104405 - DNA, 80 bp, synthetic construct
  source 1..80: mol_type = other DNA
gtgatgggtttcatagtggtgatattataggtagtttagattggatttcagctccatcggatggttccacacttgacgtg

SEQ ID NO: 104406 - DNA, 80 bp, synthetic construct
  source 1..80: mol_type = other DNA
ctacaacagaacactttccagcatgatagggaaatgatagggtaccaagtccaagccagcaatgccctgttggccaagaa

SEQ ID NO: 104407 - DNA, 80 bp, synthetic construct
  source 1..80: mol_type = other DNA
ttacacgcatagtggattggaacgggacccgtgtggcagctcccacatcaagcgctaccacactaaaatctggtgggttt

SEQ ID NO: 104408 - DNA, 80 bp, synthetic construct
  source 1..80: mol_type = other DNA
tcagaatttataattaggatttataattagaatttataattagaatttataatttggttaaattggcttttaattggtgt

SEQ ID NO: 104409 - DNA, 80 bp, synthetic construct
  source 1..80: mol_type = other DNA
tgaaggatcgcttcttagcgaaactcaagagtttgggcaacaccaaacccataaaaattgaaaacacacagatggctctt

SEQ ID NO: 104410 - DNA, 80 bp, synthetic construct
  source 1..80: mol_type = other DNA
gtcaatctccgcgaggactggggaccctgtgacgaacatggagaacatcacatcaggattcctaggacccctgctcgtgt

SEQ ID NO: 104411 - DNA, 80 bp, synthetic construct
  source 1..80: mol_type = other DNA
ttctaagtaaacagtacatgaacctttaccccgttgctcggcaacggcctggtctgtgccaagtgtttgctgacgcaacc

SEQ ID NO: 104412 - DNA, 80 bp, synthetic construct
  source 1..80: mol_type = other DNA
ttctgtgtcaacaatacctgaacctttaccccgttgcccggcaacggccaggtctgtgccaagtgtttgctgatgcaacc

SEQ ID NO: 104413 - DNA, 80 bp, synthetic construct
  source 1..80: mol_type = other DNA
agcaaaagcaggagtttaaaatgaatccaaatcagaaaataataaccattgggtccatatcattgggtttggttgtattc

SEQ ID NO: 104414 - DNA, 80 bp, synthetic construct
  source 1..80: mol_type = other DNA
aatcaggggtacggggtaaaaggcttcggatttcggcaggggactgatgtttggatggtgcgaacaattagtcgaacctc

SEQ ID NO: 104415 - DNA, 80 bp, synthetic construct
  source 1..80: mol_type = other DNA
taggtcaggatttgaaatactgagagtaaagaatggttggacacaaacaagcaaagagcaggtgagaaaacagatagttg

SEQ ID NO: 104416 - DNA, 80 bp, synthetic construct
  source 1..80: mol_type = other DNA
ttgataatttgaattggtcaggatacagtggatctttcaccctgccagttgaattgactgggaaagactgcctggttccc

SEQ ID NO: 104417 - DNA, 80 bp, synthetic construct
  source 1..80: mol_type = other DNA
tgtttttgggttgagatgatcaggggcaagccagaagagaagacaatctggacttccagcagctccattgtgatgtgtgg

SEQ ID NO: 104418 - DNA, 80 bp, synthetic construct
  source 1..80: mol_type = other DNA
gtcatggcacgatggagctattcttccctttgacatcgataagatgtagtttacgaaaaaaactccttgtttcgtaaact

SEQ ID NO: 104419 - DNA, 80 bp, synthetic construct
  source 1..80: mol_type = other DNA
aacaatagtgagggaatacaacgagacagtcagaatagagaaggtaactcaatggcacaatactagtgtagtcgaatact

SEQ ID NO: 104420 - DNA, 80 bp, synthetic construct
  source 1..80: mol_type = other DNA
tgccatattggaatgagggcacttacatgaataatacagaagcaatatgtgatgtcaaaggctttgctcctttctccaag

SEQ ID NO: 104421 - DNA, 80 bp, synthetic construct
  source 1..80: mol_type = other DNA
gacaacggaataagaattggttccaggggacatgtctttgttataagggagccctttgtttcttgttcgcccatagagtg

SEQ ID NO: 104422 - DNA, 80 bp, synthetic construct
  source 1..80: mol_type = other DNA
cagaactttctttctcactcaggggtctttgctcaatgacaaacactcgaatgggacggtaaaggatagaagcccattta

SEQ ID NO: 104423 - DNA, 80 bp, synthetic construct
  source 1..80: mol_type = other DNA
ggactctcatgagtgtcgaagtgggccaatcacccaatgtataccaagccagatttgaagctgtggcatggtcagcaacg

SEQ ID NO: 104424 - DNA, 80 bp, synthetic construct
  source 1..80: mol_type = other DNA
gcctgtcacgatggaaaaaagtggatgacagttggtgtaacagggcctgattccaaagcagtagcagtgattcattatgg
